(19) United States
(12) Patent Application Publication
(10) Pub. No.: US 2024/0075067 A1
(43) Pub. Date: Mar. 7, 2024

(54) COMPOSITIONS AND METHODS FOR TREATING HER2 POSITIVE CANCERS

(71) Applicant: A2 Biotherapeutics, Inc., Agoura Hills, CA (US)

(72) Inventors: Yuta ANDO, Agoura Hills, CA (US); Julyun OH, Agoura Hills, CA (US); Han XU, Agoura Hills, CA (US); Carl Alexander Kamb, Agoura Hills, CA (US)

(21) Appl. No.: 18/340,435

(22) Filed: Jun. 23, 2023

Related U.S. Application Data
(63) Continuation of application No. 17/809,409, filed on Jun. 28, 2022, now Pat. No. 11,730,764.
Application No. 17/809,409 is a continuation of application No. PCT/US2022/016582, filed on Feb. 16, 2022.
(60) Provisional application No. 63/149,952, filed on Feb. 16, 2021.

(51) Int. Cl. A61K 35/17; C07K 14/725; C07K 16/28; C07K 16/30

(52) U.S. Cl. CPC A61K 35/17; C07K 14/7051; C07K 16/2809; C07K 16/2833; C07K 16/2863; C07K 16/30; A61K 2039/507

(57) ABSTRACT

The disclosure relates to immune cells comprising a dual receptor system responsive to loss of heterozygosity in a target cell, and methods of making and using same. The first receptor comprises activator receptor specific to a HER2 antigen, and the second receptor comprises an inhibitory receptor specific to an antigen lost in cancer but not wild type cells, that inhibits activation of the immune cells by the first receptor.

### CROSS REFERENCE TO RELATED APPLICATIONS

[0001] This application is a continuation of U.S. patent application Ser. No. 17/809,409 filed on Jun. 28, 2022 and now issued as U.S. Pat. No. 11,730,764 which is a continuation and claims priority to the International Patent Application No. PCT/US2022/016582, filed Feb. 16, 2022 and entitled “Compositions and Methods for Treating HER2 Positive Cancers,” which claims priority to and benefit of U.S. Provisional Patent Application No. 63/149,952 filed on Feb. 16, 2021, the content of which are incorporated herein by reference in their entireties.

### INCORPORATION BY REFERENCE OF SEQUENCE LISTING

[0002] The instant application contains Sequence Listing which has been submitted electronically in xml format and is hereby incorporated by reference in its entirety. Said xml file, created on Sep. 8, 2023, is named “A2B_035_C02US_ST26.xml” and is 27,621.00 bytes in size.

### BACKGROUND

[0003] Cell therapy is a powerful tool for the treatment of various diseases, particularly cancers. In conventional adoptive cell therapies, immune cells are engineered to express specific receptors, for example chimeric antigen receptors (CARs) or T cell receptors (TCRs), which direct the activity of the immune cells to cellular targets via interaction of the receptor with a ligand expressed by the target cell. Identification of suitable target molecules remains challenging, as many targets are expressed in normal tissues. One example of such as target is erb-b2 receptor tyrosine kinase 2 (ERBB2, or HER2), which is expressed on the surface of many solid tumors, as well as normal epithelial cells. This expression can lead to toxicity when the transplanted cells target normal tissues expressing HER2 target molecules. Clinical trials with HER2 CAR have shown serious adverse effects, and the only current antibody treatments that target HER2 are only effect for breast cancers with very high HER2 levels. There is thus a need in the art for compositions and methods useful in the treatment of disease, particularly cancers, by adoptive cell therapy.

### SUMMARY

[0004] The disclosure provides an immune cell responsive to loss of heterozygosity in a cancer cell, comprising: (a) an activator receptor comprising an extracellular ligand binding domain specific to an erb-b2 receptor tyrosine kinase 2 (HER2) antigen; and (b) an inhibitory receptor comprising an extracellular ligand binding domain specific to a non-target antigen that is not expressed by the cancer cell due to a loss of heterozygosity in the cancer cell.

[0005] In some embodiments of the immune cells of the disclosure, the non-target antigen is an HLA class I allele or a minor histocompatibility antigen (MiHA). In some embodiments, the HLA class I allele comprises HLA-A, HLA-B, HLA-C or HLA-E. In some embodiments, the HLA class I allele is HLA-A*02.

[0006] In some embodiments of the immune cells of the disclosure, the target antigen is HER2 or a peptide antigen of HER2 in a complex with a major histocompatibility class I complex (MHC I).

[0007] In some embodiments of the immune cells of the disclosure, the cancer cell expresses HER2. In some embodiments, the cancer cell is a breast cancer cell, bladder cancer cell, ovarian cancer cell, gastric cancer cell, a salivary duct carcinoma cell, a non-small cell lung cancer cell, a pancreatic cancer cell, or a colon cancer cell. In some embodiments, the cancer cell is a breast cancer cell or gastric cancer cell.

[0008] In some embodiments of the immune cells of the disclosure, the HLA-A*02 non-target antigen is expressed by healthy cells of a subject. In some embodiments, healthy cells of the subject express both the target antigen and the HLA-A*02 non-target antigen. In some embodiments, the activator receptor and the inhibitory receptor together specifically activate the immune cell in the presence of the cancer cell.

[0009] In some embodiments of the immune cells of the disclosure, the immune cell is a T cell. In some embodiments, the T cell is a CD8+ CD4− T cell.

[0010] In some embodiments of the immune cells of the disclosure, the HER2 antigen comprises a sequence or subsequence at least 95% identical to a sequence or subsequence of any one of SEQ ID NOs: 2-29.

[0011] In some embodiments of the immune cells of the disclosure, the activator receptor is a T cell receptor (TCR) or a chimeric antigen receptor (CAR). In some embodiments, the extracellular ligand binding domain of the activator receptor comprises an antibody fragment, a single chain Fv antibody fragment (scFv), a β chain variable domain (Vβ), or a TCR α chain variable domain and a TCR β chain variable domain. In some embodiments, the extracellular ligand binding domain of the activator receptor comprises a heavy chain variable (VH) region and a light chain variable (VL) region. In some embodiments, the VH and VL regions comprise complement determining regions (CDRs) selected from the group consisting of SEQ ID NOS: 30-42. In some embodiments, the VH region comprises one or more CDR sequences selected from the group consisting of GFNIKDTYIH (SEQ ID NO: 36), ARIYPTNGYTRYADSVKG (SEQ ID NO: 38), and SRWGGDGFYAMD[Y/V] (SEQ ID NO: 40) or (SEQ ID NO: 41); and the VL region comprises one or more CDR sequences selected from the group consisting of RASQDVNTAVA (SEQ ID NO: 30), SASFLY (SEQ ID NO: 32), and QQHYTTPP (SEQ ID NO: 34). In some embodiments, the VH region comprises one or more CDR sequences selected from the group consisting of NYGMN (SEQ ID NO: 37), WINTSTGESTFADDFKG (SEQ ID NO: 39) and WEVYHGYVPY (SEQ ID NO: 42); and the VL region comprises one or more CDR sequences selected from the group consisting of KASQDVYNAVA (SEQ ID NO: 31), SASSRYT (SEQ ID NO: 33), and QQHFRTPFT (SEQ ID NO: 35). In some embodiments, the VH region comprises CDR sequences of GFNIKDTYIH (SEQ ID NO: 36), ARIYPTNGYTRYADSVKG (SEQ ID NO: 38), and SRWGGDGFYAMD[Y/V] (SEQ ID NO: 40) or (SEQ ID NO: 41); and the VL region comprises CDR sequences of RASQDVNTAVA (SEQ ID NO: 30), SASFLY (SEQ ID NO: 32) and QQHYTTPP (SEQ ID NO: 34). In some embodiments, the VH region comprises CDR sequences of NYGMN (SEQ ID NO: 37), WINTSTGESTFADDFKG (SEQ ID NO: 39) and WEVYHGYVPY (SEQ ID NO: 42); and the VL region comprises CDR sequences of KASQDVYNAVA (SEQ ID NO: 31), SASSRYT (SEQ ID NO: 33), and QQHFRTPFT (SEQ ID NO: 35). In some embodiments, the VH region comprises CDR sequences of DTYIH (SEQ ID NO: 313), RIYPTNGYTRYADSVKG (SEQ ID NO: 314), and WGGDGFYAMDV (SEQ ID NO: 315); and the VL region comprises CDR sequences of RASQDVNTAVA (SEQ ID NO: 30), SASFLYS (SEQ ID NO: 311), QQHYTTPPT (SEQ ID NO: 312), and DTYIH (SEQ ID NO: 313). In some embodiments, the scFv comprises a sequence having at least 85%, at least 90%, at least 95%, at least 97%, at least 99% identity or is identical to a sequence selected from the group consisting of SEQ ID NOS: 51, 53, 55, 57, 59 and 61.

[0012] In some embodiments of the immune cells of the disclosure, the CAR comprises a hinge sequence isolated or derived from CD8, CD28, IgG1, or IgG4, or a synthetic hinge. In some embodiments, the CAR comprises a transmembrane domain isolated or derived from CD8 or CD28. In some embodiments, the CAR comprises an intracellular domain isolated or derived from CD28, 4-1BB or CD3z, or a combination thereof.

[0013] In some embodiments of the immune cells of the disclosure, the inhibitory receptor comprises a TCR or CAR. In some embodiments, the extracellular ligand binding domain of the inhibitory receptor comprises an antibody fragment, a single chain Fv antibody fragment (scFv), a β chain variable domain (Vβ), or a TCR α chain variable domain and a TCR β chain variable domain. In some embodiments, the extracellular ligand binding domain of the inhibitory receptor comprises a heavy chain variable (VH) region and a light chain variable (VL) region. In some embodiments, the VH and VL regions comprise CDRs selected from the group consisting of SEQ ID NOS: 87-102. In some embodiments, the VH region comprises one or more CDRs selected from the group consisting of ASGYTFTSYHIH (SEQ ID NO: 95), WIYPGNVNTEYNEKFKGK (SEQ ID NO: 98) and EEITYAMDY (SEQ ID NO: 101), and the VL region comprises one or more CDRs selected from the group consisting of RSSQSIVHSNGNTYLE (SEQ ID NO: 87), KVSNRFSGVP[D/A]R (SEQ ID NO: 90) OR (SEQ ID NO: 91), and FQGSHVPRT (SEQ ID NO: 92). In some embodiments, the VH region comprises one or more CDRs selected from the group consisting of SGYTFTSYHMH (SEQ ID NO: 97), WIYPGDGSTQYNEKFKG (SEQ ID NO: 100) and EGTYYAMDY (SEQ ID NO: 102); and the VL region comprises one or more CDRs selected from the group consisting of RSSQSIVHSNGNTYLD (SEQ ID NO: 89), KVSNRFSGVP[D/A]R (SEQ ID NO: 90) OR (SEQ ID NO: 91) and MQGSHVPRT (SEQ ID NO: 94). In some embodiments, the scFv comprises a sequence having at least 85%, at least 90%, at least 95%, at least 97%, at least 99% identity or is identical to a sequence selected from the group consisting of SEQ ID NOS: 63-74, 207, 209 and 211. In some embodiments, the VH region comprises CDR sequences of SYHIH (SEQ ID NO: 566), WIYPGNVNTEYNEKFKG (SEQ ID NO: 567), and EEITYAMDY (SEQ ID NO: 101); and the VL region comprises CDR sequences of RSSQSIVHSNGNTYLE (SEQ ID NO: 87), KVSNRFS (SEQ ID NO: 565), and FQGSHVPRT (SEQ ID NO: 92).

[0014] In some embodiments of the immune cells of the disclosure, the inhibitory receptor comprises a LILRB1 intracellular domain or a functional variant thereof. In some embodiments, the inhibitory receptor comprises LILRB1 hinge and transmembrane domains, or functional variants thereof. In some embodiments, the inhibitory receptor comprises a sequence having at least 85%, at least 90%, at least 95%, at least 97%, at least 99% identity or is identical to

(SEQ ID NO: 254)
YGSQSSKPYLLTHPSDPLELVVSGPSGGPSSPTTGPTSTSGPEDQPLTP
TGSDPQSGLGRHLGVVIGILVAVILLLLLLLLLFLILRHRRQGKHWTST
QRKADFQHPAGAVGPEPTDRGLQWRSSPAADAQEENLYAAVKHTQPEDG
VEMDTRSPHDEDPQAVTYAEVKHSRPRREMASPPSPLSGEFLDTKDRQA
EEDRQMDTEAAASEAPQDVTYAQLHSLTLRREATEPPPSQEGPSPAVPS
IYATLAIH.

[0015] The disclosure provides a pharmaceutical composition, comprising a therapeutically effective amount of the immune cells of the disclosure. In some embodiments, the pharmaceutical composition further comprises a pharmaceutically acceptable carrier, diluent or excipient.

[0016] The disclosure provides a pharmaceutical composition comprising the immune cells of the disclosure, for use as a medicament in the treatment of cancer.

[0017] The disclosure provides a polynucleotide system, comprising one or more polynucleotides comprising polynucleotide sequences encoding: (a) an activator receptor comprising an extracellular ligand binding domain specific to an erb-b2 receptor tyrosine kinase 2 (HER2) antigen; and (b) an inhibitory receptor comprising an extracellular ligand binding domain specific to a non-target antigen that is not expressed by the cancer cell due to a loss of heterozygosity in the cancer cell.

[0018] The disclosure provides a vector, comprising the polynucleotide system of the disclosure.

[0019] The disclosure provides a method of treating a HER2+ cancer in a subject identified as having or suspected of having a loss of heterozygosity at an allele encoding a non-target antigen in the HER2+ cancer, comprising administering to the subject the immune cells or pharmaceutical composition of the disclosure.

[0020] The disclosure provides a method of making an immune cell therapy, comprising transforming immune cells with the polynucleotide system or vector of the disclosure.

[0021] The disclosure provides a kit comprising the immune cells or pharmaceutical compositions of the disclosure. In some embodiments, the kit further comprises instructions for use.

[0022] The disclosure also provides a method of selectively killing HER2-positive tumor cells having loss of heterozygosity at an allele encoding a non-target antigen in the HER2-positive cancer, comprising contacting the HER2-positive tumor cells with a composition or an immune cell the tumor cell is in a mixed culture. In some embodiments, the non-target antigen is selected from the group consisting of HLA-A*02, HLA-A*01, HLA-A*03, HLA-A*11, HLA-B*07, and HLA-C*07.

[0023] The disclosure also provides an immune cell comprising (a) an activator receptor comprising an extracellular ligand binding domain specific to an erb-b2 receptor tyrosine kinase 2 (HER2) antigen, wherein the extracellular ligand binding domain of the activator receptor comprises (i) a VH region comprising CDR sequences of DTYIH (SEQ ID NO: 313), RIYPTNGYTRYADSVKG (SEQ ID NO: 314), and WGGDGFYAMDV (SEQ ID NO: 315); and (ii) a VL region comprising CDR sequences of RASQDVNTAVA (SEQ ID NO: 30), SASFLYS (SEQ ID NO: 311), QQHYTTPPT (SEQ ID NO: 312), and DTYIH (SEQ ID NO: 313) region and a light chain variable (VL) region; and (b) an inhibitory receptor comprising an extracellular ligand binding domain specific to a non-target antigen that is not expressed by the cancer cell due to a loss of heterozygosity in the cancer cell, wherein the extracellular ligand binding domain of the inhibitory receptor comprises (i) a heavy chain variable (VH) region comprising CDR sequences of SYHIH (SEQ ID NO: 566), WIYPGNVNTEYNEKFKG (SEQ ID NO: 567), and EEITYAMDY (SEQ ID NO: 101); and (ii) a light chain variable (VL) region comprising of RSSQSIVHSNGNTYLE (SEQ ID NO: 87), KVSNRFS (SEQ ID NO: 565), and FQGSHVPRT (SEQ ID NO: 92).

[0024] The disclosure also provides an immune cell comprising (a) an activator receptor comprising an extracellular ligand binding domain specific to an erb-b2 receptor tyrosine kinase 2 (HER2) antigen, wherein the extracellular ligand binding domain of the activator receptor is an scFv comprising the sequence of SEQ ID NO: 51; and (b) an inhibitory receptor comprising an extracellular ligand binding domain specific to a non-target antigen that is not expressed by the cancer cell due to a loss of heterozygosity in the cancer cell, wherein the extracellular ligand binding domain of the inhibitory receptor is an scFv comprising the sequence of SEQ ID NO: 209.

[0025] The disclosure also provides a method of treating a HER2+ cancer in a subject identified as having or suspected of having loss of heterozygosity at an allele encoding HLA-A*02, comprising administering to the subject an immune cell comprising (a) an activator receptor comprising an extracellular ligand binding domain specific to an erb-b2 receptor tyrosine kinase 2 (HER2) antigen, wherein the extracellular ligand binding domain of the activator receptor comprises (i) a VH region comprising CDR sequences of DTYIH (SEQ ID NO: 313), RIYPTNGYTRYADSVKG (SEQ ID NO: 314), and WGGDGFYAMDV (SEQ ID NO: 315); and (ii) a VL region comprising CDR sequences of RASQDVNTAVA (SEQ ID NO: 30), SASFLYS (SEQ ID NO: 311), QQHYTTPPT (SEQ ID NO: 312), and DTYIH (SEQ ID NO: 313) region and a light chain variable (VL) region; and (b) an inhibitory receptor comprising an extracellular ligand binding domain specific to a non-target antigen that is not expressed by the cancer cell due to a loss of heterozygosity in the cancer cell, wherein the extracellular ligand binding domain of the inhibitory receptor comprises (i) a heavy chain variable (VH) region comprising CDR sequences of SYHIH (SEQ ID NO: 566), WIYPGNVNTEYNEKFKG (SEQ ID NO: 567), and EEITYAMDY (SEQ ID NO: 101); and (ii) a light chain variable (VL) region comprising of RSSQSIVHSNGNTYLE (SEQ ID NO: 87), KVSNRFS (SEQ ID NO: 565), and FQGSHVPRT (SEQ ID NO: 92).

[0026] The disclosure also provides a method of treating a HER2+ cancer in a subject identified as having or suspected of having loss of heterozygosity at an allele encoding HLA-A*02, comprising administering to the subject an immune cell comprising (a) an activator receptor comprising an extracellular ligand binding domain specific to an erb-b2 receptor tyrosine kinase 2 (HER2) antigen, wherein the extracellular ligand binding domain of the activator receptor is an scFv comprising the sequence of SEQ ID NO: 51; and (b) an inhibitory receptor comprising an extracellular ligand binding domain specific to a non-target antigen that is not expressed by the cancer cell due to a loss of heterozygosity in the cancer cell, wherein the extracellular ligand binding domain of the inhibitory receptor is an scFv comprising the sequence of SEQ ID NO: 209.

[0027] The disclosure also provides a method of selectively killing HER2-positive tumor cells having loss of heterozygosity at an allele encoding HLA-A*02, comprising contacting the HER2-positive tumor cells with an immune cell comprising (a) an activator receptor comprising an extracellular ligand binding domain specific to an erb-b2 receptor tyrosine kinase 2 (HER2) antigen, wherein the extracellular ligand binding domain of the activator receptor comprises (i) a VH region comprising CDR sequences of DTYIH (SEQ ID NO: 313), RIYPTNGYTRYADSVKG (SEQ ID NO: 314), and WGGDGFYAMDV (SEQ ID NO: 315); and (ii) a VL region comprising CDR sequences of RASQDVNTAVA (SEQ ID NO: 30), SASFLYS (SEQ ID NO: 311), QQHYTTPPT (SEQ ID NO: 312), and DTYIH (SEQ ID NO: 313) region and a light chain variable (VL) region; and (b) an inhibitory receptor comprising an extracellular ligand binding domain specific to a non-target antigen that is not expressed by the cancer cell due to a loss of heterozygosity in the cancer cell, wherein the extracellular ligand binding domain of the inhibitory receptor comprises (i) a heavy chain variable (VH) region comprising CDR sequences of SYHIH (SEQ ID NO: 566), WIYPGNVNTEYNEKFKG (SEQ ID NO: 567), and EEITYAMDY (SEQ ID NO: 101); and (ii) a light chain variable (VL) region comprising of RSSQSIVHSNGNTYLE (SEQ ID NO: 87), KVSNRFS (SEQ ID NO: 565), and FQGSHVPRT (SEQ ID NO: 92).

[0028] The disclosure also provides a method of selectively killing HER2-positive tumor cells having loss of heterozygosity at an allele encoding HLA-A*02, comprising contacting the HER2-positive tumor cells with an immune cell comprising an immune cell comprising (a) an activator receptor comprising an extracellular ligand binding domain specific to an erb-b2 receptor tyrosine kinase 2 (HER2) antigen, wherein the extracellular ligand binding domain of the activator receptor is an scFv comprising the sequence of SEQ ID NO: 51; and (b) an inhibitory receptor comprising an extracellular ligand binding domain specific to a non-target antigen that is not expressed by the cancer cell due to a loss of heterozygosity in the cancer cell, wherein the extracellular ligand binding domain of the inhibitory receptor is an scFv comprising the sequence of SEQ ID NO: 209.

### BRIEF DESCRIPTION OF THE DRAWINGS

[0029] A better understanding of the features and advantages of the present invention will be obtained by reference to the following detailed description that sets forth illustrative embodiments, in which the principles of the invention are utilized, and the accompanying drawings of which:

[0030] FIG. 1 is a table comparing the activity of different chimeric antigen receptors with that target HER2. FRP5* and 4D5* each have a single amino acid change in the VH domain compared to FRP5 and 4D5, respectively. IgG4 (EQ) has a mutated CH2 region to avoid Fc receptor binding. Linker sequence: GGGSSGGGSG (SEQ ID NO: 1).

[0031] FIG. 2A is a plot showing HER2 activator EC50 in Jurkat cells, as measured by antigen titration on a solid substrate. HER2 CAR2 showed no activity.

[0032] FIG. 2B is a plot showing HER2 activator EC50 in Jurkat cells, as measured by HCT.116 target cell number titration. HER2 CAR2 and HER2 CAR3 showed no activity.

[0033] FIG. 2C as a plot and a table showing HER2 activator EC50 in Jurkat cells, as measured by titration of target HER2 mRNA. HER2 CAR2 (C297) showed no activity with antigen titration on a solid substrate (FIG. 2A) or target cell number titration (FIG. 2B) and was further engineered with different hinges (CT1094, CT1095).

[0034] FIG. 3 is a pair of plots showing that activation of Jurkat cells that co-express an HLA-A*02 specific inhibitory receptor (HLA-A*02 Blocker) with the HER2 (CT292) CAR1 activator is blocked by target cells that express ligands for both the activator and blocker receptors. Target A: activator ligand (HER2); Target B: inhibitor ligand (HLA-A*02); left panel shows HCT.116 target cells; right panel: HeLa target cells.

[0035] FIG. 4 is a plot showing that activation of Jurkat cells that co-express an HLA-A*02 specific inhibitory receptor (HLA-A*02 Blocker) with the HER2 (CT299) CAR1 activator is blocked by HCT.116 target cells that express ligands for both the activator and blocker receptors. Target A: activator ligand (HER2); Target B: inhibitor ligand (HLA-A*02).

[0036] FIG. 5 is a series of fluorescence activated cell sorting (FACS) plots showing expression of the HER2 CAR1 or HER2 CAR4, alone or in combination with the HLA-A*02 Blocker, in Jurkat cells.

[0037] FIG. 6 is a series of FACS plots showing expression of HER2 CAR1 (CT292) in primary T cells, alone and in combination with HLA-A*02 blocker constructs mPA2.1 (C1765), humanized (hu) PA2.1.14 (C2162) and humanized PA2.1.18 (C2163). HER2 CAR1 and PA2.1 HLA-A*02 blockers can be expressed and enriched in primary T cells.

[0038] FIG. 7 is a series of plots and images showing that HER2 CAR1 (CT292) mediated primary T cell killing of HeLa target cells is inhibited when the T cells express an HLA-A*02 inhibitory receptors (as indicated), and the HeLa target cells co-express the HER2 activator ligand and HLA-A*02 blocker target ligand at a 1:40 ratio. Target A: activator ligand (HER2); Target B: inhibitor ligand (HLA-A*02); hu: humanized; SW: selectivity window. Images were taken at 40 hours, and show HeLa cells expression of activator (left image in each panel), or a combination of activator and inhibitor ligands (right panel in each image). Effector and target cells were at a ratio of 1:1.

[0039] FIG. 8 is a series of plots and images showing that HER2 CAR1 (CT292) mediated primary T cell killing of HCT.116 target cells is inhibited when the T cells express an HLA-A*02 inhibitory receptors (as indicated), and the HCT.116 target cells co-express the HER2 activator ligand and HLA-A*02 blocker target ligand at a 1:4 ratio. Target A: activator ligand (HER2); Target B: inhibitor ligand (HLA-A*02); hu: humanized; SW: selectivity window. Images were taken at 40 hours, and show HCT.116 cells expression of activator (left image in each panel), or a combination of activator and inhibitor ligands (right panel in each image). Effector and target cells were at a ratio of 1:1.

[0040] FIG. 9 is a series of plots showing that inhibition of primary T cell activation by the HER2 CAR1 (CT292) by HLA-A*02 inhibitory receptors is reversible. Activation of primary T cells was assayed using HCT.116 target cells. Target AB: HCT.116 cells expressing both activator (HER2) and inhibitor (HLA-A*02) ligands; Target A: HCT.116 cells expressing HER2; RD: round; E:T stands for Effector:Target. Primary T cells that expressed only the HER2 CAR, and not the HLA-A*02 inhibitory receptor were exhausted by Round 3, while Primary T cells that expressed both the HER2 CAR and the HLA-A*02 inhibitory receptor were not.

[0041] FIG. 10 is a diagram showing an experiment assaying the ability of primary T cells expressing the HER2 CAR and HLA-A*02 inhibitory receptor to kill target cells in a mouse xenograft model of a HER2 positive cancer that has lost expression of HLA-A*02.

[0042] FIG. 11 is a pair of plots showing that primary T cells expressing the HER2 CAR and HLA-A*02 inhibitory receptor selectively kill tumor cells, and not normal cells, in a mouse xenograft model of a HER2 positive cancer that has lost expression of HLA-A*02.

[0043] FIG. 12 is a series of FACS plots showing the expression of activator and inhibitor ligands by HeLa, HCT.116 and MS751 target cells. Cell surface antigens were quantified using the Agilent QIFI Kit.

[0044] FIG. 13 is a table summarizing the antigen density, and ratio of activator to blocker antigen, on HeLa, HCT.116 and MS751 target cells. Cell surface antigens were quantified using the Agilent QIFI Kit.

[0045] FIG. 14 is a series of plots showing sensitivity of nine receptor pairs comprising scFvs CT292 (left column), CT299 (middle column), or CT1094 (right column) paired with no modules (CAR only), murine blocker (C1765), humanized blocker 1 (C2162), or humanized blocker 2 (C2163). Activator (top row) and blocker (bottom row).

[0046] FIG. 15 is a series of plots showing killing of HeLa target cells by primary T cells transduced with 6 candidates of activator-blocker pairs at 1:1 E:T ratio. The activator-blocker pairs comprise scFvs of CT292 (left column), CT299 (middle column), or CT1094; right column) with blockers in murine form (C1765; top row) or humanized form (C2162; bottom row).

[0047] FIG. 16 is a pair of plots showing cell killing of tumor (solid circles) or normal (hollow circles) A375 target cells by CT1118 or CT1121 constructs. This analysis was conducted in two HLA-A*02− T cell donors (left vs right).

[0048] FIG. 17 is a pair of plots showing cell killing of HeLa target cells (left panel) or A375 target cells (right panel) by primary T cell transfected with HER2 CAR1 (CT292) and CAR/human blocker (CT2162) at 1:1 E:T ratio.

[0049] FIG. 18 is a pair of plots showing cell killing of HER2+/HLA-A*02− HeLa target cells (left panel) or normal HeLa target cells (right panel) by primary T cells transfected with HER2 CAR1 or CT2162 in three 48-hour rounds of tumor rechallenge on at 1:1 E:T ratio.

[0050] FIG. 19 is a series of plots showing reversibility of the ability of HER2 CAR1 and CT2162 to kill tumor (target A; HER2+/HLA-A*02−) or normal (target AB; HER2+/HLA-A*02+) HeLa cells in 48-hour rounds at 1:1 E:T ratio. Arrows indicate the sequence of exposure: tumor [symbol] normal [symbol] tumor (top panel) vs normal [symbol] top [symbol] normal (bottom panel).

[0051] FIG. 20 is a series of images showing reversibility of the ability of untransduced T cells (UTD), HER2 CAR1 T cells, or CT2162 cells to kill HER2+/HLA-A*02− HeLa cells (“Tumor”) or HER2+/HLA-A*02+ HeLa cells (“Normal”) at 1:1 E:T ratio. Images of the target cells at t=48 hrs are shown for each sequence i.e. left panel: tumor [symbol] normal [symbol] tumor vs right panel: normal [symbol] tumor [symbol] normal. Scale bar=50 μm.

[0052] FIG. 21 is a plot showing selective killing of tumor (target A; solid circles) and normal (target AB; hollow circles) HeLa target cells by HER2 CAR1 and CT2162 cells at a 1:1 ratio over three rounds of 48-hours.

[0053] FIG. 22 is a series of images showing selective killing of tumor but not normal HeLa target cells in a mixed culture after 20 hours of coculture with untransduced (UTD; left), CT292 (middle), or CT118 (right) cells.

[0054] FIG. 23 is a series of images showing selective killing of tumor but not normal HeLa target cells in a rechallenge (i.e. round 2) of mixed culture after 24 hours of coculture with untransduced (UTD; left), CT292 (middle), or CT118 (right) cells.

[0055] FIG. 24 shows a Quant Plot of HER2 and HLA-A2 expression in normal, tumors (assuming LOH of HLA-A2), and cell lines (stars). The EC50 and IC50 of CT1118 are marked by dashed lines. Lighter dashed lines show the range of measured EC50 and IC50s. A375, the cell line used in the in vivo study described in Example 12, has HER2 and HLA-A2 expression similar to the EC50 and IC50 of HER2 CT1118, respectively.

[0056] FIG. 25 shows tumor volume in mice bearing tumor (left panel) and normal (right panel) A375 xenografts after treatment with Untransduced (“UTD”) cells, CT292 cells, and CT1118 cells.

[0057] FIGS. 26A-26C show Jurkat NFAT luciferase (JNL) cell inhibition with CT292 paired with either a HLA-A*03 blocker, a HLA-A*11 blocker, or a HLA-B*07 blocker measured in an mRNA titration assay.

[0058] FIG. 27 shows titrated HLA-A*11:01 or HLA-B*07:02 protein on the surface of HeLa cells upon mRNA transfection. HeLa cells were transfected with 2× serially-diluted mRNA encoding either FLAG-tagged HLA-A*11:01 or FLAG-tagged HLA-B*07:02 with top dose of 2000 ng per 200,000 HeLa cells. The bottom panel contains 0 ng mRNA.

### DETAILED DESCRIPTION

[0059] The present disclosure describes engineered receptors, such as chimeric antigen receptors (CARs) and engineered T cell receptors (TCRs), adoptive cell therapies, and methods of use thereof. The engineered receptors can target the HER2 antigen and activate immune cells genetically altered to express the HER2 targeting receptor. Immune cells expressing the HER2 targeting activator receptors can be used in compositions as part of cell adoptive therapies in the treatment, for example, of cancers that are HER2 positive. The immune cells expressing the HER2 targeting activator receptors are also contemplated to further comprise a second inhibitory receptor. The second inhibitory receptor can prevent or inhibit the activation of an immune cell mediated by the activator receptor. For example, an immune cell expressing an activator receptor targeting HER2 and an inhibitory receptor that specifically binds a separate antigen, e.g. an MHC Class I antigen, will be activated in the presence of a cell expressing HER2, but will not be activated in the presence of a cell expressing both HER2 and the HLA Class I antigen that is the target of the inhibitory receptor. Selective activation and inhibition of the immune cell expressing both an activating and inhibitory receptors is useful for reducing toxicity in adoptive cell therapies. The inventors have found that this strategy can be employed using the HER2-targeting activator receptors and inhibitory receptors described herein. Both activating and inhibitory receptors can be, for example, chimeric antigen receptors (CARs) or T cell receptors (TCRs).

[0060] The term “chimeric antigen receptors” or “CARs” as used herein, may refer to artificial T-cell receptors, chimeric T-cell receptors, or chimeric immunoreceptors, for example, and encompass engineered receptors that graft an artificial specificity onto a particular immune effector cell, such as a helper T cell (CD4+), cytotoxic T cell (CD8+) or NK cell. CARs may be employed to impart the specificity of a monoclonal antibody onto a T cell, thereby allowing a large number of specific T cells to be generated, for example, for use in adoptive cell therapy. In specific embodiments, CARs direct specificity of the cell to a tumor associated antigen such as a HER2 antigen. In some embodiments, CARs comprise an intracellular signaling domain, a transmembrane domain, and an extracellular domain comprising an antigen-binding region. In some embodiments, CARs comprise fusions of single-chain variable fragments (scFvs) or scFabs derived from monoclonal antibodies, fused to a transmembrane domain and intracellular signaling domain(s). The fusion may also comprise a hinge. Either heavy-light (H-L) and light-heavy (L-H) scFvs may be used. The specificity of CAR designs may be derived from ligands of receptors (e.g., peptides). Depending on the type of intracellular domain, a CAR can be an activator receptor or an inhibitory receptor. In some embodiments, for example when the CAR is an activator receptor, the CAR comprises domains for additional co-stimulatory signaling, such as CD3, FcR, CD27, CD28, CD137, DAP10, and/or OX40. In some embodiments, molecules can be co-expressed with the CAR, including co-stimulatory molecules, reporter genes for imaging (e.g., for positron emission tomography), gene products that conditionally ablate the T cells upon addition of a pro-drug, homing receptors, cytokines, and cytokine receptors. As used herein, characteristics attributed to a chimeric antigen receptor may be understood to refer to the receptor itself or to a host cell comprising the receptor.

[0061] As used herein, a “TCR”, sometimes also called a “TCR complex” or “TCR/CD3 complex” refers to a protein complex comprising a TCR alpha chain, a TCR beta chain, and one or more of the invariant CD3 chains (zeta, gamma, delta and epsilon), sometimes referred to as subunits. The TCR alpha and beta chains can be disulfide-linked to function as a heterodimer to bind to peptide-MHC complexes. Once the TCR alpha/beta heterodimer engages peptide-MHC, conformational changes in the TCR complex in the associated invariant CD3 subunits are induced, which leads to their phosphorylation and association with downstream proteins, thereby transducing a primary stimulatory signal. In an exemplary TCR complex, the TCR alpha and TCR beta polypeptides form a heterodimer, CD3 epsilon and CD3 delta form a heterodimer, CD3 epsilon and CD3 gamma for a heterodimer, and two CD3 zeta form a homodimer.

[0062] The term “stimulation” refers to a primary response induced by binding of a stimulatory domain or stimulatory molecule (e.g., a TCR/CD3 complex) with its cognate ligand thereby mediating a signal transduction event, such as, but not limited to, signal transduction via the TCR/CD3 complex. Stimulation can mediate altered expression of certain molecules, and/or reorganization of cytoskeletal structures, and the like.

[0063] The term “stimulatory molecule” or “stimulatory domain” refers to a molecule or portion thereof that, when natively expressed by a T-cell, provides the primary cytoplasmic signaling sequence(s) that regulate activation of the TCR complex in a stimulatory way for at least some aspect of the T-cell signaling pathway. TCR alpha and/or TCR beta chains of wild type TCR complexes do not contain stimulatory domains and require association with CD3 subunits such as CD3 zeta to initiate signaling. In one aspect, the primary stimulatory signal is initiated by, for instance, binding of a TCR/CD3 complex with an a major histocompatibility complex (MHC) bound to peptide, and which leads to mediation of a T-cell response, including, but not limited to, proliferation, activation, differentiation, and the like. One or more stimulatory domains, as described herein, can be fused to the intracellular portion of any one or more subunits of the TCR complex, including TCR alpha, TCR beta, CD3 delta, CD3 gamma and CD3 epsilon.

[0064] As used herein, a “domain capable of providing a stimulatory signal” refers to any domain that, either directly or indirectly, can provide a stimulatory signal that enhances or increases the effectiveness of signaling mediated by the TCR complex to enhance at least some aspect of T-cell signaling. The domain capable of providing a stimulatory signal can provide this signal directly, for example with the domain capable of providing the stimulatory signal is a primary stimulatory domain or co-stimulatory domain. Alternatively, or in addition, the domain capable of providing the stimulatory signal can act indirectly. For example, the domain can be a scaffold that recruits stimulatory proteins to the TCR, or provide an enzymatic activity, such as kinase activity, that acts through downstream targets to provide a stimulatory signal.

[0065] As used herein, a “domain capable of providing an inhibitory signal” refers to any domain that, either directly or indirectly, can provide an inhibitory signal that inhibits or decreases the effectiveness signaling mediated by the TCR complex. The domain capable of providing an inhibitory signal can reduce, or block, totally or partially, at least some aspect of T-cell signaling or function. The domain capable of providing an inhibitory signal can provide this signal directly, for example with the domain capable of providing the inhibitory signal provides a primary inhibitory signal. Alternatively, or in addition, the domain capable of providing the stimulatory signal can act indirectly. For example, the domain can recruit additional inhibitory proteins to the TCR, or can provide an enzymatic activity that acts through downstream targets to provide an inhibitory signal.

[0066] Ranges: throughout this disclosure, various aspects of the invention can be presented in a range format. It should be understood that the description in range format is merely for convenience and brevity and should not be construed as an inflexible limitation on the scope of the invention. Accordingly, the description of a range should be considered to have specifically disclosed all the possible subranges as well as individual numerical values within that range. For example, description of a range such as from 1 to 6 should be considered to have specifically disclosed subranges such as from 1 to 3, from 1 to 4, from 1 to 5, from 2 to 4, from 2 to 6, from 3 to 6 etc., as well as individual numbers within that range, for example, 1, 2, 2.7, 3, 4, 5, 5.3, and 6. As another example, a range such as 95-99% identity, includes something with 95%, 96%, 97%, 98% or 99% identity, and includes subranges such as 96-99%, 96-98%, 96-97%, 97-99%, 97-98% and 98-99% identity. This applies regardless of the breadth of the range.

[0067] In general, “sequence identity” or “sequence homology” refers to an exact nucleotide-to-nucleotide or amino acid-to-amino acid correspondence of two polynucleotides or polypeptide sequences, respectively. Typically, techniques for determining sequence identity include determining the nucleotide sequence of a polynucleotide and/or determining the amino acid sequence encoded thereby and comparing these sequences to a second nucleotide or amino acid sequence. Two or more sequences (polynucleotide or amino acid) can be compared by determining their “percent identity.” The percent identity of two sequences, whether nucleic acid or amino acid sequences, is the number of exact matches between two aligned sequences divided by the length of the shorter sequences and multiplied by 100. Percent identity may also be determined, for example, by comparing sequence information using the advanced BLAST computer program, including version 2.2.9, available from the National Institutes of Health. The BLAST program is based on the alignment method of Karlin and Altschul, Proc. Natl. Acad. Sci. USA 87:2264-2268 (1990) and as discussed in Altschul, et al., J. Mol. Biol. 215:403-410 (1990); Karlin And Altschul, Proc. Natl. Acad. Sci. USA 90:5873-5877 (1993); and Altschul et al., Nucleic Acids Res. 25:3389-3402 (1997). Briefly, the BLAST program defines identity as the number of identical aligned symbols (generally nucleotides or amino acids), divided by the total number of symbols in the shorter of the two sequences. The program may be used to determine percent identity over the entire length of the proteins being compared. Default parameters are provided to optimize searches with short query sequences in, for example, with the blastp program. Ranges of desired degrees of sequence identity are approximately 80% to 100% and integer values therebetween. Typically, the percent identities between a disclosed sequence and a claimed sequence are at least 80%, at least 85%, at least 90%, at least 95%, or at least 98%.

[0068] As used herein, a “subsequence” refers to a length of contiguous amino acids or nucleotides that form a part of a sequence described herein. A subsequence may be identical to a part of a full length sequence when aligned to the full length sequence, or less than 100% identical to the part of the full length sequence to which it aligns (e.g., 90% identical to 50% of the full sequence, or the like).

[0069] The term “exogenous” is used herein to refer to any molecule, including nucleic acids, protein or peptides, small molecular compounds, and the like that originate from outside the organism. In contrast, the term “endogenous” refers to any molecule that originates from inside the organism (i.e., naturally produced by the organism).

[0070] A polynucleotide is “operably linked” to another polynucleotide when it is placed into a functional relationship with the other polynucleotide. For example, a promoter or enhancer is operably linked to a coding sequence if it affects the transcription of the sequence. A peptide is “operably linked” to another peptide when the polynucleotides encoding them are operably linked, preferably they are in the same open reading frame.

[0071] A “promoter” is a sequence of DNA needed to turn a gene on or off. Promoters are located immediately upstream and/or overlapping the transcription start site, and are usually between about one hundred to several hundred base pairs in length.

[0072] All publications and patents mentioned herein are hereby incorporated by reference in their entirety as if each individual publication or patent was specifically and individually indicated to be incorporated by reference. In case of conflict, the present application, including any definitions herein, will control. However, mention of any reference, article, publication, patent, patent publication, and patent application cited herein is not, and should not be taken as an acknowledgment, or any form of suggestion, that they constitute valid prior art or form part of the common general knowledge in any country in the world.

[0073] In the present description, any concentration range, percentage range, ratio range, or integer range is to be understood to include the value of any integer within the recited range and, when appropriate, fractions thereof (such as one tenth and one hundredth of an integer), unless otherwise indicated. The term “about”, when immediately preceding a number or numeral, means that the number or numeral ranges plus or minus 10%.

### Antigens

[0074] The activator receptors disclosed can specifically bind to an erb-b2 receptor tyrosine kinase 2 (HER2) antigen. The HER2 antigen, also known as Neu, ErbB2, and other aliases, is a receptor tyrosine kinase that, upon activation, forms homo- or heterodimers with other ErbB family members to promote intracellular signaling resulting in survival signals and proliferation. HER2 is overexpressed or has differential expression of splice variants and isoforms that contribute to the mechanisms driving various cancers, such as breast, lung, and other cancers.

[0075] In some embodiments, the target antigen is a peptide antigen of HER2 in a complex with a major histocompatibility class I complex (MHC I) or major histocompatibility class II complex (MHC II). In some embodiments, the HER2 peptide bound to MHC I comprises KIFGSLAFL (SEQ ID NO: 309). In some embodiments, the HER2 peptide bound to MHC II comprises GSPYVSRLLGICL (SEQ ID NO: 310). In some embodiments, the HER2 antigen comprises a sequence or subsequence at least 80%, at least 85%, at least 90%, at least 95%, at least 97%, at least 99% or is identical to a sequence or a subsequence of any one of SEQ ID NOs: 2-29. However, all HER2 isoforms, and sequences and subsequences thereof that act as HER2 antigens are envisaged as within the scope of the disclosure. In some embodiments, A HER2 antigen comprises a protein comprising a sequence any one of SEQ ID NOS: 2-29, or a peptide fragment of any one of SEQ ID NOS: 2-29. In some embodiments, the HER2 antigen comprises a peptide fragment of any one of SEQ ID NOS: 2-29 in a complex with a major histocompatibility class I complex (MHC-I).

[0076] Any cancer comprising a cancer cell that expresses a HER2 antigen is a HER2 positive (HER2+) cancer. In some embodiments, the cancer cell is a breast cancer cell, bladder cancer cell, ovarian cancer cell, gastric cancer cell, a salivary duct carcinoma cell, a non-small cell lung cancer cell, a pancreatic cancer cell, or a colon cancer cell. In some embodiments, the cancer cell is a breast cancer cell or gastric cancer cell.

### Engineered Receptors

[0077] The disclosure provides an activator receptor and an inhibitory receptor, comprising an extracellular region, the extracellular region comprising a first ligand binding domain capable of specifically binding a first ligand that activates or promotes activation of the receptor, which promotes activation of effector cells expressing the receptor. The disclosure further provides an inhibitory receptor comprising a second ligand binding domain capable of binding a second ligand, wherein binding of the second ligand by the second ligand binding domain inhibits, reduces, or prevents activation of effector cells even in the presence of the first receptor bound to the first ligand. The first ligand may also be referred to as activator ligand. The second ligand may also be referred to as inhibitor ligand. The activator and inhibitory receptors that bind to these ligands may also be referred to generally herein as engineered receptors. Engineered receptors can refer to either chimeric antigen receptors (CARs) and T cell receptors (TCRs) described in the disclosure. Engineered receptor may also refer to any receptor designed using the binding domains, hinge regions, transmembrane domains, and/or cytoplasmic domains described herein. Engineered receptors are sometimes referred to herein as fusion proteins.

### Activator Ligands

[0078] The disclosure provides a first ligand, an activator, and a first engineered receptor comprising the first ligand binding domain that binds to the first activator ligand. In some embodiments, the first engineered receptor is an activator receptor. In some embodiments, the activator receptor is a T cell receptor (TCR) or a chimeric antigen receptor (CAR). In some embodiments, the first activator ligand is a HER2 antigen. In some embodiments, the HER2 antigen comprises a sequence or subsequence that shares at least 80%, at least 85%, at least 86%, at least 87%, at least 88%, at least 89%, at least 90%, at least 91%, at least 92%, at least 93%, at least 94%, at least 95%, at least 96%, at least 97%, at least 98%, at least 99%, or is identical to a sequence or a subsequence of any one of SEQ ID NOs: 2-29. An Illustrative HER2 sequences is shown in Table 1.

TABLE 1
Illustrative HER2 sequence

| HER2 | |
|---|---|
| Antigen | Sequence |
| HER2 | MELAALCRWGLLLALLPPGAASTQVCTGTDMKLRLPASPETHLDMLRHL |
| Isoform a | YQGCQVVQGNLELTYLPTNASLSFLQDIQEVQGYVLIAHNQVRQVPLQRL |
| | RIVRGTQLFEDNYALAVLDNGDPLNNTTPVTGASPGGLRELQLRSLTEILK |
| | GGVLIQRNPQLCYQDTILWKDIFHKNNQLALTLIDTNRSRACHPCSPMCK |
| | GSRCWGESSEDCQSLTRTVCAGGCARCKGPLPTDCCHEQCAAGCTGPKH |
| | SDCLACLHFNHSGICELHCPALVTYNTDTFESMPNPEGRYTFGASCVTACP |
| | YNYLSTDVGSCTLVCPLHNQEVTAEDGTQRCEKCSKPCARVCYGLGMEH |
| | LREVRAVTSANIQEFAGCKKIFGSLAFLPESFDGDPASNTAPLQPEQLQVFE |
| | TLEEITGYLYISAWPDSLPDLSVFQNLQVIRGRILHNGAYSLTLQGLGISWL |
| | GLRSLRELGSGLALIHHNTHLCFVHTVPWDQLFRNPHQALLHTANRPEDE |
| | CVGEGLACHQLCARGHCWGPGPTQCVNCSQFLRGQECVEECRVLQGLPR |
| | EYVNARHCLPCHPECQPQNGSVTCFGPEADQCVACAHYKDPPFCVARCPS |
| | GVKPDLSYMPIWKFPDEEGACQPCPINCTHSCVDLDDKGCPAEQRASPLT |
| | SIISAVVGILLVVVLGVVFGILIKRRQQKIRKYTMRRLLQETELVEPLTPSG |
| | AMPNQAQMRILKETELRKVKVLGSGAFGTVYKGIWIPDGENVKIPVAIKV |
| | LRENTSPKANKEILDEAVVMAGVGSPYVSRLLGICLTSTVQLVTQLMPYG |
| | CLLDHVRENRGRLGSQDLLNWCMQIAKGMSYLEDVRLVHRDLAARNVL |
| | VKSPNHVKITDFGLARLLDIDETEYHADGGKVPIKWMALESILRRRFTHQS |
| | DVWSYGVTVWELMTFGAKPYDGIPAREIPDLLEKGERLPQPPICTIDVYMI |
| | MVKCWMIDSECRPRFRELVSEFSRMARDPQRFVVIQNEDLGPASPLDSTF |
| | YRSLLEDDDMGDLVDAEEYLVPQQGFFCPDPAPGAGGMVHHRHRSSSTR |
| | SGGGDLTLGLEPSEEEAPRSPLAPSEGAGSDVFDGDLGMGAAKGLQSLPT |
| | HDPSPLQRYSEDPTVPLPSETDGYVAPLTCSPQPEYVNQPDVRPQPPSPRE |
| | GPLPAARPAGATLERPKTLSPGKNGVVKDVFAFGGAVENPEYLTPQGGAA |
| | PQPHPPPAFSPAFDNLYYWDQDPPERGAPPSTFKGTPTAENPEYLGLDVPV |
| | (SEQ ID NO: 2) |

[0079] In some embodiments, the activator antigen is a peptide antigen of HER2 in a complex with a major histocompatibility class I complex (MHC I). In some embodiments, the activator antigen is a peptide antigen of HER2 that is not in a complex with a major histocompatibility class I complex (MHC I).

[0080] As used herein, an “activator” or “activator ligand” refers to a first ligand that binds to a first, activator ligand binding domain (LBD) of an engineered receptor of the disclosure, such as a CAR or TCR, thereby mediating activation of a T cell expressing the activator receptor. The activator ligand is expressed by target cells, for example cancer cells, and may also be expressed more broadly than just the target cells. For example the activator can be expressed on some, or all types of normal, non-target cells such as epithelial cells.

[0081] In some embodiments, the activator ligand is expressed by target cells and is not expressed by non-target cells (i.e. normal cells not targeted by the adoptive cell therapy). In some embodiments, the target cells are cancer cells and the non-target cells are non-cancerous cells.

[0082] In some embodiments, the activator ligand has high cell surface expression on the target cells. This high cell surface expression confers the ability to deliver large activation signals. Methods of measuring cell surface expression will be known to the person of ordinary skill in the art and include, but are not limited to, immunohistochemistry using an appropriate antibody against the activator ligand, followed by microscopy or fluorescence activated cell sorting (FACS).

[0083] The activator ligand is present on all target cells. In some embodiments, the target cells are cancer cells—such as HER2+ cancer cells, e.g., in HER2+ breast cancer.

[0084] In some embodiments, the activator ligand is present on a plurality of target cells. In some embodiments, the target cells are cancer cells. In some embodiments, the activator ligand is present on at least 50%, at least 60%, at least 70%, at least 80%, at least 85%, at least 90%, at least 95%, at least 96%, at least 97%, at least 98%, at least 99%, at least 99.5% or at least 99.9% of target cells. In some embodiments, the activator ligand is present on at least 95% target cells. In some embodiments, the activator ligand is present on at least 99% target cells.

[0085] In some embodiments, the first, activator ligand is expressed by a plurality of target cells and a plurality of non-target cells. In some embodiments, the plurality of non-target cells expresses both the first, activator ligand and the second inhibitor ligand.

[0086] In some embodiments, and the first, activator ligand and second, inhibitor ligand are present on the plurality of non-target target cells at a ratio of about 1:100 to about 100:1 of the first ligand to the second ligand. In some embodiments, and the first, activator ligand and second, inhibitor ligand are present on the plurality of non-target target cells at a ratio of about 1:50 to about 50:1 of the first ligand to the second ligand. In some embodiments, and the first, activator ligand and second, inhibitor ligand are present on the plurality of non-target target cells at a ratio of about 1:40 to about 40:1 of the first ligand to the second ligand. In some embodiments, and the first, activator ligand and second, inhibitor ligand are present on the plurality of non-target target cells at a ratio of about 1:30 to about 30:1 of the first ligand to the second ligand. In some embodiments, and the first, activator ligand and second, inhibitor ligand are present on the plurality of non-target target cells at a ratio of about 1:20 to about 2:1 of the first ligand to the second ligand. In some embodiments, and the first, activator ligand and second, inhibitor ligand are present on the plurality of non-target target cells at a ratio of about 1:10 to about 10:1 of the first ligand to the second ligand. In some embodiments, and the first, activator ligand and second, inhibitor ligand are present on the plurality of non-target target cells at a ratio of about 1:5 to about 5:1 of the first ligand to the second ligand. In some embodiments, and the first, activator ligand and second, inhibitor ligand are present on the plurality of non-target target cells at a ratio of about 1:3 to about 3:1 of the first ligand to the second ligand. In some embodiments, and the first, activator ligand and second, inhibitor ligand are present on the plurality of non-target target cells at a ratio of about 1:2 to about 2:1 of the first ligand to the second ligand. In some embodiments, and the first, activator ligand and second, inhibitor ligand are present on the plurality of non-target target cells at a ratio of about 1:1.

[0087] Extracellular Ligand Binding Domains

[0088] The disclosure provides chimeric antigen receptors (CARs) comprising a polypeptide. In some embodiments, the polypeptide comprises a ligand binding domain, such as an antigen-binding domain. Suitable antigen-binding domains include, but are not limited to antigen-binding domains from antibodies, antibody fragments, scFv, antigen-binding domains derived from T cell receptors, and the like. All forms of antigen-binding domains known in the art are envisaged as within the scope of the disclosure.

[0089] An “extracellular domain”, as used herein, refers to the extracellular portion of a protein. For example, the TCR alpha and beta chains each comprise an extracellular domain, which comprise a constant and a variable region involved in peptide-MHC recognition. The “extracellular domain” can also comprise a fusion domain, for example of fusions between additional domains capable of binding to and targeting a specific antigen and the endogenous extracellular domain of the TCR subunit.

[0090] The term “antibody,” as used herein, refers to a protein, or polypeptide sequences derived from an immunoglobulin molecule, which specifically binds to an antigen. Antibodies can be intact immunoglobulins of polyclonal or monoclonal origin, or fragments thereof and can be derived from natural or from recombinant sources.

[0091] The terms “antibody fragment” or “antibody binding domain” refer to at least one portion of an antibody, or recombinant variants thereof, that contains the antigen-binding domain, i.e., an antigenic determining variable region of an intact antibody, that is sufficient to confer recognition and specific binding of the antibody fragment to a target, such as an antigen and its defined epitope. Examples of antibody fragments include, but are not limited to, Fab, Fab′, F(ab′)2, and Fv fragments, single-chain (sc)Fv (“scFv”) antibody fragments, linear antibodies, single domain antibodies (abbreviated “sdAb”) (either VL or VH), camelid VHH domains, and multi-specific antibodies formed from antibody fragments.

[0092] The term “scFv” refers to a fusion protein comprising at least one antibody fragment comprising a variable region of a light chain and at least one antibody fragment comprising a variable region of a heavy chain, wherein the light and heavy chain variable regions are contiguously linked via a short flexible polypeptide linker, and capable of being expressed as a single polypeptide chain, and wherein the scFv retains the specificity of the intact antibody from which it is derived.

[0093] “Heavy chain variable region” or “VH” (or, in the case of single domain antibodies, e.g., nanobodies, “VHH”) with regard to an antibody refers to the fragment of the heavy chain that contains three CDRs interposed between flanking stretches known as framework regions, these framework regions are generally more highly conserved than the CDRs and form a scaffold to support the CDRs.

[0094] Unless specified, as used herein a scFv may have the VL and VH variable regions in either order, e.g., with respect to the N-terminal and C-terminal ends of the polypeptide, the scFv may comprise VL-linker-VH or may comprise VH-linker-VL.

[0095] The term “antibody light chain,” refers to the smaller of the two types of polypeptide chains present in antibody molecules in their naturally occurring conformations. Kappa (“K”) and lambda (“λ”) light chains refer to the two major antibody light chain isotypes.

[0096] The term “recombinant antibody” refers to an antibody that is generated using recombinant DNA technology, such as, for example, an antibody expressed by a bacteriophage or yeast expression system. The term should also be construed to mean an antibody which has been generated by the synthesis of a DNA molecule encoding the antibody and which DNA molecule expresses an antibody protein, or an amino acid sequence specifying the antibody, wherein the DNA or amino acid sequence has been obtained using recombinant DNA or amino acid sequence technology which is available and well known in the art.

[0097] In some embodiments, for example those embodiments wherein the receptor comprises a first and a second polypeptide, the antigen-binding domain is isolated or derived from a T cell receptor (TCR) extracellular domain or an antibody.

[0098] In some embodiments, the extracellular ligand binding domain of the activator receptor comprises an antibody fragment, a single chain Fv antibody fragment (scFv), a β chain variable domain (Vβ), or a TCR α chain variable domain and a TCR β chain variable domain. In some embodiments, the extracellular ligand binding domain of the activator receptor comprises a heavy chain variable (VH) region and a light chain variable (VL) region. In some embodiments, the VH and VL regions comprise complement determining regions (CDRs) selected from the group of CDRs disclosed in Table 2.

TABLE 2
HER2 antigen binding domain complement determining regions (CDRs)

| CDR-L1 | CDR-L2 | CDR-L3 | CDR-H1 | CDR-H2 | CDR-H3 |
|---|---|---|---|---|---|
| RASQDVNT | SASFLY | QQHYTTP | GFNIKDTYI | ARIYPTNGYT | SRWGGDGF |
| AVA (SEQ | (SEQ ID | P (SEQ ID | H (SEQ ID | RYADSVKG | YAMDY |
| ID NO: 30) | NO: 32) | NO: 34) | NO: 36) | (SEQ ID NO: | (SEQ ID NO: |
| | | | | 38) | 40) |
| RASQDVNT | SASFLY | QQHYTTP | GFNIKDTYI | ARIYPTNGYT | SRWGGDGF |
| AVA (SEQ | (SEQ ID | P (SEQ ID | H (SEQ ID | RYADSVKG | YAMDV |
| ID NO: 30) | NO: 32) | NO: 34) | NO: 36) | (SEQ ID NO: | (SEQ ID NO: |
| | | | | 38) | 41) |
| KASQDVY | SASSRY | QQHFRTP | NYGMN | WINTSTGEST | WEVYHGY |
| NAVA (SEQ | T (SEQ | FT (SEQ | (SEQ ID | FADDFKG | VPY (SEQ ID |
| ID NO: 31) | ID NO: | ID NO: 35) | NO: 37) | (SEQ ID NO: | NO: 42) |
| | 33) | | | 39) | |
| RASQDVNT | SASFLY | QQHYTTP | DTYIH | RIYPTNGYTR | WGGDGFYA |
| AVA (SEQ | S (SEQ | PT (SEQ | (SEQ ID | YADSVKG | MDV (SEQ |
| ID NO: 30) | ID NO: | ID NO: | NO: 313) | (SEQ ID NO: | ID NO: 315) |
| | 311) | 312) | | 314) | |

[0099] In some embodiments, the VH region comprises one or more CDR sequences selected from the group consisting of GFNIKDTYIH (SEQ ID NO: 36), ARIYPTNGYTRYADSVKG (SEQ ID NO: 38), and SRWGGDGFYAMD[Y/V] (SEQ ID NO: 40) or (SEQ ID NO: 41); and the VL region comprises one or more CDR sequences selected from the group consisting of RASQDVNTAVA (SEQ ID NO: 30), SASFLY (SEQ ID NO: 32), and QQHYTTPP (SEQ ID NO: 34).

[0100] In some embodiments, the VH region comprises one or more CDR sequences selected from the group consisting of NYGMN (SEQ ID NO: 37), WINTSTGESTFADDFKG (SEQ ID NO: 39) and WEVYHGYVPY (SEQ ID NO: 42); and the VL region comprises one or more CDR sequences selected from the group consisting of KASQDVYNAVA (SEQ ID NO: 31), SASSRYT (SEQ ID NO: 33), and QQHFRTPFT (SEQ ID NO: 35).

[0101] In some embodiments, the VH region comprises CDR sequences of GFNIKDTYIH (SEQ ID NO: 36), ARIYPTNGYTRYADSVKG (SEQ ID NO: 38), and SRWGGDGFYAMDY (SEQ ID NO: 40) or SRWGGDGFYAMDV (SEQ ID NO: 41); and the VL region comprises CDR sequences of RASQDVNTAVA (SEQ ID NO: 30), SASFLY (SEQ ID NO: 32) and QQHYTTPP (SEQ ID NO: 34).

[0102] In some embodiments, the VH region comprises CDR sequences of NYGMN (SEQ ID NO: 37), WINTSTGESTFADDFKG (SEQ ID NO: 39) and WEVYHGYVPY (SEQ ID NO: 42); and the VL region comprises CDR sequences of KASQDVYNAVA (SEQ ID NO: 31), SASSRYT (SEQ ID NO: 33), and QQHFRTPFT (SEQ ID NO: 35).

[0103] In some embodiments, the VH region comprises CDR sequences DTYIH (SEQ ID NO: 313), RIYPTNGYTRYADSVKG (SEQ ID NO: 314), and WGGDGFYAMDV (SEQ ID NO: 315); and the VL region comprises CDR sequences of RASQDVNTAVA (SEQ ID NO: 30), SASFLYS (SEQ ID NO: 311), and QQHYTTPPT (SEQ ID NO: 312).

[0104] In some embodiments, the full length VH and VL regions comprise the sequences disclosed in Table 3. In some embodiments, the binding domain comprises the full length VH region and VL regions on a single polypeptide. In some embodiments, the polypeptide comprises from N-terminal to C-terminal the full length VH regions and the full length VL region. In some embodiments, the polypeptide comprises from N-terminal to C-terminal the full length VL region and the full length VH region. In some embodiments, the full length VH and VL comprises the sequence selected from Table 3. In some embodiments, the binding domain comprises SEQ ID NO: 43 and SEQ ID NO: 44. In some embodiments, the binding domain comprises SEQ ID NO: 45 and SEQ ID NO: 46. In some embodiments, the binding domain comprises SEQ ID NO: 47 and SEQ ID NO: 48. In some embodiments, the binding domain comprises SEQ ID NO: 45 and SEQ ID NO: 49. In some embodiments, the binding domain comprises SEQ ID NO: 50 and SEQ ID NO: 49.

TABLE 3
VH and VL Domains for HER2 CAR Constructs

| Construct | | |
|---|---|---|
| and | | |
| Orientation | VH Full Length | VL Full Length |
| CT-292 | EVQLVESGGGLVQPGGSLRLSCA | DIQMTQSPSSLSASVGDRVTITCR |
| (VL-VH) | ASGFNIKDTYIHWVRQAPGKGLE | ASQDVNTAVAWYQQKPGKAPK |
| | WVARIYPTNGYTRYADSVKGRF | LLIYSASFLYSGVPSRFSGSRSGT |
| | TISADTSKNTAYLQMNSLRAEDT | DFTLTISSLQPEDFATYYCQQHY |
| | AVYYCSRWGGDGFYAMDVWG | TTPPTFGQGTKVEIKRT (SEQ ID |
| | QGTLVTVSSAAA (SEQ ID NO: | NO: 44) |
| | 43) | |
| CT-297 | QVQLQQSGPELKKPGETVKISCK | DIQLTQSHKFLSTSVGDRVSITCK |
| (VH-VL) | ASGYPFTNYGMNWVKQAPGQG | ASQDVYNAVAWYQQKPGQSPK |
| | LKWMGWINTSTGESTFADDFKG | LLIYSASSRYTGVPSRFTGSGSGP |
| | RFDFSLETSANTAYLQINNLKSE | DFTFTISSVQAEDLAVYFCQQHF |
| | DSATYFCARWEVYHGYVPYWG | RTPFTFGSGTKLEIK (SEQ ID NO: |
| | QGTTVTVSS (SEQ ID NO: 45) | 49) |
| CT-298 | EVQLVESGGGLVQPGGSLRLSCA | DIQMTQSPSSLSASVGDRVTITCR |
| (VL-VH) | ASGFNIKDTYIHWVRQAPGKGLE | ASQDVNTAVAWYQQKPGKAPK |
| | WVARIYPTNGYTRYADSVKGRF | LLIYSASFLYSGVPSRFSGSRSGT |
| | TISADTSKNTAYLQMNSLRAEDT | DFTLTISSLQPEDFATYYCQQHY |
| | AVYYCSRWGGDGFYAMDYWG | TTPPTFGQGTKVEIK (SEQ ID NO: |
| | QGTLVTVSS (SEQ ID NO: 47) | 48) |
| CT-299 | EVQLVESGGGLVQPGGSLRLSCA | DIQMTQSPSSLSASVGDRVTITCR |
| (VL-VH) | ASGFNIKDTYIHWVRQAPGKGLE | ASQDVNTAVAWYQQKPGKAPK |
| | WVARIYPTNGYTRYADSVKGRF | LLIYSASFLYSGVPSRFSGSRSGT |
| | TISADTSKNTAYLQMNSLRAEDT | DFTLTISSLQPEDFATYYCQQHY |
| | AVYYCSRWGGDGFYAMDYWG | TTPPTFGQGTKVEIK (SEQ ID NO: |
| | QGTLVTVSS (SEQ ID NO: 47) | 48) |
| CT-1094 | QVQLQQSGPELKKPGETVKISCK | DIQLTQSHKFLSTSVGDRVSITCK |
| (VH-VL) | ASGYPFTNYGMNWVKQAPGQG | ASQDVYNAVAWYQQKPGQSPK |
| | LKWMGWINTSTGESTFADDFKG | LLIYSASSRYTGVPSRFTGSGSGP |
| | RFDFSLETSANTAYLQINNLKSE | DFTFTISSVQAEDLAVYFCQQHF |
| | DSATYFCARWEVYHGYVPYWG | RTPFTFGSGTKLEIK (SEQ ID NO: |
| | QGTTVTVSS (SEQ ID NO: 45) | 49) |
| CT-1095 | QVQLQQSGPELKKPGETVKISCK | DIQLTQSHKFLSTSVGDRVSITCK |
| VH-VL | ASGYPFTNYGMNWVKQAPGQG | ASQDVYNAVAWYQQKPGQSPK |
| | LKWMGWINTSTGESTFADDFKG | LLIYSASSRYTGVPSRFTGSGSGP |
| | RFDFSLETSANTAYLQINNLKSE | DFTFTISSVQAEDLAVYFCQQHF |
| | DMATYFCARWEVYHGYVPYWG | RTPFTFGSGTKLEIK (SEQ ID NO: |
| | QGTTVTVSS (SEQ ID NO: 50) | 49) |

[0105] In some embodiments, the binding domain is a HER2 scFv domain. In some embodiments, the HER2 scFv domain is selected from a sequence listed in Table 4. In some embodiments, the HER2 scFv domain comprises a polypeptide comprising SEQ ID NO: 51. In some embodiments, the HER2 scFv domain is encoded by a polynucleotide sequence comprising SEQ ID NO: 52. In some embodiments, the HER2 scFv domain comprises a polypeptide comprising SEQ ID NO: 53. In some embodiments, the HER2 scFv domain is encoded by a polynucleotide sequence comprising SEQ ID NO: 54. In some embodiments, the HER2 scFv domain comprises a polypeptide comprising SEQ ID NO: 55. In some embodiments, the HER2 scFv domain is encoded by a polynucleotide sequence comprising SEQ ID NO: 56. In some embodiments, the HER2 scFv domain comprises a polypeptide comprising SEQ ID NO: 57. In some embodiments, the HER2 scFv domain is encoded by a polynucleotide sequence comprising SEQ ID NO: 58. In some embodiments, the HER2 scFv domain comprises a polypeptide comprising SEQ ID NO: 59. In some embodiments, the HER2 scFv domain is encoded by a polynucleotide sequence comprising SEQ ID NO: 60. In some embodiments, the HER2 scFv domain comprises a polypeptide comprising SEQ ID NO: 61. In some embodiments, the HER2 scFv domain is encoded by a polynucleotide sequence comprising SEQ ID NO: 62. In some embodiments, the HER2 scFv domain is encoded by a polynucleotide sequence comprising SEQ ID NO: 21803.

TABLE 4
HER2 ScFv Domains for HER2 CAR Constructs

| HER2 | | |
|---|---|---|
| CAR | Protein Sequence | DNA Sequence |
| CT292 | MDFQVQIFSFLLI | ATGGATTTTCAGGTGCAGATTTTCAGCTTCCTGCT |
| (VL-VH) | SASVIMSRGDIQ | AATCAGTGCCTCAGTCATAATGTCCAGAGGAGAT |
| | MTQSPSSLSASV | ATCCAGATGACCCAGTCCCCGAGCTCCCTGTCCGC |
| | GDRVTITCRASQ | CTCTGTGGGCGATAGGGTCACCATCACCTGCCGTG |
| | DVNTAVAWYQQ | CCAGTCAGGATGTGAATACTGCTGTAGCCTGGTAT |
| | KPGKAPKLLIYS | CAACAGAAACCAGGAAAAGCTCCGAAACTACTGA |
| | ASFLYSGVPSRFS | TTTACTCGGCATCCTTCCTTTATTCTGGAGTCCCTT |
| | GSRSGTDFTLTIS | CTCGCTTCTCTGGATCTAGATCTGGGACGGATTTC |
| | SLQPEDFATYYC | ACTCTGACCATCAGCAGTCTGCAGCCGGAAGACT |
| | QQHYTTPPTFGQ | TCGCAACTTATTACTGTCAGCAACATTATACTACT |
| | GTKVEIKRTGST | CCTCCCACGTTCGGACAGGGTACCAAGGTGGAGA |
| | SGSGKPGSGEGS | TCAAACGCACTGGGTCTACATCTGGATCTGGGAA |
| | EVQLVESGGGLV | GCCGGGTTCTGGTGAGGGTTCTGAGGTTCAGCTG |
| | QPGGSLRLSCAA | GTGGAGTCTGGCGGTGGCCTGGTGCAGCCAGGGG |
| | SGFNIKDTYIHW | GCTCACTCCGTTTGTCCTGTGCAGCTTCTGGCTTC |
| | VRQAPGKGLEW | AACATTAAAGACACCTATATACACTGGGTGCGTC |
| | VARIYPTNGYTR | AGGCCCCGGGTAAGGGCCTGGAATGGGTTGCAAG |
| | YADSVKGRFTIS | GATTTATCCTACGAATGGTTATACTAGATATGCCG |
| | ADTSKNTAYLQ | ATAGCGTCAAGGGCCGTTTCACTATAAGCGCAGA |
| | MNSLRAEDTAV | CACATCCAAAAACACAGCCTACCTGCAGATGAAC |
| | YYCSRWGGDGF | AGCCTGCGTGCTGAGGACACTGCCGTCTATTATTG |
| | YAMDVWGQGTL | TTCTAGATGGGGAGGGGACGGCTTCTATGCTATG |
| | VTVSSAAA (SEQ | GACGTGTGGGGTCAAGGAACCCTGGTCACCGTCT |
| | ID NO: 51) | CCTCGGCGGCCGCA (SEQ ID NO: 52) |
| CT297 | MDMRVPAQLLG | ATGGACATGAGGGTCCCCGCTCAGCTCCTGGGGC |
| (VH-VL) | LLLLWLRGARC | TCCTGCTACTCTGGCTCCGAGGTGCCAGATGTCAG |
| | QVQLQQSGPELK | GTACAACTGCAGCAGTCAGGACCTGAACTGAAGA |
| | KPGETVKISCKA | AGCCTGGAGAGACAGTCAAGATCTCCTGCAAGGC |
| | SGYPFTNYGMN | CTCTGGGTATCCTTTCACAAACTATGGAATGAACT |
| | WVKQAPGQGLK | GGGTGAAGCAGGCTCCAGGACAGGGTTTAAAGTG |
| | WMGWINTSTGE | GATGGGCTGGATTAACACCTCCACTGGAGAGTCA |
| | STFADDFKGRFD | ACATTTGCTGATGACTTCAAGGGACGGTTTGACTT |
| | FSLETSANTAYL | CTCTTTGGAAACCTCTGCCAACACTGCCTATTTGC |
| | QINNLKSEDSAT | AGATCAACAACCTCAAAAGTGAAGACTCGGCTAC |
| | YFCARWEVYHG | ATATTTCTGTGCAAGATGGGAGGTTTACCACGGCT |
| | YVPYWGQGTTV | ACGTTCCTTACTGGGGCCAAGGGACCACGGTCAC |
| | TVSSGGGGSGGG | CGTTTCCTCTGGCGGTGGCGGTTCTGGTGGCGGTG |
| | GSGGGGSDIQLT | GCTCCGGCGGTGGCGGTTCTGACATCCAGCTGAC |
| | QSHKFLSTSVGD | CCAGTCTCACAAATTCCTGTCCACTTCAGTAGGAG |
| | RVSITCKASQDV | ACAGGGTCAGCATCACCTGCAAGGCCAGTCAGGA |
| | YNAVAWYQQKP | TGTGTATAATGCTGTTGCCTGGTATCAACAGAAAC |
| | GQSPKLLIYSASS | CAGGACAATCTCCTAAACTTCTGATTTACTCGGCA |
| | RYTGVPSRFTGS | TCCTCCCGGTACACTGGAGTCCCTTCTCGCTTCAC |
| | GSGPDFTFTISSV | TGGCAGTGGCTCTGGGCCGGATTTCACTTTCACCA |
| | QAEDLAVYFCQ | TCAGCAGTGTGCAGGCTGAAGACCTGGCAGTTTA |
| | QHFRTPFTFGSG | TTTCTGTCAGCAACATTTTCGTACTCCATTCACGTT |
| | TKLEIK (SEQ ID | CGGCTCGGGGACAAAATTGGAGATCAAA (SEQ ID |
| | NO: 53) | NO: 54) |
| CT298 | MLLLVTSLLLCE | ATGCTGCTACTGGTCACCAGTCTACTGCTGTGCGA |
| (VL-VH) | LPHPAFLLIPDIQ | ACTGCCACATCCGGCCTTCCTGCTAATACCGGATA |
| | MTQSPSSLSASV | TCCAGATGACCCAGTCCCCGAGCTCCCTGTCCGCC |
| | GDRVTITCRASQ | TCTGTGGGCGATAGGGTCACCATCACCTGCCGTGC |
| | DVNTAVAWYQQ | CAGTCAGGATGTGAATACTGCTGTAGCCTGGTATC |
| | KPGKAPKLLIYS | AACAGAAACCAGGAAAAGCTCCGAAACTACTGAT |
| | ASFLYSGVPSRFS | TTACTCGGCATCCTTCCTTTATTCTGGAGTCCCTTC |
| | GSRSGTDFTLTIS | TCGCTTCTCTGGATCTAGATCTGGGACGGATTTCA |
| | SLQPEDFATYYC | CTCTGACCATCAGCAGTCTGCAGCCGGAAGACTT |
| | QQHYTTPPTFGQ | CGCAACTTATTACTGTCAGCAACATTATACTACTC |
| | GTKVEIKGSTSG | CTCCCACGTTCGGACAGGGTACCAAGGTGGAGAT |
| | GGSGGGSGGGG | CAAAGGGTCTACATCTGGCGGTGGCTCTGGTGGC |
| | SSEVQLVESGGG | GGTTCCGGCGGTGGCGGTTCTTCCGAGGTTCAGCT |
| | LVQPGGSLRLSC | GGTGGAGTCTGGCGGTGGCCTGGTGCAGCCAGGG |
| | AASGFNIKDTYI | GGCTCACTCCGTTTGTCCTGTGCAGCTTCTGGCTT |
| | HWVRQAPGKGL | CAACATTAAAGACACCTATATACACTGGGTGCGT |
| | EWVARIYPTNGY | CAGGCCCCGGGTAAGGGCCTGGAATGGGTTGCAA |
| | TRYADSVKGRFT | GGATTTATCCTACGAATGGTTATACTAGATATGCC |
| | ISADTSKNTAYL | GATAGCGTCAAGGGCCGTTTCACTATAAGCGCAG |
| | QMNSLRAEDTA | ACACATCCAAAAACACAGCCTACCTGCAGATGAA |
| | VYYCSRWGGDG | CAGCCTGCGTGCTGAGGACACTGCCGTCTATTATT |
| | FYAMDYWGQGT | GTTCTAGATGGGGAGGGGACGGCTTCTATGCTAT |
| | LVTVSS (SEQ ID | GGACTATTGGGGTCAAGGAACCCTGGTCACCGTC |
| | NO: 55) | TCCTCG (SEQ ID NO: 56) |
| CT299 | MLLLVTSLLLCE | ATGCTGCTACTGGTCACCAGTCTACTGCTGTGCGA |
| (VL-VH) | LPHPAFLLIPDIQ | ACTGCCACATCCGGCCTTCCTGCTAATACCGGATA |
| | MTQSPSSLSASV | TCCAGATGACCCAGTCCCCGAGCTCCCTGTCCGCC |
| | GDRVTITCRASQ | TCTGTGGGCGATAGGGTCACCATCACCTGCCGTGC |
| | DVNTAVAWYQQ | CAGTCAGGATGTGAATACTGCTGTAGCCTGGTATC |
| | KPGKAPKLLIYS | AACAGAAACCAGGAAAAGCTCCGAAACTACTGAT |
| | ASFLYSGVPSRFS | TTACTCGGCATCCTTCCTTTATTCTGGAGTCCCTTC |
| | GSRSGTDFTLTIS | TCGCTTCTCTGGATCTAGATCTGGGACGGATTTCA |
| | SLQPEDFATYYC | CTCTGACCATCAGCAGTCTGCAGCCGGAAGACTT |
| | QQHYTTPPTFGQ | CGCAACTTATTACTGTCAGCAACATTATACTACTC |
| | GTKVEIKGSTSG | CTCCCACGTTCGGACAGGGTACCAAGGTGGAGAT |
| | GGSGGGSGGGG | CAAAGGGTCTACATCTGGCGGTGGCTCTGGTGGC |
| | SSEVQLVESGGG | GGTTCCGGCGGTGGCGGTTCTTCCGAGGTTCAGCT |
| | LVQPGGSLRLSC | GGTGGAGTCTGGCGGTGGCCTGGTGCAGCCAGGG |
| | AASGFNIKDTYI | GGCTCACTCCGTTTGTCCTGTGCAGCTTCTGGCTT |
| | HWVRQAPGKGL | CAACATTAAAGACACCTATATACACTGGGTGCGT |
| | EWVARIYPTNGY | CAGGCCCCGGGTAAGGGCCTGGAATGGGTTGCAA |
| | TRYADSVKGRFT | GGATTTATCCTACGAATGGTTATACTAGATATGCC |
| | ISADTSKNTAYL | GATAGCGTCAAGGGCCGTTTCACTATAAGCGCAG |
| | QMNSLRAEDTA | ACACATCCAAAAACACAGCCTACCTGCAGATGAA |
| | VYYCSRWGGDG | CAGCCTGCGTGCTGAGGACACTGCCGTCTATTATT |
| | FYAMDYWGQGT | GTTCTAGATGGGGAGGGGACGGCTTCTATGCTAT |
| | LVTVSS (SEQ ID | GGACTATTGGGGTCAAGGAACCCTGGTCACCGTC |
| | NO: 57) | TCCTCG (SEQ ID NO: 58) |
| CT1094 | MDMRVPAQLLG | ATGGACATGAGGGTCCCCGCTCAGCTCCTGGGGC |
| (VH-VL) | LLLLWLRGARC | TCCTGCTACTCTGGCTCCGAGGTGCCAGATGTCAG |
| | QVQLQQSGPELK | GTACAACTGCAGCAGTCAGGACCTGAACTGAAGA |
| | KPGETVKISCKA | AGCCTGGAGAGACAGTCAAGATCTCCTGCAAGGC |
| | SGYPFTNYGMN | CTCTGGGTATCCTTTCACAAACTATGGAATGAACT |
| | WVKQAPGQGLK | GGGTGAAGCAGGCTCCAGGACAGGGTTTAAAGTG |
| | WMGWINTSTGE | GATGGGCTGGATTAACACCTCCACTGGAGAGTCA |
| | STFADDFKGRFD | ACATTTGCTGATGACTTCAAGGGACGGTTTGACTT |
| | FSLETSANTAYL | CTCTTTGGAAACCTCTGCCAACACTGCCTATTTGC |
| | QINNLKSEDSAT | AGATCAACAACCTCAAAAGTGAAGACTCGGCTAC |
| | YFCARWEVYHG | ATATTTCTGTGCAAGATGGGAGGTTTACCACGGCT |
| | YVPYWGQGTTV | ACGTTCCTTACTGGGGCCAAGGGACCACGGTCAC |
| | TVSSGGGGSGGG | CGTTTCCTCTGGCGGTGGCGGTTCTGGTGGCGGTG |
| | GSGGGGSDIQLT | GCTCCGGCGGTGGCGGTTCTGACATCCAGCTGAC |
| | QSHKFLSTSVGD | CCAGTCTCACAAATTCCTGTCCACTTCAGTAGGAG |
| | RVSITCKASQDV | ACAGGGTCAGCATCACCTGCAAGGCCAGTCAGGA |
| | YNAVAWYQQKP | TGTGTATAATGCTGTTGCCTGGTATCAACAGAAAC |
| | GQSPKLLIYSASS | CAGGACAATCTCCTAAACTTCTGATTTACTCGGCA |
| | RYTGVPSRFTGS | TCCTCCCGGTACACTGGAGTCCCTTCTCGCTTCAC |
| | GSGPDFTFTISSV | TGGCAGTGGCTCTGGGCCGGATTTCACTTTCACCA |
| | QAEDLAVYFCQ | TCAGCAGTGTGCAGGCTGAAGACCTGGCAGTTTA |
| | QHFRTPFTFGSG | TTTCTGTCAGCAACATTTTCGTACTCCATTCACGTT |
| | TKLEIK (SEQ ID | CGGCTCGGGGACAAAATTGGAGATCAAA (SEQ ID |
| | NO: 59) | NO: 60) |
| CT1095 | MDMRVPAQLLG | ATGGACATGAGGGTCCCCGCTCAGCTCCTGGGGC |
| (VH-VL) | LLLLWLRGARC | TCCTGCTACTCTGGCTCCGAGGTGCCAGATGTCAG |
| | QVQLQQSGPELK | GTACAACTGCAGCAGTCAGGACCTGAACTGAAGA |
| | KPGETVKISCKA | AGCCTGGAGAGACAGTCAAGATCTCCTGCAAGGC |
| | SGYPFTNYGMN | CTCTGGGTATCCTTTCACAAACTATGGAATGAACT |
| | WVKQAPGQGLK | GGGTGAAGCAGGCTCCAGGACAGGGTTTAAAGTG |
| | WMGWINTSTGE | GATGGGCTGGATTAACACCTCCACTGGAGAGTCA |
| | STFADDFKGRFD | ACATTTGCTGATGACTTCAAGGGACGGTTTGACTT |
| | FSLETSANTAYL | CTCTTTGGAAACCTCTGCCAACACTGCCTATTTGC |
| | QINNLKSEDMAT | AGATCAACAACCTCAAAAGTGAAGACATGGCTAC |
| | YFCARWEVYHG | ATATTTCTGTGCAAGATGGGAGGTTTACCACGGCT |
| | YVPYWGQGTTV | ACGTTCCTTACTGGGGCCAAGGGACCACGGTCAC |
| | TVSSGGGGSGGG | CGTTTCCTCTGGCGGTGGCGGTTCTGGTGGCGGTG |
| | GSGGGGSDIQLT | GCTCCGGCGGTGGCGGTTCTGACATCCAGCTGAC |
| | QSHKFLSTSVGD | CCAGTCTCACAAATTCCTGTCCACTTCAGTAGGAG |
| | RVSITCKASQDV | ACAGGGTCAGCATCACCTGCAAGGCCAGTCAGGA |
| | YNAVAWYQQKP | TGTGTATAATGCTGTTGCCTGGTATCAACAGAAAC |
| | GQSPKLLIYSASS | CAGGACAATCTCCTAAACTTCTGATTTACTCGGCA |
| | RYTGVPSRFTGS | TCCTCCCGGTACACTGGAGTCCCTTCTCGCTTCAC |
| | GSGPDFTFTISSV | TGGCAGTGGCTCTGGGCCGGATTTCACTTTCACCA |
| | QAEDLAVYFCQ | TCAGCAGTGTGCAGGCTGAAGACCTGGCAGTTTA |
| | QHFRTPFTFGSG | TTTCTGTCAGCAACATTTTCGTACTCCATTCACGTT |
| | TKLEIK (SEQ ID | CGGCTCGGGGACAAAATTGGAGATCAAA (SEQ ID |
| | NO: 61) | NO: 62) |

[0106] In some embodiments, the HER2 scFv domain comprises a sequence of any one of SEQ ID NOS: 51, 53, 55, 57, 59 or 61, or a sequence having at least 90%, at least 95%, at least 97%, at least 99% or is identical thereto.

### Inhibitory Receptors

[0107] The disclosure provides a second ligand, an inhibitor, and a second inhibitory receptor comprising a second ligand binding domain that binds to the inhibitor ligand. In some embodiments, the second, inhibitory ligand is an antigen, and the second inhibitory receptor comprises an antigen binding domain that specifically recognizes the second, inhibitory antigen.

[0108] The disclosure provides a second inhibitory receptor comprising an extracellular region, the extracellular region comprising a second ligand binding domain capable of specifically binding to a second ligand that inhibits activation of effector cells expressing the first and second receptors, wherein the effector cells are activated by binding of the first ligand to the first activator receptor.

[0109] As used herein an “inhibitor” or “inhibitor ligand” refers to a second ligand that binds to a second, ligand binding domain (inhibitor LBD) of an engineered receptor of the disclosure, but inhibits activation of an immune cell expressing the engineered receptor. The inhibitor is not expressed by the target cells. The inhibitor ligand is also expressed in a plurality of normal, non-target cells, including normal, non-target cells that express the activator ligand, thereby protecting these cells from the cytotoxic effects of the adoptive cell therapy. Without wishing to be bound by theory, inhibitor ligands can block activation of the effector cells through a variety of mechanisms. For example, binding of the inhibitor ligand to the inhibitor LBD can block transmission of a signal that occurs upon binding of the activator ligand to the activator LBD that would, in the absence of the inhibitor, lead to activation of the immune cell expressing the engineered receptors described herein.

[0110] Alternatively, or in addition, binding of the inhibitor ligand to the second engineered receptor can cause loss of cell surface expression the first, activator receptor from the surface of the immune cells comprising the two receptor system described herein. Without wishing to be bound by theory, it is thought that immune cell engagement of activator and inhibitor ligands on normal cells causes the inhibitory receptor to cause removal of nearby activator receptor molecules from the immune cell surface. This process locally desensitizes the immune cell, reversibly raising its activation threshold. Immune cells that engage only the activator ligand on a target cell cause local activation signals which are unimpeded by signals from the second, inhibitory receptor. This local activation increases until release of cytotoxic granules leads to target cell selective cell death. However, modulation of surface receptor expression levels may not be the only mechanism by which inhibitory receptors inhibit activation of immune cells by the first activator receptor. Without wishing to be bound by theory, other mechanisms may come into play, including, but not limited to, cross-talk between activator and inhibitory receptor signaling pathways.

[0111] In some embodiments, the second ligand is not expressed by the target cells, and is expressed by the non-target cells. In some embodiments, the target cells are cancer cells and the non-target cells are non-cancerous cells.

[0112] In some embodiments, the second, inhibitor ligand is an antigen and the second ligand binding domain comprises an scFv domain.

[0113] In some embodiments, the second, inhibitor ligand binding domain comprises a Vβ-only ligand binding domain.

[0114] In some embodiments, the second, inhibitor ligand binding domain comprises an antigen binding domain isolated or derived from a T cell receptor (TCR). For example, the second, inhibitor ligand binding domain comprises TCR α and β chain variable domains.

[0115] In some embodiments, the second, inhibitor ligand binding domain is an antigen binding domain. Suitable antigen-binding domains include, but are not limited to antigen-binding domains from antibodies, antibody fragments, scFv, antigen-binding domains derived from T cell receptors, and the like.

[0116] Inhibitor Targets

[0117] The disclosure provides an inhibitory receptor. In some embodiments, the inhibitory receptor comprises an extracellular ligand binding domain specific to a non-target antigen that is not expressed by the cancer cell due to a loss of heterozygosity in the cancer cell. In some embodiments, the non-target antigen is an HLA class I allele or a minor histocompatibility antigen (MiHA). In some embodiments, the HLA Class I allele comprises HLA-A, HLA-B, HLA-C, or HLA-E. In some embodiments, the HLA class I allele is HLA-A*02. In some embodiments, the HLA-A*02 non-target antigen is expressed by healthy cells of a subject.

[0118] In some embodiments, the inhibitory receptor comprises an extracellular antigen binding domain specific to a non-target antigen that is not expressed by the cancer cell due to a loss of heterozygosity in the cancer cell.

[0119] Alternatively, or in addition, expression of activator and inhibitor targets may be correlated, i.e. the two are expressed at similar levels on non-target cells.

[0120] In some embodiments, the second, inhibitor ligand is a peptide ligand. In some embodiments, the second, inhibitor ligand is a peptide antigen complexed with a major histocompatibility (MHC) class I complex (peptide MHC, or pMHC). Inhibitor ligands comprising peptide antigens complexed with pMHC comprising any of HLA-A, HLA-B, HLA-C, or HLA-E are envisaged as within the scope of the disclosure.

[0121] In some embodiment, the inhibitor ligand is encoded by a gene that is absent or polymorphic in many tumors.

[0122] Methods of distinguishing the differential expression of inhibitor ligands between target and non-target cells will be readily apparent to the person or ordinary skill in the art. For example, the presence or absence of inhibitor ligands in non-target and target cells can be assayed by immunohistochemistry with an antibody that binds to the inhibitor ligand, followed by microscopy or FACS, RNA expression profiling of target cells and non-target cells, or DNA sequencing of non-target and target cells to determine if the genomic locus of the inhibitor ligand comprises mutations in either the target or non-target cells.

[0123] Alleles Lost Due to Loss of Heterozygosity (LOH)

[0124] Homozygous deletions in primary tumors are rare and small, and therefore unlikely to yield target B candidates. For example, in an analysis of 2218 primary tumors across 21 human cancer types, the top four candidates were cyclin dependent kinase inhibitor 2A (CDKN2A), RB transcriptional corepressor 1 (RB1), phosphatase and tensin homolog (PTEN) and N3PB2. However, CDKN2A (P16) was deleted in only 5% homozygous deletion across all cancers. Homozygous HLA-A deletions were found in less than 0.2% of cancers (Cheng et al., Nature Comm. 8:1221 (2017)). In contrast, deletion of a single copy of a gene in cancer cells due to loss of hemizygosity occurs far more frequently.

[0125] In some embodiments, the second, inhibitor ligand comprises an allele of a gene that is lost in target cells due to loss of heterozygosity. In some embodiments, the target cells comprises cancer cells. Cancer cells undergo frequent genome rearrangements, including duplication and deletions. These deletions can lead to the deletion of one copy of one or more genes in the cancer cells.

[0126] As used herein, “loss of heterozygosity (LOH)” refers to a genetic change that occurs at high frequency in cancers, whereby one of the two alleles is deleted, leaving a single mono-allelic (hemizygous) locus.

[0127] HLA Class I Alleles

[0128] In some embodiments, the second, inhibitor ligand comprises an HLA class I allele. The major histocompatibility complex (MHC) class I is a protein complex that displays antigens to cells of the immune system, triggering immune response. The Human Leukocyte Antigens (HLAs) corresponding to MHC class I are HLA-A, HLA-B, HLA-C, and HLA-E.

[0129] In some embodiments, the second, inhibitor ligand comprises an HLA class I allele. In some embodiments, the second, inhibitor ligand comprises an allele of HLA class I that is lost in a target cell through LOH. HLA-A is a group of human leukocyte antigens (HLA) of the major histocompatibility complex (MHC) that are encoded by the HLA-A locus. HLA-A is one of three major types of human MHC class I cell surface receptors. The receptor is a heterodimer comprising a heavy α chain and smaller β chain. The α chain is encoded by a variant of HLA-A, while the α chain (β2-microglobulin) is invariant. There are several thousand HLA-A variants, all of which fall within the scope of the instant disclosure.

[0130] In some embodiments, the second, inhibitor ligand comprises an HLA-B allele. The HLA-B gene has many possible variations (alleles). Hundreds of versions (alleles) of the HLA-B gene are known, each of which is given a particular number (such as HLA-B27).

[0131] In some embodiments, the second, inhibitor ligand comprises an HLA-C allele. HLA-C belongs to the HLA class I heavy chain paralogues. This class I molecule is a heterodimer consisting of a heavy chain and a light chain (beta-2 microglobulin). Over one hundred HLA-C alleles have been described.

[0132] In some embodiments, the HLA class I allele has broad or ubiquitous RNA expression.

[0133] In some embodiments, the HLA class I allele has a known, or generally high minor allele frequency.

[0134] In some embodiments, the HLA class I allele does not require a peptide-MHC antigen, for example when the HLA class I allele is recognized by a pan-HLA ligand binding domain.

[0135] In some embodiments, the second inhibitor ligand comprises an HLA-A allele. In some embodiments the HLA-A allele comprises HLA-A*02. Various single variable domains known in the art or disclosed herein that bind to and recognize HLA-A*02 are suitable for use in embodiments. Such scFvs include, for example and without limitation, the following mouse and humanized scFv antibodies that bind HLA-A*02 in a peptide-independent way shown in Table 5 and Table 6 below (complementarity determining regions underlined):

TABLE 5
HLA-A*02 ScFv Sequences and Inhibitory receptor Constructs

| Construct | Protein Sequence | DNA Sequence |
|---|---|---|
| C-1765 | MDMRVPAQLLGL | ATGGACATGAGGGTCCCCGCTCAGCTCCTGGGGCTC |
| (PA2.1, | LLLWLRGARCDV | CTGCTACTCTGGCTCCGAGGTGCCAGATGTGATGTT |
| VL-VH) | LMTQTPLSLPVSL | TTGATGACCCAAACTCCACTCTCCCTGCCTGTCAGT |
| | GDQASISCRSSQSI | CTTGGAGATCAAGCCTCCATCTCTTGCAGATCTAGT |
| | VHSNGNTYLEWY | CAGAGCATTGTACATAGTAATGGAAACACCTATTTA |
| | LQKPGQSPKLLIY | GAATGGTACCTGCAGAAACCAGGCCAGTCTCCAAA |
| | KVSNRFSGVPDRF | GCTCCTGATCTACAAAGTTTCCAACCGATTTTCTGG |
| | SGSGSGTDFTLKI | GGTCCCAGACAGGTTCAGTGGCAGTGGATCAGGGA |
| | SRVEAEDLGVYY | CAGATTTCACACTCAAGATCAGTAGAGTGGAGGCT |
| | CFQGSHVPRTSGG | GAGGATCTGGGAGTTTATTACTGCTTTCAAGGTTCA |
| | GTKLEIKGGGGSG | CATGTTCCTCGGACGTCCGGTGGAGGCACCAAGCTG |
| | GGGSGGGGSGGQ | GAAATCAAAGGCGGAGGTGGAAGCGGAGGGGGAG |
| | VQLQQSGPELVK | GATCTGGCGGCGGAGGAAGCGGAGGCCAGGTCCAG |
| | PGASVRISCKASG | CTGCAGCAGTCTGGACCTGAGCTGGTGAAGCCTGG |
| | YTFTSYHIHWVK | GGCTTCAGTGAGGATATCCTGCAAGGCTTCTGGCTA |
| | QRPGQGLEWIGW | CACCTTCACAAGTTACCATATACATTGGGTGAAGCA |
| | IYPGNVNTEYNEK | GAGGCCTGGACAGGGACTTGAGTGGATTGGATGGA |
| | FKGKATLTADKS | TTTATCCTGGAAATGTTAATACTGAGTACAATGAGA |
| | SSTAYMHLSSLTS | AGTTCAAGGGCAAGGCCACACTGACTGCAGACAAA |
| | EDSAVYFCAREEI | TCGTCCAGCACAGCCTACATGCACCTCAGCAGCCTG |
| | TYAMDYWGQGT | ACCTCTGAGGACTCTGCGGTCTATTTCTGTGCCAGA |
| | SVTVSS (SEQ ID | GAGGAGATTACCTATGCTATGGACTACTGGGGTCA |
| | NO: 207) | AGGAACCTCAGTCACCGTGTCCTCA (SEQ ID NO: 208) |
| C-2162 | MDMRVPAQLLGL | ATGGACATGAGGGTCCCCGCTCAGCTCCTGGGGCTC |
| (huPA2.1, | LLLWLRGARCQV | CTGCTACTCTGGCTCCGAGGTGCCAGATGTCAGGTG |
| VH-VL) | QLVQSGAEVKKP | CAGCTGGTGCAGTCTGGGGCTGAGGTGAAGAAGCC |
| | GSSVKVSCKASG | TGGGTCCTCAGTGAAGGTTTCCTGCAAGGCTTCTGG |
| | YTFTSYHIHWVR | ATACACCTTCACTAGCTATCATATACATTGGGTGCG |
| | QAPGQGLEWIGW | CCAGGCCCCCGGACAAGGGCTTGAGTGGATCGGAT |
| | IYPGNVNTEYNEK | GGATCTACCCTGGCAATGTTAACACAGAATATAATG |
| | FKGKATITADEST | AGAAGTTCAAGGGCAAAGCCACCATTACCGCGGAC |
| | NTAYMELSSLRSE | GAATCCACGAACACAGCCTACATGGAGCTGAGCAG |
| | DTAVYYCAREEIT | CCTGAGATCTGAAGACACGGCTGTGTATTACTGTGC |
| | YAMDYWGQGTL | GAGGGAGGAAATTACCTACGCTATGGACTACTGGG |
| | VTVSSGGGGSGG | GCCAGGGAACCCTGGTCACCGTGTCCTCAGGCGGA |
| | GGSGGGGSGGDI | GGTGGAAGCGGAGGGGGAGGATCTGGCGGCGGAG |
| | QMTQSPSTLSASV | GAAGCGGAGGCGACATTCAAATGACCCAGAGCCCA |
| | GDRVTITCRSSQSI | TCCACCCTGAGCGCATCTGTAGGTGACCGGGTCACC |
| | VHSNGNTYLEWY | ATCACTTGTAGATCCAGTCAGAGTATTGTACACAGT |
| | QQKPGKAPKLLIY | AATGGGAACACCTATTTGGAATGGTATCAGCAGAA |
| | KVSNRFSGVPARF | ACCAGGTAAAGCCCCAAAATTGCTCATCTACAAAG |
| | SGSGSGTEFTLTIS | TCTCTAACAGATTTAGTGGTGTACCAGCCAGGTTCA |
| | SLQPDDFATYYCF | GCGGTTCCGGAAGTGGTACTGAATTCACCCTCACGA |
| | QGSHVPRTFGQG | TCTCCTCTCTCCAGCCAGATGATTTCGCCACTTATTA |
| | TKVEVK (SEQ ID | CTGTTTTCAAGGTTCACATGTGCCGCGCACATTCGG |
| | NO: 209) | TCAGGGTACTAAAGTAGAAGTCAAA (SEQ ID NO: |
| | | 210) |
| C-2163 | MDMRVPAQLLGL | ATGGACATGAGGGTCCCCGCTCAGCTCCTGGGGCTC |
| (huPA2.1, | LLLWLRGARCQV | CTGCTACTCTGGCTCCGAGGTGCCAGATGTCAGGTG |
| VH-VL) | QLVQSGAEVKKP | CAGCTGGTGCAGTCTGGGGCTGAGGTGAAGAAGCC |
| | GSSVKVSCKASG | TGGGTCCTCAGTGAAGGTTTCCTGCAAGGCTTCTGG |
| | YTFTSYHMHWVR | ATACACCTTCACTAGCTATCATATGCATTGGGTGCG |
| | QAPGQGLEWIGYI | CCAGGCCCCCGGACAAGGGCTTGAGTGGATCGGAT |
| | YPGNVNTEYNEK | ACATCTACCCTGGCAATGTTAACACAGAATATAATG |
| | FKGKATLTADKS | AGAAGTTCAAGGGCAAAGCCACCCTTACCGCGGAC |
| | TNTAYMELSSLRS | AAATCCACGAACACAGCCTACATGGAGCTGAGCAG |
| | EDTAVYFCAREEI | CCTGAGATCTGAAGACACGGCTGTGTATTTCTGTGC |
| | TYAMDYWGQGT | GAGGGAGGAAATTACCTACGCTATGGACTACTGGG |
| | LVTVSSGGGGSG | GCCAGGGAACCCTGGTCACCGTGTCCTCAGGCGGA |
| | GGGSGGGGSGGD | GGTGGAAGCGGAGGGGGAGGATCTGGCGGCGGAG |
| | VQMTQSPSTLSAS | GAAGCGGAGGCGACGTTCAAATGACCCAGAGCCCA |
| | VGDRVTITCSSSQ | TCCACCCTGAGCGCATCTGTAGGTGACCGGGTCACC |
| | SIVHSNGNTYME | ATCACTTGTAGCTCCAGTCAGAGTATTGTACACAGT |
| | WYQQKPGKAPKL | AATGGGAACACCTATATGGAATGGTATCAGCAGAA |
| | LIYKVSNRFSGVP | ACCAGGTAAAGCCCCAAAATTGCTCATCTACAAAG |
| | DRFSGSGSGTEFT | TCTCTAACAGATTTAGTGGTGTACCAGACAGGTTCA |
| | LTISSLQPDDFAT | GCGGTTCCGGAAGTGGTACTGAATTCACCCTCACGA |
| | YYCHQGSHVPRT | TCTCCTCTCTCCAGCCAGATGATTTCGCCACTTATTA |
| | FGQGTKVEVK | CTGTCATCAAGGTTCACATGTGCCGCGCACATTCGG |
| | (SEQ ID NO: 211) | TCAGGGTACTAAAGTAGAAGTCAAA (SEQ ID NO: |
| | | 212) |

[0136] In some embodiments, the second antigen binding domain comprises an scFv domain that binds to HLA-A*02 antigen. In some embodiments, the scFv domain comprises a sequence of SEQ ID NO: 207, 209 or 211, or sequences having at least 90%, at least 95%, at least 97%, at least 99% or is identical thereto. In some embodiments, the scFv domain comprises a sequence of SEQ ID NO: 207, 209 or 211.

TABLE 6
Additional HLA-A*02 scFv binding domains
HLA-A*02 antigen binding domains derived from PA2.1 mAb

| | |
|---|---|
| C-001765 PA2.1 scFv (mouse): | C-001765 PA2.1 |
| DVLMTQTPLSLPVSLGDQASISCRSSQSIVHSNGNTYLEWYLQKPG | scFv (mouse) |
| QSPKWYKVSNRFSGVPDRFSGSGSGTDFTLKISRVEAEDLGVYYC | DNA Sequence: |
| FQGSHVPRTSGGGTKLEIKGGGGSGGGGSGGGGSGGQVQLQQSGP | SEQ ID NO: 75 |
| ELVKPGASVRISCKASGYTFTSYHIHWVKQRPGQGLEWIGWIYPGN | |
| VNTEYNEKFKGKATLTADKSSSTAYMHLSSLTSEDSAVYFCAREEI | |
| TYAMDYWGQGTSVTVSS (SEQ ID NO: 63) | |
| C-002159 PA2.1.8 scFv (humanized): | C-002159 PA2.1.8 |
| QVQLVQSGAEVKKPGSSVKVSCKASGYTFTSYHIHWVRQAPGQGL | scFv (humanized) |
| EWMGWIYPGNVNTEYNEKFKGKATITADKSTSTAYMELSSLRSED | DNA Sequence: |
| TAVYYCAREEITYAMDYWGQGTTVTVSSGGGGSGGGGSGGGGSG | SEQ ID NO: 76 |
| GEIVLTQSPGTLSLSPGERATLSCRSSQSIVHSNGNTYLEWYQQKPG | |
| QAPRLLIYKVSNRFSGIPDRFSGSGSGTDFTLTISRLEPEDFAVYYCF | |
| QGSHVPRTFGGGTKVEIK (SEQ ID NO: 64) | |
| C-002160 PA2.1.9 scFv (humanized): | C-002160 PA2.1.9 |
| QVQLVQSGAEVKKPGSSVKVSCKASGYTFTSYHIHWVRQAPGQGL | scFv (humanized) |
| EWMGWIYPGNVNTEYNEKFKGKATITADKSTSTAYMELSSLRSED | DNA Sequence: |
| TAVYYCAREEITYAMDYWGQGTTVTVSSGGGGSGGGGSGGGGSG | SEQ ID NO: 77 |
| GDIVMTQTPLSLPVTPGEPASISCRSSQSIVHSNGNTYLEWYLQKPG | |
| QSPQLLIYKVSNRFSGVPDRFSGSGSGTDFTLKISRVEAEDVGVYYC | |
| FQGSHVPRTFGGGTKVEIK | |
| (SEQ ID NO: 65) | |
| C-002161 PA2.1.10 scFv (humanized): | C-002161 |
| EVQLVESGGGLVKPGGSLRLSCAASGYTFTSYHIHWVRQAPGKGL | PA2. 1.10 scFv |
| EWVGWIYPGNVNTEYNEKFKGRFTISRDDSKNTLYLQMNSLKTED | (humanized) DNA |
| TAVYYCAREEITYAMDYWGQGTTVTVSSGGGGSGGGGSGGGGSG | Sequence: SEQ ID |
| GDIQMTQSPSSLSASVGDRVTITCRSSQSIVHSNGNTYLEWYQQKP | NO: 78 |
| GKAPKLLIYKVSNRFSGVPSRFSGSGSGTDFTLTISSLQPEDFATYY | |
| CFQGSHVPRTFGGGTKVEIK | |
| (SEQ ID NO: 66) | |
| C-002162 PA2.1.14 scFv (humanized): | C-002162 |
| QVQLVQSGAEVKKPGSSVKVSCKASGYTFTSYHIHWVRQAPGQGL | PA2.1.14 scFv |
| EWIGWIYPGNVNTEYNEKFKGKATITADESTNTAYMELSSLRSEDT | (humanized) DNA |
| AVYYCAREEITYAMDYWGQGTLVTVSSGGGGSGGGGSGGGGSGG | Sequence: SEQ ID |
| DIQMTQSPSTLSASVGDRVTITCRSSQSIVHSNGNTYLEWYQQKPG | NO: 79 |
| KAPKLLIYKVSNRFSGVPARFSGSGSGTEFTLTISSLQPDDFATYYC | |
| FQGSHVPRTFGQGTKVEVK (SEQ ID NO: 67) | |
| C-002163 PA2.1.18 scFv (humanized): | C-002163 |
| QVQLVQSGAEVKKPGSSVKVSCKASGYTFTSYHMHWVRQAPGQG | PA2.1.18 scFv |
| LEWIGYIYPGNVNTEYNEKFKGKATLTADKSTNTAYMELSSLRSE | (humanized) DNA |
| DTAVYFCAREEITYAMDYWGQGTLVTVSSGGGGSGGGGSGGGGS | Sequence: SEQ ID |
| GGDVQMTQSPSTLSASVGDRVTITCSSSQSIVHSNGNTYMEWYQQ | NO: 80 |
| KPGKAPKLLIYKVSNRFSGVPDRFSGSGSGTEFTLTISSLQPDDFAT | |
| YYCHQGSHVPRTFGQGTKVEVK (SEQ ID NO: 68) | |

HLA-A*02 antigen binding domains derived from BB7.2 mAb

| | |
|---|---|
| C-002164 BB7.2 scFv (mouse): | C-002164 BB7.2 |
| QVQLQQSGPELVKPGASVKMSCKASGYTFTSYHIQWVKQRPGQG | scFv (mouse) |
| LEWIGWIYPGDGSTQYNEKFKGKTTLTADKSSSTAYMLLSSLTSED | DNA Sequence: |
| SAIYFCAREGTYYAMDYWGQGTSVTVSSGGGGSGGGGSGGGGSG | SEQ ID NO: 81 |
| GDVLMTQTPLSLPVSLGDQVSISCRSSQSIVHSNGNTYLEWYLQKP | |
| GQSPKLLIYKVSNRFSGVPDRFSGSGSGTDFTLKISRVEAEDLGVYY | |
| CFQGSHVPRTFGGGTKLEIK (SEQ ID NO: 69) | |
| C-002165 BB7.2.1 scFv (humanized): | C-002165 BB7.2.1 |
| QLQLQESGPGLVKPSETLSLTCTVSGYTFTSYHIQWIRQPPGKGLE | scFv (humanized) |
| WIGWIYPGDGSTQYNEKFKGRATISVDTSKNQFSLNLDSVSAADTA | DNA Sequence: |
| IYYCAREGTYYAMDYWGKGSTVTVSSGGGGSGGGGSGGGGSGG | SEQ ID NO: 82 |
| DIQMTQSPSSLSASVGDRVTITCRSSQSIVHSNGNTYLEWYQQKPG | |
| KAPKLLIYKVSNRFSGVPSRFSGSGSGTDFTFTISSLQPEDIATYYCF | |
| QGSHVPRTFGPGTKVDIK (SEQ ID NO: 70) | |
| C-002166 BB7.2.2 scFv (humanized): | C-002166 BB7.2.2 |
| EVQLVQSGAELKKPGSSVKVSCKASGYTFTSYHIQWVKQAPGQGL | scFv (humanized) |
| EWIGWIYPGDGSTQYNEKFKGKATLTVDKSTNTAYMELSSLRSED | DNA Sequence: |
| TAVYYCAREGTYYAMDYWGQGTLVTVSSGGGGSGGGGSGGGGS | SEQ ID NO: 83 |
| GGDIQMTQSPSTLSASVGDRVTITCRSSQSIVHSNGNTYLEWYQQK | |
| PGKAPKLLIYKVSNRFSGVPSRFSGSGSGTDFTLTISSLQPDDFATY | |
| YCFQGSHVPRTFGQGTKVEVK (SEQ ID NO: 71) | |
| C-002167 BB7.2.3 scFv (humanized): | C-002167 BB7.2.3 |
| QVQLVQSGAEVKKPGSSVKVSCKASGYTFTSYHIQWVRQAPGQGL | scFv (humanized) |
| EWMGWIYPGDGSTQYNEKFKGRVTITADKSTSTAYMELSSLRSED | DNA Sequence: |
| TAVYYCAREGTYYAMDYWGQGTTVTVSSGGGGSGGGGSGGGGS | SEQ ID NO: 84 |
| GGEIVLTQSPGTLSLSPGERATLSCRSSQSIVHSNGNTYLEWYQQKP | |
| GQAPRLLIYKVSNRFSGIPDRFSGSGSGTDFTLTISRLEPEDFAVYYC | |
| FQGSHVPRTFGGGTKVEIK (SEQ ID NO: 72) | |
| C-002168 BB7.2.5 scFv (humanized): | C-002168 BB7.2.5 |
| QVTLKQSGAEVKKPGSSVKVSCTASGYTFTSYHVSWVRQAPGQGL | scFv (humanized) |
| EWLGRIYPGDGSTQYNEKFKGKVTITADKSMDTSFMELTSLTSEDT | DNA Sequence: |
| AVYYCAREGTYYAMDLWGQGTLVTVSSGGGGSGGGGSGGGGSG | SEQ ID NO: 85 |
| GEIVLTQSPGTLSLSPGERATLSCRSSQSIVHSNGNTYLAWYQQKPG | |
| QAPRLLISKVSNRFSGVPDRFSGSGSGTDFTLTISRLEPEDFAVYYC | |
| QQGSHVPRTFGGGTKVEIK (SEQ ID NO: 73) | |
| C-002169 BB7.2.6 scFv (humanized): | C-002169 BB7.2.6 |
| QVQLVQSGAEVKKPGASVKVSCKASGYTFTSYHMHWVRQAPGQ | scFv (humanized) |
| RLEWMGWIYPGDGSTQYNEKFKGKVTITRDTSASTAYMELSSLRS | DNA Sequence: |
| EDTAVYYCAREGTYYAMDYWGQGTLVTVSSGGGGSGGGGSGGG | SEQ ID NO: 86 |
| GSGGDIVMTQTPLSLPVTPGEPASISCRSSQSIVHSNGNTYLDWYLQ | |
| KPGQSPQLLIYKVSNRFSGVPDRFSGSGSGTDFTLKISRVEAEDVGV | |
| YYCMQGSHVPRTFGGGTKVEIK (SEQ ID NO: 74) | |

[0137] In some embodiments, the non-target antigen comprises HLA-1B*07. Various single variable domains known in the art or disclosed herein that bind to and recognize HLA-1B*07 are suitable for use in embodiments.

[0138] In some embodiments, the non-target antigen comprises HLA-A*11. Various single variable domains known in the art or disclosed herein that bind to and recognize HLA-A*11 are suitable for use in embodiments.

[0139] In some embodiments, the non-target antigen comprises HLA-A*01. Various single variable domains known in the art or disclosed herein that bind to and recognize HLA-A*01 are suitable for use in embodiments.

[0140] In some embodiments, the non-target antigen comprises HLA-A*03. Various single variable domains known in the art or disclosed herein that bind to and recognize HLA-A*03 are suitable for use in embodiments.

[0141] In some embodiments, the non-target antigen comprises HLA-C*07. Various single variable domains known in the art or disclosed herein that bind to and recognize HLA-C*07 are suitable for use in embodiments.

[0142] Such scFvs include, for example and without limitation, the following mouse and humanized scFv antibodies that bind non-target antigens (e.g. HLA-A*02, HLA-A*01, HLA-A*03, HLA-A*11, HLA-B*07, or HLA-C*07) in a peptide-independent way shown in Table 7 below (where indicated, complementarity determining regions underlined):

TABLE 7
Exemplary HLA-A*02, HLA-A 01, HLA-A*03, HLA-A*11, HLA-B*07, or HLA-
C*07 Binding Domains
HLA-B*07 antigen binding domains

| | |
|---|---|
| BB7.1.10_ | QVQLQESGPGLVKPSQTLSLTCTVSGYSITSGYSWHWIRQPPGKGLEWIG |
| scFv | YIHFSGSTHYHPSLKSRVTISVDTSKNQFSLKLSSVTAADTAVYYCARGG |
| | VVSHYAMDCWGQGTTVTVSSGGGGSGGGGSGGGGSGGDIQMTQSPSS |
| | LSASVGDRVTITCRASENIYSNLAWYQQKPGKAPKLLIYAATYLPDGVP |
| | SRFSGSGSGTDFTLTISSLQPEDFATYYCQHFWVTPYTFGGGTKVEIK |
| | (SEQ ID NO: 330) |
| BB 7.1.9_ | EVQLVESGGGLVKPGGSLRLSCAASGYSITSGYSWHWVRQAPGKGLEW |
| scFv | VSYIHFSGSTHYHPSLKSRFTISRDNAKNSLYLQMNSLRAEDTAVYYCA |
| | RGGVVSHYAMDCWGQGTTVTVSSGGGGSGGGGSGGGGSGGDIQMTQS |
| | PSSVSASVGDRVTITCRASENIYSNLAWYQQKPGKAPKLLIYAATYLPDG |
| | VPSRFSGSGSGTDFTLTISSLQPEDFATYYCQHFWVTPYTFGGGTKVEIK |
| | (SEQ ID NO: 331) |
| BB7.1.8_ | EVQLVESGGGLVKPGGSLRLSCAASGYSITSGYSWHWVRQAPGKGLEW |
| scFv | VGYIHFSGSTHYHPSLKSRFTISRDDSKNTLYLQMNSLKTEDTAVYYCA |
| | RGGVVSHYAMDCWGQGTTVTVSSGGGGSGGGGSGGGGSGGEIVLTQS |
| | PATLSLSPGERATLSCRASENIYSNLAWYQQKPGQAPRLLIYAATYLPDG |
| | IPARFSGSGSGTDFTLTISSLEPEDFAVYYCQHFWVTPYTFGGGTKVEIK |
| | (SEQ ID NO: 332) |
| BB7.1.7_ | QVQLQQSGPGLVKPSQTLSLTCAISGYSITSGYSWHWIRQSPSRGLEWLG |
| scFv | YIHFSGSTHYHPSLKSRITINPDTSKNQFSLQLNSVTPEDTAVYYCARGG |
| | VVSHYAMDCWGQGTTVTVSSGGGGSGGGGSGGGGSGGEIVLTQSPATL |
| | SLSPGERATLSCRASENIYSNLAWYQQKPGQAPRLLIYAATYLPDGIPAR |
| | FSGSGSGTDFTLTISRLEPEDFAVYYCQHFWVTPYTFGGGTKVEIK (SEQ |
| | ID NO: 333) |
| BB7.1.6_ | EVQLVESGGGLVKPGGSLRLSCAASGYSITSGYSWHWVRQAPGKGLEW |
| scFv | VGYIHFSGSTHYHPSLKSRFTISRDDSKNTLYLQMNSLKTEDTAVYYCA |
| | RGGVVSHYAMDCWGQGTTVTVSSGGGGSGGGGSGGGGSGGDIQMTQS |
| | PSSVSASVGDRVTITCRASENIYSNLAWYQQKPGKAPKLLIYAATYLPDG |
| | VPSRFSGSGSGTDFTLTISSLQPEDFATYYCQHFWVTPYTFGGGTKVEIK |
| | (SEQ ID NO: 334) |
| BB7.1.5_ | EVQLVESGGGLVQPGGSLRLSCAASGYSITSGYSWHWVRQAPGKGLEW |
| scFv | VSYIHFSGSTHYHPSLKSRFTISRDNSKNTLYLQMNSLRAEDTAVYYCAR |
| | GGVVSHYAMDCWGQGTTVTVSSGGGGSGGGGSGGGGSGGDIQMTQSP |
| | SSLSASVGDRVTITCRASENIYSNLAWYQQKPGKAPKLLIYAATYLPDG |
| | VPSRFSGSGSGTDFTLTISSLQPEDFATYYCQHFWVTPYTFGGGTKVEIK |
| | (SEQ ID NO: 335) |
| BB 7.1.4_ | EVQLVESGGGLVKPGGSLRLSCAASGYSITSGYSWHWVRQAPGKGLEW |
| scFv | VGYIHFSGSTHYHPSLKSRFTISRDDSKNTLYLQMNSLKTEDTAVYYCA |
| | RGGVVSHYAMDCWGQGTTVTVSSGGGGSGGGGSGGGGSGGDIQMTQS |
| | PSSLSASVGDRVTITCRASENIYSNLAWYQQKPGKAPKLLIYAATYLPDG |
| | VPSRFSGSGSGTDFTLTISSLQPEDFATYYCQHFWVTPYTFGGGTKVEIK |
| | (SEQ ID NO: 336) |
| BB7.1.3_ | QVQLQQWGAGLLKPSETLSLTCAVYGYSITSGYSWHWIRQPPGKGLEWI |
| scFv | GYIHFSGSTHYHPSLKSRVTISVDTSKNQFSLKLSSVTAADTAVYYCARG |
| | GVVSHYAMDCWGQGTTVTVSSGGGGSGGGGSGGGGSGGDIQMTQSPS |
| | SLSASVGDRVTITCRASENIYSNLAWYQQKPGKAPKLLIYAATYLPDGV |
| | PSRFSGSGSGTDFTLTISSLQPEDFATYYCQHFWVTPYTFGGGTKVEIK |
| | (SEQ ID NO: 337) |
| BB 7.1.2_ | QVQLQESGPGLVKPSQTLSLTCTVSGYSITSGYSWHWIRQHPGKGLEWI |
| scFv | GYIHFSGSTHYHPSLKSRVTISVDTSKNQFSLKLSSVTAADTAVYYCARG |
| | GVVSHYAMDCWGQGTTVTVSSGGGGSGGGGSGGGGSGGDIQMTQSPS |
| | SLSASVGDRVTITCRASENIYSNLAWYQQKPGKAPKLLIYAATYLPDGV |
| | PSRFSGSGSGTDFTLTISSLQPEDFATYYCQHFWVTPYTFGGGTKVEIK |
| | (SEQ ID NO: 338) |
| BB7.1.1_ | QVQLQQSGPGLVKPSQTLSLTCAISGYSITSGYSWHWIRQSPSRGLEWLG |
| scFv | YIHFSGSTHYHPSLKSRITINPDTSKNQFSLQLNSVTPEDTAVYYCARGG |
| | VVSHYAMDCWGQGTTVTVSSGGGGSGGGGSGGGGSGGDIQMTQSPSS |
| | LSASVGDRVTITCRASENIYSNLAWYQQKPGKAPKLLIYAATYLPDGVP |
| | SRFSGSGSGTDFTLTISSLQPEDFATYYCQHFWVTPYTFGGGTKVEIK |
| | (SEQ ID NO: 339) |
| BB7.1 | VQLQESGPDLVKPSQSLSLTCTVTGYSITSGYSWHWIRQFPRNKLEWMG |
| scFv | YIHFSGSTHYHPSLKSRISITRDTSKNQFFLQLNSVTTEDTATYYCARGGV |
| | VSHYAMDCWGQGTSVTVSSGGGGSGGGGSGGGGSGGDIQMTQSPASL |
| | SVSVGETVTITCRASENIYSNLAWYQQKQGKSPHLLVYAATYLPDGVPS |
| | RFSGSGSGTQYSLKINSLQSEDFGSYYCQHFWVTPYTFGGGTKVEIK |
| | (SEQ ID NO: 21806) |

HLA-A*11 antigen binding domains

| | |
|---|---|
| 9 | QVQLQESGPGLVKPSQTLSLTCTVSGGSISSGGYYWSWIRQPPGKGLEWI |
| | GYIYYSGSTYYNPSLKSRVTISVDTSKNQFSLKLSSVTAADTAVYYCARH |
| | YYYYSMDVWGKGTTVTVSSGGGGSGGGGSGGGGSGGDIQMTQSPSSLS |
| | ASVGDRVTITCRASQSISSYLNWYQQKPGKAPKLLIYAASSLQSGVPSRF |
| | SGSGSGTDFTLTISSLQPEDFATYYCQQSYSTPLTFGGGTKVEIK (SEQ ID |
| | NO: 340) |
| 8 | QITLKESGPTLVKPTQTLTLTCTFSGFSLSTSGVGVGWIRQPPGKALEWL |
| | ALIYWNDDKRYSPSLKSRLTITKDTSKNQVVLTMTNMDPVDTATYYCA |
| | HRHMRLSCFDYWGQGTLVTVSSGGGGSGGGGSGGGGSGGDIQMTQSPS |
| | SLSASVGDRVTITCRASQSISSYLNWYQQKPGKAPKLLIYAASSLQSGVP |
| | SRFSGSGSGTDFTLTISSLQPEDFATYYCQQSYSTPLTFGGGTKVEIK |
| | (SEQ ID NO: 341) |
| 7 | QVQLVQSGAEVKKPGASVKVSCKASGYTFTSYAMHWVRQAPGQRLEW |
| | MGWINAGNGNTKYSQKFQGRVTITRDTSASTAYMELSSLRSEDTAVYY |
| | CAREGNGANPDAFDIWGQGTMVTVSSGGGGSGGGGSGGGGSGGDIQM |
| | TQSPSSLSASVGDRVTITCRASQSISSYLNWYQQKPGKAPKLLIYAASSL |
| | QSGVPSRFSGSGSGTDFTLTISSLQPEDFATYYCQQSYSTPLTFGGGTKVE |
| | IK (SEQ ID NO: 342) |
| 6 | EVQLVESGGGLVQPGGSLRLSCAASGFTFSSYDMHWVRQATGKGLEW |
| | VSAIGTAGDTYYPGSVKGRFTISRENAKNSLYLQMNSLRAGDTAVYYC |
| | ARDLPGSYWYFDLWGRGTLVTVSSGGGGSGGGGSGGGGSGGDIQMTQ |
| | SPSSLSASVGDRVTITCRASQSISSYLNWYQQKPGKAPKLLIYAASSLQSG |
| | VPSRFSGSGSGTDFTLTISSLQPEDFATYYCQQSYSTPLTFGGGTKVEIK |
| | (SEQ ID NO: 343) |
| 5 | QVQLQESGPGLVKPSQTLSLTCTVSGGSISSGGYYWSWIRQPPGKGLEWI |
| | GYIYYSGSTYYNPSLKSRVTISVDTSKNQFSLKLSSVTAADTAVYYCARH |
| | YYYYYLDVWGKGTTVTVSSGGGGSGGGGSGGGGSGGDIQMTQSPSSLS |
| | ASVGDRVTITCRASQSISSYLNWYQQKPGKAPKLLIYAASSLQSGVPSRF |
| | SGSGSGTDFTLTISSLQPEDFATYYCQQSYSTPLTFGGGTKVEIK (SEQ ID |
| | NO: 344) |
| 4 | EVQLVESGGGLVQPGGSLRLSCAASGFTFSSYWMHWVRQAPGKGLVW |
| | VSRINSDGSSTSYADSVKGRFTISRDNAKNTLYLQMNSLRAEDTAVYYC |
| | CLGVLLYNWFDPWGQGTLVTVSSGGGGSGGGGSGGGGSGGDIQMTQS |
| | PSSLSASVGDRVTITCRASQSISSYLNWYQQKPGKAPKLLIYAASSLQSG |
| | VPSRFSGSGSGTDFTLTISSLQPEDFATYYCQQSYSTPLTFGGGTKVEIK |
| | (SEQ ID NO: 345) |
| 3 | QVQLQESGPGLVKPSQTLSLTCTVSGGSISSGGYYWSWIRQPPGKGLEWI |
| | GYIYYSGSTYYNPSLKSRVTISVDTSKNQFSLKLSSVTAADTAVYYCARH |
| | YYYYMDVWGKGTTVTVSSGGGGSGGGGSGGGGSGGDIQMTQSPSSLS |
| | ASVGDRVTITCRASQSISSYLNWYQQKPGKAPKLLIYAASSLQSGVPSRF |
| | SGSGSGTDFTLTISSLQPEDFATYYCQQSYSTPLTFGGGTKVEIK (SEQ ID |
| | NO: 346) |
| 2 | QITLKESGPTLVKPTQTLTLTCTFSGFSLSTSGVGVGWIRQPPGKALEWL |
| | ALIYWNDDKRYSPSLKSRLTITKDTSKNQVVLTMTNMDPVDTATYYCA |
| | HKTTSFYFDYWGQGTLVTVSSGGGGSGGGGSGGGGSGGDIQMTQSPSS |
| | LSASVGDRVTITCRASQSISSYLNWYQQKPGKAPKLLIYAASSLQSGVPS |
| | RFSGSGSGTDFTLTISSLQPEDFATYYCQQSYSTPLTFGGGTKVEIK (SEQ |
| | ID NO: 347) |
| 1 | QVQLQESGPGLVKPSQTLSLTCTVSGGSISSGGYYWSWIRQPPGKGLEWI |
| | GYIYYSGSTYYNPSLKSRVTISVDTSKNQFSLKLSSVTAADTAVYYCARH |
| | YYYYYMDVWGKGTTVTVSSGGGGSGGGGSGGGGSGGDIQMTQSPSSL |
| | SASVGDRVTITCRASQSISSYLNWYQQKPGKAPKLLIYAASSLQSGVPSR |
| | FSGSGSGTDFTLTISSLQPEDFATYYCQQSYSTPLTFGGGTKVEIK (SEQ |
| | ID NO: 348) |

HLA-C*07 antigen binding domains

| | |
|---|---|
| C7-45 | EVQLLESGGGLVQPGGSLRLSCAASGFTFSSYAMSWVRQAPGKGLEWV |
| | SAISGSGGSTYYADSVKGRFTISRDNSKNTLYLQMNSLRAEDTAVYYCA |
| | VSFDWFDPWGQGTLVTVSSGGGGSGGGGSGGGGSGGDIQMTQSPSSLS |
| | ASVGDRVTITCRASQSISSYLNWYQQKPGKAPKLLIYAASSLQSGVPSRF |
| | SGSGSGTDFTLTISSLQPEDFATYYCQQSYSTPLTFGGGTKVEIK (SEQ ID |
| | NO: 349) |
| C7-44 | QVQLQESGPGLVKPSQTLSLTCTVSGGSISSGGYYWSWIRQPPGKGLEWI |
| | GYIYYSGSTYYNPSLKSRVTISVDTSKNQFSLKLSSVTAADTAVYYCARE |
| | RSISPYYYYYMDVWGKGTTVTVSSGGGGSGGGGSGGGGSGGDIQMTQS |
| | PSSLSASVGDRVTITCRASQSISSYLNWYQQKPGKAPKLLIYAASSLQSG |
| | VPSRFSGSGSGTDFTLTISSLQPEDFATYYCQQSYSTPLTFGGGTKVEIK |
| | (SEQ ID NO: 350) |
| C7-43 | QLQLQESGPGLVKPSETLSLTCTVSGGSISSSSYYWGWIRQPPGKGLEWI |
| | GSIYYSGSTYYNPSLKSRVTISVDTSKNQFSLKLSSVTAADTAVYYCARD |
| | SVIWYWFDPWGQGTLVTVSSGGGGSGGGGSGGGGSGGQSVLTQPPSAS |
| | GTPGQRVTISCSGSSSNIGSNTVNWYQQLPGTAPKLLIYSNNQRPSGVPD |
| | RFSGSKSGTSASLAISGLQSEDEADYYCAAWDDSLNGWVFGGGTKLTV |
| | L (SEQ ID NO: 351) |
| C7-42 | QVQLQESGPGLVKPSQTLSLTCTVSGGSISSGGYYWSWIRQPPGKGLEWI |
| | GYIYYSGSTYYNPSLKSRVTISVDTSKNQFSLKLSSVTAADTAVYYCARE |
| | EILPRLSYYYYMDVWGKGTTVTVSSGGGGSGGGGSGGGGSGGDIQMTQ |
| | SPSSLSASVGDRVTITCRASQSISSYLNWYQQKPGKAPKLLIYAASSLQSG |
| | VPSRFSGSGSGTDFTLTISSLQPEDFATYYCQQSYSTPLTFGGGTKVEIK |
| | (SEQ ID NO: 352) |
| C7-41 | QVQLVQSGSELKKPGASVKVSCKASGYTFTSYAMNWVRQAPGQGLEW |
| | MGWINTNTGNPTYAQGFTGRFVFSFDTSVSTAYLQICSLKAEDTAVYYC |
| | ARGGRAHSSWYFDLWGRGTLVTVSSGGGGSGGGGSGGGGSGGDIQMT |
| | QSPSSLSASVGDRVTITCRASQSISSYLNWYQQKPGKAPKLLIYAASSLQS |
| | GVPSRFSGSGSGTDFTLTISSLQPEDFATYYCQQSYSTPLTFGGGTKVEIK |
| | (SEQ ID NO: 353) |
| C7-40 | QVQLQESGPGLVKPSQTLSLTCTVSGGSISSGGYYWSWIRQPPGKGLEWI |
| | GYIYYSGSTYYNPSLKSRVTISVDTSKNQFSLKLSSVTAADTAVYYCARD |
| | RIKILPRLGYYYYMDVWGKGTTVTVSSGGGGSGGGGSGGGGSGGDIQM |
| | TQSPSSLSASVGDRVTITCRASQSISSYLNWYQQKPGKAPKLLIYAASSL |
| | QSGVPSRFSGSGSGTDFTLTISSLQPEDFATYYCQQSYSTPLTFGGGTKVE |
| | IK (SEQ ID NO: 354) |
| C7-39 | QVQLQESGPGLVKPSQTLSLTCTVSGGSISSGGYYWSWIRQPPGKGLEWI |
| | GYIYYSGSTYYNPSLKSRVTISVDTSKNQFSLKLSSVTAADTAVYYCARD |
| | TVIHYYYYMDVWGKGTTVTVSSGGGGSGGGGSGGGGSGGDIQMTQSP |
| | SSLSASVGDRVTITCRASQSISSYLNWYQQKPGKAPKLLIYAASSLQSGV |
| | PSRFSGSGSGTDFTLTISSLQPEDFATYYCQQSYSTPLTFGGGTKVEIK |
| | (SEQ ID NO: 355) |
| C7-38 | QVQLQESGPGLVKPSQTLSLTCTVSGGSISSGGYYWSWIRQPPGKGLEWI |
| | GYIYYSGSTYYNPSLKSRVTISVDTSKNQFSLKLSSVTAADTAVYYCARD |
| | VIVEVFLSYYYYMDVWGKGTTVTVSSGGGGSGGGGSGGGGSGGDIQM |
| | TQSPSSLSASVGDRVTITCRASQSISSYLNWYQQKPGKAPKLLIYAASSL |
| | QSGVPSRFSGSGSGTDFTLTISSLQPEDFATYYCQQSYSTPLTFGGGTKVE |
| | IK (SEQ ID NO: 356) |
| C7-37 | QVQLQESGPGLVKPSQTLSLTCTVSGGSISSGGYYWSWIRQPPGKGLEWI |
| | GYIYYSGSTYYNPSLKSRVTISVDTSKNQFSLKLSSVTAADTAVYYCARD |
| | IFIHYYYYMDVWGKGTTVTVSSGGGGSGGGGSGGGGSGGDIQMTQSPS |
| | SLSASVGDRVTITCRASQSISSYLNWYQQKPGKAPKLLIYAASSLQSGVP |
| | SRFSGSGSGTDFTLTISSLQPEDFATYYCQQSYSTPLTFGGGTKVEIK |
| | (SEQ ID NO: 357) |
| C7-36 | EVQLVESGGGLVQPGGSLRLSCAASGFTFSSYSMNWVRQAPGKGLEWV |
| | SYISSSSSTIYYADSVKGRFTISRDNAKNSLYLQMNSLRAEDTAVYYCAR |
| | DGTFYSYSPYYFDYWGQGTLVTVSSGGGGSGGGGSGGGGSGGDIQMTQ |
| | SPSSLSASVGDRVTITCRASQSISSYLNWYQQKPGKAPKLLIYAASSLQSG |
| | VPSRFSGSGSGTDFTLTISSLQPEDFATYYCQQSYSTPLTFGGGTKVEIK |
| | (SEQ ID NO: 358) |
| C7-35 | QVQLQESGPGLVKPSQTLSLTCTVSGGSISSGGYYWSWIRQPPGKGLEWI |
| | GYIYYSGSTYYNPSLKSRVTISVDTSKNQFSLKLSSVTAADTAVYYCARE |
| | WIKILPRLGYYYYMDVWGKGTTVTVSSGGGGSGGGGSGGGGSGGDIQ |
| | MTQSPSSLSASVGDRVTITCRASQSISSYLNWYQQKPGKAPKLLIYAASS |
| | LQSGVPSRFSGSGSGTDFTLTISSLQPEDFATYYCQQSYSTPLTFGGGTKV |
| | EIK (SEQ ID NO: 359) |
| C7-34 | QVQLQESGPGLVKPSQTLSLTCTVSGGSISSGGYYWSWIRQPPGKGLEWI |
| | GYIYYSGSTYYNPSLKSRVTISVDTSKNQFSLKLSSVTAADTAVYYCARD |
| | RSLYYYYYMDVWGKGTTVTVSSGGGGSGGGGSGGGGSGGDIQMTQSP |
| | SSLSASVGDRVTITCRASQSISSYLNWYQQKPGKAPKLLIYAASSLQSGV |
| | PSRFSGSGSGTDFTLTISSLQPEDFATYYCQQSYSTPLTFGGGTKVEIK |
| | (SEQ ID NO: 360) |
| C7-33 | QVQLQESGPGLVKPSQTLSLTCTVSGGSISSGGYYWSWIRQPPGKGLEWI |
| | GYIYYSGSTYYNPSLKSRVTISVDTSKNQFSLKLSSVTAADTAVYYCARD |
| | KILAPNYYYYMDVWGKGTTVTVSSGGGGSGGGGSGGGGSGGDIQMTQ |
| | SPSSLSASVGDRVTITCRASQSISSYLNWYQQKPGKAPKLLIYAASSLQSG |
| | VPSRFSGSGSGTDFTLTISSLQPEDFATYYCQQSYSTPLTFGGGTKVEIK |
| | (SEQ ID NO: 361) |
| C7-32 | QVQLQESGPGLVKPSQTLSLTCTVSGGSISSGGYYWSWIRQPPGKGLEWI |
| | GYIYYSGSTYYNPSLKSRVTISVDTSKNQFSLKLSSVTAADTAVYYCARE |
| | KSWKYFYYYYYYMDVWGKGTTVTVSSGGGGSGGGGSGGGGSGGDIQ |
| | MTQSPSSLSASVGDRVTITCRASQSISSYLNWYQQKPGKAPKLLIYAASS |
| | LQSGVPSRFSGSGSGTDFTLTISSLQPEDFATYYCQQSYSTPLTFGGGTKV |
| | EIK (SEQ ID NO: 362) |
| C7-31 | QVQLQESGPGLVKPSQTLSLTCTVSGGSISSGGYYWSWIRQPPGKGLEWI |
| | GYIYYSGSTYYNPSLKSRVTISVDTSKNQFSLKLSSVTAADTAVYYCARE |
| | NTSTIPYYYYYMDVWGKGTTVTVSSGGGGSGGGGSGGGGSGGDIQMT |
| | QSPSSLSASVGDRVTITCRASQSISSYLNWYQQKPGKAPKLLIYAASSLQS |
| | GVPSRFSGSGSGTDFTLTISSLQPEDFATYYCQQSYSTPLTFGGGTKVEIK |
| | (SEQ ID NO: 363) |
| C7-30 | QVQLQESGPGLVKPSQTLSLTCTVSGGSISSGGYYWSWIRQPPGKGLEWI |
| | GYIYYSGSTYYNPSLKSRVTISVDTSKNQFSLKLSSVTAADTAVYYCARE |
| | DVDKNTSTIYYYYYYMDVWGKGTTVTVSSGGGGSGGGGSGGGGSGGD |
| | IQMTQSPSSLSASVGDRVTITCRASQSISSYLNWYQQKPGKAPKLLIYAA |
| | SSLQSGVPSRFSGSGSGTDFTLTISSLQPEDFATYYCQQSYSTPLTFGGGT |
| | KVEIK (SEQ ID NO: 364) |
| C7-29 | QVQLVESGGGLVKPGGSLRLSCAASGFTFSDYYMSWIRQAPGKGLEWV |
| | SYISSSGSTIYYADSVKGRFTISRDNAKNSLYLQMNSLRAEDTAVYYCAR |
| | DGGDIVSSSAIYWYFDLWGRGTLVTVSSGGGGSGGGGSGGGGSGGAIQ |
| | LTQSPSSLSASVGDRVTITCRASQGISSALAWYQQKPGKAPKLLIYDASS |
| | LESGVPSRFSGSGSGTDFTLTISSLQPEDFATYYCQQFNSYPLTFGGGTKV |
| | EIK (SEQ ID NO: 365) |
| C7-28 | QVQLQESGPGLVKPSQTLSLTCTVSGGSISSGGYYWSWIRQPPGKGLEWI |
| | GYIYYSGSTYYNPSLKSRVTISVDTSKNQFSLKLSSVTAADTAVYYCARD |
| | LILPPYYYYYMDVWGKGTTVTVSSGGGGSGGGGSGGGGSGGDIQMTQS |
| | PSSLSASVGDRVTITCRASQSISSYLNWYQQKPGKAPKLLIYAASSLQSG |
| | VPSRFSGSGSGTDFTLTISSLQPEDFATYYCQQSYSTPLTFGGGTKVEIK |
| | (SEQ ID NO: 366) |
| C7-27 | QVQLQESGPGLVKPSQTLSLTCTVSGGSISSGGYYWSWIRQPPGKGLEWI |
| | GYIYYSGSTYYNPSLKSRVTISVDTSKNQFSLKLSSVTAADTAVYYCARE |
| | TWIKILPRYYYYYYYMDVWGKGTTVTVSSGGGGSGGGGSGGGGSGGD |
| | IQMTQSPSSLSASVGDRVTITCRASQSISSYLNWYQQKPGKAPKLLIYAA |
| | SSLQSGVPSRFSGSGSGTDFTLTISSLQPEDFATYYCQQSYSTPLTFGGGT |
| | KVEIK (SEQ ID NO: 367) |
| C7-26 | QVQLQESGPGLVKPSQTLSLTCTVSGGSISSGGYYWSWIRQPPGKGLEWI |
| | GYIYYSGSTYYNPSLKSRVTISVDTSKNQFSLKLSSVTAADTAVYYCARD |
| | LSRYYYYYMDVWGKGTTVTVSSGGGGSGGGGSGGGGSGGDIQMTQSP |
| | SSLSASVGDRVTITCRASQSISSYLNWYQQKPGKAPKLLIYAASSLQSGV |
| | PSRFSGSGSGTDFTLTISSLQPEDFATYYCQQSYSTPLTFGGGTKVEIK |
| | (SEQ ID NO: 368) |
| C7-25 | EVQLVESGGGLVQPGGSLRLSCAASGFTFSSYSMNWVRQAPGKGLEWV |
| | SYISSSSSTIYYADSVKGRFTISRDNAKNSLYLQMNSLRAEDTAVYYCAR |
| | EHIVLCFDYWGQGTLVTVSSGGGGSGGGGSGGGGSGGDIQMTQSPSSLS |
| | ASVGDRVTITCRASQGISSWLAWYQQKPEKAPKSLIYAASSLQSGVPSRF |
| | SGSGSGTDFTLTISSLQPEDFATYYCQQYNSYPLTFGGGTKVEIK (SEQ ID |
| | NO: 369) |
| C7-24 | QVQLQESGPGLVKPSQTLSLTCTVSGGSISSGGYYWSWIRQPPGKGLEWI |
| | GYIYYSGSTYYNPSLKSRVTISVDTSKNQFSLKLSSVTAADTAVYYCARD |
| | KILPRPYYYYYMDVWGKGTTVTVSSGGGGSGGGGSGGGGSGGDIQMT |
| | QSPSSLSASVGDRVTITCRASQSISSYLNWYQQKPGKAPKLLIYAASSLQS |
| | GVPSRFSGSGSGTDFTLTISSLQPEDFATYYCQQSYSTPLTFGGGTKVEIK |
| | (SEQ ID NO: 370) |
| C7-23 | QVQLVQSGAEVKKPGASVKVSCKASGYTFTSYGISWVRQAPGQGLEW |
| | MGWISAYNGNTNYAQKLQGRVTMTTDTSTSTAYMELRSLRSDDTAVY |
| | YCARGSNEYFQHWGQGTLVTVSSGGGGSGGGGSGGGGSGGQSALTQPP |
| | SASGSPGQSVTISCTGTSSDVGGYNYVSWYQQHPGKAPKLMIYEVSKRP |
| | SGVPDRFSGSKSGNTASLTVSGLQAEDEADYYCSSYAGSNNWVFGGGT |
| | KLTVL (SEQ ID NO: 371) |
| C7-22 | QVQLVQSGSELKKPGASVKVSCKASGYTFTSYAMNWVRQAPGQGLEW |
| | MGWINTNTGNPTYAQGFTGRFVFSFDTSVSTAYLQICSLKAEDTAVYYC |
| | ARGTSYWYFDLWGRGTLVTVSSGGGGSGGGGSGGGGSGGDIQMTQSPS |
| | SLSASVGDRVTITCRASQSISSYLNWYQQKPGKAPKLLIYAASSLQSGVP |
| | SRFSGSGSGTDFTLTISSLQPEDFATYYCQQSYSTPLTFGGGTKVEIK |
| | (SEQ ID NO: 372) |
| C7-21 | QVQLQESGPGLVKPSQTLSLTCTVSGGSISSGGYYWSWIRQPPGKGLEWI |
| | GYIYYSGSTYYNPSLKSRVTISVDTSKNQFSLKLSSVTAADTAVYYCARE |
| | EIVEVFYYYYMDVWGKGTTVTVSSGGGGSGGGGSGGGGSGGDIQMTQ |
| | SPSSLSASVGDRVTITCRASQSISSYLNWYQQKPGKAPKLLIYAASSLQSG |
| | VPSRFSGSGSGTDFTLTISSLQPEDFATYYCQQSYSTPLTFGGGTKVEIK |
| | (SEQ ID NO: 373) |
| C7-20 | EVQLLESGGGLVQPGGSLRLSCAASGFTFSSYAMSWVRQAPGKGLEWV |
| | SAISGSGGSTYYADSVKGRFTISRDNSKNTLYLQMNSLRAEDTAVYYCA |
| | KVDDYYFDYWGQGTLVTVSSGGGGSGGGGSGGGGSGGDIQMTQSPSSL |
| | SASVGDRVTITCRASQSISSYLNWYQQKPGKAPKLLIYAASSLQSGVPSR |
| | FSGSGSGTDFTLTISSLQPEDFATYYCQQSYSTPLTFGGGTKVEIK (SEQ |
| | ID NO: 374) |
| C7-19 | EVQLVESGGGLVQPGGSLRLSCAASGFTFSSYWMHWVRQAPGKGLVW |
| | VSRINSDGSSTSYADSVKGRFTISRDNAKNTLYLQMNSLRAEDTAVYYC |
| | AWSTNILLSYTKAFDIWGQGTMVTVSSGGGGSGGGGSGGGGSGGDIQM |
| | TQSPSSLSASVGDRVTITCRASQSISSYLNWYQQKPGKAPKLLIYAASSL |
| | QSGVPSRFSGSGSGTDFTLTISSLQPEDFATYYCQQSYSTPLTFGGGTKVE |
| | IK (SEQ ID NO: 375) |
| C7-18 | QVQLQESGPGLVKPSQTLSLTCTVSGGSISSGGYYWSWIRQPPGKGLEWI |
| | GYIYYSGSTYYNPSLKSRVTISVDTSKNQFSLKLSSVTAADTAVYYCARD |
| | KTYYYYYYMDVWGKGTTVTVSSGGGGSGGGGSGGGGSGGDIQMTQSP |
| | SSLSASVGDRVTITCRASQSISSYLNWYQQKPGKAPKLLIYAASSLQSGV |
| | PSRFSGSGSGTDFTLTISSLQPEDFATYYCQQSYSTPLTFGGGTKVEIK |
| | (SEQ ID NO: 376) |
| C7-17 | QVQLQESGPGLVKPSQTLSLTCTVSGGSISSGGYYWSWIRQPPGKGLEWI |
| | GYIYYSGSTYYNPSLKSRVTISVDTSKNQFSLKLSSVTAADTAVYYCARE |
| | KYFHDKYFHDYYYYYMDVWGKGTTVTVSSGGGGSGGGGSGGGGSGG |
| | DIQMTQSPSSLSASVGDRVTITCRASQSISSYLNWYQQKPGKAPKLLIYA |
| | ASSLQSGVPSRFSGSGSGTDFTLTISSLQPEDFATYYCQQSYSTPLTFGGG |
| | TKVEIK (SEQ ID NO: 377) |
| C7-16 | QVQLQESGPGLVKPSQTLSLTCTVSGGSISSGGYYWSWIRQPPGKGLEWI |
| | GYIYYSGSTYYNPSLKSRVTISVDTSKNQFSLKLSSVTAADTAVYYCARD |
| | TSVYYYYYMDVWGKGTTVTVSSGGGGSGGGGSGGGGSGGDIQMTQSP |
| | SSLSASVGDRVTITCRASQSISSYLNWYQQKPGKAPKLLIYAASSLQSGV |
| | PSRFSGSGSGTDFTLTISSLQPEDFATYYCQQSYSTPLTFGGGTKVEIK |
| | (SEQ ID NO: 378) |
| C7-15 | QVQLQESGPGLVKPSQTLSLTCTVSGGSISSGGYYWSWIRQPPGKGLEWI |
| | GYIYYSGSTYYNPSLKSRVTISVDTSKNQFSLKLSSVTAADTAVYYCARE |
| | KILPYYYYYYMDVWGKGTTVTVSSGGGGSGGGGSGGGGSGGDIQMTQ |
| | SPSSLSASVGDRVTITCRASQSISSYLNWYQQKPGKAPKLLIYAASSLQSG |
| | VPSRFSGSGSGTDFTLTISSLQPEDFATYYCQQSYSTPLTFGGGTKVEIK |
| | (SEQ ID NO: 379) |
| C7-14 | EVQLVESGGGLVQPGGSLRLSCAASGFTFSSYSMNWVRQAPGKGLEWV |
| | SYISSSSSTIYYADSVKGRFTISRDNAKNSLYLQMNSLRAEDTAVYYCAI |
| | QWIYIYINPRGFIFLHDAFDIWGQGTMVTVSSGGGGSGGGGSGGGGSGG |
| | QSVLTQPPSASGTPGQRVTISCSGSSSNIGSNTVNWYQQLPGTAPKLLIYS |
| | NNQRPSGVPDRFSGSKSGTSASLAISGLQSEDEADYYCAAWDDSLNGW |
| | VFGGGTKLTVL (SEQ ID NO: 380) |
| C7-13 | QVQLQQSGPGLVKPSQTLSLTCAISGDSVSSNSAAWNWIRQSPSRGLEW |
| | LGRTYYRSKWYNDYAVSVKSRITINPDTSKNQFSLQLNSVTPEDTAVYY |
| | CAKEDVDFHHDAFDIWGQGTMVTVSSGGGGSGGGGSGGGGSGGDIQM |
| | TQSPSSLSASVGDRVTITCRASQSISSYLNWYQQKPGKAPKLLIYAASSL |
| | QSGVPSRFSGSGSGTDFTLTISSLQPEDFATYYCQQSYSTPLTFGGGTKVE |
| | IK (SEQ ID NO: 381) |
| C7-12 | QVQLQESGPGLVKPSQTLSLTCTVSGGSISSGGYYWSWIRQPPGKGLEWI |
| | GYIYYSGSTYYNPSLKSRVTISVDTSKNQFSLKLSSVTAADTAVYYCARE |
| | GVDKNTSTIYYYYYYMDVWGKGTTVTVSSGGGGSGGGGSGGGGSGGD |
| | IQMTQSPSSLSASVGDRVTITCRASQSISSYLNWYQQKPGKAPKLLIYAA |
| | SSLQSGVPSRFSGSGSGTDFTLTISSLQPEDFATYYCQQSYSTPLTFGGGT |
| | KVEIK (SEQ ID NO: 382) |
| C7-11 | EVQLVESGGGLVQPGGSLRLSCAASGFTFSSYSMNWVRQAPGKGLEWV |
| | SYISSSSSTIYYADSVKGRFTISRDNAKNSLYLQMNSLRAEDTAVYYCAR |
| | DRRGYFDLWGRGTLVTVSSGGGGSGGGGSGGGGSGGDIQMTQSPSSLS |
| | ASVGDRVTITCRASQGISSWLAWYQQKPEKAPKSLIYAASSLQSGVPSRF |
| | SGSGSGTDFTLTISSLQPEDFATYYCQQYNSYPLTFGGGTKVEIK (SEQ ID |
| | NO: 383) |
| C7-10 | EVQLVQSGAEVKKPGATVKISCKVSGYTFTDYYMHWVQQAPGKGLEW |
| | MGLVDPEDGETIYAEKFQGRVTITADTSTDTAYMELSSLRSEDTAVYYC |
| | ATGIHVDIRSMEDWFDPWGQGTLVTVSSGGGGSGGGGSGGGGSGGDIQ |
| | MTQSPSSLSASVGDRVTITCRASQSISSYLNWYQQKPGKAPKLLIYAASS |
| | LQSGVPSRFSGSGSGTDFTLTISSLQPEDFATYYCQQSYSTPLTFGGGTKV |
| | EIK (SEQ ID NO: 384) |
| C7-9 | QVQLQESGPGLVKPSQTLSLTCTVSGGSISSGGYYWSWIRQPPGKGLEWI |
| | GYIYYSGSTYYNPSLKSRVTISVDTSKNQFSLKLSSVTAADTAVYYCARD |
| | IGTSYYYYMDVWGKGTTVTVSSGGGGSGGGGSGGGGSGGDIQMTQSPS |
| | SLSASVGDRVTITCRASQSISSYLNWYQQKPGKAPKLLIYAASSLQSGVP |
| | SRFSGSGSGTDFTLTISSLQPEDFATYYCQQSYSTPLTFGGGTKVEIK |
| | (SEQ ID NO: 385) |
| C7-8 | QVQLQESGPGLVKPSQTLSLTCTVSGGSISSGGYYWSWIRQPPGKGLEWI |
| | GYIYYSGSTYYNPSLKSRVTISVDTSKNQFSLKLSSVTAADTAVYYCARE |
| | VVEVFLYYYYYMDVWGKGTTVTVSSGGGGSGGGGSGGGGSGGDIQMT |
| | QSPSSLSASVGDRVTITCRASQSISSYLNWYQQKPGKAPKLLIYAASSLQS |
| | GVPSRFSGSGSGTDFTLTISSLQPEDFATYYCQQSYSTPLTFGGGTKVEIK |
| | (SEQ ID NO: 386) |
| C7-7 | QVQLQESGPGLVKPSQTLSLTCTVSGGSISSGGYYWSWIRQPPGKGLEWI |
| | GYIYYSGSTYYNPSLKSRVTISVDTSKNQFSLKLSSVTAADTAVYYCARD |
| | LYYYYYYYMDVWGKGTTVTVSSGGGGSGGGGSGGGGSGGDIQMTQSP |
| | SSLSASVGDRVTITCRASQSISSYLNWYQQKPGKAPKLLIYAASSLQSGV |
| | PSRFSGSGSGTDFTLTISSLQPEDFATYYCQQSYSTPLTFGGGTKVEIK |
| | (SEQ ID NO: 387) |
| C7-6 | QVQLQESGPGLVKPSQTLSLTCTVSGGSISSGGYYWSWIRQPPGKGLEWI |
| | GYIYYSGSTYYNPSLKSRVTISVDTSKNQFSLKLSSVTAADTAVYYCARE |
| | SWKYFYPRGSIFIHYYYYMDVWGKGTTVTVSSGGGGSGGGGSGGGGSG |
| | GDIQMTQSPSSLSASVGDRVTITCRASQSISSYLNWYQQKPGKAPKLLIY |
| | AASSLQSGVPSRFSGSGSGTDFTLTISSLQPEDFATYYCQQSYSTPLTFGG |
| | GTKVEIK (SEQ ID NO: 388) |
| C7-5 | QVQLQESGPGLVKPSQTLSLTCTVSGGSISSGGYYWSWIRQPPGKGLEWI |
| | GYIYYSGSTYYNPSLKSRVTISVDTSKNQFSLKLSSVTAADTAVYYCARD |
| | RIVEVFYYYYMDVWGKGTTVTVSSGGGGSGGGGSGGGGSGGDIQMTQ |
| | SPSSLSASVGDRVTITCRASQSISSYLNWYQQKPGKAPKLLIYAASSLQSG |
| | VPSRFSGSGSGTDFTLTISSLQPEDFATYYCQQSYSTPLTFGGGTKVEIK |
| | (SEQ ID NO: 389) |
| C7-4 | QVQLQESGPGLVKPSQTLSLTCTVSGGSISSGGYYWSWIRQPPGKGLEWI |
| | GYIYYSGSTYYNPSLKSRVTISVDTSKNQFSLKLSSVTAADTAVYYCARE |
| | KYFHDWLYYYYYMDVWGKGTTVTVSSGGGGSGGGGSGGGGSGGDIQ |
| | MTQSPSSLSASVGDRVTITCRASQSISSYLNWYQQKPGKAPKLLIYAASS |
| | LQSGVPSRFSGSGSGTDFTLTISSLQPEDFATYYCQQSYSTPLTFGGGTKV |
| | EIK (SEQ ID NO: 390) |
| C7-3 | QVQLQESGPGLVKPSQTLSLTCTVSGGSISSGGYYWSWIRQPPGKGLEWI |
| | GYIYYSGSTYYNPSLKSRVTISVDTSKNQFSLKLSSVTAADTAVYYCARD |
| | LVDKNTSYYYYYMDVWGKGTTVTVSSGGGGSGGGGSGGGGSGGDIQ |
| | MTQSPSSLSASVGDRVTITCRASQSISSYLNWYQQKPGKAPKLLIYAASS |
| | LQSGVPSRFSGSGSGTDFTLTISSLQPEDFATYYCQQSYSTPLTFGGGTKV |
| | EIK (SEQ ID NO: 391) |
| C7-2 | QVQLVQSGAEVKKPGASVKVSCKASGYTFTSYGISWVRQAPGQGLEW |
| | MGWISAYNGNTNYAQKLQGRVTMTTDTSTSTAYMELRSLRSDDTAVY |
| | YCARVQNEYFQHWGQGTLVTVSSGGGGSGGGGSGGGGSGGQSALTQP |
| | PSASGSPGQSVTISCTGTSSDVGGYNYVSWYQQHPGKAPKLMIYEVSKR |
| | PSGVPDRFSGSKSGNTASLTVSGLQAEDEADYYCSSYAGSNNWVFGGG |
| | TKLTVL (SEQ ID NO: 392) |
| C7-1 | QVQLVESGGGLVKPGGSLRLSCAASGFTFSDYYMSWIRQAPGKGLEWV |
| | SYISSSGSTIYYADSVKGRFTISRDNAKNSLYLQMNSLRAEDTAVYYCAT |
| | ANWFDPWGQGTLVTVSSGGGGSGGGGSGGGGSGGDIQMTQSPSSVSAS |
| | VGDRVTITCRASQGISSWLAWYQQKPGKAPKLLIYAASSLQSGVPSRFS |
| | GSGSGTDFTLTISSLQPEDFATYYCQQANSFPLTFGGGTKVEIK (SEQ ID |
| | NO: 393) |

HLA-A*03 scFv Sequences

| | |
|---|---|
| 15 | QVQLVQSGAEVKKPGASVKVSCKASGYTFTSYGISWVRQAPGQGLEW |
| | MGWISAYNGNTNYAQKLQGRVTMTTDTSTSTAYMELRSLRSDDTAVY |
| | YCARERVSQRGAFDIWGQGTMVTVSSGGGGSGGGGSGGGGSGGDIQM |
| | TQSPSSLSASVGDRVTITCRASQSISSYLNWYQQKPGKAPKLLIYAASSL |
| | QSGVPSRFSGSGSGTDFTLTISSLQPEDFATYYCQQSYSTPLTFGGGTKVE |
| | IK (SEQ ID NO: 394) |
| 16 | EVQLVESGGGLVQPGGSLRLSCAASGFTFSSYSMNWVRQAPGKGLEWV |
| | SYISSSSSTIYYADSVKGRFTISRDNAKNSLYLQMNSLRAEDTAVYYCAR |
| | GNPDKDPFDYWGQGTLVTVSSGGGGSGGGGSGGGGSGGDIQMTQSPSS |
| | LSASVGDRVTITCRASQSISSYLNWYQQKPGKAPKLLIYAASSLQSGVPS |
| | RFSGSGSGTDFTLTISSLQPEDFATYYCQQSYSTPLTFGGGTKVEIK (SEQ |
| | ID NO: 395) |
| 17 | QVQLQESGPGLVKPSETLSLTCTVSGGSVSSGSYYWSWIRQPPGKGLEW |
| | IGYIYYSGSTNYNPSLKSRVTISVDTSKNQFSLKLSSVTAADTAVYYCAR |
| | DFYCTNWYFDLWGRGTLVTVSSGGGGSGGGGSGGGGSGGDIQMTQSPS |
| | SLSASVGDRVTITCRASQSISSYLNWYQQKPGKAPKLLIYAASSLQSGVP |
| | SRFSGSGSGTDFTLTISSLQPEDFATYYCQQSYSTPLTFGGGTKVEIK |
| | (SEQ ID NO: 396) |
| 18 | QVQLQESGPGLVKPSETLSLTCTVSGGSISSYYWSWIRQPPGKGLEWIGY |
| | IYYSGSTNYNPSLKSRVTISVDTSKNQFSLKLSSVTAADTAVYYCARESS |
| | SGSYWYFDLWGRGTLVTVSSGGGGSGGGGSGGGGSGGDIQMTQSPSSL |
| | SASVGDRVTITCRASQSISSYLNWYQQKPGKAPKLLIYAASSLQSGVPSR |
| | FSGSGSGTDFTLTISSLQPEDFATYYCQQSYSTPLTFGGGTKVEIK (SEQ |
| | ID NO: 397) |
| 19 | EVQLVQSGAEVKKPGESLKISCKGSGYSFTSYWIGWVRQMPGKGLEWM |
| | GIIYPGDSDTRYSPSFQGQVTISADKSISTAYLQWSSLKASDTAMYYCAR |
| | DSGYKYNLYYYYYYMDVWGKGTTVTVSSGGGGSGGGGSGGGGSGGD |
| | IQMTQSPSSLSASVGDRVTITCRASQSISSYLNWYQQKPGKAPKLLIYAA |
| | SSLQSGVPSRFSGSGSGTDFTLTISSLQPEDFATYYCQQSYSTPLTFGGGT |
| | KVEIK (SEQ ID NO: 398) |
| 20 | QVQLVQSGAEVKKPGASVKVSCKASGYTFTSYGISWVRQAPGQGLEW |
| | MGWISAYNGNTNYAQKLQGRVTMTTDTSTSTAYMELRSLRSDDTAVY |
| | YCARGGDLSHYYYYMDVWGKGTTVTVSSGGGGSGGGGSGGGGSGGQ |
| | TVVTQEPSLTVSPGGTVTLTCASSTGAVTSGYYPNWFQQKPGQAPRALI |
| | YSTSNKHSWTPARFSGSLLGGKAALTLSGVQPEDEAEYYCLLYYGGAQ |
| | WVFGGGTKLTVL (SEQ ID NO: 399) |
| 21 | QVQLVQSGAEVKKPGASVKVSCKASGYTFTSYGISWVRQAPGQGLEW |
| | MGWISAYNGNTNYAQKLQGRVTMTTDTSTSTAYMELRSLRSDDTAVY |
| | YCARENRRYNSCYYFDYWGQGTLVTVSSGGGGSGGGGSGGGGSGGDI |
| | QMTQSPSSLSASVGDRVTITCRASQSISSYLNWYQQKPGKAPKLLIYAAS |
| | SLQSGVPSRFSGSGSGTDFTLTISSLQPEDFATYYCQQSYSTPLTFGGGTK |
| | VEIK (SEQ ID NO: 400) |
| 22 | QVQLVQSGAEVKKPGASVKVSCKASGYTFTSYGISWVRQAPGQGLEW |
| | MGWISAYNGNTNYAQKLQGRVTMTTDTSTSTAYMELRSLRSDDTAVY |
| | YCARGGDLSHYYYYLDVWGKGTTVTVSSGGGGSGGGGSGGGGSGGQT |
| | VVTQEPSLTVSPGGTVTLTCASSTGAVTSGYYPNWFQQKPGQAPRALIY |
| | STSNKHSWTPARFSGSLLGGKAALTLSGVQPEDEAEYYCLLYYGGAQW |
| | VFGGGTKLTVL (SEQ ID NO: 401) |
| 23 | EVQLVESGGGLVQPGGSLRLSCAASGFTVSSNYMSWVRQAPGKGLEWV |
| | SVIYSGGSTYYADSVKGRFTISRDNSKNTLYLQMNSLRAEDTAVYYCAR |
| | ATLLSLSYDAFDIWGQGTMVTVSSGGGGSGGGGSGGGGSGGDIQMTQS |
| | PSSLSASVGDRVTITCRASQSISSYLNWYQQKPGKAPKLLIYAASSLQSG |
| | VPSRFSGSGSGTDFTLTISSLQPEDFATYYCQQSYSTPLTFGGGTKVEIK |
| | (SEQ ID NO: 402) |
| 24 | QVQLVQSGAEVKKPGASVKVSCKASGYTFTSYGISWVRQAPGQGLEW |
| | MGWISAYNGNTNYAQKLQGRVTMTTDTSTSTAYMELRSLRSDDTAVY |
| | YCARGGDLSHYYYMDVWGKGTTVTVSSGGGGSGGGGSGGGGSGGQT |
| | VVTQEPSLTVSPGGTVTLTCASSTGAVTSGYYPNWFQQKPGQAPRALIY |
| | STSNKHSWTPARFSGSLLGGKAALTLSGVQPEDEAEYYCLLYYGGAQW |
| | VFGGGTKLTVL(SEQ ID NO: 403) |
| 25 | EVQLVQSGAEVKKPGESLKISCKGSGYSFTSYWIGWVRQMPGKGLEWM |
| | GIIYPGDSDTRYSPSFQGQVTISADKSISTAYLQWSSLKASDTAMYYCAR |
| | ERDRWFDPWGQGTLVTVSSGGGGSGGGGSGGGGSGGDIQMTQSPSSLS |
| | ASVGDRVTITCRASQSISSYLNWYQQKPGKAPKLLIYAASSLQSGVPSRF |
| | SGSGSGTDFTLTISSLQPEDFATYYCQQSYSTPLTFGGGTKVEIK (SEQ ID |
| | NO: 404) |
| 26 | QVQLVQSGAEVKKPGASVKVSCKASGYTFTSYGISWVRQAPGQGLEW |
| | MGWISAYNGNTNYAQKLQGRVTMTTDTSTSTAYMELRSLRSDDTAVY |
| | YCARETPPSLGAFDIWGQGTMVTVSSGGGGSGGGGSGGGGSGGQSALT |
| | QPPSASGSPGQSVTISCTGTSSDVGGYNYVSWYQQHPGKAPKLMIYEVS |
| | KRPSGVPDRFSGSKSGNTASLTVSGLQAEDEADYYCSSYAGSNNWVFG |
| | GGTKLTVL (SEQ ID NO: 405) |
| 27 | QLQLQESGPGLVKPSETLSLTCTVSGGSISSSSYYWGWIRQPPGKGLEWI |
| | GSIYYSGSTYYNPSLKSRVTISVDTSKNQFSLKLSSVTAADTAVYYCARE |
| | AYCLSDSYWYFDLWGRGTLVTVSSGGGGSGGGGSGGGGSGGQSVLTQ |
| | PPSASGTPGQRVTISCSGSSSNIGSNTVNWYQQLPGTAPKLLIYSNNQRPS |
| | GVPDRFSGSKSGTSASLAISGLQSEDEADYYCAAWDDSLNGWVFGGGT |
| | KLTVL (SEQ ID NO: 406) |
| 28 | QVQLQESGPGLVKPSQTLSLTCTVSGGSISSGGYYWSWIRQPPGKGLEWI |
| | GYIYYSGSTYYNPSLKSRVTISVDTSKNQFSLKLSSVTAADTAVYYCARE |
| | SWKYFYPRGYMDVWGKGTTVTVSSGGGGSGGGGSGGGGSGGDIQMT |
| | QSPSSLSASVGDRVTITCRASQSISSYLNWYQQKPGKAPKLLIYAASSLQS |
| | GVPSRFSGSGSGTDFTLTISSLQPEDFATYYCQQSYSTPLTFGGGTKVEIK |
| | (SEQ ID NO: 407) |

HLA-A*01 scFv Sequences

| | |
|---|---|
| A1-9 | QVQLVQSGAEVKKPGASVKVSCKASGYTFTSYGISWVRQAPGQGLEW |
| | MGWISAYNGNTNYAQKLQGRVTMTTDTSTSTAYMELRSLRSDDTAVY |
| | YCARGGWTAWYYYMDVWGKGTTVTVSSGGGGSGGGGSGGGGSGGQ |
| | TVVTQEPSLTVSPGGTVTLTCASSTGAVTSGYYPNWFQQKPGQAPRALI |
| | YSTSNKHSWTPARFSGSLLGGKAALTLSGVQPEDEAEYYCLLYYGGAQ |
| | WVFGGGTKLTVL (SEQ ID NO: 408) |
| A1-8 | EVQLVESGGGLVQPGGSLRLSCAASGFTFSSYSMNWVRQAPGKGLEWV |
| | SYISSSSSTIYYADSVKGRFTISRDNAKNSLYLQMNSLRAEDTAVYYCAR |
| | AKYYYMDVWGKGTTVTVSSGGGGSGGGGSGGGGSGGQSVLTQPPSAS |
| | GTPGQRVTISCSGSSSNIGSNTVNWYQQLPGTAPKLLIYSNNQRPSGVPD |
| | RFSGSKSGTSASLAISGLQSEDEADYYCAAWDDSLNGWVFGGGTKLTVL |
| | (SEQ ID NO: 409) |
| A1-7 | QVQLQESGPGLVKPSQTLSLTCTVSGGSISSGGYYWSWIRQPPGKGLEWI |
| | GYIYYSGSTYYNPSLKSRVTISVDTSKNQFSLKLSSVTAADTAVYYCARD |
| | QVDKNTYYYYMDVWGKGTTVTVSSGGGGSGGGGSGGGGSGGDIQMT |
| | QSPSSLSASVGDRVTITCRASQSISSYLNWYQQKPGKAPKLLIYAASSLQS |
| | GVPSRFSGSGSGTDFTLTISSLQPEDFATYYCQQSYSTPLTFGGGTKVEIK |
| | (SEQ ID NO: 410) |
| A1-6 | QVQLVESGGGLVKPGGSLRLSCAASGFTFSDYYMSWIRQAPGKGLEWV |
| | SYISSSGSTIYYADSVKGRFTISRDNAKNSLYLQMNSLRAEDTAVYYCAR |
| | ACQLAEYFQHWGQGTLVTVSSGGGGSGGGGSGGGGSGGDIQMTQSPSS |
| | VSASVGDRVTITCRASQGISSWLAWYQQKPGKAPKLLIYAASSLQSGVP |
| | SRFSGSGSGTDFTLTISSLQPEDFATYYCQQANSFPLTFGGGTKVEIK |
| | (SEQ ID NO: 411) |
| A1-5 | QVQLQESGPGLVKPSQTLSLTCTVSGGSISSGGYYWSWIRQPPGKGLEWI |
| | GYIYYSGSTYYNPSLKSRVTISVDTSKNQFSLKLSSVTAADTAVYYCARD |
| | RVDKNTSYYYMDVWGKGTTVTVSSGGGGSGGGGSGGGGSGGDIQMT |
| | QSPSSLSASVGDRVTITCRASQSISSYLNWYQQKPGKAPKLLIYAASSLQS |
| | GVPSRFSGSGSGTDFTLTISSLQPEDFATYYCQQSYSTPLTFGGGTKVEIK |
| | (SEQ ID NO: 412) |
| A1-4 | QVQLQESGPGLVKPSDTLSLTCAVSGYSISSSNWWGWIRQPPGKGLEWI |
| | GYIYYSGSTYYNPSLKSRVTMSVDTSKNQFSLKLSSVTAVDTAVYYCAR |
| | RVQLKLVHWFDPWGQGTLVTVSSGGGGSGGGGSGGGGSGGDIQMTQS |
| | PSSLSASVGDRVTITCRASQSISSYLNWYQQKPGKAPKLLIYAASSLQSG |
| | VPSRFSGSGSGTDFTLTISSLQPEDFATYYCQQSYSTPLTFGGGTKVEIK |
| | (SEQ ID NO: 413) |
| A1-3 | QVQLVQSGAEVKKPGASVKVSCKASGYTFTSYDINWVRQATGQGLEW |
| | MGWMNPNSGNTGYAQKFQGRVTMTRNTSISTAYMELSSLRSEDTAVY |
| | YCATYYDYVTVFYFQHWGQGTLVTVSSGGGGSGGGGSGGGGSGGDIQ |
| | MTQSPSSLSASVGDRVTITCRASQSISSYLNWYQQKPGKAPKLLIYAASS |
| | LQSGVPSRFSGSGSGTDFTLTISSLQPEDFATYYCQQSYSTPLTFGGGTKV |
| | EIK (SEQ ID NO: 414) |
| A1-2 | QLQLQESGSGLVKPSQTLSLTCAVSGGSISSGGYSWSWIRQPPGKGLEWI |
| | GYIYHSGSTYYNPSLKSRVTISVDRSKNQFSLKLSSVTAADTAVYYCARE |
| | SYPSFYAFDIWGQGTMVTVSSGGGGSGGGGSGGGGSGGDIQMTQSPSSL |
| | SASVGDRVTITCRASQSISSYLNWYQQKPGKAPKLLIYAASSLQSGVPSR |
| | FSGSGSGTDFTLTISSLQPEDFATYYCQQSYSTPLTFGGGTKVEIK (SEQ |
| | ID NO: 415) |
| A1-1 | QITLKESGPTLVKPTQTLTLTCTFSGFSLSTSGVGVGWIRQPPGKALEWL |
| | ALIYWNDDKRYSPSLKSRLTITKDTSKNQVVLTMTNMDPVDTATYYCA |
| | HSNMWSYSLNDYYFDYWGQGTLVTVSSGGGGSGGGGSGGGGSGGDIQ |
| | MTQSPSSLSASVGDRVTITCRASQSISSYLNWYQQKPGKAPKLLIYAASS |
| | LQSGVPSRFSGSGSGTDFTLTISSLQPEDFATYYCQQSYSTPLTFGGGTKV |
| | EIK (SEQ ID NO: 416) |

[0143] Exemplary heavy chain and light chain CDRs (CDR-H1, CDR-H2 and CDR-H3, or CDR-L1, CDR-L2 and CDR-L3, respectively) for HLA-A*02 antigen binding domains are shown in Table 8 below.

TABLE 8
HLA-A*02 CDR Sequences

| CDR-L1 | CDR-L2 | CDR-L3 | CDR-H1 | CDR-H2 | CDR-H3 |
|---|---|---|---|---|---|
| RSSQSIV | KVSNRFS | FQGSHVP | ASGYTFT | WIYPGNVN | EEITYAMD |
| HSNGNT | GVPDR | RT (SEQ ID | SYHIH | TEYNEKFK | Y (SEQ ID |
| YLE (SEQ | (SEQ ID | NO: 92) | (SEQ ID | GK (SEQ ID | NO: 101) |
| ID NO: 87) | NO: 90) | | NO: 95) | NO: 98) | |
| RSSQSIV | KVSNRFS | FQGSHVP | ASGYTFT | WIYPGNVN | EEITYAMD |
| HSNGNT | GVPAR | RT (SEQ ID | SYHIH | TEYNEKFK | Y (SEQ ID |
| YLE (SEQ | (SEQ ID | NO: 92) | (SEQ ID | GK (SEQ ID | NO: 101) |
| ID NO: 87) | NO: 91) | | NO: 95) | NO: 98) | |
| SSSQSIV | KVSNRFS | HQGSHVP | ASGYTFT | YIYPGNVN | EEITYAMD |
| HSNGNT | GVPDR | RT (SEQ ID | SYHMH | TEYNEKFK | Y (SEQ ID |
| YME (SEQ | (SEQ ID | NO: 93) | (SEQ ID | GK (SEQ ID | NO: 101) |
| ID NO: 88) | NO: 90) | | NO: 96) | NO: 99) | |
| RSSQSIV | KVSNRFS | MQGSHVP | SGYTFTS | WIYPGDGS | EGTYYAMD |
| HSNGNT | GVPDR | RT (SEQ ID | YHMH | TQYNEKFK | Y (SEQ ID |
| YLD (SEQ | (SEQ ID | NO: 94) | (SEQ ID | G (SEQ ID | NO: 102) |
| ID NO: 89) | NO: 90) | | NO: 97) | NO: 100) | |
| RSSQSIV | KVSNRFS | FQGSHVP | SYHIH | WIYPGNVN | EEITYAMD |
| HSNGNT | (SEQ ID | RT (SEQ ID | (SEQ ID | TEYNEKFK | Y (SEQ ID |
| YLE (SEQ | NO: 565) | NO: 92) | NO: 566) | G (SEQ ID | NO: 101) |
| ID NO: 87 | | | | NO: 567) | |

[0144] In some embodiments, the scFv comprises the complementarity determined regions (CDRs) of any one of SEQ ID NOS: 87-102. In some embodiments, the scFv comprises a sequence at least 95% identical to any one of SEQ ID NOS: 87-102. In some embodiments, the scFv comprises a sequence identical to any one of SEQ ID NOS: 87-102. In some embodiments, the heavy chain of the antibody comprises the heavy chain CDRs of any one of SEQ ID NOS: 95-102, and wherein the light chain of the antibody comprises the light chain CDRs of any one of SEQ ID NOS: 87-94. In some embodiments, the heavy chain of the antibody comprises a sequence at least 95% identical to the heavy chain portion of any one of SEQ ID NOS: 95-102, and wherein the light chain of the antibody comprises a sequence at least 95% identical to the light chain portion of any one of SEQ ID NOS: 87-94.

[0145] Additional exemplary heavy chain and light chain CDRs (CDR-H1, CDR-H2 and CDR-H3, or CDR-L1, CDR-L2 and CDR-L3, respectively) for HLA-A*03, HLA-B*07, HLA-A*11, HLA-C*07 and HLA-A*01 Ligand Binding Domains binding domains are shown in Table 9 below.

TABLE 9
CDRs Of HLA-A*03, HLA-B*07, HLA-A*11, HLA-C*07 and HLA-A*01 Ligand
Binding Domains

| | | | | | |
|---|---|---|---|---|---|
| CDR-L1 | CDR-L2 | CDR-L3 | CDR-H1 | CDR-H2 | CDR-H3 |

HLA-A*03 CDRs

| | | | | | |
|---|---|---|---|---|---|
| RASQSISSY | AASSLQS | QQSYSTPL | SYGIS | WISAYNGNT | ERVSQRGAF |
| LN (SEQ ID | (SEQ ID NO: | T (SEQ ID | (SEQ ID | NYAQKLQG | DI (SEQ ID |
| NO: 417) | 424) | NO: 430) | NO: 438) | (SEQ ID NO: | NO: 478) |
| | | | | 459) | |
| RASQSISSY | AASSLQS | QQSYSTPL | SYSMN | YISSSSSTIYY | GNPDKDPFD |
| LN (SEQ ID | (SEQ ID NO: | T (SEQ ID | (SEQ ID | ADSVKG | Y (SEQ ID |
| NO: 417) | 424) | NO: 430) | NO: 439) | (SEQ ID NO: | NO: 479) |
| | | | | 460) | |
| RASQSISSY | AASSLQS | QQSYSTPL | SGSYYW | YIYYSGSTNY | DFYCTNWYF |
| LN (SEQ ID | (SEQ ID NO: | T (SEQ ID | S (SEQ ID | NPSLKS (SEQ | DL (SEQ ID |
| NO: 417) | 424) | NO: 430) | NO: 440) | ID NO: 461) | NO: 480) |
| RASQSISSY | AASSLQS | QQSYSTPL | SYYWS | YIYYSGSTNY | ESSSGSYWY |
| LN (SEQ ID | (SEQ ID NO: | T (SEQ ID | (SEQ ID | NPSLKS (SEQ | FDL (SEQ ID |
| NO: 417) | 424) | NO: 430) | NO: 441) | ID NO: 461) | NO: 481) |
| RASQSISSY | AASSLQS | QQSYSTPL | SYWIG | IIYPGDSDTR | DSGYKYNLY |
| LN (SEQ ID | (SEQ ID NO: | T (SEQ ID | (SEQ ID | YSPSFQG | YYYYYMDV |
| NO: 417) | 424) | NO: 430) | NO: 442) | (SEQ ID NO: | (SEQ ID NO: |
| | | | | 462) | 482) |
| ASSTGAVT | STSNKHS | LLYYGGA | SYGIS | WISAYNGNT | GGDLSHYYY |
| SGYYPN | (SEQ ID NO: | QWV (SEQ | (SEQ ID | NYAQKLQG | YMDV (SEQ |
| (SEQ ID NO: | 425) | ID NO: 431) | NO: 438) | (SEQ ID NO: | ID NO: 483) |
| 418) | | | | 459) | |
| RASQSISSY | AASSLQS | QQSYSTPL | SYGIS | WISAYNGNT | ENRRYNSCY |
| LN (SEQ ID | (SEQ ID NO: | T (SEQ ID | (SEQ ID | NYAQKLQG | YFDY (SEQ |
| NO: 417) | 424) | NO: 430) | NO: 438) | (SEQ ID NO: | ID NO: 484) |
| | | | | 459) | |
| ASSTGAVT | STSNKHS | LLYYGGA | SYGIS | WISAYNGNT | GGDLSHYYY |
| SGYYPN | (SEQ ID NO: | QWV (SEQ | (SEQ ID | NYAQKLQG | YLDV (SEQ |
| (SEQ ID NO: | 425) | ID NO: 431) | NO: 438) | (SEQ ID NO: | ID NO: 485) |
| 418) | | | | 459) | |
| RASQSISSY | AASSLQS | QQSYSTPL | SNYMS | VIYSGGSTYY | ATLLSLSYD |
| LN (SEQ ID | (SEQ ID NO: | T (SEQ ID | (SEQ ID | ADSVKG | AFDI (SEQ ID |
| NO: 417) | 424) | NO: 430) | NO: 443) | (SEQ ID NO: | NO: 486) |
| | | | | 463) | |
| ASSTGAVT | STSNKHS | LLYYGGA | SYGIS | WISAYNGNT | GGDLSHYYY |
| SGYYPN | (SEQ ID NO: | QWV (SEQ | (SEQ ID | NYAQKLQG | MDV (SEQ ID |
| (SEQ ID NO: | 425) | ID NO: 431) | NO: 438) | (SEQ ID NO: | NO: 487) |
| 418) | | | | 459) | |
| RASQSISSY | AASSLQS | QQSYSTPL | SYWIG | IIYPGDSDTR | ERDRWFDP |
| LN (SEQ ID | (SEQ ID NO: | T (SEQ ID | (SEQ ID | YSPSFQG | (SEQ ID NO: |
| NO: 417) | 424) | NO: 430) | NO: 442) | (SEQ ID NO: | 488) |
| | | | | 462) | |
| TGTSSDVG | EVSKRPS | SSYAGSN | SYGIS | WISAYNGNT | ETPPSLGAFD |
| GYNYVS | (SEQ ID NO: | NWV (SEQ | (SEQ ID | NYAQKLQG | I (SEQ ID NO: |
| (SEQ ID NO: | 426) | ID NO: 432) | NO: 438) | (SEQ ID NO: | 489) |
| 419) | | | | 459) | |
| SGSSSNIGS | SNNQRPS | AAWDDSL | SSSYYW | SIYYSGSTYY | EAYCLSDSY |
| NTVN (SEQ | (SEQ ID NO: | NGWV | G (SEQ ID | NPSLKS (SEQ | WYFDL (SEQ |
| ID NO: 420 | 427) | (SEQ ID | NO: 444) | ID NO: 464) | ID NO: 490) |
| | | NO: 433) | | | |
| RASQSISSY | AASSLQS | QQSYSTPL | SGGYYW | YIYYSGSTYY | ESWKYFYPR |
| LN (SEQ ID | (SEQ ID NO: | T (SEQ ID | S (SEQ ID | NPSLKS (SEQ | GYMDV |
| NO: 417) | 424) | NO: 430) | NO: 445) | ID NO: 465) | (SEQ ID NO: |
| | | | | | 491) |

HLA-B*07 CDRs

| | | | | | |
|---|---|---|---|---|---|
| RASENIYS | AATYLPD | QHFWVTP | SGYSWH | YIHFSGSTHY | GGVVSHYA |
| NLA (SEQ | (SEQ ID NO: | YT (SEQ ID | (SEQ ID | HPSLKS (SEQ | MDC (SEQ ID |
| ID NO: 421) | 428) | NO: 434) | NO: 446) | ID NO: 466) | NO: 492) |

HLA-A*11 CDRs

| | | | | | |
|---|---|---|---|---|---|
| RASQSISSY | AASSLQS | QQSYSTPL | SGGYYW | YIYYSGSTYY | HYYYYYMD |
| LN (SEQ ID | (SEQ ID NO: | T (SEQ ID | S (SEQ ID | NPSLKS (SEQ | V (SEQ ID |
| NO: 417) | 424) | NO: 430) | NO: 445) | ID NO: 465) | NO: 493) |
| RASQSISSY | AASSLQS | QQSYSTPL | TSGVGV | LIYWNDDKR | KTTSFYFDY |
| LN (SEQ ID | (SEQ ID NO: | T (SEQ ID | G (SEQ ID | YSPSLKS | (SEQ ID NO: |
| NO: 417) | 424) | NO: 430) | NO: 447) | (SEQ ID NO: | 494) |
| | | | | 467) | |
| RASQSISSY | AASSLQS | QQSYSTPL | SGGYYW | YIYYSGSTYY | HYYYYMDV |
| LN (SEQ ID | (SEQ ID NO: | T (SEQ ID | S (SEQ ID | NPSLKS (SEQ | (SEQ ID NO: |
| NO: 417) | 424) | NO: 430) | NO: 445) | ID NO: 465) | 495) |
| RASQSISSY | AASSLQS | QQSYSTPL | SYWMH | RINSDGSSTS | GVLLYNWF |
| LN (SEQ ID | (SEQ ID NO: | T (SEQ ID | (SEQ ID | YADSVKG | DP (SEQ ID |
| NO: 417) | 424) | NO: 430) | NO: 448) | (SEQ ID NO: | NO: 496) |
| | | | | 468) | |
| RASQSISSY | AASSLQS | QQSYSTPL | SGGYYW | YIYYSGSTYY | HYYYYYLD |
| LN (SEQ ID | (SEQ ID NO: | T (SEQ ID | S (SEQ ID | NPSLKS (SEQ | V (SEQ ID |
| NO: 417) | 424) | NO: 430) | NO: 445) | ID NO: 465) | NO: 497) |
| RASQSISSY | AASSLQS | QQSYSTPL | SYDMH | AIGTAGDTYY | DLPGSYWYF |
| LN (SEQ ID | (SEQ ID NO: | T (SEQ ID | (SEQ ID | PGSVKG (SEQ | DL (SEQ ID |
| NO: 417) | 424) | NO: 430) | NO: 449) | ID NO: 469) | NO: 498) |
| RASQSISSY | AASSLQS | QQSYSTPL | SYAMH | WINAGNGNT | EGNGANPDA |
| LN (SEQ ID | (SEQ ID NO: | T (SEQ ID | (SEQ ID | KYSQKFQG | FDI (SEQ ID |
| NO: 417) | 424) | NO: 430) | NO: 450) | (SEQ ID NO: | NO: 499) |
| | | | | 470) | |
| RASQSISSY | AASSLQS | QQSYSTPL | TSGVGV | LIYWNDDKR | RHMRLSCFD |
| LN (SEQ ID | (SEQ ID NO: | T (SEQ ID | G (SEQ ID | YSPSLKS | Y (SEQ ID |
| NO: 417) | 424) | NO: 430) | NO: 447) | (SEQ ID NO: | NO: 500) |
| | | | | 467) | |
| RASQSISSY | AASSLQS | QQSYSTPL | SGGYYW | YIYYSGSTYY | HYYYYSMD |
| LN (SEQ ID | (SEQ ID NO: | T (SEQ ID | S (SEQ ID | NPSLKS (SEQ | V (SEQ ID |
| NO: 417) | 424) | NO: 430) | NO: 445) | ID NO: 465) | NO: 501) |

HLA-C*07 CDRs

| | | | | | |
|---|---|---|---|---|---|
| RASQSISSY | AASSLQS | QQSYSTPL | SYAMS | AISGSGGSTY | SFDWFDP |
| LN (SEQ ID | (SEQ ID NO: | T (SEQ ID | (SEQ ID | YADSVKG | (SEQ ID NO: |
| NO: 417) | 424) | NO: 430) | NO: 451) | (SEQ ID NO: | 502) |
| | | | | 471) | |
| RASQSISSY | AASSLQS | QQSYSTPL | SGGYYW | YIYYSGSTYY | ERSISPYYYY |
| LN (SEQ ID | (SEQ ID NO: | T (SEQ ID | S (SEQ ID | NPSLKS (SEQ | YMDV (SEQ |
| NO: 417) | 424) | NO: 430) | NO: 445) | ID NO: 465) | ID NO: 503) |
| SGSSSNIGS | SNNQRPS | AAWDDSL | SSSYYW | SIYYSGSTYY | DSVIWYWFD |
| NTVN (SEQ | (SEQ ID NO: | NGWV | G (SEQ ID | NPSLKS (SEQ | P (SEQ ID |
| ID NO: 420) | 427) | (SEQ ID | NO: 444) | ID NO: 464) | NO: 504) |
| | | NO: 433) | | | |
| RASQSISSY | AASSLQS | QQSYSTPL | SGGYYW | YIYYSGSTYY | EEILPRLSYY |
| LN (SEQ ID | (SEQ ID NO: | T (SEQ ID | S (SEQ ID | NPSLKS (SEQ | YYMDV |
| NO: 417) | 424) | NO: 430) | NO: 445) | ID NO: 465) | (SEQ ID NO: |
| | | | | | 505) |
| RASQSISSY | AASSLQS | QQSYSTPL | SYAMN | WINTNTGNPT | GGRAHSSW |
| LN (SEQ ID | (SEQ ID NO: | T (SEQ ID | (SEQ ID | YAQGFTG | YFDL (SEQ |
| NO: 417) | 424) | NO: 430) | NO: 452) | (SEQ ID NO: | ID NO: 506) |
| | | | | 472) | |
| RASQSISSY | AASSLQS | QQSYSTPL | SGGYYW | YIYYSGSTYY | DRIKILPRLG |
| LN (SEQ ID | (SEQ ID NO: | T (SEQ ID | S (SEQ ID | NPSLKS (SEQ | YYYYMDV |
| NO: 417) | 424) | NO: 430) | NO: 445) | ID NO: 465) | (SEQ ID NO: |
| | | | | | 507) |
| RASQSISSY | AASSLQS | QQSYSTPL | SGGYYW | YIYYSGSTYY | DTVIHYYYY |
| LN (SEQ ID | (SEQ ID NO: | T (SEQ ID | S (SEQ ID | NPSLKS (SEQ | MDV (SEQ ID |
| NO: 417) | 424) | NO: 430) | NO: 445) | ID NO: 465) | NO: 508) |
| RASQSISSY | AASSLQS | QQSYSTPL | SGGYYW | YIYYSGSTYY | DVIVEVFLS |
| LN (SEQ ID | (SEQ ID NO: | T (SEQ ID | S (SEQ ID | NPSLKS (SEQ | YYYYMDV |
| NO: 417) | 424) | NO: 430) | NO: 445) | ID NO: 465) | (SEQ ID NO: |
| | | | | | 509) |
| RASQSISSY | AASSLQS | QQSYSTPL | SGGYYW | YIYYSGSTYY | DIFIHYYYY |
| LN (SEQ ID | (SEQ ID NO: | T (SEQ ID | S (SEQ ID | NPSLKS (SEQ | MDV (SEQ ID |
| NO: 417) | 424) | NO: 430) | NO: 445) | ID NO: 465) | NO: 510) |
| RASQSISSY | AASSLQS | QQSYSTPL | SYSMN | YISSSSSTIYY | DGTFYSYSP |
| LN (SEQ ID | (SEQ ID NO: | T (SEQ ID | (SEQ ID | ADSVKG | YYFDY (SEQ |
| NO: 417) | 424) | NO: 430) | NO: 439) | (SEQ ID NO: | ID NO: 511) |
| | | | | 460) | |
| RASQSISSY | AASSLQS | QQSYSTPL | SGGYYW | YIYYSGSTYY | EWIKILPRLG |
| LN (SEQ ID | (SEQ ID NO: | T (SEQ ID | S (SEQ ID | NPSLKS (SEQ | YYYYMDV |
| NO: 417) | 424) | NO: 430) | NO: 445) | ID NO: 465) | (SEQ ID NO: |
| | | | | | 512) |
| RASQSISSY | AASSLQS | QQSYSTPL | SGGYYW | YIYYSGSTYY | DRSLYYYYY |
| LN (SEQ ID | (SEQ ID NO: | T (SEQ ID | S (SEQ ID | NPSLKS (SEQ | MDV (SEQ ID |
| NO: 417) | 424) | NO: 430) | NO: 445) | ID NO: 465) | NO: 513) |
| RASQSISSY | AASSLQS | QQSYSTPL | SGGYYW | YIYYSGSTYY | DKILAPNYY |
| LN (SEQ ID | (SEQ ID NO: | T (SEQ ID | S (SEQ ID | NPSLKS (SEQ | YYMDV |
| NO: 417) | 424) | NO: 430) | NO: 445) | ID NO: 465) | (SEQ ID NO: |
| | | | | | 514) |
| RASQSISSY | AASSLQS | QQSYSTPL | SGGYYW | YIYYSGSTYY | EKSWKYFY |
| LN (SEQ ID | (SEQ ID NO: | T (SEQ ID | S (SEQ ID | NPSLKS (SEQ | YYYYYMDV |
| NO: 417) | 424) | NO: 430) | NO: 445) | ID NO: 465) | (SEQ ID NO: |
| | | | | | 515) |
| RASQSISSY | AASSLQS | QQSYSTPL | SGGYYW | YIYYSGSTYY | ENTSTIPYYY |
| LN (SEQ ID | (SEQ ID NO: | T (SEQ ID | S (SEQ ID | NPSLKS (SEQ | YYMDV |
| NO: 417) | 424) | NO: 430) | NO: 445) | ID NO: 465) | (SEQ ID NO: |
| | | | | | 516) |
| RASQSISSY | AASSLQS | QQSYSTPL | SGGYYW | YIYYSGSTYY | EDVDKNTST |
| LN (SEQ ID | (SEQ ID NO: | T (SEQ ID | S (SEQ ID | NPSLKS (SEQ | IYYYYYYM |
| NO: 417) | 424) | NO: 430) | NO: 445) | ID NO: 465) | DV (SEQ ID |
| | | | | | NO: 517) |
| RASQGISSA | DASSLES | QQFNSYPL | DYYMS | YISSSGSTIYY | DGGDIVSSS |
| LA (SEQ ID | (SEQ ID NO: | T (SEQ ID | (SEQ ID | ADSVKG | AIYWYFDL |
| NO: 422) | 429) | NO: 435) | NO: 453) | (SEQ ID NO: | (SEQ ID NO: |
| | | | | 473) | 518) |
| RASQSISSY | AASSLQS | QQSYSTPL | SGGYYW | YIYYSGSTYY | DLILPPYYY |
| LN (SEQ ID | (SEQ ID NO: | T (SEQ ID | S (SEQ ID | NPSLKS (SEQ | YYMDV |
| NO: 417) | 424) | NO: 430) | NO: 445) | ID NO: 465) | (SEQ ID NO: |
| | | | | | 519) |
| RASQSISSY | AASSLQS | QQSYSTPL | SGGYYW | YIYYSGSTYY | ETWIKILPRY |
| LN (SEQ ID | (SEQ ID NO: | T (SEQ ID | S (SEQ ID | NPSLKS (SEQ | YYYYYYMD |
| NO: 417) | 424) | NO: 430) | NO: 445) | ID NO: 465) | V (SEQ ID |
| | | | | | NO: 520) |
| RASQSISSY | AASSLQS | QQSYSTPL | SGGYYW | YIYYSGSTYY | DLSRYYYYY |
| LN (SEQ ID | (SEQ ID NO: | T (SEQ ID | S (SEQ ID | NPSLKS (SEQ | MDV (SEQ ID |
| NO: 417) | 424) | NO: 430) | NO: 445) | ID NO: 465) | NO: 521) |
| RASQGISS | AASSLQS | QQYNSYP | SYSMN | YISSSSSTIYY | EHIVLCFDY |
| WLA (SEQ | (SEQ ID NO: | LT (SEQ ID | (SEQ ID | ADSVKG | (SEQ ID NO: |
| ID NO: 423) | 424) | NO: 436) | NO: 439) | (SEQ ID NO: | 522) |
| | | | | 460) | |
| RASQSISSY | AASSLQS | QQSYSTPL | SGGYYW | YIYYSGSTYY | DKILPRPYY |
| LN (SEQ ID | (SEQ ID NO: | T (SEQ ID | S (SEQ ID | NPSLKS (SEQ | YYYMDV |
| NO: 417) | 424) | NO: 430) | NO: 445) | ID NO: 465) | (SEQ ID NO: |
| | | | | | 523) |
| TGTSSDVG | EVSKRPS | SSYAGSN | SYGIS | WISAYNGNT | GSNEYFQH |
| GYNYVS | (SEQ ID NO: | NWV (SEQ | (SEQ ID | NYAQKLQG | (SEQ ID NO: |
| (SEQ ID NO: | 426) | ID NO: 432) | NO: 438) | (SEQ ID NO: | 524) |
| 419) | | | | 459) | |
| RASQSISSY | AASSLQS | QQSYSTPL | SYAMN | WINTNTGNPT | GTSYWYFDL |
| LN (SEQ ID | (SEQ ID NO: | T (SEQ ID | (SEQ ID | YAQGFTG | (SEQ ID NO: |
| NO: 417) | 424) | NO: 430) | NO: 452) | (SEQ ID NO: | 525) |
| | | | | 472) | |
| RASQSISSY | AASSLQS | QQSYSTPL | SGGYYW | YIYYSGSTYY | EEIVEVFYY |
| LN (SEQ ID | (SEQ ID NO: | T (SEQ ID | S (SEQ ID | NPSLKS (SEQ | YYMDV |
| NO: 417) | 424) | NO: 430) | NO: 445) | ID NO: 465) | (SEQ ID NO: |
| | | | | | 526) |
| RASQSISSY | AASSLQS | QQSYSTPL | SYAMS | AISGSGGSTY | VDDYYFDY |
| LN (SEQ ID | (SEQ ID NO: | T (SEQ ID | (SEQ ID | YADSVKG | (SEQ ID NO: |
| NO: 417) | 424) | NO: 430) | NO: 451) | (SEQ ID NO: | 527) |
| | | | | 471) | |
| RASQSISSY | AASSLQS | QQSYSTPL | SYWMH | RINSDGSSTS | STNILLSYTK |
| LN (SEQ ID | (SEQ ID NO: | T (SEQ ID | (SEQ ID | YADSVKG | AFDI (SEQ ID |
| NO: 417) | 424) | NO: 430) | NO: 44) | (SEQ ID NO: | NO: 528) |
| | | | | 468) | |
| RASQSISSY | AASSLQS | QQSYSTPL | SGGYYW | YIYYSGSTYY | DKTYYYYY |
| LN (SEQ ID | (SEQ ID NO: | T (SEQ ID | S (SEQ ID | NPSLKS (SEQ | YMDV (SEQ |
| NO: 417) | 424) | NO: 430) | NO: 445) | ID NO: 465) | ID NO: 529) |
| RASQSISSY | AASSLQS | QQSYSTPL | SGGYYW | YIYYSGSTYY | EKYFHDKYF |
| LN (SEQ ID | (SEQ ID NO: | T (SEQ ID | S (SEQ ID | NPSLKS (SEQ | HDYYYYYM |
| NO: 417) | 424) | NO: 430) | NO: 445) | ID NO: 465) | DV (SEQ ID |
| | | | | | NO: 530) |
| RASQSISSY | AASSLQS | QQSYSTPL | SGGYYW | YIYYSGSTYY | DTSVYYYYY |
| LN (SEQ ID | (SEQ ID NO: | T (SEQ ID | S (SEQ ID | NPSLKS (SEQ | MDV (SEQ ID |
| NO: 417) | 424) | NO: 430) | NO: 445) | ID NO: 465) | NO: 531) |
| RASQSISSY | AASSLQS | QQSYSTPL | SGGYYW | YIYYSGSTYY | EKILPYYYY |
| LN (SEQ ID | (SEQ ID NO: | T (SEQ ID | S (SEQ ID | NPSLKS (SEQ | YYMDV |
| NO: 417) | 424) | NO: 430) | NO: 445) | ID NO: 465) | (SEQ ID NO: |
| | | | | 532) | |
| SGSSSNIGS | SNNQRPS | AAWDDSL | SYSMN | YISSSSSTIYY | QWIYIYINPR |
| NTVN (SEQ | (SEQ ID NO: | NGWV | (SEQ ID | ADSVKG | GFIFLHDAFD |
| ID NO: 420) | 427) | (SEQ ID | NO: 439) | (SEQ ID NO: | I (SEQ ID NO: |
| | | NO: 433) | | 460) | 533) |
| RASQSISSY | AASSLQS | QQSYSTPL | SNSAAW | RTYYRSKWY | EDVDFHHDA |
| LN (SEQ ID | (SEQ ID NO: | T (SEQ ID | N (SEQ ID | NDYAVSVKS | FDI (SEQ ID |
| NO: 417) | 424) | NO: 430) | NO: 454) | (SEQ ID NO: | NO: 534) |
| | | | | 474) | |
| RASQSISSY | AASSLQS | QQSYSTPL | SGGYYW | YIYYSGSTYY | EGVDKNTST |
| LN (SEQ ID | (SEQ ID NO: | T (SEQ ID | S (SEQ ID | NPSLKS (SEQ | IYYYYYYM |
| NO: 417) | 424) | NO: 430) | NO: 445) | ID NO: 465) | DV (SEQ ID |
| | | | | | NO: 535) |
| RASQGISS | AASSLQS | QQYNSYP | SYSMN | YISSSSSTIYY | DRRGYFDL |
| WLA (SEQ | (SEQ ID NO: | LT (SEQ ID | (SEQ ID | ADSVKG | (SEQ ID NO: |
| ID NO: 423) | 424) | NO: 436) | NO: 439) | (SEQ ID NO: | 536) |
| | | | | 460) | |
| RASQSISSY | AASSLQS | QQSYSTPL | DYYMH | LVDPEDGETI | GIHVDIRSM |
| LN (SEQ ID | (SEQ ID NO: | T (SEQ ID | (SEQ ID | YAEKFQG | EDWFDP |
| NO: 417) | 424) | NO: 430) | NO: 455) | (SEQ ID NO: | (SEQ ID NO: |
| | | | | 475) | 537) |
| RASQSISSY | AASSLQS | QQSYSTPL | SGGYYW | YIYYSGSTYY | DIGTSYYYY |
| LN (SEQ ID | (SEQ ID NO: | T (SEQ ID | S (SEQ ID | NPSLKS (SEQ | MDV (SEQ ID |
| NO: 417) | 424) | NO: 430) | NO: 445) | ID NO: 465) | NO: 538) |
| RASQSISSY | AASSLQS | QQSYSTPL | SGGYYW | YIYYSGSTYY | EVVEVFLYY |
| LN (SEQ ID | (SEQ ID NO: | T (SEQ ID | S (SEQ ID | NPSLKS (SEQ | YYYMDV |
| NO: 417) | 424) | NO: 430) | NO: 445) | ID NO: 465) | (SEQ ID NO: |
| | | | | 539) | |
| RASQSISSY | AASSLQS | QQSYSTPL | SGGYYW | YIYYSGSTYY | DLYYYYYY |
| LN (SEQ ID | (SEQ ID NO: | T (SEQ ID | S (SEQ ID | NPSLKS (SEQ | YMDV (SEQ |
| NO: 417) | 424) | NO: 430) | NO: 445) | ID NO: 465) | ID NO: 540) |
| RASQSISSY | AASSLQS | QQSYSTPL | SGGYYW | YIYYSGSTYY | ESWKYFYPR |
| LN (SEQ ID | (SEQ ID NO: | T (SEQ ID | S (SEQ ID | NPSLKS (SEQ | GSIFIHYYYY |
| NO: 417) | 424) | NO: 430) | NO: 445) | ID NO: 465) | MDV (SEQ ID |
| | | | | | NO: 541) |
| RASQSISSY | AASSLQS | QQSYSTPL | SGGYYW | YIYYSGSTYY | DRIVEVFYY |
| LN (SEQ ID | (SEQ ID NO: | T (SEQ ID | S (SEQ ID | NPSLKS (SEQ | YYMDV |
| NO: 417) | 424) | NO: 430) | NO: 445) | ID NO: 465) | (SEQ ID NO: |
| | | | | | 542) |
| RASQSISSY | AASSLQS | QQSYSTPL | SGGYYW | YIYYSGSTYY | EKYFHDWL |
| LN (SEQ ID | (SEQ ID NO: | T (SEQ ID | S (SEQ ID | NPSLKS (SEQ | YYYYYMDV |
| NO: 417) | 424) | NO: 430) | NO: 445) | ID NO: 465) | (SEQ ID NO: |
| | | | | | 543) |
| RASQSISSY | AASSLQS | QQSYSTPL | SGGYYW | YIYYSGSTYY | DLVDKNTSY |
| LN (SEQ ID | (SEQ ID NO: | T (SEQ ID | S (SEQ ID | NPSLKS (SEQ | YYYYMDV |
| NO: 417) | 424) | NO: 430) | NO: 445) | ID NO: 465) | (SEQ ID NO: |
| | | | | | 544) |
| TGTSSDVG | EVSKRPS | SSYAGSN | SYGIS | WISAYNGNT | VQNEYFQH |
| GYNYVS | (SEQ ID NO: | NWV (SEQ | (SEQ ID | NYAQKLQG | (SEQ ID NO: |
| (SEQ ID NO: | 426) | ID NO: 432) | NO: 438) | (SEQ ID NO: | 545) |
| 419) | | | | 459) | |
| RASQGISS | AASSLQS | QQANSFPL | DYYMS | YISSSGSTIYY | ANWFDP |
| WLA (SEQ | (SEQ ID NO: | T (SEQ ID | (SEQ ID | ADSVKG | (SEQ ID NO: |
| ID NO: 423) | 424) | NO: 437) | NO: 453) | (SEQ ID NO: | 546) |
| | | | | 473) | |

HLA-A*01 CDRs

| | | | | | |
|---|---|---|---|---|---|
| ASSTGAVT | STSNKHS | LLYYGGA | SYGIS | WISAYNGNT | GGWTAWYY |
| SGYYPN | (SEQ ID NO: | QWV (SEQ | (SEQ ID | NYAQKLQG | YMDV (SEQ |
| (SEQ ID NO: | 425) | ID NO: 431) | NO: 438) | (SEQ ID NO: | ID NO: 547) |
| 418) | | | | 459) | |
| SGSSSNIGS | SNNQRPS | AAWDDSL | SYSMN | YISSSSSTIYY | AKYYYMDV |
| NTVN (SEQ | (SEQ ID NO: | NGWV | (SEQ ID | ADSVKG | (SEQ ID NO: |
| ID NO: 420) | 427) | (SEQ ID | NO: 439) | (SEQ ID NO: | 548) |
| | | NO: 433) | | 460) | |
| RASQSISSY | AASSLQS | QQSYSTPL | SGGYYW | YIYYSGSTYY | DQVDKNTY |
| LN (SEQ ID | (SEQ ID NO: | T (SEQ ID | S (SEQ ID | NPSLKS (SEQ | YYYMDV |
| NO: 417) | 424) | NO: 430) | NO: 445) | ID NO: 465) | (SEQ ID NO: |
| | | | | | 549) |
| RASQGISS | AASSLQS | QQANSFPL | DYYMS | YISSSGSTIYY | ACQLAEYFQ |
| WLA (SEQ | (SEQ ID NO: | T (SEQ ID | (SEQ ID | ADS VKG | H (SEQ ID |
| ID NO: 423) | 424) | NO: 437) | NO: 453) | (SEQ ID NO: | NO: 550) |
| | | | | 473) | |
| RASQSISSY | AASSLQS | QQSYSTPL | SGGYYW | YIYYSGSTYY | DRVDKNTSY |
| LN (SEQ ID | (SEQ ID NO: | T (SEQ ID | S (SEQ ID | NPSLKS (SEQ | YYMDV |
| NO: 417) | 424) | NO: 430) | NO: 445) | ID NO: 465) | (SEQ ID NO: |
| | | | | | 551) |
| RASQSISSY | AASSLQS | QQSYSTPL | SSNWWG | YIYYSGSTYY | RVQLKLVH |
| LN (SEQ ID | (SEQ ID NO: | T (SEQ ID | (SEQ ID | NPSLKS (SEQ | WFDP (SEQ |
| NO: 417) | 424) | NO: 430) | NO: 456) | ID NO: 465) | ID NO: 552) |
| RASQSISSY | AASSLQS | QQSYSTPL | SYDIN | WMNPNSGNT | YYDYVTVFY |
| LN (SEQ ID | (SEQ ID NO: | T (SEQ ID | (SEQ ID | GYAQKFQG | FQH (SEQ ID |
| NO: 417) | 424) | NO: 430) | NO: 457) | (SEQ ID NO: | NO: 553) |
| | | | | 476) | |
| RASQSISSY | AASSLQS | QQSYSTPL | SGGYSW | YIYHSGSTYY | ESYPSFYAF |
| LN (SEQ ID | (SEQ ID NO: | T (SEQ ID | S (SEQ ID | NPSLKS (SEQ | DI (SEQ ID |
| NO: 417) | 424) | NO: 430) | NO: 458) | ID NO: 477) | NO: 554) |
| RASQSISSY | AASSLQS | QQSYSTPL | TSGVGV | LIYWNDDKR | SNMWSYSL |
| LN (SEQ ID | (SEQ ID NO: | T (SEQ ID | G (SEQ ID | YSPSLKS | NDYYFDY |
| NO: 417) | 424) | NO: 430) | NO: 447) | (SEQ ID NO: | (SEQ ID NO: |
| | | | | 467) | 555) |

[0146] In some embodiments, the second, inhibitory ligand is HLA-A*02, and the inhibitory ligand binding domain comprises an HLA-A*02 antigen binding domain. In some embodiments, the second antigen binding domain binds HLA-A*02 independent of the peptide in a pMHC complex comprising HLA-A*02. In some embodiments, the HLA-A*02 antigen binding domain comprises an scFv domain. In some embodiments, the HLA-A*02 antigen binding domain comprises a sequence of any one of SEQ ID NOs: 63-74, 207, 209 or 211. In some embodiments, the HLA-A*02 ligand binding domain comprises a sequence at least 90%, at least 95% or at least 99% identical to a sequence of any one of SEQ ID NOs: 63-74, 207, 209 or 211.

[0147] In some embodiments, the non-target antigen comprises HLA-B*07, and the ligand binding domain of the second receptor comprises an HLA-B*07 ligand binding domain. In some embodiments, the ligand binding domain binds HLA-B*07 independent of the peptide in a pMHC complex comprising HLA-B*07. In some embodiments, the HLA-B*07 ligand binding domain comprises an scFv domain. In some embodiments, the HLA-B*07 ligand binding domain comprises a sequence of any one of the indicated B7 binding domains in Table 7. In some embodiments, the HLA-B*07 ligand binding domain comprises a sequence at least 90%, at least 95% or at least 99% identical to a sequence of any one of the indicated HLA-B*07 binding domains in Table 7 Table 9. In some embodiments, the HLA-B*07 scFv comprises any one of the indicated HLA-B*07 complementarity determined regions (CDRs) in Table 9. In some embodiments, the scFv comprises a sequence at least 95% identical to any one of the indicated HLA-B*07 scFv sequences in Table 7. In some embodiments, the scFv comprises a sequence identical to any one of the indicated HLA-B*07 scFv sequences in Table 7.

[0148] In some embodiments, the non-target antigen comprises HLA-A*11, and the ligand binding domain of the second receptor comprises an HLA-A*11 ligand binding domain. In some embodiments, the ligand binding domain binds HLA-A*11 independent of the peptide in a pMHC complex comprising HLA-A*11. In some embodiments, the HLA-A*11 ligand binding domain comprises an scFv domain. In some embodiments, the HLA-A*11 ligand binding domain comprises a sequence of any one of the indicated HLA-A*11 binding domains in Table 7. In some embodiments, the HLA-A*11 ligand binding domain comprises a sequence at least 90%, at least 95% or at least 99% identical to a sequence of any one of the indicated HLA-A*11 binding domains in Table 7. In some embodiments, the HLA-A*11 scFv comprises any one of the indicated HLA-A*11 complementarity determined regions (CDRs) in Table 9. In some embodiments, the scFv comprises a sequence at least 95% identical to any one of the indicated HLA-A*11 scFv sequences in Table 7. In some embodiments, the scFv comprises a sequence identical to any one of the indicated HLA-A*11 scFv sequences in Table 7.

[0149] In some embodiments, the non-target antigen comprises HLA-A*01, and the ligand binding domain of the second receptor comprises an HLA-A*01 ligand binding domain. In some embodiments, the ligand binding domain binds HLA-A*01 independent of the peptide in a pMHC complex comprising HLA-A*01. In some embodiments, the HLA-A*01 ligand binding domain comprises an scFv domain. In some embodiments, the HLA-A*01 ligand binding domain comprises a sequence of any one of the indicated HLA-A*01 binding domains in Table 7. In some embodiments, the HLA-A*01 ligand binding domain comprises a sequence at least 90%, at least 95% or at least 99% identical to a sequence of any one of the indicated HLA-A*01 binding domains in Table 7. In some embodiments, the HLA-A*01 scFv comprises any one of the indicated HLA-A*01 complementarity determined regions (CDRs) in Table 9. In some embodiments, the scFv comprises a sequence at least 95% identical to any one of the indicated HLA-A*01 scFv sequences in Table 7. In some embodiments, the scFv comprises a sequence identical to any one of the indicated HLA-A*01 scFv sequences in Table 7.

[0150] In some embodiments, the non-target antigen comprises HLA-A*03, and the ligand binding domain of the second receptor comprises an HLA-A*03 ligand binding domain. In some embodiments, the ligand binding domain binds HLA-A*03 independent of the peptide in a pMHC complex comprising HLA-A*03. In some embodiments, the HLA-A*03 ligand binding domain comprises an scFv domain. In some embodiments, the HLA-A*03 ligand binding domain comprises a sequence of any one of the indicated HLA-A*03 binding domains in Table 7. In some embodiments, the HLA-A*03 ligand binding domain comprises a sequence at least 90%, at least 95% or at least 99% identical to a sequence of any one of the indicated HLA-A*03 binding domains in Table 7. In some embodiments, the HLA-A*03 scFv comprises any one of the indicated HLA-A*03 complementarity determined regions (CDRs) in Table 9. In some embodiments, the scFv comprises a sequence at least 95% identical to any one of the indicated HLA-A*03 scFv sequences in Table 7. In some embodiments, the scFv comprises a sequence identical to any one of the indicated HLA-A*03 scFv sequences in Table 7.

[0151] In some embodiments, the non-target antigen comprises HLA-C*07, and the ligand binding domain of the second receptor comprises an HLA-C*07 ligand binding domain. In some embodiments, the ligand binding domain binds HLA-C*07 independent of the peptide in a pMHC complex comprising HLA-C*07. In some embodiments, the HLA-C*07 ligand binding domain comprises an scFv domain. In some embodiments, the HLA-C*07 ligand binding domain comprises a sequence of any one of the indicated HLA-C*07 binding domains in Table 7. In some embodiments, the HLA-C*07 ligand binding domain comprises a sequence at least 90%, at least 95% or at least 99% identical to a sequence of any one of the indicated HLA-C*07 binding domains in Table 7. In some embodiments, the HLA-C*07 scFv comprises any one of the indicated HLA-C*07 complementarity determined regions (CDRs) in Table 9. In some embodiments, the scFv comprises a sequence at least 95% identical to any one of the indicated HLA-C*07 scFv sequences in Table 7. In some embodiments, the scFv comprises a sequence identical to any one of the indicated HLA-C*07 scFv sequences in Table 7.

[0152] Minor Histocompatibility Antigens

[0153] In some embodiments, the second, inhibitor ligand comprises a minor histocompatibility antigen (MiHA). In some embodiments, the second, inhibitor ligand comprises an allele of a MiHA that is lost in a target cell through LOH.

[0154] MiHAs are peptides derived from proteins that contain nonsynonymous differences between alleles and are displayed by common HLA alleles. The non-synonymous differences can arise from SNPs, deletions, frameshift mutations or insertions in the coding sequence of the gene encoding the MiHA. Exemplary MiHAs can be about 9-12 amino acids in length and can bind to MHC class I and MHC class II proteins. Binding of the TCR to the MHC complex displaying the MiHA can activate T cells. The genetic and immunological properties of MiHAs will be known to the person of ordinary skill in the art. Candidate MiHAs are known peptides presented by known HLA class I alleles, are known to elicit T cell responses in the clinic (for example, in graft versus host disease, or transplant rejection, and allow for patient selection by simple SNP genotyping.

[0155] In some embodiments, the MiHA has broad or ubiquitous RNA expression.

[0156] In some embodiments, the MiHA has high minor allele frequency.

[0157] In some embodiments, the MiHA comprises a peptide derived from a Y chromosome gene.

[0158] In some embodiments, the second inhibitor ligand comprises a MiHA selected from the group of MiHAs disclosed in Table 10 and Table 11.

[0159] Exemplary, but non-limiting, examples of MiHAs that are envisaged as within the scope of the instant invention are disclosed in Table 10 below. Columns in Table 10 indicate, from left to right, the name of the MiHA, the gene which from which it is derived, MHC class I variant which can display the MiHA and the sequences of the peptide variants [A/B variants indicated in brackets).

TABLE 10
HLA Class I Autosomal MiHAs

| MiHA | Gene | HLA | Peptide A/B |
|---|---|---|---|
| LB-CYBA- | cytochrome b-245 alpha chain | A*01:01 | STMERWGQK[Y/H] (SEQ |
| 1Y | (CYBA) | | ID NO: 103) |
| LB-OAS1- | 2′-5′-oligoadenylate synthetase 1 | A*01:01 | ETDDPR[R/T]YQKY (SEQ |
| 1R | (OAS1) | | ID NO: 104) |
| HA-1/A2 | Rho GTPase activating protein 45 | A*02:01 | VL[HR]DDLLEA (SEQ ID |
| | (HMHA1) | | NO: 105) |
| HA-2 | myosin IG (MYO1G) | A*02:01 | YIGEVLVS[V/M] (SEQ ID |
| | | | NO: 106) |
| HA-8 | pumilio RNA binding family | A*02:01 | [R/P]TLDKVLEV (SEQ ID |
| | member 3 (KIAA0020, PUM3) | | NO: 107) |
| HA-3 | A-kinase anchoring protein 13 | A*01:01 | V[T/M]EPGTAQY (SEQ ID |
| | (AKAP13) | | NO: 108) |
| HwA11-S | chromosome 19 open reading | A*02:01 | CIPPD[S/T]LLFPA (SEQ ID |
| | frame 48 (C19ORF48) | | NO: 109) |
| LB-ADIR- | torsin family 3 member A | A*02:01 | SVAPALAL[F/S]PA (SEQ |
| 1F | (TOR3A) | | ID NO: 110) |
| LB- | HIVEP zinc finger 1 (HIVEP1) | A*02:01 | SLPKH[S/N]VTI (SEQ ID |
| HIVEP1-1S | | | NO: 111) |
| LB-NISCH- | nischarin (NISCH) | A*02:01 | ALAPAP[A/V]EV (SEQ ID |
| 1A | | | NO: 112) |
| LB-SSR1- | signal sequence receptor subunit 1 | A*02:01 | [S/L]LAVAQDLT (SEQ ID |
| 1S | (SSR1) | | NO: 113) |
| LB-WNK1- | WNK lysine deficient protein | A*02:01 | RTLSPE[I/M]ITV (SEQ ID |
| 1I | kinase 1 (WNK1) | | NO: 114) |
| T4A | tripartite motif containing 4 | A*02:01 | GLYTYWSAG[A/E] (SEQ |
| | (TRIM42) | | ID NO: 115) |
| UTA2-1 | retroelement silencing factor 1 | A*02:01 | QL[L/P]NSVLTL(SEQ ID |
| | (KIAA1551) | | NO: 116) |
| LB- | citramalyl-CoA lyase (CLYBL) | A*02:01 | SLAA(Y/D)IPRL (SEQ ID |
| CLYBL-1Y | | | NO: 117) |
| TRIM22 | tripartite motif containing 22 | A*02:01 | MAVPPC[C/R]IGV (SEQ ID |
| (TRIM22) | | | NO: 118) |
| PARP10-1L | poly(ADP-ribose) polymerase | A*02:01 | GL[L/P]GQEGLVEI (SEQ |
| | family member 10 (PARP10) | | ID NO: 119) |
| FAM119A- | methyltransferase like 21A | A*02:01 | AMLERQF[T/I] (SEQ ID |
| 1T | (FAM119A) | | NO: 120) |
| GLRX3-1S | glutaredoxin 3 (GLRX3) | A*02:01 | FL[S/P]SANEHL (SEQ ID |
| | | | NO: 121) |
| HNF4G-1M | hepatocyte nuclear factor 4 gamma | A*02:01 | M[M/I]YKDILLL (SEQ ID |
| | (HNF4G) | | NO: 122) |
| HMMR-1V | hyaluronan mediated motility | A*02:01 | SLQEK[V/A]AKA (SEQ ID |
| | receptor (HMMR) | | NO: 123) |
| BCL2A1 | BCL2 related protein A1 | A*02:01 | VLQ[N/K]VAFSV (SEQ ID |
| | (BCL2A1) | | NO: 124) |
| CDC26-1F | cell division cycle 26 (CDC26) | A*02:01 | [F/S]VAGTQEVFV (SEQ ID |
| | | | NO: 125) |
| APOBEC3F- | apolipoprotein B mRNA editing | A*02:01 | FL[S/A]EHPNVTL (SEQ ID |
| 1S/A | enzyme catalytic subunit 3F | | NO: 126) |
| | (APOBEC3F) | | |
| LB-PRCP- | prolylcarboxypeptidase (PRCP) | A*02:01 | FMWDVAE[D/E] (9 mer) |
| 1D | | | (SEQ ID NO: 127), |
| | | | FMWDVAE[D/E]LKA |
| | | | (11 mer) (SEQ ID NO: 128) |
| LB-CCL4- | C-C motif chemokine ligand 4 | A*02:01 | CADPSE[T/S]WV (SEQ ID |
| 1T | (CCL4) | | NO: 129) |
| LB- | non-SMC condensin II complex | A*02:01 | WL[Q/R]GVVPVV (SEQ ID |
| NCAPD3- | subunit D (NCAPD3) | | NO: 130) |
| 1Q | | | |
| LB-NDC80- | NDC80 kinetochore complex | A*02:01 | HLEEQI[P/A]KV (SEQ ID |
| 1P | component (NDC80) | | NO: 131) |
| LB-TTK- | TTK protein kinase (TTK) | A*02:01 | RLH[D/E]GRVFV (SEQ ID |
| 1D | | | NO: 132) |
| WDR27-1L | WD repeat domain 27 (WDR27) | A*02:01 | S[L/P]DDHVVAV (SEQ ID |
| | | | NO: 133) |
| MIIP | migration and invasion inhibitory | A*02:01 | SEESAVP[K/E]RSW |
| | protein (MIIP) | | (11 mer) (SEQ ID NO: 134), |
| | | | EESAVP[K/E]RSW (10 mer) |
| | | | (SEQ ID NO: 135) |
| HER- | Eerb-b2 receptor tyrosine kinase 2 | A*02:01 | not reported |
| 2/NEU | (RBB2) | | |
| LB- | DEAH-box helicase 33 (DHX33) | A*02:01, | YLYEGGIS[C/R] (SEQ ID |
| DHX33-1C | | C*03:03 | NO: 136) |
| PANE1 | centromere protein M (CENPM) | A*03:01 | RVWDLPGVLK (SEQ ID |
| | | | NO: 137) |
| SP110 | SP110 nuclear body protein | A*03:01 | SLP[R/G]GTSTPK (SEQ ID |
| | (SP110) | | NO: 138) |
| ACC-1C/Y | BCL2 related protein A1 | A*24:02 | DYLQ[Y/C]VLQI (SEQ ID |
| | (BCL2A1) | | NO: 139) |
| P2RX7 | purinergic receptor P2X 7 | A*29:02 | WFHHC[H/R]PKY (SEQ ID |
| | (P2RX7) | | NO: 140) |
| ACC-4 | cathepsin H (CTSH) | A*31:01 | ATLPLLCA[R/G] (SEQ ID |
| | | | NO: 141) |
| ACC-5 | CTSH | A*33:03 | WATLPLLCA[R/G] (SEQ |
| | | | ID NO: 142) |
| AKAP13 | A-kinase anchoring protein 13 | B*07:02 | APAGVREV[M/T] (SEQ ID |
| | (AKAP13) | | NO: 143) |
| LB- | apolipoprotein B mRNA editing | B*07:02, | [K/E]PQYHAEMCF (SEQ |
| APOBEC3 | enzyme catalytic subunit 3B | B*08:01 | ID NO: 144) |
| B-1K | (APOBEC3B) | | |
| APOBEC3 | apolipoprotein B mRNA editing | B*07:02 | KPQQ[K/E]GLRL (SEQ ID |
| H | enzyme catalytic subunit 3H | | NO: 145) |
| | (APOBEC3H) | | |
| LB- | Rho GDP dissociation inhibitor | B*07:02 | LPRACW[R/P]EA (SEQ ID |
| ARHGDIB- | beta (ARHGDIB) | | NO: 146) |
| 1R | | | |
| LB- | BCAT2-branched chain amino | B*07:02 | QP[R/T]RALLFVIL (SEQ |
| BCAT2-1R | acid transaminase 2 (BCAT2) | | ID NO: 147) |
| BFAR | bifunctional apoptosis regulator | B*07:02 | APNTGRANQQ[M/R] (SEQ |
| | (BFAR) | | ID NO: 148) |
| C14orf169 | ribosomal oxygenase 1 | B*07:02 | RPR[A/V]PTEELAL (SEQ |
| | (C14orf169 or RIOX1) | | ID NO: 149) |
| LB- | C160RF | B*07:02 | [R/W]PCPSVGLSFL (SEQ |
| C160RF- | | | ID NO: 150) |
| 1R | | | |
| C18orf21 | chromosome 18 open reading | B*07:02 | NPATP[A/T]SKL (SEQ ID |
| | frame 21 (C18orf21) | | NO: 151) |
| LB-EBI3-1I | Epstein-Barr virus induced 3 | B*07:02 | RPRARYY[I/V]QV (SEQ ID |
| | (EBI3) | | NO: 152) |
| POP1 | POP1 homolog, ribonuclease | B*07:02 | LPQKKS[N/K]AL (SEQ ID |
| | P/MRP subunit (POP1) | | NO: 153) |
| SCRIB | scribble planar cell polarity protein | B*07:02 | LPQQPP[L/P]SL (SEQ ID |
| | (SCRIB) | | NO: 154) |
| MTRR | 5-methyltetrahydrofolate- | B*07:02 | SPAS[S/L]RTDL (SEQ ID |
| | homocysteine methyltransferase | | NO: 155) |
| | reductase (MTRR) | | |
| LLGL2 | LLGL scribble cell polarity | B*07:02 | SPSL[R/H]ILAI (SEQ ID |
| | complex component 2 (LLGL2) | | NO: 156) |
| LB-ECGF- | thymidine phosphorylase (TYMP) | B*07:02 | RP[H/R]AIRRPLAL (SEQ |
| 1H | | | ID NO: 157) |
| LB-ERAP1- | endoplasmic reticulum | B*07:02 | HP[R/P]QEQIALLA (11 mer) |
| 1R | aminopeptidase 1 (ERAP1) | | (SEQ ID NO: 158), |
| | | | HP[R/P]QEQIAL (9 mer) |
| | | | (SEQ ID NO: 159) |
| LB- | alpha-L-fucosidase 2 (FUCA2) | B*07:02 | RLRQ[V/M]GSWL (SEQ ID |
| FUCA2-1V | | | NO: 160) |
| LB- | gem nuclear organelle associated | B*07:02, | FPALRFVE[V/E] (SEQ ID |
| GEMIN4- | protein 4 (GEMIN4) | B*08:01 | NO: 161) |
| 1V | | | |
| HDGF | heparin binding growth factor | B*07:02 | LPMEVEKNST[L/P] (SEQ |
| | (HDGF) | | ID NO: 162) |
| LB- | programmed cell death 11 | B*07:02 | GPDSSKT[F/L]LCL (SEQ |
| PDCD11-1F | (PDCD11) | | ID NO: 163) |
| LB-PFAS- | phosphoribosylformylglycinamidine | B*07:02 | A[P/S]GHTRRKL (SEQ ID |
| 1P | synthase (PFAS) | | NO: 164) |
| LB-TEP1- | telomerase associated protein 1 | B*07:02 | APDGAKVA[S/P]L (SEQ |
| 1S | (TEP1) | | ID NO: 165) |
| LB- | post-glycosylphosphatidylinositol | B*07:02 | RPRSVT[I/V]QPLL (SEQ |
| TMEM8A- | attachment to proteins 6 | | ID NO: 166) |
| 1I | (TMEM8A or PGAP6) | | |
| LB-USP15- | ubiquitin specific peptidase 15 | B*07:02 | MPSHLRN[I/T]LL (SEQ ID |
| 1I | (USP15) | | NO: 167) |
| LRH-1 | purinergic receptor P2X 5 | B*07:02 | TPNQRQNVC (SEQ ID NO: |
| | (P2RX5) | | 168) |
| LB- | MOB kinase activator 3A | B*07:02 | [C/S]PRPGTWTC (SEQ ID |
| MOB3A-1C | (MOB3A) | | NO: 169) |
| LB- | zinc finger DHHC-type | B*07:02 | RPR[Y/H]WILLVKI (SEQ |
| ZDHHC6- | palmitoyltransferase 6 (ZDHHC6) | | ID NO: 170) |
| 1Y | | | |
| ZAPHIR | zinc finger protein 419 (ZNF419) | B*07:02 | IPRDSWWVEL (SEQ ID |
| | | | NO: 171) |
| HEATR1 | HEAT repeat containing 1 | B*08:01 | ISKERA[E/G]AL (SEQ ID |
| | (HEATR1) | | NO: 172) |
| LB-GSTP1- | glutathione 5-transferase pi 1 | B*08:01 | DLRCKY[V/I]SL (SEQ ID |
| 1V | (GSTP1) | | NO: 173) |
| HA-1/B60 | Rho GTPase activating protein 45 | B*40:01 | KECVL[H/R] (SEQ ID |
| | (HMHA1) | | NO: 174) |
| LB-SON- | SON DNA and RNA binding | B*40:01 | SETKQ[R/C]TVL (SEQ ID |
| 1R | protein (SON) | | NO: 175) |
| LB- | switching B cell complex subunit | B*40:01 | MEQLE[Q/E]LEL (SEQ ID |
| SWAP70- | SWAP70 (SWAP70) | | NO: 176) |
| 1Q | | | |
| LB- | thyroid hormone receptor | B*40:01 | G[E/G][P/S]QDL[C/G]TL |
| TRIP10- | interactor 10 (TRIP 10) | | (SEQ ID NO: 177) |
| 1EPC | | | |
| LB- | nucleoporin 133 (NUP133) | B*40:01 | SEDLILC[R/Q]L (SEQ ID |
| NUP133-1R | | | NO: 178) |
| LB-ZNFX1- | zinc finger NFX1-type containing | B*40:01 | NEIEDVW[Q/H]LDL (SEQ |
| 1Q | 1 (ZNFX1) | | ID NO: 179) |
| SLC1A5 | solute carrier family 1 member 5 | B*40:02 | AE[A/P]TANGGLAL (SEQ |
| | (SLC1A5) | | ID NO: 180) |
| ACC-2 | BCL2A1 | B*44:02, | KEFED[D/G]IINW (SEQ ID |
| | | B*44:03 | NO: 181) |
| ACC-6 | histocompatibility minor serpin | B*44:03 | MEIFIEVFSHF (SEQ ID |
| | domain containing (HMSD) | | NO: 182) |
| HB-1H/Y | histocompatibility minor HB-1 | B*44:03 | EEKRGSL[H/Y] (SEQ |
| | (HMHB1) | | ID NO: 183) |
| DPH1 | diphthamide biosynthesis 1 | B*57:01 | S[V/L]LPEVDVW (SEQ ID |
| | (DPH1) | | NO: 184) |
| UGT2B17/ | UDP glucuronosyltransferase | A*02:06 | CVATMIFMI (SEQ ID NO: |
| A02 | family 2 member B17 (UGT2B17) | | 185) |
| UGT2B17/ | UGT2B17 | A*29:02 | AELLNIPFLY (SEQ ID NO: |
| A29 | | | 186) |
| UGT2B17/ | UGT2B17 | B*44:03 | AELLNIPFLY (SEQ ID NO: |
| B44 | | | 187) |

[0160] Exemplary, but non-limiting, examples of MiHAs that are envisaged as within the scope of the instant invention are disclosed in Table 11 below. Columns in Table 11 indicate, from left to right, the name of the MiHA, the gene which from which it is derived, MHC class I variant which can display the MiHA and the sequences of the peptide variants [A/B variants indicated in brackets).

TABLE 11
HLA Class I Y linked MiHAs

| MiHA | Gene | HLA | Peptide A/B |
|---|---|---|---|
| DFFRY | ubiquitin specific peptidase 9 | A*01:01 | IVD[C/S]LTEMY (SEQ ID |
| | Y-linked (DFFRY) | | NO: 188) |
| SMCY | lysine demethylase 5 | A*02:01 | FIDSYICQV (SEQ ID NO: |
| | (SMCY) | | 189) |
| TMSB4Y | thymosin beta 4 Y-linked | A*33:03 | EVLLRPGLHFR (SEQ ID |
| | (TMSB4Y) | | NO: 190) |
| SMCY | SMCY | B*07:02 | SP[S/A]VDKA[R/Q]AEL |
| | | | (SEQ ID NO: 191) |
| UTY | ubiquitously transcribed | B*08:01 | LPHN[H/R]T[D/N]L (SEQ |
| | tetratricopeptide repeat | | ID NO: 192) |
| | containing, Y-linked (UTY) | | |
| RPS4Y | ribosomal protein S4 Y- | B*52:01 | TIRYPDP[V/L]I (SEQ ID |
| | linked 1 (RPS4Y) | | NO: 193) |
| UTY | UTY | B*60:01 | [R/G]ESEE[E/A]S[V/P]SL |
| | | | (SEQ ID NO: 194) |

[0161] In some embodiments, the MiHA comprises HA-1. HA-1 is a peptide antigen having a sequence of VL[H/R]DDLLEA (SEQ ID NO: 105), and is derived from the Rho GTPase activating protein 45 (HA-1) gene.

[0162] Exemplary ligand binding domains that selectively bind to HA-1 variant H peptide (VLHDDLLEA (SEQ ID NO: 195)) are shown in Table 12 below. TCR alpha and TCR beta sequences are separated by a P2A self-cleaving polypeptide of sequence ATNFSLLKQAGDVEENPGP (SEQ ID NO: 196) with an N terminal GSG linker.

TABLE 12
Ftcr HA-1(H) Inhibitory receptor Sequences

| | |
|---|---|
| C-003754 KP7 HA-1H TCRalpha T48C P2A KP7 HA-1H TCRbeta | C-003754 |
| S57C: | KP7 HA-1H |
| MVKIRQFLLAILWLQLSCVSAAKNEVEQSPQNLTAQEGEFITINCS | TCRalpha |
| YSVGISALHWLQQHPGGGIVSLFMLSSGKKKHGRLIATINIQEKH | T48C P2A |
| SSLHITASHPRDSAVYICAVRSVSGAGSYQLTFGKGTKLSVIPNIQ | KP7 HA-1H |
| NPDPAVYQLRDSKSSDKSVCLFTDFDSQTNVSQSKDSDVYITDKC | TCRbeta |
| VLDMRSMDFKSNSAVAWSNKSDFACANAFNNSIIPEDTFFPSPES | S57C DNA |
| SCDVKLVEKSFETDTNLNFQNLSVIGFRILLLKVAGFNLLMTLRL | Sequence: |
| WSSGSGATNFSLLKQAGDVEENPGPMGTSLLCWMALCLLGADH | SEQ ID |
| ADTGVSQNPRHKITKRGQNVTFRCDPISEHNRLYWYRQTLGQGP | NO: 194 |
| EFLTYFQNEAQLEKSRLLSDRFSAERPKGSFSTLEIQRTEQGDSAM | |
| YLCASSIDSFNEQFFGPGTRLTVLEDLKNVFPPEVAVFEPSEAEISH | |
| TQKATLVCLATGFYPDHVELSWWVNGKEVHSGVCTDPQPLKEQ | |
| PALNDSRYCLSSRLRVSATFWQNPRNHFRCQVQFYGLSENDEWT | |
| QDRAKPVTQIVSAEAWGRADCGFTSESYQQGVLSATILYEILLGK | |
| ATLYAVLVSALVLMAMVKRKDSRG (SEQ ID NO: 197) | |
| HA-1H TCR alpha: | HA-1H |
| MVKIRQFLLAILWLQLSCVSAAKNEVEQSPQNLTAQEGEFITINCS | TCR alpha |
| YSVGISALHWLQQHPGGGIVSLFMLSSGKKKHGRLIATINIQEKH | DNA |
| SSLHITASHPRDSAVYICAVRSVSGAGSYQLTFGKGTKLSVIPNIQ | Sequence: |
| NPDPAVYQLRDSKSSDKSVCLFTDFDSQTNVSQSKDSDVYITDKC | SEQ ID |
| VLDMRSMDFKSNSAVAWSNKSDFACANAFNNSIIPEDTFFPSPES | NO: 201 |
| SCDVKLVEKSFETDTNLNFQNLS (SEQ ID: 198) | |
| HA-1(H) TCRbeta: | HA-1H |
| MGTSLLCWMALCLLGADHADTGVSQNPRHKITKRGQNVTFRCD | TCRbeta |
| PISEHNRLYWYRQTLGQGPEFLTYFQNEAQLEKSRLLSDRFSAER | DNA |
| PKGSFSTLEIQRTEQGDSAMYLCASSIDSFNEQFFGPGTRLTVLED | Sequence: |
| LKNVFPPEVAVFEPSEAEISHTQKATLVCLATGFYPDHVELSWW | SEQ ID |
| VNGKEVHSGVCTDPQPLKEQPALNDSRYCLSSRLRVSATFWQNP | NO: 202 |
| RNHFRCQVQFYGLSENDEWTQDRAKPVTQIVSAEAWGRADCGF | |
| TSESYQQGVLS (SEQ ID NO: 199) | |
| C-003755 KP7 HA-1H FTCRalpha LIR1 TICD: | C-003755 |
| MVKIRQFLLAILWLQLSCVSAAKNEVEQSPQNLTAQEGEFITINCS | KP7 HA-1H |
| YSVGISALHWLQQHPGGGIVSLFMLSSGKKKHGRLIATINIQEKH | FTCRalpha |
| SSLHITASHPRDSAVYICAVRSVSGAGSYQLTFGKGTKLSVIPNIQ | LIR1 TICD |
| NPDPAVYQLRDSKSSDKSVCLFTDFDSQTNVSQSKDSDVYITDKC | DNA |
| VLDMRSMDFKSNSAVAWSNKSDFACANAFNNSIIPEDTFFPSPES | Sequence: |
| SCDVKLVEKSFETDTNLNFQNLSVVIGILVAVILLLLLLLLLFLILR | SEQ ID |
| HRRQGKHWTSTQRKADFQHPAGAVGPEPTDRGLQWRSSPAADA | NO: 196 |
| QEENLYAAVKHTQPEDGVEMDTRSPHDEDPQAVTYAEVKHSRP | |
| RREMASPPSPLSGEFLDTKDRQAEEDRQMDTEAAASEAPQDVTY | |
| AQLHSLTLRREATEPPPSQEGPSPAVPSIYATLAIH (SEQ ID NO: | |
| 200) | |
| C-003756 KP7 HA-1H FTCRbeta LIR1 TICD: | C-003756 |
| MGTSLLCWMALCLLGADHADTGVSQNPRHKITKRGQNVTFRCD | KP7 HA-1H |
| PISEHNRLYWYRQTLGQGPEFLTYFQNEAQLEKSRLLSDRFSAER | FTCRbeta |
| PKGSFSTLEIQRTEQGDSAMYLCASSIDSFNEQFFGPGTRLTVLED | LIR1 TICD |
| LKNVFPPEVAVFEPSEAEISHTQKATLVCLATGFYPDHVELSWW | DNA |
| VNGKEVHSGVCTDPQPLKEQPALNDSRYCLSSRLRVSATFWQNP | Sequence: |
| RNHFRCQVQFYGLSENDEWTQDRAKPVTQIVSAEAWGRADCGF | SEQ ID |
| TSESYQQGVLSVVIGILVAVILLLLLLLLLFLILRHRRQGKHWTST | NO: 198 |
| QRKADFQHPAGAVGPEPTDRGLQWRSSPAADAQEENLYAAVKH | |
| TQPEDGVEMDTRSPHDEDPQAVTYAEVKHSRPRREMASPPSPLS | |
| GEFLDTKDRQAEEDRQMDTEAAASEAPQDVTYAQLHSLTLRRE | |
| ATEPPPSQEGPSPAVPSIYATLAIH (SEQ ID NO: 201) | |

[0163] In some embodiments, the second, inhibitory ligand comprises HA-1(H). In some embodiments, the second, inhibitory ligand binding is isolated or derived from a TCR. In some embodiments, the second, inhibitory ligand binding domain comprises TCR alpha and TCR beta variable domains. In some embodiments, the TCR alpha and TCR beta variable domains are separated by a self-cleaving polypeptide sequence. In some embodiments, the TCR alpha and TCR beta variable domains separated by a self-cleaving polypeptide sequence comprise SEQ ID NO: 197. In some embodiments, the TCR alpha and TCR beta variable domains separated by a self-cleaving polypeptide sequence comprise SEQ ID NO: 197, or a sequence having at least 90%, at least 95%, or at least 99% identity thereto. In some embodiments, the TCR alpha and TCR beta variable domains are encoded by a sequence of SEQ ID NO: 202, or a sequence having at least 80% identity, at least 90%, at least 95%, or at least 99% identity thereto. In some embodiments, the TCR alpha variable domain comprises SEQ ID NO: 198 or a sequence having at least 90%, at least 95%, or at least 99% identity thereto. In some embodiments, the TCR beta variable domain comprises SEQ ID NO: 199 or a sequence having at least 90%, at least 95%, or at least 99% identity thereto.

[0164] Loss of Y Chromosome Antigens

[0165] In some embodiments, the second, inhibitor ligand comprises a Y chromosome gene, i.e. peptide encoded by a gene on the Y chromosome. In some embodiments, the second, inhibitor ligand comprises a peptide encoded by a Y chromosome gene that is lost in target cells through loss of Y chromosome (LoY). For example, about a third of the characterized MiHAs come from the Y chromosome. The Y chromosome contains over 200 protein coding genes, all of which are envisaged as within the scope of the instant disclosure.

[0166] As used herein, “loss of Y”, or “LoY” refers a genetic change that occurs at high frequency in tumors whereby one copy of part or all of the Y chromosome is deleted, leading to a loss of Y chromosome encoded gene(s).

[0167] Loss of Y chromosome is known to occur in certain cancers. For example, there is a reported 40% somatic loss of Y chromosome in renal clear cell cancers (Arseneault et al., Sci. Rep. 7: 44876 (2017)). Similarly, clonal loss of the Y chromosome was reported in 5 out of 31 in male breast cancer subjects (Wong et al., Oncotarget 6(42):44927-40 (2015)). Loss of the Y chromosome in tumors from male patients has been described as a “consistent feature” of head and neck cancer patients (el-Naggar et al., Am J Clin Pathol 105(1):102-8 (1996)). Further, Y chromosome loss was associated with X chromosome disomy in four of seven male patients with gastric cancer (Saal et al., Virchows Arch B Cell Pathol (1993)). Thus, Y chromosome genes can be lost in a variety of cancers, and can be used as inhibitor ligands with the engineered receptors of the instant disclosure targeting cancer cells.

### Chimeric Antigen Receptors (CARs)

[0168] In some embodiments, the either the first or the second engineered receptor is a chimeric antigen receptor (CAR). In some embodiments, the first and second engineered receptors are chimeric antigen receptors. All CAR architectures are envisaged as within the scope of the instant disclosure.

[0169] Extracellular Domains

[0170] In some embodiments, the extracellular domain of the CAR comprises the antigen binding domains described supra.

[0171] Hinge Region

[0172] In some embodiments, the CARs of the present disclosure comprise an extracellular hinge region. Incorporation of a hinge region can affect cytokine production from CAR-T cells and improve expansion of CAR-T cells in vivo. Exemplary hinges can be isolated or derived from IgG, CD28 or CD8, among others, for example IgG1. Exemplary hinge domains are provided in Table 13.

[0173] In some embodiments, the hinge is isolated or derived from CD8a or CD28. In some embodiments, the CD8a hinge comprises an amino acid sequence having at least 80% identity, at least 90% identity, at least 95% identity, at least 99% identity or is identical to a sequence of TTTPAPRPPTPAPTIASQPLSLRPEACRPAAGGAVHTRGLDFACD (SEQ ID NO: 219). In some embodiments, the CD8a hinge comprises SEQ ID NO: 219. In some embodiments, the CD8a hinge consists essentially of SEQ ID NO: 219. In some embodiments, the CD8a hinge is encoded by a nucleotide sequence having at least 80% identity, at least 90% identity, at least 95% identity, at least 99% identity or is identical to a sequence of

(SEQ ID NO: 220)
ACCACGACGCCAGCGCCGCGACCACCAACACCGGCGCCCACCATCGCGTC
GCAGCCCCTGTCCCTGCGCCCAGAGGCGTGCCGGCCAGCGGCGGGGGGCG
CAGTGCACACGAGGGGGCTGGACTTCGCCTGTGAT.

[0174] In some embodiments, the CD8a hinge is encoded by SEQ ID NO: 220.

[0175] In some embodiments, the CD28 hinge comprises an amino acid sequence having at least 80% identity, at least 90% identity, at least 95% identity, at least 99% identity or is identical to a sequence of CTIEVMYPPPYLDNEKSNGTIIHVKGKHLCPSPLFPGPSKP (SEQ ID NO: 221). In some embodiments, the CD28 hinge comprises or consists essentially of SEQ ID NO: 221. In some embodiments, the CD28 hinge is encoded by a nucleotide sequence having at least 80% identity, at least 90% identity, at least 95% identity, at least 99% identity or is identical to a sequence of:

(SEQ ID NO: 222)
TGTACCATTGAAGTTATGTATCCTCCTCCTTACCTAGACAATGAGAAGAG
CAATGGAACCATTATCCATGTGAAAGGGAAACACCTTTGTCCAAGTCCCC
TATTTCCCGGACCTTCTAAGCCC.

[0176] In some embodiments, the CD28 hinge is encoded by SEQ ID NO: 222.

[0177] In some embodiments, the activator receptor comprises a hinge sequence isolated or derived from CD8, CD28, IgGP, or LgG4, or a synthetic hinge.

TABLE 13
Hinge Domain Sequences and Their Use in HER2 CAR Constructs

| CAR | | | |
|---|---|---|---|
| Construct | Hinge | Protein Sequence | DNA Sequence |
| CT-292 | CD8 | FVPVFLPAKPTT | TTCGTGCCGGTCTTCCTGCCAGCGAAGCCCA |
| | | TPAPRPPTPAPTI | CCACGACGCCAGCGCCGCGACCACCAACAC |
| | | ASQPLSLRPEAC | CGGCGCCCACCATCGCGTCGCAGCCCCTGTC |
| | | RPAAGGAVHTR | CCTGCGCCCAGAGGCGTGCCGGCCAGCGGC |
| | | GLDFACD (SEQ | GGGGGGCGCAGTGCACACGAGGGGGCTGGA |
| | | ID NO 223) | CTTCGCCTGTGAT (SEQ ID NO 224) |
| CT-297 | CD28 | IEVMYPPPYLDN | ATTGAAGTTATGTATCCTCCTCCTTACCTAG |
| | | EKSNGTIIHVKG | ACAATGAGAAGAGCAATGGAACCATTATCC |
| | | KHLCPSPLFPGP | ATGTGAAAGGGAAACACCTTTGTCCAAGTCC |
| | | SKP (SEQ ID NO | CCTATTTCCCGGACCTTCTAAGCCC (SEQ ID |
| | | 225) | NO 226) |
| CT-298 | Short | GGGSSGGGSG | GGTGGCGGTTCTTCCGGCGGTGGCTCTGGT |
| | linker | (SEQ ID NO: 1) | (SEQ ID NO: 227) |
| CT-299 | IgG4 | ESKYGPPCPSCP | GAGTCCAAATATGGTCCCCCATGCCCATCAT |
| | (EQ) | APEFEGGPSVFL | GCCCAGCACCTGAGTTCGAGGGGGGACCAT |
| | | FPPKPKDTLMIS | CAGTCTTCCTGTTCCCCCCAAAACCCAAGGA |
| | | RTPEVTCVVVD | CACTCTCATGATCTCCCGGACCCCTGAGGTC |
| | | VSQEDPEVQFN | ACGTGCGTGGTGGTGGACGTGAGCCAGGAA |
| | | WYVDGVEVHN | GACCCCGAGGTCCAGTTCAACTGGTACGTGG |
| | | AKTKPREEQFQ | ATGGCGTGGAGGTGCATAATGCCAAGACAA |
| | | STYRVVSVLTV | AGCCGCGGGAGGAGCAGTTCCAGAGCACGT |
| | | LHQDWLNGKE | ACCGTGTGGTCAGCGTCCTCACCGTCCTGCA |
| | | YKCKVSNKGLP | CCAGGACTGGCTGAACGGCAAGGAGTACAA |
| | | SSIEKTISKAKG | GTGCAAGGTCTCCAACAAAGGCCTCCCGTCC |
| | | QPREPQVYTLPP | TCCATCGAGAAAACCATCTCCAAAGCCAAA |
| | | SQEEMTKNQVS | GGGCAGCCCCGAGAGCCACAGGTGTACACC |
| | | LTCLVKGFYPS | CTGCCCCCATCCCAGGAGGAGATGACCAAG |
| | | DIAVEWESNGQ | AACCAGGTCAGCCTGACCTGCCTGGTCAAA |
| | | PENNYKTTPPVL | GGCTTCTACCCCAGCGACATCGCCGTGGAGT |
| | | DSDGSFFLYSRL | GGGAGAGCAATGGGCAGCCGGAGAACAACT |
| | | TVDKSRWQEGN | ACAAGACCACGCCTCCCGTGCTGGACTCCGA |
| | | VFSCSVMHEAL | CGGCTCCTTCTTCCTCTACAGCAGGCTCACC |
| | | HNHYTQKSLSL | GTGGACAAGAGCAGGTGGCAGGAGGGGAAT |
| | | SLGK (SEQ ID | GTCTTCTCATGCTCCGTGATGCATGAGGCTC |
| | | NO: 228) | TGCACAACCACTACACACAGAAGAGCCTCT |
| | | | CCCTGTCTCTGGGTAAA (SEQ ID NO: 229) |
| CT-1094, | IgG1 | AEPKSPDKTHT | GCCGAGCCCAAGTCCCCTGATAAAACTCAC |
| CT-1095 | | CPPCPKDPK | ACCTGCCCACCCTGTCCTAAGGACCCGAAG |
| | | (SEQ ID NO: 230) | (SEQ ID NO: 231) |

[0178] In some embodiments, for example those embodiments where the CAR is an activator receptor, the hinge comprises a sequence of SEQ ID NO: 1, 223, 225, 228, or 230, or a sequence having at least 80%, at least 85%, at least 90%, at least 95%, at least 97%, at least 99%, or that is identical thereto. In some embodiments, for example those embodiments where the CAR is an activator receptor, the hinge comprises a sequence of SEQ ID NO: 1, 223, 225, 228, or 230.

[0179] Transmembrane Domain

[0180] The CARs of the present disclosure can be designed to comprise a transmembrane domain that is fused to the extracellular domain of the CAR. In some embodiments, the transmembrane domain that naturally is associated with one of the domains in the CAR is used. For example, a CAR comprising a CD28 co-stimulatory domain might also use a CD28 transmembrane domain. In some instances, the transmembrane domain can be selected or modified by amino acid substitution to avoid binding of such domains to the transmembrane domains of the same or different surface membrane proteins to minimize interactions with other members of the receptor complex.

[0181] The transmembrane domain may be derived either from a natural or from a synthetic source. Where the source is natural, the domain may be derived from any membrane-bound or transmembrane protein. Transmembrane regions may be isolated or derived from (i.e. comprise at least the transmembrane region(s) of) the alpha, beta or zeta chain of the T-cell receptor, CD28, CD3 epsilon, CD45, CD4, CD5, CD8, CD9, CD16, CD22, CD33, CD37, CD64, CD80, CD86, CD134, CD137, CD154, or from an immunoglobulin such as IgG4. Alternatively the transmembrane domain may be synthetic, in which case it will comprise predominantly hydrophobic residues such as leucine and valine. In some embodiments, a triplet of phenylalanine, tryptophan and valine will be found at each end of a synthetic transmembrane domain. Optionally, a short oligo- or polypeptide linker, preferably between 2 and 10 amino acids in length may form the linkage between the transmembrane domain and the cytoplasmic signaling domain of the CAR. A glycine-serine doublet provides a particularly suitable linker.

[0182] In some embodiments of the CARs of the disclosure, the CARs comprise a CD28 transmembrane domain. In some embodiments, the CD28 transmembrane domain comprises an amino acid sequence having at least 80% identity, at least 90% identity, at least 95% identity, at least 99% identity or is identical to a sequence of FWVLVVVGGVLACYSLLVTVAFIIFWV (SEQ ID NO: 232). In some embodiments, the CD28 transmembrane domain comprises or consists essentially of SEQ ID NO: 232. In some embodiments, the CD28 transmembrane domain is encoded by a nucleotide sequence having at least 80% identity, at least 90% identity, at least 95% identity, at least 99% identity or is identical to a sequence of

(SEQ ID NO: 233)
TTCTGGGTGCTGGTCGTTGTGGGCGGCGTGCTGGCCTGCTACAGCCTGCT
GGTGACAGTGGCCTTCATCATCTTTTGGGTG.

[0183] In some embodiments, the CD28 transmembrane domain is encoded by SEQ ID NO: 233.

[0184] In some embodiments of the CARs of the disclosure, the CARs comprise an IL-2Rbeta transmembrane domain. In some embodiments, the IL-2Rbeta transmembrane domain comprises an amino acid sequence having at least 80% identity, at least 90% identity, at least 95% identity, at least 99% identity or is identical to a sequence of IPWLGHLLVGLSGAFGFIILVYLLI (SEQ ID NO: 234). In some embodiments, the IL-2Rbeta transmembrane domain comprises or consists essentially of SEQ ID NO: 234. In some embodiments, the IL-2Rbeta transmembrane domain is encoded by a nucleotide sequence having at least 80% identity, at least 90% identity, at least 95% identity, at least 99% identity or is identical to a sequence of

(SEQ ID NO: 235)
ATTCCGTGGCTCGGCCACCTCCTCGTGGGCCTCAGCGGGGCTTTTGGCTT
CATCATCTTAGTGTACTTGCTGATC.

[0185] In some embodiments, the IL-2Rbeta transmembrane domain is encoded by SEQ ID NO: 235.

[0186] In some embodiments, the CAR comprises a transmembrane domain isolated or derived from CD8 or CD28. In some embodiments, the CAR comprises a transmembrane domain sequence in Table 14. In some embodiments, the CAR comprises a transmembrane domain sequence of SEQ ID NO: 232 or SEQ ID NO: 236, or a sequence having at least 80% identity, at least 90% identity, at least 95% identity, at least 99% identity or is identical thereto. In some embodiments, the CAR comprises a transmembrane domain sequence of SEQ ID NO: 232 or SEQ ID NO: 236. In some embodiments, the CAR comprises a transmembrane domain sequence of SEQ ID NO: 561.

TABLE 14
Transmembrane Domain Sequences and their use in HER2 CAR Constructs

| CAR | TM | | |
|---|---|---|---|
| Construct | Domain | Protein Sequence | DNA Sequence |
| CT-298, | CD8 | IYIWAPLAGTCGVL | ATCTACATCTGGGCGCCCTTGGCCG |
| CT-299 | | LLSLVIT (SEQ ID | GGACTTGTGGGGTCCTTCTCCTGTC |
| | | NO: 236) | ACTGGTTATCACC (SEQ ID NO: 237) |
| CT-292 | CD8 | IYIWAPLAGTCGVL | ATCTACATCTGGGCGCCCTTGGCCG |
| | | LLSLVITLYCNHRN | GGACTTGTGGGGTCCTTCTCCTGTC |
| | | (SEQ ID NO: 561) | ACTGGTTATCACCCTTTACTGCAAC |
| | | | CACAGGAAC (SEQ ID NO: 562) |
| CT-297, | CD28 | FWVLVVVGGVLAC | TTCTGGGTGCTGGTCGTTGTGGGCG |
| CT-1094, | | YSLLVTVAFIIFWV | GCGTGCTGGCCTGCTACAGCCTGCT |
| CT1095 | | (SEQ ID NO: 232) | GGTGACAGTGGCCTTCATCATCTTT |
| | | | TGGGTG (SEQ ID NO: 233) |

[0187] Cytoplasmic Domain

[0188] The disclosure provides an activator receptor comprising an extracellular ligand binding domain specific to an erb-b2 receptor tyrosine kinase 2 (HER2) antigen. In some embodiments, the activator receptor is a T cell receptor (TCR) or a chimeric antigen receptor (CAR). In some embodiments, the CAR comprises an intracellular domain isolated or derived from CD28, 4-1BB or CD3z, or a combination thereof.

[0189] The cytoplasmic domain or otherwise the intracellular signaling domain of the CARs of the instant invention is responsible for activation of at least one of the normal effector functions of the immune cell in which the CAR has been placed. The term “effector function” refers to a specialized function of a cell. Effector functions of a regulatory T cell, for example, include the suppression or downregulation of induction or proliferation of effector T cells. Thus the term “intracellular signaling domain” refers to the portion of a protein which transduces the effector function signal and directs the cell to perform a specialized function. While usually the entire intracellular signaling domain can be employed, in many cases it is not necessary to use the entire domain. To the extent that a truncated portion of the intracellular signaling domain is used, such truncated portion may be used in place of the intact chain as long as it transduces the effector function signal. In some cases, multiple intracellular domains can be combined to achieve the desired functions of the CAR-T cells of the instant disclosure. The term intracellular signaling domain is thus meant to include any truncated portion of one or more intracellular signaling domains sufficient to transduce the effector function signal.

[0190] Examples of intracellular signaling domains for use in the CARs of the instant disclosure include the cytoplasmic sequences of the T cell receptor (TCR) and co-receptors that act in concert to initiate signal transduction following antigen receptor engagement, as well as any derivative or variant of these sequences and any synthetic sequence that has the same functional capability.

[0191] Accordingly, the intracellular domain of CARs of the instant disclosure comprises at least one cytoplasmic activation domain. In some embodiments, the intracellular activation domain ensures that there is T-cell receptor (TCR) signaling necessary to activate the effector functions of the CAR T-cell. In some embodiments, the at least one cytoplasmic activation is a CD247 molecule (CD3ζ) activation domain, a stimulatory killer immunoglobulin-like receptor (KIR) KIR2DS2 activation domain, or a DNAX-activating protein of 12 kDa (DAP12) activation domain. In some embodiments, the CD3ζ activation domain comprises an amino acid sequence having at least 80% identity, at least 90% identity, at least 95% identity, at least 99% identity or is identical to a sequence of

(SEQ ID NO: 238)
RVKFSRSADAPAYKQGQNQLYNELNLGRREEYDVLDKRRGRDPEMGGKPR
RKNPQEGLYNELQKDKMAEAYSEIGMKGERRRGKGHDGLYQGLSTATKDT
YDALHMQALPPR.

[0192] In some embodiments, the CD3ζ activation domain comprises or consists essentially of SEQ ID NO: 238. In some embodiments, the CD3ζ activation domain is encoded by a nucleotide sequence having at least 80% identity, at least 90% identity, at least 95% identity, at least 99% identity or is identical to a sequence of AGAGTGAAGTTCAGCAGGAGCGCAGACGCCCCCGCGTACAAGCAGGGCCAGAA CCAGCTCTATAACGAGCTCAATCTAGGACGAAGAGAGGAGTACGATGTTTTGGA CAAGCGTAGAGGCCGGGACCCTGAGATGGGGGGAAAGCCGAGAAGGAAGAACC CTCAGGAAGGCCTGTACAATGAACTGCAGAAAGATAAGATGGCGGAGGCCTACA GTGAGATTGGGATGAAAGGCGAGCGCCGGAGGGGCAAGGGGCACGATGGCCTT TACCAGGGACTCAGTACAGCCACCAAGGACACCTACGACGCCCTTCACATGCAG GCCCTGCCCCCTCGC (SEQ ID NO: 239). In some embodiments, the CD3ζ activation domain is encoded by SEQ ID NO: 239.

[0193] It is known that signals generated through the TCR alone are often insufficient for full activation of the T cell and that a secondary or co-stimulatory signal is also required. Thus, T cell activation can be said to be mediated by two distinct classes of cytoplasmic signaling sequence: those that initiate antigen-dependent primary activation through the TCR (primary cytoplasmic signaling sequences) and those that act in an antigen-independent manner to provide a secondary or co-stimulatory signal (secondary cytoplasmic signaling sequences).

[0194] Primary cytoplasmic signaling sequences regulate primary activation of the TCR complex either in a stimulatory way, or in an inhibitory way. Primary cytoplasmic signaling sequences that act in a stimulatory manner may contain signaling motifs which are known as immunoreceptor tyrosine-based activation motifs or ITAMs. In some embodiments, the ITAM contains a tyrosine separated from a leucine or an isoleucine by any two other amino acids (YxxL) (SEQ ID NO: 240).

[0195] In some embodiments, the cytoplasmic domain contains 1, 2, or 3 ITAMs. In some embodiments, the cytoplasmic domain contains 1 ITAM. In some embodiments, the cytoplasmic domain contains 2 ITAMs. In some embodiments, the cytoplasmic domain contains 3 ITAMs. In some embodiments, the cytoplasmic domain contains 4 ITAMs. In some embodiments, the cytoplasmic domain contains 5 ITAMs.

[0196] In some embodiments, the cytoplasmic domain is a CD3ζ activation domain. In some embodiments, CD3ζ activation domain comprises a single ITAM. In some embodiments, CD3ζ activation domain comprises two ITAMs. In some embodiments, CD3ζ activation domain comprises three ITAMs.

[0197] In some embodiments, the CD3ζ activation domain comprising a single ITAM comprises an amino acid sequence having at least 80% identity, at least 90% identity, at least 95% identity, at least 99% identity or is identical to a sequence of

(SEQ ID NO: 241)
RVKFSRSADAPAYQQGQNQLYNELNLGRREEYDVLHMQALPPR.

In some embodiments, the CD3ζ activation domain comprises SEQ ID NO: 241. In some embodiments, the CD3ζ activation domain comprising a single ITAM consists essentially of an amino acid sequence of

(SEQ ID NO: 241)
RVKFSRSADAPAYQQGQNQLYNELNLGRREEYDVLHMQALPPR.

In some embodiments, the CD3ζ activation domain comprising a single ITAM is encoded by a nucleotide sequence having at least 80% identity, at least 90% identity, at least 95% identity, at least 99% identity or is identical to a sequence of AGAGTGAAGTTCAGCAGGAGCGCAGACGCCCCCGCGTACCAGCAGGGCCAGAA CCAGCTCTATAACGAGCTCAATCTAGGACGAAGAGAGGAGTACGATG TTTTGCACATGCAGGCCCTGCCCCCTCGC (SEQ ID NO: 242). In some embodiments, the CD3ζ activation domain is encoded by SEQ ID NO: 242.

[0198] Further examples of ITAM containing primary cytoplasmic signaling sequences that can be used in the CARs of the instant disclosure include those derived from TCRζ, FcRγ, FcRβ, CD3γ, CD3δ, CD3ε, CD3ζ, CD5, CD22, CD79a, CD79b, and CD66d. It is particularly preferred that cytoplasmic signaling molecule in the CAR of the instant invention comprises a cytoplasmic signaling sequence derived from CD3ζ.

[0199] Co-Stimulatory Domain

[0200] In some embodiments, the cytoplasmic domain of the CAR can be designed to comprise the CD3ζ signaling domain by itself or combined with any other desired cytoplasmic domain(s) useful in the context of the CAR of the instant disclosure. For example, the cytoplasmic domain of the CAR can comprise a CD3ζ chain portion and a co-stimulatory domain. The co-stimulatory domain refers to a portion of the CAR comprising the intracellular domain of a costimulatory molecule. A costimulatory molecule is a cell surface molecule other than an antigen receptor or its ligands that is required for an efficient response of lymphocytes to an antigen. Examples of such molecules include the co-stimulatory domain is selected from the group consisting of IL-2Rβ, Fc Receptor gamma (FcRγ), Fc Receptor beta (FcRβ), CD3g molecule gamma (CD3γ), CD3δ, CD3ε, CD5 molecule (CD5), CD22 molecule (CD22), CD79a molecule (CD79a), CD79b molecule (CD79b), carcinoembryonic antigen related cell adhesion molecule 3 (CD66d), CD27 molecule (CD27), CD28 molecule (CD28), TNF receptor superfamily member 9 (4-1BB), TNF receptor superfamily member 4 (OX40), TNF receptor superfamily member 8 (CD30), CD40 molecule (CD40), programmed cell death 1 (PD-1), inducible T cell costimulatory (ICOS), lymphocyte function-associated antigen-1 (LFA-1), CD2 molecule (CD2), CD7 molecule (CD7), TNF superfamily member 14 (LIGHT), killer cell lectin like receptor C2 (NKG2C) and CD276 molecule (B7-H3) c-stimulatory domains, or functional fragments thereof.

[0201] The cytoplasmic domains within the cytoplasmic signaling portion of the CARs of the instant disclosure may be linked to each other in a random or specified order. Optionally, a short oligo- or polypeptide linker, for example between 2 and 10 amino acids in length may form the linkage. A glycine-serine doublet provides an example of a suitable linker.

[0202] In some embodiments, the intracellular domains of CARs of the instant disclosure comprise at least one co-stimulatory domain. In some embodiments, the co-stimulatory domain is isolated or derived from CD28. In some embodiments, the CD28 co-stimulatory domain comprises an amino acid sequence having at least 80% identity, at least 90% identity, at least 95% identity, at least 99% identity or is identical to a sequence of

(SEQ ID NO: 243)
RSKRSRLLHSDYMNMTPRRPGPTRKHYQPYAPPRDFAAYRS.

[0203] In some embodiments, the CD28 co-stimulatory domain comprises or consists essentially of SEQ ID NO: 243. In some embodiments, the CD28 co-stimulatory domain is encoded by a nucleotide sequence having at least 80% identity, at least 90% identity, at least 95% identity, at least 99% identity or is identical to a sequence of AGGAGCAAGCGGAGCAGACTGCTGCACAGCGACTACATGAACATGACCCCCCGG AGGCCTGGCCCCACCCGGAAGCACTACCAGCCCTACGCCCCTCCCAGGGATTTCG CCGCCTACCGGAGC (SEQ ID NO: 244). In some embodiments, the CD28 co-stimulatory domain is encoded by SEQ ID NO: 44.

[0204] In some embodiments, the intracellular domain of the CARs of the instant disclosure comprises an interleukin-2 receptor beta-chain (IL-2Rbeta or IL-2R-beta) cytoplasmic domain. In some embodiments, the IL-2Rbeta domain is truncated. In some embodiments, the IL-2Rbeta cytoplasmic domain comprises one or more STAT5-recruitment motifs. In some embodiments, the CAR comprises one or more STAT5-recruitment motifs outside the IL-2Rbeta cytoplasmic domain.

[0205] In some embodiments, the IL-2-Rbeta intracellular domain comprises an amino acid sequence having at least 80% identity, at least 90% identity, at least 95% identity, at least 99% identity or is identical to a sequence of NCRNTGPWLKKVLKCNTPDPSKFFSQLSSEHGGDVQKWLSSPFPSSSFSPGGLAPEIS PLEVLERDKVTQLLPLNTDAYLSLQELQGQDPTHLV (SEQ ID NO: 245). In some embodiments, the IL2R-beta intracellular domain comprises or consists essentially of SEQ ID NO: 245. In some embodiments, the IL-2R-beta intracellular domain is encoded by a nucleotide sequence having at least 80% identity, at least 90% identity, at least 95% identity, at least 99% identity or is identical to a sequence of AACTGCAGGAACACCGGGCCATGGCTGAAGAAGGTCCTGAAGTGTAACACCCCA GACCCCTCGAAGTTCTTTTCCCAGCTGAGCTCAGAGCATGGAGGCGACGTCCAGA AGTGGCTCTCTTCGCCCTTCCCCTCATCGTCCTTCAGCCCTGGCGGCCTGGCACCT GAGATCTCGCCACTAGAAGTGCTGGAGAGGGACAAGGTGACGCAGCTGCTCCCC CTGAACACTGATGCCTACTTGTCTCTCCAAGAACTCCAGGGTCAGGACCCAACTC ACTTGGTG (SEQ ID NO: 246). In some embodiments, the IL-2R-beta intracellular domain is encoded by SEQ ID NO: 246.

[0206] In an embodiment, the IL-2R-beta cytoplasmic domain comprises one or more STAT5-recruitment motifs. Exemplary STAT5-recruitment motifs are provided by Passerini et al. (2008) STAT5-signaling cytokines regulate the expression of FOXP3 in CD4+CD25+ regulatory T cells and CD4+CD25+ effector T cells. International Immunology, Vol. 20, No. 3, pp. 421-431, and by Kagoya et al. (2018) A novel chimeric antigen receptor containing a JAK-STAT signaling domain mediates superior antitumor effects. Nature Medicine doi:10.1038/nm.4478.

[0207] In some embodiments, the STAT5-recruitment motif(s) consists of the sequence Tyr-Leu-Ser-Leu (SEQ ID NO: 247).

[0208] In some embodiments, the CAR comprises an intracellular domain isolated or derived from CD28, 4-11B1 and/or CD3z, or a combination thereof. Exemplary domains derived from CD28, 4-11B1 and/or CD3z are shown in Table 15 below. In some embodiments, the CAR comprises an intracellular domain comprising a sequence of SEQ ID NOS: 248, 250 or 252, or a sequence having at least 80%, at least 85%, at least 90%, at least 95%, at least 97%, at least 99%, or that is identical thereto. In some embodiments, the CAR comprises an intracellular domain comprising a sequence of SEQ ID NOS: 248, 250 or 252. In some embodiments, the CAR intracellular domain is encoded by the sequence set forth in any one of SEQ ID NOs: 249, 251, 253, or 21804.

TABLE 15
Intracellular Domain Sequences and their use in HER2 CAR Constructs

| CAR | | Protein | |
|---|---|---|---|
| Construct | IC Domain | Sequence | DNA Sequence |
| CT-292 | CD28-4- | RSKRSRLLHS | AGGAGTAAGAGGAGCAGGCTCCTGCAC |
| | 1BB-CD3z | DYMNMTPRR | AGTGACTACATGAACATGACTCCCCGC |
| | | PGPTRKHYQP | CGCCCCGGGCCCACCCGCAAGCATTAC |
| | | YAPPRDFAA | CAGCCCTATGCCCCACCACGCGACTTCG |
| | | YRSRFSVVKR | CAGCCTATCGCTCCCGTTTCTCTGTTGT |
| | | GRKKLLYIFK | TAAACGGGGCAGAAAGAAGCTCCTGTA |
| | | QPFMRPVQTT | TATATTCAAACAACCATTTATGAGACCA |
| | | QEEDGCSCRF | GTACAAACTACTCAAGAGGAAGATGGC |
| | | PEEEEGGCEL | TGTAGCTGCCGATTTCCAGAAGAAGAA |
| | | RVKFSRSADA | GAAGGAGGATGTGAACTGAGAGTGAAG |
| | | PAYQQGQNQ | TTCAGCAGGAGCGCAGACGCCCCCGCG |
| | | LYNELNLGR | TACCAGCAGGGCCAGAACCAGCTCTAT |
| | | REEYDVLDK | AACGAGCTCAATCTAGGACGAAGAGAG |
| | | RRGRDPEMG | GAGTACGATGTTTTGGACAAGAGACGT |
| | | GKPRRKNPQ | GGCCGGGACCCTGAGATGGGGGGAAAG |
| | | EGLYNELQK | CCGAGAAGGAAGAACCCTCAGGAAGGC |
| | | DKMAEAYSEI | CTGTACAATGAACTGCAGAAAGATAAG |
| | | GMKGERRRG | ATGGCGGAGGCCTACAGTGAGATTGGG |
| | | KGHDGLYQG | ATGAAAGGCGAGCGCCGGAGGGGCAA |
| | | LSTATKDTYD | GGGGCACGATGGCCTTTACCAGGGTCT |
| | | ALHMQALPP | CAGTACAGCCACCAAGGACACCTACGA |
| | | R (SEQ ID NO: | CGCCCTTCACATGCAGGCCCTGCCCCCT |
| | | 248) | CGCTAG (SEQ ID NO: 249) |
| CT-297, | CD28- | RSKRSRLLHS | AGGAGCAAGCGGAGCAGACTGCTGCAC |
| CT-1094, | CD3z | DYMNMTPRR | AGCGACTACATGAACATGACCCCCCGG |
| CT-1095 | | PGPTRKHYQP | AGGCCTGGCCCCACCCGGAAGCACTAC |
| | | YAPPRDFAA | CAGCCCTACGCCCCTCCCAGGGATTTCG |
| | | YRSRVKFSRS | CCGCCTACCGGAGCAGAGTGAAGTTCA |
| | | ADAPAYKQG | GCAGGAGCGCAGACGCCCCCGCGTACA |
| | | QNQLYNELN | AGCAGGGCCAGAACCAGCTCTATAACG |
| | | LGRREEYDV | AGCTCAATCTAGGACGAAGAGAGGAGT |
| | | LDKRRGRDP | ACGATGTTTTGGACAAGCGTAGAGGCC |
| | | EMGGKPRRK | GGGACCCTGAGATGGGGGGAAAGCCGA |
| | | NPQEGLYNEL | GAAGGAAGAACCCTCAGGAAGGCCTGT |
| | | QKDKMAEAY | ACAATGAACTGCAGAAAGATAAGATGG |
| | | SEIGMKGERR | CGGAGGCCTACAGTGAGATTGGGATGA |
| | | RGKGHDGLY | AAGGCGAGCGCCGGAGGGGCAAGGGG |
| | | QGLSTATKDT | CACGATGGCCTTTACCAGGGACTCAGT |
| | | YDALHMQAL | ACAGCCACCAAGGACACCTACGACGCC |
| | | PPR (SEQ ID | CTTCACATGCAGGCCCTGCCCCCTCGCT |
| | | NO: 250) | AG (SEQ ID NO: 251) |
| CT-298, | 4-1BB- | KRGRKKLLYI | AAACGGGGCAGAAAGAAGCTCCTGTAT |
| CT-299 | CD3z | FKQPFMRPV | ATATTCAAACAACCATTTATGAGACCA |
| | | QTTQEEDGCS | GTACAAACTACTCAAGAGGAAGATGGC |
| | | CRFPEEEEGG | TGTAGCTGCCGATTTCCAGAAGAAGAA |
| | | CELGGGRVK | GAAGGAGGATGTGAACTGGGCGGTGGC |
| | | FSRSADAPAY | AGAGTGAAGTTCAGCAGGAGCGCAGAC |
| | | QQGQNQLYN | GCCCCCGCGTACCAGCAGGGCCAGAAC |
| | | ELNLGRREEY | CAGCTCTATAACGAGCTCAATCTAGGA |
| | | DVLDKRRGR | CGAAGAGAGGAGTACGATGTTTTGGAC |
| | | DPEMGGKPR | AAGAGACGTGGCCGGGACCCTGAGATG |
| | | RKNPQEGLY | GGGGGAAAGCCGAGAAGGAAGAACCC |
| | | NELQKDKMA | TCAGGAAGGCCTGTACAATGAACTGCA |
| | | EAYSEIGMKG | GAAAGATAAGATGGCGGAGGCCTACAG |
| | | ERRRGKGHD | TGAGATTGGGATGAAAGGCGAGCGCCG |
| | | GLYQGLSTAT | GAGGGGCAAGGGGCACGATGGCCTTTA |
| | | KDTYDALHM | CCAGGGTCTCAGTACAGCCACCAAGGA |
| | | QALPPR (SEQ | CACCTACGACGCCCTTCACATGCAGGC |
| | | ID NO: 252) | CCTGCCCCCTCGCTAG (SEQ ID NO: 253) |

### T Cell Receptors (TCRs)

[0209] The disclosure provides a first, activator receptor and immune cells comprising same. In some embodiments, the first receptor is a T cell receptor (TCR). Exemplary TCRs comprising intracellular domains for use in the instant disclosure are described in PCT/US2020/045250 filed on Sep. 6, 2020, the contents of which are incorporated herein by reference.

[0210] As used herein, a “TCR”, sometimes also called a “TCR complex” or “TCR/CD3 complex” refers to a protein complex comprising a TCR alpha chain, a TCR beta chain, and one or more of the invariant CD3 chains (zeta, gamma, delta and epsilon), sometimes referred to as subunits. The TCR alpha and beta chains can be disulfide-linked to function as a heterodimer to bind to peptide-MHC complexes. Once the TCR alpha/beta heterodimer engages peptide-MHC, conformational changes in the TCR complex in the associated invariant CD3 subunits are induced, which leads to their phosphorylation and association with downstream proteins, thereby transducing a primary stimulatory signal. In an exemplary TCR complex, the TCR alpha and TCR beta polypeptides form a heterodimer, CD3 epsilon and CD3 delta form a heterodimer, CD3 epsilon and CD3 gamma for a heterodimer, and two CD3 zeta form a homodimer.

[0211] Any suitable ligand binding domain may be fused to an extracellular domain, hinge domain or transmembrane of the TCRs described herein. For example, the ligand binding domain can be an antigen binding domain of an antibody or TCR, or comprise an antibody fragment, a Vβ only domain, a linear antibody, a single-chain variable fragment (scFv), or a single domain antibody (sdAb).

[0212] In some embodiments, the ligand binding domain is fused to one or more extracellular domains or transmembrane domains of one or more TCR subunits. The TCR subunit can be TCR alpha, TCR beta, CD3 delta, CD3 epsilon, CD3 gamma or CD3 zeta. For example, the ligand binding domain can be fused to TCR alpha, or TCR beta, or portions of the ligand binding can be fused to two subunits, for example portions of the ligand binding domain can be fused to both TCR alpha and TCR beta.

[0213] TCR subunits include TCR alpha, TCR beta, CD3 zeta, CD3 delta, CD3 gamma and CD3 epsilon. Any one or more of TCR alpha, TCR beta chain, CD3 gamma, CD3 delta, CD3 epsilon, or CD3 zeta, or fragments or derivative thereof, can be fused to one or more domains capable of providing a stimulatory signal of the disclosure, thereby enhancing TCR function and activity.

[0214] TCR transmembrane domains isolated or derived from any source are envisaged as within the scope of the disclosure. The transmembrane domain may be derived either from a natural or from a recombinant source. Where the source is natural, the domain may be derived from any membrane-bound or transmembrane protein.

[0215] In some embodiments, the transmembrane domain is capable of signaling to the intracellular domain(s) whenever the TCR complex has bound to a target. A transmembrane domain of particular use in this disclosure may include at least the transmembrane region(s) of e.g., the alpha, beta or zeta chain of the TCR, CD3 delta, CD3 epsilon or CD3 gamma, CD28, CD3 epsilon, CD45, CD4, CD5, CD8, CD9, CD16, CD22, CD33, CD37, CD64, CD80, CD86, CD134, CD137, CD154.

[0216] In some embodiments, the transmembrane domain can be attached to the extracellular region of a polypeptide of the TCR, e.g., the antigen binding domain of the TCR alpha or beta chain, via a hinge, e.g., a hinge from a human protein. For example, the hinge can be a human immunoglobulin (Ig) hinge, e.g., an IgG4 hinge, or a CD8α hinge. In some embodiments, the hinge is isolated or derived from CD8α or CD28.

[0217] In some embodiments, the extracellular ligand binding domain is attached to one or more transmembrane domains of the TCR. In some embodiments, the transmembrane domain comprises a TCR alpha transmembrane domain, a TCR beta transmembrane domain, or both. In some embodiments, the transmembrane comprises a CD3 zeta transmembrane domain.

[0218] A transmembrane domain can include one or more additional amino acids adjacent to the transmembrane region, e.g., one or more amino acid associated with the extracellular region of the protein from which the transmembrane was derived (e.g., 1, 2, 3, 4, 5, 6, 7, 8, 9, 10 or up to 15 amino acids of the extracellular region) and/or one or more additional amino acids associated with the intracellular region of the protein from which the transmembrane protein is derived (e.g., 1, 2, 3, 4, 5, 6, 7, 8, 9, 10 or up to 15 amino acids of the intracellular region).

[0219] In some embodiments, the transmembrane domain can be selected or modified by amino acid substitution to avoid binding of such domains to the transmembrane domains of the same or different surface membrane proteins, e.g., to minimize interactions with other members of the receptor complex.

[0220] When present, the transmembrane domain may be a natural TCR transmembrane domain, a natural transmembrane domain from a heterologous membrane protein, or an artificial transmembrane domain. The transmembrane domain may be a membrane anchor domain. Without limitation, a natural or artificial transmembrane domain may comprise a hydrophobic a-helix of about 20 amino acids, often with positive charges flanking the transmembrane segment. The transmembrane domain may have one transmembrane segment or more than one transmembrane segment. Prediction of transmembrane domains/segments may be made using publicly available prediction tools (e.g. TMHMM, Krogh et al. Journal of Molecular Biology 2001; 305(3):567-580; or TMpred, Hofmann & Stoffel Biol. Chem. Hoppe-Seyler 1993; 347: 166). Non-limiting examples of membrane anchor systems include platelet derived growth factor receptor (PDGFR) transmembrane domain, glycosylphosphatidylinositol (GPI) anchor (added post-translationally to a signal sequence) and the like.

[0221] In some embodiments, the transmembrane domain comprises a TCR alpha transmembrane domain. In some embodiments, the TCR alpha transmembrane domain comprises an amino acid sequence having at least 85% identity, at least 90% identity, at least 95% identity, at least 96% identity, at least 97% identity, at least 98% identity, at least 99% identity or is identical to a sequence of: VIGFRILLLKVAGFNLLMTLRLW (SEQ ID NO: 316). In some embodiments, the TCR alpha transmembrane domain comprises, or consists essentially of, SEQ ID NO: 316. In some embodiments, the TCR alpha transmembrane domain is encoded by a sequence of

(SEQ ID NO: 317)
GTGATTGGGTTCCGAATCCTCCTCCTGAAAGTGGCCGGGTTTAATCTGCT
CATGACGCTGCGGCTGTGG.

[0222] In some embodiments, the transmembrane domain comprises a TCR beta transmembrane domain. In some embodiments, the TCR beta transmembrane domain comprises an amino acid sequence having at least 85% identity, at least 90% identity, at least 95% identity, at least 96% identity, at least 97% identity, at least 98% identity, at least 99% identity or is identical to a sequence of: TILYEILLGKATLYAVLVSALVL (SEQ ID NO: 318). In some embodiments, the TCR beta transmembrane domain comprises, or consists essentially of, SEQ ID NO: 318. In some embodiments, the TCR beta transmembrane domain is encoded by a sequence of

(SEQ ID NO: 319)
ACCATCCTCTATGAGATCTTGCTAGGGAAGGCCACCTTGTATGCCGTGCT
GGTCAGTGCCCTCGTGCTG.

[0223] TCRs of the disclosure can comprise one or more intracellular domains. In some embodiments, the intracellular domain comprises one or more domains capable of providing a stimulatory signal to a transmembrane domain. In some embodiments, the intracellular domain comprises a first intracellular domain capable of providing a stimulatory signal and a second intracellular domain capable of providing a stimulatory signal. In other embodiments, the intracellular domain comprises a first, second and third intracellular domain capable of providing a stimulatory signal. The intracellular domains capable of providing a stimulatory signal are selected from the group consisting of a CD28 molecule (CD28) domain, a LCK proto-oncogene, Src family tyrosine kinase (Lck) domain, a TNF receptor superfamily member 9 (4-1BB) domain, a TNF receptor superfamily member 18 (GITR) domain, a CD4 molecule (CD4) domain, a CD8a molecule (CD8a) domain, a FYN proto-oncogene, Src family tyrosine kinase (Fyn) domain, a zeta chain of T cell receptor associated protein kinase 70 (ZAP70) domain, a linker for activation of T cells (LAT) domain, lymphocyte cytosolic protein 2 (SLP76) domain, (TCR) alpha, TCR beta, CD3 delta, CD3 gamma and CD3 epsilon intracellular domains.

[0224] In some embodiments, an intracellular domain comprises at least one intracellular signaling domain. An intracellular signaling domain generates a signal that promotes a function a cell, for example an immune effector function of a TCR containing cell, e.g., a TCR-expressing T-cell. In some embodiments, the intracellular domain of the first receptor of the disclosure includes at least one intracellular signaling domain. For example, the intracellular domains of CD3 gamma, delta or epsilon comprise signaling domains.

[0225] In some embodiments, the extracellular domain, transmembrane domain and intracellular domain are isolated or derived from the same protein, for example T-cell receptor (TCR) alpha, TCR beta, CD3 delta, CD3 gamma, CD3 epsilon or CD3 zeta.

[0226] Examples of intracellular domains for use in activator receptors of the disclosure include the cytoplasmic sequences of the TCR alpha, TCR beta, CD3 zeta, and 4-1BB, and the intracellular signaling co-receptors that act in concert to initiate signal transduction following antigen receptor engagement, as well as any derivative or variant of these sequences and any recombinant sequence that has the same functional capability.

[0227] In some embodiments, the intracellular signaling domain comprises a primary intracellular signaling domain. Exemplary primary intracellular signaling domains include those derived from the proteins responsible for primary stimulation, or antigen dependent stimulation.

[0228] In some embodiments, the intracellular domain comprises a CD3 delta intracellular domain, a CD3 epsilon intracellular domain, a CD3 gamma intracellular domain, a CD3 zeta intracellular domain, a TCR alpha intracellular domain or a TCR beta intracellular domain.

[0229] In some embodiments, the intracellular domain comprises a TCR alpha intracellular domain. In some embodiments, a TCR alpha intracellular domain comprises Ser-Ser. In some embodiments, a TCR alpha intracellular domain is encoded by a sequence of TCCAGC.

[0230] In some embodiments, the intracellular domain comprises a TCR beta intracellular domain. In some embodiments, the TCR beta intracellular domain comprises an amino acid sequence having at least 80% identity, at least 90% identity, or is identical to a sequence of: MAMVKRKDSR (SEQ ID NO: 320). In some embodiments, the TCR beta intracellular domain comprises, or consists essentially of SEQ ID NO: 320. In some embodiments, the TCR beta intracellular domain is encoded by a sequence of

(SEQ ID NO: 321)
ATGGCCATGGTCAAGAGAAAGGATTCCAGA.

[0231] In some embodiments, the intracellular signaling domain comprises at least one stimulatory intracellular domain. In some embodiments, the intracellular signaling domain comprises a primary intracellular signaling domain, such as a CD3 delta, CD3 gamma and CD3 epsilon intracellular domain, and one additional stimulatory intracellular domain, for example a co-stimulatory domain. In some embodiments, the intracellular signaling domain comprises a primary intracellular signaling domain, such as a CD3 delta, CD3 gamma and CD3 epsilon intracellular domain, and two additional stimulatory intracellular domains.

[0232] Exemplary co-stimulatory intracellular signaling domains include those derived from proteins responsible for co-stimulatory signals, or antigen independent stimulation. Co-stimulatory molecules include, but are not limited to an MHC class I molecule, BTLA, a Toll ligand receptor, as well as DAP10, DAP12, CD30, LIGHT, OX40, CD2, CD27, CDS, ICAM-1, LFA-1 (CD11a/CD18) 4-1BB (CD137, TNF receptor superfamily member 9), and CD28 molecule (CD28). A co-stimulatory protein can be represented in the following protein families: TNF receptor proteins, Immunoglobulin-like proteins, cytokine receptors, integrins, signaling lymphocytic activation molecules (SLAM proteins), and activating NK cell receptors. Examples of such molecules include CD27, CD28, 4-1BB (CD137), OX40, GITR, CD30, CD40, ICOS, BAFFR, HVEM, lymphocyte function-associated antigen-1 (LFA-1), CD2, CD7, LIGHT, NKG2C, SLAMF7, NKp80, CD160, B7-H3, a ligand that specifically binds with CD83, CD4, and the like. The co-stimulatory domain can comprise the entire intracellular portion, or the entire native intracellular signaling domain, of the molecule from which it is derived, or a functional variant thereof.

[0233] In some embodiments, the stimulatory domain comprises a co-stimulatory domain. In some embodiments, the co-stimulatory domain comprises a CD28 or 4-1BB co-stimulatory domain. CD28 and 4-1BB are well characterized co-stimulatory molecules required for full T cell activation and known to enhance T cell effector function. For example, CD28 and 4-1BB have been utilized in chimeric antigen receptors (CARs) to boost cytokine release, cytolytic function, and persistence over the first-generation CAR containing only the CD3 zeta signaling domain. Likewise, inclusion of co-stimulatory domains, for example CD28 and 4-1BB domains, in TCRs can increase T cell effector function and specifically allow co-stimulation in the absence of co-stimulatory ligand, which is typically down-regulated on the surface of tumor cells. In some embodiments, the stimulatory domain comprises a CD28 intracellular domain or a 4-1BB intracellular domain.

### Inhibitory Receptors

[0234] The disclosure provides a second receptor, comprising an extracellular ligand binding domain specific to a non-target antigen that has been lost in a cancer cell, such as an allelic variant of a gene. The non-target allelic variant can be lost in the cancer cell through any mechanism, such as, without limitation, epigenetic changes that effect non-target allelic variant expression, mutations to the gene encoding the non-target allelic variant, disruption of cellular signaling that regulates expression of the non-target allelic variant, chromosome loss, partial or complete deletion of the genomic locus, gene silencing through modification of nucleic acids or heterochromatin, or loss of expression through other mechanisms. In variations of the compositions and methods disclosed herein, the cells or subject treated may exhibit a loss of expression of the non-target allelic variant because of non-genetic changes. Accordingly the disclosure provides compositions and methods for killing cells and/or treating subject lacking expression of the non-target antigen from any cause, including but not limited to, loss of heterozygosity.

[0235] Exemplary inhibitory receptors are described in PCT/US2020/045228 filed on Sep. 6, 2020, PCT/US2020/064607, filed on Dec. 11, 2020, PCT/US2021/029907, filed on Apr. 29, 2021 and PCT/US2020/059856 filed on Nov. 10, 2020, the contents of each of which are incorporated herein by reference.

[0236] The term “inhibitory chimeric antigen receptor” or “inhibitory receptor” as used herein refers to an antigen-binding domain that is fused to an intracellular signaling domain capable of transducing an inhibitory signal that inhibits or suppresses the immune activity of an immune cell. Inhibitory receptors have immune cell inhibitory potential, and are distinct and distinguishable from CARs, which are receptors with immune cell activating potential. For example, CARs are activating receptors as they include intracellular stimulatory and/or co-stimulatory domains. Inhibitory receptors are inhibiting receptors that contain intracellular inhibitory domains.

[0237] As used herein “inhibitory signal” refers to signal transduction or changes in protein expression in an immune cell resulting in suppression of an immune response (e.g., decrease in cytokine production or reduction of immune cell activation). Inhibition or suppression of an immune cell can selective and/or reversible, or not selective and/or reversible. Inhibitory receptors are responsive to non-target antigens (e.g. HLA-A*02). For example, when a non-target antigen (e.g. HLA-A*02) binds to or contacts the inhibitory receptor, the inhibitory receptor is responsive and activates an inhibitory signal in the immune cell expressing the inhibitory receptor upon binding of the non-target antigen by the extracellular ligand binding domain of the inhibitory receptor.

[0238] The non-target antigen can be a non-target allelic variant. A “non-target allelic variant” as used herein refers to an allele (e.g. an allelic variant of an MHC Class I gene), whose expression is reduced or eliminated in a target cell (e.g. a cancer cell) due to loss of heterozygosity, or another mechanism of expression loss, but is expressed or detectably expressed in a normal or healthy cell. The non-target antigen can be a protein, or an antigen peptide thereof in a complex with a major histocompatibility complex class I (MHC-I), where the non-target antigen comprises a polymorphism. Because the non-target antigen is polymorphic, loss of a single copy of the gene encoding the non-target antigen, which may occur through loss of heterozygosity in a cancer cell, yields a cancer cell that retains the other polymorphic variant of gene, but has lost the non-target antigen. For example, a subject having HLA-A*02 and HLA-A*01 alleles at the HLA locus may have a cancer in which only the HLA-A*02 allele is lost. In such a subject, the HLA-A*01 protein remains present, but is not recognized by the inhibitory receptor of immune cells encountering the cancer cell, because the inhibitor receptor is designed to be specific to the HLA-A*02 (or other non-target antigen). In normal non-malignant cells, the HLA-A*02 (or other non-target antigen) is present and inhibits activation of the engineered immune cell. In cancer cells having loss of heterozygosity, the HLA-A*02 allelic variant (or other non-target antigen) is lost. Immune cells engineered to express the inhibitory receptor do not receive an inhibitory signal from the inhibitory receptor, as the inhibitory receptor only responds to the HLA-A*02 (or other non-target antigen), which is absent on cancer cells. By this mechanism, the immune cell is selectively activated, and selectively kills, cancer cells expressing HER2 but having lost HLA-A*02 (or another non-target antigen) due to loss-of-heterozygosity. HLA-A is used here as an example. Similar polymorphic variation occurs in the population at other MHC genes and in other non-MHC genes as well. Accordingly, in some embodiments, the non-target antigen comprises a polymorphic variant of COLEC12, APCDD1 or CXCL16, or HLA-A*02. In some embodiments, the non-target antigen is an HLA class I allele or a minor histocompatibility antigen (MiHA). In some embodiments, the HLA Class I allele comprises HLA-A, HLA-B, HLA-C, or HLA-E. In some embodiments, the HLA class I allele is HLA-A*02. In some embodiments, the HLA-A*02 non-target antigen is expressed by healthy cells of a subject. In some embodiments, the non-target antigen is a non-target allelic variant. In some embodiments, the non-target antigen is not expressed in a cancer cell of the subject. In some embodiments, the non-target antigen is not expressed in a fraction of the cells in a tumor in the subject. In some embodiments, a cancer cell in a subject has lost expression of the non-target antigen. Loss of expression or lack of expression of the non-target antigen in a cell can be by any mechanism, such as, without limitation, epigenetic changes that effect non-target gene expression, mutations to the gene encoding the non-target antigen, or disruption of cellular signaling that regulates expression of the non-target gene.

[0239] In some embodiments, the second receptor is an inhibitory chimeric antigen receptor (i.e. inhibitory receptor). In some embodiments, the second receptor is an inhibitory receptor. In some embodiments, the second receptor is humanized.

[0240] In some embodiments, the second receptor comprises SEQ ID NO: 323, or a sequence sharing at least 75%, at least 80%, at least 85%, at least 90%, at least 95%, or at least 98% identity thereto. In some embodiments, the second receptor comprises SEQ ID NO: 324 or a sequence sharing at least 75%, at least 80%, at least 85%, at least 90%, at least 95%, or at least 98% identity thereto.

[0241] The disclosure provides a second receptor, which is an inhibitory receptor, comprising an extracellular ligand binding that can discriminate between single amino-acid variant alleles of a non-target antigen. This ability to discriminate between allelic variants of a non-target antigen allows the second receptor to inhibit activation of immune cells comprising the second receptor in the presence of non-target cells that express that the allele recognized by the ligand binding domain. However, activation of immune cells is not inhibited in the presence of target cells that have lost the allele, for example cancer cells that have lost one allele of a gene through loss of heterozygosity.

[0242] The disclosure provides a second receptor, which is an inhibitory receptor, comprising an extracellular ligand binding that can discriminate between different levels of expression of a non-target antigen. This allows the second receptor to inhibit activation of immune cells comprising the second receptor in the presence of non-target cells that express the ligand for the second receptor, but to allow activation of immune cells in the presence of cancer cells that express low levels, or have no expression, of the ligand for the second receptor.

[0243] Inhibitor Ligands

[0244] In some embodiments, the non-target antigen is not expressed by the target cells, and is expressed by non-target cells. In some embodiments, the non-target antigen is expressed by healthy cells, i.e. cells that are not cancer cells. In some embodiments, the target cells are a plurality of cancer cells that have lost expression of the non-target antigen through loss of heterozygosity (LOH). In some embodiments, the non-target cells are a plurality of healthy cells (i.e., non-cancer, normal, or healthy cells), that express both the target and the non-target antigen.

[0245] Any cell surface molecule expressed by the non-target cells that is not expressed by target cells may be a suitable non-target antigen for the second receptor extracellular ligand binding domain. For example, a cell adhesion molecule, a cell-cell signaling molecule, an extracellular domain, a molecule involved in chemotaxis, a glycoprotein, a G protein-coupled receptor, a transmembrane, a receptor for a neurotransmitter or a voltage gated ion channel can be used as a non-target antigen.

[0246] In some embodiments, the target antigen is a peptide antigen of a cancer cell-specific antigen in a complex with a major histocompatibility complex class I (MHC-I).

[0247] In some embodiments, the non-target antigen is lost in the cancer cells due to loss of heterozygosity. Exemplary non-target antigens lost in cancer cells due to loss of heterozygosity include COLEC12, APCDD1, CXCL16 and HLA-A*02. In some embodiments, the non-target antigen is selected from the group consisting of a polymorphic variant of COLEC12, APCDD1 and CXCL166, or a peptide antigen thereof a complex with a major histocompatibility complex class I (MHC-I), or HLA-A*02. In some embodiments, the non-target antigen is an antigen peptide comprising a polymorphic residue of COLEC12, APCDD1 and CXCL16 in a complex with a major histocompatibility complex class I (MHC-I).

[0248] Non-target MHC-1 (MHC) antigens comprising any of HLA-A, HLA-B or HLA-C are envisaged as within the scope of the disclosure. In some embodiments, the non-target antigen comprises HLA-A. In some embodiments, the non-target antigen comprises a human leukocyte antigen A*02 allelic product (HLA-A*02). In some embodiments, the non-target antigen comprises human leukocyte antigen A*69. In some embodiments, the non-target antigen comprises HLA-B. In some embodiments, the non-target antigen comprises HLA-C.

[0249] In some embodiments, the non-target antigen comprises HLA-A*02.

[0250] In some embodiments, the non-target antigen comprises C—X—C motif chemokine ligand 16 (CXCL16) or an antigen peptide thereof in a complex with MHC-I. Human CXCL16 precursor is described in NCBI record number NP_001094282.1, the contents of which are incorporated by reference herein in their entirety. In some embodiments, CXCL16 comprises an amino acid sequence of:

| (SEQ ID NO: 325) | |
|---|---|
| 1 | MSGSQSEVAP SPQSPRSPEM GRDLRPGSRV LLLLLLLLLV YLTQPGNGNE GSVTGSCYCG |
| 61 | KRISSDSPPS VQFMNRLRKH LRAYHRCLYY TRFQLLSWSV CGGNKDPWVQ ELMSCLDLKE |
| 121 | CGHAYSGIVA HQKHLLPTSP PISQASEGAS SDIHTPAQML LSTLQSTQRP TLPVGSLSSD |
| 181 | KELTRPNETT IHTAGHSLAA GPEAGENQKQ PEKNAGPTAR TSATVPVLCL LAIIFILTAA |
| 241 | LSYVLCKRRR GQSPQSSPDL PVHYIPVAPD SNT. |

[0251] In some embodiments, the non-target antigen comprises a polymorphism of CXCL16. For example, the non-target antigen comprises a peptide derived from CXCL16 comprising a polymorphic residue of CXCL16. Polymorphic residues of CXCL16 include positions 142 and 200 of SEQ ID NO: 325. In some embodiments, the non-target antigen comprises a peptide of CXCL16 comprising amino acid 142 or 200 of SEQ ID NO: 325. In some embodiments, the non-target antigen comprises a peptide of CXCL16 comprising an A at amino acid 200 of SEQ ID NO: 325. In some embodiments, the non-target antigen comprises a peptide of CXCL16 comprising a V at amino acid 200 of SEQ ID NO: 325. In some embodiments, the non-target antigen comprises a peptide of CXCL16 comprising an I at amino acid 142 of SEQ ID NO: 325. In some embodiments, the non-target antigen comprises a peptide of CXCL16 comprising a T at amino acid 142 of SEQ ID NO: 325.

[0252] In some embodiments, the non-target antigen comprises a polymorphism of CXCL16. In some embodiments, the non-target antigen comprises a peptide of CXCL16 comprising an A at amino acid 200 of SEQ ID NO: 325, and the second receptor comprises a ligand binding domain with a higher affinity for a CXCL16 ligand with an A at position 200 of SEQ ID NO: 325 than for a CXCL16 ligand with a V at position 200 of SEQ ID NO: 325. In some embodiments, the non-target antigen comprises a peptide of CXCL16 comprising a V at amino acid 200 of SEQ ID NO: 325, and the second receptor comprises a ligand binding domain with a higher affinity for a CXCL16 ligand with a V at position 200 of SEQ ID NO: 325 than for a CXCL16 ligand with an A at position 200 of SEQ ID NO: 325. In some embodiments, the non-target antigen comprises a peptide of CXCL16 comprising an I at amino acid 142 of SEQ ID NO: 325, and the second receptor comprises a ligand binding domain with a higher affinity for a CXCL16 ligand with an I at position 142 of SEQ ID NO: 325 than for a CXCL16 ligand with a T at position 142 of SEQ ID NO: 325. In some embodiments, the non-target antigen comprises a peptide of CXCL16 comprising a T at amino acid 142 of SEQ ID NO: 325, and the second receptor comprises a ligand binding domain with a higher affinity for a CXCL16 ligand with a T at position 142 of SEQ ID NO: 325 than for a CXCL16 ligand with an I at position 142 of SEQ ID NO: 325.

[0253] In some embodiments, the non-target antigen comprises collectin subfamily member 12 (COLEC12) or an antigen peptide thereof in a complex with MHC-I. Human COLEC12 is described in NCBI record number NP_569057.2, the contents of which are incorporated by reference herein in their entirety. In some embodiments, COLEC12 comprises an amino acid sequence of:

| (SEQ ID NO: 326) | |
|---|---|
| 1 | MKDDFAEEEE VQSFGYKRFG IQEGTQCTKC KNNWALKFSI ILLYILCALL TITVAILGYK |
| 61 | VVEKMDNVTG GMETSRQTYD DKLTAVESDL KKLGDQTGKK AISTNSELST FRSDILDLRQ |
| 121 | QLREITEKTS KNKDTLEKLQ ASGDALVDRQ SQLKETLENN SFLITTVNKT LQAYNGYVTN |
| 181 | LQQDTSVLQG NLQNQMYSHN VVIMNLNNLN LTQVQQRNLI TNLQRSVDDT SQAIQRIKND |
| 241 | FQNLQQVFLQ AKKDTDWLKE KVQSLQTLAA NNSALAKANN DTLEDMNSQL NSFTGQMENI |
| 301 | TTISQANEQN LKDLQDLHKD AENRTAIKFN QLEERFQLFE TDIVNIISNI SYTAHHLRTL |
| 361 | TSNLNEVRTT CTDTLTKHTD DLTSLNNTLA NIRLDSVSLR MQQDLMRSRL DTEVANLSVI |
| 421 | MEEMKLVDSK HGQLIKNFTI LQGPPGPRGP RGDRGSQGPP GPTGNKGQKG EKGEPGPPGP |
| 481 | AGERGPIGPA GPPGERGGKG SKGSQGPKGS RGSPGKPGPQ GSSGDPGPPG PPGKEGLPGP |
| 541 | QGPPGFQGLQ GTVGEPGVPG PRGLPGLPGV PGMPGPKGPP GPPGPSGAVV PLALQNEPTP |
| 601 | APEDNGCPPH WKNFTDKCYY FSVEKEIFED AKLFCEDKSS HLVFINTREE QQWIKKQMVG |
| 661 | RESHWIGLTD SERENEWKWL DGTSPDYKNW KAGQPDNWGH GHGPGEDCAG LIYAGQWNDF |
| 721 | QCEDVNNFIC EKDRETVLSS AL. |

[0254] In some embodiments, the non-target antigen comprises a polymorphism of COLEC12. For example, the non-target antigen comprises a peptide derived from COLEC12 comprising a polymorphic residue of COLEC12. Polymorphic residues of COLEC12 include position 522 of SEQ ID NO: 326. In some embodiments, the non-target antigen comprises a peptide of COLEC12 comprising amino acid 522 of SEQ ID NO: 326. In some embodiments, the non-target antigen comprises a peptide of COLEC12 comprising an S at amino acid 522 of SEQ ID NO: 326. In some embodiments, the non-target antigen comprises a peptide of COLEC12 comprising a P at amino acid 522 of SEQ ID NO: 326.

[0255] In some embodiments, the non-target antigen comprises APC down-regulated 1 (APCDD1) or an antigen peptide thereof in a complex with MHC-I. An exemplary human APCDD1 is described in UniProtKB record number Q8J025, the contents of which are incorporated by reference herein in their entirety. In some embodiments, APCDD1 comprises an amino acid sequence of:

| (SEQ ID NO: 327) | |
|---|---|
| 1 | MSWPRRLLLR YLFPALLLHG LGEGSALLHP DSRSHPRSLE KSAWRAFKES QCHHMLKHLH |
| 61 | NGARITVQMP PTIEGHWVST GCEVRSGPEF ITRSYRFYHN NTFKAYQFYY GSNRCTNPTY |
| 121 | TLIIRGKIRL RQASWIIRGG TEADYQLHNV QVICHTEAVA EKLGQQVNRT CPGFLADGGP |
| 181 | WVQDVAYDLW REENGCECTK AVNFAMHELQ LIRVEKQYLH HNLDHLVEEL FLGDIHTDAT |
| 241 | QRMFYRPSSY QPPLQNAKNH DHACIACRII YRSDEHHPPI LPPKADLTIG LHGEWVSQRC |
| 301 | EVRPEVLFLT RHFIFHDNNN TWEGHYYHYS DPVCKHPTFS IYARGRYSRG VLSSRVMGGT |
| 361 | EFVFKVNHMK VTPMDAATAS LLNVFNGNEC GAEGSWQVGI QQDVTHTNGC VALGIKLPHT |
| 421 | EYEIFKMEQD ARGRYLLFNG QRPSDGSSPD RPEKRATSYQ MPLVQCASSS PRAEDLAEDS |
| 481 | GSSLYGRAPG RHTWSLLLAA LACLVPLLHW NIRR. |

[0256] In some embodiments, the non-target antigen comprises a polymorphism of APCDD1. Exemplary polymorphisms of APCDD1 include rs3748415, which can be a V, I or L at position 150 of SEQ ID NO: 327. In some embodiments, the non-target antigen comprises a peptide of APCDD1 comprising amino acid 150 of SEQ ID NO: 327. In some embodiments, the non-target antigen comprises a peptide of APCDD1 comprising an V at amino acid 150 of SEQ ID NO: 327. In some embodiments, the non-target antigen comprises a peptide of APCDD1 comprising an I at amino acid 150 of SEQ ID NO: 327. In some embodiments, the non-target antigen comprises a peptide of APCDD1 comprising an L at amino acid 150 of SEQ ID NO: 327.

[0257] A further exemplary human APCDD1 is described in UniProtKB record number V9GY82, the contents of which are incorporated by reference herein in their entirety. In some embodiments, APCDD1 comprises an amino acid sequence of:

| (SEQ ID NO: 328) | |
|---|---|
| 1 | XDVAYDLWRE ENGCECTKAV NFAMHELQLI RVEKQYLHHN LDHLVEELFL GDIHTDATQR |
| 61 | MFYRPSSYQP PLQNAKCAAE SSGSFQILPQ DSSEKEQNGL SHWCLSRPGH QKDWALCAHA |
| 121 | GPATAGCPSC LWPPAETGRK AGRTSSKTVH ACPGEAGTSS FELFYFPNCW SIETKLKISL |
| 181 | NAKLSFKPRA SAPLETGHRV KIETLSQLVF LSFIQLCCEV QSPLANK. |

[0258] Exemplary polymorphisms of APCDD1 include rs1786683, which can be a Y or S at position 165 of SEQ ID NO: 328. In some embodiments, the non-target antigen comprises a peptide of APCDD1 comprising amino acid 165 of SEQ ID NO: 328. In some embodiments, the non-target antigen comprises a peptide of APCDD1 comprising a Y at amino acid 165 of SEQ ID NO: 328. In some embodiments, the non-target antigen comprises a peptide of APCDD1 comprising an S at amino acid 165 of SEQ ID NO: 328.

[0259] A further exemplary human APCDD1 is described in UniProt record number J3QSE3, the contents of which are incorporated by reference herein in their entirety. In some embodiments, APCDD1 comprises an amino acid sequence of:

| (SEQ ID NO: 329) | |
|---|---|
| 1 | PEDVLPALQL PAPSAECQVE MGFHHVGQDG LQLPTSSDPP ALASQSAGIT GVSHRPPGRH |
| 61 | LSNDLRTTTM PASPVGSSIG QTSTTLPSCP QRQT. |

[0260] Exemplary polymorphisms of APCDD1 include rs9952598, which can be a Q or R at position 28 of SEQ ID NO: 329. In some embodiments, the non-target antigen comprises a peptide of APCDD1 comprising amino acid 28 of SEQ ID NO: 329. In some embodiments, the non-target antigen comprises a peptide of APCDD1 comprising a Q at amino acid 28 of SEQ ID NO: 329. In some embodiments, the non-target antigen comprises a peptide of APCDD1 comprising an R at amino acid 28 of SEQ ID NO: 329.

[0261] In some embodiments, APCDD1 comprises a sequence that shares at least 80%, at least 85%, at least 90%, at least 95%, at least 94%, at least 97%, at least 98%, or at least 99% identity to any one of SEQ ID NOs: 327-329. Polymorphic residues of APCDD1 are marked as bold and underlined in SEQ ID NOs: 327-329.

[0262] In some embodiments, the non-target antigen comprising HLA-A*02, and the ligand binding domain of the second receptor comprises an HLA-A*02 ligand binding domain. In some embodiments, the ligand binding domain binds HLA-A*02 independent of the peptide in a pMHC complex comprising HLA-A*02. In some embodiments, the HLA-A*02 ligand binding domain comprises an scFv domain. In some embodiments, the HLA-A*02 ligand binding domain comprises a sequence of any one of SEQ ID NOs: 63-74. In some embodiments, the HLA-A*02 ligand binding domain comprises a sequence at least 90%, at least 95% or at least 99% identical to a sequence of any one of SEQ ID NOs: 63-74.

[0263] In some embodiments, the HLA-A*02 scFv comprises the complementarity determined regions (CDRs) of any one of SEQ ID NOS: 87-102. In some embodiments, the scFv comprises a sequence at least 95% identical to any one of SEQ ID NOS: 87-102. In some embodiments, the scFv comprises a sequence identical to any one of SEQ ID NOS: 87-102. In some embodiments, the heavy chain of the antigen binding domain comprises the heavy chain CDRs of any one of SEQ ID NOS: 87-102, and wherein the light chain of the antigen binding domain comprises the light chain CDRs of any one of SEQ ID NOS: 87-102. In some embodiments, the HLA-A*02 antigen binding domain comprises a heavy chain and a light chain, and the heavy chain comprises CDRs selected from SEQ ID NOs: 95-102 and the light chain comprises CDRs selected from SEQ ID NOs: 87-94. In further embodiments of any of the ligand binding domains, each CDR sequence may have 1, 2, 3 or more substitutions, insertions, or deletions. CDR sequences may tolerate substitutions, deletions, or insertions. Using sequence alignment tools, routine experimentation, and known assays, those of skill in the art may generate and test variant sequences having 1, 2, 3, or more substitutions, insertions, or deletions in CDR sequences without undue experimentation.

[0264] In some embodiments, the HLA-A*02 antigen binding domain comprises a heavy chain and a light chain, and the heavy chain comprises a sequence at least 95% identical to the heavy chain portion of any one of SEQ ID NOS: 63-74, and the light chain comprises a sequence at least 95% identical to the light chain portion of any one of SEQ ID NOS: 63-74.

[0265] In some embodiments, the heavy chain comprises a sequence identical to the heavy chain portion of any one of SEQ ID NOS: 63-74, and wherein the light chain of comprises a sequence identical to the light chain portion of any one of SEQ ID NOS: 63-74.

[0266] In some embodiments, the non-target antigen comprises HLA-B*07, and the ligand binding domain of the second receptor comprises an HLA-B*07 ligand binding domain. In some embodiments, the ligand binding domain binds HLA-B*07 independent of the peptide in a pMHC complex comprising HLA-B*07. In some embodiments, the HLA-B*07 ligand binding domain comprises an scFv domain. In some embodiments, the HLA-B*07 ligand binding domain comprises a sequence of any one of the indicated B7 binding domains in Table 7. In some embodiments, the HLA-B*07 ligand binding domain comprises a sequence at least 90%, at least 95% or at least 99% identical to a sequence of any one of the indicated HLA-B*07 binding domains in Table 7. In some embodiments, the HLA-B*07 scFv comprises any one of the indicated HLA-B*07 complementarity determined regions (CDRs) in Table 9. In some embodiments, the scFv comprises a sequence at least 95% identical to any one of the indicated HLA-B*07 scFv sequences in Table 7. In some embodiments, the scFv comprises a sequence identical to any one of the indicated HLA-B*07 scFv sequences in Table 7.

[0267] In some embodiments, the non-target antigen comprises HLA-A*11, and the ligand binding domain of the second receptor comprises an HLA-A*11 ligand binding domain. In some embodiments, the ligand binding domain binds HLA-A*11 independent of the peptide in a pMHC complex comprising HLA-A*11. In some embodiments, the HLA-A*11 ligand binding domain comprises an scFv domain. In some embodiments, the HLA-A*11 ligand binding domain comprises a sequence of any one of the indicated HLA-A*11 binding domains in Table 7. In some embodiments, the HLA-A*11 ligand binding domain comprises a sequence at least 90%, at least 95% or at least 99% identical to a sequence of any one of the indicated HLA-A*11 binding domains in Table 7. In some embodiments, the HLA-A*11 scFv comprises any one of the indicated HLA-A*11 complementarity determined regions (CDRs) in Table 9. In some embodiments, the scFv comprises a sequence at least 95% identical to any one of the indicated HLA-A*11 scFv sequences in Table 7. In some embodiments, the scFv comprises a sequence identical to any one of the indicated HLA-A*11 scFv sequences in Table 7.

[0268] In some embodiments, the non-target antigen comprises HLA-A*01, and the ligand binding domain of the second receptor comprises an HLA-A*01 ligand binding domain. In some embodiments, the ligand binding domain binds HLA-A*01 independent of the peptide in a pMHC complex comprising HLA-A*01. In some embodiments, the HLA-A*01 ligand binding domain comprises an scFv domain. In some embodiments, the HLA-A*01 ligand binding domain comprises a sequence of any one of the indicated HLA-A*01 binding domains in Table 7. In some embodiments, the HLA-A*01 ligand binding domain comprises a sequence at least 90%, at least 95% or at least 99% identical to a sequence of any one of the indicated HLA-A*01 binding domains in Table 7. In some embodiments, the HLA-A*01 scFv comprises any one of the indicated HLA-A*01 complementarity determined regions (CDRs) in Table 91n some embodiments, the scFv comprises a sequence at least 95% identical to any one of the indicated HLA-A*01 scFv sequences in Table 7. In some embodiments, the scFv comprises a sequence identical to any one of the indicated HLA-A*01 scFv sequences in Table 7.

[0269] In some embodiments, the non-target antigen comprises HLA-A*03, and the ligand binding domain of the second receptor comprises an HLA-A*03 ligand binding domain. In some embodiments, the ligand binding domain binds HLA-A*03 independent of the peptide in a pMHC complex comprising HLA-A*03. In some embodiments, the HLA-A*03 ligand binding domain comprises an scFv domain. In some embodiments, the HLA-A*03 ligand binding domain comprises a sequence of any one of the indicated HLA-A*03 binding domains in Table 7. In some embodiments, the HLA-A*03 ligand binding domain comprises a sequence at least 90%, at least 95% or at least 99% identical to a sequence of any one of the indicated HLA-A*03 binding domains in Table 7. In some embodiments, the HLA-A*03 scFv comprises any one of the indicated HLA-A*03 complementarity determined regions (CDRs) in Table 9. In some embodiments, the scFv comprises a sequence at least 95% identical to any one of the indicated HLA-A*03 scFv sequences in Table 7. In some embodiments, the scFv comprises a sequence identical to any one of the indicated HLA-A*03 scFv sequences in Table 7.

[0270] In some embodiments, the non-target antigen comprises HLA-C*07, and the ligand binding domain of the second receptor comprises an HLA-C*07 ligand binding domain. In some embodiments, the ligand binding domain binds HLA-C*07 independent of the peptide in a pMHC complex comprising HLA-C*07. In some embodiments, the HLA-C*07 ligand binding domain comprises an scFv domain. In some embodiments, the HLA-C*07 ligand binding domain comprises a sequence of any one of the indicated HLA-C*07 binding domains in Table 7. In some embodiments, the HLA-C*07 ligand binding domain comprises a sequence at least 90%, at least 95% or at least 99% identical to a sequence of any one of the indicated HLA-C*07 binding domains in Table 7. In some embodiments, the HLA-C*07 scFv comprises any one of the indicated HLA-C*07 complementarity determined regions (CDRs) in Table 9. In some embodiments, the scFv comprises a sequence at least 95% identical to any one of the indicated HLA-C*07 scFv sequences in Table 7. In some embodiments, the scFv comprises a sequence identical to any one of the indicated HLA-C*07 scFv sequences in Table 7.

[0271] Inhibitory receptors of the disclosure may comprise an extracellular ligand binding domain. Any type of ligand binding domain that can regulate the activity of a receptor in a ligand dependent manner is envisaged as within the scope of the instant disclosure.

[0272] In some embodiments, the ligand binding domain is an antigen binding domain. Exemplary antigen binding domains include, inter alia, scFv, SdAb, Vβ-only domains, and TCR antigen binding domains derived from the TCR α and β chain variable domains.

[0273] Any type of antigen binding domain is envisaged as within the scope of the instant disclosure.

[0274] In some embodiments, the extracellular ligand binding domain of the second receptor binds to and recognizes a polymorphic variant of COLEC12, APCDD1, CXCL16 or an antigen peptide thereof in a complex with a major histocompatibility complex class I (MHC-I), or HLA-A*02. In some embodiments, the extracellular ligand binding domain of the second receptor is an scFv.

[0275] In some embodiments, the extracellular ligand binding domain of the second receptor is fused to the extracellular domain of an inhibitory receptor.

[0276] In some embodiments, the inhibitory receptors of the present disclosure comprise an extracellular hinge region. Exemplary hinges can be isolated or derived from IgD and CD8 domains, for example IgG1. In some embodiments, the hinge is isolated or derived from CD8α or CD28.

[0277] The inhibitory receptors of the present disclosure can be designed to comprise a transmembrane domain that is fused to the extracellular domain of the inhibitory receptors. In some instances, the transmembrane domain can be selected or modified by amino acid substitution to avoid binding of such domains to the transmembrane domains of the same or different surface membrane proteins to minimize interactions with other members of the receptor complex.

[0278] The transmembrane domain may be derived either from a natural or from a synthetic source. Where the source is natural, the domain may be derived from any membrane-bound or transmembrane protein. Transmembrane regions may be isolated or derived from (i.e. comprise at least the transmembrane region(s) of) the alpha, beta or zeta chain of the T-cell receptor, CD28, CD3 epsilon, CD45, CD4, CD5, CD8, CD9, CD16, CD22, CD33, CD37, CD64, CD80, CD86, CD134, CD137, CD154, or from an immunoglobulin such as IgG4. Alternatively, the transmembrane domain may be synthetic, in which case it will comprise predominantly hydrophobic residues such as leucine and valine. In some embodiments, a triplet of phenylalanine, tryptophan and valine will be found at each end of a synthetic transmembrane domain. Optionally, a short oligo- or polypeptide linker, preferably between 2 and 10 amino acids in length may form the linkage between the transmembrane domain and the intracellular domain of the inhibitory receptors. A glycine-serine doublet provides a particularly suitable linker.

[0279] The disclosure provides an inhibitory receptors comprising an intracellular domain. The intracellular domain of the inhibitory receptors of the instant disclosure is responsible for inhibiting activation of the immune cells comprising the inhibitory receptors, which would otherwise be activated in response to activation signals by the first receptor. In some embodiments, for example in the second inhibitory receptors of the disclosure which provide an inhibitory signal, the inhibitory signal is transmitted through the intracellular domain of the receptor. In some embodiments, the inhibitory receptor comprises an inhibitory intracellular domain. In some embodiments, the inhibitory engineered receptor is a CAR comprising an inhibitory intracellular domain (an inhibitory CAR).

[0280] In some embodiments, the inhibitory intracellular domain comprises an immunoreceptor tyrosine-based inhibitory motif (ITIM). In some embodiments, the inhibitory intracellular domain comprising an ITIM can be isolated or derived from an immune checkpoint inhibitor such as CTLA-4 and PD-1. CTLA-4 and PD-1 are immune inhibitory receptors expressed on the surface of T cells, and play a pivotal role in attenuating or terminating T cell responses.

[0281] Inhibitory domains can be isolated from human tumor necrosis factor related apoptosis inducing ligand (TRAIL) receptor and CD200 receptor 1. In some embodiments, the TRAIL receptor comprises TR10A, TR10B or TR10D.

[0282] In some embodiments, the inhibitory domain comprises an intracellular domain, a transmembrane or a combination thereof. In some embodiments, the inhibitory intracellular domain is isolated from phosphoprotein membrane anchor with glycosphingolipid microdomains 1 (PAG1). In some embodiments, the inhibitory intracellular domain is isolated from leukocyte immunoglobulin like receptor B1 (LILRB1). In some embodiments, the inhibitory domain is isolated or derived from a human protein, for example a human TRAIL receptor, CTLA-4, or PD-1, PAG1 or LILRB1 protein.

[0283] In some embodiments, the inhibitory domain comprises an intracellular domain, a transmembrane domain, a hinge region or a combination thereof. In some embodiments, the inhibitory domain comprises an immunoreceptor tyrosine-based inhibitory motif (ITIM). In some embodiments, the inhibitory domain comprising an ITIM can be isolated or derived from an immune checkpoint inhibitor such as CTLA-4 and PD-1. Exemplary hinge, transmembrane, and intracellular domains that may be used in inhibitory receptors described herein are shown in Table 16.

[0284] Inhibitory domains can be isolated from human tumor necrosis factor related apoptosis inducing ligand (TRAIL) receptor and CD200 receptor 1. In some embodiments, the inhibitory domain is isolated or derived from a human protein, for example a human TRAIL receptor, CTLA-4, or PD-1 protein. In some embodiments, the TRAIL receptor comprises TR10A, TR10B or TR10D.

[0285] Endogenous TRAIL is expressed as a 281-amino acid type II trans-membrane protein, which is anchored to the plasma membrane and presented on the cell surface. TRAIL is expressed by natural killer cells, which, following the establishment of cell-cell contacts, can induce TRAIL-dependent apoptosis in target cells. Physiologically, the TRAIL-signaling system was shown to be essential for immune surveillance, for shaping the immune system through regulating T-helper cell 1 versus T-helper cell 2 as well as “helpless” CD8+ T-cell numbers, and for the suppression of spontaneous tumor formation.

[0286] In some embodiments, the inhibitory domain comprises an intracellular domain isolated or derived from a CD200 receptor. The cell surface glycoprotein CD200 receptor 1 (Uniprot ref: Q8TD46) represents another example of an inhibitory intracellular domain of the present invention. This inhibitory receptor for the CD200/OX2 cell surface glycoprotein limits inflammation by inhibiting the expression of proinflammatory molecules including TNF-alpha, interferons, and inducible nitric oxide synthase (iNOS) in response to selected stimuli.

[0287] In some embodiments, the engineered receptor comprises an inhibitory domain isolated or derived from killer cell immunoglobulin like receptor, three Ig domains and long cytoplasmic tail 2 (KIR3DL2), killer cell immunoglobulin like receptor, three Ig domains and long cytoplasmic tail 3 (KIR3DL3), leukocyte immunoglobulin like receptor B1 (LIR1, also called LIR-1 and LILRB1), programmed cell death 1 (PD-1), Fc gamma receptor IIB (FcgRIIB), killer cell lectin like receptor K1 (NKG2D), CTLA-4, a domain containing a synthetic consensus ITIM, a ZAP70 SH2 domain (e.g., one or both of the N and C terminal SH2 domains), or ZAP70 KI_K369A (kinase inactive ZAP70).

[0288] In some embodiments, the inhibitory domain is isolated or derived from a human protein. In some embodiments, the second, inhibitory receptor comprises an inhibitory domain. In some embodiments, the second, inhibitory receptor comprises an inhibitory intracellular domain and/or an inhibitory domain and transmembrane domain. In some embodiments, the inhibitory intracellular domain is fused to an intracellular domain of an inhibitory receptors. In some embodiments, the inhibitory intracellular domain is fused to the transmembrane domain of an inhibitory receptors.

[0289] In some embodiments, the second, inhibitory receptor comprises a cytoplasmic domain and transmembrane domain isolated or derived from the same protein, for example an ITIM containing protein. In some embodiments, the second, inhibitory receptor comprises a cytoplasmic domain, a transmembrane domain, and an extracellular domain or a portion thereof isolated or derived isolated or derived from the same protein, for example an ITIM containing protein. In some embodiments, the second, inhibitory receptor comprises a hinge region isolated or derived from isolated or derived from the same protein as the intracellular domain and/or transmembrane domain, for example an ITIM containing protein. In some embodiments, the second, inhibitory receptor comprises an inhibitory domain. In some embodiments, the second, inhibitory receptor comprises an inhibitory intracellular domain and/or an inhibitory transmembrane domain. In some embodiments, the second engineered receptor is a CAR comprising an inhibitory domain (an inhibitory CAR). In some embodiments, the inhibitory intracellular domain is fused to the intracellular domain of a CAR. In some embodiments, the inhibitory intracellular domain is fused to the transmembrane domain of a CAR.

[0290] LILRB1 Inhibitory Receptors

[0291] The present disclosure provides a second inhibitory receptor comprising a LILRB1 inhibitory domain, and optionally, a LILRB1 transmembrane and/or hinge domain, or functional variants thereof. The inclusion of the LILRB1 transmembrane domain and/or the LILRB1 hinge domain in the inhibitory receptor may increase the inhibitory signal generated by the inhibitory receptor compared to a reference inhibitory receptor having another transmembrane domain or another hinge domains. The second, inhibitory receptor comprising the LILRB1 inhibitory domain may be a CAR or TCR, as described herein. Any suitable ligand binding domain, as described herein, may be fused to the LILRB1-based second, inhibitory receptors having one or more domains from Leukocyte immunoglobulin-like receptor subfamily B member 1 (LILRB1, or LIR1). In some embodiments, the inhibitory receptor comprises a LILRB1 intracellular domain or a functional variant thereof.

[0292] Leukocyte immunoglobulin-like receptor subfamily B member 1 (LILRB1), also known as Leukocyte immunoglobulin-like receptor B1, as well as ILT2, LIR1, MIR7, PIRB, CD85J, ILT-2 LIR-1, MIR-7 and PIR-B, is a member of the leukocyte immunoglobulin-like receptor (LIR) family. The LILRB1 protein belongs to the subfamily B class of LIR receptors. These receptors contain two to four extracellular immunoglobulin domains, a transmembrane domain, and two to four cytoplasmic immunoreceptor tyrosine-based inhibitory motifs (ITIMs). The LILRB1 receptor is expressed on immune cells, where it binds to MHC class I molecules on antigen-presenting cells and transduces a negative signal that inhibits stimulation of an immune response. LILRB1 is thought to regulate inflammatory responses, as well as cytotoxicity, and to play a role in limiting auto-reactivity. Multiple transcript variants encoding different isoforms of LILRB1 exist, all of which are contemplated as within the scope of the instant disclosure.

[0293] In some embodiments of the inhibitory receptors described herein, the inhibitory receptor comprises one or more domains isolated or derived from LILRB1. In some embodiments of the receptors having one or more domains isolated or derived from LILRB1, the one or more domains of LILRB1 comprise an amino acid sequence that is at least 80%, at least 90%, at least 95%, at least 96%, at least 97%, at least 98%, at least 99% or is identical to a sequence or subsequence of SEQ ID NO: 280. In some embodiments, the one or more domains of LILRB1 comprise an amino acid sequence that is identical to a sequence or subsequence of SEQ ID NO: 280. In some embodiments, the one or more domains of LILRB1 consist of an amino acid sequence that is at least 80%, at least 90%, at least 95%, at least 96%, at least 97%, at least 98%, at least 99% or is identical to a sequence or subsequence of SEQ ID NO: 280. In some embodiments, the one or more domains of LILRB1 consist of an amino acid sequence that is identical to a sequence or subsequence of SEQ ID NO: 280.

[0294] In some embodiments of the receptors having one or more domains isolated or derived from LILRB1, the one or more domains of LILRB1 are encoded by a polynucleotide sequence that is at least 80%, at least 90%, at least 95%, at least 96%, at least 97%, at least 98%, at least 99% or is identical to a sequence or subsequence of SEQ ID NO: 556.

[0295] In some embodiments of the receptors having one or more domains of LILRB1, the one or more domains of LILRB1 are encoded by a polynucleotide sequence that is identical to a sequence or subsequence of SEQ ID NO: 556. In various embodiments, a chimeric antigen receptor is provided, comprising a polypeptide, wherein the polypeptide comprises one or more of: an LILRB1 hinge domain or functional fragment or variant thereof; an LILRB1 transmembrane domain or a functional variant thereof; and an LILRB1 intracellular domain or an intracellular domain comprising at least one, or at least two immunoreceptor tyrosine-based inhibitory motifs (ITIMs), wherein each ITIM is independently selected from NLYAAV (SEQ ID NO: 256), VTYAEV (SEQ ID NO: 257), VTYAQL (SEQ ID NO: 258), and SIYATL (SEQ ID NO: 259).

[0296] Intracellular Domain

[0297] The disclosure provides inhibitory receptors, the inhibitory receptors comprising a polypeptide. In some embodiments, the polypeptide comprises an intracellular domain. In some embodiments, the inhibitory receptor comprises a LILRB1 intracellular domain or a functional variant thereof.

[0298] As used herein, “intracellular domain” refers to the cytoplasmic or intracellular domain of a protein, such as a receptor, that interacts with the interior of the cell, and carries out a cytosolic function. As used herein, “cytosolic function” refers to a function of a protein or protein complex that is carried out in the cytosol of a cell. For example, intracellular signal transduction cascades are cytosolic functions.

[0299] As used herein an “immunoreceptor tyrosine-based inhibitory motif” or “ITIM” refers to a conserved sequence of amino acids with a consensus sequence of S/I/V/LxYxxI/V/L (SEQ ID NO: 260), or the like, that is found in the cytoplasmic tails of many inhibitory receptors of the immune system. After ITIM-possessing inhibitory receptors interact with their ligand, the ITIM motif is phosphorylated, allowing the inhibitory receptor to recruit other enzymes, such as the phosphotyrosine phosphatases SHP-1 and SHP-2, or the inositol-phosphatase called SHIP.

[0300] In some embodiments, the polypeptide comprises an intracellular domain comprising at least one immunoreceptor tyrosine-based inhibitory motif (ITIM), at least two ITIMs, at least 3 ITIMs, at least 4 ITIMs, at least 5 ITIMs or at least 6 ITIMs. In some embodiments, the intracellular domain has 1, 2, 3, 4, 5, or 6 ITIMs.

[0301] In some embodiments, the polypeptide comprises an intracellular domain comprising at least one ITIM selected from the group of ITIMs consisting of NLYAAV (SEQ ID NO: 256), VTYAEV (SEQ ID NO: 257), VTYAQL (SEQ ID NO: 258), and SIYATL (SEQ ID NO: 259).

[0302] In further particular embodiments, the polypeptide comprises an intracellular domain comprising at least two immunoreceptor tyrosine-based inhibitory motifs (ITIMs), wherein each ITIM is independently selected from NLYAAV (SEQ ID NO: 256), VTYAEV (SEQ ID NO: 257), VTYAQL (SEQ ID NO: 258), and SIYATL (SEQ ID NO: 259).

[0303] In some embodiments, the intracellular domain comprises both ITIMs NLYAAV (SEQ ID NO: 256) and VTYAEV (SEQ ID NO: 257). In some embodiments, the intracellular domain comprises a sequence at least 95% identical to SEQ ID NO: 260. In some embodiments, the intracellular domain comprises or consists essentially of a sequence identical to SEQ ID NO: 281.

[0304] In some embodiments, the intracellular domain comprises both ITIMs VTYAEV (SEQ ID NO: 257) and VTYAQL (SEQ ID NO: 258). In some embodiments, the intracellular domain comprises a sequence at least 95% identical to SEQ ID NO: 261. In some embodiments, the intracellular domain comprises or consists essentially of a sequence identical to SEQ ID NO: 261.

[0305] In some embodiments, the intracellular domain comprises both ITIMs VTYAQL (SEQ ID NO: 258) and SIYATL (SEQ ID NO: 259). In some embodiments, the intracellular domain comprises a sequence at least 95% identical to SEQ ID NO: 262. In some embodiments, the intracellular domain comprises or consists essentially of a sequence identical to SEQ ID NO: 262.

[0306] In some embodiments, the intracellular domain comprises the ITIMs NLYAAV (SEQ ID NO: 256), VTYAEV (SEQ ID NO: 257), and VTYAQL (SEQ ID NO: 258). In some embodiments, the intracellular domain comprises a sequence at least 95% identical to SEQ ID NO: 263. In some embodiments, the intracellular domain comprises or consists essentially of a sequence identical to SEQ ID NO: 263.

[0307] In some embodiments, the intracellular domain comprises the ITIMs VTYAEV (SEQ ID NO: 257), VTYAQL (SEQ ID NO: 258), and SIYATL (SEQ ID NO: 259). In some embodiments, the intracellular domain comprises a sequence at least 95% identical to SEQ ID NO: 264. In some embodiments, the intracellular domain comprises or consists essentially of a sequence identical to SEQ ID NO: 264.

[0308] In some embodiments, the intracellular domain comprises the ITIMs NLYAAV (SEQ ID NO: 256), VTYAEV (SEQ ID NO: 257), VTYAQL (SEQ ID NO: 258), and SIYATL (SEQ ID NO: 259). In embodiments, the intracellular domain comprises a sequence at least 95% identical to SEQ ID NO: 265. In some embodiments, the intracellular domain comprises or consists essentially of a sequence identical to SEQ ID NO: 265.

[0309] In some embodiments, the intracellular domain comprises a sequence at least 95% identical to the LILRB1 intracellular domain (SEQ ID NO: 266). In some embodiments, the intracellular domain comprises or consists essentially of a sequence identical to the LILRB1 intracellular domain (SEQ ID NO: 266).

[0310] LILRB1 intracellular domains or functional variants thereof of the disclosure can have at least 1, at least 2, at least 4, at least 4, at least 5, at least 6, at least 7, or at least 8 ITIMs. In some embodiments, the LILRB1 intracellular domain or functional variant thereof has 2, 3, 4, 5, or 6 ITIMs.

[0311] In particular embodiments, the polypeptide comprises an intracellular domain comprising two, three, four, five, or six immunoreceptor tyrosine-based inhibitory motifs (ITIMs), wherein each ITIM is independently selected from NLYAAV (SEQ ID NO: 256), VTYAEV (SEQ ID NO: 257), VTYAQL (SEQ ID NO: 258), and SIYATL (SEQ ID NO: 259).

[0312] In particular embodiments, the polypeptide comprises an intracellular domain comprising at least three immunoreceptor tyrosine-based inhibitory motifs (ITIMs), wherein each ITIM is independently selected from NLYAAV (SEQ ID NO: 256), VTYAEV (SEQ ID NO: 257), VTYAQL (SEQ ID NO: 258), and SIYATL (SEQ ID NO: 259).

[0313] In particular embodiments, the polypeptide comprises an intracellular domain comprising three immunoreceptor tyrosine-based inhibitory motifs (ITIMs), wherein each ITIM is independently selected from NLYAAV (SEQ ID NO: 256), VTYAEV (SEQ ID NO: 257), VTYAQL (SEQ ID NO: 258), and SIYATL (SEQ ID NO: 259).

[0314] In particular embodiments, the polypeptide comprises an intracellular domain comprising four immunoreceptor tyrosine-based inhibitory motifs (ITIMs), wherein each ITIM is independently selected from NLYAAV (SEQ ID NO: 256), VTYAEV (SEQ ID NO: 257), VTYAQL (SEQ ID NO: 258), and SIYATL (SEQ ID NO: 259).

[0315] In particular embodiments, the polypeptide comprises an intracellular domain comprising five immunoreceptor tyrosine-based inhibitory motifs (ITIMs), wherein each ITIM is independently selected from NLYAAV (SEQ ID NO: 256), VTYAEV (SEQ ID NO: 257), VTYAQL (SEQ ID NO: 258), and SIYATL (SEQ ID NO: 259).

[0316] In particular embodiments, the polypeptide comprises an intracellular domain comprising six immunoreceptor tyrosine-based inhibitory motifs (ITIMs), wherein each ITIM is independently selected from NLYAAV (SEQ ID NO: 256), VTYAEV (SEQ ID NO: 257), VTYAQL (SEQ ID NO: 258), and SIYATL (SEQ ID NO: 259).

[0317] In particular embodiments, the polypeptide comprises an intracellular domain comprising at least seven immunoreceptor tyrosine-based inhibitory motifs (ITIMs), wherein each ITIM is independently selected from NLYAAV (SEQ ID NO: 256), VTYAEV (SEQ ID NO: 257), VTYAQL (SEQ ID NO: 258), and SIYATL (SEQ ID NO: 259).

[0318] In some embodiments, the intracellular domain comprises a TCR alpha intracellular domain. In some embodiments, the intracellular domain comprises a TCR alpha intracellular domain and an LILRB1 intracellular domain, as described herein. In some embodiments, a TCR alpha intracellular domain comprises Ser-Ser. In some embodiments, a TCR alpha intracellular domain is encoded by a sequence of TCCAGC.

[0319] In some embodiments, the intracellular domain comprises a TCR beta intracellular domain. In some embodiments, the intracellular domain comprises a TCR beta intracellular domain and an LILRB1 intracellular domain, as described herein. In some embodiments, the TCR beta intracellular domain comprises an amino acid sequence having at least 80% identity, at least 90% identity, or is identical to a sequence of: MAMVKRKDSR (SEQ ID NO: 267). In some embodiments, the TCR beta intracellular domain comprises, or consists essentially of MAMVKRKDSR (SEQ ID NO: 267). In some embodiments, the TCR beta intracellular domain is encoded by a sequence of

(SEQ ID NO: 268)
ATGGCCATGGTCAAGAGAAAGGATTCCAGA.

[0320] The LILRB1 protein has four immunoglobulin (Ig) like domains termed D1, D2, D3 and D4. In some embodiments, the LILRB1 hinge domain comprises an LILRB1 D3D4 domain or a functional variant thereof. In some embodiments, the LILRB1 D3D4_domain comprises a sequence at least 95%, at least 96%, at least 97%, at least 98%, at least 99% or identical to SEQ ID NO: 274. In some embodiments, the LILRB1 D3D4 domain comprises, or consists essentially of SEQ ID NO: 274.

[0321] Transmembrane Domain

[0322] The disclosure provides inhibitory receptors the receptors comprising a polypeptide. In some embodiments, the polypeptide comprises a transmembrane domain. In some embodiments, the inhibitory receptor comprises a LILRB1 hinge domain, or a functional variant thereof. In some embodiments, the inhibitory receptor comprises a LILRBI transmembrane domain, or a functional variant thereof. In some embodiments, the inhibitory receptor comprises LILRB1 hinge and transmembrane domains, or functional variants thereof.

[0323] A “transmembrane domain”, as used herein, refers to a domain of a protein that spans membrane of the cell. Transmembrane domains typically consist predominantly of non-polar amino acids, and may traverse the lipid bilayer once or several times. Transmembrane domains usually comprise alpha helices, a configuration which maximizes internal hydrogen bonding.

[0324] Transmembrane domains isolated or derived from any source are envisaged as within the scope of the fusion proteins of the disclosure.

[0325] In particular embodiments, the polypeptide comprises an LILRB1 transmembrane domain or a functional variant thereof.

[0326] In some embodiments, the LILRB1 transmembrane domain or a functional variant thereof comprises a sequence at least 95% identical, at least 96% identical, at least 97% identical, at least 98% identical or at least 99% to SEQ ID NO: 269. In some embodiments, the LILRB1 transmembrane domain or a functional variant thereof comprises a sequence at least 95% identical to SEQ ID NO: 269. In some embodiments, the LILRB1 transmembrane domain comprises a sequence identical to SEQ ID NO: 269. In embodiments, the LILRB1 transmembrane domain consists essentially of a sequence identical to SEQ ID NO: 269.

[0327] In some embodiments of the chimeric antigen receptors of the disclosure, the transmembrane domain is not a LILRB1 transmembrane domain. In some embodiments, the transmembrane domain is one that is associated with one of the other domains of the fusion protein, or isolated or derived from the same protein as one of the other domains of the fusion protein.

[0328] The transmembrane domain may be derived either from a natural or from a recombinant source. Where the source is natural, the domain may be derived from any membrane-bound or transmembrane protein. Exemplary transmembrane domains may include at least the transmembrane region(s) of e.g., the alpha, beta or zeta chain of the TCR, CD3 delta, CD3 epsilon or CD3 gamma, CD28, CD3 epsilon, CD45, CD4, CD5, CD8, CD9, CD16, CD22, CD33, CD37, CD64, CD80, CD86, CD134, CD137, CD154.

[0329] In some embodiments, the transmembrane comprises a TCR alpha transmembrane domain. In some embodiments, the TCR alpha transmembrane domain comprises an amino acid sequence having at least 85% identity, at least 90% identity, at least 95% identity, at least 96% identity, at least 97% identity, at least 98% identity, at least 99% identity or is identical to a sequence of: VIGFRILLLKVAGFNLLMTLRLW (SEQ ID NO: 270). In some embodiments, the TCR alpha transmembrane domain comprises, or consists essentially of, VIGFRILLLKVAGFNLLMTLRLW (SEQ ID NO: 270). In some embodiments, the TCR alpha transmembrane domain is encoded by a sequence of:

(SEQ ID NO: 271)
GTGATTGGGTTCCGAATCCTCCTCCTGAAAGTGGCCGGGTTTAATCTGCT
CATGACGCTGCGGCTGTGG.

[0330] In some embodiments, the transmembrane comprises a TCR beta transmembrane domain. In some embodiments, the TCR beta transmembrane domain comprises an amino acid sequence having at least 85% identity, at least 90% identity, at least 95% identity, at least 96% identity, at least 97% identity, at least 98% identity, at least 99% identity or is identical to a sequence of: TILYEILLGKATLYAVLVSALVL (SEQ ID NO: 272). In some embodiments, the TCR beta transmembrane domain comprises, or consists essentially of TILYEILLGKATLYAVLVSALVL (SEQ ID NO: 272). In some embodiments, the TCR beta transmembrane domain is encoded by a sequence of

(SEQ ID NO: 273)
ACCATCCTCTATGAGATCTTGCTAGGGAAGGCCACCTTGTATGCCGTGCT
GGTCAGTGCCCTCGTGCTG.

[0331] In some embodiments, the TCR alpha and/or TCR beta transmembrane domain comprises one or more mutations that attenuate or abolish interaction of the TCR with the TCR CD3 subunit. In some embodiments, the TCR alpha transmembrane domain comprises a R253L mutation. In some embodiments, the TCR beta transmembrane domain comprises a K288L mutation.

[0332] In some embodiments the transmembrane domain comprise a CD28 transmembrane domain. In some embodiments, the CD28 transmembrane domain comprises an amino acid sequence having at least 80% identity, at least 90% identity, at least 95% identity, at least 99% identity or is identical to a sequence of FWVLVVVGGVLACYSLLVTVAFIIFWV (SEQ ID NO: 232). In some embodiments, the CD28 transmembrane domain comprises or consists essentially of FWVLVVVGGVLACYSLLVTVAFIIFWV (SEQ ID NO: 232). In some embodiments, the CD28 transmembrane domain is encoded by a nucleotide sequence having at least 80% identity, at least 90% identity, at least 95% identity, at least 99% identity or is identical to a sequence of

(SEQ ID NO: 233)
TTCTGGGTGCTGGTCGTTGTGGGCGGCGTGCTGGCCTGCTACAGCCTGCT
GGTGACAGTGGCCTTCATCATCTTTTGGGTG.

[0333] In some embodiments, the transmembrane domain can be attached to the extracellular region chimeric antigen receptor, e.g., the antigen-binding domain or ligand binding domain, via a hinge, e.g., a hinge from a human protein. For example, in some embodiments, the hinge can be a human immunoglobulin (Ig) hinge, e.g., an IgG4 hinge, a CD8a hinge or an LILRB1 hinge.

[0334] Hinge Domain

[0335] The disclosure provides inhibitory receptors, the receptors comprising a polypeptide. In some embodiments, the polypeptide comprises a hinge domain. In some embodiments, the hinge domain is a LILRB1 hinge domain or a functional variant thereof.

[0336] The LILRB1 protein has four immunoglobulin (Ig) like domains termed D1, D2, D3 and D4. In some embodiments, the LILRB1 hinge domain comprises an LILRB1 D3D4 domain or a functional variant thereof. In some embodiments, the LILRB1 D3D4 domain comprises a sequence at least 95%, at least 96%, at least 97%, at least 98%, at least 99% or identical to SEQ ID NO: 274. In some embodiments, the LILRB1 D3D4 domain comprises or consists essentially of SEQ ID NO: 274.

[0337] In some embodiments, the polypeptide comprises the LILRB1 hinge domain or functional fragment or variant thereof. In embodiments, the LILRB1 hinge domain or functional fragment or variant thereof comprises a sequence at least 95%, at least 96%, at least 97%, at least 98%, at least 99% identical or identical to SEQ ID NO: 275, SEQ ID NO: 274, or SEQ ID NO: 276. In embodiments, the LILRB1 hinge domain or functional fragment or variant thereof comprises a sequence at least 95% identical to SEQ ID NO: 275, SEQ ID NO: 274, or SEQ ID NO: 276.

[0338] In some embodiments, the LILRB1 hinge domain comprises a sequence identical to SEQ ID NO: 275, SEQ ID NO: 274, or SEQ ID NO: 276.

[0339] In some embodiments, the LILRB1 hinge domain consists essentially of a sequence identical to SEQ ID NO: 275, SEQ ID NO: 274, or SEQ ID NO: 276.

[0340] In some embodiments the chimeric antigen receptors of the disclosure, the polypeptide comprises a hinge that is not isolated or derived from LILRB1.

[0341] In some embodiments, the hinge is isolated or derived from CD8a or CD28. In some embodiments, the CD8a hinge comprises an amino acid sequence having at least 80% identity, at least 90% identity, at least 95% identity, at least 99% identity or is identical to a sequence of TTTPAPRPPTPAPTIASQPLSLRPEACRPAAGGAVHTRGLDFACD (SEQ ID NO: 219). In some embodiments, the CD8a hinge comprises

(SEQ ID NO: 219)
TTTPAPRPPTPAPTIASQPLSLRPEACRPAAGGAVHTRGLDFACD.

In some embodiments, the CD8a hinge consists essentially of

(SEQ ID NO: 219)
TTTPAPRPPTPAPTIASQPLSLRPEACRPAAGGAVHTRGLDFACD.

In some embodiments, the CD8a hinge is encoded by a nucleotide sequence having at least 80% identity, at least 90% identity, at least 95% identity, at least 99% identity or is identical to a sequence of accacgacgccagcgccgcgaccaccaacaccggcgcccaccatcgcgtcgcagcccctgtccctgcgcccagaggcgtgccgg ccagcggcggggggcgcagtgcacacgagggggctggacttcgcctgtgat (SEQ ID NO: 220).

[0342] In some embodiments, the CD28 hinge comprises an amino acid sequence having at least 80% identity, at least 90% identity, at least 95% identity, at least 99% identity or is identical to a sequence of CTIEVMYPPPYLDNEKSNGTIIHVKGKHLCPSPLFPGPSKP (SEQ ID NO: 221). In some embodiments, the CD28 hinge comprises or consists essentially of CTIEVMYPPPYLDNEKSNGTIIHVKGKHLCPSPLFPGPSKP (SEQ ID NO: 221). In some embodiments, the CD28 hinge is encoded by a nucleotide sequence having at least 80% identity, at least 90% identity, at least 95% identity, at least 99% identity or is identical to a sequence of

[0343] tgtaccattgaagttatgtatcctcctccttacctagacaatgagaagagcaatggaaccattatccatgtgaaagggaaaca cctttgtccaagtcccctatttcccggaccttctaagccc (SEQ ID NO: 222).

[0344] Combinations of LILRB1 Domains

[0345] In some embodiments, the inhibitory receptors of the disclosure comprise a polypeptide comprising more than one LILRB1 domain or functional equivalent thereof. For example, in some embodiments, the polypeptide comprises an LILRB1 transmembrane domain and intracellular domain, or an LILRB1 hinge domain, transmembrane domain and intracellular domain.

[0346] In particular embodiments, the polypeptide comprises an LILRB1 hinge domain or functional fragment or variant thereof, and the LILRB1 transmembrane domain or a functional variant thereof. In some embodiments, the polypeptide comprises a sequence at least 95% identical, at least 96% identical, at least 97% identical, at least 98% identical, at least 99% identical or identical to SEQ ID NO: 277. In some embodiments, the polypeptide comprises a sequence at least 95% identical to SEQ ID NO: 277. In some embodiments, the polypeptide comprises a sequence identical to SEQ ID NO: 277.

[0347] In further embodiments, the polypeptide comprises: the LILRB1 transmembrane domain or a functional variant thereof, and an LILRB1 intracellular domain and/or an intracellular domain comprising at least one immunoreceptor tyrosine-based inhibitory motif (ITIM), wherein the ITIM is selected from NLYAAV (SEQ ID NO: 256), VTYAEV (SEQ ID NO: 257), VTYAQL (SEQ ID NO: 258), and SIYATL (SEQ ID NO: 259). In some embodiments, the polypeptide comprises the LILRB1 transmembrane domain or a functional variant thereof, and an LILRB1 intracellular domain and/or an intracellular domain comprising at least two ITIM, wherein each ITIM is independently selected from NLYAAV (SEQ ID NO: 256), VTYAEV (SEQ ID NO: 257), VTYAQL (SEQ ID NO: 258), and SIYATL (SEQ ID NO: 259).

[0348] In some embodiments, the polypeptide comprises a LILRB1 transmembrane domain and intracellular domain. In some embodiments, the polypeptide comprises a sequence at least 95% identical, at least 96% identical, at least 97% identical, at least 98% identical, at least 99% identical or identical to SEQ ID NO: 278. In some embodiments, the polypeptide comprises a sequence at least 95% identical to SEQ ID NO: 278. In some embodiments, the polypeptide comprises a sequence identical to SEQ ID NO: 278.

[0349] In preferred embodiments, the polypeptide comprises: an LILRB1 hinge domain or functional fragment or variant thereof; an LILRB1 transmembrane domain or a functional variant thereof; and an LILRB1 intracellular domain and/or an intracellular domain comprising at least two immunoreceptor tyrosine-based inhibitory motifs (ITIMs), wherein each ITIM is independently selected from NLYAAV (SEQ ID NO: 256), VTYAEV (SEQ ID NO: 257), VTYAQL (SEQ ID NO: 258), and SIYATL (SEQ ID NO: 259).

[0350] In some embodiments, the polypeptide comprises a sequence at least 95% identical to SEQ ID NO: 254 or SEQ ID NO: 279, or at least 99% identical to SEQ ID NO: 254 or SEQ ID NO: 279, or identical to SEQ ID NO: 254 or SEQ ID NO: 279.

[0351] In some embodiments, the polypeptide comprises a sequence at least 99% identical to SEQ ID NO: 277, or at least 99% identical to SEQ ID NO: 277, or identical to SEQ ID NO: 277.

[0352] In some embodiments, the polypeptide comprises a sequence at least 99% identical to SEQ ID NO: 278, or at least 99% identical to SEQ ID NO: 278, or identical to SEQ ID NO: 278.

[0353] In some embodiments, the inhibitory receptor comprises a LIRLRB1 hinge, transmembrane and intracellular domain. In some embodiments, the LIRLRB1 hinge, transmembrane and intracellular domain comprises a sequence of SEQ ID NO: 254, or a sequence at 90%, at least 95% identical, at least 96% identical, at least 97% identical, at least 98% identical, at least 99% identical or identical thereto.

TABLE 16
Inhibitory receptor Hinge, Transmembrane and
Intracellular Domains

| Con- | Protein | |
|---|---|---|
| struct | Sequence | DNA Sequence |
| C-1765, | YGSQSSKPYLLT | TACGGCTCACAGAGCTCCAAACCCTA |
| C2162, | HPSDPLELVVSG | CCTGCTGACTCACCCCAGTGACCCCC |
| C2163 | PSGGPSSPTTGP | TGGAGCTCGTGGTCTCAGGACCGTCT |
| | TSTSGPEDQPLT | GGGGGCCCCAGCTCCCCGACAACAGG |
| | PTGSDPQSGLGR | CCCCACCTCCACATCTGGCCCTGAGG |
| | HLGVVIGILVAV | ACCAGCCCCTCACCCCCACCGGGTCG |
| | ILLLLLLLLLFL | GATCCCCAGAGTGGTCTGGGAAGGCA |
| | ILRHRRQGKHWT | CCTGGGGGTTGTGATCGGCATCTTGG |
| | STQRKADFQHPA | TGGCCGTCATCCTACTGCTCCTCCTC |
| | GAVGPEPTDRGL | CTCCTCCTCCTCTTCCTCATCCTCCG |
| | QWRSSPAADAQE | ACATCGACGTCAGGGCAAACACTGGA |
| | ENLYAAVKHTQP | CATCGACCCAGAGAAAGGCTGATTTC |
| | EDGVEMDTRSPH | CAACATCCTGCAGGGGCTGTGGGGCC |
| | DEDPQAVTYAEV | AGAGCCCACAGACAGAGGCCTGCAGT |
| | KHSRPRREMASP | GGAGGTCCAGCCCAGCTGCCGATGCC |
| | PSPLSGEFLDTK | CAGGAAGAAAACCTCTATGCTGCCGT |
| | DRQAEEDRQMDT | GAAGCACACACAGCCTGAGGATGGGG |
| | EAAASEAPQDVT | TGGAGATGGACACTCGGAGCCCACAC |
| | YAQLHSLTLRRE | GATGAAGACCCCCAGGCAGTGACGTA |
| | ATEPPPSQEGPS | TGCCGAGGTGAAACACTCCAGACCTA |
| | PAVPSIYATLAI | GGAGAGAAATGGCCTCTCCTCCTTCC |
| | H (SEQ ID | CCACTGTCTGGGGAATTCCTGGACAC |
| | NO: 254) | AAAGGACAGACAGGCGGAAGAGGACA |
| | | GGCAGATGGACACTGAGGCTGCTGCA |
| | | TCTGAAGCCCCCCAGGATGTGACCTA |
| | | CGCCCAGCTGCACAGCTTGACCCTCA |
| | | GACGGGAGGCAACTGAGCCTCCTCCA |
| | | TCCCAGGAAGGGCCCTCTCCAGCTGT |
| | | GCCCAGCATCTACGCCACTCTGGCCA |
| | | TCCACTAG (SEQ ID NO: 255) |

[0354] Additional sequences or the based inhibitory receptors of the disclosure are shown in Table 17 below.

TABLE 17
Polypeptide Sequences for Elements of
Illustrative Inhibitory Receptors

| Name | Sequence |
|---|---|
| LILRB1 | MTPILTVLICLGLSLGPRTHVQAGHLPKPTLWAEPGSVIT |
| | QGSPVTLRCQGGQETQEYRLYREKKTALWITRIPQELVKK |
| | GQFPIPSITWEHAGRYRCYYGSDTAGRSESSDPLELVVTG |
| | AYIKPTLSAQPSPVVNSGGNVILQCDSQVAFDGFSLCKEG |
| | EDEHPQCLNSQPHARGSSRAIFSVGPVSPSRRWWYRCYAY |
| | DSNSPYEWSLPSDLLELLVLGVSKKPSLSVQPGPIVAPEE |
| | TLTLQCGSDAGYNRFVLYKDGERDFLQLAGAQPQAGLSQA |
| | NFTLGPVSRSYGGQYRCYGAHNLSSEWSAPSDPLDILIAG |
| | QFYDRVSLSVQPGPTVASGENVTLLCQSQGWMQTFLLTKE |
| | GAADDPWRLRSTYQSQKYQAEFPMGPVTSAHAGTYRCYGS |
| | QSSKPYLLTHPSDPLELVVSGPSGGPSSPTTGPTSTSGPE |
| | DQPLTPTGSDPQSGLGRHLGVVIGILVAVILLLLLLLLLF |
| | LILRHRRQGKHWTSTQRKADFQHPAGAVGPEPTDRGLQWR |
| | SSPAADAQEENLYAAVKHTQPEDGVEMDTRSPHDEDPQAV |
| | TYAEVKHSRPRREMASPPSPLSGEFLDTKDRQAEEDRQMD |
| | TEAAASEAPQDVTYAQLHSLTLRREATEPPPSQEGPSPAV |
| | PSIYATLAIH SEQ ID NO: 280 |
| LILRB1 | YGSQSSKPYLLTHPSDPLELVVSGPSGGPSSPTTGPTSTS |
| hinge- | GPEDQPLTPTGSDPQSGLGRHLGVVIGILVAVILLLLLLL |
| trans- | LLFLILRHRRQGKHWTSTQRKADFQHPAGAVGPEPTDRGL |
| membrane- | QWRSSPAADAQEENLYAAVKHTQPEDGVEMDTRSPHDEDP |
| intra- | QAVTYAEVKHSRPRREMASPPSPLSGEFLDTKDRQAEEDR |
| cellular | QMDTEAAASEAPQDVTYAQLHSLTLRREATEPPPSQEGPS |
| domain | PAVPSIYATLAIH SEQ ID NO: 254 |
| LILRB1 | VVSGPSGGPSSPTTGPTSTSGPEDQPLTPTGSDPQSGLGR |
| hinge- | HLGVVIGILVAVILLLLLLLLLFLILRHRRQGKHWTSTQR |
| trans- | KADFQHPAGAVGPEPTDRGLQWRSSPAADAQEENLYAAVK |
| membrane- | HTQPEDGVEMDTRSPHDEDPQAVTYAEVKHSRPRREMASP |
| intra- | PSPLSGEFLDTKDRQAEEDRQMDTEAAASEAPQDVTYAQL |
| cellular | HSLTLRREATEPPPSQEGPSPAVPSIYATLAIH SEQ ID |
| domain | NO: 279 |
| (w/o | |
| YGSQSSKPY | |
| LLTHPSDPL | |
| EL, SEQ | |
| ID NO: 18) | |
| LILRB1 | YGSQSSKPYLLTHPSDPLELVVSGPSGGPSSPTTGPTSTS |
| hinge | GPEDQPLTPTGSDPQSGLGRHLG SEQ ID NO: 275 |
| domain | |
| LILRB1 | VVIGILVAVILLLLLLLLLFLIL SEQ ID NO: 269 |
| trans- | |
| membrane | |
| domain | |
| LILRB1 | RHRRQGKHWTSTQRKADFQHPAGAVGPEPTDRGLQWRSSP |
| intra- | AADAQEENLYAAVKHTQPEDGVEMDTRSPHDEDPQAVTYA |
| cellular | EVKHSRPRREMASPPSPLSGEFLDTKDRQAEEDRQMDTEA |
| domain | AASEAPQDVTYAQLHSLTLRREATEPPPSQEGPSPAVPSI |
| | YATLAIH SEQ ID NO: 266 |
| ITIM1 | NLYAAV SEQ ID NO: 256 |
| ITIM2 | VTYAEV SEQ ID NO: 257 |
| ITIM3 | VTYAQL SEQ ID NO: 258 |
| ITIM4 | SIYATL SEQ ID NO: 259 |
| ITIM1-2 | NLYAAVKHTQPEDGVEMDTRSPHDEDPQAVTYAEV SEQ |
| | ID NO: 281 |
| ITIM2-3 | VTYAEVKHSRPRREMASPPSPLSGEFLDTKDRQAEEDRQM |
| | DTEAAASEAPQDVTYAQL SEQ ID NO: 261 |
| ITIM3-4 | VTYAQLHSLTLRREATEPPPSQEGPSPAVPSIYATL SEQ |
| | ID NO: 262 |
| ITIM1-3 | NLYAAVKHTQPEDGVEMDTRSPHDEDPQAVTYAEVKHSRP |
| | RREMASPPSPLSGEFLDTKDRQAEEDRQMDTEAAASEAPQ |
| | DVTYAQL SEQ ID NO: 263 |
| ITIM2-4 | VTYAEVKHSRPRREMASPPSPLSGEFLDTKDRQAEEDRQM |
| | DTEAAASEAPQDVTYAQLHSLTLRREATEPPPSQEGPSPA |
| | VPSIYATL SEQ ID NO: 264 |
| ITIM1-4 | NLYAAVKHTQPEDGVEMDTRSPHDEDPQAVTYAEVKHSRP |
| | RREMASPPSPLSGEFLDTKDRQAEEDRQMDTEAAASEAPQ |
| | DVTYAQLHSLTLRREATEPPPSQEGPSPAVPSIYATL |
| | SEQ ID NO: 265 |
| D3D4 | YGSQSSKPYLLTHPSDPLEL SEQ ID NO: 274 |
| domain | |
| Short | VVSGPSGGPSSPTTGPTSTSGPEDQPLTPTGSDPQSGLGR |
| hinge | HLG SEQ ID NO: 276 |
| Hinge | YGSQSSKPYLLTHPSDPLELVVSGPSGGPSSPTTGPTSTS |
| (iTIM | GPEDQPLTPTGSDPQSGLGRHLGV (SEQ ID NO: |
| hinge) | 282) |
| Short | VVSGPSGGPSSPTTGPTSTSGPEDQPLTPTGSDPQSGLGR |
| hinge 2 | HLGV (SEQ ID NO: 283) |
| Long | AGSGGSGGSGGSPVPSTPPTPSPSTPPTPSPSGGSGNSSG |
| hinge 1 | SGGSPVPSTPPTPSPSTPPTPSPSASV (SEQ ID NO: |
| | 284) |
| Long | AGSGGSGGSGGSPVPSTPPTNSSSTPPTPSPSPVPSTPPT |
| hinge 2 | NSSSTPPTPSPSPVPSTPPTNSSSTPPTPSPSASV (SEQ |
| | ID NO: 285) |
| 2X short | VVSGPSGGPSSPTTGPTSTSGPEDQPLTPTGSDPQSGLGR |
| hinge | HVVSGPSGGPSSPTTGPTSTSGPEDQPLTPTGSDPQSGLG |
| | RHLGV (SEQ ID NO: 286) |
| Hinge | TTGPTSTSGPEDQPLTPTGSDPQSGLGRHLGV(SEQ ID |
| (trunc- | NO: 287) |
| ated) | |
| Hinge- | YGSQSSKPYLLTHPSDPLELVVSGPSGGPSSPTTGPTSTS |
| trans- | GPEDQPLTPTGSDPQSGLGRHLGVVIGILVAVILLLLLLL |
| membrane | LLFLIL SEQ ID NO: 277 |
| Trans- | VVIGILVAVILLLLLLLLLFLILRHRRQGKHWTSTQRKAD |
| membrane- | FQHPAGAVGPEPTDRGLQWRSSPAADAQEENLYAAVKHTQ |
| intra- | PEDGVEMDTRSPHDEDPQAVTYAEVKHSRPRREMASPPSP |
| cellular | LSGEFLDTKDRQAEEDRQMDTEAAASEAPQDVTYAQLHSL |
| domain | TLRREATEPPPSQEGPSPAVPSIYATLAIH SEQ ID |
| | NO: 278 |

### Assays

[0355] Provided herein are assays that can be used to measure the activity of the engineered receptors of the disclosure.

[0356] The activity of engineered receptors can be assayed using a cell line engineered to express a reporter of receptor activity such as a luciferase reporter. Exemplary cell lines include Jurkat T cells, although any suitable cell line known in the art may be used. For example, Jurkat cells expressing a luciferase reporter under the control of an NFAT promoter can be used as effector cells. Expression of luciferase by this cell line reflects TCR-mediated signaling.

[0357] The reporter cells can be transfected with each of the various fusion protein constructs, combinations of fusion protein constructs or controls described herein.

[0358] Expression of the fusion proteins in reporter cells can be confirmed by using fluorescently labeled MHC tetramers, for example Alexa Fluor 647-labeled HER2-MHC tetramer, to detect expression of the fusion protein.

[0359] To assay the activity of engineered receptors, target cells are loaded with antigen prior to exposure to the effector cells comprising the reporter and the engineered receptor. For example, target cells can be loaded with antigen at least 12, 14, 16, 18, 20, 22 or 24 hours prior to exposure to effector cells. Exemplary target cells include A375 cells, although any suitable cells known in the art may be used. In some cases, target cells can be loaded with serially diluted concentrations of an antigen, such as a HER2 antigen. The effector cells can then be co-cultured with target cells for a suitable period of time, for example 6 hours. Luciferase is then measured by luminescence reading after co-culture. Luciferase luminescence can be normalized to maximum and minimum intensity to allow comparison of activating peptide concentrations for each engineered receptor construct.

[0360] Provided herein are methods of determining the relative EC50 of engineered receptors of the disclosure. As used herein, “EC50” refers to the concentration of an inhibitor or agent where the response (or binding) is reduced by half. EC50s of engineered receptors of the disclosure refer to concentration of antigen where binding of the engineered receptor to the antigen is reduced by half. Binding of the antigen, or probe to the engineered receptor can be measured by staining with labeled peptide or labeled peptide-MHC complex, for example MHC:HER2 pMHC complex conjugated with fluorophore. EC50 can be obtained by nonlinear regression curve fitting of reporter signal with peptide titration. Probe binding and EC50 can be normalized to the levels of benchmark TCR without a fusion protein, e.g. HER2.

### Polynucleotides

[0361] The disclosure provides a polynucleotide system, comprising one or more polynucleotides comprising polynucleotide sequences encoding: an activator receptor comprising an extracellular ligand binding domain specific to an erb-b2 receptor tyrosine kinase 2 (HER2) antigen; and an inhibitory receptor comprising an extracellular ligand binding domain specific to a non-target antigen that is not expressed by the cancer cell due to a loss of heterozygosity in the cancer cell.

[0362] The disclosure provides vectors comprising the polynucleotide system described herein. The disclosure provides vectors comprising the polynucleotides described herein.

[0363] The disclosure provides polynucleotides encoding the sequence(s) of the activator and inhibitory receptors described herein. In some embodiments, the sequence of the activating and/or inhibitory receptor, or a fusion protein of the activator and/or inhibitory receptor is operably linked to a promoter. In some embodiments, the sequence encoding the activator receptor, or a polypeptide thereof, is operably linked to a first promoter, and the sequence encoding an inhibitory receptor, or a fusion protein thereof, is operably linked to a second promoter.

[0364] In some embodiments, the polynucleotide or polynucleotide system comprises SEQ ID NO: 52, or a sequence that shares at least 80%, at least 85%, at least 90%, at least 95%, or at least 98% identity thereto. In some embodiments, the polynucleotide or polynucleotide system comprises SEQ ID NO: 54, or a sequence that shares at least 80%, at least 85%, at least 90%, at least 95%, or at least 98% identity thereto. In some embodiments, the polynucleotide or polynucleotide system comprises SEQ ID NO: 56, or a sequence that shares at least 80%, at least 85%, at least 90%, at least 95%, or at least 98% identity thereto. In some embodiments, the polynucleotide or polynucleotide system comprises SEQ ID NO: 58, or a sequence that shares at least 80%, at least 85%, at least 90%, at least 95%, or at least 98% identity thereto. In some embodiments, the polynucleotide or polynucleotide system comprises SEQ ID NO: 60, or a sequence that shares at least 80%, at least 85%, at least 90%, at least 95%, or at least 98% identity thereto. In some embodiments, the polynucleotide or polynucleotide system comprises SEQ ID NO: 62, or a sequence that shares at least 80%, at least 85%, at least 90%, at least 95%, or at least 98% identity thereto. In some embodiments, the polynucleotide or polynucleotide system comprises SEQ ID NO: 21803, or a sequence that shares at least 80%, at least 85%, at least 90%, at least 95%, or at least 98% identity thereto.

[0365] In some embodiments, the polynucleotide or polynucleotide system comprises anyone of SEQ ID NOs: 75-86, or a sequence that shares at least 80%, at least 85%, at least 90%, at least 95%, or at least 98% identity thereto. In some embodiments, the polynucleotide or polynucleotide system comprises SEQ ID NO: 76, or a sequence that shares at least 80%, at least 85%, at least 90%, at least 95%, or at least 98% identity thereto. In some embodiments, the polynucleotide or polynucleotide system comprises SEQ ID NO: 77, or a sequence that shares at least 80%, at least 85%, at least 90%, at least 95%, or at least 98% identity thereto. In some embodiments, the polynucleotide or polynucleotide system comprises SEQ ID NO: 78, or a sequence that shares at least 80%, at least 85%, at least 90%, at least 95%, or at least 98% identity thereto. In some embodiments, the polynucleotide or polynucleotide system comprises SEQ ID NO: 79, or a sequence that shares at least 80%, at least 85%, at least 90%, at least 95%, or at least 98% identity thereto. In some embodiments, the polynucleotide or polynucleotide system comprises SEQ ID NO: 80, or a sequence that shares at least 80%, at least 85%, at least 90%, at least 95%, or at least 98% identity thereto. In some embodiments, the polynucleotide or polynucleotide system comprises SEQ ID NO: 81, or a sequence that shares at least 80%, at least 85%, at least 90%, at least 95%, or at least 98% identity thereto. In some embodiments, the polynucleotide or polynucleotide system comprises SEQ ID NO: 82, or a sequence that shares at least 80%, at least 85%, at least 90%, at least 95%, or at least 98% identity thereto. In some embodiments, the polynucleotide or polynucleotide system comprises SEQ ID NO: 83, or a sequence that shares at least 80%, at least 85%, at least 90%, at least 95%, or at least 98% identity thereto. In some embodiments, the polynucleotide or polynucleotide system comprises SEQ ID NO: 84, or a sequence that shares at least 80%, at least 85%, at least 90%, at least 95%, or at least 98% identity thereto. In some embodiments, the polynucleotide or polynucleotide system comprises SEQ ID NO: 85, or a sequence that shares at least 80%, at least 85%, at least 90%, at least 95%, or at least 98% identity thereto. In some embodiments, the polynucleotide or polynucleotide system comprises SEQ ID NO: 86, or a sequence that shares at least 80%, at least 85%, at least 90%, at least 95%, or at least 98% identity thereto. In some embodiments, the polynucleotide or polynucleotide system comprises SEQ ID NO: 208, or a sequence that shares at least 80%, at least 85%, at least 90%, at least 95%, or at least 98% identity thereto. In some embodiments, the polynucleotide or polynucleotide system comprises SEQ ID NO: 210, or a sequence that shares at least 80%, at least 85%, at least 90%, at least 95%, or at least 98% identity thereto. In some embodiments, the polynucleotide or polynucleotide system comprises SEQ ID NO: 212, or a sequence that shares at least 80%, at least 85%, at least 90%, at least 95%, or at least 98% identity thereto.

[0366] In some embodiments, the polynucleotide or polynucleotide system comprises any one of SEQ ID NOs: 224, 226, 227, 229, or 231, or a sequence that shares at least 80%, at least 85%, at least 90%, at least 95%, or at least 98% identity thereto.

[0367] In some embodiments, the polynucleotide or polynucleotide system comprises ny one of SEQ ID NOs: 292, 294, 296, 298, 300, 302 304, 306, or 308, or a sequence that shares at least 80%, at least 85%, at least 90%, at least 95%, or at least 98% identity thereto.

[0368] The disclosure provides vectors encoding the coding sequence or sequences of any of the engineered receptors described herein. In some embodiments, the sequence of the activating and/or inhibitory receptor is operably linked to a promoter. In some embodiments, the sequence encoding the activating receptor is operably linked to a first promoter, and the sequence encoding an inhibitory receptor is operably linked to a second promoter.

[0369] In some embodiments, the activating receptor is encoded by a first vector and the inhibitory receptor is encoded by second vector. In some embodiments, both engineered receptors are encoded by a single vector.

[0370] In some embodiments, the activator and inhibitory receptors are encoded by a single vector. Methods of encoding multiple polypeptides using a single vector will be known to persons of ordinary skill in the art, and include, inter alia, encoding multiple polypeptides under control of different promoters, or, if a single promoter is used to control transcription of multiple polypeptides, use of sequences encoding internal ribosome entry sites (IRES) and/or self-cleaving peptides. Exemplary self-cleaving peptides include T2A, P2A, E2A and F2A self-cleaving peptides. In some embodiments, the T2A self-cleaving peptide comprises a sequence of EGRGSLLTCGDVEENPGP (SEQ ID NO: 288). In some embodiments, the P2A self-cleaving peptide comprises a sequence of ATNFSLLKQAGDVEENPGP (SEQ ID NO: 196). In some embodiments, the E2A self-cleaving peptide comprises a sequence of QCTNYALLKLAGDVESNPGP (SEQ ID NO: 289). In some embodiments, the F2A self-cleaving peptide comprises a sequence of VKQTLNFDLLKLAGDVESNPGP (SEQ ID NO: 290). Any of the foregoing can also include an N terminal GSG linker. For example, a T2A self-cleaving peptide can also comprise a sequence of GSGEGRGSLLTCGDVEENPGP (SEQ ID NO: 557), which can be encoded by a sequence of

(SEQ ID NO: 558)
GGATCCGGAGAGGGCAGAGGCAGCCTGCTGACATGTGGCGACGTGGAAGA
GAACCCTGGCCCC.

[0371] In some embodiments, the vector comprises SEQ ID NO: 52, or a sequence that shares at least 80%, at least 85%, at least 90%, at least 95%, or at least 98% identity thereto. In some embodiments, the vector comprises SEQ ID NO: 54, or a sequence that shares at least 80%, at least 85%, at least 90%, at least 95%, or at least 98% identity thereto. In some embodiments, the vector comprises SEQ ID NO: 56, or a sequence that shares at least 80%, at least 85%, at least 90%, at least 95%, or at least 98% identity thereto. In some embodiments, the vector comprises SEQ ID NO: 58, or a sequence that shares at least 80%, at least 85%, at least 90%, at least 95%, or at least 98% identity thereto. In some embodiments, the vector comprises SEQ ID NO: 60, or a sequence that shares at least 80%, at least 85%, at least 90%, at least 95%, or at least 98% identity thereto. In some embodiments, the vector comprises SEQ ID NO: 62, or a sequence that shares at least 80%, at least 85%, at least 90%, at least 95%, or at least 98% identity thereto. In some embodiments, the vector comprises SEQ ID NO: 21803, or a sequence that shares at least 80%, at least 85%, at least 90%, at least 95%, or at least 98% identity thereto.

[0372] In some embodiments, the vector comprises SEQ ID NO: 75, or a sequence that shares at least 80%, at least 85%, at least 90%, at least 95%, or at least 98% identity thereto. In some embodiments, the vector comprises SEQ ID NO: 76, or a sequence that shares at least 80%, at least 85%, at least 90%, at least 95%, or at least 98% identity thereto. In some embodiments, the vector comprises SEQ ID NO: 77, or a sequence that shares at least 80%, at least 85%, at least 90%, at least 95%, or at least 98% identity thereto. In some embodiments, the vector comprises SEQ ID NO: 78, or a sequence that shares at least 80%, at least 85%, at least 90%, at least 95%, or at least 98% identity thereto. In some embodiments, the vector comprises SEQ ID NO: 79, or a sequence that shares at least 80%, at least 85%, at least 90%, at least 95%, or at least 98% identity thereto. In some embodiments, the vector comprises SEQ ID NO: 80, or a sequence that shares at least 80%, at least 85%, at least 90%, at least 95%, or at least 98% identity thereto. In some embodiments, the vector comprises SEQ ID NO: 81, or a sequence that shares at least 80%, at least 85%, at least 90%, at least 95%, or at least 98% identity thereto. In some embodiments, the vector comprises SEQ ID NO: 82, or a sequence that shares at least 80%, at least 85%, at least 90%, at least 95%, or at least 98% identity thereto. In some embodiments, the vector comprises SEQ ID NO: 83, or a sequence that shares at least 80%, at least 85%, at least 90%, at least 95%, or at least 98% identity thereto. In some embodiments, the vector comprises SEQ ID NO: 84, or a sequence that shares at least 80%, at least 85%, at least 90%, at least 95%, or at least 98% identity thereto. In some embodiments, the vector comprises SEQ ID NO: 85, or a sequence that shares at least 80%, at least 85%, at least 90%, at least 95%, or at least 98% identity thereto. In some embodiments, the vector comprises SEQ ID NO: 86, or a sequence that shares at least 80%, at least 85%, at least 90%, at least 95%, or at least 98% identity thereto. In some embodiments, the vector comprises SEQ ID NO: 208, or a sequence that shares at least 80%, at least 85%, at least 90%, at least 95%, or at least 98% identity thereto. In some embodiments, the vector comprises SEQ ID NO: 210, or a sequence that shares at least 80%, at least 85%, at least 90%, at least 95%, or at least 98% identity thereto. In some embodiments, the vector comprises SEQ ID NO: 212, or a sequence that shares at least 80%, at least 85%, at least 90%, at least 95%, or at least 98% identity thereto.

[0373] In some embodiments, the vector comprises SEQ ID NO: 224, 226, 227, 229, or 231, or a sequence that shares at least 80%, at least 85%, at least 90%, at least 95%, or at least 98% identity thereto. In some embodiments, the vector comprises SEQ ID NO: 292, 294, 296, 298, 300, 302, 304, 306, or 308, or a sequence that shares at least 80%, at least 85%, at least 90%, at least 95%, or at least 98% identity thereto.

[0374] In some embodiments, the vector encodes a polypeptide sequence comprising SEQ ID NO: 51, or a sequence that shares at least 80%, at least 85%, at least 90%, at least 95%, or at least 98% identity thereto. In some embodiments, the vector encodes a polypeptide sequence comprising SEQ ID NO: 53, or a sequence that shares at least 80%, at least 85%, at least 90%, at least 95%, or at least 98% identity thereto. In some embodiments, the vector encodes a polypeptide sequence comprising SEQ ID NO: 55, or a sequence that shares at least 80%, at least 85%, at least 90%, at least 95%, or at least 98% identity thereto. In some embodiments, the vector encodes a polypeptide sequence comprising SEQ ID NO: 57, or a sequence that shares at least 80%, at least 85%, at least 90%, at least 95%, or at least 98% identity thereto. In some embodiments, the vector encodes a polypeptide sequence comprising SEQ ID NO: 59, or a sequence that shares at least 80%, at least 85%, at least 90%, at least 95%, or at least 98% identity thereto. In some embodiments, the vector encodes a polypeptide sequence comprising SEQ ID NO: 61, or a sequence that shares at least 80%, at least 85%, at least 90%, at least 95%, or at least 98% identity thereto. In some embodiments, the vector encodes a polypeptide sequence comprising SEQ ID NO: 63, or a sequence that shares at least 80%, at least 85%, at least 90%, at least 95%, or at least 98% identity thereto. In some embodiments, the vector encodes a polypeptide sequence comprising SEQ ID NO: 64, or a sequence that shares at least 80%, at least 85%, at least 90%, at least 95%, or at least 98% identity thereto. In some embodiments, the vector encodes a polypeptide sequence comprising SEQ ID NO: 65, or a sequence that shares at least 80%, at least 85%, at least 90%, at least 95%, or at least 98% identity thereto. In some embodiments, the vector encodes a polypeptide sequence comprising SEQ ID NO: 66, or a sequence that shares at least 80%, at least 85%, at least 90%, at least 95%, or at least 98% identity thereto. In some embodiments, the vector encodes a polypeptide sequence comprising SEQ ID NO: 67, or a sequence that shares at least 80%, at least 85%, at least 90%, at least 95%, or at least 98% identity thereto. In some embodiments, the vector encodes a polypeptide sequence comprising SEQ ID NO: 68, or a sequence that shares at least 80%, at least 85%, at least 90%, at least 95%, or at least 98% identity thereto. In some embodiments, the vector encodes a polypeptide sequence comprising SEQ ID NO: 69, or a sequence that shares at least 80%, at least 85%, at least 90%, at least 95%, or at least 98% identity thereto. In some embodiments, the vector encodes a polypeptide sequence comprising SEQ ID NO: 70, or a sequence that shares at least 80%, at least 85%, at least 90%, at least 95%, or at least 98% identity thereto. In some embodiments, the vector encodes a polypeptide sequence comprising SEQ ID NO: 72, or a sequence that shares at least 80%, at least 85%, at least 90%, at least 95%, or at least 98% identity thereto. In some embodiments, the vector encodes a polypeptide sequence comprising SEQ ID NO: 73, or a sequence that shares at least 80%, at least 85%, at least 90%, at least 95%, or at least 98% identity thereto. In some embodiments, the vector encodes a polypeptide sequence comprising SEQ ID NO: 74, or a sequence that shares at least 80%, at least 85%, at least 90%, at least 95%, or at least 98% identity thereto.

[0375] In some embodiments, the vector encodes a polypeptide sequence comprising SEQ ID NO: 207, 209, or 211, or a sequence that shares at least 80%, at least 85%, at least 90%, at least 95%, or at least 98% identity thereto. In some embodiments, the vector encodes a polypeptide sequence comprising SEQ ID NO: 291, 293, 295, 297, 299, 301, 303, 305, 307, 21805, or a sequence that shares at least 80%, at least 85%, at least 90%, at least 95%, or at least 98% identity thereto.

[0376] In some embodiments, a polynucleotide sequence provided herein is codon-optimized. Codon-optimization is the process of introducing silent nucleotide changes into a nucleic acid sequence which increase the production of the protein encoded by the nucleic acid sequence without changing the amino acid sequence of the protein.

[0377] In some embodiments, the vector is an expression vector, i.e. for the expression of the engineered receptors of the disclosure in a suitable cell.

[0378] Vectors derived from retroviruses such as the lentivirus are suitable tools to achieve long-term gene transfer since they allow long-term, stable integration of a transgene and its propagation in daughter cells. Lentiviral vectors have the added advantage over vectors derived from onco-retroviruses such as murine leukemia viruses in that they can transduce non-proliferating cells, such as hepatocytes. They also have the added advantage of low immunogenicity.

[0379] The expression of natural or synthetic nucleic acids encoding engineered receptors is typically achieved by operably linking a nucleic acid encoding the fusion protein or portions thereof to a promoter, and incorporating the construct into an expression vector. The vectors can be suitable for replication and integration eukaryotes. Typical cloning vectors contain transcription and translation terminators, initiation sequences, and promoters useful for regulation of the expression of the desired nucleic acid sequence.

[0380] The polynucleotides encoding the fusion proteins can be cloned into a number of types of vectors. For example, the polynucleotides can be cloned into a vector including, but not limited to a plasmid, a phagemid, a phage derivative, an animal virus, and a cosmid. Vectors of particular interest include expression vectors, replication vectors, probe generation vectors, and sequencing vectors.

[0381] Further, the expression vector may be provided to cells, such as immune cells, in the form of a viral vector. Viral vector technology is well known in the art and is described, for example, in Sambrook et al. (2001, Molecular Cloning: A Laboratory Manual, Cold Spring Harbor Laboratory, New York), and in other virology and molecular biology manuals. Viruses, which are useful as vectors include, but are not limited to, retroviruses, adenoviruses, adeno-associated viruses, herpes viruses, and lentiviruses. In general, a suitable vector contains an origin of replication functional in at least one organism, a promoter sequence, convenient restriction endonuclease sites, and one or more selectable markers, (e.g., WO 01/96584; WO 01/29058; and U.S. Pat. No. 6,326,193).

[0382] A number of viral based systems have been developed for gene transfer into mammalian cells. For example, retroviruses provide a convenient platform for gene delivery systems. A selected gene can be inserted into a vector and packaged in retroviral particles using techniques known in the art. The recombinant virus can then be isolated and delivered to cells of the subject either in vivo or ex vivo. A number of retroviral systems are known in the art. In some embodiments, adenovirus vectors are used. A number of adenovirus vectors are known in the art. In one embodiment, lentivirus vectors are used.

[0383] Additional promoter elements, e.g., enhancers, regulate the frequency of transcriptional initiation. Typically, these are located in the region 30-110 basepairs (bp) upstream of the start site, although a number of promoters have recently been shown to contain functional elements downstream of the start site as well. The spacing between promoter elements frequently is flexible, so that promoter function is preserved when elements are inverted or moved relative to one another. In the thymidine kinase (tk) promoter, the spacing between promoter elements can be increased to 50 bp apart before activity begins to decline. Depending on the promoter, it appears that individual elements can function either cooperatively or independently to activate transcription.

[0384] One example of a suitable promoter is the immediate early cytomegalovirus (CMV) promoter sequence. This promoter sequence is a strong constitutive promoter sequence capable of driving high levels of expression of any polynucleotide sequence operatively linked thereto. Another example of a suitable promoter is Elongation Growth Factor-1α (EF-1α). Another example of a suitable promoter is the U6 promoter. Another example of a suitable promoter is the H1 promoter. However, other constitutive promoter sequences may also be used, including, but not limited to the simian virus 40 (SV40) early promoter, mouse mammary tumor virus (MMTV), human immunodeficiency virus (HIV) long terminal repeat (LTR) promoter, MoMuLV promoter, an avian leukemia virus promoter, an Epstein-Barr virus immediate early promoter, a Rous sarcoma virus promoter, as well as human gene promoters such as, but not limited to, the actin promoter, the myosin promoter, the hemoglobin promoter, and the creatine kinase promoter. Further, the invention should not be limited to the use of constitutive promoters. Inducible promoters are also contemplated as part of the invention. The use of an inducible promoter provides a molecular switch capable of turning on expression of the polynucleotide sequence which it is operatively linked when such expression is desired, or turning off the expression when expression is not desired. Examples of inducible promoters include, but are not limited to a metallothionine promoter, a glucocorticoid promoter, a progesterone promoter, and a tetracycline promoter. An exemplary sequence of the U6 promoter is set forth in SEQ ID NO: 21800. An exemplary sequence of the H1 promoter is set forth in SEQ ID NO: 21801.

[0385] In certain aspect, a vector comprises a termination sequence, for example, a T6 or T7 termination sequence.

[0386] In order to assess the expression of an engineered receptor, the expression vector to be introduced into a cell can also contain either a selectable marker gene or a reporter gene or both to facilitate identification and selection of expressing cells from the population of cells sought to be transfected or infected through viral vectors. In other aspects, the selectable marker may be carried on a separate piece of DNA and used in a co-transfection procedure. Both selectable markers and reporter genes may be flanked with appropriate regulatory sequences to enable expression in the host cells. Useful selectable markers include, for example, antibiotic-resistance genes, such as neo and the like.

[0387] Reporter genes are used for identifying potentially transfected or transduced cells and for evaluating the functionality of regulatory sequences. In general, a reporter gene is a gene that is not present in or expressed by the recipient organism or tissue and that encodes a polypeptide whose expression is manifested by some easily detectable property, e.g., enzymatic activity. Expression of the reporter gene is assayed at a suitable time after the DNA has been introduced into the recipient cells. Suitable reporter genes may include genes encoding luciferase, beta-galactosidase, chloramphenicol acetyl transferase, secreted alkaline phosphatase, or the green fluorescent protein gene (e.g., Ui-Tei et al., 2000 FEBS Letters 479: 79-82). Suitable expression systems are well known and may be prepared using known techniques or obtained commercially. In general, the construct with the minimal 5′ flanking region showing the highest level of expression of reporter gene is identified as the promoter. Such promoter regions may be linked to a reporter gene and used to evaluate agents for the ability to modulate promoter-driven transcription.

[0388] Methods of introducing and expressing genes into a cell are known in the art. In the context of an expression vector, the vector can be readily introduced into a host cell, e.g., mammalian, bacterial, yeast, or insect cell by any method in the art. For example, the expression vector can be transferred into a host cell by physical, chemical, or biological means.

[0389] Physical methods for introducing a polynucleotide into a host cell include calcium phosphate precipitation, lipofection, particle bombardment, microinjection, electroporation, and the like. Methods for producing cells comprising vectors and/or exogenous nucleic acids are well-known in the art. See, for example, Sambrook et al. (2001, Molecular Cloning: A Laboratory Manual, Cold Spring Harbor Laboratory, New York). One method for the introduction of a polynucleotide into a host cell is calcium phosphate transfection.

[0390] Biological methods for introducing a polynucleotide of interest into a host cell include the use of DNA and RNA vectors. Viral vectors, and especially retroviral vectors, have become the most widely used method for inserting genes into mammalian, e.g., human cells. Other viral vectors can be derived from lentivirus, poxviruses, herpes simplex virus I, adenoviruses and adeno-associated viruses, and the like. See, for example, U.S. Pat. Nos. 5,350,674 and 5,585,362.

[0391] Chemical means for introducing a polynucleotide into a host cell include colloidal dispersion systems, such as macromolecule complexes, nanocapsules, microspheres, beads, and lipid-based systems including oil-in-water emulsions, micelles, mixed micelles, and liposomes. An exemplary colloidal system for use as a delivery vehicle in vitro and in vivo is a liposome (e.g., an artificial membrane vesicle).

[0392] Regardless of the method used to introduce exogenous nucleic acids into a host cell or otherwise expose a cell to the inhibitor of the present invention, in order to confirm the presence of the recombinant DNA sequence in the host cell, a variety of assays may be performed. Such assays include, for example, “molecular biological” assays well known to those of skill in the art, such as Southern and Northern blotting, RT-PCR and PCR; “biochemical” assays, such as detecting the presence or absence of a particular peptide, e.g., by immunological means (ELISAs and Western blots) or by assays described herein to identify agents falling within the scope of the invention.

### Immune Cells

[0393] Provided herein are immune cells comprising the polynucleotides, vectors, fusion proteins and engineered receptors described herein.

[0394] The disclosure provides an immune cell responsive to loss of heterozygosity in a cancer cell, comprising: an activator receptor comprising an extracellular ligand binding domain specific to an erb-b2 receptor tyrosine kinase 2 (HER2) antigen; and an inhibitory receptor comprising an extracellular ligand binding domain specific to a non-target antigen that is not expressed by the cancer cell due to a loss of heterozygosity in the cancer cell. In some embodiments, the non-target antigen is an HLA class I allele or a minor histocompatibility antigen (MiHA). In some embodiments, the HLA class I allele comprises HLA-A, HLA-B, HLA-C or HLA-E. In some embodiments, the non-target antigen is selected from CXCL16, COLEC12 and APCDD1, HLA-A*01, HLA-A*02, HLA-A*03, HLA-A*11, HLA-B*07, HLA-C*07, or an antigen peptide thereof. In some embodiments, the HLA class I allele is HLA-A*02. In some embodiments, the target antigen is HER2. In some embodiments, the target antigen is a peptide antigen of HER2 in a complex with a major histocompatibility class I complex (MHC I) or MHC II. In some embodiments, the cancer cell expresses HER2. In some embodiments, the cancer cell is a breast cancer cell, bladder cancer cell, ovarian cancer cell, gastric cancer cell, a salivary duct carcinoma cell, a non-small cell lung cancer cell, a pancreatic cancer cell, or a colon cancer cell. In some embodiments, the cancer cell is a breast cancer cell or gastric cancer cell.

[0395] In some embodiments, the HLA-A*02 non-target antigen is expressed by healthy cells of a subject. In some embodiments, the healthy cells of the subject express both the target antigen and the HLA-A*02 non-target antigen. In some embodiments, the activator receptor and the inhibitory receptor together specifically activate the immune cell in the presence of the cancer cell.

[0396] In some embodiments, the immune cell is a T cell. In some embodiments, the T cell is a CD8+ CD4− T cell. In some embodiments, the immune cell is autologous. In some embodiments, the immune cell is allogeneic.

[0397] As used herein, the term “immune cell” refers to a cell involved in the innate or adaptive (acquired) immune systems. Exemplary innate immune cells include phagocytic cells such as neutrophils, monocytes and macrophages, Natural Killer (NK) cells, polymophonuclear leukocytes such as neutrophils eosinophils and basophils and mononuclear cells such as monocytes, macrophages and mast cells. Immune cells with roles in acquired immunity include lymphocytes such as T-cells and B-cells.

[0398] As used herein, a “T-cell” refers to a type of lymphocyte that originates from a bone marrow precursor that develops in the thymus gland. There are several distinct types of T-cells which develop upon migration to the thymus, which include, helper CD4+ T-cells, cytotoxic CD8+ T cells, memory T cells, regulatory CD4+ T-cells and stem memory T-cells. Different types of T-cells can be distinguished by the ordinarily skilled artisan based on their expression of markers. Methods of distinguishing between T-cell types will be readily apparent to the ordinarily skilled artisan.

[0399] In some embodiments, the engineered immune cell expresses the first and second receptors at a ratio of about 100:1 to 1:100 of first receptor to second receptor. In some embodiments, the engineered immune cell expresses the first and second receptors at a ratio of about 50:1 to 1:50 of first receptor to second receptor. In some embodiments, the engineered immune cell expresses the first and second receptors at a ratio of about 10:1 to 1:10 of first receptor to second receptor. In some embodiments, the engineered immune cell expresses the first and second receptors at a ratio of about 5:1 to 1:5 of first receptor to second receptor. In some embodiments, the engineered immune cell expresses the first and second receptors at a ratio of about 3:1 to 1:3 of first receptor to second receptor. In some embodiments, the engineered immune cell expresses the first and second receptors at a ratio of about 2:1 to 1:2 of first receptor to second receptor. In some embodiments, the engineered immune cell expresses the first and second receptors at a ratio of about 1:1.

[0400] In some embodiments, the first receptor comprises SEQ ID NO: 291, or a sequence sharing at least 75%, at least 80%, at least 85%, at least 90%, at least 95%, or at least 98% identity thereto; and the second receptor comprises SEQ ID NO: 303 or a sequence sharing at least 75%, at least 80%, at least 85%, at least 90%, at least 95%, or at least 98% identity thereto. In some embodiments, the first receptor comprises SEQ ID NO: 291, or a sequence sharing at least 75%, at least 80%, at least 85%, at least 90%, at least 95%, or at least 98% identity thereto; and the second receptor comprises SEQ ID NO: 305, or a sequence sharing at least 75%, at least 80%, at least 85%, at least 90%, at least 95%, or at least 98% identity thereto. In some embodiments, the first receptor comprises SEQ ID NO: 291, or a sequence sharing at least 75%, at least 80%, at least 85%, at least 90%, at least 95%, or at least 98% identity thereto; and the second receptor comprises SEQ ID NO: 307, or a sequence sharing at least 75%, at least 80%, at least 85%, at least 90%, at least 95%, or at least 98% identity thereto. In some embodiments, the first receptor comprises SEQ ID NO: 291, or a sequence sharing at least 75%, at least 80%, at least 85%, at least 90%, at least 95%, or at least 98% identity thereto; and the second receptor comprises SEQ ID NO: 21805, or a sequence sharing at least 75%, at least 80%, at least 85%, at least 90%, at least 95%, or at least 98% identity thereto.

[0401] In some embodiments, the first receptor comprises SEQ ID NO: 295, or a sequence sharing at least 75%, at least 80%, at least 85%, at least 90%, at least 95%, or at least 98% identity thereto; and the second receptor comprises SEQ ID NO: 303, or a sequence sharing at least 75%, at least 80%, at least 85%, at least 90%, at least 95%, or at least 98% identity thereto. In some embodiments, the first receptor comprises SEQ ID NO: 295, or a sequence sharing at least 75%, at least 80%, at least 85%, at least 90%, at least 95%, or at least 98% identity thereto; and the second receptor comprises SEQ ID NO: 305, or a sequence sharing at least 75%, at least 80%, at least 85%, at least 90%, at least 95%, or at least 98% identity thereto. In some embodiments, the first receptor comprises SEQ ID NO: 295, or a sequence sharing at least 75%, at least 80%, at least 85%, at least 90%, at least 95%, or at least 98% identity thereto; and the second receptor comprises SEQ ID NO: 307, or a sequence sharing at least 75%, at least 80%, at least 85%, at least 90%, at least 95%, or at least 98% identity thereto. In some embodiments, the first receptor comprises SEQ ID NO: 295, or a sequence sharing at least 75%, at least 80%, at least 85%, at least 90%, at least 95%, or at least 98% identity thereto; and the second receptor comprises SEQ ID NO: 21805, or a sequence sharing at least 75%, at least 80%, at least 85%, at least 90%, at least 95%, or at least 98% identity thereto.

[0402] In some embodiments, the first receptor comprises SEQ ID NO: 299, or a sequence sharing at least 75%, at least 80%, at least 85%, at least 90%, at least 95%, or at least 98% identity thereto; and the second receptor comprises SEQ ID NO: 303, or a sequence sharing at least 75%, at least 80%, at least 85%, at least 90%, at least 95%, or at least 98% identity thereto. In some embodiments, the first receptor comprises SEQ ID NO: 299, or a sequence sharing at least 75%, at least 80%, at least 85%, at least 90%, at least 95%, or at least 98% identity thereto; and the second receptor comprises SEQ ID NO: 305, or a sequence sharing at least 75%, at least 80%, at least 85%, at least 90%, at least 95%, or at least 98% identity thereto. In some embodiments, the first receptor comprises SEQ ID NO: 299, or a sequence sharing at least 75%, at least 80%, at least 85%, at least 90%, at least 95%, or at least 98% identity thereto; and the second receptor comprises SEQ ID NO: 307, or a sequence sharing at least 75%, at least 80%, at least 85%, at least 90%, at least 95%, or at least 98% identity thereto. In some embodiments, the first receptor comprises SEQ ID NO: 299, or a sequence sharing at least 75%, at least 80%, at least 85%, at least 90%, at least 95%, or at least 98% identity thereto; and the second receptor comprises SEQ ID NO: 21805, or a sequence sharing at least 75%, at least 80%, at least 85%, at least 90%, at least 95%, or at least 98% identity thereto.

[0403] In some embodiments, the immune cell further comprises a T2A self-cleaving peptide, wherein the T2A self-cleaving peptide comprises SEQ ID NO: 288 or 557, or a sequence sharing at least 75%, at least 80%, at least 85%, at least 90%, at least 95%, or at least 98% identity thereto.

[0404] In some embodiments, the engineered immune cell comprising the engineered receptors of the disclosure is a T cell. In some embodiments, the T cell is an effector T cell or a regulatory T cell. As used herein, a “T-cell” refers to a type of lymphocyte that originates from a bone marrow precursor that develops in the thymus gland. There are several distinct types of T-cells which develop upon migration to the thymus, which include, helper CD4+ T-cells, cytotoxic CD8+ T cells, memory T cells, regulatory CD4+ T-cells, NK T cells, γδ T cells, Mucosal-associated invariant T (MAIT) cells, and stem memory T-cells. Different types of T-cells can be distinguished by the ordinarily skilled artisan based on their expression of markers. Methods of distinguishing between T-cell types will be readily apparent to the ordinarily skilled artisan.

[0405] In some embodiments, the immune cell is selected form the group consisting of T cells, B cells and Natural Killer (NK) cells. In some embodiments, the immune cell is a T cell. In some embodiments, the immune cell is a B cell. In some embodiments, the immune cell is a Natural Killer (NK) cell. In some embodiments, the immune cell is CD8−. In some embodiments, the immune cell is CD8+. In some embodiments, the immune cell is CD4+. In some embodiments, the immune cell is CD4−. In some embodiments, the immune cell is CD8−/CD4+. In some embodiments, the immune cell is CD8+ CD4− T cell.

[0406] In some embodiments, the immune cell is a gamma delta (T6) T cell. In some embodiments, the immune cell is an invariant T cell. In some embodiments, the immune cell is an invariant natural killer T cell (iNKT cell).

[0407] In some embodiments, the immune cell comprises a modification to an MHC Class I gene or a B2M gene. In some embodiments, the MHC Class I gene is HLA-A*02, or an allelic variant thereof. In some embodiments, the modification reduces or eliminates expression of the MHC Class I gene or the B2M gene.

[0408] In some embodiments, the immune cell comprises a polynucleotide or polynucleotide system described herein. In some embodiments, the polynucleotide or polynucleotide system comprises a sequence encoding a first receptor described herein. In some embodiments, the polynucleotide or polynucleotide system comprises a sequence encoding a second receptor described herein. In some embodiments, the polynucleotide or polynucleotide systems encodes an shRNA described herein. In some embodiments, the polynucleotide or polynucleotide system comprises a sequence encoding a first receptor described herein and a second receptor described herein. In some embodiments, the polynucleotide or polynucleotide system comprises a sequence encoding a first receptor described herein, a second receptor described herein, and an shRNA described herein.

[0409] Methods transforming populations of immune cells, such as T cells, with the vectors of the instant disclosure will be readily apparent to the person of ordinary skill in the art. For example, CD3+ T cells can be isolated from PBMCs using a CD3+ T cell negative isolation kit (Miltenyi), according to manufacturer's instructions. T cells can be cultured at a density of 1×10\hat{ }6 cells/mL in X-Vivo 15 media supplemented with 5% human A/B serum and 1% Pen/strep in the presence of CD3/28 Dynabeads (1:1 cell to bead ratio) and 300 Units/mL of IL-2 (Miltenyi). After 2 days, T cells can be transduced with viral vectors, such as lentiviral vectors using methods known in the art. In some embodiments, the viral vector is transduced at a multiplicity of infection (MOI) of 5. Cells can then be cultured in IL-2 or other cytokines such as combinations of IL-7/15/21 for an additional 5 days prior to enrichment. Methods of isolating and culturing other populations of immune cells, such as B cells, or other populations of T cells, will be readily apparent to the person of ordinary skill in the art. Although this method outlines a potential approach it should be noted that these methodologies are rapidly evolving. For example excellent viral transduction of peripheral blood mononuclear cells can be achieved after 5 days of growth to generate a >99% CD3+ highly transduced cell population.

[0410] Methods of activating and culturing populations of T cells comprising the engineered TCRs, CARs, fusion proteins or vectors encoding the fusion proteins of the instant disclosure, will be readily apparent to the person of ordinary skill in the art.

[0411] Whether prior to or after genetic modification of T cells to express an engineered TCR, the T cells can be activated and expanded generally using methods as described, for example, in U.S. Pat. Nos. 6,352,694; 6,534,055; 6,905,680; 6,692,964; 5,858,358; 6,887,466; 6,905,681; 7,144,575; 7,067,318; 7,172,869; 7,232,566; 7,175,843; 5,883,223; 6,905,874; 6,797,514; 6,867,041, 10,040,846; and U.S. Pat. Appl. Pub. No. 2006/0121005.

[0412] In some embodiments, T cells of the instant disclosure are expanded and activated in vitro. Generally, the T cells of the instant disclosure are expanded in vitro by contact with a surface having attached thereto an agent that stimulates a CD3/TCR complex associated signal and a ligand that stimulates a co-stimulatory molecule on the surface of the T cells. In particular, T cell populations may be stimulated as described herein, such as by contact with an anti-CD3 antibody. For co-stimulation of an accessory molecule on the surface of the T cells, a ligand that binds the accessory molecule is used. For example, a population of T cells can be contacted with an anti-CD3 antibody and an anti-CD28 antibody, under conditions appropriate for stimulating proliferation of the T cells. To stimulate proliferation of either CD4+ T cells or CD8+ T cells, an anti-CD3 antibody and an anti-CD28 antibody can be used. Examples of an anti-CD28 antibody include 9.3, B-T3, XR-CD28 (Diaclone, Besançon, France) can be used as can other methods commonly known in the art (Berg et al., Transplant Proc. 30(8):3975-3977, 1998; Haanen et al., J. Exp. Med. 190(9):13191328, 1999; Garland et al., J. Immunol Meth. 227(1-2):53-63, 1999).

[0413] In some embodiments, the primary stimulatory signal and the co-stimulatory signal for the T cell may be provided by different protocols. For example, the agents providing each signal may be in solution or coupled to a surface. When coupled to a surface, the agents may be coupled to the same surface (i.e., in “cis” formation) or to separate surfaces (i.e., in “trans” formation). Alternatively, one agent may be coupled to a surface and the other agent in solution. In some embodiments, the agent providing the co-stimulatory signal is bound to a cell surface and the agent providing the primary activation signal is in solution or coupled to a surface. In certain embodiments, both agents can be in solution. In another embodiment, the agents may be in soluble form, and then cross-linked to a surface, such as a cell expressing Fc receptors or an antibody or other binding agent which will bind to the agents. In this regard, see for example, U.S. Patent Application Publication Nos. 20040101519 and 20060034810 for artificial antigen presenting cells (aAPCs) that are contemplated for use in activating and expanding T cells in the present invention.

[0414] In some embodiments, the two agents are immobilized on beads, either on the same bead, i.e., “cis,” or to separate beads, i.e., “trans.” By way of example, the agent providing the primary activation signal is an anti-CD3 antibody or an antigen-binding fragment thereof and the agent providing the co-stimulatory signal is an anti-CD28 antibody or antigen-binding fragment thereof; and both agents are co-immobilized to the same bead in equivalent molecular amounts. In one embodiment, a 1:1 ratio of each antibody bound to the beads for CD4+ T cell expansion and T cell growth is used. In some embodiments, the ratio of CD3:CD28 antibody bound to the beads ranges from 100:1 to 1:100 and all integer values there between. In one aspect of the present invention, more anti-CD28 antibody is bound to the particles than anti-CD3 antibody, i.e., the ratio of CD3:CD28 is less than one. In certain embodiments of the invention, the ratio of anti CD28 antibody to anti CD3 antibody bound to the beads is greater than 2:1.

[0415] Ratios of particles to cells from 1:500 to 500:1 and any integer values in between may be used to stimulate T cells or other target cells. As those of ordinary skill in the art can readily appreciate, the ratio of particles to cells may depend on particle size relative to the target cell. For example, small sized beads could only bind a few cells, while larger beads could bind many. In certain embodiments the ratio of cells to particles ranges from 1:100 to 100:1 and any integer values in-between and in further embodiments the ratio comprises 1:9 to 9:1 and any integer values in between, can also be used to stimulate T cells. In some embodiments, a ratio of 1:1 cells to beads is used. One of skill in the art will appreciate that a variety of other ratios may be suitable for use in the present invention. In particular, ratios will vary depending on particle size and on cell size and type.

[0416] In further embodiments of the present invention, the cells, such as T cells, are combined with agent-coated beads, the beads and the cells are subsequently separated, and then the cells are cultured. In an alternative embodiment, prior to culture, the agent-coated beads and cells are not separated but are cultured together. In a further embodiment, the beads and cells are first concentrated by application of a force, such as a magnetic force, resulting in increased ligation of cell surface markers, thereby inducing cell stimulation.

[0417] By way of example, cell surface proteins may be ligated by allowing paramagnetic beads to which anti-CD3 and anti-CD28 are attached to contact the T cells. In one embodiment the cells (for example, CD4+ T cells) and beads (for example, DYNABEADS CD3/CD28 T paramagnetic beads at a ratio of 1:1) are combined in a buffer. Again, those of ordinary skill in the art can readily appreciate any cell concentration may be used. In certain embodiments, it may be desirable to significantly decrease the volume in which particles and cells are mixed together (i.e., increase the concentration of cells), to ensure maximum contact of cells and particles. For example, in one embodiment, a concentration of about 2 billion cells/ml is used. In another embodiment, greater than 100 million cells/ml is used. In a further embodiment, a concentration of cells of 10, 15, 20, 25, 30, 35, 40, 45, or 50 million cells/ml is used. In yet another embodiment, a concentration of cells from 75, 80, 85, 90, 95, or 100 million cells/ml is used. In further embodiments, concentrations of 125 or 150 million cells/ml can be used. In some embodiments, cells that are cultured at a density of 1×106 cells/mL are used.

[0418] In some embodiments, the mixture may be cultured for several hours (about 3 hours) to about 14 days or any hourly integer value in between. In another embodiment, the beads and T cells are cultured together for 2-3 days. Conditions appropriate for T cell culture include an appropriate media (e.g., Minimal Essential Media or RPMI Media 1640 or, X-vivo 15, (Lonza)) that may contain factors necessary for proliferation and viability, including serum (e.g., fetal bovine or human serum), interleukin-2 (IL-2), insulin, IFN-γ, IL-4, IL-7, GM-CSF, IL-10, IL-12, IL-15, TGFβ, and TNF-α or any other additives for the growth of cells known to the skilled artisan. Other additives for the growth of cells include, but are not limited to, surfactant, plasmanate, and reducing agents such as N-acetyl-cysteine and 2-mercaptoethanol. Media can include RPMI 1640, AIM-V, DMEM, MEM, α-MEM, F-12, X-Vivo 15, and X-Vivo 20, Optimizer, with added amino acids, sodium pyruvate, and vitamins, either serum-free or supplemented with an appropriate amount of serum (or plasma) or a defined set of hormones, and/or an amount of cytokine(s) sufficient for the growth and expansion of T cells. In some embodiments, the media comprises X-VIVO-15 media supplemented with 5% human A/B serum, 1% penicillin/streptomycin (pen/strep) and 300 Units/ml of IL-2 (Miltenyi).

[0419] The T cells are maintained under conditions necessary to support growth, for example, an appropriate temperature (e.g., 37° C.) and atmosphere (e.g., air plus 5% CO2).

[0420] In some embodiments, the T cells comprising engineered TCRs, CARs, and/or inhibitory receptors of the disclosure are autologous. Prior to expansion and genetic modification, a source of T cells is obtained from a subject. Immune cells such as T cells can be obtained from a number of sources, including peripheral blood mononuclear cells, bone marrow, lymph node tissue, cord blood, thymus tissue, tissue from a site of infection, ascites, pleural effusion, spleen tissue, and tumors. In certain embodiments of the present invention, any number of T cell lines available in the art, may be used. In certain embodiments of the present invention, T cells can be obtained from a unit of blood collected from a subject using any number of techniques known to the skilled artisan, such as Ficoll™ separation.

[0421] In some embodiments, cells from the circulating blood of an individual are obtained by apheresis. The apheresis product typically contains lymphocytes, including T cells, monocytes, granulocytes, B cells, other nucleated white blood cells, red blood cells, and platelets. In some embodiments, the cells collected by apheresis may be washed to remove the plasma fraction and to place the cells in an appropriate buffer or media for subsequent processing steps. In some embodiments, the cells are washed with phosphate buffered saline (PBS). In alternative embodiments, the wash solution lacks calcium and may lack magnesium or may lack many if not all divalent cations. As those of ordinary skill in the art would readily appreciate a washing step may be accomplished by methods known to those in the art, such as by using a semi-automated “flow-through” centrifuge (for example, the Cobe 2991 cell processor, the Baxter CytoMate, or the Haemonetics Cell Saver 5) according to the manufacturer's instructions. After washing, the cells may be resuspended in a variety of biocompatible buffers, such as, for example, Ca2+-free, Mg2+-free PBS, PlasmaLyte A, or other saline solution with or without buffer. Alternatively, the undesirable components of the apheresis sample may be removed and the cells directly resuspended in culture media.

[0422] In some embodiments, immune cells such as T cells are isolated from peripheral blood lymphocytes by lysing the red blood cells and depleting the monocytes, for example, by centrifugation through a PERCOLL™ gradient or by counterflow centrifugal elutriation. Specific subpopulations of immune cells, such as T cells, B cells, or CD4+ T cells can be further isolated by positive or negative selection techniques. For example, in one embodiment, T cells are isolated by incubation with anti-CD4-conjugated beads, for a time period sufficient for positive selection of the desired T cells.

[0423] Enrichment of an immune cell population, such as a T cell population, by negative selection can be accomplished with a combination of antibodies directed to surface markers unique to the negatively selected cells. One method is cell sorting and/or selection via negative magnetic immune-adherence or flow cytometry that uses a cocktail of monoclonal antibodies directed to cell surface markers present on the cells negatively selected. For example, to enrich for CD4+ cells by negative selection, a monoclonal antibody cocktail typically includes antibodies to CD 14, CD20, CD 11b, CD 16, HLA-DR, and CD8.

[0424] For isolation of a desired population of immune cells by positive or negative selection, the concentration of cells and surface (e.g., particles such as beads) can be varied. In certain embodiments, it may be desirable to significantly decrease the volume in which beads and cells are mixed together (i.e., increase the concentration of cells), to ensure maximum contact of cells and beads.

[0425] In some embodiments, the cells may be incubated on a rotator for varying lengths of time at varying speeds at either 2-10° C. or at room temperature.

[0426] T cells for stimulation, or PBMCs from which immune cells such as T cells are isolated, can also be frozen after a washing step. Wishing not to be bound by theory, the freeze and subsequent thaw step provides a more uniform product by removing granulocytes and to some extent monocytes in the cell population. After the washing step that removes plasma and platelets, the cells may be suspended in a freezing solution. While many freezing solutions and parameters are known in the art and will be useful in this context, one method involves using PBS containing 20% DMSO and 8% human serum albumin, or culture media containing 10% Dextran 40 and 5% Dextrose, 20% Human Serum Albumin and 7.5% DMSO, or 31.25% Plasmalyte-A, 31.25% Dextrose 5%, 0.45% NaCl, 10% Dextran 40 and 5% Dextrose, 20% Human Serum Albumin, and 7.5% DMSO or other suitable cell freezing media containing for example, Hespan and PlasmaLyte A, the cells then are frozen to −80° C. at a rate of 1° per minute and stored in the vapor phase of a liquid nitrogen storage tank. Other methods of controlled freezing may be used as well as uncontrolled freezing immediately at −20° C. or in liquid nitrogen.

[0427] The disclosure provides an immune cell expressing the activator and/or inhibitory receptors described herein, wherein the immune cell has reduced expression and/or function the major histocompatibility (MHC) class I complex.

[0428] In some embodiments, the immune cell is autologous. For example, the immune cells is isolated or derived from same subject who will receive the cell as part of a therapeutic regimen. It can be advantageous to modify autologous immune cells to have reduced expression and/or function of MHC class I with the inhibitory receptor is specific to an MHC class I antigen. Without wishing to be bound by theory, modification of autologous immune cells to have reduced expression and/or function of MHC class I reduces binding of the inhibitory receptor by MHC class I expressed by the immune cells, either in cis or in trans.

[0429] In some embodiments, the immune cell is all allogeneic. Allogeneic immune cells can be derived from a donor other than the subject to which the immune cells will be administered. Allogeneic immune cells have been commonly referred to in cell therapy as “off-the-shelf” or “universal” because of the possibility for allogeneic cells to be prepared and stored for use in subjects of a variety of genotypes.

[0430] Any suitable methods of reducing expression and/or function the MHC class I complex are envisaged as within the scope of the instant disclosure, and include, inter alia, expression of interfering RNAs that knock down one or more RNAs encoding MHC class I components, or modifications of genes encoding MHC class I components.

[0431] The major histocompatibility complex (MHC) is a locus on the vertebrate genome that encodes a set of polypeptides required for the adaptive immune system. Among these are MHC class I polypeptides that include HLA-A, HLA-B, and HLA-C and alleles thereof. MHC class I alleles are highly polymorphic and expressed in all nucleated cells. MHC class I polypeptides encoded by HLA-A, HLA-B, and HLA-C and alleles thereof form heterodimers with β2 microglobulin (B2M) and present in complex with antigens on the surface of cells. As referred to herein, an MHC class I gene or polypeptide may refer to any polypeptide found in the MHC or the corresponding gene encoding said polypeptide. In some embodiments, the immune cells of the disclosure are inactivated by an inhibitor ligand comprising an MHC class I polypeptide, e.g. HLA-A, HLA-B, and HLA-C and alleles thereof. HLA-A alleles can be, for example and without limitation, HLA-A*02, HLA-A*02:01, HLA-A*02:01:01, HLA-A*02:01:01:01, and/or any gene that encodes protein identical or similar to HLA-A*02 protein. Thus, to prevent autocrine signaling/binding as described herein, it is desirable to eliminate or reduce expression of polypeptides encoded by HLA-A, HLA-B, and HLA-C and alleles thereof in the immune cells.

[0432] Immune Cells with Reduced MHC Class I Polypeptide Expression

[0433] In some embodiments, the immune cells described herein are modified to inactivate, or reduce or eliminate expression or function of an endogenous gene encoding an allele of an endogenous MHC class I polypeptide. In some embodiments, the gene encoding the MHC class I polypeptide is HLA-A, HLA-B, and/or HLA-C. HLA-A, HLA-B and HLA-C are encoded by the HLA-A, HLA-B and HLA-C loci. Each of HLA-A, HLA-B and HLA-C includes many variant alleles, all of which are envisaged as within the scope of the instant disclosure. In some embodiments, the gene encoding the MHC class I polypeptide is HLA-A. In some embodiments, the gene encoding the MHC class I polypeptide is HLA-A*02. In some embodiments, the gene encoding the MHC class I polypeptide is HLA-A*02:01. In some embodiments, the gene encoding the MHC class I polypeptide is HLA-A*02:01:01. In some embodiments, the gene encoding the MHC class I polypeptide is HLA-A*02:01:01:01.

[0434] In some embodiments, the genetically engineered immune cells described herein are modified to reduce or eliminate expression of the B2M gene product. The beta-2 microglobulin (B2M) gene encodes a protein that associates with the major histocompatibility complex (MHC) class I, i.e. MHC-I complex. The MHC-I complex is required for presentation of antigens on the cell surface. The MHC-I complex is disrupted and non-functional when the B2M is deleted (Wang D et al. Stem Cells Transl Med. 4:1234-1245 (2015)). Furthermore, the B2M gene can be disrupted with high efficiency using gene editing techniques known in the art (Ren et al. Clin. Cancer Res. 23:2255-2266 (2017)). Reducing or eliminating B2M can reduce, or eliminate functional MHC I on the surface of the immune cell.

[0435] The disclosure provides gene editing systems for editing an endogenous target gene in an immune cell. The disclosure provides interfering RNAs specific to sequences of target genes. Gene editing systems such as CRISPR/Cas systems, TALENs and zinc fingers can be used to generate double strand breaks, which, through gene repair mechanisms such as homology directed repair or non-homologous end joining (NHEJ), can be used to introduce mutations. NHEJ after resection of the ends of the break, or improper end joining, can be used to introduce deletions. In some embodiments, the target gene comprises a gene encoding a subunit of the MHC-I complex.

[0436] Target gene sequences include, but are not limited to, promoters, enhancers, introns, exons, intron/exon junctions, transcription products (pre-mRNA, mRNA, and splice variants), and/or 3′ and 5′ untranslated regions (UTRs). Any gene element or combination of gene elements may be targeted for the purpose of genetic editing in the immune cells described herein. Modifications to the target genes can be accomplished using any method known in the art to edit the target gene that results in altered or disrupted expression or function the target gene or gene product.

[0437] In some embodiments, modifying the gene encoding the MHC class I polypeptide comprises deleting all or a portion of the gene. In some embodiments, modifying the gene encoding the MHC class I polypeptide comprises introducing a mutation in the gene. In some embodiments, the mutation comprises a deletion, insertion, substitution, or frameshift mutation. In some embodiments, modifying the gene comprises using a nucleic acid guided endonuclease.

[0438] Gene sequences for the target genes described herein are known in the art. The sequences can be found at public databases, such as NCBI GenBank or the NCBI nucleotide database. Sequences may be found using gene identifiers, for example, the HLA-A gene has NCBI Gene ID: 3105, the HLA-B gene has NCBI Gene ID: 3106, the HLA-C gene has NCBI Gene ID: 3107, and the B2M gene has NCBI Gene ID: 567 and NCBI Reference Sequence: NC_000015.10. Gene sequences may also be found by searching public databases using keywords. For example, HLA-A alleles may be found in the NCBI nucleotide database by searching keywords, “HLA-A*02”, “HLA-A*02:01”, “HLA-A*02:01:01”, or “HLA-A*02:01:01:01.” These sequences can be used for targeting in various gene editing techniques known in the art. Table 18 provides non-limiting illustrative sequences of HLA-A allele and B2M gene sequences targeted for modification as described herein.

TABLE 18
Exemplary Target Gene Sequences

| Target | Sequence |
|---|---|
| B2M mRNA | AUUCCUGAAGCUGACAGCAUUCGGGCCGAGAUGUCUCGCUCCGUGG |
| | CCUUAGCUGUGCUCGCGCUACUCUCUCUUUCUGGCCUGGAGGCUAU |
| | CCAGCGUACUCCAAAGAUUCAGGUUUACUCACGUCAUCCAGCAGAG |
| | AAUGGAAAGUCAAAUUUCCUGAAUUGCUAUGUGUCUGGGUUUCAUC |
| | CAUCCGACAUUGAAGUUGACUUACUGAAGAAUGGAGAGAGAAUUGA |
| | AAAAGUGGAGCAUUCAGACUUGUCUUUCAGCAAGGACUGGUCUUUC |
| | UAUCUCUUGUACUACACUGAAUUCACCCCCACUGAAAAAGAUGAGU |
| | AUGCCUGCCGUGUGAACCAUGUGACUUUGUCACAGCCCAAGAUAGU |
| | UAAGUGGGAUCGAGACAUGUAAGCAGCAUCAUGGAGGUUUGAAGAU |
| | GCCGCAUUUGGAUUGGAUGAAUUCCAAAUUCUGCUUGCUUGCUUUU |
| | UAAUAUUGAUAUGCUUAUACACUUACACUUUAUGCACAAAAUGUAG |
| | GGUUAUAAUAAUGUUAACAUGGACAUGAUCUUCUUUAUAAUUCUAC |
| | UUUGAGUGCUGUCUCCAUGUUUGAUGUAUCUGAGCAGGUUGCUCCA |
| | CAGGUAGCUCUAGGAGGGCUGGCAACUUAGAGGUGGGGAGCAGAGA |
| | AUUCUCUUAUCCAACAUCAACAUCUUGGUCAGAUUUGAACUCUUCA |
| | AUCUCUUGCACUCAAAGCUUGUUAAGAUAGUUAAGCGUGCAUAAGU |
| | UAACUUCCAAUUUACAUACUCUGCUUAGAAUUUGGGGGAAAAUUUA |
| | GAAAUAUAAUUGACAGGAUUAUUGGAAAUUUGUUAUAAUGAAUGAA |
| | ACAUUUUGUCAUAUAAGAUUCAUAUUUACUUCUUAUACAUUUGAUA |
| | AAGUAAGGCAUGGUUGUGGUUAAUCUGGUUUAUUUUUGUUCCACAA |
| | GUUAAAUAAAUCAUAAAACUUGA (SEQ ID NO: 571) |
| B2M Gene | AAGTGGAGGCGTCGCGCTGGCGGGCATTCCTGAAGCTGACAGCATT |
| (GenBank: 567) | CGGGCCGAGATGTCTCGCTCCGTGGCCTTAGCTGTGCTCGCGCTAC |
| | TCTCTCTTTCTGGCCTGGAGGCTATCCAGCGTGAGTCTCTCCTACC |
| | CTCCCGCTCTGGTCCTTCCTCTCCCGCTCTGCACCCTCTGTGGCCC |
| | TCGCTGTGCTCTCTCGCTCCGTGACTTCCCTTCTCCAAGTTCTCCT |
| | TGGTGGCCCGCCGTGGGGCTAGTCCAGGGCTGGATCTCGGGGAAGC |
| | GGCGGGGTGGCCTGGGAGTGGGGAAGGGGGTGCGCACCCGGGACGC |
| | GCGCTACTTGCCCCTTTCGGCGGGGAGCAGGGGAGACCTTTGGCCT |
| | ACGGCGACGGGAGGGTCGGGACAAAGTTTAGGGCGTCGATAAGCGT |
| | CAGAGCGCCGAGGTTGGGGGAGGGTTTCTCTTCCGCTCTTTCGCGG |
| | GGCCTCTGGCTCCCCCAGCGCAGCTGGAGTGGGGGACGGGTAGGCT |
| | CGTCCCAAAGGCGCGGCGCTGAGGTTTGTGAACGCGTGGAGGGGCG |
| | CTTGGGGTCTGGGGGAGGCGTCGCCCGGGTAAGCCTGTCTGCTGCG |
| | GCTCTGCTTCCCTTAGACTGGAGAGCTGTGGACTTCGTCTAGGCGC |
| | CCGCTAAGTTCGCATGTCCTAGCACCTCTGGGTCTATGTGGGGCCA |
| | CACCGTGGGGAGGAAACAGCACGCGACGTTTGTAGAATGCTTGGCT |
| | GTGATACAAAGCGGTTTCGAATAATTAACTTATTTGTTCCCATCAC |
| | ATGTCACTTTTAAAAAATTATAAGAACTACCCGTTATTGACATCTT |
| | TCTGTGTGCCAAGGACTTTATGTGCTTTGCGTCATTTAATTTTGAA |
| | AACAGTTATCTTCCGCCATAGATAACTACTATGGTTATCTTCTGCC |
| | TCTCACAGATGAAGAAACTAAGGCACCGAGATTTTAAGAAACTTAA |
| | TTACACAGGGGATAAATGGCAGCAATCGAGATTGAAGTCAAGCCTA |
| | ACCAGGGCTTTTGCGGGAGCGCATGCCTTTTGGCTGTAATTCGTGC |
| | ATTTTTTTTTAAGAAAAACGCCTGCCTTCTGCGTGAGATTCTCCAG |
| | AGCAAACTGGGCGGCATGGGCCCTGTGGTCTTTTCGTACAGAGGGC |
| | TTCCTCTTTGGCTCTTTGCCTGGTTGTTTCCAAGATGTACTGTGCC |
| | TCTTACTTTCGGTTTTGAAAACATGAGGGGGTTGGGCGTGGTAGCT |
| | TACGCCTGTAATCCCAGCACTTAGGGAGGCCGAGGCGGGAGGATGG |
| | CTTGAGGTCCGTAGTTGAGACCAGCCTGGCCAACATGGTGAAGCCT |
| | GGTCTCTACAAAAAATAATAACAAAAATTAGCCGGGTGTGGTGGCT |
| | CGTGCCTGTGGTCCCAGCTGCTCCGGTGGCTGAGGCGGGAGGATCT |
| | CTTGAGCTTAGGCTTTTGAGCTATCATGGCGCCAGTGCACTCCAGC |
| | GTGGGCAACAGAGCGAGACCCTGTCTCTCAAAAAAGAAAAAAAAAA |
| | AAAAAGAAAGAGAAAAGAAAAGAAAGAAAGAAGTGAAGGTTTGTCA |
| | GTCAGGGGAGCTGTAAAACCATTAATAAAGATAATCCAAGATGGTT |
| | ACCAAGACTGTTGAGGACGCCAGAGATCTTGAGCACTTTCTAAGTA |
| | CCTGGCAATACACTAAGCGCGCTCACCTTTTCCTCTGGCAAAACAT |
| | GATCGAAAGCAGAATGTTTTGATCATGAGAAAATTGCATTTAATTT |
| | GAATACAATTTATTTACAACATAAAGGATAATGTATATATCACCAC |
| | CATTACTGGTATTTGCTGGTTATGTTAGATGTCATTTTAAAAAATA |
| | ACAATCTGATATTTAAAAAAAAATCTTATTTTGAAAATTTCCAAAG |
| | TAATACATGCCATGCATAGACCATTTCTGGAAGATACCACAAGAAA |
| | CATGTAATGATGATTGCCTCTGAAGGTCTATTTTCCTCCTCTGACC |
| | TGTGTGTGGGTTTTGTTTTTGTTTTACTGTGGGCATAAATTAATTT |
| | TTCAGTTAAGTTTTGGAAGCTTAAATAACTCTCCAAAAGTCATAAA |
| | GCCAGTAACTGGTTGAGCCCAAATTCAAACCCAGCCTGTCTGATAC |
| | TTGTCCTCTTCTTAGAAAAGATTACAGTGATGCTCTCACAAAATCT |
| | TGCCGCCTTCCCTCAAACAGAGAGTTCCAGGCAGGATGAATCTGTG |
| | CTCTGATCCCTGAGGCATTTAATATGTTCTTATTATTAGAAGCTCA |
| | GATGCAAAGAGCTCTCTTAGCTTTTAATGTTATGAAAAAAATCAGG |
| | TCTTCATTAGATTCCCCAATCCACCTCTTGATGGGGCTAGTAGCCT |
| | TTCCTTAATGATAGGGTGTTTCTAGAGAGATATATCTGGTCAAGGT |
| | GGCCTGGTACTCCTCCTTCTCCCCACAGCCTCCCAGACAAGGAGGA |
| | GTAGCTGCCTTTTAGTGATCATGTACCCTGAATATAAGTGTATTTA |
| | AAAGAATTTTATACACATATATTTAGTGTCAATCTGTATATTTAGT |
| | AGCACTAACACTTCTCTTCATTTTCAATGAAAAATATAGAGTTTAT |
| | AATATTTTCTTCCCACTTCCCCATGGATGGTCTAGTCATGCCTCTC |
| | ATTTTGGAAAGTACTGTTTCTGAAACATTAGGCAATATATTCCCAA |
| | CCTGGCTAGTTTACAGCAATCACCTGTGGATGCTAATTAAAACGCA |
| | AATCCCACTGTCACATGCATTACTCCATTTGATCATAATGGAAAGT |
| | ATGTTCTGTCCCATTTGCCATAGTCCTCACCTATCCCTGTTGTATT |
| | TTATCGGGTCCAACTCAACCATTTAAGGTATTTGCCAGCTCTTGTA |
| | TGCATTTAGGTTTTGTTTCTTTGTTTTTTAGCTCATGAAATTAGGT |
| | ACAAAGTCAGAGAGGGGTCTGGCATATAAAACCTCAGCAGAAATAA |
| | AGAGGTTTTGTTGTTTGGTAAGAACATACCTTGGGTTGGTTGGGCA |
| | CGGTGGCTCGTGCCTGTAATCCCAACACTTTGGGAGGCCAAGGCAG |
| | GCTGATCACTTGAAGTTGGGAGTTCAAGACCAGCCTGGCCAACATG |
| | GTGAAATCCCGTCTCTACTGAAAATACAAAAATTAACCAGGCATGG |
| | TGGTGTGTGCCTGTAGTCCCAGGAATCACTTGAACCCAGGAGGCGG |
| | AGGTTGCAGTGAGCTGAGATCTCACCACTGCACACTGCACTCCAGC |
| | CTGGGCAATGGAATGAGATTCCATCCCAAAAAATAAAAAAATAAAA |
| | AAATAAAGAACATACCTTGGGTTGATCCACTTAGGAACCTCAGATA |
| | ATAACATCTGCCACGTATAGAGCAATTGCTATGTCCCAGGCACTCT |
| | ACTAGACACTTCATACAGTTTAGAAAATCAGATGGGTGTAGATCAA |
| | GGCAGGAGCAGGAACCAAAAAGAAAGGCATAAACATAAGAAAAAAA |
| | ATGGAAGGGGTGGAAACAGAGTACAATAACATGAGTAATTTGATGG |
| | GGGCTATTATGAACTGAGAAATGAACTTTGAAAAGTATCTTGGGGC |
| | CAAATCATGTAGACTCTTGAGTGATGTGTTAAGGAATGCTATGAGT |
| | GCTGAGAGGGCATCAGAAGTCCTTGAGAGCCTCCAGAGAAAGGCTC |
| | TTAAAAATGCAGCGCAATCTCCAGTGACAGAAGATACTGCTAGAAA |
| | TCTGCTAGAAAAAAAACAAAAAAGGCATGTATAGAGGAATTATGAG |
| | GGAAAGATACCAAGTCACGGTTTATTCTTCAAAATGGAGGTGGCTT |
| | GTTGGGAAGGTGGAAGCTCATTTGGCCAGAGTGGAAATGGAATTGG |
| | GAGAAATCGATGACCAAATGTAAACACTTGGTGCCTGATATAGCTT |
| | GACACCAAGTTAGCCCCAAGTGAAATACCCTGGCAATATTAATGTG |
| | TCTTTTCCCGATATTCCTCAGGTACTCCAAAGATTCAGGTTTACTC |
| | ACGTCATCCAGCAGAGAATGGAAAGTCAAATTTCCTGAATTGCTAT |
| | GTGTCTGGGTTTCATCCATCCGACATTGAAGTTGACTTACTGAAGA |
| | ATGGAGAGAGAATTGAAAAAGTGGAGCATTCAGACTTGTCTTTCAG |
| | CAAGGACTGGTCTTTCTATCTCTTGTACTACACTGAATTCACCCCC |
| | ACTGAAAAAGATGAGTATGCCTGCCGTGTGAACCATGTGACTTTGT |
| | CACAGCCCAAGATAGTTAAGTGGGGTAAGTCTTACATTCTTTTGTA |
| | AGCTGCTGAAAGTTGTGTATGAGTAGTCATATCATAAAGCTGCTTT |
| | GATATAAAAAAGGTCTATGGCCATACTACCCTGAATGAGTCCCATC |
| | CCATCTGATATAAACAATCTGCATATTGGGATTGTCAGGGAATGTT |
| | CTTAAAGATCAGATTAGTGGCACCTGCTGAGATACTGATGCACAGC |
| | ATGGTTTCTGAACCAGTAGTTTCCCTGCAGTTGAGCAGGGAGCAGC |
| | AGCAGCACTTGCACAAATACATATACACTCTTAACACTTCTTACCT |
| | ACTGGCTTCCTCTAGCTTTTGTGGCAGCTTCAGGTATATTTAGCAC |
| | TGAACGAACATCTCAAGAAGGTATAGGCCTTTGTTTGTAAGTCCTG |
| | CTGTCCTAGCATCCTATAATCCTGGACTTCTCCAGTACTTTCTGGC |
| | TGGATTGGTATCTGAGGCTAGTAGGAAGGGCTTGTTCCTGCTGGGT |
| | AGCTCTAAACAATGTATTCATGGGTAGGAACAGCAGCCTATTCTGC |
| | CAGCCTTATTTCTAACCATTTTAGACATTTGTTAGTACATGGTATT |
| | TTAAAAGTAAAACTTAATGTCTTCCTTTTTTTTCTCCACTGTCTTT |
| | TTCATAGATCGAGACATGTAAGCAGCATCATGGAGGTAAGTTTTTG |
| | ACCTTGAGAAAATGTTTTTGTTTCACTGTCCTGAGGACTATTTATA |
| | GACAGCTCTAACATGATAACCCTCACTATGTGGAGAACATTGACAG |
| | AGTAACATTTTAGCAGGGAAAGAAGAATCCTACAGGGTCATGTTCC |
| | CTTCTCCTGTGGAGTGGCATGAAGAAGGTGTATGGCCCCAGGTATG |
| | GCCATATTACTGACCCTCTACAGAGAGGGCAAAGGAACTGCCAGTA |
| | TGGTATTGCAGGATAAAGGCAGGTGGTTACCCACATTACCTGCAAG |
| | GCTTTGATCTTTCTTCTGCCATTTCCACATTGGACATCTCTGCTGA |
| | GGAGAGAAAATGAACCACTCTTTTCCTTTGTATAATGTTGTTTTAT |
| | TCTTCAGACAGAAGAGAGGAGTTATACAGCTCTGCAGACATCCCAT |
| | TCCTGTATGGGGACTGTGTTTGCCTCTTAGAGGTTCCCAGGCCACT |
| | AGAGGAGATAAAGGGAAACAGATTGTTATAACTTGATATAATGATA |
| | CTATAATAGATGTAACTACAAGGAGCTCCAGAAGCAAGAGAGAGGG |
| | AGGAACTTGGACTTCTCTGCATCTTTAGTTGGAGTCCAAAGGCTTT |
| | TCAATGAAATTCTACTGCCCAGGGTACATTGATGCTGAAACCCCAT |
| | TCAAATCTCCTGTTATATTCTAGAACAGGGAATTGATTTGGGAGAG |
| | CATCAGGAAGGTGGATGATCTGCCCAGTCACACTGTTAGTAAATTG |
| | TAGAGCCAGGACCTGAACTCTAATATAGTCATGTGTTACTTAATGA |
| | CGGGGACATGTTCTGAGAAATGCTTACACAAACCTAGGTGTTGTAG |
| | CCTACTACACGCATAGGCTACATGGTATAGCCTATTGCTCCTAGAC |
| | TACAAACCTGTACAGCCTGTTACTGTACTGAATACTGTGGGCAGTT |
| | GTAACACAATGGTAAGTATTTGTGTATCTAAACATAGAAGTTGCAG |
| | TAAAAATATGCTATTTTAATCTTATGAGACCACTGTCATATATACA |
| | GTCCATCATTGACCAAAACATCATATCAGCATTTTTTCTTCTAAGA |
| | TTTTGGGAGCACCAAAGGGATACACTAACAGGATATACTCTTTATA |
| | ATGGGTTTGGAGAACTGTCTGCAGCTACTTCTTTTAAAAAGGTGAT |
| | CTACACAGTAGAAATTAGACAAGTTTGGTAATGAGATCTGCAATCC |
| | AAATAAAATAAATTCATTGCTAACCTTTTTCTTTTCTTTTCAGGTT |
| | TGAAGATGCCGCATTTGGATTGGATGAATTCCAAATTCTGCTTGCT |
| | TGCTTTTTAATATTGATATGCTTATACACTTACACTTTATGCACAA |
| | AATGTAGGGTTATAATAATGTTAACATGGACATGATCTTCTTTATA |
| | ATTCTACTTTGAGTGCTGTCTCCATGTTTGATGTATCTGAGCAGGT |
| | TGCTCCACAGGTAGCTCTAGGAGGGCTGGCAACTTAGAGGTGGGGA |
| | GCAGAGAATTCTCTTATCCAACATCAACATCTTGGTCAGATTTGAA |
| | CTCTTCAATCTCTTGCACTCAAAGCTTGTTAAGATAGTTAAGCGTG |
| | CATAAGTTAACTTCCAATTTACATACTCTGCTTAGAATTTGGGGGA |
| | AAATTTAGAAATATAATTGACAGGATTATTGGAAATTTGTTATAAT |
| | GAATGAAACATTTTGTCATATAAGATTCATATTTACTTCTTATACA |
| | TTTGATAAAGTAAGGCATGGTTGTGGTTAATCTGGTTTATTTTTGT |
| | TCCACAAGTTAAATAAATCATAAAACTTGA (SEQ ID NO: |
| | 572) |
| HLA- | CAGAAGCAGAGGGGTCAGGGCGAAGTCCCAGGGCCCCAGGCGTGGC |
| A*02:01:01:01 | TCTCAGGGTCTCAGGCCCCGAAGGCGGTGTATGGATTGGGGAGTCC |
| sequence | CAGCCTTGGGGATTCCCCAACTCCGCAGTTTCTTTTCTCCCTCTCC |
| encoding mRNA | CAACCTATGTAGGGTCCTTCTTCCTGGATACTCACGACGCGGACCC |
| | AGTTCTCACTCCCATTGGGTGTCGGGTTTCCAGAGAAGCCAATCAG |
| | TGTCGTCGCGGTCGCGGTTCTAAAGTCCGCACGCACCCACCGGGAC |
| | TCAGATTCTCCCCAGACGCCGAGGATGGCCGTCATGGCGCCCCGAA |
| | CCCTCGTCCTGCTACTCTCGGGGGCTCTGGCCCTGACCCAGACCTG |
| | GGCGGGCTCTCACTCCATGAGGTATTTCTTCACATCCGTGTCCCGG |
| | CCCGGCCGCGGGGAGCCCCGCTTCATCGCAGTGGGCTACGTGGACG |
| | ACACGCAGTTCGTGCGGTTCGACAGCGACGCCGCGAGCCAGAGGAT |
| | GGAGCCGCGGGCGCCGTGGATAGAGCAGGAGGGTCCGGAGTATTGG |
| | GACGGGGAGACACGGAAAGTGAAGGCCCACTCACAGACTCACCGAG |
| | TGGACCTGGGGACCCTGCGCGGCTACTACAACCAGAGCGAGGCCGG |
| | TTCTCACACCGTCCAGAGGATGTATGGCTGCGACGTGGGGTCGGAC |
| | TGGCGCTTCCTCCGCGGGTACCACCAGTACGCCTACGACGGCAAGG |
| | ATTACATCGCCCTGAAAGAGGACCTGCGCTCTTGGACCGCGGCGGA |
| | CATGGCAGCTCAGACCACCAAGCACAAGTGGGAGGCGGCCCATGTG |
| | GCGGAGCAGTTGAGAGCCTACCTGGAGGGCACGTGCGTGGAGTGGC |
| | TCCGCAGATACCTGGAGAACGGGAAGGAGACGCTGCAGCGCACGGA |
| | CGCCCCCAAAACGCATATGACTCACCACGCTGTCTCTGACCATGAA |
| | GCCACCCTGAGGTGCTGGGCCCTGAGCTTCTACCCTGCGGAGATCA |
| | CACTGACCTGGCAGCGGGATGGGGAGGACCAGACCCAGGACACGGA |
| | GCTCGTGGAGACCAGGCCTGCAGGGGATGGAACCTTCCAGAAGTGG |
| | GCGGCTGTGGTGGTGCCTTCTGGACAGGAGCAGAGATACACCTGCC |
| | ATGTGCAGCATGAGGGTTTGCCCAAGCCCCTCACCCTGAGATGGGA |
| | GCCGTCTTCCCAGCCCACCATCCCCATCGTGGGCATCATTGCTGGC |
| | CTGGTTCTCTTTGGAGCTGTGATCACTGGAGCTGTGGTCGCTGCTG |
| | TGATGTGGAGGAGGAAGAGCTCAGATAGAAAAGGAGGGAGCTACTC |
| | TCAGGCTGCAAGCAGTGACAGTGCCCAGGGCTCTGATGTGTCTCTC |
| | ACAGCTTGTAAAGTGTGAGACAGCTGCCTTGTGTGGGACTGAGAGG |
| | CAAGAGTTGTTCCTGCCCTTCCCTTTGTGACTTGAAGAACCCTGAC |
| | TTTGTTTCTGCAAAGGCACCTGCATGTGTCTGTGTTCGTGTAGGCA |
| | TAATGTGAGGAGGTGGGGAGACCACCCCACCCCCATGTCCACCATG |
| | ACCCTCTTCCCACGCTGACCTGTGCTCCCTCCCCAATCATCTTTCC |
| | TGTTCCAGAGAGGTGGGGCTGAGGTGTCTCCATCTCTGTCTCAACT |
| | TCATGGTGCACTGAGCTGTAACTTCTTCCTTCCCTATTAAAA |
| | (SEQ ID NO: 573) |
| HLA-A*02 | ATGGCCGTCATGGCGCCCCGAACCCTCGTCCTGCTACTCTCGGGGG |
| (GenBank: | CTCTGGCCCTGACCCAGACCTGGGCGGGTGAGTGCGGGGTCGGGAG |
| LK021978.1) | GGAAACGGCCTCTGTGGGGAGAAGCAACGGGCCCGCCTGGCGGGGG |
| | CGCAGGACCCGGGAAGCCGCGCCGGGAGGAGGGTCGGGCGGGTCTC |
| | AGCCACTCCTCGTCCCCAGGCTCTCACTCCATGAGGTATTTCTTCA |
| | CATCCGTGTCCCGGCCCGGCCGCGGGGAGCCCCGCTTCATCGCAGT |
| | GGGCTACGTGGACGACACGCAGTTCGTGCGGTTCGACAGCGACGCC |
| | GCGAGCCAGAGGATGGAGCCGCGGGCGCCGTGGATAGAGCAGGAGG |
| | GTCCGGAGTATTGGGACGGGGAGACACGGAAAGTGAAGGCCCACTC |
| | ACAGACTCACCGAGTGGACCTGGGGACCCTGCGCGGCTACTACAAC |
| | CAGAGCGAGGCCGGTGAGTGACCCCGGCCCGGGGCGCAGGTCACGA |
| | CCTCTCATCCCCCACGGACGGGCCAGGTCGCCCACAGTCTCCGGGT |
| | CCGAGATCCGCCCCGAAGCCGCGGGACCCCGAGACCCTTGCCCCGG |
| | GAGAGGCCCAGGCGCCTTTACCCGGTTTCATTTTCAGTTTAGGCCA |
| | AAAATCCCCCCAGGTTGGTCGGGGCGGGGCGGGGCTCGGGGGACCG |
| | GGCTGACCGCGGGGTCCGGGCCAGGTTCTCACACCGTCCAGAGGAT |
| | GTATGGCTGCGACGTGGGGTCGGACTGGCGCTTCCTCCGCGGGTAC |
| | CACCAGTACGCCTACGACGGCAAGGATTACATCGCCCTGAAAGAGG |
| | ACCTGCGCTCTTTGACCGCGGCGGACATGGCAGCTCAGACCACCAA |
| | GCACAAGTGGGAGGCGGCCCATGTGGCGGAGCAGTTGAGAGCCTAC |
| | CTGGAGGGCACGTGCGTGGAGTGGCTCCGCAGATACCTGGAGAACG |
| | GGAAGGAGACGCTGCAGCGCACGGGTACCAGGGGCCACGGGGCGCC |
| | TCCCTGATCGCCTGTAGATCTCCCGGGCTGGCCTCCCACAAGGAGG |
| | GGAGACAATTGGGACCAACACTAGAATATCGCCCTCCCTCTGGTCC |
| | TGAGGGAGAGGAATCCTCCTGGGTTTCCAGATCCTGTACCAGAGAG |
| | TGACTCTGAGGTTCCGCCCTGCTCTCTGACACAATTAAGGGATAAA |
| | ATCTCTGAAGGAATGACGGGAAGACGATCCCTCGAATACTGATGAG |
| | TGGTTCCCTTTGACACACACAGGCAGCAGCCTTGGGCCCGTGACTT |
| | TTCCTCTCAGGCCTTGTTCTCTGCTTCACACTCAATGTGTGTGGGG |
| | GTCTGAGTCCAGCACTTCTGAGTCCTTCAGCCTCCACTCAGGTCAG |
| | GACCAGAAGTCGCTGTTCCCTCTTCAGGGACTAGAATTTTCCACGG |
| | AATAGGAGATTATCCCAGGTGCCTGTGTCCAGGCTGGTGTCTGGGT |
| | TCTGTGCTCCCTTCCCCATCCCAGGTGTCCTGTCCATTCTCAAGAT |
| | AGCCACATGTGTGCTGGAGGAGTGTCCCATGACAGATGCAAAATGC |
| | CTGAATGATCTGACTCTTCCTGACAGACGCCCCCAAAACGCATATG |
| | ACTCACCACGCTGTCTCTGACCATGAAGCCACCCTGAGGTGCTGGG |
| | CCCTGAGCTTCTACCCTGCGGAGATCACACTGACCTGGCAGCGGGA |
| | TGGGGAGGACCAGACCCAGGACACGGAGCTCGTGGAGACCAGGCCT |
| | GCAGGGGATGGAACCTTCCAGAAGTGGGCGGCTGTGGTGGTGCCTT |
| | CTGGACAGGAGCAGAGATACACCTGCCATGTGCAGCATGAGGGTTT |
| | GCCCAAGCCCCTCACCCTGAGATGGGGTAAGGAGGGAGACGGGGGT |
| | GTCATGTCTTTTAGGGAAAGCAGGAGCCTCTCTGACCTTTAGCAGG |
| | GTCAGGGCCCCTCACCTTCCCCTCTTTTCCCAGAGCCGTCTTCCCA |
| | GCCCACCATCCCCATCGTGGGCATCATTGCTGGCCTGGTTCTCTTT |
| | GGAGCTGTGATCACTGGAGCTGTGGTCGCTGCTGTGATGTGGAGGA |
| | GGAAGAGCTCAGGTGGGGAAGGGGTGAAGGGTGGGTCTGAGATTTC |
| | TTGTCTCACTGAGGGTTCCAAGACCCAGGTAGAAGTGTGCCCTGCC |
| | TCGTTACTGGGAAGCACCACCCACAATTATGGGCCTACCCAGCCTG |
| | GGCCCTGTGTGCCAGCACTTACTCTTTTGTAAAGCACCTGTTAAAA |
| | TGAAGGACAGATTTATCACCTTGATTACAGCGGTGATGGGACCTGA |
| | TCCCAGCAGTCACAAGTCACAGGGGAAGGTCCCTGAGGACCTTCAG |
| | GAGGGCGGTTGGTCCAGGACCCACACCTGCTTTCTTCATGTTTCCT |
| | GATCCCGCCCTGGGTCTGCAGTCACACATTTCTGGAAACTTCTCTG |
| | AGGTCCAAGACTTGGAGGTTCCTCTAGGACCTTAAGGCCCTGACTC |
| | CTTTCTGGTATCTCACAGGACATTTTCTTCCCACAGATAGAAAAGG |
| | AGGGAGCTACTCTCAGGCTGCAAGTAAGTATGAAGGAGGCTGATGC |
| | CTGAGGTCCTTGGGATATTGTGTTTGGGAGCCCATGGGGGAGCTCA |
| | CCCACCCCACAATTCCTCCTCTAGCCACATCTTCTGTGGGATCTGA |
| | CCAGGTTCTGTTTTTGTTCTACCCCAGGCAGTGACAGTGCCCAGGG |
| | CTCTGATGTGTCTCTCACAGCTTGTAAAGGTGAGAGCCTGGAGGGC |
| | CTGATGTGTGTTGGGTGTTGGGCGGAACAGTGGACACAGCTGTGCT |
| | ATGGGGTTTCTTTCCATTGGATGTATTGAGCATGCGATGGGCTGTT |
| | TAAAGTGTGACCCCTCACTGTGACAGATACGAATTTGTTCATGAAT |
| | ATTTTTTTCTATAGTGTGAGACAGCTGCCTTGTGTGGGACTGAGAG |
| | GCAAGAGTTGTTCCTGCCCTTCCCTTTGTGACTTGAAGAACCCTGA |
| | CTTTGTTTCTGCAAAGGCACCTGCATGTGTCTGTGTTCGTGTAGGC |
| | ATAATGTGAGGAGGTGGGGAGACCACCCCACCCCCATGTCCACCAT |
| | GACCCTCTTCCCACGCTGACCTGTGCTCCCTCCCCAATCATCTTTC |
| | CTGTTCCAGAGAGGTGGGGCTGAGGTGTCTCCATCTCTGTCTCAAC |
| | TTCATGGTGCACTGAGCTGTAACTTCTTCCTTCCCTATTAAAA |
| | (SEQ ID NO: 574) |

[0439] The person of ordinary skill in the art will appreciate that T can be substituted for U to convert an RNA sequence to a DNA sequence and vice versa, and both are envisaged as target gene sequences of the disclosure.

[0440] In some embodiments, a target gene is edited in the immune cells described herein using a nucleic acid guided endonuclease. Exemplary nucleic acid guided endonucleases include Class II endonucleases, such as CRISPR/Cas9.

[0441] “CRISPR” or “CRISPR gene editing” as used herein refers to a set of clustered regularly interspaced short palindromic repeats, or a system comprising such a set of repeats. “Cas”, as used herein, refers to a CRISPR-associated protein. A “CRISPR/Cas” system refers to a system derived from CRISPR and Cas which can be used to silence, knock out, or mutate a target gene. This system is a type of prokaryotic immune system that confers resistance to foreign genetic elements such as plasmids and phages and provides a form of acquired immunity. The CRISPR/Cas system has been modified for use in gene editing. This is accomplished by introducing into the eukaryotic cell a one or more specifically designed guide nucleic acids (gNAs), typically guide RNAs (gRNAs), and an appropriate Cas endonuclease which forms a ribonucleoprotein complex with the gNA. The gNA guides the gNA-endonuclease protein complex to a target genomic location, and the endonuclease introduces a strand break at the target genomic location. This double strand break can be repaired by cellular mechanisms such non-homologous end joining (leading to deletions) or homologous repair (which can generate insertions), thereby introducing genetic modifications into the host cell genome.

[0442] CRISPR/Cas systems are classified by class and by type. Class 2 systems currently represent a single interference protein that is categorized into three distinct types (types II, V and VI). Any class 2 CRISPR/Cas system suitable for gene editing, for example a type II, a type V or a type VI system, is envisaged as within the scope of the instant disclosure. Exemplary Class 2 type II CRISPR systems include Cas9, Csn2 and Cas4. Exemplary Class 2, type V CRISPR systems include, Cas12, Cas12a (Cpf1), Cas12b (C2c1), Cas12c (C2c3), Cas12d (CasY), Cas12e (CasX), Cas12f, Cas12g, Cas12h, Cas12i and Cas12k (C2c5). Exemplary Class 2 Type VI systems include Cas13, Cas13a (C2c2) Cas13b, Cas13c and Cas13d.

[0443] The CRISPR sequence, sometimes called a CRISPR locus, comprises alternating repeats and spacers. In a naturally-occurring CRISPR, the spacers usually comprise sequences foreign to the bacterium such as a plasmid or phage sequence. As described herein, spacer sequences may also be referred to as “targeting sequences.” In CRISPR/Cas systems for a genetic engineering, the spacers are derived from the target gene sequence (the gNA).

[0444] An exemplary Class 2 type II CRISPR system relies on the protein Cas9, which is a nuclease with two active cutting sites, one for each strand of the double helix. Combining Cas9 and modified CRISPR locus RNA can be used in a system for gene editing. Pennisi (2013) Science 341: 833-836. In some embodiments, the Cas protein used to modify the immune cells is Cas9.

[0445] The CRISPR/Cas system can thus be used to edit a target gene, such as a gene targeted for editing in the immune cells described herein, by adding or deleting a base pair, or introducing a premature stop which thus decreases expression of the target. The CRISPR/Cas system can alternatively be used like RNA interference, turning off a target gene in a reversible fashion. In a mammalian cell, for example, the RNA can guide the Cas protein to a target gene promoter, sterically blocking RNA polymerases.

[0446] A Cas protein may be derived from any bacterial or archaeal Cas protein. Any suitable CRISPR/Cas system is envisaged as within the scope of the instant disclosure. In other aspects, Cas protein comprises one or more of Cas1, Cas1B, Cas2, Cas3, Cas4, Cas5, Cas6, Cas7, Cas8, Cas9, Cas10, Cas12a (Cpf1), Cas13, Csy1, Csy2, Csy3, Cse1, Cse2, Csc1, Csc2, Csa5, Csn2, Csm2, Csm3, Csm4, Csm5, Csm6, Cmr1, Cmr3, Cmr4, Cmr5, Cmr6, Csb1, Csb2, Csb3, Csx17, Csx14, Csx10, Csx16, CsaX, Csx3, Csx1, Csx15, Csf1, Csf2, Csf3, Csf4, CasX, CasY, homologs thereof, or modified versions thereof. In some embodiments, the Cas protein is a Cas9 protein, a Cpf1 protein, a C2c1 protein, a C2c2 protein, a C2c3 protein, Cas3, Cas3-HD, Cas 5, Cas7, Cas8, Cas10, or combinations or complexes of these. In some embodiments, the Cas protein is a Cas9 protein.

[0447] Artificial CRISPR/Cas systems can be generated which inhibit a target gene, using technology known in the art, e.g., that described in U.S. Publication No. 20140068797, and Cong (2013) Science 339: 819-823. Other artificial CRISPR/Cas systems that are known in the art may also be generated which inhibit a target gene, e.g., that described in Tsai (2014) Nature Biotechnol., 32:6 569-576, U.S. Pat. Nos. 8,871,445; 8,865,406; 8,795,965; 8,771,945; and 8,697,359. Methods of designing suitable gNAs for a particular Cas protein will be known by persons of ordinary skill in the art.

[0448] The present disclosure provides gene-targeting guide nucleic acids (gNAs) that can direct the activities of an associated polypeptide (e.g., nucleic acid guided endonuclease) to a specific target gene sequence within a target nucleic acid genome. The genome-targeting nucleic acid can be an RNA. A genome-targeting RNA is referred to as a “guide RNA” or “gRNA” herein. A guide RNA can comprise at least a targeting sequence that hybridizes to a target nucleic acid sequence of interest, and a CRISPR repeat sequence. In some Type II systems, the gRNA also comprises a second RNA called the tracrRNA sequence, also referred to herein as a “scaffold” sequence. In the Type II guide RNA (gRNA), the CRISPR repeat sequence and scaffold sequence hybridize to each other to form a duplex. In the Type V guide RNA (gRNA), the crRNA forms a duplex. In both systems, the duplex can bind a site-directed polypeptide, such that the guide RNA and site-directed polypeptide form a complex. The gene-targeting nucleic acid can provide target specificity to the complex by virtue of its association with the site-directed polypeptide. The gene-targeting nucleic acid thus can direct the activity of the site-directed polypeptide.

[0449] In some embodiments, the disclosure provides a guide RNA comprising a targeting sequence and a guide RNA scaffold sequence, wherein the targeting sequence is complementary to the sequence of a target gene.

[0450] Exemplary guide RNAs include targeting sequences of about 15-20 bases. As is understood by the person of ordinary skill in the art, each gRNA can be designed to include a targeting sequence complementary to its genomic target sequence. For example, each of the targeting sequences, e.g., the RNA version of the DNA sequences presented in Table 19, minus the three 3′ nucleotides which represent that PAM site, can be put into a single RNA chimera or a crRNA.

[0451] The gene targeting nucleic acid can be a double-molecule guide RNA. The gene targeting nucleic acid can be a single-molecule guide RNA. The gene targeting nucleic acid can be any known configuration of guide RNA known in the art, such as, for example, including paired gRNA, or multiple gRNAs used in a single step. Although it is clear from genomic sequences where the coding sequences and splice junctions are, other features required for gene expression may be idiosyncratic and unclear.

[0452] A double-molecule guide RNA can comprise two strands of RNA. The first strand comprises a sequence in the 5′ to 3′ direction, an optional spacer extension sequence, a targeting sequence and a minimum CRISPR repeat sequence. The second strand can comprise a minimum tracrRNA sequence (complementary to the minimum CRISPR repeat sequence), a 3′ tracrRNA sequence and an optional tracrRNA extension sequence.

[0453] A single-molecule guide RNA (sgRNA) in a Type II system can comprise, in the 5′ to 3′ direction, an optional spacer extension sequence, a targeting sequence, a minimum CRISPR repeat sequence, a single-molecule guide linker, a minimum tracrRNA sequence, a 3′ tracrRNA sequence and an optional tracrRNA extension sequence. The optional tracrRNA extension can comprise elements that contribute additional functionality (e.g., stability) to the guide RNA. The single-molecule guide linker can link the minimum CRISPR repeat and the minimum tracrRNA sequence to form a hairpin structure. The optional tracrRNA extension can comprise one or more hairpins.

[0454] In some embodiments, guide RNA or single-molecule guide RNA (sgRNA) can comprise a targeting sequence and a scaffold sequence. In some embodiments, the scaffold sequence is a Cas9 gRNA sequence. In some embodiments, the scaffold sequence is encoded by a DNA sequence that comprises a sequence that shares at least 90%, at least 95%, at least 96%, at least 97%, at least 98%, or at least 99% identity to GTTTTAGAGCTAGAAATAGCAAGTTAAAATAAGGCTAGTCCGTTATCAACTTGAA AAAGTGGCACCGAGTCGGTGCTTTTTTT (SEQ ID NO: 575). In some embodiments, the scaffold sequence is encoded by a DNA sequence that comprises

(SEQ ID NO: 575)
GTTTTAGAGCTAGAAATAGCAAGTTAAAATAAGGCTAGTCCGTTATCAAC
TTGAAAAAGTGGCACCGAGTCGGTGCTTTTTTT.

[0455] In some embodiments, for example those embodiments where the CRISPR/Cas system is a Cas9 system, the sgRNA can comprise a 20 nucleotide targeting sequence at the 5′ end of the sgRNA sequence. The sgRNA can comprise a less than a 20 nucleotide targeting sequence at the 5′ end of the sgRNA sequence. The sgRNA can comprise a more than 20 nucleotide targeting sequence at the 5′ end of the sgRNA sequence. The sgRNA can comprise a variable length targeting sequence with 17-30 nucleotides at the 5′ end of the sgRNA sequence.

[0456] Suitable scaffold sequences, and arrangement of scaffold targeting sequences, will depend on choice of endonuclease, and will be known to persons of skill in the art.

[0457] A single-molecule guide RNA (sgRNA) in a Type II system, e.g. Cas9, can comprise, in the 5′ to 3′ direction, a minimum CRISPR repeat sequence and a targeting sequence.

[0458] By way of illustration, guide RNAs used in the CRISPR/Cas9 or CRISPR/Cpf1 system, or other smaller RNAs can be readily synthesized by chemical means, as illustrated below and described in the art. While chemical synthetic procedures are continually expanding, purifications of such RNAs by procedures such as high performance liquid chromatography (HPLC, which avoids the use of gels such as PAGE) tends to become more challenging as polynucleotide lengths increase significantly beyond a hundred or so nucleotides. One approach used for generating RNAs of greater length is to produce two or more molecules that are ligated together. Much longer RNAs, such as those encoding a Cas9 or Cpf1 endonuclease, are more readily generated enzymatically. Various types of RNA modifications can be introduced during or after chemical synthesis and/or enzymatic generation of RNAs, e.g., modifications that enhance stability, reduce the likelihood or degree of innate immune response, and/or enhance other attributes, as described in the art.

[0459] The targeting sequence of a gRNA hybridizes to a sequence in a target nucleic acid of interest. The targeting sequence of a genome-targeting nucleic acid can interact with a target nucleic acid in a sequence-specific manner via hybridization (i.e., base pairing). The nucleotide sequence of the targeting sequence can vary depending on the sequence of the target nucleic acid of interest.

[0460] In a Cas9 system described herein, the targeting sequence can be designed to hybridize to a target nucleic acid that is located 5′ of the reverse complement of a PAM of the Cas9 enzyme used in the system. The targeting sequence may perfectly match the target sequence or may have mismatches. Each CRISPR/Cas system protein may have a particular PAM sequence, in a particular orientation and position, that it recognizes in a target DNA. For example, S. pyogenes Cas9 recognizes in a target nucleic acid a PAM that comprises the sequence 5′-NRG-3′, where R comprises either A or G, where N is any nucleotide and N is immediately 3′ of the target nucleic acid sequence targeted by the targeting sequence. Selection of appropriate PAM sequences will be apparent to the person of ordinary skill in the art.

[0461] The target sequence is complementary to, and hybridizes with, the targeting sequence of the gRNA. The target nucleic acid sequence can comprise 20 nucleotides. The target nucleic acid can comprise less than 20 nucleotides. The target nucleic acid can comprise more than 20 nucleotides. The target nucleic acid can comprise at least: 5, 10, 15, 16, 17, 18, 19, 20, 21, 22, 23, 24, 25, 30 or more nucleotides. In some embodiments, for example those embodiments where the CRISPR/Cas system is a Cas9 system, the target nucleic acid sequence can comprise 20 nucleotides immediately 5′ of the first nucleotide of the reverse complement of the PAM sequence. This target nucleic acid sequence is often referred to as the PAM strand or a target strand, and the complementary nucleic acid sequence is often referred to the non-PAM strand or non-target strand. One of skill in the art would recognize that the targeting sequence hybridizes to the non-PAM strand of the target nucleic acid, see e.g., US20190185849A1.

[0462] In some examples, the percent complementarity between the targeting sequence and the target nucleic acid is at least about 30%, at least about 40%, at least about 50%, at least about 60%, at least about 65%, at least about 70%, at least about 75%, at least about 80%, at least about 85%, at least about 90%, at least about 95%, at least about 97%, at least about 98%, at least about 99%, or 100%. In some examples, the percent complementarity between the targeting sequence and the target nucleic acid is at most about 30%, at most about 40%, at most about 50%, at most about 60%, at most about 65%, at most about 70%, at most about 75%, at most about 80%, at most about 85%, at most about 90%, at most about 95%, at most about 97%, at most about 98%, at most about 99%, or 100%. In some examples, the percent complementarity between the targeting sequence and the target nucleic acid is 100% over the six contiguous 5′-most nucleotides of the target sequence of the complementary strand of the target nucleic acid. The percent complementarity between the targeting sequence and the target nucleic acid can be at least 60% over about 20 contiguous nucleotides. The length of the targeting sequence and the target nucleic acid can differ by 1 to 6 nucleotides, which may be thought of as a bulge or bulges.

[0463] The targeting sequence can be designed or chosen using computer programs known to persons of ordinary skill in the art. The computer program can use variables, such as predicted melting temperature, secondary structure formation, predicted annealing temperature, sequence identity, genomic context, chromatin accessibility, % GC, frequency of genomic occurrence (e.g., of sequences that are identical or are similar but vary in one or more spots as a result of mismatch, insertion or deletion), methylation status, presence of SNPs, and the like. Available computer programs can take as input NCBI gene IDs, official gene symbols, Ensembl Gene IDs, genomic coordinates, or DNA sequences, and create an output file containing sgRNAs targeting the appropriate genomic regions designated as input. The computer program may also provide a summary of statistics and scores indicating on- and off-target binding of the sgRNA for the target gene (Doench et al. Nat Biotechnol. 34:184-191 (2016)). The disclosure provides guide RNAs comprising a targeting sequence. In some embodiments, the guide RNA further comprises a guide RNA scaffold sequence. In some embodiments, the targeting sequence is complementary to the sequence of a target gene selected from the group consisting of HLA-A, HLA-B, HLA-C, B2M or an allele thereof. In some embodiments, the target gene is an HLA-A gene. In some embodiments, the target gene is an HLA-B gene. In some embodiments, the target gene is an HLA-C gene. In some embodiments the target gene is HLA-A, HLA-B, HLA-C, or a combination thereof. In some embodiments, targeting sequence comprises a sequence that shares about 90%, about 95%, about 96%, about 97%, about 98%, about 99% identity to or is identical to a sequence disclosed in Table 18

[0464] Table 19.

[0465] In some embodiments, the gNAs specifically target the sequence of an endogenous HLA-A. In some embodiments, the gNAs that specifically target the sequence of an HLA-A locus comprise a sequence that shares about 90%, about 95%, about 96%, about 97%, about 98%, or about 99% identity to a sequence selected from the sequences disclosed in Table 19. In some embodiments, the gNAs that specifically target the sequence of an HLA-A locus comprise a sequence selected from the sequences disclosed in Table 19. In some embodiments, the gNAs that specifically target the sequence of an HLA-A locus comprise a sequence set forth in any one of SEQ ID NO: 576-8650.

[0466] In some embodiments, the gNAs specifically target a sequence of HLA-A*02 alleles. For example, the gRNAs specifically target, and hybridize to, a sequence shared by all HLA-A*02 alleles, but that is not shared by HLA-A*02 and HLA-A*03. In some embodiments, the gNAs specifically target a sequence of HLA-A*02:01 alleles. In some embodiments, the gNAs specifically target a sequence of HLA-A*02:01:01 alleles. In some embodiments, the gNAs specifically target a sequence of HLA-A*02:01:01:01 alleles. In some embodiments, the gNAs specifically target a sequence of HLA-A*02:01:01:01 alleles. In some embodiments, the gNAs specifically target a coding DNA sequence of HLA-A*02.

[0467] In some embodiments, the gNAs specifically target a coding DNA sequence that is shared by more than 1000 HLA-A*02 alleles.

TABLE 19
Illustrative Sequences Targeting
HLA-A and HLA-Alleles

| SEQ | Guide Nucleic |
|---|---|
| ID | Acid Targeting |
| NO | Sequences |
| 576 | TGGACGACACGCAGTTCGTG |
| 577 | CAGATACCTGGAGAACGGGA |
| 578 | TCCCGTTCTCCAGGTATCTG |
| 579 | CCGCCGCGGTCCAAGAGCGC |
| 580 | CCTGCGCTCTTGGACCGCGG |
| 581 | GGACCTGCGCTCTTGGACCGC |
| 582 | AAGGAGACGCTGCAGCGCACGGG |
| 583 | GAAGGAGACGCTGCAGCGCACGG |
| 584 | GCGGGCGCCGTGGATAGAGCAGG |
| 585 | TGCTCTATCCACGGCGCCCGCGG |
| 586 | CGATGAAGCGGGGCTCCCCGCGG |
| 587 | CGTGTCCCGGCCCGGCCGCGGGG |
| 588 | CGGCTCCATCCTCTGGCTCGCGG |
| 589 | GATGTAATCCTTGCCGTCGTAGG |
| 590 | ACAGCGACGCCGCGAGCCAGAGG |
| 591 | GGATGGAGCCGCGGGCGCCGTGG |
| 592 | GGCGCCGTGGATAGAGCAGGAGG |
| 593 | GCGCCGTGGATAGAGCAGGAGGG |
| 594 | CGGCTACTACAACCAGAGCGAGG |
| 595 | CTGGTTGTAGTAGCCGCGCAGGG |
| 596 | TACTACAACCAGAGCGAGGCCGG |
| 597 | CTACCTGGAGGGCACGTGCGTGG |
| 598 | CACGCACGTGCCCTCCAGGTAGG |
| 599 | GCAGGGTCCCCAGGTCCACTCGG |
| 600 | GTGGACCTGGGGACCCTGCGCGG |
| 601 | TGGAGGGCACGTGCGTGGAGTGG |
| 602 | GTATGGCTGCGACGTGGGGTCGG |
| 603 | CTGAGCTGCCATGTCCGCCGCGG |
| 604 | GGATTACATCGCCCTGAAAGAGG |
| 605 | CAAGTGGGAGGCGGCCCATGTGG |
| 606 | GTGGGAGGCGGCCCATGTGGCGG |
| 607 | CAGTTGAGAGCCTACCTGGAGGG |
| 608 | GCAGTTGAGAGCCTACCTGGAGG |
| 609 | TACCACCAGTACGCCTACGACGG |
| 610 | TGCCGTCGTAGGCGTACTGGTGG |
| 611 | CCAGTACGCCTACGACGGCAAGG |
| 612 | GGATGTGAAGAAATACCTCATGG |
| 613 | ATTTCTTCACATCCGTGTCCCGG |
| 614 | AGGCGTACTGGTGGTACCCGCGG |
| 615 | CGTACTGGTGGTACCCGCGGAGG |
| 616 | GAGGATGTATGGCTGCGACGTGG |
| 617 | GGATGTATGGCTGCGACGTGGGG |
| 618 | CTCAGACCACCAAGCACAAGTGG |
| 619 | TCAGACCACCAAGCACAAGTGGG |
| 620 | CACCAAGCACAAGTGGGAGGCGG |
| 621 | GACCACCAAGCACAAGTGGGAGG |
| 622 | GAGCCCCGCTTCATCGCAGTGGG |
| 623 | GTAGCCCACTGCGATGAAGCGGG |
| 624 | TAGCCCACTGCGATGAAGCGGGG |
| 625 | CGTAGCCCACTGCGATGAAGCGG |
| 626 | CTTCATCGCAGTGGGCTACGTGG |
| 627 | GGAGCCCCGCTTCATCGCAGTGG |
| 628 | CGGGGAGACACGGAAAGTGAAGG |
| 629 | AGTATTGGGACGGGGAGACACGG |
| 630 | AGGGTCCGGAGTATTGGGACGGG |
| 631 | GAGGGTCCGGAGTATTGGGACGG |
| 632 | GGACCCTCCTGCTCTATCCACGG |
| 633 | GTGGATAGAGCAGGAGGGTCCGG |
| 634 | AGACTCACCGAGTGGACCTGGGG |
| 635 | CACTCGGTGAGTCTGTGAGTGGG |
| 636 | CAGACTCACCGAGTGGACCTGGG |
| 637 | CCACTCACAGACTCACCGAGTGG |
| 638 | CCACTCGGTGAGTCTGTGAGTGG |
| 639 | TCGGACTGGCGCTTCCTCCGCGG |
| 640 | GCAGCCATACATCCTCTGGACGG |
| 641 | TCTCAACTGCTCCGCCACATGGG |
| 642 | ACCCTCATGCTGCACATGGCAGG |
| 643 | ACCTGCCATGTGCAGCATGAGGG |
| 644 | CACCTGCCATGTGCAGCATGAGG |
| 645 | GGAGGACCAGACCCAGGACACGG |
| 646 | GGATGGGGAGGACCAGACCCAGG |
| 647 | GACCTGGCAGCGGGATGGGGAGG |
| 648 | AGATCACACTGACCTGGCAGCGG |
| 649 | GATCACACTGACCTGGCAGCGGG |
| 650 | AGGTCAGTGTGATCTCCGCAGGG |
| 651 | AAGCCCCTCACCCTGAGATGGGG |
| 652 | CTGCGGAGATCACACTGACCTGG |
| 653 | CAGCAATGATGCCCACGATGGGG |
| 654 | CCAGCAATGATGCCCACGATGGG |
| 655 | GCCAGCAATGATGCCCACGATGG |
| 656 | GGATGGAACCTTCCAGAAGTGGG |
| 657 | GGGATGGAACCTTCCAGAAGTGG |
| 658 | ATGCCCACGATGGGGATGGTGGG |
| 659 | CAGCCCACCATCCCCATCGTGGG |
| 660 | CCAGCCCACCATCCCCATCGTGG |
| 661 | GATGCCCACGATGGGGATGGTGG |
| 662 | CAGGGCCCAGCACCTCAGGGTGG |
| 663 | AATGATGCCCACGATGGGGATGG |
| 664 | GGCCCTGACCCAGACCTGGGCGG |
| 665 | GACCCAGGACACGGAGCTCGTGG |
| 666 | ACACGGAGCTCGTGGAGACCAGG |
| 667 | CGTGGAGACCAGGCCTGCAGGGG |
| 668 | TCGTGGAGACCAGGCCTGCAGGG |
| 669 | AGCTGTGATCACTGGAGCTGTGG |
| 670 | AAAAGGAGGGAGCTACTCTCAGG |
| 671 | ATGTGGAGGAGGAAGAGCTCAGG |
| 672 | GTGTCTCTCACAGCTTGTAAAGG |
| 673 | GAGAGACACATCAGAGCCCTGGG |
| 674 | CTCCGCAGGGTAGAAGCTCAGGG |
| 675 | GGCCCTGAGCTTCTACCCTGCGG |
| 676 | GCTCAGGGCCCAGCACCTCAGGG |
| 677 | TATCTCTGCTCCTGTCCAGAAGG |
| 678 | AGTAGCAGGACGAGGGTTCGGGG |
| 679 | CCCCGAGAGTAGCAGGACGAGGG |
| 680 | CCCTCGTCCTGCTACTCTCGGGG |
| 681 | CCTCGTCCTGCTACTCTCGGGGG |
| 682 | CTGTGGTCGCTGCTGTGATGTGG |
| 683 | TCGCTGCTGTGATGTGGAGGAGG |
| 684 | TGGTCGCTGCTGTGATGTGGAGG |
| 685 | CACAGCCGCCCACTTCTGGAAGG |
| 686 | CCAGAAGTGGGCGGCTGTGGTGG |
| 687 | TGGAACCTTCCAGAAGTGGGCGG |
| 688 | TCACAGCTCCAAAGAGAACCAGG |
| 689 | CTGACCATGAAGCCACCCTGAGG |
| 690 | GCAAACCCTCATGCTGCACATGG |
| 691 | TGAAGCCACCCTGAGGTGCTGGG |
| 692 | GGTGAGTCATATGCGTTTTGGGG |
| 693 | GTGAGTCATATGCGTTTTGGGGG |
| 694 | CTTCATGGTCAGAGACAGCGTGG |
| 695 | TCTGGCCCTGACCCAGACCTGGG |

[0468] The sequences disclosed in Table 19 include the corresponding genomic sequences, inclusive of the PAM sequence. The skilled artisan will understand that the targeting sequence of the gRNA does not include three 3′ terminal nucleotides of the sequences in Table 19, which represent the corresponding PAM site for the gRNA.

[0469] The disclosure provides gRNAs comprising a targeting sequence specific to the B2M gene. In some embodiments, the gRNAs specifically target the coding sequence (CDS) sequence of the B2M gene. In some embodiments, the gRNA comprises a sequence that targets the B2M gene promoter sequence.

[0470] In some embodiments the gRNA comprise a targeting sequence and a gRNA scaffold sequence. In some embodiments, the targeting sequence comprises a sequence set forth in Table 20, or a sequence shares about 90%, about 95%, about 96%, about 97%, about 98%, about 99% identity thereto.

[0471] In some embodiments, the targeting sequence is complementary to a sequence of the B2M gene. In some embodiments, the B2M gene comprises a sequence that shares about 90%, about 95%, about 96%, about 97%, about 98%, about 99% identity to the B2M sequence set forth in Table 18.

TABLE 20
Illustrative Sequences Targeting B2M

| SEQ | |
|---|---|
| ID | |
| NO | Sequence |
| 8657 | CGCGAGCACAGCTAAGGCCA |
| 8658 | GAGTAGCGCGAGCACAGCTA |
| 8659 | AGGGTAGGAGAGACTCACGC |
| 8660 | CTGAATCTTTGGAGTACCTG |
| 8661 | TCACGTCATCCAGCAGAGAA |
| 8662 | TCCTGAATTGCTATGTGTCT |
| 8663 | AAGTCAACTTCAATGTCGGA |
| 8664 | GTCTTTTCCCGATATTCCTC |
| 8665 | TGGAGTACCTGAGGAATATC |
| 8666 | CAGCCCAAGATAGTTAAGTG |
| 8667 | ACAAAGTCACATGGTTCACA |
| 8668 | ACTCTCTCTTTCTGGCCTGG |
| 8669 | TGGGCTGTGACAAAGTCACA |
| 8670 | GGCCGAGATGTCTCGCTCCG |
| 8671 | CAGTAAGTCAACTTCAATGT |
| 8672 | ACTCACGCTGGATAGCCTCC |
| 8673 | CATACTCATCTTTTTCAGTG |
| 8674 | CACAGCCCAAGATAGTTAAG |
| 8675 | TTCAGACTTGTCTTTCAGCA |
| 8676 | AGTCACATGGTTCACACGGC |
| 8677 | ATACTCATCTTTTTCAGTGG |
| 8678 | GGCATACTCATCTTTTTCAG |
| 8679 | ACAGCCCAAGATAGTTAAGT |
| 8680 | GCTACTCTCTCTTTCTGGCC |
| 8681 | TGGAGAGAGAATTGAAAAAG |
| 8682 | ACTTGTCTTTCAGCAAGGAC |
| 8683 | GAAGTTGACTTACTGAAGAA |
| 8684 | GGCCACGGAGCGAGACATCT |
| 8685 | GCATACTCATCTTTTTCAGT |
| 8686 | CGTGAGTAAACCTGAATCTT |
| 8687 | TTACCCCACTTAACTATCTT |
| 8688 | TTGGAGTACCTGAGGAATAT |
| 8689 | ACCCAGACACATAGCAATTC |
| 8690 | TTTGACTTTCCATTCTCTGC |
| 8691 | TTCCTGAATTGCTATGTGTC |
| 8692 | CTCAGGTACTCCAAAGATTC |
| 8693 | CTTACCCCACTTAACTATCT |
| 8694 | CTCGCGCTACTCTCTCTTTC |
| 8695 | TCGATCTATGAAAAAGACAG |
| 8696 | GAGACATGTAAGCAGCATCA |
| 8697 | ACATGTAAGCAGCATCATGG |
| 8698 | GAAGTCCTAGAATGAGCGCC |
| 8699 | GAGCGCCCGGTGTCCCAAGC |
| 8700 | AGCGCCCGGTGTCCCAAGCT |
| 8701 | GCGCCCGGTGTCCCAAGCTG |
| 8702 | CTGGGGCGCGCACCCCAGAT |
| 8703 | GGGCGCGCACCCCAGATCGG |
| 8704 | GGCGCGCACCCCAGATCGGA |
| 8705 | CATCACGAGACTCTAAGAAA |
| 8706 | TAAGAAAAGGAAACTGAAAA |
| 8707 | AAGAAAAGGAAACTGAAAAC |
| 8708 | GAAAGTCCCTCTCTCTAACC |
| 8709 | CTAACCTGGCACTGCGTCGC |
| 8710 | CTGGCACTGCGTCGCTGGCT |
| 8711 | TGCGTCGCTGGCTTGGAGAC |
| 8712 | GCTGGCTTGGAGACAGGTGA |
| 8713 | GAGACAGGTGACGGTCCCTG |
| 8714 | AGACAGGTGACGGTCCCTGC |
| 8715 | CCTGCGGGCCTTGTCCTGAT |
| 8716 | CGGGCCTTGTCCTGATTGGC |
| 8717 | GGGCCTTGTCCTGATTGGCT |
| 8718 | GGGCACGCGTTTAATATAAG |
| 8719 | CACGCGTTTAATATAAGTGG |
| 8720 | TATAAGTGGAGGCGTCGCGC |
| 8721 | AAGTGGAGGCGTCGCGCTGG |
| 8722 | AGTGGAGGCGTCGCGCTGGC |
| 8723 | TTCCTGAAGCTGACAGCATT |
| 8724 | TCCTGAAGCTGACAGCATTC |
| 8725 | GCCCGAATGCTGTCAGCTTC |
| 8726 | AAACGCGTGCCCAGCCAATC |
| 8727 | GTGCCCAGCCAATCAGGACA |
| 8728 | CCAATCAGGACAAGGCCCGC |
| 8729 | CAATCAGGACAAGGCCCGCA |
| 8730 | CAAGCCAGCGACGCAGTGCC |
| 8731 | CGCAGTGCCAGGTTAGAGAG |
| 8732 | GCAGTGCCAGGTTAGAGAGA |
| 8733 | GAGTCTCGTGATGTTTAAGA |
| 8734 | TAAGAAGGCATGCACTAGAC |
| 8735 | AAGAAGGCATGCACTAGACT |
| 8736 | TGAGTTTGCTGTCTGTACAT |
| 8737 | TACATCGGCGCCCTCCGATC |
| 8738 | ACATCGGCGCCCTCCGATCT |
| 8739 | CATCGGCGCCCTCCGATCTG |
| 8740 | CTGGGGTGCGCGCCCCAGCT |
| 8741 | TGGGGTGCGCGCCCCAGCTT |
| 8742 | CGCGCCCCAGCTTGGGACAC |
| 8743 | GCGCCCCAGCTTGGGACACC |
| 8744 | CAAGTCACTTAGCATCTCTG |
| 8745 | ACAGAAGTTCTCCTTCTGCT |
| 8746 | ATTCAAAGATCTTAATCTTC |
| 8747 | TTCAAAGATCTTAATCTTCT |
| 8748 | TTTTCTCGAATGAAAAATGC |
| 8749 | TGCAGGTCCGAGCAGTTAAC |
| 8750 | GGTCCGAGCAGTTAACTGGC |
| 8751 | GTCCGAGCAGTTAACTGGCT |
| 8752 | TCCGAGCAGTTAACTGGCTG |
| 8753 | AGCAAGTCACTTAGCATCTC |
| 8754 | GCAAGTCACTTAGCATCTCT |
| 8755 | TGGGGCCAGTCTGCAAAGCG |
| 8756 | GGGGCCAGTCTGCAAAGCGA |
| 8757 | GGGCCAGTCTGCAAAGCGAG |
| 8758 | GGCCAGTCTGCAAAGCGAGG |
| 8759 | GGACACCGGGCGCTCATTCT |
| 8760 | GGCGCTCATTCTAGGACTTC |
| 8761 | CTCATTCTAGGACTTCAGGC |
| 8762 | ATTCTAGGACTTCAGGCTGG |
| 8763 | TTCAGGCTGGAGGCACATTA |
| 8764 | TGCCCCCTCGCTTTGCAGAC |
| 8765 | GATGCTAAGTGACTTGCTAA |
| 8766 | GCCCCAGCCAGTTAACTGCT |
| 8767 | GCATTTTTCATTCGAGAAAA |
| 8768 | TTTGAATGCTACCTAGCAGA |
| 8769 | TTCTGTTTATAACTACAGCT |
| 8770 | TCTGTTTATAACTACAGCTT |

[0472] In some embodiments, the immune cells described herein are edited using TALEN gene editing.

[0473] “TALEN” or “TALEN gene editing” refers to a transcription activator-like effector nuclease, which is an artificial nuclease used to edit a target gene.

[0474] TALENs are produced artificially by fusing a TAL effector DNA binding domain to a DNA cleavage domain. Transcription activator-like effectors (TALEs) derived from Xanthomonas bacteria can be engineered to bind any desired DNA sequence, including a portion of target genes such as TCR subunits, MHC class I complex components, or CD52. By combining an engineered TALE with a DNA cleavage domain, a restriction enzyme can be produced which is specific to any desired DNA sequence, including a target gene sequence. These can then be introduced into a cell, wherein they can be used for genome editing.

[0475] To produce a TALEN, a TALE protein is fused to a nuclease (N), which is a wild-type or mutated Fold endonuclease. Several mutations to FokI have been made for its use in TALENs; these, for example, improve cleavage specificity or activity.

[0476] The FokI domain functions as a dimer, requiring two constructs with unique DNA binding domains for sites in the target genome with proper orientation and spacing. Both the number of amino acid residues between the TALE DNA binding domain and the FokI cleavage domain and the number of bases between the two individual TALEN binding sites appear to be important parameters for achieving high levels of activity.

[0477] TALENs specific to sequences in a target gene can be constructed using any method known in the art, including various schemes using modular components.

[0478] In some embodiments, a target gene is edited in the immune cells described herein using ZFN gene editing.

[0479] “ZFN” or “Zinc Finger Nuclease” or “ZFN gene editing” refer to a zinc finger nuclease, an artificial nuclease which can be used to edit a target gene.

[0480] Like a TALEN, a ZFN comprises a Fold nuclease domain (or derivative thereof) fused to a DNA-binding domain. In the case of a ZFN, the DNA-binding domain comprises one or more zinc fingers.

[0481] A zinc finger is a small protein structural motif stabilized by one or more zinc ions. A zinc finger can comprise, for example, Cys2His2, and can recognize an approximately 3-bp sequence. Various zinc fingers of known specificity can be combined to produce multi-finger polypeptides which recognize about 6, 9, 12, 15 or 18-bp sequences. Various selection and modular assembly techniques are available to generate zinc fingers (and combinations thereof) recognizing specific sequences, including phage display, yeast one-hybrid systems, bacterial one-hybrid and two-hybrid systems, and mammalian cells.

[0482] Like a TALEN, a ZFN must dimerize to cleave DNA. Thus, a pair of ZFNs are required to target non-palindromic DNA sites. The two individual ZFNs must bind opposite strands of the DNA with their nucleases properly spaced apart.

[0483] Also like a TALEN, a ZFN can create a double-stranded break in the DNA, which can create a frame-shift mutation if improperly repaired, leading to a decrease in the expression and amount of a target gene or gene product in a cell. ZFNs can also be used with homologous recombination to mutate in a target gene.

[0484] ZFNs specific to sequences in a target gene can be constructed using any method known in the art.

[0485] In some embodiments, the expression and of function of one or more MCH-I components are reduced using RNA interference. “RNAi” or “RNA interference” refers to the process of sequence-specific post-transcriptional gene silencing, mediated by double-stranded RNA (dsRNA). Duplex RNAs such as siRNA (small interfering RNA), miRNA (micro RNA), shRNA (short hairpin RNA), ddRNA (DNA-directed RNA), piRNA (Piwi-interacting RNA), or rasiRNA (repeat associated siRNA) and modified forms thereof are all capable of mediating RNA interference. These dsRNA molecules may be commercially available or may be designed and prepared based on known sequence information. The anti-sense strand of these molecules can include RNA, DNA, PNA, or a combination thereof. DNA/RNA chimeric polynucleotides include, but are not limited to, a double-strand polynucleotide composed of DNA and RNA that inhibits the expression of a target gene. dsRNA molecules can also include one or more modified nucleotides, as described herein, which can be incorporated on either or both strands.

[0486] In RNAi gene silencing or knockdown, dsRNA comprising a first (anti-sense) strand that is complementary to a portion of a target gene and a second (sense) strand that is fully or partially complementary to the first anti-sense strand is introduced into an organism. After introduction into the organism, the target gene-specific dsRNA is processed into relatively small fragments (siRNAs) and can subsequently become distributed throughout the organism, decrease messenger RNA of target gene, leading to a phenotype that may come to closely resemble the phenotype arising from a complete or partial deletion of the target gene.

[0487] Certain dsRNAs in cells can undergo the action of Dicer enzyme, a ribonuclease III enzyme. Dicer can process the dsRNA into shorter pieces of dsRNA, i.e. siRNAs. RNAi also involves an endonuclease complex known as the RNA induced silencing complex (RISC). Following cleavage by Dicer, siRNAs enter the RISC complex and direct cleavage of a single stranded RNA target having a sequence complementary to the anti-sense strand of the siRNA duplex. The other strand of the siRNA is the passenger strand. Cleavage of the target RNA takes place in the middle of the region complementary to the anti-sense strand of the siRNA duplex. siRNAs can thus down regulate or knock down gene expression by mediating RNA interference in a sequence-specific manner.

[0488] As used herein with respect to RNA interference, “target gene” or “target sequence” refers to a gene or gene sequence whose corresponding RNA is targeted for degradation through the RNAi pathway using dsRNAs or siRNAs as described herein. Exemplary target gene sequences are shown in Table 18. To target a gene, for example using an siRNA, the siRNA comprises an anti-sense region complementary to, or substantially complementary to, at least a portion of the target gene or sequence, and sense strand complementary to the anti-sense strand. Once introduced into a cell, the siRNA directs the RISC complex to cleave an RNA comprising a target sequence, thereby degrading the RNA. The disclosure provides interfering RNAs. The double stranded RNA molecule of the disclosure may be in the form of any type of RNA interference molecule known in the art. In some embodiments, the double stranded RNA molecule is a small interfering RNA (siRNA). In other embodiments, the double stranded RNA molecule is a short hairpin RNA (shRNA) molecule. In other embodiments, the double stranded RNA molecule is a Dicer substrate that is processed in a cell to produce an siRNA. In other embodiments the double stranded RNA molecule is part of a microRNA precursor molecule.

[0489] In some embodiments, the shRNA is a length to be suitable as a Dicer substrate, which can be processed to produce a RISC active siRNA molecule. See, e.g., Rossi et al., US2005/0244858.

[0490] A Dicer substrate double stranded RNA (e.g. a shRNA) can be of a length sufficient that it is processed by Dicer to produce an active siRNA, and may further include one or more of the following properties: (i) the Dicer substrate shRNA can be asymmetric, for example, having a 3′ overhang on the anti-sense strand, (ii) the Dicer substrate shRNA can have a modified 3′ end on the sense strand to direct orientation of Dicer binding and processing of the dsRNA to an active siRNA, for example the incorporation of one or more DNA nucleotides, and (iii) the first and second strands of the Dicer substrate ds RNA can be from 21-30 bp in length.

[0491] In some embodiments, the interfering RNAs comprise a sequence complementary to a sequence of a B2M mRNA. In some embodiments, the interfering RNA is capable of inducing RNAi-mediated degradation of the B2M mRNA. In some embodiments, the B2M mRNA sequence comprises a coding sequence. In some embodiments, the B2M mRNA sequence comprises an untranslated region

[0492] In some embodiments, the interfering RNAs comprise a sequence complementary to a sequence of an HLA-A*02 mRNA. In some embodiments, the interfering RNA is capable of inducing RNAi-mediated degradation of the HLA-A*02 mRNA. In some embodiments, the HLA-A*02 mRNA sequence comprises a coding sequence. In some embodiments, the HLA-A*02 mRNA sequence comprises an untranslated region.

[0493] In some embodiments, the interfering RNA is a short hairpin RNA (shRNA). In some embodiments, the shRNA comprises a first sequence, having from 5′ to 3′ end a sequence complementary to the B2M mRNA; and a second sequence, having from 5′ to 3′ end a sequence complementary to the first sequence, wherein the first sequence and second sequence form the shRNA.

[0494] In some embodiments, the first sequence is 18, 19, 20, 21, or 22 nucleotides. In some embodiments, the first sequence is complementary to a sequence selected from the sequences set forth in Table 21 and Table 22. In some embodiments, the first sequence has GC content greater than or equal to 25% and less than 60%. In some embodiments, the first sequence is complementary to a sequence selected from the sequences set forth in Table 21 and Table 22. In some embodiments, the first sequence does not comprise four nucleotides of the same base or a run of seven C or G nucleotide bases. In some embodiments, the first sequence is 21 nucleotides.

[0495] In some embodiments, the first sequence is complementary to a sequence selected from SEQ ID NOs 8771-13382. In some embodiments, the first sequence has GC content greater than or equal to 25% and less than 60%. In some embodiments, the first sequence is complementary to a sequence selected from SEQ ID NOs: 8771-13382. In some embodiments, the first sequence does not comprise four nucleotides of the same base or a run of seven C or G nucleotide bases. In some embodiments, the first sequence is complementary to a sequence selected from SEQ ID NOs: 8771-13382. In some embodiments, the first sequence is 21 nucleotides. In some embodiments, the first sequence is complementary to a sequence selected from SEQ ID NOs: 8771-9352. In some embodiments, the first sequence is complementary to a sequence selected from SEQ ID NOs: 8771-9052. In some embodiments, the first sequence is complementary to a sequence selected from SEQ ID NOs: 8771-8908. Illustrative target B2M sequences complementary to the first sequence are set forth in SEQ ID NOs: 8771-8908.

[0496] Illustrative target B2M sequences complementary to the first sequence are shown in Table 21. In some embodiments, the first sequence targeting B2M comprises a sequence set forth in any one of SEQ ID NOs: 8771-13382.

[0497] In some cases, the first sequence may have 100% identity, i.e. complete identity, homology, complementarity to the target nucleic acid sequence. In other cases, there may be one or more mismatches between the first sequence and the target nucleic acid sequence. For example, there may be 1, 2, 3, 4, 5, 6, or 7 mismatches between the sense region and the target nucleic acid sequence.

[0498] The sequences set forth in Table 21 are presented as DNA sequences. In all sequences set forth in Table 21, thymine (T) may be replaced by uracil (U) to arrive at the sequence of the target mRNA sequence.

TABLE 21
Illustrative target B2M sequences
complementary to first sequence.

| SEQ | |
|---|---|
| ID | |
| NO | Sequence |
| 8771 | AGAGAATGGAAAGTCAAATTT |
| 8772 | ATGGACATGATCTTCTTTATA |
| 8773 | TGGACATGATCTTCTTTATAA |
| 8774 | GGACATGATCTTCTTTATAAT |
| 8775 | TGACAGGATTATTGGAAATTT |
| 8776 | TTGTGGTTAATCTGGTTTATT |
| 8777 | TGTGGTTAATCTGGTTTATTT |
| 8778 | GCAGAGAATGGAAAGTCAAAT |
| 8779 | CAGAGAATGGAAAGTCAAATT |
| 8780 | GAGAATGGAAAGTCAAATTTC |
| 8781 | GTCACAGCCCAAGATAGTTAA |
| 8782 | TGCTTATACACTTACACTTTA |
| 8783 | GCTTATACACTTACACTTTAT |
| 8784 | CTTATACACTTACACTTTATG |
| 8785 | ACATGGACATGATCTTCTTTA |
| 8786 | CATGGACATGATCTTCTTTAT |
| 8787 | ATCAACATCTTGGTCAGATTT |
| 8788 | CTTGCACTCAAAGCTTGTTAA |
| 8789 | AGTTAAGCGTGCATAAGTTAA |
| 8790 | GCATAAGTTAACTTCCAATTT |
| 8791 | TACATACTCTGCTTAGAATTT |
| 8792 | ACATACTCTGCTTAGAATTTG |
| 8793 | TTGACAGGATTATTGGAAATT |
| 8794 | GACAGGATTATTGGAAATTTG |
| 8795 | TAAGGCATGGTTGTGGTTAAT |
| 8796 | GTTGTGGTTAATCTGGTTTAT |
| 8797 | GTTCCACAAGTTAAATAAATC |
| 8798 | TCCAGCGTACTCCAAAGATTC |
| 8799 | TACTCCAAAGATTCAGGTTTA |
| 8800 | ACTCCAAAGATTCAGGTTTAC |
| 8801 | CACGTCATCCAGCAGAGAATG |
| 8802 | GGTTTCATCCATCCGACATTG |
| 8803 | CCGACATTGAAGTTGACTTAC |
| 8804 | TGAAGAATGGAGAGAGAATTG |
| 8805 | GAGCATTCAGACTTGTCTTTC |
| 8806 | TTCAGCAAGGACTGGTCTTTC |
| 8807 | GCAAGGACTGGTCTTTCTATC |
| 8808 | CGTGTGAACCATGTGACTTTG |
| 8809 | CTTTGTCACAGCCCAAGATAG |
| 8810 | TCACAGCCCAAGATAGTTAAG |
| 8811 | AGTGGGATCGAGACATGTAAG |
| 8812 | AGGTTTGAAGATGCCGCATTT |
| 8813 | GGTTTGAAGATGCCGCATTTG |
| 8814 | TTGATATGCTTATACACTTAC |
| 8815 | TGAGTGCTGTCTCCATGTTTG |
| 8816 | TGTCTCCATGTTTGATGTATC |
| 8817 | TCAACATCTTGGTCAGATTTG |
| 8818 | TCAGATTTGAACTCTTCAATC |
| 8819 | TTCAATCTCTTGCACTCAAAG |
| 8820 | TTGCACTCAAAGCTTGTTAAG |
| 8821 | ACTCAAAGCTTGTTAAGATAG |
| 8822 | AGATAGTTAAGCGTGCATAAG |
| 8823 | TGCATAAGTTAACTTCCAATT |
| 8824 | GTTAACTTCCAATTTACATAC |
| 8825 | ATTGACAGGATTATTGGAAAT |
| 8826 | GTAAGGCATGGTTGTGGTTAA |
| 8827 | GGTTGTGGTTAATCTGGTTTA |
| 8828 | TTCCTGAAGCTGACAGCATTC |
| 8829 | GCTATCCAGCGTACTCCAAAG |
| 8830 | CATCCAGCAGAGAATGGAAAG |
| 8831 | CAAATTTCCTGAATTGCTATG |
| 8832 | ATTGCTATGTGTCTGGGTTTC |
| 8833 | GAAGATGCCGCATTTGGATTG |
| 8834 | CAATTTACATACTCTGCTTAG |
| 8835 | TATCCAGCGTACTCCAAAGAT |
| 8836 | ATCCAGCGTACTCCAAAGATT |
| 8837 | CTCCAAAGATTCAGGTTTACT |
| 8838 | TGCTATGTGTCTGGGTTTCAT |
| 8839 | TTTCATCCATCCGACATTGAA |
| 8840 | GAAGTTGACTTACTGAAGAAT |
| 8841 | GAAGAATGGAGAGAGAATTGA |
| 8842 | AGAATGGAGAGAGAATTGAAA |
| 8843 | CAGCAAGGACTGGTCTTTCTA |
| 8844 | AGCAAGGACTGGTCTTTCTAT |
| 8845 | ACTTTGTCACAGCCCAAGATA |
| 8846 | TTGTCACAGCCCAAGATAGTT |
| 8847 | TGTCACAGCCCAAGATAGTTA |
| 8848 | CACAGCCCAAGATAGTTAACT |
| 8849 | GCAGCATCATGGAGGTTTGAA |
| 8850 | CCGCATTTGGATTGGATGAAT |
| 8851 | TTGAGTGCTGTCTCCATGTTT |
| 8852 | AGTGCTGTCTCCATGTTTGAT |
| 8853 | CTGTCTCCATGTTTGATGTAT |
| 8854 | TCTAGGAGGGCTGGCAACTTA |
| 8855 | CAACATCTTGGTCAGATTTGA |
| 8856 | GTCAGATTTGAACTCTTCAAT |
| 8857 | TCTTGCACTCAAAGCTTGTTA |
| 8858 | TGCACTCAAAGCTTGTTAAGA |
| 8859 | GCACTCAAAGCTTGTTAAGAT |
| 8860 | CACTCAAAGCTTGTTAAGATA |
| 8861 | TCAAAGCTTGTTAAGATAGTT |
| 8862 | CAAAGCTTGTTAAGATAGTTA |
| 8863 | GATAGTTAAGCGTGCATAAGT |
| 8864 | ATAGTTAAGCGTGCATAAGTT |
| 8865 | TAGTTAAGCGTGCATAAGTTA |
| 8866 | TTAAGCGTGCATAAGTTAACT |
| 8867 | TAAGCGTGCATAAGTTAACTT |
| 8868 | ATTTACATACTCTGCTTAGAA |
| 8869 | TTTACATACTCTGCTTAGAAT |
| 8870 | ACAGGATTATTGGAAATTTGT |
| 8871 | CAGGATTATTGGAAATTTGTT |
| 8872 | AGGCATGGTTGTGGTTAATCT |
| 8873 | CAGCAGAGAATGGAAAGTCAA |
| 8874 | TCCGACATTGAAGTTGACTTA |
| 8875 | CTGGTCTTTCTATCTCTTGTA |
| 8876 | CCGTGTGAACCATGTGACTTT |
| 8877 | CCCAAGATAGTTAAGTGGGAT |
| 8878 | GGTTGCTCCACAGGTAGCTCT |
| 8879 | GCTCCACAGGTAGCTCTAGGA |
| 8880 | GGGAGCAGAGAATTCTCTTAT |
| 8881 | GGAGCAGAGAATTCTCTTATC |
| 8882 | GAGCAGAGAATTCTCTTATCC |
| 8883 | GAGAATTCTCTTATCCAACAT |
| 8884 | GAATTCTCTTATCCAACATCA |
| 8885 | AAGTGGAGCATTCAGACTTGT |
| 8886 | AAGGACTGGTCTTTCTATCTC |
| 8887 | AAGCTTGTTAAGATAGTTAAG |
| 8888 | AAGCGTGCATAAGTTAACTTC |
| 8889 | AAGATGCCGCATTTGGATTGG |
| 8890 | AAGAATGGAGAGAGAATTGAA |
| 8891 | AACATCAACATCTTGGTCAGA |
| 8892 | AAGGCATGGTTGTGGTTAATC |
| 8893 | AAGCAGCATCATGGAGGTTTG |
| 8894 | AAGATGAGTATGCCTGCCGTG |
| 8895 | AAGTTGACTTACTGAAGAATG |
| 8896 | AAGATAGTTAAGCGTGCATAA |
| 8897 | AACTTCCAATTTACATACTCT |
| 8898 | AACATCTTGGTCAGATTTGAA |
| 8899 | AACTCTTCAATCTCTTGCACT |
| 8900 | AATTTCCTGAATTGCTATGTG |
| 8901 | AATGGAAAGTCAAATTTCCTG |
| 8902 | AACCATGTGACTTTGTCACAG |
| 8903 | AATTGACAGGATTATTGGAAA |
| 8904 | AATTCTCTTATCCAACATCAA |
| 8905 | AAAGTGGAGCATTCAGACTTG |
| 8906 | AAAGTCAAATTTCCTGAATTG |
| 8907 | GTTGCTCCACAGGTAGCTCTA |
| 8908 | AATTTACATACTCTGCTTAGA |

[0499] An exemplary sequence encoding a B2M shRNA comprises a sequence of GCACTCAAAGCTTGTTAAGATCGAAATCTTAACAAGCTTTGAGTGC (SEQ ID NO: 13383), or a sequence having at least 90%, at least 95%, at least 97% or at least 99% identity thereto. A further exemplary sequence encoding a B2M shRNA comprises a sequence of GTTAACTTCCAATTTACATACCGAAGTATGTAAATTGGAAGTTAAC (SEQ ID NO: 13384), or a sequence having at least 90%, at least 95%, at least 97% or at least 99% identity thereto.

[0500] In some embodiments, the shRNA comprises a first sequence, having from 5′ end to 3′ end a sequence complementary to an HLA-A*02 mRNA; and a second sequence, having from 5′ end to 3′ end a sequence complementary to the first sequence. In some embodiments, the HLA-A*02 mRNA sequence comprises a coding sequence. In some embodiments, the HLA-A*02 mRNA sequence comprises an untranslated region. In some embodiments, the first and second sequence are present on a polynucleotide, wherein the first sequence and the second sequence are separated by 4, 5, 6, 7, 8, 9, 10, 11, 12, 13, 14, or 15 nucleotides, wherein the 4, 5, 6, 7, 8, 9, 10, 11, 12, 13, 14, or 15 nucleotides form a loop region in the shRNA. In some embodiments, the shRNA further comprises a 5′ flank sequence and a 3′ flank sequence, wherein the 5′ flank sequence is joined to the 5′ end of the first sequence, and wherein the 3′ flank sequence is joined to the 3′ end of the second sequence.

[0501] In some embodiments, the polynucleotide encoding an shRNA has from 5′ end to 3′ end, a 5′ flank sequence, a first sequence, a loop sequence, a second sequence, a 3′ flank sequence. In some embodiments, the polynucleotide encoding an shRNA has from 5′ end to 3′ end, a 5′ flank sequence, a second sequence, a loop sequence, a first sequence, and a 3′ flank sequence.

[0502] In some embodiments, the first sequences is 18, 19, 20, 21, or 22 nucleotides. In some embodiments, the first sequence is complementary to a sequence selected from SEQ ID NOs: 13385-21779. In some embodiments, the first sequence has GC content greater than or equal to 25% and less than 60%. In some embodiments, the first sequence is complementary to a sequence selected from SEQ ID NOs: 13385-16975. In some embodiments, the first sequence does not comprise four nucleotides of the same base or a run of seven C or G nucleotide bases. In some embodiments, the first sequence is complementary to a sequence selected from SEQ ID NOs: 13385-16493. In some embodiments, the first sequence is complementary to a sequence selected from SEQ ID NOs: 13385-13663. In some embodiments, the first sequence is complementary to a sequence selected from SEQ ID NOs: 13385-13470.

[0503] Illustrative target HLA sequences complementary to the first sequence are shown in Table 22.

TABLE 22
Illustrative target HLA sequences
complementary to first sequence

| SEQ | |
|---|---|
| ID NO | Sequence |
| 13385 | CTTCTTCCTTCCCTATTAAAA |
| 13386 | TCTCACTCCATGAGGTATTTC |
| 13387 | CTCTCACTCCATGAGGTATTT |
| 13388 | GAGGAGGAAGAGCTCAGATAG |
| 13389 | GCTCTCACTCCATGAGGTATT |
| 13390 | AGGATTACATCGCCCTGAAAG |
| 13391 | ACACCGTCCAGAGGATGTATG |
| 13392 | AGGGTCCTTCTTCCTGGATAC |
| 13393 | CCTACGACGGCAAGGATTACA |
| 13394 | TCACTCCATGAGGTATTTCTT |
| 13395 | CTACGACGGCAAGGATTACAT |
| 13396 | CTCACTCCATGAGGTATTTCT |
| 13397 | GGAGGAAGAGCTCAGATAGAA |
| 13398 | CACACCGTCCAGAGGATGTAT |
| 13399 | CACGCTGTCTCTGACCATGAA |
| 13400 | CTGGACAGGAGCAGAGATACA |
| 13401 | TGGAGGAGGAAGAGCTCAGAT |
| 13402 | GGCTCTCACTCCATGAGGTAT |
| 13403 | CATCTCTGTCTCAACTTCATG |
| 13404 | TACGACGGCAAGGATTACATC |
| 13405 | GGATTACATCGCCCTGAAAGA |
| 13406 | GATTACATCGCCCTGAAAGAG |
| 13407 | CTCAGACCACCAAGCACAAGT |
| 13408 | TCACACCGTCCAGAGGATGTA |
| 13409 | ACTCCATGAGGTATTTCTTCA |
| 13410 | CACTCCATGAGGTATTTCTTC |
| 13411 | CCATGAGGTATTTCTTCACAT |
| 13412 | ACTTCTTCCTTCCCTATTAAA |
| 13413 | GTGTCTCTCACAGCTTGTAAA |
| 13414 | CTGTGTTCGTGTAGGCATAAT |
| 13415 | TGTGTTCGTGTAGGCATAATG |
| 13416 | TAACTTCTTCCTTCCCTATTA |
| 13417 | TCTGGACAGGAGCAGAGATAC |
| 13418 | TTGCTGGCCTGGTTCTCTTTG |
| 13419 | TGTCTCTCACAGCTTGTAAAG |
| 13420 | ACTTGAAGAACCCTGACTTTG |
| 13421 | GAAGAACCCTGACTTTGTTTC |
| 13422 | TCTGTGTTCGTGTAGGCATAA |
| 13423 | CATGGTGCACTGAGCTGTAAC |
| 13424 | GTAACTTCTTCCTTCCCTATT |
| 13425 | CATGTGCAGCATGAGGGTTTG |
| 13426 | TTGTTCCTGCCCTTCCCTTTG |
| 13427 | ACCCAGTTCTCACTCCCATTG |
| 13428 | GGGTTTCCAGAGAAGCCAATC |
| 13429 | TTCTCCCTCTCCCAACCTATG |
| 13430 | GTCTCTCACAGCTTGTAAAGT |
| 13431 | TGTGTCTCTCACAGCTTGTAA |
| 13432 | GAGGAAGAGCTCAGATAGAAA |
| 13433 | TGAAGAACCCTGACTTTGTTT |
| 13434 | TTGAAGAACCCTGACTTTGTT |
| 13435 | GTGTTCGTGTAGGCATAATGT |
| 13436 | TGGTGCACTGAGCTGTAACTT |
| 13437 | CTCCCTCTCCCAACCTATGTA |
| 13438 | AGGAGGAAGAGCTCAGATAGA |
| 13439 | ACCTATGTAGGGTCCTTCTTC |
| 13440 | GGGTCCTTCTTCCTGGATACT |
| 13441 | GGTCCTTCTTCCTGGATACTC |
| 13442 | GTCCTTCTTCCTGGATACTCA |
| 13443 | AAGCCAATCAGTGTCGTCGCG |
| 13444 | AAGAGGACCTGCGCTCTTGGA |
| 13445 | AAGTGTGAGACAGCTGCCTTG |
| 13446 | AAGGCACCTGCATGTGTCTGT |
| 13447 | AATCATCTTTCCTGTTCCAGA |
| 13448 | AAAGGCACCTGCATGTGTCTG |
| 13449 | AAAGAGGACCTGCGCTCTTGG |
| 13450 | AAACGCATATGACTCACCACG |
| 13451 | GGAAGAGCTCAGATAGAAA |
| 13452 | GGGAGACACGGAAAGTGAA |
| 13453 | CACCTGCCATGTGCAGCATGA |
| 13454 | GGAGATCACACTGACCTGGCA |
| 13455 | GGATTACATCGCCCTGAAAG |
| 13456 | GCAGGAGGGTCCGGAGTATT |
| 13457 | GGACGGGGAGACACGGAAAG |
| 13458 | GAAAGTGAAGGCCCACTCA |
| 13459 | GATACCTGGAGAACGGGAAG |
| 13460 | GCTGTGGTGGTGCCTTCTGG |
| 13461 | GCTACTACAACCAGAGCGAG |
| 13462 | GTGGCTCCGCAGATACCTG |
| 13463 | GCCAATCAGTGTCGTCGCG |
| 13464 | GAGGACCTGCGCTCTTGGA |
| 13465 | GTGTGAGACAGCTGCCTTG |
| 13466 | GGCACCTGCATGTGTCTGT |
| 13467 | TCATCTTTCCTGTTCCAGA |
| 13468 | AGGCACCTGCATGTGTCTG |
| 13469 | AGAGGACCTGCGCTCTTGG |
| 13470 | ACGCATATGACTCACCACG |

[0504] In some embodiments, the first sequence and second sequence are separated by a linker, sometimes referred to as a loop. In some embodiments, both the first sequence and the second sequence are encoded by one single-stranded RNA or DNA vector. In some embodiments, the loop is between the first and second sequences. In these embodiments, and the first sequence and the second sequence hybridize to form a duplex region. The first sequence and second sequence are joined by a linker sequence, forming a “hairpin” or “stem-loop” structure. The shRNA can have complementary first sequences and second sequences at opposing ends of a single stranded molecule, so that the molecule can form a duplex region with the complementary sequence portions, and the strands are linked at one end of the duplex region by a linker (i.e. loop sequence). The linker, or loop sequence, can be either a nucleotide or non-nucleotide linker. The linker can interact with the first sequence, and optionally, second sequence through covalent bonds or non-covalent interactions.

[0505] Any suitable nucleotide loop sequence is envisaged as within the scope of the disclosure. An shRNA of this disclosure may include a nucleotide, non-nucleotide, or mixed nucleotide/non-nucleotide linker that joins the first sequence of the shRNA to the second sequence of the shRNA. A nucleotide loop sequence can be >2 nucleotides in length, for example about 4, 5, 6, 7, 8, 9, 10, 11, 12, 13, 14, or 15 nucleotides in length. Illustrative loop sequences are disclosed in Table 23.

[0506] In some embodiments, the shRNA further comprises a 5′ flank sequence and a 3′ flank sequence. In some embodiments, wherein the 5′ flank sequence is joined to the 5′ end of the first sequence, and wherein the 3′ flank sequence is joined to the 3′ end of the second sequence.

[0507] Without wishing to be bound by theory, it is thought that flanking shRNA stem loop sequence with 5′ and 3′ sequences similar to those found in microRNAs can target the shRNA for processing by the endogenous microRNA processing machinery, increasing the effectiveness of shRNA processing. Alternatively, or in addition, flanking sequences may increase shRNA compatibility with polymerase II or polymerase III promoters, leading to more effective regulation of shRNA expression.

[0508] In some embodiments, the 5′ flank sequence is selected from the sequences set forth in Table 23. Illustrative flank sequence are shown in Table 23.

TABLE 23
Illustrative flank sequences

| SEQ ID NO | |
|---|---|
| | 5′ Flank Sequence |
| 21780 | GG |
| 21781 | ACACCAUGUUGCCAGUCUCUAGG |
| 21782 | UGAUAGCAAUGUCAGCAGUGCCU |
| 21783 | UAUUGCUGUUGACAGUGAGCGAC |
| | 3′ Flank Sequence |
| 21784 | UGGCGUCUGGCCCAACCACAC |
| 21785 | GUAAGGUUGACCAUACUCUAC |

[0509] In some embodiments, the first and second sequence are present on a single stranded polynucleotide, wherein the first sequence and second sequence are separated by 4, 5, 6, 7, 8, 9, 10, 11, 12, 13, 14, or 15 nucleotides, wherein the 4, 5, 6, 7, 8, 9, 10, 11, 12, 13, 14, or 15 nucleotides form a loop region in the shRNA. In some embodiments, the loop region comprises a sequence selected from the sequences set forth in Table 24.

TABLE 24
Illustrative loop region sequences

| SEQ ID NO | Loop Region Sequence |
|---|---|
| 21786 | CGAA |
| 21787 | UUCAAGA |
| 21788 | AUAUUCA |
| 21789 | UGUGCUGUC |
| 21790 | CUCGAG |
| 21791 | CUUCCUGUCAGA |
| 21792 | CUUCCCUUUGUCAGA |
| 21793 | GUGUUAUUCUUG |
| 21794 | GUGUCUUAAUUG |
| 21795 | GUGUUAGUCUUG |
| 21796 | UCAAGAG |
| 21797 | GGACAUCCAGGG |
| 21798 | GUGAAGCCACAGAUG |
| 21799 | GAUUCUAAAA |

[0510] shRNAs of the disclosure may be generated exogenously by chemical synthesis, by in vitro transcription, or by cleavage of longer double-stranded RNA with Dicer or another appropriate nuclease with similar activity. Chemically synthesized siRNAs, produced from protected ribonucleoside phosphoramidites using a conventional DNA/RNA synthesizer, may be obtained from commercial suppliers such as Millipore Sigma (Houston, Tex.), Ambion Inc. (Austin, Tex.). Invitrogen (Carlsbad, Calif.), or Dharmacon (Lafayette, Colo.). siRNAs can be purified by extraction with a solvent or resin, precipitation, electrophoresis, chromatography, or a combination thereof, for example. Alternatively, siRNAs may be used with little if any purification to avoid losses due to sample processing. In some embodiments, shRNAs of the disclosure can be produced using an expression vector into which a nucleic acid encoding the double stranded RNA has been cloned, for example under control of a suitable promoter.

### Pharmaceutical Compositions

[0511] The disclosure provides pharmaceutical compositions comprising immune cells expressing the engineered receptors of the disclosure and a pharmaceutically acceptable diluent, carrier or excipient. In some embodiments, the pharmaceutical composition is for use as a medicament in the treatment of cancer. In some embodiments, the cancer is breast cancer, bladder cancer, ovarian cancer, gastric cancer, salivary duct carcinoma, non-small cell lung cancer, pancreatic cancer, or colon cancer. In some embodiments, the cancer is breast cancer. In some embodiments, the cancer is gastric cancer.

[0512] Such compositions may comprise buffers such as neutral buffered saline, phosphate buffered saline and the like; carbohydrates such as glucose, mannose, sucrose or dextrans, mannitol; proteins; polypeptides or amino acids such as glycine; antioxidants; chelating agents such as EDTA or glutathione; and preservatives.

[0513] In some embodiments, the immune cell expresses both the first receptor and the second receptor. In some embodiments, at least about 50%, about 55%, about 60%, about 65%, about 70%, about 75%, about 80%, about 85%, about 90%, or about 95% of the immune cells express both the first receptor and the second receptor. In some embodiments, at least 90% of the immune cells express both the first receptor and the second receptor.

[0514] The disclosure provides pharmaceutical compositions comprising a plurality of immune cells of the disclosure, and a pharmaceutically acceptable carrier, diluent or excipient.

[0515] Formulations of a pharmaceutical composition suitable for parenteral administration typically generally comprise of immune cells combined with a pharmaceutically acceptable carrier, such as sterile water or sterile isotonic saline. Such formulations may be prepared, packaged, or sold in a form suitable for bolus administration or for continuous administration. Injectable formulations may be prepared, packaged, or sold in unit dosage form, such as in ampoules or in multi-dose containers containing a preservative. Formulations for parenteral administration include, but are not limited to, suspensions, solutions, emulsions in oily or aqueous vehicles, pastes, and the like. Such formulations may further comprise one or more additional ingredients including, but not limited to, suspending, stabilizing, or dispersing agents. Parenteral formulations also include aqueous solutions which may contain excipients such as salts, carbohydrates and buffering agents. Exemplary parenteral administration forms include solutions or suspensions in sterile aqueous solutions, for example, aqueous propylene glycol or dextrose solutions. Such dosage forms can be suitably buffered, if desired. Formulations for parenteral administration may be formulated to be immediate and/or modified release. Modified release formulations include delayed-, sustained-, pulsed-, controlled-, targeted and programmed release.

[0516] In some embodiments, the formulated composition comprising the immune cells is suitable for administration via injection. In some embodiments, the formulated composition comprising the immune cells is suitable for administration via infusion.

[0517] The pharmaceutical compositions of the present disclosure, which may conveniently be presented in unit dosage form, may be prepared according to conventional techniques well known in the pharmaceutical industry. Such techniques include the step of bringing into association the immune cells with the pharmaceutical carrier(s) or excipient(s), such as liquid carriers.

[0518] Aqueous suspensions may further contain substances that increase the viscosity of the suspension including, for example, sodium carboxymethylcellulose, sorbitol and/or dextran. The suspension may also contain stabilizers.

[0519] The compositions of the present disclosure may additionally contain other adjunct components conventionally found in pharmaceutical compositions. Thus, for example, the compositions may contain additional, compatible, pharmaceutically-active materials such as, for example, antipruritics, astringents, local anesthetics or anti-inflammatory agents, or may contain additional materials useful in physically formulating various dosage forms of the compositions of the present disclosure, such as dyes, preservatives, antioxidants, opacifiers, thickening agents and stabilizers. However, such materials, when added, should not unduly interfere with the biological activities of the immune cells of the compositions of the present disclosure.

[0520] The formulation or composition may also contain more than one active ingredient useful for the particular indication, disease, or condition being treated with the immune cells, where the respective activities do not adversely affect one another. Such active ingredients are suitably present in combination in amounts that are effective for the purpose intended. Thus, in some embodiments, the pharmaceutical composition further includes other pharmaceutically active agents or drugs, such as chemotherapeutic agents.

[0521] The pharmaceutical composition in some aspects can employ time-released, delayed release, and sustained release delivery systems such that the delivery of the composition occurs prior to, and with sufficient time to cause, sensitization of the site to be treated. Many types of release delivery systems are available and known. Such systems can avoid repeated administrations of the composition, thereby increasing convenience to the subject and the physician.

[0522] Administration can be effected in one dose, continuously or intermittently throughout the course of treatment. Single or multiple administrations can be carried out with the dose level and pattern being selected by the treating physician.

[0523] The pharmaceutical composition in some embodiments contains the immune cells in amounts effective to treat or prevent a cancer, such as a therapeutically effective or prophylactically effective amount. Therapeutic or prophylactic efficacy in some embodiments is monitored by periodic assessment of treated subjects. For repeated administrations over days, weeks or months, depending on the condition, the treatment can be repeated until a desired suppression of cancer signs or symptoms occurs. However, other dosage regimens may be useful and can be determined. The desired dosage can be delivered by a single bolus administration or infusion of the composition or by multiple bolus administrations or infusions of the composition.

### Methods of Use

[0524] Provided herein are methods for selectively killing HER2-positive tumor cells having loss of heterozygosity at an allele encoding a non-target antigen in the HER2-positive cancer, comprising contacting the HER2-positive tumor cells with an immune cell comprising the engineered receptors of the disclosure. The cells may be, for example, in a tissue (e.g., in vivo) or in a mixed culture. In some embodiments, the non-target antigen is an HLA class I allele or a minor histocompatibility antigen (MiHA). In some embodiments, the HLA class I allele comprises HLA-A, HLA-B, HLA-C or HLA-E. In some embodiments, the HLA class I allele is HLA-A*02. In some embodiments, the non-target antigen is selected from the group consisting of HLA-A*02, HLA-A*01, HLA-A*03, HLA-A*11, HLA-B*07, and HLA-C*07.

[0525] Provided herein are methods of treating a subject in need thereof, comprising administering to the subject a therapeutically effective amount of a composition comprising immune cells comprising the engineered receptors of the disclosure.

[0526] In some embodiments, the method comprises treating a HER2+ cancer in a subject identified as having or suspected of having a loss of heterozygosity at an allele encoding a non-target antigen in the HER2+ cancer, comprising administering to the subject the immune cells described herein. In some embodiments, the immune cells are autologous. In some embodiments, the immune cells are allogeneic. In some embodiments, the non-target antigen is an HLA class I allele or a minor histocompatibility antigen (MiHA). In some embodiments, the HLA class I allele comprises HLA-A, HLA-B, HLA-C or HLA-E. In some embodiments, the HLA class I allele is HLA-A*02. In some embodiments, the non-target antigen is selected from the group consisting of HLA-A*02, HLA-A*01, HLA-A*03, HLA-A*11, HLA-B*07, and HLA-C*07.

[0527] The disclosure provides methods of making an immune cell therapy. In some embodiments, the method comprises transforming immune cells with the polynucleotide system described herein. In some embodiments, the polynucleotide system comprises one or more polynucleotides comprising polynucleotide sequences encoding: an activator receptor comprising an extracellular ligand binding domain specific to an erb-b2 receptor tyrosine kinase 2 (HER2) antigen; and an inhibitory receptor comprising an extracellular ligand binding domain specific to a non-target antigen that is not expressed by the cancer cell due to a loss of heterozygosity in the cancer cell.

[0528] In some embodiments, the method of treating a subject comprises providing immune cells from a subject suffering from or at risk for a HER2 positive (HER2+) cancer. In some embodiments, the method comprises transducing the immune cell with the polynucleotide system described herein.

[0529] The current method for adoptive cell therapy using autologous cells includes isolating immune cells from patient blood, performing a series of modifications on the isolated cells, and administering the cells to a patient (Papathanasiou et al. Cancer Gene Therapy. 27:799-809 (2020)). Providing immune cells from a subject suffering from or at risk for cancer or a hematological malignancy requires isolation of immune cell from the patient's blood, and can be accomplished through methods known in the art, for example, by leukapheresis. During leukapheresis, blood from a subject is extracted and the peripheral blood mononuclear cells (PBMCs) are separated, and the remainder of the blood is returned to the subject's circulation. The PBMCs are stored either frozen or cryopreserved as a sample of immune cells and provided for further processing steps, such as, e.g. the modifications described herein.

[0530] In some embodiments, the method of treating a subject described herein comprises modifications to immune cells from the subject comprising a series of modifications comprising enrichment, activation, genetic modification, expansion, formulation, and cryopreservation.

[0531] The disclosure provides enrichment steps that can be, for example, washing and fractionating methods known in the art for preparation of subject PBMCs for downstream procedures, e.g. the modifications described herein. For example, without limitation, methods can include devices to remove gross red blood cells and platelet contaminants, systems for size-based cell fractionation for the depletion of monocytes and the isolation of lymphocytes, and/or systems that allow the enrichment of specific subsets of T cells, such as, e.g. CD4+, CD8+, CD25+, or CD62L+ T cells. Following the enrichment steps, a target sub-population of immune cells will be isolated from the subject PMBCs for further processing. Those skilled in the art will appreciate that enrichment steps, as provided herein, may also encompass any newly discovered method, device, reagent or combination thereof.

[0532] The disclosure provides activation steps that can be any method known in the art to induce activation of immune cells, e.g. T cells, required for their ex vivo expansion. Immune cell activation can be achieved, for example, by culturing the subject immune cells in the presence of dendritic cells, culturing the subject immune cells in the presence of artificial antigen-presenting cells (AAPCs), or culturing the immune cells in the presence of irradiated K562-derived AAPCs. Other methods for activating subject immune cells can be, for example, culturing the immune cells in the presence of isolated activating factors and compositions, e.g. beads, surfaces, or particles functionalized with activating factors. Activating factors can include, for example, antibodies, e.g. anti-CD3 and/or anti-CD28 antibodies. Activating factors can also be, for example, cytokines, e.g. interleukin (IL)-2 or IL-21. Activating factors can also be costimulatory molecules, such as, for example, CD40, CD40L, CD70, CD80, CD83, CD86, CD137L, ICOSL, GITRL, and CD134L. Those skilled in the art will appreciate that activating factors, as provided herein, may also encompass any newly discovered activating factor, reagent, composition, or combination thereof that can activate immune cells.

[0533] The disclosure provides genetic modification steps for modifying the subject immune cells. In some embodiments, the genetic modification comprises transducing the immune cell with an engineered receptor. In some embodiments, the method comprises transducing the immune cell with a first vector comprising a sequence encoding the activator receptor and a second vector comprising a sequence encoding the inhibitory receptor, thereby producing an immune cell expressing the activator and inhibitory receptors.

[0534] The disclosure provides expansion steps for the genetically modified subject immune cells. Genetically modified subject immune cells can be expanded in any immune cell expansion system known in the art to generate therapeutic doses of immune cells for administration. For example, bioreactor bags for use in a system comprising controller pumps, and probes that allow for automatic feeding and waste removal can be used for immune cell expansion. Cell culture flasks with gas-permeable membranes at the base may be used for immune cell expansion. Any such system known in the art that enables expansion of immune cells for clinical use is encompassed by the expansion step provided herein. Immune cells are expanded in culture systems in media formulated specifically for expansion. Expansion can also be facilitated by culturing the immune cell of the disclosure in the presence of activation factors as described herein. Those skilled in the art will appreciate that expansion steps, as provided herein, may also encompass any newly discovered culture systems, media, or activating factors that can be used to expand immune cells.

[0535] The disclosure provides formulation and cryopreservation steps for the expanded genetically modified subject immune cells. Formulation steps provided include, for example, washing away excess components used in the preparation and expansion of immune cells of the methods of treatment described herein. Any pharmaceutically acceptable formulation medium or wash buffer compatible with immune cell known in the art may be used to wash, dilute/concentration immune cells, and prepare doses for administration. Formulation medium can be acceptable for administration of the immune cells, such as, for example crystalloid solutions for intravenous infusion. Cryopreservation can optionally be used to store immune cells long-term. Cryopreservation can be achieved using known methods in the art, including for example, storing cells in a cryopreservation medium containing cryopreservation components. Cryopreservation components can include, for example, dimethyl sulfoxide or glycerol. Immune cells stored in cryopreservation medium can be cryopreserved by reducing the storage temperature to −80° C. to −180° C.

[0536] In some embodiments, the method comprises administering immune cells described herein. In some embodiments, the method comprises administering a conditioning regimen prior to administering the immune cells described herein. In some embodiments, the conditioning regimen is lymphodepletion. A lymphodepletion regimen can include, for example, administration of alemtuzumab, cyclophosphamide, benduamustin, rituximab, pentostatin, and/or fludarabine. Lymphodepletion regimen can be administered in one or more cycles until the desired outcome of reduced circulating immune cells.

[0537] In some embodiments, the conditioning regimen comprises administering an agent that specifically targets, and reduces or eliminates CD52+ cells in the subject, and the immune cells are modified to reduce or eliminate CD52 expression.

[0538] In some embodiments, the method of treatment comprises determining the HLA germline type of the subject. In some embodiments, determining the HLA germline type comprises determining the presence of HLA-A*02:01 heterozygosity. In some embodiments, the HLA germline type is determined in bone marrow.

[0539] In some embodiments, the method of treatment comprises determining the level of expression of an activator ligand, e.g. a HER2 antigen. In some embodiments, the level of expression of an activator ligand is determined in tumor tissue samples from the subject. In some embodiments, the expression level of an activator ligand is determined using next generation sequencing. In some embodiments, the expression level of an activator ligand is determined using RNA sequencing. In some embodiments, the level of an activator ligand is determined using immunohistochemistry.

[0540] In some embodiments, the method of treatment comprises administering a therapeutically effective dose of immune cells in a subject in need thereof, wherein the subject is determined to be HLA germline HLA-A*02:01 heterozygous and have tumor tissue with activator expression and loss of HLA-A*02:01.

[0541] In some embodiments, a therapeutically effective dose of the immune cells described herein are administered. In some embodiments, the immune cells of the disclosure are administered by intravenous injection. In some embodiments, the immune cells of the disclosure are administered by intraperitoneal injection. In some embodiments, a therapeutically effective dose comprises about 0.5×10⁶ cells, about 1×106 cells, about 2×10⁶ cells, about 3×10⁶ cells, 4×10⁶ cells, about 5×10⁶ cells, about 6×10⁶ cells, about 7×10⁶ cells, about 8×10⁶ cells, about 9×10⁶ cells, about 1×10⁷, about 2×10⁷, about 3×10⁷, about 4×10⁷, about 5×10⁷, about 6×10⁷, about 7×10⁷, about 8×10⁷, about 9×10⁷, 1×10⁸ cells, about 2×10⁸ cells, about 3×10⁸ cells, about 4×10⁸ cells, about 5×10⁸ cells, or about 6×10⁸ cells. In some embodiments, a therapeutically effective dose comprises about 0.5×10⁶ cells to about 6×10⁸ cells, about 1×10⁶ cells to about 5×108 cells, about 2×10⁶ cells to about 5×10⁸ cells, about 3×10⁶ cells to about 4×108 cells, about 4×10⁶ cells to about 3×10⁸ cells, about 5×10⁶ cells to about 2×108 cells, about 6×10⁶ cells to about 1×10⁸ cells, about 7×10⁶ cells to about 9×10⁷ cells, about 8×10⁶ cells to about 8×10⁷ cells, about 9×10⁶ cells to about 7×10⁷ cells, about 1×10⁷ cells to about 6×10⁷ cells, or about 2×10⁷ cells to about 5×10⁷ cells. In some embodiments, a therapeutically effective dose comprises about 0.5×10⁶ cells to about 6×10⁸ cells. The term “about” as referred to in a therapeutically dose, can be, for example, ±0.5×10⁶ cells, ±0.5×10⁷ cells, or ±0.5×10⁸ cells.

[0542] In some embodiments, the subject in need thereof has cancer. In some embodiments, the cancer is a HER2 positive (HER2+) cancer. Cancer is a disease in which abnormal cells divide without control and spread to nearby tissue. In some embodiments, the cancer comprises a liquid tumor or a solid tumor. Exemplary liquid tumors include leukemias and lymphomas. Exemplary solid tumors include sarcomas and carcinomas. Cancers can arise in virtually an organ in the body, including blood, bone marrow, lung, breast, colon, bone, central nervous system, pancreas, prostate and ovary. Further cancers that are solid tumors include, for example, prostate cancer, testicular cancer, breast cancer, brain cancer, pancreatic cancer, colon cancer, thyroid cancer, stomach cancer, lung cancer, ovarian cancer, Kaposi's sarcoma, skin cancer, squamous cell skin cancer, renal cancer, head and neck cancers, throat cancer, squamous carcinomas that form on the moist mucosal linings of the nose, mouth, throat, bladder cancer, osteosarcoma, cervical cancer, endometrial cancer, esophageal cancer, liver cancer, and kidney cancer. In some embodiments, the condition treated by the methods described herein is metastasis of melanoma cells, prostate cancer cells, testicular cancer cells, breast cancer cells, brain cancer cells, pancreatic cancer cells, colon cancer cells, thyroid cancer cells, stomach cancer cells, lung cancer cells, ovarian cancer cells, Kaposi's sarcoma cells, skin cancer cells, renal cancer cells, head or neck cancer cells, throat cancer cells, squamous carcinoma cells, bladder cancer cells, osteosarcoma cells, cervical cancer cells, endometrial cancer cells, esophageal cancer cells, liver cancer cells, or kidney cancer cells.

[0543] Any cancer wherein a plurality of the cancer cells express the first, activator ligand and do not express the second, inhibitor ligand is envisaged as within the scope of the instant disclosure. For example, HER2 positive cancers that can be treated using the methods described herein include breast cancer cell, bladder cancer cell, ovarian cancer cell, gastric cancer cell, a salivary duct carcinoma cell, a non-small cell lung cancer cell, a pancreatic cancer cell, or a colon cancer cell.

[0544] In some embodiments, a plurality of cancer cells do not express a polymorphic allele of COLEC12, APCDD1 or CXCL16. In some embodiments, a plurality of cancer cells do not express a non-target antigen. In some embodiments, a plurality of cancer cells do not express HLA-A*02. In some embodiments, the plurality of cancer cells do not express an allelic variant of HLA-A*02. In some embodiments, the plurality of cancer cells do not express HLA-A*01. In some embodiments, the plurality of cancer cells do not express HLA-A*03. In some embodiments, the plurality of cancer cells do not expression HLA-A*11. In some embodiments, the plurality of cancer cells do not express HLA-B*07. In some embodiments, the plurality of cancer cells do not expression HLA-C*07. For example, the cancer cells have lost an allele of COLEC12, APCDD1 or CXCL16, or HLA-A*02 through loss of heterozygosity at that locus.

[0545] Treating cancer can result in a reduction in size of a tumor. A reduction in size of a tumor may also be referred to as “tumor regression”. Preferably, after treatment, tumor size is reduced by 5% or greater relative to its size prior to treatment; more preferably, tumor size is reduced by 10% or greater; more preferably, reduced by 20% or greater; more preferably, reduced by 30% or greater; more preferably, reduced by 40% or greater; even more preferably, reduced by 50% or greater; and most preferably, reduced by greater than 75% or greater. Size of a tumor may be measured by any reproducible means of measurement. The size of a tumor may be measured as a diameter of the tumor.

[0546] Treating cancer can result in a reduction in tumor volume. Preferably, after treatment, tumor volume is reduced by 5% or greater relative to its size prior to treatment; more preferably, tumor volume is reduced by 10% or greater; more preferably, reduced by 20% or greater; more preferably, reduced by 30% or greater; more preferably, reduced by 40% or greater; even more preferably, reduced by 50% or greater; and most preferably, reduced by greater than 75% or greater. Tumor volume may be measured by any reproducible means of measurement.

[0547] Treating cancer results in a decrease in number of tumors. Preferably, after treatment, tumor number is reduced by 5% or greater relative to number prior to treatment; more preferably, tumor number is reduced by 10% or greater; more preferably, reduced by 20% or greater; more preferably, reduced by 30% or greater; more preferably, reduced by 40% or greater; even more preferably, reduced by 50% or greater; and most preferably, reduced by greater than 75%. Number of tumors may be measured by any reproducible means of measurement. The number of tumors may be measured by counting tumors visible to the naked eye or at a specified magnification. Preferably, the specified magnification is 2×, 3×, 4×, 5×, 10×, or 50×.

[0548] Treating cancer can result in a decrease in number of metastatic lesions in other tissues or organs distant from the primary tumor site. Preferably, after treatment, the number of metastatic lesions is reduced by 5% or greater relative to number prior to treatment; more preferably, the number of metastatic lesions is reduced by 10% or greater; more preferably, reduced by 20% or greater; more preferably, reduced by 30% or greater; more preferably, reduced by 40% or greater; even more preferably, reduced by 50% or greater; and most preferably, reduced by greater than 75%. The number of metastatic lesions may be measured by any reproducible means of measurement. The number of metastatic lesions may be measured by counting metastatic lesions visible to the naked eye or at a specified magnification. Preferably, the specified magnification is 2×, 3×, 4×, 5×, 10×, or 50×.

[0549] Treating cancer can result in an increase in average survival time of a population of treated subjects in comparison to a population receiving carrier alone. Preferably, the average survival time is increased by more than 30 days; more preferably, by more than 60 days; more preferably, by more than 90 days; and most preferably, by more than 120 days. An increase in average survival time of a population may be measured by any reproducible means. An increase in average survival time of a population may be measured, for example, by calculating for a population the average length of survival following initiation of treatment with an active compound. An increase in average survival time of a population may also be measured, for example, by calculating for a population the average length of survival following completion of a first round of treatment with an active compound.

[0550] Treating cancer can result in an increase in average survival time of a population of treated subjects in comparison to a population of untreated subjects. Preferably, the average survival time is increased by more than 30 days; more preferably, by more than 60 days; more preferably, by more than 90 days; and most preferably, by more than 120 days. An increase in average survival time of a population may be measured by any reproducible means. An increase in average survival time of a population may be measured, for example, by calculating for a population the average length of survival following initiation of treatment with an active compound. An increase in average survival time of a population may also be measured, for example, by calculating for a population the average length of survival following completion of a first round of treatment with an active compound.

[0551] Treating cancer can result in increase in average survival time of a population of treated subjects in comparison to a population receiving monotherapy with a drug that is not a compound of the present invention, or a pharmaceutically acceptable salt, prodrug, metabolite, analog or derivative thereof. Preferably, the average survival time is increased by more than 30 days; more preferably, by more than 60 days; more preferably, by more than 90 days; and most preferably, by more than 120 days. An increase in average survival time of a population may be measured by any reproducible means. An increase in average survival time of a population may be measured, for example, by calculating for a population the average length of survival following initiation of treatment with an active compound. An increase in average survival time of a population may also be measured, for example, by calculating for a population the average length of survival following completion of a first round of treatment with an active compound.

[0552] Treating cancer can result in a decrease in the mortality rate of a population of treated subjects in comparison to a population receiving carrier alone. Treating cancer can result in a decrease in the mortality rate of a population of treated subjects in comparison to an untreated population. Treating cancer can result in a decrease in the mortality rate of a population of treated subjects in comparison to a population receiving monotherapy with a drug that is not a compound of the present invention, or a pharmaceutically acceptable salt, prodrug, metabolite, analog or derivative thereof. Preferably, the mortality rate is decreased by more than 2%; more preferably, by more than 5%; more preferably, by more than 10%; and most preferably, by more than 25%. A decrease in the mortality rate of a population of treated subjects may be measured by any reproducible means. A decrease in the mortality rate of a population may be measured, for example, by calculating for a population the average number of disease-related deaths per unit time following initiation of treatment with an active compound. A decrease in the mortality rate of a population may also be measured, for example, by calculating for a population the average number of disease-related deaths per unit time following completion of a first round of treatment with an active compound.

[0553] Treating cancer can result in a decrease in tumor growth rate. Preferably, after treatment, tumor growth rate is reduced by at least 5% relative to number prior to treatment; more preferably, tumor growth rate is reduced by at least 10%; more preferably, reduced by at least 20%; more preferably, reduced by at least 30%; more preferably, reduced by at least 40%; more preferably, reduced by at least 50%; even more preferably, reduced by at least 50%; and most preferably, reduced by at least 75%. Tumor growth rate may be measured by any reproducible means of measurement. Tumor growth rate can be measured according to a change in tumor diameter per unit time.

[0554] Treating cancer can result in a decrease in tumor regrowth. Preferably, after treatment, tumor regrowth is less than 5%; more preferably, tumor regrowth is less than 10%; more preferably, less than 20%; more preferably, less than 30%; more preferably, less than 40%; more preferably, less than 50%; even more preferably, less than 50%; and most preferably, less than 75%. Tumor regrowth may be measured by any reproducible means of measurement. Tumor regrowth is measured, for example, by measuring an increase in the diameter of a tumor after a prior tumor shrinkage that followed treatment. A decrease in tumor regrowth is indicated by failure of tumors to reoccur after treatment has stopped.

[0555] Treating or preventing a cell proliferative disorder can result in a reduction in the rate of cellular proliferation. Preferably, after treatment, the rate of cellular proliferation is reduced by at least 5%; more preferably, by at least 10%; more preferably, by at least 20%; more preferably, by at least 30%; more preferably, by at least 40%; more preferably, by at least 50%; even more preferably, by at least 50%; and most preferably, by at least 75%. The rate of cellular proliferation may be measured by any reproducible means of measurement. The rate of cellular proliferation is measured, for example, by measuring the number of dividing cells in a tissue sample per unit time.

[0556] Treating or preventing a cell proliferative disorder can result in a reduction in the proportion of proliferating cells. Preferably, after treatment, the proportion of proliferating cells is reduced by at least 5%; more preferably, by at least 10%; more preferably, by at least 20%; more preferably, by at least 30%; more preferably, by at least 40%; more preferably, by at least 50%; even more preferably, by at least 50%; and most preferably, by at least 75%. The proportion of proliferating cells may be measured by any reproducible means of measurement. Preferably, the proportion of proliferating cells is measured, for example, by quantifying the number of dividing cells relative to the number of nondividing cells in a tissue sample. The proportion of proliferating cells can be equivalent to the mitotic index.

[0557] Treating or preventing a cell proliferative disorder can result in a decrease in size of an area or zone of cellular proliferation. Preferably, after treatment, size of an area or zone of cellular proliferation is reduced by at least 5% relative to its size prior to treatment; more preferably, reduced by at least 10%; more preferably, reduced by at least 20%; more preferably, reduced by at least 30%; more preferably, reduced by at least 40%; more preferably, reduced by at least 50%; even more preferably, reduced by at least 50%; and most preferably, reduced by at least 75%. Size of an area or zone of cellular proliferation may be measured by any reproducible means of measurement. The size of an area or zone of cellular proliferation may be measured as a diameter or width of an area or zone of cellular proliferation.

[0558] Treating or preventing a cell proliferative disorder can result in a decrease in the number or proportion of cells having an abnormal appearance or morphology. Preferably, after treatment, the number of cells having an abnormal morphology is reduced by at least 5% relative to its size prior to treatment; more preferably, reduced by at least 10%; more preferably, reduced by at least 20%; more preferably, reduced by at least 30%; more preferably, reduced by at least 40%; more preferably, reduced by at least 50%; even more preferably, reduced by at least 50%; and most preferably, reduced by at least 75%. An abnormal cellular appearance or morphology may be measured by any reproducible means of measurement. An abnormal cellular morphology can be measured by microscopy, e.g., using an inverted tissue culture microscope. An abnormal cellular morphology can take the form of nuclear pleiomorphism.

[0559] The disclosure provides methods of treating a cancer in a subject comprising: (a) determining the genotype of normal cells and a plurality of cancer cells of the subject at a polymorphic locus selected from the group consisting of a polymorphic locus of COLEC12, a polymorphic locus of APCDD1 and a polymorphic locus of CXCL16, or the HLA-A*02 locus; (b) determining the expression of HER2 in a plurality of cancer cells; and (c) administering a plurality of immune cells to the subject if the normal cells are heterozygous for the polymorphic locus and the plurality of cancer cells are hemizygous for the polymorphic locus or have lost HLA-A*02, and the plurality of cancer cells are HER2-positive, wherein the plurality of immune cells comprise: (i) a first receptor, optionally a chimeric antigen receptor (CAR) or T cell receptor (TCR), comprising an extracellular ligand binding domain specific to HER2, or a peptide antigen thereof in a complex with a major histocompatibility complex class I (MHC-I); and (ii) a second receptor, optionally an inhibitory chimeric antigen receptor (i.e. inhibitory receptors), comprising an extracellular ligand binding specific to a non-target antigen selected from COLEC12, APCDD1, and CXCL16, or an antigen peptide thereof in a complex with an a major histocompatibility complex class I (MHC-I), or HLA-A*02, wherein the non-target antigen comprises a polymorphism.

[0560] Methods of genotyping cancer cells and normal cells from a subject for the presence or absence of SNPs will be readily apparent to persons of ordinary skill in the art. SNP genotyping methods include, inter alia, PCR based methods such as dual-probe TaqMan assays, array based hybridization methods and sequencing.

[0561] Methods of measuring the expression of the target antigen in cancer or normal cells from a subject will be readily apparent to persons of ordinary skill in the art. These include, inter alia, methods of measuring RNA expression such as RNA sequencing and reverse transcription polymerase chain reaction (RT-PCR), as well as methods of measuring protein expression such as immunohistochemistry based methods. Methods of measuring loss of heterozygosity in a plurality of cancer cells, include, inter alia, high throughput sequencing of genomic DNA extracted from cancer cells using methods known in the art.

[0562] Methods of measuring the expression of the target antigen in cancer or normal cells from a subject will be readily apparent to persons of ordinary skill in the art. These include, inter alia, methods of measuring RNA expression such as RNA sequencing and reverse transcription polymerase chain reaction (RT-PCR), as well as methods of measuring protein expression such as immunohistochemistry based methods.

[0563] In some embodiments, the immune cells are T cells.

[0564] In some embodiments, the immune cells are allogeneic or autologous.

[0565] In some embodiments, the second receptor increases the specificity of the immune cells for the HER2-positive cancer cells compared to immune cells that express the first receptor but do not express the second receptor. In some embodiments, the immune cells have reduced side effects compared to immune cells that express the first receptor but do not express the second receptor.

[0566] Dosage and Administration

[0567] The immune cells and of the present disclosure may be administered in a number of ways depending upon whether local or systemic treatment is desired.

[0568] In general, administration may be parenteral.

[0569] Methods for administration of cells for adoptive cell therapy are known and may be used in connection with the provided methods and compositions. For example, adoptive T cell therapy methods are described, e.g., in US Patent Application Publication No. 2003/0170238 to Gruenberg et al and U.S. Pat. No. 4,690,915 to Rosenberg.

[0570] The compositions of the disclosure are suitable for parenteral administration. As used herein, “parenteral administration” of a pharmaceutical composition includes any route of administration characterized by physical breaching of a tissue of a subject and administration of the pharmaceutical composition through the breach in the tissue, thus generally resulting in the direct administration into the blood stream, into muscle, or into an internal organ. Parenteral administration thus includes, but is not limited to, administration of a pharmaceutical composition by injection of the composition, by application of the composition through a surgical incision, by application of the composition through a tissue-penetrating non-surgical wound, and the like. In particular, parenteral administration is contemplated to include, but is not limited to, subcutaneous, intraperitoneal, intramuscular, intrasternal, intravenous, intraarterial, intrathecal, intraventricular, intraurethral, intracranial, intratumoral, intrasynovial injection or infusions; and kidney dialytic infusion techniques. In some embodiments, parenteral administration of the compositions of the present disclosure comprises intravenous or intraarterial administration.

[0571] The cells or population of cells can be administrated in one or more doses. In some embodiments, an effective amount of cells can be administrated as a single dose. In some embodiments, an effective amount of cells can be administrated as more than one doses over a period time. Timing of administration is within the judgment of a managing physician and depends on the clinical condition of the patient.

[0572] The cells or population of cells may be obtained from any source, such as a blood bank or a donor, or the patient themselves.

[0573] An effective amount means an amount which provides a therapeutic or prophylactic benefit. The dosage administered will be dependent upon the age, health and weight of the recipient, kind of concurrent treatment, if any, frequency of treatment and the nature of the effect desired. In some embodiments, an effective amount of cells or composition comprising those cells are administrated parenterally. In some embodiments, administration can be an intravenous administration. In some embodiments, administration can be directly done by injection within a tumor.

[0574] For purposes of the disclosure, an assay, which comprises, for example, comparing the extent to which target cells are lysed or one or more cytokines are secreted by immune cells expressing the receptors, upon administration of a given dose of such immune cells to a mammal, among a set of mammals of which is each given a different dose of the immune cells, can be used to determine a starting dose to be administered to a mammal.

[0575] In some embodiments, the cells are administered as part of a combination treatment, such as simultaneously with or sequentially with, in any order, another therapeutic intervention, such as an antibody or engineered cell or receptor or agent, such as a cytotoxic or therapeutic agent. The immune cells of the disclosure are in some embodiments are co-administered with one or more additional therapeutic agents or in connection with another therapeutic intervention, either simultaneously or sequentially in any order. In some contexts, the immune cells are co-administered with another therapy sufficiently close in time such that the immune cell populations enhance the effect of one or more additional therapeutic agents, or vice versa. In some embodiments, the immune cells are administered prior to the one or more additional therapeutic agents. In some embodiments, the immune cells are administered after to the one or more additional therapeutic agents.

[0576] In embodiments, a lymphodepleting chemotherapy is administered to the subject prior to, concurrently with, or after administration (e.g., infusion) of adoptive immune cells. In an example, the lymphodepleting chemotherapy is administered to the subject prior to administration of the immune cells. For example, the lymphodepleting chemotherapy ends 1-4 days (e.g., 1, 2, 3, or 4 days) prior to adoptive cell infusion. In embodiments, multiple doses of adoptive cells are administered, e.g., as described herein. In embodiments, a lymphodepleting chemotherapy is administered to the subject prior to, concurrently with, or after administration (e.g., infusion) of the immune cells described herein. Examples of lymphodepletion include, but may not be limited to, nonmyeloablative lymphodepleting chemotherapy, myeloablative lymphodepleting chemotherapy, total body irradiation, etc. Examples of lymphodepleting agents include, but are not limited to, antithymocyte globulin, anti-CD3 antibodies, anti-CD4 antibodies, anti-CD8 antibodies, anti-CD52 antibodies, anti-CD2 antibodies, TCRαβ blockers, anti-CD20 antibodies, anti-CD19 antibodies, Bortezomib, rituximab, anti-CD 154 antibodies, rapamycin, CD3 immunotoxin, fludarabine, cyclophosphamide, busulfan, melphalan, Mabthera, Tacrolimus, alefacept, alemtuzumab, OKT3, OKT4, OKT8, OKT11, fingolimod, anti-CD40 antibodies, anti-BR3 antibodies, Campath-1H, anti-CD25 antibodies, calcineurin inhibitors, mycophenolate, and steroids, which may be used alone or in combination. As a further example, a lymphodepletion regimen can include, administration of alemtuzumab, cyclophosphamide, benduamustin, rituximab, pentostatin, and/or fludarabine. Lymphodepletion regimen can be administered in one or more cycles until the desired outcome of reduced circulating immune cells. In some embodiments, the lymphodepletion comprises administering an agent that specifically targets, and reduces or eliminates CD52+ cells in the subject, and the immune cells are modified to reduce or eliminate CD52 expression.

[0577] In some embodiments, an immune stimulating therapy is administered to the subject prior to, concurrently with, or after administration (e.g. infusion) of adoptive immune cells. In some embodiments, the immune stimulating therapy comprises homeostatic cytokines. In some embodiments, the immune stimulating therapy comprises immune-stimulatory molecules. In some embodiments, the immune stimulating therapy comprises IL-2, IL-7, IL-12, IL-15, IL-21, IL-9, or a functional fragment thereof. In some embodiments, the immune stimulating therapy comprises IL-2, IL-7, IL-12, IL-15, IL-21, IL-9, or combinations thereof. In some embodiments, the immune stimulating therapy comprises IL-2, or a functional fragment thereof.

[0578] Methods for adoptive cell therapy using autologous cells includes isolating immune cells from patient blood, performing a series of modifications on the isolated cells including transducing the cells with one or more vectors encoding the dual receptor system described herein, and administering the cells to a patient. Providing immune cells from a subject suffering from or at risk for cancer or a hematological malignancy requires isolation of immune cell from the patient's blood, and can be accomplished through methods known in the art, for example, by leukapheresis. During leukapheresis, blood from a subject is extracted and the peripheral blood mononuclear cells (PBMCs) are separated, and the remainder of the blood is returned to the subject's circulation. The PBMCs are stored either frozen or cryopreserved as a sample of immune cells and provided for further processing steps, such as, e.g. the modifications described herein.

[0579] In some embodiments, the method of treating a subject described herein comprises modifications to immune cells from the subject comprising a series of modifications comprising enrichment and/or depletion, activation, genetic modification, expansion, formulation, and cryopreservation.

[0580] The disclosure provides enrichment and/or depletion steps that can be, for example, washing and fractionating methods known in the art for preparation of subject PBMCs for downstream procedures, e.g. the modifications described herein. For example, without limitation, methods can include devices to remove gross red blood cells and platelet contaminants, systems for size-based cell fractionation for the depletion of monocytes and the isolation of lymphocytes, and/or systems that allow the enrichment or depletion of specific subsets of T cells, such as, e.g. CD4+, CD8+, CD25+, or CD62L+ T cells. Following the enrichment steps, a target sub-population of immune cells will be isolated from the subject PMBCs for further processing. Those skilled in the art will appreciate that enrichment steps, as provided herein, may also encompass any newly discovered method, device, reagent or combination thereof.

[0581] The disclosure provides activation steps that can be any method known in the art to induce activation of immune cells, e.g. T cells, required for their ex vivo expansion. Immune cell activation can be achieved, for example, by culturing the subject immune cells in the presence of dendritic cells, culturing the subject immune cells in the presence of artificial antigen-presenting cells (AAPCs), or culturing the immune cells in the presence of irradiated K562-derived AAPCs. Other methods for activating subject immune cells can be, for example, culturing the immune cells in the presence of isolated activating factors and compositions, e.g. beads, surfaces, or particles functionalized with activating factors. Activating factors can include, for example, antibodies, e.g. anti-CD3 and/or anti-CD28 antibodies. Activating factors can also be, for example, cytokines, e.g. interleukin (IL)-2 or IL-21. Activating factors can also be costimulatory molecules, such as, for example, CD40, CD40L, CD70, CD80, CD83, CD86, CD137L, ICOSL, GITRL, and CD134L. Those skilled in the art will appreciate that activating factors, as provided herein, may also encompass any newly discovered activating factor, reagent, composition, or combination thereof that can activate immune cells.

[0582] The disclosure provides genetic modification steps for modifying the subject immune cells. In some embodiments, the genetic modification comprises transducing the immune cell with a vector comprising a shRNA described herein complementary to B2M or HLA-A. In some embodiments, the genetic modification comprises modifying the genome of the immune cells to induce mutations in B2M or HLA-A using CRISPR/Cas mediated genome engineering. In some embodiments, the method comprises transducing the immune cell with one or more vectors encoding the activator and inhibitory receptors, thereby producing immune cells expressing the activator and inhibitory receptors.

[0583] The disclosure provides expansion steps for the genetically modified subject immune cells. Genetically modified subject immune cells can be expanded in any immune cell expansion system known in the art to generate therapeutic doses of immune cells for administration. For example, bioreactor bags for use in a system comprising controller pumps, and probes that allow for automatic feeding and waste removal can be used for immune cell expansion. Cell culture flasks with gas-permeable membranes at the base may be used for immune cell expansion. Any such system known in the art that enables expansion of immune cells for clinical use is encompassed by the expansion step provided herein. Immune cells are expanded in culture systems in media formulated specifically for expansion. Expansion can also be facilitated by culturing the immune cell of the disclosure in the presence of activation factors as described herein. Those skilled in the art will appreciate that expansion steps, as provided herein, may also encompass any newly discovered culture systems, media, or activating factors that can be used to expand immune cells.

[0584] The disclosure provides formulation and cryopreservation steps for the expanded genetically modified subject immune cells. Formulation steps provided include, for example, washing away excess components used in the preparation and expansion of immune cells of the methods of treatment described herein. Any pharmaceutically acceptable formulation medium or wash buffer compatible with immune cell known in the art may be used to wash, dilute/concentration immune cells, and prepare doses for administration. Formulation medium can be acceptable for administration of the immune cells, such as, for example crystalloid solutions for intravenous infusion.

[0585] Cryopreservation can optionally be used to store immune cells long-term. Cryopreservation can be achieved using known methods in the art, including for example, storing cells in a cryopreservation medium containing cryopreservation components. Cryopreservation components can include, for example, dimethyl sulfoxide or glycerol. Immune cells stored in cryopreservation medium can be cryopreserved by reducing the storage temperature to −80° C. to −196° C.

[0586] In some embodiments, the method of treatment comprises determining the HLA germline type of the subject. In some embodiments, the HLA germline type is determined in bone marrow.

[0587] In some embodiments, the method of treatment comprises determining the level of expression of HER2. In some embodiments, the level of expression of HER2 is determined in tumor tissue samples from the subject. In some embodiments, the expression level of HER2 is determined using next generation sequencing. In some embodiments, the expression level of HER2 is determined using RNA sequencing. In some embodiments, the level of HER2 is determined using immunohistochemistry.

[0588] In some embodiments, the method of treatment comprises administering a therapeutically effective dose of immune cells comprising an HLA-A*02 inhibitory receptor to a subject in need thereof, wherein the subject is determined to be HLA germline HLA-A*02 heterozygous and have cancer cells with loss of HLA-A*02. In some embodiments, the method of treatment comprises administering a therapeutically effective dose of immune cells comprising an HLA-A*01 inhibitory receptor to a subject in need thereof, wherein the subject is determined to be HLA germline HLA-A*01 heterozygous and have cancer cells with loss of HLA-A*01. In some embodiments, the method of treatment comprises administering a therapeutically effective dose of immune cells comprising an HLA-A*03 to a subject in need thereof, wherein the subject is determined to be HLA germline HLA-A*03 heterozygous and have cancer cells with loss of HLA-A*03. In some embodiments, the method of treatment comprises administering a therapeutically effective dose of immune cells comprising an HLA-A*07 inhibitory receptor to a subject in need thereof, wherein the subject is determined to be HLA germline HLA-A*07 heterozygous and have cancer cells with loss of HLA-A*07. In some embodiments, the method of treatment comprises administering a therapeutically effective dose of immune cells comprising an HLA-C*07 inhibitory receptor to a subject in need thereof, wherein the subject is determined to be HLA germline HLA-C*07 heterozygous and have cancer cells with and loss of HLA-C*07. In some embodiments, the method of treatment comprises administering a therapeutically effective dose of immune cells comprising an HLA-B*07 inhibitory receptor in a subject in need thereof, wherein the subject is determined to be HLA germline HLA-B*07 heterozygous and have cancer cells with loss of HLA-B*07.

[0589] In various embodiments, the disclosure provides method of treatment of heterozygous HLA-A*02 patients with malignancies that express HER2 and have lost HLA-A*02 expression; and/or of treatment of heterozygous HLA-A*02 adult patients with recurrent unresectable or metastatic solid tumors that express HER2 and have lost HLA-A*02 expression.

[0590] In some embodiments, a therapeutically effective dose of the immune cells described herein are administered. In some embodiments, the immune cells of the disclosure are administered by intravenous injection. In some embodiments, the immune cells of the disclosure are administered by intraperitoneal injection. In some embodiments, a therapeutically effective dose comprises about 0.5×10⁶ cells, about 1×10⁶ cells, about 2×10⁶ cells, about 3×10⁶ cells, 4×10⁶ cells, about 5×10⁶ cells, about 6×10⁶ cells, about 7×10⁶ cells, about 8×10⁶ cells, about 9×10⁶ cells, about 1×10⁷, about 2×10⁷, about 3×10⁷, about 4×10⁷, about 5×10⁷, about 6×10⁷, about 7×10⁷, about 8×10⁷, about 9×10⁷, about 1×10⁸ cells, about 2×10⁸ cells, about 3×10⁸ cells, about 4×10⁸ cells, about 5×10⁸ cells, about 6×10⁸ cells, about 7×10⁸ cells, about 8×10⁸ cells, about 9×10⁸ cells, about 1×10⁹ cells, about 2×10⁹ cells, about 3×10⁹ cells, about 3×10⁹ cells, about 4×10⁹ cells, about 5×10⁹ cells, about 5×10⁹ cells, about 6×10⁹ cells, about 7×10⁹ cells, about 8×10⁹ cells, about 9×10⁹ cells, about 1×10¹⁰ cells, about 2×10¹⁰ cells, about 3×10¹⁰ cells, about 4×10¹⁰ cells, about 5×10¹⁰ cells, about 6×10¹⁰ cells, about 7×10¹⁰ cells, about 8×10¹⁰ cells, or about 9×10¹⁰ cells.

[0591] In some embodiments, a therapeutically effective dose comprises about 0.5×106 cells to about 9×10¹⁰ cells, about 1×10⁶ cells to about 5×10¹⁰ cells, about 2×10⁶ cells to about 5×10⁹ cells, about 3×10⁶ cells to about 5×10⁹ cells, about 4×10⁶ cells to about 3×10⁹ cells, about 5×10⁶ cells to about 2×10⁹ cells, about 6×10⁶ cells to about 1×10⁹ cells, 0.5×10⁶ cells to about 6×10⁹ cells, about 1×10⁶ cells to about 5×10⁹ cells, about 2×10⁶ cells to about 5×10⁹ cells, about 3×10⁶ cells to about 4×10⁹ cells, about 4×10⁶ cells to about 3×10⁹ cells, about 5×10⁶ cells to about 2×10⁹ cells, about 6×10⁶ cells to about 1×10⁹ cells, 0.5×10⁶ cells to about 6×10⁸ cells, about 1×10⁶ cells to about 5×10⁸ cells, about 2×10⁶ cells to about 5×10⁸ cells, about 3×10⁶ cells to about 4×10⁸ cells, about 4×10⁶ cells to about 3×10⁸ cells, about 5×10⁶ cells to about 2×10⁸ cells, about 6×10⁶ cells to about 1×10⁸ cells, about 7×10⁶ cells to about 9×10⁸ cells, about 8×10⁶ cells to about 8×10⁸ cells, about 9×10⁶ cells to about 7×10⁸ cells, about 1×10⁷ cells to about 6×10⁸ cells, about 2×10⁷ cells to about 5×10⁸ cells, about 7×10⁶ cells to about 9×10⁷ cells, about 8×10⁶ cells to about 8×10⁷ cells, about 9×10⁶ cells to about 7×10⁷ cells, about 1×10⁷ cells to about 6×10⁷ cells, or about 2×10⁷ cells to about 5×10⁷ cells.

[0592] In some embodiments, a therapeutically effective dose comprises about 0.5×10⁵ cells to about 9×10¹⁰ cells. In some embodiments, a therapeutically effective dose comprises about 0.5×10⁶ cells to about 1×10¹⁰ cells. In some embodiments, a therapeutically effective dose comprises about 0.5×10⁶ cells to about 5×10⁹ cells. In some embodiments, a therapeutically effective dose comprises about 0.5×10⁶ cells to about 1×10⁹ cells. In some embodiments, a therapeutically effective dose comprises about 0.5×10⁶ cells to about 6×10⁸ cells. In some embodiments, a therapeutically effective dose comprises about 0.5×10⁶ cells to about 9×10¹⁰ cells. In some embodiments, a therapeutically effective dose comprises about 0.5×10⁷ cells to about 1×10¹⁰ cells. In some embodiments, a therapeutically effective dose comprises about 0.5×10⁷ cells to about 5×10⁹ cells. In some embodiments, a therapeutically effective dose comprises about 0.5×10⁷ cells to about 1×10⁹ cells. In some embodiments, a therapeutically effective dose comprises about 0.5×10⁷ cells to about 6×10⁸ cells. In some embodiments, a therapeutically effective dose comprises about 0.5×10⁸ cells to about 9×10¹⁰ cells. In some embodiments, a therapeutically effective dose comprises about 0.5×10⁸ cells to about 1×10¹⁰ cells. In some embodiments, a therapeutically effective dose comprises about 0.5×10⁸ cells to about 5×10⁹ cells. In some embodiments, a therapeutically effective dose comprises about 0.5×10⁸ cells to about 1×10⁹ cells. The term “about” as referred to in a therapeutically dose, can be, for example, ±0.5×10⁶ cells, ±0.5×10⁷ cells, or ±0.5×10⁸ cells.

### Kits and Articles of Manufacture

[0593] The disclosure provides kits and articles of manufacture comprising the polynucleotides and vectors encoding the engineered receptors described herein, and immune cells edited using gene editing systems described herein and comprising the engineered receptors described herein. In some embodiments, the kit comprises articles such as vials, syringes and instructions for use.

[0594] In some embodiments, the kit comprises a polynucleotide or vector comprising a sequence encoding one or more engineered receptors of the disclosure.

[0595] In some embodiments, the kit comprises a plurality of immune cells comprising an engineered receptor as described herein. In some embodiments, the plurality of immune cells comprises a plurality of T cells.

### EXAMPLES

### Example 1: Methods of Assaying HER2 CAR Activity in Jurkat and Primary T Cells

[0596] Cell Culture

[0597] Jurkat cells encoding an NFAT luciferase reporter were obtained from BPS Bioscience. In culture, Jurkat cells were maintained in RPMI media supplemented with 10% FBS, 1% Pen/Strep and 0.4 mg/mL G418/Geneticin. HCT.116 and HeLa cells were maintained as suggested by ATCC.

[0598] Jurkat Cell Transfection

[0599] Jurkat cells were transiently transfected via 100 uL or 20 ul format 4D Nucleofactor (Lonza) according to manufacturer's protocol. Cotransfection was performed with 1-3 ug of activator receptor construct and 1-3 ug of inhibitory receptor constructs or empty vector per 1e6 cells and recovered in RPMI media supplemented with 20% heat-inactivated FBS and 0.1% Pen/Strep. To confirm inhibitory receptor surface expression, Jurkat cells were stained 18-24 hours post-transfection with 10 ug/mL streptavidin-PE-HLA-A*02-pMHC tetramer for 60 minutes at 4° C. in PBS with 1% BSA and characterized by flow cytometry (BD FACSCanto II).

[0600] Jurkat-NFAT-Luciferase Activation Studies

[0601] Briefly, Jurkat NFAT-Firefly-Luciferase cells were transfected with activator and inhibitory (blocker) receptor constructs using Lonza 4D Nucleofector™ (AAF-1002B) or Neon™ transfection systems (ThermoFisher, MPK5000). mRNA transfected target cells (10,000 cells/well), activator only or activator/blocker expressing target cells at different densities, were added to transfected Jurkat-NFAT-Firefly-Luciferase cells (12,000 cells/well) to a final volume of 20 mL in 384-well plates (Corning 3570). After a 6-hour incubation at 37° C., the One-Step™ Luciferase firefly assay system (BPS Bioscience, 60690) was used to determine luminescence intensity on a Tecan Infinite® M1000.

[0602] Solid Substrate Antigen Titration

[0603] Biotinylated pMHCs were added to streptavidin-coated plates with and without biotinylated recombinant CD28 agonist, biotinylated recombinant PD-L1, or both at concentrations equimolar to the highest pMHC molarity. Mouse IgG1 was used as a control to ensure the binding capacity of the well was not exceeded. The unbound molecules were washed off and transduced T-cells were added. Half of the T-cells were recovered and stained with anti-CD69 at 24 hours and the rest were stained with anti-CD25 at 48 hours.

[0604] Activator mRNA Titration

[0605] HER2 or HLA-A2 mRNA were synthesized as described below and were diluted two fold 12 times. Each dilution of mRNA was mixed with two million Her2 knock-out HeLa cells (Her2−/HLA-A2−) and electroporated using 4D Nucleofactor. mRNA transfected target cells were then co-cultured with Jurkat cells transfected with HER2 CAR or blocker receptor for 6 hours before the degree of activation was measured as described above.

[0606] In Vitro Transcription of mRNA

[0607] HER2 sequence was synthesized by Genscript with T7 promoter in the 5′ end together with 5′ and 3′ synthetic UTR sequences. In vitro transcription was done in 1×IVT buffer (40 mM Tris, 10 mM DTT, 2 mM Spermidine, 0.002% Triton X-100, and 27 mM MgCl₂) with T7 RNA polymerase (NEB, M0251S), Inorganic pyrophosphatase (NEB, M2403S) and murine RNase inhibitor (NEB, M0314S). In addition, 500 ng PCR purified template, 5 mM CleanCap Cap1 AG trimer, 5 mM each of ATP, CTP, GTP and pseudo-uridine triphosphate (pseudo-UTP) were added, and the transcription reaction was incubated at 37° C. for 2 hours, followed by addition of DNase I (NEB, M0303S) for additional 15 minutes incubation at 37° C.

[0608] In vitro transcription reaction was finalized by the addition of poly A tailing with poly A enzyme (NEB, M0276S) and incubation at 37° C. for 30 minutes. The mRNA was then cleaned using the NEB Monarch kit. The purified mRNA was treated with Antarctic phosphatase (NEB, M0289S for 1 hour at 37° C. in 1× Antarctic phosphatase buffer (NEB). mRNA was then purified again using the NEB Monarch kit. mRNA concentrations were measured by Nanodrop. The quality of mRNA was accessed by gel electrophoresis. The final in vitro transcribed mRNA was aliquoted and stored at −80° C. until shortly before use.

[0609] Primary T Cell Transduction, Expansion, and Enrichment

[0610] Human PBMCs were purified from Leukopaks purchased from Allcells® according to methods described previously (Garcia et al., 2014). Collection protocols and donor informed consent were approved by an Institutional Review Board (IRB) at Allcells®. Allcells® also followed HIPAA compliance and approved protocols with strict oversight (https://www.allcells.com/cell-tissue-procurement/donor-facilities/). Unless otherwise specified, all LymphoONE media (Takara WK552) was supplemented with 1% human AB Serum (GeminiBio 100-512). Human PBMCs were grown in LymphoONE plus TransAct™ (Miltenyi 130-111-160) following the manufacturers guidelines (1:100 dilution) for 24 hours before transduction with lentivirus encoding the activator (CAR) and/or the blocker. 24 hours after transduction, additional LymphoONE plus IL-2 (300 IU/ml) was added to transduced cells, grown for 3 days before transfer to a 24-well G-Rex plate (Wilson Wolf 80192M). Fresh IL-2 (300 IU/ml) was added every 48 hours with media change every 7 days when the cells were expanded in G-Rex plates. Expression and antigen binding of transduced activator or activator and blocker in primary T cells were confirmed by flow cytometry using protein L for the activator and HLA-A2 pMHC or LIL-RB1 antibody for the blocker. If needed, CAR- or blocker-expressing cells were labeled with protein L-biotin/streptavidin-PE or pMHC/streptavidin-PE, followed by anti-PE microbeads (Miltenyi 130-048-801) according to the manufacturer's instructions, and subsequently enriched using AutoMACS® Pro Separator (Miltenyi). Enriched cells were grown in G-Rex plates until use.

[0611] Primary T Cell In Vitro Cytotoxicity Studies

[0612] For cytotoxicity studies, enriched primary T cells were incubated with HeLa and HCT.116 cells expressing Renilla luciferase (Biosettia). Live luciferase-expressing target cells were quantified using a Renilla Luciferase Reporter Assay System (Promega). Target cells stably expressing GFP and Renilla luciferase (Biosettia) or stably expressing RFP and firefly luciferase (Biosettia) were imaged together with unlabeled primary T cells using an IncuCyte live cell imager. Fluorescence intensity of live target cells over time was quantified using IncuCyte imaging software after 40 hours. For reversibility studies, enriched primary T cells were similarly cocultured with “normal” or “tumor” target cells for 3 days and imaged. After 3 days, T cells were separated from remaining target cells by pipetting, FACS or magnetic beads. In separate wells, live luciferase-expressing target cells were quantified using a Dual-Luciferase Reporter Assay System (Promega) at 72 hours.

[0613] Mouse Xenograft Study

[0614] Activator and blocker expressing T cells were generated as described in above.

[0615] Five to six week old female NSG (NOD.Cg-Prkdc^{scid}Il2rg^{tm1Wjl}/SzJ), JAX stock No. 005557 mice were purchased from The Jackson Labs. Animals were acclimated to the housing environment for at least 3 days prior to the initiation of the study. Animals were injected with 5e6 HER2+ HCT.116 cells that were HLA-A*02 positive in one flank and HLA-A*02 negative cells, in the other flank. When total volume of tumors in both flanks reached an average of 100 mm3 (V=L×W×W/2), animals were randomized into groups, and 2e6, 5e6, or 10e6 total T cells were administered via the tail vein. Post T cell injection, tumor measurements on both flanks were performed 3 times per week for 4 weeks.

[0616] Statistical Analysis

[0617] Statistical analyses were performed using GraphPad Prism software. All peptide and cell titration studies are shown as mean±standard deviation (SD), while in vitro and in vivo studies using primary T cells are shown as mean±standard error of the mean (SEM), unless otherwise noted. Peptide and cell titration curves were fit using a four-parameter non-linear regression analysis. EC50 values were calculated directly from the curves. All other groups of data were analyzed using an ordinary two-way ANOVA followed by a Tukey's multiple-comparisons test, unless otherwise noted.

### Example 2: Activity of HER2 Chimeric Antigen Receptors in Jurkat Cells

[0618] The sensitivity of different HER2 chimeric antigen receptors (CARs) was determined in Jurkat cells and rank ordered. The formats of the different HER2 CARs assayed, and the HER2 antigen binding domains for these CARs, are shown in FIG. 1. Sequences of the HER2 CARs assayed are shown in Table 25 below.

[0619] The activity of Jurkat cells expressing HER2 CARS 1-4 (CT292, CT297, CT298 and CT299, respectively) was assayed using a titration of HER2 antigen on a solid substrate (FIG. 2A), and by titrating the number of HCT.116 HER2 positive target cells (FIG. 2B). In both cases, the HER2 CAR2, which had an FRP5 antigen binding domain, showed little to no activity. The FRP5 antigen binding domain, and a variant of FRP5, were assayed in a different CAR format that used an IgG1 hinge domain (CT1094 and CT1095). As shown in FIG. 2C, FRP5 antigen binding domain in combination with an IgG1 hinge shows detectable activity.

TABLE 25

| | Amino Acid | |
|---|---|---|
| Construct | Sequence | DNA Sequence |
| CT292 | MDFQVQIFSFLLI | ATGGATTTTCAGGTGCAGATTTTCAGCTTCCTGCT |
| | SASVIMSRGDIQM | AATCAGTGCCTCAGTCATAATGTCCAGAGGAGATA |
| | TQSPSSLSASVGD | TCCAGATGACCCAGTCCCCGAGCTCCCTGTCCGCC |
| | RVTITCRASQDVN | TCTGTGGGCGATAGGGTCACCATCACCTGCCGTGC |
| | TAVAWYQQKPGKA | CAGTCAGGATGTGAATACTGCTGTAGCCTGGTATC |
| | PKLLIYSASFLYS | AACAGAAACCAGGAAAAGCTCCGAAACTACTGATT |
| | GVPSRFSGSRSGT | TACTCGGCATCCTTCCTTTATTCTGGAGTCCCTTC |
| | DFTLTISSLQPED | TCGCTTCTCTGGATCTAGATCTGGGACGGATTTCA |
| | FATYYCQQHYTTP | CTCTGACCATCAGCAGTCTGCAGCCGGAAGACTTC |
| | PTFGQGTKVEIKR | GCAACTTATTACTGTCAGCAACATTATACTACTCC |
| | TGSTSGSGKPGSG | TCCCACGTTCGGACAGGGTACCAAGGTGGAGATCA |
| | EGSEVQLVESGGG | AACGCACTGGGTCTACATCTGGATCTGGGAAGCCG |
| | LVQPGGSLRLSCA | GGTTCTGGTGAGGGTTCTGAGGTTCAGCTGGTGGA |
| | ASGFNIKDTYIHW | GTCTGGCGGTGGCCTGGTGCAGCCAGGGGGCTCAC |
| | VRQAPGKGLEWVA | TCCGTTTGTCCTGTGCAGCTTCTGGCTTCAACATT |
| | RIYPTNGYTRYAD | AAAGACACCTATATACACTGGGTGCGTCAGGCCCC |
| | SVKGRFTISADTS | GGGTAAGGGCCTGGAATGGGTTGCAAGGATTTATC |
| | KNTAYLQMNSLRA | CTACGAATGGTTATACTAGATATGCCGATAGCGTC |
| | EDTAVYYCSRWGG | AAGGGCCGTTTCACTATAAGCGCAGACACATCCAA |
| | DGFYAMDVWGQGT | AAACACAGCCTACCTGCAGATGAACAGCCTGCGTG |
| | LVTVSSAAAFVPV | CTGAGGACACTGCCGTCTATTATTGTTCTAGATGG |
| | FLPAKPTTTPAPR | GGAGGGGACGGCTTCTATGCTATGGACGTGTGGGG |
| | PPTPAPTIASQPL | TCAAGGAACCCTGGTCACCGTTTCCTCGGCGGCCG |
| | SLRPEACRPAAGG | CATTCGTGCCGGTCTTCCTGCCAGCGAAGCCCACC |
| | AVHTRGLDFACDI | ACGACGCCAGCGCCGCGACCACCAACACCGGCGCC |
| | YIWAPLAGTCGVL | CACCATCGCGTCGCAGCCCCTGTCCCTGCGCCCAG |
| | LLSLVITLYCNHR | AGGCGTGCCGGCCAGCGGCGGGGGGCGCAGTGCAC |
| | NRSKRSRLLHSDY | ACGAGGGGGCTGGACTTCGCCTGTGATATCTACAT |
| | MNMTPRRPGPTRK | CTGGGCGCCCTTGGCCGGGACTTGTGGGGTCCTTC |
| | HYQPYAPPRDFAA | TCCTGTCACTGGTTATCACCCTTTACTGCAACCAC |
| | YRSRFSVVKRGRK | AGGAACAGGAGTAAGAGGAGCAGGCTCCTGCACAG |
| | KLLYIFKQPFMRP | TGACTACATGAACATGACTCCCCGCCGCCCCGGGC |
| | VQTTQEEDGCSCR | CCACCCGCAAGCATTACCAGCCCTATGCCCCACCA |
| | FPEEEEGGCELRV | CGCGACTTCGCAGCCTATCGCTCCCGTTTCTCTGT |
| | KFSRSADAPAYQQ | TGTTAAACGGGGCAGAAAGAAGCTCCTGTATATAT |
| | GQNQLYNELNLGR | TCAAACAACCATTTATGAGACCAGTACAAACTACT |
| | REEYDVLDKRRGR | CAAGAGGAAGATGGCTGTAGCTGCCGATTTCCAGA |
| | DPEMGGKPRRKNP | AGAAGAAGAAGGAGGATGTGAACTGAGAGTGAAGT |
| | QEGLYNELQKDKM | TCAGCAGGAGCGCAGACGCCCCCGCGTACCAGCAG |
| | AEAYSEIGMKGER | GGCCAGAACCAGCTCTATAACGAGCTCAATCTAGG |
| | RRGKGHDGLYQGL | ACGAAGAGAGGAGTACGATGTTTTGGACAAGAGGC |
| | STATKDTYDALHM | GTGGCCGGGACCCTGAGATGGGGGGAAAGCCGAGA |
| | QALPPR (SEQ | AGGAAGAACCCTCAGGAAGGCCTGTACAATGAACT |
| | ID NO: 291) | GCAGAAAGATAAGATGGCGGAGGCCTACAGTGAGA |
| | | TTGGGATGAAAGGCGAGCGCCGGAGGGGCAAGCAC |
| | | CAAGGACACCTACGACGCCCTTCACATGCAGGCCC |
| | | TGCCCCCTCGCTAG(SEQ ID NO: 292) |
| CT298 | MLLLVTSLLLCEL | ATGCTGCTACTGGTCACCAGTCTACTGCTGTGCGA |
| | PHPAFLLIPDIQM | ACTGCCACATCCGGCCTTCCTGCTAATACCGGATA |
| | TQSPSSLSASVGD | TCCAGATGACCCAGTCCCCGAGCTCCCTGTCCGCC |
| | RVTITCRASQDVN | TCTGTGGGCGATAGGGTCACCATCACCTGCCGTGC |
| | TAVAWYQQKPGKA | CAGTCAGGATGTGAATACTGCTGTAGCCTGGTATC |
| | PKLLIYSASFLYS | AACAGAAACCAGGAAAAGCTCCGAAACTACTGATT |
| | GVPSRFSGSRSGT | TACTCGGCATCCTTCCTTTATTCTGGAGTCCCTTC |
| | DFTLTISSLQPED | TCGCTTCTCTGGATCTAGATCTGGGACGGATTTCA |
| | FATYYCQQHYTTP | CTCTGACCATCAGCAGTCTGCAGCCGGAAGACTTC |
| | PTFGQGTKVEIKG | GCAACTTATTACTGTCAGCAACATTATACTACTCC |
| | STSGGGSGGGSGG | TCCCACGTTCGGACAGGGTACCAAGGTGGAGATCA |
| | GGSSEVQLVESGG | AAGGGTCTACATCTGGCGGTGGCTCTGGTGGCGGT |
| | GLVQPGGSLRLSC | TCCGGCGGTGGCGGTTCTTCCGAGGTTCAGCTGGT |
| | AASGFNIKDTYIH | GGAGTCTGGCGGTGGCCTGGTGCAGCCAGGGGGCT |
| | WVRQAPGKGLEWV | CACTCCGTTTGTCCTGTGCAGCTTCTGGCTTCAAC |
| | ARIYPTNGYTRYA | ATTAAAGACACCTATATACACTGGGTGCGTCAGGC |
| | DSVKGRFTISADT | CCCGGGTAAGGGCCTGGAATGGGTTGCAAGGATTT |
| | SKNTAYLQMNSLR | ATCCTACGAATGGTTATACTAGATATGCCGATAGC |
| | AEDTAVYYCSRWG | GTCAAGGGCCGTTTCACTATAAGCGCAGACACATC |
| | GDGFYAMDYVVGQ | CAAAAACACAGCCTACCTGCAGATGAACAGCCTGC |
| | GTLVTVSSGGGSS | GTGCTGAGGACACTGCCGTCTATTATTGTTCTAGA |
| | GGGSGIYIWAPLA | TGGGGAGGGGACGGCTTCTATGCTATGGACTATTG |
| | GTCGVLLLSLVIT | GGGTCAAGGAACCCTGGTCACCGTCTCCTCGGGTG |
| | KRGRKKLLYIFKQ | GCGGTTCTTCCGGCGGTGGCTCTGGTATCTACATC |
| | PFMRPVQTTQEED | TGGGCGCCCTTGGCCGGGACTTGTGGGGTCCTTCT |
| | GCSCRFPEEEEGG | CCTGTCACTGGTTATCACCAAACGGGGCAGAAAGA |
| | CELGGGRVKFSRS | AGCTCCTGTATATATTCAAACAACCATTTATGAGA |
| | ADAPAYQQGQNQL | CCAGTACAAACTACTCAAGAGGAAGATGGCTGTAG |
| | YNELNLGRREEYD | CTGCCGATTTCCAGAAGAAGAAGAAGGAGGATGTG |
| | VLDKRRGRDPEMG | AACTGGGCGGTGGCAGAGTGAAGTTCAGCAGGAGC |
| | GKPRRKNPQEGLY | GCAGACGCCCCCGCGTACCAGCAGGGCCAGAACCA |
| | NELQKDKMAEAYS | GCTCTATAACGAGCTCAATCTAGGACGAAGAGAGG |
| | EIGMKGERRRGKG | AGTACGATGTTTTGGACAAGAGACGTGGCCGGGAC |
| | HDGLYQGLSTATK | CCTGAGATGGGGGGAAAGCCGAGAAGGAAGAACCC |
| | DTYDALHMQALPP | TCAGGAAGGCCTGTACAATGAACTGCAGAAAGATA |
| | R (SEQ ID NO: | AGATGGCGGAGGCCTACAGTGAGATTGGGATGAAA |
| | 293) | GGCGAGCGCCGGAGGGGCAAGGGGCACGATGGCCT |
| | | TTACCAGGGTCTCAGTACAGCCACCAAGGACACCT |
| | | ACGACGCCCTTCACATGCAGGCCCTGCCCCCTCGC |
| | | TAG (SEQ ID NO: 294) |
| CT299 | MLLLVTSLLLCEL | ATGCTGCTACTGGTCACCAGTCTACTGCTGTGCGA |
| | PHPAFLLIPDIQM | ACTGCCACATCCGGCCTTCCTGCTAATACCGGATA |
| | TQSPSSLSASVGD | TCCAGATGACCCAGTCCCCGAGCTCCCTGTCCGCC |
| | RVTITCRASQDVN | TCTGTGGGCGATAGGGTCACCATCACCTGCCGTGC |
| | TAVAWYQQKPGKA | CAGTCAGGATGTGAATACTGCTGTAGCCTGGTATC |
| | PKLLIYSASFLYS | AACAGAAACCAGGAAAAGCTCCGAAACTACTGATT |
| | GVPSRFSGSRSGT | TACTCGGCATCCTTCCTTTATTCTGGAGTCCCTTC |
| | DFTLTISSLQPED | TCGCTTCTCTGGATCTAGATCTGGGACGGATTTCA |
| | FATYYCQQHYTTP | CTCTGACCATCAGCAGTCTGCAGCCGGAAGACTTC |
| | PTFGQGTKVEIKG | GCAACTTATTACTGTCAGCAACATTATACTACTCC |
| | STSGGGSGGGSGG | TCCCACGTTCGGACAGGGTACCAAGGTGGAGATCA |
| | GGSSEVQLVESGG | AAGGGTCTACATCTGGCGGTGGCTCTGGTGGCGGT |
| | GLVQPGGSLRLSC | TCCGGCGGTGGCGGTTCTTCCGAGGTTCAGCTGGT |
| | AASGFNIKDTYIH | GGAGTCTGGCGGTGGCCTGGTGCAGCCAGGGGGCT |
| | WVRQAPGKGLEWV | CACTCCGTTTGTCCTGTGCAGCTTCTGGCTTCAAC |
| | ARIYPTNGYTRYA | ATTAAAGACACCTATATACACTGGGTGCGTCAGGC |
| | DSVKGRFTISADT | CCCGGGTAAGGGCCTGGAATGGGTTGCAAGGATTT |
| | SKNTAYLQMNSLR | ATCCTACGAATGGTTATACTAGATATGCCGATAGC |
| | AEDTAVYYCSRWG | GTCAAGGGCCGTTTCACTATAAGCGCAGACACATC |
| | GDGFYAMDYVVGQ | CAAAAACACAGCCTACCTGCAGATGAACAGCCTGC |
| | GTLVTVSSESKYG | GTGCTGAGGACACTGCCGTCTATTATTGTTCTAGA |
| | PPCPSCPAPEFEG | TGGGGAGGGGACGGCTTCTATGCTATGGACTATTG |
| | GPSVFLFPPKPKD | GGGTCAAGGAACCCTGGTCACCGTCTCCTCGGAGT |
| | TLMISRTPEVTCV | CCAAATATGGTCCCCCATGCCCATCATGCCCAGCA |
| | VVDVSQEDPEVQF | CCTGAGTTCGAGGGGGGACCATCAGTCTTCCTGTT |
| | NWYVDGVEVHNAK | CCCCCCAAAACCCAAGGACACTCTCATGATCTCCC |
| | TKPREEQFQSTYR | GGACCCCTGAGGTCACGTGCGTGGTGGTGGACGTG |
| | VVSVLTVLHQDWL | AGCCAGGAAGACCCCGAGGTCCAGTTCAACTGGTA |
| | NGKEYKCKVSNKG | CGTGGATGGCGTGGAGGTGCATAATGCCAAGACAA |
| | LPSSIEKTISKAK | AGCCGCGGGAGGAGCAGTTCCAGAGCACGTACCGT |
| | GQPREPQVYTLPP | GTGGTCAGCGTCCTCACCGTCCTGCACCAGGACTG |
| | SQEEMTKNQVSLT | GCTGAACGGCAAGGAGTACAAGTGCAAGGTCTCCA |
| | CLVKGFYPSDIAV | ACAAAGGCCTCCCGTCCTCCATCGAGAAAACCATC |
| | EWESNGQPENNYK | TCCAAAGCCAAAGGGCAGCCCCGAGAGCCACAGGT |
| | TTPPVLDSDGSFF | GTACACCCTGCCCCCATCCCAGGAGGAGATGACCA |
| | LYSRLTVDKSRWQ | AGAACCAGGTCAGCCTGACCTGCCTGGTCAAAGGC |
| | EGNVFSCSVMHEA | TTCTACCCCAGCGACATCGCCGTGGAGTGGGAGAG |
| | LHNHYTQKSLSLS | CAATGGGCAGCCGGAGAACAACTACAAGACCACGC |
| | LGKIYIWAPLAGT | CTCCCGTGCTGGACTCCGACGGCTCCTTCTTCCTC |
| | CGVLLLSLVITKR | TACAGCAGGCTCACCGTGGACAAGAGCAGGTGGCA |
| | GRKKLLYIFKQPF | GGAGGGGAATGTCTTCTCATGCTCCGTGATGCATG |
| | MRPVQTTQEEDGC | AGGCTCTGCACAACCACTACACACAGAAGAGCCTC |
| | SCRFPEEEEGGCE | TCCCTGTCTCTGGGTAAAATCTACATCTGGGCGCC |
| | LGGGRVKFSRSAD | CTTGGCCGGGACTTGTGGGGTCCTTCTCCTGTCAC |
| | APAYQQGQNQLYN | TGGTTATCACCAAACGGGGCAGAAAGAAGCTCCTG |
| | ELNLGRREEYDVL | TATATATTCAAACAACCATTTATGAGACCAGTACA |
| | DKRRGRDPEMGGK | AACTACTCAAGAGGAAGATGGCTGTAGCTGCCGAT |
| | PRRKNPQEGLYNE | TTCCAGAAGAAGAAGAAGGAGGATGTGAACTGGGC |
| | LQKDKMAEAYSEI | GGTGGCAGAGTGAAGTTCAGCAGGAGCGCAGACGC |
| | GMKGERRRGKGHD | CCCCGCGTACCAGCAGGGCCAGAACCAGCTCTATA |
| | GLYQGLSTATKDT | ACGAGCTCAATCTAGGACGAAGAGAGGAGTACGAT |
| | YDALHMQALPPR | GTTTTGGACAAGAGACGTGGCCGGGACCCTGAGAT |
| | (SEQ ID NO: | GGGGGGAAAGCCGAGAAGGAAGAACCCTCAGGAAG |
| | 295) | GCCTGTACAATGAACTGCAGAAAGATAAGATGGCG |
| | | GAGGCCTACAGTGAGATTGGGATGAAAGGCGAGCG |
| | | CCGGAGGGGCAAGGGGCACGATGGCCTTTACCAGG |
| | | GTCTCAGTACAGCCACCAAGGACACCTACGACGCC |
| | | CTTCACATGCAGGCCCTGCCCCCTCGCTAG (SEQ |
| | | ID NO: 296) |
| CT297 | MDMRVPAQLLGLL | ATGGACATGAGGGTCCCCGCTCAGCTCCTGGGGCT |
| | LLWLRGARCQVQL | CCTGCTACTCTGGCTCCGAGGTGCCAGATGTCAGG |
| | QQSGPELKKPGET | TACAACTGCAGCAGTCAGGACCTGAACTGAAGAAG |
| | VKISCKASGYPFT | CCTGGAGAGACAGTCAAGATCTCCTGCAAGGCCTC |
| | NYGMNWVKQAPGQ | TGGGTATCCTTTCACAAACTATGGAATGAACTGGG |
| | GLKWMGWINTSTG | TGAAGCAGGCTCCAGGACAGGGTTTAAAGTGGATG |
| | ESTFADDFKGRFD | GGCTGGATTAACACCTCCACTGGAGAGTCAACATT |
| | FSLETSANTAYLQ | TGCTGATGACTTCAAGGGACGGTTTGACTTCTCTT |
| | INNLKSEDSATYF | TGGAAACCTCTGCCAACACTGCCTATTTGCAGATC |
| | CARWEVYHGYVPY | AACAACCTCAAAAGTGAAGACTCGGCTACATATTT |
| | VVGQGTTVTVSSG | CTGTGCAAGATGGGAGGTTTACCACGGCTACGTTC |
| | GGGSGGGGSGGGG | CTTACTGGGGCCAAGGGACCACGGTCACCGTTTCC |
| | SDIQLTQSHKFLS | TCTGGCGGTGGCGGTTCTGGTGGCGGTGGCTCCGG |
| | TSVGDRVSITCKA | CGGTGGCGGTTCTGACATCCAGCTGACCCAGTCTC |
| | SQDVYNAVAWYQQ | ACAAATTCCTGTCCACTTCAGTAGGAGACAGGGTC |
| | KPGQSPKLLIYSA | AGCATCACCTGCAAGGCCAGTCAGGATGTGTATAA |
| | SSRYTGVPSRFTG | TGCTGTTGCCTGGTATCAACAGAAACCAGGACAAT |
| | SGSGPDFTFTISS | CTCCTAAACTTCTGATTTACTCGGCATCCTCCCGG |
| | VQAEDLAVYFCQQ | TACACTGGAGTCCCTTCTCGCTTCACTGGCAGTGG |
| | HFRTPFTFGSGTK | CTCTGGGCCGGATTTCACTTTCACCATCAGCAGTG |
| | LEIKIEVMYPPPY | TGCAGGCTGAAGACCTGGCAGTTTATTTCTGTCAG |
| | LDNEKSNGTIIHV | CAACATTTTCGTACTCCATTCACGTTCGGCTCGGG |
| | KGKHLCPSPLFPG | GACAAAATTGGAGATCAAAATTGAAGTTATGTATC |
| | PSKPFWVLVVVGG | CTCCTCCTTACCTAGACAATGAGAAGAGCAATGGA |
| | VLACYSLLVTVAF | ACCATTATCCATGTGAAAGGGAAACACCTTTGTCC |
| | IIFWVRSKRSRLL | AAGTCCCCTATTTCCCGGACCTTCTAAGCCCTTCT |
| | HSDYMNMTPRRPG | GGGTGCTGGTCGTTGTGGGCGGCGTGCTGGCCTGC |
| | PTRKHYQPYAPPR | TACAGCCTGCTGGTGACAGTGGCCTTCATCATCTT |
| | DFAAYRSRVKFSR | TTGGGTGAGGAGCAAGCGGAGCAGACTGCTGCACA |
| | SADAPAYKQGQNQ | GCGACTACATGAACATGACCCCCCGGAGGCCTGGC |
| | LYNELNLGRREEY | CCCACCCGGAAGCACTACCAGCCCTACGCCCCTCC |
| | DVLDKRRGRDPEM | CAGGGATTTCGCCGCCTACCGGAGCAGAGTGAAGT |
| | GGKPRRKNPQEGL | TCAGCAGGAGCGCAGACGCCCCCGCGTACAAGCAG |
| | YNELQKDKMAEAY | GGCCAGAACCAGCTCTATAACGAGCTCAATCTAGG |
| | ESIGMKGERRRGK | ACGAAGAGAGGAGTACGATGTTTTGGACAAGCGTA |
| | GHDGLYQGLSTAT | GAGGCCGGGACCCTGAGATGGGGGGAAAGCCGAGA |
| | KDTYDALHMQALP | AGGAAGAACCCTCAGGAAGGCCTGTACAATGAACT |
| | PR (SEQ ID | GCAGAAAGATAAGATGGCGGAGGCCTACAGTGAGA |
| | NO: 297) | TTGGGATGAAAGGCGAGCGCCGGAGGGGCAAGGGG |
| | | CACGATGGCCTTTACCAGGGACTCAGTACAGCCAC |
| | | CAAGGACACCTACGACGCCCTTCACATGCAGGCCC |
| | | TGCCCCCTCGCTAG (SEQ ID NO: 298) |
| CT1094 | MDMRVPAQLLGLL | ATGGACATGAGGGTCCCCGCTCAGCTCCTGGGGCT |
| | LLWLRGARCQVQL | CCTGCTACTCTGGCTCCGAGGTGCCAGATGTCAGG |
| | QQSGPELKKPGET | TACAACTGCAGCAGTCAGGACCTGAACTGAAGAAG |
| | VKISCKASGYPFT | CCTGGAGAGACAGTCAAGATCTCCTGCAAGGCCTC |
| | NYGMNWVKQAPGQ | TGGGTATCCTTTCACAAACTATGGAATGAACTGGG |
| | GLKWMGWINTSTG | TGAAGCAGGCTCCAGGACAGGGTTTAAAGTGGATG |
| | ESTFADDFKGRFD | GGCTGGATTAACACCTCCACTGGAGAGTCAACATT |
| | FSLETSANTAYLQ | TGCTGATGACTTCAAGGGACGGTTTGACTTCTCTT |
| | INNLKSEDSATYF | TGGAAACCTCTGCCAACACTGCCTATTTGCAGATC |
| | CARWEVYHGYVPY | AACAACCTCAAAAGTGAAGACTCGGCTACATATTT |
| | VVGQGTTVTVSSG | CTGTGCAAGATGGGAGGTTTACCACGGCTACGTTC |
| | GGGSGGGGSGGGG | CTTACTGGGGCCAAGGGACCACGGTCACCGTTTCC |
| | SDIQLTQSHKFLS | TCTGGCGGTGGCGGTTCTGGTGGCGGTGGCTCCGG |
| | TSVGDRVSITCKA | CGGTGGCGGTTCTGACATCCAGCTGACCCAGTCTC |
| | SQDVYNAVAWYQQ | ACAAATTCCTGTCCACTTCAGTAGGAGACAGGGTC |
| | KPGQSPKLLIYSA | AGCATCACCTGCAAGGCCAGTCAGGATGTGTATAA |
| | SSRYTGVPSRFTG | TGCTGTTGCCTGGTATCAACAGAAACCAGGACAAT |
| | SGSGPDFTFTISS | CTCCTAAACTTCTGATTTACTCGGCATCCTCCCGG |
| | VQAEDLAVYFCQQ | TACACTGGAGTCCCTTCTCGCTTCACTGGCAGTGG |
| | HFRTPFTFGSGTK | CTCTGGGCCGGATTTCACTTTCACCATCAGCAGTG |
| | LEIKAEPKSPDKT | TGCAGGCTGAAGACCTGGCAGTTTATTTCTGTCAG |
| | HTCPPCPKDPKFW | CAACATTTTCGTACTCCATTCACGTTCGGCTCGGG |
| | VLVVVGGVLACYS | GACAAAATTGGAGATCAAAGCCGAGCCCAAGTCCC |
| | LLVTVAFIIFWVR | CTGATAAAACTCACACCTGCCCACCCTGTCCTAAG |
| | SKRSRLLHSDYMN | GACCCGAAGTTCTGGGTGCTGGTCGTTGTGGGCGG |
| | MTPRRPGPTRKHY | CGTGCTGGCCTGCTACAGCCTGCTGGTGACAGTGG |
| | QPYAPPRDFAAYR | CCTTCATCATCTTTTGGGTGAGGAGCAAGCGGAGC |
| | SRVKFSRSADAPA | AGACTGCTGCACAGCGACTACATGAACATGACCCC |
| | YKQGQNQLYNELN | CCGGAGGCCTGGCCCCACCCGGAAGCACTACCAGC |
| | LGRREEYDVLDKR | CCTACGCCCCTCCCAGGGATTTCGCCGCCTACCGG |
| | RGRDPEMGGKPRR | AGCAGAGTGAAGTTCAGCAGGAGCGCAGACGCCCC |
| | KNPQEGLYNELQK | CGCGTACAAGCAGGGCCAGAACCAGCTCTATAACG |
| | DKMAEAYSEIGMK | AGCTCAATCTAGGACGAAGAGAGGAGTACGATGTT |
| | GERRRGKGHDGLY | TTGGACAAGCGTAGAGGCCGGGACCCTGAGATGGG |
| | QGLSTATKDTYDA | GGGAAAGCCGAGAAGGAAGAACCCTCAGGAAGGCC |
| | LHMQALPPR | TGTACAATGAACTGCAGAAAGATAAGATGGCGGAG |
| | (SEQ ID NO: | GCCTACAGTGAGATTGGGATGAAAGGCGAGCGCCG |
| | 299) | GAGGGGCAAGGGGCACGATGGCCTTTACCAGGGAC |
| | | TCAGTACAGCCACCAAGGACACCTACGACGCCCTT |
| | | CACATGCAGGCCCTGCCCCCTCGCTAG (SEQ ID |
| | | NO: 300) |
| CT1095 | MDMRVPAQLLGLL | ATGGACATGAGGGTCCCCGCTCAGCTCCTGGGGCT |
| | LLWLRGARCQVQL | CCTGCTACTCTGGCTCCGAGGTGCCAGATGTCAGG |
| | QQSGPELKKPGET | TACAACTGCAGCAGTCAGGACCTGAACTGAAGAAG |
| | VKISCKASGYPFT | CCTGGAGAGACAGTCAAGATCTCCTGCAAGGCCTC |
| | NYGMNWVKQAPGQ | TGGGTATCCTTTCACAAACTATGGAATGAACTGGG |
| | GLKWMGWINTSTG | TGAAGCAGGCTCCAGGACAGGGTTTAAAGTGGATG |
| | ESTFADDFKGRFD | GGCTGGATTAACACCTCCACTGGAGAGTCAACATT |
| | FSLETSANTAYLQ | TGCTGATGACTTCAAGGGACGGTTTGACTTCTCTT |
| | INNLKSEDMATYF | TGGAAACCTCTGCCAACACTGCCTATTTGCAGATC |
| | CARWEVYHGYVPY | AACAACCTCAAAAGTGAAGACATGGCTACATATTT |
| | VVGQGTTVTVSSG | CTGTGCAAGATGGGAGGTTTACCACGGCTACGTTC |
| | GGGSGGGGSGGGG | CTTACTGGGGCCAAGGGACCACGGTCACCGTTTCC |
| | SDIQLTQSHKFLS | TCTGGCGGTGGCGGTTCTGGTGGCGGTGGCTCCGG |
| | TSVGDRVSITCKA | CGGTGGCGGTTCTGACATCCAGCTGACCCAGTCTC |
| | SQDVYNAVAWYQQ | ACAAATTCCTGTCCACTTCAGTAGGAGACAGGGTC |
| | KPGQSPKLLIYSA | AGCATCACCTGCAAGGCCAGTCAGGATGTGTATAA |
| | SSRYTGVPSRFTG | TGCTGTTGCCTGGTATCAACAGAAACCAGGACAAT |
| | SGSGPDFTFTISS | CTCCTAAACTTCTGATTTACTCGGCATCCTCCCGG |
| | VQAEDLAVYFCQQ | TACACTGGAGTCCCTTCTCGCTTCACTGGCAGTGG |
| | HFRTPFTFGSGTK | CTCTGGGCCGGATTTCACTTTCACCATCAGCAGTG |
| | LEIKAEPKSPDKT | TGCAGGCTGAAGACCTGGCAGTTTATTTCTGTCAG |
| | HTCPPCPKDPKFW | CAACATTTTCGTACTCCATTCACGTTCGGCTCGGG |
| | VLVVVGGVLACYS | GACAAAATTGGAGATCAAAGCCGAGCCCAAGTCCC |
| | LLVTVAFIIFWVR | CTGATAAAACTCACACCTGCCCACCCTGTCCTAAG |
| | SKRSRLLHSDYMN | GACCCGAAGTTCTGGGTGCTGGTCGTTGTGGGCGG |
| | MTPRRPGPTRKHY | CGTGCTGGCCTGCTACAGCCTGCTGGTGACAGTGG |
| | QPYAPPRDFAAYR | CCTTCATCATCTTTTGGGTGAGGAGCAAGCGGAGC |
| | SRVKFSRSADAPA | AGACTGCTGCACAGCGACTACATGAACATGACCCC |
| | YKQGQNQLYNELN | CCGGAGGCCTGGCCCCACCCGGAAGCACTACCAGC |
| | LGRREEYDVLDKR | CCTACGCCCCTCCCAGGGATTTCGCCGCCTACCGG |
| | RGRDPEMGGKPRR | AGCAGAGTGAAGTTCAGCAGGAGCGCAGACGCCCC |
| | KNPQEGLYNELQK | CGCGTACAAGCAGGGCCAGAACCAGCTCTATAACG |
| | DKMAEAYSEIGMK | AGCTCAATCTAGGACGAAGAGAGGAGTACGATGTT |
| | GERRRGKGHDGLY | TTGGACAAGCGTAGAGGCCGGGACCCTGAGATGGG |
| | QGLSTATKDTYDA | GGGAAAGCCGAGAAGGAAGAACCCTCAGGAAGGCC |
| | LHMQALPPR | TGTACAATGAACTGCAGAAAGATAAGATGGCGGAG |
| | (SEQ ID NO: | GCCTACAGTGAGATTGGGATGAAAGGCGAGCGCCG |
| | 301) | GAGGGGCAAGGGGCACGATGGCCTTTACCAGGGAC |
| | | TCAGTACAGCCACCAAGGACACCTACGACGCCCTT |
| | | CACATGCAGGCCCTGCCCCCTCGCTAG (SEQ ID |
| | | NO: 302) |

### Example 3: An HLA-A*02 Inhibitory Receptor can Inhibit HER2 CAR Mediated Activation of Jurkat Cells

[0620] The ability of an HLA-A*-02 LIR1 based inhibitory receptor to inhibit HER2 mediated activation of Jurkat cells expressing both a HER2 CAR and the based inhibitory receptor was assayed.

[0621] Jurkat cells expressing either the HER2 CAR1 (FIG. 3) or HER2 CAR4 (FIG. 4), either alone or in combination with the CT1765 HLA-A*02 LIR1 inhibitory receptor, were co-cultured with HCT.116 or HeLa cells. HCT.116 Hela cells expressed HER2 (Target A), or HER2 and HLA-A*02 (Target AB). As can be seen from FIG. 3, activation Jurkat cells expressing the HLA-A*02 inhibitory receptor and HER2 CAR1 was inhibited by HCT.116 or HeLa target cells that expressed both HER2 and HLA-A*02. In contrast, activation Jurkat cells expressing only HER2 CAR1 was not inhibited in the presence of target cells expressing both HER2 and HLA-A*02. Similar results were observed for HER2 CAR4, as shown in FIG. 4.

[0622] Surface expression of both the HER2 CAR, and the HLA-A*02 inhibitory receptor by Jurkat cells was validated by staining Jurkat cells using protein L for the activator receptor and pMHC or anti-LILRB1 antibody for the blocker receptor as shown in FIG. 5.

### Example 4: An HLA-A*02 Inhibitory Receptor can Inhibit HER2 CAR Mediated Activation of Primary T Cells

[0623] The efficacy, selectivity, and reversibility of HER2 CAR1 (CT292) in combination with an HLA-A*02 LIR1 inhibitory receptor was demonstrated in primary T cells. A murine version of the HLA-A*02 LIR1 inhibitory receptor (C1765), as well as two humanized versions (C2162 and C2163) were assayed in combination with HER2 CAR. The sequences of the HLA-A*02 inhibitory receptors are provided in Table 26 below.

[0624] As can be seen in FIG. 6, all of the HER2 CAR1, and the three inhibitory receptor constructs, were expressed by primary T cells following lentiviral transduction and enrichment. The activity of primary T cells expressing each of the three inhibitory receptors in combination with HER2 CAR1 was assayed using HeLa target cells expressing activator ligand to inhibitor ligand at a ratio of 1:40 (HER: HLA-A*-02). As shown in FIG. 7, all inhibitory receptors were able to inhibit HER2 mediated primary T cell activation. Similar results were obtained using HCT.116 target cells expressed activator to blocker antigen at a ratio of about 1:4 (FIG. 8). Antigen expression, and antigen densities, for HeLa and HCT.116 target cells are shown in FIGS. 12 and 13.

TABLE 26
HLA-A*02 Inhibitory receptors

| | Amino Acid | |
|---|---|---|
| Construct | Sequence | DNA Sequence |
| C-1765 | MDMRVPAQLLGL | ATGGACATGAGGGTCCCCGCTCAGCTCCTGGGGCTC |
| | LLLWLRGARCDV | CTGCTACTCTGGCTCCGAGGTGCCAGATGTGATGTT |
| | LMTQTPLSLPVS | TTGATGACCCAAACTCCACTCTCCCTGCCTGTCAGT |
| | LGDQASISCRSS | CTTGGAGATCAAGCCTCCATCTCTTGCAGATCTAGT |
| | QSIVHSNGNTYL | CAGAGCATTGTACATAGTAATGGAAACACCTATTTA |
| | EWYLQKPGQSPK | GAATGGTACCTGCAGAAACCAGGCCAGTCTCCAAAG |
| | LLIYKVSNRFSG | CTCCTGATCTACAAAGTTTCCAACCGATTTTCTGGG |
| | VPDRFSGSGSGT | GTCCCAGACAGGTTCAGTGGCAGTGGATCAGGGACA |
| | DFTLKISRVEAE | GATTTCACACTCAAGATCAGTAGAGTGGAGGCTGAG |
| | DLGVYYCFQGSH | GATCTGGGAGTTTATTACTGCTTTCAAGGTTCACAT |
| | VPRTSGGGTKLE | GTTCCTCGGACGTCCGGTGGAGGCACCAAGCTGGAA |
| | IKGGGGSGGGGS | ATCAAAGGCGGAGGTGGAAGCGGAGGGGGAGGATCT |
| | GGGGSGGQVQLQ | GGCGGCGGAGGAAGCGGAGGCCAGGTCCAGCTGCAG |
| | QSGPELVKPGAS | CAGTCTGGACCTGAGCTGGTGAAGCCTGGGGCTTCA |
| | VRISCKASGYTF | GTGAGGATATCCTGCAAGGCTTCTGGCTACACCTTC |
| | TSYHIHWVKQRP | ACAAGTTACCATATACATTGGGTGAAGCAGAGGCCT |
| | GQGLEWIGWIYP | GGACAGGGACTTGAGTGGATTGGATGGATTTATCCT |
| | GNVNTEYNEKFK | GGAAATGTTAATACTGAGTACAATGAGAAGTTCAAG |
| | GKATLTADKSSS | GGCAAGGCCACACTGACTGCAGACAAATCGTCCAGC |
| | TAYMHLSSLTSE | ACAGCCTACATGCACCTCAGCAGCCTGACCTCTGAG |
| | DSAVYFCAREEI | GACTCTGCGGTCTATTTCTGTGCCAGAGAGGAGATT |
| | TYAMDYWGQGTS | ACCTATGCTATGGACTACTGGGGTCAAGGAACCTCA |
| | VTVSSYGSQSSK | GTCACCGTGTCCTCATACGGCTCACAGAGCTCCAAA |
| | PYLLTHPSDPLE | CCCTACCTGCTGACTCACCCCAGTGACCCCCTGGAG |
| | LVVSGPSGGPSS | CTCGTGGTCTCAGGACCGTCTGGGGGCCCCAGCTCC |
| | PTTGPTSTSGPE | CCGACAACAGGCCCCACCTCCACATCTGGCCCTGAG |
| | DQPLTPTGSDPQ | GACCAGCCCCTCACCCCCACCGGGTCGGATCCCCAG |
| | SGLGRHLGVVIG | AGTGGTCTGGGAAGGCACCTGGGGGTTGTGATCGGC |
| | ILVAVILLLLLL | ATCTTGGTGGCCGTCATCCTACTGCTCCTCCTCCTC |
| | LLLFLILRHRRQ | CTCCTCCTCTTCCTCATCCTCCGACATCGACGTCAG |
| | GKHWTSTQRKAD | GGCAAACACTGGACATCGACCCAGAGAAAGGCTGAT |
| | FQHPAGAVGPEP | TTCCAACATCCTGCAGGGGCTGTGGGGCCAGAGCCC |
| | TDRGLQWRSSPA | ACAGACAGAGGCCTGCAGTGGAGGTCCAGCCCAGCT |
| | ADAQEENLYAAV | GCCGATGCCCAGGAAGAAAACCTCTATGCTGCCGTG |
| | KHTQPEDGVEMD | AAGCACACACAGCCTGAGGATGGGGTGGAGATGGAC |
| | TRSPHDEDPQAV | ACTCGGAGCCCACACGATGAAGACCCCCAGGCAGTG |
| | TYAEVKHSRPRR | ACGTATGCCGAGGTGAAACACTCCAGACCTAGGAGA |
| | EMASPPSPLSGE | GAAATGGCCTCTCCTCCTTCCCCACTGTCTGGGGAA |
| | FLDTKDRQAEED | TTCCTGGACACAAAGGACAGACAGGCGGAAGAGGAC |
| | RQMDTEAAASEA | AGGCAGATGGACACTGAGGCTGCTGCATCTGAAGCC |
| | PQDVTYAQLHSL | CCCCAGGATGTGACCTACGCCCAGCTGCACAGCTTG |
| | TLRREATEPPPS | ACCCTCAGACGGGAGGCAACTGAGCCTCCTCCATCC |
| | QEGPSPAVPSIY | CAGGAAGGGCCCTCTCCAGCTGTGCCCAGCATCTAC |
| | ATLAIH (SEQ | GCCACTCTGGCCATCCACTAG (SEQ ID NO: |
| | ID NO: 303) | 304) |
| C-2162 | MDMRVPAQLLGL | ATGGACATGAGGGTCCCCGCTCAGCTCCTGGGGCTC |
| | LLLWLRGARCQV | CTGCTACTCTGGCTCCGAGGTGCCAGATGTCAGGTG |
| | QLVQSGAEVKKP | CAGCTGGTGCAGTCTGGGGCTGAGGTGAAGAAGCCT |
| | GSSVKVSCKASG | GGGTCCTCAGTGAAGGTTTCCTGCAAGGCTTCTGGA |
| | YTFTSYHIHWVR | TACACCTTCACTAGCTATCATATACATTGGGTGCGC |
| | QAPGQGLEWIGW | CAGGCCCCCGGACAAGGGCTTGAGTGGATCGGATGG |
| | IYPGNVNTEYNE | ATCTACCCTGGCAATGTTAACACAGAATATAATGAG |
| | KFKGKATITADE | AAGTTCAAGGGCAAAGCCACCATTACCGCGGACGAA |
| | STNTAYMELSSL | TCCACGAACACAGCCTACATGGAGCTGAGCAGCCTG |
| | RSEDTAVYYCAR | AGATCTGAAGACACGGCTGTGTATTACTGTGCGAGG |
| | EEITYAMDYWGQ | GAGGAAATTACCTACGCTATGGACTACTGGGGCCAG |
| | GTLVTVSSGGGG | GGAACCCTGGTCACCGTGTCCTCAGGCGGAGGTGGA |
| | SGGGGSGGGGSG | AGCGGAGGGGGAGGATCTGGCGGCGGAGGAAGCGGA |
| | GDIQMTQSPSTL | GGCGACATTCAAATGACCCAGAGCCCATCCACCCTG |
| | SASVGDRVTITC | AGCGCATCTGTAGGTGACCGGGTCACCATCACTTGT |
| | RSSQSIVHSNGN | AGATCCAGTCAGAGTATTGTACACAGTAATGGGAAC |
| | TYLEWYQQKPGK | ACCTATTTGGAATGGTATCAGCAGAAACCAGGTAAA |
| | APKLLIYKVSNR | GCCCCAAAATTGCTCATCTACAAAGTCTCTAACAGA |
| | FSGVPARFSGSG | TTTAGTGGTGTACCAGCCAGGTTCAGCGGTTCCGGA |
| | SGTEFTLTISSL | AGTGGTACTGAATTCACCCTCACGATCTCCTCTCTC |
| | QPDDFATYYCFQ | CAGCCAGATGATTTCGCCACTTATTACTGTTTTCAA |
| | GSHVPRTFGQGT | GGTTCACATGTGCCGCGCACATTCGGTCAGGGTACT |
| | KVEVKYGSQSSK | AAAGTAGAAGTCAAATACGGCTCACAGAGCTCCAAA |
| | PYLLTHPSDPLE | CCCTACCTGCTGACTCACCCCAGTGACCCCCTGGAG |
| | LVVSGPSGGPSS | CTCGTGGTCTCAGGACCGTCTGGGGGCCCCAGCTCC |
| | PTTGPTSTSGPE | CCGACAACAGGCCCCACCTCCACATCTGGCCCTGAG |
| | DQPLTPTGSDPQ | GACCAGCCCCTCACCCCCACCGGGTCGGATCCCCAG |
| | SGLGRHLGVVIG | AGTGGTCTGGGAAGGCACCTGGGGGTTGTGATCGGC |
| | ILVAVILLLLLL | ATCTTGGTGGCCGTCATCCTACTGCTCCTCCTCCTC |
| | LLLFLILRHRRQ | CTCCTCCTCTTCCTCATCCTCCGACATCGACGTCAG |
| | GKHWTSTQRKAD | GGCAAACACTGGACATCGACCCAGAGAAAGGCTGAT |
| | FQHPAGAVGPEP | TTCCAACATCCTGCAGGGGCTGTGGGGCCAGAGCCC |
| | TDRGLQWRSSPA | ACAGACAGAGGCCTGCAGTGGAGGTCCAGCCCAGCT |
| | ADAQEENLYAAV | GCCGATGCCCAGGAAGAAAACCTCTATGCTGCCGTG |
| | KHTQPEDGVEMD | AAGCACACACAGCCTGAGGATGGGGTGGAGATGGAC |
| | TRSPHDEDPQAV | ACTCGGAGCCCACACGATGAAGACCCCCAGGCAGTG |
| | TYAEVKHSRPRR | ACGTATGCCGAGGTGAAACACTCCAGACCTAGGAGA |
| | EMASPPSPLSGE | GAAATGGCCTCTCCTCCTTCCCCACTGTCTGGGGAA |
| | FLDTKDRQAEED | TTCCTGGACACAAAGGACAGACAGGCGGAAGAGGAC |
| | RQMDTEAAASEA | AGGCAGATGGACACTGAGGCTGCTGCATCTGAAGCC |
| | PQDVTYAQLHSL | CCCCAGGATGTGACCTACGCCCAGCTGCACAGCTTG |
| | TLRREATEPPPS | ACCCTCAGACGGGAGGCAACTGAGCCTCCTCCATCC |
| | QEGPSPAVPSIY | CAGGAAGGGCCCTCTCCAGCTGTGCCCAGCATCTAC |
| | ATLAIH (SEQ | GCCACTCTGGCCATCCACTAG (SEQ ID NO: |
| | ID NO: 305) | 306) |
| C-2163 | MDMRVPAQLLGL | ATGGACATGAGGGTCCCCGCTCAGCTCCTGGGGCTC |
| | LLLWLRGARCQV | CTGCTACTCTGGCTCCGAGGTGCCAGATGTCAGGTG |
| | QLVQSGAEVKKP | CAGCTGGTGCAGTCTGGGGCTGAGGTGAAGAAGCCT |
| | GSSVKVSCKASG | GGGTCCTCAGTGAAGGTTTCCTGCAAGGCTTCTGGA |
| | YTFTSYHMHWVR | TACACCTTCACTAGCTATCATATGCATTGGGTGCGC |
| | QAPGQGLEWIGY | CAGGCCCCCGGACAAGGGCTTGAGTGGATCGGATAC |
| | IYPGNVNTEYNE | ATCTACCCTGGCAATGTTAACACAGAATATAATGAG |
| | KFKGKATLTADK | AAGTTCAAGGGCAAAGCCACCCTTACCGCGGACAAA |
| | STNTAYMELSSL | TCCACGAACACAGCCTACATGGAGCTGAGCAGCCTG |
| | RSEDTAVYFCAR | AGATCTGAAGACACGGCTGTGTATTTCTGTGCGAGG |
| | EEITYAMDYWGQ | GAGGAAATTACCTACGCTATGGACTACTGGGGCCAG |
| | GTLVTVSSGGGG | GGAACCCTGGTCACCGTGTCCTCAGGCGGAGGTGGA |
| | SGGGGSGGGGSG | AGCGGAGGGGGAGGATCTGGCGGCGGAGGAAGCGGA |
| | GDVQMTQSPSTL | GGCGACGTTCAAATGACCCAGAGCCCATCCACCCTG |
| | SASVGDRVTITC | AGCGCATCTGTAGGTGACCGGGTCACCATCACTTGT |
| | SSSQSIVHSNGN | AGCTCCAGTCAGAGTATTGTACACAGTAATGGGAAC |
| | TYMEWYQQKPGK | ACCTATATGGAATGGTATCAGCAGAAACCAGGTAAA |
| | APKLLIYKVSNR | GCCCCAAAATTGCTCATCTACAAAGTCTCTAACAGA |
| | FSGVPDRFSGSG | TTTAGTGGTGTACCAGACAGGTTCAGCGGTTCCGGA |
| | SGTEFTLTISSL | AGTGGTACTGAATTCACCCTCACGATCTCCTCTCTC |
| | QPDDFATYYCHQ | CAGCCAGATGATTTCGCCACTTATTACTGTCATCAA |
| | GSHVPRTFGQGT | GGTTCACATGTGCCGCGCACATTCGGTCAGGGTACT |
| | KVEVKYGSQSSK | AAAGTAGAAGTCAAATACGGCTCACAGAGCTCCAAA |
| | PYLLTHPSDPLE | CCCTACCTGCTGACTCACCCCAGTGACCCCCTGGAG |
| | LVVSGPSGGPSS | CTCGTGGTCTCAGGACCGTCTGGGGGCCCCAGCTCC |
| | PTTGPTSTSGPE | CCGACAACAGGCCCCACCTCCACATCTGGCCCTGAG |
| | DQPLTPTGSDPQ | GACCAGCCCCTCACCCCCACCGGGTCGGATCCCCAG |
| | SGLGRHLGVVIG | AGTGGTCTGGGAAGGCACCTGGGGGTTGTGATCGGC |
| | ILVAVILLLLLL | ATCTTGGTGGCCGTCATCCTACTGCTCCTCCTCCTC |
| | LLLFLILRHRRQ | CTCCTCCTCTTCCTCATCCTCCGACATCGACGTCAG |
| | GKHWTSTQRKAD | GGCAAACACTGGACATCGACCCAGAGAAAGGCTGAT |
| | FQHPAGAVGPEP | TTCCAACATCCTGCAGGGGCTGTGGGGCCAGAGCCC |
| | TDRGLQWRSSPA | ACAGACAGAGGCCTGCAGTGGAGGTCCAGCCCAGCT |
| | ADAQEENLYAAV | GCCGATGCCCAGGAAGAAAACCTCTATGCTGCCGTG |
| | KHTQPEDGVEMD | AAGCACACACAGCCTGAGGATGGGGTGGAGATGGAC |
| | TRSPHDEDPQAV | ACTCGGAGCCCACACGATGAAGACCCCCAGGCAGTG |
| | TYAEVKHSRPRR | ACGTATGCCGAGGTGAAACACTCCAGACCTAGGAGA |
| | EMASPPSPLSGE | GAAATGGCCTCTCCTCCTTCCCCACTGTCTGGGGAA |
| | FLDTKDRQAEED | TTCCTGGACACAAAGGACAGACAGGCGGAAGAGGAC |
| | RQMDTEAAASEA | AGGCAGATGGACACTGAGGCTGCTGCATCTGAAGCC |
| | PQDVTYAQLHSL | CCCCAGGATGTGACCTACGCCCAGCTGCACAGCTTG |
| | TLRREATEPPPS | ACCCTCAGACGGGAGGCAACTGAGCCTCCTCCATCC |
| | QEGPSPAVPSIY | CAGGAAGGGCCCTCTCCAGCTGTGCCCAGCATCTAC |
| | ATLAIH (SEQ | GCCACTCTGGCCATCCACTAG (SEQ ID NO: |
| | ID NO: 307) | 308) |

### Example 5: Inhibition of HER CAR-Mediated Primary T Cell Activation by the HLA-A*02 Inhibitory Receptor is Reversible

[0625] The ability of the HLA-A*02 LIR1 inhibitory receptor to inhibit HER2 mediated activation of primary T cells expressing a HER2 CAR was reversible. Primary T cells expressing HER2 CAR1 (CT292) alone or in combination with the CT1765 HLA-A*02 inhibitory receptor were co-cultured with HCT.116 cells expressing both HER2 and HLA-A*02 (FIG. 9, RD1, or round 1) at a ratio of 1:1. HCT.116 target cells were then removed, and the primary T cells were co-cultured with HCT.116 target cells expressing HER2 only (FIG. 9, RD2, or round 2) at a ratio of 1:1. Finally, primary T cells were again co-cultured with HCT.116 cells expressing both HER2 and HLA-A*02, or HER2 alone as a control (FIG. 9, RD3, or round 3) at a ratio of 1:1. As can be seen in FIG. 9, activation and inactivation of the T cells was reversible. In addition, T cells expressing only the HER2 CAR were exhausted by round 3 of co-culture, while T cells that expressed both the HER2 CAR and the HLA-A*02 LIR1 inhibitory receptor were not.

### Example 6: Activity of Primary T Cells Expressing HER2 CAR and HLA-A*02 Inhibitory Receptor in a Mouse Xenograft Model

[0626] The optimal dose of T cells to be used for in vivo treatments and studies was assayed using a mouse xenograft model. Mice were implanted with 5e6 target cells in each flank. Target cells were HCT.116 wild type cells (“normal” cells) which are HER2+ and HLA-A*02 positive, or HCT.116 in which HLA-A*02 had been knocked out (“tumor” cells). The normal target cells were grafted in one flank and the tumor cells were grafted in the other flank. Mice were treated with T cells from HLA-A*02 negative donors which were either untransduced, or transduced with the HER2 CAR1 activator receptor (CT292) in combination with the C2162 HLA-A*02 LIR1 inhibitory receptor. Xenograft model mice were injected with 2e6, 5e6, or 10e6 total T cells, and tumor volume was monitored in the days following T cell injection. A diagram of the experiment is shown in FIG. 10. As seen in FIG. 11, T cells expressing the combination of the HER2 CAR and the HLA-A*02 LIR inhibitory receptor showed cytotoxicity and blocking effect in the xenograft in vivo model and a dose of 1e7 total T cells per mouse.

### Example 7: Activity of HER2 CAR and HLA-A*02 Inhibitory Receptor Expressed in Jurkat Cells

[0627] Nine candidates of receptor pairs were tested. scFvs CT292, CT299, or CT1094 were paired with no modules (CAR only), murine blocker (C1765), humanized blocker 1 (C2162), or humanized blocker 2 (C2163). The various combinations of blockers and inhibitors are shown in Table 27.

[0628] Activator and blocker sensitivity was measured using the mRNA titration assay. mRNA was titrated and used to transfect HER2− HeLa target cells, which was then cocultured with Jurkat cells expressing the appropriate HER2 constructs and NFAT luciferase. After 6 hours of coculture, Jurkat cell activation was measured by luminescence intensity. Results are shown in FIG. 14 and summarized in Table 27. Blocker C2163 showed similar blocking activity to C2162 with lower level of activation and was not studied further.

TABLE 27
HER2 CARs and Inhibitory Receptors Screened

| | | | EC50 | IC50 | | |
|---|---|---|---|---|---|---|
| Activator | | | (molecules/ | (molecules/ | T cell | T cell Killing/ |
| scFv | Blocker | Construct | cell) | cell) | Expression | Blocking |
| CT292 | N/A | CT292 | 7,200 | N/A | +++ | ++ |
| | Murine | CT1110 | 7,600 | 28,000 | ++ | ++/++ |
| | Human-1 | CT1118 | 7,000 | 17,000 | + | ++/++ |
| | Human-2 | CT1184 | 6,400 | 44,800 | N/D | N/D |
| CT299 | N/A | CT299 | 7,800 | N/A | + | + |
| | Murine | CT1112 | 5,500 | 33,700 | + | +/+ |
| | Human-1 | CT1120 | 5,800 | 22,800 | + | +/++ |
| | Human-2 | CT1186 | 5,200 | 33,300 | N/D | N/D |
| CT1094 | N/A | CT1094 | 6,500 | N/A | +++ | ++ |
| | Murine | CT1113 | 4,900 | 38,800 | +++ | ++/++ |
| | Human-1 | CT1121 | 4,600 | 37,900 | ++ | ++/++ |
| | Human-2 | CT1187 | 4,500 | 87,400 | N/D | N/D |

### Example 8: Selective Cell Killing by Primary T Cell Expressing HER2 CAR and HLA-A*02 Inhibitory Receptor

[0629] Primary T cells were transduced with six activator-blocker receptor pairs and measured for acute cytotoxicity function on HeLa target cells at 1:1 E:T ratio. Cells were transfected with a HER2 CAR (CT292, CT299, or CT1094) only or with HER2 CAR and blockers in murine form (C1765) or humanized form (C2162). Results are shown in FIG. 15. Cell transfected with any one of the receptor pairs tested selectively killed tumor cells but spared normal cells, while cells transfected with CARs only killed both cell types.

[0630] Primary T cells were transduced with HER2 CAR CT292 and human blocker 1 (CT1118 cells) or with HER2 CAR CT1094 and human blocker 1 (CT1121 cells) and co-cultured with A375 normal (HLA-A*02-proficient) or tumor (HLA-A*02-deficient) target cells over a wide range of E:T ratios for 48 hours, and the maximum specific killing at each E:T ratio was recorded. The data was fitted using nonlinear regression to derive the E:T ratio giving rise to 50% maximum cytotoxicity (EC50). Results are shown in FIG. 16, where the fold-change of EC50 from tumor to normal target cells is indicated as the selectivity ratio. This analysis was conducted in two individual HLA-A*02− T cell donors (left vs right). Overall, the CT1211 receptor combination is more potent than CT1118. Both constructs are selective, but the CT1118 receptor combination appears to protect normal A375 target cells better over the range of E:T ratios tested.

### Example 9: Further Characterization of the CT1118 Receptor Combination

[0631] The CT1118 receptor combination (CT292 CAR and human blocker CT2162) was benchmarked against the CT292 CAR alone. Primary T cells were transduced with CT292 alone or in combination with CT2162 and acute cytotoxicity at 1:1 E:T ratio on HeLa target cells or A375 target cells was evaluated. Results are shown in FIG. 17. CT292 cells killed both tumor and normal cells than CT1118 cells. CT1118 cells killed tumor cells with similar efficiency as the CT292 cells while sparing normal cells, thus demonstrating improved selectivity of the receptor combination over the CAR alone.

[0632] Next, the activity and selectivity of the CT1118 cells was evaluated after rechallenge. Results are shown in FIG. 18. Primary CT292 T cells and CT1118 T cells maintained similar potency for up to three 48-hour rounds of tumor rechallenge on HER2+/HLA-A*02− HeLa target cells at 1:1 E:T ratio. However, the CT1118 cells continuously spared HER2+/HLA-A*02+ HeLa target cells, while CT292 cells did not.

### Example 10: Reversibility of CT1118 Function

[0633] The reversibility of the function of CT292 and CT1118 cells was evaluated by coculturing CT292 cells and CT1118 cells with HeLa isotypes of tumor (target A; HER2+/HLA-A*02−) or normal (target AB; HER2+/HLA-A*02+) for 48 hours per round at 1:1 E:T ratio. Results are shown in FIG. 19. CT292 T cells killed both cell types while CT1118 cells showed reversible activation. Moreover, CT1118 cells showed inactivation of Text use cytotoxicity, which was dependent on the HLA-A*02 status. This reversibility of function was observed regardless of the sequence of exposure, tumor [symbol] normal [symbol] tumor or normal [symbol] top [symbol] normal. FIG. 20 shows images of the target cells at t=48 hrs for each sequence (left panel: tumor [symbol] normal [symbol] tumor; right panel: normal [symbol] tumor [symbol] normal). Regardless of the sequence, CT1118 cells exhibited reversible function. UTD treatment resulted in healthy, adherent target cells regardless of HLA-A*02 expression while CT292 cells killed both tumor and normal target cells. CT1118 cells selectively killed tumor cells but spared normal cells

### Example 11: Selectivity Toxicity of CT1118 in Mixed Culture

[0634] Selective cytotoxicity was assessed by coculturing CT292 cells or CT1118 cells with tumor and normal HeLa target cells mixed at a 1:1 ratio for three 48-hour rounds. Results are shown in FIG. 21. CT1118 cells showed continuous selective killing of tumor cells, whereas CT292 cells killed both cell types. FIG. 22 shows images of tumor and normal HeLa target cells in a mixed culture after 20 hours of coculture with untransduced T cells, CT292 cells, or CT1118 cells. CT292 cells killed both normal and tumor cells, while CT1118 cells selectively killed tumor cells. FIG. 23 shows that the selectivity of CT1118 is maintained after a rechallenge for 24 hours.

### Example 12: Effects of CT292 In Vivo

[0635] 1E6 A375 A2+ (normal) and A2− (tumor) were grafted on each flank of the NSG mice on day 0. A375 cells have HER2 and HLA-A2 expression similar to the EC50 and IC50 of CT1118, respectively (FIG. 24). On day 8, untransduced (“UTD”), CT292 cells, and CT1118 cells were injected at 20 million cells per mouse. Tumor volumes were measured by caliper every 2-3 days after injection.

[0636] Results are shown in FIG. 25. CT292 cells reduced both tumor and normal xenografts, while CT1118 cells selectively reduced the tumor xenograft but not the normal xenograft.

### Example 13: In Vitro Efficacy of CT292 Paired with HLA-A03, HLA-A*11 or HLA-B807 Blockers

[0637] Jurkat NFAT luciferase (JNL) cell inhibition with the CT292 paired with either HLA-A*03:01 blocker 26 (comprising an scFv of SEQ ID NO: 405), HLA-A*11:01 blocker 4 (comprising an scFv of SEQ ID NO: 345), or HLA-B*07:02 blocker BB7.1 (comprising an scFv of SEQ ID NO: 21806) was measured in an mRNA titration assay.

[0638] JNL cell activation was measured in an mRNA titration assay using HeLa cells transfected with mRNA. HeLa cells were transfected with serially-diluted mRNA encoding either the A*03:01, A*11:01, or B*07:02 blocker. JNL cells were transiently transfected with CT292 and negative control vector (open circle), or CT292 and either the HLA-A*03:01, HLA-A*11:01, or HLA-B*07:02 blocker (closed circle). The functional response was assessed after a 6-hour co-culture of 5,000 JNL cells and 5,000 HeLa cells. Data are shown in FIGS. 26A-26C. The results show that all blockers block activation of the HER2 CAR in the presence of titrated corresponding HLA mRNAs.

[0639] HLA-A*11:01 or HLA-B*07:02 protein on the surface of HeLa cells upon mRNA transfection was assessed by flow cytometer. HeLa cells were transfected with 2× serially-diluted mRNA encoding either FLAG-tagged HLA-A*11:01 or FLAG-tagged HLA-B*07:02 with top dose of 2000 ng per 200,000 HeLa cells. Cells were transfected using the 4D nucleofector X-Unit (Lonza) in the 20 uL format, according to manufacturer's instructions. Transfected cells were transferred to MEM media containing 10% FBS and 0.1% penicillin and streptomycin and incubated at 37° C., 5% CO₂ for 16-24 hours. On the next day, cells were mechanically detached and washed twice with 100 uL FACS buffer (PBS+1% BSA), then stained with either anti-HLA*A11:01 (One Lambda 0284HA) or anti-B*07:02 mRNA (BB7.1) antibody for 30 minutes on ice. After 2× wash with 100 uL FACS buffer, cells were stained with either anti-mouse IgG FITC or APC secondary antibody for 30 minutes on ice. Cells were then washed twice with FACS buffer and fluorescence was measured. Results are shown in FIG. 27, where the bottom panel contains 0 ng mRNA.

1.-60. (canceled)

61. A T cell responsive to loss of heterozygosity at an HLA-A*03 allele in a cancer cell, comprising:
(a) an activator receptor comprising an extracellular ligand binding domain specific to an erb-b2 receptor tyrosine kinase 2 (HER2) antigen, wherein the activator receptor comprises a polypeptide sequence at least 80% identical to SEQ ID NO: 291, wherein the extracellular ligand binding domain of the activator receptor comprises an scFv comprising:
(i) a heavy chain variable (VH) region comprising complement determining regions (CDRs) CDR-H1 of SEQ ID NO: 36, CDR-H2 of SEQ ID NO: 38, and CDR-H3 of SEQ ID NO: 41; and
(ii) a light chain variable region (VL) comprising CDRs CDR-L1 of SEQ ID NO: 30, CDR-L2 of SEQ ID NO: 32, and CDR-L3 of SEQ ID NO: 34,
(b) an inhibitory receptor comprising an extracellular ligand binding domain specific to an HLA-A*03 allele of HLA-A, wherein the inhibitory receptor comprises a polypeptide sequence at least 80% identical to SEQ ID NO: 305, wherein the extracellular ligand binding domain of the inhibitory receptor comprises an scFv comprising:
(i) VH region comprising CDRs CDR-H1 of SEQ ID NO: 95, CDR-H2 of SEQ ID NO: 98, and CDR-H3 of SEQ ID NO: 101; and
(ii) a VL region comprising CDRs CDR-L1 of SEQ ID NO: 87, CDR-L2 of SEQ ID NO: 90 or SEQ ID NO: 91, and CDR-L3 of SEQ ID NO: 92.

62. The T cell of claim 61, wherein the activator receptor and the inhibitory receptor together specifically activate the T cell in the presence of the cancer cell.

63. The T cell of claim 61, wherein the T cell is a CD8+ CD4− T cell.

64. The T cell of claim 61, wherein the T cell is a CD8− CD4+ T cell.

65. The T cell of claim 61, wherein the T cell is a CD8− CD4− T cell.

66. The T cell of claim 61, wherein the scFv comprises a sequence at least 97% identical to SEQ ID NO: 51.

67. The T cell of claim 61, wherein the activator receptor is a chimeric antigen receptor (CAR) and wherein the CAR comprises a CD8 hinge.

68. The T cell of claim 68, wherein the CAR comprises a transmembrane domain isolated or derived from CD8 or CD28.

69. The T cell of claim 69, wherein the CAR comprises CD28, 4-1BB and CD3z intracellular domains.

70. The T cell of claim 61, wherein the inhibitory receptor comprises LILRB1 hinge and transmembrane domains.

71. The T cell of claim 61, wherein the T cell is modified to inactivate, reduce, or eliminate expression or function of an endogenous gene encoding an allele of an endogenous MHC class I polypeptide.

72. The T cell of claim 71, wherein the T cell is modified to reduce or eliminate expression of a B2M gene product.

73. A pharmaceutical composition, comprising a therapeutically effective amount of the T cells of claim 61.

74. A polynucleotide system, comprising one or more polynucleotides comprising polynucleotide sequences encoding:
(a) an activator receptor comprising an extracellular ligand binding domain specific to an erb-b2 receptor tyrosine kinase 2 (HER2) antigen, wherein the activator receptor comprises a polypeptide sequence at least 80% identical to SEQ ID NO: 291, wherein the extracellular ligand binding domain of the activator receptor comprises an scFv comprising:
(i) a heavy chain variable (VH) region comprising complement determining regions (CDRs) CDR-H1 of SEQ ID NO: 36, CDR-H2 of SEQ ID NO: 38, and CDR-H3 of SEQ ID NO: 41; and
(ii) a light chain variable region (VL) comprising CDRs CDR-L1 of SEQ ID NO: 30, CDR-L2 of SEQ ID NO: 32, and CDR-L3 of SEQ ID NO: 34; and
(b) an inhibitory receptor comprising an extracellular ligand binding domain specific to an HLA-A*03 allele of HLA-A, wherein the inhibitory receptor comprises a polypeptide sequence at least 80% identical to SEQ ID NO: 305, wherein the extracellular ligand binding domain of the inhibitory receptor comprises an scFv comprising:
(i) VH region comprising CDRs CDR-H1 of SEQ ID NO: 95, CDR-H2 of SEQ ID NO: 98, and CDR-H3 of SEQ ID NO: 101; and
(ii) a VL region comprising CDRs CDR-L1 of SEQ ID NO: 87, CDR-L2 of SEQ ID NO: 90 or SEQ ID NO: 91, and CDR-L3 of SEQ ID NO: 92.

75. A vector, comprising the polynucleotide system of claim 74.

76. A method of treating a HER2+ cancer in a subject identified as having or suspected of having a loss of heterozygosity at an HLA-A*03 allele of HLA-A in the HER2-positive cancer, comprising administering to the subject the T cells of claim 61.

77. A T cell responsive to loss of heterozygosity at an HLA-A*03 allele in a cancer cell, comprising:
(a) a polynucleotide comprising a polynucleotide sequence at least 80% identical to SEQ ID NO: 292, or encoding an activator receptor comprising an extracellular ligand binding domain specific to an erb-b2 receptor tyrosine kinase 2 (HER2) antigen, wherein the activator receptor comprises a polypeptide sequence at least 80% identical to SEQ ID NO: 291, wherein the extracellular ligand binding domain of the activator receptor comprises an scFv comprising:
(i) a heavy chain variable (VH) region comprising complement determining regions (CDRs) CDR-H1 of SEQ ID NO: 36, CDR-H2 of SEQ ID NO: 38, and CDR-H3 of SEQ ID NO: 41; and
(ii) a light chain variable region (VL) comprising CDRs CDR-L1 of SEQ ID NO: 30, CDR-L2 of SEQ ID NO: 32, and CDR-L3 of SEQ ID NO: 34; and
(b) a polynucleotide comprising a polynucleotide sequence at least 80% identical to SEQ ID NO: 306, or encoding an inhibitory receptor comprising an extracellular ligand binding domain specific to an HLA-A*03 allele of HLA-A, wherein the inhibitory receptor comprises a polypeptide sequence at least 80% identical to SEQ ID NO: 305, wherein the extracellular ligand binding domain of the inhibitory receptor comprises an scFv comprising:
(i) VH region comprising CDRs CDR-H1 of SEQ ID NO: 95, CDR-H2 of SEQ ID NO: 98, and CDR-H3 of SEQ ID NO: 101; and
(ii) a VL region comprising CDRs CDR-L1 of SEQ ID NO: 87, CDR-L2 of SEQ ID NO: 90 or SEQ ID NO: 91, and CDR-L3 of SEQ ID NO: 92.

78. The T cell of claim 77, wherein the activator receptor and the inhibitory receptor together specifically activate the T cell in the presence of the cancer cell.

79. The T cell of claim 77, wherein the T cell is a CD8+ CD4− T cell.

80. The T cell of claim 77, wherein the T cell is a CD8− CD4+ T cell.

81. The T cell of claim 77, wherein the T cell is a CD8− CD4− T cell.

The application's sequence listing, which the Patent Office published only in electronic form, follows.

SEQUENCE LISTING (21806 sequences)

SEQ ID NO: 1 - protein, 10 aa, synthetic construct
  REGION 1..10: note = Linker
GGGSSGGGSG

SEQ ID NO: 2 - protein, 1255 aa, synthetic construct [sequence omitted]

SEQ ID NO: 3 - protein, 1225 aa, synthetic construct
  REGION 1..1225: note = her2 isoform b
MKLRLPASPETHLDMLRHLYQGCQVVQGNLELTYLPTNASLSFLQDIQEVQGYVLIAHNQVRQVPLQRLRIVRGTQLFEDNYALAVLDNGDPLNNTTPVTGASPGGLRELQLRSLTEILKGGVLIQRNPQLCYQDTILWKDIFHKNNQLALTLIDTNRSRACHPCSPMCKGSRCWGESSEDCQSLTRTVCAGGCARCKGPLPTDCCHEQCAAGCTGPKHSDCLACLHFNHSGICELHCPALVTYNTDTFESMPNPEGRYTFGASCVTACPYNYLSTDVGSCTLVCPLHNQEVTAEDGTQRCEKCSKPCARVCYGLGMEHLREVRAVTSANIQEFAGCKKIFGSLAFLPESFDGDPASNTAPLQPEQLQVFETLEEITGYLYISAWPDSLPDLSVFQNLQVIRGRILHNGAYSLTLQGLGISWLGLRSLRELGSGLALIHHNTHLCFVHTVPWDQLFRNPHQALLHTANRPEDECVGEGLACHQLCARGHCWGPGPTQCVNCSQFLRGQECVEECRVLQGLPREYVNARHCLPCHPECQPQNGSVTCFGPEADQCVACAHYKDPPFCVARCPSGVKPDLSYMPIWKFPDEEGACQPCPINCTHSCVDLDDKGCPAEQRASPLTSIISAVVGILLVVVLGVVFGILIKRRQQKIRKYTMRRLLQETELVEPLTPSGAMPNQAQMRILKETELRKVKVLGSGAFGTVYKGIWIPDGENVKIPVAIKVLRENTSPKANKEILDEAYVMAGVGSPYVSRLLGICLTSTVQLVTQLMPYGCLLDHVRENRGRLGSQDLLNWCMQIAKGMSYLEDVRLVHRDLAARNVLVKSPNHVKITDFGLARLLDIDETEYHADGGKVPIKWMALESILRRRFTHQSDVWSYGVTVWELMTFGAKPYDGIPAREIPDLLEKGERLPQPPICTIDVYMIMVKCWMIDSECRPRFRELVSEFSRMARDPQRFVVIQNEDLGPASPLDSTFYRSLLEDDDMGDLVDAEEYLVPQQGFFCPDPAPGAGGMVHHRHRSSSTRSGGGDLTLGLEPSEEEAPRSPLAPSEGAGSDVFDGDLGMGAAKGLQSLPTHDPSPLQRYSEDPTVPLPSETDGYVAPLTCSPQPEYVNQPDVRPQPPSPREGPLPAARPAGATLERPKTLSPGKNGVVKDVFAFGGAVENPEYLTPQGGAAPQPHPPPAFSPAFDNLYYWDQDPPERGAPPSTFKGTPTAENPEYLGLDVPV

SEQ ID NO: 4 - protein, 1240 aa, synthetic construct
  REGION 1..1240: note = her2 isoform c
MPRGSWKPQVCTGTDMKLRLPASPETHLDMLRHLYQGCQVVQGNLELTYLPTNASLSFLQDIQEVQGYVLIAHNQVRQVPLQRLRIVRGTQLFEDNYALAVLDNGDPLNNTTPVTGASPGGLRELQLRSLTEILKGGVLIQRNPQLCYQDTILWKDIFHKNNQLALTLIDTNRSRACHPCSPMCKGSRCWGESSEDCQSLTRTVCAGGCARCKGPLPTDCCHEQCAAGCTGPKHSDCLACLHFNHSGICELHCPALVTYNTDTFESMPNPEGRYTFGASCVTACPYNYLSTDVGSCTLVCPLHNQEVTAEDGTQRCEKCSKPCARVCYGLGMEHLREVRAVTSANIQEFAGCKKIFGSLAFLPESFDGDPASNTAPLQPEQLQVFETLEEITGYLYISAWPDSLPDLSVFQNLQVIRGRILHNGAYSLTLQGLGISWLGLRSLRELGSGLALIHHNTHLCFVHTVPWDQLFRNPHQALLHTANRPEDECVGEGLACHQLCARGHCWGPGPTQCVNCSQFLRGQECVEECRVLQGLPREYVNARHCLPCHPECQPQNGSVTCFGPEADQCVACAHYKDPPFCVARCPSGVKPDLSYMPIWKFPDEEGACQPCPINCTHSCVDLDDKGCPAEQRASPLTSIISAVVGILLVVVLGVVFGILIKRRQQKIRKYTMRRLLQETELVEPLTPSGAMPNQAQMRILKETELRKVKVLGSGAFGTVYKGIWIPDGENVKIPVAIKVLRENTSPKANKEILDEAYVMAGVGSPYVSRLLGICLTSTVQLVTQLMPYGCLLDHVRENRGRLGSQDLLNWCMQIAKGMSYLEDVRLVHRDLAARNVLVKSPNHVKITDFGLARLLDIDETEYHADGGKVPIKWMALESILRRRFTHQSDVWSYGVTVWELMTFGAKPYDGIPAREIPDLLEKGERLPQPPICTIDVYMIMVKCWMIDSECRPRFRELVSEFSRMARDPQRFVVIQNEDLGPASPLDSTFYRSLLEDDDMGDLVDAEEYLVPQQGFFCPDPAPGAGGMVHHRHRSSSTRSGGGDLTLGLEPSEEEAPRSPLAPSEGAGSDVFDGDLGMGAAKGLQSLPTHDPSPLQRYSEDPTVPLPSETDGYVAPLTCSPQPEYVNQPDVRPQPPSPREGPLPAARPAGATLERPKTLSPGKNGVVKDVFAFGGAVENPEYLTPQGGAAPQPHPPPAFSPAFDNLYYWDQDPPERGAPPSTFKGTPTAENPEYLGLDVPV

SEQ ID NO: 5 - protein, 1055 aa, synthetic construct
  REGION 1..1055: note = her2 isoform d
MELAALCRWGLLLALLPPGAASTQVCTGTDMKLRLPASPETHLDMLRHLYQGCQVVQGNLELTYLPTNASLSFLQDIQEVQGYVLIAHNQVRQVPLQRLRIVRGTQLFEDNYALAVLDNGDPLNNTTPVTGASPGGLRELQLRSLTEILKGGVLIQRNPQLCYQDTILWKDIFHKNNQLALTLIDTNRSRACHPCSPMCKGSRCWGESSEDCQSLTRTVCAGGCARCKGPLPTDCCHEQCAAGCTGPKHSDCLACLHFNHSGICELHCPALVTYNTDTFESMPNPEGRYTFGASCVTACPYNYLSTDVGSCTLVCPLHNQEVTAEDGTQRCEKCSKPCARVCYGLGMEHLREVRAVTSANIQEFAGCKKIFGSLAFLPESFDGDPASNTAPLQPEQLQVFETLEEITGYLYISAWPDSLPDLSVFQNLQVIRGRILHNGAYSLTLQGLGISWLGLRSLRELGSGLALIHHNTHLCFVHTVPWDQLFRNPHQALLHTANRPEDECVGEGLACHQLCARGHCWGPGPTQCVNCSQFLRGQECVEECRVLQGLPREYVNARHCLPCHPECQPQNGSVTCFGPEADQCVACAHYKDPPFCVARCPSGVKPDLSYMPIWKFPDEEGACQPCPINCTHSCVDLDDKGCPAEQRASPLTSIISAVVGILLVVVLGVVFGILIKRRQQKIRKYTMRRLLQETELVEPLTPSGAMPNQAQMRILKETELRKVKVLGSGAFGTVYKGIWIPDGENVKIPVAIKVLRENTSPKANKEILDEAYVMAGVGSPYVSRLLGICLTSTVQLVTQLMPYGCLLDHVRENRGRLGSQDLLNWCMQIAKGMSYLEDVRLVHRDLAARNVLVKSPNHVKITDFGLARLLDIDETEYHADGGKVPIKWMALESILRRRFTHQSDVWSYGVTVWELMTFGAKPYDGIPAREIPDLLEKGERLPQPPICTIDVYMIMVKCWMIDSECRPRFRELVSEFSRMARDPQRFVVIQNEDLGPASPLDSTFYRSLLEDDDMGDLVDAEEYLVPQQGFFCPDPAPGAGGMVHHRHRSSSTRNM

SEQ ID NO: 6 - protein, 603 aa, synthetic construct
  REGION 1..603: note = her2 isoform e
MKLRLPASPETHLDMLRHLYQGCQVVQGNLELTYLPTNASLSFLQDIQEVQGYVLIAHNQVRQVPLQRLRIVRGTQLFEDNYALAVLDNGDPLNNTTPVTGASPGGLRELQLRSLTEILKGGVLIQRNPQLCYQDTILWKDIFHKNNQLALTLIDTNRSRACHPCSPMCKGSRCWGESSEDCQSLTRTVCAGGCARCKGPLPTDCCHEQCAAGCTGPKHSDCLACLHFNHSGICELHCPALVTYNTDTFESMPNPEGRYTFGASCVTACPYNYLSTDVGSCTLVCPLHNQEVTAEDGTQRCEKCSKPCARVCYGLGMEHLREVRAVTSANIQEFAGCKKIFGSLAFLPESFDGDPASNTAPLQPEQLQVFETLEEITGYLYISAWPDSLPDLSVFQNLQVIRGRILHNGAYSLTLQGLGISWLGLRSLRELGSGLALIHHNTHLCFVHTVPWDQLFRNPHQALLHTANRPEDECVGEGLACHQLCARGHCWGPGPTQCVNCSQFLRGQECVEECRVLQGLPREYVNARHCLPCHPECQPQNGSVTCFGPEADQCVACAHYKDPPFCVARCPSGVKPDLSYMPIWKFPDEEGACQPCPINCTHS

SEQ ID NO: 7 - protein, 1294 aa, synthetic construct
  REGION 1..1294: note = her2 isoform f
MELAALCRWGLLLALLPPGAASTQVCTGTDMKLRLPASPETHLDMLRHLYQGCQVVQGNLELTYLPTNASLSFLQDIQEVQGYVLIAHNQVRQVPLQRLRIVRGTQLFEDNYALAVLDNGDPLNNTTPVTGASPGGLRELQLRSLTEILKGGVLIQRNPQLCYQDTILWKDIFHKNNQLALTLIDTNRSRACHPCSPMCKGSRCWGESSEDCQSLTRTVCAGGCARCKGPLPTDCCHEQCAAGCTGPKHSDCLACLHFNHSGICELHCPALVTYNTDTFESMPNPEGRYTFGASCVTACPYNYLSTDVGSCTLVCPLHNQEVTAEDGTQRCEKCSKPCARVCYGLGMEHLREVRAVTSANIQEFAGCKKIFGSLAFLPESFDGVSLCQQAGVQWYDLGSLQPLPPGFKQFSCLSLLSSWDYRDPASNTAPLQPEQLQVFETLEEITGYLYISAWPDSLPDLSVFQNLQVIRGRILHNGAYSLTLQGLGISWLGLRSLRELGSGLALIHHNTHLCFVHTVPWDQLFRNPHQALLHTANRPEDECVGEGLACHQLCARGHCWGPGPTQCVNCSQFLRGQECVEECRVLQGLPREYVNARHCLPCHPECQPQNGSVTCFGPEADQCVACAHYKDPPFCVARCPSGVKPDLSYMPIWKFPDEEGACQPCPINCTHSCVDLDDKGCPAEQRASPLTSIISAVVGILLVVVLGVVFGILIKRRQQKIRKYTMRRLLQETELVEPLTPSGAMPNQAQMRILKETELRKVKVLGSGAFGTVYKGIWIPDGENVKIPVAIKVLRENTSPKANKEILDEAYVMAGVGSPYVSRLLGICLTSTVQLVTQLMPYGCLLDHVRENRGRLGSQDLLNWCMQIAKGMSYLEDVRLVHRDLAARNVLVKSPNHVKITDFGLARLLDIDETEYHADGGKVPIKWMALESILRRRFTHQSDVWSYGVTVWELMTFGAKPYDGIPAREIPDLLEKGERLPQPPICTIDVYMIMVKCWMIDSECRPRFRELVSEFSRMARDPQRFVVIQNEDLGPASPLDSTFYRSLLEDDDMGDLVDAEEYLVPQQGFFCPDPAPGAGGMVHHRHRSSSTRSGGGDLTLGLEPSEEEAPRSPLAPSEGAGSDVFDGDLGMGAAKGLQSLPTHDPSPLQRYSEDPTVPLPSETDGYVAPLTCSPQPEYVNQPDVRPQPPSPREGPLPAARPAGATLERPKTLSPGKNGVVKDVFAFGGAVENPEYLTPQGGAAPQPHPPPAFSPAFDNLYYWDQDPPERGAPPSTFKGTPTAENPEYLGLDVPV

SEQ ID NO: 8 - protein, 1289 aa, synthetic construct
  REGION 1..1289: note = her2 isoform g
MELAALCRWGLLLALLPPGAASTQVCTGTDMKLRLPASPETHLDMLRHLYQGCQVVQGNLELTYLPTNASLSFLQDIQEVQGYVLIAHNQVRQVPLQRLRIVRGTQLFEDNYALAVLDNGDPLNNTTPVTGASPGGLRELQLRSLTEILKGGVLIQRNPQLCYQDTILWKDIFHKNNQLALTLIDTNRSRACHPCSPMCKGSRCWGESSEDCQSLTRTVCAGGCARCKGPLPTDCCHEQCAAGCTGPKHSDCLACLHFNHSGICELHCPALVTYNTDTFESMPNPEGRYTFGASCVTACPYNYLSTDVGSCTLVCPLHNQEVTAEDGTQRCEKCSKPCARVCYGLGMEHLREVRAVTSANIQEFAGCKKIFGSLAFLPESFDGDPASNTAPLQPEQLQVFETLEEITGYLYISAWPDSLPDLSVFQNLQVIRGRILHNGAYSLTLQGLGISWLGLRSLRELGSGLALIHHNTHLCFVHTVPWDQLFRNPHQALLHTANRPEDECVGEGLACHQLCARGHCWGPGPTQCVNCSQFLRGQECVEECRVLQGLPREYVNARHCLPCHPECQPQNGSVTCFGPVMRFPLWVPPIFWLKSLPRIKLGGGPRGRGHRDWEADQCVACAHYKDPPFCVARCPSGVKPDLSYMPIWKFPDEEGACQPCPINCTHSCVDLDDKGCPAEQRASPLTSIISAVVGILLVVVLGVVFGILIKRRQQKIRKYTMRRLLQETELVEPLTPSGAMPNQAQMRILKETELRKVKVLGSGAFGTVYKGIWIPDGENVKIPVAIKVLRENTSPKANKEILDEAYVMAGVGSPYVSRLLGICLTSTVQLVTQLMPYGCLLDHVRENRGRLGSQDLLNWCMQIAKGMSYLEDVRLVHRDLAARNVLVKSPNHVKITDFGLARLLDIDETEYHADGGKVPIKWMALESILRRRFTHQSDVWSYGVTVWELMTFGAKPYDGIPAREIPDLLEKGERLPQPPICTIDVYMIMVKCWMIDSECRPRFRELVSEFSRMARDPQRFVVIQNEDLGPASPLDSTFYRSLLEDDDMGDLVDAEEYLVPQQGFFCPDPAPGAGGMVHHRHRSSSTRSGGGDLTLGLEPSEEEAPRSPLAPSEGAGSDVFDGDLGMGAAKGLQSLPTHDPSPLQRYSEDPTVPLPSETDGYVAPLTCSPQPEYVNQPDVRPQPPSPREGPLPAARPAGATLERPKTLSPGKNGVVKDVFAFGGAVENPEYLTPQGGAAPQPHPPPAFSPAFDNLYYWDQDPPERGAPPSTFKGTPTAENPEYLGLDVPV

SEQ ID NO: 9 - protein, 1282 aa, synthetic construct
  REGION 1..1282: note = her2 isoform h
MELAALCRWGLLLALLPPGAASTQVCTGTDMKLRLPASPETHLDMLRHLYQGCQVVQGNLELTYLPTNASLSFLQDIQEVQGYVLIAHNQVRQVPLQRLRIVRGTQLFEDNYALAVLDNGDPLNNTTPVTGASPGGLRELQLRSLTEILKGGVLIQRNPQLCYQDTILWKDIFHKNNQLALTLIDTNRSRACHPCSPMCKGSRCWGESSEDCQSLTRTVCAGGCARCKGPLPTDCCHEQCAAGCTGPKHSDCLACLHFNHSGICELHCPALVTYNTDTFESMPNPEGRYTFGASCVTACPYNYLSTDVGSCTLVCPLHNQEVTAEDGTQRCEKCSKPCARVCYGLGMEHLREVRAVTSANIQEFAGCKKIFGSLAFLPESFDGVSLCQQAGVQWYDLGSLQPLPPGFKQFSCLSLLSSWDYRDPASNTAPLQPEQLQVFETLEEITGYLYISAWPDSLPDLSVFQNLQVIRGRILHNGAYSLTLQGLGISWLGLRSLRELGSGLALIHHNTHLCFVHTVPWDQLFRNPHQALLHTANRPEDECVGEGLACHQLCARGHCWGPGPTQCVNCSQFLRGQECVEECRVLQGLPREYVNARHCLPCHPECQPQNGSVTCFGPEADQCVACAHYKDPPFCVARCPSGVKPDLSYMPIWKFPDEEGACQPCPINCTHSCVDLDDKGCPAEQRASPLTSIISAVVGILLVVVLGVVFGILIKRRQQKIRKYTMRRLLQETELVEPLTPSGAMPNQAQMRILKETELRKVKGIWIPDGENVKIPVAIKVLRENTSPKANKEILDEAYVMAGVGSPYVSRLLGICLTSTVQLVTQLMPYGCLLDHVRENRGRLGSQDLLNWCMQIAKGMSYLEDVRLVHRDLAARNVLVKSPNHVKITDFGLARLLDIDETEYHADGGKVPIKWMALESILRRRFTHQSDVWSYGVTVWELMTFGAKPYDGIPAREIPDLLEKGERLPQPPICTIDVYMIMVKCWMIDSECRPRFRELVSEFSRMARDPQRFVVIQNEDLGPASPLDSTFYRSLLEDDDMGDLVDAEEYLVPQQGFFCPDPAPGAGGMVHHRHRSSSTRSGGGDLTLGLEPSEEEAPRSPLAPSEGAGSDVFDGDLGMGAAKGLQSLPTHDPSPLQRYSEDPTVPLPSETDGYVAPLTCSPQPEYVNQPDVRPQPPSPREGPLPAARPAGATLERPKTLSPGKNGVVKDVFAFGGAVENPEYLTPQGGAAPQPHPPPAFSPAFDNLYYWDQDPPERGAPPSTFKGTPTAENPEYLGLDVPV

SEQ ID NO: 10 - protein, 1280 aa, synthetic construct
  REGION 1..1280: note = her2 isoform i
MELAALCRWGLLLALLPPGAASTQVCTGTDMKLRLPASPETHLDMLRHLYQGCQVVQGNLELTYLPTNASLSFLQDIQEVQGYVLIAHNQVRQVPLQRLRIVRGTQLFEDNYALAVLDNGDPLNNTTPVTGASPGGLRELQLRSLTEGRRAPREAEGDRRGKGPLIIAHPTEILKGGVLIQRNPQLCYQDTILWKDIFHKNNQLALTLIDTNRSRACHPCSPMCKGSRCWGESSEDCQSLTRTVCAGGCARCKGPLPTDCCHEQCAAGCTGPKHSDCLACLHFNHSGICELHCPALVTYNTDTFESMPNPEGRYTFGASCVTACPYNYLSTDVGSCTLVCPLHNQEVTAEDGTQRCEKCSKPCARVCYGLGMEHLREVRAVTSANIQEFAGCKKIFGSLAFLPESFDGDPASNTAPLQPEQLQVFETLEEITGYLYISAWPDSLPDLSVFQNLQVIRGRILHNGAYSLTLQGLGISWLGLRSLRELGSGLALIHHNTHLCFVHTVPWDQLFRNPHQALLHTANRPEDECVGEGLACHQLCARGHCWGPGPTQCVNCSQFLRGQECVEECRVLQGLPREYVNARHCLPCHPECQPQNGSVTCFGPEADQCVACAHYKDPPFCVARCPSGVKPDLSYMPIWKFPDEEGACQPCPINCTHSCVDLDDKGCPAEQRASPLTSIISAVVGILLVVVLGVVFGILIKRRQQKIRKYTMRRLLQETELVEPLTPSGAMPNQAQMRILKETELRKVKVLGSGAFGTVYKGIWIPDGENVKIPVAIKVLRENTSPKANKEILDEAYVMAGVGSPYVSRLLGICLTSTVQLVTQLMPYGCLLDHVRENRGRLGSQDLLNWCMQIAKGMSYLEDVRLVHRDLAARNVLVKSPNHVKITDFGLARLLDIDETEYHADGGKVPIKWMALESILRRRFTHQSDVWSYGVTVWELMTFGAKPYDGIPAREIPDLLEKGERLPQPPICTIDVYMIMVKCWMIDSECRPRFRELVSEFSRMARDPQRFVVIQNEDLGPASPLDSTFYRSLLEDDDMGDLVDAEEYLVPQQGFFCPDPAPGAGGMVHHRHRSSSTRSGGGDLTLGLEPSEEEAPRSPLAPSEGAGSDVFDGDLGMGAAKGLQSLPTHDPSPLQRYSEDPTVPLPSETDGYVAPLTCSPQPEYVNQPDVRPQPPSPREGPLPAARPAGATLERPKTLSPGKNGVVKDVFAFGGAVENPEYLTPQGGAAPQPHPPPAFSPAFDNLYYWDQDPPERGAPPSTFKGTPTAENPEYLGLDVPV

SEQ ID NO: 11 - protein, 1265 aa, synthetic construct
  REGION 1..1265: note = her2 isoform j
MELAALCRWGLLLALLPPGAASTQVCTGTDMKLRLPASPETHLDMLRHLYQGCQVVQGNLELTYLPTNASLSFLQDIQEVQGYVLIAHNQVRQVPLQRLRIVRGTQLFEDNYALAVLDNGDPLNNTTPVTGASPGGLRELQLRSLTEILKGGVLIQRNPQLCYQDTILWKDIFHKNNQLALTLIDTNRSRACHPCSPMCKGSRCWGESSEDCQSLTRTVCAGGCARCKGPLPTDCCHEQCAAGCTGPKHSDCLACLHFNHSGICELHCPALVTYNTDTFESMPNPEGRYTFGASCVTACPYNYLSTDVGSCTLVCPLHNQEVTAEDGTQRCEKCSKPCARVCYGLGMEHLREVRAVTSANIQEFAGCKKIFGSLAFLPESFDGDPASNTAPLQPEQLQVFETLEEITGYLYISAWPDSLPDLSVFQNLQVIRGRILHNGAYSLTLQGLGISWLGLRSLRELGSGLALIHHNTHLCFVHTVPWDQLFRNPHQALLHTANRPEDECVPCGPFLLTAVGEGLACHQLCARGHCWGPGPTQCVNCSQFLRGQECVEECRVLQGLPREYVNARHCLPCHPECQPQNGSVTCFGPEADQCVACAHYKDPPFCVARCPSGVKPDLSYMPIWKFPDEEGACQPCPINCTHSCVDLDDKGCPAEQRASPLTSIISAVVGILLVVVLGVVFGILIKRRQQKIRKYTMRRLLQETELVEPLTPSGAMPNQAQMRILKETELRKVKVLGSGAFGTVYKGIWIPDGENVKIPVAIKVLRENTSPKANKEILDEAYVMAGVGSPYVSRLLGICLTSTVQLVTQLMPYGCLLDHVRENRGRLGSQDLLNWCMQIAKGMSYLEDVRLVHRDLAARNVLVKSPNHVKITDFGLARLLDIDETEYHADGGKVPIKWMALESILRRRFTHQSDVWSYGVTVWELMTFGAKPYDGIPAREIPDLLEKGERLPQPPICTIDVYMIMVKCWMIDSECRPRFRELVSEFSRMARDPQRFVVIQNEDLGPASPLDSTFYRSLLEDDDMGDLVDAEEYLVPQQGFFCPDPAPGAGGMVHHRHRSSSTRSGGGDLTLGLEPSEEEAPRSPLAPSEGAGSDVFDGDLGMGAAKGLQSLPTHDPSPLQRYSEDPTVPLPSETDGYVAPLTCSPQPEYVNQPDVRPQPPSPREGPLPAARPAGATLERPKTLSPGKNGVVKDVFAFGGAVENPEYLTPQGGAAPQPHPPPAFSPAFDNLYYWDQDPPERGAPPSTFKGTPTAENPEYLGLDVPV

SEQ ID NO: 12 - protein, 1262 aa, synthetic construct
  REGION 1..1262: note = her2 isoform k
MELAALCRWGLLLALLPPGAASTQVCTGTDMKLRLPASPETHLDMLRHLYQGCQVVQGNLELTYLPTNASLSFLQDIQEVQGYVLIAHNQVRQVPLQRLRIVRGTQLFEDNYALAVLDNGDPLNNTTPVTGASPGGLRELQLRSLTEILKGGVLIQRNPQLCYQDTILWKDIFHKNNQLALTLIDTNRSRACHPCSPMCKGSRCWGESSEDCQSLTRTVCAGGCARCKGPLPTDCCHEQCAAGCTGPKHSDCLACLHFNHSGICELHCPALVTYNTDTFESMPNPEGRYTFGASCVTACPYNYLSTDVGSCTLVCPLHNQEVTAEDGTQRCEKCSKPCARVCYGLGMEHLREVRAVTSANIQEFAGCKKIFGSLAFLPESFDGDPASNTAPLQPEQLQVFETLEEITGYLYISAWPDSLPDLSVFQNLQVIRGRILHKCPPFSHSGAYSLTLQGLGISWLGLRSLRELGSGLALIHHNTHLCFVHTVPWDQLFRNPHQALLHTANRPEDECVGEGLACHQLCARGHCWGPGPTQCVNCSQFLRGQECVEECRVLQGLPREYVNARHCLPCHPECQPQNGSVTCFGPEADQCVACAHYKDPPFCVARCPSGVKPDLSYMPIWKFPDEEGACQPCPINCTHSCVDLDDKGCPAEQRASPLTSIISAVVGILLVVVLGVVFGILIKRRQQKIRKYTMRRLLQETELVEPLTPSGAMPNQAQMRILKETELRKVKVLGSGAFGTVYKGIWIPDGENVKIPVAIKVLRENTSPKANKEILDEAYVMAGVGSPYVSRLLGICLTSTVQLVTQLMPYGCLLDHVRENRGRLGSQDLLNWCMQIAKGMSYLEDVRLVHRDLAARNVLVKSPNHVKITDFGLARLLDIDETEYHADGGKVPIKWMALESILRRRFTHQSDVWSYGVTVWELMTFGAKPYDGIPAREIPDLLEKGERLPQPPICTIDVYMIMVKCWMIDSECRPRFRELVSEFSRMARDPQRFVVIQNEDLGPASPLDSTFYRSLLEDDDMGDLVDAEEYLVPQQGFFCPDPAPGAGGMVHHRHRSSSTRSGGGDLTLGLEPSEEEAPRSPLAPSEGAGSDVFDGDLGMGAAKGLQSLPTHDPSPLQRYSEDPTVPLPSETDGYVAPLTCSPQPEYVNQPDVRPQPPSPREGPLPAARPAGATLERPKTLSPGKNGVVKDVFAFGGAVENPEYLTPQGGAAPQPHPPPAFSPAFDNLYYWDQDPPERGAPPSTFKGTPTAENPEYLGLDVPV

SEQ ID NO: 13 - protein, 1254 aa, synthetic construct
  REGION 1..1254: note = her2 isoform l
MELAALCRWGLLLALLPPGAASTQVCTGTDMKLRLPASPETHLDMLRHLYQGCQVVQGNLELTYLPTNASLSFLQDIQEVQGYVLIAHNQVRQVPLQRLRIVRGTQLFEDNYALAVLDNGDPLNNTTPVTGASPGGLRELQLRSLTEILKGGVLIQRNPQLCYQDTILWKDIFHKNNQLALTLIDTNRSRACHPCSPMCKGSRCWGESSEDCQSLTRTVCAGGCARCKGPLPTDCCHEQCAAGCTGPKHSDCLACLHFNHSGICELHCPALVTYNTDTFESMPNPEGRYTFGASCVTACPYNYLSTDVGSCTLVCPLHNQEVTAEDGTQRCEKCSKPCARVCYGLGMEHLREVRAVTSANIQEFAGCKKIFGSLAFLPESFDGDPASNTAPLQPEQLQVFETLEEITGYLYISAWPDSLPDLSVFQNLQVIRGRILHNGAYSLTLQGLGISWLGLRSLRELGSGLALIHHNTHLCFVHTVPWDQLFRNPHQALLHTANRPEDECVGEGLACHQLCARGHCWGPGPTQCVNCSQFLRGQECVEECRVLQGLPREYVNARHCLPCHPECQPQNGSVTCFGPADQCVACAHYKDPPFCVARCPSGVKPDLSYMPIWKFPDEEGACQPCPINCTHSCVDLDDKGCPAEQRASPLTSIISAVVGILLVVVLGVVFGILIKRRQQKIRKYTMRRLLQETELVEPLTPSGAMPNQAQMRILKETELRKVKVLGSGAFGTVYKGIWIPDGENVKIPVAIKVLRENTSPKANKEILDEAYVMAGVGSPYVSRLLGICLTSTVQLVTQLMPYGCLLDHVRENRGRLGSQDLLNWCMQIAKGMSYLEDVRLVHRDLAARNVLVKSPNHVKITDFGLARLLDIDETEYHADGGKVPIKWMALESILRRRFTHQSDVWSYGVTVWELMTFGAKPYDGIPAREIPDLLEKGERLPQPPICTIDVYMIMVKCWMIDSECRPRFRELVSEFSRMARDPQRFVVIQNEDLGPASPLDSTFYRSLLEDDDMGDLVDAEEYLVPQQGFFCPDPAPGAGGMVHHRHRSSSTRSGGGDLTLGLEPSEEEAPRSPLAPSEGAGSDVFDGDLGMGAAKGLQSLPTHDPSPLQRYSEDPTVPLPSETDGYVAPLTCSPQPEYVNQPDVRPQPPSPREGPLPAARPAGATLERPKTLSPGKNGVVKDVFAFGGAVENPEYLTPQGGAAPQPHPPPAFSPAFDNLYYWDQDPPERGAPPSTFKGTPTAENPEYLGLDVPV

SEQ ID NO: 14 - protein, 1252 aa, synthetic construct
  REGION 1..1252: note = her2 isoform m
MELAALCRWGLLLALLPPGAASTQVCTGTDMKLRLPASPETHLDMLRHLYQGCQVVQGNLELTYLPTNASLSFLQEVQGYVLIAHNQVRQVPLQRLRIVRGTQLFEDNYALAVLDNGDPLNNTTPVTGASPGGLRELQLRSLTEILKGGVLIQRNPQLCYQDTILWKDIFHKNNQLALTLIDTNRSRACHPCSPMCKGSRCWGESSEDCQSLTRTVCAGGCARCKGPLPTDCCHEQCAAGCTGPKHSDCLACLHFNHSGICELHCPALVTYNTDTFESMPNPEGRYTFGASCVTACPYNYLSTDVGSCTLVCPLHNQEVTAEDGTQRCEKCSKPCARVCYGLGMEHLREVRAVTSANIQEFAGCKKIFGSLAFLPESFDGDPASNTAPLQPEQLQVFETLEEITGYLYISAWPDSLPDLSVFQNLQVIRGRILHNGAYSLTLQGLGISWLGLRSLRELGSGLALIHHNTHLCFVHTVPWDQLFRNPHQALLHTANRPEDECVGEGLACHQLCARGHCWGPGPTQCVNCSQFLRGQECVEECRVLQGLPREYVNARHCLPCHPECQPQNGSVTCFGPEADQCVACAHYKDPPFCVARCPSGVKPDLSYMPIWKFPDEEGACQPCPINCTHSCVDLDDKGCPAEQRASPLTSIISAVVGILLVVVLGVVFGILIKRRQQKIRKYTMRRLLQETELVEPLTPSGAMPNQAQMRILKETELRKVKVLGSGAFGTVYKGIWIPDGENVKIPVAIKVLRENTSPKANKEILDEAYVMAGVGSPYVSRLLGICLTSTVQLVTQLMPYGCLLDHVRENRGRLGSQDLLNWCMQIAKGMSYLEDVRLVHRDLAARNVLVKSPNHVKITDFGLARLLDIDETEYHADGGKVPIKWMALESILRRRFTHQSDVWSYGVTVWELMTFGAKPYDGIPAREIPDLLEKGERLPQPPICTIDVYMIMVKCWMIDSECRPRFRELVSEFSRMARDPQRFVVIQNEDLGPASPLDSTFYRSLLEDDDMGDLVDAEEYLVPQQGFFCPDPAPGAGGMVHHRHRSSSTRSGGGDLTLGLEPSEEEAPRSPLAPSEGAGSDVFDGDLGMGAAKGLQSLPTHDPSPLQRYSEDPTVPLPSETDGYVAPLTCSPQPEYVNQPDVRPQPPSPREGPLPAARPAGATLERPKTLSPGKNGVVKDVFAFGGAVENPEYLTPQGGAAPQPHPPPAFSPAFDNLYYWDQDPPERGAPPSTFKGTPTAENPEYLGLDVPV

SEQ ID NO: 15 - protein, 1243 aa, synthetic construct
  REGION 1..1243: note = her2 isoform n
MELAALCRWGLLLALLPPGAASTQVCTGTDMKLRLPASPETHLDMLRHLYQGCQVVQGNLELTYLPTNASLSFLQDIQEVQGYVLIAHNQVRQVPLQRLRIVRGTQLFEDNYALAVLDNGDPLNNTTPVTGASPGGLRELQLRSLTEILKGGVLIQRNPQLCYQDTILWKDIFHKNNQLALTLIDTNRSRACHPCSPMCKGSRCWGESSEDCQSLTRTVCAGGCARCKGPLPTDCCHEQCAAGCTGPKHSDCLACLHFNHSGICELHCPALVTYNTDTFESMPNPEGRYTFGASCVTACPYNYLSTDVGSCTLVCPLHNQEVTAEDGTQRCEKCSKPCARVCYGLGMEHLREVRAVTSANIQEFAGCKKIFGSLAFLPESFDGDPASNTAPLQPEQLQVFETLEEITGYLYISAWPDSLPDLSVFQNLQVIRGRILHNGAYSLTLQGLGISWLGLRSLRELGSGLALIHHNTHLCFVHTVPWDQLFRNPHQALLHTANRPEDECVGEGLACHQLCARGHCWGPGPTQCVNCSQFLRGQECVEECRVLQGLPREYVNARHCLPCHPECQPQNGSVTCFGPEADQCVACAHYKDPPFCVARCPSGVKPDLSYMPIWKFPDEEGACQPCPINCTHSCVDLDDKGCPAEQRASPLTSIISAVVGILLVVVLGVVFGILIKRRQQKIRKYTMRRLLQETELVEPLTPSGAMPNQAQMRILKETELRKVKGIWIPDGENVKIPVAIKVLRENTSPKANKEILDEAYVMAGVGSPYVSRLLGICLTSTVQLVTQLMPYGCLLDHVRENRGRLGSQDLLNWCMQIAKGMSYLEDVRLVHRDLAARNVLVKSPNHVKITDFGLARLLDIDETEYHADGGKVPIKWMALESILRRRFTHQSDVWSYGVTVWELMTFGAKPYDGIPAREIPDLLEKGERLPQPPICTIDVYMIMVKCWMIDSECRPRFRELVSEFSRMARDPQRFVVIQNEDLGPASPLDSTFYRSLLEDDDMGDLVDAEEYLVPQQGFFCPDPAPGAGGMVHHRHRSSSTRSGGGDLTLGLEPSEEEAPRSPLAPSEGAGSDVFDGDLGMGAAKGLQSLPTHDPSPLQRYSEDPTVPLPSETDGYVAPLTCSPQPEYVNQPDVRPQPPSPREGPLPAARPAGATLERPKTLSPGKNGVVKDVFAFGGAVENPEYLTPQGGAAPQPHPPPAFSPAFDNLYYWDQDPPERGAPPSTFKGTPTAENPEYLGLDVPV

SEQ ID NO: 16 - protein, 1241 aa, synthetic construct
  REGION 1..1241: note = her2 isoform o
MELAALCRWGLLLALLPPGAASTQVCTGTDMKLRLPASPETHLDMLRHLYQGCQVVQGNLELTYLPTNASLSFLQDIQEVQGYVLIAHNQVRQVPLQRLRIVRGTQLFEDNYALAVLDNGDPLNNTTPVTGASPGGLRELQLRSLTEILKGGVLIQRNPQLCYQDTILWKDIFHKNNQLALTLIDTNRSRACHPCSPMCKGSRCWGESSEDCQSLTRTVCAGGCARCKGPLPTDCCHEQCAAGCTGPKHSDCLACLHFNHSGICELHCPALVTYNTDTFESMPNPEGRYTFGASCVTACPYNYLSTDVGSCTLVCPLHNQEVTAEDGTQRCEKCSKPCARVCYGLGMEHLREVRAVTSANIQEFAGCKKIFGSLAFLPESFDGDPASNTAPLQPEQLQVFETLEEITGYLYISAWPDSLPDLSVFQNLQVIRGRILHNGAYSLTLQGLGISWLGLRSLRELGSGLALIHHNTHLCFVHTVPWDQLFRNPHQALLHTANRPEDECVGEGLACHQLCARGHCWGPGPTQCVNCSQFLRGQECVEECRVLQGLPREYVNARHCLPCHPECQPQNGSVTCFGPEADQCVACAHYKDPPFCVARCPSGVKPDLSYMPIWKFPDEEGACQPCPINCTHSCVDLDDKGCPAEQRASPLTSIISAVVGILLVVVLGVVFGILIKRRQQKIRKYTMRRLLQETELVEPLTPSGAMPNQAQMRILKETELRKGIWIPDGENVKIPVAIKVLRENTSPKANKEILDEAYVMAGVGSPYVSRLLGICLTSTVQLVTQLMPYGCLLDHVRENRGRLGSQDLLNWCMQIAKGMSYLEDVRLVHRDLAARNVLVKSPNHVKITDFGLARLLDIDETEYHADGGKVPIKWMALESILRRRFTHQSDVWSYGVTVWELMTFGAKPYDGIPAREIPDLLEKGERLPQPPICTIDVYMIMVKCWMIDSECRPRFRELVSEFSRMARDPQRFVVIQNEDLGPASPLDSTFYRSLLEDDDMGDLVDAEEYLVPQQGFFCPDPAPGAGGMVHHRHRSSSTRSGGGDLTLGLEPSEEEAPRSPLAPSEGAGSDVFDGDLGMGAAKGLQSLPTHDPSPLQRYSEDPTVPLPSETDGYVAPLTCSPQPEYVNQPDVRPQPPSPREGPLPAARPAGATLERPKTLSPGKNGVVKDVFAFGGAVENPEYLTPQGGAAPQPHPPPAFSPAFDNLYYWDQDPPERGAPPSTFKGTPTAENPEYLGLDVPV

SEQ ID NO: 17 - protein, 1241 aa, synthetic construct
  REGION 1..1241: note = her2 isoform p
MELAALCRWGLLLALLPPGAASTQVCTGTDMKLRLPASPETHLDMLRHLYQGCQVVQGNLELTYLPTNASLSFLQDIQEVQGYVLIAHNQVRQVPLQRLRIVRGTQLFEDNYALAVLDNGDPLNNTTPVTGASPGGLRELQLRSLTEILKGGVLIQRNPQLCYQDTILWKDIFHKNNQLALTLIDTNRSRACHPCSPMCKGSRCWGESSEDCQSLTRTVCAGGCARCKGPLPTDCCHEQCAAGCTGPKHSDCLACLHFNHSGICELHCPALVTYNTDTFESMPNPEGRYTFGASCVTACPYNYLSTDVGSCTLVCPLHNQEVTAEDGTQRCEKCSKPCARVCYGLGMEHLREVRAVTSANIQEFAGCKKIFGSLAFLPESFDGDPASNTAPLQPEQLQVFETLEEITGYLYISAWPDSLPDLSVFQNLQVIRGRILHNGAYSLTLQGLGISWLGLRSLRELGSGLALIHHNTHLCFVHTVPWDQLFRNPHQALLHTANRPEDECVGEGLACHQLCARGHCWGPGPTQCVNCSQFLRGQECVEECRVLQGLPREYVNARHCLPCHPECQPQNGSVTCFGPEADQCVACAHYKDPPFCVARCPSGVKPDLSYMPIWKFPDEEGACQPCPINCTHSCVDLDDKGCPAEQRASPLTSIISAVVGILLVVVLGVVFGILIKRRQQKIRKYTMRRLLQETEAQMRILKETELRKVKVLGSGAFGTVYKGIWIPDGENVKIPVAIKVLRENTSPKANKEILDEAYVMAGVGSPYVSRLLGICLTSTVQLVTQLMPYGCLLDHVRENRGRLGSQDLLNWCMQIAKGMSYLEDVRLVHRDLAARNVLVKSPNHVKITDFGLARLLDIDETEYHADGGKVPIKWMALESILRRRFTHQSDVWSYGVTVWELMTFGAKPYDGIPAREIPDLLEKGERLPQPPICTIDVYMIMVKCWMIDSECRPRFRELVSEFSRMARDPQRFVVIQNEDLGPASPLDSTFYRSLLEDDDMGDLVDAEEYLVPQQGFFCPDPAPGAGGMVHHRHRSSSTRSGGGDLTLGLEPSEEEAPRSPLAPSEGAGSDVFDGDLGMGAAKGLQSLPTHDPSPLQRYSEDPTVPLPSETDGYVAPLTCSPQPEYVNQPDVRPQPPSPREGPLPAARPAGATLERPKTLSPGKNGVVKDVFAFGGAVENPEYLTPQGGAAPQPHPPPAFSPAFDNLYYWDQDPPERGAPPSTFKGTPTAENPEYLGLDVPV

SEQ ID NO: 18 - protein, 1239 aa, synthetic construct
  REGION 1..1239: note = her2 isoform q
MELAALCRWGLLLALLPPGAASTQVCTGTDMKLRLPASPETHLDMLRHLYQGCQVVQGNLELTYLPTNASLSFLQDIQEVQGYVLIAHNQVRQVPLQRLRIVRGTQLFEDNYALAVLDNGDPLNNTTPVTGASPGGLRELQLRSLTEILKGGVLIQRNPQLCYQDTILWKDIFHKNNQLALTLIDTNRSRACHPCSPMCKGSRCWGESSEDCQSLTRTVCAGGCARCKGPLPTDCCHEQCAAGCTGPKHSDCLACLHFNHSGICELHCPALVTYNTDTFESMPNPEGRYTFGASCVTACPYNYLSTDVGSCTLVCPLHNQEVTAEDGTQRCEKCSKPCARVCYGLGMEHLREVRAVTSANIQEFAGCKKIFGSLAFLPESFDGDPASNTAPLQPEQLQVFETLEEITGYLYISAWPDSLPDLSVFQNLQVIRGRILHNGAYSLTLQGLGISWLGLRSLRELGSGLALIHHNTHLCFVHTVPWDQLFRNPHQALLHTANRPEDECVGEGLACHQLCARGHCWGPGPTQCVNCSQFLRGQECVEECRVLQGLPREYVNARHCLPCHPECQPQNGSVTCFGPEADQCVACAHYKDPPFCVARCPSGVKPDLSYMPIWKFPDEEGACQPCPINCTHSPLTSIISAVVGILLVVVLGVVFGILIKRRQQKIRKYTMRRLLQETELVEPLTPSGAMPNQAQMRILKETELRKVKVLGSGAFGTVYKGIWIPDGENVKIPVAIKVLRENTSPKANKEILDEAYVMAGVGSPYVSRLLGICLTSTVQLVTQLMPYGCLLDHVRENRGRLGSQDLLNWCMQIAKGMSYLEDVRLVHRDLAARNVLVKSPNHVKITDFGLARLLDIDETEYHADGGKVPIKWMALESILRRRFTHQSDVWSYGVTVWELMTFGAKPYDGIPAREIPDLLEKGERLPQPPICTIDVYMIMVKCWMIDSECRPRFRELVSEFSRMARDPQRFVVIQNEDLGPASPLDSTFYRSLLEDDDMGDLVDAEEYLVPQQGFFCPDPAPGAGGMVHHRHRSSSTRSGGGDLTLGLEPSEEEAPRSPLAPSEGAGSDVFDGDLGMGAAKGLQSLPTHDPSPLQRYSEDPTVPLPSETDGYVAPLTCSPQPEYVNQPDVRPQPPSPREGPLPAARPAGATLERPKTLSPGKNGVVKDVFAFGGAVENPEYLTPQGGAAPQPHPPPAFSPAFDNLYYWDQDPPERGAPPSTFKGTPTAENPEYLGLDVPV

SEQ ID NO: 19 - protein, 1226 aa, synthetic construct
  REGION 1..1226: note = her2 isoform r
MELAALCRWGLLLALLPPGAASTQVCTGTDMKLRLPASPETHLDMLRHLYQGCQVVQGNLELTYLPTNASLSFLQDIQEVQGYVLIAHNQVRQVPLQRLRIVRGTQLFEDNYALAVLDNGDPLNNTTPVTGASPGGLRELQLRSLTEILKGGVLIQRNPQLCYQDTILWKDIFHKNNQLALTLIDTNRSRACHPCSPMCKGSRCWGESSEDCQSLTRTVCAGGCARCKGPLPTDCCHEQCAAGCTGPKHSDCLACLHFNHSGICELHCPALVTYNTDTFESMPNPEGRYTFGASCVTACPYNYLSTDVGSCTLVCPLHNQEVTAEDGTQRCEKCSKPCARVCYGLGMEHLREVRAVTSANIQEFAGCKKIFGSLAFLPESFDGDPASNTAPLQPEQLQVFETLEEITGYLYISAWPDSLPDLSVFQNLQVIRGRILHNGAYSLTLQGLGISWLGLRSLRELGSGLALIHHNTHLCFVHTVPWDQLFRNPHQALLHTANRPEDECVGEGLACHQLCARGHCWGPGPTQCVNCSQFLRGQECVEECRVLQGLPREYVNARHCLPCHPECQPQNGSVTCFGPEADQCVACAHYKDPPFCVARCPSGVKPDLSYMPIWKFPDEEGACQPCPINCTHSCVDLDDKGCPAEQRASPLTSIISAVVGILLVVVLGVVFGILIKRRQQKIRKYTMRRLLQETELVEPLTPSGAMPNQAQMRILKETELRKVKVLGSGAFGTVYKGIWIPDGENVKIPVAIKVLRENTSPKANKEILDEAYVMAGVGSPYVSRLLGICLTSTVQLVTQLMPYGCLLDHVRENRGRLGSQDLLNWCMQIAKGMSYLEDVRLVHRDLAARNVLVKSPNHVKITDFGLARLLDIDETEYHADGGKVPIKWMALESILRRRFTHQSDVWSYGVTVWELMTFGAKPYDGIPAREIPDLLEKGERLPQPPICTIDVYMIMVKCWMIDSECRPRFRELVSEFSRMARDPQRFVVIQNEDLGPASPLDSTFYRSLLEDDDMGDLVDAEEYLSGGGDLTLGLEPSEEEAPRSPLAPSEGAGSDVFDGDLGMGAAKGLQSLPTHDPSPLQRYSEDPTVPLPSETDGYVAPLTCSPQPEYVNQPDVRPQPPSPREGPLPAARPAGATLERPKTLSPGKNGVVKDVFAFGGAVENPEYLTPQGGAAPQPHPPPAFSPAFDNLYYWDQDPPERGAPPSTFKGTPTAENPEYLGLDVPV

SEQ ID NO: 20 - protein, 1222 aa, synthetic construct
  REGION 1..1222: note = her2 isoform s
MELAALCRWGLLLALLPPGAASTQVCTGTDMKLRLPASPETHLDMLRHLYQGCQVVQGNLELTYLPTNASLSFLQDIQEVQGYVLIAHNQVRQVPLQRLRIVRGTQLFEDNYALAVLDNGDPLNNTTPVTGASPGGLRELQLRSLTEILKGGVLIQRNPQLCYQDTILWKDIFHKNNQLALTLIDTNRSRACHPCSPMCKGSRCWGESSEDCQSLTRTVCAGGCARCKGPLPTDCCHEQCAAGCTGPKHSDCLACLHFNHSGICELHCPALVTYNTDTFESMPNPEGRYTFGASCVTACPYNYLSTDVGSCTLVCPLHNQEVTAEDGTQRCEKCSKPCARVCYGLGMEHLREVRAVTSANIQEFAGCKKIFGSLAFLPESFDGDPASNTAPLQPEQLQVFETLEEITGYLYISAWPDSLPDLSVFQNLQVIRGRILHNGAYSLTLQGLGISWLGLRSLRELGSGLALIHHNTHLCFVHTVPWDQLFRNPHQALLHTANRPEDECVGEGLACHQLCARGHCWGPGPTQCVNCSQFLRGQECVEECRVLQGLPREYVNARHCLPCHPECQPQNGSVTCFGPEADQCVACAHYKDPPFCVARCPSGVKPDLSYMPIWKFPDEEGACQPCPINCTHSCVDLDDKGCPAEQRASPLTSIISAVVGILLVVVLGVVFGILIKRRQQKIRKYTMRRLLQETELVEPLTPSGAMPNQAQMRILKETELRKVKVLGSGAFGTVYKEAYVMAGVGSPYVSRLLGICLTSTVQLVTQLMPYGCLLDHVRENRGRLGSQDLLNWCMQIAKGMSYLEDVRLVHRDLAARNVLVKSPNHVKITDFGLARLLDIDETEYHADGGKVPIKWMALESILRRRFTHQSDVWSYGVTVWELMTFGAKPYDGIPAREIPDLLEKGERLPQPPICTIDVYMIMVKCWMIDSECRPRFRELVSEFSRMARDPQRFVVIQNEDLGPASPLDSTFYRSLLEDDDMGDLVDAEEYLVPQQGFFCPDPAPGAGGMVHHRHRSSSTRSGGGDLTLGLEPSEEEAPRSPLAPSEGAGSDVFDGDLGMGAAKGLQSLPTHDPSPLQRYSEDPTVPLPSETDGYVAPLTCSPQPEYVNQPDVRPQPPSPREGPLPAARPAGATLERPKTLSPGKNGVVKDVFAFGGAVENPEYLTPQGGAAPQPHPPPAFSPAFDNLYYWDQDPPERGAPPSTFKGTPTAENPEYLGLDVPV

SEQ ID NO: 21 - protein, 1203 aa, synthetic construct
  REGION 1..1203: note = her2 isoform t
MELAALCRWGLLLALLPPGAASTQVCTGTDMKLRLPASPETHLDMLRHLYQGCQVVQGNLELTYLPTNASLSFLQDIQEVQGYVLIAHNQVRQVPLQRLRIVRGTQLFEDNYALAVLDNGDPLNNTTPVTGASPGGLRELQLRSLTEILKGGVLIQRNPQLCYQDTILWKDIFHKNNQLALTLIDTNRSRACHPCSPMCKGSRCWGESSEDCQSLTRTVCAGGCARCKGPLPTDCCHEQCAAGCTGPKHSDCLACLHFNHSGICELHCPALVTYNTDTFESMPNPEGRYTFGASCVTACPYNYLSTDVGSCTLVCPLHNQEVTAEDGTQRCEKCSKPCARVCYGLGMEHLREVRAVTSANIQEFAGCKKIFGSLAFLPESFDGDPASNTAPLQPEQLQVFETLEEITGYLYISAWPDSLPDLSVFQNLQVIRGRILHNGAYSLTLQGLGISWLGLRSLRELGSGLALIHHNTHLCFVHTVPWDQLFRNPHQALLHTANRPEDECVGEGLACHQLCARGHCWGPGPTQCVNCSQFLRGQECVEECRVLQGLPREYVNARHCLPCHPECQPQNGSVTCFGPEADQCVACAHYKDPPFCVARCPSGVKPDLSYMPIWKFPDEEGACQPCPINCTHSCVDLDDKGCPAEQRASPLTSIISAVVGILLVVVLGVVFGILIKRRQQKIRKYTMRRLLQETELVEPLTPSGAMPNQAQMRILKETELRKVKVLGSGAFGTVYKGIWIPDGENVKIPVAIKVLRENTSPKANKEILDEAYVMAGVGSPYVSRLLGICLTSTVQLVTQLMPYGCLLDHVRENRGRLGSQDLLNWCMQIAKVPIKWMALESILRRRFTHQSDVWSYGVTVWELMTFGAKPYDGIPAREIPDLLEKGERLPQPPICTIDVYMIMVKCWMIDSECRPRFRELVSEFSRMARDPQRFVVIQNEDLGPASPLDSTFYRSLLEDDDMGDLVDAEEYLVPQQGFFCPDPAPGAGGMVHHRHRSSSTRSGGGDLTLGLEPSEEEAPRSPLAPSEGAGSDVFDGDLGMGAAKGLQSLPTHDPSPLQRYSEDPTVPLPSETDGYVAPLTCSPQPEYVNQPDVRPQPPSPREGPLPAARPAGATLERPKTLSPGKNGVVKDVFAFGGAVENPEYLTPQGGAAPQPHPPPAFSPAFDNLYYWDQDPPERGAPPSTFKGTPTAENPEYLGLDVPV

SEQ ID NO: 22 - protein, 1195 aa, synthetic construct
  REGION 1..1195: note = her2 isoform u
MELAALCRWGLLLALLPPGAASTQVCTGTDMKLRLPASPETHLDMLRHLYQGCQVVQGNLELTYLPTNASLSFLQDIQEVQGYVLIAHNQVRQVPLQRLRIVRGTQLFEDNYALAVLDNGDPLNNTTPVTGASPGGLRELQLRSLTESSEDCQSLTRTVCAGGCARCKGPLPTDCCHEQCAAGCTGPKHSDCLACLHFNHSGICELHCPALVTYNTDTFESMPNPEGRYTFGASCVTACPYNYLSTDVGSCTLVCPLHNQEVTAEDGTQRCEKCSKPCARVCYGLGMEHLREVRAVTSANIQEFAGCKKIFGSLAFLPESFDGDPASNTAPLQPEQLQVFETLEEITGYLYISAWPDSLPDLSVFQNLQVIRGRILHNGAYSLTLQGLGISWLGLRSLRELGSGLALIHHNTHLCFVHTVPWDQLFRNPHQALLHTANRPEDECVGEGLACHQLCARGHCWGPGPTQCVNCSQFLRGQECVEECRVLQGLPREYVNARHCLPCHPECQPQNGSVTCFGPEADQCVACAHYKDPPFCVARCPSGVKPDLSYMPIWKFPDEEGACQPCPINCTHSCVDLDDKGCPAEQRASPLTSIISAVVGILLVVVLGVVFGILIKRRQQKIRKYTMRRLLQETELVEPLTPSGAMPNQAQMRILKETELRKVKVLGSGAFGTVYKGIWIPDGENVKIPVAIKVLRENTSPKANKEILDEAYVMAGVGSPYVSRLLGICLTSTVQLVTQLMPYGCLLDHVRENRGRLGSQDLLNWCMQIAKGMSYLEDVRLVHRDLAARNVLVKSPNHVKITDFGLARLLDIDETEYHADGGKVPIKWMALESILRRRFTHQSDVWSYGVTVWELMTFGAKPYDGIPAREIPDLLEKGERLPQPPICTIDVYMIMVKCWMIDSECRPRFRELVSEFSRMARDPQRFVVIQNEDLGPASPLDSTFYRSLLEDDDMGDLVDAEEYLVPQQGFFCPDPAPGAGGMVHHRHRSSSTRSGGGDLTLGLEPSEEEAPRSPLAPSEGAGSDVFDGDLGMGAAKGLQSLPTHDPSPLQRYSEDPTVPLPSETDGYVAPLTCSPQPEYVNQPDVRPQPPSPREGPLPAARPAGATLERPKTLSPGKNGVVKDVFAFGGAVENPEYLTPQGGAAPQPHPPPAFSPAFDNLYYWDQDPPERGAPPSTFKGTPTAENPEYLGLDVPV

SEQ ID NO: 23 - protein, 1193 aa, synthetic construct
  REGION 1..1193: note = her2 isoform v
MELAALCRWGLLLALLPPGAASTQVCTGTDMKLRLPASPETHLDMLRHLYQGCQVVQGNLELTYLPTNASLSFLQDIQEVQGYVLIAHNQVRQVPLQRLRIVRGTQLFEDNYALAVLDNGDPLNNTTPVTGASPGGLRELQLRSLTEILKGGVLIQRNPQLCYQDTILWKDIFHKNNQLALTLIDTNRSRACHPCSPMCKGSRCWGESSEDCQSLTRTVCAGGCARCKGPLPTDCCHEQCAAGCTGPKHSDCLACLHFNHSGICELHCPALVTYNTDTFESMPNPEGRYTFGASCVTACPYNYLSTDVGSCTLVCPLHNQEVTAEDGTQRCEKCSKPCARVCYGLGMEHLREVRAVTSANIQEFAGCKKIFGSLAFLPESFDGDPASNTAPLQPEQLQVFETLEEITGYLYISAWPDSLPDLSVFQNLQVIRGRILHNGAYSLTLQGLGISWLGLRSLRELGSGLALIHHNTHLCFVHTVPWDQLFRNPHQALLHTANRPEDECVGEGLACHQLCARGHCWGPGPTQCVNCSQFLRGQECVEECRVLQGLPREYVNARHCLPCHPECQPQNGSVTCFGPEADQCVACAHYKDPPFCVARCPSGVKPDLSYMPIWKFPDEEGACQPCPINCTHSCVDLDDKGCPAEQRASPLTSIISAVVGILLVVVLGVVFGILIKRRQQKIRKYTMRRLLQETELVEPLTPSGAMPNQAQMRILKETELRKVKVLGSGAFGTVYKGIWIPDGENVKIPVAIKVLRENTSPKANKEILDGMSYLEDVRLVHRDLAARNVLVKSPNHVKITDFGLARLLDIDETEYHADGGKVPIKWMALESILRRRFTHQSDVWSYGVTVWELMTFGAKPYDGIPAREIPDLLEKGERLPQPPICTIDVYMIMVKCWMIDSECRPRFRELVSEFSRMARDPQRFVVIQNEDLGPASPLDSTFYRSLLEDDDMGDLVDAEEYLVPQQGFFCPDPAPGAGGMVHHRHRSSSTRSGGGDLTLGLEPSEEEAPRSPLAPSEGAGSDVFDGDLGMGAAKGLQSLPTHDPSPLQRYSEDPTVPLPSETDGYVAPLTCSPQPEYVNQPDVRPQPPSPREGPLPAARPAGATLERPKTLSPGKNGVVKDVFAFGGAVENPEYLTPQGGAAPQPHPPPAFSPAFDNLYYWDQDPPERGAPPSTFKGTPTAENPEYLGLDVPV

SEQ ID NO: 24 - protein, 1187 aa, synthetic construct
  REGION 1..1187: note = her2 isoform w
MELAALCRWGLLLALLPPGAASTQVCTGTDMKLRLPASPETHLDMLRHLYQGCQVVQGNLELTYLPTNASLSFLQDIQEVQGYVLIAHNQVRQVPLQRLRIVRGTQLFEDNYALAVLDNGDPLNNTTPVTGASPGGLRELQLRSLTEILKGGVLIQRNPQLCYQDTILWKDIFHKNNQLALTLIDTNRSRACHPCSPMCKGSRCWGESSEDCQSLTRTVCAGGCARCKGPLPTDCCHEQCAAGCTGPKHSDCLACLHFNHSGICELHCPALVTYNTDTFESMPNPEGRYTFGASCVTACPYNYLSTDVGSCTLVCPLHNQEVTAEDGTQRCEKCSKPCARVCYGLGMEHLREVRAVTSANIQEFAGCKKIFGSLAFLPESFDGDPASNTAPLQPEQLQVFETLEEITGYLYISAWPDSLPDLSVFQNLQVIRGRILHNGAYSLTLQGLGISWLGLRSLRELGSGLALIHHNTHLCFVHTVPWDQLFRNPHQALLHTANRPEDECVGEGLACHQLCARGHCWGPGPTQCVNCSQFLRGQECVEECRVLQGLPREYVNARHCLPCHPECQPQNGSVTCFGPEADQCVACAHYKDPPFCVARCPSGVKPDLSYMPIWKFPDEEGACQPCPINCTHSPLTSIISAVVGILLVVVLGVVFGILIKRRQQKIRKYTMRRLLQETELVEPLTPSGAMPNQAQMRILKETELRKVKVLGSGAFGTVYKGIWIPDGENVKIPVAIKVLRENTSPKANKEILDEAYVMAGVGSPYVSRLLGICLTSTVQLVTQLMPYGCLLDHVRENRGRLGSQDLLNWCMQIAKVPIKWMALESILRRRFTHQSDVWSYGVTVWELMTFGAKPYDGIPAREIPDLLEKGERLPQPPICTIDVYMIMVKCWMIDSECRPRFRELVSEFSRMARDPQRFVVIQNEDLGPASPLDSTFYRSLLEDDDMGDLVDAEEYLVPQQGFFCPDPAPGAGGMVHHRHRSSSTRSGGGDLTLGLEPSEEEAPRSPLAPSEGAGSDVFDGDLGMGAAKGLQSLPTHDPSPLQRYSEDPTVPLPSETDGYVAPLTCSPQPEYVNQPDVRPQPPSPREGPLPAARPAGATLERPKTLSPGKNGVVKDVFAFGGAVENPEYLTPQGGAAPQPHPPPAFSPAFDNLYYWDQDPPERGAPPSTFKGTPTAENPEYLGLDVPV

SEQ ID NO: 25 - protein, 1169 aa, synthetic construct
  REGION 1..1169: note = her2 isoform x
MELAALCRWGLLLALLPPGAASTQVCTGTDMKLRLPASPETHLDMLRHLYQGCQVVQGNLELTYLPTNASLSFLQDIQEVQGYVLIAHNQVRQVPLQRLRIVRGTQLFEDNYALAVLDNGDPLNNTTPVTGASPGGLRELQLRSLTEILKGGVLIQRNPQLCYQDTILWKDIFHKNNQLALTLIDTNRSRACHPCSPMCKGSRCWGESSEDCQSHNYLSTDVGSCTLVCPLHNQEVTAEDGTQRCEKCSKPCARVCYGLGMEHLREVRAVTSANIQEFAGCKKIFGSLAFLPESFDGDPASNTAPLQPEQLQVFETLEEITGYLYISAWPDSLPDLSVFQNLQVIRGRILHNGAYSLTLQGLGISWLGLRSLRELGSGLALIHHNTHLCFVHTVPWDQLFRNPHQALLHTANRPEDECVGEGLACHQLCARGHCWGPGPTQCVNCSQFLRGQECVEECRVLQGLPREYVNARHCLPCHPECQPQNGSVTCFGPEADQCVACAHYKDPPFCVARCPSGVKPDLSYMPIWKFPDEEGACQPCPINCTHSCVDLDDKGCPAEQRASPLTSIISAVVGILLVVVLGVVFGILIKRRQQKIRKYTMRRLLQETELVEPLTPSGAMPNQAQMRILKETELRKVKVLGSGAFGTVYKGIWIPDGENVKIPVAIKVLRENTSPKANKEILDEAYVMAGVGSPYVSRLLGICLTSTVQLVTQLMPYGCLLDHVRENRGRLGSQDLLNWCMQIAKGMSYLEDVRLVHRDLAARNVLVKSPNHVKITDFGLARLLDIDETEYHADGGKVPIKWMALESILRRRFTHQSDVWSYGVTVWELMTFGAKPYDGIPAREIPDLLEKGERLPQPPICTIDVYMIMVKCWMIDSECRPRFRELVSEFSRMARDPQRFVVIQNEDLGPASPLDSTFYRSLLEDDDMGDLVDAEEYLVPQQGFFCPDPAPGAGGMVHHRHRSSSTRSGGGDLTLGLEPSEEEAPRSPLAPSEGAGSDVFDGDLGMGAAKGLQSLPTHDPSPLQRYSEDPTVPLPSETDGYVAPLTCSPQPEYVNQPDVRPQPPSPREGPLPAARPAGATLERPKTLSPGKNGVVKDVFAFGGAVENPEYLTPQGGAAPQPHPPPAFSPAFDNLYYWDQDPPERGAPPSTFKGTPTAENPEYLGLDVPV

SEQ ID NO: 26 - protein, 1041 aa, synthetic construct
  REGION 1..1041: note = her2 isoform y
MELAALCRWGLLLALLPPGAASTQVCTGTDMKLRLPASPETHLDMLRHLYQGCQVVQGNLELTYLPTNASLSFLQDIQEVQGYVLIAHNQVRQVPLQRLRIVRGTQLFEDNYALAVLDNGDPLNNTTPVTGASPGGLRELQLRSLTEILKGGVLIQRNPQLCYQDTILWKDIFHKNNQLALTLIDTNRSRACHPCSPMCKGSRCWGESSEDCQSLTRTVCAGGCARCKGPLPTDCCHEQCAAGCTGPKHSDCLACLHFNHSGICELHCPALVTYNTDTFESMPNPEGRYTFGASCVTACPYNYLSTDVGSCTLVCPLHNQEVTAEDGTQRCEKCSKPCARVCYGLGMEHLREVRAVTSANIQEFAGCKKIFGSLAFLPESFDGDPASNTAPLQPEQLQVFETLEEITGYLYISAWPDSLPDLSVFQNLQVIRGRILHNGAYSLTLQGLGISWLGLRSLRELGSGLALIHHNTHLCFVHTVPWDQLFRNPHQALLHTANRPEDECVGEGLACHQLCARGHCWGPGPTQCVNCSQFLRGQECVEECRVLQGLPREYVNARHCLPCHPECQPQNGSVTCFGPEADQCVACAHYKDPPFCVARCPSGVKPDLSYMPIWKFPDEEGACQPCPINCTHSCVDLDDKGCPAEQRASPLTSIISAVVGILLVVVLGVVFGILIKRRQQKIRKYTMRRLLQETELVEPLTPSGAMPNQAQMRILKETELRKGIWIPDGENVKIPVAIKVLRENTSPKANKEILDEAYVMAGVGSPYVSRLLGICLTSTVQLVTQLMPYGCLLDHVRENRGRLGSQDLLNWCMQIAKGMSYLEDVRLVHRDLAARNVLVKSPNHVKITDFGLARLLDIDETEYHADGGKVPIKWMALESILRRRFTHQSDVWSYGVTVWELMTFGAKPYDGIPAREIPDLLEKGERLPQPPICTIDVYMIMVKCWMIDSECRPRFRELVSEFSRMARDPQRFVVIQNEDLGPASPLDSTFYRSLLEDDDMGDLVDAEEYLVPQQGFFCPDPAPGAGGMVHHRHRSSSTRNM

SEQ ID NO: 27 - protein, 919 aa, synthetic construct
  REGION 1..919: note = her2 isoform z
PCARVCYGLGMEHLREVRAVTSANIQEFAGCKKIFGSLAFLPESFDGDPASNTAPLQPEQLQVFETLEEITGYLYISAWPDSLPDLSVFQNLQVIRGRILHNGAYSLTLQGLGISWLGLRSLRELGSGLALIHHNTHLCFVHTVPWDQLFRNPHQALLHTANRPEDECVGEGLACHQLCARGHCWGPGPTQCVNCSQFLRGQECVEECRVLQGLPREYVNARHCLPCHPECQPQNGSVTCFGPEADQCVACAHYKDPPFCVARCPSGVKPDLSYMPIWKFPDEEGACQPCPINCTHSCVDLDDKGCPAEQRASPLTSIISAVVGILLVVVLGVVFGILIKRRQQKIRKYTMRRLLQETELVEPLTPSGAMPNQAQMRILKETELRKVKVLGSGAFGTVYKGIWIPDGENVKIPVAIKVLRENTSPKANKEILDEAYVMAGVGSPYVSRLLGICLTSTVQLVTQLMPYGCLLDHVRENRGRLGSQDLLNWCMQIAKGMSYLEDVRLVHRDLAARNVLVKSPNHVKITDFGLARLLDIDETEYHADGGKVPIKWMALESILRRRFTHQSDVWSYGVTVWELMTFGAKPYDGIPAREIPDLLEKGERLPQPPICTIDVYMIMVKCWMIDSECRPRFRELVSEFSRMARDPQRFVVIQNEDLGPASPLDSTFYRSLLEDDDMGDLVDAEEYLVPQQGFFCPDPAPGAGGMVHHRHRSSSTRSGGGDLTLGLEPSEEEAPRSPLAPSEGAGSDVFDGDLGMGAAKGLQSLPTHDPSPLQRYSEDPTVPLPSETDGYVAPLTCSPQPEYVNQPDVRPQPPSPREGPLPAARPAGATLERPKTLSPGKNGVVKDVFAFGGAVENPEYLTPQGGAAPQPHPPPAFSPAFDNLYYWDQDPPERGAPPSTFKGTPTAENPEYLGLDVPV

SEQ ID NO: 28 - protein, 938 aa, synthetic construct
  REGION 1..938: note = her2 isoform aa
MELAALCRWGLLLALLPPGAASTQVCTGTDMKLRLPASPETHLDMLRHLYQGCQVVQGNLELTYLPTNASLSFLQDIQEVQGYVLIAHNQVRQVPLQRLRIVRGTQLFEDNYALAVLDNGDPLNNTTPVTGASPGGLRELQLRSLTEILKGGVLIQRNPQLCYQDTILWKDIFHKNNQLALTLIDTNRSRACHPCSPMCKGSRCWGESSEDCQSLTRTVCAGGCARCKGPLPTDCCHEQCAAGCTGPKHSDCLACLHFNHSGICELHCPALVTYNTDTFESMPNPEGRYTFGASCVTACPYNYLSTDVGSCTLVCPLHNQEVTAEDGTQRCEKCSKPCARVCYGLGMEHLREVRAVTSANIQEFAGCKKIFGSLAFLPESFDGDPASNTAPLQPEQLQVFETLEEITGYLYISAWPDSLPDLSVFQNLQVIRGRILHNGAYSLTLQGLGISWLGLRSLRELGSGLALIHHNTHLCFVHTVPWDQLFRNPHQALLHTANRPEDECVGEGLACHQLCARGHCWGPGPTQCVNCSQFLRGQECVEECRVLQGLPREYVNARHCLPCHPECQPQNGSVTCFGPEADQCVACAHYKDPPFCVARCPSGVKPDLSYMPIWKFPDEEGACQPCPINCTHSCVDLDDKGCPAEQRASPLTSIISAVVGILLVVVLGVVFGILIKRRQQKIRKYTMRRLLQETELVEPLTPSGAMPNQAQMRILKETELRKVKVLGSGAFGTVYKSGGGDLTLGLEPSEEEAPRSPLAPSEGAGSDVFDGDLGMGAAKGLQSLPTHDPSPLQRYSEDPTVPLPSETDGYVAPLTCSPQPEYVNQPDVRPQPPSPREGPLPAARPAGATLERPKTLSPGKNGVVKDVFAFGGAVENPEYLTPQGGAAPQPHPPPAFSPAFDNLYYWDQDPPERGAPPSTFKGTPTAENPEYLGLDVPV

SEQ ID NO: 29 - protein, 909 aa, synthetic construct
  REGION 1..909: note = her2 isoform bb
MELAALCRWGLLLALLPPGAASTQVCTGTDMKLRLPASPETHLDMLRHLYQGCQVVQGNLELTYLPTNASLSFLQDIQEVQGYVLIAHNQVRQVPLQRLRIVRGTQLFEDNYALAVLDNGDPLNNTTPVTGASPGGLRELQLRSLTEILKGGVLIQRNPQLCYQDTILWKDIFHKNNQLALTLIDTNRSRACHPCSPMCKGSRCWGESSEDCQSLTRTVCAGGCARCKGPLPTDCCHEQCAAGCTGPKHSDCLACLHFNHSGICELHCPALVTYNTDTFESMPNPEGRYTFGASCVTACPYNYLSTDVGSCTLVCPLHNQEVTAEDGTQRCEKCSKPCARVCYGLGMEHLREVRAVTSANIQEFAGCKKIFGSLAFLPESFDGDPASNTAPLQPEQLQVFETLEEITVLRENTSPKANKEILDEAYVMAGVGSPYVSRLLGICLTSTVQLVTQLMPYGCLLDHVRENRGRLGSQDLLNWCMQIAKGMSYLEDVRLVHRDLAARNVLVKSPNHVKITDFGLARLLDIDETEYHADGGKVPIKWMALESILRRRFTHQSDVWSYGVTVWELMTFGAKPYDGIPAREIPDLLEKGERLPQPPICTIDVYMIMVKCWMIDSECRPRFRELVSEFSRMARDPQRFVVIQNEDLGPASPLDSTFYRSLLEDDDMGDLVDAEEYLVPQQGFFCPDPAPGAGGMVHHRHRSSSTRSGGGDLTLGLEPSEEEAPRSPLAPSEGAGSDVFDGDLGMGAAKGLQSLPTHDPSPLQRYSEDPTVPLPSETDGYVAPLTCSPQPEYVNQPDVRPQPPSPREGPLPAARPAGATLERPKTLSPGKNGVVKDVFAFGGAVENPEYLTPQGGAAPQPHPPPAFSPAFDNLYYWDQDPPERGAPPSTFKGTPTAENPEYLGLDVPV

SEQ ID NO: 30 - protein, 11 aa, synthetic construct
  REGION 1..11: note = CDR-L1
RASQDVNTAVA

SEQ ID NO: 31 - protein, 11 aa, synthetic construct
  REGION 1..11: note = CDR-L1
KASQDVYNAVA

SEQ ID NO: 32 - protein, 6 aa, synthetic construct
  REGION 1..6: note = CDR-L2
SASFLY

SEQ ID NO: 33 - protein, 7 aa, synthetic construct
  REGION 1..7: note = CDR-L2
SASSRYT

SEQ ID NO: 34 - protein, 8 aa, synthetic construct
  REGION 1..8: note = CDR-L3
QQHYTTPP

SEQ ID NO: 35 - protein, 9 aa, synthetic construct
  REGION 1..9: note = CDR-L3
QQHFRTPFT

SEQ ID NO: 36 - protein, 10 aa, synthetic construct
  REGION 1..10: note = CDR-H1
GFNIKDTYIH

SEQ ID NO: 37 - protein, 5 aa, synthetic construct
  REGION 1..5: note = CDR-H1
NYGMN

SEQ ID NO: 38 - protein, 18 aa, synthetic construct
  REGION 1..18: note = CDR-H2
ARIYPTNGYTRYADSVKG

SEQ ID NO: 39 - protein, 17 aa, synthetic construct
  REGION 1..17: note = CDR-H2
WINTSTGESTFADDFKG

SEQ ID NO: 40 - protein, 13 aa, synthetic construct
  REGION 1..13: note = CDR-H3
SRWGGDGFYAMDY

SEQ ID NO: 41 - protein, 13 aa, synthetic construct
  REGION 1..13: note = CDR-H3
SRWGGDGFYAMDV

SEQ ID NO: 42 - protein, 10 aa, synthetic construct
  REGION 1..10: note = CDR-H3
WEVYHGYVPY

SEQ ID NO: 43 - protein, 123 aa, synthetic construct
  REGION 1..123: note = CT-292 VH full
EVQLVESGGGLVQPGGSLRLSCAASGFNIKDTYIHWVRQAPGKGLEWVARIYPTNGYTRYADSVKGRFTISADTSKNTAYLQMNSLRAEDTAVYYCSRWGGDGFYAMDVWGQGTLVTVSSAAA

SEQ ID NO: 44 - protein, 109 aa, synthetic construct
  REGION 1..109: note = CT-292 VL full
DIQMTQSPSSLSASVGDRVTITCRASQDVNTAVAWYQQKPGKAPKLLIYSASFLYSGVPSRFSGSRSGTDFTLTISSLQPEDFATYYCQQHYTTPPTFGQGTKVEIKRT

SEQ ID NO: 45 - protein, 119 aa, synthetic construct
  REGION 1..119: note = CT-297 /ct-1095VH full
QVQLQQSGPELKKPGETVKISCKASGYPFTNYGMNWVKQAPGQGLKWMGWINTSTGESTFADDFKGRFDFSLETSANTAYLQINNLKSEDSATYFCARWEVYHGYVPYWGQGTTVTVSS

SEQ ID NO: 46 - protein, 122 aa, synthetic construct
  REGION 1..122: note = CT-297 VL full
GGGGSGGGGSGGGGSDIQLTQSHKFLSTSVGDRVSITCKASQDVYNAVAWYQQKPGQSPKLLIYSASSRYTGVPSRFTGSGSGPDFTFTISSVQAEDLAVYFCQQHFRTPFTFGSGTKLEIK

SEQ ID NO: 47 - protein, 120 aa, synthetic construct [sequence omitted]

SEQ ID NO: 48 - protein, 107 aa, synthetic construct [sequence omitted]

SEQ ID NO: 49 - protein, 107 aa, synthetic construct
  REGION 1..107: note = CT-1095 VL full
DIQLTQSHKFLSTSVGDRVSITCKASQDVYNAVAWYQQKPGQSPKLLIYSASSRYTGVPSRFTGSGSGPDFTFTISSVQAEDLAVYFCQQHFRTPFTFGSGTKLEIK

SEQ ID NO: 50 - protein, 119 aa, synthetic construct
  REGION 1..119: note = VH full
QVQLQQSGPELKKPGETVKISCKASGYPFTNYGMNWVKQAPGQGLKWMGWINTSTGESTFADDFKGRFDFSLETSANTAYLQINNLKSEDMATYFCARWEVYHGYVPYWGQGTTVTVSS

SEQ ID NO: 51 - protein, 269 aa, synthetic construct
  REGION 1..269: note = CT292 scFv domain
MDFQVQIFSFLLISASVIMSRGDIQMTQSPSSLSASVGDRVTITCRASQDVNTAVAWYQQKPGKAPKLLIYSASFLYSGVPSRFSGSRSGTDFTLTISSLQPEDFATYYCQQHYTTPPTFGQGTKVEIKRTGSTSGSGKPGSGEGSEVQLVESGGGLVQPGGSLRLSCAASGFNIKDTYIHWVRQAPGKGLEWVARIYPTNGYTRYADSVKGRFTISADTSKNTAYLQMNSLRAEDTAVYYCSRWGGDGFYAMDVWGQGTLVTVSSAAA

SEQ ID NO: 52 - DNA, 807 bp, synthetic construct
  misc_feature 1..807: note = CT292 scFv domain
  source 1..807: mol_type = other DNA
atggattttcaggtgcagattttcagcttcctgctaatcagtgcctcagtcataatgtccagaggagatatccagatgacccagtccccgagctccctgtccgcctctgtgggcgatagggtcaccatcacctgccgtgccagtcaggatgtgaatactgctgtagcctggtatcaacagaaaccaggaaaagctccgaaactactgatttactcggcatccttcctttattctggagtcccttctcgcttctctggatctagatctgggacggatttcactctgaccatcagcagtctgcagccggaagacttcgcaacttattactgtcagcaacattatactactcctcccacgttcggacagggtaccaaggtggagatcaaacgcactgggtctacatctggatctgggaagccgggttctggtgagggttctgaggttcagctggtggagtctggcggtggcctggtgcagccagggggctcactccgtttgtcctgtgcagcttctggcttcaacattaaagacacctatatacactgggtgcgtcaggccccgggtaagggcctggaatgggttgcaaggatttatcctacgaatggttatactagatatgccgatagcgtcaagggccgtttcactataagcgcagacacatccaaaaacacagcctacctgcagatgaacagcctgcgtgctgaggacactgccgtctattattgttctagatggggaggggacggcttctatgctatggacgtgtggggtcaaggaaccctggtcaccgtctcctcggcggccgca

SEQ ID NO: 53 - protein, 263 aa, synthetic construct
  REGION 1..263: note = CT297 scFv domain
MDMRVPAQLLGLLLLWLRGARCQVQLQQSGPELKKPGETVKISCKASGYPFTNYGMNWVKQAPGQGLKWMGWINTSTGESTFADDFKGRFDFSLETSANTAYLQINNLKSEDSATYFCARWEVYHGYVPYWGQGTTVTVSSGGGGSGGGGSGGGGSDIQLTQSHKFLSTSVGDRVSITCKASQDVYNAVAWYQQKPGQSPKLLIYSASSRYTGVPSRFTGSGSGPDFTFTISSVQAEDLAVYFCQQHFRTPFTFGSGTKLEIK

SEQ ID NO: 54 - DNA, 789 bp, synthetic construct
  misc_feature 1..789: note = CT297 scFv domain
  source 1..789: mol_type = other DNA
atggacatgagggtccccgctcagctcctggggctcctgctactctggctccgaggtgccagatgtcaggtacaactgcagcagtcaggacctgaactgaagaagcctggagagacagtcaagatctcctgcaaggcctctgggtatcctttcacaaactatggaatgaactgggtgaagcaggctccaggacagggtttaaagtggatgggctggattaacacctccactggagagtcaacatttgctgatgacttcaagggacggtttgacttctctttggaaacctctgccaacactgcctatttgcagatcaacaacctcaaaagtgaagactcggctacatatttctgtgcaagatgggaggtttaccacggctacgttccttactggggccaagggaccacggtcaccgtttcctctggcggtggcggttctggtggcggtggctccggcggtggcggttctgacatccagctgacccagtctcacaaattcctgtccacttcagtaggagacagggtcagcatcacctgcaaggccagtcaggatgtgtataatgctgttgcctggtatcaacagaaaccaggacaatctcctaaacttctgatttactcggcatcctcccggtacactggagtcccttctcgcttcactggcagtggctctgggccggatttcactttcaccatcagcagtgtgcaggctgaagacctggcagtttatttctgtcagcaacattttcgtactccattcacgttcggctcggggacaaaattggagatcaaa

SEQ ID NO: 55 - protein, 267 aa, synthetic construct
  REGION 1..267: note = CT298 scFv domain
MLLLVTSLLLCELPHPAFLLIPDIQMTQSPSSLSASVGDRVTITCRASQDVNTAVAWYQQKPGKAPKLLIYSASFLYSGVPSRFSGSRSGTDFTLTISSLQPEDFATYYCQQHYTTPPTFGQGTKVEIKGSTSGGGSGGGSGGGGSSEVQLVESGGGLVQPGGSLRLSCAASGFNIKDTYIHWVRQAPGKGLEWVARIYPTNGYTRYADSVKGRFTISADTSKNTAYLQMNSLRAEDTAVYYCSRWGGDGFYAMDYWGQGTLVTVSS

SEQ ID NO: 56 - DNA, 801 bp, synthetic construct
  misc_feature 1..801: note = CT298 scFv domain
  source 1..801: mol_type = other DNA
atgctgctactggtcaccagtctactgctgtgcgaactgccacatccggccttcctgctaataccggatatccagatgacccagtccccgagctccctgtccgcctctgtgggcgatagggtcaccatcacctgccgtgccagtcaggatgtgaatactgctgtagcctggtatcaacagaaaccaggaaaagctccgaaactactgatttactcggcatccttcctttattctggagtcccttctcgcttctctggatctagatctgggacggatttcactctgaccatcagcagtctgcagccggaagacttcgcaacttattactgtcagcaacattatactactcctcccacgttcggacagggtaccaaggtggagatcaaagggtctacatctggcggtggctctggtggcggttccggcggtggcggttcttccgaggttcagctggtggagtctggcggtggcctggtgcagccagggggctcactccgtttgtcctgtgcagcttctggcttcaacattaaagacacctatatacactgggtgcgtcaggccccgggtaagggcctggaatgggttgcaaggatttatcctacgaatggttatactagatatgccgatagcgtcaagggccgtttcactataagcgcagacacatccaaaaacacagcctacctgcagatgaacagcctgcgtgctgaggacactgccgtctattattgttctagatggggaggggacggcttctatgctatggactattggggtcaaggaaccctggtcaccgtctcctcg

SEQ ID NO: 57 - protein, 267 aa, synthetic construct; identical to SEQ ID NO: 55
  REGION 1..267: note = CT299 scFv domain

SEQ ID NO: 58 - DNA, 801 bp, synthetic construct; identical to SEQ ID NO: 56
  misc_feature 1..801: note = CT299 scFv domain
  source 1..801: mol_type = other DNA

SEQ ID NO: 59 - protein, 263 aa, synthetic construct; identical to SEQ ID NO: 53
  REGION 1..263: note = CT1094 scFv domain

SEQ ID NO: 60 - DNA, 789 bp, synthetic construct; identical to SEQ ID NO: 54
  misc_feature 1..789: note = CT1094 scFv domain
  source 1..789: mol_type = other DNA

SEQ ID NO: 61 - protein, 263 aa, synthetic construct
  REGION 1..263: note = CT1095 scFv domain
MDMRVPAQLLGLLLLWLRGARCQVQLQQSGPELKKPGETVKISCKASGYPFTNYGMNWVKQAPGQGLKWMGWINTSTGESTFADDFKGRFDFSLETSANTAYLQINNLKSEDMATYFCARWEVYHGYVPYWGQGTTVTVSSGGGGSGGGGSGGGGSDIQLTQSHKFLSTSVGDRVSITCKASQDVYNAVAWYQQKPGQSPKLLIYSASSRYTGVPSRFTGSGSGPDFTFTISSVQAEDLAVYFCQQHFRTPFTFGSGTKLEIK

SEQ ID NO: 62 - DNA, 789 bp, synthetic construct
  misc_feature 1..789: note = CT1095 scFv domain
  source 1..789: mol_type = other DNA
atggacatgagggtccccgctcagctcctggggctcctgctactctggctccgaggtgccagatgtcaggtacaactgcagcagtcaggacctgaactgaagaagcctggagagacagtcaagatctcctgcaaggcctctgggtatcctttcacaaactatggaatgaactgggtgaagcaggctccaggacagggtttaaagtggatgggctggattaacacctccactggagagtcaacatttgctgatgacttcaagggacggtttgacttctctttggaaacctctgccaacactgcctatttgcagatcaacaacctcaaaagtgaagacatggctacatatttctgtgcaagatgggaggtttaccacggctacgttccttactggggccaagggaccacggtcaccgtttcctctggcggtggcggttctggtggcggtggctccggcggtggcggttctgacatccagctgacccagtctcacaaattcctgtccacttcagtaggagacagggtcagcatcacctgcaaggccagtcaggatgtgtataatgctgttgcctggtatcaacagaaaccaggacaatctcctaaacttctgatttactcggcatcctcccggtacactggagtcccttctcgcttcactggcagtggctctgggccggatttcactttcaccatcagcagtgtgcaggctgaagacctggcagtttatttctgtcagcaacattttcgtactccattcacgttcggctcggggacaaaattggagatcaaa

SEQ ID NO: 63 - protein, 247 aa, synthetic construct
  REGION 1..247: note = C-001765 PA2.1 scFv (mouse)
DVLMTQTPLSLPVSLGDQASISCRSSQSIVHSNGNTYLEWYLQKPGQSPKLLIYKVSNRFSGVPDRFSGSGSGTDFTLKISRVEAEDLGVYYCFQGSHVPRTSGGGTKLEIKGGGGSGGGGSGGGGSGGQVQLQQSGPELVKPGASVRISCKASGYTFTSYHIHWVKQRPGQGLEWIGWIYPGNVNTEYNEKFKGKATLTADKSSSTAYMHLSSLTSEDSAVYFCAREEITYAMDYWGQGTSVTVSS

SEQ ID NO: 64 - protein, 247 aa, synthetic construct
  REGION 1..247: note = C-002159 PA2.1.8 scFv (humanized)
QVQLVQSGAEVKKPGSSVKVSCKASGYTFTSYHIHWVRQAPGQGLEWMGWIYPGNVNTEYNEKFKGKATITADKSTSTAYMELSSLRSEDTAVYYCAREEITYAMDYWGQGTTVTVSSGGGGSGGGGSGGGGSGGEIVLTQSPGTLSLSPGERATLSCRSSQSIVHSNGNTYLEWYQQKPGQAPRLLIYKVSNRFSGIPDRFSGSGSGTDFTLTISRLEPEDFAVYYCFQGSHVPRTFGGGTKVEIK

SEQ ID NO: 65 - protein, 247 aa, synthetic construct
  REGION 1..247: note = C-002160 PA2.1.9 scFv (humanized)
QVQLVQSGAEVKKPGSSVKVSCKASGYTFTSYHIHWVRQAPGQGLEWMGWIYPGNVNTEYNEKFKGKATITADKSTSTAYMELSSLRSEDTAVYYCAREEITYAMDYWGQGTTVTVSSGGGGSGGGGSGGGGSGGDIVMTQTPLSLPVTPGEPASISCRSSQSIVHSNGNTYLEWYLQKPGQSPQLLIYKVSNRFSGVPDRFSGSGSGTDFTLKISRVEAEDVGVYYCFQGSHVPRTFGGGTKVEIK

SEQ ID NO: 66 - protein, 247 aa, synthetic construct
  REGION 1..247: note = C-002161 PA2.1.10 scFv (humanized)
EVQLVESGGGLVKPGGSLRLSCAASGYTFTSYHIHWVRQAPGKGLEWVGWIYPGNVNTEYNEKFKGRFTISRDDSKNTLYLQMNSLKTEDTAVYYCAREEITYAMDYWGQGTTVTVSSGGGGSGGGGSGGGGSGGDIQMTQSPSSLSASVGDRVTITCRSSQSIVHSNGNTYLEWYQQKPGKAPKLLIYKVSNRFSGVPSRFSGSGSGTDFTLTISSLQPEDFATYYCFQGSHVPRTFGGGTKVEIK

SEQ ID NO: 67 - protein, 247 aa, synthetic construct
  REGION 1..247: note = C-002162 PA2.1.14 scFv (humanized)
QVQLVQSGAEVKKPGSSVKVSCKASGYTFTSYHIHWVRQAPGQGLEWIGWIYPGNVNTEYNEKFKGKATITADESTNTAYMELSSLRSEDTAVYYCAREEITYAMDYWGQGTLVTVSSGGGGSGGGGSGGGGSGGDIQMTQSPSTLSASVGDRVTITCRSSQSIVHSNGNTYLEWYQQKPGKAPKLLIYKVSNRFSGVPARFSGSGSGTEFTLTISSLQPDDFATYYCFQGSHVPRTFGQGTKVEVK

SEQ ID NO: 68 - protein, 247 aa, synthetic construct
  REGION 1..247: note = C-002163 PA2.1.18 scFv (humanized)
QVQLVQSGAEVKKPGSSVKVSCKASGYTFTSYHMHWVRQAPGQGLEWIGYIYPGNVNTEYNEKFKGKATLTADKSTNTAYMELSSLRSEDTAVYFCAREEITYAMDYWGQGTLVTVSSGGGGSGGGGSGGGGSGGDVQMTQSPSTLSASVGDRVTITCSSSQSIVHSNGNTYMEWYQQKPGKAPKLLIYKVSNRFSGVPDRFSGSGSGTEFTLTISSLQPDDFATYYCHQGSHVPRTFGQGTKVEVK

SEQ ID NO: 69 - protein, 247 aa, synthetic construct
  REGION 1..247: note = C-002164 BB7.2 scFv (mouse)
QVQLQQSGPELVKPGASVKMSCKASGYTFTSYHIQWVKQRPGQGLEWIGWIYPGDGSTQYNEKFKGKTTLTADKSSSTAYMLLSSLTSEDSAIYFCAREGTYYAMDYWGQGTSVTVSSGGGGSGGGGSGGGGSGGDVLMTQTPLSLPVSLGDQVSISCRSSQSIVHSNGNTYLEWYLQKPGQSPKLLIYKVSNRFSGVPDRFSGSGSGTDFTLKISRVEAEDLGVYYCFQGSHVPRTFGGGTKLEIK

SEQ ID NO: 70 - protein, 247 aa, synthetic construct
  REGION 1..247: note = C-002165 BB7.2.1 scFv (humanized)
QLQLQESGPGLVKPSETLSLTCTVSGYTFTSYHIQWIRQPPGKGLEWIGWIYPGDGSTQYNEKFKGRATISVDTSKNQFSLNLDSVSAADTAIYYCAREGTYYAMDYWGKGSTVTVSSGGGGSGGGGSGGGGSGGDIQMTQSPSSLSASVGDRVTITCRSSQSIVHSNGNTYLEWYQQKPGKAPKLLIYKVSNRFSGVPSRFSGSGSGTDFTFTISSLQPEDIATYYCFQGSHVPRTFGPGTKVDIK

SEQ ID NO: 71 - protein, 247 aa, synthetic construct
  REGION 1..247: note = C-002166 BB7.2.2 scFv (humanized)
EVQLVQSGAELKKPGSSVKVSCKASGYTFTSYHIQWVKQAPGQGLEWIGWIYPGDGSTQYNEKFKGKATLTVDKSTNTAYMELSSLRSEDTAVYYCAREGTYYAMDYWGQGTLVTVSSGGGGSGGGGSGGGGSGGDIQMTQSPSTLSASVGDRVTITCRSSQSIVHSNGNTYLEWYQQKPGKAPKLLIYKVSNRFSGVPSRFSGSGSGTDFTLTISSLQPDDFATYYCFQGSHVPRTFGQGTKVEVK

SEQ ID NO: 72 - protein, 247 aa, synthetic construct
  REGION 1..247: note = C-002167 BB7.2.3 scFv (humanized)
QVQLVQSGAEVKKPGSSVKVSCKASGYTFTSYHIQWVRQAPGQGLEWMGWIYPGDGSTQYNEKFKGRVTITADKSTSTAYMELSSLRSEDTAVYYCAREGTYYAMDYWGQGTTVTVSSGGGGSGGGGSGGGGSGGEIVLTQSPGTLSLSPGERATLSCRSSQSIVHSNGNTYLEWYQQKPGQAPRLLIYKVSNRFSGIPDRFSGSGSGTDFTLTISRLEPEDFAVYYCFQGSHVPRTFGGGTKVEIK

SEQ ID NO: 73 - protein, 247 aa, synthetic construct
  REGION 1..247: note = C-002168 BB7.2.5 scFv (humanized)
QVTLKQSGAEVKKPGSSVKVSCTASGYTFTSYHVSWVRQAPGQGLEWLGRIYPGDGSTQYNEKFKGKVTITADKSMDTSFMELTSLTSEDTAVYYCAREGTYYAMDLWGQGTLVTVSSGGGGSGGGGSGGGGSGGEIVLTQSPGTLSLSPGERATLSCRSSQSIVHSNGNTYLAWYQQKPGQAPRLLISKVSNRFSGVPDRFSGSGSGTDFTLTISRLEPEDFAVYYCQQGSHVPRTFGGGTKVEIK

SEQ ID NO: 74 - protein, 247 aa, synthetic construct
  REGION 1..247: note = C-002169 BB7.2.6 scFv (humanized)
QVQLVQSGAEVKKPGASVKVSCKASGYTFTSYHMHWVRQAPGQRLEWMGWIYPGDGSTQYNEKFKGKVTITRDTSASTAYMELSSLRSEDTAVYYCAREGTYYAMDYWGQGTLVTVSSGGGGSGGGGSGGGGSGGDIVMTQTPLSLPVTPGEPASISCRSSQSIVHSNGNTYLDWYLQKPGQSPQLLIYKVSNRFSGVPDRFSGSGSGTDFTLKISRVEAEDVGVYYCMQGSHVPRTFGGGTKVEIK

SEQ ID NO: 75 - DNA, 741 bp, synthetic construct
  misc_feature 1..741: note = C-001765 PA2.1 scFv (mouse)
  source 1..741: mol_type = other DNA
gatgttttgatgacccaaactccactctccctgcctgtcagtcttggagatcaagcctccatctcttgcagatctagtcagagcattgtacatagtaatggaaacacctatttagaatggtacctgcagaaaccaggccagtctccaaagctcctgatctacaaagtttccaaccgattttctggggtcccagacaggttcagtggcagtggatcagggacagatttcacactcaagatcagtagagtggaggctgaggatctgggagtttattactgctttcaaggttcacatgttcctcggacgtccggtggaggcaccaagctggaaatcaaaggcggaggtggaagcggagggggaggatctggcggcggaggaagcggaggccaggtccagctgcagcagtctggacctgagctggtgaagcctggggcttcagtgaggatatcctgcaaggcttctggctacaccttcacaagttaccatatacattgggtgaagcagaggcctggacagggacttgagtggattggatggatttatcctggaaatgttaatactgagtacaatgagaagttcaagggcaaggccacactgactgcagacaaatcgtccagcacagcctacatgcacctcagcagcctgacctctgaggactctgcggtctatttctgtgccagagaggagattacctatgctatggactactggggtcaaggaacctcagtcaccgtgtcctca

SEQ ID NO: 76 - DNA, 741 bp, synthetic construct
  misc_feature 1..741: note = C-002159 PA2.1.8 scFv (humanized)
  source 1..741: mol_type = other DNA
caggtgcagctggtgcagtctggggctgaggtgaagaagcctgggtcctcagtgaaggtttcctgcaaggcttctggatacaccttcactagctatcatatacattgggtgcgccaggcccccggacaagggcttgagtggatgggatggatctaccctggcaatgttaacacagaatataatgagaagttcaagggcaaagccaccattaccgcggacaaatccacgagcacagcctacatggagctgagcagcctgagatctgaagacacggctgtgtattactgtgcgagggaggaaattacctacgctatggactactggggccagggaaccacagtcaccgtgtcctcaggcggaggtggaagcggagggggaggatctggcggcggaggaagcggaggcgagattgtattgacccagagcccaggcaccctgagcctctctccaggagagcgggccaccctcagttgtagatccagtcagagtattgtacacagtaatgggaacacctatttggaatggtatcagcagaaaccaggtcaagccccaagattgctcatctacaaagtctctaacagatttagtggtattccagacaggttcagcggttccggaagtggtactgatttcaccctcacgatctccaggctcgagccagaagatttcgccgtttattactgttttcaaggttcacatgtgccgcgcacattcggtgggggtactaaagtagaaatcaaa

SEQ ID NO: 77 - DNA, 741 bp, synthetic construct
  misc_feature 1..741: note = C-002160 PA2.1.9 scFv (humanized)
  source 1..741: mol_type = other DNA
caggtgcagctggtgcagtctggggctgaggtgaagaagcctgggtcctcagtgaaggtttcctgcaaggcttctggatacaccttcactagctatcatatacattgggtgcgccaggcccccggacaagggcttgagtggatgggatggatctaccctggcaatgttaacacagaatataatgagaagttcaagggcaaagccaccattaccgcggacaaatccacgagcacagcctacatggagctgagcagcctgagatctgaagacacggctgtgtattactgtgcgagggaggaaattacctacgctatggactactggggccagggaaccacagtcaccgtgtcctcaggcggaggtggaagcggagggggaggatctggcggcggaggaagcggaggcgacattgtaatgacccagaccccactcagcctgcccgtcactccaggagagccggccagcatcagttgtagatccagtcagagtattgtacacagtaatgggaacacctatttggaatggtatctgcagaaaccaggtcaatccccacaattgctcatctacaaagtctctaacagatttagtggtgtaccagacaggttcagcggttccggaagtggtactgatttcaccctcaagatctccagggtcgaggcagaagatgtcggcgtttattactgttttcaaggttcacatgtgccgcgcacattcggtgggggtactaaagtagaaatcaaa

SEQ ID NO: 78 - DNA, 741 bp, synthetic construct
  misc_feature 1..741: note = C-002161 PA2.1.10 scFv (humanized)
  source 1..741: mol_type = other DNA
gaggtgcagctggtggagtctgggggtgggctggtgaagcctgggggctcactgaggctttcctgcgcggcttctggatacaccttcactagctatcatatacattgggtgcgccaggcccccggaaaagggcttgagtgggtgggatggatctaccctggcaatgttaacacagaatataatgagaagttcaagggcagattcaccattagcagggacgattccaagaacacactctacctgcagatgaacagcctgaaaactgaagacacggctgtgtattactgtgcgagggaggaaattacctacgctatggactactggggccagggaaccacagtcaccgtgtcctcaggcggaggtggaagcggagggggaggatctggcggcggaggaagcggaggcgacattcaaatgacccagagcccatccagcctgagcgcatctgtaggtgaccgggtcaccatcacttgtagatccagtcagagtattgtacacagtaatgggaacacctatttggaatggtatcagcagaaaccaggtaaagccccaaaattgctcatctacaaagtctctaacagatttagtggtgtaccaagcaggttcagcggttccggaagtggtactgatttcaccctcacgatctcctctctccagccagaagatttcgccacttattactgttttcaaggttcacatgtgccgcgcacattcggtgggggtactaaagtagaaatcaaa

SEQ ID NO: 79 - DNA, 741 bp, synthetic construct
  misc_feature 1..741: note = C-002162 PA2.1.14 scFv (humanized)
  source 1..741: mol_type = other DNA
caggtgcagctggtgcagtctggggctgaggtgaagaagcctgggtcctcagtgaaggtttcctgcaaggcttctggatacaccttcactagctatcatatacattgggtgcgccaggcccccggacaagggcttgagtggatcggatggatctaccctggcaatgttaacacagaatataatgagaagttcaagggcaaagccaccattaccgcggacgaatccacgaacacagcctacatggagctgagcagcctgagatctgaagacacggctgtgtattactgtgcgagggaggaaattacctacgctatggactactggggccagggaaccctggtcaccgtgtcctcaggcggaggtggaagcggagggggaggatctggcggcggaggaagcggaggcgacattcaaatgacccagagcccatccaccctgagcgcatctgtaggtgaccgggtcaccatcacttgtagatccagtcagagtattgtacacagtaatgggaacacctatttggaatggtatcagcagaaaccaggtaaagccccaaaattgctcatctacaaagtctctaacagatttagtggtgtaccagccaggttcagcggttccggaagtggtactgaattcaccctcacgatctcctctctccagccagatgatttcgccacttattactgttttcaaggttcacatgtgccgcgcacattcggtcagggtactaaagtagaagtcaaa

SEQ ID NO: 80 - DNA, 741 bp, synthetic construct
  misc_feature 1..741: note = C-002163 PA2.1.18 scFv (humanized)
  source 1..741: mol_type = other DNA
caggtgcagctggtgcagtctggggctgaggtgaagaagcctgggtcctcagtgaaggtttcctgcaaggcttctggatacaccttcactagctatcatatgcattgggtgcgccaggcccccggacaagggcttgagtggatcggatacatctaccctggcaatgttaacacagaatataatgagaagttcaagggcaaagccacccttaccgcggacaaatccacgaacacagcctacatggagctgagcagcctgagatctgaagacacggctgtgtatttctgtgcgagggaggaaattacctacgctatggactactggggccagggaaccctggtcaccgtgtcctcaggcggaggtggaagcggagggggaggatctggcggcggaggaagcggaggcgacgttcaaatgacccagagcccatccaccctgagcgcatctgtaggtgaccgggtcaccatcacttgtagctccagtcagagtattgtacacagtaatgggaacacctatatggaatggtatcagcagaaaccaggtaaagccccaaaattgctcatctacaaagtctctaacagatttagtggtgtaccagacaggttcagcggttccggaagtggtactgaattcaccctcacgatctcctctctccagccagatgatttcgccacttattactgtcatcaaggttcacatgtgccgcgcacattcggtcagggtactaaagtagaagtcaaa

SEQ ID NO: 81 - DNA, 741 bp, synthetic construct
  misc_feature 1..741: note = C-002164 BB7.2 scFv (mouse)
  source 1..741: mol_type = other DNA
caggtgcagctgcagcagtctgggcctgagctggtgaagcctggggcctcagtgaagatgtcctgcaaggcttctggatacaccttcactagctatcatatccagtgggtgaagcagaggcctggacaagggcttgagtggatcggatggatctaccctggcgatggtagtacacagtataatgagaagttcaagggcaaaaccacccttaccgcggacaaatcctccagcacagcctacatgttgctgagcagcctgacctctgaagactctgctatctatttctgtgcgagggaggggacctactacgctatggactactggggccagggaacctcagtcaccgtgtcctcaggcggaggtggaagcggagggggaggatctggcggcggaggaagcggaggcgatgttttgatgacccagactccactctccctgcctgtctctcttggagaccaagtctccatctcttgtagatccagtcagagtattgtacacagtaatgggaacacctatttagaatggtatctgcagaaaccaggtcagtctccaaagttgctcatctacaaagtctctaacagatttagtggtgtaccagacaggttcagcggttccggaagtggtactgatttcaccctcaagatctcgagagtggaggctgaggatctgggagtttattactgttttcaaggttcacatgtgccgcgcacattcggtggaggtactaaactggaaatcaaa

SEQ ID NO: 82 - DNA, 741 bp, synthetic construct
  misc_feature 1..741: note = C-002165 BB7.2.1 scFv (humanized)
  source 1..741: mol_type = other DNA
cagctgcagctgcaggagtctgggcccgggctggtgaagccttcggaaacgctgagcctcacctgcacggtttctggatacaccttcaccagctatcatatccagtggatccgacagccccctggaaaagggcttgagtggatcggatggatctaccctggcgatggttcaacacagtacaatgagaagttcaagggcagagccacgattagcgtggacacatccaagaaccaattctccctgaacctggacagcgtgagtgctgcggacacggccatttattactgtgcgagagagggaacttactacgctatggactactggggcaaagggagcacggtcaccgtgtcctcaggcggaggtggaagcggagggggaggatctggcggcggaggaagcggaggcgacatccagatgacccagagcccaagctccctgagtgcgtccgtgggcgaccgcgtgaccatcacttgcagatcctctcagtccatcgtgcactccaacggcaacacgtacctcgagtggtaccagcagaagcccgggaaggccccgaaactgctcatctacaaggtgagcaaccggttctccggcgtccccagccgcttctcagggtccggctcggggacggatttcaccttcacgattagcagcttgcagcccgaagacatcgccacgtactactgctttcagggaagtcacgtgccgcgtaccttcgggccgggcacgaaagtggatattaag

SEQ ID NO: 83 - DNA, 741 bp, synthetic construct
  misc_feature 1..741: note = C-002166 BB7.2.2 scFv (humanized)
  source 1..741: mol_type = other DNA
gaggtgcagctggtgcagtctggggccgagctgaagaagcctgggtcctcggtgaaggtgtcctgcaaggcttctggatacaccttcaccagctatcatatccagtgggtaaaacaggcccctggacaagggcttgagtggatcggatggatctaccctggcgatggttcaacacagtacaatgagaagttcaagggcaaagccacgcttaccgtggacaaatccacgaacacagcctacatggagctgagcagcctgagatctgaggacacggccgtatattactgtgcgagagagggaacttactacgctatggactactggggccaagggaccctggtcaccgtgtcctcaggcggaggtggaagcggagggggaggatctggcggcggaggaagcggaggcgacatccagatgacccagagcccatccaccctgagtgcgtccgtgggcgaccgcgtgaccatcacttgcagatcctctcagtccatcgtgcactccaacggcaacacgtacctcgagtggtaccagcagaagcccgggaaggccccgaaactgctcatctacaaggtgagcaaccggttctccggcgtccccagccgcttctcagggtccggctcggggacggatttcaccctcacgattagcagcttgcagcccgatgacttcgccacgtactactgctttcagggaagtcacgtgccgcgtaccttcgggcagggcacgaaagtggaagttaag

SEQ ID NO: 84 - DNA, 741 bp, synthetic construct
  misc_feature 1..741: note = C-002167 BB7.2.3 scFv (humanized)
  source 1..741: mol_type = other DNA
caggtgcagctggtgcagtctggggccgaggtgaagaagcctgggtcctcggtgaaggtgtcctgcaaggcttctggatacaccttcaccagctatcatatccagtgggtacgacaggcccctggacaagggcttgagtggatgggatggatctaccctggcgatggttcaacacagtacaatgagaagttcaagggcagagtcacgattaccgcggacaaatccacgagcacagcctacatggagctgagcagcctgagatctgaggacacggccgtatattactgtgcgagagagggaacttactacgctatggactactggggccaagggaccacggtcaccgtgtcctcaggcggaggtggaagcggagggggaggatctggcggcggaggaagcggaggcgagatcgtcctgacccagagcccagggaccctgagtttgtccccgggcgagcgcgcgaccctcagttgcagatcctctcagtccatcgtgcactccaacggcaacacgtacctcgagtggtaccagcagaagcccgggcaggccccgcgactgctcatctacaaggtgagcaaccggttctccggcatccccgaccgcttctcagggtccggctcggggacggatttcaccctcacgattagccgcttggagcccgaagacttcgccgtgtactactgctttcagggaagtcacgtgccgcgtaccttcggggggggcacgaaagtggaaattaag

SEQ ID NO: 85 - DNA, 741 bp, synthetic construct
  misc_feature 1..741: note = C-002168 BB7.2.5 scFv (humanized)
  source 1..741: mol_type = other DNA
caggtgaccctgaagcagtctggggccgaggtgaagaagcctgggtcctcggtgaaggtgtcctgcacggcttctggatacaccttcaccagctatcatgtcagctgggtacgacaggcccctggacaagggcttgagtggttgggaaggatctaccctggcgatggttcaacacagtacaatgagaagttcaagggcaaagtcacgattaccgcggacaaatccatggacacatccttcatggagctgaccagcctgacatctgaggacacggccgtatattactgtgcgagagagggaacttactacgctatggacctctggggccaagggaccctggtcaccgtgtcctcaggcggaggtggaagcggagggggaggatctggcggcggaggaagcggaggcgagatcgtcctgacccagagcccagggaccctgagtttgtccccgggcgagcgcgcgaccctcagttgcagatcctctcagtccatcgtgcactccaacggcaacacgtacctcgcgtggtaccagcagaagcccgggcaggccccgcgactgctcatctccaaggtgagcaaccggttctccggcgtccccgaccgcttctcagggtccggctcggggacggatttcaccctcacgattagccgcttggagcccgaagacttcgccgtgtactactgccaacagggaagtcacgtgccgcgtaccttcggggggggcacgaaagtggaaattaag

SEQ ID NO: 86 - DNA, 741 bp, synthetic construct
  misc_feature 1..741: note = C-002169 BB7.2.6 scFv (humanized)
  source 1..741: mol_type = other DNA
caggtgcagctggtgcagtctggggccgaggtgaagaagcctggggcctcggtgaaggtgtcctgcaaggcttctggatacaccttcaccagctatcatatgcactgggtacgacaggcccctggacaaaggcttgagtggatgggatggatctaccctggcgatggttcaacacagtacaatgagaagttcaagggcaaagtcacgattacccgggacacatccgcgagcacagcctacatggagctgagcagcctgagatctgaggacacggccgtatattactgtgcgagagagggaacttactacgctatggactactggggccaagggaccctggtcaccgtgtcctcaggcggaggtggaagcggagggggaggatctggcggcggaggaagcggaggcgacatcgtcatgacccagaccccactgtccctgcctgtgaccccgggcgagcccgcgagcatcagttgcagatcctctcagtccatcgtgcactccaacggcaacacgtacctcgactggtacctgcagaagcccgggcagtccccgcaactgctcatctacaaggtgagcaaccggttctccggcgtccccgaccgcttctcagggtccggctcggggacggatttcaccctcaagattagccgcgtggaggccgaagacgtcggcgtgtactactgcatgcagggaagtcacgtgccgcgtaccttcggggggggcacgaaagtggaaattaag

SEQ ID NO: 87 - protein, 16 aa, synthetic construct
  REGION 1..16: note = CDR-L1
RSSQSIVHSNGNTYLE

SEQ ID NO: 88 - protein, 16 aa, synthetic construct
  REGION 1..16: note = CDR-L1
SSSQSIVHSNGNTYME

SEQ ID NO: 89 - protein, 16 aa, synthetic construct
  REGION 1..16: note = CDR-L1
RSSQSIVHSNGNTYLD

SEQ ID NO: 90 - protein, 12 aa, synthetic construct
  REGION 1..12: note = CDR-L2
KVSNRFSGVPDR

SEQ ID NO: 91 - protein, 12 aa, synthetic construct
  REGION 1..12: note = CDR-L2
KVSNRFSGVPAR

SEQ ID NO: 92 - protein, 9 aa, synthetic construct
  REGION 1..9: note = CDR-L3
FQGSHVPRT

SEQ ID NO: 93 - protein, 9 aa, synthetic construct
  REGION 1..9: note = CDR-L3
HQGSHVPRT

SEQ ID NO: 94 - protein, 9 aa, synthetic construct
  REGION 1..9: note = CDR-L3
MQGSHVPRT

SEQ ID NO: 95 - protein, 12 aa, synthetic construct
  REGION 1..12: note = CDR-H1
ASGYTFTSYHIH

SEQ ID NO: 96 - protein, 12 aa, synthetic construct
  REGION 1..12: note = CDR-H1
ASGYTFTSYHMH

SEQ ID NO: 97 - protein, 11 aa, synthetic construct
  REGION 1..11: note = CDR-H1
SGYTFTSYHMH

SEQ ID NO: 98 - protein, 18 aa, synthetic construct
  REGION 1..18: note = CDR-H2
WIYPGNVNTEYNEKFKGK

SEQ ID NO: 99 - protein, 18 aa, synthetic construct
  REGION 1..18: note = CDR-H2
YIYPGNVNTEYNEKFKGK

SEQ ID NO: 100 - protein, 17 aa, synthetic construct
  REGION 1..17: note = CDR-H2
WIYPGDGSTQYNEKFKG

SEQ ID NO: 101 - protein, 9 aa, synthetic construct
  REGION 1..9: note = CDR-H3
EEITYAMDY

SEQ ID NO: 102 - protein, 9 aa, synthetic construct
  REGION 1..9: note = CDR-H3
EGTYYAMDY

SEQ ID NO: 103 - protein, 10 aa, synthetic construct
  REGION 1..10: note = LB-CYBA-1Y
  SITE 10: note = Xaa is Tyr or His
STMERWGQKX

SEQ ID NO: 104 - protein, 11 aa, synthetic construct
  REGION 1..11: note = LB-OAS1-1R
  SITE 7: note = Xaa is Arg or Thr
ETDDPRXYQKY

SEQ ID NO: 105 - protein, 9 aa, synthetic construct
  REGION 1..9: note = HA-1/A2
  SITE 3: note = Xaa is His or Arg
VLXDDLLEA

SEQ ID NO: 106 - protein, 9 aa, synthetic construct
  REGION 1..9: note = HA-2
  SITE 9: note = Xaa is Val or Met
YIGEVLVSX

SEQ ID NO: 107 - protein, 9 aa, synthetic construct
  REGION 1..9: note = HA-8
  SITE 1: note = Xaa is Arg or Pro
XTLDKVLEV

SEQ ID NO: 108 - protein, 9 aa, synthetic construct
  REGION 1..9: note = HA-3
  SITE 2: note = Xaa is Thr or Met
VXEPGTAQY

SEQ ID NO: 109 - protein, 11 aa, synthetic construct
  REGION 1..11: note = HwA11-S
  SITE 6: note = Xaa is Ser or Thr
CIPPDXLLFPA

SEQ ID NO: 110 - protein, 11 aa, synthetic construct
  REGION 1..11: note = LB-ADIR-1F
  SITE 9: note = Xaa is Phe or Ser
SVAPALALXPA

SEQ ID NO: 111 - protein, 9 aa, synthetic construct
  REGION 1..9: note = LB-HIVEP1-1S
  SITE 6: note = Xaa is Ser or Asn
SLPKHXVTI

SEQ ID NO: 112 - protein, 9 aa, synthetic construct
  REGION 1..9: note = LB-NISCH-1A
  SITE 7: note = Xaa is Ala or Val
ALAPAPXEV

SEQ ID NO: 113 - protein, 9 aa, synthetic construct
  REGION 1..9: note = LB-SSR1-1S
  SITE 1: note = Xaa is Ser or Leu
XLAVAQDLT

SEQ ID NO: 114 - protein, 10 aa, synthetic construct
  REGION 1..10: note = LB-WNK1-1I
  SITE 7: note = Xaa is Ile or Met
RTLSPEXITV

SEQ ID NO: 115 - protein, 10 aa, synthetic construct
  REGION 1..10: note = T4A
  SITE 10: note = Xaa is Ala or Glu
GLYTYWSAGX

SEQ ID NO: 116 - protein, 9 aa, synthetic construct
  REGION 1..9: note = UTA2-1
  SITE 3: note = Xaa is Leu or Pro
QLXNSVLTL

SEQ ID NO: 117 - protein, 9 aa, synthetic construct
  REGION 1..9: note = LB-CLYBL-1Y
  SITE 5: note = Xaa is Tyr or Asp
SLAAXIPRL

SEQ ID NO: 118 - protein, 10 aa, synthetic construct
  REGION 1..10: note = TRIM22
  SITE 7: note = Xaa is Cys or Arg
MAVPPCXIGV

SEQ ID NO: 119 - protein, 11 aa, synthetic construct
  REGION 1..11: note = PARP10-1L
  SITE 3: note = Xaa is Leu or Pro
GLXGQEGLVEI

SEQ ID NO: 120 - protein, 9 aa, synthetic construct
  REGION 1..9: note = FAM119A-1T
  SITE 8: note = Xaa is Thr or Ile
AMLERQFXV

SEQ ID NO: 121 - protein, 9 aa, synthetic construct
  REGION 1..9: note = GLRX3-1S
  SITE 3: note = Xaa is Ser or Pro
FLXSANEHL

SEQ ID NO: 122 - protein, 9 aa, synthetic construct
  REGION 1..9: note = HNF4G-1M
  SITE 2: note = Xaa is Met or Ile
MXYKDILLL

SEQ ID NO: 123 - protein, 9 aa, synthetic construct
  REGION 1..9: note = HMMR-1V
  SITE 6: note = Xaa is Val or Ala
SLQEKXAKA

SEQ ID NO: 124 - protein, 9 aa, synthetic construct
  REGION 1..9: note = BCL2A1
  SITE 4: note = Xaa is Asn or Lys
VLQXVAFSV

SEQ ID NO: 125 - protein, 10 aa, synthetic construct
  REGION 1..10: note = CDC26-1F
  SITE 1: note = Xaa is Phe or Ser
XVAGTQEVFV

SEQ ID NO: 126 - protein, 10 aa, synthetic construct
  REGION 1..10: note = APOBEC3F-1S/A
  SITE 3: note = Xaa is Ser or Ala
FLXEHPNVTL

SEQ ID NO: 127 - protein, 9 aa, synthetic construct
  REGION 1..9: note = LB-PRCP-1D
  SITE 8: note = Xaa is Asp or Glu
FMWDVAEXL

SEQ ID NO: 128 - protein, 11 aa, synthetic construct
  REGION 1..11: note = LB-PRCP-1D
  SITE 8: note = Xaa is Asp or Glu
FMWDVAEXLKA

SEQ ID NO: 129 - protein, 9 aa, synthetic construct
  REGION 1..9: note = LB-CCL4-1T
  SITE 7: note = Xaa is Thr or Ser
CADPSEXWV

SEQ ID NO: 130 - protein, 9 aa, synthetic construct
  REGION 1..9: note = LB-NCAPD3-1Q
  SITE 3: note = Xaa is Gln or Arg
WLXGVVPVV

SEQ ID NO: 131 - protein, 9 aa, synthetic construct
  REGION 1..9: note = LB-NDC80-1P
  SITE 7: note = Xaa is Pro or Ala
HLEEQIXKV

SEQ ID NO: 132 - protein, 9 aa, synthetic construct
  REGION 1..9: note = LB-TTK-1D
  SITE 4: note = Xaa is Asp or Glu
RLHXGRVFV

SEQ ID NO: 133 - protein, 9 aa, synthetic construct
  REGION 1..9: note = WDR27-1L
  SITE 2: note = Xaa is Leu or Pro
SXDDHVVAV

SEQ ID NO: 134 - protein, 11 aa, synthetic construct
  REGION 1..11: note = MIIP
  SITE 8: note = Xaa is Lys or Glu
SEESAVPXRSW

SEQ ID NO: 135 - protein, 10 aa, synthetic construct
  REGION 1..10: note = MIIP
  SITE 7: note = Xaa is Lys or Glu
EESAVPXRSW

SEQ ID NO: 136 - protein, 9 aa, synthetic construct
  REGION 1..9: note = LB-DHX33-1C
  SITE 9: note = Xaa is Cys or Arg
YLYEGGISX

SEQ ID NO: 137 - protein, 10 aa, synthetic construct
  REGION 1..10: note = PANE1
RVWDLPGVLK

SEQ ID NO: 138 - protein, 10 aa, synthetic construct
  REGION 1..10: note = SP110
  SITE 4: note = Xaa is Arg or Gly
SLPXGTSTPK

SEQ ID NO: 139 - protein, 9 aa, synthetic construct
  REGION 1..9: note = ACC-1C/Y
  SITE 5: note = Xaa is Tyr or Cys
DYLQXVLQI

SEQ ID NO: 140 - protein, 9 aa, synthetic construct
  REGION 1..9: note = P2RX7
  SITE 6: note = Xaa is His or Arg
WFHHCXPKY

SEQ ID NO: 141 - protein, 9 aa, synthetic construct
  REGION 1..9: note = ACC-4
  SITE 9: note = Xaa is Arg or Gly
ATLPLLCAX

SEQ ID NO: 142 - protein, 10 aa, synthetic construct
  REGION 1..10: note = ACC-5
  SITE 10: note = Xaa is Arg or Gly
WATLPLLCAX

SEQ ID NO: 143 - protein, 9 aa, synthetic construct
  REGION 1..9: note = AKAP13
  SITE 9: note = Xaa is Met or Thr
APAGVREVX

SEQ ID NO: 144 - protein, 10 aa, synthetic construct
  REGION 1..10: note = LB-APOBEC3B-1K
  SITE 1: note = Xaa is Lys or Glu
XPQYHAEMCF

SEQ ID NO: 145 - protein, 9 aa, synthetic construct
  REGION 1..9: note = APOBEC3H
  SITE 5: note = Xaa is Lys or Glu
KPQQXGLRL

SEQ ID NO: 146 - protein, 9 aa, synthetic construct
  REGION 1..9: note = LB-ARHGDIB-1R
  SITE 7: note = Xaa is Arg or Pro
LPRACWXEA

SEQ ID NO: 147 - protein, 11 aa, synthetic construct
  REGION 1..11: note = LB-BCAT2-1R
  SITE 3: note = Xaa is Arg or Thr
QPXRALLFVIL

SEQ ID NO: 148 - protein, 11 aa, synthetic construct
  REGION 1..11: note = BFAR
  SITE 11: note = Xaa is Met or Arg
APNTGRANQQX

SEQ ID NO: 149 - protein, 11 aa, synthetic construct
  REGION 1..11: note = C14orf169
  SITE 4: note = Xaa is Ala or Val
RPRXPTEELAL

SEQ ID NO: 150 - protein, 11 aa, synthetic construct
  REGION 1..11: note = LB-C16ORF-1R
  SITE 1: note = Xaa is Arg or Trp
XPCPSVGLSFL

SEQ ID NO: 151 - protein, 9 aa, synthetic construct
  REGION 1..9: note = C18orf21
  SITE 6: note = Xaa is Ala or Thr
NPATPXSKL

SEQ ID NO: 152 - protein, 10 aa, synthetic construct
  REGION 1..10: note = LB-EBI3-1I
  SITE 8: note = Xaa is Ile or Val
RPRARYYXQV

SEQ ID NO: 153 - protein, 9 aa, synthetic construct
  REGION 1..9: note = POP1
  SITE 7: note = Xaa is Asn or Lys
LPQKKSXAL

SEQ ID NO: 154 - protein, 9 aa, synthetic construct
  REGION 1..9: note = SCRIB
  SITE 7: note = Xaa is Leu or Pro
LPQQPPXSL

SEQ ID NO: 155 - protein, 9 aa, synthetic construct
  REGION 1..9: note = MTRR
  SITE 5: note = Xaa is Ser or Leu
SPASXRTDL

SEQ ID NO: 156 - protein, 9 aa, synthetic construct
  REGION 1..9: note = LLGL2
  SITE 5: note = Xaa is Arg or His
SPSLXILAI

SEQ ID NO: 157 - protein, 11 aa, synthetic construct
  REGION 1..11: note = LB-ECGF-1H
  SITE 3: note = Xaa is His or Arg
RPXAIRRPLAL

SEQ ID NO: 158 - protein, 11 aa, synthetic construct
  REGION 1..11: note = LB-ERAP1-1R
  SITE 3: note = Xaa is Arg or Pro
HPXQEQIALLA

SEQ ID NO: 159 - protein, 9 aa, synthetic construct
  REGION 1..9: note = LB-ERAP1-1R
  SITE 3: note = Xaa is Arg or Pro
HPXQEQIAL

SEQ ID NO: 160 - protein, 9 aa, synthetic construct
  REGION 1..9: note = LB-FUCA2-1V
  SITE 5: note = Xaa is Val or Met
RLRQXGSWL

SEQ ID NO: 161 - protein, 9 aa, synthetic construct
  REGION 1..9: note = LB-GEMIN4-1V
  SITE 9: note = Xaa is Val or Glu
FPALRFVEX

SEQ ID NO: 162 - protein, 11 aa, synthetic construct
  REGION 1..11: note = HDGF
  SITE 11: note = Xaa is Leu or Pro
LPMEVEKNSTX

SEQ ID NO: 163 - protein, 11 aa, synthetic construct
  REGION 1..11: note = LB-PDCD11-1F
  SITE 8: note = Xaa is Phe or Leu
GPDSSKTXLCL

SEQ ID NO: 164 - protein, 9 aa, synthetic construct
  REGION 1..9: note = LB-PFAS-1P
  SITE 2: note = Xaa is Pro or Ser
AXGHTRRKL

SEQ ID NO: 165 - protein, 10 aa, synthetic construct
  REGION 1..10: note = LB-TEP1-1S
  SITE 9: note = Xaa is Ser or Pro
APDGAKVAXL

SEQ ID NO: 166 - protein, 11 aa, synthetic construct
  REGION 1..11: note = LB-TMEM8A-1I
  SITE 7: note = Xaa is Ile or Val
RPRSVTXQPLL

SEQ ID NO: 167 - protein, 10 aa, synthetic construct
  REGION 1..10: note = LB-USP15-1I
  SITE 8: note = Xaa is Ile or Thr
MPSHLRNXLL

SEQ ID NO: 168 - protein, 9 aa, synthetic construct
  REGION 1..9: note = LRH-1
TPNQRQNVC

SEQ ID NO: 169 - protein, 9 aa, synthetic construct
  REGION 1..9: note = LB-MOB3A-1C
  SITE 1: note = Xaa is Cys or Ser
XPRPGTWTC

SEQ ID NO: 170 - protein, 11 aa, synthetic construct
  REGION 1..11: note = LB-ZDHHC6-1Y
  SITE 4: note = Xaa is Tyr or His
RPRXWILLVKI

SEQ ID NO: 171 - protein, 10 aa, synthetic construct
  REGION 1..10: note = ZAPHIR
IPRDSWWVEL

SEQ ID NO: 172 - protein, 9 aa, synthetic construct
  REGION 1..9: note = HEATR1
  SITE 7: note = Xaa is Glu or Gly
ISKERAXAL

SEQ ID NO: 173 - protein, 9 aa, synthetic construct
  REGION 1..9: note = LB-GSTP1-1V
  SITE 7: note = Xaa is Val or Ile
DLRCKYXSL

SEQ ID NO: 174 - protein, 9 aa, synthetic construct
  REGION 1..9: note = HA-1/B60
  SITE 6: note = Xaa is His or Arg
KECVLXDDL

SEQ ID NO: 175 - protein, 9 aa, synthetic construct
  REGION 1..9: note = LB-SON-1R
  SITE 6: note = Xaa is Arg or Cys
SETKQXTVL

SEQ ID NO: 176 - protein, 9 aa, synthetic construct
  REGION 1..9: note = LB-SWAP70-1Q
  SITE 6: note = Xaa is Gln or Glu
MEQLEXLEL

SEQ ID NO: 177 - protein, 9 aa, synthetic construct
  REGION 1..9: note = LB-TRIP10-1EPC
  SITE 2: note = Xaa is Glu or Gly
  SITE 3: note = Xaa is Pro or Ser
  SITE 7: note = Xaa is Cys or Gly
GXXQDLXTL

SEQ ID NO: 178 - protein, 9 aa, synthetic construct
  REGION 1..9: note = LB-NUP133-1R
  SITE 8: note = Xaa is Arg or Gln
SEDLILCXL

SEQ ID NO: 179 - protein, 11 aa, synthetic construct
  REGION 1..11: note = LB-ZNFX1-1Q
  SITE 8: note = Xaa is Gln or His
NEIEDVWXLDL

SEQ ID NO: 180 - protein, 11 aa, synthetic construct
  REGION 1..11: note = SLC1A5
  SITE 3: note = Xaa is Ala or Pro
AEXTANGGLAL

SEQ ID NO: 181 - protein, 10 aa, synthetic construct
  REGION 1..10: note = ACC-2
  SITE 6: note = Xaa is Asp or Gly
KEFEDXIINW

SEQ ID NO: 182 - protein, 11 aa, synthetic construct
  REGION 1..11: note = ACC-6
MEIFIEVFSHF

SEQ ID NO: 183 - protein, 10 aa, synthetic construct
  REGION 1..10: note = HB-1H/Y
  SITE 8: note = Xaa is His or Tyr
EEKRGSLXVW

SEQ ID NO: 184 - protein, 9 aa, synthetic construct
  REGION 1..9: note = DPH1
  SITE 2: note = Xaa is Val or Leu
SXLPEVDVW

SEQ ID NO: 185 - protein, 9 aa, synthetic construct
  REGION 1..9: note = UGT2B17/A02
CVATMIFMI

SEQ ID NO: 186 - protein, 10 aa, synthetic construct
  REGION 1..10: note = UGT2B17/A29
AELLNIPFLY

SEQ ID NO: 187 - protein, 10 aa, synthetic construct
  REGION 1..10: note = UGT2B17/B44
AELLNIPFLY

SEQ ID NO: 188 - protein, 9 aa, synthetic construct
  REGION 1..9: note = DFFRY
  SITE 4: note = Xaa is Cys or Ser
IVDXLTEMY

SEQ ID NO: 189 - protein, 9 aa, synthetic construct
  REGION 1..9: note = SMCY
FIDSYICQV

SEQ ID NO: 190 - protein, 11 aa, synthetic construct
  REGION 1..11: note = TMSB4Y
EVLLRPGLHFR

SEQ ID NO: 191 - protein, 11 aa, synthetic construct
  REGION 1..11: note = SMCY
  SITE 3: note = Xaa is Ser or Ala
  SITE 8: note = Xaa is Arg or Gln
SPXVDKAXAEL

SEQ ID NO: 192 - protein, 8 aa, synthetic construct
  REGION 1..8: note = UTY
  SITE 5: note = Xaa is His or Arg
  SITE 7: note = Xaa is Asp or Asn
LPHNXTXL

SEQ ID NO: 193 - protein, 9 aa, synthetic construct
  REGION 1..9: note = RPS4Y
  SITE 8: note = Xaa is Val or Leu
TIRYPDPXI

SEQ ID NO: 194 - protein, 10 aa, synthetic construct
  REGION 1..10: note = UTY
  SITE 1: note = Xaa is Arg or Gly
  SITE 6: note = Xaa is Glu or Ala
  SITE 8: note = Xaa is Val or Pro
XESEEXSXSL

SEQ ID NO: 195 - protein, 9 aa, synthetic construct
  REGION 1..9: note = HA-1 variant H peptide
VLHDDLLEA

SEQ ID NO: 196 - protein, 19 aa, synthetic construct
  REGION 1..19: note = P2A self-cleaving polypeptide
ATNFSLLKQAGDVEENPGP

SEQ ID NO: 197 - protein, 608 aa, synthetic construct
  REGION 1..608: note = C-003754 KP7 HA-1H TCRalpha T48C P2A KP7 HA-1H TCRbeta S57C
MVKIRQFLLAILWLQLSCVSAAKNEVEQSPQNLTAQEGEFITINCSYSVGISALHWLQQHPGGGIVSLFMLSSGKKKHGRLIATINIQEKHSSLHITASHPRDSAVYICAVRSVSGAGSYQLTFGKGTKLSVIPNIQNPDPAVYQLRDSKSSDKSVCLFTDFDSQTNVSQSKDSDVYITDKCVLDMRSMDFKSNSAVAWSNKSDFACANAFNNSIIPEDTFFPSPESSCDVKLVEKSFETDTNLNFQNLSVIGFRILLLKVAGFNLLMTLRLWSSGSGATNFSLLKQAGDVEENPGPMGTSLLCWMALCLLGADHADTGVSQNPRHKITKRGQNVTFRCDPISEHNRLYWYRQTLGQGPEFLTYFQNEAQLEKSRLLSDRFSAERPKGSFSTLEIQRTEQGDSAMYLCASSIDSFNEQFFGPGTRLTVLEDLKNVFPPEVAVFEPSEAEISHTQKATLVCLATGFYPDHVELSWWVNGKEVHSGVCTDPQPLKEQPALNDSRYCLSSRLRVSATFWQNPRNHFRCQVQFYGLSENDEWTQDRAKPVTQIVSAEAWGRADCGFTSESYQQGVLSATILYEILLGKATLYAVLVSALVLMAMVKRKDSRG

SEQ ID NO: 198 - protein, 250 aa, synthetic construct
  REGION 1..250: note = HA-1H TCR alpha
MVKIRQFLLAILWLQLSCVSAAKNEVEQSPQNLTAQEGEFITINCSYSVGISALHWLQQHPGGGIVSLFMLSSGKKKHGRLIATINIQEKHSSLHITASHPRDSAVYICAVRSVSGAGSYQLTFGKGTKLSVIPNIQNPDPAVYQLRDSKSSDKSVCLFTDFDSQTNVSQSKDSDVYITDKCVLDMRSMDFKSNSAVAWSNKSDFACANAFNNSIIPEDTFFPSPESSCDVKLVEKSFETDTNLNFQNLS

SEQ ID NO: 199 - protein, 276 aa, synthetic construct
  REGION 1..276: note = HA-1(H) TCRbeta
MGTSLLCWMALCLLGADHADTGVSQNPRHKITKRGQNVTFRCDPISEHNRLYWYRQTLGQGPEFLTYFQNEAQLEKSRLLSDRFSAERPKGSFSTLEIQRTEQGDSAMYLCASSIDSFNEQFFGPGTRLTVLEDLKNVFPPEVAVFEPSEAEISHTQKATLVCLATGFYPDHVELSWWVNGKEVHSGVCTDPQPLKEQPALNDSRYCLSSRLRVSATFWQNPRNHFRCQVQFYGLSENDEWTQDRAKPVTQIVSAEAWGRADCGFTSESYQQGVLS

SEQ ID NO: 200 - protein, 440 aa, synthetic construct
  REGION 1..440: note = C-003755 KP7 HA-1H FTCRalpha LIR1 TICD
MVKIRQFLLAILWLQLSCVSAAKNEVEQSPQNLTAQEGEFITINCSYSVGISALHWLQQHPGGGIVSLFMLSSGKKKHGRLIATINIQEKHSSLHITASHPRDSAVYICAVRSVSGAGSYQLTFGKGTKLSVIPNIQNPDPAVYQLRDSKSSDKSVCLFTDFDSQTNVSQSKDSDVYITDKCVLDMRSMDFKSNSAVAWSNKSDFACANAFNNSIIPEDTFFPSPESSCDVKLVEKSFETDTNLNFQNLSVVIGILVAVILLLLLLLLLFLILRHRRQGKHWTSTQRKADFQHPAGAVGPEPTDRGLQWRSSPAADAQEENLYAAVKHTQPEDGVEMDTRSPHDEDPQAVTYAEVKHSRPRREMASPPSPLSGEFLDTKDRQAEEDRQMDTEAAASEAPQDVTYAQLHSLTLRREATEPPPSQEGPSPAVPSIYATLAIH

SEQ ID NO: 201 - protein, 466 aa, synthetic construct
  REGION 1..466: note = C-003756 KP7 HA-1H FTCRbeta LIR1 TICD
MGTSLLCWMALCLLGADHADTGVSQNPRHKITKRGQNVTFRCDPISEHNRLYWYRQTLGQGPEFLTYFQNEAQLEKSRLLSDRFSAERPKGSFSTLEIQRTEQGDSAMYLCASSIDSFNEQFFGPGTRLTVLEDLKNVFPPEVAVFEPSEAEISHTQKATLVCLATGFYPDHVELSWWVNGKEVHSGVCTDPQPLKEQPALNDSRYCLSSRLRVSATFWQNPRNHFRCQVQFYGLSENDEWTQDRAKPVTQIVSAEAWGRADCGFTSESYQQGVLSVVIGILVAVILLLLLLLLLFLILRHRRQGKHWTSTQRKADFQHPAGAVGPEPTDRGLQWRSSPAADAQEENLYAAVKHTQPEDGVEMDTRSPHDEDPQAVTYAEVKHSRPRREMASPPSPLSGEFLDTKDRQAEEDRQMDTEAAASEAPQDVTYAQLHSLTLRREATEPPPSQEGPSPAVPSIYATLAIH

SEQ ID NO: 202 - DNA, 1827 bp, synthetic construct
  misc_feature 1..1827: note = C-003754 KP7 HA-1H TCRalpha T48C P2A KP7 HA-1H TCRbeta S57C
  source 1..1827: mol_type = other DNA
atggtgaagatccggcaatttttgttggctattttgtggcttcagctaagctgtgtaagtgccgccaaaaatgaagtggagcagagtcctcagaacctgactgcccaggaaggagaatttatcacaatcaactgcagttactcggtaggaataagtgccttacactggctgcaacagcatccaggaggaggcattgtttccttgtttatgctgagctcagggaagaagaagcatggaagattaattgccacaataaacatacaggaaaagcacagctccctgcacatcacagcctcccatcccagagactctgccgtctacatctgtgctgtcagaagcgtgtccggggccggctcctaccagctcacctttgggaaggggaccaaattatcagtcattccaaatatccagaaccctgaccctgccgtgtaccagctgagagactctaaatccagtgacaagtctgtctgcctattcaccgattttgattctcaaacaaatgtgtcacaaagtaaggattctgatgtgtatatcacagacaaatgtgtgctagacatgaggtctatggacttcaagagcaacagtgctgtggcctggagcaacaaatctgactttgcatgtgcaaacgccttcaacaacagcattattccagaagacaccttcttccccagcccagaaagttcctgtgatgtcaagctggtcgagaaaagctttgaaacagatacgaacctaaactttcaaaacctgtcagtgattgggttccgaatcctcctcctgaaagtggccgggtttaatctgctcatgacgctgcggctgtggtccagcggatccggagccaccaacttcagcctgctgaagcaggccggcgacgtggaggagaaccccggccccatgggcaccagcctcctctgctggatggccctgtgtctcctgggggcagatcacgcagatactggagtctcccagaaccccagacacaagatcacaaagaggggacagaatgtaactttcaggtgtgatccaatttctgaacacaaccgcctttattggtaccgacagaccctggggcagggcccagagtttctgacttacttccagaatgaagctcaactagaaaaatcaaggctgctcagtgatcggttctctgcagagaggcctaagggatctttctccaccttggagatccagcgcacagagcagggggactcggccatgtatctctgtgccagcagcatcgactccttcaacgagcagttcttcgggccgggcaccaggctcacggtcctcgaggacctgaaaaacgtgttcccacccgaggtcgctgtgtttgagccatcagaagcagagatctcccacacccaaaaggccacactggtgtgcctggccacaggcttctaccccgaccacgtggagctgagctggtgggtgaatgggaaggaggtgcacagtggggtctgcacagacccgcagcccctcaaggagcagcccgccctcaatgactccagatactgcctgagcagccgcctgagggtgtcggccaccttctggcagaacccccgcaaccacttccgctgtcaagtccagttctacgggctctcggagaatgacgagtggacccaggatagggccaaacctgtcacccagatcgtcagcgccgaggcctggggtagagcagactgtggcttcacctccgagtcttaccagcaaggggtcctgtctgccaccatcctctatgagatcttgctagggaaggccaccttgtatgccgtgctggtcagtgccctcgtgctgatggccatggtcaagagaaaggattccagaggctag

SEQ ID NO: 203 - DNA, 750 bp, synthetic construct
  misc_feature 1..750: note = HA-1H TCR alpha
  source 1..750: mol_type = other DNA
atggtgaagatccggcaatttttgttggctattttgtggcttcagctaagctgtgtaagtgccgccaaaaatgaagtggagcagagtcctcagaacctgactgcccaggaaggagaatttatcacaatcaactgcagttactcggtaggaataagtgccttacactggctgcaacagcatccaggaggaggcattgtttccttgtttatgctgagctcagggaagaagaagcatggaagattaattgccacaataaacatacaggaaaagcacagctccctgcacatcacagcctcccatcccagagactctgccgtctacatctgtgctgtcagaagcgtgtccggggccggctcctaccagctcacctttgggaaggggaccaaattatcagtcattccaaatatccagaaccctgaccctgccgtgtaccagctgagagactctaaatccagtgacaagtctgtctgcctattcaccgattttgattctcaaacaaatgtgtcacaaagtaaggattctgatgtgtatatcacagacaaatgtgtgctagacatgaggtctatggacttcaagagcaacagtgctgtggcctggagcaacaaatctgactttgcatgtgcaaacgccttcaacaacagcattattccagaagacaccttcttccccagcccagaaagttcctgtgatgtcaagctggtcgagaaaagctttgaaacagatacgaacctaaactttcaaaacctgtca

SEQ ID NO: 204 - DNA, 828 bp, synthetic construct
  misc_feature 1..828: note = HA-1(H) TCRbeta
  source 1..828: mol_type = other DNA
atgggcaccagcctcctctgctggatggccctgtgtctcctgggggcagatcacgcagatactggagtctcccagaaccccagacacaagatcacaaagaggggacagaatgtaactttcaggtgtgatccaatttctgaacacaaccgcctttattggtaccgacagaccctggggcagggcccagagtttctgacttacttccagaatgaagctcaactagaaaaatcaaggctgctcagtgatcggttctctgcagagaggcctaagggatctttctccaccttggagatccagcgcacagagcagggggactcggccatgtatctctgtgccagcagcatcgactccttcaacgagcagttcttcgggccgggcaccaggctcacggtcctcgaggacctgaaaaacgtgttcccacccgaggtcgctgtgtttgagccatcagaagcagagatctcccacacccaaaaggccacactggtgtgcctggccacaggcttctaccccgaccacgtggagctgagctggtgggtgaatgggaaggaggtgcacagtggggtctgcacagacccgcagcccctcaaggagcagcccgccctcaatgactccagatactgcctgagcagccgcctgagggtgtcggccaccttctggcagaacccccgcaaccacttccgctgtcaagtccagttctacgggctctcggagaatgacgagtggacccaggatagggccaaacctgtcacccagatcgtcagcgccgaggcctggggtagagcagactgtggcttcacctccgagtcttaccagcaaggggtcctgtct

SEQ ID NO: 205 - DNA, 1279 bp, synthetic construct
  misc_feature 1..1279: note = C-003755 KP7 HA-1H FTCRalpha LIR1 TICD
  source 1..1279: mol_type = other DNA
atggtgaagatccggcaatttttgttggctattttgtggcttcagctaagctgtgtaagtgccgccaaaaatgaagtggagcagagtcctcagaacctgactgcccaggaaggagaatttatcacaatcaactgcagttactcggtaggaataagtgccttacactggctgcaacagcatccaggaggaggcattgtttccttgtttatgctgagctcagggaagaagaagcatggaagattaattgccacaataaacatacaggaaaagcacagctccctgcacatcacagcctcccatcccagagactctgccgtctacatctgtgctgtcagaagcgtgtccggggccggctcctaccagctcacctttgggaaggggaccaaattatcagtcattccaaatatccagaaccctgaccctgccgtgtaccagctgagagactctaaatccagtgacaagtctgtctgcctattcaccgattttgattctcaaacaaatgtgtcacaaagtaaggattctgatgtgtatatcacagacaaatgtgtgctagacatgaggtctatggacttcaagagcaacagtgctgtggcctggagcaacaaatctgactttgcatgtgcaaacgccttcaacaacagcattattccagaagacaccttcttccccagcccagaaagttcctgtgatgtcaagctggtcgagaaaagctttgaaacagatacgaacctaaactttcaaaacctgtcagttgtgatcggcatcttggtggccgtcatcctactgctcctcctcctcctcctcctcttcctcatcctccgacatcgacgtcagggcaaacactggacatcgacccagagaaaggctgatttccaacatcctgcaggggctgtggggccagagcccacagacagaggcctgcagtggaggtccagcccagctgccgatgcccaggaagaaaacctctatgctgccgtgaagcacacacagcctgaggatggggtggagatggacactcggagcccacacgatgaagacccccaggcagtgacgtatgccgaggtgaaacactccagacctaggagagaaatggcctctcctccttccccactgtctggggaattcctggacacaaaggacagacaggcggaagaggacaggcagatggacactgaggctgctgcatctgaagccccccaggatgtgacctacgcccagctgcacagcttgaccctcagacgggaggcaactgagcctcctccatcccaggaagggccct

SEQ ID NO: 206 - DNA, 1401 bp, synthetic construct
  misc_feature 1..1401: note = C-003756 KP7 HA-1H FTCRbeta LIR1 TICD
  source 1..1401: mol_type = other DNA
atgggcaccagcctcctctgctggatggccctgtgtctcctgggggcagatcacgcagatactggagtctcccagaaccccagacacaagatcacaaagaggggacagaatgtaactttcaggtgtgatccaatttctgaacacaaccgcctttattggtaccgacagaccctggggcagggcccagagtttctgacttacttccagaatgaagctcaactagaaaaatcaaggctgctcagtgatcggttctctgcagagaggcctaagggatctttctccaccttggagatccagcgcacagagcagggggactcggccatgtatctctgtgccagcagcatcgactccttcaacgagcagttcttcgggccgggcaccaggctcacggtcctcgaggacctgaaaaacgtgttcccacccgaggtcgctgtgtttgagccatcagaagcagagatctcccacacccaaaaggccacactggtgtgcctggccacaggcttctaccccgaccacgtggagctgagctggtgggtgaatgggaaggaggtgcacagtggggtctgcacagacccgcagcccctcaaggagcagcccgccctcaatgactccagatactgcctgagcagccgcctgagggtgtcggccaccttctggcagaacccccgcaaccacttccgctgtcaagtccagttctacgggctctcggagaatgacgagtggacccaggatagggccaaacctgtcacccagatcgtcagcgccgaggcctggggtagagcagactgtggcttcacctccgagtcttaccagcaaggggtcctgtctgttgtgatcggcatcttggtggccgtcatcctactgctcctcctcctcctcctcctcttcctcatcctccgacatcgacgtcagggcaaacactggacatcgacccagagaaaggctgatttccaacatcctgcaggggctgtggggccagagcccacagacagaggcctgcagtggaggtccagcccagctgccgatgcccaggaagaaaacctctatgctgccgtgaagcacacacagcctgaggatggggtggagatggacactcggagcccacacgatgaagacccccaggcagtgacgtatgccgaggtgaaacactccagacctaggagagaaatggcctctcctccttccccactgtctggggaattcctggacacaaaggacagacaggcggaagaggacaggcagatggacactgaggctgctgcatctgaagccccccaggatgtgacctacgcccagctgcacagcttgaccctcagacgggaggcaactgagcctcctccatcccaggaagggccctctccagctgtgcccagcatctacgccactctggccatccactag

SEQ ID NO: 207 - protein, 269 aa, synthetic construct
  REGION 1..269: note = C-1765 (PA2.1, VL-VH)
MDMRVPAQLLGLLLLWLRGARCDVLMTQTPLSLPVSLGDQASISCRSSQSIVHSNGNTYLEWYLQKPGQSPKLLIYKVSNRFSGVPDRFSGSGSGTDFTLKISRVEAEDLGVYYCFQGSHVPRTSGGGTKLEIKGGGGSGGGGSGGGGSGGQVQLQQSGPELVKPGASVRISCKASGYTFTSYHIHWVKQRPGQGLEWIGWIYPGNVNTEYNEKFKGKATLTADKSSSTAYMHLSSLTSEDSAVYFCAREEITYAMDYWGQGTSVTVSS

SEQ ID NO: 208 - DNA, 807 bp, synthetic construct
  misc_feature 1..807: note = C-1765 (PA2.1, VL-VH)
  source 1..807: mol_type = other DNA
atggacatgagggtccccgctcagctcctggggctcctgctactctggctccgaggtgccagatgtgatgttttgatgacccaaactccactctccctgcctgtcagtcttggagatcaagcctccatctcttgcagatctagtcagagcattgtacatagtaatggaaacacctatttagaatggtacctgcagaaaccaggccagtctccaaagctcctgatctacaaagtttccaaccgattttctggggtcccagacaggttcagtggcagtggatcagggacagatttcacactcaagatcagtagagtggaggctgaggatctgggagtttattactgctttcaaggttcacatgttcctcggacgtccggtggaggcaccaagctggaaatcaaaggcggaggtggaagcggagggggaggatctggcggcggaggaagcggaggccaggtccagctgcagcagtctggacctgagctggtgaagcctggggcttcagtgaggatatcctgcaaggcttctggctacaccttcacaagttaccatatacattgggtgaagcagaggcctggacagggacttgagtggattggatggatttatcctggaaatgttaatactgagtacaatgagaagttcaagggcaaggccacactgactgcagacaaatcgtccagcacagcctacatgcacctcagcagcctgacctctgaggactctgcggtctatttctgtgccagagaggagattacctatgctatggactactggggtcaaggaacctcagtcaccgtgtcctca

SEQ ID NO: 209 - protein, 269 aa, synthetic construct
  REGION 1..269: note = C-2162 (huPA2.1, VH-VL)
MDMRVPAQLLGLLLLWLRGARCQVQLVQSGAEVKKPGSSVKVSCKASGYTFTSYHIHWVRQAPGQGLEWIGWIYPGNVNTEYNEKFKGKATITADESTNTAYMELSSLRSEDTAVYYCAREEITYAMDYWGQGTLVTVSSGGGGSGGGGSGGGGSGGDIQMTQSPSTLSASVGDRVTITCRSSQSIVHSNGNTYLEWYQQKPGKAPKLLIYKVSNRFSGVPARFSGSGSGTEFTLTISSLQPDDFATYYCFQGSHVPRTFGQGTKVEVK

SEQ ID NO: 210 - DNA, 807 bp, synthetic construct
  misc_feature 1..807: note = C-2162 (huPA2.1, VH-VL)
  source 1..807: mol_type = other DNA
atggacatgagggtccccgctcagctcctggggctcctgctactctggctccgaggtgccagatgtcaggtgcagctggtgcagtctggggctgaggtgaagaagcctgggtcctcagtgaaggtttcctgcaaggcttctggatacaccttcactagctatcatatacattgggtgcgccaggcccccggacaagggcttgagtggatcggatggatctaccctggcaatgttaacacagaatataatgagaagttcaagggcaaagccaccattaccgcggacgaatccacgaacacagcctacatggagctgagcagcctgagatctgaagacacggctgtgtattactgtgcgagggaggaaattacctacgctatggactactggggccagggaaccctggtcaccgtgtcctcaggcggaggtggaagcggagggggaggatctggcggcggaggaagcggaggcgacattcaaatgacccagagcccatccaccctgagcgcatctgtaggtgaccgggtcaccatcacttgtagatccagtcagagtattgtacacagtaatgggaacacctatttggaatggtatcagcagaaaccaggtaaagccccaaaattgctcatctacaaagtctctaacagatttagtggtgtaccagccaggttcagcggttccggaagtggtactgaattcaccctcacgatctcctctctccagccagatgatttcgccacttattactgttttcaaggttcacatgtgccgcgcacattcggtcagggtactaaagtagaagtcaaa

SEQ ID NO: 211 - protein, 269 aa, synthetic construct
  REGION 1..269: note = C-2163 (huPA2.1, VH-VL)
MDMRVPAQLLGLLLLWLRGARCQVQLVQSGAEVKKPGSSVKVSCKASGYTFTSYHMHWVRQAPGQGLEWIGYIYPGNVNTEYNEKFKGKATLTADKSTNTAYMELSSLRSEDTAVYFCAREEITYAMDYWGQGTLVTVSSGGGGSGGGGSGGGGSGGDVQMTQSPSTLSASVGDRVTITCSSSQSIVHSNGNTYMEWYQQKPGKAPKLLIYKVSNRFSGVPDRFSGSGSGTEFTLTISSLQPDDFATYYCHQGSHVPRTFGQGTKVEVK

SEQ ID NO: 212 - DNA, 807 bp, synthetic construct
  misc_feature 1..807: note = C-2163 (huPA2.1, VH-VL)
  source 1..807: mol_type = other DNA
atggacatgagggtccccgctcagctcctggggctcctgctactctggctccgaggtgccagatgtcaggtgcagctggtgcagtctggggctgaggtgaagaagcctgggtcctcagtgaaggtttcctgcaaggcttctggatacaccttcactagctatcatatgcattgggtgcgccaggcccccggacaagggcttgagtggatcggatacatctaccctggcaatgttaacacagaatataatgagaagttcaagggcaaagccacccttaccgcggacaaatccacgaacacagcctacatggagctgagcagcctgagatctgaagacacggctgtgtatttctgtgcgagggaggaaattacctacgctatggactactggggccagggaaccctggtcaccgtgtcctcaggcggaggtggaagcggagggggaggatctggcggcggaggaagcggaggcgacgttcaaatgacccagagcccatccaccctgagcgcatctgtaggtgaccgggtcaccatcacttgtagctccagtcagagtattgtacacagtaatgggaacacctatatggaatggtatcagcagaaaccaggtaaagccccaaaattgctcatctacaaagtctctaacagatttagtggtgtaccagacaggttcagcggttccggaagtggtactgaattcaccctcacgatctcctctctccagccagatgatttcgccacttattactgtcatcaaggttcacatgtgccgcgcacattcggtcagggtactaaagtagaagtcaaa

SEQ ID NO: 213 - protein, 247 aa, synthetic construct
  REGION 1..247: note = C-001765 variant
MMTQTPLSLPVSLGDQASISCRSSQSIVHSNGNTYLEWYLQKPGQSPKLLIYKVSNRFSGVPDRFSGSGSGTDFTLKISRVEAEDLGVYYCFQGSHVPRTSGGGTKLEIKGGGGSGGGGSGGGGSGGQVQLQQSGPELVKPGASVRISCKASGYTFTSYHIHWVKQRPGQGLEWIGWIYPGNVNTEYNEKFKGKATLTADKSSSTAYMHLSSLTSEDSAVYFCAREEITYAMDYWGQGTSVTVSSYG

SEQ ID NO: 214 - protein, 245 aa, synthetic construct
  REGION 1..245: note = C-002159
QLVQSGAEVKKPGSSVKVSCKASGYTFTSYHIHWVRQAPGQGLEWMGWIYPGNVNTEYNEKFKGKATITADKSTSTAYMELSSLRSEDTAVYYCAREEITYAMDYWGQGTTVTVSSGGGGSGGGGSGGGGSGGEIVLTQSPGTLSLSPGERATLSCRSSQSIVHSNGNTYLEWYQQKPGQAPRLLIYKVSNRFSGIPDRFSGSGSGTDFTLTISRLEPEDFAVYYCFQGSHVPRTFGGGTKVEIK

SEQ ID NO: 215 - protein, 245 aa, synthetic construct
  REGION 1..245: note = C-002160
QLVQSGAEVKKPGSSVKVSCKASGYTFTSYHIHWVRQAPGQGLEWMGWIYPGNVNTEYNEKFKGKATITADKSTSTAYMELSSLRSEDTAVYYCAREEITYAMDYWGQGTTVTVSSGGGGSGGGGSGGGGSGGDIVMTQTPLSLPVTPGEPASISCRSSQSIVHSNGNTYLEWYLQKPGQSPQLLIYKVSNRFSGVPDRFSGSGSGTDFTLKISRVEAEDVGVYYCFQGSHVPRTFGGGTKVEIK

SEQ ID NO: 216 - protein, 245 aa, synthetic construct
  REGION 1..245: note = C-002161
QLVESGGGLVKPGGSLRLSCAASGYTFTSYHIHWVRQAPGKGLEWVGWIYPGNVNTEYNEKFKGRFTISRDDSKNTLYLQMNSLKTEDTAVYYCAREEITYAMDYWGQGTTVTVSSGGGGSGGGGSGGGGSGGDIQMTQSPSSLSASVGDRVTITCRSSQSIVHSNGNTYLEWYQQKPGKAPKLLIYKVSNRFSGVPSRFSGSGSGTDFTLTISSLQPEDFATYYCFQGSHVPRTFGGGTKVEIK

SEQ ID NO: 217 - protein, 245 aa, synthetic construct
  REGION 1..245: note = C-002162
QLVQSGAEVKKPGSSVKVSCKASGYTFTSYHIHWVRQAPGQGLEWIGWIYPGNVNTEYNEKFKGKATITADESTNTAYMELSSLRSEDTAVYYCAREEITYAMDYWGQGTLVTVSSGGGGSGGGGSGGGGSGGDIQMTQSPSTLSASVGDRVTITCRSSQSIVHSNGNTYLEWYQQKPGKAPKLLIYKVSNRFSGVPARFSGSGSGTEFTLTISSLQPDDFATYYCFQGSHVPRTFGQGTKVEVK

SEQ ID NO: 218 - protein, 245 aa, synthetic construct
  REGION 1..245: note = C-002163
QLVQSGAEVKKPGSSVKVSCKASGYTFTSYHMHWVRQAPGQGLEWIGYIYPGNVNTEYNEKFKGKATLTADKSTNTAYMELSSLRSEDTAVYFCAREEITYAMDYWGQGTLVTVSSGGGGSGGGGSGGGGSGGDVQMTQSPSTLSASVGDRVTITCSSSQSIVHSNGNTYMEWYQQKPGKAPKLLIYKVSNRFSGVPDRFSGSGSGTEFTLTISSLQPDDFATYYCHQGSHVPRTFGQGTKVEVK

SEQ ID NO: 219 - protein, 45 aa, synthetic construct
  REGION 1..45: note = CD8alpha hinge
TTTPAPRPPTPAPTIASQPLSLRPEACRPAAGGAVHTRGLDFACD

SEQ ID NO: 220 - DNA, 135 bp, synthetic construct
  misc_feature 1..135: note = CD8alpha hinge
  source 1..135: mol_type = other DNA
accacgacgccagcgccgcgaccaccaacaccggcgcccaccatcgcgtcgcagcccctgtccctgcgcccagaggcgtgccggccagcggcggggggcgcagtgcacacgagggggctggacttcgcctgtgat

SEQ ID NO: 221 - protein, 41 aa, synthetic construct
  REGION 1..41: note = CD28 hinge
CTIEVMYPPPYLDNEKSNGTIIHVKGKHLCPSPLFPGPSKP

SEQ ID NO: 222 - DNA, 123 bp, synthetic construct
  misc_feature 1..123: note = CD28 hinge
  source 1..123: mol_type = other DNA
tgtaccattgaagttatgtatcctcctccttacctagacaatgagaagagcaatggaaccattatccatgtgaaagggaaacacctttgtccaagtcccctatttcccggaccttctaagccc

SEQ ID NO: 223 - protein, 55 aa, synthetic construct
  REGION 1..55: note = ct-292 hinge
FVPVFLPAKPTTTPAPRPPTPAPTIASQPLSLRPEACRPAAGGAVHTRGLDFACD

SEQ ID NO: 224 - DNA, 165 bp, synthetic construct
  misc_feature 1..165: note = ct-292 hinge
  source 1..165: mol_type = other DNA
ttcgtgccggtcttcctgccagcgaagcccaccacgacgccagcgccgcgaccaccaacaccggcgcccaccatcgcgtcgcagcccctgtccctgcgcccagaggcgtgccggccagcggcggggggcgcagtgcacacgagggggctggacttcgcctgtgat

SEQ ID NO: 225 - protein, 39 aa, synthetic construct
  REGION 1..39: note = ct-297 hinge
IEVMYPPPYLDNEKSNGTIIHVKGKHLCPSPLFPGPSKP

SEQ ID NO: 226 - DNA, 117 bp, synthetic construct
  misc_feature 1..117: note = ct-297 hinge
  source 1..117: mol_type = other DNA
attgaagttatgtatcctcctccttacctagacaatgagaagagcaatggaaccattatccatgtgaaagggaaacacctttgtccaagtcccctatttcccggaccttctaagccc

SEQ ID NO: 227 - DNA, 30 bp, synthetic construct
  misc_feature 1..30: note = ct-298 hinge
  source 1..30: mol_type = other DNA
ggtggcggttcttccggcggtggctctggt

SEQ ID NO: 228 - protein, 229 aa, synthetic construct
  REGION 1..229: note = ct-299 hinge
ESKYGPPCPSCPAPEFEGGPSVFLFPPKPKDTLMISRTPEVTCVVVDVSQEDPEVQFNWYVDGVEVHNAKTKPREEQFQSTYRVVSVLTVLHQDWLNGKEYKCKVSNKGLPSSIEKTISKAKGQPREPQVYTLPPSQEEMTKNQVSLTCLVKGFYPSDIAVEWESNGQPENNYKTTPPVLDSDGSFFLYSRLTVDKSRWQEGNVFSCSVMHEALHNHYTQKSLSLSLGK

SEQ ID NO: 229 - DNA, 687 bp, synthetic construct
  misc_feature 1..687: note = ct-299 hinge
  source 1..687: mol_type = other DNA
gagtccaaatatggtcccccatgcccatcatgcccagcacctgagttcgaggggggaccatcagtcttcctgttccccccaaaacccaaggacactctcatgatctcccggacccctgaggtcacgtgcgtggtggtggacgtgagccaggaagaccccgaggtccagttcaactggtacgtggatggcgtggaggtgcataatgccaagacaaagccgcgggaggagcagttccagagcacgtaccgtgtggtcagcgtcctcaccgtcctgcaccaggactggctgaacggcaaggagtacaagtgcaaggtctccaacaaaggcctcccgtcctccatcgagaaaaccatctccaaagccaaagggcagccccgagagccacaggtgtacaccctgcccccatcccaggaggagatgaccaagaaccaggtcagcctgacctgcctggtcaaaggcttctaccccagcgacatcgccgtggagtgggagagcaatgggcagccggagaacaactacaagaccacgcctcccgtgctggactccgacggctccttcttcctctacagcaggctcaccgtggacaagagcaggtggcaggaggggaatgtcttctcatgctccgtgatgcatgaggctctgcacaaccactacacacagaagagcctctccctgtctctgggtaaa

SEQ ID NO: 230 - protein, 20 aa, synthetic construct
  REGION 1..20: note = ct-1094 hinge
AEPKSPDKTHTCPPCPKDPK

SEQ ID NO: 231 - DNA, 60 bp, synthetic construct
  misc_feature 1..60: note = ct-1094 hinge
  source 1..60: mol_type = other DNA
gccgagcccaagtcccctgataaaactcacacctgcccaccctgtcctaaggacccgaag

SEQ ID NO: 232 - protein, 27 aa, synthetic construct
  REGION 1..27: note = CD28 transmembrane
FWVLVVVGGVLACYSLLVTVAFIIFWV

SEQ ID NO: 233 - DNA, 81 bp, synthetic construct
  misc_feature 1..81: note = CD28 transmembrane
  source 1..81: mol_type = other DNA
ttctgggtgctggtcgttgtgggcggcgtgctggcctgctacagcctgctggtgacagtggccttcatcatcttttgggtg

SEQ ID NO: 234 - protein, 25 aa, synthetic construct
  REGION 1..25: note = IL-2Rbeta transmembrane domain
IPWLGHLLVGLSGAFGFIILVYLLI

SEQ ID NO: 235 - DNA, 75 bp, synthetic construct
  misc_feature 1..75: note = IL-2Rbeta transmembrane domain
  source 1..75: mol_type = other DNA
attccgtggctcggccacctcctcgtgggcctcagcggggcttttggcttcatcatcttagtgtacttgctgatc

SEQ ID NO: 236 - protein, 21 aa, synthetic construct
  REGION 1..21: note = CD TM domain
IYIWAPLAGTCGVLLLSLVIT

SEQ ID NO: 237 - DNA, 63 bp, synthetic construct
  misc_feature 1..63: note = CD TM domain
  source 1..63: mol_type = other DNA
atctacatctgggcgcccttggccgggacttgtggggtccttctcctgtcactggttatcacc

SEQ ID NO: 238 - protein, 112 aa, synthetic construct
  REGION 1..112: note = CD3zeta activation domain
RVKFSRSADAPAYKQGQNQLYNELNLGRREEYDVLDKRRGRDPEMGGKPRRKNPQEGLYNELQKDKMAEAYSEIGMKGERRRGKGHDGLYQGLSTATKDTYDALHMQALPPR

SEQ ID NO: 239 - DNA, 336 bp, synthetic construct
  misc_feature 1..336: note = CD3zeta activation domain
  source 1..336: mol_type = other DNA
agagtgaagttcagcaggagcgcagacgcccccgcgtacaagcagggccagaaccagctctataacgagctcaatctaggacgaagagaggagtacgatgttttggacaagcgtagaggccgggaccctgagatggggggaaagccgagaaggaagaaccctcaggaaggcctgtacaatgaactgcagaaagataagatggcggaggcctacagtgagattgggatgaaaggcgagcgccggaggggcaaggggcacgatggcctttaccagggactcagtacagccaccaaggacacctacgacgcccttcacatgcaggccctgccccctcgc

SEQ ID NO: 240 - skipped

SEQ ID NO: 241 - protein, 43 aa, synthetic construct
  REGION 1..43: note = CD3zeta activation domain comprising a single ITAM
RVKFSRSADAPAYQQGQNQLYNELNLGRREEYDVLHMQALPPR

SEQ ID NO: 242 - DNA, 129 bp, synthetic construct
  misc_feature 1..129: note = CD3zeta activation domain comprising a single ITAM
  source 1..129: mol_type = other DNA
agagtgaagttcagcaggagcgcagacgcccccgcgtaccagcagggccagaaccagctctataacgagctcaatctaggacgaagagaggagtacgatgttttgcacatgcaggccctgccccctcgc

SEQ ID NO: 243 - protein, 41 aa, synthetic construct
  REGION 1..41: note = CD28 costimulatory domain
RSKRSRLLHSDYMNMTPRRPGPTRKHYQPYAPPRDFAAYRS

SEQ ID NO: 244 - DNA, 123 bp, synthetic construct
  misc_feature 1..123: note = CD28 costimulatory domain
  source 1..123: mol_type = other DNA
aggagcaagcggagcagactgctgcacagcgactacatgaacatgaccccccggaggcctggccccacccggaagcactaccagccctacgcccctcccagggatttcgccgcctaccggagc

SEQ ID NO: 245 - protein, 94 aa, synthetic construct
  REGION 1..94: note = IL-2-Rbeta intracellular domain
NCRNTGPWLKKVLKCNTPDPSKFFSQLSSEHGGDVQKWLSSPFPSSSFSPGGLAPEISPLEVLERDKVTQLLPLNTDAYLSLQELQGQDPTHLV

SEQ ID NO: 246 - DNA, 282 bp, synthetic construct
  misc_feature 1..282: note = IL-2-Rbeta intracellular domain
  source 1..282: mol_type = other DNA
aactgcaggaacaccgggccatggctgaagaaggtcctgaagtgtaacaccccagacccctcgaagttcttttcccagctgagctcagagcatggaggcgacgtccagaagtggctctcttcgcccttcccctcatcgtccttcagccctggcggcctggcacctgagatctcgccactagaagtgctggagagggacaaggtgacgcagctgctccccctgaacactgatgcctacttgtctctccaagaactccagggtcaggacccaactcacttggtg

SEQ ID NO: 247 - protein, 4 aa, synthetic construct
  REGION 1..4: note = STAT5-recruitment motif(s)
YLSL

SEQ ID NO: 248 - protein, 200 aa, synthetic construct
  REGION 1..200: note = CD28-4-1BB-CD3z
RSKRSRLLHSDYMNMTPRRPGPTRKHYQPYAPPRDFAAYRSRFSVVKRGRKKLLYIFKQPFMRPVQTTQEEDGCSCRFPEEEEGGCELRVKFSRSADAPAYQQGQNQLYNELNLGRREEYDVLDKRRGRDPEMGGKPRRKNPQEGLYNELQKDKMAEAYSEIGMKGERRRGKGHDGLYQGLSTATKDTYDALHMQALPPR

SEQ ID NO: 249 - DNA, 603 bp, synthetic construct
  misc_feature 1..603: note = CD28-4-1BB-CD3z
  source 1..603: mol_type = other DNA
aggagtaagaggagcaggctcctgcacagtgactacatgaacatgactccccgccgccccgggcccacccgcaagcattaccagccctatgccccaccacgcgacttcgcagcctatcgctcccgtttctctgttgttaaacggggcagaaagaagctcctgtatatattcaaacaaccatttatgagaccagtacaaactactcaagaggaagatggctgtagctgccgatttccagaagaagaagaaggaggatgtgaactgagagtgaagttcagcaggagcgcagacgcccccgcgtaccagcagggccagaaccagctctataacgagctcaatctaggacgaagagaggagtacgatgttttggacaagagacgtggccgggaccctgagatggggggaaagccgagaaggaagaaccctcaggaaggcctgtacaatgaactgcagaaagataagatggcggaggcctacagtgagattgggatgaaaggcgagcgccggaggggcaaggggcacgatggcctttaccagggtctcagtacagccaccaaggacacctacgacgcccttcacatgcaggccctgccccctcgctag

SEQ ID NO: 250 - protein, 153 aa, synthetic construct
  REGION 1..153: note = CD28-CD3z
RSKRSRLLHSDYMNMTPRRPGPTRKHYQPYAPPRDFAAYRSRVKFSRSADAPAYKQGQNQLYNELNLGRREEYDVLDKRRGRDPEMGGKPRRKNPQEGLYNELQKDKMAEAYSEIGMKGERRRGKGHDGLYQGLSTATKDTYDALHMQALPPR

SEQ ID NO: 251 - DNA, 462 bp, synthetic construct
  misc_feature 1..462: note = CD28-CD3z
  source 1..462: mol_type = other DNA
aggagcaagcggagcagactgctgcacagcgactacatgaacatgaccccccggaggcctggccccacccggaagcactaccagccctacgcccctcccagggatttcgccgcctaccggagcagagtgaagttcagcaggagcgcagacgcccccgcgtacaagcagggccagaaccagctctataacgagctcaatctaggacgaagagaggagtacgatgttttggacaagcgtagaggccgggaccctgagatggggggaaagccgagaaggaagaaccctcaggaaggcctgtacaatgaactgcagaaagataagatggcggaggcctacagtgagattgggatgaaaggcgagcgccggaggggcaaggggcacgatggcctttaccagggactcagtacagccaccaaggacacctacgacgcccttcacatgcaggccctgccccctcgctag

SEQ ID NO: 252 - protein, 157 aa, synthetic construct
  REGION 1..157: note = 4-1BB-CD3z
KRGRKKLLYIFKQPFMRPVQTTQEEDGCSCRFPEEEEGGCELGGGRVKFSRSADAPAYQQGQNQLYNELNLGRREEYDVLDKRRGRDPEMGGKPRRKNPQEGLYNELQKDKMAEAYSEIGMKGERRRGKGHDGLYQGLSTATKDTYDALHMQALPPR

SEQ ID NO: 253 - DNA, 474 bp, synthetic construct
  misc_feature 1..474: note = 4-1BB-CD3z
  source 1..474: mol_type = other DNA
aaacggggcagaaagaagctcctgtatatattcaaacaaccatttatgagaccagtacaaactactcaagaggaagatggctgtagctgccgatttccagaagaagaagaaggaggatgtgaactgggcggtggcagagtgaagttcagcaggagcgcagacgcccccgcgtaccagcagggccagaaccagctctataacgagctcaatctaggacgaagagaggagtacgatgttttggacaagagacgtggccgggaccctgagatggggggaaagccgagaaggaagaaccctcaggaaggcctgtacaatgaactgcagaaagataagatggcggaggcctacagtgagattgggatgaaaggcgagcgccggaggggcaaggggcacgatggcctttaccagggtctcagtacagccaccaaggacacctacgacgcccttcacatgcaggccctgccccctcgctag

SEQ ID NO: 254 - protein, 253 aa, synthetic construct
  REGION 1..253: note = Inhibitory Receptor Hinge, Transmembrane and IntracellularDomains
YGSQSSKPYLLTHPSDPLELVVSGPSGGPSSPTTGPTSTSGPEDQPLTPTGSDPQSGLGRHLGVVIGILVAVILLLLLLLLLFLILRHRRQGKHWTSTQRKADFQHPAGAVGPEPTDRGLQWRSSPAADAQEENLYAAVKHTQPEDGVEMDTRSPHDEDPQAVTYAEVKHSRPRREMASPPSPLSGEFLDTKDRQAEEDRQMDTEAAASEAPQDVTYAQLHSLTLRREATEPPPSQEGPSPAVPSIYATLAIH

SEQ ID NO: 255 - DNA, 762 bp, synthetic construct
  misc_feature 1..762: note = Inhibitory Receptor Hinge, Transmembrane and IntracellularDomains
  source 1..762: mol_type = other DNA
tacggctcacagagctccaaaccctacctgctgactcaccccagtgaccccctggagctcgtggtctcaggaccgtctgggggccccagctccccgacaacaggccccacctccacatctggccctgaggaccagcccctcacccccaccgggtcggatccccagagtggtctgggaaggcacctgggggttgtgatcggcatcttggtggccgtcatcctactgctcctcctcctcctcctcctcttcctcatcctccgacatcgacgtcagggcaaacactggacatcgacccagagaaaggctgatttccaacatcctgcaggggctgtggggccagagcccacagacagaggcctgcagtggaggtccagcccagctgccgatgcccaggaagaaaacctctatgctgccgtgaagcacacacagcctgaggatggggtggagatggacactcggagcccacacgatgaagacccccaggcagtgacgtatgccgaggtgaaacactccagacctaggagagaaatggcctctcctccttccccactgtctggggaattcctggacacaaaggacagacaggcggaagaggacaggcagatggacactgaggctgctgcatctgaagccccccaggatgtgacctacgcccagctgcacagcttgaccctcagacgggaggcaactgagcctcctccatcccaggaagggccctctccagctgtgcccagcatctacgccactctggccatccactag

SEQ ID NO: 256 - protein, 6 aa, synthetic construct
  REGION 1..6: note = ITIM
NLYAAV

SEQ ID NO: 257 - protein, 6 aa, synthetic construct
  REGION 1..6: note = ITIM
VTYAEV

SEQ ID NO: 258 - protein, 6 aa, synthetic construct
  REGION 1..6: note = ITIM
VTYAQL

SEQ ID NO: 259 - protein, 6 aa, synthetic construct
  REGION 1..6: note = ITIM
SIYATL

SEQ ID NO: 260 - skipped

SEQ ID NO: 261 - protein, 58 aa, synthetic construct
  REGION 1..58: note = ITIM2-3
VTYAEVKHSRPRREMASPPSPLSGEFLDTKDRQAEEDRQMDTEAAASEAPQDVTYAQL

SEQ ID NO: 262 - protein, 36 aa, synthetic construct
  REGION 1..36: note = ITIM3-4
VTYAQLHSLTLRREATEPPPSQEGPSPAVPSIYATL

SEQ ID NO: 263 - protein, 87 aa, synthetic construct
  REGION 1..87: note = ITIM1-3
NLYAAVKHTQPEDGVEMDTRSPHDEDPQAVTYAEVKHSRPRREMASPPSPLSGEFLDTKDRQAEEDRQMDTEAAASEAPQDVTYAQL

SEQ ID NO: 264 - protein, 88 aa, synthetic construct
  REGION 1..88: note = ITIM2-4
VTYAEVKHSRPRREMASPPSPLSGEFLDTKDRQAEEDRQMDTEAAASEAPQDVTYAQLHSLTLRREATEPPPSQEGPSPAVPSIYATL

SEQ ID NO: 265 - protein, 117 aa, synthetic construct
  REGION 1..117: note = ITIM1-4
NLYAAVKHTQPEDGVEMDTRSPHDEDPQAVTYAEVKHSRPRREMASPPSPLSGEFLDTKDRQAEEDRQMDTEAAASEAPQDVTYAQLHSLTLRREATEPPPSQEGPSPAVPSIYATL

SEQ ID NO: 266 - protein, 167 aa, synthetic construct
  REGION 1..167: note = LILRB1 intracellular domain
RHRRQGKHWTSTQRKADFQHPAGAVGPEPTDRGLQWRSSPAADAQEENLYAAVKHTQPEDGVEMDTRSPHDEDPQAVTYAEVKHSRPRREMASPPSPLSGEFLDTKDRQAEEDRQMDTEAAASEAPQDVTYAQLHSLTLRREATEPPPSQEGPSPAVPSIYATLAIH

SEQ ID NO: 267 - protein, 10 aa, synthetic construct
  REGION 1..10: note = TCR beta intracellular domain
MAMVKRKDSR

SEQ ID NO: 268 - DNA, 30 bp, synthetic construct
  misc_feature 1..30: note = TCR beta intracellular domain
  source 1..30: mol_type = other DNA
atggccatggtcaagagaaaggattccaga

SEQ ID NO: 269 - protein, 23 aa, synthetic construct
  REGION 1..23: note = LILRB1 transmembrane domain
VVIGILVAVILLLLLLLLLFLIL

SEQ ID NO: 270 - protein, 23 aa, synthetic construct
  REGION 1..23: note = TCR alpha transmembrane
VIGFRILLLKVAGFNLLMTLRLW

SEQ ID NO: 271 - DNA, 69 bp, synthetic construct
  misc_feature 1..69: note = TCR alpha transmembrane
  source 1..69: mol_type = other DNA
gtgattgggttccgaatcctcctcctgaaagtggccgggtttaatctgctcatgacgctgcggctgtgg

SEQ ID NO: 272 - protein, 23 aa, synthetic construct
  REGION 1..23: note = TCR beta transmembrane
TILYEILLGKATLYAVLVSALVL

SEQ ID NO: 273 - DNA, 69 bp, synthetic construct
  misc_feature 1..69: note = TCR beta transmembrane
  source 1..69: mol_type = other DNA
accatcctctatgagatcttgctagggaaggccaccttgtatgccgtgctggtcagtgccctcgtgctg

SEQ ID NO: 274 - protein, 20 aa, synthetic construct
  REGION 1..20: note = D3D Domain
YGSQSSKPYLLTHPSDPLEL

SEQ ID NO: 275 - protein, 63 aa, synthetic construct
  REGION 1..63: note = LILRB1 hinge domain
YGSQSSKPYLLTHPSDPLELVVSGPSGGPSSPTTGPTSTSGPEDQPLTPTGSDPQSGLGRHLG

SEQ ID NO: 276 - protein, 43 aa, synthetic construct
  REGION 1..43: note = Short hinge
VVSGPSGGPSSPTTGPTSTSGPEDQPLTPTGSDPQSGLGRHLG

SEQ ID NO: 277 - protein, 86 aa, synthetic construct
  REGION 1..86: note = Hinge-transmembrane
YGSQSSKPYLLTHPSDPLELVVSGPSGGPSSPTTGPTSTSGPEDQPLTPTGSDPQSGLGRHLGVVIGILVAVILLLLLLLLLFLIL

SEQ ID NO: 278 - protein, 190 aa, synthetic construct
  REGION 1..190: note = Transmembrane-intracellular domain
VVIGILVAVILLLLLLLLLFLILRHRRQGKHWTSTQRKADFQHPAGAVGPEPTDRGLQWRSSPAADAQEENLYAAVKHTQPEDGVEMDTRSPHDEDPQAVTYAEVKHSRPRREMASPPSPLSGEFLDTKDRQAEEDRQMDTEAAASEAPQDVTYAQLHSLTLRREATEPPPSQEGPSPAVPSIYATLAIH

SEQ ID NO: 279 - protein, 233 aa, synthetic construct
  REGION 1..233: note = LILRB1 hinge-transmembrane-intracellular domain (w/oYGSQSSKPYLLTHPSDPLEL)
VVSGPSGGPSSPTTGPTSTSGPEDQPLTPTGSDPQSGLGRHLGVVIGILVAVILLLLLLLLLFLILRHRRQGKHWTSTQRKADFQHPAGAVGPEPTDRGLQWRSSPAADAQEENLYAAVKHTQPEDGVEMDTRSPHDEDPQAVTYAEVKHSRPRREMASPPSPLSGEFLDTKDRQAEEDRQMDTEAAASEAPQDVTYAQLHSLTLRREATEPPPSQEGPSPAVPSIYATLAIH

SEQ ID NO: 280 - protein, 650 aa, synthetic construct
  REGION 1..650: note = LILRB1 amio acid
MTPILTVLICLGLSLGPRTHVQAGHLPKPTLWAEPGSVITQGSPVTLRCQGGQETQEYRLYREKKTALWITRIPQELVKKGQFPIPSITWEHAGRYRCYYGSDTAGRSESSDPLELVVTGAYIKPTLSAQPSPVVNSGGNVILQCDSQVAFDGFSLCKEGEDEHPQCLNSQPHARGSSRAIFSVGPVSPSRRWWYRCYAYDSNSPYEWSLPSDLLELLVLGVSKKPSLSVQPGPIVAPEETLTLQCGSDAGYNRFVLYKDGERDFLQLAGAQPQAGLSQANFTLGPVSRSYGGQYRCYGAHNLSSEWSAPSDPLDILIAGQFYDRVSLSVQPGPTVASGENVTLLCQSQGWMQTFLLTKEGAADDPWRLRSTYQSQKYQAEFPMGPVTSAHAGTYRCYGSQSSKPYLLTHPSDPLELVVSGPSGGPSSPTTGPTSTSGPEDQPLTPTGSDPQSGLGRHLGVVIGILVAVILLLLLLLLLFLILRHRRQGKHWTSTQRKADFQHPAGAVGPEPTDRGLQWRSSPAADAQEENLYAAVKHTQPEDGVEMDTRSPHDEDPQAVTYAEVKHSRPRREMASPPSPLSGEFLDTKDRQAEEDRQMDTEAAASEAPQDVTYAQLHSLTLRREATEPPPSQEGPSPAVPSIYATLAIH

SEQ ID NO: 281 - protein, 35 aa, synthetic construct
  REGION 1..35: note = ITIM1-2
NLYAAVKHTQPEDGVEMDTRSPHDEDPQAVTYAEV

SEQ ID NO: 282 - protein, 64 aa, synthetic construct
  REGION 1..64: note = Hinge (iTIM hinge)
YGSQSSKPYLLTHPSDPLELVVSGPSGGPSSPTTGPTSTSGPEDQPLTPTGSDPQSGLGRHLGV

SEQ ID NO: 283 - protein, 44 aa, synthetic construct
  REGION 1..44: note = Short hinge 2
VVSGPSGGPSSPTTGPTSTSGPEDQPLTPTGSDPQSGLGRHLGV

SEQ ID NO: 284 - protein, 67 aa, synthetic construct
  REGION 1..67: note = Long hinge 1
AGSGGSGGSGGSPVPSTPPTPSPSTPPTPSPSGGSGNSSGSGGSPVPSTPPTPSPSTPPTPSPSASV

SEQ ID NO: 285 - protein, 75 aa, synthetic construct
  REGION 1..75: note = Long hinge 2
AGSGGSGGSGGSPVPSTPPTNSSSTPPTPSPSPVPSTPPTNSSSTPPTPSPSPVPSTPPTNSSSTPPTPSPSASV

SEQ ID NO: 286 - protein, 85 aa, synthetic construct
  REGION 1..85: note = 2X short hinge
VVSGPSGGPSSPTTGPTSTSGPEDQPLTPTGSDPQSGLGRHVVSGPSGGPSSPTTGPTSTSGPEDQPLTPTGSDPQSGLGRHLGV

SEQ ID NO: 287 - protein, 32 aa, synthetic construct
  REGION 1..32: note = Hinge (truncated)
TTGPTSTSGPEDQPLTPTGSDPQSGLGRHLGV

SEQ ID NO: 288 - protein, 18 aa, synthetic construct
  REGION 1..18: note = T2A self-cleaving peptide
EGRGSLLTCGDVEENPGP

SEQ ID NO: 289 - protein, 20 aa, synthetic construct
  REGION 1..20: note = E2A self-cleaving peptide
QCTNYALLKLAGDVESNPGP

SEQ ID NO: 290 - protein, 22 aa, synthetic construct
  REGION 1..22: note = F2A self-cleaving peptide
VKQTLNFDLLKLAGDVESNPGP

SEQ ID NO: 291 - protein, 552 aa, synthetic construct
  REGION 1..552: note = CT292 full sequence
MDFQVQIFSFLLISASVIMSRGDIQMTQSPSSLSASVGDRVTITCRASQDVNTAVAWYQQKPGKAPKLLIYSASFLYSGVPSRFSGSRSGTDFTLTISSLQPEDFATYYCQQHYTTPPTFGQGTKVEIKRTGSTSGSGKPGSGEGSEVQLVESGGGLVQPGGSLRLSCAASGFNIKDTYIHWVRQAPGKGLEWVARIYPTNGYTRYADSVKGRFTISADTSKNTAYLQMNSLRAEDTAVYYCSRWGGDGFYAMDVWGQGTLVTVSSAAAFVPVFLPAKPTTTPAPRPPTPAPTIASQPLSLRPEACRPAAGGAVHTRGLDFACDIYIWAPLAGTCGVLLLSLVITLYCNHRNRSKRSRLLHSDYMNMTPRRPGPTRKHYQPYAPPRDFAAYRSRFSVVKRGRKKLLYIFKQPFMRPVQTTQEEDGCSCRFPEEEEGGCELRVKFSRSADAPAYQQGQNQLYNELNLGRREEYDVLDKRRGRDPEMGGKPRRKNPQEGLYNELQKDKMAEAYSEIGMKGERRRGKGHDGLYQGLSTATKDTYDALHMQALPPR

SEQ ID NO: 292 - DNA, 1659 bp, synthetic construct
  misc_feature 1..1659: note = CT292 full sequence
  source 1..1659: mol_type = other DNA
atggattttcaggtgcagattttcagcttcctgctaatcagtgcctcagtcataatgtccagaggagatatccagatgacccagtccccgagctccctgtccgcctctgtgggcgatagggtcaccatcacctgccgtgccagtcaggatgtgaatactgctgtagcctggtatcaacagaaaccaggaaaagctccgaaactactgatttactcggcatccttcctttattctggagtcccttctcgcttctctggatctagatctgggacggatttcactctgaccatcagcagtctgcagccggaagacttcgcaacttattactgtcagcaacattatactactcctcccacgttcggacagggtaccaaggtggagatcaaacgcactgggtctacatctggatctgggaagccgggttctggtgagggttctgaggttcagctggtggagtctggcggtggcctggtgcagccagggggctcactccgtttgtcctgtgcagcttctggcttcaacattaaagacacctatatacactgggtgcgtcaggccccgggtaagggcctggaatgggttgcaaggatttatcctacgaatggttatactagatatgccgatagcgtcaagggccgtttcactataagcgcagacacatccaaaaacacagcctacctgcagatgaacagcctgcgtgctgaggacactgccgtctattattgttctagatggggaggggacggcttctatgctatggacgtgtggggtcaaggaaccctggtcaccgtttcctcggcggccgcattcgtgccggtcttcctgccagcgaagcccaccacgacgccagcgccgcgaccaccaacaccggcgcccaccatcgcgtcgcagcccctgtccctgcgcccagaggcgtgccggccagcggcggggggcgcagtgcacacgagggggctggacttcgcctgtgatatctacatctgggcgcccttggccgggacttgtggggtccttctcctgtcactggttatcaccctttactgcaaccacaggaacaggagtaagaggagcaggctcctgcacagtgactacatgaacatgactccccgccgccccgggcccacccgcaagcattaccagccctatgccccaccacgcgacttcgcagcctatcgctcccgtttctctgttgttaaacggggcagaaagaagctcctgtatatattcaaacaaccatttatgagaccagtacaaactactcaagaggaagatggctgtagctgccgatttccagaagaagaagaaggaggatgtgaactgagagtgaagttcagcaggagcgcagacgcccccgcgtaccagcagggccagaaccagctctataacgagctcaatctaggacgaagagaggagtacgatgttttggacaagaggcgtggccgggaccctgagatggggggaaagccgagaaggaagaaccctcaggaaggcctgtacaatgaactgcagaaagataagatggcggaggcctacagtgagattgggatgaaaggcgagcgccggaggggcaaggggcacgatggcctttaccagggtctcagtacagccaccaaggacacctacgacgcccttcacatgcaggccctgccccctcgctag

SEQ ID NO: 293 - protein, 455 aa, synthetic construct
  REGION 1..455: note = CT298 full sequence
MLLLVTSLLLCELPHPAFLLIPDIQMTQSPSSLSASVGDRVTITCRASQDVNTAVAWYQQKPGKAPKLLIYSASFLYSGVPSRFSGSRSGTDFTLTISSLQPEDFATYYCQQHYTTPPTFGQGTKVEIKGSTSGGGSGGGSGGGGSSEVQLVESGGGLVQPGGSLRLSCAASGFNIKDTYIHWVRQAPGKGLEWVARIYPTNGYTRYADSVKGRFTISADTSKNTAYLQMNSLRAEDTAVYYCSRWGGDGFYAMDYWGQGTLVTVSSGGGSSGGGSGIYIWAPLAGTCGVLLLSLVITKRGRKKLLYIFKQPFMRPVQTTQEEDGCSCRFPEEEEGGCELGGGRVKFSRSADAPAYQQGQNQLYNELNLGRREEYDVLDKRRGRDPEMGGKPRRKNPQEGLYNELQKDKMAEAYSEIGMKGERRRGKGHDGLYQGLSTATKDTYDALHMQALPPR

SEQ ID NO: 294 - DNA, 1368 bp, synthetic construct
  misc_feature 1..1368: note = CT298 full sequence
  source 1..1368: mol_type = other DNA
atgctgctactggtcaccagtctactgctgtgcgaactgccacatccggccttcctgctaataccggatatccagatgacccagtccccgagctccctgtccgcctctgtgggcgatagggtcaccatcacctgccgtgccagtcaggatgtgaatactgctgtagcctggtatcaacagaaaccaggaaaagctccgaaactactgatttactcggcatccttcctttattctggagtcccttctcgcttctctggatctagatctgggacggatttcactctgaccatcagcagtctgcagccggaagacttcgcaacttattactgtcagcaacattatactactcctcccacgttcggacagggtaccaaggtggagatcaaagggtctacatctggcggtggctctggtggcggttccggcggtggcggttcttccgaggttcagctggtggagtctggcggtggcctggtgcagccagggggctcactccgtttgtcctgtgcagcttctggcttcaacattaaagacacctatatacactgggtgcgtcaggccccgggtaagggcctggaatgggttgcaaggatttatcctacgaatggttatactagatatgccgatagcgtcaagggccgtttcactataagcgcagacacatccaaaaacacagcctacctgcagatgaacagcctgcgtgctgaggacactgccgtctattattgttctagatggggaggggacggcttctatgctatggactattggggtcaaggaaccctggtcaccgtctcctcgggtggcggttcttccggcggtggctctggtatctacatctgggcgcccttggccgggacttgtggggtccttctcctgtcactggttatcaccaaacggggcagaaagaagctcctgtatatattcaaacaaccatttatgagaccagtacaaactactcaagaggaagatggctgtagctgccgatttccagaagaagaagaaggaggatgtgaactgggcggtggcagagtgaagttcagcaggagcgcagacgcccccgcgtaccagcagggccagaaccagctctataacgagctcaatctaggacgaagagaggagtacgatgttttggacaagagacgtggccgggaccctgagatggggggaaagccgagaaggaagaaccctcaggaaggcctgtacaatgaactgcagaaagataagatggcggaggcctacagtgagattgggatgaaaggcgagcgccggaggggcaaggggcacgatggcctttaccagggtctcagtacagccaccaaggacacctacgacgcccttcacatgcaggccctgccccctcgctag

SEQ ID NO: 295 - protein, 674 aa, synthetic construct
  REGION 1..674: note = CT299 full sequence
MLLLVTSLLLCELPHPAFLLIPDIQMTQSPSSLSASVGDRVTITCRASQDVNTAVAWYQQKPGKAPKLLIYSASFLYSGVPSRFSGSRSGTDFTLTISSLQPEDFATYYCQQHYTTPPTFGQGTKVEIKGSTSGGGSGGGSGGGGSSEVQLVESGGGLVQPGGSLRLSCAASGFNIKDTYIHWVRQAPGKGLEWVARIYPTNGYTRYADSVKGRFTISADTSKNTAYLQMNSLRAEDTAVYYCSRWGGDGFYAMDYWGQGTLVTVSSESKYGPPCPSCPAPEFEGGPSVFLFPPKPKDTLMISRTPEVTCVVVDVSQEDPEVQFNWYVDGVEVHNAKTKPREEQFQSTYRVVSVLTVLHQDWLNGKEYKCKVSNKGLPSSIEKTISKAKGQPREPQVYTLPPSQEEMTKNQVSLTCLVKGFYPSDIAVEWESNGQPENNYKTTPPVLDSDGSFFLYSRLTVDKSRWQEGNVFSCSVMHEALHNHYTQKSLSLSLGKIYIWAPLAGTCGVLLLSLVITKRGRKKLLYIFKQPFMRPVQTTQEEDGCSCRFPEEEEGGCELGGGRVKFSRSADAPAYQQGQNQLYNELNLGRREEYDVLDKRRGRDPEMGGKPRRKNPQEGLYNELQKDKMAEAYSEIGMKGERRRGKGHDGLYQGLSTATKDTYDALHMQALPPR

SEQ ID NO: 296 - DNA, 2025 bp, synthetic construct
  misc_feature 1..2025: note = CT299 full sequence
  source 1..2025: mol_type = other DNA
atgctgctactggtcaccagtctactgctgtgcgaactgccacatccggccttcctgctaataccggatatccagatgacccagtccccgagctccctgtccgcctctgtgggcgatagggtcaccatcacctgccgtgccagtcaggatgtgaatactgctgtagcctggtatcaacagaaaccaggaaaagctccgaaactactgatttactcggcatccttcctttattctggagtcccttctcgcttctctggatctagatctgggacggatttcactctgaccatcagcagtctgcagccggaagacttcgcaacttattactgtcagcaacattatactactcctcccacgttcggacagggtaccaaggtggagatcaaagggtctacatctggcggtggctctggtggcggttccggcggtggcggttcttccgaggttcagctggtggagtctggcggtggcctggtgcagccagggggctcactccgtttgtcctgtgcagcttctggcttcaacattaaagacacctatatacactgggtgcgtcaggccccgggtaagggcctggaatgggttgcaaggatttatcctacgaatggttatactagatatgccgatagcgtcaagggccgtttcactataagcgcagacacatccaaaaacacagcctacctgcagatgaacagcctgcgtgctgaggacactgccgtctattattgttctagatggggaggggacggcttctatgctatggactattggggtcaaggaaccctggtcaccgtctcctcggagtccaaatatggtcccccatgcccatcatgcccagcacctgagttcgaggggggaccatcagtcttcctgttccccccaaaacccaaggacactctcatgatctcccggacccctgaggtcacgtgcgtggtggtggacgtgagccaggaagaccccgaggtccagttcaactggtacgtggatggcgtggaggtgcataatgccaagacaaagccgcgggaggagcagttccagagcacgtaccgtgtggtcagcgtcctcaccgtcctgcaccaggactggctgaacggcaaggagtacaagtgcaaggtctccaacaaaggcctcccgtcctccatcgagaaaaccatctccaaagccaaagggcagccccgagagccacaggtgtacaccctgcccccatcccaggaggagatgaccaagaaccaggtcagcctgacctgcctggtcaaaggcttctaccccagcgacatcgccgtggagtgggagagcaatgggcagccggagaacaactacaagaccacgcctcccgtgctggactccgacggctccttcttcctctacagcaggctcaccgtggacaagagcaggtggcaggaggggaatgtcttctcatgctccgtgatgcatgaggctctgcacaaccactacacacagaagagcctctccctgtctctgggtaaaatctacatctgggcgcccttggccgggacttgtggggtccttctcctgtcactggttatcaccaaacggggcagaaagaagctcctgtatatattcaaacaaccatttatgagaccagtacaaactactcaagaggaagatggctgtagctgccgatttccagaagaagaagaaggaggatgtgaactgggcggtggcagagtgaagttcagcaggagcgcagacgcccccgcgtaccagcagggccagaaccagctctataacgagctcaatctaggacgaagagaggagtacgatgttttggacaagagacgtggccgggaccctgagatggggggaaagccgagaaggaagaaccctcaggaaggcctgtacaatgaactgcagaaagataagatggcggaggcctacagtgagattgggatgaaaggcgagcgccggaggggcaaggggcacgatggcctttaccagggtctcagtacagccaccaaggacacctacgacgcccttcacatgcaggccctgccccctcgctag

SEQ ID NO: 297 - protein, 482 aa, synthetic construct
  REGION 1..482: note = CT297 full sequence
MDMRVPAQLLGLLLLWLRGARCQVQLQQSGPELKKPGETVKISCKASGYPFTNYGMNWVKQAPGQGLKWMGWINTSTGESTFADDFKGRFDFSLETSANTAYLQINNLKSEDSATYFCARWEVYHGYVPYWGQGTTVTVSSGGGGSGGGGSGGGGSDIQLTQSHKFLSTSVGDRVSITCKASQDVYNAVAWYQQKPGQSPKLLIYSASSRYTGVPSRFTGSGSGPDFTFTISSVQAEDLAVYFCQQHFRTPFTFGSGTKLEIKIEVMYPPPYLDNEKSNGTIIHVKGKHLCPSPLFPGPSKPFWVLVVVGGVLACYSLLVTVAFIIFWVRSKRSRLLHSDYMNMTPRRPGPTRKHYQPYAPPRDFAAYRSRVKFSRSADAPAYKQGQNQLYNELNLGRREEYDVLDKRRGRDPEMGGKPRRKNPQEGLYNELQKDKMAEAYSEIGMKGERRRGKGHDGLYQGLSTATKDTYDALHMQALPPR

SEQ ID NO: 298 - DNA, 1449 bp, synthetic construct
  misc_feature 1..1449: note = CT297 full sequence
  source 1..1449: mol_type = other DNA
atggacatgagggtccccgctcagctcctggggctcctgctactctggctccgaggtgccagatgtcaggtacaactgcagcagtcaggacctgaactgaagaagcctggagagacagtcaagatctcctgcaaggcctctgggtatcctttcacaaactatggaatgaactgggtgaagcaggctccaggacagggtttaaagtggatgggctggattaacacctccactggagagtcaacatttgctgatgacttcaagggacggtttgacttctctttggaaacctctgccaacactgcctatttgcagatcaacaacctcaaaagtgaagactcggctacatatttctgtgcaagatgggaggtttaccacggctacgttccttactggggccaagggaccacggtcaccgtttcctctggcggtggcggttctggtggcggtggctccggcggtggcggttctgacatccagctgacccagtctcacaaattcctgtccacttcagtaggagacagggtcagcatcacctgcaaggccagtcaggatgtgtataatgctgttgcctggtatcaacagaaaccaggacaatctcctaaacttctgatttactcggcatcctcccggtacactggagtcccttctcgcttcactggcagtggctctgggccggatttcactttcaccatcagcagtgtgcaggctgaagacctggcagtttatttctgtcagcaacattttcgtactccattcacgttcggctcggggacaaaattggagatcaaaattgaagttatgtatcctcctccttacctagacaatgagaagagcaatggaaccattatccatgtgaaagggaaacacctttgtccaagtcccctatttcccggaccttctaagcccttctgggtgctggtcgttgtgggcggcgtgctggcctgctacagcctgctggtgacagtggccttcatcatcttttgggtgaggagcaagcggagcagactgctgcacagcgactacatgaacatgaccccccggaggcctggccccacccggaagcactaccagccctacgcccctcccagggatttcgccgcctaccggagcagagtgaagttcagcaggagcgcagacgcccccgcgtacaagcagggccagaaccagctctataacgagctcaatctaggacgaagagaggagtacgatgttttggacaagcgtagaggccgggaccctgagatggggggaaagccgagaaggaagaaccctcaggaaggcctgtacaatgaactgcagaaagataagatggcggaggcctacagtgagattgggatgaaaggcgagcgccggaggggcaaggggcacgatggcctttaccagggactcagtacagccaccaaggacacctacgacgcccttcacatgcaggccctgccccctcgctag

SEQ ID NO: 299 - protein, 463 aa, synthetic construct
  REGION 1..463: note = CT1094 full sequence
MDMRVPAQLLGLLLLWLRGARCQVQLQQSGPELKKPGETVKISCKASGYPFTNYGMNWVKQAPGQGLKWMGWINTSTGESTFADDFKGRFDFSLETSANTAYLQINNLKSEDSATYFCARWEVYHGYVPYWGQGTTVTVSSGGGGSGGGGSGGGGSDIQLTQSHKFLSTSVGDRVSITCKASQDVYNAVAWYQQKPGQSPKLLIYSASSRYTGVPSRFTGSGSGPDFTFTISSVQAEDLAVYFCQQHFRTPFTFGSGTKLEIKAEPKSPDKTHTCPPCPKDPKFWVLVVVGGVLACYSLLVTVAFIIFWVRSKRSRLLHSDYMNMTPRRPGPTRKHYQPYAPPRDFAAYRSRVKFSRSADAPAYKQGQNQLYNELNLGRREEYDVLDKRRGRDPEMGGKPRRKNPQEGLYNELQKDKMAEAYSEIGMKGERRRGKGHDGLYQGLSTATKDTYDALHMQALPPR

SEQ ID NO: 300 - DNA, 1392 bp, synthetic construct
  misc_feature 1..1392: note = CT1094 full sequence
  source 1..1392: mol_type = other DNA
atggacatgagggtccccgctcagctcctggggctcctgctactctggctccgaggtgccagatgtcaggtacaactgcagcagtcaggacctgaactgaagaagcctggagagacagtcaagatctcctgcaaggcctctgggtatcctttcacaaactatggaatgaactgggtgaagcaggctccaggacagggtttaaagtggatgggctggattaacacctccactggagagtcaacatttgctgatgacttcaagggacggtttgacttctctttggaaacctctgccaacactgcctatttgcagatcaacaacctcaaaagtgaagactcggctacatatttctgtgcaagatgggaggtttaccacggctacgttccttactggggccaagggaccacggtcaccgtttcctctggcggtggcggttctggtggcggtggctccggcggtggcggttctgacatccagctgacccagtctcacaaattcctgtccacttcagtaggagacagggtcagcatcacctgcaaggccagtcaggatgtgtataatgctgttgcctggtatcaacagaaaccaggacaatctcctaaacttctgatttactcggcatcctcccggtacactggagtcccttctcgcttcactggcagtggctctgggccggatttcactttcaccatcagcagtgtgcaggctgaagacctggcagtttatttctgtcagcaacattttcgtactccattcacgttcggctcggggacaaaattggagatcaaagccgagcccaagtcccctgataaaactcacacctgcccaccctgtcctaaggacccgaagttctgggtgctggtcgttgtgggcggcgtgctggcctgctacagcctgctggtgacagtggccttcatcatcttttgggtgaggagcaagcggagcagactgctgcacagcgactacatgaacatgaccccccggaggcctggccccacccggaagcactaccagccctacgcccctcccagggatttcgccgcctaccggagcagagtgaagttcagcaggagcgcagacgcccccgcgtacaagcagggccagaaccagctctataacgagctcaatctaggacgaagagaggagtacgatgttttggacaagcgtagaggccgggaccctgagatggggggaaagccgagaaggaagaaccctcaggaaggcctgtacaatgaactgcagaaagataagatggcggaggcctacagtgagattgggatgaaaggcgagcgccggaggggcaaggggcacgatggcctttaccagggactcagtacagccaccaaggacacctacgacgcccttcacatgcaggccctgccccctcgctag

SEQ ID NO: 301 - protein, 463 aa, synthetic construct
  REGION 1..463: note = CT1095 full sequence
MDMRVPAQLLGLLLLWLRGARCQVQLQQSGPELKKPGETVKISCKASGYPFTNYGMNWVKQAPGQGLKWMGWINTSTGESTFADDFKGRFDFSLETSANTAYLQINNLKSEDMATYFCARWEVYHGYVPYWGQGTTVTVSSGGGGSGGGGSGGGGSDIQLTQSHKFLSTSVGDRVSITCKASQDVYNAVAWYQQKPGQSPKLLIYSASSRYTGVPSRFTGSGSGPDFTFTISSVQAEDLAVYFCQQHFRTPFTFGSGTKLEIKAEPKSPDKTHTCPPCPKDPKFWVLVVVGGVLACYSLLVTVAFIIFWVRSKRSRLLHSDYMNMTPRRPGPTRKHYQPYAPPRDFAAYRSRVKFSRSADAPAYKQGQNQLYNELNLGRREEYDVLDKRRGRDPEMGGKPRRKNPQEGLYNELQKDKMAEAYSEIGMKGERRRGKGHDGLYQGLSTATKDTYDALHMQALPPR

SEQ ID NO: 302 - DNA, 1392 bp, synthetic construct
  misc_feature 1..1392: note = CT1095 full sequence
  source 1..1392: mol_type = other DNA
atggacatgagggtccccgctcagctcctggggctcctgctactctggctccgaggtgccagatgtcaggtacaactgcagcagtcaggacctgaactgaagaagcctggagagacagtcaagatctcctgcaaggcctctgggtatcctttcacaaactatggaatgaactgggtgaagcaggctccaggacagggtttaaagtggatgggctggattaacacctccactggagagtcaacatttgctgatgacttcaagggacggtttgacttctctttggaaacctctgccaacactgcctatttgcagatcaacaacctcaaaagtgaagacatggctacatatttctgtgcaagatgggaggtttaccacggctacgttccttactggggccaagggaccacggtcaccgtttcctctggcggtggcggttctggtggcggtggctccggcggtggcggttctgacatccagctgacccagtctcacaaattcctgtccacttcagtaggagacagggtcagcatcacctgcaaggccagtcaggatgtgtataatgctgttgcctggtatcaacagaaaccaggacaatctcctaaacttctgatttactcggcatcctcccggtacactggagtcccttctcgcttcactggcagtggctctgggccggatttcactttcaccatcagcagtgtgcaggctgaagacctggcagtttatttctgtcagcaacattttcgtactccattcacgttcggctcggggacaaaattggagatcaaagccgagcccaagtcccctgataaaactcacacctgcccaccctgtcctaaggacccgaagttctgggtgctggtcgttgtgggcggcgtgctggcctgctacagcctgctggtgacagtggccttcatcatcttttgggtgaggagcaagcggagcagactgctgcacagcgactacatgaacatgaccccccggaggcctggccccacccggaagcactaccagccctacgcccctcccagggatttcgccgcctaccggagcagagtgaagttcagcaggagcgcagacgcccccgcgtacaagcagggccagaaccagctctataacgagctcaatctaggacgaagagaggagtacgatgttttggacaagcgtagaggccgggaccctgagatggggggaaagccgagaaggaagaaccctcaggaaggcctgtacaatgaactgcagaaagataagatggcggaggcctacagtgagattgggatgaaaggcgagcgccggaggggcaaggggcacgatggcctttaccagggactcagtacagccaccaaggacacctacgacgcccttcacatgcaggccctgccccctcgctag

SEQ ID NO: 303 - protein, 522 aa, synthetic construct
  REGION 1..522: note = C-1765 full sequence
MDMRVPAQLLGLLLLWLRGARCDVLMTQTPLSLPVSLGDQASISCRSSQSIVHSNGNTYLEWYLQKPGQSPKLLIYKVSNRFSGVPDRFSGSGSGTDFTLKISRVEAEDLGVYYCFQGSHVPRTSGGGTKLEIKGGGGSGGGGSGGGGSGGQVQLQQSGPELVKPGASVRISCKASGYTFTSYHIHWVKQRPGQGLEWIGWIYPGNVNTEYNEKFKGKATLTADKSSSTAYMHLSSLTSEDSAVYFCAREEITYAMDYWGQGTSVTVSSYGSQSSKPYLLTHPSDPLELVVSGPSGGPSSPTTGPTSTSGPEDQPLTPTGSDPQSGLGRHLGVVIGILVAVILLLLLLLLLFLILRHRRQGKHWTSTQRKADFQHPAGAVGPEPTDRGLQWRSSPAADAQEENLYAAVKHTQPEDGVEMDTRSPHDEDPQAVTYAEVKHSRPRREMASPPSPLSGEFLDTKDRQAEEDRQMDTEAAASEAPQDVTYAQLHSLTLRREATEPPPSQEGPSPAVPSIYATLAIH

SEQ ID NO: 304 - DNA, 1569 bp, synthetic construct
  misc_feature 1..1569: note = C-1765 full sequence
  source 1..1569: mol_type = other DNA
atggacatgagggtccccgctcagctcctggggctcctgctactctggctccgaggtgccagatgtgatgttttgatgacccaaactccactctccctgcctgtcagtcttggagatcaagcctccatctcttgcagatctagtcagagcattgtacatagtaatggaaacacctatttagaatggtacctgcagaaaccaggccagtctccaaagctcctgatctacaaagtttccaaccgattttctggggtcccagacaggttcagtggcagtggatcagggacagatttcacactcaagatcagtagagtggaggctgaggatctgggagtttattactgctttcaaggttcacatgttcctcggacgtccggtggaggcaccaagctggaaatcaaaggcggaggtggaagcggagggggaggatctggcggcggaggaagcggaggccaggtccagctgcagcagtctggacctgagctggtgaagcctggggcttcagtgaggatatcctgcaaggcttctggctacaccttcacaagttaccatatacattgggtgaagcagaggcctggacagggacttgagtggattggatggatttatcctggaaatgttaatactgagtacaatgagaagttcaagggcaaggccacactgactgcagacaaatcgtccagcacagcctacatgcacctcagcagcctgacctctgaggactctgcggtctatttctgtgccagagaggagattacctatgctatggactactggggtcaaggaacctcagtcaccgtgtcctcatacggctcacagagctccaaaccctacctgctgactcaccccagtgaccccctggagctcgtggtctcaggaccgtctgggggccccagctccccgacaacaggccccacctccacatctggccctgaggaccagcccctcacccccaccgggtcggatccccagagtggtctgggaaggcacctgggggttgtgatcggcatcttggtggccgtcatcctactgctcctcctcctcctcctcctcttcctcatcctccgacatcgacgtcagggcaaacactggacatcgacccagagaaaggctgatttccaacatcctgcaggggctgtggggccagagcccacagacagaggcctgcagtggaggtccagcccagctgccgatgcccaggaagaaaacctctatgctgccgtgaagcacacacagcctgaggatggggtggagatggacactcggagcccacacgatgaagacccccaggcagtgacgtatgccgaggtgaaacactccagacctaggagagaaatggcctctcctccttccccactgtctggggaattcctggacacaaaggacagacaggcggaagaggacaggcagatggacactgaggctgctgcatctgaagccccccaggatgtgacctacgcccagctgcacagcttgaccctcagacgggaggcaactgagcctcctccatcccaggaagggccctctccagctgtgcccagcatctacgccactctggccatccactag

SEQ ID NO: 305 - protein, 522 aa, synthetic construct
  REGION 1..522: note = C-2162 full sequence
MDMRVPAQLLGLLLLWLRGARCQVQLVQSGAEVKKPGSSVKVSCKASGYTFTSYHIHWVRQAPGQGLEWIGWIYPGNVNTEYNEKFKGKATITADESTNTAYMELSSLRSEDTAVYYCAREEITYAMDYWGQGTLVTVSSGGGGSGGGGSGGGGSGGDIQMTQSPSTLSASVGDRVTITCRSSQSIVHSNGNTYLEWYQQKPGKAPKLLIYKVSNRFSGVPARFSGSGSGTEFTLTISSLQPDDFATYYCFQGSHVPRTFGQGTKVEVKYGSQSSKPYLLTHPSDPLELVVSGPSGGPSSPTTGPTSTSGPEDQPLTPTGSDPQSGLGRHLGVVIGILVAVILLLLLLLLLFLILRHRRQGKHWTSTQRKADFQHPAGAVGPEPTDRGLQWRSSPAADAQEENLYAAVKHTQPEDGVEMDTRSPHDEDPQAVTYAEVKHSRPRREMASPPSPLSGEFLDTKDRQAEEDRQMDTEAAASEAPQDVTYAQLHSLTLRREATEPPPSQEGPSPAVPSIYATLAIH

SEQ ID NO: 306 - DNA, 1569 bp, synthetic construct
  misc_feature 1..1569: note = C-2162 full sequence
  source 1..1569: mol_type = other DNA
atggacatgagggtccccgctcagctcctggggctcctgctactctggctccgaggtgccagatgtcaggtgcagctggtgcagtctggggctgaggtgaagaagcctgggtcctcagtgaaggtttcctgcaaggcttctggatacaccttcactagctatcatatacattgggtgcgccaggcccccggacaagggcttgagtggatcggatggatctaccctggcaatgttaacacagaatataatgagaagttcaagggcaaagccaccattaccgcggacgaatccacgaacacagcctacatggagctgagcagcctgagatctgaagacacggctgtgtattactgtgcgagggaggaaattacctacgctatggactactggggccagggaaccctggtcaccgtgtcctcaggcggaggtggaagcggagggggaggatctggcggcggaggaagcggaggcgacattcaaatgacccagagcccatccaccctgagcgcatctgtaggtgaccgggtcaccatcacttgtagatccagtcagagtattgtacacagtaatgggaacacctatttggaatggtatcagcagaaaccaggtaaagccccaaaattgctcatctacaaagtctctaacagatttagtggtgtaccagccaggttcagcggttccggaagtggtactgaattcaccctcacgatctcctctctccagccagatgatttcgccacttattactgttttcaaggttcacatgtgccgcgcacattcggtcagggtactaaagtagaagtcaaatacggctcacagagctccaaaccctacctgctgactcaccccagtgaccccctggagctcgtggtctcaggaccgtctgggggccccagctccccgacaacaggccccacctccacatctggccctgaggaccagcccctcacccccaccgggtcggatccccagagtggtctgggaaggcacctgggggttgtgatcggcatcttggtggccgtcatcctactgctcctcctcctcctcctcctcttcctcatcctccgacatcgacgtcagggcaaacactggacatcgacccagagaaaggctgatttccaacatcctgcaggggctgtggggccagagcccacagacagaggcctgcagtggaggtccagcccagctgccgatgcccaggaagaaaacctctatgctgccgtgaagcacacacagcctgaggatggggtggagatggacactcggagcccacacgatgaagacccccaggcagtgacgtatgccgaggtgaaacactccagacctaggagagaaatggcctctcctccttccccactgtctggggaattcctggacacaaaggacagacaggcggaagaggacaggcagatggacactgaggctgctgcatctgaagccccccaggatgtgacctacgcccagctgcacagcttgaccctcagacgggaggcaactgagcctcctccatcccaggaagggccctctccagctgtgcccagcatctacgccactctggccatccactag

SEQ ID NO: 307 - protein, 522 aa, synthetic construct
  REGION 1..522: note = C-2163 full sequence
MDMRVPAQLLGLLLLWLRGARCQVQLVQSGAEVKKPGSSVKVSCKASGYTFTSYHMHWVRQAPGQGLEWIGYIYPGNVNTEYNEKFKGKATLTADKSTNTAYMELSSLRSEDTAVYFCAREEITYAMDYWGQGTLVTVSSGGGGSGGGGSGGGGSGGDVQMTQSPSTLSASVGDRVTITCSSSQSIVHSNGNTYMEWYQQKPGKAPKLLIYKVSNRFSGVPDRFSGSGSGTEFTLTISSLQPDDFATYYCHQGSHVPRTFGQGTKVEVKYGSQSSKPYLLTHPSDPLELVVSGPSGGPSSPTTGPTSTSGPEDQPLTPTGSDPQSGLGRHLGVVIGILVAVILLLLLLLLLFLILRHRRQGKHWTSTQRKADFQHPAGAVGPEPTDRGLQWRSSPAADAQEENLYAAVKHTQPEDGVEMDTRSPHDEDPQAVTYAEVKHSRPRREMASPPSPLSGEFLDTKDRQAEEDRQMDTEAAASEAPQDVTYAQLHSLTLRREATEPPPSQEGPSPAVPSIYATLAIH

SEQ ID NO: 308 - DNA, 1569 bp, synthetic construct
  misc_feature 1..1569: note = C-2163 full sequence
  source 1..1569: mol_type = other DNA
atggacatgagggtccccgctcagctcctggggctcctgctactctggctccgaggtgccagatgtcaggtgcagctggtgcagtctggggctgaggtgaagaagcctgggtcctcagtgaaggtttcctgcaaggcttctggatacaccttcactagctatcatatgcattgggtgcgccaggcccccggacaagggcttgagtggatcggatacatctaccctggcaatgttaacacagaatataatgagaagttcaagggcaaagccacccttaccgcggacaaatccacgaacacagcctacatggagctgagcagcctgagatctgaagacacggctgtgtatttctgtgcgagggaggaaattacctacgctatggactactggggccagggaaccctggtcaccgtgtcctcaggcggaggtggaagcggagggggaggatctggcggcggaggaagcggaggcgacgttcaaatgacccagagcccatccaccctgagcgcatctgtaggtgaccgggtcaccatcacttgtagctccagtcagagtattgtacacagtaatgggaacacctatatggaatggtatcagcagaaaccaggtaaagccccaaaattgctcatctacaaagtctctaacagatttagtggtgtaccagacaggttcagcggttccggaagtggtactgaattcaccctcacgatctcctctctccagccagatgatttcgccacttattactgtcatcaaggttcacatgtgccgcgcacattcggtcagggtactaaagtagaagtcaaatacggctcacagagctccaaaccctacctgctgactcaccccagtgaccccctggagctcgtggtctcaggaccgtctgggggccccagctccccgacaacaggccccacctccacatctggccctgaggaccagcccctcacccccaccgggtcggatccccagagtggtctgggaaggcacctgggggttgtgatcggcatcttggtggccgtcatcctactgctcctcctcctcctcctcctcttcctcatcctccgacatcgacgtcagggcaaacactggacatcgacccagagaaaggctgatttccaacatcctgcaggggctgtggggccagagcccacagacagaggcctgcagtggaggtccagcccagctgccgatgcccaggaagaaaacctctatgctgccgtgaagcacacacagcctgaggatggggtggagatggacactcggagcccacacgatgaagacccccaggcagtgacgtatgccgaggtgaaacactccagacctaggagagaaatggcctctcctccttccccactgtctggggaattcctggacacaaaggacagacaggcggaagaggacaggcagatggacactgaggctgctgcatctgaagccccccaggatgtgacctacgcccagctgcacagcttgaccctcagacgggaggcaactgagcctcctccatcccaggaagggccctctccagctgtgcccagcatctacgccactctggccatccactag

SEQ ID NO: 309 - protein, 9 aa, synthetic construct
  REGION 1..9: note = HER2 peptide bound to MHC I
KIFGSLAFL

SEQ ID NO: 310 - protein, 13 aa, synthetic construct
  REGION 1..13: note = HER2 peptide bound to MHC II
GSPYVSRLLGICL

SEQ ID NO: 311 - protein, 7 aa, synthetic construct
  REGION 1..7: note = CDR-L2
SASFLYS

SEQ ID NO: 312 - protein, 9 aa, synthetic construct
  REGION 1..9: note = CDR-L3
QQHYTTPPT

SEQ ID NO: 313 - protein, 5 aa, synthetic construct
  REGION 1..5: note = CDR-H1
DTYIH

SEQ ID NO: 314 - protein, 17 aa, synthetic construct
  REGION 1..17: note = CDR-H2
RIYPTNGYTRYADSVKG

SEQ ID NO: 315 - protein, 11 aa, synthetic construct
  REGION 1..11: note = CDR-H3
WGGDGFYAMDV

SEQ ID NO: 316 - protein, 23 aa, synthetic construct
  REGION 1..23: note = TCR alpha transmembrane domain
VIGFRILLLKVAGFNLLMTLRLW

SEQ ID NO: 317 - DNA, 69 bp, synthetic construct; identical to SEQ ID NO: 271
  misc_feature 1..69: note = TCR alpha transmembrane domain
  source 1..69: mol_type = other DNA

SEQ ID NO: 318 - protein, 23 aa, synthetic construct
  REGION 1..23: note = TCR beta transmembrane domain
TILYEILLGKATLYAVLVSALVL

SEQ ID NO: 319 - DNA, 69 bp, synthetic construct; identical to SEQ ID NO: 273
  misc_feature 1..69: note = TCR beta transmembrane domain
  source 1..69: mol_type = other DNA

SEQ ID NO: 320 - protein, 10 aa, synthetic construct
  REGION 1..10: note = TCR beta intracellular domain
MAMVKRKDSR

SEQ ID NO: 321 - DNA, 30 bp, synthetic construct; identical to SEQ ID NO: 268
  misc_feature 1..30: note = TCR beta intracellular domain
  source 1..30: mol_type = other DNA

SEQ ID NO: 322 - skipped

SEQ ID NO: 323 - protein, 522 aa, synthetic construct; identical to SEQ ID NO: 303
  REGION 1..522: note = C1765 (anti-HLA-A*02 chimeric antigen receptor)

SEQ ID NO: 324 - protein, 522 aa, synthetic construct; identical to SEQ ID NO: 305
  REGION 1..522: note = C2162 (anti-HLA-A*02 chimeric antigen receptor)

SEQ ID NO: 325 - protein, 273 aa, Homo sapiens
MSGSQSEVAPSPQSPRSPEMGRDLRPGSRVLLLLLLLLLVYLTQPGNGNEGSVTGSCYCGKRISSDSPPSVQFMNRLRKHLRAYHRCLYYTRFQLLSWSVCGGNKDPWVQELMSCLDLKECGHAYSGIVAHQKHLLPTSPPISQASEGASSDIHTPAQMLLSTLQSTQRPTLPVGSLSSDKELTRPNETTIHTAGHSLAAGPEAGENQKQPEKNAGPTARTSATVPVLCLLAIIFILTAALSYVLCKRRRGQSPQSSPDLPVHYIPVAPDSNT

SEQ ID NO: 326 - protein, 742 aa, Homo sapiens
MKDDFAEEEEVQSFGYKRFGIQEGTQCTKCKNNWALKFSIILLYILCALLTITVAILGYKVVEKMDNVTGGMETSRQTYDDKLTAVESDLKKLGDQTGKKAISTNSELSTFRSDILDLRQQLREITEKTSKNKDTLEKLQASGDALVDRQSQLKETLENNSFLITTVNKTLQAYNGYVTNLQQDTSVLQGNLQNQMYSHNVVIMNLNNLNLTQVQQRNLITNLQRSVDDTSQAIQRIKNDFQNLQQVFLQAKKDTDWLKEKVQSLQTLAANNSALAKANNDTLEDMNSQLNSFTGQMENITTISQANEQNLKDLQDLHKDAENRTAIKFNQLEERFQLFETDIVNIISNISYTAHHLRTLTSNLNEVRTTCTDTLTKHTDDLTSLNNTLANIRLDSVSLRMQQDLMRSRLDTEVANLSVIMEEMKLVDSKHGQLIKNFTILQGPPGPRGPRGDRGSQGPPGPTGNKGQKGEKGEPGPPGPAGERGPIGPAGPPGERGGKGSKGSQGPKGSRGSPGKPGPQGSSGDPGPPGPPGKEGLPGPQGPPGFQGLQGTVGEPGVPGPRGLPGLPGVPGMPGPKGPPGPPGPSGAVVPLALQNEPTPAPEDNGCPPHWKNFTDKCYYFSVEKEIFEDAKLFCEDKSSHLVFINTREEQQWIKKQMVGRESHWIGLTDSERENEWKWLDGTSPDYKNWKAGQPDNWGHGHGPGEDCAGLIYAGQWNDFQCEDVNNFICEKDRETVLSSAL

SEQ ID NO: 327 - protein, 514 aa, Homo sapiens
MSWPRRLLLRYLFPALLLHGLGEGSALLHPDSRSHPRSLEKSAWRAFKESQCHHMLKHLHNGARITVQMPPTIEGHWVSTGCEVRSGPEFITRSYRFYHNNTFKAYQFYYGSNRCTNPTYTLIIRGKIRLRQASWIIRGGTEADYQLHNVQVICHTEAVAEKLGQQVNRTCPGFLADGGPWVQDVAYDLWREENGCECTKAVNFAMHELQLIRVEKQYLHHNLDHLVEELFLGDIHTDATQRMFYRPSSYQPPLQNAKNHDHACIACRIIYRSDEHHPPILPPKADLTIGLHGEWVSQRCEVRPEVLFLTRHFIFHDNNNTWEGHYYHYSDPVCKHPTFSIYARGRYSRGVLSSRVMGGTEFVFKVNHMKVTPMDAATASLLNVFNGNECGAEGSWQVGIQQDVTHTNGCVALGIKLPHTEYEIFKMEQDARGRYLLFNGQRPSDGSSPDRPEKRATSYQMPLVQCASSSPRAEDLAEDSGSSLYGRAPGRHTWSLLLAALACLVPLLHWNIRR

SEQ ID NO: 328 - protein, 226 aa, Homo sapiens
DVAYDLWREENGCECTKAVNFAMHELQLIRVEKQYLHHNLDHLVEELFLGDIHTDATQRMFYRPSSYQPPLQNAKCAAESSGSFQILPQDSSEKEQNGLSHWCLSRPGHQKDWALCAHAGPATAGCPSCLWPPAETGRKAGRTSSKTVHACPGEAGTSSFELFYFPNCWSIETKLKISLNAKLSFKPRASAPLETGHRVKIETLSQLVFLSFIQLCCEVQSPLANK

SEQ ID NO: 329 - protein, 94 aa, Homo sapiens
PEDVLPALQLPAPSAECQVEMGFHHVGQDGLQLPTSSDPPALASQSAGITGVSHRPPGRHLSNDLRTTTMPASPVGSSIGQTSTTLPSCPQRQT

SEQ ID NO: 330 - protein, 244 aa, synthetic construct
  REGION 1..244: note = BB7.1.10_scFv
QVQLQESGPGLVKPSQTLSLTCTVSGYSITSGYSWHWIRQPPGKGLEWIGYIHFSGSTHYHPSLKSRVTISVDTSKNQFSLKLSSVTAADTAVYYCARGGVVSHYAMDCWGQGTTVTVSSGGGGSGGGGSGGGGSGGDIQMTQSPSSLSASVGDRVTITCRASENIYSNLAWYQQKPGKAPKLLIYAATYLPDGVPSRFSGSGSGTDFTLTISSLQPEDFATYYCQHFWVTPYTFGGGTKVEIK

SEQ ID NO: 331 - protein, 244 aa, synthetic construct
  REGION 1..244: note = BB7.1.9_scFv
EVQLVESGGGLVKPGGSLRLSCAASGYSITSGYSWHWVRQAPGKGLEWVSYIHFSGSTHYHPSLKSRFTISRDNAKNSLYLQMNSLRAEDTAVYYCARGGVVSHYAMDCWGQGTTVTVSSGGGGSGGGGSGGGGSGGDIQMTQSPSSVSASVGDRVTITCRASENIYSNLAWYQQKPGKAPKLLIYAATYLPDGVPSRFSGSGSGTDFTLTISSLQPEDFATYYCQHFWVTPYTFGGGTKVEIK

SEQ ID NO: 332 - protein, 244 aa, synthetic construct
  REGION 1..244: note = BB7.1.8_scFv
EVQLVESGGGLVKPGGSLRLSCAASGYSITSGYSWHWVRQAPGKGLEWVGYIHFSGSTHYHPSLKSRFTISRDDSKNTLYLQMNSLKTEDTAVYYCARGGVVSHYAMDCWGQGTTVTVSSGGGGSGGGGSGGGGSGGEIVLTQSPATLSLSPGERATLSCRASENIYSNLAWYQQKPGQAPRLLIYAATYLPDGIPARFSGSGSGTDFTLTISSLEPEDFAVYYCQHFWVTPYTFGGGTKVEIK

SEQ ID NO: 333 - protein, 244 aa, synthetic construct
  REGION 1..244: note = BB7.1.7_scFv
QVQLQQSGPGLVKPSQTLSLTCAISGYSITSGYSWHWIRQSPSRGLEWLGYIHFSGSTHYHPSLKSRITINPDTSKNQFSLQLNSVTPEDTAVYYCARGGVVSHYAMDCWGQGTTVTVSSGGGGSGGGGSGGGGSGGEIVLTQSPATLSLSPGERATLSCRASENIYSNLAWYQQKPGQAPRLLIYAATYLPDGIPARFSGSGSGTDFTLTISRLEPEDFAVYYCQHFWVTPYTFGGGTKVEIK

SEQ ID NO: 334 - protein, 244 aa, synthetic construct
  REGION 1..244: note = BB7.1.6_scFv
EVQLVESGGGLVKPGGSLRLSCAASGYSITSGYSWHWVRQAPGKGLEWVGYIHFSGSTHYHPSLKSRFTISRDDSKNTLYLQMNSLKTEDTAVYYCARGGVVSHYAMDCWGQGTTVTVSSGGGGSGGGGSGGGGSGGDIQMTQSPSSVSASVGDRVTITCRASENIYSNLAWYQQKPGKAPKLLIYAATYLPDGVPSRFSGSGSGTDFTLTISSLQPEDFATYYCQHFWVTPYTFGGGTKVEIK

SEQ ID NO: 335 - protein, 244 aa, synthetic construct
  REGION 1..244: note = BB7.1.5_scFv
EVQLVESGGGLVQPGGSLRLSCAASGYSITSGYSWHWVRQAPGKGLEWVSYIHFSGSTHYHPSLKSRFTISRDNSKNTLYLQMNSLRAEDTAVYYCARGGVVSHYAMDCWGQGTTVTVSSGGGGSGGGGSGGGGSGGDIQMTQSPSSLSASVGDRVTITCRASENIYSNLAWYQQKPGKAPKLLIYAATYLPDGVPSRFSGSGSGTDFTLTISSLQPEDFATYYCQHFWVTPYTFGGGTKVEIK

SEQ ID NO: 336 - protein, 244 aa, synthetic construct
  REGION 1..244: note = BB7.1.4_scFv
EVQLVESGGGLVKPGGSLRLSCAASGYSITSGYSWHWVRQAPGKGLEWVGYIHFSGSTHYHPSLKSRFTISRDDSKNTLYLQMNSLKTEDTAVYYCARGGVVSHYAMDCWGQGTTVTVSSGGGGSGGGGSGGGGSGGDIQMTQSPSSLSASVGDRVTITCRASENIYSNLAWYQQKPGKAPKLLIYAATYLPDGVPSRFSGSGSGTDFTLTISSLQPEDFATYYCQHFWVTPYTFGGGTKVEIK

SEQ ID NO: 337 - protein, 244 aa, synthetic construct
  REGION 1..244: note = BB7.1.3_scFv
QVQLQQWGAGLLKPSETLSLTCAVYGYSITSGYSWHWIRQPPGKGLEWIGYIHFSGSTHYHPSLKSRVTISVDTSKNQFSLKLSSVTAADTAVYYCARGGVVSHYAMDCWGQGTTVTVSSGGGGSGGGGSGGGGSGGDIQMTQSPSSLSASVGDRVTITCRASENIYSNLAWYQQKPGKAPKLLIYAATYLPDGVPSRFSGSGSGTDFTLTISSLQPEDFATYYCQHFWVTPYTFGGGTKVEIK

SEQ ID NO: 338 - protein, 244 aa, synthetic construct
  REGION 1..244: note = BB7.1.2_scFv
QVQLQESGPGLVKPSQTLSLTCTVSGYSITSGYSWHWIRQHPGKGLEWIGYIHFSGSTHYHPSLKSRVTISVDTSKNQFSLKLSSVTAADTAVYYCARGGVVSHYAMDCWGQGTTVTVSSGGGGSGGGGSGGGGSGGDIQMTQSPSSLSASVGDRVTITCRASENIYSNLAWYQQKPGKAPKLLIYAATYLPDGVPSRFSGSGSGTDFTLTISSLQPEDFATYYCQHFWVTPYTFGGGTKVEIK

SEQ ID NO: 339 - protein, 244 aa, synthetic construct
  REGION 1..244: note = BB7.1.1_scFv
QVQLQQSGPGLVKPSQTLSLTCAISGYSITSGYSWHWIRQSPSRGLEWLGYIHFSGSTHYHPSLKSRITINPDTSKNQFSLQLNSVTPEDTAVYYCARGGVVSHYAMDCWGQGTTVTVSSGGGGSGGGGSGGGGSGGDIQMTQSPSSLSASVGDRVTITCRASENIYSNLAWYQQKPGKAPKLLIYAATYLPDGVPSRFSGSGSGTDFTLTISSLQPEDFATYYCQHFWVTPYTFGGGTKVEIK

SEQ ID NO: 340 - protein, 243 aa, synthetic construct
  REGION 1..243: note = HLA-A*11 scFv 9
QVQLQESGPGLVKPSQTLSLTCTVSGGSISSGGYYWSWIRQPPGKGLEWIGYIYYSGSTYYNPSLKSRVTISVDTSKNQFSLKLSSVTAADTAVYYCARHYYYYSMDVWGKGTTVTVSSGGGGSGGGGSGGGGSGGDIQMTQSPSSLSASVGDRVTITCRASQSISSYLNWYQQKPGKAPKLLIYAASSLQSGVPSRFSGSGSGTDFTLTISSLQPEDFATYYCQQSYSTPLTFGGGTKVEIK

SEQ ID NO: 341 - protein, 244 aa, synthetic construct
  REGION 1..244: note = HLA-A*11 scFv 8
QITLKESGPTLVKPTQTLTLTCTFSGFSLSTSGVGVGWIRQPPGKALEWLALIYWNDDKRYSPSLKSRLTITKDTSKNQVVLTMTNMDPVDTATYYCAHRHMRLSCFDYWGQGTLVTVSSGGGGSGGGGSGGGGSGGDIQMTQSPSSLSASVGDRVTITCRASQSISSYLNWYQQKPGKAPKLLIYAASSLQSGVPSRFSGSGSGTDFTLTISSLQPEDFATYYCQQSYSTPLTFGGGTKVEIK

SEQ ID NO: 342 - protein, 245 aa, synthetic construct
  REGION 1..245: note = HLA-A*11 scFv 7
QVQLVQSGAEVKKPGASVKVSCKASGYTFTSYAMHWVRQAPGQRLEWMGWINAGNGNTKYSQKFQGRVTITRDTSASTAYMELSSLRSEDTAVYYCAREGNGANPDAFDIWGQGTMVTVSSGGGGSGGGGSGGGGSGGDIQMTQSPSSLSASVGDRVTITCRASQSISSYLNWYQQKPGKAPKLLIYAASSLQSGVPSRFSGSGSGTDFTLTISSLQPEDFATYYCQQSYSTPLTFGGGTKVEIK

SEQ ID NO: 343 - protein, 243 aa, synthetic construct
  REGION 1..243: note = HLA-A*11 scFv 6
EVQLVESGGGLVQPGGSLRLSCAASGFTFSSYDMHWVRQATGKGLEWVSAIGTAGDTYYPGSVKGRFTISRENAKNSLYLQMNSLRAGDTAVYYCARDLPGSYWYFDLWGRGTLVTVSSGGGGSGGGGSGGGGSGGDIQMTQSPSSLSASVGDRVTITCRASQSISSYLNWYQQKPGKAPKLLIYAASSLQSGVPSRFSGSGSGTDFTLTISSLQPEDFATYYCQQSYSTPLTFGGGTKVEIK

SEQ ID NO: 344 - protein, 243 aa, synthetic construct
  REGION 1..243: note = HLA-A*11 scFv 5
QVQLQESGPGLVKPSQTLSLTCTVSGGSISSGGYYWSWIRQPPGKGLEWIGYIYYSGSTYYNPSLKSRVTISVDTSKNQFSLKLSSVTAADTAVYYCARHYYYYYLDVWGKGTTVTVSSGGGGSGGGGSGGGGSGGDIQMTQSPSSLSASVGDRVTITCRASQSISSYLNWYQQKPGKAPKLLIYAASSLQSGVPSRFSGSGSGTDFTLTISSLQPEDFATYYCQQSYSTPLTFGGGTKVEIK

SEQ ID NO: 345 - protein, 243 aa, synthetic construct
  REGION 1..243: note = HLA-A*11 scFv 4
EVQLVESGGGLVQPGGSLRLSCAASGFTFSSYWMHWVRQAPGKGLVWVSRINSDGSSTSYADSVKGRFTISRDNAKNTLYLQMNSLRAEDTAVYYCCLGVLLYNWFDPWGQGTLVTVSSGGGGSGGGGSGGGGSGGDIQMTQSPSSLSASVGDRVTITCRASQSISSYLNWYQQKPGKAPKLLIYAASSLQSGVPSRFSGSGSGTDFTLTISSLQPEDFATYYCQQSYSTPLTFGGGTKVEIK

SEQ ID NO: 346 - protein, 242 aa, synthetic construct
  REGION 1..242: note = HLA-A*11 scFv 3
QVQLQESGPGLVKPSQTLSLTCTVSGGSISSGGYYWSWIRQPPGKGLEWIGYIYYSGSTYYNPSLKSRVTISVDTSKNQFSLKLSSVTAADTAVYYCARHYYYYMDVWGKGTTVTVSSGGGGSGGGGSGGGGSGGDIQMTQSPSSLSASVGDRVTITCRASQSISSYLNWYQQKPGKAPKLLIYAASSLQSGVPSRFSGSGSGTDFTLTISSLQPEDFATYYCQQSYSTPLTFGGGTKVEIK

SEQ ID NO: 347 - protein, 243 aa, synthetic construct
  REGION 1..243: note = HLA-A*11 scFv 2
QITLKESGPTLVKPTQTLTLTCTFSGFSLSTSGVGVGWIRQPPGKALEWLALIYWNDDKRYSPSLKSRLTITKDTSKNQVVLTMTNMDPVDTATYYCAHKTTSFYFDYWGQGTLVTVSSGGGGSGGGGSGGGGSGGDIQMTQSPSSLSASVGDRVTITCRASQSISSYLNWYQQKPGKAPKLLIYAASSLQSGVPSRFSGSGSGTDFTLTISSLQPEDFATYYCQQSYSTPLTFGGGTKVEIK

SEQ ID NO: 348 - protein, 243 aa, synthetic construct
  REGION 1..243: note = HLA-A*11 scFv 1
QVQLQESGPGLVKPSQTLSLTCTVSGGSISSGGYYWSWIRQPPGKGLEWIGYIYYSGSTYYNPSLKSRVTISVDTSKNQFSLKLSSVTAADTAVYYCARHYYYYYMDVWGKGTTVTVSSGGGGSGGGGSGGGGSGGDIQMTQSPSSLSASVGDRVTITCRASQSISSYLNWYQQKPGKAPKLLIYAASSLQSGVPSRFSGSGSGTDFTLTISSLQPEDFATYYCQQSYSTPLTFGGGTKVEIK

SEQ ID NO: 349 - protein, 240 aa, synthetic construct
  REGION 1..240: note = C7-45
EVQLLESGGGLVQPGGSLRLSCAASGFTFSSYAMSWVRQAPGKGLEWVSAISGSGGSTYYADSVKGRFTISRDNSKNTLYLQMNSLRAEDTAVYYCAVSFDWFDPWGQGTLVTVSSGGGGSGGGGSGGGGSGGDIQMTQSPSSLSASVGDRVTITCRASQSISSYLNWYQQKPGKAPKLLIYAASSLQSGVPSRFSGSGSGTDFTLTISSLQPEDFATYYCQQSYSTPLTFGGGTKVEIK

SEQ ID NO: 350 - protein, 248 aa, synthetic construct
  REGION 1..248: note = C7-44
QVQLQESGPGLVKPSQTLSLTCTVSGGSISSGGYYWSWIRQPPGKGLEWIGYIYYSGSTYYNPSLKSRVTISVDTSKNQFSLKLSSVTAADTAVYYCARERSISPYYYYYMDVWGKGTTVTVSSGGGGSGGGGSGGGGSGGDIQMTQSPSSLSASVGDRVTITCRASQSISSYLNWYQQKPGKAPKLLIYAASSLQSGVPSRFSGSGSGTDFTLTISSLQPEDFATYYCQQSYSTPLTFGGGTKVEIK

SEQ ID NO: 351 - protein, 247 aa, synthetic construct
  REGION 1..247: note = C7-43
QLQLQESGPGLVKPSETLSLTCTVSGGSISSSSYYWGWIRQPPGKGLEWIGSIYYSGSTYYNPSLKSRVTISVDTSKNQFSLKLSSVTAADTAVYYCARDSVIWYWFDPWGQGTLVTVSSGGGGSGGGGSGGGGSGGQSVLTQPPSASGTPGQRVTISCSGSSSNIGSNTVNWYQQLPGTAPKLLIYSNNQRPSGVPDRFSGSKSGTSASLAISGLQSEDEADYYCAAWDDSLNGWVFGGGTKLTVL

SEQ ID NO: 352 - protein, 249 aa, synthetic construct
  REGION 1..249: note = C7-42
QVQLQESGPGLVKPSQTLSLTCTVSGGSISSGGYYWSWIRQPPGKGLEWIGYIYYSGSTYYNPSLKSRVTISVDTSKNQFSLKLSSVTAADTAVYYCAREEILPRLSYYYYMDVWGKGTTVTVSSGGGGSGGGGSGGGGSGGDIQMTQSPSSLSASVGDRVTITCRASQSISSYLNWYQQKPGKAPKLLIYAASSLQSGVPSRFSGSGSGTDFTLTISSLQPEDFATYYCQQSYSTPLTFGGGTKVEIK

SEQ ID NO: 353 - protein, 245 aa, synthetic construct
  REGION 1..245: note = C7-41
QVQLVQSGSELKKPGASVKVSCKASGYTFTSYAMNWVRQAPGQGLEWMGWINTNTGNPTYAQGFTGRFVFSFDTSVSTAYLQICSLKAEDTAVYYCARGGRAHSSWYFDLWGRGTLVTVSSGGGGSGGGGSGGGGSGGDIQMTQSPSSLSASVGDRVTITCRASQSISSYLNWYQQKPGKAPKLLIYAASSLQSGVPSRFSGSGSGTDFTLTISSLQPEDFATYYCQQSYSTPLTFGGGTKVEIK

SEQ ID NO: 354 - protein, 251 aa, synthetic construct
  REGION 1..251: note = C7-40
QVQLQESGPGLVKPSQTLSLTCTVSGGSISSGGYYWSWIRQPPGKGLEWIGYIYYSGSTYYNPSLKSRVTISVDTSKNQFSLKLSSVTAADTAVYYCARDRIKILPRLGYYYYMDVWGKGTTVTVSSGGGGSGGGGSGGGGSGGDIQMTQSPSSLSASVGDRVTITCRASQSISSYLNWYQQKPGKAPKLLIYAASSLQSGVPSRFSGSGSGTDFTLTISSLQPEDFATYYCQQSYSTPLTFGGGTKVEIK

SEQ ID NO: 355 - protein, 246 aa, synthetic construct
  REGION 1..246: note = C7-39
QVQLQESGPGLVKPSQTLSLTCTVSGGSISSGGYYWSWIRQPPGKGLEWIGYIYYSGSTYYNPSLKSRVTISVDTSKNQFSLKLSSVTAADTAVYYCARDTVIHYYYYMDVWGKGTTVTVSSGGGGSGGGGSGGGGSGGDIQMTQSPSSLSASVGDRVTITCRASQSISSYLNWYQQKPGKAPKLLIYAASSLQSGVPSRFSGSGSGTDFTLTISSLQPEDFATYYCQQSYSTPLTFGGGTKVEIK

SEQ ID NO: 356 - protein, 250 aa, synthetic construct
  REGION 1..250: note = C7-38
QVQLQESGPGLVKPSQTLSLTCTVSGGSISSGGYYWSWIRQPPGKGLEWIGYIYYSGSTYYNPSLKSRVTISVDTSKNQFSLKLSSVTAADTAVYYCARDVIVEVFLSYYYYMDVWGKGTTVTVSSGGGGSGGGGSGGGGSGGDIQMTQSPSSLSASVGDRVTITCRASQSISSYLNWYQQKPGKAPKLLIYAASSLQSGVPSRFSGSGSGTDFTLTISSLQPEDFATYYCQQSYSTPLTFGGGTKVEIK

SEQ ID NO: 357 - protein, 246 aa, synthetic construct
  REGION 1..246: note = C7-37
QVQLQESGPGLVKPSQTLSLTCTVSGGSISSGGYYWSWIRQPPGKGLEWIGYIYYSGSTYYNPSLKSRVTISVDTSKNQFSLKLSSVTAADTAVYYCARDIFIHYYYYMDVWGKGTTVTVSSGGGGSGGGGSGGGGSGGDIQMTQSPSSLSASVGDRVTITCRASQSISSYLNWYQQKPGKAPKLLIYAASSLQSGVPSRFSGSGSGTDFTLTISSLQPEDFATYYCQQSYSTPLTFGGGTKVEIK

SEQ ID NO: 358 - protein, 247 aa, synthetic construct
  REGION 1..247: note = C7-36
EVQLVESGGGLVQPGGSLRLSCAASGFTFSSYSMNWVRQAPGKGLEWVSYISSSSSTIYYADSVKGRFTISRDNAKNSLYLQMNSLRAEDTAVYYCARDGTFYSYSPYYFDYWGQGTLVTVSSGGGGSGGGGSGGGGSGGDIQMTQSPSSLSASVGDRVTITCRASQSISSYLNWYQQKPGKAPKLLIYAASSLQSGVPSRFSGSGSGTDFTLTISSLQPEDFATYYCQQSYSTPLTFGGGTKVEIK

SEQ ID NO: 359 - protein, 251 aa, synthetic construct
  REGION 1..251: note = C7-35
QVQLQESGPGLVKPSQTLSLTCTVSGGSISSGGYYWSWIRQPPGKGLEWIGYIYYSGSTYYNPSLKSRVTISVDTSKNQFSLKLSSVTAADTAVYYCAREWIKILPRLGYYYYMDVWGKGTTVTVSSGGGGSGGGGSGGGGSGGDIQMTQSPSSLSASVGDRVTITCRASQSISSYLNWYQQKPGKAPKLLIYAASSLQSGVPSRFSGSGSGTDFTLTISSLQPEDFATYYCQQSYSTPLTFGGGTKVEIK

SEQ ID NO: 360 - protein, 246 aa, synthetic construct
  REGION 1..246: note = C7-34
QVQLQESGPGLVKPSQTLSLTCTVSGGSISSGGYYWSWIRQPPGKGLEWIGYIYYSGSTYYNPSLKSRVTISVDTSKNQFSLKLSSVTAADTAVYYCARDRSLYYYYYMDVWGKGTTVTVSSGGGGSGGGGSGGGGSGGDIQMTQSPSSLSASVGDRVTITCRASQSISSYLNWYQQKPGKAPKLLIYAASSLQSGVPSRFSGSGSGTDFTLTISSLQPEDFATYYCQQSYSTPLTFGGGTKVEIK

SEQ ID NO: 361 - protein, 248 aa, synthetic construct
  REGION 1..248: note = C7-33
QVQLQESGPGLVKPSQTLSLTCTVSGGSISSGGYYWSWIRQPPGKGLEWIGYIYYSGSTYYNPSLKSRVTISVDTSKNQFSLKLSSVTAADTAVYYCARDKILAPNYYYYMDVWGKGTTVTVSSGGGGSGGGGSGGGGSGGDIQMTQSPSSLSASVGDRVTITCRASQSISSYLNWYQQKPGKAPKLLIYAASSLQSGVPSRFSGSGSGTDFTLTISSLQPEDFATYYCQQSYSTPLTFGGGTKVEIK

SEQ ID NO: 362 - protein, 250 aa, synthetic construct
  REGION 1..250: note = C7-32
QVQLQESGPGLVKPSQTLSLTCTVSGGSISSGGYYWSWIRQPPGKGLEWIGYIYYSGSTYYNPSLKSRVTISVDTSKNQFSLKLSSVTAADTAVYYCAREKSWKYFYYYYYYMDVWGKGTTVTVSSGGGGSGGGGSGGGGSGGDIQMTQSPSSLSASVGDRVTITCRASQSISSYLNWYQQKPGKAPKLLIYAASSLQSGVPSRFSGSGSGTDFTLTISSLQPEDFATYYCQQSYSTPLTFGGGTKVEIK

SEQ ID NO: 363 - protein, 249 aa, synthetic construct
  REGION 1..249: note = C7-31
QVQLQESGPGLVKPSQTLSLTCTVSGGSISSGGYYWSWIRQPPGKGLEWIGYIYYSGSTYYNPSLKSRVTISVDTSKNQFSLKLSSVTAADTAVYYCARENTSTIPYYYYYMDVWGKGTTVTVSSGGGGSGGGGSGGGGSGGDIQMTQSPSSLSASVGDRVTITCRASQSISSYLNWYQQKPGKAPKLLIYAASSLQSGVPSRFSGSGSGTDFTLTISSLQPEDFATYYCQQSYSTPLTFGGGTKVEIK

SEQ ID NO: 364 - protein, 253 aa, synthetic construct
  REGION 1..253: note = C7-30
QVQLQESGPGLVKPSQTLSLTCTVSGGSISSGGYYWSWIRQPPGKGLEWIGYIYYSGSTYYNPSLKSRVTISVDTSKNQFSLKLSSVTAADTAVYYCAREDVDKNTSTIYYYYYYMDVWGKGTTVTVSSGGGGSGGGGSGGGGSGGDIQMTQSPSSLSASVGDRVTITCRASQSISSYLNWYQQKPGKAPKLLIYAASSLQSGVPSRFSGSGSGTDFTLTISSLQPEDFATYYCQQSYSTPLTFGGGTKVEIK

SEQ ID NO: 365 - protein, 250 aa, synthetic construct
  REGION 1..250: note = C7-29
QVQLVESGGGLVKPGGSLRLSCAASGFTFSDYYMSWIRQAPGKGLEWVSYISSSGSTIYYADSVKGRFTISRDNAKNSLYLQMNSLRAEDTAVYYCARDGGDIVSSSAIYWYFDLWGRGTLVTVSSGGGGSGGGGSGGGGSGGAIQLTQSPSSLSASVGDRVTITCRASQGISSALAWYQQKPGKAPKLLIYDASSLESGVPSRFSGSGSGTDFTLTISSLQPEDFATYYCQQFNSYPLTFGGGTKVEIK

SEQ ID NO: 366 - protein, 248 aa, synthetic construct
  REGION 1..248: note = C7-28
QVQLQESGPGLVKPSQTLSLTCTVSGGSISSGGYYWSWIRQPPGKGLEWIGYIYYSGSTYYNPSLKSRVTISVDTSKNQFSLKLSSVTAADTAVYYCARDLILPPYYYYYMDVWGKGTTVTVSSGGGGSGGGGSGGGGSGGDIQMTQSPSSLSASVGDRVTITCRASQSISSYLNWYQQKPGKAPKLLIYAASSLQSGVPSRFSGSGSGTDFTLTISSLQPEDFATYYCQQSYSTPLTFGGGTKVEIK

SEQ ID NO: 367 - protein, 253 aa, synthetic construct
  REGION 1..253: note = C7-27
QVQLQESGPGLVKPSQTLSLTCTVSGGSISSGGYYWSWIRQPPGKGLEWIGYIYYSGSTYYNPSLKSRVTISVDTSKNQFSLKLSSVTAADTAVYYCARETWIKILPRYYYYYYYMDVWGKGTTVTVSSGGGGSGGGGSGGGGSGGDIQMTQSPSSLSASVGDRVTITCRASQSISSYLNWYQQKPGKAPKLLIYAASSLQSGVPSRFSGSGSGTDFTLTISSLQPEDFATYYCQQSYSTPLTFGGGTKVEIK

SEQ ID NO: 368 - protein, 246 aa, synthetic construct
  REGION 1..246: note = C7-26
QVQLQESGPGLVKPSQTLSLTCTVSGGSISSGGYYWSWIRQPPGKGLEWIGYIYYSGSTYYNPSLKSRVTISVDTSKNQFSLKLSSVTAADTAVYYCARDLSRYYYYYMDVWGKGTTVTVSSGGGGSGGGGSGGGGSGGDIQMTQSPSSLSASVGDRVTITCRASQSISSYLNWYQQKPGKAPKLLIYAASSLQSGVPSRFSGSGSGTDFTLTISSLQPEDFATYYCQQSYSTPLTFGGGTKVEIK

SEQ ID NO: 369 - protein, 242 aa, synthetic construct
  REGION 1..242: note = C7-25
EVQLVESGGGLVQPGGSLRLSCAASGFTFSSYSMNWVRQAPGKGLEWVSYISSSSSTIYYADSVKGRFTISRDNAKNSLYLQMNSLRAEDTAVYYCAREHIVLCFDYWGQGTLVTVSSGGGGSGGGGSGGGGSGGDIQMTQSPSSLSASVGDRVTITCRASQGISSWLAWYQQKPEKAPKSLIYAASSLQSGVPSRFSGSGSGTDFTLTISSLQPEDFATYYCQQYNSYPLTFGGGTKVEIK

SEQ ID NO: 370 - protein, 249 aa, synthetic construct
  REGION 1..249: note = C7-24
QVQLQESGPGLVKPSQTLSLTCTVSGGSISSGGYYWSWIRQPPGKGLEWIGYIYYSGSTYYNPSLKSRVTISVDTSKNQFSLKLSSVTAADTAVYYCARDKILPRPYYYYYMDVWGKGTTVTVSSGGGGSGGGGSGGGGSGGDIQMTQSPSSLSASVGDRVTITCRASQSISSYLNWYQQKPGKAPKLLIYAASSLQSGVPSRFSGSGSGTDFTLTISSLQPEDFATYYCQQSYSTPLTFGGGTKVEIK

SEQ ID NO: 371 - protein, 244 aa, synthetic construct
  REGION 1..244: note = C7-23
QVQLVQSGAEVKKPGASVKVSCKASGYTFTSYGISWVRQAPGQGLEWMGWISAYNGNTNYAQKLQGRVTMTTDTSTSTAYMELRSLRSDDTAVYYCARGSNEYFQHWGQGTLVTVSSGGGGSGGGGSGGGGSGGQSALTQPPSASGSPGQSVTISCTGTSSDVGGYNYVSWYQQHPGKAPKLMIYEVSKRPSGVPDRFSGSKSGNTASLTVSGLQAEDEADYYCSSYAGSNNWVFGGGTKLTVL

SEQ ID NO: 372 - protein, 242 aa, synthetic construct
  REGION 1..242: note = C7-22
QVQLVQSGSELKKPGASVKVSCKASGYTFTSYAMNWVRQAPGQGLEWMGWINTNTGNPTYAQGFTGRFVFSFDTSVSTAYLQICSLKAEDTAVYYCARGTSYWYFDLWGRGTLVTVSSGGGGSGGGGSGGGGSGGDIQMTQSPSSLSASVGDRVTITCRASQSISSYLNWYQQKPGKAPKLLIYAASSLQSGVPSRFSGSGSGTDFTLTISSLQPEDFATYYCQQSYSTPLTFGGGTKVEIK

SEQ ID NO: 373 - protein, 248 aa, synthetic construct
  REGION 1..248: note = C7-21
QVQLQESGPGLVKPSQTLSLTCTVSGGSISSGGYYWSWIRQPPGKGLEWIGYIYYSGSTYYNPSLKSRVTISVDTSKNQFSLKLSSVTAADTAVYYCAREEIVEVFYYYYMDVWGKGTTVTVSSGGGGSGGGGSGGGGSGGDIQMTQSPSSLSASVGDRVTITCRASQSISSYLNWYQQKPGKAPKLLIYAASSLQSGVPSRFSGSGSGTDFTLTISSLQPEDFATYYCQQSYSTPLTFGGGTKVEIK

SEQ ID NO: 374 - protein, 241 aa, synthetic construct
  REGION 1..241: note = C7-20
EVQLLESGGGLVQPGGSLRLSCAASGFTFSSYAMSWVRQAPGKGLEWVSAISGSGGSTYYADSVKGRFTISRDNSKNTLYLQMNSLRAEDTAVYYCAKVDDYYFDYWGQGTLVTVSSGGGGSGGGGSGGGGSGGDIQMTQSPSSLSASVGDRVTITCRASQSISSYLNWYQQKPGKAPKLLIYAASSLQSGVPSRFSGSGSGTDFTLTISSLQPEDFATYYCQQSYSTPLTFGGGTKVEIK

SEQ ID NO: 375 - protein, 247 aa, synthetic construct
  REGION 1..247: note = C7-19
EVQLVESGGGLVQPGGSLRLSCAASGFTFSSYWMHWVRQAPGKGLVWVSRINSDGSSTSYADSVKGRFTISRDNAKNTLYLQMNSLRAEDTAVYYCAWSTNILLSYTKAFDIWGQGTMVTVSSGGGGSGGGGSGGGGSGGDIQMTQSPSSLSASVGDRVTITCRASQSISSYLNWYQQKPGKAPKLLIYAASSLQSGVPSRFSGSGSGTDFTLTISSLQPEDFATYYCQQSYSTPLTFGGGTKVEIK

SEQ ID NO: 376 - protein, 246 aa, synthetic construct
  REGION 1..246: note = C7-18
QVQLQESGPGLVKPSQTLSLTCTVSGGSISSGGYYWSWIRQPPGKGLEWIGYIYYSGSTYYNPSLKSRVTISVDTSKNQFSLKLSSVTAADTAVYYCARDKTYYYYYYMDVWGKGTTVTVSSGGGGSGGGGSGGGGSGGDIQMTQSPSSLSASVGDRVTITCRASQSISSYLNWYQQKPGKAPKLLIYAASSLQSGVPSRFSGSGSGTDFTLTISSLQPEDFATYYCQQSYSTPLTFGGGTKVEIK

SEQ ID NO: 377 - protein, 253 aa, synthetic construct
  REGION 1..253: note = C7-17
QVQLQESGPGLVKPSQTLSLTCTVSGGSISSGGYYWSWIRQPPGKGLEWIGYIYYSGSTYYNPSLKSRVTISVDTSKNQFSLKLSSVTAADTAVYYCAREKYFHDKYFHDYYYYYMDVWGKGTTVTVSSGGGGSGGGGSGGGGSGGDIQMTQSPSSLSASVGDRVTITCRASQSISSYLNWYQQKPGKAPKLLIYAASSLQSGVPSRFSGSGSGTDFTLTISSLQPEDFATYYCQQSYSTPLTFGGGTKVEIK

SEQ ID NO: 378 - protein, 246 aa, synthetic construct
  REGION 1..246: note = C7-16
QVQLQESGPGLVKPSQTLSLTCTVSGGSISSGGYYWSWIRQPPGKGLEWIGYIYYSGSTYYNPSLKSRVTISVDTSKNQFSLKLSSVTAADTAVYYCARDTSVYYYYYMDVWGKGTTVTVSSGGGGSGGGGSGGGGSGGDIQMTQSPSSLSASVGDRVTITCRASQSISSYLNWYQQKPGKAPKLLIYAASSLQSGVPSRFSGSGSGTDFTLTISSLQPEDFATYYCQQSYSTPLTFGGGTKVEIK

SEQ ID NO: 379 - protein, 248 aa, synthetic construct
  REGION 1..248: note = C7-15
QVQLQESGPGLVKPSQTLSLTCTVSGGSISSGGYYWSWIRQPPGKGLEWIGYIYYSGSTYYNPSLKSRVTISVDTSKNQFSLKLSSVTAADTAVYYCAREKILPYYYYYYMDVWGKGTTVTVSSGGGGSGGGGSGGGGSGGDIQMTQSPSSLSASVGDRVTITCRASQSISSYLNWYQQKPGKAPKLLIYAASSLQSGVPSRFSGSGSGTDFTLTISSLQPEDFATYYCQQSYSTPLTFGGGTKVEIK

SEQ ID NO: 380 - protein, 257 aa, synthetic construct
  REGION 1..257: note = C7-14
EVQLVESGGGLVQPGGSLRLSCAASGFTFSSYSMNWVRQAPGKGLEWVSYISSSSSTIYYADSVKGRFTISRDNAKNSLYLQMNSLRAEDTAVYYCAIQWIYIYINPRGFIFLHDAFDIWGQGTMVTVSSGGGGSGGGGSGGGGSGGQSVLTQPPSASGTPGQRVTISCSGSSSNIGSNTVNWYQQLPGTAPKLLIYSNNQRPSGVPDRFSGSKSGTSASLAISGLQSEDEADYYCAAWDDSLNGWVFGGGTKLTVL

SEQ ID NO: 381 - protein, 248 aa, synthetic construct
  REGION 1..248: note = C7-13
QVQLQQSGPGLVKPSQTLSLTCAISGDSVSSNSAAWNWIRQSPSRGLEWLGRTYYRSKWYNDYAVSVKSRITINPDTSKNQFSLQLNSVTPEDTAVYYCAKEDVDFHHDAFDIWGQGTMVTVSSGGGGSGGGGSGGGGSGGDIQMTQSPSSLSASVGDRVTITCRASQSISSYLNWYQQKPGKAPKLLIYAASSLQSGVPSRFSGSGSGTDFTLTISSLQPEDFATYYCQQSYSTPLTFGGGTKVEIK

SEQ ID NO: 382 - protein, 253 aa, synthetic construct
  REGION 1..253: note = C7-12
QVQLQESGPGLVKPSQTLSLTCTVSGGSISSGGYYWSWIRQPPGKGLEWIGYIYYSGSTYYNPSLKSRVTISVDTSKNQFSLKLSSVTAADTAVYYCAREGVDKNTSTIYYYYYYMDVWGKGTTVTVSSGGGGSGGGGSGGGGSGGDIQMTQSPSSLSASVGDRVTITCRASQSISSYLNWYQQKPGKAPKLLIYAASSLQSGVPSRFSGSGSGTDFTLTISSLQPEDFATYYCQQSYSTPLTFGGGTKVEIK

SEQ ID NO: 383 - protein, 241 aa, synthetic construct
  REGION 1..241: note = C7-11
EVQLVESGGGLVQPGGSLRLSCAASGFTFSSYSMNWVRQAPGKGLEWVSYISSSSSTIYYADSVKGRFTISRDNAKNSLYLQMNSLRAEDTAVYYCARDRRGYFDLWGRGTLVTVSSGGGGSGGGGSGGGGSGGDIQMTQSPSSLSASVGDRVTITCRASQGISSWLAWYQQKPEKAPKSLIYAASSLQSGVPSRFSGSGSGTDFTLTISSLQPEDFATYYCQQYNSYPLTFGGGTKVEIK

SEQ ID NO: 384 - protein, 248 aa, synthetic construct
  REGION 1..248: note = C7-10
EVQLVQSGAEVKKPGATVKISCKVSGYTFTDYYMHWVQQAPGKGLEWMGLVDPEDGETIYAEKFQGRVTITADTSTDTAYMELSSLRSEDTAVYYCATGIHVDIRSMEDWFDPWGQGTLVTVSSGGGGSGGGGSGGGGSGGDIQMTQSPSSLSASVGDRVTITCRASQSISSYLNWYQQKPGKAPKLLIYAASSLQSGVPSRFSGSGSGTDFTLTISSLQPEDFATYYCQQSYSTPLTFGGGTKVEIK

SEQ ID NO: 385 - protein, 246 aa, synthetic construct
  REGION 1..246: note = C7-9
QVQLQESGPGLVKPSQTLSLTCTVSGGSISSGGYYWSWIRQPPGKGLEWIGYIYYSGSTYYNPSLKSRVTISVDTSKNQFSLKLSSVTAADTAVYYCARDIGTSYYYYMDVWGKGTTVTVSSGGGGSGGGGSGGGGSGGDIQMTQSPSSLSASVGDRVTITCRASQSISSYLNWYQQKPGKAPKLLIYAASSLQSGVPSRFSGSGSGTDFTLTISSLQPEDFATYYCQQSYSTPLTFGGGTKVEIK

SEQ ID NO: 386 - protein, 249 aa, synthetic construct
  REGION 1..249: note = C7-8
QVQLQESGPGLVKPSQTLSLTCTVSGGSISSGGYYWSWIRQPPGKGLEWIGYIYYSGSTYYNPSLKSRVTISVDTSKNQFSLKLSSVTAADTAVYYCAREVVEVFLYYYYYMDVWGKGTTVTVSSGGGGSGGGGSGGGGSGGDIQMTQSPSSLSASVGDRVTITCRASQSISSYLNWYQQKPGKAPKLLIYAASSLQSGVPSRFSGSGSGTDFTLTISSLQPEDFATYYCQQSYSTPLTFGGGTKVEIK

SEQ ID NO: 387 - protein, 246 aa, synthetic construct
  REGION 1..246: note = C7-7
QVQLQESGPGLVKPSQTLSLTCTVSGGSISSGGYYWSWIRQPPGKGLEWIGYIYYSGSTYYNPSLKSRVTISVDTSKNQFSLKLSSVTAADTAVYYCARDLYYYYYYYMDVWGKGTTVTVSSGGGGSGGGGSGGGGSGGDIQMTQSPSSLSASVGDRVTITCRASQSISSYLNWYQQKPGKAPKLLIYAASSLQSGVPSRFSGSGSGTDFTLTISSLQPEDFATYYCQQSYSTPLTFGGGTKVEIK

SEQ ID NO: 388 - protein, 256 aa, synthetic construct
  REGION 1..256: note = C7-6
QVQLQESGPGLVKPSQTLSLTCTVSGGSISSGGYYWSWIRQPPGKGLEWIGYIYYSGSTYYNPSLKSRVTISVDTSKNQFSLKLSSVTAADTAVYYCARESWKYFYPRGSIFIHYYYYMDVWGKGTTVTVSSGGGGSGGGGSGGGGSGGDIQMTQSPSSLSASVGDRVTITCRASQSISSYLNWYQQKPGKAPKLLIYAASSLQSGVPSRFSGSGSGTDFTLTISSLQPEDFATYYCQQSYSTPLTFGGGTKVEIK

SEQ ID NO: 389 - protein, 248 aa, synthetic construct
  REGION 1..248: note = C7-5
QVQLQESGPGLVKPSQTLSLTCTVSGGSISSGGYYWSWIRQPPGKGLEWIGYIYYSGSTYYNPSLKSRVTISVDTSKNQFSLKLSSVTAADTAVYYCARDRIVEVFYYYYMDVWGKGTTVTVSSGGGGSGGGGSGGGGSGGDIQMTQSPSSLSASVGDRVTITCRASQSISSYLNWYQQKPGKAPKLLIYAASSLQSGVPSRFSGSGSGTDFTLTISSLQPEDFATYYCQQSYSTPLTFGGGTKVEIK

SEQ ID NO: 390 - protein, 250 aa, synthetic construct
  REGION 1..250: note = C7-4
QVQLQESGPGLVKPSQTLSLTCTVSGGSISSGGYYWSWIRQPPGKGLEWIGYIYYSGSTYYNPSLKSRVTISVDTSKNQFSLKLSSVTAADTAVYYCAREKYFHDWLYYYYYMDVWGKGTTVTVSSGGGGSGGGGSGGGGSGGDIQMTQSPSSLSASVGDRVTITCRASQSISSYLNWYQQKPGKAPKLLIYAASSLQSGVPSRFSGSGSGTDFTLTISSLQPEDFATYYCQQSYSTPLTFGGGTKVEIK

SEQ ID NO: 391 - protein, 250 aa, synthetic construct
  REGION 1..250: note = C7-3
QVQLQESGPGLVKPSQTLSLTCTVSGGSISSGGYYWSWIRQPPGKGLEWIGYIYYSGSTYYNPSLKSRVTISVDTSKNQFSLKLSSVTAADTAVYYCARDLVDKNTSYYYYYMDVWGKGTTVTVSSGGGGSGGGGSGGGGSGGDIQMTQSPSSLSASVGDRVTITCRASQSISSYLNWYQQKPGKAPKLLIYAASSLQSGVPSRFSGSGSGTDFTLTISSLQPEDFATYYCQQSYSTPLTFGGGTKVEIK

SEQ ID NO: 392 - protein, 244 aa, synthetic construct
  REGION 1..244: note = C7-2
QVQLVQSGAEVKKPGASVKVSCKASGYTFTSYGISWVRQAPGQGLEWMGWISAYNGNTNYAQKLQGRVTMTTDTSTSTAYMELRSLRSDDTAVYYCARVQNEYFQHWGQGTLVTVSSGGGGSGGGGSGGGGSGGQSALTQPPSASGSPGQSVTISCTGTSSDVGGYNYVSWYQQHPGKAPKLMIYEVSKRPSGVPDRFSGSKSGNTASLTVSGLQAEDEADYYCSSYAGSNNWVFGGGTKLTVL

SEQ ID NO: 393 - protein, 239 aa, synthetic construct
  REGION 1..239: note = C7-1
QVQLVESGGGLVKPGGSLRLSCAASGFTFSDYYMSWIRQAPGKGLEWVSYISSSGSTIYYADSVKGRFTISRDNAKNSLYLQMNSLRAEDTAVYYCATANWFDPWGQGTLVTVSSGGGGSGGGGSGGGGSGGDIQMTQSPSSVSASVGDRVTITCRASQGISSWLAWYQQKPGKAPKLLIYAASSLQSGVPSRFSGSGSGTDFTLTISSLQPEDFATYYCQQANSFPLTFGGGTKVEIK

SEQ ID NO: 394 - protein, 244 aa, synthetic construct
  REGION 1..244: note = HLA-A*03 scFv 15
QVQLVQSGAEVKKPGASVKVSCKASGYTFTSYGISWVRQAPGQGLEWMGWISAYNGNTNYAQKLQGRVTMTTDTSTSTAYMELRSLRSDDTAVYYCARERVSQRGAFDIWGQGTMVTVSSGGGGSGGGGSGGGGSGGDIQMTQSPSSLSASVGDRVTITCRASQSISSYLNWYQQKPGKAPKLLIYAASSLQSGVPSRFSGSGSGTDFTLTISSLQPEDFATYYCQQSYSTPLTFGGGTKVEIK

SEQ ID NO: 395 - protein, 243 aa, synthetic construct
  REGION 1..243: note = HLA-A*03 scFv 16
EVQLVESGGGLVQPGGSLRLSCAASGFTFSSYSMNWVRQAPGKGLEWVSYISSSSSTIYYADSVKGRFTISRDNAKNSLYLQMNSLRAEDTAVYYCARGNPDKDPFDYWGQGTLVTVSSGGGGSGGGGSGGGGSGGDIQMTQSPSSLSASVGDRVTITCRASQSISSYLNWYQQKPGKAPKLLIYAASSLQSGVPSRFSGSGSGTDFTLTISSLQPEDFATYYCQQSYSTPLTFGGGTKVEIK

SEQ ID NO: 396 - protein, 245 aa, synthetic construct
  REGION 1..245: note = HLA-A*03 scFv 17
QVQLQESGPGLVKPSETLSLTCTVSGGSVSSGSYYWSWIRQPPGKGLEWIGYIYYSGSTNYNPSLKSRVTISVDTSKNQFSLKLSSVTAADTAVYYCARDFYCTNWYFDLWGRGTLVTVSSGGGGSGGGGSGGGGSGGDIQMTQSPSSLSASVGDRVTITCRASQSISSYLNWYQQKPGKAPKLLIYAASSLQSGVPSRFSGSGSGTDFTLTISSLQPEDFATYYCQQSYSTPLTFGGGTKVEIK

SEQ ID NO: 397 - protein, 244 aa, synthetic construct
  REGION 1..244: note = HLA-A*03 scFv 18
QVQLQESGPGLVKPSETLSLTCTVSGGSISSYYWSWIRQPPGKGLEWIGYIYYSGSTNYNPSLKSRVTISVDTSKNQFSLKLSSVTAADTAVYYCARESSSGSYWYFDLWGRGTLVTVSSGGGGSGGGGSGGGGSGGDIQMTQSPSSLSASVGDRVTITCRASQSISSYLNWYQQKPGKAPKLLIYAASSLQSGVPSRFSGSGSGTDFTLTISSLQPEDFATYYCQQSYSTPLTFGGGTKVEIK

SEQ ID NO: 398 - protein, 250 aa, synthetic construct
  REGION 1..250: note = HLA-A*03 scFv 19
EVQLVQSGAEVKKPGESLKISCKGSGYSFTSYWIGWVRQMPGKGLEWMGIIYPGDSDTRYSPSFQGQVTISADKSISTAYLQWSSLKASDTAMYYCARDSGYKYNLYYYYYYMDVWGKGTTVTVSSGGGGSGGGGSGGGGSGGDIQMTQSPSSLSASVGDRVTITCRASQSISSYLNWYQQKPGKAPKLLIYAASSLQSGVPSRFSGSGSGTDFTLTISSLQPEDFATYYCQQSYSTPLTFGGGTKVEIK

SEQ ID NO: 399 - protein, 249 aa, synthetic construct
  REGION 1..249: note = HLA-A*03 scFv 20
QVQLVQSGAEVKKPGASVKVSCKASGYTFTSYGISWVRQAPGQGLEWMGWISAYNGNTNYAQKLQGRVTMTTDTSTSTAYMELRSLRSDDTAVYYCARGGDLSHYYYYMDVWGKGTTVTVSSGGGGSGGGGSGGGGSGGQTVVTQEPSLTVSPGGTVTLTCASSTGAVTSGYYPNWFQQKPGQAPRALIYSTSNKHSWTPARFSGSLLGGKAALTLSGVQPEDEAEYYCLLYYGGAQWVFGGGTKLTVL

SEQ ID NO: 400 - protein, 246 aa, synthetic construct
  REGION 1..246: note = HLA-A*03 scFv 21
QVQLVQSGAEVKKPGASVKVSCKASGYTFTSYGISWVRQAPGQGLEWMGWISAYNGNTNYAQKLQGRVTMTTDTSTSTAYMELRSLRSDDTAVYYCARENRRYNSCYYFDYWGQGTLVTVSSGGGGSGGGGSGGGGSGGDIQMTQSPSSLSASVGDRVTITCRASQSISSYLNWYQQKPGKAPKLLIYAASSLQSGVPSRFSGSGSGTDFTLTISSLQPEDFATYYCQQSYSTPLTFGGGTKVEIK

SEQ ID NO: 401 - protein, 249 aa, synthetic construct
  REGION 1..249: note = HLA-A*03 scFv 22
QVQLVQSGAEVKKPGASVKVSCKASGYTFTSYGISWVRQAPGQGLEWMGWISAYNGNTNYAQKLQGRVTMTTDTSTSTAYMELRSLRSDDTAVYYCARGGDLSHYYYYLDVWGKGTTVTVSSGGGGSGGGGSGGGGSGGQTVVTQEPSLTVSPGGTVTLTCASSTGAVTSGYYPNWFQQKPGQAPRALIYSTSNKHSWTPARFSGSLLGGKAALTLSGVQPEDEAEYYCLLYYGGAQWVFGGGTKLTVL

SEQ ID NO: 402 - protein, 245 aa, synthetic construct
  REGION 1..245: note = HLA-A*03 scFv 23
EVQLVESGGGLVQPGGSLRLSCAASGFTVSSNYMSWVRQAPGKGLEWVSVIYSGGSTYYADSVKGRFTISRDNSKNTLYLQMNSLRAEDTAVYYCARATLLSLSYDAFDIWGQGTMVTVSSGGGGSGGGGSGGGGSGGDIQMTQSPSSLSASVGDRVTITCRASQSISSYLNWYQQKPGKAPKLLIYAASSLQSGVPSRFSGSGSGTDFTLTISSLQPEDFATYYCQQSYSTPLTFGGGTKVEIK

SEQ ID NO: 403 - protein, 248 aa, synthetic construct
  REGION 1..248: note = HLA-A*03 scFv 24
QVQLVQSGAEVKKPGASVKVSCKASGYTFTSYGISWVRQAPGQGLEWMGWISAYNGNTNYAQKLQGRVTMTTDTSTSTAYMELRSLRSDDTAVYYCARGGDLSHYYYMDVWGKGTTVTVSSGGGGSGGGGSGGGGSGGQTVVTQEPSLTVSPGGTVTLTCASSTGAVTSGYYPNWFQQKPGQAPRALIYSTSNKHSWTPARFSGSLLGGKAALTLSGVQPEDEAEYYCLLYYGGAQWVFGGGTKLTVL

SEQ ID NO: 404 - protein, 241 aa, synthetic construct
  REGION 1..241: note = HLA-A*03 scFv 25
EVQLVQSGAEVKKPGESLKISCKGSGYSFTSYWIGWVRQMPGKGLEWMGIIYPGDSDTRYSPSFQGQVTISADKSISTAYLQWSSLKASDTAMYYCARERDRWFDPWGQGTLVTVSSGGGGSGGGGSGGGGSGGDIQMTQSPSSLSASVGDRVTITCRASQSISSYLNWYQQKPGKAPKLLIYAASSLQSGVPSRFSGSGSGTDFTLTISSLQPEDFATYYCQQSYSTPLTFGGGTKVEIK

SEQ ID NO: 405 - protein, 247 aa, synthetic construct
  REGION 1..247: note = HLA-A*03 scFv 26
QVQLVQSGAEVKKPGASVKVSCKASGYTFTSYGISWVRQAPGQGLEWMGWISAYNGNTNYAQKLQGRVTMTTDTSTSTAYMELRSLRSDDTAVYYCARETPPSLGAFDIWGQGTMVTVSSGGGGSGGGGSGGGGSGGQSALTQPPSASGSPGQSVTISCTGTSSDVGGYNYVSWYQQHPGKAPKLMIYEVSKRPSGVPDRFSGSKSGNTASLTVSGLQAEDEADYYCSSYAGSNNWVFGGGTKLTVL

SEQ ID NO: 406 - protein, 251 aa, synthetic construct
  REGION 1..251: note = HLA-A*03 scFv 27
QLQLQESGPGLVKPSETLSLTCTVSGGSISSSSYYWGWIRQPPGKGLEWIGSIYYSGSTYYNPSLKSRVTISVDTSKNQFSLKLSSVTAADTAVYYCAREAYCLSDSYWYFDLWGRGTLVTVSSGGGGSGGGGSGGGGSGGQSVLTQPPSASGTPGQRVTISCSGSSSNIGSNTVNWYQQLPGTAPKLLIYSNNQRPSGVPDRFSGSKSGTSASLAISGLQSEDEADYYCAAWDDSLNGWVFGGGTKLTVL

SEQ ID NO: 407 - protein, 248 aa, synthetic construct
  REGION 1..248: note = HLA-A*03 scFv 28
QVQLQESGPGLVKPSQTLSLTCTVSGGSISSGGYYWSWIRQPPGKGLEWIGYIYYSGSTYYNPSLKSRVTISVDTSKNQFSLKLSSVTAADTAVYYCARESWKYFYPRGYMDVWGKGTTVTVSSGGGGSGGGGSGGGGSGGDIQMTQSPSSLSASVGDRVTITCRASQSISSYLNWYQQKPGKAPKLLIYAASSLQSGVPSRFSGSGSGTDFTLTISSLQPEDFATYYCQQSYSTPLTFGGGTKVEIK

SEQ ID NO: 408 - protein, 248 aa, synthetic construct
  REGION 1..248: note = A1-9
QVQLVQSGAEVKKPGASVKVSCKASGYTFTSYGISWVRQAPGQGLEWMGWISAYNGNTNYAQKLQGRVTMTTDTSTSTAYMELRSLRSDDTAVYYCARGGWTAWYYYMDVWGKGTTVTVSSGGGGSGGGGSGGGGSGGQTVVTQEPSLTVSPGGTVTLTCASSTGAVTSGYYPNWFQQKPGQAPRALIYSTSNKHSWTPARFSGSLLGGKAALTLSGVQPEDEAEYYCLLYYGGAQWVFGGGTKLTVL

SEQ ID NO: 409 - protein, 244 aa, synthetic construct
  REGION 1..244: note = A1-8
EVQLVESGGGLVQPGGSLRLSCAASGFTFSSYSMNWVRQAPGKGLEWVSYISSSSSTIYYADSVKGRFTISRDNAKNSLYLQMNSLRAEDTAVYYCARAKYYYMDVWGKGTTVTVSSGGGGSGGGGSGGGGSGGQSVLTQPPSASGTPGQRVTISCSGSSSNIGSNTVNWYQQLPGTAPKLLIYSNNQRPSGVPDRFSGSKSGTSASLAISGLQSEDEADYYCAAWDDSLNGWVFGGGTKLTVL

SEQ ID NO: 410 - protein, 248 aa, synthetic construct
  REGION 1..248: note = A1-7
QVQLQESGPGLVKPSQTLSLTCTVSGGSISSGGYYWSWIRQPPGKGLEWIGYIYYSGSTYYNPSLKSRVTISVDTSKNQFSLKLSSVTAADTAVYYCARDQVDKNTYYYYMDVWGKGTTVTVSSGGGGSGGGGSGGGGSGGDIQMTQSPSSLSASVGDRVTITCRASQSISSYLNWYQQKPGKAPKLLIYAASSLQSGVPSRFSGSGSGTDFTLTISSLQPEDFATYYCQQSYSTPLTFGGGTKVEIK

SEQ ID NO: 411 - protein, 243 aa, synthetic construct
  REGION 1..243: note = A1-6
QVQLVESGGGLVKPGGSLRLSCAASGFTFSDYYMSWIRQAPGKGLEWVSYISSSGSTIYYADSVKGRFTISRDNAKNSLYLQMNSLRAEDTAVYYCARACQLAEYFQHWGQGTLVTVSSGGGGSGGGGSGGGGSGGDIQMTQSPSSVSASVGDRVTITCRASQGISSWLAWYQQKPGKAPKLLIYAASSLQSGVPSRFSGSGSGTDFTLTISSLQPEDFATYYCQQANSFPLTFGGGTKVEIK

SEQ ID NO: 412 - protein, 248 aa, synthetic construct
  REGION 1..248: note = A1-5
QVQLQESGPGLVKPSQTLSLTCTVSGGSISSGGYYWSWIRQPPGKGLEWIGYIYYSGSTYYNPSLKSRVTISVDTSKNQFSLKLSSVTAADTAVYYCARDRVDKNTSYYYMDVWGKGTTVTVSSGGGGSGGGGSGGGGSGGDIQMTQSPSSLSASVGDRVTITCRASQSISSYLNWYQQKPGKAPKLLIYAASSLQSGVPSRFSGSGSGTDFTLTISSLQPEDFATYYCQQSYSTPLTFGGGTKVEIK

SEQ ID NO: 413 - protein, 245 aa, synthetic construct
  REGION 1..245: note = A1-4
QVQLQESGPGLVKPSDTLSLTCAVSGYSISSSNWWGWIRQPPGKGLEWIGYIYYSGSTYYNPSLKSRVTMSVDTSKNQFSLKLSSVTAVDTAVYYCARRVQLKLVHWFDPWGQGTLVTVSSGGGGSGGGGSGGGGSGGDIQMTQSPSSLSASVGDRVTITCRASQSISSYLNWYQQKPGKAPKLLIYAASSLQSGVPSRFSGSGSGTDFTLTISSLQPEDFATYYCQQSYSTPLTFGGGTKVEIK

SEQ ID NO: 414 - protein, 245 aa, synthetic construct
  REGION 1..245: note = A1-3
QVQLVQSGAEVKKPGASVKVSCKASGYTFTSYDINWVRQATGQGLEWMGWMNPNSGNTGYAQKFQGRVTMTRNTSISTAYMELSSLRSEDTAVYYCATYYDYVTVFYFQHWGQGTLVTVSSGGGGSGGGGSGGGGSGGDIQMTQSPSSLSASVGDRVTITCRASQSISSYLNWYQQKPGKAPKLLIYAASSLQSGVPSRFSGSGSGTDFTLTISSLQPEDFATYYCQQSYSTPLTFGGGTKVEIK

SEQ ID NO: 415 - protein, 245 aa, synthetic construct
  REGION 1..245: note = A1-2
QLQLQESGSGLVKPSQTLSLTCAVSGGSISSGGYSWSWIRQPPGKGLEWIGYIYHSGSTYYNPSLKSRVTISVDRSKNQFSLKLSSVTAADTAVYYCARESYPSFYAFDIWGQGTMVTVSSGGGGSGGGGSGGGGSGGDIQMTQSPSSLSASVGDRVTITCRASQSISSYLNWYQQKPGKAPKLLIYAASSLQSGVPSRFSGSGSGTDFTLTISSLQPEDFATYYCQQSYSTPLTFGGGTKVEIK

SEQ ID NO: 416 - protein, 249 aa, synthetic construct
  REGION 1..249: note = A1-1
QITLKESGPTLVKPTQTLTLTCTFSGFSLSTSGVGVGWIRQPPGKALEWLALIYWNDDKRYSPSLKSRLTITKDTSKNQVVLTMTNMDPVDTATYYCAHSNMWSYSLNDYYFDYWGQGTLVTVSSGGGGSGGGGSGGGGSGGDIQMTQSPSSLSASVGDRVTITCRASQSISSYLNWYQQKPGKAPKLLIYAASSLQSGVPSRFSGSGSGTDFTLTISSLQPEDFATYYCQQSYSTPLTFGGGTKVEIK

SEQ ID NO: 417 - protein, 11 aa, synthetic construct
  REGION 1..11: note = CDR-L1
RASQSISSYLN

SEQ ID NO: 418 - protein, 14 aa, synthetic construct
  REGION 1..14: note = CDR-L1
ASSTGAVTSGYYPN

SEQ ID NO: 419 - protein, 14 aa, synthetic construct
  REGION 1..14: note = CDR-L1
TGTSSDVGGYNYVS

SEQ ID NO: 420 - protein, 13 aa, synthetic construct
  REGION 1..13: note = CDR-L1
SGSSSNIGSNTVN

SEQ ID NO: 421 - protein, 11 aa, synthetic construct
  REGION 1..11: note = CDR-L1
RASENIYSNLA

SEQ ID NO: 422 - protein, 11 aa, synthetic construct
  REGION 1..11: note = CDR-L1
RASQGISSALA

SEQ ID NO: 423 - protein, 11 aa, synthetic construct
  REGION 1..11: note = CDR-L1
RASQGISSWLA

SEQ ID NO: 424 - protein, 7 aa, synthetic construct
  REGION 1..7: note = CDR-L2
AASSLQS

SEQ ID NO: 425 - protein, 7 aa, synthetic construct
  REGION 1..7: note = CDR-L2
STSNKHS

SEQ ID NO: 426 - protein, 7 aa, synthetic construct
  REGION 1..7: note = CDR-L2
EVSKRPS

SEQ ID NO: 427 - protein, 7 aa, synthetic construct
  REGION 1..7: note = CDR-L2
SNNQRPS

SEQ ID NO: 428 - protein, 7 aa, synthetic construct
  REGION 1..7: note = CDR-L2
AATYLPD

SEQ ID NO: 429 - protein, 7 aa, synthetic construct
  REGION 1..7: note = CDR-L2
DASSLES

SEQ ID NO: 430 - protein, 9 aa, synthetic construct
  REGION 1..9: note = CDR-L3
QQSYSTPLT

SEQ ID NO: 431 - protein, 10 aa, synthetic construct
  REGION 1..10: note = CDR-L3
LLYYGGAQWV

SEQ ID NO: 432 - protein, 10 aa, synthetic construct
  REGION 1..10: note = CDR-L3
SSYAGSNNWV

SEQ ID NO: 433 - protein, 11 aa, synthetic construct
  REGION 1..11: note = CDR-L3
AAWDDSLNGWV

SEQ ID NO: 434 - protein, 9 aa, synthetic construct
  REGION 1..9: note = CDR-L3
QHFWVTPYT

SEQ ID NO: 435 - protein, 9 aa, synthetic construct
  REGION 1..9: note = CDR-L3
QQFNSYPLT

SEQ ID NO: 436 - protein, 9 aa, synthetic construct
  REGION 1..9: note = CDR-L3
QQYNSYPLT

SEQ ID NO: 437 - protein, 9 aa, synthetic construct
  REGION 1..9: note = CDR-L3
QQANSFPLT

SEQ ID NO: 438 - protein, 5 aa, synthetic construct
  REGION 1..5: note = CDR-H1
SYGIS

SEQ ID NO: 439 - protein, 5 aa, synthetic construct
  REGION 1..5: note = CDR-H1
SYSMN

SEQ ID NO: 440 - protein, 7 aa, synthetic construct
  REGION 1..7: note = CDR-H1
SGSYYWS

SEQ ID NO: 441 - protein, 5 aa, synthetic construct
  REGION 1..5: note = CDR-H1
SYYWS

SEQ ID NO: 442 - protein, 5 aa, synthetic construct
  REGION 1..5: note = CDR-H1
SYWIG

SEQ ID NO: 443 - protein, 5 aa, synthetic construct
  REGION 1..5: note = CDR-H1
SNYMS

SEQ ID NO: 444 - protein, 7 aa, synthetic construct
  REGION 1..7: note = CDR-H1
SSSYYWG

SEQ ID NO: 445 - protein, 7 aa, synthetic construct
  REGION 1..7: note = CDR-H1
SGGYYWS

SEQ ID NO: 446 - protein, 6 aa, synthetic construct
  REGION 1..6: note = CDR-H1
SGYSWH

SEQ ID NO: 447 - protein, 7 aa, synthetic construct
  REGION 1..7: note = CDR-H1
TSGVGVG

SEQ ID NO: 448 - protein, 5 aa, synthetic construct
  REGION 1..5: note = CDR-H1
SYWMH

SEQ ID NO: 449 - protein, 5 aa, synthetic construct
  REGION 1..5: note = CDR-H1
SYDMH

SEQ ID NO: 450 - protein, 5 aa, synthetic construct
  REGION 1..5: note = CDR-H1
SYAMH

SEQ ID NO: 451 - protein, 5 aa, synthetic construct
  REGION 1..5: note = CDR-H1
SYAMS

SEQ ID NO: 452 - protein, 5 aa, synthetic construct
  REGION 1..5: note = CDR-H1
SYAMN

SEQ ID NO: 453 - protein, 5 aa, synthetic construct
  REGION 1..5: note = CDR-H1
DYYMS

SEQ ID NO: 454 - protein, 7 aa, synthetic construct
  REGION 1..7: note = CDR-H1
SNSAAWN

SEQ ID NO: 455 - protein, 5 aa, synthetic construct
  REGION 1..5: note = CDR-H1
DYYMH

SEQ ID NO: 456 - protein, 6 aa, synthetic construct
  REGION 1..6: note = CDR-H1
SSNWWG

SEQ ID NO: 457 - protein, 5 aa, synthetic construct
  REGION 1..5: note = CDR-H1
SYDIN

SEQ ID NO: 458 - protein, 7 aa, synthetic construct
  REGION 1..7: note = CDR-H1
SGGYSWS

SEQ ID NO: 459 - protein, 17 aa, synthetic construct
  REGION 1..17: note = CDR-H2
WISAYNGNTNYAQKLQG

SEQ ID NO: 460 - protein, 17 aa, synthetic construct
  REGION 1..17: note = CDR-H2
YISSSSSTIYYADSVKG

SEQ ID NO: 461 - protein, 16 aa, synthetic construct
  REGION 1..16: note = CDR-H2
YIYYSGSTNYNPSLKS

SEQ ID NO: 462 - protein, 17 aa, synthetic construct
  REGION 1..17: note = CDR-H2
IIYPGDSDTRYSPSFQG

SEQ ID NO: 463 - protein, 16 aa, synthetic construct
  REGION 1..16: note = CDR-H2
VIYSGGSTYYADSVKG

SEQ ID NO: 464 - protein, 16 aa, synthetic construct
  REGION 1..16: note = CDR-H2
SIYYSGSTYYNPSLKS

SEQ ID NO: 465 - protein, 16 aa, synthetic construct
  REGION 1..16: note = CDR-H2
YIYYSGSTYYNPSLKS

SEQ ID NO: 466 - protein, 16 aa, synthetic construct
  REGION 1..16: note = CDR-H2
YIHFSGSTHYHPSLKS

SEQ ID NO: 467 - protein, 16 aa, synthetic construct
  REGION 1..16: note = CDR-H2
LIYWNDDKRYSPSLKS

SEQ ID NO: 468 - protein, 17 aa, synthetic construct
  REGION 1..17: note = CDR-H2
RINSDGSSTSYADSVKG

SEQ ID NO: 469 - protein, 16 aa, synthetic construct
  REGION 1..16: note = CDR-H2
AIGTAGDTYYPGSVKG

SEQ ID NO: 470 - protein, 17 aa, synthetic construct
  REGION 1..17: note = CDR-H2
WINAGNGNTKYSQKFQG

SEQ ID NO: 471 - protein, 17 aa, synthetic construct
  REGION 1..17: note = CDR-H2
AISGSGGSTYYADSVKG

SEQ ID NO: 472 - protein, 17 aa, synthetic construct
  REGION 1..17: note = CDR-H2
WINTNTGNPTYAQGFTG

SEQ ID NO: 473 - protein, 17 aa, synthetic construct
  REGION 1..17: note = CDR-H2
YISSSGSTIYYADSVKG

SEQ ID NO: 474 - protein, 18 aa, synthetic construct
  REGION 1..18: note = CDR-H2
RTYYRSKWYNDYAVSVKS

SEQ ID NO: 475 - protein, 17 aa, synthetic construct
  REGION 1..17: note = CDR-H2
LVDPEDGETIYAEKFQG

SEQ ID NO: 476 - protein, 17 aa, synthetic construct
  REGION 1..17: note = CDR-H2
WMNPNSGNTGYAQKFQG

SEQ ID NO: 477 - protein, 16 aa, synthetic construct
  REGION 1..16: note = CDR-H2
YIYHSGSTYYNPSLKS

SEQ ID NO: 478 - protein, 11 aa, synthetic construct
  REGION 1..11: note = CDR-H3
ERVSQRGAFDI

SEQ ID NO: 479 - protein, 10 aa, synthetic construct
  REGION 1..10: note = CDR-H3
GNPDKDPFDY

SEQ ID NO: 480 - protein, 11 aa, synthetic construct
  REGION 1..11: note = CDR-H3
DFYCTNWYFDL

SEQ ID NO: 481 - protein, 12 aa, synthetic construct
  REGION 1..12: note = CDR-H3
ESSSGSYWYFDL

SEQ ID NO: 482 - protein, 17 aa, synthetic construct
  REGION 1..17: note = CDR-H3
DSGYKYNLYYYYYYMDV

SEQ ID NO: 483 - protein, 13 aa, synthetic construct
  REGION 1..13: note = CDR-H3
GGDLSHYYYYMDV

SEQ ID NO: 484 - protein, 13 aa, synthetic construct
  REGION 1..13: note = CDR-H3
ENRRYNSCYYFDY

SEQ ID NO: 485 - protein, 13 aa, synthetic construct
  REGION 1..13: note = CDR-H3
GGDLSHYYYYLDV

SEQ ID NO: 486 - protein, 13 aa, synthetic construct
  REGION 1..13: note = CDR-H3
ATLLSLSYDAFDI

SEQ ID NO: 487 - protein, 12 aa, synthetic construct
  REGION 1..12: note = CDR-H3
GGDLSHYYYMDV

SEQ ID NO: 488 - protein, 8 aa, synthetic construct
  REGION 1..8: note = CDR-H3
ERDRWFDP

SEQ ID NO: 489 - protein, 11 aa, synthetic construct
  REGION 1..11: note = CDR-H3
ETPPSLGAFDI

SEQ ID NO: 490 - protein, 14 aa, synthetic construct
  REGION 1..14: note = CDR-H3
EAYCLSDSYWYFDL

SEQ ID NO: 491 - protein, 14 aa, synthetic construct
  REGION 1..14: note = CDR-H3
ESWKYFYPRGYMDV

SEQ ID NO: 492 - protein, 11 aa, synthetic construct
  REGION 1..11: note = CDR-H3
GGVVSHYAMDC

SEQ ID NO: 493 - protein, 9 aa, synthetic construct
  REGION 1..9: note = CDR-H3
HYYYYYMDV

SEQ ID NO: 494 - protein, 9 aa, synthetic construct
  REGION 1..9: note = CDR-H3
KTTSFYFDY

SEQ ID NO: 495 - protein, 8 aa, synthetic construct
  REGION 1..8: note = CDR-H3
HYYYYMDV

SEQ ID NO: 496 - protein, 10 aa, synthetic construct
  REGION 1..10: note = CDR-H3
GVLLYNWFDP

SEQ ID NO: 497 - protein, 9 aa, synthetic construct
  REGION 1..9: note = CDR-H3
HYYYYYLDV

SEQ ID NO: 498 - protein, 11 aa, synthetic construct
  REGION 1..11: note = CDR-H3
DLPGSYWYFDL

SEQ ID NO: 499 - protein, 12 aa, synthetic construct
  REGION 1..12: note = CDR-H3
EGNGANPDAFDI

SEQ ID NO: 500 - protein, 10 aa, synthetic construct
  REGION 1..10: note = CDR-H3
RHMRLSCFDY

SEQ ID NO: 501 - protein, 9 aa, synthetic construct
  REGION 1..9: note = CDR-H3
HYYYYSMDV

SEQ ID NO: 502 - protein, 7 aa, synthetic construct
  REGION 1..7: note = CDR-H3
SFDWFDP

SEQ ID NO: 503 - protein, 14 aa, synthetic construct
  REGION 1..14: note = CDR-H3
ERSISPYYYYYMDV

SEQ ID NO: 504 - protein, 10 aa, synthetic construct
  REGION 1..10: note = CDR-H3
DSVIWYWFDP

SEQ ID NO: 505 - protein, 15 aa, synthetic construct
  REGION 1..15: note = CDR-H3
EEILPRLSYYYYMDV

SEQ ID NO: 506 - protein, 12 aa, synthetic construct
  REGION 1..12: note = CDR-H3
GGRAHSSWYFDL

SEQ ID NO: 507 - protein, 17 aa, synthetic construct
  REGION 1..17: note = CDR-H3
DRIKILPRLGYYYYMDV

SEQ ID NO: 508 - protein, 12 aa, synthetic construct
  REGION 1..12: note = CDR-H3
DTVIHYYYYMDV

SEQ ID NO: 509 - protein, 16 aa, synthetic construct
  REGION 1..16: note = CDR-H3
DVIVEVFLSYYYYMDV

SEQ ID NO: 510 - protein, 12 aa, synthetic construct
  REGION 1..12: note = CDR-H3
DIFIHYYYYMDV

SEQ ID NO: 511 - protein, 14 aa, synthetic construct
  REGION 1..14: note = CDR-H3
DGTFYSYSPYYFDY

SEQ ID NO: 512 - protein, 17 aa, synthetic construct
  REGION 1..17: note = CDR-H3
EWIKILPRLGYYYYMDV

SEQ ID NO: 513 - protein, 12 aa, synthetic construct
  REGION 1..12: note = CDR-H3
DRSLYYYYYMDV

SEQ ID NO: 514 - protein, 14 aa, synthetic construct
  REGION 1..14: note = CDR-H3
DKILAPNYYYYMDV

SEQ ID NO: 515 - protein, 16 aa, synthetic construct
  REGION 1..16: note = CDR-H3
EKSWKYFYYYYYYMDV

SEQ ID NO: 516 - protein, 15 aa, synthetic construct
  REGION 1..15: note = CDR-H3
ENTSTIPYYYYYMDV

SEQ ID NO: 517 - protein, 19 aa, synthetic construct
  REGION 1..19: note = CDR-H3
EDVDKNTSTIYYYYYYMDV

SEQ ID NO: 518 - protein, 17 aa, synthetic construct
  REGION 1..17: note = CDR-H3
DGGDIVSSSAIYWYFDL

SEQ ID NO: 519 - protein, 14 aa, synthetic construct
  REGION 1..14: note = CDR-H3
DLILPPYYYYYMDV

SEQ ID NO: 520 - protein, 19 aa, synthetic construct
  REGION 1..19: note = CDR-H3
ETWIKILPRYYYYYYYMDV

SEQ ID NO: 521 - protein, 12 aa, synthetic construct
  REGION 1..12: note = CDR-H3
DLSRYYYYYMDV

SEQ ID NO: 522 - protein, 9 aa, synthetic construct
  REGION 1..9: note = CDR-H3
EHIVLCFDY

SEQ ID NO: 523 - protein, 15 aa, synthetic construct
  REGION 1..15: note = CDR-H3
DKILPRPYYYYYMDV

SEQ ID NO: 524 - protein, 8 aa, synthetic construct
  REGION 1..8: note = CDR-H3
GSNEYFQH

SEQ ID NO: 525 - protein, 9 aa, synthetic construct
  REGION 1..9: note = CDR-H3
GTSYWYFDL

SEQ ID NO: 526 - protein, 14 aa, synthetic construct
  REGION 1..14: note = CDR-H3
EEIVEVFYYYYMDV

SEQ ID NO: 527 - protein, 8 aa, synthetic construct
  REGION 1..8: note = CDR-H3
VDDYYFDY

SEQ ID NO: 528 - protein, 14 aa, synthetic construct
  REGION 1..14: note = CDR-H3
STNILLSYTKAFDI

SEQ ID NO: 529 - protein, 12 aa, synthetic construct
  REGION 1..12: note = CDR-H3
DKTYYYYYYMDV

SEQ ID NO: 530 - protein, 19 aa, synthetic construct
  REGION 1..19: note = CDR-H3
EKYFHDKYFHDYYYYYMDV

SEQ ID NO: 531 - protein, 12 aa, synthetic construct
  REGION 1..12: note = CDR-H3
DTSVYYYYYMDV

SEQ ID NO: 532 - protein, 14 aa, synthetic construct
  REGION 1..14: note = CDR-H3
EKILPYYYYYYMDV

SEQ ID NO: 533 - protein, 21 aa, synthetic construct
  REGION 1..21: note = CDR-H3
QWIYIYINPRGFIFLHDAFDI

SEQ ID NO: 534 - protein, 12 aa, synthetic construct
  REGION 1..12: note = CDR-H3
EDVDFHHDAFDI

SEQ ID NO: 535 - protein, 19 aa, synthetic construct
  REGION 1..19: note = CDR-H3
EGVDKNTSTIYYYYYYMDV

SEQ ID NO: 536 - protein, 8 aa, synthetic construct
  REGION 1..8: note = CDR-H3
DRRGYFDL

SEQ ID NO: 537 - protein, 15 aa, synthetic construct
  REGION 1..15: note = CDR-H3
GIHVDIRSMEDWFDP

SEQ ID NO: 538 - protein, 12 aa, synthetic construct
  REGION 1..12: note = CDR-H3
DIGTSYYYYMDV

SEQ ID NO: 539 - protein, 15 aa, synthetic construct
  REGION 1..15: note = CDR-H3
EVVEVFLYYYYYMDV

SEQ ID NO: 540 - protein, 12 aa, synthetic construct
  REGION 1..12: note = CDR-H3
DLYYYYYYYMDV

SEQ ID NO: 541 - protein, 22 aa, synthetic construct
  REGION 1..22: note = CDR-H3
ESWKYFYPRGSIFIHYYYYMDV

SEQ ID NO: 542 - protein, 14 aa, synthetic construct
  REGION 1..14: note = CDR-H3
DRIVEVFYYYYMDV

SEQ ID NO: 543 - protein, 16 aa, synthetic construct
  REGION 1..16: note = CDR-H3
EKYFHDWLYYYYYMDV

SEQ ID NO: 544 - protein, 16 aa, synthetic construct
  REGION 1..16: note = CDR-H3
DLVDKNTSYYYYYMDV

SEQ ID NO: 545 - protein, 8 aa, synthetic construct
  REGION 1..8: note = CDR-H3
VQNEYFQH

SEQ ID NO: 546 - protein, 6 aa, synthetic construct
  REGION 1..6: note = CDR-H3
ANWFDP

SEQ ID NO: 547 - protein, 12 aa, synthetic construct
  REGION 1..12: note = CDR-H3
GGWTAWYYYMDV

SEQ ID NO: 548 - protein, 8 aa, synthetic construct
  REGION 1..8: note = CDR-H3
AKYYYMDV

SEQ ID NO: 549 - protein, 14 aa, synthetic construct
  REGION 1..14: note = CDR-H3
DQVDKNTYYYYMDV

SEQ ID NO: 550 - protein, 10 aa, synthetic construct
  REGION 1..10: note = CDR-H3
ACQLAEYFQH

SEQ ID NO: 551 - protein, 14 aa, synthetic construct
  REGION 1..14: note = CDR-H3
DRVDKNTSYYYMDV

SEQ ID NO: 552 - protein, 12 aa, synthetic construct
  REGION 1..12: note = CDR-H3
RVQLKLVHWFDP

SEQ ID NO: 553 - protein, 12 aa, synthetic construct
  REGION 1..12: note = CDR-H3
YYDYVTVFYFQH

SEQ ID NO: 554 - protein, 11 aa, synthetic construct
  REGION 1..11: note = CDR-H3
ESYPSFYAFDI

SEQ ID NO: 555 - protein, 15 aa, synthetic construct
  REGION 1..15: note = CDR-H3
SNMWSYSLNDYYFDY

SEQ ID NO: 556 - DNA, 3229 bp, synthetic construct
  misc_feature 1..3229: note = LIRB1 coding sequence
  source 1..3229: mol_type = other DNA
aaatgagttttaaaaaggcttgtccaggaagcacatatgggagctggtcactctgcattttgggccctcctggaggtgtttagaccttccgagagagaaactgagacacatgagagggaagaaatgactcagtggtgagaccctgtggagtcccacccacaaccagcacactgtgacccactgcacaaacctctagcccacagctcacttcctcctttaagaagagaagagaaaagaggagaggagaggaggaacagaaaagaaaagaaaagaaaaagtgggaaacaaataatctaagaatgaggagaaagcaagaagagtgacccccttgtgggcactccattggttttatggcgcctctactttctggagtttgtgtaaaacaaaaatattatggtctttgtgcacatttacatcaagctcagcctgggcggcacagccagatgcgagatgcgtctctgctgatctgagtctgcctgcagcatggacctgggtcttccctgaagcatctccagggctggagggacgactgccatgcaccgagggctcatccatccacagagcagggcagtgggaggagacgccatgacccccatcctcacggtcctgatctgtctcgggctgagtctgggcccccggacccacgtgcaggcagggcacctccccaagcccaccctctgggctgaaccaggctctgtgatcacccaggggagtcctgtgaccctcaggtgtcaggggggccaggagacccaggagtaccgtctatatagagaaaagaaaacagcaccctggattacacggatcccacaggagcttgtgaagaagggccagttccccatcccatccatcacctgggaacacacagggcggtatcgctgttactatggtagcgacactgcaggccgctcagagagcagtgaccccctggagctggtggtgacaggagcctacatcaaacccaccctctcagcccagcccagccccgtggtgaactcaggagggaatgtaaccctccagtgtgactcacaggtggcatttgatggcttcattctgtgtaaggaaggagaagatgaacacccacaatgcctgaactcccagccccatgcccgtgggtcgtcccgcgccatcttctccgtgggccccgtgagcccgagtcgcaggtggtggtacaggtgctatgcttatgactcgaactctccctatgagtggtctctacccagtgatctcctggagctcctggtcctaggtgtttctaagaagccatcactctcagtgcagccaggtcctatcgtggcccctgaggagaccctgactctgcagtgtggctctgatgctggctacaacagatttgttctgtataaggacggggaacgtgacttccttcagctcgctggcgcacagccccaggctgggctctcccaggccaacttcaccctgggccctgtgagccgctcctacgggggccagtacagatgctacggtgcacacaacctctcctccgagtggtcggcccccagcgaccccctggacatcctgatcgcaggacagttctatgacagagtctccctctcggtgcagccgggccccacggtggcctcaggagagaacgtgaccctgctgtgtcagtcacagggatggatgcaaactttccttctgaccaaggagggggcagctgatgacccatggcgtctaagatcaacgtaccaatctcaaaaataccaggctgaattccccatgggtcctgtgacctcagcccatgcggggacctacaggtgctacggctcacagagctccaaaccctacctgctgactcaccccagtgaccccctggagctcgtggtctcaggaccgtctgggggccccagctccccgacaacaggccccacctccacatctggccctgaggaccagcccctcacccccaccgggtcggatccccagagtggtctgggaaggcacctgggggttgtgatcggcatcttggtggccgtcatcctactgctcctcctcctcctcctcctcttcctcatcctccgacatcgacgtcagggcaaacactggacatcgacccagagaaaggctgatttccaacatcctgcaggggctgtggggccagagcccacagacagaggcctgcagtggaggtccagcccagctgccgatgcccaggaagaaaacctctatgctgccgtgaagcacacacagcctgaggatggggtggagatggacactcggagcccacacgatgaagacccccaggcagtgacgtatgccgaggtgaaacactccagacctaggagagaaatggcctctcctccttccccactgtctggggaattcctggacacaaaggacagacaggcggaagaggacaggcagatggacactgaggctgctgcatctgaagccccccaggatgtgacctacgcccagctgcacagcttgaccctcagacgggaggcaactgagcctcctccatcccaggaagggccctctccagctgtgcccagcatctacgccactctggccatccactagcccagggggggacgcagaccccacactccatggagtctggaatgcatgggagctgcccccccagtggacaccattggaccccacccagcctggatctaccccaggagactctgggaacttttaggggtcactcaattctgcagtataaataactaatgtctctacaattttgaaataaagcaacagacttctcaataatcaatgaagtagctgagaaaactaagtcagaaagtgcattaaactgaatcacaatgtaaatattacacatcaagcgatgaaactggaaaactacaagccacgaatgaatgaattaggaaagaaaaaaagtaggaaatgaatgatcttggctttcctataagaaatttagggcagggcacggtggctcacgcctgtaattccagcactttgggaggccgaggcgggcagatcacgagttcaggagatcgagaccatcttggccaacatggtgaaaccctgtctctcctaaaaatacaaaaattagctggatgtggtggcagtgcctgtaatcccagctatttgggaggctgaggcaggagaatcgcttgaaccagggagtcagaggtttcagtgagccaagatcgcaccactgctctccagcctggcgacagagggagactccatctcaaattaaaaaaaaaaaaaaaaaagaaagaaaaaaaaaaaaaaaaaa

SEQ ID NO: 557 - protein, 21 aa, synthetic construct
  REGION 1..21: note = T2A self-cleaving peptide
GSGEGRGSLLTCGDVEENPGP

SEQ ID NO: 558 - DNA, 63 bp, synthetic construct
  misc_feature 1..63: note = T2A self-cleaving peptide
  source 1..63: mol_type = other DNA
ggatccggagagggcagaggcagcctgctgacatgtggcgacgtggaagagaaccctggcccc

SEQ ID NO: 559 - DNA, 369 bp, synthetic construct
  misc_feature 1..369: note = CT292 VH
  source 1..369: mol_type = other DNA
gaggttcagctggtggagtctggcggtggcctggtgcagccagggggctcactccgtttgtcctgtgcagcttctggcttcaacattaaagacacctatatacactgggtgcgtcaggccccgggtaagggcctggaatgggttgcaaggatttatcctacgaatggttatactagatatgccgatagcgtcaagggccgtttcactataagcgcagacacatccaaaaacacagcctacctgcagatgaacagcctgcgtgctgaggacactgccgtctattattgttctagatggggaggggacggcttctatgctatggacgtgtggggtcaaggaaccctggtcaccgtttcctcggcggccgca

SEQ ID NO: 560 - DNA, 327 bp, synthetic construct
  misc_feature 1..327: note = CT292 VL
  source 1..327: mol_type = other DNA
gatatccagatgacccagtccccgagctccctgtccgcctctgtgggcgatagggtcaccatcacctgccgtgccagtcaggatgtgaatactgctgtagcctggtatcaacagaaaccaggaaaagctccgaaactactgatttactcggcatccttcctttattctggagtcccttctcgcttctctggatctagatctgggacggatttcactctgaccatcagcagtctgcagccggaagacttcgcaacttattactgtcagcaacattatactactcctcccacgttcggacagggtaccaaggtggagatcaaacgcact

SEQ ID NO: 561 - protein, 28 aa, synthetic construct
  REGION 1..28: note = CD TM domain
IYIWAPLAGTCGVLLLSLVITLYCNHRN

SEQ ID NO: 562 - DNA, 84 bp, synthetic construct
  misc_feature 1..84: note = CD TM domain
  source 1..84: mol_type = other DNA
atctacatctgggcgcccttggccgggacttgtggggtccttctcctgtcactggttatcaccctttactgcaaccacaggaac

SEQ ID NO: 563 - protein, 15 aa, synthetic construct
  REGION 1..15: note = Linker
GSTSGSGKPGSGEGS

SEQ ID NO: 564 - DNA, 45 bp, synthetic construct
  misc_feature 1..45: note = Linker
  source 1..45: mol_type = other DNA
gggtctacatctggatctgggaagccgggttctggtgagggttct

SEQ ID NO: 565 - protein, 7 aa, synthetic construct
  REGION 1..7: note = CDR L2
KVSNRFS

SEQ ID NO: 566 - protein, 5 aa, synthetic construct
  REGION 1..5: note = CDR H1
SYHIH

SEQ ID NO: 567 - protein, 17 aa, synthetic construct
  REGION 1..17: note = CDR H2
WIYPGNVNTEYNEKFKG

SEQ ID NO: 568 - DNA, 189 bp, synthetic construct
  misc_feature 1..189: note = LILRB1 hinge domain
  source 1..189: mol_type = other DNA
tacggctcacagagctccaaaccctacctgctgactcaccctagtgatcctctggagctcgtggtctcaggaccgtctggaggcccaagctctccgacaacaggccccacctccacatctggccctgaggaccagcccctcacacccaccgggtcggatcctcagagtggtctgggaagacacctggga

SEQ ID NO: 569 - DNA, 69 bp, synthetic construct
  misc_feature 1..69: note = LILRB1 transmembrane domain
  source 1..69: mol_type = other DNA
gttgtgatcggcatcttggtggccgtcatcctactgctcctcctcctgctcctgctcttcctcatcctc

SEQ ID NO: 570 - DNA, 501 bp, synthetic construct
  misc_feature 1..501: note = LILRB1 intracellular domain
  source 1..501: mol_type = other DNA
cgacatcgacgtcagggcaaacactggacatcgacccagagaaaggctgatttccaacatcctgcaggggctgtggggccagagcccacagacagaggcctgcagtggaggtccagcccagctgccgatgcccaggaagaaaacctctatgctgccgtgaagcacacacagcctgaggatggggtggagatggatactcggagcccacacgatgaagatccacaggcagtgacgtatgccgaggtgaaacactccagacctagaagggaaatggcctctcctccttccccactgtctggagagttcctggacacaaaggacagacaggcggaagaggacaggcagatggacactgaggctgctgcatctgaagctcctcaggatgtgacctacgcccagctgcacagcttgaccctcagacgggaggcaactgagcctcctccatcccaggaagggccctctccagctgtgcccagcatctacgccactctggccatccac

SEQ ID NO: 571 - RNA, 943 nt, Homo sapiens
  source 1..943: mol_type = unassigned RNA
attcctgaagctgacagcattcgggccgagatgtctcgctccgtggccttagctgtgctcgcgctactctctctttctggcctggaggctatccagcgtactccaaagattcaggtttactcacgtcatccagcagagaatggaaagtcaaatttcctgaattgctatgtgtctgggtttcatccatccgacattgaagttgacttactgaagaatggagagagaattgaaaaagtggagcattcagacttgtctttcagcaaggactggtctttctatctcttgtactacactgaattcacccccactgaaaaagatgagtatgcctgccgtgtgaaccatgtgactttgtcacagcccaagatagttaagtgggatcgagacatgtaagcagcatcatggaggtttgaagatgccgcatttggattggatgaattccaaattctgcttgcttgctttttaatattgatatgcttatacacttacactttatgcacaaaatgtagggttataataatgttaacatggacatgatcttctttataattctactttgagtgctgtctccatgtttgatgtatctgagcaggttgctccacaggtagctctaggagggctggcaacttagaggtggggagcagagaattctcttatccaacatcaacatcttggtcagatttgaactcttcaatctcttgcactcaaagcttgttaagatagttaagcgtgcataagttaacttccaatttacatactctgcttagaatttgggggaaaatttagaaatataattgacaggattattggaaatttgttataatgaatgaaacattttgtcatataagattcatatttacttcttatacatttgataaagtaaggcatggttgtggttaatctggtttatttttgttccacaagttaaataaatcataaaacttga

SEQ ID NO: 572 - DNA, 6654 bp, Homo sapiens
  source 1..6654: mol_type = unassigned DNA
aagtggaggcgtcgcgctggcgggcattcctgaagctgacagcattcgggccgagatgtctcgctccgtggccttagctgtgctcgcgctactctctctttctggcctggaggctatccagcgtgagtctctcctaccctcccgctctggtccttcctctcccgctctgcaccctctgtggccctcgctgtgctctctcgctccgtgacttcccttctccaagttctccttggtggcccgccgtggggctagtccagggctggatctcggggaagcggcggggtggcctgggagtggggaagggggtgcgcacccgggacgcgcgctacttgcccctttcggcggggagcaggggagacctttggcctacggcgacgggagggtcgggacaaagtttagggcgtcgataagcgtcagagcgccgaggttgggggagggtttctcttccgctctttcgcggggcctctggctcccccagcgcagctggagtgggggacgggtaggctcgtcccaaaggcgcggcgctgaggtttgtgaacgcgtggaggggcgcttggggtctgggggaggcgtcgcccgggtaagcctgtctgctgcggctctgcttcccttagactggagagctgtggacttcgtctaggcgcccgctaagttcgcatgtcctagcacctctgggtctatgtggggccacaccgtggggaggaaacagcacgcgacgtttgtagaatgcttggctgtgatacaaagcggtttcgaataattaacttatttgttcccatcacatgtcacttttaaaaaattataagaactacccgttattgacatctttctgtgtgccaaggactttatgtgctttgcgtcatttaattttgaaaacagttatcttccgccatagataactactatggttatcttctgcctctcacagatgaagaaactaaggcaccgagattttaagaaacttaattacacaggggataaatggcagcaatcgagattgaagtcaagcctaaccagggcttttgcgggagcgcatgccttttggctgtaattcgtgcatttttttttaagaaaaacgcctgccttctgcgtgagattctccagagcaaactgggcggcatgggccctgtggtcttttcgtacagagggcttcctctttggctctttgcctggttgtttccaagatgtactgtgcctcttactttcggttttgaaaacatgagggggttgggcgtggtagcttacgcctgtaatcccagcacttagggaggccgaggcgggaggatggcttgaggtccgtagttgagaccagcctggccaacatggtgaagcctggtctctacaaaaaataataacaaaaattagccgggtgtggtggctcgtgcctgtggtcccagctgctccggtggctgaggcgggaggatctcttgagcttaggcttttgagctatcatggcgccagtgcactccagcgtgggcaacagagcgagaccctgtctctcaaaaaagaaaaaaaaaaaaaaagaaagagaaaagaaaagaaagaaagaagtgaaggtttgtcagtcaggggagctgtaaaaccattaataaagataatccaagatggttaccaagactgttgaggacgccagagatcttgagcactttctaagtacctggcaatacactaagcgcgctcaccttttcctctggcaaaacatgatcgaaagcagaatgttttgatcatgagaaaattgcatttaatttgaatacaatttatttacaacataaaggataatgtatatatcaccaccattactggtatttgctggttatgttagatgtcattttaaaaaataacaatctgatatttaaaaaaaaatcttattttgaaaatttccaaagtaatacatgccatgcatagaccatttctggaagataccacaagaaacatgtaatgatgattgcctctgaaggtctattttcctcctctgacctgtgtgtgggttttgtttttgttttactgtgggcataaattaatttttcagttaagttttggaagcttaaataactctccaaaagtcataaagccagtaactggttgagcccaaattcaaacccagcctgtctgatacttgtcctcttcttagaaaagattacagtgatgctctcacaaaatcttgccgccttccctcaaacagagagttccaggcaggatgaatctgtgctctgatccctgaggcatttaatatgttcttattattagaagctcagatgcaaagagctctcttagcttttaatgttatgaaaaaaatcaggtcttcattagattccccaatccacctcttgatggggctagtagcctttccttaatgatagggtgtttctagagagatatatctggtcaaggtggcctggtactcctccttctccccacagcctcccagacaaggaggagtagctgccttttagtgatcatgtaccctgaatataagtgtatttaaaagaattttatacacatatatttagtgtcaatctgtatatttagtagcactaacacttctcttcattttcaatgaaaaatatagagtttataatattttcttcccacttccccatggatggtctagtcatgcctctcattttggaaagtactgtttctgaaacattaggcaatatattcccaacctggctagtttacagcaatcacctgtggatgctaattaaaacgcaaatcccactgtcacatgcattactccatttgatcataatggaaagtatgttctgtcccatttgccatagtcctcacctatccctgttgtattttatcgggtccaactcaaccatttaaggtatttgccagctcttgtatgcatttaggttttgtttctttgttttttagctcatgaaattaggtacaaagtcagagaggggtctggcatataaaacctcagcagaaataaagaggttttgttgtttggtaagaacataccttgggttggttgggcacggtggctcgtgcctgtaatcccaacactttgggaggccaaggcaggctgatcacttgaagttgggagttcaagaccagcctggccaacatggtgaaatcccgtctctactgaaaatacaaaaattaaccaggcatggtggtgtgtgcctgtagtcccaggaatcacttgaacccaggaggcggaggttgcagtgagctgagatctcaccactgcacactgcactccagcctgggcaatggaatgagattccatcccaaaaaataaaaaaataaaaaaataaagaacataccttgggttgatccacttaggaacctcagataataacatctgccacgtatagagcaattgctatgtcccaggcactctactagacacttcatacagtttagaaaatcagatgggtgtagatcaaggcaggagcaggaaccaaaaagaaaggcataaacataagaaaaaaaatggaaggggtggaaacagagtacaataacatgagtaatttgatgggggctattatgaactgagaaatgaactttgaaaagtatcttggggccaaatcatgtagactcttgagtgatgtgttaaggaatgctatgagtgctgagagggcatcagaagtccttgagagcctccagagaaaggctcttaaaaatgcagcgcaatctccagtgacagaagatactgctagaaatctgctagaaaaaaaacaaaaaaggcatgtatagaggaattatgagggaaagataccaagtcacggtttattcttcaaaatggaggtggcttgttgggaaggtggaagctcatttggccagagtggaaatggaattgggagaaatcgatgaccaaatgtaaacacttggtgcctgatatagcttgacaccaagttagccccaagtgaaataccctggcaatattaatgtgtcttttcccgatattcctcaggtactccaaagattcaggtttactcacgtcatccagcagagaatggaaagtcaaatttcctgaattgctatgtgtctgggtttcatccatccgacattgaagttgacttactgaagaatggagagagaattgaaaaagtggagcattcagacttgtctttcagcaaggactggtctttctatctcttgtactacactgaattcacccccactgaaaaagatgagtatgcctgccgtgtgaaccatgtgactttgtcacagcccaagatagttaagtggggtaagtcttacattcttttgtaagctgctgaaagttgtgtatgagtagtcatatcataaagctgctttgatataaaaaaggtctatggccatactaccctgaatgagtcccatcccatctgatataaacaatctgcatattgggattgtcagggaatgttcttaaagatcagattagtggcacctgctgagatactgatgcacagcatggtttctgaaccagtagtttccctgcagttgagcagggagcagcagcagcacttgcacaaatacatatacactcttaacacttcttacctactggcttcctctagcttttgtggcagcttcaggtatatttagcactgaacgaacatctcaagaaggtataggcctttgtttgtaagtcctgctgtcctagcatcctataatcctggacttctccagtactttctggctggattggtatctgaggctagtaggaagggcttgttcctgctgggtagctctaaacaatgtattcatgggtaggaacagcagcctattctgccagccttatttctaaccattttagacatttgttagtacatggtattttaaaagtaaaacttaatgtcttccttttttttctccactgtctttttcatagatcgagacatgtaagcagcatcatggaggtaagtttttgaccttgagaaaatgtttttgtttcactgtcctgaggactatttatagacagctctaacatgataaccctcactatgtggagaacattgacagagtaacattttagcagggaaagaagaatcctacagggtcatgttcccttctcctgtggagtggcatgaagaaggtgtatggccccaggtatggccatattactgaccctctacagagagggcaaaggaactgccagtatggtattgcaggataaaggcaggtggttacccacattacctgcaaggctttgatctttcttctgccatttccacattggacatctctgctgaggagagaaaatgaaccactcttttcctttgtataatgttgttttattcttcagacagaagagaggagttatacagctctgcagacatcccattcctgtatggggactgtgtttgcctcttagaggttcccaggccactagaggagataaagggaaacagattgttataacttgatataatgatactataatagatgtaactacaaggagctccagaagcaagagagagggaggaacttggacttctctgcatctttagttggagtccaaaggcttttcaatgaaattctactgcccagggtacattgatgctgaaaccccattcaaatctcctgttatattctagaacagggaattgatttgggagagcatcaggaaggtggatgatctgcccagtcacactgttagtaaattgtagagccaggacctgaactctaatatagtcatgtgttacttaatgacggggacatgttctgagaaatgcttacacaaacctaggtgttgtagcctactacacgcataggctacatggtatagcctattgctcctagactacaaacctgtacagcctgttactgtactgaatactgtgggcagttgtaacacaatggtaagtatttgtgtatctaaacatagaagttgcagtaaaaatatgctattttaatcttatgagaccactgtcatatatacagtccatcattgaccaaaacatcatatcagcattttttcttctaagattttgggagcaccaaagggatacactaacaggatatactctttataatgggtttggagaactgtctgcagctacttcttttaaaaaggtgatctacacagtagaaattagacaagtttggtaatgagatctgcaatccaaataaaataaattcattgctaacctttttcttttcttttcaggtttgaagatgccgcatttggattggatgaattccaaattctgcttgcttgctttttaatattgatatgcttatacacttacactttatgcacaaaatgtagggttataataatgttaacatggacatgatcttctttataattctactttgagtgctgtctccatgtttgatgtatctgagcaggttgctccacaggtagctctaggagggctggcaacttagaggtggggagcagagaattctcttatccaacatcaacatcttggtcagatttgaactcttcaatctcttgcactcaaagcttgttaagatagttaagcgtgcataagttaacttccaatttacatactctgcttagaatttgggggaaaatttagaaatataattgacaggattattggaaatttgttataatgaatgaaacattttgtcatataagattcatatttacttcttatacatttgataaagtaaggcatggttgtggttaatctggtttatttttgttccacaagttaaataaatcataaaacttga

SEQ ID NO: 573 - DNA, 1698 bp, synthetic construct
  misc_feature 1..1698: note = HLA-A*02:01:01:01 sequence encoding mRNA
  source 1..1698: mol_type = other DNA
cagaagcagaggggtcagggcgaagtcccagggccccaggcgtggctctcagggtctcaggccccgaaggcggtgtatggattggggagtcccagccttggggattccccaactccgcagtttcttttctccctctcccaacctatgtagggtccttcttcctggatactcacgacgcggacccagttctcactcccattgggtgtcgggtttccagagaagccaatcagtgtcgtcgcggtcgcggttctaaagtccgcacgcacccaccgggactcagattctccccagacgccgaggatggccgtcatggcgccccgaaccctcgtcctgctactctcgggggctctggccctgacccagacctgggcgggctctcactccatgaggtatttcttcacatccgtgtcccggcccggccgcggggagccccgcttcatcgcagtgggctacgtggacgacacgcagttcgtgcggttcgacagcgacgccgcgagccagaggatggagccgcgggcgccgtggatagagcaggagggtccggagtattgggacggggagacacggaaagtgaaggcccactcacagactcaccgagtggacctggggaccctgcgcggctactacaaccagagcgaggccggttctcacaccgtccagaggatgtatggctgcgacgtggggtcggactggcgcttcctccgcgggtaccaccagtacgcctacgacggcaaggattacatcgccctgaaagaggacctgcgctcttggaccgcggcggacatggcagctcagaccaccaagcacaagtgggaggcggcccatgtggcggagcagttgagagcctacctggagggcacgtgcgtggagtggctccgcagatacctggagaacgggaaggagacgctgcagcgcacggacgcccccaaaacgcatatgactcaccacgctgtctctgaccatgaagccaccctgaggtgctgggccctgagcttctaccctgcggagatcacactgacctggcagcgggatggggaggaccagacccaggacacggagctcgtggagaccaggcctgcaggggatggaaccttccagaagtgggcggctgtggtggtgccttctggacaggagcagagatacacctgccatgtgcagcatgagggtttgcccaagcccctcaccctgagatgggagccgtcttcccagcccaccatccccatcgtgggcatcattgctggcctggttctctttggagctgtgatcactggagctgtggtcgctgctgtgatgtggaggaggaagagctcagatagaaaaggagggagctactctcaggctgcaagcagtgacagtgcccagggctctgatgtgtctctcacagcttgtaaagtgtgagacagctgccttgtgtgggactgagaggcaagagttgttcctgcccttccctttgtgacttgaagaaccctgactttgtttctgcaaaggcacctgcatgtgtctgtgttcgtgtaggcataatgtgaggaggtggggagaccaccccacccccatgtccaccatgaccctcttcccacgctgacctgtgctccctccccaatcatctttcctgttccagagaggtggggctgaggtgtctccatctctgtctcaacttcatggtgcactgagctgtaacttcttccttccctattaaaa

SEQ ID NO: 574 - DNA, 3217 bp, synthetic construct
  misc_feature 1..3217: note = HLA-A*02 (GenBank: LK021978.1)
  source 1..3217: mol_type = other DNA
atggccgtcatggcgccccgaaccctcgtcctgctactctcgggggctctggccctgacccagacctgggcgggtgagtgcggggtcgggagggaaacggcctctgtggggagaagcaacgggcccgcctggcgggggcgcaggacccgggaagccgcgccgggaggagggtcgggcgggtctcagccactcctcgtccccaggctctcactccatgaggtatttcttcacatccgtgtcccggcccggccgcggggagccccgcttcatcgcagtgggctacgtggacgacacgcagttcgtgcggttcgacagcgacgccgcgagccagaggatggagccgcgggcgccgtggatagagcaggagggtccggagtattgggacggggagacacggaaagtgaaggcccactcacagactcaccgagtggacctggggaccctgcgcggctactacaaccagagcgaggccggtgagtgaccccggcccggggcgcaggtcacgacctctcatcccccacggacgggccaggtcgcccacagtctccgggtccgagatccgccccgaagccgcgggaccccgagacccttgccccgggagaggcccaggcgcctttacccggtttcattttcagtttaggccaaaaatccccccaggttggtcggggcggggcggggctcgggggaccgggctgaccgcggggtccgggccaggttctcacaccgtccagaggatgtatggctgcgacgtggggtcggactggcgcttcctccgcgggtaccaccagtacgcctacgacggcaaggattacatcgccctgaaagaggacctgcgctctttgaccgcggcggacatggcagctcagaccaccaagcacaagtgggaggcggcccatgtggcggagcagttgagagcctacctggagggcacgtgcgtggagtggctccgcagatacctggagaacgggaaggagacgctgcagcgcacgggtaccaggggccacggggcgcctccctgatcgcctgtagatctcccgggctggcctcccacaaggaggggagacaattgggaccaacactagaatatcgccctccctctggtcctgagggagaggaatcctcctgggtttccagatcctgtaccagagagtgactctgaggttccgccctgctctctgacacaattaagggataaaatctctgaaggaatgacgggaagacgatccctcgaatactgatgagtggttccctttgacacacacaggcagcagccttgggcccgtgacttttcctctcaggccttgttctctgcttcacactcaatgtgtgtgggggtctgagtccagcacttctgagtccttcagcctccactcaggtcaggaccagaagtcgctgttccctcttcagggactagaattttccacggaataggagattatcccaggtgcctgtgtccaggctggtgtctgggttctgtgctcccttccccatcccaggtgtcctgtccattctcaagatagccacatgtgtgctggaggagtgtcccatgacagatgcaaaatgcctgaatgatctgactcttcctgacagacgcccccaaaacgcatatgactcaccacgctgtctctgaccatgaagccaccctgaggtgctgggccctgagcttctaccctgcggagatcacactgacctggcagcgggatggggaggaccagacccaggacacggagctcgtggagaccaggcctgcaggggatggaaccttccagaagtgggcggctgtggtggtgccttctggacaggagcagagatacacctgccatgtgcagcatgagggtttgcccaagcccctcaccctgagatggggtaaggagggagacgggggtgtcatgtcttttagggaaagcaggagcctctctgacctttagcagggtcagggcccctcaccttcccctcttttcccagagccgtcttcccagcccaccatccccatcgtgggcatcattgctggcctggttctctttggagctgtgatcactggagctgtggtcgctgctgtgatgtggaggaggaagagctcaggtggggaaggggtgaagggtgggtctgagatttcttgtctcactgagggttccaagacccaggtagaagtgtgccctgcctcgttactgggaagcaccacccacaattatgggcctacccagcctgggccctgtgtgccagcacttactcttttgtaaagcacctgttaaaatgaaggacagatttatcaccttgattacagcggtgatgggacctgatcccagcagtcacaagtcacaggggaaggtccctgaggaccttcaggagggcggttggtccaggacccacacctgctttcttcatgtttcctgatcccgccctgggtctgcagtcacacatttctggaaacttctctgaggtccaagacttggaggttcctctaggaccttaaggccctgactcctttctggtatctcacaggacattttcttcccacagatagaaaaggagggagctactctcaggctgcaagtaagtatgaaggaggctgatgcctgaggtccttgggatattgtgtttgggagcccatgggggagctcacccaccccacaattcctcctctagccacatcttctgtgggatctgaccaggttctgtttttgttctaccccaggcagtgacagtgcccagggctctgatgtgtctctcacagcttgtaaaggtgagagcctggagggcctgatgtgtgttgggtgttgggcggaacagtggacacagctgtgctatggggtttctttccattggatgtattgagcatgcgatgggctgtttaaagtgtgacccctcactgtgacagatacgaatttgttcatgaatatttttttctatagtgtgagacagctgccttgtgtgggactgagaggcaagagttgttcctgcccttccctttgtgacttgaagaaccctgactttgtttctgcaaaggcacctgcatgtgtctgtgttcgtgtaggcataatgtgaggaggtggggagaccaccccacccccatgtccaccatgaccctcttcccacgctgacctgtgctccctccccaatcatctttcctgttccagagaggtggggctgaggtgtctccatctctgtctcaacttcatggtgcactgagctgtaacttcttccttccctattaaaa

SEQ ID NO: 575 - DNA, 83 bp, synthetic construct
  misc_feature 1..83: note = CRISPR Cas9 scaffold sequence
  source 1..83: mol_type = other DNA
gttttagagctagaaatagcaagttaaaataaggctagtccgttatcaacttgaaaaagtggcaccgagtcggtgcttttttt

SEQ ID NO: 576 - DNA, 20 bp, synthetic construct
  misc_feature 1..20: note = HLA-A targeting gRNA
  source 1..20: mol_type = other DNA
tggacgacacgcagttcgtg

SEQ ID NO: 577 - DNA, 20 bp, synthetic construct
  misc_feature 1..20: note = HLA-A targeting gRNA
  source 1..20: mol_type = other DNA
cagatacctggagaacggga

SEQ ID NO: 578 - DNA, 20 bp, synthetic construct
  misc_feature 1..20: note = HLA-A targeting gRNA
  source 1..20: mol_type = other DNA
tcccgttctccaggtatctg

SEQ ID NO: 579 - DNA, 20 bp, synthetic construct
  misc_feature 1..20: note = HLA-A targeting gRNA
  source 1..20: mol_type = other DNA
ccgccgcggtccaagagcgc

SEQ ID NO: 580 - DNA, 20 bp, synthetic construct
  misc_feature 1..20: note = HLA-A targeting gRNA
  source 1..20: mol_type = other DNA
cctgcgctcttggaccgcgg

SEQ ID NO: 581 - DNA, 21 bp, synthetic construct
  misc_feature 1..21: note = HLA-A targeting gRNA
  source 1..21: mol_type = other DNA
ggacctgcgctcttggaccgc

SEQ ID NO: 582 - DNA, 23 bp, synthetic construct
  misc_feature 1..23: note = HLA-A targeting gRNA
  source 1..23: mol_type = other DNA
aaggagacgctgcagcgcacggg

SEQ ID NO: 583 - DNA, 23 bp, synthetic construct
  misc_feature 1..23: note = HLA-A targeting gRNA
  source 1..23: mol_type = other DNA
gaaggagacgctgcagcgcacgg

SEQ ID NO: 584 - DNA, 23 bp, synthetic construct
  misc_feature 1..23: note = HLA-A targeting gRNA
  source 1..23: mol_type = other DNA
gcgggcgccgtggatagagcagg

SEQ ID NO: 585 - DNA, 23 bp, synthetic construct
  misc_feature 1..23: note = HLA-A targeting gRNA
  source 1..23: mol_type = other DNA
tgctctatccacggcgcccgcgg

SEQ ID NO: 586 - DNA, 23 bp, synthetic construct
  misc_feature 1..23: note = HLA-A targeting gRNA
  source 1..23: mol_type = other DNA
cgatgaagcggggctccccgcgg

SEQ ID NO: 587 - DNA, 23 bp, synthetic construct
  misc_feature 1..23: note = HLA-A targeting gRNA
  source 1..23: mol_type = other DNA
cgtgtcccggcccggccgcgggg

SEQ ID NO: 588 - DNA, 23 bp, synthetic construct
  misc_feature 1..23: note = HLA-A targeting gRNA
  source 1..23: mol_type = other DNA
cggctccatcctctggctcgcgg

SEQ ID NO: 589 - DNA, 23 bp, synthetic construct
  misc_feature 1..23: note = HLA-A targeting gRNA
  source 1..23: mol_type = other DNA
gatgtaatccttgccgtcgtagg

SEQ ID NO: 590 - DNA, 23 bp, synthetic construct
  misc_feature 1..23: note = HLA-A targeting gRNA
  source 1..23: mol_type = other DNA
acagcgacgccgcgagccagagg

SEQ ID NO: 591 - DNA, 23 bp, synthetic construct
  misc_feature 1..23: note = HLA-A targeting gRNA
  source 1..23: mol_type = other DNA
ggatggagccgcgggcgccgtgg

SEQ ID NO: 592 - DNA, 23 bp, synthetic construct
  misc_feature 1..23: note = HLA-A targeting gRNA
  source 1..23: mol_type = other DNA
ggcgccgtggatagagcaggagg

SEQ ID NO: 593 - DNA, 23 bp, synthetic construct
  misc_feature 1..23: note = HLA-A targeting gRNA
  source 1..23: mol_type = other DNA
gcgccgtggatagagcaggaggg

SEQ ID NO: 594 - DNA, 23 bp, synthetic construct
  misc_feature 1..23: note = HLA-A targeting gRNA
  source 1..23: mol_type = other DNA
cggctactacaaccagagcgagg

SEQ ID NO: 595 - DNA, 23 bp, synthetic construct
  misc_feature 1..23: note = HLA-A targeting gRNA
  source 1..23: mol_type = other DNA
ctggttgtagtagccgcgcaggg

SEQ ID NO: 596 - DNA, 23 bp, synthetic construct
  misc_feature 1..23: note = HLA-A targeting gRNA
  source 1..23: mol_type = other DNA
tactacaaccagagcgaggccgg

SEQ ID NO: 597 - DNA, 23 bp, synthetic construct
  misc_feature 1..23: note = HLA-A targeting gRNA
  source 1..23: mol_type = other DNA
ctacctggagggcacgtgcgtgg

SEQ ID NO: 598 - DNA, 23 bp, synthetic construct
  misc_feature 1..23: note = HLA-A targeting gRNA
  source 1..23: mol_type = other DNA
cacgcacgtgccctccaggtagg

SEQ ID NO: 599 - DNA, 23 bp, synthetic construct
  misc_feature 1..23: note = HLA-A targeting gRNA
  source 1..23: mol_type = other DNA
gcagggtccccaggtccactcgg

SEQ ID NO: 600 - DNA, 23 bp, synthetic construct
  misc_feature 1..23: note = HLA-A targeting gRNA
  source 1..23: mol_type = other DNA
gtggacctggggaccctgcgcgg

SEQ ID NO: 601 - DNA, 23 bp, synthetic construct
  misc_feature 1..23: note = HLA-A targeting gRNA
  source 1..23: mol_type = other DNA
tggagggcacgtgcgtggagtgg

SEQ ID NO: 602 - DNA, 23 bp, synthetic construct
  misc_feature 1..23: note = HLA-A targeting gRNA
  source 1..23: mol_type = other DNA
gtatggctgcgacgtggggtcgg

SEQ ID NO: 603 - DNA, 23 bp, synthetic construct
  misc_feature 1..23: note = HLA-A targeting gRNA
  source 1..23: mol_type = other DNA
ctgagctgccatgtccgccgcgg

SEQ ID NO: 604 - DNA, 23 bp, synthetic construct
  misc_feature 1..23: note = HLA-A targeting gRNA
  source 1..23: mol_type = other DNA
ggattacatcgccctgaaagagg

SEQ ID NO: 605 - DNA, 23 bp, synthetic construct
  misc_feature 1..23: note = HLA-A targeting gRNA
  source 1..23: mol_type = other DNA
caagtgggaggcggcccatgtgg

SEQ ID NO: 606 - DNA, 23 bp, synthetic construct
  misc_feature 1..23: note = HLA-A targeting gRNA
  source 1..23: mol_type = other DNA
gtgggaggcggcccatgtggcgg

SEQ ID NO: 607 - DNA, 23 bp, synthetic construct
  misc_feature 1..23: note = HLA-A targeting gRNA
  source 1..23: mol_type = other DNA
cagttgagagcctacctggaggg

SEQ ID NO: 608 - DNA, 23 bp, synthetic construct
  misc_feature 1..23: note = HLA-A targeting gRNA
  source 1..23: mol_type = other DNA
gcagttgagagcctacctggagg

SEQ ID NO: 609 - DNA, 23 bp, synthetic construct
  misc_feature 1..23: note = HLA-A targeting gRNA
  source 1..23: mol_type = other DNA
taccaccagtacgcctacgacgg

SEQ ID NO: 610 - DNA, 23 bp, synthetic construct
  misc_feature 1..23: note = HLA-A targeting gRNA
  source 1..23: mol_type = other DNA
tgccgtcgtaggcgtactggtgg

SEQ ID NO: 611 - DNA, 23 bp, synthetic construct
  misc_feature 1..23: note = HLA-A targeting gRNA
  source 1..23: mol_type = other DNA
ccagtacgcctacgacggcaagg

SEQ ID NO: 612 - DNA, 23 bp, synthetic construct
  misc_feature 1..23: note = HLA-A targeting gRNA
  source 1..23: mol_type = other DNA
ggatgtgaagaaatacctcatgg

SEQ ID NO: 613 - DNA, 23 bp, synthetic construct
  misc_feature 1..23: note = HLA-A targeting gRNA
  source 1..23: mol_type = other DNA
atttcttcacatccgtgtcccgg

SEQ ID NO: 614 - DNA, 23 bp, synthetic construct
  misc_feature 1..23: note = HLA-A targeting gRNA
  source 1..23: mol_type = other DNA
aggcgtactggtggtacccgcgg

SEQ ID NO: 615 - DNA, 23 bp, synthetic construct
  misc_feature 1..23: note = HLA-A targeting gRNA
  source 1..23: mol_type = other DNA
cgtactggtggtacccgcggagg

SEQ ID NO: 616 - DNA, 23 bp, synthetic construct
  misc_feature 1..23: note = HLA-A targeting gRNA
  source 1..23: mol_type = other DNA
gaggatgtatggctgcgacgtgg

SEQ ID NO: 617 - DNA, 23 bp, synthetic construct
  misc_feature 1..23: note = HLA-A targeting gRNA
  source 1..23: mol_type = other DNA
ggatgtatggctgcgacgtgggg

SEQ ID NO: 618 - DNA, 23 bp, synthetic construct
  misc_feature 1..23: note = HLA-A targeting gRNA
  source 1..23: mol_type = other DNA
ctcagaccaccaagcacaagtgg

SEQ ID NO: 619 - DNA, 23 bp, synthetic construct
  misc_feature 1..23: note = HLA-A targeting gRNA
  source 1..23: mol_type = other DNA
tcagaccaccaagcacaagtggg

SEQ ID NO: 620 - DNA, 23 bp, synthetic construct
  misc_feature 1..23: note = HLA-A targeting gRNA
  source 1..23: mol_type = other DNA
caccaagcacaagtgggaggcgg

SEQ ID NO: 621 - DNA, 23 bp, synthetic construct
  misc_feature 1..23: note = HLA-A targeting gRNA
  source 1..23: mol_type = other DNA
gaccaccaagcacaagtgggagg

SEQ ID NO: 622 - DNA, 23 bp, synthetic construct
  misc_feature 1..23: note = HLA-A targeting gRNA
  source 1..23: mol_type = other DNA
gagccccgcttcatcgcagtggg

SEQ ID NO: 623 - DNA, 23 bp, synthetic construct
  misc_feature 1..23: note = HLA-A targeting gRNA
  source 1..23: mol_type = other DNA
gtagcccactgcgatgaagcggg

SEQ ID NO: 624 - DNA, 23 bp, synthetic construct
  misc_feature 1..23: note = HLA-A targeting gRNA
  source 1..23: mol_type = other DNA
tagcccactgcgatgaagcgggg

SEQ ID NO: 625 - DNA, 23 bp, synthetic construct
  misc_feature 1..23: note = HLA-A targeting gRNA
  source 1..23: mol_type = other DNA
cgtagcccactgcgatgaagcgg

SEQ ID NO: 626 - DNA, 23 bp, synthetic construct
  misc_feature 1..23: note = HLA-A targeting gRNA
  source 1..23: mol_type = other DNA
cttcatcgcagtgggctacgtgg

SEQ ID NO: 627 - DNA, 23 bp, synthetic construct
  misc_feature 1..23: note = HLA-A targeting gRNA
  source 1..23: mol_type = other DNA
ggagccccgcttcatcgcagtgg

SEQ ID NO: 628 - DNA, 23 bp, synthetic construct
  misc_feature 1..23: note = HLA-A targeting gRNA
  source 1..23: mol_type = other DNA
cggggagacacggaaagtgaagg

SEQ ID NO: 629 - DNA, 23 bp, synthetic construct
  misc_feature 1..23: note = HLA-A targeting gRNA
  source 1..23: mol_type = other DNA
agtattgggacggggagacacgg

SEQ ID NO: 630 - DNA, 23 bp, synthetic construct
  misc_feature 1..23: note = HLA-A targeting gRNA
  source 1..23: mol_type = other DNA
agggtccggagtattgggacggg

SEQ ID NO: 631 - DNA, 23 bp, synthetic construct
  misc_feature 1..23: note = HLA-A targeting gRNA
  source 1..23: mol_type = other DNA
gagggtccggagtattgggacgg

SEQ ID NO: 632 - DNA, 23 bp, synthetic construct
  misc_feature 1..23: note = HLA-A targeting gRNA
  source 1..23: mol_type = other DNA
ggaccctcctgctctatccacgg

SEQ ID NO: 633 - DNA, 23 bp, synthetic construct
  misc_feature 1..23: note = HLA-A targeting gRNA
  source 1..23: mol_type = other DNA
gtggatagagcaggagggtccgg

SEQ ID NO: 634 - DNA, 23 bp, synthetic construct
  misc_feature 1..23: note = HLA-A targeting gRNA
  source 1..23: mol_type = other DNA
agactcaccgagtggacctgggg

SEQ ID NO: 635 - DNA, 23 bp, synthetic construct
  misc_feature 1..23: note = HLA-A targeting gRNA
  source 1..23: mol_type = other DNA
cactcggtgagtctgtgagtggg

SEQ ID NO: 636 - DNA, 23 bp, synthetic construct
  misc_feature 1..23: note = HLA-A targeting gRNA
  source 1..23: mol_type = other DNA
cagactcaccgagtggacctggg

SEQ ID NO: 637 - DNA, 23 bp, synthetic construct
  misc_feature 1..23: note = HLA-A targeting gRNA
  source 1..23: mol_type = other DNA
ccactcacagactcaccgagtgg

SEQ ID NO: 638 - DNA, 23 bp, synthetic construct
  misc_feature 1..23: note = HLA-A targeting gRNA
  source 1..23: mol_type = other DNA
ccactcggtgagtctgtgagtgg

SEQ ID NO: 639 - DNA, 23 bp, synthetic construct
  misc_feature 1..23: note = HLA-A targeting gRNA
  source 1..23: mol_type = other DNA
tcggactggcgcttcctccgcgg

SEQ ID NO: 640 - DNA, 23 bp, synthetic construct
  misc_feature 1..23: note = HLA-A targeting gRNA
  source 1..23: mol_type = other DNA
gcagccatacatcctctggacgg

SEQ ID NO: 641 - DNA, 23 bp, synthetic construct
  misc_feature 1..23: note = HLA-A targeting gRNA
  source 1..23: mol_type = other DNA
tctcaactgctccgccacatggg

SEQ ID NO: 642 - DNA, 23 bp, synthetic construct
  misc_feature 1..23: note = HLA-A targeting gRNA
  source 1..23: mol_type = other DNA
accctcatgctgcacatggcagg

SEQ ID NO: 643 - DNA, 23 bp, synthetic construct
  misc_feature 1..23: note = HLA-A targeting gRNA
  source 1..23: mol_type = other DNA
acctgccatgtgcagcatgaggg

SEQ ID NO: 644 - DNA, 23 bp, synthetic construct
  misc_feature 1..23: note = HLA-A targeting gRNA
  source 1..23: mol_type = other DNA
cacctgccatgtgcagcatgagg

SEQ ID NO: 645 - DNA, 23 bp, synthetic construct
  misc_feature 1..23: note = HLA-A targeting gRNA
  source 1..23: mol_type = other DNA
ggaggaccagacccaggacacgg

SEQ ID NO: 646 - DNA, 23 bp, synthetic construct
  misc_feature 1..23: note = HLA-A targeting gRNA
  source 1..23: mol_type = other DNA
ggatggggaggaccagacccagg

SEQ ID NO: 647 - DNA, 23 bp, synthetic construct
  misc_feature 1..23: note = HLA-A targeting gRNA
  source 1..23: mol_type = other DNA
gacctggcagcgggatggggagg

SEQ ID NO: 648 - DNA, 23 bp, synthetic construct
  misc_feature 1..23: note = HLA-A targeting gRNA
  source 1..23: mol_type = other DNA
agatcacactgacctggcagcgg

SEQ ID NO: 649 - DNA, 23 bp, synthetic construct
  misc_feature 1..23: note = HLA-A targeting gRNA
  source 1..23: mol_type = other DNA
gatcacactgacctggcagcggg

SEQ ID NO: 650 - DNA, 23 bp, synthetic construct
  misc_feature 1..23: note = HLA-A targeting gRNA
  source 1..23: mol_type = other DNA
aggtcagtgtgatctccgcaggg

SEQ ID NO: 651 - DNA, 23 bp, synthetic construct
  misc_feature 1..23: note = HLA-A targeting gRNA
  source 1..23: mol_type = other DNA
aagcccctcaccctgagatgggg

SEQ ID NO: 652 - DNA, 23 bp, synthetic construct
  misc_feature 1..23: note = HLA-A targeting gRNA
  source 1..23: mol_type = other DNA
ctgcggagatcacactgacctgg

SEQ ID NO: 653 - DNA, 23 bp, synthetic construct
  misc_feature 1..23: note = HLA-A targeting gRNA
  source 1..23: mol_type = other DNA
cagcaatgatgcccacgatgggg

SEQ ID NO: 654 - DNA, 23 bp, synthetic construct
  misc_feature 1..23: note = HLA-A targeting gRNA
  source 1..23: mol_type = other DNA
ccagcaatgatgcccacgatggg

SEQ ID NO: 655 - DNA, 23 bp, synthetic construct
  misc_feature 1..23: note = HLA-A targeting gRNA
  source 1..23: mol_type = other DNA
gccagcaatgatgcccacgatgg

SEQ ID NO: 656 - DNA, 23 bp, synthetic construct
  misc_feature 1..23: note = HLA-A targeting gRNA
  source 1..23: mol_type = other DNA
ggatggaaccttccagaagtggg

SEQ ID NO: 657 - DNA, 23 bp, synthetic construct
  misc_feature 1..23: note = HLA-A targeting gRNA
  source 1..23: mol_type = other DNA
gggatggaaccttccagaagtgg

SEQ ID NO: 658 - DNA, 23 bp, synthetic construct
  misc_feature 1..23: note = HLA-A targeting gRNA
  source 1..23: mol_type = other DNA
atgcccacgatggggatggtggg

SEQ ID NO: 659 - DNA, 23 bp, synthetic construct
  misc_feature 1..23: note = HLA-A targeting gRNA
  source 1..23: mol_type = other DNA
cagcccaccatccccatcgtggg

SEQ ID NO: 660 - DNA, 23 bp, synthetic construct
  misc_feature 1..23: note = HLA-A targeting gRNA
  source 1..23: mol_type = other DNA
ccagcccaccatccccatcgtgg

SEQ ID NO: 661 - DNA, 23 bp, synthetic construct
  misc_feature 1..23: note = HLA-A targeting gRNA
  source 1..23: mol_type = other DNA
gatgcccacgatggggatggtgg

SEQ ID NO: 662 - DNA, 23 bp, synthetic construct
  misc_feature 1..23: note = HLA-A targeting gRNA
  source 1..23: mol_type = other DNA
cagggcccagcacctcagggtgg

SEQ ID NO: 663 - DNA, 23 bp, synthetic construct
  misc_feature 1..23: note = HLA-A targeting gRNA
  source 1..23: mol_type = other DNA
aatgatgcccacgatggggatgg

SEQ ID NO: 664 - DNA, 23 bp, synthetic construct
  misc_feature 1..23: note = HLA-A targeting gRNA
  source 1..23: mol_type = other DNA
ggccctgacccagacctgggcgg

SEQ ID NO: 665 - DNA, 23 bp, synthetic construct
  misc_feature 1..23: note = HLA-A targeting gRNA
  source 1..23: mol_type = other DNA
gacccaggacacggagctcgtgg

SEQ ID NO: 666 - DNA, 23 bp, synthetic construct
  misc_feature 1..23: note = HLA-A targeting gRNA
  source 1..23: mol_type = other DNA
acacggagctcgtggagaccagg

SEQ ID NO: 667 - DNA, 23 bp, synthetic construct
  misc_feature 1..23: note = HLA-A targeting gRNA
  source 1..23: mol_type = other DNA
cgtggagaccaggcctgcagggg

SEQ ID NO: 668 - DNA, 23 bp, synthetic construct
  misc_feature 1..23: note = HLA-A targeting gRNA
  source 1..23: mol_type = other DNA
tcgtggagaccaggcctgcaggg

SEQ ID NO: 669 - DNA, 23 bp, synthetic construct
  misc_feature 1..23: note = HLA-A targeting gRNA
  source 1..23: mol_type = other DNA
agctgtgatcactggagctgtgg

SEQ ID NO: 670 - DNA, 23 bp, synthetic construct
  misc_feature 1..23: note = HLA-A targeting gRNA
  source 1..23: mol_type = other DNA
aaaaggagggagctactctcagg

SEQ ID NO: 671 - DNA, 23 bp, synthetic construct
  misc_feature 1..23: note = HLA-A targeting gRNA
  source 1..23: mol_type = other DNA
atgtggaggaggaagagctcagg

SEQ ID NO: 672 - DNA, 23 bp, synthetic construct
  misc_feature 1..23: note = HLA-A targeting gRNA
  source 1..23: mol_type = other DNA
gtgtctctcacagcttgtaaagg

SEQ ID NO: 673 - DNA, 23 bp, synthetic construct
  misc_feature 1..23: note = HLA-A targeting gRNA
  source 1..23: mol_type = other DNA
gagagacacatcagagccctggg

SEQ ID NO: 674 - DNA, 23 bp, synthetic construct
  misc_feature 1..23: note = HLA-A targeting gRNA
  source 1..23: mol_type = other DNA
ctccgcagggtagaagctcaggg

SEQ ID NO: 675 - DNA, 23 bp, synthetic construct
  misc_feature 1..23: note = HLA-A targeting gRNA
  source 1..23: mol_type = other DNA
ggccctgagcttctaccctgcgg

SEQ ID NO: 676 - DNA, 23 bp, synthetic construct
  misc_feature 1..23: note = HLA-A targeting gRNA
  source 1..23: mol_type = other DNA
gctcagggcccagcacctcaggg

SEQ ID NO: 677 - DNA, 23 bp, synthetic construct
  misc_feature 1..23: note = HLA-A targeting gRNA
  source 1..23: mol_type = other DNA
tatctctgctcctgtccagaagg

SEQ ID NO: 678 - DNA, 23 bp, synthetic construct
  misc_feature 1..23: note = HLA-A targeting gRNA
  source 1..23: mol_type = other DNA
agtagcaggacgagggttcgggg

SEQ ID NO: 679 - DNA, 23 bp, synthetic construct
  misc_feature 1..23: note = HLA-A targeting gRNA
  source 1..23: mol_type = other DNA
ccccgagagtagcaggacgaggg

SEQ ID NO: 680 - DNA, 23 bp, synthetic construct
  misc_feature 1..23: note = HLA-A targeting gRNA
  source 1..23: mol_type = other DNA
ccctcgtcctgctactctcgggg

SEQ ID NO: 681 - DNA, 23 bp, synthetic construct
  misc_feature 1..23: note = HLA-A targeting gRNA
  source 1..23: mol_type = other DNA
cctcgtcctgctactctcggggg

SEQ ID NO: 682 - DNA, 23 bp, synthetic construct
  misc_feature 1..23: note = HLA-A targeting gRNA
  source 1..23: mol_type = other DNA
ctgtggtcgctgctgtgatgtgg

SEQ ID NO: 683 - DNA, 23 bp, synthetic construct
  misc_feature 1..23: note = HLA-A targeting gRNA
  source 1..23: mol_type = other DNA
tcgctgctgtgatgtggaggagg

SEQ ID NO: 684 - DNA, 23 bp, synthetic construct
  misc_feature 1..23: note = HLA-A targeting gRNA
  source 1..23: mol_type = other DNA
tggtcgctgctgtgatgtggagg

SEQ ID NO: 685 - DNA, 23 bp, synthetic construct
  misc_feature 1..23: note = HLA-A targeting gRNA
  source 1..23: mol_type = other DNA
cacagccgcccacttctggaagg

SEQ ID NO: 686 - DNA, 23 bp, synthetic construct
  misc_feature 1..23: note = HLA-A targeting gRNA
  source 1..23: mol_type = other DNA
ccagaagtgggcggctgtggtgg

SEQ ID NO: 687 - DNA, 23 bp, synthetic construct
  misc_feature 1..23: note = HLA-A targeting gRNA
  source 1..23: mol_type = other DNA
tggaaccttccagaagtgggcgg

SEQ ID NO: 688 - DNA, 23 bp, synthetic construct
  misc_feature 1..23: note = HLA-A targeting gRNA
  source 1..23: mol_type = other DNA
tcacagctccaaagagaaccagg

SEQ ID NO: 689 - DNA, 23 bp, synthetic construct
  misc_feature 1..23: note = HLA-A targeting gRNA
  source 1..23: mol_type = other DNA
ctgaccatgaagccaccctgagg

SEQ ID NO: 690 - DNA, 23 bp, synthetic construct
  misc_feature 1..23: note = HLA-A targeting gRNA
  source 1..23: mol_type = other DNA
gcaaaccctcatgctgcacatgg

SEQ ID NO: 691 - DNA, 23 bp, synthetic construct
  misc_feature 1..23: note = HLA-A targeting gRNA
  source 1..23: mol_type = other DNA
tgaagccaccctgaggtgctggg

SEQ ID NO: 692 - DNA, 23 bp, synthetic construct
  misc_feature 1..23: note = HLA-A targeting gRNA
  source 1..23: mol_type = other DNA
ggtgagtcatatgcgttttgggg

SEQ ID NO: 693 - DNA, 23 bp, synthetic construct
  misc_feature 1..23: note = HLA-A targeting gRNA
  source 1..23: mol_type = other DNA
gtgagtcatatgcgttttggggg

SEQ ID NO: 694 - DNA, 23 bp, synthetic construct
  misc_feature 1..23: note = HLA-A targeting gRNA
  source 1..23: mol_type = other DNA
cttcatggtcagagacagcgtgg

SEQ ID NO: 695 - DNA, 23 bp, synthetic construct
  misc_feature 1..23: note = HLA-A targeting gRNA
  source 1..23: mol_type = other DNA
tctggccctgacccagacctggg

SEQ ID NO: 696 - DNA, 23 bp, synthetic construct
  misc_feature 1..23: note = HLA-A targeting gRNA
  source 1..23: mol_type = other DNA
tggacgacacgcagttcgtgcgg

SEQ ID NO: 697 - DNA, 23 bp, synthetic construct
  misc_feature 1..23: note = HLA-A targeting gRNA
  source 1..23: mol_type = other DNA
cagatacctggagaacgggaagg

SEQ ID NO: 698 - DNA, 23 bp, synthetic construct
  misc_feature 1..23: note = HLA-A targeting gRNA
  source 1..23: mol_type = other DNA
tcccgttctccaggtatctgcgg

SEQ ID NO: 699 - DNA, 23 bp, synthetic construct
  misc_feature 1..23: note = HLA-A targeting gRNA
  source 1..23: mol_type = other DNA
ccgccgcggtccaagagcgcagg

SEQ ID NO: 700 - DNA, 23 bp, synthetic construct
  misc_feature 1..23: note = HLA-A targeting gRNA
  source 1..23: mol_type = other DNA
cctgcgctcttggaccgcggcgg

SEQ ID NO: 701 - DNA, 23 bp, synthetic construct
  misc_feature 1..23: note = HLA-A targeting gRNA
  source 1..23: mol_type = other DNA
ggacctgcgctcttggaccgcgg

SEQ ID NO: 702 - DNA, 23 bp, synthetic construct
  misc_feature 1..23: note = HLA-A targeting gRNA
  source 1..23: mol_type = other DNA
aaggagacgctgcagcgcacggg

SEQ ID NO: 703 - DNA, 23 bp, synthetic construct
  misc_feature 1..23: note = HLA-A targeting gRNA
  source 1..23: mol_type = other DNA
gaaggagacgctgcagcgcacgg

SEQ ID NO: 704 - DNA, 23 bp, synthetic construct
  misc_feature 1..23: note = HLA-A targeting gRNA
  source 1..23: mol_type = other DNA
gcgggcgccgtggatagagcagg

SEQ ID NO: 705 - DNA, 23 bp, synthetic construct
  misc_feature 1..23: note = HLA-A targeting gRNA
  source 1..23: mol_type = other DNA
tgctctatccacggcgcccgcgg

SEQ ID NO: 706 - DNA, 23 bp, synthetic construct
  misc_feature 1..23: note = HLA-A targeting gRNA
  source 1..23: mol_type = other DNA
cgatgaagcggggctccccgcgg

SEQ ID NO: 707 - DNA, 23 bp, synthetic construct
  misc_feature 1..23: note = HLA-A targeting gRNA
  source 1..23: mol_type = other DNA
cgtgtcccggcccggccgcgggg

SEQ ID NO: 708 - DNA, 23 bp, synthetic construct
  misc_feature 1..23: note = HLA-A targeting gRNA
  source 1..23: mol_type = other DNA
cggctccatcctctggctcgcgg

SEQ ID NO: 709 - DNA, 23 bp, synthetic construct
  misc_feature 1..23: note = HLA-A targeting gRNA
  source 1..23: mol_type = other DNA
gatgtaatccttgccgtcgtagg

SEQ ID NO: 710 - DNA, 23 bp, synthetic construct
  misc_feature 1..23: note = HLA-A targeting gRNA
  source 1..23: mol_type = other DNA
acagcgacgccgcgagccagagg

SEQ ID NO: 711 - DNA, 23 bp, synthetic construct
  misc_feature 1..23: note = HLA-A targeting gRNA
  source 1..23: mol_type = other DNA
ggatggagccgcgggcgccgtgg

SEQ ID NO: 712 - DNA, 23 bp, synthetic construct
  misc_feature 1..23: note = HLA-A targeting gRNA
  source 1..23: mol_type = other DNA
ggcgccgtggatagagcaggagg

SEQ ID NO: 713 - DNA, 23 bp, synthetic construct
  misc_feature 1..23: note = HLA-A targeting gRNA
  source 1..23: mol_type = other DNA
gcgccgtggatagagcaggaggg

SEQ ID NO: 714 - DNA, 23 bp, synthetic construct
  misc_feature 1..23: note = HLA-A targeting gRNA
  source 1..23: mol_type = other DNA
cggctactacaaccagagcgagg

SEQ ID NO: 715 - DNA, 23 bp, synthetic construct
  misc_feature 1..23: note = HLA-A targeting gRNA
  source 1..23: mol_type = other DNA
ctggttgtagtagccgcgcaggg

SEQ ID NO: 716 - DNA, 23 bp, synthetic construct
  misc_feature 1..23: note = HLA-A targeting gRNA
  source 1..23: mol_type = other DNA
tactacaaccagagcgaggccgg

SEQ ID NO: 717 - DNA, 23 bp, synthetic construct
  misc_feature 1..23: note = HLA-A targeting gRNA
  source 1..23: mol_type = other DNA
ctacctggagggcacgtgcgtgg

SEQ ID NO: 718 - DNA, 23 bp, synthetic construct
  misc_feature 1..23: note = HLA-A targeting gRNA
  source 1..23: mol_type = other DNA
cacgcacgtgccctccaggtagg

SEQ ID NO: 719 - DNA, 23 bp, synthetic construct
  misc_feature 1..23: note = HLA-A targeting gRNA
  source 1..23: mol_type = other DNA
gcagggtccccaggtccactcgg

SEQ ID NO: 720 - DNA, 23 bp, synthetic construct
  misc_feature 1..23: note = HLA-A targeting gRNA
  source 1..23: mol_type = other DNA
gtggacctggggaccctgcgcgg

SEQ ID NO: 721 - DNA, 23 bp, synthetic construct
  misc_feature 1..23: note = HLA-A targeting gRNA
  source 1..23: mol_type = other DNA
tggagggcacgtgcgtggagtgg

SEQ ID NO: 722 - DNA, 23 bp, synthetic construct
  misc_feature 1..23: note = HLA-A targeting gRNA
  source 1..23: mol_type = other DNA
gtatggctgcgacgtggggtcgg

SEQ ID NO: 723 - DNA, 23 bp, synthetic construct
  misc_feature 1..23: note = HLA-A targeting gRNA
  source 1..23: mol_type = other DNA
ctgagctgccatgtccgccgcgg

SEQ ID NO: 724 - DNA, 23 bp, synthetic construct
  misc_feature 1..23: note = HLA-A targeting gRNA
  source 1..23: mol_type = other DNA
ggattacatcgccctgaaagagg

SEQ ID NO: 725 - DNA, 23 bp, synthetic construct
  misc_feature 1..23: note = HLA-A targeting gRNA
  source 1..23: mol_type = other DNA
caagtgggaggcggcccatgtgg

SEQ ID NO: 726 - DNA, 23 bp, synthetic construct
  misc_feature 1..23: note = HLA-A targeting gRNA
  source 1..23: mol_type = other DNA
gtgggaggcggcccatgtggcgg

SEQ ID NO: 727 - DNA, 23 bp, synthetic construct
  misc_feature 1..23: note = HLA-A targeting gRNA
  source 1..23: mol_type = other DNA
cagttgagagcctacctggaggg

SEQ ID NO: 728 - DNA, 23 bp, synthetic construct
  misc_feature 1..23: note = HLA-A targeting gRNA
  source 1..23: mol_type = other DNA
gcagttgagagcctacctggagg

SEQ ID NO: 729 - DNA, 23 bp, synthetic construct
  misc_feature 1..23: note = HLA-A targeting gRNA
  source 1..23: mol_type = other DNA
taccaccagtacgcctacgacgg

SEQ ID NO: 730 - DNA, 23 bp, synthetic construct
  misc_feature 1..23: note = HLA-A targeting gRNA
  source 1..23: mol_type = other DNA
tgccgtcgtaggcgtactggtgg

SEQ ID NO: 731 - DNA, 23 bp, synthetic construct
  misc_feature 1..23: note = HLA-A targeting gRNA
  source 1..23: mol_type = other DNA
ccagtacgcctacgacggcaagg

SEQ ID NO: 732 - DNA, 23 bp, synthetic construct
  misc_feature 1..23: note = HLA-A targeting gRNA
  source 1..23: mol_type = other DNA
ggatgtgaagaaatacctcatgg

SEQ ID NO: 733 - DNA, 23 bp, synthetic construct
  misc_feature 1..23: note = HLA-A targeting gRNA
  source 1..23: mol_type = other DNA
atttcttcacatccgtgtcccgg

SEQ ID NO: 734 - DNA, 23 bp, synthetic construct
  misc_feature 1..23: note = HLA-A targeting gRNA
  source 1..23: mol_type = other DNA
aggcgtactggtggtacccgcgg

SEQ ID NO: 735 - DNA, 23 bp, synthetic construct
  misc_feature 1..23: note = HLA-A targeting gRNA
  source 1..23: mol_type = other DNA
cgtactggtggtacccgcggagg

SEQ ID NO: 736 - DNA, 23 bp, synthetic construct
  misc_feature 1..23: note = HLA-A targeting gRNA
  source 1..23: mol_type = other DNA
gaggatgtatggctgcgacgtgg

SEQ ID NO: 737 - DNA, 23 bp, synthetic construct
  misc_feature 1..23: note = HLA-A targeting gRNA
  source 1..23: mol_type = other DNA
ggatgtatggctgcgacgtgggg

SEQ ID NO: 738 - DNA, 23 bp, synthetic construct
  misc_feature 1..23: note = HLA-A targeting gRNA
  source 1..23: mol_type = other DNA
ctcagaccaccaagcacaagtgg

SEQ ID NO: 739 - DNA, 23 bp, synthetic construct
  misc_feature 1..23: note = HLA-A targeting gRNA
  source 1..23: mol_type = other DNA
tcagaccaccaagcacaagtggg

SEQ ID NO: 740 - DNA, 23 bp, synthetic construct
  misc_feature 1..23: note = HLA-A targeting gRNA
  source 1..23: mol_type = other DNA
caccaagcacaagtgggaggcgg

SEQ ID NO: 741 - DNA, 23 bp, synthetic construct
  misc_feature 1..23: note = HLA-A targeting gRNA
  source 1..23: mol_type = other DNA
gaccaccaagcacaagtgggagg

SEQ ID NO: 742 - DNA, 23 bp, synthetic construct
  misc_feature 1..23: note = HLA-A targeting gRNA
  source 1..23: mol_type = other DNA
gagccccgcttcatcgcagtggg

SEQ ID NO: 743 - DNA, 23 bp, synthetic construct
  misc_feature 1..23: note = HLA-A targeting gRNA
  source 1..23: mol_type = other DNA
gtagcccactgcgatgaagcggg

SEQ ID NO: 744 - DNA, 23 bp, synthetic construct
  misc_feature 1..23: note = HLA-A targeting gRNA
  source 1..23: mol_type = other DNA
tagcccactgcgatgaagcgggg

SEQ ID NO: 745 - DNA, 23 bp, synthetic construct
  misc_feature 1..23: note = HLA-A targeting gRNA
  source 1..23: mol_type = other DNA
cgtagcccactgcgatgaagcgg

SEQ ID NO: 746 - DNA, 23 bp, synthetic construct
  misc_feature 1..23: note = HLA-A targeting gRNA
  source 1..23: mol_type = other DNA
cttcatcgcagtgggctacgtgg

SEQ ID NO: 747 - DNA, 23 bp, synthetic construct
  misc_feature 1..23: note = HLA-A targeting gRNA
  source 1..23: mol_type = other DNA
ggagccccgcttcatcgcagtgg

SEQ ID NO: 748 - DNA, 23 bp, synthetic construct
  misc_feature 1..23: note = HLA-A targeting gRNA
  source 1..23: mol_type = other DNA
cggggagacacggaaagtgaagg

SEQ ID NO: 749 - DNA, 23 bp, synthetic construct
  misc_feature 1..23: note = HLA-A targeting gRNA
  source 1..23: mol_type = other DNA
agtattgggacggggagacacgg

SEQ ID NO: 750 - DNA, 23 bp, synthetic construct
  misc_feature 1..23: note = HLA-A targeting gRNA
  source 1..23: mol_type = other DNA
agggtccggagtattgggacggg

SEQ ID NO: 751 - DNA, 23 bp, synthetic construct
  misc_feature 1..23: note = HLA-A targeting gRNA
  source 1..23: mol_type = other DNA
gagggtccggagtattgggacgg

SEQ ID NO: 752 - DNA, 23 bp, synthetic construct
  misc_feature 1..23: note = HLA-A targeting gRNA
  source 1..23: mol_type = other DNA
ggaccctcctgctctatccacgg

SEQ ID NO: 753 - DNA, 23 bp, synthetic construct
  misc_feature 1..23: note = HLA-A targeting gRNA
  source 1..23: mol_type = other DNA
gtggatagagcaggagggtccgg

SEQ ID NO: 754 - DNA, 23 bp, synthetic construct
  misc_feature 1..23: note = HLA-A targeting gRNA
  source 1..23: mol_type = other DNA
agactcaccgagtggacctgggg

SEQ ID NO: 755 - DNA, 23 bp, synthetic construct
  misc_feature 1..23: note = HLA-A targeting gRNA
  source 1..23: mol_type = other DNA
cactcggtgagtctgtgagtggg

SEQ ID NO: 756 - DNA, 23 bp, synthetic construct
  misc_feature 1..23: note = HLA-A targeting gRNA
  source 1..23: mol_type = other DNA
cagactcaccgagtggacctggg

SEQ ID NO: 757 - DNA, 23 bp, synthetic construct
  misc_feature 1..23: note = HLA-A targeting gRNA
  source 1..23: mol_type = other DNA
ccactcacagactcaccgagtgg

SEQ ID NO: 758 - DNA, 23 bp, synthetic construct
  misc_feature 1..23: note = HLA-A targeting gRNA
  source 1..23: mol_type = other DNA
ccactcggtgagtctgtgagtgg

SEQ ID NO: 759 - DNA, 23 bp, synthetic construct
  misc_feature 1..23: note = HLA-A targeting gRNA
  source 1..23: mol_type = other DNA
tcggactggcgcttcctccgcgg

SEQ ID NO: 760 - DNA, 23 bp, synthetic construct
  misc_feature 1..23: note = HLA-A targeting gRNA
  source 1..23: mol_type = other DNA
gcagccatacatcctctggacgg

SEQ ID NO: 761 - DNA, 23 bp, synthetic construct
  misc_feature 1..23: note = HLA-A targeting gRNA
  source 1..23: mol_type = other DNA
tctcaactgctccgccacatggg

SEQ ID NO: 762 - DNA, 23 bp, synthetic construct
  misc_feature 1..23: note = HLA-A targeting gRNA
  source 1..23: mol_type = other DNA
accctcatgctgcacatggcagg

SEQ ID NO: 763 - DNA, 23 bp, synthetic construct
  misc_feature 1..23: note = HLA-A targeting gRNA
  source 1..23: mol_type = other DNA
acctgccatgtgcagcatgaggg

SEQ ID NO: 764 - DNA, 23 bp, synthetic construct
  misc_feature 1..23: note = HLA-A targeting gRNA
  source 1..23: mol_type = other DNA
cacctgccatgtgcagcatgagg

SEQ ID NO: 765 - DNA, 23 bp, synthetic construct
  misc_feature 1..23: note = HLA-A targeting gRNA
  source 1..23: mol_type = other DNA
ggaggaccagacccaggacacgg

SEQ ID NO: 766 - DNA, 23 bp, synthetic construct
  misc_feature 1..23: note = HLA-A targeting gRNA
  source 1..23: mol_type = other DNA
ggatggggaggaccagacccagg

SEQ ID NO: 767 - DNA, 23 bp, synthetic construct
  misc_feature 1..23: note = HLA-A targeting gRNA
  source 1..23: mol_type = other DNA
gacctggcagcgggatggggagg

SEQ ID NO: 768 - DNA, 23 bp, synthetic construct
  misc_feature 1..23: note = HLA-A targeting gRNA
  source 1..23: mol_type = other DNA
agatcacactgacctggcagcgg

SEQ ID NO: 769 - DNA, 23 bp, synthetic construct
  misc_feature 1..23: note = HLA-A targeting gRNA
  source 1..23: mol_type = other DNA
gatcacactgacctggcagcggg

SEQ ID NO: 770 - DNA, 23 bp, synthetic construct
  misc_feature 1..23: note = HLA-A targeting gRNA
  source 1..23: mol_type = other DNA
aggtcagtgtgatctccgcaggg

SEQ ID NO: 771 - DNA, 23 bp, synthetic construct
  misc_feature 1..23: note = HLA-A targeting gRNA
  source 1..23: mol_type = other DNA
aagcccctcaccctgagatgggg

SEQ ID NO: 772 - DNA, 23 bp, synthetic construct
  misc_feature 1..23: note = HLA-A targeting gRNA
  source 1..23: mol_type = other DNA
ctgcggagatcacactgacctgg

SEQ ID NO: 773 - DNA, 23 bp, synthetic construct
  misc_feature 1..23: note = HLA-A targeting gRNA
  source 1..23: mol_type = other DNA
cagcaatgatgcccacgatgggg

SEQ ID NO: 774 - DNA, 23 bp, synthetic construct
  misc_feature 1..23: note = HLA-A targeting gRNA
  source 1..23: mol_type = other DNA
ccagcaatgatgcccacgatggg

SEQ ID NO: 775 - DNA, 23 bp, synthetic construct
  misc_feature 1..23: note = HLA-A targeting gRNA
  source 1..23: mol_type = other DNA
gccagcaatgatgcccacgatgg

SEQ ID NO: 776 - DNA, 23 bp, synthetic construct
  misc_feature 1..23: note = HLA-A targeting gRNA
  source 1..23: mol_type = other DNA
ggatggaaccttccagaagtggg

SEQ ID NO: 777 - DNA, 23 bp, synthetic construct
  misc_feature 1..23: note = HLA-A targeting gRNA
  source 1..23: mol_type = other DNA
gggatggaaccttccagaagtgg

SEQ ID NO: 778 - DNA, 23 bp, synthetic construct
  misc_feature 1..23: note = HLA-A targeting gRNA
  source 1..23: mol_type = other DNA
atgcccacgatggggatggtggg

SEQ ID NO: 779 - DNA, 23 bp, synthetic construct
  misc_feature 1..23: note = HLA-A targeting gRNA
  source 1..23: mol_type = other DNA
cagcccaccatccccatcgtggg

SEQ ID NO: 780 - DNA, 23 bp, synthetic construct
  misc_feature 1..23: note = HLA-A targeting gRNA
  source 1..23: mol_type = other DNA
ccagcccaccatccccatcgtgg

SEQ ID NO: 781 - DNA, 23 bp, synthetic construct
  misc_feature 1..23: note = HLA-A targeting gRNA
  source 1..23: mol_type = other DNA
gatgcccacgatggggatggtgg

SEQ ID NO: 782 - DNA, 23 bp, synthetic construct
  misc_feature 1..23: note = HLA-A targeting gRNA
  source 1..23: mol_type = other DNA
cagggcccagcacctcagggtgg

SEQ ID NO: 783 - DNA, 23 bp, synthetic construct
  misc_feature 1..23: note = HLA-A targeting gRNA
  source 1..23: mol_type = other DNA
aatgatgcccacgatggggatgg

SEQ ID NO: 784 - DNA, 23 bp, synthetic construct
  misc_feature 1..23: note = HLA-A targeting gRNA
  source 1..23: mol_type = other DNA
ggccctgacccagacctgggcgg

SEQ ID NO: 785 - DNA, 23 bp, synthetic construct
  misc_feature 1..23: note = HLA-A targeting gRNA
  source 1..23: mol_type = other DNA
gacccaggacacggagctcgtgg

SEQ ID NO: 786 - DNA, 23 bp, synthetic construct
  misc_feature 1..23: note = HLA-A targeting gRNA
  source 1..23: mol_type = other DNA
acacggagctcgtggagaccagg

SEQ ID NO: 787 - DNA, 23 bp, synthetic construct
  misc_feature 1..23: note = HLA-A targeting gRNA
  source 1..23: mol_type = other DNA
cgtggagaccaggcctgcagggg

SEQ ID NO: 788 - DNA, 23 bp, synthetic construct
  misc_feature 1..23: note = HLA-A targeting gRNA
  source 1..23: mol_type = other DNA
tcgtggagaccaggcctgcaggg

SEQ ID NO: 789 - DNA, 23 bp, synthetic construct
  misc_feature 1..23: note = HLA-A targeting gRNA
  source 1..23: mol_type = other DNA
agctgtgatcactggagctgtgg

SEQ ID NO: 790 - DNA, 23 bp, synthetic construct
  misc_feature 1..23: note = HLA-A targeting gRNA
  source 1..23: mol_type = other DNA
aaaaggagggagctactctcagg

SEQ ID NO: 791 - DNA, 23 bp, synthetic construct
  misc_feature 1..23: note = HLA-A targeting gRNA
  source 1..23: mol_type = other DNA
atgtggaggaggaagagctcagg

SEQ ID NO: 792 - DNA, 23 bp, synthetic construct
  misc_feature 1..23: note = HLA-A targeting gRNA
  source 1..23: mol_type = other DNA
gtgtctctcacagcttgtaaagg

SEQ ID NO: 793 - DNA, 23 bp, synthetic construct
  misc_feature 1..23: note = HLA-A targeting gRNA
  source 1..23: mol_type = other DNA
gagagacacatcagagccctggg

SEQ ID NO: 794 - DNA, 23 bp, synthetic construct
  misc_feature 1..23: note = HLA-A targeting gRNA
  source 1..23: mol_type = other DNA
ctccgcagggtagaagctcaggg

SEQ ID NO: 795 - DNA, 23 bp, synthetic construct
  misc_feature 1..23: note = HLA-A targeting gRNA
  source 1..23: mol_type = other DNA
ggccctgagcttctaccctgcgg

SEQ ID NO: 796 - DNA, 23 bp, synthetic construct
  misc_feature 1..23: note = HLA-A targeting gRNA
  source 1..23: mol_type = other DNA
gctcagggcccagcacctcaggg

SEQ ID NO: 797 - DNA, 23 bp, synthetic construct
  misc_feature 1..23: note = HLA-A targeting gRNA
  source 1..23: mol_type = other DNA
tatctctgctcctgtccagaagg

SEQ ID NO: 798 - DNA, 23 bp, synthetic construct
  misc_feature 1..23: note = HLA-A targeting gRNA
  source 1..23: mol_type = other DNA
agtagcaggacgagggttcgggg

SEQ ID NO: 799 - DNA, 23 bp, synthetic construct
  misc_feature 1..23: note = HLA-A targeting gRNA
  source 1..23: mol_type = other DNA
ccccgagagtagcaggacgaggg

SEQ ID NO: 800 - DNA, 23 bp, synthetic construct
  misc_feature 1..23: note = HLA-A targeting gRNA
  source 1..23: mol_type = other DNA
ccctcgtcctgctactctcgggg

SEQ ID NO: 801 - DNA, 23 bp, synthetic construct
  misc_feature 1..23: note = HLA-A targeting gRNA
  source 1..23: mol_type = other DNA
cctcgtcctgctactctcggggg

SEQ ID NO: 802 - DNA, 23 bp, synthetic construct
  misc_feature 1..23: note = HLA-A targeting gRNA
  source 1..23: mol_type = other DNA
ctgtggtcgctgctgtgatgtgg

SEQ ID NO: 803 - DNA, 23 bp, synthetic construct
  misc_feature 1..23: note = HLA-A targeting gRNA
  source 1..23: mol_type = other DNA
tcgctgctgtgatgtggaggagg

SEQ ID NO: 804 - DNA, 23 bp, synthetic construct
  misc_feature 1..23: note = HLA-A targeting gRNA
  source 1..23: mol_type = other DNA
tggtcgctgctgtgatgtggagg

SEQ ID NO: 805 - DNA, 23 bp, synthetic construct
  misc_feature 1..23: note = HLA-A targeting gRNA
  source 1..23: mol_type = other DNA
cacagccgcccacttctggaagg

SEQ ID NO: 806 - DNA, 23 bp, synthetic construct
  misc_feature 1..23: note = HLA-A targeting gRNA
  source 1..23: mol_type = other DNA
ccagaagtgggcggctgtggtgg

SEQ ID NO: 807 - DNA, 23 bp, synthetic construct
  misc_feature 1..23: note = HLA-A targeting gRNA
  source 1..23: mol_type = other DNA
tggaaccttccagaagtgggcgg

SEQ ID NO: 808 - DNA, 23 bp, synthetic construct
  misc_feature 1..23: note = HLA-A targeting gRNA
  source 1..23: mol_type = other DNA
tcacagctccaaagagaaccagg

SEQ ID NO: 809 - DNA, 23 bp, synthetic construct
  misc_feature 1..23: note = HLA-A targeting gRNA
  source 1..23: mol_type = other DNA
ctgaccatgaagccaccctgagg

SEQ ID NO: 810 - DNA, 23 bp, synthetic construct
  misc_feature 1..23: note = HLA-A targeting gRNA
  source 1..23: mol_type = other DNA
gcaaaccctcatgctgcacatgg

SEQ ID NO: 811 - DNA, 23 bp, synthetic construct
  misc_feature 1..23: note = HLA-A targeting gRNA
  source 1..23: mol_type = other DNA
tgaagccaccctgaggtgctggg

SEQ ID NO: 812 - DNA, 23 bp, synthetic construct
  misc_feature 1..23: note = HLA-A targeting gRNA
  source 1..23: mol_type = other DNA
ggtgagtcatatgcgttttgggg

SEQ ID NO: 813 - DNA, 23 bp, synthetic construct
  misc_feature 1..23: note = HLA-A targeting gRNA
  source 1..23: mol_type = other DNA
gtgagtcatatgcgttttggggg

SEQ ID NO: 814 - DNA, 23 bp, synthetic construct
  misc_feature 1..23: note = HLA-A targeting gRNA
  source 1..23: mol_type = other DNA
cttcatggtcagagacagcgtgg

SEQ ID NO: 815 - DNA, 23 bp, synthetic construct
  misc_feature 1..23: note = HLA-A targeting gRNA
  source 1..23: mol_type = other DNA
tctggccctgacccagacctggg

SEQ ID NO: 816 - DNA, 23 bp, synthetic construct
  misc_feature 1..23: note = HLA-A targeting gRNA
  source 1..23: mol_type = other DNA
caggctgcaagtaagtatgaagg

SEQ ID NO: 817 - DNA, 23 bp, synthetic construct
  misc_feature 1..23: note = HLA-A targeting gRNA
  source 1..23: mol_type = other DNA
cagtcacaagtcacaggggaagg

SEQ ID NO: 818 - DNA, 23 bp, synthetic construct
  misc_feature 1..23: note = HLA-A targeting gRNA
  source 1..23: mol_type = other DNA
ccagcagtcacaagtcacagggg

SEQ ID NO: 819 - DNA, 23 bp, synthetic construct
  misc_feature 1..23: note = HLA-A targeting gRNA
  source 1..23: mol_type = other DNA
cccctgtgacttgtgactgctgg

SEQ ID NO: 820 - DNA, 23 bp, synthetic construct
  misc_feature 1..23: note = HLA-A targeting gRNA
  source 1..23: mol_type = other DNA
ctttacaaaagagtaagtgctgg

SEQ ID NO: 821 - DNA, 23 bp, synthetic construct
  misc_feature 1..23: note = HLA-A targeting gRNA
  source 1..23: mol_type = other DNA
gagatttcttgtctcactgaggg

SEQ ID NO: 822 - DNA, 23 bp, synthetic construct
  misc_feature 1..23: note = HLA-A targeting gRNA
  source 1..23: mol_type = other DNA
gaggttcctctaggaccttaagg

SEQ ID NO: 823 - DNA, 23 bp, synthetic construct
  misc_feature 1..23: note = HLA-A targeting gRNA
  source 1..23: mol_type = other DNA
gctgcaagtaagtatgaaggagg

SEQ ID NO: 824 - DNA, 23 bp, synthetic construct
  misc_feature 1..23: note = HLA-A targeting gRNA
  source 1..23: mol_type = other DNA
tgagatttcttgtctcactgagg

SEQ ID NO: 825 - DNA, 23 bp, synthetic construct
  misc_feature 1..23: note = HLA-A targeting gRNA
  source 1..23: mol_type = other DNA
gcctaaactgaaaatgaaaccgg

SEQ ID NO: 826 - DNA, 23 bp, synthetic construct
  misc_feature 1..23: note = HLA-A targeting gRNA
  source 1..23: mol_type = other DNA
tctggtcctgacctgagtggagg

SEQ ID NO: 827 - DNA, 23 bp, synthetic construct
  misc_feature 1..23: note = HLA-A targeting gRNA
  source 1..23: mol_type = other DNA
aagagtaagtgctggcacacagg

SEQ ID NO: 828 - DNA, 23 bp, synthetic construct
  misc_feature 1..23: note = HLA-A targeting gRNA
  source 1..23: mol_type = other DNA
agagtaagtgctggcacacaggg

SEQ ID NO: 829 - DNA, 23 bp, synthetic construct
  misc_feature 1..23: note = HLA-A targeting gRNA
  source 1..23: mol_type = other DNA
ccaggcagtgacagtgcccaggg

SEQ ID NO: 830 - DNA, 23 bp, synthetic construct
  misc_feature 1..23: note = HLA-A targeting gRNA
  source 1..23: mol_type = other DNA
cccaggcagtgacagtgcccagg

SEQ ID NO: 831 - DNA, 23 bp, synthetic construct
  misc_feature 1..23: note = HLA-A targeting gRNA
  source 1..23: mol_type = other DNA
ccctgggcactgtcactgcctgg

SEQ ID NO: 832 - DNA, 23 bp, synthetic construct
  misc_feature 1..23: note = HLA-A targeting gRNA
  source 1..23: mol_type = other DNA
cctgggcactgtcactgcctggg

SEQ ID NO: 833 - DNA, 23 bp, synthetic construct
  misc_feature 1..23: note = HLA-A targeting gRNA
  source 1..23: mol_type = other DNA
ctgggcactgtcactgcctgggg

SEQ ID NO: 834 - DNA, 23 bp, synthetic construct
  misc_feature 1..23: note = HLA-A targeting gRNA
  source 1..23: mol_type = other DNA
caattgtctcccctccttgtggg

SEQ ID NO: 835 - DNA, 23 bp, synthetic construct
  misc_feature 1..23: note = HLA-A targeting gRNA
  source 1..23: mol_type = other DNA
cacaaggaggggagacaattggg

SEQ ID NO: 836 - DNA, 23 bp, synthetic construct
  misc_feature 1..23: note = HLA-A targeting gRNA
  source 1..23: mol_type = other DNA
caggaggattcctctccctcagg

SEQ ID NO: 837 - DNA, 23 bp, synthetic construct
  misc_feature 1..23: note = HLA-A targeting gRNA
  source 1..23: mol_type = other DNA
ccaattgtctcccctccttgtgg

SEQ ID NO: 838 - DNA, 23 bp, synthetic construct
  misc_feature 1..23: note = HLA-A targeting gRNA
  source 1..23: mol_type = other DNA
ccacaaggaggggagacaattgg

SEQ ID NO: 839 - DNA, 23 bp, synthetic construct
  misc_feature 1..23: note = HLA-A targeting gRNA
  source 1..23: mol_type = other DNA
cgggctggcctcccacaaggagg

SEQ ID NO: 840 - DNA, 23 bp, synthetic construct
  misc_feature 1..23: note = HLA-A targeting gRNA
  source 1..23: mol_type = other DNA
ctccttgtgggaggccagcccgg

SEQ ID NO: 841 - DNA, 23 bp, synthetic construct
  misc_feature 1..23: note = HLA-A targeting gRNA
  source 1..23: mol_type = other DNA
ctgagggagaggaatcctcctgg

SEQ ID NO: 842 - DNA, 23 bp, synthetic construct
  misc_feature 1..23: note = HLA-A targeting gRNA
  source 1..23: mol_type = other DNA
ggaacctcagagtcactctctgg

SEQ ID NO: 843 - DNA, 23 bp, synthetic construct
  misc_feature 1..23: note = HLA-A targeting gRNA
  source 1..23: mol_type = other DNA
ggctggcctcccacaaggagggg

SEQ ID NO: 844 - DNA, 23 bp, synthetic construct
  misc_feature 1..23: note = HLA-A targeting gRNA
  source 1..23: mol_type = other DNA
gggctggcctcccacaaggaggg

SEQ ID NO: 845 - DNA, 23 bp, synthetic construct
  misc_feature 1..23: note = HLA-A targeting gRNA
  source 1..23: mol_type = other DNA
tcccgggctggcctcccacaagg

SEQ ID NO: 846 - DNA, 23 bp, synthetic construct
  misc_feature 1..23: note = HLA-A targeting gRNA
  source 1..23: mol_type = other DNA
tccttgtgggaggccagcccggg

SEQ ID NO: 847 - DNA, 23 bp, synthetic construct
  misc_feature 1..23: note = HLA-A targeting gRNA
  source 1..23: mol_type = other DNA
tgagggagaggaatcctcctggg

SEQ ID NO: 848 - DNA, 23 bp, synthetic construct
  misc_feature 1..23: note = HLA-A targeting gRNA
  source 1..23: mol_type = other DNA
tgtaccagagagtgactctgagg

SEQ ID NO: 849 - DNA, 23 bp, synthetic construct
  misc_feature 1..23: note = HLA-A targeting gRNA
  source 1..23: mol_type = other DNA
ttgtctcccctccttgtgggagg

SEQ ID NO: 850 - DNA, 23 bp, synthetic construct
  misc_feature 1..23: note = HLA-A targeting gRNA
  source 1..23: mol_type = other DNA
aggcctgagaggaaaagtcacgg

SEQ ID NO: 851 - DNA, 23 bp, synthetic construct
  misc_feature 1..23: note = HLA-A targeting gRNA
  source 1..23: mol_type = other DNA
cagcctggacacaggcacctggg

SEQ ID NO: 852 - DNA, 23 bp, synthetic construct
  misc_feature 1..23: note = HLA-A targeting gRNA
  source 1..23: mol_type = other DNA
ccagcctggacacaggcacctgg

SEQ ID NO: 853 - DNA, 23 bp, synthetic construct
  misc_feature 1..23: note = HLA-A targeting gRNA
  source 1..23: mol_type = other DNA
ccaggtgcctgtgtccaggctgg

SEQ ID NO: 854 - DNA, 23 bp, synthetic construct
  misc_feature 1..23: note = HLA-A targeting gRNA
  source 1..23: mol_type = other DNA
tatcccaggtgcctgtgtccagg

SEQ ID NO: 855 - DNA, 23 bp, synthetic construct
  misc_feature 1..23: note = HLA-A targeting gRNA
  source 1..23: mol_type = other DNA
acttctggtcctgacctgagtgg

SEQ ID NO: 856 - DNA, 23 bp, synthetic construct
  misc_feature 1..23: note = HLA-A targeting gRNA
  source 1..23: mol_type = other DNA
aaggcgcctgggcctctcccggg

SEQ ID NO: 857 - DNA, 23 bp, synthetic construct
  misc_feature 1..23: note = HLA-A targeting gRNA
  source 1..23: mol_type = other DNA
atctcggacccggagactgtggg

SEQ ID NO: 858 - DNA, 23 bp, synthetic construct
  misc_feature 1..23: note = HLA-A targeting gRNA
  source 1..23: mol_type = other DNA
gatctcggacccggagactgtgg

SEQ ID NO: 859 - DNA, 23 bp, synthetic construct
  misc_feature 1..23: note = HLA-A targeting gRNA
  source 1..23: mol_type = other DNA
ggaaaagaggggaaggtgagggg

SEQ ID NO: 860 - DNA, 23 bp, synthetic construct
  misc_feature 1..23: note = HLA-A targeting gRNA
  source 1..23: mol_type = other DNA
gggaaaagaggggaaggtgaggg

SEQ ID NO: 861 - DNA, 23 bp, synthetic construct
  misc_feature 1..23: note = HLA-A targeting gRNA
  source 1..23: mol_type = other DNA
tgggaaaagaggggaaggtgagg

SEQ ID NO: 862 - DNA, 23 bp, synthetic construct
  misc_feature 1..23: note = HLA-A targeting gRNA
  source 1..23: mol_type = other DNA
ctccctccttaccccatctcagg

SEQ ID NO: 863 - DNA, 23 bp, synthetic construct
  misc_feature 1..23: note = HLA-A targeting gRNA
  source 1..23: mol_type = other DNA
tccctccttaccccatctcaggg

SEQ ID NO: 864 - DNA, 23 bp, synthetic construct
  misc_feature 1..23: note = HLA-A targeting gRNA
  source 1..23: mol_type = other DNA
agcagagaacaaggcctgagagg

SEQ ID NO: 865 - DNA, 23 bp, synthetic construct
  misc_feature 1..23: note = HLA-A targeting gRNA
  source 1..23: mol_type = other DNA
aggggccctgaccctgctaaagg

SEQ ID NO: 866 - DNA, 23 bp, synthetic construct
  misc_feature 1..23: note = HLA-A targeting gRNA
  source 1..23: mol_type = other DNA
cttcacactcaatgtgtgtgggg

SEQ ID NO: 867 - DNA, 23 bp, synthetic construct
  misc_feature 1..23: note = HLA-A targeting gRNA
  source 1..23: mol_type = other DNA
gcttcacactcaatgtgtgtggg

SEQ ID NO: 868 - DNA, 23 bp, synthetic construct
  misc_feature 1..23: note = HLA-A targeting gRNA
  source 1..23: mol_type = other DNA
tgagtgtgaagcagagaacaagg

SEQ ID NO: 869 - DNA, 23 bp, synthetic construct
  misc_feature 1..23: note = HLA-A targeting gRNA
  source 1..23: mol_type = other DNA
tgcttcacactcaatgtgtgtgg

SEQ ID NO: 870 - DNA, 23 bp, synthetic construct
  misc_feature 1..23: note = HLA-A targeting gRNA
  source 1..23: mol_type = other DNA
ttcacactcaatgtgtgtggggg

SEQ ID NO: 871 - DNA, 23 bp, synthetic construct
  misc_feature 1..23: note = HLA-A targeting gRNA
  source 1..23: mol_type = other DNA
ctgtgtccaggctggtgtctggg

SEQ ID NO: 872 - DNA, 23 bp, synthetic construct
  misc_feature 1..23: note = HLA-A targeting gRNA
  source 1..23: mol_type = other DNA
ggatgtattgagcatgcgatggg

SEQ ID NO: 873 - DNA, 23 bp, synthetic construct
  misc_feature 1..23: note = HLA-A targeting gRNA
  source 1..23: mol_type = other DNA
tggatgtattgagcatgcgatgg

SEQ ID NO: 874 - DNA, 23 bp, synthetic construct
  misc_feature 1..23: note = HLA-A targeting gRNA
  source 1..23: mol_type = other DNA
gtcctccccatcccgctgccagg

SEQ ID NO: 875 - DNA, 23 bp, synthetic construct
  misc_feature 1..23: note = HLA-A targeting gRNA
  source 1..23: mol_type = other DNA
cccggtttcattttcagtttagg

SEQ ID NO: 876 - DNA, 23 bp, synthetic construct
  misc_feature 1..23: note = HLA-A targeting gRNA
  source 1..23: mol_type = other DNA
cctaaactgaaaatgaaaccggg

SEQ ID NO: 877 - DNA, 23 bp, synthetic construct
  misc_feature 1..23: note = HLA-A targeting gRNA
  source 1..23: mol_type = other DNA
acagaacccagacaccagcctgg

SEQ ID NO: 878 - DNA, 23 bp, synthetic construct
  misc_feature 1..23: note = HLA-A targeting gRNA
  source 1..23: mol_type = other DNA
accctgagatggggtaaggaggg

SEQ ID NO: 879 - DNA, 23 bp, synthetic construct
  misc_feature 1..23: note = HLA-A targeting gRNA
  source 1..23: mol_type = other DNA
caccctgagatggggtaaggagg

SEQ ID NO: 880 - DNA, 23 bp, synthetic construct
  misc_feature 1..23: note = HLA-A targeting gRNA
  source 1..23: mol_type = other DNA
cctcaccctgagatggggtaagg

SEQ ID NO: 881 - DNA, 23 bp, synthetic construct
  misc_feature 1..23: note = HLA-A targeting gRNA
  source 1..23: mol_type = other DNA
ccttaccccatctcagggtgagg

SEQ ID NO: 882 - DNA, 23 bp, synthetic construct
  misc_feature 1..23: note = HLA-A targeting gRNA
  source 1..23: mol_type = other DNA
cttaccccatctcagggtgaggg

SEQ ID NO: 883 - DNA, 23 bp, synthetic construct
  misc_feature 1..23: note = HLA-A targeting gRNA
  source 1..23: mol_type = other DNA
ttaccccatctcagggtgagggg

SEQ ID NO: 884 - DNA, 23 bp, synthetic construct
  misc_feature 1..23: note = HLA-A targeting gRNA
  source 1..23: mol_type = other DNA
aaatgtgtgactgcagacccagg

SEQ ID NO: 885 - DNA, 23 bp, synthetic construct
  misc_feature 1..23: note = HLA-A targeting gRNA
  source 1..23: mol_type = other DNA
ggtctgcagtcacacatttctgg

SEQ ID NO: 886 - DNA, 23 bp, synthetic construct
  misc_feature 1..23: note = HLA-A targeting gRNA
  source 1..23: mol_type = other DNA
ctccctcaggaccagagggaggg

SEQ ID NO: 887 - DNA, 23 bp, synthetic construct
  misc_feature 1..23: note = HLA-A targeting gRNA
  source 1..23: mol_type = other DNA
tcactctctggtacaggatctgg

SEQ ID NO: 888 - DNA, 23 bp, synthetic construct
  misc_feature 1..23: note = HLA-A targeting gRNA
  source 1..23: mol_type = other DNA
tcagagtcactctctggtacagg

SEQ ID NO: 889 - DNA, 23 bp, synthetic construct
  misc_feature 1..23: note = HLA-A targeting gRNA
  source 1..23: mol_type = other DNA
tccctctggtcctgagggagagg

SEQ ID NO: 890 - DNA, 23 bp, synthetic construct
  misc_feature 1..23: note = HLA-A targeting gRNA
  source 1..23: mol_type = other DNA
tcctctccctcaggaccagaggg

SEQ ID NO: 891 - DNA, 23 bp, synthetic construct
  misc_feature 1..23: note = HLA-A targeting gRNA
  source 1..23: mol_type = other DNA
tctccctcaggaccagagggagg

SEQ ID NO: 892 - DNA, 23 bp, synthetic construct
  misc_feature 1..23: note = HLA-A targeting gRNA
  source 1..23: mol_type = other DNA
ttcctctccctcaggaccagagg

SEQ ID NO: 893 - DNA, 23 bp, synthetic construct
  misc_feature 1..23: note = HLA-A targeting gRNA
  source 1..23: mol_type = other DNA
caagcccctcaccctgagatggg

SEQ ID NO: 894 - DNA, 23 bp, synthetic construct
  misc_feature 1..23: note = HLA-A targeting gRNA
  source 1..23: mol_type = other DNA
catctcagggtgaggggcttggg

SEQ ID NO: 895 - DNA, 23 bp, synthetic construct
  misc_feature 1..23: note = HLA-A targeting gRNA
  source 1..23: mol_type = other DNA
ccaagcccctcaccctgagatgg

SEQ ID NO: 896 - DNA, 23 bp, synthetic construct
  misc_feature 1..23: note = HLA-A targeting gRNA
  source 1..23: mol_type = other DNA
ccatctcagggtgaggggcttgg

SEQ ID NO: 897 - DNA, 23 bp, synthetic construct
  misc_feature 1..23: note = HLA-A targeting gRNA
  source 1..23: mol_type = other DNA
ccagacaccagcctggacacagg

SEQ ID NO: 898 - DNA, 23 bp, synthetic construct
  misc_feature 1..23: note = HLA-A targeting gRNA
  source 1..23: mol_type = other DNA
cctgtgtccaggctggtgtctgg

SEQ ID NO: 899 - DNA, 23 bp, synthetic construct
  misc_feature 1..23: note = HLA-A targeting gRNA
  source 1..23: mol_type = other DNA
ctccgcagatacctggagaacgg

SEQ ID NO: 900 - DNA, 23 bp, synthetic construct
  misc_feature 1..23: note = HLA-A targeting gRNA
  source 1..23: mol_type = other DNA
tgtcctgtgagataccagaaagg

SEQ ID NO: 901 - DNA, 23 bp, synthetic construct
  misc_feature 1..23: note = HLA-A targeting gRNA
  source 1..23: mol_type = other DNA
aatgtgtgactgcagacccaggg

SEQ ID NO: 902 - DNA, 23 bp, synthetic construct
  misc_feature 1..23: note = HLA-A targeting gRNA
  source 1..23: mol_type = other DNA
gagaccaggcctgcaggggatgg

SEQ ID NO: 903 - DNA, 23 bp, synthetic construct
  misc_feature 1..23: note = HLA-A targeting gRNA
  source 1..23: mol_type = other DNA
actgacctggcagcgggatgggg

SEQ ID NO: 904 - DNA, 23 bp, synthetic construct
  misc_feature 1..23: note = HLA-A targeting gRNA
  source 1..23: mol_type = other DNA
cactgacctggcagcgggatggg

SEQ ID NO: 905 - DNA, 23 bp, synthetic construct
  misc_feature 1..23: note = HLA-A targeting gRNA
  source 1..23: mol_type = other DNA
acactgacctggcagcgggatgg

SEQ ID NO: 906 - DNA, 23 bp, synthetic construct
  misc_feature 1..23: note = HLA-A targeting gRNA
  source 1..23: mol_type = other DNA
gagggttcggggcgccatgacgg

SEQ ID NO: 907 - DNA, 23 bp, synthetic construct
  misc_feature 1..23: note = HLA-A targeting gRNA
  source 1..23: mol_type = other DNA
gcgtctccttcccgttctccagg

SEQ ID NO: 908 - DNA, 23 bp, synthetic construct
  misc_feature 1..23: note = HLA-A targeting gRNA
  source 1..23: mol_type = other DNA
tccgcagatacctggagaacggg

SEQ ID NO: 909 - DNA, 23 bp, synthetic construct
  misc_feature 1..23: note = HLA-A targeting gRNA
  source 1..23: mol_type = other DNA
caggtcagtgtgatctccgcagg

SEQ ID NO: 910 - DNA, 23 bp, synthetic construct
  misc_feature 1..23: note = HLA-A targeting gRNA
  source 1..23: mol_type = other DNA
ctcttggaccgcggcggacatgg

SEQ ID NO: 911 - DNA, 23 bp, synthetic construct
  misc_feature 1..23: note = HLA-A targeting gRNA
  source 1..23: mol_type = other DNA
cccatcgtgggcatcattgctgg

SEQ ID NO: 912 - DNA, 23 bp, synthetic construct
  misc_feature 1..23: note = HLA-A targeting gRNA
  source 1..23: mol_type = other DNA
gctgcagcgcacgggtaccaggg

SEQ ID NO: 913 - DNA, 23 bp, synthetic construct
  misc_feature 1..23: note = HLA-A targeting gRNA
  source 1..23: mol_type = other DNA
cacgggtaccaggggccacgggg

SEQ ID NO: 914 - DNA, 23 bp, synthetic construct
  misc_feature 1..23: note = HLA-A targeting gRNA
  source 1..23: mol_type = other DNA
cgcacgggtaccaggggccacgg

SEQ ID NO: 915 - DNA, 23 bp, synthetic construct
  misc_feature 1..23: note = HLA-A targeting gRNA
  source 1..23: mol_type = other DNA
ctgcagcgcacgggtaccagggg

SEQ ID NO: 916 - DNA, 23 bp, synthetic construct
  misc_feature 1..23: note = HLA-A targeting gRNA
  source 1..23: mol_type = other DNA
gcacgggtaccaggggccacggg

SEQ ID NO: 917 - DNA, 23 bp, synthetic construct
  misc_feature 1..23: note = HLA-A targeting gRNA
  source 1..23: mol_type = other DNA
cgctgcagcgcacgggtaccagg

SEQ ID NO: 918 - DNA, 23 bp, synthetic construct
  misc_feature 1..23: note = HLA-A targeting gRNA
  source 1..23: mol_type = other DNA
atgaaggaggctgatgcctgagg

SEQ ID NO: 919 - DNA, 23 bp, synthetic construct
  misc_feature 1..23: note = HLA-A targeting gRNA
  source 1..23: mol_type = other DNA
acagaagatgtggctagaggagg

SEQ ID NO: 920 - DNA, 23 bp, synthetic construct
  misc_feature 1..23: note = HLA-A targeting gRNA
  source 1..23: mol_type = other DNA
atcttctgtgggatctgaccagg

SEQ ID NO: 921 - DNA, 23 bp, synthetic construct
  misc_feature 1..23: note = HLA-A targeting gRNA
  source 1..23: mol_type = other DNA
cccacagaagatgtggctagagg

SEQ ID NO: 922 - DNA, 23 bp, synthetic construct
  misc_feature 1..23: note = HLA-A targeting gRNA
  source 1..23: mol_type = other DNA
cctctagccacatcttctgtggg

SEQ ID NO: 923 - DNA, 23 bp, synthetic construct
  misc_feature 1..23: note = HLA-A targeting gRNA
  source 1..23: mol_type = other DNA
gtcagatcccacagaagatgtgg

SEQ ID NO: 924 - DNA, 23 bp, synthetic construct
  misc_feature 1..23: note = HLA-A targeting gRNA
  source 1..23: mol_type = other DNA
tcctctagccacatcttctgtgg

SEQ ID NO: 925 - DNA, 23 bp, synthetic construct
  misc_feature 1..23: note = HLA-A targeting gRNA
  source 1..23: mol_type = other DNA
gggctccccgcggccgggccggg

SEQ ID NO: 926 - DNA, 23 bp, synthetic construct
  misc_feature 1..23: note = HLA-A targeting gRNA
  source 1..23: mol_type = other DNA
aggctgatgcctgaggtccttgg

SEQ ID NO: 927 - DNA, 23 bp, synthetic construct
  misc_feature 1..23: note = HLA-A targeting gRNA
  source 1..23: mol_type = other DNA
cacaatatcccaaggacctcagg

SEQ ID NO: 928 - DNA, 23 bp, synthetic construct
  misc_feature 1..23: note = HLA-A targeting gRNA
  source 1..23: mol_type = other DNA
ggctgatgcctgaggtccttggg

SEQ ID NO: 929 - DNA, 23 bp, synthetic construct
  misc_feature 1..23: note = HLA-A targeting gRNA
  source 1..23: mol_type = other DNA
aggcattttgcatctgtcatggg

SEQ ID NO: 930 - DNA, 23 bp, synthetic construct
  misc_feature 1..23: note = HLA-A targeting gRNA
  source 1..23: mol_type = other DNA
caggcattttgcatctgtcatgg

SEQ ID NO: 931 - DNA, 23 bp, synthetic construct
  misc_feature 1..23: note = HLA-A targeting gRNA
  source 1..23: mol_type = other DNA
cccagcagtcacaagtcacaggg

SEQ ID NO: 932 - DNA, 23 bp, synthetic construct
  misc_feature 1..23: note = HLA-A targeting gRNA
  source 1..23: mol_type = other DNA
ccctgtgacttgtgactgctggg

SEQ ID NO: 933 - DNA, 23 bp, synthetic construct
  misc_feature 1..23: note = HLA-A targeting gRNA
  source 1..23: mol_type = other DNA
tggaaggttccatcccctgcagg

SEQ ID NO: 934 - DNA, 23 bp, synthetic construct
  misc_feature 1..23: note = HLA-A targeting gRNA
  source 1..23: mol_type = other DNA
aagcggggctccccgcggccggg

SEQ ID NO: 935 - DNA, 23 bp, synthetic construct
  misc_feature 1..23: note = HLA-A targeting gRNA
  source 1..23: mol_type = other DNA
gaagcggggctccccgcggccgg

SEQ ID NO: 936 - DNA, 23 bp, synthetic construct
  misc_feature 1..23: note = HLA-A targeting gRNA
  source 1..23: mol_type = other DNA
ggggctccccgcggccgggccgg

SEQ ID NO: 937 - DNA, 23 bp, synthetic construct
  misc_feature 1..23: note = HLA-A targeting gRNA
  source 1..23: mol_type = other DNA
aattgtgtcagagagcagggcgg

SEQ ID NO: 938 - DNA, 23 bp, synthetic construct
  misc_feature 1..23: note = HLA-A targeting gRNA
  source 1..23: mol_type = other DNA
cctgctctctgacacaattaagg

SEQ ID NO: 939 - DNA, 23 bp, synthetic construct
  misc_feature 1..23: note = HLA-A targeting gRNA
  source 1..23: mol_type = other DNA
ccttaattgtgtcagagagcagg

SEQ ID NO: 940 - DNA, 23 bp, synthetic construct
  misc_feature 1..23: note = HLA-A targeting gRNA
  source 1..23: mol_type = other DNA
ctgctctctgacacaattaaggg

SEQ ID NO: 941 - DNA, 23 bp, synthetic construct
  misc_feature 1..23: note = HLA-A targeting gRNA
  source 1..23: mol_type = other DNA
cttaattgtgtcagagagcaggg

SEQ ID NO: 942 - DNA, 23 bp, synthetic construct
  misc_feature 1..23: note = HLA-A targeting gRNA
  source 1..23: mol_type = other DNA
agtgctggcacacagggcccagg

SEQ ID NO: 943 - DNA, 23 bp, synthetic construct
  misc_feature 1..23: note = HLA-A targeting gRNA
  source 1..23: mol_type = other DNA
ctagaggaggaattgtggggtgg

SEQ ID NO: 944 - DNA, 23 bp, synthetic construct
  misc_feature 1..23: note = HLA-A targeting gRNA
  source 1..23: mol_type = other DNA
ctggcacacagggcccaggctgg

SEQ ID NO: 945 - DNA, 23 bp, synthetic construct
  misc_feature 1..23: note = HLA-A targeting gRNA
  source 1..23: mol_type = other DNA
gtggctagaggaggaattgtggg

SEQ ID NO: 946 - DNA, 23 bp, synthetic construct
  misc_feature 1..23: note = HLA-A targeting gRNA
  source 1..23: mol_type = other DNA
tggcacacagggcccaggctggg

SEQ ID NO: 947 - DNA, 23 bp, synthetic construct
  misc_feature 1..23: note = HLA-A targeting gRNA
  source 1..23: mol_type = other DNA
tggctagaggaggaattgtgggg

SEQ ID NO: 948 - DNA, 23 bp, synthetic construct
  misc_feature 1..23: note = HLA-A targeting gRNA
  source 1..23: mol_type = other DNA
tgtggctagaggaggaattgtgg

SEQ ID NO: 949 - DNA, 23 bp, synthetic construct
  misc_feature 1..23: note = HLA-A targeting gRNA
  source 1..23: mol_type = other DNA
ctcggggtcccgcggcttcgggg

SEQ ID NO: 950 - DNA, 23 bp, synthetic construct
  misc_feature 1..23: note = HLA-A targeting gRNA
  source 1..23: mol_type = other DNA
gtctcggggtcccgcggcttcgg

SEQ ID NO: 951 - DNA, 23 bp, synthetic construct
  misc_feature 1..23: note = HLA-A targeting gRNA
  source 1..23: mol_type = other DNA
tctcggggtcccgcggcttcggg

SEQ ID NO: 952 - DNA, 23 bp, synthetic construct
  misc_feature 1..23: note = HLA-A targeting gRNA
  source 1..23: mol_type = other DNA
gacttgtgactgctgggatcagg

SEQ ID NO: 953 - DNA, 23 bp, synthetic construct
  misc_feature 1..23: note = HLA-A targeting gRNA
  source 1..23: mol_type = other DNA
tcccagcagtcacaagtcacagg

SEQ ID NO: 954 - DNA, 23 bp, synthetic construct
  misc_feature 1..23: note = HLA-A targeting gRNA
  source 1..23: mol_type = other DNA
ggttccatcccctgcaggcctgg

SEQ ID NO: 955 - DNA, 23 bp, synthetic construct
  misc_feature 1..23: note = HLA-A targeting gRNA
  source 1..23: mol_type = other DNA
ctcccaaacacaatatcccaagg

SEQ ID NO: 956 - DNA, 23 bp, synthetic construct
  misc_feature 1..23: note = HLA-A targeting gRNA
  source 1..23: mol_type = other DNA
ggtccttgggatattgtgtttgg

SEQ ID NO: 957 - DNA, 23 bp, synthetic construct
  misc_feature 1..23: note = HLA-A targeting gRNA
  source 1..23: mol_type = other DNA
gtccttgggatattgtgtttggg

SEQ ID NO: 958 - DNA, 23 bp, synthetic construct
  misc_feature 1..23: note = HLA-A targeting gRNA
  source 1..23: mol_type = other DNA
tccgtgtcccggcccggccgcgg

SEQ ID NO: 959 - DNA, 23 bp, synthetic construct
  misc_feature 1..23: note = HLA-A targeting gRNA
  source 1..23: mol_type = other DNA
cccgcggccgggccgggacacgg

SEQ ID NO: 960 - DNA, 23 bp, synthetic construct
  misc_feature 1..23: note = HLA-A targeting gRNA
  source 1..23: mol_type = other DNA
ccgtgtcccggcccggccgcggg

SEQ ID NO: 961 - DNA, 23 bp, synthetic construct
  misc_feature 1..23: note = HLA-A targeting gRNA
  source 1..23: mol_type = other DNA
acaggatctggaaacccaggagg

SEQ ID NO: 962 - DNA, 23 bp, synthetic construct
  misc_feature 1..23: note = HLA-A targeting gRNA
  source 1..23: mol_type = other DNA
ggtacaggatctggaaacccagg

SEQ ID NO: 963 - DNA, 23 bp, synthetic construct
  misc_feature 1..23: note = HLA-A targeting gRNA
  source 1..23: mol_type = other DNA
ttgggtgttgggcggaacagtgg

SEQ ID NO: 964 - DNA, 23 bp, synthetic construct
  misc_feature 1..23: note = HLA-A targeting gRNA
  source 1..23: mol_type = other DNA
cgacgccgcgagccagaggatgg

SEQ ID NO: 965 - DNA, 23 bp, synthetic construct
  misc_feature 1..23: note = HLA-A targeting gRNA
  source 1..23: mol_type = other DNA
cgagccagaggatggagccgcgg

SEQ ID NO: 966 - DNA, 23 bp, synthetic construct
  misc_feature 1..23: note = HLA-A targeting gRNA
  source 1..23: mol_type = other DNA
gagccagaggatggagccgcggg

SEQ ID NO: 967 - DNA, 23 bp, synthetic construct
  misc_feature 1..23: note = HLA-A targeting gRNA
  source 1..23: mol_type = other DNA
cctgggcctctcccggggcaagg

SEQ ID NO: 968 - DNA, 23 bp, synthetic construct
  misc_feature 1..23: note = HLA-A targeting gRNA
  source 1..23: mol_type = other DNA
ccttgccccgggagaggcccagg

SEQ ID NO: 969 - DNA, 23 bp, synthetic construct
  misc_feature 1..23: note = HLA-A targeting gRNA
  source 1..23: mol_type = other DNA
cgagacccttgccccgggagagg

SEQ ID NO: 970 - DNA, 23 bp, synthetic construct
  misc_feature 1..23: note = HLA-A targeting gRNA
  source 1..23: mol_type = other DNA
ctctcccggggcaagggtctcgg

SEQ ID NO: 971 - DNA, 23 bp, synthetic construct
  misc_feature 1..23: note = HLA-A targeting gRNA
  source 1..23: mol_type = other DNA
ctgggcctctcccggggcaaggg

SEQ ID NO: 972 - DNA, 23 bp, synthetic construct
  misc_feature 1..23: note = HLA-A targeting gRNA
  source 1..23: mol_type = other DNA
cccaacacccaacacacatcagg

SEQ ID NO: 973 - DNA, 23 bp, synthetic construct
  misc_feature 1..23: note = HLA-A targeting gRNA
  source 1..23: mol_type = other DNA
cctgatgtgtgttgggtgttggg

SEQ ID NO: 974 - DNA, 23 bp, synthetic construct
  misc_feature 1..23: note = HLA-A targeting gRNA
  source 1..23: mol_type = other DNA
gcctgatgtgtgttgggtgttgg

SEQ ID NO: 975 - DNA, 23 bp, synthetic construct
  misc_feature 1..23: note = HLA-A targeting gRNA
  source 1..23: mol_type = other DNA
tggagggcctgatgtgtgttggg

SEQ ID NO: 976 - DNA, 23 bp, synthetic construct
  misc_feature 1..23: note = HLA-A targeting gRNA
  source 1..23: mol_type = other DNA
ctcccggggcaagggtctcgggg

SEQ ID NO: 977 - DNA, 23 bp, synthetic construct
  misc_feature 1..23: note = HLA-A targeting gRNA
  source 1..23: mol_type = other DNA
gaccccgagacccttgccccggg

SEQ ID NO: 978 - DNA, 23 bp, synthetic construct
  misc_feature 1..23: note = HLA-A targeting gRNA
  source 1..23: mol_type = other DNA
gcaagggtctcggggtcccgcgg

SEQ ID NO: 979 - DNA, 23 bp, synthetic construct
  misc_feature 1..23: note = HLA-A targeting gRNA
  source 1..23: mol_type = other DNA
ggaccccgagacccttgccccgg

SEQ ID NO: 980 - DNA, 23 bp, synthetic construct
  misc_feature 1..23: note = HLA-A targeting gRNA
  source 1..23: mol_type = other DNA
tctcccggggcaagggtctcggg

SEQ ID NO: 981 - DNA, 23 bp, synthetic construct
  misc_feature 1..23: note = HLA-A targeting gRNA
  source 1..23: mol_type = other DNA
aggcgcctgggcctctcccgggg

SEQ ID NO: 982 - DNA, 23 bp, synthetic construct
  misc_feature 1..23: note = HLA-A targeting gRNA
  source 1..23: mol_type = other DNA
ctccctccttttctatctgtggg

SEQ ID NO: 983 - DNA, 23 bp, synthetic construct
  misc_feature 1..23: note = HLA-A targeting gRNA
  source 1..23: mol_type = other DNA
cttcccacagatagaaaaggagg

SEQ ID NO: 984 - DNA, 23 bp, synthetic construct
  misc_feature 1..23: note = HLA-A targeting gRNA
  source 1..23: mol_type = other DNA
ttcccacagatagaaaaggaggg

SEQ ID NO: 985 - DNA, 23 bp, synthetic construct
  misc_feature 1..23: note = HLA-A targeting gRNA
  source 1..23: mol_type = other DNA
tttcttcccacagatagaaaagg

SEQ ID NO: 986 - DNA, 23 bp, synthetic construct
  misc_feature 1..23: note = HLA-A targeting gRNA
  source 1..23: mol_type = other DNA
aaccactcatcagtattcgaggg

SEQ ID NO: 987 - DNA, 23 bp, synthetic construct
  misc_feature 1..23: note = HLA-A targeting gRNA
  source 1..23: mol_type = other DNA
atccctcgaatactgatgagtgg

SEQ ID NO: 988 - DNA, 23 bp, synthetic construct
  misc_feature 1..23: note = HLA-A targeting gRNA
  source 1..23: mol_type = other DNA
gaaccactcatcagtattcgagg

SEQ ID NO: 989 - DNA, 23 bp, synthetic construct
  misc_feature 1..23: note = HLA-A targeting gRNA
  source 1..23: mol_type = other DNA
gaggaaaagtcacgggcccaagg

SEQ ID NO: 990 - DNA, 23 bp, synthetic construct
  misc_feature 1..23: note = HLA-A targeting gRNA
  source 1..23: mol_type = other DNA
ggcccgtgacttttcctctcagg

SEQ ID NO: 991 - DNA, 23 bp, synthetic construct
  misc_feature 1..23: note = HLA-A targeting gRNA
  source 1..23: mol_type = other DNA
ggcctgagaggaaaagtcacggg

SEQ ID NO: 992 - DNA, 23 bp, synthetic construct
  misc_feature 1..23: note = HLA-A targeting gRNA
  source 1..23: mol_type = other DNA
aaacatgaagaaagcaggtgtgg

SEQ ID NO: 993 - DNA, 23 bp, synthetic construct
  misc_feature 1..23: note = HLA-A targeting gRNA
  source 1..23: mol_type = other DNA
aacatgaagaaagcaggtgtggg

SEQ ID NO: 994 - DNA, 23 bp, synthetic construct
  misc_feature 1..23: note = HLA-A targeting gRNA
  source 1..23: mol_type = other DNA
aagaaagcaggtgtgggtcctgg

SEQ ID NO: 995 - DNA, 23 bp, synthetic construct
  misc_feature 1..23: note = HLA-A targeting gRNA
  source 1..23: mol_type = other DNA
gtcacaggggaaggtccctgagg

SEQ ID NO: 996 - DNA, 23 bp, synthetic construct
  misc_feature 1..23: note = HLA-A targeting gRNA
  source 1..23: mol_type = other DNA
tcaggaaacatgaagaaagcagg

SEQ ID NO: 997 - DNA, 23 bp, synthetic construct
  misc_feature 1..23: note = HLA-A targeting gRNA
  source 1..23: mol_type = other DNA
aaaggcgcctgggcctctcccgg

SEQ ID NO: 998 - DNA, 23 bp, synthetic construct
  misc_feature 1..23: note = HLA-A targeting gRNA
  source 1..23: mol_type = other DNA
tggaggaggaagagctcaggtgg

SEQ ID NO: 999 - DNA, 23 bp, synthetic construct
  misc_feature 1..23: note = HLA-A targeting gRNA
  source 1..23: mol_type = other DNA
ttaagggataaaatctctgaagg

SEQ ID NO: 1000 - DNA, 23 bp, synthetic construct
  misc_feature 1..23: note = HLA-A targeting gRNA
  source 1..23: mol_type = other DNA
cacgatggggatggtgggctggg

SEQ ID NO: 1001 - DNA, 23 bp, synthetic construct
  misc_feature 1..23: note = HLA-A targeting gRNA
  source 1..23: mol_type = other DNA
ccacgatggggatggtgggctgg

SEQ ID NO: 1002 - DNA, 23 bp, synthetic construct
  misc_feature 1..23: note = HLA-A targeting gRNA
  source 1..23: mol_type = other DNA
gtgagacagctgccttgtgtggg

SEQ ID NO: 1003 - DNA, 23 bp, synthetic construct
  misc_feature 1..23: note = HLA-A targeting gRNA
  source 1..23: mol_type = other DNA
tgtgagacagctgccttgtgtgg

SEQ ID NO: 1004 - DNA, 23 bp, synthetic construct
  misc_feature 1..23: note = HLA-A targeting gRNA
  source 1..23: mol_type = other DNA
aatctgtccttcattttaacagg

SEQ ID NO: 1005 - DNA, 23 bp, synthetic construct
  misc_feature 1..23: note = HLA-A targeting gRNA
  source 1..23: mol_type = other DNA
taaagcacctgttaaaatgaagg

SEQ ID NO: 1006 - DNA, 23 bp, synthetic construct
  misc_feature 1..23: note = HLA-A targeting gRNA
  source 1..23: mol_type = other DNA
ctgaaaatgaaaccgggtaaagg

SEQ ID NO: 1007 - DNA, 23 bp, synthetic construct
  misc_feature 1..23: note = HLA-A targeting gRNA
  source 1..23: mol_type = other DNA
ctgccttgtgtgggactgagagg

SEQ ID NO: 1008 - DNA, 23 bp, synthetic construct
  misc_feature 1..23: note = HLA-A targeting gRNA
  source 1..23: mol_type = other DNA
ttgcctctcagtcccacacaagg

SEQ ID NO: 1009 - DNA, 23 bp, synthetic construct
  misc_feature 1..23: note = HLA-A targeting gRNA
  source 1..23: mol_type = other DNA
gaggcccaggcgcctttacccgg

SEQ ID NO: 1010 - DNA, 23 bp, synthetic construct
  misc_feature 1..23: note = HLA-A targeting gRNA
  source 1..23: mol_type = other DNA
gaaaccgggtaaaggcgcctggg

SEQ ID NO: 1011 - DNA, 23 bp, synthetic construct
  misc_feature 1..23: note = HLA-A targeting gRNA
  source 1..23: mol_type = other DNA
tgaaaccgggtaaaggcgcctgg

SEQ ID NO: 1012 - DNA, 23 bp, synthetic construct
  misc_feature 1..23: note = HLA-A targeting gRNA
  source 1..23: mol_type = other DNA
gcgcccgcggctccatcctctgg

SEQ ID NO: 1013 - DNA, 23 bp, synthetic construct
  misc_feature 1..23: note = HLA-A targeting gRNA
  source 1..23: mol_type = other DNA
acccgcccaggtctgggtcaggg

SEQ ID NO: 1014 - DNA, 23 bp, synthetic construct
  misc_feature 1..23: note = HLA-A targeting gRNA
  source 1..23: mol_type = other DNA
cacccgcccaggtctgggtcagg

SEQ ID NO: 1015 - DNA, 23 bp, synthetic construct
  misc_feature 1..23: note = HLA-A targeting gRNA
  source 1..23: mol_type = other DNA
cagacctgggcgggtgagtgcgg

SEQ ID NO: 1016 - DNA, 23 bp, synthetic construct
  misc_feature 1..23: note = HLA-A targeting gRNA
  source 1..23: mol_type = other DNA
cgcactcacccgcccaggtctgg

SEQ ID NO: 1017 - DNA, 23 bp, synthetic construct
  misc_feature 1..23: note = HLA-A targeting gRNA
  source 1..23: mol_type = other DNA
gaccccgcactcacccgcccagg

SEQ ID NO: 1018 - DNA, 23 bp, synthetic construct
  misc_feature 1..23: note = HLA-A targeting gRNA
  source 1..23: mol_type = other DNA
gacctgggcgggtgagtgcgggg

SEQ ID NO: 1019 - DNA, 23 bp, synthetic construct
  misc_feature 1..23: note = HLA-A targeting gRNA
  source 1..23: mol_type = other DNA
gcactcacccgcccaggtctggg

SEQ ID NO: 1020 - DNA, 23 bp, synthetic construct
  misc_feature 1..23: note = HLA-A targeting gRNA
  source 1..23: mol_type = other DNA
gccctgacccagacctgggcggg

SEQ ID NO: 1021 - DNA, 23 bp, synthetic construct
  misc_feature 1..23: note = HLA-A targeting gRNA
  source 1..23: mol_type = other DNA
agacctgggcgggtgagtgcggg

SEQ ID NO: 1022 - DNA, 23 bp, synthetic construct
  misc_feature 1..23: note = HLA-A targeting gRNA
  source 1..23: mol_type = other DNA
atgtttcctgatcccgccctggg

SEQ ID NO: 1023 - DNA, 23 bp, synthetic construct
  misc_feature 1..23: note = HLA-A targeting gRNA
  source 1..23: mol_type = other DNA
catgtttcctgatcccgccctgg

SEQ ID NO: 1024 - DNA, 23 bp, synthetic construct
  misc_feature 1..23: note = HLA-A targeting gRNA
  source 1..23: mol_type = other DNA
gtgtgactgcagacccagggcgg

SEQ ID NO: 1025 - DNA, 23 bp, synthetic construct
  misc_feature 1..23: note = HLA-A targeting gRNA
  source 1..23: mol_type = other DNA
tgcagacccagggcgggatcagg

SEQ ID NO: 1026 - DNA, 23 bp, synthetic construct
  misc_feature 1..23: note = HLA-A targeting gRNA
  source 1..23: mol_type = other DNA
tgtgactgcagacccagggcggg

SEQ ID NO: 1027 - DNA, 23 bp, synthetic construct
  misc_feature 1..23: note = HLA-A targeting gRNA
  source 1..23: mol_type = other DNA
cgtgggcatcattgctggcctgg

SEQ ID NO: 1028 - DNA, 23 bp, synthetic construct
  misc_feature 1..23: note = HLA-A targeting gRNA
  source 1..23: mol_type = other DNA
agtagccgcgcagggtccccagg

SEQ ID NO: 1029 - DNA, 23 bp, synthetic construct
  misc_feature 1..23: note = HLA-A targeting gRNA
  source 1..23: mol_type = other DNA
tcatcccccacggacgggccagg

SEQ ID NO: 1030 - DNA, 23 bp, synthetic construct
  misc_feature 1..23: note = HLA-A targeting gRNA
  source 1..23: mol_type = other DNA
gcgatcagggaggcgccccgtgg

SEQ ID NO: 1031 - DNA, 23 bp, synthetic construct
  misc_feature 1..23: note = HLA-A targeting gRNA
  source 1..23: mol_type = other DNA
tctggttgtagtagccgcgcagg

SEQ ID NO: 1032 - DNA, 23 bp, synthetic construct
  misc_feature 1..23: note = HLA-A targeting gRNA
  source 1..23: mol_type = other DNA
gtgaccccggcccggggcgcagg

SEQ ID NO: 1033 - DNA, 23 bp, synthetic construct
  misc_feature 1..23: note = HLA-A targeting gRNA
  source 1..23: mol_type = other DNA
caagtcacaaagggaagggcagg

SEQ ID NO: 1034 - DNA, 23 bp, synthetic construct
  misc_feature 1..23: note = HLA-A targeting gRNA
  source 1..23: mol_type = other DNA
cggtgagtgaccccggcccgggg

SEQ ID NO: 1035 - DNA, 23 bp, synthetic construct
  misc_feature 1..23: note = HLA-A targeting gRNA
  source 1..23: mol_type = other DNA
cgtgacctgcgccccgggccggg

SEQ ID NO: 1036 - DNA, 23 bp, synthetic construct
  misc_feature 1..23: note = HLA-A targeting gRNA
  source 1..23: mol_type = other DNA
gtgacctgcgccccgggccgggg

SEQ ID NO: 1037 - DNA, 23 bp, synthetic construct
  misc_feature 1..23: note = HLA-A targeting gRNA
  source 1..23: mol_type = other DNA
tcgtgacctgcgccccgggccgg

SEQ ID NO: 1038 - DNA, 23 bp, synthetic construct
  misc_feature 1..23: note = HLA-A targeting gRNA
  source 1..23: mol_type = other DNA
gatgtgtgttgggtgttgggcgg

SEQ ID NO: 1039 - DNA, 23 bp, synthetic construct
  misc_feature 1..23: note = HLA-A targeting gRNA
  source 1..23: mol_type = other DNA
tagaggaggaattgtggggtggg

SEQ ID NO: 1040 - DNA, 23 bp, synthetic construct
  misc_feature 1..23: note = HLA-A targeting gRNA
  source 1..23: mol_type = other DNA
cgagctccgtgtcctgggtctgg

SEQ ID NO: 1041 - DNA, 23 bp, synthetic construct
  misc_feature 1..23: note = HLA-A targeting gRNA
  source 1..23: mol_type = other DNA
ctccacgagctccgtgtcctggg

SEQ ID NO: 1042 - DNA, 23 bp, synthetic construct
  misc_feature 1..23: note = HLA-A targeting gRNA
  source 1..23: mol_type = other DNA
tctccacgagctccgtgtcctgg

SEQ ID NO: 1043 - DNA, 23 bp, synthetic construct
  misc_feature 1..23: note = HLA-A targeting gRNA
  source 1..23: mol_type = other DNA
gggaggcgccccgtggcccctgg

SEQ ID NO: 1044 - DNA, 23 bp, synthetic construct
  misc_feature 1..23: note = HLA-A targeting gRNA
  source 1..23: mol_type = other DNA
ggagtggctccgcagatacctgg

SEQ ID NO: 1045 - DNA, 23 bp, synthetic construct
  misc_feature 1..23: note = HLA-A targeting gRNA
  source 1..23: mol_type = other DNA
ctcgtggagaccaggcctgcagg

SEQ ID NO: 1046 - DNA, 23 bp, synthetic construct
  misc_feature 1..23: note = HLA-A targeting gRNA
  source 1..23: mol_type = other DNA
agtggacacagctgtgctatggg

SEQ ID NO: 1047 - DNA, 23 bp, synthetic construct
  misc_feature 1..23: note = HLA-A targeting gRNA
  source 1..23: mol_type = other DNA
cagtggacacagctgtgctatgg

SEQ ID NO: 1048 - DNA, 23 bp, synthetic construct
  misc_feature 1..23: note = HLA-A targeting gRNA
  source 1..23: mol_type = other DNA
ggtagaacaaaaacagaacctgg

SEQ ID NO: 1049 - DNA, 23 bp, synthetic construct
  misc_feature 1..23: note = HLA-A targeting gRNA
  source 1..23: mol_type = other DNA
gtggacacagctgtgctatgggg

SEQ ID NO: 1050 - DNA, 23 bp, synthetic construct
  misc_feature 1..23: note = HLA-A targeting gRNA
  source 1..23: mol_type = other DNA
ttctgtttttgttctaccccagg

SEQ ID NO: 1051 - DNA, 23 bp, synthetic construct
  misc_feature 1..23: note = HLA-A targeting gRNA
  source 1..23: mol_type = other DNA
atattgtgtttgggagcccatgg

SEQ ID NO: 1052 - DNA, 23 bp, synthetic construct
  misc_feature 1..23: note = HLA-A targeting gRNA
  source 1..23: mol_type = other DNA
attgtgtttgggagcccatgggg

SEQ ID NO: 1053 - DNA, 23 bp, synthetic construct
  misc_feature 1..23: note = HLA-A targeting gRNA
  source 1..23: mol_type = other DNA
tattgtgtttgggagcccatggg

SEQ ID NO: 1054 - DNA, 23 bp, synthetic construct
  misc_feature 1..23: note = HLA-A targeting gRNA
  source 1..23: mol_type = other DNA
ttgtgtttgggagcccatggggg

SEQ ID NO: 1055 - DNA, 23 bp, synthetic construct
  misc_feature 1..23: note = HLA-A targeting gRNA
  source 1..23: mol_type = other DNA
tcttcaagtcacaaagggaaggg

SEQ ID NO: 1056 - DNA, 23 bp, synthetic construct
  misc_feature 1..23: note = HLA-A targeting gRNA
  source 1..23: mol_type = other DNA
ttcttcaagtcacaaagggaagg

SEQ ID NO: 1057 - DNA, 23 bp, synthetic construct
  misc_feature 1..23: note = HLA-A targeting gRNA
  source 1..23: mol_type = other DNA
gtcactcaccggcctcgctctgg

SEQ ID NO: 1058 - DNA, 23 bp, synthetic construct
  misc_feature 1..23: note = HLA-A targeting gRNA
  source 1..23: mol_type = other DNA
agccgcgccgggaggagggtcgg

SEQ ID NO: 1059 - DNA, 23 bp, synthetic construct
  misc_feature 1..23: note = HLA-A targeting gRNA
  source 1..23: mol_type = other DNA
agggttcttcaagtcacaaaggg

SEQ ID NO: 1060 - DNA, 23 bp, synthetic construct
  misc_feature 1..23: note = HLA-A targeting gRNA
  source 1..23: mol_type = other DNA
cagggttcttcaagtcacaaagg

SEQ ID NO: 1061 - DNA, 23 bp, synthetic construct
  misc_feature 1..23: note = HLA-A targeting gRNA
  source 1..23: mol_type = other DNA
ggctctgggaaaagaggggaagg

SEQ ID NO: 1062 - DNA, 23 bp, synthetic construct
  misc_feature 1..23: note = HLA-A targeting gRNA
  source 1..23: mol_type = other DNA
ggcgccatgacggccatcctcgg

SEQ ID NO: 1063 - DNA, 23 bp, synthetic construct
  misc_feature 1..23: note = HLA-A targeting gRNA
  source 1..23: mol_type = other DNA
gctccctccttttctatctgtgg

SEQ ID NO: 1064 - DNA, 23 bp, synthetic construct
  misc_feature 1..23: note = HLA-A targeting gRNA
  source 1..23: mol_type = other DNA
gggagaatctgagtcccggtggg

SEQ ID NO: 1065 - DNA, 23 bp, synthetic construct
  misc_feature 1..23: note = HLA-A targeting gRNA
  source 1..23: mol_type = other DNA
cgggtgagtgcggggtcgggagg

SEQ ID NO: 1066 - DNA, 23 bp, synthetic construct
  misc_feature 1..23: note = HLA-A targeting gRNA
  source 1..23: mol_type = other DNA
gggcgggtgagtgcggggtcggg

SEQ ID NO: 1067 - DNA, 23 bp, synthetic construct
  misc_feature 1..23: note = HLA-A targeting gRNA
  source 1..23: mol_type = other DNA
gggtgagtgcggggtcgggaggg

SEQ ID NO: 1068 - DNA, 23 bp, synthetic construct
  misc_feature 1..23: note = HLA-A targeting gRNA
  source 1..23: mol_type = other DNA
tgggcgggtgagtgcggggtcgg

SEQ ID NO: 1069 - DNA, 23 bp, synthetic construct
  misc_feature 1..23: note = HLA-A targeting gRNA
  source 1..23: mol_type = other DNA
ggggagaatctgagtcccggtgg

SEQ ID NO: 1070 - DNA, 23 bp, synthetic construct
  misc_feature 1..23: note = HLA-A targeting gRNA
  source 1..23: mol_type = other DNA
tctggggagaatctgagtcccgg

SEQ ID NO: 1071 - DNA, 23 bp, synthetic construct
  misc_feature 1..23: note = HLA-A targeting gRNA
  source 1..23: mol_type = other DNA
tgagtcccggtgggtgcgtgcgg

SEQ ID NO: 1072 - DNA, 23 bp, synthetic construct
  misc_feature 1..23: note = HLA-A targeting gRNA
  source 1..23: mol_type = other DNA
ccctgactttgtttctgcaaagg

SEQ ID NO: 1073 - DNA, 23 bp, synthetic construct
  misc_feature 1..23: note = HLA-A targeting gRNA
  source 1..23: mol_type = other DNA
cctttgcagaaacaaagtcaggg

SEQ ID NO: 1074 - DNA, 23 bp, synthetic construct
  misc_feature 1..23: note = HLA-A targeting gRNA
  source 1..23: mol_type = other DNA
gcctttgcagaaacaaagtcagg

SEQ ID NO: 1075 - DNA, 23 bp, synthetic construct
  misc_feature 1..23: note = HLA-A targeting gRNA
  source 1..23: mol_type = other DNA
cgcctgtagatctcccgggctgg

SEQ ID NO: 1076 - DNA, 23 bp, synthetic construct
  misc_feature 1..23: note = HLA-A targeting gRNA
  source 1..23: mol_type = other DNA
cgggagatctacaggcgatcagg

SEQ ID NO: 1077 - DNA, 23 bp, synthetic construct
  misc_feature 1..23: note = HLA-A targeting gRNA
  source 1..23: mol_type = other DNA
ctgatcgcctgtagatctcccgg

SEQ ID NO: 1078 - DNA, 23 bp, synthetic construct
  misc_feature 1..23: note = HLA-A targeting gRNA
  source 1..23: mol_type = other DNA
ggccagcccgggagatctacagg

SEQ ID NO: 1079 - DNA, 23 bp, synthetic construct
  misc_feature 1..23: note = HLA-A targeting gRNA
  source 1..23: mol_type = other DNA
tgatcgcctgtagatctcccggg

SEQ ID NO: 1080 - DNA, 23 bp, synthetic construct
  misc_feature 1..23: note = HLA-A targeting gRNA
  source 1..23: mol_type = other DNA
gccgcgccgggaggagggtcggg

SEQ ID NO: 1081 - DNA, 23 bp, synthetic construct
  misc_feature 1..23: note = HLA-A targeting gRNA
  source 1..23: mol_type = other DNA
ccaggtcgcccacagtctccggg

SEQ ID NO: 1082 - DNA, 23 bp, synthetic construct
  misc_feature 1..23: note = HLA-A targeting gRNA
  source 1..23: mol_type = other DNA
cccggagactgtgggcgacctgg

SEQ ID NO: 1083 - DNA, 23 bp, synthetic construct
  misc_feature 1..23: note = HLA-A targeting gRNA
  source 1..23: mol_type = other DNA
gccaggtcgcccacagtctccgg

SEQ ID NO: 1084 - DNA, 23 bp, synthetic construct
  misc_feature 1..23: note = HLA-A targeting gRNA
  source 1..23: mol_type = other DNA
tgagagacacatcagagccctgg

SEQ ID NO: 1085 - DNA, 23 bp, synthetic construct
  misc_feature 1..23: note = HLA-A targeting gRNA
  source 1..23: mol_type = other DNA
gcgacctggcccgtccgtggggg

SEQ ID NO: 1086 - DNA, 23 bp, synthetic construct
  misc_feature 1..23: note = HLA-A targeting gRNA
  source 1..23: mol_type = other DNA
ggcgacctggcccgtccgtgggg

SEQ ID NO: 1087 - DNA, 23 bp, synthetic construct
  misc_feature 1..23: note = HLA-A targeting gRNA
  source 1..23: mol_type = other DNA
gggcgacctggcccgtccgtggg

SEQ ID NO: 1088 - DNA, 23 bp, synthetic construct
  misc_feature 1..23: note = HLA-A targeting gRNA
  source 1..23: mol_type = other DNA
tgggcgacctggcccgtccgtgg

SEQ ID NO: 1089 - DNA, 23 bp, synthetic construct
  misc_feature 1..23: note = HLA-A targeting gRNA
  source 1..23: mol_type = other DNA
gcgaggccggtgagtgaccccgg

SEQ ID NO: 1090 - DNA, 23 bp, synthetic construct
  misc_feature 1..23: note = HLA-A targeting gRNA
  source 1..23: mol_type = other DNA
agatctacaggcgatcagggagg

SEQ ID NO: 1091 - DNA, 23 bp, synthetic construct
  misc_feature 1..23: note = HLA-A targeting gRNA
  source 1..23: mol_type = other DNA
gcccgaccctcctcccggcgcgg

SEQ ID NO: 1092 - DNA, 23 bp, synthetic construct
  misc_feature 1..23: note = HLA-A targeting gRNA
  source 1..23: mol_type = other DNA
gggagatctacaggcgatcaggg

SEQ ID NO: 1093 - DNA, 23 bp, synthetic construct
  misc_feature 1..23: note = HLA-A targeting gRNA
  source 1..23: mol_type = other DNA
cgccctccctctggtcctgaggg

SEQ ID NO: 1094 - DNA, 23 bp, synthetic construct
  misc_feature 1..23: note = HLA-A targeting gRNA
  source 1..23: mol_type = other DNA
ctagaatatcgccctccctctgg

SEQ ID NO: 1095 - DNA, 23 bp, synthetic construct
  misc_feature 1..23: note = HLA-A targeting gRNA
  source 1..23: mol_type = other DNA
ggagggcgatattctagtgttgg

SEQ ID NO: 1096 - DNA, 23 bp, synthetic construct
  misc_feature 1..23: note = HLA-A targeting gRNA
  source 1..23: mol_type = other DNA
tcgccctccctctggtcctgagg

SEQ ID NO: 1097 - DNA, 23 bp, synthetic construct
  misc_feature 1..23: note = HLA-A targeting gRNA
  source 1..23: mol_type = other DNA
acggccatcctcggcgtctgggg

SEQ ID NO: 1098 - DNA, 23 bp, synthetic construct
  misc_feature 1..23: note = HLA-A targeting gRNA
  source 1..23: mol_type = other DNA
gacggccatcctcggcgtctggg

SEQ ID NO: 1099 - DNA, 23 bp, synthetic construct
  misc_feature 1..23: note = HLA-A targeting gRNA
  source 1..23: mol_type = other DNA
tgacggccatcctcggcgtctgg

SEQ ID NO: 1100 - DNA, 23 bp, synthetic construct
  misc_feature 1..23: note = HLA-A targeting gRNA
  source 1..23: mol_type = other DNA
gacgccgaggatggccgtcatgg

SEQ ID NO: 1101 - DNA, 23 bp, synthetic construct
  misc_feature 1..23: note = HLA-A targeting gRNA
  source 1..23: mol_type = other DNA
ttctccccagacgccgaggatgg

SEQ ID NO: 1102 - DNA, 23 bp, synthetic construct
  misc_feature 1..23: note = HLA-A targeting gRNA
  source 1..23: mol_type = other DNA
cagattctccccagacgccgagg

SEQ ID NO: 1103 - DNA, 23 bp, synthetic construct
  misc_feature 1..23: note = HLA-A targeting gRNA
  source 1..23: mol_type = other DNA
ctggaaacccgacacccaatggg

SEQ ID NO: 1104 - DNA, 23 bp, synthetic construct
  misc_feature 1..23: note = HLA-A targeting gRNA
  source 1..23: mol_type = other DNA
tctggaaacccgacacccaatgg

SEQ ID NO: 1105 - DNA, 23 bp, synthetic construct
  misc_feature 1..23: note = HLA-A targeting gRNA
  source 1..23: mol_type = other DNA
acacagggcccaggctgggtagg

SEQ ID NO: 1106 - DNA, 23 bp, synthetic construct
  misc_feature 1..23: note = HLA-A targeting gRNA
  source 1..23: mol_type = other DNA
tctcactcccattgggtgtcggg

SEQ ID NO: 1107 - DNA, 23 bp, synthetic construct
  misc_feature 1..23: note = HLA-A targeting gRNA
  source 1..23: mol_type = other DNA
ttctcactcccattgggtgtcgg

SEQ ID NO: 1108 - DNA, 23 bp, synthetic construct
  misc_feature 1..23: note = HLA-A targeting gRNA
  source 1..23: mol_type = other DNA
aaagtccgcacgcacccaccggg

SEQ ID NO: 1109 - DNA, 23 bp, synthetic construct
  misc_feature 1..23: note = HLA-A targeting gRNA
  source 1..23: mol_type = other DNA
taaagtccgcacgcacccaccgg

SEQ ID NO: 1110 - DNA, 23 bp, synthetic construct
  misc_feature 1..23: note = HLA-A targeting gRNA
  source 1..23: mol_type = other DNA
cacccaatgggagtgagaactgg

SEQ ID NO: 1111 - DNA, 23 bp, synthetic construct
  misc_feature 1..23: note = HLA-A targeting gRNA
  source 1..23: mol_type = other DNA
acccaatgggagtgagaactggg

SEQ ID NO: 1112 - DNA, 23 bp, synthetic construct
  misc_feature 1..23: note = HLA-A targeting gRNA
  source 1..23: mol_type = other DNA
gtaggcataatgtgaggaggtgg

SEQ ID NO: 1113 - DNA, 23 bp, synthetic construct
  misc_feature 1..23: note = HLA-A targeting gRNA
  source 1..23: mol_type = other DNA
taggcataatgtgaggaggtggg

SEQ ID NO: 1114 - DNA, 23 bp, synthetic construct
  misc_feature 1..23: note = HLA-A targeting gRNA
  source 1..23: mol_type = other DNA
gcgaccgcgacgacactgattgg

SEQ ID NO: 1115 - DNA, 23 bp, synthetic construct
  misc_feature 1..23: note = HLA-A targeting gRNA
  source 1..23: mol_type = other DNA
acccagttctcactcccattggg

SEQ ID NO: 1116 - DNA, 23 bp, synthetic construct
  misc_feature 1..23: note = HLA-A targeting gRNA
  source 1..23: mol_type = other DNA
gacccagttctcactcccattgg

SEQ ID NO: 1117 - DNA, 23 bp, synthetic construct
  misc_feature 1..23: note = HLA-A targeting gRNA
  source 1..23: mol_type = other DNA
aggcataatgtgaggaggtgggg

SEQ ID NO: 1118 - DNA, 23 bp, synthetic construct
  misc_feature 1..23: note = HLA-A targeting gRNA
  source 1..23: mol_type = other DNA
gaagccaatcagtgtcgtcgcgg

SEQ ID NO: 1119 - DNA, 23 bp, synthetic construct
  misc_feature 1..23: note = HLA-A targeting gRNA
  source 1..23: mol_type = other DNA
agcttgtaaaggtgagagcctgg

SEQ ID NO: 1120 - DNA, 23 bp, synthetic construct
  misc_feature 1..23: note = HLA-A targeting gRNA
  source 1..23: mol_type = other DNA
atggacaggacacctgggatggg

SEQ ID NO: 1121 - DNA, 23 bp, synthetic construct
  misc_feature 1..23: note = HLA-A targeting gRNA
  source 1..23: mol_type = other DNA
caacacacatcaggccctccagg

SEQ ID NO: 1122 - DNA, 23 bp, synthetic construct
  misc_feature 1..23: note = HLA-A targeting gRNA
  source 1..23: mol_type = other DNA
ctggagggcctgatgtgtgttgg

SEQ ID NO: 1123 - DNA, 23 bp, synthetic construct
  misc_feature 1..23: note = HLA-A targeting gRNA
  source 1..23: mol_type = other DNA
tggacaggacacctgggatgggg

SEQ ID NO: 1124 - DNA, 23 bp, synthetic construct
  misc_feature 1..23: note = HLA-A targeting gRNA
  source 1..23: mol_type = other DNA
tgtaaaggtgagagcctggaggg

SEQ ID NO: 1125 - DNA, 23 bp, synthetic construct
  misc_feature 1..23: note = HLA-A targeting gRNA
  source 1..23: mol_type = other DNA
ttgtaaaggtgagagcctggagg

SEQ ID NO: 1126 - DNA, 23 bp, synthetic construct
  misc_feature 1..23: note = HLA-A targeting gRNA
  source 1..23: mol_type = other DNA
acgacactgattggcttctctgg

SEQ ID NO: 1127 - DNA, 23 bp, synthetic construct
  misc_feature 1..23: note = HLA-A targeting gRNA
  source 1..23: mol_type = other DNA
gtgcggggtcgggagggaaacgg

SEQ ID NO: 1128 - DNA, 23 bp, synthetic construct
  misc_feature 1..23: note = HLA-A targeting gRNA
  source 1..23: mol_type = other DNA
tctccgcagggtagaagctcagg

SEQ ID NO: 1129 - DNA, 23 bp, synthetic construct
  misc_feature 1..23: note = HLA-A targeting gRNA
  source 1..23: mol_type = other DNA
gggatggtgggctgggaagacgg

SEQ ID NO: 1130 - DNA, 23 bp, synthetic construct
  misc_feature 1..23: note = HLA-A targeting gRNA
  source 1..23: mol_type = other DNA
gtgggctgggaagacggctctgg

SEQ ID NO: 1131 - DNA, 23 bp, synthetic construct
  misc_feature 1..23: note = HLA-A targeting gRNA
  source 1..23: mol_type = other DNA
tgggctgggaagacggctctggg

SEQ ID NO: 1132 - DNA, 23 bp, synthetic construct
  misc_feature 1..23: note = HLA-A targeting gRNA
  source 1..23: mol_type = other DNA
aaaatctctgaaggaatgacggg

SEQ ID NO: 1133 - DNA, 23 bp, synthetic construct
  misc_feature 1..23: note = HLA-A targeting gRNA
  source 1..23: mol_type = other DNA
aattcgtatctgtcacagtgagg

SEQ ID NO: 1134 - DNA, 23 bp, synthetic construct
  misc_feature 1..23: note = HLA-A targeting gRNA
  source 1..23: mol_type = other DNA
aagtcgctgttccctcttcaggg

SEQ ID NO: 1135 - DNA, 23 bp, synthetic construct
  misc_feature 1..23: note = HLA-A targeting gRNA
  source 1..23: mol_type = other DNA
aatggacaggacacctgggatgg

SEQ ID NO: 1136 - DNA, 23 bp, synthetic construct
  misc_feature 1..23: note = HLA-A targeting gRNA
  source 1..23: mol_type = other DNA
acactcctccagcacacatgtgg

SEQ ID NO: 1137 - DNA, 23 bp, synthetic construct
  misc_feature 1..23: note = HLA-A targeting gRNA
  source 1..23: mol_type = other DNA
acatgtggctatcttgagaatgg

SEQ ID NO: 1138 - DNA, 23 bp, synthetic construct
  misc_feature 1..23: note = HLA-A targeting gRNA
  source 1..23: mol_type = other DNA
acggaataggagattatcccagg

SEQ ID NO: 1139 - DNA, 23 bp, synthetic construct
  misc_feature 1..23: note = HLA-A targeting gRNA
  source 1..23: mol_type = other DNA
agcctctctgacctttagcaggg

SEQ ID NO: 1140 - DNA, 23 bp, synthetic construct
  misc_feature 1..23: note = HLA-A targeting gRNA
  source 1..23: mol_type = other DNA
agctcagggcccagcacctcagg

SEQ ID NO: 1141 - DNA, 23 bp, synthetic construct
  misc_feature 1..23: note = HLA-A targeting gRNA
  source 1..23: mol_type = other DNA
aggacacctgggatggggaaggg

SEQ ID NO: 1142 - DNA, 23 bp, synthetic construct
  misc_feature 1..23: note = HLA-A targeting gRNA
  source 1..23: mol_type = other DNA
aggaccttcaggagggcggttgg

SEQ ID NO: 1143 - DNA, 23 bp, synthetic construct
  misc_feature 1..23: note = HLA-A targeting gRNA
  source 1..23: mol_type = other DNA
aggcagggcacacttctacctgg

SEQ ID NO: 1144 - DNA, 23 bp, synthetic construct
  misc_feature 1..23: note = HLA-A targeting gRNA
  source 1..23: mol_type = other DNA
agtgtgccctgcctcgttactgg

SEQ ID NO: 1145 - DNA, 23 bp, synthetic construct
  misc_feature 1..23: note = HLA-A targeting gRNA
  source 1..23: mol_type = other DNA
caagacttggaggttcctctagg

SEQ ID NO: 1146 - DNA, 23 bp, synthetic construct
  misc_feature 1..23: note = HLA-A targeting gRNA
  source 1..23: mol_type = other DNA
caagatagccacatgtgtgctgg

SEQ ID NO: 1147 - DNA, 23 bp, synthetic construct
  misc_feature 1..23: note = HLA-A targeting gRNA
  source 1..23: mol_type = other DNA
cactgagggttccaagacccagg

SEQ ID NO: 1148 - DNA, 23 bp, synthetic construct
  misc_feature 1..23: note = HLA-A targeting gRNA
  source 1..23: mol_type = other DNA
caggacacctgggatggggaagg

SEQ ID NO: 1149 - DNA, 23 bp, synthetic construct
  misc_feature 1..23: note = HLA-A targeting gRNA
  source 1..23: mol_type = other DNA
ccgccctcctgaaggtcctcagg

SEQ ID NO: 1150 - DNA, 23 bp, synthetic construct
  misc_feature 1..23: note = HLA-A targeting gRNA
  source 1..23: mol_type = other DNA
cctgaggaccttcaggagggcgg

SEQ ID NO: 1151 - DNA, 23 bp, synthetic construct
  misc_feature 1..23: note = HLA-A targeting gRNA
  source 1..23: mol_type = other DNA
cgccctcctgaaggtcctcaggg

SEQ ID NO: 1152 - DNA, 23 bp, synthetic construct
  misc_feature 1..23: note = HLA-A targeting gRNA
  source 1..23: mol_type = other DNA
ctagaggaacctccaagtcttgg

SEQ ID NO: 1153 - DNA, 23 bp, synthetic construct
  misc_feature 1..23: note = HLA-A targeting gRNA
  source 1..23: mol_type = other DNA
ctctgacctttagcagggtcagg

SEQ ID NO: 1154 - DNA, 23 bp, synthetic construct
  misc_feature 1..23: note = HLA-A targeting gRNA
  source 1..23: mol_type = other DNA
ctctgaggtccaagacttggagg

SEQ ID NO: 1155 - DNA, 23 bp, synthetic construct
  misc_feature 1..23: note = HLA-A targeting gRNA
  source 1..23: mol_type = other DNA
cttctctgaggtccaagacttgg

SEQ ID NO: 1156 - DNA, 23 bp, synthetic construct
  misc_feature 1..23: note = HLA-A targeting gRNA
  source 1..23: mol_type = other DNA
gaagagggaacagcgacttctgg

SEQ ID NO: 1157 - DNA, 23 bp, synthetic construct
  misc_feature 1..23: note = HLA-A targeting gRNA
  source 1..23: mol_type = other DNA
gaaggtccctgaggaccttcagg

SEQ ID NO: 1158 - DNA, 23 bp, synthetic construct
  misc_feature 1..23: note = HLA-A targeting gRNA
  source 1..23: mol_type = other DNA
gaagtcgctgttccctcttcagg

SEQ ID NO: 1159 - DNA, 23 bp, synthetic construct
  misc_feature 1..23: note = HLA-A targeting gRNA
  source 1..23: mol_type = other DNA
gaccctgctaaaggtcagagagg

SEQ ID NO: 1160 - DNA, 23 bp, synthetic construct
  misc_feature 1..23: note = HLA-A targeting gRNA
  source 1..23: mol_type = other DNA
gagcctctctgacctttagcagg

SEQ ID NO: 1161 - DNA, 23 bp, synthetic construct
  misc_feature 1..23: note = HLA-A targeting gRNA
  source 1..23: mol_type = other DNA
gaggaggaagagctcaggtgggg

SEQ ID NO: 1162 - DNA, 23 bp, synthetic construct
  misc_feature 1..23: note = HLA-A targeting gRNA
  source 1..23: mol_type = other DNA
gatagccacatgtgtgctggagg

SEQ ID NO: 1163 - DNA, 23 bp, synthetic construct
  misc_feature 1..23: note = HLA-A targeting gRNA
  source 1..23: mol_type = other DNA
gcacacttctacctgggtcttgg

SEQ ID NO: 1164 - DNA, 23 bp, synthetic construct
  misc_feature 1..23: note = HLA-A targeting gRNA
  source 1..23: mol_type = other DNA
ggaggaggaagagctcaggtggg

SEQ ID NO: 1165 - DNA, 23 bp, synthetic construct
  misc_feature 1..23: note = HLA-A targeting gRNA
  source 1..23: mol_type = other DNA
ggcagggcacacttctacctggg

SEQ ID NO: 1166 - DNA, 23 bp, synthetic construct
  misc_feature 1..23: note = HLA-A targeting gRNA
  source 1..23: mol_type = other DNA
ggtccctgaggaccttcaggagg

SEQ ID NO: 1167 - DNA, 23 bp, synthetic construct
  misc_feature 1..23: note = HLA-A targeting gRNA
  source 1..23: mol_type = other DNA
gtccctgaggaccttcaggaggg

SEQ ID NO: 1168 - DNA, 23 bp, synthetic construct
  misc_feature 1..23: note = HLA-A targeting gRNA
  source 1..23: mol_type = other DNA
gtgcttcccagtaacgaggcagg

SEQ ID NO: 1169 - DNA, 23 bp, synthetic construct
  misc_feature 1..23: note = HLA-A targeting gRNA
  source 1..23: mol_type = other DNA
gtgtgccctgcctcgttactggg

SEQ ID NO: 1170 - DNA, 23 bp, synthetic construct
  misc_feature 1..23: note = HLA-A targeting gRNA
  source 1..23: mol_type = other DNA
tctgacctttagcagggtcaggg

SEQ ID NO: 1171 - DNA, 23 bp, synthetic construct
  misc_feature 1..23: note = HLA-A targeting gRNA
  source 1..23: mol_type = other DNA
tgcttcccagtaacgaggcaggg

SEQ ID NO: 1172 - DNA, 23 bp, synthetic construct
  misc_feature 1..23: note = HLA-A targeting gRNA
  source 1..23: mol_type = other DNA
tggaccaaccgccctcctgaagg

SEQ ID NO: 1173 - DNA, 23 bp, synthetic construct
  misc_feature 1..23: note = HLA-A targeting gRNA
  source 1..23: mol_type = other DNA
tggctatcttgagaatggacagg

SEQ ID NO: 1174 - DNA, 23 bp, synthetic construct
  misc_feature 1..23: note = HLA-A targeting gRNA
  source 1..23: mol_type = other DNA
tgggataatctcctattccgtgg

SEQ ID NO: 1175 - DNA, 23 bp, synthetic construct
  misc_feature 1..23: note = HLA-A targeting gRNA
  source 1..23: mol_type = other DNA
tgtgctcccttccccatcccagg

SEQ ID NO: 1176 - DNA, 23 bp, synthetic construct
  misc_feature 1..23: note = HLA-A targeting gRNA
  source 1..23: mol_type = other DNA
tgtggtggtgccttctggacagg

SEQ ID NO: 1177 - DNA, 23 bp, synthetic construct
  misc_feature 1..23: note = HLA-A targeting gRNA
  source 1..23: mol_type = other DNA
ttcaggagggcggttggtccagg

SEQ ID NO: 1178 - DNA, 23 bp, synthetic construct
  misc_feature 1..23: note = HLA-A targeting gRNA
  source 1..23: mol_type = other DNA
ttgagaatggacaggacacctgg

SEQ ID NO: 1179 - DNA, 23 bp, synthetic construct
  misc_feature 1..23: note = HLA-A targeting gRNA
  source 1..23: mol_type = other DNA
tgagaatggacaggacacctggg

SEQ ID NO: 1180 - DNA, 23 bp, synthetic construct
  misc_feature 1..23: note = HLA-A targeting gRNA
  source 1..23: mol_type = other DNA
aagacggctctgggaaaagaggg

SEQ ID NO: 1181 - DNA, 23 bp, synthetic construct
  misc_feature 1..23: note = HLA-A targeting gRNA
  source 1..23: mol_type = other DNA
agacggctctgggaaaagagggg

SEQ ID NO: 1182 - DNA, 23 bp, synthetic construct
  misc_feature 1..23: note = HLA-A targeting gRNA
  source 1..23: mol_type = other DNA
gaagacggctctgggaaaagagg

SEQ ID NO: 1183 - DNA, 23 bp, synthetic construct
  misc_feature 1..23: note = HLA-A targeting gRNA
  source 1..23: mol_type = other DNA
catttctggaaacttctctgagg

SEQ ID NO: 1184 - DNA, 23 bp, synthetic construct
  misc_feature 1..23: note = HLA-A targeting gRNA
  source 1..23: mol_type = other DNA
taaaatctctgaaggaatgacgg

SEQ ID NO: 1185 - DNA, 23 bp, synthetic construct
  misc_feature 1..23: note = HLA-A targeting gRNA
  source 1..23: mol_type = other DNA
aaaattctagtccctgaagaggg

SEQ ID NO: 1186 - DNA, 23 bp, synthetic construct
  misc_feature 1..23: note = HLA-A targeting gRNA
  source 1..23: mol_type = other DNA
actagaattttccacggaatagg

SEQ ID NO: 1187 - DNA, 23 bp, synthetic construct
  misc_feature 1..23: note = HLA-A targeting gRNA
  source 1..23: mol_type = other DNA
gaaaattctagtccctgaagagg

SEQ ID NO: 1188 - DNA, 23 bp, synthetic construct
  misc_feature 1..23: note = HLA-A targeting gRNA
  source 1..23: mol_type = other DNA
tcagggactagaattttccacgg

SEQ ID NO: 1189 - DNA, 23 bp, synthetic construct
  misc_feature 1..23: note = HLA-A targeting gRNA
  source 1..23: mol_type = other DNA
aaccctcgtcctgctactctcgg

SEQ ID NO: 1190 - DNA, 23 bp, synthetic construct
  misc_feature 1..23: note = HLA-A targeting gRNA
  source 1..23: mol_type = other DNA
accctcgtcctgctactctcggg

SEQ ID NO: 1191 - DNA, 23 bp, synthetic construct
  misc_feature 1..23: note = HLA-A targeting gRNA
  source 1..23: mol_type = other DNA
agagtagcaggacgagggttcgg

SEQ ID NO: 1192 - DNA, 23 bp, synthetic construct
  misc_feature 1..23: note = HLA-A targeting gRNA
  source 1..23: mol_type = other DNA
cccccgagagtagcaggacgagg

SEQ ID NO: 1193 - DNA, 23 bp, synthetic construct
  misc_feature 1..23: note = HLA-A targeting gRNA
  source 1..23: mol_type = other DNA
gagtagcaggacgagggttcggg

SEQ ID NO: 1194 - DNA, 23 bp, synthetic construct
  misc_feature 1..23: note = HLA-A targeting gRNA
  source 1..23: mol_type = other DNA
gccggtgagtgaccccggcccgg

SEQ ID NO: 1195 - DNA, 23 bp, synthetic construct
  misc_feature 1..23: note = HLA-A targeting gRNA
  source 1..23: mol_type = other DNA
cccgggccggggtcactcaccgg

SEQ ID NO: 1196 - DNA, 23 bp, synthetic construct
  misc_feature 1..23: note = HLA-A targeting gRNA
  source 1..23: mol_type = other DNA
ccggtgagtgaccccggcccggg

SEQ ID NO: 1197 - DNA, 23 bp, synthetic construct
  misc_feature 1..23: note = HLA-A targeting gRNA
  source 1..23: mol_type = other DNA
ggggtgggtgagctcccccatgg

SEQ ID NO: 1198 - DNA, 23 bp, synthetic construct
  misc_feature 1..23: note = HLA-A targeting gRNA
  source 1..23: mol_type = other DNA
gggtgggtgagctcccccatggg

SEQ ID NO: 1199 - DNA, 23 bp, synthetic construct
  misc_feature 1..23: note = HLA-A targeting gRNA
  source 1..23: mol_type = other DNA
ggtccgcgtcgtgagtatccagg

SEQ ID NO: 1200 - DNA, 23 bp, synthetic construct
  misc_feature 1..23: note = HLA-A targeting gRNA
  source 1..23: mol_type = other DNA
tcatgtcttttagggaaagcagg

SEQ ID NO: 1201 - DNA, 23 bp, synthetic construct
  misc_feature 1..23: note = HLA-A targeting gRNA
  source 1..23: mol_type = other DNA
actccacgcacgtgccctccagg

SEQ ID NO: 1202 - DNA, 23 bp, synthetic construct
  misc_feature 1..23: note = HLA-A targeting gRNA
  source 1..23: mol_type = other DNA
ccaccacagccgcccacttctgg

SEQ ID NO: 1203 - DNA, 23 bp, synthetic construct
  misc_feature 1..23: note = HLA-A targeting gRNA
  source 1..23: mol_type = other DNA
cttccagaagtgggcggctgtgg

SEQ ID NO: 1204 - DNA, 23 bp, synthetic construct
  misc_feature 1..23: note = HLA-A targeting gRNA
  source 1..23: mol_type = other DNA
gcggctgtggtggtgccttctgg

SEQ ID NO: 1205 - DNA, 23 bp, synthetic construct
  misc_feature 1..23: note = HLA-A targeting gRNA
  source 1..23: mol_type = other DNA
agaaaagaaactgcggagttggg

SEQ ID NO: 1206 - DNA, 23 bp, synthetic construct
  misc_feature 1..23: note = HLA-A targeting gRNA
  source 1..23: mol_type = other DNA
gaaaagaaactgcggagttgggg

SEQ ID NO: 1207 - DNA, 23 bp, synthetic construct
  misc_feature 1..23: note = HLA-A targeting gRNA
  source 1..23: mol_type = other DNA
gagaaaagaaactgcggagttgg

SEQ ID NO: 1208 - DNA, 23 bp, synthetic construct
  misc_feature 1..23: note = HLA-A targeting gRNA
  source 1..23: mol_type = other DNA
ggtcatggtggacatgggggtgg

SEQ ID NO: 1209 - DNA, 23 bp, synthetic construct
  misc_feature 1..23: note = HLA-A targeting gRNA
  source 1..23: mol_type = other DNA
gtcatggtggacatgggggtggg

SEQ ID NO: 1210 - DNA, 23 bp, synthetic construct
  misc_feature 1..23: note = HLA-A targeting gRNA
  source 1..23: mol_type = other DNA
tcatggtggacatgggggtgggg

SEQ ID NO: 1211 - DNA, 23 bp, synthetic construct
  misc_feature 1..23: note = HLA-A targeting gRNA
  source 1..23: mol_type = other DNA
gcggagttggggaatccccaagg

SEQ ID NO: 1212 - DNA, 23 bp, synthetic construct
  misc_feature 1..23: note = HLA-A targeting gRNA
  source 1..23: mol_type = other DNA
gcgccgggaggagggtcgggcgg

SEQ ID NO: 1213 - DNA, 23 bp, synthetic construct
  misc_feature 1..23: note = HLA-A targeting gRNA
  source 1..23: mol_type = other DNA
ggtcggggcggggcggggctcgg

SEQ ID NO: 1214 - DNA, 23 bp, synthetic construct
  misc_feature 1..23: note = HLA-A targeting gRNA
  source 1..23: mol_type = other DNA
gtcggggcggggcggggctcggg

SEQ ID NO: 1215 - DNA, 23 bp, synthetic construct
  misc_feature 1..23: note = HLA-A targeting gRNA
  source 1..23: mol_type = other DNA
tcggggcggggcggggctcgggg

SEQ ID NO: 1216 - DNA, 23 bp, synthetic construct
  misc_feature 1..23: note = HLA-A targeting gRNA
  source 1..23: mol_type = other DNA
cggggcggggcggggctcggggg

SEQ ID NO: 1217 - DNA, 23 bp, synthetic construct
  misc_feature 1..23: note = HLA-A targeting gRNA
  source 1..23: mol_type = other DNA
aattatgggcctacccagcctgg

SEQ ID NO: 1218 - DNA, 23 bp, synthetic construct
  misc_feature 1..23: note = HLA-A targeting gRNA
  source 1..23: mol_type = other DNA
attatgggcctacccagcctggg

SEQ ID NO: 1219 - DNA, 23 bp, synthetic construct
  misc_feature 1..23: note = HLA-A targeting gRNA
  source 1..23: mol_type = other DNA
gctgggtaggcccataattgtgg

SEQ ID NO: 1220 - DNA, 23 bp, synthetic construct
  misc_feature 1..23: note = HLA-A targeting gRNA
  source 1..23: mol_type = other DNA
ggagcagttgagagcctacctgg

SEQ ID NO: 1221 - DNA, 23 bp, synthetic construct
  misc_feature 1..23: note = HLA-A targeting gRNA
  source 1..23: mol_type = other DNA
gagagccacgcctggggccctgg

SEQ ID NO: 1222 - DNA, 23 bp, synthetic construct
  misc_feature 1..23: note = HLA-A targeting gRNA
  source 1..23: mol_type = other DNA
agttggggaatccccaaggctgg

SEQ ID NO: 1223 - DNA, 23 bp, synthetic construct
  misc_feature 1..23: note = HLA-A targeting gRNA
  source 1..23: mol_type = other DNA
gttggggaatccccaaggctggg

SEQ ID NO: 1224 - DNA, 23 bp, synthetic construct
  misc_feature 1..23: note = HLA-A targeting gRNA
  source 1..23: mol_type = other DNA
attggggagtcccagccttgggg

SEQ ID NO: 1225 - DNA, 23 bp, synthetic construct
  misc_feature 1..23: note = HLA-A targeting gRNA
  source 1..23: mol_type = other DNA
gattggggagtcccagccttggg

SEQ ID NO: 1226 - DNA, 23 bp, synthetic construct
  misc_feature 1..23: note = HLA-A targeting gRNA
  source 1..23: mol_type = other DNA
tggtggacatgggggtggggtgg

SEQ ID NO: 1227 - DNA, 23 bp, synthetic construct
  misc_feature 1..23: note = HLA-A targeting gRNA
  source 1..23: mol_type = other DNA
ggattggggagtcccagccttgg

SEQ ID NO: 1228 - DNA, 23 bp, synthetic construct
  misc_feature 1..23: note = HLA-A targeting gRNA
  source 1..23: mol_type = other DNA
aagtcccagggccccaggcgtgg

SEQ ID NO: 1229 - DNA, 23 bp, synthetic construct
  misc_feature 1..23: note = HLA-A targeting gRNA
  source 1..23: mol_type = other DNA
agagccacgcctggggccctggg

SEQ ID NO: 1230 - DNA, 23 bp, synthetic construct
  misc_feature 1..23: note = HLA-A targeting gRNA
  source 1..23: mol_type = other DNA
aagagcgcaggtcctctttcagg

SEQ ID NO: 1231 - DNA, 23 bp, synthetic construct
  misc_feature 1..23: note = HLA-A targeting gRNA
  source 1..23: mol_type = other DNA
agagcgcaggtcctctttcaggg

SEQ ID NO: 1232 - DNA, 23 bp, synthetic construct
  misc_feature 1..23: note = HLA-A targeting gRNA
  source 1..23: mol_type = other DNA
gagagggagaaaagaaactgcgg

SEQ ID NO: 1233 - DNA, 23 bp, synthetic construct
  misc_feature 1..23: note = HLA-A targeting gRNA
  source 1..23: mol_type = other DNA
tgaaagaggacctgcgctcttgg

SEQ ID NO: 1234 - DNA, 23 bp, synthetic construct
  misc_feature 1..23: note = HLA-A targeting gRNA
  source 1..23: mol_type = other DNA
gggcgaagtcccagggccccagg

SEQ ID NO: 1235 - DNA, 23 bp, synthetic construct
  misc_feature 1..23: note = HLA-A targeting gRNA
  source 1..23: mol_type = other DNA
caatccatacaccgccttcgggg

SEQ ID NO: 1236 - DNA, 23 bp, synthetic construct
  misc_feature 1..23: note = HLA-A targeting gRNA
  source 1..23: mol_type = other DNA
caggccccgaaggcggtgtatgg

SEQ ID NO: 1237 - DNA, 23 bp, synthetic construct
  misc_feature 1..23: note = HLA-A targeting gRNA
  source 1..23: mol_type = other DNA
ccaatccatacaccgccttcggg

SEQ ID NO: 1238 - DNA, 23 bp, synthetic construct
  misc_feature 1..23: note = HLA-A targeting gRNA
  source 1..23: mol_type = other DNA
cccaatccatacaccgccttcgg

SEQ ID NO: 1239 - DNA, 23 bp, synthetic construct
  misc_feature 1..23: note = HLA-A targeting gRNA
  source 1..23: mol_type = other DNA
cccgaaggcggtgtatggattgg

SEQ ID NO: 1240 - DNA, 23 bp, synthetic construct
  misc_feature 1..23: note = HLA-A targeting gRNA
  source 1..23: mol_type = other DNA
ccgaaggcggtgtatggattggg

SEQ ID NO: 1241 - DNA, 23 bp, synthetic construct
  misc_feature 1..23: note = HLA-A targeting gRNA
  source 1..23: mol_type = other DNA
cgaaggcggtgtatggattgggg

SEQ ID NO: 1242 - DNA, 23 bp, synthetic construct
  misc_feature 1..23: note = HLA-A targeting gRNA
  source 1..23: mol_type = other DNA
aggggtcagggcgaagtcccagg

SEQ ID NO: 1243 - DNA, 23 bp, synthetic construct
  misc_feature 1..23: note = HLA-A targeting gRNA
  source 1..23: mol_type = other DNA
ggggtcagggcgaagtcccaggg

SEQ ID NO: 1244 - DNA, 23 bp, synthetic construct
  misc_feature 1..23: note = HLA-A targeting gRNA
  source 1..23: mol_type = other DNA
agaccctgagagccacgcctggg

SEQ ID NO: 1245 - DNA, 23 bp, synthetic construct
  misc_feature 1..23: note = HLA-A targeting gRNA
  source 1..23: mol_type = other DNA
agggtctcaggccccgaaggcgg

SEQ ID NO: 1246 - DNA, 23 bp, synthetic construct
  misc_feature 1..23: note = HLA-A targeting gRNA
  source 1..23: mol_type = other DNA
ctcagggtctcaggccccgaagg

SEQ ID NO: 1247 - DNA, 23 bp, synthetic construct
  misc_feature 1..23: note = HLA-A targeting gRNA
  source 1..23: mol_type = other DNA
gaccctgagagccacgcctgggg

SEQ ID NO: 1248 - DNA, 23 bp, synthetic construct
  misc_feature 1..23: note = HLA-A targeting gRNA
  source 1..23: mol_type = other DNA
gagaccctgagagccacgcctgg

SEQ ID NO: 1249 - DNA, 23 bp, synthetic construct
  misc_feature 1..23: note = HLA-A targeting gRNA
  source 1..23: mol_type = other DNA
ggccccaggcgtggctctcaggg

SEQ ID NO: 1250 - DNA, 23 bp, synthetic construct
  misc_feature 1..23: note = HLA-A targeting gRNA
  source 1..23: mol_type = other DNA
ggcgtggctctcagggtctcagg

SEQ ID NO: 1251 - DNA, 23 bp, synthetic construct
  misc_feature 1..23: note = HLA-A targeting gRNA
  source 1..23: mol_type = other DNA
gggccccaggcgtggctctcagg

SEQ ID NO: 1252 - DNA, 23 bp, synthetic construct
  misc_feature 1..23: note = HLA-A targeting gRNA
  source 1..23: mol_type = other DNA
gacccgcccgaccctcctcccgg

SEQ ID NO: 1253 - DNA, 23 bp, synthetic construct
  misc_feature 1..23: note = HLA-A targeting gRNA
  source 1..23: mol_type = other DNA
cgccgggaggagggtcgggcggg

SEQ ID NO: 1254 - DNA, 23 bp, synthetic construct
  misc_feature 1..23: note = HLA-A targeting gRNA
  source 1..23: mol_type = other DNA
acgggggtgtcatgtcttttagg

SEQ ID NO: 1255 - DNA, 23 bp, synthetic construct
  misc_feature 1..23: note = HLA-A targeting gRNA
  source 1..23: mol_type = other DNA
agatggggtaaggagggagacgg

SEQ ID NO: 1256 - DNA, 23 bp, synthetic construct
  misc_feature 1..23: note = HLA-A targeting gRNA
  source 1..23: mol_type = other DNA
aggaagagctcaggtggggaagg

SEQ ID NO: 1257 - DNA, 23 bp, synthetic construct
  misc_feature 1..23: note = HLA-A targeting gRNA
  source 1..23: mol_type = other DNA
atggggtaaggagggagacgggg

SEQ ID NO: 1258 - DNA, 23 bp, synthetic construct
  misc_feature 1..23: note = HLA-A targeting gRNA
  source 1..23: mol_type = other DNA
cgggggtgtcatgtcttttaggg

SEQ ID NO: 1259 - DNA, 23 bp, synthetic construct
  misc_feature 1..23: note = HLA-A targeting gRNA
  source 1..23: mol_type = other DNA
gatggggtaaggagggagacggg

SEQ ID NO: 1260 - DNA, 23 bp, synthetic construct
  misc_feature 1..23: note = HLA-A targeting gRNA
  source 1..23: mol_type = other DNA
ggaagagctcaggtggggaaggg

SEQ ID NO: 1261 - DNA, 23 bp, synthetic construct
  misc_feature 1..23: note = HLA-A targeting gRNA
  source 1..23: mol_type = other DNA
tggggtaaggagggagacggggg

SEQ ID NO: 1262 - DNA, 23 bp, synthetic construct
  misc_feature 1..23: note = HLA-A targeting gRNA
  source 1..23: mol_type = other DNA
cggggcggggctcgggggaccgg

SEQ ID NO: 1263 - DNA, 23 bp, synthetic construct
  misc_feature 1..23: note = HLA-A targeting gRNA
  source 1..23: mol_type = other DNA
cgggagggaaacggcctctgtgg

SEQ ID NO: 1264 - DNA, 23 bp, synthetic construct
  misc_feature 1..23: note = HLA-A targeting gRNA
  source 1..23: mol_type = other DNA
ggagggaaacggcctctgtgggg

SEQ ID NO: 1265 - DNA, 23 bp, synthetic construct
  misc_feature 1..23: note = HLA-A targeting gRNA
  source 1..23: mol_type = other DNA
gggagggaaacggcctctgtggg

SEQ ID NO: 1266 - DNA, 23 bp, synthetic construct
  misc_feature 1..23: note = HLA-A targeting gRNA
  source 1..23: mol_type = other DNA
ggggcggggctcgggggaccggg

SEQ ID NO: 1267 - DNA, 23 bp, synthetic construct
  misc_feature 1..23: note = HLA-A targeting gRNA
  source 1..23: mol_type = other DNA
ggggtcccgcggcttcggggcgg

SEQ ID NO: 1268 - DNA, 23 bp, synthetic construct
  misc_feature 1..23: note = HLA-A targeting gRNA
  source 1..23: mol_type = other DNA
cgagatccgccccgaagccgcgg

SEQ ID NO: 1269 - DNA, 23 bp, synthetic construct
  misc_feature 1..23: note = HLA-A targeting gRNA
  source 1..23: mol_type = other DNA
cgcggcttcggggcggatctcgg

SEQ ID NO: 1270 - DNA, 23 bp, synthetic construct
  misc_feature 1..23: note = HLA-A targeting gRNA
  source 1..23: mol_type = other DNA
gagatccgccccgaagccgcggg

SEQ ID NO: 1271 - DNA, 23 bp, synthetic construct
  misc_feature 1..23: note = HLA-A targeting gRNA
  source 1..23: mol_type = other DNA
ttcggggcggatctcggacccgg

SEQ ID NO: 1272 - DNA, 23 bp, synthetic construct
  misc_feature 1..23: note = HLA-A targeting gRNA
  source 1..23: mol_type = other DNA
attgctggcctggttctctttgg

SEQ ID NO: 1273 - DNA, 23 bp, synthetic construct
  misc_feature 1..23: note = HLA-A targeting gRNA
  source 1..23: mol_type = other DNA
gcgtgggaagagggtcatggtgg

SEQ ID NO: 1274 - DNA, 23 bp, synthetic construct
  misc_feature 1..23: note = HLA-A targeting gRNA
  source 1..23: mol_type = other DNA
tcagcgtgggaagagggtcatgg

SEQ ID NO: 1275 - DNA, 23 bp, synthetic construct
  misc_feature 1..23: note = HLA-A targeting gRNA
  source 1..23: mol_type = other DNA
cacaggtcagcgtgggaagaggg

SEQ ID NO: 1276 - DNA, 23 bp, synthetic construct
  misc_feature 1..23: note = HLA-A targeting gRNA
  source 1..23: mol_type = other DNA
gcacaggtcagcgtgggaagagg

SEQ ID NO: 1277 - DNA, 23 bp, synthetic construct
  misc_feature 1..23: note = HLA-A targeting gRNA
  source 1..23: mol_type = other DNA
ccttgccgtcgtaggcgtactgg

SEQ ID NO: 1278 - DNA, 23 bp, synthetic construct
  misc_feature 1..23: note = HLA-A targeting gRNA
  source 1..23: mol_type = other DNA
aatcagtgtcgtcgcggtcgcgg

SEQ ID NO: 1279 - DNA, 23 bp, synthetic construct
  misc_feature 1..23: note = HLA-A targeting gRNA
  source 1..23: mol_type = other DNA
caggaagaaggaccctacatagg

SEQ ID NO: 1280 - DNA, 23 bp, synthetic construct
  misc_feature 1..23: note = HLA-A targeting gRNA
  source 1..23: mol_type = other DNA
ctatgtagggtccttcttcctgg

SEQ ID NO: 1281 - DNA, 23 bp, synthetic construct
  misc_feature 1..23: note = HLA-A targeting gRNA
  source 1..23: mol_type = other DNA
cttcctggatactcacgacgcgg

SEQ ID NO: 1282 - DNA, 23 bp, synthetic construct
  misc_feature 1..23: note = HLA-A targeting gRNA
  source 1..23: mol_type = other DNA
gtcgtgagtatccaggaagaagg

SEQ ID NO: 1283 - DNA, 23 bp, synthetic construct
  misc_feature 1..23: note = HLA-A targeting gRNA
  source 1..23: mol_type = other DNA
aagagggtcatggtggacatggg

SEQ ID NO: 1284 - DNA, 23 bp, synthetic construct
  misc_feature 1..23: note = HLA-A targeting gRNA
  source 1..23: mol_type = other DNA
agagggtcatggtggacatgggg

SEQ ID NO: 1285 - DNA, 23 bp, synthetic construct
  misc_feature 1..23: note = HLA-A targeting gRNA
  source 1..23: mol_type = other DNA
gagggtcatggtggacatggggg

SEQ ID NO: 1286 - DNA, 23 bp, synthetic construct
  misc_feature 1..23: note = HLA-A targeting gRNA
  source 1..23: mol_type = other DNA
acccgggaagccgcgccgggagg

SEQ ID NO: 1287 - DNA, 23 bp, synthetic construct
  misc_feature 1..23: note = HLA-A targeting gRNA
  source 1..23: mol_type = other DNA
cgggaagccgcgccgggaggagg

SEQ ID NO: 1288 - DNA, 23 bp, synthetic construct
  misc_feature 1..23: note = HLA-A targeting gRNA
  source 1..23: mol_type = other DNA
ctcctcccggcgcggcttcccgg

SEQ ID NO: 1289 - DNA, 23 bp, synthetic construct
  misc_feature 1..23: note = HLA-A targeting gRNA
  source 1..23: mol_type = other DNA
gggaagccgcgccgggaggaggg

SEQ ID NO: 1290 - DNA, 23 bp, synthetic construct
  misc_feature 1..23: note = HLA-A targeting gRNA
  source 1..23: mol_type = other DNA
tcctcccggcgcggcttcccggg

SEQ ID NO: 1291 - DNA, 23 bp, synthetic construct
  misc_feature 1..23: note = HLA-A targeting gRNA
  source 1..23: mol_type = other DNA
acacgaacacagacacatgcagg

SEQ ID NO: 1292 - DNA, 23 bp, synthetic construct
  misc_feature 1..23: note = HLA-A targeting gRNA
  source 1..23: mol_type = other DNA
gcatgtgtctgtgttcgtgtagg

SEQ ID NO: 1293 - DNA, 23 bp, synthetic construct
  misc_feature 1..23: note = HLA-A targeting gRNA
  source 1..23: mol_type = other DNA
aagaaggaccctacataggttgg

SEQ ID NO: 1294 - DNA, 23 bp, synthetic construct
  misc_feature 1..23: note = HLA-A targeting gRNA
  source 1..23: mol_type = other DNA
acctctcatcccccacggacggg

SEQ ID NO: 1295 - DNA, 23 bp, synthetic construct
  misc_feature 1..23: note = HLA-A targeting gRNA
  source 1..23: mol_type = other DNA
gacctctcatcccccacggacgg

SEQ ID NO: 1296 - DNA, 23 bp, synthetic construct
  misc_feature 1..23: note = HLA-A targeting gRNA
  source 1..23: mol_type = other DNA
gcccgtccgtgggggatgagagg

SEQ ID NO: 1297 - DNA, 23 bp, synthetic construct
  misc_feature 1..23: note = HLA-A targeting gRNA
  source 1..23: mol_type = other DNA
tcacgacctctcatcccccacgg

SEQ ID NO: 1298 - DNA, 23 bp, synthetic construct
  misc_feature 1..23: note = HLA-A targeting gRNA
  source 1..23: mol_type = other DNA
agaggtcgtgacctgcgccccgg

SEQ ID NO: 1299 - DNA, 23 bp, synthetic construct
  misc_feature 1..23: note = HLA-A targeting gRNA
  source 1..23: mol_type = other DNA
gaggtcgtgacctgcgccccggg

SEQ ID NO: 1300 - DNA, 23 bp, synthetic construct
  misc_feature 1..23: note = HLA-A targeting gRNA
  source 1..23: mol_type = other DNA
ttcacatccgtgtcccggcccgg

SEQ ID NO: 1301 - DNA, 23 bp, synthetic construct
  misc_feature 1..23: note = HLA-A targeting gRNA
  source 1..23: mol_type = other DNA
ctcagccactcctcgtccccagg

SEQ ID NO: 1302 - DNA, 23 bp, synthetic construct
  misc_feature 1..23: note = HLA-A targeting gRNA
  source 1..23: mol_type = other DNA
cgtgtaggcataatgtgaggagg

SEQ ID NO: 1303 - DNA, 23 bp, synthetic construct
  misc_feature 1..23: note = HLA-A targeting gRNA
  source 1..23: mol_type = other DNA
gttcgtgtaggcataatgtgagg

SEQ ID NO: 1304 - DNA, 23 bp, synthetic construct
  misc_feature 1..23: note = HLA-A targeting gRNA
  source 1..23: mol_type = other DNA
gaagagggtcatggtggacatgg

SEQ ID NO: 1305 - DNA, 23 bp, synthetic construct
  misc_feature 1..23: note = HLA-A targeting gRNA
  source 1..23: mol_type = other DNA
gagggagcacaggtcagcgtggg

SEQ ID NO: 1306 - DNA, 23 bp, synthetic construct
  misc_feature 1..23: note = HLA-A targeting gRNA
  source 1..23: mol_type = other DNA
attcgtatctgtcacagtgaggg

SEQ ID NO: 1307 - DNA, 23 bp, synthetic construct
  misc_feature 1..23: note = HLA-A targeting gRNA
  source 1..23: mol_type = other DNA
cgcatgctcaatacatccaatgg

SEQ ID NO: 1308 - DNA, 23 bp, synthetic construct
  misc_feature 1..23: note = HLA-A targeting gRNA
  source 1..23: mol_type = other DNA
gctatggggtttctttccattgg

SEQ ID NO: 1309 - DNA, 23 bp, synthetic construct
  misc_feature 1..23: note = HLA-A targeting gRNA
  source 1..23: mol_type = other DNA
ttcgtatctgtcacagtgagggg

SEQ ID NO: 1310 - DNA, 23 bp, synthetic construct
  misc_feature 1..23: note = HLA-A targeting gRNA
  source 1..23: mol_type = other DNA
acacacacaggcagcagccttgg

SEQ ID NO: 1311 - DNA, 23 bp, synthetic construct
  misc_feature 1..23: note = HLA-A targeting gRNA
  source 1..23: mol_type = other DNA
accttgattacagcggtgatggg

SEQ ID NO: 1312 - DNA, 23 bp, synthetic construct
  misc_feature 1..23: note = HLA-A targeting gRNA
  source 1..23: mol_type = other DNA
agaaaggagtcagggccttaagg

SEQ ID NO: 1313 - DNA, 23 bp, synthetic construct
  misc_feature 1..23: note = HLA-A targeting gRNA
  source 1..23: mol_type = other DNA
agcacctcagggtggcttcatgg

SEQ ID NO: 1314 - DNA, 23 bp, synthetic construct
  misc_feature 1..23: note = HLA-A targeting gRNA
  source 1..23: mol_type = other DNA
atgaagccaccctgaggtgctgg

SEQ ID NO: 1315 - DNA, 23 bp, synthetic construct
  misc_feature 1..23: note = HLA-A targeting gRNA
  source 1..23: mol_type = other DNA
atttatcaccttgattacagcgg

SEQ ID NO: 1316 - DNA, 23 bp, synthetic construct
  misc_feature 1..23: note = HLA-A targeting gRNA
  source 1..23: mol_type = other DNA
cacacacaggcagcagccttggg

SEQ ID NO: 1317 - DNA, 23 bp, synthetic construct
  misc_feature 1..23: note = HLA-A targeting gRNA
  source 1..23: mol_type = other DNA
caccttgattacagcggtgatgg

SEQ ID NO: 1318 - DNA, 23 bp, synthetic construct
  misc_feature 1..23: note = HLA-A targeting gRNA
  source 1..23: mol_type = other DNA
caggaagagtcagatcattcagg

SEQ ID NO: 1319 - DNA, 23 bp, synthetic construct
  misc_feature 1..23: note = HLA-A targeting gRNA
  source 1..23: mol_type = other DNA
ctcaggtggggaaggggtgaagg

SEQ ID NO: 1320 - DNA, 23 bp, synthetic construct
  misc_feature 1..23: note = HLA-A targeting gRNA
  source 1..23: mol_type = other DNA
ctctttggagctgtgatcactgg

SEQ ID NO: 1321 - DNA, 23 bp, synthetic construct
  misc_feature 1..23: note = HLA-A targeting gRNA
  source 1..23: mol_type = other DNA
ctgctgcctgtgtgtgtcaaagg

SEQ ID NO: 1322 - DNA, 23 bp, synthetic construct
  misc_feature 1..23: note = HLA-A targeting gRNA
  source 1..23: mol_type = other DNA
ctgggtaggcccataattgtggg

SEQ ID NO: 1323 - DNA, 23 bp, synthetic construct
  misc_feature 1..23: note = HLA-A targeting gRNA
  source 1..23: mol_type = other DNA
gaagagctcaggtggggaagggg

SEQ ID NO: 1324 - DNA, 23 bp, synthetic construct
  misc_feature 1..23: note = HLA-A targeting gRNA
  source 1..23: mol_type = other DNA
gaagcaccacccacaattatggg

SEQ ID NO: 1325 - DNA, 23 bp, synthetic construct
  misc_feature 1..23: note = HLA-A targeting gRNA
  source 1..23: mol_type = other DNA
ggaagcaccacccacaattatgg

SEQ ID NO: 1326 - DNA, 23 bp, synthetic construct
  misc_feature 1..23: note = HLA-A targeting gRNA
  source 1..23: mol_type = other DNA
ggtaggcccataattgtgggtgg

SEQ ID NO: 1327 - DNA, 23 bp, synthetic construct
  misc_feature 1..23: note = HLA-A targeting gRNA
  source 1..23: mol_type = other DNA
ggtggggaaggggtgaagggtgg

SEQ ID NO: 1328 - DNA, 23 bp, synthetic construct
  misc_feature 1..23: note = HLA-A targeting gRNA
  source 1..23: mol_type = other DNA
ggtggtgcttcccagtaacgagg

SEQ ID NO: 1329 - DNA, 23 bp, synthetic construct
  misc_feature 1..23: note = HLA-A targeting gRNA
  source 1..23: mol_type = other DNA
gtggggaaggggtgaagggtggg

SEQ ID NO: 1330 - DNA, 23 bp, synthetic construct
  misc_feature 1..23: note = HLA-A targeting gRNA
  source 1..23: mol_type = other DNA
tcagggccttaaggtcctagagg

SEQ ID NO: 1331 - DNA, 23 bp, synthetic construct
  misc_feature 1..23: note = HLA-A targeting gRNA
  source 1..23: mol_type = other DNA
tcaggtggggaaggggtgaaggg

SEQ ID NO: 1332 - DNA, 23 bp, synthetic construct
  misc_feature 1..23: note = HLA-A targeting gRNA
  source 1..23: mol_type = other DNA
tcccatcaccgctgtaatcaagg

SEQ ID NO: 1333 - DNA, 23 bp, synthetic construct
  misc_feature 1..23: note = HLA-A targeting gRNA
  source 1..23: mol_type = other DNA
tgctgcctgtgtgtgtcaaaggg

SEQ ID NO: 1334 - DNA, 23 bp, synthetic construct
  misc_feature 1..23: note = HLA-A targeting gRNA
  source 1..23: mol_type = other DNA
tggttccctttgacacacacagg

SEQ ID NO: 1335 - DNA, 23 bp, synthetic construct
  misc_feature 1..23: note = HLA-A targeting gRNA
  source 1..23: mol_type = other DNA
ttaaggccctgactcctttctgg

SEQ ID NO: 1336 - DNA, 23 bp, synthetic construct
  misc_feature 1..23: note = HLA-A targeting gRNA
  source 1..23: mol_type = other DNA
cgtcgcagccatacatcctctgg

SEQ ID NO: 1337 - DNA, 23 bp, synthetic construct
  misc_feature 1..23: note = HLA-A targeting gRNA
  source 1..23: mol_type = other DNA
aggatgtatggctgcgacgtggg

SEQ ID NO: 1338 - DNA, 23 bp, synthetic construct
  misc_feature 1..23: note = HLA-A targeting gRNA
  source 1..23: mol_type = other DNA
gcgttttgggggcgtctgtcagg

SEQ ID NO: 1339 - DNA, 23 bp, synthetic construct
  misc_feature 1..23: note = HLA-A targeting gRNA
  source 1..23: mol_type = other DNA
actcctttctggtatctcacagg

SEQ ID NO: 1340 - DNA, 23 bp, synthetic construct
  misc_feature 1..23: note = HLA-A targeting gRNA
  source 1..23: mol_type = other DNA
gagataccagaaaggagtcaggg

SEQ ID NO: 1341 - DNA, 23 bp, synthetic construct
  misc_feature 1..23: note = HLA-A targeting gRNA
  source 1..23: mol_type = other DNA
tgagataccagaaaggagtcagg

SEQ ID NO: 1342 - DNA, 23 bp, synthetic construct
  misc_feature 1..23: note = HLA-A targeting gRNA
  source 1..23: mol_type = other DNA
tggtgagtcatatgcgttttggg

SEQ ID NO: 1343 - DNA, 23 bp, synthetic construct
  misc_feature 1..23: note = HLA-A targeting gRNA
  source 1..23: mol_type = other DNA
gtggtgagtcatatgcgttttgg

SEQ ID NO: 1344 - DNA, 23 bp, synthetic construct
  misc_feature 1..23: note = HLA-A targeting gRNA
  source 1..23: mol_type = other DNA
ggccgcctcccacttgtgcttgg

SEQ ID NO: 1345 - DNA, 23 bp, synthetic construct
  misc_feature 1..23: note = HLA-A targeting gRNA
  source 1..23: mol_type = other DNA
accctacataggttgggagaggg

SEQ ID NO: 1346 - DNA, 23 bp, synthetic construct
  misc_feature 1..23: note = HLA-A targeting gRNA
  source 1..23: mol_type = other DNA
agaaggaccctacataggttggg

SEQ ID NO: 1347 - DNA, 23 bp, synthetic construct
  misc_feature 1..23: note = HLA-A targeting gRNA
  source 1..23: mol_type = other DNA
ctccctctcccaacctatgtagg

SEQ ID NO: 1348 - DNA, 23 bp, synthetic construct
  misc_feature 1..23: note = HLA-A targeting gRNA
  source 1..23: mol_type = other DNA
gaccctacataggttgggagagg

SEQ ID NO: 1349 - DNA, 23 bp, synthetic construct
  misc_feature 1..23: note = HLA-A targeting gRNA
  source 1..23: mol_type = other DNA
tccctctcccaacctatgtaggg

SEQ ID NO: 1350 - DNA, 23 bp, synthetic construct
  misc_feature 1..23: note = HLA-A targeting gRNA
  source 1..23: mol_type = other DNA
cgcctcccacttgtgcttggtgg

SEQ ID NO: 1351 - DNA, 23 bp, synthetic construct
  misc_feature 1..23: note = HLA-A targeting gRNA
  source 1..23: mol_type = other DNA
ggagggagcacaggtcagcgtgg

SEQ ID NO: 1352 - DNA, 23 bp, synthetic construct
  misc_feature 1..23: note = HLA-A targeting gRNA
  source 1..23: mol_type = other DNA
aacaggaaagatgattggggagg

SEQ ID NO: 1353 - DNA, 23 bp, synthetic construct
  misc_feature 1..23: note = HLA-A targeting gRNA
  source 1..23: mol_type = other DNA
acaggaaagatgattggggaggg

SEQ ID NO: 1354 - DNA, 23 bp, synthetic construct
  misc_feature 1..23: note = HLA-A targeting gRNA
  source 1..23: mol_type = other DNA
gatgattggggagggagcacagg

SEQ ID NO: 1355 - DNA, 23 bp, synthetic construct
  misc_feature 1..23: note = HLA-A targeting gRNA
  source 1..23: mol_type = other DNA
gtctccccgtcccaatactccgg

SEQ ID NO: 1356 - DNA, 23 bp, synthetic construct
  misc_feature 1..23: note = HLA-A targeting gRNA
  source 1..23: mol_type = other DNA
cgggggaccgggctgaccgcggg

SEQ ID NO: 1357 - DNA, 23 bp, synthetic construct
  misc_feature 1..23: note = HLA-A targeting gRNA
  source 1..23: mol_type = other DNA
gggggaccgggctgaccgcgggg

SEQ ID NO: 1358 - DNA, 23 bp, synthetic construct
  misc_feature 1..23: note = HLA-A targeting gRNA
  source 1..23: mol_type = other DNA
tcgggggaccgggctgaccgcgg

SEQ ID NO: 1359 - DNA, 23 bp, synthetic construct
  misc_feature 1..23: note = HLA-A targeting gRNA
  source 1..23: mol_type = other DNA
aggacccgggaagccgcgccggg

SEQ ID NO: 1360 - DNA, 23 bp, synthetic construct
  misc_feature 1..23: note = HLA-A targeting gRNA
  source 1..23: mol_type = other DNA
caggacccgggaagccgcgccgg

SEQ ID NO: 1361 - DNA, 23 bp, synthetic construct
  misc_feature 1..23: note = HLA-A targeting gRNA
  source 1..23: mol_type = other DNA
agcaggagggtccggagtattgg

SEQ ID NO: 1362 - DNA, 23 bp, synthetic construct
  misc_feature 1..23: note = HLA-A targeting gRNA
  source 1..23: mol_type = other DNA
gcaggagggtccggagtattggg

SEQ ID NO: 1363 - DNA, 23 bp, synthetic construct
  misc_feature 1..23: note = HLA-A targeting gRNA
  source 1..23: mol_type = other DNA
gggtccggagtattgggacgggg

SEQ ID NO: 1364 - DNA, 23 bp, synthetic construct
  misc_feature 1..23: note = HLA-A targeting gRNA
  source 1..23: mol_type = other DNA
aaaaatccccccaggttggtcgg

SEQ ID NO: 1365 - DNA, 23 bp, synthetic construct
  misc_feature 1..23: note = HLA-A targeting gRNA
  source 1..23: mol_type = other DNA
aaaatccccccaggttggtcggg

SEQ ID NO: 1366 - DNA, 23 bp, synthetic construct
  misc_feature 1..23: note = HLA-A targeting gRNA
  source 1..23: mol_type = other DNA
aaatccccccaggttggtcgggg

SEQ ID NO: 1367 - DNA, 23 bp, synthetic construct
  misc_feature 1..23: note = HLA-A targeting gRNA
  source 1..23: mol_type = other DNA
accgggctgaccgcggggtccgg

SEQ ID NO: 1368 - DNA, 23 bp, synthetic construct
  misc_feature 1..23: note = HLA-A targeting gRNA
  source 1..23: mol_type = other DNA
aggttggtcggggcggggcgggg

SEQ ID NO: 1369 - DNA, 23 bp, synthetic construct
  misc_feature 1..23: note = HLA-A targeting gRNA
  source 1..23: mol_type = other DNA
caggttggtcggggcggggcggg

SEQ ID NO: 1370 - DNA, 23 bp, synthetic construct
  misc_feature 1..23: note = HLA-A targeting gRNA
  source 1..23: mol_type = other DNA
ccaggttggtcggggcggggcgg

SEQ ID NO: 1371 - DNA, 23 bp, synthetic construct
  misc_feature 1..23: note = HLA-A targeting gRNA
  source 1..23: mol_type = other DNA
cccccaggttggtcggggcgggg

SEQ ID NO: 1372 - DNA, 23 bp, synthetic construct
  misc_feature 1..23: note = HLA-A targeting gRNA
  source 1..23: mol_type = other DNA
ccccccaggttggtcggggcggg

SEQ ID NO: 1373 - DNA, 23 bp, synthetic construct
  misc_feature 1..23: note = HLA-A targeting gRNA
  source 1..23: mol_type = other DNA
ccccgccccgaccaacctggggg

SEQ ID NO: 1374 - DNA, 23 bp, synthetic construct
  misc_feature 1..23: note = HLA-A targeting gRNA
  source 1..23: mol_type = other DNA
cccgccccgaccaacctgggggg

SEQ ID NO: 1375 - DNA, 23 bp, synthetic construct
  misc_feature 1..23: note = HLA-A targeting gRNA
  source 1..23: mol_type = other DNA
cccggaccccgcggtcagcccgg

SEQ ID NO: 1376 - DNA, 23 bp, synthetic construct
  misc_feature 1..23: note = HLA-A targeting gRNA
  source 1..23: mol_type = other DNA
ccgccccgccccgaccaacctgg

SEQ ID NO: 1377 - DNA, 23 bp, synthetic construct
  misc_feature 1..23: note = HLA-A targeting gRNA
  source 1..23: mol_type = other DNA
ccgggctgaccgcggggtccggg

SEQ ID NO: 1378 - DNA, 23 bp, synthetic construct
  misc_feature 1..23: note = HLA-A targeting gRNA
  source 1..23: mol_type = other DNA
cgccccgccccgaccaacctggg

SEQ ID NO: 1379 - DNA, 23 bp, synthetic construct
  misc_feature 1..23: note = HLA-A targeting gRNA
  source 1..23: mol_type = other DNA
gaccaacctggggggatttttgg

SEQ ID NO: 1380 - DNA, 23 bp, synthetic construct
  misc_feature 1..23: note = HLA-A targeting gRNA
  source 1..23: mol_type = other DNA
gccccgccccgaccaacctgggg

SEQ ID NO: 1381 - DNA, 23 bp, synthetic construct
  misc_feature 1..23: note = HLA-A targeting gRNA
  source 1..23: mol_type = other DNA
ggccaaaaatccccccaggttgg

SEQ ID NO: 1382 - DNA, 23 bp, synthetic construct
  misc_feature 1..23: note = HLA-A targeting gRNA
  source 1..23: mol_type = other DNA
tccccccaggttggtcggggcgg

SEQ ID NO: 1383 - DNA, 23 bp, synthetic construct
  misc_feature 1..23: note = HLA-A targeting gRNA
  source 1..23: mol_type = other DNA
tttaggccaaaaatccccccagg

SEQ ID NO: 1384 - DNA, 23 bp, synthetic construct
  misc_feature 1..23: note = HLA-A targeting gRNA
  source 1..23: mol_type = other DNA
acagactcaccgagtggacctgg

SEQ ID NO: 1385 - DNA, 23 bp, synthetic construct
  misc_feature 1..23: note = HLA-A targeting gRNA
  source 1..23: mol_type = other DNA
ctgaccgcggggtccgggccagg

SEQ ID NO: 1386 - DNA, 23 bp, synthetic construct
  misc_feature 1..23: note = HLA-A targeting gRNA
  source 1..23: mol_type = other DNA
gctgcgacgtggggtcggactgg

SEQ ID NO: 1387 - DNA, 23 bp, synthetic construct
  misc_feature 1..23: note = HLA-A targeting gRNA
  source 1..23: mol_type = other DNA
agaacctggcccggaccccgcgg

SEQ ID NO: 1388 - DNA, 23 bp, synthetic construct
  misc_feature 1..23: note = HLA-A targeting gRNA
  source 1..23: mol_type = other DNA
ctgacctgagtggaggctgaagg

SEQ ID NO: 1389 - DNA, 23 bp, synthetic construct
  misc_feature 1..23: note = HLA-A targeting gRNA
  source 1..23: mol_type = other DNA
gagtccttcagcctccactcagg

SEQ ID NO: 1390 - DNA, 23 bp, synthetic construct
  misc_feature 1..23: note = HLA-A targeting gRNA
  source 1..23: mol_type = other DNA
gctgaaggactcagaagtgctgg

SEQ ID NO: 1391 - DNA, 23 bp, synthetic construct
  misc_feature 1..23: note = HLA-A targeting gRNA
  source 1..23: mol_type = other DNA
cttcagcctccactcaggtcagg

SEQ ID NO: 1392 - DNA, 23 bp, synthetic construct
  misc_feature 1..23: note = HLA-A targeting gRNA
  source 1..23: mol_type = other DNA
acacctcagccccacctctctgg

SEQ ID NO: 1393 - DNA, 23 bp, synthetic construct
  misc_feature 1..23: note = HLA-A targeting gRNA
  source 1..23: mol_type = other DNA
cagccccacctctctggaacagg

SEQ ID NO: 1394 - DNA, 23 bp, synthetic construct
  misc_feature 1..23: note = HLA-A targeting gRNA
  source 1..23: mol_type = other DNA
ctttcctgttccagagaggtggg

SEQ ID NO: 1395 - DNA, 23 bp, synthetic construct
  misc_feature 1..23: note = HLA-A targeting gRNA
  source 1..23: mol_type = other DNA
gttccagagaggtggggctgagg

SEQ ID NO: 1396 - DNA, 23 bp, synthetic construct
  misc_feature 1..23: note = HLA-A targeting gRNA
  source 1..23: mol_type = other DNA
tcatctttcctgttccagagagg

SEQ ID NO: 1397 - DNA, 23 bp, synthetic construct
  misc_feature 1..23: note = HLA-A targeting gRNA
  source 1..23: mol_type = other DNA
tctggaacaggaaagatgattgg

SEQ ID NO: 1398 - DNA, 23 bp, synthetic construct
  misc_feature 1..23: note = HLA-A targeting gRNA
  source 1..23: mol_type = other DNA
tctttcctgttccagagaggtgg

SEQ ID NO: 1399 - DNA, 23 bp, synthetic construct
  misc_feature 1..23: note = HLA-A targeting gRNA
  source 1..23: mol_type = other DNA
tttcctgttccagagaggtgggg

SEQ ID NO: 1400 - DNA, 23 bp, synthetic construct
  misc_feature 1..23: note = HLA-A targeting gRNA
  source 1..23: mol_type = other DNA
caggttctcacaccgtccagagg

SEQ ID NO: 1401 - DNA, 23 bp, synthetic construct
  misc_feature 1..23: note = HLA-A targeting gRNA
  source 1..23: mol_type = other DNA
ctctggacggtgtgagaacctgg

SEQ ID NO: 1402 - DNA, 23 bp, synthetic construct
  misc_feature 1..23: note = HLA-A targeting gRNA
  source 1..23: mol_type = other DNA
cggactggcgcttcctccgcggg

SEQ ID NO: 1403 - DNA, 23 bp, synthetic construct
  misc_feature 1..23: note = HLA-A targeting gRNA
  source 1..23: mol_type = other DNA
cacaccgtccagaggatgtatgg

SEQ ID NO: 1404 - DNA, 23 bp, synthetic construct
  misc_feature 1..23: note = HLA-A targeting gRNA
  source 1..23: mol_type = other DNA
gacggtgtgagaacctggcccgg

SEQ ID NO: 1405 - DNA, 23 bp, synthetic construct
  misc_feature 1..23: note = HLA-A targeting gRNA
  source 1..23: mol_type = other DNA
ccatctctgtctcaacttcatgg

SEQ ID NO: 1406 - DNA, 23 bp, synthetic construct
  misc_feature 1..23: note = HLA-A targeting gRNA
  source 1..23: mol_type = other DNA
ccatgaagttgagacagagatgg

SEQ ID NO: 1407 - DNA, 23 bp, synthetic construct
  misc_feature 1..23: note = HLA-A targeting gRNA
  source 1..23: mol_type = other DNA
ctctcaactgctccgccacatgg

SEQ ID NO: 1408 - DNA, 23 bp, synthetic construct
  misc_feature 1..23: note = HLA-A targeting gRNA
  source 1..23: mol_type = other DNA
ctggaacaggaaagatgattggg

SEQ ID NO: 1409 - DNA, 23 bp, synthetic construct
  misc_feature 1..23: note = HLA-A targeting gRNA
  source 1..23: mol_type = other DNA
tggaacaggaaagatgattgggg

SEQ ID NO: 1410 - DNA, 23 bp, synthetic construct
  misc_feature 1..23: note = HLA-A targeting gRNA
  source 1..23: mol_type = other DNA
gagagcctggggacgaggagtgg

SEQ ID NO: 1411 - DNA, 23 bp, synthetic construct
  misc_feature 1..23: note = HLA-A targeting gRNA
  source 1..23: mol_type = other DNA
ggagtgagagcctggggacgagg

SEQ ID NO: 1412 - DNA, 23 bp, synthetic construct
  misc_feature 1..23: note = HLA-A targeting gRNA
  source 1..23: mol_type = other DNA
acctcatggagtgagagcctggg

SEQ ID NO: 1413 - DNA, 23 bp, synthetic construct
  misc_feature 1..23: note = HLA-A targeting gRNA
  source 1..23: mol_type = other DNA
ccagagcccccgagagtagcagg

SEQ ID NO: 1414 - DNA, 23 bp, synthetic construct
  misc_feature 1..23: note = HLA-A targeting gRNA
  source 1..23: mol_type = other DNA
ccccaggctctcactccatgagg

SEQ ID NO: 1415 - DNA, 23 bp, synthetic construct
  misc_feature 1..23: note = HLA-A targeting gRNA
  source 1..23: mol_type = other DNA
cctcatggagtgagagcctgggg

SEQ ID NO: 1416 - DNA, 23 bp, synthetic construct
  misc_feature 1..23: note = HLA-A targeting gRNA
  source 1..23: mol_type = other DNA
cctgctactctcgggggctctgg

SEQ ID NO: 1417 - DNA, 23 bp, synthetic construct
  misc_feature 1..23: note = HLA-A targeting gRNA
  source 1..23: mol_type = other DNA
ctctggccctgacccagacctgg

SEQ ID NO: 1418 - DNA, 23 bp, synthetic construct
  misc_feature 1..23: note = HLA-A targeting gRNA
  source 1..23: mol_type = other DNA
tacctcatggagtgagagcctgg

SEQ ID NO: 1419 - DNA, 23 bp, synthetic construct
  misc_feature 1..23: note = HLA-A targeting gRNA
  source 1..23: mol_type = other DNA
aagcaacgggcccgcctggcggg

SEQ ID NO: 1420 - DNA, 23 bp, synthetic construct
  misc_feature 1..23: note = HLA-A targeting gRNA
  source 1..23: mol_type = other DNA
agcaacgggcccgcctggcgggg

SEQ ID NO: 1421 - DNA, 23 bp, synthetic construct
  misc_feature 1..23: note = HLA-A targeting gRNA
  source 1..23: mol_type = other DNA
cccgttgcttctccccacagagg

SEQ ID NO: 1422 - DNA, 23 bp, synthetic construct
  misc_feature 1..23: note = HLA-A targeting gRNA
  source 1..23: mol_type = other DNA
ccgggtcctgcgcccccgccagg

SEQ ID NO: 1423 - DNA, 23 bp, synthetic construct
  misc_feature 1..23: note = HLA-A targeting gRNA
  source 1..23: mol_type = other DNA
cctctgtggggagaagcaacggg

SEQ ID NO: 1424 - DNA, 23 bp, synthetic construct
  misc_feature 1..23: note = HLA-A targeting gRNA
  source 1..23: mol_type = other DNA
cctggcgggggcgcaggacccgg

SEQ ID NO: 1425 - DNA, 23 bp, synthetic construct
  misc_feature 1..23: note = HLA-A targeting gRNA
  source 1..23: mol_type = other DNA
ctggcgggggcgcaggacccggg

SEQ ID NO: 1426 - DNA, 23 bp, synthetic construct
  misc_feature 1..23: note = HLA-A targeting gRNA
  source 1..23: mol_type = other DNA
gaagcaacgggcccgcctggcgg

SEQ ID NO: 1427 - DNA, 23 bp, synthetic construct
  misc_feature 1..23: note = HLA-A targeting gRNA
  source 1..23: mol_type = other DNA
gcaacgggcccgcctggcggggg

SEQ ID NO: 1428 - DNA, 23 bp, synthetic construct
  misc_feature 1..23: note = HLA-A targeting gRNA
  source 1..23: mol_type = other DNA
gcctctgtggggagaagcaacgg

SEQ ID NO: 1429 - DNA, 23 bp, synthetic construct
  misc_feature 1..23: note = HLA-A targeting gRNA
  source 1..23: mol_type = other DNA
ggagaagcaacgggcccgcctgg

SEQ ID NO: 1430 - DNA, 23 bp, synthetic construct
  misc_feature 1..23: note = HLA-A targeting gRNA
  source 1..23: mol_type = other DNA
ggcccgcctggcgggggcgcagg

SEQ ID NO: 1431 - DNA, 23 bp, synthetic construct
  misc_feature 1..23: note = HLA-A targeting gRNA
  source 1..23: mol_type = other DNA
ggtcctgcgcccccgccaggcgg

SEQ ID NO: 1432 - DNA, 23 bp, synthetic construct
  misc_feature 1..23: note = HLA-A targeting gRNA
  source 1..23: mol_type = other DNA
gtcctgcgcccccgccaggcggg

SEQ ID NO: 1433 - DNA, 23 bp, synthetic construct
  misc_feature 1..23: note = HLA-A targeting gRNA
  source 1..23: mol_type = other DNA
ccccttgcttctccccgcagagg

SEQ ID NO: 1434 - DNA, 23 bp, synthetic construct
  misc_feature 1..23: note = HLA-A targeting gRNA
  source 1..23: mol_type = other DNA
cctctgcggggagaagcaagggg

SEQ ID NO: 1435 - DNA, 23 bp, synthetic construct
  misc_feature 1..23: note = HLA-A targeting gRNA
  source 1..23: mol_type = other DNA
gcctctgcggggagaagcaaggg

SEQ ID NO: 1436 - DNA, 23 bp, synthetic construct
  misc_feature 1..23: note = HLA-A targeting gRNA
  source 1..23: mol_type = other DNA
actagaattctccacggaatagg

SEQ ID NO: 1437 - DNA, 23 bp, synthetic construct
  misc_feature 1..23: note = HLA-A targeting gRNA
  source 1..23: mol_type = other DNA
agaacctagcccggaccccgcgg

SEQ ID NO: 1438 - DNA, 23 bp, synthetic construct
  misc_feature 1..23: note = HLA-A targeting gRNA
  source 1..23: mol_type = other DNA
agaattctagtccctgaagaggg

SEQ ID NO: 1439 - DNA, 23 bp, synthetic construct
  misc_feature 1..23: note = HLA-A targeting gRNA
  source 1..23: mol_type = other DNA
cacaatatccaaaggacctcagg

SEQ ID NO: 1440 - DNA, 23 bp, synthetic construct
  misc_feature 1..23: note = HLA-A targeting gRNA
  source 1..23: mol_type = other DNA
ctcccaaacacaatatccaaagg

SEQ ID NO: 1441 - DNA, 23 bp, synthetic construct
  misc_feature 1..23: note = HLA-A targeting gRNA
  source 1..23: mol_type = other DNA
ctgaccgcggggtccgggctagg

SEQ ID NO: 1442 - DNA, 23 bp, synthetic construct
  misc_feature 1..23: note = HLA-A targeting gRNA
  source 1..23: mol_type = other DNA
gacggtgtgagaacctagcccgg

SEQ ID NO: 1443 - DNA, 23 bp, synthetic construct
  misc_feature 1..23: note = HLA-A targeting gRNA
  source 1..23: mol_type = other DNA
gagaattctagtccctgaagagg

SEQ ID NO: 1444 - DNA, 23 bp, synthetic construct
  misc_feature 1..23: note = HLA-A targeting gRNA
  source 1..23: mol_type = other DNA
ggctgatgcctgaggtcctttgg

SEQ ID NO: 1445 - DNA, 23 bp, synthetic construct
  misc_feature 1..23: note = HLA-A targeting gRNA
  source 1..23: mol_type = other DNA
ggtcctttggatattgtgtttgg

SEQ ID NO: 1446 - DNA, 23 bp, synthetic construct
  misc_feature 1..23: note = HLA-A targeting gRNA
  source 1..23: mol_type = other DNA
gtcctttggatattgtgtttggg

SEQ ID NO: 1447 - DNA, 23 bp, synthetic construct
  misc_feature 1..23: note = HLA-A targeting gRNA
  source 1..23: mol_type = other DNA
taggttctcacaccgtccagagg

SEQ ID NO: 1448 - DNA, 23 bp, synthetic construct
  misc_feature 1..23: note = HLA-A targeting gRNA
  source 1..23: mol_type = other DNA
tcagggactagaattctccacgg

SEQ ID NO: 1449 - DNA, 23 bp, synthetic construct
  misc_feature 1..23: note = HLA-A targeting gRNA
  source 1..23: mol_type = other DNA
acccagttctcactcccatcggg

SEQ ID NO: 1450 - DNA, 23 bp, synthetic construct
  misc_feature 1..23: note = HLA-A targeting gRNA
  source 1..23: mol_type = other DNA
acccgatgggagtgagaactggg

SEQ ID NO: 1451 - DNA, 23 bp, synthetic construct
  misc_feature 1..23: note = HLA-A targeting gRNA
  source 1..23: mol_type = other DNA
cacccgatgggagtgagaactgg

SEQ ID NO: 1452 - DNA, 23 bp, synthetic construct
  misc_feature 1..23: note = HLA-A targeting gRNA
  source 1..23: mol_type = other DNA
cgggagggaaacggcctctgcgg

SEQ ID NO: 1453 - DNA, 23 bp, synthetic construct
  misc_feature 1..23: note = HLA-A targeting gRNA
  source 1..23: mol_type = other DNA
ggagggaaacggcctctgcgggg

SEQ ID NO: 1454 - DNA, 23 bp, synthetic construct
  misc_feature 1..23: note = HLA-A targeting gRNA
  source 1..23: mol_type = other DNA
ggcctctgcggggagaagcaagg

SEQ ID NO: 1455 - DNA, 23 bp, synthetic construct
  misc_feature 1..23: note = HLA-A targeting gRNA
  source 1..23: mol_type = other DNA
gggagggaaacggcctctgcggg

SEQ ID NO: 1456 - DNA, 23 bp, synthetic construct
  misc_feature 1..23: note = HLA-A targeting gRNA
  source 1..23: mol_type = other DNA
aagacccgggaagccgcgccggg

SEQ ID NO: 1457 - DNA, 23 bp, synthetic construct
  misc_feature 1..23: note = HLA-A targeting gRNA
  source 1..23: mol_type = other DNA
aagcaaggggcccgcctggcggg

SEQ ID NO: 1458 - DNA, 23 bp, synthetic construct
  misc_feature 1..23: note = HLA-A targeting gRNA
  source 1..23: mol_type = other DNA
agcaaggggcccgcctggcgggg

SEQ ID NO: 1459 - DNA, 23 bp, synthetic construct
  misc_feature 1..23: note = HLA-A targeting gRNA
  source 1..23: mol_type = other DNA
caagacccgggaagccgcgccgg

SEQ ID NO: 1460 - DNA, 23 bp, synthetic construct
  misc_feature 1..23: note = HLA-A targeting gRNA
  source 1..23: mol_type = other DNA
ccgggtcttgcgcccccgccagg

SEQ ID NO: 1461 - DNA, 23 bp, synthetic construct
  misc_feature 1..23: note = HLA-A targeting gRNA
  source 1..23: mol_type = other DNA
cctggcgggggcgcaagacccgg

SEQ ID NO: 1462 - DNA, 23 bp, synthetic construct
  misc_feature 1..23: note = HLA-A targeting gRNA
  source 1..23: mol_type = other DNA
ctggcgggggcgcaagacccggg

SEQ ID NO: 1463 - DNA, 23 bp, synthetic construct
  misc_feature 1..23: note = HLA-A targeting gRNA
  source 1..23: mol_type = other DNA
gaagcaaggggcccgcctggcgg

SEQ ID NO: 1464 - DNA, 23 bp, synthetic construct
  misc_feature 1..23: note = HLA-A targeting gRNA
  source 1..23: mol_type = other DNA
gcaaggggcccgcctggcggggg

SEQ ID NO: 1465 - DNA, 23 bp, synthetic construct
  misc_feature 1..23: note = HLA-A targeting gRNA
  source 1..23: mol_type = other DNA
ggagaagcaaggggcccgcctgg

SEQ ID NO: 1466 - DNA, 23 bp, synthetic construct
  misc_feature 1..23: note = HLA-A targeting gRNA
  source 1..23: mol_type = other DNA
ggtcttgcgcccccgccaggcgg

SEQ ID NO: 1467 - DNA, 23 bp, synthetic construct
  misc_feature 1..23: note = HLA-A targeting gRNA
  source 1..23: mol_type = other DNA
gtcttgcgcccccgccaggcggg

SEQ ID NO: 1468 - DNA, 23 bp, synthetic construct
  misc_feature 1..23: note = HLA-A targeting gRNA
  source 1..23: mol_type = other DNA
ctggaaacccgacacccgatggg

SEQ ID NO: 1469 - DNA, 23 bp, synthetic construct
  misc_feature 1..23: note = HLA-A targeting gRNA
  source 1..23: mol_type = other DNA
gacccagttctcactcccatcgg

SEQ ID NO: 1470 - DNA, 23 bp, synthetic construct
  misc_feature 1..23: note = HLA-A targeting gRNA
  source 1..23: mol_type = other DNA
tctcactcccatcgggtgtcggg

SEQ ID NO: 1471 - DNA, 23 bp, synthetic construct
  misc_feature 1..23: note = HLA-A targeting gRNA
  source 1..23: mol_type = other DNA
tctggaaacccgacacccgatgg

SEQ ID NO: 1472 - DNA, 23 bp, synthetic construct
  misc_feature 1..23: note = HLA-A targeting gRNA
  source 1..23: mol_type = other DNA
ttctcactcccatcgggtgtcgg

SEQ ID NO: 1473 - DNA, 23 bp, synthetic construct
  misc_feature 1..23: note = HLA-A targeting gRNA
  source 1..23: mol_type = other DNA
agtacccgcgcagggtccccagg

SEQ ID NO: 1474 - DNA, 23 bp, synthetic construct
  misc_feature 1..23: note = HLA-A targeting gRNA
  source 1..23: mol_type = other DNA
atttctttacatccgtgtcccgg

SEQ ID NO: 1475 - DNA, 23 bp, synthetic construct
  misc_feature 1..23: note = HLA-A targeting gRNA
  source 1..23: mol_type = other DNA
cgggtactacaaccagagcgagg

SEQ ID NO: 1476 - DNA, 23 bp, synthetic construct
  misc_feature 1..23: note = HLA-A targeting gRNA
  source 1..23: mol_type = other DNA
ctggttgtagtacccgcgcaggg

SEQ ID NO: 1477 - DNA, 23 bp, synthetic construct
  misc_feature 1..23: note = HLA-A targeting gRNA
  source 1..23: mol_type = other DNA
ggatgtaaagaaatacctcatgg

SEQ ID NO: 1478 - DNA, 23 bp, synthetic construct
  misc_feature 1..23: note = HLA-A targeting gRNA
  source 1..23: mol_type = other DNA
tctggttgtagtacccgcgcagg

SEQ ID NO: 1479 - DNA, 23 bp, synthetic construct
  misc_feature 1..23: note = HLA-A targeting gRNA
  source 1..23: mol_type = other DNA
tggacctggggaccctgcgcggg

SEQ ID NO: 1480 - DNA, 23 bp, synthetic construct
  misc_feature 1..23: note = HLA-A targeting gRNA
  source 1..23: mol_type = other DNA
tttacatccgtgtcccggcccgg

SEQ ID NO: 1481 - DNA, 23 bp, synthetic construct
  misc_feature 1..23: note = HLA-A targeting gRNA
  source 1..23: mol_type = other DNA
aaaatctctgaaggaatgaccgg

SEQ ID NO: 1482 - DNA, 23 bp, synthetic construct
  misc_feature 1..23: note = HLA-A targeting gRNA
  source 1..23: mol_type = other DNA
aaaggcacctgggcctctcccgg

SEQ ID NO: 1483 - DNA, 23 bp, synthetic construct
  misc_feature 1..23: note = HLA-A targeting gRNA
  source 1..23: mol_type = other DNA
atatcggacccggagactgtggg

SEQ ID NO: 1484 - DNA, 23 bp, synthetic construct
  misc_feature 1..23: note = HLA-A targeting gRNA
  source 1..23: mol_type = other DNA
cgatatccgccccgaagccgcgg

SEQ ID NO: 1485 - DNA, 23 bp, synthetic construct
  misc_feature 1..23: note = HLA-A targeting gRNA
  source 1..23: mol_type = other DNA
cgcggcttcggggcggatatcgg

SEQ ID NO: 1486 - DNA, 23 bp, synthetic construct
  misc_feature 1..23: note = HLA-A targeting gRNA
  source 1..23: mol_type = other DNA
aagagcgcaggtcgtctttcagg

SEQ ID NO: 1487 - DNA, 23 bp, synthetic construct
  misc_feature 1..23: note = HLA-A targeting gRNA
  source 1..23: mol_type = other DNA
gatatccgccccgaagccgcggg

SEQ ID NO: 1488 - DNA, 23 bp, synthetic construct
  misc_feature 1..23: note = HLA-A targeting gRNA
  source 1..23: mol_type = other DNA
gatatcggacccggagactgtgg

SEQ ID NO: 1489 - DNA, 23 bp, synthetic construct
  misc_feature 1..23: note = HLA-A targeting gRNA
  source 1..23: mol_type = other DNA
aagcggggctcctcgcggccggg

SEQ ID NO: 1490 - DNA, 23 bp, synthetic construct
  misc_feature 1..23: note = HLA-A targeting gRNA
  source 1..23: mol_type = other DNA
aaggcacctgggcctctcccggg

SEQ ID NO: 1491 - DNA, 23 bp, synthetic construct
  misc_feature 1..23: note = HLA-A targeting gRNA
  source 1..23: mol_type = other DNA
ttcggggcggatatcggacccgg

SEQ ID NO: 1492 - DNA, 23 bp, synthetic construct
  misc_feature 1..23: note = HLA-A targeting gRNA
  source 1..23: mol_type = other DNA
acaccacgcacgtgccctccagg

SEQ ID NO: 1493 - DNA, 23 bp, synthetic construct
  misc_feature 1..23: note = HLA-A targeting gRNA
  source 1..23: mol_type = other DNA
acacggacctggcagcgggatgg

SEQ ID NO: 1494 - DNA, 23 bp, synthetic construct
  misc_feature 1..23: note = HLA-A targeting gRNA
  source 1..23: mol_type = other DNA
caggttctcacaccctccagagg

SEQ ID NO: 1495 - DNA, 23 bp, synthetic construct
  misc_feature 1..23: note = HLA-A targeting gRNA
  source 1..23: mol_type = other DNA
cggactggcgcttcctgcgcggg

SEQ ID NO: 1496 - DNA, 23 bp, synthetic construct
  misc_feature 1..23: note = HLA-A targeting gRNA
  source 1..23: mol_type = other DNA
cgtactggtggtacccgcgcagg

SEQ ID NO: 1497 - DNA, 23 bp, synthetic construct
  misc_feature 1..23: note = HLA-A targeting gRNA
  source 1..23: mol_type = other DNA
ctctggagggtgtgagaacctgg

SEQ ID NO: 1498 - DNA, 23 bp, synthetic construct
  misc_feature 1..23: note = HLA-A targeting gRNA
  source 1..23: mol_type = other DNA
gagggtgtgagaacctggcccgg

SEQ ID NO: 1499 - DNA, 23 bp, synthetic construct
  misc_feature 1..23: note = HLA-A targeting gRNA
  source 1..23: mol_type = other DNA
tcggactggcgcttcctgcgcgg

SEQ ID NO: 1500 - DNA, 23 bp, synthetic construct
  misc_feature 1..23: note = HLA-A targeting gRNA
  source 1..23: mol_type = other DNA
acagcgacgccgcgagccggagg

SEQ ID NO: 1501 - DNA, 23 bp, synthetic construct
  misc_feature 1..23: note = HLA-A targeting gRNA
  source 1..23: mol_type = other DNA
cgacgccgcgagccggaggatgg

SEQ ID NO: 1502 - DNA, 23 bp, synthetic construct
  misc_feature 1..23: note = HLA-A targeting gRNA
  source 1..23: mol_type = other DNA
cgagccggaggatggagccgcgg

SEQ ID NO: 1503 - DNA, 23 bp, synthetic construct
  misc_feature 1..23: note = HLA-A targeting gRNA
  source 1..23: mol_type = other DNA
cggctccatcctccggctcgcgg

SEQ ID NO: 1504 - DNA, 23 bp, synthetic construct
  misc_feature 1..23: note = HLA-A targeting gRNA
  source 1..23: mol_type = other DNA
gagccggaggatggagccgcggg

SEQ ID NO: 1505 - DNA, 23 bp, synthetic construct
  misc_feature 1..23: note = HLA-A targeting gRNA
  source 1..23: mol_type = other DNA
gcgcccgcggctccatcctccgg

SEQ ID NO: 1506 - DNA, 23 bp, synthetic construct
  misc_feature 1..23: note = HLA-A targeting gRNA
  source 1..23: mol_type = other DNA
tcgacagcgacgccgcgagccgg

SEQ ID NO: 1507 - DNA, 23 bp, synthetic construct
  misc_feature 1..23: note = HLA-A targeting gRNA
  source 1..23: mol_type = other DNA
cactcggtcagtctgtgagtggg

SEQ ID NO: 1508 - DNA, 23 bp, synthetic construct
  misc_feature 1..23: note = HLA-A targeting gRNA
  source 1..23: mol_type = other DNA
ccactcacagactgaccgagtgg

SEQ ID NO: 1509 - DNA, 23 bp, synthetic construct
  misc_feature 1..23: note = HLA-A targeting gRNA
  source 1..23: mol_type = other DNA
ccactcggtcagtctgtgagtgg

SEQ ID NO: 1510 - DNA, 23 bp, synthetic construct
  misc_feature 1..23: note = HLA-A targeting gRNA
  source 1..23: mol_type = other DNA
acggacctggcagcgggatgggg

SEQ ID NO: 1511 - DNA, 23 bp, synthetic construct
  misc_feature 1..23: note = HLA-A targeting gRNA
  source 1..23: mol_type = other DNA
acggctctgggaaaaggggaagg

SEQ ID NO: 1512 - DNA, 23 bp, synthetic construct
  misc_feature 1..23: note = HLA-A targeting gRNA
  source 1..23: mol_type = other DNA
actagccgcgcagggtccccagg

SEQ ID NO: 1513 - DNA, 23 bp, synthetic construct
  misc_feature 1..23: note = HLA-A targeting gRNA
  source 1..23: mol_type = other DNA
actcctttctgggatctcacagg

SEQ ID NO: 1514 - DNA, 23 bp, synthetic construct
  misc_feature 1..23: note = HLA-A targeting gRNA
  source 1..23: mol_type = other DNA
agaccaggcctgccaggggatgg

SEQ ID NO: 1515 - DNA, 23 bp, synthetic construct
  misc_feature 1..23: note = HLA-A targeting gRNA
  source 1..23: mol_type = other DNA
agaccctggcccggaccccgcgg

SEQ ID NO: 1516 - DNA, 23 bp, synthetic construct
  misc_feature 1..23: note = HLA-A targeting gRNA
  source 1..23: mol_type = other DNA
acatagctccaaagagaactagg

SEQ ID NO: 1517 - DNA, 23 bp, synthetic construct
  misc_feature 1..23: note = HLA-A targeting gRNA
  source 1..23: mol_type = other DNA
agctatgttcgctggagctgtgg

SEQ ID NO: 1518 - DNA, 23 bp, synthetic construct
  misc_feature 1..23: note = HLA-A targeting gRNA
  source 1..23: mol_type = other DNA
cctcctccgcgggtaccagcagg

SEQ ID NO: 1519 - DNA, 23 bp, synthetic construct
  misc_feature 1..23: note = HLA-A targeting gRNA
  source 1..23: mol_type = other DNA
cctgctggtacccgcggaggagg

SEQ ID NO: 1520 - DNA, 23 bp, synthetic construct
  misc_feature 1..23: note = HLA-A targeting gRNA
  source 1..23: mol_type = other DNA
ctctttggagctatgttcgctgg

SEQ ID NO: 1521 - DNA, 23 bp, synthetic construct
  misc_feature 1..23: note = HLA-A targeting gRNA
  source 1..23: mol_type = other DNA
tcatgtcttttacggaaagcagg

SEQ ID NO: 1522 - DNA, 23 bp, synthetic construct
  misc_feature 1..23: note = HLA-A targeting gRNA
  source 1..23: mol_type = other DNA
tgggggtgtcatgtcttttacgg

SEQ ID NO: 1523 - DNA, 23 bp, synthetic construct
  misc_feature 1..23: note = HLA-A targeting gRNA
  source 1..23: mol_type = other DNA
agagcgcaggtcgtctttcaggg

SEQ ID NO: 1524 - DNA, 23 bp, synthetic construct
  misc_feature 1..23: note = HLA-A targeting gRNA
  source 1..23: mol_type = other DNA
agatcacacggacctggcagcgg

SEQ ID NO: 1525 - DNA, 23 bp, synthetic construct
  misc_feature 1..23: note = HLA-A targeting gRNA
  source 1..23: mol_type = other DNA
agattctcccccagacgccgagg

SEQ ID NO: 1526 - DNA, 23 bp, synthetic construct
  misc_feature 1..23: note = HLA-A targeting gRNA
  source 1..23: mol_type = other DNA
aggatgtgtggctgcgacgtggg

SEQ ID NO: 1527 - DNA, 23 bp, synthetic construct
  misc_feature 1..23: note = HLA-A targeting gRNA
  source 1..23: mol_type = other DNA
aggatgtttggctgcgacgtggg

SEQ ID NO: 1528 - DNA, 23 bp, synthetic construct
  misc_feature 1..23: note = HLA-A targeting gRNA
  source 1..23: mol_type = other DNA
aggcacctgggcctctcccgggg

SEQ ID NO: 1529 - DNA, 23 bp, synthetic construct
  misc_feature 1..23: note = HLA-A targeting gRNA
  source 1..23: mol_type = other DNA
aggcataatgtgaggagggtggg

SEQ ID NO: 1530 - DNA, 23 bp, synthetic construct
  misc_feature 1..23: note = HLA-A targeting gRNA
  source 1..23: mol_type = other DNA
aggcgaactggtggtacccgcgg

SEQ ID NO: 1531 - DNA, 23 bp, synthetic construct
  misc_feature 1..23: note = HLA-A targeting gRNA
  source 1..23: mol_type = other DNA
aggcgtagtggtggtacccgcgg

SEQ ID NO: 1532 - DNA, 23 bp, synthetic construct
  misc_feature 1..23: note = HLA-A targeting gRNA
  source 1..23: mol_type = other DNA
aggtccgtgtgatctccgcaggg

SEQ ID NO: 1533 - DNA, 23 bp, synthetic construct
  misc_feature 1..23: note = HLA-A targeting gRNA
  source 1..23: mol_type = other DNA
atttctacacatccgtgtcccgg

SEQ ID NO: 1534 - DNA, 23 bp, synthetic construct
  misc_feature 1..23: note = HLA-A targeting gRNA
  source 1..23: mol_type = other DNA
cacaccctccagatgatgtatgg

SEQ ID NO: 1535 - DNA, 23 bp, synthetic construct
  misc_feature 1..23: note = HLA-A targeting gRNA
  source 1..23: mol_type = other DNA
caagtgggagacggcccatgagg

SEQ ID NO: 1536 - DNA, 23 bp, synthetic construct
  misc_feature 1..23: note = HLA-A targeting gRNA
  source 1..23: mol_type = other DNA
cacaccgtccagaggatgtgtgg

SEQ ID NO: 1537 - DNA, 23 bp, synthetic construct
  misc_feature 1..23: note = HLA-A targeting gRNA
  source 1..23: mol_type = other DNA
cacaccgtccagaggatgtttgg

SEQ ID NO: 1538 - DNA, 23 bp, synthetic construct
  misc_feature 1..23: note = HLA-A targeting gRNA
  source 1..23: mol_type = other DNA
cacagcctcccacttctggaagg

SEQ ID NO: 1539 - DNA, 23 bp, synthetic construct
  misc_feature 1..23: note = HLA-A targeting gRNA
  source 1..23: mol_type = other DNA
gtgggagacggcccatgaggcgg

SEQ ID NO: 1540 - DNA, 23 bp, synthetic construct
  misc_feature 1..23: note = HLA-A targeting gRNA
  source 1..23: mol_type = other DNA
caccaagcacaagtgggagacgg

SEQ ID NO: 1541 - DNA, 23 bp, synthetic construct
  misc_feature 1..23: note = HLA-A targeting gRNA
  source 1..23: mol_type = other DNA
aggtggggtgaagggatgaaggg

SEQ ID NO: 1542 - DNA, 23 bp, synthetic construct
  misc_feature 1..23: note = HLA-A targeting gRNA
  source 1..23: mol_type = other DNA
caggtggggtgaagggatgaagg

SEQ ID NO: 1543 - DNA, 23 bp, synthetic construct
  misc_feature 1..23: note = HLA-A targeting gRNA
  source 1..23: mol_type = other DNA
ggggtgaagggatgaagggtggg

SEQ ID NO: 1544 - DNA, 23 bp, synthetic construct
  misc_feature 1..23: note = HLA-A targeting gRNA
  source 1..23: mol_type = other DNA
tggggtgaagggatgaagggtgg

SEQ ID NO: 1545 - DNA, 23 bp, synthetic construct
  misc_feature 1..23: note = HLA-A targeting gRNA
  source 1..23: mol_type = other DNA
aggcgtcctgctggtacccgcgg

SEQ ID NO: 1546 - DNA, 23 bp, synthetic construct
  misc_feature 1..23: note = HLA-A targeting gRNA
  source 1..23: mol_type = other DNA
cacggacctggcagcgggatggg

SEQ ID NO: 1547 - DNA, 23 bp, synthetic construct
  misc_feature 1..23: note = HLA-A targeting gRNA
  source 1..23: mol_type = other DNA
taccagcaggacgcctacgacgg

SEQ ID NO: 1548 - DNA, 23 bp, synthetic construct
  misc_feature 1..23: note = HLA-A targeting gRNA
  source 1..23: mol_type = other DNA
tgccgtcgtaggcgtcctgctgg

SEQ ID NO: 1549 - DNA, 23 bp, synthetic construct
  misc_feature 1..23: note = HLA-A targeting gRNA
  source 1..23: mol_type = other DNA
agtattgggacgaggagacaggg

SEQ ID NO: 1550 - DNA, 23 bp, synthetic construct
  misc_feature 1..23: note = HLA-A targeting gRNA
  source 1..23: mol_type = other DNA
cgaggagacagggaaagtgaagg

SEQ ID NO: 1551 - DNA, 23 bp, synthetic construct
  misc_feature 1..23: note = HLA-A targeting gRNA
  source 1..23: mol_type = other DNA
cagggtctcacaccgtccagagg

SEQ ID NO: 1552 - DNA, 23 bp, synthetic construct
  misc_feature 1..23: note = HLA-A targeting gRNA
  source 1..23: mol_type = other DNA
gagtattgggacgaggagacagg

SEQ ID NO: 1553 - DNA, 23 bp, synthetic construct
  misc_feature 1..23: note = HLA-A targeting gRNA
  source 1..23: mol_type = other DNA
caggtccgtgtgatctccgcagg

SEQ ID NO: 1554 - DNA, 23 bp, synthetic construct
  misc_feature 1..23: note = HLA-A targeting gRNA
  source 1..23: mol_type = other DNA
ggggccggagtattgggacgagg

SEQ ID NO: 1555 - DNA, 23 bp, synthetic construct
  misc_feature 1..23: note = HLA-A targeting gRNA
  source 1..23: mol_type = other DNA
cggcccatgtggcggagcagtgg

SEQ ID NO: 1556 - DNA, 23 bp, synthetic construct
  misc_feature 1..23: note = HLA-A targeting gRNA
  source 1..23: mol_type = other DNA
ctctccactgctccgccacatgg

SEQ ID NO: 1557 - DNA, 23 bp, synthetic construct
  misc_feature 1..23: note = HLA-A targeting gRNA
  source 1..23: mol_type = other DNA
tctccactgctccgccacatggg

SEQ ID NO: 1558 - DNA, 23 bp, synthetic construct
  misc_feature 1..23: note = HLA-A targeting gRNA
  source 1..23: mol_type = other DNA
cagttgaaagcctacctggaggg

SEQ ID NO: 1559 - DNA, 23 bp, synthetic construct
  misc_feature 1..23: note = HLA-A targeting gRNA
  source 1..23: mol_type = other DNA
catgtttcctgatcccgcctggg

SEQ ID NO: 1560 - DNA, 23 bp, synthetic construct
  misc_feature 1..23: note = HLA-A targeting gRNA
  source 1..23: mol_type = other DNA
ccaccacagcctcccacttctgg

SEQ ID NO: 1561 - DNA, 23 bp, synthetic construct
  misc_feature 1..23: note = HLA-A targeting gRNA
  source 1..23: mol_type = other DNA
ccactacgcctacgacggcaagg

SEQ ID NO: 1562 - DNA, 23 bp, synthetic construct
  misc_feature 1..23: note = HLA-A targeting gRNA
  source 1..23: mol_type = other DNA
ccagaagtgggaggctgtggtgg

SEQ ID NO: 1563 - DNA, 23 bp, synthetic construct
  misc_feature 1..23: note = HLA-A targeting gRNA
  source 1..23: mol_type = other DNA
atctggagggtgtgagaacctgg

SEQ ID NO: 1564 - DNA, 23 bp, synthetic construct
  misc_feature 1..23: note = HLA-A targeting gRNA
  source 1..23: mol_type = other DNA
ccagtcccccgagccccgcccgg

SEQ ID NO: 1565 - DNA, 23 bp, synthetic construct
  misc_feature 1..23: note = HLA-A targeting gRNA
  source 1..23: mol_type = other DNA
ccgcccggccccgaccaacccgg

SEQ ID NO: 1566 - DNA, 23 bp, synthetic construct
  misc_feature 1..23: note = HLA-A targeting gRNA
  source 1..23: mol_type = other DNA
ccgggcggggctcgggggactgg

SEQ ID NO: 1567 - DNA, 23 bp, synthetic construct
  misc_feature 1..23: note = HLA-A targeting gRNA
  source 1..23: mol_type = other DNA
ccgggttggtcggggccgggcgg

SEQ ID NO: 1568 - DNA, 23 bp, synthetic construct
  misc_feature 1..23: note = HLA-A targeting gRNA
  source 1..23: mol_type = other DNA
cgcccggccccgaccaacccggg

SEQ ID NO: 1569 - DNA, 23 bp, synthetic construct
  misc_feature 1..23: note = HLA-A targeting gRNA
  source 1..23: mol_type = other DNA
cgggcggggctcgggggactggg

SEQ ID NO: 1570 - DNA, 23 bp, synthetic construct
  misc_feature 1..23: note = HLA-A targeting gRNA
  source 1..23: mol_type = other DNA
cggggccgggcggggctcggggg

SEQ ID NO: 1571 - DNA, 23 bp, synthetic construct
  misc_feature 1..23: note = HLA-A targeting gRNA
  source 1..23: mol_type = other DNA
cgggttggtcggggccgggcggg

SEQ ID NO: 1572 - DNA, 23 bp, synthetic construct
  misc_feature 1..23: note = HLA-A targeting gRNA
  source 1..23: mol_type = other DNA
gggttggtcggggccgggcgggg

SEQ ID NO: 1573 - DNA, 23 bp, synthetic construct
  misc_feature 1..23: note = HLA-A targeting gRNA
  source 1..23: mol_type = other DNA
ggtcggggccgggcggggctcgg

SEQ ID NO: 1574 - DNA, 23 bp, synthetic construct
  misc_feature 1..23: note = HLA-A targeting gRNA
  source 1..23: mol_type = other DNA
gtcggggccgggcggggctcggg

SEQ ID NO: 1575 - DNA, 23 bp, synthetic construct
  misc_feature 1..23: note = HLA-A targeting gRNA
  source 1..23: mol_type = other DNA
gtttggctgcgacgtggggtcgg

SEQ ID NO: 1576 - DNA, 23 bp, synthetic construct
  misc_feature 1..23: note = HLA-A targeting gRNA
  source 1..23: mol_type = other DNA
tcggggccgggcggggctcgggg

SEQ ID NO: 1577 - DNA, 23 bp, synthetic construct
  misc_feature 1..23: note = HLA-A targeting gRNA
  source 1..23: mol_type = other DNA
gtctcctcgtcccaatactccgg

SEQ ID NO: 1578 - DNA, 23 bp, synthetic construct
  misc_feature 1..23: note = HLA-A targeting gRNA
  source 1..23: mol_type = other DNA
acaagaacacagacacatgcagg

SEQ ID NO: 1579 - DNA, 23 bp, synthetic construct
  misc_feature 1..23: note = HLA-A targeting gRNA
  source 1..23: mol_type = other DNA
cttgtaggcataatgtgaggagg

SEQ ID NO: 1580 - DNA, 23 bp, synthetic construct
  misc_feature 1..23: note = HLA-A targeting gRNA
  source 1..23: mol_type = other DNA
gcatgtgtctgtgttcttgtagg

SEQ ID NO: 1581 - DNA, 23 bp, synthetic construct
  misc_feature 1..23: note = HLA-A targeting gRNA
  source 1..23: mol_type = other DNA
gttcttgtaggcataatgtgagg

SEQ ID NO: 1582 - DNA, 23 bp, synthetic construct
  misc_feature 1..23: note = HLA-A targeting gRNA
  source 1..23: mol_type = other DNA
ccgccgcggtcaaagagcgcagg

SEQ ID NO: 1583 - DNA, 23 bp, synthetic construct
  misc_feature 1..23: note = HLA-A targeting gRNA
  source 1..23: mol_type = other DNA
agagcgcaggtcctcgttcaagg

SEQ ID NO: 1584 - DNA, 23 bp, synthetic construct
  misc_feature 1..23: note = HLA-A targeting gRNA
  source 1..23: mol_type = other DNA
aagagctcaggtggggtgaaggg

SEQ ID NO: 1585 - DNA, 23 bp, synthetic construct
  misc_feature 1..23: note = HLA-A targeting gRNA
  source 1..23: mol_type = other DNA
aggtggaggaggaagagctcagg

SEQ ID NO: 1586 - DNA, 23 bp, synthetic construct
  misc_feature 1..23: note = HLA-A targeting gRNA
  source 1..23: mol_type = other DNA
attgctggcctagttctctttgg

SEQ ID NO: 1587 - DNA, 23 bp, synthetic construct
  misc_feature 1..23: note = HLA-A targeting gRNA
  source 1..23: mol_type = other DNA
ctgtggtcgctgctgtgaggtgg

SEQ ID NO: 1588 - DNA, 23 bp, synthetic construct
  misc_feature 1..23: note = HLA-A targeting gRNA
  source 1..23: mol_type = other DNA
gaagagctcaggtggggtgaagg

SEQ ID NO: 1589 - DNA, 23 bp, synthetic construct
  misc_feature 1..23: note = HLA-A targeting gRNA
  source 1..23: mol_type = other DNA
gaagcaccatccacaattatggg

SEQ ID NO: 1590 - DNA, 23 bp, synthetic construct
  misc_feature 1..23: note = HLA-A targeting gRNA
  source 1..23: mol_type = other DNA
gagctgtggtcgctgctgtgagg

SEQ ID NO: 1591 - DNA, 23 bp, synthetic construct
  misc_feature 1..23: note = HLA-A targeting gRNA
  source 1..23: mol_type = other DNA
ggaagcaccatccacaattatgg

SEQ ID NO: 1592 - DNA, 23 bp, synthetic construct
  misc_feature 1..23: note = HLA-A targeting gRNA
  source 1..23: mol_type = other DNA
ggtaggcccataattgtggatgg

SEQ ID NO: 1593 - DNA, 23 bp, synthetic construct
  misc_feature 1..23: note = HLA-A targeting gRNA
  source 1..23: mol_type = other DNA
tcgctgctgtgaggtggaggagg

SEQ ID NO: 1594 - DNA, 23 bp, synthetic construct
  misc_feature 1..23: note = HLA-A targeting gRNA
  source 1..23: mol_type = other DNA
tggtcgctgctgtgaggtggagg

SEQ ID NO: 1595 - DNA, 23 bp, synthetic construct
  misc_feature 1..23: note = HLA-A targeting gRNA
  source 1..23: mol_type = other DNA
ggattacatcgccttgaacgagg

SEQ ID NO: 1596 - DNA, 23 bp, synthetic construct
  misc_feature 1..23: note = HLA-A targeting gRNA
  source 1..23: mol_type = other DNA
cctgcgctctttgaccgcggcgg

SEQ ID NO: 1597 - DNA, 23 bp, synthetic construct
  misc_feature 1..23: note = HLA-A targeting gRNA
  source 1..23: mol_type = other DNA
actgggctgaccgtggggtcggg

SEQ ID NO: 1598 - DNA, 23 bp, synthetic construct
  misc_feature 1..23: note = HLA-A targeting gRNA
  source 1..23: mol_type = other DNA
agaacctggccccgaccccacgg

SEQ ID NO: 1599 - DNA, 23 bp, synthetic construct
  misc_feature 1..23: note = HLA-A targeting gRNA
  source 1..23: mol_type = other DNA
ccagtcccccgagccccgtccgg

SEQ ID NO: 1600 - DNA, 23 bp, synthetic construct
  misc_feature 1..23: note = HLA-A targeting gRNA
  source 1..23: mol_type = other DNA
ccggacggggctcgggggactgg

SEQ ID NO: 1601 - DNA, 23 bp, synthetic construct
  misc_feature 1..23: note = HLA-A targeting gRNA
  source 1..23: mol_type = other DNA
ccgggttggtcggggccggacgg

SEQ ID NO: 1602 - DNA, 23 bp, synthetic construct
  misc_feature 1..23: note = HLA-A targeting gRNA
  source 1..23: mol_type = other DNA
ccgtccggccccgaccaacccgg

SEQ ID NO: 1603 - DNA, 23 bp, synthetic construct
  misc_feature 1..23: note = HLA-A targeting gRNA
  source 1..23: mol_type = other DNA
cggacggggctcgggggactggg

SEQ ID NO: 1604 - DNA, 23 bp, synthetic construct
  misc_feature 1..23: note = HLA-A targeting gRNA
  source 1..23: mol_type = other DNA
cggggccggacggggctcggggg

SEQ ID NO: 1605 - DNA, 23 bp, synthetic construct
  misc_feature 1..23: note = HLA-A targeting gRNA
  source 1..23: mol_type = other DNA
cgggggactgggctgaccgtggg

SEQ ID NO: 1606 - DNA, 23 bp, synthetic construct
  misc_feature 1..23: note = HLA-A targeting gRNA
  source 1..23: mol_type = other DNA
cgggttggtcggggccggacggg

SEQ ID NO: 1607 - DNA, 23 bp, synthetic construct
  misc_feature 1..23: note = HLA-A targeting gRNA
  source 1..23: mol_type = other DNA
cgtccggccccgaccaacccggg

SEQ ID NO: 1608 - DNA, 23 bp, synthetic construct
  misc_feature 1..23: note = HLA-A targeting gRNA
  source 1..23: mol_type = other DNA
ctgaccgtggggtcggggccagg

SEQ ID NO: 1609 - DNA, 23 bp, synthetic construct
  misc_feature 1..23: note = HLA-A targeting gRNA
  source 1..23: mol_type = other DNA
ctgggctgaccgtggggtcgggg

SEQ ID NO: 1610 - DNA, 23 bp, synthetic construct
  misc_feature 1..23: note = HLA-A targeting gRNA
  source 1..23: mol_type = other DNA
gactgggctgaccgtggggtcgg

SEQ ID NO: 1611 - DNA, 23 bp, synthetic construct
  misc_feature 1..23: note = HLA-A targeting gRNA
  source 1..23: mol_type = other DNA
gggggactgggctgaccgtgggg

SEQ ID NO: 1612 - DNA, 23 bp, synthetic construct
  misc_feature 1..23: note = HLA-A targeting gRNA
  source 1..23: mol_type = other DNA
gggttggtcggggccggacgggg

SEQ ID NO: 1613 - DNA, 23 bp, synthetic construct
  misc_feature 1..23: note = HLA-A targeting gRNA
  source 1..23: mol_type = other DNA
ggtcggggccggacggggctcgg

SEQ ID NO: 1614 - DNA, 23 bp, synthetic construct
  misc_feature 1..23: note = HLA-A targeting gRNA
  source 1..23: mol_type = other DNA
gtccggccccgaccaacccgggg

SEQ ID NO: 1615 - DNA, 23 bp, synthetic construct
  misc_feature 1..23: note = HLA-A targeting gRNA
  source 1..23: mol_type = other DNA
gtcggggccggacggggctcggg

SEQ ID NO: 1616 - DNA, 23 bp, synthetic construct
  misc_feature 1..23: note = HLA-A targeting gRNA
  source 1..23: mol_type = other DNA
tccggccccgaccaacccggggg

SEQ ID NO: 1617 - DNA, 23 bp, synthetic construct
  misc_feature 1..23: note = HLA-A targeting gRNA
  source 1..23: mol_type = other DNA
tcggggccggacggggctcgggg

SEQ ID NO: 1618 - DNA, 23 bp, synthetic construct
  misc_feature 1..23: note = HLA-A targeting gRNA
  source 1..23: mol_type = other DNA
tcgggggactgggctgaccgtgg

SEQ ID NO: 1619 - DNA, 23 bp, synthetic construct
  misc_feature 1..23: note = HLA-A targeting gRNA
  source 1..23: mol_type = other DNA
gcgtcttgggggcgtctgtcagg

SEQ ID NO: 1620 - DNA, 23 bp, synthetic construct
  misc_feature 1..23: note = HLA-A targeting gRNA
  source 1..23: mol_type = other DNA
ctctcggtcagtctgtgagtggg

SEQ ID NO: 1621 - DNA, 23 bp, synthetic construct
  misc_feature 1..23: note = HLA-A targeting gRNA
  source 1..23: mol_type = other DNA
ccttgccgtcgtaggcgtagtgg

SEQ ID NO: 1622 - DNA, 23 bp, synthetic construct
  misc_feature 1..23: note = HLA-A targeting gRNA
  source 1..23: mol_type = other DNA
tctctcggtcagtctgtgagtgg

SEQ ID NO: 1623 - DNA, 23 bp, synthetic construct
  misc_feature 1..23: note = HLA-A targeting gRNA
  source 1..23: mol_type = other DNA
cgaactggtggtacccgcggagg

SEQ ID NO: 1624 - DNA, 23 bp, synthetic construct
  misc_feature 1..23: note = HLA-A targeting gRNA
  source 1..23: mol_type = other DNA
cgacctgcgctcttggaccgcgg

SEQ ID NO: 1625 - DNA, 23 bp, synthetic construct
  misc_feature 1..23: note = HLA-A targeting gRNA
  source 1..23: mol_type = other DNA
ctctcaactgctccgccacacgg

SEQ ID NO: 1626 - DNA, 23 bp, synthetic construct
  misc_feature 1..23: note = HLA-A targeting gRNA
  source 1..23: mol_type = other DNA
tctcaactgctccgccacacggg

SEQ ID NO: 1627 - DNA, 23 bp, synthetic construct
  misc_feature 1..23: note = HLA-A targeting gRNA
  source 1..23: mol_type = other DNA
cgatgaagcggggctcctcgcgg

SEQ ID NO: 1628 - DNA, 23 bp, synthetic construct
  misc_feature 1..23: note = HLA-A targeting gRNA
  source 1..23: mol_type = other DNA
cgcagccatacatcatctggagg

SEQ ID NO: 1629 - DNA, 23 bp, synthetic construct
  misc_feature 1..23: note = HLA-A targeting gRNA
  source 1..23: mol_type = other DNA
cgtcctgctggtacccgcggagg

SEQ ID NO: 1630 - DNA, 23 bp, synthetic construct
  misc_feature 1..23: note = HLA-A targeting gRNA
  source 1..23: mol_type = other DNA
cggccatcctcggcgtctggggg

SEQ ID NO: 1631 - DNA, 23 bp, synthetic construct
  misc_feature 1..23: note = HLA-A targeting gRNA
  source 1..23: mol_type = other DNA
cggcccatgaggcggagcagtgg

SEQ ID NO: 1632 - DNA, 23 bp, synthetic construct
  misc_feature 1..23: note = HLA-A targeting gRNA
  source 1..23: mol_type = other DNA
cggctactgcaaccagagcgagg

SEQ ID NO: 1633 - DNA, 23 bp, synthetic construct
  misc_feature 1..23: note = HLA-A targeting gRNA
  source 1..23: mol_type = other DNA
cggctagtacaaccagagcgagg

SEQ ID NO: 1634 - DNA, 23 bp, synthetic construct
  misc_feature 1..23: note = HLA-A targeting gRNA
  source 1..23: mol_type = other DNA
cccccgggttggtcggggccggg

SEQ ID NO: 1635 - DNA, 23 bp, synthetic construct
  misc_feature 1..23: note = HLA-A targeting gRNA
  source 1..23: mol_type = other DNA
cccggccccgaccaacccggggg

SEQ ID NO: 1636 - DNA, 23 bp, synthetic construct
  misc_feature 1..23: note = HLA-A targeting gRNA
  source 1..23: mol_type = other DNA
gcccggccccgaccaacccgggg

SEQ ID NO: 1637 - DNA, 23 bp, synthetic construct
  misc_feature 1..23: note = HLA-A targeting gRNA
  source 1..23: mol_type = other DNA
atgatgtatggctgcgacgtggg

SEQ ID NO: 1638 - DNA, 23 bp, synthetic construct
  misc_feature 1..23: note = HLA-A targeting gRNA
  source 1..23: mol_type = other DNA
cgtcgcagccatacatcatctgg

SEQ ID NO: 1639 - DNA, 23 bp, synthetic construct
  misc_feature 1..23: note = HLA-A targeting gRNA
  source 1..23: mol_type = other DNA
gatgatgtatggctgcgacgtgg

SEQ ID NO: 1640 - DNA, 23 bp, synthetic construct
  misc_feature 1..23: note = HLA-A targeting gRNA
  source 1..23: mol_type = other DNA
caagctccgtgtcctgggtctgg

SEQ ID NO: 1641 - DNA, 23 bp, synthetic construct
  misc_feature 1..23: note = HLA-A targeting gRNA
  source 1..23: mol_type = other DNA
acacggagcttgtggagaccagg

SEQ ID NO: 1642 - DNA, 23 bp, synthetic construct
  misc_feature 1..23: note = HLA-A targeting gRNA
  source 1..23: mol_type = other DNA
cttgtggagaccaggcctgcagg

SEQ ID NO: 1643 - DNA, 23 bp, synthetic construct
  misc_feature 1..23: note = HLA-A targeting gRNA
  source 1..23: mol_type = other DNA
tgtggagaccaggcctgcagggg

SEQ ID NO: 1644 - DNA, 23 bp, synthetic construct
  misc_feature 1..23: note = HLA-A targeting gRNA
  source 1..23: mol_type = other DNA
ttgtggagaccaggcctgcaggg

SEQ ID NO: 1645 - DNA, 23 bp, synthetic construct
  misc_feature 1..23: note = HLA-A targeting gRNA
  source 1..23: mol_type = other DNA
cgtagtggtggtacccgcggagg

SEQ ID NO: 1646 - DNA, 23 bp, synthetic construct
  misc_feature 1..23: note = HLA-A targeting gRNA
  source 1..23: mol_type = other DNA
cgtcgcagccaaacatcctctgg

SEQ ID NO: 1647 - DNA, 23 bp, synthetic construct
  misc_feature 1..23: note = HLA-A targeting gRNA
  source 1..23: mol_type = other DNA
cgtcgcagccacacatcctctgg

SEQ ID NO: 1648 - DNA, 23 bp, synthetic construct
  misc_feature 1..23: note = HLA-A targeting gRNA
  source 1..23: mol_type = other DNA
cgtctcccacttgtgcttggtgg

SEQ ID NO: 1649 - DNA, 23 bp, synthetic construct
  misc_feature 1..23: note = HLA-A targeting gRNA
  source 1..23: mol_type = other DNA
cgtggagaccaggcctgccaggg

SEQ ID NO: 1650 - DNA, 23 bp, synthetic construct
  misc_feature 1..23: note = HLA-A targeting gRNA
  source 1..23: mol_type = other DNA
cgtgtcccggcccggccgcgagg

SEQ ID NO: 1651 - DNA, 23 bp, synthetic construct
  misc_feature 1..23: note = HLA-A targeting gRNA
  source 1..23: mol_type = other DNA
ctaagctgccatgtccgccgcgg

SEQ ID NO: 1652 - DNA, 23 bp, synthetic construct
  misc_feature 1..23: note = HLA-A targeting gRNA
  source 1..23: mol_type = other DNA
ctccacaagctccgtgtcctggg

SEQ ID NO: 1653 - DNA, 23 bp, synthetic construct
  misc_feature 1..23: note = HLA-A targeting gRNA
  source 1..23: mol_type = other DNA
gacccaggacacggagcttgtgg

SEQ ID NO: 1654 - DNA, 23 bp, synthetic construct
  misc_feature 1..23: note = HLA-A targeting gRNA
  source 1..23: mol_type = other DNA
tctccacaagctccgtgtcctgg

SEQ ID NO: 1655 - DNA, 23 bp, synthetic construct
  misc_feature 1..23: note = HLA-A targeting gRNA
  source 1..23: mol_type = other DNA
ctcagccactcctggtccccagg

SEQ ID NO: 1656 - DNA, 23 bp, synthetic construct
  misc_feature 1..23: note = HLA-A targeting gRNA
  source 1..23: mol_type = other DNA
ggtgagtcatatgcgtcttgggg

SEQ ID NO: 1657 - DNA, 23 bp, synthetic construct
  misc_feature 1..23: note = HLA-A targeting gRNA
  source 1..23: mol_type = other DNA
gtgagtcatatgcgtcttggggg

SEQ ID NO: 1658 - DNA, 23 bp, synthetic construct
  misc_feature 1..23: note = HLA-A targeting gRNA
  source 1..23: mol_type = other DNA
ctcagggtggcttcatggtcagg

SEQ ID NO: 1659 - DNA, 23 bp, synthetic construct
  misc_feature 1..23: note = HLA-A targeting gRNA
  source 1..23: mol_type = other DNA
gtggtgagtcatatgcgtcttgg

SEQ ID NO: 1660 - DNA, 23 bp, synthetic construct
  misc_feature 1..23: note = HLA-A targeting gRNA
  source 1..23: mol_type = other DNA
tggtgagtcatatgcgtcttggg

SEQ ID NO: 1661 - DNA, 23 bp, synthetic construct
  misc_feature 1..23: note = HLA-A targeting gRNA
  source 1..23: mol_type = other DNA
cacaccatccagatgatgtatgg

SEQ ID NO: 1662 - DNA, 23 bp, synthetic construct
  misc_feature 1..23: note = HLA-A targeting gRNA
  source 1..23: mol_type = other DNA
gcagccatacatcatctggatgg

SEQ ID NO: 1663 - DNA, 23 bp, synthetic construct
  misc_feature 1..23: note = HLA-A targeting gRNA
  source 1..23: mol_type = other DNA
ctcgcggccgggccgggacacgg

SEQ ID NO: 1664 - DNA, 23 bp, synthetic construct
  misc_feature 1..23: note = HLA-A targeting gRNA
  source 1..23: mol_type = other DNA
tgatgtatggctgcgacgtgggg

SEQ ID NO: 1665 - DNA, 23 bp, synthetic construct
  misc_feature 1..23: note = HLA-A targeting gRNA
  source 1..23: mol_type = other DNA
ctctccactgctccgcctcatgg

SEQ ID NO: 1666 - DNA, 23 bp, synthetic construct
  misc_feature 1..23: note = HLA-A targeting gRNA
  source 1..23: mol_type = other DNA
acacacaccggcagcagccttgg

SEQ ID NO: 1667 - DNA, 23 bp, synthetic construct
  misc_feature 1..23: note = HLA-A targeting gRNA
  source 1..23: mol_type = other DNA
agtggacgcagctgtgctatggg

SEQ ID NO: 1668 - DNA, 23 bp, synthetic construct
  misc_feature 1..23: note = HLA-A targeting gRNA
  source 1..23: mol_type = other DNA
atattgtgtttgggagcccgtgg

SEQ ID NO: 1669 - DNA, 23 bp, synthetic construct
  misc_feature 1..23: note = HLA-A targeting gRNA
  source 1..23: mol_type = other DNA
atgtctctcacagcttgtaaagg

SEQ ID NO: 1670 - DNA, 23 bp, synthetic construct
  misc_feature 1..23: note = HLA-A targeting gRNA
  source 1..23: mol_type = other DNA
attgtgtttgggagcccgtgggg

SEQ ID NO: 1671 - DNA, 23 bp, synthetic construct
  misc_feature 1..23: note = HLA-A targeting gRNA
  source 1..23: mol_type = other DNA
cacacaccggcagcagccttggg

SEQ ID NO: 1672 - DNA, 23 bp, synthetic construct
  misc_feature 1..23: note = HLA-A targeting gRNA
  source 1..23: mol_type = other DNA
cacagacgcccacttctggaagg

SEQ ID NO: 1673 - DNA, 23 bp, synthetic construct
  misc_feature 1..23: note = HLA-A targeting gRNA
  source 1..23: mol_type = other DNA
caggaagagtcagaacattcagg

SEQ ID NO: 1674 - DNA, 23 bp, synthetic construct
  misc_feature 1..23: note = HLA-A targeting gRNA
  source 1..23: mol_type = other DNA
cagtggacgcagctgtgctatgg

SEQ ID NO: 1675 - DNA, 23 bp, synthetic construct
  misc_feature 1..23: note = HLA-A targeting gRNA
  source 1..23: mol_type = other DNA
ctctggacggtgtgagaccctgg

SEQ ID NO: 1676 - DNA, 23 bp, synthetic construct
  misc_feature 1..23: note = HLA-A targeting gRNA
  source 1..23: mol_type = other DNA
ccaccacagacgcccacttctgg

SEQ ID NO: 1677 - DNA, 23 bp, synthetic construct
  misc_feature 1..23: note = HLA-A targeting gRNA
  source 1..23: mol_type = other DNA
ccacgctgtctctgaccatgagg

SEQ ID NO: 1678 - DNA, 23 bp, synthetic construct
  misc_feature 1..23: note = HLA-A targeting gRNA
  source 1..23: mol_type = other DNA
ccagaagtgggcgtctgtggtgg

SEQ ID NO: 1679 - DNA, 23 bp, synthetic construct
  misc_feature 1..23: note = HLA-A targeting gRNA
  source 1..23: mol_type = other DNA
cctcatggtcagagacagcgtgg

SEQ ID NO: 1680 - DNA, 23 bp, synthetic construct
  misc_feature 1..23: note = HLA-A targeting gRNA
  source 1..23: mol_type = other DNA
ctcttggaccgcggcggacacgg

SEQ ID NO: 1681 - DNA, 23 bp, synthetic construct
  misc_feature 1..23: note = HLA-A targeting gRNA
  source 1..23: mol_type = other DNA
ctgctgccggtgtgtgtcaaagg

SEQ ID NO: 1682 - DNA, 23 bp, synthetic construct
  misc_feature 1..23: note = HLA-A targeting gRNA
  source 1..23: mol_type = other DNA
ctctttgaccgcggcggacatgg

SEQ ID NO: 1683 - DNA, 23 bp, synthetic construct
  misc_feature 1..23: note = HLA-A targeting gRNA
  source 1..23: mol_type = other DNA
cttccagaagtgggcgtctgtgg

SEQ ID NO: 1684 - DNA, 23 bp, synthetic construct
  misc_feature 1..23: note = HLA-A targeting gRNA
  source 1..23: mol_type = other DNA
gagagacatatcagagccctggg

SEQ ID NO: 1685 - DNA, 23 bp, synthetic construct
  misc_feature 1..23: note = HLA-A targeting gRNA
  source 1..23: mol_type = other DNA
gatggtgcttcccagtaacgagg

SEQ ID NO: 1686 - DNA, 23 bp, synthetic construct
  misc_feature 1..23: note = HLA-A targeting gRNA
  source 1..23: mol_type = other DNA
gcactgtcactgcctggggtagg

SEQ ID NO: 1687 - DNA, 23 bp, synthetic construct
  misc_feature 1..23: note = HLA-A targeting gRNA
  source 1..23: mol_type = other DNA
gcgtctgtggtggtgccttctgg

SEQ ID NO: 1688 - DNA, 23 bp, synthetic construct
  misc_feature 1..23: note = HLA-A targeting gRNA
  source 1..23: mol_type = other DNA
ggggtgggtgagctcccccacgg

SEQ ID NO: 1689 - DNA, 23 bp, synthetic construct
  misc_feature 1..23: note = HLA-A targeting gRNA
  source 1..23: mol_type = other DNA
gggtgggtgagctcccccacggg

SEQ ID NO: 1690 - DNA, 23 bp, synthetic construct
  misc_feature 1..23: note = HLA-A targeting gRNA
  source 1..23: mol_type = other DNA
ggtaggacaaaaacagaacctgg

SEQ ID NO: 1691 - DNA, 23 bp, synthetic construct
  misc_feature 1..23: note = HLA-A targeting gRNA
  source 1..23: mol_type = other DNA
gtggacgcagctgtgctatgggg

SEQ ID NO: 1692 - DNA, 23 bp, synthetic construct
  misc_feature 1..23: note = HLA-A targeting gRNA
  source 1..23: mol_type = other DNA
tattgtgtttgggagcccgtggg

SEQ ID NO: 1693 - DNA, 23 bp, synthetic construct
  misc_feature 1..23: note = HLA-A targeting gRNA
  source 1..23: mol_type = other DNA
tgagagacatatcagagccctgg

SEQ ID NO: 1694 - DNA, 23 bp, synthetic construct
  misc_feature 1..23: note = HLA-A targeting gRNA
  source 1..23: mol_type = other DNA
tgctgccggtgtgtgtcaaaggg

SEQ ID NO: 1695 - DNA, 23 bp, synthetic construct
  misc_feature 1..23: note = HLA-A targeting gRNA
  source 1..23: mol_type = other DNA
ttctgtttttgtcctaccccagg

SEQ ID NO: 1696 - DNA, 23 bp, synthetic construct
  misc_feature 1..23: note = HLA-A targeting gRNA
  source 1..23: mol_type = other DNA
ttgtgtttgggagcccgtggggg

SEQ ID NO: 1697 - DNA, 23 bp, synthetic construct
  misc_feature 1..23: note = HLA-A targeting gRNA
  source 1..23: mol_type = other DNA
ctgagctgccgtgtccgccgcgg

SEQ ID NO: 1698 - DNA, 23 bp, synthetic construct
  misc_feature 1..23: note = HLA-A targeting gRNA
  source 1..23: mol_type = other DNA
tggttccctttgacacacaccgg

SEQ ID NO: 1699 - DNA, 23 bp, synthetic construct
  misc_feature 1..23: note = HLA-A targeting gRNA
  source 1..23: mol_type = other DNA
ctgcagacccaggcgggatcagg

SEQ ID NO: 1700 - DNA, 23 bp, synthetic construct
  misc_feature 1..23: note = HLA-A targeting gRNA
  source 1..23: mol_type = other DNA
ctgcggagatcacacggacctgg

SEQ ID NO: 1701 - DNA, 23 bp, synthetic construct
  misc_feature 1..23: note = HLA-A targeting gRNA
  source 1..23: mol_type = other DNA
ccgcggaggaagcgcccgtccgg

SEQ ID NO: 1702 - DNA, 23 bp, synthetic construct
  misc_feature 1..23: note = HLA-A targeting gRNA
  source 1..23: mol_type = other DNA
ccggacgggcgcttcctccgcgg

SEQ ID NO: 1703 - DNA, 23 bp, synthetic construct
  misc_feature 1..23: note = HLA-A targeting gRNA
  source 1..23: mol_type = other DNA
ctgggaaaaggggaaggtgaggg

SEQ ID NO: 1704 - DNA, 23 bp, synthetic construct
  misc_feature 1..23: note = HLA-A targeting gRNA
  source 1..23: mol_type = other DNA
ctggttgcagtagccgcgcaggg

SEQ ID NO: 1705 - DNA, 23 bp, synthetic construct
  misc_feature 1..23: note = HLA-A targeting gRNA
  source 1..23: mol_type = other DNA
ctggttgtactagccgcgcaggg

SEQ ID NO: 1706 - DNA, 23 bp, synthetic construct
  misc_feature 1..23: note = HLA-A targeting gRNA
  source 1..23: mol_type = other DNA
cttagaccaccaagcacaagtgg

SEQ ID NO: 1707 - DNA, 23 bp, synthetic construct
  misc_feature 1..23: note = HLA-A targeting gRNA
  source 1..23: mol_type = other DNA
cttcatggtcagagacagcttgg

SEQ ID NO: 1708 - DNA, 23 bp, synthetic construct
  misc_feature 1..23: note = HLA-A targeting gRNA
  source 1..23: mol_type = other DNA
cttcatggtcagggacagcgtgg

SEQ ID NO: 1709 - DNA, 23 bp, synthetic construct
  misc_feature 1..23: note = HLA-A targeting gRNA
  source 1..23: mol_type = other DNA
cttccagaagtgggaggctgtgg

SEQ ID NO: 1710 - DNA, 23 bp, synthetic construct
  misc_feature 1..23: note = HLA-A targeting gRNA
  source 1..23: mol_type = other DNA
ctttcaactgctccgccacatgg

SEQ ID NO: 1711 - DNA, 23 bp, synthetic construct
  misc_feature 1..23: note = HLA-A targeting gRNA
  source 1..23: mol_type = other DNA
gaaaccgggtaaaggcacctggg

SEQ ID NO: 1712 - DNA, 23 bp, synthetic construct
  misc_feature 1..23: note = HLA-A targeting gRNA
  source 1..23: mol_type = other DNA
gaagacggctctgggaaaagggg

SEQ ID NO: 1713 - DNA, 23 bp, synthetic construct
  misc_feature 1..23: note = HLA-A targeting gRNA
  source 1..23: mol_type = other DNA
gaagcggggctcctcgcggccgg

SEQ ID NO: 1714 - DNA, 23 bp, synthetic construct
  misc_feature 1..23: note = HLA-A targeting gRNA
  source 1..23: mol_type = other DNA
acagactgaccgagtggacctgg

SEQ ID NO: 1715 - DNA, 23 bp, synthetic construct
  misc_feature 1..23: note = HLA-A targeting gRNA
  source 1..23: mol_type = other DNA
cagactgaccgagtggacctggg

SEQ ID NO: 1716 - DNA, 23 bp, synthetic construct
  misc_feature 1..23: note = HLA-A targeting gRNA
  source 1..23: mol_type = other DNA
gacggtgtgagaccctggcccgg

SEQ ID NO: 1717 - DNA, 23 bp, synthetic construct
  misc_feature 1..23: note = HLA-A targeting gRNA
  source 1..23: mol_type = other DNA
agactgaccgagtggacctgggg

SEQ ID NO: 1718 - DNA, 23 bp, synthetic construct
  misc_feature 1..23: note = HLA-A targeting gRNA
  source 1..23: mol_type = other DNA
gagagcctggggaccaggagtgg

SEQ ID NO: 1719 - DNA, 23 bp, synthetic construct
  misc_feature 1..23: note = HLA-A targeting gRNA
  source 1..23: mol_type = other DNA
cacaccctccagaggatgtatgg

SEQ ID NO: 1720 - DNA, 23 bp, synthetic construct
  misc_feature 1..23: note = HLA-A targeting gRNA
  source 1..23: mol_type = other DNA
gcagccatacatcctctggaggg

SEQ ID NO: 1721 - DNA, 23 bp, synthetic construct
  misc_feature 1..23: note = HLA-A targeting gRNA
  source 1..23: mol_type = other DNA
gagatcccagaaaggagtcaggg

SEQ ID NO: 1722 - DNA, 23 bp, synthetic construct
  misc_feature 1..23: note = HLA-A targeting gRNA
  source 1..23: mol_type = other DNA
taccggcaggacgcctacgacgg

SEQ ID NO: 1723 - DNA, 23 bp, synthetic construct
  misc_feature 1..23: note = HLA-A targeting gRNA
  source 1..23: mol_type = other DNA
tgccgtcgtaggcgtcctgccgg

SEQ ID NO: 1724 - DNA, 23 bp, synthetic construct
  misc_feature 1..23: note = HLA-A targeting gRNA
  source 1..23: mol_type = other DNA
gaggatgtgtggctgcgacgtgg

SEQ ID NO: 1725 - DNA, 23 bp, synthetic construct
  misc_feature 1..23: note = HLA-A targeting gRNA
  source 1..23: mol_type = other DNA
gaggatgtttggctgcgacgtgg

SEQ ID NO: 1726 - DNA, 23 bp, synthetic construct
  misc_feature 1..23: note = HLA-A targeting gRNA
  source 1..23: mol_type = other DNA
gaggcccaggtgcctttacccgg

SEQ ID NO: 1727 - DNA, 23 bp, synthetic construct
  misc_feature 1..23: note = HLA-A targeting gRNA
  source 1..23: mol_type = other DNA
gaggctgtggtggtgccttctgg

SEQ ID NO: 1728 - DNA, 23 bp, synthetic construct
  misc_feature 1..23: note = HLA-A targeting gRNA
  source 1..23: mol_type = other DNA
aggcgtcctgccggtacccgcgg

SEQ ID NO: 1729 - DNA, 23 bp, synthetic construct
  misc_feature 1..23: note = HLA-A targeting gRNA
  source 1..23: mol_type = other DNA
cgcagccatacatcctctggagg

SEQ ID NO: 1730 - DNA, 23 bp, synthetic construct
  misc_feature 1..23: note = HLA-A targeting gRNA
  source 1..23: mol_type = other DNA
cgtcctgccggtacccgcggagg

SEQ ID NO: 1731 - DNA, 23 bp, synthetic construct
  misc_feature 1..23: note = HLA-A targeting gRNA
  source 1..23: mol_type = other DNA
ccccccgggttggtcggggccgg

SEQ ID NO: 1732 - DNA, 23 bp, synthetic construct
  misc_feature 1..23: note = HLA-A targeting gRNA
  source 1..23: mol_type = other DNA
ccggccccgaccaacccgggggg

SEQ ID NO: 1733 - DNA, 23 bp, synthetic construct
  misc_feature 1..23: note = HLA-A targeting gRNA
  source 1..23: mol_type = other DNA
cttcctccgcgggtaccggcagg

SEQ ID NO: 1734 - DNA, 23 bp, synthetic construct
  misc_feature 1..23: note = HLA-A targeting gRNA
  source 1..23: mol_type = other DNA
gatcacacggacctggcagcggg

SEQ ID NO: 1735 - DNA, 23 bp, synthetic construct
  misc_feature 1..23: note = HLA-A targeting gRNA
  source 1..23: mol_type = other DNA
ggcgcttcctccgcgggtaccgg

SEQ ID NO: 1736 - DNA, 23 bp, synthetic construct
  misc_feature 1..23: note = HLA-A targeting gRNA
  source 1..23: mol_type = other DNA
actgggctgaccgcggggtcggg

SEQ ID NO: 1737 - DNA, 23 bp, synthetic construct
  misc_feature 1..23: note = HLA-A targeting gRNA
  source 1..23: mol_type = other DNA
gactgggctgaccgcggggtcgg

SEQ ID NO: 1738 - DNA, 23 bp, synthetic construct
  misc_feature 1..23: note = HLA-A targeting gRNA
  source 1..23: mol_type = other DNA
ctgggctgaccgcggggtcgggg

SEQ ID NO: 1739 - DNA, 23 bp, synthetic construct
  misc_feature 1..23: note = HLA-A targeting gRNA
  source 1..23: mol_type = other DNA
gcagccaaacatcctctggacgg

SEQ ID NO: 1740 - DNA, 23 bp, synthetic construct
  misc_feature 1..23: note = HLA-A targeting gRNA
  source 1..23: mol_type = other DNA
gcagccacacatcctctggacgg

SEQ ID NO: 1741 - DNA, 23 bp, synthetic construct
  misc_feature 1..23: note = HLA-A targeting gRNA
  source 1..23: mol_type = other DNA
gcagccatacatcatctggaggg

SEQ ID NO: 1742 - DNA, 23 bp, synthetic construct
  misc_feature 1..23: note = HLA-A targeting gRNA
  source 1..23: mol_type = other DNA
gcagttgaaagcctacctggagg

SEQ ID NO: 1743 - DNA, 23 bp, synthetic construct
  misc_feature 1..23: note = HLA-A targeting gRNA
  source 1..23: mol_type = other DNA
agaacctggccccgaccccgcgg

SEQ ID NO: 1744 - DNA, 23 bp, synthetic construct
  misc_feature 1..23: note = HLA-A targeting gRNA
  source 1..23: mol_type = other DNA
ctgaccgcggggtcggggccagg

SEQ ID NO: 1745 - DNA, 23 bp, synthetic construct
  misc_feature 1..23: note = HLA-A targeting gRNA
  source 1..23: mol_type = other DNA
gcgcgatccgcaggctctctcgg

SEQ ID NO: 1746 - DNA, 23 bp, synthetic construct
  misc_feature 1..23: note = HLA-A targeting gRNA
  source 1..23: mol_type = other DNA
accttgattacggcggtgatggg

SEQ ID NO: 1747 - DNA, 23 bp, synthetic construct
  misc_feature 1..23: note = HLA-A targeting gRNA
  source 1..23: mol_type = other DNA
atttatcaccttgattacggcgg

SEQ ID NO: 1748 - DNA, 23 bp, synthetic construct
  misc_feature 1..23: note = HLA-A targeting gRNA
  source 1..23: mol_type = other DNA
caccttgattacggcggtgatgg

SEQ ID NO: 1749 - DNA, 23 bp, synthetic construct
  misc_feature 1..23: note = HLA-A targeting gRNA
  source 1..23: mol_type = other DNA
tcccatcaccgccgtaatcaagg

SEQ ID NO: 1750 - DNA, 23 bp, synthetic construct
  misc_feature 1..23: note = HLA-A targeting gRNA
  source 1..23: mol_type = other DNA
agtagcggagcgcgatccgcagg

SEQ ID NO: 1751 - DNA, 23 bp, synthetic construct
  misc_feature 1..23: note = HLA-A targeting gRNA
  source 1..23: mol_type = other DNA
agactgaccgagagagcctgcgg

SEQ ID NO: 1752 - DNA, 23 bp, synthetic construct
  misc_feature 1..23: note = HLA-A targeting gRNA
  source 1..23: mol_type = other DNA
cagatttatcaccttgattacgg

SEQ ID NO: 1753 - DNA, 23 bp, synthetic construct
  misc_feature 1..23: note = HLA-A targeting gRNA
  source 1..23: mol_type = other DNA
gcaggacgcctacgacggcaagg

SEQ ID NO: 1754 - DNA, 23 bp, synthetic construct
  misc_feature 1..23: note = HLA-A targeting gRNA
  source 1..23: mol_type = other DNA
gctgcgacgtggggtcggacggg

SEQ ID NO: 1755 - DNA, 23 bp, synthetic construct
  misc_feature 1..23: note = HLA-A targeting gRNA
  source 1..23: mol_type = other DNA
ggctgcgacgtggggtcggacgg

SEQ ID NO: 1756 - DNA, 23 bp, synthetic construct
  misc_feature 1..23: note = HLA-A targeting gRNA
  source 1..23: mol_type = other DNA
ggaagacggctctgggaaaaggg

SEQ ID NO: 1757 - DNA, 23 bp, synthetic construct
  misc_feature 1..23: note = HLA-A targeting gRNA
  source 1..23: mol_type = other DNA
tcggacgggcgcttcctccgcgg

SEQ ID NO: 1758 - DNA, 23 bp, synthetic construct
  misc_feature 1..23: note = HLA-A targeting gRNA
  source 1..23: mol_type = other DNA
ggaaggttccatcccctggcagg

SEQ ID NO: 1759 - DNA, 23 bp, synthetic construct
  misc_feature 1..23: note = HLA-A targeting gRNA
  source 1..23: mol_type = other DNA
ggacctgcgctctttgaccgcgg

SEQ ID NO: 1760 - DNA, 23 bp, synthetic construct
  misc_feature 1..23: note = HLA-A targeting gRNA
  source 1..23: mol_type = other DNA
atttctacacctccgtgtcccgg

SEQ ID NO: 1761 - DNA, 23 bp, synthetic construct
  misc_feature 1..23: note = HLA-A targeting gRNA
  source 1..23: mol_type = other DNA
tacacctccgtgtcccggcccgg

SEQ ID NO: 1762 - DNA, 23 bp, synthetic construct
  misc_feature 1..23: note = HLA-A targeting gRNA
  source 1..23: mol_type = other DNA
ggagcagttgaaagcctacctgg

SEQ ID NO: 1763 - DNA, 23 bp, synthetic construct
  misc_feature 1..23: note = HLA-A targeting gRNA
  source 1..23: mol_type = other DNA
ttggaccgcggcggacatggcgg

SEQ ID NO: 1764 - DNA, 23 bp, synthetic construct
  misc_feature 1..23: note = HLA-A targeting gRNA
  source 1..23: mol_type = other DNA
ggggtcccgcggcttcggggtgg

SEQ ID NO: 1765 - DNA, 23 bp, synthetic construct
  misc_feature 1..23: note = HLA-A targeting gRNA
  source 1..23: mol_type = other DNA
ctgagccgccatgtccgccgcgg

SEQ ID NO: 1766 - DNA, 23 bp, synthetic construct
  misc_feature 1..23: note = HLA-A targeting gRNA
  source 1..23: mol_type = other DNA
atctggatggtgtgagaacctgg

SEQ ID NO: 1767 - DNA, 23 bp, synthetic construct
  misc_feature 1..23: note = HLA-A targeting gRNA
  source 1..23: mol_type = other DNA
cacgggcccaaggctgctgccgg

SEQ ID NO: 1768 - DNA, 23 bp, synthetic construct
  misc_feature 1..23: note = HLA-A targeting gRNA
  source 1..23: mol_type = other DNA
ggagtgagagcctggggaccagg

SEQ ID NO: 1769 - DNA, 23 bp, synthetic construct
  misc_feature 1..23: note = HLA-A targeting gRNA
  source 1..23: mol_type = other DNA
tgaacgaggacctgcgctcttgg

SEQ ID NO: 1770 - DNA, 23 bp, synthetic construct
  misc_feature 1..23: note = HLA-A targeting gRNA
  source 1..23: mol_type = other DNA
ggaggtgtagaaatacctcatgg

SEQ ID NO: 1771 - DNA, 23 bp, synthetic construct
  misc_feature 1..23: note = HLA-A targeting gRNA
  source 1..23: mol_type = other DNA
ggatgtgtagaaatacctcatgg

SEQ ID NO: 1772 - DNA, 23 bp, synthetic construct
  misc_feature 1..23: note = HLA-A targeting gRNA
  source 1..23: mol_type = other DNA
ggatgtgtggctgcgacgtgggg

SEQ ID NO: 1773 - DNA, 23 bp, synthetic construct
  misc_feature 1..23: note = HLA-A targeting gRNA
  source 1..23: mol_type = other DNA
ggatgtttggctgcgacgtgggg

SEQ ID NO: 1774 - DNA, 23 bp, synthetic construct
  misc_feature 1..23: note = HLA-A targeting gRNA
  source 1..23: mol_type = other DNA
ggcataatgtgaggagggtgggg

SEQ ID NO: 1775 - DNA, 23 bp, synthetic construct
  misc_feature 1..23: note = HLA-A targeting gRNA
  source 1..23: mol_type = other DNA
agatggggtaaggagggagatgg

SEQ ID NO: 1776 - DNA, 23 bp, synthetic construct
  misc_feature 1..23: note = HLA-A targeting gRNA
  source 1..23: mol_type = other DNA
atggggtaaggagggagatgggg

SEQ ID NO: 1777 - DNA, 23 bp, synthetic construct
  misc_feature 1..23: note = HLA-A targeting gRNA
  source 1..23: mol_type = other DNA
gatggggtaaggagggagatggg

SEQ ID NO: 1778 - DNA, 23 bp, synthetic construct
  misc_feature 1..23: note = HLA-A targeting gRNA
  source 1..23: mol_type = other DNA
tggggtaaggagggagatggggg

SEQ ID NO: 1779 - DNA, 23 bp, synthetic construct
  misc_feature 1..23: note = HLA-A targeting gRNA
  source 1..23: mol_type = other DNA
ggccgtctcccacttgtgcttgg

SEQ ID NO: 1780 - DNA, 23 bp, synthetic construct
  misc_feature 1..23: note = HLA-A targeting gRNA
  source 1..23: mol_type = other DNA
gggaagacggctctgggaaaagg

SEQ ID NO: 1781 - DNA, 23 bp, synthetic construct
  misc_feature 1..23: note = HLA-A targeting gRNA
  source 1..23: mol_type = other DNA
cgagatccaccccgaagccgcgg

SEQ ID NO: 1782 - DNA, 23 bp, synthetic construct
  misc_feature 1..23: note = HLA-A targeting gRNA
  source 1..23: mol_type = other DNA
cgcggcttcggggtggatctcgg

SEQ ID NO: 1783 - DNA, 23 bp, synthetic construct
  misc_feature 1..23: note = HLA-A targeting gRNA
  source 1..23: mol_type = other DNA
gagatccaccccgaagccgcggg

SEQ ID NO: 1784 - DNA, 23 bp, synthetic construct
  misc_feature 1..23: note = HLA-A targeting gRNA
  source 1..23: mol_type = other DNA
ttcggggtggatctcggacccgg

SEQ ID NO: 1785 - DNA, 23 bp, synthetic construct
  misc_feature 1..23: note = HLA-A targeting gRNA
  source 1..23: mol_type = other DNA
gggcgggtctcagccactcctgg

SEQ ID NO: 1786 - DNA, 23 bp, synthetic construct
  misc_feature 1..23: note = HLA-A targeting gRNA
  source 1..23: mol_type = other DNA
gggctcctcgcggccgggccggg

SEQ ID NO: 1787 - DNA, 23 bp, synthetic construct
  misc_feature 1..23: note = HLA-A targeting gRNA
  source 1..23: mol_type = other DNA
gctatggggtttctttgcattgg

SEQ ID NO: 1788 - DNA, 23 bp, synthetic construct
  misc_feature 1..23: note = HLA-A targeting gRNA
  source 1..23: mol_type = other DNA
ggggctcctcgcggccgggccgg

SEQ ID NO: 1789 - DNA, 23 bp, synthetic construct
  misc_feature 1..23: note = HLA-A targeting gRNA
  source 1..23: mol_type = other DNA
gcagaccctcatgctgcacatgg

SEQ ID NO: 1790 - DNA, 23 bp, synthetic construct
  misc_feature 1..23: note = HLA-A targeting gRNA
  source 1..23: mol_type = other DNA
gtatggctgcgacgtggggccgg

SEQ ID NO: 1791 - DNA, 23 bp, synthetic construct
  misc_feature 1..23: note = HLA-A targeting gRNA
  source 1..23: mol_type = other DNA
gagtccctcagcctccactcagg

SEQ ID NO: 1792 - DNA, 23 bp, synthetic construct
  misc_feature 1..23: note = HLA-A targeting gRNA
  source 1..23: mol_type = other DNA
gctgagggactcagaagtgctgg

SEQ ID NO: 1793 - DNA, 23 bp, synthetic construct
  misc_feature 1..23: note = HLA-A targeting gRNA
  source 1..23: mol_type = other DNA
gggtgaagggatgaagggtgggg

SEQ ID NO: 1794 - DNA, 23 bp, synthetic construct
  misc_feature 1..23: note = HLA-A targeting gRNA
  source 1..23: mol_type = other DNA
cctcagcctccactcaggtcagg

SEQ ID NO: 1795 - DNA, 23 bp, synthetic construct
  misc_feature 1..23: note = HLA-A targeting gRNA
  source 1..23: mol_type = other DNA
cctgacctgagtggaggctgagg

SEQ ID NO: 1796 - DNA, 23 bp, synthetic construct
  misc_feature 1..23: note = HLA-A targeting gRNA
  source 1..23: mol_type = other DNA
ctgacctgagtggaggctgaggg

SEQ ID NO: 1797 - DNA, 23 bp, synthetic construct
  misc_feature 1..23: note = HLA-A targeting gRNA
  source 1..23: mol_type = other DNA
ccagttcgcctacgacggcaagg

SEQ ID NO: 1798 - DNA, 23 bp, synthetic construct
  misc_feature 1..23: note = HLA-A targeting gRNA
  source 1..23: mol_type = other DNA
ccttgccgtcgtaggcgaactgg

SEQ ID NO: 1799 - DNA, 23 bp, synthetic construct
  misc_feature 1..23: note = HLA-A targeting gRNA
  source 1..23: mol_type = other DNA
gagataccagaaaggagccaggg

SEQ ID NO: 1800 - DNA, 23 bp, synthetic construct
  misc_feature 1..23: note = HLA-A targeting gRNA
  source 1..23: mol_type = other DNA
gctcctttctggtatctcacagg

SEQ ID NO: 1801 - DNA, 23 bp, synthetic construct
  misc_feature 1..23: note = HLA-A targeting gRNA
  source 1..23: mol_type = other DNA
tgagataccagaaaggagccagg

SEQ ID NO: 1802 - DNA, 23 bp, synthetic construct
  misc_feature 1..23: note = HLA-A targeting gRNA
  source 1..23: mol_type = other DNA
agaaaggagccagggccttaagg

SEQ ID NO: 1803 - DNA, 23 bp, synthetic construct
  misc_feature 1..23: note = HLA-A targeting gRNA
  source 1..23: mol_type = other DNA
ccagggccttaaggtcctagagg

SEQ ID NO: 1804 - DNA, 23 bp, synthetic construct
  misc_feature 1..23: note = HLA-A targeting gRNA
  source 1..23: mol_type = other DNA
cctctaggaccttaaggccctgg

SEQ ID NO: 1805 - DNA, 23 bp, synthetic construct
  misc_feature 1..23: note = HLA-A targeting gRNA
  source 1..23: mol_type = other DNA
ttaaggccctggctcctttctgg

SEQ ID NO: 1806 - DNA, 23 bp, synthetic construct
  misc_feature 1..23: note = HLA-A targeting gRNA
  source 1..23: mol_type = other DNA
cagtggagagcctacctggaggg

SEQ ID NO: 1807 - DNA, 23 bp, synthetic construct
  misc_feature 1..23: note = HLA-A targeting gRNA
  source 1..23: mol_type = other DNA
gcagtggagagcctacctggagg

SEQ ID NO: 1808 - DNA, 23 bp, synthetic construct
  misc_feature 1..23: note = HLA-A targeting gRNA
  source 1..23: mol_type = other DNA
ggagcagtggagagcctacctgg

SEQ ID NO: 1809 - DNA, 23 bp, synthetic construct
  misc_feature 1..23: note = HLA-A targeting gRNA
  source 1..23: mol_type = other DNA
gcggccgggccgggacacggagg

SEQ ID NO: 1810 - DNA, 23 bp, synthetic construct
  misc_feature 1..23: note = HLA-A targeting gRNA
  source 1..23: mol_type = other DNA
ggtgtggctccgcagatacctgg

SEQ ID NO: 1811 - DNA, 23 bp, synthetic construct
  misc_feature 1..23: note = HLA-A targeting gRNA
  source 1..23: mol_type = other DNA
ggttagtcatatgcgttttgggg

SEQ ID NO: 1812 - DNA, 23 bp, synthetic construct
  misc_feature 1..23: note = HLA-A targeting gRNA
  source 1..23: mol_type = other DNA
aaaaatccccccgggttggtcgg

SEQ ID NO: 1813 - DNA, 23 bp, synthetic construct
  misc_feature 1..23: note = HLA-A targeting gRNA
  source 1..23: mol_type = other DNA
aaaatccccccgggttggtcggg

SEQ ID NO: 1814 - DNA, 23 bp, synthetic construct
  misc_feature 1..23: note = HLA-A targeting gRNA
  source 1..23: mol_type = other DNA
gtattcgagggatcgtcttccgg

SEQ ID NO: 1815 - DNA, 23 bp, synthetic construct
  misc_feature 1..23: note = HLA-A targeting gRNA
  source 1..23: mol_type = other DNA
aaatccccccgggttggtcgggg

SEQ ID NO: 1816 - DNA, 23 bp, synthetic construct
  misc_feature 1..23: note = HLA-A targeting gRNA
  source 1..23: mol_type = other DNA
gaccaacccggggggatttttgg

SEQ ID NO: 1817 - DNA, 23 bp, synthetic construct
  misc_feature 1..23: note = HLA-A targeting gRNA
  source 1..23: mol_type = other DNA
ggccaaaaatccccccgggttgg

SEQ ID NO: 1818 - DNA, 23 bp, synthetic construct
  misc_feature 1..23: note = HLA-A targeting gRNA
  source 1..23: mol_type = other DNA
gtttaggccaaaaatccccccgg

SEQ ID NO: 1819 - DNA, 23 bp, synthetic construct
  misc_feature 1..23: note = HLA-A targeting gRNA
  source 1..23: mol_type = other DNA
tttaggccaaaaatccccccggg

SEQ ID NO: 1820 - DNA, 23 bp, synthetic construct
  misc_feature 1..23: note = HLA-A targeting gRNA
  source 1..23: mol_type = other DNA
cggacgggcgcttcctccgcggg

SEQ ID NO: 1821 - DNA, 23 bp, synthetic construct
  misc_feature 1..23: note = HLA-A targeting gRNA
  source 1..23: mol_type = other DNA
cgggggactgggctgaccgcggg

SEQ ID NO: 1822 - DNA, 23 bp, synthetic construct
  misc_feature 1..23: note = HLA-A targeting gRNA
  source 1..23: mol_type = other DNA
tcgggggactgggctgaccgcgg

SEQ ID NO: 1823 - DNA, 23 bp, synthetic construct
  misc_feature 1..23: note = HLA-A targeting gRNA
  source 1..23: mol_type = other DNA
tggagggcctgtgcgtggagtgg

SEQ ID NO: 1824 - DNA, 23 bp, synthetic construct
  misc_feature 1..23: note = HLA-A targeting gRNA
  source 1..23: mol_type = other DNA
tgcggagccactccacgcacagg

SEQ ID NO: 1825 - DNA, 23 bp, synthetic construct
  misc_feature 1..23: note = HLA-A targeting gRNA
  source 1..23: mol_type = other DNA
ccgctactacaaccagagcgagg

SEQ ID NO: 1826 - DNA, 23 bp, synthetic construct
  misc_feature 1..23: note = HLA-A targeting gRNA
  source 1..23: mol_type = other DNA
cctcgctctggttgtagtagcgg

SEQ ID NO: 1827 - DNA, 23 bp, synthetic construct
  misc_feature 1..23: note = HLA-A targeting gRNA
  source 1..23: mol_type = other DNA
gtggagaccaggcctgccagggg

SEQ ID NO: 1828 - DNA, 23 bp, synthetic construct
  misc_feature 1..23: note = HLA-A targeting gRNA
  source 1..23: mol_type = other DNA
gtggttagtcatatgcgttttgg

SEQ ID NO: 1829 - DNA, 23 bp, synthetic construct
  misc_feature 1..23: note = HLA-A targeting gRNA
  source 1..23: mol_type = other DNA
gtgtaggcataatgtgaggaggg

SEQ ID NO: 1830 - DNA, 23 bp, synthetic construct
  misc_feature 1..23: note = HLA-A targeting gRNA
  source 1..23: mol_type = other DNA
gtgtgactgcagacccaggcggg

SEQ ID NO: 1831 - DNA, 23 bp, synthetic construct
  misc_feature 1..23: note = HLA-A targeting gRNA
  source 1..23: mol_type = other DNA
gtgtggctgcgacgtggggtcgg

SEQ ID NO: 1832 - DNA, 23 bp, synthetic construct
  misc_feature 1..23: note = HLA-A targeting gRNA
  source 1..23: mol_type = other DNA
gttagtcatatgcgttttggggg

SEQ ID NO: 1833 - DNA, 23 bp, synthetic construct
  misc_feature 1..23: note = HLA-A targeting gRNA
  source 1..23: mol_type = other DNA
gttccatcccctggcaggcctgg

SEQ ID NO: 1834 - DNA, 23 bp, synthetic construct
  misc_feature 1..23: note = HLA-A targeting gRNA
  source 1..23: mol_type = other DNA
gggggactgggctgaccgcgggg

SEQ ID NO: 1835 - DNA, 23 bp, synthetic construct
  misc_feature 1..23: note = HLA-A targeting gRNA
  source 1..23: mol_type = other DNA
taaggccctgactcctttctggg

SEQ ID NO: 1836 - DNA, 23 bp, synthetic construct
  misc_feature 1..23: note = HLA-A targeting gRNA
  source 1..23: mol_type = other DNA
tacacatccgtgtcccggcccgg

SEQ ID NO: 1837 - DNA, 23 bp, synthetic construct
  misc_feature 1..23: note = HLA-A targeting gRNA
  source 1..23: mol_type = other DNA
taccaccactacgcctacgacgg

SEQ ID NO: 1838 - DNA, 23 bp, synthetic construct
  misc_feature 1..23: note = HLA-A targeting gRNA
  source 1..23: mol_type = other DNA
taccaccagttcgcctacgacgg

SEQ ID NO: 1839 - DNA, 23 bp, synthetic construct
  misc_feature 1..23: note = HLA-A targeting gRNA
  source 1..23: mol_type = other DNA
tactgcaaccagagcgaggccgg

SEQ ID NO: 1840 - DNA, 23 bp, synthetic construct
  misc_feature 1..23: note = HLA-A targeting gRNA
  source 1..23: mol_type = other DNA
taggcataatgtgaggagggtgg

SEQ ID NO: 1841 - DNA, 23 bp, synthetic construct
  misc_feature 1..23: note = HLA-A targeting gRNA
  source 1..23: mol_type = other DNA
tagtacaaccagagcgaggccgg

SEQ ID NO: 1842 - DNA, 23 bp, synthetic construct
  misc_feature 1..23: note = HLA-A targeting gRNA
  source 1..23: mol_type = other DNA
actccacgcacaggccctccagg

SEQ ID NO: 1843 - DNA, 23 bp, synthetic construct
  misc_feature 1..23: note = HLA-A targeting gRNA
  source 1..23: mol_type = other DNA
tcagggtggcttcatggtcaggg

SEQ ID NO: 1844 - DNA, 23 bp, synthetic construct
  misc_feature 1..23: note = HLA-A targeting gRNA
  source 1..23: mol_type = other DNA
cacgcacaggccctccaggtagg

SEQ ID NO: 1845 - DNA, 23 bp, synthetic construct
  misc_feature 1..23: note = HLA-A targeting gRNA
  source 1..23: mol_type = other DNA
ctacctggagggcctgtgcgtgg

SEQ ID NO: 1846 - DNA, 23 bp, synthetic construct
  misc_feature 1..23: note = HLA-A targeting gRNA
  source 1..23: mol_type = other DNA
tcatgtttcctgatcccgcctgg

SEQ ID NO: 1847 - DNA, 23 bp, synthetic construct
  misc_feature 1..23: note = HLA-A targeting gRNA
  source 1..23: mol_type = other DNA
tcgtggagaccaggcctgccagg

SEQ ID NO: 1848 - DNA, 23 bp, synthetic construct
  misc_feature 1..23: note = HLA-A targeting gRNA
  source 1..23: mol_type = other DNA
tctaccctgcggagatcacacgg

SEQ ID NO: 1849 - DNA, 23 bp, synthetic construct
  misc_feature 1..23: note = HLA-A targeting gRNA
  source 1..23: mol_type = other DNA
tctccactgctccgcctcatggg

SEQ ID NO: 1850 - DNA, 23 bp, synthetic construct
  misc_feature 1..23: note = HLA-A targeting gRNA
  source 1..23: mol_type = other DNA
tctcccccagacgccgaggatgg

SEQ ID NO: 1851 - DNA, 23 bp, synthetic construct
  misc_feature 1..23: note = HLA-A targeting gRNA
  source 1..23: mol_type = other DNA
tctgggaaaaggggaaggtgagg

SEQ ID NO: 1852 - DNA, 23 bp, synthetic construct
  misc_feature 1..23: note = HLA-A targeting gRNA
  source 1..23: mol_type = other DNA
tctggttgcagtagccgcgcagg

SEQ ID NO: 1853 - DNA, 23 bp, synthetic construct
  misc_feature 1..23: note = HLA-A targeting gRNA
  source 1..23: mol_type = other DNA
tctggttgtactagccgcgcagg

SEQ ID NO: 1854 - DNA, 23 bp, synthetic construct
  misc_feature 1..23: note = HLA-A targeting gRNA
  source 1..23: mol_type = other DNA
tgaaaccgggtaaaggcacctgg

SEQ ID NO: 1855 - DNA, 23 bp, synthetic construct
  misc_feature 1..23: note = HLA-A targeting gRNA
  source 1..23: mol_type = other DNA
tgaaagacgacctgcgctcttgg

SEQ ID NO: 1856 - DNA, 23 bp, synthetic construct
  misc_feature 1..23: note = HLA-A targeting gRNA
  source 1..23: mol_type = other DNA
tgaccgcggggtccgggccaggg

SEQ ID NO: 1857 - DNA, 23 bp, synthetic construct
  misc_feature 1..23: note = HLA-A targeting gRNA
  source 1..23: mol_type = other DNA
tgagatcccagaaaggagtcagg

SEQ ID NO: 1858 - DNA, 23 bp, synthetic construct
  misc_feature 1..23: note = HLA-A targeting gRNA
  source 1..23: mol_type = other DNA
gtgggaggcggcccgtgtggcgg

SEQ ID NO: 1859 - DNA, 23 bp, synthetic construct
  misc_feature 1..23: note = HLA-A targeting gRNA
  source 1..23: mol_type = other DNA
cgccgtggatagagcaggagggg

SEQ ID NO: 1860 - DNA, 23 bp, synthetic construct
  misc_feature 1..23: note = HLA-A targeting gRNA
  source 1..23: mol_type = other DNA
caagtgggaggcggcccgtgtgg

SEQ ID NO: 1861 - DNA, 23 bp, synthetic construct
  misc_feature 1..23: note = HLA-A targeting gRNA
  source 1..23: mol_type = other DNA
ggcccctcctgctctatccacgg

SEQ ID NO: 1862 - DNA, 23 bp, synthetic construct
  misc_feature 1..23: note = HLA-A targeting gRNA
  source 1..23: mol_type = other DNA
gtggatagagcaggaggggccgg

SEQ ID NO: 1863 - DNA, 23 bp, synthetic construct
  misc_feature 1..23: note = HLA-A targeting gRNA
  source 1..23: mol_type = other DNA
tgccgtcgtaggcgaactggtgg

SEQ ID NO: 1864 - DNA, 23 bp, synthetic construct
  misc_feature 1..23: note = HLA-A targeting gRNA
  source 1..23: mol_type = other DNA
tgccgtcgtaggcgtagtggtgg

SEQ ID NO: 1865 - DNA, 23 bp, synthetic construct
  misc_feature 1..23: note = HLA-A targeting gRNA
  source 1..23: mol_type = other DNA
gctgcgacgtggggccggacggg

SEQ ID NO: 1866 - DNA, 23 bp, synthetic construct
  misc_feature 1..23: note = HLA-A targeting gRNA
  source 1..23: mol_type = other DNA
ggctgcgacgtggggccggacgg

SEQ ID NO: 1867 - DNA, 23 bp, synthetic construct
  misc_feature 1..23: note = HLA-A targeting gRNA
  source 1..23: mol_type = other DNA
tggaaccttccagaagtgggagg

SEQ ID NO: 1868 - DNA, 23 bp, synthetic construct
  misc_feature 1..23: note = HLA-A targeting gRNA
  source 1..23: mol_type = other DNA
ccgcggaggaggcgcccgtccgg

SEQ ID NO: 1869 - DNA, 23 bp, synthetic construct
  misc_feature 1..23: note = HLA-A targeting gRNA
  source 1..23: mol_type = other DNA
ccggacgggcgcctcctccgcgg

SEQ ID NO: 1870 - DNA, 23 bp, synthetic construct
  misc_feature 1..23: note = HLA-A targeting gRNA
  source 1..23: mol_type = other DNA
cggacgggcgcctcctccgcggg

SEQ ID NO: 1871 - DNA, 23 bp, synthetic construct
  misc_feature 1..23: note = HLA-A targeting gRNA
  source 1..23: mol_type = other DNA
tggagggcacgtgcgtggtgtgg

SEQ ID NO: 1872 - DNA, 23 bp, synthetic construct
  misc_feature 1..23: note = HLA-A targeting gRNA
  source 1..23: mol_type = other DNA
tgggaaaaggggaaggtgagggg

SEQ ID NO: 1873 - DNA, 23 bp, synthetic construct
  misc_feature 1..23: note = HLA-A targeting gRNA
  source 1..23: mol_type = other DNA
tggttagtcatatgcgttttggg

SEQ ID NO: 1874 - DNA, 23 bp, synthetic construct
  misc_feature 1..23: note = HLA-A targeting gRNA
  source 1..23: mol_type = other DNA
cacccagcgcaagtgggaggcgg

SEQ ID NO: 1875 - DNA, 23 bp, synthetic construct
  misc_feature 1..23: note = HLA-A targeting gRNA
  source 1..23: mol_type = other DNA
tgtcctgtgagatcccagaaagg

SEQ ID NO: 1876 - DNA, 23 bp, synthetic construct
  misc_feature 1..23: note = HLA-A targeting gRNA
  source 1..23: mol_type = other DNA
gggccgcctcccacttgcgctgg

SEQ ID NO: 1877 - DNA, 23 bp, synthetic construct
  misc_feature 1..23: note = HLA-A targeting gRNA
  source 1..23: mol_type = other DNA
ggccgcctcccacttgcgctggg

SEQ ID NO: 1878 - DNA, 23 bp, synthetic construct
  misc_feature 1..23: note = HLA-A targeting gRNA
  source 1..23: mol_type = other DNA
gatcacccagcgcaagtgggagg

SEQ ID NO: 1879 - DNA, 23 bp, synthetic construct
  misc_feature 1..23: note = HLA-A targeting gRNA
  source 1..23: mol_type = other DNA
ctcagatcacccagcgcaagtgg

SEQ ID NO: 1880 - DNA, 23 bp, synthetic construct
  misc_feature 1..23: note = HLA-A targeting gRNA
  source 1..23: mol_type = other DNA
tcagatcacccagcgcaagtggg

SEQ ID NO: 1881 - DNA, 23 bp, synthetic construct
  misc_feature 1..23: note = HLA-A targeting gRNA
  source 1..23: mol_type = other DNA
tgtgtgactgcagacccaggcgg

SEQ ID NO: 1882 - DNA, 23 bp, synthetic construct
  misc_feature 1..23: note = HLA-A targeting gRNA
  source 1..23: mol_type = other DNA
ttagaccaccaagcacaagtggg

SEQ ID NO: 1883 - DNA, 23 bp, synthetic construct
  misc_feature 1..23: note = HLA-A targeting gRNA
  source 1..23: mol_type = other DNA
agcacctcagggtggcctcatgg

SEQ ID NO: 1884 - DNA, 23 bp, synthetic construct
  misc_feature 1..23: note = HLA-A targeting gRNA
  source 1..23: mol_type = other DNA
atgaggccaccctgaggtgctgg

SEQ ID NO: 1885 - DNA, 23 bp, synthetic construct
  misc_feature 1..23: note = HLA-A targeting gRNA
  source 1..23: mol_type = other DNA
ctgaccatgaggccaccctgagg

SEQ ID NO: 1886 - DNA, 23 bp, synthetic construct
  misc_feature 1..23: note = HLA-A targeting gRNA
  source 1..23: mol_type = other DNA
tgaggccaccctgaggtgctggg

SEQ ID NO: 1887 - DNA, 23 bp, synthetic construct
  misc_feature 1..23: note = HLA-A targeting gRNA
  source 1..23: mol_type = other DNA
ttctggaaggttccatcccctgg

SEQ ID NO: 1888 - DNA, 23 bp, synthetic construct
  misc_feature 1..23: note = HLA-A targeting gRNA
  source 1..23: mol_type = other DNA
agcaggaggggccggagtattgg

SEQ ID NO: 1889 - DNA, 23 bp, synthetic construct
  misc_feature 1..23: note = HLA-A targeting gRNA
  source 1..23: mol_type = other DNA
gcaggaggggccggagtattggg

SEQ ID NO: 1890 - DNA, 23 bp, synthetic construct
  misc_feature 1..23: note = HLA-A targeting gRNA
  source 1..23: mol_type = other DNA
ttggtgagtcatatgcgttttgg

SEQ ID NO: 1891 - DNA, 23 bp, synthetic construct
  misc_feature 1..23: note = HLA-A targeting gRNA
  source 1..23: mol_type = other DNA
tttcaactgctccgccacatggg

SEQ ID NO: 1892 - DNA, 23 bp, synthetic construct
  misc_feature 1..23: note = HLA-A targeting gRNA
  source 1..23: mol_type = other DNA
acggccattctcggcgtctgggg

SEQ ID NO: 1893 - DNA, 23 bp, synthetic construct
  misc_feature 1..23: note = HLA-A targeting gRNA
  source 1..23: mol_type = other DNA
aaaaatccccccgggtgggtcgg

SEQ ID NO: 1894 - DNA, 23 bp, synthetic construct
  misc_feature 1..23: note = HLA-A targeting gRNA
  source 1..23: mol_type = other DNA
gacgccgagaatggccgtcatgg

SEQ ID NO: 1895 - DNA, 23 bp, synthetic construct
  misc_feature 1..23: note = HLA-A targeting gRNA
  source 1..23: mol_type = other DNA
aaaaatccccctggttggtcggg

SEQ ID NO: 1896 - DNA, 23 bp, synthetic construct
  misc_feature 1..23: note = HLA-A targeting gRNA
  source 1..23: mol_type = other DNA
aaaaatctctgaaggaatgacgg

SEQ ID NO: 1897 - DNA, 23 bp, synthetic construct
  misc_feature 1..23: note = HLA-A targeting gRNA
  source 1..23: mol_type = other DNA
gacggccattctcggcgtctggg

SEQ ID NO: 1898 - DNA, 23 bp, synthetic construct
  misc_feature 1..23: note = HLA-A targeting gRNA
  source 1..23: mol_type = other DNA
gagcccctcagcctccactcagg

SEQ ID NO: 1899 - DNA, 23 bp, synthetic construct
  misc_feature 1..23: note = HLA-A targeting gRNA
  source 1..23: mol_type = other DNA
gctgaggggctcagaagtgctgg

SEQ ID NO: 1900 - DNA, 23 bp, synthetic construct
  misc_feature 1..23: note = HLA-A targeting gRNA
  source 1..23: mol_type = other DNA
aaaaggagggagttactctcagg

SEQ ID NO: 1901 - DNA, 23 bp, synthetic construct
  misc_feature 1..23: note = HLA-A targeting gRNA
  source 1..23: mol_type = other DNA
ggcgccatgacggccattctcgg

SEQ ID NO: 1902 - DNA, 23 bp, synthetic construct
  misc_feature 1..23: note = HLA-A targeting gRNA
  source 1..23: mol_type = other DNA
aaaatccccccgggtgggtcggg

SEQ ID NO: 1903 - DNA, 23 bp, synthetic construct
  misc_feature 1..23: note = HLA-A targeting gRNA
  source 1..23: mol_type = other DNA
tgacctgagtggaggctgagggg

SEQ ID NO: 1904 - DNA, 23 bp, synthetic construct
  misc_feature 1..23: note = HLA-A targeting gRNA
  source 1..23: mol_type = other DNA
aaaatccccctggttggtcgggg

SEQ ID NO: 1905 - DNA, 23 bp, synthetic construct
  misc_feature 1..23: note = HLA-A targeting gRNA
  source 1..23: mol_type = other DNA
tgacggccattctcggcgtctgg

SEQ ID NO: 1906 - DNA, 23 bp, synthetic construct
  misc_feature 1..23: note = HLA-A targeting gRNA
  source 1..23: mol_type = other DNA
ttctccccagacgccgagaatgg

SEQ ID NO: 1907 - DNA, 23 bp, synthetic construct
  misc_feature 1..23: note = HLA-A targeting gRNA
  source 1..23: mol_type = other DNA
aaaccgggttaaaggcgcctggg

SEQ ID NO: 1908 - DNA, 23 bp, synthetic construct
  misc_feature 1..23: note = HLA-A targeting gRNA
  source 1..23: mol_type = other DNA
aaatccccccgggtgggtcgggg

SEQ ID NO: 1909 - DNA, 23 bp, synthetic construct
  misc_feature 1..23: note = HLA-A targeting gRNA
  source 1..23: mol_type = other DNA
acctctggtcctgacctgagtgg

SEQ ID NO: 1910 - DNA, 23 bp, synthetic construct
  misc_feature 1..23: note = HLA-A targeting gRNA
  source 1..23: mol_type = other DNA
aaatgtgtgaatgcagacccagg

SEQ ID NO: 1911 - DNA, 23 bp, synthetic construct
  misc_feature 1..23: note = HLA-A targeting gRNA
  source 1..23: mol_type = other DNA
aggcctcatcccccacggacggg

SEQ ID NO: 1912 - DNA, 23 bp, synthetic construct
  misc_feature 1..23: note = HLA-A targeting gRNA
  source 1..23: mol_type = other DNA
aggtcgctgttccctcctcaggg

SEQ ID NO: 1913 - DNA, 23 bp, synthetic construct
  misc_feature 1..23: note = HLA-A targeting gRNA
  source 1..23: mol_type = other DNA
atgaggcctgcgccccgggccgg

SEQ ID NO: 1914 - DNA, 23 bp, synthetic construct
  misc_feature 1..23: note = HLA-A targeting gRNA
  source 1..23: mol_type = other DNA
cagcctggacacagacacctggg

SEQ ID NO: 1915 - DNA, 23 bp, synthetic construct
  misc_feature 1..23: note = HLA-A targeting gRNA
  source 1..23: mol_type = other DNA
caggcctcatcccccacggacgg

SEQ ID NO: 1916 - DNA, 23 bp, synthetic construct
  misc_feature 1..23: note = HLA-A targeting gRNA
  source 1..23: mol_type = other DNA
catcgggagaatctgagtcccgg

SEQ ID NO: 1917 - DNA, 23 bp, synthetic construct
  misc_feature 1..23: note = HLA-A targeting gRNA
  source 1..23: mol_type = other DNA
cattactggaaacttctctgagg

SEQ ID NO: 1918 - DNA, 23 bp, synthetic construct
  misc_feature 1..23: note = HLA-A targeting gRNA
  source 1..23: mol_type = other DNA
ccagcctggacacagacacctgg

SEQ ID NO: 1919 - DNA, 23 bp, synthetic construct
  misc_feature 1..23: note = HLA-A targeting gRNA
  source 1..23: mol_type = other DNA
aagaagagctcaggtggagaagg

SEQ ID NO: 1920 - DNA, 23 bp, synthetic construct
  misc_feature 1..23: note = HLA-A targeting gRNA
  source 1..23: mol_type = other DNA
ccaggtgtctgtgtccaggctgg

SEQ ID NO: 1921 - DNA, 23 bp, synthetic construct
  misc_feature 1..23: note = HLA-A targeting gRNA
  source 1..23: mol_type = other DNA
cgggactcagattctcccgatgg

SEQ ID NO: 1922 - DNA, 23 bp, synthetic construct
  misc_feature 1..23: note = HLA-A targeting gRNA
  source 1..23: mol_type = other DNA
cgggagaatctgagtcccggtgg

SEQ ID NO: 1923 - DNA, 23 bp, synthetic construct
  misc_feature 1..23: note = HLA-A targeting gRNA
  source 1..23: mol_type = other DNA
cggggcgccatgacggccatcgg

SEQ ID NO: 1924 - DNA, 23 bp, synthetic construct
  misc_feature 1..23: note = HLA-A targeting gRNA
  source 1..23: mol_type = other DNA
ctcaggcagtgacagtgcccagg

SEQ ID NO: 1925 - DNA, 23 bp, synthetic construct
  misc_feature 1..23: note = HLA-A targeting gRNA
  source 1..23: mol_type = other DNA
ctgggcactgtcactgcctgagg

SEQ ID NO: 1926 - DNA, 23 bp, synthetic construct
  misc_feature 1..23: note = HLA-A targeting gRNA
  source 1..23: mol_type = other DNA
gaggagggaacagcgacctctgg

SEQ ID NO: 1927 - DNA, 23 bp, synthetic construct
  misc_feature 1..23: note = HLA-A targeting gRNA
  source 1..23: mol_type = other DNA
gaggcctgcgccccgggccgggg

SEQ ID NO: 1928 - DNA, 23 bp, synthetic construct
  misc_feature 1..23: note = HLA-A targeting gRNA
  source 1..23: mol_type = other DNA
gaggtcgctgttccctcctcagg

SEQ ID NO: 1929 - DNA, 23 bp, synthetic construct
  misc_feature 1..23: note = HLA-A targeting gRNA
  source 1..23: mol_type = other DNA
aagcagggctccccgcggccggg

SEQ ID NO: 1930 - DNA, 23 bp, synthetic construct
  misc_feature 1..23: note = HLA-A targeting gRNA
  source 1..23: mol_type = other DNA
gattctcccgatggccgtcatgg

SEQ ID NO: 1931 - DNA, 23 bp, synthetic construct
  misc_feature 1..23: note = HLA-A targeting gRNA
  source 1..23: mol_type = other DNA
ggcgcaggcctcatcccccacgg

SEQ ID NO: 1932 - DNA, 23 bp, synthetic construct
  misc_feature 1..23: note = HLA-A targeting gRNA
  source 1..23: mol_type = other DNA
gggacactccagcatgcatgtgg

SEQ ID NO: 1933 - DNA, 23 bp, synthetic construct
  misc_feature 1..23: note = HLA-A targeting gRNA
  source 1..23: mol_type = other DNA
aagcggggttccccgcggccggg

SEQ ID NO: 1934 - DNA, 23 bp, synthetic construct
  misc_feature 1..23: note = HLA-A targeting gRNA
  source 1..23: mol_type = other DNA
ggggatgaggcctgcgccccggg

SEQ ID NO: 1935 - DNA, 23 bp, synthetic construct
  misc_feature 1..23: note = HLA-A targeting gRNA
  source 1..23: mol_type = other DNA
aagcgtcctgctggtacccgcgg

SEQ ID NO: 1936 - DNA, 23 bp, synthetic construct
  misc_feature 1..23: note = HLA-A targeting gRNA
  source 1..23: mol_type = other DNA
aaggaaacgctgcagcgcacggg

SEQ ID NO: 1937 - DNA, 23 bp, synthetic construct
  misc_feature 1..23: note = HLA-A targeting gRNA
  source 1..23: mol_type = other DNA
aaggagacgctgcagcgcacagg

SEQ ID NO: 1938 - DNA, 23 bp, synthetic construct
  misc_feature 1..23: note = HLA-A targeting gRNA
  source 1..23: mol_type = other DNA
ggggcgccatgacggccatcggg

SEQ ID NO: 1939 - DNA, 23 bp, synthetic construct
  misc_feature 1..23: note = HLA-A targeting gRNA
  source 1..23: mol_type = other DNA
aaggagacgctgcagcgcactgg

SEQ ID NO: 1940 - DNA, 23 bp, synthetic construct
  misc_feature 1..23: note = HLA-A targeting gRNA
  source 1..23: mol_type = other DNA
gggggatgaggcctgcgccccgg

SEQ ID NO: 1941 - DNA, 23 bp, synthetic construct
  misc_feature 1..23: note = HLA-A targeting gRNA
  source 1..23: mol_type = other DNA
aaggagatgctgcagcgcacggg

SEQ ID NO: 1942 - DNA, 23 bp, synthetic construct
  misc_feature 1..23: note = HLA-A targeting gRNA
  source 1..23: mol_type = other DNA
aaggatgcccacgatggggatgg

SEQ ID NO: 1943 - DNA, 23 bp, synthetic construct
  misc_feature 1..23: note = HLA-A targeting gRNA
  source 1..23: mol_type = other DNA
ggtctgcagtcacacattactgg

SEQ ID NO: 1944 - DNA, 23 bp, synthetic construct
  misc_feature 1..23: note = HLA-A targeting gRNA
  source 1..23: mol_type = other DNA
ggtgagacccctcactgtgatgg

SEQ ID NO: 1945 - DNA, 23 bp, synthetic construct
  misc_feature 1..23: note = HLA-A targeting gRNA
  source 1..23: mol_type = other DNA
taatgtgtgactgcagacccagg

SEQ ID NO: 1946 - DNA, 23 bp, synthetic construct
  misc_feature 1..23: note = HLA-A targeting gRNA
  source 1..23: mol_type = other DNA
aagtcgctgttccctcgtcaggg

SEQ ID NO: 1947 - DNA, 23 bp, synthetic construct
  misc_feature 1..23: note = HLA-A targeting gRNA
  source 1..23: mol_type = other DNA
aagtcgctgttccctctgcaggg

SEQ ID NO: 1948 - DNA, 23 bp, synthetic construct
  misc_feature 1..23: note = HLA-A targeting gRNA
  source 1..23: mol_type = other DNA
tatcccaggtgtctgtgtccagg

SEQ ID NO: 1949 - DNA, 23 bp, synthetic construct
  misc_feature 1..23: note = HLA-A targeting gRNA
  source 1..23: mol_type = other DNA
tcaggcagtgacagtgcccaggg

SEQ ID NO: 1950 - DNA, 23 bp, synthetic construct
  misc_feature 1..23: note = HLA-A targeting gRNA
  source 1..23: mol_type = other DNA
aatcatgggcccacccagcctgg

SEQ ID NO: 1951 - DNA, 23 bp, synthetic construct
  misc_feature 1..23: note = HLA-A targeting gRNA
  source 1..23: mol_type = other DNA
tccactcaggtcaggaccagagg

SEQ ID NO: 1952 - DNA, 23 bp, synthetic construct
  misc_feature 1..23: note = HLA-A targeting gRNA
  source 1..23: mol_type = other DNA
tctgtgtccaggctggtgtctgg

SEQ ID NO: 1953 - DNA, 23 bp, synthetic construct
  misc_feature 1..23: note = HLA-A targeting gRNA
  source 1..23: mol_type = other DNA
tgaggcctgcgccccgggccggg

SEQ ID NO: 1954 - DNA, 23 bp, synthetic construct
  misc_feature 1..23: note = HLA-A targeting gRNA
  source 1..23: mol_type = other DNA
aatctgtccttcattgtaacagg

SEQ ID NO: 1955 - DNA, 23 bp, synthetic construct
  misc_feature 1..23: note = HLA-A targeting gRNA
  source 1..23: mol_type = other DNA
ttctgtttttgttctacctcagg

SEQ ID NO: 1956 - DNA, 23 bp, synthetic construct
  misc_feature 1..23: note = HLA-A targeting gRNA
  source 1..23: mol_type = other DNA
aatcttctattccctgacgaggg

SEQ ID NO: 1957 - DNA, 23 bp, synthetic construct
  misc_feature 1..23: note = HLA-A targeting gRNA
  source 1..23: mol_type = other DNA
aatcttctattccctgcagaggg

SEQ ID NO: 1958 - DNA, 23 bp, synthetic construct
  misc_feature 1..23: note = HLA-A targeting gRNA
  source 1..23: mol_type = other DNA
aatgatgcccacaatggggatgg

SEQ ID NO: 1959 - DNA, 23 bp, synthetic construct
  misc_feature 1..23: note = HLA-A targeting gRNA
  source 1..23: mol_type = other DNA
agaacctggcctcgaccccgcgg

SEQ ID NO: 1960 - DNA, 23 bp, synthetic construct
  misc_feature 1..23: note = HLA-A targeting gRNA
  source 1..23: mol_type = other DNA
aatgatgcccacgatgtggacgg

SEQ ID NO: 1961 - DNA, 23 bp, synthetic construct
  misc_feature 1..23: note = HLA-A targeting gRNA
  source 1..23: mol_type = other DNA
ctgaccgcggggtcgaggccagg

SEQ ID NO: 1962 - DNA, 23 bp, synthetic construct
  misc_feature 1..23: note = HLA-A targeting gRNA
  source 1..23: mol_type = other DNA
aatggccacatgcgtgctggtgg

SEQ ID NO: 1963 - DNA, 23 bp, synthetic construct
  misc_feature 1..23: note = HLA-A targeting gRNA
  source 1..23: mol_type = other DNA
ctgggctgaccgcggggtcgagg

SEQ ID NO: 1964 - DNA, 23 bp, synthetic construct
  misc_feature 1..23: note = HLA-A targeting gRNA
  source 1..23: mol_type = other DNA
aatgtgccctgtctcattcctgg

SEQ ID NO: 1965 - DNA, 23 bp, synthetic construct
  misc_feature 1..23: note = HLA-A targeting gRNA
  source 1..23: mol_type = other DNA
aatgtgtgaatgcagacccaggg

SEQ ID NO: 1966 - DNA, 23 bp, synthetic construct
  misc_feature 1..23: note = HLA-A targeting gRNA
  source 1..23: mol_type = other DNA
aattcatatcactcacagtgagg

SEQ ID NO: 1967 - DNA, 23 bp, synthetic construct
  misc_feature 1..23: note = HLA-A targeting gRNA
  source 1..23: mol_type = other DNA
aagcgtcctgccggtacccgcgg

SEQ ID NO: 1968 - DNA, 23 bp, synthetic construct
  misc_feature 1..23: note = HLA-A targeting gRNA
  source 1..23: mol_type = other DNA
aattcatatctgtcacagtgagg

SEQ ID NO: 1969 - DNA, 23 bp, synthetic construct
  misc_feature 1..23: note = HLA-A targeting gRNA
  source 1..23: mol_type = other DNA
taccggcaggacgcttacgacgg

SEQ ID NO: 1970 - DNA, 23 bp, synthetic construct
  misc_feature 1..23: note = HLA-A targeting gRNA
  source 1..23: mol_type = other DNA
tgccgtcgtaagcgtcctgccgg

SEQ ID NO: 1971 - DNA, 23 bp, synthetic construct
  misc_feature 1..23: note = HLA-A targeting gRNA
  source 1..23: mol_type = other DNA
aattgtgtcacagagcaggccgg

SEQ ID NO: 1972 - DNA, 23 bp, synthetic construct
  misc_feature 1..23: note = HLA-A targeting gRNA
  source 1..23: mol_type = other DNA
cagcagagagcctacctggatgg

SEQ ID NO: 1973 - DNA, 23 bp, synthetic construct
  misc_feature 1..23: note = HLA-A targeting gRNA
  source 1..23: mol_type = other DNA
aagccccgcttcatcgccgtggg

SEQ ID NO: 1974 - DNA, 23 bp, synthetic construct
  misc_feature 1..23: note = HLA-A targeting gRNA
  source 1..23: mol_type = other DNA
aagcggggcttcccgcggccggg

SEQ ID NO: 1975 - DNA, 23 bp, synthetic construct
  misc_feature 1..23: note = HLA-A targeting gRNA
  source 1..23: mol_type = other DNA
acaagggtctcggagccccgcgg

SEQ ID NO: 1976 - DNA, 23 bp, synthetic construct
  misc_feature 1..23: note = HLA-A targeting gRNA
  source 1..23: mol_type = other DNA
acaagggtctcggagtcccgcgg

SEQ ID NO: 1977 - DNA, 23 bp, synthetic construct
  misc_feature 1..23: note = HLA-A targeting gRNA
  source 1..23: mol_type = other DNA
cgatgaagcggggcttcccgcgg

SEQ ID NO: 1978 - DNA, 23 bp, synthetic construct
  misc_feature 1..23: note = HLA-A targeting gRNA
  source 1..23: mol_type = other DNA
gaagccccgcttcatcgccgtgg

SEQ ID NO: 1979 - DNA, 23 bp, synthetic construct
  misc_feature 1..23: note = HLA-A targeting gRNA
  source 1..23: mol_type = other DNA
gaagcggggcttcccgcggccgg

SEQ ID NO: 1980 - DNA, 23 bp, synthetic construct
  misc_feature 1..23: note = HLA-A targeting gRNA
  source 1..23: mol_type = other DNA
acacacaccggcggcagccttgg

SEQ ID NO: 1981 - DNA, 23 bp, synthetic construct
  misc_feature 1..23: note = HLA-A targeting gRNA
  source 1..23: mol_type = other DNA
acacactgaccgagtggacctgg

SEQ ID NO: 1982 - DNA, 23 bp, synthetic construct
  misc_feature 1..23: note = HLA-A targeting gRNA
  source 1..23: mol_type = other DNA
gggcttcccgcggccgggccggg

SEQ ID NO: 1983 - DNA, 23 bp, synthetic construct
  misc_feature 1..23: note = HLA-A targeting gRNA
  source 1..23: mol_type = other DNA
ggggcttcccgcggccgggccgg

SEQ ID NO: 1984 - DNA, 23 bp, synthetic construct
  misc_feature 1..23: note = HLA-A targeting gRNA
  source 1..23: mol_type = other DNA
aattgagtcagagagcagggcgg

SEQ ID NO: 1985 - DNA, 23 bp, synthetic construct
  misc_feature 1..23: note = HLA-A targeting gRNA
  source 1..23: mol_type = other DNA
ccccgggcggggtcactcaccgg

SEQ ID NO: 1986 - DNA, 23 bp, synthetic construct
  misc_feature 1..23: note = HLA-A targeting gRNA
  source 1..23: mol_type = other DNA
acacagggcccaggctgggtggg

SEQ ID NO: 1987 - DNA, 23 bp, synthetic construct
  misc_feature 1..23: note = HLA-A targeting gRNA
  source 1..23: mol_type = other DNA
acaccaacacagacacatgcagg

SEQ ID NO: 1988 - DNA, 23 bp, synthetic construct
  misc_feature 1..23: note = HLA-A targeting gRNA
  source 1..23: mol_type = other DNA
ccggtgagtgaccccgcccgggg

SEQ ID NO: 1989 - DNA, 23 bp, synthetic construct
  misc_feature 1..23: note = HLA-A targeting gRNA
  source 1..23: mol_type = other DNA
cctgctctctgactcaattaagg

SEQ ID NO: 1990 - DNA, 23 bp, synthetic construct
  misc_feature 1..23: note = HLA-A targeting gRNA
  source 1..23: mol_type = other DNA
ccttaattgagtcagagagcagg

SEQ ID NO: 1991 - DNA, 23 bp, synthetic construct
  misc_feature 1..23: note = HLA-A targeting gRNA
  source 1..23: mol_type = other DNA
acacggagctcgtggaggccagg

SEQ ID NO: 1992 - DNA, 23 bp, synthetic construct
  misc_feature 1..23: note = HLA-A targeting gRNA
  source 1..23: mol_type = other DNA
cggtgagtgaccccgcccggggg

SEQ ID NO: 1993 - DNA, 23 bp, synthetic construct
  misc_feature 1..23: note = HLA-A targeting gRNA
  source 1..23: mol_type = other DNA
cgtgacctgcgcccccgggcggg

SEQ ID NO: 1994 - DNA, 23 bp, synthetic construct
  misc_feature 1..23: note = HLA-A targeting gRNA
  source 1..23: mol_type = other DNA
ctctcaactgctccgcccgacgg

SEQ ID NO: 1995 - DNA, 23 bp, synthetic construct
  misc_feature 1..23: note = HLA-A targeting gRNA
  source 1..23: mol_type = other DNA
ctgctctctgactcaattaaggg

SEQ ID NO: 1996 - DNA, 23 bp, synthetic construct
  misc_feature 1..23: note = HLA-A targeting gRNA
  source 1..23: mol_type = other DNA
acactgaccgagtggacctgggg

SEQ ID NO: 1997 - DNA, 23 bp, synthetic construct
  misc_feature 1..23: note = HLA-A targeting gRNA
  source 1..23: mol_type = other DNA
acactgacctgacagcgggatgg

SEQ ID NO: 1998 - DNA, 23 bp, synthetic construct
  misc_feature 1..23: note = HLA-A targeting gRNA
  source 1..23: mol_type = other DNA
cttaattgagtcagagagcaggg

SEQ ID NO: 1999 - DNA, 23 bp, synthetic construct
  misc_feature 1..23: note = HLA-A targeting gRNA
  source 1..23: mol_type = other DNA
acagaacatgtggctagaggagg

SEQ ID NO: 2000 - DNA, 23 bp, synthetic construct
  misc_feature 1..23: note = HLA-A targeting gRNA
  source 1..23: mol_type = other DNA
gccggtgagtgaccccgcccggg

SEQ ID NO: 2001 - DNA, 23 bp, synthetic construct
  misc_feature 1..23: note = HLA-A targeting gRNA
  source 1..23: mol_type = other DNA
ggccggtgagtgaccccgcccgg

SEQ ID NO: 2002 - DNA, 23 bp, synthetic construct
  misc_feature 1..23: note = HLA-A targeting gRNA
  source 1..23: mol_type = other DNA
acagaatctggaaacccaggagg

SEQ ID NO: 2003 - DNA, 23 bp, synthetic construct
  misc_feature 1..23: note = HLA-A targeting gRNA
  source 1..23: mol_type = other DNA
acagacctcaggagggcgattgg

SEQ ID NO: 2004 - DNA, 23 bp, synthetic construct
  misc_feature 1..23: note = HLA-A targeting gRNA
  source 1..23: mol_type = other DNA
acagacctcaggagggcggttgg

SEQ ID NO: 2005 - DNA, 23 bp, synthetic construct
  misc_feature 1..23: note = HLA-A targeting gRNA
  source 1..23: mol_type = other DNA
gggtcgtgacctgcgcccccggg

SEQ ID NO: 2006 - DNA, 23 bp, synthetic construct
  misc_feature 1..23: note = HLA-A targeting gRNA
  source 1..23: mol_type = other DNA
acagactaaccgagcgaacctgg

SEQ ID NO: 2007 - DNA, 23 bp, synthetic construct
  misc_feature 1..23: note = HLA-A targeting gRNA
  source 1..23: mol_type = other DNA
gtgaccccgcccgggggcgcagg

SEQ ID NO: 2008 - DNA, 23 bp, synthetic construct
  misc_feature 1..23: note = HLA-A targeting gRNA
  source 1..23: mol_type = other DNA
gtgacctgcgcccccgggcgggg

SEQ ID NO: 2009 - DNA, 23 bp, synthetic construct
  misc_feature 1..23: note = HLA-A targeting gRNA
  source 1..23: mol_type = other DNA
tcgtgacctgcgcccccgggcgg

SEQ ID NO: 2010 - DNA, 23 bp, synthetic construct
  misc_feature 1..23: note = HLA-A targeting gRNA
  source 1..23: mol_type = other DNA
tctcaactgctccgcccgacggg

SEQ ID NO: 2011 - DNA, 23 bp, synthetic construct
  misc_feature 1..23: note = HLA-A targeting gRNA
  source 1..23: mol_type = other DNA
acagcgacgccgcgagccaaagg

SEQ ID NO: 2012 - DNA, 23 bp, synthetic construct
  misc_feature 1..23: note = HLA-A targeting gRNA
  source 1..23: mol_type = other DNA
aagtaccagggccccaggcgtgg

SEQ ID NO: 2013 - DNA, 23 bp, synthetic construct
  misc_feature 1..23: note = HLA-A targeting gRNA
  source 1..23: mol_type = other DNA
aggggtcagggcgaagtaccagg

SEQ ID NO: 2014 - DNA, 23 bp, synthetic construct
  misc_feature 1..23: note = HLA-A targeting gRNA
  source 1..23: mol_type = other DNA
gggcgaagtaccagggccccagg

SEQ ID NO: 2015 - DNA, 23 bp, synthetic construct
  misc_feature 1..23: note = HLA-A targeting gRNA
  source 1..23: mol_type = other DNA
ggggtcagggcgaagtaccaggg

SEQ ID NO: 2016 - DNA, 23 bp, synthetic construct
  misc_feature 1..23: note = HLA-A targeting gRNA
  source 1..23: mol_type = other DNA
acagactgaccgagagaacctgg

SEQ ID NO: 2017 - DNA, 23 bp, synthetic construct
  misc_feature 1..23: note = HLA-A targeting gRNA
  source 1..23: mol_type = other DNA
accttgattacggcagtgatggg

SEQ ID NO: 2018 - DNA, 23 bp, synthetic construct
  misc_feature 1..23: note = HLA-A targeting gRNA
  source 1..23: mol_type = other DNA
agactgaccgagagaacctgggg

SEQ ID NO: 2019 - DNA, 23 bp, synthetic construct
  misc_feature 1..23: note = HLA-A targeting gRNA
  source 1..23: mol_type = other DNA
caccttgattacggcagtgatgg

SEQ ID NO: 2020 - DNA, 23 bp, synthetic construct
  misc_feature 1..23: note = HLA-A targeting gRNA
  source 1..23: mol_type = other DNA
cagactgaccgagagaacctggg

SEQ ID NO: 2021 - DNA, 23 bp, synthetic construct
  misc_feature 1..23: note = HLA-A targeting gRNA
  source 1..23: mol_type = other DNA
acccaataggagtgagaactggg

SEQ ID NO: 2022 - DNA, 23 bp, synthetic construct
  misc_feature 1..23: note = HLA-A targeting gRNA
  source 1..23: mol_type = other DNA
gagaacctggggaccctgcgcgg

SEQ ID NO: 2023 - DNA, 23 bp, synthetic construct
  misc_feature 1..23: note = HLA-A targeting gRNA
  source 1..23: mol_type = other DNA
acccaattggagtgagaactggg

SEQ ID NO: 2024 - DNA, 23 bp, synthetic construct
  misc_feature 1..23: note = HLA-A targeting gRNA
  source 1..23: mol_type = other DNA
acccagaccagcctggacacagg

SEQ ID NO: 2025 - DNA, 23 bp, synthetic construct
  misc_feature 1..23: note = HLA-A targeting gRNA
  source 1..23: mol_type = other DNA
acccagcagtcacaagtcacagg

SEQ ID NO: 2026 - DNA, 23 bp, synthetic construct
  misc_feature 1..23: note = HLA-A targeting gRNA
  source 1..23: mol_type = other DNA
acccagttctcactccaattggg

SEQ ID NO: 2027 - DNA, 23 bp, synthetic construct
  misc_feature 1..23: note = HLA-A targeting gRNA
  source 1..23: mol_type = other DNA
gcagggtccccaggttctctcgg

SEQ ID NO: 2028 - DNA, 23 bp, synthetic construct
  misc_feature 1..23: note = HLA-A targeting gRNA
  source 1..23: mol_type = other DNA
tcccatcactgccgtaatcaagg

SEQ ID NO: 2029 - DNA, 23 bp, synthetic construct
  misc_feature 1..23: note = HLA-A targeting gRNA
  source 1..23: mol_type = other DNA
acccagttctcactcctattggg

SEQ ID NO: 2030 - DNA, 23 bp, synthetic construct
  misc_feature 1..23: note = HLA-A targeting gRNA
  source 1..23: mol_type = other DNA
ttgggtgttgggcagaacagtgg

SEQ ID NO: 2031 - DNA, 23 bp, synthetic construct
  misc_feature 1..23: note = HLA-A targeting gRNA
  source 1..23: mol_type = other DNA
acccctcatcccctacggacggg

SEQ ID NO: 2032 - DNA, 23 bp, synthetic construct
  misc_feature 1..23: note = HLA-A targeting gRNA
  source 1..23: mol_type = other DNA
acccctcattccccacggacggg

SEQ ID NO: 2033 - DNA, 23 bp, synthetic construct
  misc_feature 1..23: note = HLA-A targeting gRNA
  source 1..23: mol_type = other DNA
acccgccctggtctgggtcaggg

SEQ ID NO: 2034 - DNA, 23 bp, synthetic construct
  misc_feature 1..23: note = HLA-A targeting gRNA
  source 1..23: mol_type = other DNA
attggggagtcacagccttgggg

SEQ ID NO: 2035 - DNA, 23 bp, synthetic construct
  misc_feature 1..23: note = HLA-A targeting gRNA
  source 1..23: mol_type = other DNA
gattggggagtcacagccttggg

SEQ ID NO: 2036 - DNA, 23 bp, synthetic construct
  misc_feature 1..23: note = HLA-A targeting gRNA
  source 1..23: mol_type = other DNA
ggattggggagtcacagccttgg

SEQ ID NO: 2037 - DNA, 23 bp, synthetic construct
  misc_feature 1..23: note = HLA-A targeting gRNA
  source 1..23: mol_type = other DNA
aacaggaaagatgattggagagg

SEQ ID NO: 2038 - DNA, 23 bp, synthetic construct
  misc_feature 1..23: note = HLA-A targeting gRNA
  source 1..23: mol_type = other DNA
acaggaaagatgattggagaggg

SEQ ID NO: 2039 - DNA, 23 bp, synthetic construct
  misc_feature 1..23: note = HLA-A targeting gRNA
  source 1..23: mol_type = other DNA
atttctacacttccgtgtcccgg

SEQ ID NO: 2040 - DNA, 23 bp, synthetic construct
  misc_feature 1..23: note = HLA-A targeting gRNA
  source 1..23: mol_type = other DNA
accctgagatgggataaggaggg

SEQ ID NO: 2041 - DNA, 23 bp, synthetic construct
  misc_feature 1..23: note = HLA-A targeting gRNA
  source 1..23: mol_type = other DNA
ggaagtgtagaaatacctcatgg

SEQ ID NO: 2042 - DNA, 23 bp, synthetic construct
  misc_feature 1..23: note = HLA-A targeting gRNA
  source 1..23: mol_type = other DNA
accctgagatgggttaaggaggg

SEQ ID NO: 2043 - DNA, 23 bp, synthetic construct
  misc_feature 1..23: note = HLA-A targeting gRNA
  source 1..23: mol_type = other DNA
tacacttccgtgtcccggcccgg

SEQ ID NO: 2044 - DNA, 23 bp, synthetic construct
  misc_feature 1..23: note = HLA-A targeting gRNA
  source 1..23: mol_type = other DNA
atttctacacctccatgtcccgg

SEQ ID NO: 2045 - DNA, 23 bp, synthetic construct
  misc_feature 1..23: note = HLA-A targeting gRNA
  source 1..23: mol_type = other DNA
accgggctgaccgcggggtcggg

SEQ ID NO: 2046 - DNA, 23 bp, synthetic construct
  misc_feature 1..23: note = HLA-A targeting gRNA
  source 1..23: mol_type = other DNA
gcggccgggccgggacatggagg

SEQ ID NO: 2047 - DNA, 23 bp, synthetic construct
  misc_feature 1..23: note = HLA-A targeting gRNA
  source 1..23: mol_type = other DNA
tacacctccatgtcccggcccgg

SEQ ID NO: 2048 - DNA, 23 bp, synthetic construct
  misc_feature 1..23: note = HLA-A targeting gRNA
  source 1..23: mol_type = other DNA
tccatgtcccggcccggccgcgg

SEQ ID NO: 2049 - DNA, 23 bp, synthetic construct
  misc_feature 1..23: note = HLA-A targeting gRNA
  source 1..23: mol_type = other DNA
acctcatggagtaggagcctggg

SEQ ID NO: 2050 - DNA, 23 bp, synthetic construct
  misc_feature 1..23: note = HLA-A targeting gRNA
  source 1..23: mol_type = other DNA
acccgaccctcctcccggcgcgg

SEQ ID NO: 2051 - DNA, 23 bp, synthetic construct
  misc_feature 1..23: note = HLA-A targeting gRNA
  source 1..23: mol_type = other DNA
cgccgggaggagggtcgggtggg

SEQ ID NO: 2052 - DNA, 23 bp, synthetic construct
  misc_feature 1..23: note = HLA-A targeting gRNA
  source 1..23: mol_type = other DNA
acctcatggattgggagcctggg

SEQ ID NO: 2053 - DNA, 23 bp, synthetic construct
  misc_feature 1..23: note = HLA-A targeting gRNA
  source 1..23: mol_type = other DNA
gacccacccgaccctcctcccgg

SEQ ID NO: 2054 - DNA, 23 bp, synthetic construct
  misc_feature 1..23: note = HLA-A targeting gRNA
  source 1..23: mol_type = other DNA
gcgccgggaggagggtcgggtgg

SEQ ID NO: 2055 - DNA, 23 bp, synthetic construct
  misc_feature 1..23: note = HLA-A targeting gRNA
  source 1..23: mol_type = other DNA
acttcaagtcacaaagggaaggg

SEQ ID NO: 2056 - DNA, 23 bp, synthetic construct
  misc_feature 1..23: note = HLA-A targeting gRNA
  source 1..23: mol_type = other DNA
agggtacttcaagtcacaaaggg

SEQ ID NO: 2057 - DNA, 23 bp, synthetic construct
  misc_feature 1..23: note = HLA-A targeting gRNA
  source 1..23: mol_type = other DNA
cagggtacttcaagtcacaaagg

SEQ ID NO: 2058 - DNA, 23 bp, synthetic construct
  misc_feature 1..23: note = HLA-A targeting gRNA
  source 1..23: mol_type = other DNA
tacttcaagtcacaaagggaagg

SEQ ID NO: 2059 - DNA, 23 bp, synthetic construct
  misc_feature 1..23: note = HLA-A targeting gRNA
  source 1..23: mol_type = other DNA
aaaaattcccccgggttggtcgg

SEQ ID NO: 2060 - DNA, 23 bp, synthetic construct
  misc_feature 1..23: note = HLA-A targeting gRNA
  source 1..23: mol_type = other DNA
aaaattcccccgggttggtcggg

SEQ ID NO: 2061 - DNA, 23 bp, synthetic construct
  misc_feature 1..23: note = HLA-A targeting gRNA
  source 1..23: mol_type = other DNA
aaattcccccgggttggtcgggg

SEQ ID NO: 2062 - DNA, 23 bp, synthetic construct
  misc_feature 1..23: note = HLA-A targeting gRNA
  source 1..23: mol_type = other DNA
aatcatgggcctacccagcctgg

SEQ ID NO: 2063 - DNA, 23 bp, synthetic construct
  misc_feature 1..23: note = HLA-A targeting gRNA
  source 1..23: mol_type = other DNA
acagcacgcctacgacggcaagg

SEQ ID NO: 2064 - DNA, 23 bp, synthetic construct
  misc_feature 1..23: note = HLA-A targeting gRNA
  source 1..23: mol_type = other DNA
aggcgtgctgttcatacccgcgg

SEQ ID NO: 2065 - DNA, 23 bp, synthetic construct
  misc_feature 1..23: note = HLA-A targeting gRNA
  source 1..23: mol_type = other DNA
atcatgggcctacccagcctggg

SEQ ID NO: 2066 - DNA, 23 bp, synthetic construct
  misc_feature 1..23: note = HLA-A targeting gRNA
  source 1..23: mol_type = other DNA
cctgggcctctcccgggtcaagg

SEQ ID NO: 2067 - DNA, 23 bp, synthetic construct
  misc_feature 1..23: note = HLA-A targeting gRNA
  source 1..23: mol_type = other DNA
ccttgacccgggagaggcccagg

SEQ ID NO: 2068 - DNA, 23 bp, synthetic construct
  misc_feature 1..23: note = HLA-A targeting gRNA
  source 1..23: mol_type = other DNA
actccacgaactcgccctccagg

SEQ ID NO: 2069 - DNA, 23 bp, synthetic construct
  misc_feature 1..23: note = HLA-A targeting gRNA
  source 1..23: mol_type = other DNA
cgagacccttgacccgggagagg

SEQ ID NO: 2070 - DNA, 23 bp, synthetic construct
  misc_feature 1..23: note = HLA-A targeting gRNA
  source 1..23: mol_type = other DNA
cgtgctgttcatacccgcggagg

SEQ ID NO: 2071 - DNA, 23 bp, synthetic construct
  misc_feature 1..23: note = HLA-A targeting gRNA
  source 1..23: mol_type = other DNA
ctcccgggtcaagggtctcgggg

SEQ ID NO: 2072 - DNA, 23 bp, synthetic construct
  misc_feature 1..23: note = HLA-A targeting gRNA
  source 1..23: mol_type = other DNA
ctctcccgggtcaagggtctcgg

SEQ ID NO: 2073 - DNA, 23 bp, synthetic construct
  misc_feature 1..23: note = HLA-A targeting gRNA
  source 1..23: mol_type = other DNA
ctgggcctctcccgggtcaaggg

SEQ ID NO: 2074 - DNA, 23 bp, synthetic construct
  misc_feature 1..23: note = HLA-A targeting gRNA
  source 1..23: mol_type = other DNA
gaccaacccgggggaatttttgg

SEQ ID NO: 2075 - DNA, 23 bp, synthetic construct
  misc_feature 1..23: note = HLA-A targeting gRNA
  source 1..23: mol_type = other DNA
gaccccgagacccttgacccggg

SEQ ID NO: 2076 - DNA, 23 bp, synthetic construct
  misc_feature 1..23: note = HLA-A targeting gRNA
  source 1..23: mol_type = other DNA
actctgaggtgctgggccctggg

SEQ ID NO: 2077 - DNA, 23 bp, synthetic construct
  misc_feature 1..23: note = HLA-A targeting gRNA
  source 1..23: mol_type = other DNA
actgacctgacagcgggatgggg

SEQ ID NO: 2078 - DNA, 23 bp, synthetic construct
  misc_feature 1..23: note = HLA-A targeting gRNA
  source 1..23: mol_type = other DNA
actgacctggcagcgggataggg

SEQ ID NO: 2079 - DNA, 23 bp, synthetic construct
  misc_feature 1..23: note = HLA-A targeting gRNA
  source 1..23: mol_type = other DNA
gctgggtaggcccatgattgtgg

SEQ ID NO: 2080 - DNA, 23 bp, synthetic construct
  misc_feature 1..23: note = HLA-A targeting gRNA
  source 1..23: mol_type = other DNA
ggaccccgagacccttgacccgg

SEQ ID NO: 2081 - DNA, 23 bp, synthetic construct
  misc_feature 1..23: note = HLA-A targeting gRNA
  source 1..23: mol_type = other DNA
ggccaaaaattcccccgggttgg

SEQ ID NO: 2082 - DNA, 23 bp, synthetic construct
  misc_feature 1..23: note = HLA-A targeting gRNA
  source 1..23: mol_type = other DNA
ggggtcgtgacctgcgcccccgg

SEQ ID NO: 2083 - DNA, 23 bp, synthetic construct
  misc_feature 1..23: note = HLA-A targeting gRNA
  source 1..23: mol_type = other DNA
ggtaggcccatgattgtggatgg

SEQ ID NO: 2084 - DNA, 23 bp, synthetic construct
  misc_feature 1..23: note = HLA-A targeting gRNA
  source 1..23: mol_type = other DNA
gtttaggccaaaaattcccccgg

SEQ ID NO: 2085 - DNA, 23 bp, synthetic construct
  misc_feature 1..23: note = HLA-A targeting gRNA
  source 1..23: mol_type = other DNA
tatgaacagcacgcctacgacgg

SEQ ID NO: 2086 - DNA, 23 bp, synthetic construct
  misc_feature 1..23: note = HLA-A targeting gRNA
  source 1..23: mol_type = other DNA
tcaagggtctcggggtcccgcgg

SEQ ID NO: 2087 - DNA, 23 bp, synthetic construct
  misc_feature 1..23: note = HLA-A targeting gRNA
  source 1..23: mol_type = other DNA
tcccccgggttggtcggggctgg

SEQ ID NO: 2088 - DNA, 23 bp, synthetic construct
  misc_feature 1..23: note = HLA-A targeting gRNA
  source 1..23: mol_type = other DNA
tctcccgggtcaagggtctcggg

SEQ ID NO: 2089 - DNA, 23 bp, synthetic construct
  misc_feature 1..23: note = HLA-A targeting gRNA
  source 1..23: mol_type = other DNA
tttaggccaaaaattcccccggg

SEQ ID NO: 2090 - DNA, 23 bp, synthetic construct
  misc_feature 1..23: note = HLA-A targeting gRNA
  source 1..23: mol_type = other DNA
aagagggtcatggtggacatcgg

SEQ ID NO: 2091 - DNA, 23 bp, synthetic construct
  misc_feature 1..23: note = HLA-A targeting gRNA
  source 1..23: mol_type = other DNA
agagggtcatggtggacatcggg

SEQ ID NO: 2092 - DNA, 23 bp, synthetic construct
  misc_feature 1..23: note = HLA-A targeting gRNA
  source 1..23: mol_type = other DNA
gagggtcatggtggacatcgggg

SEQ ID NO: 2093 - DNA, 23 bp, synthetic construct
  misc_feature 1..23: note = HLA-A targeting gRNA
  source 1..23: mol_type = other DNA
caagtgggaggcggcccgtcggg

SEQ ID NO: 2094 - DNA, 23 bp, synthetic construct
  misc_feature 1..23: note = HLA-A targeting gRNA
  source 1..23: mol_type = other DNA
gcaagtgggaggcggcccgtcgg

SEQ ID NO: 2095 - DNA, 23 bp, synthetic construct
  misc_feature 1..23: note = HLA-A targeting gRNA
  source 1..23: mol_type = other DNA
agaagagctcaggtggagaaggg

SEQ ID NO: 2096 - DNA, 23 bp, synthetic construct
  misc_feature 1..23: note = HLA-A targeting gRNA
  source 1..23: mol_type = other DNA
gtgggaggcggcccgtcgggcgg

SEQ ID NO: 2097 - DNA, 23 bp, synthetic construct
  misc_feature 1..23: note = HLA-A targeting gRNA
  source 1..23: mol_type = other DNA
gatgattggagagggagcacagg

SEQ ID NO: 2098 - DNA, 23 bp, synthetic construct
  misc_feature 1..23: note = HLA-A targeting gRNA
  source 1..23: mol_type = other DNA
agtattgggacctgcagacacgg

SEQ ID NO: 2099 - DNA, 23 bp, synthetic construct
  misc_feature 1..23: note = HLA-A targeting gRNA
  source 1..23: mol_type = other DNA
cctgcagacacggaatgtgaagg

SEQ ID NO: 2100 - DNA, 23 bp, synthetic construct
  misc_feature 1..23: note = HLA-A targeting gRNA
  source 1..23: mol_type = other DNA
agaccaggcctgcaggggatggg

SEQ ID NO: 2101 - DNA, 23 bp, synthetic construct
  misc_feature 1..23: note = HLA-A targeting gRNA
  source 1..23: mol_type = other DNA
agaccagggcgggtgagtgcggg

SEQ ID NO: 2102 - DNA, 23 bp, synthetic construct
  misc_feature 1..23: note = HLA-A targeting gRNA
  source 1..23: mol_type = other DNA
ccttcacattccgtgtctgcagg

SEQ ID NO: 2103 - DNA, 23 bp, synthetic construct
  misc_feature 1..23: note = HLA-A targeting gRNA
  source 1..23: mol_type = other DNA
agactaaccgagcgaacctgggg

SEQ ID NO: 2104 - DNA, 23 bp, synthetic construct
  misc_feature 1..23: note = HLA-A targeting gRNA
  source 1..23: mol_type = other DNA
agactgaccgagagaaactgcgg

SEQ ID NO: 2105 - DNA, 23 bp, synthetic construct
  misc_feature 1..23: note = HLA-A targeting gRNA
  source 1..23: mol_type = other DNA
acgctgcagcgcacgggtaccgg

SEQ ID NO: 2106 - DNA, 23 bp, synthetic construct
  misc_feature 1..23: note = HLA-A targeting gRNA
  source 1..23: mol_type = other DNA
caccgtggatagagcaggagggg

SEQ ID NO: 2107 - DNA, 23 bp, synthetic construct
  misc_feature 1..23: note = HLA-A targeting gRNA
  source 1..23: mol_type = other DNA
cacgggtaccgggggccacgggg

SEQ ID NO: 2108 - DNA, 23 bp, synthetic construct
  misc_feature 1..23: note = HLA-A targeting gRNA
  source 1..23: mol_type = other DNA
cccggcggggacgcaggacccgg

SEQ ID NO: 2109 - DNA, 23 bp, synthetic construct
  misc_feature 1..23: note = HLA-A targeting gRNA
  source 1..23: mol_type = other DNA
cccgggtcctgcgtccccgccgg

SEQ ID NO: 2110 - DNA, 23 bp, synthetic construct
  misc_feature 1..23: note = HLA-A targeting gRNA
  source 1..23: mol_type = other DNA
agagagtgactctgaggttccgg

SEQ ID NO: 2111 - DNA, 23 bp, synthetic construct
  misc_feature 1..23: note = HLA-A targeting gRNA
  source 1..23: mol_type = other DNA
agagcagttgagagcctacctgg

SEQ ID NO: 2112 - DNA, 23 bp, synthetic construct
  misc_feature 1..23: note = HLA-A targeting gRNA
  source 1..23: mol_type = other DNA
ccggcggggacgcaggacccggg

SEQ ID NO: 2113 - DNA, 23 bp, synthetic construct
  misc_feature 1..23: note = HLA-A targeting gRNA
  source 1..23: mol_type = other DNA
ccgggtcctgcgtccccgccggg

SEQ ID NO: 2114 - DNA, 23 bp, synthetic construct
  misc_feature 1..23: note = HLA-A targeting gRNA
  source 1..23: mol_type = other DNA
cgcacgggtaccgggggccacgg

SEQ ID NO: 2115 - DNA, 23 bp, synthetic construct
  misc_feature 1..23: note = HLA-A targeting gRNA
  source 1..23: mol_type = other DNA
cgctcggtcagtctgtgactggg

SEQ ID NO: 2116 - DNA, 23 bp, synthetic construct
  misc_feature 1..23: note = HLA-A targeting gRNA
  source 1..23: mol_type = other DNA
cgctgcagcgcacgggtaccggg

SEQ ID NO: 2117 - DNA, 23 bp, synthetic construct
  misc_feature 1..23: note = HLA-A targeting gRNA
  source 1..23: mol_type = other DNA
ctgcagcgcacgggtaccggggg

SEQ ID NO: 2118 - DNA, 23 bp, synthetic construct
  misc_feature 1..23: note = HLA-A targeting gRNA
  source 1..23: mol_type = other DNA
gcaccgtggatagagcaggaggg

SEQ ID NO: 2119 - DNA, 23 bp, synthetic construct
  misc_feature 1..23: note = HLA-A targeting gRNA
  source 1..23: mol_type = other DNA
gcacgggtaccgggggccacggg

SEQ ID NO: 2120 - DNA, 23 bp, synthetic construct
  misc_feature 1..23: note = HLA-A targeting gRNA
  source 1..23: mol_type = other DNA
gctgcagcgcacgggtaccgggg

SEQ ID NO: 2121 - DNA, 23 bp, synthetic construct
  misc_feature 1..23: note = HLA-A targeting gRNA
  source 1..23: mol_type = other DNA
ggcaccgtggatagagcaggagg

SEQ ID NO: 2122 - DNA, 23 bp, synthetic construct
  misc_feature 1..23: note = HLA-A targeting gRNA
  source 1..23: mol_type = other DNA
ggcccgcccggcggggacgcagg

SEQ ID NO: 2123 - DNA, 23 bp, synthetic construct
  misc_feature 1..23: note = HLA-A targeting gRNA
  source 1..23: mol_type = other DNA
gggaggcgccccgtggcccccgg

SEQ ID NO: 2124 - DNA, 23 bp, synthetic construct
  misc_feature 1..23: note = HLA-A targeting gRNA
  source 1..23: mol_type = other DNA
ggtcctgcgtccccgccgggcgg

SEQ ID NO: 2125 - DNA, 23 bp, synthetic construct
  misc_feature 1..23: note = HLA-A targeting gRNA
  source 1..23: mol_type = other DNA
gtcctgcgtccccgccgggcggg

SEQ ID NO: 2126 - DNA, 23 bp, synthetic construct
  misc_feature 1..23: note = HLA-A targeting gRNA
  source 1..23: mol_type = other DNA
agatcacactgacctgacagcgg

SEQ ID NO: 2127 - DNA, 23 bp, synthetic construct
  misc_feature 1..23: note = HLA-A targeting gRNA
  source 1..23: mol_type = other DNA
tcgctcggtcagtctgtgactgg

SEQ ID NO: 2128 - DNA, 23 bp, synthetic construct
  misc_feature 1..23: note = HLA-A targeting gRNA
  source 1..23: mol_type = other DNA
agatccaccccgaagccgcgggg

SEQ ID NO: 2129 - DNA, 23 bp, synthetic construct
  misc_feature 1..23: note = HLA-A targeting gRNA
  source 1..23: mol_type = other DNA
aagcggggctctccactgccggg

SEQ ID NO: 2130 - DNA, 23 bp, synthetic construct
  misc_feature 1..23: note = HLA-A targeting gRNA
  source 1..23: mol_type = other DNA
agagggagcacaggtcagcgtgg

SEQ ID NO: 2131 - DNA, 23 bp, synthetic construct
  misc_feature 1..23: note = HLA-A targeting gRNA
  source 1..23: mol_type = other DNA
cgccgggaggagggtcggtcagg

SEQ ID NO: 2132 - DNA, 23 bp, synthetic construct
  misc_feature 1..23: note = HLA-A targeting gRNA
  source 1..23: mol_type = other DNA
agatggagccgcgggcgccgtgg

SEQ ID NO: 2133 - DNA, 23 bp, synthetic construct
  misc_feature 1..23: note = HLA-A targeting gRNA
  source 1..23: mol_type = other DNA
gaagcggggctctccactgccgg

SEQ ID NO: 2134 - DNA, 23 bp, synthetic construct
  misc_feature 1..23: note = HLA-A targeting gRNA
  source 1..23: mol_type = other DNA
agatgggataaggagggagatgg

SEQ ID NO: 2135 - DNA, 23 bp, synthetic construct
  misc_feature 1..23: note = HLA-A targeting gRNA
  source 1..23: mol_type = other DNA
gaccgaccctcctcccggcgcgg

SEQ ID NO: 2136 - DNA, 23 bp, synthetic construct
  misc_feature 1..23: note = HLA-A targeting gRNA
  source 1..23: mol_type = other DNA
gacctgaccgaccctcctcccgg

SEQ ID NO: 2137 - DNA, 23 bp, synthetic construct
  misc_feature 1..23: note = HLA-A targeting gRNA
  source 1..23: mol_type = other DNA
agatgggttaaggagggagatgg

SEQ ID NO: 2138 - DNA, 23 bp, synthetic construct
  misc_feature 1..23: note = HLA-A targeting gRNA
  source 1..23: mol_type = other DNA
gggctctccactgccgggccggg

SEQ ID NO: 2139 - DNA, 23 bp, synthetic construct
  misc_feature 1..23: note = HLA-A targeting gRNA
  source 1..23: mol_type = other DNA
ggggctctccactgccgggccgg

SEQ ID NO: 2140 - DNA, 23 bp, synthetic construct
  misc_feature 1..23: note = HLA-A targeting gRNA
  source 1..23: mol_type = other DNA
tccactgccgggccgggacacgg

SEQ ID NO: 2141 - DNA, 23 bp, synthetic construct
  misc_feature 1..23: note = HLA-A targeting gRNA
  source 1..23: mol_type = other DNA
tccgtgtcccggcccggcagtgg

SEQ ID NO: 2142 - DNA, 23 bp, synthetic construct
  misc_feature 1..23: note = HLA-A targeting gRNA
  source 1..23: mol_type = other DNA
agactctgagagccacgcctggg

SEQ ID NO: 2143 - DNA, 23 bp, synthetic construct
  misc_feature 1..23: note = HLA-A targeting gRNA
  source 1..23: mol_type = other DNA
agcacctcagagtggcctcatgg

SEQ ID NO: 2144 - DNA, 23 bp, synthetic construct
  misc_feature 1..23: note = HLA-A targeting gRNA
  source 1..23: mol_type = other DNA
agagtctcaggccccgaaggcgg

SEQ ID NO: 2145 - DNA, 23 bp, synthetic construct
  misc_feature 1..23: note = HLA-A targeting gRNA
  source 1..23: mol_type = other DNA
ctcagagtctcaggccccgaagg

SEQ ID NO: 2146 - DNA, 23 bp, synthetic construct
  misc_feature 1..23: note = HLA-A targeting gRNA
  source 1..23: mol_type = other DNA
gactctgagagccacgcctgggg

SEQ ID NO: 2147 - DNA, 23 bp, synthetic construct
  misc_feature 1..23: note = HLA-A targeting gRNA
  source 1..23: mol_type = other DNA
agcagagaacagggcctgagagg

SEQ ID NO: 2148 - DNA, 23 bp, synthetic construct
  misc_feature 1..23: note = HLA-A targeting gRNA
  source 1..23: mol_type = other DNA
agcagagaacgaggcctgagagg

SEQ ID NO: 2149 - DNA, 23 bp, synthetic construct
  misc_feature 1..23: note = HLA-A targeting gRNA
  source 1..23: mol_type = other DNA
gagactctgagagccacgcctgg

SEQ ID NO: 2150 - DNA, 23 bp, synthetic construct
  misc_feature 1..23: note = HLA-A targeting gRNA
  source 1..23: mol_type = other DNA
agcaggaggagccggagtattgg

SEQ ID NO: 2151 - DNA, 23 bp, synthetic construct
  misc_feature 1..23: note = HLA-A targeting gRNA
  source 1..23: mol_type = other DNA
agcaggaggagggttcggggcgg

SEQ ID NO: 2152 - DNA, 23 bp, synthetic construct
  misc_feature 1..23: note = HLA-A targeting gRNA
  source 1..23: mol_type = other DNA
ggcgtggctctcagagtctcagg

SEQ ID NO: 2153 - DNA, 23 bp, synthetic construct
  misc_feature 1..23: note = HLA-A targeting gRNA
  source 1..23: mol_type = other DNA
aagacactgattggcttctctgg

SEQ ID NO: 2154 - DNA, 23 bp, synthetic construct
  misc_feature 1..23: note = HLA-A targeting gRNA
  source 1..23: mol_type = other DNA
gtctgcaggtcccaatactccgg

SEQ ID NO: 2155 - DNA, 23 bp, synthetic construct
  misc_feature 1..23: note = HLA-A targeting gRNA
  source 1..23: mol_type = other DNA
ggtcatggtggacatcggggtgg

SEQ ID NO: 2156 - DNA, 23 bp, synthetic construct
  misc_feature 1..23: note = HLA-A targeting gRNA
  source 1..23: mol_type = other DNA
agccattttgcatctgtcatggg

SEQ ID NO: 2157 - DNA, 23 bp, synthetic construct
  misc_feature 1..23: note = HLA-A targeting gRNA
  source 1..23: mol_type = other DNA
gtcatggtggacatcggggtggg

SEQ ID NO: 2158 - DNA, 23 bp, synthetic construct
  misc_feature 1..23: note = HLA-A targeting gRNA
  source 1..23: mol_type = other DNA
gcgggcaccgtggatagagcagg

SEQ ID NO: 2159 - DNA, 23 bp, synthetic construct
  misc_feature 1..23: note = HLA-A targeting gRNA
  source 1..23: mol_type = other DNA
ggatggagccgcgggcaccgtgg

SEQ ID NO: 2160 - DNA, 23 bp, synthetic construct
  misc_feature 1..23: note = HLA-A targeting gRNA
  source 1..23: mol_type = other DNA
gtgcccgcggctccatcctctgg

SEQ ID NO: 2161 - DNA, 23 bp, synthetic construct
  misc_feature 1..23: note = HLA-A targeting gRNA
  source 1..23: mol_type = other DNA
tgctctatccacggtgcccgcgg

SEQ ID NO: 2162 - DNA, 23 bp, synthetic construct
  misc_feature 1..23: note = HLA-A targeting gRNA
  source 1..23: mol_type = other DNA
agcgcccgtccgaccccacgtgg

SEQ ID NO: 2163 - DNA, 23 bp, synthetic construct
  misc_feature 1..23: note = HLA-A targeting gRNA
  source 1..23: mol_type = other DNA
agcgcgatccgcagttctctcgg

SEQ ID NO: 2164 - DNA, 23 bp, synthetic construct
  misc_feature 1..23: note = HLA-A targeting gRNA
  source 1..23: mol_type = other DNA
agatctacaggcgatcaggaagg

SEQ ID NO: 2165 - DNA, 23 bp, synthetic construct
  misc_feature 1..23: note = HLA-A targeting gRNA
  source 1..23: mol_type = other DNA
gcgatcaggaaggcgccccgtgg

SEQ ID NO: 2166 - DNA, 23 bp, synthetic construct
  misc_feature 1..23: note = HLA-A targeting gRNA
  source 1..23: mol_type = other DNA
gcgtcttgggggggtctgtcagg

SEQ ID NO: 2167 - DNA, 23 bp, synthetic construct
  misc_feature 1..23: note = HLA-A targeting gRNA
  source 1..23: mol_type = other DNA
ggaaggcgccccgtggcccctgg

SEQ ID NO: 2168 - DNA, 23 bp, synthetic construct
  misc_feature 1..23: note = HLA-A targeting gRNA
  source 1..23: mol_type = other DNA
gaagccaatcagtgtcttcgcgg

SEQ ID NO: 2169 - DNA, 23 bp, synthetic construct
  misc_feature 1..23: note = HLA-A targeting gRNA
  source 1..23: mol_type = other DNA
gcgaccgcgaagacactgattgg

SEQ ID NO: 2170 - DNA, 23 bp, synthetic construct
  misc_feature 1..23: note = HLA-A targeting gRNA
  source 1..23: mol_type = other DNA
caagtgggaggcggcccatgcgg

SEQ ID NO: 2171 - DNA, 23 bp, synthetic construct
  misc_feature 1..23: note = HLA-A targeting gRNA
  source 1..23: mol_type = other DNA
ctctctgctgctccgccgcatgg

SEQ ID NO: 2172 - DNA, 23 bp, synthetic construct
  misc_feature 1..23: note = HLA-A targeting gRNA
  source 1..23: mol_type = other DNA
gtgggaggcggcccatgcggcgg

SEQ ID NO: 2173 - DNA, 23 bp, synthetic construct
  misc_feature 1..23: note = HLA-A targeting gRNA
  source 1..23: mol_type = other DNA
tctctgctgctccgccgcatggg

SEQ ID NO: 2174 - DNA, 23 bp, synthetic construct
  misc_feature 1..23: note = HLA-A targeting gRNA
  source 1..23: mol_type = other DNA
gagtcatatgcgtcttggggggg

SEQ ID NO: 2175 - DNA, 23 bp, synthetic construct
  misc_feature 1..23: note = HLA-A targeting gRNA
  source 1..23: mol_type = other DNA
tgagtcatatgcgtcttgggggg

SEQ ID NO: 2176 - DNA, 23 bp, synthetic construct
  misc_feature 1..23: note = HLA-A targeting gRNA
  source 1..23: mol_type = other DNA
tcatggtggacatcggggtgggg

SEQ ID NO: 2177 - DNA, 23 bp, synthetic construct
  misc_feature 1..23: note = HLA-A targeting gRNA
  source 1..23: mol_type = other DNA
tggtggacatcggggtggggtgg

SEQ ID NO: 2178 - DNA, 23 bp, synthetic construct
  misc_feature 1..23: note = HLA-A targeting gRNA
  source 1..23: mol_type = other DNA
cagattctccccagaccccgagg

SEQ ID NO: 2179 - DNA, 23 bp, synthetic construct
  misc_feature 1..23: note = HLA-A targeting gRNA
  source 1..23: mol_type = other DNA
cagccccacctctctgcaacagg

SEQ ID NO: 2180 - DNA, 23 bp, synthetic construct
  misc_feature 1..23: note = HLA-A targeting gRNA
  source 1..23: mol_type = other DNA
ctttcctgttgcagagaggtggg

SEQ ID NO: 2181 - DNA, 23 bp, synthetic construct
  misc_feature 1..23: note = HLA-A targeting gRNA
  source 1..23: mol_type = other DNA
aggacggtgaccccggcccgggg

SEQ ID NO: 2182 - DNA, 23 bp, synthetic construct
  misc_feature 1..23: note = HLA-A targeting gRNA
  source 1..23: mol_type = other DNA
aggagcctgggggcgaggagtgg

SEQ ID NO: 2183 - DNA, 23 bp, synthetic construct
  misc_feature 1..23: note = HLA-A targeting gRNA
  source 1..23: mol_type = other DNA
gttgcagagaggtggggctgagg

SEQ ID NO: 2184 - DNA, 23 bp, synthetic construct
  misc_feature 1..23: note = HLA-A targeting gRNA
  source 1..23: mol_type = other DNA
tctttcctgttgcagagaggtgg

SEQ ID NO: 2185 - DNA, 23 bp, synthetic construct
  misc_feature 1..23: note = HLA-A targeting gRNA
  source 1..23: mol_type = other DNA
ttctccccagaccccgaggatgg

SEQ ID NO: 2186 - DNA, 23 bp, synthetic construct
  misc_feature 1..23: note = HLA-A targeting gRNA
  source 1..23: mol_type = other DNA
aggatggagccgcgagccagagg

SEQ ID NO: 2187 - DNA, 23 bp, synthetic construct
  misc_feature 1..23: note = HLA-A targeting gRNA
  source 1..23: mol_type = other DNA
tttcctgttgcagagaggtgggg

SEQ ID NO: 2188 - DNA, 23 bp, synthetic construct
  misc_feature 1..23: note = HLA-A targeting gRNA
  source 1..23: mol_type = other DNA
aggatgtatggttgcgacgtggg

SEQ ID NO: 2189 - DNA, 23 bp, synthetic construct
  misc_feature 1..23: note = HLA-A targeting gRNA
  source 1..23: mol_type = other DNA
aattgtgtcacagagcagggcgg

SEQ ID NO: 2190 - DNA, 23 bp, synthetic construct
  misc_feature 1..23: note = HLA-A targeting gRNA
  source 1..23: mol_type = other DNA
aggcataatgtgaggagataggg

SEQ ID NO: 2191 - DNA, 23 bp, synthetic construct
  misc_feature 1..23: note = HLA-A targeting gRNA
  source 1..23: mol_type = other DNA
cttaattgtgtcacagagcaggg

SEQ ID NO: 2192 - DNA, 23 bp, synthetic construct
  misc_feature 1..23: note = HLA-A targeting gRNA
  source 1..23: mol_type = other DNA
ctgcaacaggaaagatgattggg

SEQ ID NO: 2193 - DNA, 23 bp, synthetic construct
  misc_feature 1..23: note = HLA-A targeting gRNA
  source 1..23: mol_type = other DNA
tcatctttcctgttgcagagagg

SEQ ID NO: 2194 - DNA, 23 bp, synthetic construct
  misc_feature 1..23: note = HLA-A targeting gRNA
  source 1..23: mol_type = other DNA
aggccaaaaatccccccgggtgg

SEQ ID NO: 2195 - DNA, 23 bp, synthetic construct
  misc_feature 1..23: note = HLA-A targeting gRNA
  source 1..23: mol_type = other DNA
aggccaaaaatccccctggttgg

SEQ ID NO: 2196 - DNA, 23 bp, synthetic construct
  misc_feature 1..23: note = HLA-A targeting gRNA
  source 1..23: mol_type = other DNA
aggcccaggcgcctttaacccgg

SEQ ID NO: 2197 - DNA, 23 bp, synthetic construct
  misc_feature 1..23: note = HLA-A targeting gRNA
  source 1..23: mol_type = other DNA
tctgcaacaggaaagatgattgg

SEQ ID NO: 2198 - DNA, 23 bp, synthetic construct
  misc_feature 1..23: note = HLA-A targeting gRNA
  source 1..23: mol_type = other DNA
tgcaacaggaaagatgattgggg

SEQ ID NO: 2199 - DNA, 23 bp, synthetic construct
  misc_feature 1..23: note = HLA-A targeting gRNA
  source 1..23: mol_type = other DNA
aggcgacctgccggtacccgcgg

SEQ ID NO: 2200 - DNA, 23 bp, synthetic construct
  misc_feature 1..23: note = HLA-A targeting gRNA
  source 1..23: mol_type = other DNA
acggccatcctcggggtctgggg

SEQ ID NO: 2201 - DNA, 23 bp, synthetic construct
  misc_feature 1..23: note = HLA-A targeting gRNA
  source 1..23: mol_type = other DNA
cgccatgacggccatcctcgggg

SEQ ID NO: 2202 - DNA, 23 bp, synthetic construct
  misc_feature 1..23: note = HLA-A targeting gRNA
  source 1..23: mol_type = other DNA
gaccccgaggatggccgtcatgg

SEQ ID NO: 2203 - DNA, 23 bp, synthetic construct
  misc_feature 1..23: note = HLA-A targeting gRNA
  source 1..23: mol_type = other DNA
gacggccatcctcggggtctggg

SEQ ID NO: 2204 - DNA, 23 bp, synthetic construct
  misc_feature 1..23: note = HLA-A targeting gRNA
  source 1..23: mol_type = other DNA
aggcgtgctgccggtacccgcgg

SEQ ID NO: 2205 - DNA, 23 bp, synthetic construct
  misc_feature 1..23: note = HLA-A targeting gRNA
  source 1..23: mol_type = other DNA
gcgccatgacggccatcctcggg

SEQ ID NO: 2206 - DNA, 23 bp, synthetic construct
  misc_feature 1..23: note = HLA-A targeting gRNA
  source 1..23: mol_type = other DNA
tgacggccatcctcggggtctgg

SEQ ID NO: 2207 - DNA, 23 bp, synthetic construct
  misc_feature 1..23: note = HLA-A targeting gRNA
  source 1..23: mol_type = other DNA
agagagcctacctggagggccgg

SEQ ID NO: 2208 - DNA, 23 bp, synthetic construct
  misc_feature 1..23: note = HLA-A targeting gRNA
  source 1..23: mol_type = other DNA
aatcactgggatattgtgtttgg

SEQ ID NO: 2209 - DNA, 23 bp, synthetic construct
  misc_feature 1..23: note = HLA-A targeting gRNA
  source 1..23: mol_type = other DNA
acaatatcccagtgatttcttgg

SEQ ID NO: 2210 - DNA, 23 bp, synthetic construct
  misc_feature 1..23: note = HLA-A targeting gRNA
  source 1..23: mol_type = other DNA
agggctccccgcggccgggccgg

SEQ ID NO: 2211 - DNA, 23 bp, synthetic construct
  misc_feature 1..23: note = HLA-A targeting gRNA
  source 1..23: mol_type = other DNA
acagattgaccgagtggacctgg

SEQ ID NO: 2212 - DNA, 23 bp, synthetic construct
  misc_feature 1..23: note = HLA-A targeting gRNA
  source 1..23: mol_type = other DNA
agagctcaggtggggtgaagggg

SEQ ID NO: 2213 - DNA, 23 bp, synthetic construct
  misc_feature 1..23: note = HLA-A targeting gRNA
  source 1..23: mol_type = other DNA
aggggccggagtattgggacggg

SEQ ID NO: 2214 - DNA, 23 bp, synthetic construct
  misc_feature 1..23: note = HLA-A targeting gRNA
  source 1..23: mol_type = other DNA
aggggctctgaccctgataaagg

SEQ ID NO: 2215 - DNA, 23 bp, synthetic construct
  misc_feature 1..23: note = HLA-A targeting gRNA
  source 1..23: mol_type = other DNA
aggggctctgaccctgctaaagg

SEQ ID NO: 2216 - DNA, 23 bp, synthetic construct
  misc_feature 1..23: note = HLA-A targeting gRNA
  source 1..23: mol_type = other DNA
agattgaccgagtggacctgggg

SEQ ID NO: 2217 - DNA, 23 bp, synthetic construct
  misc_feature 1..23: note = HLA-A targeting gRNA
  source 1..23: mol_type = other DNA
aggatgatccaagaaatcactgg

SEQ ID NO: 2218 - DNA, 23 bp, synthetic construct
  misc_feature 1..23: note = HLA-A targeting gRNA
  source 1..23: mol_type = other DNA
aggcattttgcatctgtaatggg

SEQ ID NO: 2219 - DNA, 23 bp, synthetic construct
  misc_feature 1..23: note = HLA-A targeting gRNA
  source 1..23: mol_type = other DNA
aggtggggtgaaggggtgaaggg

SEQ ID NO: 2220 - DNA, 23 bp, synthetic construct
  misc_feature 1..23: note = HLA-A targeting gRNA
  source 1..23: mol_type = other DNA
atcactgggatattgtgtttggg

SEQ ID NO: 2221 - DNA, 23 bp, synthetic construct
  misc_feature 1..23: note = HLA-A targeting gRNA
  source 1..23: mol_type = other DNA
atctcagggtgaggggcttgggg

SEQ ID NO: 2222 - DNA, 23 bp, synthetic construct
  misc_feature 1..23: note = HLA-A targeting gRNA
  source 1..23: mol_type = other DNA
cactcggtcaatctgtgagtggg

SEQ ID NO: 2223 - DNA, 23 bp, synthetic construct
  misc_feature 1..23: note = HLA-A targeting gRNA
  source 1..23: mol_type = other DNA
agggtttttcaagtcacaaaggg

SEQ ID NO: 2224 - DNA, 23 bp, synthetic construct
  misc_feature 1..23: note = HLA-A targeting gRNA
  source 1..23: mol_type = other DNA
aggtcagtgtgatctccacaggg

SEQ ID NO: 2225 - DNA, 23 bp, synthetic construct
  misc_feature 1..23: note = HLA-A targeting gRNA
  source 1..23: mol_type = other DNA
cagattgaccgagtggacctggg

SEQ ID NO: 2226 - DNA, 23 bp, synthetic construct
  misc_feature 1..23: note = HLA-A targeting gRNA
  source 1..23: mol_type = other DNA
aggtcagtgtgatctctgcaggg

SEQ ID NO: 2227 - DNA, 23 bp, synthetic construct
  misc_feature 1..23: note = HLA-A targeting gRNA
  source 1..23: mol_type = other DNA
caggcattttgcatctgtaatgg

SEQ ID NO: 2228 - DNA, 23 bp, synthetic construct
  misc_feature 1..23: note = HLA-A targeting gRNA
  source 1..23: mol_type = other DNA
caggtggggtgaaggggtgaagg

SEQ ID NO: 2229 - DNA, 23 bp, synthetic construct
  misc_feature 1..23: note = HLA-A targeting gRNA
  source 1..23: mol_type = other DNA
ccactcacagattgaccgagtgg

SEQ ID NO: 2230 - DNA, 23 bp, synthetic construct
  misc_feature 1..23: note = HLA-A targeting gRNA
  source 1..23: mol_type = other DNA
ccactcggtcaatctgtgagtgg

SEQ ID NO: 2231 - DNA, 23 bp, synthetic construct
  misc_feature 1..23: note = HLA-A targeting gRNA
  source 1..23: mol_type = other DNA
ccaggtcacccacagtctccggg

SEQ ID NO: 2232 - DNA, 23 bp, synthetic construct
  misc_feature 1..23: note = HLA-A targeting gRNA
  source 1..23: mol_type = other DNA
aggtgggtgagctcccccatggg

SEQ ID NO: 2233 - DNA, 23 bp, synthetic construct
  misc_feature 1..23: note = HLA-A targeting gRNA
  source 1..23: mol_type = other DNA
cccggagactgtgggtgacctgg

SEQ ID NO: 2234 - DNA, 23 bp, synthetic construct
  misc_feature 1..23: note = HLA-A targeting gRNA
  source 1..23: mol_type = other DNA
cctgctctgtgacacaattaagg

SEQ ID NO: 2235 - DNA, 23 bp, synthetic construct
  misc_feature 1..23: note = HLA-A targeting gRNA
  source 1..23: mol_type = other DNA
ccttaattgtgtcacagagcagg

SEQ ID NO: 2236 - DNA, 23 bp, synthetic construct
  misc_feature 1..23: note = HLA-A targeting gRNA
  source 1..23: mol_type = other DNA
ctgctctgtgacacaattaaggg

SEQ ID NO: 2237 - DNA, 23 bp, synthetic construct
  misc_feature 1..23: note = HLA-A targeting gRNA
  source 1..23: mol_type = other DNA
gccaggtcacccacagtctccgg

SEQ ID NO: 2238 - DNA, 23 bp, synthetic construct
  misc_feature 1..23: note = HLA-A targeting gRNA
  source 1..23: mol_type = other DNA
ggagaccctcatgctgcacatgg

SEQ ID NO: 2239 - DNA, 23 bp, synthetic construct
  misc_feature 1..23: note = HLA-A targeting gRNA
  source 1..23: mol_type = other DNA
agtagccgtgcagggtccccagg

SEQ ID NO: 2240 - DNA, 23 bp, synthetic construct
  misc_feature 1..23: note = HLA-A targeting gRNA
  source 1..23: mol_type = other DNA
ggatgatccaagaaatcactggg

SEQ ID NO: 2241 - DNA, 23 bp, synthetic construct
  misc_feature 1..23: note = HLA-A targeting gRNA
  source 1..23: mol_type = other DNA
ggggtgaaggggtgaagggtggg

SEQ ID NO: 2242 - DNA, 23 bp, synthetic construct
  misc_feature 1..23: note = HLA-A targeting gRNA
  source 1..23: mol_type = other DNA
agtattgggaccaggagacgcgg

SEQ ID NO: 2243 - DNA, 23 bp, synthetic construct
  misc_feature 1..23: note = HLA-A targeting gRNA
  source 1..23: mol_type = other DNA
gggtgacctggcccgtccgtggg

SEQ ID NO: 2244 - DNA, 23 bp, synthetic construct
  misc_feature 1..23: note = HLA-A targeting gRNA
  source 1..23: mol_type = other DNA
ggtgacctggcccgtccgtgggg

SEQ ID NO: 2245 - DNA, 23 bp, synthetic construct
  misc_feature 1..23: note = HLA-A targeting gRNA
  source 1..23: mol_type = other DNA
agtattgggacgaggagacacgg

SEQ ID NO: 2246 - DNA, 23 bp, synthetic construct
  misc_feature 1..23: note = HLA-A targeting gRNA
  source 1..23: mol_type = other DNA
gtgacctggcccgtccgtggggg

SEQ ID NO: 2247 - DNA, 23 bp, synthetic construct
  misc_feature 1..23: note = HLA-A targeting gRNA
  source 1..23: mol_type = other DNA
tggggtgaaggggtgaagggtgg

SEQ ID NO: 2248 - DNA, 23 bp, synthetic construct
  misc_feature 1..23: note = HLA-A targeting gRNA
  source 1..23: mol_type = other DNA
agtcatatgcgtcttgggggggg

SEQ ID NO: 2249 - DNA, 23 bp, synthetic construct
  misc_feature 1..23: note = HLA-A targeting gRNA
  source 1..23: mol_type = other DNA
tgggtgacctggcccgtccgtgg

SEQ ID NO: 2250 - DNA, 23 bp, synthetic construct
  misc_feature 1..23: note = HLA-A targeting gRNA
  source 1..23: mol_type = other DNA
accctacataggttggcagaggg

SEQ ID NO: 2251 - DNA, 23 bp, synthetic construct
  misc_feature 1..23: note = HLA-A targeting gRNA
  source 1..23: mol_type = other DNA
cagagggagaaaagaaactgcgg

SEQ ID NO: 2252 - DNA, 23 bp, synthetic construct
  misc_feature 1..23: note = HLA-A targeting gRNA
  source 1..23: mol_type = other DNA
cgggttggtcggggccgggcagg

SEQ ID NO: 2253 - DNA, 23 bp, synthetic construct
  misc_feature 1..23: note = HLA-A targeting gRNA
  source 1..23: mol_type = other DNA
agtgggagactccgcccatgagg

SEQ ID NO: 2254 - DNA, 23 bp, synthetic construct
  misc_feature 1..23: note = HLA-A targeting gRNA
  source 1..23: mol_type = other DNA
agtgtgacccctcactgtgatgg

SEQ ID NO: 2255 - DNA, 23 bp, synthetic construct
  misc_feature 1..23: note = HLA-A targeting gRNA
  source 1..23: mol_type = other DNA
ctccctctgccaacctatgtagg

SEQ ID NO: 2256 - DNA, 23 bp, synthetic construct
  misc_feature 1..23: note = HLA-A targeting gRNA
  source 1..23: mol_type = other DNA
ctgcccggccccgaccaacccgg

SEQ ID NO: 2257 - DNA, 23 bp, synthetic construct
  misc_feature 1..23: note = HLA-A targeting gRNA
  source 1..23: mol_type = other DNA
agttggggaatctccaaggctgg

SEQ ID NO: 2258 - DNA, 23 bp, synthetic construct
  misc_feature 1..23: note = HLA-A targeting gRNA
  source 1..23: mol_type = other DNA
gaccctacataggttggcagagg

SEQ ID NO: 2259 - DNA, 23 bp, synthetic construct
  misc_feature 1..23: note = HLA-A targeting gRNA
  source 1..23: mol_type = other DNA
gggttggtcggggccgggcaggg

SEQ ID NO: 2260 - DNA, 23 bp, synthetic construct
  misc_feature 1..23: note = HLA-A targeting gRNA
  source 1..23: mol_type = other DNA
atattgtggttgggagcccatgg

SEQ ID NO: 2261 - DNA, 23 bp, synthetic construct
  misc_feature 1..23: note = HLA-A targeting gRNA
  source 1..23: mol_type = other DNA
tccctctgccaacctatgtaggg

SEQ ID NO: 2262 - DNA, 23 bp, synthetic construct
  misc_feature 1..23: note = HLA-A targeting gRNA
  source 1..23: mol_type = other DNA
tgcccggccccgaccaacccggg

SEQ ID NO: 2263 - DNA, 23 bp, synthetic construct
  misc_feature 1..23: note = HLA-A targeting gRNA
  source 1..23: mol_type = other DNA
accagcagtcacaagtcacaggg

SEQ ID NO: 2264 - DNA, 23 bp, synthetic construct
  misc_feature 1..23: note = HLA-A targeting gRNA
  source 1..23: mol_type = other DNA
atcatgggcccacccagcctggg

SEQ ID NO: 2265 - DNA, 23 bp, synthetic construct
  misc_feature 1..23: note = HLA-A targeting gRNA
  source 1..23: mol_type = other DNA
gacttgtgactgctggtatcagg

SEQ ID NO: 2266 - DNA, 23 bp, synthetic construct
  misc_feature 1..23: note = HLA-A targeting gRNA
  source 1..23: mol_type = other DNA
taccagcagtcacaagtcacagg

SEQ ID NO: 2267 - DNA, 23 bp, synthetic construct
  misc_feature 1..23: note = HLA-A targeting gRNA
  source 1..23: mol_type = other DNA
gatccgcccgaccctcctcccgg

SEQ ID NO: 2268 - DNA, 23 bp, synthetic construct
  misc_feature 1..23: note = HLA-A targeting gRNA
  source 1..23: mol_type = other DNA
ccaggtggcccacagtctccggg

SEQ ID NO: 2269 - DNA, 23 bp, synthetic construct
  misc_feature 1..23: note = HLA-A targeting gRNA
  source 1..23: mol_type = other DNA
ccagtcccccaagccctgcccgg

SEQ ID NO: 2270 - DNA, 23 bp, synthetic construct
  misc_feature 1..23: note = HLA-A targeting gRNA
  source 1..23: mol_type = other DNA
cccggagactgtgggccacctgg

SEQ ID NO: 2271 - DNA, 23 bp, synthetic construct
  misc_feature 1..23: note = HLA-A targeting gRNA
  source 1..23: mol_type = other DNA
ccgggcagggcttgggggactgg

SEQ ID NO: 2272 - DNA, 23 bp, synthetic construct
  misc_feature 1..23: note = HLA-A targeting gRNA
  source 1..23: mol_type = other DNA
cgggcagggcttgggggactggg

SEQ ID NO: 2273 - DNA, 23 bp, synthetic construct
  misc_feature 1..23: note = HLA-A targeting gRNA
  source 1..23: mol_type = other DNA
cggggccgggcagggcttggggg

SEQ ID NO: 2274 - DNA, 23 bp, synthetic construct
  misc_feature 1..23: note = HLA-A targeting gRNA
  source 1..23: mol_type = other DNA
gccacctggcccgtccgtggggg

SEQ ID NO: 2275 - DNA, 23 bp, synthetic construct
  misc_feature 1..23: note = HLA-A targeting gRNA
  source 1..23: mol_type = other DNA
gccaggtggcccacagtctccgg

SEQ ID NO: 2276 - DNA, 23 bp, synthetic construct
  misc_feature 1..23: note = HLA-A targeting gRNA
  source 1..23: mol_type = other DNA
ggccacctggcccgtccgtgggg

SEQ ID NO: 2277 - DNA, 23 bp, synthetic construct
  misc_feature 1..23: note = HLA-A targeting gRNA
  source 1..23: mol_type = other DNA
gggccacctggcccgtccgtggg

SEQ ID NO: 2278 - DNA, 23 bp, synthetic construct
  misc_feature 1..23: note = HLA-A targeting gRNA
  source 1..23: mol_type = other DNA
ggtcggggccgggcagggcttgg

SEQ ID NO: 2279 - DNA, 23 bp, synthetic construct
  misc_feature 1..23: note = HLA-A targeting gRNA
  source 1..23: mol_type = other DNA
ggtggagaaggggtgaaaggtgg

SEQ ID NO: 2280 - DNA, 23 bp, synthetic construct
  misc_feature 1..23: note = HLA-A targeting gRNA
  source 1..23: mol_type = other DNA
atgaggccactctgaggtgctgg

SEQ ID NO: 2281 - DNA, 23 bp, synthetic construct
  misc_feature 1..23: note = HLA-A targeting gRNA
  source 1..23: mol_type = other DNA
gtcggggccgggcagggcttggg

SEQ ID NO: 2282 - DNA, 23 bp, synthetic construct
  misc_feature 1..23: note = HLA-A targeting gRNA
  source 1..23: mol_type = other DNA
atgatgtatggctgccacgtggg

SEQ ID NO: 2283 - DNA, 23 bp, synthetic construct
  misc_feature 1..23: note = HLA-A targeting gRNA
  source 1..23: mol_type = other DNA
gtggagaaggggtgaaaggtggg

SEQ ID NO: 2284 - DNA, 23 bp, synthetic construct
  misc_feature 1..23: note = HLA-A targeting gRNA
  source 1..23: mol_type = other DNA
tcaggtggagaaggggtgaaagg

SEQ ID NO: 2285 - DNA, 23 bp, synthetic construct
  misc_feature 1..23: note = HLA-A targeting gRNA
  source 1..23: mol_type = other DNA
atgcccacaatggggatggtggg

SEQ ID NO: 2286 - DNA, 23 bp, synthetic construct
  misc_feature 1..23: note = HLA-A targeting gRNA
  source 1..23: mol_type = other DNA
tcccccacggacgggccaggtgg

SEQ ID NO: 2287 - DNA, 23 bp, synthetic construct
  misc_feature 1..23: note = HLA-A targeting gRNA
  source 1..23: mol_type = other DNA
tcggggccgggcagggcttgggg

SEQ ID NO: 2288 - DNA, 23 bp, synthetic construct
  misc_feature 1..23: note = HLA-A targeting gRNA
  source 1..23: mol_type = other DNA
atgcccacgatgtggacggtggg

SEQ ID NO: 2289 - DNA, 23 bp, synthetic construct
  misc_feature 1..23: note = HLA-A targeting gRNA
  source 1..23: mol_type = other DNA
tggagaaggggtgaaaggtgggg

SEQ ID NO: 2290 - DNA, 23 bp, synthetic construct
  misc_feature 1..23: note = HLA-A targeting gRNA
  source 1..23: mol_type = other DNA
tgggccacctggcccgtccgtgg

SEQ ID NO: 2291 - DNA, 23 bp, synthetic construct
  misc_feature 1..23: note = HLA-A targeting gRNA
  source 1..23: mol_type = other DNA
atggccatcctcggcgtctgggg

SEQ ID NO: 2292 - DNA, 23 bp, synthetic construct
  misc_feature 1..23: note = HLA-A targeting gRNA
  source 1..23: mol_type = other DNA
atgggataaggagggagatgggg

SEQ ID NO: 2293 - DNA, 23 bp, synthetic construct
  misc_feature 1..23: note = HLA-A targeting gRNA
  source 1..23: mol_type = other DNA
tgggggactgggctgaccgcggg

SEQ ID NO: 2294 - DNA, 23 bp, synthetic construct
  misc_feature 1..23: note = HLA-A targeting gRNA
  source 1..23: mol_type = other DNA
ttgggggactgggctgaccgcgg

SEQ ID NO: 2295 - DNA, 23 bp, synthetic construct
  misc_feature 1..23: note = HLA-A targeting gRNA
  source 1..23: mol_type = other DNA
cacccagcgcaagtgggagacgg

SEQ ID NO: 2296 - DNA, 23 bp, synthetic construct
  misc_feature 1..23: note = HLA-A targeting gRNA
  source 1..23: mol_type = other DNA
ggccgtctcccacttgcgctggg

SEQ ID NO: 2297 - DNA, 23 bp, synthetic construct
  misc_feature 1..23: note = HLA-A targeting gRNA
  source 1..23: mol_type = other DNA
atgggttaaggagggagatgggg

SEQ ID NO: 2298 - DNA, 23 bp, synthetic construct
  misc_feature 1..23: note = HLA-A targeting gRNA
  source 1..23: mol_type = other DNA
gggccgtctcccacttgcgctgg

SEQ ID NO: 2299 - DNA, 23 bp, synthetic construct
  misc_feature 1..23: note = HLA-A targeting gRNA
  source 1..23: mol_type = other DNA
aggaggaattgtgaggtgggtgg

SEQ ID NO: 2300 - DNA, 23 bp, synthetic construct
  misc_feature 1..23: note = HLA-A targeting gRNA
  source 1..23: mol_type = other DNA
aggtgggtgggctcccccatggg

SEQ ID NO: 2301 - DNA, 23 bp, synthetic construct
  misc_feature 1..23: note = HLA-A targeting gRNA
  source 1..23: mol_type = other DNA
atgtgccctgtctcattcctggg

SEQ ID NO: 2302 - DNA, 23 bp, synthetic construct
  misc_feature 1..23: note = HLA-A targeting gRNA
  source 1..23: mol_type = other DNA
atgtggaggaagaagagctcagg

SEQ ID NO: 2303 - DNA, 23 bp, synthetic construct
  misc_feature 1..23: note = HLA-A targeting gRNA
  source 1..23: mol_type = other DNA
gaggtgggtgggctcccccatgg

SEQ ID NO: 2304 - DNA, 23 bp, synthetic construct
  misc_feature 1..23: note = HLA-A targeting gRNA
  source 1..23: mol_type = other DNA
ggaggaattgtgaggtgggtggg

SEQ ID NO: 2305 - DNA, 23 bp, synthetic construct
  misc_feature 1..23: note = HLA-A targeting gRNA
  source 1..23: mol_type = other DNA
atgttctgtgggatctgaccagg

SEQ ID NO: 2306 - DNA, 23 bp, synthetic construct
  misc_feature 1..23: note = HLA-A targeting gRNA
  source 1..23: mol_type = other DNA
aattatgagcctacccagcctgg

SEQ ID NO: 2307 - DNA, 23 bp, synthetic construct
  misc_feature 1..23: note = HLA-A targeting gRNA
  source 1..23: mol_type = other DNA
attatgagcctacccagcctggg

SEQ ID NO: 2308 - DNA, 23 bp, synthetic construct
  misc_feature 1..23: note = HLA-A targeting gRNA
  source 1..23: mol_type = other DNA
ctcaggtggggaagggatgaagg

SEQ ID NO: 2309 - DNA, 23 bp, synthetic construct
  misc_feature 1..23: note = HLA-A targeting gRNA
  source 1..23: mol_type = other DNA
ctctttggagctgtgatcgctgg

SEQ ID NO: 2310 - DNA, 23 bp, synthetic construct
  misc_feature 1..23: note = HLA-A targeting gRNA
  source 1..23: mol_type = other DNA
attcatatcactcacagtgaggg

SEQ ID NO: 2311 - DNA, 23 bp, synthetic construct
  misc_feature 1..23: note = HLA-A targeting gRNA
  source 1..23: mol_type = other DNA
gctgggtaggctcataattgtgg

SEQ ID NO: 2312 - DNA, 23 bp, synthetic construct
  misc_feature 1..23: note = HLA-A targeting gRNA
  source 1..23: mol_type = other DNA
attcatatctgtcacagtgaggg

SEQ ID NO: 2313 - DNA, 23 bp, synthetic construct
  misc_feature 1..23: note = HLA-A targeting gRNA
  source 1..23: mol_type = other DNA
ggtaggctcataattgtggatgg

SEQ ID NO: 2314 - DNA, 23 bp, synthetic construct
  misc_feature 1..23: note = HLA-A targeting gRNA
  source 1..23: mol_type = other DNA
ggtggggaagggatgaagggtgg

SEQ ID NO: 2315 - DNA, 23 bp, synthetic construct
  misc_feature 1..23: note = HLA-A targeting gRNA
  source 1..23: mol_type = other DNA
gtggggaagggatgaagggtggg

SEQ ID NO: 2316 - DNA, 23 bp, synthetic construct
  misc_feature 1..23: note = HLA-A targeting gRNA
  source 1..23: mol_type = other DNA
tcaggtggggaagggatgaaggg

SEQ ID NO: 2317 - DNA, 23 bp, synthetic construct
  misc_feature 1..23: note = HLA-A targeting gRNA
  source 1..23: mol_type = other DNA
ctctcaactgctccgcctcatgg

SEQ ID NO: 2318 - DNA, 23 bp, synthetic construct
  misc_feature 1..23: note = HLA-A targeting gRNA
  source 1..23: mol_type = other DNA
tctcaactgctccgcctcatggg

SEQ ID NO: 2319 - DNA, 23 bp, synthetic construct
  misc_feature 1..23: note = HLA-A targeting gRNA
  source 1..23: mol_type = other DNA
attgtggttgggagcccatgggg

SEQ ID NO: 2320 - DNA, 23 bp, synthetic construct
  misc_feature 1..23: note = HLA-A targeting gRNA
  source 1..23: mol_type = other DNA
ccatctctgcctcaacttcatgg

SEQ ID NO: 2321 - DNA, 23 bp, synthetic construct
  misc_feature 1..23: note = HLA-A targeting gRNA
  source 1..23: mol_type = other DNA
ccatgaagttgaggcagagatgg

SEQ ID NO: 2322 - DNA, 23 bp, synthetic construct
  misc_feature 1..23: note = HLA-A targeting gRNA
  source 1..23: mol_type = other DNA
ctcagtgcaccatgaagttgagg

SEQ ID NO: 2323 - DNA, 23 bp, synthetic construct
  misc_feature 1..23: note = HLA-A targeting gRNA
  source 1..23: mol_type = other DNA
aatcatgggcctacccagtctgg

SEQ ID NO: 2324 - DNA, 23 bp, synthetic construct
  misc_feature 1..23: note = HLA-A targeting gRNA
  source 1..23: mol_type = other DNA
acacagggcccagactgggtagg

SEQ ID NO: 2325 - DNA, 23 bp, synthetic construct
  misc_feature 1..23: note = HLA-A targeting gRNA
  source 1..23: mol_type = other DNA
actgggtaggcccatgattgtgg

SEQ ID NO: 2326 - DNA, 23 bp, synthetic construct
  misc_feature 1..23: note = HLA-A targeting gRNA
  source 1..23: mol_type = other DNA
agccgcgccgggacgagggtcgg

SEQ ID NO: 2327 - DNA, 23 bp, synthetic construct
  misc_feature 1..23: note = HLA-A targeting gRNA
  source 1..23: mol_type = other DNA
atcatgggcctacccagtctggg

SEQ ID NO: 2328 - DNA, 23 bp, synthetic construct
  misc_feature 1..23: note = HLA-A targeting gRNA
  source 1..23: mol_type = other DNA
ccagccccgaccaacccgggggg

SEQ ID NO: 2329 - DNA, 23 bp, synthetic construct
  misc_feature 1..23: note = HLA-A targeting gRNA
  source 1..23: mol_type = other DNA
atttctacatctccgtgtcccgg

SEQ ID NO: 2330 - DNA, 23 bp, synthetic construct
  misc_feature 1..23: note = HLA-A targeting gRNA
  source 1..23: mol_type = other DNA
ccccccgggttggtcggggctgg

SEQ ID NO: 2331 - DNA, 23 bp, synthetic construct
  misc_feature 1..23: note = HLA-A targeting gRNA
  source 1..23: mol_type = other DNA
cgccgggacgagggtcgggcagg

SEQ ID NO: 2332 - DNA, 23 bp, synthetic construct
  misc_feature 1..23: note = HLA-A targeting gRNA
  source 1..23: mol_type = other DNA
atttcttcacattcgtgtcccgg

SEQ ID NO: 2333 - DNA, 23 bp, synthetic construct
  misc_feature 1..23: note = HLA-A targeting gRNA
  source 1..23: mol_type = other DNA
ctagaggaggaattgtgaggtgg

SEQ ID NO: 2334 - DNA, 23 bp, synthetic construct
  misc_feature 1..23: note = HLA-A targeting gRNA
  source 1..23: mol_type = other DNA
caaaaatccccctggttggtcgg

SEQ ID NO: 2335 - DNA, 23 bp, synthetic construct
  misc_feature 1..23: note = HLA-A targeting gRNA
  source 1..23: mol_type = other DNA
caaaatggccacatgcgtgctgg

SEQ ID NO: 2336 - DNA, 23 bp, synthetic construct
  misc_feature 1..23: note = HLA-A targeting gRNA
  source 1..23: mol_type = other DNA
caaagagaaccaggccagcaagg

SEQ ID NO: 2337 - DNA, 23 bp, synthetic construct
  misc_feature 1..23: note = HLA-A targeting gRNA
  source 1..23: mol_type = other DNA
ctcacctttacaagctgtgaggg

SEQ ID NO: 2338 - DNA, 23 bp, synthetic construct
  misc_feature 1..23: note = HLA-A targeting gRNA
  source 1..23: mol_type = other DNA
ctggcacacagggcccagactgg

SEQ ID NO: 2339 - DNA, 23 bp, synthetic construct
  misc_feature 1..23: note = HLA-A targeting gRNA
  source 1..23: mol_type = other DNA
gaagcaccgtccacaatcatggg

SEQ ID NO: 2340 - DNA, 23 bp, synthetic construct
  misc_feature 1..23: note = HLA-A targeting gRNA
  source 1..23: mol_type = other DNA
gacctgcccgaccctcgtcccgg

SEQ ID NO: 2341 - DNA, 23 bp, synthetic construct
  misc_feature 1..23: note = HLA-A targeting gRNA
  source 1..23: mol_type = other DNA
gagggacacatcagagccctggg

SEQ ID NO: 2342 - DNA, 23 bp, synthetic construct
  misc_feature 1..23: note = HLA-A targeting gRNA
  source 1..23: mol_type = other DNA
gcccgaccctcgtcccggcgcgg

SEQ ID NO: 2343 - DNA, 23 bp, synthetic construct
  misc_feature 1..23: note = HLA-A targeting gRNA
  source 1..23: mol_type = other DNA
gccgcgccgggacgagggtcggg

SEQ ID NO: 2344 - DNA, 23 bp, synthetic construct
  misc_feature 1..23: note = HLA-A targeting gRNA
  source 1..23: mol_type = other DNA
ggaagcaccgtccacaatcatgg

SEQ ID NO: 2345 - DNA, 23 bp, synthetic construct
  misc_feature 1..23: note = HLA-A targeting gRNA
  source 1..23: mol_type = other DNA
ggggagccgcgccgggacgaggg

SEQ ID NO: 2346 - DNA, 23 bp, synthetic construct
  misc_feature 1..23: note = HLA-A targeting gRNA
  source 1..23: mol_type = other DNA
caaggctacgaggttcctctagg

SEQ ID NO: 2347 - DNA, 23 bp, synthetic construct
  misc_feature 1..23: note = HLA-A targeting gRNA
  source 1..23: mol_type = other DNA
gggggagccgcgccgggacgagg

SEQ ID NO: 2348 - DNA, 23 bp, synthetic construct
  misc_feature 1..23: note = HLA-A targeting gRNA
  source 1..23: mol_type = other DNA
ggtaggcccatgattgtggacgg

SEQ ID NO: 2349 - DNA, 23 bp, synthetic construct
  misc_feature 1..23: note = HLA-A targeting gRNA
  source 1..23: mol_type = other DNA
caagtgggaggcggcccatgagg

SEQ ID NO: 2350 - DNA, 23 bp, synthetic construct
  misc_feature 1..23: note = HLA-A targeting gRNA
  source 1..23: mol_type = other DNA
gtgtccctcacagcttgtaaagg

SEQ ID NO: 2351 - DNA, 23 bp, synthetic construct
  misc_feature 1..23: note = HLA-A targeting gRNA
  source 1..23: mol_type = other DNA
tacaggatctggaacccaggagg

SEQ ID NO: 2352 - DNA, 23 bp, synthetic construct
  misc_feature 1..23: note = HLA-A targeting gRNA
  source 1..23: mol_type = other DNA
tagaggaggaattgtgaggtggg

SEQ ID NO: 2353 - DNA, 23 bp, synthetic construct
  misc_feature 1..23: note = HLA-A targeting gRNA
  source 1..23: mol_type = other DNA
tcgtcccggcgcggctcccccgg

SEQ ID NO: 2354 - DNA, 23 bp, synthetic construct
  misc_feature 1..23: note = HLA-A targeting gRNA
  source 1..23: mol_type = other DNA
caagtgggaggcggcccgttggg

SEQ ID NO: 2355 - DNA, 23 bp, synthetic construct
  misc_feature 1..23: note = HLA-A targeting gRNA
  source 1..23: mol_type = other DNA
caagtgggaggcggtccatgcgg

SEQ ID NO: 2356 - DNA, 23 bp, synthetic construct
  misc_feature 1..23: note = HLA-A targeting gRNA
  source 1..23: mol_type = other DNA
tctcacctttacaagctgtgagg

SEQ ID NO: 2357 - DNA, 23 bp, synthetic construct
  misc_feature 1..23: note = HLA-A targeting gRNA
  source 1..23: mol_type = other DNA
caatccatataccgccttcgggg

SEQ ID NO: 2358 - DNA, 23 bp, synthetic construct
  misc_feature 1..23: note = HLA-A targeting gRNA
  source 1..23: mol_type = other DNA
tgagggacacatcagagccctgg

SEQ ID NO: 2359 - DNA, 23 bp, synthetic construct
  misc_feature 1..23: note = HLA-A targeting gRNA
  source 1..23: mol_type = other DNA
cacaagaaagggagacaaatggg

SEQ ID NO: 2360 - DNA, 23 bp, synthetic construct
  misc_feature 1..23: note = HLA-A targeting gRNA
  source 1..23: mol_type = other DNA
tggcacacagggcccagactggg

SEQ ID NO: 2361 - DNA, 23 bp, synthetic construct
  misc_feature 1..23: note = HLA-A targeting gRNA
  source 1..23: mol_type = other DNA
tggctagaggaggaattgtgagg

SEQ ID NO: 2362 - DNA, 23 bp, synthetic construct
  misc_feature 1..23: note = HLA-A targeting gRNA
  source 1..23: mol_type = other DNA
tggtacaggatctggaacccagg

SEQ ID NO: 2363 - DNA, 23 bp, synthetic construct
  misc_feature 1..23: note = HLA-A targeting gRNA
  source 1..23: mol_type = other DNA
cacaatggggatggtgggctggg

SEQ ID NO: 2364 - DNA, 23 bp, synthetic construct
  misc_feature 1..23: note = HLA-A targeting gRNA
  source 1..23: mol_type = other DNA
cgccgtggatagagcaggagagg

SEQ ID NO: 2365 - DNA, 23 bp, synthetic construct
  misc_feature 1..23: note = HLA-A targeting gRNA
  source 1..23: mol_type = other DNA
actccacgcacgtgccatccagg

SEQ ID NO: 2366 - DNA, 23 bp, synthetic construct
  misc_feature 1..23: note = HLA-A targeting gRNA
  source 1..23: mol_type = other DNA
cacacaccggcggcagccttggg

SEQ ID NO: 2367 - DNA, 23 bp, synthetic construct
  misc_feature 1..23: note = HLA-A targeting gRNA
  source 1..23: mol_type = other DNA
cacacagggcccaggctgggtgg

SEQ ID NO: 2368 - DNA, 23 bp, synthetic construct
  misc_feature 1..23: note = HLA-A targeting gRNA
  source 1..23: mol_type = other DNA
cacgcacgtgccatccaggtagg

SEQ ID NO: 2369 - DNA, 23 bp, synthetic construct
  misc_feature 1..23: note = HLA-A targeting gRNA
  source 1..23: mol_type = other DNA
ctacctggatggcacgtgcgtgg

SEQ ID NO: 2370 - DNA, 23 bp, synthetic construct
  misc_feature 1..23: note = HLA-A targeting gRNA
  source 1..23: mol_type = other DNA
tggatggcacgtgcgtggagtgg

SEQ ID NO: 2371 - DNA, 23 bp, synthetic construct
  misc_feature 1..23: note = HLA-A targeting gRNA
  source 1..23: mol_type = other DNA
gcaggacgcttacgacggcaagg

SEQ ID NO: 2372 - DNA, 23 bp, synthetic construct
  misc_feature 1..23: note = HLA-A targeting gRNA
  source 1..23: mol_type = other DNA
agcaggagaggcctgagtattgg

SEQ ID NO: 2373 - DNA, 23 bp, synthetic construct
  misc_feature 1..23: note = HLA-A targeting gRNA
  source 1..23: mol_type = other DNA
cacactgaccgagtggacctggg

SEQ ID NO: 2374 - DNA, 23 bp, synthetic construct
  misc_feature 1..23: note = HLA-A targeting gRNA
  source 1..23: mol_type = other DNA
gaggcctgagtattgggaccagg

SEQ ID NO: 2375 - DNA, 23 bp, synthetic construct
  misc_feature 1..23: note = HLA-A targeting gRNA
  source 1..23: mol_type = other DNA
cacagcatccagaggatgtatgg

SEQ ID NO: 2376 - DNA, 23 bp, synthetic construct
  misc_feature 1..23: note = HLA-A targeting gRNA
  source 1..23: mol_type = other DNA
gcaggagaggcctgagtattggg

SEQ ID NO: 2377 - DNA, 23 bp, synthetic construct
  misc_feature 1..23: note = HLA-A targeting gRNA
  source 1..23: mol_type = other DNA
ggcctctcctgctctatccacgg

SEQ ID NO: 2378 - DNA, 23 bp, synthetic construct
  misc_feature 1..23: note = HLA-A targeting gRNA
  source 1..23: mol_type = other DNA
gtctcctggtcccaatactcagg

SEQ ID NO: 2379 - DNA, 23 bp, synthetic construct
  misc_feature 1..23: note = HLA-A targeting gRNA
  source 1..23: mol_type = other DNA
cacaggtaccaggggccacgggg

SEQ ID NO: 2380 - DNA, 23 bp, synthetic construct
  misc_feature 1..23: note = HLA-A targeting gRNA
  source 1..23: mol_type = other DNA
cacatcgtgggcatcattgctgg

SEQ ID NO: 2381 - DNA, 23 bp, synthetic construct
  misc_feature 1..23: note = HLA-A targeting gRNA
  source 1..23: mol_type = other DNA
catgtaggcataatgtgaggagg

SEQ ID NO: 2382 - DNA, 23 bp, synthetic construct
  misc_feature 1..23: note = HLA-A targeting gRNA
  source 1..23: mol_type = other DNA
cacccaataggagtgagaactgg

SEQ ID NO: 2383 - DNA, 23 bp, synthetic construct
  misc_feature 1..23: note = HLA-A targeting gRNA
  source 1..23: mol_type = other DNA
cacccaattggagtgagaactgg

SEQ ID NO: 2384 - DNA, 23 bp, synthetic construct
  misc_feature 1..23: note = HLA-A targeting gRNA
  source 1..23: mol_type = other DNA
agctgtgatcgctggagctgtgg

SEQ ID NO: 2385 - DNA, 23 bp, synthetic construct
  misc_feature 1..23: note = HLA-A targeting gRNA
  source 1..23: mol_type = other DNA
aaagcccgcacgcacccaccggg

SEQ ID NO: 2386 - DNA, 23 bp, synthetic construct
  misc_feature 1..23: note = HLA-A targeting gRNA
  source 1..23: mol_type = other DNA
cccggccgggggcgcaggtcagg

SEQ ID NO: 2387 - DNA, 23 bp, synthetic construct
  misc_feature 1..23: note = HLA-A targeting gRNA
  source 1..23: mol_type = other DNA
cacccgccctggtctgggtcagg

SEQ ID NO: 2388 - DNA, 23 bp, synthetic construct
  misc_feature 1..23: note = HLA-A targeting gRNA
  source 1..23: mol_type = other DNA
caccctccctctgctcctgaggg

SEQ ID NO: 2389 - DNA, 23 bp, synthetic construct
  misc_feature 1..23: note = HLA-A targeting gRNA
  source 1..23: mol_type = other DNA
cctgacctgcgcccccggccggg

SEQ ID NO: 2390 - DNA, 23 bp, synthetic construct
  misc_feature 1..23: note = HLA-A targeting gRNA
  source 1..23: mol_type = other DNA
caccctgagatgggataaggagg

SEQ ID NO: 2391 - DNA, 23 bp, synthetic construct
  misc_feature 1..23: note = HLA-A targeting gRNA
  source 1..23: mol_type = other DNA
ctgacctgcgcccccggccgggg

SEQ ID NO: 2392 - DNA, 23 bp, synthetic construct
  misc_feature 1..23: note = HLA-A targeting gRNA
  source 1..23: mol_type = other DNA
caccctgagatgggttaaggagg

SEQ ID NO: 2393 - DNA, 23 bp, synthetic construct
  misc_feature 1..23: note = HLA-A targeting gRNA
  source 1..23: mol_type = other DNA
gagtcccggtgggtgcgtgcggg

SEQ ID NO: 2394 - DNA, 23 bp, synthetic construct
  misc_feature 1..23: note = HLA-A targeting gRNA
  source 1..23: mol_type = other DNA
caccgagcgcaagtgggaggcgg

SEQ ID NO: 2395 - DNA, 23 bp, synthetic construct
  misc_feature 1..23: note = HLA-A targeting gRNA
  source 1..23: mol_type = other DNA
caccggccggggtcactcaccgg

SEQ ID NO: 2396 - DNA, 23 bp, synthetic construct
  misc_feature 1..23: note = HLA-A targeting gRNA
  source 1..23: mol_type = other DNA
caccgtggatagagcaggagagg

SEQ ID NO: 2397 - DNA, 23 bp, synthetic construct
  misc_feature 1..23: note = HLA-A targeting gRNA
  source 1..23: mol_type = other DNA
ggggtcctgacctgcgcccccgg

SEQ ID NO: 2398 - DNA, 23 bp, synthetic construct
  misc_feature 1..23: note = HLA-A targeting gRNA
  source 1..23: mol_type = other DNA
taaagcccgcacgcacccaccgg

SEQ ID NO: 2399 - DNA, 23 bp, synthetic construct
  misc_feature 1..23: note = HLA-A targeting gRNA
  source 1..23: mol_type = other DNA
tcctgacctgcgcccccggccgg

SEQ ID NO: 2400 - DNA, 23 bp, synthetic construct
  misc_feature 1..23: note = HLA-A targeting gRNA
  source 1..23: mol_type = other DNA
acatgaacacagacacatgcagg

SEQ ID NO: 2401 - DNA, 23 bp, synthetic construct
  misc_feature 1..23: note = HLA-A targeting gRNA
  source 1..23: mol_type = other DNA
gcatgtgtctgtgttcatgtagg

SEQ ID NO: 2402 - DNA, 23 bp, synthetic construct
  misc_feature 1..23: note = HLA-A targeting gRNA
  source 1..23: mol_type = other DNA
gttcatgtaggcataatgtgagg

SEQ ID NO: 2403 - DNA, 23 bp, synthetic construct
  misc_feature 1..23: note = HLA-A targeting gRNA
  source 1..23: mol_type = other DNA
cacagccacccacttctggaagg

SEQ ID NO: 2404 - DNA, 23 bp, synthetic construct
  misc_feature 1..23: note = HLA-A targeting gRNA
  source 1..23: mol_type = other DNA
cacgagtaccaggggccacgggg

SEQ ID NO: 2405 - DNA, 23 bp, synthetic construct
  misc_feature 1..23: note = HLA-A targeting gRNA
  source 1..23: mol_type = other DNA
ccaccacagccacccacttctgg

SEQ ID NO: 2406 - DNA, 23 bp, synthetic construct
  misc_feature 1..23: note = HLA-A targeting gRNA
  source 1..23: mol_type = other DNA
ccagaagtgggtggctgtggtgg

SEQ ID NO: 2407 - DNA, 23 bp, synthetic construct
  misc_feature 1..23: note = HLA-A targeting gRNA
  source 1..23: mol_type = other DNA
cacgatgtggacggtgggctggg

SEQ ID NO: 2408 - DNA, 23 bp, synthetic construct
  misc_feature 1..23: note = HLA-A targeting gRNA
  source 1..23: mol_type = other DNA
cttccagaagtgggtggctgtgg

SEQ ID NO: 2409 - DNA, 23 bp, synthetic construct
  misc_feature 1..23: note = HLA-A targeting gRNA
  source 1..23: mol_type = other DNA
gtggctgtggtggtgccttctgg

SEQ ID NO: 2410 - DNA, 23 bp, synthetic construct
  misc_feature 1..23: note = HLA-A targeting gRNA
  source 1..23: mol_type = other DNA
tggaaccttccagaagtgggtgg

SEQ ID NO: 2411 - DNA, 23 bp, synthetic construct
  misc_feature 1..23: note = HLA-A targeting gRNA
  source 1..23: mol_type = other DNA
tcaggacccctcatcccccacgg

SEQ ID NO: 2412 - DNA, 23 bp, synthetic construct
  misc_feature 1..23: note = HLA-A targeting gRNA
  source 1..23: mol_type = other DNA
cacgggcccaaggctgccgccgg

SEQ ID NO: 2413 - DNA, 23 bp, synthetic construct
  misc_feature 1..23: note = HLA-A targeting gRNA
  source 1..23: mol_type = other DNA
cacgggtaccagggaccacgggg

SEQ ID NO: 2414 - DNA, 23 bp, synthetic construct
  misc_feature 1..23: note = HLA-A targeting gRNA
  source 1..23: mol_type = other DNA
aatgatgcccacgatggggacgg

SEQ ID NO: 2415 - DNA, 23 bp, synthetic construct
  misc_feature 1..23: note = HLA-A targeting gRNA
  source 1..23: mol_type = other DNA
atgcccacgatggggacggtggg

SEQ ID NO: 2416 - DNA, 23 bp, synthetic construct
  misc_feature 1..23: note = HLA-A targeting gRNA
  source 1..23: mol_type = other DNA
cacgatggggacggtgggctggg

SEQ ID NO: 2417 - DNA, 23 bp, synthetic construct
  misc_feature 1..23: note = HLA-A targeting gRNA
  source 1..23: mol_type = other DNA
cagcccaccgtccccatcgtggg

SEQ ID NO: 2418 - DNA, 23 bp, synthetic construct
  misc_feature 1..23: note = HLA-A targeting gRNA
  source 1..23: mol_type = other DNA
ccacgatggggacggtgggctgg

SEQ ID NO: 2419 - DNA, 23 bp, synthetic construct
  misc_feature 1..23: note = HLA-A targeting gRNA
  source 1..23: mol_type = other DNA
cactcggtcagtgtgtgactggg

SEQ ID NO: 2420 - DNA, 23 bp, synthetic construct
  misc_feature 1..23: note = HLA-A targeting gRNA
  source 1..23: mol_type = other DNA
ccagcccaccgtccccatcgtgg

SEQ ID NO: 2421 - DNA, 23 bp, synthetic construct
  misc_feature 1..23: note = HLA-A targeting gRNA
  source 1..23: mol_type = other DNA
gatgcccacgatggggacggtgg

SEQ ID NO: 2422 - DNA, 23 bp, synthetic construct
  misc_feature 1..23: note = HLA-A targeting gRNA
  source 1..23: mol_type = other DNA
cactctgaggtgctgggccctgg

SEQ ID NO: 2423 - DNA, 23 bp, synthetic construct
  misc_feature 1..23: note = HLA-A targeting gRNA
  source 1..23: mol_type = other DNA
cactgacctgacagcgggatggg

SEQ ID NO: 2424 - DNA, 23 bp, synthetic construct
  misc_feature 1..23: note = HLA-A targeting gRNA
  source 1..23: mol_type = other DNA
cactgacctggcagcgggatagg

SEQ ID NO: 2425 - DNA, 23 bp, synthetic construct
  misc_feature 1..23: note = HLA-A targeting gRNA
  source 1..23: mol_type = other DNA
gggacggtgggctgggaagatgg

SEQ ID NO: 2426 - DNA, 23 bp, synthetic construct
  misc_feature 1..23: note = HLA-A targeting gRNA
  source 1..23: mol_type = other DNA
cccgggctggggtcactcaccgg

SEQ ID NO: 2427 - DNA, 23 bp, synthetic construct
  misc_feature 1..23: note = HLA-A targeting gRNA
  source 1..23: mol_type = other DNA
cactggtaccaggggccacgggg

SEQ ID NO: 2428 - DNA, 23 bp, synthetic construct
  misc_feature 1..23: note = HLA-A targeting gRNA
  source 1..23: mol_type = other DNA
ccggtgagtgaccccagcccggg

SEQ ID NO: 2429 - DNA, 23 bp, synthetic construct
  misc_feature 1..23: note = HLA-A targeting gRNA
  source 1..23: mol_type = other DNA
cagaccagggcgggtgagtgcgg

SEQ ID NO: 2430 - DNA, 23 bp, synthetic construct
  misc_feature 1..23: note = HLA-A targeting gRNA
  source 1..23: mol_type = other DNA
cggtgagtgaccccagcccgggg

SEQ ID NO: 2431 - DNA, 23 bp, synthetic construct
  misc_feature 1..23: note = HLA-A targeting gRNA
  source 1..23: mol_type = other DNA
cgtgacctgcgccccgggctggg

SEQ ID NO: 2432 - DNA, 23 bp, synthetic construct
  misc_feature 1..23: note = HLA-A targeting gRNA
  source 1..23: mol_type = other DNA
cagactaaccgagcgaacctggg

SEQ ID NO: 2433 - DNA, 23 bp, synthetic construct
  misc_feature 1..23: note = HLA-A targeting gRNA
  source 1..23: mol_type = other DNA
gccggtgagtgaccccagcccgg

SEQ ID NO: 2434 - DNA, 23 bp, synthetic construct
  misc_feature 1..23: note = HLA-A targeting gRNA
  source 1..23: mol_type = other DNA
gtgaccccagcccggggcgcagg

SEQ ID NO: 2435 - DNA, 23 bp, synthetic construct
  misc_feature 1..23: note = HLA-A targeting gRNA
  source 1..23: mol_type = other DNA
cagactgaccgagagaactgcgg

SEQ ID NO: 2436 - DNA, 23 bp, synthetic construct
  misc_feature 1..23: note = HLA-A targeting gRNA
  source 1..23: mol_type = other DNA
gtgacctgcgccccgggctgggg

SEQ ID NO: 2437 - DNA, 23 bp, synthetic construct
  misc_feature 1..23: note = HLA-A targeting gRNA
  source 1..23: mol_type = other DNA
tcgtgacctgcgccccgggctgg

SEQ ID NO: 2438 - DNA, 23 bp, synthetic construct
  misc_feature 1..23: note = HLA-A targeting gRNA
  source 1..23: mol_type = other DNA
cagagcgaggacggtgaccccgg

SEQ ID NO: 2439 - DNA, 23 bp, synthetic construct
  misc_feature 1..23: note = HLA-A targeting gRNA
  source 1..23: mol_type = other DNA
aatgtgtgttgggtgttgggcgg

SEQ ID NO: 2440 - DNA, 23 bp, synthetic construct
  misc_feature 1..23: note = HLA-A targeting gRNA
  source 1..23: mol_type = other DNA
cagatacctgaagaacgggaagg

SEQ ID NO: 2441 - DNA, 23 bp, synthetic construct
  misc_feature 1..23: note = HLA-A targeting gRNA
  source 1..23: mol_type = other DNA
ctctctgctgctccgccacatgg

SEQ ID NO: 2442 - DNA, 23 bp, synthetic construct
  misc_feature 1..23: note = HLA-A targeting gRNA
  source 1..23: mol_type = other DNA
cagatacctggagaacggtaagg

SEQ ID NO: 2443 - DNA, 23 bp, synthetic construct
  misc_feature 1..23: note = HLA-A targeting gRNA
  source 1..23: mol_type = other DNA
tctctgctgctccgccacatggg

SEQ ID NO: 2444 - DNA, 23 bp, synthetic construct
  misc_feature 1..23: note = HLA-A targeting gRNA
  source 1..23: mol_type = other DNA
acacagctccaaagagaactagg

SEQ ID NO: 2445 - DNA, 23 bp, synthetic construct
  misc_feature 1..23: note = HLA-A targeting gRNA
  source 1..23: mol_type = other DNA
accacatccgtgtcccggcccgg

SEQ ID NO: 2446 - DNA, 23 bp, synthetic construct
  misc_feature 1..23: note = HLA-A targeting gRNA
  source 1..23: mol_type = other DNA
agctgtgttcgctggagctgtgg

SEQ ID NO: 2447 - DNA, 23 bp, synthetic construct
  misc_feature 1..23: note = HLA-A targeting gRNA
  source 1..23: mol_type = other DNA
atgggggtgtcatgtcttttagg

SEQ ID NO: 2448 - DNA, 23 bp, synthetic construct
  misc_feature 1..23: note = HLA-A targeting gRNA
  source 1..23: mol_type = other DNA
cagcaaggatgcccacgatgggg

SEQ ID NO: 2449 - DNA, 23 bp, synthetic construct
  misc_feature 1..23: note = HLA-A targeting gRNA
  source 1..23: mol_type = other DNA
cagcaatgatgcccacaatgggg

SEQ ID NO: 2450 - DNA, 23 bp, synthetic construct
  misc_feature 1..23: note = HLA-A targeting gRNA
  source 1..23: mol_type = other DNA
atttcaccacatccgtgtcccgg

SEQ ID NO: 2451 - DNA, 23 bp, synthetic construct
  misc_feature 1..23: note = HLA-A targeting gRNA
  source 1..23: mol_type = other DNA
cagcaatgatgcccacgatgtgg

SEQ ID NO: 2452 - DNA, 23 bp, synthetic construct
  misc_feature 1..23: note = HLA-A targeting gRNA
  source 1..23: mol_type = other DNA
ctctttggagctgtgttcgctgg

SEQ ID NO: 2453 - DNA, 23 bp, synthetic construct
  misc_feature 1..23: note = HLA-A targeting gRNA
  source 1..23: mol_type = other DNA
ggatgtggtgaaatacctcatgg

SEQ ID NO: 2454 - DNA, 23 bp, synthetic construct
  misc_feature 1..23: note = HLA-A targeting gRNA
  source 1..23: mol_type = other DNA
cagccattttgcatctgtcatgg

SEQ ID NO: 2455 - DNA, 23 bp, synthetic construct
  misc_feature 1..23: note = HLA-A targeting gRNA
  source 1..23: mol_type = other DNA
ggtgaaatacctcatggagtggg

SEQ ID NO: 2456 - DNA, 23 bp, synthetic construct
  misc_feature 1..23: note = HLA-A targeting gRNA
  source 1..23: mol_type = other DNA
cagcccaccatccccattgtggg

SEQ ID NO: 2457 - DNA, 23 bp, synthetic construct
  misc_feature 1..23: note = HLA-A targeting gRNA
  source 1..23: mol_type = other DNA
cagcccaccgtccacatcgtggg

SEQ ID NO: 2458 - DNA, 23 bp, synthetic construct
  misc_feature 1..23: note = HLA-A targeting gRNA
  source 1..23: mol_type = other DNA
tgggggtgtcatgtcttttaggg

SEQ ID NO: 2459 - DNA, 23 bp, synthetic construct
  misc_feature 1..23: note = HLA-A targeting gRNA
  source 1..23: mol_type = other DNA
tggtgaaatacctcatggagtgg

SEQ ID NO: 2460 - DNA, 23 bp, synthetic construct
  misc_feature 1..23: note = HLA-A targeting gRNA
  source 1..23: mol_type = other DNA
ccccggccggggtcactcaccgg

SEQ ID NO: 2461 - DNA, 23 bp, synthetic construct
  misc_feature 1..23: note = HLA-A targeting gRNA
  source 1..23: mol_type = other DNA
ccggtgagtgaccccggccgggg

SEQ ID NO: 2462 - DNA, 23 bp, synthetic construct
  misc_feature 1..23: note = HLA-A targeting gRNA
  source 1..23: mol_type = other DNA
cggtgagtgaccccggccggggg

SEQ ID NO: 2463 - DNA, 23 bp, synthetic construct
  misc_feature 1..23: note = HLA-A targeting gRNA
  source 1..23: mol_type = other DNA
cagcggagagtctacctggaggg

SEQ ID NO: 2464 - DNA, 23 bp, synthetic construct
  misc_feature 1..23: note = HLA-A targeting gRNA
  source 1..23: mol_type = other DNA
gccggtgagtgaccccggccggg

SEQ ID NO: 2465 - DNA, 23 bp, synthetic construct
  misc_feature 1..23: note = HLA-A targeting gRNA
  source 1..23: mol_type = other DNA
cagctgagagcctacctggatgg

SEQ ID NO: 2466 - DNA, 23 bp, synthetic construct
  misc_feature 1..23: note = HLA-A targeting gRNA
  source 1..23: mol_type = other DNA
gtgaccccggccgggggcgcagg

SEQ ID NO: 2467 - DNA, 23 bp, synthetic construct
  misc_feature 1..23: note = HLA-A targeting gRNA
  source 1..23: mol_type = other DNA
ctgggcggggctcgggggactgg

SEQ ID NO: 2468 - DNA, 23 bp, synthetic construct
  misc_feature 1..23: note = HLA-A targeting gRNA
  source 1..23: mol_type = other DNA
tgggcggggctcgggggactggg

SEQ ID NO: 2469 - DNA, 23 bp, synthetic construct
  misc_feature 1..23: note = HLA-A targeting gRNA
  source 1..23: mol_type = other DNA
aagtcgctgttccctcctcaggg

SEQ ID NO: 2470 - DNA, 23 bp, synthetic construct
  misc_feature 1..23: note = HLA-A targeting gRNA
  source 1..23: mol_type = other DNA
acactccaccagcatgcatgtgg

SEQ ID NO: 2471 - DNA, 23 bp, synthetic construct
  misc_feature 1..23: note = HLA-A targeting gRNA
  source 1..23: mol_type = other DNA
gaagtcgctgttccctcctcagg

SEQ ID NO: 2472 - DNA, 23 bp, synthetic construct
  misc_feature 1..23: note = HLA-A targeting gRNA
  source 1..23: mol_type = other DNA
gaggagggaacagcgacttctgg

SEQ ID NO: 2473 - DNA, 23 bp, synthetic construct
  misc_feature 1..23: note = HLA-A targeting gRNA
  source 1..23: mol_type = other DNA
gatggccacatgcatgctggtgg

SEQ ID NO: 2474 - DNA, 23 bp, synthetic construct
  misc_feature 1..23: note = HLA-A targeting gRNA
  source 1..23: mol_type = other DNA
ggccggtgagtgaccccggccgg

SEQ ID NO: 2475 - DNA, 23 bp, synthetic construct
  misc_feature 1..23: note = HLA-A targeting gRNA
  source 1..23: mol_type = other DNA
actctgagatgctgggccctggg

SEQ ID NO: 2476 - DNA, 23 bp, synthetic construct
  misc_feature 1..23: note = HLA-A targeting gRNA
  source 1..23: mol_type = other DNA
agcatctcagagtggcctcatgg

SEQ ID NO: 2477 - DNA, 23 bp, synthetic construct
  misc_feature 1..23: note = HLA-A targeting gRNA
  source 1..23: mol_type = other DNA
caggccccgaaggcggtatatgg

SEQ ID NO: 2478 - DNA, 23 bp, synthetic construct
  misc_feature 1..23: note = HLA-A targeting gRNA
  source 1..23: mol_type = other DNA
atgaggccactctgagatgctgg

SEQ ID NO: 2479 - DNA, 23 bp, synthetic construct
  misc_feature 1..23: note = HLA-A targeting gRNA
  source 1..23: mol_type = other DNA
cactctgagatgctgggccctgg

SEQ ID NO: 2480 - DNA, 23 bp, synthetic construct
  misc_feature 1..23: note = HLA-A targeting gRNA
  source 1..23: mol_type = other DNA
cagggcccagcatctcagagtgg

SEQ ID NO: 2481 - DNA, 23 bp, synthetic construct
  misc_feature 1..23: note = HLA-A targeting gRNA
  source 1..23: mol_type = other DNA
cagggcccagcacctcagagtgg

SEQ ID NO: 2482 - DNA, 23 bp, synthetic construct
  misc_feature 1..23: note = HLA-A targeting gRNA
  source 1..23: mol_type = other DNA
tgaggccactctgagatgctggg

SEQ ID NO: 2483 - DNA, 23 bp, synthetic construct
  misc_feature 1..23: note = HLA-A targeting gRNA
  source 1..23: mol_type = other DNA
cggcccgtccgtgggggatgagg

SEQ ID NO: 2484 - DNA, 23 bp, synthetic construct
  misc_feature 1..23: note = HLA-A targeting gRNA
  source 1..23: mol_type = other DNA
cagggtttttcaagtcacaaagg

SEQ ID NO: 2485 - DNA, 23 bp, synthetic construct
  misc_feature 1..23: note = HLA-A targeting gRNA
  source 1..23: mol_type = other DNA
caggtcagtgtgatctccacagg

SEQ ID NO: 2486 - DNA, 23 bp, synthetic construct
  misc_feature 1..23: note = HLA-A targeting gRNA
  source 1..23: mol_type = other DNA
caggtcagtgtgatctctgcagg

SEQ ID NO: 2487 - DNA, 23 bp, synthetic construct
  misc_feature 1..23: note = HLA-A targeting gRNA
  source 1..23: mol_type = other DNA
cgtccacgcacgtgccctccagg

SEQ ID NO: 2488 - DNA, 23 bp, synthetic construct
  misc_feature 1..23: note = HLA-A targeting gRNA
  source 1..23: mol_type = other DNA
ctggagggcacgtgcgtggacgg

SEQ ID NO: 2489 - DNA, 23 bp, synthetic construct
  misc_feature 1..23: note = HLA-A targeting gRNA
  source 1..23: mol_type = other DNA
caggttctcacagcatccagagg

SEQ ID NO: 2490 - DNA, 23 bp, synthetic construct
  misc_feature 1..23: note = HLA-A targeting gRNA
  source 1..23: mol_type = other DNA
tggagggcacgtgcgtggacggg

SEQ ID NO: 2491 - DNA, 23 bp, synthetic construct
  misc_feature 1..23: note = HLA-A targeting gRNA
  source 1..23: mol_type = other DNA
acctaatgtgtgttgggtgttgg

SEQ ID NO: 2492 - DNA, 23 bp, synthetic construct
  misc_feature 1..23: note = HLA-A targeting gRNA
  source 1..23: mol_type = other DNA
cccaacacccaacacacattagg

SEQ ID NO: 2493 - DNA, 23 bp, synthetic construct
  misc_feature 1..23: note = HLA-A targeting gRNA
  source 1..23: mol_type = other DNA
cccagccccgaccaacccggggg

SEQ ID NO: 2494 - DNA, 23 bp, synthetic construct
  misc_feature 1..23: note = HLA-A targeting gRNA
  source 1..23: mol_type = other DNA
cccccgggttggtcggggctggg

SEQ ID NO: 2495 - DNA, 23 bp, synthetic construct
  misc_feature 1..23: note = HLA-A targeting gRNA
  source 1..23: mol_type = other DNA
ccgcccagccccgaccaacccgg

SEQ ID NO: 2496 - DNA, 23 bp, synthetic construct
  misc_feature 1..23: note = HLA-A targeting gRNA
  source 1..23: mol_type = other DNA
cagttgagagcctacctggatgg

SEQ ID NO: 2497 - DNA, 23 bp, synthetic construct
  misc_feature 1..23: note = HLA-A targeting gRNA
  source 1..23: mol_type = other DNA
ccgggttggtcggggctgggcgg

SEQ ID NO: 2498 - DNA, 23 bp, synthetic construct
  misc_feature 1..23: note = HLA-A targeting gRNA
  source 1..23: mol_type = other DNA
cctaatgtgtgttgggtgttggg

SEQ ID NO: 2499 - DNA, 23 bp, synthetic construct
  misc_feature 1..23: note = HLA-A targeting gRNA
  source 1..23: mol_type = other DNA
catctcagggtgaggggctcggg

SEQ ID NO: 2500 - DNA, 23 bp, synthetic construct
  misc_feature 1..23: note = HLA-A targeting gRNA
  source 1..23: mol_type = other DNA
cgcccagccccgaccaacccggg

SEQ ID NO: 2501 - DNA, 23 bp, synthetic construct
  misc_feature 1..23: note = HLA-A targeting gRNA
  source 1..23: mol_type = other DNA
cggggctgggcggggctcggggg

SEQ ID NO: 2502 - DNA, 23 bp, synthetic construct
  misc_feature 1..23: note = HLA-A targeting gRNA
  source 1..23: mol_type = other DNA
cgggttggtcggggctgggcggg

SEQ ID NO: 2503 - DNA, 23 bp, synthetic construct
  misc_feature 1..23: note = HLA-A targeting gRNA
  source 1..23: mol_type = other DNA
cttctcacagatagaaaaggagg

SEQ ID NO: 2504 - DNA, 23 bp, synthetic construct
  misc_feature 1..23: note = HLA-A targeting gRNA
  source 1..23: mol_type = other DNA
gcccagccccgaccaacccgggg

SEQ ID NO: 2505 - DNA, 23 bp, synthetic construct
  misc_feature 1..23: note = HLA-A targeting gRNA
  source 1..23: mol_type = other DNA
gggttggtcggggctgggcgggg

SEQ ID NO: 2506 - DNA, 23 bp, synthetic construct
  misc_feature 1..23: note = HLA-A targeting gRNA
  source 1..23: mol_type = other DNA
ggtcggggctgggcggggctcgg

SEQ ID NO: 2507 - DNA, 23 bp, synthetic construct
  misc_feature 1..23: note = HLA-A targeting gRNA
  source 1..23: mol_type = other DNA
gtcggggctgggcggggctcggg

SEQ ID NO: 2508 - DNA, 23 bp, synthetic construct
  misc_feature 1..23: note = HLA-A targeting gRNA
  source 1..23: mol_type = other DNA
tcggggctgggcggggctcgggg

SEQ ID NO: 2509 - DNA, 23 bp, synthetic construct
  misc_feature 1..23: note = HLA-A targeting gRNA
  source 1..23: mol_type = other DNA
catttgtctccctttcttgtggg

SEQ ID NO: 2510 - DNA, 23 bp, synthetic construct
  misc_feature 1..23: note = HLA-A targeting gRNA
  source 1..23: mol_type = other DNA
tggaggacctaatgtgtgttggg

SEQ ID NO: 2511 - DNA, 23 bp, synthetic construct
  misc_feature 1..23: note = HLA-A targeting gRNA
  source 1..23: mol_type = other DNA
ttctcacagatagaaaaggaggg

SEQ ID NO: 2512 - DNA, 23 bp, synthetic construct
  misc_feature 1..23: note = HLA-A targeting gRNA
  source 1..23: mol_type = other DNA
ccaatccatataccgccttcggg

SEQ ID NO: 2513 - DNA, 23 bp, synthetic construct
  misc_feature 1..23: note = HLA-A targeting gRNA
  source 1..23: mol_type = other DNA
ttggaggacctaatgtgtgttgg

SEQ ID NO: 2514 - DNA, 23 bp, synthetic construct
  misc_feature 1..23: note = HLA-A targeting gRNA
  source 1..23: mol_type = other DNA
ccacaagaaagggagacaaatgg

SEQ ID NO: 2515 - DNA, 23 bp, synthetic construct
  misc_feature 1..23: note = HLA-A targeting gRNA
  source 1..23: mol_type = other DNA
tttcttctcacagatagaaaagg

SEQ ID NO: 2516 - DNA, 23 bp, synthetic construct
  misc_feature 1..23: note = HLA-A targeting gRNA
  source 1..23: mol_type = other DNA
ccacaatggggatggtgggctgg

SEQ ID NO: 2517 - DNA, 23 bp, synthetic construct
  misc_feature 1..23: note = HLA-A targeting gRNA
  source 1..23: mol_type = other DNA
aaccagtcatcagtattcgaggg

SEQ ID NO: 2518 - DNA, 23 bp, synthetic construct
  misc_feature 1..23: note = HLA-A targeting gRNA
  source 1..23: mol_type = other DNA
aatcttctattccctgaggaggg

SEQ ID NO: 2519 - DNA, 23 bp, synthetic construct
  misc_feature 1..23: note = HLA-A targeting gRNA
  source 1..23: mol_type = other DNA
acagatctcaggagggcgattgg

SEQ ID NO: 2520 - DNA, 23 bp, synthetic construct
  misc_feature 1..23: note = HLA-A targeting gRNA
  source 1..23: mol_type = other DNA
acttcatatctgtcacagtgagg

SEQ ID NO: 2521 - DNA, 23 bp, synthetic construct
  misc_feature 1..23: note = HLA-A targeting gRNA
  source 1..23: mol_type = other DNA
agacctacaggcgatcaggtagg

SEQ ID NO: 2522 - DNA, 23 bp, synthetic construct
  misc_feature 1..23: note = HLA-A targeting gRNA
  source 1..23: mol_type = other DNA
aggaacagctcaggtggagaagg

SEQ ID NO: 2523 - DNA, 23 bp, synthetic construct
  misc_feature 1..23: note = HLA-A targeting gRNA
  source 1..23: mol_type = other DNA
atccctcgaatactgatgactgg

SEQ ID NO: 2524 - DNA, 23 bp, synthetic construct
  misc_feature 1..23: note = HLA-A targeting gRNA
  source 1..23: mol_type = other DNA
ccacgatgtggacggtgggctgg

SEQ ID NO: 2525 - DNA, 23 bp, synthetic construct
  misc_feature 1..23: note = HLA-A targeting gRNA
  source 1..23: mol_type = other DNA
atgatgtttggctgcgacgtggg

SEQ ID NO: 2526 - DNA, 23 bp, synthetic construct
  misc_feature 1..23: note = HLA-A targeting gRNA
  source 1..23: mol_type = other DNA
atgtggaggaggaacagctcagg

SEQ ID NO: 2527 - DNA, 23 bp, synthetic construct
  misc_feature 1..23: note = HLA-A targeting gRNA
  source 1..23: mol_type = other DNA
caagatggccacatgcatgctgg

SEQ ID NO: 2528 - DNA, 23 bp, synthetic construct
  misc_feature 1..23: note = HLA-A targeting gRNA
  source 1..23: mol_type = other DNA
cacaccctccagatgatgtttgg

SEQ ID NO: 2529 - DNA, 23 bp, synthetic construct
  misc_feature 1..23: note = HLA-A targeting gRNA
  source 1..23: mol_type = other DNA
cacggtcccaaggctgctgccgg

SEQ ID NO: 2530 - DNA, 23 bp, synthetic construct
  misc_feature 1..23: note = HLA-A targeting gRNA
  source 1..23: mol_type = other DNA
ccctcctgagatctgtcgtcagg

SEQ ID NO: 2531 - DNA, 23 bp, synthetic construct
  misc_feature 1..23: note = HLA-A targeting gRNA
  source 1..23: mol_type = other DNA
ccctgacgacagatctcaggagg

SEQ ID NO: 2532 - DNA, 23 bp, synthetic construct
  misc_feature 1..23: note = HLA-A targeting gRNA
  source 1..23: mol_type = other DNA
ccactcggtcagtgtgtgactgg

SEQ ID NO: 2533 - DNA, 23 bp, synthetic construct
  misc_feature 1..23: note = HLA-A targeting gRNA
  source 1..23: mol_type = other DNA
cctcctgagatctgtcgtcaggg

SEQ ID NO: 2534 - DNA, 23 bp, synthetic construct
  misc_feature 1..23: note = HLA-A targeting gRNA
  source 1..23: mol_type = other DNA
ccactgctccgcctcatgggcgg

SEQ ID NO: 2535 - DNA, 23 bp, synthetic construct
  misc_feature 1..23: note = HLA-A targeting gRNA
  source 1..23: mol_type = other DNA
cctgacgacagatctcaggaggg

SEQ ID NO: 2536 - DNA, 23 bp, synthetic construct
  misc_feature 1..23: note = HLA-A targeting gRNA
  source 1..23: mol_type = other DNA
cgcagccaaacatcatctggagg

SEQ ID NO: 2537 - DNA, 23 bp, synthetic construct
  misc_feature 1..23: note = HLA-A targeting gRNA
  source 1..23: mol_type = other DNA
cgcctgtaggtctcccgggctgg

SEQ ID NO: 2538 - DNA, 23 bp, synthetic construct
  misc_feature 1..23: note = HLA-A targeting gRNA
  source 1..23: mol_type = other DNA
cgggagacctacaggcgatcagg

SEQ ID NO: 2539 - DNA, 23 bp, synthetic construct
  misc_feature 1..23: note = HLA-A targeting gRNA
  source 1..23: mol_type = other DNA
cgtcgcagccaaacatcatctgg

SEQ ID NO: 2540 - DNA, 23 bp, synthetic construct
  misc_feature 1..23: note = HLA-A targeting gRNA
  source 1..23: mol_type = other DNA
ctgaaaatgaaaccgggttaagg

SEQ ID NO: 2541 - DNA, 23 bp, synthetic construct
  misc_feature 1..23: note = HLA-A targeting gRNA
  source 1..23: mol_type = other DNA
ccagcaaggatgcccacgatggg

SEQ ID NO: 2542 - DNA, 23 bp, synthetic construct
  misc_feature 1..23: note = HLA-A targeting gRNA
  source 1..23: mol_type = other DNA
ccagcaatgatgcccacaatggg

SEQ ID NO: 2543 - DNA, 23 bp, synthetic construct
  misc_feature 1..23: note = HLA-A targeting gRNA
  source 1..23: mol_type = other DNA
ctgatcgcctgtaggtctcccgg

SEQ ID NO: 2544 - DNA, 23 bp, synthetic construct
  misc_feature 1..23: note = HLA-A targeting gRNA
  source 1..23: mol_type = other DNA
cttcatatctgtcacagtgaggg

SEQ ID NO: 2545 - DNA, 23 bp, synthetic construct
  misc_feature 1..23: note = HLA-A targeting gRNA
  source 1..23: mol_type = other DNA
gaaaccgggttaaggcgcctggg

SEQ ID NO: 2546 - DNA, 23 bp, synthetic construct
  misc_feature 1..23: note = HLA-A targeting gRNA
  source 1..23: mol_type = other DNA
ccagcccaccatccccattgtgg

SEQ ID NO: 2547 - DNA, 23 bp, synthetic construct
  misc_feature 1..23: note = HLA-A targeting gRNA
  source 1..23: mol_type = other DNA
ccagcccaccgtccacatcgtgg

SEQ ID NO: 2548 - DNA, 23 bp, synthetic construct
  misc_feature 1..23: note = HLA-A targeting gRNA
  source 1..23: mol_type = other DNA
gaacagctcaggtggagaagggg

SEQ ID NO: 2549 - DNA, 23 bp, synthetic construct
  misc_feature 1..23: note = HLA-A targeting gRNA
  source 1..23: mol_type = other DNA
gaaccagtcatcagtattcgagg

SEQ ID NO: 2550 - DNA, 23 bp, synthetic construct
  misc_feature 1..23: note = HLA-A targeting gRNA
  source 1..23: mol_type = other DNA
gaggaaaagtcacggtcccaagg

SEQ ID NO: 2551 - DNA, 23 bp, synthetic construct
  misc_feature 1..23: note = HLA-A targeting gRNA
  source 1..23: mol_type = other DNA
gaggcccaggcgccttaacccgg

SEQ ID NO: 2552 - DNA, 23 bp, synthetic construct
  misc_feature 1..23: note = HLA-A targeting gRNA
  source 1..23: mol_type = other DNA
ccaggacacggagctcgtggagg

SEQ ID NO: 2553 - DNA, 23 bp, synthetic construct
  misc_feature 1..23: note = HLA-A targeting gRNA
  source 1..23: mol_type = other DNA
ccaggagacacggaatatgaagg

SEQ ID NO: 2554 - DNA, 23 bp, synthetic construct
  misc_feature 1..23: note = HLA-A targeting gRNA
  source 1..23: mol_type = other DNA
gatgatgtttggctgcgacgtgg

SEQ ID NO: 2555 - DNA, 23 bp, synthetic construct
  misc_feature 1..23: note = HLA-A targeting gRNA
  source 1..23: mol_type = other DNA
ccaggagacgcggaatgtgaagg

SEQ ID NO: 2556 - DNA, 23 bp, synthetic construct
  misc_feature 1..23: note = HLA-A targeting gRNA
  source 1..23: mol_type = other DNA
gcagccaaacatcatctggaggg

SEQ ID NO: 2557 - DNA, 23 bp, synthetic construct
  misc_feature 1..23: note = HLA-A targeting gRNA
  source 1..23: mol_type = other DNA
gcagctgtggtggtaccttctgg

SEQ ID NO: 2558 - DNA, 23 bp, synthetic construct
  misc_feature 1..23: note = HLA-A targeting gRNA
  source 1..23: mol_type = other DNA
gcgatcaggtaggcgccccgtgg

SEQ ID NO: 2559 - DNA, 23 bp, synthetic construct
  misc_feature 1..23: note = HLA-A targeting gRNA
  source 1..23: mol_type = other DNA
gcgcctacctgatcgcctgtagg

SEQ ID NO: 2560 - DNA, 23 bp, synthetic construct
  misc_feature 1..23: note = HLA-A targeting gRNA
  source 1..23: mol_type = other DNA
ggaacagctcaggtggagaaggg

SEQ ID NO: 2561 - DNA, 23 bp, synthetic construct
  misc_feature 1..23: note = HLA-A targeting gRNA
  source 1..23: mol_type = other DNA
ggaccgtgacttttcctctcagg

SEQ ID NO: 2562 - DNA, 23 bp, synthetic construct
  misc_feature 1..23: note = HLA-A targeting gRNA
  source 1..23: mol_type = other DNA
ggataatcttctattccctgagg

SEQ ID NO: 2563 - DNA, 23 bp, synthetic construct
  misc_feature 1..23: note = HLA-A targeting gRNA
  source 1..23: mol_type = other DNA
ggccagcccgggagacctacagg

SEQ ID NO: 2564 - DNA, 23 bp, synthetic construct
  misc_feature 1..23: note = HLA-A targeting gRNA
  source 1..23: mol_type = other DNA
ggggtggttgagctcccccatgg

SEQ ID NO: 2565 - DNA, 23 bp, synthetic construct
  misc_feature 1..23: note = HLA-A targeting gRNA
  source 1..23: mol_type = other DNA
gggtggttgagctcccccatggg

SEQ ID NO: 2566 - DNA, 23 bp, synthetic construct
  misc_feature 1..23: note = HLA-A targeting gRNA
  source 1..23: mol_type = other DNA
ggtaggcgccccgtggcccctgg

SEQ ID NO: 2567 - DNA, 23 bp, synthetic construct
  misc_feature 1..23: note = HLA-A targeting gRNA
  source 1..23: mol_type = other DNA
ggtccctgacgacagatctcagg

SEQ ID NO: 2568 - DNA, 23 bp, synthetic construct
  misc_feature 1..23: note = HLA-A targeting gRNA
  source 1..23: mol_type = other DNA
ccagtcacacactgaccgagtgg

SEQ ID NO: 2569 - DNA, 23 bp, synthetic construct
  misc_feature 1..23: note = HLA-A targeting gRNA
  source 1..23: mol_type = other DNA
ggtcggcccatgattgtggatgg

SEQ ID NO: 2570 - DNA, 23 bp, synthetic construct
  misc_feature 1..23: note = HLA-A targeting gRNA
  source 1..23: mol_type = other DNA
taaaatctctgacggaatgacgg

SEQ ID NO: 2571 - DNA, 23 bp, synthetic construct
  misc_feature 1..23: note = HLA-A targeting gRNA
  source 1..23: mol_type = other DNA
taaggcgcctgggcctctcccgg

SEQ ID NO: 2572 - DNA, 23 bp, synthetic construct
  misc_feature 1..23: note = HLA-A targeting gRNA
  source 1..23: mol_type = other DNA
taatcttctattccctgaggagg

SEQ ID NO: 2573 - DNA, 23 bp, synthetic construct
  misc_feature 1..23: note = HLA-A targeting gRNA
  source 1..23: mol_type = other DNA
tgaaaccgggttaaggcgcctgg

SEQ ID NO: 2574 - DNA, 23 bp, synthetic construct
  misc_feature 1..23: note = HLA-A targeting gRNA
  source 1..23: mol_type = other DNA
ccatctcagggtgaggggctcgg

SEQ ID NO: 2575 - DNA, 23 bp, synthetic construct
  misc_feature 1..23: note = HLA-A targeting gRNA
  source 1..23: mol_type = other DNA
tgactggttccctttgacaccgg

SEQ ID NO: 2576 - DNA, 23 bp, synthetic construct
  misc_feature 1..23: note = HLA-A targeting gRNA
  source 1..23: mol_type = other DNA
tgatcgcctgtaggtctcccggg

SEQ ID NO: 2577 - DNA, 23 bp, synthetic construct
  misc_feature 1..23: note = HLA-A targeting gRNA
  source 1..23: mol_type = other DNA
tgatgtttggctgcgacgtgggg

SEQ ID NO: 2578 - DNA, 23 bp, synthetic construct
  misc_feature 1..23: note = HLA-A targeting gRNA
  source 1..23: mol_type = other DNA
tggaggaggaacagctcaggtgg

SEQ ID NO: 2579 - DNA, 23 bp, synthetic construct
  misc_feature 1..23: note = HLA-A targeting gRNA
  source 1..23: mol_type = other DNA
tgtggtggtaccttctggagagg

SEQ ID NO: 2580 - DNA, 23 bp, synthetic construct
  misc_feature 1..23: note = HLA-A targeting gRNA
  source 1..23: mol_type = other DNA
ttaagggataaaatctctgacgg

SEQ ID NO: 2581 - DNA, 23 bp, synthetic construct
  misc_feature 1..23: note = HLA-A targeting gRNA
  source 1..23: mol_type = other DNA
ccatttgtctccctttcttgtgg

SEQ ID NO: 2582 - DNA, 23 bp, synthetic construct
  misc_feature 1..23: note = HLA-A targeting gRNA
  source 1..23: mol_type = other DNA
aaacatgaagaaagcagatgtgg

SEQ ID NO: 2583 - DNA, 23 bp, synthetic construct
  misc_feature 1..23: note = HLA-A targeting gRNA
  source 1..23: mol_type = other DNA
aacatgaagaaagcagatgtggg

SEQ ID NO: 2584 - DNA, 23 bp, synthetic construct
  misc_feature 1..23: note = HLA-A targeting gRNA
  source 1..23: mol_type = other DNA
aagaaagcagatgtgggccctgg

SEQ ID NO: 2585 - DNA, 23 bp, synthetic construct
  misc_feature 1..23: note = HLA-A targeting gRNA
  source 1..23: mol_type = other DNA
cccaatccatataccgccttcgg

SEQ ID NO: 2586 - DNA, 23 bp, synthetic construct
  misc_feature 1..23: note = HLA-A targeting gRNA
  source 1..23: mol_type = other DNA
cccacagaacatgtggctagagg

SEQ ID NO: 2587 - DNA, 23 bp, synthetic construct
  misc_feature 1..23: note = HLA-A targeting gRNA
  source 1..23: mol_type = other DNA
cccatcgtgggcatccttgctgg

SEQ ID NO: 2588 - DNA, 23 bp, synthetic construct
  misc_feature 1..23: note = HLA-A targeting gRNA
  source 1..23: mol_type = other DNA
cccattgtgggcatcattgctgg

SEQ ID NO: 2589 - DNA, 23 bp, synthetic construct
  misc_feature 1..23: note = HLA-A targeting gRNA
  source 1..23: mol_type = other DNA
ccccaggctcccaatccatgagg

SEQ ID NO: 2590 - DNA, 23 bp, synthetic construct
  misc_feature 1..23: note = HLA-A targeting gRNA
  source 1..23: mol_type = other DNA
ccccaggctcctactccatgagg

SEQ ID NO: 2591 - DNA, 23 bp, synthetic construct
  misc_feature 1..23: note = HLA-A targeting gRNA
  source 1..23: mol_type = other DNA
ctcaggagggcgattggtccagg

SEQ ID NO: 2592 - DNA, 23 bp, synthetic construct
  misc_feature 1..23: note = HLA-A targeting gRNA
  source 1..23: mol_type = other DNA
ccccccgggtgggtcggggcggg

SEQ ID NO: 2593 - DNA, 23 bp, synthetic construct
  misc_feature 1..23: note = HLA-A targeting gRNA
  source 1..23: mol_type = other DNA
tcaggagggcgattggtccaggg

SEQ ID NO: 2594 - DNA, 23 bp, synthetic construct
  misc_feature 1..23: note = HLA-A targeting gRNA
  source 1..23: mol_type = other DNA
ttcatatctgtcacagtgagggg

SEQ ID NO: 2595 - DNA, 23 bp, synthetic construct
  misc_feature 1..23: note = HLA-A targeting gRNA
  source 1..23: mol_type = other DNA
cccccgggtgggtcggggcgggg

SEQ ID NO: 2596 - DNA, 23 bp, synthetic construct
  misc_feature 1..23: note = HLA-A targeting gRNA
  source 1..23: mol_type = other DNA
ccccctggttggtcggggccggg

SEQ ID NO: 2597 - DNA, 23 bp, synthetic construct
  misc_feature 1..23: note = HLA-A targeting gRNA
  source 1..23: mol_type = other DNA
ccccgaccccgcggtcagcccgg

SEQ ID NO: 2598 - DNA, 23 bp, synthetic construct
  misc_feature 1..23: note = HLA-A targeting gRNA
  source 1..23: mol_type = other DNA
ccccgccccgacccacccggggg

SEQ ID NO: 2599 - DNA, 23 bp, synthetic construct
  misc_feature 1..23: note = HLA-A targeting gRNA
  source 1..23: mol_type = other DNA
cccgaaggcggtatatggattgg

SEQ ID NO: 2600 - DNA, 23 bp, synthetic construct
  misc_feature 1..23: note = HLA-A targeting gRNA
  source 1..23: mol_type = other DNA
agactgaccgagagaacctgcgg

SEQ ID NO: 2601 - DNA, 23 bp, synthetic construct
  misc_feature 1..23: note = HLA-A targeting gRNA
  source 1..23: mol_type = other DNA
cgccgggaggagggtcgggcagg

SEQ ID NO: 2602 - DNA, 23 bp, synthetic construct
  misc_feature 1..23: note = HLA-A targeting gRNA
  source 1..23: mol_type = other DNA
gacctgcccgaccctcctcccgg

SEQ ID NO: 2603 - DNA, 23 bp, synthetic construct
  misc_feature 1..23: note = HLA-A targeting gRNA
  source 1..23: mol_type = other DNA
cccgccccgacccacccgggggg

SEQ ID NO: 2604 - DNA, 23 bp, synthetic construct
  misc_feature 1..23: note = HLA-A targeting gRNA
  source 1..23: mol_type = other DNA
tgtgactgcagacccagggcagg

SEQ ID NO: 2605 - DNA, 23 bp, synthetic construct
  misc_feature 1..23: note = HLA-A targeting gRNA
  source 1..23: mol_type = other DNA
actccacgcaccggccctccagg

SEQ ID NO: 2606 - DNA, 23 bp, synthetic construct
  misc_feature 1..23: note = HLA-A targeting gRNA
  source 1..23: mol_type = other DNA
cacgcaccggccctccaggtagg

SEQ ID NO: 2607 - DNA, 23 bp, synthetic construct
  misc_feature 1..23: note = HLA-A targeting gRNA
  source 1..23: mol_type = other DNA
cttcctccgcgggtaccagcagg

SEQ ID NO: 2608 - DNA, 23 bp, synthetic construct
  misc_feature 1..23: note = HLA-A targeting gRNA
  source 1..23: mol_type = other DNA
tgcggagccactccacgcaccgg

SEQ ID NO: 2609 - DNA, 23 bp, synthetic construct
  misc_feature 1..23: note = HLA-A targeting gRNA
  source 1..23: mol_type = other DNA
tggagggccggtgcgtggagtgg

SEQ ID NO: 2610 - DNA, 23 bp, synthetic construct
  misc_feature 1..23: note = HLA-A targeting gRNA
  source 1..23: mol_type = other DNA
aagatggctctgggaaaagaggg

SEQ ID NO: 2611 - DNA, 23 bp, synthetic construct
  misc_feature 1..23: note = HLA-A targeting gRNA
  source 1..23: mol_type = other DNA
cccggccccgaccaaccaggggg

SEQ ID NO: 2612 - DNA, 23 bp, synthetic construct
  misc_feature 1..23: note = HLA-A targeting gRNA
  source 1..23: mol_type = other DNA
aatctgtccttcattgtcacagg

SEQ ID NO: 2613 - DNA, 23 bp, synthetic construct
  misc_feature 1..23: note = HLA-A targeting gRNA
  source 1..23: mol_type = other DNA
acctgcccaggtctgggtcaggg

SEQ ID NO: 2614 - DNA, 23 bp, synthetic construct
  misc_feature 1..23: note = HLA-A targeting gRNA
  source 1..23: mol_type = other DNA
cccggccggtggcgcaggtcagg

SEQ ID NO: 2615 - DNA, 23 bp, synthetic construct
  misc_feature 1..23: note = HLA-A targeting gRNA
  source 1..23: mol_type = other DNA
agacctgggcaggtgagtgcggg

SEQ ID NO: 2616 - DNA, 23 bp, synthetic construct
  misc_feature 1..23: note = HLA-A targeting gRNA
  source 1..23: mol_type = other DNA
agatggctctgggaaaagagggg

SEQ ID NO: 2617 - DNA, 23 bp, synthetic construct
  misc_feature 1..23: note = HLA-A targeting gRNA
  source 1..23: mol_type = other DNA
aggtgagtgcggggtcgggaggg

SEQ ID NO: 2618 - DNA, 23 bp, synthetic construct
  misc_feature 1..23: note = HLA-A targeting gRNA
  source 1..23: mol_type = other DNA
agtggcctcatggtcagagatgg

SEQ ID NO: 2619 - DNA, 23 bp, synthetic construct
  misc_feature 1..23: note = HLA-A targeting gRNA
  source 1..23: mol_type = other DNA
cacctgcccaggtctgggtcagg

SEQ ID NO: 2620 - DNA, 23 bp, synthetic construct
  misc_feature 1..23: note = HLA-A targeting gRNA
  source 1..23: mol_type = other DNA
cagacctgggcaggtgagtgcgg

SEQ ID NO: 2621 - DNA, 23 bp, synthetic construct
  misc_feature 1..23: note = HLA-A targeting gRNA
  source 1..23: mol_type = other DNA
caggtgagtgcggggtcgggagg

SEQ ID NO: 2622 - DNA, 23 bp, synthetic construct
  misc_feature 1..23: note = HLA-A targeting gRNA
  source 1..23: mol_type = other DNA
cgcactcacctgcccaggtctgg

SEQ ID NO: 2623 - DNA, 23 bp, synthetic construct
  misc_feature 1..23: note = HLA-A targeting gRNA
  source 1..23: mol_type = other DNA
gaccccgcactcacctgcccagg

SEQ ID NO: 2624 - DNA, 23 bp, synthetic construct
  misc_feature 1..23: note = HLA-A targeting gRNA
  source 1..23: mol_type = other DNA
gacctgggcaggtgagtgcgggg

SEQ ID NO: 2625 - DNA, 23 bp, synthetic construct
  misc_feature 1..23: note = HLA-A targeting gRNA
  source 1..23: mol_type = other DNA
gcactcacctgcccaggtctggg

SEQ ID NO: 2626 - DNA, 23 bp, synthetic construct
  misc_feature 1..23: note = HLA-A targeting gRNA
  source 1..23: mol_type = other DNA
gccctgacccagacctgggcagg

SEQ ID NO: 2627 - DNA, 23 bp, synthetic construct
  misc_feature 1..23: note = HLA-A targeting gRNA
  source 1..23: mol_type = other DNA
gggcaggtgagtgcggggtcggg

SEQ ID NO: 2628 - DNA, 23 bp, synthetic construct
  misc_feature 1..23: note = HLA-A targeting gRNA
  source 1..23: mol_type = other DNA
ccctcctgaggtctgtcgtcagg

SEQ ID NO: 2629 - DNA, 23 bp, synthetic construct
  misc_feature 1..23: note = HLA-A targeting gRNA
  source 1..23: mol_type = other DNA
taaagcacctgtgacaatgaagg

SEQ ID NO: 2630 - DNA, 23 bp, synthetic construct
  misc_feature 1..23: note = HLA-A targeting gRNA
  source 1..23: mol_type = other DNA
ccctgacgacagacctcaggagg

SEQ ID NO: 2631 - DNA, 23 bp, synthetic construct
  misc_feature 1..23: note = HLA-A targeting gRNA
  source 1..23: mol_type = other DNA
tgggcaggtgagtgcggggtcgg

SEQ ID NO: 2632 - DNA, 23 bp, synthetic construct
  misc_feature 1..23: note = HLA-A targeting gRNA
  source 1..23: mol_type = other DNA
ccctggccctgacccagaccagg

SEQ ID NO: 2633 - DNA, 23 bp, synthetic construct
  misc_feature 1..23: note = HLA-A targeting gRNA
  source 1..23: mol_type = other DNA
ccctggtctgggtcagggccagg

SEQ ID NO: 2634 - DNA, 23 bp, synthetic construct
  misc_feature 1..23: note = HLA-A targeting gRNA
  source 1..23: mol_type = other DNA
actccctccttttctatctgtgg

SEQ ID NO: 2635 - DNA, 23 bp, synthetic construct
  misc_feature 1..23: note = HLA-A targeting gRNA
  source 1..23: mol_type = other DNA
ccgaaggcggtatatggattggg

SEQ ID NO: 2636 - DNA, 23 bp, synthetic construct
  misc_feature 1..23: note = HLA-A targeting gRNA
  source 1..23: mol_type = other DNA
gaagcaccttccacaatcatggg

SEQ ID NO: 2637 - DNA, 23 bp, synthetic construct
  misc_feature 1..23: note = HLA-A targeting gRNA
  source 1..23: mol_type = other DNA
ccgagcccctcaccctgagatgg

SEQ ID NO: 2638 - DNA, 23 bp, synthetic construct
  misc_feature 1..23: note = HLA-A targeting gRNA
  source 1..23: mol_type = other DNA
ggaagcaccttccacaatcatgg

SEQ ID NO: 2639 - DNA, 23 bp, synthetic construct
  misc_feature 1..23: note = HLA-A targeting gRNA
  source 1..23: mol_type = other DNA
ccgcccatgaggcggagcagtgg

SEQ ID NO: 2640 - DNA, 23 bp, synthetic construct
  misc_feature 1..23: note = HLA-A targeting gRNA
  source 1..23: mol_type = other DNA
ggtcggcccatgattgtggaagg

SEQ ID NO: 2641 - DNA, 23 bp, synthetic construct
  misc_feature 1..23: note = HLA-A targeting gRNA
  source 1..23: mol_type = other DNA
gcagccatacatcctctggatgg

SEQ ID NO: 2642 - DNA, 23 bp, synthetic construct
  misc_feature 1..23: note = HLA-A targeting gRNA
  source 1..23: mol_type = other DNA
ccgccccgccccgacccacccgg

SEQ ID NO: 2643 - DNA, 23 bp, synthetic construct
  misc_feature 1..23: note = HLA-A targeting gRNA
  source 1..23: mol_type = other DNA
agatctataggcgatcagggagg

SEQ ID NO: 2644 - DNA, 23 bp, synthetic construct
  misc_feature 1..23: note = HLA-A targeting gRNA
  source 1..23: mol_type = other DNA
cgcctatagatctcccgggctgg

SEQ ID NO: 2645 - DNA, 23 bp, synthetic construct
  misc_feature 1..23: note = HLA-A targeting gRNA
  source 1..23: mol_type = other DNA
cgggagatctataggcgatcagg

SEQ ID NO: 2646 - DNA, 23 bp, synthetic construct
  misc_feature 1..23: note = HLA-A targeting gRNA
  source 1..23: mol_type = other DNA
ctgatcgcctatagatctcccgg

SEQ ID NO: 2647 - DNA, 23 bp, synthetic construct
  misc_feature 1..23: note = HLA-A targeting gRNA
  source 1..23: mol_type = other DNA
ccgccgcggtctaagagcgcagg

SEQ ID NO: 2648 - DNA, 23 bp, synthetic construct
  misc_feature 1..23: note = HLA-A targeting gRNA
  source 1..23: mol_type = other DNA
ggccagcccgggagatctatagg

SEQ ID NO: 2649 - DNA, 23 bp, synthetic construct
  misc_feature 1..23: note = HLA-A targeting gRNA
  source 1..23: mol_type = other DNA
gggagatctataggcgatcaggg

SEQ ID NO: 2650 - DNA, 23 bp, synthetic construct
  misc_feature 1..23: note = HLA-A targeting gRNA
  source 1..23: mol_type = other DNA
tgatcgcctatagatctcccggg

SEQ ID NO: 2651 - DNA, 23 bp, synthetic construct
  misc_feature 1..23: note = HLA-A targeting gRNA
  source 1..23: mol_type = other DNA
ccggaacacacggaaagtgaagg

SEQ ID NO: 2652 - DNA, 23 bp, synthetic construct
  misc_feature 1..23: note = HLA-A targeting gRNA
  source 1..23: mol_type = other DNA
cacaccatccagaggatgtatgg

SEQ ID NO: 2653 - DNA, 23 bp, synthetic construct
  misc_feature 1..23: note = HLA-A targeting gRNA
  source 1..23: mol_type = other DNA
accctacgtaggttgggagaggg

SEQ ID NO: 2654 - DNA, 23 bp, synthetic construct
  misc_feature 1..23: note = HLA-A targeting gRNA
  source 1..23: mol_type = other DNA
atgaaggaccctacgtaggttgg

SEQ ID NO: 2655 - DNA, 23 bp, synthetic construct
  misc_feature 1..23: note = HLA-A targeting gRNA
  source 1..23: mol_type = other DNA
caggatgaaggaccctacgtagg

SEQ ID NO: 2656 - DNA, 23 bp, synthetic construct
  misc_feature 1..23: note = HLA-A targeting gRNA
  source 1..23: mol_type = other DNA
ccggagatctacaggcgatcagg

SEQ ID NO: 2657 - DNA, 23 bp, synthetic construct
  misc_feature 1..23: note = HLA-A targeting gRNA
  source 1..23: mol_type = other DNA
catcctggatactcacgacgcgg

SEQ ID NO: 2658 - DNA, 23 bp, synthetic construct
  misc_feature 1..23: note = HLA-A targeting gRNA
  source 1..23: mol_type = other DNA
ctacgtagggtccttcatcctgg

SEQ ID NO: 2659 - DNA, 23 bp, synthetic construct
  misc_feature 1..23: note = HLA-A targeting gRNA
  source 1..23: mol_type = other DNA
ctccctctcccaacctacgtagg

SEQ ID NO: 2660 - DNA, 23 bp, synthetic construct
  misc_feature 1..23: note = HLA-A targeting gRNA
  source 1..23: mol_type = other DNA
gaagatggctctgggaaaagagg

SEQ ID NO: 2661 - DNA, 23 bp, synthetic construct
  misc_feature 1..23: note = HLA-A targeting gRNA
  source 1..23: mol_type = other DNA
gaccctacgtaggttgggagagg

SEQ ID NO: 2662 - DNA, 23 bp, synthetic construct
  misc_feature 1..23: note = HLA-A targeting gRNA
  source 1..23: mol_type = other DNA
gtcgtgagtatccaggatgaagg

SEQ ID NO: 2663 - DNA, 23 bp, synthetic construct
  misc_feature 1..23: note = HLA-A targeting gRNA
  source 1..23: mol_type = other DNA
ccgggctgaccgcggggtcgggg

SEQ ID NO: 2664 - DNA, 23 bp, synthetic construct
  misc_feature 1..23: note = HLA-A targeting gRNA
  source 1..23: mol_type = other DNA
tccctctcccaacctacgtaggg

SEQ ID NO: 2665 - DNA, 23 bp, synthetic construct
  misc_feature 1..23: note = HLA-A targeting gRNA
  source 1..23: mol_type = other DNA
tgaaggaccctacgtaggttggg

SEQ ID NO: 2666 - DNA, 23 bp, synthetic construct
  misc_feature 1..23: note = HLA-A targeting gRNA
  source 1..23: mol_type = other DNA
aaccctcctcctgctactcttgg

SEQ ID NO: 2667 - DNA, 23 bp, synthetic construct
  misc_feature 1..23: note = HLA-A targeting gRNA
  source 1..23: mol_type = other DNA
acccgggtagccgcgccgggagg

SEQ ID NO: 2668 - DNA, 23 bp, synthetic construct
  misc_feature 1..23: note = HLA-A targeting gRNA
  source 1..23: mol_type = other DNA
accctcctcctgctactcttggg

SEQ ID NO: 2669 - DNA, 23 bp, synthetic construct
  misc_feature 1..23: note = HLA-A targeting gRNA
  source 1..23: mol_type = other DNA
ccgggtgggtcggggcggggcgg

SEQ ID NO: 2670 - DNA, 23 bp, synthetic construct
  misc_feature 1..23: note = HLA-A targeting gRNA
  source 1..23: mol_type = other DNA
aggacccgggtagccgcgccggg

SEQ ID NO: 2671 - DNA, 23 bp, synthetic construct
  misc_feature 1..23: note = HLA-A targeting gRNA
  source 1..23: mol_type = other DNA
caggacccgggtagccgcgccgg

SEQ ID NO: 2672 - DNA, 23 bp, synthetic construct
  misc_feature 1..23: note = HLA-A targeting gRNA
  source 1..23: mol_type = other DNA
ccagggcccccaagagtagcagg

SEQ ID NO: 2673 - DNA, 23 bp, synthetic construct
  misc_feature 1..23: note = HLA-A targeting gRNA
  source 1..23: mol_type = other DNA
ccccaagagtagcaggaggaggg

SEQ ID NO: 2674 - DNA, 23 bp, synthetic construct
  misc_feature 1..23: note = HLA-A targeting gRNA
  source 1..23: mol_type = other DNA
cccccaagagtagcaggaggagg

SEQ ID NO: 2675 - DNA, 23 bp, synthetic construct
  misc_feature 1..23: note = HLA-A targeting gRNA
  source 1..23: mol_type = other DNA
ccctcctcctgctactcttgggg

SEQ ID NO: 2676 - DNA, 23 bp, synthetic construct
  misc_feature 1..23: note = HLA-A targeting gRNA
  source 1..23: mol_type = other DNA
cctcctcctgctactcttggggg

SEQ ID NO: 2677 - DNA, 23 bp, synthetic construct
  misc_feature 1..23: note = HLA-A targeting gRNA
  source 1..23: mol_type = other DNA
cctgctactcttgggggccctgg

SEQ ID NO: 2678 - DNA, 23 bp, synthetic construct
  misc_feature 1..23: note = HLA-A targeting gRNA
  source 1..23: mol_type = other DNA
cgggtagccgcgccgggaggagg

SEQ ID NO: 2679 - DNA, 23 bp, synthetic construct
  misc_feature 1..23: note = HLA-A targeting gRNA
  source 1..23: mol_type = other DNA
cgggtgagtgcggggtcgtgggg

SEQ ID NO: 2680 - DNA, 23 bp, synthetic construct
  misc_feature 1..23: note = HLA-A targeting gRNA
  source 1..23: mol_type = other DNA
cgtggggaaaccgcctctgcggg

SEQ ID NO: 2681 - DNA, 23 bp, synthetic construct
  misc_feature 1..23: note = HLA-A targeting gRNA
  source 1..23: mol_type = other DNA
ctcctcccggcgcggctacccgg

SEQ ID NO: 2682 - DNA, 23 bp, synthetic construct
  misc_feature 1..23: note = HLA-A targeting gRNA
  source 1..23: mol_type = other DNA
cctcaccctgagatgggataagg

SEQ ID NO: 2683 - DNA, 23 bp, synthetic construct
  misc_feature 1..23: note = HLA-A targeting gRNA
  source 1..23: mol_type = other DNA
gcgggtgagtgcggggtcgtggg

SEQ ID NO: 2684 - DNA, 23 bp, synthetic construct
  misc_feature 1..23: note = HLA-A targeting gRNA
  source 1..23: mol_type = other DNA
cctcaccctgagatgggttaagg

SEQ ID NO: 2685 - DNA, 23 bp, synthetic construct
  misc_feature 1..23: note = HLA-A targeting gRNA
  source 1..23: mol_type = other DNA
ggcgggtgagtgcggggtcgtgg

SEQ ID NO: 2686 - DNA, 23 bp, synthetic construct
  misc_feature 1..23: note = HLA-A targeting gRNA
  source 1..23: mol_type = other DNA
cctcatggagtaggagcctgggg

SEQ ID NO: 2687 - DNA, 23 bp, synthetic construct
  misc_feature 1..23: note = HLA-A targeting gRNA
  source 1..23: mol_type = other DNA
gggcccccaagagtagcaggagg

SEQ ID NO: 2688 - DNA, 23 bp, synthetic construct
  misc_feature 1..23: note = HLA-A targeting gRNA
  source 1..23: mol_type = other DNA
gggtagccgcgccgggaggaggg

SEQ ID NO: 2689 - DNA, 23 bp, synthetic construct
  misc_feature 1..23: note = HLA-A targeting gRNA
  source 1..23: mol_type = other DNA
cctcatggattgggagcctgggg

SEQ ID NO: 2690 - DNA, 23 bp, synthetic construct
  misc_feature 1..23: note = HLA-A targeting gRNA
  source 1..23: mol_type = other DNA
gtggggaaaccgcctctgcgggg

SEQ ID NO: 2691 - DNA, 23 bp, synthetic construct
  misc_feature 1..23: note = HLA-A targeting gRNA
  source 1..23: mol_type = other DNA
tcctcccggcgcggctacccggg

SEQ ID NO: 2692 - DNA, 23 bp, synthetic construct
  misc_feature 1..23: note = HLA-A targeting gRNA
  source 1..23: mol_type = other DNA
cctccacgagctccgtgtcctgg

SEQ ID NO: 2693 - DNA, 23 bp, synthetic construct
  misc_feature 1..23: note = HLA-A targeting gRNA
  source 1..23: mol_type = other DNA
tcgtggggaaaccgcctctgcgg

SEQ ID NO: 2694 - DNA, 23 bp, synthetic construct
  misc_feature 1..23: note = HLA-A targeting gRNA
  source 1..23: mol_type = other DNA
caggttctcacaccatccagagg

SEQ ID NO: 2695 - DNA, 23 bp, synthetic construct
  misc_feature 1..23: note = HLA-A targeting gRNA
  source 1..23: mol_type = other DNA
ctctggatggtgtgagaacctgg

SEQ ID NO: 2696 - DNA, 23 bp, synthetic construct
  misc_feature 1..23: note = HLA-A targeting gRNA
  source 1..23: mol_type = other DNA
gagtctctcagcctccactcagg

SEQ ID NO: 2697 - DNA, 23 bp, synthetic construct
  misc_feature 1..23: note = HLA-A targeting gRNA
  source 1..23: mol_type = other DNA
gctgagagactcagaagtgctgg

SEQ ID NO: 2698 - DNA, 23 bp, synthetic construct
  misc_feature 1..23: note = HLA-A targeting gRNA
  source 1..23: mol_type = other DNA
cctcctgaggtctgtcgtcaggg

SEQ ID NO: 2699 - DNA, 23 bp, synthetic construct
  misc_feature 1..23: note = HLA-A targeting gRNA
  source 1..23: mol_type = other DNA
tctcagcctccactcaggtcagg

SEQ ID NO: 2700 - DNA, 23 bp, synthetic construct
  misc_feature 1..23: note = HLA-A targeting gRNA
  source 1..23: mol_type = other DNA
cctctagccacatgttctgtggg

SEQ ID NO: 2701 - DNA, 23 bp, synthetic construct
  misc_feature 1..23: note = HLA-A targeting gRNA
  source 1..23: mol_type = other DNA
cctctctggagacctttatcagg

SEQ ID NO: 2702 - DNA, 23 bp, synthetic construct
  misc_feature 1..23: note = HLA-A targeting gRNA
  source 1..23: mol_type = other DNA
cctgacctgcgccaccggccggg

SEQ ID NO: 2703 - DNA, 23 bp, synthetic construct
  misc_feature 1..23: note = HLA-A targeting gRNA
  source 1..23: mol_type = other DNA
cctgacgacagacctcaggaggg

SEQ ID NO: 2704 - DNA, 23 bp, synthetic construct
  misc_feature 1..23: note = HLA-A targeting gRNA
  source 1..23: mol_type = other DNA
cctgataaaggtctccagagagg

SEQ ID NO: 2705 - DNA, 23 bp, synthetic construct
  misc_feature 1..23: note = HLA-A targeting gRNA
  source 1..23: mol_type = other DNA
cctgatcgcctgtagatctccgg

SEQ ID NO: 2706 - DNA, 23 bp, synthetic construct
  misc_feature 1..23: note = HLA-A targeting gRNA
  source 1..23: mol_type = other DNA
cctgcagacacgtaatgtgaagg

SEQ ID NO: 2707 - DNA, 23 bp, synthetic construct
  misc_feature 1..23: note = HLA-A targeting gRNA
  source 1..23: mol_type = other DNA
cctgcgctcttagaccgcggcgg

SEQ ID NO: 2708 - DNA, 23 bp, synthetic construct
  misc_feature 1..23: note = HLA-A targeting gRNA
  source 1..23: mol_type = other DNA
cctggccctgacccagaccaggg

SEQ ID NO: 2709 - DNA, 23 bp, synthetic construct
  misc_feature 1..23: note = HLA-A targeting gRNA
  source 1..23: mol_type = other DNA
cctgggcctctcccgggacaagg

SEQ ID NO: 2710 - DNA, 23 bp, synthetic construct
  misc_feature 1..23: note = HLA-A targeting gRNA
  source 1..23: mol_type = other DNA
cctggtctgggtcagggccaggg

SEQ ID NO: 2711 - DNA, 23 bp, synthetic construct
  misc_feature 1..23: note = HLA-A targeting gRNA
  source 1..23: mol_type = other DNA
ccttaacccatctcagggtgagg

SEQ ID NO: 2712 - DNA, 23 bp, synthetic construct
  misc_feature 1..23: note = HLA-A targeting gRNA
  source 1..23: mol_type = other DNA
ccttatcccatctcagggtgagg

SEQ ID NO: 2713 - DNA, 23 bp, synthetic construct
  misc_feature 1..23: note = HLA-A targeting gRNA
  source 1..23: mol_type = other DNA
ccttcacattacgtgtctgcagg

SEQ ID NO: 2714 - DNA, 23 bp, synthetic construct
  misc_feature 1..23: note = HLA-A targeting gRNA
  source 1..23: mol_type = other DNA
ccttcacattccgcgtctcctgg

SEQ ID NO: 2715 - DNA, 23 bp, synthetic construct
  misc_feature 1..23: note = HLA-A targeting gRNA
  source 1..23: mol_type = other DNA
ccttcactttccgtgtgttccgg

SEQ ID NO: 2716 - DNA, 23 bp, synthetic construct
  misc_feature 1..23: note = HLA-A targeting gRNA
  source 1..23: mol_type = other DNA
ccttcatattccgtgtctcctgg

SEQ ID NO: 2717 - DNA, 23 bp, synthetic construct
  misc_feature 1..23: note = HLA-A targeting gRNA
  source 1..23: mol_type = other DNA
acagactgaccgagcgaacctgg

SEQ ID NO: 2718 - DNA, 23 bp, synthetic construct
  misc_feature 1..23: note = HLA-A targeting gRNA
  source 1..23: mol_type = other DNA
agactgaccgagcgaacctgggg

SEQ ID NO: 2719 - DNA, 23 bp, synthetic construct
  misc_feature 1..23: note = HLA-A targeting gRNA
  source 1..23: mol_type = other DNA
cagactgaccgagcgaacctggg

SEQ ID NO: 2720 - DNA, 23 bp, synthetic construct
  misc_feature 1..23: note = HLA-A targeting gRNA
  source 1..23: mol_type = other DNA
ccttgtcccgggagaggcccagg

SEQ ID NO: 2721 - DNA, 23 bp, synthetic construct
  misc_feature 1..23: note = HLA-A targeting gRNA
  source 1..23: mol_type = other DNA
cgaaggcggtatatggattgggg

SEQ ID NO: 2722 - DNA, 23 bp, synthetic construct
  misc_feature 1..23: note = HLA-A targeting gRNA
  source 1..23: mol_type = other DNA
gaagcaccatccacaatcatggg

SEQ ID NO: 2723 - DNA, 23 bp, synthetic construct
  misc_feature 1..23: note = HLA-A targeting gRNA
  source 1..23: mol_type = other DNA
cgacacgcagttcgtgcggttgg

SEQ ID NO: 2724 - DNA, 23 bp, synthetic construct
  misc_feature 1..23: note = HLA-A targeting gRNA
  source 1..23: mol_type = other DNA
cgaccaaccagggggatttttgg

SEQ ID NO: 2725 - DNA, 23 bp, synthetic construct
  misc_feature 1..23: note = HLA-A targeting gRNA
  source 1..23: mol_type = other DNA
cgacctgccggtacccgcggagg

SEQ ID NO: 2726 - DNA, 23 bp, synthetic construct
  misc_feature 1..23: note = HLA-A targeting gRNA
  source 1..23: mol_type = other DNA
cgacgccgcgagccaaaggatgg

SEQ ID NO: 2727 - DNA, 23 bp, synthetic construct
  misc_feature 1..23: note = HLA-A targeting gRNA
  source 1..23: mol_type = other DNA
cgacgccgcgagccagaagatgg

SEQ ID NO: 2728 - DNA, 23 bp, synthetic construct
  misc_feature 1..23: note = HLA-A targeting gRNA
  source 1..23: mol_type = other DNA
ggaagcaccatccacaatcatgg

SEQ ID NO: 2729 - DNA, 23 bp, synthetic construct
  misc_feature 1..23: note = HLA-A targeting gRNA
  source 1..23: mol_type = other DNA
gatggtgtgagaacctggcccgg

SEQ ID NO: 2730 - DNA, 23 bp, synthetic construct
  misc_feature 1..23: note = HLA-A targeting gRNA
  source 1..23: mol_type = other DNA
ctcatcccccacggacgggccgg

SEQ ID NO: 2731 - DNA, 23 bp, synthetic construct
  misc_feature 1..23: note = HLA-A targeting gRNA
  source 1..23: mol_type = other DNA
gcgacccggcccgtccgtggggg

SEQ ID NO: 2732 - DNA, 23 bp, synthetic construct
  misc_feature 1..23: note = HLA-A targeting gRNA
  source 1..23: mol_type = other DNA
cgagacccttgtcccgggagagg

SEQ ID NO: 2733 - DNA, 23 bp, synthetic construct
  misc_feature 1..23: note = HLA-A targeting gRNA
  source 1..23: mol_type = other DNA
tcatcccccacggacgggccggg

SEQ ID NO: 2734 - DNA, 23 bp, synthetic construct
  misc_feature 1..23: note = HLA-A targeting gRNA
  source 1..23: mol_type = other DNA
cgagccaaaggatggagccgcgg

SEQ ID NO: 2735 - DNA, 23 bp, synthetic construct
  misc_feature 1..23: note = HLA-A targeting gRNA
  source 1..23: mol_type = other DNA
cgagccagaagatggagccgcgg

SEQ ID NO: 2736 - DNA, 23 bp, synthetic construct
  misc_feature 1..23: note = HLA-A targeting gRNA
  source 1..23: mol_type = other DNA
cgagcccctcaccctgagatggg

SEQ ID NO: 2737 - DNA, 23 bp, synthetic construct
  misc_feature 1..23: note = HLA-A targeting gRNA
  source 1..23: mol_type = other DNA
accgggctgacctcggggtccgg

SEQ ID NO: 2738 - DNA, 23 bp, synthetic construct
  misc_feature 1..23: note = HLA-A targeting gRNA
  source 1..23: mol_type = other DNA
agaacctggcccggaccccgagg

SEQ ID NO: 2739 - DNA, 23 bp, synthetic construct
  misc_feature 1..23: note = HLA-A targeting gRNA
  source 1..23: mol_type = other DNA
cgaggacggtgaccccggcccgg

SEQ ID NO: 2740 - DNA, 23 bp, synthetic construct
  misc_feature 1..23: note = HLA-A targeting gRNA
  source 1..23: mol_type = other DNA
cgaggagacacggaatgtgaagg

SEQ ID NO: 2741 - DNA, 23 bp, synthetic construct
  misc_feature 1..23: note = HLA-A targeting gRNA
  source 1..23: mol_type = other DNA
cccggaccccgaggtcagcccgg

SEQ ID NO: 2742 - DNA, 23 bp, synthetic construct
  misc_feature 1..23: note = HLA-A targeting gRNA
  source 1..23: mol_type = other DNA
ccgggctgacctcggggtccggg

SEQ ID NO: 2743 - DNA, 23 bp, synthetic construct
  misc_feature 1..23: note = HLA-A targeting gRNA
  source 1..23: mol_type = other DNA
cgatgaagcagggctccccgcgg

SEQ ID NO: 2744 - DNA, 23 bp, synthetic construct
  misc_feature 1..23: note = HLA-A targeting gRNA
  source 1..23: mol_type = other DNA
cgggggaccgggctgacctcggg

SEQ ID NO: 2745 - DNA, 23 bp, synthetic construct
  misc_feature 1..23: note = HLA-A targeting gRNA
  source 1..23: mol_type = other DNA
ctgacctcggggtccgggccagg

SEQ ID NO: 2746 - DNA, 23 bp, synthetic construct
  misc_feature 1..23: note = HLA-A targeting gRNA
  source 1..23: mol_type = other DNA
cgatgaagcggggttccccgcgg

SEQ ID NO: 2747 - DNA, 23 bp, synthetic construct
  misc_feature 1..23: note = HLA-A targeting gRNA
  source 1..23: mol_type = other DNA
cgcacaggtaccaggggccacgg

SEQ ID NO: 2748 - DNA, 23 bp, synthetic construct
  misc_feature 1..23: note = HLA-A targeting gRNA
  source 1..23: mol_type = other DNA
cgcacgagtaccaggggccacgg

SEQ ID NO: 2749 - DNA, 23 bp, synthetic construct
  misc_feature 1..23: note = HLA-A targeting gRNA
  source 1..23: mol_type = other DNA
cgcacgggtaccagggaccacgg

SEQ ID NO: 2750 - DNA, 23 bp, synthetic construct
  misc_feature 1..23: note = HLA-A targeting gRNA
  source 1..23: mol_type = other DNA
gggggaccgggctgacctcgggg

SEQ ID NO: 2751 - DNA, 23 bp, synthetic construct
  misc_feature 1..23: note = HLA-A targeting gRNA
  source 1..23: mol_type = other DNA
tcgggggaccgggctgacctcgg

SEQ ID NO: 2752 - DNA, 23 bp, synthetic construct
  misc_feature 1..23: note = HLA-A targeting gRNA
  source 1..23: mol_type = other DNA
cccggagactgtgggcgacccgg

SEQ ID NO: 2753 - DNA, 23 bp, synthetic construct
  misc_feature 1..23: note = HLA-A targeting gRNA
  source 1..23: mol_type = other DNA
cgcactcacccgccctggtctgg

SEQ ID NO: 2754 - DNA, 23 bp, synthetic construct
  misc_feature 1..23: note = HLA-A targeting gRNA
  source 1..23: mol_type = other DNA
ccgggtcgcccacagtctccggg

SEQ ID NO: 2755 - DNA, 23 bp, synthetic construct
  misc_feature 1..23: note = HLA-A targeting gRNA
  source 1..23: mol_type = other DNA
cgcactggtaccaggggccacgg

SEQ ID NO: 2756 - DNA, 23 bp, synthetic construct
  misc_feature 1..23: note = HLA-A targeting gRNA
  source 1..23: mol_type = other DNA
gccgggtcgcccacagtctccgg

SEQ ID NO: 2757 - DNA, 23 bp, synthetic construct
  misc_feature 1..23: note = HLA-A targeting gRNA
  source 1..23: mol_type = other DNA
ggcgacccggcccgtccgtgggg

SEQ ID NO: 2758 - DNA, 23 bp, synthetic construct
  misc_feature 1..23: note = HLA-A targeting gRNA
  source 1..23: mol_type = other DNA
gggcgacccggcccgtccgtggg

SEQ ID NO: 2759 - DNA, 23 bp, synthetic construct
  misc_feature 1..23: note = HLA-A targeting gRNA
  source 1..23: mol_type = other DNA
tgggcgacccggcccgtccgtgg

SEQ ID NO: 2760 - DNA, 23 bp, synthetic construct
  misc_feature 1..23: note = HLA-A targeting gRNA
  source 1..23: mol_type = other DNA
ccggaacacacggaatgtgaagg

SEQ ID NO: 2761 - DNA, 23 bp, synthetic construct
  misc_feature 1..23: note = HLA-A targeting gRNA
  source 1..23: mol_type = other DNA
ccttcacattccgtgtgttccgg

SEQ ID NO: 2762 - DNA, 23 bp, synthetic construct
  misc_feature 1..23: note = HLA-A targeting gRNA
  source 1..23: mol_type = other DNA
gcagggtccccaggttcgctcgg

SEQ ID NO: 2763 - DNA, 23 bp, synthetic construct
  misc_feature 1..23: note = HLA-A targeting gRNA
  source 1..23: mol_type = other DNA
cgccccgccccgacccacccggg

SEQ ID NO: 2764 - DNA, 23 bp, synthetic construct
  misc_feature 1..23: note = HLA-A targeting gRNA
  source 1..23: mol_type = other DNA
gcgaacctggggaccctgcgcgg

SEQ ID NO: 2765 - DNA, 23 bp, synthetic construct
  misc_feature 1..23: note = HLA-A targeting gRNA
  source 1..23: mol_type = other DNA
acccgggaagccgcgcctggagg

SEQ ID NO: 2766 - DNA, 23 bp, synthetic construct
  misc_feature 1..23: note = HLA-A targeting gRNA
  source 1..23: mol_type = other DNA
cgccctccctctggtcttgaggg

SEQ ID NO: 2767 - DNA, 23 bp, synthetic construct
  misc_feature 1..23: note = HLA-A targeting gRNA
  source 1..23: mol_type = other DNA
agccgcgcctggaggagggtcgg

SEQ ID NO: 2768 - DNA, 23 bp, synthetic construct
  misc_feature 1..23: note = HLA-A targeting gRNA
  source 1..23: mol_type = other DNA
aggacccgggaagccgcgcctgg

SEQ ID NO: 2769 - DNA, 23 bp, synthetic construct
  misc_feature 1..23: note = HLA-A targeting gRNA
  source 1..23: mol_type = other DNA
ccccttgcttctccccacagagg

SEQ ID NO: 2770 - DNA, 23 bp, synthetic construct
  misc_feature 1..23: note = HLA-A targeting gRNA
  source 1..23: mol_type = other DNA
cctctgtggggagaagcaagggg

SEQ ID NO: 2771 - DNA, 23 bp, synthetic construct
  misc_feature 1..23: note = HLA-A targeting gRNA
  source 1..23: mol_type = other DNA
cgcctggaggagggtcgggcggg

SEQ ID NO: 2772 - DNA, 23 bp, synthetic construct
  misc_feature 1..23: note = HLA-A targeting gRNA
  source 1..23: mol_type = other DNA
cgggaagccgcgcctggaggagg

SEQ ID NO: 2773 - DNA, 23 bp, synthetic construct
  misc_feature 1..23: note = HLA-A targeting gRNA
  source 1..23: mol_type = other DNA
ctcctccaggcgcggcttcccgg

SEQ ID NO: 2774 - DNA, 23 bp, synthetic construct
  misc_feature 1..23: note = HLA-A targeting gRNA
  source 1..23: mol_type = other DNA
gacccgcccgaccctcctccagg

SEQ ID NO: 2775 - DNA, 23 bp, synthetic construct
  misc_feature 1..23: note = HLA-A targeting gRNA
  source 1..23: mol_type = other DNA
gcccgaccctcctccaggcgcgg

SEQ ID NO: 2776 - DNA, 23 bp, synthetic construct
  misc_feature 1..23: note = HLA-A targeting gRNA
  source 1..23: mol_type = other DNA
gccgcgcctggaggagggtcggg

SEQ ID NO: 2777 - DNA, 23 bp, synthetic construct
  misc_feature 1..23: note = HLA-A targeting gRNA
  source 1..23: mol_type = other DNA
gcctctgtggggagaagcaaggg

SEQ ID NO: 2778 - DNA, 23 bp, synthetic construct
  misc_feature 1..23: note = HLA-A targeting gRNA
  source 1..23: mol_type = other DNA
gcgcctggaggagggtcgggcgg

SEQ ID NO: 2779 - DNA, 23 bp, synthetic construct
  misc_feature 1..23: note = HLA-A targeting gRNA
  source 1..23: mol_type = other DNA
cgcctgtagatctccggggctgg

SEQ ID NO: 2780 - DNA, 23 bp, synthetic construct
  misc_feature 1..23: note = HLA-A targeting gRNA
  source 1..23: mol_type = other DNA
ggcctctgtggggagaagcaagg

SEQ ID NO: 2781 - DNA, 23 bp, synthetic construct
  misc_feature 1..23: note = HLA-A targeting gRNA
  source 1..23: mol_type = other DNA
gggaagccgcgcctggaggaggg

SEQ ID NO: 2782 - DNA, 23 bp, synthetic construct
  misc_feature 1..23: note = HLA-A targeting gRNA
  source 1..23: mol_type = other DNA
tcctccaggcgcggcttcccggg

SEQ ID NO: 2783 - DNA, 23 bp, synthetic construct
  misc_feature 1..23: note = HLA-A targeting gRNA
  source 1..23: mol_type = other DNA
cgcgggtaccaggggccacaggg

SEQ ID NO: 2784 - DNA, 23 bp, synthetic construct
  misc_feature 1..23: note = HLA-A targeting gRNA
  source 1..23: mol_type = other DNA
accgggggagccgcgccgggagg

SEQ ID NO: 2785 - DNA, 23 bp, synthetic construct
  misc_feature 1..23: note = HLA-A targeting gRNA
  source 1..23: mol_type = other DNA
cgctcggtcagtctgtgagtggg

SEQ ID NO: 2786 - DNA, 23 bp, synthetic construct
  misc_feature 1..23: note = HLA-A targeting gRNA
  source 1..23: mol_type = other DNA
cgctcggttagtctgtgagtggg

SEQ ID NO: 2787 - DNA, 23 bp, synthetic construct
  misc_feature 1..23: note = HLA-A targeting gRNA
  source 1..23: mol_type = other DNA
cgctgcagcgcacaggtaccagg

SEQ ID NO: 2788 - DNA, 23 bp, synthetic construct
  misc_feature 1..23: note = HLA-A targeting gRNA
  source 1..23: mol_type = other DNA
cgctgcagcgcacgagtaccagg

SEQ ID NO: 2789 - DNA, 23 bp, synthetic construct
  misc_feature 1..23: note = HLA-A targeting gRNA
  source 1..23: mol_type = other DNA
gggggagccgcgccgggaggagg

SEQ ID NO: 2790 - DNA, 23 bp, synthetic construct
  misc_feature 1..23: note = HLA-A targeting gRNA
  source 1..23: mol_type = other DNA
cgctgcagcgcactggtaccagg

SEQ ID NO: 2791 - DNA, 23 bp, synthetic construct
  misc_feature 1..23: note = HLA-A targeting gRNA
  source 1..23: mol_type = other DNA
tcctcccggcgcggctcccccgg

SEQ ID NO: 2792 - DNA, 23 bp, synthetic construct
  misc_feature 1..23: note = HLA-A targeting gRNA
  source 1..23: mol_type = other DNA
agtattgggaccggaacacacgg

SEQ ID NO: 2793 - DNA, 23 bp, synthetic construct
  misc_feature 1..23: note = HLA-A targeting gRNA
  source 1..23: mol_type = other DNA
cggagatctacaggcgatcaggg

SEQ ID NO: 2794 - DNA, 23 bp, synthetic construct
  misc_feature 1..23: note = HLA-A targeting gRNA
  source 1..23: mol_type = other DNA
cggagtctcccacttgcgctggg

SEQ ID NO: 2795 - DNA, 23 bp, synthetic construct
  misc_feature 1..23: note = HLA-A targeting gRNA
  source 1..23: mol_type = other DNA
cggcccgtccgtggggaatgagg

SEQ ID NO: 2796 - DNA, 23 bp, synthetic construct
  misc_feature 1..23: note = HLA-A targeting gRNA
  source 1..23: mol_type = other DNA
cggcccgtcgggcggagcagcgg

SEQ ID NO: 2797 - DNA, 23 bp, synthetic construct
  misc_feature 1..23: note = HLA-A targeting gRNA
  source 1..23: mol_type = other DNA
cggctactacaacgagagcgagg

SEQ ID NO: 2798 - DNA, 23 bp, synthetic construct
  misc_feature 1..23: note = HLA-A targeting gRNA
  source 1..23: mol_type = other DNA
cagcagagagcctacctggaggg

SEQ ID NO: 2799 - DNA, 23 bp, synthetic construct
  misc_feature 1..23: note = HLA-A targeting gRNA
  source 1..23: mol_type = other DNA
gcagcagagagcctacctggagg

SEQ ID NO: 2800 - DNA, 23 bp, synthetic construct
  misc_feature 1..23: note = HLA-A targeting gRNA
  source 1..23: mol_type = other DNA
cggctccatcctttggctcgcgg

SEQ ID NO: 2801 - DNA, 23 bp, synthetic construct
  misc_feature 1..23: note = HLA-A targeting gRNA
  source 1..23: mol_type = other DNA
cggctccatcttctggctcgcgg

SEQ ID NO: 2802 - DNA, 23 bp, synthetic construct
  misc_feature 1..23: note = HLA-A targeting gRNA
  source 1..23: mol_type = other DNA
ccgccgcggtccaggagcgcagg

SEQ ID NO: 2803 - DNA, 23 bp, synthetic construct
  misc_feature 1..23: note = HLA-A targeting gRNA
  source 1..23: mol_type = other DNA
cctgcgctcctggaccgcggcgg

SEQ ID NO: 2804 - DNA, 23 bp, synthetic construct
  misc_feature 1..23: note = HLA-A targeting gRNA
  source 1..23: mol_type = other DNA
ctacctggagggccggtgcgtgg

SEQ ID NO: 2805 - DNA, 23 bp, synthetic construct
  misc_feature 1..23: note = HLA-A targeting gRNA
  source 1..23: mol_type = other DNA
ggacctgcgctcctggaccgcgg

SEQ ID NO: 2806 - DNA, 23 bp, synthetic construct
  misc_feature 1..23: note = HLA-A targeting gRNA
  source 1..23: mol_type = other DNA
ggacgggctccgcagatacctgg

SEQ ID NO: 2807 - DNA, 23 bp, synthetic construct
  misc_feature 1..23: note = HLA-A targeting gRNA
  source 1..23: mol_type = other DNA
ggagcagcagagagcctacctgg

SEQ ID NO: 2808 - DNA, 23 bp, synthetic construct
  misc_feature 1..23: note = HLA-A targeting gRNA
  source 1..23: mol_type = other DNA
cagacacctggagaacgggaagg

SEQ ID NO: 2809 - DNA, 23 bp, synthetic construct
  misc_feature 1..23: note = HLA-A targeting gRNA
  source 1..23: mol_type = other DNA
accttgattatggcggtgatggg

SEQ ID NO: 2810 - DNA, 23 bp, synthetic construct
  misc_feature 1..23: note = HLA-A targeting gRNA
  source 1..23: mol_type = other DNA
atttatcaccttgattatggcgg

SEQ ID NO: 2811 - DNA, 23 bp, synthetic construct
  misc_feature 1..23: note = HLA-A targeting gRNA
  source 1..23: mol_type = other DNA
caccttgattatggcggtgatgg

SEQ ID NO: 2812 - DNA, 23 bp, synthetic construct
  misc_feature 1..23: note = HLA-A targeting gRNA
  source 1..23: mol_type = other DNA
cagatttatcaccttgattatgg

SEQ ID NO: 2813 - DNA, 23 bp, synthetic construct
  misc_feature 1..23: note = HLA-A targeting gRNA
  source 1..23: mol_type = other DNA
tcccatcaccgccataatcaagg

SEQ ID NO: 2814 - DNA, 23 bp, synthetic construct
  misc_feature 1..23: note = HLA-A targeting gRNA
  source 1..23: mol_type = other DNA
cggggctcgggggagctgggcgg

SEQ ID NO: 2815 - DNA, 23 bp, synthetic construct
  misc_feature 1..23: note = HLA-A targeting gRNA
  source 1..23: mol_type = other DNA
ctccgcagacacctggagaacgg

SEQ ID NO: 2816 - DNA, 23 bp, synthetic construct
  misc_feature 1..23: note = HLA-A targeting gRNA
  source 1..23: mol_type = other DNA
tcccgttctccaggtgtctgcgg

SEQ ID NO: 2817 - DNA, 23 bp, synthetic construct
  misc_feature 1..23: note = HLA-A targeting gRNA
  source 1..23: mol_type = other DNA
tccgcagacacctggagaacggg

SEQ ID NO: 2818 - DNA, 23 bp, synthetic construct
  misc_feature 1..23: note = HLA-A targeting gRNA
  source 1..23: mol_type = other DNA
cgggggagctgggcggggctcgg

SEQ ID NO: 2819 - DNA, 23 bp, synthetic construct
  misc_feature 1..23: note = HLA-A targeting gRNA
  source 1..23: mol_type = other DNA
cgggggctgggctgaccgcgggg

SEQ ID NO: 2820 - DNA, 23 bp, synthetic construct
  misc_feature 1..23: note = HLA-A targeting gRNA
  source 1..23: mol_type = other DNA
cggggtcaccgtcctcgctctgg

SEQ ID NO: 2821 - DNA, 23 bp, synthetic construct
  misc_feature 1..23: note = HLA-A targeting gRNA
  source 1..23: mol_type = other DNA
ggagtggctccgcagacacctgg

SEQ ID NO: 2822 - DNA, 23 bp, synthetic construct
  misc_feature 1..23: note = HLA-A targeting gRNA
  source 1..23: mol_type = other DNA
cgggtgggtcggggcggggcggg

SEQ ID NO: 2823 - DNA, 23 bp, synthetic construct
  misc_feature 1..23: note = HLA-A targeting gRNA
  source 1..23: mol_type = other DNA
gaagaaatacctcatggagtggg

SEQ ID NO: 2824 - DNA, 23 bp, synthetic construct
  misc_feature 1..23: note = HLA-A targeting gRNA
  source 1..23: mol_type = other DNA
tgaagaaatacctcatggagtgg

SEQ ID NO: 2825 - DNA, 23 bp, synthetic construct
  misc_feature 1..23: note = HLA-A targeting gRNA
  source 1..23: mol_type = other DNA
atttctccacatccgtgtcccgg

SEQ ID NO: 2826 - DNA, 23 bp, synthetic construct
  misc_feature 1..23: note = HLA-A targeting gRNA
  source 1..23: mol_type = other DNA
tccacatccgtgtcccggcccgg

SEQ ID NO: 2827 - DNA, 23 bp, synthetic construct
  misc_feature 1..23: note = HLA-A targeting gRNA
  source 1..23: mol_type = other DNA
cggtccatgcggcggagcagcgg

SEQ ID NO: 2828 - DNA, 23 bp, synthetic construct
  misc_feature 1..23: note = HLA-A targeting gRNA
  source 1..23: mol_type = other DNA
cggtgagtgaccccggccggtgg

SEQ ID NO: 2829 - DNA, 23 bp, synthetic construct
  misc_feature 1..23: note = HLA-A targeting gRNA
  source 1..23: mol_type = other DNA
cgtagcccacagcgatgaagcgg

SEQ ID NO: 2830 - DNA, 23 bp, synthetic construct
  misc_feature 1..23: note = HLA-A targeting gRNA
  source 1..23: mol_type = other DNA
cgtccacgcaccggccctccagg

SEQ ID NO: 2831 - DNA, 23 bp, synthetic construct
  misc_feature 1..23: note = HLA-A targeting gRNA
  source 1..23: mol_type = other DNA
cgtccacgcactcgccctccagg

SEQ ID NO: 2832 - DNA, 23 bp, synthetic construct
  misc_feature 1..23: note = HLA-A targeting gRNA
  source 1..23: mol_type = other DNA
cgtcgcaaccatacatcctctgg

SEQ ID NO: 2833 - DNA, 23 bp, synthetic construct
  misc_feature 1..23: note = HLA-A targeting gRNA
  source 1..23: mol_type = other DNA
cgtcttggggggggtctgtcagg

SEQ ID NO: 2834 - DNA, 23 bp, synthetic construct
  misc_feature 1..23: note = HLA-A targeting gRNA
  source 1..23: mol_type = other DNA
cgtgacctgcgcccccggccggg

SEQ ID NO: 2835 - DNA, 23 bp, synthetic construct
  misc_feature 1..23: note = HLA-A targeting gRNA
  source 1..23: mol_type = other DNA
cgtgctgccggtacccgcggagg

SEQ ID NO: 2836 - DNA, 23 bp, synthetic construct
  misc_feature 1..23: note = HLA-A targeting gRNA
  source 1..23: mol_type = other DNA
cgtggaggccaggcctgcagggg

SEQ ID NO: 2837 - DNA, 23 bp, synthetic construct
  misc_feature 1..23: note = HLA-A targeting gRNA
  source 1..23: mol_type = other DNA
cgtggcagccatacatcatctgg

SEQ ID NO: 2838 - DNA, 23 bp, synthetic construct
  misc_feature 1..23: note = HLA-A targeting gRNA
  source 1..23: mol_type = other DNA
cgtgggcatccttgctggcctgg

SEQ ID NO: 2839 - DNA, 23 bp, synthetic construct
  misc_feature 1..23: note = HLA-A targeting gRNA
  source 1..23: mol_type = other DNA
cgtgtcgtccatgtagcccacgg

SEQ ID NO: 2840 - DNA, 23 bp, synthetic construct
  misc_feature 1..23: note = HLA-A targeting gRNA
  source 1..23: mol_type = other DNA
ctacctggagggcgagttcgtgg

SEQ ID NO: 2841 - DNA, 23 bp, synthetic construct
  misc_feature 1..23: note = HLA-A targeting gRNA
  source 1..23: mol_type = other DNA
ctagaggaacctcgtagccttgg

SEQ ID NO: 2842 - DNA, 23 bp, synthetic construct
  misc_feature 1..23: note = HLA-A targeting gRNA
  source 1..23: mol_type = other DNA
ctataatatcgccctccctctgg

SEQ ID NO: 2843 - DNA, 23 bp, synthetic construct
  misc_feature 1..23: note = HLA-A targeting gRNA
  source 1..23: mol_type = other DNA
ctcacccactcctcgcccccagg

SEQ ID NO: 2844 - DNA, 23 bp, synthetic construct
  misc_feature 1..23: note = HLA-A targeting gRNA
  source 1..23: mol_type = other DNA
ctcagatcaccaagcacaagtgg

SEQ ID NO: 2845 - DNA, 23 bp, synthetic construct
  misc_feature 1..23: note = HLA-A targeting gRNA
  source 1..23: mol_type = other DNA
ctcagatcaccgagcgcaagtgg

SEQ ID NO: 2846 - DNA, 23 bp, synthetic construct
  misc_feature 1..23: note = HLA-A targeting gRNA
  source 1..23: mol_type = other DNA
ctcagctactcctcgcccccagg

SEQ ID NO: 2847 - DNA, 23 bp, synthetic construct
  misc_feature 1..23: note = HLA-A targeting gRNA
  source 1..23: mol_type = other DNA
ctcaggagggcggttggtccagg

SEQ ID NO: 2848 - DNA, 23 bp, synthetic construct
  misc_feature 1..23: note = HLA-A targeting gRNA
  source 1..23: mol_type = other DNA
ctcatggagtaggagcctggggg

SEQ ID NO: 2849 - DNA, 23 bp, synthetic construct
  misc_feature 1..23: note = HLA-A targeting gRNA
  source 1..23: mol_type = other DNA
ctcattccccacggacgggccgg

SEQ ID NO: 2850 - DNA, 23 bp, synthetic construct
  misc_feature 1..23: note = HLA-A targeting gRNA
  source 1..23: mol_type = other DNA
ctccacagggtagaagctcaggg

SEQ ID NO: 2851 - DNA, 23 bp, synthetic construct
  misc_feature 1..23: note = HLA-A targeting gRNA
  source 1..23: mol_type = other DNA
ctccagcgatcacagctccaagg

SEQ ID NO: 2852 - DNA, 23 bp, synthetic construct
  misc_feature 1..23: note = HLA-A targeting gRNA
  source 1..23: mol_type = other DNA
ctcccaaccacaatatcccaagg

SEQ ID NO: 2853 - DNA, 23 bp, synthetic construct
  misc_feature 1..23: note = HLA-A targeting gRNA
  source 1..23: mol_type = other DNA
ctccctcaagaccagagggaggg

SEQ ID NO: 2854 - DNA, 23 bp, synthetic construct
  misc_feature 1..23: note = HLA-A targeting gRNA
  source 1..23: mol_type = other DNA
ctccctcaggagcagagggaggg

SEQ ID NO: 2855 - DNA, 23 bp, synthetic construct
  misc_feature 1..23: note = HLA-A targeting gRNA
  source 1..23: mol_type = other DNA
ctccctccttaacccatctcagg

SEQ ID NO: 2856 - DNA, 23 bp, synthetic construct
  misc_feature 1..23: note = HLA-A targeting gRNA
  source 1..23: mol_type = other DNA
ctccctccttatcccatctcagg

SEQ ID NO: 2857 - DNA, 23 bp, synthetic construct
  misc_feature 1..23: note = HLA-A targeting gRNA
  source 1..23: mol_type = other DNA
ctccctccttttctaactgtggg

SEQ ID NO: 2858 - DNA, 23 bp, synthetic construct
  misc_feature 1..23: note = HLA-A targeting gRNA
  source 1..23: mol_type = other DNA
ctccgcagatacctgaagaacgg

SEQ ID NO: 2859 - DNA, 23 bp, synthetic construct
  misc_feature 1..23: note = HLA-A targeting gRNA
  source 1..23: mol_type = other DNA
ctccgcctcccacttgcgcttgg

SEQ ID NO: 2860 - DNA, 23 bp, synthetic construct
  misc_feature 1..23: note = HLA-A targeting gRNA
  source 1..23: mol_type = other DNA
ctcctggaccgcggcggacatgg

SEQ ID NO: 2861 - DNA, 23 bp, synthetic construct
  misc_feature 1..23: note = HLA-A targeting gRNA
  source 1..23: mol_type = other DNA
ctccttggagctgtgatcgctgg

SEQ ID NO: 2862 - DNA, 23 bp, synthetic construct
  misc_feature 1..23: note = HLA-A targeting gRNA
  source 1..23: mol_type = other DNA
ctcggagccccgcggcttcgggg

SEQ ID NO: 2863 - DNA, 23 bp, synthetic construct
  misc_feature 1..23: note = HLA-A targeting gRNA
  source 1..23: mol_type = other DNA
ctcggagtcccgcggcttcgggg

SEQ ID NO: 2864 - DNA, 23 bp, synthetic construct
  misc_feature 1..23: note = HLA-A targeting gRNA
  source 1..23: mol_type = other DNA
ctcgggggctgggctgaccgcgg

SEQ ID NO: 2865 - DNA, 23 bp, synthetic construct
  misc_feature 1..23: note = HLA-A targeting gRNA
  source 1..23: mol_type = other DNA
ctcgtggaggccaggcctgcagg

SEQ ID NO: 2866 - DNA, 23 bp, synthetic construct
  misc_feature 1..23: note = HLA-A targeting gRNA
  source 1..23: mol_type = other DNA
ctcgttgtagtagccgcgcaggg

SEQ ID NO: 2867 - DNA, 23 bp, synthetic construct
  misc_feature 1..23: note = HLA-A targeting gRNA
  source 1..23: mol_type = other DNA
ctctcaactgctccgcccaacgg

SEQ ID NO: 2868 - DNA, 23 bp, synthetic construct
  misc_feature 1..23: note = HLA-A targeting gRNA
  source 1..23: mol_type = other DNA
ctctcaactgctcctccacacgg

SEQ ID NO: 2869 - DNA, 23 bp, synthetic construct
  misc_feature 1..23: note = HLA-A targeting gRNA
  source 1..23: mol_type = other DNA
ctctcaactgctctgccacacgg

SEQ ID NO: 2870 - DNA, 23 bp, synthetic construct
  misc_feature 1..23: note = HLA-A targeting gRNA
  source 1..23: mol_type = other DNA
ctctcagctgctccgccacatgg

SEQ ID NO: 2871 - DNA, 23 bp, synthetic construct
  misc_feature 1..23: note = HLA-A targeting gRNA
  source 1..23: mol_type = other DNA
ctctcagctgctccgcccgacgg

SEQ ID NO: 2872 - DNA, 23 bp, synthetic construct
  misc_feature 1..23: note = HLA-A targeting gRNA
  source 1..23: mol_type = other DNA
ctctcccgggacaagggtctcgg

SEQ ID NO: 2873 - DNA, 23 bp, synthetic construct
  misc_feature 1..23: note = HLA-A targeting gRNA
  source 1..23: mol_type = other DNA
ctctccgctgctccgcccgacgg

SEQ ID NO: 2874 - DNA, 23 bp, synthetic construct
  misc_feature 1..23: note = HLA-A targeting gRNA
  source 1..23: mol_type = other DNA
ctctccgctgctccgccgcatgg

SEQ ID NO: 2875 - DNA, 23 bp, synthetic construct
  misc_feature 1..23: note = HLA-A targeting gRNA
  source 1..23: mol_type = other DNA
ctctcggtcagtctgtgactggg

SEQ ID NO: 2876 - DNA, 23 bp, synthetic construct
  misc_feature 1..23: note = HLA-A targeting gRNA
  source 1..23: mol_type = other DNA
ctctctgctgctccgccacacgg

SEQ ID NO: 2877 - DNA, 23 bp, synthetic construct
  misc_feature 1..23: note = HLA-A targeting gRNA
  source 1..23: mol_type = other DNA
ctctctgctgctccgcctcatgg

SEQ ID NO: 2878 - DNA, 23 bp, synthetic construct
  misc_feature 1..23: note = HLA-A targeting gRNA
  source 1..23: mol_type = other DNA
ctctctggagacctttatcaggg

SEQ ID NO: 2879 - DNA, 23 bp, synthetic construct
  misc_feature 1..23: note = HLA-A targeting gRNA
  source 1..23: mol_type = other DNA
ctctgcagggtagaagcccaggg

SEQ ID NO: 2880 - DNA, 23 bp, synthetic construct
  misc_feature 1..23: note = HLA-A targeting gRNA
  source 1..23: mol_type = other DNA
ctctggatgctgtgagaacctgg

SEQ ID NO: 2881 - DNA, 23 bp, synthetic construct
  misc_feature 1..23: note = HLA-A targeting gRNA
  source 1..23: mol_type = other DNA
ctctggggtccaaggctacgagg

SEQ ID NO: 2882 - DNA, 23 bp, synthetic construct
  misc_feature 1..23: note = HLA-A targeting gRNA
  source 1..23: mol_type = other DNA
ctcttagaccgcggcggacatgg

SEQ ID NO: 2883 - DNA, 23 bp, synthetic construct
  misc_feature 1..23: note = HLA-A targeting gRNA
  source 1..23: mol_type = other DNA
ctgaaaatgaaaccggctaaagg

SEQ ID NO: 2884 - DNA, 23 bp, synthetic construct
  misc_feature 1..23: note = HLA-A targeting gRNA
  source 1..23: mol_type = other DNA
ctgaccatgaggccactctgagg

SEQ ID NO: 2885 - DNA, 23 bp, synthetic construct
  misc_feature 1..23: note = HLA-A targeting gRNA
  source 1..23: mol_type = other DNA
ccccccgggttggtcggggcggg

SEQ ID NO: 2886 - DNA, 23 bp, synthetic construct
  misc_feature 1..23: note = HLA-A targeting gRNA
  source 1..23: mol_type = other DNA
cccccgggttggtcggggcgggg

SEQ ID NO: 2887 - DNA, 23 bp, synthetic construct
  misc_feature 1..23: note = HLA-A targeting gRNA
  source 1..23: mol_type = other DNA
ctgacctgcgccaccggccgggg

SEQ ID NO: 2888 - DNA, 23 bp, synthetic construct
  misc_feature 1..23: note = HLA-A targeting gRNA
  source 1..23: mol_type = other DNA
ccccgccccgaccaacccggggg

SEQ ID NO: 2889 - DNA, 23 bp, synthetic construct
  misc_feature 1..23: note = HLA-A targeting gRNA
  source 1..23: mol_type = other DNA
cccgccccgaccaacccgggggg

SEQ ID NO: 2890 - DNA, 23 bp, synthetic construct
  misc_feature 1..23: note = HLA-A targeting gRNA
  source 1..23: mol_type = other DNA
ccgccccgccccgaccaacccgg

SEQ ID NO: 2891 - DNA, 23 bp, synthetic construct
  misc_feature 1..23: note = HLA-A targeting gRNA
  source 1..23: mol_type = other DNA
ccgggttggtcggggcggggcgg

SEQ ID NO: 2892 - DNA, 23 bp, synthetic construct
  misc_feature 1..23: note = HLA-A targeting gRNA
  source 1..23: mol_type = other DNA
ctgaggtccttgggatattgtgg

SEQ ID NO: 2893 - DNA, 23 bp, synthetic construct
  misc_feature 1..23: note = HLA-A targeting gRNA
  source 1..23: mol_type = other DNA
cgccccgccccgaccaacccggg

SEQ ID NO: 2894 - DNA, 23 bp, synthetic construct
  misc_feature 1..23: note = HLA-A targeting gRNA
  source 1..23: mol_type = other DNA
gccccgccccgaccaacccgggg

SEQ ID NO: 2895 - DNA, 23 bp, synthetic construct
  misc_feature 1..23: note = HLA-A targeting gRNA
  source 1..23: mol_type = other DNA
ctgatcgcctgtagatctccggg

SEQ ID NO: 2896 - DNA, 23 bp, synthetic construct
  misc_feature 1..23: note = HLA-A targeting gRNA
  source 1..23: mol_type = other DNA
tccccccgggttggtcggggcgg

SEQ ID NO: 2897 - DNA, 23 bp, synthetic construct
  misc_feature 1..23: note = HLA-A targeting gRNA
  source 1..23: mol_type = other DNA
ctgatgtgtgttgggtgttgggg

SEQ ID NO: 2898 - DNA, 23 bp, synthetic construct
  misc_feature 1..23: note = HLA-A targeting gRNA
  source 1..23: mol_type = other DNA
ctgcagagatcacactgacctgg

SEQ ID NO: 2899 - DNA, 23 bp, synthetic construct
  misc_feature 1..23: note = HLA-A targeting gRNA
  source 1..23: mol_type = other DNA
ctgcagcgcacaggtaccagggg

SEQ ID NO: 2900 - DNA, 23 bp, synthetic construct
  misc_feature 1..23: note = HLA-A targeting gRNA
  source 1..23: mol_type = other DNA
ctgcagcgcacgagtaccagggg

SEQ ID NO: 2901 - DNA, 23 bp, synthetic construct
  misc_feature 1..23: note = HLA-A targeting gRNA
  source 1..23: mol_type = other DNA
cgggagggaaaccgcctctgcgg

SEQ ID NO: 2902 - DNA, 23 bp, synthetic construct
  misc_feature 1..23: note = HLA-A targeting gRNA
  source 1..23: mol_type = other DNA
ggagggaaaccgcctctgcgggg

SEQ ID NO: 2903 - DNA, 23 bp, synthetic construct
  misc_feature 1..23: note = HLA-A targeting gRNA
  source 1..23: mol_type = other DNA
ctgcagcgcactggtaccagggg

SEQ ID NO: 2904 - DNA, 23 bp, synthetic construct
  misc_feature 1..23: note = HLA-A targeting gRNA
  source 1..23: mol_type = other DNA
gggagggaaaccgcctctgcggg

SEQ ID NO: 2905 - DNA, 23 bp, synthetic construct
  misc_feature 1..23: note = HLA-A targeting gRNA
  source 1..23: mol_type = other DNA
ctgcccggccccgaccaaccagg

SEQ ID NO: 2906 - DNA, 23 bp, synthetic construct
  misc_feature 1..23: note = HLA-A targeting gRNA
  source 1..23: mol_type = other DNA
ctgccgccggtgtgtgtcaaagg

SEQ ID NO: 2907 - DNA, 23 bp, synthetic construct
  misc_feature 1..23: note = HLA-A targeting gRNA
  source 1..23: mol_type = other DNA
ctgccttgtgtgggactgaaagg

SEQ ID NO: 2908 - DNA, 23 bp, synthetic construct
  misc_feature 1..23: note = HLA-A targeting gRNA
  source 1..23: mol_type = other DNA
ggtgtgacccctcactgtgatgg

SEQ ID NO: 2909 - DNA, 23 bp, synthetic construct
  misc_feature 1..23: note = HLA-A targeting gRNA
  source 1..23: mol_type = other DNA
ctcagccactgctcgcccccagg

SEQ ID NO: 2910 - DNA, 23 bp, synthetic construct
  misc_feature 1..23: note = HLA-A targeting gRNA
  source 1..23: mol_type = other DNA
gggagcctgggggcgagcagtgg

SEQ ID NO: 2911 - DNA, 23 bp, synthetic construct
  misc_feature 1..23: note = HLA-A targeting gRNA
  source 1..23: mol_type = other DNA
ctggaaacccgacacccaatagg

SEQ ID NO: 2912 - DNA, 23 bp, synthetic construct
  misc_feature 1..23: note = HLA-A targeting gRNA
  source 1..23: mol_type = other DNA
aagacagctctgggaaaagaggg

SEQ ID NO: 2913 - DNA, 23 bp, synthetic construct
  misc_feature 1..23: note = HLA-A targeting gRNA
  source 1..23: mol_type = other DNA
ctggaaacccgacacccaattgg

SEQ ID NO: 2914 - DNA, 23 bp, synthetic construct
  misc_feature 1..23: note = HLA-A targeting gRNA
  source 1..23: mol_type = other DNA
agacagctctgggaaaagagggg

SEQ ID NO: 2915 - DNA, 23 bp, synthetic construct
  misc_feature 1..23: note = HLA-A targeting gRNA
  source 1..23: mol_type = other DNA
agctctgggaaaagaggggaagg

SEQ ID NO: 2916 - DNA, 23 bp, synthetic construct
  misc_feature 1..23: note = HLA-A targeting gRNA
  source 1..23: mol_type = other DNA
ctggaccaaccgccctcctgagg

SEQ ID NO: 2917 - DNA, 23 bp, synthetic construct
  misc_feature 1..23: note = HLA-A targeting gRNA
  source 1..23: mol_type = other DNA
gaagacagctctgggaaaagagg

SEQ ID NO: 2918 - DNA, 23 bp, synthetic construct
  misc_feature 1..23: note = HLA-A targeting gRNA
  source 1..23: mol_type = other DNA
ctggaccaatcgccctcctgagg

SEQ ID NO: 2919 - DNA, 23 bp, synthetic construct
  misc_feature 1..23: note = HLA-A targeting gRNA
  source 1..23: mol_type = other DNA
gtgggctgggaagacagctctgg

SEQ ID NO: 2920 - DNA, 23 bp, synthetic construct
  misc_feature 1..23: note = HLA-A targeting gRNA
  source 1..23: mol_type = other DNA
ctggagggccggtgcgtggacgg

SEQ ID NO: 2921 - DNA, 23 bp, synthetic construct
  misc_feature 1..23: note = HLA-A targeting gRNA
  source 1..23: mol_type = other DNA
tgggctgggaagacagctctggg

SEQ ID NO: 2922 - DNA, 23 bp, synthetic construct
  misc_feature 1..23: note = HLA-A targeting gRNA
  source 1..23: mol_type = other DNA
ctggagggcgagtgcgtggacgg

SEQ ID NO: 2923 - DNA, 23 bp, synthetic construct
  misc_feature 1..23: note = HLA-A targeting gRNA
  source 1..23: mol_type = other DNA
aaaaggagggagttacactcagg

SEQ ID NO: 2924 - DNA, 23 bp, synthetic construct
  misc_feature 1..23: note = HLA-A targeting gRNA
  source 1..23: mol_type = other DNA
acagacctcaggagggctattgg

SEQ ID NO: 2925 - DNA, 23 bp, synthetic construct
  misc_feature 1..23: note = HLA-A targeting gRNA
  source 1..23: mol_type = other DNA
ctcaggagggctattggtccagg

SEQ ID NO: 2926 - DNA, 23 bp, synthetic construct
  misc_feature 1..23: note = HLA-A targeting gRNA
  source 1..23: mol_type = other DNA
ctggaccaatagccctcctgagg

SEQ ID NO: 2927 - DNA, 23 bp, synthetic construct
  misc_feature 1..23: note = HLA-A targeting gRNA
  source 1..23: mol_type = other DNA
gctcttcctcctccacatcacgg

SEQ ID NO: 2928 - DNA, 23 bp, synthetic construct
  misc_feature 1..23: note = HLA-A targeting gRNA
  source 1..23: mol_type = other DNA
tcgctgccgtgatgtggaggagg

SEQ ID NO: 2929 - DNA, 23 bp, synthetic construct
  misc_feature 1..23: note = HLA-A targeting gRNA
  source 1..23: mol_type = other DNA
agcatgcgatgggctgtttaagg

SEQ ID NO: 2930 - DNA, 23 bp, synthetic construct
  misc_feature 1..23: note = HLA-A targeting gRNA
  source 1..23: mol_type = other DNA
ctgggcctctcccgggacaaggg

SEQ ID NO: 2931 - DNA, 23 bp, synthetic construct
  misc_feature 1..23: note = HLA-A targeting gRNA
  source 1..23: mol_type = other DNA
aaaatctctgaaggagtgacggg

SEQ ID NO: 2932 - DNA, 23 bp, synthetic construct
  misc_feature 1..23: note = HLA-A targeting gRNA
  source 1..23: mol_type = other DNA
aagcaaggggccctcctggcggg

SEQ ID NO: 2933 - DNA, 23 bp, synthetic construct
  misc_feature 1..23: note = HLA-A targeting gRNA
  source 1..23: mol_type = other DNA
aagtcgctgttcccttctcaggg

SEQ ID NO: 2934 - DNA, 23 bp, synthetic construct
  misc_feature 1..23: note = HLA-A targeting gRNA
  source 1..23: mol_type = other DNA
ctgggcggggctcgggggctggg

SEQ ID NO: 2935 - DNA, 23 bp, synthetic construct
  misc_feature 1..23: note = HLA-A targeting gRNA
  source 1..23: mol_type = other DNA
aatcttctattccctgagaaggg

SEQ ID NO: 2936 - DNA, 23 bp, synthetic construct
  misc_feature 1..23: note = HLA-A targeting gRNA
  source 1..23: mol_type = other DNA
agcaaggggccctcctggcgggg

SEQ ID NO: 2937 - DNA, 23 bp, synthetic construct
  misc_feature 1..23: note = HLA-A targeting gRNA
  source 1..23: mol_type = other DNA
aggaagagctcaggtggagaagg

SEQ ID NO: 2938 - DNA, 23 bp, synthetic construct
  misc_feature 1..23: note = HLA-A targeting gRNA
  source 1..23: mol_type = other DNA
aggaccgggggagccgcgccggg

SEQ ID NO: 2939 - DNA, 23 bp, synthetic construct
  misc_feature 1..23: note = HLA-A targeting gRNA
  source 1..23: mol_type = other DNA
ctgggtgggcccatgattgtggg

SEQ ID NO: 2940 - DNA, 23 bp, synthetic construct
  misc_feature 1..23: note = HLA-A targeting gRNA
  source 1..23: mol_type = other DNA
ctggttggtcggggccgggcagg

SEQ ID NO: 2941 - DNA, 23 bp, synthetic construct
  misc_feature 1..23: note = HLA-A targeting gRNA
  source 1..23: mol_type = other DNA
caagatggccacatgcgtgctgg

SEQ ID NO: 2942 - DNA, 23 bp, synthetic construct
  misc_feature 1..23: note = HLA-A targeting gRNA
  source 1..23: mol_type = other DNA
caggaccgggggagccgcgccgg

SEQ ID NO: 2943 - DNA, 23 bp, synthetic construct
  misc_feature 1..23: note = HLA-A targeting gRNA
  source 1..23: mol_type = other DNA
ctggttgtagtagccgtgcaggg

SEQ ID NO: 2944 - DNA, 23 bp, synthetic construct
  misc_feature 1..23: note = HLA-A targeting gRNA
  source 1..23: mol_type = other DNA
cccggtcctgcgcccccgccagg

SEQ ID NO: 2945 - DNA, 23 bp, synthetic construct
  misc_feature 1..23: note = HLA-A targeting gRNA
  source 1..23: mol_type = other DNA
ctgtggagatcacactgacctgg

SEQ ID NO: 2946 - DNA, 23 bp, synthetic construct
  misc_feature 1..23: note = HLA-A targeting gRNA
  source 1..23: mol_type = other DNA
cctggcgggggcgcaggaccggg

SEQ ID NO: 2947 - DNA, 23 bp, synthetic construct
  misc_feature 1..23: note = HLA-A targeting gRNA
  source 1..23: mol_type = other DNA
ctggcgggggcgcaggaccgggg

SEQ ID NO: 2948 - DNA, 23 bp, synthetic construct
  misc_feature 1..23: note = HLA-A targeting gRNA
  source 1..23: mol_type = other DNA
gaagcaaggggccctcctggcgg

SEQ ID NO: 2949 - DNA, 23 bp, synthetic construct
  misc_feature 1..23: note = HLA-A targeting gRNA
  source 1..23: mol_type = other DNA
gaagtcgctgttcccttctcagg

SEQ ID NO: 2950 - DNA, 23 bp, synthetic construct
  misc_feature 1..23: note = HLA-A targeting gRNA
  source 1..23: mol_type = other DNA
cttaacccatctcagggtgaggg

SEQ ID NO: 2951 - DNA, 23 bp, synthetic construct
  misc_feature 1..23: note = HLA-A targeting gRNA
  source 1..23: mol_type = other DNA
gagaagggaacagcgacttctgg

SEQ ID NO: 2952 - DNA, 23 bp, synthetic construct
  misc_feature 1..23: note = HLA-A targeting gRNA
  source 1..23: mol_type = other DNA
gatggccacatgcgtgctggtgg

SEQ ID NO: 2953 - DNA, 23 bp, synthetic construct
  misc_feature 1..23: note = HLA-A targeting gRNA
  source 1..23: mol_type = other DNA
gcaaggggccctcctggcggggg

SEQ ID NO: 2954 - DNA, 23 bp, synthetic construct
  misc_feature 1..23: note = HLA-A targeting gRNA
  source 1..23: mol_type = other DNA
ggaagagctcaggtggagaaggg

SEQ ID NO: 2955 - DNA, 23 bp, synthetic construct
  misc_feature 1..23: note = HLA-A targeting gRNA
  source 1..23: mol_type = other DNA
cttatcccatctcagggtgaggg

SEQ ID NO: 2956 - DNA, 23 bp, synthetic construct
  misc_feature 1..23: note = HLA-A targeting gRNA
  source 1..23: mol_type = other DNA
cttcacactcaatatgtgtgggg

SEQ ID NO: 2957 - DNA, 23 bp, synthetic construct
  misc_feature 1..23: note = HLA-A targeting gRNA
  source 1..23: mol_type = other DNA
ggagaagcaaggggccctcctgg

SEQ ID NO: 2958 - DNA, 23 bp, synthetic construct
  misc_feature 1..23: note = HLA-A targeting gRNA
  source 1..23: mol_type = other DNA
ggccctcctggcgggggcgcagg

SEQ ID NO: 2959 - DNA, 23 bp, synthetic construct
  misc_feature 1..23: note = HLA-A targeting gRNA
  source 1..23: mol_type = other DNA
ggtcctgcgcccccgccaggagg

SEQ ID NO: 2960 - DNA, 23 bp, synthetic construct
  misc_feature 1..23: note = HLA-A targeting gRNA
  source 1..23: mol_type = other DNA
gtcctgcgcccccgccaggaggg

SEQ ID NO: 2961 - DNA, 23 bp, synthetic construct
  misc_feature 1..23: note = HLA-A targeting gRNA
  source 1..23: mol_type = other DNA
cttcatcgccgtgggctacatgg

SEQ ID NO: 2962 - DNA, 23 bp, synthetic construct
  misc_feature 1..23: note = HLA-A targeting gRNA
  source 1..23: mol_type = other DNA
taaaatctctgaaggagtgacgg

SEQ ID NO: 2963 - DNA, 23 bp, synthetic construct
  misc_feature 1..23: note = HLA-A targeting gRNA
  source 1..23: mol_type = other DNA
cttcatcgctgtgggctacgtgg

SEQ ID NO: 2964 - DNA, 23 bp, synthetic construct
  misc_feature 1..23: note = HLA-A targeting gRNA
  source 1..23: mol_type = other DNA
taatcttctattccctgagaagg

SEQ ID NO: 2965 - DNA, 23 bp, synthetic construct
  misc_feature 1..23: note = HLA-A targeting gRNA
  source 1..23: mol_type = other DNA
tcctggcgggggcgcaggaccgg

SEQ ID NO: 2966 - DNA, 23 bp, synthetic construct
  misc_feature 1..23: note = HLA-A targeting gRNA
  source 1..23: mol_type = other DNA
tgagtggttccctttgacaccgg

SEQ ID NO: 2967 - DNA, 23 bp, synthetic construct
  misc_feature 1..23: note = HLA-A targeting gRNA
  source 1..23: mol_type = other DNA
tggcgggggcgcaggaccggggg

SEQ ID NO: 2968 - DNA, 23 bp, synthetic construct
  misc_feature 1..23: note = HLA-A targeting gRNA
  source 1..23: mol_type = other DNA
tgtggtggtgccttctggagagg

SEQ ID NO: 2969 - DNA, 23 bp, synthetic construct
  misc_feature 1..23: note = HLA-A targeting gRNA
  source 1..23: mol_type = other DNA
ggccgcctcccacttgcgcttgg

SEQ ID NO: 2970 - DNA, 23 bp, synthetic construct
  misc_feature 1..23: note = HLA-A targeting gRNA
  source 1..23: mol_type = other DNA
cttcccacagttagaaaaggagg

SEQ ID NO: 2971 - DNA, 23 bp, synthetic construct
  misc_feature 1..23: note = HLA-A targeting gRNA
  source 1..23: mol_type = other DNA
ggggccggagtattgggaccagg

SEQ ID NO: 2972 - DNA, 23 bp, synthetic construct
  misc_feature 1..23: note = HLA-A targeting gRNA
  source 1..23: mol_type = other DNA
gtctcctggtcccaatactccgg

SEQ ID NO: 2973 - DNA, 23 bp, synthetic construct
  misc_feature 1..23: note = HLA-A targeting gRNA
  source 1..23: mol_type = other DNA
aatcatgggccgacccagcctgg

SEQ ID NO: 2974 - DNA, 23 bp, synthetic construct
  misc_feature 1..23: note = HLA-A targeting gRNA
  source 1..23: mol_type = other DNA
acacagggcccaggctgggtcgg

SEQ ID NO: 2975 - DNA, 23 bp, synthetic construct
  misc_feature 1..23: note = HLA-A targeting gRNA
  source 1..23: mol_type = other DNA
atcatgggccgacccagcctggg

SEQ ID NO: 2976 - DNA, 23 bp, synthetic construct
  misc_feature 1..23: note = HLA-A targeting gRNA
  source 1..23: mol_type = other DNA
gctgggtcggcccatgattgtgg

SEQ ID NO: 2977 - DNA, 23 bp, synthetic construct
  misc_feature 1..23: note = HLA-A targeting gRNA
  source 1..23: mol_type = other DNA
cttgctggcctggttctctttgg

SEQ ID NO: 2978 - DNA, 23 bp, synthetic construct
  misc_feature 1..23: note = HLA-A targeting gRNA
  source 1..23: mol_type = other DNA
tgtaaaggtgagagcttggaggg

SEQ ID NO: 2979 - DNA, 23 bp, synthetic construct
  misc_feature 1..23: note = HLA-A targeting gRNA
  source 1..23: mol_type = other DNA
ttggagggcctgatgtgtgttgg

SEQ ID NO: 2980 - DNA, 23 bp, synthetic construct
  misc_feature 1..23: note = HLA-A targeting gRNA
  source 1..23: mol_type = other DNA
cttgtggagaccaagcctgcagg

SEQ ID NO: 2981 - DNA, 23 bp, synthetic construct
  misc_feature 1..23: note = HLA-A targeting gRNA
  source 1..23: mol_type = other DNA
aattcatatccatcacagtgagg

SEQ ID NO: 2982 - DNA, 23 bp, synthetic construct
  misc_feature 1..23: note = HLA-A targeting gRNA
  source 1..23: mol_type = other DNA
attcatatccatcacagtgaggg

SEQ ID NO: 2983 - DNA, 23 bp, synthetic construct
  misc_feature 1..23: note = HLA-A targeting gRNA
  source 1..23: mol_type = other DNA
ttcatatccatcacagtgagggg

SEQ ID NO: 2984 - DNA, 23 bp, synthetic construct
  misc_feature 1..23: note = HLA-A targeting gRNA
  source 1..23: mol_type = other DNA
ccaggagacacggaatgtgaagg

SEQ ID NO: 2985 - DNA, 23 bp, synthetic construct
  misc_feature 1..23: note = HLA-A targeting gRNA
  source 1..23: mol_type = other DNA
ccttcacattccgtgtctcctgg

SEQ ID NO: 2986 - DNA, 23 bp, synthetic construct
  misc_feature 1..23: note = HLA-A targeting gRNA
  source 1..23: mol_type = other DNA
ccctcctgaggtctgtcctcagg

SEQ ID NO: 2987 - DNA, 23 bp, synthetic construct
  misc_feature 1..23: note = HLA-A targeting gRNA
  source 1..23: mol_type = other DNA
gaaaccggctaaaggcgcctggg

SEQ ID NO: 2988 - DNA, 23 bp, synthetic construct
  misc_feature 1..23: note = HLA-A targeting gRNA
  source 1..23: mol_type = other DNA
ccctgaggacagacctcaggagg

SEQ ID NO: 2989 - DNA, 23 bp, synthetic construct
  misc_feature 1..23: note = HLA-A targeting gRNA
  source 1..23: mol_type = other DNA
gaaaccgggttaaaggcgcctgg

SEQ ID NO: 2990 - DNA, 23 bp, synthetic construct
  misc_feature 1..23: note = HLA-A targeting gRNA
  source 1..23: mol_type = other DNA
cctcctgaggtctgtcctcaggg

SEQ ID NO: 2991 - DNA, 23 bp, synthetic construct
  misc_feature 1..23: note = HLA-A targeting gRNA
  source 1..23: mol_type = other DNA
cctgaggacagacctcaggaggg

SEQ ID NO: 2992 - DNA, 23 bp, synthetic construct
  misc_feature 1..23: note = HLA-A targeting gRNA
  source 1..23: mol_type = other DNA
ctgtggtcgctgccgtgatgtgg

SEQ ID NO: 2993 - DNA, 23 bp, synthetic construct
  misc_feature 1..23: note = HLA-A targeting gRNA
  source 1..23: mol_type = other DNA
ggtccctgaggacagacctcagg

SEQ ID NO: 2994 - DNA, 23 bp, synthetic construct
  misc_feature 1..23: note = HLA-A targeting gRNA
  source 1..23: mol_type = other DNA
gaaccccgcttcatcgccgtggg

SEQ ID NO: 2995 - DNA, 23 bp, synthetic construct
  misc_feature 1..23: note = HLA-A targeting gRNA
  source 1..23: mol_type = other DNA
tggtcgctgccgtgatgtggagg

SEQ ID NO: 2996 - DNA, 23 bp, synthetic construct
  misc_feature 1..23: note = HLA-A targeting gRNA
  source 1..23: mol_type = other DNA
cactcggtcagtctgtgactggg

SEQ ID NO: 2997 - DNA, 23 bp, synthetic construct
  misc_feature 1..23: note = HLA-A targeting gRNA
  source 1..23: mol_type = other DNA
ccactcggtcagtctgtgactgg

SEQ ID NO: 2998 - DNA, 23 bp, synthetic construct
  misc_feature 1..23: note = HLA-A targeting gRNA
  source 1..23: mol_type = other DNA
ccagtcacagactgaccgagtgg

SEQ ID NO: 2999 - DNA, 23 bp, synthetic construct
  misc_feature 1..23: note = HLA-A targeting gRNA
  source 1..23: mol_type = other DNA
aaccctcctcctgctactctcgg

SEQ ID NO: 3000 - DNA, 23 bp, synthetic construct
  misc_feature 1..23: note = HLA-A targeting gRNA
  source 1..23: mol_type = other DNA
acactccaccagcacgcatgtgg

SEQ ID NO: 3001 - DNA, 23 bp, synthetic construct
  misc_feature 1..23: note = HLA-A targeting gRNA
  source 1..23: mol_type = other DNA
accctcctcctgctactctcggg

SEQ ID NO: 3002 - DNA, 23 bp, synthetic construct
  misc_feature 1..23: note = HLA-A targeting gRNA
  source 1..23: mol_type = other DNA
cccccgagagtagcaggaggagg

SEQ ID NO: 3003 - DNA, 23 bp, synthetic construct
  misc_feature 1..23: note = HLA-A targeting gRNA
  source 1..23: mol_type = other DNA
ccccgagagtagcaggaggaggg

SEQ ID NO: 3004 - DNA, 23 bp, synthetic construct
  misc_feature 1..23: note = HLA-A targeting gRNA
  source 1..23: mol_type = other DNA
ccctcctcctgctactctcgggg

SEQ ID NO: 3005 - DNA, 23 bp, synthetic construct
  misc_feature 1..23: note = HLA-A targeting gRNA
  source 1..23: mol_type = other DNA
cctcctcctgctactctcggggg

SEQ ID NO: 3006 - DNA, 23 bp, synthetic construct
  misc_feature 1..23: note = HLA-A targeting gRNA
  source 1..23: mol_type = other DNA
gaagagctcaggtggagaagggg

SEQ ID NO: 3007 - DNA, 23 bp, synthetic construct
  misc_feature 1..23: note = HLA-A targeting gRNA
  source 1..23: mol_type = other DNA
gggcccccgagagtagcaggagg

SEQ ID NO: 3008 - DNA, 23 bp, synthetic construct
  misc_feature 1..23: note = HLA-A targeting gRNA
  source 1..23: mol_type = other DNA
gaagcaccacccacaatcatggg

SEQ ID NO: 3009 - DNA, 23 bp, synthetic construct
  misc_feature 1..23: note = HLA-A targeting gRNA
  source 1..23: mol_type = other DNA
ataatgtatggctgcgacgtggg

SEQ ID NO: 3010 - DNA, 23 bp, synthetic construct
  misc_feature 1..23: note = HLA-A targeting gRNA
  source 1..23: mol_type = other DNA
cacaccatccagataatgtatgg

SEQ ID NO: 3011 - DNA, 23 bp, synthetic construct
  misc_feature 1..23: note = HLA-A targeting gRNA
  source 1..23: mol_type = other DNA
cgtcgcagccatacattatctgg

SEQ ID NO: 3012 - DNA, 23 bp, synthetic construct
  misc_feature 1..23: note = HLA-A targeting gRNA
  source 1..23: mol_type = other DNA
gataatgtatggctgcgacgtgg

SEQ ID NO: 3013 - DNA, 23 bp, synthetic construct
  misc_feature 1..23: note = HLA-A targeting gRNA
  source 1..23: mol_type = other DNA
gcagccatacattatctggatgg

SEQ ID NO: 3014 - DNA, 23 bp, synthetic construct
  misc_feature 1..23: note = HLA-A targeting gRNA
  source 1..23: mol_type = other DNA
gaagcagggctccccgcggccgg

SEQ ID NO: 3015 - DNA, 23 bp, synthetic construct
  misc_feature 1..23: note = HLA-A targeting gRNA
  source 1..23: mol_type = other DNA
taatgtatggctgcgacgtgggg

SEQ ID NO: 3016 - DNA, 23 bp, synthetic construct
  misc_feature 1..23: note = HLA-A targeting gRNA
  source 1..23: mol_type = other DNA
cccggcgggggcgcaggacccgg

SEQ ID NO: 3017 - DNA, 23 bp, synthetic construct
  misc_feature 1..23: note = HLA-A targeting gRNA
  source 1..23: mol_type = other DNA
cccgggtcctgcgcccccgccgg

SEQ ID NO: 3018 - DNA, 23 bp, synthetic construct
  misc_feature 1..23: note = HLA-A targeting gRNA
  source 1..23: mol_type = other DNA
ccggcgggggcgcaggacccggg

SEQ ID NO: 3019 - DNA, 23 bp, synthetic construct
  misc_feature 1..23: note = HLA-A targeting gRNA
  source 1..23: mol_type = other DNA
ccgggtcctgcgcccccgccggg

SEQ ID NO: 3020 - DNA, 23 bp, synthetic construct
  misc_feature 1..23: note = HLA-A targeting gRNA
  source 1..23: mol_type = other DNA
gaagcggggttccccgcggccgg

SEQ ID NO: 3021 - DNA, 23 bp, synthetic construct
  misc_feature 1..23: note = HLA-A targeting gRNA
  source 1..23: mol_type = other DNA
gaaggaaacgctgcagcgcacgg

SEQ ID NO: 3022 - DNA, 23 bp, synthetic construct
  misc_feature 1..23: note = HLA-A targeting gRNA
  source 1..23: mol_type = other DNA
gcaaggggcccgcccggcggggg

SEQ ID NO: 3023 - DNA, 23 bp, synthetic construct
  misc_feature 1..23: note = HLA-A targeting gRNA
  source 1..23: mol_type = other DNA
ggcccgcccggcgggggcgcagg

SEQ ID NO: 3024 - DNA, 23 bp, synthetic construct
  misc_feature 1..23: note = HLA-A targeting gRNA
  source 1..23: mol_type = other DNA
gaaggagatgctgcagcgcacgg

SEQ ID NO: 3025 - DNA, 23 bp, synthetic construct
  misc_feature 1..23: note = HLA-A targeting gRNA
  source 1..23: mol_type = other DNA
ggtcctgcgcccccgccgggcgg

SEQ ID NO: 3026 - DNA, 23 bp, synthetic construct
  misc_feature 1..23: note = HLA-A targeting gRNA
  source 1..23: mol_type = other DNA
gtcctgcgcccccgccgggcggg

SEQ ID NO: 3027 - DNA, 23 bp, synthetic construct
  misc_feature 1..23: note = HLA-A targeting gRNA
  source 1..23: mol_type = other DNA
gaagtcgctgttccctcgtcagg

SEQ ID NO: 3028 - DNA, 23 bp, synthetic construct
  misc_feature 1..23: note = HLA-A targeting gRNA
  source 1..23: mol_type = other DNA
gaagtcgctgttccctctgcagg

SEQ ID NO: 3029 - DNA, 23 bp, synthetic construct
  misc_feature 1..23: note = HLA-A targeting gRNA
  source 1..23: mol_type = other DNA
gaatgtgaagaaatacctcatgg

SEQ ID NO: 3030 - DNA, 23 bp, synthetic construct
  misc_feature 1..23: note = HLA-A targeting gRNA
  source 1..23: mol_type = other DNA
ggagtgggagcctggggacgagg

SEQ ID NO: 3031 - DNA, 23 bp, synthetic construct
  misc_feature 1..23: note = HLA-A targeting gRNA
  source 1..23: mol_type = other DNA
gaccagggcgggtgagtgcgggg

SEQ ID NO: 3032 - DNA, 23 bp, synthetic construct
  misc_feature 1..23: note = HLA-A targeting gRNA
  source 1..23: mol_type = other DNA
gacccacccggggggatttttgg

SEQ ID NO: 3033 - DNA, 23 bp, synthetic construct
  misc_feature 1..23: note = HLA-A targeting gRNA
  source 1..23: mol_type = other DNA
gacccagttctcactccaattgg

SEQ ID NO: 3034 - DNA, 23 bp, synthetic construct
  misc_feature 1..23: note = HLA-A targeting gRNA
  source 1..23: mol_type = other DNA
gacccagttctcactcctattgg

SEQ ID NO: 3035 - DNA, 23 bp, synthetic construct
  misc_feature 1..23: note = HLA-A targeting gRNA
  source 1..23: mol_type = other DNA
gaccccgcactcacccgccctgg

SEQ ID NO: 3036 - DNA, 23 bp, synthetic construct
  misc_feature 1..23: note = HLA-A targeting gRNA
  source 1..23: mol_type = other DNA
gacccctcatcccctacggacgg

SEQ ID NO: 3037 - DNA, 23 bp, synthetic construct
  misc_feature 1..23: note = HLA-A targeting gRNA
  source 1..23: mol_type = other DNA
gacccctcattccccacggacgg

SEQ ID NO: 3038 - DNA, 23 bp, synthetic construct
  misc_feature 1..23: note = HLA-A targeting gRNA
  source 1..23: mol_type = other DNA
gggagcctggggacgaggagtgg

SEQ ID NO: 3039 - DNA, 23 bp, synthetic construct
  misc_feature 1..23: note = HLA-A targeting gRNA
  source 1..23: mol_type = other DNA
gaccgcctcccacttgcgcttgg

SEQ ID NO: 3040 - DNA, 23 bp, synthetic construct
  misc_feature 1..23: note = HLA-A targeting gRNA
  source 1..23: mol_type = other DNA
gaccgggctgaccgcggggtcgg

SEQ ID NO: 3041 - DNA, 23 bp, synthetic construct
  misc_feature 1..23: note = HLA-A targeting gRNA
  source 1..23: mol_type = other DNA
gacctgacagcgggatggggagg

SEQ ID NO: 3042 - DNA, 23 bp, synthetic construct
  misc_feature 1..23: note = HLA-A targeting gRNA
  source 1..23: mol_type = other DNA
gacctggcagcgggatagggagg

SEQ ID NO: 3043 - DNA, 23 bp, synthetic construct
  misc_feature 1..23: note = HLA-A targeting gRNA
  source 1..23: mol_type = other DNA
gacgagggaacagcgacttctgg

SEQ ID NO: 3044 - DNA, 23 bp, synthetic construct
  misc_feature 1..23: note = HLA-A targeting gRNA
  source 1..23: mol_type = other DNA
gacgccgaggatggccatcatgg

SEQ ID NO: 3045 - DNA, 23 bp, synthetic construct
  misc_feature 1..23: note = HLA-A targeting gRNA
  source 1..23: mol_type = other DNA
gactccgagacccttgccccggg

SEQ ID NO: 3046 - DNA, 23 bp, synthetic construct
  misc_feature 1..23: note = HLA-A targeting gRNA
  source 1..23: mol_type = other DNA
gactccgagacccttgtcccggg

SEQ ID NO: 3047 - DNA, 23 bp, synthetic construct
  misc_feature 1..23: note = HLA-A targeting gRNA
  source 1..23: mol_type = other DNA
gacttgtgactgctgggttcagg

SEQ ID NO: 3048 - DNA, 23 bp, synthetic construct
  misc_feature 1..23: note = HLA-A targeting gRNA
  source 1..23: mol_type = other DNA
gagaccaagcctgcaggggatgg

SEQ ID NO: 3049 - DNA, 23 bp, synthetic construct
  misc_feature 1..23: note = HLA-A targeting gRNA
  source 1..23: mol_type = other DNA
gagactgaccgagtggacctggg

SEQ ID NO: 3050 - DNA, 23 bp, synthetic construct
  misc_feature 1..23: note = HLA-A targeting gRNA
  source 1..23: mol_type = other DNA
gccgggccgggacacggatgtgg

SEQ ID NO: 3051 - DNA, 23 bp, synthetic construct
  misc_feature 1..23: note = HLA-A targeting gRNA
  source 1..23: mol_type = other DNA
gagccaaaggatggagccgcggg

SEQ ID NO: 3052 - DNA, 23 bp, synthetic construct
  misc_feature 1..23: note = HLA-A targeting gRNA
  source 1..23: mol_type = other DNA
gagccagaagatggagccgcggg

SEQ ID NO: 3053 - DNA, 23 bp, synthetic construct
  misc_feature 1..23: note = HLA-A targeting gRNA
  source 1..23: mol_type = other DNA
ctcagccactcctcgcccccagg

SEQ ID NO: 3054 - DNA, 23 bp, synthetic construct
  misc_feature 1..23: note = HLA-A targeting gRNA
  source 1..23: mol_type = other DNA
caccctccctctggtcctgaggg

SEQ ID NO: 3055 - DNA, 23 bp, synthetic construct
  misc_feature 1..23: note = HLA-A targeting gRNA
  source 1..23: mol_type = other DNA
ctagaatatcaccctccctctgg

SEQ ID NO: 3056 - DNA, 23 bp, synthetic construct
  misc_feature 1..23: note = HLA-A targeting gRNA
  source 1..23: mol_type = other DNA
gagccccgcttcatcgctgtggg

SEQ ID NO: 3057 - DNA, 23 bp, synthetic construct
  misc_feature 1..23: note = HLA-A targeting gRNA
  source 1..23: mol_type = other DNA
tcaccctccctctggtcctgagg

SEQ ID NO: 3058 - DNA, 23 bp, synthetic construct
  misc_feature 1..23: note = HLA-A targeting gRNA
  source 1..23: mol_type = other DNA
ctcaggtggagaaggggtgaagg

SEQ ID NO: 3059 - DNA, 23 bp, synthetic construct
  misc_feature 1..23: note = HLA-A targeting gRNA
  source 1..23: mol_type = other DNA
gagccctgcttcatcgccgtggg

SEQ ID NO: 3060 - DNA, 23 bp, synthetic construct
  misc_feature 1..23: note = HLA-A targeting gRNA
  source 1..23: mol_type = other DNA
ggtggagaaggggtgaagggtgg

SEQ ID NO: 3061 - DNA, 23 bp, synthetic construct
  misc_feature 1..23: note = HLA-A targeting gRNA
  source 1..23: mol_type = other DNA
gtggagaaggggtgaagggtggg

SEQ ID NO: 3062 - DNA, 23 bp, synthetic construct
  misc_feature 1..23: note = HLA-A targeting gRNA
  source 1..23: mol_type = other DNA
gagctaccagaaaggagccaggg

SEQ ID NO: 3063 - DNA, 23 bp, synthetic construct
  misc_feature 1..23: note = HLA-A targeting gRNA
  source 1..23: mol_type = other DNA
tcaggtggagaaggggtgaaggg

SEQ ID NO: 3064 - DNA, 23 bp, synthetic construct
  misc_feature 1..23: note = HLA-A targeting gRNA
  source 1..23: mol_type = other DNA
tggagaaggggtgaagggtgggg

SEQ ID NO: 3065 - DNA, 23 bp, synthetic construct
  misc_feature 1..23: note = HLA-A targeting gRNA
  source 1..23: mol_type = other DNA
gggagcctgggggcgaggagtgg

SEQ ID NO: 3066 - DNA, 23 bp, synthetic construct
  misc_feature 1..23: note = HLA-A targeting gRNA
  source 1..23: mol_type = other DNA
gaggacagacctcaggagggcgg

SEQ ID NO: 3067 - DNA, 23 bp, synthetic construct
  misc_feature 1..23: note = HLA-A targeting gRNA
  source 1..23: mol_type = other DNA
gaggacggtgaccccggcccggg

SEQ ID NO: 3068 - DNA, 23 bp, synthetic construct
  misc_feature 1..23: note = HLA-A targeting gRNA
  source 1..23: mol_type = other DNA
ggagaaatacctcatggagtggg

SEQ ID NO: 3069 - DNA, 23 bp, synthetic construct
  misc_feature 1..23: note = HLA-A targeting gRNA
  source 1..23: mol_type = other DNA
tggagaaatacctcatggagtgg

SEQ ID NO: 3070 - DNA, 23 bp, synthetic construct
  misc_feature 1..23: note = HLA-A targeting gRNA
  source 1..23: mol_type = other DNA
gaggatgtatggttgcgacgtgg

SEQ ID NO: 3071 - DNA, 23 bp, synthetic construct
  misc_feature 1..23: note = HLA-A targeting gRNA
  source 1..23: mol_type = other DNA
gaggccaggcctgcaggggatgg

SEQ ID NO: 3072 - DNA, 23 bp, synthetic construct
  misc_feature 1..23: note = HLA-A targeting gRNA
  source 1..23: mol_type = other DNA
ggagggtgatattctagtgttgg

SEQ ID NO: 3073 - DNA, 23 bp, synthetic construct
  misc_feature 1..23: note = HLA-A targeting gRNA
  source 1..23: mol_type = other DNA
caccaagcgcaagtgggaggcgg

SEQ ID NO: 3074 - DNA, 23 bp, synthetic construct
  misc_feature 1..23: note = HLA-A targeting gRNA
  source 1..23: mol_type = other DNA
gaggcccaggcgcctttagccgg

SEQ ID NO: 3075 - DNA, 23 bp, synthetic construct
  misc_feature 1..23: note = HLA-A targeting gRNA
  source 1..23: mol_type = other DNA
ctcagatcaccaagcgcaagtgg

SEQ ID NO: 3076 - DNA, 23 bp, synthetic construct
  misc_feature 1..23: note = HLA-A targeting gRNA
  source 1..23: mol_type = other DNA
gatcaccaagcgcaagtgggagg

SEQ ID NO: 3077 - DNA, 23 bp, synthetic construct
  misc_feature 1..23: note = HLA-A targeting gRNA
  source 1..23: mol_type = other DNA
tcagatcaccaagcgcaagtggg

SEQ ID NO: 3078 - DNA, 23 bp, synthetic construct
  misc_feature 1..23: note = HLA-A targeting gRNA
  source 1..23: mol_type = other DNA
gaggggccggagtattgggacgg

SEQ ID NO: 3079 - DNA, 23 bp, synthetic construct
  misc_feature 1..23: note = HLA-A targeting gRNA
  source 1..23: mol_type = other DNA
ggatgtggagaaatacctcatgg

SEQ ID NO: 3080 - DNA, 23 bp, synthetic construct
  misc_feature 1..23: note = HLA-A targeting gRNA
  source 1..23: mol_type = other DNA
aagcaaggggcccgcccggcggg

SEQ ID NO: 3081 - DNA, 23 bp, synthetic construct
  misc_feature 1..23: note = HLA-A targeting gRNA
  source 1..23: mol_type = other DNA
agcaaggggcccgcccggcgggg

SEQ ID NO: 3082 - DNA, 23 bp, synthetic construct
  misc_feature 1..23: note = HLA-A targeting gRNA
  source 1..23: mol_type = other DNA
gagggttcggggcgccatgatgg

SEQ ID NO: 3083 - DNA, 23 bp, synthetic construct
  misc_feature 1..23: note = HLA-A targeting gRNA
  source 1..23: mol_type = other DNA
gagggttcggggcggcatgacgg

SEQ ID NO: 3084 - DNA, 23 bp, synthetic construct
  misc_feature 1..23: note = HLA-A targeting gRNA
  source 1..23: mol_type = other DNA
gaagcaaggggcccgcccggcgg

SEQ ID NO: 3085 - DNA, 23 bp, synthetic construct
  misc_feature 1..23: note = HLA-A targeting gRNA
  source 1..23: mol_type = other DNA
gaggtgggtgagctcccccatgg

SEQ ID NO: 3086 - DNA, 23 bp, synthetic construct
  misc_feature 1..23: note = HLA-A targeting gRNA
  source 1..23: mol_type = other DNA
ggagaagcaaggggcccgcccgg

SEQ ID NO: 3087 - DNA, 23 bp, synthetic construct
  misc_feature 1..23: note = HLA-A targeting gRNA
  source 1..23: mol_type = other DNA
agtattgggaccaggagacacgg

SEQ ID NO: 3088 - DNA, 23 bp, synthetic construct
  misc_feature 1..23: note = HLA-A targeting gRNA
  source 1..23: mol_type = other DNA
gagtcactctctggaaacccagg

SEQ ID NO: 3089 - DNA, 23 bp, synthetic construct
  misc_feature 1..23: note = HLA-A targeting gRNA
  source 1..23: mol_type = other DNA
gagtcatatgcgtcctggggggg

SEQ ID NO: 3090 - DNA, 23 bp, synthetic construct
  misc_feature 1..23: note = HLA-A targeting gRNA
  source 1..23: mol_type = other DNA
gagtggcccgaccctcctcccgg

SEQ ID NO: 3091 - DNA, 23 bp, synthetic construct
  misc_feature 1..23: note = HLA-A targeting gRNA
  source 1..23: mol_type = other DNA
aagagcgcaggtcctcgttcagg

SEQ ID NO: 3092 - DNA, 23 bp, synthetic construct
  misc_feature 1..23: note = HLA-A targeting gRNA
  source 1..23: mol_type = other DNA
agagcgcaggtcctcgttcaggg

SEQ ID NO: 3093 - DNA, 23 bp, synthetic construct
  misc_feature 1..23: note = HLA-A targeting gRNA
  source 1..23: mol_type = other DNA
gatcacactgacctgacagcggg

SEQ ID NO: 3094 - DNA, 23 bp, synthetic construct
  misc_feature 1..23: note = HLA-A targeting gRNA
  source 1..23: mol_type = other DNA
gatcaccaagcacaagtgggagg

SEQ ID NO: 3095 - DNA, 23 bp, synthetic construct
  misc_feature 1..23: note = HLA-A targeting gRNA
  source 1..23: mol_type = other DNA
gatcaccgagcgcaagtgggagg

SEQ ID NO: 3096 - DNA, 23 bp, synthetic construct
  misc_feature 1..23: note = HLA-A targeting gRNA
  source 1..23: mol_type = other DNA
gatgatgtatggctgccacgtgg

SEQ ID NO: 3097 - DNA, 23 bp, synthetic construct
  misc_feature 1..23: note = HLA-A targeting gRNA
  source 1..23: mol_type = other DNA
gatgcccacaatggggatggtgg

SEQ ID NO: 3098 - DNA, 23 bp, synthetic construct
  misc_feature 1..23: note = HLA-A targeting gRNA
  source 1..23: mol_type = other DNA
gatgcccacgatgtggacggtgg

SEQ ID NO: 3099 - DNA, 23 bp, synthetic construct
  misc_feature 1..23: note = HLA-A targeting gRNA
  source 1..23: mol_type = other DNA
gatgctgtgagaacctggcccgg

SEQ ID NO: 3100 - DNA, 23 bp, synthetic construct
  misc_feature 1..23: note = HLA-A targeting gRNA
  source 1..23: mol_type = other DNA
gatggacaggacacctgggatgg

SEQ ID NO: 3101 - DNA, 23 bp, synthetic construct
  misc_feature 1..23: note = HLA-A targeting gRNA
  source 1..23: mol_type = other DNA
gatggccatcctcggcgtctggg

SEQ ID NO: 3102 - DNA, 23 bp, synthetic construct
  misc_feature 1..23: note = HLA-A targeting gRNA
  source 1..23: mol_type = other DNA
gatgggataaggagggagatggg

SEQ ID NO: 3103 - DNA, 23 bp, synthetic construct
  misc_feature 1..23: note = HLA-A targeting gRNA
  source 1..23: mol_type = other DNA
gatgggttaaggagggagatggg

SEQ ID NO: 3104 - DNA, 23 bp, synthetic construct
  misc_feature 1..23: note = HLA-A targeting gRNA
  source 1..23: mol_type = other DNA
gatgtaatccttgccgtcttagg

SEQ ID NO: 3105 - DNA, 23 bp, synthetic construct
  misc_feature 1..23: note = HLA-A targeting gRNA
  source 1..23: mol_type = other DNA
gatgtaatccttgccttcgtagg

SEQ ID NO: 3106 - DNA, 23 bp, synthetic construct
  misc_feature 1..23: note = HLA-A targeting gRNA
  source 1..23: mol_type = other DNA
gatgtgtgttgggtgttgggggg

SEQ ID NO: 3107 - DNA, 23 bp, synthetic construct
  misc_feature 1..23: note = HLA-A targeting gRNA
  source 1..23: mol_type = other DNA
gatgtgtgttgggtgttgggtgg

SEQ ID NO: 3108 - DNA, 23 bp, synthetic construct
  misc_feature 1..23: note = HLA-A targeting gRNA
  source 1..23: mol_type = other DNA
gattgtgggtggtgcttcccagg

SEQ ID NO: 3109 - DNA, 23 bp, synthetic construct
  misc_feature 1..23: note = HLA-A targeting gRNA
  source 1..23: mol_type = other DNA
gcaaccatacatcctctggatgg

SEQ ID NO: 3110 - DNA, 23 bp, synthetic construct
  misc_feature 1..23: note = HLA-A targeting gRNA
  source 1..23: mol_type = other DNA
gcaagggtctcggagtcccgcgg

SEQ ID NO: 3111 - DNA, 23 bp, synthetic construct
  misc_feature 1..23: note = HLA-A targeting gRNA
  source 1..23: mol_type = other DNA
gcaagtgggaggcggcccgttgg

SEQ ID NO: 3112 - DNA, 23 bp, synthetic construct
  misc_feature 1..23: note = HLA-A targeting gRNA
  source 1..23: mol_type = other DNA
gcacagaacccagaccagcctgg

SEQ ID NO: 3113 - DNA, 23 bp, synthetic construct
  misc_feature 1..23: note = HLA-A targeting gRNA
  source 1..23: mol_type = other DNA
gcacaggtaccaggggccacggg

SEQ ID NO: 3114 - DNA, 23 bp, synthetic construct
  misc_feature 1..23: note = HLA-A targeting gRNA
  source 1..23: mol_type = other DNA
gcacctgcatgtgtctgtgttgg

SEQ ID NO: 3115 - DNA, 23 bp, synthetic construct
  misc_feature 1..23: note = HLA-A targeting gRNA
  source 1..23: mol_type = other DNA
gcacgagtaccaggggccacggg

SEQ ID NO: 3116 - DNA, 23 bp, synthetic construct
  misc_feature 1..23: note = HLA-A targeting gRNA
  source 1..23: mol_type = other DNA
gcacgcatgtggccattttgagg

SEQ ID NO: 3117 - DNA, 23 bp, synthetic construct
  misc_feature 1..23: note = HLA-A targeting gRNA
  source 1..23: mol_type = other DNA
gcacgggtaccagggaccacggg

SEQ ID NO: 3118 - DNA, 23 bp, synthetic construct
  misc_feature 1..23: note = HLA-A targeting gRNA
  source 1..23: mol_type = other DNA
gcactcacccgccctggtctggg

SEQ ID NO: 3119 - DNA, 23 bp, synthetic construct
  misc_feature 1..23: note = HLA-A targeting gRNA
  source 1..23: mol_type = other DNA
gcactggtaccaggggccacggg

SEQ ID NO: 3120 - DNA, 23 bp, synthetic construct
  misc_feature 1..23: note = HLA-A targeting gRNA
  source 1..23: mol_type = other DNA
aaggctgctgccggtgtcaaagg

SEQ ID NO: 3121 - DNA, 23 bp, synthetic construct
  misc_feature 1..23: note = HLA-A targeting gRNA
  source 1..23: mol_type = other DNA
gcagagggaacagcgacttctgg

SEQ ID NO: 3122 - DNA, 23 bp, synthetic construct
  misc_feature 1..23: note = HLA-A targeting gRNA
  source 1..23: mol_type = other DNA
gcagcacgcctacgacggcaagg

SEQ ID NO: 3123 - DNA, 23 bp, synthetic construct
  misc_feature 1..23: note = HLA-A targeting gRNA
  source 1..23: mol_type = other DNA
aatggacaggacacccgggatgg

SEQ ID NO: 3124 - DNA, 23 bp, synthetic construct
  misc_feature 1..23: note = HLA-A targeting gRNA
  source 1..23: mol_type = other DNA
aatgtgccctgtctcattactgg

SEQ ID NO: 3125 - DNA, 23 bp, synthetic construct
  misc_feature 1..23: note = HLA-A targeting gRNA
  source 1..23: mol_type = other DNA
agcttgtaaaggtgagagcttgg

SEQ ID NO: 3126 - DNA, 23 bp, synthetic construct
  misc_feature 1..23: note = HLA-A targeting gRNA
  source 1..23: mol_type = other DNA
aggctgctgccggtgtcaaaggg

SEQ ID NO: 3127 - DNA, 23 bp, synthetic construct
  misc_feature 1..23: note = HLA-A targeting gRNA
  source 1..23: mol_type = other DNA
atggacaggacacccgggatggg

SEQ ID NO: 3128 - DNA, 23 bp, synthetic construct
  misc_feature 1..23: note = HLA-A targeting gRNA
  source 1..23: mol_type = other DNA
atgtgccctgtctcattactggg

SEQ ID NO: 3129 - DNA, 23 bp, synthetic construct
  misc_feature 1..23: note = HLA-A targeting gRNA
  source 1..23: mol_type = other DNA
caagactaggaggttcctctagg

SEQ ID NO: 3130 - DNA, 23 bp, synthetic construct
  misc_feature 1..23: note = HLA-A targeting gRNA
  source 1..23: mol_type = other DNA
gcagcggagagtctacctggagg

SEQ ID NO: 3131 - DNA, 23 bp, synthetic construct
  misc_feature 1..23: note = HLA-A targeting gRNA
  source 1..23: mol_type = other DNA
cgggaagagtcagaaaattcagg

SEQ ID NO: 3132 - DNA, 23 bp, synthetic construct
  misc_feature 1..23: note = HLA-A targeting gRNA
  source 1..23: mol_type = other DNA
ctagaggaacctcctagtcttgg

SEQ ID NO: 3133 - DNA, 23 bp, synthetic construct
  misc_feature 1..23: note = HLA-A targeting gRNA
  source 1..23: mol_type = other DNA
gcaggacgcctaagacggcaagg

SEQ ID NO: 3134 - DNA, 23 bp, synthetic construct
  misc_feature 1..23: note = HLA-A targeting gRNA
  source 1..23: mol_type = other DNA
gcaggacgcctacgaaggcaagg

SEQ ID NO: 3135 - DNA, 23 bp, synthetic construct
  misc_feature 1..23: note = HLA-A targeting gRNA
  source 1..23: mol_type = other DNA
ctccagtgatcacagctccaagg

SEQ ID NO: 3136 - DNA, 23 bp, synthetic construct
  misc_feature 1..23: note = HLA-A targeting gRNA
  source 1..23: mol_type = other DNA
ctccttggagctgtgatcactgg

SEQ ID NO: 3137 - DNA, 23 bp, synthetic construct
  misc_feature 1..23: note = HLA-A targeting gRNA
  source 1..23: mol_type = other DNA
ctctggggtccaagactaggagg

SEQ ID NO: 3138 - DNA, 23 bp, synthetic construct
  misc_feature 1..23: note = HLA-A targeting gRNA
  source 1..23: mol_type = other DNA
gcaggaggagccggagtattggg

SEQ ID NO: 3139 - DNA, 23 bp, synthetic construct
  misc_feature 1..23: note = HLA-A targeting gRNA
  source 1..23: mol_type = other DNA
ctgtgctctcttccccatcccgg

SEQ ID NO: 3140 - DNA, 23 bp, synthetic construct
  misc_feature 1..23: note = HLA-A targeting gRNA
  source 1..23: mol_type = other DNA
cttctctggggtccaagactagg

SEQ ID NO: 3141 - DNA, 23 bp, synthetic construct
  misc_feature 1..23: note = HLA-A targeting gRNA
  source 1..23: mol_type = other DNA
gcatgtggccatcttgagaatgg

SEQ ID NO: 3142 - DNA, 23 bp, synthetic construct
  misc_feature 1..23: note = HLA-A targeting gRNA
  source 1..23: mol_type = other DNA
ggagacctttagcagggtcaggg

SEQ ID NO: 3143 - DNA, 23 bp, synthetic construct
  misc_feature 1..23: note = HLA-A targeting gRNA
  source 1..23: mol_type = other DNA
gtgcttcccagtaatgagacagg

SEQ ID NO: 3144 - DNA, 23 bp, synthetic construct
  misc_feature 1..23: note = HLA-A targeting gRNA
  source 1..23: mol_type = other DNA
gcaggtcgcctacgacggcaagg

SEQ ID NO: 3145 - DNA, 23 bp, synthetic construct
  misc_feature 1..23: note = HLA-A targeting gRNA
  source 1..23: mol_type = other DNA
tatctctgctcctctccagaagg

SEQ ID NO: 3146 - DNA, 23 bp, synthetic construct
  misc_feature 1..23: note = HLA-A targeting gRNA
  source 1..23: mol_type = other DNA
tgagaatggacaggacacccggg

SEQ ID NO: 3147 - DNA, 23 bp, synthetic construct
  misc_feature 1..23: note = HLA-A targeting gRNA
  source 1..23: mol_type = other DNA
gcatctccttcccgttctccagg

SEQ ID NO: 3148 - DNA, 23 bp, synthetic construct
  misc_feature 1..23: note = HLA-A targeting gRNA
  source 1..23: mol_type = other DNA
tgcttcccagtaatgagacaggg

SEQ ID NO: 3149 - DNA, 23 bp, synthetic construct
  misc_feature 1..23: note = HLA-A targeting gRNA
  source 1..23: mol_type = other DNA
gcatgtggccattttgaggatgg

SEQ ID NO: 3150 - DNA, 23 bp, synthetic construct
  misc_feature 1..23: note = HLA-A targeting gRNA
  source 1..23: mol_type = other DNA
tggacaggacacccgggatgggg

SEQ ID NO: 3151 - DNA, 23 bp, synthetic construct
  misc_feature 1..23: note = HLA-A targeting gRNA
  source 1..23: mol_type = other DNA
tggagacctttagcagggtcagg

SEQ ID NO: 3152 - DNA, 23 bp, synthetic construct
  misc_feature 1..23: note = HLA-A targeting gRNA
  source 1..23: mol_type = other DNA
tggccatcttgagaatggacagg

SEQ ID NO: 3153 - DNA, 23 bp, synthetic construct
  misc_feature 1..23: note = HLA-A targeting gRNA
  source 1..23: mol_type = other DNA
gcatgtgtctgtgttggtgtagg

SEQ ID NO: 3154 - DNA, 23 bp, synthetic construct
  misc_feature 1..23: note = HLA-A targeting gRNA
  source 1..23: mol_type = other DNA
tgtcctgtccattctcaagatgg

SEQ ID NO: 3155 - DNA, 23 bp, synthetic construct
  misc_feature 1..23: note = HLA-A targeting gRNA
  source 1..23: mol_type = other DNA
gccagcaaggatgcccacgatgg

SEQ ID NO: 3156 - DNA, 23 bp, synthetic construct
  misc_feature 1..23: note = HLA-A targeting gRNA
  source 1..23: mol_type = other DNA
gccagcaatgatgcccacaatgg

SEQ ID NO: 3157 - DNA, 23 bp, synthetic construct
  misc_feature 1..23: note = HLA-A targeting gRNA
  source 1..23: mol_type = other DNA
tgtgctctcttccccatcccggg

SEQ ID NO: 3158 - DNA, 23 bp, synthetic construct
  misc_feature 1..23: note = HLA-A targeting gRNA
  source 1..23: mol_type = other DNA
ttgacaccggcagcagccttggg

SEQ ID NO: 3159 - DNA, 23 bp, synthetic construct
  misc_feature 1..23: note = HLA-A targeting gRNA
  source 1..23: mol_type = other DNA
ttgagaatggacaggacacccgg

SEQ ID NO: 3160 - DNA, 23 bp, synthetic construct
  misc_feature 1..23: note = HLA-A targeting gRNA
  source 1..23: mol_type = other DNA
ttgtaaaggtgagagcttggagg

SEQ ID NO: 3161 - DNA, 23 bp, synthetic construct
  misc_feature 1..23: note = HLA-A targeting gRNA
  source 1..23: mol_type = other DNA
tttgacaccggcagcagccttgg

SEQ ID NO: 3162 - DNA, 23 bp, synthetic construct
  misc_feature 1..23: note = HLA-A targeting gRNA
  source 1..23: mol_type = other DNA
gtgtcttgggggggtctgacggg

SEQ ID NO: 3163 - DNA, 23 bp, synthetic construct
  misc_feature 1..23: note = HLA-A targeting gRNA
  source 1..23: mol_type = other DNA
tgtgtcttgggggggtctgacgg

SEQ ID NO: 3164 - DNA, 23 bp, synthetic construct
  misc_feature 1..23: note = HLA-A targeting gRNA
  source 1..23: mol_type = other DNA
atgtttcctgatcctgccctggg

SEQ ID NO: 3165 - DNA, 23 bp, synthetic construct
  misc_feature 1..23: note = HLA-A targeting gRNA
  source 1..23: mol_type = other DNA
gccccgccccgacccacccgggg

SEQ ID NO: 3166 - DNA, 23 bp, synthetic construct
  misc_feature 1..23: note = HLA-A targeting gRNA
  source 1..23: mol_type = other DNA
catgtttcctgatcctgccctgg

SEQ ID NO: 3167 - DNA, 23 bp, synthetic construct
  misc_feature 1..23: note = HLA-A targeting gRNA
  source 1..23: mol_type = other DNA
gcccggccccgaccaaccagggg

SEQ ID NO: 3168 - DNA, 23 bp, synthetic construct
  misc_feature 1..23: note = HLA-A targeting gRNA
  source 1..23: mol_type = other DNA
gcccgtccgtaggggatgagggg

SEQ ID NO: 3169 - DNA, 23 bp, synthetic construct
  misc_feature 1..23: note = HLA-A targeting gRNA
  source 1..23: mol_type = other DNA
gcccgtccgtggggaatgagggg

SEQ ID NO: 3170 - DNA, 23 bp, synthetic construct
  misc_feature 1..23: note = HLA-A targeting gRNA
  source 1..23: mol_type = other DNA
gcgcgatccgcaggttctctcgg

SEQ ID NO: 3171 - DNA, 23 bp, synthetic construct
  misc_feature 1..23: note = HLA-A targeting gRNA
  source 1..23: mol_type = other DNA
gccctgacccagaccagggcggg

SEQ ID NO: 3172 - DNA, 23 bp, synthetic construct
  misc_feature 1..23: note = HLA-A targeting gRNA
  source 1..23: mol_type = other DNA
cctctctggagacctttagcagg

SEQ ID NO: 3173 - DNA, 23 bp, synthetic construct
  misc_feature 1..23: note = HLA-A targeting gRNA
  source 1..23: mol_type = other DNA
cctgctaaaggtctccagagagg

SEQ ID NO: 3174 - DNA, 23 bp, synthetic construct
  misc_feature 1..23: note = HLA-A targeting gRNA
  source 1..23: mol_type = other DNA
ctctctggagacctttagcaggg

SEQ ID NO: 3175 - DNA, 23 bp, synthetic construct
  misc_feature 1..23: note = HLA-A targeting gRNA
  source 1..23: mol_type = other DNA
gccggtttcattttcagtttagg

SEQ ID NO: 3176 - DNA, 23 bp, synthetic construct
  misc_feature 1..23: note = HLA-A targeting gRNA
  source 1..23: mol_type = other DNA
gggtcatatgtgtcttggggggg

SEQ ID NO: 3177 - DNA, 23 bp, synthetic construct
  misc_feature 1..23: note = HLA-A targeting gRNA
  source 1..23: mol_type = other DNA
ggtgggtcatatgtgtcttgggg

SEQ ID NO: 3178 - DNA, 23 bp, synthetic construct
  misc_feature 1..23: note = HLA-A targeting gRNA
  source 1..23: mol_type = other DNA
gtgggtcatatgtgtcttggggg

SEQ ID NO: 3179 - DNA, 23 bp, synthetic construct
  misc_feature 1..23: note = HLA-A targeting gRNA
  source 1..23: mol_type = other DNA
gtggtgggtcatatgtgtcttgg

SEQ ID NO: 3180 - DNA, 23 bp, synthetic construct
  misc_feature 1..23: note = HLA-A targeting gRNA
  source 1..23: mol_type = other DNA
gcctgtgtccaggctggtctggg

SEQ ID NO: 3181 - DNA, 23 bp, synthetic construct
  misc_feature 1..23: note = HLA-A targeting gRNA
  source 1..23: mol_type = other DNA
tgggtcatatgtgtcttgggggg

SEQ ID NO: 3182 - DNA, 23 bp, synthetic construct
  misc_feature 1..23: note = HLA-A targeting gRNA
  source 1..23: mol_type = other DNA
tggtgggtcatatgtgtcttggg

SEQ ID NO: 3183 - DNA, 23 bp, synthetic construct
  misc_feature 1..23: note = HLA-A targeting gRNA
  source 1..23: mol_type = other DNA
gcgacctggcccgtccgtagggg

SEQ ID NO: 3184 - DNA, 23 bp, synthetic construct
  misc_feature 1..23: note = HLA-A targeting gRNA
  source 1..23: mol_type = other DNA
acagggcacatttctagctgggg

SEQ ID NO: 3185 - DNA, 23 bp, synthetic construct
  misc_feature 1..23: note = HLA-A targeting gRNA
  source 1..23: mol_type = other DNA
acatttctggaaacttctctggg

SEQ ID NO: 3186 - DNA, 23 bp, synthetic construct
  misc_feature 1..23: note = HLA-A targeting gRNA
  source 1..23: mol_type = other DNA
agacagggcacatttctagctgg

SEQ ID NO: 3187 - DNA, 23 bp, synthetic construct
  misc_feature 1..23: note = HLA-A targeting gRNA
  source 1..23: mol_type = other DNA
agggaaagcaggagcctctctgg

SEQ ID NO: 3188 - DNA, 23 bp, synthetic construct
  misc_feature 1..23: note = HLA-A targeting gRNA
  source 1..23: mol_type = other DNA
gcgatcagggaggcgccctgtgg

SEQ ID NO: 3189 - DNA, 23 bp, synthetic construct
  misc_feature 1..23: note = HLA-A targeting gRNA
  source 1..23: mol_type = other DNA
agggaatagaagattatcccagg

SEQ ID NO: 3190 - DNA, 23 bp, synthetic construct
  misc_feature 1..23: note = HLA-A targeting gRNA
  source 1..23: mol_type = other DNA
atgggggtgtcatgtctcttagg

SEQ ID NO: 3191 - DNA, 23 bp, synthetic construct
  misc_feature 1..23: note = HLA-A targeting gRNA
  source 1..23: mol_type = other DNA
attgctggcctggttctccttgg

SEQ ID NO: 3192 - DNA, 23 bp, synthetic construct
  misc_feature 1..23: note = HLA-A targeting gRNA
  source 1..23: mol_type = other DNA
cacatttctggaaacttctctgg

SEQ ID NO: 3193 - DNA, 23 bp, synthetic construct
  misc_feature 1..23: note = HLA-A targeting gRNA
  source 1..23: mol_type = other DNA
gcgcccgcggctccatcctttgg

SEQ ID NO: 3194 - DNA, 23 bp, synthetic construct
  misc_feature 1..23: note = HLA-A targeting gRNA
  source 1..23: mol_type = other DNA
gcgcccgcggctccatcttctgg

SEQ ID NO: 3195 - DNA, 23 bp, synthetic construct
  misc_feature 1..23: note = HLA-A targeting gRNA
  source 1..23: mol_type = other DNA
catttctggaaacttctctgggg

SEQ ID NO: 3196 - DNA, 23 bp, synthetic construct
  misc_feature 1..23: note = HLA-A targeting gRNA
  source 1..23: mol_type = other DNA
gacagggcacatttctagctggg

SEQ ID NO: 3197 - DNA, 23 bp, synthetic construct
  misc_feature 1..23: note = HLA-A targeting gRNA
  source 1..23: mol_type = other DNA
gcacatttctagctggggcttgg

SEQ ID NO: 3198 - DNA, 23 bp, synthetic construct
  misc_feature 1..23: note = HLA-A targeting gRNA
  source 1..23: mol_type = other DNA
tcacagctccaaggagaaccagg

SEQ ID NO: 3199 - DNA, 23 bp, synthetic construct
  misc_feature 1..23: note = HLA-A targeting gRNA
  source 1..23: mol_type = other DNA
tcatgtctcttagggaaagcagg

SEQ ID NO: 3200 - DNA, 23 bp, synthetic construct
  misc_feature 1..23: note = HLA-A targeting gRNA
  source 1..23: mol_type = other DNA
tgggggtgtcatgtctcttaggg

SEQ ID NO: 3201 - DNA, 23 bp, synthetic construct
  misc_feature 1..23: note = HLA-A targeting gRNA
  source 1..23: mol_type = other DNA
gcgcgatccgcagtttctctcgg

SEQ ID NO: 3202 - DNA, 23 bp, synthetic construct
  misc_feature 1..23: note = HLA-A targeting gRNA
  source 1..23: mol_type = other DNA
gcgcgggtaccaggggccacagg

SEQ ID NO: 3203 - DNA, 23 bp, synthetic construct
  misc_feature 1..23: note = HLA-A targeting gRNA
  source 1..23: mol_type = other DNA
gcggagtctcccacttgcgctgg

SEQ ID NO: 3204 - DNA, 23 bp, synthetic construct
  misc_feature 1..23: note = HLA-A targeting gRNA
  source 1..23: mol_type = other DNA
cgcctctgcggggagaagcaagg

SEQ ID NO: 3205 - DNA, 23 bp, synthetic construct
  misc_feature 1..23: note = HLA-A targeting gRNA
  source 1..23: mol_type = other DNA
gcggagttggggaatctccaagg

SEQ ID NO: 3206 - DNA, 23 bp, synthetic construct
  misc_feature 1..23: note = HLA-A targeting gRNA
  source 1..23: mol_type = other DNA
cttgcttctccccgcagaggcgg

SEQ ID NO: 3207 - DNA, 23 bp, synthetic construct
  misc_feature 1..23: note = HLA-A targeting gRNA
  source 1..23: mol_type = other DNA
gcggctgtggtggtaccttctgg

SEQ ID NO: 3208 - DNA, 23 bp, synthetic construct
  misc_feature 1..23: note = HLA-A targeting gRNA
  source 1..23: mol_type = other DNA
gcgtcctgggggggtctgtcagg

SEQ ID NO: 3209 - DNA, 23 bp, synthetic construct
  misc_feature 1..23: note = HLA-A targeting gRNA
  source 1..23: mol_type = other DNA
gcgtctccttaccgttctccagg

SEQ ID NO: 3210 - DNA, 23 bp, synthetic construct
  misc_feature 1..23: note = HLA-A targeting gRNA
  source 1..23: mol_type = other DNA
gcgtctccttcccgttcttcagg

SEQ ID NO: 3211 - DNA, 23 bp, synthetic construct
  misc_feature 1..23: note = HLA-A targeting gRNA
  source 1..23: mol_type = other DNA
agagtagcaggaggagggttcgg

SEQ ID NO: 3212 - DNA, 23 bp, synthetic construct
  misc_feature 1..23: note = HLA-A targeting gRNA
  source 1..23: mol_type = other DNA
gcgtttccttcccgttctccagg

SEQ ID NO: 3213 - DNA, 23 bp, synthetic construct
  misc_feature 1..23: note = HLA-A targeting gRNA
  source 1..23: mol_type = other DNA
gcgttttgggggcgtctctcagg

SEQ ID NO: 3214 - DNA, 23 bp, synthetic construct
  misc_feature 1..23: note = HLA-A targeting gRNA
  source 1..23: mol_type = other DNA
agtagcaggaggagggttcgggg

SEQ ID NO: 3215 - DNA, 23 bp, synthetic construct
  misc_feature 1..23: note = HLA-A targeting gRNA
  source 1..23: mol_type = other DNA
gagtagcaggaggagggttcggg

SEQ ID NO: 3216 - DNA, 23 bp, synthetic construct
  misc_feature 1..23: note = HLA-A targeting gRNA
  source 1..23: mol_type = other DNA
agagccccgcttcatcgcagtgg

SEQ ID NO: 3217 - DNA, 23 bp, synthetic construct
  misc_feature 1..23: note = HLA-A targeting gRNA
  source 1..23: mol_type = other DNA
gctatggggtttctttgcgttgg

SEQ ID NO: 3218 - DNA, 23 bp, synthetic construct
  misc_feature 1..23: note = HLA-A targeting gRNA
  source 1..23: mol_type = other DNA
gctccctccttttctaactgtgg

SEQ ID NO: 3219 - DNA, 23 bp, synthetic construct
  misc_feature 1..23: note = HLA-A targeting gRNA
  source 1..23: mol_type = other DNA
gctcctttctggtagctcacagg

SEQ ID NO: 3220 - DNA, 23 bp, synthetic construct
  misc_feature 1..23: note = HLA-A targeting gRNA
  source 1..23: mol_type = other DNA
gctcttcttcctccacatcacgg

SEQ ID NO: 3221 - DNA, 23 bp, synthetic construct
  misc_feature 1..23: note = HLA-A targeting gRNA
  source 1..23: mol_type = other DNA
gctgcagcgcacaggtaccaggg

SEQ ID NO: 3222 - DNA, 23 bp, synthetic construct
  misc_feature 1..23: note = HLA-A targeting gRNA
  source 1..23: mol_type = other DNA
gctgcagcgcacgagtaccaggg

SEQ ID NO: 3223 - DNA, 23 bp, synthetic construct
  misc_feature 1..23: note = HLA-A targeting gRNA
  source 1..23: mol_type = other DNA
gctgcagcgcactggtaccaggg

SEQ ID NO: 3224 - DNA, 23 bp, synthetic construct
  misc_feature 1..23: note = HLA-A targeting gRNA
  source 1..23: mol_type = other DNA
gctgccacgtggggtcggacggg

SEQ ID NO: 3225 - DNA, 23 bp, synthetic construct
  misc_feature 1..23: note = HLA-A targeting gRNA
  source 1..23: mol_type = other DNA
gctgggcggggctcgggggctgg

SEQ ID NO: 3226 - DNA, 23 bp, synthetic construct
  misc_feature 1..23: note = HLA-A targeting gRNA
  source 1..23: mol_type = other DNA
gctgggctgaccgcggggtcggg

SEQ ID NO: 3227 - DNA, 23 bp, synthetic construct
  misc_feature 1..23: note = HLA-A targeting gRNA
  source 1..23: mol_type = other DNA
gctgggtgggcccatgattgtgg

SEQ ID NO: 3228 - DNA, 23 bp, synthetic construct
  misc_feature 1..23: note = HLA-A targeting gRNA
  source 1..23: mol_type = other DNA
gcttcacactcaatatgtgtggg

SEQ ID NO: 3229 - DNA, 23 bp, synthetic construct
  misc_feature 1..23: note = HLA-A targeting gRNA
  source 1..23: mol_type = other DNA
ggaaacttctctggggtccaagg

SEQ ID NO: 3230 - DNA, 23 bp, synthetic construct
  misc_feature 1..23: note = HLA-A targeting gRNA
  source 1..23: mol_type = other DNA
ggaaccccgcttcatcgccgtgg

SEQ ID NO: 3231 - DNA, 23 bp, synthetic construct
  misc_feature 1..23: note = HLA-A targeting gRNA
  source 1..23: mol_type = other DNA
ggaagcaccacccacaatcatgg

SEQ ID NO: 3232 - DNA, 23 bp, synthetic construct
  misc_feature 1..23: note = HLA-A targeting gRNA
  source 1..23: mol_type = other DNA
ggaaggagacgctgcagcgaagg

SEQ ID NO: 3233 - DNA, 23 bp, synthetic construct
  misc_feature 1..23: note = HLA-A targeting gRNA
  source 1..23: mol_type = other DNA
tggcccgtccgtgggggatgagg

SEQ ID NO: 3234 - DNA, 23 bp, synthetic construct
  misc_feature 1..23: note = HLA-A targeting gRNA
  source 1..23: mol_type = other DNA
ggaccaggagactgaccgagtgg

SEQ ID NO: 3235 - DNA, 23 bp, synthetic construct
  misc_feature 1..23: note = HLA-A targeting gRNA
  source 1..23: mol_type = other DNA
ggaccctcagagtcactctctgg

SEQ ID NO: 3236 - DNA, 23 bp, synthetic construct
  misc_feature 1..23: note = HLA-A targeting gRNA
  source 1..23: mol_type = other DNA
cggggcggggctcgggggactgg

SEQ ID NO: 3237 - DNA, 23 bp, synthetic construct
  misc_feature 1..23: note = HLA-A targeting gRNA
  source 1..23: mol_type = other DNA
ggacctgcgctcttagaccgcgg

SEQ ID NO: 3238 - DNA, 23 bp, synthetic construct
  misc_feature 1..23: note = HLA-A targeting gRNA
  source 1..23: mol_type = other DNA
ggggcggggctcgggggactggg

SEQ ID NO: 3239 - DNA, 23 bp, synthetic construct
  misc_feature 1..23: note = HLA-A targeting gRNA
  source 1..23: mol_type = other DNA
ggactccgagacccttgccccgg

SEQ ID NO: 3240 - DNA, 23 bp, synthetic construct
  misc_feature 1..23: note = HLA-A targeting gRNA
  source 1..23: mol_type = other DNA
ggactccgagacccttgtcccgg

SEQ ID NO: 3241 - DNA, 23 bp, synthetic construct
  misc_feature 1..23: note = HLA-A targeting gRNA
  source 1..23: mol_type = other DNA
ggagaaatacctcatggattggg

SEQ ID NO: 3242 - DNA, 23 bp, synthetic construct
  misc_feature 1..23: note = HLA-A targeting gRNA
  source 1..23: mol_type = other DNA
tcacgacccctcatcccccacgg

SEQ ID NO: 3243 - DNA, 23 bp, synthetic construct
  misc_feature 1..23: note = HLA-A targeting gRNA
  source 1..23: mol_type = other DNA
ggagactgaccgagtggacctgg

SEQ ID NO: 3244 - DNA, 23 bp, synthetic construct
  misc_feature 1..23: note = HLA-A targeting gRNA
  source 1..23: mol_type = other DNA
ggagagcctacctggagggccgg

SEQ ID NO: 3245 - DNA, 23 bp, synthetic construct
  misc_feature 1..23: note = HLA-A targeting gRNA
  source 1..23: mol_type = other DNA
ggagagtctacctggagggccgg

SEQ ID NO: 3246 - DNA, 23 bp, synthetic construct
  misc_feature 1..23: note = HLA-A targeting gRNA
  source 1..23: mol_type = other DNA
ggagatgtagaaatacctcatgg

SEQ ID NO: 3247 - DNA, 23 bp, synthetic construct
  misc_feature 1..23: note = HLA-A targeting gRNA
  source 1..23: mol_type = other DNA
ggagcagcggagagtctacctgg

SEQ ID NO: 3248 - DNA, 23 bp, synthetic construct
  misc_feature 1..23: note = HLA-A targeting gRNA
  source 1..23: mol_type = other DNA
ggagccccgcggcttcggggtgg

SEQ ID NO: 3249 - DNA, 23 bp, synthetic construct
  misc_feature 1..23: note = HLA-A targeting gRNA
  source 1..23: mol_type = other DNA
ggagccccgcttcatcgctgtgg

SEQ ID NO: 3250 - DNA, 23 bp, synthetic construct
  misc_feature 1..23: note = HLA-A targeting gRNA
  source 1..23: mol_type = other DNA
ggagccctgcttcatcgccgtgg

SEQ ID NO: 3251 - DNA, 23 bp, synthetic construct
  misc_feature 1..23: note = HLA-A targeting gRNA
  source 1..23: mol_type = other DNA
ggagccggagtattgggacgagg

SEQ ID NO: 3252 - DNA, 23 bp, synthetic construct
  misc_feature 1..23: note = HLA-A targeting gRNA
  source 1..23: mol_type = other DNA
ggagcctgggggcgaggagtggg

SEQ ID NO: 3253 - DNA, 23 bp, synthetic construct
  misc_feature 1..23: note = HLA-A targeting gRNA
  source 1..23: mol_type = other DNA
ggaggactagacccaggacacgg

SEQ ID NO: 3254 - DNA, 23 bp, synthetic construct
  misc_feature 1..23: note = HLA-A targeting gRNA
  source 1..23: mol_type = other DNA
ggagggcgatattatagtgttgg

SEQ ID NO: 3255 - DNA, 23 bp, synthetic construct
  misc_feature 1..23: note = HLA-A targeting gRNA
  source 1..23: mol_type = other DNA
ggagtaggagcctgggggcgagg

SEQ ID NO: 3256 - DNA, 23 bp, synthetic construct
  misc_feature 1..23: note = HLA-A targeting gRNA
  source 1..23: mol_type = other DNA
ggagtcccgcggcttcggggcgg

SEQ ID NO: 3257 - DNA, 23 bp, synthetic construct
  misc_feature 1..23: note = HLA-A targeting gRNA
  source 1..23: mol_type = other DNA
ggagtcccgcggcttcggggtgg

SEQ ID NO: 3258 - DNA, 23 bp, synthetic construct
  misc_feature 1..23: note = HLA-A targeting gRNA
  source 1..23: mol_type = other DNA
cacgcactcgccctccaggtagg

SEQ ID NO: 3259 - DNA, 23 bp, synthetic construct
  misc_feature 1..23: note = HLA-A targeting gRNA
  source 1..23: mol_type = other DNA
ctacctggagggcgagtgcgtgg

SEQ ID NO: 3260 - DNA, 23 bp, synthetic construct
  misc_feature 1..23: note = HLA-A targeting gRNA
  source 1..23: mol_type = other DNA
ggatagggaggaccagacccagg

SEQ ID NO: 3261 - DNA, 23 bp, synthetic construct
  misc_feature 1..23: note = HLA-A targeting gRNA
  source 1..23: mol_type = other DNA
ggatgggaccttccagaagtggg

SEQ ID NO: 3262 - DNA, 23 bp, synthetic construct
  misc_feature 1..23: note = HLA-A targeting gRNA
  source 1..23: mol_type = other DNA
ggatggggaggactagacccagg

SEQ ID NO: 3263 - DNA, 23 bp, synthetic construct
  misc_feature 1..23: note = HLA-A targeting gRNA
  source 1..23: mol_type = other DNA
ggatgtatggttgcgacgtgggg

SEQ ID NO: 3264 - DNA, 23 bp, synthetic construct
  misc_feature 1..23: note = HLA-A targeting gRNA
  source 1..23: mol_type = other DNA
ggatgtattgagcatgcaatggg

SEQ ID NO: 3265 - DNA, 23 bp, synthetic construct
  misc_feature 1..23: note = HLA-A targeting gRNA
  source 1..23: mol_type = other DNA
ggattgggagcctggggacgagg

SEQ ID NO: 3266 - DNA, 23 bp, synthetic construct
  misc_feature 1..23: note = HLA-A targeting gRNA
  source 1..23: mol_type = other DNA
ggccaaaaatccccccgggtggg

SEQ ID NO: 3267 - DNA, 23 bp, synthetic construct
  misc_feature 1..23: note = HLA-A targeting gRNA
  source 1..23: mol_type = other DNA
ggccagccccggagatctacagg

SEQ ID NO: 3268 - DNA, 23 bp, synthetic construct
  misc_feature 1..23: note = HLA-A targeting gRNA
  source 1..23: mol_type = other DNA
ggcccgtccgtaggggatgaggg

SEQ ID NO: 3269 - DNA, 23 bp, synthetic construct
  misc_feature 1..23: note = HLA-A targeting gRNA
  source 1..23: mol_type = other DNA
ggcccgtccgtggggaatgaggg

SEQ ID NO: 3270 - DNA, 23 bp, synthetic construct
  misc_feature 1..23: note = HLA-A targeting gRNA
  source 1..23: mol_type = other DNA
ggccctgacccagaccagggcgg

SEQ ID NO: 3271 - DNA, 23 bp, synthetic construct
  misc_feature 1..23: note = HLA-A targeting gRNA
  source 1..23: mol_type = other DNA
ggccctgagcttctaccctgtgg

SEQ ID NO: 3272 - DNA, 23 bp, synthetic construct
  misc_feature 1..23: note = HLA-A targeting gRNA
  source 1..23: mol_type = other DNA
ggccgcctcccacttgcgctcgg

SEQ ID NO: 3273 - DNA, 23 bp, synthetic construct
  misc_feature 1..23: note = HLA-A targeting gRNA
  source 1..23: mol_type = other DNA
ggcgacctggcccgtccgtaggg

SEQ ID NO: 3274 - DNA, 23 bp, synthetic construct
  misc_feature 1..23: note = HLA-A targeting gRNA
  source 1..23: mol_type = other DNA
ggcgccatgatggccatcctcgg

SEQ ID NO: 3275 - DNA, 23 bp, synthetic construct
  misc_feature 1..23: note = HLA-A targeting gRNA
  source 1..23: mol_type = other DNA
ggcggcatgacggccatcctcgg

SEQ ID NO: 3276 - DNA, 23 bp, synthetic construct
  misc_feature 1..23: note = HLA-A targeting gRNA
  source 1..23: mol_type = other DNA
ggctccgagacccttgtcccggg

SEQ ID NO: 3277 - DNA, 23 bp, synthetic construct
  misc_feature 1..23: note = HLA-A targeting gRNA
  source 1..23: mol_type = other DNA
ggctcctcctgctctatccacgg

SEQ ID NO: 3278 - DNA, 23 bp, synthetic construct
  misc_feature 1..23: note = HLA-A targeting gRNA
  source 1..23: mol_type = other DNA
ggctgccacgtggggtcggacgg

SEQ ID NO: 3279 - DNA, 23 bp, synthetic construct
  misc_feature 1..23: note = HLA-A targeting gRNA
  source 1..23: mol_type = other DNA
ggctggcctcccacaagaaaggg

SEQ ID NO: 3280 - DNA, 23 bp, synthetic construct
  misc_feature 1..23: note = HLA-A targeting gRNA
  source 1..23: mol_type = other DNA
ggctgggctgaccgcggggtcgg

SEQ ID NO: 3281 - DNA, 23 bp, synthetic construct
  misc_feature 1..23: note = HLA-A targeting gRNA
  source 1..23: mol_type = other DNA
gggagactccgcccatgaggcgg

SEQ ID NO: 3282 - DNA, 23 bp, synthetic construct
  misc_feature 1..23: note = HLA-A targeting gRNA
  source 1..23: mol_type = other DNA
gggagctgggcggggctcggggg

SEQ ID NO: 3283 - DNA, 23 bp, synthetic construct
  misc_feature 1..23: note = HLA-A targeting gRNA
  source 1..23: mol_type = other DNA
gggaggcgccccgtggtccctgg

SEQ ID NO: 3284 - DNA, 23 bp, synthetic construct
  misc_feature 1..23: note = HLA-A targeting gRNA
  source 1..23: mol_type = other DNA
gggaggcgccctgtggcccctgg

SEQ ID NO: 3285 - DNA, 23 bp, synthetic construct
  misc_feature 1..23: note = HLA-A targeting gRNA
  source 1..23: mol_type = other DNA
gggatgggaccttccagaagtgg

SEQ ID NO: 3286 - DNA, 23 bp, synthetic construct
  misc_feature 1..23: note = HLA-A targeting gRNA
  source 1..23: mol_type = other DNA
gggcctgagaggaaaagtcacgg

SEQ ID NO: 3287 - DNA, 23 bp, synthetic construct
  misc_feature 1..23: note = HLA-A targeting gRNA
  source 1..23: mol_type = other DNA
gggcgacctggcccgtccgtagg

SEQ ID NO: 3288 - DNA, 23 bp, synthetic construct
  misc_feature 1..23: note = HLA-A targeting gRNA
  source 1..23: mol_type = other DNA
gggcggggctcgggggagctggg

SEQ ID NO: 3289 - DNA, 23 bp, synthetic construct
  misc_feature 1..23: note = HLA-A targeting gRNA
  source 1..23: mol_type = other DNA
gggctccgagacccttgtcccgg

SEQ ID NO: 3290 - DNA, 23 bp, synthetic construct
  misc_feature 1..23: note = HLA-A targeting gRNA
  source 1..23: mol_type = other DNA
gggctcgggggagctgggcgggg

SEQ ID NO: 3291 - DNA, 23 bp, synthetic construct
  misc_feature 1..23: note = HLA-A targeting gRNA
  source 1..23: mol_type = other DNA
gggctggcctcccacaagaaagg

SEQ ID NO: 3292 - DNA, 23 bp, synthetic construct
  misc_feature 1..23: note = HLA-A targeting gRNA
  source 1..23: mol_type = other DNA
ggggagctgggcggggctcgggg

SEQ ID NO: 3293 - DNA, 23 bp, synthetic construct
  misc_feature 1..23: note = HLA-A targeting gRNA
  source 1..23: mol_type = other DNA
ggggccggagtattgggacgggg

SEQ ID NO: 3294 - DNA, 23 bp, synthetic construct
  misc_feature 1..23: note = HLA-A targeting gRNA
  source 1..23: mol_type = other DNA
acccctcatcccccacggacggg

SEQ ID NO: 3295 - DNA, 23 bp, synthetic construct
  misc_feature 1..23: note = HLA-A targeting gRNA
  source 1..23: mol_type = other DNA
ggggctcgggggagctgggcggg

SEQ ID NO: 3296 - DNA, 23 bp, synthetic construct
  misc_feature 1..23: note = HLA-A targeting gRNA
  source 1..23: mol_type = other DNA
gacccctcatcccccacggacgg

SEQ ID NO: 3297 - DNA, 23 bp, synthetic construct
  misc_feature 1..23: note = HLA-A targeting gRNA
  source 1..23: mol_type = other DNA
gcccgtccgtgggggatgagggg

SEQ ID NO: 3298 - DNA, 23 bp, synthetic construct
  misc_feature 1..23: note = HLA-A targeting gRNA
  source 1..23: mol_type = other DNA
ggcccgtccgtgggggatgaggg

SEQ ID NO: 3299 - DNA, 23 bp, synthetic construct
  misc_feature 1..23: note = HLA-A targeting gRNA
  source 1..23: mol_type = other DNA
gggggagctgggcggggctcggg

SEQ ID NO: 3300 - DNA, 23 bp, synthetic construct
  misc_feature 1..23: note = HLA-A targeting gRNA
  source 1..23: mol_type = other DNA
ccagggcccccgagagtagcagg

SEQ ID NO: 3301 - DNA, 23 bp, synthetic construct
  misc_feature 1..23: note = HLA-A targeting gRNA
  source 1..23: mol_type = other DNA
cctgctactctcgggggccctgg

SEQ ID NO: 3302 - DNA, 23 bp, synthetic construct
  misc_feature 1..23: note = HLA-A targeting gRNA
  source 1..23: mol_type = other DNA
ggggtcctgacctgcgccaccgg

SEQ ID NO: 3303 - DNA, 23 bp, synthetic construct
  misc_feature 1..23: note = HLA-A targeting gRNA
  source 1..23: mol_type = other DNA
ggggttccccgcggccgggccgg

SEQ ID NO: 3304 - DNA, 23 bp, synthetic construct
  misc_feature 1..23: note = HLA-A targeting gRNA
  source 1..23: mol_type = other DNA
gggtgggtcggggcggggcgggg

SEQ ID NO: 3305 - DNA, 23 bp, synthetic construct
  misc_feature 1..23: note = HLA-A targeting gRNA
  source 1..23: mol_type = other DNA
gggttccccgcggccgggccggg

SEQ ID NO: 3306 - DNA, 23 bp, synthetic construct
  misc_feature 1..23: note = HLA-A targeting gRNA
  source 1..23: mol_type = other DNA
ggtacagaatctggaaacccagg

SEQ ID NO: 3307 - DNA, 23 bp, synthetic construct
  misc_feature 1..23: note = HLA-A targeting gRNA
  source 1..23: mol_type = other DNA
ggtcatatgtgtcttgggggggg

SEQ ID NO: 3308 - DNA, 23 bp, synthetic construct
  misc_feature 1..23: note = HLA-A targeting gRNA
  source 1..23: mol_type = other DNA
ggtccactcggtcagtctcctgg

SEQ ID NO: 3309 - DNA, 23 bp, synthetic construct
  misc_feature 1..23: note = HLA-A targeting gRNA
  source 1..23: mol_type = other DNA
ggtccatgcggcgggagcagcgg

SEQ ID NO: 3310 - DNA, 23 bp, synthetic construct
  misc_feature 1..23: note = HLA-A targeting gRNA
  source 1..23: mol_type = other DNA
ggtcccatcccctgcaggcctgg

SEQ ID NO: 3311 - DNA, 23 bp, synthetic construct
  misc_feature 1..23: note = HLA-A targeting gRNA
  source 1..23: mol_type = other DNA
ggtccctgacgacagacctcagg

SEQ ID NO: 3312 - DNA, 23 bp, synthetic construct
  misc_feature 1..23: note = HLA-A targeting gRNA
  source 1..23: mol_type = other DNA
ggtccttgggatattgtggttgg

SEQ ID NO: 3313 - DNA, 23 bp, synthetic construct
  misc_feature 1..23: note = HLA-A targeting gRNA
  source 1..23: mol_type = other DNA
gagccccgcttcatcgccgtggg

SEQ ID NO: 3314 - DNA, 23 bp, synthetic construct
  misc_feature 1..23: note = HLA-A targeting gRNA
  source 1..23: mol_type = other DNA
ggagccccgcttcatcgccgtgg

SEQ ID NO: 3315 - DNA, 23 bp, synthetic construct
  misc_feature 1..23: note = HLA-A targeting gRNA
  source 1..23: mol_type = other DNA
ggtctgcattcacacatttctgg

SEQ ID NO: 3316 - DNA, 23 bp, synthetic construct
  misc_feature 1..23: note = HLA-A targeting gRNA
  source 1..23: mol_type = other DNA
cgtagcccacggcgatgaagcgg

SEQ ID NO: 3317 - DNA, 23 bp, synthetic construct
  misc_feature 1..23: note = HLA-A targeting gRNA
  source 1..23: mol_type = other DNA
ggtgagtcatatgcgtcctgggg

SEQ ID NO: 3318 - DNA, 23 bp, synthetic construct
  misc_feature 1..23: note = HLA-A targeting gRNA
  source 1..23: mol_type = other DNA
gtagcccacggcgatgaagcggg

SEQ ID NO: 3319 - DNA, 23 bp, synthetic construct
  misc_feature 1..23: note = HLA-A targeting gRNA
  source 1..23: mol_type = other DNA
ggtgagtcatatgtgtcttgggg

SEQ ID NO: 3320 - DNA, 23 bp, synthetic construct
  misc_feature 1..23: note = HLA-A targeting gRNA
  source 1..23: mol_type = other DNA
ggtggacatgggggtggggtggg

SEQ ID NO: 3321 - DNA, 23 bp, synthetic construct
  misc_feature 1..23: note = HLA-A targeting gRNA
  source 1..23: mol_type = other DNA
tagcccacggcgatgaagcgggg

SEQ ID NO: 3322 - DNA, 23 bp, synthetic construct
  misc_feature 1..23: note = HLA-A targeting gRNA
  source 1..23: mol_type = other DNA
cttcatcgccgtgggctacgtgg

SEQ ID NO: 3323 - DNA, 23 bp, synthetic construct
  misc_feature 1..23: note = HLA-A targeting gRNA
  source 1..23: mol_type = other DNA
ggtgggcccatgattgtgggtgg

SEQ ID NO: 3324 - DNA, 23 bp, synthetic construct
  misc_feature 1..23: note = HLA-A targeting gRNA
  source 1..23: mol_type = other DNA
ggtggtcatatgtgtcttggggg

SEQ ID NO: 3325 - DNA, 23 bp, synthetic construct
  misc_feature 1..23: note = HLA-A targeting gRNA
  source 1..23: mol_type = other DNA
ggtggtggtcatatgtgtcttgg

SEQ ID NO: 3326 - DNA, 23 bp, synthetic construct
  misc_feature 1..23: note = HLA-A targeting gRNA
  source 1..23: mol_type = other DNA
ggttccatcccctgcaggcttgg

SEQ ID NO: 3327 - DNA, 23 bp, synthetic construct
  misc_feature 1..23: note = HLA-A targeting gRNA
  source 1..23: mol_type = other DNA
ggttgcgacgtggggccggacgg

SEQ ID NO: 3328 - DNA, 23 bp, synthetic construct
  misc_feature 1..23: note = HLA-A targeting gRNA
  source 1..23: mol_type = other DNA
gtagaaatacctcatggagtagg

SEQ ID NO: 3329 - DNA, 23 bp, synthetic construct
  misc_feature 1..23: note = HLA-A targeting gRNA
  source 1..23: mol_type = other DNA
gtagcccacagcgatgaagcggg

SEQ ID NO: 3330 - DNA, 23 bp, synthetic construct
  misc_feature 1..23: note = HLA-A targeting gRNA
  source 1..23: mol_type = other DNA
gtagcccacggcgatgaagcagg

SEQ ID NO: 3331 - DNA, 23 bp, synthetic construct
  misc_feature 1..23: note = HLA-A targeting gRNA
  source 1..23: mol_type = other DNA
gtatggctgccacgtggggtcgg

SEQ ID NO: 3332 - DNA, 23 bp, synthetic construct
  misc_feature 1..23: note = HLA-A targeting gRNA
  source 1..23: mol_type = other DNA
gtatggttgcgacgtggggccgg

SEQ ID NO: 3333 - DNA, 23 bp, synthetic construct
  misc_feature 1..23: note = HLA-A targeting gRNA
  source 1..23: mol_type = other DNA
gtcagatcccacagaacatgtgg

SEQ ID NO: 3334 - DNA, 23 bp, synthetic construct
  misc_feature 1..23: note = HLA-A targeting gRNA
  source 1..23: mol_type = other DNA
gtcccatgacagatgcaaaatgg

SEQ ID NO: 3335 - DNA, 23 bp, synthetic construct
  misc_feature 1..23: note = HLA-A targeting gRNA
  source 1..23: mol_type = other DNA
gtcctccccatcccgctgtcagg

SEQ ID NO: 3336 - DNA, 23 bp, synthetic construct
  misc_feature 1..23: note = HLA-A targeting gRNA
  source 1..23: mol_type = other DNA
gtcctccctatcccgctgccagg

SEQ ID NO: 3337 - DNA, 23 bp, synthetic construct
  misc_feature 1..23: note = HLA-A targeting gRNA
  source 1..23: mol_type = other DNA
gtccttgggatattgtggttggg

SEQ ID NO: 3338 - DNA, 23 bp, synthetic construct
  misc_feature 1..23: note = HLA-A targeting gRNA
  source 1..23: mol_type = other DNA
gtctcggagccccgcggcttcgg

SEQ ID NO: 3339 - DNA, 23 bp, synthetic construct
  misc_feature 1..23: note = HLA-A targeting gRNA
  source 1..23: mol_type = other DNA
gtctcggagtcccgcggcttcgg

SEQ ID NO: 3340 - DNA, 23 bp, synthetic construct
  misc_feature 1..23: note = HLA-A targeting gRNA
  source 1..23: mol_type = other DNA
ccaggtctgggtcagggccaggg

SEQ ID NO: 3341 - DNA, 23 bp, synthetic construct
  misc_feature 1..23: note = HLA-A targeting gRNA
  source 1..23: mol_type = other DNA
cccaggtctgggtcagggccagg

SEQ ID NO: 3342 - DNA, 23 bp, synthetic construct
  misc_feature 1..23: note = HLA-A targeting gRNA
  source 1..23: mol_type = other DNA
ccctggccctgacccagacctgg

SEQ ID NO: 3343 - DNA, 23 bp, synthetic construct
  misc_feature 1..23: note = HLA-A targeting gRNA
  source 1..23: mol_type = other DNA
cctggccctgacccagacctggg

SEQ ID NO: 3344 - DNA, 23 bp, synthetic construct
  misc_feature 1..23: note = HLA-A targeting gRNA
  source 1..23: mol_type = other DNA
gtgaccccggccggtggcgcagg

SEQ ID NO: 3345 - DNA, 23 bp, synthetic construct
  misc_feature 1..23: note = HLA-A targeting gRNA
  source 1..23: mol_type = other DNA
gtgacctgcgcccccggccgggg

SEQ ID NO: 3346 - DNA, 23 bp, synthetic construct
  misc_feature 1..23: note = HLA-A targeting gRNA
  source 1..23: mol_type = other DNA
gtgagtcatatgcgtcctggggg

SEQ ID NO: 3347 - DNA, 23 bp, synthetic construct
  misc_feature 1..23: note = HLA-A targeting gRNA
  source 1..23: mol_type = other DNA
gtgagtcatatgtgtcttggggg

SEQ ID NO: 3348 - DNA, 23 bp, synthetic construct
  misc_feature 1..23: note = HLA-A targeting gRNA
  source 1..23: mol_type = other DNA
gtgcttcccaggaatgagacagg

SEQ ID NO: 3349 - DNA, 23 bp, synthetic construct
  misc_feature 1..23: note = HLA-A targeting gRNA
  source 1..23: mol_type = other DNA
gtcactcaccgtcctcgctctgg

SEQ ID NO: 3350 - DNA, 23 bp, synthetic construct
  misc_feature 1..23: note = HLA-A targeting gRNA
  source 1..23: mol_type = other DNA
acggtgagtgaccccggcccggg

SEQ ID NO: 3351 - DNA, 23 bp, synthetic construct
  misc_feature 1..23: note = HLA-A targeting gRNA
  source 1..23: mol_type = other DNA
gacggtgagtgaccccggcccgg

SEQ ID NO: 3352 - DNA, 23 bp, synthetic construct
  misc_feature 1..23: note = HLA-A targeting gRNA
  source 1..23: mol_type = other DNA
gtggacctggggaccctgcacgg

SEQ ID NO: 3353 - DNA, 23 bp, synthetic construct
  misc_feature 1..23: note = HLA-A targeting gRNA
  source 1..23: mol_type = other DNA
tactacaaccagagcgaggacgg

SEQ ID NO: 3354 - DNA, 23 bp, synthetic construct
  misc_feature 1..23: note = HLA-A targeting gRNA
  source 1..23: mol_type = other DNA
gtggatagagcaggaggagccgg

SEQ ID NO: 3355 - DNA, 23 bp, synthetic construct
  misc_feature 1..23: note = HLA-A targeting gRNA
  source 1..23: mol_type = other DNA
gcgaggacggtgagtgaccccgg

SEQ ID NO: 3356 - DNA, 23 bp, synthetic construct
  misc_feature 1..23: note = HLA-A targeting gRNA
  source 1..23: mol_type = other DNA
gtgttccggtcccaatactccgg

SEQ ID NO: 3357 - DNA, 23 bp, synthetic construct
  misc_feature 1..23: note = HLA-A targeting gRNA
  source 1..23: mol_type = other DNA
gtgggaggcggcccatgaggcgg

SEQ ID NO: 3358 - DNA, 23 bp, synthetic construct
  misc_feature 1..23: note = HLA-A targeting gRNA
  source 1..23: mol_type = other DNA
gtgggaggcggcccgtgtggagg

SEQ ID NO: 3359 - DNA, 23 bp, synthetic construct
  misc_feature 1..23: note = HLA-A targeting gRNA
  source 1..23: mol_type = other DNA
gtgggctgggaagatggctctgg

SEQ ID NO: 3360 - DNA, 23 bp, synthetic construct
  misc_feature 1..23: note = HLA-A targeting gRNA
  source 1..23: mol_type = other DNA
gtgggaggcggcccgttgggcgg

SEQ ID NO: 3361 - DNA, 23 bp, synthetic construct
  misc_feature 1..23: note = HLA-A targeting gRNA
  source 1..23: mol_type = other DNA
gtgggaggcggtccatgcggcgg

SEQ ID NO: 3362 - DNA, 23 bp, synthetic construct
  misc_feature 1..23: note = HLA-A targeting gRNA
  source 1..23: mol_type = other DNA
tgggctgggaagatggctctggg

SEQ ID NO: 3363 - DNA, 23 bp, synthetic construct
  misc_feature 1..23: note = HLA-A targeting gRNA
  source 1..23: mol_type = other DNA
gtggtcatatgtgtcttgggggg

SEQ ID NO: 3364 - DNA, 23 bp, synthetic construct
  misc_feature 1..23: note = HLA-A targeting gRNA
  source 1..23: mol_type = other DNA
gtggtgagtcatatgcgtcctgg

SEQ ID NO: 3365 - DNA, 23 bp, synthetic construct
  misc_feature 1..23: note = HLA-A targeting gRNA
  source 1..23: mol_type = other DNA
gtggtgagtcatatgtgtcttgg

SEQ ID NO: 3366 - DNA, 23 bp, synthetic construct
  misc_feature 1..23: note = HLA-A targeting gRNA
  source 1..23: mol_type = other DNA
gtggtggtcatatgtgtcttggg

SEQ ID NO: 3367 - DNA, 23 bp, synthetic construct
  misc_feature 1..23: note = HLA-A targeting gRNA
  source 1..23: mol_type = other DNA
gtgtcttgggggcgtctgtcagg

SEQ ID NO: 3368 - DNA, 23 bp, synthetic construct
  misc_feature 1..23: note = HLA-A targeting gRNA
  source 1..23: mol_type = other DNA
gtgtcttggggggggtctgacgg

SEQ ID NO: 3369 - DNA, 23 bp, synthetic construct
  misc_feature 1..23: note = HLA-A targeting gRNA
  source 1..23: mol_type = other DNA
gttgcgacgtggggccggacggg

SEQ ID NO: 3370 - DNA, 23 bp, synthetic construct
  misc_feature 1..23: note = HLA-A targeting gRNA
  source 1..23: mol_type = other DNA
gttggggaatctccaaggctggg

SEQ ID NO: 3371 - DNA, 23 bp, synthetic construct
  misc_feature 1..23: note = HLA-A targeting gRNA
  source 1..23: mol_type = other DNA
gttggtgtaggcataatgtgagg

SEQ ID NO: 3372 - DNA, 23 bp, synthetic construct
  misc_feature 1..23: note = HLA-A targeting gRNA
  source 1..23: mol_type = other DNA
gtttaggccaaaaatccccctgg

SEQ ID NO: 3373 - DNA, 23 bp, synthetic construct
  misc_feature 1..23: note = HLA-A targeting gRNA
  source 1..23: mol_type = other DNA
gtttccagagagtgactctgagg

SEQ ID NO: 3374 - DNA, 23 bp, synthetic construct
  misc_feature 1..23: note = HLA-A targeting gRNA
  source 1..23: mol_type = other DNA
taaagcacctgttacaatgaagg

SEQ ID NO: 3375 - DNA, 23 bp, synthetic construct
  misc_feature 1..23: note = HLA-A targeting gRNA
  source 1..23: mol_type = other DNA
taaggagacgctgcagcgcacgg

SEQ ID NO: 3376 - DNA, 23 bp, synthetic construct
  misc_feature 1..23: note = HLA-A targeting gRNA
  source 1..23: mol_type = other DNA
taagggataaaaatctctgaagg

SEQ ID NO: 3377 - DNA, 23 bp, synthetic construct
  misc_feature 1..23: note = HLA-A targeting gRNA
  source 1..23: mol_type = other DNA
taatcttctattccctgacgagg

SEQ ID NO: 3378 - DNA, 23 bp, synthetic construct
  misc_feature 1..23: note = HLA-A targeting gRNA
  source 1..23: mol_type = other DNA
taatcttctattccctgcagagg

SEQ ID NO: 3379 - DNA, 23 bp, synthetic construct
  misc_feature 1..23: note = HLA-A targeting gRNA
  source 1..23: mol_type = other DNA
tacatctccgtgtcccggcccgg

SEQ ID NO: 3380 - DNA, 23 bp, synthetic construct
  misc_feature 1..23: note = HLA-A targeting gRNA
  source 1..23: mol_type = other DNA
taccagcaggacgcttacgacgg

SEQ ID NO: 3381 - DNA, 23 bp, synthetic construct
  misc_feature 1..23: note = HLA-A targeting gRNA
  source 1..23: mol_type = other DNA
taccggcagcacgcctacgacgg

SEQ ID NO: 3382 - DNA, 23 bp, synthetic construct
  misc_feature 1..23: note = HLA-A targeting gRNA
  source 1..23: mol_type = other DNA
taccggcaggacgcctaagacgg

SEQ ID NO: 3383 - DNA, 23 bp, synthetic construct
  misc_feature 1..23: note = HLA-A targeting gRNA
  source 1..23: mol_type = other DNA
taccggcaggacgcctacgaagg

SEQ ID NO: 3384 - DNA, 23 bp, synthetic construct
  misc_feature 1..23: note = HLA-A targeting gRNA
  source 1..23: mol_type = other DNA
taccggcaggtcgcctacgacgg

SEQ ID NO: 3385 - DNA, 23 bp, synthetic construct
  misc_feature 1..23: note = HLA-A targeting gRNA
  source 1..23: mol_type = other DNA
taccgttctccaggtatctgcgg

SEQ ID NO: 3386 - DNA, 23 bp, synthetic construct
  misc_feature 1..23: note = HLA-A targeting gRNA
  source 1..23: mol_type = other DNA
tacctcatggagtaggagcctgg

SEQ ID NO: 3387 - DNA, 23 bp, synthetic construct
  misc_feature 1..23: note = HLA-A targeting gRNA
  source 1..23: mol_type = other DNA
tacctcatggattgggagcctgg

SEQ ID NO: 3388 - DNA, 23 bp, synthetic construct
  misc_feature 1..23: note = HLA-A targeting gRNA
  source 1..23: mol_type = other DNA
tactacaacgagagcgaggccgg

SEQ ID NO: 3389 - DNA, 23 bp, synthetic construct
  misc_feature 1..23: note = HLA-A targeting gRNA
  source 1..23: mol_type = other DNA
tagcccacagcgatgaagcgggg

SEQ ID NO: 3390 - DNA, 23 bp, synthetic construct
  misc_feature 1..23: note = HLA-A targeting gRNA
  source 1..23: mol_type = other DNA
tagcccacggcgatgaagcaggg

SEQ ID NO: 3391 - DNA, 23 bp, synthetic construct
  misc_feature 1..23: note = HLA-A targeting gRNA
  source 1..23: mol_type = other DNA
taggcataatgtgaggagatagg

SEQ ID NO: 3392 - DNA, 23 bp, synthetic construct
  misc_feature 1..23: note = HLA-A targeting gRNA
  source 1..23: mol_type = other DNA
tatctcttctcctttccagaagg

SEQ ID NO: 3393 - DNA, 23 bp, synthetic construct
  misc_feature 1..23: note = HLA-A targeting gRNA
  source 1..23: mol_type = other DNA
tattgtggttgggagcccatggg

SEQ ID NO: 3394 - DNA, 23 bp, synthetic construct
  misc_feature 1..23: note = HLA-A targeting gRNA
  source 1..23: mol_type = other DNA
tcaccctccctctgctcctgagg

SEQ ID NO: 3395 - DNA, 23 bp, synthetic construct
  misc_feature 1..23: note = HLA-A targeting gRNA
  source 1..23: mol_type = other DNA
tcacgacccctcatcccctacgg

SEQ ID NO: 3396 - DNA, 23 bp, synthetic construct
  misc_feature 1..23: note = HLA-A targeting gRNA
  source 1..23: mol_type = other DNA
tcacgacccctcattccccacgg

SEQ ID NO: 3397 - DNA, 23 bp, synthetic construct
  misc_feature 1..23: note = HLA-A targeting gRNA
  source 1..23: mol_type = other DNA
gggatggtgggctgggaagatgg

SEQ ID NO: 3398 - DNA, 23 bp, synthetic construct
  misc_feature 1..23: note = HLA-A targeting gRNA
  source 1..23: mol_type = other DNA
tcactctctggaaacccaggagg

SEQ ID NO: 3399 - DNA, 23 bp, synthetic construct
  misc_feature 1..23: note = HLA-A targeting gRNA
  source 1..23: mol_type = other DNA
tcactctctggtacagaatctgg

SEQ ID NO: 3400 - DNA, 23 bp, synthetic construct
  misc_feature 1..23: note = HLA-A targeting gRNA
  source 1..23: mol_type = other DNA
tcagatcaccaagcacaagtggg

SEQ ID NO: 3401 - DNA, 23 bp, synthetic construct
  misc_feature 1..23: note = HLA-A targeting gRNA
  source 1..23: mol_type = other DNA
tcagatcaccgagcgcaagtggg

SEQ ID NO: 3402 - DNA, 23 bp, synthetic construct
  misc_feature 1..23: note = HLA-A targeting gRNA
  source 1..23: mol_type = other DNA
tcatcccctacggacgggccagg

SEQ ID NO: 3403 - DNA, 23 bp, synthetic construct
  misc_feature 1..23: note = HLA-A targeting gRNA
  source 1..23: mol_type = other DNA
tcattccccacggacgggccggg

SEQ ID NO: 3404 - DNA, 23 bp, synthetic construct
  misc_feature 1..23: note = HLA-A targeting gRNA
  source 1..23: mol_type = other DNA
tccccccgggtgggtcggggcgg

SEQ ID NO: 3405 - DNA, 23 bp, synthetic construct
  misc_feature 1..23: note = HLA-A targeting gRNA
  source 1..23: mol_type = other DNA
gagcccctcaccctgagatgggg

SEQ ID NO: 3406 - DNA, 23 bp, synthetic construct
  misc_feature 1..23: note = HLA-A targeting gRNA
  source 1..23: mol_type = other DNA
tccccctggttggtcggggccgg

SEQ ID NO: 3407 - DNA, 23 bp, synthetic construct
  misc_feature 1..23: note = HLA-A targeting gRNA
  source 1..23: mol_type = other DNA
tcccgttcttcaggtatctgcgg

SEQ ID NO: 3408 - DNA, 23 bp, synthetic construct
  misc_feature 1..23: note = HLA-A targeting gRNA
  source 1..23: mol_type = other DNA
tccctccttaacccatctcaggg

SEQ ID NO: 3409 - DNA, 23 bp, synthetic construct
  misc_feature 1..23: note = HLA-A targeting gRNA
  source 1..23: mol_type = other DNA
tccctccttatcccatctcaggg

SEQ ID NO: 3410 - DNA, 23 bp, synthetic construct
  misc_feature 1..23: note = HLA-A targeting gRNA
  source 1..23: mol_type = other DNA
tccctctgctcctgagggagagg

SEQ ID NO: 3411 - DNA, 23 bp, synthetic construct
  misc_feature 1..23: note = HLA-A targeting gRNA
  source 1..23: mol_type = other DNA
tccgcagatacctgaagaacggg

SEQ ID NO: 3412 - DNA, 23 bp, synthetic construct
  misc_feature 1..23: note = HLA-A targeting gRNA
  source 1..23: mol_type = other DNA
tcctctagccacatgttctgtgg

SEQ ID NO: 3413 - DNA, 23 bp, synthetic construct
  misc_feature 1..23: note = HLA-A targeting gRNA
  source 1..23: mol_type = other DNA
tcctctccctcaggagcagaggg

SEQ ID NO: 3414 - DNA, 23 bp, synthetic construct
  misc_feature 1..23: note = HLA-A targeting gRNA
  source 1..23: mol_type = other DNA
tcctgacctgcgccaccggccgg

SEQ ID NO: 3415 - DNA, 23 bp, synthetic construct
  misc_feature 1..23: note = HLA-A targeting gRNA
  source 1..23: mol_type = other DNA
tcgccctccctctggtcttgagg

SEQ ID NO: 3416 - DNA, 23 bp, synthetic construct
  misc_feature 1..23: note = HLA-A targeting gRNA
  source 1..23: mol_type = other DNA
tcgctcggtcagtctgtgagtgg

SEQ ID NO: 3417 - DNA, 23 bp, synthetic construct
  misc_feature 1..23: note = HLA-A targeting gRNA
  source 1..23: mol_type = other DNA
tcgctcggttagtctgtgagtgg

SEQ ID NO: 3418 - DNA, 23 bp, synthetic construct
  misc_feature 1..23: note = HLA-A targeting gRNA
  source 1..23: mol_type = other DNA
tcgggccactcctcgcccccagg

SEQ ID NO: 3419 - DNA, 23 bp, synthetic construct
  misc_feature 1..23: note = HLA-A targeting gRNA
  source 1..23: mol_type = other DNA
tcgggggctgggctgaccgcggg

SEQ ID NO: 3420 - DNA, 23 bp, synthetic construct
  misc_feature 1..23: note = HLA-A targeting gRNA
  source 1..23: mol_type = other DNA
tcgtgacctgcgcccccggccgg

SEQ ID NO: 3421 - DNA, 23 bp, synthetic construct
  misc_feature 1..23: note = HLA-A targeting gRNA
  source 1..23: mol_type = other DNA
tcgtggaggccaggcctgcaggg

SEQ ID NO: 3422 - DNA, 23 bp, synthetic construct
  misc_feature 1..23: note = HLA-A targeting gRNA
  source 1..23: mol_type = other DNA
tcgtgtcccggcccggccgcggg

SEQ ID NO: 3423 - DNA, 23 bp, synthetic construct
  misc_feature 1..23: note = HLA-A targeting gRNA
  source 1..23: mol_type = other DNA
tctcaactgctccgcccaacggg

SEQ ID NO: 3424 - DNA, 23 bp, synthetic construct
  misc_feature 1..23: note = HLA-A targeting gRNA
  source 1..23: mol_type = other DNA
tctcaactgctcctccacacggg

SEQ ID NO: 3425 - DNA, 23 bp, synthetic construct
  misc_feature 1..23: note = HLA-A targeting gRNA
  source 1..23: mol_type = other DNA
tctcaactgctctgccacacggg

SEQ ID NO: 3426 - DNA, 23 bp, synthetic construct
  misc_feature 1..23: note = HLA-A targeting gRNA
  source 1..23: mol_type = other DNA
tctcactccaattgggtgtcggg

SEQ ID NO: 3427 - DNA, 23 bp, synthetic construct
  misc_feature 1..23: note = HLA-A targeting gRNA
  source 1..23: mol_type = other DNA
tctcactcctattgggtgtcggg

SEQ ID NO: 3428 - DNA, 23 bp, synthetic construct
  misc_feature 1..23: note = HLA-A targeting gRNA
  source 1..23: mol_type = other DNA
tctcagccactgctcgccccagg

SEQ ID NO: 3429 - DNA, 23 bp, synthetic construct
  misc_feature 1..23: note = HLA-A targeting gRNA
  source 1..23: mol_type = other DNA
tctcagctgctccgccacatggg

SEQ ID NO: 3430 - DNA, 23 bp, synthetic construct
  misc_feature 1..23: note = HLA-A targeting gRNA
  source 1..23: mol_type = other DNA
tctcagctgctccgcccgacggg

SEQ ID NO: 3431 - DNA, 23 bp, synthetic construct
  misc_feature 1..23: note = HLA-A targeting gRNA
  source 1..23: mol_type = other DNA
tctccacagggtagaagctcagg

SEQ ID NO: 3432 - DNA, 23 bp, synthetic construct
  misc_feature 1..23: note = HLA-A targeting gRNA
  source 1..23: mol_type = other DNA
tctccctcaagaccagagggagg

SEQ ID NO: 3433 - DNA, 23 bp, synthetic construct
  misc_feature 1..23: note = HLA-A targeting gRNA
  source 1..23: mol_type = other DNA
tctccctcaggagcagagggagg

SEQ ID NO: 3434 - DNA, 23 bp, synthetic construct
  misc_feature 1..23: note = HLA-A targeting gRNA
  source 1..23: mol_type = other DNA
tctccgctgctcccgccgcatgg

SEQ ID NO: 3435 - DNA, 23 bp, synthetic construct
  misc_feature 1..23: note = HLA-A targeting gRNA
  source 1..23: mol_type = other DNA
tctccgctgctccgcccgacggg

SEQ ID NO: 3436 - DNA, 23 bp, synthetic construct
  misc_feature 1..23: note = HLA-A targeting gRNA
  source 1..23: mol_type = other DNA
tctcggagccccgcggcttcggg

SEQ ID NO: 3437 - DNA, 23 bp, synthetic construct
  misc_feature 1..23: note = HLA-A targeting gRNA
  source 1..23: mol_type = other DNA
tctcggagtcccgcggcttcggg

SEQ ID NO: 3438 - DNA, 23 bp, synthetic construct
  misc_feature 1..23: note = HLA-A targeting gRNA
  source 1..23: mol_type = other DNA
tctcgttgtagtagccgcgcagg

SEQ ID NO: 3439 - DNA, 23 bp, synthetic construct
  misc_feature 1..23: note = HLA-A targeting gRNA
  source 1..23: mol_type = other DNA
tctctcggtcagtctgtgactgg

SEQ ID NO: 3440 - DNA, 23 bp, synthetic construct
  misc_feature 1..23: note = HLA-A targeting gRNA
  source 1..23: mol_type = other DNA
tctctcggtcagtctgtgatggg

SEQ ID NO: 3441 - DNA, 23 bp, synthetic construct
  misc_feature 1..23: note = HLA-A targeting gRNA
  source 1..23: mol_type = other DNA
tctctgcagggtagaagcccagg

SEQ ID NO: 3442 - DNA, 23 bp, synthetic construct
  misc_feature 1..23: note = HLA-A targeting gRNA
  source 1..23: mol_type = other DNA
tctctgctgctccgccacacggg

SEQ ID NO: 3443 - DNA, 23 bp, synthetic construct
  misc_feature 1..23: note = HLA-A targeting gRNA
  source 1..23: mol_type = other DNA
tctctgctgctccgcctcatggg

SEQ ID NO: 3444 - DNA, 23 bp, synthetic construct
  misc_feature 1..23: note = HLA-A targeting gRNA
  source 1..23: mol_type = other DNA
tctggttgtagtagccgtgcagg

SEQ ID NO: 3445 - DNA, 23 bp, synthetic construct
  misc_feature 1..23: note = HLA-A targeting gRNA
  source 1..23: mol_type = other DNA
tcttcctgacagacccccccagg

SEQ ID NO: 3446 - DNA, 23 bp, synthetic construct
  misc_feature 1..23: note = HLA-A targeting gRNA
  source 1..23: mol_type = other DNA
tcttctccctcaagaccagaggg

SEQ ID NO: 3447 - DNA, 23 bp, synthetic construct
  misc_feature 1..23: note = HLA-A targeting gRNA
  source 1..23: mol_type = other DNA
tgaaaatgaaaccgggttaaagg

SEQ ID NO: 3448 - DNA, 23 bp, synthetic construct
  misc_feature 1..23: note = HLA-A targeting gRNA
  source 1..23: mol_type = other DNA
tgaaaccggctaaaggcgcctgg

SEQ ID NO: 3449 - DNA, 23 bp, synthetic construct
  misc_feature 1..23: note = HLA-A targeting gRNA
  source 1..23: mol_type = other DNA
tgagagcctacctggagggccgg

SEQ ID NO: 3450 - DNA, 23 bp, synthetic construct
  misc_feature 1..23: note = HLA-A targeting gRNA
  source 1..23: mol_type = other DNA
ggggagccgcgccgggaggaggg

SEQ ID NO: 3451 - DNA, 23 bp, synthetic construct
  misc_feature 1..23: note = HLA-A targeting gRNA
  source 1..23: mol_type = other DNA
cgtgtcgtccacgtagcccacgg

SEQ ID NO: 3452 - DNA, 23 bp, synthetic construct
  misc_feature 1..23: note = HLA-A targeting gRNA
  source 1..23: mol_type = other DNA
catgtcccggcccggccgcgggg

SEQ ID NO: 3453 - DNA, 23 bp, synthetic construct
  misc_feature 1..23: note = HLA-A targeting gRNA
  source 1..23: mol_type = other DNA
tgagctaccagaaaggagccagg

SEQ ID NO: 3454 - DNA, 23 bp, synthetic construct
  misc_feature 1..23: note = HLA-A targeting gRNA
  source 1..23: mol_type = other DNA
tgaggatggacaggacacctggg

SEQ ID NO: 3455 - DNA, 23 bp, synthetic construct
  misc_feature 1..23: note = HLA-A targeting gRNA
  source 1..23: mol_type = other DNA
ccatgtcccggcccggccgcggg

SEQ ID NO: 3456 - DNA, 23 bp, synthetic construct
  misc_feature 1..23: note = HLA-A targeting gRNA
  source 1..23: mol_type = other DNA
cccgcggccgggccgggacatgg

SEQ ID NO: 3457 - DNA, 23 bp, synthetic construct
  misc_feature 1..23: note = HLA-A targeting gRNA
  source 1..23: mol_type = other DNA
tgaggccactctgaggtgctggg

SEQ ID NO: 3458 - DNA, 23 bp, synthetic construct
  misc_feature 1..23: note = HLA-A targeting gRNA
  source 1..23: mol_type = other DNA
aggagcgcaggtcctcgttcagg

SEQ ID NO: 3459 - DNA, 23 bp, synthetic construct
  misc_feature 1..23: note = HLA-A targeting gRNA
  source 1..23: mol_type = other DNA
ggagcgcaggtcctcgttcaggg

SEQ ID NO: 3460 - DNA, 23 bp, synthetic construct
  misc_feature 1..23: note = HLA-A targeting gRNA
  source 1..23: mol_type = other DNA
tgagggagaagaatcctcctggg

SEQ ID NO: 3461 - DNA, 23 bp, synthetic construct
  misc_feature 1..23: note = HLA-A targeting gRNA
  source 1..23: mol_type = other DNA
tgagtcatatgcgtcctgggggg

SEQ ID NO: 3462 - DNA, 23 bp, synthetic construct
  misc_feature 1..23: note = HLA-A targeting gRNA
  source 1..23: mol_type = other DNA
tgaacgaggacctgcgctcctgg

SEQ ID NO: 3463 - DNA, 23 bp, synthetic construct
  misc_feature 1..23: note = HLA-A targeting gRNA
  source 1..23: mol_type = other DNA
tgagtgtgaagcagagaacaggg

SEQ ID NO: 3464 - DNA, 23 bp, synthetic construct
  misc_feature 1..23: note = HLA-A targeting gRNA
  source 1..23: mol_type = other DNA
tgagtgtgaagcagagaacgagg

SEQ ID NO: 3465 - DNA, 23 bp, synthetic construct
  misc_feature 1..23: note = HLA-A targeting gRNA
  source 1..23: mol_type = other DNA
tgatcgcctgtagatctccgggg

SEQ ID NO: 3466 - DNA, 23 bp, synthetic construct
  misc_feature 1..23: note = HLA-A targeting gRNA
  source 1..23: mol_type = other DNA
tgatggccatcctcggcgtctgg

SEQ ID NO: 3467 - DNA, 23 bp, synthetic construct
  misc_feature 1..23: note = HLA-A targeting gRNA
  source 1..23: mol_type = other DNA
tgatgtatggctgccacgtgggg

SEQ ID NO: 3468 - DNA, 23 bp, synthetic construct
  misc_feature 1..23: note = HLA-A targeting gRNA
  source 1..23: mol_type = other DNA
tgatgtgtgttgggtgttggggg

SEQ ID NO: 3469 - DNA, 23 bp, synthetic construct
  misc_feature 1..23: note = HLA-A targeting gRNA
  source 1..23: mol_type = other DNA
tgccatgtccgccgcggtccagg

SEQ ID NO: 3470 - DNA, 23 bp, synthetic construct
  misc_feature 1..23: note = HLA-A targeting gRNA
  source 1..23: mol_type = other DNA
tgcccggccccgaccaaccaggg

SEQ ID NO: 3471 - DNA, 23 bp, synthetic construct
  misc_feature 1..23: note = HLA-A targeting gRNA
  source 1..23: mol_type = other DNA
tgccgccggtgtgtgtcaaaggg

SEQ ID NO: 3472 - DNA, 23 bp, synthetic construct
  misc_feature 1..23: note = HLA-A targeting gRNA
  source 1..23: mol_type = other DNA
tgccgtcgtaagcgtcctgctgg

SEQ ID NO: 3473 - DNA, 23 bp, synthetic construct
  misc_feature 1..23: note = HLA-A targeting gRNA
  source 1..23: mol_type = other DNA
tgccgtcgtaggcgacctgccgg

SEQ ID NO: 3474 - DNA, 23 bp, synthetic construct
  misc_feature 1..23: note = HLA-A targeting gRNA
  source 1..23: mol_type = other DNA
tgccgtcgtaggcgtgctgccgg

SEQ ID NO: 3475 - DNA, 23 bp, synthetic construct
  misc_feature 1..23: note = HLA-A targeting gRNA
  source 1..23: mol_type = other DNA
tgccgtcttaggcgtcctgccgg

SEQ ID NO: 3476 - DNA, 23 bp, synthetic construct
  misc_feature 1..23: note = HLA-A targeting gRNA
  source 1..23: mol_type = other DNA
tgcctgtgtccaggctggtctgg

SEQ ID NO: 3477 - DNA, 23 bp, synthetic construct
  misc_feature 1..23: note = HLA-A targeting gRNA
  source 1..23: mol_type = other DNA
tgccttcgtaggcgtcctgccgg

SEQ ID NO: 3478 - DNA, 23 bp, synthetic construct
  misc_feature 1..23: note = HLA-A targeting gRNA
  source 1..23: mol_type = other DNA
tgcggagcccgtccacgcaccgg

SEQ ID NO: 3479 - DNA, 23 bp, synthetic construct
  misc_feature 1..23: note = HLA-A targeting gRNA
  source 1..23: mol_type = other DNA
ggtggcctcatggtcagagatgg

SEQ ID NO: 3480 - DNA, 23 bp, synthetic construct
  misc_feature 1..23: note = HLA-A targeting gRNA
  source 1..23: mol_type = other DNA
tgctgcagcgcacgggtaccagg

SEQ ID NO: 3481 - DNA, 23 bp, synthetic construct
  misc_feature 1..23: note = HLA-A targeting gRNA
  source 1..23: mol_type = other DNA
tgcttcacactcaatatgtgtgg

SEQ ID NO: 3482 - DNA, 23 bp, synthetic construct
  misc_feature 1..23: note = HLA-A targeting gRNA
  source 1..23: mol_type = other DNA
tgcttcccaggaatgagacaggg

SEQ ID NO: 3483 - DNA, 23 bp, synthetic construct
  misc_feature 1..23: note = HLA-A targeting gRNA
  source 1..23: mol_type = other DNA
cagctgagagcctacctggaggg

SEQ ID NO: 3484 - DNA, 23 bp, synthetic construct
  misc_feature 1..23: note = HLA-A targeting gRNA
  source 1..23: mol_type = other DNA
gcagctgagagcctacctggagg

SEQ ID NO: 3485 - DNA, 23 bp, synthetic construct
  misc_feature 1..23: note = HLA-A targeting gRNA
  source 1..23: mol_type = other DNA
ggagcagctgagagcctacctgg

SEQ ID NO: 3486 - DNA, 23 bp, synthetic construct
  misc_feature 1..23: note = HLA-A targeting gRNA
  source 1..23: mol_type = other DNA
tgcagacccagggcaggatcagg

SEQ ID NO: 3487 - DNA, 23 bp, synthetic construct
  misc_feature 1..23: note = HLA-A targeting gRNA
  source 1..23: mol_type = other DNA
tggaaggtcccatcccctgcagg

SEQ ID NO: 3488 - DNA, 23 bp, synthetic construct
  misc_feature 1..23: note = HLA-A targeting gRNA
  source 1..23: mol_type = other DNA
tggcctcatggtcagagatgggg

SEQ ID NO: 3489 - DNA, 23 bp, synthetic construct
  misc_feature 1..23: note = HLA-A targeting gRNA
  source 1..23: mol_type = other DNA
gtggcctcatggtcagagatggg

SEQ ID NO: 3490 - DNA, 23 bp, synthetic construct
  misc_feature 1..23: note = HLA-A targeting gRNA
  source 1..23: mol_type = other DNA
tggacgacacgcagttagtgcgg

SEQ ID NO: 3491 - DNA, 23 bp, synthetic construct
  misc_feature 1..23: note = HLA-A targeting gRNA
  source 1..23: mol_type = other DNA
tggacggtgggctgggaagatgg

SEQ ID NO: 3492 - DNA, 23 bp, synthetic construct
  misc_feature 1..23: note = HLA-A targeting gRNA
  source 1..23: mol_type = other DNA
atggtcagagatggggtggtggg

SEQ ID NO: 3493 - DNA, 23 bp, synthetic construct
  misc_feature 1..23: note = HLA-A targeting gRNA
  source 1..23: mol_type = other DNA
tggagaaatacctcatggattgg

SEQ ID NO: 3494 - DNA, 23 bp, synthetic construct
  misc_feature 1..23: note = HLA-A targeting gRNA
  source 1..23: mol_type = other DNA
catggtcagagatggggtggtgg

SEQ ID NO: 3495 - DNA, 23 bp, synthetic construct
  misc_feature 1..23: note = HLA-A targeting gRNA
  source 1..23: mol_type = other DNA
ccaccccatctctgaccatgagg

SEQ ID NO: 3496 - DNA, 23 bp, synthetic construct
  misc_feature 1..23: note = HLA-A targeting gRNA
  source 1..23: mol_type = other DNA
cctcatggtcagagatggggtgg

SEQ ID NO: 3497 - DNA, 23 bp, synthetic construct
  misc_feature 1..23: note = HLA-A targeting gRNA
  source 1..23: mol_type = other DNA
tggagccgcgagccagaggatgg

SEQ ID NO: 3498 - DNA, 23 bp, synthetic construct
  misc_feature 1..23: note = HLA-A targeting gRNA
  source 1..23: mol_type = other DNA
tggaggaagaagagctcaggtgg

SEQ ID NO: 3499 - DNA, 23 bp, synthetic construct
  misc_feature 1..23: note = HLA-A targeting gRNA
  source 1..23: mol_type = other DNA
aggggtcgtgacctgcgccccgg

SEQ ID NO: 3500 - DNA, 23 bp, synthetic construct
  misc_feature 1..23: note = HLA-A targeting gRNA
  source 1..23: mol_type = other DNA
ggggtcgtgacctgcgccccggg

SEQ ID NO: 3501 - DNA, 23 bp, synthetic construct
  misc_feature 1..23: note = HLA-A targeting gRNA
  source 1..23: mol_type = other DNA
tggagggccggtgcgtggacggg

SEQ ID NO: 3502 - DNA, 23 bp, synthetic construct
  misc_feature 1..23: note = HLA-A targeting gRNA
  source 1..23: mol_type = other DNA
tggagggcgagtgcgtggacggg

SEQ ID NO: 3503 - DNA, 23 bp, synthetic construct
  misc_feature 1..23: note = HLA-A targeting gRNA
  source 1..23: mol_type = other DNA
tggagggcgagttcgtggagtgg

SEQ ID NO: 3504 - DNA, 23 bp, synthetic construct
  misc_feature 1..23: note = HLA-A targeting gRNA
  source 1..23: mol_type = other DNA
tggatgtattgagcatgcaatgg

SEQ ID NO: 3505 - DNA, 23 bp, synthetic construct
  misc_feature 1..23: note = HLA-A targeting gRNA
  source 1..23: mol_type = other DNA
tggccattttgaggatggacagg

SEQ ID NO: 3506 - DNA, 23 bp, synthetic construct
  misc_feature 1..23: note = HLA-A targeting gRNA
  source 1..23: mol_type = other DNA
tggcccgtccgtaggggatgagg

SEQ ID NO: 3507 - DNA, 23 bp, synthetic construct
  misc_feature 1..23: note = HLA-A targeting gRNA
  source 1..23: mol_type = other DNA
tggctcgcggctccatcctctgg

SEQ ID NO: 3508 - DNA, 23 bp, synthetic construct
  misc_feature 1..23: note = HLA-A targeting gRNA
  source 1..23: mol_type = other DNA
tgggagcctggggcgagcagtgg

SEQ ID NO: 3509 - DNA, 23 bp, synthetic construct
  misc_feature 1..23: note = HLA-A targeting gRNA
  source 1..23: mol_type = other DNA
tgggaggcggtccatgcggcggg

SEQ ID NO: 3510 - DNA, 23 bp, synthetic construct
  misc_feature 1..23: note = HLA-A targeting gRNA
  source 1..23: mol_type = other DNA
tgggataaggagggagatggggg

SEQ ID NO: 3511 - DNA, 23 bp, synthetic construct
  misc_feature 1..23: note = HLA-A targeting gRNA
  source 1..23: mol_type = other DNA
gtagaaatacctcatggagtggg

SEQ ID NO: 3512 - DNA, 23 bp, synthetic construct
  misc_feature 1..23: note = HLA-A targeting gRNA
  source 1..23: mol_type = other DNA
tgtagaaatacctcatggagtgg

SEQ ID NO: 3513 - DNA, 23 bp, synthetic construct
  misc_feature 1..23: note = HLA-A targeting gRNA
  source 1..23: mol_type = other DNA
tgggcggggctcgggggagctgg

SEQ ID NO: 3514 - DNA, 23 bp, synthetic construct
  misc_feature 1..23: note = HLA-A targeting gRNA
  source 1..23: mol_type = other DNA
aaggagacgctgcagcgcgcggg

SEQ ID NO: 3515 - DNA, 23 bp, synthetic construct
  misc_feature 1..23: note = HLA-A targeting gRNA
  source 1..23: mol_type = other DNA
gaaggagacgctgcagcgcgcgg

SEQ ID NO: 3516 - DNA, 23 bp, synthetic construct
  misc_feature 1..23: note = HLA-A targeting gRNA
  source 1..23: mol_type = other DNA
cgggttggtcggggcggggcggg

SEQ ID NO: 3517 - DNA, 23 bp, synthetic construct
  misc_feature 1..23: note = HLA-A targeting gRNA
  source 1..23: mol_type = other DNA
gggttggtcggggcggggcgggg

SEQ ID NO: 3518 - DNA, 23 bp, synthetic construct
  misc_feature 1..23: note = HLA-A targeting gRNA
  source 1..23: mol_type = other DNA
tgggttaaggagggagatggggg

SEQ ID NO: 3519 - DNA, 23 bp, synthetic construct
  misc_feature 1..23: note = HLA-A targeting gRNA
  source 1..23: mol_type = other DNA
cgctgcagcgcgcgggtaccagg

SEQ ID NO: 3520 - DNA, 23 bp, synthetic construct
  misc_feature 1..23: note = HLA-A targeting gRNA
  source 1..23: mol_type = other DNA
tggtcatatgtgtcttggggggg

SEQ ID NO: 3521 - DNA, 23 bp, synthetic construct
  misc_feature 1..23: note = HLA-A targeting gRNA
  source 1..23: mol_type = other DNA
gctgcagcgcgcgggtaccaggg

SEQ ID NO: 3522 - DNA, 23 bp, synthetic construct
  misc_feature 1..23: note = HLA-A targeting gRNA
  source 1..23: mol_type = other DNA
ctgcagcgcgcgggtaccagggg

SEQ ID NO: 3523 - DNA, 23 bp, synthetic construct
  misc_feature 1..23: note = HLA-A targeting gRNA
  source 1..23: mol_type = other DNA
tggtgagtcatatgcgtcctggg

SEQ ID NO: 3524 - DNA, 23 bp, synthetic construct
  misc_feature 1..23: note = HLA-A targeting gRNA
  source 1..23: mol_type = other DNA
tggtgagtcatatgtgtcttggg

SEQ ID NO: 3525 - DNA, 23 bp, synthetic construct
  misc_feature 1..23: note = HLA-A targeting gRNA
  source 1..23: mol_type = other DNA
tggtggtcatatgtgtcttgggg

SEQ ID NO: 3526 - DNA, 23 bp, synthetic construct
  misc_feature 1..23: note = HLA-A targeting gRNA
  source 1..23: mol_type = other DNA
tggttggtcggggccgggcaggg

SEQ ID NO: 3527 - DNA, 23 bp, synthetic construct
  misc_feature 1..23: note = HLA-A targeting gRNA
  source 1..23: mol_type = other DNA
tgtagcccacggcgatgaagcgg

SEQ ID NO: 3528 - DNA, 23 bp, synthetic construct
  misc_feature 1..23: note = HLA-A targeting gRNA
  source 1..23: mol_type = other DNA
tgtcctgtccatcctcaaaatgg

SEQ ID NO: 3529 - DNA, 23 bp, synthetic construct
  misc_feature 1..23: note = HLA-A targeting gRNA
  source 1..23: mol_type = other DNA
tgtcctgtgagctaccagaaagg

SEQ ID NO: 3530 - DNA, 23 bp, synthetic construct
  misc_feature 1..23: note = HLA-A targeting gRNA
  source 1..23: mol_type = other DNA
tgtcttggggggggtctgacggg

SEQ ID NO: 3531 - DNA, 23 bp, synthetic construct
  misc_feature 1..23: note = HLA-A targeting gRNA
  source 1..23: mol_type = other DNA
tgtgaatgcagacccagggcagg

SEQ ID NO: 3532 - DNA, 23 bp, synthetic construct
  misc_feature 1..23: note = HLA-A targeting gRNA
  source 1..23: mol_type = other DNA
tgtgctctcttccccatcccagg

SEQ ID NO: 3533 - DNA, 23 bp, synthetic construct
  misc_feature 1..23: note = HLA-A targeting gRNA
  source 1..23: mol_type = other DNA
ggagtgggagcctgggggcgagg

SEQ ID NO: 3534 - DNA, 23 bp, synthetic construct
  misc_feature 1..23: note = HLA-A targeting gRNA
  source 1..23: mol_type = other DNA
tgtggagaccaagcctgcagggg

SEQ ID NO: 3535 - DNA, 23 bp, synthetic construct
  misc_feature 1..23: note = HLA-A targeting gRNA
  source 1..23: mol_type = other DNA
tgtgggcatcattgctggcctgg

SEQ ID NO: 3536 - DNA, 23 bp, synthetic construct
  misc_feature 1..23: note = HLA-A targeting gRNA
  source 1..23: mol_type = other DNA
tgtggtggtaccttctggaaagg

SEQ ID NO: 3537 - DNA, 23 bp, synthetic construct
  misc_feature 1..23: note = HLA-A targeting gRNA
  source 1..23: mol_type = other DNA
aggggccggagtattgggaccgg

SEQ ID NO: 3538 - DNA, 23 bp, synthetic construct
  misc_feature 1..23: note = HLA-A targeting gRNA
  source 1..23: mol_type = other DNA
ccaccacagctgcccacttctgg

SEQ ID NO: 3539 - DNA, 23 bp, synthetic construct
  misc_feature 1..23: note = HLA-A targeting gRNA
  source 1..23: mol_type = other DNA
ccagaagtgggcagctgtggtgg

SEQ ID NO: 3540 - DNA, 23 bp, synthetic construct
  misc_feature 1..23: note = HLA-A targeting gRNA
  source 1..23: mol_type = other DNA
ttaacccatctcagggtgagggg

SEQ ID NO: 3541 - DNA, 23 bp, synthetic construct
  misc_feature 1..23: note = HLA-A targeting gRNA
  source 1..23: mol_type = other DNA
cttccagaagtgggcagctgtgg

SEQ ID NO: 3542 - DNA, 23 bp, synthetic construct
  misc_feature 1..23: note = HLA-A targeting gRNA
  source 1..23: mol_type = other DNA
ggattacatcgccctgaacgagg

SEQ ID NO: 3543 - DNA, 23 bp, synthetic construct
  misc_feature 1..23: note = HLA-A targeting gRNA
  source 1..23: mol_type = other DNA
agcccagggcccagcacctcagg

SEQ ID NO: 3544 - DNA, 23 bp, synthetic construct
  misc_feature 1..23: note = HLA-A targeting gRNA
  source 1..23: mol_type = other DNA
gcccagggcccagcacctcaggg

SEQ ID NO: 3545 - DNA, 23 bp, synthetic construct
  misc_feature 1..23: note = HLA-A targeting gRNA
  source 1..23: mol_type = other DNA
ttagaccgcggcggacatggcgg

SEQ ID NO: 3546 - DNA, 23 bp, synthetic construct
  misc_feature 1..23: note = HLA-A targeting gRNA
  source 1..23: mol_type = other DNA
ttatcccatctcagggtgagggg

SEQ ID NO: 3547 - DNA, 23 bp, synthetic construct
  misc_feature 1..23: note = HLA-A targeting gRNA
  source 1..23: mol_type = other DNA
ttcacactcaatatgtgtggggg

SEQ ID NO: 3548 - DNA, 23 bp, synthetic construct
  misc_feature 1..23: note = HLA-A targeting gRNA
  source 1..23: mol_type = other DNA
cacagctgcccacttctggaagg

SEQ ID NO: 3549 - DNA, 23 bp, synthetic construct
  misc_feature 1..23: note = HLA-A targeting gRNA
  source 1..23: mol_type = other DNA
ttcacattcgtgtcccggcccgg

SEQ ID NO: 3550 - DNA, 23 bp, synthetic construct
  misc_feature 1..23: note = HLA-A targeting gRNA
  source 1..23: mol_type = other DNA
ctccgcagggtagaagcccaggg

SEQ ID NO: 3551 - DNA, 23 bp, synthetic construct
  misc_feature 1..23: note = HLA-A targeting gRNA
  source 1..23: mol_type = other DNA
ttcatatcactcacagtgagggg

SEQ ID NO: 3552 - DNA, 23 bp, synthetic construct
  misc_feature 1..23: note = HLA-A targeting gRNA
  source 1..23: mol_type = other DNA
ggccctgggcttctaccctgcgg

SEQ ID NO: 3553 - DNA, 23 bp, synthetic construct
  misc_feature 1..23: note = HLA-A targeting gRNA
  source 1..23: mol_type = other DNA
tctccgcagggtagaagcccagg

SEQ ID NO: 3554 - DNA, 23 bp, synthetic construct
  misc_feature 1..23: note = HLA-A targeting gRNA
  source 1..23: mol_type = other DNA
ttcccacagttagaaaaggaggg

SEQ ID NO: 3555 - DNA, 23 bp, synthetic construct
  misc_feature 1..23: note = HLA-A targeting gRNA
  source 1..23: mol_type = other DNA
ttccctttgacacacaccggcgg

SEQ ID NO: 3556 - DNA, 23 bp, synthetic construct
  misc_feature 1..23: note = HLA-A targeting gRNA
  source 1..23: mol_type = other DNA
ttcctctccctcaggagcagagg

SEQ ID NO: 3557 - DNA, 23 bp, synthetic construct
  misc_feature 1..23: note = HLA-A targeting gRNA
  source 1..23: mol_type = other DNA
ctcatggagtgggagcctggggg

SEQ ID NO: 3558 - DNA, 23 bp, synthetic construct
  misc_feature 1..23: note = HLA-A targeting gRNA
  source 1..23: mol_type = other DNA
accctgaggtgctgggccctggg

SEQ ID NO: 3559 - DNA, 23 bp, synthetic construct
  misc_feature 1..23: note = HLA-A targeting gRNA
  source 1..23: mol_type = other DNA
caccctgaggtgctgggccctgg

SEQ ID NO: 3560 - DNA, 23 bp, synthetic construct
  misc_feature 1..23: note = HLA-A targeting gRNA
  source 1..23: mol_type = other DNA
ttcgtgtcccggcccggccgcgg

SEQ ID NO: 3561 - DNA, 23 bp, synthetic construct
  misc_feature 1..23: note = HLA-A targeting gRNA
  source 1..23: mol_type = other DNA
ttctcactccaattgggtgtcgg

SEQ ID NO: 3562 - DNA, 23 bp, synthetic construct
  misc_feature 1..23: note = HLA-A targeting gRNA
  source 1..23: mol_type = other DNA
ttctcactcctattgggtgtcgg

SEQ ID NO: 3563 - DNA, 23 bp, synthetic construct
  misc_feature 1..23: note = HLA-A targeting gRNA
  source 1..23: mol_type = other DNA
ttctctcggtcagtctgtgatgg

SEQ ID NO: 3564 - DNA, 23 bp, synthetic construct
  misc_feature 1..23: note = HLA-A targeting gRNA
  source 1..23: mol_type = other DNA
ttcttctccctcaagaccagagg

SEQ ID NO: 3565 - DNA, 23 bp, synthetic construct
  misc_feature 1..23: note = HLA-A targeting gRNA
  source 1..23: mol_type = other DNA
ttcttgtgggaggccagccccgg

SEQ ID NO: 3566 - DNA, 23 bp, synthetic construct
  misc_feature 1..23: note = HLA-A targeting gRNA
  source 1..23: mol_type = other DNA
ttgaggatggacaggacacctgg

SEQ ID NO: 3567 - DNA, 23 bp, synthetic construct
  misc_feature 1..23: note = HLA-A targeting gRNA
  source 1..23: mol_type = other DNA
ttgagggagaagaatcctcctgg

SEQ ID NO: 3568 - DNA, 23 bp, synthetic construct
  misc_feature 1..23: note = HLA-A targeting gRNA
  source 1..23: mol_type = other DNA
ttgagtgtgaagcagagaacagg

SEQ ID NO: 3569 - DNA, 23 bp, synthetic construct
  misc_feature 1..23: note = HLA-A targeting gRNA
  source 1..23: mol_type = other DNA
ttgcctttcagtcccacacaagg

SEQ ID NO: 3570 - DNA, 23 bp, synthetic construct
  misc_feature 1..23: note = HLA-A targeting gRNA
  source 1..23: mol_type = other DNA
ttgggtgttggggggaacagtgg

SEQ ID NO: 3571 - DNA, 23 bp, synthetic construct
  misc_feature 1..23: note = HLA-A targeting gRNA
  source 1..23: mol_type = other DNA
ttgggtgttgggtggaacagtgg

SEQ ID NO: 3572 - DNA, 23 bp, synthetic construct
  misc_feature 1..23: note = HLA-A targeting gRNA
  source 1..23: mol_type = other DNA
ttgtctccctttcttgtgggagg

SEQ ID NO: 3573 - DNA, 23 bp, synthetic construct
  misc_feature 1..23: note = HLA-A targeting gRNA
  source 1..23: mol_type = other DNA
ttgtggagaccaagcctgcaggg

SEQ ID NO: 3574 - DNA, 23 bp, synthetic construct
  misc_feature 1..23: note = HLA-A targeting gRNA
  source 1..23: mol_type = other DNA
ttgtggttgggagcccatggggg

SEQ ID NO: 3575 - DNA, 23 bp, synthetic construct
  misc_feature 1..23: note = HLA-A targeting gRNA
  source 1..23: mol_type = other DNA
ccccaggctcccactccatgagg

SEQ ID NO: 3576 - DNA, 23 bp, synthetic construct
  misc_feature 1..23: note = HLA-A targeting gRNA
  source 1..23: mol_type = other DNA
cctcatggagtgggagcctgggg

SEQ ID NO: 3577 - DNA, 23 bp, synthetic construct
  misc_feature 1..23: note = HLA-A targeting gRNA
  source 1..23: mol_type = other DNA
tacctcatggagtgggagcctgg

SEQ ID NO: 3578 - DNA, 23 bp, synthetic construct
  misc_feature 1..23: note = HLA-A targeting gRNA
  source 1..23: mol_type = other DNA
acctcatggagtgggagcctggg

SEQ ID NO: 3579 - DNA, 23 bp, synthetic construct
  misc_feature 1..23: note = HLA-A targeting gRNA
  source 1..23: mol_type = other DNA
tttccagagagtgactctgaggg

SEQ ID NO: 3580 - DNA, 23 bp, synthetic construct
  misc_feature 1..23: note = HLA-A targeting gRNA
  source 1..23: mol_type = other DNA
tttcttcccacagttagaaaagg

SEQ ID NO: 3581 - DNA, 23 bp, synthetic construct
  misc_feature 1..23: note = HLA-A targeting gRNA
  source 1..23: mol_type = other DNA
ttttcaagtcacaaagggaaggg

SEQ ID NO: 3582 - DNA, 23 bp, synthetic construct
  misc_feature 1..23: note = HLA-A targeting gRNA
  source 1..23: mol_type = other DNA
tttttcaagtcacaaagggaagg

SEQ ID NO: 3583 - DNA, 23 bp, synthetic construct
  misc_feature 1..23: note = HLA-A targeting gRNA
  source 1..23: mol_type = other DNA
aaaaggagggagctgctctcagg

SEQ ID NO: 3584 - DNA, 23 bp, synthetic construct
  misc_feature 1..23: note = HLA-A targeting gRNA
  source 1..23: mol_type = other DNA
aaaatccccgcgggttgggcggg

SEQ ID NO: 3585 - DNA, 23 bp, synthetic construct
  misc_feature 1..23: note = HLA-A targeting gRNA
  source 1..23: mol_type = other DNA
aaaatccccgcgggttggtcagg

SEQ ID NO: 3586 - DNA, 23 bp, synthetic construct
  misc_feature 1..23: note = HLA-A targeting gRNA
  source 1..23: mol_type = other DNA
aaaatccccgcgggttggtcggg

SEQ ID NO: 3587 - DNA, 23 bp, synthetic construct
  misc_feature 1..23: note = HLA-A targeting gRNA
  source 1..23: mol_type = other DNA
aaaatgccctatgaggggactgg

SEQ ID NO: 3588 - DNA, 23 bp, synthetic construct
  misc_feature 1..23: note = HLA-A targeting gRNA
  source 1..23: mol_type = other DNA
aaaatgccctgtgaggggacagg

SEQ ID NO: 3589 - DNA, 23 bp, synthetic construct
  misc_feature 1..23: note = HLA-A targeting gRNA
  source 1..23: mol_type = other DNA
aaaatgccctgtgaggggactgg

SEQ ID NO: 3590 - DNA, 23 bp, synthetic construct
  misc_feature 1..23: note = HLA-A targeting gRNA
  source 1..23: mol_type = other DNA
aaaatgtcctgtgagggcactgg

SEQ ID NO: 3591 - DNA, 23 bp, synthetic construct
  misc_feature 1..23: note = HLA-A targeting gRNA
  source 1..23: mol_type = other DNA
aaaatgtcctgtgaggggactgg

SEQ ID NO: 3592 - DNA, 23 bp, synthetic construct
  misc_feature 1..23: note = HLA-A targeting gRNA
  source 1..23: mol_type = other DNA
aaacacaaggaaagcaagtgtgg

SEQ ID NO: 3593 - DNA, 23 bp, synthetic construct
  misc_feature 1..23: note = HLA-A targeting gRNA
  source 1..23: mol_type = other DNA
aaacacagggaaagcagctgtgg

SEQ ID NO: 3594 - DNA, 23 bp, synthetic construct
  misc_feature 1..23: note = HLA-A targeting gRNA
  source 1..23: mol_type = other DNA
aaacacgaggaaagcaagtgtgg

SEQ ID NO: 3595 - DNA, 23 bp, synthetic construct
  misc_feature 1..23: note = HLA-A targeting gRNA
  source 1..23: mol_type = other DNA
aaacacggggaaagcagctgtgg

SEQ ID NO: 3596 - DNA, 23 bp, synthetic construct
  misc_feature 1..23: note = HLA-A targeting gRNA
  source 1..23: mol_type = other DNA
aaacatggggaaagcagctgtgg

SEQ ID NO: 3597 - DNA, 23 bp, synthetic construct
  misc_feature 1..23: note = HLA-A targeting gRNA
  source 1..23: mol_type = other DNA
aaacatggggaaagcagttgtgg

SEQ ID NO: 3598 - DNA, 23 bp, synthetic construct
  misc_feature 1..23: note = HLA-A targeting gRNA
  source 1..23: mol_type = other DNA
aaacccctcaccctgagatgggg

SEQ ID NO: 3599 - DNA, 23 bp, synthetic construct
  misc_feature 1..23: note = HLA-A targeting gRNA
  source 1..23: mol_type = other DNA
aaaccgggtaaacgcgcctgggg

SEQ ID NO: 3600 - DNA, 23 bp, synthetic construct
  misc_feature 1..23: note = HLA-A targeting gRNA
  source 1..23: mol_type = other DNA
aaaccgggtaaaggcgactaggg

SEQ ID NO: 3601 - DNA, 23 bp, synthetic construct
  misc_feature 1..23: note = HLA-A targeting gRNA
  source 1..23: mol_type = other DNA
aaaccgggtaaaggcgactgggg

SEQ ID NO: 3602 - DNA, 23 bp, synthetic construct
  misc_feature 1..23: note = HLA-A targeting gRNA
  source 1..23: mol_type = other DNA
aaaccgggtaaaggcgcctgggg

SEQ ID NO: 3603 - DNA, 23 bp, synthetic construct
  misc_feature 1..23: note = HLA-A targeting gRNA
  source 1..23: mol_type = other DNA
aaaccgggtaaaggtgactgggg

SEQ ID NO: 3604 - DNA, 23 bp, synthetic construct
  misc_feature 1..23: note = HLA-A targeting gRNA
  source 1..23: mol_type = other DNA
aaaccgggtaaagtcgcctgggg

SEQ ID NO: 3605 - DNA, 23 bp, synthetic construct
  misc_feature 1..23: note = HLA-A targeting gRNA
  source 1..23: mol_type = other DNA
aaactcaggggagtgggagtggg

SEQ ID NO: 3606 - DNA, 23 bp, synthetic construct
  misc_feature 1..23: note = HLA-A targeting gRNA
  source 1..23: mol_type = other DNA
aaagaataggagattatcccagg

SEQ ID NO: 3607 - DNA, 23 bp, synthetic construct
  misc_feature 1..23: note = HLA-A targeting gRNA
  source 1..23: mol_type = other DNA
aaagagacgctgcagcgcgcagg

SEQ ID NO: 3608 - DNA, 23 bp, synthetic construct
  misc_feature 1..23: note = HLA-A targeting gRNA
  source 1..23: mol_type = other DNA
aaagcaggagcccttcagcaggg

SEQ ID NO: 3609 - DNA, 23 bp, synthetic construct
  misc_feature 1..23: note = HLA-A targeting gRNA
  source 1..23: mol_type = other DNA
aaagcccctcaccctgagatggg

SEQ ID NO: 3610 - DNA, 23 bp, synthetic construct
  misc_feature 1..23: note = HLA-A targeting gRNA
  source 1..23: mol_type = other DNA
aaagtcaccagtcacccacccgg

SEQ ID NO: 3611 - DNA, 23 bp, synthetic construct
  misc_feature 1..23: note = HLA-A targeting gRNA
  source 1..23: mol_type = other DNA
aaagtccccacgcacccacccgg

SEQ ID NO: 3612 - DNA, 23 bp, synthetic construct
  misc_feature 1..23: note = HLA-A targeting gRNA
  source 1..23: mol_type = other DNA
aaagtccccagtcacccacccgg

SEQ ID NO: 3613 - DNA, 23 bp, synthetic construct
  misc_feature 1..23: note = HLA-A targeting gRNA
  source 1..23: mol_type = other DNA
aaagttcgagtctctgagcgggg

SEQ ID NO: 3614 - DNA, 23 bp, synthetic construct
  misc_feature 1..23: note = HLA-A targeting gRNA
  source 1..23: mol_type = other DNA
aaagttcgagtctctgagtgggg

SEQ ID NO: 3615 - DNA, 23 bp, synthetic construct
  misc_feature 1..23: note = HLA-A targeting gRNA
  source 1..23: mol_type = other DNA
aaagttctagtctctgagggagg

SEQ ID NO: 3616 - DNA, 23 bp, synthetic construct
  misc_feature 1..23: note = HLA-A targeting gRNA
  source 1..23: mol_type = other DNA
aaatccccgcgggttgggcgggg

SEQ ID NO: 3617 - DNA, 23 bp, synthetic construct
  misc_feature 1..23: note = HLA-A targeting gRNA
  source 1..23: mol_type = other DNA
aaatccccgcgggttggtcaggg

SEQ ID NO: 3618 - DNA, 23 bp, synthetic construct
  misc_feature 1..23: note = HLA-A targeting gRNA
  source 1..23: mol_type = other DNA
aaatccccgcgggttggtcgggg

SEQ ID NO: 3619 - DNA, 23 bp, synthetic construct
  misc_feature 1..23: note = HLA-A targeting gRNA
  source 1..23: mol_type = other DNA
aaatgatggcggcgggcgtgtgg

SEQ ID NO: 3620 - DNA, 23 bp, synthetic construct
  misc_feature 1..23: note = HLA-A targeting gRNA
  source 1..23: mol_type = other DNA
aaatgccctatgaggggactggg

SEQ ID NO: 3621 - DNA, 23 bp, synthetic construct
  misc_feature 1..23: note = HLA-A targeting gRNA
  source 1..23: mol_type = other DNA
aaatgccctgtgaggggacaggg

SEQ ID NO: 3622 - DNA, 23 bp, synthetic construct
  misc_feature 1..23: note = HLA-A targeting gRNA
  source 1..23: mol_type = other DNA
aaatgccctgtgaggggactggg

SEQ ID NO: 3623 - DNA, 23 bp, synthetic construct
  misc_feature 1..23: note = HLA-A targeting gRNA
  source 1..23: mol_type = other DNA
aaatgtcctgtgagggcactggg

SEQ ID NO: 3624 - DNA, 23 bp, synthetic construct
  misc_feature 1..23: note = HLA-A targeting gRNA
  source 1..23: mol_type = other DNA
aaatgtcctgtgaggggactggg

SEQ ID NO: 3625 - DNA, 23 bp, synthetic construct
  misc_feature 1..23: note = HLA-A targeting gRNA
  source 1..23: mol_type = other DNA
aacaatgcccacgatggggacgg

SEQ ID NO: 3626 - DNA, 23 bp, synthetic construct
  misc_feature 1..23: note = HLA-A targeting gRNA
  source 1..23: mol_type = other DNA
aacaatgcccacgatggggatgg

SEQ ID NO: 3627 - DNA, 23 bp, synthetic construct
  misc_feature 1..23: note = HLA-A targeting gRNA
  source 1..23: mol_type = other DNA
aacacaaggaaagcaagtgtggg

SEQ ID NO: 3628 - DNA, 23 bp, synthetic construct
  misc_feature 1..23: note = HLA-A targeting gRNA
  source 1..23: mol_type = other DNA
aacacagggaaagcagctgtggg

SEQ ID NO: 3629 - DNA, 23 bp, synthetic construct
  misc_feature 1..23: note = HLA-A targeting gRNA
  source 1..23: mol_type = other DNA
aacacgaggaaagcaagtgtggg

SEQ ID NO: 3630 - DNA, 23 bp, synthetic construct
  misc_feature 1..23: note = HLA-A targeting gRNA
  source 1..23: mol_type = other DNA
aacacggggaaagcagctgtggg

SEQ ID NO: 3631 - DNA, 23 bp, synthetic construct
  misc_feature 1..23: note = HLA-A targeting gRNA
  source 1..23: mol_type = other DNA
aacatggggaaagcagctgtggg

SEQ ID NO: 3632 - DNA, 23 bp, synthetic construct
  misc_feature 1..23: note = HLA-A targeting gRNA
  source 1..23: mol_type = other DNA
aacatggggaaagcagttgtggg

SEQ ID NO: 3633 - DNA, 23 bp, synthetic construct
  misc_feature 1..23: note = HLA-A targeting gRNA
  source 1..23: mol_type = other DNA
aacccagggcccagcacctcagg

SEQ ID NO: 3634 - DNA, 23 bp, synthetic construct
  misc_feature 1..23: note = HLA-A targeting gRNA
  source 1..23: mol_type = other DNA
aaccccgcactcacaggcccagg

SEQ ID NO: 3635 - DNA, 23 bp, synthetic construct
  misc_feature 1..23: note = HLA-A targeting gRNA
  source 1..23: mol_type = other DNA
aaccccgcactcaccggcccagg

SEQ ID NO: 3636 - DNA, 23 bp, synthetic construct
  misc_feature 1..23: note = HLA-A targeting gRNA
  source 1..23: mol_type = other DNA
aaccccgcactcaccggtccagg

SEQ ID NO: 3637 - DNA, 23 bp, synthetic construct
  misc_feature 1..23: note = HLA-A targeting gRNA
  source 1..23: mol_type = other DNA
aacccgacacccaatgggagtgg

SEQ ID NO: 3638 - DNA, 23 bp, synthetic construct
  misc_feature 1..23: note = HLA-A targeting gRNA
  source 1..23: mol_type = other DNA
aacccgcccagaccctcgaccgg

SEQ ID NO: 3639 - DNA, 23 bp, synthetic construct
  misc_feature 1..23: note = HLA-A targeting gRNA
  source 1..23: mol_type = other DNA
aacccgcccagaccctcggccgg

SEQ ID NO: 3640 - DNA, 23 bp, synthetic construct
  misc_feature 1..23: note = HLA-A targeting gRNA
  source 1..23: mol_type = other DNA
aacccgcccgaccctcctcccgg

SEQ ID NO: 3641 - DNA, 23 bp, synthetic construct
  misc_feature 1..23: note = HLA-A targeting gRNA
  source 1..23: mol_type = other DNA
aaccctcatcctgctgctctcgg

SEQ ID NO: 3642 - DNA, 23 bp, synthetic construct
  misc_feature 1..23: note = HLA-A targeting gRNA
  source 1..23: mol_type = other DNA
aaccctcctcctgctgctctagg

SEQ ID NO: 3643 - DNA, 23 bp, synthetic construct
  misc_feature 1..23: note = HLA-A targeting gRNA
  source 1..23: mol_type = other DNA
aaccctcctcctgctgctctcgg

SEQ ID NO: 3644 - DNA, 23 bp, synthetic construct
  misc_feature 1..23: note = HLA-A targeting gRNA
  source 1..23: mol_type = other DNA
aaccctcctcctgctgctctggg

SEQ ID NO: 3645 - DNA, 23 bp, synthetic construct
  misc_feature 1..23: note = HLA-A targeting gRNA
  source 1..23: mol_type = other DNA
aaccgtcctcctgctgctctcgg

SEQ ID NO: 3646 - DNA, 23 bp, synthetic construct
  misc_feature 1..23: note = HLA-A targeting gRNA
  source 1..23: mol_type = other DNA
aaccgtcctcctgctgctctggg

SEQ ID NO: 3647 - DNA, 23 bp, synthetic construct
  misc_feature 1..23: note = HLA-A targeting gRNA
  source 1..23: mol_type = other DNA
aacctcgcactcacaggcccagg

SEQ ID NO: 3648 - DNA, 23 bp, synthetic construct
  misc_feature 1..23: note = HLA-A targeting gRNA
  source 1..23: mol_type = other DNA
aacgacgccgcgagtccgagagg

SEQ ID NO: 3649 - DNA, 23 bp, synthetic construct
  misc_feature 1..23: note = HLA-A targeting gRNA
  source 1..23: mol_type = other DNA
aacgagaagaagaggaaaatggg

SEQ ID NO: 3650 - DNA, 23 bp, synthetic construct
  misc_feature 1..23: note = HLA-A targeting gRNA
  source 1..23: mol_type = other DNA
aacgaggtgcccgcccggcgagg

SEQ ID NO: 3651 - DNA, 23 bp, synthetic construct
  misc_feature 1..23: note = HLA-A targeting gRNA
  source 1..23: mol_type = other DNA
aacgatgcccaagttggggatgg

SEQ ID NO: 3652 - DNA, 23 bp, synthetic construct
  misc_feature 1..23: note = HLA-A targeting gRNA
  source 1..23: mol_type = other DNA
aacgatgcccacgatggggatgg

SEQ ID NO: 3653 - DNA, 23 bp, synthetic construct
  misc_feature 1..23: note = HLA-A targeting gRNA
  source 1..23: mol_type = other DNA
aacgatgcccatgatggggatgg

SEQ ID NO: 3654 - DNA, 23 bp, synthetic construct
  misc_feature 1..23: note = HLA-A targeting gRNA
  source 1..23: mol_type = other DNA
aacgcgcctggggctctcgccgg

SEQ ID NO: 3655 - DNA, 23 bp, synthetic construct
  misc_feature 1..23: note = HLA-A targeting gRNA
  source 1..23: mol_type = other DNA
aacggacaggacacctggggtgg

SEQ ID NO: 3656 - DNA, 23 bp, synthetic construct
  misc_feature 1..23: note = HLA-A targeting gRNA
  source 1..23: mol_type = other DNA
aactcaggacacccagcttgtgg

SEQ ID NO: 3657 - DNA, 23 bp, synthetic construct
  misc_feature 1..23: note = HLA-A targeting gRNA
  source 1..23: mol_type = other DNA
aactcaggacaccgagcttgtgg

SEQ ID NO: 3658 - DNA, 23 bp, synthetic construct
  misc_feature 1..23: note = HLA-A targeting gRNA
  source 1..23: mol_type = other DNA
aactcaggacactgagcttgtgg

SEQ ID NO: 3659 - DNA, 23 bp, synthetic construct
  misc_feature 1..23: note = HLA-A targeting gRNA
  source 1..23: mol_type = other DNA
aactcaggggagtgggagtgggg

SEQ ID NO: 3660 - DNA, 23 bp, synthetic construct
  misc_feature 1..23: note = HLA-A targeting gRNA
  source 1..23: mol_type = other DNA
aactctcctcctgctgctctcgg

SEQ ID NO: 3661 - DNA, 23 bp, synthetic construct
  misc_feature 1..23: note = HLA-A targeting gRNA
  source 1..23: mol_type = other DNA
aagaaaagtcatggttcccaagg

SEQ ID NO: 3662 - DNA, 23 bp, synthetic construct
  misc_feature 1..23: note = HLA-A targeting gRNA
  source 1..23: mol_type = other DNA
aagaagacgctgcagcgcgcggg

SEQ ID NO: 3663 - DNA, 23 bp, synthetic construct
  misc_feature 1..23: note = HLA-A targeting gRNA
  source 1..23: mol_type = other DNA
aagaaggacccgacacaagttgg

SEQ ID NO: 3664 - DNA, 23 bp, synthetic construct
  misc_feature 1..23: note = HLA-A targeting gRNA
  source 1..23: mol_type = other DNA
aagaaggacccgacacaggttgg

SEQ ID NO: 3665 - DNA, 23 bp, synthetic construct
  misc_feature 1..23: note = HLA-A targeting gRNA
  source 1..23: mol_type = other DNA
aagaaggacccgacataggttgg

SEQ ID NO: 3666 - DNA, 23 bp, synthetic construct
  misc_feature 1..23: note = HLA-A targeting gRNA
  source 1..23: mol_type = other DNA
aagaaggacccgacgcaggttgg

SEQ ID NO: 3667 - DNA, 23 bp, synthetic construct
  misc_feature 1..23: note = HLA-A targeting gRNA
  source 1..23: mol_type = other DNA
aagaaggacccgtcgcaggttgg

SEQ ID NO: 3668 - DNA, 23 bp, synthetic construct
  misc_feature 1..23: note = HLA-A targeting gRNA
  source 1..23: mol_type = other DNA
aagacctggtcagagcccacagg

SEQ ID NO: 3669 - DNA, 23 bp, synthetic construct
  misc_feature 1..23: note = HLA-A targeting gRNA
  source 1..23: mol_type = other DNA
aagacctggtcagagcccgcagg

SEQ ID NO: 3670 - DNA, 23 bp, synthetic construct
  misc_feature 1..23: note = HLA-A targeting gRNA
  source 1..23: mol_type = other DNA
aagacggctccgggaaaggaagg

SEQ ID NO: 3671 - DNA, 23 bp, synthetic construct
  misc_feature 1..23: note = HLA-A targeting gRNA
  source 1..23: mol_type = other DNA
aagacggctctgggaaaggaagg

SEQ ID NO: 3672 - DNA, 23 bp, synthetic construct
  misc_feature 1..23: note = HLA-A targeting gRNA
  source 1..23: mol_type = other DNA
aagacggctctgggaaaggaggg

SEQ ID NO: 3673 - DNA, 23 bp, synthetic construct
  misc_feature 1..23: note = HLA-A targeting gRNA
  source 1..23: mol_type = other DNA
aagagcccctcaccctgagctgg

SEQ ID NO: 3674 - DNA, 23 bp, synthetic construct
  misc_feature 1..23: note = HLA-A targeting gRNA
  source 1..23: mol_type = other DNA
aagagctcaggtggaaaaggagg

SEQ ID NO: 3675 - DNA, 23 bp, synthetic construct
  misc_feature 1..23: note = HLA-A targeting gRNA
  source 1..23: mol_type = other DNA
aagagtaagttctggcacacagg

SEQ ID NO: 3676 - DNA, 23 bp, synthetic construct
  misc_feature 1..23: note = HLA-A targeting gRNA
  source 1..23: mol_type = other DNA
aagatggccctgggaaaggaggg

SEQ ID NO: 3677 - DNA, 23 bp, synthetic construct
  misc_feature 1..23: note = HLA-A targeting gRNA
  source 1..23: mol_type = other DNA
aagatggctctgggaaaggaggg

SEQ ID NO: 3678 - DNA, 23 bp, synthetic construct
  misc_feature 1..23: note = HLA-A targeting gRNA
  source 1..23: mol_type = other DNA
aagcggagctccccgcggccggg

SEQ ID NO: 3679 - DNA, 23 bp, synthetic construct
  misc_feature 1..23: note = HLA-A targeting gRNA
  source 1..23: mol_type = other DNA
aagcggcctctgcggagaggagg

SEQ ID NO: 3680 - DNA, 23 bp, synthetic construct
  misc_feature 1..23: note = HLA-A targeting gRNA
  source 1..23: mol_type = other DNA
aagcgggactctccgcggccggg

SEQ ID NO: 3681 - DNA, 23 bp, synthetic construct
  misc_feature 1..23: note = HLA-A targeting gRNA
  source 1..23: mol_type = other DNA
aagcggggctccccacggccggg

SEQ ID NO: 3682 - DNA, 23 bp, synthetic construct
  misc_feature 1..23: note = HLA-A targeting gRNA
  source 1..23: mol_type = other DNA
aagcggggctccccgcagccggg

SEQ ID NO: 3683 - DNA, 23 bp, synthetic construct
  misc_feature 1..23: note = HLA-A targeting gRNA
  source 1..23: mol_type = other DNA
aagcggggctccccgcggccagg

SEQ ID NO: 3684 - DNA, 23 bp, synthetic construct
  misc_feature 1..23: note = HLA-A targeting gRNA
  source 1..23: mol_type = other DNA
aagcggggctccccgctgccggg

SEQ ID NO: 3685 - DNA, 23 bp, synthetic construct
  misc_feature 1..23: note = HLA-A targeting gRNA
  source 1..23: mol_type = other DNA
aagcggggctctccgcggccagg

SEQ ID NO: 3686 - DNA, 23 bp, synthetic construct
  misc_feature 1..23: note = HLA-A targeting gRNA
  source 1..23: mol_type = other DNA
aagcggggctctccgcggccggg

SEQ ID NO: 3687 - DNA, 23 bp, synthetic construct
  misc_feature 1..23: note = HLA-A targeting gRNA
  source 1..23: mol_type = other DNA
aagcggggctctccgcggcctgg

SEQ ID NO: 3688 - DNA, 23 bp, synthetic construct
  misc_feature 1..23: note = HLA-A targeting gRNA
  source 1..23: mol_type = other DNA
aagcggtgctctccgcggccagg

SEQ ID NO: 3689 - DNA, 23 bp, synthetic construct
  misc_feature 1..23: note = HLA-A targeting gRNA
  source 1..23: mol_type = other DNA
aaggaaacgctgcagcgcgcggg

SEQ ID NO: 3690 - DNA, 23 bp, synthetic construct
  misc_feature 1..23: note = HLA-A targeting gRNA
  source 1..23: mol_type = other DNA
aaggacaagctggagcgcgctgg

SEQ ID NO: 3691 - DNA, 23 bp, synthetic construct
  misc_feature 1..23: note = HLA-A targeting gRNA
  source 1..23: mol_type = other DNA
aaggacacgctggagcgcgcggg

SEQ ID NO: 3692 - DNA, 23 bp, synthetic construct
  misc_feature 1..23: note = HLA-A targeting gRNA
  source 1..23: mol_type = other DNA
aaggagaccctgcagcgcgcggg

SEQ ID NO: 3693 - DNA, 23 bp, synthetic construct
  misc_feature 1..23: note = HLA-A targeting gRNA
  source 1..23: mol_type = other DNA
aaggagacgctgcaacgcgcggg

SEQ ID NO: 3694 - DNA, 23 bp, synthetic construct
  misc_feature 1..23: note = HLA-A targeting gRNA
  source 1..23: mol_type = other DNA
aaggagacgctgcagagcgcggg

SEQ ID NO: 3695 - DNA, 23 bp, synthetic construct
  misc_feature 1..23: note = HLA-A targeting gRNA
  source 1..23: mol_type = other DNA
aaggagacgctgcagcacgcggg

SEQ ID NO: 3696 - DNA, 23 bp, synthetic construct
  misc_feature 1..23: note = HLA-A targeting gRNA
  source 1..23: mol_type = other DNA
aaggagacgctgcagcgcgcagg

SEQ ID NO: 3697 - DNA, 23 bp, synthetic construct
  misc_feature 1..23: note = HLA-A targeting gRNA
  source 1..23: mol_type = other DNA
aaggagacgctggagcgcgcggg

SEQ ID NO: 3698 - DNA, 23 bp, synthetic construct
  misc_feature 1..23: note = HLA-A targeting gRNA
  source 1..23: mol_type = other DNA
aaggcacagactgaccgagtggg

SEQ ID NO: 3699 - DNA, 23 bp, synthetic construct
  misc_feature 1..23: note = HLA-A targeting gRNA
  source 1..23: mol_type = other DNA
aaggcccaggcacagactgacgg

SEQ ID NO: 3700 - DNA, 23 bp, synthetic construct
  misc_feature 1..23: note = HLA-A targeting gRNA
  source 1..23: mol_type = other DNA
aaggcctgagaggaaagtcacgg

SEQ ID NO: 3701 - DNA, 23 bp, synthetic construct
  misc_feature 1..23: note = HLA-A targeting gRNA
  source 1..23: mol_type = other DNA
aaggcgactagggctctctccgg

SEQ ID NO: 3702 - DNA, 23 bp, synthetic construct
  misc_feature 1..23: note = HLA-A targeting gRNA
  source 1..23: mol_type = other DNA
aaggcgactggggctctctccgg

SEQ ID NO: 3703 - DNA, 23 bp, synthetic construct
  misc_feature 1..23: note = HLA-A targeting gRNA
  source 1..23: mol_type = other DNA
aaggcgcctggggctctcgccgg

SEQ ID NO: 3704 - DNA, 23 bp, synthetic construct
  misc_feature 1..23: note = HLA-A targeting gRNA
  source 1..23: mol_type = other DNA
aaggctgctgcaggggtcaaagg

SEQ ID NO: 3705 - DNA, 23 bp, synthetic construct
  misc_feature 1..23: note = HLA-A targeting gRNA
  source 1..23: mol_type = other DNA
aaggggagccgcgggcgccgtgg

SEQ ID NO: 3706 - DNA, 23 bp, synthetic construct
  misc_feature 1..23: note = HLA-A targeting gRNA
  source 1..23: mol_type = other DNA
aaggggtgaagagcggggtctgg

SEQ ID NO: 3707 - DNA, 23 bp, synthetic construct
  misc_feature 1..23: note = HLA-A targeting gRNA
  source 1..23: mol_type = other DNA
aaggggtgaggagtggggtctgg

SEQ ID NO: 3708 - DNA, 23 bp, synthetic construct
  misc_feature 1..23: note = HLA-A targeting gRNA
  source 1..23: mol_type = other DNA
aaggggtgaggggtggggtctgg

SEQ ID NO: 3709 - DNA, 23 bp, synthetic construct
  misc_feature 1..23: note = HLA-A targeting gRNA
  source 1..23: mol_type = other DNA
aaggggtggggagtggggtctgg

SEQ ID NO: 3710 - DNA, 23 bp, synthetic construct
  misc_feature 1..23: note = HLA-A targeting gRNA
  source 1..23: mol_type = other DNA
aaggtgactggggctctctccgg

SEQ ID NO: 3711 - DNA, 23 bp, synthetic construct
  misc_feature 1..23: note = HLA-A targeting gRNA
  source 1..23: mol_type = other DNA
aagtccctgaggaaatggagggg

SEQ ID NO: 3712 - DNA, 23 bp, synthetic construct
  misc_feature 1..23: note = HLA-A targeting gRNA
  source 1..23: mol_type = other DNA
aagtccgagaggggagccccggg

SEQ ID NO: 3713 - DNA, 23 bp, synthetic construct
  misc_feature 1..23: note = HLA-A targeting gRNA
  source 1..23: mol_type = other DNA
aagtcctggagcccttcagccgg

SEQ ID NO: 3714 - DNA, 23 bp, synthetic construct
  misc_feature 1..23: note = HLA-A targeting gRNA
  source 1..23: mol_type = other DNA
aagtcctggagcccttcagctgg

SEQ ID NO: 3715 - DNA, 23 bp, synthetic construct
  misc_feature 1..23: note = HLA-A targeting gRNA
  source 1..23: mol_type = other DNA
aagtccttgaggaaatggagggg

SEQ ID NO: 3716 - DNA, 23 bp, synthetic construct
  misc_feature 1..23: note = HLA-A targeting gRNA
  source 1..23: mol_type = other DNA
aagtcgcctggggctctctgcgg

SEQ ID NO: 3717 - DNA, 23 bp, synthetic construct
  misc_feature 1..23: note = HLA-A targeting gRNA
  source 1..23: mol_type = other DNA
aagtctctgaggaaatggagggg

SEQ ID NO: 3718 - DNA, 23 bp, synthetic construct
  misc_feature 1..23: note = HLA-A targeting gRNA
  source 1..23: mol_type = other DNA
aagtgaaactcagggaagtgggg

SEQ ID NO: 3719 - DNA, 23 bp, synthetic construct
  misc_feature 1..23: note = HLA-A targeting gRNA
  source 1..23: mol_type = other DNA
aagtgaaactcaggggagtgggg

SEQ ID NO: 3720 - DNA, 23 bp, synthetic construct
  misc_feature 1..23: note = HLA-A targeting gRNA
  source 1..23: mol_type = other DNA
aagtgaaactcgtgggagtgggg

SEQ ID NO: 3721 - DNA, 23 bp, synthetic construct
  misc_feature 1..23: note = HLA-A targeting gRNA
  source 1..23: mol_type = other DNA
aagtgaaactcttgggagtgggg

SEQ ID NO: 3722 - DNA, 23 bp, synthetic construct
  misc_feature 1..23: note = HLA-A targeting gRNA
  source 1..23: mol_type = other DNA
aagtgatgccggtgggcgtgtgg

SEQ ID NO: 3723 - DNA, 23 bp, synthetic construct
  misc_feature 1..23: note = HLA-A targeting gRNA
  source 1..23: mol_type = other DNA
aagtgatggcagtgggcgtgtgg

SEQ ID NO: 3724 - DNA, 23 bp, synthetic construct
  misc_feature 1..23: note = HLA-A targeting gRNA
  source 1..23: mol_type = other DNA
aagtgatggcggcaggcgtgtgg

SEQ ID NO: 3725 - DNA, 23 bp, synthetic construct
  misc_feature 1..23: note = HLA-A targeting gRNA
  source 1..23: mol_type = other DNA
aagtgatggcggcgggcgtgtgg

SEQ ID NO: 3726 - DNA, 23 bp, synthetic construct
  misc_feature 1..23: note = HLA-A targeting gRNA
  source 1..23: mol_type = other DNA
aagtgatggcggtggccgtgtgg

SEQ ID NO: 3727 - DNA, 23 bp, synthetic construct
  misc_feature 1..23: note = HLA-A targeting gRNA
  source 1..23: mol_type = other DNA
aagtgatggcggtgggcgtgtgg

SEQ ID NO: 3728 - DNA, 23 bp, synthetic construct
  misc_feature 1..23: note = HLA-A targeting gRNA
  source 1..23: mol_type = other DNA
aagtgatgggggcgggagtgtgg

SEQ ID NO: 3729 - DNA, 23 bp, synthetic construct
  misc_feature 1..23: note = HLA-A targeting gRNA
  source 1..23: mol_type = other DNA
aagtgatgggggtgggagtgtgg

SEQ ID NO: 3730 - DNA, 23 bp, synthetic construct
  misc_feature 1..23: note = HLA-A targeting gRNA
  source 1..23: mol_type = other DNA
aagtgccatgttcagcacgaggg

SEQ ID NO: 3731 - DNA, 23 bp, synthetic construct
  misc_feature 1..23: note = HLA-A targeting gRNA
  source 1..23: mol_type = other DNA
aagtggggctccccgcggccggg

SEQ ID NO: 3732 - DNA, 23 bp, synthetic construct
  misc_feature 1..23: note = HLA-A targeting gRNA
  source 1..23: mol_type = other DNA
aagtggggctctccgcggccggg

SEQ ID NO: 3733 - DNA, 23 bp, synthetic construct
  misc_feature 1..23: note = HLA-A targeting gRNA
  source 1..23: mol_type = other DNA
aagtggggctctccgcggctggg

SEQ ID NO: 3734 - DNA, 23 bp, synthetic construct
  misc_feature 1..23: note = HLA-A targeting gRNA
  source 1..23: mol_type = other DNA
aagtggtgggggtgggagtgtgg

SEQ ID NO: 3735 - DNA, 23 bp, synthetic construct
  misc_feature 1..23: note = HLA-A targeting gRNA
  source 1..23: mol_type = other DNA
aatacctggtcagagcccgcagg

SEQ ID NO: 3736 - DNA, 23 bp, synthetic construct
  misc_feature 1..23: note = HLA-A targeting gRNA
  source 1..23: mol_type = other DNA
aatatgtatggctgcgacgtggg

SEQ ID NO: 3737 - DNA, 23 bp, synthetic construct
  misc_feature 1..23: note = HLA-A targeting gRNA
  source 1..23: mol_type = other DNA
aatcagcgtctacgcagtcccgg

SEQ ID NO: 3738 - DNA, 23 bp, synthetic construct
  misc_feature 1..23: note = HLA-A targeting gRNA
  source 1..23: mol_type = other DNA
aatcagcgtctccgcagtaccgg

SEQ ID NO: 3739 - DNA, 23 bp, synthetic construct
  misc_feature 1..23: note = HLA-A targeting gRNA
  source 1..23: mol_type = other DNA
aatcagcgtctccgcagtccagg

SEQ ID NO: 3740 - DNA, 23 bp, synthetic construct
  misc_feature 1..23: note = HLA-A targeting gRNA
  source 1..23: mol_type = other DNA
aatcagcgtctccgcagtcccgg

SEQ ID NO: 3741 - DNA, 23 bp, synthetic construct
  misc_feature 1..23: note = HLA-A targeting gRNA
  source 1..23: mol_type = other DNA
aatccgacacccaatgggagtgg

SEQ ID NO: 3742 - DNA, 23 bp, synthetic construct
  misc_feature 1..23: note = HLA-A targeting gRNA
  source 1..23: mol_type = other DNA
aatccgcccagaccctcgaccgg

SEQ ID NO: 3743 - DNA, 23 bp, synthetic construct
  misc_feature 1..23: note = HLA-A targeting gRNA
  source 1..23: mol_type = other DNA
aatctgagccgcggtgtccgcgg

SEQ ID NO: 3744 - DNA, 23 bp, synthetic construct
  misc_feature 1..23: note = HLA-A targeting gRNA
  source 1..23: mol_type = other DNA
aatgaataggagattatcccagg

SEQ ID NO: 3745 - DNA, 23 bp, synthetic construct
  misc_feature 1..23: note = HLA-A targeting gRNA
  source 1..23: mol_type = other DNA
aatgcccacgatggggacagtgg

SEQ ID NO: 3746 - DNA, 23 bp, synthetic construct
  misc_feature 1..23: note = HLA-A targeting gRNA
  source 1..23: mol_type = other DNA
aatgcccacgatggggacggtgg

SEQ ID NO: 3747 - DNA, 23 bp, synthetic construct
  misc_feature 1..23: note = HLA-A targeting gRNA
  source 1..23: mol_type = other DNA
aatgcccacgatggggatggtgg

SEQ ID NO: 3748 - DNA, 23 bp, synthetic construct
  misc_feature 1..23: note = HLA-A targeting gRNA
  source 1..23: mol_type = other DNA
aatggacaggacacctggggtgg

SEQ ID NO: 3749 - DNA, 23 bp, synthetic construct
  misc_feature 1..23: note = HLA-A targeting gRNA
  source 1..23: mol_type = other DNA
aatggacaggacacctggtgtgg

SEQ ID NO: 3750 - DNA, 23 bp, synthetic construct
  misc_feature 1..23: note = HLA-A targeting gRNA
  source 1..23: mol_type = other DNA
aatggacgggacacctggggtgg

SEQ ID NO: 3751 - DNA, 23 bp, synthetic construct
  misc_feature 1..23: note = HLA-A targeting gRNA
  source 1..23: mol_type = other DNA
aatgggcaggacacctggggtgg

SEQ ID NO: 3752 - DNA, 23 bp, synthetic construct
  misc_feature 1..23: note = HLA-A targeting gRNA
  source 1..23: mol_type = other DNA
aatggggaggcgcagcgttgggg

SEQ ID NO: 3753 - DNA, 23 bp, synthetic construct
  misc_feature 1..23: note = HLA-A targeting gRNA
  source 1..23: mol_type = other DNA
aattcaggacactgagcttgtgg

SEQ ID NO: 3754 - DNA, 23 bp, synthetic construct
  misc_feature 1..23: note = HLA-A targeting gRNA
  source 1..23: mol_type = other DNA
aattgtcctagacagcagagggg

SEQ ID NO: 3755 - DNA, 23 bp, synthetic construct
  misc_feature 1..23: note = HLA-A targeting gRNA
  source 1..23: mol_type = other DNA
aattgtcctagagagaagagggg

SEQ ID NO: 3756 - DNA, 23 bp, synthetic construct
  misc_feature 1..23: note = HLA-A targeting gRNA
  source 1..23: mol_type = other DNA
aattgtcctagagagcagacggg

SEQ ID NO: 3757 - DNA, 23 bp, synthetic construct
  misc_feature 1..23: note = HLA-A targeting gRNA
  source 1..23: mol_type = other DNA
aattgtcctagagagcagagggg

SEQ ID NO: 3758 - DNA, 23 bp, synthetic construct
  misc_feature 1..23: note = HLA-A targeting gRNA
  source 1..23: mol_type = other DNA
aattgtctagagagaagaggggg

SEQ ID NO: 3759 - DNA, 23 bp, synthetic construct
  misc_feature 1..23: note = HLA-A targeting gRNA
  source 1..23: mol_type = other DNA
acacaggggctaacacagcctgg

SEQ ID NO: 3760 - DNA, 23 bp, synthetic construct
  misc_feature 1..23: note = HLA-A targeting gRNA
  source 1..23: mol_type = other DNA
acacaggggctaacgcagactgg

SEQ ID NO: 3761 - DNA, 23 bp, synthetic construct
  misc_feature 1..23: note = HLA-A targeting gRNA
  source 1..23: mol_type = other DNA
acacaggggctaacgcagcctgg

SEQ ID NO: 3762 - DNA, 23 bp, synthetic construct
  misc_feature 1..23: note = HLA-A targeting gRNA
  source 1..23: mol_type = other DNA
acacaggggctaatgcagcctgg

SEQ ID NO: 3763 - DNA, 23 bp, synthetic construct
  misc_feature 1..23: note = HLA-A targeting gRNA
  source 1..23: mol_type = other DNA
acacatgggccatcccagcctgg

SEQ ID NO: 3764 - DNA, 23 bp, synthetic construct
  misc_feature 1..23: note = HLA-A targeting gRNA
  source 1..23: mol_type = other DNA
acacatgtgacaatgaaggacgg

SEQ ID NO: 3765 - DNA, 23 bp, synthetic construct
  misc_feature 1..23: note = HLA-A targeting gRNA
  source 1..23: mol_type = other DNA
acacccagcttgtggagaccagg

SEQ ID NO: 3766 - DNA, 23 bp, synthetic construct
  misc_feature 1..23: note = HLA-A targeting gRNA
  source 1..23: mol_type = other DNA
acaccgagcttgtggagaccagg

SEQ ID NO: 3767 - DNA, 23 bp, synthetic construct
  misc_feature 1..23: note = HLA-A targeting gRNA
  source 1..23: mol_type = other DNA
acacctgggccatcccagcctgg

SEQ ID NO: 3768 - DNA, 23 bp, synthetic construct
  misc_feature 1..23: note = HLA-A targeting gRNA
  source 1..23: mol_type = other DNA
acacgggccgcctcccacttggg

SEQ ID NO: 3769 - DNA, 23 bp, synthetic construct
  misc_feature 1..23: note = HLA-A targeting gRNA
  source 1..23: mol_type = other DNA
acacgtgggccatcccagcctgg

SEQ ID NO: 3770 - DNA, 23 bp, synthetic construct
  misc_feature 1..23: note = HLA-A targeting gRNA
  source 1..23: mol_type = other DNA
acactgacctggcagtgggatgg

SEQ ID NO: 3771 - DNA, 23 bp, synthetic construct
  misc_feature 1..23: note = HLA-A targeting gRNA
  source 1..23: mol_type = other DNA
acactgacctggtagcgggatgg

SEQ ID NO: 3772 - DNA, 23 bp, synthetic construct
  misc_feature 1..23: note = HLA-A targeting gRNA
  source 1..23: mol_type = other DNA
acactgagcttgtggagaccagg

SEQ ID NO: 3773 - DNA, 23 bp, synthetic construct
  misc_feature 1..23: note = HLA-A targeting gRNA
  source 1..23: mol_type = other DNA
acactgatctggcagtgggatgg

SEQ ID NO: 3774 - DNA, 23 bp, synthetic construct
  misc_feature 1..23: note = HLA-A targeting gRNA
  source 1..23: mol_type = other DNA
acagaacccaaacaccagcctgg

SEQ ID NO: 3775 - DNA, 23 bp, synthetic construct
  misc_feature 1..23: note = HLA-A targeting gRNA
  source 1..23: mol_type = other DNA
acagaacccagacaccagcccgg

SEQ ID NO: 3776 - DNA, 23 bp, synthetic construct
  misc_feature 1..23: note = HLA-A targeting gRNA
  source 1..23: mol_type = other DNA
acagaacccagacgccagcctgg

SEQ ID NO: 3777 - DNA, 23 bp, synthetic construct
  misc_feature 1..23: note = HLA-A targeting gRNA
  source 1..23: mol_type = other DNA
acagaccttaggagagcagttgg

SEQ ID NO: 3778 - DNA, 23 bp, synthetic construct
  misc_feature 1..23: note = HLA-A targeting gRNA
  source 1..23: mol_type = other DNA
acagaccttaggagggcagttgg

SEQ ID NO: 3779 - DNA, 23 bp, synthetic construct
  misc_feature 1..23: note = HLA-A targeting gRNA
  source 1..23: mol_type = other DNA
acagcagagggggccctcagagg

SEQ ID NO: 3780 - DNA, 23 bp, synthetic construct
  misc_feature 1..23: note = HLA-A targeting gRNA
  source 1..23: mol_type = other DNA
acagccacgccgcgagtccgagg

SEQ ID NO: 3781 - DNA, 23 bp, synthetic construct
  misc_feature 1..23: note = HLA-A targeting gRNA
  source 1..23: mol_type = other DNA
acagcccctcgtgctgcacatgg

SEQ ID NO: 3782 - DNA, 23 bp, synthetic construct
  misc_feature 1..23: note = HLA-A targeting gRNA
  source 1..23: mol_type = other DNA
acagcgacgccacgagtccgagg

SEQ ID NO: 3783 - DNA, 23 bp, synthetic construct
  misc_feature 1..23: note = HLA-A targeting gRNA
  source 1..23: mol_type = other DNA
acagcgacgccgcgagtccgagg

SEQ ID NO: 3784 - DNA, 23 bp, synthetic construct
  misc_feature 1..23: note = HLA-A targeting gRNA
  source 1..23: mol_type = other DNA
acagcgacgctgcgagtccgagg

SEQ ID NO: 3785 - DNA, 23 bp, synthetic construct
  misc_feature 1..23: note = HLA-A targeting gRNA
  source 1..23: mol_type = other DNA
acagctgtggtggtgccttctgg

SEQ ID NO: 3786 - DNA, 23 bp, synthetic construct
  misc_feature 1..23: note = HLA-A targeting gRNA
  source 1..23: mol_type = other DNA
acaggaacgcagacacattcagg

SEQ ID NO: 3787 - DNA, 23 bp, synthetic construct
  misc_feature 1..23: note = HLA-A targeting gRNA
  source 1..23: mol_type = other DNA
acaggacatttgcttcccacagg

SEQ ID NO: 3788 - DNA, 23 bp, synthetic construct
  misc_feature 1..23: note = HLA-A targeting gRNA
  source 1..23: mol_type = other DNA
acaggacattttcttcccacagg

SEQ ID NO: 3789 - DNA, 23 bp, synthetic construct
  misc_feature 1..23: note = HLA-A targeting gRNA
  source 1..23: mol_type = other DNA
acaggcccaggtctcggtcaggg

SEQ ID NO: 3790 - DNA, 23 bp, synthetic construct
  misc_feature 1..23: note = HLA-A targeting gRNA
  source 1..23: mol_type = other DNA
acagggacacagacacattcagg

SEQ ID NO: 3791 - DNA, 23 bp, synthetic construct
  misc_feature 1..23: note = HLA-A targeting gRNA
  source 1..23: mol_type = other DNA
acagggacgcagacacattcagg

SEQ ID NO: 3792 - DNA, 23 bp, synthetic construct
  misc_feature 1..23: note = HLA-A targeting gRNA
  source 1..23: mol_type = other DNA
acagggcattttcttcccacagg

SEQ ID NO: 3793 - DNA, 23 bp, synthetic construct
  misc_feature 1..23: note = HLA-A targeting gRNA
  source 1..23: mol_type = other DNA
acaggggctaacgcagcctgggg

SEQ ID NO: 3794 - DNA, 23 bp, synthetic construct
  misc_feature 1..23: note = HLA-A targeting gRNA
  source 1..23: mol_type = other DNA
acatctctgaggaaatggagggg

SEQ ID NO: 3795 - DNA, 23 bp, synthetic construct
  misc_feature 1..23: note = HLA-A targeting gRNA
  source 1..23: mol_type = other DNA
acatgccaggtacagcatgaggg

SEQ ID NO: 3796 - DNA, 23 bp, synthetic construct
  misc_feature 1..23: note = HLA-A targeting gRNA
  source 1..23: mol_type = other DNA
acatgccatgtacagcatgaggg

SEQ ID NO: 3797 - DNA, 23 bp, synthetic construct
  misc_feature 1..23: note = HLA-A targeting gRNA
  source 1..23: mol_type = other DNA
accagcccaggtctcggtcaggg

SEQ ID NO: 3798 - DNA, 23 bp, synthetic construct
  misc_feature 1..23: note = HLA-A targeting gRNA
  source 1..23: mol_type = other DNA
accagcggacgcaggcacctggg

SEQ ID NO: 3799 - DNA, 23 bp, synthetic construct
  misc_feature 1..23: note = HLA-A targeting gRNA
  source 1..23: mol_type = other DNA
accagcggatgcaggcacctggg

SEQ ID NO: 3800 - DNA, 23 bp, synthetic construct
  misc_feature 1..23: note = HLA-A targeting gRNA
  source 1..23: mol_type = other DNA
accagtacgcctacgacggcagg

SEQ ID NO: 3801 - DNA, 23 bp, synthetic construct
  misc_feature 1..23: note = HLA-A targeting gRNA
  source 1..23: mol_type = other DNA
accagtcacccacccggactcgg

SEQ ID NO: 3802 - DNA, 23 bp, synthetic construct
  misc_feature 1..23: note = HLA-A targeting gRNA
  source 1..23: mol_type = other DNA
acccaatgggagtgggaaatggg

SEQ ID NO: 3803 - DNA, 23 bp, synthetic construct
  misc_feature 1..23: note = HLA-A targeting gRNA
  source 1..23: mol_type = other DNA
acccaatgggagtgggaagtggg

SEQ ID NO: 3804 - DNA, 23 bp, synthetic construct
  misc_feature 1..23: note = HLA-A targeting gRNA
  source 1..23: mol_type = other DNA
acccaatgggagtgggaattggg

SEQ ID NO: 3805 - DNA, 23 bp, synthetic construct
  misc_feature 1..23: note = HLA-A targeting gRNA
  source 1..23: mol_type = other DNA
acccagacaccagcggacgcagg

SEQ ID NO: 3806 - DNA, 23 bp, synthetic construct
  misc_feature 1..23: note = HLA-A targeting gRNA
  source 1..23: mol_type = other DNA
acccagacaccagcggatgcagg

SEQ ID NO: 3807 - DNA, 23 bp, synthetic construct
  misc_feature 1..23: note = HLA-A targeting gRNA
  source 1..23: mol_type = other DNA
acccagggcccagcacctcaggg

SEQ ID NO: 3808 - DNA, 23 bp, synthetic construct
  misc_feature 1..23: note = HLA-A targeting gRNA
  source 1..23: mol_type = other DNA
accccaacaccataatatcaagg

SEQ ID NO: 3809 - DNA, 23 bp, synthetic construct
  misc_feature 1..23: note = HLA-A targeting gRNA
  source 1..23: mol_type = other DNA
accccacgcacaggccctccagg

SEQ ID NO: 3810 - DNA, 23 bp, synthetic construct
  misc_feature 1..23: note = HLA-A targeting gRNA
  source 1..23: mol_type = other DNA
acccgacacccaatgggagtggg

SEQ ID NO: 3811 - DNA, 23 bp, synthetic construct
  misc_feature 1..23: note = HLA-A targeting gRNA
  source 1..23: mol_type = other DNA
acccgcccaggtctcggtcaggg

SEQ ID NO: 3812 - DNA, 23 bp, synthetic construct
  misc_feature 1..23: note = HLA-A targeting gRNA
  source 1..23: mol_type = other DNA
acccgcggaggaggcgcccgtgg

SEQ ID NO: 3813 - DNA, 23 bp, synthetic construct
  misc_feature 1..23: note = HLA-A targeting gRNA
  source 1..23: mol_type = other DNA
acccgggaagccgcgcagggagg

SEQ ID NO: 3814 - DNA, 23 bp, synthetic construct
  misc_feature 1..23: note = HLA-A targeting gRNA
  source 1..23: mol_type = other DNA
acccggggagccgcgcagggagg

SEQ ID NO: 3815 - DNA, 23 bp, synthetic construct
  misc_feature 1..23: note = HLA-A targeting gRNA
  source 1..23: mol_type = other DNA
acccggggagccgcgccgggagg

SEQ ID NO: 3816 - DNA, 23 bp, synthetic construct
  misc_feature 1..23: note = HLA-A targeting gRNA
  source 1..23: mol_type = other DNA
acccggggagccgcgccggtagg

SEQ ID NO: 3817 - DNA, 23 bp, synthetic construct
  misc_feature 1..23: note = HLA-A targeting gRNA
  source 1..23: mol_type = other DNA
acccggggagcggcgcagggagg

SEQ ID NO: 3818 - DNA, 23 bp, synthetic construct
  misc_feature 1..23: note = HLA-A targeting gRNA
  source 1..23: mol_type = other DNA
accctcatcctgctgctctcggg

SEQ ID NO: 3819 - DNA, 23 bp, synthetic construct
  misc_feature 1..23: note = HLA-A targeting gRNA
  source 1..23: mol_type = other DNA
accctcctcctgctgctctaggg

SEQ ID NO: 3820 - DNA, 23 bp, synthetic construct
  misc_feature 1..23: note = HLA-A targeting gRNA
  source 1..23: mol_type = other DNA
accctcctcctgctgctctcggg

SEQ ID NO: 3821 - DNA, 23 bp, synthetic construct
  misc_feature 1..23: note = HLA-A targeting gRNA
  source 1..23: mol_type = other DNA
accctcctcctgctgctctgggg

SEQ ID NO: 3822 - DNA, 23 bp, synthetic construct
  misc_feature 1..23: note = HLA-A targeting gRNA
  source 1..23: mol_type = other DNA
accctgagatggagtaaggaggg

SEQ ID NO: 3823 - DNA, 23 bp, synthetic construct
  misc_feature 1..23: note = HLA-A targeting gRNA
  source 1..23: mol_type = other DNA
accctgagctggggtaaggaggg

SEQ ID NO: 3824 - DNA, 23 bp, synthetic construct
  misc_feature 1..23: note = HLA-A targeting gRNA
  source 1..23: mol_type = other DNA
accctgaggtgctgggccatggg

SEQ ID NO: 3825 - DNA, 23 bp, synthetic construct
  misc_feature 1..23: note = HLA-A targeting gRNA
  source 1..23: mol_type = other DNA
accggaacacacagatcttcagg

SEQ ID NO: 3826 - DNA, 23 bp, synthetic construct
  misc_feature 1..23: note = HLA-A targeting gRNA
  source 1..23: mol_type = other DNA
accggcccaggtctcgatcaggg

SEQ ID NO: 3827 - DNA, 23 bp, synthetic construct
  misc_feature 1..23: note = HLA-A targeting gRNA
  source 1..23: mol_type = other DNA
accggcccaggtctcggtcaggg

SEQ ID NO: 3828 - DNA, 23 bp, synthetic construct
  misc_feature 1..23: note = HLA-A targeting gRNA
  source 1..23: mol_type = other DNA
accgggctgaccacgggggcggg

SEQ ID NO: 3829 - DNA, 23 bp, synthetic construct
  misc_feature 1..23: note = HLA-A targeting gRNA
  source 1..23: mol_type = other DNA
accggtcatacccgcggaggagg

SEQ ID NO: 3830 - DNA, 23 bp, synthetic construct
  misc_feature 1..23: note = HLA-A targeting gRNA
  source 1..23: mol_type = other DNA
accggtccaggtctcgatcaggg

SEQ ID NO: 3831 - DNA, 23 bp, synthetic construct
  misc_feature 1..23: note = HLA-A targeting gRNA
  source 1..23: mol_type = other DNA
accggtgagtgaccccggcccgg

SEQ ID NO: 3832 - DNA, 23 bp, synthetic construct
  misc_feature 1..23: note = HLA-A targeting gRNA
  source 1..23: mol_type = other DNA
accgtcctcctgctgctctcggg

SEQ ID NO: 3833 - DNA, 23 bp, synthetic construct
  misc_feature 1..23: note = HLA-A targeting gRNA
  source 1..23: mol_type = other DNA
accgtcctcctgctgctctgggg

SEQ ID NO: 3834 - DNA, 23 bp, synthetic construct
  misc_feature 1..23: note = HLA-A targeting gRNA
  source 1..23: mol_type = other DNA
accgtgagtgaccccggcccggg

SEQ ID NO: 3835 - DNA, 23 bp, synthetic construct
  misc_feature 1..23: note = HLA-A targeting gRNA
  source 1..23: mol_type = other DNA
accgtggtggttgtggtgttggg

SEQ ID NO: 3836 - DNA, 23 bp, synthetic construct
  misc_feature 1..23: note = HLA-A targeting gRNA
  source 1..23: mol_type = other DNA
acctcaactgaaaatgaaaccgg

SEQ ID NO: 3837 - DNA, 23 bp, synthetic construct
  misc_feature 1..23: note = HLA-A targeting gRNA
  source 1..23: mol_type = other DNA
acctcaaggagtgggagcctggg

SEQ ID NO: 3838 - DNA, 23 bp, synthetic construct
  misc_feature 1..23: note = HLA-A targeting gRNA
  source 1..23: mol_type = other DNA
acctcatgaagtgggagcctggg

SEQ ID NO: 3839 - DNA, 23 bp, synthetic construct
  misc_feature 1..23: note = HLA-A targeting gRNA
  source 1..23: mol_type = other DNA
acctcatggagagggagcctggg

SEQ ID NO: 3840 - DNA, 23 bp, synthetic construct
  misc_feature 1..23: note = HLA-A targeting gRNA
  source 1..23: mol_type = other DNA
acctcatggagtggaagcctggg

SEQ ID NO: 3841 - DNA, 23 bp, synthetic construct
  misc_feature 1..23: note = HLA-A targeting gRNA
  source 1..23: mol_type = other DNA
acctcatggagtgggaacctggg

SEQ ID NO: 3842 - DNA, 23 bp, synthetic construct
  misc_feature 1..23: note = HLA-A targeting gRNA
  source 1..23: mol_type = other DNA
acctcatggagtgggagactggg

SEQ ID NO: 3843 - DNA, 23 bp, synthetic construct
  misc_feature 1..23: note = HLA-A targeting gRNA
  source 1..23: mol_type = other DNA
acctcccggcgcggctccccggg

SEQ ID NO: 3844 - DNA, 23 bp, synthetic construct
  misc_feature 1..23: note = HLA-A targeting gRNA
  source 1..23: mol_type = other DNA
acctccctgcgccgctccccggg

SEQ ID NO: 3845 - DNA, 23 bp, synthetic construct
  misc_feature 1..23: note = HLA-A targeting gRNA
  source 1..23: mol_type = other DNA
acctccctgcgcggctccccggg

SEQ ID NO: 3846 - DNA, 23 bp, synthetic construct
  misc_feature 1..23: note = HLA-A targeting gRNA
  source 1..23: mol_type = other DNA
acctcgatggttgtggtgttggg

SEQ ID NO: 3847 - DNA, 23 bp, synthetic construct
  misc_feature 1..23: note = HLA-A targeting gRNA
  source 1..23: mol_type = other DNA
acctgagctcctggcggacacgg

SEQ ID NO: 3848 - DNA, 23 bp, synthetic construct
  misc_feature 1..23: note = HLA-A targeting gRNA
  source 1..23: mol_type = other DNA
acctgaggagccgcgccgggagg

SEQ ID NO: 3849 - DNA, 23 bp, synthetic construct
  misc_feature 1..23: note = HLA-A targeting gRNA
  source 1..23: mol_type = other DNA
acctgcgcggctactacaaccgg

SEQ ID NO: 3850 - DNA, 23 bp, synthetic construct
  misc_feature 1..23: note = HLA-A targeting gRNA
  source 1..23: mol_type = other DNA
acctgcgctcctggaccgccggg

SEQ ID NO: 3851 - DNA, 23 bp, synthetic construct
  misc_feature 1..23: note = HLA-A targeting gRNA
  source 1..23: mol_type = other DNA
acctgcgctcctggacgcggcgg

SEQ ID NO: 3852 - DNA, 23 bp, synthetic construct
  misc_feature 1..23: note = HLA-A targeting gRNA
  source 1..23: mol_type = other DNA
acctggagggcctgtgcgtgggg

SEQ ID NO: 3853 - DNA, 23 bp, synthetic construct
  misc_feature 1..23: note = HLA-A targeting gRNA
  source 1..23: mol_type = other DNA
acctggatgatgtgagaccctgg

SEQ ID NO: 3854 - DNA, 23 bp, synthetic construct
  misc_feature 1..23: note = HLA-A targeting gRNA
  source 1..23: mol_type = other DNA
acctgggataatctattcattgg

SEQ ID NO: 3855 - DNA, 23 bp, synthetic construct
  misc_feature 1..23: note = HLA-A targeting gRNA
  source 1..23: mol_type = other DNA
accttaatggttgtggtgttggg

SEQ ID NO: 3856 - DNA, 23 bp, synthetic construct
  misc_feature 1..23: note = HLA-A targeting gRNA
  source 1..23: mol_type = other DNA
accttgatattatggtgttgggg

SEQ ID NO: 3857 - DNA, 23 bp, synthetic construct
  misc_feature 1..23: note = HLA-A targeting gRNA
  source 1..23: mol_type = other DNA
accttgatgattatggtgttggg

SEQ ID NO: 3858 - DNA, 23 bp, synthetic construct
  misc_feature 1..23: note = HLA-A targeting gRNA
  source 1..23: mol_type = other DNA
accttgatggttgtggtgttggg

SEQ ID NO: 3859 - DNA, 23 bp, synthetic construct
  misc_feature 1..23: note = HLA-A targeting gRNA
  source 1..23: mol_type = other DNA
accttggggtggatctcagacgg

SEQ ID NO: 3860 - DNA, 23 bp, synthetic construct
  misc_feature 1..23: note = HLA-A targeting gRNA
  source 1..23: mol_type = other DNA
accttggtggttgtggcgttggg

SEQ ID NO: 3861 - DNA, 23 bp, synthetic construct
  misc_feature 1..23: note = HLA-A targeting gRNA
  source 1..23: mol_type = other DNA
accttggtggttgtggtgttggg

SEQ ID NO: 3862 - DNA, 23 bp, synthetic construct
  misc_feature 1..23: note = HLA-A targeting gRNA
  source 1..23: mol_type = other DNA
acgaagtcccaggccccgggcgg

SEQ ID NO: 3863 - DNA, 23 bp, synthetic construct
  misc_feature 1..23: note = HLA-A targeting gRNA
  source 1..23: mol_type = other DNA
acgaagtcccaggtcccggacgg

SEQ ID NO: 3864 - DNA, 23 bp, synthetic construct
  misc_feature 1..23: note = HLA-A targeting gRNA
  source 1..23: mol_type = other DNA
acgaagtcccaggtcccgggcgg

SEQ ID NO: 3865 - DNA, 23 bp, synthetic construct
  misc_feature 1..23: note = HLA-A targeting gRNA
  source 1..23: mol_type = other DNA
acgaagtcccatgtcccggacgg

SEQ ID NO: 3866 - DNA, 23 bp, synthetic construct
  misc_feature 1..23: note = HLA-A targeting gRNA
  source 1..23: mol_type = other DNA
acgacgccgcgagtccgagaggg

SEQ ID NO: 3867 - DNA, 23 bp, synthetic construct
  misc_feature 1..23: note = HLA-A targeting gRNA
  source 1..23: mol_type = other DNA
acgaggacctgagctcctggcgg

SEQ ID NO: 3868 - DNA, 23 bp, synthetic construct
  misc_feature 1..23: note = HLA-A targeting gRNA
  source 1..23: mol_type = other DNA
acgaggtgcccgcccggcgaggg

SEQ ID NO: 3869 - DNA, 23 bp, synthetic construct
  misc_feature 1..23: note = HLA-A targeting gRNA
  source 1..23: mol_type = other DNA
acgatgtacggctgcgacgtggg

SEQ ID NO: 3870 - DNA, 23 bp, synthetic construct
  misc_feature 1..23: note = HLA-A targeting gRNA
  source 1..23: mol_type = other DNA
acgatgtatggctgcgacatggg

SEQ ID NO: 3871 - DNA, 23 bp, synthetic construct
  misc_feature 1..23: note = HLA-A targeting gRNA
  source 1..23: mol_type = other DNA
acgatgtatggctgcgacctggg

SEQ ID NO: 3872 - DNA, 23 bp, synthetic construct
  misc_feature 1..23: note = HLA-A targeting gRNA
  source 1..23: mol_type = other DNA
acgatgtatggctgcgacgtggg

SEQ ID NO: 3873 - DNA, 23 bp, synthetic construct
  misc_feature 1..23: note = HLA-A targeting gRNA
  source 1..23: mol_type = other DNA
acgcgggtaccaggggcagtggg

SEQ ID NO: 3874 - DNA, 23 bp, synthetic construct
  misc_feature 1..23: note = HLA-A targeting gRNA
  source 1..23: mol_type = other DNA
acgctgcagcgcgcgggtaccgg

SEQ ID NO: 3875 - DNA, 23 bp, synthetic construct
  misc_feature 1..23: note = HLA-A targeting gRNA
  source 1..23: mol_type = other DNA
acggacaggacacctggggtggg

SEQ ID NO: 3876 - DNA, 23 bp, synthetic construct
  misc_feature 1..23: note = HLA-A targeting gRNA
  source 1..23: mol_type = other DNA
acggccgggccgggacatggcgg

SEQ ID NO: 3877 - DNA, 23 bp, synthetic construct
  misc_feature 1..23: note = HLA-A targeting gRNA
  source 1..23: mol_type = other DNA
acggcggtgtagatacctcatgg

SEQ ID NO: 3878 - DNA, 23 bp, synthetic construct
  misc_feature 1..23: note = HLA-A targeting gRNA
  source 1..23: mol_type = other DNA
acgggctgaccacgggggcgggg

SEQ ID NO: 3879 - DNA, 23 bp, synthetic construct
  misc_feature 1..23: note = HLA-A targeting gRNA
  source 1..23: mol_type = other DNA
acggggctgaccacgggggcggg

SEQ ID NO: 3880 - DNA, 23 bp, synthetic construct
  misc_feature 1..23: note = HLA-A targeting gRNA
  source 1..23: mol_type = other DNA
acggggctgaccgcggggccggg

SEQ ID NO: 3881 - DNA, 23 bp, synthetic construct
  misc_feature 1..23: note = HLA-A targeting gRNA
  source 1..23: mol_type = other DNA
acggggctgaccgcggggcctgg

SEQ ID NO: 3882 - DNA, 23 bp, synthetic construct
  misc_feature 1..23: note = HLA-A targeting gRNA
  source 1..23: mol_type = other DNA
acggggctgaccgcgggggcggg

SEQ ID NO: 3883 - DNA, 23 bp, synthetic construct
  misc_feature 1..23: note = HLA-A targeting gRNA
  source 1..23: mol_type = other DNA
acggggctggccgcggggccggg

SEQ ID NO: 3884 - DNA, 23 bp, synthetic construct
  misc_feature 1..23: note = HLA-A targeting gRNA
  source 1..23: mol_type = other DNA
acggtgagtgaccccggcctggg

SEQ ID NO: 3885 - DNA, 23 bp, synthetic construct
  misc_feature 1..23: note = HLA-A targeting gRNA
  source 1..23: mol_type = other DNA
acggtgcccaaggctgctgcagg

SEQ ID NO: 3886 - DNA, 23 bp, synthetic construct
  misc_feature 1..23: note = HLA-A targeting gRNA
  source 1..23: mol_type = other DNA
acggtgctgaccgcggggccggg

SEQ ID NO: 3887 - DNA, 23 bp, synthetic construct
  misc_feature 1..23: note = HLA-A targeting gRNA
  source 1..23: mol_type = other DNA
acggttcccaaggctgctgcagg

SEQ ID NO: 3888 - DNA, 23 bp, synthetic construct
  misc_feature 1..23: note = HLA-A targeting gRNA
  source 1..23: mol_type = other DNA
acgtcatggagtgggagcctggg

SEQ ID NO: 3889 - DNA, 23 bp, synthetic construct
  misc_feature 1..23: note = HLA-A targeting gRNA
  source 1..23: mol_type = other DNA
acgtctctgaggaaatggagggg

SEQ ID NO: 3890 - DNA, 23 bp, synthetic construct
  misc_feature 1..23: note = HLA-A targeting gRNA
  source 1..23: mol_type = other DNA
acgtctctgaggaaatgtagggg

SEQ ID NO: 3891 - DNA, 23 bp, synthetic construct
  misc_feature 1..23: note = HLA-A targeting gRNA
  source 1..23: mol_type = other DNA
acgtgccatatgcagcacgaggg

SEQ ID NO: 3892 - DNA, 23 bp, synthetic construct
  misc_feature 1..23: note = HLA-A targeting gRNA
  source 1..23: mol_type = other DNA
acgtgccatgtgcagcacgaggg

SEQ ID NO: 3893 - DNA, 23 bp, synthetic construct
  misc_feature 1..23: note = HLA-A targeting gRNA
  source 1..23: mol_type = other DNA
acgtgccatgtgcagcatgaggg

SEQ ID NO: 3894 - DNA, 23 bp, synthetic construct
  misc_feature 1..23: note = HLA-A targeting gRNA
  source 1..23: mol_type = other DNA
acgtgccatgttcagcacgaggg

SEQ ID NO: 3895 - DNA, 23 bp, synthetic construct
  misc_feature 1..23: note = HLA-A targeting gRNA
  source 1..23: mol_type = other DNA
acgtgcgtggagtggctccgcgg

SEQ ID NO: 3896 - DNA, 23 bp, synthetic construct
  misc_feature 1..23: note = HLA-A targeting gRNA
  source 1..23: mol_type = other DNA
acgtgggacaggaggaattaggg

SEQ ID NO: 3897 - DNA, 23 bp, synthetic construct
  misc_feature 1..23: note = HLA-A targeting gRNA
  source 1..23: mol_type = other DNA
acgtgggacaggaggaattatgg

SEQ ID NO: 3898 - DNA, 23 bp, synthetic construct
  misc_feature 1..23: note = HLA-A targeting gRNA
  source 1..23: mol_type = other DNA
acgttggacaggaggaattatgg

SEQ ID NO: 3899 - DNA, 23 bp, synthetic construct
  misc_feature 1..23: note = HLA-A targeting gRNA
  source 1..23: mol_type = other DNA
actacaaccagagcgaggccggg

SEQ ID NO: 3900 - DNA, 23 bp, synthetic construct
  misc_feature 1..23: note = HLA-A targeting gRNA
  source 1..23: mol_type = other DNA
actagaactttccaaagaatagg

SEQ ID NO: 3901 - DNA, 23 bp, synthetic construct
  misc_feature 1..23: note = HLA-A targeting gRNA
  source 1..23: mol_type = other DNA
actagaactttccaatgaatagg

SEQ ID NO: 3902 - DNA, 23 bp, synthetic construct
  misc_feature 1..23: note = HLA-A targeting gRNA
  source 1..23: mol_type = other DNA
actagggctctctccggtcgagg

SEQ ID NO: 3903 - DNA, 23 bp, synthetic construct
  misc_feature 1..23: note = HLA-A targeting gRNA
  source 1..23: mol_type = other DNA
actcatgaatgctggaatcaagg

SEQ ID NO: 3904 - DNA, 23 bp, synthetic construct
  misc_feature 1..23: note = HLA-A targeting gRNA
  source 1..23: mol_type = other DNA
actccacacacaggccctccagg

SEQ ID NO: 3905 - DNA, 23 bp, synthetic construct
  misc_feature 1..23: note = HLA-A targeting gRNA
  source 1..23: mol_type = other DNA
actccacacacgtgccctccagg

SEQ ID NO: 3906 - DNA, 23 bp, synthetic construct
  misc_feature 1..23: note = HLA-A targeting gRNA
  source 1..23: mol_type = other DNA
actccacgaacgtgccctccagg

SEQ ID NO: 3907 - DNA, 23 bp, synthetic construct
  misc_feature 1..23: note = HLA-A targeting gRNA
  source 1..23: mol_type = other DNA
actccacgcacagaccctccagg

SEQ ID NO: 3908 - DNA, 23 bp, synthetic construct
  misc_feature 1..23: note = HLA-A targeting gRNA
  source 1..23: mol_type = other DNA
actccacgcacaggccctcccgg

SEQ ID NO: 3909 - DNA, 23 bp, synthetic construct
  misc_feature 1..23: note = HLA-A targeting gRNA
  source 1..23: mol_type = other DNA
actccacgcacgtgcccaccagg

SEQ ID NO: 3910 - DNA, 23 bp, synthetic construct
  misc_feature 1..23: note = HLA-A targeting gRNA
  source 1..23: mol_type = other DNA
actccacgcacgtgtcctccagg

SEQ ID NO: 3911 - DNA, 23 bp, synthetic construct
  misc_feature 1..23: note = HLA-A targeting gRNA
  source 1..23: mol_type = other DNA
actccacgcacgttccctccagg

SEQ ID NO: 3912 - DNA, 23 bp, synthetic construct
  misc_feature 1..23: note = HLA-A targeting gRNA
  source 1..23: mol_type = other DNA
actccacgcactcgccctccagg

SEQ ID NO: 3913 - DNA, 23 bp, synthetic construct
  misc_feature 1..23: note = HLA-A targeting gRNA
  source 1..23: mol_type = other DNA
actccacgcacttgccctccagg

SEQ ID NO: 3914 - DNA, 23 bp, synthetic construct
  misc_feature 1..23: note = HLA-A targeting gRNA
  source 1..23: mol_type = other DNA
actccacgcgcgtgccctccagg

SEQ ID NO: 3915 - DNA, 23 bp, synthetic construct
  misc_feature 1..23: note = HLA-A targeting gRNA
  source 1..23: mol_type = other DNA
actccacgtacgtgccctccagg

SEQ ID NO: 3916 - DNA, 23 bp, synthetic construct
  misc_feature 1..23: note = HLA-A targeting gRNA
  source 1..23: mol_type = other DNA
actccactcacgtgccctccagg

SEQ ID NO: 3917 - DNA, 23 bp, synthetic construct
  misc_feature 1..23: note = HLA-A targeting gRNA
  source 1..23: mol_type = other DNA
actccatgcacgtgccctccagg

SEQ ID NO: 3918 - DNA, 23 bp, synthetic construct
  misc_feature 1..23: note = HLA-A targeting gRNA
  source 1..23: mol_type = other DNA
actcctcatattatgctaacagg

SEQ ID NO: 3919 - DNA, 23 bp, synthetic construct
  misc_feature 1..23: note = HLA-A targeting gRNA
  source 1..23: mol_type = other DNA
actcctccctgtcccctcacagg

SEQ ID NO: 3920 - DNA, 23 bp, synthetic construct
  misc_feature 1..23: note = HLA-A targeting gRNA
  source 1..23: mol_type = other DNA
actcctcgcacaggccctccagg

SEQ ID NO: 3921 - DNA, 23 bp, synthetic construct
  misc_feature 1..23: note = HLA-A targeting gRNA
  source 1..23: mol_type = other DNA
actcgaaacgtcccaatcaaagg

SEQ ID NO: 3922 - DNA, 23 bp, synthetic construct
  misc_feature 1..23: note = HLA-A targeting gRNA
  source 1..23: mol_type = other DNA
actcgaactttccaatgaatagg

SEQ ID NO: 3923 - DNA, 23 bp, synthetic construct
  misc_feature 1..23: note = HLA-A targeting gRNA
  source 1..23: mol_type = other DNA
actctcaggctgcgtgtaagtgg

SEQ ID NO: 3924 - DNA, 23 bp, synthetic construct
  misc_feature 1..23: note = HLA-A targeting gRNA
  source 1..23: mol_type = other DNA
actctcctcctgctgctctcggg

SEQ ID NO: 3925 - DNA, 23 bp, synthetic construct
  misc_feature 1..23: note = HLA-A targeting gRNA
  source 1..23: mol_type = other DNA
actgacctggcagtgggatgggg

SEQ ID NO: 3926 - DNA, 23 bp, synthetic construct
  misc_feature 1..23: note = HLA-A targeting gRNA
  source 1..23: mol_type = other DNA
actgatcatacccgcggaggagg

SEQ ID NO: 3927 - DNA, 23 bp, synthetic construct
  misc_feature 1..23: note = HLA-A targeting gRNA
  source 1..23: mol_type = other DNA
actgatctggcagtgggatgggg

SEQ ID NO: 3928 - DNA, 23 bp, synthetic construct
  misc_feature 1..23: note = HLA-A targeting gRNA
  source 1..23: mol_type = other DNA
actggacatacccgcggaggagg

SEQ ID NO: 3929 - DNA, 23 bp, synthetic construct
  misc_feature 1..23: note = HLA-A targeting gRNA
  source 1..23: mol_type = other DNA
actggccatacccgcggaggagg

SEQ ID NO: 3930 - DNA, 23 bp, synthetic construct
  misc_feature 1..23: note = HLA-A targeting gRNA
  source 1..23: mol_type = other DNA
actgggctgaccacgggggcggg

SEQ ID NO: 3931 - DNA, 23 bp, synthetic construct
  misc_feature 1..23: note = HLA-A targeting gRNA
  source 1..23: mol_type = other DNA
actgggctgaccgcgagggctgg

SEQ ID NO: 3932 - DNA, 23 bp, synthetic construct
  misc_feature 1..23: note = HLA-A targeting gRNA
  source 1..23: mol_type = other DNA
actgggctgaccgcggggccggg

SEQ ID NO: 3933 - DNA, 23 bp, synthetic construct
  misc_feature 1..23: note = HLA-A targeting gRNA
  source 1..23: mol_type = other DNA
actgggctgaccgcgggggcggg

SEQ ID NO: 3934 - DNA, 23 bp, synthetic construct
  misc_feature 1..23: note = HLA-A targeting gRNA
  source 1..23: mol_type = other DNA
actggggaggcgccgcgttgagg

SEQ ID NO: 3935 - DNA, 23 bp, synthetic construct
  misc_feature 1..23: note = HLA-A targeting gRNA
  source 1..23: mol_type = other DNA
actggggaggcgccgcgttgggg

SEQ ID NO: 3936 - DNA, 23 bp, synthetic construct
  misc_feature 1..23: note = HLA-A targeting gRNA
  source 1..23: mol_type = other DNA
actggggctctctccggccgagg

SEQ ID NO: 3937 - DNA, 23 bp, synthetic construct
  misc_feature 1..23: note = HLA-A targeting gRNA
  source 1..23: mol_type = other DNA
actggggctctctccggtcgagg

SEQ ID NO: 3938 - DNA, 23 bp, synthetic construct
  misc_feature 1..23: note = HLA-A targeting gRNA
  source 1..23: mol_type = other DNA
actggtcatacccgcggaggagg

SEQ ID NO: 3939 - DNA, 23 bp, synthetic construct
  misc_feature 1..23: note = HLA-A targeting gRNA
  source 1..23: mol_type = other DNA
actggtcatgcccgcggaggagg

SEQ ID NO: 3940 - DNA, 23 bp, synthetic construct
  misc_feature 1..23: note = HLA-A targeting gRNA
  source 1..23: mol_type = other DNA
actggttatacccgcggaggagg

SEQ ID NO: 3941 - DNA, 23 bp, synthetic construct
  misc_feature 1..23: note = HLA-A targeting gRNA
  source 1..23: mol_type = other DNA
actggttatacccgtggaggagg

SEQ ID NO: 3942 - DNA, 23 bp, synthetic construct
  misc_feature 1..23: note = HLA-A targeting gRNA
  source 1..23: mol_type = other DNA
actggttatgcccacggaggagg

SEQ ID NO: 3943 - DNA, 23 bp, synthetic construct
  misc_feature 1..23: note = HLA-A targeting gRNA
  source 1..23: mol_type = other DNA
actggttatgcccgcggaggagg

SEQ ID NO: 3944 - DNA, 23 bp, synthetic construct
  misc_feature 1..23: note = HLA-A targeting gRNA
  source 1..23: mol_type = other DNA
acttcatggagtgggagcctggg

SEQ ID NO: 3945 - DNA, 23 bp, synthetic construct
  misc_feature 1..23: note = HLA-A targeting gRNA
  source 1..23: mol_type = other DNA
acttcatggagtgggaggctggg

SEQ ID NO: 3946 - DNA, 23 bp, synthetic construct
  misc_feature 1..23: note = HLA-A targeting gRNA
  source 1..23: mol_type = other DNA
acttctgctcccgatctgagtgg

SEQ ID NO: 3947 - DNA, 23 bp, synthetic construct
  misc_feature 1..23: note = HLA-A targeting gRNA
  source 1..23: mol_type = other DNA
acttctgctcctgatctaagtgg

SEQ ID NO: 3948 - DNA, 23 bp, synthetic construct
  misc_feature 1..23: note = HLA-A targeting gRNA
  source 1..23: mol_type = other DNA
acttctgctcctgatctgagtgg

SEQ ID NO: 3949 - DNA, 23 bp, synthetic construct
  misc_feature 1..23: note = HLA-A targeting gRNA
  source 1..23: mol_type = other DNA
acttctgttcctgatctgagtgg

SEQ ID NO: 3950 - DNA, 23 bp, synthetic construct
  misc_feature 1..23: note = HLA-A targeting gRNA
  source 1..23: mol_type = other DNA
acttcttctcccaacttgtgggg

SEQ ID NO: 3951 - DNA, 23 bp, synthetic construct
  misc_feature 1..23: note = HLA-A targeting gRNA
  source 1..23: mol_type = other DNA
acttgtaaaggtgagattctggg

SEQ ID NO: 3952 - DNA, 23 bp, synthetic construct
  misc_feature 1..23: note = HLA-A targeting gRNA
  source 1..23: mol_type = other DNA
acttgtggggtccttcttccagg

SEQ ID NO: 3953 - DNA, 23 bp, synthetic construct
  misc_feature 1..23: note = HLA-A targeting gRNA
  source 1..23: mol_type = other DNA
actttacctccactcagatcagg

SEQ ID NO: 3954 - DNA, 23 bp, synthetic construct
  misc_feature 1..23: note = HLA-A targeting gRNA
  source 1..23: mol_type = other DNA
actttacctccactcagatcggg

SEQ ID NO: 3955 - DNA, 23 bp, synthetic construct
  misc_feature 1..23: note = HLA-A targeting gRNA
  source 1..23: mol_type = other DNA
actttacctccacttagatcagg

SEQ ID NO: 3956 - DNA, 23 bp, synthetic construct
  misc_feature 1..23: note = HLA-A targeting gRNA
  source 1..23: mol_type = other DNA
actttacctctactcagatcagg

SEQ ID NO: 3957 - DNA, 23 bp, synthetic construct
  misc_feature 1..23: note = HLA-A targeting gRNA
  source 1..23: mol_type = other DNA
agaacaaggcctgagaggaaagg

SEQ ID NO: 3958 - DNA, 23 bp, synthetic construct
  misc_feature 1..23: note = HLA-A targeting gRNA
  source 1..23: mol_type = other DNA
agaacctggccccgcccccgtgg

SEQ ID NO: 3959 - DNA, 23 bp, synthetic construct
  misc_feature 1..23: note = HLA-A targeting gRNA
  source 1..23: mol_type = other DNA
agaacctggccccggccccgcgg

SEQ ID NO: 3960 - DNA, 23 bp, synthetic construct
  misc_feature 1..23: note = HLA-A targeting gRNA
  source 1..23: mol_type = other DNA
agaacgaggacctgcgctcctgg

SEQ ID NO: 3961 - DNA, 23 bp, synthetic construct
  misc_feature 1..23: note = HLA-A targeting gRNA
  source 1..23: mol_type = other DNA
agaactacgactgcagacccagg

SEQ ID NO: 3962 - DNA, 23 bp, synthetic construct
  misc_feature 1..23: note = HLA-A targeting gRNA
  source 1..23: mol_type = other DNA
agaactatgactgcagacccagg

SEQ ID NO: 3963 - DNA, 23 bp, synthetic construct
  misc_feature 1..23: note = HLA-A targeting gRNA
  source 1..23: mol_type = other DNA
agaagccaatcagcgtcgccggg

SEQ ID NO: 3964 - DNA, 23 bp, synthetic construct
  misc_feature 1..23: note = HLA-A targeting gRNA
  source 1..23: mol_type = other DNA
agaagccaatcagtgtcgccggg

SEQ ID NO: 3965 - DNA, 23 bp, synthetic construct
  misc_feature 1..23: note = HLA-A targeting gRNA
  source 1..23: mol_type = other DNA
agaaggacccgacacaagttggg

SEQ ID NO: 3966 - DNA, 23 bp, synthetic construct
  misc_feature 1..23: note = HLA-A targeting gRNA
  source 1..23: mol_type = other DNA
agaaggacccgacacaggttggg

SEQ ID NO: 3967 - DNA, 23 bp, synthetic construct
  misc_feature 1..23: note = HLA-A targeting gRNA
  source 1..23: mol_type = other DNA
agaaggacccgacataggttggg

SEQ ID NO: 3968 - DNA, 23 bp, synthetic construct
  misc_feature 1..23: note = HLA-A targeting gRNA
  source 1..23: mol_type = other DNA
agaaggacccgacgcaggttggg

SEQ ID NO: 3969 - DNA, 23 bp, synthetic construct
  misc_feature 1..23: note = HLA-A targeting gRNA
  source 1..23: mol_type = other DNA
agaaggacccgtcgcaggttggg

SEQ ID NO: 3970 - DNA, 23 bp, synthetic construct
  misc_feature 1..23: note = HLA-A targeting gRNA
  source 1..23: mol_type = other DNA
agaaggaggggccggagtattgg

SEQ ID NO: 3971 - DNA, 23 bp, synthetic construct
  misc_feature 1..23: note = HLA-A targeting gRNA
  source 1..23: mol_type = other DNA
agaagtatgactacagacccagg

SEQ ID NO: 3972 - DNA, 23 bp, synthetic construct
  misc_feature 1..23: note = HLA-A targeting gRNA
  source 1..23: mol_type = other DNA
agaagtcccaggtcccgggcggg

SEQ ID NO: 3973 - DNA, 23 bp, synthetic construct
  misc_feature 1..23: note = HLA-A targeting gRNA
  source 1..23: mol_type = other DNA
agaagtgaaactcagggaagtgg

SEQ ID NO: 3974 - DNA, 23 bp, synthetic construct
  misc_feature 1..23: note = HLA-A targeting gRNA
  source 1..23: mol_type = other DNA
agaagtgaaactcaggggagtgg

SEQ ID NO: 3975 - DNA, 23 bp, synthetic construct
  misc_feature 1..23: note = HLA-A targeting gRNA
  source 1..23: mol_type = other DNA
agaagtgaaactcgtgggagtgg

SEQ ID NO: 3976 - DNA, 23 bp, synthetic construct
  misc_feature 1..23: note = HLA-A targeting gRNA
  source 1..23: mol_type = other DNA
agaagtgaaactcttgggagtgg

SEQ ID NO: 3977 - DNA, 23 bp, synthetic construct
  misc_feature 1..23: note = HLA-A targeting gRNA
  source 1..23: mol_type = other DNA
agacaccgagatgcgggtcacgg

SEQ ID NO: 3978 - DNA, 23 bp, synthetic construct
  misc_feature 1..23: note = HLA-A targeting gRNA
  source 1..23: mol_type = other DNA
agacactgagagccccgtccggg

SEQ ID NO: 3979 - DNA, 23 bp, synthetic construct
  misc_feature 1..23: note = HLA-A targeting gRNA
  source 1..23: mol_type = other DNA
agacactttgcatctctcttggg

SEQ ID NO: 3980 - DNA, 23 bp, synthetic construct
  misc_feature 1..23: note = HLA-A targeting gRNA
  source 1..23: mol_type = other DNA
agacagaaccttccagaagtggg

SEQ ID NO: 3981 - DNA, 23 bp, synthetic construct
  misc_feature 1..23: note = HLA-A targeting gRNA
  source 1..23: mol_type = other DNA
agacccagagagccccgcccggg

SEQ ID NO: 3982 - DNA, 23 bp, synthetic construct
  misc_feature 1..23: note = HLA-A targeting gRNA
  source 1..23: mol_type = other DNA
agacccctgatcagtattccagg

SEQ ID NO: 3983 - DNA, 23 bp, synthetic construct
  misc_feature 1..23: note = HLA-A targeting gRNA
  source 1..23: mol_type = other DNA
agaccctgagaaccccgcccggg

SEQ ID NO: 3984 - DNA, 23 bp, synthetic construct
  misc_feature 1..23: note = HLA-A targeting gRNA
  source 1..23: mol_type = other DNA
agaccctgagagccccgcccggg

SEQ ID NO: 3985 - DNA, 23 bp, synthetic construct
  misc_feature 1..23: note = HLA-A targeting gRNA
  source 1..23: mol_type = other DNA
agaccctgagagccccgtccggg

SEQ ID NO: 3986 - DNA, 23 bp, synthetic construct
  misc_feature 1..23: note = HLA-A targeting gRNA
  source 1..23: mol_type = other DNA
agaccctggcccagccctcgcgg

SEQ ID NO: 3987 - DNA, 23 bp, synthetic construct
  misc_feature 1..23: note = HLA-A targeting gRNA
  source 1..23: mol_type = other DNA
agaccctggcccaggccccgcgg

SEQ ID NO: 3988 - DNA, 23 bp, synthetic construct
  misc_feature 1..23: note = HLA-A targeting gRNA
  source 1..23: mol_type = other DNA
agaccctggccccgcccccgcgg

SEQ ID NO: 3989 - DNA, 23 bp, synthetic construct
  misc_feature 1..23: note = HLA-A targeting gRNA
  source 1..23: mol_type = other DNA
agaccctggccccgcccccgtgg

SEQ ID NO: 3990 - DNA, 23 bp, synthetic construct
  misc_feature 1..23: note = HLA-A targeting gRNA
  source 1..23: mol_type = other DNA
agaccctggccccggccccgcgg

SEQ ID NO: 3991 - DNA, 23 bp, synthetic construct
  misc_feature 1..23: note = HLA-A targeting gRNA
  source 1..23: mol_type = other DNA
agaccctggcctaggccccgcgg

SEQ ID NO: 3992 - DNA, 23 bp, synthetic construct
  misc_feature 1..23: note = HLA-A targeting gRNA
  source 1..23: mol_type = other DNA
agacctggaccggtgagtgcggg

SEQ ID NO: 3993 - DNA, 23 bp, synthetic construct
  misc_feature 1..23: note = HLA-A targeting gRNA
  source 1..23: mol_type = other DNA
agacctgggccggtgagtgcggg

SEQ ID NO: 3994 - DNA, 23 bp, synthetic construct
  misc_feature 1..23: note = HLA-A targeting gRNA
  source 1..23: mol_type = other DNA
agacctgggcctgtgagtgcggg

SEQ ID NO: 3995 - DNA, 23 bp, synthetic construct
  misc_feature 1..23: note = HLA-A targeting gRNA
  source 1..23: mol_type = other DNA
agacctgggctggtgagtgcggg

SEQ ID NO: 3996 - DNA, 23 bp, synthetic construct
  misc_feature 1..23: note = HLA-A targeting gRNA
  source 1..23: mol_type = other DNA
agacgaagcggggctctccgcgg

SEQ ID NO: 3997 - DNA, 23 bp, synthetic construct
  misc_feature 1..23: note = HLA-A targeting gRNA
  source 1..23: mol_type = other DNA
agacgccaagatgctggtcatgg

SEQ ID NO: 3998 - DNA, 23 bp, synthetic construct
  misc_feature 1..23: note = HLA-A targeting gRNA
  source 1..23: mol_type = other DNA
agacgccgagatgcgggtcacgg

SEQ ID NO: 3999 - DNA, 23 bp, synthetic construct
  misc_feature 1..23: note = HLA-A targeting gRNA
  source 1..23: mol_type = other DNA
agacgccgagatgcgggtcatgg

SEQ ID NO: 4000 - DNA, 23 bp, synthetic construct
  misc_feature 1..23: note = HLA-A targeting gRNA
  source 1..23: mol_type = other DNA
agacgccgagatgctggtcatgg

SEQ ID NO: 4001 - DNA, 23 bp, synthetic construct
  misc_feature 1..23: note = HLA-A targeting gRNA
  source 1..23: mol_type = other DNA
agacggatgtatcaccttaatgg

SEQ ID NO: 4002 - DNA, 23 bp, synthetic construct
  misc_feature 1..23: note = HLA-A targeting gRNA
  source 1..23: mol_type = other DNA
agacggctccgggaaaggaaggg

SEQ ID NO: 4003 - DNA, 23 bp, synthetic construct
  misc_feature 1..23: note = HLA-A targeting gRNA
  source 1..23: mol_type = other DNA
agacggctctgggaaaggaaggg

SEQ ID NO: 4004 - DNA, 23 bp, synthetic construct
  misc_feature 1..23: note = HLA-A targeting gRNA
  source 1..23: mol_type = other DNA
agacggctctgggaaaggagggg

SEQ ID NO: 4005 - DNA, 23 bp, synthetic construct
  misc_feature 1..23: note = HLA-A targeting gRNA
  source 1..23: mol_type = other DNA
agactgaccgaatgaacctgcgg

SEQ ID NO: 4006 - DNA, 23 bp, synthetic construct
  misc_feature 1..23: note = HLA-A targeting gRNA
  source 1..23: mol_type = other DNA
agactgaccgagaggacctgcgg

SEQ ID NO: 4007 - DNA, 23 bp, synthetic construct
  misc_feature 1..23: note = HLA-A targeting gRNA
  source 1..23: mol_type = other DNA
agactgaccgagtgaacctgcgg

SEQ ID NO: 4008 - DNA, 23 bp, synthetic construct
  misc_feature 1..23: note = HLA-A targeting gRNA
  source 1..23: mol_type = other DNA
agactgaccgagtgagcctgcgg

SEQ ID NO: 4009 - DNA, 23 bp, synthetic construct
  misc_feature 1..23: note = HLA-A targeting gRNA
  source 1..23: mol_type = other DNA
agactgaccgagtgggcctgcgg

SEQ ID NO: 4010 - DNA, 23 bp, synthetic construct
  misc_feature 1..23: note = HLA-A targeting gRNA
  source 1..23: mol_type = other DNA
agactgacggagagagcctgcgg

SEQ ID NO: 4011 - DNA, 23 bp, synthetic construct
  misc_feature 1..23: note = HLA-A targeting gRNA
  source 1..23: mol_type = other DNA
agacttaacgagagagcctgcgg

SEQ ID NO: 4012 - DNA, 23 bp, synthetic construct
  misc_feature 1..23: note = HLA-A targeting gRNA
  source 1..23: mol_type = other DNA
agacttaccgagagaacctgagg

SEQ ID NO: 4013 - DNA, 23 bp, synthetic construct
  misc_feature 1..23: note = HLA-A targeting gRNA
  source 1..23: mol_type = other DNA
agacttaccgagagaacctgcgg

SEQ ID NO: 4014 - DNA, 23 bp, synthetic construct
  misc_feature 1..23: note = HLA-A targeting gRNA
  source 1..23: mol_type = other DNA
agacttaccgagagagcctgcgg

SEQ ID NO: 4015 - DNA, 23 bp, synthetic construct
  misc_feature 1..23: note = HLA-A targeting gRNA
  source 1..23: mol_type = other DNA
agacttaccgagaggacctgcgg

SEQ ID NO: 4016 - DNA, 23 bp, synthetic construct
  misc_feature 1..23: note = HLA-A targeting gRNA
  source 1..23: mol_type = other DNA
agagaaagcagaagtccttctgg

SEQ ID NO: 4017 - DNA, 23 bp, synthetic construct
  misc_feature 1..23: note = HLA-A targeting gRNA
  source 1..23: mol_type = other DNA
agagaacccagacgccagcctgg

SEQ ID NO: 4018 - DNA, 23 bp, synthetic construct
  misc_feature 1..23: note = HLA-A targeting gRNA
  source 1..23: mol_type = other DNA
agagaagagggggccctcagagg

SEQ ID NO: 4019 - DNA, 23 bp, synthetic construct
  misc_feature 1..23: note = HLA-A targeting gRNA
  source 1..23: mol_type = other DNA
agagagccccgcccgggacctgg

SEQ ID NO: 4020 - DNA, 23 bp, synthetic construct
  misc_feature 1..23: note = HLA-A targeting gRNA
  source 1..23: mol_type = other DNA
agagaggggaccgcaggcggggg

SEQ ID NO: 4021 - DNA, 23 bp, synthetic construct
  misc_feature 1..23: note = HLA-A targeting gRNA
  source 1..23: mol_type = other DNA
agagcaccgcttcatctcagtgg

SEQ ID NO: 4022 - DNA, 23 bp, synthetic construct
  misc_feature 1..23: note = HLA-A targeting gRNA
  source 1..23: mol_type = other DNA
agagcagacggggccctcagagg

SEQ ID NO: 4023 - DNA, 23 bp, synthetic construct
  misc_feature 1..23: note = HLA-A targeting gRNA
  source 1..23: mol_type = other DNA
agagcagagatacacatgccagg

SEQ ID NO: 4024 - DNA, 23 bp, synthetic construct
  misc_feature 1..23: note = HLA-A targeting gRNA
  source 1..23: mol_type = other DNA
agagcagagggggccctcagagg

SEQ ID NO: 4025 - DNA, 23 bp, synthetic construct
  misc_feature 1..23: note = HLA-A targeting gRNA
  source 1..23: mol_type = other DNA
agagcagcaggaggacggttcgg

SEQ ID NO: 4026 - DNA, 23 bp, synthetic construct
  misc_feature 1..23: note = HLA-A targeting gRNA
  source 1..23: mol_type = other DNA
agagcagcaggaggagagttcgg

SEQ ID NO: 4027 - DNA, 23 bp, synthetic construct
  misc_feature 1..23: note = HLA-A targeting gRNA
  source 1..23: mol_type = other DNA
agagcagcaggaggagggctcgg

SEQ ID NO: 4028 - DNA, 23 bp, synthetic construct
  misc_feature 1..23: note = HLA-A targeting gRNA
  source 1..23: mol_type = other DNA
agagcagcaggaggagggcttgg

SEQ ID NO: 4029 - DNA, 23 bp, synthetic construct
  misc_feature 1..23: note = HLA-A targeting gRNA
  source 1..23: mol_type = other DNA
agagcagcaggaggagggttcgg

SEQ ID NO: 4030 - DNA, 23 bp, synthetic construct
  misc_feature 1..23: note = HLA-A targeting gRNA
  source 1..23: mol_type = other DNA
agagcagcaggatgagggttcgg

SEQ ID NO: 4031 - DNA, 23 bp, synthetic construct
  misc_feature 1..23: note = HLA-A targeting gRNA
  source 1..23: mol_type = other DNA
agagccccaaacactgagtgtgg

SEQ ID NO: 4032 - DNA, 23 bp, synthetic construct
  misc_feature 1..23: note = HLA-A targeting gRNA
  source 1..23: mol_type = other DNA
agagccccacttcatcgcagtgg

SEQ ID NO: 4033 - DNA, 23 bp, synthetic construct
  misc_feature 1..23: note = HLA-A targeting gRNA
  source 1..23: mol_type = other DNA
agagccccgcttcatctcagtgg

SEQ ID NO: 4034 - DNA, 23 bp, synthetic construct
  misc_feature 1..23: note = HLA-A targeting gRNA
  source 1..23: mol_type = other DNA
agagccccgcttcgtctcagtgg

SEQ ID NO: 4035 - DNA, 23 bp, synthetic construct
  misc_feature 1..23: note = HLA-A targeting gRNA
  source 1..23: mol_type = other DNA
agagcccctcaccctgagatggg

SEQ ID NO: 4036 - DNA, 23 bp, synthetic construct
  misc_feature 1..23: note = HLA-A targeting gRNA
  source 1..23: mol_type = other DNA
agagcccctcaccctgagctggg

SEQ ID NO: 4037 - DNA, 23 bp, synthetic construct
  misc_feature 1..23: note = HLA-A targeting gRNA
  source 1..23: mol_type = other DNA
agagccctgggcactgtcgctgg

SEQ ID NO: 4038 - DNA, 23 bp, synthetic construct
  misc_feature 1..23: note = HLA-A targeting gRNA
  source 1..23: mol_type = other DNA
agagccctgggcactgttgctgg

SEQ ID NO: 4039 - DNA, 23 bp, synthetic construct
  misc_feature 1..23: note = HLA-A targeting gRNA
  source 1..23: mol_type = other DNA
agagctcaggtggaaaaggaggg

SEQ ID NO: 4040 - DNA, 23 bp, synthetic construct
  misc_feature 1..23: note = HLA-A targeting gRNA
  source 1..23: mol_type = other DNA
agaggaacgaggtgcccgcccgg

SEQ ID NO: 4041 - DNA, 23 bp, synthetic construct
  misc_feature 1..23: note = HLA-A targeting gRNA
  source 1..23: mol_type = other DNA
agaggagccgcgggcgccgtggg

SEQ ID NO: 4042 - DNA, 23 bp, synthetic construct
  misc_feature 1..23: note = HLA-A targeting gRNA
  source 1..23: mol_type = other DNA
agaggagcgaggggcccgcccgg

SEQ ID NO: 4043 - DNA, 23 bp, synthetic construct
  misc_feature 1..23: note = HLA-A targeting gRNA
  source 1..23: mol_type = other DNA
agaggagcgaggggccctcccgg

SEQ ID NO: 4044 - DNA, 23 bp, synthetic construct
  misc_feature 1..23: note = HLA-A targeting gRNA
  source 1..23: mol_type = other DNA
agaggagggaggggccctcccgg

SEQ ID NO: 4045 - DNA, 23 bp, synthetic construct
  misc_feature 1..23: note = HLA-A targeting gRNA
  source 1..23: mol_type = other DNA
agaggcccttgaagtcacaaagg

SEQ ID NO: 4046 - DNA, 23 bp, synthetic construct
  misc_feature 1..23: note = HLA-A targeting gRNA
  source 1..23: mol_type = other DNA
agaggccgagatgcgggtcatgg

SEQ ID NO: 4047 - DNA, 23 bp, synthetic construct
  misc_feature 1..23: note = HLA-A targeting gRNA
  source 1..23: mol_type = other DNA
agaggctcttgaagtcacaaagg

SEQ ID NO: 4048 - DNA, 23 bp, synthetic construct
  misc_feature 1..23: note = HLA-A targeting gRNA
  source 1..23: mol_type = other DNA
agagtaagtgctagcacacaggg

SEQ ID NO: 4049 - DNA, 23 bp, synthetic construct
  misc_feature 1..23: note = HLA-A targeting gRNA
  source 1..23: mol_type = other DNA
agagtaagttctggcacacaggg

SEQ ID NO: 4050 - DNA, 23 bp, synthetic construct
  misc_feature 1..23: note = HLA-A targeting gRNA
  source 1..23: mol_type = other DNA
agagtcccgcttcatctcagtgg

SEQ ID NO: 4051 - DNA, 23 bp, synthetic construct
  misc_feature 1..23: note = HLA-A targeting gRNA
  source 1..23: mol_type = other DNA
agagtgggcaggggggtggtggg

SEQ ID NO: 4052 - DNA, 23 bp, synthetic construct
  misc_feature 1..23: note = HLA-A targeting gRNA
  source 1..23: mol_type = other DNA
agagtgggcggggggggggtggg

SEQ ID NO: 4053 - DNA, 23 bp, synthetic construct
  misc_feature 1..23: note = HLA-A targeting gRNA
  source 1..23: mol_type = other DNA
agagtgggcgggggggggtgggg

SEQ ID NO: 4054 - DNA, 23 bp, synthetic construct
  misc_feature 1..23: note = HLA-A targeting gRNA
  source 1..23: mol_type = other DNA
agagtgggcggggggggtggtgg

SEQ ID NO: 4055 - DNA, 23 bp, synthetic construct
  misc_feature 1..23: note = HLA-A targeting gRNA
  source 1..23: mol_type = other DNA
agagtgtgagaccctggccccgg

SEQ ID NO: 4056 - DNA, 23 bp, synthetic construct
  misc_feature 1..23: note = HLA-A targeting gRNA
  source 1..23: mol_type = other DNA
agatagaaccttccagaagtggg

SEQ ID NO: 4057 - DNA, 23 bp, synthetic construct
  misc_feature 1..23: note = HLA-A targeting gRNA
  source 1..23: mol_type = other DNA
agatcacactgacctggcagtgg

SEQ ID NO: 4058 - DNA, 23 bp, synthetic construct
  misc_feature 1..23: note = HLA-A targeting gRNA
  source 1..23: mol_type = other DNA
agatcacactgacctggtagcgg

SEQ ID NO: 4059 - DNA, 23 bp, synthetic construct
  misc_feature 1..23: note = HLA-A targeting gRNA
  source 1..23: mol_type = other DNA
agatcacactgatctggcagtgg

SEQ ID NO: 4060 - DNA, 23 bp, synthetic construct
  misc_feature 1..23: note = HLA-A targeting gRNA
  source 1..23: mol_type = other DNA
agatcagtgtgatctccgcaggg

SEQ ID NO: 4061 - DNA, 23 bp, synthetic construct
  misc_feature 1..23: note = HLA-A targeting gRNA
  source 1..23: mol_type = other DNA
agatccgcccccgaggccgcggg

SEQ ID NO: 4062 - DNA, 23 bp, synthetic construct
  misc_feature 1..23: note = HLA-A targeting gRNA
  source 1..23: mol_type = other DNA
agatccgccccctgaggccgcgg

SEQ ID NO: 4063 - DNA, 23 bp, synthetic construct
  misc_feature 1..23: note = HLA-A targeting gRNA
  source 1..23: mol_type = other DNA
agatctacaggagatagggaagg

SEQ ID NO: 4064 - DNA, 23 bp, synthetic construct
  misc_feature 1..23: note = HLA-A targeting gRNA
  source 1..23: mol_type = other DNA
agatctacaggagatggggaagg

SEQ ID NO: 4065 - DNA, 23 bp, synthetic construct
  misc_feature 1..23: note = HLA-A targeting gRNA
  source 1..23: mol_type = other DNA
agatctacgggagatggggaagg

SEQ ID NO: 4066 - DNA, 23 bp, synthetic construct
  misc_feature 1..23: note = HLA-A targeting gRNA
  source 1..23: mol_type = other DNA
agatctataggagatggggaagg

SEQ ID NO: 4067 - DNA, 23 bp, synthetic construct
  misc_feature 1..23: note = HLA-A targeting gRNA
  source 1..23: mol_type = other DNA
agatgaagcgggactctccgcgg

SEQ ID NO: 4068 - DNA, 23 bp, synthetic construct
  misc_feature 1..23: note = HLA-A targeting gRNA
  source 1..23: mol_type = other DNA
agatgaagcggggctccccgcgg

SEQ ID NO: 4069 - DNA, 23 bp, synthetic construct
  misc_feature 1..23: note = HLA-A targeting gRNA
  source 1..23: mol_type = other DNA
agatgaagcggggctctccgcgg

SEQ ID NO: 4070 - DNA, 23 bp, synthetic construct
  misc_feature 1..23: note = HLA-A targeting gRNA
  source 1..23: mol_type = other DNA
agatgaagcggtgctctccgcgg

SEQ ID NO: 4071 - DNA, 23 bp, synthetic construct
  misc_feature 1..23: note = HLA-A targeting gRNA
  source 1..23: mol_type = other DNA
agatggaaccttccagaagtggg

SEQ ID NO: 4072 - DNA, 23 bp, synthetic construct
  misc_feature 1..23: note = HLA-A targeting gRNA
  source 1..23: mol_type = other DNA
agatggccctgggaaaggagggg

SEQ ID NO: 4073 - DNA, 23 bp, synthetic construct
  misc_feature 1..23: note = HLA-A targeting gRNA
  source 1..23: mol_type = other DNA
agatggctctgggaaaggagggg

SEQ ID NO: 4074 - DNA, 23 bp, synthetic construct
  misc_feature 1..23: note = HLA-A targeting gRNA
  source 1..23: mol_type = other DNA
agattacatcgccctgaacgagg

SEQ ID NO: 4075 - DNA, 23 bp, synthetic construct
  misc_feature 1..23: note = HLA-A targeting gRNA
  source 1..23: mol_type = other DNA
agattcttggggtctagagtggg

SEQ ID NO: 4076 - DNA, 23 bp, synthetic construct
  misc_feature 1..23: note = HLA-A targeting gRNA
  source 1..23: mol_type = other DNA
agcaagaggggccggagtattgg

SEQ ID NO: 4077 - DNA, 23 bp, synthetic construct
  misc_feature 1..23: note = HLA-A targeting gRNA
  source 1..23: mol_type = other DNA
agcaaggggaccgcaggcggggg

SEQ ID NO: 4078 - DNA, 23 bp, synthetic construct
  misc_feature 1..23: note = HLA-A targeting gRNA
  source 1..23: mol_type = other DNA
agcacacagggtcccaggctggg

SEQ ID NO: 4079 - DNA, 23 bp, synthetic construct
  misc_feature 1..23: note = HLA-A targeting gRNA
  source 1..23: mol_type = other DNA
agcacagggcccagcacctcagg

SEQ ID NO: 4080 - DNA, 23 bp, synthetic construct
  misc_feature 1..23: note = HLA-A targeting gRNA
  source 1..23: mol_type = other DNA
agcacctcagggtgacctcatgg

SEQ ID NO: 4081 - DNA, 23 bp, synthetic construct
  misc_feature 1..23: note = HLA-A targeting gRNA
  source 1..23: mol_type = other DNA
agcagcaggaggacggttcgggg

SEQ ID NO: 4082 - DNA, 23 bp, synthetic construct
  misc_feature 1..23: note = HLA-A targeting gRNA
  source 1..23: mol_type = other DNA
agcagcaggaggagagttcgggg

SEQ ID NO: 4083 - DNA, 23 bp, synthetic construct
  misc_feature 1..23: note = HLA-A targeting gRNA
  source 1..23: mol_type = other DNA
agcagcaggaggagggctcgggg

SEQ ID NO: 4084 - DNA, 23 bp, synthetic construct
  misc_feature 1..23: note = HLA-A targeting gRNA
  source 1..23: mol_type = other DNA
agcagcaggaggagggcttgggg

SEQ ID NO: 4085 - DNA, 23 bp, synthetic construct
  misc_feature 1..23: note = HLA-A targeting gRNA
  source 1..23: mol_type = other DNA
agcagcaggaggagggttcgggg

SEQ ID NO: 4086 - DNA, 23 bp, synthetic construct
  misc_feature 1..23: note = HLA-A targeting gRNA
  source 1..23: mol_type = other DNA
agcagcaggatgagggttcaggg

SEQ ID NO: 4087 - DNA, 23 bp, synthetic construct
  misc_feature 1..23: note = HLA-A targeting gRNA
  source 1..23: mol_type = other DNA
agcagcaggatgagggttcgggg

SEQ ID NO: 4088 - DNA, 23 bp, synthetic construct
  misc_feature 1..23: note = HLA-A targeting gRNA
  source 1..23: mol_type = other DNA
agcaggaggggccagagtattgg

SEQ ID NO: 4089 - DNA, 23 bp, synthetic construct
  misc_feature 1..23: note = HLA-A targeting gRNA
  source 1..23: mol_type = other DNA
agcaggaggggccggaatattgg

SEQ ID NO: 4090 - DNA, 23 bp, synthetic construct
  misc_feature 1..23: note = HLA-A targeting gRNA
  source 1..23: mol_type = other DNA
agcaggaggggccggagcattgg

SEQ ID NO: 4091 - DNA, 23 bp, synthetic construct
  misc_feature 1..23: note = HLA-A targeting gRNA
  source 1..23: mol_type = other DNA
agcaggaggggccggagtactgg

SEQ ID NO: 4092 - DNA, 23 bp, synthetic construct
  misc_feature 1..23: note = HLA-A targeting gRNA
  source 1..23: mol_type = other DNA
agcaggaggggccggagtgttgg

SEQ ID NO: 4093 - DNA, 23 bp, synthetic construct
  misc_feature 1..23: note = HLA-A targeting gRNA
  source 1..23: mol_type = other DNA
agcaggaggggctggagtattgg

SEQ ID NO: 4094 - DNA, 23 bp, synthetic construct
  misc_feature 1..23: note = HLA-A targeting gRNA
  source 1..23: mol_type = other DNA
agcaggaggtgccggaggattgg

SEQ ID NO: 4095 - DNA, 23 bp, synthetic construct
  misc_feature 1..23: note = HLA-A targeting gRNA
  source 1..23: mol_type = other DNA
agcatgtacggctgcgacctggg

SEQ ID NO: 4096 - DNA, 23 bp, synthetic construct
  misc_feature 1..23: note = HLA-A targeting gRNA
  source 1..23: mol_type = other DNA
agcatgtacggctgcgacgtggg

SEQ ID NO: 4097 - DNA, 23 bp, synthetic construct
  misc_feature 1..23: note = HLA-A targeting gRNA
  source 1..23: mol_type = other DNA
agcatgtatggctgcgacgtggg

SEQ ID NO: 4098 - DNA, 23 bp, synthetic construct
  misc_feature 1..23: note = HLA-A targeting gRNA
  source 1..23: mol_type = other DNA
agcattcatgagtcaggggaagg

SEQ ID NO: 4099 - DNA, 23 bp, synthetic construct
  misc_feature 1..23: note = HLA-A targeting gRNA
  source 1..23: mol_type = other DNA
agcattcatgagtcgggggaagg

SEQ ID NO: 4100 - DNA, 23 bp, synthetic construct
  misc_feature 1..23: note = HLA-A targeting gRNA
  source 1..23: mol_type = other DNA
agcattcgtgagtcaggggaagg

SEQ ID NO: 4101 - DNA, 23 bp, synthetic construct
  misc_feature 1..23: note = HLA-A targeting gRNA
  source 1..23: mol_type = other DNA
agccactccacaggtatctgcgg

SEQ ID NO: 4102 - DNA, 23 bp, synthetic construct
  misc_feature 1..23: note = HLA-A targeting gRNA
  source 1..23: mol_type = other DNA
agccatggatagagcaggagggg

SEQ ID NO: 4103 - DNA, 23 bp, synthetic construct
  misc_feature 1..23: note = HLA-A targeting gRNA
  source 1..23: mol_type = other DNA
agcccatggcccagcacctcagg

SEQ ID NO: 4104 - DNA, 23 bp, synthetic construct
  misc_feature 1..23: note = HLA-A targeting gRNA
  source 1..23: mol_type = other DNA
agccccaaacactgagtgtgggg

SEQ ID NO: 4105 - DNA, 23 bp, synthetic construct
  misc_feature 1..23: note = HLA-A targeting gRNA
  source 1..23: mol_type = other DNA
agcccctcctgctctatccatgg

SEQ ID NO: 4106 - DNA, 23 bp, synthetic construct
  misc_feature 1..23: note = HLA-A targeting gRNA
  source 1..23: mol_type = other DNA
agccctcctcctgctgctctcgg

SEQ ID NO: 4107 - DNA, 23 bp, synthetic construct
  misc_feature 1..23: note = HLA-A targeting gRNA
  source 1..23: mol_type = other DNA
agccgcctcccacttgcgctggg

SEQ ID NO: 4108 - DNA, 23 bp, synthetic construct
  misc_feature 1..23: note = HLA-A targeting gRNA
  source 1..23: mol_type = other DNA
agccgcgcagggaggagggtcgg

SEQ ID NO: 4109 - DNA, 23 bp, synthetic construct
  misc_feature 1..23: note = HLA-A targeting gRNA
  source 1..23: mol_type = other DNA
agccgcgcagggaggtgggtcgg

SEQ ID NO: 4110 - DNA, 23 bp, synthetic construct
  misc_feature 1..23: note = HLA-A targeting gRNA
  source 1..23: mol_type = other DNA
agccgcgccgggaggtgggtcgg

SEQ ID NO: 4111 - DNA, 23 bp, synthetic construct
  misc_feature 1..23: note = HLA-A targeting gRNA
  source 1..23: mol_type = other DNA
agccgcgccggtaggagggtcgg

SEQ ID NO: 4112 - DNA, 23 bp, synthetic construct
  misc_feature 1..23: note = HLA-A targeting gRNA
  source 1..23: mol_type = other DNA
agccgtggatggagcaggagggg

SEQ ID NO: 4113 - DNA, 23 bp, synthetic construct
  misc_feature 1..23: note = HLA-A targeting gRNA
  source 1..23: mol_type = other DNA
agccgtgggtggagcaggagggg

SEQ ID NO: 4114 - DNA, 23 bp, synthetic construct
  misc_feature 1..23: note = HLA-A targeting gRNA
  source 1..23: mol_type = other DNA
agcgaccccgcgagtccgagagg

SEQ ID NO: 4115 - DNA, 23 bp, synthetic construct
  misc_feature 1..23: note = HLA-A targeting gRNA
  source 1..23: mol_type = other DNA
agcgacgccgcaagtccgagagg

SEQ ID NO: 4116 - DNA, 23 bp, synthetic construct
  misc_feature 1..23: note = HLA-A targeting gRNA
  source 1..23: mol_type = other DNA
agcgacgccgcgagtccaagagg

SEQ ID NO: 4117 - DNA, 23 bp, synthetic construct
  misc_feature 1..23: note = HLA-A targeting gRNA
  source 1..23: mol_type = other DNA
agcgacgccgcgagtccgagagg

SEQ ID NO: 4118 - DNA, 23 bp, synthetic construct
  misc_feature 1..23: note = HLA-A targeting gRNA
  source 1..23: mol_type = other DNA
agcgacgccgcgagtccgagggg

SEQ ID NO: 4119 - DNA, 23 bp, synthetic construct
  misc_feature 1..23: note = HLA-A targeting gRNA
  source 1..23: mol_type = other DNA
agcgactccgcgagtccaagagg

SEQ ID NO: 4120 - DNA, 23 bp, synthetic construct
  misc_feature 1..23: note = HLA-A targeting gRNA
  source 1..23: mol_type = other DNA
agcgaggggaccgcaggcggggg

SEQ ID NO: 4121 - DNA, 23 bp, synthetic construct
  misc_feature 1..23: note = HLA-A targeting gRNA
  source 1..23: mol_type = other DNA
agcgaggggcccgcccggcgagg

SEQ ID NO: 4122 - DNA, 23 bp, synthetic construct
  misc_feature 1..23: note = HLA-A targeting gRNA
  source 1..23: mol_type = other DNA
agcgaggggccctcccggcgagg

SEQ ID NO: 4123 - DNA, 23 bp, synthetic construct
  misc_feature 1..23: note = HLA-A targeting gRNA
  source 1..23: mol_type = other DNA
agcgcaagtgggaggcggcccgg

SEQ ID NO: 4124 - DNA, 23 bp, synthetic construct
  misc_feature 1..23: note = HLA-A targeting gRNA
  source 1..23: mol_type = other DNA
agcgcgggtaccaggggcagtgg

SEQ ID NO: 4125 - DNA, 23 bp, synthetic construct
  misc_feature 1..23: note = HLA-A targeting gRNA
  source 1..23: mol_type = other DNA
agcggcctctgcggagaggaggg

SEQ ID NO: 4126 - DNA, 23 bp, synthetic construct
  misc_feature 1..23: note = HLA-A targeting gRNA
  source 1..23: mol_type = other DNA
agcggcgcagggaggagggtcgg

SEQ ID NO: 4127 - DNA, 23 bp, synthetic construct
  misc_feature 1..23: note = HLA-A targeting gRNA
  source 1..23: mol_type = other DNA
agcggcgcagggaggtgggtcgg

SEQ ID NO: 4128 - DNA, 23 bp, synthetic construct
  misc_feature 1..23: note = HLA-A targeting gRNA
  source 1..23: mol_type = other DNA
agcggtgtagaaatacctcatgg

SEQ ID NO: 4129 - DNA, 23 bp, synthetic construct
  misc_feature 1..23: note = HLA-A targeting gRNA
  source 1..23: mol_type = other DNA
agcggtgtagaaatacttcatgg

SEQ ID NO: 4130 - DNA, 23 bp, synthetic construct
  misc_feature 1..23: note = HLA-A targeting gRNA
  source 1..23: mol_type = other DNA
agctacgccgcgagtccaagagg

SEQ ID NO: 4131 - DNA, 23 bp, synthetic construct
  misc_feature 1..23: note = HLA-A targeting gRNA
  source 1..23: mol_type = other DNA
agctcaggtagggaaggggtggg

SEQ ID NO: 4132 - DNA, 23 bp, synthetic construct
  misc_feature 1..23: note = HLA-A targeting gRNA
  source 1..23: mol_type = other DNA
agctgaagtggtcgggggtgggg

SEQ ID NO: 4133 - DNA, 23 bp, synthetic construct
  misc_feature 1..23: note = HLA-A targeting gRNA
  source 1..23: mol_type = other DNA
agctgaagtggtctggggtgggg

SEQ ID NO: 4134 - DNA, 23 bp, synthetic construct
  misc_feature 1..23: note = HLA-A targeting gRNA
  source 1..23: mol_type = other DNA
agctgccgcagtggtcaaagtgg

SEQ ID NO: 4135 - DNA, 23 bp, synthetic construct
  misc_feature 1..23: note = HLA-A targeting gRNA
  source 1..23: mol_type = other DNA
agctgccgcagtggtcgaagtgg

SEQ ID NO: 4136 - DNA, 23 bp, synthetic construct
  misc_feature 1..23: note = HLA-A targeting gRNA
  source 1..23: mol_type = other DNA
agctgctgcagtggtcaaagtgg

SEQ ID NO: 4137 - DNA, 23 bp, synthetic construct
  misc_feature 1..23: note = HLA-A targeting gRNA
  source 1..23: mol_type = other DNA
agctggagcgcgctggtaccagg

SEQ ID NO: 4138 - DNA, 23 bp, synthetic construct
  misc_feature 1..23: note = HLA-A targeting gRNA
  source 1..23: mol_type = other DNA
agctggggtaaggaggggaatgg

SEQ ID NO: 4139 - DNA, 23 bp, synthetic construct
  misc_feature 1..23: note = HLA-A targeting gRNA
  source 1..23: mol_type = other DNA
agctgtcctaggagctatggtgg

SEQ ID NO: 4140 - DNA, 23 bp, synthetic construct
  misc_feature 1..23: note = HLA-A targeting gRNA
  source 1..23: mol_type = other DNA
agctgtcctaggagctgtgatgg

SEQ ID NO: 4141 - DNA, 23 bp, synthetic construct
  misc_feature 1..23: note = HLA-A targeting gRNA
  source 1..23: mol_type = other DNA
agctgtcctaggagctgtggtgg

SEQ ID NO: 4142 - DNA, 23 bp, synthetic construct
  misc_feature 1..23: note = HLA-A targeting gRNA
  source 1..23: mol_type = other DNA
agcttgtacggctgcgacgtggg

SEQ ID NO: 4143 - DNA, 23 bp, synthetic construct
  misc_feature 1..23: note = HLA-A targeting gRNA
  source 1..23: mol_type = other DNA
aggaaaagtcacggtgcccaagg

SEQ ID NO: 4144 - DNA, 23 bp, synthetic construct
  misc_feature 1..23: note = HLA-A targeting gRNA
  source 1..23: mol_type = other DNA
aggaaaagtcacggttcccaagg

SEQ ID NO: 4145 - DNA, 23 bp, synthetic construct
  misc_feature 1..23: note = HLA-A targeting gRNA
  source 1..23: mol_type = other DNA
aggaaaagtcatggttcccaagg

SEQ ID NO: 4146 - DNA, 23 bp, synthetic construct
  misc_feature 1..23: note = HLA-A targeting gRNA
  source 1..23: mol_type = other DNA
aggaaagcaagtgtgggtcctgg

SEQ ID NO: 4147 - DNA, 23 bp, synthetic construct
  misc_feature 1..23: note = HLA-A targeting gRNA
  source 1..23: mol_type = other DNA
aggaaaggtcacggttcccaagg

SEQ ID NO: 4148 - DNA, 23 bp, synthetic construct
  misc_feature 1..23: note = HLA-A targeting gRNA
  source 1..23: mol_type = other DNA
aggaacgcagatcctcgttcagg

SEQ ID NO: 4149 - DNA, 23 bp, synthetic construct
  misc_feature 1..23: note = HLA-A targeting gRNA
  source 1..23: mol_type = other DNA
aggaagagctcaggtagggaagg

SEQ ID NO: 4150 - DNA, 23 bp, synthetic construct
  misc_feature 1..23: note = HLA-A targeting gRNA
  source 1..23: mol_type = other DNA
aggaagagctcaggtggaaaagg

SEQ ID NO: 4151 - DNA, 23 bp, synthetic construct
  misc_feature 1..23: note = HLA-A targeting gRNA
  source 1..23: mol_type = other DNA
aggaagagttcaggtagggaagg

SEQ ID NO: 4152 - DNA, 23 bp, synthetic construct
  misc_feature 1..23: note = HLA-A targeting gRNA
  source 1..23: mol_type = other DNA
aggaagagttctggtagggaagg

SEQ ID NO: 4153 - DNA, 23 bp, synthetic construct
  misc_feature 1..23: note = HLA-A targeting gRNA
  source 1..23: mol_type = other DNA
aggacacctggggtagggaaggg

SEQ ID NO: 4154 - DNA, 23 bp, synthetic construct
  misc_feature 1..23: note = HLA-A targeting gRNA
  source 1..23: mol_type = other DNA
aggacacctggggtggggaaggg

SEQ ID NO: 4155 - DNA, 23 bp, synthetic construct
  misc_feature 1..23: note = HLA-A targeting gRNA
  source 1..23: mol_type = other DNA
aggacacctggtgtggggaaggg

SEQ ID NO: 4156 - DNA, 23 bp, synthetic construct
  misc_feature 1..23: note = HLA-A targeting gRNA
  source 1..23: mol_type = other DNA
aggacccgggaagccgcgcaggg

SEQ ID NO: 4157 - DNA, 23 bp, synthetic construct
  misc_feature 1..23: note = HLA-A targeting gRNA
  source 1..23: mol_type = other DNA
aggacccggggagccgcgcaggg

SEQ ID NO: 4158 - DNA, 23 bp, synthetic construct
  misc_feature 1..23: note = HLA-A targeting gRNA
  source 1..23: mol_type = other DNA
aggacccggggagccgcgccggg

SEQ ID NO: 4159 - DNA, 23 bp, synthetic construct
  misc_feature 1..23: note = HLA-A targeting gRNA
  source 1..23: mol_type = other DNA
aggacccggggagcggcgcaggg

SEQ ID NO: 4160 - DNA, 23 bp, synthetic construct
  misc_feature 1..23: note = HLA-A targeting gRNA
  source 1..23: mol_type = other DNA
aggacctgaggagccgcgccggg

SEQ ID NO: 4161 - DNA, 23 bp, synthetic construct
  misc_feature 1..23: note = HLA-A targeting gRNA
  source 1..23: mol_type = other DNA
aggacctgcgctcctggacgcgg

SEQ ID NO: 4162 - DNA, 23 bp, synthetic construct
  misc_feature 1..23: note = HLA-A targeting gRNA
  source 1..23: mol_type = other DNA
aggacctggtcagagcccacagg

SEQ ID NO: 4163 - DNA, 23 bp, synthetic construct
  misc_feature 1..23: note = HLA-A targeting gRNA
  source 1..23: mol_type = other DNA
aggacctggtcagagcccgcagg

SEQ ID NO: 4164 - DNA, 23 bp, synthetic construct
  misc_feature 1..23: note = HLA-A targeting gRNA
  source 1..23: mol_type = other DNA
aggacctggtcagagccctcagg

SEQ ID NO: 4165 - DNA, 23 bp, synthetic construct
  misc_feature 1..23: note = HLA-A targeting gRNA
  source 1..23: mol_type = other DNA
aggacgaagtcccaggccccggg

SEQ ID NO: 4166 - DNA, 23 bp, synthetic construct
  misc_feature 1..23: note = HLA-A targeting gRNA
  source 1..23: mol_type = other DNA
aggacgaagtcccaggtcccggg

SEQ ID NO: 4167 - DNA, 23 bp, synthetic construct
  misc_feature 1..23: note = HLA-A targeting gRNA
  source 1..23: mol_type = other DNA
aggagacccgggccgtacgtcgg

SEQ ID NO: 4168 - DNA, 23 bp, synthetic construct
  misc_feature 1..23: note = HLA-A targeting gRNA
  source 1..23: mol_type = other DNA
aggagactctgagtccgggtggg

SEQ ID NO: 4169 - DNA, 23 bp, synthetic construct
  misc_feature 1..23: note = HLA-A targeting gRNA
  source 1..23: mol_type = other DNA
aggagagaggggaccgcaggcgg

SEQ ID NO: 4170 - DNA, 23 bp, synthetic construct
  misc_feature 1..23: note = HLA-A targeting gRNA
  source 1..23: mol_type = other DNA
aggagattctgagtccgggtggg

SEQ ID NO: 4171 - DNA, 23 bp, synthetic construct
  misc_feature 1..23: note = HLA-A targeting gRNA
  source 1..23: mol_type = other DNA
aggagattttgagtccgggtggg

SEQ ID NO: 4172 - DNA, 23 bp, synthetic construct
  misc_feature 1..23: note = HLA-A targeting gRNA
  source 1..23: mol_type = other DNA
aggagcaaggggaccgcaggcgg

SEQ ID NO: 4173 - DNA, 23 bp, synthetic construct
  misc_feature 1..23: note = HLA-A targeting gRNA
  source 1..23: mol_type = other DNA
aggagccctgcaccctgagatgg

SEQ ID NO: 4174 - DNA, 23 bp, synthetic construct
  misc_feature 1..23: note = HLA-A targeting gRNA
  source 1..23: mol_type = other DNA
aggagcccttcagcagggtcagg

SEQ ID NO: 4175 - DNA, 23 bp, synthetic construct
  misc_feature 1..23: note = HLA-A targeting gRNA
  source 1..23: mol_type = other DNA
aggagcgaggggaccgcaggcgg

SEQ ID NO: 4176 - DNA, 23 bp, synthetic construct
  misc_feature 1..23: note = HLA-A targeting gRNA
  source 1..23: mol_type = other DNA
aggagcgcagatcctcgttcagg

SEQ ID NO: 4177 - DNA, 23 bp, synthetic construct
  misc_feature 1..23: note = HLA-A targeting gRNA
  source 1..23: mol_type = other DNA
aggagcgcaggtcctcattcagg

SEQ ID NO: 4178 - DNA, 23 bp, synthetic construct
  misc_feature 1..23: note = HLA-A targeting gRNA
  source 1..23: mol_type = other DNA
aggagcgcaggtcctcgtccagg

SEQ ID NO: 4179 - DNA, 23 bp, synthetic construct
  misc_feature 1..23: note = HLA-A targeting gRNA
  source 1..23: mol_type = other DNA
aggagcgcaggtcctcgttctgg

SEQ ID NO: 4180 - DNA, 23 bp, synthetic construct
  misc_feature 1..23: note = HLA-A targeting gRNA
  source 1..23: mol_type = other DNA
aggagctcaggtcctcgttcagg

SEQ ID NO: 4181 - DNA, 23 bp, synthetic construct
  misc_feature 1..23: note = HLA-A targeting gRNA
  source 1..23: mol_type = other DNA
aggagcttaggtcctcgttcagg

SEQ ID NO: 4182 - DNA, 23 bp, synthetic construct
  misc_feature 1..23: note = HLA-A targeting gRNA
  source 1..23: mol_type = other DNA
aggaggcgcccgtcgggcccagg

SEQ ID NO: 4183 - DNA, 23 bp, synthetic construct
  misc_feature 1..23: note = HLA-A targeting gRNA
  source 1..23: mol_type = other DNA
aggaggcgcccgtcgggccccgg

SEQ ID NO: 4184 - DNA, 23 bp, synthetic construct
  misc_feature 1..23: note = HLA-A targeting gRNA
  source 1..23: mol_type = other DNA
aggagggcaggtcctcgttcagg

SEQ ID NO: 4185 - DNA, 23 bp, synthetic construct
  misc_feature 1..23: note = HLA-A targeting gRNA
  source 1..23: mol_type = other DNA
aggagtactggttatgcccgcgg

SEQ ID NO: 4186 - DNA, 23 bp, synthetic construct
  misc_feature 1..23: note = HLA-A targeting gRNA
  source 1..23: mol_type = other DNA
aggatgtaaggctgcgacgtggg

SEQ ID NO: 4187 - DNA, 23 bp, synthetic construct
  misc_feature 1..23: note = HLA-A targeting gRNA
  source 1..23: mol_type = other DNA
aggatgtacggctgcgacctggg

SEQ ID NO: 4188 - DNA, 23 bp, synthetic construct
  misc_feature 1..23: note = HLA-A targeting gRNA
  source 1..23: mol_type = other DNA
aggatgtacggctgcgacgtggg

SEQ ID NO: 4189 - DNA, 23 bp, synthetic construct
  misc_feature 1..23: note = HLA-A targeting gRNA
  source 1..23: mol_type = other DNA
aggatgtacggctgggacctggg

SEQ ID NO: 4190 - DNA, 23 bp, synthetic construct
  misc_feature 1..23: note = HLA-A targeting gRNA
  source 1..23: mol_type = other DNA
aggatgtatggctgcgacctggg

SEQ ID NO: 4191 - DNA, 23 bp, synthetic construct
  misc_feature 1..23: note = HLA-A targeting gRNA
  source 1..23: mol_type = other DNA
aggatgtctggctgcgacccggg

SEQ ID NO: 4192 - DNA, 23 bp, synthetic construct
  misc_feature 1..23: note = HLA-A targeting gRNA
  source 1..23: mol_type = other DNA
aggatgtctggctgcgacctggg

SEQ ID NO: 4193 - DNA, 23 bp, synthetic construct
  misc_feature 1..23: note = HLA-A targeting gRNA
  source 1..23: mol_type = other DNA
aggatgtctggctgcgacgtggg

SEQ ID NO: 4194 - DNA, 23 bp, synthetic construct
  misc_feature 1..23: note = HLA-A targeting gRNA
  source 1..23: mol_type = other DNA
aggatgtttggctgcgacctggg

SEQ ID NO: 4195 - DNA, 23 bp, synthetic construct
  misc_feature 1..23: note = HLA-A targeting gRNA
  source 1..23: mol_type = other DNA
aggcaaactggttatgcccgcgg

SEQ ID NO: 4196 - DNA, 23 bp, synthetic construct
  misc_feature 1..23: note = HLA-A targeting gRNA
  source 1..23: mol_type = other DNA
aggcaggatcaggaaacacgagg

SEQ ID NO: 4197 - DNA, 23 bp, synthetic construct
  misc_feature 1..23: note = HLA-A targeting gRNA
  source 1..23: mol_type = other DNA
aggcagggaacacttctacctgg

SEQ ID NO: 4198 - DNA, 23 bp, synthetic construct
  misc_feature 1..23: note = HLA-A targeting gRNA
  source 1..23: mol_type = other DNA
aggcagggccatgcaatcttagg

SEQ ID NO: 4199 - DNA, 23 bp, synthetic construct
  misc_feature 1..23: note = HLA-A targeting gRNA
  source 1..23: mol_type = other DNA
aggcagggccatgcgatcttagg

SEQ ID NO: 4200 - DNA, 23 bp, synthetic construct
  misc_feature 1..23: note = HLA-A targeting gRNA
  source 1..23: mol_type = other DNA
aggcagggccatgtgatcttagg

SEQ ID NO: 4201 - DNA, 23 bp, synthetic construct
  misc_feature 1..23: note = HLA-A targeting gRNA
  source 1..23: mol_type = other DNA
aggcagggccatgtgattttagg

SEQ ID NO: 4202 - DNA, 23 bp, synthetic construct
  misc_feature 1..23: note = HLA-A targeting gRNA
  source 1..23: mol_type = other DNA
aggcatactgctcatacccgcgg

SEQ ID NO: 4203 - DNA, 23 bp, synthetic construct
  misc_feature 1..23: note = HLA-A targeting gRNA
  source 1..23: mol_type = other DNA
aggccaaaatccccgcgggttgg

SEQ ID NO: 4204 - DNA, 23 bp, synthetic construct
  misc_feature 1..23: note = HLA-A targeting gRNA
  source 1..23: mol_type = other DNA
aggccatcccgggagatctacgg

SEQ ID NO: 4205 - DNA, 23 bp, synthetic construct
  misc_feature 1..23: note = HLA-A targeting gRNA
  source 1..23: mol_type = other DNA
aggccatgccgggagatctacgg

SEQ ID NO: 4206 - DNA, 23 bp, synthetic construct
  misc_feature 1..23: note = HLA-A targeting gRNA
  source 1..23: mol_type = other DNA
aggccccgggcggggctctcagg

SEQ ID NO: 4207 - DNA, 23 bp, synthetic construct
  misc_feature 1..23: note = HLA-A targeting gRNA
  source 1..23: mol_type = other DNA
aggcccttgaagtcacaaagggg

SEQ ID NO: 4208 - DNA, 23 bp, synthetic construct
  misc_feature 1..23: note = HLA-A targeting gRNA
  source 1..23: mol_type = other DNA
aggccgcctcccacttgcgctgg

SEQ ID NO: 4209 - DNA, 23 bp, synthetic construct
  misc_feature 1..23: note = HLA-A targeting gRNA
  source 1..23: mol_type = other DNA
aggcctgagaagaaaagtcatgg

SEQ ID NO: 4210 - DNA, 23 bp, synthetic construct
  misc_feature 1..23: note = HLA-A targeting gRNA
  source 1..23: mol_type = other DNA
aggcctgagaggaaaagtcatgg

SEQ ID NO: 4211 - DNA, 23 bp, synthetic construct
  misc_feature 1..23: note = HLA-A targeting gRNA
  source 1..23: mol_type = other DNA
aggcctgagaggaaaggtcacgg

SEQ ID NO: 4212 - DNA, 23 bp, synthetic construct
  misc_feature 1..23: note = HLA-A targeting gRNA
  source 1..23: mol_type = other DNA
aggcgaactggtcatacccgcgg

SEQ ID NO: 4213 - DNA, 23 bp, synthetic construct
  misc_feature 1..23: note = HLA-A targeting gRNA
  source 1..23: mol_type = other DNA
aggcgaactggtcatgcccgcgg

SEQ ID NO: 4214 - DNA, 23 bp, synthetic construct
  misc_feature 1..23: note = HLA-A targeting gRNA
  source 1..23: mol_type = other DNA
aggcgaactggttatacccgcgg

SEQ ID NO: 4215 - DNA, 23 bp, synthetic construct
  misc_feature 1..23: note = HLA-A targeting gRNA
  source 1..23: mol_type = other DNA
aggcgaactggttatacccgtgg

SEQ ID NO: 4216 - DNA, 23 bp, synthetic construct
  misc_feature 1..23: note = HLA-A targeting gRNA
  source 1..23: mol_type = other DNA
aggcgaactggttatgcccgcgg

SEQ ID NO: 4217 - DNA, 23 bp, synthetic construct
  misc_feature 1..23: note = HLA-A targeting gRNA
  source 1..23: mol_type = other DNA
aggcgacccgggccgtccgtggg

SEQ ID NO: 4218 - DNA, 23 bp, synthetic construct
  misc_feature 1..23: note = HLA-A targeting gRNA
  source 1..23: mol_type = other DNA
aggcgctttgcatctctcatagg

SEQ ID NO: 4219 - DNA, 23 bp, synthetic construct
  misc_feature 1..23: note = HLA-A targeting gRNA
  source 1..23: mol_type = other DNA
aggcgctttgcatctctcatggg

SEQ ID NO: 4220 - DNA, 23 bp, synthetic construct
  misc_feature 1..23: note = HLA-A targeting gRNA
  source 1..23: mol_type = other DNA
aggcgctttgcatctttcatggg

SEQ ID NO: 4221 - DNA, 23 bp, synthetic construct
  misc_feature 1..23: note = HLA-A targeting gRNA
  source 1..23: mol_type = other DNA
aggcggaccggtcatacccgcgg

SEQ ID NO: 4222 - DNA, 23 bp, synthetic construct
  misc_feature 1..23: note = HLA-A targeting gRNA
  source 1..23: mol_type = other DNA
aggcggactgatcatacccgcgg

SEQ ID NO: 4223 - DNA, 23 bp, synthetic construct
  misc_feature 1..23: note = HLA-A targeting gRNA
  source 1..23: mol_type = other DNA
aggcggactggccatacccgcgg

SEQ ID NO: 4224 - DNA, 23 bp, synthetic construct
  misc_feature 1..23: note = HLA-A targeting gRNA
  source 1..23: mol_type = other DNA
aggcggactggtcatacccgcgg

SEQ ID NO: 4225 - DNA, 23 bp, synthetic construct
  misc_feature 1..23: note = HLA-A targeting gRNA
  source 1..23: mol_type = other DNA
aggcggactggtcatgcccgcgg

SEQ ID NO: 4226 - DNA, 23 bp, synthetic construct
  misc_feature 1..23: note = HLA-A targeting gRNA
  source 1..23: mol_type = other DNA
aggcggggcacacttctacctgg

SEQ ID NO: 4227 - DNA, 23 bp, synthetic construct
  misc_feature 1..23: note = HLA-A targeting gRNA
  source 1..23: mol_type = other DNA
aggcgggggcgcaggacccgggg

SEQ ID NO: 4228 - DNA, 23 bp, synthetic construct
  misc_feature 1..23: note = HLA-A targeting gRNA
  source 1..23: mol_type = other DNA
aggcgggggcgcaggacctgagg

SEQ ID NO: 4229 - DNA, 23 bp, synthetic construct
  misc_feature 1..23: note = HLA-A targeting gRNA
  source 1..23: mol_type = other DNA
aggcgggggctcaggacccgggg

SEQ ID NO: 4230 - DNA, 23 bp, synthetic construct
  misc_feature 1..23: note = HLA-A targeting gRNA
  source 1..23: mol_type = other DNA
aggcgtactggacatacccgcgg

SEQ ID NO: 4231 - DNA, 23 bp, synthetic construct
  misc_feature 1..23: note = HLA-A targeting gRNA
  source 1..23: mol_type = other DNA
aggcgtactggtcatacccgcgg

SEQ ID NO: 4232 - DNA, 23 bp, synthetic construct
  misc_feature 1..23: note = HLA-A targeting gRNA
  source 1..23: mol_type = other DNA
aggcgtactggtcatgcccgcgg

SEQ ID NO: 4233 - DNA, 23 bp, synthetic construct
  misc_feature 1..23: note = HLA-A targeting gRNA
  source 1..23: mol_type = other DNA
aggcgtactggttatacccgcgg

SEQ ID NO: 4234 - DNA, 23 bp, synthetic construct
  misc_feature 1..23: note = HLA-A targeting gRNA
  source 1..23: mol_type = other DNA
aggcgtactggttatgcccgcgg

SEQ ID NO: 4235 - DNA, 23 bp, synthetic construct
  misc_feature 1..23: note = HLA-A targeting gRNA
  source 1..23: mol_type = other DNA
aggcgtcctggtcatacccgcgg

SEQ ID NO: 4236 - DNA, 23 bp, synthetic construct
  misc_feature 1..23: note = HLA-A targeting gRNA
  source 1..23: mol_type = other DNA
aggcgtcctggtggtacccgcgg

SEQ ID NO: 4237 - DNA, 23 bp, synthetic construct
  misc_feature 1..23: note = HLA-A targeting gRNA
  source 1..23: mol_type = other DNA
aggcgtcctggttatgcccgcgg

SEQ ID NO: 4238 - DNA, 23 bp, synthetic construct
  misc_feature 1..23: note = HLA-A targeting gRNA
  source 1..23: mol_type = other DNA
aggctaactggtcatgcccgcgg

SEQ ID NO: 4239 - DNA, 23 bp, synthetic construct
  misc_feature 1..23: note = HLA-A targeting gRNA
  source 1..23: mol_type = other DNA
aggctaactggttatacccgcgg

SEQ ID NO: 4240 - DNA, 23 bp, synthetic construct
  misc_feature 1..23: note = HLA-A targeting gRNA
  source 1..23: mol_type = other DNA
aggctaactggttatgcccacgg

SEQ ID NO: 4241 - DNA, 23 bp, synthetic construct
  misc_feature 1..23: note = HLA-A targeting gRNA
  source 1..23: mol_type = other DNA
aggctaactggttatgcccgcgg

SEQ ID NO: 4242 - DNA, 23 bp, synthetic construct
  misc_feature 1..23: note = HLA-A targeting gRNA
  source 1..23: mol_type = other DNA
aggctcttgaagtcacaaagggg

SEQ ID NO: 4243 - DNA, 23 bp, synthetic construct
  misc_feature 1..23: note = HLA-A targeting gRNA
  source 1..23: mol_type = other DNA
aggctgaccgagagagcctgcgg

SEQ ID NO: 4244 - DNA, 23 bp, synthetic construct
  misc_feature 1..23: note = HLA-A targeting gRNA
  source 1..23: mol_type = other DNA
aggctgaccgagtgaacctgcgg

SEQ ID NO: 4245 - DNA, 23 bp, synthetic construct
  misc_feature 1..23: note = HLA-A targeting gRNA
  source 1..23: mol_type = other DNA
aggctgaccgagtgagcctgcgg

SEQ ID NO: 4246 - DNA, 23 bp, synthetic construct
  misc_feature 1..23: note = HLA-A targeting gRNA
  source 1..23: mol_type = other DNA
aggctgcatgtaagtgatggcgg

SEQ ID NO: 4247 - DNA, 23 bp, synthetic construct
  misc_feature 1..23: note = HLA-A targeting gRNA
  source 1..23: mol_type = other DNA
aggctgcattagcccctgtgtgg

SEQ ID NO: 4248 - DNA, 23 bp, synthetic construct
  misc_feature 1..23: note = HLA-A targeting gRNA
  source 1..23: mol_type = other DNA
aggctgcgtgtaaatgatggcgg

SEQ ID NO: 4249 - DNA, 23 bp, synthetic construct
  misc_feature 1..23: note = HLA-A targeting gRNA
  source 1..23: mol_type = other DNA
aggctgcgtgtaagtgatgccgg

SEQ ID NO: 4250 - DNA, 23 bp, synthetic construct
  misc_feature 1..23: note = HLA-A targeting gRNA
  source 1..23: mol_type = other DNA
aggctgcgtgtaagtgatggcgg

SEQ ID NO: 4251 - DNA, 23 bp, synthetic construct
  misc_feature 1..23: note = HLA-A targeting gRNA
  source 1..23: mol_type = other DNA
aggctgcgtgtaagtgatggggg

SEQ ID NO: 4252 - DNA, 23 bp, synthetic construct
  misc_feature 1..23: note = HLA-A targeting gRNA
  source 1..23: mol_type = other DNA
aggctgcgtgtaagtggtggggg

SEQ ID NO: 4253 - DNA, 23 bp, synthetic construct
  misc_feature 1..23: note = HLA-A targeting gRNA
  source 1..23: mol_type = other DNA
aggctgcgttagcccctgtgagg

SEQ ID NO: 4254 - DNA, 23 bp, synthetic construct
  misc_feature 1..23: note = HLA-A targeting gRNA
  source 1..23: mol_type = other DNA
aggctgcgttagcccctgtgtgg

SEQ ID NO: 4255 - DNA, 23 bp, synthetic construct
  misc_feature 1..23: note = HLA-A targeting gRNA
  source 1..23: mol_type = other DNA
aggctgctgacctttctctcagg

SEQ ID NO: 4256 - DNA, 23 bp, synthetic construct
  misc_feature 1..23: note = HLA-A targeting gRNA
  source 1..23: mol_type = other DNA
aggctgctgacttttctctcagg

SEQ ID NO: 4257 - DNA, 23 bp, synthetic construct
  misc_feature 1..23: note = HLA-A targeting gRNA
  source 1..23: mol_type = other DNA
aggctgctgcaggggtcaaaggg

SEQ ID NO: 4258 - DNA, 23 bp, synthetic construct
  misc_feature 1..23: note = HLA-A targeting gRNA
  source 1..23: mol_type = other DNA
aggctgggatggcccacgtgtgg

SEQ ID NO: 4259 - DNA, 23 bp, synthetic construct
  misc_feature 1..23: note = HLA-A targeting gRNA
  source 1..23: mol_type = other DNA
aggctgggatggcccaggtgtgg

SEQ ID NO: 4260 - DNA, 23 bp, synthetic construct
  misc_feature 1..23: note = HLA-A targeting gRNA
  source 1..23: mol_type = other DNA
aggctgggatggcccatgtgtgg

SEQ ID NO: 4261 - DNA, 23 bp, synthetic construct
  misc_feature 1..23: note = HLA-A targeting gRNA
  source 1..23: mol_type = other DNA
aggctgtgttagcccctgtgtgg

SEQ ID NO: 4262 - DNA, 23 bp, synthetic construct
  misc_feature 1..23: note = HLA-A targeting gRNA
  source 1..23: mol_type = other DNA
agggaaaaggcctaggtaatggg

SEQ ID NO: 4263 - DNA, 23 bp, synthetic construct
  misc_feature 1..23: note = HLA-A targeting gRNA
  source 1..23: mol_type = other DNA
agggaaaaggcctgggtaatggg

SEQ ID NO: 4264 - DNA, 23 bp, synthetic construct
  misc_feature 1..23: note = HLA-A targeting gRNA
  source 1..23: mol_type = other DNA
agggaaagcagaagtccttctgg

SEQ ID NO: 4265 - DNA, 23 bp, synthetic construct
  misc_feature 1..23: note = HLA-A targeting gRNA
  source 1..23: mol_type = other DNA
agggaaagcaggagcccttctgg

SEQ ID NO: 4266 - DNA, 23 bp, synthetic construct
  misc_feature 1..23: note = HLA-A targeting gRNA
  source 1..23: mol_type = other DNA
agggagcctgggggcgaggaggg

SEQ ID NO: 4267 - DNA, 23 bp, synthetic construct
  misc_feature 1..23: note = HLA-A targeting gRNA
  source 1..23: mol_type = other DNA
agggaggcggatctcggacccgg

SEQ ID NO: 4268 - DNA, 23 bp, synthetic construct
  misc_feature 1..23: note = HLA-A targeting gRNA
  source 1..23: mol_type = other DNA
agggaggggccctcccggcgagg

SEQ ID NO: 4269 - DNA, 23 bp, synthetic construct
  misc_feature 1..23: note = HLA-A targeting gRNA
  source 1..23: mol_type = other DNA
agggcaggatcaggaaacacagg

SEQ ID NO: 4270 - DNA, 23 bp, synthetic construct
  misc_feature 1..23: note = HLA-A targeting gRNA
  source 1..23: mol_type = other DNA
agggcaggatcaggaaacacggg

SEQ ID NO: 4271 - DNA, 23 bp, synthetic construct
  misc_feature 1..23: note = HLA-A targeting gRNA
  source 1..23: mol_type = other DNA
agggcaggatcaggaaacatggg

SEQ ID NO: 4272 - DNA, 23 bp, synthetic construct
  misc_feature 1..23: note = HLA-A targeting gRNA
  source 1..23: mol_type = other DNA
agggcgcaggacccggggagcgg

SEQ ID NO: 4273 - DNA, 23 bp, synthetic construct
  misc_feature 1..23: note = HLA-A targeting gRNA
  source 1..23: mol_type = other DNA
agggcggggcggggctcgggggg

SEQ ID NO: 4274 - DNA, 23 bp, synthetic construct
  misc_feature 1..23: note = HLA-A targeting gRNA
  source 1..23: mol_type = other DNA
agggctgaggcttggaggtcagg

SEQ ID NO: 4275 - DNA, 23 bp, synthetic construct
  misc_feature 1..23: note = HLA-A targeting gRNA
  source 1..23: mol_type = other DNA
agggctgaggcttgggggtcagg

SEQ ID NO: 4276 - DNA, 23 bp, synthetic construct
  misc_feature 1..23: note = HLA-A targeting gRNA
  source 1..23: mol_type = other DNA
agggctgaggcttgggtgtaagg

SEQ ID NO: 4277 - DNA, 23 bp, synthetic construct
  misc_feature 1..23: note = HLA-A targeting gRNA
  source 1..23: mol_type = other DNA
aggggaaaggcctgggtaatggg

SEQ ID NO: 4278 - DNA, 23 bp, synthetic construct
  misc_feature 1..23: note = HLA-A targeting gRNA
  source 1..23: mol_type = other DNA
aggggagccccgggcgccgtggg

SEQ ID NO: 4279 - DNA, 23 bp, synthetic construct
  misc_feature 1..23: note = HLA-A targeting gRNA
  source 1..23: mol_type = other DNA
aggggagccgcaggcgccgtggg

SEQ ID NO: 4280 - DNA, 23 bp, synthetic construct
  misc_feature 1..23: note = HLA-A targeting gRNA
  source 1..23: mol_type = other DNA
aggggagccgcgggagccgtggg

SEQ ID NO: 4281 - DNA, 23 bp, synthetic construct
  misc_feature 1..23: note = HLA-A targeting gRNA
  source 1..23: mol_type = other DNA
aggggagccgcgggcgccgtggg

SEQ ID NO: 4282 - DNA, 23 bp, synthetic construct
  misc_feature 1..23: note = HLA-A targeting gRNA
  source 1..23: mol_type = other DNA
aggggccagagtattgggaccgg

SEQ ID NO: 4283 - DNA, 23 bp, synthetic construct
  misc_feature 1..23: note = HLA-A targeting gRNA
  source 1..23: mol_type = other DNA
aggggccccgaccctgctgaagg

SEQ ID NO: 4284 - DNA, 23 bp, synthetic construct
  misc_feature 1..23: note = HLA-A targeting gRNA
  source 1..23: mol_type = other DNA
aggggccctgaccctgctgaagg

SEQ ID NO: 4285 - DNA, 23 bp, synthetic construct
  misc_feature 1..23: note = HLA-A targeting gRNA
  source 1..23: mol_type = other DNA
aggggccggaatattgggaccgg

SEQ ID NO: 4286 - DNA, 23 bp, synthetic construct
  misc_feature 1..23: note = HLA-A targeting gRNA
  source 1..23: mol_type = other DNA
aggggccggaatattgggacggg

SEQ ID NO: 4287 - DNA, 23 bp, synthetic construct
  misc_feature 1..23: note = HLA-A targeting gRNA
  source 1..23: mol_type = other DNA
aggggccggagcattgggaccgg

SEQ ID NO: 4288 - DNA, 23 bp, synthetic construct
  misc_feature 1..23: note = HLA-A targeting gRNA
  source 1..23: mol_type = other DNA
aggggccggagtactgggaccgg

SEQ ID NO: 4289 - DNA, 23 bp, synthetic construct
  misc_feature 1..23: note = HLA-A targeting gRNA
  source 1..23: mol_type = other DNA
aggggccggagtattaggaccgg

SEQ ID NO: 4290 - DNA, 23 bp, synthetic construct
  misc_feature 1..23: note = HLA-A targeting gRNA
  source 1..23: mol_type = other DNA
aggggccggagtgttgggaccgg

SEQ ID NO: 4291 - DNA, 23 bp, synthetic construct
  misc_feature 1..23: note = HLA-A targeting gRNA
  source 1..23: mol_type = other DNA
aggggctggagtattgggaccgg

SEQ ID NO: 4292 - DNA, 23 bp, synthetic construct
  misc_feature 1..23: note = HLA-A targeting gRNA
  source 1..23: mol_type = other DNA
agggggaaaggcctgggtaatgg

SEQ ID NO: 4293 - DNA, 23 bp, synthetic construct
  misc_feature 1..23: note = HLA-A targeting gRNA
  source 1..23: mol_type = other DNA
aggggggcggatctcggacccgg

SEQ ID NO: 4294 - DNA, 23 bp, synthetic construct
  misc_feature 1..23: note = HLA-A targeting gRNA
  source 1..23: mol_type = other DNA
aggggggtggatctcggacccgg

SEQ ID NO: 4295 - DNA, 23 bp, synthetic construct
  misc_feature 1..23: note = HLA-A targeting gRNA
  source 1..23: mol_type = other DNA
aggggggtggtggggcagagggg

SEQ ID NO: 4296 - DNA, 23 bp, synthetic construct
  misc_feature 1..23: note = HLA-A targeting gRNA
  source 1..23: mol_type = other DNA
agggggtcggatctcggacccgg

SEQ ID NO: 4297 - DNA, 23 bp, synthetic construct
  misc_feature 1..23: note = HLA-A targeting gRNA
  source 1..23: mol_type = other DNA
aggggtcacagtggacacaaggg

SEQ ID NO: 4298 - DNA, 23 bp, synthetic construct
  misc_feature 1..23: note = HLA-A targeting gRNA
  source 1..23: mol_type = other DNA
aggggtcacagtggacacggggg

SEQ ID NO: 4299 - DNA, 23 bp, synthetic construct
  misc_feature 1..23: note = HLA-A targeting gRNA
  source 1..23: mol_type = other DNA
aggggtcacggtggacacggggg

SEQ ID NO: 4300 - DNA, 23 bp, synthetic construct
  misc_feature 1..23: note = HLA-A targeting gRNA
  source 1..23: mol_type = other DNA
aggggtcatatctcttctcaggg

SEQ ID NO: 4301 - DNA, 23 bp, synthetic construct
  misc_feature 1..23: note = HLA-A targeting gRNA
  source 1..23: mol_type = other DNA
aggggtcatatctgttctcaggg

SEQ ID NO: 4302 - DNA, 23 bp, synthetic construct
  misc_feature 1..23: note = HLA-A targeting gRNA
  source 1..23: mol_type = other DNA
aggggtcatgtgtcttctcaggg

SEQ ID NO: 4303 - DNA, 23 bp, synthetic construct
  misc_feature 1..23: note = HLA-A targeting gRNA
  source 1..23: mol_type = other DNA
aggggtcctgaccctgctgaagg

SEQ ID NO: 4304 - DNA, 23 bp, synthetic construct
  misc_feature 1..23: note = HLA-A targeting gRNA
  source 1..23: mol_type = other DNA
aggggtcgggacctgcgccccgg

SEQ ID NO: 4305 - DNA, 23 bp, synthetic construct
  misc_feature 1..23: note = HLA-A targeting gRNA
  source 1..23: mol_type = other DNA
aggggtgaagagcggggtctggg

SEQ ID NO: 4306 - DNA, 23 bp, synthetic construct
  misc_feature 1..23: note = HLA-A targeting gRNA
  source 1..23: mol_type = other DNA
aggggtgaggagtggggtctggg

SEQ ID NO: 4307 - DNA, 23 bp, synthetic construct
  misc_feature 1..23: note = HLA-A targeting gRNA
  source 1..23: mol_type = other DNA
aggggtgaggggtggggtctggg

SEQ ID NO: 4308 - DNA, 23 bp, synthetic construct
  misc_feature 1..23: note = HLA-A targeting gRNA
  source 1..23: mol_type = other DNA
aggggtgatgtgtcttctcaggg

SEQ ID NO: 4309 - DNA, 23 bp, synthetic construct
  misc_feature 1..23: note = HLA-A targeting gRNA
  source 1..23: mol_type = other DNA
aggggtggggagtggggtctggg

SEQ ID NO: 4310 - DNA, 23 bp, synthetic construct
  misc_feature 1..23: note = HLA-A targeting gRNA
  source 1..23: mol_type = other DNA
agggtatgagaccctggccccgg

SEQ ID NO: 4311 - DNA, 23 bp, synthetic construct
  misc_feature 1..23: note = HLA-A targeting gRNA
  source 1..23: mol_type = other DNA
agggtgtgagaccctggcccagg

SEQ ID NO: 4312 - DNA, 23 bp, synthetic construct
  misc_feature 1..23: note = HLA-A targeting gRNA
  source 1..23: mol_type = other DNA
agggtgtgagaccctggccccgg

SEQ ID NO: 4313 - DNA, 23 bp, synthetic construct
  misc_feature 1..23: note = HLA-A targeting gRNA
  source 1..23: mol_type = other DNA
agggtgtgagaccctggcctagg

SEQ ID NO: 4314 - DNA, 23 bp, synthetic construct
  misc_feature 1..23: note = HLA-A targeting gRNA
  source 1..23: mol_type = other DNA
aggtatctgcggtgccctccagg

SEQ ID NO: 4315 - DNA, 23 bp, synthetic construct
  misc_feature 1..23: note = HLA-A targeting gRNA
  source 1..23: mol_type = other DNA
aggtcaaaatccccgcgggttgg

SEQ ID NO: 4316 - DNA, 23 bp, synthetic construct
  misc_feature 1..23: note = HLA-A targeting gRNA
  source 1..23: mol_type = other DNA
aggtcagggctgaggcttggggg

SEQ ID NO: 4317 - DNA, 23 bp, synthetic construct
  misc_feature 1..23: note = HLA-A targeting gRNA
  source 1..23: mol_type = other DNA
aggtcagtgtgatctccccaggg

SEQ ID NO: 4318 - DNA, 23 bp, synthetic construct
  misc_feature 1..23: note = HLA-A targeting gRNA
  source 1..23: mol_type = other DNA
aggtcagtgtgatctccgtaggg

SEQ ID NO: 4319 - DNA, 23 bp, synthetic construct
  misc_feature 1..23: note = HLA-A targeting gRNA
  source 1..23: mol_type = other DNA
aggtcccggacggggctctcagg

SEQ ID NO: 4320 - DNA, 23 bp, synthetic construct
  misc_feature 1..23: note = HLA-A targeting gRNA
  source 1..23: mol_type = other DNA
aggtcccgggcggggctctcagg

SEQ ID NO: 4321 - DNA, 23 bp, synthetic construct
  misc_feature 1..23: note = HLA-A targeting gRNA
  source 1..23: mol_type = other DNA
aggtcccgggcggggctctctgg

SEQ ID NO: 4322 - DNA, 23 bp, synthetic construct
  misc_feature 1..23: note = HLA-A targeting gRNA
  source 1..23: mol_type = other DNA
aggtcccgggcggggttctcagg

SEQ ID NO: 4323 - DNA, 23 bp, synthetic construct
  misc_feature 1..23: note = HLA-A targeting gRNA
  source 1..23: mol_type = other DNA
aggtcctgcgcccccgcctgcgg

SEQ ID NO: 4324 - DNA, 23 bp, synthetic construct
  misc_feature 1..23: note = HLA-A targeting gRNA
  source 1..23: mol_type = other DNA
aggtgccggaggattgggaccgg

SEQ ID NO: 4325 - DNA, 23 bp, synthetic construct
  misc_feature 1..23: note = HLA-A targeting gRNA
  source 1..23: mol_type = other DNA
aggtggggcacacttctacctgg

SEQ ID NO: 4326 - DNA, 23 bp, synthetic construct
  misc_feature 1..23: note = HLA-A targeting gRNA
  source 1..23: mol_type = other DNA
aggttgcgtgtaagtgatggcgg

SEQ ID NO: 4327 - DNA, 23 bp, synthetic construct
  misc_feature 1..23: note = HLA-A targeting gRNA
  source 1..23: mol_type = other DNA
agtactggttatgcccgcggagg

SEQ ID NO: 4328 - DNA, 23 bp, synthetic construct
  misc_feature 1..23: note = HLA-A targeting gRNA
  source 1..23: mol_type = other DNA
agtagaacaaaaacaggacctgg

SEQ ID NO: 4329 - DNA, 23 bp, synthetic construct
  misc_feature 1..23: note = HLA-A targeting gRNA
  source 1..23: mol_type = other DNA
agtagaaccaaaacaggacctgg

SEQ ID NO: 4330 - DNA, 23 bp, synthetic construct
  misc_feature 1..23: note = HLA-A targeting gRNA
  source 1..23: mol_type = other DNA
agtagccaagcaggttccgcagg

SEQ ID NO: 4331 - DNA, 23 bp, synthetic construct
  misc_feature 1..23: note = HLA-A targeting gRNA
  source 1..23: mol_type = other DNA
agtagccgcgcaggatccgcagg

SEQ ID NO: 4332 - DNA, 23 bp, synthetic construct
  misc_feature 1..23: note = HLA-A targeting gRNA
  source 1..23: mol_type = other DNA
agtagccgcgcagggtccgcagg

SEQ ID NO: 4333 - DNA, 23 bp, synthetic construct
  misc_feature 1..23: note = HLA-A targeting gRNA
  source 1..23: mol_type = other DNA
agtagccgcgcaggttccgcagg

SEQ ID NO: 4334 - DNA, 23 bp, synthetic construct
  misc_feature 1..23: note = HLA-A targeting gRNA
  source 1..23: mol_type = other DNA
agtagccgcgcaggtttcgcagg

SEQ ID NO: 4335 - DNA, 23 bp, synthetic construct
  misc_feature 1..23: note = HLA-A targeting gRNA
  source 1..23: mol_type = other DNA
agtagccgcgcagttgccgcagg

SEQ ID NO: 4336 - DNA, 23 bp, synthetic construct
  misc_feature 1..23: note = HLA-A targeting gRNA
  source 1..23: mol_type = other DNA
agtagccgcgcagtttccgcagg

SEQ ID NO: 4337 - DNA, 23 bp, synthetic construct
  misc_feature 1..23: note = HLA-A targeting gRNA
  source 1..23: mol_type = other DNA
agtagcggagcagggtccgcagg

SEQ ID NO: 4338 - DNA, 23 bp, synthetic construct
  misc_feature 1..23: note = HLA-A targeting gRNA
  source 1..23: mol_type = other DNA
agtagcggagcgcgatcctcagg

SEQ ID NO: 4339 - DNA, 23 bp, synthetic construct
  misc_feature 1..23: note = HLA-A targeting gRNA
  source 1..23: mol_type = other DNA
agtagcggagcgcggtgcgcagg

SEQ ID NO: 4340 - DNA, 23 bp, synthetic construct
  misc_feature 1..23: note = HLA-A targeting gRNA
  source 1..23: mol_type = other DNA
agtagctgcgcaggttccgcagg

SEQ ID NO: 4341 - DNA, 23 bp, synthetic construct
  misc_feature 1..23: note = HLA-A targeting gRNA
  source 1..23: mol_type = other DNA
agtattgggaccgggagacacgg

SEQ ID NO: 4342 - DNA, 23 bp, synthetic construct
  misc_feature 1..23: note = HLA-A targeting gRNA
  source 1..23: mol_type = other DNA
agtcagggccatgcgatcttagg

SEQ ID NO: 4343 - DNA, 23 bp, synthetic construct
  misc_feature 1..23: note = HLA-A targeting gRNA
  source 1..23: mol_type = other DNA
agtccctagaatactgatcaggg

SEQ ID NO: 4344 - DNA, 23 bp, synthetic construct
  misc_feature 1..23: note = HLA-A targeting gRNA
  source 1..23: mol_type = other DNA
agtccctaggatagtgatcaggg

SEQ ID NO: 4345 - DNA, 23 bp, synthetic construct
  misc_feature 1..23: note = HLA-A targeting gRNA
  source 1..23: mol_type = other DNA
agtccctataatactgatcaggg

SEQ ID NO: 4346 - DNA, 23 bp, synthetic construct
  misc_feature 1..23: note = HLA-A targeting gRNA
  source 1..23: mol_type = other DNA
agtccctggaatactgatcaggg

SEQ ID NO: 4347 - DNA, 23 bp, synthetic construct
  misc_feature 1..23: note = HLA-A targeting gRNA
  source 1..23: mol_type = other DNA
agtccgagaaggggagccgcggg

SEQ ID NO: 4348 - DNA, 23 bp, synthetic construct
  misc_feature 1..23: note = HLA-A targeting gRNA
  source 1..23: mol_type = other DNA
agtcctggagcccttcagccagg

SEQ ID NO: 4349 - DNA, 23 bp, synthetic construct
  misc_feature 1..23: note = HLA-A targeting gRNA
  source 1..23: mol_type = other DNA
agtcctggagcccttcagccggg

SEQ ID NO: 4350 - DNA, 23 bp, synthetic construct
  misc_feature 1..23: note = HLA-A targeting gRNA
  source 1..23: mol_type = other DNA
agtcctggagcccttcagctggg

SEQ ID NO: 4351 - DNA, 23 bp, synthetic construct
  misc_feature 1..23: note = HLA-A targeting gRNA
  source 1..23: mol_type = other DNA
agtgccatgttcagcacgagggg

SEQ ID NO: 4352 - DNA, 23 bp, synthetic construct
  misc_feature 1..23: note = HLA-A targeting gRNA
  source 1..23: mol_type = other DNA
agtgcgggtcggcagggaaatgg

SEQ ID NO: 4353 - DNA, 23 bp, synthetic construct
  misc_feature 1..23: note = HLA-A targeting gRNA
  source 1..23: mol_type = other DNA
agtgcgggtcgggagggaaatgg

SEQ ID NO: 4354 - DNA, 23 bp, synthetic construct
  misc_feature 1..23: note = HLA-A targeting gRNA
  source 1..23: mol_type = other DNA
agtggccctgaccgagacctggg

SEQ ID NO: 4355 - DNA, 23 bp, synthetic construct
  misc_feature 1..23: note = HLA-A targeting gRNA
  source 1..23: mol_type = other DNA
agtggccgcgcaggttccgcagg

SEQ ID NO: 4356 - DNA, 23 bp, synthetic construct
  misc_feature 1..23: note = HLA-A targeting gRNA
  source 1..23: mol_type = other DNA
agtggccgcgcagtttccgcagg

SEQ ID NO: 4357 - DNA, 23 bp, synthetic construct
  misc_feature 1..23: note = HLA-A targeting gRNA
  source 1..23: mol_type = other DNA
agtggctccgcagatacctgggg

SEQ ID NO: 4358 - DNA, 23 bp, synthetic construct
  misc_feature 1..23: note = HLA-A targeting gRNA
  source 1..23: mol_type = other DNA
agtgggagcctggggcaaggagg

SEQ ID NO: 4359 - DNA, 23 bp, synthetic construct
  misc_feature 1..23: note = HLA-A targeting gRNA
  source 1..23: mol_type = other DNA
agtgggcgggggggcggggaggg

SEQ ID NO: 4360 - DNA, 23 bp, synthetic construct
  misc_feature 1..23: note = HLA-A targeting gRNA
  source 1..23: mol_type = other DNA
agtgggcggggggggcggggagg

SEQ ID NO: 4361 - DNA, 23 bp, synthetic construct
  misc_feature 1..23: note = HLA-A targeting gRNA
  source 1..23: mol_type = other DNA
agtgggcggggggggtggggtgg

SEQ ID NO: 4362 - DNA, 23 bp, synthetic construct
  misc_feature 1..23: note = HLA-A targeting gRNA
  source 1..23: mol_type = other DNA
agtgggcggggggggtggtgggg

SEQ ID NO: 4363 - DNA, 23 bp, synthetic construct
  misc_feature 1..23: note = HLA-A targeting gRNA
  source 1..23: mol_type = other DNA
agtgggtggggtggcaggtctgg

SEQ ID NO: 4364 - DNA, 23 bp, synthetic construct
  misc_feature 1..23: note = HLA-A targeting gRNA
  source 1..23: mol_type = other DNA
agtgggtggggtggcgggtctgg

SEQ ID NO: 4365 - DNA, 23 bp, synthetic construct
  misc_feature 1..23: note = HLA-A targeting gRNA
  source 1..23: mol_type = other DNA
agtggtcaaagtggtcaaagggg

SEQ ID NO: 4366 - DNA, 23 bp, synthetic construct
  misc_feature 1..23: note = HLA-A targeting gRNA
  source 1..23: mol_type = other DNA
agtggtcgaagtggtcaaagggg

SEQ ID NO: 4367 - DNA, 23 bp, synthetic construct
  misc_feature 1..23: note = HLA-A targeting gRNA
  source 1..23: mol_type = other DNA
agtggtcgggggtggggcagagg

SEQ ID NO: 4368 - DNA, 23 bp, synthetic construct
  misc_feature 1..23: note = HLA-A targeting gRNA
  source 1..23: mol_type = other DNA
agtggtctggggtggggcagagg

SEQ ID NO: 4369 - DNA, 23 bp, synthetic construct
  misc_feature 1..23: note = HLA-A targeting gRNA
  source 1..23: mol_type = other DNA
agtgtgccccacctcgttactgg

SEQ ID NO: 4370 - DNA, 23 bp, synthetic construct
  misc_feature 1..23: note = HLA-A targeting gRNA
  source 1..23: mol_type = other DNA
agtgtgccccgccttgttactgg

SEQ ID NO: 4371 - DNA, 23 bp, synthetic construct
  misc_feature 1..23: note = HLA-A targeting gRNA
  source 1..23: mol_type = other DNA
agtgttccctgcatcattactgg

SEQ ID NO: 4372 - DNA, 23 bp, synthetic construct
  misc_feature 1..23: note = HLA-A targeting gRNA
  source 1..23: mol_type = other DNA
agtgttccctgcctcattactgg

SEQ ID NO: 4373 - DNA, 23 bp, synthetic construct
  misc_feature 1..23: note = HLA-A targeting gRNA
  source 1..23: mol_type = other DNA
agttgaggccaaaatccccgcgg

SEQ ID NO: 4374 - DNA, 23 bp, synthetic construct
  misc_feature 1..23: note = HLA-A targeting gRNA
  source 1..23: mol_type = other DNA
agttgaggtcaaaatccccgcgg

SEQ ID NO: 4375 - DNA, 23 bp, synthetic construct
  misc_feature 1..23: note = HLA-A targeting gRNA
  source 1..23: mol_type = other DNA
agttgtggtcatcggagctgtgg

SEQ ID NO: 4376 - DNA, 23 bp, synthetic construct
  misc_feature 1..23: note = HLA-A targeting gRNA
  source 1..23: mol_type = other DNA
agtttaggccaaaatccccgcgg

SEQ ID NO: 4377 - DNA, 23 bp, synthetic construct
  misc_feature 1..23: note = HLA-A targeting gRNA
  source 1..23: mol_type = other DNA
atacataggaggaagagctcagg

SEQ ID NO: 4378 - DNA, 23 bp, synthetic construct
  misc_feature 1..23: note = HLA-A targeting gRNA
  source 1..23: mol_type = other DNA
atacttctggaaattccttttgg

SEQ ID NO: 4379 - DNA, 23 bp, synthetic construct
  misc_feature 1..23: note = HLA-A targeting gRNA
  source 1..23: mol_type = other DNA
atacttctggaaattctttttgg

SEQ ID NO: 4380 - DNA, 23 bp, synthetic construct
  misc_feature 1..23: note = HLA-A targeting gRNA
  source 1..23: mol_type = other DNA
atagcccacggtgatgaagcggg

SEQ ID NO: 4381 - DNA, 23 bp, synthetic construct
  misc_feature 1..23: note = HLA-A targeting gRNA
  source 1..23: mol_type = other DNA
ataggaggaagagctcaggtagg

SEQ ID NO: 4382 - DNA, 23 bp, synthetic construct
  misc_feature 1..23: note = HLA-A targeting gRNA
  source 1..23: mol_type = other DNA
atagggacgtttcgaatgtgtgg

SEQ ID NO: 4383 - DNA, 23 bp, synthetic construct
  misc_feature 1..23: note = HLA-A targeting gRNA
  source 1..23: mol_type = other DNA
atagggcattttcttcccacagg

SEQ ID NO: 4384 - DNA, 23 bp, synthetic construct
  misc_feature 1..23: note = HLA-A targeting gRNA
  source 1..23: mol_type = other DNA
atagttctggaaacttctcttgg

SEQ ID NO: 4385 - DNA, 23 bp, synthetic construct
  misc_feature 1..23: note = HLA-A targeting gRNA
  source 1..23: mol_type = other DNA
atatgtatggctgcgacgtgggg

SEQ ID NO: 4386 - DNA, 23 bp, synthetic construct
  misc_feature 1..23: note = HLA-A targeting gRNA
  source 1..23: mol_type = other DNA
atccaatacccaatgggagtggg

SEQ ID NO: 4387 - DNA, 23 bp, synthetic construct
  misc_feature 1..23: note = HLA-A targeting gRNA
  source 1..23: mol_type = other DNA
atccacccccctgaggccgcggg

SEQ ID NO: 4388 - DNA, 23 bp, synthetic construct
  misc_feature 1..23: note = HLA-A targeting gRNA
  source 1..23: mol_type = other DNA
atccgacacccaatgggagtggg

SEQ ID NO: 4389 - DNA, 23 bp, synthetic construct
  misc_feature 1..23: note = HLA-A targeting gRNA
  source 1..23: mol_type = other DNA
atccgaccccctgaggccgcggg

SEQ ID NO: 4390 - DNA, 23 bp, synthetic construct
  misc_feature 1..23: note = HLA-A targeting gRNA
  source 1..23: mol_type = other DNA
atccgcccccctgaggccgcggg

SEQ ID NO: 4391 - DNA, 23 bp, synthetic construct
  misc_feature 1..23: note = HLA-A targeting gRNA
  source 1..23: mol_type = other DNA
atccgcctccctgaggccgcggg

SEQ ID NO: 4392 - DNA, 23 bp, synthetic construct
  misc_feature 1..23: note = HLA-A targeting gRNA
  source 1..23: mol_type = other DNA
atcctctggatgtgagaccctgg

SEQ ID NO: 4393 - DNA, 23 bp, synthetic construct
  misc_feature 1..23: note = HLA-A targeting gRNA
  source 1..23: mol_type = other DNA
atctcagacccggagactcgggg

SEQ ID NO: 4394 - DNA, 23 bp, synthetic construct
  misc_feature 1..23: note = HLA-A targeting gRNA
  source 1..23: mol_type = other DNA
atctcagaccgggagactcgggg

SEQ ID NO: 4395 - DNA, 23 bp, synthetic construct
  misc_feature 1..23: note = HLA-A targeting gRNA
  source 1..23: mol_type = other DNA
atctcagaccgggagacttgggg

SEQ ID NO: 4396 - DNA, 23 bp, synthetic construct
  misc_feature 1..23: note = HLA-A targeting gRNA
  source 1..23: mol_type = other DNA
atctcagacggggagactcgggg

SEQ ID NO: 4397 - DNA, 23 bp, synthetic construct
  misc_feature 1..23: note = HLA-A targeting gRNA
  source 1..23: mol_type = other DNA
atctcagacggggagactctagg

SEQ ID NO: 4398 - DNA, 23 bp, synthetic construct
  misc_feature 1..23: note = HLA-A targeting gRNA
  source 1..23: mol_type = other DNA
atctcagacggggagactctggg

SEQ ID NO: 4399 - DNA, 23 bp, synthetic construct
  misc_feature 1..23: note = HLA-A targeting gRNA
  source 1..23: mol_type = other DNA
atctcagtgggctacgtggacgg

SEQ ID NO: 4400 - DNA, 23 bp, synthetic construct
  misc_feature 1..23: note = HLA-A targeting gRNA
  source 1..23: mol_type = other DNA
atctcctgcgggctctgaccagg

SEQ ID NO: 4401 - DNA, 23 bp, synthetic construct
  misc_feature 1..23: note = HLA-A targeting gRNA
  source 1..23: mol_type = other DNA
atctcctgtgggctctgaccagg

SEQ ID NO: 4402 - DNA, 23 bp, synthetic construct
  misc_feature 1..23: note = HLA-A targeting gRNA
  source 1..23: mol_type = other DNA
atctcggacccggagactcgggg

SEQ ID NO: 4403 - DNA, 23 bp, synthetic construct
  misc_feature 1..23: note = HLA-A targeting gRNA
  source 1..23: mol_type = other DNA
atctcggaccctgagactcgggg

SEQ ID NO: 4404 - DNA, 23 bp, synthetic construct
  misc_feature 1..23: note = HLA-A targeting gRNA
  source 1..23: mol_type = other DNA
atctcggacctagagactcgagg

SEQ ID NO: 4405 - DNA, 23 bp, synthetic construct
  misc_feature 1..23: note = HLA-A targeting gRNA
  source 1..23: mol_type = other DNA
atctgcggtgccctccaggtagg

SEQ ID NO: 4406 - DNA, 23 bp, synthetic construct
  misc_feature 1..23: note = HLA-A targeting gRNA
  source 1..23: mol_type = other DNA
atgaacctgcggaaactgcgcgg

SEQ ID NO: 4407 - DNA, 23 bp, synthetic construct
  misc_feature 1..23: note = HLA-A targeting gRNA
  source 1..23: mol_type = other DNA
atgacccgcatctcggcctctgg

SEQ ID NO: 4408 - DNA, 23 bp, synthetic construct
  misc_feature 1..23: note = HLA-A targeting gRNA
  source 1..23: mol_type = other DNA
atgacccgcatctcggcgtctgg

SEQ ID NO: 4409 - DNA, 23 bp, synthetic construct
  misc_feature 1..23: note = HLA-A targeting gRNA
  source 1..23: mol_type = other DNA
atgaggggcttcggtaaggaggg

SEQ ID NO: 4410 - DNA, 23 bp, synthetic construct
  misc_feature 1..23: note = HLA-A targeting gRNA
  source 1..23: mol_type = other DNA
atgaggtcaccctgaggtgctgg

SEQ ID NO: 4411 - DNA, 23 bp, synthetic construct
  misc_feature 1..23: note = HLA-A targeting gRNA
  source 1..23: mol_type = other DNA
atgatgtgagaccctggccccgg

SEQ ID NO: 4412 - DNA, 23 bp, synthetic construct
  misc_feature 1..23: note = HLA-A targeting gRNA
  source 1..23: mol_type = other DNA
atgcagggaacacttctacctgg

SEQ ID NO: 4413 - DNA, 23 bp, synthetic construct
  misc_feature 1..23: note = HLA-A targeting gRNA
  source 1..23: mol_type = other DNA
atgcccaagttggggatggtggg

SEQ ID NO: 4414 - DNA, 23 bp, synthetic construct
  misc_feature 1..23: note = HLA-A targeting gRNA
  source 1..23: mol_type = other DNA
atgcccatgatggggatggtagg

SEQ ID NO: 4415 - DNA, 23 bp, synthetic construct
  misc_feature 1..23: note = HLA-A targeting gRNA
  source 1..23: mol_type = other DNA
atgcccatgatggggatggtggg

SEQ ID NO: 4416 - DNA, 23 bp, synthetic construct
  misc_feature 1..23: note = HLA-A targeting gRNA
  source 1..23: mol_type = other DNA
atggacaggacacctggggtagg

SEQ ID NO: 4417 - DNA, 23 bp, synthetic construct
  misc_feature 1..23: note = HLA-A targeting gRNA
  source 1..23: mol_type = other DNA
atggacaggacacctggggtggg

SEQ ID NO: 4418 - DNA, 23 bp, synthetic construct
  misc_feature 1..23: note = HLA-A targeting gRNA
  source 1..23: mol_type = other DNA
atggacaggacacctggtgtggg

SEQ ID NO: 4419 - DNA, 23 bp, synthetic construct
  misc_feature 1..23: note = HLA-A targeting gRNA
  source 1..23: mol_type = other DNA
atggacgggacacctggggtggg

SEQ ID NO: 4420 - DNA, 23 bp, synthetic construct
  misc_feature 1..23: note = HLA-A targeting gRNA
  source 1..23: mol_type = other DNA
atggaggggaagacagtccctgg

SEQ ID NO: 4421 - DNA, 23 bp, synthetic construct
  misc_feature 1..23: note = HLA-A targeting gRNA
  source 1..23: mol_type = other DNA
atggagtaaggagggggatgagg

SEQ ID NO: 4422 - DNA, 23 bp, synthetic construct
  misc_feature 1..23: note = HLA-A targeting gRNA
  source 1..23: mol_type = other DNA
atggatagagcaagaggggccgg

SEQ ID NO: 4423 - DNA, 23 bp, synthetic construct
  misc_feature 1..23: note = HLA-A targeting gRNA
  source 1..23: mol_type = other DNA
atggatagagcaggaggggccgg

SEQ ID NO: 4424 - DNA, 23 bp, synthetic construct
  misc_feature 1..23: note = HLA-A targeting gRNA
  source 1..23: mol_type = other DNA
atggatagagcaggaggggctgg

SEQ ID NO: 4425 - DNA, 23 bp, synthetic construct
  misc_feature 1..23: note = HLA-A targeting gRNA
  source 1..23: mol_type = other DNA
atggatagagcaggaggtgccgg

SEQ ID NO: 4426 - DNA, 23 bp, synthetic construct
  misc_feature 1..23: note = HLA-A targeting gRNA
  source 1..23: mol_type = other DNA
atggctcccatctcagggtgagg

SEQ ID NO: 4427 - DNA, 23 bp, synthetic construct
  misc_feature 1..23: note = HLA-A targeting gRNA
  source 1..23: mol_type = other DNA
atgggaggcggcccgtgtggcgg

SEQ ID NO: 4428 - DNA, 23 bp, synthetic construct
  misc_feature 1..23: note = HLA-A targeting gRNA
  source 1..23: mol_type = other DNA
atgggcaggacacctggggtggg

SEQ ID NO: 4429 - DNA, 23 bp, synthetic construct
  misc_feature 1..23: note = HLA-A targeting gRNA
  source 1..23: mol_type = other DNA
atggggtaaggagggggatgagg

SEQ ID NO: 4430 - DNA, 23 bp, synthetic construct
  misc_feature 1..23: note = HLA-A targeting gRNA
  source 1..23: mol_type = other DNA
atggtcagagacgagatggtggg

SEQ ID NO: 4431 - DNA, 23 bp, synthetic construct
  misc_feature 1..23: note = HLA-A targeting gRNA
  source 1..23: mol_type = other DNA
atggtcagagacgggatggtggg

SEQ ID NO: 4432 - DNA, 23 bp, synthetic construct
  misc_feature 1..23: note = HLA-A targeting gRNA
  source 1..23: mol_type = other DNA
atggtcagagacggggtggtggg

SEQ ID NO: 4433 - DNA, 23 bp, synthetic construct
  misc_feature 1..23: note = HLA-A targeting gRNA
  source 1..23: mol_type = other DNA
atggtcagagagggggtggtggg

SEQ ID NO: 4434 - DNA, 23 bp, synthetic construct
  misc_feature 1..23: note = HLA-A targeting gRNA
  source 1..23: mol_type = other DNA
atggtcagagatgggatggtggg

SEQ ID NO: 4435 - DNA, 23 bp, synthetic construct
  misc_feature 1..23: note = HLA-A targeting gRNA
  source 1..23: mol_type = other DNA
atggtgtgagaacctggccccgg

SEQ ID NO: 4436 - DNA, 23 bp, synthetic construct
  misc_feature 1..23: note = HLA-A targeting gRNA
  source 1..23: mol_type = other DNA
atggtgtgagaccctggccccgg

SEQ ID NO: 4437 - DNA, 23 bp, synthetic construct
  misc_feature 1..23: note = HLA-A targeting gRNA
  source 1..23: mol_type = other DNA
atggttcccaaggctgctgcagg

SEQ ID NO: 4438 - DNA, 23 bp, synthetic construct
  misc_feature 1..23: note = HLA-A targeting gRNA
  source 1..23: mol_type = other DNA
atgtaatcccttgccgtcgtagg

SEQ ID NO: 4439 - DNA, 23 bp, synthetic construct
  misc_feature 1..23: note = HLA-A targeting gRNA
  source 1..23: mol_type = other DNA
atgtacagcatgaggggcttcgg

SEQ ID NO: 4440 - DNA, 23 bp, synthetic construct
  misc_feature 1..23: note = HLA-A targeting gRNA
  source 1..23: mol_type = other DNA
atgtatcaccgtggtggttgtgg

SEQ ID NO: 4441 - DNA, 23 bp, synthetic construct
  misc_feature 1..23: note = HLA-A targeting gRNA
  source 1..23: mol_type = other DNA
atgtatcacctcgatggttgtgg

SEQ ID NO: 4442 - DNA, 23 bp, synthetic construct
  misc_feature 1..23: note = HLA-A targeting gRNA
  source 1..23: mol_type = other DNA
atgtatcaccttaatggttgtgg

SEQ ID NO: 4443 - DNA, 23 bp, synthetic construct
  misc_feature 1..23: note = HLA-A targeting gRNA
  source 1..23: mol_type = other DNA
atgtatcaccttgatgattatgg

SEQ ID NO: 4444 - DNA, 23 bp, synthetic construct
  misc_feature 1..23: note = HLA-A targeting gRNA
  source 1..23: mol_type = other DNA
atgtatcaccttgatggttgtgg

SEQ ID NO: 4445 - DNA, 23 bp, synthetic construct
  misc_feature 1..23: note = HLA-A targeting gRNA
  source 1..23: mol_type = other DNA
atgtatcaccttggtggttgtgg

SEQ ID NO: 4446 - DNA, 23 bp, synthetic construct
  misc_feature 1..23: note = HLA-A targeting gRNA
  source 1..23: mol_type = other DNA
atgtatcgccttgatggttgtgg

SEQ ID NO: 4447 - DNA, 23 bp, synthetic construct
  misc_feature 1..23: note = HLA-A targeting gRNA
  source 1..23: mol_type = other DNA
atgtcccggacggggctctcagg

SEQ ID NO: 4448 - DNA, 23 bp, synthetic construct
  misc_feature 1..23: note = HLA-A targeting gRNA
  source 1..23: mol_type = other DNA
atgtgggacaagaggaattatgg

SEQ ID NO: 4449 - DNA, 23 bp, synthetic construct
  misc_feature 1..23: note = HLA-A targeting gRNA
  source 1..23: mol_type = other DNA
atgtgtaggaggaagagctcagg

SEQ ID NO: 4450 - DNA, 23 bp, synthetic construct
  misc_feature 1..23: note = HLA-A targeting gRNA
  source 1..23: mol_type = other DNA
atgtgtaggaggaagagttcagg

SEQ ID NO: 4451 - DNA, 23 bp, synthetic construct
  misc_feature 1..23: note = HLA-A targeting gRNA
  source 1..23: mol_type = other DNA
atgtgtaggaggaagagttctgg

SEQ ID NO: 4452 - DNA, 23 bp, synthetic construct
  misc_feature 1..23: note = HLA-A targeting gRNA
  source 1..23: mol_type = other DNA
attaaggaatgacgtctctgagg

SEQ ID NO: 4453 - DNA, 23 bp, synthetic construct
  misc_feature 1..23: note = HLA-A targeting gRNA
  source 1..23: mol_type = other DNA
attaagggatgaagtccctgagg

SEQ ID NO: 4454 - DNA, 23 bp, synthetic construct
  misc_feature 1..23: note = HLA-A targeting gRNA
  source 1..23: mol_type = other DNA
attaagggatgaagtccttgagg

SEQ ID NO: 4455 - DNA, 23 bp, synthetic construct
  misc_feature 1..23: note = HLA-A targeting gRNA
  source 1..23: mol_type = other DNA
attaagggatgaagtctctgagg

SEQ ID NO: 4456 - DNA, 23 bp, synthetic construct
  misc_feature 1..23: note = HLA-A targeting gRNA
  source 1..23: mol_type = other DNA
attaagggatgacatctctgagg

SEQ ID NO: 4457 - DNA, 23 bp, synthetic construct
  misc_feature 1..23: note = HLA-A targeting gRNA
  source 1..23: mol_type = other DNA
attaagggatgacgtctctgagg

SEQ ID NO: 4458 - DNA, 23 bp, synthetic construct
  misc_feature 1..23: note = HLA-A targeting gRNA
  source 1..23: mol_type = other DNA
attaagggatggcgtctctgagg

SEQ ID NO: 4459 - DNA, 23 bp, synthetic construct
  misc_feature 1..23: note = HLA-A targeting gRNA
  source 1..23: mol_type = other DNA
attccagcatcatgagtcagggg

SEQ ID NO: 4460 - DNA, 23 bp, synthetic construct
  misc_feature 1..23: note = HLA-A targeting gRNA
  source 1..23: mol_type = other DNA
attccagcattcatgagtcaggg

SEQ ID NO: 4461 - DNA, 23 bp, synthetic construct
  misc_feature 1..23: note = HLA-A targeting gRNA
  source 1..23: mol_type = other DNA
attccagcattcatgagtcgggg

SEQ ID NO: 4462 - DNA, 23 bp, synthetic construct
  misc_feature 1..23: note = HLA-A targeting gRNA
  source 1..23: mol_type = other DNA
attccagcattcgtgagtcaggg

SEQ ID NO: 4463 - DNA, 23 bp, synthetic construct
  misc_feature 1..23: note = HLA-A targeting gRNA
  source 1..23: mol_type = other DNA
attcgaaacgtcccaatcaaagg

SEQ ID NO: 4464 - DNA, 23 bp, synthetic construct
  misc_feature 1..23: note = HLA-A targeting gRNA
  source 1..23: mol_type = other DNA
attcgaaacgtccctatcaaagg

SEQ ID NO: 4465 - DNA, 23 bp, synthetic construct
  misc_feature 1..23: note = HLA-A targeting gRNA
  source 1..23: mol_type = other DNA
attctgggagctgaagtggtcgg

SEQ ID NO: 4466 - DNA, 23 bp, synthetic construct
  misc_feature 1..23: note = HLA-A targeting gRNA
  source 1..23: mol_type = other DNA
attgggacgtttcgaatgtgtgg

SEQ ID NO: 4467 - DNA, 23 bp, synthetic construct
  misc_feature 1..23: note = HLA-A targeting gRNA
  source 1..23: mol_type = other DNA
attgggacgtttcgagtgtgtgg

SEQ ID NO: 4468 - DNA, 23 bp, synthetic construct
  misc_feature 1..23: note = HLA-A targeting gRNA
  source 1..23: mol_type = other DNA
attgggatgttacgcgtgtgtgg

SEQ ID NO: 4469 - DNA, 23 bp, synthetic construct
  misc_feature 1..23: note = HLA-A targeting gRNA
  source 1..23: mol_type = other DNA
attgggatgtttcgcgtgtgtgg

SEQ ID NO: 4470 - DNA, 23 bp, synthetic construct
  misc_feature 1..23: note = HLA-A targeting gRNA
  source 1..23: mol_type = other DNA
attggggaggcgcagcattgggg

SEQ ID NO: 4471 - DNA, 23 bp, synthetic construct
  misc_feature 1..23: note = HLA-A targeting gRNA
  source 1..23: mol_type = other DNA
attggggaggcgcagcgttgggg

SEQ ID NO: 4472 - DNA, 23 bp, synthetic construct
  misc_feature 1..23: note = HLA-A targeting gRNA
  source 1..23: mol_type = other DNA
attggggaggcgccgcgttgggg

SEQ ID NO: 4473 - DNA, 23 bp, synthetic construct
  misc_feature 1..23: note = HLA-A targeting gRNA
  source 1..23: mol_type = other DNA
attgtcctagacagcagaggggg

SEQ ID NO: 4474 - DNA, 23 bp, synthetic construct
  misc_feature 1..23: note = HLA-A targeting gRNA
  source 1..23: mol_type = other DNA
attgtcctagagagaagaggggg

SEQ ID NO: 4475 - DNA, 23 bp, synthetic construct
  misc_feature 1..23: note = HLA-A targeting gRNA
  source 1..23: mol_type = other DNA
attgtcctagagagcagacgggg

SEQ ID NO: 4476 - DNA, 23 bp, synthetic construct
  misc_feature 1..23: note = HLA-A targeting gRNA
  source 1..23: mol_type = other DNA
attgtcctagagagcagaggggg

SEQ ID NO: 4477 - DNA, 23 bp, synthetic construct
  misc_feature 1..23: note = HLA-A targeting gRNA
  source 1..23: mol_type = other DNA
atttcagcattcatgagtcaggg

SEQ ID NO: 4478 - DNA, 23 bp, synthetic construct
  misc_feature 1..23: note = HLA-A targeting gRNA
  source 1..23: mol_type = other DNA
atttccacaccgccatgtcccgg

SEQ ID NO: 4479 - DNA, 23 bp, synthetic construct
  misc_feature 1..23: note = HLA-A targeting gRNA
  source 1..23: mol_type = other DNA
atttccacacctccgtgtcccgg

SEQ ID NO: 4480 - DNA, 23 bp, synthetic construct
  misc_feature 1..23: note = HLA-A targeting gRNA
  source 1..23: mol_type = other DNA
atttcgacaccgccacgtcccgg

SEQ ID NO: 4481 - DNA, 23 bp, synthetic construct
  misc_feature 1..23: note = HLA-A targeting gRNA
  source 1..23: mol_type = other DNA
atttcgacaccgccatgtcccgg

SEQ ID NO: 4482 - DNA, 23 bp, synthetic construct
  misc_feature 1..23: note = HLA-A targeting gRNA
  source 1..23: mol_type = other DNA
atttcgacaccgccgtgtcccgg

SEQ ID NO: 4483 - DNA, 23 bp, synthetic construct
  misc_feature 1..23: note = HLA-A targeting gRNA
  source 1..23: mol_type = other DNA
atttcgacaccgccgtgtcctgg

SEQ ID NO: 4484 - DNA, 23 bp, synthetic construct
  misc_feature 1..23: note = HLA-A targeting gRNA
  source 1..23: mol_type = other DNA
atttctacaccgccatgacccgg

SEQ ID NO: 4485 - DNA, 23 bp, synthetic construct
  misc_feature 1..23: note = HLA-A targeting gRNA
  source 1..23: mol_type = other DNA
atttctacaccgccatgtcccgg

SEQ ID NO: 4486 - DNA, 23 bp, synthetic construct
  misc_feature 1..23: note = HLA-A targeting gRNA
  source 1..23: mol_type = other DNA
atttctacaccgccgtgtcccgg

SEQ ID NO: 4487 - DNA, 23 bp, synthetic construct
  misc_feature 1..23: note = HLA-A targeting gRNA
  source 1..23: mol_type = other DNA
atttctacaccgccgtgtccggg

SEQ ID NO: 4488 - DNA, 23 bp, synthetic construct
  misc_feature 1..23: note = HLA-A targeting gRNA
  source 1..23: mol_type = other DNA
atttctacaccgctatgtcccgg

SEQ ID NO: 4489 - DNA, 23 bp, synthetic construct
  misc_feature 1..23: note = HLA-A targeting gRNA
  source 1..23: mol_type = other DNA
atttctacaccgctgtgtcccgg

SEQ ID NO: 4490 - DNA, 23 bp, synthetic construct
  misc_feature 1..23: note = HLA-A targeting gRNA
  source 1..23: mol_type = other DNA
atttctccacatccgtgtcctgg

SEQ ID NO: 4491 - DNA, 23 bp, synthetic construct
  misc_feature 1..23: note = HLA-A targeting gRNA
  source 1..23: mol_type = other DNA
atttcttcacatccgtgtcctgg

SEQ ID NO: 4492 - DNA, 23 bp, synthetic construct
  misc_feature 1..23: note = HLA-A targeting gRNA
  source 1..23: mol_type = other DNA
caaaatccccgcgggttgggcgg

SEQ ID NO: 4493 - DNA, 23 bp, synthetic construct
  misc_feature 1..23: note = HLA-A targeting gRNA
  source 1..23: mol_type = other DNA
caaaatccccgcgggttggtcgg

SEQ ID NO: 4494 - DNA, 23 bp, synthetic construct
  misc_feature 1..23: note = HLA-A targeting gRNA
  source 1..23: mol_type = other DNA
caaacccctcaccctgagatggg

SEQ ID NO: 4495 - DNA, 23 bp, synthetic construct
  misc_feature 1..23: note = HLA-A targeting gRNA
  source 1..23: mol_type = other DNA
caaactggttatgcccgcggagg

SEQ ID NO: 4496 - DNA, 23 bp, synthetic construct
  misc_feature 1..23: note = HLA-A targeting gRNA
  source 1..23: mol_type = other DNA
caaagcccctcaccctgagatgg

SEQ ID NO: 4497 - DNA, 23 bp, synthetic construct
  misc_feature 1..23: note = HLA-A targeting gRNA
  source 1..23: mol_type = other DNA
caaatgggaggcggcccgtgtgg

SEQ ID NO: 4498 - DNA, 23 bp, synthetic construct
  misc_feature 1..23: note = HLA-A targeting gRNA
  source 1..23: mol_type = other DNA
caaatgtcctgtgagggcactgg

SEQ ID NO: 4499 - DNA, 23 bp, synthetic construct
  misc_feature 1..23: note = HLA-A targeting gRNA
  source 1..23: mol_type = other DNA
caacacacagacttaccgagagg

SEQ ID NO: 4500 - DNA, 23 bp, synthetic construct
  misc_feature 1..23: note = HLA-A targeting gRNA
  source 1..23: mol_type = other DNA
caacagccaccacagctcctagg

SEQ ID NO: 4501 - DNA, 23 bp, synthetic construct
  misc_feature 1..23: note = HLA-A targeting gRNA
  source 1..23: mol_type = other DNA
caacagccaccatagctcctagg

SEQ ID NO: 4502 - DNA, 23 bp, synthetic construct
  misc_feature 1..23: note = HLA-A targeting gRNA
  source 1..23: mol_type = other DNA
caacagccatcacagctcctagg

SEQ ID NO: 4503 - DNA, 23 bp, synthetic construct
  misc_feature 1..23: note = HLA-A targeting gRNA
  source 1..23: mol_type = other DNA
caacagtcatgaacaaattctgg

SEQ ID NO: 4504 - DNA, 23 bp, synthetic construct
  misc_feature 1..23: note = HLA-A targeting gRNA
  source 1..23: mol_type = other DNA
caacgagaagaagaggaaaatgg

SEQ ID NO: 4505 - DNA, 23 bp, synthetic construct
  misc_feature 1..23: note = HLA-A targeting gRNA
  source 1..23: mol_type = other DNA
caacggagagcctacctggaggg

SEQ ID NO: 4506 - DNA, 23 bp, synthetic construct
  misc_feature 1..23: note = HLA-A targeting gRNA
  source 1..23: mol_type = other DNA
caagagcccgcaggagacgtggg

SEQ ID NO: 4507 - DNA, 23 bp, synthetic construct
  misc_feature 1..23: note = HLA-A targeting gRNA
  source 1..23: mol_type = other DNA
caagctcagtgtcctgaatttgg

SEQ ID NO: 4508 - DNA, 23 bp, synthetic construct
  misc_feature 1..23: note = HLA-A targeting gRNA
  source 1..23: mol_type = other DNA
caagctcagtgtcctgagtttgg

SEQ ID NO: 4509 - DNA, 23 bp, synthetic construct
  misc_feature 1..23: note = HLA-A targeting gRNA
  source 1..23: mol_type = other DNA
caagctcggtgtcctgagtttgg

SEQ ID NO: 4510 - DNA, 23 bp, synthetic construct
  misc_feature 1..23: note = HLA-A targeting gRNA
  source 1..23: mol_type = other DNA
caagctcggtgtcctgggtctgg

SEQ ID NO: 4511 - DNA, 23 bp, synthetic construct
  misc_feature 1..23: note = HLA-A targeting gRNA
  source 1..23: mol_type = other DNA
caagctgggtgtcctgagtttgg

SEQ ID NO: 4512 - DNA, 23 bp, synthetic construct
  misc_feature 1..23: note = HLA-A targeting gRNA
  source 1..23: mol_type = other DNA
caaggacagctaggacaaccagg

SEQ ID NO: 4513 - DNA, 23 bp, synthetic construct
  misc_feature 1..23: note = HLA-A targeting gRNA
  source 1..23: mol_type = other DNA
caaggcacagactgaccgagagg

SEQ ID NO: 4514 - DNA, 23 bp, synthetic construct
  misc_feature 1..23: note = HLA-A targeting gRNA
  source 1..23: mol_type = other DNA
caaggcacagactgaccgagtgg

SEQ ID NO: 4515 - DNA, 23 bp, synthetic construct
  misc_feature 1..23: note = HLA-A targeting gRNA
  source 1..23: mol_type = other DNA
caagggccgtgtctgcactgggg

SEQ ID NO: 4516 - DNA, 23 bp, synthetic construct
  misc_feature 1..23: note = HLA-A targeting gRNA
  source 1..23: mol_type = other DNA
caagggccgtgtctgcattgggg

SEQ ID NO: 4517 - DNA, 23 bp, synthetic construct
  misc_feature 1..23: note = HLA-A targeting gRNA
  source 1..23: mol_type = other DNA
caagtccgagaggggagccccgg

SEQ ID NO: 4518 - DNA, 23 bp, synthetic construct
  misc_feature 1..23: note = HLA-A targeting gRNA
  source 1..23: mol_type = other DNA
caagtgccatgttcagcacgagg

SEQ ID NO: 4519 - DNA, 23 bp, synthetic construct
  misc_feature 1..23: note = HLA-A targeting gRNA
  source 1..23: mol_type = other DNA
caagtgggaggcagcccgtgagg

SEQ ID NO: 4520 - DNA, 23 bp, synthetic construct
  misc_feature 1..23: note = HLA-A targeting gRNA
  source 1..23: mol_type = other DNA
caagtgggaggcggcccgggtgg

SEQ ID NO: 4521 - DNA, 23 bp, synthetic construct
  misc_feature 1..23: note = HLA-A targeting gRNA
  source 1..23: mol_type = other DNA
caagtgggaggcggcccgtacgg

SEQ ID NO: 4522 - DNA, 23 bp, synthetic construct
  misc_feature 1..23: note = HLA-A targeting gRNA
  source 1..23: mol_type = other DNA
caagtgggaggcggcccgtatgg

SEQ ID NO: 4523 - DNA, 23 bp, synthetic construct
  misc_feature 1..23: note = HLA-A targeting gRNA
  source 1..23: mol_type = other DNA
caagtgggaggcggcccgtgagg

SEQ ID NO: 4524 - DNA, 23 bp, synthetic construct
  misc_feature 1..23: note = HLA-A targeting gRNA
  source 1..23: mol_type = other DNA
caagtgggaggcggcccgtgcgg

SEQ ID NO: 4525 - DNA, 23 bp, synthetic construct
  misc_feature 1..23: note = HLA-A targeting gRNA
  source 1..23: mol_type = other DNA
caagtgggaggcggccggtgagg

SEQ ID NO: 4526 - DNA, 23 bp, synthetic construct
  misc_feature 1..23: note = HLA-A targeting gRNA
  source 1..23: mol_type = other DNA
caagtgggaggcggcctgtgagg

SEQ ID NO: 4527 - DNA, 23 bp, synthetic construct
  misc_feature 1..23: note = HLA-A targeting gRNA
  source 1..23: mol_type = other DNA
caagtgggaggcggctcgtgagg

SEQ ID NO: 4528 - DNA, 23 bp, synthetic construct
  misc_feature 1..23: note = HLA-A targeting gRNA
  source 1..23: mol_type = other DNA
caagtgtgagaccctggcccagg

SEQ ID NO: 4529 - DNA, 23 bp, synthetic construct
  misc_feature 1..23: note = HLA-A targeting gRNA
  source 1..23: mol_type = other DNA
caagtgtgagaccctggccccgg

SEQ ID NO: 4530 - DNA, 23 bp, synthetic construct
  misc_feature 1..23: note = HLA-A targeting gRNA
  source 1..23: mol_type = other DNA
caagttggaggcggcccgtgagg

SEQ ID NO: 4531 - DNA, 23 bp, synthetic construct
  misc_feature 1..23: note = HLA-A targeting gRNA
  source 1..23: mol_type = other DNA
caagttggaggcggcccgtgcgg

SEQ ID NO: 4532 - DNA, 23 bp, synthetic construct
  misc_feature 1..23: note = HLA-A targeting gRNA
  source 1..23: mol_type = other DNA
caagttggaggcggcccgtgggg

SEQ ID NO: 4533 - DNA, 23 bp, synthetic construct
  misc_feature 1..23: note = HLA-A targeting gRNA
  source 1..23: mol_type = other DNA
caagttggaggcggcccgtgtgg

SEQ ID NO: 4534 - DNA, 23 bp, synthetic construct
  misc_feature 1..23: note = HLA-A targeting gRNA
  source 1..23: mol_type = other DNA
caagttggggatggtgggctggg

SEQ ID NO: 4535 - DNA, 23 bp, synthetic construct
  misc_feature 1..23: note = HLA-A targeting gRNA
  source 1..23: mol_type = other DNA
caatagtcatgaacaaattcagg

SEQ ID NO: 4536 - DNA, 23 bp, synthetic construct
  misc_feature 1..23: note = HLA-A targeting gRNA
  source 1..23: mol_type = other DNA
caatccaccgtccccatcgtggg

SEQ ID NO: 4537 - DNA, 23 bp, synthetic construct
  misc_feature 1..23: note = HLA-A targeting gRNA
  source 1..23: mol_type = other DNA
caatgaagcggggctccccgcgg

SEQ ID NO: 4538 - DNA, 23 bp, synthetic construct
  misc_feature 1..23: note = HLA-A targeting gRNA
  source 1..23: mol_type = other DNA
caatggggaggcgcagcgttggg

SEQ ID NO: 4539 - DNA, 23 bp, synthetic construct
  misc_feature 1..23: note = HLA-A targeting gRNA
  source 1..23: mol_type = other DNA
cacacacaggccctccaggtagg

SEQ ID NO: 4540 - DNA, 23 bp, synthetic construct
  misc_feature 1..23: note = HLA-A targeting gRNA
  source 1..23: mol_type = other DNA
cacacacgtgccctccaggtagg

SEQ ID NO: 4541 - DNA, 23 bp, synthetic construct
  misc_feature 1..23: note = HLA-A targeting gRNA
  source 1..23: mol_type = other DNA
cacacagatctacaaggcccagg

SEQ ID NO: 4542 - DNA, 23 bp, synthetic construct
  misc_feature 1..23: note = HLA-A targeting gRNA
  source 1..23: mol_type = other DNA
cacacagatctgcaaggccaagg

SEQ ID NO: 4543 - DNA, 23 bp, synthetic construct
  misc_feature 1..23: note = HLA-A targeting gRNA
  source 1..23: mol_type = other DNA
cacaccatccagaggatgtacgg

SEQ ID NO: 4544 - DNA, 23 bp, synthetic construct
  misc_feature 1..23: note = HLA-A targeting gRNA
  source 1..23: mol_type = other DNA
cacaccatccagaggatgtctgg

SEQ ID NO: 4545 - DNA, 23 bp, synthetic construct
  misc_feature 1..23: note = HLA-A targeting gRNA
  source 1..23: mol_type = other DNA
cacacccgccagaggatgtacgg

SEQ ID NO: 4546 - DNA, 23 bp, synthetic construct
  misc_feature 1..23: note = HLA-A targeting gRNA
  source 1..23: mol_type = other DNA
cacaccctccagaatatgtatgg

SEQ ID NO: 4547 - DNA, 23 bp, synthetic construct
  misc_feature 1..23: note = HLA-A targeting gRNA
  source 1..23: mol_type = other DNA
cacaccctccagacgatgtacgg

SEQ ID NO: 4548 - DNA, 23 bp, synthetic construct
  misc_feature 1..23: note = HLA-A targeting gRNA
  source 1..23: mol_type = other DNA
cacaccctccagagcatgtacgg

SEQ ID NO: 4549 - DNA, 23 bp, synthetic construct
  misc_feature 1..23: note = HLA-A targeting gRNA
  source 1..23: mol_type = other DNA
cacaccctccagagcatgtatgg

SEQ ID NO: 4550 - DNA, 23 bp, synthetic construct
  misc_feature 1..23: note = HLA-A targeting gRNA
  source 1..23: mol_type = other DNA
cacaccctccagagcttgtacgg

SEQ ID NO: 4551 - DNA, 23 bp, synthetic construct
  misc_feature 1..23: note = HLA-A targeting gRNA
  source 1..23: mol_type = other DNA
cacaccctccagaggatgtacgg

SEQ ID NO: 4552 - DNA, 23 bp, synthetic construct
  misc_feature 1..23: note = HLA-A targeting gRNA
  source 1..23: mol_type = other DNA
cacaccctccagaggatgtctgg

SEQ ID NO: 4553 - DNA, 23 bp, synthetic construct
  misc_feature 1..23: note = HLA-A targeting gRNA
  source 1..23: mol_type = other DNA
cacaccctccagaggatgtttgg

SEQ ID NO: 4554 - DNA, 23 bp, synthetic construct
  misc_feature 1..23: note = HLA-A targeting gRNA
  source 1..23: mol_type = other DNA
cacaccctccagcggatgtatgg

SEQ ID NO: 4555 - DNA, 23 bp, synthetic construct
  misc_feature 1..23: note = HLA-A targeting gRNA
  source 1..23: mol_type = other DNA
cacaccctccagtggatgtacgg

SEQ ID NO: 4556 - DNA, 23 bp, synthetic construct
  misc_feature 1..23: note = HLA-A targeting gRNA
  source 1..23: mol_type = other DNA
cacaccctccagtggatgtatgg

SEQ ID NO: 4557 - DNA, 23 bp, synthetic construct
  misc_feature 1..23: note = HLA-A targeting gRNA
  source 1..23: mol_type = other DNA
cacaccctccagtggatgtgtgg

SEQ ID NO: 4558 - DNA, 23 bp, synthetic construct
  misc_feature 1..23: note = HLA-A targeting gRNA
  source 1..23: mol_type = other DNA
cacaccctccagtggatgtttgg

SEQ ID NO: 4559 - DNA, 23 bp, synthetic construct
  misc_feature 1..23: note = HLA-A targeting gRNA
  source 1..23: mol_type = other DNA
cacaccgccatgtcccggcccgg

SEQ ID NO: 4560 - DNA, 23 bp, synthetic construct
  misc_feature 1..23: note = HLA-A targeting gRNA
  source 1..23: mol_type = other DNA
cacacctccgtgtcccggcccgg

SEQ ID NO: 4561 - DNA, 23 bp, synthetic construct
  misc_feature 1..23: note = HLA-A targeting gRNA
  source 1..23: mol_type = other DNA
cacacctccgtgtcccggcctgg

SEQ ID NO: 4562 - DNA, 23 bp, synthetic construct
  misc_feature 1..23: note = HLA-A targeting gRNA
  source 1..23: mol_type = other DNA
cacaccttccagaggatgtatgg

SEQ ID NO: 4563 - DNA, 23 bp, synthetic construct
  misc_feature 1..23: note = HLA-A targeting gRNA
  source 1..23: mol_type = other DNA
cacacgggccgcctcccacttgg

SEQ ID NO: 4564 - DNA, 23 bp, synthetic construct
  misc_feature 1..23: note = HLA-A targeting gRNA
  source 1..23: mol_type = other DNA
cacactctccagagcatgtacgg

SEQ ID NO: 4565 - DNA, 23 bp, synthetic construct
  misc_feature 1..23: note = HLA-A targeting gRNA
  source 1..23: mol_type = other DNA
cacacttggcagacgatgtacgg

SEQ ID NO: 4566 - DNA, 23 bp, synthetic construct
  misc_feature 1..23: note = HLA-A targeting gRNA
  source 1..23: mol_type = other DNA
cacacttggcagacgatgtatgg

SEQ ID NO: 4567 - DNA, 23 bp, synthetic construct
  misc_feature 1..23: note = HLA-A targeting gRNA
  source 1..23: mol_type = other DNA
cacacttggcagaggatgtatgg

SEQ ID NO: 4568 - DNA, 23 bp, synthetic construct
  misc_feature 1..23: note = HLA-A targeting gRNA
  source 1..23: mol_type = other DNA
cacagctgtccacttctggaagg

SEQ ID NO: 4569 - DNA, 23 bp, synthetic construct
  misc_feature 1..23: note = HLA-A targeting gRNA
  source 1..23: mol_type = other DNA
cacaggagacgtgggacaggagg

SEQ ID NO: 4570 - DNA, 23 bp, synthetic construct
  misc_feature 1..23: note = HLA-A targeting gRNA
  source 1..23: mol_type = other DNA
cacaggagatgtgggacaagagg

SEQ ID NO: 4571 - DNA, 23 bp, synthetic construct
  misc_feature 1..23: note = HLA-A targeting gRNA
  source 1..23: mol_type = other DNA
cacaggcccaggtctcggtcagg

SEQ ID NO: 4572 - DNA, 23 bp, synthetic construct
  misc_feature 1..23: note = HLA-A targeting gRNA
  source 1..23: mol_type = other DNA
cacaggggctaacacagcctggg

SEQ ID NO: 4573 - DNA, 23 bp, synthetic construct
  misc_feature 1..23: note = HLA-A targeting gRNA
  source 1..23: mol_type = other DNA
cacaggggctaacgcagactggg

SEQ ID NO: 4574 - DNA, 23 bp, synthetic construct
  misc_feature 1..23: note = HLA-A targeting gRNA
  source 1..23: mol_type = other DNA
cacaggggctaacgcagcctggg

SEQ ID NO: 4575 - DNA, 23 bp, synthetic construct
  misc_feature 1..23: note = HLA-A targeting gRNA
  source 1..23: mol_type = other DNA
cacaggggctaatgcagcctggg

SEQ ID NO: 4576 - DNA, 23 bp, synthetic construct
  misc_feature 1..23: note = HLA-A targeting gRNA
  source 1..23: mol_type = other DNA
cacagggtcccaggctgggatgg

SEQ ID NO: 4577 - DNA, 23 bp, synthetic construct
  misc_feature 1..23: note = HLA-A targeting gRNA
  source 1..23: mol_type = other DNA
cacatcatccagaggatgtaagg

SEQ ID NO: 4578 - DNA, 23 bp, synthetic construct
  misc_feature 1..23: note = HLA-A targeting gRNA
  source 1..23: mol_type = other DNA
cacatcatccagaggatgtacgg

SEQ ID NO: 4579 - DNA, 23 bp, synthetic construct
  misc_feature 1..23: note = HLA-A targeting gRNA
  source 1..23: mol_type = other DNA
cacatcatccagaggatgtatgg

SEQ ID NO: 4580 - DNA, 23 bp, synthetic construct
  misc_feature 1..23: note = HLA-A targeting gRNA
  source 1..23: mol_type = other DNA
cacatcatccaggtgatgtatgg

SEQ ID NO: 4581 - DNA, 23 bp, synthetic construct
  misc_feature 1..23: note = HLA-A targeting gRNA
  source 1..23: mol_type = other DNA
cacatcatccggaggatgtatgg

SEQ ID NO: 4582 - DNA, 23 bp, synthetic construct
  misc_feature 1..23: note = HLA-A targeting gRNA
  source 1..23: mol_type = other DNA
cacatcctccagaggatgtatgg

SEQ ID NO: 4583 - DNA, 23 bp, synthetic construct
  misc_feature 1..23: note = HLA-A targeting gRNA
  source 1..23: mol_type = other DNA
cacatgccaggtacagcatgagg

SEQ ID NO: 4584 - DNA, 23 bp, synthetic construct
  misc_feature 1..23: note = HLA-A targeting gRNA
  source 1..23: mol_type = other DNA
cacatgccatgtacagcatgagg

SEQ ID NO: 4585 - DNA, 23 bp, synthetic construct
  misc_feature 1..23: note = HLA-A targeting gRNA
  source 1..23: mol_type = other DNA
cacatgggccatcccagcctggg

SEQ ID NO: 4586 - DNA, 23 bp, synthetic construct
  misc_feature 1..23: note = HLA-A targeting gRNA
  source 1..23: mol_type = other DNA
caccagcccaggtctcggtcagg

SEQ ID NO: 4587 - DNA, 23 bp, synthetic construct
  misc_feature 1..23: note = HLA-A targeting gRNA
  source 1..23: mol_type = other DNA
caccagcggacgcaggcacctgg

SEQ ID NO: 4588 - DNA, 23 bp, synthetic construct
  misc_feature 1..23: note = HLA-A targeting gRNA
  source 1..23: mol_type = other DNA
caccagcggatgcaggcacctgg

SEQ ID NO: 4589 - DNA, 23 bp, synthetic construct
  misc_feature 1..23: note = HLA-A targeting gRNA
  source 1..23: mol_type = other DNA
cacccaatgggagtgggaaatgg

SEQ ID NO: 4590 - DNA, 23 bp, synthetic construct
  misc_feature 1..23: note = HLA-A targeting gRNA
  source 1..23: mol_type = other DNA
cacccaatgggagtgggaagtgg

SEQ ID NO: 4591 - DNA, 23 bp, synthetic construct
  misc_feature 1..23: note = HLA-A targeting gRNA
  source 1..23: mol_type = other DNA
cacccaatgggagtgggaattgg

SEQ ID NO: 4592 - DNA, 23 bp, synthetic construct
  misc_feature 1..23: note = HLA-A targeting gRNA
  source 1..23: mol_type = other DNA
cacccagcacaagttggaggcgg

SEQ ID NO: 4593 - DNA, 23 bp, synthetic construct
  misc_feature 1..23: note = HLA-A targeting gRNA
  source 1..23: mol_type = other DNA
cacccagcccaagtgggaggcgg

SEQ ID NO: 4594 - DNA, 23 bp, synthetic construct
  misc_feature 1..23: note = HLA-A targeting gRNA
  source 1..23: mol_type = other DNA
cacccagcccaagttggaggcgg

SEQ ID NO: 4595 - DNA, 23 bp, synthetic construct
  misc_feature 1..23: note = HLA-A targeting gRNA
  source 1..23: mol_type = other DNA
cacccagcgcaaatgggaggcgg

SEQ ID NO: 4596 - DNA, 23 bp, synthetic construct
  misc_feature 1..23: note = HLA-A targeting gRNA
  source 1..23: mol_type = other DNA
cacccagcgcaagttggaggcgg

SEQ ID NO: 4597 - DNA, 23 bp, synthetic construct
  misc_feature 1..23: note = HLA-A targeting gRNA
  source 1..23: mol_type = other DNA
cacccagcgtaagtgggaggcgg

SEQ ID NO: 4598 - DNA, 23 bp, synthetic construct
  misc_feature 1..23: note = HLA-A targeting gRNA
  source 1..23: mol_type = other DNA
cacccagctcaagtgggaggcgg

SEQ ID NO: 4599 - DNA, 23 bp, synthetic construct
  misc_feature 1..23: note = HLA-A targeting gRNA
  source 1..23: mol_type = other DNA
cacccgacacccaatgggagtgg

SEQ ID NO: 4600 - DNA, 23 bp, synthetic construct
  misc_feature 1..23: note = HLA-A targeting gRNA
  source 1..23: mol_type = other DNA
cacccgcccaggtctcggtcagg

SEQ ID NO: 4601 - DNA, 23 bp, synthetic construct
  misc_feature 1..23: note = HLA-A targeting gRNA
  source 1..23: mol_type = other DNA
caccctgagatggagtaaggagg

SEQ ID NO: 4602 - DNA, 23 bp, synthetic construct
  misc_feature 1..23: note = HLA-A targeting gRNA
  source 1..23: mol_type = other DNA
caccctgagctggggtaaggagg

SEQ ID NO: 4603 - DNA, 23 bp, synthetic construct
  misc_feature 1..23: note = HLA-A targeting gRNA
  source 1..23: mol_type = other DNA
caccctgaggtgctgggccatgg

SEQ ID NO: 4604 - DNA, 23 bp, synthetic construct
  misc_feature 1..23: note = HLA-A targeting gRNA
  source 1..23: mol_type = other DNA
caccgcagatacctgtggagtgg

SEQ ID NO: 4605 - DNA, 23 bp, synthetic construct
  misc_feature 1..23: note = HLA-A targeting gRNA
  source 1..23: mol_type = other DNA
caccggcccaggtctcgatcagg

SEQ ID NO: 4606 - DNA, 23 bp, synthetic construct
  misc_feature 1..23: note = HLA-A targeting gRNA
  source 1..23: mol_type = other DNA
caccggcccaggtctcggtcagg

SEQ ID NO: 4607 - DNA, 23 bp, synthetic construct
  misc_feature 1..23: note = HLA-A targeting gRNA
  source 1..23: mol_type = other DNA
caccggtccaggtctcgatcagg

SEQ ID NO: 4608 - DNA, 23 bp, synthetic construct
  misc_feature 1..23: note = HLA-A targeting gRNA
  source 1..23: mol_type = other DNA
caccgtagctgtggtcgctgtgg

SEQ ID NO: 4609 - DNA, 23 bp, synthetic construct
  misc_feature 1..23: note = HLA-A targeting gRNA
  source 1..23: mol_type = other DNA
caccgtggtggttgtggtgttgg

SEQ ID NO: 4610 - DNA, 23 bp, synthetic construct
  misc_feature 1..23: note = HLA-A targeting gRNA
  source 1..23: mol_type = other DNA
cacctcatggagtgggagcctgg

SEQ ID NO: 4611 - DNA, 23 bp, synthetic construct
  misc_feature 1..23: note = HLA-A targeting gRNA
  source 1..23: mol_type = other DNA
cacctcccggcgcggctccccgg

SEQ ID NO: 4612 - DNA, 23 bp, synthetic construct
  misc_feature 1..23: note = HLA-A targeting gRNA
  source 1..23: mol_type = other DNA
cacctccctgcgccgctccccgg

SEQ ID NO: 4613 - DNA, 23 bp, synthetic construct
  misc_feature 1..23: note = HLA-A targeting gRNA
  source 1..23: mol_type = other DNA
cacctccctgcgcggctccccgg

SEQ ID NO: 4614 - DNA, 23 bp, synthetic construct
  misc_feature 1..23: note = HLA-A targeting gRNA
  source 1..23: mol_type = other DNA
cacctcgatggttgtggtgttgg

SEQ ID NO: 4615 - DNA, 23 bp, synthetic construct
  misc_feature 1..23: note = HLA-A targeting gRNA
  source 1..23: mol_type = other DNA
cacctcgttcctctccgcagagg

SEQ ID NO: 4616 - DNA, 23 bp, synthetic construct
  misc_feature 1..23: note = HLA-A targeting gRNA
  source 1..23: mol_type = other DNA
cacctgggccatcccagcctggg

SEQ ID NO: 4617 - DNA, 23 bp, synthetic construct
  misc_feature 1..23: note = HLA-A targeting gRNA
  source 1..23: mol_type = other DNA
caccttaatggttgtggtgttgg

SEQ ID NO: 4618 - DNA, 23 bp, synthetic construct
  misc_feature 1..23: note = HLA-A targeting gRNA
  source 1..23: mol_type = other DNA
caccttcccctcctttcccaggg

SEQ ID NO: 4619 - DNA, 23 bp, synthetic construct
  misc_feature 1..23: note = HLA-A targeting gRNA
  source 1..23: mol_type = other DNA
caccttgatattatggtgttggg

SEQ ID NO: 4620 - DNA, 23 bp, synthetic construct
  misc_feature 1..23: note = HLA-A targeting gRNA
  source 1..23: mol_type = other DNA
caccttgatgattatggtgttgg

SEQ ID NO: 4621 - DNA, 23 bp, synthetic construct
  misc_feature 1..23: note = HLA-A targeting gRNA
  source 1..23: mol_type = other DNA
caccttgatggttgtggtgttgg

SEQ ID NO: 4622 - DNA, 23 bp, synthetic construct
  misc_feature 1..23: note = HLA-A targeting gRNA
  source 1..23: mol_type = other DNA
caccttggtggttgtggcgttgg

SEQ ID NO: 4623 - DNA, 23 bp, synthetic construct
  misc_feature 1..23: note = HLA-A targeting gRNA
  source 1..23: mol_type = other DNA
caccttggtggttgtggtgttgg

SEQ ID NO: 4624 - DNA, 23 bp, synthetic construct
  misc_feature 1..23: note = HLA-A targeting gRNA
  source 1..23: mol_type = other DNA
cacgaacgtgccctccaggtagg

SEQ ID NO: 4625 - DNA, 23 bp, synthetic construct
  misc_feature 1..23: note = HLA-A targeting gRNA
  source 1..23: mol_type = other DNA
cacgagaagaagaggaaaatggg

SEQ ID NO: 4626 - DNA, 23 bp, synthetic construct
  misc_feature 1..23: note = HLA-A targeting gRNA
  source 1..23: mol_type = other DNA
cacgagaagaggaggaaaatggg

SEQ ID NO: 4627 - DNA, 23 bp, synthetic construct
  misc_feature 1..23: note = HLA-A targeting gRNA
  source 1..23: mol_type = other DNA
cacgaggaagggaggaaaatggg

SEQ ID NO: 4628 - DNA, 23 bp, synthetic construct
  misc_feature 1..23: note = HLA-A targeting gRNA
  source 1..23: mol_type = other DNA
cacgaggaggggaggaaaatggg

SEQ ID NO: 4629 - DNA, 23 bp, synthetic construct
  misc_feature 1..23: note = HLA-A targeting gRNA
  source 1..23: mol_type = other DNA
cacgatggggacagtggactggg

SEQ ID NO: 4630 - DNA, 23 bp, synthetic construct
  misc_feature 1..23: note = HLA-A targeting gRNA
  source 1..23: mol_type = other DNA
cacgatggggacggtggactggg

SEQ ID NO: 4631 - DNA, 23 bp, synthetic construct
  misc_feature 1..23: note = HLA-A targeting gRNA
  source 1..23: mol_type = other DNA
cacgatggggacggtggattggg

SEQ ID NO: 4632 - DNA, 23 bp, synthetic construct
  misc_feature 1..23: note = HLA-A targeting gRNA
  source 1..23: mol_type = other DNA
cacgatggggatggtggactggg

SEQ ID NO: 4633 - DNA, 23 bp, synthetic construct
  misc_feature 1..23: note = HLA-A targeting gRNA
  source 1..23: mol_type = other DNA
cacgcacagaccctccaggtagg

SEQ ID NO: 4634 - DNA, 23 bp, synthetic construct
  misc_feature 1..23: note = HLA-A targeting gRNA
  source 1..23: mol_type = other DNA
cacgcacaggccctcccggtagg

SEQ ID NO: 4635 - DNA, 23 bp, synthetic construct
  misc_feature 1..23: note = HLA-A targeting gRNA
  source 1..23: mol_type = other DNA
cacgcacgtgcccaccaggtagg

SEQ ID NO: 4636 - DNA, 23 bp, synthetic construct
  misc_feature 1..23: note = HLA-A targeting gRNA
  source 1..23: mol_type = other DNA
cacgcacgtgccctccaggtggg

SEQ ID NO: 4637 - DNA, 23 bp, synthetic construct
  misc_feature 1..23: note = HLA-A targeting gRNA
  source 1..23: mol_type = other DNA
cacgcacgtgtcctccaggtagg

SEQ ID NO: 4638 - DNA, 23 bp, synthetic construct
  misc_feature 1..23: note = HLA-A targeting gRNA
  source 1..23: mol_type = other DNA
cacgcacgttccctccaggtagg

SEQ ID NO: 4639 - DNA, 23 bp, synthetic construct
  misc_feature 1..23: note = HLA-A targeting gRNA
  source 1..23: mol_type = other DNA
cacgcactcgccctccaggcagg

SEQ ID NO: 4640 - DNA, 23 bp, synthetic construct
  misc_feature 1..23: note = HLA-A targeting gRNA
  source 1..23: mol_type = other DNA
cacgcacttgccctccaggtagg

SEQ ID NO: 4641 - DNA, 23 bp, synthetic construct
  misc_feature 1..23: note = HLA-A targeting gRNA
  source 1..23: mol_type = other DNA
cacgcgcgtgccctccaggtagg

SEQ ID NO: 4642 - DNA, 23 bp, synthetic construct
  misc_feature 1..23: note = HLA-A targeting gRNA
  source 1..23: mol_type = other DNA
cacgcgggtaccaggggcagtgg

SEQ ID NO: 4643 - DNA, 23 bp, synthetic construct
  misc_feature 1..23: note = HLA-A targeting gRNA
  source 1..23: mol_type = other DNA
cacgtacgtgccctccaggtagg

SEQ ID NO: 4644 - DNA, 23 bp, synthetic construct
  misc_feature 1..23: note = HLA-A targeting gRNA
  source 1..23: mol_type = other DNA
cacgtcccggcccggccgcgggg

SEQ ID NO: 4645 - DNA, 23 bp, synthetic construct
  misc_feature 1..23: note = HLA-A targeting gRNA
  source 1..23: mol_type = other DNA
cacgtgccatatgcagcacgagg

SEQ ID NO: 4646 - DNA, 23 bp, synthetic construct
  misc_feature 1..23: note = HLA-A targeting gRNA
  source 1..23: mol_type = other DNA
cacgtgccatgtgcagcacgagg

SEQ ID NO: 4647 - DNA, 23 bp, synthetic construct
  misc_feature 1..23: note = HLA-A targeting gRNA
  source 1..23: mol_type = other DNA
cacgtgccatgtgcagcatgagg

SEQ ID NO: 4648 - DNA, 23 bp, synthetic construct
  misc_feature 1..23: note = HLA-A targeting gRNA
  source 1..23: mol_type = other DNA
cacgtgccatgttcagcacgagg

SEQ ID NO: 4649 - DNA, 23 bp, synthetic construct
  misc_feature 1..23: note = HLA-A targeting gRNA
  source 1..23: mol_type = other DNA
cacgtgggccatcccagcctggg

SEQ ID NO: 4650 - DNA, 23 bp, synthetic construct
  misc_feature 1..23: note = HLA-A targeting gRNA
  source 1..23: mol_type = other DNA
cactacaaccagagcgaggccgg

SEQ ID NO: 4651 - DNA, 23 bp, synthetic construct
  misc_feature 1..23: note = HLA-A targeting gRNA
  source 1..23: mol_type = other DNA
cactcacgtgccctccaggtagg

SEQ ID NO: 4652 - DNA, 23 bp, synthetic construct
  misc_feature 1..23: note = HLA-A targeting gRNA
  source 1..23: mol_type = other DNA
cactcagcgcaagttggaggcgg

SEQ ID NO: 4653 - DNA, 23 bp, synthetic construct
  misc_feature 1..23: note = HLA-A targeting gRNA
  source 1..23: mol_type = other DNA
cactcggtcagtctgtgcctggg

SEQ ID NO: 4654 - DNA, 23 bp, synthetic construct
  misc_feature 1..23: note = HLA-A targeting gRNA
  source 1..23: mol_type = other DNA
cactcggtcagtctgtgccttgg

SEQ ID NO: 4655 - DNA, 23 bp, synthetic construct
  misc_feature 1..23: note = HLA-A targeting gRNA
  source 1..23: mol_type = other DNA
cactgacctggcagtgggatggg

SEQ ID NO: 4656 - DNA, 23 bp, synthetic construct
  misc_feature 1..23: note = HLA-A targeting gRNA
  source 1..23: mol_type = other DNA
cactgatctggcagtgggatggg

SEQ ID NO: 4657 - DNA, 23 bp, synthetic construct
  misc_feature 1..23: note = HLA-A targeting gRNA
  source 1..23: mol_type = other DNA
cactggagggtgtgagaccctgg

SEQ ID NO: 4658 - DNA, 23 bp, synthetic construct
  misc_feature 1..23: note = HLA-A targeting gRNA
  source 1..23: mol_type = other DNA
cactgggagtttcaagccccagg

SEQ ID NO: 4659 - DNA, 23 bp, synthetic construct
  misc_feature 1..23: note = HLA-A targeting gRNA
  source 1..23: mol_type = other DNA
cactggggaggcgccgcgttggg

SEQ ID NO: 4660 - DNA, 23 bp, synthetic construct
  misc_feature 1..23: note = HLA-A targeting gRNA
  source 1..23: mol_type = other DNA
cactgggggtttcaagccccagg

SEQ ID NO: 4661 - DNA, 23 bp, synthetic construct
  misc_feature 1..23: note = HLA-A targeting gRNA
  source 1..23: mol_type = other DNA
cacttctcccaacctgcgtcggg

SEQ ID NO: 4662 - DNA, 23 bp, synthetic construct
  misc_feature 1..23: note = HLA-A targeting gRNA
  source 1..23: mol_type = other DNA
cacttcttctcccaacttgtggg

SEQ ID NO: 4663 - DNA, 23 bp, synthetic construct
  misc_feature 1..23: note = HLA-A targeting gRNA
  source 1..23: mol_type = other DNA
cacttgtaaaggtgagattctgg

SEQ ID NO: 4664 - DNA, 23 bp, synthetic construct
  misc_feature 1..23: note = HLA-A targeting gRNA
  source 1..23: mol_type = other DNA
cactttacctccactcagatcgg

SEQ ID NO: 4665 - DNA, 23 bp, synthetic construct
  misc_feature 1..23: note = HLA-A targeting gRNA
  source 1..23: mol_type = other DNA
cagaaacgatgcccaagttgggg

SEQ ID NO: 4666 - DNA, 23 bp, synthetic construct
  misc_feature 1..23: note = HLA-A targeting gRNA
  source 1..23: mol_type = other DNA
cagacacctgaagaatgggaagg

SEQ ID NO: 4667 - DNA, 23 bp, synthetic construct
  misc_feature 1..23: note = HLA-A targeting gRNA
  source 1..23: mol_type = other DNA
cagacacctggagaacaggaagg

SEQ ID NO: 4668 - DNA, 23 bp, synthetic construct
  misc_feature 1..23: note = HLA-A targeting gRNA
  source 1..23: mol_type = other DNA
cagacactttgcatctctcttgg

SEQ ID NO: 4669 - DNA, 23 bp, synthetic construct
  misc_feature 1..23: note = HLA-A targeting gRNA
  source 1..23: mol_type = other DNA
cagacgccagcctggacacaggg

SEQ ID NO: 4670 - DNA, 23 bp, synthetic construct
  misc_feature 1..23: note = HLA-A targeting gRNA
  source 1..23: mol_type = other DNA
cagagcccctcaccctgagatgg

SEQ ID NO: 4671 - DNA, 23 bp, synthetic construct
  misc_feature 1..23: note = HLA-A targeting gRNA
  source 1..23: mol_type = other DNA
cagagtaagtgctagcacacagg

SEQ ID NO: 4672 - DNA, 23 bp, synthetic construct
  misc_feature 1..23: note = HLA-A targeting gRNA
  source 1..23: mol_type = other DNA
cagagtaagtgctggcacacagg

SEQ ID NO: 4673 - DNA, 23 bp, synthetic construct
  misc_feature 1..23: note = HLA-A targeting gRNA
  source 1..23: mol_type = other DNA
cagatacctgaagaaagggaagg

SEQ ID NO: 4674 - DNA, 23 bp, synthetic construct
  misc_feature 1..23: note = HLA-A targeting gRNA
  source 1..23: mol_type = other DNA
cagatacctgaagaatgggaagg

SEQ ID NO: 4675 - DNA, 23 bp, synthetic construct
  misc_feature 1..23: note = HLA-A targeting gRNA
  source 1..23: mol_type = other DNA
cagatacctggagaaagggaagg

SEQ ID NO: 4676 - DNA, 23 bp, synthetic construct
  misc_feature 1..23: note = HLA-A targeting gRNA
  source 1..23: mol_type = other DNA
cagatacctggagaaccggaagg

SEQ ID NO: 4677 - DNA, 23 bp, synthetic construct
  misc_feature 1..23: note = HLA-A targeting gRNA
  source 1..23: mol_type = other DNA
cagatacctggagaatgggaagg

SEQ ID NO: 4678 - DNA, 23 bp, synthetic construct
  misc_feature 1..23: note = HLA-A targeting gRNA
  source 1..23: mol_type = other DNA
cagatatctggagaacgggaagg

SEQ ID NO: 4679 - DNA, 23 bp, synthetic construct
  misc_feature 1..23: note = HLA-A targeting gRNA
  source 1..23: mol_type = other DNA
cagatcagtgtgatctccgcagg

SEQ ID NO: 4680 - DNA, 23 bp, synthetic construct
  misc_feature 1..23: note = HLA-A targeting gRNA
  source 1..23: mol_type = other DNA
cagcaacaatgcccacgatgggg

SEQ ID NO: 4681 - DNA, 23 bp, synthetic construct
  misc_feature 1..23: note = HLA-A targeting gRNA
  source 1..23: mol_type = other DNA
cagcaacgatgcccacgatgggg

SEQ ID NO: 4682 - DNA, 23 bp, synthetic construct
  misc_feature 1..23: note = HLA-A targeting gRNA
  source 1..23: mol_type = other DNA
cagcaacgatgcccatgatgggg

SEQ ID NO: 4683 - DNA, 23 bp, synthetic construct
  misc_feature 1..23: note = HLA-A targeting gRNA
  source 1..23: mol_type = other DNA
cagcagcgaccacagctcctagg

SEQ ID NO: 4684 - DNA, 23 bp, synthetic construct
  misc_feature 1..23: note = HLA-A targeting gRNA
  source 1..23: mol_type = other DNA
cagcatcatgagtcaggggaagg

SEQ ID NO: 4685 - DNA, 23 bp, synthetic construct
  misc_feature 1..23: note = HLA-A targeting gRNA
  source 1..23: mol_type = other DNA
cagcatgaggggcttcggtaagg

SEQ ID NO: 4686 - DNA, 23 bp, synthetic construct
  misc_feature 1..23: note = HLA-A targeting gRNA
  source 1..23: mol_type = other DNA
cagcccaccatccccaacttggg

SEQ ID NO: 4687 - DNA, 23 bp, synthetic construct
  misc_feature 1..23: note = HLA-A targeting gRNA
  source 1..23: mol_type = other DNA
cagcccaccatccccatcatggg

SEQ ID NO: 4688 - DNA, 23 bp, synthetic construct
  misc_feature 1..23: note = HLA-A targeting gRNA
  source 1..23: mol_type = other DNA
cagcccggacgcaggcacctggg

SEQ ID NO: 4689 - DNA, 23 bp, synthetic construct
  misc_feature 1..23: note = HLA-A targeting gRNA
  source 1..23: mol_type = other DNA
cagcctaccatccccatcatggg

SEQ ID NO: 4690 - DNA, 23 bp, synthetic construct
  misc_feature 1..23: note = HLA-A targeting gRNA
  source 1..23: mol_type = other DNA
cagcctggacacagggacctggg

SEQ ID NO: 4691 - DNA, 23 bp, synthetic construct
  misc_feature 1..23: note = HLA-A targeting gRNA
  source 1..23: mol_type = other DNA
cagcctggacgcaggcacctggg

SEQ ID NO: 4692 - DNA, 23 bp, synthetic construct
  misc_feature 1..23: note = HLA-A targeting gRNA
  source 1..23: mol_type = other DNA
cagcgacgccgcgagtccgaggg

SEQ ID NO: 4693 - DNA, 23 bp, synthetic construct
  misc_feature 1..23: note = HLA-A targeting gRNA
  source 1..23: mol_type = other DNA
cagcgcaagtgggaggcggccgg

SEQ ID NO: 4694 - DNA, 23 bp, synthetic construct
  misc_feature 1..23: note = HLA-A targeting gRNA
  source 1..23: mol_type = other DNA
cagcggagaacctacctggaggg

SEQ ID NO: 4695 - DNA, 23 bp, synthetic construct
  misc_feature 1..23: note = HLA-A targeting gRNA
  source 1..23: mol_type = other DNA
cagcggagagcctacctggaggg

SEQ ID NO: 4696 - DNA, 23 bp, synthetic construct
  misc_feature 1..23: note = HLA-A targeting gRNA
  source 1..23: mol_type = other DNA
cagctaagagcctacctggaggg

SEQ ID NO: 4697 - DNA, 23 bp, synthetic construct
  misc_feature 1..23: note = HLA-A targeting gRNA
  source 1..23: mol_type = other DNA
cagctactacaaccagagcgagg

SEQ ID NO: 4698 - DNA, 23 bp, synthetic construct
  misc_feature 1..23: note = HLA-A targeting gRNA
  source 1..23: mol_type = other DNA
cagctgagaacctacctggaggg

SEQ ID NO: 4699 - DNA, 23 bp, synthetic construct
  misc_feature 1..23: note = HLA-A targeting gRNA
  source 1..23: mol_type = other DNA
cagctgagagcctaccgggaggg

SEQ ID NO: 4700 - DNA, 23 bp, synthetic construct
  misc_feature 1..23: note = HLA-A targeting gRNA
  source 1..23: mol_type = other DNA
cagctgagagcctacctggtggg

SEQ ID NO: 4701 - DNA, 23 bp, synthetic construct
  misc_feature 1..23: note = HLA-A targeting gRNA
  source 1..23: mol_type = other DNA
cagctgagagcctgcctggaggg

SEQ ID NO: 4702 - DNA, 23 bp, synthetic construct
  misc_feature 1..23: note = HLA-A targeting gRNA
  source 1..23: mol_type = other DNA
caggaagaaggacccgacgcagg

SEQ ID NO: 4703 - DNA, 23 bp, synthetic construct
  misc_feature 1..23: note = HLA-A targeting gRNA
  source 1..23: mol_type = other DNA
caggaagaaggacccgtcgcagg

SEQ ID NO: 4704 - DNA, 23 bp, synthetic construct
  misc_feature 1..23: note = HLA-A targeting gRNA
  source 1..23: mol_type = other DNA
caggacacctggggtagggaagg

SEQ ID NO: 4705 - DNA, 23 bp, synthetic construct
  misc_feature 1..23: note = HLA-A targeting gRNA
  source 1..23: mol_type = other DNA
caggacacctggggtggggaagg

SEQ ID NO: 4706 - DNA, 23 bp, synthetic construct
  misc_feature 1..23: note = HLA-A targeting gRNA
  source 1..23: mol_type = other DNA
caggacacctggtgtggggaagg

SEQ ID NO: 4707 - DNA, 23 bp, synthetic construct
  misc_feature 1..23: note = HLA-A targeting gRNA
  source 1..23: mol_type = other DNA
caggacagagcctacctggaggg

SEQ ID NO: 4708 - DNA, 23 bp, synthetic construct
  misc_feature 1..23: note = HLA-A targeting gRNA
  source 1..23: mol_type = other DNA
caggacccgggaagccgcgcagg

SEQ ID NO: 4709 - DNA, 23 bp, synthetic construct
  misc_feature 1..23: note = HLA-A targeting gRNA
  source 1..23: mol_type = other DNA
caggacccggggagccgcgcagg

SEQ ID NO: 4710 - DNA, 23 bp, synthetic construct
  misc_feature 1..23: note = HLA-A targeting gRNA
  source 1..23: mol_type = other DNA
caggacccggggagccgcgccgg

SEQ ID NO: 4711 - DNA, 23 bp, synthetic construct
  misc_feature 1..23: note = HLA-A targeting gRNA
  source 1..23: mol_type = other DNA
caggacccggggagcggcgcagg

SEQ ID NO: 4712 - DNA, 23 bp, synthetic construct
  misc_feature 1..23: note = HLA-A targeting gRNA
  source 1..23: mol_type = other DNA
caggacctgaggagccgcgccgg

SEQ ID NO: 4713 - DNA, 23 bp, synthetic construct
  misc_feature 1..23: note = HLA-A targeting gRNA
  source 1..23: mol_type = other DNA
caggacgaagtcccaggccccgg

SEQ ID NO: 4714 - DNA, 23 bp, synthetic construct
  misc_feature 1..23: note = HLA-A targeting gRNA
  source 1..23: mol_type = other DNA
caggacgaagtcccaggtcccgg

SEQ ID NO: 4715 - DNA, 23 bp, synthetic construct
  misc_feature 1..23: note = HLA-A targeting gRNA
  source 1..23: mol_type = other DNA
caggacgaagtcccatgtcccgg

SEQ ID NO: 4716 - DNA, 23 bp, synthetic construct
  misc_feature 1..23: note = HLA-A targeting gRNA
  source 1..23: mol_type = other DNA
caggccgggacacggaggtgtgg

SEQ ID NO: 4717 - DNA, 23 bp, synthetic construct
  misc_feature 1..23: note = HLA-A targeting gRNA
  source 1..23: mol_type = other DNA
caggcgctttgcatctctcatgg

SEQ ID NO: 4718 - DNA, 23 bp, synthetic construct
  misc_feature 1..23: note = HLA-A targeting gRNA
  source 1..23: mol_type = other DNA
caggcgctttgcatctttcatgg

SEQ ID NO: 4719 - DNA, 23 bp, synthetic construct
  misc_feature 1..23: note = HLA-A targeting gRNA
  source 1..23: mol_type = other DNA
caggcgggggcgcaggacccggg

SEQ ID NO: 4720 - DNA, 23 bp, synthetic construct
  misc_feature 1..23: note = HLA-A targeting gRNA
  source 1..23: mol_type = other DNA
caggcgggggctcaggacccggg

SEQ ID NO: 4721 - DNA, 23 bp, synthetic construct
  misc_feature 1..23: note = HLA-A targeting gRNA
  source 1..23: mol_type = other DNA
caggctgcgtgtaagtgatgggg

SEQ ID NO: 4722 - DNA, 23 bp, synthetic construct
  misc_feature 1..23: note = HLA-A targeting gRNA
  source 1..23: mol_type = other DNA
caggctgcgtgtaagtggtgggg

SEQ ID NO: 4723 - DNA, 23 bp, synthetic construct
  misc_feature 1..23: note = HLA-A targeting gRNA
  source 1..23: mol_type = other DNA
cagggcaggatcaggaaacacgg

SEQ ID NO: 4724 - DNA, 23 bp, synthetic construct
  misc_feature 1..23: note = HLA-A targeting gRNA
  source 1..23: mol_type = other DNA
cagggcaggatcaggaaacatgg

SEQ ID NO: 4725 - DNA, 23 bp, synthetic construct
  misc_feature 1..23: note = HLA-A targeting gRNA
  source 1..23: mol_type = other DNA
cagggcggggcggggctcggggg

SEQ ID NO: 4726 - DNA, 23 bp, synthetic construct
  misc_feature 1..23: note = HLA-A targeting gRNA
  source 1..23: mol_type = other DNA
cagggggcggatctcggacccgg

SEQ ID NO: 4727 - DNA, 23 bp, synthetic construct
  misc_feature 1..23: note = HLA-A targeting gRNA
  source 1..23: mol_type = other DNA
caggggggtggtggggcagaggg

SEQ ID NO: 4728 - DNA, 23 bp, synthetic construct
  misc_feature 1..23: note = HLA-A targeting gRNA
  source 1..23: mol_type = other DNA
cagggtctcacaccatccagagg

SEQ ID NO: 4729 - DNA, 23 bp, synthetic construct
  misc_feature 1..23: note = HLA-A targeting gRNA
  source 1..23: mol_type = other DNA
cagggtctcacacccgccagagg

SEQ ID NO: 4730 - DNA, 23 bp, synthetic construct
  misc_feature 1..23: note = HLA-A targeting gRNA
  source 1..23: mol_type = other DNA
cagggtctcacaccctccagagg

SEQ ID NO: 4731 - DNA, 23 bp, synthetic construct
  misc_feature 1..23: note = HLA-A targeting gRNA
  source 1..23: mol_type = other DNA
cagggtctcacaccctccagcgg

SEQ ID NO: 4732 - DNA, 23 bp, synthetic construct
  misc_feature 1..23: note = HLA-A targeting gRNA
  source 1..23: mol_type = other DNA
cagggtctcacaccctccagtgg

SEQ ID NO: 4733 - DNA, 23 bp, synthetic construct
  misc_feature 1..23: note = HLA-A targeting gRNA
  source 1..23: mol_type = other DNA
cagggtctcacaccttccagagg

SEQ ID NO: 4734 - DNA, 23 bp, synthetic construct
  misc_feature 1..23: note = HLA-A targeting gRNA
  source 1..23: mol_type = other DNA
cagggtctcacacttggcagagg

SEQ ID NO: 4735 - DNA, 23 bp, synthetic construct
  misc_feature 1..23: note = HLA-A targeting gRNA
  source 1..23: mol_type = other DNA
cagggtctcacatcatccagagg

SEQ ID NO: 4736 - DNA, 23 bp, synthetic construct
  misc_feature 1..23: note = HLA-A targeting gRNA
  source 1..23: mol_type = other DNA
cagggtctcacatcatccggagg

SEQ ID NO: 4737 - DNA, 23 bp, synthetic construct
  misc_feature 1..23: note = HLA-A targeting gRNA
  source 1..23: mol_type = other DNA
cagggtctcacatcctccagagg

SEQ ID NO: 4738 - DNA, 23 bp, synthetic construct
  misc_feature 1..23: note = HLA-A targeting gRNA
  source 1..23: mol_type = other DNA
cagggtctcataccctccagagg

SEQ ID NO: 4739 - DNA, 23 bp, synthetic construct
  misc_feature 1..23: note = HLA-A targeting gRNA
  source 1..23: mol_type = other DNA
caggtaggctctcagctgctcgg

SEQ ID NO: 4740 - DNA, 23 bp, synthetic construct
  misc_feature 1..23: note = HLA-A targeting gRNA
  source 1..23: mol_type = other DNA
caggtcagggctgaggcttgggg

SEQ ID NO: 4741 - DNA, 23 bp, synthetic construct
  misc_feature 1..23: note = HLA-A targeting gRNA
  source 1..23: mol_type = other DNA
caggtcagtgtgatctccccagg

SEQ ID NO: 4742 - DNA, 23 bp, synthetic construct
  misc_feature 1..23: note = HLA-A targeting gRNA
  source 1..23: mol_type = other DNA
caggtcagtgtgatctccgtagg

SEQ ID NO: 4743 - DNA, 23 bp, synthetic construct
  misc_feature 1..23: note = HLA-A targeting gRNA
  source 1..23: mol_type = other DNA
caggtgtcccgtccattctcagg

SEQ ID NO: 4744 - DNA, 23 bp, synthetic construct
  misc_feature 1..23: note = HLA-A targeting gRNA
  source 1..23: mol_type = other DNA
caggtgtcctgcccattctcagg

SEQ ID NO: 4745 - DNA, 23 bp, synthetic construct
  misc_feature 1..23: note = HLA-A targeting gRNA
  source 1..23: mol_type = other DNA
caggtgtcctgtccattctcagg

SEQ ID NO: 4746 - DNA, 23 bp, synthetic construct
  misc_feature 1..23: note = HLA-A targeting gRNA
  source 1..23: mol_type = other DNA
caggtgtcctgtccgttctcagg

SEQ ID NO: 4747 - DNA, 23 bp, synthetic construct
  misc_feature 1..23: note = HLA-A targeting gRNA
  source 1..23: mol_type = other DNA
cagtccaccatccccatcgtggg

SEQ ID NO: 4748 - DNA, 23 bp, synthetic construct
  misc_feature 1..23: note = HLA-A targeting gRNA
  source 1..23: mol_type = other DNA
cagtccaccgtccccatcgtggg

SEQ ID NO: 4749 - DNA, 23 bp, synthetic construct
  misc_feature 1..23: note = HLA-A targeting gRNA
  source 1..23: mol_type = other DNA
cagtccactgtccccatcgtggg

SEQ ID NO: 4750 - DNA, 23 bp, synthetic construct
  misc_feature 1..23: note = HLA-A targeting gRNA
  source 1..23: mol_type = other DNA
cagtccctagaatactgatcagg

SEQ ID NO: 4751 - DNA, 23 bp, synthetic construct
  misc_feature 1..23: note = HLA-A targeting gRNA
  source 1..23: mol_type = other DNA
cagtccctaggatagtgatcagg

SEQ ID NO: 4752 - DNA, 23 bp, synthetic construct
  misc_feature 1..23: note = HLA-A targeting gRNA
  source 1..23: mol_type = other DNA
cagtccctataatactgatcagg

SEQ ID NO: 4753 - DNA, 23 bp, synthetic construct
  misc_feature 1..23: note = HLA-A targeting gRNA
  source 1..23: mol_type = other DNA
cagtccctggaatactgatcagg

SEQ ID NO: 4754 - DNA, 23 bp, synthetic construct
  misc_feature 1..23: note = HLA-A targeting gRNA
  source 1..23: mol_type = other DNA
cagtgagtgaccccggcccgggg

SEQ ID NO: 4755 - DNA, 23 bp, synthetic construct
  misc_feature 1..23: note = HLA-A targeting gRNA
  source 1..23: mol_type = other DNA
cagtgcagagcctacctggaggg

SEQ ID NO: 4756 - DNA, 23 bp, synthetic construct
  misc_feature 1..23: note = HLA-A targeting gRNA
  source 1..23: mol_type = other DNA
cagtggacacaagggtgggctgg

SEQ ID NO: 4757 - DNA, 23 bp, synthetic construct
  misc_feature 1..23: note = HLA-A targeting gRNA
  source 1..23: mol_type = other DNA
cagtggacacgggggtgggctgg

SEQ ID NO: 4758 - DNA, 23 bp, synthetic construct
  misc_feature 1..23: note = HLA-A targeting gRNA
  source 1..23: mol_type = other DNA
cagtggagagcccacctggaggg

SEQ ID NO: 4759 - DNA, 23 bp, synthetic construct
  misc_feature 1..23: note = HLA-A targeting gRNA
  source 1..23: mol_type = other DNA
cagtggagagtctacctggaggg

SEQ ID NO: 4760 - DNA, 23 bp, synthetic construct
  misc_feature 1..23: note = HLA-A targeting gRNA
  source 1..23: mol_type = other DNA
cagtggccctgaccgagacctgg

SEQ ID NO: 4761 - DNA, 23 bp, synthetic construct
  misc_feature 1..23: note = HLA-A targeting gRNA
  source 1..23: mol_type = other DNA
cagtggtcaaagtggtcaaaggg

SEQ ID NO: 4762 - DNA, 23 bp, synthetic construct
  misc_feature 1..23: note = HLA-A targeting gRNA
  source 1..23: mol_type = other DNA
cagtggtcgaagtggtcaaaggg

SEQ ID NO: 4763 - DNA, 23 bp, synthetic construct
  misc_feature 1..23: note = HLA-A targeting gRNA
  source 1..23: mol_type = other DNA
cagttcgcctacgacggcaaggg

SEQ ID NO: 4764 - DNA, 23 bp, synthetic construct
  misc_feature 1..23: note = HLA-A targeting gRNA
  source 1..23: mol_type = other DNA
cataaccaggacgcctacgacgg

SEQ ID NO: 4765 - DNA, 23 bp, synthetic construct
  misc_feature 1..23: note = HLA-A targeting gRNA
  source 1..23: mol_type = other DNA
cataaccagtacgcctacgacgg

SEQ ID NO: 4766 - DNA, 23 bp, synthetic construct
  misc_feature 1..23: note = HLA-A targeting gRNA
  source 1..23: mol_type = other DNA
cataaccagtactcctacgacgg

SEQ ID NO: 4767 - DNA, 23 bp, synthetic construct
  misc_feature 1..23: note = HLA-A targeting gRNA
  source 1..23: mol_type = other DNA
cataaccagttagcctacgacgg

SEQ ID NO: 4768 - DNA, 23 bp, synthetic construct
  misc_feature 1..23: note = HLA-A targeting gRNA
  source 1..23: mol_type = other DNA
cataaccagttcgcctacgacgg

SEQ ID NO: 4769 - DNA, 23 bp, synthetic construct
  misc_feature 1..23: note = HLA-A targeting gRNA
  source 1..23: mol_type = other DNA
cataaccagtttgcctacgacgg

SEQ ID NO: 4770 - DNA, 23 bp, synthetic construct
  misc_feature 1..23: note = HLA-A targeting gRNA
  source 1..23: mol_type = other DNA
catacccgcggaggaggcgccgg

SEQ ID NO: 4771 - DNA, 23 bp, synthetic construct
  misc_feature 1..23: note = HLA-A targeting gRNA
  source 1..23: mol_type = other DNA
cataccctccagaggatgtacgg

SEQ ID NO: 4772 - DNA, 23 bp, synthetic construct
  misc_feature 1..23: note = HLA-A targeting gRNA
  source 1..23: mol_type = other DNA
catactgctcatacccgcggagg

SEQ ID NO: 4773 - DNA, 23 bp, synthetic construct
  misc_feature 1..23: note = HLA-A targeting gRNA
  source 1..23: mol_type = other DNA
catagcccacggtgatgaagcgg

SEQ ID NO: 4774 - DNA, 23 bp, synthetic construct
  misc_feature 1..23: note = HLA-A targeting gRNA
  source 1..23: mol_type = other DNA
catccagcgcaagtgggaggcgg

SEQ ID NO: 4775 - DNA, 23 bp, synthetic construct
  misc_feature 1..23: note = HLA-A targeting gRNA
  source 1..23: mol_type = other DNA
catctcagggtgaggggctccgg

SEQ ID NO: 4776 - DNA, 23 bp, synthetic construct
  misc_feature 1..23: note = HLA-A targeting gRNA
  source 1..23: mol_type = other DNA
catctcagggtgaggggctctgg

SEQ ID NO: 4777 - DNA, 23 bp, synthetic construct
  misc_feature 1..23: note = HLA-A targeting gRNA
  source 1..23: mol_type = other DNA
catctcagggtgaggggcttcgg

SEQ ID NO: 4778 - DNA, 23 bp, synthetic construct
  misc_feature 1..23: note = HLA-A targeting gRNA
  source 1..23: mol_type = other DNA
catctcagggtgaggggctttgg

SEQ ID NO: 4779 - DNA, 23 bp, synthetic construct
  misc_feature 1..23: note = HLA-A targeting gRNA
  source 1..23: mol_type = other DNA
catctctcataggacaccctagg

SEQ ID NO: 4780 - DNA, 23 bp, synthetic construct
  misc_feature 1..23: note = HLA-A targeting gRNA
  source 1..23: mol_type = other DNA
catctctcatggcacaccctagg

SEQ ID NO: 4781 - DNA, 23 bp, synthetic construct
  misc_feature 1..23: note = HLA-A targeting gRNA
  source 1..23: mol_type = other DNA
catctctcatgggacaccctagg

SEQ ID NO: 4782 - DNA, 23 bp, synthetic construct
  misc_feature 1..23: note = HLA-A targeting gRNA
  source 1..23: mol_type = other DNA
catctttcatgggacaccctagg

SEQ ID NO: 4783 - DNA, 23 bp, synthetic construct
  misc_feature 1..23: note = HLA-A targeting gRNA
  source 1..23: mol_type = other DNA
catgaccagtacgcctacgacgg

SEQ ID NO: 4784 - DNA, 23 bp, synthetic construct
  misc_feature 1..23: note = HLA-A targeting gRNA
  source 1..23: mol_type = other DNA
catgaccagtccgcctacgacgg

SEQ ID NO: 4785 - DNA, 23 bp, synthetic construct
  misc_feature 1..23: note = HLA-A targeting gRNA
  source 1..23: mol_type = other DNA
catgaccagtccgcctaggacgg

SEQ ID NO: 4786 - DNA, 23 bp, synthetic construct
  misc_feature 1..23: note = HLA-A targeting gRNA
  source 1..23: mol_type = other DNA
catgaccagtccgcctgcgacgg

SEQ ID NO: 4787 - DNA, 23 bp, synthetic construct
  misc_feature 1..23: note = HLA-A targeting gRNA
  source 1..23: mol_type = other DNA
catgaccagttagcctacgacgg

SEQ ID NO: 4788 - DNA, 23 bp, synthetic construct
  misc_feature 1..23: note = HLA-A targeting gRNA
  source 1..23: mol_type = other DNA
catgaccagttcgcctacgacgg

SEQ ID NO: 4789 - DNA, 23 bp, synthetic construct
  misc_feature 1..23: note = HLA-A targeting gRNA
  source 1..23: mol_type = other DNA
catgacccggcccggccgcgggg

SEQ ID NO: 4790 - DNA, 23 bp, synthetic construct
  misc_feature 1..23: note = HLA-A targeting gRNA
  source 1..23: mol_type = other DNA
catgaggggcttcggtaaggagg

SEQ ID NO: 4791 - DNA, 23 bp, synthetic construct
  misc_feature 1..23: note = HLA-A targeting gRNA
  source 1..23: mol_type = other DNA
catgatggggatggtaggctggg

SEQ ID NO: 4792 - DNA, 23 bp, synthetic construct
  misc_feature 1..23: note = HLA-A targeting gRNA
  source 1..23: mol_type = other DNA
catgatggggatggtgggctggg

SEQ ID NO: 4793 - DNA, 23 bp, synthetic construct
  misc_feature 1..23: note = HLA-A targeting gRNA
  source 1..23: mol_type = other DNA
catgcacgtgccctccaggtagg

SEQ ID NO: 4794 - DNA, 23 bp, synthetic construct
  misc_feature 1..23: note = HLA-A targeting gRNA
  source 1..23: mol_type = other DNA
catgccaggtacagcatgagggg

SEQ ID NO: 4795 - DNA, 23 bp, synthetic construct
  misc_feature 1..23: note = HLA-A targeting gRNA
  source 1..23: mol_type = other DNA
catgccatgtacagcatgagggg

SEQ ID NO: 4796 - DNA, 23 bp, synthetic construct
  misc_feature 1..23: note = HLA-A targeting gRNA
  source 1..23: mol_type = other DNA
catgctgcttcccagtaatgagg

SEQ ID NO: 4797 - DNA, 23 bp, synthetic construct
  misc_feature 1..23: note = HLA-A targeting gRNA
  source 1..23: mol_type = other DNA
catggcccagcacctcagggtgg

SEQ ID NO: 4798 - DNA, 23 bp, synthetic construct
  misc_feature 1..23: note = HLA-A targeting gRNA
  source 1..23: mol_type = other DNA
catgggcatcgttgctggcctgg

SEQ ID NO: 4799 - DNA, 23 bp, synthetic construct
  misc_feature 1..23: note = HLA-A targeting gRNA
  source 1..23: mol_type = other DNA
catggtcagagacgagatggtgg

SEQ ID NO: 4800 - DNA, 23 bp, synthetic construct
  misc_feature 1..23: note = HLA-A targeting gRNA
  source 1..23: mol_type = other DNA
catggtcagagacgggatggtgg

SEQ ID NO: 4801 - DNA, 23 bp, synthetic construct
  misc_feature 1..23: note = HLA-A targeting gRNA
  source 1..23: mol_type = other DNA
catggtcagagacggggtggtgg

SEQ ID NO: 4802 - DNA, 23 bp, synthetic construct
  misc_feature 1..23: note = HLA-A targeting gRNA
  source 1..23: mol_type = other DNA
catggtcagagagggggtggtgg

SEQ ID NO: 4803 - DNA, 23 bp, synthetic construct
  misc_feature 1..23: note = HLA-A targeting gRNA
  source 1..23: mol_type = other DNA
catggtcagagatgggatggtgg

SEQ ID NO: 4804 - DNA, 23 bp, synthetic construct
  misc_feature 1..23: note = HLA-A targeting gRNA
  source 1..23: mol_type = other DNA
catgtcccggcccggccgtgggg

SEQ ID NO: 4805 - DNA, 23 bp, synthetic construct
  misc_feature 1..23: note = HLA-A targeting gRNA
  source 1..23: mol_type = other DNA
catgtcccggcccggctgcgggg

SEQ ID NO: 4806 - DNA, 23 bp, synthetic construct
  misc_feature 1..23: note = HLA-A targeting gRNA
  source 1..23: mol_type = other DNA
catgtcccggcctggccgcgggg

SEQ ID NO: 4807 - DNA, 23 bp, synthetic construct
  misc_feature 1..23: note = HLA-A targeting gRNA
  source 1..23: mol_type = other DNA
catgtgaccagcctgagaatggg

SEQ ID NO: 4808 - DNA, 23 bp, synthetic construct
  misc_feature 1..23: note = HLA-A targeting gRNA
  source 1..23: mol_type = other DNA
cattctcaggatagtcacatggg

SEQ ID NO: 4809 - DNA, 23 bp, synthetic construct
  misc_feature 1..23: note = HLA-A targeting gRNA
  source 1..23: mol_type = other DNA
cattctcaggatggtcacatggg

SEQ ID NO: 4810 - DNA, 23 bp, synthetic construct
  misc_feature 1..23: note = HLA-A targeting gRNA
  source 1..23: mol_type = other DNA
cattctcaggctggtcacatggg

SEQ ID NO: 4811 - DNA, 23 bp, synthetic construct
  misc_feature 1..23: note = HLA-A targeting gRNA
  source 1..23: mol_type = other DNA
cattggggaggcgcagcattggg

SEQ ID NO: 4812 - DNA, 23 bp, synthetic construct
  misc_feature 1..23: note = HLA-A targeting gRNA
  source 1..23: mol_type = other DNA
cattggggaggcgcagcgttggg

SEQ ID NO: 4813 - DNA, 23 bp, synthetic construct
  misc_feature 1..23: note = HLA-A targeting gRNA
  source 1..23: mol_type = other DNA
cattggggaggcgccgcgttggg

SEQ ID NO: 4814 - DNA, 23 bp, synthetic construct
  misc_feature 1..23: note = HLA-A targeting gRNA
  source 1..23: mol_type = other DNA
cattttcctcccctcctcgtggg

SEQ ID NO: 4815 - DNA, 23 bp, synthetic construct
  misc_feature 1..23: note = HLA-A targeting gRNA
  source 1..23: mol_type = other DNA
cattttcctcccttcctcgtggg

SEQ ID NO: 4816 - DNA, 23 bp, synthetic construct
  misc_feature 1..23: note = HLA-A targeting gRNA
  source 1..23: mol_type = other DNA
cattttcctcctcttctcgtggg

SEQ ID NO: 4817 - DNA, 23 bp, synthetic construct
  misc_feature 1..23: note = HLA-A targeting gRNA
  source 1..23: mol_type = other DNA
cattttcctcttcttctcgtggg

SEQ ID NO: 4818 - DNA, 23 bp, synthetic construct
  misc_feature 1..23: note = HLA-A targeting gRNA
  source 1..23: mol_type = other DNA
cattttcctcttcttctcgttgg

SEQ ID NO: 4819 - DNA, 23 bp, synthetic construct
  misc_feature 1..23: note = HLA-A targeting gRNA
  source 1..23: mol_type = other DNA
ccaaacaccagcctggacgcagg

SEQ ID NO: 4820 - DNA, 23 bp, synthetic construct
  misc_feature 1..23: note = HLA-A targeting gRNA
  source 1..23: mol_type = other DNA
ccaaacccctcaccctgagatgg

SEQ ID NO: 4821 - DNA, 23 bp, synthetic construct
  misc_feature 1..23: note = HLA-A targeting gRNA
  source 1..23: mol_type = other DNA
ccaaccccgacgtacggcccggg

SEQ ID NO: 4822 - DNA, 23 bp, synthetic construct
  misc_feature 1..23: note = HLA-A targeting gRNA
  source 1..23: mol_type = other DNA
ccaagggccgtgtctgcactggg

SEQ ID NO: 4823 - DNA, 23 bp, synthetic construct
  misc_feature 1..23: note = HLA-A targeting gRNA
  source 1..23: mol_type = other DNA
ccaagggccgtgtctgcattggg

SEQ ID NO: 4824 - DNA, 23 bp, synthetic construct
  misc_feature 1..23: note = HLA-A targeting gRNA
  source 1..23: mol_type = other DNA
ccaagttggggatggtgggctgg

SEQ ID NO: 4825 - DNA, 23 bp, synthetic construct
  misc_feature 1..23: note = HLA-A targeting gRNA
  source 1..23: mol_type = other DNA
ccaatccaccgtccccatcgtgg

SEQ ID NO: 4826 - DNA, 23 bp, synthetic construct
  misc_feature 1..23: note = HLA-A targeting gRNA
  source 1..23: mol_type = other DNA
ccaatgggagtgggaattggggg

SEQ ID NO: 4827 - DNA, 23 bp, synthetic construct
  misc_feature 1..23: note = HLA-A targeting gRNA
  source 1..23: mol_type = other DNA
ccacaactgctaggacagccagg

SEQ ID NO: 4828 - DNA, 23 bp, synthetic construct
  misc_feature 1..23: note = HLA-A targeting gRNA
  source 1..23: mol_type = other DNA
ccacagctacggtgaccacaagg

SEQ ID NO: 4829 - DNA, 23 bp, synthetic construct
  misc_feature 1..23: note = HLA-A targeting gRNA
  source 1..23: mol_type = other DNA
ccacagctccaaggacagctagg

SEQ ID NO: 4830 - DNA, 23 bp, synthetic construct
  misc_feature 1..23: note = HLA-A targeting gRNA
  source 1..23: mol_type = other DNA
ccacagctcctaggacagctagg

SEQ ID NO: 4831 - DNA, 23 bp, synthetic construct
  misc_feature 1..23: note = HLA-A targeting gRNA
  source 1..23: mol_type = other DNA
ccaccacagctgtccacttctgg

SEQ ID NO: 4832 - DNA, 23 bp, synthetic construct
  misc_feature 1..23: note = HLA-A targeting gRNA
  source 1..23: mol_type = other DNA
ccaccccctctctgaccatgagg

SEQ ID NO: 4833 - DNA, 23 bp, synthetic construct
  misc_feature 1..23: note = HLA-A targeting gRNA
  source 1..23: mol_type = other DNA
ccaccccgtctctgaccatgagg

SEQ ID NO: 4834 - DNA, 23 bp, synthetic construct
  misc_feature 1..23: note = HLA-A targeting gRNA
  source 1..23: mol_type = other DNA
ccacctggagggcacgtgcgtgg

SEQ ID NO: 4835 - DNA, 23 bp, synthetic construct
  misc_feature 1..23: note = HLA-A targeting gRNA
  source 1..23: mol_type = other DNA
ccacgagaagaagaggaaaatgg

SEQ ID NO: 4836 - DNA, 23 bp, synthetic construct
  misc_feature 1..23: note = HLA-A targeting gRNA
  source 1..23: mol_type = other DNA
ccacgagaagaggaggaaaatgg

SEQ ID NO: 4837 - DNA, 23 bp, synthetic construct
  misc_feature 1..23: note = HLA-A targeting gRNA
  source 1..23: mol_type = other DNA
ccacgaggaagggaggaaaatgg

SEQ ID NO: 4838 - DNA, 23 bp, synthetic construct
  misc_feature 1..23: note = HLA-A targeting gRNA
  source 1..23: mol_type = other DNA
ccacgaggaggggaggaaaatgg

SEQ ID NO: 4839 - DNA, 23 bp, synthetic construct
  misc_feature 1..23: note = HLA-A targeting gRNA
  source 1..23: mol_type = other DNA
ccacgatggggacagtggactgg

SEQ ID NO: 4840 - DNA, 23 bp, synthetic construct
  misc_feature 1..23: note = HLA-A targeting gRNA
  source 1..23: mol_type = other DNA
ccacgatggggacggtggactgg

SEQ ID NO: 4841 - DNA, 23 bp, synthetic construct
  misc_feature 1..23: note = HLA-A targeting gRNA
  source 1..23: mol_type = other DNA
ccacgatggggacggtggattgg

SEQ ID NO: 4842 - DNA, 23 bp, synthetic construct
  misc_feature 1..23: note = HLA-A targeting gRNA
  source 1..23: mol_type = other DNA
ccacgatggggatggtggactgg

SEQ ID NO: 4843 - DNA, 23 bp, synthetic construct
  misc_feature 1..23: note = HLA-A targeting gRNA
  source 1..23: mol_type = other DNA
ccacgcacgtgccctccaggtgg

SEQ ID NO: 4844 - DNA, 23 bp, synthetic construct
  misc_feature 1..23: note = HLA-A targeting gRNA
  source 1..23: mol_type = other DNA
ccacgccgcgagtccgaggacgg

SEQ ID NO: 4845 - DNA, 23 bp, synthetic construct
  misc_feature 1..23: note = HLA-A targeting gRNA
  source 1..23: mol_type = other DNA
ccacggaggaggcgcccgtccgg

SEQ ID NO: 4846 - DNA, 23 bp, synthetic construct
  misc_feature 1..23: note = HLA-A targeting gRNA
  source 1..23: mol_type = other DNA
ccacgtcccggcccggccgcggg

SEQ ID NO: 4847 - DNA, 23 bp, synthetic construct
  misc_feature 1..23: note = HLA-A targeting gRNA
  source 1..23: mol_type = other DNA
ccactgcagcagctgtggtcagg

SEQ ID NO: 4848 - DNA, 23 bp, synthetic construct
  misc_feature 1..23: note = HLA-A targeting gRNA
  source 1..23: mol_type = other DNA
ccactgccccccagagcagcagg

SEQ ID NO: 4849 - DNA, 23 bp, synthetic construct
  misc_feature 1..23: note = HLA-A targeting gRNA
  source 1..23: mol_type = other DNA
ccactgccccctagagcagcagg

SEQ ID NO: 4850 - DNA, 23 bp, synthetic construct
  misc_feature 1..23: note = HLA-A targeting gRNA
  source 1..23: mol_type = other DNA
ccactgcggcagctgtggtcagg

SEQ ID NO: 4851 - DNA, 23 bp, synthetic construct
  misc_feature 1..23: note = HLA-A targeting gRNA
  source 1..23: mol_type = other DNA
ccactggggtttcaagccccagg

SEQ ID NO: 4852 - DNA, 23 bp, synthetic construct
  misc_feature 1..23: note = HLA-A targeting gRNA
  source 1..23: mol_type = other DNA
ccagaaacgatgcccaagttggg

SEQ ID NO: 4853 - DNA, 23 bp, synthetic construct
  misc_feature 1..23: note = HLA-A targeting gRNA
  source 1..23: mol_type = other DNA
ccagaagtggacagctgtggtgg

SEQ ID NO: 4854 - DNA, 23 bp, synthetic construct
  misc_feature 1..23: note = HLA-A targeting gRNA
  source 1..23: mol_type = other DNA
ccagaagtgggcagctgtgatgg

SEQ ID NO: 4855 - DNA, 23 bp, synthetic construct
  misc_feature 1..23: note = HLA-A targeting gRNA
  source 1..23: mol_type = other DNA
ccagacaccagcccggacgcagg

SEQ ID NO: 4856 - DNA, 23 bp, synthetic construct
  misc_feature 1..23: note = HLA-A targeting gRNA
  source 1..23: mol_type = other DNA
ccagacaccagcctggacgcagg

SEQ ID NO: 4857 - DNA, 23 bp, synthetic construct
  misc_feature 1..23: note = HLA-A targeting gRNA
  source 1..23: mol_type = other DNA
ccagacgccagcctggacacagg

SEQ ID NO: 4858 - DNA, 23 bp, synthetic construct
  misc_feature 1..23: note = HLA-A targeting gRNA
  source 1..23: mol_type = other DNA
ccagcaacaatgcccacgatggg

SEQ ID NO: 4859 - DNA, 23 bp, synthetic construct
  misc_feature 1..23: note = HLA-A targeting gRNA
  source 1..23: mol_type = other DNA
ccagcaacgatgcccacgatggg

SEQ ID NO: 4860 - DNA, 23 bp, synthetic construct
  misc_feature 1..23: note = HLA-A targeting gRNA
  source 1..23: mol_type = other DNA
ccagcaacgatgcccatgatggg

SEQ ID NO: 4861 - DNA, 23 bp, synthetic construct
  misc_feature 1..23: note = HLA-A targeting gRNA
  source 1..23: mol_type = other DNA
ccagccagcaacagtgcccaggg

SEQ ID NO: 4862 - DNA, 23 bp, synthetic construct
  misc_feature 1..23: note = HLA-A targeting gRNA
  source 1..23: mol_type = other DNA
ccagccagcgacagtgcccaggg

SEQ ID NO: 4863 - DNA, 23 bp, synthetic construct
  misc_feature 1..23: note = HLA-A targeting gRNA
  source 1..23: mol_type = other DNA
ccagcccaccatccccaacttgg

SEQ ID NO: 4864 - DNA, 23 bp, synthetic construct
  misc_feature 1..23: note = HLA-A targeting gRNA
  source 1..23: mol_type = other DNA
ccagcccaccatccccatcatgg

SEQ ID NO: 4865 - DNA, 23 bp, synthetic construct
  misc_feature 1..23: note = HLA-A targeting gRNA
  source 1..23: mol_type = other DNA
ccagccccgaccaacccgcgggg

SEQ ID NO: 4866 - DNA, 23 bp, synthetic construct
  misc_feature 1..23: note = HLA-A targeting gRNA
  source 1..23: mol_type = other DNA
ccagcccggacgcaggcacctgg

SEQ ID NO: 4867 - DNA, 23 bp, synthetic construct
  misc_feature 1..23: note = HLA-A targeting gRNA
  source 1..23: mol_type = other DNA
ccagccgtacatcctctggaggg

SEQ ID NO: 4868 - DNA, 23 bp, synthetic construct
  misc_feature 1..23: note = HLA-A targeting gRNA
  source 1..23: mol_type = other DNA
ccagcctaccatccccatcatgg

SEQ ID NO: 4869 - DNA, 23 bp, synthetic construct
  misc_feature 1..23: note = HLA-A targeting gRNA
  source 1..23: mol_type = other DNA
ccagcctggacacagggacctgg

SEQ ID NO: 4870 - DNA, 23 bp, synthetic construct
  misc_feature 1..23: note = HLA-A targeting gRNA
  source 1..23: mol_type = other DNA
ccagcctggacgcaggcacctgg

SEQ ID NO: 4871 - DNA, 23 bp, synthetic construct
  misc_feature 1..23: note = HLA-A targeting gRNA
  source 1..23: mol_type = other DNA
ccaggacagccaggacagccagg

SEQ ID NO: 4872 - DNA, 23 bp, synthetic construct
  misc_feature 1..23: note = HLA-A targeting gRNA
  source 1..23: mol_type = other DNA
ccaggacagccaggacagctggg

SEQ ID NO: 4873 - DNA, 23 bp, synthetic construct
  misc_feature 1..23: note = HLA-A targeting gRNA
  source 1..23: mol_type = other DNA
ccaggacgcctacgacggcaagg

SEQ ID NO: 4874 - DNA, 23 bp, synthetic construct
  misc_feature 1..23: note = HLA-A targeting gRNA
  source 1..23: mol_type = other DNA
ccaggactcccgagagcagcagg

SEQ ID NO: 4875 - DNA, 23 bp, synthetic construct
  misc_feature 1..23: note = HLA-A targeting gRNA
  source 1..23: mol_type = other DNA
ccaggcacagactgaccgagagg

SEQ ID NO: 4876 - DNA, 23 bp, synthetic construct
  misc_feature 1..23: note = HLA-A targeting gRNA
  source 1..23: mol_type = other DNA
ccaggcagcaacagtgcccaggg

SEQ ID NO: 4877 - DNA, 23 bp, synthetic construct
  misc_feature 1..23: note = HLA-A targeting gRNA
  source 1..23: mol_type = other DNA
ccaggcagcgacagtgcccaggg

SEQ ID NO: 4878 - DNA, 23 bp, synthetic construct
  misc_feature 1..23: note = HLA-A targeting gRNA
  source 1..23: mol_type = other DNA
ccaggcctcccgagagcagcagg

SEQ ID NO: 4879 - DNA, 23 bp, synthetic construct
  misc_feature 1..23: note = HLA-A targeting gRNA
  source 1..23: mol_type = other DNA
ccagggccccccagagcagcagg

SEQ ID NO: 4880 - DNA, 23 bp, synthetic construct
  misc_feature 1..23: note = HLA-A targeting gRNA
  source 1..23: mol_type = other DNA
ccagggccgccgagagcagcagg

SEQ ID NO: 4881 - DNA, 23 bp, synthetic construct
  misc_feature 1..23: note = HLA-A targeting gRNA
  source 1..23: mol_type = other DNA
ccagggccgtgtctgcattgggg

SEQ ID NO: 4882 - DNA, 23 bp, synthetic construct
  misc_feature 1..23: note = HLA-A targeting gRNA
  source 1..23: mol_type = other DNA
ccagggctcccgagagcagcagg

SEQ ID NO: 4883 - DNA, 23 bp, synthetic construct
  misc_feature 1..23: note = HLA-A targeting gRNA
  source 1..23: mol_type = other DNA
ccaggtcagggctgaggcttggg

SEQ ID NO: 4884 - DNA, 23 bp, synthetic construct
  misc_feature 1..23: note = HLA-A targeting gRNA
  source 1..23: mol_type = other DNA
ccaggtccctgtgtccaggctgg

SEQ ID NO: 4885 - DNA, 23 bp, synthetic construct
  misc_feature 1..23: note = HLA-A targeting gRNA
  source 1..23: mol_type = other DNA
ccaggtctcgatcagggccaggg

SEQ ID NO: 4886 - DNA, 23 bp, synthetic construct
  misc_feature 1..23: note = HLA-A targeting gRNA
  source 1..23: mol_type = other DNA
ccaggtctcggtcagggccaggg

SEQ ID NO: 4887 - DNA, 23 bp, synthetic construct
  misc_feature 1..23: note = HLA-A targeting gRNA
  source 1..23: mol_type = other DNA
ccaggtgcctgcgtccaggctgg

SEQ ID NO: 4888 - DNA, 23 bp, synthetic construct
  misc_feature 1..23: note = HLA-A targeting gRNA
  source 1..23: mol_type = other DNA
ccaggtgcctgcgtccgggctgg

SEQ ID NO: 4889 - DNA, 23 bp, synthetic construct
  misc_feature 1..23: note = HLA-A targeting gRNA
  source 1..23: mol_type = other DNA
ccagtacgcctacgacggcaggg

SEQ ID NO: 4890 - DNA, 23 bp, synthetic construct
  misc_feature 1..23: note = HLA-A targeting gRNA
  source 1..23: mol_type = other DNA
ccagtactcctacgacggcaagg

SEQ ID NO: 4891 - DNA, 23 bp, synthetic construct
  misc_feature 1..23: note = HLA-A targeting gRNA
  source 1..23: mol_type = other DNA
ccagtccaccatccccatcgtgg

SEQ ID NO: 4892 - DNA, 23 bp, synthetic construct
  misc_feature 1..23: note = HLA-A targeting gRNA
  source 1..23: mol_type = other DNA
ccagtccaccgtccccatcgtgg

SEQ ID NO: 4893 - DNA, 23 bp, synthetic construct
  misc_feature 1..23: note = HLA-A targeting gRNA
  source 1..23: mol_type = other DNA
ccagtccactgtccccatcgtgg

SEQ ID NO: 4894 - DNA, 23 bp, synthetic construct
  misc_feature 1..23: note = HLA-A targeting gRNA
  source 1..23: mol_type = other DNA
ccagtcccgaccaacccgcgggg

SEQ ID NO: 4895 - DNA, 23 bp, synthetic construct
  misc_feature 1..23: note = HLA-A targeting gRNA
  source 1..23: mol_type = other DNA
ccagtccgcctaagacggcaagg

SEQ ID NO: 4896 - DNA, 23 bp, synthetic construct
  misc_feature 1..23: note = HLA-A targeting gRNA
  source 1..23: mol_type = other DNA
ccagtccgcctacgacggcaagg

SEQ ID NO: 4897 - DNA, 23 bp, synthetic construct
  misc_feature 1..23: note = HLA-A targeting gRNA
  source 1..23: mol_type = other DNA
ccagtccgcctaggacggcaagg

SEQ ID NO: 4898 - DNA, 23 bp, synthetic construct
  misc_feature 1..23: note = HLA-A targeting gRNA
  source 1..23: mol_type = other DNA
ccagtccgcctgcgacggcaagg

SEQ ID NO: 4899 - DNA, 23 bp, synthetic construct
  misc_feature 1..23: note = HLA-A targeting gRNA
  source 1..23: mol_type = other DNA
ccagtgagtgaccccggcccggg

SEQ ID NO: 4900 - DNA, 23 bp, synthetic construct
  misc_feature 1..23: note = HLA-A targeting gRNA
  source 1..23: mol_type = other DNA
ccagttagcctacgacggcaagg

SEQ ID NO: 4901 - DNA, 23 bp, synthetic construct
  misc_feature 1..23: note = HLA-A targeting gRNA
  source 1..23: mol_type = other DNA
ccagttcgcctacgatggcaagg

SEQ ID NO: 4902 - DNA, 23 bp, synthetic construct
  misc_feature 1..23: note = HLA-A targeting gRNA
  source 1..23: mol_type = other DNA
ccagtttgcctacgacggcaagg

SEQ ID NO: 4903 - DNA, 23 bp, synthetic construct
  misc_feature 1..23: note = HLA-A targeting gRNA
  source 1..23: mol_type = other DNA
ccatagctcctaggacagctagg

SEQ ID NO: 4904 - DNA, 23 bp, synthetic construct
  misc_feature 1..23: note = HLA-A targeting gRNA
  source 1..23: mol_type = other DNA
ccatcacagctgcccacttctgg

SEQ ID NO: 4905 - DNA, 23 bp, synthetic construct
  misc_feature 1..23: note = HLA-A targeting gRNA
  source 1..23: mol_type = other DNA
ccatcccatctctgaccatgagg

SEQ ID NO: 4906 - DNA, 23 bp, synthetic construct
  misc_feature 1..23: note = HLA-A targeting gRNA
  source 1..23: mol_type = other DNA
ccatcccccacggacggcccggg

SEQ ID NO: 4907 - DNA, 23 bp, synthetic construct
  misc_feature 1..23: note = HLA-A targeting gRNA
  source 1..23: mol_type = other DNA
ccatcccccacgtacggcccggg

SEQ ID NO: 4908 - DNA, 23 bp, synthetic construct
  misc_feature 1..23: note = HLA-A targeting gRNA
  source 1..23: mol_type = other DNA
ccatcccccacgtacggccgggg

SEQ ID NO: 4909 - DNA, 23 bp, synthetic construct
  misc_feature 1..23: note = HLA-A targeting gRNA
  source 1..23: mol_type = other DNA
ccatcccgtctctgaccatgagg

SEQ ID NO: 4910 - DNA, 23 bp, synthetic construct
  misc_feature 1..23: note = HLA-A targeting gRNA
  source 1..23: mol_type = other DNA
ccatctcagggtgaggggtttgg

SEQ ID NO: 4911 - DNA, 23 bp, synthetic construct
  misc_feature 1..23: note = HLA-A targeting gRNA
  source 1..23: mol_type = other DNA
ccatctcccgtagatctcccggg

SEQ ID NO: 4912 - DNA, 23 bp, synthetic construct
  misc_feature 1..23: note = HLA-A targeting gRNA
  source 1..23: mol_type = other DNA
ccatctcctatagatcgcccggg

SEQ ID NO: 4913 - DNA, 23 bp, synthetic construct
  misc_feature 1..23: note = HLA-A targeting gRNA
  source 1..23: mol_type = other DNA
ccatctcctatagatctcccggg

SEQ ID NO: 4914 - DNA, 23 bp, synthetic construct
  misc_feature 1..23: note = HLA-A targeting gRNA
  source 1..23: mol_type = other DNA
ccatctcctataggtcgccgggg

SEQ ID NO: 4915 - DNA, 23 bp, synthetic construct
  misc_feature 1..23: note = HLA-A targeting gRNA
  source 1..23: mol_type = other DNA
ccatctcctgtagatctcccggg

SEQ ID NO: 4916 - DNA, 23 bp, synthetic construct
  misc_feature 1..23: note = HLA-A targeting gRNA
  source 1..23: mol_type = other DNA
ccatctcgtctctgaccatgagg

SEQ ID NO: 4917 - DNA, 23 bp, synthetic construct
  misc_feature 1..23: note = HLA-A targeting gRNA
  source 1..23: mol_type = other DNA
ccatgacccggcccggccgcggg

SEQ ID NO: 4918 - DNA, 23 bp, synthetic construct
  misc_feature 1..23: note = HLA-A targeting gRNA
  source 1..23: mol_type = other DNA
ccatgatggggatggtaggctgg

SEQ ID NO: 4919 - DNA, 23 bp, synthetic construct
  misc_feature 1..23: note = HLA-A targeting gRNA
  source 1..23: mol_type = other DNA
ccatgatggggatggtgggctgg

SEQ ID NO: 4920 - DNA, 23 bp, synthetic construct
  misc_feature 1..23: note = HLA-A targeting gRNA
  source 1..23: mol_type = other DNA
ccatgtcccggcccggccgtggg

SEQ ID NO: 4921 - DNA, 23 bp, synthetic construct
  misc_feature 1..23: note = HLA-A targeting gRNA
  source 1..23: mol_type = other DNA
ccatgtcccggcccggctgcggg

SEQ ID NO: 4922 - DNA, 23 bp, synthetic construct
  misc_feature 1..23: note = HLA-A targeting gRNA
  source 1..23: mol_type = other DNA
ccatgtcccggcctggccgcggg

SEQ ID NO: 4923 - DNA, 23 bp, synthetic construct
  misc_feature 1..23: note = HLA-A targeting gRNA
  source 1..23: mol_type = other DNA
ccatgtgaccagcctgagaatgg

SEQ ID NO: 4924 - DNA, 23 bp, synthetic construct
  misc_feature 1..23: note = HLA-A targeting gRNA
  source 1..23: mol_type = other DNA
ccatgtgaccatcctgagaacgg

SEQ ID NO: 4925 - DNA, 23 bp, synthetic construct
  misc_feature 1..23: note = HLA-A targeting gRNA
  source 1..23: mol_type = other DNA
ccatgtgaccatcctgagaatgg

SEQ ID NO: 4926 - DNA, 23 bp, synthetic construct
  misc_feature 1..23: note = HLA-A targeting gRNA
  source 1..23: mol_type = other DNA
ccatgtgactatcctgagaatgg

SEQ ID NO: 4927 - DNA, 23 bp, synthetic construct
  misc_feature 1..23: note = HLA-A targeting gRNA
  source 1..23: mol_type = other DNA
ccattctcaggatagtcacatgg

SEQ ID NO: 4928 - DNA, 23 bp, synthetic construct
  misc_feature 1..23: note = HLA-A targeting gRNA
  source 1..23: mol_type = other DNA
ccattctcaggatggtcacatgg

SEQ ID NO: 4929 - DNA, 23 bp, synthetic construct
  misc_feature 1..23: note = HLA-A targeting gRNA
  source 1..23: mol_type = other DNA
ccattctcaggctggtcacatgg

SEQ ID NO: 4930 - DNA, 23 bp, synthetic construct
  misc_feature 1..23: note = HLA-A targeting gRNA
  source 1..23: mol_type = other DNA
ccattttcctcccctcctcgtgg

SEQ ID NO: 4931 - DNA, 23 bp, synthetic construct
  misc_feature 1..23: note = HLA-A targeting gRNA
  source 1..23: mol_type = other DNA
ccattttcctcccttcctcgtgg

SEQ ID NO: 4932 - DNA, 23 bp, synthetic construct
  misc_feature 1..23: note = HLA-A targeting gRNA
  source 1..23: mol_type = other DNA
ccattttcctcctcttctcgtgg

SEQ ID NO: 4933 - DNA, 23 bp, synthetic construct
  misc_feature 1..23: note = HLA-A targeting gRNA
  source 1..23: mol_type = other DNA
ccattttcctcttcttctcgtgg

SEQ ID NO: 4934 - DNA, 23 bp, synthetic construct
  misc_feature 1..23: note = HLA-A targeting gRNA
  source 1..23: mol_type = other DNA
cccaaccccgacgtacggcccgg

SEQ ID NO: 4935 - DNA, 23 bp, synthetic construct
  misc_feature 1..23: note = HLA-A targeting gRNA
  source 1..23: mol_type = other DNA
cccaacttgggcatcgtttctgg

SEQ ID NO: 4936 - DNA, 23 bp, synthetic construct
  misc_feature 1..23: note = HLA-A targeting gRNA
  source 1..23: mol_type = other DNA
cccaagcctcagccctgacccgg

SEQ ID NO: 4937 - DNA, 23 bp, synthetic construct
  misc_feature 1..23: note = HLA-A targeting gRNA
  source 1..23: mol_type = other DNA
cccaagcctcagccctgacctgg

SEQ ID NO: 4938 - DNA, 23 bp, synthetic construct
  misc_feature 1..23: note = HLA-A targeting gRNA
  source 1..23: mol_type = other DNA
cccaatgcagacaaggctctcgg

SEQ ID NO: 4939 - DNA, 23 bp, synthetic construct
  misc_feature 1..23: note = HLA-A targeting gRNA
  source 1..23: mol_type = other DNA
cccaatgcagacacggccctggg

SEQ ID NO: 4940 - DNA, 23 bp, synthetic construct
  misc_feature 1..23: note = HLA-A targeting gRNA
  source 1..23: mol_type = other DNA
cccaatgcagacacggcccttgg

SEQ ID NO: 4941 - DNA, 23 bp, synthetic construct
  misc_feature 1..23: note = HLA-A targeting gRNA
  source 1..23: mol_type = other DNA
cccaatgcagacgcggccctcgg

SEQ ID NO: 4942 - DNA, 23 bp, synthetic construct
  misc_feature 1..23: note = HLA-A targeting gRNA
  source 1..23: mol_type = other DNA
cccaatgggagtgggaaatgggg

SEQ ID NO: 4943 - DNA, 23 bp, synthetic construct
  misc_feature 1..23: note = HLA-A targeting gRNA
  source 1..23: mol_type = other DNA
cccaatgggagtgggaagtgggg

SEQ ID NO: 4944 - DNA, 23 bp, synthetic construct
  misc_feature 1..23: note = HLA-A targeting gRNA
  source 1..23: mol_type = other DNA
cccaatgggagtgggaattgggg

SEQ ID NO: 4945 - DNA, 23 bp, synthetic construct
  misc_feature 1..23: note = HLA-A targeting gRNA
  source 1..23: mol_type = other DNA
cccacacaggcagctgtctcagg

SEQ ID NO: 4946 - DNA, 23 bp, synthetic construct
  misc_feature 1..23: note = HLA-A targeting gRNA
  source 1..23: mol_type = other DNA
cccacggccgggccgggacatgg

SEQ ID NO: 4947 - DNA, 23 bp, synthetic construct
  misc_feature 1..23: note = HLA-A targeting gRNA
  source 1..23: mol_type = other DNA
cccacgggcgcctcctccgcggg

SEQ ID NO: 4948 - DNA, 23 bp, synthetic construct
  misc_feature 1..23: note = HLA-A targeting gRNA
  source 1..23: mol_type = other DNA
cccagccagcaacagtgcccagg

SEQ ID NO: 4949 - DNA, 23 bp, synthetic construct
  misc_feature 1..23: note = HLA-A targeting gRNA
  source 1..23: mol_type = other DNA
cccagccccgaccaacccgcggg

SEQ ID NO: 4950 - DNA, 23 bp, synthetic construct
  misc_feature 1..23: note = HLA-A targeting gRNA
  source 1..23: mol_type = other DNA
cccagccgtacatcctctggagg

SEQ ID NO: 4951 - DNA, 23 bp, synthetic construct
  misc_feature 1..23: note = HLA-A targeting gRNA
  source 1..23: mol_type = other DNA
cccagctgtcctggctgtcctgg

SEQ ID NO: 4952 - DNA, 23 bp, synthetic construct
  misc_feature 1..23: note = HLA-A targeting gRNA
  source 1..23: mol_type = other DNA
cccaggcagcaacagtgcccagg

SEQ ID NO: 4953 - DNA, 23 bp, synthetic construct
  misc_feature 1..23: note = HLA-A targeting gRNA
  source 1..23: mol_type = other DNA
cccaggccggggtcactcaccgg

SEQ ID NO: 4954 - DNA, 23 bp, synthetic construct
  misc_feature 1..23: note = HLA-A targeting gRNA
  source 1..23: mol_type = other DNA
cccagggccgtgtctgcattggg

SEQ ID NO: 4955 - DNA, 23 bp, synthetic construct
  misc_feature 1..23: note = HLA-A targeting gRNA
  source 1..23: mol_type = other DNA
cccaggtctcgatcagggccagg

SEQ ID NO: 4956 - DNA, 23 bp, synthetic construct
  misc_feature 1..23: note = HLA-A targeting gRNA
  source 1..23: mol_type = other DNA
cccaggtctcggtcagggccagg

SEQ ID NO: 4957 - DNA, 23 bp, synthetic construct
  misc_feature 1..23: note = HLA-A targeting gRNA
  source 1..23: mol_type = other DNA
cccagtcacccacccggactcgg

SEQ ID NO: 4958 - DNA, 23 bp, synthetic construct
  misc_feature 1..23: note = HLA-A targeting gRNA
  source 1..23: mol_type = other DNA
cccagtcccgaccaacccgcggg

SEQ ID NO: 4959 - DNA, 23 bp, synthetic construct
  misc_feature 1..23: note = HLA-A targeting gRNA
  source 1..23: mol_type = other DNA
cccagtgcagacacggcccttgg

SEQ ID NO: 4960 - DNA, 23 bp, synthetic construct
  misc_feature 1..23: note = HLA-A targeting gRNA
  source 1..23: mol_type = other DNA
cccatcatgggcatcgttgctgg

SEQ ID NO: 4961 - DNA, 23 bp, synthetic construct
  misc_feature 1..23: note = HLA-A targeting gRNA
  source 1..23: mol_type = other DNA
cccatcccccacggacggcccgg

SEQ ID NO: 4962 - DNA, 23 bp, synthetic construct
  misc_feature 1..23: note = HLA-A targeting gRNA
  source 1..23: mol_type = other DNA
cccatcccccacgtacggcccgg

SEQ ID NO: 4963 - DNA, 23 bp, synthetic construct
  misc_feature 1..23: note = HLA-A targeting gRNA
  source 1..23: mol_type = other DNA
cccatcccccacgtacggccggg

SEQ ID NO: 4964 - DNA, 23 bp, synthetic construct
  misc_feature 1..23: note = HLA-A targeting gRNA
  source 1..23: mol_type = other DNA
cccatcgtgggcatcgttgctgg

SEQ ID NO: 4965 - DNA, 23 bp, synthetic construct
  misc_feature 1..23: note = HLA-A targeting gRNA
  source 1..23: mol_type = other DNA
cccatcgtgggcattgttgctgg

SEQ ID NO: 4966 - DNA, 23 bp, synthetic construct
  misc_feature 1..23: note = HLA-A targeting gRNA
  source 1..23: mol_type = other DNA
cccatctcccgtagatctcccgg

SEQ ID NO: 4967 - DNA, 23 bp, synthetic construct
  misc_feature 1..23: note = HLA-A targeting gRNA
  source 1..23: mol_type = other DNA
cccatctcctatagatcgcccgg

SEQ ID NO: 4968 - DNA, 23 bp, synthetic construct
  misc_feature 1..23: note = HLA-A targeting gRNA
  source 1..23: mol_type = other DNA
cccatctcctatagatctcccgg

SEQ ID NO: 4969 - DNA, 23 bp, synthetic construct
  misc_feature 1..23: note = HLA-A targeting gRNA
  source 1..23: mol_type = other DNA
cccatctcctataggtcgccggg

SEQ ID NO: 4970 - DNA, 23 bp, synthetic construct
  misc_feature 1..23: note = HLA-A targeting gRNA
  source 1..23: mol_type = other DNA
cccatctcctgtagatctcccgg

SEQ ID NO: 4971 - DNA, 23 bp, synthetic construct
  misc_feature 1..23: note = HLA-A targeting gRNA
  source 1..23: mol_type = other DNA
cccattctccattcaagggaggg

SEQ ID NO: 4972 - DNA, 23 bp, synthetic construct
  misc_feature 1..23: note = HLA-A targeting gRNA
  source 1..23: mol_type = other DNA
cccattgcagacgcggccctcgg

SEQ ID NO: 4973 - DNA, 23 bp, synthetic construct
  misc_feature 1..23: note = HLA-A targeting gRNA
  source 1..23: mol_type = other DNA
cccattttccattcaagggaggg

SEQ ID NO: 4974 - DNA, 23 bp, synthetic construct
  misc_feature 1..23: note = HLA-A targeting gRNA
  source 1..23: mol_type = other DNA
ccccaaacacactgagtgtgagg

SEQ ID NO: 4975 - DNA, 23 bp, synthetic construct
  misc_feature 1..23: note = HLA-A targeting gRNA
  source 1..23: mol_type = other DNA
ccccaacaccacaaccaccaagg

SEQ ID NO: 4976 - DNA, 23 bp, synthetic construct
  misc_feature 1..23: note = HLA-A targeting gRNA
  source 1..23: mol_type = other DNA
ccccaacaccacaaccaccacgg

SEQ ID NO: 4977 - DNA, 23 bp, synthetic construct
  misc_feature 1..23: note = HLA-A targeting gRNA
  source 1..23: mol_type = other DNA
ccccaacaccacaaccatcaagg

SEQ ID NO: 4978 - DNA, 23 bp, synthetic construct
  misc_feature 1..23: note = HLA-A targeting gRNA
  source 1..23: mol_type = other DNA
ccccaacaccacaaccatcgagg

SEQ ID NO: 4979 - DNA, 23 bp, synthetic construct
  misc_feature 1..23: note = HLA-A targeting gRNA
  source 1..23: mol_type = other DNA
ccccaacaccacaaccattaagg

SEQ ID NO: 4980 - DNA, 23 bp, synthetic construct
  misc_feature 1..23: note = HLA-A targeting gRNA
  source 1..23: mol_type = other DNA
ccccaacaccataatcatcaagg

SEQ ID NO: 4981 - DNA, 23 bp, synthetic construct
  misc_feature 1..23: note = HLA-A targeting gRNA
  source 1..23: mol_type = other DNA
ccccaacgccacaaccaccaagg

SEQ ID NO: 4982 - DNA, 23 bp, synthetic construct
  misc_feature 1..23: note = HLA-A targeting gRNA
  source 1..23: mol_type = other DNA
ccccaatgcagacacggccctgg

SEQ ID NO: 4983 - DNA, 23 bp, synthetic construct
  misc_feature 1..23: note = HLA-A targeting gRNA
  source 1..23: mol_type = other DNA
ccccaattcccactcccattggg

SEQ ID NO: 4984 - DNA, 23 bp, synthetic construct
  misc_feature 1..23: note = HLA-A targeting gRNA
  source 1..23: mol_type = other DNA
ccccacgggcgcctcctccgcgg

SEQ ID NO: 4985 - DNA, 23 bp, synthetic construct
  misc_feature 1..23: note = HLA-A targeting gRNA
  source 1..23: mol_type = other DNA
ccccacttcccactcccattggg

SEQ ID NO: 4986 - DNA, 23 bp, synthetic construct
  misc_feature 1..23: note = HLA-A targeting gRNA
  source 1..23: mol_type = other DNA
ccccagccccgaccaacccgcgg

SEQ ID NO: 4987 - DNA, 23 bp, synthetic construct
  misc_feature 1..23: note = HLA-A targeting gRNA
  source 1..23: mol_type = other DNA
ccccaggctcccactccttgagg

SEQ ID NO: 4988 - DNA, 23 bp, synthetic construct
  misc_feature 1..23: note = HLA-A targeting gRNA
  source 1..23: mol_type = other DNA
ccccaggctcccacttcatgagg

SEQ ID NO: 4989 - DNA, 23 bp, synthetic construct
  misc_feature 1..23: note = HLA-A targeting gRNA
  source 1..23: mol_type = other DNA
ccccaggctccctctccatgagg

SEQ ID NO: 4990 - DNA, 23 bp, synthetic construct
  misc_feature 1..23: note = HLA-A targeting gRNA
  source 1..23: mol_type = other DNA
ccccaggcttccactccatgagg

SEQ ID NO: 4991 - DNA, 23 bp, synthetic construct
  misc_feature 1..23: note = HLA-A targeting gRNA
  source 1..23: mol_type = other DNA
ccccaggttcccactccatgagg

SEQ ID NO: 4992 - DNA, 23 bp, synthetic construct
  misc_feature 1..23: note = HLA-A targeting gRNA
  source 1..23: mol_type = other DNA
ccccagtcccgaccaacccgcgg

SEQ ID NO: 4993 - DNA, 23 bp, synthetic construct
  misc_feature 1..23: note = HLA-A targeting gRNA
  source 1..23: mol_type = other DNA
ccccagtctcccactccatgagg

SEQ ID NO: 4994 - DNA, 23 bp, synthetic construct
  misc_feature 1..23: note = HLA-A targeting gRNA
  source 1..23: mol_type = other DNA
ccccatcccccacgtacggccgg

SEQ ID NO: 4995 - DNA, 23 bp, synthetic construct
  misc_feature 1..23: note = HLA-A targeting gRNA
  source 1..23: mol_type = other DNA
ccccatctcctataggtcgccgg

SEQ ID NO: 4996 - DNA, 23 bp, synthetic construct
  misc_feature 1..23: note = HLA-A targeting gRNA
  source 1..23: mol_type = other DNA
ccccatttcccactcccattggg

SEQ ID NO: 4997 - DNA, 23 bp, synthetic construct
  misc_feature 1..23: note = HLA-A targeting gRNA
  source 1..23: mol_type = other DNA
cccccaattcccactcccattgg

SEQ ID NO: 4998 - DNA, 23 bp, synthetic construct
  misc_feature 1..23: note = HLA-A targeting gRNA
  source 1..23: mol_type = other DNA
cccccagagcagcaggaggacgg

SEQ ID NO: 4999 - DNA, 23 bp, synthetic construct
  misc_feature 1..23: note = HLA-A targeting gRNA
  source 1..23: mol_type = other DNA
cccccagagcagcaggaggaggg

SEQ ID NO: 5000 - DNA, 23 bp, synthetic construct
  misc_feature 1..23: note = HLA-A targeting gRNA
  source 1..23: mol_type = other DNA
ccccccagagcagcaggaggagg

SEQ ID NO: 5001 - DNA, 23 bp, synthetic construct
  misc_feature 1..23: note = HLA-A targeting gRNA
  source 1..23: mol_type = other DNA
ccccctagagcagcaggaggagg

SEQ ID NO: 5002 - DNA, 23 bp, synthetic construct
  misc_feature 1..23: note = HLA-A targeting gRNA
  source 1..23: mol_type = other DNA
ccccctccttaccccatctcagg

SEQ ID NO: 5003 - DNA, 23 bp, synthetic construct
  misc_feature 1..23: note = HLA-A targeting gRNA
  source 1..23: mol_type = other DNA
ccccctccttactccatctcagg

SEQ ID NO: 5004 - DNA, 23 bp, synthetic construct
  misc_feature 1..23: note = HLA-A targeting gRNA
  source 1..23: mol_type = other DNA
ccccgcccccgtggtcagcccgg

SEQ ID NO: 5005 - DNA, 23 bp, synthetic construct
  misc_feature 1..23: note = HLA-A targeting gRNA
  source 1..23: mol_type = other DNA
ccccgccccgaccaacccgcggg

SEQ ID NO: 5006 - DNA, 23 bp, synthetic construct
  misc_feature 1..23: note = HLA-A targeting gRNA
  source 1..23: mol_type = other DNA
ccccgccccgcccaacccgcggg

SEQ ID NO: 5007 - DNA, 23 bp, synthetic construct
  misc_feature 1..23: note = HLA-A targeting gRNA
  source 1..23: mol_type = other DNA
ccccgccctgaccaacccgcggg

SEQ ID NO: 5008 - DNA, 23 bp, synthetic construct
  misc_feature 1..23: note = HLA-A targeting gRNA
  source 1..23: mol_type = other DNA
ccccgcgggttgggcggggcggg

SEQ ID NO: 5009 - DNA, 23 bp, synthetic construct
  misc_feature 1..23: note = HLA-A targeting gRNA
  source 1..23: mol_type = other DNA
ccccgcgggttggtcagggcggg

SEQ ID NO: 5010 - DNA, 23 bp, synthetic construct
  misc_feature 1..23: note = HLA-A targeting gRNA
  source 1..23: mol_type = other DNA
ccccgcgggttggtcgggactgg

SEQ ID NO: 5011 - DNA, 23 bp, synthetic construct
  misc_feature 1..23: note = HLA-A targeting gRNA
  source 1..23: mol_type = other DNA
ccccgcgggttggtcggggcggg

SEQ ID NO: 5012 - DNA, 23 bp, synthetic construct
  misc_feature 1..23: note = HLA-A targeting gRNA
  source 1..23: mol_type = other DNA
ccccgcgggttggtcggggctgg

SEQ ID NO: 5013 - DNA, 23 bp, synthetic construct
  misc_feature 1..23: note = HLA-A targeting gRNA
  source 1..23: mol_type = other DNA
ccccggccgtacgtgggggatgg

SEQ ID NO: 5014 - DNA, 23 bp, synthetic construct
  misc_feature 1..23: note = HLA-A targeting gRNA
  source 1..23: mol_type = other DNA
ccccggcgacctataggagatgg

SEQ ID NO: 5015 - DNA, 23 bp, synthetic construct
  misc_feature 1..23: note = HLA-A targeting gRNA
  source 1..23: mol_type = other DNA
ccccggcggtccaggagcgcagg

SEQ ID NO: 5016 - DNA, 23 bp, synthetic construct
  misc_feature 1..23: note = HLA-A targeting gRNA
  source 1..23: mol_type = other DNA
ccccgggccggggtcactcacgg

SEQ ID NO: 5017 - DNA, 23 bp, synthetic construct
  misc_feature 1..23: note = HLA-A targeting gRNA
  source 1..23: mol_type = other DNA
cccctagagcagcaggaggaggg

SEQ ID NO: 5018 - DNA, 23 bp, synthetic construct
  misc_feature 1..23: note = HLA-A targeting gRNA
  source 1..23: mol_type = other DNA
cccctccctcctctccgcagagg

SEQ ID NO: 5019 - DNA, 23 bp, synthetic construct
  misc_feature 1..23: note = HLA-A targeting gRNA
  source 1..23: mol_type = other DNA
cccctccttaccccagctcaggg

SEQ ID NO: 5020 - DNA, 23 bp, synthetic construct
  misc_feature 1..23: note = HLA-A targeting gRNA
  source 1..23: mol_type = other DNA
cccctccttaccccatctcaggg

SEQ ID NO: 5021 - DNA, 23 bp, synthetic construct
  misc_feature 1..23: note = HLA-A targeting gRNA
  source 1..23: mol_type = other DNA
cccctccttactccatctcaggg

SEQ ID NO: 5022 - DNA, 23 bp, synthetic construct
  misc_feature 1..23: note = HLA-A targeting gRNA
  source 1..23: mol_type = other DNA
cccctcgctcctccccacagagg

SEQ ID NO: 5023 - DNA, 23 bp, synthetic construct
  misc_feature 1..23: note = HLA-A targeting gRNA
  source 1..23: mol_type = other DNA
cccctcgctcctcccggcagagg

SEQ ID NO: 5024 - DNA, 23 bp, synthetic construct
  misc_feature 1..23: note = HLA-A targeting gRNA
  source 1..23: mol_type = other DNA
cccctcgctcctctcagcagagg

SEQ ID NO: 5025 - DNA, 23 bp, synthetic construct
  misc_feature 1..23: note = HLA-A targeting gRNA
  source 1..23: mol_type = other DNA
cccctcgctcctctccatagagg

SEQ ID NO: 5026 - DNA, 23 bp, synthetic construct
  misc_feature 1..23: note = HLA-A targeting gRNA
  source 1..23: mol_type = other DNA
cccctcgctcctctccccagagg

SEQ ID NO: 5027 - DNA, 23 bp, synthetic construct
  misc_feature 1..23: note = HLA-A targeting gRNA
  source 1..23: mol_type = other DNA
cccctcgctcctctccgcagagg

SEQ ID NO: 5028 - DNA, 23 bp, synthetic construct
  misc_feature 1..23: note = HLA-A targeting gRNA
  source 1..23: mol_type = other DNA
cccctctctcctccccacagagg

SEQ ID NO: 5029 - DNA, 23 bp, synthetic construct
  misc_feature 1..23: note = HLA-A targeting gRNA
  source 1..23: mol_type = other DNA
ccccttgctcctccctacagagg

SEQ ID NO: 5030 - DNA, 23 bp, synthetic construct
  misc_feature 1..23: note = HLA-A targeting gRNA
  source 1..23: mol_type = other DNA
cccgaccggcgcctcctccgcgg

SEQ ID NO: 5031 - DNA, 23 bp, synthetic construct
  misc_feature 1..23: note = HLA-A targeting gRNA
  source 1..23: mol_type = other DNA
cccgacgggcccctcctccgcgg

SEQ ID NO: 5032 - DNA, 23 bp, synthetic construct
  misc_feature 1..23: note = HLA-A targeting gRNA
  source 1..23: mol_type = other DNA
cccgacgggcgcctcctccacgg

SEQ ID NO: 5033 - DNA, 23 bp, synthetic construct
  misc_feature 1..23: note = HLA-A targeting gRNA
  source 1..23: mol_type = other DNA
cccgacgggcgcctcctccgcgg

SEQ ID NO: 5034 - DNA, 23 bp, synthetic construct
  misc_feature 1..23: note = HLA-A targeting gRNA
  source 1..23: mol_type = other DNA
cccgacgggcgcttcctccgcgg

SEQ ID NO: 5035 - DNA, 23 bp, synthetic construct
  misc_feature 1..23: note = HLA-A targeting gRNA
  source 1..23: mol_type = other DNA
cccgacgggcgtctcctccgcgg

SEQ ID NO: 5036 - DNA, 23 bp, synthetic construct
  misc_feature 1..23: note = HLA-A targeting gRNA
  source 1..23: mol_type = other DNA
cccgcagccgggccgggacatgg

SEQ ID NO: 5037 - DNA, 23 bp, synthetic construct
  misc_feature 1..23: note = HLA-A targeting gRNA
  source 1..23: mol_type = other DNA
cccgccccgaccaacccgcgggg

SEQ ID NO: 5038 - DNA, 23 bp, synthetic construct
  misc_feature 1..23: note = HLA-A targeting gRNA
  source 1..23: mol_type = other DNA
cccgccccgcccaacccgcgggg

SEQ ID NO: 5039 - DNA, 23 bp, synthetic construct
  misc_feature 1..23: note = HLA-A targeting gRNA
  source 1..23: mol_type = other DNA
cccgccctgaccaacccgcgggg

SEQ ID NO: 5040 - DNA, 23 bp, synthetic construct
  misc_feature 1..23: note = HLA-A targeting gRNA
  source 1..23: mol_type = other DNA
cccgcggaggaagcgcccgtcgg

SEQ ID NO: 5041 - DNA, 23 bp, synthetic construct
  misc_feature 1..23: note = HLA-A targeting gRNA
  source 1..23: mol_type = other DNA
cccgcggaggagacgcccgtcgg

SEQ ID NO: 5042 - DNA, 23 bp, synthetic construct
  misc_feature 1..23: note = HLA-A targeting gRNA
  source 1..23: mol_type = other DNA
cccgcggaggaggcgcccgccgg

SEQ ID NO: 5043 - DNA, 23 bp, synthetic construct
  misc_feature 1..23: note = HLA-A targeting gRNA
  source 1..23: mol_type = other DNA
cccgcggaggaggcgcccgtagg

SEQ ID NO: 5044 - DNA, 23 bp, synthetic construct
  misc_feature 1..23: note = HLA-A targeting gRNA
  source 1..23: mol_type = other DNA
cccgcggaggaggcgcccgtcgg

SEQ ID NO: 5045 - DNA, 23 bp, synthetic construct
  misc_feature 1..23: note = HLA-A targeting gRNA
  source 1..23: mol_type = other DNA
cccgcggaggaggcgcccgtggg

SEQ ID NO: 5046 - DNA, 23 bp, synthetic construct
  misc_feature 1..23: note = HLA-A targeting gRNA
  source 1..23: mol_type = other DNA
cccgcggaggaggcgccggtcgg

SEQ ID NO: 5047 - DNA, 23 bp, synthetic construct
  misc_feature 1..23: note = HLA-A targeting gRNA
  source 1..23: mol_type = other DNA
cccgcggaggaggggcccgtcgg

SEQ ID NO: 5048 - DNA, 23 bp, synthetic construct
  misc_feature 1..23: note = HLA-A targeting gRNA
  source 1..23: mol_type = other DNA
cccgcggccaggccgggacacgg

SEQ ID NO: 5049 - DNA, 23 bp, synthetic construct
  misc_feature 1..23: note = HLA-A targeting gRNA
  source 1..23: mol_type = other DNA
cccgcggccaggccgggacatgg

SEQ ID NO: 5050 - DNA, 23 bp, synthetic construct
  misc_feature 1..23: note = HLA-A targeting gRNA
  source 1..23: mol_type = other DNA
cccgcggccgggccaggacacgg

SEQ ID NO: 5051 - DNA, 23 bp, synthetic construct
  misc_feature 1..23: note = HLA-A targeting gRNA
  source 1..23: mol_type = other DNA
cccgcggccgggccgggacgtgg

SEQ ID NO: 5052 - DNA, 23 bp, synthetic construct
  misc_feature 1..23: note = HLA-A targeting gRNA
  source 1..23: mol_type = other DNA
cccgcggccgggccgggtcatgg

SEQ ID NO: 5053 - DNA, 23 bp, synthetic construct
  misc_feature 1..23: note = HLA-A targeting gRNA
  source 1..23: mol_type = other DNA
cccgcgggttgggcggggcgggg

SEQ ID NO: 5054 - DNA, 23 bp, synthetic construct
  misc_feature 1..23: note = HLA-A targeting gRNA
  source 1..23: mol_type = other DNA
cccgcgggttggtcagggcgggg

SEQ ID NO: 5055 - DNA, 23 bp, synthetic construct
  misc_feature 1..23: note = HLA-A targeting gRNA
  source 1..23: mol_type = other DNA
cccgcgggttggtcgggactggg

SEQ ID NO: 5056 - DNA, 23 bp, synthetic construct
  misc_feature 1..23: note = HLA-A targeting gRNA
  source 1..23: mol_type = other DNA
cccgcgggttggtcggggcgggg

SEQ ID NO: 5057 - DNA, 23 bp, synthetic construct
  misc_feature 1..23: note = HLA-A targeting gRNA
  source 1..23: mol_type = other DNA
cccgcgggttggtcggggctggg

SEQ ID NO: 5058 - DNA, 23 bp, synthetic construct
  misc_feature 1..23: note = HLA-A targeting gRNA
  source 1..23: mol_type = other DNA
cccgctgccgggccgggacacgg

SEQ ID NO: 5059 - DNA, 23 bp, synthetic construct
  misc_feature 1..23: note = HLA-A targeting gRNA
  source 1..23: mol_type = other DNA
cccggagactcggggcgacccgg

SEQ ID NO: 5060 - DNA, 23 bp, synthetic construct
  misc_feature 1..23: note = HLA-A targeting gRNA
  source 1..23: mol_type = other DNA
cccggccgtacgtgggggatggg

SEQ ID NO: 5061 - DNA, 23 bp, synthetic construct
  misc_feature 1..23: note = HLA-A targeting gRNA
  source 1..23: mol_type = other DNA
cccggcgacctataggagatggg

SEQ ID NO: 5062 - DNA, 23 bp, synthetic construct
  misc_feature 1..23: note = HLA-A targeting gRNA
  source 1..23: mol_type = other DNA
cccggcgagggcgcaggacccgg

SEQ ID NO: 5063 - DNA, 23 bp, synthetic construct
  misc_feature 1..23: note = HLA-A targeting gRNA
  source 1..23: mol_type = other DNA
cccggcgggcgcctcctccgcgg

SEQ ID NO: 5064 - DNA, 23 bp, synthetic construct
  misc_feature 1..23: note = HLA-A targeting gRNA
  source 1..23: mol_type = other DNA
cccggctgaagggctccagaagg

SEQ ID NO: 5065 - DNA, 23 bp, synthetic construct
  misc_feature 1..23: note = HLA-A targeting gRNA
  source 1..23: mol_type = other DNA
cccgggagatctacaggagatgg

SEQ ID NO: 5066 - DNA, 23 bp, synthetic construct
  misc_feature 1..23: note = HLA-A targeting gRNA
  source 1..23: mol_type = other DNA
cccgggagatctacgggagatgg

SEQ ID NO: 5067 - DNA, 23 bp, synthetic construct
  misc_feature 1..23: note = HLA-A targeting gRNA
  source 1..23: mol_type = other DNA
cccgggagatctataggagatgg

SEQ ID NO: 5068 - DNA, 23 bp, synthetic construct
  misc_feature 1..23: note = HLA-A targeting gRNA
  source 1..23: mol_type = other DNA
cccgggccggggtcactcactgg

SEQ ID NO: 5069 - DNA, 23 bp, synthetic construct
  misc_feature 1..23: note = HLA-A targeting gRNA
  source 1..23: mol_type = other DNA
cccgggccgtacgtcggggttgg

SEQ ID NO: 5070 - DNA, 23 bp, synthetic construct
  misc_feature 1..23: note = HLA-A targeting gRNA
  source 1..23: mol_type = other DNA
cccgggccgtacgtgggggatgg

SEQ ID NO: 5071 - DNA, 23 bp, synthetic construct
  misc_feature 1..23: note = HLA-A targeting gRNA
  source 1..23: mol_type = other DNA
cccgggccgtccgtgggggatgg

SEQ ID NO: 5072 - DNA, 23 bp, synthetic construct
  misc_feature 1..23: note = HLA-A targeting gRNA
  source 1..23: mol_type = other DNA
cccgggcgatctataggagatgg

SEQ ID NO: 5073 - DNA, 23 bp, synthetic construct
  misc_feature 1..23: note = HLA-A targeting gRNA
  source 1..23: mol_type = other DNA
cccgggtcctgcgccctcgccgg

SEQ ID NO: 5074 - DNA, 23 bp, synthetic construct
  misc_feature 1..23: note = HLA-A targeting gRNA
  source 1..23: mol_type = other DNA
cccgggtcgccccgagtctcagg

SEQ ID NO: 5075 - DNA, 23 bp, synthetic construct
  misc_feature 1..23: note = HLA-A targeting gRNA
  source 1..23: mol_type = other DNA
cccgggtcgccccgagtctccgg

SEQ ID NO: 5076 - DNA, 23 bp, synthetic construct
  misc_feature 1..23: note = HLA-A targeting gRNA
  source 1..23: mol_type = other DNA
cccggtcccaatactccgtccgg

SEQ ID NO: 5077 - DNA, 23 bp, synthetic construct
  misc_feature 1..23: note = HLA-A targeting gRNA
  source 1..23: mol_type = other DNA
cccggtttcattttcagttgagg

SEQ ID NO: 5078 - DNA, 23 bp, synthetic construct
  misc_feature 1..23: note = HLA-A targeting gRNA
  source 1..23: mol_type = other DNA
cccggtttcattttcggtttagg

SEQ ID NO: 5079 - DNA, 23 bp, synthetic construct
  misc_feature 1..23: note = HLA-A targeting gRNA
  source 1..23: mol_type = other DNA
cccggtttcgttttcagtttagg

SEQ ID NO: 5080 - DNA, 23 bp, synthetic construct
  misc_feature 1..23: note = HLA-A targeting gRNA
  source 1..23: mol_type = other DNA
cccgtctgagatccaccccaagg

SEQ ID NO: 5081 - DNA, 23 bp, synthetic construct
  misc_feature 1..23: note = HLA-A targeting gRNA
  source 1..23: mol_type = other DNA
cccgtctgagatccaccccgagg

SEQ ID NO: 5082 - DNA, 23 bp, synthetic construct
  misc_feature 1..23: note = HLA-A targeting gRNA
  source 1..23: mol_type = other DNA
cccgtggaggaggcgcccgtcgg

SEQ ID NO: 5083 - DNA, 23 bp, synthetic construct
  misc_feature 1..23: note = HLA-A targeting gRNA
  source 1..23: mol_type = other DNA
ccctacgggcgcctcctccgcgg

SEQ ID NO: 5084 - DNA, 23 bp, synthetic construct
  misc_feature 1..23: note = HLA-A targeting gRNA
  source 1..23: mol_type = other DNA
ccctccagaggatgtacggctgg

SEQ ID NO: 5085 - DNA, 23 bp, synthetic construct
  misc_feature 1..23: note = HLA-A targeting gRNA
  source 1..23: mol_type = other DNA
ccctccccaaccccgacgtacgg

SEQ ID NO: 5086 - DNA, 23 bp, synthetic construct
  misc_feature 1..23: note = HLA-A targeting gRNA
  source 1..23: mol_type = other DNA
ccctccccatcccccacggacgg

SEQ ID NO: 5087 - DNA, 23 bp, synthetic construct
  misc_feature 1..23: note = HLA-A targeting gRNA
  source 1..23: mol_type = other DNA
ccctcccgacccgcactcaccgg

SEQ ID NO: 5088 - DNA, 23 bp, synthetic construct
  misc_feature 1..23: note = HLA-A targeting gRNA
  source 1..23: mol_type = other DNA
ccctcccttgaatggaaaatggg

SEQ ID NO: 5089 - DNA, 23 bp, synthetic construct
  misc_feature 1..23: note = HLA-A targeting gRNA
  source 1..23: mol_type = other DNA
ccctcccttgaatggagaatggg

SEQ ID NO: 5090 - DNA, 23 bp, synthetic construct
  misc_feature 1..23: note = HLA-A targeting gRNA
  source 1..23: mol_type = other DNA
ccctcctcatcccccacggacgg

SEQ ID NO: 5091 - DNA, 23 bp, synthetic construct
  misc_feature 1..23: note = HLA-A targeting gRNA
  source 1..23: mol_type = other DNA
ccctcctcctgctgctctagggg

SEQ ID NO: 5092 - DNA, 23 bp, synthetic construct
  misc_feature 1..23: note = HLA-A targeting gRNA
  source 1..23: mol_type = other DNA
ccctcctcctgctgctctggggg

SEQ ID NO: 5093 - DNA, 23 bp, synthetic construct
  misc_feature 1..23: note = HLA-A targeting gRNA
  source 1..23: mol_type = other DNA
ccctgagactcggggcgacccgg

SEQ ID NO: 5094 - DNA, 23 bp, synthetic construct
  misc_feature 1..23: note = HLA-A targeting gRNA
  source 1..23: mol_type = other DNA
ccctgagatggagtaaggagggg

SEQ ID NO: 5095 - DNA, 23 bp, synthetic construct
  misc_feature 1..23: note = HLA-A targeting gRNA
  source 1..23: mol_type = other DNA
ccctgagatggggtaaggagggg

SEQ ID NO: 5096 - DNA, 23 bp, synthetic construct
  misc_feature 1..23: note = HLA-A targeting gRNA
  source 1..23: mol_type = other DNA
ccctgagctggggtaaggagggg

SEQ ID NO: 5097 - DNA, 23 bp, synthetic construct
  misc_feature 1..23: note = HLA-A targeting gRNA
  source 1..23: mol_type = other DNA
ccctgcagcgcgcgggtaccagg

SEQ ID NO: 5098 - DNA, 23 bp, synthetic construct
  misc_feature 1..23: note = HLA-A targeting gRNA
  source 1..23: mol_type = other DNA
ccctgccgacccgcactcaccgg

SEQ ID NO: 5099 - DNA, 23 bp, synthetic construct
  misc_feature 1..23: note = HLA-A targeting gRNA
  source 1..23: mol_type = other DNA
ccctgccgtcgtaggcgtactgg

SEQ ID NO: 5100 - DNA, 23 bp, synthetic construct
  misc_feature 1..23: note = HLA-A targeting gRNA
  source 1..23: mol_type = other DNA
ccctgctaaggacagaccttagg

SEQ ID NO: 5101 - DNA, 23 bp, synthetic construct
  misc_feature 1..23: note = HLA-A targeting gRNA
  source 1..23: mol_type = other DNA
ccctgctgaagggctccagaagg

SEQ ID NO: 5102 - DNA, 23 bp, synthetic construct
  misc_feature 1..23: note = HLA-A targeting gRNA
  source 1..23: mol_type = other DNA
ccctggccctgaccgagacctgg

SEQ ID NO: 5103 - DNA, 23 bp, synthetic construct
  misc_feature 1..23: note = HLA-A targeting gRNA
  source 1..23: mol_type = other DNA
ccctggccctgatcgagacctgg

SEQ ID NO: 5104 - DNA, 23 bp, synthetic construct
  misc_feature 1..23: note = HLA-A targeting gRNA
  source 1..23: mol_type = other DNA
ccctgggcactgtcgctgcctgg

SEQ ID NO: 5105 - DNA, 23 bp, synthetic construct
  misc_feature 1..23: note = HLA-A targeting gRNA
  source 1..23: mol_type = other DNA
ccctgggcactgtcgctggctgg

SEQ ID NO: 5106 - DNA, 23 bp, synthetic construct
  misc_feature 1..23: note = HLA-A targeting gRNA
  source 1..23: mol_type = other DNA
ccctgggcactgttgctgcctgg

SEQ ID NO: 5107 - DNA, 23 bp, synthetic construct
  misc_feature 1..23: note = HLA-A targeting gRNA
  source 1..23: mol_type = other DNA
ccctgggcactgttgctggctgg

SEQ ID NO: 5108 - DNA, 23 bp, synthetic construct
  misc_feature 1..23: note = HLA-A targeting gRNA
  source 1..23: mol_type = other DNA
ccctggtacccgcgcgctgcagg

SEQ ID NO: 5109 - DNA, 23 bp, synthetic construct
  misc_feature 1..23: note = HLA-A targeting gRNA
  source 1..23: mol_type = other DNA
cccttctggagcccttcagcagg

SEQ ID NO: 5110 - DNA, 23 bp, synthetic construct
  misc_feature 1..23: note = HLA-A targeting gRNA
  source 1..23: mol_type = other DNA
cccttgaagtcacaaaggggagg

SEQ ID NO: 5111 - DNA, 23 bp, synthetic construct
  misc_feature 1..23: note = HLA-A targeting gRNA
  source 1..23: mol_type = other DNA
ccgaaaatgaaaccgggtaaagg

SEQ ID NO: 5112 - DNA, 23 bp, synthetic construct
  misc_feature 1..23: note = HLA-A targeting gRNA
  source 1..23: mol_type = other DNA
ccgaccggcgcctcctccgcggg

SEQ ID NO: 5113 - DNA, 23 bp, synthetic construct
  misc_feature 1..23: note = HLA-A targeting gRNA
  source 1..23: mol_type = other DNA
ccgacgggcccctcctccgcggg

SEQ ID NO: 5114 - DNA, 23 bp, synthetic construct
  misc_feature 1..23: note = HLA-A targeting gRNA
  source 1..23: mol_type = other DNA
ccgacgggcgcctcctccacggg

SEQ ID NO: 5115 - DNA, 23 bp, synthetic construct
  misc_feature 1..23: note = HLA-A targeting gRNA
  source 1..23: mol_type = other DNA
ccgacgggcgcctcctccgcggg

SEQ ID NO: 5116 - DNA, 23 bp, synthetic construct
  misc_feature 1..23: note = HLA-A targeting gRNA
  source 1..23: mol_type = other DNA
ccgacgggcgcttcctccgcggg

SEQ ID NO: 5117 - DNA, 23 bp, synthetic construct
  misc_feature 1..23: note = HLA-A targeting gRNA
  source 1..23: mol_type = other DNA
ccgacgggcgtctcctccgcggg

SEQ ID NO: 5118 - DNA, 23 bp, synthetic construct
  misc_feature 1..23: note = HLA-A targeting gRNA
  source 1..23: mol_type = other DNA
ccgagagccttgtctgcattggg

SEQ ID NO: 5119 - DNA, 23 bp, synthetic construct
  misc_feature 1..23: note = HLA-A targeting gRNA
  source 1..23: mol_type = other DNA
ccgagggccgcgtctgcaatggg

SEQ ID NO: 5120 - DNA, 23 bp, synthetic construct
  misc_feature 1..23: note = HLA-A targeting gRNA
  source 1..23: mol_type = other DNA
ccgagggccgcgtctgcattggg

SEQ ID NO: 5121 - DNA, 23 bp, synthetic construct
  misc_feature 1..23: note = HLA-A targeting gRNA
  source 1..23: mol_type = other DNA
ccgagtccgggtgggtgactggg

SEQ ID NO: 5122 - DNA, 23 bp, synthetic construct
  misc_feature 1..23: note = HLA-A targeting gRNA
  source 1..23: mol_type = other DNA
ccgcagcggtccaggagcgcagg

SEQ ID NO: 5123 - DNA, 23 bp, synthetic construct
  misc_feature 1..23: note = HLA-A targeting gRNA
  source 1..23: mol_type = other DNA
ccgccgcgatccaggagctcagg

SEQ ID NO: 5124 - DNA, 23 bp, synthetic construct
  misc_feature 1..23: note = HLA-A targeting gRNA
  source 1..23: mol_type = other DNA
ccgccgcggtccaggagctcagg

SEQ ID NO: 5125 - DNA, 23 bp, synthetic construct
  misc_feature 1..23: note = HLA-A targeting gRNA
  source 1..23: mol_type = other DNA
ccgccgcggtccaggagcttagg

SEQ ID NO: 5126 - DNA, 23 bp, synthetic construct
  misc_feature 1..23: note = HLA-A targeting gRNA
  source 1..23: mol_type = other DNA
ccgccgcggtccgggagctcagg

SEQ ID NO: 5127 - DNA, 23 bp, synthetic construct
  misc_feature 1..23: note = HLA-A targeting gRNA
  source 1..23: mol_type = other DNA
ccgcggaggaagcgcccgtcggg

SEQ ID NO: 5128 - DNA, 23 bp, synthetic construct
  misc_feature 1..23: note = HLA-A targeting gRNA
  source 1..23: mol_type = other DNA
ccgcggaggagacgcccgtcggg

SEQ ID NO: 5129 - DNA, 23 bp, synthetic construct
  misc_feature 1..23: note = HLA-A targeting gRNA
  source 1..23: mol_type = other DNA
ccgcggaggaggcgcccatccgg

SEQ ID NO: 5130 - DNA, 23 bp, synthetic construct
  misc_feature 1..23: note = HLA-A targeting gRNA
  source 1..23: mol_type = other DNA
ccgcggaggaggcgcccgccggg

SEQ ID NO: 5131 - DNA, 23 bp, synthetic construct
  misc_feature 1..23: note = HLA-A targeting gRNA
  source 1..23: mol_type = other DNA
ccgcggaggaggcgcccgtaggg

SEQ ID NO: 5132 - DNA, 23 bp, synthetic construct
  misc_feature 1..23: note = HLA-A targeting gRNA
  source 1..23: mol_type = other DNA
ccgcggaggaggcgcccgtcggg

SEQ ID NO: 5133 - DNA, 23 bp, synthetic construct
  misc_feature 1..23: note = HLA-A targeting gRNA
  source 1..23: mol_type = other DNA
ccgcggaggaggcgcccgtgggg

SEQ ID NO: 5134 - DNA, 23 bp, synthetic construct
  misc_feature 1..23: note = HLA-A targeting gRNA
  source 1..23: mol_type = other DNA
ccgcggaggaggcgccggtcggg

SEQ ID NO: 5135 - DNA, 23 bp, synthetic construct
  misc_feature 1..23: note = HLA-A targeting gRNA
  source 1..23: mol_type = other DNA
ccgcggaggaggggcccgtcggg

SEQ ID NO: 5136 - DNA, 23 bp, synthetic construct
  misc_feature 1..23: note = HLA-A targeting gRNA
  source 1..23: mol_type = other DNA
ccgcggcaatccaggagcgcagg

SEQ ID NO: 5137 - DNA, 23 bp, synthetic construct
  misc_feature 1..23: note = HLA-A targeting gRNA
  source 1..23: mol_type = other DNA
ccgcggcagtccaggagcgcagg

SEQ ID NO: 5138 - DNA, 23 bp, synthetic construct
  misc_feature 1..23: note = HLA-A targeting gRNA
  source 1..23: mol_type = other DNA
ccgcggcggtccaggagcgcagg

SEQ ID NO: 5139 - DNA, 23 bp, synthetic construct
  misc_feature 1..23: note = HLA-A targeting gRNA
  source 1..23: mol_type = other DNA
ccgcggcggtccaggagctcagg

SEQ ID NO: 5140 - DNA, 23 bp, synthetic construct
  misc_feature 1..23: note = HLA-A targeting gRNA
  source 1..23: mol_type = other DNA
ccgcggcggtccaggagggcagg

SEQ ID NO: 5141 - DNA, 23 bp, synthetic construct
  misc_feature 1..23: note = HLA-A targeting gRNA
  source 1..23: mol_type = other DNA
ccgcgggttggtcgggactgggg

SEQ ID NO: 5142 - DNA, 23 bp, synthetic construct
  misc_feature 1..23: note = HLA-A targeting gRNA
  source 1..23: mol_type = other DNA
ccgcgggttggtcggggctgggg

SEQ ID NO: 5143 - DNA, 23 bp, synthetic construct
  misc_feature 1..23: note = HLA-A targeting gRNA
  source 1..23: mol_type = other DNA
ccgcggtgtccgccgcggtccgg

SEQ ID NO: 5144 - DNA, 23 bp, synthetic construct
  misc_feature 1..23: note = HLA-A targeting gRNA
  source 1..23: mol_type = other DNA
ccgcggtgtccgccgcgtccagg

SEQ ID NO: 5145 - DNA, 23 bp, synthetic construct
  misc_feature 1..23: note = HLA-A targeting gRNA
  source 1..23: mol_type = other DNA
ccggaacacacagatctacaagg

SEQ ID NO: 5146 - DNA, 23 bp, synthetic construct
  misc_feature 1..23: note = HLA-A targeting gRNA
  source 1..23: mol_type = other DNA
ccggaacacacagatctgcaagg

SEQ ID NO: 5147 - DNA, 23 bp, synthetic construct
  misc_feature 1..23: note = HLA-A targeting gRNA
  source 1..23: mol_type = other DNA
ccggaccgcggcggacaccgcgg

SEQ ID NO: 5148 - DNA, 23 bp, synthetic construct
  misc_feature 1..23: note = HLA-A targeting gRNA
  source 1..23: mol_type = other DNA
ccggacggagtattgggaccggg

SEQ ID NO: 5149 - DNA, 23 bp, synthetic construct
  misc_feature 1..23: note = HLA-A targeting gRNA
  source 1..23: mol_type = other DNA
ccggacgggcgcctcctccgtgg

SEQ ID NO: 5150 - DNA, 23 bp, synthetic construct
  misc_feature 1..23: note = HLA-A targeting gRNA
  source 1..23: mol_type = other DNA
ccggagactcggggcgaccccgg

SEQ ID NO: 5151 - DNA, 23 bp, synthetic construct
  misc_feature 1..23: note = HLA-A targeting gRNA
  source 1..23: mol_type = other DNA
ccggagactcggggcgacccggg

SEQ ID NO: 5152 - DNA, 23 bp, synthetic construct
  misc_feature 1..23: note = HLA-A targeting gRNA
  source 1..23: mol_type = other DNA
ccggatgggcgcctcctccgcgg

SEQ ID NO: 5153 - DNA, 23 bp, synthetic construct
  misc_feature 1..23: note = HLA-A targeting gRNA
  source 1..23: mol_type = other DNA
ccggccgtacgtgggggatgggg

SEQ ID NO: 5154 - DNA, 23 bp, synthetic construct
  misc_feature 1..23: note = HLA-A targeting gRNA
  source 1..23: mol_type = other DNA
ccggcgacctataggagatgggg

SEQ ID NO: 5155 - DNA, 23 bp, synthetic construct
  misc_feature 1..23: note = HLA-A targeting gRNA
  source 1..23: mol_type = other DNA
ccggcgagggcgcaggacccggg

SEQ ID NO: 5156 - DNA, 23 bp, synthetic construct
  misc_feature 1..23: note = HLA-A targeting gRNA
  source 1..23: mol_type = other DNA
ccggcgggcgcctcctccgcggg

SEQ ID NO: 5157 - DNA, 23 bp, synthetic construct
  misc_feature 1..23: note = HLA-A targeting gRNA
  source 1..23: mol_type = other DNA
ccgggagacacagatctgcaagg

SEQ ID NO: 5158 - DNA, 23 bp, synthetic construct
  misc_feature 1..23: note = HLA-A targeting gRNA
  source 1..23: mol_type = other DNA
ccgggagacacggaacatgaagg

SEQ ID NO: 5159 - DNA, 23 bp, synthetic construct
  misc_feature 1..23: note = HLA-A targeting gRNA
  source 1..23: mol_type = other DNA
ccgggagactcggggcgacccgg

SEQ ID NO: 5160 - DNA, 23 bp, synthetic construct
  misc_feature 1..23: note = HLA-A targeting gRNA
  source 1..23: mol_type = other DNA
ccgggagacttggggcgacccgg

SEQ ID NO: 5161 - DNA, 23 bp, synthetic construct
  misc_feature 1..23: note = HLA-A targeting gRNA
  source 1..23: mol_type = other DNA
ccgggagatctacaggagatagg

SEQ ID NO: 5162 - DNA, 23 bp, synthetic construct
  misc_feature 1..23: note = HLA-A targeting gRNA
  source 1..23: mol_type = other DNA
ccgggagatctacaggagatggg

SEQ ID NO: 5163 - DNA, 23 bp, synthetic construct
  misc_feature 1..23: note = HLA-A targeting gRNA
  source 1..23: mol_type = other DNA
ccgggagatctacgggagatggg

SEQ ID NO: 5164 - DNA, 23 bp, synthetic construct
  misc_feature 1..23: note = HLA-A targeting gRNA
  source 1..23: mol_type = other DNA
ccgggagatctataggagatggg

SEQ ID NO: 5165 - DNA, 23 bp, synthetic construct
  misc_feature 1..23: note = HLA-A targeting gRNA
  source 1..23: mol_type = other DNA
ccgggagccatggatagagcagg

SEQ ID NO: 5166 - DNA, 23 bp, synthetic construct
  misc_feature 1..23: note = HLA-A targeting gRNA
  source 1..23: mol_type = other DNA
ccgggccgtacgtcggggttggg

SEQ ID NO: 5167 - DNA, 23 bp, synthetic construct
  misc_feature 1..23: note = HLA-A targeting gRNA
  source 1..23: mol_type = other DNA
ccgggccgtacgtgggggatggg

SEQ ID NO: 5168 - DNA, 23 bp, synthetic construct
  misc_feature 1..23: note = HLA-A targeting gRNA
  source 1..23: mol_type = other DNA
ccgggccgtccgtgggggatggg

SEQ ID NO: 5169 - DNA, 23 bp, synthetic construct
  misc_feature 1..23: note = HLA-A targeting gRNA
  source 1..23: mol_type = other DNA
ccgggcgatctataggagatggg

SEQ ID NO: 5170 - DNA, 23 bp, synthetic construct
  misc_feature 1..23: note = HLA-A targeting gRNA
  source 1..23: mol_type = other DNA
ccgggcgccatggatagagcagg

SEQ ID NO: 5171 - DNA, 23 bp, synthetic construct
  misc_feature 1..23: note = HLA-A targeting gRNA
  source 1..23: mol_type = other DNA
ccgggcgccgtggatagagcagg

SEQ ID NO: 5172 - DNA, 23 bp, synthetic construct
  misc_feature 1..23: note = HLA-A targeting gRNA
  source 1..23: mol_type = other DNA
ccgggcgccgtgggtggagcagg

SEQ ID NO: 5173 - DNA, 23 bp, synthetic construct
  misc_feature 1..23: note = HLA-A targeting gRNA
  source 1..23: mol_type = other DNA
ccgggctgaccacgggggcgggg

SEQ ID NO: 5174 - DNA, 23 bp, synthetic construct
  misc_feature 1..23: note = HLA-A targeting gRNA
  source 1..23: mol_type = other DNA
ccggggtcgccccgagtctccgg

SEQ ID NO: 5175 - DNA, 23 bp, synthetic construct
  misc_feature 1..23: note = HLA-A targeting gRNA
  source 1..23: mol_type = other DNA
ccgggtcagggctgaggcttggg

SEQ ID NO: 5176 - DNA, 23 bp, synthetic construct
  misc_feature 1..23: note = HLA-A targeting gRNA
  source 1..23: mol_type = other DNA
ccgggtcctgcgccctcgccggg

SEQ ID NO: 5177 - DNA, 23 bp, synthetic construct
  misc_feature 1..23: note = HLA-A targeting gRNA
  source 1..23: mol_type = other DNA
ccgggtcgccccaagtctcccgg

SEQ ID NO: 5178 - DNA, 23 bp, synthetic construct
  misc_feature 1..23: note = HLA-A targeting gRNA
  source 1..23: mol_type = other DNA
ccgggtcgccccgagtctcaggg

SEQ ID NO: 5179 - DNA, 23 bp, synthetic construct
  misc_feature 1..23: note = HLA-A targeting gRNA
  source 1..23: mol_type = other DNA
ccgggtcgccccgagtctcccgg

SEQ ID NO: 5180 - DNA, 23 bp, synthetic construct
  misc_feature 1..23: note = HLA-A targeting gRNA
  source 1..23: mol_type = other DNA
ccgggtcgccccgagtctccggg

SEQ ID NO: 5181 - DNA, 23 bp, synthetic construct
  misc_feature 1..23: note = HLA-A targeting gRNA
  source 1..23: mol_type = other DNA
ccgggtctcacaccctccagagg

SEQ ID NO: 5182 - DNA, 23 bp, synthetic construct
  misc_feature 1..23: note = HLA-A targeting gRNA
  source 1..23: mol_type = other DNA
ccgggtctcctcgagtctctagg

SEQ ID NO: 5183 - DNA, 23 bp, synthetic construct
  misc_feature 1..23: note = HLA-A targeting gRNA
  source 1..23: mol_type = other DNA
ccggtccgcctacgacggcaagg

SEQ ID NO: 5184 - DNA, 23 bp, synthetic construct
  misc_feature 1..23: note = HLA-A targeting gRNA
  source 1..23: mol_type = other DNA
ccggtctgagatccaccccgagg

SEQ ID NO: 5185 - DNA, 23 bp, synthetic construct
  misc_feature 1..23: note = HLA-A targeting gRNA
  source 1..23: mol_type = other DNA
ccggtctgagatcctccccgagg

SEQ ID NO: 5186 - DNA, 23 bp, synthetic construct
  misc_feature 1..23: note = HLA-A targeting gRNA
  source 1..23: mol_type = other DNA
ccggtgagtgaccccggcctggg

SEQ ID NO: 5187 - DNA, 23 bp, synthetic construct
  misc_feature 1..23: note = HLA-A targeting gRNA
  source 1..23: mol_type = other DNA
ccggtgagtgcgggatcgggagg

SEQ ID NO: 5188 - DNA, 23 bp, synthetic construct
  misc_feature 1..23: note = HLA-A targeting gRNA
  source 1..23: mol_type = other DNA
ccggtgagtgcggggtcggcagg

SEQ ID NO: 5189 - DNA, 23 bp, synthetic construct
  misc_feature 1..23: note = HLA-A targeting gRNA
  source 1..23: mol_type = other DNA
ccggtgagtgcggggtcgggagg

SEQ ID NO: 5190 - DNA, 23 bp, synthetic construct
  misc_feature 1..23: note = HLA-A targeting gRNA
  source 1..23: mol_type = other DNA
ccggtgagtgcggggttgggagg

SEQ ID NO: 5191 - DNA, 23 bp, synthetic construct
  misc_feature 1..23: note = HLA-A targeting gRNA
  source 1..23: mol_type = other DNA
ccggtgagtgcgggtcggcaggg

SEQ ID NO: 5192 - DNA, 23 bp, synthetic construct
  misc_feature 1..23: note = HLA-A targeting gRNA
  source 1..23: mol_type = other DNA
ccggtgagtgcgggtcgggaggg

SEQ ID NO: 5193 - DNA, 23 bp, synthetic construct
  misc_feature 1..23: note = HLA-A targeting gRNA
  source 1..23: mol_type = other DNA
ccgtacgtcggggttggggaggg

SEQ ID NO: 5194 - DNA, 23 bp, synthetic construct
  misc_feature 1..23: note = HLA-A targeting gRNA
  source 1..23: mol_type = other DNA
ccgtccgtgggggatgaggaggg

SEQ ID NO: 5195 - DNA, 23 bp, synthetic construct
  misc_feature 1..23: note = HLA-A targeting gRNA
  source 1..23: mol_type = other DNA
ccgtccgtgggggatggggaggg

SEQ ID NO: 5196 - DNA, 23 bp, synthetic construct
  misc_feature 1..23: note = HLA-A targeting gRNA
  source 1..23: mol_type = other DNA
ccgtcctcctgctgctctggggg

SEQ ID NO: 5197 - DNA, 23 bp, synthetic construct
  misc_feature 1..23: note = HLA-A targeting gRNA
  source 1..23: mol_type = other DNA
ccgtcctcggactcgcggcgtgg

SEQ ID NO: 5198 - DNA, 23 bp, synthetic construct
  misc_feature 1..23: note = HLA-A targeting gRNA
  source 1..23: mol_type = other DNA
ccgtgagtgaccccggcccgggg

SEQ ID NO: 5199 - DNA, 23 bp, synthetic construct
  misc_feature 1..23: note = HLA-A targeting gRNA
  source 1..23: mol_type = other DNA
ccgtggaggaggcgcccgtcggg

SEQ ID NO: 5200 - DNA, 23 bp, synthetic construct
  misc_feature 1..23: note = HLA-A targeting gRNA
  source 1..23: mol_type = other DNA
ccgtggtggttgtggtgttgggg

SEQ ID NO: 5201 - DNA, 23 bp, synthetic construct
  misc_feature 1..23: note = HLA-A targeting gRNA
  source 1..23: mol_type = other DNA
ccgtgtcccggcccggcagcggg

SEQ ID NO: 5202 - DNA, 23 bp, synthetic construct
  misc_feature 1..23: note = HLA-A targeting gRNA
  source 1..23: mol_type = other DNA
ccgtgtcccggcctggccgcggg

SEQ ID NO: 5203 - DNA, 23 bp, synthetic construct
  misc_feature 1..23: note = HLA-A targeting gRNA
  source 1..23: mol_type = other DNA
ccgtgtcctggcccggccgcggg

SEQ ID NO: 5204 - DNA, 23 bp, synthetic construct
  misc_feature 1..23: note = HLA-A targeting gRNA
  source 1..23: mol_type = other DNA
ccgttctcaggatggtcacatgg

SEQ ID NO: 5205 - DNA, 23 bp, synthetic construct
  misc_feature 1..23: note = HLA-A targeting gRNA
  source 1..23: mol_type = other DNA
cctaaaccgaaaatgaaaccggg

SEQ ID NO: 5206 - DNA, 23 bp, synthetic construct
  misc_feature 1..23: note = HLA-A targeting gRNA
  source 1..23: mol_type = other DNA
cctaaactgaaaacgaaaccggg

SEQ ID NO: 5207 - DNA, 23 bp, synthetic construct
  misc_feature 1..23: note = HLA-A targeting gRNA
  source 1..23: mol_type = other DNA
cctaagctcctggaccgcggcgg

SEQ ID NO: 5208 - DNA, 23 bp, synthetic construct
  misc_feature 1..23: note = HLA-A targeting gRNA
  source 1..23: mol_type = other DNA
cctaaggtctgtccttagcaggg

SEQ ID NO: 5209 - DNA, 23 bp, synthetic construct
  misc_feature 1..23: note = HLA-A targeting gRNA
  source 1..23: mol_type = other DNA
cctacgggcgcctcctccgcggg

SEQ ID NO: 5210 - DNA, 23 bp, synthetic construct
  misc_feature 1..23: note = HLA-A targeting gRNA
  source 1..23: mol_type = other DNA
cctagagactcgaggagacccgg

SEQ ID NO: 5211 - DNA, 23 bp, synthetic construct
  misc_feature 1..23: note = HLA-A targeting gRNA
  source 1..23: mol_type = other DNA
cctagctgtcctaggagctatgg

SEQ ID NO: 5212 - DNA, 23 bp, synthetic construct
  misc_feature 1..23: note = HLA-A targeting gRNA
  source 1..23: mol_type = other DNA
cctagctgtcctaggagctgtgg

SEQ ID NO: 5213 - DNA, 23 bp, synthetic construct
  misc_feature 1..23: note = HLA-A targeting gRNA
  source 1..23: mol_type = other DNA
cctagctgtccttggagctgtgg

SEQ ID NO: 5214 - DNA, 23 bp, synthetic construct
  misc_feature 1..23: note = HLA-A targeting gRNA
  source 1..23: mol_type = other DNA
cctatctcctgtagatctcccgg

SEQ ID NO: 5215 - DNA, 23 bp, synthetic construct
  misc_feature 1..23: note = HLA-A targeting gRNA
  source 1..23: mol_type = other DNA
cctatgaggggactgggaggagg

SEQ ID NO: 5216 - DNA, 23 bp, synthetic construct
  misc_feature 1..23: note = HLA-A targeting gRNA
  source 1..23: mol_type = other DNA
cctcaactgaaaatgaaaccggg

SEQ ID NO: 5217 - DNA, 23 bp, synthetic construct
  misc_feature 1..23: note = HLA-A targeting gRNA
  source 1..23: mol_type = other DNA
cctcaaggagtgggagcctgggg

SEQ ID NO: 5218 - DNA, 23 bp, synthetic construct
  misc_feature 1..23: note = HLA-A targeting gRNA
  source 1..23: mol_type = other DNA
cctcacaagacagctgtctcagg

SEQ ID NO: 5219 - DNA, 23 bp, synthetic construct
  misc_feature 1..23: note = HLA-A targeting gRNA
  source 1..23: mol_type = other DNA
cctcacactcagtgtgtttgggg

SEQ ID NO: 5220 - DNA, 23 bp, synthetic construct
  misc_feature 1..23: note = HLA-A targeting gRNA
  source 1..23: mol_type = other DNA
cctcaccctgagatggagtaagg

SEQ ID NO: 5221 - DNA, 23 bp, synthetic construct
  misc_feature 1..23: note = HLA-A targeting gRNA
  source 1..23: mol_type = other DNA
cctcaccctgagctggggtaagg

SEQ ID NO: 5222 - DNA, 23 bp, synthetic construct
  misc_feature 1..23: note = HLA-A targeting gRNA
  source 1..23: mol_type = other DNA
cctcatgaagtgggagcctgggg

SEQ ID NO: 5223 - DNA, 23 bp, synthetic construct
  misc_feature 1..23: note = HLA-A targeting gRNA
  source 1..23: mol_type = other DNA
cctcatggagagggagcctgggg

SEQ ID NO: 5224 - DNA, 23 bp, synthetic construct
  misc_feature 1..23: note = HLA-A targeting gRNA
  source 1..23: mol_type = other DNA
cctcatggagtggaagcctgggg

SEQ ID NO: 5225 - DNA, 23 bp, synthetic construct
  misc_feature 1..23: note = HLA-A targeting gRNA
  source 1..23: mol_type = other DNA
cctcatggagtgggaacctgggg

SEQ ID NO: 5226 - DNA, 23 bp, synthetic construct
  misc_feature 1..23: note = HLA-A targeting gRNA
  source 1..23: mol_type = other DNA
cctcatggagtgggagactgggg

SEQ ID NO: 5227 - DNA, 23 bp, synthetic construct
  misc_feature 1..23: note = HLA-A targeting gRNA
  source 1..23: mol_type = other DNA
cctcatggtcagagacgagatgg

SEQ ID NO: 5228 - DNA, 23 bp, synthetic construct
  misc_feature 1..23: note = HLA-A targeting gRNA
  source 1..23: mol_type = other DNA
cctcatggtcagagacgggatgg

SEQ ID NO: 5229 - DNA, 23 bp, synthetic construct
  misc_feature 1..23: note = HLA-A targeting gRNA
  source 1..23: mol_type = other DNA
cctcatggtcagagacggggtgg

SEQ ID NO: 5230 - DNA, 23 bp, synthetic construct
  misc_feature 1..23: note = HLA-A targeting gRNA
  source 1..23: mol_type = other DNA
cctcatggtcagagagggggtgg

SEQ ID NO: 5231 - DNA, 23 bp, synthetic construct
  misc_feature 1..23: note = HLA-A targeting gRNA
  source 1..23: mol_type = other DNA
cctcatggtcagagatgggatgg

SEQ ID NO: 5232 - DNA, 23 bp, synthetic construct
  misc_feature 1..23: note = HLA-A targeting gRNA
  source 1..23: mol_type = other DNA
cctccagaggatgtacggctggg

SEQ ID NO: 5233 - DNA, 23 bp, synthetic construct
  misc_feature 1..23: note = HLA-A targeting gRNA
  source 1..23: mol_type = other DNA
cctcccaaccccgcactcacagg

SEQ ID NO: 5234 - DNA, 23 bp, synthetic construct
  misc_feature 1..23: note = HLA-A targeting gRNA
  source 1..23: mol_type = other DNA
cctcccaaccccgcactcaccgg

SEQ ID NO: 5235 - DNA, 23 bp, synthetic construct
  misc_feature 1..23: note = HLA-A targeting gRNA
  source 1..23: mol_type = other DNA
cctcccaacctcgcactcacagg

SEQ ID NO: 5236 - DNA, 23 bp, synthetic construct
  misc_feature 1..23: note = HLA-A targeting gRNA
  source 1..23: mol_type = other DNA
cctcccctttgtgacttcaaggg

SEQ ID NO: 5237 - DNA, 23 bp, synthetic construct
  misc_feature 1..23: note = HLA-A targeting gRNA
  source 1..23: mol_type = other DNA
cctcccgaccccgcactcaccgg

SEQ ID NO: 5238 - DNA, 23 bp, synthetic construct
  misc_feature 1..23: note = HLA-A targeting gRNA
  source 1..23: mol_type = other DNA
cctcccgatcccgcactcaccgg

SEQ ID NO: 5239 - DNA, 23 bp, synthetic construct
  misc_feature 1..23: note = HLA-A targeting gRNA
  source 1..23: mol_type = other DNA
cctcctaaccccgcactcacagg

SEQ ID NO: 5240 - DNA, 23 bp, synthetic construct
  misc_feature 1..23: note = HLA-A targeting gRNA
  source 1..23: mol_type = other DNA
cctcctcacattaggctaacagg

SEQ ID NO: 5241 - DNA, 23 bp, synthetic construct
  misc_feature 1..23: note = HLA-A targeting gRNA
  source 1..23: mol_type = other DNA
cctcctcacattatgctaacagg

SEQ ID NO: 5242 - DNA, 23 bp, synthetic construct
  misc_feature 1..23: note = HLA-A targeting gRNA
  source 1..23: mol_type = other DNA
cctcctcccagtcccctcatagg

SEQ ID NO: 5243 - DNA, 23 bp, synthetic construct
  misc_feature 1..23: note = HLA-A targeting gRNA
  source 1..23: mol_type = other DNA
cctcctccctgtcccctcacagg

SEQ ID NO: 5244 - DNA, 23 bp, synthetic construct
  misc_feature 1..23: note = HLA-A targeting gRNA
  source 1..23: mol_type = other DNA
cctcctccgcgggcataaccagg

SEQ ID NO: 5245 - DNA, 23 bp, synthetic construct
  misc_feature 1..23: note = HLA-A targeting gRNA
  source 1..23: mol_type = other DNA
cctcctccgcgggtaccaccagg

SEQ ID NO: 5246 - DNA, 23 bp, synthetic construct
  misc_feature 1..23: note = HLA-A targeting gRNA
  source 1..23: mol_type = other DNA
cctcctccgcgggtatgaccagg

SEQ ID NO: 5247 - DNA, 23 bp, synthetic construct
  misc_feature 1..23: note = HLA-A targeting gRNA
  source 1..23: mol_type = other DNA
cctcctcctgctgctctaggggg

SEQ ID NO: 5248 - DNA, 23 bp, synthetic construct
  misc_feature 1..23: note = HLA-A targeting gRNA
  source 1..23: mol_type = other DNA
cctcctcctgctgctctgggggg

SEQ ID NO: 5249 - DNA, 23 bp, synthetic construct
  misc_feature 1..23: note = HLA-A targeting gRNA
  source 1..23: mol_type = other DNA
cctcgaccgcagagagccccagg

SEQ ID NO: 5250 - DNA, 23 bp, synthetic construct
  misc_feature 1..23: note = HLA-A targeting gRNA
  source 1..23: mol_type = other DNA
cctcgaccggcgagagccccagg

SEQ ID NO: 5251 - DNA, 23 bp, synthetic construct
  misc_feature 1..23: note = HLA-A targeting gRNA
  source 1..23: mol_type = other DNA
cctcgatggttgtggtgttgggg

SEQ ID NO: 5252 - DNA, 23 bp, synthetic construct
  misc_feature 1..23: note = HLA-A targeting gRNA
  source 1..23: mol_type = other DNA
cctcggggaggatctcagaccgg

SEQ ID NO: 5253 - DNA, 23 bp, synthetic construct
  misc_feature 1..23: note = HLA-A targeting gRNA
  source 1..23: mol_type = other DNA
cctcggggtggatctcagaccgg

SEQ ID NO: 5254 - DNA, 23 bp, synthetic construct
  misc_feature 1..23: note = HLA-A targeting gRNA
  source 1..23: mol_type = other DNA
cctcggggtggatctcagacggg

SEQ ID NO: 5255 - DNA, 23 bp, synthetic construct
  misc_feature 1..23: note = HLA-A targeting gRNA
  source 1..23: mol_type = other DNA
cctctatggagaggagcgagggg

SEQ ID NO: 5256 - DNA, 23 bp, synthetic construct
  misc_feature 1..23: note = HLA-A targeting gRNA
  source 1..23: mol_type = other DNA
cctctcggtcagtctgtgcctgg

SEQ ID NO: 5257 - DNA, 23 bp, synthetic construct
  misc_feature 1..23: note = HLA-A targeting gRNA
  source 1..23: mol_type = other DNA
cctctgccgggaggagcgagggg

SEQ ID NO: 5258 - DNA, 23 bp, synthetic construct
  misc_feature 1..23: note = HLA-A targeting gRNA
  source 1..23: mol_type = other DNA
cctctgcggagaggagcgagggg

SEQ ID NO: 5259 - DNA, 23 bp, synthetic construct
  misc_feature 1..23: note = HLA-A targeting gRNA
  source 1..23: mol_type = other DNA
cctctgcggagaggagggagggg

SEQ ID NO: 5260 - DNA, 23 bp, synthetic construct
  misc_feature 1..23: note = HLA-A targeting gRNA
  source 1..23: mol_type = other DNA
cctctgctgagaggagcgagggg

SEQ ID NO: 5261 - DNA, 23 bp, synthetic construct
  misc_feature 1..23: note = HLA-A targeting gRNA
  source 1..23: mol_type = other DNA
cctctggagggtgtgagacccgg

SEQ ID NO: 5262 - DNA, 23 bp, synthetic construct
  misc_feature 1..23: note = HLA-A targeting gRNA
  source 1..23: mol_type = other DNA
cctctggggagaggagcgagggg

SEQ ID NO: 5263 - DNA, 23 bp, synthetic construct
  misc_feature 1..23: note = HLA-A targeting gRNA
  source 1..23: mol_type = other DNA
cctctgtagggaggagcaagggg

SEQ ID NO: 5264 - DNA, 23 bp, synthetic construct
  misc_feature 1..23: note = HLA-A targeting gRNA
  source 1..23: mol_type = other DNA
cctctgtggggaggagagagggg

SEQ ID NO: 5265 - DNA, 23 bp, synthetic construct
  misc_feature 1..23: note = HLA-A targeting gRNA
  source 1..23: mol_type = other DNA
cctctgtggggaggagcgagggg

SEQ ID NO: 5266 - DNA, 23 bp, synthetic construct
  misc_feature 1..23: note = HLA-A targeting gRNA
  source 1..23: mol_type = other DNA
cctgaccacagctgccgcagtgg

SEQ ID NO: 5267 - DNA, 23 bp, synthetic construct
  misc_feature 1..23: note = HLA-A targeting gRNA
  source 1..23: mol_type = other DNA
cctgaccacagctgctgcagtgg

SEQ ID NO: 5268 - DNA, 23 bp, synthetic construct
  misc_feature 1..23: note = HLA-A targeting gRNA
  source 1..23: mol_type = other DNA
cctgagacagctgcctgtgtggg

SEQ ID NO: 5269 - DNA, 23 bp, synthetic construct
  misc_feature 1..23: note = HLA-A targeting gRNA
  source 1..23: mol_type = other DNA
cctgagacagctgtcttgtgagg

SEQ ID NO: 5270 - DNA, 23 bp, synthetic construct
  misc_feature 1..23: note = HLA-A targeting gRNA
  source 1..23: mol_type = other DNA
cctgagactcggggcgacccggg

SEQ ID NO: 5271 - DNA, 23 bp, synthetic construct
  misc_feature 1..23: note = HLA-A targeting gRNA
  source 1..23: mol_type = other DNA
cctgagatggagtaaggaggggg

SEQ ID NO: 5272 - DNA, 23 bp, synthetic construct
  misc_feature 1..23: note = HLA-A targeting gRNA
  source 1..23: mol_type = other DNA
cctgagatggggtaaggaggggg

SEQ ID NO: 5273 - DNA, 23 bp, synthetic construct
  misc_feature 1..23: note = HLA-A targeting gRNA
  source 1..23: mol_type = other DNA
cctgagctcccggaccgcggcgg

SEQ ID NO: 5274 - DNA, 23 bp, synthetic construct
  misc_feature 1..23: note = HLA-A targeting gRNA
  source 1..23: mol_type = other DNA
cctgagctcctggaccgccgcgg

SEQ ID NO: 5275 - DNA, 23 bp, synthetic construct
  misc_feature 1..23: note = HLA-A targeting gRNA
  source 1..23: mol_type = other DNA
cctgagctcctggaccgcggcgg

SEQ ID NO: 5276 - DNA, 23 bp, synthetic construct
  misc_feature 1..23: note = HLA-A targeting gRNA
  source 1..23: mol_type = other DNA
cctgagctcctggatcgcggcgg

SEQ ID NO: 5277 - DNA, 23 bp, synthetic construct
  misc_feature 1..23: note = HLA-A targeting gRNA
  source 1..23: mol_type = other DNA
cctgcagcgcgcgggtaccaggg

SEQ ID NO: 5278 - DNA, 23 bp, synthetic construct
  misc_feature 1..23: note = HLA-A targeting gRNA
  source 1..23: mol_type = other DNA
cctgcatctcagtcccacacagg

SEQ ID NO: 5279 - DNA, 23 bp, synthetic construct
  misc_feature 1..23: note = HLA-A targeting gRNA
  source 1..23: mol_type = other DNA
cctgccctcctggaccgccgcgg

SEQ ID NO: 5280 - DNA, 23 bp, synthetic construct
  misc_feature 1..23: note = HLA-A targeting gRNA
  source 1..23: mol_type = other DNA
cctgccgaccccgcactcaccgg

SEQ ID NO: 5281 - DNA, 23 bp, synthetic construct
  misc_feature 1..23: note = HLA-A targeting gRNA
  source 1..23: mol_type = other DNA
cctgcgctcctggaccgccgcgg

SEQ ID NO: 5282 - DNA, 23 bp, synthetic construct
  misc_feature 1..23: note = HLA-A targeting gRNA
  source 1..23: mol_type = other DNA
cctgcgctcctggaccgccgggg

SEQ ID NO: 5283 - DNA, 23 bp, synthetic construct
  misc_feature 1..23: note = HLA-A targeting gRNA
  source 1..23: mol_type = other DNA
cctgcgctcctggaccgctgcgg

SEQ ID NO: 5284 - DNA, 23 bp, synthetic construct
  misc_feature 1..23: note = HLA-A targeting gRNA
  source 1..23: mol_type = other DNA
cctgcgctcctggactgccgcgg

SEQ ID NO: 5285 - DNA, 23 bp, synthetic construct
  misc_feature 1..23: note = HLA-A targeting gRNA
  source 1..23: mol_type = other DNA
cctgcgctcctggattgccgcgg

SEQ ID NO: 5286 - DNA, 23 bp, synthetic construct
  misc_feature 1..23: note = HLA-A targeting gRNA
  source 1..23: mol_type = other DNA
cctgcgtccaggctggtgtctgg

SEQ ID NO: 5287 - DNA, 23 bp, synthetic construct
  misc_feature 1..23: note = HLA-A targeting gRNA
  source 1..23: mol_type = other DNA
cctgcgtccaggctggtgtttgg

SEQ ID NO: 5288 - DNA, 23 bp, synthetic construct
  misc_feature 1..23: note = HLA-A targeting gRNA
  source 1..23: mol_type = other DNA
cctgcgtccgggctggtgtctgg

SEQ ID NO: 5289 - DNA, 23 bp, synthetic construct
  misc_feature 1..23: note = HLA-A targeting gRNA
  source 1..23: mol_type = other DNA
cctgctccacccacggcgcccgg

SEQ ID NO: 5290 - DNA, 23 bp, synthetic construct
  misc_feature 1..23: note = HLA-A targeting gRNA
  source 1..23: mol_type = other DNA
cctgctctatccacggcgcccgg

SEQ ID NO: 5291 - DNA, 23 bp, synthetic construct
  misc_feature 1..23: note = HLA-A targeting gRNA
  source 1..23: mol_type = other DNA
cctgctctatccatggcgcccgg

SEQ ID NO: 5292 - DNA, 23 bp, synthetic construct
  misc_feature 1..23: note = HLA-A targeting gRNA
  source 1..23: mol_type = other DNA
cctgctctatccatggctcccgg

SEQ ID NO: 5293 - DNA, 23 bp, synthetic construct
  misc_feature 1..23: note = HLA-A targeting gRNA
  source 1..23: mol_type = other DNA
cctgctgaagggctccagaaggg

SEQ ID NO: 5294 - DNA, 23 bp, synthetic construct
  misc_feature 1..23: note = HLA-A targeting gRNA
  source 1..23: mol_type = other DNA
cctgctgctctagggggcagtgg

SEQ ID NO: 5295 - DNA, 23 bp, synthetic construct
  misc_feature 1..23: note = HLA-A targeting gRNA
  source 1..23: mol_type = other DNA
cctgctgctctcggcggccctgg

SEQ ID NO: 5296 - DNA, 23 bp, synthetic construct
  misc_feature 1..23: note = HLA-A targeting gRNA
  source 1..23: mol_type = other DNA
cctgctgctctcgggagccctgg

SEQ ID NO: 5297 - DNA, 23 bp, synthetic construct
  misc_feature 1..23: note = HLA-A targeting gRNA
  source 1..23: mol_type = other DNA
cctgctgctctcgggaggcctgg

SEQ ID NO: 5298 - DNA, 23 bp, synthetic construct
  misc_feature 1..23: note = HLA-A targeting gRNA
  source 1..23: mol_type = other DNA
cctgctgctctcgggagtcctgg

SEQ ID NO: 5299 - DNA, 23 bp, synthetic construct
  misc_feature 1..23: note = HLA-A targeting gRNA
  source 1..23: mol_type = other DNA
cctgctgctctggggggcagtgg

SEQ ID NO: 5300 - DNA, 23 bp, synthetic construct
  misc_feature 1..23: note = HLA-A targeting gRNA
  source 1..23: mol_type = other DNA
cctgctgctctggggggccctgg

SEQ ID NO: 5301 - DNA, 23 bp, synthetic construct
  misc_feature 1..23: note = HLA-A targeting gRNA
  source 1..23: mol_type = other DNA
cctggacgcggcggacaccgcgg

SEQ ID NO: 5302 - DNA, 23 bp, synthetic construct
  misc_feature 1..23: note = HLA-A targeting gRNA
  source 1..23: mol_type = other DNA
cctggccctgaccgagacctggg

SEQ ID NO: 5303 - DNA, 23 bp, synthetic construct
  misc_feature 1..23: note = HLA-A targeting gRNA
  source 1..23: mol_type = other DNA
cctggccctgatcgagacctggg

SEQ ID NO: 5304 - DNA, 23 bp, synthetic construct
  misc_feature 1..23: note = HLA-A targeting gRNA
  source 1..23: mol_type = other DNA
cctggctgtcctagcagttgtgg

SEQ ID NO: 5305 - DNA, 23 bp, synthetic construct
  misc_feature 1..23: note = HLA-A targeting gRNA
  source 1..23: mol_type = other DNA
cctggctgtcctggctgtcctgg

SEQ ID NO: 5306 - DNA, 23 bp, synthetic construct
  misc_feature 1..23: note = HLA-A targeting gRNA
  source 1..23: mol_type = other DNA
cctgggcactgttgctgcctggg

SEQ ID NO: 5307 - DNA, 23 bp, synthetic construct
  misc_feature 1..23: note = HLA-A targeting gRNA
  source 1..23: mol_type = other DNA
cctgggcactgttgctggctggg

SEQ ID NO: 5308 - DNA, 23 bp, synthetic construct
  misc_feature 1..23: note = HLA-A targeting gRNA
  source 1..23: mol_type = other DNA
cctggggctctcgccggtcgagg

SEQ ID NO: 5309 - DNA, 23 bp, synthetic construct
  misc_feature 1..23: note = HLA-A targeting gRNA
  source 1..23: mol_type = other DNA
cctggggctctctgcggtcgagg

SEQ ID NO: 5310 - DNA, 23 bp, synthetic construct
  misc_feature 1..23: note = HLA-A targeting gRNA
  source 1..23: mol_type = other DNA
cctggggcttgaaaccccagtgg

SEQ ID NO: 5311 - DNA, 23 bp, synthetic construct
  misc_feature 1..23: note = HLA-A targeting gRNA
  source 1..23: mol_type = other DNA
cctggtacccgcgcgctgcaggg

SEQ ID NO: 5312 - DNA, 23 bp, synthetic construct
  misc_feature 1..23: note = HLA-A targeting gRNA
  source 1..23: mol_type = other DNA
cctggtcatacccgcggaggagg

SEQ ID NO: 5313 - DNA, 23 bp, synthetic construct
  misc_feature 1..23: note = HLA-A targeting gRNA
  source 1..23: mol_type = other DNA
cctggtggtacccgcggaggagg

SEQ ID NO: 5314 - DNA, 23 bp, synthetic construct
  misc_feature 1..23: note = HLA-A targeting gRNA
  source 1..23: mol_type = other DNA
cctggttatgcccgcggaggagg

SEQ ID NO: 5315 - DNA, 23 bp, synthetic construct
  misc_feature 1..23: note = HLA-A targeting gRNA
  source 1..23: mol_type = other DNA
cctgtgaggggacagggaggagg

SEQ ID NO: 5316 - DNA, 23 bp, synthetic construct
  misc_feature 1..23: note = HLA-A targeting gRNA
  source 1..23: mol_type = other DNA
cctgtgagtgcgaggttgggagg

SEQ ID NO: 5317 - DNA, 23 bp, synthetic construct
  misc_feature 1..23: note = HLA-A targeting gRNA
  source 1..23: mol_type = other DNA
cctgtgagtgcggggttaggagg

SEQ ID NO: 5318 - DNA, 23 bp, synthetic construct
  misc_feature 1..23: note = HLA-A targeting gRNA
  source 1..23: mol_type = other DNA
cctgtgagtgcggggttgggagg

SEQ ID NO: 5319 - DNA, 23 bp, synthetic construct
  misc_feature 1..23: note = HLA-A targeting gRNA
  source 1..23: mol_type = other DNA
cctgtgtccaggctggcgtctgg

SEQ ID NO: 5320 - DNA, 23 bp, synthetic construct
  misc_feature 1..23: note = HLA-A targeting gRNA
  source 1..23: mol_type = other DNA
cctgtgtgggactgagatgcagg

SEQ ID NO: 5321 - DNA, 23 bp, synthetic construct
  misc_feature 1..23: note = HLA-A targeting gRNA
  source 1..23: mol_type = other DNA
cctgttagcataatgtgaggagg

SEQ ID NO: 5322 - DNA, 23 bp, synthetic construct
  misc_feature 1..23: note = HLA-A targeting gRNA
  source 1..23: mol_type = other DNA
cctgttagcctaatgtgaggagg

SEQ ID NO: 5323 - DNA, 23 bp, synthetic construct
  misc_feature 1..23: note = HLA-A targeting gRNA
  source 1..23: mol_type = other DNA
ccttaatggttgtggtgttgggg

SEQ ID NO: 5324 - DNA, 23 bp, synthetic construct
  misc_feature 1..23: note = HLA-A targeting gRNA
  source 1..23: mol_type = other DNA
ccttaccccagctcagggtgagg

SEQ ID NO: 5325 - DNA, 23 bp, synthetic construct
  misc_feature 1..23: note = HLA-A targeting gRNA
  source 1..23: mol_type = other DNA
ccttactccatctcagggtgagg

SEQ ID NO: 5326 - DNA, 23 bp, synthetic construct
  misc_feature 1..23: note = HLA-A targeting gRNA
  source 1..23: mol_type = other DNA
ccttcatgttccgtgtctcccgg

SEQ ID NO: 5327 - DNA, 23 bp, synthetic construct
  misc_feature 1..23: note = HLA-A targeting gRNA
  source 1..23: mol_type = other DNA
ccttctggagcccttcagcaggg

SEQ ID NO: 5328 - DNA, 23 bp, synthetic construct
  misc_feature 1..23: note = HLA-A targeting gRNA
  source 1..23: mol_type = other DNA
ccttctggagcccttcagccggg

SEQ ID NO: 5329 - DNA, 23 bp, synthetic construct
  misc_feature 1..23: note = HLA-A targeting gRNA
  source 1..23: mol_type = other DNA
ccttgatgattatggtgttgggg

SEQ ID NO: 5330 - DNA, 23 bp, synthetic construct
  misc_feature 1..23: note = HLA-A targeting gRNA
  source 1..23: mol_type = other DNA
ccttgatggttgtggtgttgggg

SEQ ID NO: 5331 - DNA, 23 bp, synthetic construct
  misc_feature 1..23: note = HLA-A targeting gRNA
  source 1..23: mol_type = other DNA
ccttgcagatctgtgtctcccgg

SEQ ID NO: 5332 - DNA, 23 bp, synthetic construct
  misc_feature 1..23: note = HLA-A targeting gRNA
  source 1..23: mol_type = other DNA
ccttgcagatctgtgtgttccgg

SEQ ID NO: 5333 - DNA, 23 bp, synthetic construct
  misc_feature 1..23: note = HLA-A targeting gRNA
  source 1..23: mol_type = other DNA
ccttgccatcgtaggcgaactgg

SEQ ID NO: 5334 - DNA, 23 bp, synthetic construct
  misc_feature 1..23: note = HLA-A targeting gRNA
  source 1..23: mol_type = other DNA
ccttgccgtcctaggcggactgg

SEQ ID NO: 5335 - DNA, 23 bp, synthetic construct
  misc_feature 1..23: note = HLA-A targeting gRNA
  source 1..23: mol_type = other DNA
ccttgccgtcgcaggcggactgg

SEQ ID NO: 5336 - DNA, 23 bp, synthetic construct
  misc_feature 1..23: note = HLA-A targeting gRNA
  source 1..23: mol_type = other DNA
ccttgccgtcgtaggagtactgg

SEQ ID NO: 5337 - DNA, 23 bp, synthetic construct
  misc_feature 1..23: note = HLA-A targeting gRNA
  source 1..23: mol_type = other DNA
ccttgccgtcgtaggcaaactgg

SEQ ID NO: 5338 - DNA, 23 bp, synthetic construct
  misc_feature 1..23: note = HLA-A targeting gRNA
  source 1..23: mol_type = other DNA
ccttgccgtcgtaggcggaccgg

SEQ ID NO: 5339 - DNA, 23 bp, synthetic construct
  misc_feature 1..23: note = HLA-A targeting gRNA
  source 1..23: mol_type = other DNA
ccttgccgtcgtaggcggactgg

SEQ ID NO: 5340 - DNA, 23 bp, synthetic construct
  misc_feature 1..23: note = HLA-A targeting gRNA
  source 1..23: mol_type = other DNA
ccttgccgtcgtaggcgtcctgg

SEQ ID NO: 5341 - DNA, 23 bp, synthetic construct
  misc_feature 1..23: note = HLA-A targeting gRNA
  source 1..23: mol_type = other DNA
ccttgccgtcgtaggctaactgg

SEQ ID NO: 5342 - DNA, 23 bp, synthetic construct
  misc_feature 1..23: note = HLA-A targeting gRNA
  source 1..23: mol_type = other DNA
ccttgccgtcttaggcggactgg

SEQ ID NO: 5343 - DNA, 23 bp, synthetic construct
  misc_feature 1..23: note = HLA-A targeting gRNA
  source 1..23: mol_type = other DNA
ccttggggtggatctcagacggg

SEQ ID NO: 5344 - DNA, 23 bp, synthetic construct
  misc_feature 1..23: note = HLA-A targeting gRNA
  source 1..23: mol_type = other DNA
ccttggtggttgtggcgttgggg

SEQ ID NO: 5345 - DNA, 23 bp, synthetic construct
  misc_feature 1..23: note = HLA-A targeting gRNA
  source 1..23: mol_type = other DNA
ccttggtggttgtggtgttgggg

SEQ ID NO: 5346 - DNA, 23 bp, synthetic construct
  misc_feature 1..23: note = HLA-A targeting gRNA
  source 1..23: mol_type = other DNA
ccttgtagatctgtgtgttccgg

SEQ ID NO: 5347 - DNA, 23 bp, synthetic construct
  misc_feature 1..23: note = HLA-A targeting gRNA
  source 1..23: mol_type = other DNA
ccttgtggtcaccgtagctgtgg

SEQ ID NO: 5348 - DNA, 23 bp, synthetic construct
  misc_feature 1..23: note = HLA-A targeting gRNA
  source 1..23: mol_type = other DNA
cctttacccggtttcattttcgg

SEQ ID NO: 5349 - DNA, 23 bp, synthetic construct
  misc_feature 1..23: note = HLA-A targeting gRNA
  source 1..23: mol_type = other DNA
cgaaaccgggtaaaggtgactgg

SEQ ID NO: 5350 - DNA, 23 bp, synthetic construct
  misc_feature 1..23: note = HLA-A targeting gRNA
  source 1..23: mol_type = other DNA
cgaactggtcatacccgcggagg

SEQ ID NO: 5351 - DNA, 23 bp, synthetic construct
  misc_feature 1..23: note = HLA-A targeting gRNA
  source 1..23: mol_type = other DNA
cgaactggtcatgcccgcggagg

SEQ ID NO: 5352 - DNA, 23 bp, synthetic construct
  misc_feature 1..23: note = HLA-A targeting gRNA
  source 1..23: mol_type = other DNA
cgaactggttatacccgcggagg

SEQ ID NO: 5353 - DNA, 23 bp, synthetic construct
  misc_feature 1..23: note = HLA-A targeting gRNA
  source 1..23: mol_type = other DNA
cgaactggttatacccgtggagg

SEQ ID NO: 5354 - DNA, 23 bp, synthetic construct
  misc_feature 1..23: note = HLA-A targeting gRNA
  source 1..23: mol_type = other DNA
cgaactggttatgcccgcggagg

SEQ ID NO: 5355 - DNA, 23 bp, synthetic construct
  misc_feature 1..23: note = HLA-A targeting gRNA
  source 1..23: mol_type = other DNA
cgaagcccctcaccctgagatgg

SEQ ID NO: 5356 - DNA, 23 bp, synthetic construct
  misc_feature 1..23: note = HLA-A targeting gRNA
  source 1..23: mol_type = other DNA
cgaagtcccaggccccgggcggg

SEQ ID NO: 5357 - DNA, 23 bp, synthetic construct
  misc_feature 1..23: note = HLA-A targeting gRNA
  source 1..23: mol_type = other DNA
cgaagtcccaggtcccggacggg

SEQ ID NO: 5358 - DNA, 23 bp, synthetic construct
  misc_feature 1..23: note = HLA-A targeting gRNA
  source 1..23: mol_type = other DNA
cgaagtcccaggtcccgggcggg

SEQ ID NO: 5359 - DNA, 23 bp, synthetic construct
  misc_feature 1..23: note = HLA-A targeting gRNA
  source 1..23: mol_type = other DNA
cgaagtcccatgtcccggacggg

SEQ ID NO: 5360 - DNA, 23 bp, synthetic construct
  misc_feature 1..23: note = HLA-A targeting gRNA
  source 1..23: mol_type = other DNA
cgaccaacccgcggggattttgg

SEQ ID NO: 5361 - DNA, 23 bp, synthetic construct
  misc_feature 1..23: note = HLA-A targeting gRNA
  source 1..23: mol_type = other DNA
cgaccccgcgagtccgagagggg

SEQ ID NO: 5362 - DNA, 23 bp, synthetic construct
  misc_feature 1..23: note = HLA-A targeting gRNA
  source 1..23: mol_type = other DNA
cgacccctccccatcccccacgg

SEQ ID NO: 5363 - DNA, 23 bp, synthetic construct
  misc_feature 1..23: note = HLA-A targeting gRNA
  source 1..23: mol_type = other DNA
cgacccctcctcatcccccacgg

SEQ ID NO: 5364 - DNA, 23 bp, synthetic construct
  misc_feature 1..23: note = HLA-A targeting gRNA
  source 1..23: mol_type = other DNA
cgacccgcactcacccgcccagg

SEQ ID NO: 5365 - DNA, 23 bp, synthetic construct
  misc_feature 1..23: note = HLA-A targeting gRNA
  source 1..23: mol_type = other DNA
cgacccgcactcaccggcccagg

SEQ ID NO: 5366 - DNA, 23 bp, synthetic construct
  misc_feature 1..23: note = HLA-A targeting gRNA
  source 1..23: mol_type = other DNA
cgacctataggagatggggaagg

SEQ ID NO: 5367 - DNA, 23 bp, synthetic construct
  misc_feature 1..23: note = HLA-A targeting gRNA
  source 1..23: mol_type = other DNA
cgacctctccccatcccccacgg

SEQ ID NO: 5368 - DNA, 23 bp, synthetic construct
  misc_feature 1..23: note = HLA-A targeting gRNA
  source 1..23: mol_type = other DNA
cgacgccacgagtccgaggaagg

SEQ ID NO: 5369 - DNA, 23 bp, synthetic construct
  misc_feature 1..23: note = HLA-A targeting gRNA
  source 1..23: mol_type = other DNA
cgacgccacgagtccgaggatgg

SEQ ID NO: 5370 - DNA, 23 bp, synthetic construct
  misc_feature 1..23: note = HLA-A targeting gRNA
  source 1..23: mol_type = other DNA
cgacgccgcaagtccgagagggg

SEQ ID NO: 5371 - DNA, 23 bp, synthetic construct
  misc_feature 1..23: note = HLA-A targeting gRNA
  source 1..23: mol_type = other DNA
cgacgccgcgagtccaagagggg

SEQ ID NO: 5372 - DNA, 23 bp, synthetic construct
  misc_feature 1..23: note = HLA-A targeting gRNA
  source 1..23: mol_type = other DNA
cgacgccgcgagtccgagaaggg

SEQ ID NO: 5373 - DNA, 23 bp, synthetic construct
  misc_feature 1..23: note = HLA-A targeting gRNA
  source 1..23: mol_type = other DNA
cgacgccgcgagtccgagagagg

SEQ ID NO: 5374 - DNA, 23 bp, synthetic construct
  misc_feature 1..23: note = HLA-A targeting gRNA
  source 1..23: mol_type = other DNA
cgacgccgcgagtccgagagggg

SEQ ID NO: 5375 - DNA, 23 bp, synthetic construct
  misc_feature 1..23: note = HLA-A targeting gRNA
  source 1..23: mol_type = other DNA
cgacgccgcgagtccgaggaagg

SEQ ID NO: 5376 - DNA, 23 bp, synthetic construct
  misc_feature 1..23: note = HLA-A targeting gRNA
  source 1..23: mol_type = other DNA
cgacgccgcgagtccgaggacgg

SEQ ID NO: 5377 - DNA, 23 bp, synthetic construct
  misc_feature 1..23: note = HLA-A targeting gRNA
  source 1..23: mol_type = other DNA
cgacgccgcgagtccgaggatgg

SEQ ID NO: 5378 - DNA, 23 bp, synthetic construct
  misc_feature 1..23: note = HLA-A targeting gRNA
  source 1..23: mol_type = other DNA
cgacgccgcgagtccgagggggg

SEQ ID NO: 5379 - DNA, 23 bp, synthetic construct
  misc_feature 1..23: note = HLA-A targeting gRNA
  source 1..23: mol_type = other DNA
cgacgctgcgagtccgaggacgg

SEQ ID NO: 5380 - DNA, 23 bp, synthetic construct
  misc_feature 1..23: note = HLA-A targeting gRNA
  source 1..23: mol_type = other DNA
cgactccgcgagtccaagagggg

SEQ ID NO: 5381 - DNA, 23 bp, synthetic construct
  misc_feature 1..23: note = HLA-A targeting gRNA
  source 1..23: mol_type = other DNA
cgagagaggagccgcgggcgcgg

SEQ ID NO: 5382 - DNA, 23 bp, synthetic construct
  misc_feature 1..23: note = HLA-A targeting gRNA
  source 1..23: mol_type = other DNA
cgagagccttgtctgcattgggg

SEQ ID NO: 5383 - DNA, 23 bp, synthetic construct
  misc_feature 1..23: note = HLA-A targeting gRNA
  source 1..23: mol_type = other DNA
cgagatccgccccgaggccgcgg

SEQ ID NO: 5384 - DNA, 23 bp, synthetic construct
  misc_feature 1..23: note = HLA-A targeting gRNA
  source 1..23: mol_type = other DNA
cgagcagctgagagcctacctgg

SEQ ID NO: 5385 - DNA, 23 bp, synthetic construct
  misc_feature 1..23: note = HLA-A targeting gRNA
  source 1..23: mol_type = other DNA
cgagggccgcgtctgcaatgggg

SEQ ID NO: 5386 - DNA, 23 bp, synthetic construct
  misc_feature 1..23: note = HLA-A targeting gRNA
  source 1..23: mol_type = other DNA
cgagggccgcgtctgcattgggg

SEQ ID NO: 5387 - DNA, 23 bp, synthetic construct
  misc_feature 1..23: note = HLA-A targeting gRNA
  source 1..23: mol_type = other DNA
cgagtccaagaggggagccgcgg

SEQ ID NO: 5388 - DNA, 23 bp, synthetic construct
  misc_feature 1..23: note = HLA-A targeting gRNA
  source 1..23: mol_type = other DNA
cgagtccgagagaggagccgcgg

SEQ ID NO: 5389 - DNA, 23 bp, synthetic construct
  misc_feature 1..23: note = HLA-A targeting gRNA
  source 1..23: mol_type = other DNA
cgagtccgagaggggagccccgg

SEQ ID NO: 5390 - DNA, 23 bp, synthetic construct
  misc_feature 1..23: note = HLA-A targeting gRNA
  source 1..23: mol_type = other DNA
cgagtccgagaggggagccgcgg

SEQ ID NO: 5391 - DNA, 23 bp, synthetic construct
  misc_feature 1..23: note = HLA-A targeting gRNA
  source 1..23: mol_type = other DNA
cgagtccgaggaaggagccgcgg

SEQ ID NO: 5392 - DNA, 23 bp, synthetic construct
  misc_feature 1..23: note = HLA-A targeting gRNA
  source 1..23: mol_type = other DNA
cgagtccgaggacggagccccgg

SEQ ID NO: 5393 - DNA, 23 bp, synthetic construct
  misc_feature 1..23: note = HLA-A targeting gRNA
  source 1..23: mol_type = other DNA
cgagtccgaggacggagccctgg

SEQ ID NO: 5394 - DNA, 23 bp, synthetic construct
  misc_feature 1..23: note = HLA-A targeting gRNA
  source 1..23: mol_type = other DNA
cgagtccgaggatggagccccgg

SEQ ID NO: 5395 - DNA, 23 bp, synthetic construct
  misc_feature 1..23: note = HLA-A targeting gRNA
  source 1..23: mol_type = other DNA
cgagtccgaggatggcgccccgg

SEQ ID NO: 5396 - DNA, 23 bp, synthetic construct
  misc_feature 1..23: note = HLA-A targeting gRNA
  source 1..23: mol_type = other DNA
cgagtccgaggatggcgccctgg

SEQ ID NO: 5397 - DNA, 23 bp, synthetic construct
  misc_feature 1..23: note = HLA-A targeting gRNA
  source 1..23: mol_type = other DNA
cgagtccgaggggggagccgcgg

SEQ ID NO: 5398 - DNA, 23 bp, synthetic construct
  misc_feature 1..23: note = HLA-A targeting gRNA
  source 1..23: mol_type = other DNA
cgagtccgggtgggtgactgggg

SEQ ID NO: 5399 - DNA, 23 bp, synthetic construct
  misc_feature 1..23: note = HLA-A targeting gRNA
  source 1..23: mol_type = other DNA
cgagtctctgagcggggaacagg

SEQ ID NO: 5400 - DNA, 23 bp, synthetic construct
  misc_feature 1..23: note = HLA-A targeting gRNA
  source 1..23: mol_type = other DNA
cgagtctctgagtggggaacagg

SEQ ID NO: 5401 - DNA, 23 bp, synthetic construct
  misc_feature 1..23: note = HLA-A targeting gRNA
  source 1..23: mol_type = other DNA
cgatctataggagatggggaagg

SEQ ID NO: 5402 - DNA, 23 bp, synthetic construct
  misc_feature 1..23: note = HLA-A targeting gRNA
  source 1..23: mol_type = other DNA
cgatgaagcggagctccccgcgg

SEQ ID NO: 5403 - DNA, 23 bp, synthetic construct
  misc_feature 1..23: note = HLA-A targeting gRNA
  source 1..23: mol_type = other DNA
cgatgaagcggggctccccacgg

SEQ ID NO: 5404 - DNA, 23 bp, synthetic construct
  misc_feature 1..23: note = HLA-A targeting gRNA
  source 1..23: mol_type = other DNA
cgatgaagcggggctctccgcgg

SEQ ID NO: 5405 - DNA, 23 bp, synthetic construct
  misc_feature 1..23: note = HLA-A targeting gRNA
  source 1..23: mol_type = other DNA
cgatgaagtggggctccccgcgg

SEQ ID NO: 5406 - DNA, 23 bp, synthetic construct
  misc_feature 1..23: note = HLA-A targeting gRNA
  source 1..23: mol_type = other DNA
cgatgaagtggggctctccgcgg

SEQ ID NO: 5407 - DNA, 23 bp, synthetic construct
  misc_feature 1..23: note = HLA-A targeting gRNA
  source 1..23: mol_type = other DNA
cgatgtacggctgcgacgtgggg

SEQ ID NO: 5408 - DNA, 23 bp, synthetic construct
  misc_feature 1..23: note = HLA-A targeting gRNA
  source 1..23: mol_type = other DNA
cgatgtatggctgcgacatgggg

SEQ ID NO: 5409 - DNA, 23 bp, synthetic construct
  misc_feature 1..23: note = HLA-A targeting gRNA
  source 1..23: mol_type = other DNA
cgatgtatggctgcgacctgggg

SEQ ID NO: 5410 - DNA, 23 bp, synthetic construct
  misc_feature 1..23: note = HLA-A targeting gRNA
  source 1..23: mol_type = other DNA
cgatgtatggctgcgacgtgggg

SEQ ID NO: 5411 - DNA, 23 bp, synthetic construct
  misc_feature 1..23: note = HLA-A targeting gRNA
  source 1..23: mol_type = other DNA
cgcaagttggaggcggcccgtgg

SEQ ID NO: 5412 - DNA, 23 bp, synthetic construct
  misc_feature 1..23: note = HLA-A targeting gRNA
  source 1..23: mol_type = other DNA
cgcacgggccgcctccaacttgg

SEQ ID NO: 5413 - DNA, 23 bp, synthetic construct
  misc_feature 1..23: note = HLA-A targeting gRNA
  source 1..23: mol_type = other DNA
cgcagccaaacatccactggagg

SEQ ID NO: 5414 - DNA, 23 bp, synthetic construct
  misc_feature 1..23: note = HLA-A targeting gRNA
  source 1..23: mol_type = other DNA
cgcagccaaacatcctctggagg

SEQ ID NO: 5415 - DNA, 23 bp, synthetic construct
  misc_feature 1..23: note = HLA-A targeting gRNA
  source 1..23: mol_type = other DNA
cgcagccacacatccactggagg

SEQ ID NO: 5416 - DNA, 23 bp, synthetic construct
  misc_feature 1..23: note = HLA-A targeting gRNA
  source 1..23: mol_type = other DNA
cgcagccagacatcctctggagg

SEQ ID NO: 5417 - DNA, 23 bp, synthetic construct
  misc_feature 1..23: note = HLA-A targeting gRNA
  source 1..23: mol_type = other DNA
cgcagccatacatattctggagg

SEQ ID NO: 5418 - DNA, 23 bp, synthetic construct
  misc_feature 1..23: note = HLA-A targeting gRNA
  source 1..23: mol_type = other DNA
cgcagccatacatccactggagg

SEQ ID NO: 5419 - DNA, 23 bp, synthetic construct
  misc_feature 1..23: note = HLA-A targeting gRNA
  source 1..23: mol_type = other DNA
cgcagccatacatccgctggagg

SEQ ID NO: 5420 - DNA, 23 bp, synthetic construct
  misc_feature 1..23: note = HLA-A targeting gRNA
  source 1..23: mol_type = other DNA
cgcagccatacatgctctggagg

SEQ ID NO: 5421 - DNA, 23 bp, synthetic construct
  misc_feature 1..23: note = HLA-A targeting gRNA
  source 1..23: mol_type = other DNA
cgcagccgtacaagctctggagg

SEQ ID NO: 5422 - DNA, 23 bp, synthetic construct
  misc_feature 1..23: note = HLA-A targeting gRNA
  source 1..23: mol_type = other DNA
cgcagccgtacatccactggagg

SEQ ID NO: 5423 - DNA, 23 bp, synthetic construct
  misc_feature 1..23: note = HLA-A targeting gRNA
  source 1..23: mol_type = other DNA
cgcagccgtacatcctctggagg

SEQ ID NO: 5424 - DNA, 23 bp, synthetic construct
  misc_feature 1..23: note = HLA-A targeting gRNA
  source 1..23: mol_type = other DNA
cgcagccgtacatcctctggcgg

SEQ ID NO: 5425 - DNA, 23 bp, synthetic construct
  misc_feature 1..23: note = HLA-A targeting gRNA
  source 1..23: mol_type = other DNA
cgcagccgtacatcgtctggagg

SEQ ID NO: 5426 - DNA, 23 bp, synthetic construct
  misc_feature 1..23: note = HLA-A targeting gRNA
  source 1..23: mol_type = other DNA
cgcagccgtacatgctctggagg

SEQ ID NO: 5427 - DNA, 23 bp, synthetic construct
  misc_feature 1..23: note = HLA-A targeting gRNA
  source 1..23: mol_type = other DNA
cgcaggagacgtgggacaggagg

SEQ ID NO: 5428 - DNA, 23 bp, synthetic construct
  misc_feature 1..23: note = HLA-A targeting gRNA
  source 1..23: mol_type = other DNA
cgcaggagacgttggacaggagg

SEQ ID NO: 5429 - DNA, 23 bp, synthetic construct
  misc_feature 1..23: note = HLA-A targeting gRNA
  source 1..23: mol_type = other DNA
cgcaggagatgtgggacaagagg

SEQ ID NO: 5430 - DNA, 23 bp, synthetic construct
  misc_feature 1..23: note = HLA-A targeting gRNA
  source 1..23: mol_type = other DNA
cgcagggaggagggtcgggcggg

SEQ ID NO: 5431 - DNA, 23 bp, synthetic construct
  misc_feature 1..23: note = HLA-A targeting gRNA
  source 1..23: mol_type = other DNA
cgcagggaggtgggtcgggcggg

SEQ ID NO: 5432 - DNA, 23 bp, synthetic construct
  misc_feature 1..23: note = HLA-A targeting gRNA
  source 1..23: mol_type = other DNA
cgcaggtaccaggggcagtgggg

SEQ ID NO: 5433 - DNA, 23 bp, synthetic construct
  misc_feature 1..23: note = HLA-A targeting gRNA
  source 1..23: mol_type = other DNA
cgccatggatagagcaagagggg

SEQ ID NO: 5434 - DNA, 23 bp, synthetic construct
  misc_feature 1..23: note = HLA-A targeting gRNA
  source 1..23: mol_type = other DNA
cgccatggatagagcaggagggg

SEQ ID NO: 5435 - DNA, 23 bp, synthetic construct
  misc_feature 1..23: note = HLA-A targeting gRNA
  source 1..23: mol_type = other DNA
cgcccaacccgcggggattttgg

SEQ ID NO: 5436 - DNA, 23 bp, synthetic construct
  misc_feature 1..23: note = HLA-A targeting gRNA
  source 1..23: mol_type = other DNA
cgccctggatagagcaggagggg

SEQ ID NO: 5437 - DNA, 23 bp, synthetic construct
  misc_feature 1..23: note = HLA-A targeting gRNA
  source 1..23: mol_type = other DNA
cgccgagagcagcaggaggacgg

SEQ ID NO: 5438 - DNA, 23 bp, synthetic construct
  misc_feature 1..23: note = HLA-A targeting gRNA
  source 1..23: mol_type = other DNA
cgccgggaggagggtctggcggg

SEQ ID NO: 5439 - DNA, 23 bp, synthetic construct
  misc_feature 1..23: note = HLA-A targeting gRNA
  source 1..23: mol_type = other DNA
cgccgggaggtgggtcgggcggg

SEQ ID NO: 5440 - DNA, 23 bp, synthetic construct
  misc_feature 1..23: note = HLA-A targeting gRNA
  source 1..23: mol_type = other DNA
cgccggtaggagggtcgggcggg

SEQ ID NO: 5441 - DNA, 23 bp, synthetic construct
  misc_feature 1..23: note = HLA-A targeting gRNA
  source 1..23: mol_type = other DNA
cgccggtcgagggtctgggcggg

SEQ ID NO: 5442 - DNA, 23 bp, synthetic construct
  misc_feature 1..23: note = HLA-A targeting gRNA
  source 1..23: mol_type = other DNA
cgccggtcgagggtttgggcggg

SEQ ID NO: 5443 - DNA, 23 bp, synthetic construct
  misc_feature 1..23: note = HLA-A targeting gRNA
  source 1..23: mol_type = other DNA
cgccgtggatagagcaagagggg

SEQ ID NO: 5444 - DNA, 23 bp, synthetic construct
  misc_feature 1..23: note = HLA-A targeting gRNA
  source 1..23: mol_type = other DNA
cgccgtgggtggagaaggagggg

SEQ ID NO: 5445 - DNA, 23 bp, synthetic construct
  misc_feature 1..23: note = HLA-A targeting gRNA
  source 1..23: mol_type = other DNA
cgccgtgggtggagcaggagggg

SEQ ID NO: 5446 - DNA, 23 bp, synthetic construct
  misc_feature 1..23: note = HLA-A targeting gRNA
  source 1..23: mol_type = other DNA
cgccgtgtccgcagcggtccagg

SEQ ID NO: 5447 - DNA, 23 bp, synthetic construct
  misc_feature 1..23: note = HLA-A targeting gRNA
  source 1..23: mol_type = other DNA
cgccgtgtccgccgcggtccagg

SEQ ID NO: 5448 - DNA, 23 bp, synthetic construct
  misc_feature 1..23: note = HLA-A targeting gRNA
  source 1..23: mol_type = other DNA
cgccgtgtccgcggcaatccagg

SEQ ID NO: 5449 - DNA, 23 bp, synthetic construct
  misc_feature 1..23: note = HLA-A targeting gRNA
  source 1..23: mol_type = other DNA
cgccgtgtccgcggcagtccagg

SEQ ID NO: 5450 - DNA, 23 bp, synthetic construct
  misc_feature 1..23: note = HLA-A targeting gRNA
  source 1..23: mol_type = other DNA
cgccgtgtccgcggcggtccagg

SEQ ID NO: 5451 - DNA, 23 bp, synthetic construct
  misc_feature 1..23: note = HLA-A targeting gRNA
  source 1..23: mol_type = other DNA
cgccttgatggttgtggtgttgg

SEQ ID NO: 5452 - DNA, 23 bp, synthetic construct
  misc_feature 1..23: note = HLA-A targeting gRNA
  source 1..23: mol_type = other DNA
cgccttgtccgcggcggtccagg

SEQ ID NO: 5453 - DNA, 23 bp, synthetic construct
  misc_feature 1..23: note = HLA-A targeting gRNA
  source 1..23: mol_type = other DNA
cgcgcaggtaccaggggcagtgg

SEQ ID NO: 5454 - DNA, 23 bp, synthetic construct
  misc_feature 1..23: note = HLA-A targeting gRNA
  source 1..23: mol_type = other DNA
cgcgcccgcggctcctctctcgg

SEQ ID NO: 5455 - DNA, 23 bp, synthetic construct
  misc_feature 1..23: note = HLA-A targeting gRNA
  source 1..23: mol_type = other DNA
cgcgcgggtaccaagggcagtgg

SEQ ID NO: 5456 - DNA, 23 bp, synthetic construct
  misc_feature 1..23: note = HLA-A targeting gRNA
  source 1..23: mol_type = other DNA
cgcgcgggtaccaggggcagtgg

SEQ ID NO: 5457 - DNA, 23 bp, synthetic construct
  misc_feature 1..23: note = HLA-A targeting gRNA
  source 1..23: mol_type = other DNA
cgcgcgggtaccggggcagtggg

SEQ ID NO: 5458 - DNA, 23 bp, synthetic construct
  misc_feature 1..23: note = HLA-A targeting gRNA
  source 1..23: mol_type = other DNA
cgcgctgcagcgtctccttccgg

SEQ ID NO: 5459 - DNA, 23 bp, synthetic construct
  misc_feature 1..23: note = HLA-A targeting gRNA
  source 1..23: mol_type = other DNA
cgcgctggtaccaggggcagtgg

SEQ ID NO: 5460 - DNA, 23 bp, synthetic construct
  misc_feature 1..23: note = HLA-A targeting gRNA
  source 1..23: mol_type = other DNA
cgcggcctcggggcggatctcgg

SEQ ID NO: 5461 - DNA, 23 bp, synthetic construct
  misc_feature 1..23: note = HLA-A targeting gRNA
  source 1..23: mol_type = other DNA
cgcgggacggggctgaccacggg

SEQ ID NO: 5462 - DNA, 23 bp, synthetic construct
  misc_feature 1..23: note = HLA-A targeting gRNA
  source 1..23: mol_type = other DNA
cgcgggtaccaagggcagtgggg

SEQ ID NO: 5463 - DNA, 23 bp, synthetic construct
  misc_feature 1..23: note = HLA-A targeting gRNA
  source 1..23: mol_type = other DNA
cgcgggtaccaggggcagtgggg

SEQ ID NO: 5464 - DNA, 23 bp, synthetic construct
  misc_feature 1..23: note = HLA-A targeting gRNA
  source 1..23: mol_type = other DNA
cgcggtatccgcggcggtccagg

SEQ ID NO: 5465 - DNA, 23 bp, synthetic construct
  misc_feature 1..23: note = HLA-A targeting gRNA
  source 1..23: mol_type = other DNA
cgcggtcagccccgtccccccgg

SEQ ID NO: 5466 - DNA, 23 bp, synthetic construct
  misc_feature 1..23: note = HLA-A targeting gRNA
  source 1..23: mol_type = other DNA
cgcggtggatagagcaggagggg

SEQ ID NO: 5467 - DNA, 23 bp, synthetic construct
  misc_feature 1..23: note = HLA-A targeting gRNA
  source 1..23: mol_type = other DNA
cgcggtgtccgcagcggtccagg

SEQ ID NO: 5468 - DNA, 23 bp, synthetic construct
  misc_feature 1..23: note = HLA-A targeting gRNA
  source 1..23: mol_type = other DNA
cgcggtgtccgccgcgatccagg

SEQ ID NO: 5469 - DNA, 23 bp, synthetic construct
  misc_feature 1..23: note = HLA-A targeting gRNA
  source 1..23: mol_type = other DNA
cgcggtgtccgccgcggtccagg

SEQ ID NO: 5470 - DNA, 23 bp, synthetic construct
  misc_feature 1..23: note = HLA-A targeting gRNA
  source 1..23: mol_type = other DNA
cgcggtgtccgccgcggtccggg

SEQ ID NO: 5471 - DNA, 23 bp, synthetic construct
  misc_feature 1..23: note = HLA-A targeting gRNA
  source 1..23: mol_type = other DNA
cgcggtgtccgcggcggtccagg

SEQ ID NO: 5472 - DNA, 23 bp, synthetic construct
  misc_feature 1..23: note = HLA-A targeting gRNA
  source 1..23: mol_type = other DNA
cgctctggttgtagccgcgcagg

SEQ ID NO: 5473 - DNA, 23 bp, synthetic construct
  misc_feature 1..23: note = HLA-A targeting gRNA
  source 1..23: mol_type = other DNA
cgctgcaacgcgcgggtaccagg

SEQ ID NO: 5474 - DNA, 23 bp, synthetic construct
  misc_feature 1..23: note = HLA-A targeting gRNA
  source 1..23: mol_type = other DNA
cgctgcagagcgcgggtaccagg

SEQ ID NO: 5475 - DNA, 23 bp, synthetic construct
  misc_feature 1..23: note = HLA-A targeting gRNA
  source 1..23: mol_type = other DNA
cgctgcagcacgcgggtaccagg

SEQ ID NO: 5476 - DNA, 23 bp, synthetic construct
  misc_feature 1..23: note = HLA-A targeting gRNA
  source 1..23: mol_type = other DNA
cgctgcagcgcgcaggtaccagg

SEQ ID NO: 5477 - DNA, 23 bp, synthetic construct
  misc_feature 1..23: note = HLA-A targeting gRNA
  source 1..23: mol_type = other DNA
cgctgcagcgcgcgggtaccggg

SEQ ID NO: 5478 - DNA, 23 bp, synthetic construct
  misc_feature 1..23: note = HLA-A targeting gRNA
  source 1..23: mol_type = other DNA
cgctggagcgcgcgggtaccagg

SEQ ID NO: 5479 - DNA, 23 bp, synthetic construct
  misc_feature 1..23: note = HLA-A targeting gRNA
  source 1..23: mol_type = other DNA
cgctggagggtgtgagaccctgg

SEQ ID NO: 5480 - DNA, 23 bp, synthetic construct
  misc_feature 1..23: note = HLA-A targeting gRNA
  source 1..23: mol_type = other DNA
cgctggtaccaggggcagtgggg

SEQ ID NO: 5481 - DNA, 23 bp, synthetic construct
  misc_feature 1..23: note = HLA-A targeting gRNA
  source 1..23: mol_type = other DNA
cgctgtcgaacctcacgaactgg

SEQ ID NO: 5482 - DNA, 23 bp, synthetic construct
  misc_feature 1..23: note = HLA-A targeting gRNA
  source 1..23: mol_type = other DNA
cgctgtgtccccggcggtccagg

SEQ ID NO: 5483 - DNA, 23 bp, synthetic construct
  misc_feature 1..23: note = HLA-A targeting gRNA
  source 1..23: mol_type = other DNA
cgctgtgtccgcggcggtccagg

SEQ ID NO: 5484 - DNA, 23 bp, synthetic construct
  misc_feature 1..23: note = HLA-A targeting gRNA
  source 1..23: mol_type = other DNA
cgcttgtaaaggtgagattctgg

SEQ ID NO: 5485 - DNA, 23 bp, synthetic construct
  misc_feature 1..23: note = HLA-A targeting gRNA
  source 1..23: mol_type = other DNA
cgcttgtaaggtgagattctggg

SEQ ID NO: 5486 - DNA, 23 bp, synthetic construct
  misc_feature 1..23: note = HLA-A targeting gRNA
  source 1..23: mol_type = other DNA
cggacaggacacctggggtgggg

SEQ ID NO: 5487 - DNA, 23 bp, synthetic construct
  misc_feature 1..23: note = HLA-A targeting gRNA
  source 1..23: mol_type = other DNA
cggaccggtcatacccgcggagg

SEQ ID NO: 5488 - DNA, 23 bp, synthetic construct
  misc_feature 1..23: note = HLA-A targeting gRNA
  source 1..23: mol_type = other DNA
cggacgggcgcctcctccgtggg

SEQ ID NO: 5489 - DNA, 23 bp, synthetic construct
  misc_feature 1..23: note = HLA-A targeting gRNA
  source 1..23: mol_type = other DNA
cggactcacattctccccagagg

SEQ ID NO: 5490 - DNA, 23 bp, synthetic construct
  misc_feature 1..23: note = HLA-A targeting gRNA
  source 1..23: mol_type = other DNA
cggactgatcatacccgcggagg

SEQ ID NO: 5491 - DNA, 23 bp, synthetic construct
  misc_feature 1..23: note = HLA-A targeting gRNA
  source 1..23: mol_type = other DNA
cggactggccatacccgcggagg

SEQ ID NO: 5492 - DNA, 23 bp, synthetic construct
  misc_feature 1..23: note = HLA-A targeting gRNA
  source 1..23: mol_type = other DNA
cggactggtcatacccgcggagg

SEQ ID NO: 5493 - DNA, 23 bp, synthetic construct
  misc_feature 1..23: note = HLA-A targeting gRNA
  source 1..23: mol_type = other DNA
cggactggtcatgcccgcggagg

SEQ ID NO: 5494 - DNA, 23 bp, synthetic construct
  misc_feature 1..23: note = HLA-A targeting gRNA
  source 1..23: mol_type = other DNA
cggagcagctgagagcctaccgg

SEQ ID NO: 5495 - DNA, 23 bp, synthetic construct
  misc_feature 1..23: note = HLA-A targeting gRNA
  source 1..23: mol_type = other DNA
cggagcccctcaccctgagatgg

SEQ ID NO: 5496 - DNA, 23 bp, synthetic construct
  misc_feature 1..23: note = HLA-A targeting gRNA
  source 1..23: mol_type = other DNA
cggagctgtggtcgctgctgtgg

SEQ ID NO: 5497 - DNA, 23 bp, synthetic construct
  misc_feature 1..23: note = HLA-A targeting gRNA
  source 1..23: mol_type = other DNA
cggatacctggagaacgggaagg

SEQ ID NO: 5498 - DNA, 23 bp, synthetic construct
  misc_feature 1..23: note = HLA-A targeting gRNA
  source 1..23: mol_type = other DNA
cggatgggcgcctcctccgcggg

SEQ ID NO: 5499 - DNA, 23 bp, synthetic construct
  misc_feature 1..23: note = HLA-A targeting gRNA
  source 1..23: mol_type = other DNA
cggatgtatggctgcgacctggg

SEQ ID NO: 5500 - DNA, 23 bp, synthetic construct
  misc_feature 1..23: note = HLA-A targeting gRNA
  source 1..23: mol_type = other DNA
cggattccgcagcctcggggtgg

SEQ ID NO: 5501 - DNA, 23 bp, synthetic construct
  misc_feature 1..23: note = HLA-A targeting gRNA
  source 1..23: mol_type = other DNA
cggcaaggattacatcgccctgg

SEQ ID NO: 5502 - DNA, 23 bp, synthetic construct
  misc_feature 1..23: note = HLA-A targeting gRNA
  source 1..23: mol_type = other DNA
cggcagggaaatggcctctgtgg

SEQ ID NO: 5503 - DNA, 23 bp, synthetic construct
  misc_feature 1..23: note = HLA-A targeting gRNA
  source 1..23: mol_type = other DNA
cggcatggcctcccacgaggagg

SEQ ID NO: 5504 - DNA, 23 bp, synthetic construct
  misc_feature 1..23: note = HLA-A targeting gRNA
  source 1..23: mol_type = other DNA
cggccactacaaccagagcgagg

SEQ ID NO: 5505 - DNA, 23 bp, synthetic construct
  misc_feature 1..23: note = HLA-A targeting gRNA
  source 1..23: mol_type = other DNA
cggcccctcctgctctatccagg

SEQ ID NO: 5506 - DNA, 23 bp, synthetic construct
  misc_feature 1..23: note = HLA-A targeting gRNA
  source 1..23: mol_type = other DNA
cggcccgtgaggcggagcaacgg

SEQ ID NO: 5507 - DNA, 23 bp, synthetic construct
  misc_feature 1..23: note = HLA-A targeting gRNA
  source 1..23: mol_type = other DNA
cggcccgtgaggcggagcagcgg

SEQ ID NO: 5508 - DNA, 23 bp, synthetic construct
  misc_feature 1..23: note = HLA-A targeting gRNA
  source 1..23: mol_type = other DNA
cggcccgtgaggcggagcagtgg

SEQ ID NO: 5509 - DNA, 23 bp, synthetic construct
  misc_feature 1..23: note = HLA-A targeting gRNA
  source 1..23: mol_type = other DNA
cggcccgtgcggcggagcagtgg

SEQ ID NO: 5510 - DNA, 23 bp, synthetic construct
  misc_feature 1..23: note = HLA-A targeting gRNA
  source 1..23: mol_type = other DNA
cggcccgtgtggcggagcagcgg

SEQ ID NO: 5511 - DNA, 23 bp, synthetic construct
  misc_feature 1..23: note = HLA-A targeting gRNA
  source 1..23: mol_type = other DNA
cggccgcctcccacttgcgctgg

SEQ ID NO: 5512 - DNA, 23 bp, synthetic construct
  misc_feature 1..23: note = HLA-A targeting gRNA
  source 1..23: mol_type = other DNA
cggccggtgaggcggagcagcgg

SEQ ID NO: 5513 - DNA, 23 bp, synthetic construct
  misc_feature 1..23: note = HLA-A targeting gRNA
  source 1..23: mol_type = other DNA
cggcctcagggggcggatctcgg

SEQ ID NO: 5514 - DNA, 23 bp, synthetic construct
  misc_feature 1..23: note = HLA-A targeting gRNA
  source 1..23: mol_type = other DNA
cggcctcgctctggttgtagtgg

SEQ ID NO: 5515 - DNA, 23 bp, synthetic construct
  misc_feature 1..23: note = HLA-A targeting gRNA
  source 1..23: mol_type = other DNA
cggcctgtgaggcggagcagcgg

SEQ ID NO: 5516 - DNA, 23 bp, synthetic construct
  misc_feature 1..23: note = HLA-A targeting gRNA
  source 1..23: mol_type = other DNA
cggcgagggcgcaggacccgggg

SEQ ID NO: 5517 - DNA, 23 bp, synthetic construct
  misc_feature 1..23: note = HLA-A targeting gRNA
  source 1..23: mol_type = other DNA
cggctactacaaccggagcgagg

SEQ ID NO: 5518 - DNA, 23 bp, synthetic construct
  misc_feature 1..23: note = HLA-A targeting gRNA
  source 1..23: mol_type = other DNA
cggctactataaccagagcgagg

SEQ ID NO: 5519 - DNA, 23 bp, synthetic construct
  misc_feature 1..23: note = HLA-A targeting gRNA
  source 1..23: mol_type = other DNA
cggctcccccctcggactcgcgg

SEQ ID NO: 5520 - DNA, 23 bp, synthetic construct
  misc_feature 1..23: note = HLA-A targeting gRNA
  source 1..23: mol_type = other DNA
cggctcccctctcggactcgcgg

SEQ ID NO: 5521 - DNA, 23 bp, synthetic construct
  misc_feature 1..23: note = HLA-A targeting gRNA
  source 1..23: mol_type = other DNA
cggctcccctcttggactcgcgg

SEQ ID NO: 5522 - DNA, 23 bp, synthetic construct
  misc_feature 1..23: note = HLA-A targeting gRNA
  source 1..23: mol_type = other DNA
cggctcctctctcggactcgcgg

SEQ ID NO: 5523 - DNA, 23 bp, synthetic construct
  misc_feature 1..23: note = HLA-A targeting gRNA
  source 1..23: mol_type = other DNA
cggctccttcctcggactcgcgg

SEQ ID NO: 5524 - DNA, 23 bp, synthetic construct
  misc_feature 1..23: note = HLA-A targeting gRNA
  source 1..23: mol_type = other DNA
cggctccttcctcggactcgtgg

SEQ ID NO: 5525 - DNA, 23 bp, synthetic construct
  misc_feature 1..23: note = HLA-A targeting gRNA
  source 1..23: mol_type = other DNA
cggctcgtgaggcggagcagcgg

SEQ ID NO: 5526 - DNA, 23 bp, synthetic construct
  misc_feature 1..23: note = HLA-A targeting gRNA
  source 1..23: mol_type = other DNA
cggctgcgacctgggcccgacgg

SEQ ID NO: 5527 - DNA, 23 bp, synthetic construct
  misc_feature 1..23: note = HLA-A targeting gRNA
  source 1..23: mol_type = other DNA
cgggaaaggaagggaagatgagg

SEQ ID NO: 5528 - DNA, 23 bp, synthetic construct
  misc_feature 1..23: note = HLA-A targeting gRNA
  source 1..23: mol_type = other DNA
cgggaagccgcgcagggaggagg

SEQ ID NO: 5529 - DNA, 23 bp, synthetic construct
  misc_feature 1..23: note = HLA-A targeting gRNA
  source 1..23: mol_type = other DNA
cgggacacctggggtggggaagg

SEQ ID NO: 5530 - DNA, 23 bp, synthetic construct
  misc_feature 1..23: note = HLA-A targeting gRNA
  source 1..23: mol_type = other DNA
cgggacctgcgccccgggccggg

SEQ ID NO: 5531 - DNA, 23 bp, synthetic construct
  misc_feature 1..23: note = HLA-A targeting gRNA
  source 1..23: mol_type = other DNA
cgggacggggctgaccacggggg

SEQ ID NO: 5532 - DNA, 23 bp, synthetic construct
  misc_feature 1..23: note = HLA-A targeting gRNA
  source 1..23: mol_type = other DNA
cgggactggggcggggctcgggg

SEQ ID NO: 5533 - DNA, 23 bp, synthetic construct
  misc_feature 1..23: note = HLA-A targeting gRNA
  source 1..23: mol_type = other DNA
cgggagactcggggcgacccggg

SEQ ID NO: 5534 - DNA, 23 bp, synthetic construct
  misc_feature 1..23: note = HLA-A targeting gRNA
  source 1..23: mol_type = other DNA
cgggagacttggggcgacccggg

SEQ ID NO: 5535 - DNA, 23 bp, synthetic construct
  misc_feature 1..23: note = HLA-A targeting gRNA
  source 1..23: mol_type = other DNA
cgggagatctacaggagataggg

SEQ ID NO: 5536 - DNA, 23 bp, synthetic construct
  misc_feature 1..23: note = HLA-A targeting gRNA
  source 1..23: mol_type = other DNA
cgggagatctacaggagatgggg

SEQ ID NO: 5537 - DNA, 23 bp, synthetic construct
  misc_feature 1..23: note = HLA-A targeting gRNA
  source 1..23: mol_type = other DNA
cgggagatctacgggagatgggg

SEQ ID NO: 5538 - DNA, 23 bp, synthetic construct
  misc_feature 1..23: note = HLA-A targeting gRNA
  source 1..23: mol_type = other DNA
cgggagatctataggagatgggg

SEQ ID NO: 5539 - DNA, 23 bp, synthetic construct
  misc_feature 1..23: note = HLA-A targeting gRNA
  source 1..23: mol_type = other DNA
cgggagggaaatggcctctgtgg

SEQ ID NO: 5540 - DNA, 23 bp, synthetic construct
  misc_feature 1..23: note = HLA-A targeting gRNA
  source 1..23: mol_type = other DNA
cgggatggcctcccacgaggagg

SEQ ID NO: 5541 - DNA, 23 bp, synthetic construct
  misc_feature 1..23: note = HLA-A targeting gRNA
  source 1..23: mol_type = other DNA
cgggatggccttccacgaggagg

SEQ ID NO: 5542 - DNA, 23 bp, synthetic construct
  misc_feature 1..23: note = HLA-A targeting gRNA
  source 1..23: mol_type = other DNA
cgggcatgaccagtccgcctagg

SEQ ID NO: 5543 - DNA, 23 bp, synthetic construct
  misc_feature 1..23: note = HLA-A targeting gRNA
  source 1..23: mol_type = other DNA
cgggccgggacacggaggtgtgg

SEQ ID NO: 5544 - DNA, 23 bp, synthetic construct
  misc_feature 1..23: note = HLA-A targeting gRNA
  source 1..23: mol_type = other DNA
cgggccgggacatggcggtgtgg

SEQ ID NO: 5545 - DNA, 23 bp, synthetic construct
  misc_feature 1..23: note = HLA-A targeting gRNA
  source 1..23: mol_type = other DNA
cgggccgtacgtcggggttgggg

SEQ ID NO: 5546 - DNA, 23 bp, synthetic construct
  misc_feature 1..23: note = HLA-A targeting gRNA
  source 1..23: mol_type = other DNA
cgggccgtacgtgggggatgggg

SEQ ID NO: 5547 - DNA, 23 bp, synthetic construct
  misc_feature 1..23: note = HLA-A targeting gRNA
  source 1..23: mol_type = other DNA
cgggccgtccgtgggggatgagg

SEQ ID NO: 5548 - DNA, 23 bp, synthetic construct
  misc_feature 1..23: note = HLA-A targeting gRNA
  source 1..23: mol_type = other DNA
cgggccgtccgtgggggatgggg

SEQ ID NO: 5549 - DNA, 23 bp, synthetic construct
  misc_feature 1..23: note = HLA-A targeting gRNA
  source 1..23: mol_type = other DNA
cgggcgatctataggagatgggg

SEQ ID NO: 5550 - DNA, 23 bp, synthetic construct
  misc_feature 1..23: note = HLA-A targeting gRNA
  source 1..23: mol_type = other DNA
cgggcgccgtgggtggaggaggg

SEQ ID NO: 5551 - DNA, 23 bp, synthetic construct
  misc_feature 1..23: note = HLA-A targeting gRNA
  source 1..23: mol_type = other DNA
cggggagacacggaacatgaagg

SEQ ID NO: 5552 - DNA, 23 bp, synthetic construct
  misc_feature 1..23: note = HLA-A targeting gRNA
  source 1..23: mol_type = other DNA
cggggagactcggggcgacccgg

SEQ ID NO: 5553 - DNA, 23 bp, synthetic construct
  misc_feature 1..23: note = HLA-A targeting gRNA
  source 1..23: mol_type = other DNA
cggggagactctaggcgacccgg

SEQ ID NO: 5554 - DNA, 23 bp, synthetic construct
  misc_feature 1..23: note = HLA-A targeting gRNA
  source 1..23: mol_type = other DNA
cggggagactctgggcgacccgg

SEQ ID NO: 5555 - DNA, 23 bp, synthetic construct
  misc_feature 1..23: note = HLA-A targeting gRNA
  source 1..23: mol_type = other DNA
cggggagccgcgcagggaggagg

SEQ ID NO: 5556 - DNA, 23 bp, synthetic construct
  misc_feature 1..23: note = HLA-A targeting gRNA
  source 1..23: mol_type = other DNA
cggggagccgcgcagggaggtgg

SEQ ID NO: 5557 - DNA, 23 bp, synthetic construct
  misc_feature 1..23: note = HLA-A targeting gRNA
  source 1..23: mol_type = other DNA
cggggagccgcgccgggaggagg

SEQ ID NO: 5558 - DNA, 23 bp, synthetic construct
  misc_feature 1..23: note = HLA-A targeting gRNA
  source 1..23: mol_type = other DNA
cggggagccgcgccgggaggtgg

SEQ ID NO: 5559 - DNA, 23 bp, synthetic construct
  misc_feature 1..23: note = HLA-A targeting gRNA
  source 1..23: mol_type = other DNA
cggggagccgcgccggtaggagg

SEQ ID NO: 5560 - DNA, 23 bp, synthetic construct
  misc_feature 1..23: note = HLA-A targeting gRNA
  source 1..23: mol_type = other DNA
cggggagcggcgcagggaggagg

SEQ ID NO: 5561 - DNA, 23 bp, synthetic construct
  misc_feature 1..23: note = HLA-A targeting gRNA
  source 1..23: mol_type = other DNA
cggggagcggcgcagggaggtgg

SEQ ID NO: 5562 - DNA, 23 bp, synthetic construct
  misc_feature 1..23: note = HLA-A targeting gRNA
  source 1..23: mol_type = other DNA
cggggccagggtctcacacttgg

SEQ ID NO: 5563 - DNA, 23 bp, synthetic construct
  misc_feature 1..23: note = HLA-A targeting gRNA
  source 1..23: mol_type = other DNA
cggggccctcagaggaaactcgg

SEQ ID NO: 5564 - DNA, 23 bp, synthetic construct
  misc_feature 1..23: note = HLA-A targeting gRNA
  source 1..23: mol_type = other DNA
cggggcggggccggggggacggg

SEQ ID NO: 5565 - DNA, 23 bp, synthetic construct
  misc_feature 1..23: note = HLA-A targeting gRNA
  source 1..23: mol_type = other DNA
cggggcggggcggggccgggggg

SEQ ID NO: 5566 - DNA, 23 bp, synthetic construct
  misc_feature 1..23: note = HLA-A targeting gRNA
  source 1..23: mol_type = other DNA
cggggcggggctcgggggacggg

SEQ ID NO: 5567 - DNA, 23 bp, synthetic construct
  misc_feature 1..23: note = HLA-A targeting gRNA
  source 1..23: mol_type = other DNA
cggggcggggctcggggggacgg

SEQ ID NO: 5568 - DNA, 23 bp, synthetic construct
  misc_feature 1..23: note = HLA-A targeting gRNA
  source 1..23: mol_type = other DNA
cggggctcgggggacggggctgg

SEQ ID NO: 5569 - DNA, 23 bp, synthetic construct
  misc_feature 1..23: note = HLA-A targeting gRNA
  source 1..23: mol_type = other DNA
cggggctgaccacgggggcgggg

SEQ ID NO: 5570 - DNA, 23 bp, synthetic construct
  misc_feature 1..23: note = HLA-A targeting gRNA
  source 1..23: mol_type = other DNA
cggggctgaccgcggggccgggg

SEQ ID NO: 5571 - DNA, 23 bp, synthetic construct
  misc_feature 1..23: note = HLA-A targeting gRNA
  source 1..23: mol_type = other DNA
cggggctgaccgcggggcctagg

SEQ ID NO: 5572 - DNA, 23 bp, synthetic construct
  misc_feature 1..23: note = HLA-A targeting gRNA
  source 1..23: mol_type = other DNA
cggggctgaccgcggggcctggg

SEQ ID NO: 5573 - DNA, 23 bp, synthetic construct
  misc_feature 1..23: note = HLA-A targeting gRNA
  source 1..23: mol_type = other DNA
cggggctgaccgcgggggcgggg

SEQ ID NO: 5574 - DNA, 23 bp, synthetic construct
  misc_feature 1..23: note = HLA-A targeting gRNA
  source 1..23: mol_type = other DNA
cggggctggccgcggggccgggg

SEQ ID NO: 5575 - DNA, 23 bp, synthetic construct
  misc_feature 1..23: note = HLA-A targeting gRNA
  source 1..23: mol_type = other DNA
cggggctggggcggggctcgcgg

SEQ ID NO: 5576 - DNA, 23 bp, synthetic construct
  misc_feature 1..23: note = HLA-A targeting gRNA
  source 1..23: mol_type = other DNA
cggggctggggcggggctcgggg

SEQ ID NO: 5577 - DNA, 23 bp, synthetic construct
  misc_feature 1..23: note = HLA-A targeting gRNA
  source 1..23: mol_type = other DNA
cggggctggggcggggttcgggg

SEQ ID NO: 5578 - DNA, 23 bp, synthetic construct
  misc_feature 1..23: note = HLA-A targeting gRNA
  source 1..23: mol_type = other DNA
cgggggaccgggctgaccacggg

SEQ ID NO: 5579 - DNA, 23 bp, synthetic construct
  misc_feature 1..23: note = HLA-A targeting gRNA
  source 1..23: mol_type = other DNA
cgggggacgggctgaccacgggg

SEQ ID NO: 5580 - DNA, 23 bp, synthetic construct
  misc_feature 1..23: note = HLA-A targeting gRNA
  source 1..23: mol_type = other DNA
cgggggacggggctgaccacggg

SEQ ID NO: 5581 - DNA, 23 bp, synthetic construct
  misc_feature 1..23: note = HLA-A targeting gRNA
  source 1..23: mol_type = other DNA
cgggggacggggctgaccgcggg

SEQ ID NO: 5582 - DNA, 23 bp, synthetic construct
  misc_feature 1..23: note = HLA-A targeting gRNA
  source 1..23: mol_type = other DNA
cgggggacggggctggccgcggg

SEQ ID NO: 5583 - DNA, 23 bp, synthetic construct
  misc_feature 1..23: note = HLA-A targeting gRNA
  source 1..23: mol_type = other DNA
cgggggacggtgctgaccgcggg

SEQ ID NO: 5584 - DNA, 23 bp, synthetic construct
  misc_feature 1..23: note = HLA-A targeting gRNA
  source 1..23: mol_type = other DNA
cgggggactgggctgaccacggg

SEQ ID NO: 5585 - DNA, 23 bp, synthetic construct
  misc_feature 1..23: note = HLA-A targeting gRNA
  source 1..23: mol_type = other DNA
cggggggacggggctgaccgcgg

SEQ ID NO: 5586 - DNA, 23 bp, synthetic construct
  misc_feature 1..23: note = HLA-A targeting gRNA
  source 1..23: mol_type = other DNA
cggggggactgggctgaccgcgg

SEQ ID NO: 5587 - DNA, 23 bp, synthetic construct
  misc_feature 1..23: note = HLA-A targeting gRNA
  source 1..23: mol_type = other DNA
cgggggggggtggggtggggagg

SEQ ID NO: 5588 - DNA, 23 bp, synthetic construct
  misc_feature 1..23: note = HLA-A targeting gRNA
  source 1..23: mol_type = other DNA
cggggggggtggggtggggaggg

SEQ ID NO: 5589 - DNA, 23 bp, synthetic construct
  misc_feature 1..23: note = HLA-A targeting gRNA
  source 1..23: mol_type = other DNA
cggggggggtggtggggcagagg

SEQ ID NO: 5590 - DNA, 23 bp, synthetic construct
  misc_feature 1..23: note = HLA-A targeting gRNA
  source 1..23: mol_type = other DNA
cggggtcacagtggacacaaggg

SEQ ID NO: 5591 - DNA, 23 bp, synthetic construct
  misc_feature 1..23: note = HLA-A targeting gRNA
  source 1..23: mol_type = other DNA
cggggtcgccccgagtctccggg

SEQ ID NO: 5592 - DNA, 23 bp, synthetic construct
  misc_feature 1..23: note = HLA-A targeting gRNA
  source 1..23: mol_type = other DNA
cggggtggggcagaggggaaagg

SEQ ID NO: 5593 - DNA, 23 bp, synthetic construct
  misc_feature 1..23: note = HLA-A targeting gRNA
  source 1..23: mol_type = other DNA
cgggtcagggctgaggcttgggg

SEQ ID NO: 5594 - DNA, 23 bp, synthetic construct
  misc_feature 1..23: note = HLA-A targeting gRNA
  source 1..23: mol_type = other DNA
cgggtcccgcggcctcagggagg

SEQ ID NO: 5595 - DNA, 23 bp, synthetic construct
  misc_feature 1..23: note = HLA-A targeting gRNA
  source 1..23: mol_type = other DNA
cgggtcccgcggcctcagggggg

SEQ ID NO: 5596 - DNA, 23 bp, synthetic construct
  misc_feature 1..23: note = HLA-A targeting gRNA
  source 1..23: mol_type = other DNA
cgggtcccgcggcctcggggcgg

SEQ ID NO: 5597 - DNA, 23 bp, synthetic construct
  misc_feature 1..23: note = HLA-A targeting gRNA
  source 1..23: mol_type = other DNA
cgggtctgagatccaccccgagg

SEQ ID NO: 5598 - DNA, 23 bp, synthetic construct
  misc_feature 1..23: note = HLA-A targeting gRNA
  source 1..23: mol_type = other DNA
cgggtgagtgcgggtcggcaggg

SEQ ID NO: 5599 - DNA, 23 bp, synthetic construct
  misc_feature 1..23: note = HLA-A targeting gRNA
  source 1..23: mol_type = other DNA
cgggtgggtgacttcagaaccgg

SEQ ID NO: 5600 - DNA, 23 bp, synthetic construct
  misc_feature 1..23: note = HLA-A targeting gRNA
  source 1..23: mol_type = other DNA
cgggttccgcagatccaccttgg

SEQ ID NO: 5601 - DNA, 23 bp, synthetic construct
  misc_feature 1..23: note = HLA-A targeting gRNA
  source 1..23: mol_type = other DNA
cgggttccgcagcctcggggagg

SEQ ID NO: 5602 - DNA, 23 bp, synthetic construct
  misc_feature 1..23: note = HLA-A targeting gRNA
  source 1..23: mol_type = other DNA
cgggttccgcagcctcggggtgg

SEQ ID NO: 5603 - DNA, 23 bp, synthetic construct
  misc_feature 1..23: note = HLA-A targeting gRNA
  source 1..23: mol_type = other DNA
cgggttgggcggggcggggcggg

SEQ ID NO: 5604 - DNA, 23 bp, synthetic construct
  misc_feature 1..23: note = HLA-A targeting gRNA
  source 1..23: mol_type = other DNA
cgggttggtcagggcggggcggg

SEQ ID NO: 5605 - DNA, 23 bp, synthetic construct
  misc_feature 1..23: note = HLA-A targeting gRNA
  source 1..23: mol_type = other DNA
cgggttggtcgggactggggcgg

SEQ ID NO: 5606 - DNA, 23 bp, synthetic construct
  misc_feature 1..23: note = HLA-A targeting gRNA
  source 1..23: mol_type = other DNA
cgggttggtcggggctggggcgg

SEQ ID NO: 5607 - DNA, 23 bp, synthetic construct
  misc_feature 1..23: note = HLA-A targeting gRNA
  source 1..23: mol_type = other DNA
cggtgaccacaaggacagccagg

SEQ ID NO: 5608 - DNA, 23 bp, synthetic construct
  misc_feature 1..23: note = HLA-A targeting gRNA
  source 1..23: mol_type = other DNA
cggtgagtgaccccggcctgggg

SEQ ID NO: 5609 - DNA, 23 bp, synthetic construct
  misc_feature 1..23: note = HLA-A targeting gRNA
  source 1..23: mol_type = other DNA
cggtgagtgcgggatcgggaggg

SEQ ID NO: 5610 - DNA, 23 bp, synthetic construct
  misc_feature 1..23: note = HLA-A targeting gRNA
  source 1..23: mol_type = other DNA
cggtgagtgcggggtcggcaggg

SEQ ID NO: 5611 - DNA, 23 bp, synthetic construct
  misc_feature 1..23: note = HLA-A targeting gRNA
  source 1..23: mol_type = other DNA
cggtgagtgcggggtcgggaggg

SEQ ID NO: 5612 - DNA, 23 bp, synthetic construct
  misc_feature 1..23: note = HLA-A targeting gRNA
  source 1..23: mol_type = other DNA
cggtgagtgcggggttgggaggg

SEQ ID NO: 5613 - DNA, 23 bp, synthetic construct
  misc_feature 1..23: note = HLA-A targeting gRNA
  source 1..23: mol_type = other DNA
cggtgcccaaggctgctgcaggg

SEQ ID NO: 5614 - DNA, 23 bp, synthetic construct
  misc_feature 1..23: note = HLA-A targeting gRNA
  source 1..23: mol_type = other DNA
cggtgctgaccgcggggccgggg

SEQ ID NO: 5615 - DNA, 23 bp, synthetic construct
  misc_feature 1..23: note = HLA-A targeting gRNA
  source 1..23: mol_type = other DNA
cggttcccaaggctgctgcaggg

SEQ ID NO: 5616 - DNA, 23 bp, synthetic construct
  misc_feature 1..23: note = HLA-A targeting gRNA
  source 1..23: mol_type = other DNA
cggttctgaagtcacccacccgg

SEQ ID NO: 5617 - DNA, 23 bp, synthetic construct
  misc_feature 1..23: note = HLA-A targeting gRNA
  source 1..23: mol_type = other DNA
cgtaacccactgagatgaagcgg

SEQ ID NO: 5618 - DNA, 23 bp, synthetic construct
  misc_feature 1..23: note = HLA-A targeting gRNA
  source 1..23: mol_type = other DNA
cgtacgtcggggttggggagggg

SEQ ID NO: 5619 - DNA, 23 bp, synthetic construct
  misc_feature 1..23: note = HLA-A targeting gRNA
  source 1..23: mol_type = other DNA
cgtactggacatacccgcggagg

SEQ ID NO: 5620 - DNA, 23 bp, synthetic construct
  misc_feature 1..23: note = HLA-A targeting gRNA
  source 1..23: mol_type = other DNA
cgtactggtcatacccgcggagg

SEQ ID NO: 5621 - DNA, 23 bp, synthetic construct
  misc_feature 1..23: note = HLA-A targeting gRNA
  source 1..23: mol_type = other DNA
cgtactggtcatgcccgcggagg

SEQ ID NO: 5622 - DNA, 23 bp, synthetic construct
  misc_feature 1..23: note = HLA-A targeting gRNA
  source 1..23: mol_type = other DNA
cgtactggttatacccgcggagg

SEQ ID NO: 5623 - DNA, 23 bp, synthetic construct
  misc_feature 1..23: note = HLA-A targeting gRNA
  source 1..23: mol_type = other DNA
cgtactggttatgcccgcggagg

SEQ ID NO: 5624 - DNA, 23 bp, synthetic construct
  misc_feature 1..23: note = HLA-A targeting gRNA
  source 1..23: mol_type = other DNA
cgtagcccacggtaatgaagcgg

SEQ ID NO: 5625 - DNA, 23 bp, synthetic construct
  misc_feature 1..23: note = HLA-A targeting gRNA
  source 1..23: mol_type = other DNA
cgtagcccacggtgatgaagcgg

SEQ ID NO: 5626 - DNA, 23 bp, synthetic construct
  misc_feature 1..23: note = HLA-A targeting gRNA
  source 1..23: mol_type = other DNA
cgtagcccactgagacgaagcgg

SEQ ID NO: 5627 - DNA, 23 bp, synthetic construct
  misc_feature 1..23: note = HLA-A targeting gRNA
  source 1..23: mol_type = other DNA
cgtagcccactgagatgaagcgg

SEQ ID NO: 5628 - DNA, 23 bp, synthetic construct
  misc_feature 1..23: note = HLA-A targeting gRNA
  source 1..23: mol_type = other DNA
cgtagcccactgcaatgaagcgg

SEQ ID NO: 5629 - DNA, 23 bp, synthetic construct
  misc_feature 1..23: note = HLA-A targeting gRNA
  source 1..23: mol_type = other DNA
cgtagcccactgcgatgaagtgg

SEQ ID NO: 5630 - DNA, 23 bp, synthetic construct
  misc_feature 1..23: note = HLA-A targeting gRNA
  source 1..23: mol_type = other DNA
cgtagcgcactgagatgaagcgg

SEQ ID NO: 5631 - DNA, 23 bp, synthetic construct
  misc_feature 1..23: note = HLA-A targeting gRNA
  source 1..23: mol_type = other DNA
cgtcatggagtgggagcctgggg

SEQ ID NO: 5632 - DNA, 23 bp, synthetic construct
  misc_feature 1..23: note = HLA-A targeting gRNA
  source 1..23: mol_type = other DNA
cgtccgtgggggatgaggagggg

SEQ ID NO: 5633 - DNA, 23 bp, synthetic construct
  misc_feature 1..23: note = HLA-A targeting gRNA
  source 1..23: mol_type = other DNA
cgtccgtgggggatggggagagg

SEQ ID NO: 5634 - DNA, 23 bp, synthetic construct
  misc_feature 1..23: note = HLA-A targeting gRNA
  source 1..23: mol_type = other DNA
cgtccgtgggggatggggagggg

SEQ ID NO: 5635 - DNA, 23 bp, synthetic construct
  misc_feature 1..23: note = HLA-A targeting gRNA
  source 1..23: mol_type = other DNA
cgtcctcctgctgctctcggcgg

SEQ ID NO: 5636 - DNA, 23 bp, synthetic construct
  misc_feature 1..23: note = HLA-A targeting gRNA
  source 1..23: mol_type = other DNA
cgtcctcctgctgctctgggggg

SEQ ID NO: 5637 - DNA, 23 bp, synthetic construct
  misc_feature 1..23: note = HLA-A targeting gRNA
  source 1..23: mol_type = other DNA
cgtcctggtcatacccgcggagg

SEQ ID NO: 5638 - DNA, 23 bp, synthetic construct
  misc_feature 1..23: note = HLA-A targeting gRNA
  source 1..23: mol_type = other DNA
cgtcctggtggtacccgcggagg

SEQ ID NO: 5639 - DNA, 23 bp, synthetic construct
  misc_feature 1..23: note = HLA-A targeting gRNA
  source 1..23: mol_type = other DNA
cgtcctggttatgcccgcggagg

SEQ ID NO: 5640 - DNA, 23 bp, synthetic construct
  misc_feature 1..23: note = HLA-A targeting gRNA
  source 1..23: mol_type = other DNA
cgtcgcagccagacatcctctgg

SEQ ID NO: 5641 - DNA, 23 bp, synthetic construct
  misc_feature 1..23: note = HLA-A targeting gRNA
  source 1..23: mol_type = other DNA
cgtcgcagccatacatattctgg

SEQ ID NO: 5642 - DNA, 23 bp, synthetic construct
  misc_feature 1..23: note = HLA-A targeting gRNA
  source 1..23: mol_type = other DNA
cgtcgcagccatacatcacctgg

SEQ ID NO: 5643 - DNA, 23 bp, synthetic construct
  misc_feature 1..23: note = HLA-A targeting gRNA
  source 1..23: mol_type = other DNA
cgtcgcagccatacatccactgg

SEQ ID NO: 5644 - DNA, 23 bp, synthetic construct
  misc_feature 1..23: note = HLA-A targeting gRNA
  source 1..23: mol_type = other DNA
cgtcgcagccatacatgctctgg

SEQ ID NO: 5645 - DNA, 23 bp, synthetic construct
  misc_feature 1..23: note = HLA-A targeting gRNA
  source 1..23: mol_type = other DNA
cgtcgcagccgtacaagctctgg

SEQ ID NO: 5646 - DNA, 23 bp, synthetic construct
  misc_feature 1..23: note = HLA-A targeting gRNA
  source 1..23: mol_type = other DNA
cgtcgcagccgtacatcctctgg

SEQ ID NO: 5647 - DNA, 23 bp, synthetic construct
  misc_feature 1..23: note = HLA-A targeting gRNA
  source 1..23: mol_type = other DNA
cgtcgcagccgtacatcgtctgg

SEQ ID NO: 5648 - DNA, 23 bp, synthetic construct
  misc_feature 1..23: note = HLA-A targeting gRNA
  source 1..23: mol_type = other DNA
cgtcgcagccgtacatgctctgg

SEQ ID NO: 5649 - DNA, 23 bp, synthetic construct
  misc_feature 1..23: note = HLA-A targeting gRNA
  source 1..23: mol_type = other DNA
cgtcgcagccttacatcctctgg

SEQ ID NO: 5650 - DNA, 23 bp, synthetic construct
  misc_feature 1..23: note = HLA-A targeting gRNA
  source 1..23: mol_type = other DNA
cgtgaagaaatcctgcatctcgg

SEQ ID NO: 5651 - DNA, 23 bp, synthetic construct
  misc_feature 1..23: note = HLA-A targeting gRNA
  source 1..23: mol_type = other DNA
cgtgacctgcgccccaggccggg

SEQ ID NO: 5652 - DNA, 23 bp, synthetic construct
  misc_feature 1..23: note = HLA-A targeting gRNA
  source 1..23: mol_type = other DNA
cgtgccatatgcagcacgagggg

SEQ ID NO: 5653 - DNA, 23 bp, synthetic construct
  misc_feature 1..23: note = HLA-A targeting gRNA
  source 1..23: mol_type = other DNA
cgtgccatgtgcagcacgagggg

SEQ ID NO: 5654 - DNA, 23 bp, synthetic construct
  misc_feature 1..23: note = HLA-A targeting gRNA
  source 1..23: mol_type = other DNA
cgtgccatgtgcagcatgagggg

SEQ ID NO: 5655 - DNA, 23 bp, synthetic construct
  misc_feature 1..23: note = HLA-A targeting gRNA
  source 1..23: mol_type = other DNA
cgtgccatgttcagcacgagggg

SEQ ID NO: 5656 - DNA, 23 bp, synthetic construct
  misc_feature 1..23: note = HLA-A targeting gRNA
  source 1..23: mol_type = other DNA
cgtgggacaggaggaattagggg

SEQ ID NO: 5657 - DNA, 23 bp, synthetic construct
  misc_feature 1..23: note = HLA-A targeting gRNA
  source 1..23: mol_type = other DNA
cgtgggacaggaggaattatggg

SEQ ID NO: 5658 - DNA, 23 bp, synthetic construct
  misc_feature 1..23: note = HLA-A targeting gRNA
  source 1..23: mol_type = other DNA
cgtgggcatcgttgctggcctgg

SEQ ID NO: 5659 - DNA, 23 bp, synthetic construct
  misc_feature 1..23: note = HLA-A targeting gRNA
  source 1..23: mol_type = other DNA
cgtgggcattgttgctggcctgg

SEQ ID NO: 5660 - DNA, 23 bp, synthetic construct
  misc_feature 1..23: note = HLA-A targeting gRNA
  source 1..23: mol_type = other DNA
cgtgggggatggggaggggtcgg

SEQ ID NO: 5661 - DNA, 23 bp, synthetic construct
  misc_feature 1..23: note = HLA-A targeting gRNA
  source 1..23: mol_type = other DNA
cgtgtcccggcccggcagcgggg

SEQ ID NO: 5662 - DNA, 23 bp, synthetic construct
  misc_feature 1..23: note = HLA-A targeting gRNA
  source 1..23: mol_type = other DNA
cgtgtcccggcctggccgcgggg

SEQ ID NO: 5663 - DNA, 23 bp, synthetic construct
  misc_feature 1..23: note = HLA-A targeting gRNA
  source 1..23: mol_type = other DNA
cgtgtccgcggcggtccaggagg

SEQ ID NO: 5664 - DNA, 23 bp, synthetic construct
  misc_feature 1..23: note = HLA-A targeting gRNA
  source 1..23: mol_type = other DNA
cgtgtcctggcccggccgcgggg

SEQ ID NO: 5665 - DNA, 23 bp, synthetic construct
  misc_feature 1..23: note = HLA-A targeting gRNA
  source 1..23: mol_type = other DNA
cgtgtcgtccacatagcccacgg

SEQ ID NO: 5666 - DNA, 23 bp, synthetic construct
  misc_feature 1..23: note = HLA-A targeting gRNA
  source 1..23: mol_type = other DNA
cgtgtttcctgatcctgccctgg

SEQ ID NO: 5667 - DNA, 23 bp, synthetic construct
  misc_feature 1..23: note = HLA-A targeting gRNA
  source 1..23: mol_type = other DNA
cgtgtttcctgatcctgccttgg

SEQ ID NO: 5668 - DNA, 23 bp, synthetic construct
  misc_feature 1..23: note = HLA-A targeting gRNA
  source 1..23: mol_type = other DNA
cgttctcaggatggtcacatggg

SEQ ID NO: 5669 - DNA, 23 bp, synthetic construct
  misc_feature 1..23: note = HLA-A targeting gRNA
  source 1..23: mol_type = other DNA
cgttgctggcctggctgtcctgg

SEQ ID NO: 5670 - DNA, 23 bp, synthetic construct
  misc_feature 1..23: note = HLA-A targeting gRNA
  source 1..23: mol_type = other DNA
cgttggacaggaggaattatggg

SEQ ID NO: 5671 - DNA, 23 bp, synthetic construct
  misc_feature 1..23: note = HLA-A targeting gRNA
  source 1..23: mol_type = other DNA
cgtttctggcccagctgtcctgg

SEQ ID NO: 5672 - DNA, 23 bp, synthetic construct
  misc_feature 1..23: note = HLA-A targeting gRNA
  source 1..23: mol_type = other DNA
ctaactggtcatgcccgcggagg

SEQ ID NO: 5673 - DNA, 23 bp, synthetic construct
  misc_feature 1..23: note = HLA-A targeting gRNA
  source 1..23: mol_type = other DNA
ctaactggttatacccgcggagg

SEQ ID NO: 5674 - DNA, 23 bp, synthetic construct
  misc_feature 1..23: note = HLA-A targeting gRNA
  source 1..23: mol_type = other DNA
ctaactggttatgcccacggagg

SEQ ID NO: 5675 - DNA, 23 bp, synthetic construct
  misc_feature 1..23: note = HLA-A targeting gRNA
  source 1..23: mol_type = other DNA
ctaactggttatgcccgcggagg

SEQ ID NO: 5676 - DNA, 23 bp, synthetic construct
  misc_feature 1..23: note = HLA-A targeting gRNA
  source 1..23: mol_type = other DNA
ctaagccgcggtgtccgccgcgg

SEQ ID NO: 5677 - DNA, 23 bp, synthetic construct
  misc_feature 1..23: note = HLA-A targeting gRNA
  source 1..23: mol_type = other DNA
ctaccgggagggcctgtgcgtgg

SEQ ID NO: 5678 - DNA, 23 bp, synthetic construct
  misc_feature 1..23: note = HLA-A targeting gRNA
  source 1..23: mol_type = other DNA
ctacctggaggacacgtgcgtgg

SEQ ID NO: 5679 - DNA, 23 bp, synthetic construct
  misc_feature 1..23: note = HLA-A targeting gRNA
  source 1..23: mol_type = other DNA
ctacctggagggaacgtgcgtgg

SEQ ID NO: 5680 - DNA, 23 bp, synthetic construct
  misc_feature 1..23: note = HLA-A targeting gRNA
  source 1..23: mol_type = other DNA
ctacctggagggcaagtgcgtgg

SEQ ID NO: 5681 - DNA, 23 bp, synthetic construct
  misc_feature 1..23: note = HLA-A targeting gRNA
  source 1..23: mol_type = other DNA
ctacctggagggcacgcgcgtgg

SEQ ID NO: 5682 - DNA, 23 bp, synthetic construct
  misc_feature 1..23: note = HLA-A targeting gRNA
  source 1..23: mol_type = other DNA
ctacctggagggcacgtacgtgg

SEQ ID NO: 5683 - DNA, 23 bp, synthetic construct
  misc_feature 1..23: note = HLA-A targeting gRNA
  source 1..23: mol_type = other DNA
ctacctggagggcacgtgagtgg

SEQ ID NO: 5684 - DNA, 23 bp, synthetic construct
  misc_feature 1..23: note = HLA-A targeting gRNA
  source 1..23: mol_type = other DNA
ctacctggagggcacgtgcatgg

SEQ ID NO: 5685 - DNA, 23 bp, synthetic construct
  misc_feature 1..23: note = HLA-A targeting gRNA
  source 1..23: mol_type = other DNA
ctacctggagggcacgtgtgtgg

SEQ ID NO: 5686 - DNA, 23 bp, synthetic construct
  misc_feature 1..23: note = HLA-A targeting gRNA
  source 1..23: mol_type = other DNA
ctacctggagggcacgttcgtgg

SEQ ID NO: 5687 - DNA, 23 bp, synthetic construct
  misc_feature 1..23: note = HLA-A targeting gRNA
  source 1..23: mol_type = other DNA
ctacctggagggcctgtgcgagg

SEQ ID NO: 5688 - DNA, 23 bp, synthetic construct
  misc_feature 1..23: note = HLA-A targeting gRNA
  source 1..23: mol_type = other DNA
ctacctggagggcctgtgtgtgg

SEQ ID NO: 5689 - DNA, 23 bp, synthetic construct
  misc_feature 1..23: note = HLA-A targeting gRNA
  source 1..23: mol_type = other DNA
ctacctggagggtctgtgcgtgg

SEQ ID NO: 5690 - DNA, 23 bp, synthetic construct
  misc_feature 1..23: note = HLA-A targeting gRNA
  source 1..23: mol_type = other DNA
ctacctggtgggcacgtgcgtgg

SEQ ID NO: 5691 - DNA, 23 bp, synthetic construct
  misc_feature 1..23: note = HLA-A targeting gRNA
  source 1..23: mol_type = other DNA
ctacgccgcgagtccaagagggg

SEQ ID NO: 5692 - DNA, 23 bp, synthetic construct
  misc_feature 1..23: note = HLA-A targeting gRNA
  source 1..23: mol_type = other DNA
ctacggagatcacactgacctgg

SEQ ID NO: 5693 - DNA, 23 bp, synthetic construct
  misc_feature 1..23: note = HLA-A targeting gRNA
  source 1..23: mol_type = other DNA
ctacgtggacgacacgctgttgg

SEQ ID NO: 5694 - DNA, 23 bp, synthetic construct
  misc_feature 1..23: note = HLA-A targeting gRNA
  source 1..23: mol_type = other DNA
ctagacacccgacacccaatggg

SEQ ID NO: 5695 - DNA, 23 bp, synthetic construct
  misc_feature 1..23: note = HLA-A targeting gRNA
  source 1..23: mol_type = other DNA
ctagagactcgaggagacccggg

SEQ ID NO: 5696 - DNA, 23 bp, synthetic construct
  misc_feature 1..23: note = HLA-A targeting gRNA
  source 1..23: mol_type = other DNA
ctagagtgggcgggggggcgggg

SEQ ID NO: 5697 - DNA, 23 bp, synthetic construct
  misc_feature 1..23: note = HLA-A targeting gRNA
  source 1..23: mol_type = other DNA
ctagagtgggcggggggggcggg

SEQ ID NO: 5698 - DNA, 23 bp, synthetic construct
  misc_feature 1..23: note = HLA-A targeting gRNA
  source 1..23: mol_type = other DNA
ctagagtgggcgggggggggtgg

SEQ ID NO: 5699 - DNA, 23 bp, synthetic construct
  misc_feature 1..23: note = HLA-A targeting gRNA
  source 1..23: mol_type = other DNA
ctagagtgggcggggggggtggg

SEQ ID NO: 5700 - DNA, 23 bp, synthetic construct
  misc_feature 1..23: note = HLA-A targeting gRNA
  source 1..23: mol_type = other DNA
ctagagtgggtgggggtggcggg

SEQ ID NO: 5701 - DNA, 23 bp, synthetic construct
  misc_feature 1..23: note = HLA-A targeting gRNA
  source 1..23: mol_type = other DNA
ctagatatccaatacccaatggg

SEQ ID NO: 5702 - DNA, 23 bp, synthetic construct
  misc_feature 1..23: note = HLA-A targeting gRNA
  source 1..23: mol_type = other DNA
ctagatatccgacacccaatggg

SEQ ID NO: 5703 - DNA, 23 bp, synthetic construct
  misc_feature 1..23: note = HLA-A targeting gRNA
  source 1..23: mol_type = other DNA
ctaggacaaccaggacagccagg

SEQ ID NO: 5704 - DNA, 23 bp, synthetic construct
  misc_feature 1..23: note = HLA-A targeting gRNA
  source 1..23: mol_type = other DNA
ctaggacagccaggacagccagg

SEQ ID NO: 5705 - DNA, 23 bp, synthetic construct
  misc_feature 1..23: note = HLA-A targeting gRNA
  source 1..23: mol_type = other DNA
ctaggacagctaggacaaccagg

SEQ ID NO: 5706 - DNA, 23 bp, synthetic construct
  misc_feature 1..23: note = HLA-A targeting gRNA
  source 1..23: mol_type = other DNA
ctaggacagctaggacagccagg

SEQ ID NO: 5707 - DNA, 23 bp, synthetic construct
  misc_feature 1..23: note = HLA-A targeting gRNA
  source 1..23: mol_type = other DNA
ctagggctctctccggtcgaggg

SEQ ID NO: 5708 - DNA, 23 bp, synthetic construct
  misc_feature 1..23: note = HLA-A targeting gRNA
  source 1..23: mol_type = other DNA
ctatctcctgtagatctcccggg

SEQ ID NO: 5709 - DNA, 23 bp, synthetic construct
  misc_feature 1..23: note = HLA-A targeting gRNA
  source 1..23: mol_type = other DNA
ctatgtcccggcccggccgcggg

SEQ ID NO: 5710 - DNA, 23 bp, synthetic construct
  misc_feature 1..23: note = HLA-A targeting gRNA
  source 1..23: mol_type = other DNA
ctatgtcgggtccttcttccagg

SEQ ID NO: 5711 - DNA, 23 bp, synthetic construct
  misc_feature 1..23: note = HLA-A targeting gRNA
  source 1..23: mol_type = other DNA
ctcaaggagtgggagcctggggg

SEQ ID NO: 5712 - DNA, 23 bp, synthetic construct
  misc_feature 1..23: note = HLA-A targeting gRNA
  source 1..23: mol_type = other DNA
ctcacactcaatgtgtctgaagg

SEQ ID NO: 5713 - DNA, 23 bp, synthetic construct
  misc_feature 1..23: note = HLA-A targeting gRNA
  source 1..23: mol_type = other DNA
ctcacgctcaatgtgtttaaagg

SEQ ID NO: 5714 - DNA, 23 bp, synthetic construct
  misc_feature 1..23: note = HLA-A targeting gRNA
  source 1..23: mol_type = other DNA
ctcacgctcaatgtgtttgaagg

SEQ ID NO: 5715 - DNA, 23 bp, synthetic construct
  misc_feature 1..23: note = HLA-A targeting gRNA
  source 1..23: mol_type = other DNA
ctcagatcacccagcccaagtgg

SEQ ID NO: 5716 - DNA, 23 bp, synthetic construct
  misc_feature 1..23: note = HLA-A targeting gRNA
  source 1..23: mol_type = other DNA
ctcagatcacccagcgcaaatgg

SEQ ID NO: 5717 - DNA, 23 bp, synthetic construct
  misc_feature 1..23: note = HLA-A targeting gRNA
  source 1..23: mol_type = other DNA
ctcagatcacccagcgtaagtgg

SEQ ID NO: 5718 - DNA, 23 bp, synthetic construct
  misc_feature 1..23: note = HLA-A targeting gRNA
  source 1..23: mol_type = other DNA
ctcagatcacccagctcaagtgg

SEQ ID NO: 5719 - DNA, 23 bp, synthetic construct
  misc_feature 1..23: note = HLA-A targeting gRNA
  source 1..23: mol_type = other DNA
ctcagatcatccagcgcaagtgg

SEQ ID NO: 5720 - DNA, 23 bp, synthetic construct
  misc_feature 1..23: note = HLA-A targeting gRNA
  source 1..23: mol_type = other DNA
ctcagatctcccagcgcaagtgg

SEQ ID NO: 5721 - DNA, 23 bp, synthetic construct
  misc_feature 1..23: note = HLA-A targeting gRNA
  source 1..23: mol_type = other DNA
ctcagcccctcctcacccccagg

SEQ ID NO: 5722 - DNA, 23 bp, synthetic construct
  misc_feature 1..23: note = HLA-A targeting gRNA
  source 1..23: mol_type = other DNA
ctcagcccctcctcgcccccagg

SEQ ID NO: 5723 - DNA, 23 bp, synthetic construct
  misc_feature 1..23: note = HLA-A targeting gRNA
  source 1..23: mol_type = other DNA
ctcagcccctcctcgctcccagg

SEQ ID NO: 5724 - DNA, 23 bp, synthetic construct
  misc_feature 1..23: note = HLA-A targeting gRNA
  source 1..23: mol_type = other DNA
ctcagcccctcctctcccccagg

SEQ ID NO: 5725 - DNA, 23 bp, synthetic construct
  misc_feature 1..23: note = HLA-A targeting gRNA
  source 1..23: mol_type = other DNA
ctcagcccctcctggcccccagg

SEQ ID NO: 5726 - DNA, 23 bp, synthetic construct
  misc_feature 1..23: note = HLA-A targeting gRNA
  source 1..23: mol_type = other DNA
ctcagccctgacccagctgaagg

SEQ ID NO: 5727 - DNA, 23 bp, synthetic construct
  misc_feature 1..23: note = HLA-A targeting gRNA
  source 1..23: mol_type = other DNA
ctcagccctgacccggctgaagg

SEQ ID NO: 5728 - DNA, 23 bp, synthetic construct
  misc_feature 1..23: note = HLA-A targeting gRNA
  source 1..23: mol_type = other DNA
ctcagccctgacctggctgaagg

SEQ ID NO: 5729 - DNA, 23 bp, synthetic construct
  misc_feature 1..23: note = HLA-A targeting gRNA
  source 1..23: mol_type = other DNA
ctcagctcctcctcgcccccagg

SEQ ID NO: 5730 - DNA, 23 bp, synthetic construct
  misc_feature 1..23: note = HLA-A targeting gRNA
  source 1..23: mol_type = other DNA
ctcaggagacgtgggacaggagg

SEQ ID NO: 5731 - DNA, 23 bp, synthetic construct
  misc_feature 1..23: note = HLA-A targeting gRNA
  source 1..23: mol_type = other DNA
ctcaggctgcatgtaagtgatgg

SEQ ID NO: 5732 - DNA, 23 bp, synthetic construct
  misc_feature 1..23: note = HLA-A targeting gRNA
  source 1..23: mol_type = other DNA
ctcaggctgcgtgtaaatgatgg

SEQ ID NO: 5733 - DNA, 23 bp, synthetic construct
  misc_feature 1..23: note = HLA-A targeting gRNA
  source 1..23: mol_type = other DNA
ctcaggctgcgtgtaagtgatgg

SEQ ID NO: 5734 - DNA, 23 bp, synthetic construct
  misc_feature 1..23: note = HLA-A targeting gRNA
  source 1..23: mol_type = other DNA
ctcaggctgcgtgtaagtggtgg

SEQ ID NO: 5735 - DNA, 23 bp, synthetic construct
  misc_feature 1..23: note = HLA-A targeting gRNA
  source 1..23: mol_type = other DNA
ctcagggaaaccagaagtcctgg

SEQ ID NO: 5736 - DNA, 23 bp, synthetic construct
  misc_feature 1..23: note = HLA-A targeting gRNA
  source 1..23: mol_type = other DNA
ctcagggaaagcagaagtcctgg

SEQ ID NO: 5737 - DNA, 23 bp, synthetic construct
  misc_feature 1..23: note = HLA-A targeting gRNA
  source 1..23: mol_type = other DNA
ctcagggtctcaggctccaaggg

SEQ ID NO: 5738 - DNA, 23 bp, synthetic construct
  misc_feature 1..23: note = HLA-A targeting gRNA
  source 1..23: mol_type = other DNA
ctcagggtctcaggctccgaggg

SEQ ID NO: 5739 - DNA, 23 bp, synthetic construct
  misc_feature 1..23: note = HLA-A targeting gRNA
  source 1..23: mol_type = other DNA
ctcaggtagggaaggggtgaggg

SEQ ID NO: 5740 - DNA, 23 bp, synthetic construct
  misc_feature 1..23: note = HLA-A targeting gRNA
  source 1..23: mol_type = other DNA
ctcaggttgcgtgtaagtgatgg

SEQ ID NO: 5741 - DNA, 23 bp, synthetic construct
  misc_feature 1..23: note = HLA-A targeting gRNA
  source 1..23: mol_type = other DNA
ctcatactcaatgtgtctgaagg

SEQ ID NO: 5742 - DNA, 23 bp, synthetic construct
  misc_feature 1..23: note = HLA-A targeting gRNA
  source 1..23: mol_type = other DNA
ctcatcccattctccattcaagg

SEQ ID NO: 5743 - DNA, 23 bp, synthetic construct
  misc_feature 1..23: note = HLA-A targeting gRNA
  source 1..23: mol_type = other DNA
ctcatcccattttccattcaagg

SEQ ID NO: 5744 - DNA, 23 bp, synthetic construct
  misc_feature 1..23: note = HLA-A targeting gRNA
  source 1..23: mol_type = other DNA
ctcatcccccacggacggcccgg

SEQ ID NO: 5745 - DNA, 23 bp, synthetic construct
  misc_feature 1..23: note = HLA-A targeting gRNA
  source 1..23: mol_type = other DNA
ctcatcttcccttcctttcccgg

SEQ ID NO: 5746 - DNA, 23 bp, synthetic construct
  misc_feature 1..23: note = HLA-A targeting gRNA
  source 1..23: mol_type = other DNA
ctcatgaagtgggagcctggggg

SEQ ID NO: 5747 - DNA, 23 bp, synthetic construct
  misc_feature 1..23: note = HLA-A targeting gRNA
  source 1..23: mol_type = other DNA
ctcatgccattctccattcaagg

SEQ ID NO: 5748 - DNA, 23 bp, synthetic construct
  misc_feature 1..23: note = HLA-A targeting gRNA
  source 1..23: mol_type = other DNA
ctcatgctcaatgtgtttgaagg

SEQ ID NO: 5749 - DNA, 23 bp, synthetic construct
  misc_feature 1..23: note = HLA-A targeting gRNA
  source 1..23: mol_type = other DNA
ctcatggagagggagcctggggg

SEQ ID NO: 5750 - DNA, 23 bp, synthetic construct
  misc_feature 1..23: note = HLA-A targeting gRNA
  source 1..23: mol_type = other DNA
ctcatggagtggaagcctggggg

SEQ ID NO: 5751 - DNA, 23 bp, synthetic construct
  misc_feature 1..23: note = HLA-A targeting gRNA
  source 1..23: mol_type = other DNA
ctcatggagtgggaacctggggg

SEQ ID NO: 5752 - DNA, 23 bp, synthetic construct
  misc_feature 1..23: note = HLA-A targeting gRNA
  source 1..23: mol_type = other DNA
ctcatggagtgggagactggggg

SEQ ID NO: 5753 - DNA, 23 bp, synthetic construct
  misc_feature 1..23: note = HLA-A targeting gRNA
  source 1..23: mol_type = other DNA
ctccacaagctcggtgtcctggg

SEQ ID NO: 5754 - DNA, 23 bp, synthetic construct
  misc_feature 1..23: note = HLA-A targeting gRNA
  source 1..23: mol_type = other DNA
ctccacagggtagaaacccaggg

SEQ ID NO: 5755 - DNA, 23 bp, synthetic construct
  misc_feature 1..23: note = HLA-A targeting gRNA
  source 1..23: mol_type = other DNA
ctccacagggtagaagcccaggg

SEQ ID NO: 5756 - DNA, 23 bp, synthetic construct
  misc_feature 1..23: note = HLA-A targeting gRNA
  source 1..23: mol_type = other DNA
ctcccagcgcaagtgggaggcgg

SEQ ID NO: 5757 - DNA, 23 bp, synthetic construct
  misc_feature 1..23: note = HLA-A targeting gRNA
  source 1..23: mol_type = other DNA
ctcccagcgcaagttggaggcgg

SEQ ID NO: 5758 - DNA, 23 bp, synthetic construct
  misc_feature 1..23: note = HLA-A targeting gRNA
  source 1..23: mol_type = other DNA
ctccccagacgccgagatgcggg

SEQ ID NO: 5759 - DNA, 23 bp, synthetic construct
  misc_feature 1..23: note = HLA-A targeting gRNA
  source 1..23: mol_type = other DNA
ctccccagaggccgagatgcggg

SEQ ID NO: 5760 - DNA, 23 bp, synthetic construct
  misc_feature 1..23: note = HLA-A targeting gRNA
  source 1..23: mol_type = other DNA
ctccccagggtagaagcccaggg

SEQ ID NO: 5761 - DNA, 23 bp, synthetic construct
  misc_feature 1..23: note = HLA-A targeting gRNA
  source 1..23: mol_type = other DNA
ctcccgagagcagcaggaggagg

SEQ ID NO: 5762 - DNA, 23 bp, synthetic construct
  misc_feature 1..23: note = HLA-A targeting gRNA
  source 1..23: mol_type = other DNA
ctcccgagagcagcaggatgagg

SEQ ID NO: 5763 - DNA, 23 bp, synthetic construct
  misc_feature 1..23: note = HLA-A targeting gRNA
  source 1..23: mol_type = other DNA
ctcccgtagatctcccggcatgg

SEQ ID NO: 5764 - DNA, 23 bp, synthetic construct
  misc_feature 1..23: note = HLA-A targeting gRNA
  source 1..23: mol_type = other DNA
ctcccgtagatctcccgggatgg

SEQ ID NO: 5765 - DNA, 23 bp, synthetic construct
  misc_feature 1..23: note = HLA-A targeting gRNA
  source 1..23: mol_type = other DNA
ctccctccttttccacctgtggg

SEQ ID NO: 5766 - DNA, 23 bp, synthetic construct
  misc_feature 1..23: note = HLA-A targeting gRNA
  source 1..23: mol_type = other DNA
ctccgatgaccacaactgctagg

SEQ ID NO: 5767 - DNA, 23 bp, synthetic construct
  misc_feature 1..23: note = HLA-A targeting gRNA
  source 1..23: mol_type = other DNA
ctccgcagacacctgaagaatgg

SEQ ID NO: 5768 - DNA, 23 bp, synthetic construct
  misc_feature 1..23: note = HLA-A targeting gRNA
  source 1..23: mol_type = other DNA
ctccgcagatacctgaagaaagg

SEQ ID NO: 5769 - DNA, 23 bp, synthetic construct
  misc_feature 1..23: note = HLA-A targeting gRNA
  source 1..23: mol_type = other DNA
ctccgcagatacctgaagaatgg

SEQ ID NO: 5770 - DNA, 23 bp, synthetic construct
  misc_feature 1..23: note = HLA-A targeting gRNA
  source 1..23: mol_type = other DNA
ctccgcagatacctggagaaagg

SEQ ID NO: 5771 - DNA, 23 bp, synthetic construct
  misc_feature 1..23: note = HLA-A targeting gRNA
  source 1..23: mol_type = other DNA
ctccgcagatacctggagaatgg

SEQ ID NO: 5772 - DNA, 23 bp, synthetic construct
  misc_feature 1..23: note = HLA-A targeting gRNA
  source 1..23: mol_type = other DNA
ctccgcagatacctggggaacgg

SEQ ID NO: 5773 - DNA, 23 bp, synthetic construct
  misc_feature 1..23: note = HLA-A targeting gRNA
  source 1..23: mol_type = other DNA
ctccgcagatatctggagaacgg

SEQ ID NO: 5774 - DNA, 23 bp, synthetic construct
  misc_feature 1..23: note = HLA-A targeting gRNA
  source 1..23: mol_type = other DNA
ctccgcagggtagaaacccaggg

SEQ ID NO: 5775 - DNA, 23 bp, synthetic construct
  misc_feature 1..23: note = HLA-A targeting gRNA
  source 1..23: mol_type = other DNA
ctccgcagggtagaagcacaggg

SEQ ID NO: 5776 - DNA, 23 bp, synthetic construct
  misc_feature 1..23: note = HLA-A targeting gRNA
  source 1..23: mol_type = other DNA
ctccgcagggtagaagcccatgg

SEQ ID NO: 5777 - DNA, 23 bp, synthetic construct
  misc_feature 1..23: note = HLA-A targeting gRNA
  source 1..23: mol_type = other DNA
ctccgcggatacctggagaacgg

SEQ ID NO: 5778 - DNA, 23 bp, synthetic construct
  misc_feature 1..23: note = HLA-A targeting gRNA
  source 1..23: mol_type = other DNA
ctccggatgatgtgagaccctgg

SEQ ID NO: 5779 - DNA, 23 bp, synthetic construct
  misc_feature 1..23: note = HLA-A targeting gRNA
  source 1..23: mol_type = other DNA
ctccggccgagggtctgggcggg

SEQ ID NO: 5780 - DNA, 23 bp, synthetic construct
  misc_feature 1..23: note = HLA-A targeting gRNA
  source 1..23: mol_type = other DNA
ctccggtcgagggtctgggcggg

SEQ ID NO: 5781 - DNA, 23 bp, synthetic construct
  misc_feature 1..23: note = HLA-A targeting gRNA
  source 1..23: mol_type = other DNA
ctccgtagggtagaagcccaggg

SEQ ID NO: 5782 - DNA, 23 bp, synthetic construct
  misc_feature 1..23: note = HLA-A targeting gRNA
  source 1..23: mol_type = other DNA
ctcctaccggcgcggctccccgg

SEQ ID NO: 5783 - DNA, 23 bp, synthetic construct
  misc_feature 1..23: note = HLA-A targeting gRNA
  source 1..23: mol_type = other DNA
ctcctagtcttggacccaaaagg

SEQ ID NO: 5784 - DNA, 23 bp, synthetic construct
  misc_feature 1..23: note = HLA-A targeting gRNA
  source 1..23: mol_type = other DNA
ctcctatagatcgcccgggatgg

SEQ ID NO: 5785 - DNA, 23 bp, synthetic construct
  misc_feature 1..23: note = HLA-A targeting gRNA
  source 1..23: mol_type = other DNA
ctcctatagatctcccgggatgg

SEQ ID NO: 5786 - DNA, 23 bp, synthetic construct
  misc_feature 1..23: note = HLA-A targeting gRNA
  source 1..23: mol_type = other DNA
ctcctataggtcgccggggatgg

SEQ ID NO: 5787 - DNA, 23 bp, synthetic construct
  misc_feature 1..23: note = HLA-A targeting gRNA
  source 1..23: mol_type = other DNA
ctcctcacattaggctaacaggg

SEQ ID NO: 5788 - DNA, 23 bp, synthetic construct
  misc_feature 1..23: note = HLA-A targeting gRNA
  source 1..23: mol_type = other DNA
ctcctcacattatgctaacaggg

SEQ ID NO: 5789 - DNA, 23 bp, synthetic construct
  misc_feature 1..23: note = HLA-A targeting gRNA
  source 1..23: mol_type = other DNA
ctcctcagacaccgagatgcggg

SEQ ID NO: 5790 - DNA, 23 bp, synthetic construct
  misc_feature 1..23: note = HLA-A targeting gRNA
  source 1..23: mol_type = other DNA
ctcctcagacgccaagatgctgg

SEQ ID NO: 5791 - DNA, 23 bp, synthetic construct
  misc_feature 1..23: note = HLA-A targeting gRNA
  source 1..23: mol_type = other DNA
ctcctcagacgccgagatgcggg

SEQ ID NO: 5792 - DNA, 23 bp, synthetic construct
  misc_feature 1..23: note = HLA-A targeting gRNA
  source 1..23: mol_type = other DNA
ctcctcagacgccgagatgctgg

SEQ ID NO: 5793 - DNA, 23 bp, synthetic construct
  misc_feature 1..23: note = HLA-A targeting gRNA
  source 1..23: mol_type = other DNA
ctcctcccagtcccctcataggg

SEQ ID NO: 5794 - DNA, 23 bp, synthetic construct
  misc_feature 1..23: note = HLA-A targeting gRNA
  source 1..23: mol_type = other DNA
ctcctcccggcgcggctccccgg

SEQ ID NO: 5795 - DNA, 23 bp, synthetic construct
  misc_feature 1..23: note = HLA-A targeting gRNA
  source 1..23: mol_type = other DNA
ctcctccctgcgccgctccccgg

SEQ ID NO: 5796 - DNA, 23 bp, synthetic construct
  misc_feature 1..23: note = HLA-A targeting gRNA
  source 1..23: mol_type = other DNA
ctcctccctgcgcggctccccgg

SEQ ID NO: 5797 - DNA, 23 bp, synthetic construct
  misc_feature 1..23: note = HLA-A targeting gRNA
  source 1..23: mol_type = other DNA
ctcctccctgcgcggcttcccgg

SEQ ID NO: 5798 - DNA, 23 bp, synthetic construct
  misc_feature 1..23: note = HLA-A targeting gRNA
  source 1..23: mol_type = other DNA
ctcctccctgtcccctcacaggg

SEQ ID NO: 5799 - DNA, 23 bp, synthetic construct
  misc_feature 1..23: note = HLA-A targeting gRNA
  source 1..23: mol_type = other DNA
ctcctcctgctgctctcgggagg

SEQ ID NO: 5800 - DNA, 23 bp, synthetic construct
  misc_feature 1..23: note = HLA-A targeting gRNA
  source 1..23: mol_type = other DNA
ctcctcgtcttggaaccaaaagg

SEQ ID NO: 5801 - DNA, 23 bp, synthetic construct
  misc_feature 1..23: note = HLA-A targeting gRNA
  source 1..23: mol_type = other DNA
ctcctcgtcttggacccaaaagg

SEQ ID NO: 5802 - DNA, 23 bp, synthetic construct
  misc_feature 1..23: note = HLA-A targeting gRNA
  source 1..23: mol_type = other DNA
ctcctcgtggaaggccatcccgg

SEQ ID NO: 5803 - DNA, 23 bp, synthetic construct
  misc_feature 1..23: note = HLA-A targeting gRNA
  source 1..23: mol_type = other DNA
ctcctcgtgggaggccatcccgg

SEQ ID NO: 5804 - DNA, 23 bp, synthetic construct
  misc_feature 1..23: note = HLA-A targeting gRNA
  source 1..23: mol_type = other DNA
ctcctcgtgggaggccatgccgg

SEQ ID NO: 5805 - DNA, 23 bp, synthetic construct
  misc_feature 1..23: note = HLA-A targeting gRNA
  source 1..23: mol_type = other DNA
ctcctggaccgccgcggacaagg

SEQ ID NO: 5806 - DNA, 23 bp, synthetic construct
  misc_feature 1..23: note = HLA-A targeting gRNA
  source 1..23: mol_type = other DNA
ctcctggaccgccgcggacacgg

SEQ ID NO: 5807 - DNA, 23 bp, synthetic construct
  misc_feature 1..23: note = HLA-A targeting gRNA
  source 1..23: mol_type = other DNA
ctcctggaccgcggcggacacgg

SEQ ID NO: 5808 - DNA, 23 bp, synthetic construct
  misc_feature 1..23: note = HLA-A targeting gRNA
  source 1..23: mol_type = other DNA
ctcctggaccgctgcggacacgg

SEQ ID NO: 5809 - DNA, 23 bp, synthetic construct
  misc_feature 1..23: note = HLA-A targeting gRNA
  source 1..23: mol_type = other DNA
ctcctggactgccgcggacacgg

SEQ ID NO: 5810 - DNA, 23 bp, synthetic construct
  misc_feature 1..23: note = HLA-A targeting gRNA
  source 1..23: mol_type = other DNA
ctcctggattgccgcggacacgg

SEQ ID NO: 5811 - DNA, 23 bp, synthetic construct
  misc_feature 1..23: note = HLA-A targeting gRNA
  source 1..23: mol_type = other DNA
ctcctgtagatctcccgggatgg

SEQ ID NO: 5812 - DNA, 23 bp, synthetic construct
  misc_feature 1..23: note = HLA-A targeting gRNA
  source 1..23: mol_type = other DNA
ctcctgtccaacgtctcctgcgg

SEQ ID NO: 5813 - DNA, 23 bp, synthetic construct
  misc_feature 1..23: note = HLA-A targeting gRNA
  source 1..23: mol_type = other DNA
ctcctgtcccacgtctcctgagg

SEQ ID NO: 5814 - DNA, 23 bp, synthetic construct
  misc_feature 1..23: note = HLA-A targeting gRNA
  source 1..23: mol_type = other DNA
ctcctgtcccacgtctcctgcgg

SEQ ID NO: 5815 - DNA, 23 bp, synthetic construct
  misc_feature 1..23: note = HLA-A targeting gRNA
  source 1..23: mol_type = other DNA
ctcctgtcccacgtctcctgtgg

SEQ ID NO: 5816 - DNA, 23 bp, synthetic construct
  misc_feature 1..23: note = HLA-A targeting gRNA
  source 1..23: mol_type = other DNA
ctcgacgggcgcctcctccgcgg

SEQ ID NO: 5817 - DNA, 23 bp, synthetic construct
  misc_feature 1..23: note = HLA-A targeting gRNA
  source 1..23: mol_type = other DNA
ctcgcacaggccctccaggtagg

SEQ ID NO: 5818 - DNA, 23 bp, synthetic construct
  misc_feature 1..23: note = HLA-A targeting gRNA
  source 1..23: mol_type = other DNA
ctcggggaggatctcagaccggg

SEQ ID NO: 5819 - DNA, 23 bp, synthetic construct
  misc_feature 1..23: note = HLA-A targeting gRNA
  source 1..23: mol_type = other DNA
ctcgggggacgggctgaccacgg

SEQ ID NO: 5820 - DNA, 23 bp, synthetic construct
  misc_feature 1..23: note = HLA-A targeting gRNA
  source 1..23: mol_type = other DNA
ctcggggtggatctcagacccgg

SEQ ID NO: 5821 - DNA, 23 bp, synthetic construct
  misc_feature 1..23: note = HLA-A targeting gRNA
  source 1..23: mol_type = other DNA
ctcggggtggatctcagaccggg

SEQ ID NO: 5822 - DNA, 23 bp, synthetic construct
  misc_feature 1..23: note = HLA-A targeting gRNA
  source 1..23: mol_type = other DNA
ctcggggtggatctcagacgggg

SEQ ID NO: 5823 - DNA, 23 bp, synthetic construct
  misc_feature 1..23: note = HLA-A targeting gRNA
  source 1..23: mol_type = other DNA
ctctagaacccgacacccaatgg

SEQ ID NO: 5824 - DNA, 23 bp, synthetic construct
  misc_feature 1..23: note = HLA-A targeting gRNA
  source 1..23: mol_type = other DNA
ctctagaatccgacacccaatgg

SEQ ID NO: 5825 - DNA, 23 bp, synthetic construct
  misc_feature 1..23: note = HLA-A targeting gRNA
  source 1..23: mol_type = other DNA
ctctcaactgctccgcctcacgg

SEQ ID NO: 5826 - DNA, 23 bp, synthetic construct
  misc_feature 1..23: note = HLA-A targeting gRNA
  source 1..23: mol_type = other DNA
ctctcagctgctccgccacacgg

SEQ ID NO: 5827 - DNA, 23 bp, synthetic construct
  misc_feature 1..23: note = HLA-A targeting gRNA
  source 1..23: mol_type = other DNA
ctctcagctgctccgccacccgg

SEQ ID NO: 5828 - DNA, 23 bp, synthetic construct
  misc_feature 1..23: note = HLA-A targeting gRNA
  source 1..23: mol_type = other DNA
ctctcagctgctccgccccacgg

SEQ ID NO: 5829 - DNA, 23 bp, synthetic construct
  misc_feature 1..23: note = HLA-A targeting gRNA
  source 1..23: mol_type = other DNA
ctctcagctgctccgccgcacgg

SEQ ID NO: 5830 - DNA, 23 bp, synthetic construct
  misc_feature 1..23: note = HLA-A targeting gRNA
  source 1..23: mol_type = other DNA
ctctcagctgctccgccgtacgg

SEQ ID NO: 5831 - DNA, 23 bp, synthetic construct
  misc_feature 1..23: note = HLA-A targeting gRNA
  source 1..23: mol_type = other DNA
ctctcagctgctccgcctcacgg

SEQ ID NO: 5832 - DNA, 23 bp, synthetic construct
  misc_feature 1..23: note = HLA-A targeting gRNA
  source 1..23: mol_type = other DNA
ctctcagctgctcggccgcacgg

SEQ ID NO: 5833 - DNA, 23 bp, synthetic construct
  misc_feature 1..23: note = HLA-A targeting gRNA
  source 1..23: mol_type = other DNA
ctctccactgctccgccgcacgg

SEQ ID NO: 5834 - DNA, 23 bp, synthetic construct
  misc_feature 1..23: note = HLA-A targeting gRNA
  source 1..23: mol_type = other DNA
ctctccactgctccgcctcacgg

SEQ ID NO: 5835 - DNA, 23 bp, synthetic construct
  misc_feature 1..23: note = HLA-A targeting gRNA
  source 1..23: mol_type = other DNA
ctctccccatcccccacggacgg

SEQ ID NO: 5836 - DNA, 23 bp, synthetic construct
  misc_feature 1..23: note = HLA-A targeting gRNA
  source 1..23: mol_type = other DNA
ctctccgctgctccgccacacgg

SEQ ID NO: 5837 - DNA, 23 bp, synthetic construct
  misc_feature 1..23: note = HLA-A targeting gRNA
  source 1..23: mol_type = other DNA
ctctccgctgctccgcctcacgg

SEQ ID NO: 5838 - DNA, 23 bp, synthetic construct
  misc_feature 1..23: note = HLA-A targeting gRNA
  source 1..23: mol_type = other DNA
ctctccgtcagtctgtgcctggg

SEQ ID NO: 5839 - DNA, 23 bp, synthetic construct
  misc_feature 1..23: note = HLA-A targeting gRNA
  source 1..23: mol_type = other DNA
ctctccgttgctccgcctcacgg

SEQ ID NO: 5840 - DNA, 23 bp, synthetic construct
  misc_feature 1..23: note = HLA-A targeting gRNA
  source 1..23: mol_type = other DNA
ctctcgccggtcgagggtctggg

SEQ ID NO: 5841 - DNA, 23 bp, synthetic construct
  misc_feature 1..23: note = HLA-A targeting gRNA
  source 1..23: mol_type = other DNA
ctctcgccggtcgagggtttggg

SEQ ID NO: 5842 - DNA, 23 bp, synthetic construct
  misc_feature 1..23: note = HLA-A targeting gRNA
  source 1..23: mol_type = other DNA
ctctcggtaagtctgcgcggagg

SEQ ID NO: 5843 - DNA, 23 bp, synthetic construct
  misc_feature 1..23: note = HLA-A targeting gRNA
  source 1..23: mol_type = other DNA
ctctcggtaagtctgtgccttgg

SEQ ID NO: 5844 - DNA, 23 bp, synthetic construct
  misc_feature 1..23: note = HLA-A targeting gRNA
  source 1..23: mol_type = other DNA
ctctcggtaagtctgtgtgttgg

SEQ ID NO: 5845 - DNA, 23 bp, synthetic construct
  misc_feature 1..23: note = HLA-A targeting gRNA
  source 1..23: mol_type = other DNA
ctctcggtacgtctgtgtgttgg

SEQ ID NO: 5846 - DNA, 23 bp, synthetic construct
  misc_feature 1..23: note = HLA-A targeting gRNA
  source 1..23: mol_type = other DNA
ctctcggtcagcctgtgtgttgg

SEQ ID NO: 5847 - DNA, 23 bp, synthetic construct
  misc_feature 1..23: note = HLA-A targeting gRNA
  source 1..23: mol_type = other DNA
ctctcggtcagtctgtgcctggg

SEQ ID NO: 5848 - DNA, 23 bp, synthetic construct
  misc_feature 1..23: note = HLA-A targeting gRNA
  source 1..23: mol_type = other DNA
ctctcggtcagtctgtgccttgg

SEQ ID NO: 5849 - DNA, 23 bp, synthetic construct
  misc_feature 1..23: note = HLA-A targeting gRNA
  source 1..23: mol_type = other DNA
ctctcggtcagtctgtgtgttgg

SEQ ID NO: 5850 - DNA, 23 bp, synthetic construct
  misc_feature 1..23: note = HLA-A targeting gRNA
  source 1..23: mol_type = other DNA
ctctcgttaagtctgtgtgttgg

SEQ ID NO: 5851 - DNA, 23 bp, synthetic construct
  misc_feature 1..23: note = HLA-A targeting gRNA
  source 1..23: mol_type = other DNA
ctctctccggccgagggtctggg

SEQ ID NO: 5852 - DNA, 23 bp, synthetic construct
  misc_feature 1..23: note = HLA-A targeting gRNA
  source 1..23: mol_type = other DNA
ctctctccggtcgagggtctggg

SEQ ID NO: 5853 - DNA, 23 bp, synthetic construct
  misc_feature 1..23: note = HLA-A targeting gRNA
  source 1..23: mol_type = other DNA
ctctctgcggtcgaggttctggg

SEQ ID NO: 5854 - DNA, 23 bp, synthetic construct
  misc_feature 1..23: note = HLA-A targeting gRNA
  source 1..23: mol_type = other DNA
ctctctgctgctccgccgcacgg

SEQ ID NO: 5855 - DNA, 23 bp, synthetic construct
  misc_feature 1..23: note = HLA-A targeting gRNA
  source 1..23: mol_type = other DNA
ctctgcactgctccgcctcacgg

SEQ ID NO: 5856 - DNA, 23 bp, synthetic construct
  misc_feature 1..23: note = HLA-A targeting gRNA
  source 1..23: mol_type = other DNA
ctctgccaagtgtgagaccctgg

SEQ ID NO: 5857 - DNA, 23 bp, synthetic construct
  misc_feature 1..23: note = HLA-A targeting gRNA
  source 1..23: mol_type = other DNA
ctctggaaggtgtgagaccctgg

SEQ ID NO: 5858 - DNA, 23 bp, synthetic construct
  misc_feature 1..23: note = HLA-A targeting gRNA
  source 1..23: mol_type = other DNA
ctctggagagtgtgagaccctgg

SEQ ID NO: 5859 - DNA, 23 bp, synthetic construct
  misc_feature 1..23: note = HLA-A targeting gRNA
  source 1..23: mol_type = other DNA
ctctggaggatgtgagaccctgg

SEQ ID NO: 5860 - DNA, 23 bp, synthetic construct
  misc_feature 1..23: note = HLA-A targeting gRNA
  source 1..23: mol_type = other DNA
ctctggagggtatgagaccctgg

SEQ ID NO: 5861 - DNA, 23 bp, synthetic construct
  misc_feature 1..23: note = HLA-A targeting gRNA
  source 1..23: mol_type = other DNA
ctctggagggtgtgagaccctgg

SEQ ID NO: 5862 - DNA, 23 bp, synthetic construct
  misc_feature 1..23: note = HLA-A targeting gRNA
  source 1..23: mol_type = other DNA
ctctggatgatgtgagaccctgg

SEQ ID NO: 5863 - DNA, 23 bp, synthetic construct
  misc_feature 1..23: note = HLA-A targeting gRNA
  source 1..23: mol_type = other DNA
ctctggatggtgtgagaccctgg

SEQ ID NO: 5864 - DNA, 23 bp, synthetic construct
  misc_feature 1..23: note = HLA-A targeting gRNA
  source 1..23: mol_type = other DNA
ctctggcgggtgtgagaccctgg

SEQ ID NO: 5865 - DNA, 23 bp, synthetic construct
  misc_feature 1..23: note = HLA-A targeting gRNA
  source 1..23: mol_type = other DNA
ctctggggagaatgtgagtccgg

SEQ ID NO: 5866 - DNA, 23 bp, synthetic construct
  misc_feature 1..23: note = HLA-A targeting gRNA
  source 1..23: mol_type = other DNA
ctctgggtctcaagctcccaggg

SEQ ID NO: 5867 - DNA, 23 bp, synthetic construct
  misc_feature 1..23: note = HLA-A targeting gRNA
  source 1..23: mol_type = other DNA
ctctgtcctgctccgccacacgg

SEQ ID NO: 5868 - DNA, 23 bp, synthetic construct
  misc_feature 1..23: note = HLA-A targeting gRNA
  source 1..23: mol_type = other DNA
ctctgtcctgctccgccatacgg

SEQ ID NO: 5869 - DNA, 23 bp, synthetic construct
  misc_feature 1..23: note = HLA-A targeting gRNA
  source 1..23: mol_type = other DNA
ctctgtcctgctccgccgcacgg

SEQ ID NO: 5870 - DNA, 23 bp, synthetic construct
  misc_feature 1..23: note = HLA-A targeting gRNA
  source 1..23: mol_type = other DNA
ctcttagctgctccgccacacgg

SEQ ID NO: 5871 - DNA, 23 bp, synthetic construct
  misc_feature 1..23: note = HLA-A targeting gRNA
  source 1..23: mol_type = other DNA
ctcttctctctagacaattaagg

SEQ ID NO: 5872 - DNA, 23 bp, synthetic construct
  misc_feature 1..23: note = HLA-A targeting gRNA
  source 1..23: mol_type = other DNA
ctcttgaagtcacaaaggaaagg

SEQ ID NO: 5873 - DNA, 23 bp, synthetic construct
  misc_feature 1..23: note = HLA-A targeting gRNA
  source 1..23: mol_type = other DNA
ctcttgaagtcacaaaggagagg

SEQ ID NO: 5874 - DNA, 23 bp, synthetic construct
  misc_feature 1..23: note = HLA-A targeting gRNA
  source 1..23: mol_type = other DNA
ctcttgaagtcacaaaggggagg

SEQ ID NO: 5875 - DNA, 23 bp, synthetic construct
  misc_feature 1..23: note = HLA-A targeting gRNA
  source 1..23: mol_type = other DNA
ctcttgggtccaagactaggagg

SEQ ID NO: 5876 - DNA, 23 bp, synthetic construct
  misc_feature 1..23: note = HLA-A targeting gRNA
  source 1..23: mol_type = other DNA
ctcttgtcccacatctcctgcgg

SEQ ID NO: 5877 - DNA, 23 bp, synthetic construct
  misc_feature 1..23: note = HLA-A targeting gRNA
  source 1..23: mol_type = other DNA
ctcttgtcccacatctcctgtgg

SEQ ID NO: 5878 - DNA, 23 bp, synthetic construct
  misc_feature 1..23: note = HLA-A targeting gRNA
  source 1..23: mol_type = other DNA
ctgaaaacgaaaccgggtaaagg

SEQ ID NO: 5879 - DNA, 23 bp, synthetic construct
  misc_feature 1..23: note = HLA-A targeting gRNA
  source 1..23: mol_type = other DNA
ctgaagcaactgccctcctaagg

SEQ ID NO: 5880 - DNA, 23 bp, synthetic construct
  misc_feature 1..23: note = HLA-A targeting gRNA
  source 1..23: mol_type = other DNA
ctgaagggctccaggacttctgg

SEQ ID NO: 5881 - DNA, 23 bp, synthetic construct
  misc_feature 1..23: note = HLA-A targeting gRNA
  source 1..23: mol_type = other DNA
ctgaccacgggggcggggccagg

SEQ ID NO: 5882 - DNA, 23 bp, synthetic construct
  misc_feature 1..23: note = HLA-A targeting gRNA
  source 1..23: mol_type = other DNA
ctgaccatgaggtcaccctgagg

SEQ ID NO: 5883 - DNA, 23 bp, synthetic construct
  misc_feature 1..23: note = HLA-A targeting gRNA
  source 1..23: mol_type = other DNA
ctgaccgcgagggctgggccagg

SEQ ID NO: 5884 - DNA, 23 bp, synthetic construct
  misc_feature 1..23: note = HLA-A targeting gRNA
  source 1..23: mol_type = other DNA
ctgaccgcggggccggggccagg

SEQ ID NO: 5885 - DNA, 23 bp, synthetic construct
  misc_feature 1..23: note = HLA-A targeting gRNA
  source 1..23: mol_type = other DNA
ctgaccgcggggcctaggccagg

SEQ ID NO: 5886 - DNA, 23 bp, synthetic construct
  misc_feature 1..23: note = HLA-A targeting gRNA
  source 1..23: mol_type = other DNA
ctgaccgcggggcctgggccagg

SEQ ID NO: 5887 - DNA, 23 bp, synthetic construct
  misc_feature 1..23: note = HLA-A targeting gRNA
  source 1..23: mol_type = other DNA
ctgaccgcgggggcggggccagg

SEQ ID NO: 5888 - DNA, 23 bp, synthetic construct
  misc_feature 1..23: note = HLA-A targeting gRNA
  source 1..23: mol_type = other DNA
ctgacctgagtggaggccgaagg

SEQ ID NO: 5889 - DNA, 23 bp, synthetic construct
  misc_feature 1..23: note = HLA-A targeting gRNA
  source 1..23: mol_type = other DNA
ctgacctgagtggaggctgcagg

SEQ ID NO: 5890 - DNA, 23 bp, synthetic construct
  misc_feature 1..23: note = HLA-A targeting gRNA
  source 1..23: mol_type = other DNA
ctgacgctcaatgtgtttgaagg

SEQ ID NO: 5891 - DNA, 23 bp, synthetic construct
  misc_feature 1..23: note = HLA-A targeting gRNA
  source 1..23: mol_type = other DNA
ctgagaacggacaggacacctgg

SEQ ID NO: 5892 - DNA, 23 bp, synthetic construct
  misc_feature 1..23: note = HLA-A targeting gRNA
  source 1..23: mol_type = other DNA
ctgagaatggacaggacacctgg

SEQ ID NO: 5893 - DNA, 23 bp, synthetic construct
  misc_feature 1..23: note = HLA-A targeting gRNA
  source 1..23: mol_type = other DNA
ctgagaatggacgggacacctgg

SEQ ID NO: 5894 - DNA, 23 bp, synthetic construct
  misc_feature 1..23: note = HLA-A targeting gRNA
  source 1..23: mol_type = other DNA
ctgagaatgggcaggacacctgg

SEQ ID NO: 5895 - DNA, 23 bp, synthetic construct
  misc_feature 1..23: note = HLA-A targeting gRNA
  source 1..23: mol_type = other DNA
ctgagacagctgtcttgtgaggg

SEQ ID NO: 5896 - DNA, 23 bp, synthetic construct
  misc_feature 1..23: note = HLA-A targeting gRNA
  source 1..23: mol_type = other DNA
ctgagccgccgtgtccgcagcgg

SEQ ID NO: 5897 - DNA, 23 bp, synthetic construct
  misc_feature 1..23: note = HLA-A targeting gRNA
  source 1..23: mol_type = other DNA
ctgagccgccgtgtccgccgcgg

SEQ ID NO: 5898 - DNA, 23 bp, synthetic construct
  misc_feature 1..23: note = HLA-A targeting gRNA
  source 1..23: mol_type = other DNA
ctgagccgccgtgtccgcggcgg

SEQ ID NO: 5899 - DNA, 23 bp, synthetic construct
  misc_feature 1..23: note = HLA-A targeting gRNA
  source 1..23: mol_type = other DNA
ctgagccgccttgtccgcggcgg

SEQ ID NO: 5900 - DNA, 23 bp, synthetic construct
  misc_feature 1..23: note = HLA-A targeting gRNA
  source 1..23: mol_type = other DNA
ctgagccgcggtatccgcggcgg

SEQ ID NO: 5901 - DNA, 23 bp, synthetic construct
  misc_feature 1..23: note = HLA-A targeting gRNA
  source 1..23: mol_type = other DNA
ctgagccgcggtgtccgcagcgg

SEQ ID NO: 5902 - DNA, 23 bp, synthetic construct
  misc_feature 1..23: note = HLA-A targeting gRNA
  source 1..23: mol_type = other DNA
ctgagccgcggtgtccgccgcgg

SEQ ID NO: 5903 - DNA, 23 bp, synthetic construct
  misc_feature 1..23: note = HLA-A targeting gRNA
  source 1..23: mol_type = other DNA
ctgagccgcggtgtccgcggcgg

SEQ ID NO: 5904 - DNA, 23 bp, synthetic construct
  misc_feature 1..23: note = HLA-A targeting gRNA
  source 1..23: mol_type = other DNA
ctgagccgctgtgtccccggcgg

SEQ ID NO: 5905 - DNA, 23 bp, synthetic construct
  misc_feature 1..23: note = HLA-A targeting gRNA
  source 1..23: mol_type = other DNA
ctgagccgctgtgtccgcggcgg

SEQ ID NO: 5906 - DNA, 23 bp, synthetic construct
  misc_feature 1..23: note = HLA-A targeting gRNA
  source 1..23: mol_type = other DNA
ctgagtccgggtgggtgactggg

SEQ ID NO: 5907 - DNA, 23 bp, synthetic construct
  misc_feature 1..23: note = HLA-A targeting gRNA
  source 1..23: mol_type = other DNA
ctgagtccgggtgggtgcgtggg

SEQ ID NO: 5908 - DNA, 23 bp, synthetic construct
  misc_feature 1..23: note = HLA-A targeting gRNA
  source 1..23: mol_type = other DNA
ctgagttttcttgtcccactggg

SEQ ID NO: 5909 - DNA, 23 bp, synthetic construct
  misc_feature 1..23: note = HLA-A targeting gRNA
  source 1..23: mol_type = other DNA
ctgcaacgcgcgggtaccagggg

SEQ ID NO: 5910 - DNA, 23 bp, synthetic construct
  misc_feature 1..23: note = HLA-A targeting gRNA
  source 1..23: mol_type = other DNA
ctgcacaaaagagtaagtgctgg

SEQ ID NO: 5911 - DNA, 23 bp, synthetic construct
  misc_feature 1..23: note = HLA-A targeting gRNA
  source 1..23: mol_type = other DNA
ctgcacaaaagagtaagttctgg

SEQ ID NO: 5912 - DNA, 23 bp, synthetic construct
  misc_feature 1..23: note = HLA-A targeting gRNA
  source 1..23: mol_type = other DNA
ctgcaccctgagatggagtaagg

SEQ ID NO: 5913 - DNA, 23 bp, synthetic construct
  misc_feature 1..23: note = HLA-A targeting gRNA
  source 1..23: mol_type = other DNA
ctgcagagcgcgggtaccagggg

SEQ ID NO: 5914 - DNA, 23 bp, synthetic construct
  misc_feature 1..23: note = HLA-A targeting gRNA
  source 1..23: mol_type = other DNA
ctgcagcacgcgggtaccagggg

SEQ ID NO: 5915 - DNA, 23 bp, synthetic construct
  misc_feature 1..23: note = HLA-A targeting gRNA
  source 1..23: mol_type = other DNA
ctgcagcctccactcaggtcagg

SEQ ID NO: 5916 - DNA, 23 bp, synthetic construct
  misc_feature 1..23: note = HLA-A targeting gRNA
  source 1..23: mol_type = other DNA
ctgcagcgcgcaggtaccagggg

SEQ ID NO: 5917 - DNA, 23 bp, synthetic construct
  misc_feature 1..23: note = HLA-A targeting gRNA
  source 1..23: mol_type = other DNA
ctgcagcgcgcgggtaccaaggg

SEQ ID NO: 5918 - DNA, 23 bp, synthetic construct
  misc_feature 1..23: note = HLA-A targeting gRNA
  source 1..23: mol_type = other DNA
ctgcatcccagtaatgaggcagg

SEQ ID NO: 5919 - DNA, 23 bp, synthetic construct
  misc_feature 1..23: note = HLA-A targeting gRNA
  source 1..23: mol_type = other DNA
ctgcatgtaagtgatggcggtgg

SEQ ID NO: 5920 - DNA, 23 bp, synthetic construct
  misc_feature 1..23: note = HLA-A targeting gRNA
  source 1..23: mol_type = other DNA
ctgccccacactcagtgtttggg

SEQ ID NO: 5921 - DNA, 23 bp, synthetic construct
  misc_feature 1..23: note = HLA-A targeting gRNA
  source 1..23: mol_type = other DNA
ctgccccccagagcagcaggagg

SEQ ID NO: 5922 - DNA, 23 bp, synthetic construct
  misc_feature 1..23: note = HLA-A targeting gRNA
  source 1..23: mol_type = other DNA
ctgccccctagagcagcaggagg

SEQ ID NO: 5923 - DNA, 23 bp, synthetic construct
  misc_feature 1..23: note = HLA-A targeting gRNA
  source 1..23: mol_type = other DNA
ctgcctggagggcgagtgcgtgg

SEQ ID NO: 5924 - DNA, 23 bp, synthetic construct
  misc_feature 1..23: note = HLA-A targeting gRNA
  source 1..23: mol_type = other DNA
ctgcggagatcacactgatctgg

SEQ ID NO: 5925 - DNA, 23 bp, synthetic construct
  misc_feature 1..23: note = HLA-A targeting gRNA
  source 1..23: mol_type = other DNA
ctgcggtcgaggttctgggcggg

SEQ ID NO: 5926 - DNA, 23 bp, synthetic construct
  misc_feature 1..23: note = HLA-A targeting gRNA
  source 1..23: mol_type = other DNA
ctgcgtccaggctggtgtctggg

SEQ ID NO: 5927 - DNA, 23 bp, synthetic construct
  misc_feature 1..23: note = HLA-A targeting gRNA
  source 1..23: mol_type = other DNA
ctgcgtccaggctggtgtttggg

SEQ ID NO: 5928 - DNA, 23 bp, synthetic construct
  misc_feature 1..23: note = HLA-A targeting gRNA
  source 1..23: mol_type = other DNA
ctgcgtccgggctggtgtctggg

SEQ ID NO: 5929 - DNA, 23 bp, synthetic construct
  misc_feature 1..23: note = HLA-A targeting gRNA
  source 1..23: mol_type = other DNA
ctgcgtgtaaatgatggcggcgg

SEQ ID NO: 5930 - DNA, 23 bp, synthetic construct
  misc_feature 1..23: note = HLA-A targeting gRNA
  source 1..23: mol_type = other DNA
ctgcgtgtaagtgatgccggtgg

SEQ ID NO: 5931 - DNA, 23 bp, synthetic construct
  misc_feature 1..23: note = HLA-A targeting gRNA
  source 1..23: mol_type = other DNA
ctgcgtgtaagtgatggcagtgg

SEQ ID NO: 5932 - DNA, 23 bp, synthetic construct
  misc_feature 1..23: note = HLA-A targeting gRNA
  source 1..23: mol_type = other DNA
ctgcgtgtaagtgatggcggcgg

SEQ ID NO: 5933 - DNA, 23 bp, synthetic construct
  misc_feature 1..23: note = HLA-A targeting gRNA
  source 1..23: mol_type = other DNA
ctgcgtgtaagtgatggcggtgg

SEQ ID NO: 5934 - DNA, 23 bp, synthetic construct
  misc_feature 1..23: note = HLA-A targeting gRNA
  source 1..23: mol_type = other DNA
ctgcgtgtaagtgatgggggcgg

SEQ ID NO: 5935 - DNA, 23 bp, synthetic construct
  misc_feature 1..23: note = HLA-A targeting gRNA
  source 1..23: mol_type = other DNA
ctgcgtgtaagtgatgggggtgg

SEQ ID NO: 5936 - DNA, 23 bp, synthetic construct
  misc_feature 1..23: note = HLA-A targeting gRNA
  source 1..23: mol_type = other DNA
ctgcgtgtaagtggtgggggtgg

SEQ ID NO: 5937 - DNA, 23 bp, synthetic construct
  misc_feature 1..23: note = HLA-A targeting gRNA
  source 1..23: mol_type = other DNA
ctgctccacccacggcgcccggg

SEQ ID NO: 5938 - DNA, 23 bp, synthetic construct
  misc_feature 1..23: note = HLA-A targeting gRNA
  source 1..23: mol_type = other DNA
ctgctctatccacggcgcccggg

SEQ ID NO: 5939 - DNA, 23 bp, synthetic construct
  misc_feature 1..23: note = HLA-A targeting gRNA
  source 1..23: mol_type = other DNA
ctgctctatccatggcgcccagg

SEQ ID NO: 5940 - DNA, 23 bp, synthetic construct
  misc_feature 1..23: note = HLA-A targeting gRNA
  source 1..23: mol_type = other DNA
ctgctctatccatggcgcccggg

SEQ ID NO: 5941 - DNA, 23 bp, synthetic construct
  misc_feature 1..23: note = HLA-A targeting gRNA
  source 1..23: mol_type = other DNA
ctgctctatccatggctcccggg

SEQ ID NO: 5942 - DNA, 23 bp, synthetic construct
  misc_feature 1..23: note = HLA-A targeting gRNA
  source 1..23: mol_type = other DNA
ctgctctctaggacaattaaggg

SEQ ID NO: 5943 - DNA, 23 bp, synthetic construct
  misc_feature 1..23: note = HLA-A targeting gRNA
  source 1..23: mol_type = other DNA
ctgctgtctaggacaattaaggg

SEQ ID NO: 5944 - DNA, 23 bp, synthetic construct
  misc_feature 1..23: note = HLA-A targeting gRNA
  source 1..23: mol_type = other DNA
ctgcttcccagtaatgaggcagg

SEQ ID NO: 5945 - DNA, 23 bp, synthetic construct
  misc_feature 1..23: note = HLA-A targeting gRNA
  source 1..23: mol_type = other DNA
ctgcttcccagtaatgatgcagg

SEQ ID NO: 5946 - DNA, 23 bp, synthetic construct
  misc_feature 1..23: note = HLA-A targeting gRNA
  source 1..23: mol_type = other DNA
ctggaagaaggacccgacacagg

SEQ ID NO: 5947 - DNA, 23 bp, synthetic construct
  misc_feature 1..23: note = HLA-A targeting gRNA
  source 1..23: mol_type = other DNA
ctggaagaaggacccgacatagg

SEQ ID NO: 5948 - DNA, 23 bp, synthetic construct
  misc_feature 1..23: note = HLA-A targeting gRNA
  source 1..23: mol_type = other DNA
ctggaagcaccatccacacatgg

SEQ ID NO: 5949 - DNA, 23 bp, synthetic construct
  misc_feature 1..23: note = HLA-A targeting gRNA
  source 1..23: mol_type = other DNA
ctggaagcaccatccacacctgg

SEQ ID NO: 5950 - DNA, 23 bp, synthetic construct
  misc_feature 1..23: note = HLA-A targeting gRNA
  source 1..23: mol_type = other DNA
ctggaagcaccatccacacgtgg

SEQ ID NO: 5951 - DNA, 23 bp, synthetic construct
  misc_feature 1..23: note = HLA-A targeting gRNA
  source 1..23: mol_type = other DNA
ctggaccaactgccctcctaagg

SEQ ID NO: 5952 - DNA, 23 bp, synthetic construct
  misc_feature 1..23: note = HLA-A targeting gRNA
  source 1..23: mol_type = other DNA
ctggaccaactgctctcctaagg

SEQ ID NO: 5953 - DNA, 23 bp, synthetic construct
  misc_feature 1..23: note = HLA-A targeting gRNA
  source 1..23: mol_type = other DNA
ctggaccgccgcggacaaggcgg

SEQ ID NO: 5954 - DNA, 23 bp, synthetic construct
  misc_feature 1..23: note = HLA-A targeting gRNA
  source 1..23: mol_type = other DNA
ctggaccgccgcggacacagcgg

SEQ ID NO: 5955 - DNA, 23 bp, synthetic construct
  misc_feature 1..23: note = HLA-A targeting gRNA
  source 1..23: mol_type = other DNA
ctggaccgccgcggacaccgcgg

SEQ ID NO: 5956 - DNA, 23 bp, synthetic construct
  misc_feature 1..23: note = HLA-A targeting gRNA
  source 1..23: mol_type = other DNA
ctggaccgccgcggacacggcgg

SEQ ID NO: 5957 - DNA, 23 bp, synthetic construct
  misc_feature 1..23: note = HLA-A targeting gRNA
  source 1..23: mol_type = other DNA
ctggaccgccgcggataccgcgg

SEQ ID NO: 5958 - DNA, 23 bp, synthetic construct
  misc_feature 1..23: note = HLA-A targeting gRNA
  source 1..23: mol_type = other DNA
ctggaccgccggggacacagcgg

SEQ ID NO: 5959 - DNA, 23 bp, synthetic construct
  misc_feature 1..23: note = HLA-A targeting gRNA
  source 1..23: mol_type = other DNA
ctggaccgcggcggacaccgcgg

SEQ ID NO: 5960 - DNA, 23 bp, synthetic construct
  misc_feature 1..23: note = HLA-A targeting gRNA
  source 1..23: mol_type = other DNA
ctggaccgcggcggacacggcgg

SEQ ID NO: 5961 - DNA, 23 bp, synthetic construct
  misc_feature 1..23: note = HLA-A targeting gRNA
  source 1..23: mol_type = other DNA
ctggaccgctgcggacaccgcgg

SEQ ID NO: 5962 - DNA, 23 bp, synthetic construct
  misc_feature 1..23: note = HLA-A targeting gRNA
  source 1..23: mol_type = other DNA
ctggaccgctgcggacacggcgg

SEQ ID NO: 5963 - DNA, 23 bp, synthetic construct
  misc_feature 1..23: note = HLA-A targeting gRNA
  source 1..23: mol_type = other DNA
ctggactgccgcggacacggcgg

SEQ ID NO: 5964 - DNA, 23 bp, synthetic construct
  misc_feature 1..23: note = HLA-A targeting gRNA
  source 1..23: mol_type = other DNA
ctggagcaactgccctcctaagg

SEQ ID NO: 5965 - DNA, 23 bp, synthetic construct
  misc_feature 1..23: note = HLA-A targeting gRNA
  source 1..23: mol_type = other DNA
ctggagcccttcagcagggtcgg

SEQ ID NO: 5966 - DNA, 23 bp, synthetic construct
  misc_feature 1..23: note = HLA-A targeting gRNA
  source 1..23: mol_type = other DNA
ctggagcgcgcgggtaccagggg

SEQ ID NO: 5967 - DNA, 23 bp, synthetic construct
  misc_feature 1..23: note = HLA-A targeting gRNA
  source 1..23: mol_type = other DNA
ctggagcgcgctggtaccagggg

SEQ ID NO: 5968 - DNA, 23 bp, synthetic construct
  misc_feature 1..23: note = HLA-A targeting gRNA
  source 1..23: mol_type = other DNA
ctggatagagcaggaggggccgg

SEQ ID NO: 5969 - DNA, 23 bp, synthetic construct
  misc_feature 1..23: note = HLA-A targeting gRNA
  source 1..23: mol_type = other DNA
ctggatcgcggcggacaccgcgg

SEQ ID NO: 5970 - DNA, 23 bp, synthetic construct
  misc_feature 1..23: note = HLA-A targeting gRNA
  source 1..23: mol_type = other DNA
ctggattgccgcggacacggcgg

SEQ ID NO: 5971 - DNA, 23 bp, synthetic construct
  misc_feature 1..23: note = HLA-A targeting gRNA
  source 1..23: mol_type = other DNA
ctggccgcggggccggggccagg

SEQ ID NO: 5972 - DNA, 23 bp, synthetic construct
  misc_feature 1..23: note = HLA-A targeting gRNA
  source 1..23: mol_type = other DNA
ctggcctggtctccacaagctgg

SEQ ID NO: 5973 - DNA, 23 bp, synthetic construct
  misc_feature 1..23: note = HLA-A targeting gRNA
  source 1..23: mol_type = other DNA
ctggctgtcctagctgtcctagg

SEQ ID NO: 5974 - DNA, 23 bp, synthetic construct
  misc_feature 1..23: note = HLA-A targeting gRNA
  source 1..23: mol_type = other DNA
ctgggaagcagcatccacacagg

SEQ ID NO: 5975 - DNA, 23 bp, synthetic construct
  misc_feature 1..23: note = HLA-A targeting gRNA
  source 1..23: mol_type = other DNA
ctgggaagcagcatcctcacagg

SEQ ID NO: 5976 - DNA, 23 bp, synthetic construct
  misc_feature 1..23: note = HLA-A targeting gRNA
  source 1..23: mol_type = other DNA
ctgggaagcagcatgcacacagg

SEQ ID NO: 5977 - DNA, 23 bp, synthetic construct
  misc_feature 1..23: note = HLA-A targeting gRNA
  source 1..23: mol_type = other DNA
ctgggagctgaagtggtcggggg

SEQ ID NO: 5978 - DNA, 23 bp, synthetic construct
  misc_feature 1..23: note = HLA-A targeting gRNA
  source 1..23: mol_type = other DNA
ctgggatgcagcatccacacagg

SEQ ID NO: 5979 - DNA, 23 bp, synthetic construct
  misc_feature 1..23: note = HLA-A targeting gRNA
  source 1..23: mol_type = other DNA
ctgggcactgttgctgcctgggg

SEQ ID NO: 5980 - DNA, 23 bp, synthetic construct
  misc_feature 1..23: note = HLA-A targeting gRNA
  source 1..23: mol_type = other DNA
ctgggcactgttgctggctgggg

SEQ ID NO: 5981 - DNA, 23 bp, synthetic construct
  misc_feature 1..23: note = HLA-A targeting gRNA
  source 1..23: mol_type = other DNA
ctgggccagggtctcacacttgg

SEQ ID NO: 5982 - DNA, 23 bp, synthetic construct
  misc_feature 1..23: note = HLA-A targeting gRNA
  source 1..23: mol_type = other DNA
ctgggccggtgagtgcgggtcgg

SEQ ID NO: 5983 - DNA, 23 bp, synthetic construct
  misc_feature 1..23: note = HLA-A targeting gRNA
  source 1..23: mol_type = other DNA
ctgggcgccatggatagagcagg

SEQ ID NO: 5984 - DNA, 23 bp, synthetic construct
  misc_feature 1..23: note = HLA-A targeting gRNA
  source 1..23: mol_type = other DNA
ctgggcggattccgcagcctcgg

SEQ ID NO: 5985 - DNA, 23 bp, synthetic construct
  misc_feature 1..23: note = HLA-A targeting gRNA
  source 1..23: mol_type = other DNA
ctgggcgggtcccgcggcctcgg

SEQ ID NO: 5986 - DNA, 23 bp, synthetic construct
  misc_feature 1..23: note = HLA-A targeting gRNA
  source 1..23: mol_type = other DNA
ctgggcgggtgagtgcgggtcgg

SEQ ID NO: 5987 - DNA, 23 bp, synthetic construct
  misc_feature 1..23: note = HLA-A targeting gRNA
  source 1..23: mol_type = other DNA
ctgggcgggttccgcagcctcgg

SEQ ID NO: 5988 - DNA, 23 bp, synthetic construct
  misc_feature 1..23: note = HLA-A targeting gRNA
  source 1..23: mol_type = other DNA
ctgggctgaccacgggggcgggg

SEQ ID NO: 5989 - DNA, 23 bp, synthetic construct
  misc_feature 1..23: note = HLA-A targeting gRNA
  source 1..23: mol_type = other DNA
ctgggctgaccgcgagggctggg

SEQ ID NO: 5990 - DNA, 23 bp, synthetic construct
  misc_feature 1..23: note = HLA-A targeting gRNA
  source 1..23: mol_type = other DNA
ctgggctgaccgcggggccgggg

SEQ ID NO: 5991 - DNA, 23 bp, synthetic construct
  misc_feature 1..23: note = HLA-A targeting gRNA
  source 1..23: mol_type = other DNA
ctgggctgaccgcgggggcgggg

SEQ ID NO: 5992 - DNA, 23 bp, synthetic construct
  misc_feature 1..23: note = HLA-A targeting gRNA
  source 1..23: mol_type = other DNA
ctggggagatcacactgacctgg

SEQ ID NO: 5993 - DNA, 23 bp, synthetic construct
  misc_feature 1..23: note = HLA-A targeting gRNA
  source 1..23: mol_type = other DNA
ctggggagctgaagtggtcgggg

SEQ ID NO: 5994 - DNA, 23 bp, synthetic construct
  misc_feature 1..23: note = HLA-A targeting gRNA
  source 1..23: mol_type = other DNA
ctggggagctgaagtggtctggg

SEQ ID NO: 5995 - DNA, 23 bp, synthetic construct
  misc_feature 1..23: note = HLA-A targeting gRNA
  source 1..23: mol_type = other DNA
ctggggcggggctcgcgggacgg

SEQ ID NO: 5996 - DNA, 23 bp, synthetic construct
  misc_feature 1..23: note = HLA-A targeting gRNA
  source 1..23: mol_type = other DNA
ctggggcggggctcgggggacgg

SEQ ID NO: 5997 - DNA, 23 bp, synthetic construct
  misc_feature 1..23: note = HLA-A targeting gRNA
  source 1..23: mol_type = other DNA
ctggggcggggtggggcagaggg

SEQ ID NO: 5998 - DNA, 23 bp, synthetic construct
  misc_feature 1..23: note = HLA-A targeting gRNA
  source 1..23: mol_type = other DNA
ctggggcggggttcgggggacgg

SEQ ID NO: 5999 - DNA, 23 bp, synthetic construct
  misc_feature 1..23: note = HLA-A targeting gRNA
  source 1..23: mol_type = other DNA
ctggggctctcgccggtcgaggg

SEQ ID NO: 6000 - DNA, 23 bp, synthetic construct
  misc_feature 1..23: note = HLA-A targeting gRNA
  source 1..23: mol_type = other DNA
ctggggctctctccggccgaggg

SEQ ID NO: 6001 - DNA, 23 bp, synthetic construct
  misc_feature 1..23: note = HLA-A targeting gRNA
  source 1..23: mol_type = other DNA
ctggggctctctccggtcgaggg

SEQ ID NO: 6002 - DNA, 23 bp, synthetic construct
  misc_feature 1..23: note = HLA-A targeting gRNA
  source 1..23: mol_type = other DNA
ctggggcttgaaaccccagtggg

SEQ ID NO: 6003 - DNA, 23 bp, synthetic construct
  misc_feature 1..23: note = HLA-A targeting gRNA
  source 1..23: mol_type = other DNA
ctggggcttgaaacccccagtgg

SEQ ID NO: 6004 - DNA, 23 bp, synthetic construct
  misc_feature 1..23: note = HLA-A targeting gRNA
  source 1..23: mol_type = other DNA
ctggggcttgaaactcccagtgg

SEQ ID NO: 6005 - DNA, 23 bp, synthetic construct
  misc_feature 1..23: note = HLA-A targeting gRNA
  source 1..23: mol_type = other DNA
ctggggggggggggggcagaggg

SEQ ID NO: 6006 - DNA, 23 bp, synthetic construct
  misc_feature 1..23: note = HLA-A targeting gRNA
  source 1..23: mol_type = other DNA
ctgggggtgggtggggcagaggg

SEQ ID NO: 6007 - DNA, 23 bp, synthetic construct
  misc_feature 1..23: note = HLA-A targeting gRNA
  source 1..23: mol_type = other DNA
ctgggggtgggtggggcagtggg

SEQ ID NO: 6008 - DNA, 23 bp, synthetic construct
  misc_feature 1..23: note = HLA-A targeting gRNA
  source 1..23: mol_type = other DNA
ctggggtaaggaggggaatgggg

SEQ ID NO: 6009 - DNA, 23 bp, synthetic construct
  misc_feature 1..23: note = HLA-A targeting gRNA
  source 1..23: mol_type = other DNA
ctgggtcagggctgaggcttggg

SEQ ID NO: 6010 - DNA, 23 bp, synthetic construct
  misc_feature 1..23: note = HLA-A targeting gRNA
  source 1..23: mol_type = other DNA
ctgggttttcttgtcccactggg

SEQ ID NO: 6011 - DNA, 23 bp, synthetic construct
  misc_feature 1..23: note = HLA-A targeting gRNA
  source 1..23: mol_type = other DNA
ctgggttttcttgttccactggg

SEQ ID NO: 6012 - DNA, 23 bp, synthetic construct
  misc_feature 1..23: note = HLA-A targeting gRNA
  source 1..23: mol_type = other DNA
ctgggttttgttgtcccactggg

SEQ ID NO: 6013 - DNA, 23 bp, synthetic construct
  misc_feature 1..23: note = HLA-A targeting gRNA
  source 1..23: mol_type = other DNA
ctggtcacatgggtggtcctagg

SEQ ID NO: 6014 - DNA, 23 bp, synthetic construct
  misc_feature 1..23: note = HLA-A targeting gRNA
  source 1..23: mol_type = other DNA
ctggtcatacccgcggaggaggg

SEQ ID NO: 6015 - DNA, 23 bp, synthetic construct
  misc_feature 1..23: note = HLA-A targeting gRNA
  source 1..23: mol_type = other DNA
ctggtgagtgcggggtcggcagg

SEQ ID NO: 6016 - DNA, 23 bp, synthetic construct
  misc_feature 1..23: note = HLA-A targeting gRNA
  source 1..23: mol_type = other DNA
ctggtgagtgcggggtcgggagg

SEQ ID NO: 6017 - DNA, 23 bp, synthetic construct
  misc_feature 1..23: note = HLA-A targeting gRNA
  source 1..23: mol_type = other DNA
ctggttgtagtagcggagcaggg

SEQ ID NO: 6018 - DNA, 23 bp, synthetic construct
  misc_feature 1..23: note = HLA-A targeting gRNA
  source 1..23: mol_type = other DNA
ctggttgtagtagcggagcgcgg

SEQ ID NO: 6019 - DNA, 23 bp, synthetic construct
  misc_feature 1..23: note = HLA-A targeting gRNA
  source 1..23: mol_type = other DNA
ctggttgtcctagctgtcctagg

SEQ ID NO: 6020 - DNA, 23 bp, synthetic construct
  misc_feature 1..23: note = HLA-A targeting gRNA
  source 1..23: mol_type = other DNA
ctggttgtcctagctgtccttgg

SEQ ID NO: 6021 - DNA, 23 bp, synthetic construct
  misc_feature 1..23: note = HLA-A targeting gRNA
  source 1..23: mol_type = other DNA
ctgtaggacagctgcctgtgtgg

SEQ ID NO: 6022 - DNA, 23 bp, synthetic construct
  misc_feature 1..23: note = HLA-A targeting gRNA
  source 1..23: mol_type = other DNA
ctgtgagtgcgaggttgggaggg

SEQ ID NO: 6023 - DNA, 23 bp, synthetic construct
  misc_feature 1..23: note = HLA-A targeting gRNA
  source 1..23: mol_type = other DNA
ctgtgagtgcggggttaggaggg

SEQ ID NO: 6024 - DNA, 23 bp, synthetic construct
  misc_feature 1..23: note = HLA-A targeting gRNA
  source 1..23: mol_type = other DNA
ctgtgagtgcggggttgggaggg

SEQ ID NO: 6025 - DNA, 23 bp, synthetic construct
  misc_feature 1..23: note = HLA-A targeting gRNA
  source 1..23: mol_type = other DNA
ctgtgccccttccccacaccagg

SEQ ID NO: 6026 - DNA, 23 bp, synthetic construct
  misc_feature 1..23: note = HLA-A targeting gRNA
  source 1..23: mol_type = other DNA
ctgtgccccttccccaccccagg

SEQ ID NO: 6027 - DNA, 23 bp, synthetic construct
  misc_feature 1..23: note = HLA-A targeting gRNA
  source 1..23: mol_type = other DNA
ctgtgccccttccctaccccagg

SEQ ID NO: 6028 - DNA, 23 bp, synthetic construct
  misc_feature 1..23: note = HLA-A targeting gRNA
  source 1..23: mol_type = other DNA
ctgtgtccaggctggcgtctggg

SEQ ID NO: 6029 - DNA, 23 bp, synthetic construct
  misc_feature 1..23: note = HLA-A targeting gRNA
  source 1..23: mol_type = other DNA
ctgtgtcccggcccggccgcggg

SEQ ID NO: 6030 - DNA, 23 bp, synthetic construct
  misc_feature 1..23: note = HLA-A targeting gRNA
  source 1..23: mol_type = other DNA
ctgtgtcccttccccaccccagg

SEQ ID NO: 6031 - DNA, 23 bp, synthetic construct
  misc_feature 1..23: note = HLA-A targeting gRNA
  source 1..23: mol_type = other DNA
ctgtgtcgggtccttcttccagg

SEQ ID NO: 6032 - DNA, 23 bp, synthetic construct
  misc_feature 1..23: note = HLA-A targeting gRNA
  source 1..23: mol_type = other DNA
ctgttccggtcccaatactccgg

SEQ ID NO: 6033 - DNA, 23 bp, synthetic construct
  misc_feature 1..23: note = HLA-A targeting gRNA
  source 1..23: mol_type = other DNA
cttaattgtctagagagaagagg

SEQ ID NO: 6034 - DNA, 23 bp, synthetic construct
  misc_feature 1..23: note = HLA-A targeting gRNA
  source 1..23: mol_type = other DNA
cttaccccagctcagggtgaggg

SEQ ID NO: 6035 - DNA, 23 bp, synthetic construct
  misc_feature 1..23: note = HLA-A targeting gRNA
  source 1..23: mol_type = other DNA
cttactccatctcagggtgaggg

SEQ ID NO: 6036 - DNA, 23 bp, synthetic construct
  misc_feature 1..23: note = HLA-A targeting gRNA
  source 1..23: mol_type = other DNA
cttactccatctcagggtgcagg

SEQ ID NO: 6037 - DNA, 23 bp, synthetic construct
  misc_feature 1..23: note = HLA-A targeting gRNA
  source 1..23: mol_type = other DNA
cttagatcacccagcgcaagtgg

SEQ ID NO: 6038 - DNA, 23 bp, synthetic construct
  misc_feature 1..23: note = HLA-A targeting gRNA
  source 1..23: mol_type = other DNA
cttaggagagcagttggtccagg

SEQ ID NO: 6039 - DNA, 23 bp, synthetic construct
  misc_feature 1..23: note = HLA-A targeting gRNA
  source 1..23: mol_type = other DNA
cttaggagggcagttgcttcagg

SEQ ID NO: 6040 - DNA, 23 bp, synthetic construct
  misc_feature 1..23: note = HLA-A targeting gRNA
  source 1..23: mol_type = other DNA
cttaggagggcagttggtccagg

SEQ ID NO: 6041 - DNA, 23 bp, synthetic construct
  misc_feature 1..23: note = HLA-A targeting gRNA
  source 1..23: mol_type = other DNA
cttcaaacacattgagcatgagg

SEQ ID NO: 6042 - DNA, 23 bp, synthetic construct
  misc_feature 1..23: note = HLA-A targeting gRNA
  source 1..23: mol_type = other DNA
cttcaaacacattgagcgtcagg

SEQ ID NO: 6043 - DNA, 23 bp, synthetic construct
  misc_feature 1..23: note = HLA-A targeting gRNA
  source 1..23: mol_type = other DNA
cttcaaacacattgagcgtgagg

SEQ ID NO: 6044 - DNA, 23 bp, synthetic construct
  misc_feature 1..23: note = HLA-A targeting gRNA
  source 1..23: mol_type = other DNA
cttcacaaaagagtaagtgctgg

SEQ ID NO: 6045 - DNA, 23 bp, synthetic construct
  misc_feature 1..23: note = HLA-A targeting gRNA
  source 1..23: mol_type = other DNA
cttcacaacagagtaagtgctgg

SEQ ID NO: 6046 - DNA, 23 bp, synthetic construct
  misc_feature 1..23: note = HLA-A targeting gRNA
  source 1..23: mol_type = other DNA
cttcagacacattgagtatgagg

SEQ ID NO: 6047 - DNA, 23 bp, synthetic construct
  misc_feature 1..23: note = HLA-A targeting gRNA
  source 1..23: mol_type = other DNA
cttcagacacattgagtgtgagg

SEQ ID NO: 6048 - DNA, 23 bp, synthetic construct
  misc_feature 1..23: note = HLA-A targeting gRNA
  source 1..23: mol_type = other DNA
cttcagccaggtcagggctgagg

SEQ ID NO: 6049 - DNA, 23 bp, synthetic construct
  misc_feature 1..23: note = HLA-A targeting gRNA
  source 1..23: mol_type = other DNA
cttcagccgggtcagggctgagg

SEQ ID NO: 6050 - DNA, 23 bp, synthetic construct
  misc_feature 1..23: note = HLA-A targeting gRNA
  source 1..23: mol_type = other DNA
cttcagctgggtcagggctgagg

SEQ ID NO: 6051 - DNA, 23 bp, synthetic construct
  misc_feature 1..23: note = HLA-A targeting gRNA
  source 1..23: mol_type = other DNA
cttcatcaccgtgggctacgtgg

SEQ ID NO: 6052 - DNA, 23 bp, synthetic construct
  misc_feature 1..23: note = HLA-A targeting gRNA
  source 1..23: mol_type = other DNA
cttcatcaccgtgggctatgtgg

SEQ ID NO: 6053 - DNA, 23 bp, synthetic construct
  misc_feature 1..23: note = HLA-A targeting gRNA
  source 1..23: mol_type = other DNA
cttcatctcagtgcgctacgtgg

SEQ ID NO: 6054 - DNA, 23 bp, synthetic construct
  misc_feature 1..23: note = HLA-A targeting gRNA
  source 1..23: mol_type = other DNA
cttcatctcagtgggctacgtgg

SEQ ID NO: 6055 - DNA, 23 bp, synthetic construct
  misc_feature 1..23: note = HLA-A targeting gRNA
  source 1..23: mol_type = other DNA
cttcatctcagtgggttacgtgg

SEQ ID NO: 6056 - DNA, 23 bp, synthetic construct
  misc_feature 1..23: note = HLA-A targeting gRNA
  source 1..23: mol_type = other DNA
cttcatggagtgggagcctgggg

SEQ ID NO: 6057 - DNA, 23 bp, synthetic construct
  misc_feature 1..23: note = HLA-A targeting gRNA
  source 1..23: mol_type = other DNA
cttcatggagtgggaggctgggg

SEQ ID NO: 6058 - DNA, 23 bp, synthetic construct
  misc_feature 1..23: note = HLA-A targeting gRNA
  source 1..23: mol_type = other DNA
cttcattaccgtgggctacgtgg

SEQ ID NO: 6059 - DNA, 23 bp, synthetic construct
  misc_feature 1..23: note = HLA-A targeting gRNA
  source 1..23: mol_type = other DNA
cttcattgcagtgggctacgtgg

SEQ ID NO: 6060 - DNA, 23 bp, synthetic construct
  misc_feature 1..23: note = HLA-A targeting gRNA
  source 1..23: mol_type = other DNA
cttccagaagtggacagctgtgg

SEQ ID NO: 6061 - DNA, 23 bp, synthetic construct
  misc_feature 1..23: note = HLA-A targeting gRNA
  source 1..23: mol_type = other DNA
cttcccacaggtggaaaaggagg

SEQ ID NO: 6062 - DNA, 23 bp, synthetic construct
  misc_feature 1..23: note = HLA-A targeting gRNA
  source 1..23: mol_type = other DNA
cttcccctgactcatgatgctgg

SEQ ID NO: 6063 - DNA, 23 bp, synthetic construct
  misc_feature 1..23: note = HLA-A targeting gRNA
  source 1..23: mol_type = other DNA
cttcctcccagtcccctcacagg

SEQ ID NO: 6064 - DNA, 23 bp, synthetic construct
  misc_feature 1..23: note = HLA-A targeting gRNA
  source 1..23: mol_type = other DNA
cttcctcccagtgccctcacagg

SEQ ID NO: 6065 - DNA, 23 bp, synthetic construct
  misc_feature 1..23: note = HLA-A targeting gRNA
  source 1..23: mol_type = other DNA
cttcctcctacacatcatagcgg

SEQ ID NO: 6066 - DNA, 23 bp, synthetic construct
  misc_feature 1..23: note = HLA-A targeting gRNA
  source 1..23: mol_type = other DNA
cttcctcctacacatcttagcgg

SEQ ID NO: 6067 - DNA, 23 bp, synthetic construct
  misc_feature 1..23: note = HLA-A targeting gRNA
  source 1..23: mol_type = other DNA
cttcggcctccactcaggtcagg

SEQ ID NO: 6068 - DNA, 23 bp, synthetic construct
  misc_feature 1..23: note = HLA-A targeting gRNA
  source 1..23: mol_type = other DNA
cttcggtaaggagggggatgagg

SEQ ID NO: 6069 - DNA, 23 bp, synthetic construct
  misc_feature 1..23: note = HLA-A targeting gRNA
  source 1..23: mol_type = other DNA
cttcgtctcagtgggctacgtgg

SEQ ID NO: 6070 - DNA, 23 bp, synthetic construct
  misc_feature 1..23: note = HLA-A targeting gRNA
  source 1..23: mol_type = other DNA
cttctctctaggacaattaaggg

SEQ ID NO: 6071 - DNA, 23 bp, synthetic construct
  misc_feature 1..23: note = HLA-A targeting gRNA
  source 1..23: mol_type = other DNA
cttctcttgggtccaagactagg

SEQ ID NO: 6072 - DNA, 23 bp, synthetic construct
  misc_feature 1..23: note = HLA-A targeting gRNA
  source 1..23: mol_type = other DNA
cttcttctcccaacctatgtcgg

SEQ ID NO: 6073 - DNA, 23 bp, synthetic construct
  misc_feature 1..23: note = HLA-A targeting gRNA
  source 1..23: mol_type = other DNA
cttcttctcccaacctgcgacgg

SEQ ID NO: 6074 - DNA, 23 bp, synthetic construct
  misc_feature 1..23: note = HLA-A targeting gRNA
  source 1..23: mol_type = other DNA
cttcttctcccaacctgcgtcgg

SEQ ID NO: 6075 - DNA, 23 bp, synthetic construct
  misc_feature 1..23: note = HLA-A targeting gRNA
  source 1..23: mol_type = other DNA
cttcttctcccaacctgtgtcgg

SEQ ID NO: 6076 - DNA, 23 bp, synthetic construct
  misc_feature 1..23: note = HLA-A targeting gRNA
  source 1..23: mol_type = other DNA
cttcttctcccaacttgtgtcgg

SEQ ID NO: 6077 - DNA, 23 bp, synthetic construct
  misc_feature 1..23: note = HLA-A targeting gRNA
  source 1..23: mol_type = other DNA
cttcttcttccaacctgcgtcgg

SEQ ID NO: 6078 - DNA, 23 bp, synthetic construct
  misc_feature 1..23: note = HLA-A targeting gRNA
  source 1..23: mol_type = other DNA
cttgaaaaggtgagattcttggg

SEQ ID NO: 6079 - DNA, 23 bp, synthetic construct
  misc_feature 1..23: note = HLA-A targeting gRNA
  source 1..23: mol_type = other DNA
cttgctctatccacggcgcccgg

SEQ ID NO: 6080 - DNA, 23 bp, synthetic construct
  misc_feature 1..23: note = HLA-A targeting gRNA
  source 1..23: mol_type = other DNA
cttgctctatccatggcgcccgg

SEQ ID NO: 6081 - DNA, 23 bp, synthetic construct
  misc_feature 1..23: note = HLA-A targeting gRNA
  source 1..23: mol_type = other DNA
cttggggtctagagtgggcaggg

SEQ ID NO: 6082 - DNA, 23 bp, synthetic construct
  misc_feature 1..23: note = HLA-A targeting gRNA
  source 1..23: mol_type = other DNA
cttggggtctagagtgggcgggg

SEQ ID NO: 6083 - DNA, 23 bp, synthetic construct
  misc_feature 1..23: note = HLA-A targeting gRNA
  source 1..23: mol_type = other DNA
cttggggtctagagtgggtgggg

SEQ ID NO: 6084 - DNA, 23 bp, synthetic construct
  misc_feature 1..23: note = HLA-A targeting gRNA
  source 1..23: mol_type = other DNA
cttggggtggatctcagacgggg

SEQ ID NO: 6085 - DNA, 23 bp, synthetic construct
  misc_feature 1..23: note = HLA-A targeting gRNA
  source 1..23: mol_type = other DNA
cttgtaaaggtgagattctgggg

SEQ ID NO: 6086 - DNA, 23 bp, synthetic construct
  misc_feature 1..23: note = HLA-A targeting gRNA
  source 1..23: mol_type = other DNA
cttgtgagggaccgagatgcagg

SEQ ID NO: 6087 - DNA, 23 bp, synthetic construct
  misc_feature 1..23: note = HLA-A targeting gRNA
  source 1..23: mol_type = other DNA
cttgtgagggactgagatgcagg

SEQ ID NO: 6088 - DNA, 23 bp, synthetic construct
  misc_feature 1..23: note = HLA-A targeting gRNA
  source 1..23: mol_type = other DNA
cttgtggagaccagaccagcagg

SEQ ID NO: 6089 - DNA, 23 bp, synthetic construct
  misc_feature 1..23: note = HLA-A targeting gRNA
  source 1..23: mol_type = other DNA
cttgtggagaccagaccggcagg

SEQ ID NO: 6090 - DNA, 23 bp, synthetic construct
  misc_feature 1..23: note = HLA-A targeting gRNA
  source 1..23: mol_type = other DNA
cttgtggagaccagacctgcagg

SEQ ID NO: 6091 - DNA, 23 bp, synthetic construct
  misc_feature 1..23: note = HLA-A targeting gRNA
  source 1..23: mol_type = other DNA
cttgtggagaccaggccagcagg

SEQ ID NO: 6092 - DNA, 23 bp, synthetic construct
  misc_feature 1..23: note = HLA-A targeting gRNA
  source 1..23: mol_type = other DNA
cttgtggagaccaggcgagcagg

SEQ ID NO: 6093 - DNA, 23 bp, synthetic construct
  misc_feature 1..23: note = HLA-A targeting gRNA
  source 1..23: mol_type = other DNA
cttgtgtcgggtccttcttccgg

SEQ ID NO: 6094 - DNA, 23 bp, synthetic construct
  misc_feature 1..23: note = HLA-A targeting gRNA
  source 1..23: mol_type = other DNA
ctttaaacacattgagcgtgagg

SEQ ID NO: 6095 - DNA, 23 bp, synthetic construct
  misc_feature 1..23: note = HLA-A targeting gRNA
  source 1..23: mol_type = other DNA
ctttgccgtcgtaggcgtactgg

SEQ ID NO: 6096 - DNA, 23 bp, synthetic construct
  misc_feature 1..23: note = HLA-A targeting gRNA
  source 1..23: mol_type = other DNA
ctttgccgtcgtaggcgtcctgg

SEQ ID NO: 6097 - DNA, 23 bp, synthetic construct
  misc_feature 1..23: note = HLA-A targeting gRNA
  source 1..23: mol_type = other DNA
cttttgggtccaagacgaggagg

SEQ ID NO: 6098 - DNA, 23 bp, synthetic construct
  misc_feature 1..23: note = HLA-A targeting gRNA
  source 1..23: mol_type = other DNA
cttttgggtccaagactaggagg

SEQ ID NO: 6099 - DNA, 23 bp, synthetic construct
  misc_feature 1..23: note = HLA-A targeting gRNA
  source 1..23: mol_type = other DNA
cttttggttccaagacgaggagg

SEQ ID NO: 6100 - DNA, 23 bp, synthetic construct
  misc_feature 1..23: note = HLA-A targeting gRNA
  source 1..23: mol_type = other DNA
ctttttttttgttctaccccagg

SEQ ID NO: 6101 - DNA, 23 bp, synthetic construct
  misc_feature 1..23: note = HLA-A targeting gRNA
  source 1..23: mol_type = other DNA
gaaaccgggtaaacgcgcctggg

SEQ ID NO: 6102 - DNA, 23 bp, synthetic construct
  misc_feature 1..23: note = HLA-A targeting gRNA
  source 1..23: mol_type = other DNA
gaaaccgggtaaaggcgactagg

SEQ ID NO: 6103 - DNA, 23 bp, synthetic construct
  misc_feature 1..23: note = HLA-A targeting gRNA
  source 1..23: mol_type = other DNA
gaaaccgggtaaaggcgactggg

SEQ ID NO: 6104 - DNA, 23 bp, synthetic construct
  misc_feature 1..23: note = HLA-A targeting gRNA
  source 1..23: mol_type = other DNA
gaaaccgggtaaaggtgactggg

SEQ ID NO: 6105 - DNA, 23 bp, synthetic construct
  misc_feature 1..23: note = HLA-A targeting gRNA
  source 1..23: mol_type = other DNA
gaaaccgggtaaagtcgcctggg

SEQ ID NO: 6106 - DNA, 23 bp, synthetic construct
  misc_feature 1..23: note = HLA-A targeting gRNA
  source 1..23: mol_type = other DNA
gaaactcaggggagtgggagtgg

SEQ ID NO: 6107 - DNA, 23 bp, synthetic construct
  misc_feature 1..23: note = HLA-A targeting gRNA
  source 1..23: mol_type = other DNA
gaaagcaggagcccttcagcagg

SEQ ID NO: 6108 - DNA, 23 bp, synthetic construct
  misc_feature 1..23: note = HLA-A targeting gRNA
  source 1..23: mol_type = other DNA
gaaagttcgagtctctgagcggg

SEQ ID NO: 6109 - DNA, 23 bp, synthetic construct
  misc_feature 1..23: note = HLA-A targeting gRNA
  source 1..23: mol_type = other DNA
gaaagttcgagtctctgagtggg

SEQ ID NO: 6110 - DNA, 23 bp, synthetic construct
  misc_feature 1..23: note = HLA-A targeting gRNA
  source 1..23: mol_type = other DNA
gaaatacttcatggagtgggagg

SEQ ID NO: 6111 - DNA, 23 bp, synthetic construct
  misc_feature 1..23: note = HLA-A targeting gRNA
  source 1..23: mol_type = other DNA
gaacaaattcaggtcagtcatgg

SEQ ID NO: 6112 - DNA, 23 bp, synthetic construct
  misc_feature 1..23: note = HLA-A targeting gRNA
  source 1..23: mol_type = other DNA
gaacaaattctggtgagtcatgg

SEQ ID NO: 6113 - DNA, 23 bp, synthetic construct
  misc_feature 1..23: note = HLA-A targeting gRNA
  source 1..23: mol_type = other DNA
gaacaaattctggttagtcatgg

SEQ ID NO: 6114 - DNA, 23 bp, synthetic construct
  misc_feature 1..23: note = HLA-A targeting gRNA
  source 1..23: mol_type = other DNA
gaaccatgacttttcctctcagg

SEQ ID NO: 6115 - DNA, 23 bp, synthetic construct
  misc_feature 1..23: note = HLA-A targeting gRNA
  source 1..23: mol_type = other DNA
gaaccatgacttttcttctcagg

SEQ ID NO: 6116 - DNA, 23 bp, synthetic construct
  misc_feature 1..23: note = HLA-A targeting gRNA
  source 1..23: mol_type = other DNA
gaaccctcctcctgctgctctgg

SEQ ID NO: 6117 - DNA, 23 bp, synthetic construct
  misc_feature 1..23: note = HLA-A targeting gRNA
  source 1..23: mol_type = other DNA
gaaccgtcctcctgctgctctgg

SEQ ID NO: 6118 - DNA, 23 bp, synthetic construct
  misc_feature 1..23: note = HLA-A targeting gRNA
  source 1..23: mol_type = other DNA
gaaccgtgacctttcctctcagg

SEQ ID NO: 6119 - DNA, 23 bp, synthetic construct
  misc_feature 1..23: note = HLA-A targeting gRNA
  source 1..23: mol_type = other DNA
gaaccgtgacttttcctctcagg

SEQ ID NO: 6120 - DNA, 23 bp, synthetic construct
  misc_feature 1..23: note = HLA-A targeting gRNA
  source 1..23: mol_type = other DNA
gaactacaagcgccaggcacagg

SEQ ID NO: 6121 - DNA, 23 bp, synthetic construct
  misc_feature 1..23: note = HLA-A targeting gRNA
  source 1..23: mol_type = other DNA
gaactacgactgcagacccaggg

SEQ ID NO: 6122 - DNA, 23 bp, synthetic construct
  misc_feature 1..23: note = HLA-A targeting gRNA
  source 1..23: mol_type = other DNA
gaactatgactgcagacccaggg

SEQ ID NO: 6123 - DNA, 23 bp, synthetic construct
  misc_feature 1..23: note = HLA-A targeting gRNA
  source 1..23: mol_type = other DNA
gaagaaatacttcatggagtggg

SEQ ID NO: 6124 - DNA, 23 bp, synthetic construct
  misc_feature 1..23: note = HLA-A targeting gRNA
  source 1..23: mol_type = other DNA
gaagaagaagtgaaactcagggg

SEQ ID NO: 6125 - DNA, 23 bp, synthetic construct
  misc_feature 1..23: note = HLA-A targeting gRNA
  source 1..23: mol_type = other DNA
gaagaagacgctgcagcgcgcgg

SEQ ID NO: 6126 - DNA, 23 bp, synthetic construct
  misc_feature 1..23: note = HLA-A targeting gRNA
  source 1..23: mol_type = other DNA
gaagaaggaccccacaagttggg

SEQ ID NO: 6127 - DNA, 23 bp, synthetic construct
  misc_feature 1..23: note = HLA-A targeting gRNA
  source 1..23: mol_type = other DNA
gaagacggctctgggaaaggagg

SEQ ID NO: 6128 - DNA, 23 bp, synthetic construct
  misc_feature 1..23: note = HLA-A targeting gRNA
  source 1..23: mol_type = other DNA
gaagagctcaggtagggaagggg

SEQ ID NO: 6129 - DNA, 23 bp, synthetic construct
  misc_feature 1..23: note = HLA-A targeting gRNA
  source 1..23: mol_type = other DNA
gaagagttcaggtagggaagggg

SEQ ID NO: 6130 - DNA, 23 bp, synthetic construct
  misc_feature 1..23: note = HLA-A targeting gRNA
  source 1..23: mol_type = other DNA
gaagagttctggtagggaagggg

SEQ ID NO: 6131 - DNA, 23 bp, synthetic construct
  misc_feature 1..23: note = HLA-A targeting gRNA
  source 1..23: mol_type = other DNA
gaagatggccctgggaaaggagg

SEQ ID NO: 6132 - DNA, 23 bp, synthetic construct
  misc_feature 1..23: note = HLA-A targeting gRNA
  source 1..23: mol_type = other DNA
gaagatggctctgggaaaggagg

SEQ ID NO: 6133 - DNA, 23 bp, synthetic construct
  misc_feature 1..23: note = HLA-A targeting gRNA
  source 1..23: mol_type = other DNA
gaagcacaagcgccaggcacagg

SEQ ID NO: 6134 - DNA, 23 bp, synthetic construct
  misc_feature 1..23: note = HLA-A targeting gRNA
  source 1..23: mol_type = other DNA
gaagccaatcagcgtcgccgcgg

SEQ ID NO: 6135 - DNA, 23 bp, synthetic construct
  misc_feature 1..23: note = HLA-A targeting gRNA
  source 1..23: mol_type = other DNA
gaagccaatcagcgtcgccgggg

SEQ ID NO: 6136 - DNA, 23 bp, synthetic construct
  misc_feature 1..23: note = HLA-A targeting gRNA
  source 1..23: mol_type = other DNA
gaagccaatcagcgtcgccgtgg

SEQ ID NO: 6137 - DNA, 23 bp, synthetic construct
  misc_feature 1..23: note = HLA-A targeting gRNA
  source 1..23: mol_type = other DNA
gaagccaatcagcgttgccgcgg

SEQ ID NO: 6138 - DNA, 23 bp, synthetic construct
  misc_feature 1..23: note = HLA-A targeting gRNA
  source 1..23: mol_type = other DNA
gaagccaatcagtgtcgccgggg

SEQ ID NO: 6139 - DNA, 23 bp, synthetic construct
  misc_feature 1..23: note = HLA-A targeting gRNA
  source 1..23: mol_type = other DNA
gaagcccctcaccctgagatggg

SEQ ID NO: 6140 - DNA, 23 bp, synthetic construct
  misc_feature 1..23: note = HLA-A targeting gRNA
  source 1..23: mol_type = other DNA
gaagcccctcatgctgtacatgg

SEQ ID NO: 6141 - DNA, 23 bp, synthetic construct
  misc_feature 1..23: note = HLA-A targeting gRNA
  source 1..23: mol_type = other DNA
gaagcggagctccccgcggccgg

SEQ ID NO: 6142 - DNA, 23 bp, synthetic construct
  misc_feature 1..23: note = HLA-A targeting gRNA
  source 1..23: mol_type = other DNA
gaagcgggactctccgcggccgg

SEQ ID NO: 6143 - DNA, 23 bp, synthetic construct
  misc_feature 1..23: note = HLA-A targeting gRNA
  source 1..23: mol_type = other DNA
gaagcggggctccccacggccgg

SEQ ID NO: 6144 - DNA, 23 bp, synthetic construct
  misc_feature 1..23: note = HLA-A targeting gRNA
  source 1..23: mol_type = other DNA
gaagcggggctccccgcagccgg

SEQ ID NO: 6145 - DNA, 23 bp, synthetic construct
  misc_feature 1..23: note = HLA-A targeting gRNA
  source 1..23: mol_type = other DNA
gaagcggggctccccgctgccgg

SEQ ID NO: 6146 - DNA, 23 bp, synthetic construct
  misc_feature 1..23: note = HLA-A targeting gRNA
  source 1..23: mol_type = other DNA
gaagcggggctctccgcggccgg

SEQ ID NO: 6147 - DNA, 23 bp, synthetic construct
  misc_feature 1..23: note = HLA-A targeting gRNA
  source 1..23: mol_type = other DNA
gaaggaaacgctgcagcgcgcgg

SEQ ID NO: 6148 - DNA, 23 bp, synthetic construct
  misc_feature 1..23: note = HLA-A targeting gRNA
  source 1..23: mol_type = other DNA
gaaggacacgctggagcgcgcgg

SEQ ID NO: 6149 - DNA, 23 bp, synthetic construct
  misc_feature 1..23: note = HLA-A targeting gRNA
  source 1..23: mol_type = other DNA
gaaggacggatgtatcaccgtgg

SEQ ID NO: 6150 - DNA, 23 bp, synthetic construct
  misc_feature 1..23: note = HLA-A targeting gRNA
  source 1..23: mol_type = other DNA
gaaggacggatgtatcaccttgg

SEQ ID NO: 6151 - DNA, 23 bp, synthetic construct
  misc_feature 1..23: note = HLA-A targeting gRNA
  source 1..23: mol_type = other DNA
gaaggagaccctgcagcgcgcgg

SEQ ID NO: 6152 - DNA, 23 bp, synthetic construct
  misc_feature 1..23: note = HLA-A targeting gRNA
  source 1..23: mol_type = other DNA
gaaggagacgctgcaacgcgcgg

SEQ ID NO: 6153 - DNA, 23 bp, synthetic construct
  misc_feature 1..23: note = HLA-A targeting gRNA
  source 1..23: mol_type = other DNA
gaaggagacgctgcagagcgcgg

SEQ ID NO: 6154 - DNA, 23 bp, synthetic construct
  misc_feature 1..23: note = HLA-A targeting gRNA
  source 1..23: mol_type = other DNA
gaaggagacgctgcagcacgcgg

SEQ ID NO: 6155 - DNA, 23 bp, synthetic construct
  misc_feature 1..23: note = HLA-A targeting gRNA
  source 1..23: mol_type = other DNA
gaaggagacgctggagcgcgcgg

SEQ ID NO: 6156 - DNA, 23 bp, synthetic construct
  misc_feature 1..23: note = HLA-A targeting gRNA
  source 1..23: mol_type = other DNA
gaaggaggggccggagtattggg

SEQ ID NO: 6157 - DNA, 23 bp, synthetic construct
  misc_feature 1..23: note = HLA-A targeting gRNA
  source 1..23: mol_type = other DNA
gaagtacaagcgccaggcacagg

SEQ ID NO: 6158 - DNA, 23 bp, synthetic construct
  misc_feature 1..23: note = HLA-A targeting gRNA
  source 1..23: mol_type = other DNA
gaagtatgactacagacccaagg

SEQ ID NO: 6159 - DNA, 23 bp, synthetic construct
  misc_feature 1..23: note = HLA-A targeting gRNA
  source 1..23: mol_type = other DNA
gaagtatgactacagacccaggg

SEQ ID NO: 6160 - DNA, 23 bp, synthetic construct
  misc_feature 1..23: note = HLA-A targeting gRNA
  source 1..23: mol_type = other DNA
gaagtcccaggccccgggcgggg

SEQ ID NO: 6161 - DNA, 23 bp, synthetic construct
  misc_feature 1..23: note = HLA-A targeting gRNA
  source 1..23: mol_type = other DNA
gaagtcccaggtcccggacgggg

SEQ ID NO: 6162 - DNA, 23 bp, synthetic construct
  misc_feature 1..23: note = HLA-A targeting gRNA
  source 1..23: mol_type = other DNA
gaagtcccaggtcccgggcgggg

SEQ ID NO: 6163 - DNA, 23 bp, synthetic construct
  misc_feature 1..23: note = HLA-A targeting gRNA
  source 1..23: mol_type = other DNA
gaagtcccatgtcccggacgggg

SEQ ID NO: 6164 - DNA, 23 bp, synthetic construct
  misc_feature 1..23: note = HLA-A targeting gRNA
  source 1..23: mol_type = other DNA
gaagtccccagtcacccacccgg

SEQ ID NO: 6165 - DNA, 23 bp, synthetic construct
  misc_feature 1..23: note = HLA-A targeting gRNA
  source 1..23: mol_type = other DNA
gaagtccctgaggaaatggaggg

SEQ ID NO: 6166 - DNA, 23 bp, synthetic construct
  misc_feature 1..23: note = HLA-A targeting gRNA
  source 1..23: mol_type = other DNA
gaagtccttgaggaaatggaggg

SEQ ID NO: 6167 - DNA, 23 bp, synthetic construct
  misc_feature 1..23: note = HLA-A targeting gRNA
  source 1..23: mol_type = other DNA
gaagtctctgaggaaatggaggg

SEQ ID NO: 6168 - DNA, 23 bp, synthetic construct
  misc_feature 1..23: note = HLA-A targeting gRNA
  source 1..23: mol_type = other DNA
gaagtgaaactcagggaagtggg

SEQ ID NO: 6169 - DNA, 23 bp, synthetic construct
  misc_feature 1..23: note = HLA-A targeting gRNA
  source 1..23: mol_type = other DNA
gaagtgaaactcaggggagtggg

SEQ ID NO: 6170 - DNA, 23 bp, synthetic construct
  misc_feature 1..23: note = HLA-A targeting gRNA
  source 1..23: mol_type = other DNA
gaagtgaaactcgtgggagtggg

SEQ ID NO: 6171 - DNA, 23 bp, synthetic construct
  misc_feature 1..23: note = HLA-A targeting gRNA
  source 1..23: mol_type = other DNA
gaagtgaaactcttgggagtggg

SEQ ID NO: 6172 - DNA, 23 bp, synthetic construct
  misc_feature 1..23: note = HLA-A targeting gRNA
  source 1..23: mol_type = other DNA
gaagtgggagcctgggggcgagg

SEQ ID NO: 6173 - DNA, 23 bp, synthetic construct
  misc_feature 1..23: note = HLA-A targeting gRNA
  source 1..23: mol_type = other DNA
gaagtggggctccccgcggccgg

SEQ ID NO: 6174 - DNA, 23 bp, synthetic construct
  misc_feature 1..23: note = HLA-A targeting gRNA
  source 1..23: mol_type = other DNA
gaagtggggctctccgcggccgg

SEQ ID NO: 6175 - DNA, 23 bp, synthetic construct
  misc_feature 1..23: note = HLA-A targeting gRNA
  source 1..23: mol_type = other DNA
gaagtggggctctccgcggctgg

SEQ ID NO: 6176 - DNA, 23 bp, synthetic construct
  misc_feature 1..23: note = HLA-A targeting gRNA
  source 1..23: mol_type = other DNA
gaatatcgccctcccttgaatgg

SEQ ID NO: 6177 - DNA, 23 bp, synthetic construct
  misc_feature 1..23: note = HLA-A targeting gRNA
  source 1..23: mol_type = other DNA
gaatatgtatggctgcgacgtgg

SEQ ID NO: 6178 - DNA, 23 bp, synthetic construct
  misc_feature 1..23: note = HLA-A targeting gRNA
  source 1..23: mol_type = other DNA
gaatgacgtctctgaggaaatgg

SEQ ID NO: 6179 - DNA, 23 bp, synthetic construct
  misc_feature 1..23: note = HLA-A targeting gRNA
  source 1..23: mol_type = other DNA
gaatgtcgccctcccttgaatgg

SEQ ID NO: 6180 - DNA, 23 bp, synthetic construct
  misc_feature 1..23: note = HLA-A targeting gRNA
  source 1..23: mol_type = other DNA
gaatgtcgccctccgttgaatgg

SEQ ID NO: 6181 - DNA, 23 bp, synthetic construct
  misc_feature 1..23: note = HLA-A targeting gRNA
  source 1..23: mol_type = other DNA
gacaagaggaattatggagtagg

SEQ ID NO: 6182 - DNA, 23 bp, synthetic construct
  misc_feature 1..23: note = HLA-A targeting gRNA
  source 1..23: mol_type = other DNA
gacaagaggaattatggggcggg

SEQ ID NO: 6183 - DNA, 23 bp, synthetic construct
  misc_feature 1..23: note = HLA-A targeting gRNA
  source 1..23: mol_type = other DNA
gacaagaggaattatggggtagg

SEQ ID NO: 6184 - DNA, 23 bp, synthetic construct
  misc_feature 1..23: note = HLA-A targeting gRNA
  source 1..23: mol_type = other DNA
gacaagaggaattatggggtggg

SEQ ID NO: 6185 - DNA, 23 bp, synthetic construct
  misc_feature 1..23: note = HLA-A targeting gRNA
  source 1..23: mol_type = other DNA
gacacaaaagtacaagcgccagg

SEQ ID NO: 6186 - DNA, 23 bp, synthetic construct
  misc_feature 1..23: note = HLA-A targeting gRNA
  source 1..23: mol_type = other DNA
gacacagaactacaagcgccagg

SEQ ID NO: 6187 - DNA, 23 bp, synthetic construct
  misc_feature 1..23: note = HLA-A targeting gRNA
  source 1..23: mol_type = other DNA
gacacagaagaacaagcgccagg

SEQ ID NO: 6188 - DNA, 23 bp, synthetic construct
  misc_feature 1..23: note = HLA-A targeting gRNA
  source 1..23: mol_type = other DNA
gacacagaagcacaagcgccagg

SEQ ID NO: 6189 - DNA, 23 bp, synthetic construct
  misc_feature 1..23: note = HLA-A targeting gRNA
  source 1..23: mol_type = other DNA
gacacagaagtacaagcgccagg

SEQ ID NO: 6190 - DNA, 23 bp, synthetic construct
  misc_feature 1..23: note = HLA-A targeting gRNA
  source 1..23: mol_type = other DNA
gacacagatctgcaaggccaagg

SEQ ID NO: 6191 - DNA, 23 bp, synthetic construct
  misc_feature 1..23: note = HLA-A targeting gRNA
  source 1..23: mol_type = other DNA
gacacagatctgcaaggcccagg

SEQ ID NO: 6192 - DNA, 23 bp, synthetic construct
  misc_feature 1..23: note = HLA-A targeting gRNA
  source 1..23: mol_type = other DNA
gacaccgccacgtcccggcccgg

SEQ ID NO: 6193 - DNA, 23 bp, synthetic construct
  misc_feature 1..23: note = HLA-A targeting gRNA
  source 1..23: mol_type = other DNA
gacaccgccatgtcccggcccgg

SEQ ID NO: 6194 - DNA, 23 bp, synthetic construct
  misc_feature 1..23: note = HLA-A targeting gRNA
  source 1..23: mol_type = other DNA
gacaccgccgtgtcccggcccgg

SEQ ID NO: 6195 - DNA, 23 bp, synthetic construct
  misc_feature 1..23: note = HLA-A targeting gRNA
  source 1..23: mol_type = other DNA
gacaccgccgtgtcctggcccgg

SEQ ID NO: 6196 - DNA, 23 bp, synthetic construct
  misc_feature 1..23: note = HLA-A targeting gRNA
  source 1..23: mol_type = other DNA
gacacctgatcagtattctaggg

SEQ ID NO: 6197 - DNA, 23 bp, synthetic construct
  misc_feature 1..23: note = HLA-A targeting gRNA
  source 1..23: mol_type = other DNA
gacacctggggtagggaaggggg

SEQ ID NO: 6198 - DNA, 23 bp, synthetic construct
  misc_feature 1..23: note = HLA-A targeting gRNA
  source 1..23: mol_type = other DNA
gacacctggggtggggaaggcgg

SEQ ID NO: 6199 - DNA, 23 bp, synthetic construct
  misc_feature 1..23: note = HLA-A targeting gRNA
  source 1..23: mol_type = other DNA
gacacctggggtggggaaggggg

SEQ ID NO: 6200 - DNA, 23 bp, synthetic construct
  misc_feature 1..23: note = HLA-A targeting gRNA
  source 1..23: mol_type = other DNA
gacaggaggaattagggggtggg

SEQ ID NO: 6201 - DNA, 23 bp, synthetic construct
  misc_feature 1..23: note = HLA-A targeting gRNA
  source 1..23: mol_type = other DNA
gacaggaggaattatggggtggg

SEQ ID NO: 6202 - DNA, 23 bp, synthetic construct
  misc_feature 1..23: note = HLA-A targeting gRNA
  source 1..23: mol_type = other DNA
gacatctctgaggaaatggaggg

SEQ ID NO: 6203 - DNA, 23 bp, synthetic construct
  misc_feature 1..23: note = HLA-A targeting gRNA
  source 1..23: mol_type = other DNA
gaccacagcgaccacagctacgg

SEQ ID NO: 6204 - DNA, 23 bp, synthetic construct
  misc_feature 1..23: note = HLA-A targeting gRNA
  source 1..23: mol_type = other DNA
gaccagcatctcggcgtctgagg

SEQ ID NO: 6205 - DNA, 23 bp, synthetic construct
  misc_feature 1..23: note = HLA-A targeting gRNA
  source 1..23: mol_type = other DNA
gaccagcatcttggcgtctgagg

SEQ ID NO: 6206 - DNA, 23 bp, synthetic construct
  misc_feature 1..23: note = HLA-A targeting gRNA
  source 1..23: mol_type = other DNA
gacccaggacaccgagcttgtgg

SEQ ID NO: 6207 - DNA, 23 bp, synthetic construct
  misc_feature 1..23: note = HLA-A targeting gRNA
  source 1..23: mol_type = other DNA
gaccccgcactcaccagcccagg

SEQ ID NO: 6208 - DNA, 23 bp, synthetic construct
  misc_feature 1..23: note = HLA-A targeting gRNA
  source 1..23: mol_type = other DNA
gaccccgcactcaccggcccagg

SEQ ID NO: 6209 - DNA, 23 bp, synthetic construct
  misc_feature 1..23: note = HLA-A targeting gRNA
  source 1..23: mol_type = other DNA
gacccctgatcactatcctaggg

SEQ ID NO: 6210 - DNA, 23 bp, synthetic construct
  misc_feature 1..23: note = HLA-A targeting gRNA
  source 1..23: mol_type = other DNA
gacccctgatcagtattataggg

SEQ ID NO: 6211 - DNA, 23 bp, synthetic construct
  misc_feature 1..23: note = HLA-A targeting gRNA
  source 1..23: mol_type = other DNA
gacccctgatcagtattccaggg

SEQ ID NO: 6212 - DNA, 23 bp, synthetic construct
  misc_feature 1..23: note = HLA-A targeting gRNA
  source 1..23: mol_type = other DNA
gacccctgatcagtattctaggg

SEQ ID NO: 6213 - DNA, 23 bp, synthetic construct
  misc_feature 1..23: note = HLA-A targeting gRNA
  source 1..23: mol_type = other DNA
gacccgcatctcggcctctgggg

SEQ ID NO: 6214 - DNA, 23 bp, synthetic construct
  misc_feature 1..23: note = HLA-A targeting gRNA
  source 1..23: mol_type = other DNA
gacccgcatctcggcgtctgagg

SEQ ID NO: 6215 - DNA, 23 bp, synthetic construct
  misc_feature 1..23: note = HLA-A targeting gRNA
  source 1..23: mol_type = other DNA
gacccgcatctcggcgtctgggg

SEQ ID NO: 6216 - DNA, 23 bp, synthetic construct
  misc_feature 1..23: note = HLA-A targeting gRNA
  source 1..23: mol_type = other DNA
gacccgcatctcggtgtctgagg

SEQ ID NO: 6217 - DNA, 23 bp, synthetic construct
  misc_feature 1..23: note = HLA-A targeting gRNA
  source 1..23: mol_type = other DNA
gacccgccagaccctcctcccgg

SEQ ID NO: 6218 - DNA, 23 bp, synthetic construct
  misc_feature 1..23: note = HLA-A targeting gRNA
  source 1..23: mol_type = other DNA
gacccgcccaaaccctcgaccgg

SEQ ID NO: 6219 - DNA, 23 bp, synthetic construct
  misc_feature 1..23: note = HLA-A targeting gRNA
  source 1..23: mol_type = other DNA
gacccgcccagaccctcgaccgg

SEQ ID NO: 6220 - DNA, 23 bp, synthetic construct
  misc_feature 1..23: note = HLA-A targeting gRNA
  source 1..23: mol_type = other DNA
gacccgcccgacccacctcccgg

SEQ ID NO: 6221 - DNA, 23 bp, synthetic construct
  misc_feature 1..23: note = HLA-A targeting gRNA
  source 1..23: mol_type = other DNA
gacccgcccgaccctcctaccgg

SEQ ID NO: 6222 - DNA, 23 bp, synthetic construct
  misc_feature 1..23: note = HLA-A targeting gRNA
  source 1..23: mol_type = other DNA
gaccctgagagccccgcccgggg

SEQ ID NO: 6223 - DNA, 23 bp, synthetic construct
  misc_feature 1..23: note = HLA-A targeting gRNA
  source 1..23: mol_type = other DNA
gaccgggctgaccacgggggcgg

SEQ ID NO: 6224 - DNA, 23 bp, synthetic construct
  misc_feature 1..23: note = HLA-A targeting gRNA
  source 1..23: mol_type = other DNA
gaccgtgagtgaccccggcccgg

SEQ ID NO: 6225 - DNA, 23 bp, synthetic construct
  misc_feature 1..23: note = HLA-A targeting gRNA
  source 1..23: mol_type = other DNA
gacctgcgctcctggaccgccgg

SEQ ID NO: 6226 - DNA, 23 bp, synthetic construct
  misc_feature 1..23: note = HLA-A targeting gRNA
  source 1..23: mol_type = other DNA
gacctggaccggtgagtgcgggg

SEQ ID NO: 6227 - DNA, 23 bp, synthetic construct
  misc_feature 1..23: note = HLA-A targeting gRNA
  source 1..23: mol_type = other DNA
gacctggcagcgggatggcaagg

SEQ ID NO: 6228 - DNA, 23 bp, synthetic construct
  misc_feature 1..23: note = HLA-A targeting gRNA
  source 1..23: mol_type = other DNA
gacctggcagcgggatggcgagg

SEQ ID NO: 6229 - DNA, 23 bp, synthetic construct
  misc_feature 1..23: note = HLA-A targeting gRNA
  source 1..23: mol_type = other DNA
gacctggcagtgggatggggagg

SEQ ID NO: 6230 - DNA, 23 bp, synthetic construct
  misc_feature 1..23: note = HLA-A targeting gRNA
  source 1..23: mol_type = other DNA
gacctgggccggtgagtgcgggg

SEQ ID NO: 6231 - DNA, 23 bp, synthetic construct
  misc_feature 1..23: note = HLA-A targeting gRNA
  source 1..23: mol_type = other DNA
gacctgggcctgtgagtgcgagg

SEQ ID NO: 6232 - DNA, 23 bp, synthetic construct
  misc_feature 1..23: note = HLA-A targeting gRNA
  source 1..23: mol_type = other DNA
gacctgggcctgtgagtgcgggg

SEQ ID NO: 6233 - DNA, 23 bp, synthetic construct
  misc_feature 1..23: note = HLA-A targeting gRNA
  source 1..23: mol_type = other DNA
gacctgggctggtgagtgcgggg

SEQ ID NO: 6234 - DNA, 23 bp, synthetic construct
  misc_feature 1..23: note = HLA-A targeting gRNA
  source 1..23: mol_type = other DNA
gacctggtagcgggatggcgagg

SEQ ID NO: 6235 - DNA, 23 bp, synthetic construct
  misc_feature 1..23: note = HLA-A targeting gRNA
  source 1..23: mol_type = other DNA
gacgatgtacggctgcgacgtgg

SEQ ID NO: 6236 - DNA, 23 bp, synthetic construct
  misc_feature 1..23: note = HLA-A targeting gRNA
  source 1..23: mol_type = other DNA
gacgatgtatggctgcgacatgg

SEQ ID NO: 6237 - DNA, 23 bp, synthetic construct
  misc_feature 1..23: note = HLA-A targeting gRNA
  source 1..23: mol_type = other DNA
gacgatgtatggctgcgacctgg

SEQ ID NO: 6238 - DNA, 23 bp, synthetic construct
  misc_feature 1..23: note = HLA-A targeting gRNA
  source 1..23: mol_type = other DNA
gacgatgtatggctgcgacgtgg

SEQ ID NO: 6239 - DNA, 23 bp, synthetic construct
  misc_feature 1..23: note = HLA-A targeting gRNA
  source 1..23: mol_type = other DNA
gacgcagaagtacaagcgccagg

SEQ ID NO: 6240 - DNA, 23 bp, synthetic construct
  misc_feature 1..23: note = HLA-A targeting gRNA
  source 1..23: mol_type = other DNA
gacgccgcgagtccgagaagggg

SEQ ID NO: 6241 - DNA, 23 bp, synthetic construct
  misc_feature 1..23: note = HLA-A targeting gRNA
  source 1..23: mol_type = other DNA
gacggagccccgggcgccgtggg

SEQ ID NO: 6242 - DNA, 23 bp, synthetic construct
  misc_feature 1..23: note = HLA-A targeting gRNA
  source 1..23: mol_type = other DNA
gacgggctgaccacgggggcggg

SEQ ID NO: 6243 - DNA, 23 bp, synthetic construct
  misc_feature 1..23: note = HLA-A targeting gRNA
  source 1..23: mol_type = other DNA
gacggggctctcagggtctcagg

SEQ ID NO: 6244 - DNA, 23 bp, synthetic construct
  misc_feature 1..23: note = HLA-A targeting gRNA
  source 1..23: mol_type = other DNA
gacggggctctcagtgtctcagg

SEQ ID NO: 6245 - DNA, 23 bp, synthetic construct
  misc_feature 1..23: note = HLA-A targeting gRNA
  source 1..23: mol_type = other DNA
gacggggctgaccacgggggcgg

SEQ ID NO: 6246 - DNA, 23 bp, synthetic construct
  misc_feature 1..23: note = HLA-A targeting gRNA
  source 1..23: mol_type = other DNA
gacggggctgaccgcggggccgg

SEQ ID NO: 6247 - DNA, 23 bp, synthetic construct
  misc_feature 1..23: note = HLA-A targeting gRNA
  source 1..23: mol_type = other DNA
gacggggctgaccgcgggggcgg

SEQ ID NO: 6248 - DNA, 23 bp, synthetic construct
  misc_feature 1..23: note = HLA-A targeting gRNA
  source 1..23: mol_type = other DNA
gacggggctggccgcggggccgg

SEQ ID NO: 6249 - DNA, 23 bp, synthetic construct
  misc_feature 1..23: note = HLA-A targeting gRNA
  source 1..23: mol_type = other DNA
gacggtgagtgaccccggcctgg

SEQ ID NO: 6250 - DNA, 23 bp, synthetic construct
  misc_feature 1..23: note = HLA-A targeting gRNA
  source 1..23: mol_type = other DNA
gacggtgctgaccgcggggccgg

SEQ ID NO: 6251 - DNA, 23 bp, synthetic construct
  misc_feature 1..23: note = HLA-A targeting gRNA
  source 1..23: mol_type = other DNA
gacgtctctgaggaaatggaggg

SEQ ID NO: 6252 - DNA, 23 bp, synthetic construct
  misc_feature 1..23: note = HLA-A targeting gRNA
  source 1..23: mol_type = other DNA
gacgtctctgaggaaatgtaggg

SEQ ID NO: 6253 - DNA, 23 bp, synthetic construct
  misc_feature 1..23: note = HLA-A targeting gRNA
  source 1..23: mol_type = other DNA
gacgtgggacaggaggaattagg

SEQ ID NO: 6254 - DNA, 23 bp, synthetic construct
  misc_feature 1..23: note = HLA-A targeting gRNA
  source 1..23: mol_type = other DNA
gactcacgaatgctggaatcagg

SEQ ID NO: 6255 - DNA, 23 bp, synthetic construct
  misc_feature 1..23: note = HLA-A targeting gRNA
  source 1..23: mol_type = other DNA
gactcatgaatgctgaaatcagg

SEQ ID NO: 6256 - DNA, 23 bp, synthetic construct
  misc_feature 1..23: note = HLA-A targeting gRNA
  source 1..23: mol_type = other DNA
gactcatgaatgctggaatcagg

SEQ ID NO: 6257 - DNA, 23 bp, synthetic construct
  misc_feature 1..23: note = HLA-A targeting gRNA
  source 1..23: mol_type = other DNA
gactccccatcccccacggacgg

SEQ ID NO: 6258 - DNA, 23 bp, synthetic construct
  misc_feature 1..23: note = HLA-A targeting gRNA
  source 1..23: mol_type = other DNA
gactccccatcccccacgtacgg

SEQ ID NO: 6259 - DNA, 23 bp, synthetic construct
  misc_feature 1..23: note = HLA-A targeting gRNA
  source 1..23: mol_type = other DNA
gactgggctgaccacgggggcgg

SEQ ID NO: 6260 - DNA, 23 bp, synthetic construct
  misc_feature 1..23: note = HLA-A targeting gRNA
  source 1..23: mol_type = other DNA
gactgggctgaccgcggggccgg

SEQ ID NO: 6261 - DNA, 23 bp, synthetic construct
  misc_feature 1..23: note = HLA-A targeting gRNA
  source 1..23: mol_type = other DNA
gactgggctgaccgcgggggcgg

SEQ ID NO: 6262 - DNA, 23 bp, synthetic construct
  misc_feature 1..23: note = HLA-A targeting gRNA
  source 1..23: mol_type = other DNA
gagaacaaggcctgagagaaagg

SEQ ID NO: 6263 - DNA, 23 bp, synthetic construct
  misc_feature 1..23: note = HLA-A targeting gRNA
  source 1..23: mol_type = other DNA
gagaaccccgcccgggacctggg

SEQ ID NO: 6264 - DNA, 23 bp, synthetic construct
  misc_feature 1..23: note = HLA-A targeting gRNA
  source 1..23: mol_type = other DNA
gagaacctgcggaacctgcgcgg

SEQ ID NO: 6265 - DNA, 23 bp, synthetic construct
  misc_feature 1..23: note = HLA-A targeting gRNA
  source 1..23: mol_type = other DNA
gagaacggacaggacacctgggg

SEQ ID NO: 6266 - DNA, 23 bp, synthetic construct
  misc_feature 1..23: note = HLA-A targeting gRNA
  source 1..23: mol_type = other DNA
gagaagccaatcagcgtcgccgg

SEQ ID NO: 6267 - DNA, 23 bp, synthetic construct
  misc_feature 1..23: note = HLA-A targeting gRNA
  source 1..23: mol_type = other DNA
gagaagccaatcagtgtcgccgg

SEQ ID NO: 6268 - DNA, 23 bp, synthetic construct
  misc_feature 1..23: note = HLA-A targeting gRNA
  source 1..23: mol_type = other DNA
gagaatggacaggacacctgggg

SEQ ID NO: 6269 - DNA, 23 bp, synthetic construct
  misc_feature 1..23: note = HLA-A targeting gRNA
  source 1..23: mol_type = other DNA
gagaatggacgggacacctgggg

SEQ ID NO: 6270 - DNA, 23 bp, synthetic construct
  misc_feature 1..23: note = HLA-A targeting gRNA
  source 1..23: mol_type = other DNA
gagaatgggcaggacacctgggg

SEQ ID NO: 6271 - DNA, 23 bp, synthetic construct
  misc_feature 1..23: note = HLA-A targeting gRNA
  source 1..23: mol_type = other DNA
gagacactgagagccccgtccgg

SEQ ID NO: 6272 - DNA, 23 bp, synthetic construct
  misc_feature 1..23: note = HLA-A targeting gRNA
  source 1..23: mol_type = other DNA
gagacagaaccttccagaagtgg

SEQ ID NO: 6273 - DNA, 23 bp, synthetic construct
  misc_feature 1..23: note = HLA-A targeting gRNA
  source 1..23: mol_type = other DNA
gagaccaggccagcaggagatgg

SEQ ID NO: 6274 - DNA, 23 bp, synthetic construct
  misc_feature 1..23: note = HLA-A targeting gRNA
  source 1..23: mol_type = other DNA
gagaccaggcgagcaggagatgg

SEQ ID NO: 6275 - DNA, 23 bp, synthetic construct
  misc_feature 1..23: note = HLA-A targeting gRNA
  source 1..23: mol_type = other DNA
gagacccagagagccccgcccgg

SEQ ID NO: 6276 - DNA, 23 bp, synthetic construct
  misc_feature 1..23: note = HLA-A targeting gRNA
  source 1..23: mol_type = other DNA
gagacccgggccgtacgtcgggg

SEQ ID NO: 6277 - DNA, 23 bp, synthetic construct
  misc_feature 1..23: note = HLA-A targeting gRNA
  source 1..23: mol_type = other DNA
gagaccctgagaaccccgcccgg

SEQ ID NO: 6278 - DNA, 23 bp, synthetic construct
  misc_feature 1..23: note = HLA-A targeting gRNA
  source 1..23: mol_type = other DNA
gagaccctgagagccccgcccgg

SEQ ID NO: 6279 - DNA, 23 bp, synthetic construct
  misc_feature 1..23: note = HLA-A targeting gRNA
  source 1..23: mol_type = other DNA
gagaccctgagagccccgtccgg

SEQ ID NO: 6280 - DNA, 23 bp, synthetic construct
  misc_feature 1..23: note = HLA-A targeting gRNA
  source 1..23: mol_type = other DNA
gagacctggaccggtgagtgcgg

SEQ ID NO: 6281 - DNA, 23 bp, synthetic construct
  misc_feature 1..23: note = HLA-A targeting gRNA
  source 1..23: mol_type = other DNA
gagacctgggccggtgagtgcgg

SEQ ID NO: 6282 - DNA, 23 bp, synthetic construct
  misc_feature 1..23: note = HLA-A targeting gRNA
  source 1..23: mol_type = other DNA
gagacctgggcctgtgagtgcgg

SEQ ID NO: 6283 - DNA, 23 bp, synthetic construct
  misc_feature 1..23: note = HLA-A targeting gRNA
  source 1..23: mol_type = other DNA
gagacctgggcgggtgagtgcgg

SEQ ID NO: 6284 - DNA, 23 bp, synthetic construct
  misc_feature 1..23: note = HLA-A targeting gRNA
  source 1..23: mol_type = other DNA
gagacctgggctggtgagtgcgg

SEQ ID NO: 6285 - DNA, 23 bp, synthetic construct
  misc_feature 1..23: note = HLA-A targeting gRNA
  source 1..23: mol_type = other DNA
gagagactcatcagagccctggg

SEQ ID NO: 6286 - DNA, 23 bp, synthetic construct
  misc_feature 1..23: note = HLA-A targeting gRNA
  source 1..23: mol_type = other DNA
gagagaggggaccgcaggcgggg

SEQ ID NO: 6287 - DNA, 23 bp, synthetic construct
  misc_feature 1..23: note = HLA-A targeting gRNA
  source 1..23: mol_type = other DNA
gagagccccgcccgggacctggg

SEQ ID NO: 6288 - DNA, 23 bp, synthetic construct
  misc_feature 1..23: note = HLA-A targeting gRNA
  source 1..23: mol_type = other DNA
gagagccccgcccggggcctggg

SEQ ID NO: 6289 - DNA, 23 bp, synthetic construct
  misc_feature 1..23: note = HLA-A targeting gRNA
  source 1..23: mol_type = other DNA
gagagccccgtccgggacatggg

SEQ ID NO: 6290 - DNA, 23 bp, synthetic construct
  misc_feature 1..23: note = HLA-A targeting gRNA
  source 1..23: mol_type = other DNA
gagagccccgtccgggacctggg

SEQ ID NO: 6291 - DNA, 23 bp, synthetic construct
  misc_feature 1..23: note = HLA-A targeting gRNA
  source 1..23: mol_type = other DNA
gagagcctgcgaaacctgcgcgg

SEQ ID NO: 6292 - DNA, 23 bp, synthetic construct
  misc_feature 1..23: note = HLA-A targeting gRNA
  source 1..23: mol_type = other DNA
gagagcctgcggaacctgcgcgg

SEQ ID NO: 6293 - DNA, 23 bp, synthetic construct
  misc_feature 1..23: note = HLA-A targeting gRNA
  source 1..23: mol_type = other DNA
gagagcctgcggaccctgcgcgg

SEQ ID NO: 6294 - DNA, 23 bp, synthetic construct
  misc_feature 1..23: note = HLA-A targeting gRNA
  source 1..23: mol_type = other DNA
gagagcctgcggatcctgcgcgg

SEQ ID NO: 6295 - DNA, 23 bp, synthetic construct
  misc_feature 1..23: note = HLA-A targeting gRNA
  source 1..23: mol_type = other DNA
gagaggagccgcgggcgccgtgg

SEQ ID NO: 6296 - DNA, 23 bp, synthetic construct
  misc_feature 1..23: note = HLA-A targeting gRNA
  source 1..23: mol_type = other DNA
gagaggagccgcgggcgcggtgg

SEQ ID NO: 6297 - DNA, 23 bp, synthetic construct
  misc_feature 1..23: note = HLA-A targeting gRNA
  source 1..23: mol_type = other DNA
gagatagaaccttccagaagtgg

SEQ ID NO: 6298 - DNA, 23 bp, synthetic construct
  misc_feature 1..23: note = HLA-A targeting gRNA
  source 1..23: mol_type = other DNA
gagatccgcccccgaggccgcgg

SEQ ID NO: 6299 - DNA, 23 bp, synthetic construct
  misc_feature 1..23: note = HLA-A targeting gRNA
  source 1..23: mol_type = other DNA
gagatccgccccgaggccgcggg

SEQ ID NO: 6300 - DNA, 23 bp, synthetic construct
  misc_feature 1..23: note = HLA-A targeting gRNA
  source 1..23: mol_type = other DNA
gagatggaaccttccagaagtgg

SEQ ID NO: 6301 - DNA, 23 bp, synthetic construct
  misc_feature 1..23: note = HLA-A targeting gRNA
  source 1..23: mol_type = other DNA
gagattctggggagctgaagtgg

SEQ ID NO: 6302 - DNA, 23 bp, synthetic construct
  misc_feature 1..23: note = HLA-A targeting gRNA
  source 1..23: mol_type = other DNA
gagattcttggggtctagagtgg

SEQ ID NO: 6303 - DNA, 23 bp, synthetic construct
  misc_feature 1..23: note = HLA-A targeting gRNA
  source 1..23: mol_type = other DNA
gagcaaggggaccgcaggcgggg

SEQ ID NO: 6304 - DNA, 23 bp, synthetic construct
  misc_feature 1..23: note = HLA-A targeting gRNA
  source 1..23: mol_type = other DNA
gagcaccgcttcatctcagtggg

SEQ ID NO: 6305 - DNA, 23 bp, synthetic construct
  misc_feature 1..23: note = HLA-A targeting gRNA
  source 1..23: mol_type = other DNA
gagcagcaggaggacggttcggg

SEQ ID NO: 6306 - DNA, 23 bp, synthetic construct
  misc_feature 1..23: note = HLA-A targeting gRNA
  source 1..23: mol_type = other DNA
gagcagcaggaggagagttcggg

SEQ ID NO: 6307 - DNA, 23 bp, synthetic construct
  misc_feature 1..23: note = HLA-A targeting gRNA
  source 1..23: mol_type = other DNA
gagcagcaggaggagggctcggg

SEQ ID NO: 6308 - DNA, 23 bp, synthetic construct
  misc_feature 1..23: note = HLA-A targeting gRNA
  source 1..23: mol_type = other DNA
gagcagcaggaggagggcttggg

SEQ ID NO: 6309 - DNA, 23 bp, synthetic construct
  misc_feature 1..23: note = HLA-A targeting gRNA
  source 1..23: mol_type = other DNA
gagcagcaggaggagggttcggg

SEQ ID NO: 6310 - DNA, 23 bp, synthetic construct
  misc_feature 1..23: note = HLA-A targeting gRNA
  source 1..23: mol_type = other DNA
gagcagcaggatgagggttcagg

SEQ ID NO: 6311 - DNA, 23 bp, synthetic construct
  misc_feature 1..23: note = HLA-A targeting gRNA
  source 1..23: mol_type = other DNA
gagcagcaggatgagggttcggg

SEQ ID NO: 6312 - DNA, 23 bp, synthetic construct
  misc_feature 1..23: note = HLA-A targeting gRNA
  source 1..23: mol_type = other DNA
gagcatgtacggctgcgacctgg

SEQ ID NO: 6313 - DNA, 23 bp, synthetic construct
  misc_feature 1..23: note = HLA-A targeting gRNA
  source 1..23: mol_type = other DNA
gagcatgtacggctgcgacgtgg

SEQ ID NO: 6314 - DNA, 23 bp, synthetic construct
  misc_feature 1..23: note = HLA-A targeting gRNA
  source 1..23: mol_type = other DNA
gagcatgtatggctgcgacgtgg

SEQ ID NO: 6315 - DNA, 23 bp, synthetic construct
  misc_feature 1..23: note = HLA-A targeting gRNA
  source 1..23: mol_type = other DNA
gagccatggatagagcaggaggg

SEQ ID NO: 6316 - DNA, 23 bp, synthetic construct
  misc_feature 1..23: note = HLA-A targeting gRNA
  source 1..23: mol_type = other DNA
gagccccaaacactgagtgtggg

SEQ ID NO: 6317 - DNA, 23 bp, synthetic construct
  misc_feature 1..23: note = HLA-A targeting gRNA
  source 1..23: mol_type = other DNA
gagccccacttcatcgcagtggg

SEQ ID NO: 6318 - DNA, 23 bp, synthetic construct
  misc_feature 1..23: note = HLA-A targeting gRNA
  source 1..23: mol_type = other DNA
gagccccaggcgactttacccgg

SEQ ID NO: 6319 - DNA, 23 bp, synthetic construct
  misc_feature 1..23: note = HLA-A targeting gRNA
  source 1..23: mol_type = other DNA
gagccccaggcgcctttacccgg

SEQ ID NO: 6320 - DNA, 23 bp, synthetic construct
  misc_feature 1..23: note = HLA-A targeting gRNA
  source 1..23: mol_type = other DNA
gagccccaggcgcgtttacccgg

SEQ ID NO: 6321 - DNA, 23 bp, synthetic construct
  misc_feature 1..23: note = HLA-A targeting gRNA
  source 1..23: mol_type = other DNA
gagccccagtcacctttacccgg

SEQ ID NO: 6322 - DNA, 23 bp, synthetic construct
  misc_feature 1..23: note = HLA-A targeting gRNA
  source 1..23: mol_type = other DNA
gagccccagtcgcctttacccgg

SEQ ID NO: 6323 - DNA, 23 bp, synthetic construct
  misc_feature 1..23: note = HLA-A targeting gRNA
  source 1..23: mol_type = other DNA
gagccccgcttcatcaccgtggg

SEQ ID NO: 6324 - DNA, 23 bp, synthetic construct
  misc_feature 1..23: note = HLA-A targeting gRNA
  source 1..23: mol_type = other DNA
gagccccgcttcatctcagtggg

SEQ ID NO: 6325 - DNA, 23 bp, synthetic construct
  misc_feature 1..23: note = HLA-A targeting gRNA
  source 1..23: mol_type = other DNA
gagccccgcttcattaccgtggg

SEQ ID NO: 6326 - DNA, 23 bp, synthetic construct
  misc_feature 1..23: note = HLA-A targeting gRNA
  source 1..23: mol_type = other DNA
gagccccgcttcattgcagtggg

SEQ ID NO: 6327 - DNA, 23 bp, synthetic construct
  misc_feature 1..23: note = HLA-A targeting gRNA
  source 1..23: mol_type = other DNA
gagccccgcttcgtctcagtggg

SEQ ID NO: 6328 - DNA, 23 bp, synthetic construct
  misc_feature 1..23: note = HLA-A targeting gRNA
  source 1..23: mol_type = other DNA
gagcccctcaccctgagctgggg

SEQ ID NO: 6329 - DNA, 23 bp, synthetic construct
  misc_feature 1..23: note = HLA-A targeting gRNA
  source 1..23: mol_type = other DNA
gagccctagtcgcctttacccgg

SEQ ID NO: 6330 - DNA, 23 bp, synthetic construct
  misc_feature 1..23: note = HLA-A targeting gRNA
  source 1..23: mol_type = other DNA
gagccgcctcccacttgcgctgg

SEQ ID NO: 6331 - DNA, 23 bp, synthetic construct
  misc_feature 1..23: note = HLA-A targeting gRNA
  source 1..23: mol_type = other DNA
gagccgtggatggagcaggaggg

SEQ ID NO: 6332 - DNA, 23 bp, synthetic construct
  misc_feature 1..23: note = HLA-A targeting gRNA
  source 1..23: mol_type = other DNA
gagccgtgggtggagcaggaggg

SEQ ID NO: 6333 - DNA, 23 bp, synthetic construct
  misc_feature 1..23: note = HLA-A targeting gRNA
  source 1..23: mol_type = other DNA
gagccttccccatctcctatagg

SEQ ID NO: 6334 - DNA, 23 bp, synthetic construct
  misc_feature 1..23: note = HLA-A targeting gRNA
  source 1..23: mol_type = other DNA
gagccttgtctgcattggggagg

SEQ ID NO: 6335 - DNA, 23 bp, synthetic construct
  misc_feature 1..23: note = HLA-A targeting gRNA
  source 1..23: mol_type = other DNA
gagcgaggggaccgcaggcgggg

SEQ ID NO: 6336 - DNA, 23 bp, synthetic construct
  misc_feature 1..23: note = HLA-A targeting gRNA
  source 1..23: mol_type = other DNA
gagctcaggtagggaaggggtgg

SEQ ID NO: 6337 - DNA, 23 bp, synthetic construct
  misc_feature 1..23: note = HLA-A targeting gRNA
  source 1..23: mol_type = other DNA
gagctccccgcggccgggccagg

SEQ ID NO: 6338 - DNA, 23 bp, synthetic construct
  misc_feature 1..23: note = HLA-A targeting gRNA
  source 1..23: mol_type = other DNA
gagctccgcttcatcgcagtggg

SEQ ID NO: 6339 - DNA, 23 bp, synthetic construct
  misc_feature 1..23: note = HLA-A targeting gRNA
  source 1..23: mol_type = other DNA
gagctcctccacacgcccaccgg

SEQ ID NO: 6340 - DNA, 23 bp, synthetic construct
  misc_feature 1..23: note = HLA-A targeting gRNA
  source 1..23: mol_type = other DNA
gagctgaagtggtcgggggtggg

SEQ ID NO: 6341 - DNA, 23 bp, synthetic construct
  misc_feature 1..23: note = HLA-A targeting gRNA
  source 1..23: mol_type = other DNA
gagctgaagtggtctggggtggg

SEQ ID NO: 6342 - DNA, 23 bp, synthetic construct
  misc_feature 1..23: note = HLA-A targeting gRNA
  source 1..23: mol_type = other DNA
gagctgggtgatctgagccgcgg

SEQ ID NO: 6343 - DNA, 23 bp, synthetic construct
  misc_feature 1..23: note = HLA-A targeting gRNA
  source 1..23: mol_type = other DNA
gagcttgtacggctgcgacgtgg

SEQ ID NO: 6344 - DNA, 23 bp, synthetic construct
  misc_feature 1..23: note = HLA-A targeting gRNA
  source 1..23: mol_type = other DNA
gaggaaaatgggatcagcactgg

SEQ ID NO: 6345 - DNA, 23 bp, synthetic construct
  misc_feature 1..23: note = HLA-A targeting gRNA
  source 1..23: mol_type = other DNA
gaggaaaatgggatcagcgctgg

SEQ ID NO: 6346 - DNA, 23 bp, synthetic construct
  misc_feature 1..23: note = HLA-A targeting gRNA
  source 1..23: mol_type = other DNA
gaggaaagtcacggttcccaagg

SEQ ID NO: 6347 - DNA, 23 bp, synthetic construct
  misc_feature 1..23: note = HLA-A targeting gRNA
  source 1..23: mol_type = other DNA
gaggacctgcggaacctgcgcgg

SEQ ID NO: 6348 - DNA, 23 bp, synthetic construct
  misc_feature 1..23: note = HLA-A targeting gRNA
  source 1..23: mol_type = other DNA
gaggacctgcggaccctgcgcgg

SEQ ID NO: 6349 - DNA, 23 bp, synthetic construct
  misc_feature 1..23: note = HLA-A targeting gRNA
  source 1..23: mol_type = other DNA
gaggagactctgagtccgggtgg

SEQ ID NO: 6350 - DNA, 23 bp, synthetic construct
  misc_feature 1..23: note = HLA-A targeting gRNA
  source 1..23: mol_type = other DNA
gaggagattctgagtccgggtgg

SEQ ID NO: 6351 - DNA, 23 bp, synthetic construct
  misc_feature 1..23: note = HLA-A targeting gRNA
  source 1..23: mol_type = other DNA
gaggagattttgagtccgggtgg

SEQ ID NO: 6352 - DNA, 23 bp, synthetic construct
  misc_feature 1..23: note = HLA-A targeting gRNA
  source 1..23: mol_type = other DNA
gaggagccgcgccgggaggaggg

SEQ ID NO: 6353 - DNA, 23 bp, synthetic construct
  misc_feature 1..23: note = HLA-A targeting gRNA
  source 1..23: mol_type = other DNA
gaggatgtaaggctgcgacgtgg

SEQ ID NO: 6354 - DNA, 23 bp, synthetic construct
  misc_feature 1..23: note = HLA-A targeting gRNA
  source 1..23: mol_type = other DNA
gaggatgtacggctgcgacctgg

SEQ ID NO: 6355 - DNA, 23 bp, synthetic construct
  misc_feature 1..23: note = HLA-A targeting gRNA
  source 1..23: mol_type = other DNA
gaggatgtacggctgcgacgtgg

SEQ ID NO: 6356 - DNA, 23 bp, synthetic construct
  misc_feature 1..23: note = HLA-A targeting gRNA
  source 1..23: mol_type = other DNA
gaggatgtacggctgggacctgg

SEQ ID NO: 6357 - DNA, 23 bp, synthetic construct
  misc_feature 1..23: note = HLA-A targeting gRNA
  source 1..23: mol_type = other DNA
gaggatgtatggctgcgacctgg

SEQ ID NO: 6358 - DNA, 23 bp, synthetic construct
  misc_feature 1..23: note = HLA-A targeting gRNA
  source 1..23: mol_type = other DNA
gaggatgtctggctgcgacccgg

SEQ ID NO: 6359 - DNA, 23 bp, synthetic construct
  misc_feature 1..23: note = HLA-A targeting gRNA
  source 1..23: mol_type = other DNA
gaggatgtctggctgcgacctgg

SEQ ID NO: 6360 - DNA, 23 bp, synthetic construct
  misc_feature 1..23: note = HLA-A targeting gRNA
  source 1..23: mol_type = other DNA
gaggatgtctggctgcgacgtgg

SEQ ID NO: 6361 - DNA, 23 bp, synthetic construct
  misc_feature 1..23: note = HLA-A targeting gRNA
  source 1..23: mol_type = other DNA
gaggatgtttggctgcgacctgg

SEQ ID NO: 6362 - DNA, 23 bp, synthetic construct
  misc_feature 1..23: note = HLA-A targeting gRNA
  source 1..23: mol_type = other DNA
gaggcccttgaagtcacaaaggg

SEQ ID NO: 6363 - DNA, 23 bp, synthetic construct
  misc_feature 1..23: note = HLA-A targeting gRNA
  source 1..23: mol_type = other DNA
gaggctcttgaagtcacaaaggg

SEQ ID NO: 6364 - DNA, 23 bp, synthetic construct
  misc_feature 1..23: note = HLA-A targeting gRNA
  source 1..23: mol_type = other DNA
gagggaaaaggcctaggtaatgg

SEQ ID NO: 6365 - DNA, 23 bp, synthetic construct
  misc_feature 1..23: note = HLA-A targeting gRNA
  source 1..23: mol_type = other DNA
gagggaaaaggcctgggtaatgg

SEQ ID NO: 6366 - DNA, 23 bp, synthetic construct
  misc_feature 1..23: note = HLA-A targeting gRNA
  source 1..23: mol_type = other DNA
gagggagcctgggggcgaggagg

SEQ ID NO: 6367 - DNA, 23 bp, synthetic construct
  misc_feature 1..23: note = HLA-A targeting gRNA
  source 1..23: mol_type = other DNA
gagggaggaacagcgacttctgg

SEQ ID NO: 6368 - DNA, 23 bp, synthetic construct
  misc_feature 1..23: note = HLA-A targeting gRNA
  source 1..23: mol_type = other DNA
gagggcaccgcagatacctgtgg

SEQ ID NO: 6369 - DNA, 23 bp, synthetic construct
  misc_feature 1..23: note = HLA-A targeting gRNA
  source 1..23: mol_type = other DNA
gagggcactgggaggaagcaggg

SEQ ID NO: 6370 - DNA, 23 bp, synthetic construct
  misc_feature 1..23: note = HLA-A targeting gRNA
  source 1..23: mol_type = other DNA
gagggccccctctgctctctagg

SEQ ID NO: 6371 - DNA, 23 bp, synthetic construct
  misc_feature 1..23: note = HLA-A targeting gRNA
  source 1..23: mol_type = other DNA
gagggccccctctgctgtctagg

SEQ ID NO: 6372 - DNA, 23 bp, synthetic construct
  misc_feature 1..23: note = HLA-A targeting gRNA
  source 1..23: mol_type = other DNA
gagggccccctcttctctctagg

SEQ ID NO: 6373 - DNA, 23 bp, synthetic construct
  misc_feature 1..23: note = HLA-A targeting gRNA
  source 1..23: mol_type = other DNA
gagggccccgtctgctctctagg

SEQ ID NO: 6374 - DNA, 23 bp, synthetic construct
  misc_feature 1..23: note = HLA-A targeting gRNA
  source 1..23: mol_type = other DNA
gaggggaaaggcctgggtaatgg

SEQ ID NO: 6375 - DNA, 23 bp, synthetic construct
  misc_feature 1..23: note = HLA-A targeting gRNA
  source 1..23: mol_type = other DNA
gaggggacagggaggaggcaggg

SEQ ID NO: 6376 - DNA, 23 bp, synthetic construct
  misc_feature 1..23: note = HLA-A targeting gRNA
  source 1..23: mol_type = other DNA
gaggggacagggaggagtcaggg

SEQ ID NO: 6377 - DNA, 23 bp, synthetic construct
  misc_feature 1..23: note = HLA-A targeting gRNA
  source 1..23: mol_type = other DNA
gaggggactgggaggaagcaggg

SEQ ID NO: 6378 - DNA, 23 bp, synthetic construct
  misc_feature 1..23: note = HLA-A targeting gRNA
  source 1..23: mol_type = other DNA
gaggggactgggaggaggcaggg

SEQ ID NO: 6379 - DNA, 23 bp, synthetic construct
  misc_feature 1..23: note = HLA-A targeting gRNA
  source 1..23: mol_type = other DNA
gaggggagccccgggcgccgtgg

SEQ ID NO: 6380 - DNA, 23 bp, synthetic construct
  misc_feature 1..23: note = HLA-A targeting gRNA
  source 1..23: mol_type = other DNA
gaggggagccgcaggcgccgtgg

SEQ ID NO: 6381 - DNA, 23 bp, synthetic construct
  misc_feature 1..23: note = HLA-A targeting gRNA
  source 1..23: mol_type = other DNA
gaggggagccgcgggagccgtgg

SEQ ID NO: 6382 - DNA, 23 bp, synthetic construct
  misc_feature 1..23: note = HLA-A targeting gRNA
  source 1..23: mol_type = other DNA
gaggggagccgcgggcgccgtgg

SEQ ID NO: 6383 - DNA, 23 bp, synthetic construct
  misc_feature 1..23: note = HLA-A targeting gRNA
  source 1..23: mol_type = other DNA
gaggggcccgaccctcctcccgg

SEQ ID NO: 6384 - DNA, 23 bp, synthetic construct
  misc_feature 1..23: note = HLA-A targeting gRNA
  source 1..23: mol_type = other DNA
gaggggccggaatattgggacgg

SEQ ID NO: 6385 - DNA, 23 bp, synthetic construct
  misc_feature 1..23: note = HLA-A targeting gRNA
  source 1..23: mol_type = other DNA
gaggggccggacggagtattggg

SEQ ID NO: 6386 - DNA, 23 bp, synthetic construct
  misc_feature 1..23: note = HLA-A targeting gRNA
  source 1..23: mol_type = other DNA
gaggggcttcggtaaggaggggg

SEQ ID NO: 6387 - DNA, 23 bp, synthetic construct
  misc_feature 1..23: note = HLA-A targeting gRNA
  source 1..23: mol_type = other DNA
gaggggtcatatctcttctcagg

SEQ ID NO: 6388 - DNA, 23 bp, synthetic construct
  misc_feature 1..23: note = HLA-A targeting gRNA
  source 1..23: mol_type = other DNA
gaggggtcatatctgttctcagg

SEQ ID NO: 6389 - DNA, 23 bp, synthetic construct
  misc_feature 1..23: note = HLA-A targeting gRNA
  source 1..23: mol_type = other DNA
gaggggtcatgtgtcttctcagg

SEQ ID NO: 6390 - DNA, 23 bp, synthetic construct
  misc_feature 1..23: note = HLA-A targeting gRNA
  source 1..23: mol_type = other DNA
gaggggtgatgtgtcttctcagg

SEQ ID NO: 6391 - DNA, 23 bp, synthetic construct
  misc_feature 1..23: note = HLA-A targeting gRNA
  source 1..23: mol_type = other DNA
gagggtctgggcgggtcccgcgg

SEQ ID NO: 6392 - DNA, 23 bp, synthetic construct
  misc_feature 1..23: note = HLA-A targeting gRNA
  source 1..23: mol_type = other DNA
gagggtttgggcgggtcccgcgg

SEQ ID NO: 6393 - DNA, 23 bp, synthetic construct
  misc_feature 1..23: note = HLA-A targeting gRNA
  source 1..23: mol_type = other DNA
gaggttcccctaaaatcacatgg

SEQ ID NO: 6394 - DNA, 23 bp, synthetic construct
  misc_feature 1..23: note = HLA-A targeting gRNA
  source 1..23: mol_type = other DNA
gaggttcccctaagatcacatgg

SEQ ID NO: 6395 - DNA, 23 bp, synthetic construct
  misc_feature 1..23: note = HLA-A targeting gRNA
  source 1..23: mol_type = other DNA
gaggttcccctaagatcgcatgg

SEQ ID NO: 6396 - DNA, 23 bp, synthetic construct
  misc_feature 1..23: note = HLA-A targeting gRNA
  source 1..23: mol_type = other DNA
gaggttcccctaagattgcatgg

SEQ ID NO: 6397 - DNA, 23 bp, synthetic construct
  misc_feature 1..23: note = HLA-A targeting gRNA
  source 1..23: mol_type = other DNA
gaggttcctctaagatctcatgg

SEQ ID NO: 6398 - DNA, 23 bp, synthetic construct
  misc_feature 1..23: note = HLA-A targeting gRNA
  source 1..23: mol_type = other DNA
gaggttctgggcgggtcccgcgg

SEQ ID NO: 6399 - DNA, 23 bp, synthetic construct
  misc_feature 1..23: note = HLA-A targeting gRNA
  source 1..23: mol_type = other DNA
gagtccaagaggggagccgcagg

SEQ ID NO: 6400 - DNA, 23 bp, synthetic construct
  misc_feature 1..23: note = HLA-A targeting gRNA
  source 1..23: mol_type = other DNA
gagtccaagaggggagccgcggg

SEQ ID NO: 6401 - DNA, 23 bp, synthetic construct
  misc_feature 1..23: note = HLA-A targeting gRNA
  source 1..23: mol_type = other DNA
gagtcccgcttcatctcagtggg

SEQ ID NO: 6402 - DNA, 23 bp, synthetic construct
  misc_feature 1..23: note = HLA-A targeting gRNA
  source 1..23: mol_type = other DNA
gagtccgagaaggggagccgcgg

SEQ ID NO: 6403 - DNA, 23 bp, synthetic construct
  misc_feature 1..23: note = HLA-A targeting gRNA
  source 1..23: mol_type = other DNA
gagtccgagagaggagccgcggg

SEQ ID NO: 6404 - DNA, 23 bp, synthetic construct
  misc_feature 1..23: note = HLA-A targeting gRNA
  source 1..23: mol_type = other DNA
gagtccgagaggggagccccggg

SEQ ID NO: 6405 - DNA, 23 bp, synthetic construct
  misc_feature 1..23: note = HLA-A targeting gRNA
  source 1..23: mol_type = other DNA
gagtccgagaggggagccgcggg

SEQ ID NO: 6406 - DNA, 23 bp, synthetic construct
  misc_feature 1..23: note = HLA-A targeting gRNA
  source 1..23: mol_type = other DNA
gagtccgaggaaggagccgcggg

SEQ ID NO: 6407 - DNA, 23 bp, synthetic construct
  misc_feature 1..23: note = HLA-A targeting gRNA
  source 1..23: mol_type = other DNA
gagtccgaggacggagccccggg

SEQ ID NO: 6408 - DNA, 23 bp, synthetic construct
  misc_feature 1..23: note = HLA-A targeting gRNA
  source 1..23: mol_type = other DNA
gagtccgaggacggagccctggg

SEQ ID NO: 6409 - DNA, 23 bp, synthetic construct
  misc_feature 1..23: note = HLA-A targeting gRNA
  source 1..23: mol_type = other DNA
gagtccgaggatggagccccggg

SEQ ID NO: 6410 - DNA, 23 bp, synthetic construct
  misc_feature 1..23: note = HLA-A targeting gRNA
  source 1..23: mol_type = other DNA
gagtccgaggatggcgccccggg

SEQ ID NO: 6411 - DNA, 23 bp, synthetic construct
  misc_feature 1..23: note = HLA-A targeting gRNA
  source 1..23: mol_type = other DNA
gagtccgaggatggcgccctggg

SEQ ID NO: 6412 - DNA, 23 bp, synthetic construct
  misc_feature 1..23: note = HLA-A targeting gRNA
  source 1..23: mol_type = other DNA
gagtccgaggggggagccgcggg

SEQ ID NO: 6413 - DNA, 23 bp, synthetic construct
  misc_feature 1..23: note = HLA-A targeting gRNA
  source 1..23: mol_type = other DNA
gagtcctgcagcctccactcagg

SEQ ID NO: 6414 - DNA, 23 bp, synthetic construct
  misc_feature 1..23: note = HLA-A targeting gRNA
  source 1..23: mol_type = other DNA
gagtccttcggcctccactcagg

SEQ ID NO: 6415 - DNA, 23 bp, synthetic construct
  misc_feature 1..23: note = HLA-A targeting gRNA
  source 1..23: mol_type = other DNA
gagtctctcatcacttgtaaagg

SEQ ID NO: 6416 - DNA, 23 bp, synthetic construct
  misc_feature 1..23: note = HLA-A targeting gRNA
  source 1..23: mol_type = other DNA
gagtctctcatcgcttgtaaagg

SEQ ID NO: 6417 - DNA, 23 bp, synthetic construct
  misc_feature 1..23: note = HLA-A targeting gRNA
  source 1..23: mol_type = other DNA
gagtctctgagcggggaacaggg

SEQ ID NO: 6418 - DNA, 23 bp, synthetic construct
  misc_feature 1..23: note = HLA-A targeting gRNA
  source 1..23: mol_type = other DNA
gagtctctgagtggggaacaggg

SEQ ID NO: 6419 - DNA, 23 bp, synthetic construct
  misc_feature 1..23: note = HLA-A targeting gRNA
  source 1..23: mol_type = other DNA
gagtgcgtggagtggctccgcgg

SEQ ID NO: 6420 - DNA, 23 bp, synthetic construct
  misc_feature 1..23: note = HLA-A targeting gRNA
  source 1..23: mol_type = other DNA
gagtggctccgcagatacctggg

SEQ ID NO: 6421 - DNA, 23 bp, synthetic construct
  misc_feature 1..23: note = HLA-A targeting gRNA
  source 1..23: mol_type = other DNA
gagtgggcaggggggtggtgggg

SEQ ID NO: 6422 - DNA, 23 bp, synthetic construct
  misc_feature 1..23: note = HLA-A targeting gRNA
  source 1..23: mol_type = other DNA
gagtgggcgggggggcggggagg

SEQ ID NO: 6423 - DNA, 23 bp, synthetic construct
  misc_feature 1..23: note = HLA-A targeting gRNA
  source 1..23: mol_type = other DNA
gagtgggcggggggggggtgggg

SEQ ID NO: 6424 - DNA, 23 bp, synthetic construct
  misc_feature 1..23: note = HLA-A targeting gRNA
  source 1..23: mol_type = other DNA
gagtgggcggggggggtggtggg

SEQ ID NO: 6425 - DNA, 23 bp, synthetic construct
  misc_feature 1..23: note = HLA-A targeting gRNA
  source 1..23: mol_type = other DNA
gagttcttcagcctccactcagg

SEQ ID NO: 6426 - DNA, 23 bp, synthetic construct
  misc_feature 1..23: note = HLA-A targeting gRNA
  source 1..23: mol_type = other DNA
gagttttcttgtcccactggggg

SEQ ID NO: 6427 - DNA, 23 bp, synthetic construct
  misc_feature 1..23: note = HLA-A targeting gRNA
  source 1..23: mol_type = other DNA
gatagagcaggaggtgccggagg

SEQ ID NO: 6428 - DNA, 23 bp, synthetic construct
  misc_feature 1..23: note = HLA-A targeting gRNA
  source 1..23: mol_type = other DNA
gatagtcacatgggcgctgttgg

SEQ ID NO: 6429 - DNA, 23 bp, synthetic construct
  misc_feature 1..23: note = HLA-A targeting gRNA
  source 1..23: mol_type = other DNA
gatcacactgacctggcagtggg

SEQ ID NO: 6430 - DNA, 23 bp, synthetic construct
  misc_feature 1..23: note = HLA-A targeting gRNA
  source 1..23: mol_type = other DNA
gatcacactgacctggtagcggg

SEQ ID NO: 6431 - DNA, 23 bp, synthetic construct
  misc_feature 1..23: note = HLA-A targeting gRNA
  source 1..23: mol_type = other DNA
gatcacactgatctggcagtggg

SEQ ID NO: 6432 - DNA, 23 bp, synthetic construct
  misc_feature 1..23: note = HLA-A targeting gRNA
  source 1..23: mol_type = other DNA
gatcacccagcacaagttggagg

SEQ ID NO: 6433 - DNA, 23 bp, synthetic construct
  misc_feature 1..23: note = HLA-A targeting gRNA
  source 1..23: mol_type = other DNA
gatcacccagcccaagtgggagg

SEQ ID NO: 6434 - DNA, 23 bp, synthetic construct
  misc_feature 1..23: note = HLA-A targeting gRNA
  source 1..23: mol_type = other DNA
gatcacccagcccaagttggagg

SEQ ID NO: 6435 - DNA, 23 bp, synthetic construct
  misc_feature 1..23: note = HLA-A targeting gRNA
  source 1..23: mol_type = other DNA
gatcacccagcgcaaatgggagg

SEQ ID NO: 6436 - DNA, 23 bp, synthetic construct
  misc_feature 1..23: note = HLA-A targeting gRNA
  source 1..23: mol_type = other DNA
gatcacccagcgcaagttggagg

SEQ ID NO: 6437 - DNA, 23 bp, synthetic construct
  misc_feature 1..23: note = HLA-A targeting gRNA
  source 1..23: mol_type = other DNA
gatcacccagcgtaagtgggagg

SEQ ID NO: 6438 - DNA, 23 bp, synthetic construct
  misc_feature 1..23: note = HLA-A targeting gRNA
  source 1..23: mol_type = other DNA
gatcacccagctcaagtgggagg

SEQ ID NO: 6439 - DNA, 23 bp, synthetic construct
  misc_feature 1..23: note = HLA-A targeting gRNA
  source 1..23: mol_type = other DNA
gatcactcagcgcaagttggagg

SEQ ID NO: 6440 - DNA, 23 bp, synthetic construct
  misc_feature 1..23: note = HLA-A targeting gRNA
  source 1..23: mol_type = other DNA
gatcatccagcgcaagtgggagg

SEQ ID NO: 6441 - DNA, 23 bp, synthetic construct
  misc_feature 1..23: note = HLA-A targeting gRNA
  source 1..23: mol_type = other DNA
gatccacccccctgaggccgcgg

SEQ ID NO: 6442 - DNA, 23 bp, synthetic construct
  misc_feature 1..23: note = HLA-A targeting gRNA
  source 1..23: mol_type = other DNA
gatcccgcactcaccggcccagg

SEQ ID NO: 6443 - DNA, 23 bp, synthetic construct
  misc_feature 1..23: note = HLA-A targeting gRNA
  source 1..23: mol_type = other DNA
gatccgaccccctgaggccgcgg

SEQ ID NO: 6444 - DNA, 23 bp, synthetic construct
  misc_feature 1..23: note = HLA-A targeting gRNA
  source 1..23: mol_type = other DNA
gatccgcccccctgaggccgcgg

SEQ ID NO: 6445 - DNA, 23 bp, synthetic construct
  misc_feature 1..23: note = HLA-A targeting gRNA
  source 1..23: mol_type = other DNA
gatccgccccctgaggccgcggg

SEQ ID NO: 6446 - DNA, 23 bp, synthetic construct
  misc_feature 1..23: note = HLA-A targeting gRNA
  source 1..23: mol_type = other DNA
gatccgcctccctgaggccgcgg

SEQ ID NO: 6447 - DNA, 23 bp, synthetic construct
  misc_feature 1..23: note = HLA-A targeting gRNA
  source 1..23: mol_type = other DNA
gatctcagacccggagactcggg

SEQ ID NO: 6448 - DNA, 23 bp, synthetic construct
  misc_feature 1..23: note = HLA-A targeting gRNA
  source 1..23: mol_type = other DNA
gatctcagaccgggagactcggg

SEQ ID NO: 6449 - DNA, 23 bp, synthetic construct
  misc_feature 1..23: note = HLA-A targeting gRNA
  source 1..23: mol_type = other DNA
gatctcagaccgggagacttggg

SEQ ID NO: 6450 - DNA, 23 bp, synthetic construct
  misc_feature 1..23: note = HLA-A targeting gRNA
  source 1..23: mol_type = other DNA
gatctcagacggggagactcggg

SEQ ID NO: 6451 - DNA, 23 bp, synthetic construct
  misc_feature 1..23: note = HLA-A targeting gRNA
  source 1..23: mol_type = other DNA
gatctcagacggggagactctgg

SEQ ID NO: 6452 - DNA, 23 bp, synthetic construct
  misc_feature 1..23: note = HLA-A targeting gRNA
  source 1..23: mol_type = other DNA
gatctcccagcgcaagtgggagg

SEQ ID NO: 6453 - DNA, 23 bp, synthetic construct
  misc_feature 1..23: note = HLA-A targeting gRNA
  source 1..23: mol_type = other DNA
gatctcccagcgcaagttggagg

SEQ ID NO: 6454 - DNA, 23 bp, synthetic construct
  misc_feature 1..23: note = HLA-A targeting gRNA
  source 1..23: mol_type = other DNA
gatctcggacccggagactcggg

SEQ ID NO: 6455 - DNA, 23 bp, synthetic construct
  misc_feature 1..23: note = HLA-A targeting gRNA
  source 1..23: mol_type = other DNA
gatctcggaccctgagactcggg

SEQ ID NO: 6456 - DNA, 23 bp, synthetic construct
  misc_feature 1..23: note = HLA-A targeting gRNA
  source 1..23: mol_type = other DNA
gatctgagccgccgtgtccgcgg

SEQ ID NO: 6457 - DNA, 23 bp, synthetic construct
  misc_feature 1..23: note = HLA-A targeting gRNA
  source 1..23: mol_type = other DNA
gatctgagccgccttgtccgcgg

SEQ ID NO: 6458 - DNA, 23 bp, synthetic construct
  misc_feature 1..23: note = HLA-A targeting gRNA
  source 1..23: mol_type = other DNA
gatctgagccgcggtatccgcgg

SEQ ID NO: 6459 - DNA, 23 bp, synthetic construct
  misc_feature 1..23: note = HLA-A targeting gRNA
  source 1..23: mol_type = other DNA
gatctgagccgcggtgtccgcgg

SEQ ID NO: 6460 - DNA, 23 bp, synthetic construct
  misc_feature 1..23: note = HLA-A targeting gRNA
  source 1..23: mol_type = other DNA
gatctgagccgctgtgtccccgg

SEQ ID NO: 6461 - DNA, 23 bp, synthetic construct
  misc_feature 1..23: note = HLA-A targeting gRNA
  source 1..23: mol_type = other DNA
gatctgagccgctgtgtccgcgg

SEQ ID NO: 6462 - DNA, 23 bp, synthetic construct
  misc_feature 1..23: note = HLA-A targeting gRNA
  source 1..23: mol_type = other DNA
gatctggcagtgggatggggagg

SEQ ID NO: 6463 - DNA, 23 bp, synthetic construct
  misc_feature 1..23: note = HLA-A targeting gRNA
  source 1..23: mol_type = other DNA
gatcttcaagaccaacacacagg

SEQ ID NO: 6464 - DNA, 23 bp, synthetic construct
  misc_feature 1..23: note = HLA-A targeting gRNA
  source 1..23: mol_type = other DNA
gatgcccaagttggggatggtgg

SEQ ID NO: 6465 - DNA, 23 bp, synthetic construct
  misc_feature 1..23: note = HLA-A targeting gRNA
  source 1..23: mol_type = other DNA
gatgcccatgatggggatggtgg

SEQ ID NO: 6466 - DNA, 23 bp, synthetic construct
  misc_feature 1..23: note = HLA-A targeting gRNA
  source 1..23: mol_type = other DNA
gatgctgcatcccagtaatgagg

SEQ ID NO: 6467 - DNA, 23 bp, synthetic construct
  misc_feature 1..23: note = HLA-A targeting gRNA
  source 1..23: mol_type = other DNA
gatgctgcttcccagtaatgagg

SEQ ID NO: 6468 - DNA, 23 bp, synthetic construct
  misc_feature 1..23: note = HLA-A targeting gRNA
  source 1..23: mol_type = other DNA
gatggtcacatgggcactgttgg

SEQ ID NO: 6469 - DNA, 23 bp, synthetic construct
  misc_feature 1..23: note = HLA-A targeting gRNA
  source 1..23: mol_type = other DNA
gatggtcacatgggcgctgctgg

SEQ ID NO: 6470 - DNA, 23 bp, synthetic construct
  misc_feature 1..23: note = HLA-A targeting gRNA
  source 1..23: mol_type = other DNA
gatggtcacatgggcgctgttgg

SEQ ID NO: 6471 - DNA, 23 bp, synthetic construct
  misc_feature 1..23: note = HLA-A targeting gRNA
  source 1..23: mol_type = other DNA
gatggtcacatgggtgctgttgg

SEQ ID NO: 6472 - DNA, 23 bp, synthetic construct
  misc_feature 1..23: note = HLA-A targeting gRNA
  source 1..23: mol_type = other DNA
gatgtaagccttgccgtcgtagg

SEQ ID NO: 6473 - DNA, 23 bp, synthetic construct
  misc_feature 1..23: note = HLA-A targeting gRNA
  source 1..23: mol_type = other DNA
gatgtaatccctgccgtcgtagg

SEQ ID NO: 6474 - DNA, 23 bp, synthetic construct
  misc_feature 1..23: note = HLA-A targeting gRNA
  source 1..23: mol_type = other DNA
gatgtaatccttgccatcgtagg

SEQ ID NO: 6475 - DNA, 23 bp, synthetic construct
  misc_feature 1..23: note = HLA-A targeting gRNA
  source 1..23: mol_type = other DNA
gatgtaatccttgccgtcctagg

SEQ ID NO: 6476 - DNA, 23 bp, synthetic construct
  misc_feature 1..23: note = HLA-A targeting gRNA
  source 1..23: mol_type = other DNA
gatgtaatccttgccgtcgcagg

SEQ ID NO: 6477 - DNA, 23 bp, synthetic construct
  misc_feature 1..23: note = HLA-A targeting gRNA
  source 1..23: mol_type = other DNA
gatgtaatctttgccgtcgtagg

SEQ ID NO: 6478 - DNA, 23 bp, synthetic construct
  misc_feature 1..23: note = HLA-A targeting gRNA
  source 1..23: mol_type = other DNA
gatgtatcaccttgatattatgg

SEQ ID NO: 6479 - DNA, 23 bp, synthetic construct
  misc_feature 1..23: note = HLA-A targeting gRNA
  source 1..23: mol_type = other DNA
gatgtcatccttgccgtcgtagg

SEQ ID NO: 6480 - DNA, 23 bp, synthetic construct
  misc_feature 1..23: note = HLA-A targeting gRNA
  source 1..23: mol_type = other DNA
gattacccagcgcaagttggagg

SEQ ID NO: 6481 - DNA, 23 bp, synthetic construct
  misc_feature 1..23: note = HLA-A targeting gRNA
  source 1..23: mol_type = other DNA
gattccagcatcatgagtcaggg

SEQ ID NO: 6482 - DNA, 23 bp, synthetic construct
  misc_feature 1..23: note = HLA-A targeting gRNA
  source 1..23: mol_type = other DNA
gattccagcattcatgagtcagg

SEQ ID NO: 6483 - DNA, 23 bp, synthetic construct
  misc_feature 1..23: note = HLA-A targeting gRNA
  source 1..23: mol_type = other DNA
gattccagcattcatgagtcggg

SEQ ID NO: 6484 - DNA, 23 bp, synthetic construct
  misc_feature 1..23: note = HLA-A targeting gRNA
  source 1..23: mol_type = other DNA
gattccagcattcgtgagtcagg

SEQ ID NO: 6485 - DNA, 23 bp, synthetic construct
  misc_feature 1..23: note = HLA-A targeting gRNA
  source 1..23: mol_type = other DNA
gatttcagcattcatgagtcagg

SEQ ID NO: 6486 - DNA, 23 bp, synthetic construct
  misc_feature 1..23: note = HLA-A targeting gRNA
  source 1..23: mol_type = other DNA
gcaacggagagcctacctggagg

SEQ ID NO: 6487 - DNA, 23 bp, synthetic construct
  misc_feature 1..23: note = HLA-A targeting gRNA
  source 1..23: mol_type = other DNA
gcaagaggggccggagtattggg

SEQ ID NO: 6488 - DNA, 23 bp, synthetic construct
  misc_feature 1..23: note = HLA-A targeting gRNA
  source 1..23: mol_type = other DNA
gcaagttggaggcggcccgtggg

SEQ ID NO: 6489 - DNA, 23 bp, synthetic construct
  misc_feature 1..23: note = HLA-A targeting gRNA
  source 1..23: mol_type = other DNA
gcaatggggaggcgcagcgttgg

SEQ ID NO: 6490 - DNA, 23 bp, synthetic construct
  misc_feature 1..23: note = HLA-A targeting gRNA
  source 1..23: mol_type = other DNA
gcacagaacccagacaccagcgg

SEQ ID NO: 6491 - DNA, 23 bp, synthetic construct
  misc_feature 1..23: note = HLA-A targeting gRNA
  source 1..23: mol_type = other DNA
gcacagggcccagcacctcaggg

SEQ ID NO: 6492 - DNA, 23 bp, synthetic construct
  misc_feature 1..23: note = HLA-A targeting gRNA
  source 1..23: mol_type = other DNA
gcacatgtgacaatgaaagacgg

SEQ ID NO: 6493 - DNA, 23 bp, synthetic construct
  misc_feature 1..23: note = HLA-A targeting gRNA
  source 1..23: mol_type = other DNA
gcacatgtgacaatgaagcacgg

SEQ ID NO: 6494 - DNA, 23 bp, synthetic construct
  misc_feature 1..23: note = HLA-A targeting gRNA
  source 1..23: mol_type = other DNA
gcacatgtgacaatgaaggacgg

SEQ ID NO: 6495 - DNA, 23 bp, synthetic construct
  misc_feature 1..23: note = HLA-A targeting gRNA
  source 1..23: mol_type = other DNA
gcacatgtgacaatgaaggatgg

SEQ ID NO: 6496 - DNA, 23 bp, synthetic construct
  misc_feature 1..23: note = HLA-A targeting gRNA
  source 1..23: mol_type = other DNA
gcaccgtgacttttcctctcagg

SEQ ID NO: 6497 - DNA, 23 bp, synthetic construct
  misc_feature 1..23: note = HLA-A targeting gRNA
  source 1..23: mol_type = other DNA
gcacggatgtatcaccttgatgg

SEQ ID NO: 6498 - DNA, 23 bp, synthetic construct
  misc_feature 1..23: note = HLA-A targeting gRNA
  source 1..23: mol_type = other DNA
gcacgggccgcctccaacttggg

SEQ ID NO: 6499 - DNA, 23 bp, synthetic construct
  misc_feature 1..23: note = HLA-A targeting gRNA
  source 1..23: mol_type = other DNA
gcactcacaggcccaggtctcgg

SEQ ID NO: 6500 - DNA, 23 bp, synthetic construct
  misc_feature 1..23: note = HLA-A targeting gRNA
  source 1..23: mol_type = other DNA
gcactcaccagcccaggtctcgg

SEQ ID NO: 6501 - DNA, 23 bp, synthetic construct
  misc_feature 1..23: note = HLA-A targeting gRNA
  source 1..23: mol_type = other DNA
gcactcacccgcccaggtctcgg

SEQ ID NO: 6502 - DNA, 23 bp, synthetic construct
  misc_feature 1..23: note = HLA-A targeting gRNA
  source 1..23: mol_type = other DNA
gcactcaccggcccaggtctcgg

SEQ ID NO: 6503 - DNA, 23 bp, synthetic construct
  misc_feature 1..23: note = HLA-A targeting gRNA
  source 1..23: mol_type = other DNA
gcactggggaggcgccgcgttgg

SEQ ID NO: 6504 - DNA, 23 bp, synthetic construct
  misc_feature 1..23: note = HLA-A targeting gRNA
  source 1..23: mol_type = other DNA
gcagccaaacatccactggaggg

SEQ ID NO: 6505 - DNA, 23 bp, synthetic construct
  misc_feature 1..23: note = HLA-A targeting gRNA
  source 1..23: mol_type = other DNA
gcagccaaacatcctctggaggg

SEQ ID NO: 6506 - DNA, 23 bp, synthetic construct
  misc_feature 1..23: note = HLA-A targeting gRNA
  source 1..23: mol_type = other DNA
gcagccacacatccactggaggg

SEQ ID NO: 6507 - DNA, 23 bp, synthetic construct
  misc_feature 1..23: note = HLA-A targeting gRNA
  source 1..23: mol_type = other DNA
gcagccagacatcctctggaggg

SEQ ID NO: 6508 - DNA, 23 bp, synthetic construct
  misc_feature 1..23: note = HLA-A targeting gRNA
  source 1..23: mol_type = other DNA
gcagccagacatcctctggatgg

SEQ ID NO: 6509 - DNA, 23 bp, synthetic construct
  misc_feature 1..23: note = HLA-A targeting gRNA
  source 1..23: mol_type = other DNA
gcagccatacatattctggaggg

SEQ ID NO: 6510 - DNA, 23 bp, synthetic construct
  misc_feature 1..23: note = HLA-A targeting gRNA
  source 1..23: mol_type = other DNA
gcagccatacatccactggaggg

SEQ ID NO: 6511 - DNA, 23 bp, synthetic construct
  misc_feature 1..23: note = HLA-A targeting gRNA
  source 1..23: mol_type = other DNA
gcagccatacatccgctggaggg

SEQ ID NO: 6512 - DNA, 23 bp, synthetic construct
  misc_feature 1..23: note = HLA-A targeting gRNA
  source 1..23: mol_type = other DNA
gcagccatacatcctctggaagg

SEQ ID NO: 6513 - DNA, 23 bp, synthetic construct
  misc_feature 1..23: note = HLA-A targeting gRNA
  source 1..23: mol_type = other DNA
gcagccatacatgctctggaggg

SEQ ID NO: 6514 - DNA, 23 bp, synthetic construct
  misc_feature 1..23: note = HLA-A targeting gRNA
  source 1..23: mol_type = other DNA
gcagcccctcatgctgcacatgg

SEQ ID NO: 6515 - DNA, 23 bp, synthetic construct
  misc_feature 1..23: note = HLA-A targeting gRNA
  source 1..23: mol_type = other DNA
gcagcccctcatgctgtacatgg

SEQ ID NO: 6516 - DNA, 23 bp, synthetic construct
  misc_feature 1..23: note = HLA-A targeting gRNA
  source 1..23: mol_type = other DNA
gcagcccctcatgctgtacctgg

SEQ ID NO: 6517 - DNA, 23 bp, synthetic construct
  misc_feature 1..23: note = HLA-A targeting gRNA
  source 1..23: mol_type = other DNA
gcagcccctcgtgctgaacatgg

SEQ ID NO: 6518 - DNA, 23 bp, synthetic construct
  misc_feature 1..23: note = HLA-A targeting gRNA
  source 1..23: mol_type = other DNA
gcagcccctcgtgctgcacatgg

SEQ ID NO: 6519 - DNA, 23 bp, synthetic construct
  misc_feature 1..23: note = HLA-A targeting gRNA
  source 1..23: mol_type = other DNA
gcagcccctcgtgctgcatatgg

SEQ ID NO: 6520 - DNA, 23 bp, synthetic construct
  misc_feature 1..23: note = HLA-A targeting gRNA
  source 1..23: mol_type = other DNA
gcagccgggccgggacatggcgg

SEQ ID NO: 6521 - DNA, 23 bp, synthetic construct
  misc_feature 1..23: note = HLA-A targeting gRNA
  source 1..23: mol_type = other DNA
gcagccgtacaagctctggaggg

SEQ ID NO: 6522 - DNA, 23 bp, synthetic construct
  misc_feature 1..23: note = HLA-A targeting gRNA
  source 1..23: mol_type = other DNA
gcagccgtacatccactggaggg

SEQ ID NO: 6523 - DNA, 23 bp, synthetic construct
  misc_feature 1..23: note = HLA-A targeting gRNA
  source 1..23: mol_type = other DNA
gcagccgtacatcctctggaggg

SEQ ID NO: 6524 - DNA, 23 bp, synthetic construct
  misc_feature 1..23: note = HLA-A targeting gRNA
  source 1..23: mol_type = other DNA
gcagccgtacatcctctggatgg

SEQ ID NO: 6525 - DNA, 23 bp, synthetic construct
  misc_feature 1..23: note = HLA-A targeting gRNA
  source 1..23: mol_type = other DNA
gcagccgtacatcctctggcggg

SEQ ID NO: 6526 - DNA, 23 bp, synthetic construct
  misc_feature 1..23: note = HLA-A targeting gRNA
  source 1..23: mol_type = other DNA
gcagccgtacatcgtctggaggg

SEQ ID NO: 6527 - DNA, 23 bp, synthetic construct
  misc_feature 1..23: note = HLA-A targeting gRNA
  source 1..23: mol_type = other DNA
gcagccgtacatgctctggaggg

SEQ ID NO: 6528 - DNA, 23 bp, synthetic construct
  misc_feature 1..23: note = HLA-A targeting gRNA
  source 1..23: mol_type = other DNA
gcagcggagaacctacctggagg

SEQ ID NO: 6529 - DNA, 23 bp, synthetic construct
  misc_feature 1..23: note = HLA-A targeting gRNA
  source 1..23: mol_type = other DNA
gcagcggagagcctacctggagg

SEQ ID NO: 6530 - DNA, 23 bp, synthetic construct
  misc_feature 1..23: note = HLA-A targeting gRNA
  source 1..23: mol_type = other DNA
gcagctaagagcctacctggagg

SEQ ID NO: 6531 - DNA, 23 bp, synthetic construct
  misc_feature 1..23: note = HLA-A targeting gRNA
  source 1..23: mol_type = other DNA
gcagctgagaacctacctggagg

SEQ ID NO: 6532 - DNA, 23 bp, synthetic construct
  misc_feature 1..23: note = HLA-A targeting gRNA
  source 1..23: mol_type = other DNA
gcagctgagagcctaccgggagg

SEQ ID NO: 6533 - DNA, 23 bp, synthetic construct
  misc_feature 1..23: note = HLA-A targeting gRNA
  source 1..23: mol_type = other DNA
gcagctgagagcctacctggtgg

SEQ ID NO: 6534 - DNA, 23 bp, synthetic construct
  misc_feature 1..23: note = HLA-A targeting gRNA
  source 1..23: mol_type = other DNA
gcagctgagagcctgcctggagg

SEQ ID NO: 6535 - DNA, 23 bp, synthetic construct
  misc_feature 1..23: note = HLA-A targeting gRNA
  source 1..23: mol_type = other DNA
gcagctgtgatggtgccttctgg

SEQ ID NO: 6536 - DNA, 23 bp, synthetic construct
  misc_feature 1..23: note = HLA-A targeting gRNA
  source 1..23: mol_type = other DNA
gcagctgtggtggtgccttctgg

SEQ ID NO: 6537 - DNA, 23 bp, synthetic construct
  misc_feature 1..23: note = HLA-A targeting gRNA
  source 1..23: mol_type = other DNA
gcaggacagagcctacctggagg

SEQ ID NO: 6538 - DNA, 23 bp, synthetic construct
  misc_feature 1..23: note = HLA-A targeting gRNA
  source 1..23: mol_type = other DNA
gcaggaccatgagatcttagagg

SEQ ID NO: 6539 - DNA, 23 bp, synthetic construct
  misc_feature 1..23: note = HLA-A targeting gRNA
  source 1..23: mol_type = other DNA
gcaggaggggccagagtattggg

SEQ ID NO: 6540 - DNA, 23 bp, synthetic construct
  misc_feature 1..23: note = HLA-A targeting gRNA
  source 1..23: mol_type = other DNA
gcaggaggggccggaatattggg

SEQ ID NO: 6541 - DNA, 23 bp, synthetic construct
  misc_feature 1..23: note = HLA-A targeting gRNA
  source 1..23: mol_type = other DNA
gcaggaggggccggagcattggg

SEQ ID NO: 6542 - DNA, 23 bp, synthetic construct
  misc_feature 1..23: note = HLA-A targeting gRNA
  source 1..23: mol_type = other DNA
gcaggaggggccggagtactggg

SEQ ID NO: 6543 - DNA, 23 bp, synthetic construct
  misc_feature 1..23: note = HLA-A targeting gRNA
  source 1..23: mol_type = other DNA
gcaggaggggccggagtattagg

SEQ ID NO: 6544 - DNA, 23 bp, synthetic construct
  misc_feature 1..23: note = HLA-A targeting gRNA
  source 1..23: mol_type = other DNA
gcaggaggggccggagtgttggg

SEQ ID NO: 6545 - DNA, 23 bp, synthetic construct
  misc_feature 1..23: note = HLA-A targeting gRNA
  source 1..23: mol_type = other DNA
gcaggaggggctggagtattggg

SEQ ID NO: 6546 - DNA, 23 bp, synthetic construct
  misc_feature 1..23: note = HLA-A targeting gRNA
  source 1..23: mol_type = other DNA
gcaggaggtgccggaggattggg

SEQ ID NO: 6547 - DNA, 23 bp, synthetic construct
  misc_feature 1..23: note = HLA-A targeting gRNA
  source 1..23: mol_type = other DNA
gcaggatccgcaggctctctcgg

SEQ ID NO: 6548 - DNA, 23 bp, synthetic construct
  misc_feature 1..23: note = HLA-A targeting gRNA
  source 1..23: mol_type = other DNA
gcaggcgccgtgggtggagcagg

SEQ ID NO: 6549 - DNA, 23 bp, synthetic construct
  misc_feature 1..23: note = HLA-A targeting gRNA
  source 1..23: mol_type = other DNA
gcaggcgggggcgcaggacccgg

SEQ ID NO: 6550 - DNA, 23 bp, synthetic construct
  misc_feature 1..23: note = HLA-A targeting gRNA
  source 1..23: mol_type = other DNA
gcaggcgggggctcaggacccgg

SEQ ID NO: 6551 - DNA, 23 bp, synthetic construct
  misc_feature 1..23: note = HLA-A targeting gRNA
  source 1..23: mol_type = other DNA
gcagggaaatggcctctgtaggg

SEQ ID NO: 6552 - DNA, 23 bp, synthetic construct
  misc_feature 1..23: note = HLA-A targeting gRNA
  source 1..23: mol_type = other DNA
gcagggaaatggcctctgtgggg

SEQ ID NO: 6553 - DNA, 23 bp, synthetic construct
  misc_feature 1..23: note = HLA-A targeting gRNA
  source 1..23: mol_type = other DNA
gcagggaacacttctacctgggg

SEQ ID NO: 6554 - DNA, 23 bp, synthetic construct
  misc_feature 1..23: note = HLA-A targeting gRNA
  source 1..23: mol_type = other DNA
gcagggccatgagatcttagagg

SEQ ID NO: 6555 - DNA, 23 bp, synthetic construct
  misc_feature 1..23: note = HLA-A targeting gRNA
  source 1..23: mol_type = other DNA
gcagggccatgcaatcttagggg

SEQ ID NO: 6556 - DNA, 23 bp, synthetic construct
  misc_feature 1..23: note = HLA-A targeting gRNA
  source 1..23: mol_type = other DNA
gcagggccatgcgatcttagggg

SEQ ID NO: 6557 - DNA, 23 bp, synthetic construct
  misc_feature 1..23: note = HLA-A targeting gRNA
  source 1..23: mol_type = other DNA
gcagggccatgtgatcttagggg

SEQ ID NO: 6558 - DNA, 23 bp, synthetic construct
  misc_feature 1..23: note = HLA-A targeting gRNA
  source 1..23: mol_type = other DNA
gcagggccatgtgattttagggg

SEQ ID NO: 6559 - DNA, 23 bp, synthetic construct
  misc_feature 1..23: note = HLA-A targeting gRNA
  source 1..23: mol_type = other DNA
gcaggggggtggtggggcagagg

SEQ ID NO: 6560 - DNA, 23 bp, synthetic construct
  misc_feature 1..23: note = HLA-A targeting gRNA
  source 1..23: mol_type = other DNA
gcagggtccgcaggctctctcgg

SEQ ID NO: 6561 - DNA, 23 bp, synthetic construct
  misc_feature 1..23: note = HLA-A targeting gRNA
  source 1..23: mol_type = other DNA
gcagggtccgcaggtcctctcgg

SEQ ID NO: 6562 - DNA, 23 bp, synthetic construct
  misc_feature 1..23: note = HLA-A targeting gRNA
  source 1..23: mol_type = other DNA
gcaggttccgcaggcccactcgg

SEQ ID NO: 6563 - DNA, 23 bp, synthetic construct
  misc_feature 1..23: note = HLA-A targeting gRNA
  source 1..23: mol_type = other DNA
gcaggttccgcaggctcactcgg

SEQ ID NO: 6564 - DNA, 23 bp, synthetic construct
  misc_feature 1..23: note = HLA-A targeting gRNA
  source 1..23: mol_type = other DNA
gcaggttccgcaggctctctcgg

SEQ ID NO: 6565 - DNA, 23 bp, synthetic construct
  misc_feature 1..23: note = HLA-A targeting gRNA
  source 1..23: mol_type = other DNA
gcaggttccgcaggtcctctcgg

SEQ ID NO: 6566 - DNA, 23 bp, synthetic construct
  misc_feature 1..23: note = HLA-A targeting gRNA
  source 1..23: mol_type = other DNA
gcaggttccgcaggttcactcgg

SEQ ID NO: 6567 - DNA, 23 bp, synthetic construct
  misc_feature 1..23: note = HLA-A targeting gRNA
  source 1..23: mol_type = other DNA
gcaggttccgcaggttctctcgg

SEQ ID NO: 6568 - DNA, 23 bp, synthetic construct
  misc_feature 1..23: note = HLA-A targeting gRNA
  source 1..23: mol_type = other DNA
gcaggtttcgcaggctctctcgg

SEQ ID NO: 6569 - DNA, 23 bp, synthetic construct
  misc_feature 1..23: note = HLA-A targeting gRNA
  source 1..23: mol_type = other DNA
gcagtatgcctacgacggcaagg

SEQ ID NO: 6570 - DNA, 23 bp, synthetic construct
  misc_feature 1..23: note = HLA-A targeting gRNA
  source 1..23: mol_type = other DNA
gcagtgcagagcctacctggagg

SEQ ID NO: 6571 - DNA, 23 bp, synthetic construct
  misc_feature 1..23: note = HLA-A targeting gRNA
  source 1..23: mol_type = other DNA
gcagtggagagcccacctggagg

SEQ ID NO: 6572 - DNA, 23 bp, synthetic construct
  misc_feature 1..23: note = HLA-A targeting gRNA
  source 1..23: mol_type = other DNA
gcagtggagagtctacctggagg

SEQ ID NO: 6573 - DNA, 23 bp, synthetic construct
  misc_feature 1..23: note = HLA-A targeting gRNA
  source 1..23: mol_type = other DNA
gcagtggtcaaagtggtcaaagg

SEQ ID NO: 6574 - DNA, 23 bp, synthetic construct
  misc_feature 1..23: note = HLA-A targeting gRNA
  source 1..23: mol_type = other DNA
gcagtggtcgaagtggtcaaagg

SEQ ID NO: 6575 - DNA, 23 bp, synthetic construct
  misc_feature 1..23: note = HLA-A targeting gRNA
  source 1..23: mol_type = other DNA
gcagttgccgcaggttcactcgg

SEQ ID NO: 6576 - DNA, 23 bp, synthetic construct
  misc_feature 1..23: note = HLA-A targeting gRNA
  source 1..23: mol_type = other DNA
gcagtttccgcaggctcactcgg

SEQ ID NO: 6577 - DNA, 23 bp, synthetic construct
  misc_feature 1..23: note = HLA-A targeting gRNA
  source 1..23: mol_type = other DNA
gcagtttccgcaggttcactcgg

SEQ ID NO: 6578 - DNA, 23 bp, synthetic construct
  misc_feature 1..23: note = HLA-A targeting gRNA
  source 1..23: mol_type = other DNA
gcagtttccgcaggttcattcgg

SEQ ID NO: 6579 - DNA, 23 bp, synthetic construct
  misc_feature 1..23: note = HLA-A targeting gRNA
  source 1..23: mol_type = other DNA
gcatggcctcccacgaggagggg

SEQ ID NO: 6580 - DNA, 23 bp, synthetic construct
  misc_feature 1..23: note = HLA-A targeting gRNA
  source 1..23: mol_type = other DNA
gcatgtacggctgcgacctgggg

SEQ ID NO: 6581 - DNA, 23 bp, synthetic construct
  misc_feature 1..23: note = HLA-A targeting gRNA
  source 1..23: mol_type = other DNA
gcatgtacggctgcgacgtgggg

SEQ ID NO: 6582 - DNA, 23 bp, synthetic construct
  misc_feature 1..23: note = HLA-A targeting gRNA
  source 1..23: mol_type = other DNA
gcatgtatggctgcgacgtgggg

SEQ ID NO: 6583 - DNA, 23 bp, synthetic construct
  misc_feature 1..23: note = HLA-A targeting gRNA
  source 1..23: mol_type = other DNA
gcattggggaggcgcagcattgg

SEQ ID NO: 6584 - DNA, 23 bp, synthetic construct
  misc_feature 1..23: note = HLA-A targeting gRNA
  source 1..23: mol_type = other DNA
gcattggggaggcgcagcgttgg

SEQ ID NO: 6585 - DNA, 23 bp, synthetic construct
  misc_feature 1..23: note = HLA-A targeting gRNA
  source 1..23: mol_type = other DNA
gcattggggaggcgccgcgttgg

SEQ ID NO: 6586 - DNA, 23 bp, synthetic construct
  misc_feature 1..23: note = HLA-A targeting gRNA
  source 1..23: mol_type = other DNA
gccacgtcccggcccggccgcgg

SEQ ID NO: 6587 - DNA, 23 bp, synthetic construct
  misc_feature 1..23: note = HLA-A targeting gRNA
  source 1..23: mol_type = other DNA
gccagaaacgatgcccaagttgg

SEQ ID NO: 6588 - DNA, 23 bp, synthetic construct
  misc_feature 1..23: note = HLA-A targeting gRNA
  source 1..23: mol_type = other DNA
gccagaccctcctcccggcgcgg

SEQ ID NO: 6589 - DNA, 23 bp, synthetic construct
  misc_feature 1..23: note = HLA-A targeting gRNA
  source 1..23: mol_type = other DNA
gccagcaacaatgcccacgatgg

SEQ ID NO: 6590 - DNA, 23 bp, synthetic construct
  misc_feature 1..23: note = HLA-A targeting gRNA
  source 1..23: mol_type = other DNA
gccagcaacgatgcccacgatgg

SEQ ID NO: 6591 - DNA, 23 bp, synthetic construct
  misc_feature 1..23: note = HLA-A targeting gRNA
  source 1..23: mol_type = other DNA
gccagcaacgatgcccatgatgg

SEQ ID NO: 6592 - DNA, 23 bp, synthetic construct
  misc_feature 1..23: note = HLA-A targeting gRNA
  source 1..23: mol_type = other DNA
gccaggacagccaggacagctgg

SEQ ID NO: 6593 - DNA, 23 bp, synthetic construct
  misc_feature 1..23: note = HLA-A targeting gRNA
  source 1..23: mol_type = other DNA
gccagggtctcacatcatccagg

SEQ ID NO: 6594 - DNA, 23 bp, synthetic construct
  misc_feature 1..23: note = HLA-A targeting gRNA
  source 1..23: mol_type = other DNA
gccaggtcagggctgaggcttgg

SEQ ID NO: 6595 - DNA, 23 bp, synthetic construct
  misc_feature 1..23: note = HLA-A targeting gRNA
  source 1..23: mol_type = other DNA
gccagtgagtgaccccggcccgg

SEQ ID NO: 6596 - DNA, 23 bp, synthetic construct
  misc_feature 1..23: note = HLA-A targeting gRNA
  source 1..23: mol_type = other DNA
gccatgacccggcccggccgcgg

SEQ ID NO: 6597 - DNA, 23 bp, synthetic construct
  misc_feature 1..23: note = HLA-A targeting gRNA
  source 1..23: mol_type = other DNA
gccatgtcccggcccggccgcgg

SEQ ID NO: 6598 - DNA, 23 bp, synthetic construct
  misc_feature 1..23: note = HLA-A targeting gRNA
  source 1..23: mol_type = other DNA
gccatgtcccggcccggccgtgg

SEQ ID NO: 6599 - DNA, 23 bp, synthetic construct
  misc_feature 1..23: note = HLA-A targeting gRNA
  source 1..23: mol_type = other DNA
gccatgtcccggcccggctgcgg

SEQ ID NO: 6600 - DNA, 23 bp, synthetic construct
  misc_feature 1..23: note = HLA-A targeting gRNA
  source 1..23: mol_type = other DNA
gccatgtcccggcctggccgcgg

SEQ ID NO: 6601 - DNA, 23 bp, synthetic construct
  misc_feature 1..23: note = HLA-A targeting gRNA
  source 1..23: mol_type = other DNA
gccattctccattcaacggaggg

SEQ ID NO: 6602 - DNA, 23 bp, synthetic construct
  misc_feature 1..23: note = HLA-A targeting gRNA
  source 1..23: mol_type = other DNA
gccattctccattcaagggaggg

SEQ ID NO: 6603 - DNA, 23 bp, synthetic construct
  misc_feature 1..23: note = HLA-A targeting gRNA
  source 1..23: mol_type = other DNA
gcccacaggagacgtgggacagg

SEQ ID NO: 6604 - DNA, 23 bp, synthetic construct
  misc_feature 1..23: note = HLA-A targeting gRNA
  source 1..23: mol_type = other DNA
gcccatggcccagcacctcaggg

SEQ ID NO: 6605 - DNA, 23 bp, synthetic construct
  misc_feature 1..23: note = HLA-A targeting gRNA
  source 1..23: mol_type = other DNA
gccccgccccgaccaacccgcgg

SEQ ID NO: 6606 - DNA, 23 bp, synthetic construct
  misc_feature 1..23: note = HLA-A targeting gRNA
  source 1..23: mol_type = other DNA
gccccgccccgcccaacccgcgg

SEQ ID NO: 6607 - DNA, 23 bp, synthetic construct
  misc_feature 1..23: note = HLA-A targeting gRNA
  source 1..23: mol_type = other DNA
gccccgccctgaccaacccgcgg

SEQ ID NO: 6608 - DNA, 23 bp, synthetic construct
  misc_feature 1..23: note = HLA-A targeting gRNA
  source 1..23: mol_type = other DNA
gcccgacccacctcccggcgcgg

SEQ ID NO: 6609 - DNA, 23 bp, synthetic construct
  misc_feature 1..23: note = HLA-A targeting gRNA
  source 1..23: mol_type = other DNA
gcccgacccacctccctgcgcgg

SEQ ID NO: 6610 - DNA, 23 bp, synthetic construct
  misc_feature 1..23: note = HLA-A targeting gRNA
  source 1..23: mol_type = other DNA
gcccgaccctcctaccggcgcgg

SEQ ID NO: 6611 - DNA, 23 bp, synthetic construct
  misc_feature 1..23: note = HLA-A targeting gRNA
  source 1..23: mol_type = other DNA
gcccgaccctcctccctgcgcgg

SEQ ID NO: 6612 - DNA, 23 bp, synthetic construct
  misc_feature 1..23: note = HLA-A targeting gRNA
  source 1..23: mol_type = other DNA
gcccgcaggagacgtgggacagg

SEQ ID NO: 6613 - DNA, 23 bp, synthetic construct
  misc_feature 1..23: note = HLA-A targeting gRNA
  source 1..23: mol_type = other DNA
gcccgcaggagacgttggacagg

SEQ ID NO: 6614 - DNA, 23 bp, synthetic construct
  misc_feature 1..23: note = HLA-A targeting gRNA
  source 1..23: mol_type = other DNA
gcccgggatggcctcccacgagg

SEQ ID NO: 6615 - DNA, 23 bp, synthetic construct
  misc_feature 1..23: note = HLA-A targeting gRNA
  source 1..23: mol_type = other DNA
gccctcaggagacgtgggacagg

SEQ ID NO: 6616 - DNA, 23 bp, synthetic construct
  misc_feature 1..23: note = HLA-A targeting gRNA
  source 1..23: mol_type = other DNA
gccctcccttgaatggaaaatgg

SEQ ID NO: 6617 - DNA, 23 bp, synthetic construct
  misc_feature 1..23: note = HLA-A targeting gRNA
  source 1..23: mol_type = other DNA
gccctcccttgaatggagaatgg

SEQ ID NO: 6618 - DNA, 23 bp, synthetic construct
  misc_feature 1..23: note = HLA-A targeting gRNA
  source 1..23: mol_type = other DNA
gccctccgttgaatggagaatgg

SEQ ID NO: 6619 - DNA, 23 bp, synthetic construct
  misc_feature 1..23: note = HLA-A targeting gRNA
  source 1..23: mol_type = other DNA
gccctcctcctgctgctctcggg

SEQ ID NO: 6620 - DNA, 23 bp, synthetic construct
  misc_feature 1..23: note = HLA-A targeting gRNA
  source 1..23: mol_type = other DNA
gccctgaccgagacctgggccgg

SEQ ID NO: 6621 - DNA, 23 bp, synthetic construct
  misc_feature 1..23: note = HLA-A targeting gRNA
  source 1..23: mol_type = other DNA
gccctgaccgagacctgggcggg

SEQ ID NO: 6622 - DNA, 23 bp, synthetic construct
  misc_feature 1..23: note = HLA-A targeting gRNA
  source 1..23: mol_type = other DNA
gccctgaccgagacctgggctgg

SEQ ID NO: 6623 - DNA, 23 bp, synthetic construct
  misc_feature 1..23: note = HLA-A targeting gRNA
  source 1..23: mol_type = other DNA
gccctgatcgagacctggaccgg

SEQ ID NO: 6624 - DNA, 23 bp, synthetic construct
  misc_feature 1..23: note = HLA-A targeting gRNA
  source 1..23: mol_type = other DNA
gccctgatcgagacctgggccgg

SEQ ID NO: 6625 - DNA, 23 bp, synthetic construct
  misc_feature 1..23: note = HLA-A targeting gRNA
  source 1..23: mol_type = other DNA
gccgaaggactcagaaaagctgg

SEQ ID NO: 6626 - DNA, 23 bp, synthetic construct
  misc_feature 1..23: note = HLA-A targeting gRNA
  source 1..23: mol_type = other DNA
gccgaaggactcagaaaagttgg

SEQ ID NO: 6627 - DNA, 23 bp, synthetic construct
  misc_feature 1..23: note = HLA-A targeting gRNA
  source 1..23: mol_type = other DNA
gccgcgcagggaggagggtcggg

SEQ ID NO: 6628 - DNA, 23 bp, synthetic construct
  misc_feature 1..23: note = HLA-A targeting gRNA
  source 1..23: mol_type = other DNA
gccgcgcagggaggtgggtcggg

SEQ ID NO: 6629 - DNA, 23 bp, synthetic construct
  misc_feature 1..23: note = HLA-A targeting gRNA
  source 1..23: mol_type = other DNA
gccgcgccgggaggagggtctgg

SEQ ID NO: 6630 - DNA, 23 bp, synthetic construct
  misc_feature 1..23: note = HLA-A targeting gRNA
  source 1..23: mol_type = other DNA
gccgcgccgggaggtgggtcggg

SEQ ID NO: 6631 - DNA, 23 bp, synthetic construct
  misc_feature 1..23: note = HLA-A targeting gRNA
  source 1..23: mol_type = other DNA
gccgcgccggtaggagggtcggg

SEQ ID NO: 6632 - DNA, 23 bp, synthetic construct
  misc_feature 1..23: note = HLA-A targeting gRNA
  source 1..23: mol_type = other DNA
gccgcgggcgccgtgggtggagg

SEQ ID NO: 6633 - DNA, 23 bp, synthetic construct
  misc_feature 1..23: note = HLA-A targeting gRNA
  source 1..23: mol_type = other DNA
gccggacggagtattgggaccgg

SEQ ID NO: 6634 - DNA, 23 bp, synthetic construct
  misc_feature 1..23: note = HLA-A targeting gRNA
  source 1..23: mol_type = other DNA
gccgggagatctacgggagatgg

SEQ ID NO: 6635 - DNA, 23 bp, synthetic construct
  misc_feature 1..23: note = HLA-A targeting gRNA
  source 1..23: mol_type = other DNA
gccgggccaggacacggatgtgg

SEQ ID NO: 6636 - DNA, 23 bp, synthetic construct
  misc_feature 1..23: note = HLA-A targeting gRNA
  source 1..23: mol_type = other DNA
gccgggtcagggctgaggcttgg

SEQ ID NO: 6637 - DNA, 23 bp, synthetic construct
  misc_feature 1..23: note = HLA-A targeting gRNA
  source 1..23: mol_type = other DNA
gccggtgagtgaccccggcctgg

SEQ ID NO: 6638 - DNA, 23 bp, synthetic construct
  misc_feature 1..23: note = HLA-A targeting gRNA
  source 1..23: mol_type = other DNA
gccggtgagtgcgggtcggcagg

SEQ ID NO: 6639 - DNA, 23 bp, synthetic construct
  misc_feature 1..23: note = HLA-A targeting gRNA
  source 1..23: mol_type = other DNA
gccggtgagtgcgggtcgggagg

SEQ ID NO: 6640 - DNA, 23 bp, synthetic construct
  misc_feature 1..23: note = HLA-A targeting gRNA
  source 1..23: mol_type = other DNA
gccgtacgtcggggttggggagg

SEQ ID NO: 6641 - DNA, 23 bp, synthetic construct
  misc_feature 1..23: note = HLA-A targeting gRNA
  source 1..23: mol_type = other DNA
gccgtccgtgggggatgaggagg

SEQ ID NO: 6642 - DNA, 23 bp, synthetic construct
  misc_feature 1..23: note = HLA-A targeting gRNA
  source 1..23: mol_type = other DNA
gccgtccgtgggggatggggagg

SEQ ID NO: 6643 - DNA, 23 bp, synthetic construct
  misc_feature 1..23: note = HLA-A targeting gRNA
  source 1..23: mol_type = other DNA
gccgtgggtggaggaggggccgg

SEQ ID NO: 6644 - DNA, 23 bp, synthetic construct
  misc_feature 1..23: note = HLA-A targeting gRNA
  source 1..23: mol_type = other DNA
gccgtgtcccggccaggccgcgg

SEQ ID NO: 6645 - DNA, 23 bp, synthetic construct
  misc_feature 1..23: note = HLA-A targeting gRNA
  source 1..23: mol_type = other DNA
gccgtgtcccggcccggccgcgg

SEQ ID NO: 6646 - DNA, 23 bp, synthetic construct
  misc_feature 1..23: note = HLA-A targeting gRNA
  source 1..23: mol_type = other DNA
gccgtgtcccggcctggccgcgg

SEQ ID NO: 6647 - DNA, 23 bp, synthetic construct
  misc_feature 1..23: note = HLA-A targeting gRNA
  source 1..23: mol_type = other DNA
gccgtgtccgccaggagctcagg

SEQ ID NO: 6648 - DNA, 23 bp, synthetic construct
  misc_feature 1..23: note = HLA-A targeting gRNA
  source 1..23: mol_type = other DNA
gccgtgtccgggcccggccgcgg

SEQ ID NO: 6649 - DNA, 23 bp, synthetic construct
  misc_feature 1..23: note = HLA-A targeting gRNA
  source 1..23: mol_type = other DNA
gccgtgtcctggcccggccgcgg

SEQ ID NO: 6650 - DNA, 23 bp, synthetic construct
  misc_feature 1..23: note = HLA-A targeting gRNA
  source 1..23: mol_type = other DNA
gcctaaaccgaaaatgaaaccgg

SEQ ID NO: 6651 - DNA, 23 bp, synthetic construct
  misc_feature 1..23: note = HLA-A targeting gRNA
  source 1..23: mol_type = other DNA
gcctaaactgaaaacgaaaccgg

SEQ ID NO: 6652 - DNA, 23 bp, synthetic construct
  misc_feature 1..23: note = HLA-A targeting gRNA
  source 1..23: mol_type = other DNA
gcctcaactgaaaatgaaaccgg

SEQ ID NO: 6653 - DNA, 23 bp, synthetic construct
  misc_feature 1..23: note = HLA-A targeting gRNA
  source 1..23: mol_type = other DNA
gcctcacactcagtgtgtttggg

SEQ ID NO: 6654 - DNA, 23 bp, synthetic construct
  misc_feature 1..23: note = HLA-A targeting gRNA
  source 1..23: mol_type = other DNA
gcctcctccgcgggtatgaccgg

SEQ ID NO: 6655 - DNA, 23 bp, synthetic construct
  misc_feature 1..23: note = HLA-A targeting gRNA
  source 1..23: mol_type = other DNA
gcctcggggtggatctcagacgg

SEQ ID NO: 6656 - DNA, 23 bp, synthetic construct
  misc_feature 1..23: note = HLA-A targeting gRNA
  source 1..23: mol_type = other DNA
gcctctatggagaggagcgaggg

SEQ ID NO: 6657 - DNA, 23 bp, synthetic construct
  misc_feature 1..23: note = HLA-A targeting gRNA
  source 1..23: mol_type = other DNA
gcctctgccgggaggagcgaggg

SEQ ID NO: 6658 - DNA, 23 bp, synthetic construct
  misc_feature 1..23: note = HLA-A targeting gRNA
  source 1..23: mol_type = other DNA
gcctctgcggagaggagcgaggg

SEQ ID NO: 6659 - DNA, 23 bp, synthetic construct
  misc_feature 1..23: note = HLA-A targeting gRNA
  source 1..23: mol_type = other DNA
gcctctgcggagaggagggaggg

SEQ ID NO: 6660 - DNA, 23 bp, synthetic construct
  misc_feature 1..23: note = HLA-A targeting gRNA
  source 1..23: mol_type = other DNA
gcctctgctgagaggagcgaggg

SEQ ID NO: 6661 - DNA, 23 bp, synthetic construct
  misc_feature 1..23: note = HLA-A targeting gRNA
  source 1..23: mol_type = other DNA
gcctctggggagaggagcgaggg

SEQ ID NO: 6662 - DNA, 23 bp, synthetic construct
  misc_feature 1..23: note = HLA-A targeting gRNA
  source 1..23: mol_type = other DNA
gcctctgtagggaggagcaaggg

SEQ ID NO: 6663 - DNA, 23 bp, synthetic construct
  misc_feature 1..23: note = HLA-A targeting gRNA
  source 1..23: mol_type = other DNA
gcctctgtggggaggagagaggg

SEQ ID NO: 6664 - DNA, 23 bp, synthetic construct
  misc_feature 1..23: note = HLA-A targeting gRNA
  source 1..23: mol_type = other DNA
gcctctgtggggaggagcgaggg

SEQ ID NO: 6665 - DNA, 23 bp, synthetic construct
  misc_feature 1..23: note = HLA-A targeting gRNA
  source 1..23: mol_type = other DNA
gcctgagacagctgcctgtgtgg

SEQ ID NO: 6666 - DNA, 23 bp, synthetic construct
  misc_feature 1..23: note = HLA-A targeting gRNA
  source 1..23: mol_type = other DNA
gcctgcatccgctggtgtctggg

SEQ ID NO: 6667 - DNA, 23 bp, synthetic construct
  misc_feature 1..23: note = HLA-A targeting gRNA
  source 1..23: mol_type = other DNA
gcctgcgtccgctggtgtctggg

SEQ ID NO: 6668 - DNA, 23 bp, synthetic construct
  misc_feature 1..23: note = HLA-A targeting gRNA
  source 1..23: mol_type = other DNA
gcctggagtagaacaaaaacagg

SEQ ID NO: 6669 - DNA, 23 bp, synthetic construct
  misc_feature 1..23: note = HLA-A targeting gRNA
  source 1..23: mol_type = other DNA
gcctggagtagaaccaaaacagg

SEQ ID NO: 6670 - DNA, 23 bp, synthetic construct
  misc_feature 1..23: note = HLA-A targeting gRNA
  source 1..23: mol_type = other DNA
gcctggccctgaccgagacctgg

SEQ ID NO: 6671 - DNA, 23 bp, synthetic construct
  misc_feature 1..23: note = HLA-A targeting gRNA
  source 1..23: mol_type = other DNA
gccttgatggttgtggtgttggg

SEQ ID NO: 6672 - DNA, 23 bp, synthetic construct
  misc_feature 1..23: note = HLA-A targeting gRNA
  source 1..23: mol_type = other DNA
gcgaccccgcgagtccgagaggg

SEQ ID NO: 6673 - DNA, 23 bp, synthetic construct
  misc_feature 1..23: note = HLA-A targeting gRNA
  source 1..23: mol_type = other DNA
gcgaccccggccgtacgtggggg

SEQ ID NO: 6674 - DNA, 23 bp, synthetic construct
  misc_feature 1..23: note = HLA-A targeting gRNA
  source 1..23: mol_type = other DNA
gcgacccgggccgtacgtggggg

SEQ ID NO: 6675 - DNA, 23 bp, synthetic construct
  misc_feature 1..23: note = HLA-A targeting gRNA
  source 1..23: mol_type = other DNA
gcgacccgggccgtccgtggggg

SEQ ID NO: 6676 - DNA, 23 bp, synthetic construct
  misc_feature 1..23: note = HLA-A targeting gRNA
  source 1..23: mol_type = other DNA
gcgacgccgcaagtccgagaggg

SEQ ID NO: 6677 - DNA, 23 bp, synthetic construct
  misc_feature 1..23: note = HLA-A targeting gRNA
  source 1..23: mol_type = other DNA
gcgacgccgcgagtccaagaggg

SEQ ID NO: 6678 - DNA, 23 bp, synthetic construct
  misc_feature 1..23: note = HLA-A targeting gRNA
  source 1..23: mol_type = other DNA
gcgacgccgcgagtccgagaagg

SEQ ID NO: 6679 - DNA, 23 bp, synthetic construct
  misc_feature 1..23: note = HLA-A targeting gRNA
  source 1..23: mol_type = other DNA
gcgacgccgcgagtccgagaggg

SEQ ID NO: 6680 - DNA, 23 bp, synthetic construct
  misc_feature 1..23: note = HLA-A targeting gRNA
  source 1..23: mol_type = other DNA
gcgacgccgcgagtccgaggggg

SEQ ID NO: 6681 - DNA, 23 bp, synthetic construct
  misc_feature 1..23: note = HLA-A targeting gRNA
  source 1..23: mol_type = other DNA
gcgactccgcgagtccaagaggg

SEQ ID NO: 6682 - DNA, 23 bp, synthetic construct
  misc_feature 1..23: note = HLA-A targeting gRNA
  source 1..23: mol_type = other DNA
gcgagaccggtgagtgaccccgg

SEQ ID NO: 6683 - DNA, 23 bp, synthetic construct
  misc_feature 1..23: note = HLA-A targeting gRNA
  source 1..23: mol_type = other DNA
gcgaggaccgtgagtgaccccgg

SEQ ID NO: 6684 - DNA, 23 bp, synthetic construct
  misc_feature 1..23: note = HLA-A targeting gRNA
  source 1..23: mol_type = other DNA
gcgaggccagtgagtgaccccgg

SEQ ID NO: 6685 - DNA, 23 bp, synthetic construct
  misc_feature 1..23: note = HLA-A targeting gRNA
  source 1..23: mol_type = other DNA
gcgaggggcccgcccggcgaggg

SEQ ID NO: 6686 - DNA, 23 bp, synthetic construct
  misc_feature 1..23: note = HLA-A targeting gRNA
  source 1..23: mol_type = other DNA
gcgaggggccctcccggcgaggg

SEQ ID NO: 6687 - DNA, 23 bp, synthetic construct
  misc_feature 1..23: note = HLA-A targeting gRNA
  source 1..23: mol_type = other DNA
gcgcaagtgggaggcggcccggg

SEQ ID NO: 6688 - DNA, 23 bp, synthetic construct
  misc_feature 1..23: note = HLA-A targeting gRNA
  source 1..23: mol_type = other DNA
gcgcagggaggagggtcgggcgg

SEQ ID NO: 6689 - DNA, 23 bp, synthetic construct
  misc_feature 1..23: note = HLA-A targeting gRNA
  source 1..23: mol_type = other DNA
gcgcagggaggtgggtcgggcgg

SEQ ID NO: 6690 - DNA, 23 bp, synthetic construct
  misc_feature 1..23: note = HLA-A targeting gRNA
  source 1..23: mol_type = other DNA
gcgcaggtaccaggggcagtggg

SEQ ID NO: 6691 - DNA, 23 bp, synthetic construct
  misc_feature 1..23: note = HLA-A targeting gRNA
  source 1..23: mol_type = other DNA
gcgccatggatagagcaagaggg

SEQ ID NO: 6692 - DNA, 23 bp, synthetic construct
  misc_feature 1..23: note = HLA-A targeting gRNA
  source 1..23: mol_type = other DNA
gcgccatggatagagcaggaggg

SEQ ID NO: 6693 - DNA, 23 bp, synthetic construct
  misc_feature 1..23: note = HLA-A targeting gRNA
  source 1..23: mol_type = other DNA
gcgcccgcggctccccttctcgg

SEQ ID NO: 6694 - DNA, 23 bp, synthetic construct
  misc_feature 1..23: note = HLA-A targeting gRNA
  source 1..23: mol_type = other DNA
gcgccctggatagagcaggaggg

SEQ ID NO: 6695 - DNA, 23 bp, synthetic construct
  misc_feature 1..23: note = HLA-A targeting gRNA
  source 1..23: mol_type = other DNA
gcgccgggaggagggtctggcgg

SEQ ID NO: 6696 - DNA, 23 bp, synthetic construct
  misc_feature 1..23: note = HLA-A targeting gRNA
  source 1..23: mol_type = other DNA
gcgccgggaggtgggtcgggcgg

SEQ ID NO: 6697 - DNA, 23 bp, synthetic construct
  misc_feature 1..23: note = HLA-A targeting gRNA
  source 1..23: mol_type = other DNA
gcgccggtaggagggtcgggcgg

SEQ ID NO: 6698 - DNA, 23 bp, synthetic construct
  misc_feature 1..23: note = HLA-A targeting gRNA
  source 1..23: mol_type = other DNA
gcgccgtggatagagcaagaggg

SEQ ID NO: 6699 - DNA, 23 bp, synthetic construct
  misc_feature 1..23: note = HLA-A targeting gRNA
  source 1..23: mol_type = other DNA
gcgccgtgggtggagaaggaggg

SEQ ID NO: 6700 - DNA, 23 bp, synthetic construct
  misc_feature 1..23: note = HLA-A targeting gRNA
  source 1..23: mol_type = other DNA
gcgccgtgggtggagcaggaggg

SEQ ID NO: 6701 - DNA, 23 bp, synthetic construct
  misc_feature 1..23: note = HLA-A targeting gRNA
  source 1..23: mol_type = other DNA
gcgcctccccaatgcagacaagg

SEQ ID NO: 6702 - DNA, 23 bp, synthetic construct
  misc_feature 1..23: note = HLA-A targeting gRNA
  source 1..23: mol_type = other DNA
gcgcctccccaatgcagacacgg

SEQ ID NO: 6703 - DNA, 23 bp, synthetic construct
  misc_feature 1..23: note = HLA-A targeting gRNA
  source 1..23: mol_type = other DNA
gcgcctccccaatgcagacgcgg

SEQ ID NO: 6704 - DNA, 23 bp, synthetic construct
  misc_feature 1..23: note = HLA-A targeting gRNA
  source 1..23: mol_type = other DNA
gcgcctccccagtgcagacacgg

SEQ ID NO: 6705 - DNA, 23 bp, synthetic construct
  misc_feature 1..23: note = HLA-A targeting gRNA
  source 1..23: mol_type = other DNA
gcgcctccccattgcagacgcgg

SEQ ID NO: 6706 - DNA, 23 bp, synthetic construct
  misc_feature 1..23: note = HLA-A targeting gRNA
  source 1..23: mol_type = other DNA
gcgcgatcctcaggttctctcgg

SEQ ID NO: 6707 - DNA, 23 bp, synthetic construct
  misc_feature 1..23: note = HLA-A targeting gRNA
  source 1..23: mol_type = other DNA
gcgcgcgggtaccggggcagtgg

SEQ ID NO: 6708 - DNA, 23 bp, synthetic construct
  misc_feature 1..23: note = HLA-A targeting gRNA
  source 1..23: mol_type = other DNA
gcgcggctacaaccagagcgagg

SEQ ID NO: 6709 - DNA, 23 bp, synthetic construct
  misc_feature 1..23: note = HLA-A targeting gRNA
  source 1..23: mol_type = other DNA
gcgcgggtaccaagggcagtggg

SEQ ID NO: 6710 - DNA, 23 bp, synthetic construct
  misc_feature 1..23: note = HLA-A targeting gRNA
  source 1..23: mol_type = other DNA
gcgcgggtaccaggggcagtggg

SEQ ID NO: 6711 - DNA, 23 bp, synthetic construct
  misc_feature 1..23: note = HLA-A targeting gRNA
  source 1..23: mol_type = other DNA
gcgcgggtaccggggcagtgggg

SEQ ID NO: 6712 - DNA, 23 bp, synthetic construct
  misc_feature 1..23: note = HLA-A targeting gRNA
  source 1..23: mol_type = other DNA
gcgcggtgcgcaggctctctcgg

SEQ ID NO: 6713 - DNA, 23 bp, synthetic construct
  misc_feature 1..23: note = HLA-A targeting gRNA
  source 1..23: mol_type = other DNA
gcgcggtgcgcaggttctctcgg

SEQ ID NO: 6714 - DNA, 23 bp, synthetic construct
  misc_feature 1..23: note = HLA-A targeting gRNA
  source 1..23: mol_type = other DNA
gcgcggtggatagagcaggaggg

SEQ ID NO: 6715 - DNA, 23 bp, synthetic construct
  misc_feature 1..23: note = HLA-A targeting gRNA
  source 1..23: mol_type = other DNA
gcgctgagtgatctgagccgcgg

SEQ ID NO: 6716 - DNA, 23 bp, synthetic construct
  misc_feature 1..23: note = HLA-A targeting gRNA
  source 1..23: mol_type = other DNA
gcgctgggtaatctgagccgcgg

SEQ ID NO: 6717 - DNA, 23 bp, synthetic construct
  misc_feature 1..23: note = HLA-A targeting gRNA
  source 1..23: mol_type = other DNA
gcgctgggtgatctaagccgcgg

SEQ ID NO: 6718 - DNA, 23 bp, synthetic construct
  misc_feature 1..23: note = HLA-A targeting gRNA
  source 1..23: mol_type = other DNA
gcgctgggtgatctgagccgcgg

SEQ ID NO: 6719 - DNA, 23 bp, synthetic construct
  misc_feature 1..23: note = HLA-A targeting gRNA
  source 1..23: mol_type = other DNA
gcgctggtaccaggggcagtggg

SEQ ID NO: 6720 - DNA, 23 bp, synthetic construct
  misc_feature 1..23: note = HLA-A targeting gRNA
  source 1..23: mol_type = other DNA
gcggaacccgcccagaccctcgg

SEQ ID NO: 6721 - DNA, 23 bp, synthetic construct
  misc_feature 1..23: note = HLA-A targeting gRNA
  source 1..23: mol_type = other DNA
gcggatgtatggctgcgacctgg

SEQ ID NO: 6722 - DNA, 23 bp, synthetic construct
  misc_feature 1..23: note = HLA-A targeting gRNA
  source 1..23: mol_type = other DNA
gcggccaggccgggacacggagg

SEQ ID NO: 6723 - DNA, 23 bp, synthetic construct
  misc_feature 1..23: note = HLA-A targeting gRNA
  source 1..23: mol_type = other DNA
gcggccaggccgggacacggcgg

SEQ ID NO: 6724 - DNA, 23 bp, synthetic construct
  misc_feature 1..23: note = HLA-A targeting gRNA
  source 1..23: mol_type = other DNA
gcggccaggccgggacatggcgg

SEQ ID NO: 6725 - DNA, 23 bp, synthetic construct
  misc_feature 1..23: note = HLA-A targeting gRNA
  source 1..23: mol_type = other DNA
gcggccgggccaggacacggcgg

SEQ ID NO: 6726 - DNA, 23 bp, synthetic construct
  misc_feature 1..23: note = HLA-A targeting gRNA
  source 1..23: mol_type = other DNA
gcggccgggcccggacacggcgg

SEQ ID NO: 6727 - DNA, 23 bp, synthetic construct
  misc_feature 1..23: note = HLA-A targeting gRNA
  source 1..23: mol_type = other DNA
gcggccgggccgggacacagcgg

SEQ ID NO: 6728 - DNA, 23 bp, synthetic construct
  misc_feature 1..23: note = HLA-A targeting gRNA
  source 1..23: mol_type = other DNA
gcggccgggccgggacacggcgg

SEQ ID NO: 6729 - DNA, 23 bp, synthetic construct
  misc_feature 1..23: note = HLA-A targeting gRNA
  source 1..23: mol_type = other DNA
gcggccgggccgggacatagcgg

SEQ ID NO: 6730 - DNA, 23 bp, synthetic construct
  misc_feature 1..23: note = HLA-A targeting gRNA
  source 1..23: mol_type = other DNA
gcggccgggccgggacatggcgg

SEQ ID NO: 6731 - DNA, 23 bp, synthetic construct
  misc_feature 1..23: note = HLA-A targeting gRNA
  source 1..23: mol_type = other DNA
gcggccgggccgggacgtggcgg

SEQ ID NO: 6732 - DNA, 23 bp, synthetic construct
  misc_feature 1..23: note = HLA-A targeting gRNA
  source 1..23: mol_type = other DNA
gcggccgggccgggtcatggcgg

SEQ ID NO: 6733 - DNA, 23 bp, synthetic construct
  misc_feature 1..23: note = HLA-A targeting gRNA
  source 1..23: mol_type = other DNA
gcggcctcgggggcggatctcgg

SEQ ID NO: 6734 - DNA, 23 bp, synthetic construct
  misc_feature 1..23: note = HLA-A targeting gRNA
  source 1..23: mol_type = other DNA
gcggcctggccgggacacggcgg

SEQ ID NO: 6735 - DNA, 23 bp, synthetic construct
  misc_feature 1..23: note = HLA-A targeting gRNA
  source 1..23: mol_type = other DNA
gcggcgcagggaggagggtcggg

SEQ ID NO: 6736 - DNA, 23 bp, synthetic construct
  misc_feature 1..23: note = HLA-A targeting gRNA
  source 1..23: mol_type = other DNA
gcggcgcagggaggtgggtcggg

SEQ ID NO: 6737 - DNA, 23 bp, synthetic construct
  misc_feature 1..23: note = HLA-A targeting gRNA
  source 1..23: mol_type = other DNA
gcggctgggccgggacacagcgg

SEQ ID NO: 6738 - DNA, 23 bp, synthetic construct
  misc_feature 1..23: note = HLA-A targeting gRNA
  source 1..23: mol_type = other DNA
gcgggacggggctgaccacgggg

SEQ ID NO: 6739 - DNA, 23 bp, synthetic construct
  misc_feature 1..23: note = HLA-A targeting gRNA
  source 1..23: mol_type = other DNA
gcgggagccgtggatggagcagg

SEQ ID NO: 6740 - DNA, 23 bp, synthetic construct
  misc_feature 1..23: note = HLA-A targeting gRNA
  source 1..23: mol_type = other DNA
gcgggagccgtgggtggagcagg

SEQ ID NO: 6741 - DNA, 23 bp, synthetic construct
  misc_feature 1..23: note = HLA-A targeting gRNA
  source 1..23: mol_type = other DNA
gcgggcgccatggatagagcagg

SEQ ID NO: 6742 - DNA, 23 bp, synthetic construct
  misc_feature 1..23: note = HLA-A targeting gRNA
  source 1..23: mol_type = other DNA
gcgggcgccctggatagagcagg

SEQ ID NO: 6743 - DNA, 23 bp, synthetic construct
  misc_feature 1..23: note = HLA-A targeting gRNA
  source 1..23: mol_type = other DNA
gcgggcgccgtgggtggagaagg

SEQ ID NO: 6744 - DNA, 23 bp, synthetic construct
  misc_feature 1..23: note = HLA-A targeting gRNA
  source 1..23: mol_type = other DNA
gcgggcgccgtgggtggagcagg

SEQ ID NO: 6745 - DNA, 23 bp, synthetic construct
  misc_feature 1..23: note = HLA-A targeting gRNA
  source 1..23: mol_type = other DNA
gcgggcgccgtgggtggaggagg

SEQ ID NO: 6746 - DNA, 23 bp, synthetic construct
  misc_feature 1..23: note = HLA-A targeting gRNA
  source 1..23: mol_type = other DNA
gcgggcgcggtggatagagcagg

SEQ ID NO: 6747 - DNA, 23 bp, synthetic construct
  misc_feature 1..23: note = HLA-A targeting gRNA
  source 1..23: mol_type = other DNA
gcggggcacacttctacctgggg

SEQ ID NO: 6748 - DNA, 23 bp, synthetic construct
  misc_feature 1..23: note = HLA-A targeting gRNA
  source 1..23: mol_type = other DNA
gcggggcggggccggggggacgg

SEQ ID NO: 6749 - DNA, 23 bp, synthetic construct
  misc_feature 1..23: note = HLA-A targeting gRNA
  source 1..23: mol_type = other DNA
gcggggcggggcggggccggggg

SEQ ID NO: 6750 - DNA, 23 bp, synthetic construct
  misc_feature 1..23: note = HLA-A targeting gRNA
  source 1..23: mol_type = other DNA
gcggggcggggcggggctcgggg

SEQ ID NO: 6751 - DNA, 23 bp, synthetic construct
  misc_feature 1..23: note = HLA-A targeting gRNA
  source 1..23: mol_type = other DNA
gcggggcggggctcgggggacgg

SEQ ID NO: 6752 - DNA, 23 bp, synthetic construct
  misc_feature 1..23: note = HLA-A targeting gRNA
  source 1..23: mol_type = other DNA
gcggggggggtggggtggggagg

SEQ ID NO: 6753 - DNA, 23 bp, synthetic construct
  misc_feature 1..23: note = HLA-A targeting gRNA
  source 1..23: mol_type = other DNA
gcgggtcccgcggcctcaggggg

SEQ ID NO: 6754 - DNA, 23 bp, synthetic construct
  misc_feature 1..23: note = HLA-A targeting gRNA
  source 1..23: mol_type = other DNA
gcgggtgagtgcgggtcggcagg

SEQ ID NO: 6755 - DNA, 23 bp, synthetic construct
  misc_feature 1..23: note = HLA-A targeting gRNA
  source 1..23: mol_type = other DNA
gcgggttgggcggggcggggcgg

SEQ ID NO: 6756 - DNA, 23 bp, synthetic construct
  misc_feature 1..23: note = HLA-A targeting gRNA
  source 1..23: mol_type = other DNA
gcgggttggtcagggcggggcgg

SEQ ID NO: 6757 - DNA, 23 bp, synthetic construct
  misc_feature 1..23: note = HLA-A targeting gRNA
  source 1..23: mol_type = other DNA
gcgggttggtcggggcggggcgg

SEQ ID NO: 6758 - DNA, 23 bp, synthetic construct
  misc_feature 1..23: note = HLA-A targeting gRNA
  source 1..23: mol_type = other DNA
gcgtccagcgacagtgcccaggg

SEQ ID NO: 6759 - DNA, 23 bp, synthetic construct
  misc_feature 1..23: note = HLA-A targeting gRNA
  source 1..23: mol_type = other DNA
gcgtctccttcccattctccagg

SEQ ID NO: 6760 - DNA, 23 bp, synthetic construct
  misc_feature 1..23: note = HLA-A targeting gRNA
  source 1..23: mol_type = other DNA
gcgtctccttcccattcttcagg

SEQ ID NO: 6761 - DNA, 23 bp, synthetic construct
  misc_feature 1..23: note = HLA-A targeting gRNA
  source 1..23: mol_type = other DNA
gcgtctccttccctttctccagg

SEQ ID NO: 6762 - DNA, 23 bp, synthetic construct
  misc_feature 1..23: note = HLA-A targeting gRNA
  source 1..23: mol_type = other DNA
gcgtctccttccctttcttcagg

SEQ ID NO: 6763 - DNA, 23 bp, synthetic construct
  misc_feature 1..23: note = HLA-A targeting gRNA
  source 1..23: mol_type = other DNA
gcgtctccttccggttctccagg

SEQ ID NO: 6764 - DNA, 23 bp, synthetic construct
  misc_feature 1..23: note = HLA-A targeting gRNA
  source 1..23: mol_type = other DNA
gcgtctccttcctgttctccagg

SEQ ID NO: 6765 - DNA, 23 bp, synthetic construct
  misc_feature 1..23: note = HLA-A targeting gRNA
  source 1..23: mol_type = other DNA
gcgtctctgaggaaatggagggg

SEQ ID NO: 6766 - DNA, 23 bp, synthetic construct
  misc_feature 1..23: note = HLA-A targeting gRNA
  source 1..23: mol_type = other DNA
gcgtctctttcccgttctccagg

SEQ ID NO: 6767 - DNA, 23 bp, synthetic construct
  misc_feature 1..23: note = HLA-A targeting gRNA
  source 1..23: mol_type = other DNA
gcgtcttcttcccgttccccagg

SEQ ID NO: 6768 - DNA, 23 bp, synthetic construct
  misc_feature 1..23: note = HLA-A targeting gRNA
  source 1..23: mol_type = other DNA
gcgtcttcttcccgttctccagg

SEQ ID NO: 6769 - DNA, 23 bp, synthetic construct
  misc_feature 1..23: note = HLA-A targeting gRNA
  source 1..23: mol_type = other DNA
gcgtcttcttcctgttctccagg

SEQ ID NO: 6770 - DNA, 23 bp, synthetic construct
  misc_feature 1..23: note = HLA-A targeting gRNA
  source 1..23: mol_type = other DNA
gcgtgtccttcccgttctccagg

SEQ ID NO: 6771 - DNA, 23 bp, synthetic construct
  misc_feature 1..23: note = HLA-A targeting gRNA
  source 1..23: mol_type = other DNA
gctaaggacagaccttaggaggg

SEQ ID NO: 6772 - DNA, 23 bp, synthetic construct
  misc_feature 1..23: note = HLA-A targeting gRNA
  source 1..23: mol_type = other DNA
gctacgccgcgagtccaagaggg

SEQ ID NO: 6773 - DNA, 23 bp, synthetic construct
  misc_feature 1..23: note = HLA-A targeting gRNA
  source 1..23: mol_type = other DNA
gctatgtcccggcccggccgcgg

SEQ ID NO: 6774 - DNA, 23 bp, synthetic construct
  misc_feature 1..23: note = HLA-A targeting gRNA
  source 1..23: mol_type = other DNA
gctcaggtagggaaggggtgagg

SEQ ID NO: 6775 - DNA, 23 bp, synthetic construct
  misc_feature 1..23: note = HLA-A targeting gRNA
  source 1..23: mol_type = other DNA
gctcaggtagggaaggggtgggg

SEQ ID NO: 6776 - DNA, 23 bp, synthetic construct
  misc_feature 1..23: note = HLA-A targeting gRNA
  source 1..23: mol_type = other DNA
gctcccctctcggactcgcgggg

SEQ ID NO: 6777 - DNA, 23 bp, synthetic construct
  misc_feature 1..23: note = HLA-A targeting gRNA
  source 1..23: mol_type = other DNA
gctccctccttttccacctgtgg

SEQ ID NO: 6778 - DNA, 23 bp, synthetic construct
  misc_feature 1..23: note = HLA-A targeting gRNA
  source 1..23: mol_type = other DNA
gctctcgccggtcgagggtctgg

SEQ ID NO: 6779 - DNA, 23 bp, synthetic construct
  misc_feature 1..23: note = HLA-A targeting gRNA
  source 1..23: mol_type = other DNA
gctctcgccggtcgagggtttgg

SEQ ID NO: 6780 - DNA, 23 bp, synthetic construct
  misc_feature 1..23: note = HLA-A targeting gRNA
  source 1..23: mol_type = other DNA
gctctctccggccgagggtctgg

SEQ ID NO: 6781 - DNA, 23 bp, synthetic construct
  misc_feature 1..23: note = HLA-A targeting gRNA
  source 1..23: mol_type = other DNA
gctctctccggtcgagggtctgg

SEQ ID NO: 6782 - DNA, 23 bp, synthetic construct
  misc_feature 1..23: note = HLA-A targeting gRNA
  source 1..23: mol_type = other DNA
gctctctgcggtcgaggttctgg

SEQ ID NO: 6783 - DNA, 23 bp, synthetic construct
  misc_feature 1..23: note = HLA-A targeting gRNA
  source 1..23: mol_type = other DNA
gctctgaccaggtcctgttttgg

SEQ ID NO: 6784 - DNA, 23 bp, synthetic construct
  misc_feature 1..23: note = HLA-A targeting gRNA
  source 1..23: mol_type = other DNA
gctgaagaactcagaaaagctgg

SEQ ID NO: 6785 - DNA, 23 bp, synthetic construct
  misc_feature 1..23: note = HLA-A targeting gRNA
  source 1..23: mol_type = other DNA
gctgcaacctggggcccgacggg

SEQ ID NO: 6786 - DNA, 23 bp, synthetic construct
  misc_feature 1..23: note = HLA-A targeting gRNA
  source 1..23: mol_type = other DNA
gctgcaacgcgcgggtaccaggg

SEQ ID NO: 6787 - DNA, 23 bp, synthetic construct
  misc_feature 1..23: note = HLA-A targeting gRNA
  source 1..23: mol_type = other DNA
gctgcagagcgcgggtaccaggg

SEQ ID NO: 6788 - DNA, 23 bp, synthetic construct
  misc_feature 1..23: note = HLA-A targeting gRNA
  source 1..23: mol_type = other DNA
gctgcagcacgcgggtaccaggg

SEQ ID NO: 6789 - DNA, 23 bp, synthetic construct
  misc_feature 1..23: note = HLA-A targeting gRNA
  source 1..23: mol_type = other DNA
gctgcagcgcgcaggtaccaggg

SEQ ID NO: 6790 - DNA, 23 bp, synthetic construct
  misc_feature 1..23: note = HLA-A targeting gRNA
  source 1..23: mol_type = other DNA
gctgcagcgcgcgggtaccaagg

SEQ ID NO: 6791 - DNA, 23 bp, synthetic construct
  misc_feature 1..23: note = HLA-A targeting gRNA
  source 1..23: mol_type = other DNA
gctgcagcgcgcgggtaccgggg

SEQ ID NO: 6792 - DNA, 23 bp, synthetic construct
  misc_feature 1..23: note = HLA-A targeting gRNA
  source 1..23: mol_type = other DNA
gctgcaggactcagaaaagctgg

SEQ ID NO: 6793 - DNA, 23 bp, synthetic construct
  misc_feature 1..23: note = HLA-A targeting gRNA
  source 1..23: mol_type = other DNA
gctgcgacatggggccggacggg

SEQ ID NO: 6794 - DNA, 23 bp, synthetic construct
  misc_feature 1..23: note = HLA-A targeting gRNA
  source 1..23: mol_type = other DNA
gctgcgacccggggcccgacggg

SEQ ID NO: 6795 - DNA, 23 bp, synthetic construct
  misc_feature 1..23: note = HLA-A targeting gRNA
  source 1..23: mol_type = other DNA
gctgcgacctggggccccacggg

SEQ ID NO: 6796 - DNA, 23 bp, synthetic construct
  misc_feature 1..23: note = HLA-A targeting gRNA
  source 1..23: mol_type = other DNA
gctgcgacctggggcccgaccgg

SEQ ID NO: 6797 - DNA, 23 bp, synthetic construct
  misc_feature 1..23: note = HLA-A targeting gRNA
  source 1..23: mol_type = other DNA
gctgcgacctggggcccgacggg

SEQ ID NO: 6798 - DNA, 23 bp, synthetic construct
  misc_feature 1..23: note = HLA-A targeting gRNA
  source 1..23: mol_type = other DNA
gctgcgacctggggccctacggg

SEQ ID NO: 6799 - DNA, 23 bp, synthetic construct
  misc_feature 1..23: note = HLA-A targeting gRNA
  source 1..23: mol_type = other DNA
gctgcgacctggggccggacggg

SEQ ID NO: 6800 - DNA, 23 bp, synthetic construct
  misc_feature 1..23: note = HLA-A targeting gRNA
  source 1..23: mol_type = other DNA
gctgcgacctggggctcgacggg

SEQ ID NO: 6801 - DNA, 23 bp, synthetic construct
  misc_feature 1..23: note = HLA-A targeting gRNA
  source 1..23: mol_type = other DNA
gctgcgacctgggtcccgacggg

SEQ ID NO: 6802 - DNA, 23 bp, synthetic construct
  misc_feature 1..23: note = HLA-A targeting gRNA
  source 1..23: mol_type = other DNA
gctgcgaccttgggcccgacggg

SEQ ID NO: 6803 - DNA, 23 bp, synthetic construct
  misc_feature 1..23: note = HLA-A targeting gRNA
  source 1..23: mol_type = other DNA
gctgcgacgtggagccggacggg

SEQ ID NO: 6804 - DNA, 23 bp, synthetic construct
  misc_feature 1..23: note = HLA-A targeting gRNA
  source 1..23: mol_type = other DNA
gctgcgacgtggggcccgacggg

SEQ ID NO: 6805 - DNA, 23 bp, synthetic construct
  misc_feature 1..23: note = HLA-A targeting gRNA
  source 1..23: mol_type = other DNA
gctgcgacgtggggcccggcggg

SEQ ID NO: 6806 - DNA, 23 bp, synthetic construct
  misc_feature 1..23: note = HLA-A targeting gRNA
  source 1..23: mol_type = other DNA
gctgcgacgtggggccggatggg

SEQ ID NO: 6807 - DNA, 23 bp, synthetic construct
  misc_feature 1..23: note = HLA-A targeting gRNA
  source 1..23: mol_type = other DNA
gctggagcgcgcgggtaccaggg

SEQ ID NO: 6808 - DNA, 23 bp, synthetic construct
  misc_feature 1..23: note = HLA-A targeting gRNA
  source 1..23: mol_type = other DNA
gctggagcgcgctggtaccaggg

SEQ ID NO: 6809 - DNA, 23 bp, synthetic construct
  misc_feature 1..23: note = HLA-A targeting gRNA
  source 1..23: mol_type = other DNA
gctgggacctggggcccgacggg

SEQ ID NO: 6810 - DNA, 23 bp, synthetic construct
  misc_feature 1..23: note = HLA-A targeting gRNA
  source 1..23: mol_type = other DNA
gctggggtaaggaggggaatggg

SEQ ID NO: 6811 - DNA, 23 bp, synthetic construct
  misc_feature 1..23: note = HLA-A targeting gRNA
  source 1..23: mol_type = other DNA
gctgggtcagggctgaggcttgg

SEQ ID NO: 6812 - DNA, 23 bp, synthetic construct
  misc_feature 1..23: note = HLA-A targeting gRNA
  source 1..23: mol_type = other DNA
gctgtcgaacctcacgaactggg

SEQ ID NO: 6813 - DNA, 23 bp, synthetic construct
  misc_feature 1..23: note = HLA-A targeting gRNA
  source 1..23: mol_type = other DNA
gctgtgtcccggcccagccgcgg

SEQ ID NO: 6814 - DNA, 23 bp, synthetic construct
  misc_feature 1..23: note = HLA-A targeting gRNA
  source 1..23: mol_type = other DNA
gctgtgtcccggcccggccgcgg

SEQ ID NO: 6815 - DNA, 23 bp, synthetic construct
  misc_feature 1..23: note = HLA-A targeting gRNA
  source 1..23: mol_type = other DNA
gcttgaaaaggtgagattcttgg

SEQ ID NO: 6816 - DNA, 23 bp, synthetic construct
  misc_feature 1..23: note = HLA-A targeting gRNA
  source 1..23: mol_type = other DNA
gcttgtaaaggtgagattctggg

SEQ ID NO: 6817 - DNA, 23 bp, synthetic construct
  misc_feature 1..23: note = HLA-A targeting gRNA
  source 1..23: mol_type = other DNA
gcttgtaaggtgagattctgggg

SEQ ID NO: 6818 - DNA, 23 bp, synthetic construct
  misc_feature 1..23: note = HLA-A targeting gRNA
  source 1..23: mol_type = other DNA
gcttgtacggctgcgacgtgggg

SEQ ID NO: 6819 - DNA, 23 bp, synthetic construct
  misc_feature 1..23: note = HLA-A targeting gRNA
  source 1..23: mol_type = other DNA
gcttgtacttctgcgtctcccgg

SEQ ID NO: 6820 - DNA, 23 bp, synthetic construct
  misc_feature 1..23: note = HLA-A targeting gRNA
  source 1..23: mol_type = other DNA
gcttgtacttctgtgtctcccgg

SEQ ID NO: 6821 - DNA, 23 bp, synthetic construct
  misc_feature 1..23: note = HLA-A targeting gRNA
  source 1..23: mol_type = other DNA
gcttgtacttttgtgtctcccgg

SEQ ID NO: 6822 - DNA, 23 bp, synthetic construct
  misc_feature 1..23: note = HLA-A targeting gRNA
  source 1..23: mol_type = other DNA
gcttgtagttctgtgtctcccgg

SEQ ID NO: 6823 - DNA, 23 bp, synthetic construct
  misc_feature 1..23: note = HLA-A targeting gRNA
  source 1..23: mol_type = other DNA
gcttgtccttcccgttctccagg

SEQ ID NO: 6824 - DNA, 23 bp, synthetic construct
  misc_feature 1..23: note = HLA-A targeting gRNA
  source 1..23: mol_type = other DNA
gcttgtgcttctgtgtctcccgg

SEQ ID NO: 6825 - DNA, 23 bp, synthetic construct
  misc_feature 1..23: note = HLA-A targeting gRNA
  source 1..23: mol_type = other DNA
gcttgttcttctgtgtctcccgg

SEQ ID NO: 6826 - DNA, 23 bp, synthetic construct
  misc_feature 1..23: note = HLA-A targeting gRNA
  source 1..23: mol_type = other DNA
ggaaaagaggagaaggtgagggg

SEQ ID NO: 6827 - DNA, 23 bp, synthetic construct
  misc_feature 1..23: note = HLA-A targeting gRNA
  source 1..23: mol_type = other DNA
ggaaaggaagggaagatgagggg

SEQ ID NO: 6828 - DNA, 23 bp, synthetic construct
  misc_feature 1..23: note = HLA-A targeting gRNA
  source 1..23: mol_type = other DNA
ggaaaggaggagaaggtgagggg

SEQ ID NO: 6829 - DNA, 23 bp, synthetic construct
  misc_feature 1..23: note = HLA-A targeting gRNA
  source 1..23: mol_type = other DNA
ggaaaggaggggaagacgagggg

SEQ ID NO: 6830 - DNA, 23 bp, synthetic construct
  misc_feature 1..23: note = HLA-A targeting gRNA
  source 1..23: mol_type = other DNA
ggaaaggaggggaagatgagggg

SEQ ID NO: 6831 - DNA, 23 bp, synthetic construct
  misc_feature 1..23: note = HLA-A targeting gRNA
  source 1..23: mol_type = other DNA
ggaaaggaggggaaggtgagggg

SEQ ID NO: 6832 - DNA, 23 bp, synthetic construct
  misc_feature 1..23: note = HLA-A targeting gRNA
  source 1..23: mol_type = other DNA
ggaaagttcgagtctctgagcgg

SEQ ID NO: 6833 - DNA, 23 bp, synthetic construct
  misc_feature 1..23: note = HLA-A targeting gRNA
  source 1..23: mol_type = other DNA
ggaaagttcgagtctctgagtgg

SEQ ID NO: 6834 - DNA, 23 bp, synthetic construct
  misc_feature 1..23: note = HLA-A targeting gRNA
  source 1..23: mol_type = other DNA
ggaaccgtgactttcctctcagg

SEQ ID NO: 6835 - DNA, 23 bp, synthetic construct
  misc_feature 1..23: note = HLA-A targeting gRNA
  source 1..23: mol_type = other DNA
ggaacgcagatcctcgttcaggg

SEQ ID NO: 6836 - DNA, 23 bp, synthetic construct
  misc_feature 1..23: note = HLA-A targeting gRNA
  source 1..23: mol_type = other DNA
ggaagaaaatgccctatgagggg

SEQ ID NO: 6837 - DNA, 23 bp, synthetic construct
  misc_feature 1..23: note = HLA-A targeting gRNA
  source 1..23: mol_type = other DNA
ggaagaaaatgccctgtgagggg

SEQ ID NO: 6838 - DNA, 23 bp, synthetic construct
  misc_feature 1..23: note = HLA-A targeting gRNA
  source 1..23: mol_type = other DNA
ggaagaaaatgtcctgtgagggg

SEQ ID NO: 6839 - DNA, 23 bp, synthetic construct
  misc_feature 1..23: note = HLA-A targeting gRNA
  source 1..23: mol_type = other DNA
ggaagaagaagtgaaactcaggg

SEQ ID NO: 6840 - DNA, 23 bp, synthetic construct
  misc_feature 1..23: note = HLA-A targeting gRNA
  source 1..23: mol_type = other DNA
ggaagaaggaccccacaagttgg

SEQ ID NO: 6841 - DNA, 23 bp, synthetic construct
  misc_feature 1..23: note = HLA-A targeting gRNA
  source 1..23: mol_type = other DNA
ggaagagctcaggtagggaaggg

SEQ ID NO: 6842 - DNA, 23 bp, synthetic construct
  misc_feature 1..23: note = HLA-A targeting gRNA
  source 1..23: mol_type = other DNA
ggaagagttcaggtagggaaggg

SEQ ID NO: 6843 - DNA, 23 bp, synthetic construct
  misc_feature 1..23: note = HLA-A targeting gRNA
  source 1..23: mol_type = other DNA
ggaagagttctggtagggaaggg

SEQ ID NO: 6844 - DNA, 23 bp, synthetic construct
  misc_feature 1..23: note = HLA-A targeting gRNA
  source 1..23: mol_type = other DNA
ggaagatggctcccatctcaggg

SEQ ID NO: 6845 - DNA, 23 bp, synthetic construct
  misc_feature 1..23: note = HLA-A targeting gRNA
  source 1..23: mol_type = other DNA
ggaagcctgggggcgaggagggg

SEQ ID NO: 6846 - DNA, 23 bp, synthetic construct
  misc_feature 1..23: note = HLA-A targeting gRNA
  source 1..23: mol_type = other DNA
ggaagcgcccgtcgggccccagg

SEQ ID NO: 6847 - DNA, 23 bp, synthetic construct
  misc_feature 1..23: note = HLA-A targeting gRNA
  source 1..23: mol_type = other DNA
ggaaggagccgcgggcgccatgg

SEQ ID NO: 6848 - DNA, 23 bp, synthetic construct
  misc_feature 1..23: note = HLA-A targeting gRNA
  source 1..23: mol_type = other DNA
ggaaggagccgcgggcgccctgg

SEQ ID NO: 6849 - DNA, 23 bp, synthetic construct
  misc_feature 1..23: note = HLA-A targeting gRNA
  source 1..23: mol_type = other DNA
ggaaggagccgcgggcgccgtgg

SEQ ID NO: 6850 - DNA, 23 bp, synthetic construct
  misc_feature 1..23: note = HLA-A targeting gRNA
  source 1..23: mol_type = other DNA
ggaaggctccccactgcccctgg

SEQ ID NO: 6851 - DNA, 23 bp, synthetic construct
  misc_feature 1..23: note = HLA-A targeting gRNA
  source 1..23: mol_type = other DNA
ggaaggctccccactgcccttgg

SEQ ID NO: 6852 - DNA, 23 bp, synthetic construct
  misc_feature 1..23: note = HLA-A targeting gRNA
  source 1..23: mol_type = other DNA
ggacaagaggaattatggggcgg

SEQ ID NO: 6853 - DNA, 23 bp, synthetic construct
  misc_feature 1..23: note = HLA-A targeting gRNA
  source 1..23: mol_type = other DNA
ggacaagaggaattatggggtgg

SEQ ID NO: 6854 - DNA, 23 bp, synthetic construct
  misc_feature 1..23: note = HLA-A targeting gRNA
  source 1..23: mol_type = other DNA
ggacacctgatcagtattctagg

SEQ ID NO: 6855 - DNA, 23 bp, synthetic construct
  misc_feature 1..23: note = HLA-A targeting gRNA
  source 1..23: mol_type = other DNA
ggacacctggggtagggaagggg

SEQ ID NO: 6856 - DNA, 23 bp, synthetic construct
  misc_feature 1..23: note = HLA-A targeting gRNA
  source 1..23: mol_type = other DNA
ggacacctggggtggggaagggg

SEQ ID NO: 6857 - DNA, 23 bp, synthetic construct
  misc_feature 1..23: note = HLA-A targeting gRNA
  source 1..23: mol_type = other DNA
ggacacctggtgtggggaagggg

SEQ ID NO: 6858 - DNA, 23 bp, synthetic construct
  misc_feature 1..23: note = HLA-A targeting gRNA
  source 1..23: mol_type = other DNA
ggacagatgtatcgccttgatgg

SEQ ID NO: 6859 - DNA, 23 bp, synthetic construct
  misc_feature 1..23: note = HLA-A targeting gRNA
  source 1..23: mol_type = other DNA
ggacaggaggaattagggggtgg

SEQ ID NO: 6860 - DNA, 23 bp, synthetic construct
  misc_feature 1..23: note = HLA-A targeting gRNA
  source 1..23: mol_type = other DNA
ggacaggaggaattatggggtgg

SEQ ID NO: 6861 - DNA, 23 bp, synthetic construct
  misc_feature 1..23: note = HLA-A targeting gRNA
  source 1..23: mol_type = other DNA
ggacatttgcttcccacaggtgg

SEQ ID NO: 6862 - DNA, 23 bp, synthetic construct
  misc_feature 1..23: note = HLA-A targeting gRNA
  source 1..23: mol_type = other DNA
ggacattttcttcccacaggtgg

SEQ ID NO: 6863 - DNA, 23 bp, synthetic construct
  misc_feature 1..23: note = HLA-A targeting gRNA
  source 1..23: mol_type = other DNA
ggacccctgatcactatcctagg

SEQ ID NO: 6864 - DNA, 23 bp, synthetic construct
  misc_feature 1..23: note = HLA-A targeting gRNA
  source 1..23: mol_type = other DNA
ggacccctgatcagtattatagg

SEQ ID NO: 6865 - DNA, 23 bp, synthetic construct
  misc_feature 1..23: note = HLA-A targeting gRNA
  source 1..23: mol_type = other DNA
ggacccctgatcagtattccagg

SEQ ID NO: 6866 - DNA, 23 bp, synthetic construct
  misc_feature 1..23: note = HLA-A targeting gRNA
  source 1..23: mol_type = other DNA
ggacccctgatcagtattctagg

SEQ ID NO: 6867 - DNA, 23 bp, synthetic construct
  misc_feature 1..23: note = HLA-A targeting gRNA
  source 1..23: mol_type = other DNA
ggaccggtgagtgcggggttggg

SEQ ID NO: 6868 - DNA, 23 bp, synthetic construct
  misc_feature 1..23: note = HLA-A targeting gRNA
  source 1..23: mol_type = other DNA
ggacctaagctcctggaccgcgg

SEQ ID NO: 6869 - DNA, 23 bp, synthetic construct
  misc_feature 1..23: note = HLA-A targeting gRNA
  source 1..23: mol_type = other DNA
ggacctgagctcccggaccgcgg

SEQ ID NO: 6870 - DNA, 23 bp, synthetic construct
  misc_feature 1..23: note = HLA-A targeting gRNA
  source 1..23: mol_type = other DNA
ggacctgagctcctggaccgcgg

SEQ ID NO: 6871 - DNA, 23 bp, synthetic construct
  misc_feature 1..23: note = HLA-A targeting gRNA
  source 1..23: mol_type = other DNA
ggacctgagctcctggatcgcgg

SEQ ID NO: 6872 - DNA, 23 bp, synthetic construct
  misc_feature 1..23: note = HLA-A targeting gRNA
  source 1..23: mol_type = other DNA
ggacctggtcaagagcccgcagg

SEQ ID NO: 6873 - DNA, 23 bp, synthetic construct
  misc_feature 1..23: note = HLA-A targeting gRNA
  source 1..23: mol_type = other DNA
ggacggagccccgggagccatgg

SEQ ID NO: 6874 - DNA, 23 bp, synthetic construct
  misc_feature 1..23: note = HLA-A targeting gRNA
  source 1..23: mol_type = other DNA
ggacggagccccgggcgccatgg

SEQ ID NO: 6875 - DNA, 23 bp, synthetic construct
  misc_feature 1..23: note = HLA-A targeting gRNA
  source 1..23: mol_type = other DNA
ggacggagccccgggcgccgtgg

SEQ ID NO: 6876 - DNA, 23 bp, synthetic construct
  misc_feature 1..23: note = HLA-A targeting gRNA
  source 1..23: mol_type = other DNA
ggacggagccctgggcgccatgg

SEQ ID NO: 6877 - DNA, 23 bp, synthetic construct
  misc_feature 1..23: note = HLA-A targeting gRNA
  source 1..23: mol_type = other DNA
ggacggatgtatcaccgtggtgg

SEQ ID NO: 6878 - DNA, 23 bp, synthetic construct
  misc_feature 1..23: note = HLA-A targeting gRNA
  source 1..23: mol_type = other DNA
ggacggatgtatcacctcgatgg

SEQ ID NO: 6879 - DNA, 23 bp, synthetic construct
  misc_feature 1..23: note = HLA-A targeting gRNA
  source 1..23: mol_type = other DNA
ggacggatgtatcaccttgatgg

SEQ ID NO: 6880 - DNA, 23 bp, synthetic construct
  misc_feature 1..23: note = HLA-A targeting gRNA
  source 1..23: mol_type = other DNA
ggacggatgtatcaccttggtgg

SEQ ID NO: 6881 - DNA, 23 bp, synthetic construct
  misc_feature 1..23: note = HLA-A targeting gRNA
  source 1..23: mol_type = other DNA
ggacggatgtatcgccttgatgg

SEQ ID NO: 6882 - DNA, 23 bp, synthetic construct
  misc_feature 1..23: note = HLA-A targeting gRNA
  source 1..23: mol_type = other DNA
ggacgggctgaccacgggggcgg

SEQ ID NO: 6883 - DNA, 23 bp, synthetic construct
  misc_feature 1..23: note = HLA-A targeting gRNA
  source 1..23: mol_type = other DNA
ggacgtttcgagtgtgtggtggg

SEQ ID NO: 6884 - DNA, 23 bp, synthetic construct
  misc_feature 1..23: note = HLA-A targeting gRNA
  source 1..23: mol_type = other DNA
ggactcccgagagcagcaggagg

SEQ ID NO: 6885 - DNA, 23 bp, synthetic construct
  misc_feature 1..23: note = HLA-A targeting gRNA
  source 1..23: mol_type = other DNA
ggactctccgcggccgggccggg

SEQ ID NO: 6886 - DNA, 23 bp, synthetic construct
  misc_feature 1..23: note = HLA-A targeting gRNA
  source 1..23: mol_type = other DNA
ggacttcagaaccgggactgcgg

SEQ ID NO: 6887 - DNA, 23 bp, synthetic construct
  misc_feature 1..23: note = HLA-A targeting gRNA
  source 1..23: mol_type = other DNA
ggacttcagaaccggtactgcgg

SEQ ID NO: 6888 - DNA, 23 bp, synthetic construct
  misc_feature 1..23: note = HLA-A targeting gRNA
  source 1..23: mol_type = other DNA
ggactttagaaccgggactgcgg

SEQ ID NO: 6889 - DNA, 23 bp, synthetic construct
  misc_feature 1..23: note = HLA-A targeting gRNA
  source 1..23: mol_type = other DNA
ggactttagaacctggactgcgg

SEQ ID NO: 6890 - DNA, 23 bp, synthetic construct
  misc_feature 1..23: note = HLA-A targeting gRNA
  source 1..23: mol_type = other DNA
ggactttagaactgggaccacgg

SEQ ID NO: 6891 - DNA, 23 bp, synthetic construct
  misc_feature 1..23: note = HLA-A targeting gRNA
  source 1..23: mol_type = other DNA
ggactttagaactgggaccccgg

SEQ ID NO: 6892 - DNA, 23 bp, synthetic construct
  misc_feature 1..23: note = HLA-A targeting gRNA
  source 1..23: mol_type = other DNA
ggactttagaactgggaccgcgg

SEQ ID NO: 6893 - DNA, 23 bp, synthetic construct
  misc_feature 1..23: note = HLA-A targeting gRNA
  source 1..23: mol_type = other DNA
ggagaaacacctcatggagtggg

SEQ ID NO: 6894 - DNA, 23 bp, synthetic construct
  misc_feature 1..23: note = HLA-A targeting gRNA
  source 1..23: mol_type = other DNA
ggagaaatacgtcatggagtggg

SEQ ID NO: 6895 - DNA, 23 bp, synthetic construct
  misc_feature 1..23: note = HLA-A targeting gRNA
  source 1..23: mol_type = other DNA
ggagaacgggaaggacaagctgg

SEQ ID NO: 6896 - DNA, 23 bp, synthetic construct
  misc_feature 1..23: note = HLA-A targeting gRNA
  source 1..23: mol_type = other DNA
ggagaacgggaaggacacgctgg

SEQ ID NO: 6897 - DNA, 23 bp, synthetic construct
  misc_feature 1..23: note = HLA-A targeting gRNA
  source 1..23: mol_type = other DNA
ggagaacgggaaggagacgctgg

SEQ ID NO: 6898 - DNA, 23 bp, synthetic construct
  misc_feature 1..23: note = HLA-A targeting gRNA
  source 1..23: mol_type = other DNA
ggagaagaagtgaaactcagggg

SEQ ID NO: 6899 - DNA, 23 bp, synthetic construct
  misc_feature 1..23: note = HLA-A targeting gRNA
  source 1..23: mol_type = other DNA
ggagaagaagtgaaactcgtggg

SEQ ID NO: 6900 - DNA, 23 bp, synthetic construct
  misc_feature 1..23: note = HLA-A targeting gRNA
  source 1..23: mol_type = other DNA
ggagaagaagtgaaactcttggg

SEQ ID NO: 6901 - DNA, 23 bp, synthetic construct
  misc_feature 1..23: note = HLA-A targeting gRNA
  source 1..23: mol_type = other DNA
ggagacccgggccgtacgtcggg

SEQ ID NO: 6902 - DNA, 23 bp, synthetic construct
  misc_feature 1..23: note = HLA-A targeting gRNA
  source 1..23: mol_type = other DNA
ggagacgcccgtcgggccccagg

SEQ ID NO: 6903 - DNA, 23 bp, synthetic construct
  misc_feature 1..23: note = HLA-A targeting gRNA
  source 1..23: mol_type = other DNA
ggagagaggggaccgcaggcggg

SEQ ID NO: 6904 - DNA, 23 bp, synthetic construct
  misc_feature 1..23: note = HLA-A targeting gRNA
  source 1..23: mol_type = other DNA
ggagagggagcctgggggcgagg

SEQ ID NO: 6905 - DNA, 23 bp, synthetic construct
  misc_feature 1..23: note = HLA-A targeting gRNA
  source 1..23: mol_type = other DNA
ggagcaacggagagcctacctgg

SEQ ID NO: 6906 - DNA, 23 bp, synthetic construct
  misc_feature 1..23: note = HLA-A targeting gRNA
  source 1..23: mol_type = other DNA
ggagcaaggggaccgcaggcggg

SEQ ID NO: 6907 - DNA, 23 bp, synthetic construct
  misc_feature 1..23: note = HLA-A targeting gRNA
  source 1..23: mol_type = other DNA
ggagcagcggagaacctacctgg

SEQ ID NO: 6908 - DNA, 23 bp, synthetic construct
  misc_feature 1..23: note = HLA-A targeting gRNA
  source 1..23: mol_type = other DNA
ggagcagcggagagcctacctgg

SEQ ID NO: 6909 - DNA, 23 bp, synthetic construct
  misc_feature 1..23: note = HLA-A targeting gRNA
  source 1..23: mol_type = other DNA
ggagcagctaagagcctacctgg

SEQ ID NO: 6910 - DNA, 23 bp, synthetic construct
  misc_feature 1..23: note = HLA-A targeting gRNA
  source 1..23: mol_type = other DNA
ggagcagctgagaacctacctgg

SEQ ID NO: 6911 - DNA, 23 bp, synthetic construct
  misc_feature 1..23: note = HLA-A targeting gRNA
  source 1..23: mol_type = other DNA
ggagcagctgagagcctaccggg

SEQ ID NO: 6912 - DNA, 23 bp, synthetic construct
  misc_feature 1..23: note = HLA-A targeting gRNA
  source 1..23: mol_type = other DNA
ggagcagctgagagcctgcctgg

SEQ ID NO: 6913 - DNA, 23 bp, synthetic construct
  misc_feature 1..23: note = HLA-A targeting gRNA
  source 1..23: mol_type = other DNA
ggagcaggacagagcctacctgg

SEQ ID NO: 6914 - DNA, 23 bp, synthetic construct
  misc_feature 1..23: note = HLA-A targeting gRNA
  source 1..23: mol_type = other DNA
ggagcagtgcagagcctacctgg

SEQ ID NO: 6915 - DNA, 23 bp, synthetic construct
  misc_feature 1..23: note = HLA-A targeting gRNA
  source 1..23: mol_type = other DNA
ggagcagtggagagcccacctgg

SEQ ID NO: 6916 - DNA, 23 bp, synthetic construct
  misc_feature 1..23: note = HLA-A targeting gRNA
  source 1..23: mol_type = other DNA
ggagcagtggagagtctacctgg

SEQ ID NO: 6917 - DNA, 23 bp, synthetic construct
  misc_feature 1..23: note = HLA-A targeting gRNA
  source 1..23: mol_type = other DNA
ggagccatggatagagcaggagg

SEQ ID NO: 6918 - DNA, 23 bp, synthetic construct
  misc_feature 1..23: note = HLA-A targeting gRNA
  source 1..23: mol_type = other DNA
ggagccccacttcatcgcagtgg

SEQ ID NO: 6919 - DNA, 23 bp, synthetic construct
  misc_feature 1..23: note = HLA-A targeting gRNA
  source 1..23: mol_type = other DNA
ggagccccgcttcatcaccgtgg

SEQ ID NO: 6920 - DNA, 23 bp, synthetic construct
  misc_feature 1..23: note = HLA-A targeting gRNA
  source 1..23: mol_type = other DNA
ggagccccgcttcatctcagtgg

SEQ ID NO: 6921 - DNA, 23 bp, synthetic construct
  misc_feature 1..23: note = HLA-A targeting gRNA
  source 1..23: mol_type = other DNA
ggagccccgcttcattaccgtgg

SEQ ID NO: 6922 - DNA, 23 bp, synthetic construct
  misc_feature 1..23: note = HLA-A targeting gRNA
  source 1..23: mol_type = other DNA
ggagccccgcttcattgcagtgg

SEQ ID NO: 6923 - DNA, 23 bp, synthetic construct
  misc_feature 1..23: note = HLA-A targeting gRNA
  source 1..23: mol_type = other DNA
ggagccccgggcgccgtgggtgg

SEQ ID NO: 6924 - DNA, 23 bp, synthetic construct
  misc_feature 1..23: note = HLA-A targeting gRNA
  source 1..23: mol_type = other DNA
ggagcccctcaccctgagatggg

SEQ ID NO: 6925 - DNA, 23 bp, synthetic construct
  misc_feature 1..23: note = HLA-A targeting gRNA
  source 1..23: mol_type = other DNA
ggagcccttcagcagggtcaggg

SEQ ID NO: 6926 - DNA, 23 bp, synthetic construct
  misc_feature 1..23: note = HLA-A targeting gRNA
  source 1..23: mol_type = other DNA
ggagcccttcagcagggtcgggg

SEQ ID NO: 6927 - DNA, 23 bp, synthetic construct
  misc_feature 1..23: note = HLA-A targeting gRNA
  source 1..23: mol_type = other DNA
ggagcccttcagccaggtcaggg

SEQ ID NO: 6928 - DNA, 23 bp, synthetic construct
  misc_feature 1..23: note = HLA-A targeting gRNA
  source 1..23: mol_type = other DNA
ggagcccttcagccgggtcaggg

SEQ ID NO: 6929 - DNA, 23 bp, synthetic construct
  misc_feature 1..23: note = HLA-A targeting gRNA
  source 1..23: mol_type = other DNA
ggagcccttcagctgggtcaggg

SEQ ID NO: 6930 - DNA, 23 bp, synthetic construct
  misc_feature 1..23: note = HLA-A targeting gRNA
  source 1..23: mol_type = other DNA
ggagccgcaggcgccgtgggtgg

SEQ ID NO: 6931 - DNA, 23 bp, synthetic construct
  misc_feature 1..23: note = HLA-A targeting gRNA
  source 1..23: mol_type = other DNA
ggagccgcgggagccgtggatgg

SEQ ID NO: 6932 - DNA, 23 bp, synthetic construct
  misc_feature 1..23: note = HLA-A targeting gRNA
  source 1..23: mol_type = other DNA
ggagccgcgggagccgtgggtgg

SEQ ID NO: 6933 - DNA, 23 bp, synthetic construct
  misc_feature 1..23: note = HLA-A targeting gRNA
  source 1..23: mol_type = other DNA
ggagccgcgggcgccgtgggtgg

SEQ ID NO: 6934 - DNA, 23 bp, synthetic construct
  misc_feature 1..23: note = HLA-A targeting gRNA
  source 1..23: mol_type = other DNA
ggagccgtggatggagcaggagg

SEQ ID NO: 6935 - DNA, 23 bp, synthetic construct
  misc_feature 1..23: note = HLA-A targeting gRNA
  source 1..23: mol_type = other DNA
ggagccgtgggtggagcaggagg

SEQ ID NO: 6936 - DNA, 23 bp, synthetic construct
  misc_feature 1..23: note = HLA-A targeting gRNA
  source 1..23: mol_type = other DNA
ggagcgaggggaccgcaggcggg

SEQ ID NO: 6937 - DNA, 23 bp, synthetic construct
  misc_feature 1..23: note = HLA-A targeting gRNA
  source 1..23: mol_type = other DNA
ggagcgcagatcctcgttcaggg

SEQ ID NO: 6938 - DNA, 23 bp, synthetic construct
  misc_feature 1..23: note = HLA-A targeting gRNA
  source 1..23: mol_type = other DNA
ggagcgcaggtcctcattcaggg

SEQ ID NO: 6939 - DNA, 23 bp, synthetic construct
  misc_feature 1..23: note = HLA-A targeting gRNA
  source 1..23: mol_type = other DNA
ggagcgcaggtcctcgtccaggg

SEQ ID NO: 6940 - DNA, 23 bp, synthetic construct
  misc_feature 1..23: note = HLA-A targeting gRNA
  source 1..23: mol_type = other DNA
ggagcgcaggtcctcgttcacgg

SEQ ID NO: 6941 - DNA, 23 bp, synthetic construct
  misc_feature 1..23: note = HLA-A targeting gRNA
  source 1..23: mol_type = other DNA
ggagcgcaggtcctcgttctggg

SEQ ID NO: 6942 - DNA, 23 bp, synthetic construct
  misc_feature 1..23: note = HLA-A targeting gRNA
  source 1..23: mol_type = other DNA
ggagctcaggtcctcgttcaagg

SEQ ID NO: 6943 - DNA, 23 bp, synthetic construct
  misc_feature 1..23: note = HLA-A targeting gRNA
  source 1..23: mol_type = other DNA
ggagctcaggtcctcgttcaggg

SEQ ID NO: 6944 - DNA, 23 bp, synthetic construct
  misc_feature 1..23: note = HLA-A targeting gRNA
  source 1..23: mol_type = other DNA
ggagctccgcttcatcgcagtgg

SEQ ID NO: 6945 - DNA, 23 bp, synthetic construct
  misc_feature 1..23: note = HLA-A targeting gRNA
  source 1..23: mol_type = other DNA
ggagctgaagtggtcgggggtgg

SEQ ID NO: 6946 - DNA, 23 bp, synthetic construct
  misc_feature 1..23: note = HLA-A targeting gRNA
  source 1..23: mol_type = other DNA
ggagctgaagtggtctggggtgg

SEQ ID NO: 6947 - DNA, 23 bp, synthetic construct
  misc_feature 1..23: note = HLA-A targeting gRNA
  source 1..23: mol_type = other DNA
ggagcttaggtcctcgttcaggg

SEQ ID NO: 6948 - DNA, 23 bp, synthetic construct
  misc_feature 1..23: note = HLA-A targeting gRNA
  source 1..23: mol_type = other DNA
ggaggaggggccggagtattggg

SEQ ID NO: 6949 - DNA, 23 bp, synthetic construct
  misc_feature 1..23: note = HLA-A targeting gRNA
  source 1..23: mol_type = other DNA
ggaggcgcccgtagggccccagg

SEQ ID NO: 6950 - DNA, 23 bp, synthetic construct
  misc_feature 1..23: note = HLA-A targeting gRNA
  source 1..23: mol_type = other DNA
ggaggcgcccgtccggccccagg

SEQ ID NO: 6951 - DNA, 23 bp, synthetic construct
  misc_feature 1..23: note = HLA-A targeting gRNA
  source 1..23: mol_type = other DNA
ggaggcgcccgtcgagccccagg

SEQ ID NO: 6952 - DNA, 23 bp, synthetic construct
  misc_feature 1..23: note = HLA-A targeting gRNA
  source 1..23: mol_type = other DNA
ggaggcgcccgtcgggacccagg

SEQ ID NO: 6953 - DNA, 23 bp, synthetic construct
  misc_feature 1..23: note = HLA-A targeting gRNA
  source 1..23: mol_type = other DNA
ggaggcgcccgtcgggcccaagg

SEQ ID NO: 6954 - DNA, 23 bp, synthetic construct
  misc_feature 1..23: note = HLA-A targeting gRNA
  source 1..23: mol_type = other DNA
ggaggcgcccgtcgggccccagg

SEQ ID NO: 6955 - DNA, 23 bp, synthetic construct
  misc_feature 1..23: note = HLA-A targeting gRNA
  source 1..23: mol_type = other DNA
ggaggcgcccgtcgggccccggg

SEQ ID NO: 6956 - DNA, 23 bp, synthetic construct
  misc_feature 1..23: note = HLA-A targeting gRNA
  source 1..23: mol_type = other DNA
ggaggcgcccgtggggccccagg

SEQ ID NO: 6957 - DNA, 23 bp, synthetic construct
  misc_feature 1..23: note = HLA-A targeting gRNA
  source 1..23: mol_type = other DNA
ggaggcgccggtcgggccccagg

SEQ ID NO: 6958 - DNA, 23 bp, synthetic construct
  misc_feature 1..23: note = HLA-A targeting gRNA
  source 1..23: mol_type = other DNA
ggagggaaatggcctctgccggg

SEQ ID NO: 6959 - DNA, 23 bp, synthetic construct
  misc_feature 1..23: note = HLA-A targeting gRNA
  source 1..23: mol_type = other DNA
ggagggaaatggcctctgtgggg

SEQ ID NO: 6960 - DNA, 23 bp, synthetic construct
  misc_feature 1..23: note = HLA-A targeting gRNA
  source 1..23: mol_type = other DNA
ggagggcaggtcctcgttcaggg

SEQ ID NO: 6961 - DNA, 23 bp, synthetic construct
  misc_feature 1..23: note = HLA-A targeting gRNA
  source 1..23: mol_type = other DNA
ggaggggcccgtcgggccccagg

SEQ ID NO: 6962 - DNA, 23 bp, synthetic construct
  misc_feature 1..23: note = HLA-A targeting gRNA
  source 1..23: mol_type = other DNA
ggaggggccggacggagtattgg

SEQ ID NO: 6963 - DNA, 23 bp, synthetic construct
  misc_feature 1..23: note = HLA-A targeting gRNA
  source 1..23: mol_type = other DNA
ggaggtgtggaaatacctcatgg

SEQ ID NO: 6964 - DNA, 23 bp, synthetic construct
  misc_feature 1..23: note = HLA-A targeting gRNA
  source 1..23: mol_type = other DNA
ggagtaaggagggggatgagggg

SEQ ID NO: 6965 - DNA, 23 bp, synthetic construct
  misc_feature 1..23: note = HLA-A targeting gRNA
  source 1..23: mol_type = other DNA
ggagtcgctccgcagatacctgg

SEQ ID NO: 6966 - DNA, 23 bp, synthetic construct
  misc_feature 1..23: note = HLA-A targeting gRNA
  source 1..23: mol_type = other DNA
ggagtcgtgacctgcgccccagg

SEQ ID NO: 6967 - DNA, 23 bp, synthetic construct
  misc_feature 1..23: note = HLA-A targeting gRNA
  source 1..23: mol_type = other DNA
ggagtcgtgacctgcgccccggg

SEQ ID NO: 6968 - DNA, 23 bp, synthetic construct
  misc_feature 1..23: note = HLA-A targeting gRNA
  source 1..23: mol_type = other DNA
ggagtggaagcctgggggcgagg

SEQ ID NO: 6969 - DNA, 23 bp, synthetic construct
  misc_feature 1..23: note = HLA-A targeting gRNA
  source 1..23: mol_type = other DNA
ggagtggagaatccccaacgcgg

SEQ ID NO: 6970 - DNA, 23 bp, synthetic construct
  misc_feature 1..23: note = HLA-A targeting gRNA
  source 1..23: mol_type = other DNA
ggagtggagaatcctcaacgcgg

SEQ ID NO: 6971 - DNA, 23 bp, synthetic construct
  misc_feature 1..23: note = HLA-A targeting gRNA
  source 1..23: mol_type = other DNA
ggagtggctccgcagatatctgg

SEQ ID NO: 6972 - DNA, 23 bp, synthetic construct
  misc_feature 1..23: note = HLA-A targeting gRNA
  source 1..23: mol_type = other DNA
ggagtggctccgcggatacctgg

SEQ ID NO: 6973 - DNA, 23 bp, synthetic construct
  misc_feature 1..23: note = HLA-A targeting gRNA
  source 1..23: mol_type = other DNA
ggagtgggaacctgggggcgagg

SEQ ID NO: 6974 - DNA, 23 bp, synthetic construct
  misc_feature 1..23: note = HLA-A targeting gRNA
  source 1..23: mol_type = other DNA
ggagtgggagactgggggcgagg

SEQ ID NO: 6975 - DNA, 23 bp, synthetic construct
  misc_feature 1..23: note = HLA-A targeting gRNA
  source 1..23: mol_type = other DNA
ggagtgggagactgggggtgagg

SEQ ID NO: 6976 - DNA, 23 bp, synthetic construct
  misc_feature 1..23: note = HLA-A targeting gRNA
  source 1..23: mol_type = other DNA
ggagtgggagcctgggagcgagg

SEQ ID NO: 6977 - DNA, 23 bp, synthetic construct
  misc_feature 1..23: note = HLA-A targeting gRNA
  source 1..23: mol_type = other DNA
ggagtgggagcctgggggagagg

SEQ ID NO: 6978 - DNA, 23 bp, synthetic construct
  misc_feature 1..23: note = HLA-A targeting gRNA
  source 1..23: mol_type = other DNA
ggagtgggagcctgggggccagg

SEQ ID NO: 6979 - DNA, 23 bp, synthetic construct
  misc_feature 1..23: note = HLA-A targeting gRNA
  source 1..23: mol_type = other DNA
ggagtgggagcctgggggtgagg

SEQ ID NO: 6980 - DNA, 23 bp, synthetic construct
  misc_feature 1..23: note = HLA-A targeting gRNA
  source 1..23: mol_type = other DNA
ggagtgggaggctgggggcgagg

SEQ ID NO: 6981 - DNA, 23 bp, synthetic construct
  misc_feature 1..23: note = HLA-A targeting gRNA
  source 1..23: mol_type = other DNA
ggatctcagacccggagactcgg

SEQ ID NO: 6982 - DNA, 23 bp, synthetic construct
  misc_feature 1..23: note = HLA-A targeting gRNA
  source 1..23: mol_type = other DNA
ggatctcagaccgggagactcgg

SEQ ID NO: 6983 - DNA, 23 bp, synthetic construct
  misc_feature 1..23: note = HLA-A targeting gRNA
  source 1..23: mol_type = other DNA
ggatctcagaccgggagacttgg

SEQ ID NO: 6984 - DNA, 23 bp, synthetic construct
  misc_feature 1..23: note = HLA-A targeting gRNA
  source 1..23: mol_type = other DNA
ggatctcagacggggagactcgg

SEQ ID NO: 6985 - DNA, 23 bp, synthetic construct
  misc_feature 1..23: note = HLA-A targeting gRNA
  source 1..23: mol_type = other DNA
ggatctcggacccggagactcgg

SEQ ID NO: 6986 - DNA, 23 bp, synthetic construct
  misc_feature 1..23: note = HLA-A targeting gRNA
  source 1..23: mol_type = other DNA
ggatctcggaccctgagactcgg

SEQ ID NO: 6987 - DNA, 23 bp, synthetic construct
  misc_feature 1..23: note = HLA-A targeting gRNA
  source 1..23: mol_type = other DNA
ggatgaagtccctgaggaaatgg

SEQ ID NO: 6988 - DNA, 23 bp, synthetic construct
  misc_feature 1..23: note = HLA-A targeting gRNA
  source 1..23: mol_type = other DNA
ggatgaagtccttgaggaaatgg

SEQ ID NO: 6989 - DNA, 23 bp, synthetic construct
  misc_feature 1..23: note = HLA-A targeting gRNA
  source 1..23: mol_type = other DNA
ggatgaagtctctgaggaaatgg

SEQ ID NO: 6990 - DNA, 23 bp, synthetic construct
  misc_feature 1..23: note = HLA-A targeting gRNA
  source 1..23: mol_type = other DNA
ggatgacatcgccctgaacgagg

SEQ ID NO: 6991 - DNA, 23 bp, synthetic construct
  misc_feature 1..23: note = HLA-A targeting gRNA
  source 1..23: mol_type = other DNA
ggatgacatctctgaggaaatgg

SEQ ID NO: 6992 - DNA, 23 bp, synthetic construct
  misc_feature 1..23: note = HLA-A targeting gRNA
  source 1..23: mol_type = other DNA
ggatgacgtctctgaggaaatgg

SEQ ID NO: 6993 - DNA, 23 bp, synthetic construct
  misc_feature 1..23: note = HLA-A targeting gRNA
  source 1..23: mol_type = other DNA
ggatggagccccgggcgccatgg

SEQ ID NO: 6994 - DNA, 23 bp, synthetic construct
  misc_feature 1..23: note = HLA-A targeting gRNA
  source 1..23: mol_type = other DNA
ggatggatgtatcaccttgatgg

SEQ ID NO: 6995 - DNA, 23 bp, synthetic construct
  misc_feature 1..23: note = HLA-A targeting gRNA
  source 1..23: mol_type = other DNA
ggatggcaaggaccaaactcagg

SEQ ID NO: 6996 - DNA, 23 bp, synthetic construct
  misc_feature 1..23: note = HLA-A targeting gRNA
  source 1..23: mol_type = other DNA
ggatggcctcccacgagaagagg

SEQ ID NO: 6997 - DNA, 23 bp, synthetic construct
  misc_feature 1..23: note = HLA-A targeting gRNA
  source 1..23: mol_type = other DNA
ggatggcctcccacgaggaaggg

SEQ ID NO: 6998 - DNA, 23 bp, synthetic construct
  misc_feature 1..23: note = HLA-A targeting gRNA
  source 1..23: mol_type = other DNA
ggatggcctcccacgaggagggg

SEQ ID NO: 6999 - DNA, 23 bp, synthetic construct
  misc_feature 1..23: note = HLA-A targeting gRNA
  source 1..23: mol_type = other DNA
ggatggccttccacgaggagggg

SEQ ID NO: 7000 - DNA, 23 bp, synthetic construct
  misc_feature 1..23: note = HLA-A targeting gRNA
  source 1..23: mol_type = other DNA
ggatggcgaggaccaaactcagg

SEQ ID NO: 7001 - DNA, 23 bp, synthetic construct
  misc_feature 1..23: note = HLA-A targeting gRNA
  source 1..23: mol_type = other DNA
ggatggcgaggactaaactcagg

SEQ ID NO: 7002 - DNA, 23 bp, synthetic construct
  misc_feature 1..23: note = HLA-A targeting gRNA
  source 1..23: mol_type = other DNA
ggatggcgccccgggcgccatgg

SEQ ID NO: 7003 - DNA, 23 bp, synthetic construct
  misc_feature 1..23: note = HLA-A targeting gRNA
  source 1..23: mol_type = other DNA
ggatggcgccctgggcgccatgg

SEQ ID NO: 7004 - DNA, 23 bp, synthetic construct
  misc_feature 1..23: note = HLA-A targeting gRNA
  source 1..23: mol_type = other DNA
ggatggcgtctctgaggaaatgg

SEQ ID NO: 7005 - DNA, 23 bp, synthetic construct
  misc_feature 1..23: note = HLA-A targeting gRNA
  source 1..23: mol_type = other DNA
ggatggggaagaccagacccagg

SEQ ID NO: 7006 - DNA, 23 bp, synthetic construct
  misc_feature 1..23: note = HLA-A targeting gRNA
  source 1..23: mol_type = other DNA
ggatggggaggaccaaactcagg

SEQ ID NO: 7007 - DNA, 23 bp, synthetic construct
  misc_feature 1..23: note = HLA-A targeting gRNA
  source 1..23: mol_type = other DNA
ggatggggaggaccaaattcagg

SEQ ID NO: 7008 - DNA, 23 bp, synthetic construct
  misc_feature 1..23: note = HLA-A targeting gRNA
  source 1..23: mol_type = other DNA
ggatggtgcttccagtaacaagg

SEQ ID NO: 7009 - DNA, 23 bp, synthetic construct
  misc_feature 1..23: note = HLA-A targeting gRNA
  source 1..23: mol_type = other DNA
ggatggtgcttccagtaacgagg

SEQ ID NO: 7010 - DNA, 23 bp, synthetic construct
  misc_feature 1..23: note = HLA-A targeting gRNA
  source 1..23: mol_type = other DNA
ggatgtaaggctgcgacgtgggg

SEQ ID NO: 7011 - DNA, 23 bp, synthetic construct
  misc_feature 1..23: note = HLA-A targeting gRNA
  source 1..23: mol_type = other DNA
ggatgtacggctgcgacctgggg

SEQ ID NO: 7012 - DNA, 23 bp, synthetic construct
  misc_feature 1..23: note = HLA-A targeting gRNA
  source 1..23: mol_type = other DNA
ggatgtacggctgcgacgtgggg

SEQ ID NO: 7013 - DNA, 23 bp, synthetic construct
  misc_feature 1..23: note = HLA-A targeting gRNA
  source 1..23: mol_type = other DNA
ggatgtacggctgggacctgggg

SEQ ID NO: 7014 - DNA, 23 bp, synthetic construct
  misc_feature 1..23: note = HLA-A targeting gRNA
  source 1..23: mol_type = other DNA
ggatgtatggctgcgacctgggg

SEQ ID NO: 7015 - DNA, 23 bp, synthetic construct
  misc_feature 1..23: note = HLA-A targeting gRNA
  source 1..23: mol_type = other DNA
ggatgtctggctgcgacccgggg

SEQ ID NO: 7016 - DNA, 23 bp, synthetic construct
  misc_feature 1..23: note = HLA-A targeting gRNA
  source 1..23: mol_type = other DNA
ggatgtctggctgcgacctgggg

SEQ ID NO: 7017 - DNA, 23 bp, synthetic construct
  misc_feature 1..23: note = HLA-A targeting gRNA
  source 1..23: mol_type = other DNA
ggatgtctggctgcgacgtgggg

SEQ ID NO: 7018 - DNA, 23 bp, synthetic construct
  misc_feature 1..23: note = HLA-A targeting gRNA
  source 1..23: mol_type = other DNA
ggatgtgaagaaatacttcatgg

SEQ ID NO: 7019 - DNA, 23 bp, synthetic construct
  misc_feature 1..23: note = HLA-A targeting gRNA
  source 1..23: mol_type = other DNA
ggatgtggagaaacacctcatgg

SEQ ID NO: 7020 - DNA, 23 bp, synthetic construct
  misc_feature 1..23: note = HLA-A targeting gRNA
  source 1..23: mol_type = other DNA
ggatgtggagaaatacgtcatgg

SEQ ID NO: 7021 - DNA, 23 bp, synthetic construct
  misc_feature 1..23: note = HLA-A targeting gRNA
  source 1..23: mol_type = other DNA
ggatgtgtggctgcaacctgggg

SEQ ID NO: 7022 - DNA, 23 bp, synthetic construct
  misc_feature 1..23: note = HLA-A targeting gRNA
  source 1..23: mol_type = other DNA
ggatgtgtggctgcgacctgggg

SEQ ID NO: 7023 - DNA, 23 bp, synthetic construct
  misc_feature 1..23: note = HLA-A targeting gRNA
  source 1..23: mol_type = other DNA
ggatgttacgcgtgtgtggtggg

SEQ ID NO: 7024 - DNA, 23 bp, synthetic construct
  misc_feature 1..23: note = HLA-A targeting gRNA
  source 1..23: mol_type = other DNA
ggatgtttcgcgtgtgtcgtggg

SEQ ID NO: 7025 - DNA, 23 bp, synthetic construct
  misc_feature 1..23: note = HLA-A targeting gRNA
  source 1..23: mol_type = other DNA
ggatgtttcgcgtgtgtgatggg

SEQ ID NO: 7026 - DNA, 23 bp, synthetic construct
  misc_feature 1..23: note = HLA-A targeting gRNA
  source 1..23: mol_type = other DNA
ggatgtttcgcgtgtgtggtggg

SEQ ID NO: 7027 - DNA, 23 bp, synthetic construct
  misc_feature 1..23: note = HLA-A targeting gRNA
  source 1..23: mol_type = other DNA
ggatgtttggctgcgacctgggg

SEQ ID NO: 7028 - DNA, 23 bp, synthetic construct
  misc_feature 1..23: note = HLA-A targeting gRNA
  source 1..23: mol_type = other DNA
ggatgtttggctgcgaccttggg

SEQ ID NO: 7029 - DNA, 23 bp, synthetic construct
  misc_feature 1..23: note = HLA-A targeting gRNA
  source 1..23: mol_type = other DNA
ggattacaacgccctgaatgagg

SEQ ID NO: 7030 - DNA, 23 bp, synthetic construct
  misc_feature 1..23: note = HLA-A targeting gRNA
  source 1..23: mol_type = other DNA
ggattacatagccctgaacgagg

SEQ ID NO: 7031 - DNA, 23 bp, synthetic construct
  misc_feature 1..23: note = HLA-A targeting gRNA
  source 1..23: mol_type = other DNA
ggattacatcgcccagaacgagg

SEQ ID NO: 7032 - DNA, 23 bp, synthetic construct
  misc_feature 1..23: note = HLA-A targeting gRNA
  source 1..23: mol_type = other DNA
ggattacatcgccctgaatgagg

SEQ ID NO: 7033 - DNA, 23 bp, synthetic construct
  misc_feature 1..23: note = HLA-A targeting gRNA
  source 1..23: mol_type = other DNA
ggattacatcgccctggacgagg

SEQ ID NO: 7034 - DNA, 23 bp, synthetic construct
  misc_feature 1..23: note = HLA-A targeting gRNA
  source 1..23: mol_type = other DNA
ggattacatcgccgtgaacgagg

SEQ ID NO: 7035 - DNA, 23 bp, synthetic construct
  misc_feature 1..23: note = HLA-A targeting gRNA
  source 1..23: mol_type = other DNA
ggcacacagggtcccaggctggg

SEQ ID NO: 7036 - DNA, 23 bp, synthetic construct
  misc_feature 1..23: note = HLA-A targeting gRNA
  source 1..23: mol_type = other DNA
ggcacctcctgctctatccatgg

SEQ ID NO: 7037 - DNA, 23 bp, synthetic construct
  misc_feature 1..23: note = HLA-A targeting gRNA
  source 1..23: mol_type = other DNA
ggcagagaacaaggcctgagagg

SEQ ID NO: 7038 - DNA, 23 bp, synthetic construct
  misc_feature 1..23: note = HLA-A targeting gRNA
  source 1..23: mol_type = other DNA
ggcagggaaatggcctctgtagg

SEQ ID NO: 7039 - DNA, 23 bp, synthetic construct
  misc_feature 1..23: note = HLA-A targeting gRNA
  source 1..23: mol_type = other DNA
ggcagggaaatggcctctgtggg

SEQ ID NO: 7040 - DNA, 23 bp, synthetic construct
  misc_feature 1..23: note = HLA-A targeting gRNA
  source 1..23: mol_type = other DNA
ggcagggaacacttctacctggg

SEQ ID NO: 7041 - DNA, 23 bp, synthetic construct
  misc_feature 1..23: note = HLA-A targeting gRNA
  source 1..23: mol_type = other DNA
ggcagggccatgcaatcttaggg

SEQ ID NO: 7042 - DNA, 23 bp, synthetic construct
  misc_feature 1..23: note = HLA-A targeting gRNA
  source 1..23: mol_type = other DNA
ggcagggccatgcgatcttaggg

SEQ ID NO: 7043 - DNA, 23 bp, synthetic construct
  misc_feature 1..23: note = HLA-A targeting gRNA
  source 1..23: mol_type = other DNA
ggcagggccatgtgatcttaggg

SEQ ID NO: 7044 - DNA, 23 bp, synthetic construct
  misc_feature 1..23: note = HLA-A targeting gRNA
  source 1..23: mol_type = other DNA
ggcagggccatgtgattttaggg

SEQ ID NO: 7045 - DNA, 23 bp, synthetic construct
  misc_feature 1..23: note = HLA-A targeting gRNA
  source 1..23: mol_type = other DNA
ggcaggtctgggggtgggtgggg

SEQ ID NO: 7046 - DNA, 23 bp, synthetic construct
  misc_feature 1..23: note = HLA-A targeting gRNA
  source 1..23: mol_type = other DNA
ggcatggcctcccacgaggaggg

SEQ ID NO: 7047 - DNA, 23 bp, synthetic construct
  misc_feature 1..23: note = HLA-A targeting gRNA
  source 1..23: mol_type = other DNA
ggccaaaatccccgcgggttggg

SEQ ID NO: 7048 - DNA, 23 bp, synthetic construct
  misc_feature 1..23: note = HLA-A targeting gRNA
  source 1..23: mol_type = other DNA
ggccagggtctcacatcatccgg

SEQ ID NO: 7049 - DNA, 23 bp, synthetic construct
  misc_feature 1..23: note = HLA-A targeting gRNA
  source 1..23: mol_type = other DNA
ggccagggtctcacatccagagg

SEQ ID NO: 7050 - DNA, 23 bp, synthetic construct
  misc_feature 1..23: note = HLA-A targeting gRNA
  source 1..23: mol_type = other DNA
ggccatccccggcgacctatagg

SEQ ID NO: 7051 - DNA, 23 bp, synthetic construct
  misc_feature 1..23: note = HLA-A targeting gRNA
  source 1..23: mol_type = other DNA
ggccatcccgggagatctacagg

SEQ ID NO: 7052 - DNA, 23 bp, synthetic construct
  misc_feature 1..23: note = HLA-A targeting gRNA
  source 1..23: mol_type = other DNA
ggccatcccgggagatctacggg

SEQ ID NO: 7053 - DNA, 23 bp, synthetic construct
  misc_feature 1..23: note = HLA-A targeting gRNA
  source 1..23: mol_type = other DNA
ggccatcccgggagatctatagg

SEQ ID NO: 7054 - DNA, 23 bp, synthetic construct
  misc_feature 1..23: note = HLA-A targeting gRNA
  source 1..23: mol_type = other DNA
ggccatcccgggcgatctatagg

SEQ ID NO: 7055 - DNA, 23 bp, synthetic construct
  misc_feature 1..23: note = HLA-A targeting gRNA
  source 1..23: mol_type = other DNA
ggccatgccgggagatctacggg

SEQ ID NO: 7056 - DNA, 23 bp, synthetic construct
  misc_feature 1..23: note = HLA-A targeting gRNA
  source 1..23: mol_type = other DNA
ggccatgggcttctaccctgcgg

SEQ ID NO: 7057 - DNA, 23 bp, synthetic construct
  misc_feature 1..23: note = HLA-A targeting gRNA
  source 1..23: mol_type = other DNA
ggccccgggcggggctctcaggg

SEQ ID NO: 7058 - DNA, 23 bp, synthetic construct
  misc_feature 1..23: note = HLA-A targeting gRNA
  source 1..23: mol_type = other DNA
ggcccctcctgctccacccacgg

SEQ ID NO: 7059 - DNA, 23 bp, synthetic construct
  misc_feature 1..23: note = HLA-A targeting gRNA
  source 1..23: mol_type = other DNA
ggcccctcctgctccatccacgg

SEQ ID NO: 7060 - DNA, 23 bp, synthetic construct
  misc_feature 1..23: note = HLA-A targeting gRNA
  source 1..23: mol_type = other DNA
ggcccctcctgctctatccaggg

SEQ ID NO: 7061 - DNA, 23 bp, synthetic construct
  misc_feature 1..23: note = HLA-A targeting gRNA
  source 1..23: mol_type = other DNA
ggcccctcctgctctatccatgg

SEQ ID NO: 7062 - DNA, 23 bp, synthetic construct
  misc_feature 1..23: note = HLA-A targeting gRNA
  source 1..23: mol_type = other DNA
ggcccctccttctccacccacgg

SEQ ID NO: 7063 - DNA, 23 bp, synthetic construct
  misc_feature 1..23: note = HLA-A targeting gRNA
  source 1..23: mol_type = other DNA
ggcccctcttgctctatccacgg

SEQ ID NO: 7064 - DNA, 23 bp, synthetic construct
  misc_feature 1..23: note = HLA-A targeting gRNA
  source 1..23: mol_type = other DNA
ggcccctcttgctctatccatgg

SEQ ID NO: 7065 - DNA, 23 bp, synthetic construct
  misc_feature 1..23: note = HLA-A targeting gRNA
  source 1..23: mol_type = other DNA
ggcccgcccggcgagggcgcagg

SEQ ID NO: 7066 - DNA, 23 bp, synthetic construct
  misc_feature 1..23: note = HLA-A targeting gRNA
  source 1..23: mol_type = other DNA
ggccctcccggcgagggcgcagg

SEQ ID NO: 7067 - DNA, 23 bp, synthetic construct
  misc_feature 1..23: note = HLA-A targeting gRNA
  source 1..23: mol_type = other DNA
ggccctgaccgagacctgggcgg

SEQ ID NO: 7068 - DNA, 23 bp, synthetic construct
  misc_feature 1..23: note = HLA-A targeting gRNA
  source 1..23: mol_type = other DNA
ggccctgggaaaggaggggaagg

SEQ ID NO: 7069 - DNA, 23 bp, synthetic construct
  misc_feature 1..23: note = HLA-A targeting gRNA
  source 1..23: mol_type = other DNA
ggccctgggcttctaccctacgg

SEQ ID NO: 7070 - DNA, 23 bp, synthetic construct
  misc_feature 1..23: note = HLA-A targeting gRNA
  source 1..23: mol_type = other DNA
ggccctgggcttctaccctgggg

SEQ ID NO: 7071 - DNA, 23 bp, synthetic construct
  misc_feature 1..23: note = HLA-A targeting gRNA
  source 1..23: mol_type = other DNA
ggccctgggcttctaccctgtgg

SEQ ID NO: 7072 - DNA, 23 bp, synthetic construct
  misc_feature 1..23: note = HLA-A targeting gRNA
  source 1..23: mol_type = other DNA
ggccctgggtttctaccctgcgg

SEQ ID NO: 7073 - DNA, 23 bp, synthetic construct
  misc_feature 1..23: note = HLA-A targeting gRNA
  source 1..23: mol_type = other DNA
ggccctgggtttctaccctgtgg

SEQ ID NO: 7074 - DNA, 23 bp, synthetic construct
  misc_feature 1..23: note = HLA-A targeting gRNA
  source 1..23: mol_type = other DNA
ggccctgtgcttctaccctgcgg

SEQ ID NO: 7075 - DNA, 23 bp, synthetic construct
  misc_feature 1..23: note = HLA-A targeting gRNA
  source 1..23: mol_type = other DNA
ggccgcctccaacttgcgctggg

SEQ ID NO: 7076 - DNA, 23 bp, synthetic construct
  misc_feature 1..23: note = HLA-A targeting gRNA
  source 1..23: mol_type = other DNA
ggccgcctccaacttgggctggg

SEQ ID NO: 7077 - DNA, 23 bp, synthetic construct
  misc_feature 1..23: note = HLA-A targeting gRNA
  source 1..23: mol_type = other DNA
ggccgcctccaacttgtgctggg

SEQ ID NO: 7078 - DNA, 23 bp, synthetic construct
  misc_feature 1..23: note = HLA-A targeting gRNA
  source 1..23: mol_type = other DNA
ggccgcctcccacttacgctggg

SEQ ID NO: 7079 - DNA, 23 bp, synthetic construct
  misc_feature 1..23: note = HLA-A targeting gRNA
  source 1..23: mol_type = other DNA
ggccgcctcccacttgagctggg

SEQ ID NO: 7080 - DNA, 23 bp, synthetic construct
  misc_feature 1..23: note = HLA-A targeting gRNA
  source 1..23: mol_type = other DNA
ggccgcctcccacttgggctggg

SEQ ID NO: 7081 - DNA, 23 bp, synthetic construct
  misc_feature 1..23: note = HLA-A targeting gRNA
  source 1..23: mol_type = other DNA
ggccgcctcccatttgcgctggg

SEQ ID NO: 7082 - DNA, 23 bp, synthetic construct
  misc_feature 1..23: note = HLA-A targeting gRNA
  source 1..23: mol_type = other DNA
ggcctcagggaggcggatctcgg

SEQ ID NO: 7083 - DNA, 23 bp, synthetic construct
  misc_feature 1..23: note = HLA-A targeting gRNA
  source 1..23: mol_type = other DNA
ggcctcaggggggcggatctcgg

SEQ ID NO: 7084 - DNA, 23 bp, synthetic construct
  misc_feature 1..23: note = HLA-A targeting gRNA
  source 1..23: mol_type = other DNA
ggcctcaggggggtggatctcgg

SEQ ID NO: 7085 - DNA, 23 bp, synthetic construct
  misc_feature 1..23: note = HLA-A targeting gRNA
  source 1..23: mol_type = other DNA
ggcctcagggggtcggatctcgg

SEQ ID NO: 7086 - DNA, 23 bp, synthetic construct
  misc_feature 1..23: note = HLA-A targeting gRNA
  source 1..23: mol_type = other DNA
ggcctcccgagagcagcaggagg

SEQ ID NO: 7087 - DNA, 23 bp, synthetic construct
  misc_feature 1..23: note = HLA-A targeting gRNA
  source 1..23: mol_type = other DNA
ggcctctatggagaggagcgagg

SEQ ID NO: 7088 - DNA, 23 bp, synthetic construct
  misc_feature 1..23: note = HLA-A targeting gRNA
  source 1..23: mol_type = other DNA
ggcctctgccgggaggagcgagg

SEQ ID NO: 7089 - DNA, 23 bp, synthetic construct
  misc_feature 1..23: note = HLA-A targeting gRNA
  source 1..23: mol_type = other DNA
ggcctctgcggagaggaacgagg

SEQ ID NO: 7090 - DNA, 23 bp, synthetic construct
  misc_feature 1..23: note = HLA-A targeting gRNA
  source 1..23: mol_type = other DNA
ggcctctgcggagaggagcgagg

SEQ ID NO: 7091 - DNA, 23 bp, synthetic construct
  misc_feature 1..23: note = HLA-A targeting gRNA
  source 1..23: mol_type = other DNA
ggcctctgcggagaggagggagg

SEQ ID NO: 7092 - DNA, 23 bp, synthetic construct
  misc_feature 1..23: note = HLA-A targeting gRNA
  source 1..23: mol_type = other DNA
ggcctctgctgagaggagcgagg

SEQ ID NO: 7093 - DNA, 23 bp, synthetic construct
  misc_feature 1..23: note = HLA-A targeting gRNA
  source 1..23: mol_type = other DNA
ggcctctggggagaggagcgagg

SEQ ID NO: 7094 - DNA, 23 bp, synthetic construct
  misc_feature 1..23: note = HLA-A targeting gRNA
  source 1..23: mol_type = other DNA
ggcctctgtagggaggagcaagg

SEQ ID NO: 7095 - DNA, 23 bp, synthetic construct
  misc_feature 1..23: note = HLA-A targeting gRNA
  source 1..23: mol_type = other DNA
ggcctctgtggggaggagagagg

SEQ ID NO: 7096 - DNA, 23 bp, synthetic construct
  misc_feature 1..23: note = HLA-A targeting gRNA
  source 1..23: mol_type = other DNA
ggcctctgtggggaggagcgagg

SEQ ID NO: 7097 - DNA, 23 bp, synthetic construct
  misc_feature 1..23: note = HLA-A targeting gRNA
  source 1..23: mol_type = other DNA
ggcgaccccggccgtacgtgggg

SEQ ID NO: 7098 - DNA, 23 bp, synthetic construct
  misc_feature 1..23: note = HLA-A targeting gRNA
  source 1..23: mol_type = other DNA
ggcgacccgggccgtacgtgggg

SEQ ID NO: 7099 - DNA, 23 bp, synthetic construct
  misc_feature 1..23: note = HLA-A targeting gRNA
  source 1..23: mol_type = other DNA
ggcgacccgggccgtccgtgggg

SEQ ID NO: 7100 - DNA, 23 bp, synthetic construct
  misc_feature 1..23: note = HLA-A targeting gRNA
  source 1..23: mol_type = other DNA
ggcgccatggatagagcaagagg

SEQ ID NO: 7101 - DNA, 23 bp, synthetic construct
  misc_feature 1..23: note = HLA-A targeting gRNA
  source 1..23: mol_type = other DNA
ggcgccatggatagagcaggagg

SEQ ID NO: 7102 - DNA, 23 bp, synthetic construct
  misc_feature 1..23: note = HLA-A targeting gRNA
  source 1..23: mol_type = other DNA
ggcgcccagggcgccatcctcgg

SEQ ID NO: 7103 - DNA, 23 bp, synthetic construct
  misc_feature 1..23: note = HLA-A targeting gRNA
  source 1..23: mol_type = other DNA
ggcgcccagggctccgtcctcgg

SEQ ID NO: 7104 - DNA, 23 bp, synthetic construct
  misc_feature 1..23: note = HLA-A targeting gRNA
  source 1..23: mol_type = other DNA
ggcgcccgcggctcccccctcgg

SEQ ID NO: 7105 - DNA, 23 bp, synthetic construct
  misc_feature 1..23: note = HLA-A targeting gRNA
  source 1..23: mol_type = other DNA
ggcgcccgcggctcccctctcgg

SEQ ID NO: 7106 - DNA, 23 bp, synthetic construct
  misc_feature 1..23: note = HLA-A targeting gRNA
  source 1..23: mol_type = other DNA
ggcgcccgcggctcccctcttgg

SEQ ID NO: 7107 - DNA, 23 bp, synthetic construct
  misc_feature 1..23: note = HLA-A targeting gRNA
  source 1..23: mol_type = other DNA
ggcgcccgcggctcctctctcgg

SEQ ID NO: 7108 - DNA, 23 bp, synthetic construct
  misc_feature 1..23: note = HLA-A targeting gRNA
  source 1..23: mol_type = other DNA
ggcgcccgcggctccttcctcgg

SEQ ID NO: 7109 - DNA, 23 bp, synthetic construct
  misc_feature 1..23: note = HLA-A targeting gRNA
  source 1..23: mol_type = other DNA
ggcgcccggggcgccatcctcgg

SEQ ID NO: 7110 - DNA, 23 bp, synthetic construct
  misc_feature 1..23: note = HLA-A targeting gRNA
  source 1..23: mol_type = other DNA
ggcgcccggggctccatcctcgg

SEQ ID NO: 7111 - DNA, 23 bp, synthetic construct
  misc_feature 1..23: note = HLA-A targeting gRNA
  source 1..23: mol_type = other DNA
ggcgcccggggctcccctctcgg

SEQ ID NO: 7112 - DNA, 23 bp, synthetic construct
  misc_feature 1..23: note = HLA-A targeting gRNA
  source 1..23: mol_type = other DNA
ggcgcccggggctccgtcctcgg

SEQ ID NO: 7113 - DNA, 23 bp, synthetic construct
  misc_feature 1..23: note = HLA-A targeting gRNA
  source 1..23: mol_type = other DNA
ggcgccctggatagagcaggagg

SEQ ID NO: 7114 - DNA, 23 bp, synthetic construct
  misc_feature 1..23: note = HLA-A targeting gRNA
  source 1..23: mol_type = other DNA
ggcgccgtggatagagcaagagg

SEQ ID NO: 7115 - DNA, 23 bp, synthetic construct
  misc_feature 1..23: note = HLA-A targeting gRNA
  source 1..23: mol_type = other DNA
ggcgccgtgggtggagaaggagg

SEQ ID NO: 7116 - DNA, 23 bp, synthetic construct
  misc_feature 1..23: note = HLA-A targeting gRNA
  source 1..23: mol_type = other DNA
ggcgccgtgggtggagcaggagg

SEQ ID NO: 7117 - DNA, 23 bp, synthetic construct
  misc_feature 1..23: note = HLA-A targeting gRNA
  source 1..23: mol_type = other DNA
ggcgcctgcggctcccctcttgg

SEQ ID NO: 7118 - DNA, 23 bp, synthetic construct
  misc_feature 1..23: note = HLA-A targeting gRNA
  source 1..23: mol_type = other DNA
ggcgcggtggatagagcaggagg

SEQ ID NO: 7119 - DNA, 23 bp, synthetic construct
  misc_feature 1..23: note = HLA-A targeting gRNA
  source 1..23: mol_type = other DNA
ggcggcccgtatggcggagcagg

SEQ ID NO: 7120 - DNA, 23 bp, synthetic construct
  misc_feature 1..23: note = HLA-A targeting gRNA
  source 1..23: mol_type = other DNA
ggcggcccgtgcggcggagcagg

SEQ ID NO: 7121 - DNA, 23 bp, synthetic construct
  misc_feature 1..23: note = HLA-A targeting gRNA
  source 1..23: mol_type = other DNA
ggcggcccgtgtggcggagcagg

SEQ ID NO: 7122 - DNA, 23 bp, synthetic construct
  misc_feature 1..23: note = HLA-A targeting gRNA
  source 1..23: mol_type = other DNA
ggcggggcacacttctacctggg

SEQ ID NO: 7123 - DNA, 23 bp, synthetic construct
  misc_feature 1..23: note = HLA-A targeting gRNA
  source 1..23: mol_type = other DNA
ggcggggcggggcggggccgggg

SEQ ID NO: 7124 - DNA, 23 bp, synthetic construct
  misc_feature 1..23: note = HLA-A targeting gRNA
  source 1..23: mol_type = other DNA
ggcggggcggggcggggctcggg

SEQ ID NO: 7125 - DNA, 23 bp, synthetic construct
  misc_feature 1..23: note = HLA-A targeting gRNA
  source 1..23: mol_type = other DNA
ggcggggctctcagggtctcagg

SEQ ID NO: 7126 - DNA, 23 bp, synthetic construct
  misc_feature 1..23: note = HLA-A targeting gRNA
  source 1..23: mol_type = other DNA
ggcggggggggggtggggtgggg

SEQ ID NO: 7127 - DNA, 23 bp, synthetic construct
  misc_feature 1..23: note = HLA-A targeting gRNA
  source 1..23: mol_type = other DNA
ggcggggttctcagggtctcagg

SEQ ID NO: 7128 - DNA, 23 bp, synthetic construct
  misc_feature 1..23: note = HLA-A targeting gRNA
  source 1..23: mol_type = other DNA
ggcgggtcccgcggcctcagggg

SEQ ID NO: 7129 - DNA, 23 bp, synthetic construct
  misc_feature 1..23: note = HLA-A targeting gRNA
  source 1..23: mol_type = other DNA
ggcgggtcccgcggcctcggggg

SEQ ID NO: 7130 - DNA, 23 bp, synthetic construct
  misc_feature 1..23: note = HLA-A targeting gRNA
  source 1..23: mol_type = other DNA
ggcgggtctggggcggggtgggg

SEQ ID NO: 7131 - DNA, 23 bp, synthetic construct
  misc_feature 1..23: note = HLA-A targeting gRNA
  source 1..23: mol_type = other DNA
ggcgggtctgggggggggggggg

SEQ ID NO: 7132 - DNA, 23 bp, synthetic construct
  misc_feature 1..23: note = HLA-A targeting gRNA
  source 1..23: mol_type = other DNA
ggcgggtctgggggtgggtgggg

SEQ ID NO: 7133 - DNA, 23 bp, synthetic construct
  misc_feature 1..23: note = HLA-A targeting gRNA
  source 1..23: mol_type = other DNA
ggcggtgtagaaatacctcaagg

SEQ ID NO: 7134 - DNA, 23 bp, synthetic construct
  misc_feature 1..23: note = HLA-A targeting gRNA
  source 1..23: mol_type = other DNA
ggcggtgtagaaatacctcatgg

SEQ ID NO: 7135 - DNA, 23 bp, synthetic construct
  misc_feature 1..23: note = HLA-A targeting gRNA
  source 1..23: mol_type = other DNA
ggcggtgtagaaatacttcatgg

SEQ ID NO: 7136 - DNA, 23 bp, synthetic construct
  misc_feature 1..23: note = HLA-A targeting gRNA
  source 1..23: mol_type = other DNA
ggcggtgtcgaaatacctcatgg

SEQ ID NO: 7137 - DNA, 23 bp, synthetic construct
  misc_feature 1..23: note = HLA-A targeting gRNA
  source 1..23: mol_type = other DNA
ggcggtgtggaaatacctcatgg

SEQ ID NO: 7138 - DNA, 23 bp, synthetic construct
  misc_feature 1..23: note = HLA-A targeting gRNA
  source 1..23: mol_type = other DNA
ggcgtctctgaggaaatggaggg

SEQ ID NO: 7139 - DNA, 23 bp, synthetic construct
  misc_feature 1..23: note = HLA-A targeting gRNA
  source 1..23: mol_type = other DNA
ggctacaaccagagcgaggccgg

SEQ ID NO: 7140 - DNA, 23 bp, synthetic construct
  misc_feature 1..23: note = HLA-A targeting gRNA
  source 1..23: mol_type = other DNA
ggctcccatctcagggtgagggg

SEQ ID NO: 7141 - DNA, 23 bp, synthetic construct
  misc_feature 1..23: note = HLA-A targeting gRNA
  source 1..23: mol_type = other DNA
ggctcccctctcggactcgcggg

SEQ ID NO: 7142 - DNA, 23 bp, synthetic construct
  misc_feature 1..23: note = HLA-A targeting gRNA
  source 1..23: mol_type = other DNA
ggctccccttctcggactcgcgg

SEQ ID NO: 7143 - DNA, 23 bp, synthetic construct
  misc_feature 1..23: note = HLA-A targeting gRNA
  source 1..23: mol_type = other DNA
ggctcccgcggctcccctcttgg

SEQ ID NO: 7144 - DNA, 23 bp, synthetic construct
  misc_feature 1..23: note = HLA-A targeting gRNA
  source 1..23: mol_type = other DNA
ggctcccggggctccgtcctcgg

SEQ ID NO: 7145 - DNA, 23 bp, synthetic construct
  misc_feature 1..23: note = HLA-A targeting gRNA
  source 1..23: mol_type = other DNA
ggctctgggaaaagaggagaagg

SEQ ID NO: 7146 - DNA, 23 bp, synthetic construct
  misc_feature 1..23: note = HLA-A targeting gRNA
  source 1..23: mol_type = other DNA
ggctctgggaaaggaggagaagg

SEQ ID NO: 7147 - DNA, 23 bp, synthetic construct
  misc_feature 1..23: note = HLA-A targeting gRNA
  source 1..23: mol_type = other DNA
ggctctgggaaaggaggggaagg

SEQ ID NO: 7148 - DNA, 23 bp, synthetic construct
  misc_feature 1..23: note = HLA-A targeting gRNA
  source 1..23: mol_type = other DNA
ggctgcaacctggggcccgacgg

SEQ ID NO: 7149 - DNA, 23 bp, synthetic construct
  misc_feature 1..23: note = HLA-A targeting gRNA
  source 1..23: mol_type = other DNA
ggctgcctcccacttgcgctggg

SEQ ID NO: 7150 - DNA, 23 bp, synthetic construct
  misc_feature 1..23: note = HLA-A targeting gRNA
  source 1..23: mol_type = other DNA
ggctgcgacatggggccggacgg

SEQ ID NO: 7151 - DNA, 23 bp, synthetic construct
  misc_feature 1..23: note = HLA-A targeting gRNA
  source 1..23: mol_type = other DNA
ggctgcgacccggggcccgacgg

SEQ ID NO: 7152 - DNA, 23 bp, synthetic construct
  misc_feature 1..23: note = HLA-A targeting gRNA
  source 1..23: mol_type = other DNA
ggctgcgacctgggcccgacggg

SEQ ID NO: 7153 - DNA, 23 bp, synthetic construct
  misc_feature 1..23: note = HLA-A targeting gRNA
  source 1..23: mol_type = other DNA
ggctgcgacctggggccccacgg

SEQ ID NO: 7154 - DNA, 23 bp, synthetic construct
  misc_feature 1..23: note = HLA-A targeting gRNA
  source 1..23: mol_type = other DNA
ggctgcgacctggggcccgacgg

SEQ ID NO: 7155 - DNA, 23 bp, synthetic construct
  misc_feature 1..23: note = HLA-A targeting gRNA
  source 1..23: mol_type = other DNA
ggctgcgacctggggccctacgg

SEQ ID NO: 7156 - DNA, 23 bp, synthetic construct
  misc_feature 1..23: note = HLA-A targeting gRNA
  source 1..23: mol_type = other DNA
ggctgcgacctggggccggacgg

SEQ ID NO: 7157 - DNA, 23 bp, synthetic construct
  misc_feature 1..23: note = HLA-A targeting gRNA
  source 1..23: mol_type = other DNA
ggctgcgacctggggctcgacgg

SEQ ID NO: 7158 - DNA, 23 bp, synthetic construct
  misc_feature 1..23: note = HLA-A targeting gRNA
  source 1..23: mol_type = other DNA
ggctgcgacctgggtcccgacgg

SEQ ID NO: 7159 - DNA, 23 bp, synthetic construct
  misc_feature 1..23: note = HLA-A targeting gRNA
  source 1..23: mol_type = other DNA
ggctgcgaccttgggcccgacgg

SEQ ID NO: 7160 - DNA, 23 bp, synthetic construct
  misc_feature 1..23: note = HLA-A targeting gRNA
  source 1..23: mol_type = other DNA
ggctgcgacgtggagccggacgg

SEQ ID NO: 7161 - DNA, 23 bp, synthetic construct
  misc_feature 1..23: note = HLA-A targeting gRNA
  source 1..23: mol_type = other DNA
ggctgcgacgtggggcccgacgg

SEQ ID NO: 7162 - DNA, 23 bp, synthetic construct
  misc_feature 1..23: note = HLA-A targeting gRNA
  source 1..23: mol_type = other DNA
ggctgcgacgtggggcccggcgg

SEQ ID NO: 7163 - DNA, 23 bp, synthetic construct
  misc_feature 1..23: note = HLA-A targeting gRNA
  source 1..23: mol_type = other DNA
ggctgcgacgtggggccggatgg

SEQ ID NO: 7164 - DNA, 23 bp, synthetic construct
  misc_feature 1..23: note = HLA-A targeting gRNA
  source 1..23: mol_type = other DNA
ggctgctgcaggggtcaaagagg

SEQ ID NO: 7165 - DNA, 23 bp, synthetic construct
  misc_feature 1..23: note = HLA-A targeting gRNA
  source 1..23: mol_type = other DNA
ggctgctgcaggggtcaaagggg

SEQ ID NO: 7166 - DNA, 23 bp, synthetic construct
  misc_feature 1..23: note = HLA-A targeting gRNA
  source 1..23: mol_type = other DNA
ggctggagtagaacaaaaacagg

SEQ ID NO: 7167 - DNA, 23 bp, synthetic construct
  misc_feature 1..23: note = HLA-A targeting gRNA
  source 1..23: mol_type = other DNA
ggctgggacctggggcccgacgg

SEQ ID NO: 7168 - DNA, 23 bp, synthetic construct
  misc_feature 1..23: note = HLA-A targeting gRNA
  source 1..23: mol_type = other DNA
ggctgtcgaacctcacgaactgg

SEQ ID NO: 7169 - DNA, 23 bp, synthetic construct
  misc_feature 1..23: note = HLA-A targeting gRNA
  source 1..23: mol_type = other DNA
ggcttacatcgccctgaacgagg

SEQ ID NO: 7170 - DNA, 23 bp, synthetic construct
  misc_feature 1..23: note = HLA-A targeting gRNA
  source 1..23: mol_type = other DNA
gggaaaagaggagaaggtgaggg

SEQ ID NO: 7171 - DNA, 23 bp, synthetic construct
  misc_feature 1..23: note = HLA-A targeting gRNA
  source 1..23: mol_type = other DNA
gggaaaaggcctaggtaatgggg

SEQ ID NO: 7172 - DNA, 23 bp, synthetic construct
  misc_feature 1..23: note = HLA-A targeting gRNA
  source 1..23: mol_type = other DNA
gggaaaaggcctgggtaatgggg

SEQ ID NO: 7173 - DNA, 23 bp, synthetic construct
  misc_feature 1..23: note = HLA-A targeting gRNA
  source 1..23: mol_type = other DNA
gggaaacggcctctgcggagagg

SEQ ID NO: 7174 - DNA, 23 bp, synthetic construct
  misc_feature 1..23: note = HLA-A targeting gRNA
  source 1..23: mol_type = other DNA
gggaaacggcctctgctgagagg

SEQ ID NO: 7175 - DNA, 23 bp, synthetic construct
  misc_feature 1..23: note = HLA-A targeting gRNA
  source 1..23: mol_type = other DNA
gggaaacggcctctggggagagg

SEQ ID NO: 7176 - DNA, 23 bp, synthetic construct
  misc_feature 1..23: note = HLA-A targeting gRNA
  source 1..23: mol_type = other DNA
gggaaagcagctgtgggttctgg

SEQ ID NO: 7177 - DNA, 23 bp, synthetic construct
  misc_feature 1..23: note = HLA-A targeting gRNA
  source 1..23: mol_type = other DNA
gggaaagcagttgtgggttctgg

SEQ ID NO: 7178 - DNA, 23 bp, synthetic construct
  misc_feature 1..23: note = HLA-A targeting gRNA
  source 1..23: mol_type = other DNA
gggaaaggaagggaagatgaggg

SEQ ID NO: 7179 - DNA, 23 bp, synthetic construct
  misc_feature 1..23: note = HLA-A targeting gRNA
  source 1..23: mol_type = other DNA
gggaaaggaggagaaggtgaggg

SEQ ID NO: 7180 - DNA, 23 bp, synthetic construct
  misc_feature 1..23: note = HLA-A targeting gRNA
  source 1..23: mol_type = other DNA
gggaaaggaggggaagacgaggg

SEQ ID NO: 7181 - DNA, 23 bp, synthetic construct
  misc_feature 1..23: note = HLA-A targeting gRNA
  source 1..23: mol_type = other DNA
gggaaaggaggggaagatgaggg

SEQ ID NO: 7182 - DNA, 23 bp, synthetic construct
  misc_feature 1..23: note = HLA-A targeting gRNA
  source 1..23: mol_type = other DNA
gggaaaggaggggaaggtgaggg

SEQ ID NO: 7183 - DNA, 23 bp, synthetic construct
  misc_feature 1..23: note = HLA-A targeting gRNA
  source 1..23: mol_type = other DNA
gggaaatggcctctgccgggagg

SEQ ID NO: 7184 - DNA, 23 bp, synthetic construct
  misc_feature 1..23: note = HLA-A targeting gRNA
  source 1..23: mol_type = other DNA
gggaaatggcctctgtagggagg

SEQ ID NO: 7185 - DNA, 23 bp, synthetic construct
  misc_feature 1..23: note = HLA-A targeting gRNA
  source 1..23: mol_type = other DNA
gggaaatggcctctgtggggagg

SEQ ID NO: 7186 - DNA, 23 bp, synthetic construct
  misc_feature 1..23: note = HLA-A targeting gRNA
  source 1..23: mol_type = other DNA
gggaacctgggggcgaggagggg

SEQ ID NO: 7187 - DNA, 23 bp, synthetic construct
  misc_feature 1..23: note = HLA-A targeting gRNA
  source 1..23: mol_type = other DNA
gggaagaaaatgccctatgaggg

SEQ ID NO: 7188 - DNA, 23 bp, synthetic construct
  misc_feature 1..23: note = HLA-A targeting gRNA
  source 1..23: mol_type = other DNA
gggaagaaaatgccctgtgaggg

SEQ ID NO: 7189 - DNA, 23 bp, synthetic construct
  misc_feature 1..23: note = HLA-A targeting gRNA
  source 1..23: mol_type = other DNA
gggaagaaaatgtcctgtgaggg

SEQ ID NO: 7190 - DNA, 23 bp, synthetic construct
  misc_feature 1..23: note = HLA-A targeting gRNA
  source 1..23: mol_type = other DNA
gggaagatggctcccatctcagg

SEQ ID NO: 7191 - DNA, 23 bp, synthetic construct
  misc_feature 1..23: note = HLA-A targeting gRNA
  source 1..23: mol_type = other DNA
gggaagcaaatgtcctgtgaggg

SEQ ID NO: 7192 - DNA, 23 bp, synthetic construct
  misc_feature 1..23: note = HLA-A targeting gRNA
  source 1..23: mol_type = other DNA
gggaagcagcatccacacagggg

SEQ ID NO: 7193 - DNA, 23 bp, synthetic construct
  misc_feature 1..23: note = HLA-A targeting gRNA
  source 1..23: mol_type = other DNA
gggaagcagcatcctcacagggg

SEQ ID NO: 7194 - DNA, 23 bp, synthetic construct
  misc_feature 1..23: note = HLA-A targeting gRNA
  source 1..23: mol_type = other DNA
gggaagcagcatgcacacagggg

SEQ ID NO: 7195 - DNA, 23 bp, synthetic construct
  misc_feature 1..23: note = HLA-A targeting gRNA
  source 1..23: mol_type = other DNA
gggaagccgcgcagggaggaggg

SEQ ID NO: 7196 - DNA, 23 bp, synthetic construct
  misc_feature 1..23: note = HLA-A targeting gRNA
  source 1..23: mol_type = other DNA
gggaagcggcctctatggagagg

SEQ ID NO: 7197 - DNA, 23 bp, synthetic construct
  misc_feature 1..23: note = HLA-A targeting gRNA
  source 1..23: mol_type = other DNA
gggaagcggcctctgcggagagg

SEQ ID NO: 7198 - DNA, 23 bp, synthetic construct
  misc_feature 1..23: note = HLA-A targeting gRNA
  source 1..23: mol_type = other DNA
gggaaggctccccactgccccgg

SEQ ID NO: 7199 - DNA, 23 bp, synthetic construct
  misc_feature 1..23: note = HLA-A targeting gRNA
  source 1..23: mol_type = other DNA
gggaatcggcctctgcggagagg

SEQ ID NO: 7200 - DNA, 23 bp, synthetic construct
  misc_feature 1..23: note = HLA-A targeting gRNA
  source 1..23: mol_type = other DNA
gggacacctggggtggggaaggg

SEQ ID NO: 7201 - DNA, 23 bp, synthetic construct
  misc_feature 1..23: note = HLA-A targeting gRNA
  source 1..23: mol_type = other DNA
gggacagtggactgggaagacgg

SEQ ID NO: 7202 - DNA, 23 bp, synthetic construct
  misc_feature 1..23: note = HLA-A targeting gRNA
  source 1..23: mol_type = other DNA
gggaccacggcgacgctgattgg

SEQ ID NO: 7203 - DNA, 23 bp, synthetic construct
  misc_feature 1..23: note = HLA-A targeting gRNA
  source 1..23: mol_type = other DNA
gggaccccggcgacactgattgg

SEQ ID NO: 7204 - DNA, 23 bp, synthetic construct
  misc_feature 1..23: note = HLA-A targeting gRNA
  source 1..23: mol_type = other DNA
gggaccccggcgacgctgattgg

SEQ ID NO: 7205 - DNA, 23 bp, synthetic construct
  misc_feature 1..23: note = HLA-A targeting gRNA
  source 1..23: mol_type = other DNA
gggaccgcaggcgggggcgcagg

SEQ ID NO: 7206 - DNA, 23 bp, synthetic construct
  misc_feature 1..23: note = HLA-A targeting gRNA
  source 1..23: mol_type = other DNA
gggaccgcaggcgggggctcagg

SEQ ID NO: 7207 - DNA, 23 bp, synthetic construct
  misc_feature 1..23: note = HLA-A targeting gRNA
  source 1..23: mol_type = other DNA
gggaccgcggcaacgctgattgg

SEQ ID NO: 7208 - DNA, 23 bp, synthetic construct
  misc_feature 1..23: note = HLA-A targeting gRNA
  source 1..23: mol_type = other DNA
gggaccgcggcgacgctgattgg

SEQ ID NO: 7209 - DNA, 23 bp, synthetic construct
  misc_feature 1..23: note = HLA-A targeting gRNA
  source 1..23: mol_type = other DNA
gggacctgcgccccgggccgggg

SEQ ID NO: 7210 - DNA, 23 bp, synthetic construct
  misc_feature 1..23: note = HLA-A targeting gRNA
  source 1..23: mol_type = other DNA
gggacgcgtcacgagtatcccgg

SEQ ID NO: 7211 - DNA, 23 bp, synthetic construct
  misc_feature 1..23: note = HLA-A targeting gRNA
  source 1..23: mol_type = other DNA
gggacgcgtcacgagtatcctgg

SEQ ID NO: 7212 - DNA, 23 bp, synthetic construct
  misc_feature 1..23: note = HLA-A targeting gRNA
  source 1..23: mol_type = other DNA
gggacgcgtcatgagtattcagg

SEQ ID NO: 7213 - DNA, 23 bp, synthetic construct
  misc_feature 1..23: note = HLA-A targeting gRNA
  source 1..23: mol_type = other DNA
gggacggtggactgggaagacgg

SEQ ID NO: 7214 - DNA, 23 bp, synthetic construct
  misc_feature 1..23: note = HLA-A targeting gRNA
  source 1..23: mol_type = other DNA
gggacggtggactgggaagatgg

SEQ ID NO: 7215 - DNA, 23 bp, synthetic construct
  misc_feature 1..23: note = HLA-A targeting gRNA
  source 1..23: mol_type = other DNA
gggacggtggattgggaagatgg

SEQ ID NO: 7216 - DNA, 23 bp, synthetic construct
  misc_feature 1..23: note = HLA-A targeting gRNA
  source 1..23: mol_type = other DNA
gggacgtttcgagtgtgtggtgg

SEQ ID NO: 7217 - DNA, 23 bp, synthetic construct
  misc_feature 1..23: note = HLA-A targeting gRNA
  source 1..23: mol_type = other DNA
gggactctccgcggccgggccgg

SEQ ID NO: 7218 - DNA, 23 bp, synthetic construct
  misc_feature 1..23: note = HLA-A targeting gRNA
  source 1..23: mol_type = other DNA
gggactgcggagacgctgattgg

SEQ ID NO: 7219 - DNA, 23 bp, synthetic construct
  misc_feature 1..23: note = HLA-A targeting gRNA
  source 1..23: mol_type = other DNA
gggactgcgtagacgctgattgg

SEQ ID NO: 7220 - DNA, 23 bp, synthetic construct
  misc_feature 1..23: note = HLA-A targeting gRNA
  source 1..23: mol_type = other DNA
gggactggggcggggctcggggg

SEQ ID NO: 7221 - DNA, 23 bp, synthetic construct
  misc_feature 1..23: note = HLA-A targeting gRNA
  source 1..23: mol_type = other DNA
gggagaagaagtgaaactcaggg

SEQ ID NO: 7222 - DNA, 23 bp, synthetic construct
  misc_feature 1..23: note = HLA-A targeting gRNA
  source 1..23: mol_type = other DNA
gggagaagaagtgaaactcgtgg

SEQ ID NO: 7223 - DNA, 23 bp, synthetic construct
  misc_feature 1..23: note = HLA-A targeting gRNA
  source 1..23: mol_type = other DNA
gggagaagaagtgaaactcttgg

SEQ ID NO: 7224 - DNA, 23 bp, synthetic construct
  misc_feature 1..23: note = HLA-A targeting gRNA
  source 1..23: mol_type = other DNA
gggagaatccgagtccgggtggg

SEQ ID NO: 7225 - DNA, 23 bp, synthetic construct
  misc_feature 1..23: note = HLA-A targeting gRNA
  source 1..23: mol_type = other DNA
gggagaatctgagtccgggtggg

SEQ ID NO: 7226 - DNA, 23 bp, synthetic construct
  misc_feature 1..23: note = HLA-A targeting gRNA
  source 1..23: mol_type = other DNA
gggagaatgtgagtccgggtggg

SEQ ID NO: 7227 - DNA, 23 bp, synthetic construct
  misc_feature 1..23: note = HLA-A targeting gRNA
  source 1..23: mol_type = other DNA
gggagactgggggcgaggagggg

SEQ ID NO: 7228 - DNA, 23 bp, synthetic construct
  misc_feature 1..23: note = HLA-A targeting gRNA
  source 1..23: mol_type = other DNA
gggagactgggggtgaggagggg

SEQ ID NO: 7229 - DNA, 23 bp, synthetic construct
  misc_feature 1..23: note = HLA-A targeting gRNA
  source 1..23: mol_type = other DNA
gggagcctgggagcgaggagggg

SEQ ID NO: 7230 - DNA, 23 bp, synthetic construct
  misc_feature 1..23: note = HLA-A targeting gRNA
  source 1..23: mol_type = other DNA
gggagcctgggggagaggagggg

SEQ ID NO: 7231 - DNA, 23 bp, synthetic construct
  misc_feature 1..23: note = HLA-A targeting gRNA
  source 1..23: mol_type = other DNA
gggagcctgggggccaggagggg

SEQ ID NO: 7232 - DNA, 23 bp, synthetic construct
  misc_feature 1..23: note = HLA-A targeting gRNA
  source 1..23: mol_type = other DNA
gggagcctgggggcgaggagggg

SEQ ID NO: 7233 - DNA, 23 bp, synthetic construct
  misc_feature 1..23: note = HLA-A targeting gRNA
  source 1..23: mol_type = other DNA
gggagcctgggggtgaggagggg

SEQ ID NO: 7234 - DNA, 23 bp, synthetic construct
  misc_feature 1..23: note = HLA-A targeting gRNA
  source 1..23: mol_type = other DNA
gggagctcaggtcctcgttcagg

SEQ ID NO: 7235 - DNA, 23 bp, synthetic construct
  misc_feature 1..23: note = HLA-A targeting gRNA
  source 1..23: mol_type = other DNA
gggaggagagaggggaccgcagg

SEQ ID NO: 7236 - DNA, 23 bp, synthetic construct
  misc_feature 1..23: note = HLA-A targeting gRNA
  source 1..23: mol_type = other DNA
gggaggagcaaggggaccgcagg

SEQ ID NO: 7237 - DNA, 23 bp, synthetic construct
  misc_feature 1..23: note = HLA-A targeting gRNA
  source 1..23: mol_type = other DNA
gggaggagcgaggggaccgcagg

SEQ ID NO: 7238 - DNA, 23 bp, synthetic construct
  misc_feature 1..23: note = HLA-A targeting gRNA
  source 1..23: mol_type = other DNA
gggaggctgggggcgaggagggg

SEQ ID NO: 7239 - DNA, 23 bp, synthetic construct
  misc_feature 1..23: note = HLA-A targeting gRNA
  source 1..23: mol_type = other DNA
gggagggaaatggcctctgccgg

SEQ ID NO: 7240 - DNA, 23 bp, synthetic construct
  misc_feature 1..23: note = HLA-A targeting gRNA
  source 1..23: mol_type = other DNA
gggagggaaatggcctctgtggg

SEQ ID NO: 7241 - DNA, 23 bp, synthetic construct
  misc_feature 1..23: note = HLA-A targeting gRNA
  source 1..23: mol_type = other DNA
gggagggcctgtgcgtggagtgg

SEQ ID NO: 7242 - DNA, 23 bp, synthetic construct
  misc_feature 1..23: note = HLA-A targeting gRNA
  source 1..23: mol_type = other DNA
gggaggggccctcccggcgaggg

SEQ ID NO: 7243 - DNA, 23 bp, synthetic construct
  misc_feature 1..23: note = HLA-A targeting gRNA
  source 1..23: mol_type = other DNA
gggagggggcagagggggaaagg

SEQ ID NO: 7244 - DNA, 23 bp, synthetic construct
  misc_feature 1..23: note = HLA-A targeting gRNA
  source 1..23: mol_type = other DNA
gggagtcgtgacctgcgccccgg

SEQ ID NO: 7245 - DNA, 23 bp, synthetic construct
  misc_feature 1..23: note = HLA-A targeting gRNA
  source 1..23: mol_type = other DNA
gggatgcagcatccacacagggg

SEQ ID NO: 7246 - DNA, 23 bp, synthetic construct
  misc_feature 1..23: note = HLA-A targeting gRNA
  source 1..23: mol_type = other DNA
gggatgcgtcacgagtatcctgg

SEQ ID NO: 7247 - DNA, 23 bp, synthetic construct
  misc_feature 1..23: note = HLA-A targeting gRNA
  source 1..23: mol_type = other DNA
gggatggcctcccacgaggaagg

SEQ ID NO: 7248 - DNA, 23 bp, synthetic construct
  misc_feature 1..23: note = HLA-A targeting gRNA
  source 1..23: mol_type = other DNA
gggatggcctcccacgaggaggg

SEQ ID NO: 7249 - DNA, 23 bp, synthetic construct
  misc_feature 1..23: note = HLA-A targeting gRNA
  source 1..23: mol_type = other DNA
gggatggccttccacgaggaggg

SEQ ID NO: 7250 - DNA, 23 bp, synthetic construct
  misc_feature 1..23: note = HLA-A targeting gRNA
  source 1..23: mol_type = other DNA
gggatggtaggctgggaagatgg

SEQ ID NO: 7251 - DNA, 23 bp, synthetic construct
  misc_feature 1..23: note = HLA-A targeting gRNA
  source 1..23: mol_type = other DNA
gggatggtggactgggaagacgg

SEQ ID NO: 7252 - DNA, 23 bp, synthetic construct
  misc_feature 1..23: note = HLA-A targeting gRNA
  source 1..23: mol_type = other DNA
gggatggtggactgggaagatgg

SEQ ID NO: 7253 - DNA, 23 bp, synthetic construct
  misc_feature 1..23: note = HLA-A targeting gRNA
  source 1..23: mol_type = other DNA
gggatgttacgcgtgtgtggtgg

SEQ ID NO: 7254 - DNA, 23 bp, synthetic construct
  misc_feature 1..23: note = HLA-A targeting gRNA
  source 1..23: mol_type = other DNA
gggatgtttcgcgtgtgtcgtgg

SEQ ID NO: 7255 - DNA, 23 bp, synthetic construct
  misc_feature 1..23: note = HLA-A targeting gRNA
  source 1..23: mol_type = other DNA
gggatgtttcgcgtgtgtgatgg

SEQ ID NO: 7256 - DNA, 23 bp, synthetic construct
  misc_feature 1..23: note = HLA-A targeting gRNA
  source 1..23: mol_type = other DNA
gggatgtttcgcgtgtgtggtgg

SEQ ID NO: 7257 - DNA, 23 bp, synthetic construct
  misc_feature 1..23: note = HLA-A targeting gRNA
  source 1..23: mol_type = other DNA
gggcagagggggaaaggcctggg

SEQ ID NO: 7258 - DNA, 23 bp, synthetic construct
  misc_feature 1..23: note = HLA-A targeting gRNA
  source 1..23: mol_type = other DNA
gggcaggatcaggaaacacaagg

SEQ ID NO: 7259 - DNA, 23 bp, synthetic construct
  misc_feature 1..23: note = HLA-A targeting gRNA
  source 1..23: mol_type = other DNA
gggcaggatcaggaaacacaggg

SEQ ID NO: 7260 - DNA, 23 bp, synthetic construct
  misc_feature 1..23: note = HLA-A targeting gRNA
  source 1..23: mol_type = other DNA
gggcaggatcaggaaacacgagg

SEQ ID NO: 7261 - DNA, 23 bp, synthetic construct
  misc_feature 1..23: note = HLA-A targeting gRNA
  source 1..23: mol_type = other DNA
gggcaggatcaggaaacacgggg

SEQ ID NO: 7262 - DNA, 23 bp, synthetic construct
  misc_feature 1..23: note = HLA-A targeting gRNA
  source 1..23: mol_type = other DNA
gggcaggatcaggaaacatgggg

SEQ ID NO: 7263 - DNA, 23 bp, synthetic construct
  misc_feature 1..23: note = HLA-A targeting gRNA
  source 1..23: mol_type = other DNA
gggcattttcttcccacaggtgg

SEQ ID NO: 7264 - DNA, 23 bp, synthetic construct
  misc_feature 1..23: note = HLA-A targeting gRNA
  source 1..23: mol_type = other DNA
gggccccccagagcagcaggagg

SEQ ID NO: 7265 - DNA, 23 bp, synthetic construct
  misc_feature 1..23: note = HLA-A targeting gRNA
  source 1..23: mol_type = other DNA
gggccctgggcttctaccctggg

SEQ ID NO: 7266 - DNA, 23 bp, synthetic construct
  misc_feature 1..23: note = HLA-A targeting gRNA
  source 1..23: mol_type = other DNA
gggccgccgagagcagcaggagg

SEQ ID NO: 7267 - DNA, 23 bp, synthetic construct
  misc_feature 1..23: note = HLA-A targeting gRNA
  source 1..23: mol_type = other DNA
gggccgcctccaacttgcgctgg

SEQ ID NO: 7268 - DNA, 23 bp, synthetic construct
  misc_feature 1..23: note = HLA-A targeting gRNA
  source 1..23: mol_type = other DNA
gggccgcctccaacttgggctgg

SEQ ID NO: 7269 - DNA, 23 bp, synthetic construct
  misc_feature 1..23: note = HLA-A targeting gRNA
  source 1..23: mol_type = other DNA
gggccgcctccaacttgtgctgg

SEQ ID NO: 7270 - DNA, 23 bp, synthetic construct
  misc_feature 1..23: note = HLA-A targeting gRNA
  source 1..23: mol_type = other DNA
gggccgcctcccacttacgctgg

SEQ ID NO: 7271 - DNA, 23 bp, synthetic construct
  misc_feature 1..23: note = HLA-A targeting gRNA
  source 1..23: mol_type = other DNA
gggccgcctcccacttgagctgg

SEQ ID NO: 7272 - DNA, 23 bp, synthetic construct
  misc_feature 1..23: note = HLA-A targeting gRNA
  source 1..23: mol_type = other DNA
gggccgcctcccacttgggctgg

SEQ ID NO: 7273 - DNA, 23 bp, synthetic construct
  misc_feature 1..23: note = HLA-A targeting gRNA
  source 1..23: mol_type = other DNA
gggccgcctcccatttgcgctgg

SEQ ID NO: 7274 - DNA, 23 bp, synthetic construct
  misc_feature 1..23: note = HLA-A targeting gRNA
  source 1..23: mol_type = other DNA
gggccgcgtctgcaatggggagg

SEQ ID NO: 7275 - DNA, 23 bp, synthetic construct
  misc_feature 1..23: note = HLA-A targeting gRNA
  source 1..23: mol_type = other DNA
gggccgcgtctgcattggggagg

SEQ ID NO: 7276 - DNA, 23 bp, synthetic construct
  misc_feature 1..23: note = HLA-A targeting gRNA
  source 1..23: mol_type = other DNA
gggccggtgagtgcgggatcggg

SEQ ID NO: 7277 - DNA, 23 bp, synthetic construct
  misc_feature 1..23: note = HLA-A targeting gRNA
  source 1..23: mol_type = other DNA
gggccggtgagtgcggggtcggg

SEQ ID NO: 7278 - DNA, 23 bp, synthetic construct
  misc_feature 1..23: note = HLA-A targeting gRNA
  source 1..23: mol_type = other DNA
gggccggtgagtgcggggttggg

SEQ ID NO: 7279 - DNA, 23 bp, synthetic construct
  misc_feature 1..23: note = HLA-A targeting gRNA
  source 1..23: mol_type = other DNA
gggccgtgtctgcactggggagg

SEQ ID NO: 7280 - DNA, 23 bp, synthetic construct
  misc_feature 1..23: note = HLA-A targeting gRNA
  source 1..23: mol_type = other DNA
gggccgtgtctgcattggggagg

SEQ ID NO: 7281 - DNA, 23 bp, synthetic construct
  misc_feature 1..23: note = HLA-A targeting gRNA
  source 1..23: mol_type = other DNA
gggcctgtgagtgcgaggttggg

SEQ ID NO: 7282 - DNA, 23 bp, synthetic construct
  misc_feature 1..23: note = HLA-A targeting gRNA
  source 1..23: mol_type = other DNA
gggcctgtgagtgcggggttagg

SEQ ID NO: 7283 - DNA, 23 bp, synthetic construct
  misc_feature 1..23: note = HLA-A targeting gRNA
  source 1..23: mol_type = other DNA
gggcctgtgagtgcggggttggg

SEQ ID NO: 7284 - DNA, 23 bp, synthetic construct
  misc_feature 1..23: note = HLA-A targeting gRNA
  source 1..23: mol_type = other DNA
gggcgaccccggccgtacgtggg

SEQ ID NO: 7285 - DNA, 23 bp, synthetic construct
  misc_feature 1..23: note = HLA-A targeting gRNA
  source 1..23: mol_type = other DNA
gggcgacccgggccgtacgtggg

SEQ ID NO: 7286 - DNA, 23 bp, synthetic construct
  misc_feature 1..23: note = HLA-A targeting gRNA
  source 1..23: mol_type = other DNA
gggcgacccgggccgtccgtggg

SEQ ID NO: 7287 - DNA, 23 bp, synthetic construct
  misc_feature 1..23: note = HLA-A targeting gRNA
  source 1..23: mol_type = other DNA
gggcgccatcctcggactcgcgg

SEQ ID NO: 7288 - DNA, 23 bp, synthetic construct
  misc_feature 1..23: note = HLA-A targeting gRNA
  source 1..23: mol_type = other DNA
gggcgccatcctcggactcgtgg

SEQ ID NO: 7289 - DNA, 23 bp, synthetic construct
  misc_feature 1..23: note = HLA-A targeting gRNA
  source 1..23: mol_type = other DNA
gggcgccatgaccagcatctcgg

SEQ ID NO: 7290 - DNA, 23 bp, synthetic construct
  misc_feature 1..23: note = HLA-A targeting gRNA
  source 1..23: mol_type = other DNA
gggcgccatgaccagcatcttgg

SEQ ID NO: 7291 - DNA, 23 bp, synthetic construct
  misc_feature 1..23: note = HLA-A targeting gRNA
  source 1..23: mol_type = other DNA
gggcgccatgacccgcatctcgg

SEQ ID NO: 7292 - DNA, 23 bp, synthetic construct
  misc_feature 1..23: note = HLA-A targeting gRNA
  source 1..23: mol_type = other DNA
gggcgccgtgacccgcatctcgg

SEQ ID NO: 7293 - DNA, 23 bp, synthetic construct
  misc_feature 1..23: note = HLA-A targeting gRNA
  source 1..23: mol_type = other DNA
gggcgccgtgggtggaggagggg

SEQ ID NO: 7294 - DNA, 23 bp, synthetic construct
  misc_feature 1..23: note = HLA-A targeting gRNA
  source 1..23: mol_type = other DNA
gggcgcctcctccgcgggtatgg

SEQ ID NO: 7295 - DNA, 23 bp, synthetic construct
  misc_feature 1..23: note = HLA-A targeting gRNA
  source 1..23: mol_type = other DNA
gggcggattccgcagcctcgggg

SEQ ID NO: 7296 - DNA, 23 bp, synthetic construct
  misc_feature 1..23: note = HLA-A targeting gRNA
  source 1..23: mol_type = other DNA
gggcggggcggggcggggccggg

SEQ ID NO: 7297 - DNA, 23 bp, synthetic construct
  misc_feature 1..23: note = HLA-A targeting gRNA
  source 1..23: mol_type = other DNA
gggcggggcggggcggggctcgg

SEQ ID NO: 7298 - DNA, 23 bp, synthetic construct
  misc_feature 1..23: note = HLA-A targeting gRNA
  source 1..23: mol_type = other DNA
gggcggggctcggggggacgggg

SEQ ID NO: 7299 - DNA, 23 bp, synthetic construct
  misc_feature 1..23: note = HLA-A targeting gRNA
  source 1..23: mol_type = other DNA
gggcggggctcggggggactggg

SEQ ID NO: 7300 - DNA, 23 bp, synthetic construct
  misc_feature 1..23: note = HLA-A targeting gRNA
  source 1..23: mol_type = other DNA
gggcggggggggcggggaggggg

SEQ ID NO: 7301 - DNA, 23 bp, synthetic construct
  misc_feature 1..23: note = HLA-A targeting gRNA
  source 1..23: mol_type = other DNA
gggcggggggggggtggggtggg

SEQ ID NO: 7302 - DNA, 23 bp, synthetic construct
  misc_feature 1..23: note = HLA-A targeting gRNA
  source 1..23: mol_type = other DNA
gggcgggggggggtggggtgggg

SEQ ID NO: 7303 - DNA, 23 bp, synthetic construct
  misc_feature 1..23: note = HLA-A targeting gRNA
  source 1..23: mol_type = other DNA
gggcgggtcccgcggcctcaggg

SEQ ID NO: 7304 - DNA, 23 bp, synthetic construct
  misc_feature 1..23: note = HLA-A targeting gRNA
  source 1..23: mol_type = other DNA
gggcgggtcccgcggcctcgggg

SEQ ID NO: 7305 - DNA, 23 bp, synthetic construct
  misc_feature 1..23: note = HLA-A targeting gRNA
  source 1..23: mol_type = other DNA
gggcgggttccgcagcctcgggg

SEQ ID NO: 7306 - DNA, 23 bp, synthetic construct
  misc_feature 1..23: note = HLA-A targeting gRNA
  source 1..23: mol_type = other DNA
gggctccatcctcggactcgcgg

SEQ ID NO: 7307 - DNA, 23 bp, synthetic construct
  misc_feature 1..23: note = HLA-A targeting gRNA
  source 1..23: mol_type = other DNA
gggctccccacggccgggccggg

SEQ ID NO: 7308 - DNA, 23 bp, synthetic construct
  misc_feature 1..23: note = HLA-A targeting gRNA
  source 1..23: mol_type = other DNA
gggctccccgcagccgggccggg

SEQ ID NO: 7309 - DNA, 23 bp, synthetic construct
  misc_feature 1..23: note = HLA-A targeting gRNA
  source 1..23: mol_type = other DNA
gggctccccgcggccaggccggg

SEQ ID NO: 7310 - DNA, 23 bp, synthetic construct
  misc_feature 1..23: note = HLA-A targeting gRNA
  source 1..23: mol_type = other DNA
gggctccccgcggccgggccagg

SEQ ID NO: 7311 - DNA, 23 bp, synthetic construct
  misc_feature 1..23: note = HLA-A targeting gRNA
  source 1..23: mol_type = other DNA
gggctccccgctgccgggccggg

SEQ ID NO: 7312 - DNA, 23 bp, synthetic construct
  misc_feature 1..23: note = HLA-A targeting gRNA
  source 1..23: mol_type = other DNA
gggctcccctctcggactcgcgg

SEQ ID NO: 7313 - DNA, 23 bp, synthetic construct
  misc_feature 1..23: note = HLA-A targeting gRNA
  source 1..23: mol_type = other DNA
gggctcccctctcggacttgcgg

SEQ ID NO: 7314 - DNA, 23 bp, synthetic construct
  misc_feature 1..23: note = HLA-A targeting gRNA
  source 1..23: mol_type = other DNA
gggctcccgagagcagcaggagg

SEQ ID NO: 7315 - DNA, 23 bp, synthetic construct
  misc_feature 1..23: note = HLA-A targeting gRNA
  source 1..23: mol_type = other DNA
gggctccgtcctcggactcgcgg

SEQ ID NO: 7316 - DNA, 23 bp, synthetic construct
  misc_feature 1..23: note = HLA-A targeting gRNA
  source 1..23: mol_type = other DNA
gggctctccgcggccaggccggg

SEQ ID NO: 7317 - DNA, 23 bp, synthetic construct
  misc_feature 1..23: note = HLA-A targeting gRNA
  source 1..23: mol_type = other DNA
gggctctccgcggccgggccagg

SEQ ID NO: 7318 - DNA, 23 bp, synthetic construct
  misc_feature 1..23: note = HLA-A targeting gRNA
  source 1..23: mol_type = other DNA
gggctctccgcggccgggcccgg

SEQ ID NO: 7319 - DNA, 23 bp, synthetic construct
  misc_feature 1..23: note = HLA-A targeting gRNA
  source 1..23: mol_type = other DNA
gggctctccgcggccgggccggg

SEQ ID NO: 7320 - DNA, 23 bp, synthetic construct
  misc_feature 1..23: note = HLA-A targeting gRNA
  source 1..23: mol_type = other DNA
gggctctccgcggcctggccggg

SEQ ID NO: 7321 - DNA, 23 bp, synthetic construct
  misc_feature 1..23: note = HLA-A targeting gRNA
  source 1..23: mol_type = other DNA
gggctctccgcggctgggccggg

SEQ ID NO: 7322 - DNA, 23 bp, synthetic construct
  misc_feature 1..23: note = HLA-A targeting gRNA
  source 1..23: mol_type = other DNA
gggctgaggcttggaggtcaggg

SEQ ID NO: 7323 - DNA, 23 bp, synthetic construct
  misc_feature 1..23: note = HLA-A targeting gRNA
  source 1..23: mol_type = other DNA
gggctgaggcttgggggtcaggg

SEQ ID NO: 7324 - DNA, 23 bp, synthetic construct
  misc_feature 1..23: note = HLA-A targeting gRNA
  source 1..23: mol_type = other DNA
gggctgaggcttgggtgtaaggg

SEQ ID NO: 7325 - DNA, 23 bp, synthetic construct
  misc_feature 1..23: note = HLA-A targeting gRNA
  source 1..23: mol_type = other DNA
gggctgcctcccacttgcgctgg

SEQ ID NO: 7326 - DNA, 23 bp, synthetic construct
  misc_feature 1..23: note = HLA-A targeting gRNA
  source 1..23: mol_type = other DNA
gggctgggtgatctgagccgcgg

SEQ ID NO: 7327 - DNA, 23 bp, synthetic construct
  misc_feature 1..23: note = HLA-A targeting gRNA
  source 1..23: mol_type = other DNA
gggctggtgagtgcggggtcggg

SEQ ID NO: 7328 - DNA, 23 bp, synthetic construct
  misc_feature 1..23: note = HLA-A targeting gRNA
  source 1..23: mol_type = other DNA
ggggaaaggcctgggtaatgggg

SEQ ID NO: 7329 - DNA, 23 bp, synthetic construct
  misc_feature 1..23: note = HLA-A targeting gRNA
  source 1..23: mol_type = other DNA
ggggaccgggctgaccacggggg

SEQ ID NO: 7330 - DNA, 23 bp, synthetic construct
  misc_feature 1..23: note = HLA-A targeting gRNA
  source 1..23: mol_type = other DNA
ggggacggggctgaccacggggg

SEQ ID NO: 7331 - DNA, 23 bp, synthetic construct
  misc_feature 1..23: note = HLA-A targeting gRNA
  source 1..23: mol_type = other DNA
ggggacggggctgaccgcggggg

SEQ ID NO: 7332 - DNA, 23 bp, synthetic construct
  misc_feature 1..23: note = HLA-A targeting gRNA
  source 1..23: mol_type = other DNA
ggggactgggctgaccacggggg

SEQ ID NO: 7333 - DNA, 23 bp, synthetic construct
  misc_feature 1..23: note = HLA-A targeting gRNA
  source 1..23: mol_type = other DNA
ggggactgggctgaccgcgaggg

SEQ ID NO: 7334 - DNA, 23 bp, synthetic construct
  misc_feature 1..23: note = HLA-A targeting gRNA
  source 1..23: mol_type = other DNA
ggggactgggctgaccgcggggg

SEQ ID NO: 7335 - DNA, 23 bp, synthetic construct
  misc_feature 1..23: note = HLA-A targeting gRNA
  source 1..23: mol_type = other DNA
ggggagaatccgagtccgggtgg

SEQ ID NO: 7336 - DNA, 23 bp, synthetic construct
  misc_feature 1..23: note = HLA-A targeting gRNA
  source 1..23: mol_type = other DNA
ggggagaatctgagtccgggtgg

SEQ ID NO: 7337 - DNA, 23 bp, synthetic construct
  misc_feature 1..23: note = HLA-A targeting gRNA
  source 1..23: mol_type = other DNA
ggggagaatgtgagtccgggtgg

SEQ ID NO: 7338 - DNA, 23 bp, synthetic construct
  misc_feature 1..23: note = HLA-A targeting gRNA
  source 1..23: mol_type = other DNA
ggggagactcggggcgacccggg

SEQ ID NO: 7339 - DNA, 23 bp, synthetic construct
  misc_feature 1..23: note = HLA-A targeting gRNA
  source 1..23: mol_type = other DNA
ggggagactctaggcgacccggg

SEQ ID NO: 7340 - DNA, 23 bp, synthetic construct
  misc_feature 1..23: note = HLA-A targeting gRNA
  source 1..23: mol_type = other DNA
ggggagactctgggcgacccggg

SEQ ID NO: 7341 - DNA, 23 bp, synthetic construct
  misc_feature 1..23: note = HLA-A targeting gRNA
  source 1..23: mol_type = other DNA
ggggagccgcgcagggaggaggg

SEQ ID NO: 7342 - DNA, 23 bp, synthetic construct
  misc_feature 1..23: note = HLA-A targeting gRNA
  source 1..23: mol_type = other DNA
ggggagccgcgcagggaggtggg

SEQ ID NO: 7343 - DNA, 23 bp, synthetic construct
  misc_feature 1..23: note = HLA-A targeting gRNA
  source 1..23: mol_type = other DNA
ggggagccgcgccgggaggtggg

SEQ ID NO: 7344 - DNA, 23 bp, synthetic construct
  misc_feature 1..23: note = HLA-A targeting gRNA
  source 1..23: mol_type = other DNA
ggggagccgcgccggtaggaggg

SEQ ID NO: 7345 - DNA, 23 bp, synthetic construct
  misc_feature 1..23: note = HLA-A targeting gRNA
  source 1..23: mol_type = other DNA
ggggagcggcgcagggaggaggg

SEQ ID NO: 7346 - DNA, 23 bp, synthetic construct
  misc_feature 1..23: note = HLA-A targeting gRNA
  source 1..23: mol_type = other DNA
ggggagcggcgcagggaggtggg

SEQ ID NO: 7347 - DNA, 23 bp, synthetic construct
  misc_feature 1..23: note = HLA-A targeting gRNA
  source 1..23: mol_type = other DNA
ggggagggggcagaggggaaagg

SEQ ID NO: 7348 - DNA, 23 bp, synthetic construct
  misc_feature 1..23: note = HLA-A targeting gRNA
  source 1..23: mol_type = other DNA
ggggcagagggaaaaggcctagg

SEQ ID NO: 7349 - DNA, 23 bp, synthetic construct
  misc_feature 1..23: note = HLA-A targeting gRNA
  source 1..23: mol_type = other DNA
ggggcagagggaaaaggcctggg

SEQ ID NO: 7350 - DNA, 23 bp, synthetic construct
  misc_feature 1..23: note = HLA-A targeting gRNA
  source 1..23: mol_type = other DNA
ggggcagaggggaaaggcctggg

SEQ ID NO: 7351 - DNA, 23 bp, synthetic construct
  misc_feature 1..23: note = HLA-A targeting gRNA
  source 1..23: mol_type = other DNA
ggggcagagggggaaaggcctgg

SEQ ID NO: 7352 - DNA, 23 bp, synthetic construct
  misc_feature 1..23: note = HLA-A targeting gRNA
  source 1..23: mol_type = other DNA
ggggcagtggggaaaggcctggg

SEQ ID NO: 7353 - DNA, 23 bp, synthetic construct
  misc_feature 1..23: note = HLA-A targeting gRNA
  source 1..23: mol_type = other DNA
ggggccagagtattgggaccggg

SEQ ID NO: 7354 - DNA, 23 bp, synthetic construct
  misc_feature 1..23: note = HLA-A targeting gRNA
  source 1..23: mol_type = other DNA
ggggccccgaccctgctgaaggg

SEQ ID NO: 7355 - DNA, 23 bp, synthetic construct
  misc_feature 1..23: note = HLA-A targeting gRNA
  source 1..23: mol_type = other DNA
ggggccctcagaagaaactcagg

SEQ ID NO: 7356 - DNA, 23 bp, synthetic construct
  misc_feature 1..23: note = HLA-A targeting gRNA
  source 1..23: mol_type = other DNA
ggggccctcagaggaaactcagg

SEQ ID NO: 7357 - DNA, 23 bp, synthetic construct
  misc_feature 1..23: note = HLA-A targeting gRNA
  source 1..23: mol_type = other DNA
ggggccctcagaggaaactcggg

SEQ ID NO: 7358 - DNA, 23 bp, synthetic construct
  misc_feature 1..23: note = HLA-A targeting gRNA
  source 1..23: mol_type = other DNA
ggggccctgaccctgctgaaggg

SEQ ID NO: 7359 - DNA, 23 bp, synthetic construct
  misc_feature 1..23: note = HLA-A targeting gRNA
  source 1..23: mol_type = other DNA
ggggccggagtactgggaccggg

SEQ ID NO: 7360 - DNA, 23 bp, synthetic construct
  misc_feature 1..23: note = HLA-A targeting gRNA
  source 1..23: mol_type = other DNA
ggggccggagtattaggaccggg

SEQ ID NO: 7361 - DNA, 23 bp, synthetic construct
  misc_feature 1..23: note = HLA-A targeting gRNA
  source 1..23: mol_type = other DNA
ggggccggagtattgggaccggg

SEQ ID NO: 7362 - DNA, 23 bp, synthetic construct
  misc_feature 1..23: note = HLA-A targeting gRNA
  source 1..23: mol_type = other DNA
ggggccggagtgttgggaccggg

SEQ ID NO: 7363 - DNA, 23 bp, synthetic construct
  misc_feature 1..23: note = HLA-A targeting gRNA
  source 1..23: mol_type = other DNA
ggggcgaccccggccgtacgtgg

SEQ ID NO: 7364 - DNA, 23 bp, synthetic construct
  misc_feature 1..23: note = HLA-A targeting gRNA
  source 1..23: mol_type = other DNA
ggggcgacccgggccgtacgtgg

SEQ ID NO: 7365 - DNA, 23 bp, synthetic construct
  misc_feature 1..23: note = HLA-A targeting gRNA
  source 1..23: mol_type = other DNA
ggggcgacccgggccgtccgtgg

SEQ ID NO: 7366 - DNA, 23 bp, synthetic construct
  misc_feature 1..23: note = HLA-A targeting gRNA
  source 1..23: mol_type = other DNA
ggggcggggagggggcagagggg

SEQ ID NO: 7367 - DNA, 23 bp, synthetic construct
  misc_feature 1..23: note = HLA-A targeting gRNA
  source 1..23: mol_type = other DNA
ggggcggggccggggggacgggg

SEQ ID NO: 7368 - DNA, 23 bp, synthetic construct
  misc_feature 1..23: note = HLA-A targeting gRNA
  source 1..23: mol_type = other DNA
ggggcggggcggggcggggccgg

SEQ ID NO: 7369 - DNA, 23 bp, synthetic construct
  misc_feature 1..23: note = HLA-A targeting gRNA
  source 1..23: mol_type = other DNA
ggggcggggcggggctcgggggg

SEQ ID NO: 7370 - DNA, 23 bp, synthetic construct
  misc_feature 1..23: note = HLA-A targeting gRNA
  source 1..23: mol_type = other DNA
ggggcggggctcgcgggacgggg

SEQ ID NO: 7371 - DNA, 23 bp, synthetic construct
  misc_feature 1..23: note = HLA-A targeting gRNA
  source 1..23: mol_type = other DNA
ggggcggggctcgggggacgggg

SEQ ID NO: 7372 - DNA, 23 bp, synthetic construct
  misc_feature 1..23: note = HLA-A targeting gRNA
  source 1..23: mol_type = other DNA
ggggcggggctcggggggacggg

SEQ ID NO: 7373 - DNA, 23 bp, synthetic construct
  misc_feature 1..23: note = HLA-A targeting gRNA
  source 1..23: mol_type = other DNA
ggggcggggctcggggggactgg

SEQ ID NO: 7374 - DNA, 23 bp, synthetic construct
  misc_feature 1..23: note = HLA-A targeting gRNA
  source 1..23: mol_type = other DNA
ggggcggggttcgggggacgggg

SEQ ID NO: 7375 - DNA, 23 bp, synthetic construct
  misc_feature 1..23: note = HLA-A targeting gRNA
  source 1..23: mol_type = other DNA
ggggctccccacggccgggccgg

SEQ ID NO: 7376 - DNA, 23 bp, synthetic construct
  misc_feature 1..23: note = HLA-A targeting gRNA
  source 1..23: mol_type = other DNA
ggggctccccgcagccgggccgg

SEQ ID NO: 7377 - DNA, 23 bp, synthetic construct
  misc_feature 1..23: note = HLA-A targeting gRNA
  source 1..23: mol_type = other DNA
ggggctccccgcggccaggccgg

SEQ ID NO: 7378 - DNA, 23 bp, synthetic construct
  misc_feature 1..23: note = HLA-A targeting gRNA
  source 1..23: mol_type = other DNA
ggggctccccgctgccgggccgg

SEQ ID NO: 7379 - DNA, 23 bp, synthetic construct
  misc_feature 1..23: note = HLA-A targeting gRNA
  source 1..23: mol_type = other DNA
ggggctctccgcggccaggccgg

SEQ ID NO: 7380 - DNA, 23 bp, synthetic construct
  misc_feature 1..23: note = HLA-A targeting gRNA
  source 1..23: mol_type = other DNA
ggggctctccgcggccgggccgg

SEQ ID NO: 7381 - DNA, 23 bp, synthetic construct
  misc_feature 1..23: note = HLA-A targeting gRNA
  source 1..23: mol_type = other DNA
ggggctctccgcggcctggccgg

SEQ ID NO: 7382 - DNA, 23 bp, synthetic construct
  misc_feature 1..23: note = HLA-A targeting gRNA
  source 1..23: mol_type = other DNA
ggggctctccgcggctgggccgg

SEQ ID NO: 7383 - DNA, 23 bp, synthetic construct
  misc_feature 1..23: note = HLA-A targeting gRNA
  source 1..23: mol_type = other DNA
ggggctggagtattgggaccggg

SEQ ID NO: 7384 - DNA, 23 bp, synthetic construct
  misc_feature 1..23: note = HLA-A targeting gRNA
  source 1..23: mol_type = other DNA
ggggctggggcggggctcgcggg

SEQ ID NO: 7385 - DNA, 23 bp, synthetic construct
  misc_feature 1..23: note = HLA-A targeting gRNA
  source 1..23: mol_type = other DNA
ggggctggggcggggctcggggg

SEQ ID NO: 7386 - DNA, 23 bp, synthetic construct
  misc_feature 1..23: note = HLA-A targeting gRNA
  source 1..23: mol_type = other DNA
ggggctggggcggggttcggggg

SEQ ID NO: 7387 - DNA, 23 bp, synthetic construct
  misc_feature 1..23: note = HLA-A targeting gRNA
  source 1..23: mol_type = other DNA
gggggaccgggctgaccacgggg

SEQ ID NO: 7388 - DNA, 23 bp, synthetic construct
  misc_feature 1..23: note = HLA-A targeting gRNA
  source 1..23: mol_type = other DNA
gggggacgggctgaccacggggg

SEQ ID NO: 7389 - DNA, 23 bp, synthetic construct
  misc_feature 1..23: note = HLA-A targeting gRNA
  source 1..23: mol_type = other DNA
gggggacggggctgaccacgggg

SEQ ID NO: 7390 - DNA, 23 bp, synthetic construct
  misc_feature 1..23: note = HLA-A targeting gRNA
  source 1..23: mol_type = other DNA
gggggacggggctgaccgcgggg

SEQ ID NO: 7391 - DNA, 23 bp, synthetic construct
  misc_feature 1..23: note = HLA-A targeting gRNA
  source 1..23: mol_type = other DNA
gggggacggggctggccgcgggg

SEQ ID NO: 7392 - DNA, 23 bp, synthetic construct
  misc_feature 1..23: note = HLA-A targeting gRNA
  source 1..23: mol_type = other DNA
gggggacggtgctgaccgcgggg

SEQ ID NO: 7393 - DNA, 23 bp, synthetic construct
  misc_feature 1..23: note = HLA-A targeting gRNA
  source 1..23: mol_type = other DNA
gggggactgggctgaccacgggg

SEQ ID NO: 7394 - DNA, 23 bp, synthetic construct
  misc_feature 1..23: note = HLA-A targeting gRNA
  source 1..23: mol_type = other DNA
gggggactgggctgaccgcgagg

SEQ ID NO: 7395 - DNA, 23 bp, synthetic construct
  misc_feature 1..23: note = HLA-A targeting gRNA
  source 1..23: mol_type = other DNA
gggggagccgcgggcgccgtggg

SEQ ID NO: 7396 - DNA, 23 bp, synthetic construct
  misc_feature 1..23: note = HLA-A targeting gRNA
  source 1..23: mol_type = other DNA
gggggcagaggggaaaggcctgg

SEQ ID NO: 7397 - DNA, 23 bp, synthetic construct
  misc_feature 1..23: note = HLA-A targeting gRNA
  source 1..23: mol_type = other DNA
gggggccctcagaggaaactcgg

SEQ ID NO: 7398 - DNA, 23 bp, synthetic construct
  misc_feature 1..23: note = HLA-A targeting gRNA
  source 1..23: mol_type = other DNA
gggggcggggagggggcagaggg

SEQ ID NO: 7399 - DNA, 23 bp, synthetic construct
  misc_feature 1..23: note = HLA-A targeting gRNA
  source 1..23: mol_type = other DNA
ggggggacggggctgaccgcggg

SEQ ID NO: 7400 - DNA, 23 bp, synthetic construct
  misc_feature 1..23: note = HLA-A targeting gRNA
  source 1..23: mol_type = other DNA
ggggggactgggctgaccgcggg

SEQ ID NO: 7401 - DNA, 23 bp, synthetic construct
  misc_feature 1..23: note = HLA-A targeting gRNA
  source 1..23: mol_type = other DNA
ggggggagccgcgggcgccgtgg

SEQ ID NO: 7402 - DNA, 23 bp, synthetic construct
  misc_feature 1..23: note = HLA-A targeting gRNA
  source 1..23: mol_type = other DNA
ggggggcggggagggggcagagg

SEQ ID NO: 7403 - DNA, 23 bp, synthetic construct
  misc_feature 1..23: note = HLA-A targeting gRNA
  source 1..23: mol_type = other DNA
ggggggggggcagaggggaaagg

SEQ ID NO: 7404 - DNA, 23 bp, synthetic construct
  misc_feature 1..23: note = HLA-A targeting gRNA
  source 1..23: mol_type = other DNA
ggggggggggtggggtggggagg

SEQ ID NO: 7405 - DNA, 23 bp, synthetic construct
  misc_feature 1..23: note = HLA-A targeting gRNA
  source 1..23: mol_type = other DNA
gggggggggtggggtggggaggg

SEQ ID NO: 7406 - DNA, 23 bp, synthetic construct
  misc_feature 1..23: note = HLA-A targeting gRNA
  source 1..23: mol_type = other DNA
ggggggggtggggtggggagggg

SEQ ID NO: 7407 - DNA, 23 bp, synthetic construct
  misc_feature 1..23: note = HLA-A targeting gRNA
  source 1..23: mol_type = other DNA
ggggggggtggtggggcagaggg

SEQ ID NO: 7408 - DNA, 23 bp, synthetic construct
  misc_feature 1..23: note = HLA-A targeting gRNA
  source 1..23: mol_type = other DNA
gggggggtggggtggggaggggg

SEQ ID NO: 7409 - DNA, 23 bp, synthetic construct
  misc_feature 1..23: note = HLA-A targeting gRNA
  source 1..23: mol_type = other DNA
gggggggtggtggggcagagggg

SEQ ID NO: 7410 - DNA, 23 bp, synthetic construct
  misc_feature 1..23: note = HLA-A targeting gRNA
  source 1..23: mol_type = other DNA
gggggtggcgggtctggggcggg

SEQ ID NO: 7411 - DNA, 23 bp, synthetic construct
  misc_feature 1..23: note = HLA-A targeting gRNA
  source 1..23: mol_type = other DNA
gggggtggggcagagggaaaagg

SEQ ID NO: 7412 - DNA, 23 bp, synthetic construct
  misc_feature 1..23: note = HLA-A targeting gRNA
  source 1..23: mol_type = other DNA
ggggtaaggaggggaatgggggg

SEQ ID NO: 7413 - DNA, 23 bp, synthetic construct
  misc_feature 1..23: note = HLA-A targeting gRNA
  source 1..23: mol_type = other DNA
ggggtaaggagggggatgagggg

SEQ ID NO: 7414 - DNA, 23 bp, synthetic construct
  misc_feature 1..23: note = HLA-A targeting gRNA
  source 1..23: mol_type = other DNA
ggggtcctgaccctgctgaaggg

SEQ ID NO: 7415 - DNA, 23 bp, synthetic construct
  misc_feature 1..23: note = HLA-A targeting gRNA
  source 1..23: mol_type = other DNA
ggggtcgctccgcagatacctgg

SEQ ID NO: 7416 - DNA, 23 bp, synthetic construct
  misc_feature 1..23: note = HLA-A targeting gRNA
  source 1..23: mol_type = other DNA
ggggtcgggacctgcgccccggg

SEQ ID NO: 7417 - DNA, 23 bp, synthetic construct
  misc_feature 1..23: note = HLA-A targeting gRNA
  source 1..23: mol_type = other DNA
ggggtcgtgacctgcgccccagg

SEQ ID NO: 7418 - DNA, 23 bp, synthetic construct
  misc_feature 1..23: note = HLA-A targeting gRNA
  source 1..23: mol_type = other DNA
ggggtctagagtgggcagggggg

SEQ ID NO: 7419 - DNA, 23 bp, synthetic construct
  misc_feature 1..23: note = HLA-A targeting gRNA
  source 1..23: mol_type = other DNA
ggggtctagagtgggcggggggg

SEQ ID NO: 7420 - DNA, 23 bp, synthetic construct
  misc_feature 1..23: note = HLA-A targeting gRNA
  source 1..23: mol_type = other DNA
ggggtctagagtgggtggggtgg

SEQ ID NO: 7421 - DNA, 23 bp, synthetic construct
  misc_feature 1..23: note = HLA-A targeting gRNA
  source 1..23: mol_type = other DNA
ggggtggcaggtctgggggtggg

SEQ ID NO: 7422 - DNA, 23 bp, synthetic construct
  misc_feature 1..23: note = HLA-A targeting gRNA
  source 1..23: mol_type = other DNA
ggggtggcgggtctggggcgggg

SEQ ID NO: 7423 - DNA, 23 bp, synthetic construct
  misc_feature 1..23: note = HLA-A targeting gRNA
  source 1..23: mol_type = other DNA
ggggtggcgggtctggggggggg

SEQ ID NO: 7424 - DNA, 23 bp, synthetic construct
  misc_feature 1..23: note = HLA-A targeting gRNA
  source 1..23: mol_type = other DNA
ggggtggcgggtctgggggtggg

SEQ ID NO: 7425 - DNA, 23 bp, synthetic construct
  misc_feature 1..23: note = HLA-A targeting gRNA
  source 1..23: mol_type = other DNA
ggggtggggagggggcagagggg

SEQ ID NO: 7426 - DNA, 23 bp, synthetic construct
  misc_feature 1..23: note = HLA-A targeting gRNA
  source 1..23: mol_type = other DNA
gggtcacatgtgtctttgggggg

SEQ ID NO: 7427 - DNA, 23 bp, synthetic construct
  misc_feature 1..23: note = HLA-A targeting gRNA
  source 1..23: mol_type = other DNA
gggtcacgtgtgtctttgcgggg

SEQ ID NO: 7428 - DNA, 23 bp, synthetic construct
  misc_feature 1..23: note = HLA-A targeting gRNA
  source 1..23: mol_type = other DNA
gggtcacgtgtgtctttgggggg

SEQ ID NO: 7429 - DNA, 23 bp, synthetic construct
  misc_feature 1..23: note = HLA-A targeting gRNA
  source 1..23: mol_type = other DNA
gggtcagggctgaggcttggagg

SEQ ID NO: 7430 - DNA, 23 bp, synthetic construct
  misc_feature 1..23: note = HLA-A targeting gRNA
  source 1..23: mol_type = other DNA
gggtcagggctgaggcttggggg

SEQ ID NO: 7431 - DNA, 23 bp, synthetic construct
  misc_feature 1..23: note = HLA-A targeting gRNA
  source 1..23: mol_type = other DNA
gggtcccgcggcctcgggggcgg

SEQ ID NO: 7432 - DNA, 23 bp, synthetic construct
  misc_feature 1..23: note = HLA-A targeting gRNA
  source 1..23: mol_type = other DNA
gggtccgagatccgcccccgagg

SEQ ID NO: 7433 - DNA, 23 bp, synthetic construct
  misc_feature 1..23: note = HLA-A targeting gRNA
  source 1..23: mol_type = other DNA
gggtcctgagcccccgcctgcgg

SEQ ID NO: 7434 - DNA, 23 bp, synthetic construct
  misc_feature 1..23: note = HLA-A targeting gRNA
  source 1..23: mol_type = other DNA
gggtcctgcgcccccgcctgcgg

SEQ ID NO: 7435 - DNA, 23 bp, synthetic construct
  misc_feature 1..23: note = HLA-A targeting gRNA
  source 1..23: mol_type = other DNA
gggtctagagtgggcgggggggg

SEQ ID NO: 7436 - DNA, 23 bp, synthetic construct
  misc_feature 1..23: note = HLA-A targeting gRNA
  source 1..23: mol_type = other DNA
gggtctagagtgggtgggggtgg

SEQ ID NO: 7437 - DNA, 23 bp, synthetic construct
  misc_feature 1..23: note = HLA-A targeting gRNA
  source 1..23: mol_type = other DNA
gggtctccttcccgttctccagg

SEQ ID NO: 7438 - DNA, 23 bp, synthetic construct
  misc_feature 1..23: note = HLA-A targeting gRNA
  source 1..23: mol_type = other DNA
gggtgccgtgacccgcatctcgg

SEQ ID NO: 7439 - DNA, 23 bp, synthetic construct
  misc_feature 1..23: note = HLA-A targeting gRNA
  source 1..23: mol_type = other DNA
gggtggcctcatggtcagagagg

SEQ ID NO: 7440 - DNA, 23 bp, synthetic construct
  misc_feature 1..23: note = HLA-A targeting gRNA
  source 1..23: mol_type = other DNA
gggtggcgggtctgggggggggg

SEQ ID NO: 7441 - DNA, 23 bp, synthetic construct
  misc_feature 1..23: note = HLA-A targeting gRNA
  source 1..23: mol_type = other DNA
gggtggggagggggcagaggggg

SEQ ID NO: 7442 - DNA, 23 bp, synthetic construct
  misc_feature 1..23: note = HLA-A targeting gRNA
  source 1..23: mol_type = other DNA
gggtgggggtggcgggtctgggg

SEQ ID NO: 7443 - DNA, 23 bp, synthetic construct
  misc_feature 1..23: note = HLA-A targeting gRNA
  source 1..23: mol_type = other DNA
gggtggggtggcaggtctggggg

SEQ ID NO: 7444 - DNA, 23 bp, synthetic construct
  misc_feature 1..23: note = HLA-A targeting gRNA
  source 1..23: mol_type = other DNA
gggtggggtggcgggtctggggg

SEQ ID NO: 7445 - DNA, 23 bp, synthetic construct
  misc_feature 1..23: note = HLA-A targeting gRNA
  source 1..23: mol_type = other DNA
gggtgggtgacttcagaaccggg

SEQ ID NO: 7446 - DNA, 23 bp, synthetic construct
  misc_feature 1..23: note = HLA-A targeting gRNA
  source 1..23: mol_type = other DNA
gggttccgcagatccaccttggg

SEQ ID NO: 7447 - DNA, 23 bp, synthetic construct
  misc_feature 1..23: note = HLA-A targeting gRNA
  source 1..23: mol_type = other DNA
gggttgggcggggcggggcgggg

SEQ ID NO: 7448 - DNA, 23 bp, synthetic construct
  misc_feature 1..23: note = HLA-A targeting gRNA
  source 1..23: mol_type = other DNA
gggttggtcagggcggggcgggg

SEQ ID NO: 7449 - DNA, 23 bp, synthetic construct
  misc_feature 1..23: note = HLA-A targeting gRNA
  source 1..23: mol_type = other DNA
gggttggtcgggactggggcggg

SEQ ID NO: 7450 - DNA, 23 bp, synthetic construct
  misc_feature 1..23: note = HLA-A targeting gRNA
  source 1..23: mol_type = other DNA
gggttggtcggggctggggcggg

SEQ ID NO: 7451 - DNA, 23 bp, synthetic construct
  misc_feature 1..23: note = HLA-A targeting gRNA
  source 1..23: mol_type = other DNA
gggttttcttgtcccactggggg

SEQ ID NO: 7452 - DNA, 23 bp, synthetic construct
  misc_feature 1..23: note = HLA-A targeting gRNA
  source 1..23: mol_type = other DNA
gggttttgttgtcccactggggg

SEQ ID NO: 7453 - DNA, 23 bp, synthetic construct
  misc_feature 1..23: note = HLA-A targeting gRNA
  source 1..23: mol_type = other DNA
ggtaatggacattctttgattgg

SEQ ID NO: 7454 - DNA, 23 bp, synthetic construct
  misc_feature 1..23: note = HLA-A targeting gRNA
  source 1..23: mol_type = other DNA
ggtaatggagattctttgattgg

SEQ ID NO: 7455 - DNA, 23 bp, synthetic construct
  misc_feature 1..23: note = HLA-A targeting gRNA
  source 1..23: mol_type = other DNA
ggtaatggggatcctttgatagg

SEQ ID NO: 7456 - DNA, 23 bp, synthetic construct
  misc_feature 1..23: note = HLA-A targeting gRNA
  source 1..23: mol_type = other DNA
ggtaatggggatcctttgattgg

SEQ ID NO: 7457 - DNA, 23 bp, synthetic construct
  misc_feature 1..23: note = HLA-A targeting gRNA
  source 1..23: mol_type = other DNA
ggtaatggggattctttgattgg

SEQ ID NO: 7458 - DNA, 23 bp, synthetic construct
  misc_feature 1..23: note = HLA-A targeting gRNA
  source 1..23: mol_type = other DNA
ggtactgcggagacgctgattgg

SEQ ID NO: 7459 - DNA, 23 bp, synthetic construct
  misc_feature 1..23: note = HLA-A targeting gRNA
  source 1..23: mol_type = other DNA
ggtagaacaaaaaaaatacctgg

SEQ ID NO: 7460 - DNA, 23 bp, synthetic construct
  misc_feature 1..23: note = HLA-A targeting gRNA
  source 1..23: mol_type = other DNA
ggtagggaaggggtgaagagcgg

SEQ ID NO: 7461 - DNA, 23 bp, synthetic construct
  misc_feature 1..23: note = HLA-A targeting gRNA
  source 1..23: mol_type = other DNA
ggtagggaaggggtgaggagtgg

SEQ ID NO: 7462 - DNA, 23 bp, synthetic construct
  misc_feature 1..23: note = HLA-A targeting gRNA
  source 1..23: mol_type = other DNA
ggtagggaaggggtgaggggtgg

SEQ ID NO: 7463 - DNA, 23 bp, synthetic construct
  misc_feature 1..23: note = HLA-A targeting gRNA
  source 1..23: mol_type = other DNA
ggtagggaaggggtggggagtgg

SEQ ID NO: 7464 - DNA, 23 bp, synthetic construct
  misc_feature 1..23: note = HLA-A targeting gRNA
  source 1..23: mol_type = other DNA
ggtcacagtggacacaagggtgg

SEQ ID NO: 7465 - DNA, 23 bp, synthetic construct
  misc_feature 1..23: note = HLA-A targeting gRNA
  source 1..23: mol_type = other DNA
ggtcacagtggacacaaggttgg

SEQ ID NO: 7466 - DNA, 23 bp, synthetic construct
  misc_feature 1..23: note = HLA-A targeting gRNA
  source 1..23: mol_type = other DNA
ggtcacagtggacacacagttgg

SEQ ID NO: 7467 - DNA, 23 bp, synthetic construct
  misc_feature 1..23: note = HLA-A targeting gRNA
  source 1..23: mol_type = other DNA
ggtcacagtggacacgggggtgg

SEQ ID NO: 7468 - DNA, 23 bp, synthetic construct
  misc_feature 1..23: note = HLA-A targeting gRNA
  source 1..23: mol_type = other DNA
ggtcacggtggacacgggggtgg

SEQ ID NO: 7469 - DNA, 23 bp, synthetic construct
  misc_feature 1..23: note = HLA-A targeting gRNA
  source 1..23: mol_type = other DNA
ggtcagggcggggcggggctcgg

SEQ ID NO: 7470 - DNA, 23 bp, synthetic construct
  misc_feature 1..23: note = HLA-A targeting gRNA
  source 1..23: mol_type = other DNA
ggtcccagccgtacatcctctgg

SEQ ID NO: 7471 - DNA, 23 bp, synthetic construct
  misc_feature 1..23: note = HLA-A targeting gRNA
  source 1..23: mol_type = other DNA
ggtcccgcggcctcagggggcgg

SEQ ID NO: 7472 - DNA, 23 bp, synthetic construct
  misc_feature 1..23: note = HLA-A targeting gRNA
  source 1..23: mol_type = other DNA
ggtcccggacggggctctcaggg

SEQ ID NO: 7473 - DNA, 23 bp, synthetic construct
  misc_feature 1..23: note = HLA-A targeting gRNA
  source 1..23: mol_type = other DNA
ggtcccgggcggggctctcaggg

SEQ ID NO: 7474 - DNA, 23 bp, synthetic construct
  misc_feature 1..23: note = HLA-A targeting gRNA
  source 1..23: mol_type = other DNA
ggtcccgggcggggctctctggg

SEQ ID NO: 7475 - DNA, 23 bp, synthetic construct
  misc_feature 1..23: note = HLA-A targeting gRNA
  source 1..23: mol_type = other DNA
ggtcccgggcggggttctcaggg

SEQ ID NO: 7476 - DNA, 23 bp, synthetic construct
  misc_feature 1..23: note = HLA-A targeting gRNA
  source 1..23: mol_type = other DNA
ggtccgagatccgccccctgagg

SEQ ID NO: 7477 - DNA, 23 bp, synthetic construct
  misc_feature 1..23: note = HLA-A targeting gRNA
  source 1..23: mol_type = other DNA
ggtcctgcgccctcgccgggagg

SEQ ID NO: 7478 - DNA, 23 bp, synthetic construct
  misc_feature 1..23: note = HLA-A targeting gRNA
  source 1..23: mol_type = other DNA
ggtcctgcgccctcgccgggcgg

SEQ ID NO: 7479 - DNA, 23 bp, synthetic construct
  misc_feature 1..23: note = HLA-A targeting gRNA
  source 1..23: mol_type = other DNA
ggtcgcagccaaacatccactgg

SEQ ID NO: 7480 - DNA, 23 bp, synthetic construct
  misc_feature 1..23: note = HLA-A targeting gRNA
  source 1..23: mol_type = other DNA
ggtcgcagccaaacatcctctgg

SEQ ID NO: 7481 - DNA, 23 bp, synthetic construct
  misc_feature 1..23: note = HLA-A targeting gRNA
  source 1..23: mol_type = other DNA
ggtcgcagccacacatccactgg

SEQ ID NO: 7482 - DNA, 23 bp, synthetic construct
  misc_feature 1..23: note = HLA-A targeting gRNA
  source 1..23: mol_type = other DNA
ggtcgcagccagacatcctctgg

SEQ ID NO: 7483 - DNA, 23 bp, synthetic construct
  misc_feature 1..23: note = HLA-A targeting gRNA
  source 1..23: mol_type = other DNA
ggtcgcagccatacatccactgg

SEQ ID NO: 7484 - DNA, 23 bp, synthetic construct
  misc_feature 1..23: note = HLA-A targeting gRNA
  source 1..23: mol_type = other DNA
ggtcgcagccatacatccgctgg

SEQ ID NO: 7485 - DNA, 23 bp, synthetic construct
  misc_feature 1..23: note = HLA-A targeting gRNA
  source 1..23: mol_type = other DNA
ggtcgcagccatacatcctccgg

SEQ ID NO: 7486 - DNA, 23 bp, synthetic construct
  misc_feature 1..23: note = HLA-A targeting gRNA
  source 1..23: mol_type = other DNA
ggtcgcagccatacatcctctgg

SEQ ID NO: 7487 - DNA, 23 bp, synthetic construct
  misc_feature 1..23: note = HLA-A targeting gRNA
  source 1..23: mol_type = other DNA
ggtcgcagccgtacatccactgg

SEQ ID NO: 7488 - DNA, 23 bp, synthetic construct
  misc_feature 1..23: note = HLA-A targeting gRNA
  source 1..23: mol_type = other DNA
ggtcgcagccgtacatcctctgg

SEQ ID NO: 7489 - DNA, 23 bp, synthetic construct
  misc_feature 1..23: note = HLA-A targeting gRNA
  source 1..23: mol_type = other DNA
ggtcgcagccgtacatgctctgg

SEQ ID NO: 7490 - DNA, 23 bp, synthetic construct
  misc_feature 1..23: note = HLA-A targeting gRNA
  source 1..23: mol_type = other DNA
ggtcggggcggggcggggcgggg

SEQ ID NO: 7491 - DNA, 23 bp, synthetic construct
  misc_feature 1..23: note = HLA-A targeting gRNA
  source 1..23: mol_type = other DNA
ggtctagagtgggcggggggggg

SEQ ID NO: 7492 - DNA, 23 bp, synthetic construct
  misc_feature 1..23: note = HLA-A targeting gRNA
  source 1..23: mol_type = other DNA
ggtgacctcatggtcagagatgg

SEQ ID NO: 7493 - DNA, 23 bp, synthetic construct
  misc_feature 1..23: note = HLA-A targeting gRNA
  source 1..23: mol_type = other DNA
ggtgatgtatggctgcgacgtgg

SEQ ID NO: 7494 - DNA, 23 bp, synthetic construct
  misc_feature 1..23: note = HLA-A targeting gRNA
  source 1..23: mol_type = other DNA
ggtgcccaaggctgctgcagggg

SEQ ID NO: 7495 - DNA, 23 bp, synthetic construct
  misc_feature 1..23: note = HLA-A targeting gRNA
  source 1..23: mol_type = other DNA
ggtgccggaggattgggaccggg

SEQ ID NO: 7496 - DNA, 23 bp, synthetic construct
  misc_feature 1..23: note = HLA-A targeting gRNA
  source 1..23: mol_type = other DNA
ggtgctctccgcggccaggccgg

SEQ ID NO: 7497 - DNA, 23 bp, synthetic construct
  misc_feature 1..23: note = HLA-A targeting gRNA
  source 1..23: mol_type = other DNA
ggtgcttccagtaacaaggcggg

SEQ ID NO: 7498 - DNA, 23 bp, synthetic construct
  misc_feature 1..23: note = HLA-A targeting gRNA
  source 1..23: mol_type = other DNA
ggtgcttccagtaacgaggtggg

SEQ ID NO: 7499 - DNA, 23 bp, synthetic construct
  misc_feature 1..23: note = HLA-A targeting gRNA
  source 1..23: mol_type = other DNA
ggtggcctcatggtcagagacgg

SEQ ID NO: 7500 - DNA, 23 bp, synthetic construct
  misc_feature 1..23: note = HLA-A targeting gRNA
  source 1..23: mol_type = other DNA
ggtggcctcatggtcagagaggg

SEQ ID NO: 7501 - DNA, 23 bp, synthetic construct
  misc_feature 1..23: note = HLA-A targeting gRNA
  source 1..23: mol_type = other DNA
ggtggcgggtctggggggggggg

SEQ ID NO: 7502 - DNA, 23 bp, synthetic construct
  misc_feature 1..23: note = HLA-A targeting gRNA
  source 1..23: mol_type = other DNA
ggtggggcacacttctacctggg

SEQ ID NO: 7503 - DNA, 23 bp, synthetic construct
  misc_feature 1..23: note = HLA-A targeting gRNA
  source 1..23: mol_type = other DNA
ggtggggtggcgggtctgggggg

SEQ ID NO: 7504 - DNA, 23 bp, synthetic construct
  misc_feature 1..23: note = HLA-A targeting gRNA
  source 1..23: mol_type = other DNA
ggtgggtcacatgtgtctttggg

SEQ ID NO: 7505 - DNA, 23 bp, synthetic construct
  misc_feature 1..23: note = HLA-A targeting gRNA
  source 1..23: mol_type = other DNA
ggtgggtcacgtgtgtctttggg

SEQ ID NO: 7506 - DNA, 23 bp, synthetic construct
  misc_feature 1..23: note = HLA-A targeting gRNA
  source 1..23: mol_type = other DNA
ggtgggtgagctcctccacacgg

SEQ ID NO: 7507 - DNA, 23 bp, synthetic construct
  misc_feature 1..23: note = HLA-A targeting gRNA
  source 1..23: mol_type = other DNA
ggtggtggggcagaggggaaagg

SEQ ID NO: 7508 - DNA, 23 bp, synthetic construct
  misc_feature 1..23: note = HLA-A targeting gRNA
  source 1..23: mol_type = other DNA
ggtgtagatacctcatggagtgg

SEQ ID NO: 7509 - DNA, 23 bp, synthetic construct
  misc_feature 1..23: note = HLA-A targeting gRNA
  source 1..23: mol_type = other DNA
ggtgtcgtccacgtagcccacgg

SEQ ID NO: 7510 - DNA, 23 bp, synthetic construct
  misc_feature 1..23: note = HLA-A targeting gRNA
  source 1..23: mol_type = other DNA
ggttccatctcctgctcgcctgg

SEQ ID NO: 7511 - DNA, 23 bp, synthetic construct
  misc_feature 1..23: note = HLA-A targeting gRNA
  source 1..23: mol_type = other DNA
ggttccatctcctgctggcctgg

SEQ ID NO: 7512 - DNA, 23 bp, synthetic construct
  misc_feature 1..23: note = HLA-A targeting gRNA
  source 1..23: mol_type = other DNA
ggttcccaaggctgctgcagggg

SEQ ID NO: 7513 - DNA, 23 bp, synthetic construct
  misc_feature 1..23: note = HLA-A targeting gRNA
  source 1..23: mol_type = other DNA
ggttccgcagatccaccttgggg

SEQ ID NO: 7514 - DNA, 23 bp, synthetic construct
  misc_feature 1..23: note = HLA-A targeting gRNA
  source 1..23: mol_type = other DNA
ggttctatctcctgcaggtctgg

SEQ ID NO: 7515 - DNA, 23 bp, synthetic construct
  misc_feature 1..23: note = HLA-A targeting gRNA
  source 1..23: mol_type = other DNA
ggttctatctcctgccggtctgg

SEQ ID NO: 7516 - DNA, 23 bp, synthetic construct
  misc_feature 1..23: note = HLA-A targeting gRNA
  source 1..23: mol_type = other DNA
ggttctatctcctgctggtctgg

SEQ ID NO: 7517 - DNA, 23 bp, synthetic construct
  misc_feature 1..23: note = HLA-A targeting gRNA
  source 1..23: mol_type = other DNA
ggttctgtctcctgctggtctgg

SEQ ID NO: 7518 - DNA, 23 bp, synthetic construct
  misc_feature 1..23: note = HLA-A targeting gRNA
  source 1..23: mol_type = other DNA
ggttgcagccacacatccactgg

SEQ ID NO: 7519 - DNA, 23 bp, synthetic construct
  misc_feature 1..23: note = HLA-A targeting gRNA
  source 1..23: mol_type = other DNA
ggttgggagaagtgaaactcagg

SEQ ID NO: 7520 - DNA, 23 bp, synthetic construct
  misc_feature 1..23: note = HLA-A targeting gRNA
  source 1..23: mol_type = other DNA
ggttggtcgggactggggcgggg

SEQ ID NO: 7521 - DNA, 23 bp, synthetic construct
  misc_feature 1..23: note = HLA-A targeting gRNA
  source 1..23: mol_type = other DNA
ggttggtcggggctggggcgggg

SEQ ID NO: 7522 - DNA, 23 bp, synthetic construct
  misc_feature 1..23: note = HLA-A targeting gRNA
  source 1..23: mol_type = other DNA
ggtttaggccaaaatccccgcgg

SEQ ID NO: 7523 - DNA, 23 bp, synthetic construct
  misc_feature 1..23: note = HLA-A targeting gRNA
  source 1..23: mol_type = other DNA
gtaaagtgactcaaaagtgctgg

SEQ ID NO: 7524 - DNA, 23 bp, synthetic construct
  misc_feature 1..23: note = HLA-A targeting gRNA
  source 1..23: mol_type = other DNA
gtaaagtgactcagaagtgctgg

SEQ ID NO: 7525 - DNA, 23 bp, synthetic construct
  misc_feature 1..23: note = HLA-A targeting gRNA
  source 1..23: mol_type = other DNA
gtaacccactgagatgaagcggg

SEQ ID NO: 7526 - DNA, 23 bp, synthetic construct
  misc_feature 1..23: note = HLA-A targeting gRNA
  source 1..23: mol_type = other DNA
gtaagccttgccgtcgtaggcgg

SEQ ID NO: 7527 - DNA, 23 bp, synthetic construct
  misc_feature 1..23: note = HLA-A targeting gRNA
  source 1..23: mol_type = other DNA
gtaagcgatgacactctgaacgg

SEQ ID NO: 7528 - DNA, 23 bp, synthetic construct
  misc_feature 1..23: note = HLA-A targeting gRNA
  source 1..23: mol_type = other DNA
gtaaggctgcgacgtggggccgg

SEQ ID NO: 7529 - DNA, 23 bp, synthetic construct
  misc_feature 1..23: note = HLA-A targeting gRNA
  source 1..23: mol_type = other DNA
gtaagtctgtgtgttggtcttgg

SEQ ID NO: 7530 - DNA, 23 bp, synthetic construct
  misc_feature 1..23: note = HLA-A targeting gRNA
  source 1..23: mol_type = other DNA
gtaagtgatgacactctgaacgg

SEQ ID NO: 7531 - DNA, 23 bp, synthetic construct
  misc_feature 1..23: note = HLA-A targeting gRNA
  source 1..23: mol_type = other DNA
gtaagtgatgacattctgaacgg

SEQ ID NO: 7532 - DNA, 23 bp, synthetic construct
  misc_feature 1..23: note = HLA-A targeting gRNA
  source 1..23: mol_type = other DNA
gtaatccttgccgtcctaggcgg

SEQ ID NO: 7533 - DNA, 23 bp, synthetic construct
  misc_feature 1..23: note = HLA-A targeting gRNA
  source 1..23: mol_type = other DNA
gtaatccttgccgtcgcaggcgg

SEQ ID NO: 7534 - DNA, 23 bp, synthetic construct
  misc_feature 1..23: note = HLA-A targeting gRNA
  source 1..23: mol_type = other DNA
gtaatccttgccgtcgtaggcgg

SEQ ID NO: 7535 - DNA, 23 bp, synthetic construct
  misc_feature 1..23: note = HLA-A targeting gRNA
  source 1..23: mol_type = other DNA
gtaatccttgccgtcttaggcgg

SEQ ID NO: 7536 - DNA, 23 bp, synthetic construct
  misc_feature 1..23: note = HLA-A targeting gRNA
  source 1..23: mol_type = other DNA
gtaatggacattctttgattggg

SEQ ID NO: 7537 - DNA, 23 bp, synthetic construct
  misc_feature 1..23: note = HLA-A targeting gRNA
  source 1..23: mol_type = other DNA
gtaatggagattctttgattggg

SEQ ID NO: 7538 - DNA, 23 bp, synthetic construct
  misc_feature 1..23: note = HLA-A targeting gRNA
  source 1..23: mol_type = other DNA
gtaatggggatcctttgataggg

SEQ ID NO: 7539 - DNA, 23 bp, synthetic construct
  misc_feature 1..23: note = HLA-A targeting gRNA
  source 1..23: mol_type = other DNA
gtaatggggatcctttgattggg

SEQ ID NO: 7540 - DNA, 23 bp, synthetic construct
  misc_feature 1..23: note = HLA-A targeting gRNA
  source 1..23: mol_type = other DNA
gtaatggggattctttgattggg

SEQ ID NO: 7541 - DNA, 23 bp, synthetic construct
  misc_feature 1..23: note = HLA-A targeting gRNA
  source 1..23: mol_type = other DNA
gtacggctgcgacctggggccgg

SEQ ID NO: 7542 - DNA, 23 bp, synthetic construct
  misc_feature 1..23: note = HLA-A targeting gRNA
  source 1..23: mol_type = other DNA
gtacggctgcgacgtggggccgg

SEQ ID NO: 7543 - DNA, 23 bp, synthetic construct
  misc_feature 1..23: note = HLA-A targeting gRNA
  source 1..23: mol_type = other DNA
gtacgtctgtgtgttggtcttgg

SEQ ID NO: 7544 - DNA, 23 bp, synthetic construct
  misc_feature 1..23: note = HLA-A targeting gRNA
  source 1..23: mol_type = other DNA
gtagaaatacctcaaggagtggg

SEQ ID NO: 7545 - DNA, 23 bp, synthetic construct
  misc_feature 1..23: note = HLA-A targeting gRNA
  source 1..23: mol_type = other DNA
gtagaaatacctcatgaagtggg

SEQ ID NO: 7546 - DNA, 23 bp, synthetic construct
  misc_feature 1..23: note = HLA-A targeting gRNA
  source 1..23: mol_type = other DNA
gtagaaatacctcatggagaggg

SEQ ID NO: 7547 - DNA, 23 bp, synthetic construct
  misc_feature 1..23: note = HLA-A targeting gRNA
  source 1..23: mol_type = other DNA
gtagaaatacttcatggagtggg

SEQ ID NO: 7548 - DNA, 23 bp, synthetic construct
  misc_feature 1..23: note = HLA-A targeting gRNA
  source 1..23: mol_type = other DNA
gtagaacaaaaaaaaagacctgg

SEQ ID NO: 7549 - DNA, 23 bp, synthetic construct
  misc_feature 1..23: note = HLA-A targeting gRNA
  source 1..23: mol_type = other DNA
gtagcccacggtaatgaagcggg

SEQ ID NO: 7550 - DNA, 23 bp, synthetic construct
  misc_feature 1..23: note = HLA-A targeting gRNA
  source 1..23: mol_type = other DNA
gtagcccacggtgatgaagcggg

SEQ ID NO: 7551 - DNA, 23 bp, synthetic construct
  misc_feature 1..23: note = HLA-A targeting gRNA
  source 1..23: mol_type = other DNA
gtagcccactgagacgaagcggg

SEQ ID NO: 7552 - DNA, 23 bp, synthetic construct
  misc_feature 1..23: note = HLA-A targeting gRNA
  source 1..23: mol_type = other DNA
gtagcccactgagatgaagcggg

SEQ ID NO: 7553 - DNA, 23 bp, synthetic construct
  misc_feature 1..23: note = HLA-A targeting gRNA
  source 1..23: mol_type = other DNA
gtagcccactgcaatgaagcggg

SEQ ID NO: 7554 - DNA, 23 bp, synthetic construct
  misc_feature 1..23: note = HLA-A targeting gRNA
  source 1..23: mol_type = other DNA
gtagcccactgcgatgaagtggg

SEQ ID NO: 7555 - DNA, 23 bp, synthetic construct
  misc_feature 1..23: note = HLA-A targeting gRNA
  source 1..23: mol_type = other DNA
gtagcgcactgagatgaagcggg

SEQ ID NO: 7556 - DNA, 23 bp, synthetic construct
  misc_feature 1..23: note = HLA-A targeting gRNA
  source 1..23: mol_type = other DNA
gtaggaggaagagctcaggtagg

SEQ ID NO: 7557 - DNA, 23 bp, synthetic construct
  misc_feature 1..23: note = HLA-A targeting gRNA
  source 1..23: mol_type = other DNA
gtaggaggaagagttcaggtagg

SEQ ID NO: 7558 - DNA, 23 bp, synthetic construct
  misc_feature 1..23: note = HLA-A targeting gRNA
  source 1..23: mol_type = other DNA
gtaggaggaagagttctggtagg

SEQ ID NO: 7559 - DNA, 23 bp, synthetic construct
  misc_feature 1..23: note = HLA-A targeting gRNA
  source 1..23: mol_type = other DNA
gtaggctgggaagatggctctgg

SEQ ID NO: 7560 - DNA, 23 bp, synthetic construct
  misc_feature 1..23: note = HLA-A targeting gRNA
  source 1..23: mol_type = other DNA
gtagggaaggggtgaagagcggg

SEQ ID NO: 7561 - DNA, 23 bp, synthetic construct
  misc_feature 1..23: note = HLA-A targeting gRNA
  source 1..23: mol_type = other DNA
gtagggaaggggtgaggagtggg

SEQ ID NO: 7562 - DNA, 23 bp, synthetic construct
  misc_feature 1..23: note = HLA-A targeting gRNA
  source 1..23: mol_type = other DNA
gtagggaaggggtgaggggtggg

SEQ ID NO: 7563 - DNA, 23 bp, synthetic construct
  misc_feature 1..23: note = HLA-A targeting gRNA
  source 1..23: mol_type = other DNA
gtagggaaggggtggggagtggg

SEQ ID NO: 7564 - DNA, 23 bp, synthetic construct
  misc_feature 1..23: note = HLA-A targeting gRNA
  source 1..23: mol_type = other DNA
gtagttctggaaacttctcttgg

SEQ ID NO: 7565 - DNA, 23 bp, synthetic construct
  misc_feature 1..23: note = HLA-A targeting gRNA
  source 1..23: mol_type = other DNA
gtatctacaccgccgtgtcccgg

SEQ ID NO: 7566 - DNA, 23 bp, synthetic construct
  misc_feature 1..23: note = HLA-A targeting gRNA
  source 1..23: mol_type = other DNA
gtatggctgcgacatggggccgg

SEQ ID NO: 7567 - DNA, 23 bp, synthetic construct
  misc_feature 1..23: note = HLA-A targeting gRNA
  source 1..23: mol_type = other DNA
gtatggctgcgacctggggccgg

SEQ ID NO: 7568 - DNA, 23 bp, synthetic construct
  misc_feature 1..23: note = HLA-A targeting gRNA
  source 1..23: mol_type = other DNA
gtatggctgcgacgtggagccgg

SEQ ID NO: 7569 - DNA, 23 bp, synthetic construct
  misc_feature 1..23: note = HLA-A targeting gRNA
  source 1..23: mol_type = other DNA
gtcacagtggacacaagggtggg

SEQ ID NO: 7570 - DNA, 23 bp, synthetic construct
  misc_feature 1..23: note = HLA-A targeting gRNA
  source 1..23: mol_type = other DNA
gtcacagtggacacaaggttggg

SEQ ID NO: 7571 - DNA, 23 bp, synthetic construct
  misc_feature 1..23: note = HLA-A targeting gRNA
  source 1..23: mol_type = other DNA
gtcacagtggacacacagttggg

SEQ ID NO: 7572 - DNA, 23 bp, synthetic construct
  misc_feature 1..23: note = HLA-A targeting gRNA
  source 1..23: mol_type = other DNA
gtcacagtggacacgggggtggg

SEQ ID NO: 7573 - DNA, 23 bp, synthetic construct
  misc_feature 1..23: note = HLA-A targeting gRNA
  source 1..23: mol_type = other DNA
gtcacgagtatcccggaagaagg

SEQ ID NO: 7574 - DNA, 23 bp, synthetic construct
  misc_feature 1..23: note = HLA-A targeting gRNA
  source 1..23: mol_type = other DNA
gtcacgagtatcctggaagaagg

SEQ ID NO: 7575 - DNA, 23 bp, synthetic construct
  misc_feature 1..23: note = HLA-A targeting gRNA
  source 1..23: mol_type = other DNA
gtcacggtggacacgggggtggg

SEQ ID NO: 7576 - DNA, 23 bp, synthetic construct
  misc_feature 1..23: note = HLA-A targeting gRNA
  source 1..23: mol_type = other DNA
gtcactcaccggcctcgctccgg

SEQ ID NO: 7577 - DNA, 23 bp, synthetic construct
  misc_feature 1..23: note = HLA-A targeting gRNA
  source 1..23: mol_type = other DNA
gtcactcaccggtctcgctctgg

SEQ ID NO: 7578 - DNA, 23 bp, synthetic construct
  misc_feature 1..23: note = HLA-A targeting gRNA
  source 1..23: mol_type = other DNA
gtcactcaccgtcctcgctccgg

SEQ ID NO: 7579 - DNA, 23 bp, synthetic construct
  misc_feature 1..23: note = HLA-A targeting gRNA
  source 1..23: mol_type = other DNA
gtcactcacggtcctcgctctgg

SEQ ID NO: 7580 - DNA, 23 bp, synthetic construct
  misc_feature 1..23: note = HLA-A targeting gRNA
  source 1..23: mol_type = other DNA
gtcactcactggcctcgctctgg

SEQ ID NO: 7581 - DNA, 23 bp, synthetic construct
  misc_feature 1..23: note = HLA-A targeting gRNA
  source 1..23: mol_type = other DNA
gtcagagcccacaggagacgtgg

SEQ ID NO: 7582 - DNA, 23 bp, synthetic construct
  misc_feature 1..23: note = HLA-A targeting gRNA
  source 1..23: mol_type = other DNA
gtcagagcccacaggagatgtgg

SEQ ID NO: 7583 - DNA, 23 bp, synthetic construct
  misc_feature 1..23: note = HLA-A targeting gRNA
  source 1..23: mol_type = other DNA
gtcagagcccgcaggagacgtgg

SEQ ID NO: 7584 - DNA, 23 bp, synthetic construct
  misc_feature 1..23: note = HLA-A targeting gRNA
  source 1..23: mol_type = other DNA
gtcagagcccgcaggagatgtgg

SEQ ID NO: 7585 - DNA, 23 bp, synthetic construct
  misc_feature 1..23: note = HLA-A targeting gRNA
  source 1..23: mol_type = other DNA
gtcagagccctcaggagacgtgg

SEQ ID NO: 7586 - DNA, 23 bp, synthetic construct
  misc_feature 1..23: note = HLA-A targeting gRNA
  source 1..23: mol_type = other DNA
gtcagggccatgcgatcttaggg

SEQ ID NO: 7587 - DNA, 23 bp, synthetic construct
  misc_feature 1..23: note = HLA-A targeting gRNA
  source 1..23: mol_type = other DNA
gtcagggcggggcggggctcggg

SEQ ID NO: 7588 - DNA, 23 bp, synthetic construct
  misc_feature 1..23: note = HLA-A targeting gRNA
  source 1..23: mol_type = other DNA
gtcagtctgtgtgttggtcttgg

SEQ ID NO: 7589 - DNA, 23 bp, synthetic construct
  misc_feature 1..23: note = HLA-A targeting gRNA
  source 1..23: mol_type = other DNA
gtcatgagtattcaggaagaagg

SEQ ID NO: 7590 - DNA, 23 bp, synthetic construct
  misc_feature 1..23: note = HLA-A targeting gRNA
  source 1..23: mol_type = other DNA
gtcccaggctgggatggcccagg

SEQ ID NO: 7591 - DNA, 23 bp, synthetic construct
  misc_feature 1..23: note = HLA-A targeting gRNA
  source 1..23: mol_type = other DNA
gtcccgcggcctcagggaggcgg

SEQ ID NO: 7592 - DNA, 23 bp, synthetic construct
  misc_feature 1..23: note = HLA-A targeting gRNA
  source 1..23: mol_type = other DNA
gtcccgcggcctcaggggggcgg

SEQ ID NO: 7593 - DNA, 23 bp, synthetic construct
  misc_feature 1..23: note = HLA-A targeting gRNA
  source 1..23: mol_type = other DNA
gtcccgcggcctcaggggggtgg

SEQ ID NO: 7594 - DNA, 23 bp, synthetic construct
  misc_feature 1..23: note = HLA-A targeting gRNA
  source 1..23: mol_type = other DNA
gtcccgcggcctcagggggtcgg

SEQ ID NO: 7595 - DNA, 23 bp, synthetic construct
  misc_feature 1..23: note = HLA-A targeting gRNA
  source 1..23: mol_type = other DNA
gtccctagaatactgatcagggg

SEQ ID NO: 7596 - DNA, 23 bp, synthetic construct
  misc_feature 1..23: note = HLA-A targeting gRNA
  source 1..23: mol_type = other DNA
gtccctaggatagtgatcagggg

SEQ ID NO: 7597 - DNA, 23 bp, synthetic construct
  misc_feature 1..23: note = HLA-A targeting gRNA
  source 1..23: mol_type = other DNA
gtccctataatactgatcagggg

SEQ ID NO: 7598 - DNA, 23 bp, synthetic construct
  misc_feature 1..23: note = HLA-A targeting gRNA
  source 1..23: mol_type = other DNA
gtccctggaatactgatcagggg

SEQ ID NO: 7599 - DNA, 23 bp, synthetic construct
  misc_feature 1..23: note = HLA-A targeting gRNA
  source 1..23: mol_type = other DNA
gtccctgttagcataatgtgagg

SEQ ID NO: 7600 - DNA, 23 bp, synthetic construct
  misc_feature 1..23: note = HLA-A targeting gRNA
  source 1..23: mol_type = other DNA
gtccctgttagcctaatgtgagg

SEQ ID NO: 7601 - DNA, 23 bp, synthetic construct
  misc_feature 1..23: note = HLA-A targeting gRNA
  source 1..23: mol_type = other DNA
gtccgagatccacccccctgagg

SEQ ID NO: 7602 - DNA, 23 bp, synthetic construct
  misc_feature 1..23: note = HLA-A targeting gRNA
  source 1..23: mol_type = other DNA
gtccgagatccgaccccctgagg

SEQ ID NO: 7603 - DNA, 23 bp, synthetic construct
  misc_feature 1..23: note = HLA-A targeting gRNA
  source 1..23: mol_type = other DNA
gtccgagatccgcccccctgagg

SEQ ID NO: 7604 - DNA, 23 bp, synthetic construct
  misc_feature 1..23: note = HLA-A targeting gRNA
  source 1..23: mol_type = other DNA
gtccgagatccgcctccctgagg

SEQ ID NO: 7605 - DNA, 23 bp, synthetic construct
  misc_feature 1..23: note = HLA-A targeting gRNA
  source 1..23: mol_type = other DNA
gtcctagcagttgtggtcatcgg

SEQ ID NO: 7606 - DNA, 23 bp, synthetic construct
  misc_feature 1..23: note = HLA-A targeting gRNA
  source 1..23: mol_type = other DNA
gtcctccccatcccactgccagg

SEQ ID NO: 7607 - DNA, 23 bp, synthetic construct
  misc_feature 1..23: note = HLA-A targeting gRNA
  source 1..23: mol_type = other DNA
gtcctcgccatcccgctaccagg

SEQ ID NO: 7608 - DNA, 23 bp, synthetic construct
  misc_feature 1..23: note = HLA-A targeting gRNA
  source 1..23: mol_type = other DNA
gtcctcgccatcccgctgccagg

SEQ ID NO: 7609 - DNA, 23 bp, synthetic construct
  misc_feature 1..23: note = HLA-A targeting gRNA
  source 1..23: mol_type = other DNA
gtcctgcgccctcgccgggaggg

SEQ ID NO: 7610 - DNA, 23 bp, synthetic construct
  misc_feature 1..23: note = HLA-A targeting gRNA
  source 1..23: mol_type = other DNA
gtcctgcgccctcgccgggcggg

SEQ ID NO: 7611 - DNA, 23 bp, synthetic construct
  misc_feature 1..23: note = HLA-A targeting gRNA
  source 1..23: mol_type = other DNA
gtccttgccatcccgctgccagg

SEQ ID NO: 7612 - DNA, 23 bp, synthetic construct
  misc_feature 1..23: note = HLA-A targeting gRNA
  source 1..23: mol_type = other DNA
gtcgaaatacctcatggagtggg

SEQ ID NO: 7613 - DNA, 23 bp, synthetic construct
  misc_feature 1..23: note = HLA-A targeting gRNA
  source 1..23: mol_type = other DNA
gtcgggactggggcggggctcgg

SEQ ID NO: 7614 - DNA, 23 bp, synthetic construct
  misc_feature 1..23: note = HLA-A targeting gRNA
  source 1..23: mol_type = other DNA
gtcggggctggggcggggctcgg

SEQ ID NO: 7615 - DNA, 23 bp, synthetic construct
  misc_feature 1..23: note = HLA-A targeting gRNA
  source 1..23: mol_type = other DNA
gtcggggctggggcggggttcgg

SEQ ID NO: 7616 - DNA, 23 bp, synthetic construct
  misc_feature 1..23: note = HLA-A targeting gRNA
  source 1..23: mol_type = other DNA
gtctagagtgggcaggggggtgg

SEQ ID NO: 7617 - DNA, 23 bp, synthetic construct
  misc_feature 1..23: note = HLA-A targeting gRNA
  source 1..23: mol_type = other DNA
gtctagagtgggcgggggggcgg

SEQ ID NO: 7618 - DNA, 23 bp, synthetic construct
  misc_feature 1..23: note = HLA-A targeting gRNA
  source 1..23: mol_type = other DNA
gtctagagtgggcgggggggggg

SEQ ID NO: 7619 - DNA, 23 bp, synthetic construct
  misc_feature 1..23: note = HLA-A targeting gRNA
  source 1..23: mol_type = other DNA
gtctagagtgggtggggtggcgg

SEQ ID NO: 7620 - DNA, 23 bp, synthetic construct
  misc_feature 1..23: note = HLA-A targeting gRNA
  source 1..23: mol_type = other DNA
gtctcccggtcccaacactccgg

SEQ ID NO: 7621 - DNA, 23 bp, synthetic construct
  misc_feature 1..23: note = HLA-A targeting gRNA
  source 1..23: mol_type = other DNA
gtctcccggtcccaatactccgg

SEQ ID NO: 7622 - DNA, 23 bp, synthetic construct
  misc_feature 1..23: note = HLA-A targeting gRNA
  source 1..23: mol_type = other DNA
gtctcccggtcccaatactctgg

SEQ ID NO: 7623 - DNA, 23 bp, synthetic construct
  misc_feature 1..23: note = HLA-A targeting gRNA
  source 1..23: mol_type = other DNA
gtctcccggtcccaatcctccgg

SEQ ID NO: 7624 - DNA, 23 bp, synthetic construct
  misc_feature 1..23: note = HLA-A targeting gRNA
  source 1..23: mol_type = other DNA
gtctcccggtcccagtactccgg

SEQ ID NO: 7625 - DNA, 23 bp, synthetic construct
  misc_feature 1..23: note = HLA-A targeting gRNA
  source 1..23: mol_type = other DNA
gtctcccggtcctaatactccgg

SEQ ID NO: 7626 - DNA, 23 bp, synthetic construct
  misc_feature 1..23: note = HLA-A targeting gRNA
  source 1..23: mol_type = other DNA
gtctcctgagggctctgaccagg

SEQ ID NO: 7627 - DNA, 23 bp, synthetic construct
  misc_feature 1..23: note = HLA-A targeting gRNA
  source 1..23: mol_type = other DNA
gtctcctgcgggctctgaccagg

SEQ ID NO: 7628 - DNA, 23 bp, synthetic construct
  misc_feature 1..23: note = HLA-A targeting gRNA
  source 1..23: mol_type = other DNA
gtctcctgtgggctctgaccagg

SEQ ID NO: 7629 - DNA, 23 bp, synthetic construct
  misc_feature 1..23: note = HLA-A targeting gRNA
  source 1..23: mol_type = other DNA
gtctgagatccaccccaaggtgg

SEQ ID NO: 7630 - DNA, 23 bp, synthetic construct
  misc_feature 1..23: note = HLA-A targeting gRNA
  source 1..23: mol_type = other DNA
gtctgaggagactctgagtccgg

SEQ ID NO: 7631 - DNA, 23 bp, synthetic construct
  misc_feature 1..23: note = HLA-A targeting gRNA
  source 1..23: mol_type = other DNA
gtctgaggagattctgagtccgg

SEQ ID NO: 7632 - DNA, 23 bp, synthetic construct
  misc_feature 1..23: note = HLA-A targeting gRNA
  source 1..23: mol_type = other DNA
gtctgaggagattttgagtccgg

SEQ ID NO: 7633 - DNA, 23 bp, synthetic construct
  misc_feature 1..23: note = HLA-A targeting gRNA
  source 1..23: mol_type = other DNA
gtctgccaagtgtgagaccctgg

SEQ ID NO: 7634 - DNA, 23 bp, synthetic construct
  misc_feature 1..23: note = HLA-A targeting gRNA
  source 1..23: mol_type = other DNA
gtctggagggtgtgagaccctgg

SEQ ID NO: 7635 - DNA, 23 bp, synthetic construct
  misc_feature 1..23: note = HLA-A targeting gRNA
  source 1..23: mol_type = other DNA
gtctggctgcgacgtggggccgg

SEQ ID NO: 7636 - DNA, 23 bp, synthetic construct
  misc_feature 1..23: note = HLA-A targeting gRNA
  source 1..23: mol_type = other DNA
gtctggggagaatccgagtccgg

SEQ ID NO: 7637 - DNA, 23 bp, synthetic construct
  misc_feature 1..23: note = HLA-A targeting gRNA
  source 1..23: mol_type = other DNA
gtctggggagaatctgagtccgg

SEQ ID NO: 7638 - DNA, 23 bp, synthetic construct
  misc_feature 1..23: note = HLA-A targeting gRNA
  source 1..23: mol_type = other DNA
gtcttccccatcccgctgccagg

SEQ ID NO: 7639 - DNA, 23 bp, synthetic construct
  misc_feature 1..23: note = HLA-A targeting gRNA
  source 1..23: mol_type = other DNA
gtcttcccctccatttcctcagg

SEQ ID NO: 7640 - DNA, 23 bp, synthetic construct
  misc_feature 1..23: note = HLA-A targeting gRNA
  source 1..23: mol_type = other DNA
gtcttgaagatctgtgtgttcgg

SEQ ID NO: 7641 - DNA, 23 bp, synthetic construct
  misc_feature 1..23: note = HLA-A targeting gRNA
  source 1..23: mol_type = other DNA
gtgaacctgcggaaactgcgcgg

SEQ ID NO: 7642 - DNA, 23 bp, synthetic construct
  misc_feature 1..23: note = HLA-A targeting gRNA
  source 1..23: mol_type = other DNA
gtgaacctgcggaacctgcgcgg

SEQ ID NO: 7643 - DNA, 23 bp, synthetic construct
  misc_feature 1..23: note = HLA-A targeting gRNA
  source 1..23: mol_type = other DNA
gtgaacctgcggcaactgcgcgg

SEQ ID NO: 7644 - DNA, 23 bp, synthetic construct
  misc_feature 1..23: note = HLA-A targeting gRNA
  source 1..23: mol_type = other DNA
gtgaccagcctgagaatggacgg

SEQ ID NO: 7645 - DNA, 23 bp, synthetic construct
  misc_feature 1..23: note = HLA-A targeting gRNA
  source 1..23: mol_type = other DNA
gtgaccccggcctggggcgcagg

SEQ ID NO: 7646 - DNA, 23 bp, synthetic construct
  misc_feature 1..23: note = HLA-A targeting gRNA
  source 1..23: mol_type = other DNA
gtgacctcatggtcagagatggg

SEQ ID NO: 7647 - DNA, 23 bp, synthetic construct
  misc_feature 1..23: note = HLA-A targeting gRNA
  source 1..23: mol_type = other DNA
gtgacctgcgccccaggccgggg

SEQ ID NO: 7648 - DNA, 23 bp, synthetic construct
  misc_feature 1..23: note = HLA-A targeting gRNA
  source 1..23: mol_type = other DNA
gtgactggggacttcagaaccgg

SEQ ID NO: 7649 - DNA, 23 bp, synthetic construct
  misc_feature 1..23: note = HLA-A targeting gRNA
  source 1..23: mol_type = other DNA
gtgactggggactttagaaccgg

SEQ ID NO: 7650 - DNA, 23 bp, synthetic construct
  misc_feature 1..23: note = HLA-A targeting gRNA
  source 1..23: mol_type = other DNA
gtgactggtgactttagaaccgg

SEQ ID NO: 7651 - DNA, 23 bp, synthetic construct
  misc_feature 1..23: note = HLA-A targeting gRNA
  source 1..23: mol_type = other DNA
gtgagcctgcggaaactgcgcgg

SEQ ID NO: 7652 - DNA, 23 bp, synthetic construct
  misc_feature 1..23: note = HLA-A targeting gRNA
  source 1..23: mol_type = other DNA
gtgagcctgcggaacctgcgcgg

SEQ ID NO: 7653 - DNA, 23 bp, synthetic construct
  misc_feature 1..23: note = HLA-A targeting gRNA
  source 1..23: mol_type = other DNA
gtgagcctgcggaacctgcttgg

SEQ ID NO: 7654 - DNA, 23 bp, synthetic construct
  misc_feature 1..23: note = HLA-A targeting gRNA
  source 1..23: mol_type = other DNA
gtgagtccgggtgggtgactggg

SEQ ID NO: 7655 - DNA, 23 bp, synthetic construct
  misc_feature 1..23: note = HLA-A targeting gRNA
  source 1..23: mol_type = other DNA
gtgatgtatggctgcgacgtggg

SEQ ID NO: 7656 - DNA, 23 bp, synthetic construct
  misc_feature 1..23: note = HLA-A targeting gRNA
  source 1..23: mol_type = other DNA
gtgcgaggttgggagggaaacgg

SEQ ID NO: 7657 - DNA, 23 bp, synthetic construct
  misc_feature 1..23: note = HLA-A targeting gRNA
  source 1..23: mol_type = other DNA
gtgcgggatcgggagggaaatgg

SEQ ID NO: 7658 - DNA, 23 bp, synthetic construct
  misc_feature 1..23: note = HLA-A targeting gRNA
  source 1..23: mol_type = other DNA
gtgcggggtcggcagggaaatgg

SEQ ID NO: 7659 - DNA, 23 bp, synthetic construct
  misc_feature 1..23: note = HLA-A targeting gRNA
  source 1..23: mol_type = other DNA
gtgcggggtcgggagggaaatgg

SEQ ID NO: 7660 - DNA, 23 bp, synthetic construct
  misc_feature 1..23: note = HLA-A targeting gRNA
  source 1..23: mol_type = other DNA
gtgcggggttaggagggaaacgg

SEQ ID NO: 7661 - DNA, 23 bp, synthetic construct
  misc_feature 1..23: note = HLA-A targeting gRNA
  source 1..23: mol_type = other DNA
gtgcggggttgggagggaaacgg

SEQ ID NO: 7662 - DNA, 23 bp, synthetic construct
  misc_feature 1..23: note = HLA-A targeting gRNA
  source 1..23: mol_type = other DNA
gtgcggggttgggagggaagcgg

SEQ ID NO: 7663 - DNA, 23 bp, synthetic construct
  misc_feature 1..23: note = HLA-A targeting gRNA
  source 1..23: mol_type = other DNA
gtgcggggttgggagggaatcgg

SEQ ID NO: 7664 - DNA, 23 bp, synthetic construct
  misc_feature 1..23: note = HLA-A targeting gRNA
  source 1..23: mol_type = other DNA
gtgcgtggggactttagaactgg

SEQ ID NO: 7665 - DNA, 23 bp, synthetic construct
  misc_feature 1..23: note = HLA-A targeting gRNA
  source 1..23: mol_type = other DNA
gtgctagcacacagggtcccagg

SEQ ID NO: 7666 - DNA, 23 bp, synthetic construct
  misc_feature 1..23: note = HLA-A targeting gRNA
  source 1..23: mol_type = other DNA
gtgctctccgcggccaggccggg

SEQ ID NO: 7667 - DNA, 23 bp, synthetic construct
  misc_feature 1..23: note = HLA-A targeting gRNA
  source 1..23: mol_type = other DNA
gtgctggcacacagggccccagg

SEQ ID NO: 7668 - DNA, 23 bp, synthetic construct
  misc_feature 1..23: note = HLA-A targeting gRNA
  source 1..23: mol_type = other DNA
gtgctggcacacagggtcccagg

SEQ ID NO: 7669 - DNA, 23 bp, synthetic construct
  misc_feature 1..23: note = HLA-A targeting gRNA
  source 1..23: mol_type = other DNA
gtgctgggtgatctgagccgcgg

SEQ ID NO: 7670 - DNA, 23 bp, synthetic construct
  misc_feature 1..23: note = HLA-A targeting gRNA
  source 1..23: mol_type = other DNA
gtgcttccagtaacaaggcgggg

SEQ ID NO: 7671 - DNA, 23 bp, synthetic construct
  misc_feature 1..23: note = HLA-A targeting gRNA
  source 1..23: mol_type = other DNA
gtgcttccagtaacgaggtgggg

SEQ ID NO: 7672 - DNA, 23 bp, synthetic construct
  misc_feature 1..23: note = HLA-A targeting gRNA
  source 1..23: mol_type = other DNA
gtggaaatacctcatggagtggg

SEQ ID NO: 7673 - DNA, 23 bp, synthetic construct
  misc_feature 1..23: note = HLA-A targeting gRNA
  source 1..23: mol_type = other DNA
gtggaagcctgggggcgaggagg

SEQ ID NO: 7674 - DNA, 23 bp, synthetic construct
  misc_feature 1..23: note = HLA-A targeting gRNA
  source 1..23: mol_type = other DNA
gtggactgggaagacggctccgg

SEQ ID NO: 7675 - DNA, 23 bp, synthetic construct
  misc_feature 1..23: note = HLA-A targeting gRNA
  source 1..23: mol_type = other DNA
gtggactgggaagacggctctgg

SEQ ID NO: 7676 - DNA, 23 bp, synthetic construct
  misc_feature 1..23: note = HLA-A targeting gRNA
  source 1..23: mol_type = other DNA
gtggactgggaagatggctctgg

SEQ ID NO: 7677 - DNA, 23 bp, synthetic construct
  misc_feature 1..23: note = HLA-A targeting gRNA
  source 1..23: mol_type = other DNA
gtggagcaggaggggccggacgg

SEQ ID NO: 7678 - DNA, 23 bp, synthetic construct
  misc_feature 1..23: note = HLA-A targeting gRNA
  source 1..23: mol_type = other DNA
gtggatagagcaagaggggccgg

SEQ ID NO: 7679 - DNA, 23 bp, synthetic construct
  misc_feature 1..23: note = HLA-A targeting gRNA
  source 1..23: mol_type = other DNA
gtggatggagcaggaggggccgg

SEQ ID NO: 7680 - DNA, 23 bp, synthetic construct
  misc_feature 1..23: note = HLA-A targeting gRNA
  source 1..23: mol_type = other DNA
gtggatgtacggctgcgacctgg

SEQ ID NO: 7681 - DNA, 23 bp, synthetic construct
  misc_feature 1..23: note = HLA-A targeting gRNA
  source 1..23: mol_type = other DNA
gtggatgtatggctgcgacctgg

SEQ ID NO: 7682 - DNA, 23 bp, synthetic construct
  misc_feature 1..23: note = HLA-A targeting gRNA
  source 1..23: mol_type = other DNA
gtggatgtatggctgcgacgtgg

SEQ ID NO: 7683 - DNA, 23 bp, synthetic construct
  misc_feature 1..23: note = HLA-A targeting gRNA
  source 1..23: mol_type = other DNA
gtggatgtgtggctgcaacctgg

SEQ ID NO: 7684 - DNA, 23 bp, synthetic construct
  misc_feature 1..23: note = HLA-A targeting gRNA
  source 1..23: mol_type = other DNA
gtggatgtgtggctgcgacctgg

SEQ ID NO: 7685 - DNA, 23 bp, synthetic construct
  misc_feature 1..23: note = HLA-A targeting gRNA
  source 1..23: mol_type = other DNA
gtggatgtttggctgcgacctgg

SEQ ID NO: 7686 - DNA, 23 bp, synthetic construct
  misc_feature 1..23: note = HLA-A targeting gRNA
  source 1..23: mol_type = other DNA
gtggattgggaagatggctctgg

SEQ ID NO: 7687 - DNA, 23 bp, synthetic construct
  misc_feature 1..23: note = HLA-A targeting gRNA
  source 1..23: mol_type = other DNA
gtggcaggtctgggggtgggtgg

SEQ ID NO: 7688 - DNA, 23 bp, synthetic construct
  misc_feature 1..23: note = HLA-A targeting gRNA
  source 1..23: mol_type = other DNA
gtggcctcatggtcagagacggg

SEQ ID NO: 7689 - DNA, 23 bp, synthetic construct
  misc_feature 1..23: note = HLA-A targeting gRNA
  source 1..23: mol_type = other DNA
gtggcctcatggtcagagagggg

SEQ ID NO: 7690 - DNA, 23 bp, synthetic construct
  misc_feature 1..23: note = HLA-A targeting gRNA
  source 1..23: mol_type = other DNA
gtggcgggtctggggcggggtgg

SEQ ID NO: 7691 - DNA, 23 bp, synthetic construct
  misc_feature 1..23: note = HLA-A targeting gRNA
  source 1..23: mol_type = other DNA
gtggcgggtctgggggggggggg

SEQ ID NO: 7692 - DNA, 23 bp, synthetic construct
  misc_feature 1..23: note = HLA-A targeting gRNA
  source 1..23: mol_type = other DNA
gtggcgggtctgggggtgggtgg

SEQ ID NO: 7693 - DNA, 23 bp, synthetic construct
  misc_feature 1..23: note = HLA-A targeting gRNA
  source 1..23: mol_type = other DNA
gtgggaacctgggggcgaggagg

SEQ ID NO: 7694 - DNA, 23 bp, synthetic construct
  misc_feature 1..23: note = HLA-A targeting gRNA
  source 1..23: mol_type = other DNA
gtgggacaagaggaattatgggg

SEQ ID NO: 7695 - DNA, 23 bp, synthetic construct
  misc_feature 1..23: note = HLA-A targeting gRNA
  source 1..23: mol_type = other DNA
gtgggacaggaggaattaggggg

SEQ ID NO: 7696 - DNA, 23 bp, synthetic construct
  misc_feature 1..23: note = HLA-A targeting gRNA
  source 1..23: mol_type = other DNA
gtgggacaggaggaattatgggg

SEQ ID NO: 7697 - DNA, 23 bp, synthetic construct
  misc_feature 1..23: note = HLA-A targeting gRNA
  source 1..23: mol_type = other DNA
gtgggagactgggggcgaggagg

SEQ ID NO: 7698 - DNA, 23 bp, synthetic construct
  misc_feature 1..23: note = HLA-A targeting gRNA
  source 1..23: mol_type = other DNA
gtgggagactgggggtgaggagg

SEQ ID NO: 7699 - DNA, 23 bp, synthetic construct
  misc_feature 1..23: note = HLA-A targeting gRNA
  source 1..23: mol_type = other DNA
gtgggagcctgggagcgaggagg

SEQ ID NO: 7700 - DNA, 23 bp, synthetic construct
  misc_feature 1..23: note = HLA-A targeting gRNA
  source 1..23: mol_type = other DNA
gtgggagcctggggcaaggaggg

SEQ ID NO: 7701 - DNA, 23 bp, synthetic construct
  misc_feature 1..23: note = HLA-A targeting gRNA
  source 1..23: mol_type = other DNA
gtgggagcctgggggagaggagg

SEQ ID NO: 7702 - DNA, 23 bp, synthetic construct
  misc_feature 1..23: note = HLA-A targeting gRNA
  source 1..23: mol_type = other DNA
gtgggagcctgggggccaggagg

SEQ ID NO: 7703 - DNA, 23 bp, synthetic construct
  misc_feature 1..23: note = HLA-A targeting gRNA
  source 1..23: mol_type = other DNA
gtgggagcctgggggcgaggagg

SEQ ID NO: 7704 - DNA, 23 bp, synthetic construct
  misc_feature 1..23: note = HLA-A targeting gRNA
  source 1..23: mol_type = other DNA
gtgggagcctgggggtgaggagg

SEQ ID NO: 7705 - DNA, 23 bp, synthetic construct
  misc_feature 1..23: note = HLA-A targeting gRNA
  source 1..23: mol_type = other DNA
gtgggaggcagcccgtgaggcgg

SEQ ID NO: 7706 - DNA, 23 bp, synthetic construct
  misc_feature 1..23: note = HLA-A targeting gRNA
  source 1..23: mol_type = other DNA
gtgggaggcggcccgggtggcgg

SEQ ID NO: 7707 - DNA, 23 bp, synthetic construct
  misc_feature 1..23: note = HLA-A targeting gRNA
  source 1..23: mol_type = other DNA
gtgggaggcggcccgtacggcgg

SEQ ID NO: 7708 - DNA, 23 bp, synthetic construct
  misc_feature 1..23: note = HLA-A targeting gRNA
  source 1..23: mol_type = other DNA
gtgggaggcggcccgtatggcgg

SEQ ID NO: 7709 - DNA, 23 bp, synthetic construct
  misc_feature 1..23: note = HLA-A targeting gRNA
  source 1..23: mol_type = other DNA
gtgggaggcggcccgtgaggcgg

SEQ ID NO: 7710 - DNA, 23 bp, synthetic construct
  misc_feature 1..23: note = HLA-A targeting gRNA
  source 1..23: mol_type = other DNA
gtgggaggcggcccgtgcggcgg

SEQ ID NO: 7711 - DNA, 23 bp, synthetic construct
  misc_feature 1..23: note = HLA-A targeting gRNA
  source 1..23: mol_type = other DNA
gtgggaggcggccggtgaggcgg

SEQ ID NO: 7712 - DNA, 23 bp, synthetic construct
  misc_feature 1..23: note = HLA-A targeting gRNA
  source 1..23: mol_type = other DNA
gtgggaggcggcctgtgaggcgg

SEQ ID NO: 7713 - DNA, 23 bp, synthetic construct
  misc_feature 1..23: note = HLA-A targeting gRNA
  source 1..23: mol_type = other DNA
gtgggaggcggctcgtgaggcgg

SEQ ID NO: 7714 - DNA, 23 bp, synthetic construct
  misc_feature 1..23: note = HLA-A targeting gRNA
  source 1..23: mol_type = other DNA
gtgggaggctgggggcgaggagg

SEQ ID NO: 7715 - DNA, 23 bp, synthetic construct
  misc_feature 1..23: note = HLA-A targeting gRNA
  source 1..23: mol_type = other DNA
gtgggcctgcggaacctgcgcgg

SEQ ID NO: 7716 - DNA, 23 bp, synthetic construct
  misc_feature 1..23: note = HLA-A targeting gRNA
  source 1..23: mol_type = other DNA
gtgggcgggggggcggggagggg

SEQ ID NO: 7717 - DNA, 23 bp, synthetic construct
  misc_feature 1..23: note = HLA-A targeting gRNA
  source 1..23: mol_type = other DNA
gtgggcggggggggcggggaggg

SEQ ID NO: 7718 - DNA, 23 bp, synthetic construct
  misc_feature 1..23: note = HLA-A targeting gRNA
  source 1..23: mol_type = other DNA
gtgggcgggggggggtggggtgg

SEQ ID NO: 7719 - DNA, 23 bp, synthetic construct
  misc_feature 1..23: note = HLA-A targeting gRNA
  source 1..23: mol_type = other DNA
gtgggcggggggggtggggtggg

SEQ ID NO: 7720 - DNA, 23 bp, synthetic construct
  misc_feature 1..23: note = HLA-A targeting gRNA
  source 1..23: mol_type = other DNA
gtgggctgggaagatggccctgg

SEQ ID NO: 7721 - DNA, 23 bp, synthetic construct
  misc_feature 1..23: note = HLA-A targeting gRNA
  source 1..23: mol_type = other DNA
gtggggaaaggcctgggtaatgg

SEQ ID NO: 7722 - DNA, 23 bp, synthetic construct
  misc_feature 1..23: note = HLA-A targeting gRNA
  source 1..23: mol_type = other DNA
gtggggcacacttctacctgggg

SEQ ID NO: 7723 - DNA, 23 bp, synthetic construct
  misc_feature 1..23: note = HLA-A targeting gRNA
  source 1..23: mol_type = other DNA
gtgggggatggggaggggtcggg

SEQ ID NO: 7724 - DNA, 23 bp, synthetic construct
  misc_feature 1..23: note = HLA-A targeting gRNA
  source 1..23: mol_type = other DNA
gtggggtggcgggtctggggggg

SEQ ID NO: 7725 - DNA, 23 bp, synthetic construct
  misc_feature 1..23: note = HLA-A targeting gRNA
  source 1..23: mol_type = other DNA
gtggggtggggagggggcagagg

SEQ ID NO: 7726 - DNA, 23 bp, synthetic construct
  misc_feature 1..23: note = HLA-A targeting gRNA
  source 1..23: mol_type = other DNA
gtgggtcacatgtgtctttgggg

SEQ ID NO: 7727 - DNA, 23 bp, synthetic construct
  misc_feature 1..23: note = HLA-A targeting gRNA
  source 1..23: mol_type = other DNA
gtgggtcacgtgtgtctttgcgg

SEQ ID NO: 7728 - DNA, 23 bp, synthetic construct
  misc_feature 1..23: note = HLA-A targeting gRNA
  source 1..23: mol_type = other DNA
gtgggtcacgtgtgtctttgggg

SEQ ID NO: 7729 - DNA, 23 bp, synthetic construct
  misc_feature 1..23: note = HLA-A targeting gRNA
  source 1..23: mol_type = other DNA
gtgggtggagaaggaggggccgg

SEQ ID NO: 7730 - DNA, 23 bp, synthetic construct
  misc_feature 1..23: note = HLA-A targeting gRNA
  source 1..23: mol_type = other DNA
gtgggtggagcaggaggggccgg

SEQ ID NO: 7731 - DNA, 23 bp, synthetic construct
  misc_feature 1..23: note = HLA-A targeting gRNA
  source 1..23: mol_type = other DNA
gtgggtggggcagaggggaaagg

SEQ ID NO: 7732 - DNA, 23 bp, synthetic construct
  misc_feature 1..23: note = HLA-A targeting gRNA
  source 1..23: mol_type = other DNA
gtgggtggggcagtggggaaagg

SEQ ID NO: 7733 - DNA, 23 bp, synthetic construct
  misc_feature 1..23: note = HLA-A targeting gRNA
  source 1..23: mol_type = other DNA
gtgggtgggggtggcgggtctgg

SEQ ID NO: 7734 - DNA, 23 bp, synthetic construct
  misc_feature 1..23: note = HLA-A targeting gRNA
  source 1..23: mol_type = other DNA
gtgggtggggtggcaggtctggg

SEQ ID NO: 7735 - DNA, 23 bp, synthetic construct
  misc_feature 1..23: note = HLA-A targeting gRNA
  source 1..23: mol_type = other DNA
gtgggtggggtggcgggtctggg

SEQ ID NO: 7736 - DNA, 23 bp, synthetic construct
  misc_feature 1..23: note = HLA-A targeting gRNA
  source 1..23: mol_type = other DNA
gtggtcgggggtggggcagaggg

SEQ ID NO: 7737 - DNA, 23 bp, synthetic construct
  misc_feature 1..23: note = HLA-A targeting gRNA
  source 1..23: mol_type = other DNA
gtggtctggggtggggcagaggg

SEQ ID NO: 7738 - DNA, 23 bp, synthetic construct
  misc_feature 1..23: note = HLA-A targeting gRNA
  source 1..23: mol_type = other DNA
gtgtagatacctcatggagtggg

SEQ ID NO: 7739 - DNA, 23 bp, synthetic construct
  misc_feature 1..23: note = HLA-A targeting gRNA
  source 1..23: mol_type = other DNA
gtgtccgcggcggtccaggaggg

SEQ ID NO: 7740 - DNA, 23 bp, synthetic construct
  misc_feature 1..23: note = HLA-A targeting gRNA
  source 1..23: mol_type = other DNA
gtgtctctcacagcttgaaaagg

SEQ ID NO: 7741 - DNA, 23 bp, synthetic construct
  misc_feature 1..23: note = HLA-A targeting gRNA
  source 1..23: mol_type = other DNA
gtgtctctcatcacttgtaaagg

SEQ ID NO: 7742 - DNA, 23 bp, synthetic construct
  misc_feature 1..23: note = HLA-A targeting gRNA
  source 1..23: mol_type = other DNA
gtgtctttgcggggtctgatggg

SEQ ID NO: 7743 - DNA, 23 bp, synthetic construct
  misc_feature 1..23: note = HLA-A targeting gRNA
  source 1..23: mol_type = other DNA
gtgtctttgggcgttctgacggg

SEQ ID NO: 7744 - DNA, 23 bp, synthetic construct
  misc_feature 1..23: note = HLA-A targeting gRNA
  source 1..23: mol_type = other DNA
gtgtctttggggggtctgatggg

SEQ ID NO: 7745 - DNA, 23 bp, synthetic construct
  misc_feature 1..23: note = HLA-A targeting gRNA
  source 1..23: mol_type = other DNA
gtgtctttgggggttctgacggg

SEQ ID NO: 7746 - DNA, 23 bp, synthetic construct
  misc_feature 1..23: note = HLA-A targeting gRNA
  source 1..23: mol_type = other DNA
gtgtctttgggtgttctgacggg

SEQ ID NO: 7747 - DNA, 23 bp, synthetic construct
  misc_feature 1..23: note = HLA-A targeting gRNA
  source 1..23: mol_type = other DNA
gtgtctttgggtgttctgatggg

SEQ ID NO: 7748 - DNA, 23 bp, synthetic construct
  misc_feature 1..23: note = HLA-A targeting gRNA
  source 1..23: mol_type = other DNA
gtgtgtaggaggaagagctcagg

SEQ ID NO: 7749 - DNA, 23 bp, synthetic construct
  misc_feature 1..23: note = HLA-A targeting gRNA
  source 1..23: mol_type = other DNA
gtgttcccgtcccaatattccgg

SEQ ID NO: 7750 - DNA, 23 bp, synthetic construct
  misc_feature 1..23: note = HLA-A targeting gRNA
  source 1..23: mol_type = other DNA
gtgttccctgcatcattactggg

SEQ ID NO: 7751 - DNA, 23 bp, synthetic construct
  misc_feature 1..23: note = HLA-A targeting gRNA
  source 1..23: mol_type = other DNA
gtgttccctgcctcattactggg

SEQ ID NO: 7752 - DNA, 23 bp, synthetic construct
  misc_feature 1..23: note = HLA-A targeting gRNA
  source 1..23: mol_type = other DNA
gtgttccggtcccaatattccgg

SEQ ID NO: 7753 - DNA, 23 bp, synthetic construct
  misc_feature 1..23: note = HLA-A targeting gRNA
  source 1..23: mol_type = other DNA
gtgttccggtcccaatgctccgg

SEQ ID NO: 7754 - DNA, 23 bp, synthetic construct
  misc_feature 1..23: note = HLA-A targeting gRNA
  source 1..23: mol_type = other DNA
gtgttcgggtcccaatactccgg

SEQ ID NO: 7755 - DNA, 23 bp, synthetic construct
  misc_feature 1..23: note = HLA-A targeting gRNA
  source 1..23: mol_type = other DNA
gtgtttcctgatcctgccctggg

SEQ ID NO: 7756 - DNA, 23 bp, synthetic construct
  misc_feature 1..23: note = HLA-A targeting gRNA
  source 1..23: mol_type = other DNA
gtgtttcctgatcctgccttggg

SEQ ID NO: 7757 - DNA, 23 bp, synthetic construct
  misc_feature 1..23: note = HLA-A targeting gRNA
  source 1..23: mol_type = other DNA
gttagcataatatgaggagttgg

SEQ ID NO: 7758 - DNA, 23 bp, synthetic construct
  misc_feature 1..23: note = HLA-A targeting gRNA
  source 1..23: mol_type = other DNA
gttagcataatgtgaggaggtgg

SEQ ID NO: 7759 - DNA, 23 bp, synthetic construct
  misc_feature 1..23: note = HLA-A targeting gRNA
  source 1..23: mol_type = other DNA
gttagcctaatgtgaggaggtgg

SEQ ID NO: 7760 - DNA, 23 bp, synthetic construct
  misc_feature 1..23: note = HLA-A targeting gRNA
  source 1..23: mol_type = other DNA
gttcaggtagggaaggggtgagg

SEQ ID NO: 7761 - DNA, 23 bp, synthetic construct
  misc_feature 1..23: note = HLA-A targeting gRNA
  source 1..23: mol_type = other DNA
gttcctgttagcataatatgagg

SEQ ID NO: 7762 - DNA, 23 bp, synthetic construct
  misc_feature 1..23: note = HLA-A targeting gRNA
  source 1..23: mol_type = other DNA
gttcctgttagcataatgtgagg

SEQ ID NO: 7763 - DNA, 23 bp, synthetic construct
  misc_feature 1..23: note = HLA-A targeting gRNA
  source 1..23: mol_type = other DNA
gttctagaagtcccaggtcccgg

SEQ ID NO: 7764 - DNA, 23 bp, synthetic construct
  misc_feature 1..23: note = HLA-A targeting gRNA
  source 1..23: mol_type = other DNA
gttctctcggtaagtctgcgcgg

SEQ ID NO: 7765 - DNA, 23 bp, synthetic construct
  misc_feature 1..23: note = HLA-A targeting gRNA
  source 1..23: mol_type = other DNA
gttctggcacacagggtcccagg

SEQ ID NO: 7766 - DNA, 23 bp, synthetic construct
  misc_feature 1..23: note = HLA-A targeting gRNA
  source 1..23: mol_type = other DNA
gttctggtagggaaggggtgagg

SEQ ID NO: 7767 - DNA, 23 bp, synthetic construct
  misc_feature 1..23: note = HLA-A targeting gRNA
  source 1..23: mol_type = other DNA
gttgaggccaaaatccccgcggg

SEQ ID NO: 7768 - DNA, 23 bp, synthetic construct
  misc_feature 1..23: note = HLA-A targeting gRNA
  source 1..23: mol_type = other DNA
gttgaggtcaaaatccccgcggg

SEQ ID NO: 7769 - DNA, 23 bp, synthetic construct
  misc_feature 1..23: note = HLA-A targeting gRNA
  source 1..23: mol_type = other DNA
gttggacaggaggaattatgggg

SEQ ID NO: 7770 - DNA, 23 bp, synthetic construct
  misc_feature 1..23: note = HLA-A targeting gRNA
  source 1..23: mol_type = other DNA
gttggaggcggcccgtgaggcgg

SEQ ID NO: 7771 - DNA, 23 bp, synthetic construct
  misc_feature 1..23: note = HLA-A targeting gRNA
  source 1..23: mol_type = other DNA
gttggaggcggcccgtgcggcgg

SEQ ID NO: 7772 - DNA, 23 bp, synthetic construct
  misc_feature 1..23: note = HLA-A targeting gRNA
  source 1..23: mol_type = other DNA
gttggaggcggcccgtggggcgg

SEQ ID NO: 7773 - DNA, 23 bp, synthetic construct
  misc_feature 1..23: note = HLA-A targeting gRNA
  source 1..23: mol_type = other DNA
gttggaggcggcccgtgtggcgg

SEQ ID NO: 7774 - DNA, 23 bp, synthetic construct
  misc_feature 1..23: note = HLA-A targeting gRNA
  source 1..23: mol_type = other DNA
gttgggagaagtgaaactcaggg

SEQ ID NO: 7775 - DNA, 23 bp, synthetic construct
  misc_feature 1..23: note = HLA-A targeting gRNA
  source 1..23: mol_type = other DNA
gttgggagggaaacggcctctgg

SEQ ID NO: 7776 - DNA, 23 bp, synthetic construct
  misc_feature 1..23: note = HLA-A targeting gRNA
  source 1..23: mol_type = other DNA
gttgtaatccttgccgtcgtagg

SEQ ID NO: 7777 - DNA, 23 bp, synthetic construct
  misc_feature 1..23: note = HLA-A targeting gRNA
  source 1..23: mol_type = other DNA
gtttaggccaaaatccccgcggg

SEQ ID NO: 7778 - DNA, 23 bp, synthetic construct
  misc_feature 1..23: note = HLA-A targeting gRNA
  source 1..23: mol_type = other DNA
gtttctccacatccgtgtcctgg

SEQ ID NO: 7779 - DNA, 23 bp, synthetic construct
  misc_feature 1..23: note = HLA-A targeting gRNA
  source 1..23: mol_type = other DNA
gtttggctgcgacctggggccgg

SEQ ID NO: 7780 - DNA, 23 bp, synthetic construct
  misc_feature 1..23: note = HLA-A targeting gRNA
  source 1..23: mol_type = other DNA
gtttggctgcgacgtggggccgg

SEQ ID NO: 7781 - DNA, 23 bp, synthetic construct
  misc_feature 1..23: note = HLA-A targeting gRNA
  source 1..23: mol_type = other DNA
gttttcccgagtttcctctgagg

SEQ ID NO: 7782 - DNA, 23 bp, synthetic construct
  misc_feature 1..23: note = HLA-A targeting gRNA
  source 1..23: mol_type = other DNA
gttttcctgagtttcctctgagg

SEQ ID NO: 7783 - DNA, 23 bp, synthetic construct
  misc_feature 1..23: note = HLA-A targeting gRNA
  source 1..23: mol_type = other DNA
gttttcctgagtttcttctgagg

SEQ ID NO: 7784 - DNA, 23 bp, synthetic construct
  misc_feature 1..23: note = HLA-A targeting gRNA
  source 1..23: mol_type = other DNA
taacccactgagatgaagcgggg

SEQ ID NO: 7785 - DNA, 23 bp, synthetic construct
  misc_feature 1..23: note = HLA-A targeting gRNA
  source 1..23: mol_type = other DNA
taagtgggaggcggcccgtgagg

SEQ ID NO: 7786 - DNA, 23 bp, synthetic construct
  misc_feature 1..23: note = HLA-A targeting gRNA
  source 1..23: mol_type = other DNA
taatgaagcggggctccccgcgg

SEQ ID NO: 7787 - DNA, 23 bp, synthetic construct
  misc_feature 1..23: note = HLA-A targeting gRNA
  source 1..23: mol_type = other DNA
taattgtcctagacagcagaggg

SEQ ID NO: 7788 - DNA, 23 bp, synthetic construct
  misc_feature 1..23: note = HLA-A targeting gRNA
  source 1..23: mol_type = other DNA
taattgtcctagagagaagaggg

SEQ ID NO: 7789 - DNA, 23 bp, synthetic construct
  misc_feature 1..23: note = HLA-A targeting gRNA
  source 1..23: mol_type = other DNA
taattgtcctagagagcagacgg

SEQ ID NO: 7790 - DNA, 23 bp, synthetic construct
  misc_feature 1..23: note = HLA-A targeting gRNA
  source 1..23: mol_type = other DNA
taattgtcctagagagcagaggg

SEQ ID NO: 7791 - DNA, 23 bp, synthetic construct
  misc_feature 1..23: note = HLA-A targeting gRNA
  source 1..23: mol_type = other DNA
taattgtctagagagaagagggg

SEQ ID NO: 7792 - DNA, 23 bp, synthetic construct
  misc_feature 1..23: note = HLA-A targeting gRNA
  source 1..23: mol_type = other DNA
tacaccgccatgacccggcccgg

SEQ ID NO: 7793 - DNA, 23 bp, synthetic construct
  misc_feature 1..23: note = HLA-A targeting gRNA
  source 1..23: mol_type = other DNA
tacaccgccatgtcccggcccgg

SEQ ID NO: 7794 - DNA, 23 bp, synthetic construct
  misc_feature 1..23: note = HLA-A targeting gRNA
  source 1..23: mol_type = other DNA
tacaccgccatgtcccggcctgg

SEQ ID NO: 7795 - DNA, 23 bp, synthetic construct
  misc_feature 1..23: note = HLA-A targeting gRNA
  source 1..23: mol_type = other DNA
tacaccgccgtgtcccggccagg

SEQ ID NO: 7796 - DNA, 23 bp, synthetic construct
  misc_feature 1..23: note = HLA-A targeting gRNA
  source 1..23: mol_type = other DNA
tacaccgccgtgtcccggcccgg

SEQ ID NO: 7797 - DNA, 23 bp, synthetic construct
  misc_feature 1..23: note = HLA-A targeting gRNA
  source 1..23: mol_type = other DNA
tacaccgccgtgtcccggcctgg

SEQ ID NO: 7798 - DNA, 23 bp, synthetic construct
  misc_feature 1..23: note = HLA-A targeting gRNA
  source 1..23: mol_type = other DNA
tacaccgccgtgtccgggcccgg

SEQ ID NO: 7799 - DNA, 23 bp, synthetic construct
  misc_feature 1..23: note = HLA-A targeting gRNA
  source 1..23: mol_type = other DNA
tacaccgctatgtcccggcccgg

SEQ ID NO: 7800 - DNA, 23 bp, synthetic construct
  misc_feature 1..23: note = HLA-A targeting gRNA
  source 1..23: mol_type = other DNA
tacaccgctgtgtcccggcccgg

SEQ ID NO: 7801 - DNA, 23 bp, synthetic construct
  misc_feature 1..23: note = HLA-A targeting gRNA
  source 1..23: mol_type = other DNA
tacagacccaaggcaggatcagg

SEQ ID NO: 7802 - DNA, 23 bp, synthetic construct
  misc_feature 1..23: note = HLA-A targeting gRNA
  source 1..23: mol_type = other DNA
tacagacccagggcaggatcagg

SEQ ID NO: 7803 - DNA, 23 bp, synthetic construct
  misc_feature 1..23: note = HLA-A targeting gRNA
  source 1..23: mol_type = other DNA
taccaccaggacgcctacgacgg

SEQ ID NO: 7804 - DNA, 23 bp, synthetic construct
  misc_feature 1..23: note = HLA-A targeting gRNA
  source 1..23: mol_type = other DNA
tacccaatgggagtgggaagtgg

SEQ ID NO: 7805 - DNA, 23 bp, synthetic construct
  misc_feature 1..23: note = HLA-A targeting gRNA
  source 1..23: mol_type = other DNA
tacccagcgcaagttggaggcgg

SEQ ID NO: 7806 - DNA, 23 bp, synthetic construct
  misc_feature 1..23: note = HLA-A targeting gRNA
  source 1..23: mol_type = other DNA
tacctcaaggagtgggagcctgg

SEQ ID NO: 7807 - DNA, 23 bp, synthetic construct
  misc_feature 1..23: note = HLA-A targeting gRNA
  source 1..23: mol_type = other DNA
tacctcatgaagtgggagcctgg

SEQ ID NO: 7808 - DNA, 23 bp, synthetic construct
  misc_feature 1..23: note = HLA-A targeting gRNA
  source 1..23: mol_type = other DNA
tacctcatggagagggagcctgg

SEQ ID NO: 7809 - DNA, 23 bp, synthetic construct
  misc_feature 1..23: note = HLA-A targeting gRNA
  source 1..23: mol_type = other DNA
tacctcatggagtggaagcctgg

SEQ ID NO: 7810 - DNA, 23 bp, synthetic construct
  misc_feature 1..23: note = HLA-A targeting gRNA
  source 1..23: mol_type = other DNA
tacctcatggagtgggaacctgg

SEQ ID NO: 7811 - DNA, 23 bp, synthetic construct
  misc_feature 1..23: note = HLA-A targeting gRNA
  source 1..23: mol_type = other DNA
tacctcatggagtgggagactgg

SEQ ID NO: 7812 - DNA, 23 bp, synthetic construct
  misc_feature 1..23: note = HLA-A targeting gRNA
  source 1..23: mol_type = other DNA
tacctggagggcctgtgcgtggg

SEQ ID NO: 7813 - DNA, 23 bp, synthetic construct
  misc_feature 1..23: note = HLA-A targeting gRNA
  source 1..23: mol_type = other DNA
tacgactgcagacccagggcagg

SEQ ID NO: 7814 - DNA, 23 bp, synthetic construct
  misc_feature 1..23: note = HLA-A targeting gRNA
  source 1..23: mol_type = other DNA
tacgtcatggagtgggagcctgg

SEQ ID NO: 7815 - DNA, 23 bp, synthetic construct
  misc_feature 1..23: note = HLA-A targeting gRNA
  source 1..23: mol_type = other DNA
tactacaaccagagcgagaccgg

SEQ ID NO: 7816 - DNA, 23 bp, synthetic construct
  misc_feature 1..23: note = HLA-A targeting gRNA
  source 1..23: mol_type = other DNA
tactacaaccggagcgaggacgg

SEQ ID NO: 7817 - DNA, 23 bp, synthetic construct
  misc_feature 1..23: note = HLA-A targeting gRNA
  source 1..23: mol_type = other DNA
tactacaaccggagcgaggccgg

SEQ ID NO: 7818 - DNA, 23 bp, synthetic construct
  misc_feature 1..23: note = HLA-A targeting gRNA
  source 1..23: mol_type = other DNA
tactataaccagagcgaggacgg

SEQ ID NO: 7819 - DNA, 23 bp, synthetic construct
  misc_feature 1..23: note = HLA-A targeting gRNA
  source 1..23: mol_type = other DNA
tacttcatggagtgggagcctgg

SEQ ID NO: 7820 - DNA, 23 bp, synthetic construct
  misc_feature 1..23: note = HLA-A targeting gRNA
  source 1..23: mol_type = other DNA
tacttcatggagtgggaggctgg

SEQ ID NO: 7821 - DNA, 23 bp, synthetic construct
  misc_feature 1..23: note = HLA-A targeting gRNA
  source 1..23: mol_type = other DNA
tacttctggaaattccttttggg

SEQ ID NO: 7822 - DNA, 23 bp, synthetic construct
  misc_feature 1..23: note = HLA-A targeting gRNA
  source 1..23: mol_type = other DNA
tacttctggaaattctttttggg

SEQ ID NO: 7823 - DNA, 23 bp, synthetic construct
  misc_feature 1..23: note = HLA-A targeting gRNA
  source 1..23: mol_type = other DNA
tagaagtcccaggtcccgggcgg

SEQ ID NO: 7824 - DNA, 23 bp, synthetic construct
  misc_feature 1..23: note = HLA-A targeting gRNA
  source 1..23: mol_type = other DNA
tagacgacacgcagttcgtgcgg

SEQ ID NO: 7825 - DNA, 23 bp, synthetic construct
  misc_feature 1..23: note = HLA-A targeting gRNA
  source 1..23: mol_type = other DNA
tagagtgggcaggggggtggtgg

SEQ ID NO: 7826 - DNA, 23 bp, synthetic construct
  misc_feature 1..23: note = HLA-A targeting gRNA
  source 1..23: mol_type = other DNA
tagagtgggcggggggggcgggg

SEQ ID NO: 7827 - DNA, 23 bp, synthetic construct
  misc_feature 1..23: note = HLA-A targeting gRNA
  source 1..23: mol_type = other DNA
tagagtgggcggggggggggtgg

SEQ ID NO: 7828 - DNA, 23 bp, synthetic construct
  misc_feature 1..23: note = HLA-A targeting gRNA
  source 1..23: mol_type = other DNA
tagagtgggcgggggggggtggg

SEQ ID NO: 7829 - DNA, 23 bp, synthetic construct
  misc_feature 1..23: note = HLA-A targeting gRNA
  source 1..23: mol_type = other DNA
tagagtgggcggggggggtgggg

SEQ ID NO: 7830 - DNA, 23 bp, synthetic construct
  misc_feature 1..23: note = HLA-A targeting gRNA
  source 1..23: mol_type = other DNA
tagcacacagggtcccaggctgg

SEQ ID NO: 7831 - DNA, 23 bp, synthetic construct
  misc_feature 1..23: note = HLA-A targeting gRNA
  source 1..23: mol_type = other DNA
tagcccacggtaatgaagcgggg

SEQ ID NO: 7832 - DNA, 23 bp, synthetic construct
  misc_feature 1..23: note = HLA-A targeting gRNA
  source 1..23: mol_type = other DNA
tagcccacggtgatgaagcgggg

SEQ ID NO: 7833 - DNA, 23 bp, synthetic construct
  misc_feature 1..23: note = HLA-A targeting gRNA
  source 1..23: mol_type = other DNA
tagcccactgagacgaagcgggg

SEQ ID NO: 7834 - DNA, 23 bp, synthetic construct
  misc_feature 1..23: note = HLA-A targeting gRNA
  source 1..23: mol_type = other DNA
tagcccactgagatgaagcgggg

SEQ ID NO: 7835 - DNA, 23 bp, synthetic construct
  misc_feature 1..23: note = HLA-A targeting gRNA
  source 1..23: mol_type = other DNA
tagcccactgcaatgaagcgggg

SEQ ID NO: 7836 - DNA, 23 bp, synthetic construct
  misc_feature 1..23: note = HLA-A targeting gRNA
  source 1..23: mol_type = other DNA
tagcccactgcgatgaagtgggg

SEQ ID NO: 7837 - DNA, 23 bp, synthetic construct
  misc_feature 1..23: note = HLA-A targeting gRNA
  source 1..23: mol_type = other DNA
tagcgcactgagatgaagcgggg

SEQ ID NO: 7838 - DNA, 23 bp, synthetic construct
  misc_feature 1..23: note = HLA-A targeting gRNA
  source 1..23: mol_type = other DNA
tagcggtgaccacagctccaagg

SEQ ID NO: 7839 - DNA, 23 bp, synthetic construct
  misc_feature 1..23: note = HLA-A targeting gRNA
  source 1..23: mol_type = other DNA
taggaggaagagctcaggtaggg

SEQ ID NO: 7840 - DNA, 23 bp, synthetic construct
  misc_feature 1..23: note = HLA-A targeting gRNA
  source 1..23: mol_type = other DNA
taggaggaagagttcaggtaggg

SEQ ID NO: 7841 - DNA, 23 bp, synthetic construct
  misc_feature 1..23: note = HLA-A targeting gRNA
  source 1..23: mol_type = other DNA
taggaggaagagttctggtaggg

SEQ ID NO: 7842 - DNA, 23 bp, synthetic construct
  misc_feature 1..23: note = HLA-A targeting gRNA
  source 1..23: mol_type = other DNA
taggagggaaacggcctctgcgg

SEQ ID NO: 7843 - DNA, 23 bp, synthetic construct
  misc_feature 1..23: note = HLA-A targeting gRNA
  source 1..23: mol_type = other DNA
taggcgacccgggccgtccgtgg

SEQ ID NO: 7844 - DNA, 23 bp, synthetic construct
  misc_feature 1..23: note = HLA-A targeting gRNA
  source 1..23: mol_type = other DNA
taggctgggaagatggctctggg

SEQ ID NO: 7845 - DNA, 23 bp, synthetic construct
  misc_feature 1..23: note = HLA-A targeting gRNA
  source 1..23: mol_type = other DNA
tagggaaggggtgaagagcgggg

SEQ ID NO: 7846 - DNA, 23 bp, synthetic construct
  misc_feature 1..23: note = HLA-A targeting gRNA
  source 1..23: mol_type = other DNA
tagggaaggggtgaggagtgggg

SEQ ID NO: 7847 - DNA, 23 bp, synthetic construct
  misc_feature 1..23: note = HLA-A targeting gRNA
  source 1..23: mol_type = other DNA
tagggaaggggtgaggggtgggg

SEQ ID NO: 7848 - DNA, 23 bp, synthetic construct
  misc_feature 1..23: note = HLA-A targeting gRNA
  source 1..23: mol_type = other DNA
tagggaaggggtggggagtgggg

SEQ ID NO: 7849 - DNA, 23 bp, synthetic construct
  misc_feature 1..23: note = HLA-A targeting gRNA
  source 1..23: mol_type = other DNA
taggtccgagatccgccccgagg

SEQ ID NO: 7850 - DNA, 23 bp, synthetic construct
  misc_feature 1..23: note = HLA-A targeting gRNA
  source 1..23: mol_type = other DNA
tagttctggaaacttctcttggg

SEQ ID NO: 7851 - DNA, 23 bp, synthetic construct
  misc_feature 1..23: note = HLA-A targeting gRNA
  source 1..23: mol_type = other DNA
tataaccagtacgcctacgacgg

SEQ ID NO: 7852 - DNA, 23 bp, synthetic construct
  misc_feature 1..23: note = HLA-A targeting gRNA
  source 1..23: mol_type = other DNA
tataaccagttagcctacgacgg

SEQ ID NO: 7853 - DNA, 23 bp, synthetic construct
  misc_feature 1..23: note = HLA-A targeting gRNA
  source 1..23: mol_type = other DNA
tataaccagttcgcctacgacgg

SEQ ID NO: 7854 - DNA, 23 bp, synthetic construct
  misc_feature 1..23: note = HLA-A targeting gRNA
  source 1..23: mol_type = other DNA
tataaccagttcgcctacgatgg

SEQ ID NO: 7855 - DNA, 23 bp, synthetic construct
  misc_feature 1..23: note = HLA-A targeting gRNA
  source 1..23: mol_type = other DNA
tatccaatacccaatgggagtgg

SEQ ID NO: 7856 - DNA, 23 bp, synthetic construct
  misc_feature 1..23: note = HLA-A targeting gRNA
  source 1..23: mol_type = other DNA
tatcccaggtccctgtgtccagg

SEQ ID NO: 7857 - DNA, 23 bp, synthetic construct
  misc_feature 1..23: note = HLA-A targeting gRNA
  source 1..23: mol_type = other DNA
tatcccaggtgcctgcgtccagg

SEQ ID NO: 7858 - DNA, 23 bp, synthetic construct
  misc_feature 1..23: note = HLA-A targeting gRNA
  source 1..23: mol_type = other DNA
tatcccaggtgcctgcgtccggg

SEQ ID NO: 7859 - DNA, 23 bp, synthetic construct
  misc_feature 1..23: note = HLA-A targeting gRNA
  source 1..23: mol_type = other DNA
tatccgacacccaatgggagtgg

SEQ ID NO: 7860 - DNA, 23 bp, synthetic construct
  misc_feature 1..23: note = HLA-A targeting gRNA
  source 1..23: mol_type = other DNA
tatctctgctcttctccagaagg

SEQ ID NO: 7861 - DNA, 23 bp, synthetic construct
  misc_feature 1..23: note = HLA-A targeting gRNA
  source 1..23: mol_type = other DNA
tatctctgctcttgtccagaagg

SEQ ID NO: 7862 - DNA, 23 bp, synthetic construct
  misc_feature 1..23: note = HLA-A targeting gRNA
  source 1..23: mol_type = other DNA
tatctctgctgttctccagaagg

SEQ ID NO: 7863 - DNA, 23 bp, synthetic construct
  misc_feature 1..23: note = HLA-A targeting gRNA
  source 1..23: mol_type = other DNA
tatctctgttcttgtccagaagg

SEQ ID NO: 7864 - DNA, 23 bp, synthetic construct
  misc_feature 1..23: note = HLA-A targeting gRNA
  source 1..23: mol_type = other DNA
tatctcttctcagggaaagcagg

SEQ ID NO: 7865 - DNA, 23 bp, synthetic construct
  misc_feature 1..23: note = HLA-A targeting gRNA
  source 1..23: mol_type = other DNA
tatctgcggagccactccacagg

SEQ ID NO: 7866 - DNA, 23 bp, synthetic construct
  misc_feature 1..23: note = HLA-A targeting gRNA
  source 1..23: mol_type = other DNA
tatctgttctcagggaaagcagg

SEQ ID NO: 7867 - DNA, 23 bp, synthetic construct
  misc_feature 1..23: note = HLA-A targeting gRNA
  source 1..23: mol_type = other DNA
tatgaccaggacgcctacgacgg

SEQ ID NO: 7868 - DNA, 23 bp, synthetic construct
  misc_feature 1..23: note = HLA-A targeting gRNA
  source 1..23: mol_type = other DNA
tatgaccagtacgcctacgacgg

SEQ ID NO: 7869 - DNA, 23 bp, synthetic construct
  misc_feature 1..23: note = HLA-A targeting gRNA
  source 1..23: mol_type = other DNA
tatgaccagtccgcctaagacgg

SEQ ID NO: 7870 - DNA, 23 bp, synthetic construct
  misc_feature 1..23: note = HLA-A targeting gRNA
  source 1..23: mol_type = other DNA
tatgaccagtccgcctacgacgg

SEQ ID NO: 7871 - DNA, 23 bp, synthetic construct
  misc_feature 1..23: note = HLA-A targeting gRNA
  source 1..23: mol_type = other DNA
tatgaccagttcgcctacgacgg

SEQ ID NO: 7872 - DNA, 23 bp, synthetic construct
  misc_feature 1..23: note = HLA-A targeting gRNA
  source 1..23: mol_type = other DNA
tatgaccggtccgcctacgacgg

SEQ ID NO: 7873 - DNA, 23 bp, synthetic construct
  misc_feature 1..23: note = HLA-A targeting gRNA
  source 1..23: mol_type = other DNA
tatgactacagacccaaggcagg

SEQ ID NO: 7874 - DNA, 23 bp, synthetic construct
  misc_feature 1..23: note = HLA-A targeting gRNA
  source 1..23: mol_type = other DNA
tatgactacagacccagggcagg

SEQ ID NO: 7875 - DNA, 23 bp, synthetic construct
  misc_feature 1..23: note = HLA-A targeting gRNA
  source 1..23: mol_type = other DNA
tatgactgcagacccagggcagg

SEQ ID NO: 7876 - DNA, 23 bp, synthetic construct
  misc_feature 1..23: note = HLA-A targeting gRNA
  source 1..23: mol_type = other DNA
tatgagcagtatgcctacgacgg

SEQ ID NO: 7877 - DNA, 23 bp, synthetic construct
  misc_feature 1..23: note = HLA-A targeting gRNA
  source 1..23: mol_type = other DNA
tatgatcagtccgcctacgacgg

SEQ ID NO: 7878 - DNA, 23 bp, synthetic construct
  misc_feature 1..23: note = HLA-A targeting gRNA
  source 1..23: mol_type = other DNA
tatggccagtccgcctacgacgg

SEQ ID NO: 7879 - DNA, 23 bp, synthetic construct
  misc_feature 1..23: note = HLA-A targeting gRNA
  source 1..23: mol_type = other DNA
tatggctgcgacgtggggcccgg

SEQ ID NO: 7880 - DNA, 23 bp, synthetic construct
  misc_feature 1..23: note = HLA-A targeting gRNA
  source 1..23: mol_type = other DNA
tatgtaatccttgccgtcgtagg

SEQ ID NO: 7881 - DNA, 23 bp, synthetic construct
  misc_feature 1..23: note = HLA-A targeting gRNA
  source 1..23: mol_type = other DNA
tatgtccagtacgcctacgacgg

SEQ ID NO: 7882 - DNA, 23 bp, synthetic construct
  misc_feature 1..23: note = HLA-A targeting gRNA
  source 1..23: mol_type = other DNA
tatgtcccggcccggccgcgggg

SEQ ID NO: 7883 - DNA, 23 bp, synthetic construct
  misc_feature 1..23: note = HLA-A targeting gRNA
  source 1..23: mol_type = other DNA
tatttctacaccgccgtgtccgg

SEQ ID NO: 7884 - DNA, 23 bp, synthetic construct
  misc_feature 1..23: note = HLA-A targeting gRNA
  source 1..23: mol_type = other DNA
tcaaagaatccccattacccagg

SEQ ID NO: 7885 - DNA, 23 bp, synthetic construct
  misc_feature 1..23: note = HLA-A targeting gRNA
  source 1..23: mol_type = other DNA
tcaaagaatctccattacccagg

SEQ ID NO: 7886 - DNA, 23 bp, synthetic construct
  misc_feature 1..23: note = HLA-A targeting gRNA
  source 1..23: mol_type = other DNA
tcaaagaatgtccattacccagg

SEQ ID NO: 7887 - DNA, 23 bp, synthetic construct
  misc_feature 1..23: note = HLA-A targeting gRNA
  source 1..23: mol_type = other DNA
tcaaaggatccccattacccagg

SEQ ID NO: 7888 - DNA, 23 bp, synthetic construct
  misc_feature 1..23: note = HLA-A targeting gRNA
  source 1..23: mol_type = other DNA
tcaaaggatccccattacctagg

SEQ ID NO: 7889 - DNA, 23 bp, synthetic construct
  misc_feature 1..23: note = HLA-A targeting gRNA
  source 1..23: mol_type = other DNA
tcaagagcccgcaggagacgtgg

SEQ ID NO: 7890 - DNA, 23 bp, synthetic construct
  misc_feature 1..23: note = HLA-A targeting gRNA
  source 1..23: mol_type = other DNA
tcacagctcctaggacagctagg

SEQ ID NO: 7891 - DNA, 23 bp, synthetic construct
  misc_feature 1..23: note = HLA-A targeting gRNA
  source 1..23: mol_type = other DNA
tcacaggggctaacgcagcctgg

SEQ ID NO: 7892 - DNA, 23 bp, synthetic construct
  misc_feature 1..23: note = HLA-A targeting gRNA
  source 1..23: mol_type = other DNA
tcaccgctaagatgtgtaggagg

SEQ ID NO: 7893 - DNA, 23 bp, synthetic construct
  misc_feature 1..23: note = HLA-A targeting gRNA
  source 1..23: mol_type = other DNA
tcaccgctatgatgtgtaggagg

SEQ ID NO: 7894 - DNA, 23 bp, synthetic construct
  misc_feature 1..23: note = HLA-A targeting gRNA
  source 1..23: mol_type = other DNA
tcaccttcccctcctttcccagg

SEQ ID NO: 7895 - DNA, 23 bp, synthetic construct
  misc_feature 1..23: note = HLA-A targeting gRNA
  source 1..23: mol_type = other DNA
tcaccttgatattatggtgttgg

SEQ ID NO: 7896 - DNA, 23 bp, synthetic construct
  misc_feature 1..23: note = HLA-A targeting gRNA
  source 1..23: mol_type = other DNA
tcacgactccccatcccccacgg

SEQ ID NO: 7897 - DNA, 23 bp, synthetic construct
  misc_feature 1..23: note = HLA-A targeting gRNA
  source 1..23: mol_type = other DNA
tcactcggtcagcctgtgcctgg

SEQ ID NO: 7898 - DNA, 23 bp, synthetic construct
  misc_feature 1..23: note = HLA-A targeting gRNA
  source 1..23: mol_type = other DNA
tcactcggtcagtctgtgcctgg

SEQ ID NO: 7899 - DNA, 23 bp, synthetic construct
  misc_feature 1..23: note = HLA-A targeting gRNA
  source 1..23: mol_type = other DNA
tcacttctcccaacctgcgtcgg

SEQ ID NO: 7900 - DNA, 23 bp, synthetic construct
  misc_feature 1..23: note = HLA-A targeting gRNA
  source 1..23: mol_type = other DNA
tcacttcttctcccaacttgtgg

SEQ ID NO: 7901 - DNA, 23 bp, synthetic construct
  misc_feature 1..23: note = HLA-A targeting gRNA
  source 1..23: mol_type = other DNA
tcagagcccacaggagacgtggg

SEQ ID NO: 7902 - DNA, 23 bp, synthetic construct
  misc_feature 1..23: note = HLA-A targeting gRNA
  source 1..23: mol_type = other DNA
tcagagcccacaggagatgtggg

SEQ ID NO: 7903 - DNA, 23 bp, synthetic construct
  misc_feature 1..23: note = HLA-A targeting gRNA
  source 1..23: mol_type = other DNA
tcagagcccgcaggagacgtggg

SEQ ID NO: 7904 - DNA, 23 bp, synthetic construct
  misc_feature 1..23: note = HLA-A targeting gRNA
  source 1..23: mol_type = other DNA
tcagagcccgcaggagacgttgg

SEQ ID NO: 7905 - DNA, 23 bp, synthetic construct
  misc_feature 1..23: note = HLA-A targeting gRNA
  source 1..23: mol_type = other DNA
tcagagcccgcaggagatgtggg

SEQ ID NO: 7906 - DNA, 23 bp, synthetic construct
  misc_feature 1..23: note = HLA-A targeting gRNA
  source 1..23: mol_type = other DNA
tcagagccctcaggagacgtggg

SEQ ID NO: 7907 - DNA, 23 bp, synthetic construct
  misc_feature 1..23: note = HLA-A targeting gRNA
  source 1..23: mol_type = other DNA
tcagatcacccagcacaagttgg

SEQ ID NO: 7908 - DNA, 23 bp, synthetic construct
  misc_feature 1..23: note = HLA-A targeting gRNA
  source 1..23: mol_type = other DNA
tcagatcacccagcccaagtggg

SEQ ID NO: 7909 - DNA, 23 bp, synthetic construct
  misc_feature 1..23: note = HLA-A targeting gRNA
  source 1..23: mol_type = other DNA
tcagatcacccagcccaagttgg

SEQ ID NO: 7910 - DNA, 23 bp, synthetic construct
  misc_feature 1..23: note = HLA-A targeting gRNA
  source 1..23: mol_type = other DNA
tcagatcacccagcgcaaatggg

SEQ ID NO: 7911 - DNA, 23 bp, synthetic construct
  misc_feature 1..23: note = HLA-A targeting gRNA
  source 1..23: mol_type = other DNA
tcagatcacccagcgcaagttgg

SEQ ID NO: 7912 - DNA, 23 bp, synthetic construct
  misc_feature 1..23: note = HLA-A targeting gRNA
  source 1..23: mol_type = other DNA
tcagatcacccagcgtaagtggg

SEQ ID NO: 7913 - DNA, 23 bp, synthetic construct
  misc_feature 1..23: note = HLA-A targeting gRNA
  source 1..23: mol_type = other DNA
tcagatcacccagctcaagtggg

SEQ ID NO: 7914 - DNA, 23 bp, synthetic construct
  misc_feature 1..23: note = HLA-A targeting gRNA
  source 1..23: mol_type = other DNA
tcagatcactcagcgcaagttgg

SEQ ID NO: 7915 - DNA, 23 bp, synthetic construct
  misc_feature 1..23: note = HLA-A targeting gRNA
  source 1..23: mol_type = other DNA
tcagatcatccagcgcaagtggg

SEQ ID NO: 7916 - DNA, 23 bp, synthetic construct
  misc_feature 1..23: note = HLA-A targeting gRNA
  source 1..23: mol_type = other DNA
tcagatctcccagcgcaagtggg

SEQ ID NO: 7917 - DNA, 23 bp, synthetic construct
  misc_feature 1..23: note = HLA-A targeting gRNA
  source 1..23: mol_type = other DNA
tcagatctcccagcgcaagttgg

SEQ ID NO: 7918 - DNA, 23 bp, synthetic construct
  misc_feature 1..23: note = HLA-A targeting gRNA
  source 1..23: mol_type = other DNA
tcagattacccagcgcaagttgg

SEQ ID NO: 7919 - DNA, 23 bp, synthetic construct
  misc_feature 1..23: note = HLA-A targeting gRNA
  source 1..23: mol_type = other DNA
tcagccctgacccagctgaaggg

SEQ ID NO: 7920 - DNA, 23 bp, synthetic construct
  misc_feature 1..23: note = HLA-A targeting gRNA
  source 1..23: mol_type = other DNA
tcagccctgacccggctgaaggg

SEQ ID NO: 7921 - DNA, 23 bp, synthetic construct
  misc_feature 1..23: note = HLA-A targeting gRNA
  source 1..23: mol_type = other DNA
tcagccctgacctggctgaaggg

SEQ ID NO: 7922 - DNA, 23 bp, synthetic construct
  misc_feature 1..23: note = HLA-A targeting gRNA
  source 1..23: mol_type = other DNA
tcaggctgcgtgtaagtgatggg

SEQ ID NO: 7923 - DNA, 23 bp, synthetic construct
  misc_feature 1..23: note = HLA-A targeting gRNA
  source 1..23: mol_type = other DNA
tcaggctgcgtgtaagtggtggg

SEQ ID NO: 7924 - DNA, 23 bp, synthetic construct
  misc_feature 1..23: note = HLA-A targeting gRNA
  source 1..23: mol_type = other DNA
tcagggccatgcgatcttagggg

SEQ ID NO: 7925 - DNA, 23 bp, synthetic construct
  misc_feature 1..23: note = HLA-A targeting gRNA
  source 1..23: mol_type = other DNA
tcagggcggggcggggctcgggg

SEQ ID NO: 7926 - DNA, 23 bp, synthetic construct
  misc_feature 1..23: note = HLA-A targeting gRNA
  source 1..23: mol_type = other DNA
tcaggggaaggtccctgctaagg

SEQ ID NO: 7927 - DNA, 23 bp, synthetic construct
  misc_feature 1..23: note = HLA-A targeting gRNA
  source 1..23: mol_type = other DNA
tcaggtagggaaggggtgagggg

SEQ ID NO: 7928 - DNA, 23 bp, synthetic construct
  misc_feature 1..23: note = HLA-A targeting gRNA
  source 1..23: mol_type = other DNA
tcagtccgcctacgacggcaagg

SEQ ID NO: 7929 - DNA, 23 bp, synthetic construct
  misc_feature 1..23: note = HLA-A targeting gRNA
  source 1..23: mol_type = other DNA
tcatcccattctccattcaaggg

SEQ ID NO: 7930 - DNA, 23 bp, synthetic construct
  misc_feature 1..23: note = HLA-A targeting gRNA
  source 1..23: mol_type = other DNA
tcatcccattttccattcaaggg

SEQ ID NO: 7931 - DNA, 23 bp, synthetic construct
  misc_feature 1..23: note = HLA-A targeting gRNA
  source 1..23: mol_type = other DNA
tcatcccccacggacggcccggg

SEQ ID NO: 7932 - DNA, 23 bp, synthetic construct
  misc_feature 1..23: note = HLA-A targeting gRNA
  source 1..23: mol_type = other DNA
tcatgactattgtgttctgtagg

SEQ ID NO: 7933 - DNA, 23 bp, synthetic construct
  misc_feature 1..23: note = HLA-A targeting gRNA
  source 1..23: mol_type = other DNA
tcatgccattctccattcaacgg

SEQ ID NO: 7934 - DNA, 23 bp, synthetic construct
  misc_feature 1..23: note = HLA-A targeting gRNA
  source 1..23: mol_type = other DNA
tcatgccattctccattcaaggg

SEQ ID NO: 7935 - DNA, 23 bp, synthetic construct
  misc_feature 1..23: note = HLA-A targeting gRNA
  source 1..23: mol_type = other DNA
tcattcggtcagtctgtgcctgg

SEQ ID NO: 7936 - DNA, 23 bp, synthetic construct
  misc_feature 1..23: note = HLA-A targeting gRNA
  source 1..23: mol_type = other DNA
tcattttcctcccctcctcgtgg

SEQ ID NO: 7937 - DNA, 23 bp, synthetic construct
  misc_feature 1..23: note = HLA-A targeting gRNA
  source 1..23: mol_type = other DNA
tccaacttttctgagtccttcgg

SEQ ID NO: 7938 - DNA, 23 bp, synthetic construct
  misc_feature 1..23: note = HLA-A targeting gRNA
  source 1..23: mol_type = other DNA
tccaagcctcagccctgacccgg

SEQ ID NO: 7939 - DNA, 23 bp, synthetic construct
  misc_feature 1..23: note = HLA-A targeting gRNA
  source 1..23: mol_type = other DNA
tccaagggccgtgtctgcactgg

SEQ ID NO: 7940 - DNA, 23 bp, synthetic construct
  misc_feature 1..23: note = HLA-A targeting gRNA
  source 1..23: mol_type = other DNA
tccaagggccgtgtctgcattgg

SEQ ID NO: 7941 - DNA, 23 bp, synthetic construct
  misc_feature 1..23: note = HLA-A targeting gRNA
  source 1..23: mol_type = other DNA
tccaatgaatagattatcccagg

SEQ ID NO: 7942 - DNA, 23 bp, synthetic construct
  misc_feature 1..23: note = HLA-A targeting gRNA
  source 1..23: mol_type = other DNA
tccacatccgtgtcctggcccgg

SEQ ID NO: 7943 - DNA, 23 bp, synthetic construct
  misc_feature 1..23: note = HLA-A targeting gRNA
  source 1..23: mol_type = other DNA
tccaccccaaggtggatctgcgg

SEQ ID NO: 7944 - DNA, 23 bp, synthetic construct
  misc_feature 1..23: note = HLA-A targeting gRNA
  source 1..23: mol_type = other DNA
tccagccagcgacagtgcccagg

SEQ ID NO: 7945 - DNA, 23 bp, synthetic construct
  misc_feature 1..23: note = HLA-A targeting gRNA
  source 1..23: mol_type = other DNA
tccagcttttctgagtccttcgg

SEQ ID NO: 7946 - DNA, 23 bp, synthetic construct
  misc_feature 1..23: note = HLA-A targeting gRNA
  source 1..23: mol_type = other DNA
tccaggcagcgacagtgcccagg

SEQ ID NO: 7947 - DNA, 23 bp, synthetic construct
  misc_feature 1..23: note = HLA-A targeting gRNA
  source 1..23: mol_type = other DNA
tccaggtctcgatcagggccagg

SEQ ID NO: 7948 - DNA, 23 bp, synthetic construct
  misc_feature 1..23: note = HLA-A targeting gRNA
  source 1..23: mol_type = other DNA
tcccactcccattgggtgtcggg

SEQ ID NO: 7949 - DNA, 23 bp, synthetic construct
  misc_feature 1..23: note = HLA-A targeting gRNA
  source 1..23: mol_type = other DNA
tcccaggctcccactccatgagg

SEQ ID NO: 7950 - DNA, 23 bp, synthetic construct
  misc_feature 1..23: note = HLA-A targeting gRNA
  source 1..23: mol_type = other DNA
tcccagggccgtgtctgcattgg

SEQ ID NO: 7951 - DNA, 23 bp, synthetic construct
  misc_feature 1..23: note = HLA-A targeting gRNA
  source 1..23: mol_type = other DNA
tcccaggtgcctgcatccgctgg

SEQ ID NO: 7952 - DNA, 23 bp, synthetic construct
  misc_feature 1..23: note = HLA-A targeting gRNA
  source 1..23: mol_type = other DNA
tcccaggtgcctgcgtccgctgg

SEQ ID NO: 7953 - DNA, 23 bp, synthetic construct
  misc_feature 1..23: note = HLA-A targeting gRNA
  source 1..23: mol_type = other DNA
tcccattctccaggtatctgcgg

SEQ ID NO: 7954 - DNA, 23 bp, synthetic construct
  misc_feature 1..23: note = HLA-A targeting gRNA
  source 1..23: mol_type = other DNA
tcccattctccattcaagggagg

SEQ ID NO: 7955 - DNA, 23 bp, synthetic construct
  misc_feature 1..23: note = HLA-A targeting gRNA
  source 1..23: mol_type = other DNA
tcccattcttcaggtatctgcgg

SEQ ID NO: 7956 - DNA, 23 bp, synthetic construct
  misc_feature 1..23: note = HLA-A targeting gRNA
  source 1..23: mol_type = other DNA
tcccattcttcaggtgtctgcgg

SEQ ID NO: 7957 - DNA, 23 bp, synthetic construct
  misc_feature 1..23: note = HLA-A targeting gRNA
  source 1..23: mol_type = other DNA
tcccattttccattcaagggagg

SEQ ID NO: 7958 - DNA, 23 bp, synthetic construct
  misc_feature 1..23: note = HLA-A targeting gRNA
  source 1..23: mol_type = other DNA
tccccaattcccactcccattgg

SEQ ID NO: 7959 - DNA, 23 bp, synthetic construct
  misc_feature 1..23: note = HLA-A targeting gRNA
  source 1..23: mol_type = other DNA
tccccacttcccactcccattgg

SEQ ID NO: 7960 - DNA, 23 bp, synthetic construct
  misc_feature 1..23: note = HLA-A targeting gRNA
  source 1..23: mol_type = other DNA
tccccatttcccactcccattgg

SEQ ID NO: 7961 - DNA, 23 bp, synthetic construct
  misc_feature 1..23: note = HLA-A targeting gRNA
  source 1..23: mol_type = other DNA
tccccgcgggttgggcggggcgg

SEQ ID NO: 7962 - DNA, 23 bp, synthetic construct
  misc_feature 1..23: note = HLA-A targeting gRNA
  source 1..23: mol_type = other DNA
tccccgcgggttggtcagggcgg

SEQ ID NO: 7963 - DNA, 23 bp, synthetic construct
  misc_feature 1..23: note = HLA-A targeting gRNA
  source 1..23: mol_type = other DNA
tccccgcgggttggtcggggcgg

SEQ ID NO: 7964 - DNA, 23 bp, synthetic construct
  misc_feature 1..23: note = HLA-A targeting gRNA
  source 1..23: mol_type = other DNA
tcccctccttaccccagctcagg

SEQ ID NO: 7965 - DNA, 23 bp, synthetic construct
  misc_feature 1..23: note = HLA-A targeting gRNA
  source 1..23: mol_type = other DNA
tcccgagagcagcaggaggacgg

SEQ ID NO: 7966 - DNA, 23 bp, synthetic construct
  misc_feature 1..23: note = HLA-A targeting gRNA
  source 1..23: mol_type = other DNA
tcccgagagcagcaggaggaggg

SEQ ID NO: 7967 - DNA, 23 bp, synthetic construct
  misc_feature 1..23: note = HLA-A targeting gRNA
  source 1..23: mol_type = other DNA
tcccgagagcagcaggatgaggg

SEQ ID NO: 7968 - DNA, 23 bp, synthetic construct
  misc_feature 1..23: note = HLA-A targeting gRNA
  source 1..23: mol_type = other DNA
tcccggcatggcctcccacgagg

SEQ ID NO: 7969 - DNA, 23 bp, synthetic construct
  misc_feature 1..23: note = HLA-A targeting gRNA
  source 1..23: mol_type = other DNA
tcccgggatggcctcccacgagg

SEQ ID NO: 7970 - DNA, 23 bp, synthetic construct
  misc_feature 1..23: note = HLA-A targeting gRNA
  source 1..23: mol_type = other DNA
tcccgggatggccttccacgagg

SEQ ID NO: 7971 - DNA, 23 bp, synthetic construct
  misc_feature 1..23: note = HLA-A targeting gRNA
  source 1..23: mol_type = other DNA
tcccgttccccaggtatctgcgg

SEQ ID NO: 7972 - DNA, 23 bp, synthetic construct
  misc_feature 1..23: note = HLA-A targeting gRNA
  source 1..23: mol_type = other DNA
tcccgttctccagatatctgcgg

SEQ ID NO: 7973 - DNA, 23 bp, synthetic construct
  misc_feature 1..23: note = HLA-A targeting gRNA
  source 1..23: mol_type = other DNA
tcccgttctccaggtatccgcgg

SEQ ID NO: 7974 - DNA, 23 bp, synthetic construct
  misc_feature 1..23: note = HLA-A targeting gRNA
  source 1..23: mol_type = other DNA
tccctttctccaggtatctgcgg

SEQ ID NO: 7975 - DNA, 23 bp, synthetic construct
  misc_feature 1..23: note = HLA-A targeting gRNA
  source 1..23: mol_type = other DNA
tccctttcttcaggtatctgcgg

SEQ ID NO: 7976 - DNA, 23 bp, synthetic construct
  misc_feature 1..23: note = HLA-A targeting gRNA
  source 1..23: mol_type = other DNA
tccgagagccttgtctgcattgg

SEQ ID NO: 7977 - DNA, 23 bp, synthetic construct
  misc_feature 1..23: note = HLA-A targeting gRNA
  source 1..23: mol_type = other DNA
tccgagggccgcgtctgcaatgg

SEQ ID NO: 7978 - DNA, 23 bp, synthetic construct
  misc_feature 1..23: note = HLA-A targeting gRNA
  source 1..23: mol_type = other DNA
tccgagggccgcgtctgcattgg

SEQ ID NO: 7979 - DNA, 23 bp, synthetic construct
  misc_feature 1..23: note = HLA-A targeting gRNA
  source 1..23: mol_type = other DNA
tccgagtccgggtgggtgactgg

SEQ ID NO: 7980 - DNA, 23 bp, synthetic construct
  misc_feature 1..23: note = HLA-A targeting gRNA
  source 1..23: mol_type = other DNA
tccgcagacacctgaagaatggg

SEQ ID NO: 7981 - DNA, 23 bp, synthetic construct
  misc_feature 1..23: note = HLA-A targeting gRNA
  source 1..23: mol_type = other DNA
tccgcagacacctggagaacagg

SEQ ID NO: 7982 - DNA, 23 bp, synthetic construct
  misc_feature 1..23: note = HLA-A targeting gRNA
  source 1..23: mol_type = other DNA
tccgcagatacctgaagaaaggg

SEQ ID NO: 7983 - DNA, 23 bp, synthetic construct
  misc_feature 1..23: note = HLA-A targeting gRNA
  source 1..23: mol_type = other DNA
tccgcagatacctgaagaatggg

SEQ ID NO: 7984 - DNA, 23 bp, synthetic construct
  misc_feature 1..23: note = HLA-A targeting gRNA
  source 1..23: mol_type = other DNA
tccgcagatacctggagaaaggg

SEQ ID NO: 7985 - DNA, 23 bp, synthetic construct
  misc_feature 1..23: note = HLA-A targeting gRNA
  source 1..23: mol_type = other DNA
tccgcagatacctggagaacagg

SEQ ID NO: 7986 - DNA, 23 bp, synthetic construct
  misc_feature 1..23: note = HLA-A targeting gRNA
  source 1..23: mol_type = other DNA
tccgcagatacctggagaaccgg

SEQ ID NO: 7987 - DNA, 23 bp, synthetic construct
  misc_feature 1..23: note = HLA-A targeting gRNA
  source 1..23: mol_type = other DNA
tccgcagatacctggagaatggg

SEQ ID NO: 7988 - DNA, 23 bp, synthetic construct
  misc_feature 1..23: note = HLA-A targeting gRNA
  source 1..23: mol_type = other DNA
tccgcagatacctggggaacggg

SEQ ID NO: 7989 - DNA, 23 bp, synthetic construct
  misc_feature 1..23: note = HLA-A targeting gRNA
  source 1..23: mol_type = other DNA
tccgcagatatctggagaacggg

SEQ ID NO: 7990 - DNA, 23 bp, synthetic construct
  misc_feature 1..23: note = HLA-A targeting gRNA
  source 1..23: mol_type = other DNA
tccgcagatccaccttggggtgg

SEQ ID NO: 7991 - DNA, 23 bp, synthetic construct
  misc_feature 1..23: note = HLA-A targeting gRNA
  source 1..23: mol_type = other DNA
tccgccgcgtccaggagcgcagg

SEQ ID NO: 7992 - DNA, 23 bp, synthetic construct
  misc_feature 1..23: note = HLA-A targeting gRNA
  source 1..23: mol_type = other DNA
tccgcggatacctggagaacggg

SEQ ID NO: 7993 - DNA, 23 bp, synthetic construct
  misc_feature 1..23: note = HLA-A targeting gRNA
  source 1..23: mol_type = other DNA
tccgcggccaggccgggacacgg

SEQ ID NO: 7994 - DNA, 23 bp, synthetic construct
  misc_feature 1..23: note = HLA-A targeting gRNA
  source 1..23: mol_type = other DNA
tccgcggccgggccaggacacgg

SEQ ID NO: 7995 - DNA, 23 bp, synthetic construct
  misc_feature 1..23: note = HLA-A targeting gRNA
  source 1..23: mol_type = other DNA
tccgcggccgggcccggacacgg

SEQ ID NO: 7996 - DNA, 23 bp, synthetic construct
  misc_feature 1..23: note = HLA-A targeting gRNA
  source 1..23: mol_type = other DNA
tccgcggccgggccgggacacgg

SEQ ID NO: 7997 - DNA, 23 bp, synthetic construct
  misc_feature 1..23: note = HLA-A targeting gRNA
  source 1..23: mol_type = other DNA
tccgcggcctggccgggacacgg

SEQ ID NO: 7998 - DNA, 23 bp, synthetic construct
  misc_feature 1..23: note = HLA-A targeting gRNA
  source 1..23: mol_type = other DNA
tccggcccctcctccacccacgg

SEQ ID NO: 7999 - DNA, 23 bp, synthetic construct
  misc_feature 1..23: note = HLA-A targeting gRNA
  source 1..23: mol_type = other DNA
tccggttctccaggtatctgcgg

SEQ ID NO: 8000 - DNA, 23 bp, synthetic construct
  misc_feature 1..23: note = HLA-A targeting gRNA
  source 1..23: mol_type = other DNA
tccggttgtagtagccgcgcagg

SEQ ID NO: 8001 - DNA, 23 bp, synthetic construct
  misc_feature 1..23: note = HLA-A targeting gRNA
  source 1..23: mol_type = other DNA
tccgtgtcccggcccggcagcgg

SEQ ID NO: 8002 - DNA, 23 bp, synthetic construct
  misc_feature 1..23: note = HLA-A targeting gRNA
  source 1..23: mol_type = other DNA
tccgtgtcccggcctggccgcgg

SEQ ID NO: 8003 - DNA, 23 bp, synthetic construct
  misc_feature 1..23: note = HLA-A targeting gRNA
  source 1..23: mol_type = other DNA
tccgtgtcctggcccggccgcgg

SEQ ID NO: 8004 - DNA, 23 bp, synthetic construct
  misc_feature 1..23: note = HLA-A targeting gRNA
  source 1..23: mol_type = other DNA
tcctaaggtctgtccttagcagg

SEQ ID NO: 8005 - DNA, 23 bp, synthetic construct
  misc_feature 1..23: note = HLA-A targeting gRNA
  source 1..23: mol_type = other DNA
tcctaccggcgcggctccccggg

SEQ ID NO: 8006 - DNA, 23 bp, synthetic construct
  misc_feature 1..23: note = HLA-A targeting gRNA
  source 1..23: mol_type = other DNA
tcctccacccacggcgcccgcgg

SEQ ID NO: 8007 - DNA, 23 bp, synthetic construct
  misc_feature 1..23: note = HLA-A targeting gRNA
  source 1..23: mol_type = other DNA
tcctcccctttgtgacttcaagg

SEQ ID NO: 8008 - DNA, 23 bp, synthetic construct
  misc_feature 1..23: note = HLA-A targeting gRNA
  source 1..23: mol_type = other DNA
tcctcccggcgcggctccccggg

SEQ ID NO: 8009 - DNA, 23 bp, synthetic construct
  misc_feature 1..23: note = HLA-A targeting gRNA
  source 1..23: mol_type = other DNA
tcctcccggcgcggctcctcagg

SEQ ID NO: 8010 - DNA, 23 bp, synthetic construct
  misc_feature 1..23: note = HLA-A targeting gRNA
  source 1..23: mol_type = other DNA
tcctccctgcgccgctccccggg

SEQ ID NO: 8011 - DNA, 23 bp, synthetic construct
  misc_feature 1..23: note = HLA-A targeting gRNA
  source 1..23: mol_type = other DNA
tcctccctgcgcggctccccggg

SEQ ID NO: 8012 - DNA, 23 bp, synthetic construct
  misc_feature 1..23: note = HLA-A targeting gRNA
  source 1..23: mol_type = other DNA
tcctccctgcgcggcttcccggg

SEQ ID NO: 8013 - DNA, 23 bp, synthetic construct
  misc_feature 1..23: note = HLA-A targeting gRNA
  source 1..23: mol_type = other DNA
tcctcgtggaaggccatcccggg

SEQ ID NO: 8014 - DNA, 23 bp, synthetic construct
  misc_feature 1..23: note = HLA-A targeting gRNA
  source 1..23: mol_type = other DNA
tcctcgtgggaggccatcccggg

SEQ ID NO: 8015 - DNA, 23 bp, synthetic construct
  misc_feature 1..23: note = HLA-A targeting gRNA
  source 1..23: mol_type = other DNA
tcctcgtgggaggccatgccggg

SEQ ID NO: 8016 - DNA, 23 bp, synthetic construct
  misc_feature 1..23: note = HLA-A targeting gRNA
  source 1..23: mol_type = other DNA
tcctgaagatctgtgtgttccgg

SEQ ID NO: 8017 - DNA, 23 bp, synthetic construct
  misc_feature 1..23: note = HLA-A targeting gRNA
  source 1..23: mol_type = other DNA
tcctggccctgaccgagacctgg

SEQ ID NO: 8018 - DNA, 23 bp, synthetic construct
  misc_feature 1..23: note = HLA-A targeting gRNA
  source 1..23: mol_type = other DNA
tcctgtccaacgtctcctgcggg

SEQ ID NO: 8019 - DNA, 23 bp, synthetic construct
  misc_feature 1..23: note = HLA-A targeting gRNA
  source 1..23: mol_type = other DNA
tcctgtcccacgtctcctgaggg

SEQ ID NO: 8020 - DNA, 23 bp, synthetic construct
  misc_feature 1..23: note = HLA-A targeting gRNA
  source 1..23: mol_type = other DNA
tcctgtcccacgtctcctgcggg

SEQ ID NO: 8021 - DNA, 23 bp, synthetic construct
  misc_feature 1..23: note = HLA-A targeting gRNA
  source 1..23: mol_type = other DNA
tcctgtcccacgtctcctgtggg

SEQ ID NO: 8022 - DNA, 23 bp, synthetic construct
  misc_feature 1..23: note = HLA-A targeting gRNA
  source 1..23: mol_type = other DNA
tcctgttctccaggtatctgcgg

SEQ ID NO: 8023 - DNA, 23 bp, synthetic construct
  misc_feature 1..23: note = HLA-A targeting gRNA
  source 1..23: mol_type = other DNA
tcctgttctccaggtgtctgcgg

SEQ ID NO: 8024 - DNA, 23 bp, synthetic construct
  misc_feature 1..23: note = HLA-A targeting gRNA
  source 1..23: mol_type = other DNA
tcctgttttggttctactccagg

SEQ ID NO: 8025 - DNA, 23 bp, synthetic construct
  misc_feature 1..23: note = HLA-A targeting gRNA
  source 1..23: mol_type = other DNA
tcctgtttttgttctactccagg

SEQ ID NO: 8026 - DNA, 23 bp, synthetic construct
  misc_feature 1..23: note = HLA-A targeting gRNA
  source 1..23: mol_type = other DNA
tccttctggagcccttcagccgg

SEQ ID NO: 8027 - DNA, 23 bp, synthetic construct
  misc_feature 1..23: note = HLA-A targeting gRNA
  source 1..23: mol_type = other DNA
tcgacgggcgcctcctccgcggg

SEQ ID NO: 8028 - DNA, 23 bp, synthetic construct
  misc_feature 1..23: note = HLA-A targeting gRNA
  source 1..23: mol_type = other DNA
tcgccggtcgagggtctgggcgg

SEQ ID NO: 8029 - DNA, 23 bp, synthetic construct
  misc_feature 1..23: note = HLA-A targeting gRNA
  source 1..23: mol_type = other DNA
tcgccggtcgagggtttgggcgg

SEQ ID NO: 8030 - DNA, 23 bp, synthetic construct
  misc_feature 1..23: note = HLA-A targeting gRNA
  source 1..23: mol_type = other DNA
tcgcctggtctccacaagctcgg

SEQ ID NO: 8031 - DNA, 23 bp, synthetic construct
  misc_feature 1..23: note = HLA-A targeting gRNA
  source 1..23: mol_type = other DNA
tcgcgggacggggctgaccacgg

SEQ ID NO: 8032 - DNA, 23 bp, synthetic construct
  misc_feature 1..23: note = HLA-A targeting gRNA
  source 1..23: mol_type = other DNA
tcgctactgtgatgtgtaggagg

SEQ ID NO: 8033 - DNA, 23 bp, synthetic construct
  misc_feature 1..23: note = HLA-A targeting gRNA
  source 1..23: mol_type = other DNA
tcgctgctgtgatacataggagg

SEQ ID NO: 8034 - DNA, 23 bp, synthetic construct
  misc_feature 1..23: note = HLA-A targeting gRNA
  source 1..23: mol_type = other DNA
tcgctgctgtgatgtgtaggagg

SEQ ID NO: 8035 - DNA, 23 bp, synthetic construct
  misc_feature 1..23: note = HLA-A targeting gRNA
  source 1..23: mol_type = other DNA
tcgctgctgtggtgtgtaggagg

SEQ ID NO: 8036 - DNA, 23 bp, synthetic construct
  misc_feature 1..23: note = HLA-A targeting gRNA
  source 1..23: mol_type = other DNA
tcgcttgtaaggtgagattctgg

SEQ ID NO: 8037 - DNA, 23 bp, synthetic construct
  misc_feature 1..23: note = HLA-A targeting gRNA
  source 1..23: mol_type = other DNA
tcggacgggcgcctcctccgcgg

SEQ ID NO: 8038 - DNA, 23 bp, synthetic construct
  misc_feature 1..23: note = HLA-A targeting gRNA
  source 1..23: mol_type = other DNA
tcgggacctgcgccccgggccgg

SEQ ID NO: 8039 - DNA, 23 bp, synthetic construct
  misc_feature 1..23: note = HLA-A targeting gRNA
  source 1..23: mol_type = other DNA
tcgggactggggcggggctcggg

SEQ ID NO: 8040 - DNA, 23 bp, synthetic construct
  misc_feature 1..23: note = HLA-A targeting gRNA
  source 1..23: mol_type = other DNA
tcgggcccctcctcgcccccagg

SEQ ID NO: 8041 - DNA, 23 bp, synthetic construct
  misc_feature 1..23: note = HLA-A targeting gRNA
  source 1..23: mol_type = other DNA
tcggggctggggcggggctcggg

SEQ ID NO: 8042 - DNA, 23 bp, synthetic construct
  misc_feature 1..23: note = HLA-A targeting gRNA
  source 1..23: mol_type = other DNA
tcggggctggggcggggttcggg

SEQ ID NO: 8043 - DNA, 23 bp, synthetic construct
  misc_feature 1..23: note = HLA-A targeting gRNA
  source 1..23: mol_type = other DNA
tcgggggaaggtccctgctaagg

SEQ ID NO: 8044 - DNA, 23 bp, synthetic construct
  misc_feature 1..23: note = HLA-A targeting gRNA
  source 1..23: mol_type = other DNA
tcgggggaccgggctgaccacgg

SEQ ID NO: 8045 - DNA, 23 bp, synthetic construct
  misc_feature 1..23: note = HLA-A targeting gRNA
  source 1..23: mol_type = other DNA
tcgggggacgggctgaccacggg

SEQ ID NO: 8046 - DNA, 23 bp, synthetic construct
  misc_feature 1..23: note = HLA-A targeting gRNA
  source 1..23: mol_type = other DNA
tcgggggacggggctgaccacgg

SEQ ID NO: 8047 - DNA, 23 bp, synthetic construct
  misc_feature 1..23: note = HLA-A targeting gRNA
  source 1..23: mol_type = other DNA
tcgggggacggggctgaccgcgg

SEQ ID NO: 8048 - DNA, 23 bp, synthetic construct
  misc_feature 1..23: note = HLA-A targeting gRNA
  source 1..23: mol_type = other DNA
tcgggggacggggctggccgcgg

SEQ ID NO: 8049 - DNA, 23 bp, synthetic construct
  misc_feature 1..23: note = HLA-A targeting gRNA
  source 1..23: mol_type = other DNA
tcgggggacggtgctgaccgcgg

SEQ ID NO: 8050 - DNA, 23 bp, synthetic construct
  misc_feature 1..23: note = HLA-A targeting gRNA
  source 1..23: mol_type = other DNA
tcgggggactgggctgaccacgg

SEQ ID NO: 8051 - DNA, 23 bp, synthetic construct
  misc_feature 1..23: note = HLA-A targeting gRNA
  source 1..23: mol_type = other DNA
tcgggggcggatctcggacccgg

SEQ ID NO: 8052 - DNA, 23 bp, synthetic construct
  misc_feature 1..23: note = HLA-A targeting gRNA
  source 1..23: mol_type = other DNA
tcggtaaggagggggatgagggg

SEQ ID NO: 8053 - DNA, 23 bp, synthetic construct
  misc_feature 1..23: note = HLA-A targeting gRNA
  source 1..23: mol_type = other DNA
tcgtgacctgcgccccaggccgg

SEQ ID NO: 8054 - DNA, 23 bp, synthetic construct
  misc_feature 1..23: note = HLA-A targeting gRNA
  source 1..23: mol_type = other DNA
tctagaacccgacacccaatggg

SEQ ID NO: 8055 - DNA, 23 bp, synthetic construct
  misc_feature 1..23: note = HLA-A targeting gRNA
  source 1..23: mol_type = other DNA
tctagaatccgacacccaatggg

SEQ ID NO: 8056 - DNA, 23 bp, synthetic construct
  misc_feature 1..23: note = HLA-A targeting gRNA
  source 1..23: mol_type = other DNA
tctagacacccgacacccaatgg

SEQ ID NO: 8057 - DNA, 23 bp, synthetic construct
  misc_feature 1..23: note = HLA-A targeting gRNA
  source 1..23: mol_type = other DNA
tctagagtgggcgggggggcggg

SEQ ID NO: 8058 - DNA, 23 bp, synthetic construct
  misc_feature 1..23: note = HLA-A targeting gRNA
  source 1..23: mol_type = other DNA
tctagagtgggcggggggggcgg

SEQ ID NO: 8059 - DNA, 23 bp, synthetic construct
  misc_feature 1..23: note = HLA-A targeting gRNA
  source 1..23: mol_type = other DNA
tctagagtgggcggggggggtgg

SEQ ID NO: 8060 - DNA, 23 bp, synthetic construct
  misc_feature 1..23: note = HLA-A targeting gRNA
  source 1..23: mol_type = other DNA
tctagagtgggtgggggtggcgg

SEQ ID NO: 8061 - DNA, 23 bp, synthetic construct
  misc_feature 1..23: note = HLA-A targeting gRNA
  source 1..23: mol_type = other DNA
tctagagtgggtggggtggcagg

SEQ ID NO: 8062 - DNA, 23 bp, synthetic construct
  misc_feature 1..23: note = HLA-A targeting gRNA
  source 1..23: mol_type = other DNA
tctagagtgggtggggtggcggg

SEQ ID NO: 8063 - DNA, 23 bp, synthetic construct
  misc_feature 1..23: note = HLA-A targeting gRNA
  source 1..23: mol_type = other DNA
tctagatatccaatacccaatgg

SEQ ID NO: 8064 - DNA, 23 bp, synthetic construct
  misc_feature 1..23: note = HLA-A targeting gRNA
  source 1..23: mol_type = other DNA
tctagatatccgacacccaatgg

SEQ ID NO: 8065 - DNA, 23 bp, synthetic construct
  misc_feature 1..23: note = HLA-A targeting gRNA
  source 1..23: mol_type = other DNA
tctcaactgctccgcctcacggg

SEQ ID NO: 8066 - DNA, 23 bp, synthetic construct
  misc_feature 1..23: note = HLA-A targeting gRNA
  source 1..23: mol_type = other DNA
tctcacatccagaggatgtacgg

SEQ ID NO: 8067 - DNA, 23 bp, synthetic construct
  misc_feature 1..23: note = HLA-A targeting gRNA
  source 1..23: mol_type = other DNA
tctcagcccctccttgccccagg

SEQ ID NO: 8068 - DNA, 23 bp, synthetic construct
  misc_feature 1..23: note = HLA-A targeting gRNA
  source 1..23: mol_type = other DNA
tctcagctgctccgccacacggg

SEQ ID NO: 8069 - DNA, 23 bp, synthetic construct
  misc_feature 1..23: note = HLA-A targeting gRNA
  source 1..23: mol_type = other DNA
tctcagctgctccgccacccggg

SEQ ID NO: 8070 - DNA, 23 bp, synthetic construct
  misc_feature 1..23: note = HLA-A targeting gRNA
  source 1..23: mol_type = other DNA
tctcagctgctccgccccacggg

SEQ ID NO: 8071 - DNA, 23 bp, synthetic construct
  misc_feature 1..23: note = HLA-A targeting gRNA
  source 1..23: mol_type = other DNA
tctcagctgctccgccgcacggg

SEQ ID NO: 8072 - DNA, 23 bp, synthetic construct
  misc_feature 1..23: note = HLA-A targeting gRNA
  source 1..23: mol_type = other DNA
tctcagctgctccgccgtacggg

SEQ ID NO: 8073 - DNA, 23 bp, synthetic construct
  misc_feature 1..23: note = HLA-A targeting gRNA
  source 1..23: mol_type = other DNA
tctcagctgctccgcctcacggg

SEQ ID NO: 8074 - DNA, 23 bp, synthetic construct
  misc_feature 1..23: note = HLA-A targeting gRNA
  source 1..23: mol_type = other DNA
tctcagctgctcggccgcacggg

SEQ ID NO: 8075 - DNA, 23 bp, synthetic construct
  misc_feature 1..23: note = HLA-A targeting gRNA
  source 1..23: mol_type = other DNA
tctcaggctggtcacatgggtgg

SEQ ID NO: 8076 - DNA, 23 bp, synthetic construct
  misc_feature 1..23: note = HLA-A targeting gRNA
  source 1..23: mol_type = other DNA
tctcagggtctcaggctccaagg

SEQ ID NO: 8077 - DNA, 23 bp, synthetic construct
  misc_feature 1..23: note = HLA-A targeting gRNA
  source 1..23: mol_type = other DNA
tctcagggtctcaggctccgagg

SEQ ID NO: 8078 - DNA, 23 bp, synthetic construct
  misc_feature 1..23: note = HLA-A targeting gRNA
  source 1..23: mol_type = other DNA
tctccacaagctcggtgtcctgg

SEQ ID NO: 8079 - DNA, 23 bp, synthetic construct
  misc_feature 1..23: note = HLA-A targeting gRNA
  source 1..23: mol_type = other DNA
tctccacagggtagaaacccagg

SEQ ID NO: 8080 - DNA, 23 bp, synthetic construct
  misc_feature 1..23: note = HLA-A targeting gRNA
  source 1..23: mol_type = other DNA
tctccacagggtagaagcccagg

SEQ ID NO: 8081 - DNA, 23 bp, synthetic construct
  misc_feature 1..23: note = HLA-A targeting gRNA
  source 1..23: mol_type = other DNA
tctccactgctccgccgcacggg

SEQ ID NO: 8082 - DNA, 23 bp, synthetic construct
  misc_feature 1..23: note = HLA-A targeting gRNA
  source 1..23: mol_type = other DNA
tctccactgctccgcctcacggg

SEQ ID NO: 8083 - DNA, 23 bp, synthetic construct
  misc_feature 1..23: note = HLA-A targeting gRNA
  source 1..23: mol_type = other DNA
tctccccagacgccgagatgcgg

SEQ ID NO: 8084 - DNA, 23 bp, synthetic construct
  misc_feature 1..23: note = HLA-A targeting gRNA
  source 1..23: mol_type = other DNA
tctccccagaggccgagatgcgg

SEQ ID NO: 8085 - DNA, 23 bp, synthetic construct
  misc_feature 1..23: note = HLA-A targeting gRNA
  source 1..23: mol_type = other DNA
tctccccagggtagaagcccagg

SEQ ID NO: 8086 - DNA, 23 bp, synthetic construct
  misc_feature 1..23: note = HLA-A targeting gRNA
  source 1..23: mol_type = other DNA
tctccgcagggtagaaacccagg

SEQ ID NO: 8087 - DNA, 23 bp, synthetic construct
  misc_feature 1..23: note = HLA-A targeting gRNA
  source 1..23: mol_type = other DNA
tctccgcagggtagaagcacagg

SEQ ID NO: 8088 - DNA, 23 bp, synthetic construct
  misc_feature 1..23: note = HLA-A targeting gRNA
  source 1..23: mol_type = other DNA
tctccgctgctccgccacacggg

SEQ ID NO: 8089 - DNA, 23 bp, synthetic construct
  misc_feature 1..23: note = HLA-A targeting gRNA
  source 1..23: mol_type = other DNA
tctccgctgctccgcctcacagg

SEQ ID NO: 8090 - DNA, 23 bp, synthetic construct
  misc_feature 1..23: note = HLA-A targeting gRNA
  source 1..23: mol_type = other DNA
tctccgctgctccgcctcaccgg

SEQ ID NO: 8091 - DNA, 23 bp, synthetic construct
  misc_feature 1..23: note = HLA-A targeting gRNA
  source 1..23: mol_type = other DNA
tctccgctgctccgcctcacggg

SEQ ID NO: 8092 - DNA, 23 bp, synthetic construct
  misc_feature 1..23: note = HLA-A targeting gRNA
  source 1..23: mol_type = other DNA
tctccggccgagggtctgggcgg

SEQ ID NO: 8093 - DNA, 23 bp, synthetic construct
  misc_feature 1..23: note = HLA-A targeting gRNA
  source 1..23: mol_type = other DNA
tctccggtcgagggtctgggcgg

SEQ ID NO: 8094 - DNA, 23 bp, synthetic construct
  misc_feature 1..23: note = HLA-A targeting gRNA
  source 1..23: mol_type = other DNA
tctccgtagggtagaagcccagg

SEQ ID NO: 8095 - DNA, 23 bp, synthetic construct
  misc_feature 1..23: note = HLA-A targeting gRNA
  source 1..23: mol_type = other DNA
tctccgttgctccgcctcacggg

SEQ ID NO: 8096 - DNA, 23 bp, synthetic construct
  misc_feature 1..23: note = HLA-A targeting gRNA
  source 1..23: mol_type = other DNA
tctcctcagacaccgagatgcgg

SEQ ID NO: 8097 - DNA, 23 bp, synthetic construct
  misc_feature 1..23: note = HLA-A targeting gRNA
  source 1..23: mol_type = other DNA
tctcctcagacgccgagatgcgg

SEQ ID NO: 8098 - DNA, 23 bp, synthetic construct
  misc_feature 1..23: note = HLA-A targeting gRNA
  source 1..23: mol_type = other DNA
tctcctgcgggctcttgaccagg

SEQ ID NO: 8099 - DNA, 23 bp, synthetic construct
  misc_feature 1..23: note = HLA-A targeting gRNA
  source 1..23: mol_type = other DNA
tctctaggacaattaagggatgg

SEQ ID NO: 8100 - DNA, 23 bp, synthetic construct
  misc_feature 1..23: note = HLA-A targeting gRNA
  source 1..23: mol_type = other DNA
tctctccacctcctcacattagg

SEQ ID NO: 8101 - DNA, 23 bp, synthetic construct
  misc_feature 1..23: note = HLA-A targeting gRNA
  source 1..23: mol_type = other DNA
tctctccgtcagtctgtgcctgg

SEQ ID NO: 8102 - DNA, 23 bp, synthetic construct
  misc_feature 1..23: note = HLA-A targeting gRNA
  source 1..23: mol_type = other DNA
tctctcggtcagtctgtgcctgg

SEQ ID NO: 8103 - DNA, 23 bp, synthetic construct
  misc_feature 1..23: note = HLA-A targeting gRNA
  source 1..23: mol_type = other DNA
tctctgctgctccgccgcacggg

SEQ ID NO: 8104 - DNA, 23 bp, synthetic construct
  misc_feature 1..23: note = HLA-A targeting gRNA
  source 1..23: mol_type = other DNA
tctctgggtctcaagctcccagg

SEQ ID NO: 8105 - DNA, 23 bp, synthetic construct
  misc_feature 1..23: note = HLA-A targeting gRNA
  source 1..23: mol_type = other DNA
tctgagccgccgtgtccgccagg

SEQ ID NO: 8106 - DNA, 23 bp, synthetic construct
  misc_feature 1..23: note = HLA-A targeting gRNA
  source 1..23: mol_type = other DNA
tctgaggagactctgagtccggg

SEQ ID NO: 8107 - DNA, 23 bp, synthetic construct
  misc_feature 1..23: note = HLA-A targeting gRNA
  source 1..23: mol_type = other DNA
tctgaggagattctgagtccggg

SEQ ID NO: 8108 - DNA, 23 bp, synthetic construct
  misc_feature 1..23: note = HLA-A targeting gRNA
  source 1..23: mol_type = other DNA
tctgaggagattttgagtccggg

SEQ ID NO: 8109 - DNA, 23 bp, synthetic construct
  misc_feature 1..23: note = HLA-A targeting gRNA
  source 1..23: mol_type = other DNA
tctgagtccgggtgggtgactgg

SEQ ID NO: 8110 - DNA, 23 bp, synthetic construct
  misc_feature 1..23: note = HLA-A targeting gRNA
  source 1..23: mol_type = other DNA
tctgagtccgggtgggtgcgtgg

SEQ ID NO: 8111 - DNA, 23 bp, synthetic construct
  misc_feature 1..23: note = HLA-A targeting gRNA
  source 1..23: mol_type = other DNA
tctgagttttcttgtcccactgg

SEQ ID NO: 8112 - DNA, 23 bp, synthetic construct
  misc_feature 1..23: note = HLA-A targeting gRNA
  source 1..23: mol_type = other DNA
tctgcactgctccgcctcacggg

SEQ ID NO: 8113 - DNA, 23 bp, synthetic construct
  misc_feature 1..23: note = HLA-A targeting gRNA
  source 1..23: mol_type = other DNA
tctgccccacactcagtgtttgg

SEQ ID NO: 8114 - DNA, 23 bp, synthetic construct
  misc_feature 1..23: note = HLA-A targeting gRNA
  source 1..23: mol_type = other DNA
tctgccgccttccccaccccagg

SEQ ID NO: 8115 - DNA, 23 bp, synthetic construct
  misc_feature 1..23: note = HLA-A targeting gRNA
  source 1..23: mol_type = other DNA
tctgcgctcctggaccgccgcgg

SEQ ID NO: 8116 - DNA, 23 bp, synthetic construct
  misc_feature 1..23: note = HLA-A targeting gRNA
  source 1..23: mol_type = other DNA
tctgcggtcgaggttctgggcgg

SEQ ID NO: 8117 - DNA, 23 bp, synthetic construct
  misc_feature 1..23: note = HLA-A targeting gRNA
  source 1..23: mol_type = other DNA
tctgcgttcctggaccgccgcgg

SEQ ID NO: 8118 - DNA, 23 bp, synthetic construct
  misc_feature 1..23: note = HLA-A targeting gRNA
  source 1..23: mol_type = other DNA
tctgctcccgatctgagtggagg

SEQ ID NO: 8119 - DNA, 23 bp, synthetic construct
  misc_feature 1..23: note = HLA-A targeting gRNA
  source 1..23: mol_type = other DNA
tctgctcctgatctaagtggagg

SEQ ID NO: 8120 - DNA, 23 bp, synthetic construct
  misc_feature 1..23: note = HLA-A targeting gRNA
  source 1..23: mol_type = other DNA
tctgctcctgatctgagtagagg

SEQ ID NO: 8121 - DNA, 23 bp, synthetic construct
  misc_feature 1..23: note = HLA-A targeting gRNA
  source 1..23: mol_type = other DNA
tctgctcctgatctgagtggagg

SEQ ID NO: 8122 - DNA, 23 bp, synthetic construct
  misc_feature 1..23: note = HLA-A targeting gRNA
  source 1..23: mol_type = other DNA
tctgctctctaggacaattaagg

SEQ ID NO: 8123 - DNA, 23 bp, synthetic construct
  misc_feature 1..23: note = HLA-A targeting gRNA
  source 1..23: mol_type = other DNA
tctgctgtctaggacaattaagg

SEQ ID NO: 8124 - DNA, 23 bp, synthetic construct
  misc_feature 1..23: note = HLA-A targeting gRNA
  source 1..23: mol_type = other DNA
tctggcatctctttctacaaagg

SEQ ID NO: 8125 - DNA, 23 bp, synthetic construct
  misc_feature 1..23: note = HLA-A targeting gRNA
  source 1..23: mol_type = other DNA
tctggcatctctttctgcaaagg

SEQ ID NO: 8126 - DNA, 23 bp, synthetic construct
  misc_feature 1..23: note = HLA-A targeting gRNA
  source 1..23: mol_type = other DNA
tctgggagctgaagtggtcgggg

SEQ ID NO: 8127 - DNA, 23 bp, synthetic construct
  misc_feature 1..23: note = HLA-A targeting gRNA
  source 1..23: mol_type = other DNA
tctggggagaatccgagtccggg

SEQ ID NO: 8128 - DNA, 23 bp, synthetic construct
  misc_feature 1..23: note = HLA-A targeting gRNA
  source 1..23: mol_type = other DNA
tctggggagaatctgagtccggg

SEQ ID NO: 8129 - DNA, 23 bp, synthetic construct
  misc_feature 1..23: note = HLA-A targeting gRNA
  source 1..23: mol_type = other DNA
tctggggagaatgtgagtccggg

SEQ ID NO: 8130 - DNA, 23 bp, synthetic construct
  misc_feature 1..23: note = HLA-A targeting gRNA
  source 1..23: mol_type = other DNA
tctggggagctgaagtggtcggg

SEQ ID NO: 8131 - DNA, 23 bp, synthetic construct
  misc_feature 1..23: note = HLA-A targeting gRNA
  source 1..23: mol_type = other DNA
tctggggagctgaagtggtctgg

SEQ ID NO: 8132 - DNA, 23 bp, synthetic construct
  misc_feature 1..23: note = HLA-A targeting gRNA
  source 1..23: mol_type = other DNA
tctggggcggggtggggcagagg

SEQ ID NO: 8133 - DNA, 23 bp, synthetic construct
  misc_feature 1..23: note = HLA-A targeting gRNA
  source 1..23: mol_type = other DNA
tctggggggggggggggcagagg

SEQ ID NO: 8134 - DNA, 23 bp, synthetic construct
  misc_feature 1..23: note = HLA-A targeting gRNA
  source 1..23: mol_type = other DNA
tctgggggtgggtggggcagagg

SEQ ID NO: 8135 - DNA, 23 bp, synthetic construct
  misc_feature 1..23: note = HLA-A targeting gRNA
  source 1..23: mol_type = other DNA
tctgggggtgggtggggcagtgg

SEQ ID NO: 8136 - DNA, 23 bp, synthetic construct
  misc_feature 1..23: note = HLA-A targeting gRNA
  source 1..23: mol_type = other DNA
tctgggttttcttgtcccactgg

SEQ ID NO: 8137 - DNA, 23 bp, synthetic construct
  misc_feature 1..23: note = HLA-A targeting gRNA
  source 1..23: mol_type = other DNA
tctgggttttcttgttccactgg

SEQ ID NO: 8138 - DNA, 23 bp, synthetic construct
  misc_feature 1..23: note = HLA-A targeting gRNA
  source 1..23: mol_type = other DNA
tctgggttttgttgtcccactgg

SEQ ID NO: 8139 - DNA, 23 bp, synthetic construct
  misc_feature 1..23: note = HLA-A targeting gRNA
  source 1..23: mol_type = other DNA
tctggtagggaaggggtgagggg

SEQ ID NO: 8140 - DNA, 23 bp, synthetic construct
  misc_feature 1..23: note = HLA-A targeting gRNA
  source 1..23: mol_type = other DNA
tctggttatagtagccgcgcagg

SEQ ID NO: 8141 - DNA, 23 bp, synthetic construct
  misc_feature 1..23: note = HLA-A targeting gRNA
  source 1..23: mol_type = other DNA
tctggttgtagtagccaagcagg

SEQ ID NO: 8142 - DNA, 23 bp, synthetic construct
  misc_feature 1..23: note = HLA-A targeting gRNA
  source 1..23: mol_type = other DNA
tctggttgtagtagcggagcagg

SEQ ID NO: 8143 - DNA, 23 bp, synthetic construct
  misc_feature 1..23: note = HLA-A targeting gRNA
  source 1..23: mol_type = other DNA
tctggttgtagtagctgcgcagg

SEQ ID NO: 8144 - DNA, 23 bp, synthetic construct
  misc_feature 1..23: note = HLA-A targeting gRNA
  source 1..23: mol_type = other DNA
tctggttgtagtggccgcgcagg

SEQ ID NO: 8145 - DNA, 23 bp, synthetic construct
  misc_feature 1..23: note = HLA-A targeting gRNA
  source 1..23: mol_type = other DNA
tctgtcctgctccgccacacggg

SEQ ID NO: 8146 - DNA, 23 bp, synthetic construct
  misc_feature 1..23: note = HLA-A targeting gRNA
  source 1..23: mol_type = other DNA
tctgtcctgctccgccatacggg

SEQ ID NO: 8147 - DNA, 23 bp, synthetic construct
  misc_feature 1..23: note = HLA-A targeting gRNA
  source 1..23: mol_type = other DNA
tctgtcctgctccgccgcacggg

SEQ ID NO: 8148 - DNA, 23 bp, synthetic construct
  misc_feature 1..23: note = HLA-A targeting gRNA
  source 1..23: mol_type = other DNA
tctgttcctgatctgagtggagg

SEQ ID NO: 8149 - DNA, 23 bp, synthetic construct
  misc_feature 1..23: note = HLA-A targeting gRNA
  source 1..23: mol_type = other DNA
tcttagctgctccgccacacggg

SEQ ID NO: 8150 - DNA, 23 bp, synthetic construct
  misc_feature 1..23: note = HLA-A targeting gRNA
  source 1..23: mol_type = other DNA
tcttcccctccatttcctcaagg

SEQ ID NO: 8151 - DNA, 23 bp, synthetic construct
  misc_feature 1..23: note = HLA-A targeting gRNA
  source 1..23: mol_type = other DNA
tcttcccctccatttcctcaggg

SEQ ID NO: 8152 - DNA, 23 bp, synthetic construct
  misc_feature 1..23: note = HLA-A targeting gRNA
  source 1..23: mol_type = other DNA
tcttctctctagacaattaaggg

SEQ ID NO: 8153 - DNA, 23 bp, synthetic construct
  misc_feature 1..23: note = HLA-A targeting gRNA
  source 1..23: mol_type = other DNA
tcttctctctaggacaattaagg

SEQ ID NO: 8154 - DNA, 23 bp, synthetic construct
  misc_feature 1..23: note = HLA-A targeting gRNA
  source 1..23: mol_type = other DNA
tcttgaagatctgtgtctcccgg

SEQ ID NO: 8155 - DNA, 23 bp, synthetic construct
  misc_feature 1..23: note = HLA-A targeting gRNA
  source 1..23: mol_type = other DNA
tcttgaagatctgtgtgttccgg

SEQ ID NO: 8156 - DNA, 23 bp, synthetic construct
  misc_feature 1..23: note = HLA-A targeting gRNA
  source 1..23: mol_type = other DNA
tcttgaagatctgtgtgttcggg

SEQ ID NO: 8157 - DNA, 23 bp, synthetic construct
  misc_feature 1..23: note = HLA-A targeting gRNA
  source 1..23: mol_type = other DNA
tcttgcagatctgtgtctcccgg

SEQ ID NO: 8158 - DNA, 23 bp, synthetic construct
  misc_feature 1..23: note = HLA-A targeting gRNA
  source 1..23: mol_type = other DNA
tcttgcagatctgtgtgttccgg

SEQ ID NO: 8159 - DNA, 23 bp, synthetic construct
  misc_feature 1..23: note = HLA-A targeting gRNA
  source 1..23: mol_type = other DNA
tcttggagatctctgtctcccgg

SEQ ID NO: 8160 - DNA, 23 bp, synthetic construct
  misc_feature 1..23: note = HLA-A targeting gRNA
  source 1..23: mol_type = other DNA
tcttggagatctgtgtctcccgg

SEQ ID NO: 8161 - DNA, 23 bp, synthetic construct
  misc_feature 1..23: note = HLA-A targeting gRNA
  source 1..23: mol_type = other DNA
tcttggagatctgtgtgttccgg

SEQ ID NO: 8162 - DNA, 23 bp, synthetic construct
  misc_feature 1..23: note = HLA-A targeting gRNA
  source 1..23: mol_type = other DNA
tcttggggtctagagtgggcagg

SEQ ID NO: 8163 - DNA, 23 bp, synthetic construct
  misc_feature 1..23: note = HLA-A targeting gRNA
  source 1..23: mol_type = other DNA
tcttggggtctagagtgggcggg

SEQ ID NO: 8164 - DNA, 23 bp, synthetic construct
  misc_feature 1..23: note = HLA-A targeting gRNA
  source 1..23: mol_type = other DNA
tcttggggtctagagtgggtggg

SEQ ID NO: 8165 - DNA, 23 bp, synthetic construct
  misc_feature 1..23: note = HLA-A targeting gRNA
  source 1..23: mol_type = other DNA
tcttgtagatctgtgtgttccgg

SEQ ID NO: 8166 - DNA, 23 bp, synthetic construct
  misc_feature 1..23: note = HLA-A targeting gRNA
  source 1..23: mol_type = other DNA
tcttgtcccacatctcctgcggg

SEQ ID NO: 8167 - DNA, 23 bp, synthetic construct
  misc_feature 1..23: note = HLA-A targeting gRNA
  source 1..23: mol_type = other DNA
tcttgtcccacatctcctgtggg

SEQ ID NO: 8168 - DNA, 23 bp, synthetic construct
  misc_feature 1..23: note = HLA-A targeting gRNA
  source 1..23: mol_type = other DNA
tgaaaccgggtaaacgcgcctgg

SEQ ID NO: 8169 - DNA, 23 bp, synthetic construct
  misc_feature 1..23: note = HLA-A targeting gRNA
  source 1..23: mol_type = other DNA
tgaaaccgggtaaaggcgactgg

SEQ ID NO: 8170 - DNA, 23 bp, synthetic construct
  misc_feature 1..23: note = HLA-A targeting gRNA
  source 1..23: mol_type = other DNA
tgaaaccgggtaaaggtgactgg

SEQ ID NO: 8171 - DNA, 23 bp, synthetic construct
  misc_feature 1..23: note = HLA-A targeting gRNA
  source 1..23: mol_type = other DNA
tgaaaccgggtaaagtcgcctgg

SEQ ID NO: 8172 - DNA, 23 bp, synthetic construct
  misc_feature 1..23: note = HLA-A targeting gRNA
  source 1..23: mol_type = other DNA
tgaacgaggacctaagctcctgg

SEQ ID NO: 8173 - DNA, 23 bp, synthetic construct
  misc_feature 1..23: note = HLA-A targeting gRNA
  source 1..23: mol_type = other DNA
tgaacgaggacctgagctcccgg

SEQ ID NO: 8174 - DNA, 23 bp, synthetic construct
  misc_feature 1..23: note = HLA-A targeting gRNA
  source 1..23: mol_type = other DNA
tgaacgaggacctgagctcctgg

SEQ ID NO: 8175 - DNA, 23 bp, synthetic construct
  misc_feature 1..23: note = HLA-A targeting gRNA
  source 1..23: mol_type = other DNA
tgaacgaggacctgccctcctgg

SEQ ID NO: 8176 - DNA, 23 bp, synthetic construct
  misc_feature 1..23: note = HLA-A targeting gRNA
  source 1..23: mol_type = other DNA
tgaacgaggatctgcgctcctgg

SEQ ID NO: 8177 - DNA, 23 bp, synthetic construct
  misc_feature 1..23: note = HLA-A targeting gRNA
  source 1..23: mol_type = other DNA
tgaacgaggatctgcgttcctgg

SEQ ID NO: 8178 - DNA, 23 bp, synthetic construct
  misc_feature 1..23: note = HLA-A targeting gRNA
  source 1..23: mol_type = other DNA
tgaagaaatacttcatggagtgg

SEQ ID NO: 8179 - DNA, 23 bp, synthetic construct
  misc_feature 1..23: note = HLA-A targeting gRNA
  source 1..23: mol_type = other DNA
tgaagcacatgtgacaatgaagg

SEQ ID NO: 8180 - DNA, 23 bp, synthetic construct
  misc_feature 1..23: note = HLA-A targeting gRNA
  source 1..23: mol_type = other DNA
tgaagtccctgaggaaatggagg

SEQ ID NO: 8181 - DNA, 23 bp, synthetic construct
  misc_feature 1..23: note = HLA-A targeting gRNA
  source 1..23: mol_type = other DNA
tgaagtccttgaggaaatggagg

SEQ ID NO: 8182 - DNA, 23 bp, synthetic construct
  misc_feature 1..23: note = HLA-A targeting gRNA
  source 1..23: mol_type = other DNA
tgaagtctctgaggaaatggagg

SEQ ID NO: 8183 - DNA, 23 bp, synthetic construct
  misc_feature 1..23: note = HLA-A targeting gRNA
  source 1..23: mol_type = other DNA
tgaatgaggacctgcgctcctgg

SEQ ID NO: 8184 - DNA, 23 bp, synthetic construct
  misc_feature 1..23: note = HLA-A targeting gRNA
  source 1..23: mol_type = other DNA
tgacatctctgaggaaatggagg

SEQ ID NO: 8185 - DNA, 23 bp, synthetic construct
  misc_feature 1..23: note = HLA-A targeting gRNA
  source 1..23: mol_type = other DNA
tgaccaacccgcggggattttgg

SEQ ID NO: 8186 - DNA, 23 bp, synthetic construct
  misc_feature 1..23: note = HLA-A targeting gRNA
  source 1..23: mol_type = other DNA
tgaccacgggggcggggccaggg

SEQ ID NO: 8187 - DNA, 23 bp, synthetic construct
  misc_feature 1..23: note = HLA-A targeting gRNA
  source 1..23: mol_type = other DNA
tgaccagcctgagaatggacagg

SEQ ID NO: 8188 - DNA, 23 bp, synthetic construct
  misc_feature 1..23: note = HLA-A targeting gRNA
  source 1..23: mol_type = other DNA
tgaccagcctgagaatggacggg

SEQ ID NO: 8189 - DNA, 23 bp, synthetic construct
  misc_feature 1..23: note = HLA-A targeting gRNA
  source 1..23: mol_type = other DNA
tgaccagcctgagaatgggcagg

SEQ ID NO: 8190 - DNA, 23 bp, synthetic construct
  misc_feature 1..23: note = HLA-A targeting gRNA
  source 1..23: mol_type = other DNA
tgaccatcctgagaacggacagg

SEQ ID NO: 8191 - DNA, 23 bp, synthetic construct
  misc_feature 1..23: note = HLA-A targeting gRNA
  source 1..23: mol_type = other DNA
tgaccatcctgagaatggacagg

SEQ ID NO: 8192 - DNA, 23 bp, synthetic construct
  misc_feature 1..23: note = HLA-A targeting gRNA
  source 1..23: mol_type = other DNA
tgacccagctgaagggctccagg

SEQ ID NO: 8193 - DNA, 23 bp, synthetic construct
  misc_feature 1..23: note = HLA-A targeting gRNA
  source 1..23: mol_type = other DNA
tgacccgcatctcggcctctggg

SEQ ID NO: 8194 - DNA, 23 bp, synthetic construct
  misc_feature 1..23: note = HLA-A targeting gRNA
  source 1..23: mol_type = other DNA
tgacccgcatctcggcgtctggg

SEQ ID NO: 8195 - DNA, 23 bp, synthetic construct
  misc_feature 1..23: note = HLA-A targeting gRNA
  source 1..23: mol_type = other DNA
tgacccggctgaagggctccagg

SEQ ID NO: 8196 - DNA, 23 bp, synthetic construct
  misc_feature 1..23: note = HLA-A targeting gRNA
  source 1..23: mol_type = other DNA
tgaccgcgagggctgggccaggg

SEQ ID NO: 8197 - DNA, 23 bp, synthetic construct
  misc_feature 1..23: note = HLA-A targeting gRNA
  source 1..23: mol_type = other DNA
tgaccgcggggccggggccaggg

SEQ ID NO: 8198 - DNA, 23 bp, synthetic construct
  misc_feature 1..23: note = HLA-A targeting gRNA
  source 1..23: mol_type = other DNA
tgaccgcggggcctaggccaggg

SEQ ID NO: 8199 - DNA, 23 bp, synthetic construct
  misc_feature 1..23: note = HLA-A targeting gRNA
  source 1..23: mol_type = other DNA
tgaccgcggggcctgggccaggg

SEQ ID NO: 8200 - DNA, 23 bp, synthetic construct
  misc_feature 1..23: note = HLA-A targeting gRNA
  source 1..23: mol_type = other DNA
tgaccgcgggggcggggccaggg

SEQ ID NO: 8201 - DNA, 23 bp, synthetic construct
  misc_feature 1..23: note = HLA-A targeting gRNA
  source 1..23: mol_type = other DNA
tgacctcatggtcagagatgggg

SEQ ID NO: 8202 - DNA, 23 bp, synthetic construct
  misc_feature 1..23: note = HLA-A targeting gRNA
  source 1..23: mol_type = other DNA
tgacctggctgaagggctccagg

SEQ ID NO: 8203 - DNA, 23 bp, synthetic construct
  misc_feature 1..23: note = HLA-A targeting gRNA
  source 1..23: mol_type = other DNA
tgacgtctctgaggaaatggagg

SEQ ID NO: 8204 - DNA, 23 bp, synthetic construct
  misc_feature 1..23: note = HLA-A targeting gRNA
  source 1..23: mol_type = other DNA
tgacgtctctgaggaaatgtagg

SEQ ID NO: 8205 - DNA, 23 bp, synthetic construct
  misc_feature 1..23: note = HLA-A targeting gRNA
  source 1..23: mol_type = other DNA
tgactatcctgagaatggacagg

SEQ ID NO: 8206 - DNA, 23 bp, synthetic construct
  misc_feature 1..23: note = HLA-A targeting gRNA
  source 1..23: mol_type = other DNA
tgactcatgatgctggaatcagg

SEQ ID NO: 8207 - DNA, 23 bp, synthetic construct
  misc_feature 1..23: note = HLA-A targeting gRNA
  source 1..23: mol_type = other DNA
tgactggggacttcagaaccggg

SEQ ID NO: 8208 - DNA, 23 bp, synthetic construct
  misc_feature 1..23: note = HLA-A targeting gRNA
  source 1..23: mol_type = other DNA
tgactggggactttagaaccggg

SEQ ID NO: 8209 - DNA, 23 bp, synthetic construct
  misc_feature 1..23: note = HLA-A targeting gRNA
  source 1..23: mol_type = other DNA
tgactggggactttagaacctgg

SEQ ID NO: 8210 - DNA, 23 bp, synthetic construct
  misc_feature 1..23: note = HLA-A targeting gRNA
  source 1..23: mol_type = other DNA
tgactggtgactttagaaccggg

SEQ ID NO: 8211 - DNA, 23 bp, synthetic construct
  misc_feature 1..23: note = HLA-A targeting gRNA
  source 1..23: mol_type = other DNA
tgactttagaaccgggactgcgg

SEQ ID NO: 8212 - DNA, 23 bp, synthetic construct
  misc_feature 1..23: note = HLA-A targeting gRNA
  source 1..23: mol_type = other DNA
tgagaaccccgcccgggacctgg

SEQ ID NO: 8213 - DNA, 23 bp, synthetic construct
  misc_feature 1..23: note = HLA-A targeting gRNA
  source 1..23: mol_type = other DNA
tgagaacggacaggacacctggg

SEQ ID NO: 8214 - DNA, 23 bp, synthetic construct
  misc_feature 1..23: note = HLA-A targeting gRNA
  source 1..23: mol_type = other DNA
tgagaatggacgggacacctggg

SEQ ID NO: 8215 - DNA, 23 bp, synthetic construct
  misc_feature 1..23: note = HLA-A targeting gRNA
  source 1..23: mol_type = other DNA
tgagaatgggcaggacacctggg

SEQ ID NO: 8216 - DNA, 23 bp, synthetic construct
  misc_feature 1..23: note = HLA-A targeting gRNA
  source 1..23: mol_type = other DNA
tgagagactcatcagagccctgg

SEQ ID NO: 8217 - DNA, 23 bp, synthetic construct
  misc_feature 1..23: note = HLA-A targeting gRNA
  source 1..23: mol_type = other DNA
tgagagccccgcccgggacctgg

SEQ ID NO: 8218 - DNA, 23 bp, synthetic construct
  misc_feature 1..23: note = HLA-A targeting gRNA
  source 1..23: mol_type = other DNA
tgagagccccgcccggggcctgg

SEQ ID NO: 8219 - DNA, 23 bp, synthetic construct
  misc_feature 1..23: note = HLA-A targeting gRNA
  source 1..23: mol_type = other DNA
tgagagccccgtccgggacatgg

SEQ ID NO: 8220 - DNA, 23 bp, synthetic construct
  misc_feature 1..23: note = HLA-A targeting gRNA
  source 1..23: mol_type = other DNA
tgagagccccgtccgggacctgg

SEQ ID NO: 8221 - DNA, 23 bp, synthetic construct
  misc_feature 1..23: note = HLA-A targeting gRNA
  source 1..23: mol_type = other DNA
tgagatccaccccgaggctgcgg

SEQ ID NO: 8222 - DNA, 23 bp, synthetic construct
  misc_feature 1..23: note = HLA-A targeting gRNA
  source 1..23: mol_type = other DNA
tgagatcctccccgaggctgcgg

SEQ ID NO: 8223 - DNA, 23 bp, synthetic construct
  misc_feature 1..23: note = HLA-A targeting gRNA
  source 1..23: mol_type = other DNA
tgagattctgggagctgaagtgg

SEQ ID NO: 8224 - DNA, 23 bp, synthetic construct
  misc_feature 1..23: note = HLA-A targeting gRNA
  source 1..23: mol_type = other DNA
tgagcatgaggcagagaacaagg

SEQ ID NO: 8225 - DNA, 23 bp, synthetic construct
  misc_feature 1..23: note = HLA-A targeting gRNA
  source 1..23: mol_type = other DNA
tgagcgtcaggcagagaacaagg

SEQ ID NO: 8226 - DNA, 23 bp, synthetic construct
  misc_feature 1..23: note = HLA-A targeting gRNA
  source 1..23: mol_type = other DNA
tgagcgtgaggcagagaacaagg

SEQ ID NO: 8227 - DNA, 23 bp, synthetic construct
  misc_feature 1..23: note = HLA-A targeting gRNA
  source 1..23: mol_type = other DNA
tgagctcctggcggacacggcgg

SEQ ID NO: 8228 - DNA, 23 bp, synthetic construct
  misc_feature 1..23: note = HLA-A targeting gRNA
  source 1..23: mol_type = other DNA
tgagcttgtggagaccagaccgg

SEQ ID NO: 8229 - DNA, 23 bp, synthetic construct
  misc_feature 1..23: note = HLA-A targeting gRNA
  source 1..23: mol_type = other DNA
tgaggagccgcgccgggaggagg

SEQ ID NO: 8230 - DNA, 23 bp, synthetic construct
  misc_feature 1..23: note = HLA-A targeting gRNA
  source 1..23: mol_type = other DNA
tgagggcactgggaggaagcagg

SEQ ID NO: 8231 - DNA, 23 bp, synthetic construct
  misc_feature 1..23: note = HLA-A targeting gRNA
  source 1..23: mol_type = other DNA
tgaggggacagggaggaggcagg

SEQ ID NO: 8232 - DNA, 23 bp, synthetic construct
  misc_feature 1..23: note = HLA-A targeting gRNA
  source 1..23: mol_type = other DNA
tgaggggacagggaggagtcagg

SEQ ID NO: 8233 - DNA, 23 bp, synthetic construct
  misc_feature 1..23: note = HLA-A targeting gRNA
  source 1..23: mol_type = other DNA
tgaggggactgggaggaagcagg

SEQ ID NO: 8234 - DNA, 23 bp, synthetic construct
  misc_feature 1..23: note = HLA-A targeting gRNA
  source 1..23: mol_type = other DNA
tgaggggactgggaggaggcagg

SEQ ID NO: 8235 - DNA, 23 bp, synthetic construct
  misc_feature 1..23: note = HLA-A targeting gRNA
  source 1..23: mol_type = other DNA
tgaggggcttcggtaaggagggg

SEQ ID NO: 8236 - DNA, 23 bp, synthetic construct
  misc_feature 1..23: note = HLA-A targeting gRNA
  source 1..23: mol_type = other DNA
tgaggtcaccctgaggtgctggg

SEQ ID NO: 8237 - DNA, 23 bp, synthetic construct
  misc_feature 1..23: note = HLA-A targeting gRNA
  source 1..23: mol_type = other DNA
tgagtatgaggcagagaacaagg

SEQ ID NO: 8238 - DNA, 23 bp, synthetic construct
  misc_feature 1..23: note = HLA-A targeting gRNA
  source 1..23: mol_type = other DNA
tgagtccgggtgggtgactgggg

SEQ ID NO: 8239 - DNA, 23 bp, synthetic construct
  misc_feature 1..23: note = HLA-A targeting gRNA
  source 1..23: mol_type = other DNA
tgagtccgggtgggtgcgtgggg

SEQ ID NO: 8240 - DNA, 23 bp, synthetic construct
  misc_feature 1..23: note = HLA-A targeting gRNA
  source 1..23: mol_type = other DNA
tgagtctctcatcgcttgtaagg

SEQ ID NO: 8241 - DNA, 23 bp, synthetic construct
  misc_feature 1..23: note = HLA-A targeting gRNA
  source 1..23: mol_type = other DNA
tgagtgtgaggcagagaacaagg

SEQ ID NO: 8242 - DNA, 23 bp, synthetic construct
  misc_feature 1..23: note = HLA-A targeting gRNA
  source 1..23: mol_type = other DNA
tgagtgtggggcagagaacaagg

SEQ ID NO: 8243 - DNA, 23 bp, synthetic construct
  misc_feature 1..23: note = HLA-A targeting gRNA
  source 1..23: mol_type = other DNA
tgagttttcttgtcccactgggg

SEQ ID NO: 8244 - DNA, 23 bp, synthetic construct
  misc_feature 1..23: note = HLA-A targeting gRNA
  source 1..23: mol_type = other DNA
tgatgaagcggggctccccgcgg

SEQ ID NO: 8245 - DNA, 23 bp, synthetic construct
  misc_feature 1..23: note = HLA-A targeting gRNA
  source 1..23: mol_type = other DNA
tgatgccggtgggcgtgtggagg

SEQ ID NO: 8246 - DNA, 23 bp, synthetic construct
  misc_feature 1..23: note = HLA-A targeting gRNA
  source 1..23: mol_type = other DNA
tgatggcagtgggcgtgtggagg

SEQ ID NO: 8247 - DNA, 23 bp, synthetic construct
  misc_feature 1..23: note = HLA-A targeting gRNA
  source 1..23: mol_type = other DNA
tgatggcggcaggcgtgtggagg

SEQ ID NO: 8248 - DNA, 23 bp, synthetic construct
  misc_feature 1..23: note = HLA-A targeting gRNA
  source 1..23: mol_type = other DNA
tgatggcggcgggcgtgtggagg

SEQ ID NO: 8249 - DNA, 23 bp, synthetic construct
  misc_feature 1..23: note = HLA-A targeting gRNA
  source 1..23: mol_type = other DNA
tgatggcggtggccgtgtggagg

SEQ ID NO: 8250 - DNA, 23 bp, synthetic construct
  misc_feature 1..23: note = HLA-A targeting gRNA
  source 1..23: mol_type = other DNA
tgatggcggtgggcgtgtggagg

SEQ ID NO: 8251 - DNA, 23 bp, synthetic construct
  misc_feature 1..23: note = HLA-A targeting gRNA
  source 1..23: mol_type = other DNA
tgatggctgttgtgatgtgtagg

SEQ ID NO: 8252 - DNA, 23 bp, synthetic construct
  misc_feature 1..23: note = HLA-A targeting gRNA
  source 1..23: mol_type = other DNA
tgatgggggcgggagtgtgaagg

SEQ ID NO: 8253 - DNA, 23 bp, synthetic construct
  misc_feature 1..23: note = HLA-A targeting gRNA
  source 1..23: mol_type = other DNA
tgatgggggcgggagtgtggagg

SEQ ID NO: 8254 - DNA, 23 bp, synthetic construct
  misc_feature 1..23: note = HLA-A targeting gRNA
  source 1..23: mol_type = other DNA
tgatgggggtgggagtgtgaagg

SEQ ID NO: 8255 - DNA, 23 bp, synthetic construct
  misc_feature 1..23: note = HLA-A targeting gRNA
  source 1..23: mol_type = other DNA
tgatgggggtgggagtgtggagg

SEQ ID NO: 8256 - DNA, 23 bp, synthetic construct
  misc_feature 1..23: note = HLA-A targeting gRNA
  source 1..23: mol_type = other DNA
tgattccagcatcatgagtcagg

SEQ ID NO: 8257 - DNA, 23 bp, synthetic construct
  misc_feature 1..23: note = HLA-A targeting gRNA
  source 1..23: mol_type = other DNA
tgattccagcattcatgagtcgg

SEQ ID NO: 8258 - DNA, 23 bp, synthetic construct
  misc_feature 1..23: note = HLA-A targeting gRNA
  source 1..23: mol_type = other DNA
tgcagcacatgtgacaatgaagg

SEQ ID NO: 8259 - DNA, 23 bp, synthetic construct
  misc_feature 1..23: note = HLA-A targeting gRNA
  source 1..23: mol_type = other DNA
tgcagccacacatccactggagg

SEQ ID NO: 8260 - DNA, 23 bp, synthetic construct
  misc_feature 1..23: note = HLA-A targeting gRNA
  source 1..23: mol_type = other DNA
tgcagggaacacttctacctggg

SEQ ID NO: 8261 - DNA, 23 bp, synthetic construct
  misc_feature 1..23: note = HLA-A targeting gRNA
  source 1..23: mol_type = other DNA
tgcatcccagtaatgaggcaggg

SEQ ID NO: 8262 - DNA, 23 bp, synthetic construct
  misc_feature 1..23: note = HLA-A targeting gRNA
  source 1..23: mol_type = other DNA
tgcatgtaagtgatggcggtggg

SEQ ID NO: 8263 - DNA, 23 bp, synthetic construct
  misc_feature 1..23: note = HLA-A targeting gRNA
  source 1..23: mol_type = other DNA
tgccattctccattcaacggagg

SEQ ID NO: 8264 - DNA, 23 bp, synthetic construct
  misc_feature 1..23: note = HLA-A targeting gRNA
  source 1..23: mol_type = other DNA
tgccattctccattcaagggagg

SEQ ID NO: 8265 - DNA, 23 bp, synthetic construct
  misc_feature 1..23: note = HLA-A targeting gRNA
  source 1..23: mol_type = other DNA
tgccccacactcagtgtttgggg

SEQ ID NO: 8266 - DNA, 23 bp, synthetic construct
  misc_feature 1..23: note = HLA-A targeting gRNA
  source 1..23: mol_type = other DNA
tgcccgcccggcgagggcgcagg

SEQ ID NO: 8267 - DNA, 23 bp, synthetic construct
  misc_feature 1..23: note = HLA-A targeting gRNA
  source 1..23: mol_type = other DNA
tgccctatgaggggactgggagg

SEQ ID NO: 8268 - DNA, 23 bp, synthetic construct
  misc_feature 1..23: note = HLA-A targeting gRNA
  source 1..23: mol_type = other DNA
tgccctgtgaggggacagggagg

SEQ ID NO: 8269 - DNA, 23 bp, synthetic construct
  misc_feature 1..23: note = HLA-A targeting gRNA
  source 1..23: mol_type = other DNA
tgccctgtgaggggactgggagg

SEQ ID NO: 8270 - DNA, 23 bp, synthetic construct
  misc_feature 1..23: note = HLA-A targeting gRNA
  source 1..23: mol_type = other DNA
tgccgtcgtaggcgtcctggtgg

SEQ ID NO: 8271 - DNA, 23 bp, synthetic construct
  misc_feature 1..23: note = HLA-A targeting gRNA
  source 1..23: mol_type = other DNA
tgcctcacactcagtgtgtttgg

SEQ ID NO: 8272 - DNA, 23 bp, synthetic construct
  misc_feature 1..23: note = HLA-A targeting gRNA
  source 1..23: mol_type = other DNA
tgcctgcatccgctggtgtctgg

SEQ ID NO: 8273 - DNA, 23 bp, synthetic construct
  misc_feature 1..23: note = HLA-A targeting gRNA
  source 1..23: mol_type = other DNA
tgcctgcgtccgctggtgtctgg

SEQ ID NO: 8274 - DNA, 23 bp, synthetic construct
  misc_feature 1..23: note = HLA-A targeting gRNA
  source 1..23: mol_type = other DNA
tgcggagccactccacacacagg

SEQ ID NO: 8275 - DNA, 23 bp, synthetic construct
  misc_feature 1..23: note = HLA-A targeting gRNA
  source 1..23: mol_type = other DNA
tgcggagccactcctcgcacagg

SEQ ID NO: 8276 - DNA, 23 bp, synthetic construct
  misc_feature 1..23: note = HLA-A targeting gRNA
  source 1..23: mol_type = other DNA
tgcggagcgaccccacgcacagg

SEQ ID NO: 8277 - DNA, 23 bp, synthetic construct
  misc_feature 1..23: note = HLA-A targeting gRNA
  source 1..23: mol_type = other DNA
tgcggagcgactccacgcacagg

SEQ ID NO: 8278 - DNA, 23 bp, synthetic construct
  misc_feature 1..23: note = HLA-A targeting gRNA
  source 1..23: mol_type = other DNA
tgcggtcccctcgctcctcccgg

SEQ ID NO: 8279 - DNA, 23 bp, synthetic construct
  misc_feature 1..23: note = HLA-A targeting gRNA
  source 1..23: mol_type = other DNA
tgcgtccagcgacagtgcccagg

SEQ ID NO: 8280 - DNA, 23 bp, synthetic construct
  misc_feature 1..23: note = HLA-A targeting gRNA
  source 1..23: mol_type = other DNA
tgcgtggggactttagaactggg

SEQ ID NO: 8281 - DNA, 23 bp, synthetic construct
  misc_feature 1..23: note = HLA-A targeting gRNA
  source 1..23: mol_type = other DNA
tgcgtgtaaatgatggcggcggg

SEQ ID NO: 8282 - DNA, 23 bp, synthetic construct
  misc_feature 1..23: note = HLA-A targeting gRNA
  source 1..23: mol_type = other DNA
tgcgtgtaagtgatgccggtggg

SEQ ID NO: 8283 - DNA, 23 bp, synthetic construct
  misc_feature 1..23: note = HLA-A targeting gRNA
  source 1..23: mol_type = other DNA
tgcgtgtaagtgatggcagtggg

SEQ ID NO: 8284 - DNA, 23 bp, synthetic construct
  misc_feature 1..23: note = HLA-A targeting gRNA
  source 1..23: mol_type = other DNA
tgcgtgtaagtgatggcggcagg

SEQ ID NO: 8285 - DNA, 23 bp, synthetic construct
  misc_feature 1..23: note = HLA-A targeting gRNA
  source 1..23: mol_type = other DNA
tgcgtgtaagtgatggcggcggg

SEQ ID NO: 8286 - DNA, 23 bp, synthetic construct
  misc_feature 1..23: note = HLA-A targeting gRNA
  source 1..23: mol_type = other DNA
tgcgtgtaagtgatggcggtggg

SEQ ID NO: 8287 - DNA, 23 bp, synthetic construct
  misc_feature 1..23: note = HLA-A targeting gRNA
  source 1..23: mol_type = other DNA
tgcgtgtaagtgatgggggcggg

SEQ ID NO: 8288 - DNA, 23 bp, synthetic construct
  misc_feature 1..23: note = HLA-A targeting gRNA
  source 1..23: mol_type = other DNA
tgcgtgtaagtgatgggggtggg

SEQ ID NO: 8289 - DNA, 23 bp, synthetic construct
  misc_feature 1..23: note = HLA-A targeting gRNA
  source 1..23: mol_type = other DNA
tgcgtgtaagtggtgggggtggg

SEQ ID NO: 8290 - DNA, 23 bp, synthetic construct
  misc_feature 1..23: note = HLA-A targeting gRNA
  source 1..23: mol_type = other DNA
tgctaaggacagaccttaggagg

SEQ ID NO: 8291 - DNA, 23 bp, synthetic construct
  misc_feature 1..23: note = HLA-A targeting gRNA
  source 1..23: mol_type = other DNA
tgctccacccacggcgcccgcgg

SEQ ID NO: 8292 - DNA, 23 bp, synthetic construct
  misc_feature 1..23: note = HLA-A targeting gRNA
  source 1..23: mol_type = other DNA
tgctccacccacggcgcccgggg

SEQ ID NO: 8293 - DNA, 23 bp, synthetic construct
  misc_feature 1..23: note = HLA-A targeting gRNA
  source 1..23: mol_type = other DNA
tgctccacccacggcgcctgcgg

SEQ ID NO: 8294 - DNA, 23 bp, synthetic construct
  misc_feature 1..23: note = HLA-A targeting gRNA
  source 1..23: mol_type = other DNA
tgctccacccacggctcccgcgg

SEQ ID NO: 8295 - DNA, 23 bp, synthetic construct
  misc_feature 1..23: note = HLA-A targeting gRNA
  source 1..23: mol_type = other DNA
tgctccatccacggctcccgcgg

SEQ ID NO: 8296 - DNA, 23 bp, synthetic construct
  misc_feature 1..23: note = HLA-A targeting gRNA
  source 1..23: mol_type = other DNA
tgctctatccaccgcgcccgcgg

SEQ ID NO: 8297 - DNA, 23 bp, synthetic construct
  misc_feature 1..23: note = HLA-A targeting gRNA
  source 1..23: mol_type = other DNA
tgctctatccacggcgcccgggg

SEQ ID NO: 8298 - DNA, 23 bp, synthetic construct
  misc_feature 1..23: note = HLA-A targeting gRNA
  source 1..23: mol_type = other DNA
tgctctatccagggcgcccgcgg

SEQ ID NO: 8299 - DNA, 23 bp, synthetic construct
  misc_feature 1..23: note = HLA-A targeting gRNA
  source 1..23: mol_type = other DNA
tgctctatccatggcgcccaggg

SEQ ID NO: 8300 - DNA, 23 bp, synthetic construct
  misc_feature 1..23: note = HLA-A targeting gRNA
  source 1..23: mol_type = other DNA
tgctctatccatggcgcccgcgg

SEQ ID NO: 8301 - DNA, 23 bp, synthetic construct
  misc_feature 1..23: note = HLA-A targeting gRNA
  source 1..23: mol_type = other DNA
tgctctatccatggcgcccgggg

SEQ ID NO: 8302 - DNA, 23 bp, synthetic construct
  misc_feature 1..23: note = HLA-A targeting gRNA
  source 1..23: mol_type = other DNA
tgctctatccatggctcccgggg

SEQ ID NO: 8303 - DNA, 23 bp, synthetic construct
  misc_feature 1..23: note = HLA-A targeting gRNA
  source 1..23: mol_type = other DNA
tgctggcctggctgtccttgtgg

SEQ ID NO: 8304 - DNA, 23 bp, synthetic construct
  misc_feature 1..23: note = HLA-A targeting gRNA
  source 1..23: mol_type = other DNA
tgcttcccagtaatgaggcaggg

SEQ ID NO: 8305 - DNA, 23 bp, synthetic construct
  misc_feature 1..23: note = HLA-A targeting gRNA
  source 1..23: mol_type = other DNA
tgcttcccagtaatgatgcaggg

SEQ ID NO: 8306 - DNA, 23 bp, synthetic construct
  misc_feature 1..23: note = HLA-A targeting gRNA
  source 1..23: mol_type = other DNA
tggaaagttctagtctctgaggg

SEQ ID NO: 8307 - DNA, 23 bp, synthetic construct
  misc_feature 1..23: note = HLA-A targeting gRNA
  source 1..23: mol_type = other DNA
tggaagaagaagtgaaactcagg

SEQ ID NO: 8308 - DNA, 23 bp, synthetic construct
  misc_feature 1..23: note = HLA-A targeting gRNA
  source 1..23: mol_type = other DNA
tggaagcaccatccacacatggg

SEQ ID NO: 8309 - DNA, 23 bp, synthetic construct
  misc_feature 1..23: note = HLA-A targeting gRNA
  source 1..23: mol_type = other DNA
tggaagcaccatccacacctggg

SEQ ID NO: 8310 - DNA, 23 bp, synthetic construct
  misc_feature 1..23: note = HLA-A targeting gRNA
  source 1..23: mol_type = other DNA
tggaagcaccatccacacgtggg

SEQ ID NO: 8311 - DNA, 23 bp, synthetic construct
  misc_feature 1..23: note = HLA-A targeting gRNA
  source 1..23: mol_type = other DNA
tggaagcctgggggcgaggaggg

SEQ ID NO: 8312 - DNA, 23 bp, synthetic construct
  misc_feature 1..23: note = HLA-A targeting gRNA
  source 1..23: mol_type = other DNA
tggaaggttccatctcctgctgg

SEQ ID NO: 8313 - DNA, 23 bp, synthetic construct
  misc_feature 1..23: note = HLA-A targeting gRNA
  source 1..23: mol_type = other DNA
tggaaggttctatctcctgcagg

SEQ ID NO: 8314 - DNA, 23 bp, synthetic construct
  misc_feature 1..23: note = HLA-A targeting gRNA
  source 1..23: mol_type = other DNA
tggaaggttctatctcctgccgg

SEQ ID NO: 8315 - DNA, 23 bp, synthetic construct
  misc_feature 1..23: note = HLA-A targeting gRNA
  source 1..23: mol_type = other DNA
tggaaggttctatctcctgctgg

SEQ ID NO: 8316 - DNA, 23 bp, synthetic construct
  misc_feature 1..23: note = HLA-A targeting gRNA
  source 1..23: mol_type = other DNA
tggaaggttctgtctcctgctgg

SEQ ID NO: 8317 - DNA, 23 bp, synthetic construct
  misc_feature 1..23: note = HLA-A targeting gRNA
  source 1..23: mol_type = other DNA
tggacaggacacctggggtaggg

SEQ ID NO: 8318 - DNA, 23 bp, synthetic construct
  misc_feature 1..23: note = HLA-A targeting gRNA
  source 1..23: mol_type = other DNA
tggacaggacacctggggtgggg

SEQ ID NO: 8319 - DNA, 23 bp, synthetic construct
  misc_feature 1..23: note = HLA-A targeting gRNA
  source 1..23: mol_type = other DNA
tggacaggacacctggtgtgggg

SEQ ID NO: 8320 - DNA, 23 bp, synthetic construct
  misc_feature 1..23: note = HLA-A targeting gRNA
  source 1..23: mol_type = other DNA
tggaccggtgagtgcggggttgg

SEQ ID NO: 8321 - DNA, 23 bp, synthetic construct
  misc_feature 1..23: note = HLA-A targeting gRNA
  source 1..23: mol_type = other DNA
tggacgacaagcagttcgtgagg

SEQ ID NO: 8322 - DNA, 23 bp, synthetic construct
  misc_feature 1..23: note = HLA-A targeting gRNA
  source 1..23: mol_type = other DNA
tggacgacacccagttcgtgagg

SEQ ID NO: 8323 - DNA, 23 bp, synthetic construct
  misc_feature 1..23: note = HLA-A targeting gRNA
  source 1..23: mol_type = other DNA
tggacgacacgcacttcgtgcgg

SEQ ID NO: 8324 - DNA, 23 bp, synthetic construct
  misc_feature 1..23: note = HLA-A targeting gRNA
  source 1..23: mol_type = other DNA
tggacgacacgcagttcatgagg

SEQ ID NO: 8325 - DNA, 23 bp, synthetic construct
  misc_feature 1..23: note = HLA-A targeting gRNA
  source 1..23: mol_type = other DNA
tggacgacacgcagttcgcgcgg

SEQ ID NO: 8326 - DNA, 23 bp, synthetic construct
  misc_feature 1..23: note = HLA-A targeting gRNA
  source 1..23: mol_type = other DNA
tggacgacacgcagttcgtgagg

SEQ ID NO: 8327 - DNA, 23 bp, synthetic construct
  misc_feature 1..23: note = HLA-A targeting gRNA
  source 1..23: mol_type = other DNA
tggacgacacgcagtttgtgcgg

SEQ ID NO: 8328 - DNA, 23 bp, synthetic construct
  misc_feature 1..23: note = HLA-A targeting gRNA
  source 1..23: mol_type = other DNA
tggacgacacgctgttcatgagg

SEQ ID NO: 8329 - DNA, 23 bp, synthetic construct
  misc_feature 1..23: note = HLA-A targeting gRNA
  source 1..23: mol_type = other DNA
tggacgacacgctgttcgtgagg

SEQ ID NO: 8330 - DNA, 23 bp, synthetic construct
  misc_feature 1..23: note = HLA-A targeting gRNA
  source 1..23: mol_type = other DNA
tggacgacacgctgttggtgagg

SEQ ID NO: 8331 - DNA, 23 bp, synthetic construct
  misc_feature 1..23: note = HLA-A targeting gRNA
  source 1..23: mol_type = other DNA
tggacgaggacctgcgctcctgg

SEQ ID NO: 8332 - DNA, 23 bp, synthetic construct
  misc_feature 1..23: note = HLA-A targeting gRNA
  source 1..23: mol_type = other DNA
tggacgatacgcagttcgtgcgg

SEQ ID NO: 8333 - DNA, 23 bp, synthetic construct
  misc_feature 1..23: note = HLA-A targeting gRNA
  source 1..23: mol_type = other DNA
tggacggcacccagttcgtgagg

SEQ ID NO: 8334 - DNA, 23 bp, synthetic construct
  misc_feature 1..23: note = HLA-A targeting gRNA
  source 1..23: mol_type = other DNA
tggacgggacacctggggtgggg

SEQ ID NO: 8335 - DNA, 23 bp, synthetic construct
  misc_feature 1..23: note = HLA-A targeting gRNA
  source 1..23: mol_type = other DNA
tggactacacgcagttcgtgcgg

SEQ ID NO: 8336 - DNA, 23 bp, synthetic construct
  misc_feature 1..23: note = HLA-A targeting gRNA
  source 1..23: mol_type = other DNA
tggactgcggagacgctgattgg

SEQ ID NO: 8337 - DNA, 23 bp, synthetic construct
  misc_feature 1..23: note = HLA-A targeting gRNA
  source 1..23: mol_type = other DNA
tggactgggaagacggctccggg

SEQ ID NO: 8338 - DNA, 23 bp, synthetic construct
  misc_feature 1..23: note = HLA-A targeting gRNA
  source 1..23: mol_type = other DNA
tggactgggaagacggctctggg

SEQ ID NO: 8339 - DNA, 23 bp, synthetic construct
  misc_feature 1..23: note = HLA-A targeting gRNA
  source 1..23: mol_type = other DNA
tggactgggaagatggctctggg

SEQ ID NO: 8340 - DNA, 23 bp, synthetic construct
  misc_feature 1..23: note = HLA-A targeting gRNA
  source 1..23: mol_type = other DNA
tggagaaacacctcatggagtgg

SEQ ID NO: 8341 - DNA, 23 bp, synthetic construct
  misc_feature 1..23: note = HLA-A targeting gRNA
  source 1..23: mol_type = other DNA
tggagaaatacgtcatggagtgg

SEQ ID NO: 8342 - DNA, 23 bp, synthetic construct
  misc_feature 1..23: note = HLA-A targeting gRNA
  source 1..23: mol_type = other DNA
tggagcccctcaccctgagatgg

SEQ ID NO: 8343 - DNA, 23 bp, synthetic construct
  misc_feature 1..23: note = HLA-A targeting gRNA
  source 1..23: mol_type = other DNA
tggagcccttcagcagggtcagg

SEQ ID NO: 8344 - DNA, 23 bp, synthetic construct
  misc_feature 1..23: note = HLA-A targeting gRNA
  source 1..23: mol_type = other DNA
tggagcccttcagcagggtcggg

SEQ ID NO: 8345 - DNA, 23 bp, synthetic construct
  misc_feature 1..23: note = HLA-A targeting gRNA
  source 1..23: mol_type = other DNA
tggagcccttcagccaggtcagg

SEQ ID NO: 8346 - DNA, 23 bp, synthetic construct
  misc_feature 1..23: note = HLA-A targeting gRNA
  source 1..23: mol_type = other DNA
tggagcccttcagccgggtcagg

SEQ ID NO: 8347 - DNA, 23 bp, synthetic construct
  misc_feature 1..23: note = HLA-A targeting gRNA
  source 1..23: mol_type = other DNA
tggagcccttcagctgggtcagg

SEQ ID NO: 8348 - DNA, 23 bp, synthetic construct
  misc_feature 1..23: note = HLA-A targeting gRNA
  source 1..23: mol_type = other DNA
tggaggacacgtgcgtggagtgg

SEQ ID NO: 8349 - DNA, 23 bp, synthetic construct
  misc_feature 1..23: note = HLA-A targeting gRNA
  source 1..23: mol_type = other DNA
tggaggaggggccggagtattgg

SEQ ID NO: 8350 - DNA, 23 bp, synthetic construct
  misc_feature 1..23: note = HLA-A targeting gRNA
  source 1..23: mol_type = other DNA
tggagggaacgtgcgtggagtgg

SEQ ID NO: 8351 - DNA, 23 bp, synthetic construct
  misc_feature 1..23: note = HLA-A targeting gRNA
  source 1..23: mol_type = other DNA
tggagggcaagtgcgtggagtgg

SEQ ID NO: 8352 - DNA, 23 bp, synthetic construct
  misc_feature 1..23: note = HLA-A targeting gRNA
  source 1..23: mol_type = other DNA
tggagggcacgcgcgtggagtgg

SEQ ID NO: 8353 - DNA, 23 bp, synthetic construct
  misc_feature 1..23: note = HLA-A targeting gRNA
  source 1..23: mol_type = other DNA
tggagggcacgtacgtggagtgg

SEQ ID NO: 8354 - DNA, 23 bp, synthetic construct
  misc_feature 1..23: note = HLA-A targeting gRNA
  source 1..23: mol_type = other DNA
tggagggcacgtgagtggagtgg

SEQ ID NO: 8355 - DNA, 23 bp, synthetic construct
  misc_feature 1..23: note = HLA-A targeting gRNA
  source 1..23: mol_type = other DNA
tggagggcacgtgcatggagtgg

SEQ ID NO: 8356 - DNA, 23 bp, synthetic construct
  misc_feature 1..23: note = HLA-A targeting gRNA
  source 1..23: mol_type = other DNA
tggagggcacgtgtgtggagtgg

SEQ ID NO: 8357 - DNA, 23 bp, synthetic construct
  misc_feature 1..23: note = HLA-A targeting gRNA
  source 1..23: mol_type = other DNA
tggagggcacgttcgtggagtgg

SEQ ID NO: 8358 - DNA, 23 bp, synthetic construct
  misc_feature 1..23: note = HLA-A targeting gRNA
  source 1..23: mol_type = other DNA
tggagggcctgtgcgaggagtgg

SEQ ID NO: 8359 - DNA, 23 bp, synthetic construct
  misc_feature 1..23: note = HLA-A targeting gRNA
  source 1..23: mol_type = other DNA
tggagggcctgtgtgtggagtgg

SEQ ID NO: 8360 - DNA, 23 bp, synthetic construct
  misc_feature 1..23: note = HLA-A targeting gRNA
  source 1..23: mol_type = other DNA
tggagggcgagtgcgtggagtgg

SEQ ID NO: 8361 - DNA, 23 bp, synthetic construct
  misc_feature 1..23: note = HLA-A targeting gRNA
  source 1..23: mol_type = other DNA
tggaggggaagacagtccctagg

SEQ ID NO: 8362 - DNA, 23 bp, synthetic construct
  misc_feature 1..23: note = HLA-A targeting gRNA
  source 1..23: mol_type = other DNA
tggagtaaggagggggatgaggg

SEQ ID NO: 8363 - DNA, 23 bp, synthetic construct
  misc_feature 1..23: note = HLA-A targeting gRNA
  source 1..23: mol_type = other DNA
tggagtgggagcctggggcaagg

SEQ ID NO: 8364 - DNA, 23 bp, synthetic construct
  misc_feature 1..23: note = HLA-A targeting gRNA
  source 1..23: mol_type = other DNA
tggatgtacggctgcgacctggg

SEQ ID NO: 8365 - DNA, 23 bp, synthetic construct
  misc_feature 1..23: note = HLA-A targeting gRNA
  source 1..23: mol_type = other DNA
tggatgtatggctgcgacctggg

SEQ ID NO: 8366 - DNA, 23 bp, synthetic construct
  misc_feature 1..23: note = HLA-A targeting gRNA
  source 1..23: mol_type = other DNA
tggatgtatggctgcgacgtggg

SEQ ID NO: 8367 - DNA, 23 bp, synthetic construct
  misc_feature 1..23: note = HLA-A targeting gRNA
  source 1..23: mol_type = other DNA
tggatgtgagaccctggccccgg

SEQ ID NO: 8368 - DNA, 23 bp, synthetic construct
  misc_feature 1..23: note = HLA-A targeting gRNA
  source 1..23: mol_type = other DNA
tggatgtgtggctgcaacctggg

SEQ ID NO: 8369 - DNA, 23 bp, synthetic construct
  misc_feature 1..23: note = HLA-A targeting gRNA
  source 1..23: mol_type = other DNA
tggatgtgtggctgcgacctggg

SEQ ID NO: 8370 - DNA, 23 bp, synthetic construct
  misc_feature 1..23: note = HLA-A targeting gRNA
  source 1..23: mol_type = other DNA
tggatgtttggctgcgacctggg

SEQ ID NO: 8371 - DNA, 23 bp, synthetic construct
  misc_feature 1..23: note = HLA-A targeting gRNA
  source 1..23: mol_type = other DNA
tggatgtttggctgcgaccttgg

SEQ ID NO: 8372 - DNA, 23 bp, synthetic construct
  misc_feature 1..23: note = HLA-A targeting gRNA
  source 1..23: mol_type = other DNA
tggattgggaagatggctctggg

SEQ ID NO: 8373 - DNA, 23 bp, synthetic construct
  misc_feature 1..23: note = HLA-A targeting gRNA
  source 1..23: mol_type = other DNA
tggcacacagggtcccaggctgg

SEQ ID NO: 8374 - DNA, 23 bp, synthetic construct
  misc_feature 1..23: note = HLA-A targeting gRNA
  source 1..23: mol_type = other DNA
tggcaggtctgggggtgggtggg

SEQ ID NO: 8375 - DNA, 23 bp, synthetic construct
  misc_feature 1..23: note = HLA-A targeting gRNA
  source 1..23: mol_type = other DNA
tggccgcggggccggggccaggg

SEQ ID NO: 8376 - DNA, 23 bp, synthetic construct
  misc_feature 1..23: note = HLA-A targeting gRNA
  source 1..23: mol_type = other DNA
tggcctcatggtcagagacgggg

SEQ ID NO: 8377 - DNA, 23 bp, synthetic construct
  misc_feature 1..23: note = HLA-A targeting gRNA
  source 1..23: mol_type = other DNA
tggcctcatggtcagagaggggg

SEQ ID NO: 8378 - DNA, 23 bp, synthetic construct
  misc_feature 1..23: note = HLA-A targeting gRNA
  source 1..23: mol_type = other DNA
tggcctccaacgagaagaagagg

SEQ ID NO: 8379 - DNA, 23 bp, synthetic construct
  misc_feature 1..23: note = HLA-A targeting gRNA
  source 1..23: mol_type = other DNA
tggcctcccacgagaagaagagg

SEQ ID NO: 8380 - DNA, 23 bp, synthetic construct
  misc_feature 1..23: note = HLA-A targeting gRNA
  source 1..23: mol_type = other DNA
tggcctcccacgagaagaggagg

SEQ ID NO: 8381 - DNA, 23 bp, synthetic construct
  misc_feature 1..23: note = HLA-A targeting gRNA
  source 1..23: mol_type = other DNA
tggcctcccacgaggaagggagg

SEQ ID NO: 8382 - DNA, 23 bp, synthetic construct
  misc_feature 1..23: note = HLA-A targeting gRNA
  source 1..23: mol_type = other DNA
tggcctcccacgaggaggggagg

SEQ ID NO: 8383 - DNA, 23 bp, synthetic construct
  misc_feature 1..23: note = HLA-A targeting gRNA
  source 1..23: mol_type = other DNA
tggcctggtctccacaagctcgg

SEQ ID NO: 8384 - DNA, 23 bp, synthetic construct
  misc_feature 1..23: note = HLA-A targeting gRNA
  source 1..23: mol_type = other DNA
tggcctggtctccacaagctggg

SEQ ID NO: 8385 - DNA, 23 bp, synthetic construct
  misc_feature 1..23: note = HLA-A targeting gRNA
  source 1..23: mol_type = other DNA
tggccttccacgaggaggggagg

SEQ ID NO: 8386 - DNA, 23 bp, synthetic construct
  misc_feature 1..23: note = HLA-A targeting gRNA
  source 1..23: mol_type = other DNA
tggcgggtctcagcccctcctgg

SEQ ID NO: 8387 - DNA, 23 bp, synthetic construct
  misc_feature 1..23: note = HLA-A targeting gRNA
  source 1..23: mol_type = other DNA
tggcgggtctggggcggggtggg

SEQ ID NO: 8388 - DNA, 23 bp, synthetic construct
  misc_feature 1..23: note = HLA-A targeting gRNA
  source 1..23: mol_type = other DNA
tggcgggtctggggggggggggg

SEQ ID NO: 8389 - DNA, 23 bp, synthetic construct
  misc_feature 1..23: note = HLA-A targeting gRNA
  source 1..23: mol_type = other DNA
tggcgggtctgggggtgggtggg

SEQ ID NO: 8390 - DNA, 23 bp, synthetic construct
  misc_feature 1..23: note = HLA-A targeting gRNA
  source 1..23: mol_type = other DNA
tggcgtctctgaggaaatggagg

SEQ ID NO: 8391 - DNA, 23 bp, synthetic construct
  misc_feature 1..23: note = HLA-A targeting gRNA
  source 1..23: mol_type = other DNA
tggctactacaaccagagcgagg

SEQ ID NO: 8392 - DNA, 23 bp, synthetic construct
  misc_feature 1..23: note = HLA-A targeting gRNA
  source 1..23: mol_type = other DNA
tggctcccatctcagggtgaggg

SEQ ID NO: 8393 - DNA, 23 bp, synthetic construct
  misc_feature 1..23: note = HLA-A targeting gRNA
  source 1..23: mol_type = other DNA
tggctgttgtgatgtgtaggagg

SEQ ID NO: 8394 - DNA, 23 bp, synthetic construct
  misc_feature 1..23: note = HLA-A targeting gRNA
  source 1..23: mol_type = other DNA
tggctgttgttatgtgtaggagg

SEQ ID NO: 8395 - DNA, 23 bp, synthetic construct
  misc_feature 1..23: note = HLA-A targeting gRNA
  source 1..23: mol_type = other DNA
tgggaaaagaggagaaggtgagg

SEQ ID NO: 8396 - DNA, 23 bp, synthetic construct
  misc_feature 1..23: note = HLA-A targeting gRNA
  source 1..23: mol_type = other DNA
tgggaaaggaagggaagatgagg

SEQ ID NO: 8397 - DNA, 23 bp, synthetic construct
  misc_feature 1..23: note = HLA-A targeting gRNA
  source 1..23: mol_type = other DNA
tgggaaaggaggagaaggtgagg

SEQ ID NO: 8398 - DNA, 23 bp, synthetic construct
  misc_feature 1..23: note = HLA-A targeting gRNA
  source 1..23: mol_type = other DNA
tgggaaaggaggggaagacgagg

SEQ ID NO: 8399 - DNA, 23 bp, synthetic construct
  misc_feature 1..23: note = HLA-A targeting gRNA
  source 1..23: mol_type = other DNA
tgggaaaggaggggaagatgagg

SEQ ID NO: 8400 - DNA, 23 bp, synthetic construct
  misc_feature 1..23: note = HLA-A targeting gRNA
  source 1..23: mol_type = other DNA
tgggaaaggaggggaaggtgagg

SEQ ID NO: 8401 - DNA, 23 bp, synthetic construct
  misc_feature 1..23: note = HLA-A targeting gRNA
  source 1..23: mol_type = other DNA
tgggaacctgggggcgaggaggg

SEQ ID NO: 8402 - DNA, 23 bp, synthetic construct
  misc_feature 1..23: note = HLA-A targeting gRNA
  source 1..23: mol_type = other DNA
tgggaagaaaatgccctatgagg

SEQ ID NO: 8403 - DNA, 23 bp, synthetic construct
  misc_feature 1..23: note = HLA-A targeting gRNA
  source 1..23: mol_type = other DNA
tgggaagaaaatgccctgtgagg

SEQ ID NO: 8404 - DNA, 23 bp, synthetic construct
  misc_feature 1..23: note = HLA-A targeting gRNA
  source 1..23: mol_type = other DNA
tgggaagaaaatgtcctgtgagg

SEQ ID NO: 8405 - DNA, 23 bp, synthetic construct
  misc_feature 1..23: note = HLA-A targeting gRNA
  source 1..23: mol_type = other DNA
tgggaagacggctccgggaaagg

SEQ ID NO: 8406 - DNA, 23 bp, synthetic construct
  misc_feature 1..23: note = HLA-A targeting gRNA
  source 1..23: mol_type = other DNA
tgggaagacggctctgggaaagg

SEQ ID NO: 8407 - DNA, 23 bp, synthetic construct
  misc_feature 1..23: note = HLA-A targeting gRNA
  source 1..23: mol_type = other DNA
tgggaagagtcagaaaattcagg

SEQ ID NO: 8408 - DNA, 23 bp, synthetic construct
  misc_feature 1..23: note = HLA-A targeting gRNA
  source 1..23: mol_type = other DNA
tgggaagatggccctgggaaagg

SEQ ID NO: 8409 - DNA, 23 bp, synthetic construct
  misc_feature 1..23: note = HLA-A targeting gRNA
  source 1..23: mol_type = other DNA
tgggaagatggctctgggaaagg

SEQ ID NO: 8410 - DNA, 23 bp, synthetic construct
  misc_feature 1..23: note = HLA-A targeting gRNA
  source 1..23: mol_type = other DNA
tgggaagcaaatgtcctgtgagg

SEQ ID NO: 8411 - DNA, 23 bp, synthetic construct
  misc_feature 1..23: note = HLA-A targeting gRNA
  source 1..23: mol_type = other DNA
tgggaagcagcatccacacaggg

SEQ ID NO: 8412 - DNA, 23 bp, synthetic construct
  misc_feature 1..23: note = HLA-A targeting gRNA
  source 1..23: mol_type = other DNA
tgggaagcagcatcctcacaggg

SEQ ID NO: 8413 - DNA, 23 bp, synthetic construct
  misc_feature 1..23: note = HLA-A targeting gRNA
  source 1..23: mol_type = other DNA
tgggaagcagcatgcacacaggg

SEQ ID NO: 8414 - DNA, 23 bp, synthetic construct
  misc_feature 1..23: note = HLA-A targeting gRNA
  source 1..23: mol_type = other DNA
tgggagaagaagtgaaactcagg

SEQ ID NO: 8415 - DNA, 23 bp, synthetic construct
  misc_feature 1..23: note = HLA-A targeting gRNA
  source 1..23: mol_type = other DNA
tgggagactgggggcgaggaggg

SEQ ID NO: 8416 - DNA, 23 bp, synthetic construct
  misc_feature 1..23: note = HLA-A targeting gRNA
  source 1..23: mol_type = other DNA
tgggagactgggggtgaggaggg

SEQ ID NO: 8417 - DNA, 23 bp, synthetic construct
  misc_feature 1..23: note = HLA-A targeting gRNA
  source 1..23: mol_type = other DNA
tgggagcctgggagcgaggaggg

SEQ ID NO: 8418 - DNA, 23 bp, synthetic construct
  misc_feature 1..23: note = HLA-A targeting gRNA
  source 1..23: mol_type = other DNA
tgggagcctggggcaaggagggg

SEQ ID NO: 8419 - DNA, 23 bp, synthetic construct
  misc_feature 1..23: note = HLA-A targeting gRNA
  source 1..23: mol_type = other DNA
tgggagcctgggggagaggaggg

SEQ ID NO: 8420 - DNA, 23 bp, synthetic construct
  misc_feature 1..23: note = HLA-A targeting gRNA
  source 1..23: mol_type = other DNA
tgggagcctgggggccaggaggg

SEQ ID NO: 8421 - DNA, 23 bp, synthetic construct
  misc_feature 1..23: note = HLA-A targeting gRNA
  source 1..23: mol_type = other DNA
tgggagcctgggggcgaggaggg

SEQ ID NO: 8422 - DNA, 23 bp, synthetic construct
  misc_feature 1..23: note = HLA-A targeting gRNA
  source 1..23: mol_type = other DNA
tgggagcctgggggtgaggaggg

SEQ ID NO: 8423 - DNA, 23 bp, synthetic construct
  misc_feature 1..23: note = HLA-A targeting gRNA
  source 1..23: mol_type = other DNA
tgggaggctgggggcgaggaggg

SEQ ID NO: 8424 - DNA, 23 bp, synthetic construct
  misc_feature 1..23: note = HLA-A targeting gRNA
  source 1..23: mol_type = other DNA
tgggagggaaacggcctctgcgg

SEQ ID NO: 8425 - DNA, 23 bp, synthetic construct
  misc_feature 1..23: note = HLA-A targeting gRNA
  source 1..23: mol_type = other DNA
tgggagggaaacggcctctgggg

SEQ ID NO: 8426 - DNA, 23 bp, synthetic construct
  misc_feature 1..23: note = HLA-A targeting gRNA
  source 1..23: mol_type = other DNA
tgggagggaagcggcctctatgg

SEQ ID NO: 8427 - DNA, 23 bp, synthetic construct
  misc_feature 1..23: note = HLA-A targeting gRNA
  source 1..23: mol_type = other DNA
tgggagggaagcggcctctgcgg

SEQ ID NO: 8428 - DNA, 23 bp, synthetic construct
  misc_feature 1..23: note = HLA-A targeting gRNA
  source 1..23: mol_type = other DNA
tgggagggaatcggcctctgcgg

SEQ ID NO: 8429 - DNA, 23 bp, synthetic construct
  misc_feature 1..23: note = HLA-A targeting gRNA
  source 1..23: mol_type = other DNA
tgggataatctcctattcattgg

SEQ ID NO: 8430 - DNA, 23 bp, synthetic construct
  misc_feature 1..23: note = HLA-A targeting gRNA
  source 1..23: mol_type = other DNA
tgggataatctcctattctttgg

SEQ ID NO: 8431 - DNA, 23 bp, synthetic construct
  misc_feature 1..23: note = HLA-A targeting gRNA
  source 1..23: mol_type = other DNA
tgggatgcagcatccacacaggg

SEQ ID NO: 8432 - DNA, 23 bp, synthetic construct
  misc_feature 1..23: note = HLA-A targeting gRNA
  source 1..23: mol_type = other DNA
tgggatggcccacgtgtggatgg

SEQ ID NO: 8433 - DNA, 23 bp, synthetic construct
  misc_feature 1..23: note = HLA-A targeting gRNA
  source 1..23: mol_type = other DNA
tgggatggcccaggtgtggatgg

SEQ ID NO: 8434 - DNA, 23 bp, synthetic construct
  misc_feature 1..23: note = HLA-A targeting gRNA
  source 1..23: mol_type = other DNA
tgggatggcccatgtgtggatgg

SEQ ID NO: 8435 - DNA, 23 bp, synthetic construct
  misc_feature 1..23: note = HLA-A targeting gRNA
  source 1..23: mol_type = other DNA
tgggcaggacacctggggtgggg

SEQ ID NO: 8436 - DNA, 23 bp, synthetic construct
  misc_feature 1..23: note = HLA-A targeting gRNA
  source 1..23: mol_type = other DNA
tgggccctgggcttctaccctgg

SEQ ID NO: 8437 - DNA, 23 bp, synthetic construct
  misc_feature 1..23: note = HLA-A targeting gRNA
  source 1..23: mol_type = other DNA
tgggccggtgagtgcgggatcgg

SEQ ID NO: 8438 - DNA, 23 bp, synthetic construct
  misc_feature 1..23: note = HLA-A targeting gRNA
  source 1..23: mol_type = other DNA
tgggccggtgagtgcggggtcgg

SEQ ID NO: 8439 - DNA, 23 bp, synthetic construct
  misc_feature 1..23: note = HLA-A targeting gRNA
  source 1..23: mol_type = other DNA
tgggccggtgagtgcggggttgg

SEQ ID NO: 8440 - DNA, 23 bp, synthetic construct
  misc_feature 1..23: note = HLA-A targeting gRNA
  source 1..23: mol_type = other DNA
tgggccggtgagtgcgggtcggg

SEQ ID NO: 8441 - DNA, 23 bp, synthetic construct
  misc_feature 1..23: note = HLA-A targeting gRNA
  source 1..23: mol_type = other DNA
tgggcctgtgagtgcgaggttgg

SEQ ID NO: 8442 - DNA, 23 bp, synthetic construct
  misc_feature 1..23: note = HLA-A targeting gRNA
  source 1..23: mol_type = other DNA
tgggcctgtgagtgcggggttgg

SEQ ID NO: 8443 - DNA, 23 bp, synthetic construct
  misc_feature 1..23: note = HLA-A targeting gRNA
  source 1..23: mol_type = other DNA
tgggcgacccgggccgtccgtgg

SEQ ID NO: 8444 - DNA, 23 bp, synthetic construct
  misc_feature 1..23: note = HLA-A targeting gRNA
  source 1..23: mol_type = other DNA
tgggcggattccgcagcctcggg

SEQ ID NO: 8445 - DNA, 23 bp, synthetic construct
  misc_feature 1..23: note = HLA-A targeting gRNA
  source 1..23: mol_type = other DNA
tgggcgggggggcggggaggggg

SEQ ID NO: 8446 - DNA, 23 bp, synthetic construct
  misc_feature 1..23: note = HLA-A targeting gRNA
  source 1..23: mol_type = other DNA
tgggcggggggggcggggagggg

SEQ ID NO: 8447 - DNA, 23 bp, synthetic construct
  misc_feature 1..23: note = HLA-A targeting gRNA
  source 1..23: mol_type = other DNA
tgggcggggggggggtggggtgg

SEQ ID NO: 8448 - DNA, 23 bp, synthetic construct
  misc_feature 1..23: note = HLA-A targeting gRNA
  source 1..23: mol_type = other DNA
tgggcgggggggggtggggtggg

SEQ ID NO: 8449 - DNA, 23 bp, synthetic construct
  misc_feature 1..23: note = HLA-A targeting gRNA
  source 1..23: mol_type = other DNA
tgggcggggggggtggggtgggg

SEQ ID NO: 8450 - DNA, 23 bp, synthetic construct
  misc_feature 1..23: note = HLA-A targeting gRNA
  source 1..23: mol_type = other DNA
tgggcgggtcccgcggcctcagg

SEQ ID NO: 8451 - DNA, 23 bp, synthetic construct
  misc_feature 1..23: note = HLA-A targeting gRNA
  source 1..23: mol_type = other DNA
tgggcgggtcccgcggcctcggg

SEQ ID NO: 8452 - DNA, 23 bp, synthetic construct
  misc_feature 1..23: note = HLA-A targeting gRNA
  source 1..23: mol_type = other DNA
tgggcgggttccgcagcctcggg

SEQ ID NO: 8453 - DNA, 23 bp, synthetic construct
  misc_feature 1..23: note = HLA-A targeting gRNA
  source 1..23: mol_type = other DNA
tgggctgggaagatggccctggg

SEQ ID NO: 8454 - DNA, 23 bp, synthetic construct
  misc_feature 1..23: note = HLA-A targeting gRNA
  source 1..23: mol_type = other DNA
tgggctggtgagtgcggggtcgg

SEQ ID NO: 8455 - DNA, 23 bp, synthetic construct
  misc_feature 1..23: note = HLA-A targeting gRNA
  source 1..23: mol_type = other DNA
tggggagctgaagtggtcggggg

SEQ ID NO: 8456 - DNA, 23 bp, synthetic construct
  misc_feature 1..23: note = HLA-A targeting gRNA
  source 1..23: mol_type = other DNA
tggggagctgaagtggtctgggg

SEQ ID NO: 8457 - DNA, 23 bp, synthetic construct
  misc_feature 1..23: note = HLA-A targeting gRNA
  source 1..23: mol_type = other DNA
tggggcagagggaaaaggcctgg

SEQ ID NO: 8458 - DNA, 23 bp, synthetic construct
  misc_feature 1..23: note = HLA-A targeting gRNA
  source 1..23: mol_type = other DNA
tggggcagaggggaaaggcctgg

SEQ ID NO: 8459 - DNA, 23 bp, synthetic construct
  misc_feature 1..23: note = HLA-A targeting gRNA
  source 1..23: mol_type = other DNA
tggggcagtggggaaaggcctgg

SEQ ID NO: 8460 - DNA, 23 bp, synthetic construct
  misc_feature 1..23: note = HLA-A targeting gRNA
  source 1..23: mol_type = other DNA
tggggcggggctcgcgggacggg

SEQ ID NO: 8461 - DNA, 23 bp, synthetic construct
  misc_feature 1..23: note = HLA-A targeting gRNA
  source 1..23: mol_type = other DNA
tggggcggggctcgggggaccgg

SEQ ID NO: 8462 - DNA, 23 bp, synthetic construct
  misc_feature 1..23: note = HLA-A targeting gRNA
  source 1..23: mol_type = other DNA
tggggcggggctcgggggacggg

SEQ ID NO: 8463 - DNA, 23 bp, synthetic construct
  misc_feature 1..23: note = HLA-A targeting gRNA
  source 1..23: mol_type = other DNA
tggggcggggtggggcagagggg

SEQ ID NO: 8464 - DNA, 23 bp, synthetic construct
  misc_feature 1..23: note = HLA-A targeting gRNA
  source 1..23: mol_type = other DNA
tggggcggggttcgggggacggg

SEQ ID NO: 8465 - DNA, 23 bp, synthetic construct
  misc_feature 1..23: note = HLA-A targeting gRNA
  source 1..23: mol_type = other DNA
tggggcttgaaacccccagtggg

SEQ ID NO: 8466 - DNA, 23 bp, synthetic construct
  misc_feature 1..23: note = HLA-A targeting gRNA
  source 1..23: mol_type = other DNA
tggggcttgaaactcccagtggg

SEQ ID NO: 8467 - DNA, 23 bp, synthetic construct
  misc_feature 1..23: note = HLA-A targeting gRNA
  source 1..23: mol_type = other DNA
tggggggggggggggcagagggg

SEQ ID NO: 8468 - DNA, 23 bp, synthetic construct
  misc_feature 1..23: note = HLA-A targeting gRNA
  source 1..23: mol_type = other DNA
tgggggtggcgggtctggggcgg

SEQ ID NO: 8469 - DNA, 23 bp, synthetic construct
  misc_feature 1..23: note = HLA-A targeting gRNA
  source 1..23: mol_type = other DNA
tgggggtgggtggggcagagggg

SEQ ID NO: 8470 - DNA, 23 bp, synthetic construct
  misc_feature 1..23: note = HLA-A targeting gRNA
  source 1..23: mol_type = other DNA
tgggggtgggtggggcagtgggg

SEQ ID NO: 8471 - DNA, 23 bp, synthetic construct
  misc_feature 1..23: note = HLA-A targeting gRNA
  source 1..23: mol_type = other DNA
tggggtaaggaggggaatggggg

SEQ ID NO: 8472 - DNA, 23 bp, synthetic construct
  misc_feature 1..23: note = HLA-A targeting gRNA
  source 1..23: mol_type = other DNA
tggggtaaggagggggatgaggg

SEQ ID NO: 8473 - DNA, 23 bp, synthetic construct
  misc_feature 1..23: note = HLA-A targeting gRNA
  source 1..23: mol_type = other DNA
tggggtctagagtgggcaggggg

SEQ ID NO: 8474 - DNA, 23 bp, synthetic construct
  misc_feature 1..23: note = HLA-A targeting gRNA
  source 1..23: mol_type = other DNA
tggggtctagagtgggcgggggg

SEQ ID NO: 8475 - DNA, 23 bp, synthetic construct
  misc_feature 1..23: note = HLA-A targeting gRNA
  source 1..23: mol_type = other DNA
tggggtggcaggtctgggggtgg

SEQ ID NO: 8476 - DNA, 23 bp, synthetic construct
  misc_feature 1..23: note = HLA-A targeting gRNA
  source 1..23: mol_type = other DNA
tggggtggcgggtctgggggggg

SEQ ID NO: 8477 - DNA, 23 bp, synthetic construct
  misc_feature 1..23: note = HLA-A targeting gRNA
  source 1..23: mol_type = other DNA
tggggtggcgggtctgggggtgg

SEQ ID NO: 8478 - DNA, 23 bp, synthetic construct
  misc_feature 1..23: note = HLA-A targeting gRNA
  source 1..23: mol_type = other DNA
tggggtggggagggggcagaggg

SEQ ID NO: 8479 - DNA, 23 bp, synthetic construct
  misc_feature 1..23: note = HLA-A targeting gRNA
  source 1..23: mol_type = other DNA
tggggtggggcagagggaaaagg

SEQ ID NO: 8480 - DNA, 23 bp, synthetic construct
  misc_feature 1..23: note = HLA-A targeting gRNA
  source 1..23: mol_type = other DNA
tgggtcacatgtgtctttggggg

SEQ ID NO: 8481 - DNA, 23 bp, synthetic construct
  misc_feature 1..23: note = HLA-A targeting gRNA
  source 1..23: mol_type = other DNA
tgggtcacgtgtgtctttgcggg

SEQ ID NO: 8482 - DNA, 23 bp, synthetic construct
  misc_feature 1..23: note = HLA-A targeting gRNA
  source 1..23: mol_type = other DNA
tgggtcacgtgtgtctttggggg

SEQ ID NO: 8483 - DNA, 23 bp, synthetic construct
  misc_feature 1..23: note = HLA-A targeting gRNA
  source 1..23: mol_type = other DNA
tgggtcagggctgaggcttgggg

SEQ ID NO: 8484 - DNA, 23 bp, synthetic construct
  misc_feature 1..23: note = HLA-A targeting gRNA
  source 1..23: mol_type = other DNA
tgggtctgcagtcatagttctgg

SEQ ID NO: 8485 - DNA, 23 bp, synthetic construct
  misc_feature 1..23: note = HLA-A targeting gRNA
  source 1..23: mol_type = other DNA
tgggtctgcagtcgtagttctgg

SEQ ID NO: 8486 - DNA, 23 bp, synthetic construct
  misc_feature 1..23: note = HLA-A targeting gRNA
  source 1..23: mol_type = other DNA
tgggtctgtagtcatacttctgg

SEQ ID NO: 8487 - DNA, 23 bp, synthetic construct
  misc_feature 1..23: note = HLA-A targeting gRNA
  source 1..23: mol_type = other DNA
tgggtgggggtggcgggtctggg

SEQ ID NO: 8488 - DNA, 23 bp, synthetic construct
  misc_feature 1..23: note = HLA-A targeting gRNA
  source 1..23: mol_type = other DNA
tgggtggggtggcaggtctgggg

SEQ ID NO: 8489 - DNA, 23 bp, synthetic construct
  misc_feature 1..23: note = HLA-A targeting gRNA
  source 1..23: mol_type = other DNA
tgggtggggtggcgggtctgggg

SEQ ID NO: 8490 - DNA, 23 bp, synthetic construct
  misc_feature 1..23: note = HLA-A targeting gRNA
  source 1..23: mol_type = other DNA
tgggttttcttgtcccactgggg

SEQ ID NO: 8491 - DNA, 23 bp, synthetic construct
  misc_feature 1..23: note = HLA-A targeting gRNA
  source 1..23: mol_type = other DNA
tgggttttgttgtcccactgggg

SEQ ID NO: 8492 - DNA, 23 bp, synthetic construct
  misc_feature 1..23: note = HLA-A targeting gRNA
  source 1..23: mol_type = other DNA
tggtcacatgggtggtcctaggg

SEQ ID NO: 8493 - DNA, 23 bp, synthetic construct
  misc_feature 1..23: note = HLA-A targeting gRNA
  source 1..23: mol_type = other DNA
tggtcaccgctaagatgtgtagg

SEQ ID NO: 8494 - DNA, 23 bp, synthetic construct
  misc_feature 1..23: note = HLA-A targeting gRNA
  source 1..23: mol_type = other DNA
tggtcaccgctatgatgtgtagg

SEQ ID NO: 8495 - DNA, 23 bp, synthetic construct
  misc_feature 1..23: note = HLA-A targeting gRNA
  source 1..23: mol_type = other DNA
tggtcatacccgcggaggagggg

SEQ ID NO: 8496 - DNA, 23 bp, synthetic construct
  misc_feature 1..23: note = HLA-A targeting gRNA
  source 1..23: mol_type = other DNA
tggtcgctactgtgatgtgtagg

SEQ ID NO: 8497 - DNA, 23 bp, synthetic construct
  misc_feature 1..23: note = HLA-A targeting gRNA
  source 1..23: mol_type = other DNA
tggtcgctgctgtgatacatagg

SEQ ID NO: 8498 - DNA, 23 bp, synthetic construct
  misc_feature 1..23: note = HLA-A targeting gRNA
  source 1..23: mol_type = other DNA
tggtcgctgctgtgatgtgtagg

SEQ ID NO: 8499 - DNA, 23 bp, synthetic construct
  misc_feature 1..23: note = HLA-A targeting gRNA
  source 1..23: mol_type = other DNA
tggtcgctgctgtggtgtgtagg

SEQ ID NO: 8500 - DNA, 23 bp, synthetic construct
  misc_feature 1..23: note = HLA-A targeting gRNA
  source 1..23: mol_type = other DNA
tggtcggggcggggcggggcggg

SEQ ID NO: 8501 - DNA, 23 bp, synthetic construct
  misc_feature 1..23: note = HLA-A targeting gRNA
  source 1..23: mol_type = other DNA
tggtctggtctccacaagctcgg

SEQ ID NO: 8502 - DNA, 23 bp, synthetic construct
  misc_feature 1..23: note = HLA-A targeting gRNA
  source 1..23: mol_type = other DNA
tggtgagtgcggggtcggcaggg

SEQ ID NO: 8503 - DNA, 23 bp, synthetic construct
  misc_feature 1..23: note = HLA-A targeting gRNA
  source 1..23: mol_type = other DNA
tggtgagtgcggggtcgggaggg

SEQ ID NO: 8504 - DNA, 23 bp, synthetic construct
  misc_feature 1..23: note = HLA-A targeting gRNA
  source 1..23: mol_type = other DNA
tggtgcttccagtaacaaggcgg

SEQ ID NO: 8505 - DNA, 23 bp, synthetic construct
  misc_feature 1..23: note = HLA-A targeting gRNA
  source 1..23: mol_type = other DNA
tggtgcttccagtaacgaggtgg

SEQ ID NO: 8506 - DNA, 23 bp, synthetic construct
  misc_feature 1..23: note = HLA-A targeting gRNA
  source 1..23: mol_type = other DNA
tggtggctgttgtgatgtgtagg

SEQ ID NO: 8507 - DNA, 23 bp, synthetic construct
  misc_feature 1..23: note = HLA-A targeting gRNA
  source 1..23: mol_type = other DNA
tggtggctgttgttatgtgtagg

SEQ ID NO: 8508 - DNA, 23 bp, synthetic construct
  misc_feature 1..23: note = HLA-A targeting gRNA
  source 1..23: mol_type = other DNA
tggtgggcacgtgcgtggagtgg

SEQ ID NO: 8509 - DNA, 23 bp, synthetic construct
  misc_feature 1..23: note = HLA-A targeting gRNA
  source 1..23: mol_type = other DNA
tggtgggggtgggagtgtgaagg

SEQ ID NO: 8510 - DNA, 23 bp, synthetic construct
  misc_feature 1..23: note = HLA-A targeting gRNA
  source 1..23: mol_type = other DNA
tggtgggggtgggagtgtggagg

SEQ ID NO: 8511 - DNA, 23 bp, synthetic construct
  misc_feature 1..23: note = HLA-A targeting gRNA
  source 1..23: mol_type = other DNA
tggtgggtcacatgtgtctttgg

SEQ ID NO: 8512 - DNA, 23 bp, synthetic construct
  misc_feature 1..23: note = HLA-A targeting gRNA
  source 1..23: mol_type = other DNA
tggtgggtcacgtgtgtctttgg

SEQ ID NO: 8513 - DNA, 23 bp, synthetic construct
  misc_feature 1..23: note = HLA-A targeting gRNA
  source 1..23: mol_type = other DNA
tggttcccaaggctgctgcaggg

SEQ ID NO: 8514 - DNA, 23 bp, synthetic construct
  misc_feature 1..23: note = HLA-A targeting gRNA
  source 1..23: mol_type = other DNA
tggttgctactgtgatgtgtagg

SEQ ID NO: 8515 - DNA, 23 bp, synthetic construct
  misc_feature 1..23: note = HLA-A targeting gRNA
  source 1..23: mol_type = other DNA
tgtagaaatacctcaaggagtgg

SEQ ID NO: 8516 - DNA, 23 bp, synthetic construct
  misc_feature 1..23: note = HLA-A targeting gRNA
  source 1..23: mol_type = other DNA
tgtagaaatacctcatgaagtgg

SEQ ID NO: 8517 - DNA, 23 bp, synthetic construct
  misc_feature 1..23: note = HLA-A targeting gRNA
  source 1..23: mol_type = other DNA
tgtagaaatacctcatggagagg

SEQ ID NO: 8518 - DNA, 23 bp, synthetic construct
  misc_feature 1..23: note = HLA-A targeting gRNA
  source 1..23: mol_type = other DNA
tgtagaaatacttcatggagtgg

SEQ ID NO: 8519 - DNA, 23 bp, synthetic construct
  misc_feature 1..23: note = HLA-A targeting gRNA
  source 1..23: mol_type = other DNA
tgtagccgcgcaggttccgcagg

SEQ ID NO: 8520 - DNA, 23 bp, synthetic construct
  misc_feature 1..23: note = HLA-A targeting gRNA
  source 1..23: mol_type = other DNA
tgtaggacagctgcctgtgtggg

SEQ ID NO: 8521 - DNA, 23 bp, synthetic construct
  misc_feature 1..23: note = HLA-A targeting gRNA
  source 1..23: mol_type = other DNA
tgtaggaggaagagctcaggtgg

SEQ ID NO: 8522 - DNA, 23 bp, synthetic construct
  misc_feature 1..23: note = HLA-A targeting gRNA
  source 1..23: mol_type = other DNA
tgtcacaaaagagtaagtgctgg

SEQ ID NO: 8523 - DNA, 23 bp, synthetic construct
  misc_feature 1..23: note = HLA-A targeting gRNA
  source 1..23: mol_type = other DNA
tgtcccggacggggctctcaggg

SEQ ID NO: 8524 - DNA, 23 bp, synthetic construct
  misc_feature 1..23: note = HLA-A targeting gRNA
  source 1..23: mol_type = other DNA
tgtcccgtccattctcaggctgg

SEQ ID NO: 8525 - DNA, 23 bp, synthetic construct
  misc_feature 1..23: note = HLA-A targeting gRNA
  source 1..23: mol_type = other DNA
tgtcctgcccattctcaggctgg

SEQ ID NO: 8526 - DNA, 23 bp, synthetic construct
  misc_feature 1..23: note = HLA-A targeting gRNA
  source 1..23: mol_type = other DNA
tgtcctgtccattctcaggatgg

SEQ ID NO: 8527 - DNA, 23 bp, synthetic construct
  misc_feature 1..23: note = HLA-A targeting gRNA
  source 1..23: mol_type = other DNA
tgtcctgtccattctcaggctgg

SEQ ID NO: 8528 - DNA, 23 bp, synthetic construct
  misc_feature 1..23: note = HLA-A targeting gRNA
  source 1..23: mol_type = other DNA
tgtcctgtccgttctcaggatgg

SEQ ID NO: 8529 - DNA, 23 bp, synthetic construct
  misc_feature 1..23: note = HLA-A targeting gRNA
  source 1..23: mol_type = other DNA
tgtcctgtgagggcactgggagg

SEQ ID NO: 8530 - DNA, 23 bp, synthetic construct
  misc_feature 1..23: note = HLA-A targeting gRNA
  source 1..23: mol_type = other DNA
tgtcctgtgaggggactgggagg

SEQ ID NO: 8531 - DNA, 23 bp, synthetic construct
  misc_feature 1..23: note = HLA-A targeting gRNA
  source 1..23: mol_type = other DNA
tgtcgaaatacctcatggagtgg

SEQ ID NO: 8532 - DNA, 23 bp, synthetic construct
  misc_feature 1..23: note = HLA-A targeting gRNA
  source 1..23: mol_type = other DNA
tgtgaagcacatgacaacgaagg

SEQ ID NO: 8533 - DNA, 23 bp, synthetic construct
  misc_feature 1..23: note = HLA-A targeting gRNA
  source 1..23: mol_type = other DNA
tgtgaagcacatgacaatgaagg

SEQ ID NO: 8534 - DNA, 23 bp, synthetic construct
  misc_feature 1..23: note = HLA-A targeting gRNA
  source 1..23: mol_type = other DNA
tgtgacacatgtgacaatgaagg

SEQ ID NO: 8535 - DNA, 23 bp, synthetic construct
  misc_feature 1..23: note = HLA-A targeting gRNA
  source 1..23: mol_type = other DNA
tgtgagacccggcctcgctctgg

SEQ ID NO: 8536 - DNA, 23 bp, synthetic construct
  misc_feature 1..23: note = HLA-A targeting gRNA
  source 1..23: mol_type = other DNA
tgtgagtccgggtgggtgactgg

SEQ ID NO: 8537 - DNA, 23 bp, synthetic construct
  misc_feature 1..23: note = HLA-A targeting gRNA
  source 1..23: mol_type = other DNA
tgtgcagcacgaggggctgcagg

SEQ ID NO: 8538 - DNA, 23 bp, synthetic construct
  misc_feature 1..23: note = HLA-A targeting gRNA
  source 1..23: mol_type = other DNA
tgtgcagcacgaggggctgccgg

SEQ ID NO: 8539 - DNA, 23 bp, synthetic construct
  misc_feature 1..23: note = HLA-A targeting gRNA
  source 1..23: mol_type = other DNA
tgtgcagcacgaggggctgctgg

SEQ ID NO: 8540 - DNA, 23 bp, synthetic construct
  misc_feature 1..23: note = HLA-A targeting gRNA
  source 1..23: mol_type = other DNA
tgtgcagcacgaggggctgtcgg

SEQ ID NO: 8541 - DNA, 23 bp, synthetic construct
  misc_feature 1..23: note = HLA-A targeting gRNA
  source 1..23: mol_type = other DNA
tgtgcccccttccccaccccagg

SEQ ID NO: 8542 - DNA, 23 bp, synthetic construct
  misc_feature 1..23: note = HLA-A targeting gRNA
  source 1..23: mol_type = other DNA
tgtgcccccttccctaccccagg

SEQ ID NO: 8543 - DNA, 23 bp, synthetic construct
  misc_feature 1..23: note = HLA-A targeting gRNA
  source 1..23: mol_type = other DNA
tgtgccgccttccccaccccagg

SEQ ID NO: 8544 - DNA, 23 bp, synthetic construct
  misc_feature 1..23: note = HLA-A targeting gRNA
  source 1..23: mol_type = other DNA
tgtggaaatacctcatggagtgg

SEQ ID NO: 8545 - DNA, 23 bp, synthetic construct
  misc_feature 1..23: note = HLA-A targeting gRNA
  source 1..23: mol_type = other DNA
tgtgggacaagaggaattatggg

SEQ ID NO: 8546 - DNA, 23 bp, synthetic construct
  misc_feature 1..23: note = HLA-A targeting gRNA
  source 1..23: mol_type = other DNA
tgtgtcccggcccggccgcgggg

SEQ ID NO: 8547 - DNA, 23 bp, synthetic construct
  misc_feature 1..23: note = HLA-A targeting gRNA
  source 1..23: mol_type = other DNA
tgtgtctttgcggggtctgatgg

SEQ ID NO: 8548 - DNA, 23 bp, synthetic construct
  misc_feature 1..23: note = HLA-A targeting gRNA
  source 1..23: mol_type = other DNA
tgtgtctttgggcgttctgacgg

SEQ ID NO: 8549 - DNA, 23 bp, synthetic construct
  misc_feature 1..23: note = HLA-A targeting gRNA
  source 1..23: mol_type = other DNA
tgtgtctttggggggtctgatgg

SEQ ID NO: 8550 - DNA, 23 bp, synthetic construct
  misc_feature 1..23: note = HLA-A targeting gRNA
  source 1..23: mol_type = other DNA
tgtgtctttgggggttctgacgg

SEQ ID NO: 8551 - DNA, 23 bp, synthetic construct
  misc_feature 1..23: note = HLA-A targeting gRNA
  source 1..23: mol_type = other DNA
tgtgtctttgggtgttctgacgg

SEQ ID NO: 8552 - DNA, 23 bp, synthetic construct
  misc_feature 1..23: note = HLA-A targeting gRNA
  source 1..23: mol_type = other DNA
tgtgtctttgggtgttctgatgg

SEQ ID NO: 8553 - DNA, 23 bp, synthetic construct
  misc_feature 1..23: note = HLA-A targeting gRNA
  source 1..23: mol_type = other DNA
tgtgtttcctgatcctgccctgg

SEQ ID NO: 8554 - DNA, 23 bp, synthetic construct
  misc_feature 1..23: note = HLA-A targeting gRNA
  source 1..23: mol_type = other DNA
tgttcagcacgaggggctgccgg

SEQ ID NO: 8555 - DNA, 23 bp, synthetic construct
  misc_feature 1..23: note = HLA-A targeting gRNA
  source 1..23: mol_type = other DNA
ttaagtctgtgtgttggtcttgg

SEQ ID NO: 8556 - DNA, 23 bp, synthetic construct
  misc_feature 1..23: note = HLA-A targeting gRNA
  source 1..23: mol_type = other DNA
ttaattgtcctagacagcagagg

SEQ ID NO: 8557 - DNA, 23 bp, synthetic construct
  misc_feature 1..23: note = HLA-A targeting gRNA
  source 1..23: mol_type = other DNA
ttaattgtcctagagagaagagg

SEQ ID NO: 8558 - DNA, 23 bp, synthetic construct
  misc_feature 1..23: note = HLA-A targeting gRNA
  source 1..23: mol_type = other DNA
ttaattgtcctagagagcagagg

SEQ ID NO: 8559 - DNA, 23 bp, synthetic construct
  misc_feature 1..23: note = HLA-A targeting gRNA
  source 1..23: mol_type = other DNA
ttaattgtctagagagaagaggg

SEQ ID NO: 8560 - DNA, 23 bp, synthetic construct
  misc_feature 1..23: note = HLA-A targeting gRNA
  source 1..23: mol_type = other DNA
ttaccccagctcagggtgagggg

SEQ ID NO: 8561 - DNA, 23 bp, synthetic construct
  misc_feature 1..23: note = HLA-A targeting gRNA
  source 1..23: mol_type = other DNA
ttactccatctcagggtgagggg

SEQ ID NO: 8562 - DNA, 23 bp, synthetic construct
  misc_feature 1..23: note = HLA-A targeting gRNA
  source 1..23: mol_type = other DNA
ttactccatctcagggtgcaggg

SEQ ID NO: 8563 - DNA, 23 bp, synthetic construct
  misc_feature 1..23: note = HLA-A targeting gRNA
  source 1..23: mol_type = other DNA
ttagaggaacctcctagtcttgg

SEQ ID NO: 8564 - DNA, 23 bp, synthetic construct
  misc_feature 1..23: note = HLA-A targeting gRNA
  source 1..23: mol_type = other DNA
ttagaggaacctcctcgtcttgg

SEQ ID NO: 8565 - DNA, 23 bp, synthetic construct
  misc_feature 1..23: note = HLA-A targeting gRNA
  source 1..23: mol_type = other DNA
ttagatcacccagcgcaagtggg

SEQ ID NO: 8566 - DNA, 23 bp, synthetic construct
  misc_feature 1..23: note = HLA-A targeting gRNA
  source 1..23: mol_type = other DNA
ttaggggaacctcctagtcttgg

SEQ ID NO: 8567 - DNA, 23 bp, synthetic construct
  misc_feature 1..23: note = HLA-A targeting gRNA
  source 1..23: mol_type = other DNA
ttatcccaggtgcctgcgtccgg

SEQ ID NO: 8568 - DNA, 23 bp, synthetic construct
  misc_feature 1..23: note = HLA-A targeting gRNA
  source 1..23: mol_type = other DNA
ttcacatccgtgtcccggcctgg

SEQ ID NO: 8569 - DNA, 23 bp, synthetic construct
  misc_feature 1..23: note = HLA-A targeting gRNA
  source 1..23: mol_type = other DNA
ttcacatccgtgtcctggcccgg

SEQ ID NO: 8570 - DNA, 23 bp, synthetic construct
  misc_feature 1..23: note = HLA-A targeting gRNA
  source 1..23: mol_type = other DNA
ttcagcccctcctcgcccccagg

SEQ ID NO: 8571 - DNA, 23 bp, synthetic construct
  misc_feature 1..23: note = HLA-A targeting gRNA
  source 1..23: mol_type = other DNA
ttcaggtagggaaggggtgaggg

SEQ ID NO: 8572 - DNA, 23 bp, synthetic construct
  misc_feature 1..23: note = HLA-A targeting gRNA
  source 1..23: mol_type = other DNA
ttcatggagtgggagcctggggg

SEQ ID NO: 8573 - DNA, 23 bp, synthetic construct
  misc_feature 1..23: note = HLA-A targeting gRNA
  source 1..23: mol_type = other DNA
ttcatggagtgggaggctggggg

SEQ ID NO: 8574 - DNA, 23 bp, synthetic construct
  misc_feature 1..23: note = HLA-A targeting gRNA
  source 1..23: mol_type = other DNA
ttccagcattcatgagtcagggg

SEQ ID NO: 8575 - DNA, 23 bp, synthetic construct
  misc_feature 1..23: note = HLA-A targeting gRNA
  source 1..23: mol_type = other DNA
ttccagcattcatgagtcggggg

SEQ ID NO: 8576 - DNA, 23 bp, synthetic construct
  misc_feature 1..23: note = HLA-A targeting gRNA
  source 1..23: mol_type = other DNA
ttccagcattcgtgagtcagggg

SEQ ID NO: 8577 - DNA, 23 bp, synthetic construct
  misc_feature 1..23: note = HLA-A targeting gRNA
  source 1..23: mol_type = other DNA
ttcccacaggtggaaaaggaggg

SEQ ID NO: 8578 - DNA, 23 bp, synthetic construct
  misc_feature 1..23: note = HLA-A targeting gRNA
  source 1..23: mol_type = other DNA
ttcccactcccattgggtattgg

SEQ ID NO: 8579 - DNA, 23 bp, synthetic construct
  misc_feature 1..23: note = HLA-A targeting gRNA
  source 1..23: mol_type = other DNA
ttcccactcccattgggtgtcgg

SEQ ID NO: 8580 - DNA, 23 bp, synthetic construct
  misc_feature 1..23: note = HLA-A targeting gRNA
  source 1..23: mol_type = other DNA
ttcccccgactcatgaatgctgg

SEQ ID NO: 8581 - DNA, 23 bp, synthetic construct
  misc_feature 1..23: note = HLA-A targeting gRNA
  source 1..23: mol_type = other DNA
ttcccctgactcacgaatgctgg

SEQ ID NO: 8582 - DNA, 23 bp, synthetic construct
  misc_feature 1..23: note = HLA-A targeting gRNA
  source 1..23: mol_type = other DNA
ttcccctgactcatgaatgctgg

SEQ ID NO: 8583 - DNA, 23 bp, synthetic construct
  misc_feature 1..23: note = HLA-A targeting gRNA
  source 1..23: mol_type = other DNA
ttcctcccagtcccctcacaggg

SEQ ID NO: 8584 - DNA, 23 bp, synthetic construct
  misc_feature 1..23: note = HLA-A targeting gRNA
  source 1..23: mol_type = other DNA
ttcctcgtgggaggccatcccgg

SEQ ID NO: 8585 - DNA, 23 bp, synthetic construct
  misc_feature 1..23: note = HLA-A targeting gRNA
  source 1..23: mol_type = other DNA
ttcctggaccgccgcggacacgg

SEQ ID NO: 8586 - DNA, 23 bp, synthetic construct
  misc_feature 1..23: note = HLA-A targeting gRNA
  source 1..23: mol_type = other DNA
ttccttttgggtccaagacgagg

SEQ ID NO: 8587 - DNA, 23 bp, synthetic construct
  misc_feature 1..23: note = HLA-A targeting gRNA
  source 1..23: mol_type = other DNA
ttccttttgggtccaagactagg

SEQ ID NO: 8588 - DNA, 23 bp, synthetic construct
  misc_feature 1..23: note = HLA-A targeting gRNA
  source 1..23: mol_type = other DNA
ttccttttggttccaagacgagg

SEQ ID NO: 8589 - DNA, 23 bp, synthetic construct
  misc_feature 1..23: note = HLA-A targeting gRNA
  source 1..23: mol_type = other DNA
ttcgaccactgcggcagctgtgg

SEQ ID NO: 8590 - DNA, 23 bp, synthetic construct
  misc_feature 1..23: note = HLA-A targeting gRNA
  source 1..23: mol_type = other DNA
ttcggtaaggagggggatgaggg

SEQ ID NO: 8591 - DNA, 23 bp, synthetic construct
  misc_feature 1..23: note = HLA-A targeting gRNA
  source 1..23: mol_type = other DNA
ttctagaagtcccaggtcccggg

SEQ ID NO: 8592 - DNA, 23 bp, synthetic construct
  misc_feature 1..23: note = HLA-A targeting gRNA
  source 1..23: mol_type = other DNA
ttctcagctgctccgccacacgg

SEQ ID NO: 8593 - DNA, 23 bp, synthetic construct
  misc_feature 1..23: note = HLA-A targeting gRNA
  source 1..23: mol_type = other DNA
ttctcagctgctccgcctcacgg

SEQ ID NO: 8594 - DNA, 23 bp, synthetic construct
  misc_feature 1..23: note = HLA-A targeting gRNA
  source 1..23: mol_type = other DNA
ttctccacccacggcgcccgcgg

SEQ ID NO: 8595 - DNA, 23 bp, synthetic construct
  misc_feature 1..23: note = HLA-A targeting gRNA
  source 1..23: mol_type = other DNA
ttctccgctgctccgcctcacgg

SEQ ID NO: 8596 - DNA, 23 bp, synthetic construct
  misc_feature 1..23: note = HLA-A targeting gRNA
  source 1..23: mol_type = other DNA
ttctcgtgggaggccatccccgg

SEQ ID NO: 8597 - DNA, 23 bp, synthetic construct
  misc_feature 1..23: note = HLA-A targeting gRNA
  source 1..23: mol_type = other DNA
ttctcgttggaggccatccccgg

SEQ ID NO: 8598 - DNA, 23 bp, synthetic construct
  misc_feature 1..23: note = HLA-A targeting gRNA
  source 1..23: mol_type = other DNA
ttctggagggtgtgagaccctgg

SEQ ID NO: 8599 - DNA, 23 bp, synthetic construct
  misc_feature 1..23: note = HLA-A targeting gRNA
  source 1..23: mol_type = other DNA
ttctgggagctgaagtggtcggg

SEQ ID NO: 8600 - DNA, 23 bp, synthetic construct
  misc_feature 1..23: note = HLA-A targeting gRNA
  source 1..23: mol_type = other DNA
ttctggggagctgaagtggtcgg

SEQ ID NO: 8601 - DNA, 23 bp, synthetic construct
  misc_feature 1..23: note = HLA-A targeting gRNA
  source 1..23: mol_type = other DNA
ttctggtagggaaggggtgaggg

SEQ ID NO: 8602 - DNA, 23 bp, synthetic construct
  misc_feature 1..23: note = HLA-A targeting gRNA
  source 1..23: mol_type = other DNA
ttcttctcccaacctatgtcggg

SEQ ID NO: 8603 - DNA, 23 bp, synthetic construct
  misc_feature 1..23: note = HLA-A targeting gRNA
  source 1..23: mol_type = other DNA
ttcttctcccaacctgcgacggg

SEQ ID NO: 8604 - DNA, 23 bp, synthetic construct
  misc_feature 1..23: note = HLA-A targeting gRNA
  source 1..23: mol_type = other DNA
ttcttctcccaacctgcgtcggg

SEQ ID NO: 8605 - DNA, 23 bp, synthetic construct
  misc_feature 1..23: note = HLA-A targeting gRNA
  source 1..23: mol_type = other DNA
ttcttctcccaacctgtgtcggg

SEQ ID NO: 8606 - DNA, 23 bp, synthetic construct
  misc_feature 1..23: note = HLA-A targeting gRNA
  source 1..23: mol_type = other DNA
ttcttctcccaacttgtgtcggg

SEQ ID NO: 8607 - DNA, 23 bp, synthetic construct
  misc_feature 1..23: note = HLA-A targeting gRNA
  source 1..23: mol_type = other DNA
ttcttcttccaacctgcgtcggg

SEQ ID NO: 8608 - DNA, 23 bp, synthetic construct
  misc_feature 1..23: note = HLA-A targeting gRNA
  source 1..23: mol_type = other DNA
ttcttggggtctagagtgggcgg

SEQ ID NO: 8609 - DNA, 23 bp, synthetic construct
  misc_feature 1..23: note = HLA-A targeting gRNA
  source 1..23: mol_type = other DNA
ttcttggggtctagagtgggtgg

SEQ ID NO: 8610 - DNA, 23 bp, synthetic construct
  misc_feature 1..23: note = HLA-A targeting gRNA
  source 1..23: mol_type = other DNA
ttctttttgggtccaagactagg

SEQ ID NO: 8611 - DNA, 23 bp, synthetic construct
  misc_feature 1..23: note = HLA-A targeting gRNA
  source 1..23: mol_type = other DNA
ttgaaaaggtgagattcttgggg

SEQ ID NO: 8612 - DNA, 23 bp, synthetic construct
  misc_feature 1..23: note = HLA-A targeting gRNA
  source 1..23: mol_type = other DNA
ttgacccctgcagcagccttggg

SEQ ID NO: 8613 - DNA, 23 bp, synthetic construct
  misc_feature 1..23: note = HLA-A targeting gRNA
  source 1..23: mol_type = other DNA
ttgagtccgggtgggtgcgtggg

SEQ ID NO: 8614 - DNA, 23 bp, synthetic construct
  misc_feature 1..23: note = HLA-A targeting gRNA
  source 1..23: mol_type = other DNA
ttgcgtgtaagtgatggcggcgg

SEQ ID NO: 8615 - DNA, 23 bp, synthetic construct
  misc_feature 1..23: note = HLA-A targeting gRNA
  source 1..23: mol_type = other DNA
ttgctactgtgatgtgtaggagg

SEQ ID NO: 8616 - DNA, 23 bp, synthetic construct
  misc_feature 1..23: note = HLA-A targeting gRNA
  source 1..23: mol_type = other DNA
ttgctctatccacggcgcccggg

SEQ ID NO: 8617 - DNA, 23 bp, synthetic construct
  misc_feature 1..23: note = HLA-A targeting gRNA
  source 1..23: mol_type = other DNA
ttgctctatccatggcgcccggg

SEQ ID NO: 8618 - DNA, 23 bp, synthetic construct
  misc_feature 1..23: note = HLA-A targeting gRNA
  source 1..23: mol_type = other DNA
ttgcttcccacaggtggaaaagg

SEQ ID NO: 8619 - DNA, 23 bp, synthetic construct
  misc_feature 1..23: note = HLA-A targeting gRNA
  source 1..23: mol_type = other DNA
ttggaaagttctagtctctgagg

SEQ ID NO: 8620 - DNA, 23 bp, synthetic construct
  misc_feature 1..23: note = HLA-A targeting gRNA
  source 1..23: mol_type = other DNA
ttgggagaagtgaaactcagggg

SEQ ID NO: 8621 - DNA, 23 bp, synthetic construct
  misc_feature 1..23: note = HLA-A targeting gRNA
  source 1..23: mol_type = other DNA
ttgggagggaaacggcctctggg

SEQ ID NO: 8622 - DNA, 23 bp, synthetic construct
  misc_feature 1..23: note = HLA-A targeting gRNA
  source 1..23: mol_type = other DNA
ttggggtctagagtgggcagggg

SEQ ID NO: 8623 - DNA, 23 bp, synthetic construct
  misc_feature 1..23: note = HLA-A targeting gRNA
  source 1..23: mol_type = other DNA
ttggggtctagagtgggcggggg

SEQ ID NO: 8624 - DNA, 23 bp, synthetic construct
  misc_feature 1..23: note = HLA-A targeting gRNA
  source 1..23: mol_type = other DNA
ttggggtctagagtgggtggggg

SEQ ID NO: 8625 - DNA, 23 bp, synthetic construct
  misc_feature 1..23: note = HLA-A targeting gRNA
  source 1..23: mol_type = other DNA
ttggtcggggcggggcggggcgg

SEQ ID NO: 8626 - DNA, 23 bp, synthetic construct
  misc_feature 1..23: note = HLA-A targeting gRNA
  source 1..23: mol_type = other DNA
ttggtcttgaagatctgttccgg

SEQ ID NO: 8627 - DNA, 23 bp, synthetic construct
  misc_feature 1..23: note = HLA-A targeting gRNA
  source 1..23: mol_type = other DNA
ttgtgtcgggtccttcttccagg

SEQ ID NO: 8628 - DNA, 23 bp, synthetic construct
  misc_feature 1..23: note = HLA-A targeting gRNA
  source 1..23: mol_type = other DNA
ttgtgtcgggtccttcttccggg

SEQ ID NO: 8629 - DNA, 23 bp, synthetic construct
  misc_feature 1..23: note = HLA-A targeting gRNA
  source 1..23: mol_type = other DNA
tttcagcattcatgagtcagggg

SEQ ID NO: 8630 - DNA, 23 bp, synthetic construct
  misc_feature 1..23: note = HLA-A targeting gRNA
  source 1..23: mol_type = other DNA
tttcctcccctcctcgtggaagg

SEQ ID NO: 8631 - DNA, 23 bp, synthetic construct
  misc_feature 1..23: note = HLA-A targeting gRNA
  source 1..23: mol_type = other DNA
tttcctcccctcctcgtgggagg

SEQ ID NO: 8632 - DNA, 23 bp, synthetic construct
  misc_feature 1..23: note = HLA-A targeting gRNA
  source 1..23: mol_type = other DNA
tttcctcccttcctcgtgggagg

SEQ ID NO: 8633 - DNA, 23 bp, synthetic construct
  misc_feature 1..23: note = HLA-A targeting gRNA
  source 1..23: mol_type = other DNA
tttcctcctcttctcgtgggagg

SEQ ID NO: 8634 - DNA, 23 bp, synthetic construct
  misc_feature 1..23: note = HLA-A targeting gRNA
  source 1..23: mol_type = other DNA
tttcctcttcttctcgtgggagg

SEQ ID NO: 8635 - DNA, 23 bp, synthetic construct
  misc_feature 1..23: note = HLA-A targeting gRNA
  source 1..23: mol_type = other DNA
tttcctcttcttctcgttggagg

SEQ ID NO: 8636 - DNA, 23 bp, synthetic construct
  misc_feature 1..23: note = HLA-A targeting gRNA
  source 1..23: mol_type = other DNA
tttcttcccacaggtggaaaagg

SEQ ID NO: 8637 - DNA, 23 bp, synthetic construct
  misc_feature 1..23: note = HLA-A targeting gRNA
  source 1..23: mol_type = other DNA
tttgaccactgcagcagctgtgg

SEQ ID NO: 8638 - DNA, 23 bp, synthetic construct
  misc_feature 1..23: note = HLA-A targeting gRNA
  source 1..23: mol_type = other DNA
tttgaccactgcggcagctgtgg

SEQ ID NO: 8639 - DNA, 23 bp, synthetic construct
  misc_feature 1..23: note = HLA-A targeting gRNA
  source 1..23: mol_type = other DNA
tttgaccacttcgaccactgcgg

SEQ ID NO: 8640 - DNA, 23 bp, synthetic construct
  misc_feature 1..23: note = HLA-A targeting gRNA
  source 1..23: mol_type = other DNA
tttgaccactttgaccactgcgg

SEQ ID NO: 8641 - DNA, 23 bp, synthetic construct
  misc_feature 1..23: note = HLA-A targeting gRNA
  source 1..23: mol_type = other DNA
tttgacccctgcagcagccttgg

SEQ ID NO: 8642 - DNA, 23 bp, synthetic construct
  misc_feature 1..23: note = HLA-A targeting gRNA
  source 1..23: mol_type = other DNA
tttgagtccgggtgggtgcgtgg

SEQ ID NO: 8643 - DNA, 23 bp, synthetic construct
  misc_feature 1..23: note = HLA-A targeting gRNA
  source 1..23: mol_type = other DNA
tttgcagaaagagatgccagagg

SEQ ID NO: 8644 - DNA, 23 bp, synthetic construct
  misc_feature 1..23: note = HLA-A targeting gRNA
  source 1..23: mol_type = other DNA
tttgtagaaagagatgccagagg

SEQ ID NO: 8645 - DNA, 23 bp, synthetic construct
  misc_feature 1..23: note = HLA-A targeting gRNA
  source 1..23: mol_type = other DNA
tttgtgacttcaagagcctctgg

SEQ ID NO: 8646 - DNA, 23 bp, synthetic construct
  misc_feature 1..23: note = HLA-A targeting gRNA
  source 1..23: mol_type = other DNA
tttgtgacttcaagggcctctgg

SEQ ID NO: 8647 - DNA, 23 bp, synthetic construct
  misc_feature 1..23: note = HLA-A targeting gRNA
  source 1..23: mol_type = other DNA
ttttcccgagtttcctctgaggg

SEQ ID NO: 8648 - DNA, 23 bp, synthetic construct
  misc_feature 1..23: note = HLA-A targeting gRNA
  source 1..23: mol_type = other DNA
ttttcctgagtttcctctgaggg

SEQ ID NO: 8649 - DNA, 23 bp, synthetic construct
  misc_feature 1..23: note = HLA-A targeting gRNA
  source 1..23: mol_type = other DNA
ttttcctgagtttcttctgaggg

SEQ ID NO: 8650 - DNA, 23 bp, synthetic construct
  misc_feature 1..23: note = HLA-A targeting gRNA
  source 1..23: mol_type = other DNA
tttttgggtccaagactaggagg

SEQ ID NO: 8651 - DNA, 20 bp, synthetic construct
  misc_feature 1..20: note = HLA-A targeting gRNA
  source 1..20: mol_type = other DNA
tggacgacacgcagttcgtg

SEQ ID NO: 8652 - DNA, 20 bp, synthetic construct
  misc_feature 1..20: note = HLA-A targeting gRNA
  source 1..20: mol_type = other DNA
cagatacctggagaacggga

SEQ ID NO: 8653 - DNA, 20 bp, synthetic construct
  misc_feature 1..20: note = HLA-A targeting gRNA
  source 1..20: mol_type = other DNA
tcccgttctccaggtatctg

SEQ ID NO: 8654 - DNA, 20 bp, synthetic construct
  misc_feature 1..20: note = HLA-A targeting gRNA
  source 1..20: mol_type = other DNA
ccgccgcggtccaagagcgc

SEQ ID NO: 8655 - DNA, 20 bp, synthetic construct
  misc_feature 1..20: note = HLA-A targeting gRNA
  source 1..20: mol_type = other DNA
cctgcgctcttggaccgcgg

SEQ ID NO: 8656 - DNA, 21 bp, synthetic construct
  misc_feature 1..21: note = HLA-A targeting gRNA
  source 1..21: mol_type = other DNA
ggacctgcgctcttggaccgc

SEQ ID NO: 8657 - DNA, 20 bp, synthetic construct
  misc_feature 1..20: note = B2M CDS targeting gRNA
  source 1..20: mol_type = other DNA
cgcgagcacagctaaggcca

SEQ ID NO: 8658 - DNA, 20 bp, synthetic construct
  misc_feature 1..20: note = B2M CDS targeting gRNA
  source 1..20: mol_type = other DNA
gagtagcgcgagcacagcta

SEQ ID NO: 8659 - DNA, 20 bp, synthetic construct
  misc_feature 1..20: note = B2M CDS targeting gRNA
  source 1..20: mol_type = other DNA
agggtaggagagactcacgc

SEQ ID NO: 8660 - DNA, 20 bp, synthetic construct
  misc_feature 1..20: note = B2M CDS targeting gRNA
  source 1..20: mol_type = other DNA
ctgaatctttggagtacctg

SEQ ID NO: 8661 - DNA, 20 bp, synthetic construct
  misc_feature 1..20: note = B2M CDS targeting gRNA
  source 1..20: mol_type = other DNA
tcacgtcatccagcagagaa

SEQ ID NO: 8662 - DNA, 20 bp, synthetic construct
  misc_feature 1..20: note = B2M CDS targeting gRNA
  source 1..20: mol_type = other DNA
tcctgaattgctatgtgtct

SEQ ID NO: 8663 - DNA, 20 bp, synthetic construct
  misc_feature 1..20: note = B2M CDS targeting gRNA
  source 1..20: mol_type = other DNA
aagtcaacttcaatgtcgga

SEQ ID NO: 8664 - DNA, 20 bp, synthetic construct
  misc_feature 1..20: note = B2M CDS targeting gRNA
  source 1..20: mol_type = other DNA
gtcttttcccgatattcctc

SEQ ID NO: 8665 - DNA, 20 bp, synthetic construct
  misc_feature 1..20: note = B2M CDS targeting gRNA
  source 1..20: mol_type = other DNA
tggagtacctgaggaatatc

SEQ ID NO: 8666 - DNA, 20 bp, synthetic construct
  misc_feature 1..20: note = B2M CDS targeting gRNA
  source 1..20: mol_type = other DNA
cagcccaagatagttaagtg

SEQ ID NO: 8667 - DNA, 20 bp, synthetic construct
  misc_feature 1..20: note = B2M CDS targeting gRNA
  source 1..20: mol_type = other DNA
acaaagtcacatggttcaca

SEQ ID NO: 8668 - DNA, 20 bp, synthetic construct
  misc_feature 1..20: note = B2M CDS targeting gRNA
  source 1..20: mol_type = other DNA
actctctctttctggcctgg

SEQ ID NO: 8669 - DNA, 20 bp, synthetic construct
  misc_feature 1..20: note = B2M CDS targeting gRNA
  source 1..20: mol_type = other DNA
tgggctgtgacaaagtcaca

SEQ ID NO: 8670 - DNA, 20 bp, synthetic construct
  misc_feature 1..20: note = B2M CDS targeting gRNA
  source 1..20: mol_type = other DNA
ggccgagatgtctcgctccg

SEQ ID NO: 8671 - DNA, 20 bp, synthetic construct
  misc_feature 1..20: note = B2M CDS targeting gRNA
  source 1..20: mol_type = other DNA
cagtaagtcaacttcaatgt

SEQ ID NO: 8672 - DNA, 20 bp, synthetic construct
  misc_feature 1..20: note = B2M CDS targeting gRNA
  source 1..20: mol_type = other DNA
actcacgctggatagcctcc

SEQ ID NO: 8673 - DNA, 20 bp, synthetic construct
  misc_feature 1..20: note = B2M CDS targeting gRNA
  source 1..20: mol_type = other DNA
catactcatctttttcagtg

SEQ ID NO: 8674 - DNA, 20 bp, synthetic construct
  misc_feature 1..20: note = B2M CDS targeting gRNA
  source 1..20: mol_type = other DNA
cacagcccaagatagttaag

SEQ ID NO: 8675 - DNA, 20 bp, synthetic construct
  misc_feature 1..20: note = B2M CDS targeting gRNA
  source 1..20: mol_type = other DNA
ttcagacttgtctttcagca

SEQ ID NO: 8676 - DNA, 20 bp, synthetic construct
  misc_feature 1..20: note = B2M CDS targeting gRNA
  source 1..20: mol_type = other DNA
agtcacatggttcacacggc

SEQ ID NO: 8677 - DNA, 20 bp, synthetic construct
  misc_feature 1..20: note = B2M CDS targeting gRNA
  source 1..20: mol_type = other DNA
atactcatctttttcagtgg

SEQ ID NO: 8678 - DNA, 20 bp, synthetic construct
  misc_feature 1..20: note = B2M CDS targeting gRNA
  source 1..20: mol_type = other DNA
ggcatactcatctttttcag

SEQ ID NO: 8679 - DNA, 20 bp, synthetic construct
  misc_feature 1..20: note = B2M CDS targeting gRNA
  source 1..20: mol_type = other DNA
acagcccaagatagttaagt

SEQ ID NO: 8680 - DNA, 20 bp, synthetic construct
  misc_feature 1..20: note = B2M CDS targeting gRNA
  source 1..20: mol_type = other DNA
gctactctctctttctggcc

SEQ ID NO: 8681 - DNA, 20 bp, synthetic construct
  misc_feature 1..20: note = B2M CDS targeting gRNA
  source 1..20: mol_type = other DNA
tggagagagaattgaaaaag

SEQ ID NO: 8682 - DNA, 20 bp, synthetic construct
  misc_feature 1..20: note = B2M CDS targeting gRNA
  source 1..20: mol_type = other DNA
acttgtctttcagcaaggac

SEQ ID NO: 8683 - DNA, 20 bp, synthetic construct
  misc_feature 1..20: note = B2M CDS targeting gRNA
  source 1..20: mol_type = other DNA
gaagttgacttactgaagaa

SEQ ID NO: 8684 - DNA, 20 bp, synthetic construct
  misc_feature 1..20: note = B2M CDS targeting gRNA
  source 1..20: mol_type = other DNA
ggccacggagcgagacatct

SEQ ID NO: 8685 - DNA, 20 bp, synthetic construct
  misc_feature 1..20: note = B2M CDS targeting gRNA
  source 1..20: mol_type = other DNA
gcatactcatctttttcagt

SEQ ID NO: 8686 - DNA, 20 bp, synthetic construct
  misc_feature 1..20: note = B2M CDS targeting gRNA
  source 1..20: mol_type = other DNA
cgtgagtaaacctgaatctt

SEQ ID NO: 8687 - DNA, 20 bp, synthetic construct
  misc_feature 1..20: note = B2M CDS targeting gRNA
  source 1..20: mol_type = other DNA
ttaccccacttaactatctt

SEQ ID NO: 8688 - DNA, 20 bp, synthetic construct
  misc_feature 1..20: note = B2M CDS targeting gRNA
  source 1..20: mol_type = other DNA
ttggagtacctgaggaatat

SEQ ID NO: 8689 - DNA, 20 bp, synthetic construct
  misc_feature 1..20: note = B2M CDS targeting gRNA
  source 1..20: mol_type = other DNA
acccagacacatagcaattc

SEQ ID NO: 8690 - DNA, 20 bp, synthetic construct
  misc_feature 1..20: note = B2M CDS targeting gRNA
  source 1..20: mol_type = other DNA
tttgactttccattctctgc

SEQ ID NO: 8691 - DNA, 20 bp, synthetic construct
  misc_feature 1..20: note = B2M CDS targeting gRNA
  source 1..20: mol_type = other DNA
ttcctgaattgctatgtgtc

SEQ ID NO: 8692 - DNA, 20 bp, synthetic construct
  misc_feature 1..20: note = B2M CDS targeting gRNA
  source 1..20: mol_type = other DNA
ctcaggtactccaaagattc

SEQ ID NO: 8693 - DNA, 20 bp, synthetic construct
  misc_feature 1..20: note = B2M CDS targeting gRNA
  source 1..20: mol_type = other DNA
cttaccccacttaactatct

SEQ ID NO: 8694 - DNA, 20 bp, synthetic construct
  misc_feature 1..20: note = B2M CDS targeting gRNA
  source 1..20: mol_type = other DNA
ctcgcgctactctctctttc

SEQ ID NO: 8695 - DNA, 20 bp, synthetic construct
  misc_feature 1..20: note = B2M CDS targeting gRNA
  source 1..20: mol_type = other DNA
tcgatctatgaaaaagacag

SEQ ID NO: 8696 - DNA, 20 bp, synthetic construct
  misc_feature 1..20: note = B2M CDS targeting gRNA
  source 1..20: mol_type = other DNA
gagacatgtaagcagcatca

SEQ ID NO: 8697 - DNA, 20 bp, synthetic construct
  misc_feature 1..20: note = B2M CDS targeting gRNA
  source 1..20: mol_type = other DNA
acatgtaagcagcatcatgg

SEQ ID NO: 8698 - DNA, 20 bp, synthetic construct
  misc_feature 1..20: note = B2M promoter targeting gRNA
  source 1..20: mol_type = other DNA
gaagtcctagaatgagcgcc

SEQ ID NO: 8699 - DNA, 20 bp, synthetic construct
  misc_feature 1..20: note = B2M promoter targeting gRNA
  source 1..20: mol_type = other DNA
gagcgcccggtgtcccaagc

SEQ ID NO: 8700 - DNA, 20 bp, synthetic construct
  misc_feature 1..20: note = B2M promoter targeting gRNA
  source 1..20: mol_type = other DNA
agcgcccggtgtcccaagct

SEQ ID NO: 8701 - DNA, 20 bp, synthetic construct
  misc_feature 1..20: note = B2M promoter targeting gRNA
  source 1..20: mol_type = other DNA
gcgcccggtgtcccaagctg

SEQ ID NO: 8702 - DNA, 20 bp, synthetic construct
  misc_feature 1..20: note = B2M promoter targeting gRNA
  source 1..20: mol_type = other DNA
ctggggcgcgcaccccagat

SEQ ID NO: 8703 - DNA, 20 bp, synthetic construct
  misc_feature 1..20: note = B2M promoter targeting gRNA
  source 1..20: mol_type = other DNA
gggcgcgcaccccagatcgg

SEQ ID NO: 8704 - DNA, 20 bp, synthetic construct
  misc_feature 1..20: note = B2M promoter targeting gRNA
  source 1..20: mol_type = other DNA
ggcgcgcaccccagatcgga

SEQ ID NO: 8705 - DNA, 20 bp, synthetic construct
  misc_feature 1..20: note = B2M promoter targeting gRNA
  source 1..20: mol_type = other DNA
catcacgagactctaagaaa

SEQ ID NO: 8706 - DNA, 20 bp, synthetic construct
  misc_feature 1..20: note = B2M promoter targeting gRNA
  source 1..20: mol_type = other DNA
taagaaaaggaaactgaaaa

SEQ ID NO: 8707 - DNA, 20 bp, synthetic construct
  misc_feature 1..20: note = B2M promoter targeting gRNA
  source 1..20: mol_type = other DNA
aagaaaaggaaactgaaaac

SEQ ID NO: 8708 - DNA, 20 bp, synthetic construct
  misc_feature 1..20: note = B2M promoter targeting gRNA
  source 1..20: mol_type = other DNA
gaaagtccctctctctaacc

SEQ ID NO: 8709 - DNA, 20 bp, synthetic construct
  misc_feature 1..20: note = B2M promoter targeting gRNA
  source 1..20: mol_type = other DNA
ctaacctggcactgcgtcgc

SEQ ID NO: 8710 - DNA, 20 bp, synthetic construct
  misc_feature 1..20: note = B2M promoter targeting gRNA
  source 1..20: mol_type = other DNA
ctggcactgcgtcgctggct

SEQ ID NO: 8711 - DNA, 20 bp, synthetic construct
  misc_feature 1..20: note = B2M promoter targeting gRNA
  source 1..20: mol_type = other DNA
tgcgtcgctggcttggagac

SEQ ID NO: 8712 - DNA, 20 bp, synthetic construct
  misc_feature 1..20: note = B2M promoter targeting gRNA
  source 1..20: mol_type = other DNA
gctggcttggagacaggtga

SEQ ID NO: 8713 - DNA, 20 bp, synthetic construct
  misc_feature 1..20: note = B2M promoter targeting gRNA
  source 1..20: mol_type = other DNA
gagacaggtgacggtccctg

SEQ ID NO: 8714 - DNA, 20 bp, synthetic construct
  misc_feature 1..20: note = B2M promoter targeting gRNA
  source 1..20: mol_type = other DNA
agacaggtgacggtccctgc

SEQ ID NO: 8715 - DNA, 20 bp, synthetic construct
  misc_feature 1..20: note = B2M promoter targeting gRNA
  source 1..20: mol_type = other DNA
cctgcgggccttgtcctgat

SEQ ID NO: 8716 - DNA, 20 bp, synthetic construct
  misc_feature 1..20: note = B2M promoter targeting gRNA
  source 1..20: mol_type = other DNA
cgggccttgtcctgattggc

SEQ ID NO: 8717 - DNA, 20 bp, synthetic construct
  misc_feature 1..20: note = B2M promoter targeting gRNA
  source 1..20: mol_type = other DNA
gggccttgtcctgattggct

SEQ ID NO: 8718 - DNA, 20 bp, synthetic construct
  misc_feature 1..20: note = B2M promoter targeting gRNA
  source 1..20: mol_type = other DNA
gggcacgcgtttaatataag

SEQ ID NO: 8719 - DNA, 20 bp, synthetic construct
  misc_feature 1..20: note = B2M promoter targeting gRNA
  source 1..20: mol_type = other DNA
cacgcgtttaatataagtgg

SEQ ID NO: 8720 - DNA, 20 bp, synthetic construct
  misc_feature 1..20: note = B2M promoter targeting gRNA
  source 1..20: mol_type = other DNA
tataagtggaggcgtcgcgc

SEQ ID NO: 8721 - DNA, 20 bp, synthetic construct
  misc_feature 1..20: note = B2M promoter targeting gRNA
  source 1..20: mol_type = other DNA
aagtggaggcgtcgcgctgg

SEQ ID NO: 8722 - DNA, 20 bp, synthetic construct
  misc_feature 1..20: note = B2M promoter targeting gRNA
  source 1..20: mol_type = other DNA
agtggaggcgtcgcgctggc

SEQ ID NO: 8723 - DNA, 20 bp, synthetic construct
  misc_feature 1..20: note = B2M promoter targeting gRNA
  source 1..20: mol_type = other DNA
ttcctgaagctgacagcatt

SEQ ID NO: 8724 - DNA, 20 bp, synthetic construct
  misc_feature 1..20: note = B2M promoter targeting gRNA
  source 1..20: mol_type = other DNA
tcctgaagctgacagcattc

SEQ ID NO: 8725 - DNA, 20 bp, synthetic construct
  misc_feature 1..20: note = B2M promoter targeting gRNA
  source 1..20: mol_type = other DNA
gcccgaatgctgtcagcttc

SEQ ID NO: 8726 - DNA, 20 bp, synthetic construct
  misc_feature 1..20: note = B2M promoter targeting gRNA
  source 1..20: mol_type = other DNA
aaacgcgtgcccagccaatc

SEQ ID NO: 8727 - DNA, 20 bp, synthetic construct
  misc_feature 1..20: note = B2M promoter targeting gRNA
  source 1..20: mol_type = other DNA
gtgcccagccaatcaggaca

SEQ ID NO: 8728 - DNA, 20 bp, synthetic construct
  misc_feature 1..20: note = B2M promoter targeting gRNA
  source 1..20: mol_type = other DNA
ccaatcaggacaaggcccgc

SEQ ID NO: 8729 - DNA, 20 bp, synthetic construct
  misc_feature 1..20: note = B2M promoter targeting gRNA
  source 1..20: mol_type = other DNA
caatcaggacaaggcccgca

SEQ ID NO: 8730 - DNA, 20 bp, synthetic construct
  misc_feature 1..20: note = B2M promoter targeting gRNA
  source 1..20: mol_type = other DNA
caagccagcgacgcagtgcc

SEQ ID NO: 8731 - DNA, 20 bp, synthetic construct
  misc_feature 1..20: note = B2M promoter targeting gRNA
  source 1..20: mol_type = other DNA
cgcagtgccaggttagagag

SEQ ID NO: 8732 - DNA, 20 bp, synthetic construct
  misc_feature 1..20: note = B2M promoter targeting gRNA
  source 1..20: mol_type = other DNA
gcagtgccaggttagagaga

SEQ ID NO: 8733 - DNA, 20 bp, synthetic construct
  misc_feature 1..20: note = B2M promoter targeting gRNA
  source 1..20: mol_type = other DNA
gagtctcgtgatgtttaaga

SEQ ID NO: 8734 - DNA, 20 bp, synthetic construct
  misc_feature 1..20: note = B2M promoter targeting gRNA
  source 1..20: mol_type = other DNA
taagaaggcatgcactagac

SEQ ID NO: 8735 - DNA, 20 bp, synthetic construct
  misc_feature 1..20: note = B2M promoter targeting gRNA
  source 1..20: mol_type = other DNA
aagaaggcatgcactagact

SEQ ID NO: 8736 - DNA, 20 bp, synthetic construct
  misc_feature 1..20: note = B2M promoter targeting gRNA
  source 1..20: mol_type = other DNA
tgagtttgctgtctgtacat

SEQ ID NO: 8737 - DNA, 20 bp, synthetic construct
  misc_feature 1..20: note = B2M promoter targeting gRNA
  source 1..20: mol_type = other DNA
tacatcggcgccctccgatc

SEQ ID NO: 8738 - DNA, 20 bp, synthetic construct
  misc_feature 1..20: note = B2M promoter targeting gRNA
  source 1..20: mol_type = other DNA
acatcggcgccctccgatct

SEQ ID NO: 8739 - DNA, 20 bp, synthetic construct
  misc_feature 1..20: note = B2M promoter targeting gRNA
  source 1..20: mol_type = other DNA
catcggcgccctccgatctg

SEQ ID NO: 8740 - DNA, 20 bp, synthetic construct
  misc_feature 1..20: note = B2M promoter targeting gRNA
  source 1..20: mol_type = other DNA
ctggggtgcgcgccccagct

SEQ ID NO: 8741 - DNA, 20 bp, synthetic construct
  misc_feature 1..20: note = B2M promoter targeting gRNA
  source 1..20: mol_type = other DNA
tggggtgcgcgccccagctt

SEQ ID NO: 8742 - DNA, 20 bp, synthetic construct
  misc_feature 1..20: note = B2M promoter targeting gRNA
  source 1..20: mol_type = other DNA
cgcgccccagcttgggacac

SEQ ID NO: 8743 - DNA, 20 bp, synthetic construct
  misc_feature 1..20: note = B2M promoter targeting gRNA
  source 1..20: mol_type = other DNA
gcgccccagcttgggacacc

SEQ ID NO: 8744 - DNA, 20 bp, synthetic construct
  misc_feature 1..20: note = B2M promoter targeting gRNA
  source 1..20: mol_type = other DNA
caagtcacttagcatctctg

SEQ ID NO: 8745 - DNA, 20 bp, synthetic construct
  misc_feature 1..20: note = B2M promoter targeting gRNA
  source 1..20: mol_type = other DNA
acagaagttctccttctgct

SEQ ID NO: 8746 - DNA, 20 bp, synthetic construct
  misc_feature 1..20: note = B2M promoter targeting gRNA
  source 1..20: mol_type = other DNA
attcaaagatcttaatcttc

SEQ ID NO: 8747 - DNA, 20 bp, synthetic construct
  misc_feature 1..20: note = B2M promoter targeting gRNA
  source 1..20: mol_type = other DNA
ttcaaagatcttaatcttct

SEQ ID NO: 8748 - DNA, 20 bp, synthetic construct
  misc_feature 1..20: note = B2M promoter targeting gRNA
  source 1..20: mol_type = other DNA
ttttctcgaatgaaaaatgc

SEQ ID NO: 8749 - DNA, 20 bp, synthetic construct
  misc_feature 1..20: note = B2M promoter targeting gRNA
  source 1..20: mol_type = other DNA
tgcaggtccgagcagttaac

SEQ ID NO: 8750 - DNA, 20 bp, synthetic construct
  misc_feature 1..20: note = B2M promoter targeting gRNA
  source 1..20: mol_type = other DNA
ggtccgagcagttaactggc

SEQ ID NO: 8751 - DNA, 20 bp, synthetic construct
  misc_feature 1..20: note = B2M promoter targeting gRNA
  source 1..20: mol_type = other DNA
gtccgagcagttaactggct

SEQ ID NO: 8752 - DNA, 20 bp, synthetic construct
  misc_feature 1..20: note = B2M promoter targeting gRNA
  source 1..20: mol_type = other DNA
tccgagcagttaactggctg

SEQ ID NO: 8753 - DNA, 20 bp, synthetic construct
  misc_feature 1..20: note = B2M promoter targeting gRNA
  source 1..20: mol_type = other DNA
agcaagtcacttagcatctc

SEQ ID NO: 8754 - DNA, 20 bp, synthetic construct
  misc_feature 1..20: note = B2M promoter targeting gRNA
  source 1..20: mol_type = other DNA
gcaagtcacttagcatctct

SEQ ID NO: 8755 - DNA, 20 bp, synthetic construct
  misc_feature 1..20: note = B2M promoter targeting gRNA
  source 1..20: mol_type = other DNA
tggggccagtctgcaaagcg

SEQ ID NO: 8756 - DNA, 20 bp, synthetic construct
  misc_feature 1..20: note = B2M promoter targeting gRNA
  source 1..20: mol_type = other DNA
ggggccagtctgcaaagcga

SEQ ID NO: 8757 - DNA, 20 bp, synthetic construct
  misc_feature 1..20: note = B2M promoter targeting gRNA
  source 1..20: mol_type = other DNA
gggccagtctgcaaagcgag

SEQ ID NO: 8758 - DNA, 20 bp, synthetic construct
  misc_feature 1..20: note = B2M promoter targeting gRNA
  source 1..20: mol_type = other DNA
ggccagtctgcaaagcgagg

SEQ ID NO: 8759 - DNA, 20 bp, synthetic construct
  misc_feature 1..20: note = B2M promoter targeting gRNA
  source 1..20: mol_type = other DNA
ggacaccgggcgctcattct

SEQ ID NO: 8760 - DNA, 20 bp, synthetic construct
  misc_feature 1..20: note = B2M promoter targeting gRNA
  source 1..20: mol_type = other DNA
ggcgctcattctaggacttc

SEQ ID NO: 8761 - DNA, 20 bp, synthetic construct
  misc_feature 1..20: note = B2M promoter targeting gRNA
  source 1..20: mol_type = other DNA
ctcattctaggacttcaggc

SEQ ID NO: 8762 - DNA, 20 bp, synthetic construct
  misc_feature 1..20: note = B2M promoter targeting gRNA
  source 1..20: mol_type = other DNA
attctaggacttcaggctgg

SEQ ID NO: 8763 - DNA, 20 bp, synthetic construct
  misc_feature 1..20: note = B2M promoter targeting gRNA
  source 1..20: mol_type = other DNA
ttcaggctggaggcacatta

SEQ ID NO: 8764 - DNA, 20 bp, synthetic construct
  misc_feature 1..20: note = B2M promoter targeting gRNA
  source 1..20: mol_type = other DNA
tgccccctcgctttgcagac

SEQ ID NO: 8765 - DNA, 20 bp, synthetic construct
  misc_feature 1..20: note = B2M promoter targeting gRNA
  source 1..20: mol_type = other DNA
gatgctaagtgacttgctaa

SEQ ID NO: 8766 - DNA, 20 bp, synthetic construct
  misc_feature 1..20: note = B2M promoter targeting gRNA
  source 1..20: mol_type = other DNA
gccccagccagttaactgct

SEQ ID NO: 8767 - DNA, 20 bp, synthetic construct
  misc_feature 1..20: note = B2M promoter targeting gRNA
  source 1..20: mol_type = other DNA
gcatttttcattcgagaaaa

SEQ ID NO: 8768 - DNA, 20 bp, synthetic construct
  misc_feature 1..20: note = B2M promoter targeting gRNA
  source 1..20: mol_type = other DNA
tttgaatgctacctagcaga

SEQ ID NO: 8769 - DNA, 20 bp, synthetic construct
  misc_feature 1..20: note = B2M promoter targeting gRNA
  source 1..20: mol_type = other DNA
ttctgtttataactacagct

SEQ ID NO: 8770 - DNA, 20 bp, synthetic construct
  misc_feature 1..20: note = B2M promoter targeting gRNA
  source 1..20: mol_type = other DNA
tctgtttataactacagctt

SEQ ID NO: 8771 - DNA, 21 bp, synthetic construct
  misc_feature 1..21: note = Target B2M Sequence complement
  source 1..21: mol_type = other DNA
agagaatggaaagtcaaattt

SEQ ID NO: 8772 - DNA, 21 bp, synthetic construct
  misc_feature 1..21: note = Target B2M Sequence complement
  source 1..21: mol_type = other DNA
atggacatgatcttctttata

SEQ ID NO: 8773 - DNA, 21 bp, synthetic construct
  misc_feature 1..21: note = Target B2M Sequence complement
  source 1..21: mol_type = other DNA
tggacatgatcttctttataa

SEQ ID NO: 8774 - DNA, 21 bp, synthetic construct
  misc_feature 1..21: note = Target B2M Sequence complement
  source 1..21: mol_type = other DNA
ggacatgatcttctttataat

SEQ ID NO: 8775 - DNA, 21 bp, synthetic construct
  misc_feature 1..21: note = Target B2M Sequence complement
  source 1..21: mol_type = other DNA
tgacaggattattggaaattt

SEQ ID NO: 8776 - DNA, 21 bp, synthetic construct
  misc_feature 1..21: note = Target B2M Sequence complement
  source 1..21: mol_type = other DNA
ttgtggttaatctggtttatt

SEQ ID NO: 8777 - DNA, 21 bp, synthetic construct
  misc_feature 1..21: note = Target B2M Sequence complement
  source 1..21: mol_type = other DNA
tgtggttaatctggtttattt

SEQ ID NO: 8778 - DNA, 21 bp, synthetic construct
  misc_feature 1..21: note = Target B2M Sequence complement
  source 1..21: mol_type = other DNA
gcagagaatggaaagtcaaat

SEQ ID NO: 8779 - DNA, 21 bp, synthetic construct
  misc_feature 1..21: note = Target B2M Sequence complement
  source 1..21: mol_type = other DNA
cagagaatggaaagtcaaatt

SEQ ID NO: 8780 - DNA, 21 bp, synthetic construct
  misc_feature 1..21: note = Target B2M Sequence complement
  source 1..21: mol_type = other DNA
gagaatggaaagtcaaatttc

SEQ ID NO: 8781 - DNA, 21 bp, synthetic construct
  misc_feature 1..21: note = Target B2M Sequence complement
  source 1..21: mol_type = other DNA
gtcacagcccaagatagttaa

SEQ ID NO: 8782 - DNA, 21 bp, synthetic construct
  misc_feature 1..21: note = Target B2M Sequence complement
  source 1..21: mol_type = other DNA
tgcttatacacttacacttta

SEQ ID NO: 8783 - DNA, 21 bp, synthetic construct
  misc_feature 1..21: note = Target B2M Sequence complement
  source 1..21: mol_type = other DNA
gcttatacacttacactttat

SEQ ID NO: 8784 - DNA, 21 bp, synthetic construct
  misc_feature 1..21: note = Target B2M Sequence complement
  source 1..21: mol_type = other DNA
cttatacacttacactttatg

SEQ ID NO: 8785 - DNA, 21 bp, synthetic construct
  misc_feature 1..21: note = Target B2M Sequence complement
  source 1..21: mol_type = other DNA
acatggacatgatcttcttta

SEQ ID NO: 8786 - DNA, 21 bp, synthetic construct
  misc_feature 1..21: note = Target B2M Sequence complement
  source 1..21: mol_type = other DNA
catggacatgatcttctttat

SEQ ID NO: 8787 - DNA, 21 bp, synthetic construct
  misc_feature 1..21: note = Target B2M Sequence complement
  source 1..21: mol_type = other DNA
atcaacatcttggtcagattt

SEQ ID NO: 8788 - DNA, 21 bp, synthetic construct
  misc_feature 1..21: note = Target B2M Sequence complement
  source 1..21: mol_type = other DNA
cttgcactcaaagcttgttaa

SEQ ID NO: 8789 - DNA, 21 bp, synthetic construct
  misc_feature 1..21: note = Target B2M Sequence complement
  source 1..21: mol_type = other DNA
agttaagcgtgcataagttaa

SEQ ID NO: 8790 - DNA, 21 bp, synthetic construct
  misc_feature 1..21: note = Target B2M Sequence complement
  source 1..21: mol_type = other DNA
gcataagttaacttccaattt

SEQ ID NO: 8791 - DNA, 21 bp, synthetic construct
  misc_feature 1..21: note = Target B2M Sequence complement
  source 1..21: mol_type = other DNA
tacatactctgcttagaattt

SEQ ID NO: 8792 - DNA, 21 bp, synthetic construct
  misc_feature 1..21: note = Target B2M Sequence complement
  source 1..21: mol_type = other DNA
acatactctgcttagaatttg

SEQ ID NO: 8793 - DNA, 21 bp, synthetic construct
  misc_feature 1..21: note = Target B2M Sequence complement
  source 1..21: mol_type = other DNA
ttgacaggattattggaaatt

SEQ ID NO: 8794 - DNA, 21 bp, synthetic construct
  misc_feature 1..21: note = Target B2M Sequence complement
  source 1..21: mol_type = other DNA
gacaggattattggaaatttg

SEQ ID NO: 8795 - DNA, 21 bp, synthetic construct
  misc_feature 1..21: note = Target B2M Sequence complement
  source 1..21: mol_type = other DNA
taaggcatggttgtggttaat

SEQ ID NO: 8796 - DNA, 21 bp, synthetic construct
  misc_feature 1..21: note = Target B2M Sequence complement
  source 1..21: mol_type = other DNA
gttgtggttaatctggtttat

SEQ ID NO: 8797 - DNA, 21 bp, synthetic construct
  misc_feature 1..21: note = Target B2M Sequence complement
  source 1..21: mol_type = other DNA
gttccacaagttaaataaatc

SEQ ID NO: 8798 - DNA, 21 bp, synthetic construct
  misc_feature 1..21: note = Target B2M Sequence complement
  source 1..21: mol_type = other DNA
tccagcgtactccaaagattc

SEQ ID NO: 8799 - DNA, 21 bp, synthetic construct
  misc_feature 1..21: note = Target B2M Sequence complement
  source 1..21: mol_type = other DNA
tactccaaagattcaggttta

SEQ ID NO: 8800 - DNA, 21 bp, synthetic construct
  misc_feature 1..21: note = Target B2M Sequence complement
  source 1..21: mol_type = other DNA
actccaaagattcaggtttac

SEQ ID NO: 8801 - DNA, 21 bp, synthetic construct
  misc_feature 1..21: note = Target B2M Sequence complement
  source 1..21: mol_type = other DNA
cacgtcatccagcagagaatg

SEQ ID NO: 8802 - DNA, 21 bp, synthetic construct
  misc_feature 1..21: note = Target B2M Sequence complement
  source 1..21: mol_type = other DNA
ggtttcatccatccgacattg

SEQ ID NO: 8803 - DNA, 21 bp, synthetic construct
  misc_feature 1..21: note = Target B2M Sequence complement
  source 1..21: mol_type = other DNA
ccgacattgaagttgacttac

SEQ ID NO: 8804 - DNA, 21 bp, synthetic construct
  misc_feature 1..21: note = Target B2M Sequence complement
  source 1..21: mol_type = other DNA
tgaagaatggagagagaattg

SEQ ID NO: 8805 - DNA, 21 bp, synthetic construct
  misc_feature 1..21: note = Target B2M Sequence complement
  source 1..21: mol_type = other DNA
gagcattcagacttgtctttc

SEQ ID NO: 8806 - DNA, 21 bp, synthetic construct
  misc_feature 1..21: note = Target B2M Sequence complement
  source 1..21: mol_type = other DNA
ttcagcaaggactggtctttc

SEQ ID NO: 8807 - DNA, 21 bp, synthetic construct
  misc_feature 1..21: note = Target B2M Sequence complement
  source 1..21: mol_type = other DNA
gcaaggactggtctttctatc

SEQ ID NO: 8808 - DNA, 21 bp, synthetic construct
  misc_feature 1..21: note = Target B2M Sequence complement
  source 1..21: mol_type = other DNA
cgtgtgaaccatgtgactttg

SEQ ID NO: 8809 - DNA, 21 bp, synthetic construct
  misc_feature 1..21: note = Target B2M Sequence complement
  source 1..21: mol_type = other DNA
ctttgtcacagcccaagatag

SEQ ID NO: 8810 - DNA, 21 bp, synthetic construct
  misc_feature 1..21: note = Target B2M Sequence complement
  source 1..21: mol_type = other DNA
tcacagcccaagatagttaag

SEQ ID NO: 8811 - DNA, 21 bp, synthetic construct
  misc_feature 1..21: note = Target B2M Sequence complement
  source 1..21: mol_type = other DNA
agtgggatcgagacatgtaag

SEQ ID NO: 8812 - DNA, 21 bp, synthetic construct
  misc_feature 1..21: note = Target B2M Sequence complement
  source 1..21: mol_type = other DNA
aggtttgaagatgccgcattt

SEQ ID NO: 8813 - DNA, 21 bp, synthetic construct
  misc_feature 1..21: note = Target B2M Sequence complement
  source 1..21: mol_type = other DNA
ggtttgaagatgccgcatttg

SEQ ID NO: 8814 - DNA, 21 bp, synthetic construct
  misc_feature 1..21: note = Target B2M Sequence complement
  source 1..21: mol_type = other DNA
ttgatatgcttatacacttac

SEQ ID NO: 8815 - DNA, 21 bp, synthetic construct
  misc_feature 1..21: note = Target B2M Sequence complement
  source 1..21: mol_type = other DNA
tgagtgctgtctccatgtttg

SEQ ID NO: 8816 - DNA, 21 bp, synthetic construct
  misc_feature 1..21: note = Target B2M Sequence complement
  source 1..21: mol_type = other DNA
tgtctccatgtttgatgtatc

SEQ ID NO: 8817 - DNA, 21 bp, synthetic construct
  misc_feature 1..21: note = Target B2M Sequence complement
  source 1..21: mol_type = other DNA
tcaacatcttggtcagatttg

SEQ ID NO: 8818 - DNA, 21 bp, synthetic construct
  misc_feature 1..21: note = Target B2M Sequence complement
  source 1..21: mol_type = other DNA
tcagatttgaactcttcaatc

SEQ ID NO: 8819 - DNA, 21 bp, synthetic construct
  misc_feature 1..21: note = Target B2M Sequence complement
  source 1..21: mol_type = other DNA
ttcaatctcttgcactcaaag

SEQ ID NO: 8820 - DNA, 21 bp, synthetic construct
  misc_feature 1..21: note = Target B2M Sequence complement
  source 1..21: mol_type = other DNA
ttgcactcaaagcttgttaag

SEQ ID NO: 8821 - DNA, 21 bp, synthetic construct
  misc_feature 1..21: note = Target B2M Sequence complement
  source 1..21: mol_type = other DNA
actcaaagcttgttaagatag

SEQ ID NO: 8822 - DNA, 21 bp, synthetic construct
  misc_feature 1..21: note = Target B2M Sequence complement
  source 1..21: mol_type = other DNA
agatagttaagcgtgcataag

SEQ ID NO: 8823 - DNA, 21 bp, synthetic construct
  misc_feature 1..21: note = Target B2M Sequence complement
  source 1..21: mol_type = other DNA
tgcataagttaacttccaatt

SEQ ID NO: 8824 - DNA, 21 bp, synthetic construct
  misc_feature 1..21: note = Target B2M Sequence complement
  source 1..21: mol_type = other DNA
gttaacttccaatttacatac

SEQ ID NO: 8825 - DNA, 21 bp, synthetic construct
  misc_feature 1..21: note = Target B2M Sequence complement
  source 1..21: mol_type = other DNA
attgacaggattattggaaat

SEQ ID NO: 8826 - DNA, 21 bp, synthetic construct
  misc_feature 1..21: note = Target B2M Sequence complement
  source 1..21: mol_type = other DNA
gtaaggcatggttgtggttaa

SEQ ID NO: 8827 - DNA, 21 bp, synthetic construct
  misc_feature 1..21: note = Target B2M Sequence complement
  source 1..21: mol_type = other DNA
ggttgtggttaatctggttta

SEQ ID NO: 8828 - DNA, 21 bp, synthetic construct
  misc_feature 1..21: note = Target B2M Sequence complement
  source 1..21: mol_type = other DNA
ttcctgaagctgacagcattc

SEQ ID NO: 8829 - DNA, 21 bp, synthetic construct
  misc_feature 1..21: note = Target B2M Sequence complement
  source 1..21: mol_type = other DNA
gctatccagcgtactccaaag

SEQ ID NO: 8830 - DNA, 21 bp, synthetic construct
  misc_feature 1..21: note = Target B2M Sequence complement
  source 1..21: mol_type = other DNA
catccagcagagaatggaaag

SEQ ID NO: 8831 - DNA, 21 bp, synthetic construct
  misc_feature 1..21: note = Target B2M Sequence complement
  source 1..21: mol_type = other DNA
caaatttcctgaattgctatg

SEQ ID NO: 8832 - DNA, 21 bp, synthetic construct
  misc_feature 1..21: note = Target B2M Sequence complement
  source 1..21: mol_type = other DNA
attgctatgtgtctgggtttc

SEQ ID NO: 8833 - DNA, 21 bp, synthetic construct
  misc_feature 1..21: note = Target B2M Sequence complement
  source 1..21: mol_type = other DNA
gaagatgccgcatttggattg

SEQ ID NO: 8834 - DNA, 21 bp, synthetic construct
  misc_feature 1..21: note = Target B2M Sequence complement
  source 1..21: mol_type = other DNA
caatttacatactctgcttag

SEQ ID NO: 8835 - DNA, 21 bp, synthetic construct
  misc_feature 1..21: note = Target B2M Sequence complement
  source 1..21: mol_type = other DNA
tatccagcgtactccaaagat

SEQ ID NO: 8836 - DNA, 21 bp, synthetic construct
  misc_feature 1..21: note = Target B2M Sequence complement
  source 1..21: mol_type = other DNA
atccagcgtactccaaagatt

SEQ ID NO: 8837 - DNA, 21 bp, synthetic construct
  misc_feature 1..21: note = Target B2M Sequence complement
  source 1..21: mol_type = other DNA
ctccaaagattcaggtttact

SEQ ID NO: 8838 - DNA, 21 bp, synthetic construct
  misc_feature 1..21: note = Target B2M Sequence complement
  source 1..21: mol_type = other DNA
tgctatgtgtctgggtttcat

SEQ ID NO: 8839 - DNA, 21 bp, synthetic construct
  misc_feature 1..21: note = Target B2M Sequence complement
  source 1..21: mol_type = other DNA
tttcatccatccgacattgaa

SEQ ID NO: 8840 - DNA, 21 bp, synthetic construct
  misc_feature 1..21: note = Target B2M Sequence complement
  source 1..21: mol_type = other DNA
gaagttgacttactgaagaat

SEQ ID NO: 8841 - DNA, 21 bp, synthetic construct
  misc_feature 1..21: note = Target B2M Sequence complement
  source 1..21: mol_type = other DNA
gaagaatggagagagaattga

SEQ ID NO: 8842 - DNA, 21 bp, synthetic construct
  misc_feature 1..21: note = Target B2M Sequence complement
  source 1..21: mol_type = other DNA
agaatggagagagaattgaaa

SEQ ID NO: 8843 - DNA, 21 bp, synthetic construct
  misc_feature 1..21: note = Target B2M Sequence complement
  source 1..21: mol_type = other DNA
cagcaaggactggtctttcta

SEQ ID NO: 8844 - DNA, 21 bp, synthetic construct
  misc_feature 1..21: note = Target B2M Sequence complement
  source 1..21: mol_type = other DNA
agcaaggactggtctttctat

SEQ ID NO: 8845 - DNA, 21 bp, synthetic construct
  misc_feature 1..21: note = Target B2M Sequence complement
  source 1..21: mol_type = other DNA
actttgtcacagcccaagata

SEQ ID NO: 8846 - DNA, 21 bp, synthetic construct
  misc_feature 1..21: note = Target B2M Sequence complement
  source 1..21: mol_type = other DNA
ttgtcacagcccaagatagtt

SEQ ID NO: 8847 - DNA, 21 bp, synthetic construct
  misc_feature 1..21: note = Target B2M Sequence complement
  source 1..21: mol_type = other DNA
tgtcacagcccaagatagtta

SEQ ID NO: 8848 - DNA, 21 bp, synthetic construct
  misc_feature 1..21: note = Target B2M Sequence complement
  source 1..21: mol_type = other DNA
cacagcccaagatagttaagt

SEQ ID NO: 8849 - DNA, 21 bp, synthetic construct
  misc_feature 1..21: note = Target B2M Sequence complement
  source 1..21: mol_type = other DNA
gcagcatcatggaggtttgaa

SEQ ID NO: 8850 - DNA, 21 bp, synthetic construct
  misc_feature 1..21: note = Target B2M Sequence complement
  source 1..21: mol_type = other DNA
ccgcatttggattggatgaat

SEQ ID NO: 8851 - DNA, 21 bp, synthetic construct
  misc_feature 1..21: note = Target B2M Sequence complement
  source 1..21: mol_type = other DNA
ttgagtgctgtctccatgttt

SEQ ID NO: 8852 - DNA, 21 bp, synthetic construct
  misc_feature 1..21: note = Target B2M Sequence complement
  source 1..21: mol_type = other DNA
agtgctgtctccatgtttgat

SEQ ID NO: 8853 - DNA, 21 bp, synthetic construct
  misc_feature 1..21: note = Target B2M Sequence complement
  source 1..21: mol_type = other DNA
ctgtctccatgtttgatgtat

SEQ ID NO: 8854 - DNA, 21 bp, synthetic construct
  misc_feature 1..21: note = Target B2M Sequence complement
  source 1..21: mol_type = other DNA
tctaggagggctggcaactta

SEQ ID NO: 8855 - DNA, 21 bp, synthetic construct
  misc_feature 1..21: note = Target B2M Sequence complement
  source 1..21: mol_type = other DNA
caacatcttggtcagatttga

SEQ ID NO: 8856 - DNA, 21 bp, synthetic construct
  misc_feature 1..21: note = Target B2M Sequence complement
  source 1..21: mol_type = other DNA
gtcagatttgaactcttcaat

SEQ ID NO: 8857 - DNA, 21 bp, synthetic construct
  misc_feature 1..21: note = Target B2M Sequence complement
  source 1..21: mol_type = other DNA
tcttgcactcaaagcttgtta

SEQ ID NO: 8858 - DNA, 21 bp, synthetic construct
  misc_feature 1..21: note = Target B2M Sequence complement
  source 1..21: mol_type = other DNA
tgcactcaaagcttgttaaga

SEQ ID NO: 8859 - DNA, 21 bp, synthetic construct
  misc_feature 1..21: note = Target B2M Sequence complement
  source 1..21: mol_type = other DNA
gcactcaaagcttgttaagat

SEQ ID NO: 8860 - DNA, 21 bp, synthetic construct
  misc_feature 1..21: note = Target B2M Sequence complement
  source 1..21: mol_type = other DNA
cactcaaagcttgttaagata

SEQ ID NO: 8861 - DNA, 21 bp, synthetic construct
  misc_feature 1..21: note = Target B2M Sequence complement
  source 1..21: mol_type = other DNA
tcaaagcttgttaagatagtt

SEQ ID NO: 8862 - DNA, 21 bp, synthetic construct
  misc_feature 1..21: note = Target B2M Sequence complement
  source 1..21: mol_type = other DNA
caaagcttgttaagatagtta

SEQ ID NO: 8863 - DNA, 21 bp, synthetic construct
  misc_feature 1..21: note = Target B2M Sequence complement
  source 1..21: mol_type = other DNA
gatagttaagcgtgcataagt

SEQ ID NO: 8864 - DNA, 21 bp, synthetic construct
  misc_feature 1..21: note = Target B2M Sequence complement
  source 1..21: mol_type = other DNA
atagttaagcgtgcataagtt

SEQ ID NO: 8865 - DNA, 21 bp, synthetic construct
  misc_feature 1..21: note = Target B2M Sequence complement
  source 1..21: mol_type = other DNA
tagttaagcgtgcataagtta

SEQ ID NO: 8866 - DNA, 21 bp, synthetic construct
  misc_feature 1..21: note = Target B2M Sequence complement
  source 1..21: mol_type = other DNA
ttaagcgtgcataagttaact

SEQ ID NO: 8867 - DNA, 21 bp, synthetic construct
  misc_feature 1..21: note = Target B2M Sequence complement
  source 1..21: mol_type = other DNA
taagcgtgcataagttaactt

SEQ ID NO: 8868 - DNA, 21 bp, synthetic construct
  misc_feature 1..21: note = Target B2M Sequence complement
  source 1..21: mol_type = other DNA
atttacatactctgcttagaa

SEQ ID NO: 8869 - DNA, 21 bp, synthetic construct
  misc_feature 1..21: note = Target B2M Sequence complement
  source 1..21: mol_type = other DNA
tttacatactctgcttagaat

SEQ ID NO: 8870 - DNA, 21 bp, synthetic construct
  misc_feature 1..21: note = Target B2M Sequence complement
  source 1..21: mol_type = other DNA
acaggattattggaaatttgt

SEQ ID NO: 8871 - DNA, 21 bp, synthetic construct
  misc_feature 1..21: note = Target B2M Sequence complement
  source 1..21: mol_type = other DNA
caggattattggaaatttgtt

SEQ ID NO: 8872 - DNA, 21 bp, synthetic construct
  misc_feature 1..21: note = Target B2M Sequence complement
  source 1..21: mol_type = other DNA
aggcatggttgtggttaatct

SEQ ID NO: 8873 - DNA, 21 bp, synthetic construct
  misc_feature 1..21: note = Target B2M Sequence complement
  source 1..21: mol_type = other DNA
cagcagagaatggaaagtcaa

SEQ ID NO: 8874 - DNA, 21 bp, synthetic construct
  misc_feature 1..21: note = Target B2M Sequence complement
  source 1..21: mol_type = other DNA
tccgacattgaagttgactta

SEQ ID NO: 8875 - DNA, 21 bp, synthetic construct
  misc_feature 1..21: note = Target B2M Sequence complement
  source 1..21: mol_type = other DNA
ctggtctttctatctcttgta

SEQ ID NO: 8876 - DNA, 21 bp, synthetic construct
  misc_feature 1..21: note = Target B2M Sequence complement
  source 1..21: mol_type = other DNA
ccgtgtgaaccatgtgacttt

SEQ ID NO: 8877 - DNA, 21 bp, synthetic construct
  misc_feature 1..21: note = Target B2M Sequence complement
  source 1..21: mol_type = other DNA
cccaagatagttaagtgggat

SEQ ID NO: 8878 - DNA, 21 bp, synthetic construct
  misc_feature 1..21: note = Target B2M Sequence complement
  source 1..21: mol_type = other DNA
ggttgctccacaggtagctct

SEQ ID NO: 8879 - DNA, 21 bp, synthetic construct
  misc_feature 1..21: note = Target B2M Sequence complement
  source 1..21: mol_type = other DNA
gctccacaggtagctctagga

SEQ ID NO: 8880 - DNA, 21 bp, synthetic construct
  misc_feature 1..21: note = Target B2M Sequence complement
  source 1..21: mol_type = other DNA
gggagcagagaattctcttat

SEQ ID NO: 8881 - DNA, 21 bp, synthetic construct
  misc_feature 1..21: note = Target B2M Sequence complement
  source 1..21: mol_type = other DNA
ggagcagagaattctcttatc

SEQ ID NO: 8882 - DNA, 21 bp, synthetic construct
  misc_feature 1..21: note = Target B2M Sequence complement
  source 1..21: mol_type = other DNA
gagcagagaattctcttatcc

SEQ ID NO: 8883 - DNA, 21 bp, synthetic construct
  misc_feature 1..21: note = Target B2M Sequence complement
  source 1..21: mol_type = other DNA
gagaattctcttatccaacat

SEQ ID NO: 8884 - DNA, 21 bp, synthetic construct
  misc_feature 1..21: note = Target B2M Sequence complement
  source 1..21: mol_type = other DNA
gaattctcttatccaacatca

SEQ ID NO: 8885 - DNA, 21 bp, synthetic construct
  misc_feature 1..21: note = Target B2M Sequence complement
  source 1..21: mol_type = other DNA
aagtggagcattcagacttgt

SEQ ID NO: 8886 - DNA, 21 bp, synthetic construct
  misc_feature 1..21: note = Target B2M Sequence complement
  source 1..21: mol_type = other DNA
aaggactggtctttctatctc

SEQ ID NO: 8887 - DNA, 21 bp, synthetic construct
  misc_feature 1..21: note = Target B2M Sequence complement
  source 1..21: mol_type = other DNA
aagcttgttaagatagttaag

SEQ ID NO: 8888 - DNA, 21 bp, synthetic construct
  misc_feature 1..21: note = Target B2M Sequence complement
  source 1..21: mol_type = other DNA
aagcgtgcataagttaacttc

SEQ ID NO: 8889 - DNA, 21 bp, synthetic construct
  misc_feature 1..21: note = Target B2M Sequence complement
  source 1..21: mol_type = other DNA
aagatgccgcatttggattgg

SEQ ID NO: 8890 - DNA, 21 bp, synthetic construct
  misc_feature 1..21: note = Target B2M Sequence complement
  source 1..21: mol_type = other DNA
aagaatggagagagaattgaa

SEQ ID NO: 8891 - DNA, 21 bp, synthetic construct
  misc_feature 1..21: note = Target B2M Sequence complement
  source 1..21: mol_type = other DNA
aacatcaacatcttggtcaga

SEQ ID NO: 8892 - DNA, 21 bp, synthetic construct
  misc_feature 1..21: note = Target B2M Sequence complement
  source 1..21: mol_type = other DNA
aaggcatggttgtggttaatc

SEQ ID NO: 8893 - DNA, 21 bp, synthetic construct
  misc_feature 1..21: note = Target B2M Sequence complement
  source 1..21: mol_type = other DNA
aagcagcatcatggaggtttg

SEQ ID NO: 8894 - DNA, 21 bp, synthetic construct
  misc_feature 1..21: note = Target B2M Sequence complement
  source 1..21: mol_type = other DNA
aagatgagtatgcctgccgtg

SEQ ID NO: 8895 - DNA, 21 bp, synthetic construct
  misc_feature 1..21: note = Target B2M Sequence complement
  source 1..21: mol_type = other DNA
aagttgacttactgaagaatg

SEQ ID NO: 8896 - DNA, 21 bp, synthetic construct
  misc_feature 1..21: note = Target B2M Sequence complement
  source 1..21: mol_type = other DNA
aagatagttaagcgtgcataa

SEQ ID NO: 8897 - DNA, 21 bp, synthetic construct
  misc_feature 1..21: note = Target B2M Sequence complement
  source 1..21: mol_type = other DNA
aacttccaatttacatactct

SEQ ID NO: 8898 - DNA, 21 bp, synthetic construct
  misc_feature 1..21: note = Target B2M Sequence complement
  source 1..21: mol_type = other DNA
aacatcttggtcagatttgaa

SEQ ID NO: 8899 - DNA, 21 bp, synthetic construct
  misc_feature 1..21: note = Target B2M Sequence complement
  source 1..21: mol_type = other DNA
aactcttcaatctcttgcact

SEQ ID NO: 8900 - DNA, 21 bp, synthetic construct
  misc_feature 1..21: note = Target B2M Sequence complement
  source 1..21: mol_type = other DNA
aatttcctgaattgctatgtg

SEQ ID NO: 8901 - DNA, 21 bp, synthetic construct
  misc_feature 1..21: note = Target B2M Sequence complement
  source 1..21: mol_type = other DNA
aatggaaagtcaaatttcctg

SEQ ID NO: 8902 - DNA, 21 bp, synthetic construct
  misc_feature 1..21: note = Target B2M Sequence complement
  source 1..21: mol_type = other DNA
aaccatgtgactttgtcacag

SEQ ID NO: 8903 - DNA, 21 bp, synthetic construct
  misc_feature 1..21: note = Target B2M Sequence complement
  source 1..21: mol_type = other DNA
aattgacaggattattggaaa

SEQ ID NO: 8904 - DNA, 21 bp, synthetic construct
  misc_feature 1..21: note = Target B2M Sequence complement
  source 1..21: mol_type = other DNA
aattctcttatccaacatcaa

SEQ ID NO: 8905 - DNA, 21 bp, synthetic construct
  misc_feature 1..21: note = Target B2M Sequence complement
  source 1..21: mol_type = other DNA
aaagtggagcattcagacttg

SEQ ID NO: 8906 - DNA, 21 bp, synthetic construct
  misc_feature 1..21: note = Target B2M Sequence complement
  source 1..21: mol_type = other DNA
aaagtcaaatttcctgaattg

SEQ ID NO: 8907 - DNA, 21 bp, synthetic construct
  misc_feature 1..21: note = Target B2M Sequence complement
  source 1..21: mol_type = other DNA
gttgctccacaggtagctcta

SEQ ID NO: 8908 - DNA, 21 bp, synthetic construct
  misc_feature 1..21: note = Target B2M Sequence complement
  source 1..21: mol_type = other DNA
aatttacatactctgcttaga

SEQ ID NO: 8909 - DNA, 21 bp, synthetic construct
  misc_feature 1..21: note = Target B2M Sequence complement
  source 1..21: mol_type = other DNA
attcctgaagctgacagcatt

SEQ ID NO: 8910 - DNA, 21 bp, synthetic construct
  misc_feature 1..21: note = Target B2M Sequence complement
  source 1..21: mol_type = other DNA
tgctcgcgctactctctcttt

SEQ ID NO: 8911 - DNA, 21 bp, synthetic construct
  misc_feature 1..21: note = Target B2M Sequence complement
  source 1..21: mol_type = other DNA
ctcgcgctactctctctttct

SEQ ID NO: 8912 - DNA, 21 bp, synthetic construct
  misc_feature 1..21: note = Target B2M Sequence complement
  source 1..21: mol_type = other DNA
tcgcgctactctctctttctg

SEQ ID NO: 8913 - DNA, 21 bp, synthetic construct
  misc_feature 1..21: note = Target B2M Sequence complement
  source 1..21: mol_type = other DNA
ggctatccagcgtactccaaa

SEQ ID NO: 8914 - DNA, 21 bp, synthetic construct
  misc_feature 1..21: note = Target B2M Sequence complement
  source 1..21: mol_type = other DNA
ctatccagcgtactccaaaga

SEQ ID NO: 8915 - DNA, 21 bp, synthetic construct
  misc_feature 1..21: note = Target B2M Sequence complement
  source 1..21: mol_type = other DNA
ccagcgtactccaaagattca

SEQ ID NO: 8916 - DNA, 21 bp, synthetic construct
  misc_feature 1..21: note = Target B2M Sequence complement
  source 1..21: mol_type = other DNA
cagcgtactccaaagattcag

SEQ ID NO: 8917 - DNA, 21 bp, synthetic construct
  misc_feature 1..21: note = Target B2M Sequence complement
  source 1..21: mol_type = other DNA
gtactccaaagattcaggttt

SEQ ID NO: 8918 - DNA, 21 bp, synthetic construct
  misc_feature 1..21: note = Target B2M Sequence complement
  source 1..21: mol_type = other DNA
tccaaagattcaggtttactc

SEQ ID NO: 8919 - DNA, 21 bp, synthetic construct
  misc_feature 1..21: note = Target B2M Sequence complement
  source 1..21: mol_type = other DNA
ctcacgtcatccagcagagaa

SEQ ID NO: 8920 - DNA, 21 bp, synthetic construct
  misc_feature 1..21: note = Target B2M Sequence complement
  source 1..21: mol_type = other DNA
tcacgtcatccagcagagaat

SEQ ID NO: 8921 - DNA, 21 bp, synthetic construct
  misc_feature 1..21: note = Target B2M Sequence complement
  source 1..21: mol_type = other DNA
tcatccagcagagaatggaaa

SEQ ID NO: 8922 - DNA, 21 bp, synthetic construct
  misc_feature 1..21: note = Target B2M Sequence complement
  source 1..21: mol_type = other DNA
atccagcagagaatggaaagt

SEQ ID NO: 8923 - DNA, 21 bp, synthetic construct
  misc_feature 1..21: note = Target B2M Sequence complement
  source 1..21: mol_type = other DNA
tccagcagagaatggaaagtc

SEQ ID NO: 8924 - DNA, 21 bp, synthetic construct
  misc_feature 1..21: note = Target B2M Sequence complement
  source 1..21: mol_type = other DNA
agcagagaatggaaagtcaaa

SEQ ID NO: 8925 - DNA, 21 bp, synthetic construct
  misc_feature 1..21: note = Target B2M Sequence complement
  source 1..21: mol_type = other DNA
tcaaatttcctgaattgctat

SEQ ID NO: 8926 - DNA, 21 bp, synthetic construct
  misc_feature 1..21: note = Target B2M Sequence complement
  source 1..21: mol_type = other DNA
ttgctatgtgtctgggtttca

SEQ ID NO: 8927 - DNA, 21 bp, synthetic construct
  misc_feature 1..21: note = Target B2M Sequence complement
  source 1..21: mol_type = other DNA
gctatgtgtctgggtttcatc

SEQ ID NO: 8928 - DNA, 21 bp, synthetic construct
  misc_feature 1..21: note = Target B2M Sequence complement
  source 1..21: mol_type = other DNA
gggtttcatccatccgacatt

SEQ ID NO: 8929 - DNA, 21 bp, synthetic construct
  misc_feature 1..21: note = Target B2M Sequence complement
  source 1..21: mol_type = other DNA
gtttcatccatccgacattga

SEQ ID NO: 8930 - DNA, 21 bp, synthetic construct
  misc_feature 1..21: note = Target B2M Sequence complement
  source 1..21: mol_type = other DNA
ttcatccatccgacattgaag

SEQ ID NO: 8931 - DNA, 21 bp, synthetic construct
  misc_feature 1..21: note = Target B2M Sequence complement
  source 1..21: mol_type = other DNA
tcatccatccgacattgaagt

SEQ ID NO: 8932 - DNA, 21 bp, synthetic construct
  misc_feature 1..21: note = Target B2M Sequence complement
  source 1..21: mol_type = other DNA
catccatccgacattgaagtt

SEQ ID NO: 8933 - DNA, 21 bp, synthetic construct
  misc_feature 1..21: note = Target B2M Sequence complement
  source 1..21: mol_type = other DNA
atccatccgacattgaagttg

SEQ ID NO: 8934 - DNA, 21 bp, synthetic construct
  misc_feature 1..21: note = Target B2M Sequence complement
  source 1..21: mol_type = other DNA
tccatccgacattgaagttga

SEQ ID NO: 8935 - DNA, 21 bp, synthetic construct
  misc_feature 1..21: note = Target B2M Sequence complement
  source 1..21: mol_type = other DNA
atccgacattgaagttgactt

SEQ ID NO: 8936 - DNA, 21 bp, synthetic construct
  misc_feature 1..21: note = Target B2M Sequence complement
  source 1..21: mol_type = other DNA
cgacattgaagttgacttact

SEQ ID NO: 8937 - DNA, 21 bp, synthetic construct
  misc_feature 1..21: note = Target B2M Sequence complement
  source 1..21: mol_type = other DNA
gacattgaagttgacttactg

SEQ ID NO: 8938 - DNA, 21 bp, synthetic construct
  misc_feature 1..21: note = Target B2M Sequence complement
  source 1..21: mol_type = other DNA
cattgaagttgacttactgaa

SEQ ID NO: 8939 - DNA, 21 bp, synthetic construct
  misc_feature 1..21: note = Target B2M Sequence complement
  source 1..21: mol_type = other DNA
ttgaagttgacttactgaaga

SEQ ID NO: 8940 - DNA, 21 bp, synthetic construct
  misc_feature 1..21: note = Target B2M Sequence complement
  source 1..21: mol_type = other DNA
tgaagttgacttactgaagaa

SEQ ID NO: 8941 - DNA, 21 bp, synthetic construct
  misc_feature 1..21: note = Target B2M Sequence complement
  source 1..21: mol_type = other DNA
tactgaagaatggagagagaa

SEQ ID NO: 8942 - DNA, 21 bp, synthetic construct
  misc_feature 1..21: note = Target B2M Sequence complement
  source 1..21: mol_type = other DNA
actgaagaatggagagagaat

SEQ ID NO: 8943 - DNA, 21 bp, synthetic construct
  misc_feature 1..21: note = Target B2M Sequence complement
  source 1..21: mol_type = other DNA
tggagcattcagacttgtctt

SEQ ID NO: 8944 - DNA, 21 bp, synthetic construct
  misc_feature 1..21: note = Target B2M Sequence complement
  source 1..21: mol_type = other DNA
ggagcattcagacttgtcttt

SEQ ID NO: 8945 - DNA, 21 bp, synthetic construct
  misc_feature 1..21: note = Target B2M Sequence complement
  source 1..21: mol_type = other DNA
agcattcagacttgtctttca

SEQ ID NO: 8946 - DNA, 21 bp, synthetic construct
  misc_feature 1..21: note = Target B2M Sequence complement
  source 1..21: mol_type = other DNA
gcattcagacttgtctttcag

SEQ ID NO: 8947 - DNA, 21 bp, synthetic construct
  misc_feature 1..21: note = Target B2M Sequence complement
  source 1..21: mol_type = other DNA
tttcagcaaggactggtcttt

SEQ ID NO: 8948 - DNA, 21 bp, synthetic construct
  misc_feature 1..21: note = Target B2M Sequence complement
  source 1..21: mol_type = other DNA
tcagcaaggactggtctttct

SEQ ID NO: 8949 - DNA, 21 bp, synthetic construct
  misc_feature 1..21: note = Target B2M Sequence complement
  source 1..21: mol_type = other DNA
caaggactggtctttctatct

SEQ ID NO: 8950 - DNA, 21 bp, synthetic construct
  misc_feature 1..21: note = Target B2M Sequence complement
  source 1..21: mol_type = other DNA
ggactggtctttctatctctt

SEQ ID NO: 8951 - DNA, 21 bp, synthetic construct
  misc_feature 1..21: note = Target B2M Sequence complement
  source 1..21: mol_type = other DNA
actggtctttctatctcttgt

SEQ ID NO: 8952 - DNA, 21 bp, synthetic construct
  misc_feature 1..21: note = Target B2M Sequence complement
  source 1..21: mol_type = other DNA
tggtctttctatctcttgtac

SEQ ID NO: 8953 - DNA, 21 bp, synthetic construct
  misc_feature 1..21: note = Target B2M Sequence complement
  source 1..21: mol_type = other DNA
ggtctttctatctcttgtact

SEQ ID NO: 8954 - DNA, 21 bp, synthetic construct
  misc_feature 1..21: note = Target B2M Sequence complement
  source 1..21: mol_type = other DNA
gtctttctatctcttgtacta

SEQ ID NO: 8955 - DNA, 21 bp, synthetic construct
  misc_feature 1..21: note = Target B2M Sequence complement
  source 1..21: mol_type = other DNA
tctttctatctcttgtactac

SEQ ID NO: 8956 - DNA, 21 bp, synthetic construct
  misc_feature 1..21: note = Target B2M Sequence complement
  source 1..21: mol_type = other DNA
ctttctatctcttgtactaca

SEQ ID NO: 8957 - DNA, 21 bp, synthetic construct
  misc_feature 1..21: note = Target B2M Sequence complement
  source 1..21: mol_type = other DNA
tatctcttgtactacactgaa

SEQ ID NO: 8958 - DNA, 21 bp, synthetic construct
  misc_feature 1..21: note = Target B2M Sequence complement
  source 1..21: mol_type = other DNA
atctcttgtactacactgaat

SEQ ID NO: 8959 - DNA, 21 bp, synthetic construct
  misc_feature 1..21: note = Target B2M Sequence complement
  source 1..21: mol_type = other DNA
tgagtatgcctgccgtgtgaa

SEQ ID NO: 8960 - DNA, 21 bp, synthetic construct
  misc_feature 1..21: note = Target B2M Sequence complement
  source 1..21: mol_type = other DNA
gccgtgtgaaccatgtgactt

SEQ ID NO: 8961 - DNA, 21 bp, synthetic construct
  misc_feature 1..21: note = Target B2M Sequence complement
  source 1..21: mol_type = other DNA
gtgtgaaccatgtgactttgt

SEQ ID NO: 8962 - DNA, 21 bp, synthetic construct
  misc_feature 1..21: note = Target B2M Sequence complement
  source 1..21: mol_type = other DNA
tgtgaaccatgtgactttgtc

SEQ ID NO: 8963 - DNA, 21 bp, synthetic construct
  misc_feature 1..21: note = Target B2M Sequence complement
  source 1..21: mol_type = other DNA
gactttgtcacagcccaagat

SEQ ID NO: 8964 - DNA, 21 bp, synthetic construct
  misc_feature 1..21: note = Target B2M Sequence complement
  source 1..21: mol_type = other DNA
tttgtcacagcccaagatagt

SEQ ID NO: 8965 - DNA, 21 bp, synthetic construct
  misc_feature 1..21: note = Target B2M Sequence complement
  source 1..21: mol_type = other DNA
acagcccaagatagttaagtg

SEQ ID NO: 8966 - DNA, 21 bp, synthetic construct
  misc_feature 1..21: note = Target B2M Sequence complement
  source 1..21: mol_type = other DNA
agttaagtgggatcgagacat

SEQ ID NO: 8967 - DNA, 21 bp, synthetic construct
  misc_feature 1..21: note = Target B2M Sequence complement
  source 1..21: mol_type = other DNA
ttaagtgggatcgagacatgt

SEQ ID NO: 8968 - DNA, 21 bp, synthetic construct
  misc_feature 1..21: note = Target B2M Sequence complement
  source 1..21: mol_type = other DNA
taagtgggatcgagacatgta

SEQ ID NO: 8969 - DNA, 21 bp, synthetic construct
  misc_feature 1..21: note = Target B2M Sequence complement
  source 1..21: mol_type = other DNA
gagacatgtaagcagcatcat

SEQ ID NO: 8970 - DNA, 21 bp, synthetic construct
  misc_feature 1..21: note = Target B2M Sequence complement
  source 1..21: mol_type = other DNA
agacatgtaagcagcatcatg

SEQ ID NO: 8971 - DNA, 21 bp, synthetic construct
  misc_feature 1..21: note = Target B2M Sequence complement
  source 1..21: mol_type = other DNA
taagcagcatcatggaggttt

SEQ ID NO: 8972 - DNA, 21 bp, synthetic construct
  misc_feature 1..21: note = Target B2M Sequence complement
  source 1..21: mol_type = other DNA
agcagcatcatggaggtttga

SEQ ID NO: 8973 - DNA, 21 bp, synthetic construct
  misc_feature 1..21: note = Target B2M Sequence complement
  source 1..21: mol_type = other DNA
cagcatcatggaggtttgaag

SEQ ID NO: 8974 - DNA, 21 bp, synthetic construct
  misc_feature 1..21: note = Target B2M Sequence complement
  source 1..21: mol_type = other DNA
agcatcatggaggtttgaaga

SEQ ID NO: 8975 - DNA, 21 bp, synthetic construct
  misc_feature 1..21: note = Target B2M Sequence complement
  source 1..21: mol_type = other DNA
gcatcatggaggtttgaagat

SEQ ID NO: 8976 - DNA, 21 bp, synthetic construct
  misc_feature 1..21: note = Target B2M Sequence complement
  source 1..21: mol_type = other DNA
catcatggaggtttgaagatg

SEQ ID NO: 8977 - DNA, 21 bp, synthetic construct
  misc_feature 1..21: note = Target B2M Sequence complement
  source 1..21: mol_type = other DNA
gtttgaagatgccgcatttgg

SEQ ID NO: 8978 - DNA, 21 bp, synthetic construct
  misc_feature 1..21: note = Target B2M Sequence complement
  source 1..21: mol_type = other DNA
tgaagatgccgcatttggatt

SEQ ID NO: 8979 - DNA, 21 bp, synthetic construct
  misc_feature 1..21: note = Target B2M Sequence complement
  source 1..21: mol_type = other DNA
gccgcatttggattggatgaa

SEQ ID NO: 8980 - DNA, 21 bp, synthetic construct
  misc_feature 1..21: note = Target B2M Sequence complement
  source 1..21: mol_type = other DNA
caaattctgcttgcttgcttt

SEQ ID NO: 8981 - DNA, 21 bp, synthetic construct
  misc_feature 1..21: note = Target B2M Sequence complement
  source 1..21: mol_type = other DNA
tgatatgcttatacacttaca

SEQ ID NO: 8982 - DNA, 21 bp, synthetic construct
  misc_feature 1..21: note = Target B2M Sequence complement
  source 1..21: mol_type = other DNA
gatatgcttatacacttacac

SEQ ID NO: 8983 - DNA, 21 bp, synthetic construct
  misc_feature 1..21: note = Target B2M Sequence complement
  source 1..21: mol_type = other DNA
tatgcttatacacttacactt

SEQ ID NO: 8984 - DNA, 21 bp, synthetic construct
  misc_feature 1..21: note = Target B2M Sequence complement
  source 1..21: mol_type = other DNA
atgcttatacacttacacttt

SEQ ID NO: 8985 - DNA, 21 bp, synthetic construct
  misc_feature 1..21: note = Target B2M Sequence complement
  source 1..21: mol_type = other DNA
ttatacacttacactttatgc

SEQ ID NO: 8986 - DNA, 21 bp, synthetic construct
  misc_feature 1..21: note = Target B2M Sequence complement
  source 1..21: mol_type = other DNA
cacttacactttatgcacaaa

SEQ ID NO: 8987 - DNA, 21 bp, synthetic construct
  misc_feature 1..21: note = Target B2M Sequence complement
  source 1..21: mol_type = other DNA
ataatgttaacatggacatga

SEQ ID NO: 8988 - DNA, 21 bp, synthetic construct
  misc_feature 1..21: note = Target B2M Sequence complement
  source 1..21: mol_type = other DNA
taatgttaacatggacatgat

SEQ ID NO: 8989 - DNA, 21 bp, synthetic construct
  misc_feature 1..21: note = Target B2M Sequence complement
  source 1..21: mol_type = other DNA
atgttaacatggacatgatct

SEQ ID NO: 8990 - DNA, 21 bp, synthetic construct
  misc_feature 1..21: note = Target B2M Sequence complement
  source 1..21: mol_type = other DNA
tgttaacatggacatgatctt

SEQ ID NO: 8991 - DNA, 21 bp, synthetic construct
  misc_feature 1..21: note = Target B2M Sequence complement
  source 1..21: mol_type = other DNA
gttaacatggacatgatcttc

SEQ ID NO: 8992 - DNA, 21 bp, synthetic construct
  misc_feature 1..21: note = Target B2M Sequence complement
  source 1..21: mol_type = other DNA
ttaacatggacatgatcttct

SEQ ID NO: 8993 - DNA, 21 bp, synthetic construct
  misc_feature 1..21: note = Target B2M Sequence complement
  source 1..21: mol_type = other DNA
taacatggacatgatcttctt

SEQ ID NO: 8994 - DNA, 21 bp, synthetic construct
  misc_feature 1..21: note = Target B2M Sequence complement
  source 1..21: mol_type = other DNA
tttgagtgctgtctccatgtt

SEQ ID NO: 8995 - DNA, 21 bp, synthetic construct
  misc_feature 1..21: note = Target B2M Sequence complement
  source 1..21: mol_type = other DNA
gagtgctgtctccatgtttga

SEQ ID NO: 8996 - DNA, 21 bp, synthetic construct
  misc_feature 1..21: note = Target B2M Sequence complement
  source 1..21: mol_type = other DNA
gtgctgtctccatgtttgatg

SEQ ID NO: 8997 - DNA, 21 bp, synthetic construct
  misc_feature 1..21: note = Target B2M Sequence complement
  source 1..21: mol_type = other DNA
tgctgtctccatgtttgatgt

SEQ ID NO: 8998 - DNA, 21 bp, synthetic construct
  misc_feature 1..21: note = Target B2M Sequence complement
  source 1..21: mol_type = other DNA
gctgtctccatgtttgatgta

SEQ ID NO: 8999 - DNA, 21 bp, synthetic construct
  misc_feature 1..21: note = Target B2M Sequence complement
  source 1..21: mol_type = other DNA
gtctccatgtttgatgtatct

SEQ ID NO: 9000 - DNA, 21 bp, synthetic construct
  misc_feature 1..21: note = Target B2M Sequence complement
  source 1..21: mol_type = other DNA
tctccatgtttgatgtatctg

SEQ ID NO: 9001 - DNA, 21 bp, synthetic construct
  misc_feature 1..21: note = Target B2M Sequence complement
  source 1..21: mol_type = other DNA
taggagggctggcaacttaga

SEQ ID NO: 9002 - DNA, 21 bp, synthetic construct
  misc_feature 1..21: note = Target B2M Sequence complement
  source 1..21: mol_type = other DNA
attctcttatccaacatcaac

SEQ ID NO: 9003 - DNA, 21 bp, synthetic construct
  misc_feature 1..21: note = Target B2M Sequence complement
  source 1..21: mol_type = other DNA
ttctcttatccaacatcaaca

SEQ ID NO: 9004 - DNA, 21 bp, synthetic construct
  misc_feature 1..21: note = Target B2M Sequence complement
  source 1..21: mol_type = other DNA
tctcttatccaacatcaacat

SEQ ID NO: 9005 - DNA, 21 bp, synthetic construct
  misc_feature 1..21: note = Target B2M Sequence complement
  source 1..21: mol_type = other DNA
ctcttatccaacatcaacatc

SEQ ID NO: 9006 - DNA, 21 bp, synthetic construct
  misc_feature 1..21: note = Target B2M Sequence complement
  source 1..21: mol_type = other DNA
tcttatccaacatcaacatct

SEQ ID NO: 9007 - DNA, 21 bp, synthetic construct
  misc_feature 1..21: note = Target B2M Sequence complement
  source 1..21: mol_type = other DNA
cttatccaacatcaacatctt

SEQ ID NO: 9008 - DNA, 21 bp, synthetic construct
  misc_feature 1..21: note = Target B2M Sequence complement
  source 1..21: mol_type = other DNA
ttatccaacatcaacatcttg

SEQ ID NO: 9009 - DNA, 21 bp, synthetic construct
  misc_feature 1..21: note = Target B2M Sequence complement
  source 1..21: mol_type = other DNA
acatcaacatcttggtcagat

SEQ ID NO: 9010 - DNA, 21 bp, synthetic construct
  misc_feature 1..21: note = Target B2M Sequence complement
  source 1..21: mol_type = other DNA
catcaacatcttggtcagatt

SEQ ID NO: 9011 - DNA, 21 bp, synthetic construct
  misc_feature 1..21: note = Target B2M Sequence complement
  source 1..21: mol_type = other DNA
acatcttggtcagatttgaac

SEQ ID NO: 9012 - DNA, 21 bp, synthetic construct
  misc_feature 1..21: note = Target B2M Sequence complement
  source 1..21: mol_type = other DNA
catcttggtcagatttgaact

SEQ ID NO: 9013 - DNA, 21 bp, synthetic construct
  misc_feature 1..21: note = Target B2M Sequence complement
  source 1..21: mol_type = other DNA
cttggtcagatttgaactctt

SEQ ID NO: 9014 - DNA, 21 bp, synthetic construct
  misc_feature 1..21: note = Target B2M Sequence complement
  source 1..21: mol_type = other DNA
tggtcagatttgaactcttca

SEQ ID NO: 9015 - DNA, 21 bp, synthetic construct
  misc_feature 1..21: note = Target B2M Sequence complement
  source 1..21: mol_type = other DNA
ggtcagatttgaactcttcaa

SEQ ID NO: 9016 - DNA, 21 bp, synthetic construct
  misc_feature 1..21: note = Target B2M Sequence complement
  source 1..21: mol_type = other DNA
atttgaactcttcaatctctt

SEQ ID NO: 9017 - DNA, 21 bp, synthetic construct
  misc_feature 1..21: note = Target B2M Sequence complement
  source 1..21: mol_type = other DNA
tcttcaatctcttgcactcaa

SEQ ID NO: 9018 - DNA, 21 bp, synthetic construct
  misc_feature 1..21: note = Target B2M Sequence complement
  source 1..21: mol_type = other DNA
cttcaatctcttgcactcaaa

SEQ ID NO: 9019 - DNA, 21 bp, synthetic construct
  misc_feature 1..21: note = Target B2M Sequence complement
  source 1..21: mol_type = other DNA
ctcttgcactcaaagcttgtt

SEQ ID NO: 9020 - DNA, 21 bp, synthetic construct
  misc_feature 1..21: note = Target B2M Sequence complement
  source 1..21: mol_type = other DNA
ctcaaagcttgttaagatagt

SEQ ID NO: 9021 - DNA, 21 bp, synthetic construct
  misc_feature 1..21: note = Target B2M Sequence complement
  source 1..21: mol_type = other DNA
agcttgttaagatagttaagc

SEQ ID NO: 9022 - DNA, 21 bp, synthetic construct
  misc_feature 1..21: note = Target B2M Sequence complement
  source 1..21: mol_type = other DNA
taagatagttaagcgtgcata

SEQ ID NO: 9023 - DNA, 21 bp, synthetic construct
  misc_feature 1..21: note = Target B2M Sequence complement
  source 1..21: mol_type = other DNA
gtgcataagttaacttccaat

SEQ ID NO: 9024 - DNA, 21 bp, synthetic construct
  misc_feature 1..21: note = Target B2M Sequence complement
  source 1..21: mol_type = other DNA
taacttccaatttacatactc

SEQ ID NO: 9025 - DNA, 21 bp, synthetic construct
  misc_feature 1..21: note = Target B2M Sequence complement
  source 1..21: mol_type = other DNA
ccaatttacatactctgctta

SEQ ID NO: 9026 - DNA, 21 bp, synthetic construct
  misc_feature 1..21: note = Target B2M Sequence complement
  source 1..21: mol_type = other DNA
catactctgcttagaatttgg

SEQ ID NO: 9027 - DNA, 21 bp, synthetic construct
  misc_feature 1..21: note = Target B2M Sequence complement
  source 1..21: mol_type = other DNA
agtaaggcatggttgtggtta

SEQ ID NO: 9028 - DNA, 21 bp, synthetic construct
  misc_feature 1..21: note = Target B2M Sequence complement
  source 1..21: mol_type = other DNA
ggcatggttgtggttaatctg

SEQ ID NO: 9029 - DNA, 21 bp, synthetic construct
  misc_feature 1..21: note = Target B2M Sequence complement
  source 1..21: mol_type = other DNA
tggttgtggttaatctggttt

SEQ ID NO: 9030 - DNA, 21 bp, synthetic construct
  misc_feature 1..21: note = Target B2M Sequence complement
  source 1..21: mol_type = other DNA
tcctgaagctgacagcattcg

SEQ ID NO: 9031 - DNA, 21 bp, synthetic construct
  misc_feature 1..21: note = Target B2M Sequence complement
  source 1..21: mol_type = other DNA
tctttctggcctggaggctat

SEQ ID NO: 9032 - DNA, 21 bp, synthetic construct
  misc_feature 1..21: note = Target B2M Sequence complement
  source 1..21: mol_type = other DNA
caaagattcaggtttactcac

SEQ ID NO: 9033 - DNA, 21 bp, synthetic construct
  misc_feature 1..21: note = Target B2M Sequence complement
  source 1..21: mol_type = other DNA
attcaggtttactcacgtcat

SEQ ID NO: 9034 - DNA, 21 bp, synthetic construct
  misc_feature 1..21: note = Target B2M Sequence complement
  source 1..21: mol_type = other DNA
ttcaggtttactcacgtcatc

SEQ ID NO: 9035 - DNA, 21 bp, synthetic construct
  misc_feature 1..21: note = Target B2M Sequence complement
  source 1..21: mol_type = other DNA
tcaggtttactcacgtcatcc

SEQ ID NO: 9036 - DNA, 21 bp, synthetic construct
  misc_feature 1..21: note = Target B2M Sequence complement
  source 1..21: mol_type = other DNA
acgtcatccagcagagaatgg

SEQ ID NO: 9037 - DNA, 21 bp, synthetic construct
  misc_feature 1..21: note = Target B2M Sequence complement
  source 1..21: mol_type = other DNA
tttcctgaattgctatgtgtc

SEQ ID NO: 9038 - DNA, 21 bp, synthetic construct
  misc_feature 1..21: note = Target B2M Sequence complement
  source 1..21: mol_type = other DNA
tcctgaattgctatgtgtctg

SEQ ID NO: 9039 - DNA, 21 bp, synthetic construct
  misc_feature 1..21: note = Target B2M Sequence complement
  source 1..21: mol_type = other DNA
ctatgtgtctgggtttcatcc

SEQ ID NO: 9040 - DNA, 21 bp, synthetic construct
  misc_feature 1..21: note = Target B2M Sequence complement
  source 1..21: mol_type = other DNA
tgtgtctgggtttcatccatc

SEQ ID NO: 9041 - DNA, 21 bp, synthetic construct
  misc_feature 1..21: note = Target B2M Sequence complement
  source 1..21: mol_type = other DNA
tgggtttcatccatccgacat

SEQ ID NO: 9042 - DNA, 21 bp, synthetic construct
  misc_feature 1..21: note = Target B2M Sequence complement
  source 1..21: mol_type = other DNA
ccatccgacattgaagttgac

SEQ ID NO: 9043 - DNA, 21 bp, synthetic construct
  misc_feature 1..21: note = Target B2M Sequence complement
  source 1..21: mol_type = other DNA
attgaagttgacttactgaag

SEQ ID NO: 9044 - DNA, 21 bp, synthetic construct
  misc_feature 1..21: note = Target B2M Sequence complement
  source 1..21: mol_type = other DNA
agttgacttactgaagaatgg

SEQ ID NO: 9045 - DNA, 21 bp, synthetic construct
  misc_feature 1..21: note = Target B2M Sequence complement
  source 1..21: mol_type = other DNA
cttactgaagaatggagagag

SEQ ID NO: 9046 - DNA, 21 bp, synthetic construct
  misc_feature 1..21: note = Target B2M Sequence complement
  source 1..21: mol_type = other DNA
agtggagcattcagacttgtc

SEQ ID NO: 9047 - DNA, 21 bp, synthetic construct
  misc_feature 1..21: note = Target B2M Sequence complement
  source 1..21: mol_type = other DNA
tcagacttgtctttcagcaag

SEQ ID NO: 9048 - DNA, 21 bp, synthetic construct
  misc_feature 1..21: note = Target B2M Sequence complement
  source 1..21: mol_type = other DNA
ctttcagcaaggactggtctt

SEQ ID NO: 9049 - DNA, 21 bp, synthetic construct
  misc_feature 1..21: note = Target B2M Sequence complement
  source 1..21: mol_type = other DNA
gactggtctttctatctcttg

SEQ ID NO: 9050 - DNA, 21 bp, synthetic construct
  misc_feature 1..21: note = Target B2M Sequence complement
  source 1..21: mol_type = other DNA
tttctatctcttgtactacac

SEQ ID NO: 9051 - DNA, 21 bp, synthetic construct
  misc_feature 1..21: note = Target B2M Sequence complement
  source 1..21: mol_type = other DNA
tctatctcttgtactacactg

SEQ ID NO: 9052 - DNA, 21 bp, synthetic construct
  misc_feature 1..21: note = Target B2M Sequence complement
  source 1..21: mol_type = other DNA
tgaaccatgtgactttgtcac

SEQ ID NO: 9053 - DNA, 21 bp, synthetic construct
  misc_feature 1..21: note = Target B2M Sequence complement
  source 1..21: mol_type = other DNA
cctgaagctgacagcattcgg

SEQ ID NO: 9054 - DNA, 21 bp, synthetic construct
  misc_feature 1..21: note = Target B2M Sequence complement
  source 1..21: mol_type = other DNA
ctgaagctgacagcattcggg

SEQ ID NO: 9055 - DNA, 21 bp, synthetic construct
  misc_feature 1..21: note = Target B2M Sequence complement
  source 1..21: mol_type = other DNA
tgaagctgacagcattcgggc

SEQ ID NO: 9056 - DNA, 21 bp, synthetic construct
  misc_feature 1..21: note = Target B2M Sequence complement
  source 1..21: mol_type = other DNA
atgtctcgctccgtggcctta

SEQ ID NO: 9057 - DNA, 21 bp, synthetic construct
  misc_feature 1..21: note = Target B2M Sequence complement
  source 1..21: mol_type = other DNA
cttagctgtgctcgcgctact

SEQ ID NO: 9058 - DNA, 21 bp, synthetic construct
  misc_feature 1..21: note = Target B2M Sequence complement
  source 1..21: mol_type = other DNA
ttagctgtgctcgcgctactc

SEQ ID NO: 9059 - DNA, 21 bp, synthetic construct
  misc_feature 1..21: note = Target B2M Sequence complement
  source 1..21: mol_type = other DNA
tagctgtgctcgcgctactct

SEQ ID NO: 9060 - DNA, 21 bp, synthetic construct
  misc_feature 1..21: note = Target B2M Sequence complement
  source 1..21: mol_type = other DNA
tgtgctcgcgctactctctct

SEQ ID NO: 9061 - DNA, 21 bp, synthetic construct
  misc_feature 1..21: note = Target B2M Sequence complement
  source 1..21: mol_type = other DNA
gtgctcgcgctactctctctt

SEQ ID NO: 9062 - DNA, 21 bp, synthetic construct
  misc_feature 1..21: note = Target B2M Sequence complement
  source 1..21: mol_type = other DNA
gctcgcgctactctctctttc

SEQ ID NO: 9063 - DNA, 21 bp, synthetic construct
  misc_feature 1..21: note = Target B2M Sequence complement
  source 1..21: mol_type = other DNA
cgcgctactctctctttctgg

SEQ ID NO: 9064 - DNA, 21 bp, synthetic construct
  misc_feature 1..21: note = Target B2M Sequence complement
  source 1..21: mol_type = other DNA
gcgctactctctctttctggc

SEQ ID NO: 9065 - DNA, 21 bp, synthetic construct
  misc_feature 1..21: note = Target B2M Sequence complement
  source 1..21: mol_type = other DNA
cgctactctctctttctggcc

SEQ ID NO: 9066 - DNA, 21 bp, synthetic construct
  misc_feature 1..21: note = Target B2M Sequence complement
  source 1..21: mol_type = other DNA
gctactctctctttctggcct

SEQ ID NO: 9067 - DNA, 21 bp, synthetic construct
  misc_feature 1..21: note = Target B2M Sequence complement
  source 1..21: mol_type = other DNA
ctactctctctttctggcctg

SEQ ID NO: 9068 - DNA, 21 bp, synthetic construct
  misc_feature 1..21: note = Target B2M Sequence complement
  source 1..21: mol_type = other DNA
tactctctctttctggcctgg

SEQ ID NO: 9069 - DNA, 21 bp, synthetic construct
  misc_feature 1..21: note = Target B2M Sequence complement
  source 1..21: mol_type = other DNA
actctctctttctggcctgga

SEQ ID NO: 9070 - DNA, 21 bp, synthetic construct
  misc_feature 1..21: note = Target B2M Sequence complement
  source 1..21: mol_type = other DNA
ctctctctttctggcctggag

SEQ ID NO: 9071 - DNA, 21 bp, synthetic construct
  misc_feature 1..21: note = Target B2M Sequence complement
  source 1..21: mol_type = other DNA
tctctctttctggcctggagg

SEQ ID NO: 9072 - DNA, 21 bp, synthetic construct
  misc_feature 1..21: note = Target B2M Sequence complement
  source 1..21: mol_type = other DNA
tctctttctggcctggaggct

SEQ ID NO: 9073 - DNA, 21 bp, synthetic construct
  misc_feature 1..21: note = Target B2M Sequence complement
  source 1..21: mol_type = other DNA
ctctttctggcctggaggcta

SEQ ID NO: 9074 - DNA, 21 bp, synthetic construct
  misc_feature 1..21: note = Target B2M Sequence complement
  source 1..21: mol_type = other DNA
ctttctggcctggaggctatc

SEQ ID NO: 9075 - DNA, 21 bp, synthetic construct
  misc_feature 1..21: note = Target B2M Sequence complement
  source 1..21: mol_type = other DNA
tttctggcctggaggctatcc

SEQ ID NO: 9076 - DNA, 21 bp, synthetic construct
  misc_feature 1..21: note = Target B2M Sequence complement
  source 1..21: mol_type = other DNA
ttctggcctggaggctatcca

SEQ ID NO: 9077 - DNA, 21 bp, synthetic construct
  misc_feature 1..21: note = Target B2M Sequence complement
  source 1..21: mol_type = other DNA
ctggaggctatccagcgtact

SEQ ID NO: 9078 - DNA, 21 bp, synthetic construct
  misc_feature 1..21: note = Target B2M Sequence complement
  source 1..21: mol_type = other DNA
tggaggctatccagcgtactc

SEQ ID NO: 9079 - DNA, 21 bp, synthetic construct
  misc_feature 1..21: note = Target B2M Sequence complement
  source 1..21: mol_type = other DNA
gaggctatccagcgtactcca

SEQ ID NO: 9080 - DNA, 21 bp, synthetic construct
  misc_feature 1..21: note = Target B2M Sequence complement
  source 1..21: mol_type = other DNA
aggctatccagcgtactccaa

SEQ ID NO: 9081 - DNA, 21 bp, synthetic construct
  misc_feature 1..21: note = Target B2M Sequence complement
  source 1..21: mol_type = other DNA
agcgtactccaaagattcagg

SEQ ID NO: 9082 - DNA, 21 bp, synthetic construct
  misc_feature 1..21: note = Target B2M Sequence complement
  source 1..21: mol_type = other DNA
gcgtactccaaagattcaggt

SEQ ID NO: 9083 - DNA, 21 bp, synthetic construct
  misc_feature 1..21: note = Target B2M Sequence complement
  source 1..21: mol_type = other DNA
cgtactccaaagattcaggtt

SEQ ID NO: 9084 - DNA, 21 bp, synthetic construct
  misc_feature 1..21: note = Target B2M Sequence complement
  source 1..21: mol_type = other DNA
ccaaagattcaggtttactca

SEQ ID NO: 9085 - DNA, 21 bp, synthetic construct
  misc_feature 1..21: note = Target B2M Sequence complement
  source 1..21: mol_type = other DNA
aaagattcaggtttactcacg

SEQ ID NO: 9086 - DNA, 21 bp, synthetic construct
  misc_feature 1..21: note = Target B2M Sequence complement
  source 1..21: mol_type = other DNA
aagattcaggtttactcacgt

SEQ ID NO: 9087 - DNA, 21 bp, synthetic construct
  misc_feature 1..21: note = Target B2M Sequence complement
  source 1..21: mol_type = other DNA
agattcaggtttactcacgtc

SEQ ID NO: 9088 - DNA, 21 bp, synthetic construct
  misc_feature 1..21: note = Target B2M Sequence complement
  source 1..21: mol_type = other DNA
gattcaggtttactcacgtca

SEQ ID NO: 9089 - DNA, 21 bp, synthetic construct
  misc_feature 1..21: note = Target B2M Sequence complement
  source 1..21: mol_type = other DNA
caggtttactcacgtcatcca

SEQ ID NO: 9090 - DNA, 21 bp, synthetic construct
  misc_feature 1..21: note = Target B2M Sequence complement
  source 1..21: mol_type = other DNA
aggtttactcacgtcatccag

SEQ ID NO: 9091 - DNA, 21 bp, synthetic construct
  misc_feature 1..21: note = Target B2M Sequence complement
  source 1..21: mol_type = other DNA
ggtttactcacgtcatccagc

SEQ ID NO: 9092 - DNA, 21 bp, synthetic construct
  misc_feature 1..21: note = Target B2M Sequence complement
  source 1..21: mol_type = other DNA
gtttactcacgtcatccagca

SEQ ID NO: 9093 - DNA, 21 bp, synthetic construct
  misc_feature 1..21: note = Target B2M Sequence complement
  source 1..21: mol_type = other DNA
tttactcacgtcatccagcag

SEQ ID NO: 9094 - DNA, 21 bp, synthetic construct
  misc_feature 1..21: note = Target B2M Sequence complement
  source 1..21: mol_type = other DNA
ttactcacgtcatccagcaga

SEQ ID NO: 9095 - DNA, 21 bp, synthetic construct
  misc_feature 1..21: note = Target B2M Sequence complement
  source 1..21: mol_type = other DNA
tactcacgtcatccagcagag

SEQ ID NO: 9096 - DNA, 21 bp, synthetic construct
  misc_feature 1..21: note = Target B2M Sequence complement
  source 1..21: mol_type = other DNA
actcacgtcatccagcagaga

SEQ ID NO: 9097 - DNA, 21 bp, synthetic construct
  misc_feature 1..21: note = Target B2M Sequence complement
  source 1..21: mol_type = other DNA
cgtcatccagcagagaatgga

SEQ ID NO: 9098 - DNA, 21 bp, synthetic construct
  misc_feature 1..21: note = Target B2M Sequence complement
  source 1..21: mol_type = other DNA
gtcatccagcagagaatggaa

SEQ ID NO: 9099 - DNA, 21 bp, synthetic construct
  misc_feature 1..21: note = Target B2M Sequence complement
  source 1..21: mol_type = other DNA
ccagcagagaatggaaagtca

SEQ ID NO: 9100 - DNA, 21 bp, synthetic construct
  misc_feature 1..21: note = Target B2M Sequence complement
  source 1..21: mol_type = other DNA
agaatggaaagtcaaatttcc

SEQ ID NO: 9101 - DNA, 21 bp, synthetic construct
  misc_feature 1..21: note = Target B2M Sequence complement
  source 1..21: mol_type = other DNA
gaatggaaagtcaaatttcct

SEQ ID NO: 9102 - DNA, 21 bp, synthetic construct
  misc_feature 1..21: note = Target B2M Sequence complement
  source 1..21: mol_type = other DNA
atggaaagtcaaatttcctga

SEQ ID NO: 9103 - DNA, 21 bp, synthetic construct
  misc_feature 1..21: note = Target B2M Sequence complement
  source 1..21: mol_type = other DNA
tggaaagtcaaatttcctgaa

SEQ ID NO: 9104 - DNA, 21 bp, synthetic construct
  misc_feature 1..21: note = Target B2M Sequence complement
  source 1..21: mol_type = other DNA
ggaaagtcaaatttcctgaat

SEQ ID NO: 9105 - DNA, 21 bp, synthetic construct
  misc_feature 1..21: note = Target B2M Sequence complement
  source 1..21: mol_type = other DNA
gaaagtcaaatttcctgaatt

SEQ ID NO: 9106 - DNA, 21 bp, synthetic construct
  misc_feature 1..21: note = Target B2M Sequence complement
  source 1..21: mol_type = other DNA
aagtcaaatttcctgaattgc

SEQ ID NO: 9107 - DNA, 21 bp, synthetic construct
  misc_feature 1..21: note = Target B2M Sequence complement
  source 1..21: mol_type = other DNA
agtcaaatttcctgaattgct

SEQ ID NO: 9108 - DNA, 21 bp, synthetic construct
  misc_feature 1..21: note = Target B2M Sequence complement
  source 1..21: mol_type = other DNA
gtcaaatttcctgaattgcta

SEQ ID NO: 9109 - DNA, 21 bp, synthetic construct
  misc_feature 1..21: note = Target B2M Sequence complement
  source 1..21: mol_type = other DNA
aaatttcctgaattgctatgt

SEQ ID NO: 9110 - DNA, 21 bp, synthetic construct
  misc_feature 1..21: note = Target B2M Sequence complement
  source 1..21: mol_type = other DNA
atttcctgaattgctatgtgt

SEQ ID NO: 9111 - DNA, 21 bp, synthetic construct
  misc_feature 1..21: note = Target B2M Sequence complement
  source 1..21: mol_type = other DNA
ttcctgaattgctatgtgtct

SEQ ID NO: 9112 - DNA, 21 bp, synthetic construct
  misc_feature 1..21: note = Target B2M Sequence complement
  source 1..21: mol_type = other DNA
cctgaattgctatgtgtctgg

SEQ ID NO: 9113 - DNA, 21 bp, synthetic construct
  misc_feature 1..21: note = Target B2M Sequence complement
  source 1..21: mol_type = other DNA
ctgaattgctatgtgtctggg

SEQ ID NO: 9114 - DNA, 21 bp, synthetic construct
  misc_feature 1..21: note = Target B2M Sequence complement
  source 1..21: mol_type = other DNA
tgaattgctatgtgtctgggt

SEQ ID NO: 9115 - DNA, 21 bp, synthetic construct
  misc_feature 1..21: note = Target B2M Sequence complement
  source 1..21: mol_type = other DNA
gaattgctatgtgtctgggtt

SEQ ID NO: 9116 - DNA, 21 bp, synthetic construct
  misc_feature 1..21: note = Target B2M Sequence complement
  source 1..21: mol_type = other DNA
aattgctatgtgtctgggttt

SEQ ID NO: 9117 - DNA, 21 bp, synthetic construct
  misc_feature 1..21: note = Target B2M Sequence complement
  source 1..21: mol_type = other DNA
tatgtgtctgggtttcatcca

SEQ ID NO: 9118 - DNA, 21 bp, synthetic construct
  misc_feature 1..21: note = Target B2M Sequence complement
  source 1..21: mol_type = other DNA
atgtgtctgggtttcatccat

SEQ ID NO: 9119 - DNA, 21 bp, synthetic construct
  misc_feature 1..21: note = Target B2M Sequence complement
  source 1..21: mol_type = other DNA
gtgtctgggtttcatccatcc

SEQ ID NO: 9120 - DNA, 21 bp, synthetic construct
  misc_feature 1..21: note = Target B2M Sequence complement
  source 1..21: mol_type = other DNA
tgtctgggtttcatccatccg

SEQ ID NO: 9121 - DNA, 21 bp, synthetic construct
  misc_feature 1..21: note = Target B2M Sequence complement
  source 1..21: mol_type = other DNA
gtctgggtttcatccatccga

SEQ ID NO: 9122 - DNA, 21 bp, synthetic construct
  misc_feature 1..21: note = Target B2M Sequence complement
  source 1..21: mol_type = other DNA
tctgggtttcatccatccgac

SEQ ID NO: 9123 - DNA, 21 bp, synthetic construct
  misc_feature 1..21: note = Target B2M Sequence complement
  source 1..21: mol_type = other DNA
ctgggtttcatccatccgaca

SEQ ID NO: 9124 - DNA, 21 bp, synthetic construct
  misc_feature 1..21: note = Target B2M Sequence complement
  source 1..21: mol_type = other DNA
catccgacattgaagttgact

SEQ ID NO: 9125 - DNA, 21 bp, synthetic construct
  misc_feature 1..21: note = Target B2M Sequence complement
  source 1..21: mol_type = other DNA
acattgaagttgacttactga

SEQ ID NO: 9126 - DNA, 21 bp, synthetic construct
  misc_feature 1..21: note = Target B2M Sequence complement
  source 1..21: mol_type = other DNA
gttgacttactgaagaatgga

SEQ ID NO: 9127 - DNA, 21 bp, synthetic construct
  misc_feature 1..21: note = Target B2M Sequence complement
  source 1..21: mol_type = other DNA
ttgacttactgaagaatggag

SEQ ID NO: 9128 - DNA, 21 bp, synthetic construct
  misc_feature 1..21: note = Target B2M Sequence complement
  source 1..21: mol_type = other DNA
tgacttactgaagaatggaga

SEQ ID NO: 9129 - DNA, 21 bp, synthetic construct
  misc_feature 1..21: note = Target B2M Sequence complement
  source 1..21: mol_type = other DNA
gacttactgaagaatggagag

SEQ ID NO: 9130 - DNA, 21 bp, synthetic construct
  misc_feature 1..21: note = Target B2M Sequence complement
  source 1..21: mol_type = other DNA
acttactgaagaatggagaga

SEQ ID NO: 9131 - DNA, 21 bp, synthetic construct
  misc_feature 1..21: note = Target B2M Sequence complement
  source 1..21: mol_type = other DNA
ttactgaagaatggagagaga

SEQ ID NO: 9132 - DNA, 21 bp, synthetic construct
  misc_feature 1..21: note = Target B2M Sequence complement
  source 1..21: mol_type = other DNA
ctgaagaatggagagagaatt

SEQ ID NO: 9133 - DNA, 21 bp, synthetic construct
  misc_feature 1..21: note = Target B2M Sequence complement
  source 1..21: mol_type = other DNA
gtggagcattcagacttgtct

SEQ ID NO: 9134 - DNA, 21 bp, synthetic construct
  misc_feature 1..21: note = Target B2M Sequence complement
  source 1..21: mol_type = other DNA
cattcagacttgtctttcagc

SEQ ID NO: 9135 - DNA, 21 bp, synthetic construct
  misc_feature 1..21: note = Target B2M Sequence complement
  source 1..21: mol_type = other DNA
attcagacttgtctttcagca

SEQ ID NO: 9136 - DNA, 21 bp, synthetic construct
  misc_feature 1..21: note = Target B2M Sequence complement
  source 1..21: mol_type = other DNA
ttcagacttgtctttcagcaa

SEQ ID NO: 9137 - DNA, 21 bp, synthetic construct
  misc_feature 1..21: note = Target B2M Sequence complement
  source 1..21: mol_type = other DNA
cagacttgtctttcagcaagg

SEQ ID NO: 9138 - DNA, 21 bp, synthetic construct
  misc_feature 1..21: note = Target B2M Sequence complement
  source 1..21: mol_type = other DNA
agacttgtctttcagcaagga

SEQ ID NO: 9139 - DNA, 21 bp, synthetic construct
  misc_feature 1..21: note = Target B2M Sequence complement
  source 1..21: mol_type = other DNA
gacttgtctttcagcaaggac

SEQ ID NO: 9140 - DNA, 21 bp, synthetic construct
  misc_feature 1..21: note = Target B2M Sequence complement
  source 1..21: mol_type = other DNA
acttgtctttcagcaaggact

SEQ ID NO: 9141 - DNA, 21 bp, synthetic construct
  misc_feature 1..21: note = Target B2M Sequence complement
  source 1..21: mol_type = other DNA
cttgtctttcagcaaggactg

SEQ ID NO: 9142 - DNA, 21 bp, synthetic construct
  misc_feature 1..21: note = Target B2M Sequence complement
  source 1..21: mol_type = other DNA
ttgtctttcagcaaggactgg

SEQ ID NO: 9143 - DNA, 21 bp, synthetic construct
  misc_feature 1..21: note = Target B2M Sequence complement
  source 1..21: mol_type = other DNA
tgtctttcagcaaggactggt

SEQ ID NO: 9144 - DNA, 21 bp, synthetic construct
  misc_feature 1..21: note = Target B2M Sequence complement
  source 1..21: mol_type = other DNA
gtctttcagcaaggactggtc

SEQ ID NO: 9145 - DNA, 21 bp, synthetic construct
  misc_feature 1..21: note = Target B2M Sequence complement
  source 1..21: mol_type = other DNA
tctttcagcaaggactggtct

SEQ ID NO: 9146 - DNA, 21 bp, synthetic construct
  misc_feature 1..21: note = Target B2M Sequence complement
  source 1..21: mol_type = other DNA
aggactggtctttctatctct

SEQ ID NO: 9147 - DNA, 21 bp, synthetic construct
  misc_feature 1..21: note = Target B2M Sequence complement
  source 1..21: mol_type = other DNA
ttctatctcttgtactacact

SEQ ID NO: 9148 - DNA, 21 bp, synthetic construct
  misc_feature 1..21: note = Target B2M Sequence complement
  source 1..21: mol_type = other DNA
ctatctcttgtactacactga

SEQ ID NO: 9149 - DNA, 21 bp, synthetic construct
  misc_feature 1..21: note = Target B2M Sequence complement
  source 1..21: mol_type = other DNA
tctcttgtactacactgaatt

SEQ ID NO: 9150 - DNA, 21 bp, synthetic construct
  misc_feature 1..21: note = Target B2M Sequence complement
  source 1..21: mol_type = other DNA
ctcttgtactacactgaattc

SEQ ID NO: 9151 - DNA, 21 bp, synthetic construct
  misc_feature 1..21: note = Target B2M Sequence complement
  source 1..21: mol_type = other DNA
tcttgtactacactgaattca

SEQ ID NO: 9152 - DNA, 21 bp, synthetic construct
  misc_feature 1..21: note = Target B2M Sequence complement
  source 1..21: mol_type = other DNA
cttgtactacactgaattcac

SEQ ID NO: 9153 - DNA, 21 bp, synthetic construct
  misc_feature 1..21: note = Target B2M Sequence complement
  source 1..21: mol_type = other DNA
ttgtactacactgaattcacc

SEQ ID NO: 9154 - DNA, 21 bp, synthetic construct
  misc_feature 1..21: note = Target B2M Sequence complement
  source 1..21: mol_type = other DNA
tgtactacactgaattcaccc

SEQ ID NO: 9155 - DNA, 21 bp, synthetic construct
  misc_feature 1..21: note = Target B2M Sequence complement
  source 1..21: mol_type = other DNA
aaagatgagtatgcctgccgt

SEQ ID NO: 9156 - DNA, 21 bp, synthetic construct
  misc_feature 1..21: note = Target B2M Sequence complement
  source 1..21: mol_type = other DNA
agatgagtatgcctgccgtgt

SEQ ID NO: 9157 - DNA, 21 bp, synthetic construct
  misc_feature 1..21: note = Target B2M Sequence complement
  source 1..21: mol_type = other DNA
gatgagtatgcctgccgtgtg

SEQ ID NO: 9158 - DNA, 21 bp, synthetic construct
  misc_feature 1..21: note = Target B2M Sequence complement
  source 1..21: mol_type = other DNA
atgagtatgcctgccgtgtga

SEQ ID NO: 9159 - DNA, 21 bp, synthetic construct
  misc_feature 1..21: note = Target B2M Sequence complement
  source 1..21: mol_type = other DNA
gagtatgcctgccgtgtgaac

SEQ ID NO: 9160 - DNA, 21 bp, synthetic construct
  misc_feature 1..21: note = Target B2M Sequence complement
  source 1..21: mol_type = other DNA
agtatgcctgccgtgtgaacc

SEQ ID NO: 9161 - DNA, 21 bp, synthetic construct
  misc_feature 1..21: note = Target B2M Sequence complement
  source 1..21: mol_type = other DNA
gtatgcctgccgtgtgaacca

SEQ ID NO: 9162 - DNA, 21 bp, synthetic construct
  misc_feature 1..21: note = Target B2M Sequence complement
  source 1..21: mol_type = other DNA
tatgcctgccgtgtgaaccat

SEQ ID NO: 9163 - DNA, 21 bp, synthetic construct
  misc_feature 1..21: note = Target B2M Sequence complement
  source 1..21: mol_type = other DNA
atgcctgccgtgtgaaccatg

SEQ ID NO: 9164 - DNA, 21 bp, synthetic construct
  misc_feature 1..21: note = Target B2M Sequence complement
  source 1..21: mol_type = other DNA
tgcctgccgtgtgaaccatgt

SEQ ID NO: 9165 - DNA, 21 bp, synthetic construct
  misc_feature 1..21: note = Target B2M Sequence complement
  source 1..21: mol_type = other DNA
cctgccgtgtgaaccatgtga

SEQ ID NO: 9166 - DNA, 21 bp, synthetic construct
  misc_feature 1..21: note = Target B2M Sequence complement
  source 1..21: mol_type = other DNA
ctgccgtgtgaaccatgtgac

SEQ ID NO: 9167 - DNA, 21 bp, synthetic construct
  misc_feature 1..21: note = Target B2M Sequence complement
  source 1..21: mol_type = other DNA
tgccgtgtgaaccatgtgact

SEQ ID NO: 9168 - DNA, 21 bp, synthetic construct
  misc_feature 1..21: note = Target B2M Sequence complement
  source 1..21: mol_type = other DNA
gtgaaccatgtgactttgtca

SEQ ID NO: 9169 - DNA, 21 bp, synthetic construct
  misc_feature 1..21: note = Target B2M Sequence complement
  source 1..21: mol_type = other DNA
gaaccatgtgactttgtcaca

SEQ ID NO: 9170 - DNA, 21 bp, synthetic construct
  misc_feature 1..21: note = Target B2M Sequence complement
  source 1..21: mol_type = other DNA
accatgtgactttgtcacagc

SEQ ID NO: 9171 - DNA, 21 bp, synthetic construct
  misc_feature 1..21: note = Target B2M Sequence complement
  source 1..21: mol_type = other DNA
ccatgtgactttgtcacagcc

SEQ ID NO: 9172 - DNA, 21 bp, synthetic construct
  misc_feature 1..21: note = Target B2M Sequence complement
  source 1..21: mol_type = other DNA
catgtgactttgtcacagccc

SEQ ID NO: 9173 - DNA, 21 bp, synthetic construct
  misc_feature 1..21: note = Target B2M Sequence complement
  source 1..21: mol_type = other DNA
atgtgactttgtcacagccca

SEQ ID NO: 9174 - DNA, 21 bp, synthetic construct
  misc_feature 1..21: note = Target B2M Sequence complement
  source 1..21: mol_type = other DNA
tgtgactttgtcacagcccaa

SEQ ID NO: 9175 - DNA, 21 bp, synthetic construct
  misc_feature 1..21: note = Target B2M Sequence complement
  source 1..21: mol_type = other DNA
gtgactttgtcacagcccaag

SEQ ID NO: 9176 - DNA, 21 bp, synthetic construct
  misc_feature 1..21: note = Target B2M Sequence complement
  source 1..21: mol_type = other DNA
tgactttgtcacagcccaaga

SEQ ID NO: 9177 - DNA, 21 bp, synthetic construct
  misc_feature 1..21: note = Target B2M Sequence complement
  source 1..21: mol_type = other DNA
cagcccaagatagttaagtgg

SEQ ID NO: 9178 - DNA, 21 bp, synthetic construct
  misc_feature 1..21: note = Target B2M Sequence complement
  source 1..21: mol_type = other DNA
agcccaagatagttaagtggg

SEQ ID NO: 9179 - DNA, 21 bp, synthetic construct
  misc_feature 1..21: note = Target B2M Sequence complement
  source 1..21: mol_type = other DNA
gcccaagatagttaagtggga

SEQ ID NO: 9180 - DNA, 21 bp, synthetic construct
  misc_feature 1..21: note = Target B2M Sequence complement
  source 1..21: mol_type = other DNA
ccaagatagttaagtgggatc

SEQ ID NO: 9181 - DNA, 21 bp, synthetic construct
  misc_feature 1..21: note = Target B2M Sequence complement
  source 1..21: mol_type = other DNA
caagatagttaagtgggatcg

SEQ ID NO: 9182 - DNA, 21 bp, synthetic construct
  misc_feature 1..21: note = Target B2M Sequence complement
  source 1..21: mol_type = other DNA
aagatagttaagtgggatcga

SEQ ID NO: 9183 - DNA, 21 bp, synthetic construct
  misc_feature 1..21: note = Target B2M Sequence complement
  source 1..21: mol_type = other DNA
agatagttaagtgggatcgag

SEQ ID NO: 9184 - DNA, 21 bp, synthetic construct
  misc_feature 1..21: note = Target B2M Sequence complement
  source 1..21: mol_type = other DNA
gatagttaagtgggatcgaga

SEQ ID NO: 9185 - DNA, 21 bp, synthetic construct
  misc_feature 1..21: note = Target B2M Sequence complement
  source 1..21: mol_type = other DNA
atagttaagtgggatcgagac

SEQ ID NO: 9186 - DNA, 21 bp, synthetic construct
  misc_feature 1..21: note = Target B2M Sequence complement
  source 1..21: mol_type = other DNA
tagttaagtgggatcgagaca

SEQ ID NO: 9187 - DNA, 21 bp, synthetic construct
  misc_feature 1..21: note = Target B2M Sequence complement
  source 1..21: mol_type = other DNA
gttaagtgggatcgagacatg

SEQ ID NO: 9188 - DNA, 21 bp, synthetic construct
  misc_feature 1..21: note = Target B2M Sequence complement
  source 1..21: mol_type = other DNA
aagtgggatcgagacatgtaa

SEQ ID NO: 9189 - DNA, 21 bp, synthetic construct
  misc_feature 1..21: note = Target B2M Sequence complement
  source 1..21: mol_type = other DNA
gtgggatcgagacatgtaagc

SEQ ID NO: 9190 - DNA, 21 bp, synthetic construct
  misc_feature 1..21: note = Target B2M Sequence complement
  source 1..21: mol_type = other DNA
tgggatcgagacatgtaagca

SEQ ID NO: 9191 - DNA, 21 bp, synthetic construct
  misc_feature 1..21: note = Target B2M Sequence complement
  source 1..21: mol_type = other DNA
gggatcgagacatgtaagcag

SEQ ID NO: 9192 - DNA, 21 bp, synthetic construct
  misc_feature 1..21: note = Target B2M Sequence complement
  source 1..21: mol_type = other DNA
ggatcgagacatgtaagcagc

SEQ ID NO: 9193 - DNA, 21 bp, synthetic construct
  misc_feature 1..21: note = Target B2M Sequence complement
  source 1..21: mol_type = other DNA
gatcgagacatgtaagcagca

SEQ ID NO: 9194 - DNA, 21 bp, synthetic construct
  misc_feature 1..21: note = Target B2M Sequence complement
  source 1..21: mol_type = other DNA
atcgagacatgtaagcagcat

SEQ ID NO: 9195 - DNA, 21 bp, synthetic construct
  misc_feature 1..21: note = Target B2M Sequence complement
  source 1..21: mol_type = other DNA
tcgagacatgtaagcagcatc

SEQ ID NO: 9196 - DNA, 21 bp, synthetic construct
  misc_feature 1..21: note = Target B2M Sequence complement
  source 1..21: mol_type = other DNA
cgagacatgtaagcagcatca

SEQ ID NO: 9197 - DNA, 21 bp, synthetic construct
  misc_feature 1..21: note = Target B2M Sequence complement
  source 1..21: mol_type = other DNA
gacatgtaagcagcatcatgg

SEQ ID NO: 9198 - DNA, 21 bp, synthetic construct
  misc_feature 1..21: note = Target B2M Sequence complement
  source 1..21: mol_type = other DNA
acatgtaagcagcatcatgga

SEQ ID NO: 9199 - DNA, 21 bp, synthetic construct
  misc_feature 1..21: note = Target B2M Sequence complement
  source 1..21: mol_type = other DNA
catgtaagcagcatcatggag

SEQ ID NO: 9200 - DNA, 21 bp, synthetic construct
  misc_feature 1..21: note = Target B2M Sequence complement
  source 1..21: mol_type = other DNA
atgtaagcagcatcatggagg

SEQ ID NO: 9201 - DNA, 21 bp, synthetic construct
  misc_feature 1..21: note = Target B2M Sequence complement
  source 1..21: mol_type = other DNA
tgtaagcagcatcatggaggt

SEQ ID NO: 9202 - DNA, 21 bp, synthetic construct
  misc_feature 1..21: note = Target B2M Sequence complement
  source 1..21: mol_type = other DNA
gtaagcagcatcatggaggtt

SEQ ID NO: 9203 - DNA, 21 bp, synthetic construct
  misc_feature 1..21: note = Target B2M Sequence complement
  source 1..21: mol_type = other DNA
atcatggaggtttgaagatgc

SEQ ID NO: 9204 - DNA, 21 bp, synthetic construct
  misc_feature 1..21: note = Target B2M Sequence complement
  source 1..21: mol_type = other DNA
tcatggaggtttgaagatgcc

SEQ ID NO: 9205 - DNA, 21 bp, synthetic construct
  misc_feature 1..21: note = Target B2M Sequence complement
  source 1..21: mol_type = other DNA
catggaggtttgaagatgccg

SEQ ID NO: 9206 - DNA, 21 bp, synthetic construct
  misc_feature 1..21: note = Target B2M Sequence complement
  source 1..21: mol_type = other DNA
atggaggtttgaagatgccgc

SEQ ID NO: 9207 - DNA, 21 bp, synthetic construct
  misc_feature 1..21: note = Target B2M Sequence complement
  source 1..21: mol_type = other DNA
tggaggtttgaagatgccgca

SEQ ID NO: 9208 - DNA, 21 bp, synthetic construct
  misc_feature 1..21: note = Target B2M Sequence complement
  source 1..21: mol_type = other DNA
ggaggtttgaagatgccgcat

SEQ ID NO: 9209 - DNA, 21 bp, synthetic construct
  misc_feature 1..21: note = Target B2M Sequence complement
  source 1..21: mol_type = other DNA
gaggtttgaagatgccgcatt

SEQ ID NO: 9210 - DNA, 21 bp, synthetic construct
  misc_feature 1..21: note = Target B2M Sequence complement
  source 1..21: mol_type = other DNA
tttgaagatgccgcatttgga

SEQ ID NO: 9211 - DNA, 21 bp, synthetic construct
  misc_feature 1..21: note = Target B2M Sequence complement
  source 1..21: mol_type = other DNA
ttgaagatgccgcatttggat

SEQ ID NO: 9212 - DNA, 21 bp, synthetic construct
  misc_feature 1..21: note = Target B2M Sequence complement
  source 1..21: mol_type = other DNA
agatgccgcatttggattgga

SEQ ID NO: 9213 - DNA, 21 bp, synthetic construct
  misc_feature 1..21: note = Target B2M Sequence complement
  source 1..21: mol_type = other DNA
gatgccgcatttggattggat

SEQ ID NO: 9214 - DNA, 21 bp, synthetic construct
  misc_feature 1..21: note = Target B2M Sequence complement
  source 1..21: mol_type = other DNA
atgccgcatttggattggatg

SEQ ID NO: 9215 - DNA, 21 bp, synthetic construct
  misc_feature 1..21: note = Target B2M Sequence complement
  source 1..21: mol_type = other DNA
tgccgcatttggattggatga

SEQ ID NO: 9216 - DNA, 21 bp, synthetic construct
  misc_feature 1..21: note = Target B2M Sequence complement
  source 1..21: mol_type = other DNA
cgcatttggattggatgaatt

SEQ ID NO: 9217 - DNA, 21 bp, synthetic construct
  misc_feature 1..21: note = Target B2M Sequence complement
  source 1..21: mol_type = other DNA
gcatttggattggatgaattc

SEQ ID NO: 9218 - DNA, 21 bp, synthetic construct
  misc_feature 1..21: note = Target B2M Sequence complement
  source 1..21: mol_type = other DNA
catttggattggatgaattcc

SEQ ID NO: 9219 - DNA, 21 bp, synthetic construct
  misc_feature 1..21: note = Target B2M Sequence complement
  source 1..21: mol_type = other DNA
atttggattggatgaattcca

SEQ ID NO: 9220 - DNA, 21 bp, synthetic construct
  misc_feature 1..21: note = Target B2M Sequence complement
  source 1..21: mol_type = other DNA
tttggattggatgaattccaa

SEQ ID NO: 9221 - DNA, 21 bp, synthetic construct
  misc_feature 1..21: note = Target B2M Sequence complement
  source 1..21: mol_type = other DNA
ttggattggatgaattccaaa

SEQ ID NO: 9222 - DNA, 21 bp, synthetic construct
  misc_feature 1..21: note = Target B2M Sequence complement
  source 1..21: mol_type = other DNA
tggattggatgaattccaaat

SEQ ID NO: 9223 - DNA, 21 bp, synthetic construct
  misc_feature 1..21: note = Target B2M Sequence complement
  source 1..21: mol_type = other DNA
ggattggatgaattccaaatt

SEQ ID NO: 9224 - DNA, 21 bp, synthetic construct
  misc_feature 1..21: note = Target B2M Sequence complement
  source 1..21: mol_type = other DNA
gattggatgaattccaaattc

SEQ ID NO: 9225 - DNA, 21 bp, synthetic construct
  misc_feature 1..21: note = Target B2M Sequence complement
  source 1..21: mol_type = other DNA
attggatgaattccaaattct

SEQ ID NO: 9226 - DNA, 21 bp, synthetic construct
  misc_feature 1..21: note = Target B2M Sequence complement
  source 1..21: mol_type = other DNA
ttggatgaattccaaattctg

SEQ ID NO: 9227 - DNA, 21 bp, synthetic construct
  misc_feature 1..21: note = Target B2M Sequence complement
  source 1..21: mol_type = other DNA
tggatgaattccaaattctgc

SEQ ID NO: 9228 - DNA, 21 bp, synthetic construct
  misc_feature 1..21: note = Target B2M Sequence complement
  source 1..21: mol_type = other DNA
ggatgaattccaaattctgct

SEQ ID NO: 9229 - DNA, 21 bp, synthetic construct
  misc_feature 1..21: note = Target B2M Sequence complement
  source 1..21: mol_type = other DNA
gatgaattccaaattctgctt

SEQ ID NO: 9230 - DNA, 21 bp, synthetic construct
  misc_feature 1..21: note = Target B2M Sequence complement
  source 1..21: mol_type = other DNA
atgaattccaaattctgcttg

SEQ ID NO: 9231 - DNA, 21 bp, synthetic construct
  misc_feature 1..21: note = Target B2M Sequence complement
  source 1..21: mol_type = other DNA
tgaattccaaattctgcttgc

SEQ ID NO: 9232 - DNA, 21 bp, synthetic construct
  misc_feature 1..21: note = Target B2M Sequence complement
  source 1..21: mol_type = other DNA
gaattccaaattctgcttgct

SEQ ID NO: 9233 - DNA, 21 bp, synthetic construct
  misc_feature 1..21: note = Target B2M Sequence complement
  source 1..21: mol_type = other DNA
aattccaaattctgcttgctt

SEQ ID NO: 9234 - DNA, 21 bp, synthetic construct
  misc_feature 1..21: note = Target B2M Sequence complement
  source 1..21: mol_type = other DNA
attccaaattctgcttgcttg

SEQ ID NO: 9235 - DNA, 21 bp, synthetic construct
  misc_feature 1..21: note = Target B2M Sequence complement
  source 1..21: mol_type = other DNA
ttccaaattctgcttgcttgc

SEQ ID NO: 9236 - DNA, 21 bp, synthetic construct
  misc_feature 1..21: note = Target B2M Sequence complement
  source 1..21: mol_type = other DNA
tccaaattctgcttgcttgct

SEQ ID NO: 9237 - DNA, 21 bp, synthetic construct
  misc_feature 1..21: note = Target B2M Sequence complement
  source 1..21: mol_type = other DNA
ccaaattctgcttgcttgctt

SEQ ID NO: 9238 - DNA, 21 bp, synthetic construct
  misc_feature 1..21: note = Target B2M Sequence complement
  source 1..21: mol_type = other DNA
atatgcttatacacttacact

SEQ ID NO: 9239 - DNA, 21 bp, synthetic construct
  misc_feature 1..21: note = Target B2M Sequence complement
  source 1..21: mol_type = other DNA
tatacacttacactttatgca

SEQ ID NO: 9240 - DNA, 21 bp, synthetic construct
  misc_feature 1..21: note = Target B2M Sequence complement
  source 1..21: mol_type = other DNA
atacacttacactttatgcac

SEQ ID NO: 9241 - DNA, 21 bp, synthetic construct
  misc_feature 1..21: note = Target B2M Sequence complement
  source 1..21: mol_type = other DNA
tacacttacactttatgcaca

SEQ ID NO: 9242 - DNA, 21 bp, synthetic construct
  misc_feature 1..21: note = Target B2M Sequence complement
  source 1..21: mol_type = other DNA
acacttacactttatgcacaa

SEQ ID NO: 9243 - DNA, 21 bp, synthetic construct
  misc_feature 1..21: note = Target B2M Sequence complement
  source 1..21: mol_type = other DNA
aataatgttaacatggacatg

SEQ ID NO: 9244 - DNA, 21 bp, synthetic construct
  misc_feature 1..21: note = Target B2M Sequence complement
  source 1..21: mol_type = other DNA
aatgttaacatggacatgatc

SEQ ID NO: 9245 - DNA, 21 bp, synthetic construct
  misc_feature 1..21: note = Target B2M Sequence complement
  source 1..21: mol_type = other DNA
aacatggacatgatcttcttt

SEQ ID NO: 9246 - DNA, 21 bp, synthetic construct
  misc_feature 1..21: note = Target B2M Sequence complement
  source 1..21: mol_type = other DNA
ttataattctactttgagtgc

SEQ ID NO: 9247 - DNA, 21 bp, synthetic construct
  misc_feature 1..21: note = Target B2M Sequence complement
  source 1..21: mol_type = other DNA
tataattctactttgagtgct

SEQ ID NO: 9248 - DNA, 21 bp, synthetic construct
  misc_feature 1..21: note = Target B2M Sequence complement
  source 1..21: mol_type = other DNA
ataattctactttgagtgctg

SEQ ID NO: 9249 - DNA, 21 bp, synthetic construct
  misc_feature 1..21: note = Target B2M Sequence complement
  source 1..21: mol_type = other DNA
taattctactttgagtgctgt

SEQ ID NO: 9250 - DNA, 21 bp, synthetic construct
  misc_feature 1..21: note = Target B2M Sequence complement
  source 1..21: mol_type = other DNA
aattctactttgagtgctgtc

SEQ ID NO: 9251 - DNA, 21 bp, synthetic construct
  misc_feature 1..21: note = Target B2M Sequence complement
  source 1..21: mol_type = other DNA
attctactttgagtgctgtct

SEQ ID NO: 9252 - DNA, 21 bp, synthetic construct
  misc_feature 1..21: note = Target B2M Sequence complement
  source 1..21: mol_type = other DNA
ttctactttgagtgctgtctc

SEQ ID NO: 9253 - DNA, 21 bp, synthetic construct
  misc_feature 1..21: note = Target B2M Sequence complement
  source 1..21: mol_type = other DNA
tctactttgagtgctgtctcc

SEQ ID NO: 9254 - DNA, 21 bp, synthetic construct
  misc_feature 1..21: note = Target B2M Sequence complement
  source 1..21: mol_type = other DNA
ctactttgagtgctgtctcca

SEQ ID NO: 9255 - DNA, 21 bp, synthetic construct
  misc_feature 1..21: note = Target B2M Sequence complement
  source 1..21: mol_type = other DNA
tactttgagtgctgtctccat

SEQ ID NO: 9256 - DNA, 21 bp, synthetic construct
  misc_feature 1..21: note = Target B2M Sequence complement
  source 1..21: mol_type = other DNA
actttgagtgctgtctccatg

SEQ ID NO: 9257 - DNA, 21 bp, synthetic construct
  misc_feature 1..21: note = Target B2M Sequence complement
  source 1..21: mol_type = other DNA
ctttgagtgctgtctccatgt

SEQ ID NO: 9258 - DNA, 21 bp, synthetic construct
  misc_feature 1..21: note = Target B2M Sequence complement
  source 1..21: mol_type = other DNA
ctccatgtttgatgtatctga

SEQ ID NO: 9259 - DNA, 21 bp, synthetic construct
  misc_feature 1..21: note = Target B2M Sequence complement
  source 1..21: mol_type = other DNA
tccatgtttgatgtatctgag

SEQ ID NO: 9260 - DNA, 21 bp, synthetic construct
  misc_feature 1..21: note = Target B2M Sequence complement
  source 1..21: mol_type = other DNA
ccatgtttgatgtatctgagc

SEQ ID NO: 9261 - DNA, 21 bp, synthetic construct
  misc_feature 1..21: note = Target B2M Sequence complement
  source 1..21: mol_type = other DNA
catgtttgatgtatctgagca

SEQ ID NO: 9262 - DNA, 21 bp, synthetic construct
  misc_feature 1..21: note = Target B2M Sequence complement
  source 1..21: mol_type = other DNA
atgtttgatgtatctgagcag

SEQ ID NO: 9263 - DNA, 21 bp, synthetic construct
  misc_feature 1..21: note = Target B2M Sequence complement
  source 1..21: mol_type = other DNA
tgtttgatgtatctgagcagg

SEQ ID NO: 9264 - DNA, 21 bp, synthetic construct
  misc_feature 1..21: note = Target B2M Sequence complement
  source 1..21: mol_type = other DNA
gtttgatgtatctgagcaggt

SEQ ID NO: 9265 - DNA, 21 bp, synthetic construct
  misc_feature 1..21: note = Target B2M Sequence complement
  source 1..21: mol_type = other DNA
tttgatgtatctgagcaggtt

SEQ ID NO: 9266 - DNA, 21 bp, synthetic construct
  misc_feature 1..21: note = Target B2M Sequence complement
  source 1..21: mol_type = other DNA
ttgatgtatctgagcaggttg

SEQ ID NO: 9267 - DNA, 21 bp, synthetic construct
  misc_feature 1..21: note = Target B2M Sequence complement
  source 1..21: mol_type = other DNA
tgatgtatctgagcaggttgc

SEQ ID NO: 9268 - DNA, 21 bp, synthetic construct
  misc_feature 1..21: note = Target B2M Sequence complement
  source 1..21: mol_type = other DNA
gatgtatctgagcaggttgct

SEQ ID NO: 9269 - DNA, 21 bp, synthetic construct
  misc_feature 1..21: note = Target B2M Sequence complement
  source 1..21: mol_type = other DNA
atgtatctgagcaggttgctc

SEQ ID NO: 9270 - DNA, 21 bp, synthetic construct
  misc_feature 1..21: note = Target B2M Sequence complement
  source 1..21: mol_type = other DNA
tgtatctgagcaggttgctcc

SEQ ID NO: 9271 - DNA, 21 bp, synthetic construct
  misc_feature 1..21: note = Target B2M Sequence complement
  source 1..21: mol_type = other DNA
gtatctgagcaggttgctcca

SEQ ID NO: 9272 - DNA, 21 bp, synthetic construct
  misc_feature 1..21: note = Target B2M Sequence complement
  source 1..21: mol_type = other DNA
tatctgagcaggttgctccac

SEQ ID NO: 9273 - DNA, 21 bp, synthetic construct
  misc_feature 1..21: note = Target B2M Sequence complement
  source 1..21: mol_type = other DNA
atctgagcaggttgctccaca

SEQ ID NO: 9274 - DNA, 21 bp, synthetic construct
  misc_feature 1..21: note = Target B2M Sequence complement
  source 1..21: mol_type = other DNA
tctgagcaggttgctccacag

SEQ ID NO: 9275 - DNA, 21 bp, synthetic construct
  misc_feature 1..21: note = Target B2M Sequence complement
  source 1..21: mol_type = other DNA
tgagcaggttgctccacaggt

SEQ ID NO: 9276 - DNA, 21 bp, synthetic construct
  misc_feature 1..21: note = Target B2M Sequence complement
  source 1..21: mol_type = other DNA
gagcaggttgctccacaggta

SEQ ID NO: 9277 - DNA, 21 bp, synthetic construct
  misc_feature 1..21: note = Target B2M Sequence complement
  source 1..21: mol_type = other DNA
agcaggttgctccacaggtag

SEQ ID NO: 9278 - DNA, 21 bp, synthetic construct
  misc_feature 1..21: note = Target B2M Sequence complement
  source 1..21: mol_type = other DNA
caggttgctccacaggtagct

SEQ ID NO: 9279 - DNA, 21 bp, synthetic construct
  misc_feature 1..21: note = Target B2M Sequence complement
  source 1..21: mol_type = other DNA
aggttgctccacaggtagctc

SEQ ID NO: 9280 - DNA, 21 bp, synthetic construct
  misc_feature 1..21: note = Target B2M Sequence complement
  source 1..21: mol_type = other DNA
ttgctccacaggtagctctag

SEQ ID NO: 9281 - DNA, 21 bp, synthetic construct
  misc_feature 1..21: note = Target B2M Sequence complement
  source 1..21: mol_type = other DNA
tgctccacaggtagctctagg

SEQ ID NO: 9282 - DNA, 21 bp, synthetic construct
  misc_feature 1..21: note = Target B2M Sequence complement
  source 1..21: mol_type = other DNA
ctccacaggtagctctaggag

SEQ ID NO: 9283 - DNA, 21 bp, synthetic construct
  misc_feature 1..21: note = Target B2M Sequence complement
  source 1..21: mol_type = other DNA
tccacaggtagctctaggagg

SEQ ID NO: 9284 - DNA, 21 bp, synthetic construct
  misc_feature 1..21: note = Target B2M Sequence complement
  source 1..21: mol_type = other DNA
acaggtagctctaggagggct

SEQ ID NO: 9285 - DNA, 21 bp, synthetic construct
  misc_feature 1..21: note = Target B2M Sequence complement
  source 1..21: mol_type = other DNA
tagctctaggagggctggcaa

SEQ ID NO: 9286 - DNA, 21 bp, synthetic construct
  misc_feature 1..21: note = Target B2M Sequence complement
  source 1..21: mol_type = other DNA
ctctaggagggctggcaactt

SEQ ID NO: 9287 - DNA, 21 bp, synthetic construct
  misc_feature 1..21: note = Target B2M Sequence complement
  source 1..21: mol_type = other DNA
ctaggagggctggcaacttag

SEQ ID NO: 9288 - DNA, 21 bp, synthetic construct
  misc_feature 1..21: note = Target B2M Sequence complement
  source 1..21: mol_type = other DNA
aggagggctggcaacttagag

SEQ ID NO: 9289 - DNA, 21 bp, synthetic construct
  misc_feature 1..21: note = Target B2M Sequence complement
  source 1..21: mol_type = other DNA
gagggctggcaacttagaggt

SEQ ID NO: 9290 - DNA, 21 bp, synthetic construct
  misc_feature 1..21: note = Target B2M Sequence complement
  source 1..21: mol_type = other DNA
agggctggcaacttagaggtg

SEQ ID NO: 9291 - DNA, 21 bp, synthetic construct
  misc_feature 1..21: note = Target B2M Sequence complement
  source 1..21: mol_type = other DNA
agcagagaattctcttatcca

SEQ ID NO: 9292 - DNA, 21 bp, synthetic construct
  misc_feature 1..21: note = Target B2M Sequence complement
  source 1..21: mol_type = other DNA
gcagagaattctcttatccaa

SEQ ID NO: 9293 - DNA, 21 bp, synthetic construct
  misc_feature 1..21: note = Target B2M Sequence complement
  source 1..21: mol_type = other DNA
cagagaattctcttatccaac

SEQ ID NO: 9294 - DNA, 21 bp, synthetic construct
  misc_feature 1..21: note = Target B2M Sequence complement
  source 1..21: mol_type = other DNA
agagaattctcttatccaaca

SEQ ID NO: 9295 - DNA, 21 bp, synthetic construct
  misc_feature 1..21: note = Target B2M Sequence complement
  source 1..21: mol_type = other DNA
agaattctcttatccaacatc

SEQ ID NO: 9296 - DNA, 21 bp, synthetic construct
  misc_feature 1..21: note = Target B2M Sequence complement
  source 1..21: mol_type = other DNA
tatccaacatcaacatcttgg

SEQ ID NO: 9297 - DNA, 21 bp, synthetic construct
  misc_feature 1..21: note = Target B2M Sequence complement
  source 1..21: mol_type = other DNA
atccaacatcaacatcttggt

SEQ ID NO: 9298 - DNA, 21 bp, synthetic construct
  misc_feature 1..21: note = Target B2M Sequence complement
  source 1..21: mol_type = other DNA
tccaacatcaacatcttggtc

SEQ ID NO: 9299 - DNA, 21 bp, synthetic construct
  misc_feature 1..21: note = Target B2M Sequence complement
  source 1..21: mol_type = other DNA
ccaacatcaacatcttggtca

SEQ ID NO: 9300 - DNA, 21 bp, synthetic construct
  misc_feature 1..21: note = Target B2M Sequence complement
  source 1..21: mol_type = other DNA
caacatcaacatcttggtcag

SEQ ID NO: 9301 - DNA, 21 bp, synthetic construct
  misc_feature 1..21: note = Target B2M Sequence complement
  source 1..21: mol_type = other DNA
atcttggtcagatttgaactc

SEQ ID NO: 9302 - DNA, 21 bp, synthetic construct
  misc_feature 1..21: note = Target B2M Sequence complement
  source 1..21: mol_type = other DNA
tcttggtcagatttgaactct

SEQ ID NO: 9303 - DNA, 21 bp, synthetic construct
  misc_feature 1..21: note = Target B2M Sequence complement
  source 1..21: mol_type = other DNA
ttggtcagatttgaactcttc

SEQ ID NO: 9304 - DNA, 21 bp, synthetic construct
  misc_feature 1..21: note = Target B2M Sequence complement
  source 1..21: mol_type = other DNA
cagatttgaactcttcaatct

SEQ ID NO: 9305 - DNA, 21 bp, synthetic construct
  misc_feature 1..21: note = Target B2M Sequence complement
  source 1..21: mol_type = other DNA
agatttgaactcttcaatctc

SEQ ID NO: 9306 - DNA, 21 bp, synthetic construct
  misc_feature 1..21: note = Target B2M Sequence complement
  source 1..21: mol_type = other DNA
gatttgaactcttcaatctct

SEQ ID NO: 9307 - DNA, 21 bp, synthetic construct
  misc_feature 1..21: note = Target B2M Sequence complement
  source 1..21: mol_type = other DNA
tttgaactcttcaatctcttg

SEQ ID NO: 9308 - DNA, 21 bp, synthetic construct
  misc_feature 1..21: note = Target B2M Sequence complement
  source 1..21: mol_type = other DNA
ttgaactcttcaatctcttgc

SEQ ID NO: 9309 - DNA, 21 bp, synthetic construct
  misc_feature 1..21: note = Target B2M Sequence complement
  source 1..21: mol_type = other DNA
tgaactcttcaatctcttgca

SEQ ID NO: 9310 - DNA, 21 bp, synthetic construct
  misc_feature 1..21: note = Target B2M Sequence complement
  source 1..21: mol_type = other DNA
gaactcttcaatctcttgcac

SEQ ID NO: 9311 - DNA, 21 bp, synthetic construct
  misc_feature 1..21: note = Target B2M Sequence complement
  source 1..21: mol_type = other DNA
actcttcaatctcttgcactc

SEQ ID NO: 9312 - DNA, 21 bp, synthetic construct
  misc_feature 1..21: note = Target B2M Sequence complement
  source 1..21: mol_type = other DNA
ctcttcaatctcttgcactca

SEQ ID NO: 9313 - DNA, 21 bp, synthetic construct
  misc_feature 1..21: note = Target B2M Sequence complement
  source 1..21: mol_type = other DNA
tcaatctcttgcactcaaagc

SEQ ID NO: 9314 - DNA, 21 bp, synthetic construct
  misc_feature 1..21: note = Target B2M Sequence complement
  source 1..21: mol_type = other DNA
caatctcttgcactcaaagct

SEQ ID NO: 9315 - DNA, 21 bp, synthetic construct
  misc_feature 1..21: note = Target B2M Sequence complement
  source 1..21: mol_type = other DNA
aatctcttgcactcaaagctt

SEQ ID NO: 9316 - DNA, 21 bp, synthetic construct
  misc_feature 1..21: note = Target B2M Sequence complement
  source 1..21: mol_type = other DNA
atctcttgcactcaaagcttg

SEQ ID NO: 9317 - DNA, 21 bp, synthetic construct
  misc_feature 1..21: note = Target B2M Sequence complement
  source 1..21: mol_type = other DNA
tctcttgcactcaaagcttgt

SEQ ID NO: 9318 - DNA, 21 bp, synthetic construct
  misc_feature 1..21: note = Target B2M Sequence complement
  source 1..21: mol_type = other DNA
gcttgttaagatagttaagcg

SEQ ID NO: 9319 - DNA, 21 bp, synthetic construct
  misc_feature 1..21: note = Target B2M Sequence complement
  source 1..21: mol_type = other DNA
cttgttaagatagttaagcgt

SEQ ID NO: 9320 - DNA, 21 bp, synthetic construct
  misc_feature 1..21: note = Target B2M Sequence complement
  source 1..21: mol_type = other DNA
ttgttaagatagttaagcgtg

SEQ ID NO: 9321 - DNA, 21 bp, synthetic construct
  misc_feature 1..21: note = Target B2M Sequence complement
  source 1..21: mol_type = other DNA
tgttaagatagttaagcgtgc

SEQ ID NO: 9322 - DNA, 21 bp, synthetic construct
  misc_feature 1..21: note = Target B2M Sequence complement
  source 1..21: mol_type = other DNA
gttaagatagttaagcgtgca

SEQ ID NO: 9323 - DNA, 21 bp, synthetic construct
  misc_feature 1..21: note = Target B2M Sequence complement
  source 1..21: mol_type = other DNA
ttaagatagttaagcgtgcat

SEQ ID NO: 9324 - DNA, 21 bp, synthetic construct
  misc_feature 1..21: note = Target B2M Sequence complement
  source 1..21: mol_type = other DNA
gttaagcgtgcataagttaac

SEQ ID NO: 9325 - DNA, 21 bp, synthetic construct
  misc_feature 1..21: note = Target B2M Sequence complement
  source 1..21: mol_type = other DNA
agcgtgcataagttaacttcc

SEQ ID NO: 9326 - DNA, 21 bp, synthetic construct
  misc_feature 1..21: note = Target B2M Sequence complement
  source 1..21: mol_type = other DNA
gcgtgcataagttaacttcca

SEQ ID NO: 9327 - DNA, 21 bp, synthetic construct
  misc_feature 1..21: note = Target B2M Sequence complement
  source 1..21: mol_type = other DNA
cgtgcataagttaacttccaa

SEQ ID NO: 9328 - DNA, 21 bp, synthetic construct
  misc_feature 1..21: note = Target B2M Sequence complement
  source 1..21: mol_type = other DNA
acttccaatttacatactctg

SEQ ID NO: 9329 - DNA, 21 bp, synthetic construct
  misc_feature 1..21: note = Target B2M Sequence complement
  source 1..21: mol_type = other DNA
cttccaatttacatactctgc

SEQ ID NO: 9330 - DNA, 21 bp, synthetic construct
  misc_feature 1..21: note = Target B2M Sequence complement
  source 1..21: mol_type = other DNA
ttccaatttacatactctgct

SEQ ID NO: 9331 - DNA, 21 bp, synthetic construct
  misc_feature 1..21: note = Target B2M Sequence complement
  source 1..21: mol_type = other DNA
tccaatttacatactctgctt

SEQ ID NO: 9332 - DNA, 21 bp, synthetic construct
  misc_feature 1..21: note = Target B2M Sequence complement
  source 1..21: mol_type = other DNA
ttacatactctgcttagaatt

SEQ ID NO: 9333 - DNA, 21 bp, synthetic construct
  misc_feature 1..21: note = Target B2M Sequence complement
  source 1..21: mol_type = other DNA
atactctgcttagaatttggg

SEQ ID NO: 9334 - DNA, 21 bp, synthetic construct
  misc_feature 1..21: note = Target B2M Sequence complement
  source 1..21: mol_type = other DNA
tataattgacaggattattgg

SEQ ID NO: 9335 - DNA, 21 bp, synthetic construct
  misc_feature 1..21: note = Target B2M Sequence complement
  source 1..21: mol_type = other DNA
ataattgacaggattattgga

SEQ ID NO: 9336 - DNA, 21 bp, synthetic construct
  misc_feature 1..21: note = Target B2M Sequence complement
  source 1..21: mol_type = other DNA
taattgacaggattattggaa

SEQ ID NO: 9337 - DNA, 21 bp, synthetic construct
  misc_feature 1..21: note = Target B2M Sequence complement
  source 1..21: mol_type = other DNA
atacatttgataaagtaaggc

SEQ ID NO: 9338 - DNA, 21 bp, synthetic construct
  misc_feature 1..21: note = Target B2M Sequence complement
  source 1..21: mol_type = other DNA
tacatttgataaagtaaggca

SEQ ID NO: 9339 - DNA, 21 bp, synthetic construct
  misc_feature 1..21: note = Target B2M Sequence complement
  source 1..21: mol_type = other DNA
acatttgataaagtaaggcat

SEQ ID NO: 9340 - DNA, 21 bp, synthetic construct
  misc_feature 1..21: note = Target B2M Sequence complement
  source 1..21: mol_type = other DNA
catttgataaagtaaggcatg

SEQ ID NO: 9341 - DNA, 21 bp, synthetic construct
  misc_feature 1..21: note = Target B2M Sequence complement
  source 1..21: mol_type = other DNA
atttgataaagtaaggcatgg

SEQ ID NO: 9342 - DNA, 21 bp, synthetic construct
  misc_feature 1..21: note = Target B2M Sequence complement
  source 1..21: mol_type = other DNA
tttgataaagtaaggcatggt

SEQ ID NO: 9343 - DNA, 21 bp, synthetic construct
  misc_feature 1..21: note = Target B2M Sequence complement
  source 1..21: mol_type = other DNA
ttgataaagtaaggcatggtt

SEQ ID NO: 9344 - DNA, 21 bp, synthetic construct
  misc_feature 1..21: note = Target B2M Sequence complement
  source 1..21: mol_type = other DNA
tgataaagtaaggcatggttg

SEQ ID NO: 9345 - DNA, 21 bp, synthetic construct
  misc_feature 1..21: note = Target B2M Sequence complement
  source 1..21: mol_type = other DNA
gataaagtaaggcatggttgt

SEQ ID NO: 9346 - DNA, 21 bp, synthetic construct
  misc_feature 1..21: note = Target B2M Sequence complement
  source 1..21: mol_type = other DNA
ataaagtaaggcatggttgtg

SEQ ID NO: 9347 - DNA, 21 bp, synthetic construct
  misc_feature 1..21: note = Target B2M Sequence complement
  source 1..21: mol_type = other DNA
taaagtaaggcatggttgtgg

SEQ ID NO: 9348 - DNA, 21 bp, synthetic construct
  misc_feature 1..21: note = Target B2M Sequence complement
  source 1..21: mol_type = other DNA
aaagtaaggcatggttgtggt

SEQ ID NO: 9349 - DNA, 21 bp, synthetic construct
  misc_feature 1..21: note = Target B2M Sequence complement
  source 1..21: mol_type = other DNA
aagtaaggcatggttgtggtt

SEQ ID NO: 9350 - DNA, 21 bp, synthetic construct
  misc_feature 1..21: note = Target B2M Sequence complement
  source 1..21: mol_type = other DNA
gcatggttgtggttaatctgg

SEQ ID NO: 9351 - DNA, 21 bp, synthetic construct
  misc_feature 1..21: note = Target B2M Sequence complement
  source 1..21: mol_type = other DNA
catggttgtggttaatctggt

SEQ ID NO: 9352 - DNA, 21 bp, synthetic construct
  misc_feature 1..21: note = Target B2M Sequence complement
  source 1..21: mol_type = other DNA
atggttgtggttaatctggtt

SEQ ID NO: 9353 - DNA, 18 bp, synthetic construct
  misc_feature 1..18: note = Target B2M Sequence complement
  source 1..18: mol_type = other DNA
attcctgaagctgacagc

SEQ ID NO: 9354 - DNA, 18 bp, synthetic construct
  misc_feature 1..18: note = Target B2M Sequence complement
  source 1..18: mol_type = other DNA
ttcctgaagctgacagca

SEQ ID NO: 9355 - DNA, 18 bp, synthetic construct
  misc_feature 1..18: note = Target B2M Sequence complement
  source 1..18: mol_type = other DNA
tcctgaagctgacagcat

SEQ ID NO: 9356 - DNA, 18 bp, synthetic construct
  misc_feature 1..18: note = Target B2M Sequence complement
  source 1..18: mol_type = other DNA
cctgaagctgacagcatt

SEQ ID NO: 9357 - DNA, 18 bp, synthetic construct
  misc_feature 1..18: note = Target B2M Sequence complement
  source 1..18: mol_type = other DNA
ctgaagctgacagcattc

SEQ ID NO: 9358 - DNA, 18 bp, synthetic construct
  misc_feature 1..18: note = Target B2M Sequence complement
  source 1..18: mol_type = other DNA
tgaagctgacagcattcg

SEQ ID NO: 9359 - DNA, 18 bp, synthetic construct
  misc_feature 1..18: note = Target B2M Sequence complement
  source 1..18: mol_type = other DNA
gaagctgacagcattcgg

SEQ ID NO: 9360 - DNA, 18 bp, synthetic construct
  misc_feature 1..18: note = Target B2M Sequence complement
  source 1..18: mol_type = other DNA
aagctgacagcattcggg

SEQ ID NO: 9361 - DNA, 18 bp, synthetic construct
  misc_feature 1..18: note = Target B2M Sequence complement
  source 1..18: mol_type = other DNA
ttagctgtgctcgcgcta

SEQ ID NO: 9362 - DNA, 18 bp, synthetic construct
  misc_feature 1..18: note = Target B2M Sequence complement
  source 1..18: mol_type = other DNA
ctcgcgctactctctctt

SEQ ID NO: 9363 - DNA, 18 bp, synthetic construct
  misc_feature 1..18: note = Target B2M Sequence complement
  source 1..18: mol_type = other DNA
tcgcgctactctctcttt

SEQ ID NO: 9364 - DNA, 18 bp, synthetic construct
  misc_feature 1..18: note = Target B2M Sequence complement
  source 1..18: mol_type = other DNA
cgcgctactctctctttc

SEQ ID NO: 9365 - DNA, 18 bp, synthetic construct
  misc_feature 1..18: note = Target B2M Sequence complement
  source 1..18: mol_type = other DNA
gcgctactctctctttct

SEQ ID NO: 9366 - DNA, 18 bp, synthetic construct
  misc_feature 1..18: note = Target B2M Sequence complement
  source 1..18: mol_type = other DNA
cgctactctctctttctg

SEQ ID NO: 9367 - DNA, 18 bp, synthetic construct
  misc_feature 1..18: note = Target B2M Sequence complement
  source 1..18: mol_type = other DNA
gctactctctctttctgg

SEQ ID NO: 9368 - DNA, 18 bp, synthetic construct
  misc_feature 1..18: note = Target B2M Sequence complement
  source 1..18: mol_type = other DNA
ctactctctctttctggc

SEQ ID NO: 9369 - DNA, 18 bp, synthetic construct
  misc_feature 1..18: note = Target B2M Sequence complement
  source 1..18: mol_type = other DNA
tactctctctttctggcc

SEQ ID NO: 9370 - DNA, 18 bp, synthetic construct
  misc_feature 1..18: note = Target B2M Sequence complement
  source 1..18: mol_type = other DNA
actctctctttctggcct

SEQ ID NO: 9371 - DNA, 18 bp, synthetic construct
  misc_feature 1..18: note = Target B2M Sequence complement
  source 1..18: mol_type = other DNA
ctctctctttctggcctg

SEQ ID NO: 9372 - DNA, 18 bp, synthetic construct
  misc_feature 1..18: note = Target B2M Sequence complement
  source 1..18: mol_type = other DNA
tctctctttctggcctgg

SEQ ID NO: 9373 - DNA, 18 bp, synthetic construct
  misc_feature 1..18: note = Target B2M Sequence complement
  source 1..18: mol_type = other DNA
ctctctttctggcctgga

SEQ ID NO: 9374 - DNA, 18 bp, synthetic construct
  misc_feature 1..18: note = Target B2M Sequence complement
  source 1..18: mol_type = other DNA
tctctttctggcctggag

SEQ ID NO: 9375 - DNA, 18 bp, synthetic construct
  misc_feature 1..18: note = Target B2M Sequence complement
  source 1..18: mol_type = other DNA
tttctggcctggaggcta

SEQ ID NO: 9376 - DNA, 18 bp, synthetic construct
  misc_feature 1..18: note = Target B2M Sequence complement
  source 1..18: mol_type = other DNA
ttctggcctggaggctat

SEQ ID NO: 9377 - DNA, 18 bp, synthetic construct
  misc_feature 1..18: note = Target B2M Sequence complement
  source 1..18: mol_type = other DNA
tggaggctatccagcgta

SEQ ID NO: 9378 - DNA, 18 bp, synthetic construct
  misc_feature 1..18: note = Target B2M Sequence complement
  source 1..18: mol_type = other DNA
gaggctatccagcgtact

SEQ ID NO: 9379 - DNA, 18 bp, synthetic construct
  misc_feature 1..18: note = Target B2M Sequence complement
  source 1..18: mol_type = other DNA
aggctatccagcgtactc

SEQ ID NO: 9380 - DNA, 18 bp, synthetic construct
  misc_feature 1..18: note = Target B2M Sequence complement
  source 1..18: mol_type = other DNA
gctatccagcgtactcca

SEQ ID NO: 9381 - DNA, 18 bp, synthetic construct
  misc_feature 1..18: note = Target B2M Sequence complement
  source 1..18: mol_type = other DNA
ctatccagcgtactccaa

SEQ ID NO: 9382 - DNA, 18 bp, synthetic construct
  misc_feature 1..18: note = Target B2M Sequence complement
  source 1..18: mol_type = other DNA
tatccagcgtactccaaa

SEQ ID NO: 9383 - DNA, 18 bp, synthetic construct
  misc_feature 1..18: note = Target B2M Sequence complement
  source 1..18: mol_type = other DNA
atccagcgtactccaaag

SEQ ID NO: 9384 - DNA, 18 bp, synthetic construct
  misc_feature 1..18: note = Target B2M Sequence complement
  source 1..18: mol_type = other DNA
tccagcgtactccaaaga

SEQ ID NO: 9385 - DNA, 18 bp, synthetic construct
  misc_feature 1..18: note = Target B2M Sequence complement
  source 1..18: mol_type = other DNA
ccagcgtactccaaagat

SEQ ID NO: 9386 - DNA, 18 bp, synthetic construct
  misc_feature 1..18: note = Target B2M Sequence complement
  source 1..18: mol_type = other DNA
cagcgtactccaaagatt

SEQ ID NO: 9387 - DNA, 18 bp, synthetic construct
  misc_feature 1..18: note = Target B2M Sequence complement
  source 1..18: mol_type = other DNA
agcgtactccaaagattc

SEQ ID NO: 9388 - DNA, 18 bp, synthetic construct
  misc_feature 1..18: note = Target B2M Sequence complement
  source 1..18: mol_type = other DNA
gcgtactccaaagattca

SEQ ID NO: 9389 - DNA, 18 bp, synthetic construct
  misc_feature 1..18: note = Target B2M Sequence complement
  source 1..18: mol_type = other DNA
cgtactccaaagattcag

SEQ ID NO: 9390 - DNA, 18 bp, synthetic construct
  misc_feature 1..18: note = Target B2M Sequence complement
  source 1..18: mol_type = other DNA
gtactccaaagattcagg

SEQ ID NO: 9391 - DNA, 18 bp, synthetic construct
  misc_feature 1..18: note = Target B2M Sequence complement
  source 1..18: mol_type = other DNA
tactccaaagattcaggt

SEQ ID NO: 9392 - DNA, 18 bp, synthetic construct
  misc_feature 1..18: note = Target B2M Sequence complement
  source 1..18: mol_type = other DNA
actccaaagattcaggtt

SEQ ID NO: 9393 - DNA, 18 bp, synthetic construct
  misc_feature 1..18: note = Target B2M Sequence complement
  source 1..18: mol_type = other DNA
ctccaaagattcaggttt

SEQ ID NO: 9394 - DNA, 18 bp, synthetic construct
  misc_feature 1..18: note = Target B2M Sequence complement
  source 1..18: mol_type = other DNA
tccaaagattcaggttta

SEQ ID NO: 9395 - DNA, 18 bp, synthetic construct
  misc_feature 1..18: note = Target B2M Sequence complement
  source 1..18: mol_type = other DNA
ccaaagattcaggtttac

SEQ ID NO: 9396 - DNA, 18 bp, synthetic construct
  misc_feature 1..18: note = Target B2M Sequence complement
  source 1..18: mol_type = other DNA
caaagattcaggtttact

SEQ ID NO: 9397 - DNA, 18 bp, synthetic construct
  misc_feature 1..18: note = Target B2M Sequence complement
  source 1..18: mol_type = other DNA
aaagattcaggtttactc

SEQ ID NO: 9398 - DNA, 18 bp, synthetic construct
  misc_feature 1..18: note = Target B2M Sequence complement
  source 1..18: mol_type = other DNA
aagattcaggtttactca

SEQ ID NO: 9399 - DNA, 18 bp, synthetic construct
  misc_feature 1..18: note = Target B2M Sequence complement
  source 1..18: mol_type = other DNA
agattcaggtttactcac

SEQ ID NO: 9400 - DNA, 18 bp, synthetic construct
  misc_feature 1..18: note = Target B2M Sequence complement
  source 1..18: mol_type = other DNA
gattcaggtttactcacg

SEQ ID NO: 9401 - DNA, 18 bp, synthetic construct
  misc_feature 1..18: note = Target B2M Sequence complement
  source 1..18: mol_type = other DNA
attcaggtttactcacgt

SEQ ID NO: 9402 - DNA, 18 bp, synthetic construct
  misc_feature 1..18: note = Target B2M Sequence complement
  source 1..18: mol_type = other DNA
ttcaggtttactcacgtc

SEQ ID NO: 9403 - DNA, 18 bp, synthetic construct
  misc_feature 1..18: note = Target B2M Sequence complement
  source 1..18: mol_type = other DNA
tcaggtttactcacgtca

SEQ ID NO: 9404 - DNA, 18 bp, synthetic construct
  misc_feature 1..18: note = Target B2M Sequence complement
  source 1..18: mol_type = other DNA
caggtttactcacgtcat

SEQ ID NO: 9405 - DNA, 18 bp, synthetic construct
  misc_feature 1..18: note = Target B2M Sequence complement
  source 1..18: mol_type = other DNA
aggtttactcacgtcatc

SEQ ID NO: 9406 - DNA, 18 bp, synthetic construct
  misc_feature 1..18: note = Target B2M Sequence complement
  source 1..18: mol_type = other DNA
ggtttactcacgtcatcc

SEQ ID NO: 9407 - DNA, 18 bp, synthetic construct
  misc_feature 1..18: note = Target B2M Sequence complement
  source 1..18: mol_type = other DNA
gtttactcacgtcatcca

SEQ ID NO: 9408 - DNA, 18 bp, synthetic construct
  misc_feature 1..18: note = Target B2M Sequence complement
  source 1..18: mol_type = other DNA
tttactcacgtcatccag

SEQ ID NO: 9409 - DNA, 18 bp, synthetic construct
  misc_feature 1..18: note = Target B2M Sequence complement
  source 1..18: mol_type = other DNA
ttactcacgtcatccagc

SEQ ID NO: 9410 - DNA, 18 bp, synthetic construct
  misc_feature 1..18: note = Target B2M Sequence complement
  source 1..18: mol_type = other DNA
tactcacgtcatccagca

SEQ ID NO: 9411 - DNA, 18 bp, synthetic construct
  misc_feature 1..18: note = Target B2M Sequence complement
  source 1..18: mol_type = other DNA
actcacgtcatccagcag

SEQ ID NO: 9412 - DNA, 18 bp, synthetic construct
  misc_feature 1..18: note = Target B2M Sequence complement
  source 1..18: mol_type = other DNA
ctcacgtcatccagcaga

SEQ ID NO: 9413 - DNA, 18 bp, synthetic construct
  misc_feature 1..18: note = Target B2M Sequence complement
  source 1..18: mol_type = other DNA
tcacgtcatccagcagag

SEQ ID NO: 9414 - DNA, 18 bp, synthetic construct
  misc_feature 1..18: note = Target B2M Sequence complement
  source 1..18: mol_type = other DNA
cacgtcatccagcagaga

SEQ ID NO: 9415 - DNA, 18 bp, synthetic construct
  misc_feature 1..18: note = Target B2M Sequence complement
  source 1..18: mol_type = other DNA
acgtcatccagcagagaa

SEQ ID NO: 9416 - DNA, 18 bp, synthetic construct
  misc_feature 1..18: note = Target B2M Sequence complement
  source 1..18: mol_type = other DNA
cgtcatccagcagagaat

SEQ ID NO: 9417 - DNA, 18 bp, synthetic construct
  misc_feature 1..18: note = Target B2M Sequence complement
  source 1..18: mol_type = other DNA
gtcatccagcagagaatg

SEQ ID NO: 9418 - DNA, 18 bp, synthetic construct
  misc_feature 1..18: note = Target B2M Sequence complement
  source 1..18: mol_type = other DNA
tcatccagcagagaatgg

SEQ ID NO: 9419 - DNA, 18 bp, synthetic construct
  misc_feature 1..18: note = Target B2M Sequence complement
  source 1..18: mol_type = other DNA
catccagcagagaatgga

SEQ ID NO: 9420 - DNA, 18 bp, synthetic construct
  misc_feature 1..18: note = Target B2M Sequence complement
  source 1..18: mol_type = other DNA
atccagcagagaatggaa

SEQ ID NO: 9421 - DNA, 18 bp, synthetic construct
  misc_feature 1..18: note = Target B2M Sequence complement
  source 1..18: mol_type = other DNA
tccagcagagaatggaaa

SEQ ID NO: 9422 - DNA, 18 bp, synthetic construct
  misc_feature 1..18: note = Target B2M Sequence complement
  source 1..18: mol_type = other DNA
ccagcagagaatggaaag

SEQ ID NO: 9423 - DNA, 18 bp, synthetic construct
  misc_feature 1..18: note = Target B2M Sequence complement
  source 1..18: mol_type = other DNA
cagcagagaatggaaagt

SEQ ID NO: 9424 - DNA, 18 bp, synthetic construct
  misc_feature 1..18: note = Target B2M Sequence complement
  source 1..18: mol_type = other DNA
agcagagaatggaaagtc

SEQ ID NO: 9425 - DNA, 18 bp, synthetic construct
  misc_feature 1..18: note = Target B2M Sequence complement
  source 1..18: mol_type = other DNA
gcagagaatggaaagtca

SEQ ID NO: 9426 - DNA, 18 bp, synthetic construct
  misc_feature 1..18: note = Target B2M Sequence complement
  source 1..18: mol_type = other DNA
cagagaatggaaagtcaa

SEQ ID NO: 9427 - DNA, 18 bp, synthetic construct
  misc_feature 1..18: note = Target B2M Sequence complement
  source 1..18: mol_type = other DNA
agagaatggaaagtcaaa

SEQ ID NO: 9428 - DNA, 18 bp, synthetic construct
  misc_feature 1..18: note = Target B2M Sequence complement
  source 1..18: mol_type = other DNA
gagaatggaaagtcaaat

SEQ ID NO: 9429 - DNA, 18 bp, synthetic construct
  misc_feature 1..18: note = Target B2M Sequence complement
  source 1..18: mol_type = other DNA
agaatggaaagtcaaatt

SEQ ID NO: 9430 - DNA, 18 bp, synthetic construct
  misc_feature 1..18: note = Target B2M Sequence complement
  source 1..18: mol_type = other DNA
gaatggaaagtcaaattt

SEQ ID NO: 9431 - DNA, 18 bp, synthetic construct
  misc_feature 1..18: note = Target B2M Sequence complement
  source 1..18: mol_type = other DNA
aatggaaagtcaaatttc

SEQ ID NO: 9432 - DNA, 18 bp, synthetic construct
  misc_feature 1..18: note = Target B2M Sequence complement
  source 1..18: mol_type = other DNA
atggaaagtcaaatttcc

SEQ ID NO: 9433 - DNA, 18 bp, synthetic construct
  misc_feature 1..18: note = Target B2M Sequence complement
  source 1..18: mol_type = other DNA
tggaaagtcaaatttcct

SEQ ID NO: 9434 - DNA, 18 bp, synthetic construct
  misc_feature 1..18: note = Target B2M Sequence complement
  source 1..18: mol_type = other DNA
ggaaagtcaaatttcctg

SEQ ID NO: 9435 - DNA, 18 bp, synthetic construct
  misc_feature 1..18: note = Target B2M Sequence complement
  source 1..18: mol_type = other DNA
gaaagtcaaatttcctga

SEQ ID NO: 9436 - DNA, 18 bp, synthetic construct
  misc_feature 1..18: note = Target B2M Sequence complement
  source 1..18: mol_type = other DNA
aaagtcaaatttcctgaa

SEQ ID NO: 9437 - DNA, 18 bp, synthetic construct
  misc_feature 1..18: note = Target B2M Sequence complement
  source 1..18: mol_type = other DNA
aagtcaaatttcctgaat

SEQ ID NO: 9438 - DNA, 18 bp, synthetic construct
  misc_feature 1..18: note = Target B2M Sequence complement
  source 1..18: mol_type = other DNA
agtcaaatttcctgaatt

SEQ ID NO: 9439 - DNA, 18 bp, synthetic construct
  misc_feature 1..18: note = Target B2M Sequence complement
  source 1..18: mol_type = other DNA
gtcaaatttcctgaattg

SEQ ID NO: 9440 - DNA, 18 bp, synthetic construct
  misc_feature 1..18: note = Target B2M Sequence complement
  source 1..18: mol_type = other DNA
tcaaatttcctgaattgc

SEQ ID NO: 9441 - DNA, 18 bp, synthetic construct
  misc_feature 1..18: note = Target B2M Sequence complement
  source 1..18: mol_type = other DNA
caaatttcctgaattgct

SEQ ID NO: 9442 - DNA, 18 bp, synthetic construct
  misc_feature 1..18: note = Target B2M Sequence complement
  source 1..18: mol_type = other DNA
aaatttcctgaattgcta

SEQ ID NO: 9443 - DNA, 18 bp, synthetic construct
  misc_feature 1..18: note = Target B2M Sequence complement
  source 1..18: mol_type = other DNA
aatttcctgaattgctat

SEQ ID NO: 9444 - DNA, 18 bp, synthetic construct
  misc_feature 1..18: note = Target B2M Sequence complement
  source 1..18: mol_type = other DNA
atttcctgaattgctatg

SEQ ID NO: 9445 - DNA, 18 bp, synthetic construct
  misc_feature 1..18: note = Target B2M Sequence complement
  source 1..18: mol_type = other DNA
tttcctgaattgctatgt

SEQ ID NO: 9446 - DNA, 18 bp, synthetic construct
  misc_feature 1..18: note = Target B2M Sequence complement
  source 1..18: mol_type = other DNA
ttcctgaattgctatgtg

SEQ ID NO: 9447 - DNA, 18 bp, synthetic construct
  misc_feature 1..18: note = Target B2M Sequence complement
  source 1..18: mol_type = other DNA
tcctgaattgctatgtgt

SEQ ID NO: 9448 - DNA, 18 bp, synthetic construct
  misc_feature 1..18: note = Target B2M Sequence complement
  source 1..18: mol_type = other DNA
cctgaattgctatgtgtc

SEQ ID NO: 9449 - DNA, 18 bp, synthetic construct
  misc_feature 1..18: note = Target B2M Sequence complement
  source 1..18: mol_type = other DNA
ctgaattgctatgtgtct

SEQ ID NO: 9450 - DNA, 18 bp, synthetic construct
  misc_feature 1..18: note = Target B2M Sequence complement
  source 1..18: mol_type = other DNA
tgaattgctatgtgtctg

SEQ ID NO: 9451 - DNA, 18 bp, synthetic construct
  misc_feature 1..18: note = Target B2M Sequence complement
  source 1..18: mol_type = other DNA
gaattgctatgtgtctgg

SEQ ID NO: 9452 - DNA, 18 bp, synthetic construct
  misc_feature 1..18: note = Target B2M Sequence complement
  source 1..18: mol_type = other DNA
aattgctatgtgtctggg

SEQ ID NO: 9453 - DNA, 18 bp, synthetic construct
  misc_feature 1..18: note = Target B2M Sequence complement
  source 1..18: mol_type = other DNA
attgctatgtgtctgggt

SEQ ID NO: 9454 - DNA, 18 bp, synthetic construct
  misc_feature 1..18: note = Target B2M Sequence complement
  source 1..18: mol_type = other DNA
ttgctatgtgtctgggtt

SEQ ID NO: 9455 - DNA, 18 bp, synthetic construct
  misc_feature 1..18: note = Target B2M Sequence complement
  source 1..18: mol_type = other DNA
tgctatgtgtctgggttt

SEQ ID NO: 9456 - DNA, 18 bp, synthetic construct
  misc_feature 1..18: note = Target B2M Sequence complement
  source 1..18: mol_type = other DNA
gctatgtgtctgggtttc

SEQ ID NO: 9457 - DNA, 18 bp, synthetic construct
  misc_feature 1..18: note = Target B2M Sequence complement
  source 1..18: mol_type = other DNA
ctatgtgtctgggtttca

SEQ ID NO: 9458 - DNA, 18 bp, synthetic construct
  misc_feature 1..18: note = Target B2M Sequence complement
  source 1..18: mol_type = other DNA
tatgtgtctgggtttcat

SEQ ID NO: 9459 - DNA, 18 bp, synthetic construct
  misc_feature 1..18: note = Target B2M Sequence complement
  source 1..18: mol_type = other DNA
atgtgtctgggtttcatc

SEQ ID NO: 9460 - DNA, 18 bp, synthetic construct
  misc_feature 1..18: note = Target B2M Sequence complement
  source 1..18: mol_type = other DNA
tgtgtctgggtttcatcc

SEQ ID NO: 9461 - DNA, 18 bp, synthetic construct
  misc_feature 1..18: note = Target B2M Sequence complement
  source 1..18: mol_type = other DNA
gtgtctgggtttcatcca

SEQ ID NO: 9462 - DNA, 18 bp, synthetic construct
  misc_feature 1..18: note = Target B2M Sequence complement
  source 1..18: mol_type = other DNA
tgtctgggtttcatccat

SEQ ID NO: 9463 - DNA, 18 bp, synthetic construct
  misc_feature 1..18: note = Target B2M Sequence complement
  source 1..18: mol_type = other DNA
gtctgggtttcatccatc

SEQ ID NO: 9464 - DNA, 18 bp, synthetic construct
  misc_feature 1..18: note = Target B2M Sequence complement
  source 1..18: mol_type = other DNA
tctgggtttcatccatcc

SEQ ID NO: 9465 - DNA, 18 bp, synthetic construct
  misc_feature 1..18: note = Target B2M Sequence complement
  source 1..18: mol_type = other DNA
ctgggtttcatccatccg

SEQ ID NO: 9466 - DNA, 18 bp, synthetic construct
  misc_feature 1..18: note = Target B2M Sequence complement
  source 1..18: mol_type = other DNA
tgggtttcatccatccga

SEQ ID NO: 9467 - DNA, 18 bp, synthetic construct
  misc_feature 1..18: note = Target B2M Sequence complement
  source 1..18: mol_type = other DNA
gggtttcatccatccgac

SEQ ID NO: 9468 - DNA, 18 bp, synthetic construct
  misc_feature 1..18: note = Target B2M Sequence complement
  source 1..18: mol_type = other DNA
ggtttcatccatccgaca

SEQ ID NO: 9469 - DNA, 18 bp, synthetic construct
  misc_feature 1..18: note = Target B2M Sequence complement
  source 1..18: mol_type = other DNA
gtttcatccatccgacat

SEQ ID NO: 9470 - DNA, 18 bp, synthetic construct
  misc_feature 1..18: note = Target B2M Sequence complement
  source 1..18: mol_type = other DNA
tttcatccatccgacatt

SEQ ID NO: 9471 - DNA, 18 bp, synthetic construct
  misc_feature 1..18: note = Target B2M Sequence complement
  source 1..18: mol_type = other DNA
ttcatccatccgacattg

SEQ ID NO: 9472 - DNA, 18 bp, synthetic construct
  misc_feature 1..18: note = Target B2M Sequence complement
  source 1..18: mol_type = other DNA
tcatccatccgacattga

SEQ ID NO: 9473 - DNA, 18 bp, synthetic construct
  misc_feature 1..18: note = Target B2M Sequence complement
  source 1..18: mol_type = other DNA
catccatccgacattgaa

SEQ ID NO: 9474 - DNA, 18 bp, synthetic construct
  misc_feature 1..18: note = Target B2M Sequence complement
  source 1..18: mol_type = other DNA
atccatccgacattgaag

SEQ ID NO: 9475 - DNA, 18 bp, synthetic construct
  misc_feature 1..18: note = Target B2M Sequence complement
  source 1..18: mol_type = other DNA
tccatccgacattgaagt

SEQ ID NO: 9476 - DNA, 18 bp, synthetic construct
  misc_feature 1..18: note = Target B2M Sequence complement
  source 1..18: mol_type = other DNA
ccatccgacattgaagtt

SEQ ID NO: 9477 - DNA, 18 bp, synthetic construct
  misc_feature 1..18: note = Target B2M Sequence complement
  source 1..18: mol_type = other DNA
catccgacattgaagttg

SEQ ID NO: 9478 - DNA, 18 bp, synthetic construct
  misc_feature 1..18: note = Target B2M Sequence complement
  source 1..18: mol_type = other DNA
atccgacattgaagttga

SEQ ID NO: 9479 - DNA, 18 bp, synthetic construct
  misc_feature 1..18: note = Target B2M Sequence complement
  source 1..18: mol_type = other DNA
tccgacattgaagttgac

SEQ ID NO: 9480 - DNA, 18 bp, synthetic construct
  misc_feature 1..18: note = Target B2M Sequence complement
  source 1..18: mol_type = other DNA
ccgacattgaagttgact

SEQ ID NO: 9481 - DNA, 18 bp, synthetic construct
  misc_feature 1..18: note = Target B2M Sequence complement
  source 1..18: mol_type = other DNA
cgacattgaagttgactt

SEQ ID NO: 9482 - DNA, 18 bp, synthetic construct
  misc_feature 1..18: note = Target B2M Sequence complement
  source 1..18: mol_type = other DNA
gacattgaagttgactta

SEQ ID NO: 9483 - DNA, 18 bp, synthetic construct
  misc_feature 1..18: note = Target B2M Sequence complement
  source 1..18: mol_type = other DNA
acattgaagttgacttac

SEQ ID NO: 9484 - DNA, 18 bp, synthetic construct
  misc_feature 1..18: note = Target B2M Sequence complement
  source 1..18: mol_type = other DNA
cattgaagttgacttact

SEQ ID NO: 9485 - DNA, 18 bp, synthetic construct
  misc_feature 1..18: note = Target B2M Sequence complement
  source 1..18: mol_type = other DNA
attgaagttgacttactg

SEQ ID NO: 9486 - DNA, 18 bp, synthetic construct
  misc_feature 1..18: note = Target B2M Sequence complement
  source 1..18: mol_type = other DNA
ttgaagttgacttactga

SEQ ID NO: 9487 - DNA, 18 bp, synthetic construct
  misc_feature 1..18: note = Target B2M Sequence complement
  source 1..18: mol_type = other DNA
tgaagttgacttactgaa

SEQ ID NO: 9488 - DNA, 18 bp, synthetic construct
  misc_feature 1..18: note = Target B2M Sequence complement
  source 1..18: mol_type = other DNA
gaagttgacttactgaag

SEQ ID NO: 9489 - DNA, 18 bp, synthetic construct
  misc_feature 1..18: note = Target B2M Sequence complement
  source 1..18: mol_type = other DNA
aagttgacttactgaaga

SEQ ID NO: 9490 - DNA, 18 bp, synthetic construct
  misc_feature 1..18: note = Target B2M Sequence complement
  source 1..18: mol_type = other DNA
agttgacttactgaagaa

SEQ ID NO: 9491 - DNA, 18 bp, synthetic construct
  misc_feature 1..18: note = Target B2M Sequence complement
  source 1..18: mol_type = other DNA
gttgacttactgaagaat

SEQ ID NO: 9492 - DNA, 18 bp, synthetic construct
  misc_feature 1..18: note = Target B2M Sequence complement
  source 1..18: mol_type = other DNA
ttgacttactgaagaatg

SEQ ID NO: 9493 - DNA, 18 bp, synthetic construct
  misc_feature 1..18: note = Target B2M Sequence complement
  source 1..18: mol_type = other DNA
tgacttactgaagaatgg

SEQ ID NO: 9494 - DNA, 18 bp, synthetic construct
  misc_feature 1..18: note = Target B2M Sequence complement
  source 1..18: mol_type = other DNA
gacttactgaagaatgga

SEQ ID NO: 9495 - DNA, 18 bp, synthetic construct
  misc_feature 1..18: note = Target B2M Sequence complement
  source 1..18: mol_type = other DNA
acttactgaagaatggag

SEQ ID NO: 9496 - DNA, 18 bp, synthetic construct
  misc_feature 1..18: note = Target B2M Sequence complement
  source 1..18: mol_type = other DNA
cttactgaagaatggaga

SEQ ID NO: 9497 - DNA, 18 bp, synthetic construct
  misc_feature 1..18: note = Target B2M Sequence complement
  source 1..18: mol_type = other DNA
ttactgaagaatggagag

SEQ ID NO: 9498 - DNA, 18 bp, synthetic construct
  misc_feature 1..18: note = Target B2M Sequence complement
  source 1..18: mol_type = other DNA
tactgaagaatggagaga

SEQ ID NO: 9499 - DNA, 18 bp, synthetic construct
  misc_feature 1..18: note = Target B2M Sequence complement
  source 1..18: mol_type = other DNA
actgaagaatggagagag

SEQ ID NO: 9500 - DNA, 18 bp, synthetic construct
  misc_feature 1..18: note = Target B2M Sequence complement
  source 1..18: mol_type = other DNA
ctgaagaatggagagaga

SEQ ID NO: 9501 - DNA, 18 bp, synthetic construct
  misc_feature 1..18: note = Target B2M Sequence complement
  source 1..18: mol_type = other DNA
tgaagaatggagagagaa

SEQ ID NO: 9502 - DNA, 18 bp, synthetic construct
  misc_feature 1..18: note = Target B2M Sequence complement
  source 1..18: mol_type = other DNA
gaagaatggagagagaat

SEQ ID NO: 9503 - DNA, 18 bp, synthetic construct
  misc_feature 1..18: note = Target B2M Sequence complement
  source 1..18: mol_type = other DNA
aagaatggagagagaatt

SEQ ID NO: 9504 - DNA, 18 bp, synthetic construct
  misc_feature 1..18: note = Target B2M Sequence complement
  source 1..18: mol_type = other DNA
agaatggagagagaattg

SEQ ID NO: 9505 - DNA, 18 bp, synthetic construct
  misc_feature 1..18: note = Target B2M Sequence complement
  source 1..18: mol_type = other DNA
gaatggagagagaattga

SEQ ID NO: 9506 - DNA, 18 bp, synthetic construct
  misc_feature 1..18: note = Target B2M Sequence complement
  source 1..18: mol_type = other DNA
aatggagagagaattgaa

SEQ ID NO: 9507 - DNA, 18 bp, synthetic construct
  misc_feature 1..18: note = Target B2M Sequence complement
  source 1..18: mol_type = other DNA
atggagagagaattgaaa

SEQ ID NO: 9508 - DNA, 18 bp, synthetic construct
  misc_feature 1..18: note = Target B2M Sequence complement
  source 1..18: mol_type = other DNA
aaagtggagcattcagac

SEQ ID NO: 9509 - DNA, 18 bp, synthetic construct
  misc_feature 1..18: note = Target B2M Sequence complement
  source 1..18: mol_type = other DNA
aagtggagcattcagact

SEQ ID NO: 9510 - DNA, 18 bp, synthetic construct
  misc_feature 1..18: note = Target B2M Sequence complement
  source 1..18: mol_type = other DNA
agtggagcattcagactt

SEQ ID NO: 9511 - DNA, 18 bp, synthetic construct
  misc_feature 1..18: note = Target B2M Sequence complement
  source 1..18: mol_type = other DNA
gtggagcattcagacttg

SEQ ID NO: 9512 - DNA, 18 bp, synthetic construct
  misc_feature 1..18: note = Target B2M Sequence complement
  source 1..18: mol_type = other DNA
tggagcattcagacttgt

SEQ ID NO: 9513 - DNA, 18 bp, synthetic construct
  misc_feature 1..18: note = Target B2M Sequence complement
  source 1..18: mol_type = other DNA
ggagcattcagacttgtc

SEQ ID NO: 9514 - DNA, 18 bp, synthetic construct
  misc_feature 1..18: note = Target B2M Sequence complement
  source 1..18: mol_type = other DNA
gagcattcagacttgtct

SEQ ID NO: 9515 - DNA, 18 bp, synthetic construct
  misc_feature 1..18: note = Target B2M Sequence complement
  source 1..18: mol_type = other DNA
agcattcagacttgtctt

SEQ ID NO: 9516 - DNA, 18 bp, synthetic construct
  misc_feature 1..18: note = Target B2M Sequence complement
  source 1..18: mol_type = other DNA
gcattcagacttgtcttt

SEQ ID NO: 9517 - DNA, 18 bp, synthetic construct
  misc_feature 1..18: note = Target B2M Sequence complement
  source 1..18: mol_type = other DNA
cattcagacttgtctttc

SEQ ID NO: 9518 - DNA, 18 bp, synthetic construct
  misc_feature 1..18: note = Target B2M Sequence complement
  source 1..18: mol_type = other DNA
attcagacttgtctttca

SEQ ID NO: 9519 - DNA, 18 bp, synthetic construct
  misc_feature 1..18: note = Target B2M Sequence complement
  source 1..18: mol_type = other DNA
ttcagacttgtctttcag

SEQ ID NO: 9520 - DNA, 18 bp, synthetic construct
  misc_feature 1..18: note = Target B2M Sequence complement
  source 1..18: mol_type = other DNA
tcagacttgtctttcagc

SEQ ID NO: 9521 - DNA, 18 bp, synthetic construct
  misc_feature 1..18: note = Target B2M Sequence complement
  source 1..18: mol_type = other DNA
cagacttgtctttcagca

SEQ ID NO: 9522 - DNA, 18 bp, synthetic construct
  misc_feature 1..18: note = Target B2M Sequence complement
  source 1..18: mol_type = other DNA
agacttgtctttcagcaa

SEQ ID NO: 9523 - DNA, 18 bp, synthetic construct
  misc_feature 1..18: note = Target B2M Sequence complement
  source 1..18: mol_type = other DNA
gacttgtctttcagcaag

SEQ ID NO: 9524 - DNA, 18 bp, synthetic construct
  misc_feature 1..18: note = Target B2M Sequence complement
  source 1..18: mol_type = other DNA
acttgtctttcagcaagg

SEQ ID NO: 9525 - DNA, 18 bp, synthetic construct
  misc_feature 1..18: note = Target B2M Sequence complement
  source 1..18: mol_type = other DNA
cttgtctttcagcaagga

SEQ ID NO: 9526 - DNA, 18 bp, synthetic construct
  misc_feature 1..18: note = Target B2M Sequence complement
  source 1..18: mol_type = other DNA
ttgtctttcagcaaggac

SEQ ID NO: 9527 - DNA, 18 bp, synthetic construct
  misc_feature 1..18: note = Target B2M Sequence complement
  source 1..18: mol_type = other DNA
tgtctttcagcaaggact

SEQ ID NO: 9528 - DNA, 18 bp, synthetic construct
  misc_feature 1..18: note = Target B2M Sequence complement
  source 1..18: mol_type = other DNA
gtctttcagcaaggactg

SEQ ID NO: 9529 - DNA, 18 bp, synthetic construct
  misc_feature 1..18: note = Target B2M Sequence complement
  source 1..18: mol_type = other DNA
tctttcagcaaggactgg

SEQ ID NO: 9530 - DNA, 18 bp, synthetic construct
  misc_feature 1..18: note = Target B2M Sequence complement
  source 1..18: mol_type = other DNA
ctttcagcaaggactggt

SEQ ID NO: 9531 - DNA, 18 bp, synthetic construct
  misc_feature 1..18: note = Target B2M Sequence complement
  source 1..18: mol_type = other DNA
tttcagcaaggactggtc

SEQ ID NO: 9532 - DNA, 18 bp, synthetic construct
  misc_feature 1..18: note = Target B2M Sequence complement
  source 1..18: mol_type = other DNA
ttcagcaaggactggtct

SEQ ID NO: 9533 - DNA, 18 bp, synthetic construct
  misc_feature 1..18: note = Target B2M Sequence complement
  source 1..18: mol_type = other DNA
tcagcaaggactggtctt

SEQ ID NO: 9534 - DNA, 18 bp, synthetic construct
  misc_feature 1..18: note = Target B2M Sequence complement
  source 1..18: mol_type = other DNA
cagcaaggactggtcttt

SEQ ID NO: 9535 - DNA, 18 bp, synthetic construct
  misc_feature 1..18: note = Target B2M Sequence complement
  source 1..18: mol_type = other DNA
agcaaggactggtctttc

SEQ ID NO: 9536 - DNA, 18 bp, synthetic construct
  misc_feature 1..18: note = Target B2M Sequence complement
  source 1..18: mol_type = other DNA
gcaaggactggtctttct

SEQ ID NO: 9537 - DNA, 18 bp, synthetic construct
  misc_feature 1..18: note = Target B2M Sequence complement
  source 1..18: mol_type = other DNA
caaggactggtctttcta

SEQ ID NO: 9538 - DNA, 18 bp, synthetic construct
  misc_feature 1..18: note = Target B2M Sequence complement
  source 1..18: mol_type = other DNA
aaggactggtctttctat

SEQ ID NO: 9539 - DNA, 18 bp, synthetic construct
  misc_feature 1..18: note = Target B2M Sequence complement
  source 1..18: mol_type = other DNA
aggactggtctttctatc

SEQ ID NO: 9540 - DNA, 18 bp, synthetic construct
  misc_feature 1..18: note = Target B2M Sequence complement
  source 1..18: mol_type = other DNA
ggactggtctttctatct

SEQ ID NO: 9541 - DNA, 18 bp, synthetic construct
  misc_feature 1..18: note = Target B2M Sequence complement
  source 1..18: mol_type = other DNA
gactggtctttctatctc

SEQ ID NO: 9542 - DNA, 18 bp, synthetic construct
  misc_feature 1..18: note = Target B2M Sequence complement
  source 1..18: mol_type = other DNA
actggtctttctatctct

SEQ ID NO: 9543 - DNA, 18 bp, synthetic construct
  misc_feature 1..18: note = Target B2M Sequence complement
  source 1..18: mol_type = other DNA
ctggtctttctatctctt

SEQ ID NO: 9544 - DNA, 18 bp, synthetic construct
  misc_feature 1..18: note = Target B2M Sequence complement
  source 1..18: mol_type = other DNA
tggtctttctatctcttg

SEQ ID NO: 9545 - DNA, 18 bp, synthetic construct
  misc_feature 1..18: note = Target B2M Sequence complement
  source 1..18: mol_type = other DNA
ggtctttctatctcttgt

SEQ ID NO: 9546 - DNA, 18 bp, synthetic construct
  misc_feature 1..18: note = Target B2M Sequence complement
  source 1..18: mol_type = other DNA
gtctttctatctcttgta

SEQ ID NO: 9547 - DNA, 18 bp, synthetic construct
  misc_feature 1..18: note = Target B2M Sequence complement
  source 1..18: mol_type = other DNA
tctttctatctcttgtac

SEQ ID NO: 9548 - DNA, 18 bp, synthetic construct
  misc_feature 1..18: note = Target B2M Sequence complement
  source 1..18: mol_type = other DNA
ctttctatctcttgtact

SEQ ID NO: 9549 - DNA, 18 bp, synthetic construct
  misc_feature 1..18: note = Target B2M Sequence complement
  source 1..18: mol_type = other DNA
tttctatctcttgtacta

SEQ ID NO: 9550 - DNA, 18 bp, synthetic construct
  misc_feature 1..18: note = Target B2M Sequence complement
  source 1..18: mol_type = other DNA
ttctatctcttgtactac

SEQ ID NO: 9551 - DNA, 18 bp, synthetic construct
  misc_feature 1..18: note = Target B2M Sequence complement
  source 1..18: mol_type = other DNA
tctatctcttgtactaca

SEQ ID NO: 9552 - DNA, 18 bp, synthetic construct
  misc_feature 1..18: note = Target B2M Sequence complement
  source 1..18: mol_type = other DNA
ctatctcttgtactacac

SEQ ID NO: 9553 - DNA, 18 bp, synthetic construct
  misc_feature 1..18: note = Target B2M Sequence complement
  source 1..18: mol_type = other DNA
tatctcttgtactacact

SEQ ID NO: 9554 - DNA, 18 bp, synthetic construct
  misc_feature 1..18: note = Target B2M Sequence complement
  source 1..18: mol_type = other DNA
atctcttgtactacactg

SEQ ID NO: 9555 - DNA, 18 bp, synthetic construct
  misc_feature 1..18: note = Target B2M Sequence complement
  source 1..18: mol_type = other DNA
tctcttgtactacactga

SEQ ID NO: 9556 - DNA, 18 bp, synthetic construct
  misc_feature 1..18: note = Target B2M Sequence complement
  source 1..18: mol_type = other DNA
ctcttgtactacactgaa

SEQ ID NO: 9557 - DNA, 18 bp, synthetic construct
  misc_feature 1..18: note = Target B2M Sequence complement
  source 1..18: mol_type = other DNA
tcttgtactacactgaat

SEQ ID NO: 9558 - DNA, 18 bp, synthetic construct
  misc_feature 1..18: note = Target B2M Sequence complement
  source 1..18: mol_type = other DNA
cttgtactacactgaatt

SEQ ID NO: 9559 - DNA, 18 bp, synthetic construct
  misc_feature 1..18: note = Target B2M Sequence complement
  source 1..18: mol_type = other DNA
ttgtactacactgaattc

SEQ ID NO: 9560 - DNA, 18 bp, synthetic construct
  misc_feature 1..18: note = Target B2M Sequence complement
  source 1..18: mol_type = other DNA
tgtactacactgaattca

SEQ ID NO: 9561 - DNA, 18 bp, synthetic construct
  misc_feature 1..18: note = Target B2M Sequence complement
  source 1..18: mol_type = other DNA
gtactacactgaattcac

SEQ ID NO: 9562 - DNA, 18 bp, synthetic construct
  misc_feature 1..18: note = Target B2M Sequence complement
  source 1..18: mol_type = other DNA
tactacactgaattcacc

SEQ ID NO: 9563 - DNA, 18 bp, synthetic construct
  misc_feature 1..18: note = Target B2M Sequence complement
  source 1..18: mol_type = other DNA
actacactgaattcaccc

SEQ ID NO: 9564 - DNA, 18 bp, synthetic construct
  misc_feature 1..18: note = Target B2M Sequence complement
  source 1..18: mol_type = other DNA
aaagatgagtatgcctgc

SEQ ID NO: 9565 - DNA, 18 bp, synthetic construct
  misc_feature 1..18: note = Target B2M Sequence complement
  source 1..18: mol_type = other DNA
aagatgagtatgcctgcc

SEQ ID NO: 9566 - DNA, 18 bp, synthetic construct
  misc_feature 1..18: note = Target B2M Sequence complement
  source 1..18: mol_type = other DNA
agatgagtatgcctgccg

SEQ ID NO: 9567 - DNA, 18 bp, synthetic construct
  misc_feature 1..18: note = Target B2M Sequence complement
  source 1..18: mol_type = other DNA
gatgagtatgcctgccgt

SEQ ID NO: 9568 - DNA, 18 bp, synthetic construct
  misc_feature 1..18: note = Target B2M Sequence complement
  source 1..18: mol_type = other DNA
atgagtatgcctgccgtg

SEQ ID NO: 9569 - DNA, 18 bp, synthetic construct
  misc_feature 1..18: note = Target B2M Sequence complement
  source 1..18: mol_type = other DNA
tgagtatgcctgccgtgt

SEQ ID NO: 9570 - DNA, 18 bp, synthetic construct
  misc_feature 1..18: note = Target B2M Sequence complement
  source 1..18: mol_type = other DNA
agtatgcctgccgtgtga

SEQ ID NO: 9571 - DNA, 18 bp, synthetic construct
  misc_feature 1..18: note = Target B2M Sequence complement
  source 1..18: mol_type = other DNA
gtatgcctgccgtgtgaa

SEQ ID NO: 9572 - DNA, 18 bp, synthetic construct
  misc_feature 1..18: note = Target B2M Sequence complement
  source 1..18: mol_type = other DNA
tatgcctgccgtgtgaac

SEQ ID NO: 9573 - DNA, 18 bp, synthetic construct
  misc_feature 1..18: note = Target B2M Sequence complement
  source 1..18: mol_type = other DNA
ctgccgtgtgaaccatgt

SEQ ID NO: 9574 - DNA, 18 bp, synthetic construct
  misc_feature 1..18: note = Target B2M Sequence complement
  source 1..18: mol_type = other DNA
tgccgtgtgaaccatgtg

SEQ ID NO: 9575 - DNA, 18 bp, synthetic construct
  misc_feature 1..18: note = Target B2M Sequence complement
  source 1..18: mol_type = other DNA
gccgtgtgaaccatgtga

SEQ ID NO: 9576 - DNA, 18 bp, synthetic construct
  misc_feature 1..18: note = Target B2M Sequence complement
  source 1..18: mol_type = other DNA
ccgtgtgaaccatgtgac

SEQ ID NO: 9577 - DNA, 18 bp, synthetic construct
  misc_feature 1..18: note = Target B2M Sequence complement
  source 1..18: mol_type = other DNA
cgtgtgaaccatgtgact

SEQ ID NO: 9578 - DNA, 18 bp, synthetic construct
  misc_feature 1..18: note = Target B2M Sequence complement
  source 1..18: mol_type = other DNA
gtgtgaaccatgtgactt

SEQ ID NO: 9579 - DNA, 18 bp, synthetic construct
  misc_feature 1..18: note = Target B2M Sequence complement
  source 1..18: mol_type = other DNA
tgtgaaccatgtgacttt

SEQ ID NO: 9580 - DNA, 18 bp, synthetic construct
  misc_feature 1..18: note = Target B2M Sequence complement
  source 1..18: mol_type = other DNA
gtgaaccatgtgactttg

SEQ ID NO: 9581 - DNA, 18 bp, synthetic construct
  misc_feature 1..18: note = Target B2M Sequence complement
  source 1..18: mol_type = other DNA
tgaaccatgtgactttgt

SEQ ID NO: 9582 - DNA, 18 bp, synthetic construct
  misc_feature 1..18: note = Target B2M Sequence complement
  source 1..18: mol_type = other DNA
gaaccatgtgactttgtc

SEQ ID NO: 9583 - DNA, 18 bp, synthetic construct
  misc_feature 1..18: note = Target B2M Sequence complement
  source 1..18: mol_type = other DNA
aaccatgtgactttgtca

SEQ ID NO: 9584 - DNA, 18 bp, synthetic construct
  misc_feature 1..18: note = Target B2M Sequence complement
  source 1..18: mol_type = other DNA
accatgtgactttgtcac

SEQ ID NO: 9585 - DNA, 18 bp, synthetic construct
  misc_feature 1..18: note = Target B2M Sequence complement
  source 1..18: mol_type = other DNA
ccatgtgactttgtcaca

SEQ ID NO: 9586 - DNA, 18 bp, synthetic construct
  misc_feature 1..18: note = Target B2M Sequence complement
  source 1..18: mol_type = other DNA
catgtgactttgtcacag

SEQ ID NO: 9587 - DNA, 18 bp, synthetic construct
  misc_feature 1..18: note = Target B2M Sequence complement
  source 1..18: mol_type = other DNA
atgtgactttgtcacagc

SEQ ID NO: 9588 - DNA, 18 bp, synthetic construct
  misc_feature 1..18: note = Target B2M Sequence complement
  source 1..18: mol_type = other DNA
tgtgactttgtcacagcc

SEQ ID NO: 9589 - DNA, 18 bp, synthetic construct
  misc_feature 1..18: note = Target B2M Sequence complement
  source 1..18: mol_type = other DNA
gtgactttgtcacagccc

SEQ ID NO: 9590 - DNA, 18 bp, synthetic construct
  misc_feature 1..18: note = Target B2M Sequence complement
  source 1..18: mol_type = other DNA
tgactttgtcacagccca

SEQ ID NO: 9591 - DNA, 18 bp, synthetic construct
  misc_feature 1..18: note = Target B2M Sequence complement
  source 1..18: mol_type = other DNA
gactttgtcacagcccaa

SEQ ID NO: 9592 - DNA, 18 bp, synthetic construct
  misc_feature 1..18: note = Target B2M Sequence complement
  source 1..18: mol_type = other DNA
actttgtcacagcccaag

SEQ ID NO: 9593 - DNA, 18 bp, synthetic construct
  misc_feature 1..18: note = Target B2M Sequence complement
  source 1..18: mol_type = other DNA
ctttgtcacagcccaaga

SEQ ID NO: 9594 - DNA, 18 bp, synthetic construct
  misc_feature 1..18: note = Target B2M Sequence complement
  source 1..18: mol_type = other DNA
tttgtcacagcccaagat

SEQ ID NO: 9595 - DNA, 18 bp, synthetic construct
  misc_feature 1..18: note = Target B2M Sequence complement
  source 1..18: mol_type = other DNA
ttgtcacagcccaagata

SEQ ID NO: 9596 - DNA, 18 bp, synthetic construct
  misc_feature 1..18: note = Target B2M Sequence complement
  source 1..18: mol_type = other DNA
tgtcacagcccaagatag

SEQ ID NO: 9597 - DNA, 18 bp, synthetic construct
  misc_feature 1..18: note = Target B2M Sequence complement
  source 1..18: mol_type = other DNA
gtcacagcccaagatagt

SEQ ID NO: 9598 - DNA, 18 bp, synthetic construct
  misc_feature 1..18: note = Target B2M Sequence complement
  source 1..18: mol_type = other DNA
tcacagcccaagatagtt

SEQ ID NO: 9599 - DNA, 18 bp, synthetic construct
  misc_feature 1..18: note = Target B2M Sequence complement
  source 1..18: mol_type = other DNA
cacagcccaagatagtta

SEQ ID NO: 9600 - DNA, 18 bp, synthetic construct
  misc_feature 1..18: note = Target B2M Sequence complement
  source 1..18: mol_type = other DNA
acagcccaagatagttaa

SEQ ID NO: 9601 - DNA, 18 bp, synthetic construct
  misc_feature 1..18: note = Target B2M Sequence complement
  source 1..18: mol_type = other DNA
cagcccaagatagttaag

SEQ ID NO: 9602 - DNA, 18 bp, synthetic construct
  misc_feature 1..18: note = Target B2M Sequence complement
  source 1..18: mol_type = other DNA
agcccaagatagttaagt

SEQ ID NO: 9603 - DNA, 18 bp, synthetic construct
  misc_feature 1..18: note = Target B2M Sequence complement
  source 1..18: mol_type = other DNA
gcccaagatagttaagtg

SEQ ID NO: 9604 - DNA, 18 bp, synthetic construct
  misc_feature 1..18: note = Target B2M Sequence complement
  source 1..18: mol_type = other DNA
cccaagatagttaagtgg

SEQ ID NO: 9605 - DNA, 18 bp, synthetic construct
  misc_feature 1..18: note = Target B2M Sequence complement
  source 1..18: mol_type = other DNA
ccaagatagttaagtggg

SEQ ID NO: 9606 - DNA, 18 bp, synthetic construct
  misc_feature 1..18: note = Target B2M Sequence complement
  source 1..18: mol_type = other DNA
caagatagttaagtggga

SEQ ID NO: 9607 - DNA, 18 bp, synthetic construct
  misc_feature 1..18: note = Target B2M Sequence complement
  source 1..18: mol_type = other DNA
aagatagttaagtgggat

SEQ ID NO: 9608 - DNA, 18 bp, synthetic construct
  misc_feature 1..18: note = Target B2M Sequence complement
  source 1..18: mol_type = other DNA
agatagttaagtgggatc

SEQ ID NO: 9609 - DNA, 18 bp, synthetic construct
  misc_feature 1..18: note = Target B2M Sequence complement
  source 1..18: mol_type = other DNA
gatagttaagtgggatcg

SEQ ID NO: 9610 - DNA, 18 bp, synthetic construct
  misc_feature 1..18: note = Target B2M Sequence complement
  source 1..18: mol_type = other DNA
atagttaagtgggatcga

SEQ ID NO: 9611 - DNA, 18 bp, synthetic construct
  misc_feature 1..18: note = Target B2M Sequence complement
  source 1..18: mol_type = other DNA
tagttaagtgggatcgag

SEQ ID NO: 9612 - DNA, 18 bp, synthetic construct
  misc_feature 1..18: note = Target B2M Sequence complement
  source 1..18: mol_type = other DNA
agttaagtgggatcgaga

SEQ ID NO: 9613 - DNA, 18 bp, synthetic construct
  misc_feature 1..18: note = Target B2M Sequence complement
  source 1..18: mol_type = other DNA
gttaagtgggatcgagac

SEQ ID NO: 9614 - DNA, 18 bp, synthetic construct
  misc_feature 1..18: note = Target B2M Sequence complement
  source 1..18: mol_type = other DNA
ttaagtgggatcgagaca

SEQ ID NO: 9615 - DNA, 18 bp, synthetic construct
  misc_feature 1..18: note = Target B2M Sequence complement
  source 1..18: mol_type = other DNA
taagtgggatcgagacat

SEQ ID NO: 9616 - DNA, 18 bp, synthetic construct
  misc_feature 1..18: note = Target B2M Sequence complement
  source 1..18: mol_type = other DNA
aagtgggatcgagacatg

SEQ ID NO: 9617 - DNA, 18 bp, synthetic construct
  misc_feature 1..18: note = Target B2M Sequence complement
  source 1..18: mol_type = other DNA
agtgggatcgagacatgt

SEQ ID NO: 9618 - DNA, 18 bp, synthetic construct
  misc_feature 1..18: note = Target B2M Sequence complement
  source 1..18: mol_type = other DNA
gtgggatcgagacatgta

SEQ ID NO: 9619 - DNA, 18 bp, synthetic construct
  misc_feature 1..18: note = Target B2M Sequence complement
  source 1..18: mol_type = other DNA
tgggatcgagacatgtaa

SEQ ID NO: 9620 - DNA, 18 bp, synthetic construct
  misc_feature 1..18: note = Target B2M Sequence complement
  source 1..18: mol_type = other DNA
gggatcgagacatgtaag

SEQ ID NO: 9621 - DNA, 18 bp, synthetic construct
  misc_feature 1..18: note = Target B2M Sequence complement
  source 1..18: mol_type = other DNA
ggatcgagacatgtaagc

SEQ ID NO: 9622 - DNA, 18 bp, synthetic construct
  misc_feature 1..18: note = Target B2M Sequence complement
  source 1..18: mol_type = other DNA
gatcgagacatgtaagca

SEQ ID NO: 9623 - DNA, 18 bp, synthetic construct
  misc_feature 1..18: note = Target B2M Sequence complement
  source 1..18: mol_type = other DNA
atcgagacatgtaagcag

SEQ ID NO: 9624 - DNA, 18 bp, synthetic construct
  misc_feature 1..18: note = Target B2M Sequence complement
  source 1..18: mol_type = other DNA
tcgagacatgtaagcagc

SEQ ID NO: 9625 - DNA, 18 bp, synthetic construct
  misc_feature 1..18: note = Target B2M Sequence complement
  source 1..18: mol_type = other DNA
cgagacatgtaagcagca

SEQ ID NO: 9626 - DNA, 18 bp, synthetic construct
  misc_feature 1..18: note = Target B2M Sequence complement
  source 1..18: mol_type = other DNA
gagacatgtaagcagcat

SEQ ID NO: 9627 - DNA, 18 bp, synthetic construct
  misc_feature 1..18: note = Target B2M Sequence complement
  source 1..18: mol_type = other DNA
agacatgtaagcagcatc

SEQ ID NO: 9628 - DNA, 18 bp, synthetic construct
  misc_feature 1..18: note = Target B2M Sequence complement
  source 1..18: mol_type = other DNA
gacatgtaagcagcatca

SEQ ID NO: 9629 - DNA, 18 bp, synthetic construct
  misc_feature 1..18: note = Target B2M Sequence complement
  source 1..18: mol_type = other DNA
acatgtaagcagcatcat

SEQ ID NO: 9630 - DNA, 18 bp, synthetic construct
  misc_feature 1..18: note = Target B2M Sequence complement
  source 1..18: mol_type = other DNA
catgtaagcagcatcatg

SEQ ID NO: 9631 - DNA, 18 bp, synthetic construct
  misc_feature 1..18: note = Target B2M Sequence complement
  source 1..18: mol_type = other DNA
atgtaagcagcatcatgg

SEQ ID NO: 9632 - DNA, 18 bp, synthetic construct
  misc_feature 1..18: note = Target B2M Sequence complement
  source 1..18: mol_type = other DNA
tgtaagcagcatcatgga

SEQ ID NO: 9633 - DNA, 18 bp, synthetic construct
  misc_feature 1..18: note = Target B2M Sequence complement
  source 1..18: mol_type = other DNA
gtaagcagcatcatggag

SEQ ID NO: 9634 - DNA, 18 bp, synthetic construct
  misc_feature 1..18: note = Target B2M Sequence complement
  source 1..18: mol_type = other DNA
taagcagcatcatggagg

SEQ ID NO: 9635 - DNA, 18 bp, synthetic construct
  misc_feature 1..18: note = Target B2M Sequence complement
  source 1..18: mol_type = other DNA
aagcagcatcatggaggt

SEQ ID NO: 9636 - DNA, 18 bp, synthetic construct
  misc_feature 1..18: note = Target B2M Sequence complement
  source 1..18: mol_type = other DNA
agcagcatcatggaggtt

SEQ ID NO: 9637 - DNA, 18 bp, synthetic construct
  misc_feature 1..18: note = Target B2M Sequence complement
  source 1..18: mol_type = other DNA
gcagcatcatggaggttt

SEQ ID NO: 9638 - DNA, 18 bp, synthetic construct
  misc_feature 1..18: note = Target B2M Sequence complement
  source 1..18: mol_type = other DNA
cagcatcatggaggtttg

SEQ ID NO: 9639 - DNA, 18 bp, synthetic construct
  misc_feature 1..18: note = Target B2M Sequence complement
  source 1..18: mol_type = other DNA
agcatcatggaggtttga

SEQ ID NO: 9640 - DNA, 18 bp, synthetic construct
  misc_feature 1..18: note = Target B2M Sequence complement
  source 1..18: mol_type = other DNA
gcatcatggaggtttgaa

SEQ ID NO: 9641 - DNA, 18 bp, synthetic construct
  misc_feature 1..18: note = Target B2M Sequence complement
  source 1..18: mol_type = other DNA
catcatggaggtttgaag

SEQ ID NO: 9642 - DNA, 18 bp, synthetic construct
  misc_feature 1..18: note = Target B2M Sequence complement
  source 1..18: mol_type = other DNA
atcatggaggtttgaaga

SEQ ID NO: 9643 - DNA, 18 bp, synthetic construct
  misc_feature 1..18: note = Target B2M Sequence complement
  source 1..18: mol_type = other DNA
tcatggaggtttgaagat

SEQ ID NO: 9644 - DNA, 18 bp, synthetic construct
  misc_feature 1..18: note = Target B2M Sequence complement
  source 1..18: mol_type = other DNA
catggaggtttgaagatg

SEQ ID NO: 9645 - DNA, 18 bp, synthetic construct
  misc_feature 1..18: note = Target B2M Sequence complement
  source 1..18: mol_type = other DNA
atggaggtttgaagatgc

SEQ ID NO: 9646 - DNA, 18 bp, synthetic construct
  misc_feature 1..18: note = Target B2M Sequence complement
  source 1..18: mol_type = other DNA
tggaggtttgaagatgcc

SEQ ID NO: 9647 - DNA, 18 bp, synthetic construct
  misc_feature 1..18: note = Target B2M Sequence complement
  source 1..18: mol_type = other DNA
ggaggtttgaagatgccg

SEQ ID NO: 9648 - DNA, 18 bp, synthetic construct
  misc_feature 1..18: note = Target B2M Sequence complement
  source 1..18: mol_type = other DNA
gaggtttgaagatgccgc

SEQ ID NO: 9649 - DNA, 18 bp, synthetic construct
  misc_feature 1..18: note = Target B2M Sequence complement
  source 1..18: mol_type = other DNA
aggtttgaagatgccgca

SEQ ID NO: 9650 - DNA, 18 bp, synthetic construct
  misc_feature 1..18: note = Target B2M Sequence complement
  source 1..18: mol_type = other DNA
ggtttgaagatgccgcat

SEQ ID NO: 9651 - DNA, 18 bp, synthetic construct
  misc_feature 1..18: note = Target B2M Sequence complement
  source 1..18: mol_type = other DNA
gtttgaagatgccgcatt

SEQ ID NO: 9652 - DNA, 18 bp, synthetic construct
  misc_feature 1..18: note = Target B2M Sequence complement
  source 1..18: mol_type = other DNA
tttgaagatgccgcattt

SEQ ID NO: 9653 - DNA, 18 bp, synthetic construct
  misc_feature 1..18: note = Target B2M Sequence complement
  source 1..18: mol_type = other DNA
ttgaagatgccgcatttg

SEQ ID NO: 9654 - DNA, 18 bp, synthetic construct
  misc_feature 1..18: note = Target B2M Sequence complement
  source 1..18: mol_type = other DNA
tgaagatgccgcatttgg

SEQ ID NO: 9655 - DNA, 18 bp, synthetic construct
  misc_feature 1..18: note = Target B2M Sequence complement
  source 1..18: mol_type = other DNA
gaagatgccgcatttgga

SEQ ID NO: 9656 - DNA, 18 bp, synthetic construct
  misc_feature 1..18: note = Target B2M Sequence complement
  source 1..18: mol_type = other DNA
aagatgccgcatttggat

SEQ ID NO: 9657 - DNA, 18 bp, synthetic construct
  misc_feature 1..18: note = Target B2M Sequence complement
  source 1..18: mol_type = other DNA
agatgccgcatttggatt

SEQ ID NO: 9658 - DNA, 18 bp, synthetic construct
  misc_feature 1..18: note = Target B2M Sequence complement
  source 1..18: mol_type = other DNA
gatgccgcatttggattg

SEQ ID NO: 9659 - DNA, 18 bp, synthetic construct
  misc_feature 1..18: note = Target B2M Sequence complement
  source 1..18: mol_type = other DNA
atgccgcatttggattgg

SEQ ID NO: 9660 - DNA, 18 bp, synthetic construct
  misc_feature 1..18: note = Target B2M Sequence complement
  source 1..18: mol_type = other DNA
tgccgcatttggattgga

SEQ ID NO: 9661 - DNA, 18 bp, synthetic construct
  misc_feature 1..18: note = Target B2M Sequence complement
  source 1..18: mol_type = other DNA
gccgcatttggattggat

SEQ ID NO: 9662 - DNA, 18 bp, synthetic construct
  misc_feature 1..18: note = Target B2M Sequence complement
  source 1..18: mol_type = other DNA
ccgcatttggattggatg

SEQ ID NO: 9663 - DNA, 18 bp, synthetic construct
  misc_feature 1..18: note = Target B2M Sequence complement
  source 1..18: mol_type = other DNA
cgcatttggattggatga

SEQ ID NO: 9664 - DNA, 18 bp, synthetic construct
  misc_feature 1..18: note = Target B2M Sequence complement
  source 1..18: mol_type = other DNA
gcatttggattggatgaa

SEQ ID NO: 9665 - DNA, 18 bp, synthetic construct
  misc_feature 1..18: note = Target B2M Sequence complement
  source 1..18: mol_type = other DNA
catttggattggatgaat

SEQ ID NO: 9666 - DNA, 18 bp, synthetic construct
  misc_feature 1..18: note = Target B2M Sequence complement
  source 1..18: mol_type = other DNA
atttggattggatgaatt

SEQ ID NO: 9667 - DNA, 18 bp, synthetic construct
  misc_feature 1..18: note = Target B2M Sequence complement
  source 1..18: mol_type = other DNA
tttggattggatgaattc

SEQ ID NO: 9668 - DNA, 18 bp, synthetic construct
  misc_feature 1..18: note = Target B2M Sequence complement
  source 1..18: mol_type = other DNA
ttggattggatgaattcc

SEQ ID NO: 9669 - DNA, 18 bp, synthetic construct
  misc_feature 1..18: note = Target B2M Sequence complement
  source 1..18: mol_type = other DNA
tggattggatgaattcca

SEQ ID NO: 9670 - DNA, 18 bp, synthetic construct
  misc_feature 1..18: note = Target B2M Sequence complement
  source 1..18: mol_type = other DNA
ggattggatgaattccaa

SEQ ID NO: 9671 - DNA, 18 bp, synthetic construct
  misc_feature 1..18: note = Target B2M Sequence complement
  source 1..18: mol_type = other DNA
gattggatgaattccaaa

SEQ ID NO: 9672 - DNA, 18 bp, synthetic construct
  misc_feature 1..18: note = Target B2M Sequence complement
  source 1..18: mol_type = other DNA
attggatgaattccaaat

SEQ ID NO: 9673 - DNA, 18 bp, synthetic construct
  misc_feature 1..18: note = Target B2M Sequence complement
  source 1..18: mol_type = other DNA
ttggatgaattccaaatt

SEQ ID NO: 9674 - DNA, 18 bp, synthetic construct
  misc_feature 1..18: note = Target B2M Sequence complement
  source 1..18: mol_type = other DNA
tggatgaattccaaattc

SEQ ID NO: 9675 - DNA, 18 bp, synthetic construct
  misc_feature 1..18: note = Target B2M Sequence complement
  source 1..18: mol_type = other DNA
ggatgaattccaaattct

SEQ ID NO: 9676 - DNA, 18 bp, synthetic construct
  misc_feature 1..18: note = Target B2M Sequence complement
  source 1..18: mol_type = other DNA
gatgaattccaaattctg

SEQ ID NO: 9677 - DNA, 18 bp, synthetic construct
  misc_feature 1..18: note = Target B2M Sequence complement
  source 1..18: mol_type = other DNA
atgaattccaaattctgc

SEQ ID NO: 9678 - DNA, 18 bp, synthetic construct
  misc_feature 1..18: note = Target B2M Sequence complement
  source 1..18: mol_type = other DNA
tgaattccaaattctgct

SEQ ID NO: 9679 - DNA, 18 bp, synthetic construct
  misc_feature 1..18: note = Target B2M Sequence complement
  source 1..18: mol_type = other DNA
gaattccaaattctgctt

SEQ ID NO: 9680 - DNA, 18 bp, synthetic construct
  misc_feature 1..18: note = Target B2M Sequence complement
  source 1..18: mol_type = other DNA
aattccaaattctgcttg

SEQ ID NO: 9681 - DNA, 18 bp, synthetic construct
  misc_feature 1..18: note = Target B2M Sequence complement
  source 1..18: mol_type = other DNA
attccaaattctgcttgc

SEQ ID NO: 9682 - DNA, 18 bp, synthetic construct
  misc_feature 1..18: note = Target B2M Sequence complement
  source 1..18: mol_type = other DNA
ttccaaattctgcttgct

SEQ ID NO: 9683 - DNA, 18 bp, synthetic construct
  misc_feature 1..18: note = Target B2M Sequence complement
  source 1..18: mol_type = other DNA
tccaaattctgcttgctt

SEQ ID NO: 9684 - DNA, 18 bp, synthetic construct
  misc_feature 1..18: note = Target B2M Sequence complement
  source 1..18: mol_type = other DNA
ccaaattctgcttgcttg

SEQ ID NO: 9685 - DNA, 18 bp, synthetic construct
  misc_feature 1..18: note = Target B2M Sequence complement
  source 1..18: mol_type = other DNA
caaattctgcttgcttgc

SEQ ID NO: 9686 - DNA, 18 bp, synthetic construct
  misc_feature 1..18: note = Target B2M Sequence complement
  source 1..18: mol_type = other DNA
aaattctgcttgcttgct

SEQ ID NO: 9687 - DNA, 18 bp, synthetic construct
  misc_feature 1..18: note = Target B2M Sequence complement
  source 1..18: mol_type = other DNA
aattctgcttgcttgctt

SEQ ID NO: 9688 - DNA, 18 bp, synthetic construct
  misc_feature 1..18: note = Target B2M Sequence complement
  source 1..18: mol_type = other DNA
attctgcttgcttgcttt

SEQ ID NO: 9689 - DNA, 18 bp, synthetic construct
  misc_feature 1..18: note = Target B2M Sequence complement
  source 1..18: mol_type = other DNA
attgatatgcttatacac

SEQ ID NO: 9690 - DNA, 18 bp, synthetic construct
  misc_feature 1..18: note = Target B2M Sequence complement
  source 1..18: mol_type = other DNA
ttgatatgcttatacact

SEQ ID NO: 9691 - DNA, 18 bp, synthetic construct
  misc_feature 1..18: note = Target B2M Sequence complement
  source 1..18: mol_type = other DNA
tgatatgcttatacactt

SEQ ID NO: 9692 - DNA, 18 bp, synthetic construct
  misc_feature 1..18: note = Target B2M Sequence complement
  source 1..18: mol_type = other DNA
gatatgcttatacactta

SEQ ID NO: 9693 - DNA, 18 bp, synthetic construct
  misc_feature 1..18: note = Target B2M Sequence complement
  source 1..18: mol_type = other DNA
atatgcttatacacttac

SEQ ID NO: 9694 - DNA, 18 bp, synthetic construct
  misc_feature 1..18: note = Target B2M Sequence complement
  source 1..18: mol_type = other DNA
tatgcttatacacttaca

SEQ ID NO: 9695 - DNA, 18 bp, synthetic construct
  misc_feature 1..18: note = Target B2M Sequence complement
  source 1..18: mol_type = other DNA
atgcttatacacttacac

SEQ ID NO: 9696 - DNA, 18 bp, synthetic construct
  misc_feature 1..18: note = Target B2M Sequence complement
  source 1..18: mol_type = other DNA
tgcttatacacttacact

SEQ ID NO: 9697 - DNA, 18 bp, synthetic construct
  misc_feature 1..18: note = Target B2M Sequence complement
  source 1..18: mol_type = other DNA
gcttatacacttacactt

SEQ ID NO: 9698 - DNA, 18 bp, synthetic construct
  misc_feature 1..18: note = Target B2M Sequence complement
  source 1..18: mol_type = other DNA
cttatacacttacacttt

SEQ ID NO: 9699 - DNA, 18 bp, synthetic construct
  misc_feature 1..18: note = Target B2M Sequence complement
  source 1..18: mol_type = other DNA
atacacttacactttatg

SEQ ID NO: 9700 - DNA, 18 bp, synthetic construct
  misc_feature 1..18: note = Target B2M Sequence complement
  source 1..18: mol_type = other DNA
tacacttacactttatgc

SEQ ID NO: 9701 - DNA, 18 bp, synthetic construct
  misc_feature 1..18: note = Target B2M Sequence complement
  source 1..18: mol_type = other DNA
acacttacactttatgca

SEQ ID NO: 9702 - DNA, 18 bp, synthetic construct
  misc_feature 1..18: note = Target B2M Sequence complement
  source 1..18: mol_type = other DNA
cacttacactttatgcac

SEQ ID NO: 9703 - DNA, 18 bp, synthetic construct
  misc_feature 1..18: note = Target B2M Sequence complement
  source 1..18: mol_type = other DNA
acttacactttatgcaca

SEQ ID NO: 9704 - DNA, 18 bp, synthetic construct
  misc_feature 1..18: note = Target B2M Sequence complement
  source 1..18: mol_type = other DNA
cttacactttatgcacaa

SEQ ID NO: 9705 - DNA, 18 bp, synthetic construct
  misc_feature 1..18: note = Target B2M Sequence complement
  source 1..18: mol_type = other DNA
ttacactttatgcacaaa

SEQ ID NO: 9706 - DNA, 18 bp, synthetic construct
  misc_feature 1..18: note = Target B2M Sequence complement
  source 1..18: mol_type = other DNA
tgtagggttataataatg

SEQ ID NO: 9707 - DNA, 18 bp, synthetic construct
  misc_feature 1..18: note = Target B2M Sequence complement
  source 1..18: mol_type = other DNA
gtagggttataataatgt

SEQ ID NO: 9708 - DNA, 18 bp, synthetic construct
  misc_feature 1..18: note = Target B2M Sequence complement
  source 1..18: mol_type = other DNA
aataatgttaacatggac

SEQ ID NO: 9709 - DNA, 18 bp, synthetic construct
  misc_feature 1..18: note = Target B2M Sequence complement
  source 1..18: mol_type = other DNA
ataatgttaacatggaca

SEQ ID NO: 9710 - DNA, 18 bp, synthetic construct
  misc_feature 1..18: note = Target B2M Sequence complement
  source 1..18: mol_type = other DNA
taatgttaacatggacat

SEQ ID NO: 9711 - DNA, 18 bp, synthetic construct
  misc_feature 1..18: note = Target B2M Sequence complement
  source 1..18: mol_type = other DNA
aatgttaacatggacatg

SEQ ID NO: 9712 - DNA, 18 bp, synthetic construct
  misc_feature 1..18: note = Target B2M Sequence complement
  source 1..18: mol_type = other DNA
atgttaacatggacatga

SEQ ID NO: 9713 - DNA, 18 bp, synthetic construct
  misc_feature 1..18: note = Target B2M Sequence complement
  source 1..18: mol_type = other DNA
tgttaacatggacatgat

SEQ ID NO: 9714 - DNA, 18 bp, synthetic construct
  misc_feature 1..18: note = Target B2M Sequence complement
  source 1..18: mol_type = other DNA
gttaacatggacatgatc

SEQ ID NO: 9715 - DNA, 18 bp, synthetic construct
  misc_feature 1..18: note = Target B2M Sequence complement
  source 1..18: mol_type = other DNA
ttaacatggacatgatct

SEQ ID NO: 9716 - DNA, 18 bp, synthetic construct
  misc_feature 1..18: note = Target B2M Sequence complement
  source 1..18: mol_type = other DNA
taacatggacatgatctt

SEQ ID NO: 9717 - DNA, 18 bp, synthetic construct
  misc_feature 1..18: note = Target B2M Sequence complement
  source 1..18: mol_type = other DNA
aacatggacatgatcttc

SEQ ID NO: 9718 - DNA, 18 bp, synthetic construct
  misc_feature 1..18: note = Target B2M Sequence complement
  source 1..18: mol_type = other DNA
acatggacatgatcttct

SEQ ID NO: 9719 - DNA, 18 bp, synthetic construct
  misc_feature 1..18: note = Target B2M Sequence complement
  source 1..18: mol_type = other DNA
catggacatgatcttctt

SEQ ID NO: 9720 - DNA, 18 bp, synthetic construct
  misc_feature 1..18: note = Target B2M Sequence complement
  source 1..18: mol_type = other DNA
atggacatgatcttcttt

SEQ ID NO: 9721 - DNA, 18 bp, synthetic construct
  misc_feature 1..18: note = Target B2M Sequence complement
  source 1..18: mol_type = other DNA
tggacatgatcttcttta

SEQ ID NO: 9722 - DNA, 18 bp, synthetic construct
  misc_feature 1..18: note = Target B2M Sequence complement
  source 1..18: mol_type = other DNA
ggacatgatcttctttat

SEQ ID NO: 9723 - DNA, 18 bp, synthetic construct
  misc_feature 1..18: note = Target B2M Sequence complement
  source 1..18: mol_type = other DNA
gacatgatcttctttata

SEQ ID NO: 9724 - DNA, 18 bp, synthetic construct
  misc_feature 1..18: note = Target B2M Sequence complement
  source 1..18: mol_type = other DNA
ataattctactttgagtg

SEQ ID NO: 9725 - DNA, 18 bp, synthetic construct
  misc_feature 1..18: note = Target B2M Sequence complement
  source 1..18: mol_type = other DNA
taattctactttgagtgc

SEQ ID NO: 9726 - DNA, 18 bp, synthetic construct
  misc_feature 1..18: note = Target B2M Sequence complement
  source 1..18: mol_type = other DNA
aattctactttgagtgct

SEQ ID NO: 9727 - DNA, 18 bp, synthetic construct
  misc_feature 1..18: note = Target B2M Sequence complement
  source 1..18: mol_type = other DNA
attctactttgagtgctg

SEQ ID NO: 9728 - DNA, 18 bp, synthetic construct
  misc_feature 1..18: note = Target B2M Sequence complement
  source 1..18: mol_type = other DNA
ttctactttgagtgctgt

SEQ ID NO: 9729 - DNA, 18 bp, synthetic construct
  misc_feature 1..18: note = Target B2M Sequence complement
  source 1..18: mol_type = other DNA
tctactttgagtgctgtc

SEQ ID NO: 9730 - DNA, 18 bp, synthetic construct
  misc_feature 1..18: note = Target B2M Sequence complement
  source 1..18: mol_type = other DNA
ctactttgagtgctgtct

SEQ ID NO: 9731 - DNA, 18 bp, synthetic construct
  misc_feature 1..18: note = Target B2M Sequence complement
  source 1..18: mol_type = other DNA
tactttgagtgctgtctc

SEQ ID NO: 9732 - DNA, 18 bp, synthetic construct
  misc_feature 1..18: note = Target B2M Sequence complement
  source 1..18: mol_type = other DNA
actttgagtgctgtctcc

SEQ ID NO: 9733 - DNA, 18 bp, synthetic construct
  misc_feature 1..18: note = Target B2M Sequence complement
  source 1..18: mol_type = other DNA
ctttgagtgctgtctcca

SEQ ID NO: 9734 - DNA, 18 bp, synthetic construct
  misc_feature 1..18: note = Target B2M Sequence complement
  source 1..18: mol_type = other DNA
tttgagtgctgtctccat

SEQ ID NO: 9735 - DNA, 18 bp, synthetic construct
  misc_feature 1..18: note = Target B2M Sequence complement
  source 1..18: mol_type = other DNA
ttgagtgctgtctccatg

SEQ ID NO: 9736 - DNA, 18 bp, synthetic construct
  misc_feature 1..18: note = Target B2M Sequence complement
  source 1..18: mol_type = other DNA
tgagtgctgtctccatgt

SEQ ID NO: 9737 - DNA, 18 bp, synthetic construct
  misc_feature 1..18: note = Target B2M Sequence complement
  source 1..18: mol_type = other DNA
gagtgctgtctccatgtt

SEQ ID NO: 9738 - DNA, 18 bp, synthetic construct
  misc_feature 1..18: note = Target B2M Sequence complement
  source 1..18: mol_type = other DNA
agtgctgtctccatgttt

SEQ ID NO: 9739 - DNA, 18 bp, synthetic construct
  misc_feature 1..18: note = Target B2M Sequence complement
  source 1..18: mol_type = other DNA
gtgctgtctccatgtttg

SEQ ID NO: 9740 - DNA, 18 bp, synthetic construct
  misc_feature 1..18: note = Target B2M Sequence complement
  source 1..18: mol_type = other DNA
tgctgtctccatgtttga

SEQ ID NO: 9741 - DNA, 18 bp, synthetic construct
  misc_feature 1..18: note = Target B2M Sequence complement
  source 1..18: mol_type = other DNA
gctgtctccatgtttgat

SEQ ID NO: 9742 - DNA, 18 bp, synthetic construct
  misc_feature 1..18: note = Target B2M Sequence complement
  source 1..18: mol_type = other DNA
ctgtctccatgtttgatg

SEQ ID NO: 9743 - DNA, 18 bp, synthetic construct
  misc_feature 1..18: note = Target B2M Sequence complement
  source 1..18: mol_type = other DNA
tgtctccatgtttgatgt

SEQ ID NO: 9744 - DNA, 18 bp, synthetic construct
  misc_feature 1..18: note = Target B2M Sequence complement
  source 1..18: mol_type = other DNA
gtctccatgtttgatgta

SEQ ID NO: 9745 - DNA, 18 bp, synthetic construct
  misc_feature 1..18: note = Target B2M Sequence complement
  source 1..18: mol_type = other DNA
tctccatgtttgatgtat

SEQ ID NO: 9746 - DNA, 18 bp, synthetic construct
  misc_feature 1..18: note = Target B2M Sequence complement
  source 1..18: mol_type = other DNA
ctccatgtttgatgtatc

SEQ ID NO: 9747 - DNA, 18 bp, synthetic construct
  misc_feature 1..18: note = Target B2M Sequence complement
  source 1..18: mol_type = other DNA
tccatgtttgatgtatct

SEQ ID NO: 9748 - DNA, 18 bp, synthetic construct
  misc_feature 1..18: note = Target B2M Sequence complement
  source 1..18: mol_type = other DNA
ccatgtttgatgtatctg

SEQ ID NO: 9749 - DNA, 18 bp, synthetic construct
  misc_feature 1..18: note = Target B2M Sequence complement
  source 1..18: mol_type = other DNA
catgtttgatgtatctga

SEQ ID NO: 9750 - DNA, 18 bp, synthetic construct
  misc_feature 1..18: note = Target B2M Sequence complement
  source 1..18: mol_type = other DNA
atgtttgatgtatctgag

SEQ ID NO: 9751 - DNA, 18 bp, synthetic construct
  misc_feature 1..18: note = Target B2M Sequence complement
  source 1..18: mol_type = other DNA
tgtttgatgtatctgagc

SEQ ID NO: 9752 - DNA, 18 bp, synthetic construct
  misc_feature 1..18: note = Target B2M Sequence complement
  source 1..18: mol_type = other DNA
gtttgatgtatctgagca

SEQ ID NO: 9753 - DNA, 18 bp, synthetic construct
  misc_feature 1..18: note = Target B2M Sequence complement
  source 1..18: mol_type = other DNA
tttgatgtatctgagcag

SEQ ID NO: 9754 - DNA, 18 bp, synthetic construct
  misc_feature 1..18: note = Target B2M Sequence complement
  source 1..18: mol_type = other DNA
ttgatgtatctgagcagg

SEQ ID NO: 9755 - DNA, 18 bp, synthetic construct
  misc_feature 1..18: note = Target B2M Sequence complement
  source 1..18: mol_type = other DNA
tgatgtatctgagcaggt

SEQ ID NO: 9756 - DNA, 18 bp, synthetic construct
  misc_feature 1..18: note = Target B2M Sequence complement
  source 1..18: mol_type = other DNA
gatgtatctgagcaggtt

SEQ ID NO: 9757 - DNA, 18 bp, synthetic construct
  misc_feature 1..18: note = Target B2M Sequence complement
  source 1..18: mol_type = other DNA
atgtatctgagcaggttg

SEQ ID NO: 9758 - DNA, 18 bp, synthetic construct
  misc_feature 1..18: note = Target B2M Sequence complement
  source 1..18: mol_type = other DNA
tgtatctgagcaggttgc

SEQ ID NO: 9759 - DNA, 18 bp, synthetic construct
  misc_feature 1..18: note = Target B2M Sequence complement
  source 1..18: mol_type = other DNA
gtatctgagcaggttgct

SEQ ID NO: 9760 - DNA, 18 bp, synthetic construct
  misc_feature 1..18: note = Target B2M Sequence complement
  source 1..18: mol_type = other DNA
tatctgagcaggttgctc

SEQ ID NO: 9761 - DNA, 18 bp, synthetic construct
  misc_feature 1..18: note = Target B2M Sequence complement
  source 1..18: mol_type = other DNA
atctgagcaggttgctcc

SEQ ID NO: 9762 - DNA, 18 bp, synthetic construct
  misc_feature 1..18: note = Target B2M Sequence complement
  source 1..18: mol_type = other DNA
tctgagcaggttgctcca

SEQ ID NO: 9763 - DNA, 18 bp, synthetic construct
  misc_feature 1..18: note = Target B2M Sequence complement
  source 1..18: mol_type = other DNA
tgagcaggttgctccaca

SEQ ID NO: 9764 - DNA, 18 bp, synthetic construct
  misc_feature 1..18: note = Target B2M Sequence complement
  source 1..18: mol_type = other DNA
caggttgctccacaggta

SEQ ID NO: 9765 - DNA, 18 bp, synthetic construct
  misc_feature 1..18: note = Target B2M Sequence complement
  source 1..18: mol_type = other DNA
aggttgctccacaggtag

SEQ ID NO: 9766 - DNA, 18 bp, synthetic construct
  misc_feature 1..18: note = Target B2M Sequence complement
  source 1..18: mol_type = other DNA
gttgctccacaggtagct

SEQ ID NO: 9767 - DNA, 18 bp, synthetic construct
  misc_feature 1..18: note = Target B2M Sequence complement
  source 1..18: mol_type = other DNA
ttgctccacaggtagctc

SEQ ID NO: 9768 - DNA, 18 bp, synthetic construct
  misc_feature 1..18: note = Target B2M Sequence complement
  source 1..18: mol_type = other DNA
tgctccacaggtagctct

SEQ ID NO: 9769 - DNA, 18 bp, synthetic construct
  misc_feature 1..18: note = Target B2M Sequence complement
  source 1..18: mol_type = other DNA
gctccacaggtagctcta

SEQ ID NO: 9770 - DNA, 18 bp, synthetic construct
  misc_feature 1..18: note = Target B2M Sequence complement
  source 1..18: mol_type = other DNA
ctccacaggtagctctag

SEQ ID NO: 9771 - DNA, 18 bp, synthetic construct
  misc_feature 1..18: note = Target B2M Sequence complement
  source 1..18: mol_type = other DNA
tccacaggtagctctagg

SEQ ID NO: 9772 - DNA, 18 bp, synthetic construct
  misc_feature 1..18: note = Target B2M Sequence complement
  source 1..18: mol_type = other DNA
ccacaggtagctctagga

SEQ ID NO: 9773 - DNA, 18 bp, synthetic construct
  misc_feature 1..18: note = Target B2M Sequence complement
  source 1..18: mol_type = other DNA
cacaggtagctctaggag

SEQ ID NO: 9774 - DNA, 18 bp, synthetic construct
  misc_feature 1..18: note = Target B2M Sequence complement
  source 1..18: mol_type = other DNA
acaggtagctctaggagg

SEQ ID NO: 9775 - DNA, 18 bp, synthetic construct
  misc_feature 1..18: note = Target B2M Sequence complement
  source 1..18: mol_type = other DNA
taggagggctggcaactt

SEQ ID NO: 9776 - DNA, 18 bp, synthetic construct
  misc_feature 1..18: note = Target B2M Sequence complement
  source 1..18: mol_type = other DNA
aggagggctggcaactta

SEQ ID NO: 9777 - DNA, 18 bp, synthetic construct
  misc_feature 1..18: note = Target B2M Sequence complement
  source 1..18: mol_type = other DNA
gagggctggcaacttaga

SEQ ID NO: 9778 - DNA, 18 bp, synthetic construct
  misc_feature 1..18: note = Target B2M Sequence complement
  source 1..18: mol_type = other DNA
agggctggcaacttagag

SEQ ID NO: 9779 - DNA, 18 bp, synthetic construct
  misc_feature 1..18: note = Target B2M Sequence complement
  source 1..18: mol_type = other DNA
ggctggcaacttagaggt

SEQ ID NO: 9780 - DNA, 18 bp, synthetic construct
  misc_feature 1..18: note = Target B2M Sequence complement
  source 1..18: mol_type = other DNA
gctggcaacttagaggtg

SEQ ID NO: 9781 - DNA, 18 bp, synthetic construct
  misc_feature 1..18: note = Target B2M Sequence complement
  source 1..18: mol_type = other DNA
ctggcaacttagaggtgg

SEQ ID NO: 9782 - DNA, 18 bp, synthetic construct
  misc_feature 1..18: note = Target B2M Sequence complement
  source 1..18: mol_type = other DNA
tggcaacttagaggtggg

SEQ ID NO: 9783 - DNA, 18 bp, synthetic construct
  misc_feature 1..18: note = Target B2M Sequence complement
  source 1..18: mol_type = other DNA
gggagcagagaattctct

SEQ ID NO: 9784 - DNA, 18 bp, synthetic construct
  misc_feature 1..18: note = Target B2M Sequence complement
  source 1..18: mol_type = other DNA
ggagcagagaattctctt

SEQ ID NO: 9785 - DNA, 18 bp, synthetic construct
  misc_feature 1..18: note = Target B2M Sequence complement
  source 1..18: mol_type = other DNA
gagcagagaattctctta

SEQ ID NO: 9786 - DNA, 18 bp, synthetic construct
  misc_feature 1..18: note = Target B2M Sequence complement
  source 1..18: mol_type = other DNA
agcagagaattctcttat

SEQ ID NO: 9787 - DNA, 18 bp, synthetic construct
  misc_feature 1..18: note = Target B2M Sequence complement
  source 1..18: mol_type = other DNA
gcagagaattctcttatc

SEQ ID NO: 9788 - DNA, 18 bp, synthetic construct
  misc_feature 1..18: note = Target B2M Sequence complement
  source 1..18: mol_type = other DNA
cagagaattctcttatcc

SEQ ID NO: 9789 - DNA, 18 bp, synthetic construct
  misc_feature 1..18: note = Target B2M Sequence complement
  source 1..18: mol_type = other DNA
agagaattctcttatcca

SEQ ID NO: 9790 - DNA, 18 bp, synthetic construct
  misc_feature 1..18: note = Target B2M Sequence complement
  source 1..18: mol_type = other DNA
gagaattctcttatccaa

SEQ ID NO: 9791 - DNA, 18 bp, synthetic construct
  misc_feature 1..18: note = Target B2M Sequence complement
  source 1..18: mol_type = other DNA
agaattctcttatccaac

SEQ ID NO: 9792 - DNA, 18 bp, synthetic construct
  misc_feature 1..18: note = Target B2M Sequence complement
  source 1..18: mol_type = other DNA
gaattctcttatccaaca

SEQ ID NO: 9793 - DNA, 18 bp, synthetic construct
  misc_feature 1..18: note = Target B2M Sequence complement
  source 1..18: mol_type = other DNA
aattctcttatccaacat

SEQ ID NO: 9794 - DNA, 18 bp, synthetic construct
  misc_feature 1..18: note = Target B2M Sequence complement
  source 1..18: mol_type = other DNA
attctcttatccaacatc

SEQ ID NO: 9795 - DNA, 18 bp, synthetic construct
  misc_feature 1..18: note = Target B2M Sequence complement
  source 1..18: mol_type = other DNA
ttctcttatccaacatca

SEQ ID NO: 9796 - DNA, 18 bp, synthetic construct
  misc_feature 1..18: note = Target B2M Sequence complement
  source 1..18: mol_type = other DNA
tctcttatccaacatcaa

SEQ ID NO: 9797 - DNA, 18 bp, synthetic construct
  misc_feature 1..18: note = Target B2M Sequence complement
  source 1..18: mol_type = other DNA
ctcttatccaacatcaac

SEQ ID NO: 9798 - DNA, 18 bp, synthetic construct
  misc_feature 1..18: note = Target B2M Sequence complement
  source 1..18: mol_type = other DNA
tcttatccaacatcaaca

SEQ ID NO: 9799 - DNA, 18 bp, synthetic construct
  misc_feature 1..18: note = Target B2M Sequence complement
  source 1..18: mol_type = other DNA
cttatccaacatcaacat

SEQ ID NO: 9800 - DNA, 18 bp, synthetic construct
  misc_feature 1..18: note = Target B2M Sequence complement
  source 1..18: mol_type = other DNA
ttatccaacatcaacatc

SEQ ID NO: 9801 - DNA, 18 bp, synthetic construct
  misc_feature 1..18: note = Target B2M Sequence complement
  source 1..18: mol_type = other DNA
tatccaacatcaacatct

SEQ ID NO: 9802 - DNA, 18 bp, synthetic construct
  misc_feature 1..18: note = Target B2M Sequence complement
  source 1..18: mol_type = other DNA
atccaacatcaacatctt

SEQ ID NO: 9803 - DNA, 18 bp, synthetic construct
  misc_feature 1..18: note = Target B2M Sequence complement
  source 1..18: mol_type = other DNA
tccaacatcaacatcttg

SEQ ID NO: 9804 - DNA, 18 bp, synthetic construct
  misc_feature 1..18: note = Target B2M Sequence complement
  source 1..18: mol_type = other DNA
ccaacatcaacatcttgg

SEQ ID NO: 9805 - DNA, 18 bp, synthetic construct
  misc_feature 1..18: note = Target B2M Sequence complement
  source 1..18: mol_type = other DNA
caacatcaacatcttggt

SEQ ID NO: 9806 - DNA, 18 bp, synthetic construct
  misc_feature 1..18: note = Target B2M Sequence complement
  source 1..18: mol_type = other DNA
aacatcaacatcttggtc

SEQ ID NO: 9807 - DNA, 18 bp, synthetic construct
  misc_feature 1..18: note = Target B2M Sequence complement
  source 1..18: mol_type = other DNA
acatcaacatcttggtca

SEQ ID NO: 9808 - DNA, 18 bp, synthetic construct
  misc_feature 1..18: note = Target B2M Sequence complement
  source 1..18: mol_type = other DNA
catcaacatcttggtcag

SEQ ID NO: 9809 - DNA, 18 bp, synthetic construct
  misc_feature 1..18: note = Target B2M Sequence complement
  source 1..18: mol_type = other DNA
atcaacatcttggtcaga

SEQ ID NO: 9810 - DNA, 18 bp, synthetic construct
  misc_feature 1..18: note = Target B2M Sequence complement
  source 1..18: mol_type = other DNA
tcaacatcttggtcagat

SEQ ID NO: 9811 - DNA, 18 bp, synthetic construct
  misc_feature 1..18: note = Target B2M Sequence complement
  source 1..18: mol_type = other DNA
caacatcttggtcagatt

SEQ ID NO: 9812 - DNA, 18 bp, synthetic construct
  misc_feature 1..18: note = Target B2M Sequence complement
  source 1..18: mol_type = other DNA
aacatcttggtcagattt

SEQ ID NO: 9813 - DNA, 18 bp, synthetic construct
  misc_feature 1..18: note = Target B2M Sequence complement
  source 1..18: mol_type = other DNA
acatcttggtcagatttg

SEQ ID NO: 9814 - DNA, 18 bp, synthetic construct
  misc_feature 1..18: note = Target B2M Sequence complement
  source 1..18: mol_type = other DNA
catcttggtcagatttga

SEQ ID NO: 9815 - DNA, 18 bp, synthetic construct
  misc_feature 1..18: note = Target B2M Sequence complement
  source 1..18: mol_type = other DNA
atcttggtcagatttgaa

SEQ ID NO: 9816 - DNA, 18 bp, synthetic construct
  misc_feature 1..18: note = Target B2M Sequence complement
  source 1..18: mol_type = other DNA
tcttggtcagatttgaac

SEQ ID NO: 9817 - DNA, 18 bp, synthetic construct
  misc_feature 1..18: note = Target B2M Sequence complement
  source 1..18: mol_type = other DNA
cttggtcagatttgaact

SEQ ID NO: 9818 - DNA, 18 bp, synthetic construct
  misc_feature 1..18: note = Target B2M Sequence complement
  source 1..18: mol_type = other DNA
ttggtcagatttgaactc

SEQ ID NO: 9819 - DNA, 18 bp, synthetic construct
  misc_feature 1..18: note = Target B2M Sequence complement
  source 1..18: mol_type = other DNA
tggtcagatttgaactct

SEQ ID NO: 9820 - DNA, 18 bp, synthetic construct
  misc_feature 1..18: note = Target B2M Sequence complement
  source 1..18: mol_type = other DNA
ggtcagatttgaactctt

SEQ ID NO: 9821 - DNA, 18 bp, synthetic construct
  misc_feature 1..18: note = Target B2M Sequence complement
  source 1..18: mol_type = other DNA
gtcagatttgaactcttc

SEQ ID NO: 9822 - DNA, 18 bp, synthetic construct
  misc_feature 1..18: note = Target B2M Sequence complement
  source 1..18: mol_type = other DNA
tcagatttgaactcttca

SEQ ID NO: 9823 - DNA, 18 bp, synthetic construct
  misc_feature 1..18: note = Target B2M Sequence complement
  source 1..18: mol_type = other DNA
cagatttgaactcttcaa

SEQ ID NO: 9824 - DNA, 18 bp, synthetic construct
  misc_feature 1..18: note = Target B2M Sequence complement
  source 1..18: mol_type = other DNA
agatttgaactcttcaat

SEQ ID NO: 9825 - DNA, 18 bp, synthetic construct
  misc_feature 1..18: note = Target B2M Sequence complement
  source 1..18: mol_type = other DNA
gatttgaactcttcaatc

SEQ ID NO: 9826 - DNA, 18 bp, synthetic construct
  misc_feature 1..18: note = Target B2M Sequence complement
  source 1..18: mol_type = other DNA
atttgaactcttcaatct

SEQ ID NO: 9827 - DNA, 18 bp, synthetic construct
  misc_feature 1..18: note = Target B2M Sequence complement
  source 1..18: mol_type = other DNA
tttgaactcttcaatctc

SEQ ID NO: 9828 - DNA, 18 bp, synthetic construct
  misc_feature 1..18: note = Target B2M Sequence complement
  source 1..18: mol_type = other DNA
ttgaactcttcaatctct

SEQ ID NO: 9829 - DNA, 18 bp, synthetic construct
  misc_feature 1..18: note = Target B2M Sequence complement
  source 1..18: mol_type = other DNA
tgaactcttcaatctctt

SEQ ID NO: 9830 - DNA, 18 bp, synthetic construct
  misc_feature 1..18: note = Target B2M Sequence complement
  source 1..18: mol_type = other DNA
gaactcttcaatctcttg

SEQ ID NO: 9831 - DNA, 18 bp, synthetic construct
  misc_feature 1..18: note = Target B2M Sequence complement
  source 1..18: mol_type = other DNA
aactcttcaatctcttgc

SEQ ID NO: 9832 - DNA, 18 bp, synthetic construct
  misc_feature 1..18: note = Target B2M Sequence complement
  source 1..18: mol_type = other DNA
actcttcaatctcttgca

SEQ ID NO: 9833 - DNA, 18 bp, synthetic construct
  misc_feature 1..18: note = Target B2M Sequence complement
  source 1..18: mol_type = other DNA
ctcttcaatctcttgcac

SEQ ID NO: 9834 - DNA, 18 bp, synthetic construct
  misc_feature 1..18: note = Target B2M Sequence complement
  source 1..18: mol_type = other DNA
tcttcaatctcttgcact

SEQ ID NO: 9835 - DNA, 18 bp, synthetic construct
  misc_feature 1..18: note = Target B2M Sequence complement
  source 1..18: mol_type = other DNA
cttcaatctcttgcactc

SEQ ID NO: 9836 - DNA, 18 bp, synthetic construct
  misc_feature 1..18: note = Target B2M Sequence complement
  source 1..18: mol_type = other DNA
ttcaatctcttgcactca

SEQ ID NO: 9837 - DNA, 18 bp, synthetic construct
  misc_feature 1..18: note = Target B2M Sequence complement
  source 1..18: mol_type = other DNA
tcaatctcttgcactcaa

SEQ ID NO: 9838 - DNA, 18 bp, synthetic construct
  misc_feature 1..18: note = Target B2M Sequence complement
  source 1..18: mol_type = other DNA
caatctcttgcactcaaa

SEQ ID NO: 9839 - DNA, 18 bp, synthetic construct
  misc_feature 1..18: note = Target B2M Sequence complement
  source 1..18: mol_type = other DNA
aatctcttgcactcaaag

SEQ ID NO: 9840 - DNA, 18 bp, synthetic construct
  misc_feature 1..18: note = Target B2M Sequence complement
  source 1..18: mol_type = other DNA
atctcttgcactcaaagc

SEQ ID NO: 9841 - DNA, 18 bp, synthetic construct
  misc_feature 1..18: note = Target B2M Sequence complement
  source 1..18: mol_type = other DNA
tctcttgcactcaaagct

SEQ ID NO: 9842 - DNA, 18 bp, synthetic construct
  misc_feature 1..18: note = Target B2M Sequence complement
  source 1..18: mol_type = other DNA
ctcttgcactcaaagctt

SEQ ID NO: 9843 - DNA, 18 bp, synthetic construct
  misc_feature 1..18: note = Target B2M Sequence complement
  source 1..18: mol_type = other DNA
tcttgcactcaaagcttg

SEQ ID NO: 9844 - DNA, 18 bp, synthetic construct
  misc_feature 1..18: note = Target B2M Sequence complement
  source 1..18: mol_type = other DNA
cttgcactcaaagcttgt

SEQ ID NO: 9845 - DNA, 18 bp, synthetic construct
  misc_feature 1..18: note = Target B2M Sequence complement
  source 1..18: mol_type = other DNA
ttgcactcaaagcttgtt

SEQ ID NO: 9846 - DNA, 18 bp, synthetic construct
  misc_feature 1..18: note = Target B2M Sequence complement
  source 1..18: mol_type = other DNA
tgcactcaaagcttgtta

SEQ ID NO: 9847 - DNA, 18 bp, synthetic construct
  misc_feature 1..18: note = Target B2M Sequence complement
  source 1..18: mol_type = other DNA
gcactcaaagcttgttaa

SEQ ID NO: 9848 - DNA, 18 bp, synthetic construct
  misc_feature 1..18: note = Target B2M Sequence complement
  source 1..18: mol_type = other DNA
cactcaaagcttgttaag

SEQ ID NO: 9849 - DNA, 18 bp, synthetic construct
  misc_feature 1..18: note = Target B2M Sequence complement
  source 1..18: mol_type = other DNA
actcaaagcttgttaaga

SEQ ID NO: 9850 - DNA, 18 bp, synthetic construct
  misc_feature 1..18: note = Target B2M Sequence complement
  source 1..18: mol_type = other DNA
ctcaaagcttgttaagat

SEQ ID NO: 9851 - DNA, 18 bp, synthetic construct
  misc_feature 1..18: note = Target B2M Sequence complement
  source 1..18: mol_type = other DNA
tcaaagcttgttaagata

SEQ ID NO: 9852 - DNA, 18 bp, synthetic construct
  misc_feature 1..18: note = Target B2M Sequence complement
  source 1..18: mol_type = other DNA
caaagcttgttaagatag

SEQ ID NO: 9853 - DNA, 18 bp, synthetic construct
  misc_feature 1..18: note = Target B2M Sequence complement
  source 1..18: mol_type = other DNA
aaagcttgttaagatagt

SEQ ID NO: 9854 - DNA, 18 bp, synthetic construct
  misc_feature 1..18: note = Target B2M Sequence complement
  source 1..18: mol_type = other DNA
aagcttgttaagatagtt

SEQ ID NO: 9855 - DNA, 18 bp, synthetic construct
  misc_feature 1..18: note = Target B2M Sequence complement
  source 1..18: mol_type = other DNA
agcttgttaagatagtta

SEQ ID NO: 9856 - DNA, 18 bp, synthetic construct
  misc_feature 1..18: note = Target B2M Sequence complement
  source 1..18: mol_type = other DNA
gcttgttaagatagttaa

SEQ ID NO: 9857 - DNA, 18 bp, synthetic construct
  misc_feature 1..18: note = Target B2M Sequence complement
  source 1..18: mol_type = other DNA
cttgttaagatagttaag

SEQ ID NO: 9858 - DNA, 18 bp, synthetic construct
  misc_feature 1..18: note = Target B2M Sequence complement
  source 1..18: mol_type = other DNA
ttgttaagatagttaagc

SEQ ID NO: 9859 - DNA, 18 bp, synthetic construct
  misc_feature 1..18: note = Target B2M Sequence complement
  source 1..18: mol_type = other DNA
tgttaagatagttaagcg

SEQ ID NO: 9860 - DNA, 18 bp, synthetic construct
  misc_feature 1..18: note = Target B2M Sequence complement
  source 1..18: mol_type = other DNA
gttaagatagttaagcgt

SEQ ID NO: 9861 - DNA, 18 bp, synthetic construct
  misc_feature 1..18: note = Target B2M Sequence complement
  source 1..18: mol_type = other DNA
ttaagatagttaagcgtg

SEQ ID NO: 9862 - DNA, 18 bp, synthetic construct
  misc_feature 1..18: note = Target B2M Sequence complement
  source 1..18: mol_type = other DNA
taagatagttaagcgtgc

SEQ ID NO: 9863 - DNA, 18 bp, synthetic construct
  misc_feature 1..18: note = Target B2M Sequence complement
  source 1..18: mol_type = other DNA
aagatagttaagcgtgca

SEQ ID NO: 9864 - DNA, 18 bp, synthetic construct
  misc_feature 1..18: note = Target B2M Sequence complement
  source 1..18: mol_type = other DNA
agatagttaagcgtgcat

SEQ ID NO: 9865 - DNA, 18 bp, synthetic construct
  misc_feature 1..18: note = Target B2M Sequence complement
  source 1..18: mol_type = other DNA
gatagttaagcgtgcata

SEQ ID NO: 9866 - DNA, 18 bp, synthetic construct
  misc_feature 1..18: note = Target B2M Sequence complement
  source 1..18: mol_type = other DNA
atagttaagcgtgcataa

SEQ ID NO: 9867 - DNA, 18 bp, synthetic construct
  misc_feature 1..18: note = Target B2M Sequence complement
  source 1..18: mol_type = other DNA
tagttaagcgtgcataag

SEQ ID NO: 9868 - DNA, 18 bp, synthetic construct
  misc_feature 1..18: note = Target B2M Sequence complement
  source 1..18: mol_type = other DNA
agttaagcgtgcataagt

SEQ ID NO: 9869 - DNA, 18 bp, synthetic construct
  misc_feature 1..18: note = Target B2M Sequence complement
  source 1..18: mol_type = other DNA
gttaagcgtgcataagtt

SEQ ID NO: 9870 - DNA, 18 bp, synthetic construct
  misc_feature 1..18: note = Target B2M Sequence complement
  source 1..18: mol_type = other DNA
ttaagcgtgcataagtta

SEQ ID NO: 9871 - DNA, 18 bp, synthetic construct
  misc_feature 1..18: note = Target B2M Sequence complement
  source 1..18: mol_type = other DNA
taagcgtgcataagttaa

SEQ ID NO: 9872 - DNA, 18 bp, synthetic construct
  misc_feature 1..18: note = Target B2M Sequence complement
  source 1..18: mol_type = other DNA
aagcgtgcataagttaac

SEQ ID NO: 9873 - DNA, 18 bp, synthetic construct
  misc_feature 1..18: note = Target B2M Sequence complement
  source 1..18: mol_type = other DNA
agcgtgcataagttaact

SEQ ID NO: 9874 - DNA, 18 bp, synthetic construct
  misc_feature 1..18: note = Target B2M Sequence complement
  source 1..18: mol_type = other DNA
gcgtgcataagttaactt

SEQ ID NO: 9875 - DNA, 18 bp, synthetic construct
  misc_feature 1..18: note = Target B2M Sequence complement
  source 1..18: mol_type = other DNA
cgtgcataagttaacttc

SEQ ID NO: 9876 - DNA, 18 bp, synthetic construct
  misc_feature 1..18: note = Target B2M Sequence complement
  source 1..18: mol_type = other DNA
gtgcataagttaacttcc

SEQ ID NO: 9877 - DNA, 18 bp, synthetic construct
  misc_feature 1..18: note = Target B2M Sequence complement
  source 1..18: mol_type = other DNA
tgcataagttaacttcca

SEQ ID NO: 9878 - DNA, 18 bp, synthetic construct
  misc_feature 1..18: note = Target B2M Sequence complement
  source 1..18: mol_type = other DNA
gcataagttaacttccaa

SEQ ID NO: 9879 - DNA, 18 bp, synthetic construct
  misc_feature 1..18: note = Target B2M Sequence complement
  source 1..18: mol_type = other DNA
cataagttaacttccaat

SEQ ID NO: 9880 - DNA, 18 bp, synthetic construct
  misc_feature 1..18: note = Target B2M Sequence complement
  source 1..18: mol_type = other DNA
agttaacttccaatttac

SEQ ID NO: 9881 - DNA, 18 bp, synthetic construct
  misc_feature 1..18: note = Target B2M Sequence complement
  source 1..18: mol_type = other DNA
gttaacttccaatttaca

SEQ ID NO: 9882 - DNA, 18 bp, synthetic construct
  misc_feature 1..18: note = Target B2M Sequence complement
  source 1..18: mol_type = other DNA
aacttccaatttacatac

SEQ ID NO: 9883 - DNA, 18 bp, synthetic construct
  misc_feature 1..18: note = Target B2M Sequence complement
  source 1..18: mol_type = other DNA
acttccaatttacatact

SEQ ID NO: 9884 - DNA, 18 bp, synthetic construct
  misc_feature 1..18: note = Target B2M Sequence complement
  source 1..18: mol_type = other DNA
cttccaatttacatactc

SEQ ID NO: 9885 - DNA, 18 bp, synthetic construct
  misc_feature 1..18: note = Target B2M Sequence complement
  source 1..18: mol_type = other DNA
ttccaatttacatactct

SEQ ID NO: 9886 - DNA, 18 bp, synthetic construct
  misc_feature 1..18: note = Target B2M Sequence complement
  source 1..18: mol_type = other DNA
tccaatttacatactctg

SEQ ID NO: 9887 - DNA, 18 bp, synthetic construct
  misc_feature 1..18: note = Target B2M Sequence complement
  source 1..18: mol_type = other DNA
ccaatttacatactctgc

SEQ ID NO: 9888 - DNA, 18 bp, synthetic construct
  misc_feature 1..18: note = Target B2M Sequence complement
  source 1..18: mol_type = other DNA
caatttacatactctgct

SEQ ID NO: 9889 - DNA, 18 bp, synthetic construct
  misc_feature 1..18: note = Target B2M Sequence complement
  source 1..18: mol_type = other DNA
aatttacatactctgctt

SEQ ID NO: 9890 - DNA, 18 bp, synthetic construct
  misc_feature 1..18: note = Target B2M Sequence complement
  source 1..18: mol_type = other DNA
atttacatactctgctta

SEQ ID NO: 9891 - DNA, 18 bp, synthetic construct
  misc_feature 1..18: note = Target B2M Sequence complement
  source 1..18: mol_type = other DNA
tttacatactctgcttag

SEQ ID NO: 9892 - DNA, 18 bp, synthetic construct
  misc_feature 1..18: note = Target B2M Sequence complement
  source 1..18: mol_type = other DNA
ttacatactctgcttaga

SEQ ID NO: 9893 - DNA, 18 bp, synthetic construct
  misc_feature 1..18: note = Target B2M Sequence complement
  source 1..18: mol_type = other DNA
tacatactctgcttagaa

SEQ ID NO: 9894 - DNA, 18 bp, synthetic construct
  misc_feature 1..18: note = Target B2M Sequence complement
  source 1..18: mol_type = other DNA
acatactctgcttagaat

SEQ ID NO: 9895 - DNA, 18 bp, synthetic construct
  misc_feature 1..18: note = Target B2M Sequence complement
  source 1..18: mol_type = other DNA
catactctgcttagaatt

SEQ ID NO: 9896 - DNA, 18 bp, synthetic construct
  misc_feature 1..18: note = Target B2M Sequence complement
  source 1..18: mol_type = other DNA
atactctgcttagaattt

SEQ ID NO: 9897 - DNA, 18 bp, synthetic construct
  misc_feature 1..18: note = Target B2M Sequence complement
  source 1..18: mol_type = other DNA
tactctgcttagaatttg

SEQ ID NO: 9898 - DNA, 18 bp, synthetic construct
  misc_feature 1..18: note = Target B2M Sequence complement
  source 1..18: mol_type = other DNA
actctgcttagaatttgg

SEQ ID NO: 9899 - DNA, 18 bp, synthetic construct
  misc_feature 1..18: note = Target B2M Sequence complement
  source 1..18: mol_type = other DNA
ctctgcttagaatttggg

SEQ ID NO: 9900 - DNA, 18 bp, synthetic construct
  misc_feature 1..18: note = Target B2M Sequence complement
  source 1..18: mol_type = other DNA
agaaatataattgacagg

SEQ ID NO: 9901 - DNA, 18 bp, synthetic construct
  misc_feature 1..18: note = Target B2M Sequence complement
  source 1..18: mol_type = other DNA
gaaatataattgacagga

SEQ ID NO: 9902 - DNA, 18 bp, synthetic construct
  misc_feature 1..18: note = Target B2M Sequence complement
  source 1..18: mol_type = other DNA
taattgacaggattattg

SEQ ID NO: 9903 - DNA, 18 bp, synthetic construct
  misc_feature 1..18: note = Target B2M Sequence complement
  source 1..18: mol_type = other DNA
aattgacaggattattgg

SEQ ID NO: 9904 - DNA, 18 bp, synthetic construct
  misc_feature 1..18: note = Target B2M Sequence complement
  source 1..18: mol_type = other DNA
attgacaggattattgga

SEQ ID NO: 9905 - DNA, 18 bp, synthetic construct
  misc_feature 1..18: note = Target B2M Sequence complement
  source 1..18: mol_type = other DNA
ttgacaggattattggaa

SEQ ID NO: 9906 - DNA, 18 bp, synthetic construct
  misc_feature 1..18: note = Target B2M Sequence complement
  source 1..18: mol_type = other DNA
tgacaggattattggaaa

SEQ ID NO: 9907 - DNA, 18 bp, synthetic construct
  misc_feature 1..18: note = Target B2M Sequence complement
  source 1..18: mol_type = other DNA
gacaggattattggaaat

SEQ ID NO: 9908 - DNA, 18 bp, synthetic construct
  misc_feature 1..18: note = Target B2M Sequence complement
  source 1..18: mol_type = other DNA
acaggattattggaaatt

SEQ ID NO: 9909 - DNA, 18 bp, synthetic construct
  misc_feature 1..18: note = Target B2M Sequence complement
  source 1..18: mol_type = other DNA
caggattattggaaattt

SEQ ID NO: 9910 - DNA, 18 bp, synthetic construct
  misc_feature 1..18: note = Target B2M Sequence complement
  source 1..18: mol_type = other DNA
aggattattggaaatttg

SEQ ID NO: 9911 - DNA, 18 bp, synthetic construct
  misc_feature 1..18: note = Target B2M Sequence complement
  source 1..18: mol_type = other DNA
ggattattggaaatttgt

SEQ ID NO: 9912 - DNA, 18 bp, synthetic construct
  misc_feature 1..18: note = Target B2M Sequence complement
  source 1..18: mol_type = other DNA
acatttgataaagtaagg

SEQ ID NO: 9913 - DNA, 18 bp, synthetic construct
  misc_feature 1..18: note = Target B2M Sequence complement
  source 1..18: mol_type = other DNA
catttgataaagtaaggc

SEQ ID NO: 9914 - DNA, 18 bp, synthetic construct
  misc_feature 1..18: note = Target B2M Sequence complement
  source 1..18: mol_type = other DNA
atttgataaagtaaggca

SEQ ID NO: 9915 - DNA, 18 bp, synthetic construct
  misc_feature 1..18: note = Target B2M Sequence complement
  source 1..18: mol_type = other DNA
tttgataaagtaaggcat

SEQ ID NO: 9916 - DNA, 18 bp, synthetic construct
  misc_feature 1..18: note = Target B2M Sequence complement
  source 1..18: mol_type = other DNA
ttgataaagtaaggcatg

SEQ ID NO: 9917 - DNA, 18 bp, synthetic construct
  misc_feature 1..18: note = Target B2M Sequence complement
  source 1..18: mol_type = other DNA
tgataaagtaaggcatgg

SEQ ID NO: 9918 - DNA, 18 bp, synthetic construct
  misc_feature 1..18: note = Target B2M Sequence complement
  source 1..18: mol_type = other DNA
gataaagtaaggcatggt

SEQ ID NO: 9919 - DNA, 18 bp, synthetic construct
  misc_feature 1..18: note = Target B2M Sequence complement
  source 1..18: mol_type = other DNA
ataaagtaaggcatggtt

SEQ ID NO: 9920 - DNA, 18 bp, synthetic construct
  misc_feature 1..18: note = Target B2M Sequence complement
  source 1..18: mol_type = other DNA
taaagtaaggcatggttg

SEQ ID NO: 9921 - DNA, 18 bp, synthetic construct
  misc_feature 1..18: note = Target B2M Sequence complement
  source 1..18: mol_type = other DNA
aaagtaaggcatggttgt

SEQ ID NO: 9922 - DNA, 18 bp, synthetic construct
  misc_feature 1..18: note = Target B2M Sequence complement
  source 1..18: mol_type = other DNA
aagtaaggcatggttgtg

SEQ ID NO: 9923 - DNA, 18 bp, synthetic construct
  misc_feature 1..18: note = Target B2M Sequence complement
  source 1..18: mol_type = other DNA
agtaaggcatggttgtgg

SEQ ID NO: 9924 - DNA, 18 bp, synthetic construct
  misc_feature 1..18: note = Target B2M Sequence complement
  source 1..18: mol_type = other DNA
gtaaggcatggttgtggt

SEQ ID NO: 9925 - DNA, 18 bp, synthetic construct
  misc_feature 1..18: note = Target B2M Sequence complement
  source 1..18: mol_type = other DNA
taaggcatggttgtggtt

SEQ ID NO: 9926 - DNA, 18 bp, synthetic construct
  misc_feature 1..18: note = Target B2M Sequence complement
  source 1..18: mol_type = other DNA
aaggcatggttgtggtta

SEQ ID NO: 9927 - DNA, 18 bp, synthetic construct
  misc_feature 1..18: note = Target B2M Sequence complement
  source 1..18: mol_type = other DNA
aggcatggttgtggttaa

SEQ ID NO: 9928 - DNA, 18 bp, synthetic construct
  misc_feature 1..18: note = Target B2M Sequence complement
  source 1..18: mol_type = other DNA
ggcatggttgtggttaat

SEQ ID NO: 9929 - DNA, 18 bp, synthetic construct
  misc_feature 1..18: note = Target B2M Sequence complement
  source 1..18: mol_type = other DNA
gcatggttgtggttaatc

SEQ ID NO: 9930 - DNA, 18 bp, synthetic construct
  misc_feature 1..18: note = Target B2M Sequence complement
  source 1..18: mol_type = other DNA
catggttgtggttaatct

SEQ ID NO: 9931 - DNA, 18 bp, synthetic construct
  misc_feature 1..18: note = Target B2M Sequence complement
  source 1..18: mol_type = other DNA
atggttgtggttaatctg

SEQ ID NO: 9932 - DNA, 18 bp, synthetic construct
  misc_feature 1..18: note = Target B2M Sequence complement
  source 1..18: mol_type = other DNA
tggttgtggttaatctgg

SEQ ID NO: 9933 - DNA, 18 bp, synthetic construct
  misc_feature 1..18: note = Target B2M Sequence complement
  source 1..18: mol_type = other DNA
ggttgtggttaatctggt

SEQ ID NO: 9934 - DNA, 18 bp, synthetic construct
  misc_feature 1..18: note = Target B2M Sequence complement
  source 1..18: mol_type = other DNA
gttgtggttaatctggtt

SEQ ID NO: 9935 - DNA, 18 bp, synthetic construct
  misc_feature 1..18: note = Target B2M Sequence complement
  source 1..18: mol_type = other DNA
ttgtggttaatctggttt

SEQ ID NO: 9936 - DNA, 18 bp, synthetic construct
  misc_feature 1..18: note = Target B2M Sequence complement
  source 1..18: mol_type = other DNA
tgtggttaatctggttta

SEQ ID NO: 9937 - DNA, 18 bp, synthetic construct
  misc_feature 1..18: note = Target B2M Sequence complement
  source 1..18: mol_type = other DNA
gtggttaatctggtttat

SEQ ID NO: 9938 - DNA, 18 bp, synthetic construct
  misc_feature 1..18: note = Target B2M Sequence complement
  source 1..18: mol_type = other DNA
tggttaatctggtttatt

SEQ ID NO: 9939 - DNA, 18 bp, synthetic construct
  misc_feature 1..18: note = Target B2M Sequence complement
  source 1..18: mol_type = other DNA
ggttaatctggtttattt

SEQ ID NO: 9940 - DNA, 18 bp, synthetic construct
  misc_feature 1..18: note = Target B2M Sequence complement
  source 1..18: mol_type = other DNA
tttgttccacaagttaaa

SEQ ID NO: 9941 - DNA, 18 bp, synthetic construct
  misc_feature 1..18: note = Target B2M Sequence complement
  source 1..18: mol_type = other DNA
ttgttccacaagttaaat

SEQ ID NO: 9942 - DNA, 18 bp, synthetic construct
  misc_feature 1..18: note = Target B2M Sequence complement
  source 1..18: mol_type = other DNA
tgttccacaagttaaata

SEQ ID NO: 9943 - DNA, 18 bp, synthetic construct
  misc_feature 1..18: note = Target B2M Sequence complement
  source 1..18: mol_type = other DNA
gttccacaagttaaataa

SEQ ID NO: 9944 - DNA, 18 bp, synthetic construct
  misc_feature 1..18: note = Target B2M Sequence complement
  source 1..18: mol_type = other DNA
ccacaagttaaataaatc

SEQ ID NO: 9945 - DNA, 19 bp, synthetic construct
  misc_feature 1..19: note = Target B2M Sequence complement
  source 1..19: mol_type = other DNA
attcctgaagctgacagca

SEQ ID NO: 9946 - DNA, 19 bp, synthetic construct
  misc_feature 1..19: note = Target B2M Sequence complement
  source 1..19: mol_type = other DNA
ttcctgaagctgacagcat

SEQ ID NO: 9947 - DNA, 19 bp, synthetic construct
  misc_feature 1..19: note = Target B2M Sequence complement
  source 1..19: mol_type = other DNA
tcctgaagctgacagcatt

SEQ ID NO: 9948 - DNA, 19 bp, synthetic construct
  misc_feature 1..19: note = Target B2M Sequence complement
  source 1..19: mol_type = other DNA
cctgaagctgacagcattc

SEQ ID NO: 9949 - DNA, 19 bp, synthetic construct
  misc_feature 1..19: note = Target B2M Sequence complement
  source 1..19: mol_type = other DNA
ctgaagctgacagcattcg

SEQ ID NO: 9950 - DNA, 19 bp, synthetic construct
  misc_feature 1..19: note = Target B2M Sequence complement
  source 1..19: mol_type = other DNA
tgaagctgacagcattcgg

SEQ ID NO: 9951 - DNA, 19 bp, synthetic construct
  misc_feature 1..19: note = Target B2M Sequence complement
  source 1..19: mol_type = other DNA
gaagctgacagcattcggg

SEQ ID NO: 9952 - DNA, 19 bp, synthetic construct
  misc_feature 1..19: note = Target B2M Sequence complement
  source 1..19: mol_type = other DNA
aagctgacagcattcgggc

SEQ ID NO: 9953 - DNA, 19 bp, synthetic construct
  misc_feature 1..19: note = Target B2M Sequence complement
  source 1..19: mol_type = other DNA
cttagctgtgctcgcgcta

SEQ ID NO: 9954 - DNA, 19 bp, synthetic construct
  misc_feature 1..19: note = Target B2M Sequence complement
  source 1..19: mol_type = other DNA
ttagctgtgctcgcgctac

SEQ ID NO: 9955 - DNA, 19 bp, synthetic construct
  misc_feature 1..19: note = Target B2M Sequence complement
  source 1..19: mol_type = other DNA
tagctgtgctcgcgctact

SEQ ID NO: 9956 - DNA, 19 bp, synthetic construct
  misc_feature 1..19: note = Target B2M Sequence complement
  source 1..19: mol_type = other DNA
tgtgctcgcgctactctct

SEQ ID NO: 9957 - DNA, 19 bp, synthetic construct
  misc_feature 1..19: note = Target B2M Sequence complement
  source 1..19: mol_type = other DNA
tgctcgcgctactctctct

SEQ ID NO: 9958 - DNA, 19 bp, synthetic construct
  misc_feature 1..19: note = Target B2M Sequence complement
  source 1..19: mol_type = other DNA
gctcgcgctactctctctt

SEQ ID NO: 9959 - DNA, 19 bp, synthetic construct
  misc_feature 1..19: note = Target B2M Sequence complement
  source 1..19: mol_type = other DNA
ctcgcgctactctctcttt

SEQ ID NO: 9960 - DNA, 19 bp, synthetic construct
  misc_feature 1..19: note = Target B2M Sequence complement
  source 1..19: mol_type = other DNA
tcgcgctactctctctttc

SEQ ID NO: 9961 - DNA, 19 bp, synthetic construct
  misc_feature 1..19: note = Target B2M Sequence complement
  source 1..19: mol_type = other DNA
cgcgctactctctctttct

SEQ ID NO: 9962 - DNA, 19 bp, synthetic construct
  misc_feature 1..19: note = Target B2M Sequence complement
  source 1..19: mol_type = other DNA
gcgctactctctctttctg

SEQ ID NO: 9963 - DNA, 19 bp, synthetic construct
  misc_feature 1..19: note = Target B2M Sequence complement
  source 1..19: mol_type = other DNA
cgctactctctctttctgg

SEQ ID NO: 9964 - DNA, 19 bp, synthetic construct
  misc_feature 1..19: note = Target B2M Sequence complement
  source 1..19: mol_type = other DNA
gctactctctctttctggc

SEQ ID NO: 9965 - DNA, 19 bp, synthetic construct
  misc_feature 1..19: note = Target B2M Sequence complement
  source 1..19: mol_type = other DNA
ctactctctctttctggcc

SEQ ID NO: 9966 - DNA, 19 bp, synthetic construct
  misc_feature 1..19: note = Target B2M Sequence complement
  source 1..19: mol_type = other DNA
tactctctctttctggcct

SEQ ID NO: 9967 - DNA, 19 bp, synthetic construct
  misc_feature 1..19: note = Target B2M Sequence complement
  source 1..19: mol_type = other DNA
actctctctttctggcctg

SEQ ID NO: 9968 - DNA, 19 bp, synthetic construct
  misc_feature 1..19: note = Target B2M Sequence complement
  source 1..19: mol_type = other DNA
ctctctctttctggcctgg

SEQ ID NO: 9969 - DNA, 19 bp, synthetic construct
  misc_feature 1..19: note = Target B2M Sequence complement
  source 1..19: mol_type = other DNA
tctctctttctggcctgga

SEQ ID NO: 9970 - DNA, 19 bp, synthetic construct
  misc_feature 1..19: note = Target B2M Sequence complement
  source 1..19: mol_type = other DNA
ctctctttctggcctggag

SEQ ID NO: 9971 - DNA, 19 bp, synthetic construct
  misc_feature 1..19: note = Target B2M Sequence complement
  source 1..19: mol_type = other DNA
tctctttctggcctggagg

SEQ ID NO: 9972 - DNA, 19 bp, synthetic construct
  misc_feature 1..19: note = Target B2M Sequence complement
  source 1..19: mol_type = other DNA
tctttctggcctggaggct

SEQ ID NO: 9973 - DNA, 19 bp, synthetic construct
  misc_feature 1..19: note = Target B2M Sequence complement
  source 1..19: mol_type = other DNA
ctttctggcctggaggcta

SEQ ID NO: 9974 - DNA, 19 bp, synthetic construct
  misc_feature 1..19: note = Target B2M Sequence complement
  source 1..19: mol_type = other DNA
tttctggcctggaggctat

SEQ ID NO: 9975 - DNA, 19 bp, synthetic construct
  misc_feature 1..19: note = Target B2M Sequence complement
  source 1..19: mol_type = other DNA
ttctggcctggaggctatc

SEQ ID NO: 9976 - DNA, 19 bp, synthetic construct
  misc_feature 1..19: note = Target B2M Sequence complement
  source 1..19: mol_type = other DNA
ctggaggctatccagcgta

SEQ ID NO: 9977 - DNA, 19 bp, synthetic construct
  misc_feature 1..19: note = Target B2M Sequence complement
  source 1..19: mol_type = other DNA
tggaggctatccagcgtac

SEQ ID NO: 9978 - DNA, 19 bp, synthetic construct
  misc_feature 1..19: note = Target B2M Sequence complement
  source 1..19: mol_type = other DNA
ggaggctatccagcgtact

SEQ ID NO: 9979 - DNA, 19 bp, synthetic construct
  misc_feature 1..19: note = Target B2M Sequence complement
  source 1..19: mol_type = other DNA
gaggctatccagcgtactc

SEQ ID NO: 9980 - DNA, 19 bp, synthetic construct
  misc_feature 1..19: note = Target B2M Sequence complement
  source 1..19: mol_type = other DNA
aggctatccagcgtactcc

SEQ ID NO: 9981 - DNA, 19 bp, synthetic construct
  misc_feature 1..19: note = Target B2M Sequence complement
  source 1..19: mol_type = other DNA
ggctatccagcgtactcca

SEQ ID NO: 9982 - DNA, 19 bp, synthetic construct
  misc_feature 1..19: note = Target B2M Sequence complement
  source 1..19: mol_type = other DNA
gctatccagcgtactccaa

SEQ ID NO: 9983 - DNA, 19 bp, synthetic construct
  misc_feature 1..19: note = Target B2M Sequence complement
  source 1..19: mol_type = other DNA
ctatccagcgtactccaaa

SEQ ID NO: 9984 - DNA, 19 bp, synthetic construct
  misc_feature 1..19: note = Target B2M Sequence complement
  source 1..19: mol_type = other DNA
tatccagcgtactccaaag

SEQ ID NO: 9985 - DNA, 19 bp, synthetic construct
  misc_feature 1..19: note = Target B2M Sequence complement
  source 1..19: mol_type = other DNA
atccagcgtactccaaaga

SEQ ID NO: 9986 - DNA, 19 bp, synthetic construct
  misc_feature 1..19: note = Target B2M Sequence complement
  source 1..19: mol_type = other DNA
tccagcgtactccaaagat

SEQ ID NO: 9987 - DNA, 19 bp, synthetic construct
  misc_feature 1..19: note = Target B2M Sequence complement
  source 1..19: mol_type = other DNA
ccagcgtactccaaagatt

SEQ ID NO: 9988 - DNA, 19 bp, synthetic construct
  misc_feature 1..19: note = Target B2M Sequence complement
  source 1..19: mol_type = other DNA
cagcgtactccaaagattc

SEQ ID NO: 9989 - DNA, 19 bp, synthetic construct
  misc_feature 1..19: note = Target B2M Sequence complement
  source 1..19: mol_type = other DNA
agcgtactccaaagattca

SEQ ID NO: 9990 - DNA, 19 bp, synthetic construct
  misc_feature 1..19: note = Target B2M Sequence complement
  source 1..19: mol_type = other DNA
gcgtactccaaagattcag

SEQ ID NO: 9991 - DNA, 19 bp, synthetic construct
  misc_feature 1..19: note = Target B2M Sequence complement
  source 1..19: mol_type = other DNA
cgtactccaaagattcagg

SEQ ID NO: 9992 - DNA, 19 bp, synthetic construct
  misc_feature 1..19: note = Target B2M Sequence complement
  source 1..19: mol_type = other DNA
gtactccaaagattcaggt

SEQ ID NO: 9993 - DNA, 19 bp, synthetic construct
  misc_feature 1..19: note = Target B2M Sequence complement
  source 1..19: mol_type = other DNA
tactccaaagattcaggtt

SEQ ID NO: 9994 - DNA, 19 bp, synthetic construct
  misc_feature 1..19: note = Target B2M Sequence complement
  source 1..19: mol_type = other DNA
actccaaagattcaggttt

SEQ ID NO: 9995 - DNA, 19 bp, synthetic construct
  misc_feature 1..19: note = Target B2M Sequence complement
  source 1..19: mol_type = other DNA
ctccaaagattcaggttta

SEQ ID NO: 9996 - DNA, 19 bp, synthetic construct
  misc_feature 1..19: note = Target B2M Sequence complement
  source 1..19: mol_type = other DNA
tccaaagattcaggtttac

SEQ ID NO: 9997 - DNA, 19 bp, synthetic construct
  misc_feature 1..19: note = Target B2M Sequence complement
  source 1..19: mol_type = other DNA
ccaaagattcaggtttact

SEQ ID NO: 9998 - DNA, 19 bp, synthetic construct
  misc_feature 1..19: note = Target B2M Sequence complement
  source 1..19: mol_type = other DNA
caaagattcaggtttactc

SEQ ID NO: 9999 - DNA, 19 bp, synthetic construct
  misc_feature 1..19: note = Target B2M Sequence complement
  source 1..19: mol_type = other DNA
aaagattcaggtttactca

SEQ ID NO: 10000 - DNA, 19 bp, synthetic construct
  misc_feature 1..19: note = Target B2M Sequence complement
  source 1..19: mol_type = other DNA
aagattcaggtttactcac

SEQ ID NO: 10001 - DNA, 19 bp, synthetic construct
  misc_feature 1..19: note = Target B2M Sequence complement
  source 1..19: mol_type = other DNA
agattcaggtttactcacg

SEQ ID NO: 10002 - DNA, 19 bp, synthetic construct
  misc_feature 1..19: note = Target B2M Sequence complement
  source 1..19: mol_type = other DNA
gattcaggtttactcacgt

SEQ ID NO: 10003 - DNA, 19 bp, synthetic construct
  misc_feature 1..19: note = Target B2M Sequence complement
  source 1..19: mol_type = other DNA
attcaggtttactcacgtc

SEQ ID NO: 10004 - DNA, 19 bp, synthetic construct
  misc_feature 1..19: note = Target B2M Sequence complement
  source 1..19: mol_type = other DNA
ttcaggtttactcacgtca

SEQ ID NO: 10005 - DNA, 19 bp, synthetic construct
  misc_feature 1..19: note = Target B2M Sequence complement
  source 1..19: mol_type = other DNA
tcaggtttactcacgtcat

SEQ ID NO: 10006 - DNA, 19 bp, synthetic construct
  misc_feature 1..19: note = Target B2M Sequence complement
  source 1..19: mol_type = other DNA
caggtttactcacgtcatc

SEQ ID NO: 10007 - DNA, 19 bp, synthetic construct
  misc_feature 1..19: note = Target B2M Sequence complement
  source 1..19: mol_type = other DNA
aggtttactcacgtcatcc

SEQ ID NO: 10008 - DNA, 19 bp, synthetic construct
  misc_feature 1..19: note = Target B2M Sequence complement
  source 1..19: mol_type = other DNA
ggtttactcacgtcatcca

SEQ ID NO: 10009 - DNA, 19 bp, synthetic construct
  misc_feature 1..19: note = Target B2M Sequence complement
  source 1..19: mol_type = other DNA
gtttactcacgtcatccag

SEQ ID NO: 10010 - DNA, 19 bp, synthetic construct
  misc_feature 1..19: note = Target B2M Sequence complement
  source 1..19: mol_type = other DNA
tttactcacgtcatccagc

SEQ ID NO: 10011 - DNA, 19 bp, synthetic construct
  misc_feature 1..19: note = Target B2M Sequence complement
  source 1..19: mol_type = other DNA
ttactcacgtcatccagca

SEQ ID NO: 10012 - DNA, 19 bp, synthetic construct
  misc_feature 1..19: note = Target B2M Sequence complement
  source 1..19: mol_type = other DNA
tactcacgtcatccagcag

SEQ ID NO: 10013 - DNA, 19 bp, synthetic construct
  misc_feature 1..19: note = Target B2M Sequence complement
  source 1..19: mol_type = other DNA
actcacgtcatccagcaga

SEQ ID NO: 10014 - DNA, 19 bp, synthetic construct
  misc_feature 1..19: note = Target B2M Sequence complement
  source 1..19: mol_type = other DNA
ctcacgtcatccagcagag

SEQ ID NO: 10015 - DNA, 19 bp, synthetic construct
  misc_feature 1..19: note = Target B2M Sequence complement
  source 1..19: mol_type = other DNA
tcacgtcatccagcagaga

SEQ ID NO: 10016 - DNA, 19 bp, synthetic construct
  misc_feature 1..19: note = Target B2M Sequence complement
  source 1..19: mol_type = other DNA
cacgtcatccagcagagaa

SEQ ID NO: 10017 - DNA, 19 bp, synthetic construct
  misc_feature 1..19: note = Target B2M Sequence complement
  source 1..19: mol_type = other DNA
acgtcatccagcagagaat

SEQ ID NO: 10018 - DNA, 19 bp, synthetic construct
  misc_feature 1..19: note = Target B2M Sequence complement
  source 1..19: mol_type = other DNA
cgtcatccagcagagaatg

SEQ ID NO: 10019 - DNA, 19 bp, synthetic construct
  misc_feature 1..19: note = Target B2M Sequence complement
  source 1..19: mol_type = other DNA
gtcatccagcagagaatgg

SEQ ID NO: 10020 - DNA, 19 bp, synthetic construct
  misc_feature 1..19: note = Target B2M Sequence complement
  source 1..19: mol_type = other DNA
tcatccagcagagaatgga

SEQ ID NO: 10021 - DNA, 19 bp, synthetic construct
  misc_feature 1..19: note = Target B2M Sequence complement
  source 1..19: mol_type = other DNA
catccagcagagaatggaa

SEQ ID NO: 10022 - DNA, 19 bp, synthetic construct
  misc_feature 1..19: note = Target B2M Sequence complement
  source 1..19: mol_type = other DNA
atccagcagagaatggaaa

SEQ ID NO: 10023 - DNA, 19 bp, synthetic construct
  misc_feature 1..19: note = Target B2M Sequence complement
  source 1..19: mol_type = other DNA
tccagcagagaatggaaag

SEQ ID NO: 10024 - DNA, 19 bp, synthetic construct
  misc_feature 1..19: note = Target B2M Sequence complement
  source 1..19: mol_type = other DNA
ccagcagagaatggaaagt

SEQ ID NO: 10025 - DNA, 19 bp, synthetic construct
  misc_feature 1..19: note = Target B2M Sequence complement
  source 1..19: mol_type = other DNA
cagcagagaatggaaagtc

SEQ ID NO: 10026 - DNA, 19 bp, synthetic construct
  misc_feature 1..19: note = Target B2M Sequence complement
  source 1..19: mol_type = other DNA
agcagagaatggaaagtca

SEQ ID NO: 10027 - DNA, 19 bp, synthetic construct
  misc_feature 1..19: note = Target B2M Sequence complement
  source 1..19: mol_type = other DNA
gcagagaatggaaagtcaa

SEQ ID NO: 10028 - DNA, 19 bp, synthetic construct
  misc_feature 1..19: note = Target B2M Sequence complement
  source 1..19: mol_type = other DNA
cagagaatggaaagtcaaa

SEQ ID NO: 10029 - DNA, 19 bp, synthetic construct
  misc_feature 1..19: note = Target B2M Sequence complement
  source 1..19: mol_type = other DNA
agagaatggaaagtcaaat

SEQ ID NO: 10030 - DNA, 19 bp, synthetic construct
  misc_feature 1..19: note = Target B2M Sequence complement
  source 1..19: mol_type = other DNA
gagaatggaaagtcaaatt

SEQ ID NO: 10031 - DNA, 19 bp, synthetic construct
  misc_feature 1..19: note = Target B2M Sequence complement
  source 1..19: mol_type = other DNA
agaatggaaagtcaaattt

SEQ ID NO: 10032 - DNA, 19 bp, synthetic construct
  misc_feature 1..19: note = Target B2M Sequence complement
  source 1..19: mol_type = other DNA
gaatggaaagtcaaatttc

SEQ ID NO: 10033 - DNA, 19 bp, synthetic construct
  misc_feature 1..19: note = Target B2M Sequence complement
  source 1..19: mol_type = other DNA
aatggaaagtcaaatttcc

SEQ ID NO: 10034 - DNA, 19 bp, synthetic construct
  misc_feature 1..19: note = Target B2M Sequence complement
  source 1..19: mol_type = other DNA
atggaaagtcaaatttcct

SEQ ID NO: 10035 - DNA, 19 bp, synthetic construct
  misc_feature 1..19: note = Target B2M Sequence complement
  source 1..19: mol_type = other DNA
tggaaagtcaaatttcctg

SEQ ID NO: 10036 - DNA, 19 bp, synthetic construct
  misc_feature 1..19: note = Target B2M Sequence complement
  source 1..19: mol_type = other DNA
ggaaagtcaaatttcctga

SEQ ID NO: 10037 - DNA, 19 bp, synthetic construct
  misc_feature 1..19: note = Target B2M Sequence complement
  source 1..19: mol_type = other DNA
gaaagtcaaatttcctgaa

SEQ ID NO: 10038 - DNA, 19 bp, synthetic construct
  misc_feature 1..19: note = Target B2M Sequence complement
  source 1..19: mol_type = other DNA
aaagtcaaatttcctgaat

SEQ ID NO: 10039 - DNA, 19 bp, synthetic construct
  misc_feature 1..19: note = Target B2M Sequence complement
  source 1..19: mol_type = other DNA
aagtcaaatttcctgaatt

SEQ ID NO: 10040 - DNA, 19 bp, synthetic construct
  misc_feature 1..19: note = Target B2M Sequence complement
  source 1..19: mol_type = other DNA
agtcaaatttcctgaattg

SEQ ID NO: 10041 - DNA, 19 bp, synthetic construct
  misc_feature 1..19: note = Target B2M Sequence complement
  source 1..19: mol_type = other DNA
gtcaaatttcctgaattgc

SEQ ID NO: 10042 - DNA, 19 bp, synthetic construct
  misc_feature 1..19: note = Target B2M Sequence complement
  source 1..19: mol_type = other DNA
tcaaatttcctgaattgct

SEQ ID NO: 10043 - DNA, 19 bp, synthetic construct
  misc_feature 1..19: note = Target B2M Sequence complement
  source 1..19: mol_type = other DNA
caaatttcctgaattgcta

SEQ ID NO: 10044 - DNA, 19 bp, synthetic construct
  misc_feature 1..19: note = Target B2M Sequence complement
  source 1..19: mol_type = other DNA
aaatttcctgaattgctat

SEQ ID NO: 10045 - DNA, 19 bp, synthetic construct
  misc_feature 1..19: note = Target B2M Sequence complement
  source 1..19: mol_type = other DNA
aatttcctgaattgctatg

SEQ ID NO: 10046 - DNA, 19 bp, synthetic construct
  misc_feature 1..19: note = Target B2M Sequence complement
  source 1..19: mol_type = other DNA
atttcctgaattgctatgt

SEQ ID NO: 10047 - DNA, 19 bp, synthetic construct
  misc_feature 1..19: note = Target B2M Sequence complement
  source 1..19: mol_type = other DNA
tttcctgaattgctatgtg

SEQ ID NO: 10048 - DNA, 19 bp, synthetic construct
  misc_feature 1..19: note = Target B2M Sequence complement
  source 1..19: mol_type = other DNA
ttcctgaattgctatgtgt

SEQ ID NO: 10049 - DNA, 19 bp, synthetic construct
  misc_feature 1..19: note = Target B2M Sequence complement
  source 1..19: mol_type = other DNA
tcctgaattgctatgtgtc

SEQ ID NO: 10050 - DNA, 19 bp, synthetic construct
  misc_feature 1..19: note = Target B2M Sequence complement
  source 1..19: mol_type = other DNA
cctgaattgctatgtgtct

SEQ ID NO: 10051 - DNA, 19 bp, synthetic construct
  misc_feature 1..19: note = Target B2M Sequence complement
  source 1..19: mol_type = other DNA
ctgaattgctatgtgtctg

SEQ ID NO: 10052 - DNA, 19 bp, synthetic construct
  misc_feature 1..19: note = Target B2M Sequence complement
  source 1..19: mol_type = other DNA
tgaattgctatgtgtctgg

SEQ ID NO: 10053 - DNA, 19 bp, synthetic construct
  misc_feature 1..19: note = Target B2M Sequence complement
  source 1..19: mol_type = other DNA
gaattgctatgtgtctggg

SEQ ID NO: 10054 - DNA, 19 bp, synthetic construct
  misc_feature 1..19: note = Target B2M Sequence complement
  source 1..19: mol_type = other DNA
aattgctatgtgtctgggt

SEQ ID NO: 10055 - DNA, 19 bp, synthetic construct
  misc_feature 1..19: note = Target B2M Sequence complement
  source 1..19: mol_type = other DNA
attgctatgtgtctgggtt

SEQ ID NO: 10056 - DNA, 19 bp, synthetic construct
  misc_feature 1..19: note = Target B2M Sequence complement
  source 1..19: mol_type = other DNA
ttgctatgtgtctgggttt

SEQ ID NO: 10057 - DNA, 19 bp, synthetic construct
  misc_feature 1..19: note = Target B2M Sequence complement
  source 1..19: mol_type = other DNA
tgctatgtgtctgggtttc

SEQ ID NO: 10058 - DNA, 19 bp, synthetic construct
  misc_feature 1..19: note = Target B2M Sequence complement
  source 1..19: mol_type = other DNA
gctatgtgtctgggtttca

SEQ ID NO: 10059 - DNA, 19 bp, synthetic construct
  misc_feature 1..19: note = Target B2M Sequence complement
  source 1..19: mol_type = other DNA
ctatgtgtctgggtttcat

SEQ ID NO: 10060 - DNA, 19 bp, synthetic construct
  misc_feature 1..19: note = Target B2M Sequence complement
  source 1..19: mol_type = other DNA
tatgtgtctgggtttcatc

SEQ ID NO: 10061 - DNA, 19 bp, synthetic construct
  misc_feature 1..19: note = Target B2M Sequence complement
  source 1..19: mol_type = other DNA
atgtgtctgggtttcatcc

SEQ ID NO: 10062 - DNA, 19 bp, synthetic construct
  misc_feature 1..19: note = Target B2M Sequence complement
  source 1..19: mol_type = other DNA
tgtgtctgggtttcatcca

SEQ ID NO: 10063 - DNA, 19 bp, synthetic construct
  misc_feature 1..19: note = Target B2M Sequence complement
  source 1..19: mol_type = other DNA
gtgtctgggtttcatccat

SEQ ID NO: 10064 - DNA, 19 bp, synthetic construct
  misc_feature 1..19: note = Target B2M Sequence complement
  source 1..19: mol_type = other DNA
tgtctgggtttcatccatc

SEQ ID NO: 10065 - DNA, 19 bp, synthetic construct
  misc_feature 1..19: note = Target B2M Sequence complement
  source 1..19: mol_type = other DNA
gtctgggtttcatccatcc

SEQ ID NO: 10066 - DNA, 19 bp, synthetic construct
  misc_feature 1..19: note = Target B2M Sequence complement
  source 1..19: mol_type = other DNA
tctgggtttcatccatccg

SEQ ID NO: 10067 - DNA, 19 bp, synthetic construct
  misc_feature 1..19: note = Target B2M Sequence complement
  source 1..19: mol_type = other DNA
ctgggtttcatccatccga

SEQ ID NO: 10068 - DNA, 19 bp, synthetic construct
  misc_feature 1..19: note = Target B2M Sequence complement
  source 1..19: mol_type = other DNA
tgggtttcatccatccgac

SEQ ID NO: 10069 - DNA, 19 bp, synthetic construct
  misc_feature 1..19: note = Target B2M Sequence complement
  source 1..19: mol_type = other DNA
gggtttcatccatccgaca

SEQ ID NO: 10070 - DNA, 19 bp, synthetic construct
  misc_feature 1..19: note = Target B2M Sequence complement
  source 1..19: mol_type = other DNA
ggtttcatccatccgacat

SEQ ID NO: 10071 - DNA, 19 bp, synthetic construct
  misc_feature 1..19: note = Target B2M Sequence complement
  source 1..19: mol_type = other DNA
gtttcatccatccgacatt

SEQ ID NO: 10072 - DNA, 19 bp, synthetic construct
  misc_feature 1..19: note = Target B2M Sequence complement
  source 1..19: mol_type = other DNA
tttcatccatccgacattg

SEQ ID NO: 10073 - DNA, 19 bp, synthetic construct
  misc_feature 1..19: note = Target B2M Sequence complement
  source 1..19: mol_type = other DNA
ttcatccatccgacattga

SEQ ID NO: 10074 - DNA, 19 bp, synthetic construct
  misc_feature 1..19: note = Target B2M Sequence complement
  source 1..19: mol_type = other DNA
tcatccatccgacattgaa

SEQ ID NO: 10075 - DNA, 19 bp, synthetic construct
  misc_feature 1..19: note = Target B2M Sequence complement
  source 1..19: mol_type = other DNA
catccatccgacattgaag

SEQ ID NO: 10076 - DNA, 19 bp, synthetic construct
  misc_feature 1..19: note = Target B2M Sequence complement
  source 1..19: mol_type = other DNA
atccatccgacattgaagt

SEQ ID NO: 10077 - DNA, 19 bp, synthetic construct
  misc_feature 1..19: note = Target B2M Sequence complement
  source 1..19: mol_type = other DNA
tccatccgacattgaagtt

SEQ ID NO: 10078 - DNA, 19 bp, synthetic construct
  misc_feature 1..19: note = Target B2M Sequence complement
  source 1..19: mol_type = other DNA
ccatccgacattgaagttg

SEQ ID NO: 10079 - DNA, 19 bp, synthetic construct
  misc_feature 1..19: note = Target B2M Sequence complement
  source 1..19: mol_type = other DNA
catccgacattgaagttga

SEQ ID NO: 10080 - DNA, 19 bp, synthetic construct
  misc_feature 1..19: note = Target B2M Sequence complement
  source 1..19: mol_type = other DNA
atccgacattgaagttgac

SEQ ID NO: 10081 - DNA, 19 bp, synthetic construct
  misc_feature 1..19: note = Target B2M Sequence complement
  source 1..19: mol_type = other DNA
tccgacattgaagttgact

SEQ ID NO: 10082 - DNA, 19 bp, synthetic construct
  misc_feature 1..19: note = Target B2M Sequence complement
  source 1..19: mol_type = other DNA
ccgacattgaagttgactt

SEQ ID NO: 10083 - DNA, 19 bp, synthetic construct
  misc_feature 1..19: note = Target B2M Sequence complement
  source 1..19: mol_type = other DNA
cgacattgaagttgactta

SEQ ID NO: 10084 - DNA, 19 bp, synthetic construct
  misc_feature 1..19: note = Target B2M Sequence complement
  source 1..19: mol_type = other DNA
gacattgaagttgacttac

SEQ ID NO: 10085 - DNA, 19 bp, synthetic construct
  misc_feature 1..19: note = Target B2M Sequence complement
  source 1..19: mol_type = other DNA
acattgaagttgacttact

SEQ ID NO: 10086 - DNA, 19 bp, synthetic construct
  misc_feature 1..19: note = Target B2M Sequence complement
  source 1..19: mol_type = other DNA
cattgaagttgacttactg

SEQ ID NO: 10087 - DNA, 19 bp, synthetic construct
  misc_feature 1..19: note = Target B2M Sequence complement
  source 1..19: mol_type = other DNA
attgaagttgacttactga

SEQ ID NO: 10088 - DNA, 19 bp, synthetic construct
  misc_feature 1..19: note = Target B2M Sequence complement
  source 1..19: mol_type = other DNA
ttgaagttgacttactgaa

SEQ ID NO: 10089 - DNA, 19 bp, synthetic construct
  misc_feature 1..19: note = Target B2M Sequence complement
  source 1..19: mol_type = other DNA
tgaagttgacttactgaag

SEQ ID NO: 10090 - DNA, 19 bp, synthetic construct
  misc_feature 1..19: note = Target B2M Sequence complement
  source 1..19: mol_type = other DNA
gaagttgacttactgaaga

SEQ ID NO: 10091 - DNA, 19 bp, synthetic construct
  misc_feature 1..19: note = Target B2M Sequence complement
  source 1..19: mol_type = other DNA
aagttgacttactgaagaa

SEQ ID NO: 10092 - DNA, 19 bp, synthetic construct
  misc_feature 1..19: note = Target B2M Sequence complement
  source 1..19: mol_type = other DNA
agttgacttactgaagaat

SEQ ID NO: 10093 - DNA, 19 bp, synthetic construct
  misc_feature 1..19: note = Target B2M Sequence complement
  source 1..19: mol_type = other DNA
gttgacttactgaagaatg

SEQ ID NO: 10094 - DNA, 19 bp, synthetic construct
  misc_feature 1..19: note = Target B2M Sequence complement
  source 1..19: mol_type = other DNA
ttgacttactgaagaatgg

SEQ ID NO: 10095 - DNA, 19 bp, synthetic construct
  misc_feature 1..19: note = Target B2M Sequence complement
  source 1..19: mol_type = other DNA
tgacttactgaagaatgga

SEQ ID NO: 10096 - DNA, 19 bp, synthetic construct
  misc_feature 1..19: note = Target B2M Sequence complement
  source 1..19: mol_type = other DNA
gacttactgaagaatggag

SEQ ID NO: 10097 - DNA, 19 bp, synthetic construct
  misc_feature 1..19: note = Target B2M Sequence complement
  source 1..19: mol_type = other DNA
acttactgaagaatggaga

SEQ ID NO: 10098 - DNA, 19 bp, synthetic construct
  misc_feature 1..19: note = Target B2M Sequence complement
  source 1..19: mol_type = other DNA
cttactgaagaatggagag

SEQ ID NO: 10099 - DNA, 19 bp, synthetic construct
  misc_feature 1..19: note = Target B2M Sequence complement
  source 1..19: mol_type = other DNA
ttactgaagaatggagaga

SEQ ID NO: 10100 - DNA, 19 bp, synthetic construct
  misc_feature 1..19: note = Target B2M Sequence complement
  source 1..19: mol_type = other DNA
tactgaagaatggagagag

SEQ ID NO: 10101 - DNA, 19 bp, synthetic construct
  misc_feature 1..19: note = Target B2M Sequence complement
  source 1..19: mol_type = other DNA
actgaagaatggagagaga

SEQ ID NO: 10102 - DNA, 19 bp, synthetic construct
  misc_feature 1..19: note = Target B2M Sequence complement
  source 1..19: mol_type = other DNA
ctgaagaatggagagagaa

SEQ ID NO: 10103 - DNA, 19 bp, synthetic construct
  misc_feature 1..19: note = Target B2M Sequence complement
  source 1..19: mol_type = other DNA
tgaagaatggagagagaat

SEQ ID NO: 10104 - DNA, 19 bp, synthetic construct
  misc_feature 1..19: note = Target B2M Sequence complement
  source 1..19: mol_type = other DNA
gaagaatggagagagaatt

SEQ ID NO: 10105 - DNA, 19 bp, synthetic construct
  misc_feature 1..19: note = Target B2M Sequence complement
  source 1..19: mol_type = other DNA
aagaatggagagagaattg

SEQ ID NO: 10106 - DNA, 19 bp, synthetic construct
  misc_feature 1..19: note = Target B2M Sequence complement
  source 1..19: mol_type = other DNA
agaatggagagagaattga

SEQ ID NO: 10107 - DNA, 19 bp, synthetic construct
  misc_feature 1..19: note = Target B2M Sequence complement
  source 1..19: mol_type = other DNA
gaatggagagagaattgaa

SEQ ID NO: 10108 - DNA, 19 bp, synthetic construct
  misc_feature 1..19: note = Target B2M Sequence complement
  source 1..19: mol_type = other DNA
aatggagagagaattgaaa

SEQ ID NO: 10109 - DNA, 19 bp, synthetic construct
  misc_feature 1..19: note = Target B2M Sequence complement
  source 1..19: mol_type = other DNA
aaagtggagcattcagact

SEQ ID NO: 10110 - DNA, 19 bp, synthetic construct
  misc_feature 1..19: note = Target B2M Sequence complement
  source 1..19: mol_type = other DNA
aagtggagcattcagactt

SEQ ID NO: 10111 - DNA, 19 bp, synthetic construct
  misc_feature 1..19: note = Target B2M Sequence complement
  source 1..19: mol_type = other DNA
agtggagcattcagacttg

SEQ ID NO: 10112 - DNA, 19 bp, synthetic construct
  misc_feature 1..19: note = Target B2M Sequence complement
  source 1..19: mol_type = other DNA
gtggagcattcagacttgt

SEQ ID NO: 10113 - DNA, 19 bp, synthetic construct
  misc_feature 1..19: note = Target B2M Sequence complement
  source 1..19: mol_type = other DNA
tggagcattcagacttgtc

SEQ ID NO: 10114 - DNA, 19 bp, synthetic construct
  misc_feature 1..19: note = Target B2M Sequence complement
  source 1..19: mol_type = other DNA
ggagcattcagacttgtct

SEQ ID NO: 10115 - DNA, 19 bp, synthetic construct
  misc_feature 1..19: note = Target B2M Sequence complement
  source 1..19: mol_type = other DNA
gagcattcagacttgtctt

SEQ ID NO: 10116 - DNA, 19 bp, synthetic construct
  misc_feature 1..19: note = Target B2M Sequence complement
  source 1..19: mol_type = other DNA
agcattcagacttgtcttt

SEQ ID NO: 10117 - DNA, 19 bp, synthetic construct
  misc_feature 1..19: note = Target B2M Sequence complement
  source 1..19: mol_type = other DNA
gcattcagacttgtctttc

SEQ ID NO: 10118 - DNA, 19 bp, synthetic construct
  misc_feature 1..19: note = Target B2M Sequence complement
  source 1..19: mol_type = other DNA
cattcagacttgtctttca

SEQ ID NO: 10119 - DNA, 19 bp, synthetic construct
  misc_feature 1..19: note = Target B2M Sequence complement
  source 1..19: mol_type = other DNA
attcagacttgtctttcag

SEQ ID NO: 10120 - DNA, 19 bp, synthetic construct
  misc_feature 1..19: note = Target B2M Sequence complement
  source 1..19: mol_type = other DNA
ttcagacttgtctttcagc

SEQ ID NO: 10121 - DNA, 19 bp, synthetic construct
  misc_feature 1..19: note = Target B2M Sequence complement
  source 1..19: mol_type = other DNA
tcagacttgtctttcagca

SEQ ID NO: 10122 - DNA, 19 bp, synthetic construct
  misc_feature 1..19: note = Target B2M Sequence complement
  source 1..19: mol_type = other DNA
cagacttgtctttcagcaa

SEQ ID NO: 10123 - DNA, 19 bp, synthetic construct
  misc_feature 1..19: note = Target B2M Sequence complement
  source 1..19: mol_type = other DNA
agacttgtctttcagcaag

SEQ ID NO: 10124 - DNA, 19 bp, synthetic construct
  misc_feature 1..19: note = Target B2M Sequence complement
  source 1..19: mol_type = other DNA
gacttgtctttcagcaagg

SEQ ID NO: 10125 - DNA, 19 bp, synthetic construct
  misc_feature 1..19: note = Target B2M Sequence complement
  source 1..19: mol_type = other DNA
acttgtctttcagcaagga

SEQ ID NO: 10126 - DNA, 19 bp, synthetic construct
  misc_feature 1..19: note = Target B2M Sequence complement
  source 1..19: mol_type = other DNA
cttgtctttcagcaaggac

SEQ ID NO: 10127 - DNA, 19 bp, synthetic construct
  misc_feature 1..19: note = Target B2M Sequence complement
  source 1..19: mol_type = other DNA
ttgtctttcagcaaggact

SEQ ID NO: 10128 - DNA, 19 bp, synthetic construct
  misc_feature 1..19: note = Target B2M Sequence complement
  source 1..19: mol_type = other DNA
tgtctttcagcaaggactg

SEQ ID NO: 10129 - DNA, 19 bp, synthetic construct
  misc_feature 1..19: note = Target B2M Sequence complement
  source 1..19: mol_type = other DNA
gtctttcagcaaggactgg

SEQ ID NO: 10130 - DNA, 19 bp, synthetic construct
  misc_feature 1..19: note = Target B2M Sequence complement
  source 1..19: mol_type = other DNA
tctttcagcaaggactggt

SEQ ID NO: 10131 - DNA, 19 bp, synthetic construct
  misc_feature 1..19: note = Target B2M Sequence complement
  source 1..19: mol_type = other DNA
ctttcagcaaggactggtc

SEQ ID NO: 10132 - DNA, 19 bp, synthetic construct
  misc_feature 1..19: note = Target B2M Sequence complement
  source 1..19: mol_type = other DNA
tttcagcaaggactggtct

SEQ ID NO: 10133 - DNA, 19 bp, synthetic construct
  misc_feature 1..19: note = Target B2M Sequence complement
  source 1..19: mol_type = other DNA
ttcagcaaggactggtctt

SEQ ID NO: 10134 - DNA, 19 bp, synthetic construct
  misc_feature 1..19: note = Target B2M Sequence complement
  source 1..19: mol_type = other DNA
tcagcaaggactggtcttt

SEQ ID NO: 10135 - DNA, 19 bp, synthetic construct
  misc_feature 1..19: note = Target B2M Sequence complement
  source 1..19: mol_type = other DNA
cagcaaggactggtctttc

SEQ ID NO: 10136 - DNA, 19 bp, synthetic construct
  misc_feature 1..19: note = Target B2M Sequence complement
  source 1..19: mol_type = other DNA
agcaaggactggtctttct

SEQ ID NO: 10137 - DNA, 19 bp, synthetic construct
  misc_feature 1..19: note = Target B2M Sequence complement
  source 1..19: mol_type = other DNA
gcaaggactggtctttcta

SEQ ID NO: 10138 - DNA, 19 bp, synthetic construct
  misc_feature 1..19: note = Target B2M Sequence complement
  source 1..19: mol_type = other DNA
caaggactggtctttctat

SEQ ID NO: 10139 - DNA, 19 bp, synthetic construct
  misc_feature 1..19: note = Target B2M Sequence complement
  source 1..19: mol_type = other DNA
aaggactggtctttctatc

SEQ ID NO: 10140 - DNA, 19 bp, synthetic construct
  misc_feature 1..19: note = Target B2M Sequence complement
  source 1..19: mol_type = other DNA
aggactggtctttctatct

SEQ ID NO: 10141 - DNA, 19 bp, synthetic construct
  misc_feature 1..19: note = Target B2M Sequence complement
  source 1..19: mol_type = other DNA
ggactggtctttctatctc

SEQ ID NO: 10142 - DNA, 19 bp, synthetic construct
  misc_feature 1..19: note = Target B2M Sequence complement
  source 1..19: mol_type = other DNA
gactggtctttctatctct

SEQ ID NO: 10143 - DNA, 19 bp, synthetic construct
  misc_feature 1..19: note = Target B2M Sequence complement
  source 1..19: mol_type = other DNA
actggtctttctatctctt

SEQ ID NO: 10144 - DNA, 19 bp, synthetic construct
  misc_feature 1..19: note = Target B2M Sequence complement
  source 1..19: mol_type = other DNA
ctggtctttctatctcttg

SEQ ID NO: 10145 - DNA, 19 bp, synthetic construct
  misc_feature 1..19: note = Target B2M Sequence complement
  source 1..19: mol_type = other DNA
tggtctttctatctcttgt

SEQ ID NO: 10146 - DNA, 19 bp, synthetic construct
  misc_feature 1..19: note = Target B2M Sequence complement
  source 1..19: mol_type = other DNA
ggtctttctatctcttgta

SEQ ID NO: 10147 - DNA, 19 bp, synthetic construct
  misc_feature 1..19: note = Target B2M Sequence complement
  source 1..19: mol_type = other DNA
gtctttctatctcttgtac

SEQ ID NO: 10148 - DNA, 19 bp, synthetic construct
  misc_feature 1..19: note = Target B2M Sequence complement
  source 1..19: mol_type = other DNA
tctttctatctcttgtact

SEQ ID NO: 10149 - DNA, 19 bp, synthetic construct
  misc_feature 1..19: note = Target B2M Sequence complement
  source 1..19: mol_type = other DNA
ctttctatctcttgtacta

SEQ ID NO: 10150 - DNA, 19 bp, synthetic construct
  misc_feature 1..19: note = Target B2M Sequence complement
  source 1..19: mol_type = other DNA
tttctatctcttgtactac

SEQ ID NO: 10151 - DNA, 19 bp, synthetic construct
  misc_feature 1..19: note = Target B2M Sequence complement
  source 1..19: mol_type = other DNA
ttctatctcttgtactaca

SEQ ID NO: 10152 - DNA, 19 bp, synthetic construct
  misc_feature 1..19: note = Target B2M Sequence complement
  source 1..19: mol_type = other DNA
tctatctcttgtactacac

SEQ ID NO: 10153 - DNA, 19 bp, synthetic construct
  misc_feature 1..19: note = Target B2M Sequence complement
  source 1..19: mol_type = other DNA
ctatctcttgtactacact

SEQ ID NO: 10154 - DNA, 19 bp, synthetic construct
  misc_feature 1..19: note = Target B2M Sequence complement
  source 1..19: mol_type = other DNA
tatctcttgtactacactg

SEQ ID NO: 10155 - DNA, 19 bp, synthetic construct
  misc_feature 1..19: note = Target B2M Sequence complement
  source 1..19: mol_type = other DNA
atctcttgtactacactga

SEQ ID NO: 10156 - DNA, 19 bp, synthetic construct
  misc_feature 1..19: note = Target B2M Sequence complement
  source 1..19: mol_type = other DNA
tctcttgtactacactgaa

SEQ ID NO: 10157 - DNA, 19 bp, synthetic construct
  misc_feature 1..19: note = Target B2M Sequence complement
  source 1..19: mol_type = other DNA
ctcttgtactacactgaat

SEQ ID NO: 10158 - DNA, 19 bp, synthetic construct
  misc_feature 1..19: note = Target B2M Sequence complement
  source 1..19: mol_type = other DNA
tcttgtactacactgaatt

SEQ ID NO: 10159 - DNA, 19 bp, synthetic construct
  misc_feature 1..19: note = Target B2M Sequence complement
  source 1..19: mol_type = other DNA
cttgtactacactgaattc

SEQ ID NO: 10160 - DNA, 19 bp, synthetic construct
  misc_feature 1..19: note = Target B2M Sequence complement
  source 1..19: mol_type = other DNA
ttgtactacactgaattca

SEQ ID NO: 10161 - DNA, 19 bp, synthetic construct
  misc_feature 1..19: note = Target B2M Sequence complement
  source 1..19: mol_type = other DNA
tgtactacactgaattcac

SEQ ID NO: 10162 - DNA, 19 bp, synthetic construct
  misc_feature 1..19: note = Target B2M Sequence complement
  source 1..19: mol_type = other DNA
gtactacactgaattcacc

SEQ ID NO: 10163 - DNA, 19 bp, synthetic construct
  misc_feature 1..19: note = Target B2M Sequence complement
  source 1..19: mol_type = other DNA
tactacactgaattcaccc

SEQ ID NO: 10164 - DNA, 19 bp, synthetic construct
  misc_feature 1..19: note = Target B2M Sequence complement
  source 1..19: mol_type = other DNA
aaagatgagtatgcctgcc

SEQ ID NO: 10165 - DNA, 19 bp, synthetic construct
  misc_feature 1..19: note = Target B2M Sequence complement
  source 1..19: mol_type = other DNA
aagatgagtatgcctgccg

SEQ ID NO: 10166 - DNA, 19 bp, synthetic construct
  misc_feature 1..19: note = Target B2M Sequence complement
  source 1..19: mol_type = other DNA
agatgagtatgcctgccgt

SEQ ID NO: 10167 - DNA, 19 bp, synthetic construct
  misc_feature 1..19: note = Target B2M Sequence complement
  source 1..19: mol_type = other DNA
gatgagtatgcctgccgtg

SEQ ID NO: 10168 - DNA, 19 bp, synthetic construct
  misc_feature 1..19: note = Target B2M Sequence complement
  source 1..19: mol_type = other DNA
atgagtatgcctgccgtgt

SEQ ID NO: 10169 - DNA, 19 bp, synthetic construct
  misc_feature 1..19: note = Target B2M Sequence complement
  source 1..19: mol_type = other DNA
tgagtatgcctgccgtgtg

SEQ ID NO: 10170 - DNA, 19 bp, synthetic construct
  misc_feature 1..19: note = Target B2M Sequence complement
  source 1..19: mol_type = other DNA
gagtatgcctgccgtgtga

SEQ ID NO: 10171 - DNA, 19 bp, synthetic construct
  misc_feature 1..19: note = Target B2M Sequence complement
  source 1..19: mol_type = other DNA
agtatgcctgccgtgtgaa

SEQ ID NO: 10172 - DNA, 19 bp, synthetic construct
  misc_feature 1..19: note = Target B2M Sequence complement
  source 1..19: mol_type = other DNA
gtatgcctgccgtgtgaac

SEQ ID NO: 10173 - DNA, 19 bp, synthetic construct
  misc_feature 1..19: note = Target B2M Sequence complement
  source 1..19: mol_type = other DNA
tatgcctgccgtgtgaacc

SEQ ID NO: 10174 - DNA, 19 bp, synthetic construct
  misc_feature 1..19: note = Target B2M Sequence complement
  source 1..19: mol_type = other DNA
atgcctgccgtgtgaacca

SEQ ID NO: 10175 - DNA, 19 bp, synthetic construct
  misc_feature 1..19: note = Target B2M Sequence complement
  source 1..19: mol_type = other DNA
tgcctgccgtgtgaaccat

SEQ ID NO: 10176 - DNA, 19 bp, synthetic construct
  misc_feature 1..19: note = Target B2M Sequence complement
  source 1..19: mol_type = other DNA
cctgccgtgtgaaccatgt

SEQ ID NO: 10177 - DNA, 19 bp, synthetic construct
  misc_feature 1..19: note = Target B2M Sequence complement
  source 1..19: mol_type = other DNA
ctgccgtgtgaaccatgtg

SEQ ID NO: 10178 - DNA, 19 bp, synthetic construct
  misc_feature 1..19: note = Target B2M Sequence complement
  source 1..19: mol_type = other DNA
tgccgtgtgaaccatgtga

SEQ ID NO: 10179 - DNA, 19 bp, synthetic construct
  misc_feature 1..19: note = Target B2M Sequence complement
  source 1..19: mol_type = other DNA
gccgtgtgaaccatgtgac

SEQ ID NO: 10180 - DNA, 19 bp, synthetic construct
  misc_feature 1..19: note = Target B2M Sequence complement
  source 1..19: mol_type = other DNA
ccgtgtgaaccatgtgact

SEQ ID NO: 10181 - DNA, 19 bp, synthetic construct
  misc_feature 1..19: note = Target B2M Sequence complement
  source 1..19: mol_type = other DNA
cgtgtgaaccatgtgactt

SEQ ID NO: 10182 - DNA, 19 bp, synthetic construct
  misc_feature 1..19: note = Target B2M Sequence complement
  source 1..19: mol_type = other DNA
gtgtgaaccatgtgacttt

SEQ ID NO: 10183 - DNA, 19 bp, synthetic construct
  misc_feature 1..19: note = Target B2M Sequence complement
  source 1..19: mol_type = other DNA
tgtgaaccatgtgactttg

SEQ ID NO: 10184 - DNA, 19 bp, synthetic construct
  misc_feature 1..19: note = Target B2M Sequence complement
  source 1..19: mol_type = other DNA
gtgaaccatgtgactttgt

SEQ ID NO: 10185 - DNA, 19 bp, synthetic construct
  misc_feature 1..19: note = Target B2M Sequence complement
  source 1..19: mol_type = other DNA
tgaaccatgtgactttgtc

SEQ ID NO: 10186 - DNA, 19 bp, synthetic construct
  misc_feature 1..19: note = Target B2M Sequence complement
  source 1..19: mol_type = other DNA
gaaccatgtgactttgtca

SEQ ID NO: 10187 - DNA, 19 bp, synthetic construct
  misc_feature 1..19: note = Target B2M Sequence complement
  source 1..19: mol_type = other DNA
aaccatgtgactttgtcac

SEQ ID NO: 10188 - DNA, 19 bp, synthetic construct
  misc_feature 1..19: note = Target B2M Sequence complement
  source 1..19: mol_type = other DNA
accatgtgactttgtcaca

SEQ ID NO: 10189 - DNA, 19 bp, synthetic construct
  misc_feature 1..19: note = Target B2M Sequence complement
  source 1..19: mol_type = other DNA
ccatgtgactttgtcacag

SEQ ID NO: 10190 - DNA, 19 bp, synthetic construct
  misc_feature 1..19: note = Target B2M Sequence complement
  source 1..19: mol_type = other DNA
catgtgactttgtcacagc

SEQ ID NO: 10191 - DNA, 19 bp, synthetic construct
  misc_feature 1..19: note = Target B2M Sequence complement
  source 1..19: mol_type = other DNA
atgtgactttgtcacagcc

SEQ ID NO: 10192 - DNA, 19 bp, synthetic construct
  misc_feature 1..19: note = Target B2M Sequence complement
  source 1..19: mol_type = other DNA
tgtgactttgtcacagccc

SEQ ID NO: 10193 - DNA, 19 bp, synthetic construct
  misc_feature 1..19: note = Target B2M Sequence complement
  source 1..19: mol_type = other DNA
gtgactttgtcacagccca

SEQ ID NO: 10194 - DNA, 19 bp, synthetic construct
  misc_feature 1..19: note = Target B2M Sequence complement
  source 1..19: mol_type = other DNA
tgactttgtcacagcccaa

SEQ ID NO: 10195 - DNA, 19 bp, synthetic construct
  misc_feature 1..19: note = Target B2M Sequence complement
  source 1..19: mol_type = other DNA
gactttgtcacagcccaag

SEQ ID NO: 10196 - DNA, 19 bp, synthetic construct
  misc_feature 1..19: note = Target B2M Sequence complement
  source 1..19: mol_type = other DNA
actttgtcacagcccaaga

SEQ ID NO: 10197 - DNA, 19 bp, synthetic construct
  misc_feature 1..19: note = Target B2M Sequence complement
  source 1..19: mol_type = other DNA
ctttgtcacagcccaagat

SEQ ID NO: 10198 - DNA, 19 bp, synthetic construct
  misc_feature 1..19: note = Target B2M Sequence complement
  source 1..19: mol_type = other DNA
tttgtcacagcccaagata

SEQ ID NO: 10199 - DNA, 19 bp, synthetic construct
  misc_feature 1..19: note = Target B2M Sequence complement
  source 1..19: mol_type = other DNA
ttgtcacagcccaagatag

SEQ ID NO: 10200 - DNA, 19 bp, synthetic construct
  misc_feature 1..19: note = Target B2M Sequence complement
  source 1..19: mol_type = other DNA
tgtcacagcccaagatagt

SEQ ID NO: 10201 - DNA, 19 bp, synthetic construct
  misc_feature 1..19: note = Target B2M Sequence complement
  source 1..19: mol_type = other DNA
gtcacagcccaagatagtt

SEQ ID NO: 10202 - DNA, 19 bp, synthetic construct
  misc_feature 1..19: note = Target B2M Sequence complement
  source 1..19: mol_type = other DNA
tcacagcccaagatagtta

SEQ ID NO: 10203 - DNA, 19 bp, synthetic construct
  misc_feature 1..19: note = Target B2M Sequence complement
  source 1..19: mol_type = other DNA
cacagcccaagatagttaa

SEQ ID NO: 10204 - DNA, 19 bp, synthetic construct
  misc_feature 1..19: note = Target B2M Sequence complement
  source 1..19: mol_type = other DNA
acagcccaagatagttaag

SEQ ID NO: 10205 - DNA, 19 bp, synthetic construct
  misc_feature 1..19: note = Target B2M Sequence complement
  source 1..19: mol_type = other DNA
cagcccaagatagttaagt

SEQ ID NO: 10206 - DNA, 19 bp, synthetic construct
  misc_feature 1..19: note = Target B2M Sequence complement
  source 1..19: mol_type = other DNA
agcccaagatagttaagtg

SEQ ID NO: 10207 - DNA, 19 bp, synthetic construct
  misc_feature 1..19: note = Target B2M Sequence complement
  source 1..19: mol_type = other DNA
gcccaagatagttaagtgg

SEQ ID NO: 10208 - DNA, 19 bp, synthetic construct
  misc_feature 1..19: note = Target B2M Sequence complement
  source 1..19: mol_type = other DNA
cccaagatagttaagtggg

SEQ ID NO: 10209 - DNA, 19 bp, synthetic construct
  misc_feature 1..19: note = Target B2M Sequence complement
  source 1..19: mol_type = other DNA
ccaagatagttaagtggga

SEQ ID NO: 10210 - DNA, 19 bp, synthetic construct
  misc_feature 1..19: note = Target B2M Sequence complement
  source 1..19: mol_type = other DNA
caagatagttaagtgggat

SEQ ID NO: 10211 - DNA, 19 bp, synthetic construct
  misc_feature 1..19: note = Target B2M Sequence complement
  source 1..19: mol_type = other DNA
aagatagttaagtgggatc

SEQ ID NO: 10212 - DNA, 19 bp, synthetic construct
  misc_feature 1..19: note = Target B2M Sequence complement
  source 1..19: mol_type = other DNA
agatagttaagtgggatcg

SEQ ID NO: 10213 - DNA, 19 bp, synthetic construct
  misc_feature 1..19: note = Target B2M Sequence complement
  source 1..19: mol_type = other DNA
gatagttaagtgggatcga

SEQ ID NO: 10214 - DNA, 19 bp, synthetic construct
  misc_feature 1..19: note = Target B2M Sequence complement
  source 1..19: mol_type = other DNA
atagttaagtgggatcgag

SEQ ID NO: 10215 - DNA, 19 bp, synthetic construct
  misc_feature 1..19: note = Target B2M Sequence complement
  source 1..19: mol_type = other DNA
tagttaagtgggatcgaga

SEQ ID NO: 10216 - DNA, 19 bp, synthetic construct
  misc_feature 1..19: note = Target B2M Sequence complement
  source 1..19: mol_type = other DNA
agttaagtgggatcgagac

SEQ ID NO: 10217 - DNA, 19 bp, synthetic construct
  misc_feature 1..19: note = Target B2M Sequence complement
  source 1..19: mol_type = other DNA
gttaagtgggatcgagaca

SEQ ID NO: 10218 - DNA, 19 bp, synthetic construct
  misc_feature 1..19: note = Target B2M Sequence complement
  source 1..19: mol_type = other DNA
ttaagtgggatcgagacat

SEQ ID NO: 10219 - DNA, 19 bp, synthetic construct
  misc_feature 1..19: note = Target B2M Sequence complement
  source 1..19: mol_type = other DNA
taagtgggatcgagacatg

SEQ ID NO: 10220 - DNA, 19 bp, synthetic construct
  misc_feature 1..19: note = Target B2M Sequence complement
  source 1..19: mol_type = other DNA
aagtgggatcgagacatgt

SEQ ID NO: 10221 - DNA, 19 bp, synthetic construct
  misc_feature 1..19: note = Target B2M Sequence complement
  source 1..19: mol_type = other DNA
agtgggatcgagacatgta

SEQ ID NO: 10222 - DNA, 19 bp, synthetic construct
  misc_feature 1..19: note = Target B2M Sequence complement
  source 1..19: mol_type = other DNA
gtgggatcgagacatgtaa

SEQ ID NO: 10223 - DNA, 19 bp, synthetic construct
  misc_feature 1..19: note = Target B2M Sequence complement
  source 1..19: mol_type = other DNA
tgggatcgagacatgtaag

SEQ ID NO: 10224 - DNA, 19 bp, synthetic construct
  misc_feature 1..19: note = Target B2M Sequence complement
  source 1..19: mol_type = other DNA
gggatcgagacatgtaagc

SEQ ID NO: 10225 - DNA, 19 bp, synthetic construct
  misc_feature 1..19: note = Target B2M Sequence complement
  source 1..19: mol_type = other DNA
ggatcgagacatgtaagca

SEQ ID NO: 10226 - DNA, 19 bp, synthetic construct
  misc_feature 1..19: note = Target B2M Sequence complement
  source 1..19: mol_type = other DNA
gatcgagacatgtaagcag

SEQ ID NO: 10227 - DNA, 19 bp, synthetic construct
  misc_feature 1..19: note = Target B2M Sequence complement
  source 1..19: mol_type = other DNA
atcgagacatgtaagcagc

SEQ ID NO: 10228 - DNA, 19 bp, synthetic construct
  misc_feature 1..19: note = Target B2M Sequence complement
  source 1..19: mol_type = other DNA
tcgagacatgtaagcagca

SEQ ID NO: 10229 - DNA, 19 bp, synthetic construct
  misc_feature 1..19: note = Target B2M Sequence complement
  source 1..19: mol_type = other DNA
cgagacatgtaagcagcat

SEQ ID NO: 10230 - DNA, 19 bp, synthetic construct
  misc_feature 1..19: note = Target B2M Sequence complement
  source 1..19: mol_type = other DNA
gagacatgtaagcagcatc

SEQ ID NO: 10231 - DNA, 19 bp, synthetic construct
  misc_feature 1..19: note = Target B2M Sequence complement
  source 1..19: mol_type = other DNA
agacatgtaagcagcatca

SEQ ID NO: 10232 - DNA, 19 bp, synthetic construct
  misc_feature 1..19: note = Target B2M Sequence complement
  source 1..19: mol_type = other DNA
gacatgtaagcagcatcat

SEQ ID NO: 10233 - DNA, 19 bp, synthetic construct
  misc_feature 1..19: note = Target B2M Sequence complement
  source 1..19: mol_type = other DNA
acatgtaagcagcatcatg

SEQ ID NO: 10234 - DNA, 19 bp, synthetic construct
  misc_feature 1..19: note = Target B2M Sequence complement
  source 1..19: mol_type = other DNA
catgtaagcagcatcatgg

SEQ ID NO: 10235 - DNA, 19 bp, synthetic construct
  misc_feature 1..19: note = Target B2M Sequence complement
  source 1..19: mol_type = other DNA
atgtaagcagcatcatgga

SEQ ID NO: 10236 - DNA, 19 bp, synthetic construct
  misc_feature 1..19: note = Target B2M Sequence complement
  source 1..19: mol_type = other DNA
tgtaagcagcatcatggag

SEQ ID NO: 10237 - DNA, 19 bp, synthetic construct
  misc_feature 1..19: note = Target B2M Sequence complement
  source 1..19: mol_type = other DNA
gtaagcagcatcatggagg

SEQ ID NO: 10238 - DNA, 19 bp, synthetic construct
  misc_feature 1..19: note = Target B2M Sequence complement
  source 1..19: mol_type = other DNA
taagcagcatcatggaggt

SEQ ID NO: 10239 - DNA, 19 bp, synthetic construct
  misc_feature 1..19: note = Target B2M Sequence complement
  source 1..19: mol_type = other DNA
aagcagcatcatggaggtt

SEQ ID NO: 10240 - DNA, 19 bp, synthetic construct
  misc_feature 1..19: note = Target B2M Sequence complement
  source 1..19: mol_type = other DNA
agcagcatcatggaggttt

SEQ ID NO: 10241 - DNA, 19 bp, synthetic construct
  misc_feature 1..19: note = Target B2M Sequence complement
  source 1..19: mol_type = other DNA
gcagcatcatggaggtttg

SEQ ID NO: 10242 - DNA, 19 bp, synthetic construct
  misc_feature 1..19: note = Target B2M Sequence complement
  source 1..19: mol_type = other DNA
cagcatcatggaggtttga

SEQ ID NO: 10243 - DNA, 19 bp, synthetic construct
  misc_feature 1..19: note = Target B2M Sequence complement
  source 1..19: mol_type = other DNA
agcatcatggaggtttgaa

SEQ ID NO: 10244 - DNA, 19 bp, synthetic construct
  misc_feature 1..19: note = Target B2M Sequence complement
  source 1..19: mol_type = other DNA
gcatcatggaggtttgaag

SEQ ID NO: 10245 - DNA, 19 bp, synthetic construct
  misc_feature 1..19: note = Target B2M Sequence complement
  source 1..19: mol_type = other DNA
catcatggaggtttgaaga

SEQ ID NO: 10246 - DNA, 19 bp, synthetic construct
  misc_feature 1..19: note = Target B2M Sequence complement
  source 1..19: mol_type = other DNA
atcatggaggtttgaagat

SEQ ID NO: 10247 - DNA, 19 bp, synthetic construct
  misc_feature 1..19: note = Target B2M Sequence complement
  source 1..19: mol_type = other DNA
tcatggaggtttgaagatg

SEQ ID NO: 10248 - DNA, 19 bp, synthetic construct
  misc_feature 1..19: note = Target B2M Sequence complement
  source 1..19: mol_type = other DNA
catggaggtttgaagatgc

SEQ ID NO: 10249 - DNA, 19 bp, synthetic construct
  misc_feature 1..19: note = Target B2M Sequence complement
  source 1..19: mol_type = other DNA
atggaggtttgaagatgcc

SEQ ID NO: 10250 - DNA, 19 bp, synthetic construct
  misc_feature 1..19: note = Target B2M Sequence complement
  source 1..19: mol_type = other DNA
tggaggtttgaagatgccg

SEQ ID NO: 10251 - DNA, 19 bp, synthetic construct
  misc_feature 1..19: note = Target B2M Sequence complement
  source 1..19: mol_type = other DNA
ggaggtttgaagatgccgc

SEQ ID NO: 10252 - DNA, 19 bp, synthetic construct
  misc_feature 1..19: note = Target B2M Sequence complement
  source 1..19: mol_type = other DNA
gaggtttgaagatgccgca

SEQ ID NO: 10253 - DNA, 19 bp, synthetic construct
  misc_feature 1..19: note = Target B2M Sequence complement
  source 1..19: mol_type = other DNA
aggtttgaagatgccgcat

SEQ ID NO: 10254 - DNA, 19 bp, synthetic construct
  misc_feature 1..19: note = Target B2M Sequence complement
  source 1..19: mol_type = other DNA
ggtttgaagatgccgcatt

SEQ ID NO: 10255 - DNA, 19 bp, synthetic construct
  misc_feature 1..19: note = Target B2M Sequence complement
  source 1..19: mol_type = other DNA
gtttgaagatgccgcattt

SEQ ID NO: 10256 - DNA, 19 bp, synthetic construct
  misc_feature 1..19: note = Target B2M Sequence complement
  source 1..19: mol_type = other DNA
tttgaagatgccgcatttg

SEQ ID NO: 10257 - DNA, 19 bp, synthetic construct
  misc_feature 1..19: note = Target B2M Sequence complement
  source 1..19: mol_type = other DNA
ttgaagatgccgcatttgg

SEQ ID NO: 10258 - DNA, 19 bp, synthetic construct
  misc_feature 1..19: note = Target B2M Sequence complement
  source 1..19: mol_type = other DNA
tgaagatgccgcatttgga

SEQ ID NO: 10259 - DNA, 19 bp, synthetic construct
  misc_feature 1..19: note = Target B2M Sequence complement
  source 1..19: mol_type = other DNA
gaagatgccgcatttggat

SEQ ID NO: 10260 - DNA, 19 bp, synthetic construct
  misc_feature 1..19: note = Target B2M Sequence complement
  source 1..19: mol_type = other DNA
aagatgccgcatttggatt

SEQ ID NO: 10261 - DNA, 19 bp, synthetic construct
  misc_feature 1..19: note = Target B2M Sequence complement
  source 1..19: mol_type = other DNA
agatgccgcatttggattg

SEQ ID NO: 10262 - DNA, 19 bp, synthetic construct
  misc_feature 1..19: note = Target B2M Sequence complement
  source 1..19: mol_type = other DNA
gatgccgcatttggattgg

SEQ ID NO: 10263 - DNA, 19 bp, synthetic construct
  misc_feature 1..19: note = Target B2M Sequence complement
  source 1..19: mol_type = other DNA
atgccgcatttggattgga

SEQ ID NO: 10264 - DNA, 19 bp, synthetic construct
  misc_feature 1..19: note = Target B2M Sequence complement
  source 1..19: mol_type = other DNA
tgccgcatttggattggat

SEQ ID NO: 10265 - DNA, 19 bp, synthetic construct
  misc_feature 1..19: note = Target B2M Sequence complement
  source 1..19: mol_type = other DNA
gccgcatttggattggatg

SEQ ID NO: 10266 - DNA, 19 bp, synthetic construct
  misc_feature 1..19: note = Target B2M Sequence complement
  source 1..19: mol_type = other DNA
ccgcatttggattggatga

SEQ ID NO: 10267 - DNA, 19 bp, synthetic construct
  misc_feature 1..19: note = Target B2M Sequence complement
  source 1..19: mol_type = other DNA
cgcatttggattggatgaa

SEQ ID NO: 10268 - DNA, 19 bp, synthetic construct
  misc_feature 1..19: note = Target B2M Sequence complement
  source 1..19: mol_type = other DNA
gcatttggattggatgaat

SEQ ID NO: 10269 - DNA, 19 bp, synthetic construct
  misc_feature 1..19: note = Target B2M Sequence complement
  source 1..19: mol_type = other DNA
catttggattggatgaatt

SEQ ID NO: 10270 - DNA, 19 bp, synthetic construct
  misc_feature 1..19: note = Target B2M Sequence complement
  source 1..19: mol_type = other DNA
atttggattggatgaattc

SEQ ID NO: 10271 - DNA, 19 bp, synthetic construct
  misc_feature 1..19: note = Target B2M Sequence complement
  source 1..19: mol_type = other DNA
tttggattggatgaattcc

SEQ ID NO: 10272 - DNA, 19 bp, synthetic construct
  misc_feature 1..19: note = Target B2M Sequence complement
  source 1..19: mol_type = other DNA
ttggattggatgaattcca

SEQ ID NO: 10273 - DNA, 19 bp, synthetic construct
  misc_feature 1..19: note = Target B2M Sequence complement
  source 1..19: mol_type = other DNA
tggattggatgaattccaa

SEQ ID NO: 10274 - DNA, 19 bp, synthetic construct
  misc_feature 1..19: note = Target B2M Sequence complement
  source 1..19: mol_type = other DNA
ggattggatgaattccaaa

SEQ ID NO: 10275 - DNA, 19 bp, synthetic construct
  misc_feature 1..19: note = Target B2M Sequence complement
  source 1..19: mol_type = other DNA
gattggatgaattccaaat

SEQ ID NO: 10276 - DNA, 19 bp, synthetic construct
  misc_feature 1..19: note = Target B2M Sequence complement
  source 1..19: mol_type = other DNA
attggatgaattccaaatt

SEQ ID NO: 10277 - DNA, 19 bp, synthetic construct
  misc_feature 1..19: note = Target B2M Sequence complement
  source 1..19: mol_type = other DNA
ttggatgaattccaaattc

SEQ ID NO: 10278 - DNA, 19 bp, synthetic construct
  misc_feature 1..19: note = Target B2M Sequence complement
  source 1..19: mol_type = other DNA
tggatgaattccaaattct

SEQ ID NO: 10279 - DNA, 19 bp, synthetic construct
  misc_feature 1..19: note = Target B2M Sequence complement
  source 1..19: mol_type = other DNA
ggatgaattccaaattctg

SEQ ID NO: 10280 - DNA, 19 bp, synthetic construct
  misc_feature 1..19: note = Target B2M Sequence complement
  source 1..19: mol_type = other DNA
gatgaattccaaattctgc

SEQ ID NO: 10281 - DNA, 19 bp, synthetic construct
  misc_feature 1..19: note = Target B2M Sequence complement
  source 1..19: mol_type = other DNA
atgaattccaaattctgct

SEQ ID NO: 10282 - DNA, 19 bp, synthetic construct
  misc_feature 1..19: note = Target B2M Sequence complement
  source 1..19: mol_type = other DNA
tgaattccaaattctgctt

SEQ ID NO: 10283 - DNA, 19 bp, synthetic construct
  misc_feature 1..19: note = Target B2M Sequence complement
  source 1..19: mol_type = other DNA
gaattccaaattctgcttg

SEQ ID NO: 10284 - DNA, 19 bp, synthetic construct
  misc_feature 1..19: note = Target B2M Sequence complement
  source 1..19: mol_type = other DNA
aattccaaattctgcttgc

SEQ ID NO: 10285 - DNA, 19 bp, synthetic construct
  misc_feature 1..19: note = Target B2M Sequence complement
  source 1..19: mol_type = other DNA
attccaaattctgcttgct

SEQ ID NO: 10286 - DNA, 19 bp, synthetic construct
  misc_feature 1..19: note = Target B2M Sequence complement
  source 1..19: mol_type = other DNA
ttccaaattctgcttgctt

SEQ ID NO: 10287 - DNA, 19 bp, synthetic construct
  misc_feature 1..19: note = Target B2M Sequence complement
  source 1..19: mol_type = other DNA
tccaaattctgcttgcttg

SEQ ID NO: 10288 - DNA, 19 bp, synthetic construct
  misc_feature 1..19: note = Target B2M Sequence complement
  source 1..19: mol_type = other DNA
ccaaattctgcttgcttgc

SEQ ID NO: 10289 - DNA, 19 bp, synthetic construct
  misc_feature 1..19: note = Target B2M Sequence complement
  source 1..19: mol_type = other DNA
caaattctgcttgcttgct

SEQ ID NO: 10290 - DNA, 19 bp, synthetic construct
  misc_feature 1..19: note = Target B2M Sequence complement
  source 1..19: mol_type = other DNA
aaattctgcttgcttgctt

SEQ ID NO: 10291 - DNA, 19 bp, synthetic construct
  misc_feature 1..19: note = Target B2M Sequence complement
  source 1..19: mol_type = other DNA
aattctgcttgcttgcttt

SEQ ID NO: 10292 - DNA, 19 bp, synthetic construct
  misc_feature 1..19: note = Target B2M Sequence complement
  source 1..19: mol_type = other DNA
tattgatatgcttatacac

SEQ ID NO: 10293 - DNA, 19 bp, synthetic construct
  misc_feature 1..19: note = Target B2M Sequence complement
  source 1..19: mol_type = other DNA
attgatatgcttatacact

SEQ ID NO: 10294 - DNA, 19 bp, synthetic construct
  misc_feature 1..19: note = Target B2M Sequence complement
  source 1..19: mol_type = other DNA
ttgatatgcttatacactt

SEQ ID NO: 10295 - DNA, 19 bp, synthetic construct
  misc_feature 1..19: note = Target B2M Sequence complement
  source 1..19: mol_type = other DNA
tgatatgcttatacactta

SEQ ID NO: 10296 - DNA, 19 bp, synthetic construct
  misc_feature 1..19: note = Target B2M Sequence complement
  source 1..19: mol_type = other DNA
gatatgcttatacacttac

SEQ ID NO: 10297 - DNA, 19 bp, synthetic construct
  misc_feature 1..19: note = Target B2M Sequence complement
  source 1..19: mol_type = other DNA
atatgcttatacacttaca

SEQ ID NO: 10298 - DNA, 19 bp, synthetic construct
  misc_feature 1..19: note = Target B2M Sequence complement
  source 1..19: mol_type = other DNA
tatgcttatacacttacac

SEQ ID NO: 10299 - DNA, 19 bp, synthetic construct
  misc_feature 1..19: note = Target B2M Sequence complement
  source 1..19: mol_type = other DNA
atgcttatacacttacact

SEQ ID NO: 10300 - DNA, 19 bp, synthetic construct
  misc_feature 1..19: note = Target B2M Sequence complement
  source 1..19: mol_type = other DNA
tgcttatacacttacactt

SEQ ID NO: 10301 - DNA, 19 bp, synthetic construct
  misc_feature 1..19: note = Target B2M Sequence complement
  source 1..19: mol_type = other DNA
gcttatacacttacacttt

SEQ ID NO: 10302 - DNA, 19 bp, synthetic construct
  misc_feature 1..19: note = Target B2M Sequence complement
  source 1..19: mol_type = other DNA
cttatacacttacacttta

SEQ ID NO: 10303 - DNA, 19 bp, synthetic construct
  misc_feature 1..19: note = Target B2M Sequence complement
  source 1..19: mol_type = other DNA
tatacacttacactttatg

SEQ ID NO: 10304 - DNA, 19 bp, synthetic construct
  misc_feature 1..19: note = Target B2M Sequence complement
  source 1..19: mol_type = other DNA
atacacttacactttatgc

SEQ ID NO: 10305 - DNA, 19 bp, synthetic construct
  misc_feature 1..19: note = Target B2M Sequence complement
  source 1..19: mol_type = other DNA
tacacttacactttatgca

SEQ ID NO: 10306 - DNA, 19 bp, synthetic construct
  misc_feature 1..19: note = Target B2M Sequence complement
  source 1..19: mol_type = other DNA
acacttacactttatgcac

SEQ ID NO: 10307 - DNA, 19 bp, synthetic construct
  misc_feature 1..19: note = Target B2M Sequence complement
  source 1..19: mol_type = other DNA
cacttacactttatgcaca

SEQ ID NO: 10308 - DNA, 19 bp, synthetic construct
  misc_feature 1..19: note = Target B2M Sequence complement
  source 1..19: mol_type = other DNA
acttacactttatgcacaa

SEQ ID NO: 10309 - DNA, 19 bp, synthetic construct
  misc_feature 1..19: note = Target B2M Sequence complement
  source 1..19: mol_type = other DNA
cttacactttatgcacaaa

SEQ ID NO: 10310 - DNA, 19 bp, synthetic construct
  misc_feature 1..19: note = Target B2M Sequence complement
  source 1..19: mol_type = other DNA
atgtagggttataataatg

SEQ ID NO: 10311 - DNA, 19 bp, synthetic construct
  misc_feature 1..19: note = Target B2M Sequence complement
  source 1..19: mol_type = other DNA
tgtagggttataataatgt

SEQ ID NO: 10312 - DNA, 19 bp, synthetic construct
  misc_feature 1..19: note = Target B2M Sequence complement
  source 1..19: mol_type = other DNA
gtagggttataataatgtt

SEQ ID NO: 10313 - DNA, 19 bp, synthetic construct
  misc_feature 1..19: note = Target B2M Sequence complement
  source 1..19: mol_type = other DNA
gggttataataatgttaac

SEQ ID NO: 10314 - DNA, 19 bp, synthetic construct
  misc_feature 1..19: note = Target B2M Sequence complement
  source 1..19: mol_type = other DNA
taataatgttaacatggac

SEQ ID NO: 10315 - DNA, 19 bp, synthetic construct
  misc_feature 1..19: note = Target B2M Sequence complement
  source 1..19: mol_type = other DNA
aataatgttaacatggaca

SEQ ID NO: 10316 - DNA, 19 bp, synthetic construct
  misc_feature 1..19: note = Target B2M Sequence complement
  source 1..19: mol_type = other DNA
ataatgttaacatggacat

SEQ ID NO: 10317 - DNA, 19 bp, synthetic construct
  misc_feature 1..19: note = Target B2M Sequence complement
  source 1..19: mol_type = other DNA
taatgttaacatggacatg

SEQ ID NO: 10318 - DNA, 19 bp, synthetic construct
  misc_feature 1..19: note = Target B2M Sequence complement
  source 1..19: mol_type = other DNA
aatgttaacatggacatga

SEQ ID NO: 10319 - DNA, 19 bp, synthetic construct
  misc_feature 1..19: note = Target B2M Sequence complement
  source 1..19: mol_type = other DNA
atgttaacatggacatgat

SEQ ID NO: 10320 - DNA, 19 bp, synthetic construct
  misc_feature 1..19: note = Target B2M Sequence complement
  source 1..19: mol_type = other DNA
tgttaacatggacatgatc

SEQ ID NO: 10321 - DNA, 19 bp, synthetic construct
  misc_feature 1..19: note = Target B2M Sequence complement
  source 1..19: mol_type = other DNA
gttaacatggacatgatct

SEQ ID NO: 10322 - DNA, 19 bp, synthetic construct
  misc_feature 1..19: note = Target B2M Sequence complement
  source 1..19: mol_type = other DNA
ttaacatggacatgatctt

SEQ ID NO: 10323 - DNA, 19 bp, synthetic construct
  misc_feature 1..19: note = Target B2M Sequence complement
  source 1..19: mol_type = other DNA
taacatggacatgatcttc

SEQ ID NO: 10324 - DNA, 19 bp, synthetic construct
  misc_feature 1..19: note = Target B2M Sequence complement
  source 1..19: mol_type = other DNA
aacatggacatgatcttct

SEQ ID NO: 10325 - DNA, 19 bp, synthetic construct
  misc_feature 1..19: note = Target B2M Sequence complement
  source 1..19: mol_type = other DNA
acatggacatgatcttctt

SEQ ID NO: 10326 - DNA, 19 bp, synthetic construct
  misc_feature 1..19: note = Target B2M Sequence complement
  source 1..19: mol_type = other DNA
catggacatgatcttcttt

SEQ ID NO: 10327 - DNA, 19 bp, synthetic construct
  misc_feature 1..19: note = Target B2M Sequence complement
  source 1..19: mol_type = other DNA
atggacatgatcttcttta

SEQ ID NO: 10328 - DNA, 19 bp, synthetic construct
  misc_feature 1..19: note = Target B2M Sequence complement
  source 1..19: mol_type = other DNA
tggacatgatcttctttat

SEQ ID NO: 10329 - DNA, 19 bp, synthetic construct
  misc_feature 1..19: note = Target B2M Sequence complement
  source 1..19: mol_type = other DNA
ggacatgatcttctttata

SEQ ID NO: 10330 - DNA, 19 bp, synthetic construct
  misc_feature 1..19: note = Target B2M Sequence complement
  source 1..19: mol_type = other DNA
gacatgatcttctttataa

SEQ ID NO: 10331 - DNA, 19 bp, synthetic construct
  misc_feature 1..19: note = Target B2M Sequence complement
  source 1..19: mol_type = other DNA
tataattctactttgagtg

SEQ ID NO: 10332 - DNA, 19 bp, synthetic construct
  misc_feature 1..19: note = Target B2M Sequence complement
  source 1..19: mol_type = other DNA
ataattctactttgagtgc

SEQ ID NO: 10333 - DNA, 19 bp, synthetic construct
  misc_feature 1..19: note = Target B2M Sequence complement
  source 1..19: mol_type = other DNA
taattctactttgagtgct

SEQ ID NO: 10334 - DNA, 19 bp, synthetic construct
  misc_feature 1..19: note = Target B2M Sequence complement
  source 1..19: mol_type = other DNA
aattctactttgagtgctg

SEQ ID NO: 10335 - DNA, 19 bp, synthetic construct
  misc_feature 1..19: note = Target B2M Sequence complement
  source 1..19: mol_type = other DNA
attctactttgagtgctgt

SEQ ID NO: 10336 - DNA, 19 bp, synthetic construct
  misc_feature 1..19: note = Target B2M Sequence complement
  source 1..19: mol_type = other DNA
ttctactttgagtgctgtc

SEQ ID NO: 10337 - DNA, 19 bp, synthetic construct
  misc_feature 1..19: note = Target B2M Sequence complement
  source 1..19: mol_type = other DNA
tctactttgagtgctgtct

SEQ ID NO: 10338 - DNA, 19 bp, synthetic construct
  misc_feature 1..19: note = Target B2M Sequence complement
  source 1..19: mol_type = other DNA
ctactttgagtgctgtctc

SEQ ID NO: 10339 - DNA, 19 bp, synthetic construct
  misc_feature 1..19: note = Target B2M Sequence complement
  source 1..19: mol_type = other DNA
tactttgagtgctgtctcc

SEQ ID NO: 10340 - DNA, 19 bp, synthetic construct
  misc_feature 1..19: note = Target B2M Sequence complement
  source 1..19: mol_type = other DNA
actttgagtgctgtctcca

SEQ ID NO: 10341 - DNA, 19 bp, synthetic construct
  misc_feature 1..19: note = Target B2M Sequence complement
  source 1..19: mol_type = other DNA
ctttgagtgctgtctccat

SEQ ID NO: 10342 - DNA, 19 bp, synthetic construct
  misc_feature 1..19: note = Target B2M Sequence complement
  source 1..19: mol_type = other DNA
tttgagtgctgtctccatg

SEQ ID NO: 10343 - DNA, 19 bp, synthetic construct
  misc_feature 1..19: note = Target B2M Sequence complement
  source 1..19: mol_type = other DNA
ttgagtgctgtctccatgt

SEQ ID NO: 10344 - DNA, 19 bp, synthetic construct
  misc_feature 1..19: note = Target B2M Sequence complement
  source 1..19: mol_type = other DNA
tgagtgctgtctccatgtt

SEQ ID NO: 10345 - DNA, 19 bp, synthetic construct
  misc_feature 1..19: note = Target B2M Sequence complement
  source 1..19: mol_type = other DNA
gagtgctgtctccatgttt

SEQ ID NO: 10346 - DNA, 19 bp, synthetic construct
  misc_feature 1..19: note = Target B2M Sequence complement
  source 1..19: mol_type = other DNA
agtgctgtctccatgtttg

SEQ ID NO: 10347 - DNA, 19 bp, synthetic construct
  misc_feature 1..19: note = Target B2M Sequence complement
  source 1..19: mol_type = other DNA
gtgctgtctccatgtttga

SEQ ID NO: 10348 - DNA, 19 bp, synthetic construct
  misc_feature 1..19: note = Target B2M Sequence complement
  source 1..19: mol_type = other DNA
tgctgtctccatgtttgat

SEQ ID NO: 10349 - DNA, 19 bp, synthetic construct
  misc_feature 1..19: note = Target B2M Sequence complement
  source 1..19: mol_type = other DNA
gctgtctccatgtttgatg

SEQ ID NO: 10350 - DNA, 19 bp, synthetic construct
  misc_feature 1..19: note = Target B2M Sequence complement
  source 1..19: mol_type = other DNA
ctgtctccatgtttgatgt

SEQ ID NO: 10351 - DNA, 19 bp, synthetic construct
  misc_feature 1..19: note = Target B2M Sequence complement
  source 1..19: mol_type = other DNA
tgtctccatgtttgatgta

SEQ ID NO: 10352 - DNA, 19 bp, synthetic construct
  misc_feature 1..19: note = Target B2M Sequence complement
  source 1..19: mol_type = other DNA
gtctccatgtttgatgtat

SEQ ID NO: 10353 - DNA, 19 bp, synthetic construct
  misc_feature 1..19: note = Target B2M Sequence complement
  source 1..19: mol_type = other DNA
tctccatgtttgatgtatc

SEQ ID NO: 10354 - DNA, 19 bp, synthetic construct
  misc_feature 1..19: note = Target B2M Sequence complement
  source 1..19: mol_type = other DNA
ctccatgtttgatgtatct

SEQ ID NO: 10355 - DNA, 19 bp, synthetic construct
  misc_feature 1..19: note = Target B2M Sequence complement
  source 1..19: mol_type = other DNA
tccatgtttgatgtatctg

SEQ ID NO: 10356 - DNA, 19 bp, synthetic construct
  misc_feature 1..19: note = Target B2M Sequence complement
  source 1..19: mol_type = other DNA
ccatgtttgatgtatctga

SEQ ID NO: 10357 - DNA, 19 bp, synthetic construct
  misc_feature 1..19: note = Target B2M Sequence complement
  source 1..19: mol_type = other DNA
catgtttgatgtatctgag

SEQ ID NO: 10358 - DNA, 19 bp, synthetic construct
  misc_feature 1..19: note = Target B2M Sequence complement
  source 1..19: mol_type = other DNA
atgtttgatgtatctgagc

SEQ ID NO: 10359 - DNA, 19 bp, synthetic construct
  misc_feature 1..19: note = Target B2M Sequence complement
  source 1..19: mol_type = other DNA
tgtttgatgtatctgagca

SEQ ID NO: 10360 - DNA, 19 bp, synthetic construct
  misc_feature 1..19: note = Target B2M Sequence complement
  source 1..19: mol_type = other DNA
gtttgatgtatctgagcag

SEQ ID NO: 10361 - DNA, 19 bp, synthetic construct
  misc_feature 1..19: note = Target B2M Sequence complement
  source 1..19: mol_type = other DNA
tttgatgtatctgagcagg

SEQ ID NO: 10362 - DNA, 19 bp, synthetic construct
  misc_feature 1..19: note = Target B2M Sequence complement
  source 1..19: mol_type = other DNA
ttgatgtatctgagcaggt

SEQ ID NO: 10363 - DNA, 19 bp, synthetic construct
  misc_feature 1..19: note = Target B2M Sequence complement
  source 1..19: mol_type = other DNA
tgatgtatctgagcaggtt

SEQ ID NO: 10364 - DNA, 19 bp, synthetic construct
  misc_feature 1..19: note = Target B2M Sequence complement
  source 1..19: mol_type = other DNA
gatgtatctgagcaggttg

SEQ ID NO: 10365 - DNA, 19 bp, synthetic construct
  misc_feature 1..19: note = Target B2M Sequence complement
  source 1..19: mol_type = other DNA
atgtatctgagcaggttgc

SEQ ID NO: 10366 - DNA, 19 bp, synthetic construct
  misc_feature 1..19: note = Target B2M Sequence complement
  source 1..19: mol_type = other DNA
tgtatctgagcaggttgct

SEQ ID NO: 10367 - DNA, 19 bp, synthetic construct
  misc_feature 1..19: note = Target B2M Sequence complement
  source 1..19: mol_type = other DNA
gtatctgagcaggttgctc

SEQ ID NO: 10368 - DNA, 19 bp, synthetic construct
  misc_feature 1..19: note = Target B2M Sequence complement
  source 1..19: mol_type = other DNA
tatctgagcaggttgctcc

SEQ ID NO: 10369 - DNA, 19 bp, synthetic construct
  misc_feature 1..19: note = Target B2M Sequence complement
  source 1..19: mol_type = other DNA
atctgagcaggttgctcca

SEQ ID NO: 10370 - DNA, 19 bp, synthetic construct
  misc_feature 1..19: note = Target B2M Sequence complement
  source 1..19: mol_type = other DNA
tctgagcaggttgctccac

SEQ ID NO: 10371 - DNA, 19 bp, synthetic construct
  misc_feature 1..19: note = Target B2M Sequence complement
  source 1..19: mol_type = other DNA
ctgagcaggttgctccaca

SEQ ID NO: 10372 - DNA, 19 bp, synthetic construct
  misc_feature 1..19: note = Target B2M Sequence complement
  source 1..19: mol_type = other DNA
tgagcaggttgctccacag

SEQ ID NO: 10373 - DNA, 19 bp, synthetic construct
  misc_feature 1..19: note = Target B2M Sequence complement
  source 1..19: mol_type = other DNA
agcaggttgctccacaggt

SEQ ID NO: 10374 - DNA, 19 bp, synthetic construct
  misc_feature 1..19: note = Target B2M Sequence complement
  source 1..19: mol_type = other DNA
gcaggttgctccacaggta

SEQ ID NO: 10375 - DNA, 19 bp, synthetic construct
  misc_feature 1..19: note = Target B2M Sequence complement
  source 1..19: mol_type = other DNA
caggttgctccacaggtag

SEQ ID NO: 10376 - DNA, 19 bp, synthetic construct
  misc_feature 1..19: note = Target B2M Sequence complement
  source 1..19: mol_type = other DNA
aggttgctccacaggtagc

SEQ ID NO: 10377 - DNA, 19 bp, synthetic construct
  misc_feature 1..19: note = Target B2M Sequence complement
  source 1..19: mol_type = other DNA
ggttgctccacaggtagct

SEQ ID NO: 10378 - DNA, 19 bp, synthetic construct
  misc_feature 1..19: note = Target B2M Sequence complement
  source 1..19: mol_type = other DNA
gttgctccacaggtagctc

SEQ ID NO: 10379 - DNA, 19 bp, synthetic construct
  misc_feature 1..19: note = Target B2M Sequence complement
  source 1..19: mol_type = other DNA
ttgctccacaggtagctct

SEQ ID NO: 10380 - DNA, 19 bp, synthetic construct
  misc_feature 1..19: note = Target B2M Sequence complement
  source 1..19: mol_type = other DNA
tgctccacaggtagctcta

SEQ ID NO: 10381 - DNA, 19 bp, synthetic construct
  misc_feature 1..19: note = Target B2M Sequence complement
  source 1..19: mol_type = other DNA
gctccacaggtagctctag

SEQ ID NO: 10382 - DNA, 19 bp, synthetic construct
  misc_feature 1..19: note = Target B2M Sequence complement
  source 1..19: mol_type = other DNA
ctccacaggtagctctagg

SEQ ID NO: 10383 - DNA, 19 bp, synthetic construct
  misc_feature 1..19: note = Target B2M Sequence complement
  source 1..19: mol_type = other DNA
tccacaggtagctctagga

SEQ ID NO: 10384 - DNA, 19 bp, synthetic construct
  misc_feature 1..19: note = Target B2M Sequence complement
  source 1..19: mol_type = other DNA
ccacaggtagctctaggag

SEQ ID NO: 10385 - DNA, 19 bp, synthetic construct
  misc_feature 1..19: note = Target B2M Sequence complement
  source 1..19: mol_type = other DNA
cacaggtagctctaggagg

SEQ ID NO: 10386 - DNA, 19 bp, synthetic construct
  misc_feature 1..19: note = Target B2M Sequence complement
  source 1..19: mol_type = other DNA
acaggtagctctaggaggg

SEQ ID NO: 10387 - DNA, 19 bp, synthetic construct
  misc_feature 1..19: note = Target B2M Sequence complement
  source 1..19: mol_type = other DNA
aggtagctctaggagggct

SEQ ID NO: 10388 - DNA, 19 bp, synthetic construct
  misc_feature 1..19: note = Target B2M Sequence complement
  source 1..19: mol_type = other DNA
tctaggagggctggcaact

SEQ ID NO: 10389 - DNA, 19 bp, synthetic construct
  misc_feature 1..19: note = Target B2M Sequence complement
  source 1..19: mol_type = other DNA
ctaggagggctggcaactt

SEQ ID NO: 10390 - DNA, 19 bp, synthetic construct
  misc_feature 1..19: note = Target B2M Sequence complement
  source 1..19: mol_type = other DNA
taggagggctggcaactta

SEQ ID NO: 10391 - DNA, 19 bp, synthetic construct
  misc_feature 1..19: note = Target B2M Sequence complement
  source 1..19: mol_type = other DNA
aggagggctggcaacttag

SEQ ID NO: 10392 - DNA, 19 bp, synthetic construct
  misc_feature 1..19: note = Target B2M Sequence complement
  source 1..19: mol_type = other DNA
ggagggctggcaacttaga

SEQ ID NO: 10393 - DNA, 19 bp, synthetic construct
  misc_feature 1..19: note = Target B2M Sequence complement
  source 1..19: mol_type = other DNA
gagggctggcaacttagag

SEQ ID NO: 10394 - DNA, 19 bp, synthetic construct
  misc_feature 1..19: note = Target B2M Sequence complement
  source 1..19: mol_type = other DNA
agggctggcaacttagagg

SEQ ID NO: 10395 - DNA, 19 bp, synthetic construct
  misc_feature 1..19: note = Target B2M Sequence complement
  source 1..19: mol_type = other DNA
gggctggcaacttagaggt

SEQ ID NO: 10396 - DNA, 19 bp, synthetic construct
  misc_feature 1..19: note = Target B2M Sequence complement
  source 1..19: mol_type = other DNA
ggctggcaacttagaggtg

SEQ ID NO: 10397 - DNA, 19 bp, synthetic construct
  misc_feature 1..19: note = Target B2M Sequence complement
  source 1..19: mol_type = other DNA
gctggcaacttagaggtgg

SEQ ID NO: 10398 - DNA, 19 bp, synthetic construct
  misc_feature 1..19: note = Target B2M Sequence complement
  source 1..19: mol_type = other DNA
ctggcaacttagaggtggg

SEQ ID NO: 10399 - DNA, 19 bp, synthetic construct
  misc_feature 1..19: note = Target B2M Sequence complement
  source 1..19: mol_type = other DNA
gggagcagagaattctctt

SEQ ID NO: 10400 - DNA, 19 bp, synthetic construct
  misc_feature 1..19: note = Target B2M Sequence complement
  source 1..19: mol_type = other DNA
ggagcagagaattctctta

SEQ ID NO: 10401 - DNA, 19 bp, synthetic construct
  misc_feature 1..19: note = Target B2M Sequence complement
  source 1..19: mol_type = other DNA
gagcagagaattctcttat

SEQ ID NO: 10402 - DNA, 19 bp, synthetic construct
  misc_feature 1..19: note = Target B2M Sequence complement
  source 1..19: mol_type = other DNA
agcagagaattctcttatc

SEQ ID NO: 10403 - DNA, 19 bp, synthetic construct
  misc_feature 1..19: note = Target B2M Sequence complement
  source 1..19: mol_type = other DNA
gcagagaattctcttatcc

SEQ ID NO: 10404 - DNA, 19 bp, synthetic construct
  misc_feature 1..19: note = Target B2M Sequence complement
  source 1..19: mol_type = other DNA
cagagaattctcttatcca

SEQ ID NO: 10405 - DNA, 19 bp, synthetic construct
  misc_feature 1..19: note = Target B2M Sequence complement
  source 1..19: mol_type = other DNA
agagaattctcttatccaa

SEQ ID NO: 10406 - DNA, 19 bp, synthetic construct
  misc_feature 1..19: note = Target B2M Sequence complement
  source 1..19: mol_type = other DNA
gagaattctcttatccaac

SEQ ID NO: 10407 - DNA, 19 bp, synthetic construct
  misc_feature 1..19: note = Target B2M Sequence complement
  source 1..19: mol_type = other DNA
agaattctcttatccaaca

SEQ ID NO: 10408 - DNA, 19 bp, synthetic construct
  misc_feature 1..19: note = Target B2M Sequence complement
  source 1..19: mol_type = other DNA
gaattctcttatccaacat

SEQ ID NO: 10409 - DNA, 19 bp, synthetic construct
  misc_feature 1..19: note = Target B2M Sequence complement
  source 1..19: mol_type = other DNA
aattctcttatccaacatc

SEQ ID NO: 10410 - DNA, 19 bp, synthetic construct
  misc_feature 1..19: note = Target B2M Sequence complement
  source 1..19: mol_type = other DNA
attctcttatccaacatca

SEQ ID NO: 10411 - DNA, 19 bp, synthetic construct
  misc_feature 1..19: note = Target B2M Sequence complement
  source 1..19: mol_type = other DNA
ttctcttatccaacatcaa

SEQ ID NO: 10412 - DNA, 19 bp, synthetic construct
  misc_feature 1..19: note = Target B2M Sequence complement
  source 1..19: mol_type = other DNA
tctcttatccaacatcaac

SEQ ID NO: 10413 - DNA, 19 bp, synthetic construct
  misc_feature 1..19: note = Target B2M Sequence complement
  source 1..19: mol_type = other DNA
ctcttatccaacatcaaca

SEQ ID NO: 10414 - DNA, 19 bp, synthetic construct
  misc_feature 1..19: note = Target B2M Sequence complement
  source 1..19: mol_type = other DNA
tcttatccaacatcaacat

SEQ ID NO: 10415 - DNA, 19 bp, synthetic construct
  misc_feature 1..19: note = Target B2M Sequence complement
  source 1..19: mol_type = other DNA
cttatccaacatcaacatc

SEQ ID NO: 10416 - DNA, 19 bp, synthetic construct
  misc_feature 1..19: note = Target B2M Sequence complement
  source 1..19: mol_type = other DNA
ttatccaacatcaacatct

SEQ ID NO: 10417 - DNA, 19 bp, synthetic construct
  misc_feature 1..19: note = Target B2M Sequence complement
  source 1..19: mol_type = other DNA
tatccaacatcaacatctt

SEQ ID NO: 10418 - DNA, 19 bp, synthetic construct
  misc_feature 1..19: note = Target B2M Sequence complement
  source 1..19: mol_type = other DNA
atccaacatcaacatcttg

SEQ ID NO: 10419 - DNA, 19 bp, synthetic construct
  misc_feature 1..19: note = Target B2M Sequence complement
  source 1..19: mol_type = other DNA
tccaacatcaacatcttgg

SEQ ID NO: 10420 - DNA, 19 bp, synthetic construct
  misc_feature 1..19: note = Target B2M Sequence complement
  source 1..19: mol_type = other DNA
ccaacatcaacatcttggt

SEQ ID NO: 10421 - DNA, 19 bp, synthetic construct
  misc_feature 1..19: note = Target B2M Sequence complement
  source 1..19: mol_type = other DNA
caacatcaacatcttggtc

SEQ ID NO: 10422 - DNA, 19 bp, synthetic construct
  misc_feature 1..19: note = Target B2M Sequence complement
  source 1..19: mol_type = other DNA
aacatcaacatcttggtca

SEQ ID NO: 10423 - DNA, 19 bp, synthetic construct
  misc_feature 1..19: note = Target B2M Sequence complement
  source 1..19: mol_type = other DNA
acatcaacatcttggtcag

SEQ ID NO: 10424 - DNA, 19 bp, synthetic construct
  misc_feature 1..19: note = Target B2M Sequence complement
  source 1..19: mol_type = other DNA
catcaacatcttggtcaga

SEQ ID NO: 10425 - DNA, 19 bp, synthetic construct
  misc_feature 1..19: note = Target B2M Sequence complement
  source 1..19: mol_type = other DNA
atcaacatcttggtcagat

SEQ ID NO: 10426 - DNA, 19 bp, synthetic construct
  misc_feature 1..19: note = Target B2M Sequence complement
  source 1..19: mol_type = other DNA
tcaacatcttggtcagatt

SEQ ID NO: 10427 - DNA, 19 bp, synthetic construct
  misc_feature 1..19: note = Target B2M Sequence complement
  source 1..19: mol_type = other DNA
caacatcttggtcagattt

SEQ ID NO: 10428 - DNA, 19 bp, synthetic construct
  misc_feature 1..19: note = Target B2M Sequence complement
  source 1..19: mol_type = other DNA
aacatcttggtcagatttg

SEQ ID NO: 10429 - DNA, 19 bp, synthetic construct
  misc_feature 1..19: note = Target B2M Sequence complement
  source 1..19: mol_type = other DNA
acatcttggtcagatttga

SEQ ID NO: 10430 - DNA, 19 bp, synthetic construct
  misc_feature 1..19: note = Target B2M Sequence complement
  source 1..19: mol_type = other DNA
catcttggtcagatttgaa

SEQ ID NO: 10431 - DNA, 19 bp, synthetic construct
  misc_feature 1..19: note = Target B2M Sequence complement
  source 1..19: mol_type = other DNA
atcttggtcagatttgaac

SEQ ID NO: 10432 - DNA, 19 bp, synthetic construct
  misc_feature 1..19: note = Target B2M Sequence complement
  source 1..19: mol_type = other DNA
tcttggtcagatttgaact

SEQ ID NO: 10433 - DNA, 19 bp, synthetic construct
  misc_feature 1..19: note = Target B2M Sequence complement
  source 1..19: mol_type = other DNA
cttggtcagatttgaactc

SEQ ID NO: 10434 - DNA, 19 bp, synthetic construct
  misc_feature 1..19: note = Target B2M Sequence complement
  source 1..19: mol_type = other DNA
ttggtcagatttgaactct

SEQ ID NO: 10435 - DNA, 19 bp, synthetic construct
  misc_feature 1..19: note = Target B2M Sequence complement
  source 1..19: mol_type = other DNA
tggtcagatttgaactctt

SEQ ID NO: 10436 - DNA, 19 bp, synthetic construct
  misc_feature 1..19: note = Target B2M Sequence complement
  source 1..19: mol_type = other DNA
ggtcagatttgaactcttc

SEQ ID NO: 10437 - DNA, 19 bp, synthetic construct
  misc_feature 1..19: note = Target B2M Sequence complement
  source 1..19: mol_type = other DNA
gtcagatttgaactcttca

SEQ ID NO: 10438 - DNA, 19 bp, synthetic construct
  misc_feature 1..19: note = Target B2M Sequence complement
  source 1..19: mol_type = other DNA
tcagatttgaactcttcaa

SEQ ID NO: 10439 - DNA, 19 bp, synthetic construct
  misc_feature 1..19: note = Target B2M Sequence complement
  source 1..19: mol_type = other DNA
cagatttgaactcttcaat

SEQ ID NO: 10440 - DNA, 19 bp, synthetic construct
  misc_feature 1..19: note = Target B2M Sequence complement
  source 1..19: mol_type = other DNA
agatttgaactcttcaatc

SEQ ID NO: 10441 - DNA, 19 bp, synthetic construct
  misc_feature 1..19: note = Target B2M Sequence complement
  source 1..19: mol_type = other DNA
gatttgaactcttcaatct

SEQ ID NO: 10442 - DNA, 19 bp, synthetic construct
  misc_feature 1..19: note = Target B2M Sequence complement
  source 1..19: mol_type = other DNA
atttgaactcttcaatctc

SEQ ID NO: 10443 - DNA, 19 bp, synthetic construct
  misc_feature 1..19: note = Target B2M Sequence complement
  source 1..19: mol_type = other DNA
tttgaactcttcaatctct

SEQ ID NO: 10444 - DNA, 19 bp, synthetic construct
  misc_feature 1..19: note = Target B2M Sequence complement
  source 1..19: mol_type = other DNA
ttgaactcttcaatctctt

SEQ ID NO: 10445 - DNA, 19 bp, synthetic construct
  misc_feature 1..19: note = Target B2M Sequence complement
  source 1..19: mol_type = other DNA
tgaactcttcaatctcttg

SEQ ID NO: 10446 - DNA, 19 bp, synthetic construct
  misc_feature 1..19: note = Target B2M Sequence complement
  source 1..19: mol_type = other DNA
gaactcttcaatctcttgc

SEQ ID NO: 10447 - DNA, 19 bp, synthetic construct
  misc_feature 1..19: note = Target B2M Sequence complement
  source 1..19: mol_type = other DNA
aactcttcaatctcttgca

SEQ ID NO: 10448 - DNA, 19 bp, synthetic construct
  misc_feature 1..19: note = Target B2M Sequence complement
  source 1..19: mol_type = other DNA
actcttcaatctcttgcac

SEQ ID NO: 10449 - DNA, 19 bp, synthetic construct
  misc_feature 1..19: note = Target B2M Sequence complement
  source 1..19: mol_type = other DNA
ctcttcaatctcttgcact

SEQ ID NO: 10450 - DNA, 19 bp, synthetic construct
  misc_feature 1..19: note = Target B2M Sequence complement
  source 1..19: mol_type = other DNA
tcttcaatctcttgcactc

SEQ ID NO: 10451 - DNA, 19 bp, synthetic construct
  misc_feature 1..19: note = Target B2M Sequence complement
  source 1..19: mol_type = other DNA
cttcaatctcttgcactca

SEQ ID NO: 10452 - DNA, 19 bp, synthetic construct
  misc_feature 1..19: note = Target B2M Sequence complement
  source 1..19: mol_type = other DNA
ttcaatctcttgcactcaa

SEQ ID NO: 10453 - DNA, 19 bp, synthetic construct
  misc_feature 1..19: note = Target B2M Sequence complement
  source 1..19: mol_type = other DNA
tcaatctcttgcactcaaa

SEQ ID NO: 10454 - DNA, 19 bp, synthetic construct
  misc_feature 1..19: note = Target B2M Sequence complement
  source 1..19: mol_type = other DNA
caatctcttgcactcaaag

SEQ ID NO: 10455 - DNA, 19 bp, synthetic construct
  misc_feature 1..19: note = Target B2M Sequence complement
  source 1..19: mol_type = other DNA
aatctcttgcactcaaagc

SEQ ID NO: 10456 - DNA, 19 bp, synthetic construct
  misc_feature 1..19: note = Target B2M Sequence complement
  source 1..19: mol_type = other DNA
atctcttgcactcaaagct

SEQ ID NO: 10457 - DNA, 19 bp, synthetic construct
  misc_feature 1..19: note = Target B2M Sequence complement
  source 1..19: mol_type = other DNA
tctcttgcactcaaagctt

SEQ ID NO: 10458 - DNA, 19 bp, synthetic construct
  misc_feature 1..19: note = Target B2M Sequence complement
  source 1..19: mol_type = other DNA
ctcttgcactcaaagcttg

SEQ ID NO: 10459 - DNA, 19 bp, synthetic construct
  misc_feature 1..19: note = Target B2M Sequence complement
  source 1..19: mol_type = other DNA
tcttgcactcaaagcttgt

SEQ ID NO: 10460 - DNA, 19 bp, synthetic construct
  misc_feature 1..19: note = Target B2M Sequence complement
  source 1..19: mol_type = other DNA
cttgcactcaaagcttgtt

SEQ ID NO: 10461 - DNA, 19 bp, synthetic construct
  misc_feature 1..19: note = Target B2M Sequence complement
  source 1..19: mol_type = other DNA
ttgcactcaaagcttgtta

SEQ ID NO: 10462 - DNA, 19 bp, synthetic construct
  misc_feature 1..19: note = Target B2M Sequence complement
  source 1..19: mol_type = other DNA
tgcactcaaagcttgttaa

SEQ ID NO: 10463 - DNA, 19 bp, synthetic construct
  misc_feature 1..19: note = Target B2M Sequence complement
  source 1..19: mol_type = other DNA
gcactcaaagcttgttaag

SEQ ID NO: 10464 - DNA, 19 bp, synthetic construct
  misc_feature 1..19: note = Target B2M Sequence complement
  source 1..19: mol_type = other DNA
cactcaaagcttgttaaga

SEQ ID NO: 10465 - DNA, 19 bp, synthetic construct
  misc_feature 1..19: note = Target B2M Sequence complement
  source 1..19: mol_type = other DNA
actcaaagcttgttaagat

SEQ ID NO: 10466 - DNA, 19 bp, synthetic construct
  misc_feature 1..19: note = Target B2M Sequence complement
  source 1..19: mol_type = other DNA
ctcaaagcttgttaagata

SEQ ID NO: 10467 - DNA, 19 bp, synthetic construct
  misc_feature 1..19: note = Target B2M Sequence complement
  source 1..19: mol_type = other DNA
tcaaagcttgttaagatag

SEQ ID NO: 10468 - DNA, 19 bp, synthetic construct
  misc_feature 1..19: note = Target B2M Sequence complement
  source 1..19: mol_type = other DNA
caaagcttgttaagatagt

SEQ ID NO: 10469 - DNA, 19 bp, synthetic construct
  misc_feature 1..19: note = Target B2M Sequence complement
  source 1..19: mol_type = other DNA
aaagcttgttaagatagtt

SEQ ID NO: 10470 - DNA, 19 bp, synthetic construct
  misc_feature 1..19: note = Target B2M Sequence complement
  source 1..19: mol_type = other DNA
aagcttgttaagatagtta

SEQ ID NO: 10471 - DNA, 19 bp, synthetic construct
  misc_feature 1..19: note = Target B2M Sequence complement
  source 1..19: mol_type = other DNA
agcttgttaagatagttaa

SEQ ID NO: 10472 - DNA, 19 bp, synthetic construct
  misc_feature 1..19: note = Target B2M Sequence complement
  source 1..19: mol_type = other DNA
gcttgttaagatagttaag

SEQ ID NO: 10473 - DNA, 19 bp, synthetic construct
  misc_feature 1..19: note = Target B2M Sequence complement
  source 1..19: mol_type = other DNA
cttgttaagatagttaagc

SEQ ID NO: 10474 - DNA, 19 bp, synthetic construct
  misc_feature 1..19: note = Target B2M Sequence complement
  source 1..19: mol_type = other DNA
ttgttaagatagttaagcg

SEQ ID NO: 10475 - DNA, 19 bp, synthetic construct
  misc_feature 1..19: note = Target B2M Sequence complement
  source 1..19: mol_type = other DNA
tgttaagatagttaagcgt

SEQ ID NO: 10476 - DNA, 19 bp, synthetic construct
  misc_feature 1..19: note = Target B2M Sequence complement
  source 1..19: mol_type = other DNA
gttaagatagttaagcgtg

SEQ ID NO: 10477 - DNA, 19 bp, synthetic construct
  misc_feature 1..19: note = Target B2M Sequence complement
  source 1..19: mol_type = other DNA
ttaagatagttaagcgtgc

SEQ ID NO: 10478 - DNA, 19 bp, synthetic construct
  misc_feature 1..19: note = Target B2M Sequence complement
  source 1..19: mol_type = other DNA
taagatagttaagcgtgca

SEQ ID NO: 10479 - DNA, 19 bp, synthetic construct
  misc_feature 1..19: note = Target B2M Sequence complement
  source 1..19: mol_type = other DNA
aagatagttaagcgtgcat

SEQ ID NO: 10480 - DNA, 19 bp, synthetic construct
  misc_feature 1..19: note = Target B2M Sequence complement
  source 1..19: mol_type = other DNA
agatagttaagcgtgcata

SEQ ID NO: 10481 - DNA, 19 bp, synthetic construct
  misc_feature 1..19: note = Target B2M Sequence complement
  source 1..19: mol_type = other DNA
gatagttaagcgtgcataa

SEQ ID NO: 10482 - DNA, 19 bp, synthetic construct
  misc_feature 1..19: note = Target B2M Sequence complement
  source 1..19: mol_type = other DNA
atagttaagcgtgcataag

SEQ ID NO: 10483 - DNA, 19 bp, synthetic construct
  misc_feature 1..19: note = Target B2M Sequence complement
  source 1..19: mol_type = other DNA
tagttaagcgtgcataagt

SEQ ID NO: 10484 - DNA, 19 bp, synthetic construct
  misc_feature 1..19: note = Target B2M Sequence complement
  source 1..19: mol_type = other DNA
agttaagcgtgcataagtt

SEQ ID NO: 10485 - DNA, 19 bp, synthetic construct
  misc_feature 1..19: note = Target B2M Sequence complement
  source 1..19: mol_type = other DNA
gttaagcgtgcataagtta

SEQ ID NO: 10486 - DNA, 19 bp, synthetic construct
  misc_feature 1..19: note = Target B2M Sequence complement
  source 1..19: mol_type = other DNA
ttaagcgtgcataagttaa

SEQ ID NO: 10487 - DNA, 19 bp, synthetic construct
  misc_feature 1..19: note = Target B2M Sequence complement
  source 1..19: mol_type = other DNA
taagcgtgcataagttaac

SEQ ID NO: 10488 - DNA, 19 bp, synthetic construct
  misc_feature 1..19: note = Target B2M Sequence complement
  source 1..19: mol_type = other DNA
aagcgtgcataagttaact

SEQ ID NO: 10489 - DNA, 19 bp, synthetic construct
  misc_feature 1..19: note = Target B2M Sequence complement
  source 1..19: mol_type = other DNA
agcgtgcataagttaactt

SEQ ID NO: 10490 - DNA, 19 bp, synthetic construct
  misc_feature 1..19: note = Target B2M Sequence complement
  source 1..19: mol_type = other DNA
gcgtgcataagttaacttc

SEQ ID NO: 10491 - DNA, 19 bp, synthetic construct
  misc_feature 1..19: note = Target B2M Sequence complement
  source 1..19: mol_type = other DNA
cgtgcataagttaacttcc

SEQ ID NO: 10492 - DNA, 19 bp, synthetic construct
  misc_feature 1..19: note = Target B2M Sequence complement
  source 1..19: mol_type = other DNA
gtgcataagttaacttcca

SEQ ID NO: 10493 - DNA, 19 bp, synthetic construct
  misc_feature 1..19: note = Target B2M Sequence complement
  source 1..19: mol_type = other DNA
tgcataagttaacttccaa

SEQ ID NO: 10494 - DNA, 19 bp, synthetic construct
  misc_feature 1..19: note = Target B2M Sequence complement
  source 1..19: mol_type = other DNA
gcataagttaacttccaat

SEQ ID NO: 10495 - DNA, 19 bp, synthetic construct
  misc_feature 1..19: note = Target B2M Sequence complement
  source 1..19: mol_type = other DNA
cataagttaacttccaatt

SEQ ID NO: 10496 - DNA, 19 bp, synthetic construct
  misc_feature 1..19: note = Target B2M Sequence complement
  source 1..19: mol_type = other DNA
aagttaacttccaatttac

SEQ ID NO: 10497 - DNA, 19 bp, synthetic construct
  misc_feature 1..19: note = Target B2M Sequence complement
  source 1..19: mol_type = other DNA
agttaacttccaatttaca

SEQ ID NO: 10498 - DNA, 19 bp, synthetic construct
  misc_feature 1..19: note = Target B2M Sequence complement
  source 1..19: mol_type = other DNA
gttaacttccaatttacat

SEQ ID NO: 10499 - DNA, 19 bp, synthetic construct
  misc_feature 1..19: note = Target B2M Sequence complement
  source 1..19: mol_type = other DNA
taacttccaatttacatac

SEQ ID NO: 10500 - DNA, 19 bp, synthetic construct
  misc_feature 1..19: note = Target B2M Sequence complement
  source 1..19: mol_type = other DNA
aacttccaatttacatact

SEQ ID NO: 10501 - DNA, 19 bp, synthetic construct
  misc_feature 1..19: note = Target B2M Sequence complement
  source 1..19: mol_type = other DNA
acttccaatttacatactc

SEQ ID NO: 10502 - DNA, 19 bp, synthetic construct
  misc_feature 1..19: note = Target B2M Sequence complement
  source 1..19: mol_type = other DNA
cttccaatttacatactct

SEQ ID NO: 10503 - DNA, 19 bp, synthetic construct
  misc_feature 1..19: note = Target B2M Sequence complement
  source 1..19: mol_type = other DNA
ttccaatttacatactctg

SEQ ID NO: 10504 - DNA, 19 bp, synthetic construct
  misc_feature 1..19: note = Target B2M Sequence complement
  source 1..19: mol_type = other DNA
tccaatttacatactctgc

SEQ ID NO: 10505 - DNA, 19 bp, synthetic construct
  misc_feature 1..19: note = Target B2M Sequence complement
  source 1..19: mol_type = other DNA
ccaatttacatactctgct

SEQ ID NO: 10506 - DNA, 19 bp, synthetic construct
  misc_feature 1..19: note = Target B2M Sequence complement
  source 1..19: mol_type = other DNA
caatttacatactctgctt

SEQ ID NO: 10507 - DNA, 19 bp, synthetic construct
  misc_feature 1..19: note = Target B2M Sequence complement
  source 1..19: mol_type = other DNA
aatttacatactctgctta

SEQ ID NO: 10508 - DNA, 19 bp, synthetic construct
  misc_feature 1..19: note = Target B2M Sequence complement
  source 1..19: mol_type = other DNA
atttacatactctgcttag

SEQ ID NO: 10509 - DNA, 19 bp, synthetic construct
  misc_feature 1..19: note = Target B2M Sequence complement
  source 1..19: mol_type = other DNA
tttacatactctgcttaga

SEQ ID NO: 10510 - DNA, 19 bp, synthetic construct
  misc_feature 1..19: note = Target B2M Sequence complement
  source 1..19: mol_type = other DNA
ttacatactctgcttagaa

SEQ ID NO: 10511 - DNA, 19 bp, synthetic construct
  misc_feature 1..19: note = Target B2M Sequence complement
  source 1..19: mol_type = other DNA
tacatactctgcttagaat

SEQ ID NO: 10512 - DNA, 19 bp, synthetic construct
  misc_feature 1..19: note = Target B2M Sequence complement
  source 1..19: mol_type = other DNA
acatactctgcttagaatt

SEQ ID NO: 10513 - DNA, 19 bp, synthetic construct
  misc_feature 1..19: note = Target B2M Sequence complement
  source 1..19: mol_type = other DNA
catactctgcttagaattt

SEQ ID NO: 10514 - DNA, 19 bp, synthetic construct
  misc_feature 1..19: note = Target B2M Sequence complement
  source 1..19: mol_type = other DNA
atactctgcttagaatttg

SEQ ID NO: 10515 - DNA, 19 bp, synthetic construct
  misc_feature 1..19: note = Target B2M Sequence complement
  source 1..19: mol_type = other DNA
tactctgcttagaatttgg

SEQ ID NO: 10516 - DNA, 19 bp, synthetic construct
  misc_feature 1..19: note = Target B2M Sequence complement
  source 1..19: mol_type = other DNA
actctgcttagaatttggg

SEQ ID NO: 10517 - DNA, 19 bp, synthetic construct
  misc_feature 1..19: note = Target B2M Sequence complement
  source 1..19: mol_type = other DNA
tagaaatataattgacagg

SEQ ID NO: 10518 - DNA, 19 bp, synthetic construct
  misc_feature 1..19: note = Target B2M Sequence complement
  source 1..19: mol_type = other DNA
agaaatataattgacagga

SEQ ID NO: 10519 - DNA, 19 bp, synthetic construct
  misc_feature 1..19: note = Target B2M Sequence complement
  source 1..19: mol_type = other DNA
gaaatataattgacaggat

SEQ ID NO: 10520 - DNA, 19 bp, synthetic construct
  misc_feature 1..19: note = Target B2M Sequence complement
  source 1..19: mol_type = other DNA
ataattgacaggattattg

SEQ ID NO: 10521 - DNA, 19 bp, synthetic construct
  misc_feature 1..19: note = Target B2M Sequence complement
  source 1..19: mol_type = other DNA
taattgacaggattattgg

SEQ ID NO: 10522 - DNA, 19 bp, synthetic construct
  misc_feature 1..19: note = Target B2M Sequence complement
  source 1..19: mol_type = other DNA
aattgacaggattattgga

SEQ ID NO: 10523 - DNA, 19 bp, synthetic construct
  misc_feature 1..19: note = Target B2M Sequence complement
  source 1..19: mol_type = other DNA
attgacaggattattggaa

SEQ ID NO: 10524 - DNA, 19 bp, synthetic construct
  misc_feature 1..19: note = Target B2M Sequence complement
  source 1..19: mol_type = other DNA
ttgacaggattattggaaa

SEQ ID NO: 10525 - DNA, 19 bp, synthetic construct
  misc_feature 1..19: note = Target B2M Sequence complement
  source 1..19: mol_type = other DNA
tgacaggattattggaaat

SEQ ID NO: 10526 - DNA, 19 bp, synthetic construct
  misc_feature 1..19: note = Target B2M Sequence complement
  source 1..19: mol_type = other DNA
gacaggattattggaaatt

SEQ ID NO: 10527 - DNA, 19 bp, synthetic construct
  misc_feature 1..19: note = Target B2M Sequence complement
  source 1..19: mol_type = other DNA
acaggattattggaaattt

SEQ ID NO: 10528 - DNA, 19 bp, synthetic construct
  misc_feature 1..19: note = Target B2M Sequence complement
  source 1..19: mol_type = other DNA
caggattattggaaatttg

SEQ ID NO: 10529 - DNA, 19 bp, synthetic construct
  misc_feature 1..19: note = Target B2M Sequence complement
  source 1..19: mol_type = other DNA
aggattattggaaatttgt

SEQ ID NO: 10530 - DNA, 19 bp, synthetic construct
  misc_feature 1..19: note = Target B2M Sequence complement
  source 1..19: mol_type = other DNA
ggattattggaaatttgtt

SEQ ID NO: 10531 - DNA, 19 bp, synthetic construct
  misc_feature 1..19: note = Target B2M Sequence complement
  source 1..19: mol_type = other DNA
tacatttgataaagtaagg

SEQ ID NO: 10532 - DNA, 19 bp, synthetic construct
  misc_feature 1..19: note = Target B2M Sequence complement
  source 1..19: mol_type = other DNA
acatttgataaagtaaggc

SEQ ID NO: 10533 - DNA, 19 bp, synthetic construct
  misc_feature 1..19: note = Target B2M Sequence complement
  source 1..19: mol_type = other DNA
catttgataaagtaaggca

SEQ ID NO: 10534 - DNA, 19 bp, synthetic construct
  misc_feature 1..19: note = Target B2M Sequence complement
  source 1..19: mol_type = other DNA
atttgataaagtaaggcat

SEQ ID NO: 10535 - DNA, 19 bp, synthetic construct
  misc_feature 1..19: note = Target B2M Sequence complement
  source 1..19: mol_type = other DNA
tttgataaagtaaggcatg

SEQ ID NO: 10536 - DNA, 19 bp, synthetic construct
  misc_feature 1..19: note = Target B2M Sequence complement
  source 1..19: mol_type = other DNA
ttgataaagtaaggcatgg

SEQ ID NO: 10537 - DNA, 19 bp, synthetic construct
  misc_feature 1..19: note = Target B2M Sequence complement
  source 1..19: mol_type = other DNA
tgataaagtaaggcatggt

SEQ ID NO: 10538 - DNA, 19 bp, synthetic construct
  misc_feature 1..19: note = Target B2M Sequence complement
  source 1..19: mol_type = other DNA
gataaagtaaggcatggtt

SEQ ID NO: 10539 - DNA, 19 bp, synthetic construct
  misc_feature 1..19: note = Target B2M Sequence complement
  source 1..19: mol_type = other DNA
ataaagtaaggcatggttg

SEQ ID NO: 10540 - DNA, 19 bp, synthetic construct
  misc_feature 1..19: note = Target B2M Sequence complement
  source 1..19: mol_type = other DNA
taaagtaaggcatggttgt

SEQ ID NO: 10541 - DNA, 19 bp, synthetic construct
  misc_feature 1..19: note = Target B2M Sequence complement
  source 1..19: mol_type = other DNA
aaagtaaggcatggttgtg

SEQ ID NO: 10542 - DNA, 19 bp, synthetic construct
  misc_feature 1..19: note = Target B2M Sequence complement
  source 1..19: mol_type = other DNA
aagtaaggcatggttgtgg

SEQ ID NO: 10543 - DNA, 19 bp, synthetic construct
  misc_feature 1..19: note = Target B2M Sequence complement
  source 1..19: mol_type = other DNA
agtaaggcatggttgtggt

SEQ ID NO: 10544 - DNA, 19 bp, synthetic construct
  misc_feature 1..19: note = Target B2M Sequence complement
  source 1..19: mol_type = other DNA
gtaaggcatggttgtggtt

SEQ ID NO: 10545 - DNA, 19 bp, synthetic construct
  misc_feature 1..19: note = Target B2M Sequence complement
  source 1..19: mol_type = other DNA
taaggcatggttgtggtta

SEQ ID NO: 10546 - DNA, 19 bp, synthetic construct
  misc_feature 1..19: note = Target B2M Sequence complement
  source 1..19: mol_type = other DNA
aaggcatggttgtggttaa

SEQ ID NO: 10547 - DNA, 19 bp, synthetic construct
  misc_feature 1..19: note = Target B2M Sequence complement
  source 1..19: mol_type = other DNA
aggcatggttgtggttaat

SEQ ID NO: 10548 - DNA, 19 bp, synthetic construct
  misc_feature 1..19: note = Target B2M Sequence complement
  source 1..19: mol_type = other DNA
ggcatggttgtggttaatc

SEQ ID NO: 10549 - DNA, 19 bp, synthetic construct
  misc_feature 1..19: note = Target B2M Sequence complement
  source 1..19: mol_type = other DNA
gcatggttgtggttaatct

SEQ ID NO: 10550 - DNA, 19 bp, synthetic construct
  misc_feature 1..19: note = Target B2M Sequence complement
  source 1..19: mol_type = other DNA
catggttgtggttaatctg

SEQ ID NO: 10551 - DNA, 19 bp, synthetic construct
  misc_feature 1..19: note = Target B2M Sequence complement
  source 1..19: mol_type = other DNA
atggttgtggttaatctgg

SEQ ID NO: 10552 - DNA, 19 bp, synthetic construct
  misc_feature 1..19: note = Target B2M Sequence complement
  source 1..19: mol_type = other DNA
tggttgtggttaatctggt

SEQ ID NO: 10553 - DNA, 19 bp, synthetic construct
  misc_feature 1..19: note = Target B2M Sequence complement
  source 1..19: mol_type = other DNA
ggttgtggttaatctggtt

SEQ ID NO: 10554 - DNA, 19 bp, synthetic construct
  misc_feature 1..19: note = Target B2M Sequence complement
  source 1..19: mol_type = other DNA
gttgtggttaatctggttt

SEQ ID NO: 10555 - DNA, 19 bp, synthetic construct
  misc_feature 1..19: note = Target B2M Sequence complement
  source 1..19: mol_type = other DNA
ttgtggttaatctggttta

SEQ ID NO: 10556 - DNA, 19 bp, synthetic construct
  misc_feature 1..19: note = Target B2M Sequence complement
  source 1..19: mol_type = other DNA
tgtggttaatctggtttat

SEQ ID NO: 10557 - DNA, 19 bp, synthetic construct
  misc_feature 1..19: note = Target B2M Sequence complement
  source 1..19: mol_type = other DNA
gtggttaatctggtttatt

SEQ ID NO: 10558 - DNA, 19 bp, synthetic construct
  misc_feature 1..19: note = Target B2M Sequence complement
  source 1..19: mol_type = other DNA
tggttaatctggtttattt

SEQ ID NO: 10559 - DNA, 19 bp, synthetic construct
  misc_feature 1..19: note = Target B2M Sequence complement
  source 1..19: mol_type = other DNA
tttgttccacaagttaaat

SEQ ID NO: 10560 - DNA, 19 bp, synthetic construct
  misc_feature 1..19: note = Target B2M Sequence complement
  source 1..19: mol_type = other DNA
ttgttccacaagttaaata

SEQ ID NO: 10561 - DNA, 19 bp, synthetic construct
  misc_feature 1..19: note = Target B2M Sequence complement
  source 1..19: mol_type = other DNA
tgttccacaagttaaataa

SEQ ID NO: 10562 - DNA, 19 bp, synthetic construct
  misc_feature 1..19: note = Target B2M Sequence complement
  source 1..19: mol_type = other DNA
gttccacaagttaaataaa

SEQ ID NO: 10563 - DNA, 19 bp, synthetic construct
  misc_feature 1..19: note = Target B2M Sequence complement
  source 1..19: mol_type = other DNA
tccacaagttaaataaatc

SEQ ID NO: 10564 - DNA, 19 bp, synthetic construct
  misc_feature 1..19: note = Target B2M Sequence complement
  source 1..19: mol_type = other DNA
ccacaagttaaataaatca

SEQ ID NO: 10565 - DNA, 20 bp, synthetic construct
  misc_feature 1..20: note = Target B2M Sequence complement
  source 1..20: mol_type = other DNA
attcctgaagctgacagcat

SEQ ID NO: 10566 - DNA, 20 bp, synthetic construct
  misc_feature 1..20: note = Target B2M Sequence complement
  source 1..20: mol_type = other DNA
ttcctgaagctgacagcatt

SEQ ID NO: 10567 - DNA, 20 bp, synthetic construct
  misc_feature 1..20: note = Target B2M Sequence complement
  source 1..20: mol_type = other DNA
tcctgaagctgacagcattc

SEQ ID NO: 10568 - DNA, 20 bp, synthetic construct
  misc_feature 1..20: note = Target B2M Sequence complement
  source 1..20: mol_type = other DNA
cctgaagctgacagcattcg

SEQ ID NO: 10569 - DNA, 20 bp, synthetic construct
  misc_feature 1..20: note = Target B2M Sequence complement
  source 1..20: mol_type = other DNA
ctgaagctgacagcattcgg

SEQ ID NO: 10570 - DNA, 20 bp, synthetic construct
  misc_feature 1..20: note = Target B2M Sequence complement
  source 1..20: mol_type = other DNA
tgaagctgacagcattcggg

SEQ ID NO: 10571 - DNA, 20 bp, synthetic construct
  misc_feature 1..20: note = Target B2M Sequence complement
  source 1..20: mol_type = other DNA
ttagctgtgctcgcgctact

SEQ ID NO: 10572 - DNA, 20 bp, synthetic construct
  misc_feature 1..20: note = Target B2M Sequence complement
  source 1..20: mol_type = other DNA
tgctcgcgctactctctctt

SEQ ID NO: 10573 - DNA, 20 bp, synthetic construct
  misc_feature 1..20: note = Target B2M Sequence complement
  source 1..20: mol_type = other DNA
gctcgcgctactctctcttt

SEQ ID NO: 10574 - DNA, 20 bp, synthetic construct
  misc_feature 1..20: note = Target B2M Sequence complement
  source 1..20: mol_type = other DNA
tcgcgctactctctctttct

SEQ ID NO: 10575 - DNA, 20 bp, synthetic construct
  misc_feature 1..20: note = Target B2M Sequence complement
  source 1..20: mol_type = other DNA
cgcgctactctctctttctg

SEQ ID NO: 10576 - DNA, 20 bp, synthetic construct
  misc_feature 1..20: note = Target B2M Sequence complement
  source 1..20: mol_type = other DNA
gcgctactctctctttctgg

SEQ ID NO: 10577 - DNA, 20 bp, synthetic construct
  misc_feature 1..20: note = Target B2M Sequence complement
  source 1..20: mol_type = other DNA
cgctactctctctttctggc

SEQ ID NO: 10578 - DNA, 20 bp, synthetic construct
  misc_feature 1..20: note = Target B2M Sequence complement
  source 1..20: mol_type = other DNA
gctactctctctttctggcc

SEQ ID NO: 10579 - DNA, 20 bp, synthetic construct
  misc_feature 1..20: note = Target B2M Sequence complement
  source 1..20: mol_type = other DNA
ctactctctctttctggcct

SEQ ID NO: 10580 - DNA, 20 bp, synthetic construct
  misc_feature 1..20: note = Target B2M Sequence complement
  source 1..20: mol_type = other DNA
tactctctctttctggcctg

SEQ ID NO: 10581 - DNA, 20 bp, synthetic construct
  misc_feature 1..20: note = Target B2M Sequence complement
  source 1..20: mol_type = other DNA
ctctctctttctggcctgga

SEQ ID NO: 10582 - DNA, 20 bp, synthetic construct
  misc_feature 1..20: note = Target B2M Sequence complement
  source 1..20: mol_type = other DNA
tctctctttctggcctggag

SEQ ID NO: 10583 - DNA, 20 bp, synthetic construct
  misc_feature 1..20: note = Target B2M Sequence complement
  source 1..20: mol_type = other DNA
tctttctggcctggaggcta

SEQ ID NO: 10584 - DNA, 20 bp, synthetic construct
  misc_feature 1..20: note = Target B2M Sequence complement
  source 1..20: mol_type = other DNA
ctttctggcctggaggctat

SEQ ID NO: 10585 - DNA, 20 bp, synthetic construct
  misc_feature 1..20: note = Target B2M Sequence complement
  source 1..20: mol_type = other DNA
tttctggcctggaggctatc

SEQ ID NO: 10586 - DNA, 20 bp, synthetic construct
  misc_feature 1..20: note = Target B2M Sequence complement
  source 1..20: mol_type = other DNA
tggaggctatccagcgtact

SEQ ID NO: 10587 - DNA, 20 bp, synthetic construct
  misc_feature 1..20: note = Target B2M Sequence complement
  source 1..20: mol_type = other DNA
aggctatccagcgtactcca

SEQ ID NO: 10588 - DNA, 20 bp, synthetic construct
  misc_feature 1..20: note = Target B2M Sequence complement
  source 1..20: mol_type = other DNA
ggctatccagcgtactccaa

SEQ ID NO: 10589 - DNA, 20 bp, synthetic construct
  misc_feature 1..20: note = Target B2M Sequence complement
  source 1..20: mol_type = other DNA
gctatccagcgtactccaaa

SEQ ID NO: 10590 - DNA, 20 bp, synthetic construct
  misc_feature 1..20: note = Target B2M Sequence complement
  source 1..20: mol_type = other DNA
ctatccagcgtactccaaag

SEQ ID NO: 10591 - DNA, 20 bp, synthetic construct
  misc_feature 1..20: note = Target B2M Sequence complement
  source 1..20: mol_type = other DNA
tatccagcgtactccaaaga

SEQ ID NO: 10592 - DNA, 20 bp, synthetic construct
  misc_feature 1..20: note = Target B2M Sequence complement
  source 1..20: mol_type = other DNA
atccagcgtactccaaagat

SEQ ID NO: 10593 - DNA, 20 bp, synthetic construct
  misc_feature 1..20: note = Target B2M Sequence complement
  source 1..20: mol_type = other DNA
tccagcgtactccaaagatt

SEQ ID NO: 10594 - DNA, 20 bp, synthetic construct
  misc_feature 1..20: note = Target B2M Sequence complement
  source 1..20: mol_type = other DNA
ccagcgtactccaaagattc

SEQ ID NO: 10595 - DNA, 20 bp, synthetic construct
  misc_feature 1..20: note = Target B2M Sequence complement
  source 1..20: mol_type = other DNA
cagcgtactccaaagattca

SEQ ID NO: 10596 - DNA, 20 bp, synthetic construct
  misc_feature 1..20: note = Target B2M Sequence complement
  source 1..20: mol_type = other DNA
agcgtactccaaagattcag

SEQ ID NO: 10597 - DNA, 20 bp, synthetic construct
  misc_feature 1..20: note = Target B2M Sequence complement
  source 1..20: mol_type = other DNA
gcgtactccaaagattcagg

SEQ ID NO: 10598 - DNA, 20 bp, synthetic construct
  misc_feature 1..20: note = Target B2M Sequence complement
  source 1..20: mol_type = other DNA
cgtactccaaagattcaggt

SEQ ID NO: 10599 - DNA, 20 bp, synthetic construct
  misc_feature 1..20: note = Target B2M Sequence complement
  source 1..20: mol_type = other DNA
gtactccaaagattcaggtt

SEQ ID NO: 10600 - DNA, 20 bp, synthetic construct
  misc_feature 1..20: note = Target B2M Sequence complement
  source 1..20: mol_type = other DNA
tactccaaagattcaggttt

SEQ ID NO: 10601 - DNA, 20 bp, synthetic construct
  misc_feature 1..20: note = Target B2M Sequence complement
  source 1..20: mol_type = other DNA
actccaaagattcaggttta

SEQ ID NO: 10602 - DNA, 20 bp, synthetic construct
  misc_feature 1..20: note = Target B2M Sequence complement
  source 1..20: mol_type = other DNA
ctccaaagattcaggtttac

SEQ ID NO: 10603 - DNA, 20 bp, synthetic construct
  misc_feature 1..20: note = Target B2M Sequence complement
  source 1..20: mol_type = other DNA
tccaaagattcaggtttact

SEQ ID NO: 10604 - DNA, 20 bp, synthetic construct
  misc_feature 1..20: note = Target B2M Sequence complement
  source 1..20: mol_type = other DNA
ccaaagattcaggtttactc

SEQ ID NO: 10605 - DNA, 20 bp, synthetic construct
  misc_feature 1..20: note = Target B2M Sequence complement
  source 1..20: mol_type = other DNA
caaagattcaggtttactca

SEQ ID NO: 10606 - DNA, 20 bp, synthetic construct
  misc_feature 1..20: note = Target B2M Sequence complement
  source 1..20: mol_type = other DNA
aaagattcaggtttactcac

SEQ ID NO: 10607 - DNA, 20 bp, synthetic construct
  misc_feature 1..20: note = Target B2M Sequence complement
  source 1..20: mol_type = other DNA
aagattcaggtttactcacg

SEQ ID NO: 10608 - DNA, 20 bp, synthetic construct
  misc_feature 1..20: note = Target B2M Sequence complement
  source 1..20: mol_type = other DNA
agattcaggtttactcacgt

SEQ ID NO: 10609 - DNA, 20 bp, synthetic construct
  misc_feature 1..20: note = Target B2M Sequence complement
  source 1..20: mol_type = other DNA
gattcaggtttactcacgtc

SEQ ID NO: 10610 - DNA, 20 bp, synthetic construct
  misc_feature 1..20: note = Target B2M Sequence complement
  source 1..20: mol_type = other DNA
attcaggtttactcacgtca

SEQ ID NO: 10611 - DNA, 20 bp, synthetic construct
  misc_feature 1..20: note = Target B2M Sequence complement
  source 1..20: mol_type = other DNA
ttcaggtttactcacgtcat

SEQ ID NO: 10612 - DNA, 20 bp, synthetic construct
  misc_feature 1..20: note = Target B2M Sequence complement
  source 1..20: mol_type = other DNA
tcaggtttactcacgtcatc

SEQ ID NO: 10613 - DNA, 20 bp, synthetic construct
  misc_feature 1..20: note = Target B2M Sequence complement
  source 1..20: mol_type = other DNA
caggtttactcacgtcatcc

SEQ ID NO: 10614 - DNA, 20 bp, synthetic construct
  misc_feature 1..20: note = Target B2M Sequence complement
  source 1..20: mol_type = other DNA
aggtttactcacgtcatcca

SEQ ID NO: 10615 - DNA, 20 bp, synthetic construct
  misc_feature 1..20: note = Target B2M Sequence complement
  source 1..20: mol_type = other DNA
ggtttactcacgtcatccag

SEQ ID NO: 10616 - DNA, 20 bp, synthetic construct
  misc_feature 1..20: note = Target B2M Sequence complement
  source 1..20: mol_type = other DNA
gtttactcacgtcatccagc

SEQ ID NO: 10617 - DNA, 20 bp, synthetic construct
  misc_feature 1..20: note = Target B2M Sequence complement
  source 1..20: mol_type = other DNA
tttactcacgtcatccagca

SEQ ID NO: 10618 - DNA, 20 bp, synthetic construct
  misc_feature 1..20: note = Target B2M Sequence complement
  source 1..20: mol_type = other DNA
ttactcacgtcatccagcag

SEQ ID NO: 10619 - DNA, 20 bp, synthetic construct
  misc_feature 1..20: note = Target B2M Sequence complement
  source 1..20: mol_type = other DNA
tactcacgtcatccagcaga

SEQ ID NO: 10620 - DNA, 20 bp, synthetic construct
  misc_feature 1..20: note = Target B2M Sequence complement
  source 1..20: mol_type = other DNA
actcacgtcatccagcagag

SEQ ID NO: 10621 - DNA, 20 bp, synthetic construct
  misc_feature 1..20: note = Target B2M Sequence complement
  source 1..20: mol_type = other DNA
ctcacgtcatccagcagaga

SEQ ID NO: 10622 - DNA, 20 bp, synthetic construct
  misc_feature 1..20: note = Target B2M Sequence complement
  source 1..20: mol_type = other DNA
tcacgtcatccagcagagaa

SEQ ID NO: 10623 - DNA, 20 bp, synthetic construct
  misc_feature 1..20: note = Target B2M Sequence complement
  source 1..20: mol_type = other DNA
cacgtcatccagcagagaat

SEQ ID NO: 10624 - DNA, 20 bp, synthetic construct
  misc_feature 1..20: note = Target B2M Sequence complement
  source 1..20: mol_type = other DNA
acgtcatccagcagagaatg

SEQ ID NO: 10625 - DNA, 20 bp, synthetic construct
  misc_feature 1..20: note = Target B2M Sequence complement
  source 1..20: mol_type = other DNA
cgtcatccagcagagaatgg

SEQ ID NO: 10626 - DNA, 20 bp, synthetic construct
  misc_feature 1..20: note = Target B2M Sequence complement
  source 1..20: mol_type = other DNA
gtcatccagcagagaatgga

SEQ ID NO: 10627 - DNA, 20 bp, synthetic construct
  misc_feature 1..20: note = Target B2M Sequence complement
  source 1..20: mol_type = other DNA
tcatccagcagagaatggaa

SEQ ID NO: 10628 - DNA, 20 bp, synthetic construct
  misc_feature 1..20: note = Target B2M Sequence complement
  source 1..20: mol_type = other DNA
catccagcagagaatggaaa

SEQ ID NO: 10629 - DNA, 20 bp, synthetic construct
  misc_feature 1..20: note = Target B2M Sequence complement
  source 1..20: mol_type = other DNA
atccagcagagaatggaaag

SEQ ID NO: 10630 - DNA, 20 bp, synthetic construct
  misc_feature 1..20: note = Target B2M Sequence complement
  source 1..20: mol_type = other DNA
tccagcagagaatggaaagt

SEQ ID NO: 10631 - DNA, 20 bp, synthetic construct
  misc_feature 1..20: note = Target B2M Sequence complement
  source 1..20: mol_type = other DNA
ccagcagagaatggaaagtc

SEQ ID NO: 10632 - DNA, 20 bp, synthetic construct
  misc_feature 1..20: note = Target B2M Sequence complement
  source 1..20: mol_type = other DNA
cagcagagaatggaaagtca

SEQ ID NO: 10633 - DNA, 20 bp, synthetic construct
  misc_feature 1..20: note = Target B2M Sequence complement
  source 1..20: mol_type = other DNA
agcagagaatggaaagtcaa

SEQ ID NO: 10634 - DNA, 20 bp, synthetic construct
  misc_feature 1..20: note = Target B2M Sequence complement
  source 1..20: mol_type = other DNA
gcagagaatggaaagtcaaa

SEQ ID NO: 10635 - DNA, 20 bp, synthetic construct
  misc_feature 1..20: note = Target B2M Sequence complement
  source 1..20: mol_type = other DNA
cagagaatggaaagtcaaat

SEQ ID NO: 10636 - DNA, 20 bp, synthetic construct
  misc_feature 1..20: note = Target B2M Sequence complement
  source 1..20: mol_type = other DNA
agagaatggaaagtcaaatt

SEQ ID NO: 10637 - DNA, 20 bp, synthetic construct
  misc_feature 1..20: note = Target B2M Sequence complement
  source 1..20: mol_type = other DNA
gagaatggaaagtcaaattt

SEQ ID NO: 10638 - DNA, 20 bp, synthetic construct
  misc_feature 1..20: note = Target B2M Sequence complement
  source 1..20: mol_type = other DNA
agaatggaaagtcaaatttc

SEQ ID NO: 10639 - DNA, 20 bp, synthetic construct
  misc_feature 1..20: note = Target B2M Sequence complement
  source 1..20: mol_type = other DNA
gaatggaaagtcaaatttcc

SEQ ID NO: 10640 - DNA, 20 bp, synthetic construct
  misc_feature 1..20: note = Target B2M Sequence complement
  source 1..20: mol_type = other DNA
aatggaaagtcaaatttcct

SEQ ID NO: 10641 - DNA, 20 bp, synthetic construct
  misc_feature 1..20: note = Target B2M Sequence complement
  source 1..20: mol_type = other DNA
atggaaagtcaaatttcctg

SEQ ID NO: 10642 - DNA, 20 bp, synthetic construct
  misc_feature 1..20: note = Target B2M Sequence complement
  source 1..20: mol_type = other DNA
tggaaagtcaaatttcctga

SEQ ID NO: 10643 - DNA, 20 bp, synthetic construct
  misc_feature 1..20: note = Target B2M Sequence complement
  source 1..20: mol_type = other DNA
ggaaagtcaaatttcctgaa

SEQ ID NO: 10644 - DNA, 20 bp, synthetic construct
  misc_feature 1..20: note = Target B2M Sequence complement
  source 1..20: mol_type = other DNA
gaaagtcaaatttcctgaat

SEQ ID NO: 10645 - DNA, 20 bp, synthetic construct
  misc_feature 1..20: note = Target B2M Sequence complement
  source 1..20: mol_type = other DNA
aaagtcaaatttcctgaatt

SEQ ID NO: 10646 - DNA, 20 bp, synthetic construct
  misc_feature 1..20: note = Target B2M Sequence complement
  source 1..20: mol_type = other DNA
aagtcaaatttcctgaattg

SEQ ID NO: 10647 - DNA, 20 bp, synthetic construct
  misc_feature 1..20: note = Target B2M Sequence complement
  source 1..20: mol_type = other DNA
agtcaaatttcctgaattgc

SEQ ID NO: 10648 - DNA, 20 bp, synthetic construct
  misc_feature 1..20: note = Target B2M Sequence complement
  source 1..20: mol_type = other DNA
gtcaaatttcctgaattgct

SEQ ID NO: 10649 - DNA, 20 bp, synthetic construct
  misc_feature 1..20: note = Target B2M Sequence complement
  source 1..20: mol_type = other DNA
tcaaatttcctgaattgcta

SEQ ID NO: 10650 - DNA, 20 bp, synthetic construct
  misc_feature 1..20: note = Target B2M Sequence complement
  source 1..20: mol_type = other DNA
caaatttcctgaattgctat

SEQ ID NO: 10651 - DNA, 20 bp, synthetic construct
  misc_feature 1..20: note = Target B2M Sequence complement
  source 1..20: mol_type = other DNA
aaatttcctgaattgctatg

SEQ ID NO: 10652 - DNA, 20 bp, synthetic construct
  misc_feature 1..20: note = Target B2M Sequence complement
  source 1..20: mol_type = other DNA
aatttcctgaattgctatgt

SEQ ID NO: 10653 - DNA, 20 bp, synthetic construct
  misc_feature 1..20: note = Target B2M Sequence complement
  source 1..20: mol_type = other DNA
atttcctgaattgctatgtg

SEQ ID NO: 10654 - DNA, 20 bp, synthetic construct
  misc_feature 1..20: note = Target B2M Sequence complement
  source 1..20: mol_type = other DNA
tttcctgaattgctatgtgt

SEQ ID NO: 10655 - DNA, 20 bp, synthetic construct
  misc_feature 1..20: note = Target B2M Sequence complement
  source 1..20: mol_type = other DNA
ttcctgaattgctatgtgtc

SEQ ID NO: 10656 - DNA, 20 bp, synthetic construct
  misc_feature 1..20: note = Target B2M Sequence complement
  source 1..20: mol_type = other DNA
tcctgaattgctatgtgtct

SEQ ID NO: 10657 - DNA, 20 bp, synthetic construct
  misc_feature 1..20: note = Target B2M Sequence complement
  source 1..20: mol_type = other DNA
cctgaattgctatgtgtctg

SEQ ID NO: 10658 - DNA, 20 bp, synthetic construct
  misc_feature 1..20: note = Target B2M Sequence complement
  source 1..20: mol_type = other DNA
ctgaattgctatgtgtctgg

SEQ ID NO: 10659 - DNA, 20 bp, synthetic construct
  misc_feature 1..20: note = Target B2M Sequence complement
  source 1..20: mol_type = other DNA
tgaattgctatgtgtctggg

SEQ ID NO: 10660 - DNA, 20 bp, synthetic construct
  misc_feature 1..20: note = Target B2M Sequence complement
  source 1..20: mol_type = other DNA
gaattgctatgtgtctgggt

SEQ ID NO: 10661 - DNA, 20 bp, synthetic construct
  misc_feature 1..20: note = Target B2M Sequence complement
  source 1..20: mol_type = other DNA
aattgctatgtgtctgggtt

SEQ ID NO: 10662 - DNA, 20 bp, synthetic construct
  misc_feature 1..20: note = Target B2M Sequence complement
  source 1..20: mol_type = other DNA
attgctatgtgtctgggttt

SEQ ID NO: 10663 - DNA, 20 bp, synthetic construct
  misc_feature 1..20: note = Target B2M Sequence complement
  source 1..20: mol_type = other DNA
ttgctatgtgtctgggtttc

SEQ ID NO: 10664 - DNA, 20 bp, synthetic construct
  misc_feature 1..20: note = Target B2M Sequence complement
  source 1..20: mol_type = other DNA
tgctatgtgtctgggtttca

SEQ ID NO: 10665 - DNA, 20 bp, synthetic construct
  misc_feature 1..20: note = Target B2M Sequence complement
  source 1..20: mol_type = other DNA
gctatgtgtctgggtttcat

SEQ ID NO: 10666 - DNA, 20 bp, synthetic construct
  misc_feature 1..20: note = Target B2M Sequence complement
  source 1..20: mol_type = other DNA
ctatgtgtctgggtttcatc

SEQ ID NO: 10667 - DNA, 20 bp, synthetic construct
  misc_feature 1..20: note = Target B2M Sequence complement
  source 1..20: mol_type = other DNA
tatgtgtctgggtttcatcc

SEQ ID NO: 10668 - DNA, 20 bp, synthetic construct
  misc_feature 1..20: note = Target B2M Sequence complement
  source 1..20: mol_type = other DNA
atgtgtctgggtttcatcca

SEQ ID NO: 10669 - DNA, 20 bp, synthetic construct
  misc_feature 1..20: note = Target B2M Sequence complement
  source 1..20: mol_type = other DNA
tgtgtctgggtttcatccat

SEQ ID NO: 10670 - DNA, 20 bp, synthetic construct
  misc_feature 1..20: note = Target B2M Sequence complement
  source 1..20: mol_type = other DNA
gtgtctgggtttcatccatc

SEQ ID NO: 10671 - DNA, 20 bp, synthetic construct
  misc_feature 1..20: note = Target B2M Sequence complement
  source 1..20: mol_type = other DNA
tgtctgggtttcatccatcc

SEQ ID NO: 10672 - DNA, 20 bp, synthetic construct
  misc_feature 1..20: note = Target B2M Sequence complement
  source 1..20: mol_type = other DNA
gtctgggtttcatccatccg

SEQ ID NO: 10673 - DNA, 20 bp, synthetic construct
  misc_feature 1..20: note = Target B2M Sequence complement
  source 1..20: mol_type = other DNA
tctgggtttcatccatccga

SEQ ID NO: 10674 - DNA, 20 bp, synthetic construct
  misc_feature 1..20: note = Target B2M Sequence complement
  source 1..20: mol_type = other DNA
ctgggtttcatccatccgac

SEQ ID NO: 10675 - DNA, 20 bp, synthetic construct
  misc_feature 1..20: note = Target B2M Sequence complement
  source 1..20: mol_type = other DNA
tgggtttcatccatccgaca

SEQ ID NO: 10676 - DNA, 20 bp, synthetic construct
  misc_feature 1..20: note = Target B2M Sequence complement
  source 1..20: mol_type = other DNA
gggtttcatccatccgacat

SEQ ID NO: 10677 - DNA, 20 bp, synthetic construct
  misc_feature 1..20: note = Target B2M Sequence complement
  source 1..20: mol_type = other DNA
ggtttcatccatccgacatt

SEQ ID NO: 10678 - DNA, 20 bp, synthetic construct
  misc_feature 1..20: note = Target B2M Sequence complement
  source 1..20: mol_type = other DNA
gtttcatccatccgacattg

SEQ ID NO: 10679 - DNA, 20 bp, synthetic construct
  misc_feature 1..20: note = Target B2M Sequence complement
  source 1..20: mol_type = other DNA
tttcatccatccgacattga

SEQ ID NO: 10680 - DNA, 20 bp, synthetic construct
  misc_feature 1..20: note = Target B2M Sequence complement
  source 1..20: mol_type = other DNA
ttcatccatccgacattgaa

SEQ ID NO: 10681 - DNA, 20 bp, synthetic construct
  misc_feature 1..20: note = Target B2M Sequence complement
  source 1..20: mol_type = other DNA
tcatccatccgacattgaag

SEQ ID NO: 10682 - DNA, 20 bp, synthetic construct
  misc_feature 1..20: note = Target B2M Sequence complement
  source 1..20: mol_type = other DNA
catccatccgacattgaagt

SEQ ID NO: 10683 - DNA, 20 bp, synthetic construct
  misc_feature 1..20: note = Target B2M Sequence complement
  source 1..20: mol_type = other DNA
atccatccgacattgaagtt

SEQ ID NO: 10684 - DNA, 20 bp, synthetic construct
  misc_feature 1..20: note = Target B2M Sequence complement
  source 1..20: mol_type = other DNA
tccatccgacattgaagttg

SEQ ID NO: 10685 - DNA, 20 bp, synthetic construct
  misc_feature 1..20: note = Target B2M Sequence complement
  source 1..20: mol_type = other DNA
ccatccgacattgaagttga

SEQ ID NO: 10686 - DNA, 20 bp, synthetic construct
  misc_feature 1..20: note = Target B2M Sequence complement
  source 1..20: mol_type = other DNA
catccgacattgaagttgac

SEQ ID NO: 10687 - DNA, 20 bp, synthetic construct
  misc_feature 1..20: note = Target B2M Sequence complement
  source 1..20: mol_type = other DNA
atccgacattgaagttgact

SEQ ID NO: 10688 - DNA, 20 bp, synthetic construct
  misc_feature 1..20: note = Target B2M Sequence complement
  source 1..20: mol_type = other DNA
tccgacattgaagttgactt

SEQ ID NO: 10689 - DNA, 20 bp, synthetic construct
  misc_feature 1..20: note = Target B2M Sequence complement
  source 1..20: mol_type = other DNA
ccgacattgaagttgactta

SEQ ID NO: 10690 - DNA, 20 bp, synthetic construct
  misc_feature 1..20: note = Target B2M Sequence complement
  source 1..20: mol_type = other DNA
cgacattgaagttgacttac

SEQ ID NO: 10691 - DNA, 20 bp, synthetic construct
  misc_feature 1..20: note = Target B2M Sequence complement
  source 1..20: mol_type = other DNA
gacattgaagttgacttact

SEQ ID NO: 10692 - DNA, 20 bp, synthetic construct
  misc_feature 1..20: note = Target B2M Sequence complement
  source 1..20: mol_type = other DNA
acattgaagttgacttactg

SEQ ID NO: 10693 - DNA, 20 bp, synthetic construct
  misc_feature 1..20: note = Target B2M Sequence complement
  source 1..20: mol_type = other DNA
cattgaagttgacttactga

SEQ ID NO: 10694 - DNA, 20 bp, synthetic construct
  misc_feature 1..20: note = Target B2M Sequence complement
  source 1..20: mol_type = other DNA
attgaagttgacttactgaa

SEQ ID NO: 10695 - DNA, 20 bp, synthetic construct
  misc_feature 1..20: note = Target B2M Sequence complement
  source 1..20: mol_type = other DNA
ttgaagttgacttactgaag

SEQ ID NO: 10696 - DNA, 20 bp, synthetic construct
  misc_feature 1..20: note = Target B2M Sequence complement
  source 1..20: mol_type = other DNA
tgaagttgacttactgaaga

SEQ ID NO: 10697 - DNA, 20 bp, synthetic construct
  misc_feature 1..20: note = Target B2M Sequence complement
  source 1..20: mol_type = other DNA
aagttgacttactgaagaat

SEQ ID NO: 10698 - DNA, 20 bp, synthetic construct
  misc_feature 1..20: note = Target B2M Sequence complement
  source 1..20: mol_type = other DNA
agttgacttactgaagaatg

SEQ ID NO: 10699 - DNA, 20 bp, synthetic construct
  misc_feature 1..20: note = Target B2M Sequence complement
  source 1..20: mol_type = other DNA
gttgacttactgaagaatgg

SEQ ID NO: 10700 - DNA, 20 bp, synthetic construct
  misc_feature 1..20: note = Target B2M Sequence complement
  source 1..20: mol_type = other DNA
ttgacttactgaagaatgga

SEQ ID NO: 10701 - DNA, 20 bp, synthetic construct
  misc_feature 1..20: note = Target B2M Sequence complement
  source 1..20: mol_type = other DNA
tgacttactgaagaatggag

SEQ ID NO: 10702 - DNA, 20 bp, synthetic construct
  misc_feature 1..20: note = Target B2M Sequence complement
  source 1..20: mol_type = other DNA
gacttactgaagaatggaga

SEQ ID NO: 10703 - DNA, 20 bp, synthetic construct
  misc_feature 1..20: note = Target B2M Sequence complement
  source 1..20: mol_type = other DNA
acttactgaagaatggagag

SEQ ID NO: 10704 - DNA, 20 bp, synthetic construct
  misc_feature 1..20: note = Target B2M Sequence complement
  source 1..20: mol_type = other DNA
cttactgaagaatggagaga

SEQ ID NO: 10705 - DNA, 20 bp, synthetic construct
  misc_feature 1..20: note = Target B2M Sequence complement
  source 1..20: mol_type = other DNA
ttactgaagaatggagagag

SEQ ID NO: 10706 - DNA, 20 bp, synthetic construct
  misc_feature 1..20: note = Target B2M Sequence complement
  source 1..20: mol_type = other DNA
tactgaagaatggagagaga

SEQ ID NO: 10707 - DNA, 20 bp, synthetic construct
  misc_feature 1..20: note = Target B2M Sequence complement
  source 1..20: mol_type = other DNA
actgaagaatggagagagaa

SEQ ID NO: 10708 - DNA, 20 bp, synthetic construct
  misc_feature 1..20: note = Target B2M Sequence complement
  source 1..20: mol_type = other DNA
ctgaagaatggagagagaat

SEQ ID NO: 10709 - DNA, 20 bp, synthetic construct
  misc_feature 1..20: note = Target B2M Sequence complement
  source 1..20: mol_type = other DNA
tgaagaatggagagagaatt

SEQ ID NO: 10710 - DNA, 20 bp, synthetic construct
  misc_feature 1..20: note = Target B2M Sequence complement
  source 1..20: mol_type = other DNA
gaagaatggagagagaattg

SEQ ID NO: 10711 - DNA, 20 bp, synthetic construct
  misc_feature 1..20: note = Target B2M Sequence complement
  source 1..20: mol_type = other DNA
aagaatggagagagaattga

SEQ ID NO: 10712 - DNA, 20 bp, synthetic construct
  misc_feature 1..20: note = Target B2M Sequence complement
  source 1..20: mol_type = other DNA
agaatggagagagaattgaa

SEQ ID NO: 10713 - DNA, 20 bp, synthetic construct
  misc_feature 1..20: note = Target B2M Sequence complement
  source 1..20: mol_type = other DNA
gaatggagagagaattgaaa

SEQ ID NO: 10714 - DNA, 20 bp, synthetic construct
  misc_feature 1..20: note = Target B2M Sequence complement
  source 1..20: mol_type = other DNA
aaagtggagcattcagactt

SEQ ID NO: 10715 - DNA, 20 bp, synthetic construct
  misc_feature 1..20: note = Target B2M Sequence complement
  source 1..20: mol_type = other DNA
aagtggagcattcagacttg

SEQ ID NO: 10716 - DNA, 20 bp, synthetic construct
  misc_feature 1..20: note = Target B2M Sequence complement
  source 1..20: mol_type = other DNA
agtggagcattcagacttgt

SEQ ID NO: 10717 - DNA, 20 bp, synthetic construct
  misc_feature 1..20: note = Target B2M Sequence complement
  source 1..20: mol_type = other DNA
gtggagcattcagacttgtc

SEQ ID NO: 10718 - DNA, 20 bp, synthetic construct
  misc_feature 1..20: note = Target B2M Sequence complement
  source 1..20: mol_type = other DNA
tggagcattcagacttgtct

SEQ ID NO: 10719 - DNA, 20 bp, synthetic construct
  misc_feature 1..20: note = Target B2M Sequence complement
  source 1..20: mol_type = other DNA
ggagcattcagacttgtctt

SEQ ID NO: 10720 - DNA, 20 bp, synthetic construct
  misc_feature 1..20: note = Target B2M Sequence complement
  source 1..20: mol_type = other DNA
gagcattcagacttgtcttt

SEQ ID NO: 10721 - DNA, 20 bp, synthetic construct
  misc_feature 1..20: note = Target B2M Sequence complement
  source 1..20: mol_type = other DNA
agcattcagacttgtctttc

SEQ ID NO: 10722 - DNA, 20 bp, synthetic construct
  misc_feature 1..20: note = Target B2M Sequence complement
  source 1..20: mol_type = other DNA
gcattcagacttgtctttca

SEQ ID NO: 10723 - DNA, 20 bp, synthetic construct
  misc_feature 1..20: note = Target B2M Sequence complement
  source 1..20: mol_type = other DNA
cattcagacttgtctttcag

SEQ ID NO: 10724 - DNA, 20 bp, synthetic construct
  misc_feature 1..20: note = Target B2M Sequence complement
  source 1..20: mol_type = other DNA
attcagacttgtctttcagc

SEQ ID NO: 10725 - DNA, 20 bp, synthetic construct
  misc_feature 1..20: note = Target B2M Sequence complement
  source 1..20: mol_type = other DNA
ttcagacttgtctttcagca

SEQ ID NO: 10726 - DNA, 20 bp, synthetic construct
  misc_feature 1..20: note = Target B2M Sequence complement
  source 1..20: mol_type = other DNA
tcagacttgtctttcagcaa

SEQ ID NO: 10727 - DNA, 20 bp, synthetic construct
  misc_feature 1..20: note = Target B2M Sequence complement
  source 1..20: mol_type = other DNA
cagacttgtctttcagcaag

SEQ ID NO: 10728 - DNA, 20 bp, synthetic construct
  misc_feature 1..20: note = Target B2M Sequence complement
  source 1..20: mol_type = other DNA
agacttgtctttcagcaagg

SEQ ID NO: 10729 - DNA, 20 bp, synthetic construct
  misc_feature 1..20: note = Target B2M Sequence complement
  source 1..20: mol_type = other DNA
gacttgtctttcagcaagga

SEQ ID NO: 10730 - DNA, 20 bp, synthetic construct
  misc_feature 1..20: note = Target B2M Sequence complement
  source 1..20: mol_type = other DNA
cttgtctttcagcaaggact

SEQ ID NO: 10731 - DNA, 20 bp, synthetic construct
  misc_feature 1..20: note = Target B2M Sequence complement
  source 1..20: mol_type = other DNA
ttgtctttcagcaaggactg

SEQ ID NO: 10732 - DNA, 20 bp, synthetic construct
  misc_feature 1..20: note = Target B2M Sequence complement
  source 1..20: mol_type = other DNA
tgtctttcagcaaggactgg

SEQ ID NO: 10733 - DNA, 20 bp, synthetic construct
  misc_feature 1..20: note = Target B2M Sequence complement
  source 1..20: mol_type = other DNA
gtctttcagcaaggactggt

SEQ ID NO: 10734 - DNA, 20 bp, synthetic construct
  misc_feature 1..20: note = Target B2M Sequence complement
  source 1..20: mol_type = other DNA
tctttcagcaaggactggtc

SEQ ID NO: 10735 - DNA, 20 bp, synthetic construct
  misc_feature 1..20: note = Target B2M Sequence complement
  source 1..20: mol_type = other DNA
ctttcagcaaggactggtct

SEQ ID NO: 10736 - DNA, 20 bp, synthetic construct
  misc_feature 1..20: note = Target B2M Sequence complement
  source 1..20: mol_type = other DNA
tttcagcaaggactggtctt

SEQ ID NO: 10737 - DNA, 20 bp, synthetic construct
  misc_feature 1..20: note = Target B2M Sequence complement
  source 1..20: mol_type = other DNA
ttcagcaaggactggtcttt

SEQ ID NO: 10738 - DNA, 20 bp, synthetic construct
  misc_feature 1..20: note = Target B2M Sequence complement
  source 1..20: mol_type = other DNA
tcagcaaggactggtctttc

SEQ ID NO: 10739 - DNA, 20 bp, synthetic construct
  misc_feature 1..20: note = Target B2M Sequence complement
  source 1..20: mol_type = other DNA
cagcaaggactggtctttct

SEQ ID NO: 10740 - DNA, 20 bp, synthetic construct
  misc_feature 1..20: note = Target B2M Sequence complement
  source 1..20: mol_type = other DNA
agcaaggactggtctttcta

SEQ ID NO: 10741 - DNA, 20 bp, synthetic construct
  misc_feature 1..20: note = Target B2M Sequence complement
  source 1..20: mol_type = other DNA
gcaaggactggtctttctat

SEQ ID NO: 10742 - DNA, 20 bp, synthetic construct
  misc_feature 1..20: note = Target B2M Sequence complement
  source 1..20: mol_type = other DNA
caaggactggtctttctatc

SEQ ID NO: 10743 - DNA, 20 bp, synthetic construct
  misc_feature 1..20: note = Target B2M Sequence complement
  source 1..20: mol_type = other DNA
aaggactggtctttctatct

SEQ ID NO: 10744 - DNA, 20 bp, synthetic construct
  misc_feature 1..20: note = Target B2M Sequence complement
  source 1..20: mol_type = other DNA
aggactggtctttctatctc

SEQ ID NO: 10745 - DNA, 20 bp, synthetic construct
  misc_feature 1..20: note = Target B2M Sequence complement
  source 1..20: mol_type = other DNA
ggactggtctttctatctct

SEQ ID NO: 10746 - DNA, 20 bp, synthetic construct
  misc_feature 1..20: note = Target B2M Sequence complement
  source 1..20: mol_type = other DNA
gactggtctttctatctctt

SEQ ID NO: 10747 - DNA, 20 bp, synthetic construct
  misc_feature 1..20: note = Target B2M Sequence complement
  source 1..20: mol_type = other DNA
actggtctttctatctcttg

SEQ ID NO: 10748 - DNA, 20 bp, synthetic construct
  misc_feature 1..20: note = Target B2M Sequence complement
  source 1..20: mol_type = other DNA
ctggtctttctatctcttgt

SEQ ID NO: 10749 - DNA, 20 bp, synthetic construct
  misc_feature 1..20: note = Target B2M Sequence complement
  source 1..20: mol_type = other DNA
tggtctttctatctcttgta

SEQ ID NO: 10750 - DNA, 20 bp, synthetic construct
  misc_feature 1..20: note = Target B2M Sequence complement
  source 1..20: mol_type = other DNA
ggtctttctatctcttgtac

SEQ ID NO: 10751 - DNA, 20 bp, synthetic construct
  misc_feature 1..20: note = Target B2M Sequence complement
  source 1..20: mol_type = other DNA
gtctttctatctcttgtact

SEQ ID NO: 10752 - DNA, 20 bp, synthetic construct
  misc_feature 1..20: note = Target B2M Sequence complement
  source 1..20: mol_type = other DNA
tctttctatctcttgtacta

SEQ ID NO: 10753 - DNA, 20 bp, synthetic construct
  misc_feature 1..20: note = Target B2M Sequence complement
  source 1..20: mol_type = other DNA
ctttctatctcttgtactac

SEQ ID NO: 10754 - DNA, 20 bp, synthetic construct
  misc_feature 1..20: note = Target B2M Sequence complement
  source 1..20: mol_type = other DNA
tttctatctcttgtactaca

SEQ ID NO: 10755 - DNA, 20 bp, synthetic construct
  misc_feature 1..20: note = Target B2M Sequence complement
  source 1..20: mol_type = other DNA
ttctatctcttgtactacac

SEQ ID NO: 10756 - DNA, 20 bp, synthetic construct
  misc_feature 1..20: note = Target B2M Sequence complement
  source 1..20: mol_type = other DNA
tctatctcttgtactacact

SEQ ID NO: 10757 - DNA, 20 bp, synthetic construct
  misc_feature 1..20: note = Target B2M Sequence complement
  source 1..20: mol_type = other DNA
ctatctcttgtactacactg

SEQ ID NO: 10758 - DNA, 20 bp, synthetic construct
  misc_feature 1..20: note = Target B2M Sequence complement
  source 1..20: mol_type = other DNA
tatctcttgtactacactga

SEQ ID NO: 10759 - DNA, 20 bp, synthetic construct
  misc_feature 1..20: note = Target B2M Sequence complement
  source 1..20: mol_type = other DNA
atctcttgtactacactgaa

SEQ ID NO: 10760 - DNA, 20 bp, synthetic construct
  misc_feature 1..20: note = Target B2M Sequence complement
  source 1..20: mol_type = other DNA
tctcttgtactacactgaat

SEQ ID NO: 10761 - DNA, 20 bp, synthetic construct
  misc_feature 1..20: note = Target B2M Sequence complement
  source 1..20: mol_type = other DNA
ctcttgtactacactgaatt

SEQ ID NO: 10762 - DNA, 20 bp, synthetic construct
  misc_feature 1..20: note = Target B2M Sequence complement
  source 1..20: mol_type = other DNA
tcttgtactacactgaattc

SEQ ID NO: 10763 - DNA, 20 bp, synthetic construct
  misc_feature 1..20: note = Target B2M Sequence complement
  source 1..20: mol_type = other DNA
cttgtactacactgaattca

SEQ ID NO: 10764 - DNA, 20 bp, synthetic construct
  misc_feature 1..20: note = Target B2M Sequence complement
  source 1..20: mol_type = other DNA
ttgtactacactgaattcac

SEQ ID NO: 10765 - DNA, 20 bp, synthetic construct
  misc_feature 1..20: note = Target B2M Sequence complement
  source 1..20: mol_type = other DNA
tgtactacactgaattcacc

SEQ ID NO: 10766 - DNA, 20 bp, synthetic construct
  misc_feature 1..20: note = Target B2M Sequence complement
  source 1..20: mol_type = other DNA
gtactacactgaattcaccc

SEQ ID NO: 10767 - DNA, 20 bp, synthetic construct
  misc_feature 1..20: note = Target B2M Sequence complement
  source 1..20: mol_type = other DNA
aaagatgagtatgcctgccg

SEQ ID NO: 10768 - DNA, 20 bp, synthetic construct
  misc_feature 1..20: note = Target B2M Sequence complement
  source 1..20: mol_type = other DNA
aagatgagtatgcctgccgt

SEQ ID NO: 10769 - DNA, 20 bp, synthetic construct
  misc_feature 1..20: note = Target B2M Sequence complement
  source 1..20: mol_type = other DNA
agatgagtatgcctgccgtg

SEQ ID NO: 10770 - DNA, 20 bp, synthetic construct
  misc_feature 1..20: note = Target B2M Sequence complement
  source 1..20: mol_type = other DNA
gatgagtatgcctgccgtgt

SEQ ID NO: 10771 - DNA, 20 bp, synthetic construct
  misc_feature 1..20: note = Target B2M Sequence complement
  source 1..20: mol_type = other DNA
atgagtatgcctgccgtgtg

SEQ ID NO: 10772 - DNA, 20 bp, synthetic construct
  misc_feature 1..20: note = Target B2M Sequence complement
  source 1..20: mol_type = other DNA
tgagtatgcctgccgtgtga

SEQ ID NO: 10773 - DNA, 20 bp, synthetic construct
  misc_feature 1..20: note = Target B2M Sequence complement
  source 1..20: mol_type = other DNA
gagtatgcctgccgtgtgaa

SEQ ID NO: 10774 - DNA, 20 bp, synthetic construct
  misc_feature 1..20: note = Target B2M Sequence complement
  source 1..20: mol_type = other DNA
agtatgcctgccgtgtgaac

SEQ ID NO: 10775 - DNA, 20 bp, synthetic construct
  misc_feature 1..20: note = Target B2M Sequence complement
  source 1..20: mol_type = other DNA
tatgcctgccgtgtgaacca

SEQ ID NO: 10776 - DNA, 20 bp, synthetic construct
  misc_feature 1..20: note = Target B2M Sequence complement
  source 1..20: mol_type = other DNA
atgcctgccgtgtgaaccat

SEQ ID NO: 10777 - DNA, 20 bp, synthetic construct
  misc_feature 1..20: note = Target B2M Sequence complement
  source 1..20: mol_type = other DNA
ctgccgtgtgaaccatgtga

SEQ ID NO: 10778 - DNA, 20 bp, synthetic construct
  misc_feature 1..20: note = Target B2M Sequence complement
  source 1..20: mol_type = other DNA
tgccgtgtgaaccatgtgac

SEQ ID NO: 10779 - DNA, 20 bp, synthetic construct
  misc_feature 1..20: note = Target B2M Sequence complement
  source 1..20: mol_type = other DNA
gccgtgtgaaccatgtgact

SEQ ID NO: 10780 - DNA, 20 bp, synthetic construct
  misc_feature 1..20: note = Target B2M Sequence complement
  source 1..20: mol_type = other DNA
ccgtgtgaaccatgtgactt

SEQ ID NO: 10781 - DNA, 20 bp, synthetic construct
  misc_feature 1..20: note = Target B2M Sequence complement
  source 1..20: mol_type = other DNA
cgtgtgaaccatgtgacttt

SEQ ID NO: 10782 - DNA, 20 bp, synthetic construct
  misc_feature 1..20: note = Target B2M Sequence complement
  source 1..20: mol_type = other DNA
gtgtgaaccatgtgactttg

SEQ ID NO: 10783 - DNA, 20 bp, synthetic construct
  misc_feature 1..20: note = Target B2M Sequence complement
  source 1..20: mol_type = other DNA
tgtgaaccatgtgactttgt

SEQ ID NO: 10784 - DNA, 20 bp, synthetic construct
  misc_feature 1..20: note = Target B2M Sequence complement
  source 1..20: mol_type = other DNA
gtgaaccatgtgactttgtc

SEQ ID NO: 10785 - DNA, 20 bp, synthetic construct
  misc_feature 1..20: note = Target B2M Sequence complement
  source 1..20: mol_type = other DNA
tgaaccatgtgactttgtca

SEQ ID NO: 10786 - DNA, 20 bp, synthetic construct
  misc_feature 1..20: note = Target B2M Sequence complement
  source 1..20: mol_type = other DNA
gaaccatgtgactttgtcac

SEQ ID NO: 10787 - DNA, 20 bp, synthetic construct
  misc_feature 1..20: note = Target B2M Sequence complement
  source 1..20: mol_type = other DNA
aaccatgtgactttgtcaca

SEQ ID NO: 10788 - DNA, 20 bp, synthetic construct
  misc_feature 1..20: note = Target B2M Sequence complement
  source 1..20: mol_type = other DNA
accatgtgactttgtcacag

SEQ ID NO: 10789 - DNA, 20 bp, synthetic construct
  misc_feature 1..20: note = Target B2M Sequence complement
  source 1..20: mol_type = other DNA
ccatgtgactttgtcacagc

SEQ ID NO: 10790 - DNA, 20 bp, synthetic construct
  misc_feature 1..20: note = Target B2M Sequence complement
  source 1..20: mol_type = other DNA
catgtgactttgtcacagcc

SEQ ID NO: 10791 - DNA, 20 bp, synthetic construct
  misc_feature 1..20: note = Target B2M Sequence complement
  source 1..20: mol_type = other DNA
atgtgactttgtcacagccc

SEQ ID NO: 10792 - DNA, 20 bp, synthetic construct
  misc_feature 1..20: note = Target B2M Sequence complement
  source 1..20: mol_type = other DNA
tgtgactttgtcacagccca

SEQ ID NO: 10793 - DNA, 20 bp, synthetic construct
  misc_feature 1..20: note = Target B2M Sequence complement
  source 1..20: mol_type = other DNA
gtgactttgtcacagcccaa

SEQ ID NO: 10794 - DNA, 20 bp, synthetic construct
  misc_feature 1..20: note = Target B2M Sequence complement
  source 1..20: mol_type = other DNA
tgactttgtcacagcccaag

SEQ ID NO: 10795 - DNA, 20 bp, synthetic construct
  misc_feature 1..20: note = Target B2M Sequence complement
  source 1..20: mol_type = other DNA
gactttgtcacagcccaaga

SEQ ID NO: 10796 - DNA, 20 bp, synthetic construct
  misc_feature 1..20: note = Target B2M Sequence complement
  source 1..20: mol_type = other DNA
actttgtcacagcccaagat

SEQ ID NO: 10797 - DNA, 20 bp, synthetic construct
  misc_feature 1..20: note = Target B2M Sequence complement
  source 1..20: mol_type = other DNA
ctttgtcacagcccaagata

SEQ ID NO: 10798 - DNA, 20 bp, synthetic construct
  misc_feature 1..20: note = Target B2M Sequence complement
  source 1..20: mol_type = other DNA
tttgtcacagcccaagatag

SEQ ID NO: 10799 - DNA, 20 bp, synthetic construct
  misc_feature 1..20: note = Target B2M Sequence complement
  source 1..20: mol_type = other DNA
ttgtcacagcccaagatagt

SEQ ID NO: 10800 - DNA, 20 bp, synthetic construct
  misc_feature 1..20: note = Target B2M Sequence complement
  source 1..20: mol_type = other DNA
tgtcacagcccaagatagtt

SEQ ID NO: 10801 - DNA, 20 bp, synthetic construct
  misc_feature 1..20: note = Target B2M Sequence complement
  source 1..20: mol_type = other DNA
gtcacagcccaagatagtta

SEQ ID NO: 10802 - DNA, 20 bp, synthetic construct
  misc_feature 1..20: note = Target B2M Sequence complement
  source 1..20: mol_type = other DNA
tcacagcccaagatagttaa

SEQ ID NO: 10803 - DNA, 20 bp, synthetic construct
  misc_feature 1..20: note = Target B2M Sequence complement
  source 1..20: mol_type = other DNA
cagcccaagatagttaagtg

SEQ ID NO: 10804 - DNA, 20 bp, synthetic construct
  misc_feature 1..20: note = Target B2M Sequence complement
  source 1..20: mol_type = other DNA
agcccaagatagttaagtgg

SEQ ID NO: 10805 - DNA, 20 bp, synthetic construct
  misc_feature 1..20: note = Target B2M Sequence complement
  source 1..20: mol_type = other DNA
gcccaagatagttaagtggg

SEQ ID NO: 10806 - DNA, 20 bp, synthetic construct
  misc_feature 1..20: note = Target B2M Sequence complement
  source 1..20: mol_type = other DNA
cccaagatagttaagtggga

SEQ ID NO: 10807 - DNA, 20 bp, synthetic construct
  misc_feature 1..20: note = Target B2M Sequence complement
  source 1..20: mol_type = other DNA
ccaagatagttaagtgggat

SEQ ID NO: 10808 - DNA, 20 bp, synthetic construct
  misc_feature 1..20: note = Target B2M Sequence complement
  source 1..20: mol_type = other DNA
caagatagttaagtgggatc

SEQ ID NO: 10809 - DNA, 20 bp, synthetic construct
  misc_feature 1..20: note = Target B2M Sequence complement
  source 1..20: mol_type = other DNA
aagatagttaagtgggatcg

SEQ ID NO: 10810 - DNA, 20 bp, synthetic construct
  misc_feature 1..20: note = Target B2M Sequence complement
  source 1..20: mol_type = other DNA
agatagttaagtgggatcga

SEQ ID NO: 10811 - DNA, 20 bp, synthetic construct
  misc_feature 1..20: note = Target B2M Sequence complement
  source 1..20: mol_type = other DNA
gatagttaagtgggatcgag

SEQ ID NO: 10812 - DNA, 20 bp, synthetic construct
  misc_feature 1..20: note = Target B2M Sequence complement
  source 1..20: mol_type = other DNA
atagttaagtgggatcgaga

SEQ ID NO: 10813 - DNA, 20 bp, synthetic construct
  misc_feature 1..20: note = Target B2M Sequence complement
  source 1..20: mol_type = other DNA
tagttaagtgggatcgagac

SEQ ID NO: 10814 - DNA, 20 bp, synthetic construct
  misc_feature 1..20: note = Target B2M Sequence complement
  source 1..20: mol_type = other DNA
agttaagtgggatcgagaca

SEQ ID NO: 10815 - DNA, 20 bp, synthetic construct
  misc_feature 1..20: note = Target B2M Sequence complement
  source 1..20: mol_type = other DNA
gttaagtgggatcgagacat

SEQ ID NO: 10816 - DNA, 20 bp, synthetic construct
  misc_feature 1..20: note = Target B2M Sequence complement
  source 1..20: mol_type = other DNA
ttaagtgggatcgagacatg

SEQ ID NO: 10817 - DNA, 20 bp, synthetic construct
  misc_feature 1..20: note = Target B2M Sequence complement
  source 1..20: mol_type = other DNA
taagtgggatcgagacatgt

SEQ ID NO: 10818 - DNA, 20 bp, synthetic construct
  misc_feature 1..20: note = Target B2M Sequence complement
  source 1..20: mol_type = other DNA
aagtgggatcgagacatgta

SEQ ID NO: 10819 - DNA, 20 bp, synthetic construct
  misc_feature 1..20: note = Target B2M Sequence complement
  source 1..20: mol_type = other DNA
agtgggatcgagacatgtaa

SEQ ID NO: 10820 - DNA, 20 bp, synthetic construct
  misc_feature 1..20: note = Target B2M Sequence complement
  source 1..20: mol_type = other DNA
gtgggatcgagacatgtaag

SEQ ID NO: 10821 - DNA, 20 bp, synthetic construct
  misc_feature 1..20: note = Target B2M Sequence complement
  source 1..20: mol_type = other DNA
tgggatcgagacatgtaagc

SEQ ID NO: 10822 - DNA, 20 bp, synthetic construct
  misc_feature 1..20: note = Target B2M Sequence complement
  source 1..20: mol_type = other DNA
gggatcgagacatgtaagca

SEQ ID NO: 10823 - DNA, 20 bp, synthetic construct
  misc_feature 1..20: note = Target B2M Sequence complement
  source 1..20: mol_type = other DNA
ggatcgagacatgtaagcag

SEQ ID NO: 10824 - DNA, 20 bp, synthetic construct
  misc_feature 1..20: note = Target B2M Sequence complement
  source 1..20: mol_type = other DNA
gatcgagacatgtaagcagc

SEQ ID NO: 10825 - DNA, 20 bp, synthetic construct
  misc_feature 1..20: note = Target B2M Sequence complement
  source 1..20: mol_type = other DNA
atcgagacatgtaagcagca

SEQ ID NO: 10826 - DNA, 20 bp, synthetic construct
  misc_feature 1..20: note = Target B2M Sequence complement
  source 1..20: mol_type = other DNA
tcgagacatgtaagcagcat

SEQ ID NO: 10827 - DNA, 20 bp, synthetic construct
  misc_feature 1..20: note = Target B2M Sequence complement
  source 1..20: mol_type = other DNA
cgagacatgtaagcagcatc

SEQ ID NO: 10828 - DNA, 20 bp, synthetic construct
  misc_feature 1..20: note = Target B2M Sequence complement
  source 1..20: mol_type = other DNA
agacatgtaagcagcatcat

SEQ ID NO: 10829 - DNA, 20 bp, synthetic construct
  misc_feature 1..20: note = Target B2M Sequence complement
  source 1..20: mol_type = other DNA
gacatgtaagcagcatcatg

SEQ ID NO: 10830 - DNA, 20 bp, synthetic construct
  misc_feature 1..20: note = Target B2M Sequence complement
  source 1..20: mol_type = other DNA
catgtaagcagcatcatgga

SEQ ID NO: 10831 - DNA, 20 bp, synthetic construct
  misc_feature 1..20: note = Target B2M Sequence complement
  source 1..20: mol_type = other DNA
atgtaagcagcatcatggag

SEQ ID NO: 10832 - DNA, 20 bp, synthetic construct
  misc_feature 1..20: note = Target B2M Sequence complement
  source 1..20: mol_type = other DNA
tgtaagcagcatcatggagg

SEQ ID NO: 10833 - DNA, 20 bp, synthetic construct
  misc_feature 1..20: note = Target B2M Sequence complement
  source 1..20: mol_type = other DNA
gtaagcagcatcatggaggt

SEQ ID NO: 10834 - DNA, 20 bp, synthetic construct
  misc_feature 1..20: note = Target B2M Sequence complement
  source 1..20: mol_type = other DNA
taagcagcatcatggaggtt

SEQ ID NO: 10835 - DNA, 20 bp, synthetic construct
  misc_feature 1..20: note = Target B2M Sequence complement
  source 1..20: mol_type = other DNA
aagcagcatcatggaggttt

SEQ ID NO: 10836 - DNA, 20 bp, synthetic construct
  misc_feature 1..20: note = Target B2M Sequence complement
  source 1..20: mol_type = other DNA
agcagcatcatggaggtttg

SEQ ID NO: 10837 - DNA, 20 bp, synthetic construct
  misc_feature 1..20: note = Target B2M Sequence complement
  source 1..20: mol_type = other DNA
gcagcatcatggaggtttga

SEQ ID NO: 10838 - DNA, 20 bp, synthetic construct
  misc_feature 1..20: note = Target B2M Sequence complement
  source 1..20: mol_type = other DNA
cagcatcatggaggtttgaa

SEQ ID NO: 10839 - DNA, 20 bp, synthetic construct
  misc_feature 1..20: note = Target B2M Sequence complement
  source 1..20: mol_type = other DNA
agcatcatggaggtttgaag

SEQ ID NO: 10840 - DNA, 20 bp, synthetic construct
  misc_feature 1..20: note = Target B2M Sequence complement
  source 1..20: mol_type = other DNA
gcatcatggaggtttgaaga

SEQ ID NO: 10841 - DNA, 20 bp, synthetic construct
  misc_feature 1..20: note = Target B2M Sequence complement
  source 1..20: mol_type = other DNA
catcatggaggtttgaagat

SEQ ID NO: 10842 - DNA, 20 bp, synthetic construct
  misc_feature 1..20: note = Target B2M Sequence complement
  source 1..20: mol_type = other DNA
atcatggaggtttgaagatg

SEQ ID NO: 10843 - DNA, 20 bp, synthetic construct
  misc_feature 1..20: note = Target B2M Sequence complement
  source 1..20: mol_type = other DNA
tcatggaggtttgaagatgc

SEQ ID NO: 10844 - DNA, 20 bp, synthetic construct
  misc_feature 1..20: note = Target B2M Sequence complement
  source 1..20: mol_type = other DNA
catggaggtttgaagatgcc

SEQ ID NO: 10845 - DNA, 20 bp, synthetic construct
  misc_feature 1..20: note = Target B2M Sequence complement
  source 1..20: mol_type = other DNA
atggaggtttgaagatgccg

SEQ ID NO: 10846 - DNA, 20 bp, synthetic construct
  misc_feature 1..20: note = Target B2M Sequence complement
  source 1..20: mol_type = other DNA
tggaggtttgaagatgccgc

SEQ ID NO: 10847 - DNA, 20 bp, synthetic construct
  misc_feature 1..20: note = Target B2M Sequence complement
  source 1..20: mol_type = other DNA
ggaggtttgaagatgccgca

SEQ ID NO: 10848 - DNA, 20 bp, synthetic construct
  misc_feature 1..20: note = Target B2M Sequence complement
  source 1..20: mol_type = other DNA
gaggtttgaagatgccgcat

SEQ ID NO: 10849 - DNA, 20 bp, synthetic construct
  misc_feature 1..20: note = Target B2M Sequence complement
  source 1..20: mol_type = other DNA
aggtttgaagatgccgcatt

SEQ ID NO: 10850 - DNA, 20 bp, synthetic construct
  misc_feature 1..20: note = Target B2M Sequence complement
  source 1..20: mol_type = other DNA
ggtttgaagatgccgcattt

SEQ ID NO: 10851 - DNA, 20 bp, synthetic construct
  misc_feature 1..20: note = Target B2M Sequence complement
  source 1..20: mol_type = other DNA
gtttgaagatgccgcatttg

SEQ ID NO: 10852 - DNA, 20 bp, synthetic construct
  misc_feature 1..20: note = Target B2M Sequence complement
  source 1..20: mol_type = other DNA
tttgaagatgccgcatttgg

SEQ ID NO: 10853 - DNA, 20 bp, synthetic construct
  misc_feature 1..20: note = Target B2M Sequence complement
  source 1..20: mol_type = other DNA
ttgaagatgccgcatttgga

SEQ ID NO: 10854 - DNA, 20 bp, synthetic construct
  misc_feature 1..20: note = Target B2M Sequence complement
  source 1..20: mol_type = other DNA
tgaagatgccgcatttggat

SEQ ID NO: 10855 - DNA, 20 bp, synthetic construct
  misc_feature 1..20: note = Target B2M Sequence complement
  source 1..20: mol_type = other DNA
gaagatgccgcatttggatt

SEQ ID NO: 10856 - DNA, 20 bp, synthetic construct
  misc_feature 1..20: note = Target B2M Sequence complement
  source 1..20: mol_type = other DNA
aagatgccgcatttggattg

SEQ ID NO: 10857 - DNA, 20 bp, synthetic construct
  misc_feature 1..20: note = Target B2M Sequence complement
  source 1..20: mol_type = other DNA
agatgccgcatttggattgg

SEQ ID NO: 10858 - DNA, 20 bp, synthetic construct
  misc_feature 1..20: note = Target B2M Sequence complement
  source 1..20: mol_type = other DNA
gatgccgcatttggattgga

SEQ ID NO: 10859 - DNA, 20 bp, synthetic construct
  misc_feature 1..20: note = Target B2M Sequence complement
  source 1..20: mol_type = other DNA
atgccgcatttggattggat

SEQ ID NO: 10860 - DNA, 20 bp, synthetic construct
  misc_feature 1..20: note = Target B2M Sequence complement
  source 1..20: mol_type = other DNA
tgccgcatttggattggatg

SEQ ID NO: 10861 - DNA, 20 bp, synthetic construct
  misc_feature 1..20: note = Target B2M Sequence complement
  source 1..20: mol_type = other DNA
gccgcatttggattggatga

SEQ ID NO: 10862 - DNA, 20 bp, synthetic construct
  misc_feature 1..20: note = Target B2M Sequence complement
  source 1..20: mol_type = other DNA
ccgcatttggattggatgaa

SEQ ID NO: 10863 - DNA, 20 bp, synthetic construct
  misc_feature 1..20: note = Target B2M Sequence complement
  source 1..20: mol_type = other DNA
cgcatttggattggatgaat

SEQ ID NO: 10864 - DNA, 20 bp, synthetic construct
  misc_feature 1..20: note = Target B2M Sequence complement
  source 1..20: mol_type = other DNA
gcatttggattggatgaatt

SEQ ID NO: 10865 - DNA, 20 bp, synthetic construct
  misc_feature 1..20: note = Target B2M Sequence complement
  source 1..20: mol_type = other DNA
catttggattggatgaattc

SEQ ID NO: 10866 - DNA, 20 bp, synthetic construct
  misc_feature 1..20: note = Target B2M Sequence complement
  source 1..20: mol_type = other DNA
atttggattggatgaattcc

SEQ ID NO: 10867 - DNA, 20 bp, synthetic construct
  misc_feature 1..20: note = Target B2M Sequence complement
  source 1..20: mol_type = other DNA
tttggattggatgaattcca

SEQ ID NO: 10868 - DNA, 20 bp, synthetic construct
  misc_feature 1..20: note = Target B2M Sequence complement
  source 1..20: mol_type = other DNA
ttggattggatgaattccaa

SEQ ID NO: 10869 - DNA, 20 bp, synthetic construct
  misc_feature 1..20: note = Target B2M Sequence complement
  source 1..20: mol_type = other DNA
tggattggatgaattccaaa

SEQ ID NO: 10870 - DNA, 20 bp, synthetic construct
  misc_feature 1..20: note = Target B2M Sequence complement
  source 1..20: mol_type = other DNA
ggattggatgaattccaaat

SEQ ID NO: 10871 - DNA, 20 bp, synthetic construct
  misc_feature 1..20: note = Target B2M Sequence complement
  source 1..20: mol_type = other DNA
gattggatgaattccaaatt

SEQ ID NO: 10872 - DNA, 20 bp, synthetic construct
  misc_feature 1..20: note = Target B2M Sequence complement
  source 1..20: mol_type = other DNA
attggatgaattccaaattc

SEQ ID NO: 10873 - DNA, 20 bp, synthetic construct
  misc_feature 1..20: note = Target B2M Sequence complement
  source 1..20: mol_type = other DNA
ttggatgaattccaaattct

SEQ ID NO: 10874 - DNA, 20 bp, synthetic construct
  misc_feature 1..20: note = Target B2M Sequence complement
  source 1..20: mol_type = other DNA
tggatgaattccaaattctg

SEQ ID NO: 10875 - DNA, 20 bp, synthetic construct
  misc_feature 1..20: note = Target B2M Sequence complement
  source 1..20: mol_type = other DNA
ggatgaattccaaattctgc

SEQ ID NO: 10876 - DNA, 20 bp, synthetic construct
  misc_feature 1..20: note = Target B2M Sequence complement
  source 1..20: mol_type = other DNA
gatgaattccaaattctgct

SEQ ID NO: 10877 - DNA, 20 bp, synthetic construct
  misc_feature 1..20: note = Target B2M Sequence complement
  source 1..20: mol_type = other DNA
atgaattccaaattctgctt

SEQ ID NO: 10878 - DNA, 20 bp, synthetic construct
  misc_feature 1..20: note = Target B2M Sequence complement
  source 1..20: mol_type = other DNA
tgaattccaaattctgcttg

SEQ ID NO: 10879 - DNA, 20 bp, synthetic construct
  misc_feature 1..20: note = Target B2M Sequence complement
  source 1..20: mol_type = other DNA
gaattccaaattctgcttgc

SEQ ID NO: 10880 - DNA, 20 bp, synthetic construct
  misc_feature 1..20: note = Target B2M Sequence complement
  source 1..20: mol_type = other DNA
aattccaaattctgcttgct

SEQ ID NO: 10881 - DNA, 20 bp, synthetic construct
  misc_feature 1..20: note = Target B2M Sequence complement
  source 1..20: mol_type = other DNA
attccaaattctgcttgctt

SEQ ID NO: 10882 - DNA, 20 bp, synthetic construct
  misc_feature 1..20: note = Target B2M Sequence complement
  source 1..20: mol_type = other DNA
ttccaaattctgcttgcttg

SEQ ID NO: 10883 - DNA, 20 bp, synthetic construct
  misc_feature 1..20: note = Target B2M Sequence complement
  source 1..20: mol_type = other DNA
tccaaattctgcttgcttgc

SEQ ID NO: 10884 - DNA, 20 bp, synthetic construct
  misc_feature 1..20: note = Target B2M Sequence complement
  source 1..20: mol_type = other DNA
ccaaattctgcttgcttgct

SEQ ID NO: 10885 - DNA, 20 bp, synthetic construct
  misc_feature 1..20: note = Target B2M Sequence complement
  source 1..20: mol_type = other DNA
caaattctgcttgcttgctt

SEQ ID NO: 10886 - DNA, 20 bp, synthetic construct
  misc_feature 1..20: note = Target B2M Sequence complement
  source 1..20: mol_type = other DNA
aaattctgcttgcttgcttt

SEQ ID NO: 10887 - DNA, 20 bp, synthetic construct
  misc_feature 1..20: note = Target B2M Sequence complement
  source 1..20: mol_type = other DNA
atattgatatgcttatacac

SEQ ID NO: 10888 - DNA, 20 bp, synthetic construct
  misc_feature 1..20: note = Target B2M Sequence complement
  source 1..20: mol_type = other DNA
tattgatatgcttatacact

SEQ ID NO: 10889 - DNA, 20 bp, synthetic construct
  misc_feature 1..20: note = Target B2M Sequence complement
  source 1..20: mol_type = other DNA
attgatatgcttatacactt

SEQ ID NO: 10890 - DNA, 20 bp, synthetic construct
  misc_feature 1..20: note = Target B2M Sequence complement
  source 1..20: mol_type = other DNA
ttgatatgcttatacactta

SEQ ID NO: 10891 - DNA, 20 bp, synthetic construct
  misc_feature 1..20: note = Target B2M Sequence complement
  source 1..20: mol_type = other DNA
tgatatgcttatacacttac

SEQ ID NO: 10892 - DNA, 20 bp, synthetic construct
  misc_feature 1..20: note = Target B2M Sequence complement
  source 1..20: mol_type = other DNA
gatatgcttatacacttaca

SEQ ID NO: 10893 - DNA, 20 bp, synthetic construct
  misc_feature 1..20: note = Target B2M Sequence complement
  source 1..20: mol_type = other DNA
atatgcttatacacttacac

SEQ ID NO: 10894 - DNA, 20 bp, synthetic construct
  misc_feature 1..20: note = Target B2M Sequence complement
  source 1..20: mol_type = other DNA
tatgcttatacacttacact

SEQ ID NO: 10895 - DNA, 20 bp, synthetic construct
  misc_feature 1..20: note = Target B2M Sequence complement
  source 1..20: mol_type = other DNA
atgcttatacacttacactt

SEQ ID NO: 10896 - DNA, 20 bp, synthetic construct
  misc_feature 1..20: note = Target B2M Sequence complement
  source 1..20: mol_type = other DNA
tgcttatacacttacacttt

SEQ ID NO: 10897 - DNA, 20 bp, synthetic construct
  misc_feature 1..20: note = Target B2M Sequence complement
  source 1..20: mol_type = other DNA
gcttatacacttacacttta

SEQ ID NO: 10898 - DNA, 20 bp, synthetic construct
  misc_feature 1..20: note = Target B2M Sequence complement
  source 1..20: mol_type = other DNA
cttatacacttacactttat

SEQ ID NO: 10899 - DNA, 20 bp, synthetic construct
  misc_feature 1..20: note = Target B2M Sequence complement
  source 1..20: mol_type = other DNA
ttatacacttacactttatg

SEQ ID NO: 10900 - DNA, 20 bp, synthetic construct
  misc_feature 1..20: note = Target B2M Sequence complement
  source 1..20: mol_type = other DNA
tatacacttacactttatgc

SEQ ID NO: 10901 - DNA, 20 bp, synthetic construct
  misc_feature 1..20: note = Target B2M Sequence complement
  source 1..20: mol_type = other DNA
atacacttacactttatgca

SEQ ID NO: 10902 - DNA, 20 bp, synthetic construct
  misc_feature 1..20: note = Target B2M Sequence complement
  source 1..20: mol_type = other DNA
tacacttacactttatgcac

SEQ ID NO: 10903 - DNA, 20 bp, synthetic construct
  misc_feature 1..20: note = Target B2M Sequence complement
  source 1..20: mol_type = other DNA
acacttacactttatgcaca

SEQ ID NO: 10904 - DNA, 20 bp, synthetic construct
  misc_feature 1..20: note = Target B2M Sequence complement
  source 1..20: mol_type = other DNA
cacttacactttatgcacaa

SEQ ID NO: 10905 - DNA, 20 bp, synthetic construct
  misc_feature 1..20: note = Target B2M Sequence complement
  source 1..20: mol_type = other DNA
acttacactttatgcacaaa

SEQ ID NO: 10906 - DNA, 20 bp, synthetic construct
  misc_feature 1..20: note = Target B2M Sequence complement
  source 1..20: mol_type = other DNA
aatgtagggttataataatg

SEQ ID NO: 10907 - DNA, 20 bp, synthetic construct
  misc_feature 1..20: note = Target B2M Sequence complement
  source 1..20: mol_type = other DNA
atgtagggttataataatgt

SEQ ID NO: 10908 - DNA, 20 bp, synthetic construct
  misc_feature 1..20: note = Target B2M Sequence complement
  source 1..20: mol_type = other DNA
tgtagggttataataatgtt

SEQ ID NO: 10909 - DNA, 20 bp, synthetic construct
  misc_feature 1..20: note = Target B2M Sequence complement
  source 1..20: mol_type = other DNA
gtagggttataataatgtta

SEQ ID NO: 10910 - DNA, 20 bp, synthetic construct
  misc_feature 1..20: note = Target B2M Sequence complement
  source 1..20: mol_type = other DNA
agggttataataatgttaac

SEQ ID NO: 10911 - DNA, 20 bp, synthetic construct
  misc_feature 1..20: note = Target B2M Sequence complement
  source 1..20: mol_type = other DNA
gggttataataatgttaaca

SEQ ID NO: 10912 - DNA, 20 bp, synthetic construct
  misc_feature 1..20: note = Target B2M Sequence complement
  source 1..20: mol_type = other DNA
ataataatgttaacatggac

SEQ ID NO: 10913 - DNA, 20 bp, synthetic construct
  misc_feature 1..20: note = Target B2M Sequence complement
  source 1..20: mol_type = other DNA
taataatgttaacatggaca

SEQ ID NO: 10914 - DNA, 20 bp, synthetic construct
  misc_feature 1..20: note = Target B2M Sequence complement
  source 1..20: mol_type = other DNA
aataatgttaacatggacat

SEQ ID NO: 10915 - DNA, 20 bp, synthetic construct
  misc_feature 1..20: note = Target B2M Sequence complement
  source 1..20: mol_type = other DNA
ataatgttaacatggacatg

SEQ ID NO: 10916 - DNA, 20 bp, synthetic construct
  misc_feature 1..20: note = Target B2M Sequence complement
  source 1..20: mol_type = other DNA
taatgttaacatggacatga

SEQ ID NO: 10917 - DNA, 20 bp, synthetic construct
  misc_feature 1..20: note = Target B2M Sequence complement
  source 1..20: mol_type = other DNA
aatgttaacatggacatgat

SEQ ID NO: 10918 - DNA, 20 bp, synthetic construct
  misc_feature 1..20: note = Target B2M Sequence complement
  source 1..20: mol_type = other DNA
atgttaacatggacatgatc

SEQ ID NO: 10919 - DNA, 20 bp, synthetic construct
  misc_feature 1..20: note = Target B2M Sequence complement
  source 1..20: mol_type = other DNA
tgttaacatggacatgatct

SEQ ID NO: 10920 - DNA, 20 bp, synthetic construct
  misc_feature 1..20: note = Target B2M Sequence complement
  source 1..20: mol_type = other DNA
gttaacatggacatgatctt

SEQ ID NO: 10921 - DNA, 20 bp, synthetic construct
  misc_feature 1..20: note = Target B2M Sequence complement
  source 1..20: mol_type = other DNA
ttaacatggacatgatcttc

SEQ ID NO: 10922 - DNA, 20 bp, synthetic construct
  misc_feature 1..20: note = Target B2M Sequence complement
  source 1..20: mol_type = other DNA
taacatggacatgatcttct

SEQ ID NO: 10923 - DNA, 20 bp, synthetic construct
  misc_feature 1..20: note = Target B2M Sequence complement
  source 1..20: mol_type = other DNA
aacatggacatgatcttctt

SEQ ID NO: 10924 - DNA, 20 bp, synthetic construct
  misc_feature 1..20: note = Target B2M Sequence complement
  source 1..20: mol_type = other DNA
acatggacatgatcttcttt

SEQ ID NO: 10925 - DNA, 20 bp, synthetic construct
  misc_feature 1..20: note = Target B2M Sequence complement
  source 1..20: mol_type = other DNA
catggacatgatcttcttta

SEQ ID NO: 10926 - DNA, 20 bp, synthetic construct
  misc_feature 1..20: note = Target B2M Sequence complement
  source 1..20: mol_type = other DNA
atggacatgatcttctttat

SEQ ID NO: 10927 - DNA, 20 bp, synthetic construct
  misc_feature 1..20: note = Target B2M Sequence complement
  source 1..20: mol_type = other DNA
tggacatgatcttctttata

SEQ ID NO: 10928 - DNA, 20 bp, synthetic construct
  misc_feature 1..20: note = Target B2M Sequence complement
  source 1..20: mol_type = other DNA
ggacatgatcttctttataa

SEQ ID NO: 10929 - DNA, 20 bp, synthetic construct
  misc_feature 1..20: note = Target B2M Sequence complement
  source 1..20: mol_type = other DNA
gacatgatcttctttataat

SEQ ID NO: 10930 - DNA, 20 bp, synthetic construct
  misc_feature 1..20: note = Target B2M Sequence complement
  source 1..20: mol_type = other DNA
catgatcttctttataattc

SEQ ID NO: 10931 - DNA, 20 bp, synthetic construct
  misc_feature 1..20: note = Target B2M Sequence complement
  source 1..20: mol_type = other DNA
gatcttctttataattctac

SEQ ID NO: 10932 - DNA, 20 bp, synthetic construct
  misc_feature 1..20: note = Target B2M Sequence complement
  source 1..20: mol_type = other DNA
ctttataattctactttgag

SEQ ID NO: 10933 - DNA, 20 bp, synthetic construct
  misc_feature 1..20: note = Target B2M Sequence complement
  source 1..20: mol_type = other DNA
ttataattctactttgagtg

SEQ ID NO: 10934 - DNA, 20 bp, synthetic construct
  misc_feature 1..20: note = Target B2M Sequence complement
  source 1..20: mol_type = other DNA
tataattctactttgagtgc

SEQ ID NO: 10935 - DNA, 20 bp, synthetic construct
  misc_feature 1..20: note = Target B2M Sequence complement
  source 1..20: mol_type = other DNA
ataattctactttgagtgct

SEQ ID NO: 10936 - DNA, 20 bp, synthetic construct
  misc_feature 1..20: note = Target B2M Sequence complement
  source 1..20: mol_type = other DNA
taattctactttgagtgctg

SEQ ID NO: 10937 - DNA, 20 bp, synthetic construct
  misc_feature 1..20: note = Target B2M Sequence complement
  source 1..20: mol_type = other DNA
aattctactttgagtgctgt

SEQ ID NO: 10938 - DNA, 20 bp, synthetic construct
  misc_feature 1..20: note = Target B2M Sequence complement
  source 1..20: mol_type = other DNA
attctactttgagtgctgtc

SEQ ID NO: 10939 - DNA, 20 bp, synthetic construct
  misc_feature 1..20: note = Target B2M Sequence complement
  source 1..20: mol_type = other DNA
ttctactttgagtgctgtct

SEQ ID NO: 10940 - DNA, 20 bp, synthetic construct
  misc_feature 1..20: note = Target B2M Sequence complement
  source 1..20: mol_type = other DNA
tctactttgagtgctgtctc

SEQ ID NO: 10941 - DNA, 20 bp, synthetic construct
  misc_feature 1..20: note = Target B2M Sequence complement
  source 1..20: mol_type = other DNA
ctactttgagtgctgtctcc

SEQ ID NO: 10942 - DNA, 20 bp, synthetic construct
  misc_feature 1..20: note = Target B2M Sequence complement
  source 1..20: mol_type = other DNA
tactttgagtgctgtctcca

SEQ ID NO: 10943 - DNA, 20 bp, synthetic construct
  misc_feature 1..20: note = Target B2M Sequence complement
  source 1..20: mol_type = other DNA
actttgagtgctgtctccat

SEQ ID NO: 10944 - DNA, 20 bp, synthetic construct
  misc_feature 1..20: note = Target B2M Sequence complement
  source 1..20: mol_type = other DNA
ctttgagtgctgtctccatg

SEQ ID NO: 10945 - DNA, 20 bp, synthetic construct
  misc_feature 1..20: note = Target B2M Sequence complement
  source 1..20: mol_type = other DNA
tttgagtgctgtctccatgt

SEQ ID NO: 10946 - DNA, 20 bp, synthetic construct
  misc_feature 1..20: note = Target B2M Sequence complement
  source 1..20: mol_type = other DNA
ttgagtgctgtctccatgtt

SEQ ID NO: 10947 - DNA, 20 bp, synthetic construct
  misc_feature 1..20: note = Target B2M Sequence complement
  source 1..20: mol_type = other DNA
tgagtgctgtctccatgttt

SEQ ID NO: 10948 - DNA, 20 bp, synthetic construct
  misc_feature 1..20: note = Target B2M Sequence complement
  source 1..20: mol_type = other DNA
gagtgctgtctccatgtttg

SEQ ID NO: 10949 - DNA, 20 bp, synthetic construct
  misc_feature 1..20: note = Target B2M Sequence complement
  source 1..20: mol_type = other DNA
agtgctgtctccatgtttga

SEQ ID NO: 10950 - DNA, 20 bp, synthetic construct
  misc_feature 1..20: note = Target B2M Sequence complement
  source 1..20: mol_type = other DNA
gtgctgtctccatgtttgat

SEQ ID NO: 10951 - DNA, 20 bp, synthetic construct
  misc_feature 1..20: note = Target B2M Sequence complement
  source 1..20: mol_type = other DNA
tgctgtctccatgtttgatg

SEQ ID NO: 10952 - DNA, 20 bp, synthetic construct
  misc_feature 1..20: note = Target B2M Sequence complement
  source 1..20: mol_type = other DNA
gctgtctccatgtttgatgt

SEQ ID NO: 10953 - DNA, 20 bp, synthetic construct
  misc_feature 1..20: note = Target B2M Sequence complement
  source 1..20: mol_type = other DNA
ctgtctccatgtttgatgta

SEQ ID NO: 10954 - DNA, 20 bp, synthetic construct
  misc_feature 1..20: note = Target B2M Sequence complement
  source 1..20: mol_type = other DNA
tgtctccatgtttgatgtat

SEQ ID NO: 10955 - DNA, 20 bp, synthetic construct
  misc_feature 1..20: note = Target B2M Sequence complement
  source 1..20: mol_type = other DNA
gtctccatgtttgatgtatc

SEQ ID NO: 10956 - DNA, 20 bp, synthetic construct
  misc_feature 1..20: note = Target B2M Sequence complement
  source 1..20: mol_type = other DNA
tctccatgtttgatgtatct

SEQ ID NO: 10957 - DNA, 20 bp, synthetic construct
  misc_feature 1..20: note = Target B2M Sequence complement
  source 1..20: mol_type = other DNA
ctccatgtttgatgtatctg

SEQ ID NO: 10958 - DNA, 20 bp, synthetic construct
  misc_feature 1..20: note = Target B2M Sequence complement
  source 1..20: mol_type = other DNA
tccatgtttgatgtatctga

SEQ ID NO: 10959 - DNA, 20 bp, synthetic construct
  misc_feature 1..20: note = Target B2M Sequence complement
  source 1..20: mol_type = other DNA
ccatgtttgatgtatctgag

SEQ ID NO: 10960 - DNA, 20 bp, synthetic construct
  misc_feature 1..20: note = Target B2M Sequence complement
  source 1..20: mol_type = other DNA
catgtttgatgtatctgagc

SEQ ID NO: 10961 - DNA, 20 bp, synthetic construct
  misc_feature 1..20: note = Target B2M Sequence complement
  source 1..20: mol_type = other DNA
atgtttgatgtatctgagca

SEQ ID NO: 10962 - DNA, 20 bp, synthetic construct
  misc_feature 1..20: note = Target B2M Sequence complement
  source 1..20: mol_type = other DNA
tgtttgatgtatctgagcag

SEQ ID NO: 10963 - DNA, 20 bp, synthetic construct
  misc_feature 1..20: note = Target B2M Sequence complement
  source 1..20: mol_type = other DNA
gtttgatgtatctgagcagg

SEQ ID NO: 10964 - DNA, 20 bp, synthetic construct
  misc_feature 1..20: note = Target B2M Sequence complement
  source 1..20: mol_type = other DNA
tttgatgtatctgagcaggt

SEQ ID NO: 10965 - DNA, 20 bp, synthetic construct
  misc_feature 1..20: note = Target B2M Sequence complement
  source 1..20: mol_type = other DNA
ttgatgtatctgagcaggtt

SEQ ID NO: 10966 - DNA, 20 bp, synthetic construct
  misc_feature 1..20: note = Target B2M Sequence complement
  source 1..20: mol_type = other DNA
tgatgtatctgagcaggttg

SEQ ID NO: 10967 - DNA, 20 bp, synthetic construct
  misc_feature 1..20: note = Target B2M Sequence complement
  source 1..20: mol_type = other DNA
gatgtatctgagcaggttgc

SEQ ID NO: 10968 - DNA, 20 bp, synthetic construct
  misc_feature 1..20: note = Target B2M Sequence complement
  source 1..20: mol_type = other DNA
atgtatctgagcaggttgct

SEQ ID NO: 10969 - DNA, 20 bp, synthetic construct
  misc_feature 1..20: note = Target B2M Sequence complement
  source 1..20: mol_type = other DNA
tgtatctgagcaggttgctc

SEQ ID NO: 10970 - DNA, 20 bp, synthetic construct
  misc_feature 1..20: note = Target B2M Sequence complement
  source 1..20: mol_type = other DNA
gtatctgagcaggttgctcc

SEQ ID NO: 10971 - DNA, 20 bp, synthetic construct
  misc_feature 1..20: note = Target B2M Sequence complement
  source 1..20: mol_type = other DNA
tatctgagcaggttgctcca

SEQ ID NO: 10972 - DNA, 20 bp, synthetic construct
  misc_feature 1..20: note = Target B2M Sequence complement
  source 1..20: mol_type = other DNA
atctgagcaggttgctccac

SEQ ID NO: 10973 - DNA, 20 bp, synthetic construct
  misc_feature 1..20: note = Target B2M Sequence complement
  source 1..20: mol_type = other DNA
tctgagcaggttgctccaca

SEQ ID NO: 10974 - DNA, 20 bp, synthetic construct
  misc_feature 1..20: note = Target B2M Sequence complement
  source 1..20: mol_type = other DNA
agcaggttgctccacaggta

SEQ ID NO: 10975 - DNA, 20 bp, synthetic construct
  misc_feature 1..20: note = Target B2M Sequence complement
  source 1..20: mol_type = other DNA
aggttgctccacaggtagct

SEQ ID NO: 10976 - DNA, 20 bp, synthetic construct
  misc_feature 1..20: note = Target B2M Sequence complement
  source 1..20: mol_type = other DNA
gttgctccacaggtagctct

SEQ ID NO: 10977 - DNA, 20 bp, synthetic construct
  misc_feature 1..20: note = Target B2M Sequence complement
  source 1..20: mol_type = other DNA
ttgctccacaggtagctcta

SEQ ID NO: 10978 - DNA, 20 bp, synthetic construct
  misc_feature 1..20: note = Target B2M Sequence complement
  source 1..20: mol_type = other DNA
tgctccacaggtagctctag

SEQ ID NO: 10979 - DNA, 20 bp, synthetic construct
  misc_feature 1..20: note = Target B2M Sequence complement
  source 1..20: mol_type = other DNA
ctccacaggtagctctagga

SEQ ID NO: 10980 - DNA, 20 bp, synthetic construct
  misc_feature 1..20: note = Target B2M Sequence complement
  source 1..20: mol_type = other DNA
tccacaggtagctctaggag

SEQ ID NO: 10981 - DNA, 20 bp, synthetic construct
  misc_feature 1..20: note = Target B2M Sequence complement
  source 1..20: mol_type = other DNA
tctaggagggctggcaactt

SEQ ID NO: 10982 - DNA, 20 bp, synthetic construct
  misc_feature 1..20: note = Target B2M Sequence complement
  source 1..20: mol_type = other DNA
ctaggagggctggcaactta

SEQ ID NO: 10983 - DNA, 20 bp, synthetic construct
  misc_feature 1..20: note = Target B2M Sequence complement
  source 1..20: mol_type = other DNA
taggagggctggcaacttag

SEQ ID NO: 10984 - DNA, 20 bp, synthetic construct
  misc_feature 1..20: note = Target B2M Sequence complement
  source 1..20: mol_type = other DNA
aggagggctggcaacttaga

SEQ ID NO: 10985 - DNA, 20 bp, synthetic construct
  misc_feature 1..20: note = Target B2M Sequence complement
  source 1..20: mol_type = other DNA
agggctggcaacttagaggt

SEQ ID NO: 10986 - DNA, 20 bp, synthetic construct
  misc_feature 1..20: note = Target B2M Sequence complement
  source 1..20: mol_type = other DNA
gggagcagagaattctctta

SEQ ID NO: 10987 - DNA, 20 bp, synthetic construct
  misc_feature 1..20: note = Target B2M Sequence complement
  source 1..20: mol_type = other DNA
ggagcagagaattctcttat

SEQ ID NO: 10988 - DNA, 20 bp, synthetic construct
  misc_feature 1..20: note = Target B2M Sequence complement
  source 1..20: mol_type = other DNA
gagcagagaattctcttatc

SEQ ID NO: 10989 - DNA, 20 bp, synthetic construct
  misc_feature 1..20: note = Target B2M Sequence complement
  source 1..20: mol_type = other DNA
agcagagaattctcttatcc

SEQ ID NO: 10990 - DNA, 20 bp, synthetic construct
  misc_feature 1..20: note = Target B2M Sequence complement
  source 1..20: mol_type = other DNA
gcagagaattctcttatcca

SEQ ID NO: 10991 - DNA, 20 bp, synthetic construct
  misc_feature 1..20: note = Target B2M Sequence complement
  source 1..20: mol_type = other DNA
cagagaattctcttatccaa

SEQ ID NO: 10992 - DNA, 20 bp, synthetic construct
  misc_feature 1..20: note = Target B2M Sequence complement
  source 1..20: mol_type = other DNA
agagaattctcttatccaac

SEQ ID NO: 10993 - DNA, 20 bp, synthetic construct
  misc_feature 1..20: note = Target B2M Sequence complement
  source 1..20: mol_type = other DNA
gagaattctcttatccaaca

SEQ ID NO: 10994 - DNA, 20 bp, synthetic construct
  misc_feature 1..20: note = Target B2M Sequence complement
  source 1..20: mol_type = other DNA
agaattctcttatccaacat

SEQ ID NO: 10995 - DNA, 20 bp, synthetic construct
  misc_feature 1..20: note = Target B2M Sequence complement
  source 1..20: mol_type = other DNA
gaattctcttatccaacatc

SEQ ID NO: 10996 - DNA, 20 bp, synthetic construct
  misc_feature 1..20: note = Target B2M Sequence complement
  source 1..20: mol_type = other DNA
aattctcttatccaacatca

SEQ ID NO: 10997 - DNA, 20 bp, synthetic construct
  misc_feature 1..20: note = Target B2M Sequence complement
  source 1..20: mol_type = other DNA
attctcttatccaacatcaa

SEQ ID NO: 10998 - DNA, 20 bp, synthetic construct
  misc_feature 1..20: note = Target B2M Sequence complement
  source 1..20: mol_type = other DNA
ttctcttatccaacatcaac

SEQ ID NO: 10999 - DNA, 20 bp, synthetic construct
  misc_feature 1..20: note = Target B2M Sequence complement
  source 1..20: mol_type = other DNA
tctcttatccaacatcaaca

SEQ ID NO: 11000 - DNA, 20 bp, synthetic construct
  misc_feature 1..20: note = Target B2M Sequence complement
  source 1..20: mol_type = other DNA
ctcttatccaacatcaacat

SEQ ID NO: 11001 - DNA, 20 bp, synthetic construct
  misc_feature 1..20: note = Target B2M Sequence complement
  source 1..20: mol_type = other DNA
tcttatccaacatcaacatc

SEQ ID NO: 11002 - DNA, 20 bp, synthetic construct
  misc_feature 1..20: note = Target B2M Sequence complement
  source 1..20: mol_type = other DNA
cttatccaacatcaacatct

SEQ ID NO: 11003 - DNA, 20 bp, synthetic construct
  misc_feature 1..20: note = Target B2M Sequence complement
  source 1..20: mol_type = other DNA
ttatccaacatcaacatctt

SEQ ID NO: 11004 - DNA, 20 bp, synthetic construct
  misc_feature 1..20: note = Target B2M Sequence complement
  source 1..20: mol_type = other DNA
tatccaacatcaacatcttg

SEQ ID NO: 11005 - DNA, 20 bp, synthetic construct
  misc_feature 1..20: note = Target B2M Sequence complement
  source 1..20: mol_type = other DNA
atccaacatcaacatcttgg

SEQ ID NO: 11006 - DNA, 20 bp, synthetic construct
  misc_feature 1..20: note = Target B2M Sequence complement
  source 1..20: mol_type = other DNA
tccaacatcaacatcttggt

SEQ ID NO: 11007 - DNA, 20 bp, synthetic construct
  misc_feature 1..20: note = Target B2M Sequence complement
  source 1..20: mol_type = other DNA
ccaacatcaacatcttggtc

SEQ ID NO: 11008 - DNA, 20 bp, synthetic construct
  misc_feature 1..20: note = Target B2M Sequence complement
  source 1..20: mol_type = other DNA
caacatcaacatcttggtca

SEQ ID NO: 11009 - DNA, 20 bp, synthetic construct
  misc_feature 1..20: note = Target B2M Sequence complement
  source 1..20: mol_type = other DNA
aacatcaacatcttggtcag

SEQ ID NO: 11010 - DNA, 20 bp, synthetic construct
  misc_feature 1..20: note = Target B2M Sequence complement
  source 1..20: mol_type = other DNA
acatcaacatcttggtcaga

SEQ ID NO: 11011 - DNA, 20 bp, synthetic construct
  misc_feature 1..20: note = Target B2M Sequence complement
  source 1..20: mol_type = other DNA
catcaacatcttggtcagat

SEQ ID NO: 11012 - DNA, 20 bp, synthetic construct
  misc_feature 1..20: note = Target B2M Sequence complement
  source 1..20: mol_type = other DNA
atcaacatcttggtcagatt

SEQ ID NO: 11013 - DNA, 20 bp, synthetic construct
  misc_feature 1..20: note = Target B2M Sequence complement
  source 1..20: mol_type = other DNA
tcaacatcttggtcagattt

SEQ ID NO: 11014 - DNA, 20 bp, synthetic construct
  misc_feature 1..20: note = Target B2M Sequence complement
  source 1..20: mol_type = other DNA
caacatcttggtcagatttg

SEQ ID NO: 11015 - DNA, 20 bp, synthetic construct
  misc_feature 1..20: note = Target B2M Sequence complement
  source 1..20: mol_type = other DNA
aacatcttggtcagatttga

SEQ ID NO: 11016 - DNA, 20 bp, synthetic construct
  misc_feature 1..20: note = Target B2M Sequence complement
  source 1..20: mol_type = other DNA
acatcttggtcagatttgaa

SEQ ID NO: 11017 - DNA, 20 bp, synthetic construct
  misc_feature 1..20: note = Target B2M Sequence complement
  source 1..20: mol_type = other DNA
catcttggtcagatttgaac

SEQ ID NO: 11018 - DNA, 20 bp, synthetic construct
  misc_feature 1..20: note = Target B2M Sequence complement
  source 1..20: mol_type = other DNA
atcttggtcagatttgaact

SEQ ID NO: 11019 - DNA, 20 bp, synthetic construct
  misc_feature 1..20: note = Target B2M Sequence complement
  source 1..20: mol_type = other DNA
tcttggtcagatttgaactc

SEQ ID NO: 11020 - DNA, 20 bp, synthetic construct
  misc_feature 1..20: note = Target B2M Sequence complement
  source 1..20: mol_type = other DNA
cttggtcagatttgaactct

SEQ ID NO: 11021 - DNA, 20 bp, synthetic construct
  misc_feature 1..20: note = Target B2M Sequence complement
  source 1..20: mol_type = other DNA
ttggtcagatttgaactctt

SEQ ID NO: 11022 - DNA, 20 bp, synthetic construct
  misc_feature 1..20: note = Target B2M Sequence complement
  source 1..20: mol_type = other DNA
tggtcagatttgaactcttc

SEQ ID NO: 11023 - DNA, 20 bp, synthetic construct
  misc_feature 1..20: note = Target B2M Sequence complement
  source 1..20: mol_type = other DNA
ggtcagatttgaactcttca

SEQ ID NO: 11024 - DNA, 20 bp, synthetic construct
  misc_feature 1..20: note = Target B2M Sequence complement
  source 1..20: mol_type = other DNA
gtcagatttgaactcttcaa

SEQ ID NO: 11025 - DNA, 20 bp, synthetic construct
  misc_feature 1..20: note = Target B2M Sequence complement
  source 1..20: mol_type = other DNA
tcagatttgaactcttcaat

SEQ ID NO: 11026 - DNA, 20 bp, synthetic construct
  misc_feature 1..20: note = Target B2M Sequence complement
  source 1..20: mol_type = other DNA
cagatttgaactcttcaatc

SEQ ID NO: 11027 - DNA, 20 bp, synthetic construct
  misc_feature 1..20: note = Target B2M Sequence complement
  source 1..20: mol_type = other DNA
agatttgaactcttcaatct

SEQ ID NO: 11028 - DNA, 20 bp, synthetic construct
  misc_feature 1..20: note = Target B2M Sequence complement
  source 1..20: mol_type = other DNA
gatttgaactcttcaatctc

SEQ ID NO: 11029 - DNA, 20 bp, synthetic construct
  misc_feature 1..20: note = Target B2M Sequence complement
  source 1..20: mol_type = other DNA
atttgaactcttcaatctct

SEQ ID NO: 11030 - DNA, 20 bp, synthetic construct
  misc_feature 1..20: note = Target B2M Sequence complement
  source 1..20: mol_type = other DNA
tttgaactcttcaatctctt

SEQ ID NO: 11031 - DNA, 20 bp, synthetic construct
  misc_feature 1..20: note = Target B2M Sequence complement
  source 1..20: mol_type = other DNA
ttgaactcttcaatctcttg

SEQ ID NO: 11032 - DNA, 20 bp, synthetic construct
  misc_feature 1..20: note = Target B2M Sequence complement
  source 1..20: mol_type = other DNA
tgaactcttcaatctcttgc

SEQ ID NO: 11033 - DNA, 20 bp, synthetic construct
  misc_feature 1..20: note = Target B2M Sequence complement
  source 1..20: mol_type = other DNA
gaactcttcaatctcttgca

SEQ ID NO: 11034 - DNA, 20 bp, synthetic construct
  misc_feature 1..20: note = Target B2M Sequence complement
  source 1..20: mol_type = other DNA
aactcttcaatctcttgcac

SEQ ID NO: 11035 - DNA, 20 bp, synthetic construct
  misc_feature 1..20: note = Target B2M Sequence complement
  source 1..20: mol_type = other DNA
actcttcaatctcttgcact

SEQ ID NO: 11036 - DNA, 20 bp, synthetic construct
  misc_feature 1..20: note = Target B2M Sequence complement
  source 1..20: mol_type = other DNA
ctcttcaatctcttgcactc

SEQ ID NO: 11037 - DNA, 20 bp, synthetic construct
  misc_feature 1..20: note = Target B2M Sequence complement
  source 1..20: mol_type = other DNA
tcttcaatctcttgcactca

SEQ ID NO: 11038 - DNA, 20 bp, synthetic construct
  misc_feature 1..20: note = Target B2M Sequence complement
  source 1..20: mol_type = other DNA
cttcaatctcttgcactcaa

SEQ ID NO: 11039 - DNA, 20 bp, synthetic construct
  misc_feature 1..20: note = Target B2M Sequence complement
  source 1..20: mol_type = other DNA
ttcaatctcttgcactcaaa

SEQ ID NO: 11040 - DNA, 20 bp, synthetic construct
  misc_feature 1..20: note = Target B2M Sequence complement
  source 1..20: mol_type = other DNA
tcaatctcttgcactcaaag

SEQ ID NO: 11041 - DNA, 20 bp, synthetic construct
  misc_feature 1..20: note = Target B2M Sequence complement
  source 1..20: mol_type = other DNA
caatctcttgcactcaaagc

SEQ ID NO: 11042 - DNA, 20 bp, synthetic construct
  misc_feature 1..20: note = Target B2M Sequence complement
  source 1..20: mol_type = other DNA
aatctcttgcactcaaagct

SEQ ID NO: 11043 - DNA, 20 bp, synthetic construct
  misc_feature 1..20: note = Target B2M Sequence complement
  source 1..20: mol_type = other DNA
atctcttgcactcaaagctt

SEQ ID NO: 11044 - DNA, 20 bp, synthetic construct
  misc_feature 1..20: note = Target B2M Sequence complement
  source 1..20: mol_type = other DNA
tctcttgcactcaaagcttg

SEQ ID NO: 11045 - DNA, 20 bp, synthetic construct
  misc_feature 1..20: note = Target B2M Sequence complement
  source 1..20: mol_type = other DNA
ctcttgcactcaaagcttgt

SEQ ID NO: 11046 - DNA, 20 bp, synthetic construct
  misc_feature 1..20: note = Target B2M Sequence complement
  source 1..20: mol_type = other DNA
tcttgcactcaaagcttgtt

SEQ ID NO: 11047 - DNA, 20 bp, synthetic construct
  misc_feature 1..20: note = Target B2M Sequence complement
  source 1..20: mol_type = other DNA
cttgcactcaaagcttgtta

SEQ ID NO: 11048 - DNA, 20 bp, synthetic construct
  misc_feature 1..20: note = Target B2M Sequence complement
  source 1..20: mol_type = other DNA
ttgcactcaaagcttgttaa

SEQ ID NO: 11049 - DNA, 20 bp, synthetic construct
  misc_feature 1..20: note = Target B2M Sequence complement
  source 1..20: mol_type = other DNA
tgcactcaaagcttgttaag

SEQ ID NO: 11050 - DNA, 20 bp, synthetic construct
  misc_feature 1..20: note = Target B2M Sequence complement
  source 1..20: mol_type = other DNA
gcactcaaagcttgttaaga

SEQ ID NO: 11051 - DNA, 20 bp, synthetic construct
  misc_feature 1..20: note = Target B2M Sequence complement
  source 1..20: mol_type = other DNA
cactcaaagcttgttaagat

SEQ ID NO: 11052 - DNA, 20 bp, synthetic construct
  misc_feature 1..20: note = Target B2M Sequence complement
  source 1..20: mol_type = other DNA
actcaaagcttgttaagata

SEQ ID NO: 11053 - DNA, 20 bp, synthetic construct
  misc_feature 1..20: note = Target B2M Sequence complement
  source 1..20: mol_type = other DNA
ctcaaagcttgttaagatag

SEQ ID NO: 11054 - DNA, 20 bp, synthetic construct
  misc_feature 1..20: note = Target B2M Sequence complement
  source 1..20: mol_type = other DNA
tcaaagcttgttaagatagt

SEQ ID NO: 11055 - DNA, 20 bp, synthetic construct
  misc_feature 1..20: note = Target B2M Sequence complement
  source 1..20: mol_type = other DNA
caaagcttgttaagatagtt

SEQ ID NO: 11056 - DNA, 20 bp, synthetic construct
  misc_feature 1..20: note = Target B2M Sequence complement
  source 1..20: mol_type = other DNA
aaagcttgttaagatagtta

SEQ ID NO: 11057 - DNA, 20 bp, synthetic construct
  misc_feature 1..20: note = Target B2M Sequence complement
  source 1..20: mol_type = other DNA
aagcttgttaagatagttaa

SEQ ID NO: 11058 - DNA, 20 bp, synthetic construct
  misc_feature 1..20: note = Target B2M Sequence complement
  source 1..20: mol_type = other DNA
agcttgttaagatagttaag

SEQ ID NO: 11059 - DNA, 20 bp, synthetic construct
  misc_feature 1..20: note = Target B2M Sequence complement
  source 1..20: mol_type = other DNA
gcttgttaagatagttaagc

SEQ ID NO: 11060 - DNA, 20 bp, synthetic construct
  misc_feature 1..20: note = Target B2M Sequence complement
  source 1..20: mol_type = other DNA
cttgttaagatagttaagcg

SEQ ID NO: 11061 - DNA, 20 bp, synthetic construct
  misc_feature 1..20: note = Target B2M Sequence complement
  source 1..20: mol_type = other DNA
ttgttaagatagttaagcgt

SEQ ID NO: 11062 - DNA, 20 bp, synthetic construct
  misc_feature 1..20: note = Target B2M Sequence complement
  source 1..20: mol_type = other DNA
tgttaagatagttaagcgtg

SEQ ID NO: 11063 - DNA, 20 bp, synthetic construct
  misc_feature 1..20: note = Target B2M Sequence complement
  source 1..20: mol_type = other DNA
gttaagatagttaagcgtgc

SEQ ID NO: 11064 - DNA, 20 bp, synthetic construct
  misc_feature 1..20: note = Target B2M Sequence complement
  source 1..20: mol_type = other DNA
ttaagatagttaagcgtgca

SEQ ID NO: 11065 - DNA, 20 bp, synthetic construct
  misc_feature 1..20: note = Target B2M Sequence complement
  source 1..20: mol_type = other DNA
taagatagttaagcgtgcat

SEQ ID NO: 11066 - DNA, 20 bp, synthetic construct
  misc_feature 1..20: note = Target B2M Sequence complement
  source 1..20: mol_type = other DNA
aagatagttaagcgtgcata

SEQ ID NO: 11067 - DNA, 20 bp, synthetic construct
  misc_feature 1..20: note = Target B2M Sequence complement
  source 1..20: mol_type = other DNA
agatagttaagcgtgcataa

SEQ ID NO: 11068 - DNA, 20 bp, synthetic construct
  misc_feature 1..20: note = Target B2M Sequence complement
  source 1..20: mol_type = other DNA
gatagttaagcgtgcataag

SEQ ID NO: 11069 - DNA, 20 bp, synthetic construct
  misc_feature 1..20: note = Target B2M Sequence complement
  source 1..20: mol_type = other DNA
atagttaagcgtgcataagt

SEQ ID NO: 11070 - DNA, 20 bp, synthetic construct
  misc_feature 1..20: note = Target B2M Sequence complement
  source 1..20: mol_type = other DNA
tagttaagcgtgcataagtt

SEQ ID NO: 11071 - DNA, 20 bp, synthetic construct
  misc_feature 1..20: note = Target B2M Sequence complement
  source 1..20: mol_type = other DNA
agttaagcgtgcataagtta

SEQ ID NO: 11072 - DNA, 20 bp, synthetic construct
  misc_feature 1..20: note = Target B2M Sequence complement
  source 1..20: mol_type = other DNA
gttaagcgtgcataagttaa

SEQ ID NO: 11073 - DNA, 20 bp, synthetic construct
  misc_feature 1..20: note = Target B2M Sequence complement
  source 1..20: mol_type = other DNA
ttaagcgtgcataagttaac

SEQ ID NO: 11074 - DNA, 20 bp, synthetic construct
  misc_feature 1..20: note = Target B2M Sequence complement
  source 1..20: mol_type = other DNA
taagcgtgcataagttaact

SEQ ID NO: 11075 - DNA, 20 bp, synthetic construct
  misc_feature 1..20: note = Target B2M Sequence complement
  source 1..20: mol_type = other DNA
aagcgtgcataagttaactt

SEQ ID NO: 11076 - DNA, 20 bp, synthetic construct
  misc_feature 1..20: note = Target B2M Sequence complement
  source 1..20: mol_type = other DNA
agcgtgcataagttaacttc

SEQ ID NO: 11077 - DNA, 20 bp, synthetic construct
  misc_feature 1..20: note = Target B2M Sequence complement
  source 1..20: mol_type = other DNA
gcgtgcataagttaacttcc

SEQ ID NO: 11078 - DNA, 20 bp, synthetic construct
  misc_feature 1..20: note = Target B2M Sequence complement
  source 1..20: mol_type = other DNA
cgtgcataagttaacttcca

SEQ ID NO: 11079 - DNA, 20 bp, synthetic construct
  misc_feature 1..20: note = Target B2M Sequence complement
  source 1..20: mol_type = other DNA
gtgcataagttaacttccaa

SEQ ID NO: 11080 - DNA, 20 bp, synthetic construct
  misc_feature 1..20: note = Target B2M Sequence complement
  source 1..20: mol_type = other DNA
tgcataagttaacttccaat

SEQ ID NO: 11081 - DNA, 20 bp, synthetic construct
  misc_feature 1..20: note = Target B2M Sequence complement
  source 1..20: mol_type = other DNA
gcataagttaacttccaatt

SEQ ID NO: 11082 - DNA, 20 bp, synthetic construct
  misc_feature 1..20: note = Target B2M Sequence complement
  source 1..20: mol_type = other DNA
cataagttaacttccaattt

SEQ ID NO: 11083 - DNA, 20 bp, synthetic construct
  misc_feature 1..20: note = Target B2M Sequence complement
  source 1..20: mol_type = other DNA
taagttaacttccaatttac

SEQ ID NO: 11084 - DNA, 20 bp, synthetic construct
  misc_feature 1..20: note = Target B2M Sequence complement
  source 1..20: mol_type = other DNA
aagttaacttccaatttaca

SEQ ID NO: 11085 - DNA, 20 bp, synthetic construct
  misc_feature 1..20: note = Target B2M Sequence complement
  source 1..20: mol_type = other DNA
agttaacttccaatttacat

SEQ ID NO: 11086 - DNA, 20 bp, synthetic construct
  misc_feature 1..20: note = Target B2M Sequence complement
  source 1..20: mol_type = other DNA
gttaacttccaatttacata

SEQ ID NO: 11087 - DNA, 20 bp, synthetic construct
  misc_feature 1..20: note = Target B2M Sequence complement
  source 1..20: mol_type = other DNA
ttaacttccaatttacatac

SEQ ID NO: 11088 - DNA, 20 bp, synthetic construct
  misc_feature 1..20: note = Target B2M Sequence complement
  source 1..20: mol_type = other DNA
taacttccaatttacatact

SEQ ID NO: 11089 - DNA, 20 bp, synthetic construct
  misc_feature 1..20: note = Target B2M Sequence complement
  source 1..20: mol_type = other DNA
aacttccaatttacatactc

SEQ ID NO: 11090 - DNA, 20 bp, synthetic construct
  misc_feature 1..20: note = Target B2M Sequence complement
  source 1..20: mol_type = other DNA
acttccaatttacatactct

SEQ ID NO: 11091 - DNA, 20 bp, synthetic construct
  misc_feature 1..20: note = Target B2M Sequence complement
  source 1..20: mol_type = other DNA
cttccaatttacatactctg

SEQ ID NO: 11092 - DNA, 20 bp, synthetic construct
  misc_feature 1..20: note = Target B2M Sequence complement
  source 1..20: mol_type = other DNA
ttccaatttacatactctgc

SEQ ID NO: 11093 - DNA, 20 bp, synthetic construct
  misc_feature 1..20: note = Target B2M Sequence complement
  source 1..20: mol_type = other DNA
tccaatttacatactctgct

SEQ ID NO: 11094 - DNA, 20 bp, synthetic construct
  misc_feature 1..20: note = Target B2M Sequence complement
  source 1..20: mol_type = other DNA
ccaatttacatactctgctt

SEQ ID NO: 11095 - DNA, 20 bp, synthetic construct
  misc_feature 1..20: note = Target B2M Sequence complement
  source 1..20: mol_type = other DNA
caatttacatactctgctta

SEQ ID NO: 11096 - DNA, 20 bp, synthetic construct
  misc_feature 1..20: note = Target B2M Sequence complement
  source 1..20: mol_type = other DNA
aatttacatactctgcttag

SEQ ID NO: 11097 - DNA, 20 bp, synthetic construct
  misc_feature 1..20: note = Target B2M Sequence complement
  source 1..20: mol_type = other DNA
atttacatactctgcttaga

SEQ ID NO: 11098 - DNA, 20 bp, synthetic construct
  misc_feature 1..20: note = Target B2M Sequence complement
  source 1..20: mol_type = other DNA
tttacatactctgcttagaa

SEQ ID NO: 11099 - DNA, 20 bp, synthetic construct
  misc_feature 1..20: note = Target B2M Sequence complement
  source 1..20: mol_type = other DNA
ttacatactctgcttagaat

SEQ ID NO: 11100 - DNA, 20 bp, synthetic construct
  misc_feature 1..20: note = Target B2M Sequence complement
  source 1..20: mol_type = other DNA
tacatactctgcttagaatt

SEQ ID NO: 11101 - DNA, 20 bp, synthetic construct
  misc_feature 1..20: note = Target B2M Sequence complement
  source 1..20: mol_type = other DNA
acatactctgcttagaattt

SEQ ID NO: 11102 - DNA, 20 bp, synthetic construct
  misc_feature 1..20: note = Target B2M Sequence complement
  source 1..20: mol_type = other DNA
catactctgcttagaatttg

SEQ ID NO: 11103 - DNA, 20 bp, synthetic construct
  misc_feature 1..20: note = Target B2M Sequence complement
  source 1..20: mol_type = other DNA
atactctgcttagaatttgg

SEQ ID NO: 11104 - DNA, 20 bp, synthetic construct
  misc_feature 1..20: note = Target B2M Sequence complement
  source 1..20: mol_type = other DNA
tactctgcttagaatttggg

SEQ ID NO: 11105 - DNA, 20 bp, synthetic construct
  misc_feature 1..20: note = Target B2M Sequence complement
  source 1..20: mol_type = other DNA
ttagaaatataattgacagg

SEQ ID NO: 11106 - DNA, 20 bp, synthetic construct
  misc_feature 1..20: note = Target B2M Sequence complement
  source 1..20: mol_type = other DNA
tagaaatataattgacagga

SEQ ID NO: 11107 - DNA, 20 bp, synthetic construct
  misc_feature 1..20: note = Target B2M Sequence complement
  source 1..20: mol_type = other DNA
agaaatataattgacaggat

SEQ ID NO: 11108 - DNA, 20 bp, synthetic construct
  misc_feature 1..20: note = Target B2M Sequence complement
  source 1..20: mol_type = other DNA
gaaatataattgacaggatt

SEQ ID NO: 11109 - DNA, 20 bp, synthetic construct
  misc_feature 1..20: note = Target B2M Sequence complement
  source 1..20: mol_type = other DNA
tataattgacaggattattg

SEQ ID NO: 11110 - DNA, 20 bp, synthetic construct
  misc_feature 1..20: note = Target B2M Sequence complement
  source 1..20: mol_type = other DNA
ataattgacaggattattgg

SEQ ID NO: 11111 - DNA, 20 bp, synthetic construct
  misc_feature 1..20: note = Target B2M Sequence complement
  source 1..20: mol_type = other DNA
taattgacaggattattgga

SEQ ID NO: 11112 - DNA, 20 bp, synthetic construct
  misc_feature 1..20: note = Target B2M Sequence complement
  source 1..20: mol_type = other DNA
aattgacaggattattggaa

SEQ ID NO: 11113 - DNA, 20 bp, synthetic construct
  misc_feature 1..20: note = Target B2M Sequence complement
  source 1..20: mol_type = other DNA
attgacaggattattggaaa

SEQ ID NO: 11114 - DNA, 20 bp, synthetic construct
  misc_feature 1..20: note = Target B2M Sequence complement
  source 1..20: mol_type = other DNA
ttgacaggattattggaaat

SEQ ID NO: 11115 - DNA, 20 bp, synthetic construct
  misc_feature 1..20: note = Target B2M Sequence complement
  source 1..20: mol_type = other DNA
tgacaggattattggaaatt

SEQ ID NO: 11116 - DNA, 20 bp, synthetic construct
  misc_feature 1..20: note = Target B2M Sequence complement
  source 1..20: mol_type = other DNA
gacaggattattggaaattt

SEQ ID NO: 11117 - DNA, 20 bp, synthetic construct
  misc_feature 1..20: note = Target B2M Sequence complement
  source 1..20: mol_type = other DNA
acaggattattggaaatttg

SEQ ID NO: 11118 - DNA, 20 bp, synthetic construct
  misc_feature 1..20: note = Target B2M Sequence complement
  source 1..20: mol_type = other DNA
caggattattggaaatttgt

SEQ ID NO: 11119 - DNA, 20 bp, synthetic construct
  misc_feature 1..20: note = Target B2M Sequence complement
  source 1..20: mol_type = other DNA
aggattattggaaatttgtt

SEQ ID NO: 11120 - DNA, 20 bp, synthetic construct
  misc_feature 1..20: note = Target B2M Sequence complement
  source 1..20: mol_type = other DNA
ggattattggaaatttgtta

SEQ ID NO: 11121 - DNA, 20 bp, synthetic construct
  misc_feature 1..20: note = Target B2M Sequence complement
  source 1..20: mol_type = other DNA
atacatttgataaagtaagg

SEQ ID NO: 11122 - DNA, 20 bp, synthetic construct
  misc_feature 1..20: note = Target B2M Sequence complement
  source 1..20: mol_type = other DNA
tacatttgataaagtaaggc

SEQ ID NO: 11123 - DNA, 20 bp, synthetic construct
  misc_feature 1..20: note = Target B2M Sequence complement
  source 1..20: mol_type = other DNA
acatttgataaagtaaggca

SEQ ID NO: 11124 - DNA, 20 bp, synthetic construct
  misc_feature 1..20: note = Target B2M Sequence complement
  source 1..20: mol_type = other DNA
catttgataaagtaaggcat

SEQ ID NO: 11125 - DNA, 20 bp, synthetic construct
  misc_feature 1..20: note = Target B2M Sequence complement
  source 1..20: mol_type = other DNA
atttgataaagtaaggcatg

SEQ ID NO: 11126 - DNA, 20 bp, synthetic construct
  misc_feature 1..20: note = Target B2M Sequence complement
  source 1..20: mol_type = other DNA
tttgataaagtaaggcatgg

SEQ ID NO: 11127 - DNA, 20 bp, synthetic construct
  misc_feature 1..20: note = Target B2M Sequence complement
  source 1..20: mol_type = other DNA
ttgataaagtaaggcatggt

SEQ ID NO: 11128 - DNA, 20 bp, synthetic construct
  misc_feature 1..20: note = Target B2M Sequence complement
  source 1..20: mol_type = other DNA
tgataaagtaaggcatggtt

SEQ ID NO: 11129 - DNA, 20 bp, synthetic construct
  misc_feature 1..20: note = Target B2M Sequence complement
  source 1..20: mol_type = other DNA
gataaagtaaggcatggttg

SEQ ID NO: 11130 - DNA, 20 bp, synthetic construct
  misc_feature 1..20: note = Target B2M Sequence complement
  source 1..20: mol_type = other DNA
ataaagtaaggcatggttgt

SEQ ID NO: 11131 - DNA, 20 bp, synthetic construct
  misc_feature 1..20: note = Target B2M Sequence complement
  source 1..20: mol_type = other DNA
taaagtaaggcatggttgtg

SEQ ID NO: 11132 - DNA, 20 bp, synthetic construct
  misc_feature 1..20: note = Target B2M Sequence complement
  source 1..20: mol_type = other DNA
aaagtaaggcatggttgtgg

SEQ ID NO: 11133 - DNA, 20 bp, synthetic construct
  misc_feature 1..20: note = Target B2M Sequence complement
  source 1..20: mol_type = other DNA
aagtaaggcatggttgtggt

SEQ ID NO: 11134 - DNA, 20 bp, synthetic construct
  misc_feature 1..20: note = Target B2M Sequence complement
  source 1..20: mol_type = other DNA
agtaaggcatggttgtggtt

SEQ ID NO: 11135 - DNA, 20 bp, synthetic construct
  misc_feature 1..20: note = Target B2M Sequence complement
  source 1..20: mol_type = other DNA
gtaaggcatggttgtggtta

SEQ ID NO: 11136 - DNA, 20 bp, synthetic construct
  misc_feature 1..20: note = Target B2M Sequence complement
  source 1..20: mol_type = other DNA
taaggcatggttgtggttaa

SEQ ID NO: 11137 - DNA, 20 bp, synthetic construct
  misc_feature 1..20: note = Target B2M Sequence complement
  source 1..20: mol_type = other DNA
aaggcatggttgtggttaat

SEQ ID NO: 11138 - DNA, 20 bp, synthetic construct
  misc_feature 1..20: note = Target B2M Sequence complement
  source 1..20: mol_type = other DNA
aggcatggttgtggttaatc

SEQ ID NO: 11139 - DNA, 20 bp, synthetic construct
  misc_feature 1..20: note = Target B2M Sequence complement
  source 1..20: mol_type = other DNA
ggcatggttgtggttaatct

SEQ ID NO: 11140 - DNA, 20 bp, synthetic construct
  misc_feature 1..20: note = Target B2M Sequence complement
  source 1..20: mol_type = other DNA
gcatggttgtggttaatctg

SEQ ID NO: 11141 - DNA, 20 bp, synthetic construct
  misc_feature 1..20: note = Target B2M Sequence complement
  source 1..20: mol_type = other DNA
catggttgtggttaatctgg

SEQ ID NO: 11142 - DNA, 20 bp, synthetic construct
  misc_feature 1..20: note = Target B2M Sequence complement
  source 1..20: mol_type = other DNA
atggttgtggttaatctggt

SEQ ID NO: 11143 - DNA, 20 bp, synthetic construct
  misc_feature 1..20: note = Target B2M Sequence complement
  source 1..20: mol_type = other DNA
tggttgtggttaatctggtt

SEQ ID NO: 11144 - DNA, 20 bp, synthetic construct
  misc_feature 1..20: note = Target B2M Sequence complement
  source 1..20: mol_type = other DNA
ggttgtggttaatctggttt

SEQ ID NO: 11145 - DNA, 20 bp, synthetic construct
  misc_feature 1..20: note = Target B2M Sequence complement
  source 1..20: mol_type = other DNA
gttgtggttaatctggttta

SEQ ID NO: 11146 - DNA, 20 bp, synthetic construct
  misc_feature 1..20: note = Target B2M Sequence complement
  source 1..20: mol_type = other DNA
ttgtggttaatctggtttat

SEQ ID NO: 11147 - DNA, 20 bp, synthetic construct
  misc_feature 1..20: note = Target B2M Sequence complement
  source 1..20: mol_type = other DNA
tgtggttaatctggtttatt

SEQ ID NO: 11148 - DNA, 20 bp, synthetic construct
  misc_feature 1..20: note = Target B2M Sequence complement
  source 1..20: mol_type = other DNA
gtggttaatctggtttattt

SEQ ID NO: 11149 - DNA, 20 bp, synthetic construct
  misc_feature 1..20: note = Target B2M Sequence complement
  source 1..20: mol_type = other DNA
tttgttccacaagttaaata

SEQ ID NO: 11150 - DNA, 20 bp, synthetic construct
  misc_feature 1..20: note = Target B2M Sequence complement
  source 1..20: mol_type = other DNA
ttgttccacaagttaaataa

SEQ ID NO: 11151 - DNA, 20 bp, synthetic construct
  misc_feature 1..20: note = Target B2M Sequence complement
  source 1..20: mol_type = other DNA
tgttccacaagttaaataaa

SEQ ID NO: 11152 - DNA, 20 bp, synthetic construct
  misc_feature 1..20: note = Target B2M Sequence complement
  source 1..20: mol_type = other DNA
gttccacaagttaaataaat

SEQ ID NO: 11153 - DNA, 20 bp, synthetic construct
  misc_feature 1..20: note = Target B2M Sequence complement
  source 1..20: mol_type = other DNA
ttccacaagttaaataaatc

SEQ ID NO: 11154 - DNA, 20 bp, synthetic construct
  misc_feature 1..20: note = Target B2M Sequence complement
  source 1..20: mol_type = other DNA
tccacaagttaaataaatca

SEQ ID NO: 11155 - DNA, 20 bp, synthetic construct
  misc_feature 1..20: note = Target B2M Sequence complement
  source 1..20: mol_type = other DNA
ccacaagttaaataaatcat

SEQ ID NO: 11156 - DNA, 22 bp, synthetic construct
  misc_feature 1..22: note = Target B2M Sequence complement
  source 1..22: mol_type = other DNA
attcctgaagctgacagcattc

SEQ ID NO: 11157 - DNA, 22 bp, synthetic construct
  misc_feature 1..22: note = Target B2M Sequence complement
  source 1..22: mol_type = other DNA
ttcctgaagctgacagcattcg

SEQ ID NO: 11158 - DNA, 22 bp, synthetic construct
  misc_feature 1..22: note = Target B2M Sequence complement
  source 1..22: mol_type = other DNA
tcctgaagctgacagcattcgg

SEQ ID NO: 11159 - DNA, 22 bp, synthetic construct
  misc_feature 1..22: note = Target B2M Sequence complement
  source 1..22: mol_type = other DNA
cctgaagctgacagcattcggg

SEQ ID NO: 11160 - DNA, 22 bp, synthetic construct
  misc_feature 1..22: note = Target B2M Sequence complement
  source 1..22: mol_type = other DNA
ctgaagctgacagcattcgggc

SEQ ID NO: 11161 - DNA, 22 bp, synthetic construct
  misc_feature 1..22: note = Target B2M Sequence complement
  source 1..22: mol_type = other DNA
tgaagctgacagcattcgggcc

SEQ ID NO: 11162 - DNA, 22 bp, synthetic construct
  misc_feature 1..22: note = Target B2M Sequence complement
  source 1..22: mol_type = other DNA
agatgtctcgctccgtggcctt

SEQ ID NO: 11163 - DNA, 22 bp, synthetic construct
  misc_feature 1..22: note = Target B2M Sequence complement
  source 1..22: mol_type = other DNA
gatgtctcgctccgtggcctta

SEQ ID NO: 11164 - DNA, 22 bp, synthetic construct
  misc_feature 1..22: note = Target B2M Sequence complement
  source 1..22: mol_type = other DNA
atgtctcgctccgtggccttag

SEQ ID NO: 11165 - DNA, 22 bp, synthetic construct
  misc_feature 1..22: note = Target B2M Sequence complement
  source 1..22: mol_type = other DNA
ccttagctgtgctcgcgctact

SEQ ID NO: 11166 - DNA, 22 bp, synthetic construct
  misc_feature 1..22: note = Target B2M Sequence complement
  source 1..22: mol_type = other DNA
cttagctgtgctcgcgctactc

SEQ ID NO: 11167 - DNA, 22 bp, synthetic construct
  misc_feature 1..22: note = Target B2M Sequence complement
  source 1..22: mol_type = other DNA
ttagctgtgctcgcgctactct

SEQ ID NO: 11168 - DNA, 22 bp, synthetic construct
  misc_feature 1..22: note = Target B2M Sequence complement
  source 1..22: mol_type = other DNA
tagctgtgctcgcgctactctc

SEQ ID NO: 11169 - DNA, 22 bp, synthetic construct
  misc_feature 1..22: note = Target B2M Sequence complement
  source 1..22: mol_type = other DNA
agctgtgctcgcgctactctct

SEQ ID NO: 11170 - DNA, 22 bp, synthetic construct
  misc_feature 1..22: note = Target B2M Sequence complement
  source 1..22: mol_type = other DNA
ctgtgctcgcgctactctctct

SEQ ID NO: 11171 - DNA, 22 bp, synthetic construct
  misc_feature 1..22: note = Target B2M Sequence complement
  source 1..22: mol_type = other DNA
tgtgctcgcgctactctctctt

SEQ ID NO: 11172 - DNA, 22 bp, synthetic construct
  misc_feature 1..22: note = Target B2M Sequence complement
  source 1..22: mol_type = other DNA
gtgctcgcgctactctctcttt

SEQ ID NO: 11173 - DNA, 22 bp, synthetic construct
  misc_feature 1..22: note = Target B2M Sequence complement
  source 1..22: mol_type = other DNA
tgctcgcgctactctctctttc

SEQ ID NO: 11174 - DNA, 22 bp, synthetic construct
  misc_feature 1..22: note = Target B2M Sequence complement
  source 1..22: mol_type = other DNA
gctcgcgctactctctctttct

SEQ ID NO: 11175 - DNA, 22 bp, synthetic construct
  misc_feature 1..22: note = Target B2M Sequence complement
  source 1..22: mol_type = other DNA
ctcgcgctactctctctttctg

SEQ ID NO: 11176 - DNA, 22 bp, synthetic construct
  misc_feature 1..22: note = Target B2M Sequence complement
  source 1..22: mol_type = other DNA
tcgcgctactctctctttctgg

SEQ ID NO: 11177 - DNA, 22 bp, synthetic construct
  misc_feature 1..22: note = Target B2M Sequence complement
  source 1..22: mol_type = other DNA
cgcgctactctctctttctggc

SEQ ID NO: 11178 - DNA, 22 bp, synthetic construct
  misc_feature 1..22: note = Target B2M Sequence complement
  source 1..22: mol_type = other DNA
gcgctactctctctttctggcc

SEQ ID NO: 11179 - DNA, 22 bp, synthetic construct
  misc_feature 1..22: note = Target B2M Sequence complement
  source 1..22: mol_type = other DNA
cgctactctctctttctggcct

SEQ ID NO: 11180 - DNA, 22 bp, synthetic construct
  misc_feature 1..22: note = Target B2M Sequence complement
  source 1..22: mol_type = other DNA
gctactctctctttctggcctg

SEQ ID NO: 11181 - DNA, 22 bp, synthetic construct
  misc_feature 1..22: note = Target B2M Sequence complement
  source 1..22: mol_type = other DNA
ctactctctctttctggcctgg

SEQ ID NO: 11182 - DNA, 22 bp, synthetic construct
  misc_feature 1..22: note = Target B2M Sequence complement
  source 1..22: mol_type = other DNA
tactctctctttctggcctgga

SEQ ID NO: 11183 - DNA, 22 bp, synthetic construct
  misc_feature 1..22: note = Target B2M Sequence complement
  source 1..22: mol_type = other DNA
actctctctttctggcctggag

SEQ ID NO: 11184 - DNA, 22 bp, synthetic construct
  misc_feature 1..22: note = Target B2M Sequence complement
  source 1..22: mol_type = other DNA
ctctctctttctggcctggagg

SEQ ID NO: 11185 - DNA, 22 bp, synthetic construct
  misc_feature 1..22: note = Target B2M Sequence complement
  source 1..22: mol_type = other DNA
tctctctttctggcctggaggc

SEQ ID NO: 11186 - DNA, 22 bp, synthetic construct
  misc_feature 1..22: note = Target B2M Sequence complement
  source 1..22: mol_type = other DNA
ctctctttctggcctggaggct

SEQ ID NO: 11187 - DNA, 22 bp, synthetic construct
  misc_feature 1..22: note = Target B2M Sequence complement
  source 1..22: mol_type = other DNA
tctctttctggcctggaggcta

SEQ ID NO: 11188 - DNA, 22 bp, synthetic construct
  misc_feature 1..22: note = Target B2M Sequence complement
  source 1..22: mol_type = other DNA
ctctttctggcctggaggctat

SEQ ID NO: 11189 - DNA, 22 bp, synthetic construct
  misc_feature 1..22: note = Target B2M Sequence complement
  source 1..22: mol_type = other DNA
tctttctggcctggaggctatc

SEQ ID NO: 11190 - DNA, 22 bp, synthetic construct
  misc_feature 1..22: note = Target B2M Sequence complement
  source 1..22: mol_type = other DNA
ctttctggcctggaggctatcc

SEQ ID NO: 11191 - DNA, 22 bp, synthetic construct
  misc_feature 1..22: note = Target B2M Sequence complement
  source 1..22: mol_type = other DNA
tttctggcctggaggctatcca

SEQ ID NO: 11192 - DNA, 22 bp, synthetic construct
  misc_feature 1..22: note = Target B2M Sequence complement
  source 1..22: mol_type = other DNA
ttctggcctggaggctatccag

SEQ ID NO: 11193 - DNA, 22 bp, synthetic construct
  misc_feature 1..22: note = Target B2M Sequence complement
  source 1..22: mol_type = other DNA
cctggaggctatccagcgtact

SEQ ID NO: 11194 - DNA, 22 bp, synthetic construct
  misc_feature 1..22: note = Target B2M Sequence complement
  source 1..22: mol_type = other DNA
ctggaggctatccagcgtactc

SEQ ID NO: 11195 - DNA, 22 bp, synthetic construct
  misc_feature 1..22: note = Target B2M Sequence complement
  source 1..22: mol_type = other DNA
tggaggctatccagcgtactcc

SEQ ID NO: 11196 - DNA, 22 bp, synthetic construct
  misc_feature 1..22: note = Target B2M Sequence complement
  source 1..22: mol_type = other DNA
ggaggctatccagcgtactcca

SEQ ID NO: 11197 - DNA, 22 bp, synthetic construct
  misc_feature 1..22: note = Target B2M Sequence complement
  source 1..22: mol_type = other DNA
gaggctatccagcgtactccaa

SEQ ID NO: 11198 - DNA, 22 bp, synthetic construct
  misc_feature 1..22: note = Target B2M Sequence complement
  source 1..22: mol_type = other DNA
aggctatccagcgtactccaaa

SEQ ID NO: 11199 - DNA, 22 bp, synthetic construct
  misc_feature 1..22: note = Target B2M Sequence complement
  source 1..22: mol_type = other DNA
ggctatccagcgtactccaaag

SEQ ID NO: 11200 - DNA, 22 bp, synthetic construct
  misc_feature 1..22: note = Target B2M Sequence complement
  source 1..22: mol_type = other DNA
gctatccagcgtactccaaaga

SEQ ID NO: 11201 - DNA, 22 bp, synthetic construct
  misc_feature 1..22: note = Target B2M Sequence complement
  source 1..22: mol_type = other DNA
ctatccagcgtactccaaagat

SEQ ID NO: 11202 - DNA, 22 bp, synthetic construct
  misc_feature 1..22: note = Target B2M Sequence complement
  source 1..22: mol_type = other DNA
tatccagcgtactccaaagatt

SEQ ID NO: 11203 - DNA, 22 bp, synthetic construct
  misc_feature 1..22: note = Target B2M Sequence complement
  source 1..22: mol_type = other DNA
atccagcgtactccaaagattc

SEQ ID NO: 11204 - DNA, 22 bp, synthetic construct
  misc_feature 1..22: note = Target B2M Sequence complement
  source 1..22: mol_type = other DNA
tccagcgtactccaaagattca

SEQ ID NO: 11205 - DNA, 22 bp, synthetic construct
  misc_feature 1..22: note = Target B2M Sequence complement
  source 1..22: mol_type = other DNA
ccagcgtactccaaagattcag

SEQ ID NO: 11206 - DNA, 22 bp, synthetic construct
  misc_feature 1..22: note = Target B2M Sequence complement
  source 1..22: mol_type = other DNA
cagcgtactccaaagattcagg

SEQ ID NO: 11207 - DNA, 22 bp, synthetic construct
  misc_feature 1..22: note = Target B2M Sequence complement
  source 1..22: mol_type = other DNA
agcgtactccaaagattcaggt

SEQ ID NO: 11208 - DNA, 22 bp, synthetic construct
  misc_feature 1..22: note = Target B2M Sequence complement
  source 1..22: mol_type = other DNA
gcgtactccaaagattcaggtt

SEQ ID NO: 11209 - DNA, 22 bp, synthetic construct
  misc_feature 1..22: note = Target B2M Sequence complement
  source 1..22: mol_type = other DNA
cgtactccaaagattcaggttt

SEQ ID NO: 11210 - DNA, 22 bp, synthetic construct
  misc_feature 1..22: note = Target B2M Sequence complement
  source 1..22: mol_type = other DNA
gtactccaaagattcaggttta

SEQ ID NO: 11211 - DNA, 22 bp, synthetic construct
  misc_feature 1..22: note = Target B2M Sequence complement
  source 1..22: mol_type = other DNA
tactccaaagattcaggtttac

SEQ ID NO: 11212 - DNA, 22 bp, synthetic construct
  misc_feature 1..22: note = Target B2M Sequence complement
  source 1..22: mol_type = other DNA
actccaaagattcaggtttact

SEQ ID NO: 11213 - DNA, 22 bp, synthetic construct
  misc_feature 1..22: note = Target B2M Sequence complement
  source 1..22: mol_type = other DNA
ctccaaagattcaggtttactc

SEQ ID NO: 11214 - DNA, 22 bp, synthetic construct
  misc_feature 1..22: note = Target B2M Sequence complement
  source 1..22: mol_type = other DNA
tccaaagattcaggtttactca

SEQ ID NO: 11215 - DNA, 22 bp, synthetic construct
  misc_feature 1..22: note = Target B2M Sequence complement
  source 1..22: mol_type = other DNA
ccaaagattcaggtttactcac

SEQ ID NO: 11216 - DNA, 22 bp, synthetic construct
  misc_feature 1..22: note = Target B2M Sequence complement
  source 1..22: mol_type = other DNA
caaagattcaggtttactcacg

SEQ ID NO: 11217 - DNA, 22 bp, synthetic construct
  misc_feature 1..22: note = Target B2M Sequence complement
  source 1..22: mol_type = other DNA
aaagattcaggtttactcacgt

SEQ ID NO: 11218 - DNA, 22 bp, synthetic construct
  misc_feature 1..22: note = Target B2M Sequence complement
  source 1..22: mol_type = other DNA
aagattcaggtttactcacgtc

SEQ ID NO: 11219 - DNA, 22 bp, synthetic construct
  misc_feature 1..22: note = Target B2M Sequence complement
  source 1..22: mol_type = other DNA
agattcaggtttactcacgtca

SEQ ID NO: 11220 - DNA, 22 bp, synthetic construct
  misc_feature 1..22: note = Target B2M Sequence complement
  source 1..22: mol_type = other DNA
gattcaggtttactcacgtcat

SEQ ID NO: 11221 - DNA, 22 bp, synthetic construct
  misc_feature 1..22: note = Target B2M Sequence complement
  source 1..22: mol_type = other DNA
attcaggtttactcacgtcatc

SEQ ID NO: 11222 - DNA, 22 bp, synthetic construct
  misc_feature 1..22: note = Target B2M Sequence complement
  source 1..22: mol_type = other DNA
ttcaggtttactcacgtcatcc

SEQ ID NO: 11223 - DNA, 22 bp, synthetic construct
  misc_feature 1..22: note = Target B2M Sequence complement
  source 1..22: mol_type = other DNA
tcaggtttactcacgtcatcca

SEQ ID NO: 11224 - DNA, 22 bp, synthetic construct
  misc_feature 1..22: note = Target B2M Sequence complement
  source 1..22: mol_type = other DNA
caggtttactcacgtcatccag

SEQ ID NO: 11225 - DNA, 22 bp, synthetic construct
  misc_feature 1..22: note = Target B2M Sequence complement
  source 1..22: mol_type = other DNA
aggtttactcacgtcatccagc

SEQ ID NO: 11226 - DNA, 22 bp, synthetic construct
  misc_feature 1..22: note = Target B2M Sequence complement
  source 1..22: mol_type = other DNA
ggtttactcacgtcatccagca

SEQ ID NO: 11227 - DNA, 22 bp, synthetic construct
  misc_feature 1..22: note = Target B2M Sequence complement
  source 1..22: mol_type = other DNA
gtttactcacgtcatccagcag

SEQ ID NO: 11228 - DNA, 22 bp, synthetic construct
  misc_feature 1..22: note = Target B2M Sequence complement
  source 1..22: mol_type = other DNA
tttactcacgtcatccagcaga

SEQ ID NO: 11229 - DNA, 22 bp, synthetic construct
  misc_feature 1..22: note = Target B2M Sequence complement
  source 1..22: mol_type = other DNA
ttactcacgtcatccagcagag

SEQ ID NO: 11230 - DNA, 22 bp, synthetic construct
  misc_feature 1..22: note = Target B2M Sequence complement
  source 1..22: mol_type = other DNA
tactcacgtcatccagcagaga

SEQ ID NO: 11231 - DNA, 22 bp, synthetic construct
  misc_feature 1..22: note = Target B2M Sequence complement
  source 1..22: mol_type = other DNA
actcacgtcatccagcagagaa

SEQ ID NO: 11232 - DNA, 22 bp, synthetic construct
  misc_feature 1..22: note = Target B2M Sequence complement
  source 1..22: mol_type = other DNA
ctcacgtcatccagcagagaat

SEQ ID NO: 11233 - DNA, 22 bp, synthetic construct
  misc_feature 1..22: note = Target B2M Sequence complement
  source 1..22: mol_type = other DNA
tcacgtcatccagcagagaatg

SEQ ID NO: 11234 - DNA, 22 bp, synthetic construct
  misc_feature 1..22: note = Target B2M Sequence complement
  source 1..22: mol_type = other DNA
cacgtcatccagcagagaatgg

SEQ ID NO: 11235 - DNA, 22 bp, synthetic construct
  misc_feature 1..22: note = Target B2M Sequence complement
  source 1..22: mol_type = other DNA
acgtcatccagcagagaatgga

SEQ ID NO: 11236 - DNA, 22 bp, synthetic construct
  misc_feature 1..22: note = Target B2M Sequence complement
  source 1..22: mol_type = other DNA
cgtcatccagcagagaatggaa

SEQ ID NO: 11237 - DNA, 22 bp, synthetic construct
  misc_feature 1..22: note = Target B2M Sequence complement
  source 1..22: mol_type = other DNA
gtcatccagcagagaatggaaa

SEQ ID NO: 11238 - DNA, 22 bp, synthetic construct
  misc_feature 1..22: note = Target B2M Sequence complement
  source 1..22: mol_type = other DNA
tcatccagcagagaatggaaag

SEQ ID NO: 11239 - DNA, 22 bp, synthetic construct
  misc_feature 1..22: note = Target B2M Sequence complement
  source 1..22: mol_type = other DNA
catccagcagagaatggaaagt

SEQ ID NO: 11240 - DNA, 22 bp, synthetic construct
  misc_feature 1..22: note = Target B2M Sequence complement
  source 1..22: mol_type = other DNA
atccagcagagaatggaaagtc

SEQ ID NO: 11241 - DNA, 22 bp, synthetic construct
  misc_feature 1..22: note = Target B2M Sequence complement
  source 1..22: mol_type = other DNA
tccagcagagaatggaaagtca

SEQ ID NO: 11242 - DNA, 22 bp, synthetic construct
  misc_feature 1..22: note = Target B2M Sequence complement
  source 1..22: mol_type = other DNA
ccagcagagaatggaaagtcaa

SEQ ID NO: 11243 - DNA, 22 bp, synthetic construct
  misc_feature 1..22: note = Target B2M Sequence complement
  source 1..22: mol_type = other DNA
cagcagagaatggaaagtcaaa

SEQ ID NO: 11244 - DNA, 22 bp, synthetic construct
  misc_feature 1..22: note = Target B2M Sequence complement
  source 1..22: mol_type = other DNA
agcagagaatggaaagtcaaat

SEQ ID NO: 11245 - DNA, 22 bp, synthetic construct
  misc_feature 1..22: note = Target B2M Sequence complement
  source 1..22: mol_type = other DNA
gcagagaatggaaagtcaaatt

SEQ ID NO: 11246 - DNA, 22 bp, synthetic construct
  misc_feature 1..22: note = Target B2M Sequence complement
  source 1..22: mol_type = other DNA
cagagaatggaaagtcaaattt

SEQ ID NO: 11247 - DNA, 22 bp, synthetic construct
  misc_feature 1..22: note = Target B2M Sequence complement
  source 1..22: mol_type = other DNA
agagaatggaaagtcaaatttc

SEQ ID NO: 11248 - DNA, 22 bp, synthetic construct
  misc_feature 1..22: note = Target B2M Sequence complement
  source 1..22: mol_type = other DNA
gagaatggaaagtcaaatttcc

SEQ ID NO: 11249 - DNA, 22 bp, synthetic construct
  misc_feature 1..22: note = Target B2M Sequence complement
  source 1..22: mol_type = other DNA
agaatggaaagtcaaatttcct

SEQ ID NO: 11250 - DNA, 22 bp, synthetic construct
  misc_feature 1..22: note = Target B2M Sequence complement
  source 1..22: mol_type = other DNA
gaatggaaagtcaaatttcctg

SEQ ID NO: 11251 - DNA, 22 bp, synthetic construct
  misc_feature 1..22: note = Target B2M Sequence complement
  source 1..22: mol_type = other DNA
aatggaaagtcaaatttcctga

SEQ ID NO: 11252 - DNA, 22 bp, synthetic construct
  misc_feature 1..22: note = Target B2M Sequence complement
  source 1..22: mol_type = other DNA
atggaaagtcaaatttcctgaa

SEQ ID NO: 11253 - DNA, 22 bp, synthetic construct
  misc_feature 1..22: note = Target B2M Sequence complement
  source 1..22: mol_type = other DNA
tggaaagtcaaatttcctgaat

SEQ ID NO: 11254 - DNA, 22 bp, synthetic construct
  misc_feature 1..22: note = Target B2M Sequence complement
  source 1..22: mol_type = other DNA
ggaaagtcaaatttcctgaatt

SEQ ID NO: 11255 - DNA, 22 bp, synthetic construct
  misc_feature 1..22: note = Target B2M Sequence complement
  source 1..22: mol_type = other DNA
gaaagtcaaatttcctgaattg

SEQ ID NO: 11256 - DNA, 22 bp, synthetic construct
  misc_feature 1..22: note = Target B2M Sequence complement
  source 1..22: mol_type = other DNA
aaagtcaaatttcctgaattgc

SEQ ID NO: 11257 - DNA, 22 bp, synthetic construct
  misc_feature 1..22: note = Target B2M Sequence complement
  source 1..22: mol_type = other DNA
aagtcaaatttcctgaattgct

SEQ ID NO: 11258 - DNA, 22 bp, synthetic construct
  misc_feature 1..22: note = Target B2M Sequence complement
  source 1..22: mol_type = other DNA
agtcaaatttcctgaattgcta

SEQ ID NO: 11259 - DNA, 22 bp, synthetic construct
  misc_feature 1..22: note = Target B2M Sequence complement
  source 1..22: mol_type = other DNA
gtcaaatttcctgaattgctat

SEQ ID NO: 11260 - DNA, 22 bp, synthetic construct
  misc_feature 1..22: note = Target B2M Sequence complement
  source 1..22: mol_type = other DNA
tcaaatttcctgaattgctatg

SEQ ID NO: 11261 - DNA, 22 bp, synthetic construct
  misc_feature 1..22: note = Target B2M Sequence complement
  source 1..22: mol_type = other DNA
caaatttcctgaattgctatgt

SEQ ID NO: 11262 - DNA, 22 bp, synthetic construct
  misc_feature 1..22: note = Target B2M Sequence complement
  source 1..22: mol_type = other DNA
aaatttcctgaattgctatgtg

SEQ ID NO: 11263 - DNA, 22 bp, synthetic construct
  misc_feature 1..22: note = Target B2M Sequence complement
  source 1..22: mol_type = other DNA
aatttcctgaattgctatgtgt

SEQ ID NO: 11264 - DNA, 22 bp, synthetic construct
  misc_feature 1..22: note = Target B2M Sequence complement
  source 1..22: mol_type = other DNA
atttcctgaattgctatgtgtc

SEQ ID NO: 11265 - DNA, 22 bp, synthetic construct
  misc_feature 1..22: note = Target B2M Sequence complement
  source 1..22: mol_type = other DNA
tttcctgaattgctatgtgtct

SEQ ID NO: 11266 - DNA, 22 bp, synthetic construct
  misc_feature 1..22: note = Target B2M Sequence complement
  source 1..22: mol_type = other DNA
ttcctgaattgctatgtgtctg

SEQ ID NO: 11267 - DNA, 22 bp, synthetic construct
  misc_feature 1..22: note = Target B2M Sequence complement
  source 1..22: mol_type = other DNA
tcctgaattgctatgtgtctgg

SEQ ID NO: 11268 - DNA, 22 bp, synthetic construct
  misc_feature 1..22: note = Target B2M Sequence complement
  source 1..22: mol_type = other DNA
cctgaattgctatgtgtctggg

SEQ ID NO: 11269 - DNA, 22 bp, synthetic construct
  misc_feature 1..22: note = Target B2M Sequence complement
  source 1..22: mol_type = other DNA
ctgaattgctatgtgtctgggt

SEQ ID NO: 11270 - DNA, 22 bp, synthetic construct
  misc_feature 1..22: note = Target B2M Sequence complement
  source 1..22: mol_type = other DNA
tgaattgctatgtgtctgggtt

SEQ ID NO: 11271 - DNA, 22 bp, synthetic construct
  misc_feature 1..22: note = Target B2M Sequence complement
  source 1..22: mol_type = other DNA
gaattgctatgtgtctgggttt

SEQ ID NO: 11272 - DNA, 22 bp, synthetic construct
  misc_feature 1..22: note = Target B2M Sequence complement
  source 1..22: mol_type = other DNA
aattgctatgtgtctgggtttc

SEQ ID NO: 11273 - DNA, 22 bp, synthetic construct
  misc_feature 1..22: note = Target B2M Sequence complement
  source 1..22: mol_type = other DNA
attgctatgtgtctgggtttca

SEQ ID NO: 11274 - DNA, 22 bp, synthetic construct
  misc_feature 1..22: note = Target B2M Sequence complement
  source 1..22: mol_type = other DNA
ttgctatgtgtctgggtttcat

SEQ ID NO: 11275 - DNA, 22 bp, synthetic construct
  misc_feature 1..22: note = Target B2M Sequence complement
  source 1..22: mol_type = other DNA
tgctatgtgtctgggtttcatc

SEQ ID NO: 11276 - DNA, 22 bp, synthetic construct
  misc_feature 1..22: note = Target B2M Sequence complement
  source 1..22: mol_type = other DNA
gctatgtgtctgggtttcatcc

SEQ ID NO: 11277 - DNA, 22 bp, synthetic construct
  misc_feature 1..22: note = Target B2M Sequence complement
  source 1..22: mol_type = other DNA
ctatgtgtctgggtttcatcca

SEQ ID NO: 11278 - DNA, 22 bp, synthetic construct
  misc_feature 1..22: note = Target B2M Sequence complement
  source 1..22: mol_type = other DNA
tatgtgtctgggtttcatccat

SEQ ID NO: 11279 - DNA, 22 bp, synthetic construct
  misc_feature 1..22: note = Target B2M Sequence complement
  source 1..22: mol_type = other DNA
atgtgtctgggtttcatccatc

SEQ ID NO: 11280 - DNA, 22 bp, synthetic construct
  misc_feature 1..22: note = Target B2M Sequence complement
  source 1..22: mol_type = other DNA
tgtgtctgggtttcatccatcc

SEQ ID NO: 11281 - DNA, 22 bp, synthetic construct
  misc_feature 1..22: note = Target B2M Sequence complement
  source 1..22: mol_type = other DNA
gtgtctgggtttcatccatccg

SEQ ID NO: 11282 - DNA, 22 bp, synthetic construct
  misc_feature 1..22: note = Target B2M Sequence complement
  source 1..22: mol_type = other DNA
tgtctgggtttcatccatccga

SEQ ID NO: 11283 - DNA, 22 bp, synthetic construct
  misc_feature 1..22: note = Target B2M Sequence complement
  source 1..22: mol_type = other DNA
gtctgggtttcatccatccgac

SEQ ID NO: 11284 - DNA, 22 bp, synthetic construct
  misc_feature 1..22: note = Target B2M Sequence complement
  source 1..22: mol_type = other DNA
tctgggtttcatccatccgaca

SEQ ID NO: 11285 - DNA, 22 bp, synthetic construct
  misc_feature 1..22: note = Target B2M Sequence complement
  source 1..22: mol_type = other DNA
ctgggtttcatccatccgacat

SEQ ID NO: 11286 - DNA, 22 bp, synthetic construct
  misc_feature 1..22: note = Target B2M Sequence complement
  source 1..22: mol_type = other DNA
tgggtttcatccatccgacatt

SEQ ID NO: 11287 - DNA, 22 bp, synthetic construct
  misc_feature 1..22: note = Target B2M Sequence complement
  source 1..22: mol_type = other DNA
gggtttcatccatccgacattg

SEQ ID NO: 11288 - DNA, 22 bp, synthetic construct
  misc_feature 1..22: note = Target B2M Sequence complement
  source 1..22: mol_type = other DNA
ggtttcatccatccgacattga

SEQ ID NO: 11289 - DNA, 22 bp, synthetic construct
  misc_feature 1..22: note = Target B2M Sequence complement
  source 1..22: mol_type = other DNA
gtttcatccatccgacattgaa

SEQ ID NO: 11290 - DNA, 22 bp, synthetic construct
  misc_feature 1..22: note = Target B2M Sequence complement
  source 1..22: mol_type = other DNA
tttcatccatccgacattgaag

SEQ ID NO: 11291 - DNA, 22 bp, synthetic construct
  misc_feature 1..22: note = Target B2M Sequence complement
  source 1..22: mol_type = other DNA
ttcatccatccgacattgaagt

SEQ ID NO: 11292 - DNA, 22 bp, synthetic construct
  misc_feature 1..22: note = Target B2M Sequence complement
  source 1..22: mol_type = other DNA
tcatccatccgacattgaagtt

SEQ ID NO: 11293 - DNA, 22 bp, synthetic construct
  misc_feature 1..22: note = Target B2M Sequence complement
  source 1..22: mol_type = other DNA
catccatccgacattgaagttg

SEQ ID NO: 11294 - DNA, 22 bp, synthetic construct
  misc_feature 1..22: note = Target B2M Sequence complement
  source 1..22: mol_type = other DNA
atccatccgacattgaagttga

SEQ ID NO: 11295 - DNA, 22 bp, synthetic construct
  misc_feature 1..22: note = Target B2M Sequence complement
  source 1..22: mol_type = other DNA
tccatccgacattgaagttgac

SEQ ID NO: 11296 - DNA, 22 bp, synthetic construct
  misc_feature 1..22: note = Target B2M Sequence complement
  source 1..22: mol_type = other DNA
ccatccgacattgaagttgact

SEQ ID NO: 11297 - DNA, 22 bp, synthetic construct
  misc_feature 1..22: note = Target B2M Sequence complement
  source 1..22: mol_type = other DNA
catccgacattgaagttgactt

SEQ ID NO: 11298 - DNA, 22 bp, synthetic construct
  misc_feature 1..22: note = Target B2M Sequence complement
  source 1..22: mol_type = other DNA
atccgacattgaagttgactta

SEQ ID NO: 11299 - DNA, 22 bp, synthetic construct
  misc_feature 1..22: note = Target B2M Sequence complement
  source 1..22: mol_type = other DNA
tccgacattgaagttgacttac

SEQ ID NO: 11300 - DNA, 22 bp, synthetic construct
  misc_feature 1..22: note = Target B2M Sequence complement
  source 1..22: mol_type = other DNA
ccgacattgaagttgacttact

SEQ ID NO: 11301 - DNA, 22 bp, synthetic construct
  misc_feature 1..22: note = Target B2M Sequence complement
  source 1..22: mol_type = other DNA
cgacattgaagttgacttactg

SEQ ID NO: 11302 - DNA, 22 bp, synthetic construct
  misc_feature 1..22: note = Target B2M Sequence complement
  source 1..22: mol_type = other DNA
gacattgaagttgacttactga

SEQ ID NO: 11303 - DNA, 22 bp, synthetic construct
  misc_feature 1..22: note = Target B2M Sequence complement
  source 1..22: mol_type = other DNA
acattgaagttgacttactgaa

SEQ ID NO: 11304 - DNA, 22 bp, synthetic construct
  misc_feature 1..22: note = Target B2M Sequence complement
  source 1..22: mol_type = other DNA
cattgaagttgacttactgaag

SEQ ID NO: 11305 - DNA, 22 bp, synthetic construct
  misc_feature 1..22: note = Target B2M Sequence complement
  source 1..22: mol_type = other DNA
attgaagttgacttactgaaga

SEQ ID NO: 11306 - DNA, 22 bp, synthetic construct
  misc_feature 1..22: note = Target B2M Sequence complement
  source 1..22: mol_type = other DNA
ttgaagttgacttactgaagaa

SEQ ID NO: 11307 - DNA, 22 bp, synthetic construct
  misc_feature 1..22: note = Target B2M Sequence complement
  source 1..22: mol_type = other DNA
tgaagttgacttactgaagaat

SEQ ID NO: 11308 - DNA, 22 bp, synthetic construct
  misc_feature 1..22: note = Target B2M Sequence complement
  source 1..22: mol_type = other DNA
gaagttgacttactgaagaatg

SEQ ID NO: 11309 - DNA, 22 bp, synthetic construct
  misc_feature 1..22: note = Target B2M Sequence complement
  source 1..22: mol_type = other DNA
aagttgacttactgaagaatgg

SEQ ID NO: 11310 - DNA, 22 bp, synthetic construct
  misc_feature 1..22: note = Target B2M Sequence complement
  source 1..22: mol_type = other DNA
agttgacttactgaagaatgga

SEQ ID NO: 11311 - DNA, 22 bp, synthetic construct
  misc_feature 1..22: note = Target B2M Sequence complement
  source 1..22: mol_type = other DNA
gttgacttactgaagaatggag

SEQ ID NO: 11312 - DNA, 22 bp, synthetic construct
  misc_feature 1..22: note = Target B2M Sequence complement
  source 1..22: mol_type = other DNA
ttgacttactgaagaatggaga

SEQ ID NO: 11313 - DNA, 22 bp, synthetic construct
  misc_feature 1..22: note = Target B2M Sequence complement
  source 1..22: mol_type = other DNA
tgacttactgaagaatggagag

SEQ ID NO: 11314 - DNA, 22 bp, synthetic construct
  misc_feature 1..22: note = Target B2M Sequence complement
  source 1..22: mol_type = other DNA
gacttactgaagaatggagaga

SEQ ID NO: 11315 - DNA, 22 bp, synthetic construct
  misc_feature 1..22: note = Target B2M Sequence complement
  source 1..22: mol_type = other DNA
acttactgaagaatggagagag

SEQ ID NO: 11316 - DNA, 22 bp, synthetic construct
  misc_feature 1..22: note = Target B2M Sequence complement
  source 1..22: mol_type = other DNA
cttactgaagaatggagagaga

SEQ ID NO: 11317 - DNA, 22 bp, synthetic construct
  misc_feature 1..22: note = Target B2M Sequence complement
  source 1..22: mol_type = other DNA
ttactgaagaatggagagagaa

SEQ ID NO: 11318 - DNA, 22 bp, synthetic construct
  misc_feature 1..22: note = Target B2M Sequence complement
  source 1..22: mol_type = other DNA
tactgaagaatggagagagaat

SEQ ID NO: 11319 - DNA, 22 bp, synthetic construct
  misc_feature 1..22: note = Target B2M Sequence complement
  source 1..22: mol_type = other DNA
actgaagaatggagagagaatt

SEQ ID NO: 11320 - DNA, 22 bp, synthetic construct
  misc_feature 1..22: note = Target B2M Sequence complement
  source 1..22: mol_type = other DNA
ctgaagaatggagagagaattg

SEQ ID NO: 11321 - DNA, 22 bp, synthetic construct
  misc_feature 1..22: note = Target B2M Sequence complement
  source 1..22: mol_type = other DNA
tgaagaatggagagagaattga

SEQ ID NO: 11322 - DNA, 22 bp, synthetic construct
  misc_feature 1..22: note = Target B2M Sequence complement
  source 1..22: mol_type = other DNA
gaagaatggagagagaattgaa

SEQ ID NO: 11323 - DNA, 22 bp, synthetic construct
  misc_feature 1..22: note = Target B2M Sequence complement
  source 1..22: mol_type = other DNA
aagaatggagagagaattgaaa

SEQ ID NO: 11324 - DNA, 22 bp, synthetic construct
  misc_feature 1..22: note = Target B2M Sequence complement
  source 1..22: mol_type = other DNA
aaagtggagcattcagacttgt

SEQ ID NO: 11325 - DNA, 22 bp, synthetic construct
  misc_feature 1..22: note = Target B2M Sequence complement
  source 1..22: mol_type = other DNA
aagtggagcattcagacttgtc

SEQ ID NO: 11326 - DNA, 22 bp, synthetic construct
  misc_feature 1..22: note = Target B2M Sequence complement
  source 1..22: mol_type = other DNA
agtggagcattcagacttgtct

SEQ ID NO: 11327 - DNA, 22 bp, synthetic construct
  misc_feature 1..22: note = Target B2M Sequence complement
  source 1..22: mol_type = other DNA
gtggagcattcagacttgtctt

SEQ ID NO: 11328 - DNA, 22 bp, synthetic construct
  misc_feature 1..22: note = Target B2M Sequence complement
  source 1..22: mol_type = other DNA
tggagcattcagacttgtcttt

SEQ ID NO: 11329 - DNA, 22 bp, synthetic construct
  misc_feature 1..22: note = Target B2M Sequence complement
  source 1..22: mol_type = other DNA
ggagcattcagacttgtctttc

SEQ ID NO: 11330 - DNA, 22 bp, synthetic construct
  misc_feature 1..22: note = Target B2M Sequence complement
  source 1..22: mol_type = other DNA
gagcattcagacttgtctttca

SEQ ID NO: 11331 - DNA, 22 bp, synthetic construct
  misc_feature 1..22: note = Target B2M Sequence complement
  source 1..22: mol_type = other DNA
agcattcagacttgtctttcag

SEQ ID NO: 11332 - DNA, 22 bp, synthetic construct
  misc_feature 1..22: note = Target B2M Sequence complement
  source 1..22: mol_type = other DNA
gcattcagacttgtctttcagc

SEQ ID NO: 11333 - DNA, 22 bp, synthetic construct
  misc_feature 1..22: note = Target B2M Sequence complement
  source 1..22: mol_type = other DNA
cattcagacttgtctttcagca

SEQ ID NO: 11334 - DNA, 22 bp, synthetic construct
  misc_feature 1..22: note = Target B2M Sequence complement
  source 1..22: mol_type = other DNA
attcagacttgtctttcagcaa

SEQ ID NO: 11335 - DNA, 22 bp, synthetic construct
  misc_feature 1..22: note = Target B2M Sequence complement
  source 1..22: mol_type = other DNA
ttcagacttgtctttcagcaag

SEQ ID NO: 11336 - DNA, 22 bp, synthetic construct
  misc_feature 1..22: note = Target B2M Sequence complement
  source 1..22: mol_type = other DNA
tcagacttgtctttcagcaagg

SEQ ID NO: 11337 - DNA, 22 bp, synthetic construct
  misc_feature 1..22: note = Target B2M Sequence complement
  source 1..22: mol_type = other DNA
cagacttgtctttcagcaagga

SEQ ID NO: 11338 - DNA, 22 bp, synthetic construct
  misc_feature 1..22: note = Target B2M Sequence complement
  source 1..22: mol_type = other DNA
agacttgtctttcagcaaggac

SEQ ID NO: 11339 - DNA, 22 bp, synthetic construct
  misc_feature 1..22: note = Target B2M Sequence complement
  source 1..22: mol_type = other DNA
gacttgtctttcagcaaggact

SEQ ID NO: 11340 - DNA, 22 bp, synthetic construct
  misc_feature 1..22: note = Target B2M Sequence complement
  source 1..22: mol_type = other DNA
acttgtctttcagcaaggactg

SEQ ID NO: 11341 - DNA, 22 bp, synthetic construct
  misc_feature 1..22: note = Target B2M Sequence complement
  source 1..22: mol_type = other DNA
cttgtctttcagcaaggactgg

SEQ ID NO: 11342 - DNA, 22 bp, synthetic construct
  misc_feature 1..22: note = Target B2M Sequence complement
  source 1..22: mol_type = other DNA
ttgtctttcagcaaggactggt

SEQ ID NO: 11343 - DNA, 22 bp, synthetic construct
  misc_feature 1..22: note = Target B2M Sequence complement
  source 1..22: mol_type = other DNA
tgtctttcagcaaggactggtc

SEQ ID NO: 11344 - DNA, 22 bp, synthetic construct
  misc_feature 1..22: note = Target B2M Sequence complement
  source 1..22: mol_type = other DNA
gtctttcagcaaggactggtct

SEQ ID NO: 11345 - DNA, 22 bp, synthetic construct
  misc_feature 1..22: note = Target B2M Sequence complement
  source 1..22: mol_type = other DNA
tctttcagcaaggactggtctt

SEQ ID NO: 11346 - DNA, 22 bp, synthetic construct
  misc_feature 1..22: note = Target B2M Sequence complement
  source 1..22: mol_type = other DNA
ctttcagcaaggactggtcttt

SEQ ID NO: 11347 - DNA, 22 bp, synthetic construct
  misc_feature 1..22: note = Target B2M Sequence complement
  source 1..22: mol_type = other DNA
tttcagcaaggactggtctttc

SEQ ID NO: 11348 - DNA, 22 bp, synthetic construct
  misc_feature 1..22: note = Target B2M Sequence complement
  source 1..22: mol_type = other DNA
ttcagcaaggactggtctttct

SEQ ID NO: 11349 - DNA, 22 bp, synthetic construct
  misc_feature 1..22: note = Target B2M Sequence complement
  source 1..22: mol_type = other DNA
tcagcaaggactggtctttcta

SEQ ID NO: 11350 - DNA, 22 bp, synthetic construct
  misc_feature 1..22: note = Target B2M Sequence complement
  source 1..22: mol_type = other DNA
cagcaaggactggtctttctat

SEQ ID NO: 11351 - DNA, 22 bp, synthetic construct
  misc_feature 1..22: note = Target B2M Sequence complement
  source 1..22: mol_type = other DNA
agcaaggactggtctttctatc

SEQ ID NO: 11352 - DNA, 22 bp, synthetic construct
  misc_feature 1..22: note = Target B2M Sequence complement
  source 1..22: mol_type = other DNA
gcaaggactggtctttctatct

SEQ ID NO: 11353 - DNA, 22 bp, synthetic construct
  misc_feature 1..22: note = Target B2M Sequence complement
  source 1..22: mol_type = other DNA
caaggactggtctttctatctc

SEQ ID NO: 11354 - DNA, 22 bp, synthetic construct
  misc_feature 1..22: note = Target B2M Sequence complement
  source 1..22: mol_type = other DNA
aaggactggtctttctatctct

SEQ ID NO: 11355 - DNA, 22 bp, synthetic construct
  misc_feature 1..22: note = Target B2M Sequence complement
  source 1..22: mol_type = other DNA
aggactggtctttctatctctt

SEQ ID NO: 11356 - DNA, 22 bp, synthetic construct
  misc_feature 1..22: note = Target B2M Sequence complement
  source 1..22: mol_type = other DNA
ggactggtctttctatctcttg

SEQ ID NO: 11357 - DNA, 22 bp, synthetic construct
  misc_feature 1..22: note = Target B2M Sequence complement
  source 1..22: mol_type = other DNA
gactggtctttctatctcttgt

SEQ ID NO: 11358 - DNA, 22 bp, synthetic construct
  misc_feature 1..22: note = Target B2M Sequence complement
  source 1..22: mol_type = other DNA
actggtctttctatctcttgta

SEQ ID NO: 11359 - DNA, 22 bp, synthetic construct
  misc_feature 1..22: note = Target B2M Sequence complement
  source 1..22: mol_type = other DNA
ctggtctttctatctcttgtac

SEQ ID NO: 11360 - DNA, 22 bp, synthetic construct
  misc_feature 1..22: note = Target B2M Sequence complement
  source 1..22: mol_type = other DNA
tggtctttctatctcttgtact

SEQ ID NO: 11361 - DNA, 22 bp, synthetic construct
  misc_feature 1..22: note = Target B2M Sequence complement
  source 1..22: mol_type = other DNA
ggtctttctatctcttgtacta

SEQ ID NO: 11362 - DNA, 22 bp, synthetic construct
  misc_feature 1..22: note = Target B2M Sequence complement
  source 1..22: mol_type = other DNA
gtctttctatctcttgtactac

SEQ ID NO: 11363 - DNA, 22 bp, synthetic construct
  misc_feature 1..22: note = Target B2M Sequence complement
  source 1..22: mol_type = other DNA
tctttctatctcttgtactaca

SEQ ID NO: 11364 - DNA, 22 bp, synthetic construct
  misc_feature 1..22: note = Target B2M Sequence complement
  source 1..22: mol_type = other DNA
ctttctatctcttgtactacac

SEQ ID NO: 11365 - DNA, 22 bp, synthetic construct
  misc_feature 1..22: note = Target B2M Sequence complement
  source 1..22: mol_type = other DNA
tttctatctcttgtactacact

SEQ ID NO: 11366 - DNA, 22 bp, synthetic construct
  misc_feature 1..22: note = Target B2M Sequence complement
  source 1..22: mol_type = other DNA
ttctatctcttgtactacactg

SEQ ID NO: 11367 - DNA, 22 bp, synthetic construct
  misc_feature 1..22: note = Target B2M Sequence complement
  source 1..22: mol_type = other DNA
tctatctcttgtactacactga

SEQ ID NO: 11368 - DNA, 22 bp, synthetic construct
  misc_feature 1..22: note = Target B2M Sequence complement
  source 1..22: mol_type = other DNA
ctatctcttgtactacactgaa

SEQ ID NO: 11369 - DNA, 22 bp, synthetic construct
  misc_feature 1..22: note = Target B2M Sequence complement
  source 1..22: mol_type = other DNA
tatctcttgtactacactgaat

SEQ ID NO: 11370 - DNA, 22 bp, synthetic construct
  misc_feature 1..22: note = Target B2M Sequence complement
  source 1..22: mol_type = other DNA
atctcttgtactacactgaatt

SEQ ID NO: 11371 - DNA, 22 bp, synthetic construct
  misc_feature 1..22: note = Target B2M Sequence complement
  source 1..22: mol_type = other DNA
tctcttgtactacactgaattc

SEQ ID NO: 11372 - DNA, 22 bp, synthetic construct
  misc_feature 1..22: note = Target B2M Sequence complement
  source 1..22: mol_type = other DNA
ctcttgtactacactgaattca

SEQ ID NO: 11373 - DNA, 22 bp, synthetic construct
  misc_feature 1..22: note = Target B2M Sequence complement
  source 1..22: mol_type = other DNA
tcttgtactacactgaattcac

SEQ ID NO: 11374 - DNA, 22 bp, synthetic construct
  misc_feature 1..22: note = Target B2M Sequence complement
  source 1..22: mol_type = other DNA
cttgtactacactgaattcacc

SEQ ID NO: 11375 - DNA, 22 bp, synthetic construct
  misc_feature 1..22: note = Target B2M Sequence complement
  source 1..22: mol_type = other DNA
ttgtactacactgaattcaccc

SEQ ID NO: 11376 - DNA, 22 bp, synthetic construct
  misc_feature 1..22: note = Target B2M Sequence complement
  source 1..22: mol_type = other DNA
aaagatgagtatgcctgccgtg

SEQ ID NO: 11377 - DNA, 22 bp, synthetic construct
  misc_feature 1..22: note = Target B2M Sequence complement
  source 1..22: mol_type = other DNA
aagatgagtatgcctgccgtgt

SEQ ID NO: 11378 - DNA, 22 bp, synthetic construct
  misc_feature 1..22: note = Target B2M Sequence complement
  source 1..22: mol_type = other DNA
agatgagtatgcctgccgtgtg

SEQ ID NO: 11379 - DNA, 22 bp, synthetic construct
  misc_feature 1..22: note = Target B2M Sequence complement
  source 1..22: mol_type = other DNA
gatgagtatgcctgccgtgtga

SEQ ID NO: 11380 - DNA, 22 bp, synthetic construct
  misc_feature 1..22: note = Target B2M Sequence complement
  source 1..22: mol_type = other DNA
atgagtatgcctgccgtgtgaa

SEQ ID NO: 11381 - DNA, 22 bp, synthetic construct
  misc_feature 1..22: note = Target B2M Sequence complement
  source 1..22: mol_type = other DNA
tgagtatgcctgccgtgtgaac

SEQ ID NO: 11382 - DNA, 22 bp, synthetic construct
  misc_feature 1..22: note = Target B2M Sequence complement
  source 1..22: mol_type = other DNA
gagtatgcctgccgtgtgaacc

SEQ ID NO: 11383 - DNA, 22 bp, synthetic construct
  misc_feature 1..22: note = Target B2M Sequence complement
  source 1..22: mol_type = other DNA
agtatgcctgccgtgtgaacca

SEQ ID NO: 11384 - DNA, 22 bp, synthetic construct
  misc_feature 1..22: note = Target B2M Sequence complement
  source 1..22: mol_type = other DNA
gtatgcctgccgtgtgaaccat

SEQ ID NO: 11385 - DNA, 22 bp, synthetic construct
  misc_feature 1..22: note = Target B2M Sequence complement
  source 1..22: mol_type = other DNA
tatgcctgccgtgtgaaccatg

SEQ ID NO: 11386 - DNA, 22 bp, synthetic construct
  misc_feature 1..22: note = Target B2M Sequence complement
  source 1..22: mol_type = other DNA
atgcctgccgtgtgaaccatgt

SEQ ID NO: 11387 - DNA, 22 bp, synthetic construct
  misc_feature 1..22: note = Target B2M Sequence complement
  source 1..22: mol_type = other DNA
tgcctgccgtgtgaaccatgtg

SEQ ID NO: 11388 - DNA, 22 bp, synthetic construct
  misc_feature 1..22: note = Target B2M Sequence complement
  source 1..22: mol_type = other DNA
gcctgccgtgtgaaccatgtga

SEQ ID NO: 11389 - DNA, 22 bp, synthetic construct
  misc_feature 1..22: note = Target B2M Sequence complement
  source 1..22: mol_type = other DNA
cctgccgtgtgaaccatgtgac

SEQ ID NO: 11390 - DNA, 22 bp, synthetic construct
  misc_feature 1..22: note = Target B2M Sequence complement
  source 1..22: mol_type = other DNA
ctgccgtgtgaaccatgtgact

SEQ ID NO: 11391 - DNA, 22 bp, synthetic construct
  misc_feature 1..22: note = Target B2M Sequence complement
  source 1..22: mol_type = other DNA
tgccgtgtgaaccatgtgactt

SEQ ID NO: 11392 - DNA, 22 bp, synthetic construct
  misc_feature 1..22: note = Target B2M Sequence complement
  source 1..22: mol_type = other DNA
gccgtgtgaaccatgtgacttt

SEQ ID NO: 11393 - DNA, 22 bp, synthetic construct
  misc_feature 1..22: note = Target B2M Sequence complement
  source 1..22: mol_type = other DNA
ccgtgtgaaccatgtgactttg

SEQ ID NO: 11394 - DNA, 22 bp, synthetic construct
  misc_feature 1..22: note = Target B2M Sequence complement
  source 1..22: mol_type = other DNA
cgtgtgaaccatgtgactttgt

SEQ ID NO: 11395 - DNA, 22 bp, synthetic construct
  misc_feature 1..22: note = Target B2M Sequence complement
  source 1..22: mol_type = other DNA
gtgtgaaccatgtgactttgtc

SEQ ID NO: 11396 - DNA, 22 bp, synthetic construct
  misc_feature 1..22: note = Target B2M Sequence complement
  source 1..22: mol_type = other DNA
tgtgaaccatgtgactttgtca

SEQ ID NO: 11397 - DNA, 22 bp, synthetic construct
  misc_feature 1..22: note = Target B2M Sequence complement
  source 1..22: mol_type = other DNA
gtgaaccatgtgactttgtcac

SEQ ID NO: 11398 - DNA, 22 bp, synthetic construct
  misc_feature 1..22: note = Target B2M Sequence complement
  source 1..22: mol_type = other DNA
tgaaccatgtgactttgtcaca

SEQ ID NO: 11399 - DNA, 22 bp, synthetic construct
  misc_feature 1..22: note = Target B2M Sequence complement
  source 1..22: mol_type = other DNA
gaaccatgtgactttgtcacag

SEQ ID NO: 11400 - DNA, 22 bp, synthetic construct
  misc_feature 1..22: note = Target B2M Sequence complement
  source 1..22: mol_type = other DNA
aaccatgtgactttgtcacagc

SEQ ID NO: 11401 - DNA, 22 bp, synthetic construct
  misc_feature 1..22: note = Target B2M Sequence complement
  source 1..22: mol_type = other DNA
accatgtgactttgtcacagcc

SEQ ID NO: 11402 - DNA, 22 bp, synthetic construct
  misc_feature 1..22: note = Target B2M Sequence complement
  source 1..22: mol_type = other DNA
ccatgtgactttgtcacagccc

SEQ ID NO: 11403 - DNA, 22 bp, synthetic construct
  misc_feature 1..22: note = Target B2M Sequence complement
  source 1..22: mol_type = other DNA
catgtgactttgtcacagccca

SEQ ID NO: 11404 - DNA, 22 bp, synthetic construct
  misc_feature 1..22: note = Target B2M Sequence complement
  source 1..22: mol_type = other DNA
atgtgactttgtcacagcccaa

SEQ ID NO: 11405 - DNA, 22 bp, synthetic construct
  misc_feature 1..22: note = Target B2M Sequence complement
  source 1..22: mol_type = other DNA
tgtgactttgtcacagcccaag

SEQ ID NO: 11406 - DNA, 22 bp, synthetic construct
  misc_feature 1..22: note = Target B2M Sequence complement
  source 1..22: mol_type = other DNA
gtgactttgtcacagcccaaga

SEQ ID NO: 11407 - DNA, 22 bp, synthetic construct
  misc_feature 1..22: note = Target B2M Sequence complement
  source 1..22: mol_type = other DNA
tgactttgtcacagcccaagat

SEQ ID NO: 11408 - DNA, 22 bp, synthetic construct
  misc_feature 1..22: note = Target B2M Sequence complement
  source 1..22: mol_type = other DNA
gactttgtcacagcccaagata

SEQ ID NO: 11409 - DNA, 22 bp, synthetic construct
  misc_feature 1..22: note = Target B2M Sequence complement
  source 1..22: mol_type = other DNA
actttgtcacagcccaagatag

SEQ ID NO: 11410 - DNA, 22 bp, synthetic construct
  misc_feature 1..22: note = Target B2M Sequence complement
  source 1..22: mol_type = other DNA
ctttgtcacagcccaagatagt

SEQ ID NO: 11411 - DNA, 22 bp, synthetic construct
  misc_feature 1..22: note = Target B2M Sequence complement
  source 1..22: mol_type = other DNA
tttgtcacagcccaagatagtt

SEQ ID NO: 11412 - DNA, 22 bp, synthetic construct
  misc_feature 1..22: note = Target B2M Sequence complement
  source 1..22: mol_type = other DNA
ttgtcacagcccaagatagtta

SEQ ID NO: 11413 - DNA, 22 bp, synthetic construct
  misc_feature 1..22: note = Target B2M Sequence complement
  source 1..22: mol_type = other DNA
tgtcacagcccaagatagttaa

SEQ ID NO: 11414 - DNA, 22 bp, synthetic construct
  misc_feature 1..22: note = Target B2M Sequence complement
  source 1..22: mol_type = other DNA
gtcacagcccaagatagttaag

SEQ ID NO: 11415 - DNA, 22 bp, synthetic construct
  misc_feature 1..22: note = Target B2M Sequence complement
  source 1..22: mol_type = other DNA
tcacagcccaagatagttaagt

SEQ ID NO: 11416 - DNA, 22 bp, synthetic construct
  misc_feature 1..22: note = Target B2M Sequence complement
  source 1..22: mol_type = other DNA
cacagcccaagatagttaagtg

SEQ ID NO: 11417 - DNA, 22 bp, synthetic construct
  misc_feature 1..22: note = Target B2M Sequence complement
  source 1..22: mol_type = other DNA
acagcccaagatagttaagtgg

SEQ ID NO: 11418 - DNA, 22 bp, synthetic construct
  misc_feature 1..22: note = Target B2M Sequence complement
  source 1..22: mol_type = other DNA
cagcccaagatagttaagtggg

SEQ ID NO: 11419 - DNA, 22 bp, synthetic construct
  misc_feature 1..22: note = Target B2M Sequence complement
  source 1..22: mol_type = other DNA
agcccaagatagttaagtggga

SEQ ID NO: 11420 - DNA, 22 bp, synthetic construct
  misc_feature 1..22: note = Target B2M Sequence complement
  source 1..22: mol_type = other DNA
gcccaagatagttaagtgggat

SEQ ID NO: 11421 - DNA, 22 bp, synthetic construct
  misc_feature 1..22: note = Target B2M Sequence complement
  source 1..22: mol_type = other DNA
cccaagatagttaagtgggatc

SEQ ID NO: 11422 - DNA, 22 bp, synthetic construct
  misc_feature 1..22: note = Target B2M Sequence complement
  source 1..22: mol_type = other DNA
ccaagatagttaagtgggatcg

SEQ ID NO: 11423 - DNA, 22 bp, synthetic construct
  misc_feature 1..22: note = Target B2M Sequence complement
  source 1..22: mol_type = other DNA
caagatagttaagtgggatcga

SEQ ID NO: 11424 - DNA, 22 bp, synthetic construct
  misc_feature 1..22: note = Target B2M Sequence complement
  source 1..22: mol_type = other DNA
aagatagttaagtgggatcgag

SEQ ID NO: 11425 - DNA, 22 bp, synthetic construct
  misc_feature 1..22: note = Target B2M Sequence complement
  source 1..22: mol_type = other DNA
agatagttaagtgggatcgaga

SEQ ID NO: 11426 - DNA, 22 bp, synthetic construct
  misc_feature 1..22: note = Target B2M Sequence complement
  source 1..22: mol_type = other DNA
gatagttaagtgggatcgagac

SEQ ID NO: 11427 - DNA, 22 bp, synthetic construct
  misc_feature 1..22: note = Target B2M Sequence complement
  source 1..22: mol_type = other DNA
atagttaagtgggatcgagaca

SEQ ID NO: 11428 - DNA, 22 bp, synthetic construct
  misc_feature 1..22: note = Target B2M Sequence complement
  source 1..22: mol_type = other DNA
tagttaagtgggatcgagacat

SEQ ID NO: 11429 - DNA, 22 bp, synthetic construct
  misc_feature 1..22: note = Target B2M Sequence complement
  source 1..22: mol_type = other DNA
agttaagtgggatcgagacatg

SEQ ID NO: 11430 - DNA, 22 bp, synthetic construct
  misc_feature 1..22: note = Target B2M Sequence complement
  source 1..22: mol_type = other DNA
gttaagtgggatcgagacatgt

SEQ ID NO: 11431 - DNA, 22 bp, synthetic construct
  misc_feature 1..22: note = Target B2M Sequence complement
  source 1..22: mol_type = other DNA
ttaagtgggatcgagacatgta

SEQ ID NO: 11432 - DNA, 22 bp, synthetic construct
  misc_feature 1..22: note = Target B2M Sequence complement
  source 1..22: mol_type = other DNA
taagtgggatcgagacatgtaa

SEQ ID NO: 11433 - DNA, 22 bp, synthetic construct
  misc_feature 1..22: note = Target B2M Sequence complement
  source 1..22: mol_type = other DNA
aagtgggatcgagacatgtaag

SEQ ID NO: 11434 - DNA, 22 bp, synthetic construct
  misc_feature 1..22: note = Target B2M Sequence complement
  source 1..22: mol_type = other DNA
agtgggatcgagacatgtaagc

SEQ ID NO: 11435 - DNA, 22 bp, synthetic construct
  misc_feature 1..22: note = Target B2M Sequence complement
  source 1..22: mol_type = other DNA
gtgggatcgagacatgtaagca

SEQ ID NO: 11436 - DNA, 22 bp, synthetic construct
  misc_feature 1..22: note = Target B2M Sequence complement
  source 1..22: mol_type = other DNA
tgggatcgagacatgtaagcag

SEQ ID NO: 11437 - DNA, 22 bp, synthetic construct
  misc_feature 1..22: note = Target B2M Sequence complement
  source 1..22: mol_type = other DNA
gggatcgagacatgtaagcagc

SEQ ID NO: 11438 - DNA, 22 bp, synthetic construct
  misc_feature 1..22: note = Target B2M Sequence complement
  source 1..22: mol_type = other DNA
ggatcgagacatgtaagcagca

SEQ ID NO: 11439 - DNA, 22 bp, synthetic construct
  misc_feature 1..22: note = Target B2M Sequence complement
  source 1..22: mol_type = other DNA
gatcgagacatgtaagcagcat

SEQ ID NO: 11440 - DNA, 22 bp, synthetic construct
  misc_feature 1..22: note = Target B2M Sequence complement
  source 1..22: mol_type = other DNA
atcgagacatgtaagcagcatc

SEQ ID NO: 11441 - DNA, 22 bp, synthetic construct
  misc_feature 1..22: note = Target B2M Sequence complement
  source 1..22: mol_type = other DNA
tcgagacatgtaagcagcatca

SEQ ID NO: 11442 - DNA, 22 bp, synthetic construct
  misc_feature 1..22: note = Target B2M Sequence complement
  source 1..22: mol_type = other DNA
cgagacatgtaagcagcatcat

SEQ ID NO: 11443 - DNA, 22 bp, synthetic construct
  misc_feature 1..22: note = Target B2M Sequence complement
  source 1..22: mol_type = other DNA
gagacatgtaagcagcatcatg

SEQ ID NO: 11444 - DNA, 22 bp, synthetic construct
  misc_feature 1..22: note = Target B2M Sequence complement
  source 1..22: mol_type = other DNA
agacatgtaagcagcatcatgg

SEQ ID NO: 11445 - DNA, 22 bp, synthetic construct
  misc_feature 1..22: note = Target B2M Sequence complement
  source 1..22: mol_type = other DNA
gacatgtaagcagcatcatgga

SEQ ID NO: 11446 - DNA, 22 bp, synthetic construct
  misc_feature 1..22: note = Target B2M Sequence complement
  source 1..22: mol_type = other DNA
acatgtaagcagcatcatggag

SEQ ID NO: 11447 - DNA, 22 bp, synthetic construct
  misc_feature 1..22: note = Target B2M Sequence complement
  source 1..22: mol_type = other DNA
catgtaagcagcatcatggagg

SEQ ID NO: 11448 - DNA, 22 bp, synthetic construct
  misc_feature 1..22: note = Target B2M Sequence complement
  source 1..22: mol_type = other DNA
atgtaagcagcatcatggaggt

SEQ ID NO: 11449 - DNA, 22 bp, synthetic construct
  misc_feature 1..22: note = Target B2M Sequence complement
  source 1..22: mol_type = other DNA
tgtaagcagcatcatggaggtt

SEQ ID NO: 11450 - DNA, 22 bp, synthetic construct
  misc_feature 1..22: note = Target B2M Sequence complement
  source 1..22: mol_type = other DNA
gtaagcagcatcatggaggttt

SEQ ID NO: 11451 - DNA, 22 bp, synthetic construct
  misc_feature 1..22: note = Target B2M Sequence complement
  source 1..22: mol_type = other DNA
taagcagcatcatggaggtttg

SEQ ID NO: 11452 - DNA, 22 bp, synthetic construct
  misc_feature 1..22: note = Target B2M Sequence complement
  source 1..22: mol_type = other DNA
aagcagcatcatggaggtttga

SEQ ID NO: 11453 - DNA, 22 bp, synthetic construct
  misc_feature 1..22: note = Target B2M Sequence complement
  source 1..22: mol_type = other DNA
agcagcatcatggaggtttgaa

SEQ ID NO: 11454 - DNA, 22 bp, synthetic construct
  misc_feature 1..22: note = Target B2M Sequence complement
  source 1..22: mol_type = other DNA
gcagcatcatggaggtttgaag

SEQ ID NO: 11455 - DNA, 22 bp, synthetic construct
  misc_feature 1..22: note = Target B2M Sequence complement
  source 1..22: mol_type = other DNA
cagcatcatggaggtttgaaga

SEQ ID NO: 11456 - DNA, 22 bp, synthetic construct
  misc_feature 1..22: note = Target B2M Sequence complement
  source 1..22: mol_type = other DNA
agcatcatggaggtttgaagat

SEQ ID NO: 11457 - DNA, 22 bp, synthetic construct
  misc_feature 1..22: note = Target B2M Sequence complement
  source 1..22: mol_type = other DNA
gcatcatggaggtttgaagatg

SEQ ID NO: 11458 - DNA, 22 bp, synthetic construct
  misc_feature 1..22: note = Target B2M Sequence complement
  source 1..22: mol_type = other DNA
catcatggaggtttgaagatgc

SEQ ID NO: 11459 - DNA, 22 bp, synthetic construct
  misc_feature 1..22: note = Target B2M Sequence complement
  source 1..22: mol_type = other DNA
atcatggaggtttgaagatgcc

SEQ ID NO: 11460 - DNA, 22 bp, synthetic construct
  misc_feature 1..22: note = Target B2M Sequence complement
  source 1..22: mol_type = other DNA
tcatggaggtttgaagatgccg

SEQ ID NO: 11461 - DNA, 22 bp, synthetic construct
  misc_feature 1..22: note = Target B2M Sequence complement
  source 1..22: mol_type = other DNA
catggaggtttgaagatgccgc

SEQ ID NO: 11462 - DNA, 22 bp, synthetic construct
  misc_feature 1..22: note = Target B2M Sequence complement
  source 1..22: mol_type = other DNA
atggaggtttgaagatgccgca

SEQ ID NO: 11463 - DNA, 22 bp, synthetic construct
  misc_feature 1..22: note = Target B2M Sequence complement
  source 1..22: mol_type = other DNA
tggaggtttgaagatgccgcat

SEQ ID NO: 11464 - DNA, 22 bp, synthetic construct
  misc_feature 1..22: note = Target B2M Sequence complement
  source 1..22: mol_type = other DNA
ggaggtttgaagatgccgcatt

SEQ ID NO: 11465 - DNA, 22 bp, synthetic construct
  misc_feature 1..22: note = Target B2M Sequence complement
  source 1..22: mol_type = other DNA
gaggtttgaagatgccgcattt

SEQ ID NO: 11466 - DNA, 22 bp, synthetic construct
  misc_feature 1..22: note = Target B2M Sequence complement
  source 1..22: mol_type = other DNA
aggtttgaagatgccgcatttg

SEQ ID NO: 11467 - DNA, 22 bp, synthetic construct
  misc_feature 1..22: note = Target B2M Sequence complement
  source 1..22: mol_type = other DNA
ggtttgaagatgccgcatttgg

SEQ ID NO: 11468 - DNA, 22 bp, synthetic construct
  misc_feature 1..22: note = Target B2M Sequence complement
  source 1..22: mol_type = other DNA
gtttgaagatgccgcatttgga

SEQ ID NO: 11469 - DNA, 22 bp, synthetic construct
  misc_feature 1..22: note = Target B2M Sequence complement
  source 1..22: mol_type = other DNA
tttgaagatgccgcatttggat

SEQ ID NO: 11470 - DNA, 22 bp, synthetic construct
  misc_feature 1..22: note = Target B2M Sequence complement
  source 1..22: mol_type = other DNA
ttgaagatgccgcatttggatt

SEQ ID NO: 11471 - DNA, 22 bp, synthetic construct
  misc_feature 1..22: note = Target B2M Sequence complement
  source 1..22: mol_type = other DNA
tgaagatgccgcatttggattg

SEQ ID NO: 11472 - DNA, 22 bp, synthetic construct
  misc_feature 1..22: note = Target B2M Sequence complement
  source 1..22: mol_type = other DNA
gaagatgccgcatttggattgg

SEQ ID NO: 11473 - DNA, 22 bp, synthetic construct
  misc_feature 1..22: note = Target B2M Sequence complement
  source 1..22: mol_type = other DNA
aagatgccgcatttggattgga

SEQ ID NO: 11474 - DNA, 22 bp, synthetic construct
  misc_feature 1..22: note = Target B2M Sequence complement
  source 1..22: mol_type = other DNA
agatgccgcatttggattggat

SEQ ID NO: 11475 - DNA, 22 bp, synthetic construct
  misc_feature 1..22: note = Target B2M Sequence complement
  source 1..22: mol_type = other DNA
gatgccgcatttggattggatg

SEQ ID NO: 11476 - DNA, 22 bp, synthetic construct
  misc_feature 1..22: note = Target B2M Sequence complement
  source 1..22: mol_type = other DNA
atgccgcatttggattggatga

SEQ ID NO: 11477 - DNA, 22 bp, synthetic construct
  misc_feature 1..22: note = Target B2M Sequence complement
  source 1..22: mol_type = other DNA
tgccgcatttggattggatgaa

SEQ ID NO: 11478 - DNA, 22 bp, synthetic construct
  misc_feature 1..22: note = Target B2M Sequence complement
  source 1..22: mol_type = other DNA
gccgcatttggattggatgaat

SEQ ID NO: 11479 - DNA, 22 bp, synthetic construct
  misc_feature 1..22: note = Target B2M Sequence complement
  source 1..22: mol_type = other DNA
ccgcatttggattggatgaatt

SEQ ID NO: 11480 - DNA, 22 bp, synthetic construct
  misc_feature 1..22: note = Target B2M Sequence complement
  source 1..22: mol_type = other DNA
cgcatttggattggatgaattc

SEQ ID NO: 11481 - DNA, 22 bp, synthetic construct
  misc_feature 1..22: note = Target B2M Sequence complement
  source 1..22: mol_type = other DNA
gcatttggattggatgaattcc

SEQ ID NO: 11482 - DNA, 22 bp, synthetic construct
  misc_feature 1..22: note = Target B2M Sequence complement
  source 1..22: mol_type = other DNA
catttggattggatgaattcca

SEQ ID NO: 11483 - DNA, 22 bp, synthetic construct
  misc_feature 1..22: note = Target B2M Sequence complement
  source 1..22: mol_type = other DNA
atttggattggatgaattccaa

SEQ ID NO: 11484 - DNA, 22 bp, synthetic construct
  misc_feature 1..22: note = Target B2M Sequence complement
  source 1..22: mol_type = other DNA
tttggattggatgaattccaaa

SEQ ID NO: 11485 - DNA, 22 bp, synthetic construct
  misc_feature 1..22: note = Target B2M Sequence complement
  source 1..22: mol_type = other DNA
ttggattggatgaattccaaat

SEQ ID NO: 11486 - DNA, 22 bp, synthetic construct
  misc_feature 1..22: note = Target B2M Sequence complement
  source 1..22: mol_type = other DNA
tggattggatgaattccaaatt

SEQ ID NO: 11487 - DNA, 22 bp, synthetic construct
  misc_feature 1..22: note = Target B2M Sequence complement
  source 1..22: mol_type = other DNA
ggattggatgaattccaaattc

SEQ ID NO: 11488 - DNA, 22 bp, synthetic construct
  misc_feature 1..22: note = Target B2M Sequence complement
  source 1..22: mol_type = other DNA
gattggatgaattccaaattct

SEQ ID NO: 11489 - DNA, 22 bp, synthetic construct
  misc_feature 1..22: note = Target B2M Sequence complement
  source 1..22: mol_type = other DNA
attggatgaattccaaattctg

SEQ ID NO: 11490 - DNA, 22 bp, synthetic construct
  misc_feature 1..22: note = Target B2M Sequence complement
  source 1..22: mol_type = other DNA
ttggatgaattccaaattctgc

SEQ ID NO: 11491 - DNA, 22 bp, synthetic construct
  misc_feature 1..22: note = Target B2M Sequence complement
  source 1..22: mol_type = other DNA
tggatgaattccaaattctgct

SEQ ID NO: 11492 - DNA, 22 bp, synthetic construct
  misc_feature 1..22: note = Target B2M Sequence complement
  source 1..22: mol_type = other DNA
ggatgaattccaaattctgctt

SEQ ID NO: 11493 - DNA, 22 bp, synthetic construct
  misc_feature 1..22: note = Target B2M Sequence complement
  source 1..22: mol_type = other DNA
gatgaattccaaattctgcttg

SEQ ID NO: 11494 - DNA, 22 bp, synthetic construct
  misc_feature 1..22: note = Target B2M Sequence complement
  source 1..22: mol_type = other DNA
atgaattccaaattctgcttgc

SEQ ID NO: 11495 - DNA, 22 bp, synthetic construct
  misc_feature 1..22: note = Target B2M Sequence complement
  source 1..22: mol_type = other DNA
tgaattccaaattctgcttgct

SEQ ID NO: 11496 - DNA, 22 bp, synthetic construct
  misc_feature 1..22: note = Target B2M Sequence complement
  source 1..22: mol_type = other DNA
gaattccaaattctgcttgctt

SEQ ID NO: 11497 - DNA, 22 bp, synthetic construct
  misc_feature 1..22: note = Target B2M Sequence complement
  source 1..22: mol_type = other DNA
aattccaaattctgcttgcttg

SEQ ID NO: 11498 - DNA, 22 bp, synthetic construct
  misc_feature 1..22: note = Target B2M Sequence complement
  source 1..22: mol_type = other DNA
attccaaattctgcttgcttgc

SEQ ID NO: 11499 - DNA, 22 bp, synthetic construct
  misc_feature 1..22: note = Target B2M Sequence complement
  source 1..22: mol_type = other DNA
ttccaaattctgcttgcttgct

SEQ ID NO: 11500 - DNA, 22 bp, synthetic construct
  misc_feature 1..22: note = Target B2M Sequence complement
  source 1..22: mol_type = other DNA
tccaaattctgcttgcttgctt

SEQ ID NO: 11501 - DNA, 22 bp, synthetic construct
  misc_feature 1..22: note = Target B2M Sequence complement
  source 1..22: mol_type = other DNA
ccaaattctgcttgcttgcttt

SEQ ID NO: 11502 - DNA, 22 bp, synthetic construct
  misc_feature 1..22: note = Target B2M Sequence complement
  source 1..22: mol_type = other DNA
attgatatgcttatacacttac

SEQ ID NO: 11503 - DNA, 22 bp, synthetic construct
  misc_feature 1..22: note = Target B2M Sequence complement
  source 1..22: mol_type = other DNA
ttgatatgcttatacacttaca

SEQ ID NO: 11504 - DNA, 22 bp, synthetic construct
  misc_feature 1..22: note = Target B2M Sequence complement
  source 1..22: mol_type = other DNA
tgatatgcttatacacttacac

SEQ ID NO: 11505 - DNA, 22 bp, synthetic construct
  misc_feature 1..22: note = Target B2M Sequence complement
  source 1..22: mol_type = other DNA
gatatgcttatacacttacact

SEQ ID NO: 11506 - DNA, 22 bp, synthetic construct
  misc_feature 1..22: note = Target B2M Sequence complement
  source 1..22: mol_type = other DNA
atatgcttatacacttacactt

SEQ ID NO: 11507 - DNA, 22 bp, synthetic construct
  misc_feature 1..22: note = Target B2M Sequence complement
  source 1..22: mol_type = other DNA
tatgcttatacacttacacttt

SEQ ID NO: 11508 - DNA, 22 bp, synthetic construct
  misc_feature 1..22: note = Target B2M Sequence complement
  source 1..22: mol_type = other DNA
atgcttatacacttacacttta

SEQ ID NO: 11509 - DNA, 22 bp, synthetic construct
  misc_feature 1..22: note = Target B2M Sequence complement
  source 1..22: mol_type = other DNA
tgcttatacacttacactttat

SEQ ID NO: 11510 - DNA, 22 bp, synthetic construct
  misc_feature 1..22: note = Target B2M Sequence complement
  source 1..22: mol_type = other DNA
gcttatacacttacactttatg

SEQ ID NO: 11511 - DNA, 22 bp, synthetic construct
  misc_feature 1..22: note = Target B2M Sequence complement
  source 1..22: mol_type = other DNA
cttatacacttacactttatgc

SEQ ID NO: 11512 - DNA, 22 bp, synthetic construct
  misc_feature 1..22: note = Target B2M Sequence complement
  source 1..22: mol_type = other DNA
ttatacacttacactttatgca

SEQ ID NO: 11513 - DNA, 22 bp, synthetic construct
  misc_feature 1..22: note = Target B2M Sequence complement
  source 1..22: mol_type = other DNA
tatacacttacactttatgcac

SEQ ID NO: 11514 - DNA, 22 bp, synthetic construct
  misc_feature 1..22: note = Target B2M Sequence complement
  source 1..22: mol_type = other DNA
atacacttacactttatgcaca

SEQ ID NO: 11515 - DNA, 22 bp, synthetic construct
  misc_feature 1..22: note = Target B2M Sequence complement
  source 1..22: mol_type = other DNA
tacacttacactttatgcacaa

SEQ ID NO: 11516 - DNA, 22 bp, synthetic construct
  misc_feature 1..22: note = Target B2M Sequence complement
  source 1..22: mol_type = other DNA
acacttacactttatgcacaaa

SEQ ID NO: 11517 - DNA, 22 bp, synthetic construct
  misc_feature 1..22: note = Target B2M Sequence complement
  source 1..22: mol_type = other DNA
gtagggttataataatgttaac

SEQ ID NO: 11518 - DNA, 22 bp, synthetic construct
  misc_feature 1..22: note = Target B2M Sequence complement
  source 1..22: mol_type = other DNA
gggttataataatgttaacatg

SEQ ID NO: 11519 - DNA, 22 bp, synthetic construct
  misc_feature 1..22: note = Target B2M Sequence complement
  source 1..22: mol_type = other DNA
ggttataataatgttaacatgg

SEQ ID NO: 11520 - DNA, 22 bp, synthetic construct
  misc_feature 1..22: note = Target B2M Sequence complement
  source 1..22: mol_type = other DNA
taataatgttaacatggacatg

SEQ ID NO: 11521 - DNA, 22 bp, synthetic construct
  misc_feature 1..22: note = Target B2M Sequence complement
  source 1..22: mol_type = other DNA
aataatgttaacatggacatga

SEQ ID NO: 11522 - DNA, 22 bp, synthetic construct
  misc_feature 1..22: note = Target B2M Sequence complement
  source 1..22: mol_type = other DNA
ataatgttaacatggacatgat

SEQ ID NO: 11523 - DNA, 22 bp, synthetic construct
  misc_feature 1..22: note = Target B2M Sequence complement
  source 1..22: mol_type = other DNA
taatgttaacatggacatgatc

SEQ ID NO: 11524 - DNA, 22 bp, synthetic construct
  misc_feature 1..22: note = Target B2M Sequence complement
  source 1..22: mol_type = other DNA
aatgttaacatggacatgatct

SEQ ID NO: 11525 - DNA, 22 bp, synthetic construct
  misc_feature 1..22: note = Target B2M Sequence complement
  source 1..22: mol_type = other DNA
atgttaacatggacatgatctt

SEQ ID NO: 11526 - DNA, 22 bp, synthetic construct
  misc_feature 1..22: note = Target B2M Sequence complement
  source 1..22: mol_type = other DNA
tgttaacatggacatgatcttc

SEQ ID NO: 11527 - DNA, 22 bp, synthetic construct
  misc_feature 1..22: note = Target B2M Sequence complement
  source 1..22: mol_type = other DNA
gttaacatggacatgatcttct

SEQ ID NO: 11528 - DNA, 22 bp, synthetic construct
  misc_feature 1..22: note = Target B2M Sequence complement
  source 1..22: mol_type = other DNA
ttaacatggacatgatcttctt

SEQ ID NO: 11529 - DNA, 22 bp, synthetic construct
  misc_feature 1..22: note = Target B2M Sequence complement
  source 1..22: mol_type = other DNA
taacatggacatgatcttcttt

SEQ ID NO: 11530 - DNA, 22 bp, synthetic construct
  misc_feature 1..22: note = Target B2M Sequence complement
  source 1..22: mol_type = other DNA
aacatggacatgatcttcttta

SEQ ID NO: 11531 - DNA, 22 bp, synthetic construct
  misc_feature 1..22: note = Target B2M Sequence complement
  source 1..22: mol_type = other DNA
acatggacatgatcttctttat

SEQ ID NO: 11532 - DNA, 22 bp, synthetic construct
  misc_feature 1..22: note = Target B2M Sequence complement
  source 1..22: mol_type = other DNA
catggacatgatcttctttata

SEQ ID NO: 11533 - DNA, 22 bp, synthetic construct
  misc_feature 1..22: note = Target B2M Sequence complement
  source 1..22: mol_type = other DNA
atggacatgatcttctttataa

SEQ ID NO: 11534 - DNA, 22 bp, synthetic construct
  misc_feature 1..22: note = Target B2M Sequence complement
  source 1..22: mol_type = other DNA
tggacatgatcttctttataat

SEQ ID NO: 11535 - DNA, 22 bp, synthetic construct
  misc_feature 1..22: note = Target B2M Sequence complement
  source 1..22: mol_type = other DNA
ggacatgatcttctttataatt

SEQ ID NO: 11536 - DNA, 22 bp, synthetic construct
  misc_feature 1..22: note = Target B2M Sequence complement
  source 1..22: mol_type = other DNA
gacatgatcttctttataattc

SEQ ID NO: 11537 - DNA, 22 bp, synthetic construct
  misc_feature 1..22: note = Target B2M Sequence complement
  source 1..22: mol_type = other DNA
ctttataattctactttgagtg

SEQ ID NO: 11538 - DNA, 22 bp, synthetic construct
  misc_feature 1..22: note = Target B2M Sequence complement
  source 1..22: mol_type = other DNA
tttataattctactttgagtgc

SEQ ID NO: 11539 - DNA, 22 bp, synthetic construct
  misc_feature 1..22: note = Target B2M Sequence complement
  source 1..22: mol_type = other DNA
ttataattctactttgagtgct

SEQ ID NO: 11540 - DNA, 22 bp, synthetic construct
  misc_feature 1..22: note = Target B2M Sequence complement
  source 1..22: mol_type = other DNA
tataattctactttgagtgctg

SEQ ID NO: 11541 - DNA, 22 bp, synthetic construct
  misc_feature 1..22: note = Target B2M Sequence complement
  source 1..22: mol_type = other DNA
ataattctactttgagtgctgt

SEQ ID NO: 11542 - DNA, 22 bp, synthetic construct
  misc_feature 1..22: note = Target B2M Sequence complement
  source 1..22: mol_type = other DNA
taattctactttgagtgctgtc

SEQ ID NO: 11543 - DNA, 22 bp, synthetic construct
  misc_feature 1..22: note = Target B2M Sequence complement
  source 1..22: mol_type = other DNA
aattctactttgagtgctgtct

SEQ ID NO: 11544 - DNA, 22 bp, synthetic construct
  misc_feature 1..22: note = Target B2M Sequence complement
  source 1..22: mol_type = other DNA
attctactttgagtgctgtctc

SEQ ID NO: 11545 - DNA, 22 bp, synthetic construct
  misc_feature 1..22: note = Target B2M Sequence complement
  source 1..22: mol_type = other DNA
ttctactttgagtgctgtctcc

SEQ ID NO: 11546 - DNA, 22 bp, synthetic construct
  misc_feature 1..22: note = Target B2M Sequence complement
  source 1..22: mol_type = other DNA
tctactttgagtgctgtctcca

SEQ ID NO: 11547 - DNA, 22 bp, synthetic construct
  misc_feature 1..22: note = Target B2M Sequence complement
  source 1..22: mol_type = other DNA
ctactttgagtgctgtctccat

SEQ ID NO: 11548 - DNA, 22 bp, synthetic construct
  misc_feature 1..22: note = Target B2M Sequence complement
  source 1..22: mol_type = other DNA
tactttgagtgctgtctccatg

SEQ ID NO: 11549 - DNA, 22 bp, synthetic construct
  misc_feature 1..22: note = Target B2M Sequence complement
  source 1..22: mol_type = other DNA
actttgagtgctgtctccatgt

SEQ ID NO: 11550 - DNA, 22 bp, synthetic construct
  misc_feature 1..22: note = Target B2M Sequence complement
  source 1..22: mol_type = other DNA
ctttgagtgctgtctccatgtt

SEQ ID NO: 11551 - DNA, 22 bp, synthetic construct
  misc_feature 1..22: note = Target B2M Sequence complement
  source 1..22: mol_type = other DNA
tttgagtgctgtctccatgttt

SEQ ID NO: 11552 - DNA, 22 bp, synthetic construct
  misc_feature 1..22: note = Target B2M Sequence complement
  source 1..22: mol_type = other DNA
ttgagtgctgtctccatgtttg

SEQ ID NO: 11553 - DNA, 22 bp, synthetic construct
  misc_feature 1..22: note = Target B2M Sequence complement
  source 1..22: mol_type = other DNA
tgagtgctgtctccatgtttga

SEQ ID NO: 11554 - DNA, 22 bp, synthetic construct
  misc_feature 1..22: note = Target B2M Sequence complement
  source 1..22: mol_type = other DNA
gagtgctgtctccatgtttgat

SEQ ID NO: 11555 - DNA, 22 bp, synthetic construct
  misc_feature 1..22: note = Target B2M Sequence complement
  source 1..22: mol_type = other DNA
agtgctgtctccatgtttgatg

SEQ ID NO: 11556 - DNA, 22 bp, synthetic construct
  misc_feature 1..22: note = Target B2M Sequence complement
  source 1..22: mol_type = other DNA
gtgctgtctccatgtttgatgt

SEQ ID NO: 11557 - DNA, 22 bp, synthetic construct
  misc_feature 1..22: note = Target B2M Sequence complement
  source 1..22: mol_type = other DNA
tgctgtctccatgtttgatgta

SEQ ID NO: 11558 - DNA, 22 bp, synthetic construct
  misc_feature 1..22: note = Target B2M Sequence complement
  source 1..22: mol_type = other DNA
gctgtctccatgtttgatgtat

SEQ ID NO: 11559 - DNA, 22 bp, synthetic construct
  misc_feature 1..22: note = Target B2M Sequence complement
  source 1..22: mol_type = other DNA
ctgtctccatgtttgatgtatc

SEQ ID NO: 11560 - DNA, 22 bp, synthetic construct
  misc_feature 1..22: note = Target B2M Sequence complement
  source 1..22: mol_type = other DNA
tgtctccatgtttgatgtatct

SEQ ID NO: 11561 - DNA, 22 bp, synthetic construct
  misc_feature 1..22: note = Target B2M Sequence complement
  source 1..22: mol_type = other DNA
gtctccatgtttgatgtatctg

SEQ ID NO: 11562 - DNA, 22 bp, synthetic construct
  misc_feature 1..22: note = Target B2M Sequence complement
  source 1..22: mol_type = other DNA
tctccatgtttgatgtatctga

SEQ ID NO: 11563 - DNA, 22 bp, synthetic construct
  misc_feature 1..22: note = Target B2M Sequence complement
  source 1..22: mol_type = other DNA
ctccatgtttgatgtatctgag

SEQ ID NO: 11564 - DNA, 22 bp, synthetic construct
  misc_feature 1..22: note = Target B2M Sequence complement
  source 1..22: mol_type = other DNA
tccatgtttgatgtatctgagc

SEQ ID NO: 11565 - DNA, 22 bp, synthetic construct
  misc_feature 1..22: note = Target B2M Sequence complement
  source 1..22: mol_type = other DNA
ccatgtttgatgtatctgagca

SEQ ID NO: 11566 - DNA, 22 bp, synthetic construct
  misc_feature 1..22: note = Target B2M Sequence complement
  source 1..22: mol_type = other DNA
catgtttgatgtatctgagcag

SEQ ID NO: 11567 - DNA, 22 bp, synthetic construct
  misc_feature 1..22: note = Target B2M Sequence complement
  source 1..22: mol_type = other DNA
atgtttgatgtatctgagcagg

SEQ ID NO: 11568 - DNA, 22 bp, synthetic construct
  misc_feature 1..22: note = Target B2M Sequence complement
  source 1..22: mol_type = other DNA
tgtttgatgtatctgagcaggt

SEQ ID NO: 11569 - DNA, 22 bp, synthetic construct
  misc_feature 1..22: note = Target B2M Sequence complement
  source 1..22: mol_type = other DNA
gtttgatgtatctgagcaggtt

SEQ ID NO: 11570 - DNA, 22 bp, synthetic construct
  misc_feature 1..22: note = Target B2M Sequence complement
  source 1..22: mol_type = other DNA
tttgatgtatctgagcaggttg

SEQ ID NO: 11571 - DNA, 22 bp, synthetic construct
  misc_feature 1..22: note = Target B2M Sequence complement
  source 1..22: mol_type = other DNA
ttgatgtatctgagcaggttgc

SEQ ID NO: 11572 - DNA, 22 bp, synthetic construct
  misc_feature 1..22: note = Target B2M Sequence complement
  source 1..22: mol_type = other DNA
tgatgtatctgagcaggttgct

SEQ ID NO: 11573 - DNA, 22 bp, synthetic construct
  misc_feature 1..22: note = Target B2M Sequence complement
  source 1..22: mol_type = other DNA
gatgtatctgagcaggttgctc

SEQ ID NO: 11574 - DNA, 22 bp, synthetic construct
  misc_feature 1..22: note = Target B2M Sequence complement
  source 1..22: mol_type = other DNA
atgtatctgagcaggttgctcc

SEQ ID NO: 11575 - DNA, 22 bp, synthetic construct
  misc_feature 1..22: note = Target B2M Sequence complement
  source 1..22: mol_type = other DNA
tgtatctgagcaggttgctcca

SEQ ID NO: 11576 - DNA, 22 bp, synthetic construct
  misc_feature 1..22: note = Target B2M Sequence complement
  source 1..22: mol_type = other DNA
gtatctgagcaggttgctccac

SEQ ID NO: 11577 - DNA, 22 bp, synthetic construct
  misc_feature 1..22: note = Target B2M Sequence complement
  source 1..22: mol_type = other DNA
tatctgagcaggttgctccaca

SEQ ID NO: 11578 - DNA, 22 bp, synthetic construct
  misc_feature 1..22: note = Target B2M Sequence complement
  source 1..22: mol_type = other DNA
atctgagcaggttgctccacag

SEQ ID NO: 11579 - DNA, 22 bp, synthetic construct
  misc_feature 1..22: note = Target B2M Sequence complement
  source 1..22: mol_type = other DNA
tctgagcaggttgctccacagg

SEQ ID NO: 11580 - DNA, 22 bp, synthetic construct
  misc_feature 1..22: note = Target B2M Sequence complement
  source 1..22: mol_type = other DNA
ctgagcaggttgctccacaggt

SEQ ID NO: 11581 - DNA, 22 bp, synthetic construct
  misc_feature 1..22: note = Target B2M Sequence complement
  source 1..22: mol_type = other DNA
tgagcaggttgctccacaggta

SEQ ID NO: 11582 - DNA, 22 bp, synthetic construct
  misc_feature 1..22: note = Target B2M Sequence complement
  source 1..22: mol_type = other DNA
gagcaggttgctccacaggtag

SEQ ID NO: 11583 - DNA, 22 bp, synthetic construct
  misc_feature 1..22: note = Target B2M Sequence complement
  source 1..22: mol_type = other DNA
agcaggttgctccacaggtagc

SEQ ID NO: 11584 - DNA, 22 bp, synthetic construct
  misc_feature 1..22: note = Target B2M Sequence complement
  source 1..22: mol_type = other DNA
gcaggttgctccacaggtagct

SEQ ID NO: 11585 - DNA, 22 bp, synthetic construct
  misc_feature 1..22: note = Target B2M Sequence complement
  source 1..22: mol_type = other DNA
caggttgctccacaggtagctc

SEQ ID NO: 11586 - DNA, 22 bp, synthetic construct
  misc_feature 1..22: note = Target B2M Sequence complement
  source 1..22: mol_type = other DNA
aggttgctccacaggtagctct

SEQ ID NO: 11587 - DNA, 22 bp, synthetic construct
  misc_feature 1..22: note = Target B2M Sequence complement
  source 1..22: mol_type = other DNA
ggttgctccacaggtagctcta

SEQ ID NO: 11588 - DNA, 22 bp, synthetic construct
  misc_feature 1..22: note = Target B2M Sequence complement
  source 1..22: mol_type = other DNA
gttgctccacaggtagctctag

SEQ ID NO: 11589 - DNA, 22 bp, synthetic construct
  misc_feature 1..22: note = Target B2M Sequence complement
  source 1..22: mol_type = other DNA
ttgctccacaggtagctctagg

SEQ ID NO: 11590 - DNA, 22 bp, synthetic construct
  misc_feature 1..22: note = Target B2M Sequence complement
  source 1..22: mol_type = other DNA
tgctccacaggtagctctagga

SEQ ID NO: 11591 - DNA, 22 bp, synthetic construct
  misc_feature 1..22: note = Target B2M Sequence complement
  source 1..22: mol_type = other DNA
gctccacaggtagctctaggag

SEQ ID NO: 11592 - DNA, 22 bp, synthetic construct
  misc_feature 1..22: note = Target B2M Sequence complement
  source 1..22: mol_type = other DNA
ctccacaggtagctctaggagg

SEQ ID NO: 11593 - DNA, 22 bp, synthetic construct
  misc_feature 1..22: note = Target B2M Sequence complement
  source 1..22: mol_type = other DNA
tccacaggtagctctaggaggg

SEQ ID NO: 11594 - DNA, 22 bp, synthetic construct
  misc_feature 1..22: note = Target B2M Sequence complement
  source 1..22: mol_type = other DNA
cacaggtagctctaggagggct

SEQ ID NO: 11595 - DNA, 22 bp, synthetic construct
  misc_feature 1..22: note = Target B2M Sequence complement
  source 1..22: mol_type = other DNA
acaggtagctctaggagggctg

SEQ ID NO: 11596 - DNA, 22 bp, synthetic construct
  misc_feature 1..22: note = Target B2M Sequence complement
  source 1..22: mol_type = other DNA
gtagctctaggagggctggcaa

SEQ ID NO: 11597 - DNA, 22 bp, synthetic construct
  misc_feature 1..22: note = Target B2M Sequence complement
  source 1..22: mol_type = other DNA
tagctctaggagggctggcaac

SEQ ID NO: 11598 - DNA, 22 bp, synthetic construct
  misc_feature 1..22: note = Target B2M Sequence complement
  source 1..22: mol_type = other DNA
agctctaggagggctggcaact

SEQ ID NO: 11599 - DNA, 22 bp, synthetic construct
  misc_feature 1..22: note = Target B2M Sequence complement
  source 1..22: mol_type = other DNA
gctctaggagggctggcaactt

SEQ ID NO: 11600 - DNA, 22 bp, synthetic construct
  misc_feature 1..22: note = Target B2M Sequence complement
  source 1..22: mol_type = other DNA
ctctaggagggctggcaactta

SEQ ID NO: 11601 - DNA, 22 bp, synthetic construct
  misc_feature 1..22: note = Target B2M Sequence complement
  source 1..22: mol_type = other DNA
tctaggagggctggcaacttag

SEQ ID NO: 11602 - DNA, 22 bp, synthetic construct
  misc_feature 1..22: note = Target B2M Sequence complement
  source 1..22: mol_type = other DNA
ctaggagggctggcaacttaga

SEQ ID NO: 11603 - DNA, 22 bp, synthetic construct
  misc_feature 1..22: note = Target B2M Sequence complement
  source 1..22: mol_type = other DNA
taggagggctggcaacttagag

SEQ ID NO: 11604 - DNA, 22 bp, synthetic construct
  misc_feature 1..22: note = Target B2M Sequence complement
  source 1..22: mol_type = other DNA
aggagggctggcaacttagagg

SEQ ID NO: 11605 - DNA, 22 bp, synthetic construct
  misc_feature 1..22: note = Target B2M Sequence complement
  source 1..22: mol_type = other DNA
ggagggctggcaacttagaggt

SEQ ID NO: 11606 - DNA, 22 bp, synthetic construct
  misc_feature 1..22: note = Target B2M Sequence complement
  source 1..22: mol_type = other DNA
gagggctggcaacttagaggtg

SEQ ID NO: 11607 - DNA, 22 bp, synthetic construct
  misc_feature 1..22: note = Target B2M Sequence complement
  source 1..22: mol_type = other DNA
agggctggcaacttagaggtgg

SEQ ID NO: 11608 - DNA, 22 bp, synthetic construct
  misc_feature 1..22: note = Target B2M Sequence complement
  source 1..22: mol_type = other DNA
gggagcagagaattctcttatc

SEQ ID NO: 11609 - DNA, 22 bp, synthetic construct
  misc_feature 1..22: note = Target B2M Sequence complement
  source 1..22: mol_type = other DNA
ggagcagagaattctcttatcc

SEQ ID NO: 11610 - DNA, 22 bp, synthetic construct
  misc_feature 1..22: note = Target B2M Sequence complement
  source 1..22: mol_type = other DNA
gagcagagaattctcttatcca

SEQ ID NO: 11611 - DNA, 22 bp, synthetic construct
  misc_feature 1..22: note = Target B2M Sequence complement
  source 1..22: mol_type = other DNA
agcagagaattctcttatccaa

SEQ ID NO: 11612 - DNA, 22 bp, synthetic construct
  misc_feature 1..22: note = Target B2M Sequence complement
  source 1..22: mol_type = other DNA
gcagagaattctcttatccaac

SEQ ID NO: 11613 - DNA, 22 bp, synthetic construct
  misc_feature 1..22: note = Target B2M Sequence complement
  source 1..22: mol_type = other DNA
cagagaattctcttatccaaca

SEQ ID NO: 11614 - DNA, 22 bp, synthetic construct
  misc_feature 1..22: note = Target B2M Sequence complement
  source 1..22: mol_type = other DNA
agagaattctcttatccaacat

SEQ ID NO: 11615 - DNA, 22 bp, synthetic construct
  misc_feature 1..22: note = Target B2M Sequence complement
  source 1..22: mol_type = other DNA
gagaattctcttatccaacatc

SEQ ID NO: 11616 - DNA, 22 bp, synthetic construct
  misc_feature 1..22: note = Target B2M Sequence complement
  source 1..22: mol_type = other DNA
agaattctcttatccaacatca

SEQ ID NO: 11617 - DNA, 22 bp, synthetic construct
  misc_feature 1..22: note = Target B2M Sequence complement
  source 1..22: mol_type = other DNA
gaattctcttatccaacatcaa

SEQ ID NO: 11618 - DNA, 22 bp, synthetic construct
  misc_feature 1..22: note = Target B2M Sequence complement
  source 1..22: mol_type = other DNA
aattctcttatccaacatcaac

SEQ ID NO: 11619 - DNA, 22 bp, synthetic construct
  misc_feature 1..22: note = Target B2M Sequence complement
  source 1..22: mol_type = other DNA
attctcttatccaacatcaaca

SEQ ID NO: 11620 - DNA, 22 bp, synthetic construct
  misc_feature 1..22: note = Target B2M Sequence complement
  source 1..22: mol_type = other DNA
ttctcttatccaacatcaacat

SEQ ID NO: 11621 - DNA, 22 bp, synthetic construct
  misc_feature 1..22: note = Target B2M Sequence complement
  source 1..22: mol_type = other DNA
tctcttatccaacatcaacatc

SEQ ID NO: 11622 - DNA, 22 bp, synthetic construct
  misc_feature 1..22: note = Target B2M Sequence complement
  source 1..22: mol_type = other DNA
ctcttatccaacatcaacatct

SEQ ID NO: 11623 - DNA, 22 bp, synthetic construct
  misc_feature 1..22: note = Target B2M Sequence complement
  source 1..22: mol_type = other DNA
tcttatccaacatcaacatctt

SEQ ID NO: 11624 - DNA, 22 bp, synthetic construct
  misc_feature 1..22: note = Target B2M Sequence complement
  source 1..22: mol_type = other DNA
cttatccaacatcaacatcttg

SEQ ID NO: 11625 - DNA, 22 bp, synthetic construct
  misc_feature 1..22: note = Target B2M Sequence complement
  source 1..22: mol_type = other DNA
ttatccaacatcaacatcttgg

SEQ ID NO: 11626 - DNA, 22 bp, synthetic construct
  misc_feature 1..22: note = Target B2M Sequence complement
  source 1..22: mol_type = other DNA
tatccaacatcaacatcttggt

SEQ ID NO: 11627 - DNA, 22 bp, synthetic construct
  misc_feature 1..22: note = Target B2M Sequence complement
  source 1..22: mol_type = other DNA
atccaacatcaacatcttggtc

SEQ ID NO: 11628 - DNA, 22 bp, synthetic construct
  misc_feature 1..22: note = Target B2M Sequence complement
  source 1..22: mol_type = other DNA
tccaacatcaacatcttggtca

SEQ ID NO: 11629 - DNA, 22 bp, synthetic construct
  misc_feature 1..22: note = Target B2M Sequence complement
  source 1..22: mol_type = other DNA
ccaacatcaacatcttggtcag

SEQ ID NO: 11630 - DNA, 22 bp, synthetic construct
  misc_feature 1..22: note = Target B2M Sequence complement
  source 1..22: mol_type = other DNA
caacatcaacatcttggtcaga

SEQ ID NO: 11631 - DNA, 22 bp, synthetic construct
  misc_feature 1..22: note = Target B2M Sequence complement
  source 1..22: mol_type = other DNA
aacatcaacatcttggtcagat

SEQ ID NO: 11632 - DNA, 22 bp, synthetic construct
  misc_feature 1..22: note = Target B2M Sequence complement
  source 1..22: mol_type = other DNA
acatcaacatcttggtcagatt

SEQ ID NO: 11633 - DNA, 22 bp, synthetic construct
  misc_feature 1..22: note = Target B2M Sequence complement
  source 1..22: mol_type = other DNA
catcaacatcttggtcagattt

SEQ ID NO: 11634 - DNA, 22 bp, synthetic construct
  misc_feature 1..22: note = Target B2M Sequence complement
  source 1..22: mol_type = other DNA
atcaacatcttggtcagatttg

SEQ ID NO: 11635 - DNA, 22 bp, synthetic construct
  misc_feature 1..22: note = Target B2M Sequence complement
  source 1..22: mol_type = other DNA
tcaacatcttggtcagatttga

SEQ ID NO: 11636 - DNA, 22 bp, synthetic construct
  misc_feature 1..22: note = Target B2M Sequence complement
  source 1..22: mol_type = other DNA
caacatcttggtcagatttgaa

SEQ ID NO: 11637 - DNA, 22 bp, synthetic construct
  misc_feature 1..22: note = Target B2M Sequence complement
  source 1..22: mol_type = other DNA
aacatcttggtcagatttgaac

SEQ ID NO: 11638 - DNA, 22 bp, synthetic construct
  misc_feature 1..22: note = Target B2M Sequence complement
  source 1..22: mol_type = other DNA
acatcttggtcagatttgaact

SEQ ID NO: 11639 - DNA, 22 bp, synthetic construct
  misc_feature 1..22: note = Target B2M Sequence complement
  source 1..22: mol_type = other DNA
catcttggtcagatttgaactc

SEQ ID NO: 11640 - DNA, 22 bp, synthetic construct
  misc_feature 1..22: note = Target B2M Sequence complement
  source 1..22: mol_type = other DNA
atcttggtcagatttgaactct

SEQ ID NO: 11641 - DNA, 22 bp, synthetic construct
  misc_feature 1..22: note = Target B2M Sequence complement
  source 1..22: mol_type = other DNA
tcttggtcagatttgaactctt

SEQ ID NO: 11642 - DNA, 22 bp, synthetic construct
  misc_feature 1..22: note = Target B2M Sequence complement
  source 1..22: mol_type = other DNA
cttggtcagatttgaactcttc

SEQ ID NO: 11643 - DNA, 22 bp, synthetic construct
  misc_feature 1..22: note = Target B2M Sequence complement
  source 1..22: mol_type = other DNA
ttggtcagatttgaactcttca

SEQ ID NO: 11644 - DNA, 22 bp, synthetic construct
  misc_feature 1..22: note = Target B2M Sequence complement
  source 1..22: mol_type = other DNA
tggtcagatttgaactcttcaa

SEQ ID NO: 11645 - DNA, 22 bp, synthetic construct
  misc_feature 1..22: note = Target B2M Sequence complement
  source 1..22: mol_type = other DNA
ggtcagatttgaactcttcaat

SEQ ID NO: 11646 - DNA, 22 bp, synthetic construct
  misc_feature 1..22: note = Target B2M Sequence complement
  source 1..22: mol_type = other DNA
gtcagatttgaactcttcaatc

SEQ ID NO: 11647 - DNA, 22 bp, synthetic construct
  misc_feature 1..22: note = Target B2M Sequence complement
  source 1..22: mol_type = other DNA
tcagatttgaactcttcaatct

SEQ ID NO: 11648 - DNA, 22 bp, synthetic construct
  misc_feature 1..22: note = Target B2M Sequence complement
  source 1..22: mol_type = other DNA
cagatttgaactcttcaatctc

SEQ ID NO: 11649 - DNA, 22 bp, synthetic construct
  misc_feature 1..22: note = Target B2M Sequence complement
  source 1..22: mol_type = other DNA
agatttgaactcttcaatctct

SEQ ID NO: 11650 - DNA, 22 bp, synthetic construct
  misc_feature 1..22: note = Target B2M Sequence complement
  source 1..22: mol_type = other DNA
gatttgaactcttcaatctctt

SEQ ID NO: 11651 - DNA, 22 bp, synthetic construct
  misc_feature 1..22: note = Target B2M Sequence complement
  source 1..22: mol_type = other DNA
atttgaactcttcaatctcttg

SEQ ID NO: 11652 - DNA, 22 bp, synthetic construct
  misc_feature 1..22: note = Target B2M Sequence complement
  source 1..22: mol_type = other DNA
tttgaactcttcaatctcttgc

SEQ ID NO: 11653 - DNA, 22 bp, synthetic construct
  misc_feature 1..22: note = Target B2M Sequence complement
  source 1..22: mol_type = other DNA
ttgaactcttcaatctcttgca

SEQ ID NO: 11654 - DNA, 22 bp, synthetic construct
  misc_feature 1..22: note = Target B2M Sequence complement
  source 1..22: mol_type = other DNA
tgaactcttcaatctcttgcac

SEQ ID NO: 11655 - DNA, 22 bp, synthetic construct
  misc_feature 1..22: note = Target B2M Sequence complement
  source 1..22: mol_type = other DNA
gaactcttcaatctcttgcact

SEQ ID NO: 11656 - DNA, 22 bp, synthetic construct
  misc_feature 1..22: note = Target B2M Sequence complement
  source 1..22: mol_type = other DNA
aactcttcaatctcttgcactc

SEQ ID NO: 11657 - DNA, 22 bp, synthetic construct
  misc_feature 1..22: note = Target B2M Sequence complement
  source 1..22: mol_type = other DNA
actcttcaatctcttgcactca

SEQ ID NO: 11658 - DNA, 22 bp, synthetic construct
  misc_feature 1..22: note = Target B2M Sequence complement
  source 1..22: mol_type = other DNA
ctcttcaatctcttgcactcaa

SEQ ID NO: 11659 - DNA, 22 bp, synthetic construct
  misc_feature 1..22: note = Target B2M Sequence complement
  source 1..22: mol_type = other DNA
tcttcaatctcttgcactcaaa

SEQ ID NO: 11660 - DNA, 22 bp, synthetic construct
  misc_feature 1..22: note = Target B2M Sequence complement
  source 1..22: mol_type = other DNA
cttcaatctcttgcactcaaag

SEQ ID NO: 11661 - DNA, 22 bp, synthetic construct
  misc_feature 1..22: note = Target B2M Sequence complement
  source 1..22: mol_type = other DNA
ttcaatctcttgcactcaaagc

SEQ ID NO: 11662 - DNA, 22 bp, synthetic construct
  misc_feature 1..22: note = Target B2M Sequence complement
  source 1..22: mol_type = other DNA
tcaatctcttgcactcaaagct

SEQ ID NO: 11663 - DNA, 22 bp, synthetic construct
  misc_feature 1..22: note = Target B2M Sequence complement
  source 1..22: mol_type = other DNA
caatctcttgcactcaaagctt

SEQ ID NO: 11664 - DNA, 22 bp, synthetic construct
  misc_feature 1..22: note = Target B2M Sequence complement
  source 1..22: mol_type = other DNA
aatctcttgcactcaaagcttg

SEQ ID NO: 11665 - DNA, 22 bp, synthetic construct
  misc_feature 1..22: note = Target B2M Sequence complement
  source 1..22: mol_type = other DNA
atctcttgcactcaaagcttgt

SEQ ID NO: 11666 - DNA, 22 bp, synthetic construct
  misc_feature 1..22: note = Target B2M Sequence complement
  source 1..22: mol_type = other DNA
tctcttgcactcaaagcttgtt

SEQ ID NO: 11667 - DNA, 22 bp, synthetic construct
  misc_feature 1..22: note = Target B2M Sequence complement
  source 1..22: mol_type = other DNA
ctcttgcactcaaagcttgtta

SEQ ID NO: 11668 - DNA, 22 bp, synthetic construct
  misc_feature 1..22: note = Target B2M Sequence complement
  source 1..22: mol_type = other DNA
tcttgcactcaaagcttgttaa

SEQ ID NO: 11669 - DNA, 22 bp, synthetic construct
  misc_feature 1..22: note = Target B2M Sequence complement
  source 1..22: mol_type = other DNA
cttgcactcaaagcttgttaag

SEQ ID NO: 11670 - DNA, 22 bp, synthetic construct
  misc_feature 1..22: note = Target B2M Sequence complement
  source 1..22: mol_type = other DNA
ttgcactcaaagcttgttaaga

SEQ ID NO: 11671 - DNA, 22 bp, synthetic construct
  misc_feature 1..22: note = Target B2M Sequence complement
  source 1..22: mol_type = other DNA
tgcactcaaagcttgttaagat

SEQ ID NO: 11672 - DNA, 22 bp, synthetic construct
  misc_feature 1..22: note = Target B2M Sequence complement
  source 1..22: mol_type = other DNA
gcactcaaagcttgttaagata

SEQ ID NO: 11673 - DNA, 22 bp, synthetic construct
  misc_feature 1..22: note = Target B2M Sequence complement
  source 1..22: mol_type = other DNA
cactcaaagcttgttaagatag

SEQ ID NO: 11674 - DNA, 22 bp, synthetic construct
  misc_feature 1..22: note = Target B2M Sequence complement
  source 1..22: mol_type = other DNA
actcaaagcttgttaagatagt

SEQ ID NO: 11675 - DNA, 22 bp, synthetic construct
  misc_feature 1..22: note = Target B2M Sequence complement
  source 1..22: mol_type = other DNA
ctcaaagcttgttaagatagtt

SEQ ID NO: 11676 - DNA, 22 bp, synthetic construct
  misc_feature 1..22: note = Target B2M Sequence complement
  source 1..22: mol_type = other DNA
tcaaagcttgttaagatagtta

SEQ ID NO: 11677 - DNA, 22 bp, synthetic construct
  misc_feature 1..22: note = Target B2M Sequence complement
  source 1..22: mol_type = other DNA
caaagcttgttaagatagttaa

SEQ ID NO: 11678 - DNA, 22 bp, synthetic construct
  misc_feature 1..22: note = Target B2M Sequence complement
  source 1..22: mol_type = other DNA
aaagcttgttaagatagttaag

SEQ ID NO: 11679 - DNA, 22 bp, synthetic construct
  misc_feature 1..22: note = Target B2M Sequence complement
  source 1..22: mol_type = other DNA
aagcttgttaagatagttaagc

SEQ ID NO: 11680 - DNA, 22 bp, synthetic construct
  misc_feature 1..22: note = Target B2M Sequence complement
  source 1..22: mol_type = other DNA
agcttgttaagatagttaagcg

SEQ ID NO: 11681 - DNA, 22 bp, synthetic construct
  misc_feature 1..22: note = Target B2M Sequence complement
  source 1..22: mol_type = other DNA
gcttgttaagatagttaagcgt

SEQ ID NO: 11682 - DNA, 22 bp, synthetic construct
  misc_feature 1..22: note = Target B2M Sequence complement
  source 1..22: mol_type = other DNA
cttgttaagatagttaagcgtg

SEQ ID NO: 11683 - DNA, 22 bp, synthetic construct
  misc_feature 1..22: note = Target B2M Sequence complement
  source 1..22: mol_type = other DNA
ttgttaagatagttaagcgtgc

SEQ ID NO: 11684 - DNA, 22 bp, synthetic construct
  misc_feature 1..22: note = Target B2M Sequence complement
  source 1..22: mol_type = other DNA
tgttaagatagttaagcgtgca

SEQ ID NO: 11685 - DNA, 22 bp, synthetic construct
  misc_feature 1..22: note = Target B2M Sequence complement
  source 1..22: mol_type = other DNA
gttaagatagttaagcgtgcat

SEQ ID NO: 11686 - DNA, 22 bp, synthetic construct
  misc_feature 1..22: note = Target B2M Sequence complement
  source 1..22: mol_type = other DNA
ttaagatagttaagcgtgcata

SEQ ID NO: 11687 - DNA, 22 bp, synthetic construct
  misc_feature 1..22: note = Target B2M Sequence complement
  source 1..22: mol_type = other DNA
taagatagttaagcgtgcataa

SEQ ID NO: 11688 - DNA, 22 bp, synthetic construct
  misc_feature 1..22: note = Target B2M Sequence complement
  source 1..22: mol_type = other DNA
aagatagttaagcgtgcataag

SEQ ID NO: 11689 - DNA, 22 bp, synthetic construct
  misc_feature 1..22: note = Target B2M Sequence complement
  source 1..22: mol_type = other DNA
agatagttaagcgtgcataagt

SEQ ID NO: 11690 - DNA, 22 bp, synthetic construct
  misc_feature 1..22: note = Target B2M Sequence complement
  source 1..22: mol_type = other DNA
gatagttaagcgtgcataagtt

SEQ ID NO: 11691 - DNA, 22 bp, synthetic construct
  misc_feature 1..22: note = Target B2M Sequence complement
  source 1..22: mol_type = other DNA
atagttaagcgtgcataagtta

SEQ ID NO: 11692 - DNA, 22 bp, synthetic construct
  misc_feature 1..22: note = Target B2M Sequence complement
  source 1..22: mol_type = other DNA
tagttaagcgtgcataagttaa

SEQ ID NO: 11693 - DNA, 22 bp, synthetic construct
  misc_feature 1..22: note = Target B2M Sequence complement
  source 1..22: mol_type = other DNA
agttaagcgtgcataagttaac

SEQ ID NO: 11694 - DNA, 22 bp, synthetic construct
  misc_feature 1..22: note = Target B2M Sequence complement
  source 1..22: mol_type = other DNA
gttaagcgtgcataagttaact

SEQ ID NO: 11695 - DNA, 22 bp, synthetic construct
  misc_feature 1..22: note = Target B2M Sequence complement
  source 1..22: mol_type = other DNA
ttaagcgtgcataagttaactt

SEQ ID NO: 11696 - DNA, 22 bp, synthetic construct
  misc_feature 1..22: note = Target B2M Sequence complement
  source 1..22: mol_type = other DNA
taagcgtgcataagttaacttc

SEQ ID NO: 11697 - DNA, 22 bp, synthetic construct
  misc_feature 1..22: note = Target B2M Sequence complement
  source 1..22: mol_type = other DNA
aagcgtgcataagttaacttcc

SEQ ID NO: 11698 - DNA, 22 bp, synthetic construct
  misc_feature 1..22: note = Target B2M Sequence complement
  source 1..22: mol_type = other DNA
agcgtgcataagttaacttcca

SEQ ID NO: 11699 - DNA, 22 bp, synthetic construct
  misc_feature 1..22: note = Target B2M Sequence complement
  source 1..22: mol_type = other DNA
gcgtgcataagttaacttccaa

SEQ ID NO: 11700 - DNA, 22 bp, synthetic construct
  misc_feature 1..22: note = Target B2M Sequence complement
  source 1..22: mol_type = other DNA
cgtgcataagttaacttccaat

SEQ ID NO: 11701 - DNA, 22 bp, synthetic construct
  misc_feature 1..22: note = Target B2M Sequence complement
  source 1..22: mol_type = other DNA
gtgcataagttaacttccaatt

SEQ ID NO: 11702 - DNA, 22 bp, synthetic construct
  misc_feature 1..22: note = Target B2M Sequence complement
  source 1..22: mol_type = other DNA
tgcataagttaacttccaattt

SEQ ID NO: 11703 - DNA, 22 bp, synthetic construct
  misc_feature 1..22: note = Target B2M Sequence complement
  source 1..22: mol_type = other DNA
gcataagttaacttccaattta

SEQ ID NO: 11704 - DNA, 22 bp, synthetic construct
  misc_feature 1..22: note = Target B2M Sequence complement
  source 1..22: mol_type = other DNA
cataagttaacttccaatttac

SEQ ID NO: 11705 - DNA, 22 bp, synthetic construct
  misc_feature 1..22: note = Target B2M Sequence complement
  source 1..22: mol_type = other DNA
agttaacttccaatttacatac

SEQ ID NO: 11706 - DNA, 22 bp, synthetic construct
  misc_feature 1..22: note = Target B2M Sequence complement
  source 1..22: mol_type = other DNA
gttaacttccaatttacatact

SEQ ID NO: 11707 - DNA, 22 bp, synthetic construct
  misc_feature 1..22: note = Target B2M Sequence complement
  source 1..22: mol_type = other DNA
ttaacttccaatttacatactc

SEQ ID NO: 11708 - DNA, 22 bp, synthetic construct
  misc_feature 1..22: note = Target B2M Sequence complement
  source 1..22: mol_type = other DNA
taacttccaatttacatactct

SEQ ID NO: 11709 - DNA, 22 bp, synthetic construct
  misc_feature 1..22: note = Target B2M Sequence complement
  source 1..22: mol_type = other DNA
aacttccaatttacatactctg

SEQ ID NO: 11710 - DNA, 22 bp, synthetic construct
  misc_feature 1..22: note = Target B2M Sequence complement
  source 1..22: mol_type = other DNA
acttccaatttacatactctgc

SEQ ID NO: 11711 - DNA, 22 bp, synthetic construct
  misc_feature 1..22: note = Target B2M Sequence complement
  source 1..22: mol_type = other DNA
cttccaatttacatactctgct

SEQ ID NO: 11712 - DNA, 22 bp, synthetic construct
  misc_feature 1..22: note = Target B2M Sequence complement
  source 1..22: mol_type = other DNA
ttccaatttacatactctgctt

SEQ ID NO: 11713 - DNA, 22 bp, synthetic construct
  misc_feature 1..22: note = Target B2M Sequence complement
  source 1..22: mol_type = other DNA
tccaatttacatactctgctta

SEQ ID NO: 11714 - DNA, 22 bp, synthetic construct
  misc_feature 1..22: note = Target B2M Sequence complement
  source 1..22: mol_type = other DNA
ccaatttacatactctgcttag

SEQ ID NO: 11715 - DNA, 22 bp, synthetic construct
  misc_feature 1..22: note = Target B2M Sequence complement
  source 1..22: mol_type = other DNA
caatttacatactctgcttaga

SEQ ID NO: 11716 - DNA, 22 bp, synthetic construct
  misc_feature 1..22: note = Target B2M Sequence complement
  source 1..22: mol_type = other DNA
aatttacatactctgcttagaa

SEQ ID NO: 11717 - DNA, 22 bp, synthetic construct
  misc_feature 1..22: note = Target B2M Sequence complement
  source 1..22: mol_type = other DNA
atttacatactctgcttagaat

SEQ ID NO: 11718 - DNA, 22 bp, synthetic construct
  misc_feature 1..22: note = Target B2M Sequence complement
  source 1..22: mol_type = other DNA
tttacatactctgcttagaatt

SEQ ID NO: 11719 - DNA, 22 bp, synthetic construct
  misc_feature 1..22: note = Target B2M Sequence complement
  source 1..22: mol_type = other DNA
ttacatactctgcttagaattt

SEQ ID NO: 11720 - DNA, 22 bp, synthetic construct
  misc_feature 1..22: note = Target B2M Sequence complement
  source 1..22: mol_type = other DNA
tacatactctgcttagaatttg

SEQ ID NO: 11721 - DNA, 22 bp, synthetic construct
  misc_feature 1..22: note = Target B2M Sequence complement
  source 1..22: mol_type = other DNA
acatactctgcttagaatttgg

SEQ ID NO: 11722 - DNA, 22 bp, synthetic construct
  misc_feature 1..22: note = Target B2M Sequence complement
  source 1..22: mol_type = other DNA
catactctgcttagaatttggg

SEQ ID NO: 11723 - DNA, 22 bp, synthetic construct
  misc_feature 1..22: note = Target B2M Sequence complement
  source 1..22: mol_type = other DNA
atataattgacaggattattgg

SEQ ID NO: 11724 - DNA, 22 bp, synthetic construct
  misc_feature 1..22: note = Target B2M Sequence complement
  source 1..22: mol_type = other DNA
tataattgacaggattattgga

SEQ ID NO: 11725 - DNA, 22 bp, synthetic construct
  misc_feature 1..22: note = Target B2M Sequence complement
  source 1..22: mol_type = other DNA
ataattgacaggattattggaa

SEQ ID NO: 11726 - DNA, 22 bp, synthetic construct
  misc_feature 1..22: note = Target B2M Sequence complement
  source 1..22: mol_type = other DNA
taattgacaggattattggaaa

SEQ ID NO: 11727 - DNA, 22 bp, synthetic construct
  misc_feature 1..22: note = Target B2M Sequence complement
  source 1..22: mol_type = other DNA
aattgacaggattattggaaat

SEQ ID NO: 11728 - DNA, 22 bp, synthetic construct
  misc_feature 1..22: note = Target B2M Sequence complement
  source 1..22: mol_type = other DNA
attgacaggattattggaaatt

SEQ ID NO: 11729 - DNA, 22 bp, synthetic construct
  misc_feature 1..22: note = Target B2M Sequence complement
  source 1..22: mol_type = other DNA
ttgacaggattattggaaattt

SEQ ID NO: 11730 - DNA, 22 bp, synthetic construct
  misc_feature 1..22: note = Target B2M Sequence complement
  source 1..22: mol_type = other DNA
tgacaggattattggaaatttg

SEQ ID NO: 11731 - DNA, 22 bp, synthetic construct
  misc_feature 1..22: note = Target B2M Sequence complement
  source 1..22: mol_type = other DNA
gacaggattattggaaatttgt

SEQ ID NO: 11732 - DNA, 22 bp, synthetic construct
  misc_feature 1..22: note = Target B2M Sequence complement
  source 1..22: mol_type = other DNA
acaggattattggaaatttgtt

SEQ ID NO: 11733 - DNA, 22 bp, synthetic construct
  misc_feature 1..22: note = Target B2M Sequence complement
  source 1..22: mol_type = other DNA
caggattattggaaatttgtta

SEQ ID NO: 11734 - DNA, 22 bp, synthetic construct
  misc_feature 1..22: note = Target B2M Sequence complement
  source 1..22: mol_type = other DNA
tatacatttgataaagtaaggc

SEQ ID NO: 11735 - DNA, 22 bp, synthetic construct
  misc_feature 1..22: note = Target B2M Sequence complement
  source 1..22: mol_type = other DNA
atacatttgataaagtaaggca

SEQ ID NO: 11736 - DNA, 22 bp, synthetic construct
  misc_feature 1..22: note = Target B2M Sequence complement
  source 1..22: mol_type = other DNA
tacatttgataaagtaaggcat

SEQ ID NO: 11737 - DNA, 22 bp, synthetic construct
  misc_feature 1..22: note = Target B2M Sequence complement
  source 1..22: mol_type = other DNA
acatttgataaagtaaggcatg

SEQ ID NO: 11738 - DNA, 22 bp, synthetic construct
  misc_feature 1..22: note = Target B2M Sequence complement
  source 1..22: mol_type = other DNA
catttgataaagtaaggcatgg

SEQ ID NO: 11739 - DNA, 22 bp, synthetic construct
  misc_feature 1..22: note = Target B2M Sequence complement
  source 1..22: mol_type = other DNA
atttgataaagtaaggcatggt

SEQ ID NO: 11740 - DNA, 22 bp, synthetic construct
  misc_feature 1..22: note = Target B2M Sequence complement
  source 1..22: mol_type = other DNA
tttgataaagtaaggcatggtt

SEQ ID NO: 11741 - DNA, 22 bp, synthetic construct
  misc_feature 1..22: note = Target B2M Sequence complement
  source 1..22: mol_type = other DNA
ttgataaagtaaggcatggttg

SEQ ID NO: 11742 - DNA, 22 bp, synthetic construct
  misc_feature 1..22: note = Target B2M Sequence complement
  source 1..22: mol_type = other DNA
tgataaagtaaggcatggttgt

SEQ ID NO: 11743 - DNA, 22 bp, synthetic construct
  misc_feature 1..22: note = Target B2M Sequence complement
  source 1..22: mol_type = other DNA
gataaagtaaggcatggttgtg

SEQ ID NO: 11744 - DNA, 22 bp, synthetic construct
  misc_feature 1..22: note = Target B2M Sequence complement
  source 1..22: mol_type = other DNA
ataaagtaaggcatggttgtgg

SEQ ID NO: 11745 - DNA, 22 bp, synthetic construct
  misc_feature 1..22: note = Target B2M Sequence complement
  source 1..22: mol_type = other DNA
taaagtaaggcatggttgtggt

SEQ ID NO: 11746 - DNA, 22 bp, synthetic construct
  misc_feature 1..22: note = Target B2M Sequence complement
  source 1..22: mol_type = other DNA
aaagtaaggcatggttgtggtt

SEQ ID NO: 11747 - DNA, 22 bp, synthetic construct
  misc_feature 1..22: note = Target B2M Sequence complement
  source 1..22: mol_type = other DNA
aagtaaggcatggttgtggtta

SEQ ID NO: 11748 - DNA, 22 bp, synthetic construct
  misc_feature 1..22: note = Target B2M Sequence complement
  source 1..22: mol_type = other DNA
agtaaggcatggttgtggttaa

SEQ ID NO: 11749 - DNA, 22 bp, synthetic construct
  misc_feature 1..22: note = Target B2M Sequence complement
  source 1..22: mol_type = other DNA
gtaaggcatggttgtggttaat

SEQ ID NO: 11750 - DNA, 22 bp, synthetic construct
  misc_feature 1..22: note = Target B2M Sequence complement
  source 1..22: mol_type = other DNA
taaggcatggttgtggttaatc

SEQ ID NO: 11751 - DNA, 22 bp, synthetic construct
  misc_feature 1..22: note = Target B2M Sequence complement
  source 1..22: mol_type = other DNA
aaggcatggttgtggttaatct

SEQ ID NO: 11752 - DNA, 22 bp, synthetic construct
  misc_feature 1..22: note = Target B2M Sequence complement
  source 1..22: mol_type = other DNA
aggcatggttgtggttaatctg

SEQ ID NO: 11753 - DNA, 22 bp, synthetic construct
  misc_feature 1..22: note = Target B2M Sequence complement
  source 1..22: mol_type = other DNA
ggcatggttgtggttaatctgg

SEQ ID NO: 11754 - DNA, 22 bp, synthetic construct
  misc_feature 1..22: note = Target B2M Sequence complement
  source 1..22: mol_type = other DNA
gcatggttgtggttaatctggt

SEQ ID NO: 11755 - DNA, 22 bp, synthetic construct
  misc_feature 1..22: note = Target B2M Sequence complement
  source 1..22: mol_type = other DNA
catggttgtggttaatctggtt

SEQ ID NO: 11756 - DNA, 22 bp, synthetic construct
  misc_feature 1..22: note = Target B2M Sequence complement
  source 1..22: mol_type = other DNA
atggttgtggttaatctggttt

SEQ ID NO: 11757 - DNA, 22 bp, synthetic construct
  misc_feature 1..22: note = Target B2M Sequence complement
  source 1..22: mol_type = other DNA
tggttgtggttaatctggttta

SEQ ID NO: 11758 - DNA, 22 bp, synthetic construct
  misc_feature 1..22: note = Target B2M Sequence complement
  source 1..22: mol_type = other DNA
ggttgtggttaatctggtttat

SEQ ID NO: 11759 - DNA, 22 bp, synthetic construct
  misc_feature 1..22: note = Target B2M Sequence complement
  source 1..22: mol_type = other DNA
gttgtggttaatctggtttatt

SEQ ID NO: 11760 - DNA, 22 bp, synthetic construct
  misc_feature 1..22: note = Target B2M Sequence complement
  source 1..22: mol_type = other DNA
ttgtggttaatctggtttattt

SEQ ID NO: 11761 - DNA, 22 bp, synthetic construct
  misc_feature 1..22: note = Target B2M Sequence complement
  source 1..22: mol_type = other DNA
tgttccacaagttaaataaatc

SEQ ID NO: 11762 - DNA, 22 bp, synthetic construct
  misc_feature 1..22: note = Target B2M Sequence complement
  source 1..22: mol_type = other DNA
gttccacaagttaaataaatca

SEQ ID NO: 11763 - DNA, 18 bp, synthetic construct
  misc_feature 1..18: note = Target B2M Sequence complement
  source 1..18: mol_type = other DNA
attcgggccgagatgtct

SEQ ID NO: 11764 - DNA, 18 bp, synthetic construct
  misc_feature 1..18: note = Target B2M Sequence complement
  source 1..18: mol_type = other DNA
tggagagagaattgaaaa

SEQ ID NO: 11765 - DNA, 18 bp, synthetic construct
  misc_feature 1..18: note = Target B2M Sequence complement
  source 1..18: mol_type = other DNA
ggagagagaattgaaaaa

SEQ ID NO: 11766 - DNA, 18 bp, synthetic construct
  misc_feature 1..18: note = Target B2M Sequence complement
  source 1..18: mol_type = other DNA
gagagagaattgaaaaag

SEQ ID NO: 11767 - DNA, 18 bp, synthetic construct
  misc_feature 1..18: note = Target B2M Sequence complement
  source 1..18: mol_type = other DNA
agagagaattgaaaaagt

SEQ ID NO: 11768 - DNA, 18 bp, synthetic construct
  misc_feature 1..18: note = Target B2M Sequence complement
  source 1..18: mol_type = other DNA
gagagaattgaaaaagtg

SEQ ID NO: 11769 - DNA, 18 bp, synthetic construct
  misc_feature 1..18: note = Target B2M Sequence complement
  source 1..18: mol_type = other DNA
agagaattgaaaaagtgg

SEQ ID NO: 11770 - DNA, 18 bp, synthetic construct
  misc_feature 1..18: note = Target B2M Sequence complement
  source 1..18: mol_type = other DNA
gagaattgaaaaagtgga

SEQ ID NO: 11771 - DNA, 18 bp, synthetic construct
  misc_feature 1..18: note = Target B2M Sequence complement
  source 1..18: mol_type = other DNA
agaattgaaaaagtggag

SEQ ID NO: 11772 - DNA, 18 bp, synthetic construct
  misc_feature 1..18: note = Target B2M Sequence complement
  source 1..18: mol_type = other DNA
gaattgaaaaagtggagc

SEQ ID NO: 11773 - DNA, 18 bp, synthetic construct
  misc_feature 1..18: note = Target B2M Sequence complement
  source 1..18: mol_type = other DNA
aattgaaaaagtggagca

SEQ ID NO: 11774 - DNA, 18 bp, synthetic construct
  misc_feature 1..18: note = Target B2M Sequence complement
  source 1..18: mol_type = other DNA
attgaaaaagtggagcat

SEQ ID NO: 11775 - DNA, 18 bp, synthetic construct
  misc_feature 1..18: note = Target B2M Sequence complement
  source 1..18: mol_type = other DNA
ttgaaaaagtggagcatt

SEQ ID NO: 11776 - DNA, 18 bp, synthetic construct
  misc_feature 1..18: note = Target B2M Sequence complement
  source 1..18: mol_type = other DNA
tgaaaaagtggagcattc

SEQ ID NO: 11777 - DNA, 18 bp, synthetic construct
  misc_feature 1..18: note = Target B2M Sequence complement
  source 1..18: mol_type = other DNA
gaaaaagtggagcattca

SEQ ID NO: 11778 - DNA, 18 bp, synthetic construct
  misc_feature 1..18: note = Target B2M Sequence complement
  source 1..18: mol_type = other DNA
aaaaagtggagcattcag

SEQ ID NO: 11779 - DNA, 18 bp, synthetic construct
  misc_feature 1..18: note = Target B2M Sequence complement
  source 1..18: mol_type = other DNA
aaaagtggagcattcaga

SEQ ID NO: 11780 - DNA, 18 bp, synthetic construct
  misc_feature 1..18: note = Target B2M Sequence complement
  source 1..18: mol_type = other DNA
ctacactgaattcacccc

SEQ ID NO: 11781 - DNA, 18 bp, synthetic construct
  misc_feature 1..18: note = Target B2M Sequence complement
  source 1..18: mol_type = other DNA
tacactgaattcaccccc

SEQ ID NO: 11782 - DNA, 18 bp, synthetic construct
  misc_feature 1..18: note = Target B2M Sequence complement
  source 1..18: mol_type = other DNA
acactgaattcaccccca

SEQ ID NO: 11783 - DNA, 18 bp, synthetic construct
  misc_feature 1..18: note = Target B2M Sequence complement
  source 1..18: mol_type = other DNA
cactgaattcacccccac

SEQ ID NO: 11784 - DNA, 18 bp, synthetic construct
  misc_feature 1..18: note = Target B2M Sequence complement
  source 1..18: mol_type = other DNA
actgaattcacccccact

SEQ ID NO: 11785 - DNA, 18 bp, synthetic construct
  misc_feature 1..18: note = Target B2M Sequence complement
  source 1..18: mol_type = other DNA
ctgaattcacccccactg

SEQ ID NO: 11786 - DNA, 18 bp, synthetic construct
  misc_feature 1..18: note = Target B2M Sequence complement
  source 1..18: mol_type = other DNA
tgaattcacccccactga

SEQ ID NO: 11787 - DNA, 18 bp, synthetic construct
  misc_feature 1..18: note = Target B2M Sequence complement
  source 1..18: mol_type = other DNA
gaattcacccccactgaa

SEQ ID NO: 11788 - DNA, 18 bp, synthetic construct
  misc_feature 1..18: note = Target B2M Sequence complement
  source 1..18: mol_type = other DNA
aattcacccccactgaaa

SEQ ID NO: 11789 - DNA, 18 bp, synthetic construct
  misc_feature 1..18: note = Target B2M Sequence complement
  source 1..18: mol_type = other DNA
attcacccccactgaaaa

SEQ ID NO: 11790 - DNA, 18 bp, synthetic construct
  misc_feature 1..18: note = Target B2M Sequence complement
  source 1..18: mol_type = other DNA
ttcacccccactgaaaaa

SEQ ID NO: 11791 - DNA, 18 bp, synthetic construct
  misc_feature 1..18: note = Target B2M Sequence complement
  source 1..18: mol_type = other DNA
tcacccccactgaaaaag

SEQ ID NO: 11792 - DNA, 18 bp, synthetic construct
  misc_feature 1..18: note = Target B2M Sequence complement
  source 1..18: mol_type = other DNA
cacccccactgaaaaaga

SEQ ID NO: 11793 - DNA, 18 bp, synthetic construct
  misc_feature 1..18: note = Target B2M Sequence complement
  source 1..18: mol_type = other DNA
acccccactgaaaaagat

SEQ ID NO: 11794 - DNA, 18 bp, synthetic construct
  misc_feature 1..18: note = Target B2M Sequence complement
  source 1..18: mol_type = other DNA
cccccactgaaaaagatg

SEQ ID NO: 11795 - DNA, 18 bp, synthetic construct
  misc_feature 1..18: note = Target B2M Sequence complement
  source 1..18: mol_type = other DNA
ccccactgaaaaagatga

SEQ ID NO: 11796 - DNA, 18 bp, synthetic construct
  misc_feature 1..18: note = Target B2M Sequence complement
  source 1..18: mol_type = other DNA
cccactgaaaaagatgag

SEQ ID NO: 11797 - DNA, 18 bp, synthetic construct
  misc_feature 1..18: note = Target B2M Sequence complement
  source 1..18: mol_type = other DNA
ccactgaaaaagatgagt

SEQ ID NO: 11798 - DNA, 18 bp, synthetic construct
  misc_feature 1..18: note = Target B2M Sequence complement
  source 1..18: mol_type = other DNA
cactgaaaaagatgagta

SEQ ID NO: 11799 - DNA, 18 bp, synthetic construct
  misc_feature 1..18: note = Target B2M Sequence complement
  source 1..18: mol_type = other DNA
actgaaaaagatgagtat

SEQ ID NO: 11800 - DNA, 18 bp, synthetic construct
  misc_feature 1..18: note = Target B2M Sequence complement
  source 1..18: mol_type = other DNA
ctgaaaaagatgagtatg

SEQ ID NO: 11801 - DNA, 18 bp, synthetic construct
  misc_feature 1..18: note = Target B2M Sequence complement
  source 1..18: mol_type = other DNA
tgaaaaagatgagtatgc

SEQ ID NO: 11802 - DNA, 18 bp, synthetic construct
  misc_feature 1..18: note = Target B2M Sequence complement
  source 1..18: mol_type = other DNA
gaaaaagatgagtatgcc

SEQ ID NO: 11803 - DNA, 18 bp, synthetic construct
  misc_feature 1..18: note = Target B2M Sequence complement
  source 1..18: mol_type = other DNA
aaaaagatgagtatgcct

SEQ ID NO: 11804 - DNA, 18 bp, synthetic construct
  misc_feature 1..18: note = Target B2M Sequence complement
  source 1..18: mol_type = other DNA
aaaagatgagtatgcctg

SEQ ID NO: 11805 - DNA, 18 bp, synthetic construct
  misc_feature 1..18: note = Target B2M Sequence complement
  source 1..18: mol_type = other DNA
ttctgcttgcttgctttt

SEQ ID NO: 11806 - DNA, 18 bp, synthetic construct
  misc_feature 1..18: note = Target B2M Sequence complement
  source 1..18: mol_type = other DNA
tctgcttgcttgcttttt

SEQ ID NO: 11807 - DNA, 18 bp, synthetic construct
  misc_feature 1..18: note = Target B2M Sequence complement
  source 1..18: mol_type = other DNA
ctgcttgcttgcttttta

SEQ ID NO: 11808 - DNA, 18 bp, synthetic construct
  misc_feature 1..18: note = Target B2M Sequence complement
  source 1..18: mol_type = other DNA
tgcttgcttgctttttaa

SEQ ID NO: 11809 - DNA, 18 bp, synthetic construct
  misc_feature 1..18: note = Target B2M Sequence complement
  source 1..18: mol_type = other DNA
gcttgcttgctttttaat

SEQ ID NO: 11810 - DNA, 18 bp, synthetic construct
  misc_feature 1..18: note = Target B2M Sequence complement
  source 1..18: mol_type = other DNA
cttgcttgctttttaata

SEQ ID NO: 11811 - DNA, 18 bp, synthetic construct
  misc_feature 1..18: note = Target B2M Sequence complement
  source 1..18: mol_type = other DNA
gcttgctttttaatattg

SEQ ID NO: 11812 - DNA, 18 bp, synthetic construct
  misc_feature 1..18: note = Target B2M Sequence complement
  source 1..18: mol_type = other DNA
tacactttatgcacaaaa

SEQ ID NO: 11813 - DNA, 18 bp, synthetic construct
  misc_feature 1..18: note = Target B2M Sequence complement
  source 1..18: mol_type = other DNA
acactttatgcacaaaat

SEQ ID NO: 11814 - DNA, 18 bp, synthetic construct
  misc_feature 1..18: note = Target B2M Sequence complement
  source 1..18: mol_type = other DNA
cactttatgcacaaaatg

SEQ ID NO: 11815 - DNA, 18 bp, synthetic construct
  misc_feature 1..18: note = Target B2M Sequence complement
  source 1..18: mol_type = other DNA
actttatgcacaaaatgt

SEQ ID NO: 11816 - DNA, 18 bp, synthetic construct
  misc_feature 1..18: note = Target B2M Sequence complement
  source 1..18: mol_type = other DNA
ctttatgcacaaaatgta

SEQ ID NO: 11817 - DNA, 18 bp, synthetic construct
  misc_feature 1..18: note = Target B2M Sequence complement
  source 1..18: mol_type = other DNA
tttatgcacaaaatgtag

SEQ ID NO: 11818 - DNA, 18 bp, synthetic construct
  misc_feature 1..18: note = Target B2M Sequence complement
  source 1..18: mol_type = other DNA
ttatgcacaaaatgtagg

SEQ ID NO: 11819 - DNA, 18 bp, synthetic construct
  misc_feature 1..18: note = Target B2M Sequence complement
  source 1..18: mol_type = other DNA
tatgcacaaaatgtaggg

SEQ ID NO: 11820 - DNA, 18 bp, synthetic construct
  misc_feature 1..18: note = Target B2M Sequence complement
  source 1..18: mol_type = other DNA
atgcacaaaatgtagggt

SEQ ID NO: 11821 - DNA, 18 bp, synthetic construct
  misc_feature 1..18: note = Target B2M Sequence complement
  source 1..18: mol_type = other DNA
tgcacaaaatgtagggtt

SEQ ID NO: 11822 - DNA, 18 bp, synthetic construct
  misc_feature 1..18: note = Target B2M Sequence complement
  source 1..18: mol_type = other DNA
gcacaaaatgtagggtta

SEQ ID NO: 11823 - DNA, 18 bp, synthetic construct
  misc_feature 1..18: note = Target B2M Sequence complement
  source 1..18: mol_type = other DNA
cacaaaatgtagggttat

SEQ ID NO: 11824 - DNA, 18 bp, synthetic construct
  misc_feature 1..18: note = Target B2M Sequence complement
  source 1..18: mol_type = other DNA
acaaaatgtagggttata

SEQ ID NO: 11825 - DNA, 18 bp, synthetic construct
  misc_feature 1..18: note = Target B2M Sequence complement
  source 1..18: mol_type = other DNA
caaaatgtagggttataa

SEQ ID NO: 11826 - DNA, 18 bp, synthetic construct
  misc_feature 1..18: note = Target B2M Sequence complement
  source 1..18: mol_type = other DNA
gcaacttagaggtgggga

SEQ ID NO: 11827 - DNA, 18 bp, synthetic construct
  misc_feature 1..18: note = Target B2M Sequence complement
  source 1..18: mol_type = other DNA
caacttagaggtggggag

SEQ ID NO: 11828 - DNA, 18 bp, synthetic construct
  misc_feature 1..18: note = Target B2M Sequence complement
  source 1..18: mol_type = other DNA
aacttagaggtggggagc

SEQ ID NO: 11829 - DNA, 18 bp, synthetic construct
  misc_feature 1..18: note = Target B2M Sequence complement
  source 1..18: mol_type = other DNA
acttagaggtggggagca

SEQ ID NO: 11830 - DNA, 18 bp, synthetic construct
  misc_feature 1..18: note = Target B2M Sequence complement
  source 1..18: mol_type = other DNA
ttagaggtggggagcaga

SEQ ID NO: 11831 - DNA, 18 bp, synthetic construct
  misc_feature 1..18: note = Target B2M Sequence complement
  source 1..18: mol_type = other DNA
aggtggggagcagagaat

SEQ ID NO: 11832 - DNA, 18 bp, synthetic construct
  misc_feature 1..18: note = Target B2M Sequence complement
  source 1..18: mol_type = other DNA
ggtggggagcagagaatt

SEQ ID NO: 11833 - DNA, 18 bp, synthetic construct
  misc_feature 1..18: note = Target B2M Sequence complement
  source 1..18: mol_type = other DNA
gtggggagcagagaattc

SEQ ID NO: 11834 - DNA, 18 bp, synthetic construct
  misc_feature 1..18: note = Target B2M Sequence complement
  source 1..18: mol_type = other DNA
tggggagcagagaattct

SEQ ID NO: 11835 - DNA, 18 bp, synthetic construct
  misc_feature 1..18: note = Target B2M Sequence complement
  source 1..18: mol_type = other DNA
ggggagcagagaattctc

SEQ ID NO: 11836 - DNA, 18 bp, synthetic construct
  misc_feature 1..18: note = Target B2M Sequence complement
  source 1..18: mol_type = other DNA
tctgcttagaatttgggg

SEQ ID NO: 11837 - DNA, 18 bp, synthetic construct
  misc_feature 1..18: note = Target B2M Sequence complement
  source 1..18: mol_type = other DNA
ctgcttagaatttggggg

SEQ ID NO: 11838 - DNA, 18 bp, synthetic construct
  misc_feature 1..18: note = Target B2M Sequence complement
  source 1..18: mol_type = other DNA
tgcttagaatttggggga

SEQ ID NO: 11839 - DNA, 18 bp, synthetic construct
  misc_feature 1..18: note = Target B2M Sequence complement
  source 1..18: mol_type = other DNA
gcttagaatttgggggaa

SEQ ID NO: 11840 - DNA, 18 bp, synthetic construct
  misc_feature 1..18: note = Target B2M Sequence complement
  source 1..18: mol_type = other DNA
cttagaatttgggggaaa

SEQ ID NO: 11841 - DNA, 18 bp, synthetic construct
  misc_feature 1..18: note = Target B2M Sequence complement
  source 1..18: mol_type = other DNA
ttagaatttgggggaaaa

SEQ ID NO: 11842 - DNA, 18 bp, synthetic construct
  misc_feature 1..18: note = Target B2M Sequence complement
  source 1..18: mol_type = other DNA
tagaatttgggggaaaat

SEQ ID NO: 11843 - DNA, 18 bp, synthetic construct
  misc_feature 1..18: note = Target B2M Sequence complement
  source 1..18: mol_type = other DNA
agaatttgggggaaaatt

SEQ ID NO: 11844 - DNA, 18 bp, synthetic construct
  misc_feature 1..18: note = Target B2M Sequence complement
  source 1..18: mol_type = other DNA
gaatttgggggaaaattt

SEQ ID NO: 11845 - DNA, 18 bp, synthetic construct
  misc_feature 1..18: note = Target B2M Sequence complement
  source 1..18: mol_type = other DNA
aatttgggggaaaattta

SEQ ID NO: 11846 - DNA, 18 bp, synthetic construct
  misc_feature 1..18: note = Target B2M Sequence complement
  source 1..18: mol_type = other DNA
atttgggggaaaatttag

SEQ ID NO: 11847 - DNA, 18 bp, synthetic construct
  misc_feature 1..18: note = Target B2M Sequence complement
  source 1..18: mol_type = other DNA
tttgggggaaaatttaga

SEQ ID NO: 11848 - DNA, 18 bp, synthetic construct
  misc_feature 1..18: note = Target B2M Sequence complement
  source 1..18: mol_type = other DNA
ttgggggaaaatttagaa

SEQ ID NO: 11849 - DNA, 18 bp, synthetic construct
  misc_feature 1..18: note = Target B2M Sequence complement
  source 1..18: mol_type = other DNA
tgggggaaaatttagaaa

SEQ ID NO: 11850 - DNA, 18 bp, synthetic construct
  misc_feature 1..18: note = Target B2M Sequence complement
  source 1..18: mol_type = other DNA
gggggaaaatttagaaat

SEQ ID NO: 11851 - DNA, 18 bp, synthetic construct
  misc_feature 1..18: note = Target B2M Sequence complement
  source 1..18: mol_type = other DNA
ggggaaaatttagaaata

SEQ ID NO: 11852 - DNA, 18 bp, synthetic construct
  misc_feature 1..18: note = Target B2M Sequence complement
  source 1..18: mol_type = other DNA
tgaatgaaacattttgtc

SEQ ID NO: 11853 - DNA, 18 bp, synthetic construct
  misc_feature 1..18: note = Target B2M Sequence complement
  source 1..18: mol_type = other DNA
gaatgaaacattttgtca

SEQ ID NO: 11854 - DNA, 18 bp, synthetic construct
  misc_feature 1..18: note = Target B2M Sequence complement
  source 1..18: mol_type = other DNA
tctggtttatttttgttc

SEQ ID NO: 11855 - DNA, 18 bp, synthetic construct
  misc_feature 1..18: note = Target B2M Sequence complement
  source 1..18: mol_type = other DNA
ctggtttatttttgttcc

SEQ ID NO: 11856 - DNA, 18 bp, synthetic construct
  misc_feature 1..18: note = Target B2M Sequence complement
  source 1..18: mol_type = other DNA
tggtttatttttgttcca

SEQ ID NO: 11857 - DNA, 18 bp, synthetic construct
  misc_feature 1..18: note = Target B2M Sequence complement
  source 1..18: mol_type = other DNA
ggtttatttttgttccac

SEQ ID NO: 11858 - DNA, 18 bp, synthetic construct
  misc_feature 1..18: note = Target B2M Sequence complement
  source 1..18: mol_type = other DNA
gtttatttttgttccaca

SEQ ID NO: 11859 - DNA, 18 bp, synthetic construct
  misc_feature 1..18: note = Target B2M Sequence complement
  source 1..18: mol_type = other DNA
ttatttttgttccacaag

SEQ ID NO: 11860 - DNA, 18 bp, synthetic construct
  misc_feature 1..18: note = Target B2M Sequence complement
  source 1..18: mol_type = other DNA
tatttttgttccacaagt

SEQ ID NO: 11861 - DNA, 18 bp, synthetic construct
  misc_feature 1..18: note = Target B2M Sequence complement
  source 1..18: mol_type = other DNA
atttttgttccacaagtt

SEQ ID NO: 11862 - DNA, 18 bp, synthetic construct
  misc_feature 1..18: note = Target B2M Sequence complement
  source 1..18: mol_type = other DNA
tttttgttccacaagtta

SEQ ID NO: 11863 - DNA, 18 bp, synthetic construct
  misc_feature 1..18: note = Target B2M Sequence complement
  source 1..18: mol_type = other DNA
ttttgttccacaagttaa

SEQ ID NO: 11864 - DNA, 19 bp, synthetic construct
  misc_feature 1..19: note = Target B2M Sequence complement
  source 1..19: mol_type = other DNA
acagcattcgggccgagat

SEQ ID NO: 11865 - DNA, 19 bp, synthetic construct
  misc_feature 1..19: note = Target B2M Sequence complement
  source 1..19: mol_type = other DNA
agcattcgggccgagatgt

SEQ ID NO: 11866 - DNA, 19 bp, synthetic construct
  misc_feature 1..19: note = Target B2M Sequence complement
  source 1..19: mol_type = other DNA
cattcgggccgagatgtct

SEQ ID NO: 11867 - DNA, 19 bp, synthetic construct
  misc_feature 1..19: note = Target B2M Sequence complement
  source 1..19: mol_type = other DNA
attcgggccgagatgtctc

SEQ ID NO: 11868 - DNA, 19 bp, synthetic construct
  misc_feature 1..19: note = Target B2M Sequence complement
  source 1..19: mol_type = other DNA
atggagagagaattgaaaa

SEQ ID NO: 11869 - DNA, 19 bp, synthetic construct
  misc_feature 1..19: note = Target B2M Sequence complement
  source 1..19: mol_type = other DNA
tggagagagaattgaaaaa

SEQ ID NO: 11870 - DNA, 19 bp, synthetic construct
  misc_feature 1..19: note = Target B2M Sequence complement
  source 1..19: mol_type = other DNA
ggagagagaattgaaaaag

SEQ ID NO: 11871 - DNA, 19 bp, synthetic construct
  misc_feature 1..19: note = Target B2M Sequence complement
  source 1..19: mol_type = other DNA
gagagagaattgaaaaagt

SEQ ID NO: 11872 - DNA, 19 bp, synthetic construct
  misc_feature 1..19: note = Target B2M Sequence complement
  source 1..19: mol_type = other DNA
agagagaattgaaaaagtg

SEQ ID NO: 11873 - DNA, 19 bp, synthetic construct
  misc_feature 1..19: note = Target B2M Sequence complement
  source 1..19: mol_type = other DNA
gagagaattgaaaaagtgg

SEQ ID NO: 11874 - DNA, 19 bp, synthetic construct
  misc_feature 1..19: note = Target B2M Sequence complement
  source 1..19: mol_type = other DNA
agagaattgaaaaagtgga

SEQ ID NO: 11875 - DNA, 19 bp, synthetic construct
  misc_feature 1..19: note = Target B2M Sequence complement
  source 1..19: mol_type = other DNA
gagaattgaaaaagtggag

SEQ ID NO: 11876 - DNA, 19 bp, synthetic construct
  misc_feature 1..19: note = Target B2M Sequence complement
  source 1..19: mol_type = other DNA
agaattgaaaaagtggagc

SEQ ID NO: 11877 - DNA, 19 bp, synthetic construct
  misc_feature 1..19: note = Target B2M Sequence complement
  source 1..19: mol_type = other DNA
gaattgaaaaagtggagca

SEQ ID NO: 11878 - DNA, 19 bp, synthetic construct
  misc_feature 1..19: note = Target B2M Sequence complement
  source 1..19: mol_type = other DNA
aattgaaaaagtggagcat

SEQ ID NO: 11879 - DNA, 19 bp, synthetic construct
  misc_feature 1..19: note = Target B2M Sequence complement
  source 1..19: mol_type = other DNA
attgaaaaagtggagcatt

SEQ ID NO: 11880 - DNA, 19 bp, synthetic construct
  misc_feature 1..19: note = Target B2M Sequence complement
  source 1..19: mol_type = other DNA
ttgaaaaagtggagcattc

SEQ ID NO: 11881 - DNA, 19 bp, synthetic construct
  misc_feature 1..19: note = Target B2M Sequence complement
  source 1..19: mol_type = other DNA
tgaaaaagtggagcattca

SEQ ID NO: 11882 - DNA, 19 bp, synthetic construct
  misc_feature 1..19: note = Target B2M Sequence complement
  source 1..19: mol_type = other DNA
gaaaaagtggagcattcag

SEQ ID NO: 11883 - DNA, 19 bp, synthetic construct
  misc_feature 1..19: note = Target B2M Sequence complement
  source 1..19: mol_type = other DNA
aaaaagtggagcattcaga

SEQ ID NO: 11884 - DNA, 19 bp, synthetic construct
  misc_feature 1..19: note = Target B2M Sequence complement
  source 1..19: mol_type = other DNA
aaaagtggagcattcagac

SEQ ID NO: 11885 - DNA, 19 bp, synthetic construct
  misc_feature 1..19: note = Target B2M Sequence complement
  source 1..19: mol_type = other DNA
actacactgaattcacccc

SEQ ID NO: 11886 - DNA, 19 bp, synthetic construct
  misc_feature 1..19: note = Target B2M Sequence complement
  source 1..19: mol_type = other DNA
ctacactgaattcaccccc

SEQ ID NO: 11887 - DNA, 19 bp, synthetic construct
  misc_feature 1..19: note = Target B2M Sequence complement
  source 1..19: mol_type = other DNA
tacactgaattcaccccca

SEQ ID NO: 11888 - DNA, 19 bp, synthetic construct
  misc_feature 1..19: note = Target B2M Sequence complement
  source 1..19: mol_type = other DNA
acactgaattcacccccac

SEQ ID NO: 11889 - DNA, 19 bp, synthetic construct
  misc_feature 1..19: note = Target B2M Sequence complement
  source 1..19: mol_type = other DNA
cactgaattcacccccact

SEQ ID NO: 11890 - DNA, 19 bp, synthetic construct
  misc_feature 1..19: note = Target B2M Sequence complement
  source 1..19: mol_type = other DNA
actgaattcacccccactg

SEQ ID NO: 11891 - DNA, 19 bp, synthetic construct
  misc_feature 1..19: note = Target B2M Sequence complement
  source 1..19: mol_type = other DNA
ctgaattcacccccactga

SEQ ID NO: 11892 - DNA, 19 bp, synthetic construct
  misc_feature 1..19: note = Target B2M Sequence complement
  source 1..19: mol_type = other DNA
tgaattcacccccactgaa

SEQ ID NO: 11893 - DNA, 19 bp, synthetic construct
  misc_feature 1..19: note = Target B2M Sequence complement
  source 1..19: mol_type = other DNA
gaattcacccccactgaaa

SEQ ID NO: 11894 - DNA, 19 bp, synthetic construct
  misc_feature 1..19: note = Target B2M Sequence complement
  source 1..19: mol_type = other DNA
aattcacccccactgaaaa

SEQ ID NO: 11895 - DNA, 19 bp, synthetic construct
  misc_feature 1..19: note = Target B2M Sequence complement
  source 1..19: mol_type = other DNA
attcacccccactgaaaaa

SEQ ID NO: 11896 - DNA, 19 bp, synthetic construct
  misc_feature 1..19: note = Target B2M Sequence complement
  source 1..19: mol_type = other DNA
ttcacccccactgaaaaag

SEQ ID NO: 11897 - DNA, 19 bp, synthetic construct
  misc_feature 1..19: note = Target B2M Sequence complement
  source 1..19: mol_type = other DNA
tcacccccactgaaaaaga

SEQ ID NO: 11898 - DNA, 19 bp, synthetic construct
  misc_feature 1..19: note = Target B2M Sequence complement
  source 1..19: mol_type = other DNA
cacccccactgaaaaagat

SEQ ID NO: 11899 - DNA, 19 bp, synthetic construct
  misc_feature 1..19: note = Target B2M Sequence complement
  source 1..19: mol_type = other DNA
acccccactgaaaaagatg

SEQ ID NO: 11900 - DNA, 19 bp, synthetic construct
  misc_feature 1..19: note = Target B2M Sequence complement
  source 1..19: mol_type = other DNA
cccccactgaaaaagatga

SEQ ID NO: 11901 - DNA, 19 bp, synthetic construct
  misc_feature 1..19: note = Target B2M Sequence complement
  source 1..19: mol_type = other DNA
ccccactgaaaaagatgag

SEQ ID NO: 11902 - DNA, 19 bp, synthetic construct
  misc_feature 1..19: note = Target B2M Sequence complement
  source 1..19: mol_type = other DNA
cccactgaaaaagatgagt

SEQ ID NO: 11903 - DNA, 19 bp, synthetic construct
  misc_feature 1..19: note = Target B2M Sequence complement
  source 1..19: mol_type = other DNA
ccactgaaaaagatgagta

SEQ ID NO: 11904 - DNA, 19 bp, synthetic construct
  misc_feature 1..19: note = Target B2M Sequence complement
  source 1..19: mol_type = other DNA
cactgaaaaagatgagtat

SEQ ID NO: 11905 - DNA, 19 bp, synthetic construct
  misc_feature 1..19: note = Target B2M Sequence complement
  source 1..19: mol_type = other DNA
actgaaaaagatgagtatg

SEQ ID NO: 11906 - DNA, 19 bp, synthetic construct
  misc_feature 1..19: note = Target B2M Sequence complement
  source 1..19: mol_type = other DNA
ctgaaaaagatgagtatgc

SEQ ID NO: 11907 - DNA, 19 bp, synthetic construct
  misc_feature 1..19: note = Target B2M Sequence complement
  source 1..19: mol_type = other DNA
tgaaaaagatgagtatgcc

SEQ ID NO: 11908 - DNA, 19 bp, synthetic construct
  misc_feature 1..19: note = Target B2M Sequence complement
  source 1..19: mol_type = other DNA
gaaaaagatgagtatgcct

SEQ ID NO: 11909 - DNA, 19 bp, synthetic construct
  misc_feature 1..19: note = Target B2M Sequence complement
  source 1..19: mol_type = other DNA
aaaaagatgagtatgcctg

SEQ ID NO: 11910 - DNA, 19 bp, synthetic construct
  misc_feature 1..19: note = Target B2M Sequence complement
  source 1..19: mol_type = other DNA
aaaagatgagtatgcctgc

SEQ ID NO: 11911 - DNA, 19 bp, synthetic construct
  misc_feature 1..19: note = Target B2M Sequence complement
  source 1..19: mol_type = other DNA
attctgcttgcttgctttt

SEQ ID NO: 11912 - DNA, 19 bp, synthetic construct
  misc_feature 1..19: note = Target B2M Sequence complement
  source 1..19: mol_type = other DNA
ttctgcttgcttgcttttt

SEQ ID NO: 11913 - DNA, 19 bp, synthetic construct
  misc_feature 1..19: note = Target B2M Sequence complement
  source 1..19: mol_type = other DNA
tctgcttgcttgcttttta

SEQ ID NO: 11914 - DNA, 19 bp, synthetic construct
  misc_feature 1..19: note = Target B2M Sequence complement
  source 1..19: mol_type = other DNA
ctgcttgcttgctttttaa

SEQ ID NO: 11915 - DNA, 19 bp, synthetic construct
  misc_feature 1..19: note = Target B2M Sequence complement
  source 1..19: mol_type = other DNA
tgcttgcttgctttttaat

SEQ ID NO: 11916 - DNA, 19 bp, synthetic construct
  misc_feature 1..19: note = Target B2M Sequence complement
  source 1..19: mol_type = other DNA
gcttgcttgctttttaata

SEQ ID NO: 11917 - DNA, 19 bp, synthetic construct
  misc_feature 1..19: note = Target B2M Sequence complement
  source 1..19: mol_type = other DNA
cttgcttgctttttaatat

SEQ ID NO: 11918 - DNA, 19 bp, synthetic construct
  misc_feature 1..19: note = Target B2M Sequence complement
  source 1..19: mol_type = other DNA
tgcttgctttttaatattg

SEQ ID NO: 11919 - DNA, 19 bp, synthetic construct
  misc_feature 1..19: note = Target B2M Sequence complement
  source 1..19: mol_type = other DNA
gcttgctttttaatattga

SEQ ID NO: 11920 - DNA, 19 bp, synthetic construct
  misc_feature 1..19: note = Target B2M Sequence complement
  source 1..19: mol_type = other DNA
ttacactttatgcacaaaa

SEQ ID NO: 11921 - DNA, 19 bp, synthetic construct
  misc_feature 1..19: note = Target B2M Sequence complement
  source 1..19: mol_type = other DNA
tacactttatgcacaaaat

SEQ ID NO: 11922 - DNA, 19 bp, synthetic construct
  misc_feature 1..19: note = Target B2M Sequence complement
  source 1..19: mol_type = other DNA
acactttatgcacaaaatg

SEQ ID NO: 11923 - DNA, 19 bp, synthetic construct
  misc_feature 1..19: note = Target B2M Sequence complement
  source 1..19: mol_type = other DNA
cactttatgcacaaaatgt

SEQ ID NO: 11924 - DNA, 19 bp, synthetic construct
  misc_feature 1..19: note = Target B2M Sequence complement
  source 1..19: mol_type = other DNA
actttatgcacaaaatgta

SEQ ID NO: 11925 - DNA, 19 bp, synthetic construct
  misc_feature 1..19: note = Target B2M Sequence complement
  source 1..19: mol_type = other DNA
ctttatgcacaaaatgtag

SEQ ID NO: 11926 - DNA, 19 bp, synthetic construct
  misc_feature 1..19: note = Target B2M Sequence complement
  source 1..19: mol_type = other DNA
tttatgcacaaaatgtagg

SEQ ID NO: 11927 - DNA, 19 bp, synthetic construct
  misc_feature 1..19: note = Target B2M Sequence complement
  source 1..19: mol_type = other DNA
ttatgcacaaaatgtaggg

SEQ ID NO: 11928 - DNA, 19 bp, synthetic construct
  misc_feature 1..19: note = Target B2M Sequence complement
  source 1..19: mol_type = other DNA
tatgcacaaaatgtagggt

SEQ ID NO: 11929 - DNA, 19 bp, synthetic construct
  misc_feature 1..19: note = Target B2M Sequence complement
  source 1..19: mol_type = other DNA
atgcacaaaatgtagggtt

SEQ ID NO: 11930 - DNA, 19 bp, synthetic construct
  misc_feature 1..19: note = Target B2M Sequence complement
  source 1..19: mol_type = other DNA
tgcacaaaatgtagggtta

SEQ ID NO: 11931 - DNA, 19 bp, synthetic construct
  misc_feature 1..19: note = Target B2M Sequence complement
  source 1..19: mol_type = other DNA
gcacaaaatgtagggttat

SEQ ID NO: 11932 - DNA, 19 bp, synthetic construct
  misc_feature 1..19: note = Target B2M Sequence complement
  source 1..19: mol_type = other DNA
cacaaaatgtagggttata

SEQ ID NO: 11933 - DNA, 19 bp, synthetic construct
  misc_feature 1..19: note = Target B2M Sequence complement
  source 1..19: mol_type = other DNA
acaaaatgtagggttataa

SEQ ID NO: 11934 - DNA, 19 bp, synthetic construct
  misc_feature 1..19: note = Target B2M Sequence complement
  source 1..19: mol_type = other DNA
caaaatgtagggttataat

SEQ ID NO: 11935 - DNA, 19 bp, synthetic construct
  misc_feature 1..19: note = Target B2M Sequence complement
  source 1..19: mol_type = other DNA
tggcaacttagaggtgggg

SEQ ID NO: 11936 - DNA, 19 bp, synthetic construct
  misc_feature 1..19: note = Target B2M Sequence complement
  source 1..19: mol_type = other DNA
ggcaacttagaggtgggga

SEQ ID NO: 11937 - DNA, 19 bp, synthetic construct
  misc_feature 1..19: note = Target B2M Sequence complement
  source 1..19: mol_type = other DNA
gcaacttagaggtggggag

SEQ ID NO: 11938 - DNA, 19 bp, synthetic construct
  misc_feature 1..19: note = Target B2M Sequence complement
  source 1..19: mol_type = other DNA
caacttagaggtggggagc

SEQ ID NO: 11939 - DNA, 19 bp, synthetic construct
  misc_feature 1..19: note = Target B2M Sequence complement
  source 1..19: mol_type = other DNA
aacttagaggtggggagca

SEQ ID NO: 11940 - DNA, 19 bp, synthetic construct
  misc_feature 1..19: note = Target B2M Sequence complement
  source 1..19: mol_type = other DNA
acttagaggtggggagcag

SEQ ID NO: 11941 - DNA, 19 bp, synthetic construct
  misc_feature 1..19: note = Target B2M Sequence complement
  source 1..19: mol_type = other DNA
cttagaggtggggagcaga

SEQ ID NO: 11942 - DNA, 19 bp, synthetic construct
  misc_feature 1..19: note = Target B2M Sequence complement
  source 1..19: mol_type = other DNA
ttagaggtggggagcagag

SEQ ID NO: 11943 - DNA, 19 bp, synthetic construct
  misc_feature 1..19: note = Target B2M Sequence complement
  source 1..19: mol_type = other DNA
tagaggtggggagcagaga

SEQ ID NO: 11944 - DNA, 19 bp, synthetic construct
  misc_feature 1..19: note = Target B2M Sequence complement
  source 1..19: mol_type = other DNA
agaggtggggagcagagaa

SEQ ID NO: 11945 - DNA, 19 bp, synthetic construct
  misc_feature 1..19: note = Target B2M Sequence complement
  source 1..19: mol_type = other DNA
gaggtggggagcagagaat

SEQ ID NO: 11946 - DNA, 19 bp, synthetic construct
  misc_feature 1..19: note = Target B2M Sequence complement
  source 1..19: mol_type = other DNA
aggtggggagcagagaatt

SEQ ID NO: 11947 - DNA, 19 bp, synthetic construct
  misc_feature 1..19: note = Target B2M Sequence complement
  source 1..19: mol_type = other DNA
ggtggggagcagagaattc

SEQ ID NO: 11948 - DNA, 19 bp, synthetic construct
  misc_feature 1..19: note = Target B2M Sequence complement
  source 1..19: mol_type = other DNA
gtggggagcagagaattct

SEQ ID NO: 11949 - DNA, 19 bp, synthetic construct
  misc_feature 1..19: note = Target B2M Sequence complement
  source 1..19: mol_type = other DNA
tggggagcagagaattctc

SEQ ID NO: 11950 - DNA, 19 bp, synthetic construct
  misc_feature 1..19: note = Target B2M Sequence complement
  source 1..19: mol_type = other DNA
ggggagcagagaattctct

SEQ ID NO: 11951 - DNA, 19 bp, synthetic construct
  misc_feature 1..19: note = Target B2M Sequence complement
  source 1..19: mol_type = other DNA
ctctgcttagaatttgggg

SEQ ID NO: 11952 - DNA, 19 bp, synthetic construct
  misc_feature 1..19: note = Target B2M Sequence complement
  source 1..19: mol_type = other DNA
tctgcttagaatttggggg

SEQ ID NO: 11953 - DNA, 19 bp, synthetic construct
  misc_feature 1..19: note = Target B2M Sequence complement
  source 1..19: mol_type = other DNA
ctgcttagaatttggggga

SEQ ID NO: 11954 - DNA, 19 bp, synthetic construct
  misc_feature 1..19: note = Target B2M Sequence complement
  source 1..19: mol_type = other DNA
tgcttagaatttgggggaa

SEQ ID NO: 11955 - DNA, 19 bp, synthetic construct
  misc_feature 1..19: note = Target B2M Sequence complement
  source 1..19: mol_type = other DNA
gcttagaatttgggggaaa

SEQ ID NO: 11956 - DNA, 19 bp, synthetic construct
  misc_feature 1..19: note = Target B2M Sequence complement
  source 1..19: mol_type = other DNA
cttagaatttgggggaaaa

SEQ ID NO: 11957 - DNA, 19 bp, synthetic construct
  misc_feature 1..19: note = Target B2M Sequence complement
  source 1..19: mol_type = other DNA
ttagaatttgggggaaaat

SEQ ID NO: 11958 - DNA, 19 bp, synthetic construct
  misc_feature 1..19: note = Target B2M Sequence complement
  source 1..19: mol_type = other DNA
tagaatttgggggaaaatt

SEQ ID NO: 11959 - DNA, 19 bp, synthetic construct
  misc_feature 1..19: note = Target B2M Sequence complement
  source 1..19: mol_type = other DNA
agaatttgggggaaaattt

SEQ ID NO: 11960 - DNA, 19 bp, synthetic construct
  misc_feature 1..19: note = Target B2M Sequence complement
  source 1..19: mol_type = other DNA
gaatttgggggaaaattta

SEQ ID NO: 11961 - DNA, 19 bp, synthetic construct
  misc_feature 1..19: note = Target B2M Sequence complement
  source 1..19: mol_type = other DNA
aatttgggggaaaatttag

SEQ ID NO: 11962 - DNA, 19 bp, synthetic construct
  misc_feature 1..19: note = Target B2M Sequence complement
  source 1..19: mol_type = other DNA
atttgggggaaaatttaga

SEQ ID NO: 11963 - DNA, 19 bp, synthetic construct
  misc_feature 1..19: note = Target B2M Sequence complement
  source 1..19: mol_type = other DNA
tttgggggaaaatttagaa

SEQ ID NO: 11964 - DNA, 19 bp, synthetic construct
  misc_feature 1..19: note = Target B2M Sequence complement
  source 1..19: mol_type = other DNA
ttgggggaaaatttagaaa

SEQ ID NO: 11965 - DNA, 19 bp, synthetic construct
  misc_feature 1..19: note = Target B2M Sequence complement
  source 1..19: mol_type = other DNA
tgggggaaaatttagaaat

SEQ ID NO: 11966 - DNA, 19 bp, synthetic construct
  misc_feature 1..19: note = Target B2M Sequence complement
  source 1..19: mol_type = other DNA
gggggaaaatttagaaata

SEQ ID NO: 11967 - DNA, 19 bp, synthetic construct
  misc_feature 1..19: note = Target B2M Sequence complement
  source 1..19: mol_type = other DNA
ggggaaaatttagaaatat

SEQ ID NO: 11968 - DNA, 19 bp, synthetic construct
  misc_feature 1..19: note = Target B2M Sequence complement
  source 1..19: mol_type = other DNA
atgaatgaaacattttgtc

SEQ ID NO: 11969 - DNA, 19 bp, synthetic construct
  misc_feature 1..19: note = Target B2M Sequence complement
  source 1..19: mol_type = other DNA
tgaatgaaacattttgtca

SEQ ID NO: 11970 - DNA, 19 bp, synthetic construct
  misc_feature 1..19: note = Target B2M Sequence complement
  source 1..19: mol_type = other DNA
gaatgaaacattttgtcat

SEQ ID NO: 11971 - DNA, 19 bp, synthetic construct
  misc_feature 1..19: note = Target B2M Sequence complement
  source 1..19: mol_type = other DNA
ggttaatctggtttatttt

SEQ ID NO: 11972 - DNA, 19 bp, synthetic construct
  misc_feature 1..19: note = Target B2M Sequence complement
  source 1..19: mol_type = other DNA
atctggtttatttttgttc

SEQ ID NO: 11973 - DNA, 19 bp, synthetic construct
  misc_feature 1..19: note = Target B2M Sequence complement
  source 1..19: mol_type = other DNA
tctggtttatttttgttcc

SEQ ID NO: 11974 - DNA, 19 bp, synthetic construct
  misc_feature 1..19: note = Target B2M Sequence complement
  source 1..19: mol_type = other DNA
ctggtttatttttgttcca

SEQ ID NO: 11975 - DNA, 19 bp, synthetic construct
  misc_feature 1..19: note = Target B2M Sequence complement
  source 1..19: mol_type = other DNA
tggtttatttttgttccac

SEQ ID NO: 11976 - DNA, 19 bp, synthetic construct
  misc_feature 1..19: note = Target B2M Sequence complement
  source 1..19: mol_type = other DNA
ggtttatttttgttccaca

SEQ ID NO: 11977 - DNA, 19 bp, synthetic construct
  misc_feature 1..19: note = Target B2M Sequence complement
  source 1..19: mol_type = other DNA
gtttatttttgttccacaa

SEQ ID NO: 11978 - DNA, 19 bp, synthetic construct
  misc_feature 1..19: note = Target B2M Sequence complement
  source 1..19: mol_type = other DNA
tttatttttgttccacaag

SEQ ID NO: 11979 - DNA, 19 bp, synthetic construct
  misc_feature 1..19: note = Target B2M Sequence complement
  source 1..19: mol_type = other DNA
ttatttttgttccacaagt

SEQ ID NO: 11980 - DNA, 19 bp, synthetic construct
  misc_feature 1..19: note = Target B2M Sequence complement
  source 1..19: mol_type = other DNA
tatttttgttccacaagtt

SEQ ID NO: 11981 - DNA, 19 bp, synthetic construct
  misc_feature 1..19: note = Target B2M Sequence complement
  source 1..19: mol_type = other DNA
atttttgttccacaagtta

SEQ ID NO: 11982 - DNA, 19 bp, synthetic construct
  misc_feature 1..19: note = Target B2M Sequence complement
  source 1..19: mol_type = other DNA
tttttgttccacaagttaa

SEQ ID NO: 11983 - DNA, 19 bp, synthetic construct
  misc_feature 1..19: note = Target B2M Sequence complement
  source 1..19: mol_type = other DNA
ttttgttccacaagttaaa

SEQ ID NO: 11984 - DNA, 20 bp, synthetic construct
  misc_feature 1..20: note = Target B2M Sequence complement
  source 1..20: mol_type = other DNA
aatggagagagaattgaaaa

SEQ ID NO: 11985 - DNA, 20 bp, synthetic construct
  misc_feature 1..20: note = Target B2M Sequence complement
  source 1..20: mol_type = other DNA
atggagagagaattgaaaaa

SEQ ID NO: 11986 - DNA, 20 bp, synthetic construct
  misc_feature 1..20: note = Target B2M Sequence complement
  source 1..20: mol_type = other DNA
tggagagagaattgaaaaag

SEQ ID NO: 11987 - DNA, 20 bp, synthetic construct
  misc_feature 1..20: note = Target B2M Sequence complement
  source 1..20: mol_type = other DNA
ggagagagaattgaaaaagt

SEQ ID NO: 11988 - DNA, 20 bp, synthetic construct
  misc_feature 1..20: note = Target B2M Sequence complement
  source 1..20: mol_type = other DNA
gagagagaattgaaaaagtg

SEQ ID NO: 11989 - DNA, 20 bp, synthetic construct
  misc_feature 1..20: note = Target B2M Sequence complement
  source 1..20: mol_type = other DNA
agagagaattgaaaaagtgg

SEQ ID NO: 11990 - DNA, 20 bp, synthetic construct
  misc_feature 1..20: note = Target B2M Sequence complement
  source 1..20: mol_type = other DNA
gagagaattgaaaaagtgga

SEQ ID NO: 11991 - DNA, 20 bp, synthetic construct
  misc_feature 1..20: note = Target B2M Sequence complement
  source 1..20: mol_type = other DNA
agagaattgaaaaagtggag

SEQ ID NO: 11992 - DNA, 20 bp, synthetic construct
  misc_feature 1..20: note = Target B2M Sequence complement
  source 1..20: mol_type = other DNA
gagaattgaaaaagtggagc

SEQ ID NO: 11993 - DNA, 20 bp, synthetic construct
  misc_feature 1..20: note = Target B2M Sequence complement
  source 1..20: mol_type = other DNA
agaattgaaaaagtggagca

SEQ ID NO: 11994 - DNA, 20 bp, synthetic construct
  misc_feature 1..20: note = Target B2M Sequence complement
  source 1..20: mol_type = other DNA
gaattgaaaaagtggagcat

SEQ ID NO: 11995 - DNA, 20 bp, synthetic construct
  misc_feature 1..20: note = Target B2M Sequence complement
  source 1..20: mol_type = other DNA
aattgaaaaagtggagcatt

SEQ ID NO: 11996 - DNA, 20 bp, synthetic construct
  misc_feature 1..20: note = Target B2M Sequence complement
  source 1..20: mol_type = other DNA
attgaaaaagtggagcattc

SEQ ID NO: 11997 - DNA, 20 bp, synthetic construct
  misc_feature 1..20: note = Target B2M Sequence complement
  source 1..20: mol_type = other DNA
ttgaaaaagtggagcattca

SEQ ID NO: 11998 - DNA, 20 bp, synthetic construct
  misc_feature 1..20: note = Target B2M Sequence complement
  source 1..20: mol_type = other DNA
tgaaaaagtggagcattcag

SEQ ID NO: 11999 - DNA, 20 bp, synthetic construct
  misc_feature 1..20: note = Target B2M Sequence complement
  source 1..20: mol_type = other DNA
gaaaaagtggagcattcaga

SEQ ID NO: 12000 - DNA, 20 bp, synthetic construct
  misc_feature 1..20: note = Target B2M Sequence complement
  source 1..20: mol_type = other DNA
aaaaagtggagcattcagac

SEQ ID NO: 12001 - DNA, 20 bp, synthetic construct
  misc_feature 1..20: note = Target B2M Sequence complement
  source 1..20: mol_type = other DNA
aaaagtggagcattcagact

SEQ ID NO: 12002 - DNA, 20 bp, synthetic construct
  misc_feature 1..20: note = Target B2M Sequence complement
  source 1..20: mol_type = other DNA
tactacactgaattcacccc

SEQ ID NO: 12003 - DNA, 20 bp, synthetic construct
  misc_feature 1..20: note = Target B2M Sequence complement
  source 1..20: mol_type = other DNA
actacactgaattcaccccc

SEQ ID NO: 12004 - DNA, 20 bp, synthetic construct
  misc_feature 1..20: note = Target B2M Sequence complement
  source 1..20: mol_type = other DNA
ctacactgaattcaccccca

SEQ ID NO: 12005 - DNA, 20 bp, synthetic construct
  misc_feature 1..20: note = Target B2M Sequence complement
  source 1..20: mol_type = other DNA
tacactgaattcacccccac

SEQ ID NO: 12006 - DNA, 20 bp, synthetic construct
  misc_feature 1..20: note = Target B2M Sequence complement
  source 1..20: mol_type = other DNA
acactgaattcacccccact

SEQ ID NO: 12007 - DNA, 20 bp, synthetic construct
  misc_feature 1..20: note = Target B2M Sequence complement
  source 1..20: mol_type = other DNA
cactgaattcacccccactg

SEQ ID NO: 12008 - DNA, 20 bp, synthetic construct
  misc_feature 1..20: note = Target B2M Sequence complement
  source 1..20: mol_type = other DNA
actgaattcacccccactga

SEQ ID NO: 12009 - DNA, 20 bp, synthetic construct
  misc_feature 1..20: note = Target B2M Sequence complement
  source 1..20: mol_type = other DNA
ctgaattcacccccactgaa

SEQ ID NO: 12010 - DNA, 20 bp, synthetic construct
  misc_feature 1..20: note = Target B2M Sequence complement
  source 1..20: mol_type = other DNA
tgaattcacccccactgaaa

SEQ ID NO: 12011 - DNA, 20 bp, synthetic construct
  misc_feature 1..20: note = Target B2M Sequence complement
  source 1..20: mol_type = other DNA
gaattcacccccactgaaaa

SEQ ID NO: 12012 - DNA, 20 bp, synthetic construct
  misc_feature 1..20: note = Target B2M Sequence complement
  source 1..20: mol_type = other DNA
aattcacccccactgaaaaa

SEQ ID NO: 12013 - DNA, 20 bp, synthetic construct
  misc_feature 1..20: note = Target B2M Sequence complement
  source 1..20: mol_type = other DNA
attcacccccactgaaaaag

SEQ ID NO: 12014 - DNA, 20 bp, synthetic construct
  misc_feature 1..20: note = Target B2M Sequence complement
  source 1..20: mol_type = other DNA
ttcacccccactgaaaaaga

SEQ ID NO: 12015 - DNA, 20 bp, synthetic construct
  misc_feature 1..20: note = Target B2M Sequence complement
  source 1..20: mol_type = other DNA
tcacccccactgaaaaagat

SEQ ID NO: 12016 - DNA, 20 bp, synthetic construct
  misc_feature 1..20: note = Target B2M Sequence complement
  source 1..20: mol_type = other DNA
cacccccactgaaaaagatg

SEQ ID NO: 12017 - DNA, 20 bp, synthetic construct
  misc_feature 1..20: note = Target B2M Sequence complement
  source 1..20: mol_type = other DNA
acccccactgaaaaagatga

SEQ ID NO: 12018 - DNA, 20 bp, synthetic construct
  misc_feature 1..20: note = Target B2M Sequence complement
  source 1..20: mol_type = other DNA
cccccactgaaaaagatgag

SEQ ID NO: 12019 - DNA, 20 bp, synthetic construct
  misc_feature 1..20: note = Target B2M Sequence complement
  source 1..20: mol_type = other DNA
ccccactgaaaaagatgagt

SEQ ID NO: 12020 - DNA, 20 bp, synthetic construct
  misc_feature 1..20: note = Target B2M Sequence complement
  source 1..20: mol_type = other DNA
cccactgaaaaagatgagta

SEQ ID NO: 12021 - DNA, 20 bp, synthetic construct
  misc_feature 1..20: note = Target B2M Sequence complement
  source 1..20: mol_type = other DNA
ccactgaaaaagatgagtat

SEQ ID NO: 12022 - DNA, 20 bp, synthetic construct
  misc_feature 1..20: note = Target B2M Sequence complement
  source 1..20: mol_type = other DNA
cactgaaaaagatgagtatg

SEQ ID NO: 12023 - DNA, 20 bp, synthetic construct
  misc_feature 1..20: note = Target B2M Sequence complement
  source 1..20: mol_type = other DNA
actgaaaaagatgagtatgc

SEQ ID NO: 12024 - DNA, 20 bp, synthetic construct
  misc_feature 1..20: note = Target B2M Sequence complement
  source 1..20: mol_type = other DNA
ctgaaaaagatgagtatgcc

SEQ ID NO: 12025 - DNA, 20 bp, synthetic construct
  misc_feature 1..20: note = Target B2M Sequence complement
  source 1..20: mol_type = other DNA
tgaaaaagatgagtatgcct

SEQ ID NO: 12026 - DNA, 20 bp, synthetic construct
  misc_feature 1..20: note = Target B2M Sequence complement
  source 1..20: mol_type = other DNA
gaaaaagatgagtatgcctg

SEQ ID NO: 12027 - DNA, 20 bp, synthetic construct
  misc_feature 1..20: note = Target B2M Sequence complement
  source 1..20: mol_type = other DNA
aaaaagatgagtatgcctgc

SEQ ID NO: 12028 - DNA, 20 bp, synthetic construct
  misc_feature 1..20: note = Target B2M Sequence complement
  source 1..20: mol_type = other DNA
aaaagatgagtatgcctgcc

SEQ ID NO: 12029 - DNA, 20 bp, synthetic construct
  misc_feature 1..20: note = Target B2M Sequence complement
  source 1..20: mol_type = other DNA
aattctgcttgcttgctttt

SEQ ID NO: 12030 - DNA, 20 bp, synthetic construct
  misc_feature 1..20: note = Target B2M Sequence complement
  source 1..20: mol_type = other DNA
attctgcttgcttgcttttt

SEQ ID NO: 12031 - DNA, 20 bp, synthetic construct
  misc_feature 1..20: note = Target B2M Sequence complement
  source 1..20: mol_type = other DNA
ttctgcttgcttgcttttta

SEQ ID NO: 12032 - DNA, 20 bp, synthetic construct
  misc_feature 1..20: note = Target B2M Sequence complement
  source 1..20: mol_type = other DNA
tctgcttgcttgctttttaa

SEQ ID NO: 12033 - DNA, 20 bp, synthetic construct
  misc_feature 1..20: note = Target B2M Sequence complement
  source 1..20: mol_type = other DNA
ctgcttgcttgctttttaat

SEQ ID NO: 12034 - DNA, 20 bp, synthetic construct
  misc_feature 1..20: note = Target B2M Sequence complement
  source 1..20: mol_type = other DNA
tgcttgcttgctttttaata

SEQ ID NO: 12035 - DNA, 20 bp, synthetic construct
  misc_feature 1..20: note = Target B2M Sequence complement
  source 1..20: mol_type = other DNA
gcttgcttgctttttaatat

SEQ ID NO: 12036 - DNA, 20 bp, synthetic construct
  misc_feature 1..20: note = Target B2M Sequence complement
  source 1..20: mol_type = other DNA
cttgcttgctttttaatatt

SEQ ID NO: 12037 - DNA, 20 bp, synthetic construct
  misc_feature 1..20: note = Target B2M Sequence complement
  source 1..20: mol_type = other DNA
ttgcttgctttttaatattg

SEQ ID NO: 12038 - DNA, 20 bp, synthetic construct
  misc_feature 1..20: note = Target B2M Sequence complement
  source 1..20: mol_type = other DNA
tgcttgctttttaatattga

SEQ ID NO: 12039 - DNA, 20 bp, synthetic construct
  misc_feature 1..20: note = Target B2M Sequence complement
  source 1..20: mol_type = other DNA
gcttgctttttaatattgat

SEQ ID NO: 12040 - DNA, 20 bp, synthetic construct
  misc_feature 1..20: note = Target B2M Sequence complement
  source 1..20: mol_type = other DNA
gctttttaatattgatatgc

SEQ ID NO: 12041 - DNA, 20 bp, synthetic construct
  misc_feature 1..20: note = Target B2M Sequence complement
  source 1..20: mol_type = other DNA
cttacactttatgcacaaaa

SEQ ID NO: 12042 - DNA, 20 bp, synthetic construct
  misc_feature 1..20: note = Target B2M Sequence complement
  source 1..20: mol_type = other DNA
ttacactttatgcacaaaat

SEQ ID NO: 12043 - DNA, 20 bp, synthetic construct
  misc_feature 1..20: note = Target B2M Sequence complement
  source 1..20: mol_type = other DNA
tacactttatgcacaaaatg

SEQ ID NO: 12044 - DNA, 20 bp, synthetic construct
  misc_feature 1..20: note = Target B2M Sequence complement
  source 1..20: mol_type = other DNA
acactttatgcacaaaatgt

SEQ ID NO: 12045 - DNA, 20 bp, synthetic construct
  misc_feature 1..20: note = Target B2M Sequence complement
  source 1..20: mol_type = other DNA
cactttatgcacaaaatgta

SEQ ID NO: 12046 - DNA, 20 bp, synthetic construct
  misc_feature 1..20: note = Target B2M Sequence complement
  source 1..20: mol_type = other DNA
actttatgcacaaaatgtag

SEQ ID NO: 12047 - DNA, 20 bp, synthetic construct
  misc_feature 1..20: note = Target B2M Sequence complement
  source 1..20: mol_type = other DNA
ctttatgcacaaaatgtagg

SEQ ID NO: 12048 - DNA, 20 bp, synthetic construct
  misc_feature 1..20: note = Target B2M Sequence complement
  source 1..20: mol_type = other DNA
tttatgcacaaaatgtaggg

SEQ ID NO: 12049 - DNA, 20 bp, synthetic construct
  misc_feature 1..20: note = Target B2M Sequence complement
  source 1..20: mol_type = other DNA
ttatgcacaaaatgtagggt

SEQ ID NO: 12050 - DNA, 20 bp, synthetic construct
  misc_feature 1..20: note = Target B2M Sequence complement
  source 1..20: mol_type = other DNA
tatgcacaaaatgtagggtt

SEQ ID NO: 12051 - DNA, 20 bp, synthetic construct
  misc_feature 1..20: note = Target B2M Sequence complement
  source 1..20: mol_type = other DNA
atgcacaaaatgtagggtta

SEQ ID NO: 12052 - DNA, 20 bp, synthetic construct
  misc_feature 1..20: note = Target B2M Sequence complement
  source 1..20: mol_type = other DNA
tgcacaaaatgtagggttat

SEQ ID NO: 12053 - DNA, 20 bp, synthetic construct
  misc_feature 1..20: note = Target B2M Sequence complement
  source 1..20: mol_type = other DNA
gcacaaaatgtagggttata

SEQ ID NO: 12054 - DNA, 20 bp, synthetic construct
  misc_feature 1..20: note = Target B2M Sequence complement
  source 1..20: mol_type = other DNA
cacaaaatgtagggttataa

SEQ ID NO: 12055 - DNA, 20 bp, synthetic construct
  misc_feature 1..20: note = Target B2M Sequence complement
  source 1..20: mol_type = other DNA
acaaaatgtagggttataat

SEQ ID NO: 12056 - DNA, 20 bp, synthetic construct
  misc_feature 1..20: note = Target B2M Sequence complement
  source 1..20: mol_type = other DNA
caaaatgtagggttataata

SEQ ID NO: 12057 - DNA, 20 bp, synthetic construct
  misc_feature 1..20: note = Target B2M Sequence complement
  source 1..20: mol_type = other DNA
tggcaacttagaggtgggga

SEQ ID NO: 12058 - DNA, 20 bp, synthetic construct
  misc_feature 1..20: note = Target B2M Sequence complement
  source 1..20: mol_type = other DNA
caacttagaggtggggagca

SEQ ID NO: 12059 - DNA, 20 bp, synthetic construct
  misc_feature 1..20: note = Target B2M Sequence complement
  source 1..20: mol_type = other DNA
aacttagaggtggggagcag

SEQ ID NO: 12060 - DNA, 20 bp, synthetic construct
  misc_feature 1..20: note = Target B2M Sequence complement
  source 1..20: mol_type = other DNA
acttagaggtggggagcaga

SEQ ID NO: 12061 - DNA, 20 bp, synthetic construct
  misc_feature 1..20: note = Target B2M Sequence complement
  source 1..20: mol_type = other DNA
ttagaggtggggagcagaga

SEQ ID NO: 12062 - DNA, 20 bp, synthetic construct
  misc_feature 1..20: note = Target B2M Sequence complement
  source 1..20: mol_type = other DNA
tagaggtggggagcagagaa

SEQ ID NO: 12063 - DNA, 20 bp, synthetic construct
  misc_feature 1..20: note = Target B2M Sequence complement
  source 1..20: mol_type = other DNA
agaggtggggagcagagaat

SEQ ID NO: 12064 - DNA, 20 bp, synthetic construct
  misc_feature 1..20: note = Target B2M Sequence complement
  source 1..20: mol_type = other DNA
gaggtggggagcagagaatt

SEQ ID NO: 12065 - DNA, 20 bp, synthetic construct
  misc_feature 1..20: note = Target B2M Sequence complement
  source 1..20: mol_type = other DNA
aggtggggagcagagaattc

SEQ ID NO: 12066 - DNA, 20 bp, synthetic construct
  misc_feature 1..20: note = Target B2M Sequence complement
  source 1..20: mol_type = other DNA
ggtggggagcagagaattct

SEQ ID NO: 12067 - DNA, 20 bp, synthetic construct
  misc_feature 1..20: note = Target B2M Sequence complement
  source 1..20: mol_type = other DNA
gtggggagcagagaattctc

SEQ ID NO: 12068 - DNA, 20 bp, synthetic construct
  misc_feature 1..20: note = Target B2M Sequence complement
  source 1..20: mol_type = other DNA
tggggagcagagaattctct

SEQ ID NO: 12069 - DNA, 20 bp, synthetic construct
  misc_feature 1..20: note = Target B2M Sequence complement
  source 1..20: mol_type = other DNA
ggggagcagagaattctctt

SEQ ID NO: 12070 - DNA, 20 bp, synthetic construct
  misc_feature 1..20: note = Target B2M Sequence complement
  source 1..20: mol_type = other DNA
actctgcttagaatttgggg

SEQ ID NO: 12071 - DNA, 20 bp, synthetic construct
  misc_feature 1..20: note = Target B2M Sequence complement
  source 1..20: mol_type = other DNA
ctctgcttagaatttggggg

SEQ ID NO: 12072 - DNA, 20 bp, synthetic construct
  misc_feature 1..20: note = Target B2M Sequence complement
  source 1..20: mol_type = other DNA
tctgcttagaatttggggga

SEQ ID NO: 12073 - DNA, 20 bp, synthetic construct
  misc_feature 1..20: note = Target B2M Sequence complement
  source 1..20: mol_type = other DNA
ctgcttagaatttgggggaa

SEQ ID NO: 12074 - DNA, 20 bp, synthetic construct
  misc_feature 1..20: note = Target B2M Sequence complement
  source 1..20: mol_type = other DNA
tgcttagaatttgggggaaa

SEQ ID NO: 12075 - DNA, 20 bp, synthetic construct
  misc_feature 1..20: note = Target B2M Sequence complement
  source 1..20: mol_type = other DNA
gcttagaatttgggggaaaa

SEQ ID NO: 12076 - DNA, 20 bp, synthetic construct
  misc_feature 1..20: note = Target B2M Sequence complement
  source 1..20: mol_type = other DNA
cttagaatttgggggaaaat

SEQ ID NO: 12077 - DNA, 20 bp, synthetic construct
  misc_feature 1..20: note = Target B2M Sequence complement
  source 1..20: mol_type = other DNA
ttagaatttgggggaaaatt

SEQ ID NO: 12078 - DNA, 20 bp, synthetic construct
  misc_feature 1..20: note = Target B2M Sequence complement
  source 1..20: mol_type = other DNA
tagaatttgggggaaaattt

SEQ ID NO: 12079 - DNA, 20 bp, synthetic construct
  misc_feature 1..20: note = Target B2M Sequence complement
  source 1..20: mol_type = other DNA
agaatttgggggaaaattta

SEQ ID NO: 12080 - DNA, 20 bp, synthetic construct
  misc_feature 1..20: note = Target B2M Sequence complement
  source 1..20: mol_type = other DNA
gaatttgggggaaaatttag

SEQ ID NO: 12081 - DNA, 20 bp, synthetic construct
  misc_feature 1..20: note = Target B2M Sequence complement
  source 1..20: mol_type = other DNA
aatttgggggaaaatttaga

SEQ ID NO: 12082 - DNA, 20 bp, synthetic construct
  misc_feature 1..20: note = Target B2M Sequence complement
  source 1..20: mol_type = other DNA
atttgggggaaaatttagaa

SEQ ID NO: 12083 - DNA, 20 bp, synthetic construct
  misc_feature 1..20: note = Target B2M Sequence complement
  source 1..20: mol_type = other DNA
tttgggggaaaatttagaaa

SEQ ID NO: 12084 - DNA, 20 bp, synthetic construct
  misc_feature 1..20: note = Target B2M Sequence complement
  source 1..20: mol_type = other DNA
ttgggggaaaatttagaaat

SEQ ID NO: 12085 - DNA, 20 bp, synthetic construct
  misc_feature 1..20: note = Target B2M Sequence complement
  source 1..20: mol_type = other DNA
tgggggaaaatttagaaata

SEQ ID NO: 12086 - DNA, 20 bp, synthetic construct
  misc_feature 1..20: note = Target B2M Sequence complement
  source 1..20: mol_type = other DNA
gggggaaaatttagaaatat

SEQ ID NO: 12087 - DNA, 20 bp, synthetic construct
  misc_feature 1..20: note = Target B2M Sequence complement
  source 1..20: mol_type = other DNA
ggggaaaatttagaaatata

SEQ ID NO: 12088 - DNA, 20 bp, synthetic construct
  misc_feature 1..20: note = Target B2M Sequence complement
  source 1..20: mol_type = other DNA
aatgaatgaaacattttgtc

SEQ ID NO: 12089 - DNA, 20 bp, synthetic construct
  misc_feature 1..20: note = Target B2M Sequence complement
  source 1..20: mol_type = other DNA
atgaatgaaacattttgtca

SEQ ID NO: 12090 - DNA, 20 bp, synthetic construct
  misc_feature 1..20: note = Target B2M Sequence complement
  source 1..20: mol_type = other DNA
tgaatgaaacattttgtcat

SEQ ID NO: 12091 - DNA, 20 bp, synthetic construct
  misc_feature 1..20: note = Target B2M Sequence complement
  source 1..20: mol_type = other DNA
gaatgaaacattttgtcata

SEQ ID NO: 12092 - DNA, 20 bp, synthetic construct
  misc_feature 1..20: note = Target B2M Sequence complement
  source 1..20: mol_type = other DNA
gaaacattttgtcatataag

SEQ ID NO: 12093 - DNA, 20 bp, synthetic construct
  misc_feature 1..20: note = Target B2M Sequence complement
  source 1..20: mol_type = other DNA
cattttgtcatataagattc

SEQ ID NO: 12094 - DNA, 20 bp, synthetic construct
  misc_feature 1..20: note = Target B2M Sequence complement
  source 1..20: mol_type = other DNA
tggttaatctggtttatttt

SEQ ID NO: 12095 - DNA, 20 bp, synthetic construct
  misc_feature 1..20: note = Target B2M Sequence complement
  source 1..20: mol_type = other DNA
ggttaatctggtttattttt

SEQ ID NO: 12096 - DNA, 20 bp, synthetic construct
  misc_feature 1..20: note = Target B2M Sequence complement
  source 1..20: mol_type = other DNA
gttaatctggtttatttttg

SEQ ID NO: 12097 - DNA, 20 bp, synthetic construct
  misc_feature 1..20: note = Target B2M Sequence complement
  source 1..20: mol_type = other DNA
aatctggtttatttttgttc

SEQ ID NO: 12098 - DNA, 20 bp, synthetic construct
  misc_feature 1..20: note = Target B2M Sequence complement
  source 1..20: mol_type = other DNA
atctggtttatttttgttcc

SEQ ID NO: 12099 - DNA, 20 bp, synthetic construct
  misc_feature 1..20: note = Target B2M Sequence complement
  source 1..20: mol_type = other DNA
tctggtttatttttgttcca

SEQ ID NO: 12100 - DNA, 20 bp, synthetic construct
  misc_feature 1..20: note = Target B2M Sequence complement
  source 1..20: mol_type = other DNA
ctggtttatttttgttccac

SEQ ID NO: 12101 - DNA, 20 bp, synthetic construct
  misc_feature 1..20: note = Target B2M Sequence complement
  source 1..20: mol_type = other DNA
tggtttatttttgttccaca

SEQ ID NO: 12102 - DNA, 20 bp, synthetic construct
  misc_feature 1..20: note = Target B2M Sequence complement
  source 1..20: mol_type = other DNA
ggtttatttttgttccacaa

SEQ ID NO: 12103 - DNA, 20 bp, synthetic construct
  misc_feature 1..20: note = Target B2M Sequence complement
  source 1..20: mol_type = other DNA
gtttatttttgttccacaag

SEQ ID NO: 12104 - DNA, 20 bp, synthetic construct
  misc_feature 1..20: note = Target B2M Sequence complement
  source 1..20: mol_type = other DNA
tttatttttgttccacaagt

SEQ ID NO: 12105 - DNA, 20 bp, synthetic construct
  misc_feature 1..20: note = Target B2M Sequence complement
  source 1..20: mol_type = other DNA
ttatttttgttccacaagtt

SEQ ID NO: 12106 - DNA, 20 bp, synthetic construct
  misc_feature 1..20: note = Target B2M Sequence complement
  source 1..20: mol_type = other DNA
tatttttgttccacaagtta

SEQ ID NO: 12107 - DNA, 20 bp, synthetic construct
  misc_feature 1..20: note = Target B2M Sequence complement
  source 1..20: mol_type = other DNA
atttttgttccacaagttaa

SEQ ID NO: 12108 - DNA, 20 bp, synthetic construct
  misc_feature 1..20: note = Target B2M Sequence complement
  source 1..20: mol_type = other DNA
tttttgttccacaagttaaa

SEQ ID NO: 12109 - DNA, 20 bp, synthetic construct
  misc_feature 1..20: note = Target B2M Sequence complement
  source 1..20: mol_type = other DNA
ttttgttccacaagttaaat

SEQ ID NO: 12110 - DNA, 21 bp, synthetic construct
  misc_feature 1..21: note = Target B2M Sequence complement
  source 1..21: mol_type = other DNA
tgacagcattcgggccgagat

SEQ ID NO: 12111 - DNA, 21 bp, synthetic construct
  misc_feature 1..21: note = Target B2M Sequence complement
  source 1..21: mol_type = other DNA
acagcattcgggccgagatgt

SEQ ID NO: 12112 - DNA, 21 bp, synthetic construct
  misc_feature 1..21: note = Target B2M Sequence complement
  source 1..21: mol_type = other DNA
agcattcgggccgagatgtct

SEQ ID NO: 12113 - DNA, 21 bp, synthetic construct
  misc_feature 1..21: note = Target B2M Sequence complement
  source 1..21: mol_type = other DNA
gaatggagagagaattgaaaa

SEQ ID NO: 12114 - DNA, 21 bp, synthetic construct
  misc_feature 1..21: note = Target B2M Sequence complement
  source 1..21: mol_type = other DNA
aatggagagagaattgaaaaa

SEQ ID NO: 12115 - DNA, 21 bp, synthetic construct
  misc_feature 1..21: note = Target B2M Sequence complement
  source 1..21: mol_type = other DNA
atggagagagaattgaaaaag

SEQ ID NO: 12116 - DNA, 21 bp, synthetic construct
  misc_feature 1..21: note = Target B2M Sequence complement
  source 1..21: mol_type = other DNA
tggagagagaattgaaaaagt

SEQ ID NO: 12117 - DNA, 21 bp, synthetic construct
  misc_feature 1..21: note = Target B2M Sequence complement
  source 1..21: mol_type = other DNA
ggagagagaattgaaaaagtg

SEQ ID NO: 12118 - DNA, 21 bp, synthetic construct
  misc_feature 1..21: note = Target B2M Sequence complement
  source 1..21: mol_type = other DNA
gagagagaattgaaaaagtgg

SEQ ID NO: 12119 - DNA, 21 bp, synthetic construct
  misc_feature 1..21: note = Target B2M Sequence complement
  source 1..21: mol_type = other DNA
agagagaattgaaaaagtgga

SEQ ID NO: 12120 - DNA, 21 bp, synthetic construct
  misc_feature 1..21: note = Target B2M Sequence complement
  source 1..21: mol_type = other DNA
gagagaattgaaaaagtggag

SEQ ID NO: 12121 - DNA, 21 bp, synthetic construct
  misc_feature 1..21: note = Target B2M Sequence complement
  source 1..21: mol_type = other DNA
agagaattgaaaaagtggagc

SEQ ID NO: 12122 - DNA, 21 bp, synthetic construct
  misc_feature 1..21: note = Target B2M Sequence complement
  source 1..21: mol_type = other DNA
gagaattgaaaaagtggagca

SEQ ID NO: 12123 - DNA, 21 bp, synthetic construct
  misc_feature 1..21: note = Target B2M Sequence complement
  source 1..21: mol_type = other DNA
agaattgaaaaagtggagcat

SEQ ID NO: 12124 - DNA, 21 bp, synthetic construct
  misc_feature 1..21: note = Target B2M Sequence complement
  source 1..21: mol_type = other DNA
gaattgaaaaagtggagcatt

SEQ ID NO: 12125 - DNA, 21 bp, synthetic construct
  misc_feature 1..21: note = Target B2M Sequence complement
  source 1..21: mol_type = other DNA
aattgaaaaagtggagcattc

SEQ ID NO: 12126 - DNA, 21 bp, synthetic construct
  misc_feature 1..21: note = Target B2M Sequence complement
  source 1..21: mol_type = other DNA
attgaaaaagtggagcattca

SEQ ID NO: 12127 - DNA, 21 bp, synthetic construct
  misc_feature 1..21: note = Target B2M Sequence complement
  source 1..21: mol_type = other DNA
ttgaaaaagtggagcattcag

SEQ ID NO: 12128 - DNA, 21 bp, synthetic construct
  misc_feature 1..21: note = Target B2M Sequence complement
  source 1..21: mol_type = other DNA
tgaaaaagtggagcattcaga

SEQ ID NO: 12129 - DNA, 21 bp, synthetic construct
  misc_feature 1..21: note = Target B2M Sequence complement
  source 1..21: mol_type = other DNA
gaaaaagtggagcattcagac

SEQ ID NO: 12130 - DNA, 21 bp, synthetic construct
  misc_feature 1..21: note = Target B2M Sequence complement
  source 1..21: mol_type = other DNA
aaaaagtggagcattcagact

SEQ ID NO: 12131 - DNA, 21 bp, synthetic construct
  misc_feature 1..21: note = Target B2M Sequence complement
  source 1..21: mol_type = other DNA
aaaagtggagcattcagactt

SEQ ID NO: 12132 - DNA, 21 bp, synthetic construct
  misc_feature 1..21: note = Target B2M Sequence complement
  source 1..21: mol_type = other DNA
gtactacactgaattcacccc

SEQ ID NO: 12133 - DNA, 21 bp, synthetic construct
  misc_feature 1..21: note = Target B2M Sequence complement
  source 1..21: mol_type = other DNA
tactacactgaattcaccccc

SEQ ID NO: 12134 - DNA, 21 bp, synthetic construct
  misc_feature 1..21: note = Target B2M Sequence complement
  source 1..21: mol_type = other DNA
actacactgaattcaccccca

SEQ ID NO: 12135 - DNA, 21 bp, synthetic construct
  misc_feature 1..21: note = Target B2M Sequence complement
  source 1..21: mol_type = other DNA
ctacactgaattcacccccac

SEQ ID NO: 12136 - DNA, 21 bp, synthetic construct
  misc_feature 1..21: note = Target B2M Sequence complement
  source 1..21: mol_type = other DNA
tacactgaattcacccccact

SEQ ID NO: 12137 - DNA, 21 bp, synthetic construct
  misc_feature 1..21: note = Target B2M Sequence complement
  source 1..21: mol_type = other DNA
acactgaattcacccccactg

SEQ ID NO: 12138 - DNA, 21 bp, synthetic construct
  misc_feature 1..21: note = Target B2M Sequence complement
  source 1..21: mol_type = other DNA
cactgaattcacccccactga

SEQ ID NO: 12139 - DNA, 21 bp, synthetic construct
  misc_feature 1..21: note = Target B2M Sequence complement
  source 1..21: mol_type = other DNA
actgaattcacccccactgaa

SEQ ID NO: 12140 - DNA, 21 bp, synthetic construct
  misc_feature 1..21: note = Target B2M Sequence complement
  source 1..21: mol_type = other DNA
ctgaattcacccccactgaaa

SEQ ID NO: 12141 - DNA, 21 bp, synthetic construct
  misc_feature 1..21: note = Target B2M Sequence complement
  source 1..21: mol_type = other DNA
tgaattcacccccactgaaaa

SEQ ID NO: 12142 - DNA, 21 bp, synthetic construct
  misc_feature 1..21: note = Target B2M Sequence complement
  source 1..21: mol_type = other DNA
gaattcacccccactgaaaaa

SEQ ID NO: 12143 - DNA, 21 bp, synthetic construct
  misc_feature 1..21: note = Target B2M Sequence complement
  source 1..21: mol_type = other DNA
aattcacccccactgaaaaag

SEQ ID NO: 12144 - DNA, 21 bp, synthetic construct
  misc_feature 1..21: note = Target B2M Sequence complement
  source 1..21: mol_type = other DNA
attcacccccactgaaaaaga

SEQ ID NO: 12145 - DNA, 21 bp, synthetic construct
  misc_feature 1..21: note = Target B2M Sequence complement
  source 1..21: mol_type = other DNA
ttcacccccactgaaaaagat

SEQ ID NO: 12146 - DNA, 21 bp, synthetic construct
  misc_feature 1..21: note = Target B2M Sequence complement
  source 1..21: mol_type = other DNA
tcacccccactgaaaaagatg

SEQ ID NO: 12147 - DNA, 21 bp, synthetic construct
  misc_feature 1..21: note = Target B2M Sequence complement
  source 1..21: mol_type = other DNA
cacccccactgaaaaagatga

SEQ ID NO: 12148 - DNA, 21 bp, synthetic construct
  misc_feature 1..21: note = Target B2M Sequence complement
  source 1..21: mol_type = other DNA
acccccactgaaaaagatgag

SEQ ID NO: 12149 - DNA, 21 bp, synthetic construct
  misc_feature 1..21: note = Target B2M Sequence complement
  source 1..21: mol_type = other DNA
cccccactgaaaaagatgagt

SEQ ID NO: 12150 - DNA, 21 bp, synthetic construct
  misc_feature 1..21: note = Target B2M Sequence complement
  source 1..21: mol_type = other DNA
ccccactgaaaaagatgagta

SEQ ID NO: 12151 - DNA, 21 bp, synthetic construct
  misc_feature 1..21: note = Target B2M Sequence complement
  source 1..21: mol_type = other DNA
cccactgaaaaagatgagtat

SEQ ID NO: 12152 - DNA, 21 bp, synthetic construct
  misc_feature 1..21: note = Target B2M Sequence complement
  source 1..21: mol_type = other DNA
ccactgaaaaagatgagtatg

SEQ ID NO: 12153 - DNA, 21 bp, synthetic construct
  misc_feature 1..21: note = Target B2M Sequence complement
  source 1..21: mol_type = other DNA
cactgaaaaagatgagtatgc

SEQ ID NO: 12154 - DNA, 21 bp, synthetic construct
  misc_feature 1..21: note = Target B2M Sequence complement
  source 1..21: mol_type = other DNA
actgaaaaagatgagtatgcc

SEQ ID NO: 12155 - DNA, 21 bp, synthetic construct
  misc_feature 1..21: note = Target B2M Sequence complement
  source 1..21: mol_type = other DNA
ctgaaaaagatgagtatgcct

SEQ ID NO: 12156 - DNA, 21 bp, synthetic construct
  misc_feature 1..21: note = Target B2M Sequence complement
  source 1..21: mol_type = other DNA
tgaaaaagatgagtatgcctg

SEQ ID NO: 12157 - DNA, 21 bp, synthetic construct
  misc_feature 1..21: note = Target B2M Sequence complement
  source 1..21: mol_type = other DNA
gaaaaagatgagtatgcctgc

SEQ ID NO: 12158 - DNA, 21 bp, synthetic construct
  misc_feature 1..21: note = Target B2M Sequence complement
  source 1..21: mol_type = other DNA
aaaaagatgagtatgcctgcc

SEQ ID NO: 12159 - DNA, 21 bp, synthetic construct
  misc_feature 1..21: note = Target B2M Sequence complement
  source 1..21: mol_type = other DNA
aaaagatgagtatgcctgccg

SEQ ID NO: 12160 - DNA, 21 bp, synthetic construct
  misc_feature 1..21: note = Target B2M Sequence complement
  source 1..21: mol_type = other DNA
aaattctgcttgcttgctttt

SEQ ID NO: 12161 - DNA, 21 bp, synthetic construct
  misc_feature 1..21: note = Target B2M Sequence complement
  source 1..21: mol_type = other DNA
aattctgcttgcttgcttttt

SEQ ID NO: 12162 - DNA, 21 bp, synthetic construct
  misc_feature 1..21: note = Target B2M Sequence complement
  source 1..21: mol_type = other DNA
attctgcttgcttgcttttta

SEQ ID NO: 12163 - DNA, 21 bp, synthetic construct
  misc_feature 1..21: note = Target B2M Sequence complement
  source 1..21: mol_type = other DNA
ttctgcttgcttgctttttaa

SEQ ID NO: 12164 - DNA, 21 bp, synthetic construct
  misc_feature 1..21: note = Target B2M Sequence complement
  source 1..21: mol_type = other DNA
tctgcttgcttgctttttaat

SEQ ID NO: 12165 - DNA, 21 bp, synthetic construct
  misc_feature 1..21: note = Target B2M Sequence complement
  source 1..21: mol_type = other DNA
ctgcttgcttgctttttaata

SEQ ID NO: 12166 - DNA, 21 bp, synthetic construct
  misc_feature 1..21: note = Target B2M Sequence complement
  source 1..21: mol_type = other DNA
tgcttgcttgctttttaatat

SEQ ID NO: 12167 - DNA, 21 bp, synthetic construct
  misc_feature 1..21: note = Target B2M Sequence complement
  source 1..21: mol_type = other DNA
gcttgcttgctttttaatatt

SEQ ID NO: 12168 - DNA, 21 bp, synthetic construct
  misc_feature 1..21: note = Target B2M Sequence complement
  source 1..21: mol_type = other DNA
cttgcttgctttttaatattg

SEQ ID NO: 12169 - DNA, 21 bp, synthetic construct
  misc_feature 1..21: note = Target B2M Sequence complement
  source 1..21: mol_type = other DNA
acttacactttatgcacaaaa

SEQ ID NO: 12170 - DNA, 21 bp, synthetic construct
  misc_feature 1..21: note = Target B2M Sequence complement
  source 1..21: mol_type = other DNA
cttacactttatgcacaaaat

SEQ ID NO: 12171 - DNA, 21 bp, synthetic construct
  misc_feature 1..21: note = Target B2M Sequence complement
  source 1..21: mol_type = other DNA
ttacactttatgcacaaaatg

SEQ ID NO: 12172 - DNA, 21 bp, synthetic construct
  misc_feature 1..21: note = Target B2M Sequence complement
  source 1..21: mol_type = other DNA
tacactttatgcacaaaatgt

SEQ ID NO: 12173 - DNA, 21 bp, synthetic construct
  misc_feature 1..21: note = Target B2M Sequence complement
  source 1..21: mol_type = other DNA
acactttatgcacaaaatgta

SEQ ID NO: 12174 - DNA, 21 bp, synthetic construct
  misc_feature 1..21: note = Target B2M Sequence complement
  source 1..21: mol_type = other DNA
cactttatgcacaaaatgtag

SEQ ID NO: 12175 - DNA, 21 bp, synthetic construct
  misc_feature 1..21: note = Target B2M Sequence complement
  source 1..21: mol_type = other DNA
actttatgcacaaaatgtagg

SEQ ID NO: 12176 - DNA, 21 bp, synthetic construct
  misc_feature 1..21: note = Target B2M Sequence complement
  source 1..21: mol_type = other DNA
ctttatgcacaaaatgtaggg

SEQ ID NO: 12177 - DNA, 21 bp, synthetic construct
  misc_feature 1..21: note = Target B2M Sequence complement
  source 1..21: mol_type = other DNA
tttatgcacaaaatgtagggt

SEQ ID NO: 12178 - DNA, 21 bp, synthetic construct
  misc_feature 1..21: note = Target B2M Sequence complement
  source 1..21: mol_type = other DNA
ttatgcacaaaatgtagggtt

SEQ ID NO: 12179 - DNA, 21 bp, synthetic construct
  misc_feature 1..21: note = Target B2M Sequence complement
  source 1..21: mol_type = other DNA
tatgcacaaaatgtagggtta

SEQ ID NO: 12180 - DNA, 21 bp, synthetic construct
  misc_feature 1..21: note = Target B2M Sequence complement
  source 1..21: mol_type = other DNA
atgcacaaaatgtagggttat

SEQ ID NO: 12181 - DNA, 21 bp, synthetic construct
  misc_feature 1..21: note = Target B2M Sequence complement
  source 1..21: mol_type = other DNA
tgcacaaaatgtagggttata

SEQ ID NO: 12182 - DNA, 21 bp, synthetic construct
  misc_feature 1..21: note = Target B2M Sequence complement
  source 1..21: mol_type = other DNA
gcacaaaatgtagggttataa

SEQ ID NO: 12183 - DNA, 21 bp, synthetic construct
  misc_feature 1..21: note = Target B2M Sequence complement
  source 1..21: mol_type = other DNA
cacaaaatgtagggttataat

SEQ ID NO: 12184 - DNA, 21 bp, synthetic construct
  misc_feature 1..21: note = Target B2M Sequence complement
  source 1..21: mol_type = other DNA
ctggcaacttagaggtgggga

SEQ ID NO: 12185 - DNA, 21 bp, synthetic construct
  misc_feature 1..21: note = Target B2M Sequence complement
  source 1..21: mol_type = other DNA
tggcaacttagaggtggggag

SEQ ID NO: 12186 - DNA, 21 bp, synthetic construct
  misc_feature 1..21: note = Target B2M Sequence complement
  source 1..21: mol_type = other DNA
gcaacttagaggtggggagca

SEQ ID NO: 12187 - DNA, 21 bp, synthetic construct
  misc_feature 1..21: note = Target B2M Sequence complement
  source 1..21: mol_type = other DNA
caacttagaggtggggagcag

SEQ ID NO: 12188 - DNA, 21 bp, synthetic construct
  misc_feature 1..21: note = Target B2M Sequence complement
  source 1..21: mol_type = other DNA
aacttagaggtggggagcaga

SEQ ID NO: 12189 - DNA, 21 bp, synthetic construct
  misc_feature 1..21: note = Target B2M Sequence complement
  source 1..21: mol_type = other DNA
acttagaggtggggagcagag

SEQ ID NO: 12190 - DNA, 21 bp, synthetic construct
  misc_feature 1..21: note = Target B2M Sequence complement
  source 1..21: mol_type = other DNA
cttagaggtggggagcagaga

SEQ ID NO: 12191 - DNA, 21 bp, synthetic construct
  misc_feature 1..21: note = Target B2M Sequence complement
  source 1..21: mol_type = other DNA
ttagaggtggggagcagagaa

SEQ ID NO: 12192 - DNA, 21 bp, synthetic construct
  misc_feature 1..21: note = Target B2M Sequence complement
  source 1..21: mol_type = other DNA
tagaggtggggagcagagaat

SEQ ID NO: 12193 - DNA, 21 bp, synthetic construct
  misc_feature 1..21: note = Target B2M Sequence complement
  source 1..21: mol_type = other DNA
agaggtggggagcagagaatt

SEQ ID NO: 12194 - DNA, 21 bp, synthetic construct
  misc_feature 1..21: note = Target B2M Sequence complement
  source 1..21: mol_type = other DNA
gaggtggggagcagagaattc

SEQ ID NO: 12195 - DNA, 21 bp, synthetic construct
  misc_feature 1..21: note = Target B2M Sequence complement
  source 1..21: mol_type = other DNA
aggtggggagcagagaattct

SEQ ID NO: 12196 - DNA, 21 bp, synthetic construct
  misc_feature 1..21: note = Target B2M Sequence complement
  source 1..21: mol_type = other DNA
ggtggggagcagagaattctc

SEQ ID NO: 12197 - DNA, 21 bp, synthetic construct
  misc_feature 1..21: note = Target B2M Sequence complement
  source 1..21: mol_type = other DNA
gtggggagcagagaattctct

SEQ ID NO: 12198 - DNA, 21 bp, synthetic construct
  misc_feature 1..21: note = Target B2M Sequence complement
  source 1..21: mol_type = other DNA
tggggagcagagaattctctt

SEQ ID NO: 12199 - DNA, 21 bp, synthetic construct
  misc_feature 1..21: note = Target B2M Sequence complement
  source 1..21: mol_type = other DNA
ggggagcagagaattctctta

SEQ ID NO: 12200 - DNA, 21 bp, synthetic construct
  misc_feature 1..21: note = Target B2M Sequence complement
  source 1..21: mol_type = other DNA
tactctgcttagaatttgggg

SEQ ID NO: 12201 - DNA, 21 bp, synthetic construct
  misc_feature 1..21: note = Target B2M Sequence complement
  source 1..21: mol_type = other DNA
actctgcttagaatttggggg

SEQ ID NO: 12202 - DNA, 21 bp, synthetic construct
  misc_feature 1..21: note = Target B2M Sequence complement
  source 1..21: mol_type = other DNA
ctctgcttagaatttggggga

SEQ ID NO: 12203 - DNA, 21 bp, synthetic construct
  misc_feature 1..21: note = Target B2M Sequence complement
  source 1..21: mol_type = other DNA
tctgcttagaatttgggggaa

SEQ ID NO: 12204 - DNA, 21 bp, synthetic construct
  misc_feature 1..21: note = Target B2M Sequence complement
  source 1..21: mol_type = other DNA
ctgcttagaatttgggggaaa

SEQ ID NO: 12205 - DNA, 21 bp, synthetic construct
  misc_feature 1..21: note = Target B2M Sequence complement
  source 1..21: mol_type = other DNA
tgcttagaatttgggggaaaa

SEQ ID NO: 12206 - DNA, 21 bp, synthetic construct
  misc_feature 1..21: note = Target B2M Sequence complement
  source 1..21: mol_type = other DNA
gcttagaatttgggggaaaat

SEQ ID NO: 12207 - DNA, 21 bp, synthetic construct
  misc_feature 1..21: note = Target B2M Sequence complement
  source 1..21: mol_type = other DNA
cttagaatttgggggaaaatt

SEQ ID NO: 12208 - DNA, 21 bp, synthetic construct
  misc_feature 1..21: note = Target B2M Sequence complement
  source 1..21: mol_type = other DNA
ttagaatttgggggaaaattt

SEQ ID NO: 12209 - DNA, 21 bp, synthetic construct
  misc_feature 1..21: note = Target B2M Sequence complement
  source 1..21: mol_type = other DNA
tagaatttgggggaaaattta

SEQ ID NO: 12210 - DNA, 21 bp, synthetic construct
  misc_feature 1..21: note = Target B2M Sequence complement
  source 1..21: mol_type = other DNA
agaatttgggggaaaatttag

SEQ ID NO: 12211 - DNA, 21 bp, synthetic construct
  misc_feature 1..21: note = Target B2M Sequence complement
  source 1..21: mol_type = other DNA
gaatttgggggaaaatttaga

SEQ ID NO: 12212 - DNA, 21 bp, synthetic construct
  misc_feature 1..21: note = Target B2M Sequence complement
  source 1..21: mol_type = other DNA
aatttgggggaaaatttagaa

SEQ ID NO: 12213 - DNA, 21 bp, synthetic construct
  misc_feature 1..21: note = Target B2M Sequence complement
  source 1..21: mol_type = other DNA
atttgggggaaaatttagaaa

SEQ ID NO: 12214 - DNA, 21 bp, synthetic construct
  misc_feature 1..21: note = Target B2M Sequence complement
  source 1..21: mol_type = other DNA
tttgggggaaaatttagaaat

SEQ ID NO: 12215 - DNA, 21 bp, synthetic construct
  misc_feature 1..21: note = Target B2M Sequence complement
  source 1..21: mol_type = other DNA
ttgggggaaaatttagaaata

SEQ ID NO: 12216 - DNA, 21 bp, synthetic construct
  misc_feature 1..21: note = Target B2M Sequence complement
  source 1..21: mol_type = other DNA
tgggggaaaatttagaaatat

SEQ ID NO: 12217 - DNA, 21 bp, synthetic construct
  misc_feature 1..21: note = Target B2M Sequence complement
  source 1..21: mol_type = other DNA
gggggaaaatttagaaatata

SEQ ID NO: 12218 - DNA, 21 bp, synthetic construct
  misc_feature 1..21: note = Target B2M Sequence complement
  source 1..21: mol_type = other DNA
gtggttaatctggtttatttt

SEQ ID NO: 12219 - DNA, 21 bp, synthetic construct
  misc_feature 1..21: note = Target B2M Sequence complement
  source 1..21: mol_type = other DNA
ggttaatctggtttatttttg

SEQ ID NO: 12220 - DNA, 21 bp, synthetic construct
  misc_feature 1..21: note = Target B2M Sequence complement
  source 1..21: mol_type = other DNA
aatctggtttatttttgttcc

SEQ ID NO: 12221 - DNA, 21 bp, synthetic construct
  misc_feature 1..21: note = Target B2M Sequence complement
  source 1..21: mol_type = other DNA
atctggtttatttttgttcca

SEQ ID NO: 12222 - DNA, 21 bp, synthetic construct
  misc_feature 1..21: note = Target B2M Sequence complement
  source 1..21: mol_type = other DNA
tctggtttatttttgttccac

SEQ ID NO: 12223 - DNA, 21 bp, synthetic construct
  misc_feature 1..21: note = Target B2M Sequence complement
  source 1..21: mol_type = other DNA
ctggtttatttttgttccaca

SEQ ID NO: 12224 - DNA, 21 bp, synthetic construct
  misc_feature 1..21: note = Target B2M Sequence complement
  source 1..21: mol_type = other DNA
tggtttatttttgttccacaa

SEQ ID NO: 12225 - DNA, 21 bp, synthetic construct
  misc_feature 1..21: note = Target B2M Sequence complement
  source 1..21: mol_type = other DNA
ggtttatttttgttccacaag

SEQ ID NO: 12226 - DNA, 21 bp, synthetic construct
  misc_feature 1..21: note = Target B2M Sequence complement
  source 1..21: mol_type = other DNA
gtttatttttgttccacaagt

SEQ ID NO: 12227 - DNA, 22 bp, synthetic construct
  misc_feature 1..22: note = Target B2M Sequence complement
  source 1..22: mol_type = other DNA
aagctgacagcattcgggccga

SEQ ID NO: 12228 - DNA, 22 bp, synthetic construct
  misc_feature 1..22: note = Target B2M Sequence complement
  source 1..22: mol_type = other DNA
ctgacagcattcgggccgagat

SEQ ID NO: 12229 - DNA, 22 bp, synthetic construct
  misc_feature 1..22: note = Target B2M Sequence complement
  source 1..22: mol_type = other DNA
tgacagcattcgggccgagatg

SEQ ID NO: 12230 - DNA, 22 bp, synthetic construct
  misc_feature 1..22: note = Target B2M Sequence complement
  source 1..22: mol_type = other DNA
gacagcattcgggccgagatgt

SEQ ID NO: 12231 - DNA, 22 bp, synthetic construct
  misc_feature 1..22: note = Target B2M Sequence complement
  source 1..22: mol_type = other DNA
acagcattcgggccgagatgtc

SEQ ID NO: 12232 - DNA, 22 bp, synthetic construct
  misc_feature 1..22: note = Target B2M Sequence complement
  source 1..22: mol_type = other DNA
cagcattcgggccgagatgtct

SEQ ID NO: 12233 - DNA, 22 bp, synthetic construct
  misc_feature 1..22: note = Target B2M Sequence complement
  source 1..22: mol_type = other DNA
agcattcgggccgagatgtctc

SEQ ID NO: 12234 - DNA, 22 bp, synthetic construct
  misc_feature 1..22: note = Target B2M Sequence complement
  source 1..22: mol_type = other DNA
attcgggccgagatgtctcgct

SEQ ID NO: 12235 - DNA, 22 bp, synthetic construct
  misc_feature 1..22: note = Target B2M Sequence complement
  source 1..22: mol_type = other DNA
agaatggagagagaattgaaaa

SEQ ID NO: 12236 - DNA, 22 bp, synthetic construct
  misc_feature 1..22: note = Target B2M Sequence complement
  source 1..22: mol_type = other DNA
gaatggagagagaattgaaaaa

SEQ ID NO: 12237 - DNA, 22 bp, synthetic construct
  misc_feature 1..22: note = Target B2M Sequence complement
  source 1..22: mol_type = other DNA
aatggagagagaattgaaaaag

SEQ ID NO: 12238 - DNA, 22 bp, synthetic construct
  misc_feature 1..22: note = Target B2M Sequence complement
  source 1..22: mol_type = other DNA
atggagagagaattgaaaaagt

SEQ ID NO: 12239 - DNA, 22 bp, synthetic construct
  misc_feature 1..22: note = Target B2M Sequence complement
  source 1..22: mol_type = other DNA
tggagagagaattgaaaaagtg

SEQ ID NO: 12240 - DNA, 22 bp, synthetic construct
  misc_feature 1..22: note = Target B2M Sequence complement
  source 1..22: mol_type = other DNA
ggagagagaattgaaaaagtgg

SEQ ID NO: 12241 - DNA, 22 bp, synthetic construct
  misc_feature 1..22: note = Target B2M Sequence complement
  source 1..22: mol_type = other DNA
gagagagaattgaaaaagtgga

SEQ ID NO: 12242 - DNA, 22 bp, synthetic construct
  misc_feature 1..22: note = Target B2M Sequence complement
  source 1..22: mol_type = other DNA
agagagaattgaaaaagtggag

SEQ ID NO: 12243 - DNA, 22 bp, synthetic construct
  misc_feature 1..22: note = Target B2M Sequence complement
  source 1..22: mol_type = other DNA
gagagaattgaaaaagtggagc

SEQ ID NO: 12244 - DNA, 22 bp, synthetic construct
  misc_feature 1..22: note = Target B2M Sequence complement
  source 1..22: mol_type = other DNA
agagaattgaaaaagtggagca

SEQ ID NO: 12245 - DNA, 22 bp, synthetic construct
  misc_feature 1..22: note = Target B2M Sequence complement
  source 1..22: mol_type = other DNA
gagaattgaaaaagtggagcat

SEQ ID NO: 12246 - DNA, 22 bp, synthetic construct
  misc_feature 1..22: note = Target B2M Sequence complement
  source 1..22: mol_type = other DNA
agaattgaaaaagtggagcatt

SEQ ID NO: 12247 - DNA, 22 bp, synthetic construct
  misc_feature 1..22: note = Target B2M Sequence complement
  source 1..22: mol_type = other DNA
gaattgaaaaagtggagcattc

SEQ ID NO: 12248 - DNA, 22 bp, synthetic construct
  misc_feature 1..22: note = Target B2M Sequence complement
  source 1..22: mol_type = other DNA
aattgaaaaagtggagcattca

SEQ ID NO: 12249 - DNA, 22 bp, synthetic construct
  misc_feature 1..22: note = Target B2M Sequence complement
  source 1..22: mol_type = other DNA
attgaaaaagtggagcattcag

SEQ ID NO: 12250 - DNA, 22 bp, synthetic construct
  misc_feature 1..22: note = Target B2M Sequence complement
  source 1..22: mol_type = other DNA
ttgaaaaagtggagcattcaga

SEQ ID NO: 12251 - DNA, 22 bp, synthetic construct
  misc_feature 1..22: note = Target B2M Sequence complement
  source 1..22: mol_type = other DNA
tgaaaaagtggagcattcagac

SEQ ID NO: 12252 - DNA, 22 bp, synthetic construct
  misc_feature 1..22: note = Target B2M Sequence complement
  source 1..22: mol_type = other DNA
gaaaaagtggagcattcagact

SEQ ID NO: 12253 - DNA, 22 bp, synthetic construct
  misc_feature 1..22: note = Target B2M Sequence complement
  source 1..22: mol_type = other DNA
aaaaagtggagcattcagactt

SEQ ID NO: 12254 - DNA, 22 bp, synthetic construct
  misc_feature 1..22: note = Target B2M Sequence complement
  source 1..22: mol_type = other DNA
aaaagtggagcattcagacttg

SEQ ID NO: 12255 - DNA, 22 bp, synthetic construct
  misc_feature 1..22: note = Target B2M Sequence complement
  source 1..22: mol_type = other DNA
tgtactacactgaattcacccc

SEQ ID NO: 12256 - DNA, 22 bp, synthetic construct
  misc_feature 1..22: note = Target B2M Sequence complement
  source 1..22: mol_type = other DNA
gtactacactgaattcaccccc

SEQ ID NO: 12257 - DNA, 22 bp, synthetic construct
  misc_feature 1..22: note = Target B2M Sequence complement
  source 1..22: mol_type = other DNA
tactacactgaattcaccccca

SEQ ID NO: 12258 - DNA, 22 bp, synthetic construct
  misc_feature 1..22: note = Target B2M Sequence complement
  source 1..22: mol_type = other DNA
actacactgaattcacccccac

SEQ ID NO: 12259 - DNA, 22 bp, synthetic construct
  misc_feature 1..22: note = Target B2M Sequence complement
  source 1..22: mol_type = other DNA
ctacactgaattcacccccact

SEQ ID NO: 12260 - DNA, 22 bp, synthetic construct
  misc_feature 1..22: note = Target B2M Sequence complement
  source 1..22: mol_type = other DNA
tacactgaattcacccccactg

SEQ ID NO: 12261 - DNA, 22 bp, synthetic construct
  misc_feature 1..22: note = Target B2M Sequence complement
  source 1..22: mol_type = other DNA
acactgaattcacccccactga

SEQ ID NO: 12262 - DNA, 22 bp, synthetic construct
  misc_feature 1..22: note = Target B2M Sequence complement
  source 1..22: mol_type = other DNA
cactgaattcacccccactgaa

SEQ ID NO: 12263 - DNA, 22 bp, synthetic construct
  misc_feature 1..22: note = Target B2M Sequence complement
  source 1..22: mol_type = other DNA
actgaattcacccccactgaaa

SEQ ID NO: 12264 - DNA, 22 bp, synthetic construct
  misc_feature 1..22: note = Target B2M Sequence complement
  source 1..22: mol_type = other DNA
ctgaattcacccccactgaaaa

SEQ ID NO: 12265 - DNA, 22 bp, synthetic construct
  misc_feature 1..22: note = Target B2M Sequence complement
  source 1..22: mol_type = other DNA
tgaattcacccccactgaaaaa

SEQ ID NO: 12266 - DNA, 22 bp, synthetic construct
  misc_feature 1..22: note = Target B2M Sequence complement
  source 1..22: mol_type = other DNA
gaattcacccccactgaaaaag

SEQ ID NO: 12267 - DNA, 22 bp, synthetic construct
  misc_feature 1..22: note = Target B2M Sequence complement
  source 1..22: mol_type = other DNA
aattcacccccactgaaaaaga

SEQ ID NO: 12268 - DNA, 22 bp, synthetic construct
  misc_feature 1..22: note = Target B2M Sequence complement
  source 1..22: mol_type = other DNA
attcacccccactgaaaaagat

SEQ ID NO: 12269 - DNA, 22 bp, synthetic construct
  misc_feature 1..22: note = Target B2M Sequence complement
  source 1..22: mol_type = other DNA
ttcacccccactgaaaaagatg

SEQ ID NO: 12270 - DNA, 22 bp, synthetic construct
  misc_feature 1..22: note = Target B2M Sequence complement
  source 1..22: mol_type = other DNA
tcacccccactgaaaaagatga

SEQ ID NO: 12271 - DNA, 22 bp, synthetic construct
  misc_feature 1..22: note = Target B2M Sequence complement
  source 1..22: mol_type = other DNA
cacccccactgaaaaagatgag

SEQ ID NO: 12272 - DNA, 22 bp, synthetic construct
  misc_feature 1..22: note = Target B2M Sequence complement
  source 1..22: mol_type = other DNA
acccccactgaaaaagatgagt

SEQ ID NO: 12273 - DNA, 22 bp, synthetic construct
  misc_feature 1..22: note = Target B2M Sequence complement
  source 1..22: mol_type = other DNA
cccccactgaaaaagatgagta

SEQ ID NO: 12274 - DNA, 22 bp, synthetic construct
  misc_feature 1..22: note = Target B2M Sequence complement
  source 1..22: mol_type = other DNA
ccccactgaaaaagatgagtat

SEQ ID NO: 12275 - DNA, 22 bp, synthetic construct
  misc_feature 1..22: note = Target B2M Sequence complement
  source 1..22: mol_type = other DNA
cccactgaaaaagatgagtatg

SEQ ID NO: 12276 - DNA, 22 bp, synthetic construct
  misc_feature 1..22: note = Target B2M Sequence complement
  source 1..22: mol_type = other DNA
ccactgaaaaagatgagtatgc

SEQ ID NO: 12277 - DNA, 22 bp, synthetic construct
  misc_feature 1..22: note = Target B2M Sequence complement
  source 1..22: mol_type = other DNA
cactgaaaaagatgagtatgcc

SEQ ID NO: 12278 - DNA, 22 bp, synthetic construct
  misc_feature 1..22: note = Target B2M Sequence complement
  source 1..22: mol_type = other DNA
actgaaaaagatgagtatgcct

SEQ ID NO: 12279 - DNA, 22 bp, synthetic construct
  misc_feature 1..22: note = Target B2M Sequence complement
  source 1..22: mol_type = other DNA
ctgaaaaagatgagtatgcctg

SEQ ID NO: 12280 - DNA, 22 bp, synthetic construct
  misc_feature 1..22: note = Target B2M Sequence complement
  source 1..22: mol_type = other DNA
tgaaaaagatgagtatgcctgc

SEQ ID NO: 12281 - DNA, 22 bp, synthetic construct
  misc_feature 1..22: note = Target B2M Sequence complement
  source 1..22: mol_type = other DNA
gaaaaagatgagtatgcctgcc

SEQ ID NO: 12282 - DNA, 22 bp, synthetic construct
  misc_feature 1..22: note = Target B2M Sequence complement
  source 1..22: mol_type = other DNA
aaaaagatgagtatgcctgccg

SEQ ID NO: 12283 - DNA, 22 bp, synthetic construct
  misc_feature 1..22: note = Target B2M Sequence complement
  source 1..22: mol_type = other DNA
aaaagatgagtatgcctgccgt

SEQ ID NO: 12284 - DNA, 22 bp, synthetic construct
  misc_feature 1..22: note = Target B2M Sequence complement
  source 1..22: mol_type = other DNA
caaattctgcttgcttgctttt

SEQ ID NO: 12285 - DNA, 22 bp, synthetic construct
  misc_feature 1..22: note = Target B2M Sequence complement
  source 1..22: mol_type = other DNA
aaattctgcttgcttgcttttt

SEQ ID NO: 12286 - DNA, 22 bp, synthetic construct
  misc_feature 1..22: note = Target B2M Sequence complement
  source 1..22: mol_type = other DNA
aattctgcttgcttgcttttta

SEQ ID NO: 12287 - DNA, 22 bp, synthetic construct
  misc_feature 1..22: note = Target B2M Sequence complement
  source 1..22: mol_type = other DNA
attctgcttgcttgctttttaa

SEQ ID NO: 12288 - DNA, 22 bp, synthetic construct
  misc_feature 1..22: note = Target B2M Sequence complement
  source 1..22: mol_type = other DNA
ttctgcttgcttgctttttaat

SEQ ID NO: 12289 - DNA, 22 bp, synthetic construct
  misc_feature 1..22: note = Target B2M Sequence complement
  source 1..22: mol_type = other DNA
tctgcttgcttgctttttaata

SEQ ID NO: 12290 - DNA, 22 bp, synthetic construct
  misc_feature 1..22: note = Target B2M Sequence complement
  source 1..22: mol_type = other DNA
ctgcttgcttgctttttaatat

SEQ ID NO: 12291 - DNA, 22 bp, synthetic construct
  misc_feature 1..22: note = Target B2M Sequence complement
  source 1..22: mol_type = other DNA
tgcttgcttgctttttaatatt

SEQ ID NO: 12292 - DNA, 22 bp, synthetic construct
  misc_feature 1..22: note = Target B2M Sequence complement
  source 1..22: mol_type = other DNA
gcttgcttgctttttaatattg

SEQ ID NO: 12293 - DNA, 22 bp, synthetic construct
  misc_feature 1..22: note = Target B2M Sequence complement
  source 1..22: mol_type = other DNA
cttgcttgctttttaatattga

SEQ ID NO: 12294 - DNA, 22 bp, synthetic construct
  misc_feature 1..22: note = Target B2M Sequence complement
  source 1..22: mol_type = other DNA
cacttacactttatgcacaaaa

SEQ ID NO: 12295 - DNA, 22 bp, synthetic construct
  misc_feature 1..22: note = Target B2M Sequence complement
  source 1..22: mol_type = other DNA
acttacactttatgcacaaaat

SEQ ID NO: 12296 - DNA, 22 bp, synthetic construct
  misc_feature 1..22: note = Target B2M Sequence complement
  source 1..22: mol_type = other DNA
cttacactttatgcacaaaatg

SEQ ID NO: 12297 - DNA, 22 bp, synthetic construct
  misc_feature 1..22: note = Target B2M Sequence complement
  source 1..22: mol_type = other DNA
ttacactttatgcacaaaatgt

SEQ ID NO: 12298 - DNA, 22 bp, synthetic construct
  misc_feature 1..22: note = Target B2M Sequence complement
  source 1..22: mol_type = other DNA
tacactttatgcacaaaatgta

SEQ ID NO: 12299 - DNA, 22 bp, synthetic construct
  misc_feature 1..22: note = Target B2M Sequence complement
  source 1..22: mol_type = other DNA
acactttatgcacaaaatgtag

SEQ ID NO: 12300 - DNA, 22 bp, synthetic construct
  misc_feature 1..22: note = Target B2M Sequence complement
  source 1..22: mol_type = other DNA
cactttatgcacaaaatgtagg

SEQ ID NO: 12301 - DNA, 22 bp, synthetic construct
  misc_feature 1..22: note = Target B2M Sequence complement
  source 1..22: mol_type = other DNA
actttatgcacaaaatgtaggg

SEQ ID NO: 12302 - DNA, 22 bp, synthetic construct
  misc_feature 1..22: note = Target B2M Sequence complement
  source 1..22: mol_type = other DNA
ctttatgcacaaaatgtagggt

SEQ ID NO: 12303 - DNA, 22 bp, synthetic construct
  misc_feature 1..22: note = Target B2M Sequence complement
  source 1..22: mol_type = other DNA
tttatgcacaaaatgtagggtt

SEQ ID NO: 12304 - DNA, 22 bp, synthetic construct
  misc_feature 1..22: note = Target B2M Sequence complement
  source 1..22: mol_type = other DNA
ttatgcacaaaatgtagggtta

SEQ ID NO: 12305 - DNA, 22 bp, synthetic construct
  misc_feature 1..22: note = Target B2M Sequence complement
  source 1..22: mol_type = other DNA
tatgcacaaaatgtagggttat

SEQ ID NO: 12306 - DNA, 22 bp, synthetic construct
  misc_feature 1..22: note = Target B2M Sequence complement
  source 1..22: mol_type = other DNA
atgcacaaaatgtagggttata

SEQ ID NO: 12307 - DNA, 22 bp, synthetic construct
  misc_feature 1..22: note = Target B2M Sequence complement
  source 1..22: mol_type = other DNA
tgcacaaaatgtagggttataa

SEQ ID NO: 12308 - DNA, 22 bp, synthetic construct
  misc_feature 1..22: note = Target B2M Sequence complement
  source 1..22: mol_type = other DNA
gcacaaaatgtagggttataat

SEQ ID NO: 12309 - DNA, 22 bp, synthetic construct
  misc_feature 1..22: note = Target B2M Sequence complement
  source 1..22: mol_type = other DNA
cacaaaatgtagggttataata

SEQ ID NO: 12310 - DNA, 22 bp, synthetic construct
  misc_feature 1..22: note = Target B2M Sequence complement
  source 1..22: mol_type = other DNA
gctggcaacttagaggtgggga

SEQ ID NO: 12311 - DNA, 22 bp, synthetic construct
  misc_feature 1..22: note = Target B2M Sequence complement
  source 1..22: mol_type = other DNA
ctggcaacttagaggtggggag

SEQ ID NO: 12312 - DNA, 22 bp, synthetic construct
  misc_feature 1..22: note = Target B2M Sequence complement
  source 1..22: mol_type = other DNA
tggcaacttagaggtggggagc

SEQ ID NO: 12313 - DNA, 22 bp, synthetic construct
  misc_feature 1..22: note = Target B2M Sequence complement
  source 1..22: mol_type = other DNA
ggcaacttagaggtggggagca

SEQ ID NO: 12314 - DNA, 22 bp, synthetic construct
  misc_feature 1..22: note = Target B2M Sequence complement
  source 1..22: mol_type = other DNA
gcaacttagaggtggggagcag

SEQ ID NO: 12315 - DNA, 22 bp, synthetic construct
  misc_feature 1..22: note = Target B2M Sequence complement
  source 1..22: mol_type = other DNA
caacttagaggtggggagcaga

SEQ ID NO: 12316 - DNA, 22 bp, synthetic construct
  misc_feature 1..22: note = Target B2M Sequence complement
  source 1..22: mol_type = other DNA
aacttagaggtggggagcagag

SEQ ID NO: 12317 - DNA, 22 bp, synthetic construct
  misc_feature 1..22: note = Target B2M Sequence complement
  source 1..22: mol_type = other DNA
acttagaggtggggagcagaga

SEQ ID NO: 12318 - DNA, 22 bp, synthetic construct
  misc_feature 1..22: note = Target B2M Sequence complement
  source 1..22: mol_type = other DNA
cttagaggtggggagcagagaa

SEQ ID NO: 12319 - DNA, 22 bp, synthetic construct
  misc_feature 1..22: note = Target B2M Sequence complement
  source 1..22: mol_type = other DNA
ttagaggtggggagcagagaat

SEQ ID NO: 12320 - DNA, 22 bp, synthetic construct
  misc_feature 1..22: note = Target B2M Sequence complement
  source 1..22: mol_type = other DNA
tagaggtggggagcagagaatt

SEQ ID NO: 12321 - DNA, 22 bp, synthetic construct
  misc_feature 1..22: note = Target B2M Sequence complement
  source 1..22: mol_type = other DNA
agaggtggggagcagagaattc

SEQ ID NO: 12322 - DNA, 22 bp, synthetic construct
  misc_feature 1..22: note = Target B2M Sequence complement
  source 1..22: mol_type = other DNA
gaggtggggagcagagaattct

SEQ ID NO: 12323 - DNA, 22 bp, synthetic construct
  misc_feature 1..22: note = Target B2M Sequence complement
  source 1..22: mol_type = other DNA
aggtggggagcagagaattctc

SEQ ID NO: 12324 - DNA, 22 bp, synthetic construct
  misc_feature 1..22: note = Target B2M Sequence complement
  source 1..22: mol_type = other DNA
ggtggggagcagagaattctct

SEQ ID NO: 12325 - DNA, 22 bp, synthetic construct
  misc_feature 1..22: note = Target B2M Sequence complement
  source 1..22: mol_type = other DNA
gtggggagcagagaattctctt

SEQ ID NO: 12326 - DNA, 22 bp, synthetic construct
  misc_feature 1..22: note = Target B2M Sequence complement
  source 1..22: mol_type = other DNA
tggggagcagagaattctctta

SEQ ID NO: 12327 - DNA, 22 bp, synthetic construct
  misc_feature 1..22: note = Target B2M Sequence complement
  source 1..22: mol_type = other DNA
ggggagcagagaattctcttat

SEQ ID NO: 12328 - DNA, 22 bp, synthetic construct
  misc_feature 1..22: note = Target B2M Sequence complement
  source 1..22: mol_type = other DNA
atactctgcttagaatttgggg

SEQ ID NO: 12329 - DNA, 22 bp, synthetic construct
  misc_feature 1..22: note = Target B2M Sequence complement
  source 1..22: mol_type = other DNA
tactctgcttagaatttggggg

SEQ ID NO: 12330 - DNA, 22 bp, synthetic construct
  misc_feature 1..22: note = Target B2M Sequence complement
  source 1..22: mol_type = other DNA
actctgcttagaatttggggga

SEQ ID NO: 12331 - DNA, 22 bp, synthetic construct
  misc_feature 1..22: note = Target B2M Sequence complement
  source 1..22: mol_type = other DNA
ctctgcttagaatttgggggaa

SEQ ID NO: 12332 - DNA, 22 bp, synthetic construct
  misc_feature 1..22: note = Target B2M Sequence complement
  source 1..22: mol_type = other DNA
tctgcttagaatttgggggaaa

SEQ ID NO: 12333 - DNA, 22 bp, synthetic construct
  misc_feature 1..22: note = Target B2M Sequence complement
  source 1..22: mol_type = other DNA
ctgcttagaatttgggggaaaa

SEQ ID NO: 12334 - DNA, 22 bp, synthetic construct
  misc_feature 1..22: note = Target B2M Sequence complement
  source 1..22: mol_type = other DNA
tgcttagaatttgggggaaaat

SEQ ID NO: 12335 - DNA, 22 bp, synthetic construct
  misc_feature 1..22: note = Target B2M Sequence complement
  source 1..22: mol_type = other DNA
gcttagaatttgggggaaaatt

SEQ ID NO: 12336 - DNA, 22 bp, synthetic construct
  misc_feature 1..22: note = Target B2M Sequence complement
  source 1..22: mol_type = other DNA
cttagaatttgggggaaaattt

SEQ ID NO: 12337 - DNA, 22 bp, synthetic construct
  misc_feature 1..22: note = Target B2M Sequence complement
  source 1..22: mol_type = other DNA
ttagaatttgggggaaaattta

SEQ ID NO: 12338 - DNA, 22 bp, synthetic construct
  misc_feature 1..22: note = Target B2M Sequence complement
  source 1..22: mol_type = other DNA
tagaatttgggggaaaatttag

SEQ ID NO: 12339 - DNA, 22 bp, synthetic construct
  misc_feature 1..22: note = Target B2M Sequence complement
  source 1..22: mol_type = other DNA
agaatttgggggaaaatttaga

SEQ ID NO: 12340 - DNA, 22 bp, synthetic construct
  misc_feature 1..22: note = Target B2M Sequence complement
  source 1..22: mol_type = other DNA
gaatttgggggaaaatttagaa

SEQ ID NO: 12341 - DNA, 22 bp, synthetic construct
  misc_feature 1..22: note = Target B2M Sequence complement
  source 1..22: mol_type = other DNA
aatttgggggaaaatttagaaa

SEQ ID NO: 12342 - DNA, 22 bp, synthetic construct
  misc_feature 1..22: note = Target B2M Sequence complement
  source 1..22: mol_type = other DNA
atttgggggaaaatttagaaat

SEQ ID NO: 12343 - DNA, 22 bp, synthetic construct
  misc_feature 1..22: note = Target B2M Sequence complement
  source 1..22: mol_type = other DNA
tttgggggaaaatttagaaata

SEQ ID NO: 12344 - DNA, 22 bp, synthetic construct
  misc_feature 1..22: note = Target B2M Sequence complement
  source 1..22: mol_type = other DNA
ttgggggaaaatttagaaatat

SEQ ID NO: 12345 - DNA, 22 bp, synthetic construct
  misc_feature 1..22: note = Target B2M Sequence complement
  source 1..22: mol_type = other DNA
tgggggaaaatttagaaatata

SEQ ID NO: 12346 - DNA, 22 bp, synthetic construct
  misc_feature 1..22: note = Target B2M Sequence complement
  source 1..22: mol_type = other DNA
gggggaaaatttagaaatataa

SEQ ID NO: 12347 - DNA, 22 bp, synthetic construct
  misc_feature 1..22: note = Target B2M Sequence complement
  source 1..22: mol_type = other DNA
tgtggttaatctggtttatttt

SEQ ID NO: 12348 - DNA, 22 bp, synthetic construct
  misc_feature 1..22: note = Target B2M Sequence complement
  source 1..22: mol_type = other DNA
gtggttaatctggtttattttt

SEQ ID NO: 12349 - DNA, 22 bp, synthetic construct
  misc_feature 1..22: note = Target B2M Sequence complement
  source 1..22: mol_type = other DNA
tggttaatctggtttatttttg

SEQ ID NO: 12350 - DNA, 22 bp, synthetic construct
  misc_feature 1..22: note = Target B2M Sequence complement
  source 1..22: mol_type = other DNA
ggttaatctggtttatttttgt

SEQ ID NO: 12351 - DNA, 22 bp, synthetic construct
  misc_feature 1..22: note = Target B2M Sequence complement
  source 1..22: mol_type = other DNA
taatctggtttatttttgttcc

SEQ ID NO: 12352 - DNA, 22 bp, synthetic construct
  misc_feature 1..22: note = Target B2M Sequence complement
  source 1..22: mol_type = other DNA
aatctggtttatttttgttcca

SEQ ID NO: 12353 - DNA, 22 bp, synthetic construct
  misc_feature 1..22: note = Target B2M Sequence complement
  source 1..22: mol_type = other DNA
atctggtttatttttgttccac

SEQ ID NO: 12354 - DNA, 22 bp, synthetic construct
  misc_feature 1..22: note = Target B2M Sequence complement
  source 1..22: mol_type = other DNA
tctggtttatttttgttccaca

SEQ ID NO: 12355 - DNA, 22 bp, synthetic construct
  misc_feature 1..22: note = Target B2M Sequence complement
  source 1..22: mol_type = other DNA
ctggtttatttttgttccacaa

SEQ ID NO: 12356 - DNA, 22 bp, synthetic construct
  misc_feature 1..22: note = Target B2M Sequence complement
  source 1..22: mol_type = other DNA
tggtttatttttgttccacaag

SEQ ID NO: 12357 - DNA, 22 bp, synthetic construct
  misc_feature 1..22: note = Target B2M Sequence complement
  source 1..22: mol_type = other DNA
ggtttatttttgttccacaagt

SEQ ID NO: 12358 - DNA, 22 bp, synthetic construct
  misc_feature 1..22: note = Target B2M Sequence complement
  source 1..22: mol_type = other DNA
gtttatttttgttccacaagtt

SEQ ID NO: 12359 - DNA, 18 bp, synthetic construct
  misc_feature 1..18: note = Target B2M Sequence complement
  source 1..18: mol_type = other DNA
agctgacagcattcgggc

SEQ ID NO: 12360 - DNA, 18 bp, synthetic construct
  misc_feature 1..18: note = Target B2M Sequence complement
  source 1..18: mol_type = other DNA
gctgacagcattcgggcc

SEQ ID NO: 12361 - DNA, 18 bp, synthetic construct
  misc_feature 1..18: note = Target B2M Sequence complement
  source 1..18: mol_type = other DNA
ctgacagcattcgggccg

SEQ ID NO: 12362 - DNA, 18 bp, synthetic construct
  misc_feature 1..18: note = Target B2M Sequence complement
  source 1..18: mol_type = other DNA
tgacagcattcgggccga

SEQ ID NO: 12363 - DNA, 18 bp, synthetic construct
  misc_feature 1..18: note = Target B2M Sequence complement
  source 1..18: mol_type = other DNA
gacagcattcgggccgag

SEQ ID NO: 12364 - DNA, 18 bp, synthetic construct
  misc_feature 1..18: note = Target B2M Sequence complement
  source 1..18: mol_type = other DNA
acagcattcgggccgaga

SEQ ID NO: 12365 - DNA, 18 bp, synthetic construct
  misc_feature 1..18: note = Target B2M Sequence complement
  source 1..18: mol_type = other DNA
cagcattcgggccgagat

SEQ ID NO: 12366 - DNA, 18 bp, synthetic construct
  misc_feature 1..18: note = Target B2M Sequence complement
  source 1..18: mol_type = other DNA
agcattcgggccgagatg

SEQ ID NO: 12367 - DNA, 18 bp, synthetic construct
  misc_feature 1..18: note = Target B2M Sequence complement
  source 1..18: mol_type = other DNA
gcattcgggccgagatgt

SEQ ID NO: 12368 - DNA, 18 bp, synthetic construct
  misc_feature 1..18: note = Target B2M Sequence complement
  source 1..18: mol_type = other DNA
cattcgggccgagatgtc

SEQ ID NO: 12369 - DNA, 18 bp, synthetic construct
  misc_feature 1..18: note = Target B2M Sequence complement
  source 1..18: mol_type = other DNA
ttcgggccgagatgtctc

SEQ ID NO: 12370 - DNA, 18 bp, synthetic construct
  misc_feature 1..18: note = Target B2M Sequence complement
  source 1..18: mol_type = other DNA
tcgggccgagatgtctcg

SEQ ID NO: 12371 - DNA, 18 bp, synthetic construct
  misc_feature 1..18: note = Target B2M Sequence complement
  source 1..18: mol_type = other DNA
cgggccgagatgtctcgc

SEQ ID NO: 12372 - DNA, 18 bp, synthetic construct
  misc_feature 1..18: note = Target B2M Sequence complement
  source 1..18: mol_type = other DNA
gggccgagatgtctcgct

SEQ ID NO: 12373 - DNA, 18 bp, synthetic construct
  misc_feature 1..18: note = Target B2M Sequence complement
  source 1..18: mol_type = other DNA
ggccgagatgtctcgctc

SEQ ID NO: 12374 - DNA, 18 bp, synthetic construct
  misc_feature 1..18: note = Target B2M Sequence complement
  source 1..18: mol_type = other DNA
gccgagatgtctcgctcc

SEQ ID NO: 12375 - DNA, 18 bp, synthetic construct
  misc_feature 1..18: note = Target B2M Sequence complement
  source 1..18: mol_type = other DNA
ccgagatgtctcgctccg

SEQ ID NO: 12376 - DNA, 18 bp, synthetic construct
  misc_feature 1..18: note = Target B2M Sequence complement
  source 1..18: mol_type = other DNA
cgagatgtctcgctccgt

SEQ ID NO: 12377 - DNA, 18 bp, synthetic construct
  misc_feature 1..18: note = Target B2M Sequence complement
  source 1..18: mol_type = other DNA
gagatgtctcgctccgtg

SEQ ID NO: 12378 - DNA, 18 bp, synthetic construct
  misc_feature 1..18: note = Target B2M Sequence complement
  source 1..18: mol_type = other DNA
agatgtctcgctccgtgg

SEQ ID NO: 12379 - DNA, 18 bp, synthetic construct
  misc_feature 1..18: note = Target B2M Sequence complement
  source 1..18: mol_type = other DNA
gatgtctcgctccgtggc

SEQ ID NO: 12380 - DNA, 18 bp, synthetic construct
  misc_feature 1..18: note = Target B2M Sequence complement
  source 1..18: mol_type = other DNA
atgtctcgctccgtggcc

SEQ ID NO: 12381 - DNA, 18 bp, synthetic construct
  misc_feature 1..18: note = Target B2M Sequence complement
  source 1..18: mol_type = other DNA
tgtctcgctccgtggcct

SEQ ID NO: 12382 - DNA, 18 bp, synthetic construct
  misc_feature 1..18: note = Target B2M Sequence complement
  source 1..18: mol_type = other DNA
gtctcgctccgtggcctt

SEQ ID NO: 12383 - DNA, 18 bp, synthetic construct
  misc_feature 1..18: note = Target B2M Sequence complement
  source 1..18: mol_type = other DNA
tctcgctccgtggcctta

SEQ ID NO: 12384 - DNA, 18 bp, synthetic construct
  misc_feature 1..18: note = Target B2M Sequence complement
  source 1..18: mol_type = other DNA
ctcgctccgtggccttag

SEQ ID NO: 12385 - DNA, 18 bp, synthetic construct
  misc_feature 1..18: note = Target B2M Sequence complement
  source 1..18: mol_type = other DNA
tcgctccgtggccttagc

SEQ ID NO: 12386 - DNA, 18 bp, synthetic construct
  misc_feature 1..18: note = Target B2M Sequence complement
  source 1..18: mol_type = other DNA
cgctccgtggccttagct

SEQ ID NO: 12387 - DNA, 18 bp, synthetic construct
  misc_feature 1..18: note = Target B2M Sequence complement
  source 1..18: mol_type = other DNA
gctccgtggccttagctg

SEQ ID NO: 12388 - DNA, 18 bp, synthetic construct
  misc_feature 1..18: note = Target B2M Sequence complement
  source 1..18: mol_type = other DNA
ctccgtggccttagctgt

SEQ ID NO: 12389 - DNA, 18 bp, synthetic construct
  misc_feature 1..18: note = Target B2M Sequence complement
  source 1..18: mol_type = other DNA
tccgtggccttagctgtg

SEQ ID NO: 12390 - DNA, 18 bp, synthetic construct
  misc_feature 1..18: note = Target B2M Sequence complement
  source 1..18: mol_type = other DNA
ccgtggccttagctgtgc

SEQ ID NO: 12391 - DNA, 18 bp, synthetic construct
  misc_feature 1..18: note = Target B2M Sequence complement
  source 1..18: mol_type = other DNA
cgtggccttagctgtgct

SEQ ID NO: 12392 - DNA, 18 bp, synthetic construct
  misc_feature 1..18: note = Target B2M Sequence complement
  source 1..18: mol_type = other DNA
gtggccttagctgtgctc

SEQ ID NO: 12393 - DNA, 18 bp, synthetic construct
  misc_feature 1..18: note = Target B2M Sequence complement
  source 1..18: mol_type = other DNA
tggccttagctgtgctcg

SEQ ID NO: 12394 - DNA, 18 bp, synthetic construct
  misc_feature 1..18: note = Target B2M Sequence complement
  source 1..18: mol_type = other DNA
ggccttagctgtgctcgc

SEQ ID NO: 12395 - DNA, 18 bp, synthetic construct
  misc_feature 1..18: note = Target B2M Sequence complement
  source 1..18: mol_type = other DNA
gccttagctgtgctcgcg

SEQ ID NO: 12396 - DNA, 18 bp, synthetic construct
  misc_feature 1..18: note = Target B2M Sequence complement
  source 1..18: mol_type = other DNA
ccttagctgtgctcgcgc

SEQ ID NO: 12397 - DNA, 18 bp, synthetic construct
  misc_feature 1..18: note = Target B2M Sequence complement
  source 1..18: mol_type = other DNA
cttagctgtgctcgcgct

SEQ ID NO: 12398 - DNA, 18 bp, synthetic construct
  misc_feature 1..18: note = Target B2M Sequence complement
  source 1..18: mol_type = other DNA
tagctgtgctcgcgctac

SEQ ID NO: 12399 - DNA, 18 bp, synthetic construct
  misc_feature 1..18: note = Target B2M Sequence complement
  source 1..18: mol_type = other DNA
agctgtgctcgcgctact

SEQ ID NO: 12400 - DNA, 18 bp, synthetic construct
  misc_feature 1..18: note = Target B2M Sequence complement
  source 1..18: mol_type = other DNA
gctgtgctcgcgctactc

SEQ ID NO: 12401 - DNA, 18 bp, synthetic construct
  misc_feature 1..18: note = Target B2M Sequence complement
  source 1..18: mol_type = other DNA
ctgtgctcgcgctactct

SEQ ID NO: 12402 - DNA, 18 bp, synthetic construct
  misc_feature 1..18: note = Target B2M Sequence complement
  source 1..18: mol_type = other DNA
tgtgctcgcgctactctc

SEQ ID NO: 12403 - DNA, 18 bp, synthetic construct
  misc_feature 1..18: note = Target B2M Sequence complement
  source 1..18: mol_type = other DNA
gtgctcgcgctactctct

SEQ ID NO: 12404 - DNA, 18 bp, synthetic construct
  misc_feature 1..18: note = Target B2M Sequence complement
  source 1..18: mol_type = other DNA
tgctcgcgctactctctc

SEQ ID NO: 12405 - DNA, 18 bp, synthetic construct
  misc_feature 1..18: note = Target B2M Sequence complement
  source 1..18: mol_type = other DNA
gctcgcgctactctctct

SEQ ID NO: 12406 - DNA, 18 bp, synthetic construct
  misc_feature 1..18: note = Target B2M Sequence complement
  source 1..18: mol_type = other DNA
ctctttctggcctggagg

SEQ ID NO: 12407 - DNA, 18 bp, synthetic construct
  misc_feature 1..18: note = Target B2M Sequence complement
  source 1..18: mol_type = other DNA
tctttctggcctggaggc

SEQ ID NO: 12408 - DNA, 18 bp, synthetic construct
  misc_feature 1..18: note = Target B2M Sequence complement
  source 1..18: mol_type = other DNA
ctttctggcctggaggct

SEQ ID NO: 12409 - DNA, 18 bp, synthetic construct
  misc_feature 1..18: note = Target B2M Sequence complement
  source 1..18: mol_type = other DNA
tctggcctggaggctatc

SEQ ID NO: 12410 - DNA, 18 bp, synthetic construct
  misc_feature 1..18: note = Target B2M Sequence complement
  source 1..18: mol_type = other DNA
ctggcctggaggctatcc

SEQ ID NO: 12411 - DNA, 18 bp, synthetic construct
  misc_feature 1..18: note = Target B2M Sequence complement
  source 1..18: mol_type = other DNA
tggcctggaggctatcca

SEQ ID NO: 12412 - DNA, 18 bp, synthetic construct
  misc_feature 1..18: note = Target B2M Sequence complement
  source 1..18: mol_type = other DNA
ggcctggaggctatccag

SEQ ID NO: 12413 - DNA, 18 bp, synthetic construct
  misc_feature 1..18: note = Target B2M Sequence complement
  source 1..18: mol_type = other DNA
gcctggaggctatccagc

SEQ ID NO: 12414 - DNA, 18 bp, synthetic construct
  misc_feature 1..18: note = Target B2M Sequence complement
  source 1..18: mol_type = other DNA
cctggaggctatccagcg

SEQ ID NO: 12415 - DNA, 18 bp, synthetic construct
  misc_feature 1..18: note = Target B2M Sequence complement
  source 1..18: mol_type = other DNA
ctggaggctatccagcgt

SEQ ID NO: 12416 - DNA, 18 bp, synthetic construct
  misc_feature 1..18: note = Target B2M Sequence complement
  source 1..18: mol_type = other DNA
ggaggctatccagcgtac

SEQ ID NO: 12417 - DNA, 18 bp, synthetic construct
  misc_feature 1..18: note = Target B2M Sequence complement
  source 1..18: mol_type = other DNA
ggctatccagcgtactcc

SEQ ID NO: 12418 - DNA, 18 bp, synthetic construct
  misc_feature 1..18: note = Target B2M Sequence complement
  source 1..18: mol_type = other DNA
gagtatgcctgccgtgtg

SEQ ID NO: 12419 - DNA, 18 bp, synthetic construct
  misc_feature 1..18: note = Target B2M Sequence complement
  source 1..18: mol_type = other DNA
atgcctgccgtgtgaacc

SEQ ID NO: 12420 - DNA, 18 bp, synthetic construct
  misc_feature 1..18: note = Target B2M Sequence complement
  source 1..18: mol_type = other DNA
tgcctgccgtgtgaacca

SEQ ID NO: 12421 - DNA, 18 bp, synthetic construct
  misc_feature 1..18: note = Target B2M Sequence complement
  source 1..18: mol_type = other DNA
gcctgccgtgtgaaccat

SEQ ID NO: 12422 - DNA, 18 bp, synthetic construct
  misc_feature 1..18: note = Target B2M Sequence complement
  source 1..18: mol_type = other DNA
cctgccgtgtgaaccatg

SEQ ID NO: 12423 - DNA, 18 bp, synthetic construct
  misc_feature 1..18: note = Target B2M Sequence complement
  source 1..18: mol_type = other DNA
ttgcttgctttttaatat

SEQ ID NO: 12424 - DNA, 18 bp, synthetic construct
  misc_feature 1..18: note = Target B2M Sequence complement
  source 1..18: mol_type = other DNA
tgcttgctttttaatatt

SEQ ID NO: 12425 - DNA, 18 bp, synthetic construct
  misc_feature 1..18: note = Target B2M Sequence complement
  source 1..18: mol_type = other DNA
cttgctttttaatattga

SEQ ID NO: 12426 - DNA, 18 bp, synthetic construct
  misc_feature 1..18: note = Target B2M Sequence complement
  source 1..18: mol_type = other DNA
ttgctttttaatattgat

SEQ ID NO: 12427 - DNA, 18 bp, synthetic construct
  misc_feature 1..18: note = Target B2M Sequence complement
  source 1..18: mol_type = other DNA
tgctttttaatattgata

SEQ ID NO: 12428 - DNA, 18 bp, synthetic construct
  misc_feature 1..18: note = Target B2M Sequence complement
  source 1..18: mol_type = other DNA
gctttttaatattgatat

SEQ ID NO: 12429 - DNA, 18 bp, synthetic construct
  misc_feature 1..18: note = Target B2M Sequence complement
  source 1..18: mol_type = other DNA
ctttttaatattgatatg

SEQ ID NO: 12430 - DNA, 18 bp, synthetic construct
  misc_feature 1..18: note = Target B2M Sequence complement
  source 1..18: mol_type = other DNA
tttttaatattgatatgc

SEQ ID NO: 12431 - DNA, 18 bp, synthetic construct
  misc_feature 1..18: note = Target B2M Sequence complement
  source 1..18: mol_type = other DNA
ttttaatattgatatgct

SEQ ID NO: 12432 - DNA, 18 bp, synthetic construct
  misc_feature 1..18: note = Target B2M Sequence complement
  source 1..18: mol_type = other DNA
tttaatattgatatgctt

SEQ ID NO: 12433 - DNA, 18 bp, synthetic construct
  misc_feature 1..18: note = Target B2M Sequence complement
  source 1..18: mol_type = other DNA
ttaatattgatatgctta

SEQ ID NO: 12434 - DNA, 18 bp, synthetic construct
  misc_feature 1..18: note = Target B2M Sequence complement
  source 1..18: mol_type = other DNA
taatattgatatgcttat

SEQ ID NO: 12435 - DNA, 18 bp, synthetic construct
  misc_feature 1..18: note = Target B2M Sequence complement
  source 1..18: mol_type = other DNA
aatattgatatgcttata

SEQ ID NO: 12436 - DNA, 18 bp, synthetic construct
  misc_feature 1..18: note = Target B2M Sequence complement
  source 1..18: mol_type = other DNA
atattgatatgcttatac

SEQ ID NO: 12437 - DNA, 18 bp, synthetic construct
  misc_feature 1..18: note = Target B2M Sequence complement
  source 1..18: mol_type = other DNA
tattgatatgcttataca

SEQ ID NO: 12438 - DNA, 18 bp, synthetic construct
  misc_feature 1..18: note = Target B2M Sequence complement
  source 1..18: mol_type = other DNA
ttatacacttacacttta

SEQ ID NO: 12439 - DNA, 18 bp, synthetic construct
  misc_feature 1..18: note = Target B2M Sequence complement
  source 1..18: mol_type = other DNA
tatacacttacactttat

SEQ ID NO: 12440 - DNA, 18 bp, synthetic construct
  misc_feature 1..18: note = Target B2M Sequence complement
  source 1..18: mol_type = other DNA
aaaatgtagggttataat

SEQ ID NO: 12441 - DNA, 18 bp, synthetic construct
  misc_feature 1..18: note = Target B2M Sequence complement
  source 1..18: mol_type = other DNA
aaatgtagggttataata

SEQ ID NO: 12442 - DNA, 18 bp, synthetic construct
  misc_feature 1..18: note = Target B2M Sequence complement
  source 1..18: mol_type = other DNA
aatgtagggttataataa

SEQ ID NO: 12443 - DNA, 18 bp, synthetic construct
  misc_feature 1..18: note = Target B2M Sequence complement
  source 1..18: mol_type = other DNA
atgtagggttataataat

SEQ ID NO: 12444 - DNA, 18 bp, synthetic construct
  misc_feature 1..18: note = Target B2M Sequence complement
  source 1..18: mol_type = other DNA
tagggttataataatgtt

SEQ ID NO: 12445 - DNA, 18 bp, synthetic construct
  misc_feature 1..18: note = Target B2M Sequence complement
  source 1..18: mol_type = other DNA
agggttataataatgtta

SEQ ID NO: 12446 - DNA, 18 bp, synthetic construct
  misc_feature 1..18: note = Target B2M Sequence complement
  source 1..18: mol_type = other DNA
gggttataataatgttaa

SEQ ID NO: 12447 - DNA, 18 bp, synthetic construct
  misc_feature 1..18: note = Target B2M Sequence complement
  source 1..18: mol_type = other DNA
ggttataataatgttaac

SEQ ID NO: 12448 - DNA, 18 bp, synthetic construct
  misc_feature 1..18: note = Target B2M Sequence complement
  source 1..18: mol_type = other DNA
gttataataatgttaaca

SEQ ID NO: 12449 - DNA, 18 bp, synthetic construct
  misc_feature 1..18: note = Target B2M Sequence complement
  source 1..18: mol_type = other DNA
ttataataatgttaacat

SEQ ID NO: 12450 - DNA, 18 bp, synthetic construct
  misc_feature 1..18: note = Target B2M Sequence complement
  source 1..18: mol_type = other DNA
tataataatgttaacatg

SEQ ID NO: 12451 - DNA, 18 bp, synthetic construct
  misc_feature 1..18: note = Target B2M Sequence complement
  source 1..18: mol_type = other DNA
ataataatgttaacatgg

SEQ ID NO: 12452 - DNA, 18 bp, synthetic construct
  misc_feature 1..18: note = Target B2M Sequence complement
  source 1..18: mol_type = other DNA
taataatgttaacatgga

SEQ ID NO: 12453 - DNA, 18 bp, synthetic construct
  misc_feature 1..18: note = Target B2M Sequence complement
  source 1..18: mol_type = other DNA
acatgatcttctttataa

SEQ ID NO: 12454 - DNA, 18 bp, synthetic construct
  misc_feature 1..18: note = Target B2M Sequence complement
  source 1..18: mol_type = other DNA
catgatcttctttataat

SEQ ID NO: 12455 - DNA, 18 bp, synthetic construct
  misc_feature 1..18: note = Target B2M Sequence complement
  source 1..18: mol_type = other DNA
atgatcttctttataatt

SEQ ID NO: 12456 - DNA, 18 bp, synthetic construct
  misc_feature 1..18: note = Target B2M Sequence complement
  source 1..18: mol_type = other DNA
tgatcttctttataattc

SEQ ID NO: 12457 - DNA, 18 bp, synthetic construct
  misc_feature 1..18: note = Target B2M Sequence complement
  source 1..18: mol_type = other DNA
gatcttctttataattct

SEQ ID NO: 12458 - DNA, 18 bp, synthetic construct
  misc_feature 1..18: note = Target B2M Sequence complement
  source 1..18: mol_type = other DNA
atcttctttataattcta

SEQ ID NO: 12459 - DNA, 18 bp, synthetic construct
  misc_feature 1..18: note = Target B2M Sequence complement
  source 1..18: mol_type = other DNA
tcttctttataattctac

SEQ ID NO: 12460 - DNA, 18 bp, synthetic construct
  misc_feature 1..18: note = Target B2M Sequence complement
  source 1..18: mol_type = other DNA
cttctttataattctact

SEQ ID NO: 12461 - DNA, 18 bp, synthetic construct
  misc_feature 1..18: note = Target B2M Sequence complement
  source 1..18: mol_type = other DNA
ttctttataattctactt

SEQ ID NO: 12462 - DNA, 18 bp, synthetic construct
  misc_feature 1..18: note = Target B2M Sequence complement
  source 1..18: mol_type = other DNA
tctttataattctacttt

SEQ ID NO: 12463 - DNA, 18 bp, synthetic construct
  misc_feature 1..18: note = Target B2M Sequence complement
  source 1..18: mol_type = other DNA
ctttataattctactttg

SEQ ID NO: 12464 - DNA, 18 bp, synthetic construct
  misc_feature 1..18: note = Target B2M Sequence complement
  source 1..18: mol_type = other DNA
tttataattctactttga

SEQ ID NO: 12465 - DNA, 18 bp, synthetic construct
  misc_feature 1..18: note = Target B2M Sequence complement
  source 1..18: mol_type = other DNA
ttataattctactttgag

SEQ ID NO: 12466 - DNA, 18 bp, synthetic construct
  misc_feature 1..18: note = Target B2M Sequence complement
  source 1..18: mol_type = other DNA
tataattctactttgagt

SEQ ID NO: 12467 - DNA, 18 bp, synthetic construct
  misc_feature 1..18: note = Target B2M Sequence complement
  source 1..18: mol_type = other DNA
ctgagcaggttgctccac

SEQ ID NO: 12468 - DNA, 18 bp, synthetic construct
  misc_feature 1..18: note = Target B2M Sequence complement
  source 1..18: mol_type = other DNA
gagcaggttgctccacag

SEQ ID NO: 12469 - DNA, 18 bp, synthetic construct
  misc_feature 1..18: note = Target B2M Sequence complement
  source 1..18: mol_type = other DNA
agcaggttgctccacagg

SEQ ID NO: 12470 - DNA, 18 bp, synthetic construct
  misc_feature 1..18: note = Target B2M Sequence complement
  source 1..18: mol_type = other DNA
gcaggttgctccacaggt

SEQ ID NO: 12471 - DNA, 18 bp, synthetic construct
  misc_feature 1..18: note = Target B2M Sequence complement
  source 1..18: mol_type = other DNA
ggttgctccacaggtagc

SEQ ID NO: 12472 - DNA, 18 bp, synthetic construct
  misc_feature 1..18: note = Target B2M Sequence complement
  source 1..18: mol_type = other DNA
caggtagctctaggaggg

SEQ ID NO: 12473 - DNA, 18 bp, synthetic construct
  misc_feature 1..18: note = Target B2M Sequence complement
  source 1..18: mol_type = other DNA
aggtagctctaggagggc

SEQ ID NO: 12474 - DNA, 18 bp, synthetic construct
  misc_feature 1..18: note = Target B2M Sequence complement
  source 1..18: mol_type = other DNA
ggtagctctaggagggct

SEQ ID NO: 12475 - DNA, 18 bp, synthetic construct
  misc_feature 1..18: note = Target B2M Sequence complement
  source 1..18: mol_type = other DNA
gtagctctaggagggctg

SEQ ID NO: 12476 - DNA, 18 bp, synthetic construct
  misc_feature 1..18: note = Target B2M Sequence complement
  source 1..18: mol_type = other DNA
tagctctaggagggctgg

SEQ ID NO: 12477 - DNA, 18 bp, synthetic construct
  misc_feature 1..18: note = Target B2M Sequence complement
  source 1..18: mol_type = other DNA
agctctaggagggctggc

SEQ ID NO: 12478 - DNA, 18 bp, synthetic construct
  misc_feature 1..18: note = Target B2M Sequence complement
  source 1..18: mol_type = other DNA
gctctaggagggctggca

SEQ ID NO: 12479 - DNA, 18 bp, synthetic construct
  misc_feature 1..18: note = Target B2M Sequence complement
  source 1..18: mol_type = other DNA
ctctaggagggctggcaa

SEQ ID NO: 12480 - DNA, 18 bp, synthetic construct
  misc_feature 1..18: note = Target B2M Sequence complement
  source 1..18: mol_type = other DNA
tctaggagggctggcaac

SEQ ID NO: 12481 - DNA, 18 bp, synthetic construct
  misc_feature 1..18: note = Target B2M Sequence complement
  source 1..18: mol_type = other DNA
ctaggagggctggcaact

SEQ ID NO: 12482 - DNA, 18 bp, synthetic construct
  misc_feature 1..18: note = Target B2M Sequence complement
  source 1..18: mol_type = other DNA
ggagggctggcaacttag

SEQ ID NO: 12483 - DNA, 18 bp, synthetic construct
  misc_feature 1..18: note = Target B2M Sequence complement
  source 1..18: mol_type = other DNA
gggctggcaacttagagg

SEQ ID NO: 12484 - DNA, 18 bp, synthetic construct
  misc_feature 1..18: note = Target B2M Sequence complement
  source 1..18: mol_type = other DNA
ggcaacttagaggtgggg

SEQ ID NO: 12485 - DNA, 18 bp, synthetic construct
  misc_feature 1..18: note = Target B2M Sequence complement
  source 1..18: mol_type = other DNA
cttagaggtggggagcag

SEQ ID NO: 12486 - DNA, 18 bp, synthetic construct
  misc_feature 1..18: note = Target B2M Sequence complement
  source 1..18: mol_type = other DNA
tagaggtggggagcagag

SEQ ID NO: 12487 - DNA, 18 bp, synthetic construct
  misc_feature 1..18: note = Target B2M Sequence complement
  source 1..18: mol_type = other DNA
agaggtggggagcagaga

SEQ ID NO: 12488 - DNA, 18 bp, synthetic construct
  misc_feature 1..18: note = Target B2M Sequence complement
  source 1..18: mol_type = other DNA
gaggtggggagcagagaa

SEQ ID NO: 12489 - DNA, 18 bp, synthetic construct
  misc_feature 1..18: note = Target B2M Sequence complement
  source 1..18: mol_type = other DNA
ataagttaacttccaatt

SEQ ID NO: 12490 - DNA, 18 bp, synthetic construct
  misc_feature 1..18: note = Target B2M Sequence complement
  source 1..18: mol_type = other DNA
taagttaacttccaattt

SEQ ID NO: 12491 - DNA, 18 bp, synthetic construct
  misc_feature 1..18: note = Target B2M Sequence complement
  source 1..18: mol_type = other DNA
aagttaacttccaattta

SEQ ID NO: 12492 - DNA, 18 bp, synthetic construct
  misc_feature 1..18: note = Target B2M Sequence complement
  source 1..18: mol_type = other DNA
ttaacttccaatttacat

SEQ ID NO: 12493 - DNA, 18 bp, synthetic construct
  misc_feature 1..18: note = Target B2M Sequence complement
  source 1..18: mol_type = other DNA
taacttccaatttacata

SEQ ID NO: 12494 - DNA, 18 bp, synthetic construct
  misc_feature 1..18: note = Target B2M Sequence complement
  source 1..18: mol_type = other DNA
gggaaaatttagaaatat

SEQ ID NO: 12495 - DNA, 18 bp, synthetic construct
  misc_feature 1..18: note = Target B2M Sequence complement
  source 1..18: mol_type = other DNA
ggaaaatttagaaatata

SEQ ID NO: 12496 - DNA, 18 bp, synthetic construct
  misc_feature 1..18: note = Target B2M Sequence complement
  source 1..18: mol_type = other DNA
gaaaatttagaaatataa

SEQ ID NO: 12497 - DNA, 18 bp, synthetic construct
  misc_feature 1..18: note = Target B2M Sequence complement
  source 1..18: mol_type = other DNA
aaaatttagaaatataat

SEQ ID NO: 12498 - DNA, 18 bp, synthetic construct
  misc_feature 1..18: note = Target B2M Sequence complement
  source 1..18: mol_type = other DNA
aaatttagaaatataatt

SEQ ID NO: 12499 - DNA, 18 bp, synthetic construct
  misc_feature 1..18: note = Target B2M Sequence complement
  source 1..18: mol_type = other DNA
aatttagaaatataattg

SEQ ID NO: 12500 - DNA, 18 bp, synthetic construct
  misc_feature 1..18: note = Target B2M Sequence complement
  source 1..18: mol_type = other DNA
atttagaaatataattga

SEQ ID NO: 12501 - DNA, 18 bp, synthetic construct
  misc_feature 1..18: note = Target B2M Sequence complement
  source 1..18: mol_type = other DNA
tttagaaatataattgac

SEQ ID NO: 12502 - DNA, 18 bp, synthetic construct
  misc_feature 1..18: note = Target B2M Sequence complement
  source 1..18: mol_type = other DNA
ttagaaatataattgaca

SEQ ID NO: 12503 - DNA, 18 bp, synthetic construct
  misc_feature 1..18: note = Target B2M Sequence complement
  source 1..18: mol_type = other DNA
tagaaatataattgacag

SEQ ID NO: 12504 - DNA, 18 bp, synthetic construct
  misc_feature 1..18: note = Target B2M Sequence complement
  source 1..18: mol_type = other DNA
aaatataattgacaggat

SEQ ID NO: 12505 - DNA, 18 bp, synthetic construct
  misc_feature 1..18: note = Target B2M Sequence complement
  source 1..18: mol_type = other DNA
aatataattgacaggatt

SEQ ID NO: 12506 - DNA, 18 bp, synthetic construct
  misc_feature 1..18: note = Target B2M Sequence complement
  source 1..18: mol_type = other DNA
atataattgacaggatta

SEQ ID NO: 12507 - DNA, 18 bp, synthetic construct
  misc_feature 1..18: note = Target B2M Sequence complement
  source 1..18: mol_type = other DNA
tataattgacaggattat

SEQ ID NO: 12508 - DNA, 18 bp, synthetic construct
  misc_feature 1..18: note = Target B2M Sequence complement
  source 1..18: mol_type = other DNA
ataattgacaggattatt

SEQ ID NO: 12509 - DNA, 18 bp, synthetic construct
  misc_feature 1..18: note = Target B2M Sequence complement
  source 1..18: mol_type = other DNA
gattattggaaatttgtt

SEQ ID NO: 12510 - DNA, 18 bp, synthetic construct
  misc_feature 1..18: note = Target B2M Sequence complement
  source 1..18: mol_type = other DNA
attattggaaatttgtta

SEQ ID NO: 12511 - DNA, 18 bp, synthetic construct
  misc_feature 1..18: note = Target B2M Sequence complement
  source 1..18: mol_type = other DNA
ttattggaaatttgttat

SEQ ID NO: 12512 - DNA, 18 bp, synthetic construct
  misc_feature 1..18: note = Target B2M Sequence complement
  source 1..18: mol_type = other DNA
tattggaaatttgttata

SEQ ID NO: 12513 - DNA, 18 bp, synthetic construct
  misc_feature 1..18: note = Target B2M Sequence complement
  source 1..18: mol_type = other DNA
attggaaatttgttataa

SEQ ID NO: 12514 - DNA, 18 bp, synthetic construct
  misc_feature 1..18: note = Target B2M Sequence complement
  source 1..18: mol_type = other DNA
ttggaaatttgttataat

SEQ ID NO: 12515 - DNA, 18 bp, synthetic construct
  misc_feature 1..18: note = Target B2M Sequence complement
  source 1..18: mol_type = other DNA
tggaaatttgttataatg

SEQ ID NO: 12516 - DNA, 18 bp, synthetic construct
  misc_feature 1..18: note = Target B2M Sequence complement
  source 1..18: mol_type = other DNA
ggaaatttgttataatga

SEQ ID NO: 12517 - DNA, 18 bp, synthetic construct
  misc_feature 1..18: note = Target B2M Sequence complement
  source 1..18: mol_type = other DNA
gaaatttgttataatgaa

SEQ ID NO: 12518 - DNA, 18 bp, synthetic construct
  misc_feature 1..18: note = Target B2M Sequence complement
  source 1..18: mol_type = other DNA
aaatttgttataatgaat

SEQ ID NO: 12519 - DNA, 18 bp, synthetic construct
  misc_feature 1..18: note = Target B2M Sequence complement
  source 1..18: mol_type = other DNA
aatttgttataatgaatg

SEQ ID NO: 12520 - DNA, 18 bp, synthetic construct
  misc_feature 1..18: note = Target B2M Sequence complement
  source 1..18: mol_type = other DNA
atttgttataatgaatga

SEQ ID NO: 12521 - DNA, 18 bp, synthetic construct
  misc_feature 1..18: note = Target B2M Sequence complement
  source 1..18: mol_type = other DNA
tttgttataatgaatgaa

SEQ ID NO: 12522 - DNA, 18 bp, synthetic construct
  misc_feature 1..18: note = Target B2M Sequence complement
  source 1..18: mol_type = other DNA
ttgttataatgaatgaaa

SEQ ID NO: 12523 - DNA, 18 bp, synthetic construct
  misc_feature 1..18: note = Target B2M Sequence complement
  source 1..18: mol_type = other DNA
tgttataatgaatgaaac

SEQ ID NO: 12524 - DNA, 18 bp, synthetic construct
  misc_feature 1..18: note = Target B2M Sequence complement
  source 1..18: mol_type = other DNA
gttataatgaatgaaaca

SEQ ID NO: 12525 - DNA, 18 bp, synthetic construct
  misc_feature 1..18: note = Target B2M Sequence complement
  source 1..18: mol_type = other DNA
ttataatgaatgaaacat

SEQ ID NO: 12526 - DNA, 18 bp, synthetic construct
  misc_feature 1..18: note = Target B2M Sequence complement
  source 1..18: mol_type = other DNA
tataatgaatgaaacatt

SEQ ID NO: 12527 - DNA, 18 bp, synthetic construct
  misc_feature 1..18: note = Target B2M Sequence complement
  source 1..18: mol_type = other DNA
ataatgaatgaaacattt

SEQ ID NO: 12528 - DNA, 18 bp, synthetic construct
  misc_feature 1..18: note = Target B2M Sequence complement
  source 1..18: mol_type = other DNA
taatgaatgaaacatttt

SEQ ID NO: 12529 - DNA, 18 bp, synthetic construct
  misc_feature 1..18: note = Target B2M Sequence complement
  source 1..18: mol_type = other DNA
aatgaatgaaacattttg

SEQ ID NO: 12530 - DNA, 18 bp, synthetic construct
  misc_feature 1..18: note = Target B2M Sequence complement
  source 1..18: mol_type = other DNA
atgaatgaaacattttgt

SEQ ID NO: 12531 - DNA, 18 bp, synthetic construct
  misc_feature 1..18: note = Target B2M Sequence complement
  source 1..18: mol_type = other DNA
aatgaaacattttgtcat

SEQ ID NO: 12532 - DNA, 18 bp, synthetic construct
  misc_feature 1..18: note = Target B2M Sequence complement
  source 1..18: mol_type = other DNA
atgaaacattttgtcata

SEQ ID NO: 12533 - DNA, 18 bp, synthetic construct
  misc_feature 1..18: note = Target B2M Sequence complement
  source 1..18: mol_type = other DNA
tgaaacattttgtcatat

SEQ ID NO: 12534 - DNA, 18 bp, synthetic construct
  misc_feature 1..18: note = Target B2M Sequence complement
  source 1..18: mol_type = other DNA
gaaacattttgtcatata

SEQ ID NO: 12535 - DNA, 18 bp, synthetic construct
  misc_feature 1..18: note = Target B2M Sequence complement
  source 1..18: mol_type = other DNA
aaacattttgtcatataa

SEQ ID NO: 12536 - DNA, 18 bp, synthetic construct
  misc_feature 1..18: note = Target B2M Sequence complement
  source 1..18: mol_type = other DNA
aacattttgtcatataag

SEQ ID NO: 12537 - DNA, 18 bp, synthetic construct
  misc_feature 1..18: note = Target B2M Sequence complement
  source 1..18: mol_type = other DNA
acattttgtcatataaga

SEQ ID NO: 12538 - DNA, 18 bp, synthetic construct
  misc_feature 1..18: note = Target B2M Sequence complement
  source 1..18: mol_type = other DNA
cattttgtcatataagat

SEQ ID NO: 12539 - DNA, 18 bp, synthetic construct
  misc_feature 1..18: note = Target B2M Sequence complement
  source 1..18: mol_type = other DNA
attttgtcatataagatt

SEQ ID NO: 12540 - DNA, 18 bp, synthetic construct
  misc_feature 1..18: note = Target B2M Sequence complement
  source 1..18: mol_type = other DNA
ttttgtcatataagattc

SEQ ID NO: 12541 - DNA, 18 bp, synthetic construct
  misc_feature 1..18: note = Target B2M Sequence complement
  source 1..18: mol_type = other DNA
tttgtcatataagattca

SEQ ID NO: 12542 - DNA, 18 bp, synthetic construct
  misc_feature 1..18: note = Target B2M Sequence complement
  source 1..18: mol_type = other DNA
ttgtcatataagattcat

SEQ ID NO: 12543 - DNA, 18 bp, synthetic construct
  misc_feature 1..18: note = Target B2M Sequence complement
  source 1..18: mol_type = other DNA
tgtcatataagattcata

SEQ ID NO: 12544 - DNA, 18 bp, synthetic construct
  misc_feature 1..18: note = Target B2M Sequence complement
  source 1..18: mol_type = other DNA
gtcatataagattcatat

SEQ ID NO: 12545 - DNA, 18 bp, synthetic construct
  misc_feature 1..18: note = Target B2M Sequence complement
  source 1..18: mol_type = other DNA
tcatataagattcatatt

SEQ ID NO: 12546 - DNA, 18 bp, synthetic construct
  misc_feature 1..18: note = Target B2M Sequence complement
  source 1..18: mol_type = other DNA
catataagattcatattt

SEQ ID NO: 12547 - DNA, 18 bp, synthetic construct
  misc_feature 1..18: note = Target B2M Sequence complement
  source 1..18: mol_type = other DNA
atataagattcatattta

SEQ ID NO: 12548 - DNA, 18 bp, synthetic construct
  misc_feature 1..18: note = Target B2M Sequence complement
  source 1..18: mol_type = other DNA
tataagattcatatttac

SEQ ID NO: 12549 - DNA, 18 bp, synthetic construct
  misc_feature 1..18: note = Target B2M Sequence complement
  source 1..18: mol_type = other DNA
ataagattcatatttact

SEQ ID NO: 12550 - DNA, 18 bp, synthetic construct
  misc_feature 1..18: note = Target B2M Sequence complement
  source 1..18: mol_type = other DNA
taagattcatatttactt

SEQ ID NO: 12551 - DNA, 18 bp, synthetic construct
  misc_feature 1..18: note = Target B2M Sequence complement
  source 1..18: mol_type = other DNA
aagattcatatttacttc

SEQ ID NO: 12552 - DNA, 18 bp, synthetic construct
  misc_feature 1..18: note = Target B2M Sequence complement
  source 1..18: mol_type = other DNA
agattcatatttacttct

SEQ ID NO: 12553 - DNA, 18 bp, synthetic construct
  misc_feature 1..18: note = Target B2M Sequence complement
  source 1..18: mol_type = other DNA
gattcatatttacttctt

SEQ ID NO: 12554 - DNA, 18 bp, synthetic construct
  misc_feature 1..18: note = Target B2M Sequence complement
  source 1..18: mol_type = other DNA
attcatatttacttctta

SEQ ID NO: 12555 - DNA, 18 bp, synthetic construct
  misc_feature 1..18: note = Target B2M Sequence complement
  source 1..18: mol_type = other DNA
ttcatatttacttcttat

SEQ ID NO: 12556 - DNA, 18 bp, synthetic construct
  misc_feature 1..18: note = Target B2M Sequence complement
  source 1..18: mol_type = other DNA
tcatatttacttcttata

SEQ ID NO: 12557 - DNA, 18 bp, synthetic construct
  misc_feature 1..18: note = Target B2M Sequence complement
  source 1..18: mol_type = other DNA
catatttacttcttatac

SEQ ID NO: 12558 - DNA, 18 bp, synthetic construct
  misc_feature 1..18: note = Target B2M Sequence complement
  source 1..18: mol_type = other DNA
atatttacttcttataca

SEQ ID NO: 12559 - DNA, 18 bp, synthetic construct
  misc_feature 1..18: note = Target B2M Sequence complement
  source 1..18: mol_type = other DNA
tatttacttcttatacat

SEQ ID NO: 12560 - DNA, 18 bp, synthetic construct
  misc_feature 1..18: note = Target B2M Sequence complement
  source 1..18: mol_type = other DNA
atttacttcttatacatt

SEQ ID NO: 12561 - DNA, 18 bp, synthetic construct
  misc_feature 1..18: note = Target B2M Sequence complement
  source 1..18: mol_type = other DNA
tttacttcttatacattt

SEQ ID NO: 12562 - DNA, 18 bp, synthetic construct
  misc_feature 1..18: note = Target B2M Sequence complement
  source 1..18: mol_type = other DNA
ttacttcttatacatttg

SEQ ID NO: 12563 - DNA, 18 bp, synthetic construct
  misc_feature 1..18: note = Target B2M Sequence complement
  source 1..18: mol_type = other DNA
tacttcttatacatttga

SEQ ID NO: 12564 - DNA, 18 bp, synthetic construct
  misc_feature 1..18: note = Target B2M Sequence complement
  source 1..18: mol_type = other DNA
acttcttatacatttgat

SEQ ID NO: 12565 - DNA, 18 bp, synthetic construct
  misc_feature 1..18: note = Target B2M Sequence complement
  source 1..18: mol_type = other DNA
cttcttatacatttgata

SEQ ID NO: 12566 - DNA, 18 bp, synthetic construct
  misc_feature 1..18: note = Target B2M Sequence complement
  source 1..18: mol_type = other DNA
ttcttatacatttgataa

SEQ ID NO: 12567 - DNA, 18 bp, synthetic construct
  misc_feature 1..18: note = Target B2M Sequence complement
  source 1..18: mol_type = other DNA
tcttatacatttgataaa

SEQ ID NO: 12568 - DNA, 18 bp, synthetic construct
  misc_feature 1..18: note = Target B2M Sequence complement
  source 1..18: mol_type = other DNA
cttatacatttgataaag

SEQ ID NO: 12569 - DNA, 18 bp, synthetic construct
  misc_feature 1..18: note = Target B2M Sequence complement
  source 1..18: mol_type = other DNA
ttatacatttgataaagt

SEQ ID NO: 12570 - DNA, 18 bp, synthetic construct
  misc_feature 1..18: note = Target B2M Sequence complement
  source 1..18: mol_type = other DNA
tatacatttgataaagta

SEQ ID NO: 12571 - DNA, 18 bp, synthetic construct
  misc_feature 1..18: note = Target B2M Sequence complement
  source 1..18: mol_type = other DNA
atacatttgataaagtaa

SEQ ID NO: 12572 - DNA, 18 bp, synthetic construct
  misc_feature 1..18: note = Target B2M Sequence complement
  source 1..18: mol_type = other DNA
tacatttgataaagtaag

SEQ ID NO: 12573 - DNA, 18 bp, synthetic construct
  misc_feature 1..18: note = Target B2M Sequence complement
  source 1..18: mol_type = other DNA
gttaatctggtttatttt

SEQ ID NO: 12574 - DNA, 18 bp, synthetic construct
  misc_feature 1..18: note = Target B2M Sequence complement
  source 1..18: mol_type = other DNA
ttaatctggtttattttt

SEQ ID NO: 12575 - DNA, 18 bp, synthetic construct
  misc_feature 1..18: note = Target B2M Sequence complement
  source 1..18: mol_type = other DNA
taatctggtttatttttg

SEQ ID NO: 12576 - DNA, 18 bp, synthetic construct
  misc_feature 1..18: note = Target B2M Sequence complement
  source 1..18: mol_type = other DNA
aatctggtttatttttgt

SEQ ID NO: 12577 - DNA, 18 bp, synthetic construct
  misc_feature 1..18: note = Target B2M Sequence complement
  source 1..18: mol_type = other DNA
atctggtttatttttgtt

SEQ ID NO: 12578 - DNA, 18 bp, synthetic construct
  misc_feature 1..18: note = Target B2M Sequence complement
  source 1..18: mol_type = other DNA
tttatttttgttccacaa

SEQ ID NO: 12579 - DNA, 18 bp, synthetic construct
  misc_feature 1..18: note = Target B2M Sequence complement
  source 1..18: mol_type = other DNA
ttccacaagttaaataaa

SEQ ID NO: 12580 - DNA, 18 bp, synthetic construct
  misc_feature 1..18: note = Target B2M Sequence complement
  source 1..18: mol_type = other DNA
tccacaagttaaataaat

SEQ ID NO: 12581 - DNA, 18 bp, synthetic construct
  misc_feature 1..18: note = Target B2M Sequence complement
  source 1..18: mol_type = other DNA
cacaagttaaataaatca

SEQ ID NO: 12582 - DNA, 18 bp, synthetic construct
  misc_feature 1..18: note = Target B2M Sequence complement
  source 1..18: mol_type = other DNA
acaagttaaataaatcat

SEQ ID NO: 12583 - DNA, 18 bp, synthetic construct
  misc_feature 1..18: note = Target B2M Sequence complement
  source 1..18: mol_type = other DNA
caagttaaataaatcata

SEQ ID NO: 12584 - DNA, 18 bp, synthetic construct
  misc_feature 1..18: note = Target B2M Sequence complement
  source 1..18: mol_type = other DNA
aagttaaataaatcataa

SEQ ID NO: 12585 - DNA, 18 bp, synthetic construct
  misc_feature 1..18: note = Target B2M Sequence complement
  source 1..18: mol_type = other DNA
agttaaataaatcataaa

SEQ ID NO: 12586 - DNA, 18 bp, synthetic construct
  misc_feature 1..18: note = Target B2M Sequence complement
  source 1..18: mol_type = other DNA
gttaaataaatcataaaa

SEQ ID NO: 12587 - DNA, 18 bp, synthetic construct
  misc_feature 1..18: note = Target B2M Sequence complement
  source 1..18: mol_type = other DNA
ttaaataaatcataaaac

SEQ ID NO: 12588 - DNA, 18 bp, synthetic construct
  misc_feature 1..18: note = Target B2M Sequence complement
  source 1..18: mol_type = other DNA
taaataaatcataaaact

SEQ ID NO: 12589 - DNA, 18 bp, synthetic construct
  misc_feature 1..18: note = Target B2M Sequence complement
  source 1..18: mol_type = other DNA
aaataaatcataaaactt

SEQ ID NO: 12590 - DNA, 18 bp, synthetic construct
  misc_feature 1..18: note = Target B2M Sequence complement
  source 1..18: mol_type = other DNA
aataaatcataaaacttg

SEQ ID NO: 12591 - DNA, 18 bp, synthetic construct
  misc_feature 1..18: note = Target B2M Sequence complement
  source 1..18: mol_type = other DNA
ataaatcataaaacttga

SEQ ID NO: 12592 - DNA, 19 bp, synthetic construct
  misc_feature 1..19: note = Target B2M Sequence complement
  source 1..19: mol_type = other DNA
agctgacagcattcgggcc

SEQ ID NO: 12593 - DNA, 19 bp, synthetic construct
  misc_feature 1..19: note = Target B2M Sequence complement
  source 1..19: mol_type = other DNA
gctgacagcattcgggccg

SEQ ID NO: 12594 - DNA, 19 bp, synthetic construct
  misc_feature 1..19: note = Target B2M Sequence complement
  source 1..19: mol_type = other DNA
ctgacagcattcgggccga

SEQ ID NO: 12595 - DNA, 19 bp, synthetic construct
  misc_feature 1..19: note = Target B2M Sequence complement
  source 1..19: mol_type = other DNA
tgacagcattcgggccgag

SEQ ID NO: 12596 - DNA, 19 bp, synthetic construct
  misc_feature 1..19: note = Target B2M Sequence complement
  source 1..19: mol_type = other DNA
gacagcattcgggccgaga

SEQ ID NO: 12597 - DNA, 19 bp, synthetic construct
  misc_feature 1..19: note = Target B2M Sequence complement
  source 1..19: mol_type = other DNA
cagcattcgggccgagatg

SEQ ID NO: 12598 - DNA, 19 bp, synthetic construct
  misc_feature 1..19: note = Target B2M Sequence complement
  source 1..19: mol_type = other DNA
gcattcgggccgagatgtc

SEQ ID NO: 12599 - DNA, 19 bp, synthetic construct
  misc_feature 1..19: note = Target B2M Sequence complement
  source 1..19: mol_type = other DNA
ttcgggccgagatgtctcg

SEQ ID NO: 12600 - DNA, 19 bp, synthetic construct
  misc_feature 1..19: note = Target B2M Sequence complement
  source 1..19: mol_type = other DNA
tcgggccgagatgtctcgc

SEQ ID NO: 12601 - DNA, 19 bp, synthetic construct
  misc_feature 1..19: note = Target B2M Sequence complement
  source 1..19: mol_type = other DNA
cgggccgagatgtctcgct

SEQ ID NO: 12602 - DNA, 19 bp, synthetic construct
  misc_feature 1..19: note = Target B2M Sequence complement
  source 1..19: mol_type = other DNA
gggccgagatgtctcgctc

SEQ ID NO: 12603 - DNA, 19 bp, synthetic construct
  misc_feature 1..19: note = Target B2M Sequence complement
  source 1..19: mol_type = other DNA
ggccgagatgtctcgctcc

SEQ ID NO: 12604 - DNA, 19 bp, synthetic construct
  misc_feature 1..19: note = Target B2M Sequence complement
  source 1..19: mol_type = other DNA
gccgagatgtctcgctccg

SEQ ID NO: 12605 - DNA, 19 bp, synthetic construct
  misc_feature 1..19: note = Target B2M Sequence complement
  source 1..19: mol_type = other DNA
ccgagatgtctcgctccgt

SEQ ID NO: 12606 - DNA, 19 bp, synthetic construct
  misc_feature 1..19: note = Target B2M Sequence complement
  source 1..19: mol_type = other DNA
cgagatgtctcgctccgtg

SEQ ID NO: 12607 - DNA, 19 bp, synthetic construct
  misc_feature 1..19: note = Target B2M Sequence complement
  source 1..19: mol_type = other DNA
gagatgtctcgctccgtgg

SEQ ID NO: 12608 - DNA, 19 bp, synthetic construct
  misc_feature 1..19: note = Target B2M Sequence complement
  source 1..19: mol_type = other DNA
agatgtctcgctccgtggc

SEQ ID NO: 12609 - DNA, 19 bp, synthetic construct
  misc_feature 1..19: note = Target B2M Sequence complement
  source 1..19: mol_type = other DNA
gatgtctcgctccgtggcc

SEQ ID NO: 12610 - DNA, 19 bp, synthetic construct
  misc_feature 1..19: note = Target B2M Sequence complement
  source 1..19: mol_type = other DNA
atgtctcgctccgtggcct

SEQ ID NO: 12611 - DNA, 19 bp, synthetic construct
  misc_feature 1..19: note = Target B2M Sequence complement
  source 1..19: mol_type = other DNA
tgtctcgctccgtggcctt

SEQ ID NO: 12612 - DNA, 19 bp, synthetic construct
  misc_feature 1..19: note = Target B2M Sequence complement
  source 1..19: mol_type = other DNA
gtctcgctccgtggcctta

SEQ ID NO: 12613 - DNA, 19 bp, synthetic construct
  misc_feature 1..19: note = Target B2M Sequence complement
  source 1..19: mol_type = other DNA
tctcgctccgtggccttag

SEQ ID NO: 12614 - DNA, 19 bp, synthetic construct
  misc_feature 1..19: note = Target B2M Sequence complement
  source 1..19: mol_type = other DNA
ctcgctccgtggccttagc

SEQ ID NO: 12615 - DNA, 19 bp, synthetic construct
  misc_feature 1..19: note = Target B2M Sequence complement
  source 1..19: mol_type = other DNA
tcgctccgtggccttagct

SEQ ID NO: 12616 - DNA, 19 bp, synthetic construct
  misc_feature 1..19: note = Target B2M Sequence complement
  source 1..19: mol_type = other DNA
cgctccgtggccttagctg

SEQ ID NO: 12617 - DNA, 19 bp, synthetic construct
  misc_feature 1..19: note = Target B2M Sequence complement
  source 1..19: mol_type = other DNA
gctccgtggccttagctgt

SEQ ID NO: 12618 - DNA, 19 bp, synthetic construct
  misc_feature 1..19: note = Target B2M Sequence complement
  source 1..19: mol_type = other DNA
ctccgtggccttagctgtg

SEQ ID NO: 12619 - DNA, 19 bp, synthetic construct
  misc_feature 1..19: note = Target B2M Sequence complement
  source 1..19: mol_type = other DNA
tccgtggccttagctgtgc

SEQ ID NO: 12620 - DNA, 19 bp, synthetic construct
  misc_feature 1..19: note = Target B2M Sequence complement
  source 1..19: mol_type = other DNA
ccgtggccttagctgtgct

SEQ ID NO: 12621 - DNA, 19 bp, synthetic construct
  misc_feature 1..19: note = Target B2M Sequence complement
  source 1..19: mol_type = other DNA
cgtggccttagctgtgctc

SEQ ID NO: 12622 - DNA, 19 bp, synthetic construct
  misc_feature 1..19: note = Target B2M Sequence complement
  source 1..19: mol_type = other DNA
gtggccttagctgtgctcg

SEQ ID NO: 12623 - DNA, 19 bp, synthetic construct
  misc_feature 1..19: note = Target B2M Sequence complement
  source 1..19: mol_type = other DNA
tggccttagctgtgctcgc

SEQ ID NO: 12624 - DNA, 19 bp, synthetic construct
  misc_feature 1..19: note = Target B2M Sequence complement
  source 1..19: mol_type = other DNA
ggccttagctgtgctcgcg

SEQ ID NO: 12625 - DNA, 19 bp, synthetic construct
  misc_feature 1..19: note = Target B2M Sequence complement
  source 1..19: mol_type = other DNA
gccttagctgtgctcgcgc

SEQ ID NO: 12626 - DNA, 19 bp, synthetic construct
  misc_feature 1..19: note = Target B2M Sequence complement
  source 1..19: mol_type = other DNA
ccttagctgtgctcgcgct

SEQ ID NO: 12627 - DNA, 19 bp, synthetic construct
  misc_feature 1..19: note = Target B2M Sequence complement
  source 1..19: mol_type = other DNA
agctgtgctcgcgctactc

SEQ ID NO: 12628 - DNA, 19 bp, synthetic construct
  misc_feature 1..19: note = Target B2M Sequence complement
  source 1..19: mol_type = other DNA
gctgtgctcgcgctactct

SEQ ID NO: 12629 - DNA, 19 bp, synthetic construct
  misc_feature 1..19: note = Target B2M Sequence complement
  source 1..19: mol_type = other DNA
ctgtgctcgcgctactctc

SEQ ID NO: 12630 - DNA, 19 bp, synthetic construct
  misc_feature 1..19: note = Target B2M Sequence complement
  source 1..19: mol_type = other DNA
gtgctcgcgctactctctc

SEQ ID NO: 12631 - DNA, 19 bp, synthetic construct
  misc_feature 1..19: note = Target B2M Sequence complement
  source 1..19: mol_type = other DNA
ctctttctggcctggaggc

SEQ ID NO: 12632 - DNA, 19 bp, synthetic construct
  misc_feature 1..19: note = Target B2M Sequence complement
  source 1..19: mol_type = other DNA
tctggcctggaggctatcc

SEQ ID NO: 12633 - DNA, 19 bp, synthetic construct
  misc_feature 1..19: note = Target B2M Sequence complement
  source 1..19: mol_type = other DNA
ctggcctggaggctatcca

SEQ ID NO: 12634 - DNA, 19 bp, synthetic construct
  misc_feature 1..19: note = Target B2M Sequence complement
  source 1..19: mol_type = other DNA
tggcctggaggctatccag

SEQ ID NO: 12635 - DNA, 19 bp, synthetic construct
  misc_feature 1..19: note = Target B2M Sequence complement
  source 1..19: mol_type = other DNA
ggcctggaggctatccagc

SEQ ID NO: 12636 - DNA, 19 bp, synthetic construct
  misc_feature 1..19: note = Target B2M Sequence complement
  source 1..19: mol_type = other DNA
gcctggaggctatccagcg

SEQ ID NO: 12637 - DNA, 19 bp, synthetic construct
  misc_feature 1..19: note = Target B2M Sequence complement
  source 1..19: mol_type = other DNA
cctggaggctatccagcgt

SEQ ID NO: 12638 - DNA, 19 bp, synthetic construct
  misc_feature 1..19: note = Target B2M Sequence complement
  source 1..19: mol_type = other DNA
gcctgccgtgtgaaccatg

SEQ ID NO: 12639 - DNA, 19 bp, synthetic construct
  misc_feature 1..19: note = Target B2M Sequence complement
  source 1..19: mol_type = other DNA
ttgcttgctttttaatatt

SEQ ID NO: 12640 - DNA, 19 bp, synthetic construct
  misc_feature 1..19: note = Target B2M Sequence complement
  source 1..19: mol_type = other DNA
cttgctttttaatattgat

SEQ ID NO: 12641 - DNA, 19 bp, synthetic construct
  misc_feature 1..19: note = Target B2M Sequence complement
  source 1..19: mol_type = other DNA
ttgctttttaatattgata

SEQ ID NO: 12642 - DNA, 19 bp, synthetic construct
  misc_feature 1..19: note = Target B2M Sequence complement
  source 1..19: mol_type = other DNA
tgctttttaatattgatat

SEQ ID NO: 12643 - DNA, 19 bp, synthetic construct
  misc_feature 1..19: note = Target B2M Sequence complement
  source 1..19: mol_type = other DNA
gctttttaatattgatatg

SEQ ID NO: 12644 - DNA, 19 bp, synthetic construct
  misc_feature 1..19: note = Target B2M Sequence complement
  source 1..19: mol_type = other DNA
ctttttaatattgatatgc

SEQ ID NO: 12645 - DNA, 19 bp, synthetic construct
  misc_feature 1..19: note = Target B2M Sequence complement
  source 1..19: mol_type = other DNA
tttttaatattgatatgct

SEQ ID NO: 12646 - DNA, 19 bp, synthetic construct
  misc_feature 1..19: note = Target B2M Sequence complement
  source 1..19: mol_type = other DNA
ttttaatattgatatgctt

SEQ ID NO: 12647 - DNA, 19 bp, synthetic construct
  misc_feature 1..19: note = Target B2M Sequence complement
  source 1..19: mol_type = other DNA
tttaatattgatatgctta

SEQ ID NO: 12648 - DNA, 19 bp, synthetic construct
  misc_feature 1..19: note = Target B2M Sequence complement
  source 1..19: mol_type = other DNA
ttaatattgatatgcttat

SEQ ID NO: 12649 - DNA, 19 bp, synthetic construct
  misc_feature 1..19: note = Target B2M Sequence complement
  source 1..19: mol_type = other DNA
taatattgatatgcttata

SEQ ID NO: 12650 - DNA, 19 bp, synthetic construct
  misc_feature 1..19: note = Target B2M Sequence complement
  source 1..19: mol_type = other DNA
aatattgatatgcttatac

SEQ ID NO: 12651 - DNA, 19 bp, synthetic construct
  misc_feature 1..19: note = Target B2M Sequence complement
  source 1..19: mol_type = other DNA
atattgatatgcttataca

SEQ ID NO: 12652 - DNA, 19 bp, synthetic construct
  misc_feature 1..19: note = Target B2M Sequence complement
  source 1..19: mol_type = other DNA
ttatacacttacactttat

SEQ ID NO: 12653 - DNA, 19 bp, synthetic construct
  misc_feature 1..19: note = Target B2M Sequence complement
  source 1..19: mol_type = other DNA
aaaatgtagggttataata

SEQ ID NO: 12654 - DNA, 19 bp, synthetic construct
  misc_feature 1..19: note = Target B2M Sequence complement
  source 1..19: mol_type = other DNA
aaatgtagggttataataa

SEQ ID NO: 12655 - DNA, 19 bp, synthetic construct
  misc_feature 1..19: note = Target B2M Sequence complement
  source 1..19: mol_type = other DNA
aatgtagggttataataat

SEQ ID NO: 12656 - DNA, 19 bp, synthetic construct
  misc_feature 1..19: note = Target B2M Sequence complement
  source 1..19: mol_type = other DNA
tagggttataataatgtta

SEQ ID NO: 12657 - DNA, 19 bp, synthetic construct
  misc_feature 1..19: note = Target B2M Sequence complement
  source 1..19: mol_type = other DNA
agggttataataatgttaa

SEQ ID NO: 12658 - DNA, 19 bp, synthetic construct
  misc_feature 1..19: note = Target B2M Sequence complement
  source 1..19: mol_type = other DNA
ggttataataatgttaaca

SEQ ID NO: 12659 - DNA, 19 bp, synthetic construct
  misc_feature 1..19: note = Target B2M Sequence complement
  source 1..19: mol_type = other DNA
gttataataatgttaacat

SEQ ID NO: 12660 - DNA, 19 bp, synthetic construct
  misc_feature 1..19: note = Target B2M Sequence complement
  source 1..19: mol_type = other DNA
ttataataatgttaacatg

SEQ ID NO: 12661 - DNA, 19 bp, synthetic construct
  misc_feature 1..19: note = Target B2M Sequence complement
  source 1..19: mol_type = other DNA
tataataatgttaacatgg

SEQ ID NO: 12662 - DNA, 19 bp, synthetic construct
  misc_feature 1..19: note = Target B2M Sequence complement
  source 1..19: mol_type = other DNA
ataataatgttaacatgga

SEQ ID NO: 12663 - DNA, 19 bp, synthetic construct
  misc_feature 1..19: note = Target B2M Sequence complement
  source 1..19: mol_type = other DNA
acatgatcttctttataat

SEQ ID NO: 12664 - DNA, 19 bp, synthetic construct
  misc_feature 1..19: note = Target B2M Sequence complement
  source 1..19: mol_type = other DNA
catgatcttctttataatt

SEQ ID NO: 12665 - DNA, 19 bp, synthetic construct
  misc_feature 1..19: note = Target B2M Sequence complement
  source 1..19: mol_type = other DNA
atgatcttctttataattc

SEQ ID NO: 12666 - DNA, 19 bp, synthetic construct
  misc_feature 1..19: note = Target B2M Sequence complement
  source 1..19: mol_type = other DNA
tgatcttctttataattct

SEQ ID NO: 12667 - DNA, 19 bp, synthetic construct
  misc_feature 1..19: note = Target B2M Sequence complement
  source 1..19: mol_type = other DNA
gatcttctttataattcta

SEQ ID NO: 12668 - DNA, 19 bp, synthetic construct
  misc_feature 1..19: note = Target B2M Sequence complement
  source 1..19: mol_type = other DNA
atcttctttataattctac

SEQ ID NO: 12669 - DNA, 19 bp, synthetic construct
  misc_feature 1..19: note = Target B2M Sequence complement
  source 1..19: mol_type = other DNA
tcttctttataattctact

SEQ ID NO: 12670 - DNA, 19 bp, synthetic construct
  misc_feature 1..19: note = Target B2M Sequence complement
  source 1..19: mol_type = other DNA
cttctttataattctactt

SEQ ID NO: 12671 - DNA, 19 bp, synthetic construct
  misc_feature 1..19: note = Target B2M Sequence complement
  source 1..19: mol_type = other DNA
ttctttataattctacttt

SEQ ID NO: 12672 - DNA, 19 bp, synthetic construct
  misc_feature 1..19: note = Target B2M Sequence complement
  source 1..19: mol_type = other DNA
tctttataattctactttg

SEQ ID NO: 12673 - DNA, 19 bp, synthetic construct
  misc_feature 1..19: note = Target B2M Sequence complement
  source 1..19: mol_type = other DNA
ctttataattctactttga

SEQ ID NO: 12674 - DNA, 19 bp, synthetic construct
  misc_feature 1..19: note = Target B2M Sequence complement
  source 1..19: mol_type = other DNA
tttataattctactttgag

SEQ ID NO: 12675 - DNA, 19 bp, synthetic construct
  misc_feature 1..19: note = Target B2M Sequence complement
  source 1..19: mol_type = other DNA
ttataattctactttgagt

SEQ ID NO: 12676 - DNA, 19 bp, synthetic construct
  misc_feature 1..19: note = Target B2M Sequence complement
  source 1..19: mol_type = other DNA
gagcaggttgctccacagg

SEQ ID NO: 12677 - DNA, 19 bp, synthetic construct
  misc_feature 1..19: note = Target B2M Sequence complement
  source 1..19: mol_type = other DNA
caggtagctctaggagggc

SEQ ID NO: 12678 - DNA, 19 bp, synthetic construct
  misc_feature 1..19: note = Target B2M Sequence complement
  source 1..19: mol_type = other DNA
ggtagctctaggagggctg

SEQ ID NO: 12679 - DNA, 19 bp, synthetic construct
  misc_feature 1..19: note = Target B2M Sequence complement
  source 1..19: mol_type = other DNA
gtagctctaggagggctgg

SEQ ID NO: 12680 - DNA, 19 bp, synthetic construct
  misc_feature 1..19: note = Target B2M Sequence complement
  source 1..19: mol_type = other DNA
tagctctaggagggctggc

SEQ ID NO: 12681 - DNA, 19 bp, synthetic construct
  misc_feature 1..19: note = Target B2M Sequence complement
  source 1..19: mol_type = other DNA
agctctaggagggctggca

SEQ ID NO: 12682 - DNA, 19 bp, synthetic construct
  misc_feature 1..19: note = Target B2M Sequence complement
  source 1..19: mol_type = other DNA
gctctaggagggctggcaa

SEQ ID NO: 12683 - DNA, 19 bp, synthetic construct
  misc_feature 1..19: note = Target B2M Sequence complement
  source 1..19: mol_type = other DNA
ctctaggagggctggcaac

SEQ ID NO: 12684 - DNA, 19 bp, synthetic construct
  misc_feature 1..19: note = Target B2M Sequence complement
  source 1..19: mol_type = other DNA
ataagttaacttccaattt

SEQ ID NO: 12685 - DNA, 19 bp, synthetic construct
  misc_feature 1..19: note = Target B2M Sequence complement
  source 1..19: mol_type = other DNA
taagttaacttccaattta

SEQ ID NO: 12686 - DNA, 19 bp, synthetic construct
  misc_feature 1..19: note = Target B2M Sequence complement
  source 1..19: mol_type = other DNA
ttaacttccaatttacata

SEQ ID NO: 12687 - DNA, 19 bp, synthetic construct
  misc_feature 1..19: note = Target B2M Sequence complement
  source 1..19: mol_type = other DNA
gggaaaatttagaaatata

SEQ ID NO: 12688 - DNA, 19 bp, synthetic construct
  misc_feature 1..19: note = Target B2M Sequence complement
  source 1..19: mol_type = other DNA
ggaaaatttagaaatataa

SEQ ID NO: 12689 - DNA, 19 bp, synthetic construct
  misc_feature 1..19: note = Target B2M Sequence complement
  source 1..19: mol_type = other DNA
gaaaatttagaaatataat

SEQ ID NO: 12690 - DNA, 19 bp, synthetic construct
  misc_feature 1..19: note = Target B2M Sequence complement
  source 1..19: mol_type = other DNA
aaaatttagaaatataatt

SEQ ID NO: 12691 - DNA, 19 bp, synthetic construct
  misc_feature 1..19: note = Target B2M Sequence complement
  source 1..19: mol_type = other DNA
aaatttagaaatataattg

SEQ ID NO: 12692 - DNA, 19 bp, synthetic construct
  misc_feature 1..19: note = Target B2M Sequence complement
  source 1..19: mol_type = other DNA
aatttagaaatataattga

SEQ ID NO: 12693 - DNA, 19 bp, synthetic construct
  misc_feature 1..19: note = Target B2M Sequence complement
  source 1..19: mol_type = other DNA
atttagaaatataattgac

SEQ ID NO: 12694 - DNA, 19 bp, synthetic construct
  misc_feature 1..19: note = Target B2M Sequence complement
  source 1..19: mol_type = other DNA
tttagaaatataattgaca

SEQ ID NO: 12695 - DNA, 19 bp, synthetic construct
  misc_feature 1..19: note = Target B2M Sequence complement
  source 1..19: mol_type = other DNA
ttagaaatataattgacag

SEQ ID NO: 12696 - DNA, 19 bp, synthetic construct
  misc_feature 1..19: note = Target B2M Sequence complement
  source 1..19: mol_type = other DNA
aaatataattgacaggatt

SEQ ID NO: 12697 - DNA, 19 bp, synthetic construct
  misc_feature 1..19: note = Target B2M Sequence complement
  source 1..19: mol_type = other DNA
aatataattgacaggatta

SEQ ID NO: 12698 - DNA, 19 bp, synthetic construct
  misc_feature 1..19: note = Target B2M Sequence complement
  source 1..19: mol_type = other DNA
atataattgacaggattat

SEQ ID NO: 12699 - DNA, 19 bp, synthetic construct
  misc_feature 1..19: note = Target B2M Sequence complement
  source 1..19: mol_type = other DNA
tataattgacaggattatt

SEQ ID NO: 12700 - DNA, 19 bp, synthetic construct
  misc_feature 1..19: note = Target B2M Sequence complement
  source 1..19: mol_type = other DNA
gattattggaaatttgtta

SEQ ID NO: 12701 - DNA, 19 bp, synthetic construct
  misc_feature 1..19: note = Target B2M Sequence complement
  source 1..19: mol_type = other DNA
attattggaaatttgttat

SEQ ID NO: 12702 - DNA, 19 bp, synthetic construct
  misc_feature 1..19: note = Target B2M Sequence complement
  source 1..19: mol_type = other DNA
ttattggaaatttgttata

SEQ ID NO: 12703 - DNA, 19 bp, synthetic construct
  misc_feature 1..19: note = Target B2M Sequence complement
  source 1..19: mol_type = other DNA
tattggaaatttgttataa

SEQ ID NO: 12704 - DNA, 19 bp, synthetic construct
  misc_feature 1..19: note = Target B2M Sequence complement
  source 1..19: mol_type = other DNA
attggaaatttgttataat

SEQ ID NO: 12705 - DNA, 19 bp, synthetic construct
  misc_feature 1..19: note = Target B2M Sequence complement
  source 1..19: mol_type = other DNA
ttggaaatttgttataatg

SEQ ID NO: 12706 - DNA, 19 bp, synthetic construct
  misc_feature 1..19: note = Target B2M Sequence complement
  source 1..19: mol_type = other DNA
tggaaatttgttataatga

SEQ ID NO: 12707 - DNA, 19 bp, synthetic construct
  misc_feature 1..19: note = Target B2M Sequence complement
  source 1..19: mol_type = other DNA
ggaaatttgttataatgaa

SEQ ID NO: 12708 - DNA, 19 bp, synthetic construct
  misc_feature 1..19: note = Target B2M Sequence complement
  source 1..19: mol_type = other DNA
gaaatttgttataatgaat

SEQ ID NO: 12709 - DNA, 19 bp, synthetic construct
  misc_feature 1..19: note = Target B2M Sequence complement
  source 1..19: mol_type = other DNA
aaatttgttataatgaatg

SEQ ID NO: 12710 - DNA, 19 bp, synthetic construct
  misc_feature 1..19: note = Target B2M Sequence complement
  source 1..19: mol_type = other DNA
aatttgttataatgaatga

SEQ ID NO: 12711 - DNA, 19 bp, synthetic construct
  misc_feature 1..19: note = Target B2M Sequence complement
  source 1..19: mol_type = other DNA
atttgttataatgaatgaa

SEQ ID NO: 12712 - DNA, 19 bp, synthetic construct
  misc_feature 1..19: note = Target B2M Sequence complement
  source 1..19: mol_type = other DNA
tttgttataatgaatgaaa

SEQ ID NO: 12713 - DNA, 19 bp, synthetic construct
  misc_feature 1..19: note = Target B2M Sequence complement
  source 1..19: mol_type = other DNA
ttgttataatgaatgaaac

SEQ ID NO: 12714 - DNA, 19 bp, synthetic construct
  misc_feature 1..19: note = Target B2M Sequence complement
  source 1..19: mol_type = other DNA
tgttataatgaatgaaaca

SEQ ID NO: 12715 - DNA, 19 bp, synthetic construct
  misc_feature 1..19: note = Target B2M Sequence complement
  source 1..19: mol_type = other DNA
gttataatgaatgaaacat

SEQ ID NO: 12716 - DNA, 19 bp, synthetic construct
  misc_feature 1..19: note = Target B2M Sequence complement
  source 1..19: mol_type = other DNA
ttataatgaatgaaacatt

SEQ ID NO: 12717 - DNA, 19 bp, synthetic construct
  misc_feature 1..19: note = Target B2M Sequence complement
  source 1..19: mol_type = other DNA
tataatgaatgaaacattt

SEQ ID NO: 12718 - DNA, 19 bp, synthetic construct
  misc_feature 1..19: note = Target B2M Sequence complement
  source 1..19: mol_type = other DNA
ataatgaatgaaacatttt

SEQ ID NO: 12719 - DNA, 19 bp, synthetic construct
  misc_feature 1..19: note = Target B2M Sequence complement
  source 1..19: mol_type = other DNA
taatgaatgaaacattttg

SEQ ID NO: 12720 - DNA, 19 bp, synthetic construct
  misc_feature 1..19: note = Target B2M Sequence complement
  source 1..19: mol_type = other DNA
aatgaatgaaacattttgt

SEQ ID NO: 12721 - DNA, 19 bp, synthetic construct
  misc_feature 1..19: note = Target B2M Sequence complement
  source 1..19: mol_type = other DNA
aatgaaacattttgtcata

SEQ ID NO: 12722 - DNA, 19 bp, synthetic construct
  misc_feature 1..19: note = Target B2M Sequence complement
  source 1..19: mol_type = other DNA
atgaaacattttgtcatat

SEQ ID NO: 12723 - DNA, 19 bp, synthetic construct
  misc_feature 1..19: note = Target B2M Sequence complement
  source 1..19: mol_type = other DNA
tgaaacattttgtcatata

SEQ ID NO: 12724 - DNA, 19 bp, synthetic construct
  misc_feature 1..19: note = Target B2M Sequence complement
  source 1..19: mol_type = other DNA
gaaacattttgtcatataa

SEQ ID NO: 12725 - DNA, 19 bp, synthetic construct
  misc_feature 1..19: note = Target B2M Sequence complement
  source 1..19: mol_type = other DNA
aaacattttgtcatataag

SEQ ID NO: 12726 - DNA, 19 bp, synthetic construct
  misc_feature 1..19: note = Target B2M Sequence complement
  source 1..19: mol_type = other DNA
aacattttgtcatataaga

SEQ ID NO: 12727 - DNA, 19 bp, synthetic construct
  misc_feature 1..19: note = Target B2M Sequence complement
  source 1..19: mol_type = other DNA
acattttgtcatataagat

SEQ ID NO: 12728 - DNA, 19 bp, synthetic construct
  misc_feature 1..19: note = Target B2M Sequence complement
  source 1..19: mol_type = other DNA
cattttgtcatataagatt

SEQ ID NO: 12729 - DNA, 19 bp, synthetic construct
  misc_feature 1..19: note = Target B2M Sequence complement
  source 1..19: mol_type = other DNA
attttgtcatataagattc

SEQ ID NO: 12730 - DNA, 19 bp, synthetic construct
  misc_feature 1..19: note = Target B2M Sequence complement
  source 1..19: mol_type = other DNA
ttttgtcatataagattca

SEQ ID NO: 12731 - DNA, 19 bp, synthetic construct
  misc_feature 1..19: note = Target B2M Sequence complement
  source 1..19: mol_type = other DNA
tttgtcatataagattcat

SEQ ID NO: 12732 - DNA, 19 bp, synthetic construct
  misc_feature 1..19: note = Target B2M Sequence complement
  source 1..19: mol_type = other DNA
ttgtcatataagattcata

SEQ ID NO: 12733 - DNA, 19 bp, synthetic construct
  misc_feature 1..19: note = Target B2M Sequence complement
  source 1..19: mol_type = other DNA
tgtcatataagattcatat

SEQ ID NO: 12734 - DNA, 19 bp, synthetic construct
  misc_feature 1..19: note = Target B2M Sequence complement
  source 1..19: mol_type = other DNA
gtcatataagattcatatt

SEQ ID NO: 12735 - DNA, 19 bp, synthetic construct
  misc_feature 1..19: note = Target B2M Sequence complement
  source 1..19: mol_type = other DNA
tcatataagattcatattt

SEQ ID NO: 12736 - DNA, 19 bp, synthetic construct
  misc_feature 1..19: note = Target B2M Sequence complement
  source 1..19: mol_type = other DNA
catataagattcatattta

SEQ ID NO: 12737 - DNA, 19 bp, synthetic construct
  misc_feature 1..19: note = Target B2M Sequence complement
  source 1..19: mol_type = other DNA
atataagattcatatttac

SEQ ID NO: 12738 - DNA, 19 bp, synthetic construct
  misc_feature 1..19: note = Target B2M Sequence complement
  source 1..19: mol_type = other DNA
tataagattcatatttact

SEQ ID NO: 12739 - DNA, 19 bp, synthetic construct
  misc_feature 1..19: note = Target B2M Sequence complement
  source 1..19: mol_type = other DNA
ataagattcatatttactt

SEQ ID NO: 12740 - DNA, 19 bp, synthetic construct
  misc_feature 1..19: note = Target B2M Sequence complement
  source 1..19: mol_type = other DNA
taagattcatatttacttc

SEQ ID NO: 12741 - DNA, 19 bp, synthetic construct
  misc_feature 1..19: note = Target B2M Sequence complement
  source 1..19: mol_type = other DNA
aagattcatatttacttct

SEQ ID NO: 12742 - DNA, 19 bp, synthetic construct
  misc_feature 1..19: note = Target B2M Sequence complement
  source 1..19: mol_type = other DNA
agattcatatttacttctt

SEQ ID NO: 12743 - DNA, 19 bp, synthetic construct
  misc_feature 1..19: note = Target B2M Sequence complement
  source 1..19: mol_type = other DNA
gattcatatttacttctta

SEQ ID NO: 12744 - DNA, 19 bp, synthetic construct
  misc_feature 1..19: note = Target B2M Sequence complement
  source 1..19: mol_type = other DNA
attcatatttacttcttat

SEQ ID NO: 12745 - DNA, 19 bp, synthetic construct
  misc_feature 1..19: note = Target B2M Sequence complement
  source 1..19: mol_type = other DNA
ttcatatttacttcttata

SEQ ID NO: 12746 - DNA, 19 bp, synthetic construct
  misc_feature 1..19: note = Target B2M Sequence complement
  source 1..19: mol_type = other DNA
tcatatttacttcttatac

SEQ ID NO: 12747 - DNA, 19 bp, synthetic construct
  misc_feature 1..19: note = Target B2M Sequence complement
  source 1..19: mol_type = other DNA
catatttacttcttataca

SEQ ID NO: 12748 - DNA, 19 bp, synthetic construct
  misc_feature 1..19: note = Target B2M Sequence complement
  source 1..19: mol_type = other DNA
atatttacttcttatacat

SEQ ID NO: 12749 - DNA, 19 bp, synthetic construct
  misc_feature 1..19: note = Target B2M Sequence complement
  source 1..19: mol_type = other DNA
tatttacttcttatacatt

SEQ ID NO: 12750 - DNA, 19 bp, synthetic construct
  misc_feature 1..19: note = Target B2M Sequence complement
  source 1..19: mol_type = other DNA
atttacttcttatacattt

SEQ ID NO: 12751 - DNA, 19 bp, synthetic construct
  misc_feature 1..19: note = Target B2M Sequence complement
  source 1..19: mol_type = other DNA
tttacttcttatacatttg

SEQ ID NO: 12752 - DNA, 19 bp, synthetic construct
  misc_feature 1..19: note = Target B2M Sequence complement
  source 1..19: mol_type = other DNA
ttacttcttatacatttga

SEQ ID NO: 12753 - DNA, 19 bp, synthetic construct
  misc_feature 1..19: note = Target B2M Sequence complement
  source 1..19: mol_type = other DNA
tacttcttatacatttgat

SEQ ID NO: 12754 - DNA, 19 bp, synthetic construct
  misc_feature 1..19: note = Target B2M Sequence complement
  source 1..19: mol_type = other DNA
acttcttatacatttgata

SEQ ID NO: 12755 - DNA, 19 bp, synthetic construct
  misc_feature 1..19: note = Target B2M Sequence complement
  source 1..19: mol_type = other DNA
cttcttatacatttgataa

SEQ ID NO: 12756 - DNA, 19 bp, synthetic construct
  misc_feature 1..19: note = Target B2M Sequence complement
  source 1..19: mol_type = other DNA
ttcttatacatttgataaa

SEQ ID NO: 12757 - DNA, 19 bp, synthetic construct
  misc_feature 1..19: note = Target B2M Sequence complement
  source 1..19: mol_type = other DNA
tcttatacatttgataaag

SEQ ID NO: 12758 - DNA, 19 bp, synthetic construct
  misc_feature 1..19: note = Target B2M Sequence complement
  source 1..19: mol_type = other DNA
cttatacatttgataaagt

SEQ ID NO: 12759 - DNA, 19 bp, synthetic construct
  misc_feature 1..19: note = Target B2M Sequence complement
  source 1..19: mol_type = other DNA
ttatacatttgataaagta

SEQ ID NO: 12760 - DNA, 19 bp, synthetic construct
  misc_feature 1..19: note = Target B2M Sequence complement
  source 1..19: mol_type = other DNA
tatacatttgataaagtaa

SEQ ID NO: 12761 - DNA, 19 bp, synthetic construct
  misc_feature 1..19: note = Target B2M Sequence complement
  source 1..19: mol_type = other DNA
atacatttgataaagtaag

SEQ ID NO: 12762 - DNA, 19 bp, synthetic construct
  misc_feature 1..19: note = Target B2M Sequence complement
  source 1..19: mol_type = other DNA
gttaatctggtttattttt

SEQ ID NO: 12763 - DNA, 19 bp, synthetic construct
  misc_feature 1..19: note = Target B2M Sequence complement
  source 1..19: mol_type = other DNA
ttaatctggtttatttttg

SEQ ID NO: 12764 - DNA, 19 bp, synthetic construct
  misc_feature 1..19: note = Target B2M Sequence complement
  source 1..19: mol_type = other DNA
taatctggtttatttttgt

SEQ ID NO: 12765 - DNA, 19 bp, synthetic construct
  misc_feature 1..19: note = Target B2M Sequence complement
  source 1..19: mol_type = other DNA
aatctggtttatttttgtt

SEQ ID NO: 12766 - DNA, 19 bp, synthetic construct
  misc_feature 1..19: note = Target B2M Sequence complement
  source 1..19: mol_type = other DNA
ttccacaagttaaataaat

SEQ ID NO: 12767 - DNA, 19 bp, synthetic construct
  misc_feature 1..19: note = Target B2M Sequence complement
  source 1..19: mol_type = other DNA
cacaagttaaataaatcat

SEQ ID NO: 12768 - DNA, 19 bp, synthetic construct
  misc_feature 1..19: note = Target B2M Sequence complement
  source 1..19: mol_type = other DNA
acaagttaaataaatcata

SEQ ID NO: 12769 - DNA, 19 bp, synthetic construct
  misc_feature 1..19: note = Target B2M Sequence complement
  source 1..19: mol_type = other DNA
caagttaaataaatcataa

SEQ ID NO: 12770 - DNA, 19 bp, synthetic construct
  misc_feature 1..19: note = Target B2M Sequence complement
  source 1..19: mol_type = other DNA
aagttaaataaatcataaa

SEQ ID NO: 12771 - DNA, 19 bp, synthetic construct
  misc_feature 1..19: note = Target B2M Sequence complement
  source 1..19: mol_type = other DNA
agttaaataaatcataaaa

SEQ ID NO: 12772 - DNA, 19 bp, synthetic construct
  misc_feature 1..19: note = Target B2M Sequence complement
  source 1..19: mol_type = other DNA
gttaaataaatcataaaac

SEQ ID NO: 12773 - DNA, 19 bp, synthetic construct
  misc_feature 1..19: note = Target B2M Sequence complement
  source 1..19: mol_type = other DNA
ttaaataaatcataaaact

SEQ ID NO: 12774 - DNA, 19 bp, synthetic construct
  misc_feature 1..19: note = Target B2M Sequence complement
  source 1..19: mol_type = other DNA
taaataaatcataaaactt

SEQ ID NO: 12775 - DNA, 19 bp, synthetic construct
  misc_feature 1..19: note = Target B2M Sequence complement
  source 1..19: mol_type = other DNA
aaataaatcataaaacttg

SEQ ID NO: 12776 - DNA, 19 bp, synthetic construct
  misc_feature 1..19: note = Target B2M Sequence complement
  source 1..19: mol_type = other DNA
aataaatcataaaacttga

SEQ ID NO: 12777 - DNA, 20 bp, synthetic construct
  misc_feature 1..20: note = Target B2M Sequence complement
  source 1..20: mol_type = other DNA
gaagctgacagcattcgggc

SEQ ID NO: 12778 - DNA, 20 bp, synthetic construct
  misc_feature 1..20: note = Target B2M Sequence complement
  source 1..20: mol_type = other DNA
aagctgacagcattcgggcc

SEQ ID NO: 12779 - DNA, 20 bp, synthetic construct
  misc_feature 1..20: note = Target B2M Sequence complement
  source 1..20: mol_type = other DNA
agctgacagcattcgggccg

SEQ ID NO: 12780 - DNA, 20 bp, synthetic construct
  misc_feature 1..20: note = Target B2M Sequence complement
  source 1..20: mol_type = other DNA
gctgacagcattcgggccga

SEQ ID NO: 12781 - DNA, 20 bp, synthetic construct
  misc_feature 1..20: note = Target B2M Sequence complement
  source 1..20: mol_type = other DNA
ctgacagcattcgggccgag

SEQ ID NO: 12782 - DNA, 20 bp, synthetic construct
  misc_feature 1..20: note = Target B2M Sequence complement
  source 1..20: mol_type = other DNA
tgacagcattcgggccgaga

SEQ ID NO: 12783 - DNA, 20 bp, synthetic construct
  misc_feature 1..20: note = Target B2M Sequence complement
  source 1..20: mol_type = other DNA
gacagcattcgggccgagat

SEQ ID NO: 12784 - DNA, 20 bp, synthetic construct
  misc_feature 1..20: note = Target B2M Sequence complement
  source 1..20: mol_type = other DNA
acagcattcgggccgagatg

SEQ ID NO: 12785 - DNA, 20 bp, synthetic construct
  misc_feature 1..20: note = Target B2M Sequence complement
  source 1..20: mol_type = other DNA
cagcattcgggccgagatgt

SEQ ID NO: 12786 - DNA, 20 bp, synthetic construct
  misc_feature 1..20: note = Target B2M Sequence complement
  source 1..20: mol_type = other DNA
agcattcgggccgagatgtc

SEQ ID NO: 12787 - DNA, 20 bp, synthetic construct
  misc_feature 1..20: note = Target B2M Sequence complement
  source 1..20: mol_type = other DNA
gcattcgggccgagatgtct

SEQ ID NO: 12788 - DNA, 20 bp, synthetic construct
  misc_feature 1..20: note = Target B2M Sequence complement
  source 1..20: mol_type = other DNA
cattcgggccgagatgtctc

SEQ ID NO: 12789 - DNA, 20 bp, synthetic construct
  misc_feature 1..20: note = Target B2M Sequence complement
  source 1..20: mol_type = other DNA
attcgggccgagatgtctcg

SEQ ID NO: 12790 - DNA, 20 bp, synthetic construct
  misc_feature 1..20: note = Target B2M Sequence complement
  source 1..20: mol_type = other DNA
ttcgggccgagatgtctcgc

SEQ ID NO: 12791 - DNA, 20 bp, synthetic construct
  misc_feature 1..20: note = Target B2M Sequence complement
  source 1..20: mol_type = other DNA
tcgggccgagatgtctcgct

SEQ ID NO: 12792 - DNA, 20 bp, synthetic construct
  misc_feature 1..20: note = Target B2M Sequence complement
  source 1..20: mol_type = other DNA
cgggccgagatgtctcgctc

SEQ ID NO: 12793 - DNA, 20 bp, synthetic construct
  misc_feature 1..20: note = Target B2M Sequence complement
  source 1..20: mol_type = other DNA
gggccgagatgtctcgctcc

SEQ ID NO: 12794 - DNA, 20 bp, synthetic construct
  misc_feature 1..20: note = Target B2M Sequence complement
  source 1..20: mol_type = other DNA
ggccgagatgtctcgctccg

SEQ ID NO: 12795 - DNA, 20 bp, synthetic construct
  misc_feature 1..20: note = Target B2M Sequence complement
  source 1..20: mol_type = other DNA
gccgagatgtctcgctccgt

SEQ ID NO: 12796 - DNA, 20 bp, synthetic construct
  misc_feature 1..20: note = Target B2M Sequence complement
  source 1..20: mol_type = other DNA
ccgagatgtctcgctccgtg

SEQ ID NO: 12797 - DNA, 20 bp, synthetic construct
  misc_feature 1..20: note = Target B2M Sequence complement
  source 1..20: mol_type = other DNA
cgagatgtctcgctccgtgg

SEQ ID NO: 12798 - DNA, 20 bp, synthetic construct
  misc_feature 1..20: note = Target B2M Sequence complement
  source 1..20: mol_type = other DNA
gagatgtctcgctccgtggc

SEQ ID NO: 12799 - DNA, 20 bp, synthetic construct
  misc_feature 1..20: note = Target B2M Sequence complement
  source 1..20: mol_type = other DNA
agatgtctcgctccgtggcc

SEQ ID NO: 12800 - DNA, 20 bp, synthetic construct
  misc_feature 1..20: note = Target B2M Sequence complement
  source 1..20: mol_type = other DNA
gatgtctcgctccgtggcct

SEQ ID NO: 12801 - DNA, 20 bp, synthetic construct
  misc_feature 1..20: note = Target B2M Sequence complement
  source 1..20: mol_type = other DNA
atgtctcgctccgtggcctt

SEQ ID NO: 12802 - DNA, 20 bp, synthetic construct
  misc_feature 1..20: note = Target B2M Sequence complement
  source 1..20: mol_type = other DNA
tgtctcgctccgtggcctta

SEQ ID NO: 12803 - DNA, 20 bp, synthetic construct
  misc_feature 1..20: note = Target B2M Sequence complement
  source 1..20: mol_type = other DNA
gtctcgctccgtggccttag

SEQ ID NO: 12804 - DNA, 20 bp, synthetic construct
  misc_feature 1..20: note = Target B2M Sequence complement
  source 1..20: mol_type = other DNA
tctcgctccgtggccttagc

SEQ ID NO: 12805 - DNA, 20 bp, synthetic construct
  misc_feature 1..20: note = Target B2M Sequence complement
  source 1..20: mol_type = other DNA
ctcgctccgtggccttagct

SEQ ID NO: 12806 - DNA, 20 bp, synthetic construct
  misc_feature 1..20: note = Target B2M Sequence complement
  source 1..20: mol_type = other DNA
tcgctccgtggccttagctg

SEQ ID NO: 12807 - DNA, 20 bp, synthetic construct
  misc_feature 1..20: note = Target B2M Sequence complement
  source 1..20: mol_type = other DNA
cgctccgtggccttagctgt

SEQ ID NO: 12808 - DNA, 20 bp, synthetic construct
  misc_feature 1..20: note = Target B2M Sequence complement
  source 1..20: mol_type = other DNA
gctccgtggccttagctgtg

SEQ ID NO: 12809 - DNA, 20 bp, synthetic construct
  misc_feature 1..20: note = Target B2M Sequence complement
  source 1..20: mol_type = other DNA
ctccgtggccttagctgtgc

SEQ ID NO: 12810 - DNA, 20 bp, synthetic construct
  misc_feature 1..20: note = Target B2M Sequence complement
  source 1..20: mol_type = other DNA
tccgtggccttagctgtgct

SEQ ID NO: 12811 - DNA, 20 bp, synthetic construct
  misc_feature 1..20: note = Target B2M Sequence complement
  source 1..20: mol_type = other DNA
ccgtggccttagctgtgctc

SEQ ID NO: 12812 - DNA, 20 bp, synthetic construct
  misc_feature 1..20: note = Target B2M Sequence complement
  source 1..20: mol_type = other DNA
cgtggccttagctgtgctcg

SEQ ID NO: 12813 - DNA, 20 bp, synthetic construct
  misc_feature 1..20: note = Target B2M Sequence complement
  source 1..20: mol_type = other DNA
gtggccttagctgtgctcgc

SEQ ID NO: 12814 - DNA, 20 bp, synthetic construct
  misc_feature 1..20: note = Target B2M Sequence complement
  source 1..20: mol_type = other DNA
tggccttagctgtgctcgcg

SEQ ID NO: 12815 - DNA, 20 bp, synthetic construct
  misc_feature 1..20: note = Target B2M Sequence complement
  source 1..20: mol_type = other DNA
ggccttagctgtgctcgcgc

SEQ ID NO: 12816 - DNA, 20 bp, synthetic construct
  misc_feature 1..20: note = Target B2M Sequence complement
  source 1..20: mol_type = other DNA
gccttagctgtgctcgcgct

SEQ ID NO: 12817 - DNA, 20 bp, synthetic construct
  misc_feature 1..20: note = Target B2M Sequence complement
  source 1..20: mol_type = other DNA
ccttagctgtgctcgcgcta

SEQ ID NO: 12818 - DNA, 20 bp, synthetic construct
  misc_feature 1..20: note = Target B2M Sequence complement
  source 1..20: mol_type = other DNA
cttagctgtgctcgcgctac

SEQ ID NO: 12819 - DNA, 20 bp, synthetic construct
  misc_feature 1..20: note = Target B2M Sequence complement
  source 1..20: mol_type = other DNA
tagctgtgctcgcgctactc

SEQ ID NO: 12820 - DNA, 20 bp, synthetic construct
  misc_feature 1..20: note = Target B2M Sequence complement
  source 1..20: mol_type = other DNA
agctgtgctcgcgctactct

SEQ ID NO: 12821 - DNA, 20 bp, synthetic construct
  misc_feature 1..20: note = Target B2M Sequence complement
  source 1..20: mol_type = other DNA
gctgtgctcgcgctactctc

SEQ ID NO: 12822 - DNA, 20 bp, synthetic construct
  misc_feature 1..20: note = Target B2M Sequence complement
  source 1..20: mol_type = other DNA
ctgtgctcgcgctactctct

SEQ ID NO: 12823 - DNA, 20 bp, synthetic construct
  misc_feature 1..20: note = Target B2M Sequence complement
  source 1..20: mol_type = other DNA
tgtgctcgcgctactctctc

SEQ ID NO: 12824 - DNA, 20 bp, synthetic construct
  misc_feature 1..20: note = Target B2M Sequence complement
  source 1..20: mol_type = other DNA
gtgctcgcgctactctctct

SEQ ID NO: 12825 - DNA, 20 bp, synthetic construct
  misc_feature 1..20: note = Target B2M Sequence complement
  source 1..20: mol_type = other DNA
ctctctttctggcctggagg

SEQ ID NO: 12826 - DNA, 20 bp, synthetic construct
  misc_feature 1..20: note = Target B2M Sequence complement
  source 1..20: mol_type = other DNA
tctctttctggcctggaggc

SEQ ID NO: 12827 - DNA, 20 bp, synthetic construct
  misc_feature 1..20: note = Target B2M Sequence complement
  source 1..20: mol_type = other DNA
ctctttctggcctggaggct

SEQ ID NO: 12828 - DNA, 20 bp, synthetic construct
  misc_feature 1..20: note = Target B2M Sequence complement
  source 1..20: mol_type = other DNA
ttctggcctggaggctatcc

SEQ ID NO: 12829 - DNA, 20 bp, synthetic construct
  misc_feature 1..20: note = Target B2M Sequence complement
  source 1..20: mol_type = other DNA
tctggcctggaggctatcca

SEQ ID NO: 12830 - DNA, 20 bp, synthetic construct
  misc_feature 1..20: note = Target B2M Sequence complement
  source 1..20: mol_type = other DNA
ctggcctggaggctatccag

SEQ ID NO: 12831 - DNA, 20 bp, synthetic construct
  misc_feature 1..20: note = Target B2M Sequence complement
  source 1..20: mol_type = other DNA
tggcctggaggctatccagc

SEQ ID NO: 12832 - DNA, 20 bp, synthetic construct
  misc_feature 1..20: note = Target B2M Sequence complement
  source 1..20: mol_type = other DNA
ggcctggaggctatccagcg

SEQ ID NO: 12833 - DNA, 20 bp, synthetic construct
  misc_feature 1..20: note = Target B2M Sequence complement
  source 1..20: mol_type = other DNA
gcctggaggctatccagcgt

SEQ ID NO: 12834 - DNA, 20 bp, synthetic construct
  misc_feature 1..20: note = Target B2M Sequence complement
  source 1..20: mol_type = other DNA
cctggaggctatccagcgta

SEQ ID NO: 12835 - DNA, 20 bp, synthetic construct
  misc_feature 1..20: note = Target B2M Sequence complement
  source 1..20: mol_type = other DNA
ctggaggctatccagcgtac

SEQ ID NO: 12836 - DNA, 20 bp, synthetic construct
  misc_feature 1..20: note = Target B2M Sequence complement
  source 1..20: mol_type = other DNA
ggaggctatccagcgtactc

SEQ ID NO: 12837 - DNA, 20 bp, synthetic construct
  misc_feature 1..20: note = Target B2M Sequence complement
  source 1..20: mol_type = other DNA
gaggctatccagcgtactcc

SEQ ID NO: 12838 - DNA, 20 bp, synthetic construct
  misc_feature 1..20: note = Target B2M Sequence complement
  source 1..20: mol_type = other DNA
gtatgcctgccgtgtgaacc

SEQ ID NO: 12839 - DNA, 20 bp, synthetic construct
  misc_feature 1..20: note = Target B2M Sequence complement
  source 1..20: mol_type = other DNA
tgcctgccgtgtgaaccatg

SEQ ID NO: 12840 - DNA, 20 bp, synthetic construct
  misc_feature 1..20: note = Target B2M Sequence complement
  source 1..20: mol_type = other DNA
gcctgccgtgtgaaccatgt

SEQ ID NO: 12841 - DNA, 20 bp, synthetic construct
  misc_feature 1..20: note = Target B2M Sequence complement
  source 1..20: mol_type = other DNA
cctgccgtgtgaaccatgtg

SEQ ID NO: 12842 - DNA, 20 bp, synthetic construct
  misc_feature 1..20: note = Target B2M Sequence complement
  source 1..20: mol_type = other DNA
cttgctttttaatattgata

SEQ ID NO: 12843 - DNA, 20 bp, synthetic construct
  misc_feature 1..20: note = Target B2M Sequence complement
  source 1..20: mol_type = other DNA
ttgctttttaatattgatat

SEQ ID NO: 12844 - DNA, 20 bp, synthetic construct
  misc_feature 1..20: note = Target B2M Sequence complement
  source 1..20: mol_type = other DNA
tgctttttaatattgatatg

SEQ ID NO: 12845 - DNA, 20 bp, synthetic construct
  misc_feature 1..20: note = Target B2M Sequence complement
  source 1..20: mol_type = other DNA
ctttttaatattgatatgct

SEQ ID NO: 12846 - DNA, 20 bp, synthetic construct
  misc_feature 1..20: note = Target B2M Sequence complement
  source 1..20: mol_type = other DNA
tttttaatattgatatgctt

SEQ ID NO: 12847 - DNA, 20 bp, synthetic construct
  misc_feature 1..20: note = Target B2M Sequence complement
  source 1..20: mol_type = other DNA
ttttaatattgatatgctta

SEQ ID NO: 12848 - DNA, 20 bp, synthetic construct
  misc_feature 1..20: note = Target B2M Sequence complement
  source 1..20: mol_type = other DNA
tttaatattgatatgcttat

SEQ ID NO: 12849 - DNA, 20 bp, synthetic construct
  misc_feature 1..20: note = Target B2M Sequence complement
  source 1..20: mol_type = other DNA
ttaatattgatatgcttata

SEQ ID NO: 12850 - DNA, 20 bp, synthetic construct
  misc_feature 1..20: note = Target B2M Sequence complement
  source 1..20: mol_type = other DNA
taatattgatatgcttatac

SEQ ID NO: 12851 - DNA, 20 bp, synthetic construct
  misc_feature 1..20: note = Target B2M Sequence complement
  source 1..20: mol_type = other DNA
aatattgatatgcttataca

SEQ ID NO: 12852 - DNA, 20 bp, synthetic construct
  misc_feature 1..20: note = Target B2M Sequence complement
  source 1..20: mol_type = other DNA
aaaatgtagggttataataa

SEQ ID NO: 12853 - DNA, 20 bp, synthetic construct
  misc_feature 1..20: note = Target B2M Sequence complement
  source 1..20: mol_type = other DNA
aaatgtagggttataataat

SEQ ID NO: 12854 - DNA, 20 bp, synthetic construct
  misc_feature 1..20: note = Target B2M Sequence complement
  source 1..20: mol_type = other DNA
tagggttataataatgttaa

SEQ ID NO: 12855 - DNA, 20 bp, synthetic construct
  misc_feature 1..20: note = Target B2M Sequence complement
  source 1..20: mol_type = other DNA
ggttataataatgttaacat

SEQ ID NO: 12856 - DNA, 20 bp, synthetic construct
  misc_feature 1..20: note = Target B2M Sequence complement
  source 1..20: mol_type = other DNA
gttataataatgttaacatg

SEQ ID NO: 12857 - DNA, 20 bp, synthetic construct
  misc_feature 1..20: note = Target B2M Sequence complement
  source 1..20: mol_type = other DNA
ttataataatgttaacatgg

SEQ ID NO: 12858 - DNA, 20 bp, synthetic construct
  misc_feature 1..20: note = Target B2M Sequence complement
  source 1..20: mol_type = other DNA
tataataatgttaacatgga

SEQ ID NO: 12859 - DNA, 20 bp, synthetic construct
  misc_feature 1..20: note = Target B2M Sequence complement
  source 1..20: mol_type = other DNA
acatgatcttctttataatt

SEQ ID NO: 12860 - DNA, 20 bp, synthetic construct
  misc_feature 1..20: note = Target B2M Sequence complement
  source 1..20: mol_type = other DNA
atgatcttctttataattct

SEQ ID NO: 12861 - DNA, 20 bp, synthetic construct
  misc_feature 1..20: note = Target B2M Sequence complement
  source 1..20: mol_type = other DNA
tgatcttctttataattcta

SEQ ID NO: 12862 - DNA, 20 bp, synthetic construct
  misc_feature 1..20: note = Target B2M Sequence complement
  source 1..20: mol_type = other DNA
atcttctttataattctact

SEQ ID NO: 12863 - DNA, 20 bp, synthetic construct
  misc_feature 1..20: note = Target B2M Sequence complement
  source 1..20: mol_type = other DNA
tcttctttataattctactt

SEQ ID NO: 12864 - DNA, 20 bp, synthetic construct
  misc_feature 1..20: note = Target B2M Sequence complement
  source 1..20: mol_type = other DNA
cttctttataattctacttt

SEQ ID NO: 12865 - DNA, 20 bp, synthetic construct
  misc_feature 1..20: note = Target B2M Sequence complement
  source 1..20: mol_type = other DNA
ttctttataattctactttg

SEQ ID NO: 12866 - DNA, 20 bp, synthetic construct
  misc_feature 1..20: note = Target B2M Sequence complement
  source 1..20: mol_type = other DNA
tctttataattctactttga

SEQ ID NO: 12867 - DNA, 20 bp, synthetic construct
  misc_feature 1..20: note = Target B2M Sequence complement
  source 1..20: mol_type = other DNA
tttataattctactttgagt

SEQ ID NO: 12868 - DNA, 20 bp, synthetic construct
  misc_feature 1..20: note = Target B2M Sequence complement
  source 1..20: mol_type = other DNA
ctgagcaggttgctccacag

SEQ ID NO: 12869 - DNA, 20 bp, synthetic construct
  misc_feature 1..20: note = Target B2M Sequence complement
  source 1..20: mol_type = other DNA
tgagcaggttgctccacagg

SEQ ID NO: 12870 - DNA, 20 bp, synthetic construct
  misc_feature 1..20: note = Target B2M Sequence complement
  source 1..20: mol_type = other DNA
gagcaggttgctccacaggt

SEQ ID NO: 12871 - DNA, 20 bp, synthetic construct
  misc_feature 1..20: note = Target B2M Sequence complement
  source 1..20: mol_type = other DNA
gcaggttgctccacaggtag

SEQ ID NO: 12872 - DNA, 20 bp, synthetic construct
  misc_feature 1..20: note = Target B2M Sequence complement
  source 1..20: mol_type = other DNA
caggttgctccacaggtagc

SEQ ID NO: 12873 - DNA, 20 bp, synthetic construct
  misc_feature 1..20: note = Target B2M Sequence complement
  source 1..20: mol_type = other DNA
ggttgctccacaggtagctc

SEQ ID NO: 12874 - DNA, 20 bp, synthetic construct
  misc_feature 1..20: note = Target B2M Sequence complement
  source 1..20: mol_type = other DNA
gctccacaggtagctctagg

SEQ ID NO: 12875 - DNA, 20 bp, synthetic construct
  misc_feature 1..20: note = Target B2M Sequence complement
  source 1..20: mol_type = other DNA
ccacaggtagctctaggagg

SEQ ID NO: 12876 - DNA, 20 bp, synthetic construct
  misc_feature 1..20: note = Target B2M Sequence complement
  source 1..20: mol_type = other DNA
cacaggtagctctaggaggg

SEQ ID NO: 12877 - DNA, 20 bp, synthetic construct
  misc_feature 1..20: note = Target B2M Sequence complement
  source 1..20: mol_type = other DNA
acaggtagctctaggagggc

SEQ ID NO: 12878 - DNA, 20 bp, synthetic construct
  misc_feature 1..20: note = Target B2M Sequence complement
  source 1..20: mol_type = other DNA
caggtagctctaggagggct

SEQ ID NO: 12879 - DNA, 20 bp, synthetic construct
  misc_feature 1..20: note = Target B2M Sequence complement
  source 1..20: mol_type = other DNA
aggtagctctaggagggctg

SEQ ID NO: 12880 - DNA, 20 bp, synthetic construct
  misc_feature 1..20: note = Target B2M Sequence complement
  source 1..20: mol_type = other DNA
ggtagctctaggagggctgg

SEQ ID NO: 12881 - DNA, 20 bp, synthetic construct
  misc_feature 1..20: note = Target B2M Sequence complement
  source 1..20: mol_type = other DNA
gtagctctaggagggctggc

SEQ ID NO: 12882 - DNA, 20 bp, synthetic construct
  misc_feature 1..20: note = Target B2M Sequence complement
  source 1..20: mol_type = other DNA
tagctctaggagggctggca

SEQ ID NO: 12883 - DNA, 20 bp, synthetic construct
  misc_feature 1..20: note = Target B2M Sequence complement
  source 1..20: mol_type = other DNA
agctctaggagggctggcaa

SEQ ID NO: 12884 - DNA, 20 bp, synthetic construct
  misc_feature 1..20: note = Target B2M Sequence complement
  source 1..20: mol_type = other DNA
gctctaggagggctggcaac

SEQ ID NO: 12885 - DNA, 20 bp, synthetic construct
  misc_feature 1..20: note = Target B2M Sequence complement
  source 1..20: mol_type = other DNA
ctctaggagggctggcaact

SEQ ID NO: 12886 - DNA, 20 bp, synthetic construct
  misc_feature 1..20: note = Target B2M Sequence complement
  source 1..20: mol_type = other DNA
ggagggctggcaacttagag

SEQ ID NO: 12887 - DNA, 20 bp, synthetic construct
  misc_feature 1..20: note = Target B2M Sequence complement
  source 1..20: mol_type = other DNA
gagggctggcaacttagagg

SEQ ID NO: 12888 - DNA, 20 bp, synthetic construct
  misc_feature 1..20: note = Target B2M Sequence complement
  source 1..20: mol_type = other DNA
gggctggcaacttagaggtg

SEQ ID NO: 12889 - DNA, 20 bp, synthetic construct
  misc_feature 1..20: note = Target B2M Sequence complement
  source 1..20: mol_type = other DNA
ggctggcaacttagaggtgg

SEQ ID NO: 12890 - DNA, 20 bp, synthetic construct
  misc_feature 1..20: note = Target B2M Sequence complement
  source 1..20: mol_type = other DNA
gctggcaacttagaggtggg

SEQ ID NO: 12891 - DNA, 20 bp, synthetic construct
  misc_feature 1..20: note = Target B2M Sequence complement
  source 1..20: mol_type = other DNA
ctggcaacttagaggtgggg

SEQ ID NO: 12892 - DNA, 20 bp, synthetic construct
  misc_feature 1..20: note = Target B2M Sequence complement
  source 1..20: mol_type = other DNA
ggcaacttagaggtggggag

SEQ ID NO: 12893 - DNA, 20 bp, synthetic construct
  misc_feature 1..20: note = Target B2M Sequence complement
  source 1..20: mol_type = other DNA
gcaacttagaggtggggagc

SEQ ID NO: 12894 - DNA, 20 bp, synthetic construct
  misc_feature 1..20: note = Target B2M Sequence complement
  source 1..20: mol_type = other DNA
cttagaggtggggagcagag

SEQ ID NO: 12895 - DNA, 20 bp, synthetic construct
  misc_feature 1..20: note = Target B2M Sequence complement
  source 1..20: mol_type = other DNA
ataagttaacttccaattta

SEQ ID NO: 12896 - DNA, 20 bp, synthetic construct
  misc_feature 1..20: note = Target B2M Sequence complement
  source 1..20: mol_type = other DNA
gggaaaatttagaaatataa

SEQ ID NO: 12897 - DNA, 20 bp, synthetic construct
  misc_feature 1..20: note = Target B2M Sequence complement
  source 1..20: mol_type = other DNA
ggaaaatttagaaatataat

SEQ ID NO: 12898 - DNA, 20 bp, synthetic construct
  misc_feature 1..20: note = Target B2M Sequence complement
  source 1..20: mol_type = other DNA
gaaaatttagaaatataatt

SEQ ID NO: 12899 - DNA, 20 bp, synthetic construct
  misc_feature 1..20: note = Target B2M Sequence complement
  source 1..20: mol_type = other DNA
aaaatttagaaatataattg

SEQ ID NO: 12900 - DNA, 20 bp, synthetic construct
  misc_feature 1..20: note = Target B2M Sequence complement
  source 1..20: mol_type = other DNA
aaatttagaaatataattga

SEQ ID NO: 12901 - DNA, 20 bp, synthetic construct
  misc_feature 1..20: note = Target B2M Sequence complement
  source 1..20: mol_type = other DNA
aatttagaaatataattgac

SEQ ID NO: 12902 - DNA, 20 bp, synthetic construct
  misc_feature 1..20: note = Target B2M Sequence complement
  source 1..20: mol_type = other DNA
atttagaaatataattgaca

SEQ ID NO: 12903 - DNA, 20 bp, synthetic construct
  misc_feature 1..20: note = Target B2M Sequence complement
  source 1..20: mol_type = other DNA
tttagaaatataattgacag

SEQ ID NO: 12904 - DNA, 20 bp, synthetic construct
  misc_feature 1..20: note = Target B2M Sequence complement
  source 1..20: mol_type = other DNA
aaatataattgacaggatta

SEQ ID NO: 12905 - DNA, 20 bp, synthetic construct
  misc_feature 1..20: note = Target B2M Sequence complement
  source 1..20: mol_type = other DNA
aatataattgacaggattat

SEQ ID NO: 12906 - DNA, 20 bp, synthetic construct
  misc_feature 1..20: note = Target B2M Sequence complement
  source 1..20: mol_type = other DNA
atataattgacaggattatt

SEQ ID NO: 12907 - DNA, 20 bp, synthetic construct
  misc_feature 1..20: note = Target B2M Sequence complement
  source 1..20: mol_type = other DNA
gattattggaaatttgttat

SEQ ID NO: 12908 - DNA, 20 bp, synthetic construct
  misc_feature 1..20: note = Target B2M Sequence complement
  source 1..20: mol_type = other DNA
attattggaaatttgttata

SEQ ID NO: 12909 - DNA, 20 bp, synthetic construct
  misc_feature 1..20: note = Target B2M Sequence complement
  source 1..20: mol_type = other DNA
ttattggaaatttgttataa

SEQ ID NO: 12910 - DNA, 20 bp, synthetic construct
  misc_feature 1..20: note = Target B2M Sequence complement
  source 1..20: mol_type = other DNA
tattggaaatttgttataat

SEQ ID NO: 12911 - DNA, 20 bp, synthetic construct
  misc_feature 1..20: note = Target B2M Sequence complement
  source 1..20: mol_type = other DNA
attggaaatttgttataatg

SEQ ID NO: 12912 - DNA, 20 bp, synthetic construct
  misc_feature 1..20: note = Target B2M Sequence complement
  source 1..20: mol_type = other DNA
ttggaaatttgttataatga

SEQ ID NO: 12913 - DNA, 20 bp, synthetic construct
  misc_feature 1..20: note = Target B2M Sequence complement
  source 1..20: mol_type = other DNA
tggaaatttgttataatgaa

SEQ ID NO: 12914 - DNA, 20 bp, synthetic construct
  misc_feature 1..20: note = Target B2M Sequence complement
  source 1..20: mol_type = other DNA
ggaaatttgttataatgaat

SEQ ID NO: 12915 - DNA, 20 bp, synthetic construct
  misc_feature 1..20: note = Target B2M Sequence complement
  source 1..20: mol_type = other DNA
gaaatttgttataatgaatg

SEQ ID NO: 12916 - DNA, 20 bp, synthetic construct
  misc_feature 1..20: note = Target B2M Sequence complement
  source 1..20: mol_type = other DNA
aaatttgttataatgaatga

SEQ ID NO: 12917 - DNA, 20 bp, synthetic construct
  misc_feature 1..20: note = Target B2M Sequence complement
  source 1..20: mol_type = other DNA
aatttgttataatgaatgaa

SEQ ID NO: 12918 - DNA, 20 bp, synthetic construct
  misc_feature 1..20: note = Target B2M Sequence complement
  source 1..20: mol_type = other DNA
atttgttataatgaatgaaa

SEQ ID NO: 12919 - DNA, 20 bp, synthetic construct
  misc_feature 1..20: note = Target B2M Sequence complement
  source 1..20: mol_type = other DNA
tttgttataatgaatgaaac

SEQ ID NO: 12920 - DNA, 20 bp, synthetic construct
  misc_feature 1..20: note = Target B2M Sequence complement
  source 1..20: mol_type = other DNA
ttgttataatgaatgaaaca

SEQ ID NO: 12921 - DNA, 20 bp, synthetic construct
  misc_feature 1..20: note = Target B2M Sequence complement
  source 1..20: mol_type = other DNA
tgttataatgaatgaaacat

SEQ ID NO: 12922 - DNA, 20 bp, synthetic construct
  misc_feature 1..20: note = Target B2M Sequence complement
  source 1..20: mol_type = other DNA
gttataatgaatgaaacatt

SEQ ID NO: 12923 - DNA, 20 bp, synthetic construct
  misc_feature 1..20: note = Target B2M Sequence complement
  source 1..20: mol_type = other DNA
ttataatgaatgaaacattt

SEQ ID NO: 12924 - DNA, 20 bp, synthetic construct
  misc_feature 1..20: note = Target B2M Sequence complement
  source 1..20: mol_type = other DNA
tataatgaatgaaacatttt

SEQ ID NO: 12925 - DNA, 20 bp, synthetic construct
  misc_feature 1..20: note = Target B2M Sequence complement
  source 1..20: mol_type = other DNA
ataatgaatgaaacattttg

SEQ ID NO: 12926 - DNA, 20 bp, synthetic construct
  misc_feature 1..20: note = Target B2M Sequence complement
  source 1..20: mol_type = other DNA
taatgaatgaaacattttgt

SEQ ID NO: 12927 - DNA, 20 bp, synthetic construct
  misc_feature 1..20: note = Target B2M Sequence complement
  source 1..20: mol_type = other DNA
aatgaaacattttgtcatat

SEQ ID NO: 12928 - DNA, 20 bp, synthetic construct
  misc_feature 1..20: note = Target B2M Sequence complement
  source 1..20: mol_type = other DNA
atgaaacattttgtcatata

SEQ ID NO: 12929 - DNA, 20 bp, synthetic construct
  misc_feature 1..20: note = Target B2M Sequence complement
  source 1..20: mol_type = other DNA
tgaaacattttgtcatataa

SEQ ID NO: 12930 - DNA, 20 bp, synthetic construct
  misc_feature 1..20: note = Target B2M Sequence complement
  source 1..20: mol_type = other DNA
aaacattttgtcatataaga

SEQ ID NO: 12931 - DNA, 20 bp, synthetic construct
  misc_feature 1..20: note = Target B2M Sequence complement
  source 1..20: mol_type = other DNA
aacattttgtcatataagat

SEQ ID NO: 12932 - DNA, 20 bp, synthetic construct
  misc_feature 1..20: note = Target B2M Sequence complement
  source 1..20: mol_type = other DNA
acattttgtcatataagatt

SEQ ID NO: 12933 - DNA, 20 bp, synthetic construct
  misc_feature 1..20: note = Target B2M Sequence complement
  source 1..20: mol_type = other DNA
attttgtcatataagattca

SEQ ID NO: 12934 - DNA, 20 bp, synthetic construct
  misc_feature 1..20: note = Target B2M Sequence complement
  source 1..20: mol_type = other DNA
ttttgtcatataagattcat

SEQ ID NO: 12935 - DNA, 20 bp, synthetic construct
  misc_feature 1..20: note = Target B2M Sequence complement
  source 1..20: mol_type = other DNA
tttgtcatataagattcata

SEQ ID NO: 12936 - DNA, 20 bp, synthetic construct
  misc_feature 1..20: note = Target B2M Sequence complement
  source 1..20: mol_type = other DNA
ttgtcatataagattcatat

SEQ ID NO: 12937 - DNA, 20 bp, synthetic construct
  misc_feature 1..20: note = Target B2M Sequence complement
  source 1..20: mol_type = other DNA
tgtcatataagattcatatt

SEQ ID NO: 12938 - DNA, 20 bp, synthetic construct
  misc_feature 1..20: note = Target B2M Sequence complement
  source 1..20: mol_type = other DNA
gtcatataagattcatattt

SEQ ID NO: 12939 - DNA, 20 bp, synthetic construct
  misc_feature 1..20: note = Target B2M Sequence complement
  source 1..20: mol_type = other DNA
tcatataagattcatattta

SEQ ID NO: 12940 - DNA, 20 bp, synthetic construct
  misc_feature 1..20: note = Target B2M Sequence complement
  source 1..20: mol_type = other DNA
catataagattcatatttac

SEQ ID NO: 12941 - DNA, 20 bp, synthetic construct
  misc_feature 1..20: note = Target B2M Sequence complement
  source 1..20: mol_type = other DNA
atataagattcatatttact

SEQ ID NO: 12942 - DNA, 20 bp, synthetic construct
  misc_feature 1..20: note = Target B2M Sequence complement
  source 1..20: mol_type = other DNA
tataagattcatatttactt

SEQ ID NO: 12943 - DNA, 20 bp, synthetic construct
  misc_feature 1..20: note = Target B2M Sequence complement
  source 1..20: mol_type = other DNA
ataagattcatatttacttc

SEQ ID NO: 12944 - DNA, 20 bp, synthetic construct
  misc_feature 1..20: note = Target B2M Sequence complement
  source 1..20: mol_type = other DNA
taagattcatatttacttct

SEQ ID NO: 12945 - DNA, 20 bp, synthetic construct
  misc_feature 1..20: note = Target B2M Sequence complement
  source 1..20: mol_type = other DNA
aagattcatatttacttctt

SEQ ID NO: 12946 - DNA, 20 bp, synthetic construct
  misc_feature 1..20: note = Target B2M Sequence complement
  source 1..20: mol_type = other DNA
agattcatatttacttctta

SEQ ID NO: 12947 - DNA, 20 bp, synthetic construct
  misc_feature 1..20: note = Target B2M Sequence complement
  source 1..20: mol_type = other DNA
gattcatatttacttcttat

SEQ ID NO: 12948 - DNA, 20 bp, synthetic construct
  misc_feature 1..20: note = Target B2M Sequence complement
  source 1..20: mol_type = other DNA
attcatatttacttcttata

SEQ ID NO: 12949 - DNA, 20 bp, synthetic construct
  misc_feature 1..20: note = Target B2M Sequence complement
  source 1..20: mol_type = other DNA
ttcatatttacttcttatac

SEQ ID NO: 12950 - DNA, 20 bp, synthetic construct
  misc_feature 1..20: note = Target B2M Sequence complement
  source 1..20: mol_type = other DNA
tcatatttacttcttataca

SEQ ID NO: 12951 - DNA, 20 bp, synthetic construct
  misc_feature 1..20: note = Target B2M Sequence complement
  source 1..20: mol_type = other DNA
catatttacttcttatacat

SEQ ID NO: 12952 - DNA, 20 bp, synthetic construct
  misc_feature 1..20: note = Target B2M Sequence complement
  source 1..20: mol_type = other DNA
atatttacttcttatacatt

SEQ ID NO: 12953 - DNA, 20 bp, synthetic construct
  misc_feature 1..20: note = Target B2M Sequence complement
  source 1..20: mol_type = other DNA
tatttacttcttatacattt

SEQ ID NO: 12954 - DNA, 20 bp, synthetic construct
  misc_feature 1..20: note = Target B2M Sequence complement
  source 1..20: mol_type = other DNA
atttacttcttatacatttg

SEQ ID NO: 12955 - DNA, 20 bp, synthetic construct
  misc_feature 1..20: note = Target B2M Sequence complement
  source 1..20: mol_type = other DNA
tttacttcttatacatttga

SEQ ID NO: 12956 - DNA, 20 bp, synthetic construct
  misc_feature 1..20: note = Target B2M Sequence complement
  source 1..20: mol_type = other DNA
ttacttcttatacatttgat

SEQ ID NO: 12957 - DNA, 20 bp, synthetic construct
  misc_feature 1..20: note = Target B2M Sequence complement
  source 1..20: mol_type = other DNA
tacttcttatacatttgata

SEQ ID NO: 12958 - DNA, 20 bp, synthetic construct
  misc_feature 1..20: note = Target B2M Sequence complement
  source 1..20: mol_type = other DNA
acttcttatacatttgataa

SEQ ID NO: 12959 - DNA, 20 bp, synthetic construct
  misc_feature 1..20: note = Target B2M Sequence complement
  source 1..20: mol_type = other DNA
cttcttatacatttgataaa

SEQ ID NO: 12960 - DNA, 20 bp, synthetic construct
  misc_feature 1..20: note = Target B2M Sequence complement
  source 1..20: mol_type = other DNA
ttcttatacatttgataaag

SEQ ID NO: 12961 - DNA, 20 bp, synthetic construct
  misc_feature 1..20: note = Target B2M Sequence complement
  source 1..20: mol_type = other DNA
tcttatacatttgataaagt

SEQ ID NO: 12962 - DNA, 20 bp, synthetic construct
  misc_feature 1..20: note = Target B2M Sequence complement
  source 1..20: mol_type = other DNA
cttatacatttgataaagta

SEQ ID NO: 12963 - DNA, 20 bp, synthetic construct
  misc_feature 1..20: note = Target B2M Sequence complement
  source 1..20: mol_type = other DNA
ttatacatttgataaagtaa

SEQ ID NO: 12964 - DNA, 20 bp, synthetic construct
  misc_feature 1..20: note = Target B2M Sequence complement
  source 1..20: mol_type = other DNA
tatacatttgataaagtaag

SEQ ID NO: 12965 - DNA, 20 bp, synthetic construct
  misc_feature 1..20: note = Target B2M Sequence complement
  source 1..20: mol_type = other DNA
ttaatctggtttatttttgt

SEQ ID NO: 12966 - DNA, 20 bp, synthetic construct
  misc_feature 1..20: note = Target B2M Sequence complement
  source 1..20: mol_type = other DNA
taatctggtttatttttgtt

SEQ ID NO: 12967 - DNA, 20 bp, synthetic construct
  misc_feature 1..20: note = Target B2M Sequence complement
  source 1..20: mol_type = other DNA
cacaagttaaataaatcata

SEQ ID NO: 12968 - DNA, 20 bp, synthetic construct
  misc_feature 1..20: note = Target B2M Sequence complement
  source 1..20: mol_type = other DNA
acaagttaaataaatcataa

SEQ ID NO: 12969 - DNA, 20 bp, synthetic construct
  misc_feature 1..20: note = Target B2M Sequence complement
  source 1..20: mol_type = other DNA
caagttaaataaatcataaa

SEQ ID NO: 12970 - DNA, 20 bp, synthetic construct
  misc_feature 1..20: note = Target B2M Sequence complement
  source 1..20: mol_type = other DNA
aagttaaataaatcataaaa

SEQ ID NO: 12971 - DNA, 20 bp, synthetic construct
  misc_feature 1..20: note = Target B2M Sequence complement
  source 1..20: mol_type = other DNA
agttaaataaatcataaaac

SEQ ID NO: 12972 - DNA, 20 bp, synthetic construct
  misc_feature 1..20: note = Target B2M Sequence complement
  source 1..20: mol_type = other DNA
gttaaataaatcataaaact

SEQ ID NO: 12973 - DNA, 20 bp, synthetic construct
  misc_feature 1..20: note = Target B2M Sequence complement
  source 1..20: mol_type = other DNA
ttaaataaatcataaaactt

SEQ ID NO: 12974 - DNA, 20 bp, synthetic construct
  misc_feature 1..20: note = Target B2M Sequence complement
  source 1..20: mol_type = other DNA
taaataaatcataaaacttg

SEQ ID NO: 12975 - DNA, 20 bp, synthetic construct
  misc_feature 1..20: note = Target B2M Sequence complement
  source 1..20: mol_type = other DNA
aaataaatcataaaacttga

SEQ ID NO: 12976 - DNA, 21 bp, synthetic construct
  misc_feature 1..21: note = Target B2M Sequence complement
  source 1..21: mol_type = other DNA
gaagctgacagcattcgggcc

SEQ ID NO: 12977 - DNA, 21 bp, synthetic construct
  misc_feature 1..21: note = Target B2M Sequence complement
  source 1..21: mol_type = other DNA
aagctgacagcattcgggccg

SEQ ID NO: 12978 - DNA, 21 bp, synthetic construct
  misc_feature 1..21: note = Target B2M Sequence complement
  source 1..21: mol_type = other DNA
agctgacagcattcgggccga

SEQ ID NO: 12979 - DNA, 21 bp, synthetic construct
  misc_feature 1..21: note = Target B2M Sequence complement
  source 1..21: mol_type = other DNA
gctgacagcattcgggccgag

SEQ ID NO: 12980 - DNA, 21 bp, synthetic construct
  misc_feature 1..21: note = Target B2M Sequence complement
  source 1..21: mol_type = other DNA
ctgacagcattcgggccgaga

SEQ ID NO: 12981 - DNA, 21 bp, synthetic construct
  misc_feature 1..21: note = Target B2M Sequence complement
  source 1..21: mol_type = other DNA
gacagcattcgggccgagatg

SEQ ID NO: 12982 - DNA, 21 bp, synthetic construct
  misc_feature 1..21: note = Target B2M Sequence complement
  source 1..21: mol_type = other DNA
cagcattcgggccgagatgtc

SEQ ID NO: 12983 - DNA, 21 bp, synthetic construct
  misc_feature 1..21: note = Target B2M Sequence complement
  source 1..21: mol_type = other DNA
gcattcgggccgagatgtctc

SEQ ID NO: 12984 - DNA, 21 bp, synthetic construct
  misc_feature 1..21: note = Target B2M Sequence complement
  source 1..21: mol_type = other DNA
cattcgggccgagatgtctcg

SEQ ID NO: 12985 - DNA, 21 bp, synthetic construct
  misc_feature 1..21: note = Target B2M Sequence complement
  source 1..21: mol_type = other DNA
attcgggccgagatgtctcgc

SEQ ID NO: 12986 - DNA, 21 bp, synthetic construct
  misc_feature 1..21: note = Target B2M Sequence complement
  source 1..21: mol_type = other DNA
ttcgggccgagatgtctcgct

SEQ ID NO: 12987 - DNA, 21 bp, synthetic construct
  misc_feature 1..21: note = Target B2M Sequence complement
  source 1..21: mol_type = other DNA
tcgggccgagatgtctcgctc

SEQ ID NO: 12988 - DNA, 21 bp, synthetic construct
  misc_feature 1..21: note = Target B2M Sequence complement
  source 1..21: mol_type = other DNA
cgggccgagatgtctcgctcc

SEQ ID NO: 12989 - DNA, 21 bp, synthetic construct
  misc_feature 1..21: note = Target B2M Sequence complement
  source 1..21: mol_type = other DNA
gggccgagatgtctcgctccg

SEQ ID NO: 12990 - DNA, 21 bp, synthetic construct
  misc_feature 1..21: note = Target B2M Sequence complement
  source 1..21: mol_type = other DNA
ggccgagatgtctcgctccgt

SEQ ID NO: 12991 - DNA, 21 bp, synthetic construct
  misc_feature 1..21: note = Target B2M Sequence complement
  source 1..21: mol_type = other DNA
gccgagatgtctcgctccgtg

SEQ ID NO: 12992 - DNA, 21 bp, synthetic construct
  misc_feature 1..21: note = Target B2M Sequence complement
  source 1..21: mol_type = other DNA
ccgagatgtctcgctccgtgg

SEQ ID NO: 12993 - DNA, 21 bp, synthetic construct
  misc_feature 1..21: note = Target B2M Sequence complement
  source 1..21: mol_type = other DNA
cgagatgtctcgctccgtggc

SEQ ID NO: 12994 - DNA, 21 bp, synthetic construct
  misc_feature 1..21: note = Target B2M Sequence complement
  source 1..21: mol_type = other DNA
gagatgtctcgctccgtggcc

SEQ ID NO: 12995 - DNA, 21 bp, synthetic construct
  misc_feature 1..21: note = Target B2M Sequence complement
  source 1..21: mol_type = other DNA
agatgtctcgctccgtggcct

SEQ ID NO: 12996 - DNA, 21 bp, synthetic construct
  misc_feature 1..21: note = Target B2M Sequence complement
  source 1..21: mol_type = other DNA
gatgtctcgctccgtggcctt

SEQ ID NO: 12997 - DNA, 21 bp, synthetic construct
  misc_feature 1..21: note = Target B2M Sequence complement
  source 1..21: mol_type = other DNA
tgtctcgctccgtggccttag

SEQ ID NO: 12998 - DNA, 21 bp, synthetic construct
  misc_feature 1..21: note = Target B2M Sequence complement
  source 1..21: mol_type = other DNA
gtctcgctccgtggccttagc

SEQ ID NO: 12999 - DNA, 21 bp, synthetic construct
  misc_feature 1..21: note = Target B2M Sequence complement
  source 1..21: mol_type = other DNA
tctcgctccgtggccttagct

SEQ ID NO: 13000 - DNA, 21 bp, synthetic construct
  misc_feature 1..21: note = Target B2M Sequence complement
  source 1..21: mol_type = other DNA
ctcgctccgtggccttagctg

SEQ ID NO: 13001 - DNA, 21 bp, synthetic construct
  misc_feature 1..21: note = Target B2M Sequence complement
  source 1..21: mol_type = other DNA
tcgctccgtggccttagctgt

SEQ ID NO: 13002 - DNA, 21 bp, synthetic construct
  misc_feature 1..21: note = Target B2M Sequence complement
  source 1..21: mol_type = other DNA
cgctccgtggccttagctgtg

SEQ ID NO: 13003 - DNA, 21 bp, synthetic construct
  misc_feature 1..21: note = Target B2M Sequence complement
  source 1..21: mol_type = other DNA
gctccgtggccttagctgtgc

SEQ ID NO: 13004 - DNA, 21 bp, synthetic construct
  misc_feature 1..21: note = Target B2M Sequence complement
  source 1..21: mol_type = other DNA
ctccgtggccttagctgtgct

SEQ ID NO: 13005 - DNA, 21 bp, synthetic construct
  misc_feature 1..21: note = Target B2M Sequence complement
  source 1..21: mol_type = other DNA
tccgtggccttagctgtgctc

SEQ ID NO: 13006 - DNA, 21 bp, synthetic construct
  misc_feature 1..21: note = Target B2M Sequence complement
  source 1..21: mol_type = other DNA
ccgtggccttagctgtgctcg

SEQ ID NO: 13007 - DNA, 21 bp, synthetic construct
  misc_feature 1..21: note = Target B2M Sequence complement
  source 1..21: mol_type = other DNA
cgtggccttagctgtgctcgc

SEQ ID NO: 13008 - DNA, 21 bp, synthetic construct
  misc_feature 1..21: note = Target B2M Sequence complement
  source 1..21: mol_type = other DNA
gtggccttagctgtgctcgcg

SEQ ID NO: 13009 - DNA, 21 bp, synthetic construct
  misc_feature 1..21: note = Target B2M Sequence complement
  source 1..21: mol_type = other DNA
tggccttagctgtgctcgcgc

SEQ ID NO: 13010 - DNA, 21 bp, synthetic construct
  misc_feature 1..21: note = Target B2M Sequence complement
  source 1..21: mol_type = other DNA
ggccttagctgtgctcgcgct

SEQ ID NO: 13011 - DNA, 21 bp, synthetic construct
  misc_feature 1..21: note = Target B2M Sequence complement
  source 1..21: mol_type = other DNA
gccttagctgtgctcgcgcta

SEQ ID NO: 13012 - DNA, 21 bp, synthetic construct
  misc_feature 1..21: note = Target B2M Sequence complement
  source 1..21: mol_type = other DNA
ccttagctgtgctcgcgctac

SEQ ID NO: 13013 - DNA, 21 bp, synthetic construct
  misc_feature 1..21: note = Target B2M Sequence complement
  source 1..21: mol_type = other DNA
agctgtgctcgcgctactctc

SEQ ID NO: 13014 - DNA, 21 bp, synthetic construct
  misc_feature 1..21: note = Target B2M Sequence complement
  source 1..21: mol_type = other DNA
gctgtgctcgcgctactctct

SEQ ID NO: 13015 - DNA, 21 bp, synthetic construct
  misc_feature 1..21: note = Target B2M Sequence complement
  source 1..21: mol_type = other DNA
ctgtgctcgcgctactctctc

SEQ ID NO: 13016 - DNA, 21 bp, synthetic construct
  misc_feature 1..21: note = Target B2M Sequence complement
  source 1..21: mol_type = other DNA
ctctctttctggcctggaggc

SEQ ID NO: 13017 - DNA, 21 bp, synthetic construct
  misc_feature 1..21: note = Target B2M Sequence complement
  source 1..21: mol_type = other DNA
tctggcctggaggctatccag

SEQ ID NO: 13018 - DNA, 21 bp, synthetic construct
  misc_feature 1..21: note = Target B2M Sequence complement
  source 1..21: mol_type = other DNA
ctggcctggaggctatccagc

SEQ ID NO: 13019 - DNA, 21 bp, synthetic construct
  misc_feature 1..21: note = Target B2M Sequence complement
  source 1..21: mol_type = other DNA
tggcctggaggctatccagcg

SEQ ID NO: 13020 - DNA, 21 bp, synthetic construct
  misc_feature 1..21: note = Target B2M Sequence complement
  source 1..21: mol_type = other DNA
ggcctggaggctatccagcgt

SEQ ID NO: 13021 - DNA, 21 bp, synthetic construct
  misc_feature 1..21: note = Target B2M Sequence complement
  source 1..21: mol_type = other DNA
gcctggaggctatccagcgta

SEQ ID NO: 13022 - DNA, 21 bp, synthetic construct
  misc_feature 1..21: note = Target B2M Sequence complement
  source 1..21: mol_type = other DNA
cctggaggctatccagcgtac

SEQ ID NO: 13023 - DNA, 21 bp, synthetic construct
  misc_feature 1..21: note = Target B2M Sequence complement
  source 1..21: mol_type = other DNA
ggaggctatccagcgtactcc

SEQ ID NO: 13024 - DNA, 21 bp, synthetic construct
  misc_feature 1..21: note = Target B2M Sequence complement
  source 1..21: mol_type = other DNA
gcctgccgtgtgaaccatgtg

SEQ ID NO: 13025 - DNA, 21 bp, synthetic construct
  misc_feature 1..21: note = Target B2M Sequence complement
  source 1..21: mol_type = other DNA
ttgcttgctttttaatattga

SEQ ID NO: 13026 - DNA, 21 bp, synthetic construct
  misc_feature 1..21: note = Target B2M Sequence complement
  source 1..21: mol_type = other DNA
tgcttgctttttaatattgat

SEQ ID NO: 13027 - DNA, 21 bp, synthetic construct
  misc_feature 1..21: note = Target B2M Sequence complement
  source 1..21: mol_type = other DNA
gcttgctttttaatattgata

SEQ ID NO: 13028 - DNA, 21 bp, synthetic construct
  misc_feature 1..21: note = Target B2M Sequence complement
  source 1..21: mol_type = other DNA
cttgctttttaatattgatat

SEQ ID NO: 13029 - DNA, 21 bp, synthetic construct
  misc_feature 1..21: note = Target B2M Sequence complement
  source 1..21: mol_type = other DNA
ttgctttttaatattgatatg

SEQ ID NO: 13030 - DNA, 21 bp, synthetic construct
  misc_feature 1..21: note = Target B2M Sequence complement
  source 1..21: mol_type = other DNA
tgctttttaatattgatatgc

SEQ ID NO: 13031 - DNA, 21 bp, synthetic construct
  misc_feature 1..21: note = Target B2M Sequence complement
  source 1..21: mol_type = other DNA
gctttttaatattgatatgct

SEQ ID NO: 13032 - DNA, 21 bp, synthetic construct
  misc_feature 1..21: note = Target B2M Sequence complement
  source 1..21: mol_type = other DNA
ctttttaatattgatatgctt

SEQ ID NO: 13033 - DNA, 21 bp, synthetic construct
  misc_feature 1..21: note = Target B2M Sequence complement
  source 1..21: mol_type = other DNA
tttttaatattgatatgctta

SEQ ID NO: 13034 - DNA, 21 bp, synthetic construct
  misc_feature 1..21: note = Target B2M Sequence complement
  source 1..21: mol_type = other DNA
ttttaatattgatatgcttat

SEQ ID NO: 13035 - DNA, 21 bp, synthetic construct
  misc_feature 1..21: note = Target B2M Sequence complement
  source 1..21: mol_type = other DNA
tttaatattgatatgcttata

SEQ ID NO: 13036 - DNA, 21 bp, synthetic construct
  misc_feature 1..21: note = Target B2M Sequence complement
  source 1..21: mol_type = other DNA
ttaatattgatatgcttatac

SEQ ID NO: 13037 - DNA, 21 bp, synthetic construct
  misc_feature 1..21: note = Target B2M Sequence complement
  source 1..21: mol_type = other DNA
taatattgatatgcttataca

SEQ ID NO: 13038 - DNA, 21 bp, synthetic construct
  misc_feature 1..21: note = Target B2M Sequence complement
  source 1..21: mol_type = other DNA
aatattgatatgcttatacac

SEQ ID NO: 13039 - DNA, 21 bp, synthetic construct
  misc_feature 1..21: note = Target B2M Sequence complement
  source 1..21: mol_type = other DNA
atattgatatgcttatacact

SEQ ID NO: 13040 - DNA, 21 bp, synthetic construct
  misc_feature 1..21: note = Target B2M Sequence complement
  source 1..21: mol_type = other DNA
tattgatatgcttatacactt

SEQ ID NO: 13041 - DNA, 21 bp, synthetic construct
  misc_feature 1..21: note = Target B2M Sequence complement
  source 1..21: mol_type = other DNA
attgatatgcttatacactta

SEQ ID NO: 13042 - DNA, 21 bp, synthetic construct
  misc_feature 1..21: note = Target B2M Sequence complement
  source 1..21: mol_type = other DNA
acaaaatgtagggttataata

SEQ ID NO: 13043 - DNA, 21 bp, synthetic construct
  misc_feature 1..21: note = Target B2M Sequence complement
  source 1..21: mol_type = other DNA
caaaatgtagggttataataa

SEQ ID NO: 13044 - DNA, 21 bp, synthetic construct
  misc_feature 1..21: note = Target B2M Sequence complement
  source 1..21: mol_type = other DNA
aaaatgtagggttataataat

SEQ ID NO: 13045 - DNA, 21 bp, synthetic construct
  misc_feature 1..21: note = Target B2M Sequence complement
  source 1..21: mol_type = other DNA
aaatgtagggttataataatg

SEQ ID NO: 13046 - DNA, 21 bp, synthetic construct
  misc_feature 1..21: note = Target B2M Sequence complement
  source 1..21: mol_type = other DNA
aatgtagggttataataatgt

SEQ ID NO: 13047 - DNA, 21 bp, synthetic construct
  misc_feature 1..21: note = Target B2M Sequence complement
  source 1..21: mol_type = other DNA
atgtagggttataataatgtt

SEQ ID NO: 13048 - DNA, 21 bp, synthetic construct
  misc_feature 1..21: note = Target B2M Sequence complement
  source 1..21: mol_type = other DNA
tgtagggttataataatgtta

SEQ ID NO: 13049 - DNA, 21 bp, synthetic construct
  misc_feature 1..21: note = Target B2M Sequence complement
  source 1..21: mol_type = other DNA
gtagggttataataatgttaa

SEQ ID NO: 13050 - DNA, 21 bp, synthetic construct
  misc_feature 1..21: note = Target B2M Sequence complement
  source 1..21: mol_type = other DNA
tagggttataataatgttaac

SEQ ID NO: 13051 - DNA, 21 bp, synthetic construct
  misc_feature 1..21: note = Target B2M Sequence complement
  source 1..21: mol_type = other DNA
agggttataataatgttaaca

SEQ ID NO: 13052 - DNA, 21 bp, synthetic construct
  misc_feature 1..21: note = Target B2M Sequence complement
  source 1..21: mol_type = other DNA
gggttataataatgttaacat

SEQ ID NO: 13053 - DNA, 21 bp, synthetic construct
  misc_feature 1..21: note = Target B2M Sequence complement
  source 1..21: mol_type = other DNA
ggttataataatgttaacatg

SEQ ID NO: 13054 - DNA, 21 bp, synthetic construct
  misc_feature 1..21: note = Target B2M Sequence complement
  source 1..21: mol_type = other DNA
gttataataatgttaacatgg

SEQ ID NO: 13055 - DNA, 21 bp, synthetic construct
  misc_feature 1..21: note = Target B2M Sequence complement
  source 1..21: mol_type = other DNA
ttataataatgttaacatgga

SEQ ID NO: 13056 - DNA, 21 bp, synthetic construct
  misc_feature 1..21: note = Target B2M Sequence complement
  source 1..21: mol_type = other DNA
tataataatgttaacatggac

SEQ ID NO: 13057 - DNA, 21 bp, synthetic construct
  misc_feature 1..21: note = Target B2M Sequence complement
  source 1..21: mol_type = other DNA
ataataatgttaacatggaca

SEQ ID NO: 13058 - DNA, 21 bp, synthetic construct
  misc_feature 1..21: note = Target B2M Sequence complement
  source 1..21: mol_type = other DNA
taataatgttaacatggacat

SEQ ID NO: 13059 - DNA, 21 bp, synthetic construct
  misc_feature 1..21: note = Target B2M Sequence complement
  source 1..21: mol_type = other DNA
gacatgatcttctttataatt

SEQ ID NO: 13060 - DNA, 21 bp, synthetic construct
  misc_feature 1..21: note = Target B2M Sequence complement
  source 1..21: mol_type = other DNA
acatgatcttctttataattc

SEQ ID NO: 13061 - DNA, 21 bp, synthetic construct
  misc_feature 1..21: note = Target B2M Sequence complement
  source 1..21: mol_type = other DNA
catgatcttctttataattct

SEQ ID NO: 13062 - DNA, 21 bp, synthetic construct
  misc_feature 1..21: note = Target B2M Sequence complement
  source 1..21: mol_type = other DNA
atgatcttctttataattcta

SEQ ID NO: 13063 - DNA, 21 bp, synthetic construct
  misc_feature 1..21: note = Target B2M Sequence complement
  source 1..21: mol_type = other DNA
tgatcttctttataattctac

SEQ ID NO: 13064 - DNA, 21 bp, synthetic construct
  misc_feature 1..21: note = Target B2M Sequence complement
  source 1..21: mol_type = other DNA
gatcttctttataattctact

SEQ ID NO: 13065 - DNA, 21 bp, synthetic construct
  misc_feature 1..21: note = Target B2M Sequence complement
  source 1..21: mol_type = other DNA
atcttctttataattctactt

SEQ ID NO: 13066 - DNA, 21 bp, synthetic construct
  misc_feature 1..21: note = Target B2M Sequence complement
  source 1..21: mol_type = other DNA
tcttctttataattctacttt

SEQ ID NO: 13067 - DNA, 21 bp, synthetic construct
  misc_feature 1..21: note = Target B2M Sequence complement
  source 1..21: mol_type = other DNA
cttctttataattctactttg

SEQ ID NO: 13068 - DNA, 21 bp, synthetic construct
  misc_feature 1..21: note = Target B2M Sequence complement
  source 1..21: mol_type = other DNA
ttctttataattctactttga

SEQ ID NO: 13069 - DNA, 21 bp, synthetic construct
  misc_feature 1..21: note = Target B2M Sequence complement
  source 1..21: mol_type = other DNA
tctttataattctactttgag

SEQ ID NO: 13070 - DNA, 21 bp, synthetic construct
  misc_feature 1..21: note = Target B2M Sequence complement
  source 1..21: mol_type = other DNA
ctttataattctactttgagt

SEQ ID NO: 13071 - DNA, 21 bp, synthetic construct
  misc_feature 1..21: note = Target B2M Sequence complement
  source 1..21: mol_type = other DNA
tttataattctactttgagtg

SEQ ID NO: 13072 - DNA, 21 bp, synthetic construct
  misc_feature 1..21: note = Target B2M Sequence complement
  source 1..21: mol_type = other DNA
ctgagcaggttgctccacagg

SEQ ID NO: 13073 - DNA, 21 bp, synthetic construct
  misc_feature 1..21: note = Target B2M Sequence complement
  source 1..21: mol_type = other DNA
gcaggttgctccacaggtagc

SEQ ID NO: 13074 - DNA, 21 bp, synthetic construct
  misc_feature 1..21: note = Target B2M Sequence complement
  source 1..21: mol_type = other DNA
ccacaggtagctctaggaggg

SEQ ID NO: 13075 - DNA, 21 bp, synthetic construct
  misc_feature 1..21: note = Target B2M Sequence complement
  source 1..21: mol_type = other DNA
cacaggtagctctaggagggc

SEQ ID NO: 13076 - DNA, 21 bp, synthetic construct
  misc_feature 1..21: note = Target B2M Sequence complement
  source 1..21: mol_type = other DNA
caggtagctctaggagggctg

SEQ ID NO: 13077 - DNA, 21 bp, synthetic construct
  misc_feature 1..21: note = Target B2M Sequence complement
  source 1..21: mol_type = other DNA
aggtagctctaggagggctgg

SEQ ID NO: 13078 - DNA, 21 bp, synthetic construct
  misc_feature 1..21: note = Target B2M Sequence complement
  source 1..21: mol_type = other DNA
ggtagctctaggagggctggc

SEQ ID NO: 13079 - DNA, 21 bp, synthetic construct
  misc_feature 1..21: note = Target B2M Sequence complement
  source 1..21: mol_type = other DNA
gtagctctaggagggctggca

SEQ ID NO: 13080 - DNA, 21 bp, synthetic construct
  misc_feature 1..21: note = Target B2M Sequence complement
  source 1..21: mol_type = other DNA
agctctaggagggctggcaac

SEQ ID NO: 13081 - DNA, 21 bp, synthetic construct
  misc_feature 1..21: note = Target B2M Sequence complement
  source 1..21: mol_type = other DNA
gctctaggagggctggcaact

SEQ ID NO: 13082 - DNA, 21 bp, synthetic construct
  misc_feature 1..21: note = Target B2M Sequence complement
  source 1..21: mol_type = other DNA
ggagggctggcaacttagagg

SEQ ID NO: 13083 - DNA, 21 bp, synthetic construct
  misc_feature 1..21: note = Target B2M Sequence complement
  source 1..21: mol_type = other DNA
gggctggcaacttagaggtgg

SEQ ID NO: 13084 - DNA, 21 bp, synthetic construct
  misc_feature 1..21: note = Target B2M Sequence complement
  source 1..21: mol_type = other DNA
ggctggcaacttagaggtggg

SEQ ID NO: 13085 - DNA, 21 bp, synthetic construct
  misc_feature 1..21: note = Target B2M Sequence complement
  source 1..21: mol_type = other DNA
gctggcaacttagaggtgggg

SEQ ID NO: 13086 - DNA, 21 bp, synthetic construct
  misc_feature 1..21: note = Target B2M Sequence complement
  source 1..21: mol_type = other DNA
ggcaacttagaggtggggagc

SEQ ID NO: 13087 - DNA, 21 bp, synthetic construct
  misc_feature 1..21: note = Target B2M Sequence complement
  source 1..21: mol_type = other DNA
aaagcttgttaagatagttaa

SEQ ID NO: 13088 - DNA, 21 bp, synthetic construct
  misc_feature 1..21: note = Target B2M Sequence complement
  source 1..21: mol_type = other DNA
cataagttaacttccaattta

SEQ ID NO: 13089 - DNA, 21 bp, synthetic construct
  misc_feature 1..21: note = Target B2M Sequence complement
  source 1..21: mol_type = other DNA
ataagttaacttccaatttac

SEQ ID NO: 13090 - DNA, 21 bp, synthetic construct
  misc_feature 1..21: note = Target B2M Sequence complement
  source 1..21: mol_type = other DNA
taagttaacttccaatttaca

SEQ ID NO: 13091 - DNA, 21 bp, synthetic construct
  misc_feature 1..21: note = Target B2M Sequence complement
  source 1..21: mol_type = other DNA
aagttaacttccaatttacat

SEQ ID NO: 13092 - DNA, 21 bp, synthetic construct
  misc_feature 1..21: note = Target B2M Sequence complement
  source 1..21: mol_type = other DNA
agttaacttccaatttacata

SEQ ID NO: 13093 - DNA, 21 bp, synthetic construct
  misc_feature 1..21: note = Target B2M Sequence complement
  source 1..21: mol_type = other DNA
ttaacttccaatttacatact

SEQ ID NO: 13094 - DNA, 21 bp, synthetic construct
  misc_feature 1..21: note = Target B2M Sequence complement
  source 1..21: mol_type = other DNA
ggggaaaatttagaaatataa

SEQ ID NO: 13095 - DNA, 21 bp, synthetic construct
  misc_feature 1..21: note = Target B2M Sequence complement
  source 1..21: mol_type = other DNA
gggaaaatttagaaatataat

SEQ ID NO: 13096 - DNA, 21 bp, synthetic construct
  misc_feature 1..21: note = Target B2M Sequence complement
  source 1..21: mol_type = other DNA
ggaaaatttagaaatataatt

SEQ ID NO: 13097 - DNA, 21 bp, synthetic construct
  misc_feature 1..21: note = Target B2M Sequence complement
  source 1..21: mol_type = other DNA
gaaaatttagaaatataattg

SEQ ID NO: 13098 - DNA, 21 bp, synthetic construct
  misc_feature 1..21: note = Target B2M Sequence complement
  source 1..21: mol_type = other DNA
aaaatttagaaatataattga

SEQ ID NO: 13099 - DNA, 21 bp, synthetic construct
  misc_feature 1..21: note = Target B2M Sequence complement
  source 1..21: mol_type = other DNA
aaatttagaaatataattgac

SEQ ID NO: 13100 - DNA, 21 bp, synthetic construct
  misc_feature 1..21: note = Target B2M Sequence complement
  source 1..21: mol_type = other DNA
aatttagaaatataattgaca

SEQ ID NO: 13101 - DNA, 21 bp, synthetic construct
  misc_feature 1..21: note = Target B2M Sequence complement
  source 1..21: mol_type = other DNA
atttagaaatataattgacag

SEQ ID NO: 13102 - DNA, 21 bp, synthetic construct
  misc_feature 1..21: note = Target B2M Sequence complement
  source 1..21: mol_type = other DNA
tttagaaatataattgacagg

SEQ ID NO: 13103 - DNA, 21 bp, synthetic construct
  misc_feature 1..21: note = Target B2M Sequence complement
  source 1..21: mol_type = other DNA
ttagaaatataattgacagga

SEQ ID NO: 13104 - DNA, 21 bp, synthetic construct
  misc_feature 1..21: note = Target B2M Sequence complement
  source 1..21: mol_type = other DNA
tagaaatataattgacaggat

SEQ ID NO: 13105 - DNA, 21 bp, synthetic construct
  misc_feature 1..21: note = Target B2M Sequence complement
  source 1..21: mol_type = other DNA
agaaatataattgacaggatt

SEQ ID NO: 13106 - DNA, 21 bp, synthetic construct
  misc_feature 1..21: note = Target B2M Sequence complement
  source 1..21: mol_type = other DNA
gaaatataattgacaggatta

SEQ ID NO: 13107 - DNA, 21 bp, synthetic construct
  misc_feature 1..21: note = Target B2M Sequence complement
  source 1..21: mol_type = other DNA
aaatataattgacaggattat

SEQ ID NO: 13108 - DNA, 21 bp, synthetic construct
  misc_feature 1..21: note = Target B2M Sequence complement
  source 1..21: mol_type = other DNA
aatataattgacaggattatt

SEQ ID NO: 13109 - DNA, 21 bp, synthetic construct
  misc_feature 1..21: note = Target B2M Sequence complement
  source 1..21: mol_type = other DNA
atataattgacaggattattg

SEQ ID NO: 13110 - DNA, 21 bp, synthetic construct
  misc_feature 1..21: note = Target B2M Sequence complement
  source 1..21: mol_type = other DNA
aggattattggaaatttgtta

SEQ ID NO: 13111 - DNA, 21 bp, synthetic construct
  misc_feature 1..21: note = Target B2M Sequence complement
  source 1..21: mol_type = other DNA
ggattattggaaatttgttat

SEQ ID NO: 13112 - DNA, 21 bp, synthetic construct
  misc_feature 1..21: note = Target B2M Sequence complement
  source 1..21: mol_type = other DNA
gattattggaaatttgttata

SEQ ID NO: 13113 - DNA, 21 bp, synthetic construct
  misc_feature 1..21: note = Target B2M Sequence complement
  source 1..21: mol_type = other DNA
attattggaaatttgttataa

SEQ ID NO: 13114 - DNA, 21 bp, synthetic construct
  misc_feature 1..21: note = Target B2M Sequence complement
  source 1..21: mol_type = other DNA
ttattggaaatttgttataat

SEQ ID NO: 13115 - DNA, 21 bp, synthetic construct
  misc_feature 1..21: note = Target B2M Sequence complement
  source 1..21: mol_type = other DNA
tattggaaatttgttataatg

SEQ ID NO: 13116 - DNA, 21 bp, synthetic construct
  misc_feature 1..21: note = Target B2M Sequence complement
  source 1..21: mol_type = other DNA
attggaaatttgttataatga

SEQ ID NO: 13117 - DNA, 21 bp, synthetic construct
  misc_feature 1..21: note = Target B2M Sequence complement
  source 1..21: mol_type = other DNA
ttggaaatttgttataatgaa

SEQ ID NO: 13118 - DNA, 21 bp, synthetic construct
  misc_feature 1..21: note = Target B2M Sequence complement
  source 1..21: mol_type = other DNA
tggaaatttgttataatgaat

SEQ ID NO: 13119 - DNA, 21 bp, synthetic construct
  misc_feature 1..21: note = Target B2M Sequence complement
  source 1..21: mol_type = other DNA
ggaaatttgttataatgaatg

SEQ ID NO: 13120 - DNA, 21 bp, synthetic construct
  misc_feature 1..21: note = Target B2M Sequence complement
  source 1..21: mol_type = other DNA
gaaatttgttataatgaatga

SEQ ID NO: 13121 - DNA, 21 bp, synthetic construct
  misc_feature 1..21: note = Target B2M Sequence complement
  source 1..21: mol_type = other DNA
aaatttgttataatgaatgaa

SEQ ID NO: 13122 - DNA, 21 bp, synthetic construct
  misc_feature 1..21: note = Target B2M Sequence complement
  source 1..21: mol_type = other DNA
aatttgttataatgaatgaaa

SEQ ID NO: 13123 - DNA, 21 bp, synthetic construct
  misc_feature 1..21: note = Target B2M Sequence complement
  source 1..21: mol_type = other DNA
atttgttataatgaatgaaac

SEQ ID NO: 13124 - DNA, 21 bp, synthetic construct
  misc_feature 1..21: note = Target B2M Sequence complement
  source 1..21: mol_type = other DNA
tttgttataatgaatgaaaca

SEQ ID NO: 13125 - DNA, 21 bp, synthetic construct
  misc_feature 1..21: note = Target B2M Sequence complement
  source 1..21: mol_type = other DNA
ttgttataatgaatgaaacat

SEQ ID NO: 13126 - DNA, 21 bp, synthetic construct
  misc_feature 1..21: note = Target B2M Sequence complement
  source 1..21: mol_type = other DNA
tgttataatgaatgaaacatt

SEQ ID NO: 13127 - DNA, 21 bp, synthetic construct
  misc_feature 1..21: note = Target B2M Sequence complement
  source 1..21: mol_type = other DNA
gttataatgaatgaaacattt

SEQ ID NO: 13128 - DNA, 21 bp, synthetic construct
  misc_feature 1..21: note = Target B2M Sequence complement
  source 1..21: mol_type = other DNA
ttataatgaatgaaacatttt

SEQ ID NO: 13129 - DNA, 21 bp, synthetic construct
  misc_feature 1..21: note = Target B2M Sequence complement
  source 1..21: mol_type = other DNA
tataatgaatgaaacattttg

SEQ ID NO: 13130 - DNA, 21 bp, synthetic construct
  misc_feature 1..21: note = Target B2M Sequence complement
  source 1..21: mol_type = other DNA
ataatgaatgaaacattttgt

SEQ ID NO: 13131 - DNA, 21 bp, synthetic construct
  misc_feature 1..21: note = Target B2M Sequence complement
  source 1..21: mol_type = other DNA
taatgaatgaaacattttgtc

SEQ ID NO: 13132 - DNA, 21 bp, synthetic construct
  misc_feature 1..21: note = Target B2M Sequence complement
  source 1..21: mol_type = other DNA
aatgaatgaaacattttgtca

SEQ ID NO: 13133 - DNA, 21 bp, synthetic construct
  misc_feature 1..21: note = Target B2M Sequence complement
  source 1..21: mol_type = other DNA
atgaatgaaacattttgtcat

SEQ ID NO: 13134 - DNA, 21 bp, synthetic construct
  misc_feature 1..21: note = Target B2M Sequence complement
  source 1..21: mol_type = other DNA
tgaatgaaacattttgtcata

SEQ ID NO: 13135 - DNA, 21 bp, synthetic construct
  misc_feature 1..21: note = Target B2M Sequence complement
  source 1..21: mol_type = other DNA
gaatgaaacattttgtcatat

SEQ ID NO: 13136 - DNA, 21 bp, synthetic construct
  misc_feature 1..21: note = Target B2M Sequence complement
  source 1..21: mol_type = other DNA
aatgaaacattttgtcatata

SEQ ID NO: 13137 - DNA, 21 bp, synthetic construct
  misc_feature 1..21: note = Target B2M Sequence complement
  source 1..21: mol_type = other DNA
atgaaacattttgtcatataa

SEQ ID NO: 13138 - DNA, 21 bp, synthetic construct
  misc_feature 1..21: note = Target B2M Sequence complement
  source 1..21: mol_type = other DNA
tgaaacattttgtcatataag

SEQ ID NO: 13139 - DNA, 21 bp, synthetic construct
  misc_feature 1..21: note = Target B2M Sequence complement
  source 1..21: mol_type = other DNA
gaaacattttgtcatataaga

SEQ ID NO: 13140 - DNA, 21 bp, synthetic construct
  misc_feature 1..21: note = Target B2M Sequence complement
  source 1..21: mol_type = other DNA
aaacattttgtcatataagat

SEQ ID NO: 13141 - DNA, 21 bp, synthetic construct
  misc_feature 1..21: note = Target B2M Sequence complement
  source 1..21: mol_type = other DNA
aacattttgtcatataagatt

SEQ ID NO: 13142 - DNA, 21 bp, synthetic construct
  misc_feature 1..21: note = Target B2M Sequence complement
  source 1..21: mol_type = other DNA
acattttgtcatataagattc

SEQ ID NO: 13143 - DNA, 21 bp, synthetic construct
  misc_feature 1..21: note = Target B2M Sequence complement
  source 1..21: mol_type = other DNA
cattttgtcatataagattca

SEQ ID NO: 13144 - DNA, 21 bp, synthetic construct
  misc_feature 1..21: note = Target B2M Sequence complement
  source 1..21: mol_type = other DNA
attttgtcatataagattcat

SEQ ID NO: 13145 - DNA, 21 bp, synthetic construct
  misc_feature 1..21: note = Target B2M Sequence complement
  source 1..21: mol_type = other DNA
ttttgtcatataagattcata

SEQ ID NO: 13146 - DNA, 21 bp, synthetic construct
  misc_feature 1..21: note = Target B2M Sequence complement
  source 1..21: mol_type = other DNA
tttgtcatataagattcatat

SEQ ID NO: 13147 - DNA, 21 bp, synthetic construct
  misc_feature 1..21: note = Target B2M Sequence complement
  source 1..21: mol_type = other DNA
ttgtcatataagattcatatt

SEQ ID NO: 13148 - DNA, 21 bp, synthetic construct
  misc_feature 1..21: note = Target B2M Sequence complement
  source 1..21: mol_type = other DNA
tgtcatataagattcatattt

SEQ ID NO: 13149 - DNA, 21 bp, synthetic construct
  misc_feature 1..21: note = Target B2M Sequence complement
  source 1..21: mol_type = other DNA
gtcatataagattcatattta

SEQ ID NO: 13150 - DNA, 21 bp, synthetic construct
  misc_feature 1..21: note = Target B2M Sequence complement
  source 1..21: mol_type = other DNA
tcatataagattcatatttac

SEQ ID NO: 13151 - DNA, 21 bp, synthetic construct
  misc_feature 1..21: note = Target B2M Sequence complement
  source 1..21: mol_type = other DNA
catataagattcatatttact

SEQ ID NO: 13152 - DNA, 21 bp, synthetic construct
  misc_feature 1..21: note = Target B2M Sequence complement
  source 1..21: mol_type = other DNA
atataagattcatatttactt

SEQ ID NO: 13153 - DNA, 21 bp, synthetic construct
  misc_feature 1..21: note = Target B2M Sequence complement
  source 1..21: mol_type = other DNA
tataagattcatatttacttc

SEQ ID NO: 13154 - DNA, 21 bp, synthetic construct
  misc_feature 1..21: note = Target B2M Sequence complement
  source 1..21: mol_type = other DNA
ataagattcatatttacttct

SEQ ID NO: 13155 - DNA, 21 bp, synthetic construct
  misc_feature 1..21: note = Target B2M Sequence complement
  source 1..21: mol_type = other DNA
taagattcatatttacttctt

SEQ ID NO: 13156 - DNA, 21 bp, synthetic construct
  misc_feature 1..21: note = Target B2M Sequence complement
  source 1..21: mol_type = other DNA
aagattcatatttacttctta

SEQ ID NO: 13157 - DNA, 21 bp, synthetic construct
  misc_feature 1..21: note = Target B2M Sequence complement
  source 1..21: mol_type = other DNA
agattcatatttacttcttat

SEQ ID NO: 13158 - DNA, 21 bp, synthetic construct
  misc_feature 1..21: note = Target B2M Sequence complement
  source 1..21: mol_type = other DNA
gattcatatttacttcttata

SEQ ID NO: 13159 - DNA, 21 bp, synthetic construct
  misc_feature 1..21: note = Target B2M Sequence complement
  source 1..21: mol_type = other DNA
attcatatttacttcttatac

SEQ ID NO: 13160 - DNA, 21 bp, synthetic construct
  misc_feature 1..21: note = Target B2M Sequence complement
  source 1..21: mol_type = other DNA
ttcatatttacttcttataca

SEQ ID NO: 13161 - DNA, 21 bp, synthetic construct
  misc_feature 1..21: note = Target B2M Sequence complement
  source 1..21: mol_type = other DNA
tcatatttacttcttatacat

SEQ ID NO: 13162 - DNA, 21 bp, synthetic construct
  misc_feature 1..21: note = Target B2M Sequence complement
  source 1..21: mol_type = other DNA
catatttacttcttatacatt

SEQ ID NO: 13163 - DNA, 21 bp, synthetic construct
  misc_feature 1..21: note = Target B2M Sequence complement
  source 1..21: mol_type = other DNA
atatttacttcttatacattt

SEQ ID NO: 13164 - DNA, 21 bp, synthetic construct
  misc_feature 1..21: note = Target B2M Sequence complement
  source 1..21: mol_type = other DNA
tatttacttcttatacatttg

SEQ ID NO: 13165 - DNA, 21 bp, synthetic construct
  misc_feature 1..21: note = Target B2M Sequence complement
  source 1..21: mol_type = other DNA
atttacttcttatacatttga

SEQ ID NO: 13166 - DNA, 21 bp, synthetic construct
  misc_feature 1..21: note = Target B2M Sequence complement
  source 1..21: mol_type = other DNA
tttacttcttatacatttgat

SEQ ID NO: 13167 - DNA, 21 bp, synthetic construct
  misc_feature 1..21: note = Target B2M Sequence complement
  source 1..21: mol_type = other DNA
ttacttcttatacatttgata

SEQ ID NO: 13168 - DNA, 21 bp, synthetic construct
  misc_feature 1..21: note = Target B2M Sequence complement
  source 1..21: mol_type = other DNA
tacttcttatacatttgataa

SEQ ID NO: 13169 - DNA, 21 bp, synthetic construct
  misc_feature 1..21: note = Target B2M Sequence complement
  source 1..21: mol_type = other DNA
acttcttatacatttgataaa

SEQ ID NO: 13170 - DNA, 21 bp, synthetic construct
  misc_feature 1..21: note = Target B2M Sequence complement
  source 1..21: mol_type = other DNA
cttcttatacatttgataaag

SEQ ID NO: 13171 - DNA, 21 bp, synthetic construct
  misc_feature 1..21: note = Target B2M Sequence complement
  source 1..21: mol_type = other DNA
ttcttatacatttgataaagt

SEQ ID NO: 13172 - DNA, 21 bp, synthetic construct
  misc_feature 1..21: note = Target B2M Sequence complement
  source 1..21: mol_type = other DNA
tcttatacatttgataaagta

SEQ ID NO: 13173 - DNA, 21 bp, synthetic construct
  misc_feature 1..21: note = Target B2M Sequence complement
  source 1..21: mol_type = other DNA
cttatacatttgataaagtaa

SEQ ID NO: 13174 - DNA, 21 bp, synthetic construct
  misc_feature 1..21: note = Target B2M Sequence complement
  source 1..21: mol_type = other DNA
ttatacatttgataaagtaag

SEQ ID NO: 13175 - DNA, 21 bp, synthetic construct
  misc_feature 1..21: note = Target B2M Sequence complement
  source 1..21: mol_type = other DNA
tatacatttgataaagtaagg

SEQ ID NO: 13176 - DNA, 21 bp, synthetic construct
  misc_feature 1..21: note = Target B2M Sequence complement
  source 1..21: mol_type = other DNA
tggttaatctggtttattttt

SEQ ID NO: 13177 - DNA, 21 bp, synthetic construct
  misc_feature 1..21: note = Target B2M Sequence complement
  source 1..21: mol_type = other DNA
gttaatctggtttatttttgt

SEQ ID NO: 13178 - DNA, 21 bp, synthetic construct
  misc_feature 1..21: note = Target B2M Sequence complement
  source 1..21: mol_type = other DNA
ttaatctggtttatttttgtt

SEQ ID NO: 13179 - DNA, 21 bp, synthetic construct
  misc_feature 1..21: note = Target B2M Sequence complement
  source 1..21: mol_type = other DNA
taatctggtttatttttgttc

SEQ ID NO: 13180 - DNA, 21 bp, synthetic construct
  misc_feature 1..21: note = Target B2M Sequence complement
  source 1..21: mol_type = other DNA
tttatttttgttccacaagtt

SEQ ID NO: 13181 - DNA, 21 bp, synthetic construct
  misc_feature 1..21: note = Target B2M Sequence complement
  source 1..21: mol_type = other DNA
ttatttttgttccacaagtta

SEQ ID NO: 13182 - DNA, 21 bp, synthetic construct
  misc_feature 1..21: note = Target B2M Sequence complement
  source 1..21: mol_type = other DNA
tatttttgttccacaagttaa

SEQ ID NO: 13183 - DNA, 21 bp, synthetic construct
  misc_feature 1..21: note = Target B2M Sequence complement
  source 1..21: mol_type = other DNA
atttttgttccacaagttaaa

SEQ ID NO: 13184 - DNA, 21 bp, synthetic construct
  misc_feature 1..21: note = Target B2M Sequence complement
  source 1..21: mol_type = other DNA
tttttgttccacaagttaaat

SEQ ID NO: 13185 - DNA, 21 bp, synthetic construct
  misc_feature 1..21: note = Target B2M Sequence complement
  source 1..21: mol_type = other DNA
ttttgttccacaagttaaata

SEQ ID NO: 13186 - DNA, 21 bp, synthetic construct
  misc_feature 1..21: note = Target B2M Sequence complement
  source 1..21: mol_type = other DNA
tttgttccacaagttaaataa

SEQ ID NO: 13187 - DNA, 21 bp, synthetic construct
  misc_feature 1..21: note = Target B2M Sequence complement
  source 1..21: mol_type = other DNA
ttgttccacaagttaaataaa

SEQ ID NO: 13188 - DNA, 21 bp, synthetic construct
  misc_feature 1..21: note = Target B2M Sequence complement
  source 1..21: mol_type = other DNA
tgttccacaagttaaataaat

SEQ ID NO: 13189 - DNA, 21 bp, synthetic construct
  misc_feature 1..21: note = Target B2M Sequence complement
  source 1..21: mol_type = other DNA
ttccacaagttaaataaatca

SEQ ID NO: 13190 - DNA, 21 bp, synthetic construct
  misc_feature 1..21: note = Target B2M Sequence complement
  source 1..21: mol_type = other DNA
tccacaagttaaataaatcat

SEQ ID NO: 13191 - DNA, 21 bp, synthetic construct
  misc_feature 1..21: note = Target B2M Sequence complement
  source 1..21: mol_type = other DNA
ccacaagttaaataaatcata

SEQ ID NO: 13192 - DNA, 21 bp, synthetic construct
  misc_feature 1..21: note = Target B2M Sequence complement
  source 1..21: mol_type = other DNA
cacaagttaaataaatcataa

SEQ ID NO: 13193 - DNA, 21 bp, synthetic construct
  misc_feature 1..21: note = Target B2M Sequence complement
  source 1..21: mol_type = other DNA
acaagttaaataaatcataaa

SEQ ID NO: 13194 - DNA, 21 bp, synthetic construct
  misc_feature 1..21: note = Target B2M Sequence complement
  source 1..21: mol_type = other DNA
caagttaaataaatcataaaa

SEQ ID NO: 13195 - DNA, 21 bp, synthetic construct
  misc_feature 1..21: note = Target B2M Sequence complement
  source 1..21: mol_type = other DNA
aagttaaataaatcataaaac

SEQ ID NO: 13196 - DNA, 21 bp, synthetic construct
  misc_feature 1..21: note = Target B2M Sequence complement
  source 1..21: mol_type = other DNA
agttaaataaatcataaaact

SEQ ID NO: 13197 - DNA, 21 bp, synthetic construct
  misc_feature 1..21: note = Target B2M Sequence complement
  source 1..21: mol_type = other DNA
gttaaataaatcataaaactt

SEQ ID NO: 13198 - DNA, 21 bp, synthetic construct
  misc_feature 1..21: note = Target B2M Sequence complement
  source 1..21: mol_type = other DNA
ttaaataaatcataaaacttg

SEQ ID NO: 13199 - DNA, 21 bp, synthetic construct
  misc_feature 1..21: note = Target B2M Sequence complement
  source 1..21: mol_type = other DNA
taaataaatcataaaacttga

SEQ ID NO: 13200 - DNA, 22 bp, synthetic construct
  misc_feature 1..22: note = Target B2M Sequence complement
  source 1..22: mol_type = other DNA
gaagctgacagcattcgggccg

SEQ ID NO: 13201 - DNA, 22 bp, synthetic construct
  misc_feature 1..22: note = Target B2M Sequence complement
  source 1..22: mol_type = other DNA
agctgacagcattcgggccgag

SEQ ID NO: 13202 - DNA, 22 bp, synthetic construct
  misc_feature 1..22: note = Target B2M Sequence complement
  source 1..22: mol_type = other DNA
gctgacagcattcgggccgaga

SEQ ID NO: 13203 - DNA, 22 bp, synthetic construct
  misc_feature 1..22: note = Target B2M Sequence complement
  source 1..22: mol_type = other DNA
gcattcgggccgagatgtctcg

SEQ ID NO: 13204 - DNA, 22 bp, synthetic construct
  misc_feature 1..22: note = Target B2M Sequence complement
  source 1..22: mol_type = other DNA
cattcgggccgagatgtctcgc

SEQ ID NO: 13205 - DNA, 22 bp, synthetic construct
  misc_feature 1..22: note = Target B2M Sequence complement
  source 1..22: mol_type = other DNA
ttcgggccgagatgtctcgctc

SEQ ID NO: 13206 - DNA, 22 bp, synthetic construct
  misc_feature 1..22: note = Target B2M Sequence complement
  source 1..22: mol_type = other DNA
tcgggccgagatgtctcgctcc

SEQ ID NO: 13207 - DNA, 22 bp, synthetic construct
  misc_feature 1..22: note = Target B2M Sequence complement
  source 1..22: mol_type = other DNA
cgggccgagatgtctcgctccg

SEQ ID NO: 13208 - DNA, 22 bp, synthetic construct
  misc_feature 1..22: note = Target B2M Sequence complement
  source 1..22: mol_type = other DNA
gggccgagatgtctcgctccgt

SEQ ID NO: 13209 - DNA, 22 bp, synthetic construct
  misc_feature 1..22: note = Target B2M Sequence complement
  source 1..22: mol_type = other DNA
ggccgagatgtctcgctccgtg

SEQ ID NO: 13210 - DNA, 22 bp, synthetic construct
  misc_feature 1..22: note = Target B2M Sequence complement
  source 1..22: mol_type = other DNA
gccgagatgtctcgctccgtgg

SEQ ID NO: 13211 - DNA, 22 bp, synthetic construct
  misc_feature 1..22: note = Target B2M Sequence complement
  source 1..22: mol_type = other DNA
ccgagatgtctcgctccgtggc

SEQ ID NO: 13212 - DNA, 22 bp, synthetic construct
  misc_feature 1..22: note = Target B2M Sequence complement
  source 1..22: mol_type = other DNA
cgagatgtctcgctccgtggcc

SEQ ID NO: 13213 - DNA, 22 bp, synthetic construct
  misc_feature 1..22: note = Target B2M Sequence complement
  source 1..22: mol_type = other DNA
gagatgtctcgctccgtggcct

SEQ ID NO: 13214 - DNA, 22 bp, synthetic construct
  misc_feature 1..22: note = Target B2M Sequence complement
  source 1..22: mol_type = other DNA
tgtctcgctccgtggccttagc

SEQ ID NO: 13215 - DNA, 22 bp, synthetic construct
  misc_feature 1..22: note = Target B2M Sequence complement
  source 1..22: mol_type = other DNA
gtctcgctccgtggccttagct

SEQ ID NO: 13216 - DNA, 22 bp, synthetic construct
  misc_feature 1..22: note = Target B2M Sequence complement
  source 1..22: mol_type = other DNA
tctcgctccgtggccttagctg

SEQ ID NO: 13217 - DNA, 22 bp, synthetic construct
  misc_feature 1..22: note = Target B2M Sequence complement
  source 1..22: mol_type = other DNA
ctcgctccgtggccttagctgt

SEQ ID NO: 13218 - DNA, 22 bp, synthetic construct
  misc_feature 1..22: note = Target B2M Sequence complement
  source 1..22: mol_type = other DNA
tcgctccgtggccttagctgtg

SEQ ID NO: 13219 - DNA, 22 bp, synthetic construct
  misc_feature 1..22: note = Target B2M Sequence complement
  source 1..22: mol_type = other DNA
cgctccgtggccttagctgtgc

SEQ ID NO: 13220 - DNA, 22 bp, synthetic construct
  misc_feature 1..22: note = Target B2M Sequence complement
  source 1..22: mol_type = other DNA
gctccgtggccttagctgtgct

SEQ ID NO: 13221 - DNA, 22 bp, synthetic construct
  misc_feature 1..22: note = Target B2M Sequence complement
  source 1..22: mol_type = other DNA
ctccgtggccttagctgtgctc

SEQ ID NO: 13222 - DNA, 22 bp, synthetic construct
  misc_feature 1..22: note = Target B2M Sequence complement
  source 1..22: mol_type = other DNA
tccgtggccttagctgtgctcg

SEQ ID NO: 13223 - DNA, 22 bp, synthetic construct
  misc_feature 1..22: note = Target B2M Sequence complement
  source 1..22: mol_type = other DNA
ccgtggccttagctgtgctcgc

SEQ ID NO: 13224 - DNA, 22 bp, synthetic construct
  misc_feature 1..22: note = Target B2M Sequence complement
  source 1..22: mol_type = other DNA
cgtggccttagctgtgctcgcg

SEQ ID NO: 13225 - DNA, 22 bp, synthetic construct
  misc_feature 1..22: note = Target B2M Sequence complement
  source 1..22: mol_type = other DNA
gtggccttagctgtgctcgcgc

SEQ ID NO: 13226 - DNA, 22 bp, synthetic construct
  misc_feature 1..22: note = Target B2M Sequence complement
  source 1..22: mol_type = other DNA
tggccttagctgtgctcgcgct

SEQ ID NO: 13227 - DNA, 22 bp, synthetic construct
  misc_feature 1..22: note = Target B2M Sequence complement
  source 1..22: mol_type = other DNA
ggccttagctgtgctcgcgcta

SEQ ID NO: 13228 - DNA, 22 bp, synthetic construct
  misc_feature 1..22: note = Target B2M Sequence complement
  source 1..22: mol_type = other DNA
gccttagctgtgctcgcgctac

SEQ ID NO: 13229 - DNA, 22 bp, synthetic construct
  misc_feature 1..22: note = Target B2M Sequence complement
  source 1..22: mol_type = other DNA
gctgtgctcgcgctactctctc

SEQ ID NO: 13230 - DNA, 22 bp, synthetic construct
  misc_feature 1..22: note = Target B2M Sequence complement
  source 1..22: mol_type = other DNA
tctggcctggaggctatccagc

SEQ ID NO: 13231 - DNA, 22 bp, synthetic construct
  misc_feature 1..22: note = Target B2M Sequence complement
  source 1..22: mol_type = other DNA
ctggcctggaggctatccagcg

SEQ ID NO: 13232 - DNA, 22 bp, synthetic construct
  misc_feature 1..22: note = Target B2M Sequence complement
  source 1..22: mol_type = other DNA
tggcctggaggctatccagcgt

SEQ ID NO: 13233 - DNA, 22 bp, synthetic construct
  misc_feature 1..22: note = Target B2M Sequence complement
  source 1..22: mol_type = other DNA
ggcctggaggctatccagcgta

SEQ ID NO: 13234 - DNA, 22 bp, synthetic construct
  misc_feature 1..22: note = Target B2M Sequence complement
  source 1..22: mol_type = other DNA
gcctggaggctatccagcgtac

SEQ ID NO: 13235 - DNA, 22 bp, synthetic construct
  misc_feature 1..22: note = Target B2M Sequence complement
  source 1..22: mol_type = other DNA
ttgcttgctttttaatattgat

SEQ ID NO: 13236 - DNA, 22 bp, synthetic construct
  misc_feature 1..22: note = Target B2M Sequence complement
  source 1..22: mol_type = other DNA
tgcttgctttttaatattgata

SEQ ID NO: 13237 - DNA, 22 bp, synthetic construct
  misc_feature 1..22: note = Target B2M Sequence complement
  source 1..22: mol_type = other DNA
gcttgctttttaatattgatat

SEQ ID NO: 13238 - DNA, 22 bp, synthetic construct
  misc_feature 1..22: note = Target B2M Sequence complement
  source 1..22: mol_type = other DNA
cttgctttttaatattgatatg

SEQ ID NO: 13239 - DNA, 22 bp, synthetic construct
  misc_feature 1..22: note = Target B2M Sequence complement
  source 1..22: mol_type = other DNA
ttgctttttaatattgatatgc

SEQ ID NO: 13240 - DNA, 22 bp, synthetic construct
  misc_feature 1..22: note = Target B2M Sequence complement
  source 1..22: mol_type = other DNA
tgctttttaatattgatatgct

SEQ ID NO: 13241 - DNA, 22 bp, synthetic construct
  misc_feature 1..22: note = Target B2M Sequence complement
  source 1..22: mol_type = other DNA
gctttttaatattgatatgctt

SEQ ID NO: 13242 - DNA, 22 bp, synthetic construct
  misc_feature 1..22: note = Target B2M Sequence complement
  source 1..22: mol_type = other DNA
ctttttaatattgatatgctta

SEQ ID NO: 13243 - DNA, 22 bp, synthetic construct
  misc_feature 1..22: note = Target B2M Sequence complement
  source 1..22: mol_type = other DNA
tttttaatattgatatgcttat

SEQ ID NO: 13244 - DNA, 22 bp, synthetic construct
  misc_feature 1..22: note = Target B2M Sequence complement
  source 1..22: mol_type = other DNA
ttttaatattgatatgcttata

SEQ ID NO: 13245 - DNA, 22 bp, synthetic construct
  misc_feature 1..22: note = Target B2M Sequence complement
  source 1..22: mol_type = other DNA
tttaatattgatatgcttatac

SEQ ID NO: 13246 - DNA, 22 bp, synthetic construct
  misc_feature 1..22: note = Target B2M Sequence complement
  source 1..22: mol_type = other DNA
ttaatattgatatgcttataca

SEQ ID NO: 13247 - DNA, 22 bp, synthetic construct
  misc_feature 1..22: note = Target B2M Sequence complement
  source 1..22: mol_type = other DNA
taatattgatatgcttatacac

SEQ ID NO: 13248 - DNA, 22 bp, synthetic construct
  misc_feature 1..22: note = Target B2M Sequence complement
  source 1..22: mol_type = other DNA
aatattgatatgcttatacact

SEQ ID NO: 13249 - DNA, 22 bp, synthetic construct
  misc_feature 1..22: note = Target B2M Sequence complement
  source 1..22: mol_type = other DNA
atattgatatgcttatacactt

SEQ ID NO: 13250 - DNA, 22 bp, synthetic construct
  misc_feature 1..22: note = Target B2M Sequence complement
  source 1..22: mol_type = other DNA
tattgatatgcttatacactta

SEQ ID NO: 13251 - DNA, 22 bp, synthetic construct
  misc_feature 1..22: note = Target B2M Sequence complement
  source 1..22: mol_type = other DNA
acaaaatgtagggttataataa

SEQ ID NO: 13252 - DNA, 22 bp, synthetic construct
  misc_feature 1..22: note = Target B2M Sequence complement
  source 1..22: mol_type = other DNA
caaaatgtagggttataataat

SEQ ID NO: 13253 - DNA, 22 bp, synthetic construct
  misc_feature 1..22: note = Target B2M Sequence complement
  source 1..22: mol_type = other DNA
aaaatgtagggttataataatg

SEQ ID NO: 13254 - DNA, 22 bp, synthetic construct
  misc_feature 1..22: note = Target B2M Sequence complement
  source 1..22: mol_type = other DNA
aaatgtagggttataataatgt

SEQ ID NO: 13255 - DNA, 22 bp, synthetic construct
  misc_feature 1..22: note = Target B2M Sequence complement
  source 1..22: mol_type = other DNA
aatgtagggttataataatgtt

SEQ ID NO: 13256 - DNA, 22 bp, synthetic construct
  misc_feature 1..22: note = Target B2M Sequence complement
  source 1..22: mol_type = other DNA
atgtagggttataataatgtta

SEQ ID NO: 13257 - DNA, 22 bp, synthetic construct
  misc_feature 1..22: note = Target B2M Sequence complement
  source 1..22: mol_type = other DNA
tgtagggttataataatgttaa

SEQ ID NO: 13258 - DNA, 22 bp, synthetic construct
  misc_feature 1..22: note = Target B2M Sequence complement
  source 1..22: mol_type = other DNA
tagggttataataatgttaaca

SEQ ID NO: 13259 - DNA, 22 bp, synthetic construct
  misc_feature 1..22: note = Target B2M Sequence complement
  source 1..22: mol_type = other DNA
agggttataataatgttaacat

SEQ ID NO: 13260 - DNA, 22 bp, synthetic construct
  misc_feature 1..22: note = Target B2M Sequence complement
  source 1..22: mol_type = other DNA
gttataataatgttaacatgga

SEQ ID NO: 13261 - DNA, 22 bp, synthetic construct
  misc_feature 1..22: note = Target B2M Sequence complement
  source 1..22: mol_type = other DNA
ttataataatgttaacatggac

SEQ ID NO: 13262 - DNA, 22 bp, synthetic construct
  misc_feature 1..22: note = Target B2M Sequence complement
  source 1..22: mol_type = other DNA
tataataatgttaacatggaca

SEQ ID NO: 13263 - DNA, 22 bp, synthetic construct
  misc_feature 1..22: note = Target B2M Sequence complement
  source 1..22: mol_type = other DNA
ataataatgttaacatggacat

SEQ ID NO: 13264 - DNA, 22 bp, synthetic construct
  misc_feature 1..22: note = Target B2M Sequence complement
  source 1..22: mol_type = other DNA
acatgatcttctttataattct

SEQ ID NO: 13265 - DNA, 22 bp, synthetic construct
  misc_feature 1..22: note = Target B2M Sequence complement
  source 1..22: mol_type = other DNA
catgatcttctttataattcta

SEQ ID NO: 13266 - DNA, 22 bp, synthetic construct
  misc_feature 1..22: note = Target B2M Sequence complement
  source 1..22: mol_type = other DNA
atgatcttctttataattctac

SEQ ID NO: 13267 - DNA, 22 bp, synthetic construct
  misc_feature 1..22: note = Target B2M Sequence complement
  source 1..22: mol_type = other DNA
tgatcttctttataattctact

SEQ ID NO: 13268 - DNA, 22 bp, synthetic construct
  misc_feature 1..22: note = Target B2M Sequence complement
  source 1..22: mol_type = other DNA
gatcttctttataattctactt

SEQ ID NO: 13269 - DNA, 22 bp, synthetic construct
  misc_feature 1..22: note = Target B2M Sequence complement
  source 1..22: mol_type = other DNA
atcttctttataattctacttt

SEQ ID NO: 13270 - DNA, 22 bp, synthetic construct
  misc_feature 1..22: note = Target B2M Sequence complement
  source 1..22: mol_type = other DNA
tcttctttataattctactttg

SEQ ID NO: 13271 - DNA, 22 bp, synthetic construct
  misc_feature 1..22: note = Target B2M Sequence complement
  source 1..22: mol_type = other DNA
cttctttataattctactttga

SEQ ID NO: 13272 - DNA, 22 bp, synthetic construct
  misc_feature 1..22: note = Target B2M Sequence complement
  source 1..22: mol_type = other DNA
ttctttataattctactttgag

SEQ ID NO: 13273 - DNA, 22 bp, synthetic construct
  misc_feature 1..22: note = Target B2M Sequence complement
  source 1..22: mol_type = other DNA
tctttataattctactttgagt

SEQ ID NO: 13274 - DNA, 22 bp, synthetic construct
  misc_feature 1..22: note = Target B2M Sequence complement
  source 1..22: mol_type = other DNA
ccacaggtagctctaggagggc

SEQ ID NO: 13275 - DNA, 22 bp, synthetic construct
  misc_feature 1..22: note = Target B2M Sequence complement
  source 1..22: mol_type = other DNA
caggtagctctaggagggctgg

SEQ ID NO: 13276 - DNA, 22 bp, synthetic construct
  misc_feature 1..22: note = Target B2M Sequence complement
  source 1..22: mol_type = other DNA
aggtagctctaggagggctggc

SEQ ID NO: 13277 - DNA, 22 bp, synthetic construct
  misc_feature 1..22: note = Target B2M Sequence complement
  source 1..22: mol_type = other DNA
ggtagctctaggagggctggca

SEQ ID NO: 13278 - DNA, 22 bp, synthetic construct
  misc_feature 1..22: note = Target B2M Sequence complement
  source 1..22: mol_type = other DNA
gggctggcaacttagaggtggg

SEQ ID NO: 13279 - DNA, 22 bp, synthetic construct
  misc_feature 1..22: note = Target B2M Sequence complement
  source 1..22: mol_type = other DNA
ggctggcaacttagaggtgggg

SEQ ID NO: 13280 - DNA, 22 bp, synthetic construct
  misc_feature 1..22: note = Target B2M Sequence complement
  source 1..22: mol_type = other DNA
ataagttaacttccaatttaca

SEQ ID NO: 13281 - DNA, 22 bp, synthetic construct
  misc_feature 1..22: note = Target B2M Sequence complement
  source 1..22: mol_type = other DNA
taagttaacttccaatttacat

SEQ ID NO: 13282 - DNA, 22 bp, synthetic construct
  misc_feature 1..22: note = Target B2M Sequence complement
  source 1..22: mol_type = other DNA
aagttaacttccaatttacata

SEQ ID NO: 13283 - DNA, 22 bp, synthetic construct
  misc_feature 1..22: note = Target B2M Sequence complement
  source 1..22: mol_type = other DNA
ggggaaaatttagaaatataat

SEQ ID NO: 13284 - DNA, 22 bp, synthetic construct
  misc_feature 1..22: note = Target B2M Sequence complement
  source 1..22: mol_type = other DNA
gggaaaatttagaaatataatt

SEQ ID NO: 13285 - DNA, 22 bp, synthetic construct
  misc_feature 1..22: note = Target B2M Sequence complement
  source 1..22: mol_type = other DNA
ggaaaatttagaaatataattg

SEQ ID NO: 13286 - DNA, 22 bp, synthetic construct
  misc_feature 1..22: note = Target B2M Sequence complement
  source 1..22: mol_type = other DNA
gaaaatttagaaatataattga

SEQ ID NO: 13287 - DNA, 22 bp, synthetic construct
  misc_feature 1..22: note = Target B2M Sequence complement
  source 1..22: mol_type = other DNA
aaaatttagaaatataattgac

SEQ ID NO: 13288 - DNA, 22 bp, synthetic construct
  misc_feature 1..22: note = Target B2M Sequence complement
  source 1..22: mol_type = other DNA
aaatttagaaatataattgaca

SEQ ID NO: 13289 - DNA, 22 bp, synthetic construct
  misc_feature 1..22: note = Target B2M Sequence complement
  source 1..22: mol_type = other DNA
aatttagaaatataattgacag

SEQ ID NO: 13290 - DNA, 22 bp, synthetic construct
  misc_feature 1..22: note = Target B2M Sequence complement
  source 1..22: mol_type = other DNA
atttagaaatataattgacagg

SEQ ID NO: 13291 - DNA, 22 bp, synthetic construct
  misc_feature 1..22: note = Target B2M Sequence complement
  source 1..22: mol_type = other DNA
tttagaaatataattgacagga

SEQ ID NO: 13292 - DNA, 22 bp, synthetic construct
  misc_feature 1..22: note = Target B2M Sequence complement
  source 1..22: mol_type = other DNA
ttagaaatataattgacaggat

SEQ ID NO: 13293 - DNA, 22 bp, synthetic construct
  misc_feature 1..22: note = Target B2M Sequence complement
  source 1..22: mol_type = other DNA
tagaaatataattgacaggatt

SEQ ID NO: 13294 - DNA, 22 bp, synthetic construct
  misc_feature 1..22: note = Target B2M Sequence complement
  source 1..22: mol_type = other DNA
agaaatataattgacaggatta

SEQ ID NO: 13295 - DNA, 22 bp, synthetic construct
  misc_feature 1..22: note = Target B2M Sequence complement
  source 1..22: mol_type = other DNA
gaaatataattgacaggattat

SEQ ID NO: 13296 - DNA, 22 bp, synthetic construct
  misc_feature 1..22: note = Target B2M Sequence complement
  source 1..22: mol_type = other DNA
aaatataattgacaggattatt

SEQ ID NO: 13297 - DNA, 22 bp, synthetic construct
  misc_feature 1..22: note = Target B2M Sequence complement
  source 1..22: mol_type = other DNA
aatataattgacaggattattg

SEQ ID NO: 13298 - DNA, 22 bp, synthetic construct
  misc_feature 1..22: note = Target B2M Sequence complement
  source 1..22: mol_type = other DNA
aggattattggaaatttgttat

SEQ ID NO: 13299 - DNA, 22 bp, synthetic construct
  misc_feature 1..22: note = Target B2M Sequence complement
  source 1..22: mol_type = other DNA
ggattattggaaatttgttata

SEQ ID NO: 13300 - DNA, 22 bp, synthetic construct
  misc_feature 1..22: note = Target B2M Sequence complement
  source 1..22: mol_type = other DNA
gattattggaaatttgttataa

SEQ ID NO: 13301 - DNA, 22 bp, synthetic construct
  misc_feature 1..22: note = Target B2M Sequence complement
  source 1..22: mol_type = other DNA
attattggaaatttgttataat

SEQ ID NO: 13302 - DNA, 22 bp, synthetic construct
  misc_feature 1..22: note = Target B2M Sequence complement
  source 1..22: mol_type = other DNA
ttattggaaatttgttataatg

SEQ ID NO: 13303 - DNA, 22 bp, synthetic construct
  misc_feature 1..22: note = Target B2M Sequence complement
  source 1..22: mol_type = other DNA
tattggaaatttgttataatga

SEQ ID NO: 13304 - DNA, 22 bp, synthetic construct
  misc_feature 1..22: note = Target B2M Sequence complement
  source 1..22: mol_type = other DNA
attggaaatttgttataatgaa

SEQ ID NO: 13305 - DNA, 22 bp, synthetic construct
  misc_feature 1..22: note = Target B2M Sequence complement
  source 1..22: mol_type = other DNA
ttggaaatttgttataatgaat

SEQ ID NO: 13306 - DNA, 22 bp, synthetic construct
  misc_feature 1..22: note = Target B2M Sequence complement
  source 1..22: mol_type = other DNA
tggaaatttgttataatgaatg

SEQ ID NO: 13307 - DNA, 22 bp, synthetic construct
  misc_feature 1..22: note = Target B2M Sequence complement
  source 1..22: mol_type = other DNA
ggaaatttgttataatgaatga

SEQ ID NO: 13308 - DNA, 22 bp, synthetic construct
  misc_feature 1..22: note = Target B2M Sequence complement
  source 1..22: mol_type = other DNA
gaaatttgttataatgaatgaa

SEQ ID NO: 13309 - DNA, 22 bp, synthetic construct
  misc_feature 1..22: note = Target B2M Sequence complement
  source 1..22: mol_type = other DNA
aaatttgttataatgaatgaaa

SEQ ID NO: 13310 - DNA, 22 bp, synthetic construct
  misc_feature 1..22: note = Target B2M Sequence complement
  source 1..22: mol_type = other DNA
aatttgttataatgaatgaaac

SEQ ID NO: 13311 - DNA, 22 bp, synthetic construct
  misc_feature 1..22: note = Target B2M Sequence complement
  source 1..22: mol_type = other DNA
atttgttataatgaatgaaaca

SEQ ID NO: 13312 - DNA, 22 bp, synthetic construct
  misc_feature 1..22: note = Target B2M Sequence complement
  source 1..22: mol_type = other DNA
tttgttataatgaatgaaacat

SEQ ID NO: 13313 - DNA, 22 bp, synthetic construct
  misc_feature 1..22: note = Target B2M Sequence complement
  source 1..22: mol_type = other DNA
ttgttataatgaatgaaacatt

SEQ ID NO: 13314 - DNA, 22 bp, synthetic construct
  misc_feature 1..22: note = Target B2M Sequence complement
  source 1..22: mol_type = other DNA
tgttataatgaatgaaacattt

SEQ ID NO: 13315 - DNA, 22 bp, synthetic construct
  misc_feature 1..22: note = Target B2M Sequence complement
  source 1..22: mol_type = other DNA
gttataatgaatgaaacatttt

SEQ ID NO: 13316 - DNA, 22 bp, synthetic construct
  misc_feature 1..22: note = Target B2M Sequence complement
  source 1..22: mol_type = other DNA
ttataatgaatgaaacattttg

SEQ ID NO: 13317 - DNA, 22 bp, synthetic construct
  misc_feature 1..22: note = Target B2M Sequence complement
  source 1..22: mol_type = other DNA
tataatgaatgaaacattttgt

SEQ ID NO: 13318 - DNA, 22 bp, synthetic construct
  misc_feature 1..22: note = Target B2M Sequence complement
  source 1..22: mol_type = other DNA
ataatgaatgaaacattttgtc

SEQ ID NO: 13319 - DNA, 22 bp, synthetic construct
  misc_feature 1..22: note = Target B2M Sequence complement
  source 1..22: mol_type = other DNA
taatgaatgaaacattttgtca

SEQ ID NO: 13320 - DNA, 22 bp, synthetic construct
  misc_feature 1..22: note = Target B2M Sequence complement
  source 1..22: mol_type = other DNA
aatgaatgaaacattttgtcat

SEQ ID NO: 13321 - DNA, 22 bp, synthetic construct
  misc_feature 1..22: note = Target B2M Sequence complement
  source 1..22: mol_type = other DNA
atgaatgaaacattttgtcata

SEQ ID NO: 13322 - DNA, 22 bp, synthetic construct
  misc_feature 1..22: note = Target B2M Sequence complement
  source 1..22: mol_type = other DNA
tgaatgaaacattttgtcatat

SEQ ID NO: 13323 - DNA, 22 bp, synthetic construct
  misc_feature 1..22: note = Target B2M Sequence complement
  source 1..22: mol_type = other DNA
gaatgaaacattttgtcatata

SEQ ID NO: 13324 - DNA, 22 bp, synthetic construct
  misc_feature 1..22: note = Target B2M Sequence complement
  source 1..22: mol_type = other DNA
aatgaaacattttgtcatataa

SEQ ID NO: 13325 - DNA, 22 bp, synthetic construct
  misc_feature 1..22: note = Target B2M Sequence complement
  source 1..22: mol_type = other DNA
atgaaacattttgtcatataag

SEQ ID NO: 13326 - DNA, 22 bp, synthetic construct
  misc_feature 1..22: note = Target B2M Sequence complement
  source 1..22: mol_type = other DNA
tgaaacattttgtcatataaga

SEQ ID NO: 13327 - DNA, 22 bp, synthetic construct
  misc_feature 1..22: note = Target B2M Sequence complement
  source 1..22: mol_type = other DNA
gaaacattttgtcatataagat

SEQ ID NO: 13328 - DNA, 22 bp, synthetic construct
  misc_feature 1..22: note = Target B2M Sequence complement
  source 1..22: mol_type = other DNA
aaacattttgtcatataagatt

SEQ ID NO: 13329 - DNA, 22 bp, synthetic construct
  misc_feature 1..22: note = Target B2M Sequence complement
  source 1..22: mol_type = other DNA
aacattttgtcatataagattc

SEQ ID NO: 13330 - DNA, 22 bp, synthetic construct
  misc_feature 1..22: note = Target B2M Sequence complement
  source 1..22: mol_type = other DNA
acattttgtcatataagattca

SEQ ID NO: 13331 - DNA, 22 bp, synthetic construct
  misc_feature 1..22: note = Target B2M Sequence complement
  source 1..22: mol_type = other DNA
cattttgtcatataagattcat

SEQ ID NO: 13332 - DNA, 22 bp, synthetic construct
  misc_feature 1..22: note = Target B2M Sequence complement
  source 1..22: mol_type = other DNA
attttgtcatataagattcata

SEQ ID NO: 13333 - DNA, 22 bp, synthetic construct
  misc_feature 1..22: note = Target B2M Sequence complement
  source 1..22: mol_type = other DNA
ttttgtcatataagattcatat

SEQ ID NO: 13334 - DNA, 22 bp, synthetic construct
  misc_feature 1..22: note = Target B2M Sequence complement
  source 1..22: mol_type = other DNA
tttgtcatataagattcatatt

SEQ ID NO: 13335 - DNA, 22 bp, synthetic construct
  misc_feature 1..22: note = Target B2M Sequence complement
  source 1..22: mol_type = other DNA
ttgtcatataagattcatattt

SEQ ID NO: 13336 - DNA, 22 bp, synthetic construct
  misc_feature 1..22: note = Target B2M Sequence complement
  source 1..22: mol_type = other DNA
tgtcatataagattcatattta

SEQ ID NO: 13337 - DNA, 22 bp, synthetic construct
  misc_feature 1..22: note = Target B2M Sequence complement
  source 1..22: mol_type = other DNA
gtcatataagattcatatttac

SEQ ID NO: 13338 - DNA, 22 bp, synthetic construct
  misc_feature 1..22: note = Target B2M Sequence complement
  source 1..22: mol_type = other DNA
tcatataagattcatatttact

SEQ ID NO: 13339 - DNA, 22 bp, synthetic construct
  misc_feature 1..22: note = Target B2M Sequence complement
  source 1..22: mol_type = other DNA
catataagattcatatttactt

SEQ ID NO: 13340 - DNA, 22 bp, synthetic construct
  misc_feature 1..22: note = Target B2M Sequence complement
  source 1..22: mol_type = other DNA
atataagattcatatttacttc

SEQ ID NO: 13341 - DNA, 22 bp, synthetic construct
  misc_feature 1..22: note = Target B2M Sequence complement
  source 1..22: mol_type = other DNA
tataagattcatatttacttct

SEQ ID NO: 13342 - DNA, 22 bp, synthetic construct
  misc_feature 1..22: note = Target B2M Sequence complement
  source 1..22: mol_type = other DNA
ataagattcatatttacttctt

SEQ ID NO: 13343 - DNA, 22 bp, synthetic construct
  misc_feature 1..22: note = Target B2M Sequence complement
  source 1..22: mol_type = other DNA
taagattcatatttacttctta

SEQ ID NO: 13344 - DNA, 22 bp, synthetic construct
  misc_feature 1..22: note = Target B2M Sequence complement
  source 1..22: mol_type = other DNA
aagattcatatttacttcttat

SEQ ID NO: 13345 - DNA, 22 bp, synthetic construct
  misc_feature 1..22: note = Target B2M Sequence complement
  source 1..22: mol_type = other DNA
agattcatatttacttcttata

SEQ ID NO: 13346 - DNA, 22 bp, synthetic construct
  misc_feature 1..22: note = Target B2M Sequence complement
  source 1..22: mol_type = other DNA
gattcatatttacttcttatac

SEQ ID NO: 13347 - DNA, 22 bp, synthetic construct
  misc_feature 1..22: note = Target B2M Sequence complement
  source 1..22: mol_type = other DNA
attcatatttacttcttataca

SEQ ID NO: 13348 - DNA, 22 bp, synthetic construct
  misc_feature 1..22: note = Target B2M Sequence complement
  source 1..22: mol_type = other DNA
ttcatatttacttcttatacat

SEQ ID NO: 13349 - DNA, 22 bp, synthetic construct
  misc_feature 1..22: note = Target B2M Sequence complement
  source 1..22: mol_type = other DNA
tcatatttacttcttatacatt

SEQ ID NO: 13350 - DNA, 22 bp, synthetic construct
  misc_feature 1..22: note = Target B2M Sequence complement
  source 1..22: mol_type = other DNA
catatttacttcttatacattt

SEQ ID NO: 13351 - DNA, 22 bp, synthetic construct
  misc_feature 1..22: note = Target B2M Sequence complement
  source 1..22: mol_type = other DNA
atatttacttcttatacatttg

SEQ ID NO: 13352 - DNA, 22 bp, synthetic construct
  misc_feature 1..22: note = Target B2M Sequence complement
  source 1..22: mol_type = other DNA
tatttacttcttatacatttga

SEQ ID NO: 13353 - DNA, 22 bp, synthetic construct
  misc_feature 1..22: note = Target B2M Sequence complement
  source 1..22: mol_type = other DNA
atttacttcttatacatttgat

SEQ ID NO: 13354 - DNA, 22 bp, synthetic construct
  misc_feature 1..22: note = Target B2M Sequence complement
  source 1..22: mol_type = other DNA
tttacttcttatacatttgata

SEQ ID NO: 13355 - DNA, 22 bp, synthetic construct
  misc_feature 1..22: note = Target B2M Sequence complement
  source 1..22: mol_type = other DNA
ttacttcttatacatttgataa

SEQ ID NO: 13356 - DNA, 22 bp, synthetic construct
  misc_feature 1..22: note = Target B2M Sequence complement
  source 1..22: mol_type = other DNA
tacttcttatacatttgataaa

SEQ ID NO: 13357 - DNA, 22 bp, synthetic construct
  misc_feature 1..22: note = Target B2M Sequence complement
  source 1..22: mol_type = other DNA
acttcttatacatttgataaag

SEQ ID NO: 13358 - DNA, 22 bp, synthetic construct
  misc_feature 1..22: note = Target B2M Sequence complement
  source 1..22: mol_type = other DNA
cttcttatacatttgataaagt

SEQ ID NO: 13359 - DNA, 22 bp, synthetic construct
  misc_feature 1..22: note = Target B2M Sequence complement
  source 1..22: mol_type = other DNA
ttcttatacatttgataaagta

SEQ ID NO: 13360 - DNA, 22 bp, synthetic construct
  misc_feature 1..22: note = Target B2M Sequence complement
  source 1..22: mol_type = other DNA
tcttatacatttgataaagtaa

SEQ ID NO: 13361 - DNA, 22 bp, synthetic construct
  misc_feature 1..22: note = Target B2M Sequence complement
  source 1..22: mol_type = other DNA
cttatacatttgataaagtaag

SEQ ID NO: 13362 - DNA, 22 bp, synthetic construct
  misc_feature 1..22: note = Target B2M Sequence complement
  source 1..22: mol_type = other DNA
ttatacatttgataaagtaagg

SEQ ID NO: 13363 - DNA, 22 bp, synthetic construct
  misc_feature 1..22: note = Target B2M Sequence complement
  source 1..22: mol_type = other DNA
gttaatctggtttatttttgtt

SEQ ID NO: 13364 - DNA, 22 bp, synthetic construct
  misc_feature 1..22: note = Target B2M Sequence complement
  source 1..22: mol_type = other DNA
ttaatctggtttatttttgttc

SEQ ID NO: 13365 - DNA, 22 bp, synthetic construct
  misc_feature 1..22: note = Target B2M Sequence complement
  source 1..22: mol_type = other DNA
tttatttttgttccacaagtta

SEQ ID NO: 13366 - DNA, 22 bp, synthetic construct
  misc_feature 1..22: note = Target B2M Sequence complement
  source 1..22: mol_type = other DNA
ttatttttgttccacaagttaa

SEQ ID NO: 13367 - DNA, 22 bp, synthetic construct
  misc_feature 1..22: note = Target B2M Sequence complement
  source 1..22: mol_type = other DNA
tatttttgttccacaagttaaa

SEQ ID NO: 13368 - DNA, 22 bp, synthetic construct
  misc_feature 1..22: note = Target B2M Sequence complement
  source 1..22: mol_type = other DNA
atttttgttccacaagttaaat

SEQ ID NO: 13369 - DNA, 22 bp, synthetic construct
  misc_feature 1..22: note = Target B2M Sequence complement
  source 1..22: mol_type = other DNA
tttttgttccacaagttaaata

SEQ ID NO: 13370 - DNA, 22 bp, synthetic construct
  misc_feature 1..22: note = Target B2M Sequence complement
  source 1..22: mol_type = other DNA
ttttgttccacaagttaaataa

SEQ ID NO: 13371 - DNA, 22 bp, synthetic construct
  misc_feature 1..22: note = Target B2M Sequence complement
  source 1..22: mol_type = other DNA
tttgttccacaagttaaataaa

SEQ ID NO: 13372 - DNA, 22 bp, synthetic construct
  misc_feature 1..22: note = Target B2M Sequence complement
  source 1..22: mol_type = other DNA
ttgttccacaagttaaataaat

SEQ ID NO: 13373 - DNA, 22 bp, synthetic construct
  misc_feature 1..22: note = Target B2M Sequence complement
  source 1..22: mol_type = other DNA
ttccacaagttaaataaatcat

SEQ ID NO: 13374 - DNA, 22 bp, synthetic construct
  misc_feature 1..22: note = Target B2M Sequence complement
  source 1..22: mol_type = other DNA
tccacaagttaaataaatcata

SEQ ID NO: 13375 - DNA, 22 bp, synthetic construct
  misc_feature 1..22: note = Target B2M Sequence complement
  source 1..22: mol_type = other DNA
ccacaagttaaataaatcataa

SEQ ID NO: 13376 - DNA, 22 bp, synthetic construct
  misc_feature 1..22: note = Target B2M Sequence complement
  source 1..22: mol_type = other DNA
cacaagttaaataaatcataaa

SEQ ID NO: 13377 - DNA, 22 bp, synthetic construct
  misc_feature 1..22: note = Target B2M Sequence complement
  source 1..22: mol_type = other DNA
acaagttaaataaatcataaaa

SEQ ID NO: 13378 - DNA, 22 bp, synthetic construct
  misc_feature 1..22: note = Target B2M Sequence complement
  source 1..22: mol_type = other DNA
caagttaaataaatcataaaac

SEQ ID NO: 13379 - DNA, 22 bp, synthetic construct
  misc_feature 1..22: note = Target B2M Sequence complement
  source 1..22: mol_type = other DNA
aagttaaataaatcataaaact

SEQ ID NO: 13380 - DNA, 22 bp, synthetic construct
  misc_feature 1..22: note = Target B2M Sequence complement
  source 1..22: mol_type = other DNA
agttaaataaatcataaaactt

SEQ ID NO: 13381 - DNA, 22 bp, synthetic construct
  misc_feature 1..22: note = Target B2M Sequence complement
  source 1..22: mol_type = other DNA
gttaaataaatcataaaacttg

SEQ ID NO: 13382 - DNA, 22 bp, synthetic construct
  misc_feature 1..22: note = Target B2M Sequence complement
  source 1..22: mol_type = other DNA
ttaaataaatcataaaacttga

SEQ ID NO: 13383 - DNA, 46 bp, synthetic construct
  misc_feature 1..46: note = B2M targeting shRNA
  source 1..46: mol_type = other DNA
gcactcaaagcttgttaagatcgaaatcttaacaagctttgagtgc

SEQ ID NO: 13384 - DNA, 46 bp, synthetic construct
  misc_feature 1..46: note = B2M targeting shRNA
  source 1..46: mol_type = other DNA
gttaacttccaatttacataccgaagtatgtaaattggaagttaac

SEQ ID NO: 13385 - DNA, 21 bp, synthetic construct
  misc_feature 1..21: note = Target HLA Sequence complement
  source 1..21: mol_type = other DNA
cttcttccttccctattaaaa

SEQ ID NO: 13386 - DNA, 21 bp, synthetic construct
  misc_feature 1..21: note = Target HLA Sequence complement
  source 1..21: mol_type = other DNA
tctcactccatgaggtatttc

SEQ ID NO: 13387 - DNA, 21 bp, synthetic construct
  misc_feature 1..21: note = Target HLA Sequence complement
  source 1..21: mol_type = other DNA
ctctcactccatgaggtattt

SEQ ID NO: 13388 - DNA, 21 bp, synthetic construct
  misc_feature 1..21: note = Target HLA Sequence complement
  source 1..21: mol_type = other DNA
gaggaggaagagctcagatag

SEQ ID NO: 13389 - DNA, 21 bp, synthetic construct
  misc_feature 1..21: note = Target HLA Sequence complement
  source 1..21: mol_type = other DNA
gctctcactccatgaggtatt

SEQ ID NO: 13390 - DNA, 21 bp, synthetic construct
  misc_feature 1..21: note = Target HLA Sequence complement
  source 1..21: mol_type = other DNA
aggattacatcgccctgaaag

SEQ ID NO: 13391 - DNA, 21 bp, synthetic construct
  misc_feature 1..21: note = Target HLA Sequence complement
  source 1..21: mol_type = other DNA
acaccgtccagaggatgtatg

SEQ ID NO: 13392 - DNA, 21 bp, synthetic construct
  misc_feature 1..21: note = Target HLA Sequence complement
  source 1..21: mol_type = other DNA
agggtccttcttcctggatac

SEQ ID NO: 13393 - DNA, 21 bp, synthetic construct
  misc_feature 1..21: note = Target HLA Sequence complement
  source 1..21: mol_type = other DNA
cctacgacggcaaggattaca

SEQ ID NO: 13394 - DNA, 21 bp, synthetic construct
  misc_feature 1..21: note = Target HLA Sequence complement
  source 1..21: mol_type = other DNA
tcactccatgaggtatttctt

SEQ ID NO: 13395 - DNA, 21 bp, synthetic construct
  misc_feature 1..21: note = Target HLA Sequence complement
  source 1..21: mol_type = other DNA
ctacgacggcaaggattacat

SEQ ID NO: 13396 - DNA, 21 bp, synthetic construct
  misc_feature 1..21: note = Target HLA Sequence complement
  source 1..21: mol_type = other DNA
ctcactccatgaggtatttct

SEQ ID NO: 13397 - DNA, 21 bp, synthetic construct
  misc_feature 1..21: note = Target HLA Sequence complement
  source 1..21: mol_type = other DNA
ggaggaagagctcagatagaa

SEQ ID NO: 13398 - DNA, 21 bp, synthetic construct
  misc_feature 1..21: note = Target HLA Sequence complement
  source 1..21: mol_type = other DNA
cacaccgtccagaggatgtat

SEQ ID NO: 13399 - DNA, 21 bp, synthetic construct
  misc_feature 1..21: note = Target HLA Sequence complement
  source 1..21: mol_type = other DNA
cacgctgtctctgaccatgaa

SEQ ID NO: 13400 - DNA, 21 bp, synthetic construct
  misc_feature 1..21: note = Target HLA Sequence complement
  source 1..21: mol_type = other DNA
ctggacaggagcagagataca

SEQ ID NO: 13401 - DNA, 21 bp, synthetic construct
  misc_feature 1..21: note = Target HLA Sequence complement
  source 1..21: mol_type = other DNA
tggaggaggaagagctcagat

SEQ ID NO: 13402 - DNA, 21 bp, synthetic construct
  misc_feature 1..21: note = Target HLA Sequence complement
  source 1..21: mol_type = other DNA
ggctctcactccatgaggtat

SEQ ID NO: 13403 - DNA, 21 bp, synthetic construct
  misc_feature 1..21: note = Target HLA Sequence complement
  source 1..21: mol_type = other DNA
catctctgtctcaacttcatg

SEQ ID NO: 13404 - DNA, 21 bp, synthetic construct
  misc_feature 1..21: note = Target HLA Sequence complement
  source 1..21: mol_type = other DNA
tacgacggcaaggattacatc

SEQ ID NO: 13405 - DNA, 21 bp, synthetic construct
  misc_feature 1..21: note = Target HLA Sequence complement
  source 1..21: mol_type = other DNA
ggattacatcgccctgaaaga

SEQ ID NO: 13406 - DNA, 21 bp, synthetic construct
  misc_feature 1..21: note = Target HLA Sequence complement
  source 1..21: mol_type = other DNA
gattacatcgccctgaaagag

SEQ ID NO: 13407 - DNA, 21 bp, synthetic construct
  misc_feature 1..21: note = Target HLA Sequence complement
  source 1..21: mol_type = other DNA
ctcagaccaccaagcacaagt

SEQ ID NO: 13408 - DNA, 21 bp, synthetic construct
  misc_feature 1..21: note = Target HLA Sequence complement
  source 1..21: mol_type = other DNA
tcacaccgtccagaggatgta

SEQ ID NO: 13409 - DNA, 21 bp, synthetic construct
  misc_feature 1..21: note = Target HLA Sequence complement
  source 1..21: mol_type = other DNA
actccatgaggtatttcttca

SEQ ID NO: 13410 - DNA, 21 bp, synthetic construct
  misc_feature 1..21: note = Target HLA Sequence complement
  source 1..21: mol_type = other DNA
cactccatgaggtatttcttc

SEQ ID NO: 13411 - DNA, 21 bp, synthetic construct
  misc_feature 1..21: note = Target HLA Sequence complement
  source 1..21: mol_type = other DNA
ccatgaggtatttcttcacat

SEQ ID NO: 13412 - DNA, 21 bp, synthetic construct
  misc_feature 1..21: note = Target HLA Sequence complement
  source 1..21: mol_type = other DNA
acttcttccttccctattaaa

SEQ ID NO: 13413 - DNA, 21 bp, synthetic construct
  misc_feature 1..21: note = Target HLA Sequence complement
  source 1..21: mol_type = other DNA
gtgtctctcacagcttgtaaa

SEQ ID NO: 13414 - DNA, 21 bp, synthetic construct
  misc_feature 1..21: note = Target HLA Sequence complement
  source 1..21: mol_type = other DNA
ctgtgttcgtgtaggcataat

SEQ ID NO: 13415 - DNA, 21 bp, synthetic construct
  misc_feature 1..21: note = Target HLA Sequence complement
  source 1..21: mol_type = other DNA
tgtgttcgtgtaggcataatg

SEQ ID NO: 13416 - DNA, 21 bp, synthetic construct
  misc_feature 1..21: note = Target HLA Sequence complement
  source 1..21: mol_type = other DNA
taacttcttccttccctatta

SEQ ID NO: 13417 - DNA, 21 bp, synthetic construct
  misc_feature 1..21: note = Target HLA Sequence complement
  source 1..21: mol_type = other DNA
tctggacaggagcagagatac

SEQ ID NO: 13418 - DNA, 21 bp, synthetic construct
  misc_feature 1..21: note = Target HLA Sequence complement
  source 1..21: mol_type = other DNA
ttgctggcctggttctctttg

SEQ ID NO: 13419 - DNA, 21 bp, synthetic construct
  misc_feature 1..21: note = Target HLA Sequence complement
  source 1..21: mol_type = other DNA
tgtctctcacagcttgtaaag

SEQ ID NO: 13420 - DNA, 21 bp, synthetic construct
  misc_feature 1..21: note = Target HLA Sequence complement
  source 1..21: mol_type = other DNA
acttgaagaaccctgactttg

SEQ ID NO: 13421 - DNA, 21 bp, synthetic construct
  misc_feature 1..21: note = Target HLA Sequence complement
  source 1..21: mol_type = other DNA
gaagaaccctgactttgtttc

SEQ ID NO: 13422 - DNA, 21 bp, synthetic construct
  misc_feature 1..21: note = Target HLA Sequence complement
  source 1..21: mol_type = other DNA
tctgtgttcgtgtaggcataa

SEQ ID NO: 13423 - DNA, 21 bp, synthetic construct
  misc_feature 1..21: note = Target HLA Sequence complement
  source 1..21: mol_type = other DNA
catggtgcactgagctgtaac

SEQ ID NO: 13424 - DNA, 21 bp, synthetic construct
  misc_feature 1..21: note = Target HLA Sequence complement
  source 1..21: mol_type = other DNA
gtaacttcttccttccctatt

SEQ ID NO: 13425 - DNA, 21 bp, synthetic construct
  misc_feature 1..21: note = Target HLA Sequence complement
  source 1..21: mol_type = other DNA
catgtgcagcatgagggtttg

SEQ ID NO: 13426 - DNA, 21 bp, synthetic construct
  misc_feature 1..21: note = Target HLA Sequence complement
  source 1..21: mol_type = other DNA
ttgttcctgcccttccctttg

SEQ ID NO: 13427 - DNA, 21 bp, synthetic construct
  misc_feature 1..21: note = Target HLA Sequence complement
  source 1..21: mol_type = other DNA
acccagttctcactcccattg

SEQ ID NO: 13428 - DNA, 21 bp, synthetic construct
  misc_feature 1..21: note = Target HLA Sequence complement
  source 1..21: mol_type = other DNA
gggtttccagagaagccaatc

SEQ ID NO: 13429 - DNA, 21 bp, synthetic construct
  misc_feature 1..21: note = Target HLA Sequence complement
  source 1..21: mol_type = other DNA
ttctccctctcccaacctatg

SEQ ID NO: 13430 - DNA, 21 bp, synthetic construct
  misc_feature 1..21: note = Target HLA Sequence complement
  source 1..21: mol_type = other DNA
gtctctcacagcttgtaaagt

SEQ ID NO: 13431 - DNA, 21 bp, synthetic construct
  misc_feature 1..21: note = Target HLA Sequence complement
  source 1..21: mol_type = other DNA
tgtgtctctcacagcttgtaa

SEQ ID NO: 13432 - DNA, 21 bp, synthetic construct
  misc_feature 1..21: note = Target HLA Sequence complement
  source 1..21: mol_type = other DNA
gaggaagagctcagatagaaa

SEQ ID NO: 13433 - DNA, 21 bp, synthetic construct
  misc_feature 1..21: note = Target HLA Sequence complement
  source 1..21: mol_type = other DNA
tgaagaaccctgactttgttt

SEQ ID NO: 13434 - DNA, 21 bp, synthetic construct
  misc_feature 1..21: note = Target HLA Sequence complement
  source 1..21: mol_type = other DNA
ttgaagaaccctgactttgtt

SEQ ID NO: 13435 - DNA, 21 bp, synthetic construct
  misc_feature 1..21: note = Target HLA Sequence complement
  source 1..21: mol_type = other DNA
gtgttcgtgtaggcataatgt

SEQ ID NO: 13436 - DNA, 21 bp, synthetic construct
  misc_feature 1..21: note = Target HLA Sequence complement
  source 1..21: mol_type = other DNA
tggtgcactgagctgtaactt

SEQ ID NO: 13437 - DNA, 21 bp, synthetic construct
  misc_feature 1..21: note = Target HLA Sequence complement
  source 1..21: mol_type = other DNA
ctccctctcccaacctatgta

SEQ ID NO: 13438 - DNA, 21 bp, synthetic construct
  misc_feature 1..21: note = Target HLA Sequence complement
  source 1..21: mol_type = other DNA
aggaggaagagctcagataga

SEQ ID NO: 13439 - DNA, 21 bp, synthetic construct
  misc_feature 1..21: note = Target HLA Sequence complement
  source 1..21: mol_type = other DNA
acctatgtagggtccttcttc

SEQ ID NO: 13440 - DNA, 21 bp, synthetic construct
  misc_feature 1..21: note = Target HLA Sequence complement
  source 1..21: mol_type = other DNA
gggtccttcttcctggatact

SEQ ID NO: 13441 - DNA, 21 bp, synthetic construct
  misc_feature 1..21: note = Target HLA Sequence complement
  source 1..21: mol_type = other DNA
ggtccttcttcctggatactc

SEQ ID NO: 13442 - DNA, 21 bp, synthetic construct
  misc_feature 1..21: note = Target HLA Sequence complement
  source 1..21: mol_type = other DNA
gtccttcttcctggatactca

SEQ ID NO: 13443 - DNA, 21 bp, synthetic construct
  misc_feature 1..21: note = Target HLA Sequence complement
  source 1..21: mol_type = other DNA
aagccaatcagtgtcgtcgcg

SEQ ID NO: 13444 - DNA, 21 bp, synthetic construct
  misc_feature 1..21: note = Target HLA Sequence complement
  source 1..21: mol_type = other DNA
aagaggacctgcgctcttgga

SEQ ID NO: 13445 - DNA, 21 bp, synthetic construct
  misc_feature 1..21: note = Target HLA Sequence complement
  source 1..21: mol_type = other DNA
aagtgtgagacagctgccttg

SEQ ID NO: 13446 - DNA, 21 bp, synthetic construct
  misc_feature 1..21: note = Target HLA Sequence complement
  source 1..21: mol_type = other DNA
aaggcacctgcatgtgtctgt

SEQ ID NO: 13447 - DNA, 21 bp, synthetic construct
  misc_feature 1..21: note = Target HLA Sequence complement
  source 1..21: mol_type = other DNA
aatcatctttcctgttccaga

SEQ ID NO: 13448 - DNA, 21 bp, synthetic construct
  misc_feature 1..21: note = Target HLA Sequence complement
  source 1..21: mol_type = other DNA
aaaggcacctgcatgtgtctg

SEQ ID NO: 13449 - DNA, 21 bp, synthetic construct
  misc_feature 1..21: note = Target HLA Sequence complement
  source 1..21: mol_type = other DNA
aaagaggacctgcgctcttgg

SEQ ID NO: 13450 - DNA, 21 bp, synthetic construct
  misc_feature 1..21: note = Target HLA Sequence complement
  source 1..21: mol_type = other DNA
aaacgcatatgactcaccacg

SEQ ID NO: 13451 - DNA, 19 bp, synthetic construct
  misc_feature 1..19: note = Target HLA Sequence complement
  source 1..19: mol_type = other DNA
ggaagagctcagatagaaa

SEQ ID NO: 13452 - DNA, 19 bp, synthetic construct
  misc_feature 1..19: note = Target HLA Sequence complement
  source 1..19: mol_type = other DNA
gggagacacggaaagtgaa

SEQ ID NO: 13453 - DNA, 21 bp, synthetic construct
  misc_feature 1..21: note = Target HLA Sequence complement
  source 1..21: mol_type = other DNA
cacctgccatgtgcagcatga

SEQ ID NO: 13454 - DNA, 21 bp, synthetic construct
  misc_feature 1..21: note = Target HLA Sequence complement
  source 1..21: mol_type = other DNA
ggagatcacactgacctggca

SEQ ID NO: 13455 - DNA, 20 bp, synthetic construct
  misc_feature 1..20: note = Target HLA Sequence complement
  source 1..20: mol_type = other DNA
ggattacatcgccctgaaag

SEQ ID NO: 13456 - DNA, 20 bp, synthetic construct
  misc_feature 1..20: note = Target HLA Sequence complement
  source 1..20: mol_type = other DNA
gcaggagggtccggagtatt

SEQ ID NO: 13457 - DNA, 20 bp, synthetic construct
  misc_feature 1..20: note = Target HLA Sequence complement
  source 1..20: mol_type = other DNA
ggacggggagacacggaaag

SEQ ID NO: 13458 - DNA, 19 bp, synthetic construct
  misc_feature 1..19: note = Target HLA Sequence complement
  source 1..19: mol_type = other DNA
gaaagtgaaggcccactca

SEQ ID NO: 13459 - DNA, 20 bp, synthetic construct
  misc_feature 1..20: note = Target HLA Sequence complement
  source 1..20: mol_type = other DNA
gatacctggagaacgggaag

SEQ ID NO: 13460 - DNA, 20 bp, synthetic construct
  misc_feature 1..20: note = Target HLA Sequence complement
  source 1..20: mol_type = other DNA
gctgtggtggtgccttctgg

SEQ ID NO: 13461 - DNA, 20 bp, synthetic construct
  misc_feature 1..20: note = Target HLA Sequence complement
  source 1..20: mol_type = other DNA
gctactacaaccagagcgag

SEQ ID NO: 13462 - DNA, 19 bp, synthetic construct
  misc_feature 1..19: note = Target HLA Sequence complement
  source 1..19: mol_type = other DNA
gtggctccgcagatacctg

SEQ ID NO: 13463 - DNA, 19 bp, synthetic construct
  misc_feature 1..19: note = Target HLA Sequence complement
  source 1..19: mol_type = other DNA
gccaatcagtgtcgtcgcg

SEQ ID NO: 13464 - DNA, 19 bp, synthetic construct
  misc_feature 1..19: note = Target HLA Sequence complement
  source 1..19: mol_type = other DNA
gaggacctgcgctcttgga

SEQ ID NO: 13465 - DNA, 19 bp, synthetic construct
  misc_feature 1..19: note = Target HLA Sequence complement
  source 1..19: mol_type = other DNA
gtgtgagacagctgccttg

SEQ ID NO: 13466 - DNA, 19 bp, synthetic construct
  misc_feature 1..19: note = Target HLA Sequence complement
  source 1..19: mol_type = other DNA
ggcacctgcatgtgtctgt

SEQ ID NO: 13467 - DNA, 19 bp, synthetic construct
  misc_feature 1..19: note = Target HLA Sequence complement
  source 1..19: mol_type = other DNA
tcatctttcctgttccaga

SEQ ID NO: 13468 - DNA, 19 bp, synthetic construct
  misc_feature 1..19: note = Target HLA Sequence complement
  source 1..19: mol_type = other DNA
aggcacctgcatgtgtctg

SEQ ID NO: 13469 - DNA, 19 bp, synthetic construct
  misc_feature 1..19: note = Target HLA Sequence complement
  source 1..19: mol_type = other DNA
agaggacctgcgctcttgg

SEQ ID NO: 13470 - DNA, 19 bp, synthetic construct
  misc_feature 1..19: note = Target HLA Sequence complement
  source 1..19: mol_type = other DNA
acgcatatgactcaccacg

SEQ ID NO: 13471 - DNA, 21 bp, synthetic construct
  misc_feature 1..21: note = Artificial sequence related to HLA knockouts in cell therapy
  source 1..21: mol_type = other DNA
cttctggacaggagcagagat

SEQ ID NO: 13472 - DNA, 21 bp, synthetic construct
  misc_feature 1..21: note = Artificial sequence related to HLA knockouts in cell therapy
  source 1..21: mol_type = other DNA
gggatggaaccttccagaagt

SEQ ID NO: 13473 - DNA, 21 bp, synthetic construct
  misc_feature 1..21: note = Artificial sequence related to HLA knockouts in cell therapy
  source 1..21: mol_type = other DNA
tggacaggagcagagatacac

SEQ ID NO: 13474 - DNA, 21 bp, synthetic construct
  misc_feature 1..21: note = Artificial sequence related to HLA knockouts in cell therapy
  source 1..21: mol_type = other DNA
acgctgtctctgaccatgaag

SEQ ID NO: 13475 - DNA, 21 bp, synthetic construct
  misc_feature 1..21: note = Artificial sequence related to HLA knockouts in cell therapy
  source 1..21: mol_type = other DNA
ttctggacaggagcagagata

SEQ ID NO: 13476 - DNA, 21 bp, synthetic construct
  misc_feature 1..21: note = Artificial sequence related to HLA knockouts in cell therapy
  source 1..21: mol_type = other DNA
ggttctctttggagctgtgat

SEQ ID NO: 13477 - DNA, 21 bp, synthetic construct
  misc_feature 1..21: note = Artificial sequence related to HLA knockouts in cell therapy
  source 1..21: mol_type = other DNA
cattgctggcctggttctctt

SEQ ID NO: 13478 - DNA, 21 bp, synthetic construct
  misc_feature 1..21: note = Artificial sequence related to HLA knockouts in cell therapy
  source 1..21: mol_type = other DNA
ttctctttggagctgtgatca

SEQ ID NO: 13479 - DNA, 21 bp, synthetic construct
  misc_feature 1..21: note = Artificial sequence related to HLA knockouts in cell therapy
  source 1..21: mol_type = other DNA
attgctggcctggttctcttt

SEQ ID NO: 13480 - DNA, 21 bp, synthetic construct
  misc_feature 1..21: note = Artificial sequence related to HLA knockouts in cell therapy
  source 1..21: mol_type = other DNA
atgtgtctctcacagcttgta

SEQ ID NO: 13481 - DNA, 21 bp, synthetic construct
  misc_feature 1..21: note = Artificial sequence related to HLA knockouts in cell therapy
  source 1..21: mol_type = other DNA
ccctgactttgtttctgcaaa

SEQ ID NO: 13482 - DNA, 21 bp, synthetic construct
  misc_feature 1..21: note = Artificial sequence related to HLA knockouts in cell therapy
  source 1..21: mol_type = other DNA
gcacctgcatgtgtctgtgtt

SEQ ID NO: 13483 - DNA, 21 bp, synthetic construct
  misc_feature 1..21: note = Artificial sequence related to HLA knockouts in cell therapy
  source 1..21: mol_type = other DNA
gcccttccctttgtgacttga

SEQ ID NO: 13484 - DNA, 21 bp, synthetic construct
  misc_feature 1..21: note = Artificial sequence related to HLA knockouts in cell therapy
  source 1..21: mol_type = other DNA
agaaccctgactttgtttctg

SEQ ID NO: 13485 - DNA, 21 bp, synthetic construct
  misc_feature 1..21: note = Artificial sequence related to HLA knockouts in cell therapy
  source 1..21: mol_type = other DNA
tccatctctgtctcaacttca

SEQ ID NO: 13486 - DNA, 21 bp, synthetic construct
  misc_feature 1..21: note = Artificial sequence related to HLA knockouts in cell therapy
  source 1..21: mol_type = other DNA
gtgcactgagctgtaacttct

SEQ ID NO: 13487 - DNA, 21 bp, synthetic construct
  misc_feature 1..21: note = Artificial sequence related to HLA knockouts in cell therapy
  source 1..21: mol_type = other DNA
ctgcccttccctttgtgactt

SEQ ID NO: 13488 - DNA, 21 bp, synthetic construct
  misc_feature 1..21: note = Artificial sequence related to HLA knockouts in cell therapy
  source 1..21: mol_type = other DNA
tgacttgaagaaccctgactt

SEQ ID NO: 13489 - DNA, 21 bp, synthetic construct
  misc_feature 1..21: note = Artificial sequence related to HLA knockouts in cell therapy
  source 1..21: mol_type = other DNA
gtgtctccatctctgtctcaa

SEQ ID NO: 13490 - DNA, 21 bp, synthetic construct
  misc_feature 1..21: note = Artificial sequence related to HLA knockouts in cell therapy
  source 1..21: mol_type = other DNA
tgcactgagctgtaacttctt

SEQ ID NO: 13491 - DNA, 21 bp, synthetic construct
  misc_feature 1..21: note = Artificial sequence related to HLA knockouts in cell therapy
  source 1..21: mol_type = other DNA
tgttcctgcccttccctttgt

SEQ ID NO: 13492 - DNA, 21 bp, synthetic construct
  misc_feature 1..21: note = Artificial sequence related to HLA knockouts in cell therapy
  source 1..21: mol_type = other DNA
gacttgaagaaccctgacttt

SEQ ID NO: 13493 - DNA, 21 bp, synthetic construct
  misc_feature 1..21: note = Artificial sequence related to HLA knockouts in cell therapy
  source 1..21: mol_type = other DNA
tctctcacagcttgtaaagtg

SEQ ID NO: 13494 - DNA, 21 bp, synthetic construct
  misc_feature 1..21: note = Artificial sequence related to HLA knockouts in cell therapy
  source 1..21: mol_type = other DNA
ggaggaggaagagctcagata

SEQ ID NO: 13495 - DNA, 21 bp, synthetic construct
  misc_feature 1..21: note = Artificial sequence related to HLA knockouts in cell therapy
  source 1..21: mol_type = other DNA
ggactgagaggcaagagttgt

SEQ ID NO: 13496 - DNA, 21 bp, synthetic construct
  misc_feature 1..21: note = Artificial sequence related to HLA knockouts in cell therapy
  source 1..21: mol_type = other DNA
actgagaggcaagagttgttc

SEQ ID NO: 13497 - DNA, 21 bp, synthetic construct
  misc_feature 1..21: note = Artificial sequence related to HLA knockouts in cell therapy
  source 1..21: mol_type = other DNA
tgggactgagaggcaagagtt

SEQ ID NO: 13498 - DNA, 21 bp, synthetic construct
  misc_feature 1..21: note = Artificial sequence related to HLA knockouts in cell therapy
  source 1..21: mol_type = other DNA
gactgagaggcaagagttgtt

SEQ ID NO: 13499 - DNA, 21 bp, synthetic construct
  misc_feature 1..21: note = Artificial sequence related to HLA knockouts in cell therapy
  source 1..21: mol_type = other DNA
cccttccctttgtgacttgaa

SEQ ID NO: 13500 - DNA, 21 bp, synthetic construct
  misc_feature 1..21: note = Artificial sequence related to HLA knockouts in cell therapy
  source 1..21: mol_type = other DNA
gtttccagagaagccaatcag

SEQ ID NO: 13501 - DNA, 21 bp, synthetic construct
  misc_feature 1..21: note = Artificial sequence related to HLA knockouts in cell therapy
  source 1..21: mol_type = other DNA
ggtttccagagaagccaatca

SEQ ID NO: 13502 - DNA, 21 bp, synthetic construct
  misc_feature 1..21: note = Artificial sequence related to HLA knockouts in cell therapy
  source 1..21: mol_type = other DNA
ccttccctttgtgacttgaag

SEQ ID NO: 13503 - DNA, 21 bp, synthetic construct
  misc_feature 1..21: note = Artificial sequence related to HLA knockouts in cell therapy
  source 1..21: mol_type = other DNA
tccctttgtgacttgaagaac

SEQ ID NO: 13504 - DNA, 21 bp, synthetic construct
  misc_feature 1..21: note = Artificial sequence related to HLA knockouts in cell therapy
  source 1..21: mol_type = other DNA
ttccctttgtgacttgaagaa

SEQ ID NO: 13505 - DNA, 21 bp, synthetic construct
  misc_feature 1..21: note = Artificial sequence related to HLA knockouts in cell therapy
  source 1..21: mol_type = other DNA
cttccctttgtgacttgaaga

SEQ ID NO: 13506 - DNA, 21 bp, synthetic construct
  misc_feature 1..21: note = Artificial sequence related to HLA knockouts in cell therapy
  source 1..21: mol_type = other DNA
cttgaagaaccctgactttgt

SEQ ID NO: 13507 - DNA, 21 bp, synthetic construct
  misc_feature 1..21: note = Artificial sequence related to HLA knockouts in cell therapy
  source 1..21: mol_type = other DNA
gcactgagctgtaacttcttc

SEQ ID NO: 13508 - DNA, 21 bp, synthetic construct
  misc_feature 1..21: note = Artificial sequence related to HLA knockouts in cell therapy
  source 1..21: mol_type = other DNA
tgttcgtgtaggcataatgtg

SEQ ID NO: 13509 - DNA, 21 bp, synthetic construct
  misc_feature 1..21: note = Artificial sequence related to HLA knockouts in cell therapy
  source 1..21: mol_type = other DNA
ccatctctgtctcaacttcat

SEQ ID NO: 13510 - DNA, 21 bp, synthetic construct
  misc_feature 1..21: note = Artificial sequence related to HLA knockouts in cell therapy
  source 1..21: mol_type = other DNA
tcatggtgcactgagctgtaa

SEQ ID NO: 13511 - DNA, 21 bp, synthetic construct
  misc_feature 1..21: note = Artificial sequence related to HLA knockouts in cell therapy
  source 1..21: mol_type = other DNA
gtctccatctctgtctcaact

SEQ ID NO: 13512 - DNA, 21 bp, synthetic construct
  misc_feature 1..21: note = Artificial sequence related to HLA knockouts in cell therapy
  source 1..21: mol_type = other DNA
tctccatctctgtctcaactt

SEQ ID NO: 13513 - DNA, 21 bp, synthetic construct
  misc_feature 1..21: note = Artificial sequence related to HLA knockouts in cell therapy
  source 1..21: mol_type = other DNA
ctccatctctgtctcaacttc

SEQ ID NO: 13514 - DNA, 21 bp, synthetic construct
  misc_feature 1..21: note = Artificial sequence related to HLA knockouts in cell therapy
  source 1..21: mol_type = other DNA
atggtgcactgagctgtaact

SEQ ID NO: 13515 - DNA, 21 bp, synthetic construct
  misc_feature 1..21: note = Artificial sequence related to HLA knockouts in cell therapy
  source 1..21: mol_type = other DNA
ggtgcactgagctgtaacttc

SEQ ID NO: 13516 - DNA, 21 bp, synthetic construct
  misc_feature 1..21: note = Artificial sequence related to HLA knockouts in cell therapy
  source 1..21: mol_type = other DNA
tagggtccttcttcctggata

SEQ ID NO: 13517 - DNA, 21 bp, synthetic construct
  misc_feature 1..21: note = Artificial sequence related to HLA knockouts in cell therapy
  source 1..21: mol_type = other DNA
tctccctctcccaacctatgt

SEQ ID NO: 13518 - DNA, 21 bp, synthetic construct
  misc_feature 1..21: note = Artificial sequence related to HLA knockouts in cell therapy
  source 1..21: mol_type = other DNA
tccctctcccaacctatgtag

SEQ ID NO: 13519 - DNA, 21 bp, synthetic construct
  misc_feature 1..21: note = Artificial sequence related to HLA knockouts in cell therapy
  source 1..21: mol_type = other DNA
tttctccctctcccaacctat

SEQ ID NO: 13520 - DNA, 21 bp, synthetic construct
  misc_feature 1..21: note = Artificial sequence related to HLA knockouts in cell therapy
  source 1..21: mol_type = other DNA
agcaggagggtccggagtatt

SEQ ID NO: 13521 - DNA, 21 bp, synthetic construct
  misc_feature 1..21: note = Artificial sequence related to HLA knockouts in cell therapy
  source 1..21: mol_type = other DNA
gctctgatgtgtctctcacag

SEQ ID NO: 13522 - DNA, 21 bp, synthetic construct
  misc_feature 1..21: note = Artificial sequence related to HLA knockouts in cell therapy
  source 1..21: mol_type = other DNA
caaggattacatcgccctgaa

SEQ ID NO: 13523 - DNA, 21 bp, synthetic construct
  misc_feature 1..21: note = Artificial sequence related to HLA knockouts in cell therapy
  source 1..21: mol_type = other DNA
agcttgtaaagtgtgagacag

SEQ ID NO: 13524 - DNA, 21 bp, synthetic construct
  misc_feature 1..21: note = Artificial sequence related to HLA knockouts in cell therapy
  source 1..21: mol_type = other DNA
acgacggcaaggattacatcg

SEQ ID NO: 13525 - DNA, 21 bp, synthetic construct
  misc_feature 1..21: note = Artificial sequence related to HLA knockouts in cell therapy
  source 1..21: mol_type = other DNA
tcagaccaccaagcacaagtg

SEQ ID NO: 13526 - DNA, 21 bp, synthetic construct
  misc_feature 1..21: note = Artificial sequence related to HLA knockouts in cell therapy
  source 1..21: mol_type = other DNA
agctcagaccaccaagcacaa

SEQ ID NO: 13527 - DNA, 21 bp, synthetic construct
  misc_feature 1..21: note = Artificial sequence related to HLA knockouts in cell therapy
  source 1..21: mol_type = other DNA
cagagatacacctgccatgtg

SEQ ID NO: 13528 - DNA, 21 bp, synthetic construct
  misc_feature 1..21: note = Artificial sequence related to HLA knockouts in cell therapy
  source 1..21: mol_type = other DNA
atgaggtatttcttcacatcc

SEQ ID NO: 13529 - DNA, 21 bp, synthetic construct
  misc_feature 1..21: note = Artificial sequence related to HLA knockouts in cell therapy
  source 1..21: mol_type = other DNA
ctccatgaggtatttcttcac

SEQ ID NO: 13530 - DNA, 21 bp, synthetic construct
  misc_feature 1..21: note = Artificial sequence related to HLA knockouts in cell therapy
  source 1..21: mol_type = other DNA
cactgagctgtaacttcttcc

SEQ ID NO: 13531 - DNA, 21 bp, synthetic construct
  misc_feature 1..21: note = Artificial sequence related to HLA knockouts in cell therapy
  source 1..21: mol_type = other DNA
cctatgtagggtccttcttcc

SEQ ID NO: 13532 - DNA, 21 bp, synthetic construct
  misc_feature 1..21: note = Artificial sequence related to HLA knockouts in cell therapy
  source 1..21: mol_type = other DNA
catgaggtatttcttcacatc

SEQ ID NO: 13533 - DNA, 21 bp, synthetic construct
  misc_feature 1..21: note = Artificial sequence related to HLA knockouts in cell therapy
  source 1..21: mol_type = other DNA
catctttcctgttccagagag

SEQ ID NO: 13534 - DNA, 21 bp, synthetic construct
  misc_feature 1..21: note = Artificial sequence related to HLA knockouts in cell therapy
  source 1..21: mol_type = other DNA
tcaacttcatggtgcactgag

SEQ ID NO: 13535 - DNA, 21 bp, synthetic construct
  misc_feature 1..21: note = Artificial sequence related to HLA knockouts in cell therapy
  source 1..21: mol_type = other DNA
ggatggaaccttccagaagtg

SEQ ID NO: 13536 - DNA, 21 bp, synthetic construct
  misc_feature 1..21: note = Artificial sequence related to HLA knockouts in cell therapy
  source 1..21: mol_type = other DNA
gcagagatacacctgccatgt

SEQ ID NO: 13537 - DNA, 21 bp, synthetic construct
  misc_feature 1..21: note = Artificial sequence related to HLA knockouts in cell therapy
  source 1..21: mol_type = other DNA
ccatgtgcagcatgagggttt

SEQ ID NO: 13538 - DNA, 21 bp, synthetic construct
  misc_feature 1..21: note = Artificial sequence related to HLA knockouts in cell therapy
  source 1..21: mol_type = other DNA
tatgactcaccacgctgtctc

SEQ ID NO: 13539 - DNA, 21 bp, synthetic construct
  misc_feature 1..21: note = Artificial sequence related to HLA knockouts in cell therapy
  source 1..21: mol_type = other DNA
aggtgtctccatctctgtctc

SEQ ID NO: 13540 - DNA, 21 bp, synthetic construct
  misc_feature 1..21: note = Artificial sequence related to HLA knockouts in cell therapy
  source 1..21: mol_type = other DNA
atgtgcagcatgagggtttgc

SEQ ID NO: 13541 - DNA, 21 bp, synthetic construct
  misc_feature 1..21: note = Artificial sequence related to HLA knockouts in cell therapy
  source 1..21: mol_type = other DNA
tgtgatgtggaggaggaagag

SEQ ID NO: 13542 - DNA, 21 bp, synthetic construct
  misc_feature 1..21: note = Artificial sequence related to HLA knockouts in cell therapy
  source 1..21: mol_type = other DNA
catcattgctggcctggttct

SEQ ID NO: 13543 - DNA, 21 bp, synthetic construct
  misc_feature 1..21: note = Artificial sequence related to HLA knockouts in cell therapy
  source 1..21: mol_type = other DNA
atcattgctggcctggttctc

SEQ ID NO: 13544 - DNA, 21 bp, synthetic construct
  misc_feature 1..21: note = Artificial sequence related to HLA knockouts in cell therapy
  source 1..21: mol_type = other DNA
ttcatggtgcactgagctgta

SEQ ID NO: 13545 - DNA, 21 bp, synthetic construct
  misc_feature 1..21: note = Artificial sequence related to HLA knockouts in cell therapy
  source 1..21: mol_type = other DNA
ctgtgatgtggaggaggaaga

SEQ ID NO: 13546 - DNA, 21 bp, synthetic construct
  misc_feature 1..21: note = Artificial sequence related to HLA knockouts in cell therapy
  source 1..21: mol_type = other DNA
tctctttggagctgtgatcac

SEQ ID NO: 13547 - DNA, 21 bp, synthetic construct
  misc_feature 1..21: note = Artificial sequence related to HLA knockouts in cell therapy
  source 1..21: mol_type = other DNA
gttctctttggagctgtgatc

SEQ ID NO: 13548 - DNA, 21 bp, synthetic construct
  misc_feature 1..21: note = Artificial sequence related to HLA knockouts in cell therapy
  source 1..21: mol_type = other DNA
tctttggagctgtgatcactg

SEQ ID NO: 13549 - DNA, 21 bp, synthetic construct
  misc_feature 1..21: note = Artificial sequence related to HLA knockouts in cell therapy
  source 1..21: mol_type = other DNA
tgatgtgtctctcacagcttg

SEQ ID NO: 13550 - DNA, 21 bp, synthetic construct
  misc_feature 1..21: note = Artificial sequence related to HLA knockouts in cell therapy
  source 1..21: mol_type = other DNA
gatgtgtctctcacagcttgt

SEQ ID NO: 13551 - DNA, 21 bp, synthetic construct
  misc_feature 1..21: note = Artificial sequence related to HLA knockouts in cell therapy
  source 1..21: mol_type = other DNA
acagcttgtaaagtgtgagac

SEQ ID NO: 13552 - DNA, 21 bp, synthetic construct
  misc_feature 1..21: note = Artificial sequence related to HLA knockouts in cell therapy
  source 1..21: mol_type = other DNA
agtgtgagacagctgccttgt

SEQ ID NO: 13553 - DNA, 21 bp, synthetic construct
  misc_feature 1..21: note = Artificial sequence related to HLA knockouts in cell therapy
  source 1..21: mol_type = other DNA
atctctgtctcaacttcatgg

SEQ ID NO: 13554 - DNA, 21 bp, synthetic construct
  misc_feature 1..21: note = Artificial sequence related to HLA knockouts in cell therapy
  source 1..21: mol_type = other DNA
catgtccaccatgaccctctt

SEQ ID NO: 13555 - DNA, 21 bp, synthetic construct
  misc_feature 1..21: note = Artificial sequence related to HLA knockouts in cell therapy
  source 1..21: mol_type = other DNA
cccaatcatctttcctgttcc

SEQ ID NO: 13556 - DNA, 21 bp, synthetic construct
  misc_feature 1..21: note = Artificial sequence related to HLA knockouts in cell therapy
  source 1..21: mol_type = other DNA
gttgttcctgcccttcccttt

SEQ ID NO: 13557 - DNA, 21 bp, synthetic construct
  misc_feature 1..21: note = Artificial sequence related to HLA knockouts in cell therapy
  source 1..21: mol_type = other DNA
atgtccaccatgaccctcttc

SEQ ID NO: 13558 - DNA, 21 bp, synthetic construct
  misc_feature 1..21: note = Artificial sequence related to HLA knockouts in cell therapy
  source 1..21: mol_type = other DNA
tctcacagcttgtaaagtgtg

SEQ ID NO: 13559 - DNA, 21 bp, synthetic construct
  misc_feature 1..21: note = Artificial sequence related to HLA knockouts in cell therapy
  source 1..21: mol_type = other DNA
ctgagaggcaagagttgttcc

SEQ ID NO: 13560 - DNA, 21 bp, synthetic construct
  misc_feature 1..21: note = Artificial sequence related to HLA knockouts in cell therapy
  source 1..21: mol_type = other DNA
tgcccttccctttgtgacttg

SEQ ID NO: 13561 - DNA, 21 bp, synthetic construct
  misc_feature 1..21: note = Artificial sequence related to HLA knockouts in cell therapy
  source 1..21: mol_type = other DNA
gacccagttctcactcccatt

SEQ ID NO: 13562 - DNA, 21 bp, synthetic construct
  misc_feature 1..21: note = Artificial sequence related to HLA knockouts in cell therapy
  source 1..21: mol_type = other DNA
cacctgcatgtgtctgtgttc

SEQ ID NO: 13563 - DNA, 21 bp, synthetic construct
  misc_feature 1..21: note = Artificial sequence related to HLA knockouts in cell therapy
  source 1..21: mol_type = other DNA
tgaggtgtctccatctctgtc

SEQ ID NO: 13564 - DNA, 21 bp, synthetic construct
  misc_feature 1..21: note = Artificial sequence related to HLA knockouts in cell therapy
  source 1..21: mol_type = other DNA
tgtctccatctctgtctcaac

SEQ ID NO: 13565 - DNA, 21 bp, synthetic construct
  misc_feature 1..21: note = Artificial sequence related to HLA knockouts in cell therapy
  source 1..21: mol_type = other DNA
ccaacctatgtagggtccttc

SEQ ID NO: 13566 - DNA, 21 bp, synthetic construct
  misc_feature 1..21: note = Artificial sequence related to HLA knockouts in cell therapy
  source 1..21: mol_type = other DNA
caacctatgtagggtccttct

SEQ ID NO: 13567 - DNA, 21 bp, synthetic construct
  misc_feature 1..21: note = Artificial sequence related to HLA knockouts in cell therapy
  source 1..21: mol_type = other DNA
ttccagagaagccaatcagtg

SEQ ID NO: 13568 - DNA, 21 bp, synthetic construct
  misc_feature 1..21: note = Artificial sequence related to HLA knockouts in cell therapy
  source 1..21: mol_type = other DNA
ccagagaagccaatcagtgtc

SEQ ID NO: 13569 - DNA, 21 bp, synthetic construct
  misc_feature 1..21: note = Artificial sequence related to HLA knockouts in cell therapy
  source 1..21: mol_type = other DNA
cgggtttccagagaagccaat

SEQ ID NO: 13570 - DNA, 21 bp, synthetic construct
  misc_feature 1..21: note = Artificial sequence related to HLA knockouts in cell therapy
  source 1..21: mol_type = other DNA
ccctttgtgacttgaagaacc

SEQ ID NO: 13571 - DNA, 21 bp, synthetic construct
  misc_feature 1..21: note = Artificial sequence related to HLA knockouts in cell therapy
  source 1..21: mol_type = other DNA
tctgcaaaggcacctgcatgt

SEQ ID NO: 13572 - DNA, 21 bp, synthetic construct
  misc_feature 1..21: note = Artificial sequence related to HLA knockouts in cell therapy
  source 1..21: mol_type = other DNA
ttcgtgtaggcataatgtgag

SEQ ID NO: 13573 - DNA, 21 bp, synthetic construct
  misc_feature 1..21: note = Artificial sequence related to HLA knockouts in cell therapy
  source 1..21: mol_type = other DNA
ttctgcaaaggcacctgcatg

SEQ ID NO: 13574 - DNA, 21 bp, synthetic construct
  misc_feature 1..21: note = Artificial sequence related to HLA knockouts in cell therapy
  source 1..21: mol_type = other DNA
acctgcatgtgtctgtgttcg

SEQ ID NO: 13575 - DNA, 21 bp, synthetic construct
  misc_feature 1..21: note = Artificial sequence related to HLA knockouts in cell therapy
  source 1..21: mol_type = other DNA
gtctgtgttcgtgtaggcata

SEQ ID NO: 13576 - DNA, 21 bp, synthetic construct
  misc_feature 1..21: note = Artificial sequence related to HLA knockouts in cell therapy
  source 1..21: mol_type = other DNA
gcatgtgtctgtgttcgtgta

SEQ ID NO: 13577 - DNA, 21 bp, synthetic construct
  misc_feature 1..21: note = Artificial sequence related to HLA knockouts in cell therapy
  source 1..21: mol_type = other DNA
catgtgtctgtgttcgtgtag

SEQ ID NO: 13578 - DNA, 21 bp, synthetic construct
  misc_feature 1..21: note = Artificial sequence related to HLA knockouts in cell therapy
  source 1..21: mol_type = other DNA
atgtgtctgtgttcgtgtagg

SEQ ID NO: 13579 - DNA, 21 bp, synthetic construct
  misc_feature 1..21: note = Artificial sequence related to HLA knockouts in cell therapy
  source 1..21: mol_type = other DNA
tgtaacttcttccttccctat

SEQ ID NO: 13580 - DNA, 21 bp, synthetic construct
  misc_feature 1..21: note = Artificial sequence related to HLA knockouts in cell therapy
  source 1..21: mol_type = other DNA
tgagctgtaacttcttccttc

SEQ ID NO: 13581 - DNA, 21 bp, synthetic construct
  misc_feature 1..21: note = Artificial sequence related to HLA knockouts in cell therapy
  source 1..21: mol_type = other DNA
tccttcttcctggatactcac

SEQ ID NO: 13582 - DNA, 21 bp, synthetic construct
  misc_feature 1..21: note = Artificial sequence related to HLA knockouts in cell therapy
  source 1..21: mol_type = other DNA
gcctacgacggcaaggattac

SEQ ID NO: 13583 - DNA, 21 bp, synthetic construct
  misc_feature 1..21: note = Artificial sequence related to HLA knockouts in cell therapy
  source 1..21: mol_type = other DNA
cgcctacgacggcaaggatta

SEQ ID NO: 13584 - DNA, 21 bp, synthetic construct
  misc_feature 1..21: note = Artificial sequence related to HLA knockouts in cell therapy
  source 1..21: mol_type = other DNA
tcattgctggcctggttctct

SEQ ID NO: 13585 - DNA, 21 bp, synthetic construct
  misc_feature 1..21: note = Artificial sequence related to HLA knockouts in cell therapy
  source 1..21: mol_type = other DNA
ctgagctgtaacttcttcctt

SEQ ID NO: 13586 - DNA, 21 bp, synthetic construct
  misc_feature 1..21: note = Artificial sequence related to HLA knockouts in cell therapy
  source 1..21: mol_type = other DNA
ctctcacagcttgtaaagtgt

SEQ ID NO: 13587 - DNA, 21 bp, synthetic construct
  misc_feature 1..21: note = Artificial sequence related to HLA knockouts in cell therapy
  source 1..21: mol_type = other DNA
tgcaaaggcacctgcatgtgt

SEQ ID NO: 13588 - DNA, 21 bp, synthetic construct
  misc_feature 1..21: note = Artificial sequence related to HLA knockouts in cell therapy
  source 1..21: mol_type = other DNA
tccatgaggtatttcttcaca

SEQ ID NO: 13589 - DNA, 21 bp, synthetic construct
  misc_feature 1..21: note = Artificial sequence related to HLA knockouts in cell therapy
  source 1..21: mol_type = other DNA
ttctaccctgcggagatcaca

SEQ ID NO: 13590 - DNA, 21 bp, synthetic construct
  misc_feature 1..21: note = Artificial sequence related to HLA knockouts in cell therapy
  source 1..21: mol_type = other DNA
ctctttggagctgtgatcact

SEQ ID NO: 13591 - DNA, 21 bp, synthetic construct
  misc_feature 1..21: note = Artificial sequence related to HLA knockouts in cell therapy
  source 1..21: mol_type = other DNA
gttcgtgtaggcataatgtga

SEQ ID NO: 13592 - DNA, 21 bp, synthetic construct
  misc_feature 1..21: note = Artificial sequence related to HLA knockouts in cell therapy
  source 1..21: mol_type = other DNA
tgtgagacagctgccttgtgt

SEQ ID NO: 13593 - DNA, 21 bp, synthetic construct
  misc_feature 1..21: note = Artificial sequence related to HLA knockouts in cell therapy
  source 1..21: mol_type = other DNA
ttcctgcccttccctttgtga

SEQ ID NO: 13594 - DNA, 21 bp, synthetic construct
  misc_feature 1..21: note = Artificial sequence related to HLA knockouts in cell therapy
  source 1..21: mol_type = other DNA
tttccagagaagccaatcagt

SEQ ID NO: 13595 - DNA, 21 bp, synthetic construct
  misc_feature 1..21: note = Artificial sequence related to HLA knockouts in cell therapy
  source 1..21: mol_type = other DNA
ttctcacaccgtccagaggat

SEQ ID NO: 13596 - DNA, 21 bp, synthetic construct
  misc_feature 1..21: note = Artificial sequence related to HLA knockouts in cell therapy
  source 1..21: mol_type = other DNA
ggctctgatgtgtctctcaca

SEQ ID NO: 13597 - DNA, 21 bp, synthetic construct
  misc_feature 1..21: note = Artificial sequence related to HLA knockouts in cell therapy
  source 1..21: mol_type = other DNA
tcatctttcctgttccagaga

SEQ ID NO: 13598 - DNA, 21 bp, synthetic construct
  misc_feature 1..21: note = Artificial sequence related to HLA knockouts in cell therapy
  source 1..21: mol_type = other DNA
gtagggtccttcttcctggat

SEQ ID NO: 13599 - DNA, 21 bp, synthetic construct
  misc_feature 1..21: note = Artificial sequence related to HLA knockouts in cell therapy
  source 1..21: mol_type = other DNA
gaaagtgaaggcccactcaca

SEQ ID NO: 13600 - DNA, 21 bp, synthetic construct
  misc_feature 1..21: note = Artificial sequence related to HLA knockouts in cell therapy
  source 1..21: mol_type = other DNA
atacctggagaacgggaagga

SEQ ID NO: 13601 - DNA, 21 bp, synthetic construct
  misc_feature 1..21: note = Artificial sequence related to HLA knockouts in cell therapy
  source 1..21: mol_type = other DNA
tgcatgtgtctgtgttcgtgt

SEQ ID NO: 13602 - DNA, 21 bp, synthetic construct
  misc_feature 1..21: note = Artificial sequence related to HLA knockouts in cell therapy
  source 1..21: mol_type = other DNA
ctgcatgtgtctgtgttcgtg

SEQ ID NO: 13603 - DNA, 21 bp, synthetic construct
  misc_feature 1..21: note = Artificial sequence related to HLA knockouts in cell therapy
  source 1..21: mol_type = other DNA
cttgtaaagtgtgagacagct

SEQ ID NO: 13604 - DNA, 21 bp, synthetic construct
  misc_feature 1..21: note = Artificial sequence related to HLA knockouts in cell therapy
  source 1..21: mol_type = other DNA
tatgtagggtccttcttcctg

SEQ ID NO: 13605 - DNA, 21 bp, synthetic construct
  misc_feature 1..21: note = Artificial sequence related to HLA knockouts in cell therapy
  source 1..21: mol_type = other DNA
ttacatcgccctgaaagagga

SEQ ID NO: 13606 - DNA, 21 bp, synthetic construct
  misc_feature 1..21: note = Artificial sequence related to HLA knockouts in cell therapy
  source 1..21: mol_type = other DNA
attacatcgccctgaaagagg

SEQ ID NO: 13607 - DNA, 21 bp, synthetic construct
  misc_feature 1..21: note = Artificial sequence related to HLA knockouts in cell therapy
  source 1..21: mol_type = other DNA
agagatacacctgccatgtgc

SEQ ID NO: 13608 - DNA, 21 bp, synthetic construct
  misc_feature 1..21: note = Artificial sequence related to HLA knockouts in cell therapy
  source 1..21: mol_type = other DNA
gacaggagcagagatacacct

SEQ ID NO: 13609 - DNA, 21 bp, synthetic construct
  misc_feature 1..21: note = Artificial sequence related to HLA knockouts in cell therapy
  source 1..21: mol_type = other DNA
tgctgtgatgtggaggaggaa

SEQ ID NO: 13610 - DNA, 21 bp, synthetic construct
  misc_feature 1..21: note = Artificial sequence related to HLA knockouts in cell therapy
  source 1..21: mol_type = other DNA
tacacctgccatgtgcagcat

SEQ ID NO: 13611 - DNA, 21 bp, synthetic construct
  misc_feature 1..21: note = Artificial sequence related to HLA knockouts in cell therapy
  source 1..21: mol_type = other DNA
atgtggaggaggaagagctca

SEQ ID NO: 13612 - DNA, 21 bp, synthetic construct
  misc_feature 1..21: note = Artificial sequence related to HLA knockouts in cell therapy
  source 1..21: mol_type = other DNA
gatggaaccttccagaagtgg

SEQ ID NO: 13613 - DNA, 21 bp, synthetic construct
  misc_feature 1..21: note = Artificial sequence related to HLA knockouts in cell therapy
  source 1..21: mol_type = other DNA
gagatacacctgccatgtgca

SEQ ID NO: 13614 - DNA, 21 bp, synthetic construct
  misc_feature 1..21: note = Artificial sequence related to HLA knockouts in cell therapy
  source 1..21: mol_type = other DNA
attgggtgtcgggtttccaga

SEQ ID NO: 13615 - DNA, 21 bp, synthetic construct
  misc_feature 1..21: note = Artificial sequence related to HLA knockouts in cell therapy
  source 1..21: mol_type = other DNA
tgtgatcactggagctgtggt

SEQ ID NO: 13616 - DNA, 21 bp, synthetic construct
  misc_feature 1..21: note = Artificial sequence related to HLA knockouts in cell therapy
  source 1..21: mol_type = other DNA
atgactcaccacgctgtctct

SEQ ID NO: 13617 - DNA, 21 bp, synthetic construct
  misc_feature 1..21: note = Artificial sequence related to HLA knockouts in cell therapy
  source 1..21: mol_type = other DNA
ggtgtctccatctctgtctca

SEQ ID NO: 13618 - DNA, 21 bp, synthetic construct
  misc_feature 1..21: note = Artificial sequence related to HLA knockouts in cell therapy
  source 1..21: mol_type = other DNA
tggttctctttggagctgtga

SEQ ID NO: 13619 - DNA, 21 bp, synthetic construct
  misc_feature 1..21: note = Artificial sequence related to HLA knockouts in cell therapy
  source 1..21: mol_type = other DNA
tcgggtttccagagaagccaa

SEQ ID NO: 13620 - DNA, 21 bp, synthetic construct
  misc_feature 1..21: note = Artificial sequence related to HLA knockouts in cell therapy
  source 1..21: mol_type = other DNA
tttctgcaaaggcacctgcat

SEQ ID NO: 13621 - DNA, 21 bp, synthetic construct
  misc_feature 1..21: note = Artificial sequence related to HLA knockouts in cell therapy
  source 1..21: mol_type = other DNA
ctgaggtgtctccatctctgt

SEQ ID NO: 13622 - DNA, 21 bp, synthetic construct
  misc_feature 1..21: note = Artificial sequence related to HLA knockouts in cell therapy
  source 1..21: mol_type = other DNA
gagcagagatacacctgccat

SEQ ID NO: 13623 - DNA, 21 bp, synthetic construct
  misc_feature 1..21: note = Artificial sequence related to HLA knockouts in cell therapy
  source 1..21: mol_type = other DNA
atatgactcaccacgctgtct

SEQ ID NO: 13624 - DNA, 21 bp, synthetic construct
  misc_feature 1..21: note = Artificial sequence related to HLA knockouts in cell therapy
  source 1..21: mol_type = other DNA
gtgacttgaagaaccctgact

SEQ ID NO: 13625 - DNA, 21 bp, synthetic construct
  misc_feature 1..21: note = Artificial sequence related to HLA knockouts in cell therapy
  source 1..21: mol_type = other DNA
actgagctgtaacttcttcct

SEQ ID NO: 13626 - DNA, 21 bp, synthetic construct
  misc_feature 1..21: note = Artificial sequence related to HLA knockouts in cell therapy
  source 1..21: mol_type = other DNA
ctatgtagggtccttcttcct

SEQ ID NO: 13627 - DNA, 21 bp, synthetic construct
  misc_feature 1..21: note = Artificial sequence related to HLA knockouts in cell therapy
  source 1..21: mol_type = other DNA
tctctgtctcaacttcatggt

SEQ ID NO: 13628 - DNA, 21 bp, synthetic construct
  misc_feature 1..21: note = Artificial sequence related to HLA knockouts in cell therapy
  source 1..21: mol_type = other DNA
agctgtgatcactggagctgt

SEQ ID NO: 13629 - DNA, 21 bp, synthetic construct
  misc_feature 1..21: note = Artificial sequence related to HLA knockouts in cell therapy
  source 1..21: mol_type = other DNA
cctggttctctttggagctgt

SEQ ID NO: 13630 - DNA, 21 bp, synthetic construct
  misc_feature 1..21: note = Artificial sequence related to HLA knockouts in cell therapy
  source 1..21: mol_type = other DNA
cttcatggtgcactgagctgt

SEQ ID NO: 13631 - DNA, 21 bp, synthetic construct
  misc_feature 1..21: note = Artificial sequence related to HLA knockouts in cell therapy
  source 1..21: mol_type = other DNA
tgatgtggaggaggaagagct

SEQ ID NO: 13632 - DNA, 21 bp, synthetic construct
  misc_feature 1..21: note = Artificial sequence related to HLA knockouts in cell therapy
  source 1..21: mol_type = other DNA
tttggagctgtgatcactgga

SEQ ID NO: 13633 - DNA, 21 bp, synthetic construct
  misc_feature 1..21: note = Artificial sequence related to HLA knockouts in cell therapy
  source 1..21: mol_type = other DNA
tctgatgtgtctctcacagct

SEQ ID NO: 13634 - DNA, 21 bp, synthetic construct
  misc_feature 1..21: note = Artificial sequence related to HLA knockouts in cell therapy
  source 1..21: mol_type = other DNA
ctgatgtgtctctcacagctt

SEQ ID NO: 13635 - DNA, 21 bp, synthetic construct
  misc_feature 1..21: note = Artificial sequence related to HLA knockouts in cell therapy
  source 1..21: mol_type = other DNA
caaaggcacctgcatgtgtct

SEQ ID NO: 13636 - DNA, 21 bp, synthetic construct
  misc_feature 1..21: note = Artificial sequence related to HLA knockouts in cell therapy
  source 1..21: mol_type = other DNA
agggctctgatgtgtctctca

SEQ ID NO: 13637 - DNA, 21 bp, synthetic construct
  misc_feature 1..21: note = Artificial sequence related to HLA knockouts in cell therapy
  source 1..21: mol_type = other DNA
tctttcctgttccagagaggt

SEQ ID NO: 13638 - DNA, 21 bp, synthetic construct
  misc_feature 1..21: note = Artificial sequence related to HLA knockouts in cell therapy
  source 1..21: mol_type = other DNA
gaaccctgactttgtttctgc

SEQ ID NO: 13639 - DNA, 21 bp, synthetic construct
  misc_feature 1..21: note = Artificial sequence related to HLA knockouts in cell therapy
  source 1..21: mol_type = other DNA
gagaggcaagagttgttcctg

SEQ ID NO: 13640 - DNA, 21 bp, synthetic construct
  misc_feature 1..21: note = Artificial sequence related to HLA knockouts in cell therapy
  source 1..21: mol_type = other DNA
caatcatctttcctgttccag

SEQ ID NO: 13641 - DNA, 21 bp, synthetic construct
  misc_feature 1..21: note = Artificial sequence related to HLA knockouts in cell therapy
  source 1..21: mol_type = other DNA
cccaacctatgtagggtcctt

SEQ ID NO: 13642 - DNA, 21 bp, synthetic construct
  misc_feature 1..21: note = Artificial sequence related to HLA knockouts in cell therapy
  source 1..21: mol_type = other DNA
tgagaggcaagagttgttcct

SEQ ID NO: 13643 - DNA, 21 bp, synthetic construct
  misc_feature 1..21: note = Artificial sequence related to HLA knockouts in cell therapy
  source 1..21: mol_type = other DNA
agttgttcctgcccttccctt

SEQ ID NO: 13644 - DNA, 21 bp, synthetic construct
  misc_feature 1..21: note = Artificial sequence related to HLA knockouts in cell therapy
  source 1..21: mol_type = other DNA
accctgactttgtttctgcaa

SEQ ID NO: 13645 - DNA, 21 bp, synthetic construct
  misc_feature 1..21: note = Artificial sequence related to HLA knockouts in cell therapy
  source 1..21: mol_type = other DNA
ccaatcatctttcctgttcca

SEQ ID NO: 13646 - DNA, 21 bp, synthetic construct
  misc_feature 1..21: note = Artificial sequence related to HLA knockouts in cell therapy
  source 1..21: mol_type = other DNA
ctgtaacttcttccttcccta

SEQ ID NO: 13647 - DNA, 21 bp, synthetic construct
  misc_feature 1..21: note = Artificial sequence related to HLA knockouts in cell therapy
  source 1..21: mol_type = other DNA
tactctcaggctgcaagcagt

SEQ ID NO: 13648 - DNA, 21 bp, synthetic construct
  misc_feature 1..21: note = Artificial sequence related to HLA knockouts in cell therapy
  source 1..21: mol_type = other DNA
cagcttgtaaagtgtgagaca

SEQ ID NO: 13649 - DNA, 21 bp, synthetic construct
  misc_feature 1..21: note = Artificial sequence related to HLA knockouts in cell therapy
  source 1..21: mol_type = other DNA
cacagcttgtaaagtgtgaga

SEQ ID NO: 13650 - DNA, 21 bp, synthetic construct
  misc_feature 1..21: note = Artificial sequence related to HLA knockouts in cell therapy
  source 1..21: mol_type = other DNA
ttgtgtgggactgagaggcaa

SEQ ID NO: 13651 - DNA, 21 bp, synthetic construct
  misc_feature 1..21: note = Artificial sequence related to HLA knockouts in cell therapy
  source 1..21: mol_type = other DNA
tccagagaagccaatcagtgt

SEQ ID NO: 13652 - DNA, 21 bp, synthetic construct
  misc_feature 1..21: note = Artificial sequence related to HLA knockouts in cell therapy
  source 1..21: mol_type = other DNA
agagaagccaatcagtgtcgt

SEQ ID NO: 13653 - DNA, 21 bp, synthetic construct
  misc_feature 1..21: note = Artificial sequence related to HLA knockouts in cell therapy
  source 1..21: mol_type = other DNA
cgtgtaggcataatgtgagga

SEQ ID NO: 13654 - DNA, 21 bp, synthetic construct
  misc_feature 1..21: note = Artificial sequence related to HLA knockouts in cell therapy
  source 1..21: mol_type = other DNA
cctgcatgtgtctgtgttcgt

SEQ ID NO: 13655 - DNA, 21 bp, synthetic construct
  misc_feature 1..21: note = Artificial sequence related to HLA knockouts in cell therapy
  source 1..21: mol_type = other DNA
tgtctgtgttcgtgtaggcat

SEQ ID NO: 13656 - DNA, 21 bp, synthetic construct
  misc_feature 1..21: note = Artificial sequence related to HLA knockouts in cell therapy
  source 1..21: mol_type = other DNA
ctcaacttcatggtgcactga

SEQ ID NO: 13657 - DNA, 21 bp, synthetic construct
  misc_feature 1..21: note = Artificial sequence related to HLA knockouts in cell therapy
  source 1..21: mol_type = other DNA
ctctgtctcaacttcatggtg

SEQ ID NO: 13658 - DNA, 21 bp, synthetic construct
  misc_feature 1..21: note = Artificial sequence related to HLA knockouts in cell therapy
  source 1..21: mol_type = other DNA
gtctcaacttcatggtgcact

SEQ ID NO: 13659 - DNA, 21 bp, synthetic construct
  misc_feature 1..21: note = Artificial sequence related to HLA knockouts in cell therapy
  source 1..21: mol_type = other DNA
gaggtgtctccatctctgtct

SEQ ID NO: 13660 - DNA, 21 bp, synthetic construct
  misc_feature 1..21: note = Artificial sequence related to HLA knockouts in cell therapy
  source 1..21: mol_type = other DNA
cttcttcctggatactcacga

SEQ ID NO: 13661 - DNA, 21 bp, synthetic construct
  misc_feature 1..21: note = Artificial sequence related to HLA knockouts in cell therapy
  source 1..21: mol_type = other DNA
agatacctggagaacgggaag

SEQ ID NO: 13662 - DNA, 21 bp, synthetic construct
  misc_feature 1..21: note = Artificial sequence related to HLA knockouts in cell therapy
  source 1..21: mol_type = other DNA
gtatttcttcacatccgtgtc

SEQ ID NO: 13663 - DNA, 21 bp, synthetic construct
  misc_feature 1..21: note = Artificial sequence related to HLA knockouts in cell therapy
  source 1..21: mol_type = other DNA
ttctcactcccattgggtgtc

SEQ ID NO: 13664 - DNA, 18 bp, synthetic construct
  misc_feature 1..18: note = Artificial sequence related to HLA knockouts in cell therapy
  source 1..18: mol_type = other DNA
cgaaggcggtgtatggat

SEQ ID NO: 13665 - DNA, 18 bp, synthetic construct
  misc_feature 1..18: note = Artificial sequence related to HLA knockouts in cell therapy
  source 1..18: mol_type = other DNA
gaaggcggtgtatggatt

SEQ ID NO: 13666 - DNA, 18 bp, synthetic construct
  misc_feature 1..18: note = Artificial sequence related to HLA knockouts in cell therapy
  source 1..18: mol_type = other DNA
aaggcggtgtatggattg

SEQ ID NO: 13667 - DNA, 18 bp, synthetic construct
  misc_feature 1..18: note = Artificial sequence related to HLA knockouts in cell therapy
  source 1..18: mol_type = other DNA
aggcggtgtatggattgg

SEQ ID NO: 13668 - DNA, 18 bp, synthetic construct
  misc_feature 1..18: note = Artificial sequence related to HLA knockouts in cell therapy
  source 1..18: mol_type = other DNA
cccaactccgcagtttct

SEQ ID NO: 13669 - DNA, 18 bp, synthetic construct
  misc_feature 1..18: note = Artificial sequence related to HLA knockouts in cell therapy
  source 1..18: mol_type = other DNA
ccaactccgcagtttctt

SEQ ID NO: 13670 - DNA, 18 bp, synthetic construct
  misc_feature 1..18: note = Artificial sequence related to HLA knockouts in cell therapy
  source 1..18: mol_type = other DNA
caactccgcagtttcttt

SEQ ID NO: 13671 - DNA, 18 bp, synthetic construct
  misc_feature 1..18: note = Artificial sequence related to HLA knockouts in cell therapy
  source 1..18: mol_type = other DNA
tttctccctctcccaacc

SEQ ID NO: 13672 - DNA, 18 bp, synthetic construct
  misc_feature 1..18: note = Artificial sequence related to HLA knockouts in cell therapy
  source 1..18: mol_type = other DNA
ttctccctctcccaacct

SEQ ID NO: 13673 - DNA, 18 bp, synthetic construct
  misc_feature 1..18: note = Artificial sequence related to HLA knockouts in cell therapy
  source 1..18: mol_type = other DNA
tctccctctcccaaccta

SEQ ID NO: 13674 - DNA, 18 bp, synthetic construct
  misc_feature 1..18: note = Artificial sequence related to HLA knockouts in cell therapy
  source 1..18: mol_type = other DNA
ctccctctcccaacctat

SEQ ID NO: 13675 - DNA, 18 bp, synthetic construct
  misc_feature 1..18: note = Artificial sequence related to HLA knockouts in cell therapy
  source 1..18: mol_type = other DNA
tccctctcccaacctatg

SEQ ID NO: 13676 - DNA, 18 bp, synthetic construct
  misc_feature 1..18: note = Artificial sequence related to HLA knockouts in cell therapy
  source 1..18: mol_type = other DNA
ccctctcccaacctatgt

SEQ ID NO: 13677 - DNA, 18 bp, synthetic construct
  misc_feature 1..18: note = Artificial sequence related to HLA knockouts in cell therapy
  source 1..18: mol_type = other DNA
cctctcccaacctatgta

SEQ ID NO: 13678 - DNA, 18 bp, synthetic construct
  misc_feature 1..18: note = Artificial sequence related to HLA knockouts in cell therapy
  source 1..18: mol_type = other DNA
ctctcccaacctatgtag

SEQ ID NO: 13679 - DNA, 18 bp, synthetic construct
  misc_feature 1..18: note = Artificial sequence related to HLA knockouts in cell therapy
  source 1..18: mol_type = other DNA
tctcccaacctatgtagg

SEQ ID NO: 13680 - DNA, 18 bp, synthetic construct
  misc_feature 1..18: note = Artificial sequence related to HLA knockouts in cell therapy
  source 1..18: mol_type = other DNA
ctcccaacctatgtaggg

SEQ ID NO: 13681 - DNA, 18 bp, synthetic construct
  misc_feature 1..18: note = Artificial sequence related to HLA knockouts in cell therapy
  source 1..18: mol_type = other DNA
tcccaacctatgtagggt

SEQ ID NO: 13682 - DNA, 18 bp, synthetic construct
  misc_feature 1..18: note = Artificial sequence related to HLA knockouts in cell therapy
  source 1..18: mol_type = other DNA
cccaacctatgtagggtc

SEQ ID NO: 13683 - DNA, 18 bp, synthetic construct
  misc_feature 1..18: note = Artificial sequence related to HLA knockouts in cell therapy
  source 1..18: mol_type = other DNA
ccaacctatgtagggtcc

SEQ ID NO: 13684 - DNA, 18 bp, synthetic construct
  misc_feature 1..18: note = Artificial sequence related to HLA knockouts in cell therapy
  source 1..18: mol_type = other DNA
caacctatgtagggtcct

SEQ ID NO: 13685 - DNA, 18 bp, synthetic construct
  misc_feature 1..18: note = Artificial sequence related to HLA knockouts in cell therapy
  source 1..18: mol_type = other DNA
aacctatgtagggtcctt

SEQ ID NO: 13686 - DNA, 18 bp, synthetic construct
  misc_feature 1..18: note = Artificial sequence related to HLA knockouts in cell therapy
  source 1..18: mol_type = other DNA
acctatgtagggtccttc

SEQ ID NO: 13687 - DNA, 18 bp, synthetic construct
  misc_feature 1..18: note = Artificial sequence related to HLA knockouts in cell therapy
  source 1..18: mol_type = other DNA
cctatgtagggtccttct

SEQ ID NO: 13688 - DNA, 18 bp, synthetic construct
  misc_feature 1..18: note = Artificial sequence related to HLA knockouts in cell therapy
  source 1..18: mol_type = other DNA
ctatgtagggtccttctt

SEQ ID NO: 13689 - DNA, 18 bp, synthetic construct
  misc_feature 1..18: note = Artificial sequence related to HLA knockouts in cell therapy
  source 1..18: mol_type = other DNA
tatgtagggtccttcttc

SEQ ID NO: 13690 - DNA, 18 bp, synthetic construct
  misc_feature 1..18: note = Artificial sequence related to HLA knockouts in cell therapy
  source 1..18: mol_type = other DNA
atgtagggtccttcttcc

SEQ ID NO: 13691 - DNA, 18 bp, synthetic construct
  misc_feature 1..18: note = Artificial sequence related to HLA knockouts in cell therapy
  source 1..18: mol_type = other DNA
tgtagggtccttcttcct

SEQ ID NO: 13692 - DNA, 18 bp, synthetic construct
  misc_feature 1..18: note = Artificial sequence related to HLA knockouts in cell therapy
  source 1..18: mol_type = other DNA
gtagggtccttcttcctg

SEQ ID NO: 13693 - DNA, 18 bp, synthetic construct
  misc_feature 1..18: note = Artificial sequence related to HLA knockouts in cell therapy
  source 1..18: mol_type = other DNA
tagggtccttcttcctgg

SEQ ID NO: 13694 - DNA, 18 bp, synthetic construct
  misc_feature 1..18: note = Artificial sequence related to HLA knockouts in cell therapy
  source 1..18: mol_type = other DNA
agggtccttcttcctgga

SEQ ID NO: 13695 - DNA, 18 bp, synthetic construct
  misc_feature 1..18: note = Artificial sequence related to HLA knockouts in cell therapy
  source 1..18: mol_type = other DNA
gggtccttcttcctggat

SEQ ID NO: 13696 - DNA, 18 bp, synthetic construct
  misc_feature 1..18: note = Artificial sequence related to HLA knockouts in cell therapy
  source 1..18: mol_type = other DNA
ggtccttcttcctggata

SEQ ID NO: 13697 - DNA, 18 bp, synthetic construct
  misc_feature 1..18: note = Artificial sequence related to HLA knockouts in cell therapy
  source 1..18: mol_type = other DNA
gtccttcttcctggatac

SEQ ID NO: 13698 - DNA, 18 bp, synthetic construct
  misc_feature 1..18: note = Artificial sequence related to HLA knockouts in cell therapy
  source 1..18: mol_type = other DNA
tccttcttcctggatact

SEQ ID NO: 13699 - DNA, 18 bp, synthetic construct
  misc_feature 1..18: note = Artificial sequence related to HLA knockouts in cell therapy
  source 1..18: mol_type = other DNA
ccttcttcctggatactc

SEQ ID NO: 13700 - DNA, 18 bp, synthetic construct
  misc_feature 1..18: note = Artificial sequence related to HLA knockouts in cell therapy
  source 1..18: mol_type = other DNA
cttcttcctggatactca

SEQ ID NO: 13701 - DNA, 18 bp, synthetic construct
  misc_feature 1..18: note = Artificial sequence related to HLA knockouts in cell therapy
  source 1..18: mol_type = other DNA
ttcttcctggatactcac

SEQ ID NO: 13702 - DNA, 18 bp, synthetic construct
  misc_feature 1..18: note = Artificial sequence related to HLA knockouts in cell therapy
  source 1..18: mol_type = other DNA
tcttcctggatactcacg

SEQ ID NO: 13703 - DNA, 18 bp, synthetic construct
  misc_feature 1..18: note = Artificial sequence related to HLA knockouts in cell therapy
  source 1..18: mol_type = other DNA
cttcctggatactcacga

SEQ ID NO: 13704 - DNA, 18 bp, synthetic construct
  misc_feature 1..18: note = Artificial sequence related to HLA knockouts in cell therapy
  source 1..18: mol_type = other DNA
ttcctggatactcacgac

SEQ ID NO: 13705 - DNA, 18 bp, synthetic construct
  misc_feature 1..18: note = Artificial sequence related to HLA knockouts in cell therapy
  source 1..18: mol_type = other DNA
tcctggatactcacgacg

SEQ ID NO: 13706 - DNA, 18 bp, synthetic construct
  misc_feature 1..18: note = Artificial sequence related to HLA knockouts in cell therapy
  source 1..18: mol_type = other DNA
acccagttctcactccca

SEQ ID NO: 13707 - DNA, 18 bp, synthetic construct
  misc_feature 1..18: note = Artificial sequence related to HLA knockouts in cell therapy
  source 1..18: mol_type = other DNA
cccagttctcactcccat

SEQ ID NO: 13708 - DNA, 18 bp, synthetic construct
  misc_feature 1..18: note = Artificial sequence related to HLA knockouts in cell therapy
  source 1..18: mol_type = other DNA
ccagttctcactcccatt

SEQ ID NO: 13709 - DNA, 18 bp, synthetic construct
  misc_feature 1..18: note = Artificial sequence related to HLA knockouts in cell therapy
  source 1..18: mol_type = other DNA
cagttctcactcccattg

SEQ ID NO: 13710 - DNA, 18 bp, synthetic construct
  misc_feature 1..18: note = Artificial sequence related to HLA knockouts in cell therapy
  source 1..18: mol_type = other DNA
agttctcactcccattgg

SEQ ID NO: 13711 - DNA, 18 bp, synthetic construct
  misc_feature 1..18: note = Artificial sequence related to HLA knockouts in cell therapy
  source 1..18: mol_type = other DNA
gttctcactcccattggg

SEQ ID NO: 13712 - DNA, 18 bp, synthetic construct
  misc_feature 1..18: note = Artificial sequence related to HLA knockouts in cell therapy
  source 1..18: mol_type = other DNA
ttctcactcccattgggt

SEQ ID NO: 13713 - DNA, 18 bp, synthetic construct
  misc_feature 1..18: note = Artificial sequence related to HLA knockouts in cell therapy
  source 1..18: mol_type = other DNA
tctcactcccattgggtg

SEQ ID NO: 13714 - DNA, 18 bp, synthetic construct
  misc_feature 1..18: note = Artificial sequence related to HLA knockouts in cell therapy
  source 1..18: mol_type = other DNA
ctcactcccattgggtgt

SEQ ID NO: 13715 - DNA, 18 bp, synthetic construct
  misc_feature 1..18: note = Artificial sequence related to HLA knockouts in cell therapy
  source 1..18: mol_type = other DNA
tcactcccattgggtgtc

SEQ ID NO: 13716 - DNA, 18 bp, synthetic construct
  misc_feature 1..18: note = Artificial sequence related to HLA knockouts in cell therapy
  source 1..18: mol_type = other DNA
ccattgggtgtcgggttt

SEQ ID NO: 13717 - DNA, 18 bp, synthetic construct
  misc_feature 1..18: note = Artificial sequence related to HLA knockouts in cell therapy
  source 1..18: mol_type = other DNA
cattgggtgtcgggtttc

SEQ ID NO: 13718 - DNA, 18 bp, synthetic construct
  misc_feature 1..18: note = Artificial sequence related to HLA knockouts in cell therapy
  source 1..18: mol_type = other DNA
attgggtgtcgggtttcc

SEQ ID NO: 13719 - DNA, 18 bp, synthetic construct
  misc_feature 1..18: note = Artificial sequence related to HLA knockouts in cell therapy
  source 1..18: mol_type = other DNA
ttgggtgtcgggtttcca

SEQ ID NO: 13720 - DNA, 18 bp, synthetic construct
  misc_feature 1..18: note = Artificial sequence related to HLA knockouts in cell therapy
  source 1..18: mol_type = other DNA
gtgtcgggtttccagaga

SEQ ID NO: 13721 - DNA, 18 bp, synthetic construct
  misc_feature 1..18: note = Artificial sequence related to HLA knockouts in cell therapy
  source 1..18: mol_type = other DNA
tgtcgggtttccagagaa

SEQ ID NO: 13722 - DNA, 18 bp, synthetic construct
  misc_feature 1..18: note = Artificial sequence related to HLA knockouts in cell therapy
  source 1..18: mol_type = other DNA
gtcgggtttccagagaag

SEQ ID NO: 13723 - DNA, 18 bp, synthetic construct
  misc_feature 1..18: note = Artificial sequence related to HLA knockouts in cell therapy
  source 1..18: mol_type = other DNA
tcgggtttccagagaagc

SEQ ID NO: 13724 - DNA, 18 bp, synthetic construct
  misc_feature 1..18: note = Artificial sequence related to HLA knockouts in cell therapy
  source 1..18: mol_type = other DNA
gggtttccagagaagcca

SEQ ID NO: 13725 - DNA, 18 bp, synthetic construct
  misc_feature 1..18: note = Artificial sequence related to HLA knockouts in cell therapy
  source 1..18: mol_type = other DNA
ggtttccagagaagccaa

SEQ ID NO: 13726 - DNA, 18 bp, synthetic construct
  misc_feature 1..18: note = Artificial sequence related to HLA knockouts in cell therapy
  source 1..18: mol_type = other DNA
gtttccagagaagccaat

SEQ ID NO: 13727 - DNA, 18 bp, synthetic construct
  misc_feature 1..18: note = Artificial sequence related to HLA knockouts in cell therapy
  source 1..18: mol_type = other DNA
tttccagagaagccaatc

SEQ ID NO: 13728 - DNA, 18 bp, synthetic construct
  misc_feature 1..18: note = Artificial sequence related to HLA knockouts in cell therapy
  source 1..18: mol_type = other DNA
ttccagagaagccaatca

SEQ ID NO: 13729 - DNA, 18 bp, synthetic construct
  misc_feature 1..18: note = Artificial sequence related to HLA knockouts in cell therapy
  source 1..18: mol_type = other DNA
tccagagaagccaatcag

SEQ ID NO: 13730 - DNA, 18 bp, synthetic construct
  misc_feature 1..18: note = Artificial sequence related to HLA knockouts in cell therapy
  source 1..18: mol_type = other DNA
ccagagaagccaatcagt

SEQ ID NO: 13731 - DNA, 18 bp, synthetic construct
  misc_feature 1..18: note = Artificial sequence related to HLA knockouts in cell therapy
  source 1..18: mol_type = other DNA
cagagaagccaatcagtg

SEQ ID NO: 13732 - DNA, 18 bp, synthetic construct
  misc_feature 1..18: note = Artificial sequence related to HLA knockouts in cell therapy
  source 1..18: mol_type = other DNA
agagaagccaatcagtgt

SEQ ID NO: 13733 - DNA, 18 bp, synthetic construct
  misc_feature 1..18: note = Artificial sequence related to HLA knockouts in cell therapy
  source 1..18: mol_type = other DNA
gagaagccaatcagtgtc

SEQ ID NO: 13734 - DNA, 18 bp, synthetic construct
  misc_feature 1..18: note = Artificial sequence related to HLA knockouts in cell therapy
  source 1..18: mol_type = other DNA
agaagccaatcagtgtcg

SEQ ID NO: 13735 - DNA, 18 bp, synthetic construct
  misc_feature 1..18: note = Artificial sequence related to HLA knockouts in cell therapy
  source 1..18: mol_type = other DNA
gaagccaatcagtgtcgt

SEQ ID NO: 13736 - DNA, 18 bp, synthetic construct
  misc_feature 1..18: note = Artificial sequence related to HLA knockouts in cell therapy
  source 1..18: mol_type = other DNA
aagccaatcagtgtcgtc

SEQ ID NO: 13737 - DNA, 18 bp, synthetic construct
  misc_feature 1..18: note = Artificial sequence related to HLA knockouts in cell therapy
  source 1..18: mol_type = other DNA
agccaatcagtgtcgtcg

SEQ ID NO: 13738 - DNA, 18 bp, synthetic construct
  misc_feature 1..18: note = Artificial sequence related to HLA knockouts in cell therapy
  source 1..18: mol_type = other DNA
aatcagtgtcgtcgcggt

SEQ ID NO: 13739 - DNA, 18 bp, synthetic construct
  misc_feature 1..18: note = Artificial sequence related to HLA knockouts in cell therapy
  source 1..18: mol_type = other DNA
cggtcgcggttctaaagt

SEQ ID NO: 13740 - DNA, 18 bp, synthetic construct
  misc_feature 1..18: note = Artificial sequence related to HLA knockouts in cell therapy
  source 1..18: mol_type = other DNA
ggtcgcggttctaaagtc

SEQ ID NO: 13741 - DNA, 18 bp, synthetic construct
  misc_feature 1..18: note = Artificial sequence related to HLA knockouts in cell therapy
  source 1..18: mol_type = other DNA
gtcgcggttctaaagtcc

SEQ ID NO: 13742 - DNA, 18 bp, synthetic construct
  misc_feature 1..18: note = Artificial sequence related to HLA knockouts in cell therapy
  source 1..18: mol_type = other DNA
tcgcggttctaaagtccg

SEQ ID NO: 13743 - DNA, 18 bp, synthetic construct
  misc_feature 1..18: note = Artificial sequence related to HLA knockouts in cell therapy
  source 1..18: mol_type = other DNA
gcggttctaaagtccgca

SEQ ID NO: 13744 - DNA, 18 bp, synthetic construct
  misc_feature 1..18: note = Artificial sequence related to HLA knockouts in cell therapy
  source 1..18: mol_type = other DNA
cggttctaaagtccgcac

SEQ ID NO: 13745 - DNA, 18 bp, synthetic construct
  misc_feature 1..18: note = Artificial sequence related to HLA knockouts in cell therapy
  source 1..18: mol_type = other DNA
ggttctaaagtccgcacg

SEQ ID NO: 13746 - DNA, 18 bp, synthetic construct
  misc_feature 1..18: note = Artificial sequence related to HLA knockouts in cell therapy
  source 1..18: mol_type = other DNA
gttctaaagtccgcacgc

SEQ ID NO: 13747 - DNA, 18 bp, synthetic construct
  misc_feature 1..18: note = Artificial sequence related to HLA knockouts in cell therapy
  source 1..18: mol_type = other DNA
ttctaaagtccgcacgca

SEQ ID NO: 13748 - DNA, 18 bp, synthetic construct
  misc_feature 1..18: note = Artificial sequence related to HLA knockouts in cell therapy
  source 1..18: mol_type = other DNA
tctaaagtccgcacgcac

SEQ ID NO: 13749 - DNA, 18 bp, synthetic construct
  misc_feature 1..18: note = Artificial sequence related to HLA knockouts in cell therapy
  source 1..18: mol_type = other DNA
caccgggactcagattct

SEQ ID NO: 13750 - DNA, 18 bp, synthetic construct
  misc_feature 1..18: note = Artificial sequence related to HLA knockouts in cell therapy
  source 1..18: mol_type = other DNA
accgggactcagattctc

SEQ ID NO: 13751 - DNA, 18 bp, synthetic construct
  misc_feature 1..18: note = Artificial sequence related to HLA knockouts in cell therapy
  source 1..18: mol_type = other DNA
aaccctcgtcctgctact

SEQ ID NO: 13752 - DNA, 18 bp, synthetic construct
  misc_feature 1..18: note = Artificial sequence related to HLA knockouts in cell therapy
  source 1..18: mol_type = other DNA
gctctcactccatgaggt

SEQ ID NO: 13753 - DNA, 18 bp, synthetic construct
  misc_feature 1..18: note = Artificial sequence related to HLA knockouts in cell therapy
  source 1..18: mol_type = other DNA
ctctcactccatgaggta

SEQ ID NO: 13754 - DNA, 18 bp, synthetic construct
  misc_feature 1..18: note = Artificial sequence related to HLA knockouts in cell therapy
  source 1..18: mol_type = other DNA
tctcactccatgaggtat

SEQ ID NO: 13755 - DNA, 18 bp, synthetic construct
  misc_feature 1..18: note = Artificial sequence related to HLA knockouts in cell therapy
  source 1..18: mol_type = other DNA
ctcactccatgaggtatt

SEQ ID NO: 13756 - DNA, 18 bp, synthetic construct
  misc_feature 1..18: note = Artificial sequence related to HLA knockouts in cell therapy
  source 1..18: mol_type = other DNA
tcactccatgaggtattt

SEQ ID NO: 13757 - DNA, 18 bp, synthetic construct
  misc_feature 1..18: note = Artificial sequence related to HLA knockouts in cell therapy
  source 1..18: mol_type = other DNA
cactccatgaggtatttc

SEQ ID NO: 13758 - DNA, 18 bp, synthetic construct
  misc_feature 1..18: note = Artificial sequence related to HLA knockouts in cell therapy
  source 1..18: mol_type = other DNA
actccatgaggtatttct

SEQ ID NO: 13759 - DNA, 18 bp, synthetic construct
  misc_feature 1..18: note = Artificial sequence related to HLA knockouts in cell therapy
  source 1..18: mol_type = other DNA
ctccatgaggtatttctt

SEQ ID NO: 13760 - DNA, 18 bp, synthetic construct
  misc_feature 1..18: note = Artificial sequence related to HLA knockouts in cell therapy
  source 1..18: mol_type = other DNA
tccatgaggtatttcttc

SEQ ID NO: 13761 - DNA, 18 bp, synthetic construct
  misc_feature 1..18: note = Artificial sequence related to HLA knockouts in cell therapy
  source 1..18: mol_type = other DNA
ccatgaggtatttcttca

SEQ ID NO: 13762 - DNA, 18 bp, synthetic construct
  misc_feature 1..18: note = Artificial sequence related to HLA knockouts in cell therapy
  source 1..18: mol_type = other DNA
catgaggtatttcttcac

SEQ ID NO: 13763 - DNA, 18 bp, synthetic construct
  misc_feature 1..18: note = Artificial sequence related to HLA knockouts in cell therapy
  source 1..18: mol_type = other DNA
atgaggtatttcttcaca

SEQ ID NO: 13764 - DNA, 18 bp, synthetic construct
  misc_feature 1..18: note = Artificial sequence related to HLA knockouts in cell therapy
  source 1..18: mol_type = other DNA
tgaggtatttcttcacat

SEQ ID NO: 13765 - DNA, 18 bp, synthetic construct
  misc_feature 1..18: note = Artificial sequence related to HLA knockouts in cell therapy
  source 1..18: mol_type = other DNA
gaggtatttcttcacatc

SEQ ID NO: 13766 - DNA, 18 bp, synthetic construct
  misc_feature 1..18: note = Artificial sequence related to HLA knockouts in cell therapy
  source 1..18: mol_type = other DNA
aggtatttcttcacatcc

SEQ ID NO: 13767 - DNA, 18 bp, synthetic construct
  misc_feature 1..18: note = Artificial sequence related to HLA knockouts in cell therapy
  source 1..18: mol_type = other DNA
ggtatttcttcacatccg

SEQ ID NO: 13768 - DNA, 18 bp, synthetic construct
  misc_feature 1..18: note = Artificial sequence related to HLA knockouts in cell therapy
  source 1..18: mol_type = other DNA
gtatttcttcacatccgt

SEQ ID NO: 13769 - DNA, 18 bp, synthetic construct
  misc_feature 1..18: note = Artificial sequence related to HLA knockouts in cell therapy
  source 1..18: mol_type = other DNA
tatttcttcacatccgtg

SEQ ID NO: 13770 - DNA, 18 bp, synthetic construct
  misc_feature 1..18: note = Artificial sequence related to HLA knockouts in cell therapy
  source 1..18: mol_type = other DNA
atttcttcacatccgtgt

SEQ ID NO: 13771 - DNA, 18 bp, synthetic construct
  misc_feature 1..18: note = Artificial sequence related to HLA knockouts in cell therapy
  source 1..18: mol_type = other DNA
tttcttcacatccgtgtc

SEQ ID NO: 13772 - DNA, 18 bp, synthetic construct
  misc_feature 1..18: note = Artificial sequence related to HLA knockouts in cell therapy
  source 1..18: mol_type = other DNA
ttcttcacatccgtgtcc

SEQ ID NO: 13773 - DNA, 18 bp, synthetic construct
  misc_feature 1..18: note = Artificial sequence related to HLA knockouts in cell therapy
  source 1..18: mol_type = other DNA
tcttcacatccgtgtccc

SEQ ID NO: 13774 - DNA, 18 bp, synthetic construct
  misc_feature 1..18: note = Artificial sequence related to HLA knockouts in cell therapy
  source 1..18: mol_type = other DNA
cttcatcgcagtgggcta

SEQ ID NO: 13775 - DNA, 18 bp, synthetic construct
  misc_feature 1..18: note = Artificial sequence related to HLA knockouts in cell therapy
  source 1..18: mol_type = other DNA
ttcatcgcagtgggctac

SEQ ID NO: 13776 - DNA, 18 bp, synthetic construct
  misc_feature 1..18: note = Artificial sequence related to HLA knockouts in cell therapy
  source 1..18: mol_type = other DNA
agttcgtgcggttcgaca

SEQ ID NO: 13777 - DNA, 18 bp, synthetic construct
  misc_feature 1..18: note = Artificial sequence related to HLA knockouts in cell therapy
  source 1..18: mol_type = other DNA
tggatagagcaggagggt

SEQ ID NO: 13778 - DNA, 18 bp, synthetic construct
  misc_feature 1..18: note = Artificial sequence related to HLA knockouts in cell therapy
  source 1..18: mol_type = other DNA
aggagggtccggagtatt

SEQ ID NO: 13779 - DNA, 18 bp, synthetic construct
  misc_feature 1..18: note = Artificial sequence related to HLA knockouts in cell therapy
  source 1..18: mol_type = other DNA
gggagacacggaaagtga

SEQ ID NO: 13780 - DNA, 18 bp, synthetic construct
  misc_feature 1..18: note = Artificial sequence related to HLA knockouts in cell therapy
  source 1..18: mol_type = other DNA
ggagacacggaaagtgaa

SEQ ID NO: 13781 - DNA, 18 bp, synthetic construct
  misc_feature 1..18: note = Artificial sequence related to HLA knockouts in cell therapy
  source 1..18: mol_type = other DNA
gagacacggaaagtgaag

SEQ ID NO: 13782 - DNA, 18 bp, synthetic construct
  misc_feature 1..18: note = Artificial sequence related to HLA knockouts in cell therapy
  source 1..18: mol_type = other DNA
agacacggaaagtgaagg

SEQ ID NO: 13783 - DNA, 18 bp, synthetic construct
  misc_feature 1..18: note = Artificial sequence related to HLA knockouts in cell therapy
  source 1..18: mol_type = other DNA
gacacggaaagtgaaggc

SEQ ID NO: 13784 - DNA, 18 bp, synthetic construct
  misc_feature 1..18: note = Artificial sequence related to HLA knockouts in cell therapy
  source 1..18: mol_type = other DNA
acacggaaagtgaaggcc

SEQ ID NO: 13785 - DNA, 18 bp, synthetic construct
  misc_feature 1..18: note = Artificial sequence related to HLA knockouts in cell therapy
  source 1..18: mol_type = other DNA
acggaaagtgaaggccca

SEQ ID NO: 13786 - DNA, 18 bp, synthetic construct
  misc_feature 1..18: note = Artificial sequence related to HLA knockouts in cell therapy
  source 1..18: mol_type = other DNA
ggaaagtgaaggcccact

SEQ ID NO: 13787 - DNA, 18 bp, synthetic construct
  misc_feature 1..18: note = Artificial sequence related to HLA knockouts in cell therapy
  source 1..18: mol_type = other DNA
gaaagtgaaggcccactc

SEQ ID NO: 13788 - DNA, 18 bp, synthetic construct
  misc_feature 1..18: note = Artificial sequence related to HLA knockouts in cell therapy
  source 1..18: mol_type = other DNA
aaagtgaaggcccactca

SEQ ID NO: 13789 - DNA, 18 bp, synthetic construct
  misc_feature 1..18: note = Artificial sequence related to HLA knockouts in cell therapy
  source 1..18: mol_type = other DNA
aagtgaaggcccactcac

SEQ ID NO: 13790 - DNA, 18 bp, synthetic construct
  misc_feature 1..18: note = Artificial sequence related to HLA knockouts in cell therapy
  source 1..18: mol_type = other DNA
agtgaaggcccactcaca

SEQ ID NO: 13791 - DNA, 18 bp, synthetic construct
  misc_feature 1..18: note = Artificial sequence related to HLA knockouts in cell therapy
  source 1..18: mol_type = other DNA
tgaaggcccactcacaga

SEQ ID NO: 13792 - DNA, 18 bp, synthetic construct
  misc_feature 1..18: note = Artificial sequence related to HLA knockouts in cell therapy
  source 1..18: mol_type = other DNA
aaggcccactcacagact

SEQ ID NO: 13793 - DNA, 18 bp, synthetic construct
  misc_feature 1..18: note = Artificial sequence related to HLA knockouts in cell therapy
  source 1..18: mol_type = other DNA
cactcacagactcaccga

SEQ ID NO: 13794 - DNA, 18 bp, synthetic construct
  misc_feature 1..18: note = Artificial sequence related to HLA knockouts in cell therapy
  source 1..18: mol_type = other DNA
actcacagactcaccgag

SEQ ID NO: 13795 - DNA, 18 bp, synthetic construct
  misc_feature 1..18: note = Artificial sequence related to HLA knockouts in cell therapy
  source 1..18: mol_type = other DNA
ctcacagactcaccgagt

SEQ ID NO: 13796 - DNA, 18 bp, synthetic construct
  misc_feature 1..18: note = Artificial sequence related to HLA knockouts in cell therapy
  source 1..18: mol_type = other DNA
tcacagactcaccgagtg

SEQ ID NO: 13797 - DNA, 18 bp, synthetic construct
  misc_feature 1..18: note = Artificial sequence related to HLA knockouts in cell therapy
  source 1..18: mol_type = other DNA
acagactcaccgagtgga

SEQ ID NO: 13798 - DNA, 18 bp, synthetic construct
  misc_feature 1..18: note = Artificial sequence related to HLA knockouts in cell therapy
  source 1..18: mol_type = other DNA
gcggctactacaaccaga

SEQ ID NO: 13799 - DNA, 18 bp, synthetic construct
  misc_feature 1..18: note = Artificial sequence related to HLA knockouts in cell therapy
  source 1..18: mol_type = other DNA
cggctactacaaccagag

SEQ ID NO: 13800 - DNA, 18 bp, synthetic construct
  misc_feature 1..18: note = Artificial sequence related to HLA knockouts in cell therapy
  source 1..18: mol_type = other DNA
ggctactacaaccagagc

SEQ ID NO: 13801 - DNA, 18 bp, synthetic construct
  misc_feature 1..18: note = Artificial sequence related to HLA knockouts in cell therapy
  source 1..18: mol_type = other DNA
gctactacaaccagagcg

SEQ ID NO: 13802 - DNA, 18 bp, synthetic construct
  misc_feature 1..18: note = Artificial sequence related to HLA knockouts in cell therapy
  source 1..18: mol_type = other DNA
ctactacaaccagagcga

SEQ ID NO: 13803 - DNA, 18 bp, synthetic construct
  misc_feature 1..18: note = Artificial sequence related to HLA knockouts in cell therapy
  source 1..18: mol_type = other DNA
tactacaaccagagcgag

SEQ ID NO: 13804 - DNA, 18 bp, synthetic construct
  misc_feature 1..18: note = Artificial sequence related to HLA knockouts in cell therapy
  source 1..18: mol_type = other DNA
actacaaccagagcgagg

SEQ ID NO: 13805 - DNA, 18 bp, synthetic construct
  misc_feature 1..18: note = Artificial sequence related to HLA knockouts in cell therapy
  source 1..18: mol_type = other DNA
gttctcacaccgtccaga

SEQ ID NO: 13806 - DNA, 18 bp, synthetic construct
  misc_feature 1..18: note = Artificial sequence related to HLA knockouts in cell therapy
  source 1..18: mol_type = other DNA
ttctcacaccgtccagag

SEQ ID NO: 13807 - DNA, 18 bp, synthetic construct
  misc_feature 1..18: note = Artificial sequence related to HLA knockouts in cell therapy
  source 1..18: mol_type = other DNA
tcacaccgtccagaggat

SEQ ID NO: 13808 - DNA, 18 bp, synthetic construct
  misc_feature 1..18: note = Artificial sequence related to HLA knockouts in cell therapy
  source 1..18: mol_type = other DNA
acaccgtccagaggatgt

SEQ ID NO: 13809 - DNA, 18 bp, synthetic construct
  misc_feature 1..18: note = Artificial sequence related to HLA knockouts in cell therapy
  source 1..18: mol_type = other DNA
caccgtccagaggatgta

SEQ ID NO: 13810 - DNA, 18 bp, synthetic construct
  misc_feature 1..18: note = Artificial sequence related to HLA knockouts in cell therapy
  source 1..18: mol_type = other DNA
accgtccagaggatgtat

SEQ ID NO: 13811 - DNA, 18 bp, synthetic construct
  misc_feature 1..18: note = Artificial sequence related to HLA knockouts in cell therapy
  source 1..18: mol_type = other DNA
ccgtccagaggatgtatg

SEQ ID NO: 13812 - DNA, 18 bp, synthetic construct
  misc_feature 1..18: note = Artificial sequence related to HLA knockouts in cell therapy
  source 1..18: mol_type = other DNA
cgtccagaggatgtatgg

SEQ ID NO: 13813 - DNA, 18 bp, synthetic construct
  misc_feature 1..18: note = Artificial sequence related to HLA knockouts in cell therapy
  source 1..18: mol_type = other DNA
gtccagaggatgtatggc

SEQ ID NO: 13814 - DNA, 18 bp, synthetic construct
  misc_feature 1..18: note = Artificial sequence related to HLA knockouts in cell therapy
  source 1..18: mol_type = other DNA
tccagaggatgtatggct

SEQ ID NO: 13815 - DNA, 18 bp, synthetic construct
  misc_feature 1..18: note = Artificial sequence related to HLA knockouts in cell therapy
  source 1..18: mol_type = other DNA
ccagaggatgtatggctg

SEQ ID NO: 13816 - DNA, 18 bp, synthetic construct
  misc_feature 1..18: note = Artificial sequence related to HLA knockouts in cell therapy
  source 1..18: mol_type = other DNA
cagaggatgtatggctgc

SEQ ID NO: 13817 - DNA, 18 bp, synthetic construct
  misc_feature 1..18: note = Artificial sequence related to HLA knockouts in cell therapy
  source 1..18: mol_type = other DNA
agaggatgtatggctgcg

SEQ ID NO: 13818 - DNA, 18 bp, synthetic construct
  misc_feature 1..18: note = Artificial sequence related to HLA knockouts in cell therapy
  source 1..18: mol_type = other DNA
gaggatgtatggctgcga

SEQ ID NO: 13819 - DNA, 18 bp, synthetic construct
  misc_feature 1..18: note = Artificial sequence related to HLA knockouts in cell therapy
  source 1..18: mol_type = other DNA
aggatgtatggctgcgac

SEQ ID NO: 13820 - DNA, 18 bp, synthetic construct
  misc_feature 1..18: note = Artificial sequence related to HLA knockouts in cell therapy
  source 1..18: mol_type = other DNA
gatgtatggctgcgacgt

SEQ ID NO: 13821 - DNA, 18 bp, synthetic construct
  misc_feature 1..18: note = Artificial sequence related to HLA knockouts in cell therapy
  source 1..18: mol_type = other DNA
atgtatggctgcgacgtg

SEQ ID NO: 13822 - DNA, 18 bp, synthetic construct
  misc_feature 1..18: note = Artificial sequence related to HLA knockouts in cell therapy
  source 1..18: mol_type = other DNA
gtaccaccagtacgccta

SEQ ID NO: 13823 - DNA, 18 bp, synthetic construct
  misc_feature 1..18: note = Artificial sequence related to HLA knockouts in cell therapy
  source 1..18: mol_type = other DNA
taccaccagtacgcctac

SEQ ID NO: 13824 - DNA, 18 bp, synthetic construct
  misc_feature 1..18: note = Artificial sequence related to HLA knockouts in cell therapy
  source 1..18: mol_type = other DNA
cctacgacggcaaggatt

SEQ ID NO: 13825 - DNA, 18 bp, synthetic construct
  misc_feature 1..18: note = Artificial sequence related to HLA knockouts in cell therapy
  source 1..18: mol_type = other DNA
ctacgacggcaaggatta

SEQ ID NO: 13826 - DNA, 18 bp, synthetic construct
  misc_feature 1..18: note = Artificial sequence related to HLA knockouts in cell therapy
  source 1..18: mol_type = other DNA
tacgacggcaaggattac

SEQ ID NO: 13827 - DNA, 18 bp, synthetic construct
  misc_feature 1..18: note = Artificial sequence related to HLA knockouts in cell therapy
  source 1..18: mol_type = other DNA
acgacggcaaggattaca

SEQ ID NO: 13828 - DNA, 18 bp, synthetic construct
  misc_feature 1..18: note = Artificial sequence related to HLA knockouts in cell therapy
  source 1..18: mol_type = other DNA
cgacggcaaggattacat

SEQ ID NO: 13829 - DNA, 18 bp, synthetic construct
  misc_feature 1..18: note = Artificial sequence related to HLA knockouts in cell therapy
  source 1..18: mol_type = other DNA
gacggcaaggattacatc

SEQ ID NO: 13830 - DNA, 18 bp, synthetic construct
  misc_feature 1..18: note = Artificial sequence related to HLA knockouts in cell therapy
  source 1..18: mol_type = other DNA
acggcaaggattacatcg

SEQ ID NO: 13831 - DNA, 18 bp, synthetic construct
  misc_feature 1..18: note = Artificial sequence related to HLA knockouts in cell therapy
  source 1..18: mol_type = other DNA
cggcaaggattacatcgc

SEQ ID NO: 13832 - DNA, 18 bp, synthetic construct
  misc_feature 1..18: note = Artificial sequence related to HLA knockouts in cell therapy
  source 1..18: mol_type = other DNA
ggcaaggattacatcgcc

SEQ ID NO: 13833 - DNA, 18 bp, synthetic construct
  misc_feature 1..18: note = Artificial sequence related to HLA knockouts in cell therapy
  source 1..18: mol_type = other DNA
gcaaggattacatcgccc

SEQ ID NO: 13834 - DNA, 18 bp, synthetic construct
  misc_feature 1..18: note = Artificial sequence related to HLA knockouts in cell therapy
  source 1..18: mol_type = other DNA
caaggattacatcgccct

SEQ ID NO: 13835 - DNA, 18 bp, synthetic construct
  misc_feature 1..18: note = Artificial sequence related to HLA knockouts in cell therapy
  source 1..18: mol_type = other DNA
aaggattacatcgccctg

SEQ ID NO: 13836 - DNA, 18 bp, synthetic construct
  misc_feature 1..18: note = Artificial sequence related to HLA knockouts in cell therapy
  source 1..18: mol_type = other DNA
aggattacatcgccctga

SEQ ID NO: 13837 - DNA, 18 bp, synthetic construct
  misc_feature 1..18: note = Artificial sequence related to HLA knockouts in cell therapy
  source 1..18: mol_type = other DNA
ggattacatcgccctgaa

SEQ ID NO: 13838 - DNA, 18 bp, synthetic construct
  misc_feature 1..18: note = Artificial sequence related to HLA knockouts in cell therapy
  source 1..18: mol_type = other DNA
gattacatcgccctgaaa

SEQ ID NO: 13839 - DNA, 18 bp, synthetic construct
  misc_feature 1..18: note = Artificial sequence related to HLA knockouts in cell therapy
  source 1..18: mol_type = other DNA
attacatcgccctgaaag

SEQ ID NO: 13840 - DNA, 18 bp, synthetic construct
  misc_feature 1..18: note = Artificial sequence related to HLA knockouts in cell therapy
  source 1..18: mol_type = other DNA
ttacatcgccctgaaaga

SEQ ID NO: 13841 - DNA, 18 bp, synthetic construct
  misc_feature 1..18: note = Artificial sequence related to HLA knockouts in cell therapy
  source 1..18: mol_type = other DNA
tacatcgccctgaaagag

SEQ ID NO: 13842 - DNA, 18 bp, synthetic construct
  misc_feature 1..18: note = Artificial sequence related to HLA knockouts in cell therapy
  source 1..18: mol_type = other DNA
acatcgccctgaaagagg

SEQ ID NO: 13843 - DNA, 18 bp, synthetic construct
  misc_feature 1..18: note = Artificial sequence related to HLA knockouts in cell therapy
  source 1..18: mol_type = other DNA
catcgccctgaaagagga

SEQ ID NO: 13844 - DNA, 18 bp, synthetic construct
  misc_feature 1..18: note = Artificial sequence related to HLA knockouts in cell therapy
  source 1..18: mol_type = other DNA
atcgccctgaaagaggac

SEQ ID NO: 13845 - DNA, 18 bp, synthetic construct
  misc_feature 1..18: note = Artificial sequence related to HLA knockouts in cell therapy
  source 1..18: mol_type = other DNA
tgaaagaggacctgcgct

SEQ ID NO: 13846 - DNA, 18 bp, synthetic construct
  misc_feature 1..18: note = Artificial sequence related to HLA knockouts in cell therapy
  source 1..18: mol_type = other DNA
aaagaggacctgcgctct

SEQ ID NO: 13847 - DNA, 18 bp, synthetic construct
  misc_feature 1..18: note = Artificial sequence related to HLA knockouts in cell therapy
  source 1..18: mol_type = other DNA
aagaggacctgcgctctt

SEQ ID NO: 13848 - DNA, 18 bp, synthetic construct
  misc_feature 1..18: note = Artificial sequence related to HLA knockouts in cell therapy
  source 1..18: mol_type = other DNA
acatggcagctcagacca

SEQ ID NO: 13849 - DNA, 18 bp, synthetic construct
  misc_feature 1..18: note = Artificial sequence related to HLA knockouts in cell therapy
  source 1..18: mol_type = other DNA
agctcagaccaccaagca

SEQ ID NO: 13850 - DNA, 18 bp, synthetic construct
  misc_feature 1..18: note = Artificial sequence related to HLA knockouts in cell therapy
  source 1..18: mol_type = other DNA
ctcagaccaccaagcaca

SEQ ID NO: 13851 - DNA, 18 bp, synthetic construct
  misc_feature 1..18: note = Artificial sequence related to HLA knockouts in cell therapy
  source 1..18: mol_type = other DNA
tcagaccaccaagcacaa

SEQ ID NO: 13852 - DNA, 18 bp, synthetic construct
  misc_feature 1..18: note = Artificial sequence related to HLA knockouts in cell therapy
  source 1..18: mol_type = other DNA
cagaccaccaagcacaag

SEQ ID NO: 13853 - DNA, 18 bp, synthetic construct
  misc_feature 1..18: note = Artificial sequence related to HLA knockouts in cell therapy
  source 1..18: mol_type = other DNA
agaccaccaagcacaagt

SEQ ID NO: 13854 - DNA, 18 bp, synthetic construct
  misc_feature 1..18: note = Artificial sequence related to HLA knockouts in cell therapy
  source 1..18: mol_type = other DNA
gaccaccaagcacaagtg

SEQ ID NO: 13855 - DNA, 18 bp, synthetic construct
  misc_feature 1..18: note = Artificial sequence related to HLA knockouts in cell therapy
  source 1..18: mol_type = other DNA
accaccaagcacaagtgg

SEQ ID NO: 13856 - DNA, 18 bp, synthetic construct
  misc_feature 1..18: note = Artificial sequence related to HLA knockouts in cell therapy
  source 1..18: mol_type = other DNA
caccaagcacaagtggga

SEQ ID NO: 13857 - DNA, 18 bp, synthetic construct
  misc_feature 1..18: note = Artificial sequence related to HLA knockouts in cell therapy
  source 1..18: mol_type = other DNA
accaagcacaagtgggag

SEQ ID NO: 13858 - DNA, 18 bp, synthetic construct
  misc_feature 1..18: note = Artificial sequence related to HLA knockouts in cell therapy
  source 1..18: mol_type = other DNA
atgtggcggagcagttga

SEQ ID NO: 13859 - DNA, 18 bp, synthetic construct
  misc_feature 1..18: note = Artificial sequence related to HLA knockouts in cell therapy
  source 1..18: mol_type = other DNA
ggagcagttgagagccta

SEQ ID NO: 13860 - DNA, 18 bp, synthetic construct
  misc_feature 1..18: note = Artificial sequence related to HLA knockouts in cell therapy
  source 1..18: mol_type = other DNA
gagcagttgagagcctac

SEQ ID NO: 13861 - DNA, 18 bp, synthetic construct
  misc_feature 1..18: note = Artificial sequence related to HLA knockouts in cell therapy
  source 1..18: mol_type = other DNA
agcagttgagagcctacc

SEQ ID NO: 13862 - DNA, 18 bp, synthetic construct
  misc_feature 1..18: note = Artificial sequence related to HLA knockouts in cell therapy
  source 1..18: mol_type = other DNA
gcagttgagagcctacct

SEQ ID NO: 13863 - DNA, 18 bp, synthetic construct
  misc_feature 1..18: note = Artificial sequence related to HLA knockouts in cell therapy
  source 1..18: mol_type = other DNA
cagttgagagcctacctg

SEQ ID NO: 13864 - DNA, 18 bp, synthetic construct
  misc_feature 1..18: note = Artificial sequence related to HLA knockouts in cell therapy
  source 1..18: mol_type = other DNA
agttgagagcctacctgg

SEQ ID NO: 13865 - DNA, 18 bp, synthetic construct
  misc_feature 1..18: note = Artificial sequence related to HLA knockouts in cell therapy
  source 1..18: mol_type = other DNA
gttgagagcctacctgga

SEQ ID NO: 13866 - DNA, 18 bp, synthetic construct
  misc_feature 1..18: note = Artificial sequence related to HLA knockouts in cell therapy
  source 1..18: mol_type = other DNA
ttgagagcctacctggag

SEQ ID NO: 13867 - DNA, 18 bp, synthetic construct
  misc_feature 1..18: note = Artificial sequence related to HLA knockouts in cell therapy
  source 1..18: mol_type = other DNA
tccgcagatacctggaga

SEQ ID NO: 13868 - DNA, 18 bp, synthetic construct
  misc_feature 1..18: note = Artificial sequence related to HLA knockouts in cell therapy
  source 1..18: mol_type = other DNA
ccgcagatacctggagaa

SEQ ID NO: 13869 - DNA, 18 bp, synthetic construct
  misc_feature 1..18: note = Artificial sequence related to HLA knockouts in cell therapy
  source 1..18: mol_type = other DNA
cgcagatacctggagaac

SEQ ID NO: 13870 - DNA, 18 bp, synthetic construct
  misc_feature 1..18: note = Artificial sequence related to HLA knockouts in cell therapy
  source 1..18: mol_type = other DNA
gcagatacctggagaacg

SEQ ID NO: 13871 - DNA, 18 bp, synthetic construct
  misc_feature 1..18: note = Artificial sequence related to HLA knockouts in cell therapy
  source 1..18: mol_type = other DNA
cagatacctggagaacgg

SEQ ID NO: 13872 - DNA, 18 bp, synthetic construct
  misc_feature 1..18: note = Artificial sequence related to HLA knockouts in cell therapy
  source 1..18: mol_type = other DNA
agatacctggagaacggg

SEQ ID NO: 13873 - DNA, 18 bp, synthetic construct
  misc_feature 1..18: note = Artificial sequence related to HLA knockouts in cell therapy
  source 1..18: mol_type = other DNA
gatacctggagaacggga

SEQ ID NO: 13874 - DNA, 18 bp, synthetic construct
  misc_feature 1..18: note = Artificial sequence related to HLA knockouts in cell therapy
  source 1..18: mol_type = other DNA
atacctggagaacgggaa

SEQ ID NO: 13875 - DNA, 18 bp, synthetic construct
  misc_feature 1..18: note = Artificial sequence related to HLA knockouts in cell therapy
  source 1..18: mol_type = other DNA
tacctggagaacgggaag

SEQ ID NO: 13876 - DNA, 18 bp, synthetic construct
  misc_feature 1..18: note = Artificial sequence related to HLA knockouts in cell therapy
  source 1..18: mol_type = other DNA
tggagaacgggaaggaga

SEQ ID NO: 13877 - DNA, 18 bp, synthetic construct
  misc_feature 1..18: note = Artificial sequence related to HLA knockouts in cell therapy
  source 1..18: mol_type = other DNA
aaacgcatatgactcacc

SEQ ID NO: 13878 - DNA, 18 bp, synthetic construct
  misc_feature 1..18: note = Artificial sequence related to HLA knockouts in cell therapy
  source 1..18: mol_type = other DNA
aacgcatatgactcacca

SEQ ID NO: 13879 - DNA, 18 bp, synthetic construct
  misc_feature 1..18: note = Artificial sequence related to HLA knockouts in cell therapy
  source 1..18: mol_type = other DNA
acgcatatgactcaccac

SEQ ID NO: 13880 - DNA, 18 bp, synthetic construct
  misc_feature 1..18: note = Artificial sequence related to HLA knockouts in cell therapy
  source 1..18: mol_type = other DNA
cgcatatgactcaccacg

SEQ ID NO: 13881 - DNA, 18 bp, synthetic construct
  misc_feature 1..18: note = Artificial sequence related to HLA knockouts in cell therapy
  source 1..18: mol_type = other DNA
gcatatgactcaccacgc

SEQ ID NO: 13882 - DNA, 18 bp, synthetic construct
  misc_feature 1..18: note = Artificial sequence related to HLA knockouts in cell therapy
  source 1..18: mol_type = other DNA
catatgactcaccacgct

SEQ ID NO: 13883 - DNA, 18 bp, synthetic construct
  misc_feature 1..18: note = Artificial sequence related to HLA knockouts in cell therapy
  source 1..18: mol_type = other DNA
atatgactcaccacgctg

SEQ ID NO: 13884 - DNA, 18 bp, synthetic construct
  misc_feature 1..18: note = Artificial sequence related to HLA knockouts in cell therapy
  source 1..18: mol_type = other DNA
tatgactcaccacgctgt

SEQ ID NO: 13885 - DNA, 18 bp, synthetic construct
  misc_feature 1..18: note = Artificial sequence related to HLA knockouts in cell therapy
  source 1..18: mol_type = other DNA
atgactcaccacgctgtc

SEQ ID NO: 13886 - DNA, 18 bp, synthetic construct
  misc_feature 1..18: note = Artificial sequence related to HLA knockouts in cell therapy
  source 1..18: mol_type = other DNA
tgactcaccacgctgtct

SEQ ID NO: 13887 - DNA, 18 bp, synthetic construct
  misc_feature 1..18: note = Artificial sequence related to HLA knockouts in cell therapy
  source 1..18: mol_type = other DNA
actcaccacgctgtctct

SEQ ID NO: 13888 - DNA, 18 bp, synthetic construct
  misc_feature 1..18: note = Artificial sequence related to HLA knockouts in cell therapy
  source 1..18: mol_type = other DNA
tcaccacgctgtctctga

SEQ ID NO: 13889 - DNA, 18 bp, synthetic construct
  misc_feature 1..18: note = Artificial sequence related to HLA knockouts in cell therapy
  source 1..18: mol_type = other DNA
cacgctgtctctgaccat

SEQ ID NO: 13890 - DNA, 18 bp, synthetic construct
  misc_feature 1..18: note = Artificial sequence related to HLA knockouts in cell therapy
  source 1..18: mol_type = other DNA
acgctgtctctgaccatg

SEQ ID NO: 13891 - DNA, 18 bp, synthetic construct
  misc_feature 1..18: note = Artificial sequence related to HLA knockouts in cell therapy
  source 1..18: mol_type = other DNA
cgctgtctctgaccatga

SEQ ID NO: 13892 - DNA, 18 bp, synthetic construct
  misc_feature 1..18: note = Artificial sequence related to HLA knockouts in cell therapy
  source 1..18: mol_type = other DNA
gctgtctctgaccatgaa

SEQ ID NO: 13893 - DNA, 18 bp, synthetic construct
  misc_feature 1..18: note = Artificial sequence related to HLA knockouts in cell therapy
  source 1..18: mol_type = other DNA
ctgtctctgaccatgaag

SEQ ID NO: 13894 - DNA, 18 bp, synthetic construct
  misc_feature 1..18: note = Artificial sequence related to HLA knockouts in cell therapy
  source 1..18: mol_type = other DNA
tgtctctgaccatgaagc

SEQ ID NO: 13895 - DNA, 18 bp, synthetic construct
  misc_feature 1..18: note = Artificial sequence related to HLA knockouts in cell therapy
  source 1..18: mol_type = other DNA
gtctctgaccatgaagcc

SEQ ID NO: 13896 - DNA, 18 bp, synthetic construct
  misc_feature 1..18: note = Artificial sequence related to HLA knockouts in cell therapy
  source 1..18: mol_type = other DNA
tctctgaccatgaagcca

SEQ ID NO: 13897 - DNA, 18 bp, synthetic construct
  misc_feature 1..18: note = Artificial sequence related to HLA knockouts in cell therapy
  source 1..18: mol_type = other DNA
ctctgaccatgaagccac

SEQ ID NO: 13898 - DNA, 18 bp, synthetic construct
  misc_feature 1..18: note = Artificial sequence related to HLA knockouts in cell therapy
  source 1..18: mol_type = other DNA
tctgaccatgaagccacc

SEQ ID NO: 13899 - DNA, 18 bp, synthetic construct
  misc_feature 1..18: note = Artificial sequence related to HLA knockouts in cell therapy
  source 1..18: mol_type = other DNA
tgaccatgaagccaccct

SEQ ID NO: 13900 - DNA, 18 bp, synthetic construct
  misc_feature 1..18: note = Artificial sequence related to HLA knockouts in cell therapy
  source 1..18: mol_type = other DNA
accatgaagccaccctga

SEQ ID NO: 13901 - DNA, 18 bp, synthetic construct
  misc_feature 1..18: note = Artificial sequence related to HLA knockouts in cell therapy
  source 1..18: mol_type = other DNA
atgaagccaccctgaggt

SEQ ID NO: 13902 - DNA, 18 bp, synthetic construct
  misc_feature 1..18: note = Artificial sequence related to HLA knockouts in cell therapy
  source 1..18: mol_type = other DNA
cttctaccctgcggagat

SEQ ID NO: 13903 - DNA, 18 bp, synthetic construct
  misc_feature 1..18: note = Artificial sequence related to HLA knockouts in cell therapy
  source 1..18: mol_type = other DNA
ttctaccctgcggagatc

SEQ ID NO: 13904 - DNA, 18 bp, synthetic construct
  misc_feature 1..18: note = Artificial sequence related to HLA knockouts in cell therapy
  source 1..18: mol_type = other DNA
tctaccctgcggagatca

SEQ ID NO: 13905 - DNA, 18 bp, synthetic construct
  misc_feature 1..18: note = Artificial sequence related to HLA knockouts in cell therapy
  source 1..18: mol_type = other DNA
taccctgcggagatcaca

SEQ ID NO: 13906 - DNA, 18 bp, synthetic construct
  misc_feature 1..18: note = Artificial sequence related to HLA knockouts in cell therapy
  source 1..18: mol_type = other DNA
ctgcggagatcacactga

SEQ ID NO: 13907 - DNA, 18 bp, synthetic construct
  misc_feature 1..18: note = Artificial sequence related to HLA knockouts in cell therapy
  source 1..18: mol_type = other DNA
tgcggagatcacactgac

SEQ ID NO: 13908 - DNA, 18 bp, synthetic construct
  misc_feature 1..18: note = Artificial sequence related to HLA knockouts in cell therapy
  source 1..18: mol_type = other DNA
cggagatcacactgacct

SEQ ID NO: 13909 - DNA, 18 bp, synthetic construct
  misc_feature 1..18: note = Artificial sequence related to HLA knockouts in cell therapy
  source 1..18: mol_type = other DNA
ggagatcacactgacctg

SEQ ID NO: 13910 - DNA, 18 bp, synthetic construct
  misc_feature 1..18: note = Artificial sequence related to HLA knockouts in cell therapy
  source 1..18: mol_type = other DNA
gagatcacactgacctgg

SEQ ID NO: 13911 - DNA, 18 bp, synthetic construct
  misc_feature 1..18: note = Artificial sequence related to HLA knockouts in cell therapy
  source 1..18: mol_type = other DNA
agatcacactgacctggc

SEQ ID NO: 13912 - DNA, 18 bp, synthetic construct
  misc_feature 1..18: note = Artificial sequence related to HLA knockouts in cell therapy
  source 1..18: mol_type = other DNA
gatcacactgacctggca

SEQ ID NO: 13913 - DNA, 18 bp, synthetic construct
  misc_feature 1..18: note = Artificial sequence related to HLA knockouts in cell therapy
  source 1..18: mol_type = other DNA
atcacactgacctggcag

SEQ ID NO: 13914 - DNA, 18 bp, synthetic construct
  misc_feature 1..18: note = Artificial sequence related to HLA knockouts in cell therapy
  source 1..18: mol_type = other DNA
gggatggaaccttccaga

SEQ ID NO: 13915 - DNA, 18 bp, synthetic construct
  misc_feature 1..18: note = Artificial sequence related to HLA knockouts in cell therapy
  source 1..18: mol_type = other DNA
ggatggaaccttccagaa

SEQ ID NO: 13916 - DNA, 18 bp, synthetic construct
  misc_feature 1..18: note = Artificial sequence related to HLA knockouts in cell therapy
  source 1..18: mol_type = other DNA
gatggaaccttccagaag

SEQ ID NO: 13917 - DNA, 18 bp, synthetic construct
  misc_feature 1..18: note = Artificial sequence related to HLA knockouts in cell therapy
  source 1..18: mol_type = other DNA
atggaaccttccagaagt

SEQ ID NO: 13918 - DNA, 18 bp, synthetic construct
  misc_feature 1..18: note = Artificial sequence related to HLA knockouts in cell therapy
  source 1..18: mol_type = other DNA
tggaaccttccagaagtg

SEQ ID NO: 13919 - DNA, 18 bp, synthetic construct
  misc_feature 1..18: note = Artificial sequence related to HLA knockouts in cell therapy
  source 1..18: mol_type = other DNA
ggaaccttccagaagtgg

SEQ ID NO: 13920 - DNA, 18 bp, synthetic construct
  misc_feature 1..18: note = Artificial sequence related to HLA knockouts in cell therapy
  source 1..18: mol_type = other DNA
gaaccttccagaagtggg

SEQ ID NO: 13921 - DNA, 18 bp, synthetic construct
  misc_feature 1..18: note = Artificial sequence related to HLA knockouts in cell therapy
  source 1..18: mol_type = other DNA
aaccttccagaagtgggc

SEQ ID NO: 13922 - DNA, 18 bp, synthetic construct
  misc_feature 1..18: note = Artificial sequence related to HLA knockouts in cell therapy
  source 1..18: mol_type = other DNA
cttctggacaggagcaga

SEQ ID NO: 13923 - DNA, 18 bp, synthetic construct
  misc_feature 1..18: note = Artificial sequence related to HLA knockouts in cell therapy
  source 1..18: mol_type = other DNA
ttctggacaggagcagag

SEQ ID NO: 13924 - DNA, 18 bp, synthetic construct
  misc_feature 1..18: note = Artificial sequence related to HLA knockouts in cell therapy
  source 1..18: mol_type = other DNA
tctggacaggagcagaga

SEQ ID NO: 13925 - DNA, 18 bp, synthetic construct
  misc_feature 1..18: note = Artificial sequence related to HLA knockouts in cell therapy
  source 1..18: mol_type = other DNA
ctggacaggagcagagat

SEQ ID NO: 13926 - DNA, 18 bp, synthetic construct
  misc_feature 1..18: note = Artificial sequence related to HLA knockouts in cell therapy
  source 1..18: mol_type = other DNA
tggacaggagcagagata

SEQ ID NO: 13927 - DNA, 18 bp, synthetic construct
  misc_feature 1..18: note = Artificial sequence related to HLA knockouts in cell therapy
  source 1..18: mol_type = other DNA
ggacaggagcagagatac

SEQ ID NO: 13928 - DNA, 18 bp, synthetic construct
  misc_feature 1..18: note = Artificial sequence related to HLA knockouts in cell therapy
  source 1..18: mol_type = other DNA
gacaggagcagagataca

SEQ ID NO: 13929 - DNA, 18 bp, synthetic construct
  misc_feature 1..18: note = Artificial sequence related to HLA knockouts in cell therapy
  source 1..18: mol_type = other DNA
acaggagcagagatacac

SEQ ID NO: 13930 - DNA, 18 bp, synthetic construct
  misc_feature 1..18: note = Artificial sequence related to HLA knockouts in cell therapy
  source 1..18: mol_type = other DNA
caggagcagagatacacc

SEQ ID NO: 13931 - DNA, 18 bp, synthetic construct
  misc_feature 1..18: note = Artificial sequence related to HLA knockouts in cell therapy
  source 1..18: mol_type = other DNA
aggagcagagatacacct

SEQ ID NO: 13932 - DNA, 18 bp, synthetic construct
  misc_feature 1..18: note = Artificial sequence related to HLA knockouts in cell therapy
  source 1..18: mol_type = other DNA
ggagcagagatacacctg

SEQ ID NO: 13933 - DNA, 18 bp, synthetic construct
  misc_feature 1..18: note = Artificial sequence related to HLA knockouts in cell therapy
  source 1..18: mol_type = other DNA
gagcagagatacacctgc

SEQ ID NO: 13934 - DNA, 18 bp, synthetic construct
  misc_feature 1..18: note = Artificial sequence related to HLA knockouts in cell therapy
  source 1..18: mol_type = other DNA
agcagagatacacctgcc

SEQ ID NO: 13935 - DNA, 18 bp, synthetic construct
  misc_feature 1..18: note = Artificial sequence related to HLA knockouts in cell therapy
  source 1..18: mol_type = other DNA
gcagagatacacctgcca

SEQ ID NO: 13936 - DNA, 18 bp, synthetic construct
  misc_feature 1..18: note = Artificial sequence related to HLA knockouts in cell therapy
  source 1..18: mol_type = other DNA
cagagatacacctgccat

SEQ ID NO: 13937 - DNA, 18 bp, synthetic construct
  misc_feature 1..18: note = Artificial sequence related to HLA knockouts in cell therapy
  source 1..18: mol_type = other DNA
agagatacacctgccatg

SEQ ID NO: 13938 - DNA, 18 bp, synthetic construct
  misc_feature 1..18: note = Artificial sequence related to HLA knockouts in cell therapy
  source 1..18: mol_type = other DNA
gagatacacctgccatgt

SEQ ID NO: 13939 - DNA, 18 bp, synthetic construct
  misc_feature 1..18: note = Artificial sequence related to HLA knockouts in cell therapy
  source 1..18: mol_type = other DNA
agatacacctgccatgtg

SEQ ID NO: 13940 - DNA, 18 bp, synthetic construct
  misc_feature 1..18: note = Artificial sequence related to HLA knockouts in cell therapy
  source 1..18: mol_type = other DNA
gatacacctgccatgtgc

SEQ ID NO: 13941 - DNA, 18 bp, synthetic construct
  misc_feature 1..18: note = Artificial sequence related to HLA knockouts in cell therapy
  source 1..18: mol_type = other DNA
atacacctgccatgtgca

SEQ ID NO: 13942 - DNA, 18 bp, synthetic construct
  misc_feature 1..18: note = Artificial sequence related to HLA knockouts in cell therapy
  source 1..18: mol_type = other DNA
tacacctgccatgtgcag

SEQ ID NO: 13943 - DNA, 18 bp, synthetic construct
  misc_feature 1..18: note = Artificial sequence related to HLA knockouts in cell therapy
  source 1..18: mol_type = other DNA
acctgccatgtgcagcat

SEQ ID NO: 13944 - DNA, 18 bp, synthetic construct
  misc_feature 1..18: note = Artificial sequence related to HLA knockouts in cell therapy
  source 1..18: mol_type = other DNA
ctgccatgtgcagcatga

SEQ ID NO: 13945 - DNA, 18 bp, synthetic construct
  misc_feature 1..18: note = Artificial sequence related to HLA knockouts in cell therapy
  source 1..18: mol_type = other DNA
tgccatgtgcagcatgag

SEQ ID NO: 13946 - DNA, 18 bp, synthetic construct
  misc_feature 1..18: note = Artificial sequence related to HLA knockouts in cell therapy
  source 1..18: mol_type = other DNA
catgtgcagcatgagggt

SEQ ID NO: 13947 - DNA, 18 bp, synthetic construct
  misc_feature 1..18: note = Artificial sequence related to HLA knockouts in cell therapy
  source 1..18: mol_type = other DNA
atgtgcagcatgagggtt

SEQ ID NO: 13948 - DNA, 18 bp, synthetic construct
  misc_feature 1..18: note = Artificial sequence related to HLA knockouts in cell therapy
  source 1..18: mol_type = other DNA
tgtgcagcatgagggttt

SEQ ID NO: 13949 - DNA, 18 bp, synthetic construct
  misc_feature 1..18: note = Artificial sequence related to HLA knockouts in cell therapy
  source 1..18: mol_type = other DNA
gtgcagcatgagggtttg

SEQ ID NO: 13950 - DNA, 18 bp, synthetic construct
  misc_feature 1..18: note = Artificial sequence related to HLA knockouts in cell therapy
  source 1..18: mol_type = other DNA
tgcagcatgagggtttgc

SEQ ID NO: 13951 - DNA, 18 bp, synthetic construct
  misc_feature 1..18: note = Artificial sequence related to HLA knockouts in cell therapy
  source 1..18: mol_type = other DNA
agcatgagggtttgccca

SEQ ID NO: 13952 - DNA, 18 bp, synthetic construct
  misc_feature 1..18: note = Artificial sequence related to HLA knockouts in cell therapy
  source 1..18: mol_type = other DNA
gcatgagggtttgcccaa

SEQ ID NO: 13953 - DNA, 18 bp, synthetic construct
  misc_feature 1..18: note = Artificial sequence related to HLA knockouts in cell therapy
  source 1..18: mol_type = other DNA
catgagggtttgcccaag

SEQ ID NO: 13954 - DNA, 18 bp, synthetic construct
  misc_feature 1..18: note = Artificial sequence related to HLA knockouts in cell therapy
  source 1..18: mol_type = other DNA
atgagggtttgcccaagc

SEQ ID NO: 13955 - DNA, 18 bp, synthetic construct
  misc_feature 1..18: note = Artificial sequence related to HLA knockouts in cell therapy
  source 1..18: mol_type = other DNA
tgagatgggagccgtctt

SEQ ID NO: 13956 - DNA, 18 bp, synthetic construct
  misc_feature 1..18: note = Artificial sequence related to HLA knockouts in cell therapy
  source 1..18: mol_type = other DNA
cccatcgtgggcatcatt

SEQ ID NO: 13957 - DNA, 18 bp, synthetic construct
  misc_feature 1..18: note = Artificial sequence related to HLA knockouts in cell therapy
  source 1..18: mol_type = other DNA
ccatcgtgggcatcattg

SEQ ID NO: 13958 - DNA, 18 bp, synthetic construct
  misc_feature 1..18: note = Artificial sequence related to HLA knockouts in cell therapy
  source 1..18: mol_type = other DNA
catcgtgggcatcattgc

SEQ ID NO: 13959 - DNA, 18 bp, synthetic construct
  misc_feature 1..18: note = Artificial sequence related to HLA knockouts in cell therapy
  source 1..18: mol_type = other DNA
atcgtgggcatcattgct

SEQ ID NO: 13960 - DNA, 18 bp, synthetic construct
  misc_feature 1..18: note = Artificial sequence related to HLA knockouts in cell therapy
  source 1..18: mol_type = other DNA
tcgtgggcatcattgctg

SEQ ID NO: 13961 - DNA, 18 bp, synthetic construct
  misc_feature 1..18: note = Artificial sequence related to HLA knockouts in cell therapy
  source 1..18: mol_type = other DNA
catcattgctggcctggt

SEQ ID NO: 13962 - DNA, 18 bp, synthetic construct
  misc_feature 1..18: note = Artificial sequence related to HLA knockouts in cell therapy
  source 1..18: mol_type = other DNA
atcattgctggcctggtt

SEQ ID NO: 13963 - DNA, 18 bp, synthetic construct
  misc_feature 1..18: note = Artificial sequence related to HLA knockouts in cell therapy
  source 1..18: mol_type = other DNA
tcattgctggcctggttc

SEQ ID NO: 13964 - DNA, 18 bp, synthetic construct
  misc_feature 1..18: note = Artificial sequence related to HLA knockouts in cell therapy
  source 1..18: mol_type = other DNA
cattgctggcctggttct

SEQ ID NO: 13965 - DNA, 18 bp, synthetic construct
  misc_feature 1..18: note = Artificial sequence related to HLA knockouts in cell therapy
  source 1..18: mol_type = other DNA
attgctggcctggttctc

SEQ ID NO: 13966 - DNA, 18 bp, synthetic construct
  misc_feature 1..18: note = Artificial sequence related to HLA knockouts in cell therapy
  source 1..18: mol_type = other DNA
ttgctggcctggttctct

SEQ ID NO: 13967 - DNA, 18 bp, synthetic construct
  misc_feature 1..18: note = Artificial sequence related to HLA knockouts in cell therapy
  source 1..18: mol_type = other DNA
tgctggcctggttctctt

SEQ ID NO: 13968 - DNA, 18 bp, synthetic construct
  misc_feature 1..18: note = Artificial sequence related to HLA knockouts in cell therapy
  source 1..18: mol_type = other DNA
gctggcctggttctcttt

SEQ ID NO: 13969 - DNA, 18 bp, synthetic construct
  misc_feature 1..18: note = Artificial sequence related to HLA knockouts in cell therapy
  source 1..18: mol_type = other DNA
ctggcctggttctctttg

SEQ ID NO: 13970 - DNA, 18 bp, synthetic construct
  misc_feature 1..18: note = Artificial sequence related to HLA knockouts in cell therapy
  source 1..18: mol_type = other DNA
tggcctggttctctttgg

SEQ ID NO: 13971 - DNA, 18 bp, synthetic construct
  misc_feature 1..18: note = Artificial sequence related to HLA knockouts in cell therapy
  source 1..18: mol_type = other DNA
ggcctggttctctttgga

SEQ ID NO: 13972 - DNA, 18 bp, synthetic construct
  misc_feature 1..18: note = Artificial sequence related to HLA knockouts in cell therapy
  source 1..18: mol_type = other DNA
gcctggttctctttggag

SEQ ID NO: 13973 - DNA, 18 bp, synthetic construct
  misc_feature 1..18: note = Artificial sequence related to HLA knockouts in cell therapy
  source 1..18: mol_type = other DNA
cctggttctctttggagc

SEQ ID NO: 13974 - DNA, 18 bp, synthetic construct
  misc_feature 1..18: note = Artificial sequence related to HLA knockouts in cell therapy
  source 1..18: mol_type = other DNA
ctggttctctttggagct

SEQ ID NO: 13975 - DNA, 18 bp, synthetic construct
  misc_feature 1..18: note = Artificial sequence related to HLA knockouts in cell therapy
  source 1..18: mol_type = other DNA
tggttctctttggagctg

SEQ ID NO: 13976 - DNA, 18 bp, synthetic construct
  misc_feature 1..18: note = Artificial sequence related to HLA knockouts in cell therapy
  source 1..18: mol_type = other DNA
ggttctctttggagctgt

SEQ ID NO: 13977 - DNA, 18 bp, synthetic construct
  misc_feature 1..18: note = Artificial sequence related to HLA knockouts in cell therapy
  source 1..18: mol_type = other DNA
gttctctttggagctgtg

SEQ ID NO: 13978 - DNA, 18 bp, synthetic construct
  misc_feature 1..18: note = Artificial sequence related to HLA knockouts in cell therapy
  source 1..18: mol_type = other DNA
ttctctttggagctgtga

SEQ ID NO: 13979 - DNA, 18 bp, synthetic construct
  misc_feature 1..18: note = Artificial sequence related to HLA knockouts in cell therapy
  source 1..18: mol_type = other DNA
tctctttggagctgtgat

SEQ ID NO: 13980 - DNA, 18 bp, synthetic construct
  misc_feature 1..18: note = Artificial sequence related to HLA knockouts in cell therapy
  source 1..18: mol_type = other DNA
ctctttggagctgtgatc

SEQ ID NO: 13981 - DNA, 18 bp, synthetic construct
  misc_feature 1..18: note = Artificial sequence related to HLA knockouts in cell therapy
  source 1..18: mol_type = other DNA
tctttggagctgtgatca

SEQ ID NO: 13982 - DNA, 18 bp, synthetic construct
  misc_feature 1..18: note = Artificial sequence related to HLA knockouts in cell therapy
  source 1..18: mol_type = other DNA
ctttggagctgtgatcac

SEQ ID NO: 13983 - DNA, 18 bp, synthetic construct
  misc_feature 1..18: note = Artificial sequence related to HLA knockouts in cell therapy
  source 1..18: mol_type = other DNA
tttggagctgtgatcact

SEQ ID NO: 13984 - DNA, 18 bp, synthetic construct
  misc_feature 1..18: note = Artificial sequence related to HLA knockouts in cell therapy
  source 1..18: mol_type = other DNA
ttggagctgtgatcactg

SEQ ID NO: 13985 - DNA, 18 bp, synthetic construct
  misc_feature 1..18: note = Artificial sequence related to HLA knockouts in cell therapy
  source 1..18: mol_type = other DNA
tggagctgtgatcactgg

SEQ ID NO: 13986 - DNA, 18 bp, synthetic construct
  misc_feature 1..18: note = Artificial sequence related to HLA knockouts in cell therapy
  source 1..18: mol_type = other DNA
ggagctgtgatcactgga

SEQ ID NO: 13987 - DNA, 18 bp, synthetic construct
  misc_feature 1..18: note = Artificial sequence related to HLA knockouts in cell therapy
  source 1..18: mol_type = other DNA
gagctgtgatcactggag

SEQ ID NO: 13988 - DNA, 18 bp, synthetic construct
  misc_feature 1..18: note = Artificial sequence related to HLA knockouts in cell therapy
  source 1..18: mol_type = other DNA
agctgtgatcactggagc

SEQ ID NO: 13989 - DNA, 18 bp, synthetic construct
  misc_feature 1..18: note = Artificial sequence related to HLA knockouts in cell therapy
  source 1..18: mol_type = other DNA
gctgtgatcactggagct

SEQ ID NO: 13990 - DNA, 18 bp, synthetic construct
  misc_feature 1..18: note = Artificial sequence related to HLA knockouts in cell therapy
  source 1..18: mol_type = other DNA
ctgtgatcactggagctg

SEQ ID NO: 13991 - DNA, 18 bp, synthetic construct
  misc_feature 1..18: note = Artificial sequence related to HLA knockouts in cell therapy
  source 1..18: mol_type = other DNA
tgtgatcactggagctgt

SEQ ID NO: 13992 - DNA, 18 bp, synthetic construct
  misc_feature 1..18: note = Artificial sequence related to HLA knockouts in cell therapy
  source 1..18: mol_type = other DNA
gtgatcactggagctgtg

SEQ ID NO: 13993 - DNA, 18 bp, synthetic construct
  misc_feature 1..18: note = Artificial sequence related to HLA knockouts in cell therapy
  source 1..18: mol_type = other DNA
tgatcactggagctgtgg

SEQ ID NO: 13994 - DNA, 18 bp, synthetic construct
  misc_feature 1..18: note = Artificial sequence related to HLA knockouts in cell therapy
  source 1..18: mol_type = other DNA
gatcactggagctgtggt

SEQ ID NO: 13995 - DNA, 18 bp, synthetic construct
  misc_feature 1..18: note = Artificial sequence related to HLA knockouts in cell therapy
  source 1..18: mol_type = other DNA
atcactggagctgtggtc

SEQ ID NO: 13996 - DNA, 18 bp, synthetic construct
  misc_feature 1..18: note = Artificial sequence related to HLA knockouts in cell therapy
  source 1..18: mol_type = other DNA
tgtggtcgctgctgtgat

SEQ ID NO: 13997 - DNA, 18 bp, synthetic construct
  misc_feature 1..18: note = Artificial sequence related to HLA knockouts in cell therapy
  source 1..18: mol_type = other DNA
tggtcgctgctgtgatgt

SEQ ID NO: 13998 - DNA, 18 bp, synthetic construct
  misc_feature 1..18: note = Artificial sequence related to HLA knockouts in cell therapy
  source 1..18: mol_type = other DNA
tcgctgctgtgatgtgga

SEQ ID NO: 13999 - DNA, 18 bp, synthetic construct
  misc_feature 1..18: note = Artificial sequence related to HLA knockouts in cell therapy
  source 1..18: mol_type = other DNA
ctgctgtgatgtggagga

SEQ ID NO: 14000 - DNA, 18 bp, synthetic construct
  misc_feature 1..18: note = Artificial sequence related to HLA knockouts in cell therapy
  source 1..18: mol_type = other DNA
tgctgtgatgtggaggag

SEQ ID NO: 14001 - DNA, 18 bp, synthetic construct
  misc_feature 1..18: note = Artificial sequence related to HLA knockouts in cell therapy
  source 1..18: mol_type = other DNA
ctgtgatgtggaggagga

SEQ ID NO: 14002 - DNA, 18 bp, synthetic construct
  misc_feature 1..18: note = Artificial sequence related to HLA knockouts in cell therapy
  source 1..18: mol_type = other DNA
tgtgatgtggaggaggaa

SEQ ID NO: 14003 - DNA, 18 bp, synthetic construct
  misc_feature 1..18: note = Artificial sequence related to HLA knockouts in cell therapy
  source 1..18: mol_type = other DNA
gtgatgtggaggaggaag

SEQ ID NO: 14004 - DNA, 18 bp, synthetic construct
  misc_feature 1..18: note = Artificial sequence related to HLA knockouts in cell therapy
  source 1..18: mol_type = other DNA
tgatgtggaggaggaaga

SEQ ID NO: 14005 - DNA, 18 bp, synthetic construct
  misc_feature 1..18: note = Artificial sequence related to HLA knockouts in cell therapy
  source 1..18: mol_type = other DNA
gatgtggaggaggaagag

SEQ ID NO: 14006 - DNA, 18 bp, synthetic construct
  misc_feature 1..18: note = Artificial sequence related to HLA knockouts in cell therapy
  source 1..18: mol_type = other DNA
atgtggaggaggaagagc

SEQ ID NO: 14007 - DNA, 18 bp, synthetic construct
  misc_feature 1..18: note = Artificial sequence related to HLA knockouts in cell therapy
  source 1..18: mol_type = other DNA
tgtggaggaggaagagct

SEQ ID NO: 14008 - DNA, 18 bp, synthetic construct
  misc_feature 1..18: note = Artificial sequence related to HLA knockouts in cell therapy
  source 1..18: mol_type = other DNA
tggaggaggaagagctca

SEQ ID NO: 14009 - DNA, 18 bp, synthetic construct
  misc_feature 1..18: note = Artificial sequence related to HLA knockouts in cell therapy
  source 1..18: mol_type = other DNA
gaggaggaagagctcaga

SEQ ID NO: 14010 - DNA, 18 bp, synthetic construct
  misc_feature 1..18: note = Artificial sequence related to HLA knockouts in cell therapy
  source 1..18: mol_type = other DNA
aggaggaagagctcagat

SEQ ID NO: 14011 - DNA, 18 bp, synthetic construct
  misc_feature 1..18: note = Artificial sequence related to HLA knockouts in cell therapy
  source 1..18: mol_type = other DNA
ggaggaagagctcagata

SEQ ID NO: 14012 - DNA, 18 bp, synthetic construct
  misc_feature 1..18: note = Artificial sequence related to HLA knockouts in cell therapy
  source 1..18: mol_type = other DNA
gaggaagagctcagatag

SEQ ID NO: 14013 - DNA, 18 bp, synthetic construct
  misc_feature 1..18: note = Artificial sequence related to HLA knockouts in cell therapy
  source 1..18: mol_type = other DNA
aggaagagctcagataga

SEQ ID NO: 14014 - DNA, 18 bp, synthetic construct
  misc_feature 1..18: note = Artificial sequence related to HLA knockouts in cell therapy
  source 1..18: mol_type = other DNA
ggaagagctcagatagaa

SEQ ID NO: 14015 - DNA, 18 bp, synthetic construct
  misc_feature 1..18: note = Artificial sequence related to HLA knockouts in cell therapy
  source 1..18: mol_type = other DNA
gaagagctcagatagaaa

SEQ ID NO: 14016 - DNA, 18 bp, synthetic construct
  misc_feature 1..18: note = Artificial sequence related to HLA knockouts in cell therapy
  source 1..18: mol_type = other DNA
aaaggagggagctactct

SEQ ID NO: 14017 - DNA, 18 bp, synthetic construct
  misc_feature 1..18: note = Artificial sequence related to HLA knockouts in cell therapy
  source 1..18: mol_type = other DNA
aaggagggagctactctc

SEQ ID NO: 14018 - DNA, 18 bp, synthetic construct
  misc_feature 1..18: note = Artificial sequence related to HLA knockouts in cell therapy
  source 1..18: mol_type = other DNA
aggagggagctactctca

SEQ ID NO: 14019 - DNA, 18 bp, synthetic construct
  misc_feature 1..18: note = Artificial sequence related to HLA knockouts in cell therapy
  source 1..18: mol_type = other DNA
agctactctcaggctgca

SEQ ID NO: 14020 - DNA, 18 bp, synthetic construct
  misc_feature 1..18: note = Artificial sequence related to HLA knockouts in cell therapy
  source 1..18: mol_type = other DNA
gctactctcaggctgcaa

SEQ ID NO: 14021 - DNA, 18 bp, synthetic construct
  misc_feature 1..18: note = Artificial sequence related to HLA knockouts in cell therapy
  source 1..18: mol_type = other DNA
ctactctcaggctgcaag

SEQ ID NO: 14022 - DNA, 18 bp, synthetic construct
  misc_feature 1..18: note = Artificial sequence related to HLA knockouts in cell therapy
  source 1..18: mol_type = other DNA
tactctcaggctgcaagc

SEQ ID NO: 14023 - DNA, 18 bp, synthetic construct
  misc_feature 1..18: note = Artificial sequence related to HLA knockouts in cell therapy
  source 1..18: mol_type = other DNA
actctcaggctgcaagca

SEQ ID NO: 14024 - DNA, 18 bp, synthetic construct
  misc_feature 1..18: note = Artificial sequence related to HLA knockouts in cell therapy
  source 1..18: mol_type = other DNA
tctcaggctgcaagcagt

SEQ ID NO: 14025 - DNA, 18 bp, synthetic construct
  misc_feature 1..18: note = Artificial sequence related to HLA knockouts in cell therapy
  source 1..18: mol_type = other DNA
tcaggctgcaagcagtga

SEQ ID NO: 14026 - DNA, 18 bp, synthetic construct
  misc_feature 1..18: note = Artificial sequence related to HLA knockouts in cell therapy
  source 1..18: mol_type = other DNA
aggctgcaagcagtgaca

SEQ ID NO: 14027 - DNA, 18 bp, synthetic construct
  misc_feature 1..18: note = Artificial sequence related to HLA knockouts in cell therapy
  source 1..18: mol_type = other DNA
gctgcaagcagtgacagt

SEQ ID NO: 14028 - DNA, 18 bp, synthetic construct
  misc_feature 1..18: note = Artificial sequence related to HLA knockouts in cell therapy
  source 1..18: mol_type = other DNA
ctgcaagcagtgacagtg

SEQ ID NO: 14029 - DNA, 18 bp, synthetic construct
  misc_feature 1..18: note = Artificial sequence related to HLA knockouts in cell therapy
  source 1..18: mol_type = other DNA
tgcaagcagtgacagtgc

SEQ ID NO: 14030 - DNA, 18 bp, synthetic construct
  misc_feature 1..18: note = Artificial sequence related to HLA knockouts in cell therapy
  source 1..18: mol_type = other DNA
aagcagtgacagtgccca

SEQ ID NO: 14031 - DNA, 18 bp, synthetic construct
  misc_feature 1..18: note = Artificial sequence related to HLA knockouts in cell therapy
  source 1..18: mol_type = other DNA
cagggctctgatgtgtct

SEQ ID NO: 14032 - DNA, 18 bp, synthetic construct
  misc_feature 1..18: note = Artificial sequence related to HLA knockouts in cell therapy
  source 1..18: mol_type = other DNA
agggctctgatgtgtctc

SEQ ID NO: 14033 - DNA, 18 bp, synthetic construct
  misc_feature 1..18: note = Artificial sequence related to HLA knockouts in cell therapy
  source 1..18: mol_type = other DNA
gggctctgatgtgtctct

SEQ ID NO: 14034 - DNA, 18 bp, synthetic construct
  misc_feature 1..18: note = Artificial sequence related to HLA knockouts in cell therapy
  source 1..18: mol_type = other DNA
ggctctgatgtgtctctc

SEQ ID NO: 14035 - DNA, 18 bp, synthetic construct
  misc_feature 1..18: note = Artificial sequence related to HLA knockouts in cell therapy
  source 1..18: mol_type = other DNA
gctctgatgtgtctctca

SEQ ID NO: 14036 - DNA, 18 bp, synthetic construct
  misc_feature 1..18: note = Artificial sequence related to HLA knockouts in cell therapy
  source 1..18: mol_type = other DNA
ctctgatgtgtctctcac

SEQ ID NO: 14037 - DNA, 18 bp, synthetic construct
  misc_feature 1..18: note = Artificial sequence related to HLA knockouts in cell therapy
  source 1..18: mol_type = other DNA
tctgatgtgtctctcaca

SEQ ID NO: 14038 - DNA, 18 bp, synthetic construct
  misc_feature 1..18: note = Artificial sequence related to HLA knockouts in cell therapy
  source 1..18: mol_type = other DNA
ctgatgtgtctctcacag

SEQ ID NO: 14039 - DNA, 18 bp, synthetic construct
  misc_feature 1..18: note = Artificial sequence related to HLA knockouts in cell therapy
  source 1..18: mol_type = other DNA
tgatgtgtctctcacagc

SEQ ID NO: 14040 - DNA, 18 bp, synthetic construct
  misc_feature 1..18: note = Artificial sequence related to HLA knockouts in cell therapy
  source 1..18: mol_type = other DNA
gatgtgtctctcacagct

SEQ ID NO: 14041 - DNA, 18 bp, synthetic construct
  misc_feature 1..18: note = Artificial sequence related to HLA knockouts in cell therapy
  source 1..18: mol_type = other DNA
atgtgtctctcacagctt

SEQ ID NO: 14042 - DNA, 18 bp, synthetic construct
  misc_feature 1..18: note = Artificial sequence related to HLA knockouts in cell therapy
  source 1..18: mol_type = other DNA
tgtgtctctcacagcttg

SEQ ID NO: 14043 - DNA, 18 bp, synthetic construct
  misc_feature 1..18: note = Artificial sequence related to HLA knockouts in cell therapy
  source 1..18: mol_type = other DNA
gtgtctctcacagcttgt

SEQ ID NO: 14044 - DNA, 18 bp, synthetic construct
  misc_feature 1..18: note = Artificial sequence related to HLA knockouts in cell therapy
  source 1..18: mol_type = other DNA
tgtctctcacagcttgta

SEQ ID NO: 14045 - DNA, 18 bp, synthetic construct
  misc_feature 1..18: note = Artificial sequence related to HLA knockouts in cell therapy
  source 1..18: mol_type = other DNA
gtctctcacagcttgtaa

SEQ ID NO: 14046 - DNA, 18 bp, synthetic construct
  misc_feature 1..18: note = Artificial sequence related to HLA knockouts in cell therapy
  source 1..18: mol_type = other DNA
tctctcacagcttgtaaa

SEQ ID NO: 14047 - DNA, 18 bp, synthetic construct
  misc_feature 1..18: note = Artificial sequence related to HLA knockouts in cell therapy
  source 1..18: mol_type = other DNA
ctctcacagcttgtaaag

SEQ ID NO: 14048 - DNA, 18 bp, synthetic construct
  misc_feature 1..18: note = Artificial sequence related to HLA knockouts in cell therapy
  source 1..18: mol_type = other DNA
tctcacagcttgtaaagt

SEQ ID NO: 14049 - DNA, 18 bp, synthetic construct
  misc_feature 1..18: note = Artificial sequence related to HLA knockouts in cell therapy
  source 1..18: mol_type = other DNA
ctcacagcttgtaaagtg

SEQ ID NO: 14050 - DNA, 18 bp, synthetic construct
  misc_feature 1..18: note = Artificial sequence related to HLA knockouts in cell therapy
  source 1..18: mol_type = other DNA
tcacagcttgtaaagtgt

SEQ ID NO: 14051 - DNA, 18 bp, synthetic construct
  misc_feature 1..18: note = Artificial sequence related to HLA knockouts in cell therapy
  source 1..18: mol_type = other DNA
cacagcttgtaaagtgtg

SEQ ID NO: 14052 - DNA, 18 bp, synthetic construct
  misc_feature 1..18: note = Artificial sequence related to HLA knockouts in cell therapy
  source 1..18: mol_type = other DNA
acagcttgtaaagtgtga

SEQ ID NO: 14053 - DNA, 18 bp, synthetic construct
  misc_feature 1..18: note = Artificial sequence related to HLA knockouts in cell therapy
  source 1..18: mol_type = other DNA
cagcttgtaaagtgtgag

SEQ ID NO: 14054 - DNA, 18 bp, synthetic construct
  misc_feature 1..18: note = Artificial sequence related to HLA knockouts in cell therapy
  source 1..18: mol_type = other DNA
agcttgtaaagtgtgaga

SEQ ID NO: 14055 - DNA, 18 bp, synthetic construct
  misc_feature 1..18: note = Artificial sequence related to HLA knockouts in cell therapy
  source 1..18: mol_type = other DNA
gcttgtaaagtgtgagac

SEQ ID NO: 14056 - DNA, 18 bp, synthetic construct
  misc_feature 1..18: note = Artificial sequence related to HLA knockouts in cell therapy
  source 1..18: mol_type = other DNA
cttgtaaagtgtgagaca

SEQ ID NO: 14057 - DNA, 18 bp, synthetic construct
  misc_feature 1..18: note = Artificial sequence related to HLA knockouts in cell therapy
  source 1..18: mol_type = other DNA
ttgtaaagtgtgagacag

SEQ ID NO: 14058 - DNA, 18 bp, synthetic construct
  misc_feature 1..18: note = Artificial sequence related to HLA knockouts in cell therapy
  source 1..18: mol_type = other DNA
tgtaaagtgtgagacagc

SEQ ID NO: 14059 - DNA, 18 bp, synthetic construct
  misc_feature 1..18: note = Artificial sequence related to HLA knockouts in cell therapy
  source 1..18: mol_type = other DNA
gtaaagtgtgagacagct

SEQ ID NO: 14060 - DNA, 18 bp, synthetic construct
  misc_feature 1..18: note = Artificial sequence related to HLA knockouts in cell therapy
  source 1..18: mol_type = other DNA
taaagtgtgagacagctg

SEQ ID NO: 14061 - DNA, 18 bp, synthetic construct
  misc_feature 1..18: note = Artificial sequence related to HLA knockouts in cell therapy
  source 1..18: mol_type = other DNA
aaagtgtgagacagctgc

SEQ ID NO: 14062 - DNA, 18 bp, synthetic construct
  misc_feature 1..18: note = Artificial sequence related to HLA knockouts in cell therapy
  source 1..18: mol_type = other DNA
aagtgtgagacagctgcc

SEQ ID NO: 14063 - DNA, 18 bp, synthetic construct
  misc_feature 1..18: note = Artificial sequence related to HLA knockouts in cell therapy
  source 1..18: mol_type = other DNA
agtgtgagacagctgcct

SEQ ID NO: 14064 - DNA, 18 bp, synthetic construct
  misc_feature 1..18: note = Artificial sequence related to HLA knockouts in cell therapy
  source 1..18: mol_type = other DNA
gtgtgagacagctgcctt

SEQ ID NO: 14065 - DNA, 18 bp, synthetic construct
  misc_feature 1..18: note = Artificial sequence related to HLA knockouts in cell therapy
  source 1..18: mol_type = other DNA
tgtgagacagctgccttg

SEQ ID NO: 14066 - DNA, 18 bp, synthetic construct
  misc_feature 1..18: note = Artificial sequence related to HLA knockouts in cell therapy
  source 1..18: mol_type = other DNA
gtgagacagctgccttgt

SEQ ID NO: 14067 - DNA, 18 bp, synthetic construct
  misc_feature 1..18: note = Artificial sequence related to HLA knockouts in cell therapy
  source 1..18: mol_type = other DNA
tgagacagctgccttgtg

SEQ ID NO: 14068 - DNA, 18 bp, synthetic construct
  misc_feature 1..18: note = Artificial sequence related to HLA knockouts in cell therapy
  source 1..18: mol_type = other DNA
gagacagctgccttgtgt

SEQ ID NO: 14069 - DNA, 18 bp, synthetic construct
  misc_feature 1..18: note = Artificial sequence related to HLA knockouts in cell therapy
  source 1..18: mol_type = other DNA
agacagctgccttgtgtg

SEQ ID NO: 14070 - DNA, 18 bp, synthetic construct
  misc_feature 1..18: note = Artificial sequence related to HLA knockouts in cell therapy
  source 1..18: mol_type = other DNA
tgccttgtgtgggactga

SEQ ID NO: 14071 - DNA, 18 bp, synthetic construct
  misc_feature 1..18: note = Artificial sequence related to HLA knockouts in cell therapy
  source 1..18: mol_type = other DNA
ccttgtgtgggactgaga

SEQ ID NO: 14072 - DNA, 18 bp, synthetic construct
  misc_feature 1..18: note = Artificial sequence related to HLA knockouts in cell therapy
  source 1..18: mol_type = other DNA
cttgtgtgggactgagag

SEQ ID NO: 14073 - DNA, 18 bp, synthetic construct
  misc_feature 1..18: note = Artificial sequence related to HLA knockouts in cell therapy
  source 1..18: mol_type = other DNA
ttgtgtgggactgagagg

SEQ ID NO: 14074 - DNA, 18 bp, synthetic construct
  misc_feature 1..18: note = Artificial sequence related to HLA knockouts in cell therapy
  source 1..18: mol_type = other DNA
tgtgggactgagaggcaa

SEQ ID NO: 14075 - DNA, 18 bp, synthetic construct
  misc_feature 1..18: note = Artificial sequence related to HLA knockouts in cell therapy
  source 1..18: mol_type = other DNA
tgggactgagaggcaaga

SEQ ID NO: 14076 - DNA, 18 bp, synthetic construct
  misc_feature 1..18: note = Artificial sequence related to HLA knockouts in cell therapy
  source 1..18: mol_type = other DNA
ggactgagaggcaagagt

SEQ ID NO: 14077 - DNA, 18 bp, synthetic construct
  misc_feature 1..18: note = Artificial sequence related to HLA knockouts in cell therapy
  source 1..18: mol_type = other DNA
gactgagaggcaagagtt

SEQ ID NO: 14078 - DNA, 18 bp, synthetic construct
  misc_feature 1..18: note = Artificial sequence related to HLA knockouts in cell therapy
  source 1..18: mol_type = other DNA
actgagaggcaagagttg

SEQ ID NO: 14079 - DNA, 18 bp, synthetic construct
  misc_feature 1..18: note = Artificial sequence related to HLA knockouts in cell therapy
  source 1..18: mol_type = other DNA
ctgagaggcaagagttgt

SEQ ID NO: 14080 - DNA, 18 bp, synthetic construct
  misc_feature 1..18: note = Artificial sequence related to HLA knockouts in cell therapy
  source 1..18: mol_type = other DNA
tgagaggcaagagttgtt

SEQ ID NO: 14081 - DNA, 18 bp, synthetic construct
  misc_feature 1..18: note = Artificial sequence related to HLA knockouts in cell therapy
  source 1..18: mol_type = other DNA
gagaggcaagagttgttc

SEQ ID NO: 14082 - DNA, 18 bp, synthetic construct
  misc_feature 1..18: note = Artificial sequence related to HLA knockouts in cell therapy
  source 1..18: mol_type = other DNA
agaggcaagagttgttcc

SEQ ID NO: 14083 - DNA, 18 bp, synthetic construct
  misc_feature 1..18: note = Artificial sequence related to HLA knockouts in cell therapy
  source 1..18: mol_type = other DNA
gaggcaagagttgttcct

SEQ ID NO: 14084 - DNA, 18 bp, synthetic construct
  misc_feature 1..18: note = Artificial sequence related to HLA knockouts in cell therapy
  source 1..18: mol_type = other DNA
aggcaagagttgttcctg

SEQ ID NO: 14085 - DNA, 18 bp, synthetic construct
  misc_feature 1..18: note = Artificial sequence related to HLA knockouts in cell therapy
  source 1..18: mol_type = other DNA
ggcaagagttgttcctgc

SEQ ID NO: 14086 - DNA, 18 bp, synthetic construct
  misc_feature 1..18: note = Artificial sequence related to HLA knockouts in cell therapy
  source 1..18: mol_type = other DNA
gcaagagttgttcctgcc

SEQ ID NO: 14087 - DNA, 18 bp, synthetic construct
  misc_feature 1..18: note = Artificial sequence related to HLA knockouts in cell therapy
  source 1..18: mol_type = other DNA
caagagttgttcctgccc

SEQ ID NO: 14088 - DNA, 18 bp, synthetic construct
  misc_feature 1..18: note = Artificial sequence related to HLA knockouts in cell therapy
  source 1..18: mol_type = other DNA
aagagttgttcctgccct

SEQ ID NO: 14089 - DNA, 18 bp, synthetic construct
  misc_feature 1..18: note = Artificial sequence related to HLA knockouts in cell therapy
  source 1..18: mol_type = other DNA
agagttgttcctgccctt

SEQ ID NO: 14090 - DNA, 18 bp, synthetic construct
  misc_feature 1..18: note = Artificial sequence related to HLA knockouts in cell therapy
  source 1..18: mol_type = other DNA
gagttgttcctgcccttc

SEQ ID NO: 14091 - DNA, 18 bp, synthetic construct
  misc_feature 1..18: note = Artificial sequence related to HLA knockouts in cell therapy
  source 1..18: mol_type = other DNA
agttgttcctgcccttcc

SEQ ID NO: 14092 - DNA, 18 bp, synthetic construct
  misc_feature 1..18: note = Artificial sequence related to HLA knockouts in cell therapy
  source 1..18: mol_type = other DNA
ttgttcctgcccttccct

SEQ ID NO: 14093 - DNA, 18 bp, synthetic construct
  misc_feature 1..18: note = Artificial sequence related to HLA knockouts in cell therapy
  source 1..18: mol_type = other DNA
tgttcctgcccttccctt

SEQ ID NO: 14094 - DNA, 18 bp, synthetic construct
  misc_feature 1..18: note = Artificial sequence related to HLA knockouts in cell therapy
  source 1..18: mol_type = other DNA
gttcctgcccttcccttt

SEQ ID NO: 14095 - DNA, 18 bp, synthetic construct
  misc_feature 1..18: note = Artificial sequence related to HLA knockouts in cell therapy
  source 1..18: mol_type = other DNA
ttcctgcccttccctttg

SEQ ID NO: 14096 - DNA, 18 bp, synthetic construct
  misc_feature 1..18: note = Artificial sequence related to HLA knockouts in cell therapy
  source 1..18: mol_type = other DNA
tcctgcccttccctttgt

SEQ ID NO: 14097 - DNA, 18 bp, synthetic construct
  misc_feature 1..18: note = Artificial sequence related to HLA knockouts in cell therapy
  source 1..18: mol_type = other DNA
ctgcccttccctttgtga

SEQ ID NO: 14098 - DNA, 18 bp, synthetic construct
  misc_feature 1..18: note = Artificial sequence related to HLA knockouts in cell therapy
  source 1..18: mol_type = other DNA
tgcccttccctttgtgac

SEQ ID NO: 14099 - DNA, 18 bp, synthetic construct
  misc_feature 1..18: note = Artificial sequence related to HLA knockouts in cell therapy
  source 1..18: mol_type = other DNA
gcccttccctttgtgact

SEQ ID NO: 14100 - DNA, 18 bp, synthetic construct
  misc_feature 1..18: note = Artificial sequence related to HLA knockouts in cell therapy
  source 1..18: mol_type = other DNA
cccttccctttgtgactt

SEQ ID NO: 14101 - DNA, 18 bp, synthetic construct
  misc_feature 1..18: note = Artificial sequence related to HLA knockouts in cell therapy
  source 1..18: mol_type = other DNA
ccttccctttgtgacttg

SEQ ID NO: 14102 - DNA, 18 bp, synthetic construct
  misc_feature 1..18: note = Artificial sequence related to HLA knockouts in cell therapy
  source 1..18: mol_type = other DNA
cttccctttgtgacttga

SEQ ID NO: 14103 - DNA, 18 bp, synthetic construct
  misc_feature 1..18: note = Artificial sequence related to HLA knockouts in cell therapy
  source 1..18: mol_type = other DNA
ttccctttgtgacttgaa

SEQ ID NO: 14104 - DNA, 18 bp, synthetic construct
  misc_feature 1..18: note = Artificial sequence related to HLA knockouts in cell therapy
  source 1..18: mol_type = other DNA
tccctttgtgacttgaag

SEQ ID NO: 14105 - DNA, 18 bp, synthetic construct
  misc_feature 1..18: note = Artificial sequence related to HLA knockouts in cell therapy
  source 1..18: mol_type = other DNA
ccctttgtgacttgaaga

SEQ ID NO: 14106 - DNA, 18 bp, synthetic construct
  misc_feature 1..18: note = Artificial sequence related to HLA knockouts in cell therapy
  source 1..18: mol_type = other DNA
cctttgtgacttgaagaa

SEQ ID NO: 14107 - DNA, 18 bp, synthetic construct
  misc_feature 1..18: note = Artificial sequence related to HLA knockouts in cell therapy
  source 1..18: mol_type = other DNA
ctttgtgacttgaagaac

SEQ ID NO: 14108 - DNA, 18 bp, synthetic construct
  misc_feature 1..18: note = Artificial sequence related to HLA knockouts in cell therapy
  source 1..18: mol_type = other DNA
tttgtgacttgaagaacc

SEQ ID NO: 14109 - DNA, 18 bp, synthetic construct
  misc_feature 1..18: note = Artificial sequence related to HLA knockouts in cell therapy
  source 1..18: mol_type = other DNA
ttgtgacttgaagaaccc

SEQ ID NO: 14110 - DNA, 18 bp, synthetic construct
  misc_feature 1..18: note = Artificial sequence related to HLA knockouts in cell therapy
  source 1..18: mol_type = other DNA
tgtgacttgaagaaccct

SEQ ID NO: 14111 - DNA, 18 bp, synthetic construct
  misc_feature 1..18: note = Artificial sequence related to HLA knockouts in cell therapy
  source 1..18: mol_type = other DNA
gtgacttgaagaaccctg

SEQ ID NO: 14112 - DNA, 18 bp, synthetic construct
  misc_feature 1..18: note = Artificial sequence related to HLA knockouts in cell therapy
  source 1..18: mol_type = other DNA
tgacttgaagaaccctga

SEQ ID NO: 14113 - DNA, 18 bp, synthetic construct
  misc_feature 1..18: note = Artificial sequence related to HLA knockouts in cell therapy
  source 1..18: mol_type = other DNA
gacttgaagaaccctgac

SEQ ID NO: 14114 - DNA, 18 bp, synthetic construct
  misc_feature 1..18: note = Artificial sequence related to HLA knockouts in cell therapy
  source 1..18: mol_type = other DNA
acttgaagaaccctgact

SEQ ID NO: 14115 - DNA, 18 bp, synthetic construct
  misc_feature 1..18: note = Artificial sequence related to HLA knockouts in cell therapy
  source 1..18: mol_type = other DNA
cttgaagaaccctgactt

SEQ ID NO: 14116 - DNA, 18 bp, synthetic construct
  misc_feature 1..18: note = Artificial sequence related to HLA knockouts in cell therapy
  source 1..18: mol_type = other DNA
ttgaagaaccctgacttt

SEQ ID NO: 14117 - DNA, 18 bp, synthetic construct
  misc_feature 1..18: note = Artificial sequence related to HLA knockouts in cell therapy
  source 1..18: mol_type = other DNA
tgaagaaccctgactttg

SEQ ID NO: 14118 - DNA, 18 bp, synthetic construct
  misc_feature 1..18: note = Artificial sequence related to HLA knockouts in cell therapy
  source 1..18: mol_type = other DNA
gaagaaccctgactttgt

SEQ ID NO: 14119 - DNA, 18 bp, synthetic construct
  misc_feature 1..18: note = Artificial sequence related to HLA knockouts in cell therapy
  source 1..18: mol_type = other DNA
aagaaccctgactttgtt

SEQ ID NO: 14120 - DNA, 18 bp, synthetic construct
  misc_feature 1..18: note = Artificial sequence related to HLA knockouts in cell therapy
  source 1..18: mol_type = other DNA
agaaccctgactttgttt

SEQ ID NO: 14121 - DNA, 18 bp, synthetic construct
  misc_feature 1..18: note = Artificial sequence related to HLA knockouts in cell therapy
  source 1..18: mol_type = other DNA
gaaccctgactttgtttc

SEQ ID NO: 14122 - DNA, 18 bp, synthetic construct
  misc_feature 1..18: note = Artificial sequence related to HLA knockouts in cell therapy
  source 1..18: mol_type = other DNA
aaccctgactttgtttct

SEQ ID NO: 14123 - DNA, 18 bp, synthetic construct
  misc_feature 1..18: note = Artificial sequence related to HLA knockouts in cell therapy
  source 1..18: mol_type = other DNA
accctgactttgtttctg

SEQ ID NO: 14124 - DNA, 18 bp, synthetic construct
  misc_feature 1..18: note = Artificial sequence related to HLA knockouts in cell therapy
  source 1..18: mol_type = other DNA
ccctgactttgtttctgc

SEQ ID NO: 14125 - DNA, 18 bp, synthetic construct
  misc_feature 1..18: note = Artificial sequence related to HLA knockouts in cell therapy
  source 1..18: mol_type = other DNA
cctgactttgtttctgca

SEQ ID NO: 14126 - DNA, 18 bp, synthetic construct
  misc_feature 1..18: note = Artificial sequence related to HLA knockouts in cell therapy
  source 1..18: mol_type = other DNA
ctgactttgtttctgcaa

SEQ ID NO: 14127 - DNA, 18 bp, synthetic construct
  misc_feature 1..18: note = Artificial sequence related to HLA knockouts in cell therapy
  source 1..18: mol_type = other DNA
tgactttgtttctgcaaa

SEQ ID NO: 14128 - DNA, 18 bp, synthetic construct
  misc_feature 1..18: note = Artificial sequence related to HLA knockouts in cell therapy
  source 1..18: mol_type = other DNA
gactttgtttctgcaaag

SEQ ID NO: 14129 - DNA, 18 bp, synthetic construct
  misc_feature 1..18: note = Artificial sequence related to HLA knockouts in cell therapy
  source 1..18: mol_type = other DNA
actttgtttctgcaaagg

SEQ ID NO: 14130 - DNA, 18 bp, synthetic construct
  misc_feature 1..18: note = Artificial sequence related to HLA knockouts in cell therapy
  source 1..18: mol_type = other DNA
ctttgtttctgcaaaggc

SEQ ID NO: 14131 - DNA, 18 bp, synthetic construct
  misc_feature 1..18: note = Artificial sequence related to HLA knockouts in cell therapy
  source 1..18: mol_type = other DNA
tttgtttctgcaaaggca

SEQ ID NO: 14132 - DNA, 18 bp, synthetic construct
  misc_feature 1..18: note = Artificial sequence related to HLA knockouts in cell therapy
  source 1..18: mol_type = other DNA
ttgtttctgcaaaggcac

SEQ ID NO: 14133 - DNA, 18 bp, synthetic construct
  misc_feature 1..18: note = Artificial sequence related to HLA knockouts in cell therapy
  source 1..18: mol_type = other DNA
tgtttctgcaaaggcacc

SEQ ID NO: 14134 - DNA, 18 bp, synthetic construct
  misc_feature 1..18: note = Artificial sequence related to HLA knockouts in cell therapy
  source 1..18: mol_type = other DNA
gtttctgcaaaggcacct

SEQ ID NO: 14135 - DNA, 18 bp, synthetic construct
  misc_feature 1..18: note = Artificial sequence related to HLA knockouts in cell therapy
  source 1..18: mol_type = other DNA
tttctgcaaaggcacctg

SEQ ID NO: 14136 - DNA, 18 bp, synthetic construct
  misc_feature 1..18: note = Artificial sequence related to HLA knockouts in cell therapy
  source 1..18: mol_type = other DNA
ttctgcaaaggcacctgc

SEQ ID NO: 14137 - DNA, 18 bp, synthetic construct
  misc_feature 1..18: note = Artificial sequence related to HLA knockouts in cell therapy
  source 1..18: mol_type = other DNA
tctgcaaaggcacctgca

SEQ ID NO: 14138 - DNA, 18 bp, synthetic construct
  misc_feature 1..18: note = Artificial sequence related to HLA knockouts in cell therapy
  source 1..18: mol_type = other DNA
ctgcaaaggcacctgcat

SEQ ID NO: 14139 - DNA, 18 bp, synthetic construct
  misc_feature 1..18: note = Artificial sequence related to HLA knockouts in cell therapy
  source 1..18: mol_type = other DNA
tgcaaaggcacctgcatg

SEQ ID NO: 14140 - DNA, 18 bp, synthetic construct
  misc_feature 1..18: note = Artificial sequence related to HLA knockouts in cell therapy
  source 1..18: mol_type = other DNA
gcaaaggcacctgcatgt

SEQ ID NO: 14141 - DNA, 18 bp, synthetic construct
  misc_feature 1..18: note = Artificial sequence related to HLA knockouts in cell therapy
  source 1..18: mol_type = other DNA
caaaggcacctgcatgtg

SEQ ID NO: 14142 - DNA, 18 bp, synthetic construct
  misc_feature 1..18: note = Artificial sequence related to HLA knockouts in cell therapy
  source 1..18: mol_type = other DNA
aaaggcacctgcatgtgt

SEQ ID NO: 14143 - DNA, 18 bp, synthetic construct
  misc_feature 1..18: note = Artificial sequence related to HLA knockouts in cell therapy
  source 1..18: mol_type = other DNA
aaggcacctgcatgtgtc

SEQ ID NO: 14144 - DNA, 18 bp, synthetic construct
  misc_feature 1..18: note = Artificial sequence related to HLA knockouts in cell therapy
  source 1..18: mol_type = other DNA
aggcacctgcatgtgtct

SEQ ID NO: 14145 - DNA, 18 bp, synthetic construct
  misc_feature 1..18: note = Artificial sequence related to HLA knockouts in cell therapy
  source 1..18: mol_type = other DNA
gcacctgcatgtgtctgt

SEQ ID NO: 14146 - DNA, 18 bp, synthetic construct
  misc_feature 1..18: note = Artificial sequence related to HLA knockouts in cell therapy
  source 1..18: mol_type = other DNA
cacctgcatgtgtctgtg

SEQ ID NO: 14147 - DNA, 18 bp, synthetic construct
  misc_feature 1..18: note = Artificial sequence related to HLA knockouts in cell therapy
  source 1..18: mol_type = other DNA
acctgcatgtgtctgtgt

SEQ ID NO: 14148 - DNA, 18 bp, synthetic construct
  misc_feature 1..18: note = Artificial sequence related to HLA knockouts in cell therapy
  source 1..18: mol_type = other DNA
cctgcatgtgtctgtgtt

SEQ ID NO: 14149 - DNA, 18 bp, synthetic construct
  misc_feature 1..18: note = Artificial sequence related to HLA knockouts in cell therapy
  source 1..18: mol_type = other DNA
ctgcatgtgtctgtgttc

SEQ ID NO: 14150 - DNA, 18 bp, synthetic construct
  misc_feature 1..18: note = Artificial sequence related to HLA knockouts in cell therapy
  source 1..18: mol_type = other DNA
tgcatgtgtctgtgttcg

SEQ ID NO: 14151 - DNA, 18 bp, synthetic construct
  misc_feature 1..18: note = Artificial sequence related to HLA knockouts in cell therapy
  source 1..18: mol_type = other DNA
gcatgtgtctgtgttcgt

SEQ ID NO: 14152 - DNA, 18 bp, synthetic construct
  misc_feature 1..18: note = Artificial sequence related to HLA knockouts in cell therapy
  source 1..18: mol_type = other DNA
catgtgtctgtgttcgtg

SEQ ID NO: 14153 - DNA, 18 bp, synthetic construct
  misc_feature 1..18: note = Artificial sequence related to HLA knockouts in cell therapy
  source 1..18: mol_type = other DNA
atgtgtctgtgttcgtgt

SEQ ID NO: 14154 - DNA, 18 bp, synthetic construct
  misc_feature 1..18: note = Artificial sequence related to HLA knockouts in cell therapy
  source 1..18: mol_type = other DNA
tgtgtctgtgttcgtgta

SEQ ID NO: 14155 - DNA, 18 bp, synthetic construct
  misc_feature 1..18: note = Artificial sequence related to HLA knockouts in cell therapy
  source 1..18: mol_type = other DNA
gtgtctgtgttcgtgtag

SEQ ID NO: 14156 - DNA, 18 bp, synthetic construct
  misc_feature 1..18: note = Artificial sequence related to HLA knockouts in cell therapy
  source 1..18: mol_type = other DNA
tgtctgtgttcgtgtagg

SEQ ID NO: 14157 - DNA, 18 bp, synthetic construct
  misc_feature 1..18: note = Artificial sequence related to HLA knockouts in cell therapy
  source 1..18: mol_type = other DNA
gtctgtgttcgtgtaggc

SEQ ID NO: 14158 - DNA, 18 bp, synthetic construct
  misc_feature 1..18: note = Artificial sequence related to HLA knockouts in cell therapy
  source 1..18: mol_type = other DNA
tctgtgttcgtgtaggca

SEQ ID NO: 14159 - DNA, 18 bp, synthetic construct
  misc_feature 1..18: note = Artificial sequence related to HLA knockouts in cell therapy
  source 1..18: mol_type = other DNA
ctgtgttcgtgtaggcat

SEQ ID NO: 14160 - DNA, 18 bp, synthetic construct
  misc_feature 1..18: note = Artificial sequence related to HLA knockouts in cell therapy
  source 1..18: mol_type = other DNA
tgtgttcgtgtaggcata

SEQ ID NO: 14161 - DNA, 18 bp, synthetic construct
  misc_feature 1..18: note = Artificial sequence related to HLA knockouts in cell therapy
  source 1..18: mol_type = other DNA
gtgttcgtgtaggcataa

SEQ ID NO: 14162 - DNA, 18 bp, synthetic construct
  misc_feature 1..18: note = Artificial sequence related to HLA knockouts in cell therapy
  source 1..18: mol_type = other DNA
tgttcgtgtaggcataat

SEQ ID NO: 14163 - DNA, 18 bp, synthetic construct
  misc_feature 1..18: note = Artificial sequence related to HLA knockouts in cell therapy
  source 1..18: mol_type = other DNA
gttcgtgtaggcataatg

SEQ ID NO: 14164 - DNA, 18 bp, synthetic construct
  misc_feature 1..18: note = Artificial sequence related to HLA knockouts in cell therapy
  source 1..18: mol_type = other DNA
ttcgtgtaggcataatgt

SEQ ID NO: 14165 - DNA, 18 bp, synthetic construct
  misc_feature 1..18: note = Artificial sequence related to HLA knockouts in cell therapy
  source 1..18: mol_type = other DNA
tcgtgtaggcataatgtg

SEQ ID NO: 14166 - DNA, 18 bp, synthetic construct
  misc_feature 1..18: note = Artificial sequence related to HLA knockouts in cell therapy
  source 1..18: mol_type = other DNA
cgtgtaggcataatgtga

SEQ ID NO: 14167 - DNA, 18 bp, synthetic construct
  misc_feature 1..18: note = Artificial sequence related to HLA knockouts in cell therapy
  source 1..18: mol_type = other DNA
gtgtaggcataatgtgag

SEQ ID NO: 14168 - DNA, 18 bp, synthetic construct
  misc_feature 1..18: note = Artificial sequence related to HLA knockouts in cell therapy
  source 1..18: mol_type = other DNA
tgtaggcataatgtgagg

SEQ ID NO: 14169 - DNA, 18 bp, synthetic construct
  misc_feature 1..18: note = Artificial sequence related to HLA knockouts in cell therapy
  source 1..18: mol_type = other DNA
gtaggcataatgtgagga

SEQ ID NO: 14170 - DNA, 18 bp, synthetic construct
  misc_feature 1..18: note = Artificial sequence related to HLA knockouts in cell therapy
  source 1..18: mol_type = other DNA
taggcataatgtgaggag

SEQ ID NO: 14171 - DNA, 18 bp, synthetic construct
  misc_feature 1..18: note = Artificial sequence related to HLA knockouts in cell therapy
  source 1..18: mol_type = other DNA
aggcataatgtgaggagg

SEQ ID NO: 14172 - DNA, 18 bp, synthetic construct
  misc_feature 1..18: note = Artificial sequence related to HLA knockouts in cell therapy
  source 1..18: mol_type = other DNA
ggcataatgtgaggaggt

SEQ ID NO: 14173 - DNA, 18 bp, synthetic construct
  misc_feature 1..18: note = Artificial sequence related to HLA knockouts in cell therapy
  source 1..18: mol_type = other DNA
gcataatgtgaggaggtg

SEQ ID NO: 14174 - DNA, 18 bp, synthetic construct
  misc_feature 1..18: note = Artificial sequence related to HLA knockouts in cell therapy
  source 1..18: mol_type = other DNA
cataatgtgaggaggtgg

SEQ ID NO: 14175 - DNA, 18 bp, synthetic construct
  misc_feature 1..18: note = Artificial sequence related to HLA knockouts in cell therapy
  source 1..18: mol_type = other DNA
ataatgtgaggaggtggg

SEQ ID NO: 14176 - DNA, 18 bp, synthetic construct
  misc_feature 1..18: note = Artificial sequence related to HLA knockouts in cell therapy
  source 1..18: mol_type = other DNA
catgtccaccatgaccct

SEQ ID NO: 14177 - DNA, 18 bp, synthetic construct
  misc_feature 1..18: note = Artificial sequence related to HLA knockouts in cell therapy
  source 1..18: mol_type = other DNA
atgtccaccatgaccctc

SEQ ID NO: 14178 - DNA, 18 bp, synthetic construct
  misc_feature 1..18: note = Artificial sequence related to HLA knockouts in cell therapy
  source 1..18: mol_type = other DNA
tgtccaccatgaccctct

SEQ ID NO: 14179 - DNA, 18 bp, synthetic construct
  misc_feature 1..18: note = Artificial sequence related to HLA knockouts in cell therapy
  source 1..18: mol_type = other DNA
gtccaccatgaccctctt

SEQ ID NO: 14180 - DNA, 18 bp, synthetic construct
  misc_feature 1..18: note = Artificial sequence related to HLA knockouts in cell therapy
  source 1..18: mol_type = other DNA
tccaccatgaccctcttc

SEQ ID NO: 14181 - DNA, 18 bp, synthetic construct
  misc_feature 1..18: note = Artificial sequence related to HLA knockouts in cell therapy
  source 1..18: mol_type = other DNA
accatgaccctcttccca

SEQ ID NO: 14182 - DNA, 18 bp, synthetic construct
  misc_feature 1..18: note = Artificial sequence related to HLA knockouts in cell therapy
  source 1..18: mol_type = other DNA
cccaatcatctttcctgt

SEQ ID NO: 14183 - DNA, 18 bp, synthetic construct
  misc_feature 1..18: note = Artificial sequence related to HLA knockouts in cell therapy
  source 1..18: mol_type = other DNA
ccaatcatctttcctgtt

SEQ ID NO: 14184 - DNA, 18 bp, synthetic construct
  misc_feature 1..18: note = Artificial sequence related to HLA knockouts in cell therapy
  source 1..18: mol_type = other DNA
caatcatctttcctgttc

SEQ ID NO: 14185 - DNA, 18 bp, synthetic construct
  misc_feature 1..18: note = Artificial sequence related to HLA knockouts in cell therapy
  source 1..18: mol_type = other DNA
aatcatctttcctgttcc

SEQ ID NO: 14186 - DNA, 18 bp, synthetic construct
  misc_feature 1..18: note = Artificial sequence related to HLA knockouts in cell therapy
  source 1..18: mol_type = other DNA
atcatctttcctgttcca

SEQ ID NO: 14187 - DNA, 18 bp, synthetic construct
  misc_feature 1..18: note = Artificial sequence related to HLA knockouts in cell therapy
  source 1..18: mol_type = other DNA
tcatctttcctgttccag

SEQ ID NO: 14188 - DNA, 18 bp, synthetic construct
  misc_feature 1..18: note = Artificial sequence related to HLA knockouts in cell therapy
  source 1..18: mol_type = other DNA
catctttcctgttccaga

SEQ ID NO: 14189 - DNA, 18 bp, synthetic construct
  misc_feature 1..18: note = Artificial sequence related to HLA knockouts in cell therapy
  source 1..18: mol_type = other DNA
atctttcctgttccagag

SEQ ID NO: 14190 - DNA, 18 bp, synthetic construct
  misc_feature 1..18: note = Artificial sequence related to HLA knockouts in cell therapy
  source 1..18: mol_type = other DNA
tctttcctgttccagaga

SEQ ID NO: 14191 - DNA, 18 bp, synthetic construct
  misc_feature 1..18: note = Artificial sequence related to HLA knockouts in cell therapy
  source 1..18: mol_type = other DNA
ctttcctgttccagagag

SEQ ID NO: 14192 - DNA, 18 bp, synthetic construct
  misc_feature 1..18: note = Artificial sequence related to HLA knockouts in cell therapy
  source 1..18: mol_type = other DNA
tttcctgttccagagagg

SEQ ID NO: 14193 - DNA, 18 bp, synthetic construct
  misc_feature 1..18: note = Artificial sequence related to HLA knockouts in cell therapy
  source 1..18: mol_type = other DNA
ttcctgttccagagaggt

SEQ ID NO: 14194 - DNA, 18 bp, synthetic construct
  misc_feature 1..18: note = Artificial sequence related to HLA knockouts in cell therapy
  source 1..18: mol_type = other DNA
tcctgttccagagaggtg

SEQ ID NO: 14195 - DNA, 18 bp, synthetic construct
  misc_feature 1..18: note = Artificial sequence related to HLA knockouts in cell therapy
  source 1..18: mol_type = other DNA
gctgaggtgtctccatct

SEQ ID NO: 14196 - DNA, 18 bp, synthetic construct
  misc_feature 1..18: note = Artificial sequence related to HLA knockouts in cell therapy
  source 1..18: mol_type = other DNA
ctgaggtgtctccatctc

SEQ ID NO: 14197 - DNA, 18 bp, synthetic construct
  misc_feature 1..18: note = Artificial sequence related to HLA knockouts in cell therapy
  source 1..18: mol_type = other DNA
tgaggtgtctccatctct

SEQ ID NO: 14198 - DNA, 18 bp, synthetic construct
  misc_feature 1..18: note = Artificial sequence related to HLA knockouts in cell therapy
  source 1..18: mol_type = other DNA
gaggtgtctccatctctg

SEQ ID NO: 14199 - DNA, 18 bp, synthetic construct
  misc_feature 1..18: note = Artificial sequence related to HLA knockouts in cell therapy
  source 1..18: mol_type = other DNA
aggtgtctccatctctgt

SEQ ID NO: 14200 - DNA, 18 bp, synthetic construct
  misc_feature 1..18: note = Artificial sequence related to HLA knockouts in cell therapy
  source 1..18: mol_type = other DNA
ggtgtctccatctctgtc

SEQ ID NO: 14201 - DNA, 18 bp, synthetic construct
  misc_feature 1..18: note = Artificial sequence related to HLA knockouts in cell therapy
  source 1..18: mol_type = other DNA
gtgtctccatctctgtct

SEQ ID NO: 14202 - DNA, 18 bp, synthetic construct
  misc_feature 1..18: note = Artificial sequence related to HLA knockouts in cell therapy
  source 1..18: mol_type = other DNA
tgtctccatctctgtctc

SEQ ID NO: 14203 - DNA, 18 bp, synthetic construct
  misc_feature 1..18: note = Artificial sequence related to HLA knockouts in cell therapy
  source 1..18: mol_type = other DNA
gtctccatctctgtctca

SEQ ID NO: 14204 - DNA, 18 bp, synthetic construct
  misc_feature 1..18: note = Artificial sequence related to HLA knockouts in cell therapy
  source 1..18: mol_type = other DNA
tctccatctctgtctcaa

SEQ ID NO: 14205 - DNA, 18 bp, synthetic construct
  misc_feature 1..18: note = Artificial sequence related to HLA knockouts in cell therapy
  source 1..18: mol_type = other DNA
ctccatctctgtctcaac

SEQ ID NO: 14206 - DNA, 18 bp, synthetic construct
  misc_feature 1..18: note = Artificial sequence related to HLA knockouts in cell therapy
  source 1..18: mol_type = other DNA
tccatctctgtctcaact

SEQ ID NO: 14207 - DNA, 18 bp, synthetic construct
  misc_feature 1..18: note = Artificial sequence related to HLA knockouts in cell therapy
  source 1..18: mol_type = other DNA
ccatctctgtctcaactt

SEQ ID NO: 14208 - DNA, 18 bp, synthetic construct
  misc_feature 1..18: note = Artificial sequence related to HLA knockouts in cell therapy
  source 1..18: mol_type = other DNA
catctctgtctcaacttc

SEQ ID NO: 14209 - DNA, 18 bp, synthetic construct
  misc_feature 1..18: note = Artificial sequence related to HLA knockouts in cell therapy
  source 1..18: mol_type = other DNA
atctctgtctcaacttca

SEQ ID NO: 14210 - DNA, 18 bp, synthetic construct
  misc_feature 1..18: note = Artificial sequence related to HLA knockouts in cell therapy
  source 1..18: mol_type = other DNA
tctctgtctcaacttcat

SEQ ID NO: 14211 - DNA, 18 bp, synthetic construct
  misc_feature 1..18: note = Artificial sequence related to HLA knockouts in cell therapy
  source 1..18: mol_type = other DNA
ctctgtctcaacttcatg

SEQ ID NO: 14212 - DNA, 18 bp, synthetic construct
  misc_feature 1..18: note = Artificial sequence related to HLA knockouts in cell therapy
  source 1..18: mol_type = other DNA
tctgtctcaacttcatgg

SEQ ID NO: 14213 - DNA, 18 bp, synthetic construct
  misc_feature 1..18: note = Artificial sequence related to HLA knockouts in cell therapy
  source 1..18: mol_type = other DNA
ctgtctcaacttcatggt

SEQ ID NO: 14214 - DNA, 18 bp, synthetic construct
  misc_feature 1..18: note = Artificial sequence related to HLA knockouts in cell therapy
  source 1..18: mol_type = other DNA
tgtctcaacttcatggtg

SEQ ID NO: 14215 - DNA, 18 bp, synthetic construct
  misc_feature 1..18: note = Artificial sequence related to HLA knockouts in cell therapy
  source 1..18: mol_type = other DNA
gtctcaacttcatggtgc

SEQ ID NO: 14216 - DNA, 18 bp, synthetic construct
  misc_feature 1..18: note = Artificial sequence related to HLA knockouts in cell therapy
  source 1..18: mol_type = other DNA
tctcaacttcatggtgca

SEQ ID NO: 14217 - DNA, 18 bp, synthetic construct
  misc_feature 1..18: note = Artificial sequence related to HLA knockouts in cell therapy
  source 1..18: mol_type = other DNA
ctcaacttcatggtgcac

SEQ ID NO: 14218 - DNA, 18 bp, synthetic construct
  misc_feature 1..18: note = Artificial sequence related to HLA knockouts in cell therapy
  source 1..18: mol_type = other DNA
tcaacttcatggtgcact

SEQ ID NO: 14219 - DNA, 18 bp, synthetic construct
  misc_feature 1..18: note = Artificial sequence related to HLA knockouts in cell therapy
  source 1..18: mol_type = other DNA
caacttcatggtgcactg

SEQ ID NO: 14220 - DNA, 18 bp, synthetic construct
  misc_feature 1..18: note = Artificial sequence related to HLA knockouts in cell therapy
  source 1..18: mol_type = other DNA
aacttcatggtgcactga

SEQ ID NO: 14221 - DNA, 18 bp, synthetic construct
  misc_feature 1..18: note = Artificial sequence related to HLA knockouts in cell therapy
  source 1..18: mol_type = other DNA
acttcatggtgcactgag

SEQ ID NO: 14222 - DNA, 18 bp, synthetic construct
  misc_feature 1..18: note = Artificial sequence related to HLA knockouts in cell therapy
  source 1..18: mol_type = other DNA
cttcatggtgcactgagc

SEQ ID NO: 14223 - DNA, 18 bp, synthetic construct
  misc_feature 1..18: note = Artificial sequence related to HLA knockouts in cell therapy
  source 1..18: mol_type = other DNA
ttcatggtgcactgagct

SEQ ID NO: 14224 - DNA, 18 bp, synthetic construct
  misc_feature 1..18: note = Artificial sequence related to HLA knockouts in cell therapy
  source 1..18: mol_type = other DNA
tcatggtgcactgagctg

SEQ ID NO: 14225 - DNA, 18 bp, synthetic construct
  misc_feature 1..18: note = Artificial sequence related to HLA knockouts in cell therapy
  source 1..18: mol_type = other DNA
catggtgcactgagctgt

SEQ ID NO: 14226 - DNA, 18 bp, synthetic construct
  misc_feature 1..18: note = Artificial sequence related to HLA knockouts in cell therapy
  source 1..18: mol_type = other DNA
atggtgcactgagctgta

SEQ ID NO: 14227 - DNA, 18 bp, synthetic construct
  misc_feature 1..18: note = Artificial sequence related to HLA knockouts in cell therapy
  source 1..18: mol_type = other DNA
tggtgcactgagctgtaa

SEQ ID NO: 14228 - DNA, 18 bp, synthetic construct
  misc_feature 1..18: note = Artificial sequence related to HLA knockouts in cell therapy
  source 1..18: mol_type = other DNA
ggtgcactgagctgtaac

SEQ ID NO: 14229 - DNA, 18 bp, synthetic construct
  misc_feature 1..18: note = Artificial sequence related to HLA knockouts in cell therapy
  source 1..18: mol_type = other DNA
gtgcactgagctgtaact

SEQ ID NO: 14230 - DNA, 18 bp, synthetic construct
  misc_feature 1..18: note = Artificial sequence related to HLA knockouts in cell therapy
  source 1..18: mol_type = other DNA
tgcactgagctgtaactt

SEQ ID NO: 14231 - DNA, 18 bp, synthetic construct
  misc_feature 1..18: note = Artificial sequence related to HLA knockouts in cell therapy
  source 1..18: mol_type = other DNA
gcactgagctgtaacttc

SEQ ID NO: 14232 - DNA, 18 bp, synthetic construct
  misc_feature 1..18: note = Artificial sequence related to HLA knockouts in cell therapy
  source 1..18: mol_type = other DNA
cactgagctgtaacttct

SEQ ID NO: 14233 - DNA, 18 bp, synthetic construct
  misc_feature 1..18: note = Artificial sequence related to HLA knockouts in cell therapy
  source 1..18: mol_type = other DNA
actgagctgtaacttctt

SEQ ID NO: 14234 - DNA, 18 bp, synthetic construct
  misc_feature 1..18: note = Artificial sequence related to HLA knockouts in cell therapy
  source 1..18: mol_type = other DNA
ctgagctgtaacttcttc

SEQ ID NO: 14235 - DNA, 18 bp, synthetic construct
  misc_feature 1..18: note = Artificial sequence related to HLA knockouts in cell therapy
  source 1..18: mol_type = other DNA
tgagctgtaacttcttcc

SEQ ID NO: 14236 - DNA, 18 bp, synthetic construct
  misc_feature 1..18: note = Artificial sequence related to HLA knockouts in cell therapy
  source 1..18: mol_type = other DNA
gagctgtaacttcttcct

SEQ ID NO: 14237 - DNA, 18 bp, synthetic construct
  misc_feature 1..18: note = Artificial sequence related to HLA knockouts in cell therapy
  source 1..18: mol_type = other DNA
agctgtaacttcttcctt

SEQ ID NO: 14238 - DNA, 18 bp, synthetic construct
  misc_feature 1..18: note = Artificial sequence related to HLA knockouts in cell therapy
  source 1..18: mol_type = other DNA
gctgtaacttcttccttc

SEQ ID NO: 14239 - DNA, 18 bp, synthetic construct
  misc_feature 1..18: note = Artificial sequence related to HLA knockouts in cell therapy
  source 1..18: mol_type = other DNA
ctgtaacttcttccttcc

SEQ ID NO: 14240 - DNA, 18 bp, synthetic construct
  misc_feature 1..18: note = Artificial sequence related to HLA knockouts in cell therapy
  source 1..18: mol_type = other DNA
tgtaacttcttccttccc

SEQ ID NO: 14241 - DNA, 18 bp, synthetic construct
  misc_feature 1..18: note = Artificial sequence related to HLA knockouts in cell therapy
  source 1..18: mol_type = other DNA
gtaacttcttccttccct

SEQ ID NO: 14242 - DNA, 18 bp, synthetic construct
  misc_feature 1..18: note = Artificial sequence related to HLA knockouts in cell therapy
  source 1..18: mol_type = other DNA
taacttcttccttcccta

SEQ ID NO: 14243 - DNA, 18 bp, synthetic construct
  misc_feature 1..18: note = Artificial sequence related to HLA knockouts in cell therapy
  source 1..18: mol_type = other DNA
aacttcttccttccctat

SEQ ID NO: 14244 - DNA, 18 bp, synthetic construct
  misc_feature 1..18: note = Artificial sequence related to HLA knockouts in cell therapy
  source 1..18: mol_type = other DNA
acttcttccttccctatt

SEQ ID NO: 14245 - DNA, 18 bp, synthetic construct
  misc_feature 1..18: note = Artificial sequence related to HLA knockouts in cell therapy
  source 1..18: mol_type = other DNA
cttcttccttccctatta

SEQ ID NO: 14246 - DNA, 18 bp, synthetic construct
  misc_feature 1..18: note = Artificial sequence related to HLA knockouts in cell therapy
  source 1..18: mol_type = other DNA
ttcttccttccctattaa

SEQ ID NO: 14247 - DNA, 18 bp, synthetic construct
  misc_feature 1..18: note = Artificial sequence related to HLA knockouts in cell therapy
  source 1..18: mol_type = other DNA
tcttccttccctattaaa

SEQ ID NO: 14248 - DNA, 19 bp, synthetic construct
  misc_feature 1..19: note = Artificial sequence related to HLA knockouts in cell therapy
  source 1..19: mol_type = other DNA
ccgaaggcggtgtatggat

SEQ ID NO: 14249 - DNA, 19 bp, synthetic construct
  misc_feature 1..19: note = Artificial sequence related to HLA knockouts in cell therapy
  source 1..19: mol_type = other DNA
cgaaggcggtgtatggatt

SEQ ID NO: 14250 - DNA, 19 bp, synthetic construct
  misc_feature 1..19: note = Artificial sequence related to HLA knockouts in cell therapy
  source 1..19: mol_type = other DNA
gaaggcggtgtatggattg

SEQ ID NO: 14251 - DNA, 19 bp, synthetic construct
  misc_feature 1..19: note = Artificial sequence related to HLA knockouts in cell therapy
  source 1..19: mol_type = other DNA
aaggcggtgtatggattgg

SEQ ID NO: 14252 - DNA, 19 bp, synthetic construct
  misc_feature 1..19: note = Artificial sequence related to HLA knockouts in cell therapy
  source 1..19: mol_type = other DNA
aggcggtgtatggattggg

SEQ ID NO: 14253 - DNA, 19 bp, synthetic construct
  misc_feature 1..19: note = Artificial sequence related to HLA knockouts in cell therapy
  source 1..19: mol_type = other DNA
cccaactccgcagtttctt

SEQ ID NO: 14254 - DNA, 19 bp, synthetic construct
  misc_feature 1..19: note = Artificial sequence related to HLA knockouts in cell therapy
  source 1..19: mol_type = other DNA
ccaactccgcagtttcttt

SEQ ID NO: 14255 - DNA, 19 bp, synthetic construct
  misc_feature 1..19: note = Artificial sequence related to HLA knockouts in cell therapy
  source 1..19: mol_type = other DNA
tttctccctctcccaacct

SEQ ID NO: 14256 - DNA, 19 bp, synthetic construct
  misc_feature 1..19: note = Artificial sequence related to HLA knockouts in cell therapy
  source 1..19: mol_type = other DNA
ttctccctctcccaaccta

SEQ ID NO: 14257 - DNA, 19 bp, synthetic construct
  misc_feature 1..19: note = Artificial sequence related to HLA knockouts in cell therapy
  source 1..19: mol_type = other DNA
tctccctctcccaacctat

SEQ ID NO: 14258 - DNA, 19 bp, synthetic construct
  misc_feature 1..19: note = Artificial sequence related to HLA knockouts in cell therapy
  source 1..19: mol_type = other DNA
ctccctctcccaacctatg

SEQ ID NO: 14259 - DNA, 19 bp, synthetic construct
  misc_feature 1..19: note = Artificial sequence related to HLA knockouts in cell therapy
  source 1..19: mol_type = other DNA
tccctctcccaacctatgt

SEQ ID NO: 14260 - DNA, 19 bp, synthetic construct
  misc_feature 1..19: note = Artificial sequence related to HLA knockouts in cell therapy
  source 1..19: mol_type = other DNA
ccctctcccaacctatgta

SEQ ID NO: 14261 - DNA, 19 bp, synthetic construct
  misc_feature 1..19: note = Artificial sequence related to HLA knockouts in cell therapy
  source 1..19: mol_type = other DNA
cctctcccaacctatgtag

SEQ ID NO: 14262 - DNA, 19 bp, synthetic construct
  misc_feature 1..19: note = Artificial sequence related to HLA knockouts in cell therapy
  source 1..19: mol_type = other DNA
ctctcccaacctatgtagg

SEQ ID NO: 14263 - DNA, 19 bp, synthetic construct
  misc_feature 1..19: note = Artificial sequence related to HLA knockouts in cell therapy
  source 1..19: mol_type = other DNA
tctcccaacctatgtaggg

SEQ ID NO: 14264 - DNA, 19 bp, synthetic construct
  misc_feature 1..19: note = Artificial sequence related to HLA knockouts in cell therapy
  source 1..19: mol_type = other DNA
ctcccaacctatgtagggt

SEQ ID NO: 14265 - DNA, 19 bp, synthetic construct
  misc_feature 1..19: note = Artificial sequence related to HLA knockouts in cell therapy
  source 1..19: mol_type = other DNA
tcccaacctatgtagggtc

SEQ ID NO: 14266 - DNA, 19 bp, synthetic construct
  misc_feature 1..19: note = Artificial sequence related to HLA knockouts in cell therapy
  source 1..19: mol_type = other DNA
cccaacctatgtagggtcc

SEQ ID NO: 14267 - DNA, 19 bp, synthetic construct
  misc_feature 1..19: note = Artificial sequence related to HLA knockouts in cell therapy
  source 1..19: mol_type = other DNA
ccaacctatgtagggtcct

SEQ ID NO: 14268 - DNA, 19 bp, synthetic construct
  misc_feature 1..19: note = Artificial sequence related to HLA knockouts in cell therapy
  source 1..19: mol_type = other DNA
caacctatgtagggtcctt

SEQ ID NO: 14269 - DNA, 19 bp, synthetic construct
  misc_feature 1..19: note = Artificial sequence related to HLA knockouts in cell therapy
  source 1..19: mol_type = other DNA
aacctatgtagggtccttc

SEQ ID NO: 14270 - DNA, 19 bp, synthetic construct
  misc_feature 1..19: note = Artificial sequence related to HLA knockouts in cell therapy
  source 1..19: mol_type = other DNA
acctatgtagggtccttct

SEQ ID NO: 14271 - DNA, 19 bp, synthetic construct
  misc_feature 1..19: note = Artificial sequence related to HLA knockouts in cell therapy
  source 1..19: mol_type = other DNA
cctatgtagggtccttctt

SEQ ID NO: 14272 - DNA, 19 bp, synthetic construct
  misc_feature 1..19: note = Artificial sequence related to HLA knockouts in cell therapy
  source 1..19: mol_type = other DNA
ctatgtagggtccttcttc

SEQ ID NO: 14273 - DNA, 19 bp, synthetic construct
  misc_feature 1..19: note = Artificial sequence related to HLA knockouts in cell therapy
  source 1..19: mol_type = other DNA
tatgtagggtccttcttcc

SEQ ID NO: 14274 - DNA, 19 bp, synthetic construct
  misc_feature 1..19: note = Artificial sequence related to HLA knockouts in cell therapy
  source 1..19: mol_type = other DNA
atgtagggtccttcttcct

SEQ ID NO: 14275 - DNA, 19 bp, synthetic construct
  misc_feature 1..19: note = Artificial sequence related to HLA knockouts in cell therapy
  source 1..19: mol_type = other DNA
tgtagggtccttcttcctg

SEQ ID NO: 14276 - DNA, 19 bp, synthetic construct
  misc_feature 1..19: note = Artificial sequence related to HLA knockouts in cell therapy
  source 1..19: mol_type = other DNA
gtagggtccttcttcctgg

SEQ ID NO: 14277 - DNA, 19 bp, synthetic construct
  misc_feature 1..19: note = Artificial sequence related to HLA knockouts in cell therapy
  source 1..19: mol_type = other DNA
tagggtccttcttcctgga

SEQ ID NO: 14278 - DNA, 19 bp, synthetic construct
  misc_feature 1..19: note = Artificial sequence related to HLA knockouts in cell therapy
  source 1..19: mol_type = other DNA
agggtccttcttcctggat

SEQ ID NO: 14279 - DNA, 19 bp, synthetic construct
  misc_feature 1..19: note = Artificial sequence related to HLA knockouts in cell therapy
  source 1..19: mol_type = other DNA
gggtccttcttcctggata

SEQ ID NO: 14280 - DNA, 19 bp, synthetic construct
  misc_feature 1..19: note = Artificial sequence related to HLA knockouts in cell therapy
  source 1..19: mol_type = other DNA
ggtccttcttcctggatac

SEQ ID NO: 14281 - DNA, 19 bp, synthetic construct
  misc_feature 1..19: note = Artificial sequence related to HLA knockouts in cell therapy
  source 1..19: mol_type = other DNA
gtccttcttcctggatact

SEQ ID NO: 14282 - DNA, 19 bp, synthetic construct
  misc_feature 1..19: note = Artificial sequence related to HLA knockouts in cell therapy
  source 1..19: mol_type = other DNA
tccttcttcctggatactc

SEQ ID NO: 14283 - DNA, 19 bp, synthetic construct
  misc_feature 1..19: note = Artificial sequence related to HLA knockouts in cell therapy
  source 1..19: mol_type = other DNA
ccttcttcctggatactca

SEQ ID NO: 14284 - DNA, 19 bp, synthetic construct
  misc_feature 1..19: note = Artificial sequence related to HLA knockouts in cell therapy
  source 1..19: mol_type = other DNA
cttcttcctggatactcac

SEQ ID NO: 14285 - DNA, 19 bp, synthetic construct
  misc_feature 1..19: note = Artificial sequence related to HLA knockouts in cell therapy
  source 1..19: mol_type = other DNA
ttcttcctggatactcacg

SEQ ID NO: 14286 - DNA, 19 bp, synthetic construct
  misc_feature 1..19: note = Artificial sequence related to HLA knockouts in cell therapy
  source 1..19: mol_type = other DNA
tcttcctggatactcacga

SEQ ID NO: 14287 - DNA, 19 bp, synthetic construct
  misc_feature 1..19: note = Artificial sequence related to HLA knockouts in cell therapy
  source 1..19: mol_type = other DNA
cttcctggatactcacgac

SEQ ID NO: 14288 - DNA, 19 bp, synthetic construct
  misc_feature 1..19: note = Artificial sequence related to HLA knockouts in cell therapy
  source 1..19: mol_type = other DNA
ttcctggatactcacgacg

SEQ ID NO: 14289 - DNA, 19 bp, synthetic construct
  misc_feature 1..19: note = Artificial sequence related to HLA knockouts in cell therapy
  source 1..19: mol_type = other DNA
tcctggatactcacgacgc

SEQ ID NO: 14290 - DNA, 19 bp, synthetic construct
  misc_feature 1..19: note = Artificial sequence related to HLA knockouts in cell therapy
  source 1..19: mol_type = other DNA
tggatactcacgacgcgga

SEQ ID NO: 14291 - DNA, 19 bp, synthetic construct
  misc_feature 1..19: note = Artificial sequence related to HLA knockouts in cell therapy
  source 1..19: mol_type = other DNA
gacccagttctcactccca

SEQ ID NO: 14292 - DNA, 19 bp, synthetic construct
  misc_feature 1..19: note = Artificial sequence related to HLA knockouts in cell therapy
  source 1..19: mol_type = other DNA
acccagttctcactcccat

SEQ ID NO: 14293 - DNA, 19 bp, synthetic construct
  misc_feature 1..19: note = Artificial sequence related to HLA knockouts in cell therapy
  source 1..19: mol_type = other DNA
cccagttctcactcccatt

SEQ ID NO: 14294 - DNA, 19 bp, synthetic construct
  misc_feature 1..19: note = Artificial sequence related to HLA knockouts in cell therapy
  source 1..19: mol_type = other DNA
ccagttctcactcccattg

SEQ ID NO: 14295 - DNA, 19 bp, synthetic construct
  misc_feature 1..19: note = Artificial sequence related to HLA knockouts in cell therapy
  source 1..19: mol_type = other DNA
cagttctcactcccattgg

SEQ ID NO: 14296 - DNA, 19 bp, synthetic construct
  misc_feature 1..19: note = Artificial sequence related to HLA knockouts in cell therapy
  source 1..19: mol_type = other DNA
agttctcactcccattggg

SEQ ID NO: 14297 - DNA, 19 bp, synthetic construct
  misc_feature 1..19: note = Artificial sequence related to HLA knockouts in cell therapy
  source 1..19: mol_type = other DNA
gttctcactcccattgggt

SEQ ID NO: 14298 - DNA, 19 bp, synthetic construct
  misc_feature 1..19: note = Artificial sequence related to HLA knockouts in cell therapy
  source 1..19: mol_type = other DNA
ttctcactcccattgggtg

SEQ ID NO: 14299 - DNA, 19 bp, synthetic construct
  misc_feature 1..19: note = Artificial sequence related to HLA knockouts in cell therapy
  source 1..19: mol_type = other DNA
tctcactcccattgggtgt

SEQ ID NO: 14300 - DNA, 19 bp, synthetic construct
  misc_feature 1..19: note = Artificial sequence related to HLA knockouts in cell therapy
  source 1..19: mol_type = other DNA
ctcactcccattgggtgtc

SEQ ID NO: 14301 - DNA, 19 bp, synthetic construct
  misc_feature 1..19: note = Artificial sequence related to HLA knockouts in cell therapy
  source 1..19: mol_type = other DNA
tcactcccattgggtgtcg

SEQ ID NO: 14302 - DNA, 19 bp, synthetic construct
  misc_feature 1..19: note = Artificial sequence related to HLA knockouts in cell therapy
  source 1..19: mol_type = other DNA
tcccattgggtgtcgggtt

SEQ ID NO: 14303 - DNA, 19 bp, synthetic construct
  misc_feature 1..19: note = Artificial sequence related to HLA knockouts in cell therapy
  source 1..19: mol_type = other DNA
cccattgggtgtcgggttt

SEQ ID NO: 14304 - DNA, 19 bp, synthetic construct
  misc_feature 1..19: note = Artificial sequence related to HLA knockouts in cell therapy
  source 1..19: mol_type = other DNA
ccattgggtgtcgggtttc

SEQ ID NO: 14305 - DNA, 19 bp, synthetic construct
  misc_feature 1..19: note = Artificial sequence related to HLA knockouts in cell therapy
  source 1..19: mol_type = other DNA
cattgggtgtcgggtttcc

SEQ ID NO: 14306 - DNA, 19 bp, synthetic construct
  misc_feature 1..19: note = Artificial sequence related to HLA knockouts in cell therapy
  source 1..19: mol_type = other DNA
attgggtgtcgggtttcca

SEQ ID NO: 14307 - DNA, 19 bp, synthetic construct
  misc_feature 1..19: note = Artificial sequence related to HLA knockouts in cell therapy
  source 1..19: mol_type = other DNA
ttgggtgtcgggtttccag

SEQ ID NO: 14308 - DNA, 19 bp, synthetic construct
  misc_feature 1..19: note = Artificial sequence related to HLA knockouts in cell therapy
  source 1..19: mol_type = other DNA
tgggtgtcgggtttccaga

SEQ ID NO: 14309 - DNA, 19 bp, synthetic construct
  misc_feature 1..19: note = Artificial sequence related to HLA knockouts in cell therapy
  source 1..19: mol_type = other DNA
ggtgtcgggtttccagaga

SEQ ID NO: 14310 - DNA, 19 bp, synthetic construct
  misc_feature 1..19: note = Artificial sequence related to HLA knockouts in cell therapy
  source 1..19: mol_type = other DNA
gtgtcgggtttccagagaa

SEQ ID NO: 14311 - DNA, 19 bp, synthetic construct
  misc_feature 1..19: note = Artificial sequence related to HLA knockouts in cell therapy
  source 1..19: mol_type = other DNA
tgtcgggtttccagagaag

SEQ ID NO: 14312 - DNA, 19 bp, synthetic construct
  misc_feature 1..19: note = Artificial sequence related to HLA knockouts in cell therapy
  source 1..19: mol_type = other DNA
gtcgggtttccagagaagc

SEQ ID NO: 14313 - DNA, 19 bp, synthetic construct
  misc_feature 1..19: note = Artificial sequence related to HLA knockouts in cell therapy
  source 1..19: mol_type = other DNA
tcgggtttccagagaagcc

SEQ ID NO: 14314 - DNA, 19 bp, synthetic construct
  misc_feature 1..19: note = Artificial sequence related to HLA knockouts in cell therapy
  source 1..19: mol_type = other DNA
cgggtttccagagaagcca

SEQ ID NO: 14315 - DNA, 19 bp, synthetic construct
  misc_feature 1..19: note = Artificial sequence related to HLA knockouts in cell therapy
  source 1..19: mol_type = other DNA
gggtttccagagaagccaa

SEQ ID NO: 14316 - DNA, 19 bp, synthetic construct
  misc_feature 1..19: note = Artificial sequence related to HLA knockouts in cell therapy
  source 1..19: mol_type = other DNA
ggtttccagagaagccaat

SEQ ID NO: 14317 - DNA, 19 bp, synthetic construct
  misc_feature 1..19: note = Artificial sequence related to HLA knockouts in cell therapy
  source 1..19: mol_type = other DNA
gtttccagagaagccaatc

SEQ ID NO: 14318 - DNA, 19 bp, synthetic construct
  misc_feature 1..19: note = Artificial sequence related to HLA knockouts in cell therapy
  source 1..19: mol_type = other DNA
tttccagagaagccaatca

SEQ ID NO: 14319 - DNA, 19 bp, synthetic construct
  misc_feature 1..19: note = Artificial sequence related to HLA knockouts in cell therapy
  source 1..19: mol_type = other DNA
ttccagagaagccaatcag

SEQ ID NO: 14320 - DNA, 19 bp, synthetic construct
  misc_feature 1..19: note = Artificial sequence related to HLA knockouts in cell therapy
  source 1..19: mol_type = other DNA
tccagagaagccaatcagt

SEQ ID NO: 14321 - DNA, 19 bp, synthetic construct
  misc_feature 1..19: note = Artificial sequence related to HLA knockouts in cell therapy
  source 1..19: mol_type = other DNA
ccagagaagccaatcagtg

SEQ ID NO: 14322 - DNA, 19 bp, synthetic construct
  misc_feature 1..19: note = Artificial sequence related to HLA knockouts in cell therapy
  source 1..19: mol_type = other DNA
cagagaagccaatcagtgt

SEQ ID NO: 14323 - DNA, 19 bp, synthetic construct
  misc_feature 1..19: note = Artificial sequence related to HLA knockouts in cell therapy
  source 1..19: mol_type = other DNA
agagaagccaatcagtgtc

SEQ ID NO: 14324 - DNA, 19 bp, synthetic construct
  misc_feature 1..19: note = Artificial sequence related to HLA knockouts in cell therapy
  source 1..19: mol_type = other DNA
gagaagccaatcagtgtcg

SEQ ID NO: 14325 - DNA, 19 bp, synthetic construct
  misc_feature 1..19: note = Artificial sequence related to HLA knockouts in cell therapy
  source 1..19: mol_type = other DNA
agaagccaatcagtgtcgt

SEQ ID NO: 14326 - DNA, 19 bp, synthetic construct
  misc_feature 1..19: note = Artificial sequence related to HLA knockouts in cell therapy
  source 1..19: mol_type = other DNA
gaagccaatcagtgtcgtc

SEQ ID NO: 14327 - DNA, 19 bp, synthetic construct
  misc_feature 1..19: note = Artificial sequence related to HLA knockouts in cell therapy
  source 1..19: mol_type = other DNA
aagccaatcagtgtcgtcg

SEQ ID NO: 14328 - DNA, 19 bp, synthetic construct
  misc_feature 1..19: note = Artificial sequence related to HLA knockouts in cell therapy
  source 1..19: mol_type = other DNA
agccaatcagtgtcgtcgc

SEQ ID NO: 14329 - DNA, 19 bp, synthetic construct
  misc_feature 1..19: note = Artificial sequence related to HLA knockouts in cell therapy
  source 1..19: mol_type = other DNA
caatcagtgtcgtcgcggt

SEQ ID NO: 14330 - DNA, 19 bp, synthetic construct
  misc_feature 1..19: note = Artificial sequence related to HLA knockouts in cell therapy
  source 1..19: mol_type = other DNA
aatcagtgtcgtcgcggtc

SEQ ID NO: 14331 - DNA, 19 bp, synthetic construct
  misc_feature 1..19: note = Artificial sequence related to HLA knockouts in cell therapy
  source 1..19: mol_type = other DNA
tcgcggtcgcggttctaaa

SEQ ID NO: 14332 - DNA, 19 bp, synthetic construct
  misc_feature 1..19: note = Artificial sequence related to HLA knockouts in cell therapy
  source 1..19: mol_type = other DNA
gcggtcgcggttctaaagt

SEQ ID NO: 14333 - DNA, 19 bp, synthetic construct
  misc_feature 1..19: note = Artificial sequence related to HLA knockouts in cell therapy
  source 1..19: mol_type = other DNA
cggtcgcggttctaaagtc

SEQ ID NO: 14334 - DNA, 19 bp, synthetic construct
  misc_feature 1..19: note = Artificial sequence related to HLA knockouts in cell therapy
  source 1..19: mol_type = other DNA
ggtcgcggttctaaagtcc

SEQ ID NO: 14335 - DNA, 19 bp, synthetic construct
  misc_feature 1..19: note = Artificial sequence related to HLA knockouts in cell therapy
  source 1..19: mol_type = other DNA
gtcgcggttctaaagtccg

SEQ ID NO: 14336 - DNA, 19 bp, synthetic construct
  misc_feature 1..19: note = Artificial sequence related to HLA knockouts in cell therapy
  source 1..19: mol_type = other DNA
tcgcggttctaaagtccgc

SEQ ID NO: 14337 - DNA, 19 bp, synthetic construct
  misc_feature 1..19: note = Artificial sequence related to HLA knockouts in cell therapy
  source 1..19: mol_type = other DNA
cgcggttctaaagtccgca

SEQ ID NO: 14338 - DNA, 19 bp, synthetic construct
  misc_feature 1..19: note = Artificial sequence related to HLA knockouts in cell therapy
  source 1..19: mol_type = other DNA
gcggttctaaagtccgcac

SEQ ID NO: 14339 - DNA, 19 bp, synthetic construct
  misc_feature 1..19: note = Artificial sequence related to HLA knockouts in cell therapy
  source 1..19: mol_type = other DNA
cggttctaaagtccgcacg

SEQ ID NO: 14340 - DNA, 19 bp, synthetic construct
  misc_feature 1..19: note = Artificial sequence related to HLA knockouts in cell therapy
  source 1..19: mol_type = other DNA
ggttctaaagtccgcacgc

SEQ ID NO: 14341 - DNA, 19 bp, synthetic construct
  misc_feature 1..19: note = Artificial sequence related to HLA knockouts in cell therapy
  source 1..19: mol_type = other DNA
gttctaaagtccgcacgca

SEQ ID NO: 14342 - DNA, 19 bp, synthetic construct
  misc_feature 1..19: note = Artificial sequence related to HLA knockouts in cell therapy
  source 1..19: mol_type = other DNA
ttctaaagtccgcacgcac

SEQ ID NO: 14343 - DNA, 19 bp, synthetic construct
  misc_feature 1..19: note = Artificial sequence related to HLA knockouts in cell therapy
  source 1..19: mol_type = other DNA
tctaaagtccgcacgcacc

SEQ ID NO: 14344 - DNA, 19 bp, synthetic construct
  misc_feature 1..19: note = Artificial sequence related to HLA knockouts in cell therapy
  source 1..19: mol_type = other DNA
taaagtccgcacgcaccca

SEQ ID NO: 14345 - DNA, 19 bp, synthetic construct
  misc_feature 1..19: note = Artificial sequence related to HLA knockouts in cell therapy
  source 1..19: mol_type = other DNA
acccaccgggactcagatt

SEQ ID NO: 14346 - DNA, 19 bp, synthetic construct
  misc_feature 1..19: note = Artificial sequence related to HLA knockouts in cell therapy
  source 1..19: mol_type = other DNA
ccaccgggactcagattct

SEQ ID NO: 14347 - DNA, 19 bp, synthetic construct
  misc_feature 1..19: note = Artificial sequence related to HLA knockouts in cell therapy
  source 1..19: mol_type = other DNA
caccgggactcagattctc

SEQ ID NO: 14348 - DNA, 19 bp, synthetic construct
  misc_feature 1..19: note = Artificial sequence related to HLA knockouts in cell therapy
  source 1..19: mol_type = other DNA
accgggactcagattctcc

SEQ ID NO: 14349 - DNA, 19 bp, synthetic construct
  misc_feature 1..19: note = Artificial sequence related to HLA knockouts in cell therapy
  source 1..19: mol_type = other DNA
gaaccctcgtcctgctact

SEQ ID NO: 14350 - DNA, 19 bp, synthetic construct
  misc_feature 1..19: note = Artificial sequence related to HLA knockouts in cell therapy
  source 1..19: mol_type = other DNA
aaccctcgtcctgctactc

SEQ ID NO: 14351 - DNA, 19 bp, synthetic construct
  misc_feature 1..19: note = Artificial sequence related to HLA knockouts in cell therapy
  source 1..19: mol_type = other DNA
accctcgtcctgctactct

SEQ ID NO: 14352 - DNA, 19 bp, synthetic construct
  misc_feature 1..19: note = Artificial sequence related to HLA knockouts in cell therapy
  source 1..19: mol_type = other DNA
ggctctcactccatgaggt

SEQ ID NO: 14353 - DNA, 19 bp, synthetic construct
  misc_feature 1..19: note = Artificial sequence related to HLA knockouts in cell therapy
  source 1..19: mol_type = other DNA
gctctcactccatgaggta

SEQ ID NO: 14354 - DNA, 19 bp, synthetic construct
  misc_feature 1..19: note = Artificial sequence related to HLA knockouts in cell therapy
  source 1..19: mol_type = other DNA
ctctcactccatgaggtat

SEQ ID NO: 14355 - DNA, 19 bp, synthetic construct
  misc_feature 1..19: note = Artificial sequence related to HLA knockouts in cell therapy
  source 1..19: mol_type = other DNA
tctcactccatgaggtatt

SEQ ID NO: 14356 - DNA, 19 bp, synthetic construct
  misc_feature 1..19: note = Artificial sequence related to HLA knockouts in cell therapy
  source 1..19: mol_type = other DNA
ctcactccatgaggtattt

SEQ ID NO: 14357 - DNA, 19 bp, synthetic construct
  misc_feature 1..19: note = Artificial sequence related to HLA knockouts in cell therapy
  source 1..19: mol_type = other DNA
tcactccatgaggtatttc

SEQ ID NO: 14358 - DNA, 19 bp, synthetic construct
  misc_feature 1..19: note = Artificial sequence related to HLA knockouts in cell therapy
  source 1..19: mol_type = other DNA
cactccatgaggtatttct

SEQ ID NO: 14359 - DNA, 19 bp, synthetic construct
  misc_feature 1..19: note = Artificial sequence related to HLA knockouts in cell therapy
  source 1..19: mol_type = other DNA
actccatgaggtatttctt

SEQ ID NO: 14360 - DNA, 19 bp, synthetic construct
  misc_feature 1..19: note = Artificial sequence related to HLA knockouts in cell therapy
  source 1..19: mol_type = other DNA
ctccatgaggtatttcttc

SEQ ID NO: 14361 - DNA, 19 bp, synthetic construct
  misc_feature 1..19: note = Artificial sequence related to HLA knockouts in cell therapy
  source 1..19: mol_type = other DNA
tccatgaggtatttcttca

SEQ ID NO: 14362 - DNA, 19 bp, synthetic construct
  misc_feature 1..19: note = Artificial sequence related to HLA knockouts in cell therapy
  source 1..19: mol_type = other DNA
ccatgaggtatttcttcac

SEQ ID NO: 14363 - DNA, 19 bp, synthetic construct
  misc_feature 1..19: note = Artificial sequence related to HLA knockouts in cell therapy
  source 1..19: mol_type = other DNA
catgaggtatttcttcaca

SEQ ID NO: 14364 - DNA, 19 bp, synthetic construct
  misc_feature 1..19: note = Artificial sequence related to HLA knockouts in cell therapy
  source 1..19: mol_type = other DNA
atgaggtatttcttcacat

SEQ ID NO: 14365 - DNA, 19 bp, synthetic construct
  misc_feature 1..19: note = Artificial sequence related to HLA knockouts in cell therapy
  source 1..19: mol_type = other DNA
tgaggtatttcttcacatc

SEQ ID NO: 14366 - DNA, 19 bp, synthetic construct
  misc_feature 1..19: note = Artificial sequence related to HLA knockouts in cell therapy
  source 1..19: mol_type = other DNA
gaggtatttcttcacatcc

SEQ ID NO: 14367 - DNA, 19 bp, synthetic construct
  misc_feature 1..19: note = Artificial sequence related to HLA knockouts in cell therapy
  source 1..19: mol_type = other DNA
aggtatttcttcacatccg

SEQ ID NO: 14368 - DNA, 19 bp, synthetic construct
  misc_feature 1..19: note = Artificial sequence related to HLA knockouts in cell therapy
  source 1..19: mol_type = other DNA
ggtatttcttcacatccgt

SEQ ID NO: 14369 - DNA, 19 bp, synthetic construct
  misc_feature 1..19: note = Artificial sequence related to HLA knockouts in cell therapy
  source 1..19: mol_type = other DNA
gtatttcttcacatccgtg

SEQ ID NO: 14370 - DNA, 19 bp, synthetic construct
  misc_feature 1..19: note = Artificial sequence related to HLA knockouts in cell therapy
  source 1..19: mol_type = other DNA
tatttcttcacatccgtgt

SEQ ID NO: 14371 - DNA, 19 bp, synthetic construct
  misc_feature 1..19: note = Artificial sequence related to HLA knockouts in cell therapy
  source 1..19: mol_type = other DNA
atttcttcacatccgtgtc

SEQ ID NO: 14372 - DNA, 19 bp, synthetic construct
  misc_feature 1..19: note = Artificial sequence related to HLA knockouts in cell therapy
  source 1..19: mol_type = other DNA
tttcttcacatccgtgtcc

SEQ ID NO: 14373 - DNA, 19 bp, synthetic construct
  misc_feature 1..19: note = Artificial sequence related to HLA knockouts in cell therapy
  source 1..19: mol_type = other DNA
ttcttcacatccgtgtccc

SEQ ID NO: 14374 - DNA, 19 bp, synthetic construct
  misc_feature 1..19: note = Artificial sequence related to HLA knockouts in cell therapy
  source 1..19: mol_type = other DNA
tcttcacatccgtgtcccg

SEQ ID NO: 14375 - DNA, 19 bp, synthetic construct
  misc_feature 1..19: note = Artificial sequence related to HLA knockouts in cell therapy
  source 1..19: mol_type = other DNA
gcttcatcgcagtgggcta

SEQ ID NO: 14376 - DNA, 19 bp, synthetic construct
  misc_feature 1..19: note = Artificial sequence related to HLA knockouts in cell therapy
  source 1..19: mol_type = other DNA
cttcatcgcagtgggctac

SEQ ID NO: 14377 - DNA, 19 bp, synthetic construct
  misc_feature 1..19: note = Artificial sequence related to HLA knockouts in cell therapy
  source 1..19: mol_type = other DNA
ttcatcgcagtgggctacg

SEQ ID NO: 14378 - DNA, 19 bp, synthetic construct
  misc_feature 1..19: note = Artificial sequence related to HLA knockouts in cell therapy
  source 1..19: mol_type = other DNA
tcatcgcagtgggctacgt

SEQ ID NO: 14379 - DNA, 19 bp, synthetic construct
  misc_feature 1..19: note = Artificial sequence related to HLA knockouts in cell therapy
  source 1..19: mol_type = other DNA
tacgtggacgacacgcagt

SEQ ID NO: 14380 - DNA, 19 bp, synthetic construct
  misc_feature 1..19: note = Artificial sequence related to HLA knockouts in cell therapy
  source 1..19: mol_type = other DNA
acgtggacgacacgcagtt

SEQ ID NO: 14381 - DNA, 19 bp, synthetic construct
  misc_feature 1..19: note = Artificial sequence related to HLA knockouts in cell therapy
  source 1..19: mol_type = other DNA
tggacgacacgcagttcgt

SEQ ID NO: 14382 - DNA, 19 bp, synthetic construct
  misc_feature 1..19: note = Artificial sequence related to HLA knockouts in cell therapy
  source 1..19: mol_type = other DNA
acacgcagttcgtgcggtt

SEQ ID NO: 14383 - DNA, 19 bp, synthetic construct
  misc_feature 1..19: note = Artificial sequence related to HLA knockouts in cell therapy
  source 1..19: mol_type = other DNA
cagttcgtgcggttcgaca

SEQ ID NO: 14384 - DNA, 19 bp, synthetic construct
  misc_feature 1..19: note = Artificial sequence related to HLA knockouts in cell therapy
  source 1..19: mol_type = other DNA
agttcgtgcggttcgacag

SEQ ID NO: 14385 - DNA, 19 bp, synthetic construct
  misc_feature 1..19: note = Artificial sequence related to HLA knockouts in cell therapy
  source 1..19: mol_type = other DNA
gtggatagagcaggagggt

SEQ ID NO: 14386 - DNA, 19 bp, synthetic construct
  misc_feature 1..19: note = Artificial sequence related to HLA knockouts in cell therapy
  source 1..19: mol_type = other DNA
tggatagagcaggagggtc

SEQ ID NO: 14387 - DNA, 19 bp, synthetic construct
  misc_feature 1..19: note = Artificial sequence related to HLA knockouts in cell therapy
  source 1..19: mol_type = other DNA
caggagggtccggagtatt

SEQ ID NO: 14388 - DNA, 19 bp, synthetic construct
  misc_feature 1..19: note = Artificial sequence related to HLA knockouts in cell therapy
  source 1..19: mol_type = other DNA
aggagggtccggagtattg

SEQ ID NO: 14389 - DNA, 19 bp, synthetic construct
  misc_feature 1..19: note = Artificial sequence related to HLA knockouts in cell therapy
  source 1..19: mol_type = other DNA
agggtccggagtattggga

SEQ ID NO: 14390 - DNA, 19 bp, synthetic construct
  misc_feature 1..19: note = Artificial sequence related to HLA knockouts in cell therapy
  source 1..19: mol_type = other DNA
ggagacacggaaagtgaag

SEQ ID NO: 14391 - DNA, 19 bp, synthetic construct
  misc_feature 1..19: note = Artificial sequence related to HLA knockouts in cell therapy
  source 1..19: mol_type = other DNA
gagacacggaaagtgaagg

SEQ ID NO: 14392 - DNA, 19 bp, synthetic construct
  misc_feature 1..19: note = Artificial sequence related to HLA knockouts in cell therapy
  source 1..19: mol_type = other DNA
agacacggaaagtgaaggc

SEQ ID NO: 14393 - DNA, 19 bp, synthetic construct
  misc_feature 1..19: note = Artificial sequence related to HLA knockouts in cell therapy
  source 1..19: mol_type = other DNA
gacacggaaagtgaaggcc

SEQ ID NO: 14394 - DNA, 19 bp, synthetic construct
  misc_feature 1..19: note = Artificial sequence related to HLA knockouts in cell therapy
  source 1..19: mol_type = other DNA
acacggaaagtgaaggccc

SEQ ID NO: 14395 - DNA, 19 bp, synthetic construct
  misc_feature 1..19: note = Artificial sequence related to HLA knockouts in cell therapy
  source 1..19: mol_type = other DNA
cacggaaagtgaaggccca

SEQ ID NO: 14396 - DNA, 19 bp, synthetic construct
  misc_feature 1..19: note = Artificial sequence related to HLA knockouts in cell therapy
  source 1..19: mol_type = other DNA
acggaaagtgaaggcccac

SEQ ID NO: 14397 - DNA, 19 bp, synthetic construct
  misc_feature 1..19: note = Artificial sequence related to HLA knockouts in cell therapy
  source 1..19: mol_type = other DNA
cggaaagtgaaggcccact

SEQ ID NO: 14398 - DNA, 19 bp, synthetic construct
  misc_feature 1..19: note = Artificial sequence related to HLA knockouts in cell therapy
  source 1..19: mol_type = other DNA
ggaaagtgaaggcccactc

SEQ ID NO: 14399 - DNA, 19 bp, synthetic construct
  misc_feature 1..19: note = Artificial sequence related to HLA knockouts in cell therapy
  source 1..19: mol_type = other DNA
aaagtgaaggcccactcac

SEQ ID NO: 14400 - DNA, 19 bp, synthetic construct
  misc_feature 1..19: note = Artificial sequence related to HLA knockouts in cell therapy
  source 1..19: mol_type = other DNA
aagtgaaggcccactcaca

SEQ ID NO: 14401 - DNA, 19 bp, synthetic construct
  misc_feature 1..19: note = Artificial sequence related to HLA knockouts in cell therapy
  source 1..19: mol_type = other DNA
agtgaaggcccactcacag

SEQ ID NO: 14402 - DNA, 19 bp, synthetic construct
  misc_feature 1..19: note = Artificial sequence related to HLA knockouts in cell therapy
  source 1..19: mol_type = other DNA
gtgaaggcccactcacaga

SEQ ID NO: 14403 - DNA, 19 bp, synthetic construct
  misc_feature 1..19: note = Artificial sequence related to HLA knockouts in cell therapy
  source 1..19: mol_type = other DNA
tgaaggcccactcacagac

SEQ ID NO: 14404 - DNA, 19 bp, synthetic construct
  misc_feature 1..19: note = Artificial sequence related to HLA knockouts in cell therapy
  source 1..19: mol_type = other DNA
gaaggcccactcacagact

SEQ ID NO: 14405 - DNA, 19 bp, synthetic construct
  misc_feature 1..19: note = Artificial sequence related to HLA knockouts in cell therapy
  source 1..19: mol_type = other DNA
aaggcccactcacagactc

SEQ ID NO: 14406 - DNA, 19 bp, synthetic construct
  misc_feature 1..19: note = Artificial sequence related to HLA knockouts in cell therapy
  source 1..19: mol_type = other DNA
aggcccactcacagactca

SEQ ID NO: 14407 - DNA, 19 bp, synthetic construct
  misc_feature 1..19: note = Artificial sequence related to HLA knockouts in cell therapy
  source 1..19: mol_type = other DNA
ccactcacagactcaccga

SEQ ID NO: 14408 - DNA, 19 bp, synthetic construct
  misc_feature 1..19: note = Artificial sequence related to HLA knockouts in cell therapy
  source 1..19: mol_type = other DNA
cactcacagactcaccgag

SEQ ID NO: 14409 - DNA, 19 bp, synthetic construct
  misc_feature 1..19: note = Artificial sequence related to HLA knockouts in cell therapy
  source 1..19: mol_type = other DNA
actcacagactcaccgagt

SEQ ID NO: 14410 - DNA, 19 bp, synthetic construct
  misc_feature 1..19: note = Artificial sequence related to HLA knockouts in cell therapy
  source 1..19: mol_type = other DNA
ctcacagactcaccgagtg

SEQ ID NO: 14411 - DNA, 19 bp, synthetic construct
  misc_feature 1..19: note = Artificial sequence related to HLA knockouts in cell therapy
  source 1..19: mol_type = other DNA
tcacagactcaccgagtgg

SEQ ID NO: 14412 - DNA, 19 bp, synthetic construct
  misc_feature 1..19: note = Artificial sequence related to HLA knockouts in cell therapy
  source 1..19: mol_type = other DNA
cacagactcaccgagtgga

SEQ ID NO: 14413 - DNA, 19 bp, synthetic construct
  misc_feature 1..19: note = Artificial sequence related to HLA knockouts in cell therapy
  source 1..19: mol_type = other DNA
acagactcaccgagtggac

SEQ ID NO: 14414 - DNA, 19 bp, synthetic construct
  misc_feature 1..19: note = Artificial sequence related to HLA knockouts in cell therapy
  source 1..19: mol_type = other DNA
agactcaccgagtggacct

SEQ ID NO: 14415 - DNA, 19 bp, synthetic construct
  misc_feature 1..19: note = Artificial sequence related to HLA knockouts in cell therapy
  source 1..19: mol_type = other DNA
cgcggctactacaaccaga

SEQ ID NO: 14416 - DNA, 19 bp, synthetic construct
  misc_feature 1..19: note = Artificial sequence related to HLA knockouts in cell therapy
  source 1..19: mol_type = other DNA
gcggctactacaaccagag

SEQ ID NO: 14417 - DNA, 19 bp, synthetic construct
  misc_feature 1..19: note = Artificial sequence related to HLA knockouts in cell therapy
  source 1..19: mol_type = other DNA
cggctactacaaccagagc

SEQ ID NO: 14418 - DNA, 19 bp, synthetic construct
  misc_feature 1..19: note = Artificial sequence related to HLA knockouts in cell therapy
  source 1..19: mol_type = other DNA
ggctactacaaccagagcg

SEQ ID NO: 14419 - DNA, 19 bp, synthetic construct
  misc_feature 1..19: note = Artificial sequence related to HLA knockouts in cell therapy
  source 1..19: mol_type = other DNA
gctactacaaccagagcga

SEQ ID NO: 14420 - DNA, 19 bp, synthetic construct
  misc_feature 1..19: note = Artificial sequence related to HLA knockouts in cell therapy
  source 1..19: mol_type = other DNA
ctactacaaccagagcgag

SEQ ID NO: 14421 - DNA, 19 bp, synthetic construct
  misc_feature 1..19: note = Artificial sequence related to HLA knockouts in cell therapy
  source 1..19: mol_type = other DNA
tactacaaccagagcgagg

SEQ ID NO: 14422 - DNA, 19 bp, synthetic construct
  misc_feature 1..19: note = Artificial sequence related to HLA knockouts in cell therapy
  source 1..19: mol_type = other DNA
actacaaccagagcgaggc

SEQ ID NO: 14423 - DNA, 19 bp, synthetic construct
  misc_feature 1..19: note = Artificial sequence related to HLA knockouts in cell therapy
  source 1..19: mol_type = other DNA
ggttctcacaccgtccaga

SEQ ID NO: 14424 - DNA, 19 bp, synthetic construct
  misc_feature 1..19: note = Artificial sequence related to HLA knockouts in cell therapy
  source 1..19: mol_type = other DNA
gttctcacaccgtccagag

SEQ ID NO: 14425 - DNA, 19 bp, synthetic construct
  misc_feature 1..19: note = Artificial sequence related to HLA knockouts in cell therapy
  source 1..19: mol_type = other DNA
ttctcacaccgtccagagg

SEQ ID NO: 14426 - DNA, 19 bp, synthetic construct
  misc_feature 1..19: note = Artificial sequence related to HLA knockouts in cell therapy
  source 1..19: mol_type = other DNA
tctcacaccgtccagagga

SEQ ID NO: 14427 - DNA, 19 bp, synthetic construct
  misc_feature 1..19: note = Artificial sequence related to HLA knockouts in cell therapy
  source 1..19: mol_type = other DNA
ctcacaccgtccagaggat

SEQ ID NO: 14428 - DNA, 19 bp, synthetic construct
  misc_feature 1..19: note = Artificial sequence related to HLA knockouts in cell therapy
  source 1..19: mol_type = other DNA
tcacaccgtccagaggatg

SEQ ID NO: 14429 - DNA, 19 bp, synthetic construct
  misc_feature 1..19: note = Artificial sequence related to HLA knockouts in cell therapy
  source 1..19: mol_type = other DNA
cacaccgtccagaggatgt

SEQ ID NO: 14430 - DNA, 19 bp, synthetic construct
  misc_feature 1..19: note = Artificial sequence related to HLA knockouts in cell therapy
  source 1..19: mol_type = other DNA
acaccgtccagaggatgta

SEQ ID NO: 14431 - DNA, 19 bp, synthetic construct
  misc_feature 1..19: note = Artificial sequence related to HLA knockouts in cell therapy
  source 1..19: mol_type = other DNA
caccgtccagaggatgtat

SEQ ID NO: 14432 - DNA, 19 bp, synthetic construct
  misc_feature 1..19: note = Artificial sequence related to HLA knockouts in cell therapy
  source 1..19: mol_type = other DNA
accgtccagaggatgtatg

SEQ ID NO: 14433 - DNA, 19 bp, synthetic construct
  misc_feature 1..19: note = Artificial sequence related to HLA knockouts in cell therapy
  source 1..19: mol_type = other DNA
ccgtccagaggatgtatgg

SEQ ID NO: 14434 - DNA, 19 bp, synthetic construct
  misc_feature 1..19: note = Artificial sequence related to HLA knockouts in cell therapy
  source 1..19: mol_type = other DNA
cgtccagaggatgtatggc

SEQ ID NO: 14435 - DNA, 19 bp, synthetic construct
  misc_feature 1..19: note = Artificial sequence related to HLA knockouts in cell therapy
  source 1..19: mol_type = other DNA
gtccagaggatgtatggct

SEQ ID NO: 14436 - DNA, 19 bp, synthetic construct
  misc_feature 1..19: note = Artificial sequence related to HLA knockouts in cell therapy
  source 1..19: mol_type = other DNA
tccagaggatgtatggctg

SEQ ID NO: 14437 - DNA, 19 bp, synthetic construct
  misc_feature 1..19: note = Artificial sequence related to HLA knockouts in cell therapy
  source 1..19: mol_type = other DNA
ccagaggatgtatggctgc

SEQ ID NO: 14438 - DNA, 19 bp, synthetic construct
  misc_feature 1..19: note = Artificial sequence related to HLA knockouts in cell therapy
  source 1..19: mol_type = other DNA
cagaggatgtatggctgcg

SEQ ID NO: 14439 - DNA, 19 bp, synthetic construct
  misc_feature 1..19: note = Artificial sequence related to HLA knockouts in cell therapy
  source 1..19: mol_type = other DNA
agaggatgtatggctgcga

SEQ ID NO: 14440 - DNA, 19 bp, synthetic construct
  misc_feature 1..19: note = Artificial sequence related to HLA knockouts in cell therapy
  source 1..19: mol_type = other DNA
gaggatgtatggctgcgac

SEQ ID NO: 14441 - DNA, 19 bp, synthetic construct
  misc_feature 1..19: note = Artificial sequence related to HLA knockouts in cell therapy
  source 1..19: mol_type = other DNA
aggatgtatggctgcgacg

SEQ ID NO: 14442 - DNA, 19 bp, synthetic construct
  misc_feature 1..19: note = Artificial sequence related to HLA knockouts in cell therapy
  source 1..19: mol_type = other DNA
ggatgtatggctgcgacgt

SEQ ID NO: 14443 - DNA, 19 bp, synthetic construct
  misc_feature 1..19: note = Artificial sequence related to HLA knockouts in cell therapy
  source 1..19: mol_type = other DNA
gatgtatggctgcgacgtg

SEQ ID NO: 14444 - DNA, 19 bp, synthetic construct
  misc_feature 1..19: note = Artificial sequence related to HLA knockouts in cell therapy
  source 1..19: mol_type = other DNA
atgtatggctgcgacgtgg

SEQ ID NO: 14445 - DNA, 19 bp, synthetic construct
  misc_feature 1..19: note = Artificial sequence related to HLA knockouts in cell therapy
  source 1..19: mol_type = other DNA
ggtaccaccagtacgccta

SEQ ID NO: 14446 - DNA, 19 bp, synthetic construct
  misc_feature 1..19: note = Artificial sequence related to HLA knockouts in cell therapy
  source 1..19: mol_type = other DNA
gtaccaccagtacgcctac

SEQ ID NO: 14447 - DNA, 19 bp, synthetic construct
  misc_feature 1..19: note = Artificial sequence related to HLA knockouts in cell therapy
  source 1..19: mol_type = other DNA
taccaccagtacgcctacg

SEQ ID NO: 14448 - DNA, 19 bp, synthetic construct
  misc_feature 1..19: note = Artificial sequence related to HLA knockouts in cell therapy
  source 1..19: mol_type = other DNA
accaccagtacgcctacga

SEQ ID NO: 14449 - DNA, 19 bp, synthetic construct
  misc_feature 1..19: note = Artificial sequence related to HLA knockouts in cell therapy
  source 1..19: mol_type = other DNA
agtacgcctacgacggcaa

SEQ ID NO: 14450 - DNA, 19 bp, synthetic construct
  misc_feature 1..19: note = Artificial sequence related to HLA knockouts in cell therapy
  source 1..19: mol_type = other DNA
gcctacgacggcaaggatt

SEQ ID NO: 14451 - DNA, 19 bp, synthetic construct
  misc_feature 1..19: note = Artificial sequence related to HLA knockouts in cell therapy
  source 1..19: mol_type = other DNA
cctacgacggcaaggatta

SEQ ID NO: 14452 - DNA, 19 bp, synthetic construct
  misc_feature 1..19: note = Artificial sequence related to HLA knockouts in cell therapy
  source 1..19: mol_type = other DNA
ctacgacggcaaggattac

SEQ ID NO: 14453 - DNA, 19 bp, synthetic construct
  misc_feature 1..19: note = Artificial sequence related to HLA knockouts in cell therapy
  source 1..19: mol_type = other DNA
tacgacggcaaggattaca

SEQ ID NO: 14454 - DNA, 19 bp, synthetic construct
  misc_feature 1..19: note = Artificial sequence related to HLA knockouts in cell therapy
  source 1..19: mol_type = other DNA
acgacggcaaggattacat

SEQ ID NO: 14455 - DNA, 19 bp, synthetic construct
  misc_feature 1..19: note = Artificial sequence related to HLA knockouts in cell therapy
  source 1..19: mol_type = other DNA
cgacggcaaggattacatc

SEQ ID NO: 14456 - DNA, 19 bp, synthetic construct
  misc_feature 1..19: note = Artificial sequence related to HLA knockouts in cell therapy
  source 1..19: mol_type = other DNA
gacggcaaggattacatcg

SEQ ID NO: 14457 - DNA, 19 bp, synthetic construct
  misc_feature 1..19: note = Artificial sequence related to HLA knockouts in cell therapy
  source 1..19: mol_type = other DNA
acggcaaggattacatcgc

SEQ ID NO: 14458 - DNA, 19 bp, synthetic construct
  misc_feature 1..19: note = Artificial sequence related to HLA knockouts in cell therapy
  source 1..19: mol_type = other DNA
cggcaaggattacatcgcc

SEQ ID NO: 14459 - DNA, 19 bp, synthetic construct
  misc_feature 1..19: note = Artificial sequence related to HLA knockouts in cell therapy
  source 1..19: mol_type = other DNA
ggcaaggattacatcgccc

SEQ ID NO: 14460 - DNA, 19 bp, synthetic construct
  misc_feature 1..19: note = Artificial sequence related to HLA knockouts in cell therapy
  source 1..19: mol_type = other DNA
gcaaggattacatcgccct

SEQ ID NO: 14461 - DNA, 19 bp, synthetic construct
  misc_feature 1..19: note = Artificial sequence related to HLA knockouts in cell therapy
  source 1..19: mol_type = other DNA
caaggattacatcgccctg

SEQ ID NO: 14462 - DNA, 19 bp, synthetic construct
  misc_feature 1..19: note = Artificial sequence related to HLA knockouts in cell therapy
  source 1..19: mol_type = other DNA
aaggattacatcgccctga

SEQ ID NO: 14463 - DNA, 19 bp, synthetic construct
  misc_feature 1..19: note = Artificial sequence related to HLA knockouts in cell therapy
  source 1..19: mol_type = other DNA
aggattacatcgccctgaa

SEQ ID NO: 14464 - DNA, 19 bp, synthetic construct
  misc_feature 1..19: note = Artificial sequence related to HLA knockouts in cell therapy
  source 1..19: mol_type = other DNA
ggattacatcgccctgaaa

SEQ ID NO: 14465 - DNA, 19 bp, synthetic construct
  misc_feature 1..19: note = Artificial sequence related to HLA knockouts in cell therapy
  source 1..19: mol_type = other DNA
gattacatcgccctgaaag

SEQ ID NO: 14466 - DNA, 19 bp, synthetic construct
  misc_feature 1..19: note = Artificial sequence related to HLA knockouts in cell therapy
  source 1..19: mol_type = other DNA
attacatcgccctgaaaga

SEQ ID NO: 14467 - DNA, 19 bp, synthetic construct
  misc_feature 1..19: note = Artificial sequence related to HLA knockouts in cell therapy
  source 1..19: mol_type = other DNA
ttacatcgccctgaaagag

SEQ ID NO: 14468 - DNA, 19 bp, synthetic construct
  misc_feature 1..19: note = Artificial sequence related to HLA knockouts in cell therapy
  source 1..19: mol_type = other DNA
tacatcgccctgaaagagg

SEQ ID NO: 14469 - DNA, 19 bp, synthetic construct
  misc_feature 1..19: note = Artificial sequence related to HLA knockouts in cell therapy
  source 1..19: mol_type = other DNA
acatcgccctgaaagagga

SEQ ID NO: 14470 - DNA, 19 bp, synthetic construct
  misc_feature 1..19: note = Artificial sequence related to HLA knockouts in cell therapy
  source 1..19: mol_type = other DNA
catcgccctgaaagaggac

SEQ ID NO: 14471 - DNA, 19 bp, synthetic construct
  misc_feature 1..19: note = Artificial sequence related to HLA knockouts in cell therapy
  source 1..19: mol_type = other DNA
atcgccctgaaagaggacc

SEQ ID NO: 14472 - DNA, 19 bp, synthetic construct
  misc_feature 1..19: note = Artificial sequence related to HLA knockouts in cell therapy
  source 1..19: mol_type = other DNA
tcgccctgaaagaggacct

SEQ ID NO: 14473 - DNA, 19 bp, synthetic construct
  misc_feature 1..19: note = Artificial sequence related to HLA knockouts in cell therapy
  source 1..19: mol_type = other DNA
ctgaaagaggacctgcgct

SEQ ID NO: 14474 - DNA, 19 bp, synthetic construct
  misc_feature 1..19: note = Artificial sequence related to HLA knockouts in cell therapy
  source 1..19: mol_type = other DNA
tgaaagaggacctgcgctc

SEQ ID NO: 14475 - DNA, 19 bp, synthetic construct
  misc_feature 1..19: note = Artificial sequence related to HLA knockouts in cell therapy
  source 1..19: mol_type = other DNA
gaaagaggacctgcgctct

SEQ ID NO: 14476 - DNA, 19 bp, synthetic construct
  misc_feature 1..19: note = Artificial sequence related to HLA knockouts in cell therapy
  source 1..19: mol_type = other DNA
aaagaggacctgcgctctt

SEQ ID NO: 14477 - DNA, 19 bp, synthetic construct
  misc_feature 1..19: note = Artificial sequence related to HLA knockouts in cell therapy
  source 1..19: mol_type = other DNA
aagaggacctgcgctcttg

SEQ ID NO: 14478 - DNA, 19 bp, synthetic construct
  misc_feature 1..19: note = Artificial sequence related to HLA knockouts in cell therapy
  source 1..19: mol_type = other DNA
gacatggcagctcagacca

SEQ ID NO: 14479 - DNA, 19 bp, synthetic construct
  misc_feature 1..19: note = Artificial sequence related to HLA knockouts in cell therapy
  source 1..19: mol_type = other DNA
acatggcagctcagaccac

SEQ ID NO: 14480 - DNA, 19 bp, synthetic construct
  misc_feature 1..19: note = Artificial sequence related to HLA knockouts in cell therapy
  source 1..19: mol_type = other DNA
atggcagctcagaccacca

SEQ ID NO: 14481 - DNA, 19 bp, synthetic construct
  misc_feature 1..19: note = Artificial sequence related to HLA knockouts in cell therapy
  source 1..19: mol_type = other DNA
tggcagctcagaccaccaa

SEQ ID NO: 14482 - DNA, 19 bp, synthetic construct
  misc_feature 1..19: note = Artificial sequence related to HLA knockouts in cell therapy
  source 1..19: mol_type = other DNA
cagctcagaccaccaagca

SEQ ID NO: 14483 - DNA, 19 bp, synthetic construct
  misc_feature 1..19: note = Artificial sequence related to HLA knockouts in cell therapy
  source 1..19: mol_type = other DNA
agctcagaccaccaagcac

SEQ ID NO: 14484 - DNA, 19 bp, synthetic construct
  misc_feature 1..19: note = Artificial sequence related to HLA knockouts in cell therapy
  source 1..19: mol_type = other DNA
gctcagaccaccaagcaca

SEQ ID NO: 14485 - DNA, 19 bp, synthetic construct
  misc_feature 1..19: note = Artificial sequence related to HLA knockouts in cell therapy
  source 1..19: mol_type = other DNA
ctcagaccaccaagcacaa

SEQ ID NO: 14486 - DNA, 19 bp, synthetic construct
  misc_feature 1..19: note = Artificial sequence related to HLA knockouts in cell therapy
  source 1..19: mol_type = other DNA
tcagaccaccaagcacaag

SEQ ID NO: 14487 - DNA, 19 bp, synthetic construct
  misc_feature 1..19: note = Artificial sequence related to HLA knockouts in cell therapy
  source 1..19: mol_type = other DNA
cagaccaccaagcacaagt

SEQ ID NO: 14488 - DNA, 19 bp, synthetic construct
  misc_feature 1..19: note = Artificial sequence related to HLA knockouts in cell therapy
  source 1..19: mol_type = other DNA
agaccaccaagcacaagtg

SEQ ID NO: 14489 - DNA, 19 bp, synthetic construct
  misc_feature 1..19: note = Artificial sequence related to HLA knockouts in cell therapy
  source 1..19: mol_type = other DNA
gaccaccaagcacaagtgg

SEQ ID NO: 14490 - DNA, 19 bp, synthetic construct
  misc_feature 1..19: note = Artificial sequence related to HLA knockouts in cell therapy
  source 1..19: mol_type = other DNA
accaccaagcacaagtggg

SEQ ID NO: 14491 - DNA, 19 bp, synthetic construct
  misc_feature 1..19: note = Artificial sequence related to HLA knockouts in cell therapy
  source 1..19: mol_type = other DNA
ccaccaagcacaagtggga

SEQ ID NO: 14492 - DNA, 19 bp, synthetic construct
  misc_feature 1..19: note = Artificial sequence related to HLA knockouts in cell therapy
  source 1..19: mol_type = other DNA
caccaagcacaagtgggag

SEQ ID NO: 14493 - DNA, 19 bp, synthetic construct
  misc_feature 1..19: note = Artificial sequence related to HLA knockouts in cell therapy
  source 1..19: mol_type = other DNA
accaagcacaagtgggagg

SEQ ID NO: 14494 - DNA, 19 bp, synthetic construct
  misc_feature 1..19: note = Artificial sequence related to HLA knockouts in cell therapy
  source 1..19: mol_type = other DNA
catgtggcggagcagttga

SEQ ID NO: 14495 - DNA, 19 bp, synthetic construct
  misc_feature 1..19: note = Artificial sequence related to HLA knockouts in cell therapy
  source 1..19: mol_type = other DNA
atgtggcggagcagttgag

SEQ ID NO: 14496 - DNA, 19 bp, synthetic construct
  misc_feature 1..19: note = Artificial sequence related to HLA knockouts in cell therapy
  source 1..19: mol_type = other DNA
tgtggcggagcagttgaga

SEQ ID NO: 14497 - DNA, 19 bp, synthetic construct
  misc_feature 1..19: note = Artificial sequence related to HLA knockouts in cell therapy
  source 1..19: mol_type = other DNA
cggagcagttgagagccta

SEQ ID NO: 14498 - DNA, 19 bp, synthetic construct
  misc_feature 1..19: note = Artificial sequence related to HLA knockouts in cell therapy
  source 1..19: mol_type = other DNA
ggagcagttgagagcctac

SEQ ID NO: 14499 - DNA, 19 bp, synthetic construct
  misc_feature 1..19: note = Artificial sequence related to HLA knockouts in cell therapy
  source 1..19: mol_type = other DNA
gagcagttgagagcctacc

SEQ ID NO: 14500 - DNA, 19 bp, synthetic construct
  misc_feature 1..19: note = Artificial sequence related to HLA knockouts in cell therapy
  source 1..19: mol_type = other DNA
agcagttgagagcctacct

SEQ ID NO: 14501 - DNA, 19 bp, synthetic construct
  misc_feature 1..19: note = Artificial sequence related to HLA knockouts in cell therapy
  source 1..19: mol_type = other DNA
gcagttgagagcctacctg

SEQ ID NO: 14502 - DNA, 19 bp, synthetic construct
  misc_feature 1..19: note = Artificial sequence related to HLA knockouts in cell therapy
  source 1..19: mol_type = other DNA
cagttgagagcctacctgg

SEQ ID NO: 14503 - DNA, 19 bp, synthetic construct
  misc_feature 1..19: note = Artificial sequence related to HLA knockouts in cell therapy
  source 1..19: mol_type = other DNA
agttgagagcctacctgga

SEQ ID NO: 14504 - DNA, 19 bp, synthetic construct
  misc_feature 1..19: note = Artificial sequence related to HLA knockouts in cell therapy
  source 1..19: mol_type = other DNA
gttgagagcctacctggag

SEQ ID NO: 14505 - DNA, 19 bp, synthetic construct
  misc_feature 1..19: note = Artificial sequence related to HLA knockouts in cell therapy
  source 1..19: mol_type = other DNA
ttgagagcctacctggagg

SEQ ID NO: 14506 - DNA, 19 bp, synthetic construct
  misc_feature 1..19: note = Artificial sequence related to HLA knockouts in cell therapy
  source 1..19: mol_type = other DNA
tggagtggctccgcagata

SEQ ID NO: 14507 - DNA, 19 bp, synthetic construct
  misc_feature 1..19: note = Artificial sequence related to HLA knockouts in cell therapy
  source 1..19: mol_type = other DNA
agtggctccgcagatacct

SEQ ID NO: 14508 - DNA, 19 bp, synthetic construct
  misc_feature 1..19: note = Artificial sequence related to HLA knockouts in cell therapy
  source 1..19: mol_type = other DNA
ctccgcagatacctggaga

SEQ ID NO: 14509 - DNA, 19 bp, synthetic construct
  misc_feature 1..19: note = Artificial sequence related to HLA knockouts in cell therapy
  source 1..19: mol_type = other DNA
tccgcagatacctggagaa

SEQ ID NO: 14510 - DNA, 19 bp, synthetic construct
  misc_feature 1..19: note = Artificial sequence related to HLA knockouts in cell therapy
  source 1..19: mol_type = other DNA
ccgcagatacctggagaac

SEQ ID NO: 14511 - DNA, 19 bp, synthetic construct
  misc_feature 1..19: note = Artificial sequence related to HLA knockouts in cell therapy
  source 1..19: mol_type = other DNA
cgcagatacctggagaacg

SEQ ID NO: 14512 - DNA, 19 bp, synthetic construct
  misc_feature 1..19: note = Artificial sequence related to HLA knockouts in cell therapy
  source 1..19: mol_type = other DNA
gcagatacctggagaacgg

SEQ ID NO: 14513 - DNA, 19 bp, synthetic construct
  misc_feature 1..19: note = Artificial sequence related to HLA knockouts in cell therapy
  source 1..19: mol_type = other DNA
cagatacctggagaacggg

SEQ ID NO: 14514 - DNA, 19 bp, synthetic construct
  misc_feature 1..19: note = Artificial sequence related to HLA knockouts in cell therapy
  source 1..19: mol_type = other DNA
agatacctggagaacggga

SEQ ID NO: 14515 - DNA, 19 bp, synthetic construct
  misc_feature 1..19: note = Artificial sequence related to HLA knockouts in cell therapy
  source 1..19: mol_type = other DNA
gatacctggagaacgggaa

SEQ ID NO: 14516 - DNA, 19 bp, synthetic construct
  misc_feature 1..19: note = Artificial sequence related to HLA knockouts in cell therapy
  source 1..19: mol_type = other DNA
atacctggagaacgggaag

SEQ ID NO: 14517 - DNA, 19 bp, synthetic construct
  misc_feature 1..19: note = Artificial sequence related to HLA knockouts in cell therapy
  source 1..19: mol_type = other DNA
tacctggagaacgggaagg

SEQ ID NO: 14518 - DNA, 19 bp, synthetic construct
  misc_feature 1..19: note = Artificial sequence related to HLA knockouts in cell therapy
  source 1..19: mol_type = other DNA
acctggagaacgggaagga

SEQ ID NO: 14519 - DNA, 19 bp, synthetic construct
  misc_feature 1..19: note = Artificial sequence related to HLA knockouts in cell therapy
  source 1..19: mol_type = other DNA
ctggagaacgggaaggaga

SEQ ID NO: 14520 - DNA, 19 bp, synthetic construct
  misc_feature 1..19: note = Artificial sequence related to HLA knockouts in cell therapy
  source 1..19: mol_type = other DNA
tggagaacgggaaggagac

SEQ ID NO: 14521 - DNA, 19 bp, synthetic construct
  misc_feature 1..19: note = Artificial sequence related to HLA knockouts in cell therapy
  source 1..19: mol_type = other DNA
agaacgggaaggagacgct

SEQ ID NO: 14522 - DNA, 19 bp, synthetic construct
  misc_feature 1..19: note = Artificial sequence related to HLA knockouts in cell therapy
  source 1..19: mol_type = other DNA
aaacgcatatgactcacca

SEQ ID NO: 14523 - DNA, 19 bp, synthetic construct
  misc_feature 1..19: note = Artificial sequence related to HLA knockouts in cell therapy
  source 1..19: mol_type = other DNA
aacgcatatgactcaccac

SEQ ID NO: 14524 - DNA, 19 bp, synthetic construct
  misc_feature 1..19: note = Artificial sequence related to HLA knockouts in cell therapy
  source 1..19: mol_type = other DNA
cgcatatgactcaccacgc

SEQ ID NO: 14525 - DNA, 19 bp, synthetic construct
  misc_feature 1..19: note = Artificial sequence related to HLA knockouts in cell therapy
  source 1..19: mol_type = other DNA
gcatatgactcaccacgct

SEQ ID NO: 14526 - DNA, 19 bp, synthetic construct
  misc_feature 1..19: note = Artificial sequence related to HLA knockouts in cell therapy
  source 1..19: mol_type = other DNA
catatgactcaccacgctg

SEQ ID NO: 14527 - DNA, 19 bp, synthetic construct
  misc_feature 1..19: note = Artificial sequence related to HLA knockouts in cell therapy
  source 1..19: mol_type = other DNA
atatgactcaccacgctgt

SEQ ID NO: 14528 - DNA, 19 bp, synthetic construct
  misc_feature 1..19: note = Artificial sequence related to HLA knockouts in cell therapy
  source 1..19: mol_type = other DNA
tatgactcaccacgctgtc

SEQ ID NO: 14529 - DNA, 19 bp, synthetic construct
  misc_feature 1..19: note = Artificial sequence related to HLA knockouts in cell therapy
  source 1..19: mol_type = other DNA
atgactcaccacgctgtct

SEQ ID NO: 14530 - DNA, 19 bp, synthetic construct
  misc_feature 1..19: note = Artificial sequence related to HLA knockouts in cell therapy
  source 1..19: mol_type = other DNA
tgactcaccacgctgtctc

SEQ ID NO: 14531 - DNA, 19 bp, synthetic construct
  misc_feature 1..19: note = Artificial sequence related to HLA knockouts in cell therapy
  source 1..19: mol_type = other DNA
gactcaccacgctgtctct

SEQ ID NO: 14532 - DNA, 19 bp, synthetic construct
  misc_feature 1..19: note = Artificial sequence related to HLA knockouts in cell therapy
  source 1..19: mol_type = other DNA
actcaccacgctgtctctg

SEQ ID NO: 14533 - DNA, 19 bp, synthetic construct
  misc_feature 1..19: note = Artificial sequence related to HLA knockouts in cell therapy
  source 1..19: mol_type = other DNA
ctcaccacgctgtctctga

SEQ ID NO: 14534 - DNA, 19 bp, synthetic construct
  misc_feature 1..19: note = Artificial sequence related to HLA knockouts in cell therapy
  source 1..19: mol_type = other DNA
tcaccacgctgtctctgac

SEQ ID NO: 14535 - DNA, 19 bp, synthetic construct
  misc_feature 1..19: note = Artificial sequence related to HLA knockouts in cell therapy
  source 1..19: mol_type = other DNA
accacgctgtctctgacca

SEQ ID NO: 14536 - DNA, 19 bp, synthetic construct
  misc_feature 1..19: note = Artificial sequence related to HLA knockouts in cell therapy
  source 1..19: mol_type = other DNA
ccacgctgtctctgaccat

SEQ ID NO: 14537 - DNA, 19 bp, synthetic construct
  misc_feature 1..19: note = Artificial sequence related to HLA knockouts in cell therapy
  source 1..19: mol_type = other DNA
cacgctgtctctgaccatg

SEQ ID NO: 14538 - DNA, 19 bp, synthetic construct
  misc_feature 1..19: note = Artificial sequence related to HLA knockouts in cell therapy
  source 1..19: mol_type = other DNA
acgctgtctctgaccatga

SEQ ID NO: 14539 - DNA, 19 bp, synthetic construct
  misc_feature 1..19: note = Artificial sequence related to HLA knockouts in cell therapy
  source 1..19: mol_type = other DNA
cgctgtctctgaccatgaa

SEQ ID NO: 14540 - DNA, 19 bp, synthetic construct
  misc_feature 1..19: note = Artificial sequence related to HLA knockouts in cell therapy
  source 1..19: mol_type = other DNA
gctgtctctgaccatgaag

SEQ ID NO: 14541 - DNA, 19 bp, synthetic construct
  misc_feature 1..19: note = Artificial sequence related to HLA knockouts in cell therapy
  source 1..19: mol_type = other DNA
ctgtctctgaccatgaagc

SEQ ID NO: 14542 - DNA, 19 bp, synthetic construct
  misc_feature 1..19: note = Artificial sequence related to HLA knockouts in cell therapy
  source 1..19: mol_type = other DNA
tgtctctgaccatgaagcc

SEQ ID NO: 14543 - DNA, 19 bp, synthetic construct
  misc_feature 1..19: note = Artificial sequence related to HLA knockouts in cell therapy
  source 1..19: mol_type = other DNA
gtctctgaccatgaagcca

SEQ ID NO: 14544 - DNA, 19 bp, synthetic construct
  misc_feature 1..19: note = Artificial sequence related to HLA knockouts in cell therapy
  source 1..19: mol_type = other DNA
tctctgaccatgaagccac

SEQ ID NO: 14545 - DNA, 19 bp, synthetic construct
  misc_feature 1..19: note = Artificial sequence related to HLA knockouts in cell therapy
  source 1..19: mol_type = other DNA
ctctgaccatgaagccacc

SEQ ID NO: 14546 - DNA, 19 bp, synthetic construct
  misc_feature 1..19: note = Artificial sequence related to HLA knockouts in cell therapy
  source 1..19: mol_type = other DNA
tctgaccatgaagccaccc

SEQ ID NO: 14547 - DNA, 19 bp, synthetic construct
  misc_feature 1..19: note = Artificial sequence related to HLA knockouts in cell therapy
  source 1..19: mol_type = other DNA
ctgaccatgaagccaccct

SEQ ID NO: 14548 - DNA, 19 bp, synthetic construct
  misc_feature 1..19: note = Artificial sequence related to HLA knockouts in cell therapy
  source 1..19: mol_type = other DNA
tgaccatgaagccaccctg

SEQ ID NO: 14549 - DNA, 19 bp, synthetic construct
  misc_feature 1..19: note = Artificial sequence related to HLA knockouts in cell therapy
  source 1..19: mol_type = other DNA
gaccatgaagccaccctga

SEQ ID NO: 14550 - DNA, 19 bp, synthetic construct
  misc_feature 1..19: note = Artificial sequence related to HLA knockouts in cell therapy
  source 1..19: mol_type = other DNA
accatgaagccaccctgag

SEQ ID NO: 14551 - DNA, 19 bp, synthetic construct
  misc_feature 1..19: note = Artificial sequence related to HLA knockouts in cell therapy
  source 1..19: mol_type = other DNA
catgaagccaccctgaggt

SEQ ID NO: 14552 - DNA, 19 bp, synthetic construct
  misc_feature 1..19: note = Artificial sequence related to HLA knockouts in cell therapy
  source 1..19: mol_type = other DNA
atgaagccaccctgaggtg

SEQ ID NO: 14553 - DNA, 19 bp, synthetic construct
  misc_feature 1..19: note = Artificial sequence related to HLA knockouts in cell therapy
  source 1..19: mol_type = other DNA
tgagcttctaccctgcgga

SEQ ID NO: 14554 - DNA, 19 bp, synthetic construct
  misc_feature 1..19: note = Artificial sequence related to HLA knockouts in cell therapy
  source 1..19: mol_type = other DNA
agcttctaccctgcggaga

SEQ ID NO: 14555 - DNA, 19 bp, synthetic construct
  misc_feature 1..19: note = Artificial sequence related to HLA knockouts in cell therapy
  source 1..19: mol_type = other DNA
gcttctaccctgcggagat

SEQ ID NO: 14556 - DNA, 19 bp, synthetic construct
  misc_feature 1..19: note = Artificial sequence related to HLA knockouts in cell therapy
  source 1..19: mol_type = other DNA
cttctaccctgcggagatc

SEQ ID NO: 14557 - DNA, 19 bp, synthetic construct
  misc_feature 1..19: note = Artificial sequence related to HLA knockouts in cell therapy
  source 1..19: mol_type = other DNA
ttctaccctgcggagatca

SEQ ID NO: 14558 - DNA, 19 bp, synthetic construct
  misc_feature 1..19: note = Artificial sequence related to HLA knockouts in cell therapy
  source 1..19: mol_type = other DNA
tctaccctgcggagatcac

SEQ ID NO: 14559 - DNA, 19 bp, synthetic construct
  misc_feature 1..19: note = Artificial sequence related to HLA knockouts in cell therapy
  source 1..19: mol_type = other DNA
ctaccctgcggagatcaca

SEQ ID NO: 14560 - DNA, 19 bp, synthetic construct
  misc_feature 1..19: note = Artificial sequence related to HLA knockouts in cell therapy
  source 1..19: mol_type = other DNA
taccctgcggagatcacac

SEQ ID NO: 14561 - DNA, 19 bp, synthetic construct
  misc_feature 1..19: note = Artificial sequence related to HLA knockouts in cell therapy
  source 1..19: mol_type = other DNA
accctgcggagatcacact

SEQ ID NO: 14562 - DNA, 19 bp, synthetic construct
  misc_feature 1..19: note = Artificial sequence related to HLA knockouts in cell therapy
  source 1..19: mol_type = other DNA
cctgcggagatcacactga

SEQ ID NO: 14563 - DNA, 19 bp, synthetic construct
  misc_feature 1..19: note = Artificial sequence related to HLA knockouts in cell therapy
  source 1..19: mol_type = other DNA
ctgcggagatcacactgac

SEQ ID NO: 14564 - DNA, 19 bp, synthetic construct
  misc_feature 1..19: note = Artificial sequence related to HLA knockouts in cell therapy
  source 1..19: mol_type = other DNA
tgcggagatcacactgacc

SEQ ID NO: 14565 - DNA, 19 bp, synthetic construct
  misc_feature 1..19: note = Artificial sequence related to HLA knockouts in cell therapy
  source 1..19: mol_type = other DNA
gcggagatcacactgacct

SEQ ID NO: 14566 - DNA, 19 bp, synthetic construct
  misc_feature 1..19: note = Artificial sequence related to HLA knockouts in cell therapy
  source 1..19: mol_type = other DNA
cggagatcacactgacctg

SEQ ID NO: 14567 - DNA, 19 bp, synthetic construct
  misc_feature 1..19: note = Artificial sequence related to HLA knockouts in cell therapy
  source 1..19: mol_type = other DNA
ggagatcacactgacctgg

SEQ ID NO: 14568 - DNA, 19 bp, synthetic construct
  misc_feature 1..19: note = Artificial sequence related to HLA knockouts in cell therapy
  source 1..19: mol_type = other DNA
gagatcacactgacctggc

SEQ ID NO: 14569 - DNA, 19 bp, synthetic construct
  misc_feature 1..19: note = Artificial sequence related to HLA knockouts in cell therapy
  source 1..19: mol_type = other DNA
agatcacactgacctggca

SEQ ID NO: 14570 - DNA, 19 bp, synthetic construct
  misc_feature 1..19: note = Artificial sequence related to HLA knockouts in cell therapy
  source 1..19: mol_type = other DNA
gatcacactgacctggcag

SEQ ID NO: 14571 - DNA, 19 bp, synthetic construct
  misc_feature 1..19: note = Artificial sequence related to HLA knockouts in cell therapy
  source 1..19: mol_type = other DNA
atcacactgacctggcagc

SEQ ID NO: 14572 - DNA, 19 bp, synthetic construct
  misc_feature 1..19: note = Artificial sequence related to HLA knockouts in cell therapy
  source 1..19: mol_type = other DNA
gggatggaaccttccagaa

SEQ ID NO: 14573 - DNA, 19 bp, synthetic construct
  misc_feature 1..19: note = Artificial sequence related to HLA knockouts in cell therapy
  source 1..19: mol_type = other DNA
ggatggaaccttccagaag

SEQ ID NO: 14574 - DNA, 19 bp, synthetic construct
  misc_feature 1..19: note = Artificial sequence related to HLA knockouts in cell therapy
  source 1..19: mol_type = other DNA
gatggaaccttccagaagt

SEQ ID NO: 14575 - DNA, 19 bp, synthetic construct
  misc_feature 1..19: note = Artificial sequence related to HLA knockouts in cell therapy
  source 1..19: mol_type = other DNA
atggaaccttccagaagtg

SEQ ID NO: 14576 - DNA, 19 bp, synthetic construct
  misc_feature 1..19: note = Artificial sequence related to HLA knockouts in cell therapy
  source 1..19: mol_type = other DNA
tggaaccttccagaagtgg

SEQ ID NO: 14577 - DNA, 19 bp, synthetic construct
  misc_feature 1..19: note = Artificial sequence related to HLA knockouts in cell therapy
  source 1..19: mol_type = other DNA
ggaaccttccagaagtggg

SEQ ID NO: 14578 - DNA, 19 bp, synthetic construct
  misc_feature 1..19: note = Artificial sequence related to HLA knockouts in cell therapy
  source 1..19: mol_type = other DNA
gaaccttccagaagtgggc

SEQ ID NO: 14579 - DNA, 19 bp, synthetic construct
  misc_feature 1..19: note = Artificial sequence related to HLA knockouts in cell therapy
  source 1..19: mol_type = other DNA
aaccttccagaagtgggcg

SEQ ID NO: 14580 - DNA, 19 bp, synthetic construct
  misc_feature 1..19: note = Artificial sequence related to HLA knockouts in cell therapy
  source 1..19: mol_type = other DNA
tgtggtggtgccttctgga

SEQ ID NO: 14581 - DNA, 19 bp, synthetic construct
  misc_feature 1..19: note = Artificial sequence related to HLA knockouts in cell therapy
  source 1..19: mol_type = other DNA
tggtggtgccttctggaca

SEQ ID NO: 14582 - DNA, 19 bp, synthetic construct
  misc_feature 1..19: note = Artificial sequence related to HLA knockouts in cell therapy
  source 1..19: mol_type = other DNA
tggtgccttctggacagga

SEQ ID NO: 14583 - DNA, 19 bp, synthetic construct
  misc_feature 1..19: note = Artificial sequence related to HLA knockouts in cell therapy
  source 1..19: mol_type = other DNA
tgccttctggacaggagca

SEQ ID NO: 14584 - DNA, 19 bp, synthetic construct
  misc_feature 1..19: note = Artificial sequence related to HLA knockouts in cell therapy
  source 1..19: mol_type = other DNA
ccttctggacaggagcaga

SEQ ID NO: 14585 - DNA, 19 bp, synthetic construct
  misc_feature 1..19: note = Artificial sequence related to HLA knockouts in cell therapy
  source 1..19: mol_type = other DNA
cttctggacaggagcagag

SEQ ID NO: 14586 - DNA, 19 bp, synthetic construct
  misc_feature 1..19: note = Artificial sequence related to HLA knockouts in cell therapy
  source 1..19: mol_type = other DNA
ttctggacaggagcagaga

SEQ ID NO: 14587 - DNA, 19 bp, synthetic construct
  misc_feature 1..19: note = Artificial sequence related to HLA knockouts in cell therapy
  source 1..19: mol_type = other DNA
tctggacaggagcagagat

SEQ ID NO: 14588 - DNA, 19 bp, synthetic construct
  misc_feature 1..19: note = Artificial sequence related to HLA knockouts in cell therapy
  source 1..19: mol_type = other DNA
ctggacaggagcagagata

SEQ ID NO: 14589 - DNA, 19 bp, synthetic construct
  misc_feature 1..19: note = Artificial sequence related to HLA knockouts in cell therapy
  source 1..19: mol_type = other DNA
tggacaggagcagagatac

SEQ ID NO: 14590 - DNA, 19 bp, synthetic construct
  misc_feature 1..19: note = Artificial sequence related to HLA knockouts in cell therapy
  source 1..19: mol_type = other DNA
ggacaggagcagagataca

SEQ ID NO: 14591 - DNA, 19 bp, synthetic construct
  misc_feature 1..19: note = Artificial sequence related to HLA knockouts in cell therapy
  source 1..19: mol_type = other DNA
gacaggagcagagatacac

SEQ ID NO: 14592 - DNA, 19 bp, synthetic construct
  misc_feature 1..19: note = Artificial sequence related to HLA knockouts in cell therapy
  source 1..19: mol_type = other DNA
acaggagcagagatacacc

SEQ ID NO: 14593 - DNA, 19 bp, synthetic construct
  misc_feature 1..19: note = Artificial sequence related to HLA knockouts in cell therapy
  source 1..19: mol_type = other DNA
caggagcagagatacacct

SEQ ID NO: 14594 - DNA, 19 bp, synthetic construct
  misc_feature 1..19: note = Artificial sequence related to HLA knockouts in cell therapy
  source 1..19: mol_type = other DNA
aggagcagagatacacctg

SEQ ID NO: 14595 - DNA, 19 bp, synthetic construct
  misc_feature 1..19: note = Artificial sequence related to HLA knockouts in cell therapy
  source 1..19: mol_type = other DNA
ggagcagagatacacctgc

SEQ ID NO: 14596 - DNA, 19 bp, synthetic construct
  misc_feature 1..19: note = Artificial sequence related to HLA knockouts in cell therapy
  source 1..19: mol_type = other DNA
gagcagagatacacctgcc

SEQ ID NO: 14597 - DNA, 19 bp, synthetic construct
  misc_feature 1..19: note = Artificial sequence related to HLA knockouts in cell therapy
  source 1..19: mol_type = other DNA
agcagagatacacctgcca

SEQ ID NO: 14598 - DNA, 19 bp, synthetic construct
  misc_feature 1..19: note = Artificial sequence related to HLA knockouts in cell therapy
  source 1..19: mol_type = other DNA
gcagagatacacctgccat

SEQ ID NO: 14599 - DNA, 19 bp, synthetic construct
  misc_feature 1..19: note = Artificial sequence related to HLA knockouts in cell therapy
  source 1..19: mol_type = other DNA
cagagatacacctgccatg

SEQ ID NO: 14600 - DNA, 19 bp, synthetic construct
  misc_feature 1..19: note = Artificial sequence related to HLA knockouts in cell therapy
  source 1..19: mol_type = other DNA
agagatacacctgccatgt

SEQ ID NO: 14601 - DNA, 19 bp, synthetic construct
  misc_feature 1..19: note = Artificial sequence related to HLA knockouts in cell therapy
  source 1..19: mol_type = other DNA
gagatacacctgccatgtg

SEQ ID NO: 14602 - DNA, 19 bp, synthetic construct
  misc_feature 1..19: note = Artificial sequence related to HLA knockouts in cell therapy
  source 1..19: mol_type = other DNA
agatacacctgccatgtgc

SEQ ID NO: 14603 - DNA, 19 bp, synthetic construct
  misc_feature 1..19: note = Artificial sequence related to HLA knockouts in cell therapy
  source 1..19: mol_type = other DNA
gatacacctgccatgtgca

SEQ ID NO: 14604 - DNA, 19 bp, synthetic construct
  misc_feature 1..19: note = Artificial sequence related to HLA knockouts in cell therapy
  source 1..19: mol_type = other DNA
atacacctgccatgtgcag

SEQ ID NO: 14605 - DNA, 19 bp, synthetic construct
  misc_feature 1..19: note = Artificial sequence related to HLA knockouts in cell therapy
  source 1..19: mol_type = other DNA
tacacctgccatgtgcagc

SEQ ID NO: 14606 - DNA, 19 bp, synthetic construct
  misc_feature 1..19: note = Artificial sequence related to HLA knockouts in cell therapy
  source 1..19: mol_type = other DNA
acacctgccatgtgcagca

SEQ ID NO: 14607 - DNA, 19 bp, synthetic construct
  misc_feature 1..19: note = Artificial sequence related to HLA knockouts in cell therapy
  source 1..19: mol_type = other DNA
cacctgccatgtgcagcat

SEQ ID NO: 14608 - DNA, 19 bp, synthetic construct
  misc_feature 1..19: note = Artificial sequence related to HLA knockouts in cell therapy
  source 1..19: mol_type = other DNA
acctgccatgtgcagcatg

SEQ ID NO: 14609 - DNA, 19 bp, synthetic construct
  misc_feature 1..19: note = Artificial sequence related to HLA knockouts in cell therapy
  source 1..19: mol_type = other DNA
cctgccatgtgcagcatga

SEQ ID NO: 14610 - DNA, 19 bp, synthetic construct
  misc_feature 1..19: note = Artificial sequence related to HLA knockouts in cell therapy
  source 1..19: mol_type = other DNA
ctgccatgtgcagcatgag

SEQ ID NO: 14611 - DNA, 19 bp, synthetic construct
  misc_feature 1..19: note = Artificial sequence related to HLA knockouts in cell therapy
  source 1..19: mol_type = other DNA
tgccatgtgcagcatgagg

SEQ ID NO: 14612 - DNA, 19 bp, synthetic construct
  misc_feature 1..19: note = Artificial sequence related to HLA knockouts in cell therapy
  source 1..19: mol_type = other DNA
ccatgtgcagcatgagggt

SEQ ID NO: 14613 - DNA, 19 bp, synthetic construct
  misc_feature 1..19: note = Artificial sequence related to HLA knockouts in cell therapy
  source 1..19: mol_type = other DNA
catgtgcagcatgagggtt

SEQ ID NO: 14614 - DNA, 19 bp, synthetic construct
  misc_feature 1..19: note = Artificial sequence related to HLA knockouts in cell therapy
  source 1..19: mol_type = other DNA
atgtgcagcatgagggttt

SEQ ID NO: 14615 - DNA, 19 bp, synthetic construct
  misc_feature 1..19: note = Artificial sequence related to HLA knockouts in cell therapy
  source 1..19: mol_type = other DNA
tgtgcagcatgagggtttg

SEQ ID NO: 14616 - DNA, 19 bp, synthetic construct
  misc_feature 1..19: note = Artificial sequence related to HLA knockouts in cell therapy
  source 1..19: mol_type = other DNA
gtgcagcatgagggtttgc

SEQ ID NO: 14617 - DNA, 19 bp, synthetic construct
  misc_feature 1..19: note = Artificial sequence related to HLA knockouts in cell therapy
  source 1..19: mol_type = other DNA
tgcagcatgagggtttgcc

SEQ ID NO: 14618 - DNA, 19 bp, synthetic construct
  misc_feature 1..19: note = Artificial sequence related to HLA knockouts in cell therapy
  source 1..19: mol_type = other DNA
cagcatgagggtttgccca

SEQ ID NO: 14619 - DNA, 19 bp, synthetic construct
  misc_feature 1..19: note = Artificial sequence related to HLA knockouts in cell therapy
  source 1..19: mol_type = other DNA
agcatgagggtttgcccaa

SEQ ID NO: 14620 - DNA, 19 bp, synthetic construct
  misc_feature 1..19: note = Artificial sequence related to HLA knockouts in cell therapy
  source 1..19: mol_type = other DNA
gcatgagggtttgcccaag

SEQ ID NO: 14621 - DNA, 19 bp, synthetic construct
  misc_feature 1..19: note = Artificial sequence related to HLA knockouts in cell therapy
  source 1..19: mol_type = other DNA
catgagggtttgcccaagc

SEQ ID NO: 14622 - DNA, 19 bp, synthetic construct
  misc_feature 1..19: note = Artificial sequence related to HLA knockouts in cell therapy
  source 1..19: mol_type = other DNA
atgagggtttgcccaagcc

SEQ ID NO: 14623 - DNA, 19 bp, synthetic construct
  misc_feature 1..19: note = Artificial sequence related to HLA knockouts in cell therapy
  source 1..19: mol_type = other DNA
ctgagatgggagccgtctt

SEQ ID NO: 14624 - DNA, 19 bp, synthetic construct
  misc_feature 1..19: note = Artificial sequence related to HLA knockouts in cell therapy
  source 1..19: mol_type = other DNA
tgagatgggagccgtcttc

SEQ ID NO: 14625 - DNA, 19 bp, synthetic construct
  misc_feature 1..19: note = Artificial sequence related to HLA knockouts in cell therapy
  source 1..19: mol_type = other DNA
cccatcgtgggcatcattg

SEQ ID NO: 14626 - DNA, 19 bp, synthetic construct
  misc_feature 1..19: note = Artificial sequence related to HLA knockouts in cell therapy
  source 1..19: mol_type = other DNA
ccatcgtgggcatcattgc

SEQ ID NO: 14627 - DNA, 19 bp, synthetic construct
  misc_feature 1..19: note = Artificial sequence related to HLA knockouts in cell therapy
  source 1..19: mol_type = other DNA
catcgtgggcatcattgct

SEQ ID NO: 14628 - DNA, 19 bp, synthetic construct
  misc_feature 1..19: note = Artificial sequence related to HLA knockouts in cell therapy
  source 1..19: mol_type = other DNA
atcgtgggcatcattgctg

SEQ ID NO: 14629 - DNA, 19 bp, synthetic construct
  misc_feature 1..19: note = Artificial sequence related to HLA knockouts in cell therapy
  source 1..19: mol_type = other DNA
tcgtgggcatcattgctgg

SEQ ID NO: 14630 - DNA, 19 bp, synthetic construct
  misc_feature 1..19: note = Artificial sequence related to HLA knockouts in cell therapy
  source 1..19: mol_type = other DNA
tgggcatcattgctggcct

SEQ ID NO: 14631 - DNA, 19 bp, synthetic construct
  misc_feature 1..19: note = Artificial sequence related to HLA knockouts in cell therapy
  source 1..19: mol_type = other DNA
gcatcattgctggcctggt

SEQ ID NO: 14632 - DNA, 19 bp, synthetic construct
  misc_feature 1..19: note = Artificial sequence related to HLA knockouts in cell therapy
  source 1..19: mol_type = other DNA
catcattgctggcctggtt

SEQ ID NO: 14633 - DNA, 19 bp, synthetic construct
  misc_feature 1..19: note = Artificial sequence related to HLA knockouts in cell therapy
  source 1..19: mol_type = other DNA
atcattgctggcctggttc

SEQ ID NO: 14634 - DNA, 19 bp, synthetic construct
  misc_feature 1..19: note = Artificial sequence related to HLA knockouts in cell therapy
  source 1..19: mol_type = other DNA
tcattgctggcctggttct

SEQ ID NO: 14635 - DNA, 19 bp, synthetic construct
  misc_feature 1..19: note = Artificial sequence related to HLA knockouts in cell therapy
  source 1..19: mol_type = other DNA
cattgctggcctggttctc

SEQ ID NO: 14636 - DNA, 19 bp, synthetic construct
  misc_feature 1..19: note = Artificial sequence related to HLA knockouts in cell therapy
  source 1..19: mol_type = other DNA
attgctggcctggttctct

SEQ ID NO: 14637 - DNA, 19 bp, synthetic construct
  misc_feature 1..19: note = Artificial sequence related to HLA knockouts in cell therapy
  source 1..19: mol_type = other DNA
ttgctggcctggttctctt

SEQ ID NO: 14638 - DNA, 19 bp, synthetic construct
  misc_feature 1..19: note = Artificial sequence related to HLA knockouts in cell therapy
  source 1..19: mol_type = other DNA
tgctggcctggttctcttt

SEQ ID NO: 14639 - DNA, 19 bp, synthetic construct
  misc_feature 1..19: note = Artificial sequence related to HLA knockouts in cell therapy
  source 1..19: mol_type = other DNA
gctggcctggttctctttg

SEQ ID NO: 14640 - DNA, 19 bp, synthetic construct
  misc_feature 1..19: note = Artificial sequence related to HLA knockouts in cell therapy
  source 1..19: mol_type = other DNA
ctggcctggttctctttgg

SEQ ID NO: 14641 - DNA, 19 bp, synthetic construct
  misc_feature 1..19: note = Artificial sequence related to HLA knockouts in cell therapy
  source 1..19: mol_type = other DNA
tggcctggttctctttgga

SEQ ID NO: 14642 - DNA, 19 bp, synthetic construct
  misc_feature 1..19: note = Artificial sequence related to HLA knockouts in cell therapy
  source 1..19: mol_type = other DNA
ggcctggttctctttggag

SEQ ID NO: 14643 - DNA, 19 bp, synthetic construct
  misc_feature 1..19: note = Artificial sequence related to HLA knockouts in cell therapy
  source 1..19: mol_type = other DNA
gcctggttctctttggagc

SEQ ID NO: 14644 - DNA, 19 bp, synthetic construct
  misc_feature 1..19: note = Artificial sequence related to HLA knockouts in cell therapy
  source 1..19: mol_type = other DNA
cctggttctctttggagct

SEQ ID NO: 14645 - DNA, 19 bp, synthetic construct
  misc_feature 1..19: note = Artificial sequence related to HLA knockouts in cell therapy
  source 1..19: mol_type = other DNA
ctggttctctttggagctg

SEQ ID NO: 14646 - DNA, 19 bp, synthetic construct
  misc_feature 1..19: note = Artificial sequence related to HLA knockouts in cell therapy
  source 1..19: mol_type = other DNA
tggttctctttggagctgt

SEQ ID NO: 14647 - DNA, 19 bp, synthetic construct
  misc_feature 1..19: note = Artificial sequence related to HLA knockouts in cell therapy
  source 1..19: mol_type = other DNA
ggttctctttggagctgtg

SEQ ID NO: 14648 - DNA, 19 bp, synthetic construct
  misc_feature 1..19: note = Artificial sequence related to HLA knockouts in cell therapy
  source 1..19: mol_type = other DNA
gttctctttggagctgtga

SEQ ID NO: 14649 - DNA, 19 bp, synthetic construct
  misc_feature 1..19: note = Artificial sequence related to HLA knockouts in cell therapy
  source 1..19: mol_type = other DNA
ttctctttggagctgtgat

SEQ ID NO: 14650 - DNA, 19 bp, synthetic construct
  misc_feature 1..19: note = Artificial sequence related to HLA knockouts in cell therapy
  source 1..19: mol_type = other DNA
tctctttggagctgtgatc

SEQ ID NO: 14651 - DNA, 19 bp, synthetic construct
  misc_feature 1..19: note = Artificial sequence related to HLA knockouts in cell therapy
  source 1..19: mol_type = other DNA
ctctttggagctgtgatca

SEQ ID NO: 14652 - DNA, 19 bp, synthetic construct
  misc_feature 1..19: note = Artificial sequence related to HLA knockouts in cell therapy
  source 1..19: mol_type = other DNA
tctttggagctgtgatcac

SEQ ID NO: 14653 - DNA, 19 bp, synthetic construct
  misc_feature 1..19: note = Artificial sequence related to HLA knockouts in cell therapy
  source 1..19: mol_type = other DNA
ctttggagctgtgatcact

SEQ ID NO: 14654 - DNA, 19 bp, synthetic construct
  misc_feature 1..19: note = Artificial sequence related to HLA knockouts in cell therapy
  source 1..19: mol_type = other DNA
tttggagctgtgatcactg

SEQ ID NO: 14655 - DNA, 19 bp, synthetic construct
  misc_feature 1..19: note = Artificial sequence related to HLA knockouts in cell therapy
  source 1..19: mol_type = other DNA
ttggagctgtgatcactgg

SEQ ID NO: 14656 - DNA, 19 bp, synthetic construct
  misc_feature 1..19: note = Artificial sequence related to HLA knockouts in cell therapy
  source 1..19: mol_type = other DNA
tggagctgtgatcactgga

SEQ ID NO: 14657 - DNA, 19 bp, synthetic construct
  misc_feature 1..19: note = Artificial sequence related to HLA knockouts in cell therapy
  source 1..19: mol_type = other DNA
ggagctgtgatcactggag

SEQ ID NO: 14658 - DNA, 19 bp, synthetic construct
  misc_feature 1..19: note = Artificial sequence related to HLA knockouts in cell therapy
  source 1..19: mol_type = other DNA
gagctgtgatcactggagc

SEQ ID NO: 14659 - DNA, 19 bp, synthetic construct
  misc_feature 1..19: note = Artificial sequence related to HLA knockouts in cell therapy
  source 1..19: mol_type = other DNA
agctgtgatcactggagct

SEQ ID NO: 14660 - DNA, 19 bp, synthetic construct
  misc_feature 1..19: note = Artificial sequence related to HLA knockouts in cell therapy
  source 1..19: mol_type = other DNA
gctgtgatcactggagctg

SEQ ID NO: 14661 - DNA, 19 bp, synthetic construct
  misc_feature 1..19: note = Artificial sequence related to HLA knockouts in cell therapy
  source 1..19: mol_type = other DNA
ctgtgatcactggagctgt

SEQ ID NO: 14662 - DNA, 19 bp, synthetic construct
  misc_feature 1..19: note = Artificial sequence related to HLA knockouts in cell therapy
  source 1..19: mol_type = other DNA
tgtgatcactggagctgtg

SEQ ID NO: 14663 - DNA, 19 bp, synthetic construct
  misc_feature 1..19: note = Artificial sequence related to HLA knockouts in cell therapy
  source 1..19: mol_type = other DNA
gtgatcactggagctgtgg

SEQ ID NO: 14664 - DNA, 19 bp, synthetic construct
  misc_feature 1..19: note = Artificial sequence related to HLA knockouts in cell therapy
  source 1..19: mol_type = other DNA
tgatcactggagctgtggt

SEQ ID NO: 14665 - DNA, 19 bp, synthetic construct
  misc_feature 1..19: note = Artificial sequence related to HLA knockouts in cell therapy
  source 1..19: mol_type = other DNA
gatcactggagctgtggtc

SEQ ID NO: 14666 - DNA, 19 bp, synthetic construct
  misc_feature 1..19: note = Artificial sequence related to HLA knockouts in cell therapy
  source 1..19: mol_type = other DNA
atcactggagctgtggtcg

SEQ ID NO: 14667 - DNA, 19 bp, synthetic construct
  misc_feature 1..19: note = Artificial sequence related to HLA knockouts in cell therapy
  source 1..19: mol_type = other DNA
ctgtggtcgctgctgtgat

SEQ ID NO: 14668 - DNA, 19 bp, synthetic construct
  misc_feature 1..19: note = Artificial sequence related to HLA knockouts in cell therapy
  source 1..19: mol_type = other DNA
tgtggtcgctgctgtgatg

SEQ ID NO: 14669 - DNA, 19 bp, synthetic construct
  misc_feature 1..19: note = Artificial sequence related to HLA knockouts in cell therapy
  source 1..19: mol_type = other DNA
gtggtcgctgctgtgatgt

SEQ ID NO: 14670 - DNA, 19 bp, synthetic construct
  misc_feature 1..19: note = Artificial sequence related to HLA knockouts in cell therapy
  source 1..19: mol_type = other DNA
tggtcgctgctgtgatgtg

SEQ ID NO: 14671 - DNA, 19 bp, synthetic construct
  misc_feature 1..19: note = Artificial sequence related to HLA knockouts in cell therapy
  source 1..19: mol_type = other DNA
gtcgctgctgtgatgtgga

SEQ ID NO: 14672 - DNA, 19 bp, synthetic construct
  misc_feature 1..19: note = Artificial sequence related to HLA knockouts in cell therapy
  source 1..19: mol_type = other DNA
tcgctgctgtgatgtggag

SEQ ID NO: 14673 - DNA, 19 bp, synthetic construct
  misc_feature 1..19: note = Artificial sequence related to HLA knockouts in cell therapy
  source 1..19: mol_type = other DNA
gctgctgtgatgtggagga

SEQ ID NO: 14674 - DNA, 19 bp, synthetic construct
  misc_feature 1..19: note = Artificial sequence related to HLA knockouts in cell therapy
  source 1..19: mol_type = other DNA
ctgctgtgatgtggaggag

SEQ ID NO: 14675 - DNA, 19 bp, synthetic construct
  misc_feature 1..19: note = Artificial sequence related to HLA knockouts in cell therapy
  source 1..19: mol_type = other DNA
tgctgtgatgtggaggagg

SEQ ID NO: 14676 - DNA, 19 bp, synthetic construct
  misc_feature 1..19: note = Artificial sequence related to HLA knockouts in cell therapy
  source 1..19: mol_type = other DNA
gctgtgatgtggaggagga

SEQ ID NO: 14677 - DNA, 19 bp, synthetic construct
  misc_feature 1..19: note = Artificial sequence related to HLA knockouts in cell therapy
  source 1..19: mol_type = other DNA
ctgtgatgtggaggaggaa

SEQ ID NO: 14678 - DNA, 19 bp, synthetic construct
  misc_feature 1..19: note = Artificial sequence related to HLA knockouts in cell therapy
  source 1..19: mol_type = other DNA
tgtgatgtggaggaggaag

SEQ ID NO: 14679 - DNA, 19 bp, synthetic construct
  misc_feature 1..19: note = Artificial sequence related to HLA knockouts in cell therapy
  source 1..19: mol_type = other DNA
gtgatgtggaggaggaaga

SEQ ID NO: 14680 - DNA, 19 bp, synthetic construct
  misc_feature 1..19: note = Artificial sequence related to HLA knockouts in cell therapy
  source 1..19: mol_type = other DNA
tgatgtggaggaggaagag

SEQ ID NO: 14681 - DNA, 19 bp, synthetic construct
  misc_feature 1..19: note = Artificial sequence related to HLA knockouts in cell therapy
  source 1..19: mol_type = other DNA
gatgtggaggaggaagagc

SEQ ID NO: 14682 - DNA, 19 bp, synthetic construct
  misc_feature 1..19: note = Artificial sequence related to HLA knockouts in cell therapy
  source 1..19: mol_type = other DNA
atgtggaggaggaagagct

SEQ ID NO: 14683 - DNA, 19 bp, synthetic construct
  misc_feature 1..19: note = Artificial sequence related to HLA knockouts in cell therapy
  source 1..19: mol_type = other DNA
tgtggaggaggaagagctc

SEQ ID NO: 14684 - DNA, 19 bp, synthetic construct
  misc_feature 1..19: note = Artificial sequence related to HLA knockouts in cell therapy
  source 1..19: mol_type = other DNA
gtggaggaggaagagctca

SEQ ID NO: 14685 - DNA, 19 bp, synthetic construct
  misc_feature 1..19: note = Artificial sequence related to HLA knockouts in cell therapy
  source 1..19: mol_type = other DNA
tggaggaggaagagctcag

SEQ ID NO: 14686 - DNA, 19 bp, synthetic construct
  misc_feature 1..19: note = Artificial sequence related to HLA knockouts in cell therapy
  source 1..19: mol_type = other DNA
ggaggaggaagagctcaga

SEQ ID NO: 14687 - DNA, 19 bp, synthetic construct
  misc_feature 1..19: note = Artificial sequence related to HLA knockouts in cell therapy
  source 1..19: mol_type = other DNA
gaggaggaagagctcagat

SEQ ID NO: 14688 - DNA, 19 bp, synthetic construct
  misc_feature 1..19: note = Artificial sequence related to HLA knockouts in cell therapy
  source 1..19: mol_type = other DNA
aggaggaagagctcagata

SEQ ID NO: 14689 - DNA, 19 bp, synthetic construct
  misc_feature 1..19: note = Artificial sequence related to HLA knockouts in cell therapy
  source 1..19: mol_type = other DNA
ggaggaagagctcagatag

SEQ ID NO: 14690 - DNA, 19 bp, synthetic construct
  misc_feature 1..19: note = Artificial sequence related to HLA knockouts in cell therapy
  source 1..19: mol_type = other DNA
gaggaagagctcagataga

SEQ ID NO: 14691 - DNA, 19 bp, synthetic construct
  misc_feature 1..19: note = Artificial sequence related to HLA knockouts in cell therapy
  source 1..19: mol_type = other DNA
aggaagagctcagatagaa

SEQ ID NO: 14692 - DNA, 19 bp, synthetic construct
  misc_feature 1..19: note = Artificial sequence related to HLA knockouts in cell therapy
  source 1..19: mol_type = other DNA
aaaggagggagctactctc

SEQ ID NO: 14693 - DNA, 19 bp, synthetic construct
  misc_feature 1..19: note = Artificial sequence related to HLA knockouts in cell therapy
  source 1..19: mol_type = other DNA
aaggagggagctactctca

SEQ ID NO: 14694 - DNA, 19 bp, synthetic construct
  misc_feature 1..19: note = Artificial sequence related to HLA knockouts in cell therapy
  source 1..19: mol_type = other DNA
aggagggagctactctcag

SEQ ID NO: 14695 - DNA, 19 bp, synthetic construct
  misc_feature 1..19: note = Artificial sequence related to HLA knockouts in cell therapy
  source 1..19: mol_type = other DNA
agggagctactctcaggct

SEQ ID NO: 14696 - DNA, 19 bp, synthetic construct
  misc_feature 1..19: note = Artificial sequence related to HLA knockouts in cell therapy
  source 1..19: mol_type = other DNA
gagctactctcaggctgca

SEQ ID NO: 14697 - DNA, 19 bp, synthetic construct
  misc_feature 1..19: note = Artificial sequence related to HLA knockouts in cell therapy
  source 1..19: mol_type = other DNA
agctactctcaggctgcaa

SEQ ID NO: 14698 - DNA, 19 bp, synthetic construct
  misc_feature 1..19: note = Artificial sequence related to HLA knockouts in cell therapy
  source 1..19: mol_type = other DNA
gctactctcaggctgcaag

SEQ ID NO: 14699 - DNA, 19 bp, synthetic construct
  misc_feature 1..19: note = Artificial sequence related to HLA knockouts in cell therapy
  source 1..19: mol_type = other DNA
ctactctcaggctgcaagc

SEQ ID NO: 14700 - DNA, 19 bp, synthetic construct
  misc_feature 1..19: note = Artificial sequence related to HLA knockouts in cell therapy
  source 1..19: mol_type = other DNA
tactctcaggctgcaagca

SEQ ID NO: 14701 - DNA, 19 bp, synthetic construct
  misc_feature 1..19: note = Artificial sequence related to HLA knockouts in cell therapy
  source 1..19: mol_type = other DNA
actctcaggctgcaagcag

SEQ ID NO: 14702 - DNA, 19 bp, synthetic construct
  misc_feature 1..19: note = Artificial sequence related to HLA knockouts in cell therapy
  source 1..19: mol_type = other DNA
ctctcaggctgcaagcagt

SEQ ID NO: 14703 - DNA, 19 bp, synthetic construct
  misc_feature 1..19: note = Artificial sequence related to HLA knockouts in cell therapy
  source 1..19: mol_type = other DNA
tctcaggctgcaagcagtg

SEQ ID NO: 14704 - DNA, 19 bp, synthetic construct
  misc_feature 1..19: note = Artificial sequence related to HLA knockouts in cell therapy
  source 1..19: mol_type = other DNA
ctcaggctgcaagcagtga

SEQ ID NO: 14705 - DNA, 19 bp, synthetic construct
  misc_feature 1..19: note = Artificial sequence related to HLA knockouts in cell therapy
  source 1..19: mol_type = other DNA
tcaggctgcaagcagtgac

SEQ ID NO: 14706 - DNA, 19 bp, synthetic construct
  misc_feature 1..19: note = Artificial sequence related to HLA knockouts in cell therapy
  source 1..19: mol_type = other DNA
caggctgcaagcagtgaca

SEQ ID NO: 14707 - DNA, 19 bp, synthetic construct
  misc_feature 1..19: note = Artificial sequence related to HLA knockouts in cell therapy
  source 1..19: mol_type = other DNA
aggctgcaagcagtgacag

SEQ ID NO: 14708 - DNA, 19 bp, synthetic construct
  misc_feature 1..19: note = Artificial sequence related to HLA knockouts in cell therapy
  source 1..19: mol_type = other DNA
ggctgcaagcagtgacagt

SEQ ID NO: 14709 - DNA, 19 bp, synthetic construct
  misc_feature 1..19: note = Artificial sequence related to HLA knockouts in cell therapy
  source 1..19: mol_type = other DNA
gctgcaagcagtgacagtg

SEQ ID NO: 14710 - DNA, 19 bp, synthetic construct
  misc_feature 1..19: note = Artificial sequence related to HLA knockouts in cell therapy
  source 1..19: mol_type = other DNA
ctgcaagcagtgacagtgc

SEQ ID NO: 14711 - DNA, 19 bp, synthetic construct
  misc_feature 1..19: note = Artificial sequence related to HLA knockouts in cell therapy
  source 1..19: mol_type = other DNA
tgcaagcagtgacagtgcc

SEQ ID NO: 14712 - DNA, 19 bp, synthetic construct
  misc_feature 1..19: note = Artificial sequence related to HLA knockouts in cell therapy
  source 1..19: mol_type = other DNA
caagcagtgacagtgccca

SEQ ID NO: 14713 - DNA, 19 bp, synthetic construct
  misc_feature 1..19: note = Artificial sequence related to HLA knockouts in cell therapy
  source 1..19: mol_type = other DNA
aagcagtgacagtgcccag

SEQ ID NO: 14714 - DNA, 19 bp, synthetic construct
  misc_feature 1..19: note = Artificial sequence related to HLA knockouts in cell therapy
  source 1..19: mol_type = other DNA
ccagggctctgatgtgtct

SEQ ID NO: 14715 - DNA, 19 bp, synthetic construct
  misc_feature 1..19: note = Artificial sequence related to HLA knockouts in cell therapy
  source 1..19: mol_type = other DNA
cagggctctgatgtgtctc

SEQ ID NO: 14716 - DNA, 19 bp, synthetic construct
  misc_feature 1..19: note = Artificial sequence related to HLA knockouts in cell therapy
  source 1..19: mol_type = other DNA
agggctctgatgtgtctct

SEQ ID NO: 14717 - DNA, 19 bp, synthetic construct
  misc_feature 1..19: note = Artificial sequence related to HLA knockouts in cell therapy
  source 1..19: mol_type = other DNA
gggctctgatgtgtctctc

SEQ ID NO: 14718 - DNA, 19 bp, synthetic construct
  misc_feature 1..19: note = Artificial sequence related to HLA knockouts in cell therapy
  source 1..19: mol_type = other DNA
ggctctgatgtgtctctca

SEQ ID NO: 14719 - DNA, 19 bp, synthetic construct
  misc_feature 1..19: note = Artificial sequence related to HLA knockouts in cell therapy
  source 1..19: mol_type = other DNA
gctctgatgtgtctctcac

SEQ ID NO: 14720 - DNA, 19 bp, synthetic construct
  misc_feature 1..19: note = Artificial sequence related to HLA knockouts in cell therapy
  source 1..19: mol_type = other DNA
ctctgatgtgtctctcaca

SEQ ID NO: 14721 - DNA, 19 bp, synthetic construct
  misc_feature 1..19: note = Artificial sequence related to HLA knockouts in cell therapy
  source 1..19: mol_type = other DNA
tctgatgtgtctctcacag

SEQ ID NO: 14722 - DNA, 19 bp, synthetic construct
  misc_feature 1..19: note = Artificial sequence related to HLA knockouts in cell therapy
  source 1..19: mol_type = other DNA
ctgatgtgtctctcacagc

SEQ ID NO: 14723 - DNA, 19 bp, synthetic construct
  misc_feature 1..19: note = Artificial sequence related to HLA knockouts in cell therapy
  source 1..19: mol_type = other DNA
tgatgtgtctctcacagct

SEQ ID NO: 14724 - DNA, 19 bp, synthetic construct
  misc_feature 1..19: note = Artificial sequence related to HLA knockouts in cell therapy
  source 1..19: mol_type = other DNA
gatgtgtctctcacagctt

SEQ ID NO: 14725 - DNA, 19 bp, synthetic construct
  misc_feature 1..19: note = Artificial sequence related to HLA knockouts in cell therapy
  source 1..19: mol_type = other DNA
atgtgtctctcacagcttg

SEQ ID NO: 14726 - DNA, 19 bp, synthetic construct
  misc_feature 1..19: note = Artificial sequence related to HLA knockouts in cell therapy
  source 1..19: mol_type = other DNA
tgtgtctctcacagcttgt

SEQ ID NO: 14727 - DNA, 19 bp, synthetic construct
  misc_feature 1..19: note = Artificial sequence related to HLA knockouts in cell therapy
  source 1..19: mol_type = other DNA
gtgtctctcacagcttgta

SEQ ID NO: 14728 - DNA, 19 bp, synthetic construct
  misc_feature 1..19: note = Artificial sequence related to HLA knockouts in cell therapy
  source 1..19: mol_type = other DNA
tgtctctcacagcttgtaa

SEQ ID NO: 14729 - DNA, 19 bp, synthetic construct
  misc_feature 1..19: note = Artificial sequence related to HLA knockouts in cell therapy
  source 1..19: mol_type = other DNA
gtctctcacagcttgtaaa

SEQ ID NO: 14730 - DNA, 19 bp, synthetic construct
  misc_feature 1..19: note = Artificial sequence related to HLA knockouts in cell therapy
  source 1..19: mol_type = other DNA
tctctcacagcttgtaaag

SEQ ID NO: 14731 - DNA, 19 bp, synthetic construct
  misc_feature 1..19: note = Artificial sequence related to HLA knockouts in cell therapy
  source 1..19: mol_type = other DNA
ctctcacagcttgtaaagt

SEQ ID NO: 14732 - DNA, 19 bp, synthetic construct
  misc_feature 1..19: note = Artificial sequence related to HLA knockouts in cell therapy
  source 1..19: mol_type = other DNA
tctcacagcttgtaaagtg

SEQ ID NO: 14733 - DNA, 19 bp, synthetic construct
  misc_feature 1..19: note = Artificial sequence related to HLA knockouts in cell therapy
  source 1..19: mol_type = other DNA
ctcacagcttgtaaagtgt

SEQ ID NO: 14734 - DNA, 19 bp, synthetic construct
  misc_feature 1..19: note = Artificial sequence related to HLA knockouts in cell therapy
  source 1..19: mol_type = other DNA
tcacagcttgtaaagtgtg

SEQ ID NO: 14735 - DNA, 19 bp, synthetic construct
  misc_feature 1..19: note = Artificial sequence related to HLA knockouts in cell therapy
  source 1..19: mol_type = other DNA
cacagcttgtaaagtgtga

SEQ ID NO: 14736 - DNA, 19 bp, synthetic construct
  misc_feature 1..19: note = Artificial sequence related to HLA knockouts in cell therapy
  source 1..19: mol_type = other DNA
acagcttgtaaagtgtgag

SEQ ID NO: 14737 - DNA, 19 bp, synthetic construct
  misc_feature 1..19: note = Artificial sequence related to HLA knockouts in cell therapy
  source 1..19: mol_type = other DNA
cagcttgtaaagtgtgaga

SEQ ID NO: 14738 - DNA, 19 bp, synthetic construct
  misc_feature 1..19: note = Artificial sequence related to HLA knockouts in cell therapy
  source 1..19: mol_type = other DNA
agcttgtaaagtgtgagac

SEQ ID NO: 14739 - DNA, 19 bp, synthetic construct
  misc_feature 1..19: note = Artificial sequence related to HLA knockouts in cell therapy
  source 1..19: mol_type = other DNA
gcttgtaaagtgtgagaca

SEQ ID NO: 14740 - DNA, 19 bp, synthetic construct
  misc_feature 1..19: note = Artificial sequence related to HLA knockouts in cell therapy
  source 1..19: mol_type = other DNA
cttgtaaagtgtgagacag

SEQ ID NO: 14741 - DNA, 19 bp, synthetic construct
  misc_feature 1..19: note = Artificial sequence related to HLA knockouts in cell therapy
  source 1..19: mol_type = other DNA
ttgtaaagtgtgagacagc

SEQ ID NO: 14742 - DNA, 19 bp, synthetic construct
  misc_feature 1..19: note = Artificial sequence related to HLA knockouts in cell therapy
  source 1..19: mol_type = other DNA
tgtaaagtgtgagacagct

SEQ ID NO: 14743 - DNA, 19 bp, synthetic construct
  misc_feature 1..19: note = Artificial sequence related to HLA knockouts in cell therapy
  source 1..19: mol_type = other DNA
gtaaagtgtgagacagctg

SEQ ID NO: 14744 - DNA, 19 bp, synthetic construct
  misc_feature 1..19: note = Artificial sequence related to HLA knockouts in cell therapy
  source 1..19: mol_type = other DNA
taaagtgtgagacagctgc

SEQ ID NO: 14745 - DNA, 19 bp, synthetic construct
  misc_feature 1..19: note = Artificial sequence related to HLA knockouts in cell therapy
  source 1..19: mol_type = other DNA
aaagtgtgagacagctgcc

SEQ ID NO: 14746 - DNA, 19 bp, synthetic construct
  misc_feature 1..19: note = Artificial sequence related to HLA knockouts in cell therapy
  source 1..19: mol_type = other DNA
aagtgtgagacagctgcct

SEQ ID NO: 14747 - DNA, 19 bp, synthetic construct
  misc_feature 1..19: note = Artificial sequence related to HLA knockouts in cell therapy
  source 1..19: mol_type = other DNA
agtgtgagacagctgcctt

SEQ ID NO: 14748 - DNA, 19 bp, synthetic construct
  misc_feature 1..19: note = Artificial sequence related to HLA knockouts in cell therapy
  source 1..19: mol_type = other DNA
tgtgagacagctgccttgt

SEQ ID NO: 14749 - DNA, 19 bp, synthetic construct
  misc_feature 1..19: note = Artificial sequence related to HLA knockouts in cell therapy
  source 1..19: mol_type = other DNA
gtgagacagctgccttgtg

SEQ ID NO: 14750 - DNA, 19 bp, synthetic construct
  misc_feature 1..19: note = Artificial sequence related to HLA knockouts in cell therapy
  source 1..19: mol_type = other DNA
tgagacagctgccttgtgt

SEQ ID NO: 14751 - DNA, 19 bp, synthetic construct
  misc_feature 1..19: note = Artificial sequence related to HLA knockouts in cell therapy
  source 1..19: mol_type = other DNA
gagacagctgccttgtgtg

SEQ ID NO: 14752 - DNA, 19 bp, synthetic construct
  misc_feature 1..19: note = Artificial sequence related to HLA knockouts in cell therapy
  source 1..19: mol_type = other DNA
agacagctgccttgtgtgg

SEQ ID NO: 14753 - DNA, 19 bp, synthetic construct
  misc_feature 1..19: note = Artificial sequence related to HLA knockouts in cell therapy
  source 1..19: mol_type = other DNA
acagctgccttgtgtggga

SEQ ID NO: 14754 - DNA, 19 bp, synthetic construct
  misc_feature 1..19: note = Artificial sequence related to HLA knockouts in cell therapy
  source 1..19: mol_type = other DNA
agctgccttgtgtgggact

SEQ ID NO: 14755 - DNA, 19 bp, synthetic construct
  misc_feature 1..19: note = Artificial sequence related to HLA knockouts in cell therapy
  source 1..19: mol_type = other DNA
ctgccttgtgtgggactga

SEQ ID NO: 14756 - DNA, 19 bp, synthetic construct
  misc_feature 1..19: note = Artificial sequence related to HLA knockouts in cell therapy
  source 1..19: mol_type = other DNA
tgccttgtgtgggactgag

SEQ ID NO: 14757 - DNA, 19 bp, synthetic construct
  misc_feature 1..19: note = Artificial sequence related to HLA knockouts in cell therapy
  source 1..19: mol_type = other DNA
gccttgtgtgggactgaga

SEQ ID NO: 14758 - DNA, 19 bp, synthetic construct
  misc_feature 1..19: note = Artificial sequence related to HLA knockouts in cell therapy
  source 1..19: mol_type = other DNA
ccttgtgtgggactgagag

SEQ ID NO: 14759 - DNA, 19 bp, synthetic construct
  misc_feature 1..19: note = Artificial sequence related to HLA knockouts in cell therapy
  source 1..19: mol_type = other DNA
cttgtgtgggactgagagg

SEQ ID NO: 14760 - DNA, 19 bp, synthetic construct
  misc_feature 1..19: note = Artificial sequence related to HLA knockouts in cell therapy
  source 1..19: mol_type = other DNA
ttgtgtgggactgagaggc

SEQ ID NO: 14761 - DNA, 19 bp, synthetic construct
  misc_feature 1..19: note = Artificial sequence related to HLA knockouts in cell therapy
  source 1..19: mol_type = other DNA
tgtgtgggactgagaggca

SEQ ID NO: 14762 - DNA, 19 bp, synthetic construct
  misc_feature 1..19: note = Artificial sequence related to HLA knockouts in cell therapy
  source 1..19: mol_type = other DNA
gtgtgggactgagaggcaa

SEQ ID NO: 14763 - DNA, 19 bp, synthetic construct
  misc_feature 1..19: note = Artificial sequence related to HLA knockouts in cell therapy
  source 1..19: mol_type = other DNA
tgtgggactgagaggcaag

SEQ ID NO: 14764 - DNA, 19 bp, synthetic construct
  misc_feature 1..19: note = Artificial sequence related to HLA knockouts in cell therapy
  source 1..19: mol_type = other DNA
gtgggactgagaggcaaga

SEQ ID NO: 14765 - DNA, 19 bp, synthetic construct
  misc_feature 1..19: note = Artificial sequence related to HLA knockouts in cell therapy
  source 1..19: mol_type = other DNA
tgggactgagaggcaagag

SEQ ID NO: 14766 - DNA, 19 bp, synthetic construct
  misc_feature 1..19: note = Artificial sequence related to HLA knockouts in cell therapy
  source 1..19: mol_type = other DNA
gggactgagaggcaagagt

SEQ ID NO: 14767 - DNA, 19 bp, synthetic construct
  misc_feature 1..19: note = Artificial sequence related to HLA knockouts in cell therapy
  source 1..19: mol_type = other DNA
ggactgagaggcaagagtt

SEQ ID NO: 14768 - DNA, 19 bp, synthetic construct
  misc_feature 1..19: note = Artificial sequence related to HLA knockouts in cell therapy
  source 1..19: mol_type = other DNA
gactgagaggcaagagttg

SEQ ID NO: 14769 - DNA, 19 bp, synthetic construct
  misc_feature 1..19: note = Artificial sequence related to HLA knockouts in cell therapy
  source 1..19: mol_type = other DNA
actgagaggcaagagttgt

SEQ ID NO: 14770 - DNA, 19 bp, synthetic construct
  misc_feature 1..19: note = Artificial sequence related to HLA knockouts in cell therapy
  source 1..19: mol_type = other DNA
ctgagaggcaagagttgtt

SEQ ID NO: 14771 - DNA, 19 bp, synthetic construct
  misc_feature 1..19: note = Artificial sequence related to HLA knockouts in cell therapy
  source 1..19: mol_type = other DNA
tgagaggcaagagttgttc

SEQ ID NO: 14772 - DNA, 19 bp, synthetic construct
  misc_feature 1..19: note = Artificial sequence related to HLA knockouts in cell therapy
  source 1..19: mol_type = other DNA
gagaggcaagagttgttcc

SEQ ID NO: 14773 - DNA, 19 bp, synthetic construct
  misc_feature 1..19: note = Artificial sequence related to HLA knockouts in cell therapy
  source 1..19: mol_type = other DNA
agaggcaagagttgttcct

SEQ ID NO: 14774 - DNA, 19 bp, synthetic construct
  misc_feature 1..19: note = Artificial sequence related to HLA knockouts in cell therapy
  source 1..19: mol_type = other DNA
gaggcaagagttgttcctg

SEQ ID NO: 14775 - DNA, 19 bp, synthetic construct
  misc_feature 1..19: note = Artificial sequence related to HLA knockouts in cell therapy
  source 1..19: mol_type = other DNA
aggcaagagttgttcctgc

SEQ ID NO: 14776 - DNA, 19 bp, synthetic construct
  misc_feature 1..19: note = Artificial sequence related to HLA knockouts in cell therapy
  source 1..19: mol_type = other DNA
ggcaagagttgttcctgcc

SEQ ID NO: 14777 - DNA, 19 bp, synthetic construct
  misc_feature 1..19: note = Artificial sequence related to HLA knockouts in cell therapy
  source 1..19: mol_type = other DNA
gcaagagttgttcctgccc

SEQ ID NO: 14778 - DNA, 19 bp, synthetic construct
  misc_feature 1..19: note = Artificial sequence related to HLA knockouts in cell therapy
  source 1..19: mol_type = other DNA
caagagttgttcctgccct

SEQ ID NO: 14779 - DNA, 19 bp, synthetic construct
  misc_feature 1..19: note = Artificial sequence related to HLA knockouts in cell therapy
  source 1..19: mol_type = other DNA
aagagttgttcctgccctt

SEQ ID NO: 14780 - DNA, 19 bp, synthetic construct
  misc_feature 1..19: note = Artificial sequence related to HLA knockouts in cell therapy
  source 1..19: mol_type = other DNA
agagttgttcctgcccttc

SEQ ID NO: 14781 - DNA, 19 bp, synthetic construct
  misc_feature 1..19: note = Artificial sequence related to HLA knockouts in cell therapy
  source 1..19: mol_type = other DNA
gagttgttcctgcccttcc

SEQ ID NO: 14782 - DNA, 19 bp, synthetic construct
  misc_feature 1..19: note = Artificial sequence related to HLA knockouts in cell therapy
  source 1..19: mol_type = other DNA
agttgttcctgcccttccc

SEQ ID NO: 14783 - DNA, 19 bp, synthetic construct
  misc_feature 1..19: note = Artificial sequence related to HLA knockouts in cell therapy
  source 1..19: mol_type = other DNA
gttgttcctgcccttccct

SEQ ID NO: 14784 - DNA, 19 bp, synthetic construct
  misc_feature 1..19: note = Artificial sequence related to HLA knockouts in cell therapy
  source 1..19: mol_type = other DNA
ttgttcctgcccttccctt

SEQ ID NO: 14785 - DNA, 19 bp, synthetic construct
  misc_feature 1..19: note = Artificial sequence related to HLA knockouts in cell therapy
  source 1..19: mol_type = other DNA
tgttcctgcccttcccttt

SEQ ID NO: 14786 - DNA, 19 bp, synthetic construct
  misc_feature 1..19: note = Artificial sequence related to HLA knockouts in cell therapy
  source 1..19: mol_type = other DNA
gttcctgcccttccctttg

SEQ ID NO: 14787 - DNA, 19 bp, synthetic construct
  misc_feature 1..19: note = Artificial sequence related to HLA knockouts in cell therapy
  source 1..19: mol_type = other DNA
ttcctgcccttccctttgt

SEQ ID NO: 14788 - DNA, 19 bp, synthetic construct
  misc_feature 1..19: note = Artificial sequence related to HLA knockouts in cell therapy
  source 1..19: mol_type = other DNA
tcctgcccttccctttgtg

SEQ ID NO: 14789 - DNA, 19 bp, synthetic construct
  misc_feature 1..19: note = Artificial sequence related to HLA knockouts in cell therapy
  source 1..19: mol_type = other DNA
cctgcccttccctttgtga

SEQ ID NO: 14790 - DNA, 19 bp, synthetic construct
  misc_feature 1..19: note = Artificial sequence related to HLA knockouts in cell therapy
  source 1..19: mol_type = other DNA
ctgcccttccctttgtgac

SEQ ID NO: 14791 - DNA, 19 bp, synthetic construct
  misc_feature 1..19: note = Artificial sequence related to HLA knockouts in cell therapy
  source 1..19: mol_type = other DNA
tgcccttccctttgtgact

SEQ ID NO: 14792 - DNA, 19 bp, synthetic construct
  misc_feature 1..19: note = Artificial sequence related to HLA knockouts in cell therapy
  source 1..19: mol_type = other DNA
gcccttccctttgtgactt

SEQ ID NO: 14793 - DNA, 19 bp, synthetic construct
  misc_feature 1..19: note = Artificial sequence related to HLA knockouts in cell therapy
  source 1..19: mol_type = other DNA
cccttccctttgtgacttg

SEQ ID NO: 14794 - DNA, 19 bp, synthetic construct
  misc_feature 1..19: note = Artificial sequence related to HLA knockouts in cell therapy
  source 1..19: mol_type = other DNA
ccttccctttgtgacttga

SEQ ID NO: 14795 - DNA, 19 bp, synthetic construct
  misc_feature 1..19: note = Artificial sequence related to HLA knockouts in cell therapy
  source 1..19: mol_type = other DNA
cttccctttgtgacttgaa

SEQ ID NO: 14796 - DNA, 19 bp, synthetic construct
  misc_feature 1..19: note = Artificial sequence related to HLA knockouts in cell therapy
  source 1..19: mol_type = other DNA
ttccctttgtgacttgaag

SEQ ID NO: 14797 - DNA, 19 bp, synthetic construct
  misc_feature 1..19: note = Artificial sequence related to HLA knockouts in cell therapy
  source 1..19: mol_type = other DNA
tccctttgtgacttgaaga

SEQ ID NO: 14798 - DNA, 19 bp, synthetic construct
  misc_feature 1..19: note = Artificial sequence related to HLA knockouts in cell therapy
  source 1..19: mol_type = other DNA
ccctttgtgacttgaagaa

SEQ ID NO: 14799 - DNA, 19 bp, synthetic construct
  misc_feature 1..19: note = Artificial sequence related to HLA knockouts in cell therapy
  source 1..19: mol_type = other DNA
cctttgtgacttgaagaac

SEQ ID NO: 14800 - DNA, 19 bp, synthetic construct
  misc_feature 1..19: note = Artificial sequence related to HLA knockouts in cell therapy
  source 1..19: mol_type = other DNA
ctttgtgacttgaagaacc

SEQ ID NO: 14801 - DNA, 19 bp, synthetic construct
  misc_feature 1..19: note = Artificial sequence related to HLA knockouts in cell therapy
  source 1..19: mol_type = other DNA
tttgtgacttgaagaaccc

SEQ ID NO: 14802 - DNA, 19 bp, synthetic construct
  misc_feature 1..19: note = Artificial sequence related to HLA knockouts in cell therapy
  source 1..19: mol_type = other DNA
ttgtgacttgaagaaccct

SEQ ID NO: 14803 - DNA, 19 bp, synthetic construct
  misc_feature 1..19: note = Artificial sequence related to HLA knockouts in cell therapy
  source 1..19: mol_type = other DNA
tgtgacttgaagaaccctg

SEQ ID NO: 14804 - DNA, 19 bp, synthetic construct
  misc_feature 1..19: note = Artificial sequence related to HLA knockouts in cell therapy
  source 1..19: mol_type = other DNA
gtgacttgaagaaccctga

SEQ ID NO: 14805 - DNA, 19 bp, synthetic construct
  misc_feature 1..19: note = Artificial sequence related to HLA knockouts in cell therapy
  source 1..19: mol_type = other DNA
tgacttgaagaaccctgac

SEQ ID NO: 14806 - DNA, 19 bp, synthetic construct
  misc_feature 1..19: note = Artificial sequence related to HLA knockouts in cell therapy
  source 1..19: mol_type = other DNA
gacttgaagaaccctgact

SEQ ID NO: 14807 - DNA, 19 bp, synthetic construct
  misc_feature 1..19: note = Artificial sequence related to HLA knockouts in cell therapy
  source 1..19: mol_type = other DNA
acttgaagaaccctgactt

SEQ ID NO: 14808 - DNA, 19 bp, synthetic construct
  misc_feature 1..19: note = Artificial sequence related to HLA knockouts in cell therapy
  source 1..19: mol_type = other DNA
cttgaagaaccctgacttt

SEQ ID NO: 14809 - DNA, 19 bp, synthetic construct
  misc_feature 1..19: note = Artificial sequence related to HLA knockouts in cell therapy
  source 1..19: mol_type = other DNA
ttgaagaaccctgactttg

SEQ ID NO: 14810 - DNA, 19 bp, synthetic construct
  misc_feature 1..19: note = Artificial sequence related to HLA knockouts in cell therapy
  source 1..19: mol_type = other DNA
tgaagaaccctgactttgt

SEQ ID NO: 14811 - DNA, 19 bp, synthetic construct
  misc_feature 1..19: note = Artificial sequence related to HLA knockouts in cell therapy
  source 1..19: mol_type = other DNA
gaagaaccctgactttgtt

SEQ ID NO: 14812 - DNA, 19 bp, synthetic construct
  misc_feature 1..19: note = Artificial sequence related to HLA knockouts in cell therapy
  source 1..19: mol_type = other DNA
aagaaccctgactttgttt

SEQ ID NO: 14813 - DNA, 19 bp, synthetic construct
  misc_feature 1..19: note = Artificial sequence related to HLA knockouts in cell therapy
  source 1..19: mol_type = other DNA
agaaccctgactttgtttc

SEQ ID NO: 14814 - DNA, 19 bp, synthetic construct
  misc_feature 1..19: note = Artificial sequence related to HLA knockouts in cell therapy
  source 1..19: mol_type = other DNA
gaaccctgactttgtttct

SEQ ID NO: 14815 - DNA, 19 bp, synthetic construct
  misc_feature 1..19: note = Artificial sequence related to HLA knockouts in cell therapy
  source 1..19: mol_type = other DNA
aaccctgactttgtttctg

SEQ ID NO: 14816 - DNA, 19 bp, synthetic construct
  misc_feature 1..19: note = Artificial sequence related to HLA knockouts in cell therapy
  source 1..19: mol_type = other DNA
accctgactttgtttctgc

SEQ ID NO: 14817 - DNA, 19 bp, synthetic construct
  misc_feature 1..19: note = Artificial sequence related to HLA knockouts in cell therapy
  source 1..19: mol_type = other DNA
ccctgactttgtttctgca

SEQ ID NO: 14818 - DNA, 19 bp, synthetic construct
  misc_feature 1..19: note = Artificial sequence related to HLA knockouts in cell therapy
  source 1..19: mol_type = other DNA
cctgactttgtttctgcaa

SEQ ID NO: 14819 - DNA, 19 bp, synthetic construct
  misc_feature 1..19: note = Artificial sequence related to HLA knockouts in cell therapy
  source 1..19: mol_type = other DNA
ctgactttgtttctgcaaa

SEQ ID NO: 14820 - DNA, 19 bp, synthetic construct
  misc_feature 1..19: note = Artificial sequence related to HLA knockouts in cell therapy
  source 1..19: mol_type = other DNA
tgactttgtttctgcaaag

SEQ ID NO: 14821 - DNA, 19 bp, synthetic construct
  misc_feature 1..19: note = Artificial sequence related to HLA knockouts in cell therapy
  source 1..19: mol_type = other DNA
gactttgtttctgcaaagg

SEQ ID NO: 14822 - DNA, 19 bp, synthetic construct
  misc_feature 1..19: note = Artificial sequence related to HLA knockouts in cell therapy
  source 1..19: mol_type = other DNA
actttgtttctgcaaaggc

SEQ ID NO: 14823 - DNA, 19 bp, synthetic construct
  misc_feature 1..19: note = Artificial sequence related to HLA knockouts in cell therapy
  source 1..19: mol_type = other DNA
ctttgtttctgcaaaggca

SEQ ID NO: 14824 - DNA, 19 bp, synthetic construct
  misc_feature 1..19: note = Artificial sequence related to HLA knockouts in cell therapy
  source 1..19: mol_type = other DNA
tttgtttctgcaaaggcac

SEQ ID NO: 14825 - DNA, 19 bp, synthetic construct
  misc_feature 1..19: note = Artificial sequence related to HLA knockouts in cell therapy
  source 1..19: mol_type = other DNA
ttgtttctgcaaaggcacc

SEQ ID NO: 14826 - DNA, 19 bp, synthetic construct
  misc_feature 1..19: note = Artificial sequence related to HLA knockouts in cell therapy
  source 1..19: mol_type = other DNA
tgtttctgcaaaggcacct

SEQ ID NO: 14827 - DNA, 19 bp, synthetic construct
  misc_feature 1..19: note = Artificial sequence related to HLA knockouts in cell therapy
  source 1..19: mol_type = other DNA
gtttctgcaaaggcacctg

SEQ ID NO: 14828 - DNA, 19 bp, synthetic construct
  misc_feature 1..19: note = Artificial sequence related to HLA knockouts in cell therapy
  source 1..19: mol_type = other DNA
tttctgcaaaggcacctgc

SEQ ID NO: 14829 - DNA, 19 bp, synthetic construct
  misc_feature 1..19: note = Artificial sequence related to HLA knockouts in cell therapy
  source 1..19: mol_type = other DNA
ttctgcaaaggcacctgca

SEQ ID NO: 14830 - DNA, 19 bp, synthetic construct
  misc_feature 1..19: note = Artificial sequence related to HLA knockouts in cell therapy
  source 1..19: mol_type = other DNA
tctgcaaaggcacctgcat

SEQ ID NO: 14831 - DNA, 19 bp, synthetic construct
  misc_feature 1..19: note = Artificial sequence related to HLA knockouts in cell therapy
  source 1..19: mol_type = other DNA
ctgcaaaggcacctgcatg

SEQ ID NO: 14832 - DNA, 19 bp, synthetic construct
  misc_feature 1..19: note = Artificial sequence related to HLA knockouts in cell therapy
  source 1..19: mol_type = other DNA
tgcaaaggcacctgcatgt

SEQ ID NO: 14833 - DNA, 19 bp, synthetic construct
  misc_feature 1..19: note = Artificial sequence related to HLA knockouts in cell therapy
  source 1..19: mol_type = other DNA
gcaaaggcacctgcatgtg

SEQ ID NO: 14834 - DNA, 19 bp, synthetic construct
  misc_feature 1..19: note = Artificial sequence related to HLA knockouts in cell therapy
  source 1..19: mol_type = other DNA
caaaggcacctgcatgtgt

SEQ ID NO: 14835 - DNA, 19 bp, synthetic construct
  misc_feature 1..19: note = Artificial sequence related to HLA knockouts in cell therapy
  source 1..19: mol_type = other DNA
aaaggcacctgcatgtgtc

SEQ ID NO: 14836 - DNA, 19 bp, synthetic construct
  misc_feature 1..19: note = Artificial sequence related to HLA knockouts in cell therapy
  source 1..19: mol_type = other DNA
aaggcacctgcatgtgtct

SEQ ID NO: 14837 - DNA, 19 bp, synthetic construct
  misc_feature 1..19: note = Artificial sequence related to HLA knockouts in cell therapy
  source 1..19: mol_type = other DNA
gcacctgcatgtgtctgtg

SEQ ID NO: 14838 - DNA, 19 bp, synthetic construct
  misc_feature 1..19: note = Artificial sequence related to HLA knockouts in cell therapy
  source 1..19: mol_type = other DNA
cacctgcatgtgtctgtgt

SEQ ID NO: 14839 - DNA, 19 bp, synthetic construct
  misc_feature 1..19: note = Artificial sequence related to HLA knockouts in cell therapy
  source 1..19: mol_type = other DNA
acctgcatgtgtctgtgtt

SEQ ID NO: 14840 - DNA, 19 bp, synthetic construct
  misc_feature 1..19: note = Artificial sequence related to HLA knockouts in cell therapy
  source 1..19: mol_type = other DNA
cctgcatgtgtctgtgttc

SEQ ID NO: 14841 - DNA, 19 bp, synthetic construct
  misc_feature 1..19: note = Artificial sequence related to HLA knockouts in cell therapy
  source 1..19: mol_type = other DNA
ctgcatgtgtctgtgttcg

SEQ ID NO: 14842 - DNA, 19 bp, synthetic construct
  misc_feature 1..19: note = Artificial sequence related to HLA knockouts in cell therapy
  source 1..19: mol_type = other DNA
tgcatgtgtctgtgttcgt

SEQ ID NO: 14843 - DNA, 19 bp, synthetic construct
  misc_feature 1..19: note = Artificial sequence related to HLA knockouts in cell therapy
  source 1..19: mol_type = other DNA
gcatgtgtctgtgttcgtg

SEQ ID NO: 14844 - DNA, 19 bp, synthetic construct
  misc_feature 1..19: note = Artificial sequence related to HLA knockouts in cell therapy
  source 1..19: mol_type = other DNA
catgtgtctgtgttcgtgt

SEQ ID NO: 14845 - DNA, 19 bp, synthetic construct
  misc_feature 1..19: note = Artificial sequence related to HLA knockouts in cell therapy
  source 1..19: mol_type = other DNA
atgtgtctgtgttcgtgta

SEQ ID NO: 14846 - DNA, 19 bp, synthetic construct
  misc_feature 1..19: note = Artificial sequence related to HLA knockouts in cell therapy
  source 1..19: mol_type = other DNA
tgtgtctgtgttcgtgtag

SEQ ID NO: 14847 - DNA, 19 bp, synthetic construct
  misc_feature 1..19: note = Artificial sequence related to HLA knockouts in cell therapy
  source 1..19: mol_type = other DNA
gtgtctgtgttcgtgtagg

SEQ ID NO: 14848 - DNA, 19 bp, synthetic construct
  misc_feature 1..19: note = Artificial sequence related to HLA knockouts in cell therapy
  source 1..19: mol_type = other DNA
tgtctgtgttcgtgtaggc

SEQ ID NO: 14849 - DNA, 19 bp, synthetic construct
  misc_feature 1..19: note = Artificial sequence related to HLA knockouts in cell therapy
  source 1..19: mol_type = other DNA
gtctgtgttcgtgtaggca

SEQ ID NO: 14850 - DNA, 19 bp, synthetic construct
  misc_feature 1..19: note = Artificial sequence related to HLA knockouts in cell therapy
  source 1..19: mol_type = other DNA
tctgtgttcgtgtaggcat

SEQ ID NO: 14851 - DNA, 19 bp, synthetic construct
  misc_feature 1..19: note = Artificial sequence related to HLA knockouts in cell therapy
  source 1..19: mol_type = other DNA
ctgtgttcgtgtaggcata

SEQ ID NO: 14852 - DNA, 19 bp, synthetic construct
  misc_feature 1..19: note = Artificial sequence related to HLA knockouts in cell therapy
  source 1..19: mol_type = other DNA
tgtgttcgtgtaggcataa

SEQ ID NO: 14853 - DNA, 19 bp, synthetic construct
  misc_feature 1..19: note = Artificial sequence related to HLA knockouts in cell therapy
  source 1..19: mol_type = other DNA
gtgttcgtgtaggcataat

SEQ ID NO: 14854 - DNA, 19 bp, synthetic construct
  misc_feature 1..19: note = Artificial sequence related to HLA knockouts in cell therapy
  source 1..19: mol_type = other DNA
tgttcgtgtaggcataatg

SEQ ID NO: 14855 - DNA, 19 bp, synthetic construct
  misc_feature 1..19: note = Artificial sequence related to HLA knockouts in cell therapy
  source 1..19: mol_type = other DNA
gttcgtgtaggcataatgt

SEQ ID NO: 14856 - DNA, 19 bp, synthetic construct
  misc_feature 1..19: note = Artificial sequence related to HLA knockouts in cell therapy
  source 1..19: mol_type = other DNA
ttcgtgtaggcataatgtg

SEQ ID NO: 14857 - DNA, 19 bp, synthetic construct
  misc_feature 1..19: note = Artificial sequence related to HLA knockouts in cell therapy
  source 1..19: mol_type = other DNA
tcgtgtaggcataatgtga

SEQ ID NO: 14858 - DNA, 19 bp, synthetic construct
  misc_feature 1..19: note = Artificial sequence related to HLA knockouts in cell therapy
  source 1..19: mol_type = other DNA
cgtgtaggcataatgtgag

SEQ ID NO: 14859 - DNA, 19 bp, synthetic construct
  misc_feature 1..19: note = Artificial sequence related to HLA knockouts in cell therapy
  source 1..19: mol_type = other DNA
gtgtaggcataatgtgagg

SEQ ID NO: 14860 - DNA, 19 bp, synthetic construct
  misc_feature 1..19: note = Artificial sequence related to HLA knockouts in cell therapy
  source 1..19: mol_type = other DNA
tgtaggcataatgtgagga

SEQ ID NO: 14861 - DNA, 19 bp, synthetic construct
  misc_feature 1..19: note = Artificial sequence related to HLA knockouts in cell therapy
  source 1..19: mol_type = other DNA
gtaggcataatgtgaggag

SEQ ID NO: 14862 - DNA, 19 bp, synthetic construct
  misc_feature 1..19: note = Artificial sequence related to HLA knockouts in cell therapy
  source 1..19: mol_type = other DNA
taggcataatgtgaggagg

SEQ ID NO: 14863 - DNA, 19 bp, synthetic construct
  misc_feature 1..19: note = Artificial sequence related to HLA knockouts in cell therapy
  source 1..19: mol_type = other DNA
aggcataatgtgaggaggt

SEQ ID NO: 14864 - DNA, 19 bp, synthetic construct
  misc_feature 1..19: note = Artificial sequence related to HLA knockouts in cell therapy
  source 1..19: mol_type = other DNA
ggcataatgtgaggaggtg

SEQ ID NO: 14865 - DNA, 19 bp, synthetic construct
  misc_feature 1..19: note = Artificial sequence related to HLA knockouts in cell therapy
  source 1..19: mol_type = other DNA
gcataatgtgaggaggtgg

SEQ ID NO: 14866 - DNA, 19 bp, synthetic construct
  misc_feature 1..19: note = Artificial sequence related to HLA knockouts in cell therapy
  source 1..19: mol_type = other DNA
cataatgtgaggaggtggg

SEQ ID NO: 14867 - DNA, 19 bp, synthetic construct
  misc_feature 1..19: note = Artificial sequence related to HLA knockouts in cell therapy
  source 1..19: mol_type = other DNA
ccatgtccaccatgaccct

SEQ ID NO: 14868 - DNA, 19 bp, synthetic construct
  misc_feature 1..19: note = Artificial sequence related to HLA knockouts in cell therapy
  source 1..19: mol_type = other DNA
catgtccaccatgaccctc

SEQ ID NO: 14869 - DNA, 19 bp, synthetic construct
  misc_feature 1..19: note = Artificial sequence related to HLA knockouts in cell therapy
  source 1..19: mol_type = other DNA
atgtccaccatgaccctct

SEQ ID NO: 14870 - DNA, 19 bp, synthetic construct
  misc_feature 1..19: note = Artificial sequence related to HLA knockouts in cell therapy
  source 1..19: mol_type = other DNA
tgtccaccatgaccctctt

SEQ ID NO: 14871 - DNA, 19 bp, synthetic construct
  misc_feature 1..19: note = Artificial sequence related to HLA knockouts in cell therapy
  source 1..19: mol_type = other DNA
gtccaccatgaccctcttc

SEQ ID NO: 14872 - DNA, 19 bp, synthetic construct
  misc_feature 1..19: note = Artificial sequence related to HLA knockouts in cell therapy
  source 1..19: mol_type = other DNA
tccaccatgaccctcttcc

SEQ ID NO: 14873 - DNA, 19 bp, synthetic construct
  misc_feature 1..19: note = Artificial sequence related to HLA knockouts in cell therapy
  source 1..19: mol_type = other DNA
caccatgaccctcttccca

SEQ ID NO: 14874 - DNA, 19 bp, synthetic construct
  misc_feature 1..19: note = Artificial sequence related to HLA knockouts in cell therapy
  source 1..19: mol_type = other DNA
accatgaccctcttcccac

SEQ ID NO: 14875 - DNA, 19 bp, synthetic construct
  misc_feature 1..19: note = Artificial sequence related to HLA knockouts in cell therapy
  source 1..19: mol_type = other DNA
atgaccctcttcccacgct

SEQ ID NO: 14876 - DNA, 19 bp, synthetic construct
  misc_feature 1..19: note = Artificial sequence related to HLA knockouts in cell therapy
  source 1..19: mol_type = other DNA
tcttcccacgctgacctgt

SEQ ID NO: 14877 - DNA, 19 bp, synthetic construct
  misc_feature 1..19: note = Artificial sequence related to HLA knockouts in cell therapy
  source 1..19: mol_type = other DNA
cccaatcatctttcctgtt

SEQ ID NO: 14878 - DNA, 19 bp, synthetic construct
  misc_feature 1..19: note = Artificial sequence related to HLA knockouts in cell therapy
  source 1..19: mol_type = other DNA
ccaatcatctttcctgttc

SEQ ID NO: 14879 - DNA, 19 bp, synthetic construct
  misc_feature 1..19: note = Artificial sequence related to HLA knockouts in cell therapy
  source 1..19: mol_type = other DNA
caatcatctttcctgttcc

SEQ ID NO: 14880 - DNA, 19 bp, synthetic construct
  misc_feature 1..19: note = Artificial sequence related to HLA knockouts in cell therapy
  source 1..19: mol_type = other DNA
aatcatctttcctgttcca

SEQ ID NO: 14881 - DNA, 19 bp, synthetic construct
  misc_feature 1..19: note = Artificial sequence related to HLA knockouts in cell therapy
  source 1..19: mol_type = other DNA
atcatctttcctgttccag

SEQ ID NO: 14882 - DNA, 19 bp, synthetic construct
  misc_feature 1..19: note = Artificial sequence related to HLA knockouts in cell therapy
  source 1..19: mol_type = other DNA
catctttcctgttccagag

SEQ ID NO: 14883 - DNA, 19 bp, synthetic construct
  misc_feature 1..19: note = Artificial sequence related to HLA knockouts in cell therapy
  source 1..19: mol_type = other DNA
atctttcctgttccagaga

SEQ ID NO: 14884 - DNA, 19 bp, synthetic construct
  misc_feature 1..19: note = Artificial sequence related to HLA knockouts in cell therapy
  source 1..19: mol_type = other DNA
tctttcctgttccagagag

SEQ ID NO: 14885 - DNA, 19 bp, synthetic construct
  misc_feature 1..19: note = Artificial sequence related to HLA knockouts in cell therapy
  source 1..19: mol_type = other DNA
ctttcctgttccagagagg

SEQ ID NO: 14886 - DNA, 19 bp, synthetic construct
  misc_feature 1..19: note = Artificial sequence related to HLA knockouts in cell therapy
  source 1..19: mol_type = other DNA
tttcctgttccagagaggt

SEQ ID NO: 14887 - DNA, 19 bp, synthetic construct
  misc_feature 1..19: note = Artificial sequence related to HLA knockouts in cell therapy
  source 1..19: mol_type = other DNA
ttcctgttccagagaggtg

SEQ ID NO: 14888 - DNA, 19 bp, synthetic construct
  misc_feature 1..19: note = Artificial sequence related to HLA knockouts in cell therapy
  source 1..19: mol_type = other DNA
tcctgttccagagaggtgg

SEQ ID NO: 14889 - DNA, 19 bp, synthetic construct
  misc_feature 1..19: note = Artificial sequence related to HLA knockouts in cell therapy
  source 1..19: mol_type = other DNA
ggctgaggtgtctccatct

SEQ ID NO: 14890 - DNA, 19 bp, synthetic construct
  misc_feature 1..19: note = Artificial sequence related to HLA knockouts in cell therapy
  source 1..19: mol_type = other DNA
gctgaggtgtctccatctc

SEQ ID NO: 14891 - DNA, 19 bp, synthetic construct
  misc_feature 1..19: note = Artificial sequence related to HLA knockouts in cell therapy
  source 1..19: mol_type = other DNA
ctgaggtgtctccatctct

SEQ ID NO: 14892 - DNA, 19 bp, synthetic construct
  misc_feature 1..19: note = Artificial sequence related to HLA knockouts in cell therapy
  source 1..19: mol_type = other DNA
tgaggtgtctccatctctg

SEQ ID NO: 14893 - DNA, 19 bp, synthetic construct
  misc_feature 1..19: note = Artificial sequence related to HLA knockouts in cell therapy
  source 1..19: mol_type = other DNA
gaggtgtctccatctctgt

SEQ ID NO: 14894 - DNA, 19 bp, synthetic construct
  misc_feature 1..19: note = Artificial sequence related to HLA knockouts in cell therapy
  source 1..19: mol_type = other DNA
aggtgtctccatctctgtc

SEQ ID NO: 14895 - DNA, 19 bp, synthetic construct
  misc_feature 1..19: note = Artificial sequence related to HLA knockouts in cell therapy
  source 1..19: mol_type = other DNA
ggtgtctccatctctgtct

SEQ ID NO: 14896 - DNA, 19 bp, synthetic construct
  misc_feature 1..19: note = Artificial sequence related to HLA knockouts in cell therapy
  source 1..19: mol_type = other DNA
gtgtctccatctctgtctc

SEQ ID NO: 14897 - DNA, 19 bp, synthetic construct
  misc_feature 1..19: note = Artificial sequence related to HLA knockouts in cell therapy
  source 1..19: mol_type = other DNA
tgtctccatctctgtctca

SEQ ID NO: 14898 - DNA, 19 bp, synthetic construct
  misc_feature 1..19: note = Artificial sequence related to HLA knockouts in cell therapy
  source 1..19: mol_type = other DNA
gtctccatctctgtctcaa

SEQ ID NO: 14899 - DNA, 19 bp, synthetic construct
  misc_feature 1..19: note = Artificial sequence related to HLA knockouts in cell therapy
  source 1..19: mol_type = other DNA
tctccatctctgtctcaac

SEQ ID NO: 14900 - DNA, 19 bp, synthetic construct
  misc_feature 1..19: note = Artificial sequence related to HLA knockouts in cell therapy
  source 1..19: mol_type = other DNA
ctccatctctgtctcaact

SEQ ID NO: 14901 - DNA, 19 bp, synthetic construct
  misc_feature 1..19: note = Artificial sequence related to HLA knockouts in cell therapy
  source 1..19: mol_type = other DNA
tccatctctgtctcaactt

SEQ ID NO: 14902 - DNA, 19 bp, synthetic construct
  misc_feature 1..19: note = Artificial sequence related to HLA knockouts in cell therapy
  source 1..19: mol_type = other DNA
ccatctctgtctcaacttc

SEQ ID NO: 14903 - DNA, 19 bp, synthetic construct
  misc_feature 1..19: note = Artificial sequence related to HLA knockouts in cell therapy
  source 1..19: mol_type = other DNA
catctctgtctcaacttca

SEQ ID NO: 14904 - DNA, 19 bp, synthetic construct
  misc_feature 1..19: note = Artificial sequence related to HLA knockouts in cell therapy
  source 1..19: mol_type = other DNA
atctctgtctcaacttcat

SEQ ID NO: 14905 - DNA, 19 bp, synthetic construct
  misc_feature 1..19: note = Artificial sequence related to HLA knockouts in cell therapy
  source 1..19: mol_type = other DNA
tctctgtctcaacttcatg

SEQ ID NO: 14906 - DNA, 19 bp, synthetic construct
  misc_feature 1..19: note = Artificial sequence related to HLA knockouts in cell therapy
  source 1..19: mol_type = other DNA
ctctgtctcaacttcatgg

SEQ ID NO: 14907 - DNA, 19 bp, synthetic construct
  misc_feature 1..19: note = Artificial sequence related to HLA knockouts in cell therapy
  source 1..19: mol_type = other DNA
tctgtctcaacttcatggt

SEQ ID NO: 14908 - DNA, 19 bp, synthetic construct
  misc_feature 1..19: note = Artificial sequence related to HLA knockouts in cell therapy
  source 1..19: mol_type = other DNA
ctgtctcaacttcatggtg

SEQ ID NO: 14909 - DNA, 19 bp, synthetic construct
  misc_feature 1..19: note = Artificial sequence related to HLA knockouts in cell therapy
  source 1..19: mol_type = other DNA
tgtctcaacttcatggtgc

SEQ ID NO: 14910 - DNA, 19 bp, synthetic construct
  misc_feature 1..19: note = Artificial sequence related to HLA knockouts in cell therapy
  source 1..19: mol_type = other DNA
gtctcaacttcatggtgca

SEQ ID NO: 14911 - DNA, 19 bp, synthetic construct
  misc_feature 1..19: note = Artificial sequence related to HLA knockouts in cell therapy
  source 1..19: mol_type = other DNA
tctcaacttcatggtgcac

SEQ ID NO: 14912 - DNA, 19 bp, synthetic construct
  misc_feature 1..19: note = Artificial sequence related to HLA knockouts in cell therapy
  source 1..19: mol_type = other DNA
ctcaacttcatggtgcact

SEQ ID NO: 14913 - DNA, 19 bp, synthetic construct
  misc_feature 1..19: note = Artificial sequence related to HLA knockouts in cell therapy
  source 1..19: mol_type = other DNA
tcaacttcatggtgcactg

SEQ ID NO: 14914 - DNA, 19 bp, synthetic construct
  misc_feature 1..19: note = Artificial sequence related to HLA knockouts in cell therapy
  source 1..19: mol_type = other DNA
caacttcatggtgcactga

SEQ ID NO: 14915 - DNA, 19 bp, synthetic construct
  misc_feature 1..19: note = Artificial sequence related to HLA knockouts in cell therapy
  source 1..19: mol_type = other DNA
aacttcatggtgcactgag

SEQ ID NO: 14916 - DNA, 19 bp, synthetic construct
  misc_feature 1..19: note = Artificial sequence related to HLA knockouts in cell therapy
  source 1..19: mol_type = other DNA
acttcatggtgcactgagc

SEQ ID NO: 14917 - DNA, 19 bp, synthetic construct
  misc_feature 1..19: note = Artificial sequence related to HLA knockouts in cell therapy
  source 1..19: mol_type = other DNA
cttcatggtgcactgagct

SEQ ID NO: 14918 - DNA, 19 bp, synthetic construct
  misc_feature 1..19: note = Artificial sequence related to HLA knockouts in cell therapy
  source 1..19: mol_type = other DNA
ttcatggtgcactgagctg

SEQ ID NO: 14919 - DNA, 19 bp, synthetic construct
  misc_feature 1..19: note = Artificial sequence related to HLA knockouts in cell therapy
  source 1..19: mol_type = other DNA
tcatggtgcactgagctgt

SEQ ID NO: 14920 - DNA, 19 bp, synthetic construct
  misc_feature 1..19: note = Artificial sequence related to HLA knockouts in cell therapy
  source 1..19: mol_type = other DNA
catggtgcactgagctgta

SEQ ID NO: 14921 - DNA, 19 bp, synthetic construct
  misc_feature 1..19: note = Artificial sequence related to HLA knockouts in cell therapy
  source 1..19: mol_type = other DNA
atggtgcactgagctgtaa

SEQ ID NO: 14922 - DNA, 19 bp, synthetic construct
  misc_feature 1..19: note = Artificial sequence related to HLA knockouts in cell therapy
  source 1..19: mol_type = other DNA
tggtgcactgagctgtaac

SEQ ID NO: 14923 - DNA, 19 bp, synthetic construct
  misc_feature 1..19: note = Artificial sequence related to HLA knockouts in cell therapy
  source 1..19: mol_type = other DNA
ggtgcactgagctgtaact

SEQ ID NO: 14924 - DNA, 19 bp, synthetic construct
  misc_feature 1..19: note = Artificial sequence related to HLA knockouts in cell therapy
  source 1..19: mol_type = other DNA
gtgcactgagctgtaactt

SEQ ID NO: 14925 - DNA, 19 bp, synthetic construct
  misc_feature 1..19: note = Artificial sequence related to HLA knockouts in cell therapy
  source 1..19: mol_type = other DNA
tgcactgagctgtaacttc

SEQ ID NO: 14926 - DNA, 19 bp, synthetic construct
  misc_feature 1..19: note = Artificial sequence related to HLA knockouts in cell therapy
  source 1..19: mol_type = other DNA
gcactgagctgtaacttct

SEQ ID NO: 14927 - DNA, 19 bp, synthetic construct
  misc_feature 1..19: note = Artificial sequence related to HLA knockouts in cell therapy
  source 1..19: mol_type = other DNA
cactgagctgtaacttctt

SEQ ID NO: 14928 - DNA, 19 bp, synthetic construct
  misc_feature 1..19: note = Artificial sequence related to HLA knockouts in cell therapy
  source 1..19: mol_type = other DNA
actgagctgtaacttcttc

SEQ ID NO: 14929 - DNA, 19 bp, synthetic construct
  misc_feature 1..19: note = Artificial sequence related to HLA knockouts in cell therapy
  source 1..19: mol_type = other DNA
ctgagctgtaacttcttcc

SEQ ID NO: 14930 - DNA, 19 bp, synthetic construct
  misc_feature 1..19: note = Artificial sequence related to HLA knockouts in cell therapy
  source 1..19: mol_type = other DNA
tgagctgtaacttcttcct

SEQ ID NO: 14931 - DNA, 19 bp, synthetic construct
  misc_feature 1..19: note = Artificial sequence related to HLA knockouts in cell therapy
  source 1..19: mol_type = other DNA
gagctgtaacttcttcctt

SEQ ID NO: 14932 - DNA, 19 bp, synthetic construct
  misc_feature 1..19: note = Artificial sequence related to HLA knockouts in cell therapy
  source 1..19: mol_type = other DNA
agctgtaacttcttccttc

SEQ ID NO: 14933 - DNA, 19 bp, synthetic construct
  misc_feature 1..19: note = Artificial sequence related to HLA knockouts in cell therapy
  source 1..19: mol_type = other DNA
gctgtaacttcttccttcc

SEQ ID NO: 14934 - DNA, 19 bp, synthetic construct
  misc_feature 1..19: note = Artificial sequence related to HLA knockouts in cell therapy
  source 1..19: mol_type = other DNA
ctgtaacttcttccttccc

SEQ ID NO: 14935 - DNA, 19 bp, synthetic construct
  misc_feature 1..19: note = Artificial sequence related to HLA knockouts in cell therapy
  source 1..19: mol_type = other DNA
tgtaacttcttccttccct

SEQ ID NO: 14936 - DNA, 19 bp, synthetic construct
  misc_feature 1..19: note = Artificial sequence related to HLA knockouts in cell therapy
  source 1..19: mol_type = other DNA
gtaacttcttccttcccta

SEQ ID NO: 14937 - DNA, 19 bp, synthetic construct
  misc_feature 1..19: note = Artificial sequence related to HLA knockouts in cell therapy
  source 1..19: mol_type = other DNA
taacttcttccttccctat

SEQ ID NO: 14938 - DNA, 19 bp, synthetic construct
  misc_feature 1..19: note = Artificial sequence related to HLA knockouts in cell therapy
  source 1..19: mol_type = other DNA
aacttcttccttccctatt

SEQ ID NO: 14939 - DNA, 19 bp, synthetic construct
  misc_feature 1..19: note = Artificial sequence related to HLA knockouts in cell therapy
  source 1..19: mol_type = other DNA
acttcttccttccctatta

SEQ ID NO: 14940 - DNA, 19 bp, synthetic construct
  misc_feature 1..19: note = Artificial sequence related to HLA knockouts in cell therapy
  source 1..19: mol_type = other DNA
cttcttccttccctattaa

SEQ ID NO: 14941 - DNA, 19 bp, synthetic construct
  misc_feature 1..19: note = Artificial sequence related to HLA knockouts in cell therapy
  source 1..19: mol_type = other DNA
ttcttccttccctattaaa

SEQ ID NO: 14942 - DNA, 20 bp, synthetic construct
  misc_feature 1..20: note = Artificial sequence related to HLA knockouts in cell therapy
  source 1..20: mol_type = other DNA
ccgaaggcggtgtatggatt

SEQ ID NO: 14943 - DNA, 20 bp, synthetic construct
  misc_feature 1..20: note = Artificial sequence related to HLA knockouts in cell therapy
  source 1..20: mol_type = other DNA
cgaaggcggtgtatggattg

SEQ ID NO: 14944 - DNA, 20 bp, synthetic construct
  misc_feature 1..20: note = Artificial sequence related to HLA knockouts in cell therapy
  source 1..20: mol_type = other DNA
gaaggcggtgtatggattgg

SEQ ID NO: 14945 - DNA, 20 bp, synthetic construct
  misc_feature 1..20: note = Artificial sequence related to HLA knockouts in cell therapy
  source 1..20: mol_type = other DNA
aaggcggtgtatggattggg

SEQ ID NO: 14946 - DNA, 20 bp, synthetic construct
  misc_feature 1..20: note = Artificial sequence related to HLA knockouts in cell therapy
  source 1..20: mol_type = other DNA
cccaactccgcagtttcttt

SEQ ID NO: 14947 - DNA, 20 bp, synthetic construct
  misc_feature 1..20: note = Artificial sequence related to HLA knockouts in cell therapy
  source 1..20: mol_type = other DNA
tttctccctctcccaaccta

SEQ ID NO: 14948 - DNA, 20 bp, synthetic construct
  misc_feature 1..20: note = Artificial sequence related to HLA knockouts in cell therapy
  source 1..20: mol_type = other DNA
ttctccctctcccaacctat

SEQ ID NO: 14949 - DNA, 20 bp, synthetic construct
  misc_feature 1..20: note = Artificial sequence related to HLA knockouts in cell therapy
  source 1..20: mol_type = other DNA
tctccctctcccaacctatg

SEQ ID NO: 14950 - DNA, 20 bp, synthetic construct
  misc_feature 1..20: note = Artificial sequence related to HLA knockouts in cell therapy
  source 1..20: mol_type = other DNA
ctccctctcccaacctatgt

SEQ ID NO: 14951 - DNA, 20 bp, synthetic construct
  misc_feature 1..20: note = Artificial sequence related to HLA knockouts in cell therapy
  source 1..20: mol_type = other DNA
tccctctcccaacctatgta

SEQ ID NO: 14952 - DNA, 20 bp, synthetic construct
  misc_feature 1..20: note = Artificial sequence related to HLA knockouts in cell therapy
  source 1..20: mol_type = other DNA
ccctctcccaacctatgtag

SEQ ID NO: 14953 - DNA, 20 bp, synthetic construct
  misc_feature 1..20: note = Artificial sequence related to HLA knockouts in cell therapy
  source 1..20: mol_type = other DNA
cctctcccaacctatgtagg

SEQ ID NO: 14954 - DNA, 20 bp, synthetic construct
  misc_feature 1..20: note = Artificial sequence related to HLA knockouts in cell therapy
  source 1..20: mol_type = other DNA
ctctcccaacctatgtaggg

SEQ ID NO: 14955 - DNA, 20 bp, synthetic construct
  misc_feature 1..20: note = Artificial sequence related to HLA knockouts in cell therapy
  source 1..20: mol_type = other DNA
tctcccaacctatgtagggt

SEQ ID NO: 14956 - DNA, 20 bp, synthetic construct
  misc_feature 1..20: note = Artificial sequence related to HLA knockouts in cell therapy
  source 1..20: mol_type = other DNA
ctcccaacctatgtagggtc

SEQ ID NO: 14957 - DNA, 20 bp, synthetic construct
  misc_feature 1..20: note = Artificial sequence related to HLA knockouts in cell therapy
  source 1..20: mol_type = other DNA
tcccaacctatgtagggtcc

SEQ ID NO: 14958 - DNA, 20 bp, synthetic construct
  misc_feature 1..20: note = Artificial sequence related to HLA knockouts in cell therapy
  source 1..20: mol_type = other DNA
cccaacctatgtagggtcct

SEQ ID NO: 14959 - DNA, 20 bp, synthetic construct
  misc_feature 1..20: note = Artificial sequence related to HLA knockouts in cell therapy
  source 1..20: mol_type = other DNA
ccaacctatgtagggtcctt

SEQ ID NO: 14960 - DNA, 20 bp, synthetic construct
  misc_feature 1..20: note = Artificial sequence related to HLA knockouts in cell therapy
  source 1..20: mol_type = other DNA
caacctatgtagggtccttc

SEQ ID NO: 14961 - DNA, 20 bp, synthetic construct
  misc_feature 1..20: note = Artificial sequence related to HLA knockouts in cell therapy
  source 1..20: mol_type = other DNA
aacctatgtagggtccttct

SEQ ID NO: 14962 - DNA, 20 bp, synthetic construct
  misc_feature 1..20: note = Artificial sequence related to HLA knockouts in cell therapy
  source 1..20: mol_type = other DNA
acctatgtagggtccttctt

SEQ ID NO: 14963 - DNA, 20 bp, synthetic construct
  misc_feature 1..20: note = Artificial sequence related to HLA knockouts in cell therapy
  source 1..20: mol_type = other DNA
cctatgtagggtccttcttc

SEQ ID NO: 14964 - DNA, 20 bp, synthetic construct
  misc_feature 1..20: note = Artificial sequence related to HLA knockouts in cell therapy
  source 1..20: mol_type = other DNA
ctatgtagggtccttcttcc

SEQ ID NO: 14965 - DNA, 20 bp, synthetic construct
  misc_feature 1..20: note = Artificial sequence related to HLA knockouts in cell therapy
  source 1..20: mol_type = other DNA
tatgtagggtccttcttcct

SEQ ID NO: 14966 - DNA, 20 bp, synthetic construct
  misc_feature 1..20: note = Artificial sequence related to HLA knockouts in cell therapy
  source 1..20: mol_type = other DNA
atgtagggtccttcttcctg

SEQ ID NO: 14967 - DNA, 20 bp, synthetic construct
  misc_feature 1..20: note = Artificial sequence related to HLA knockouts in cell therapy
  source 1..20: mol_type = other DNA
tgtagggtccttcttcctgg

SEQ ID NO: 14968 - DNA, 20 bp, synthetic construct
  misc_feature 1..20: note = Artificial sequence related to HLA knockouts in cell therapy
  source 1..20: mol_type = other DNA
gtagggtccttcttcctgga

SEQ ID NO: 14969 - DNA, 20 bp, synthetic construct
  misc_feature 1..20: note = Artificial sequence related to HLA knockouts in cell therapy
  source 1..20: mol_type = other DNA
tagggtccttcttcctggat

SEQ ID NO: 14970 - DNA, 20 bp, synthetic construct
  misc_feature 1..20: note = Artificial sequence related to HLA knockouts in cell therapy
  source 1..20: mol_type = other DNA
agggtccttcttcctggata

SEQ ID NO: 14971 - DNA, 20 bp, synthetic construct
  misc_feature 1..20: note = Artificial sequence related to HLA knockouts in cell therapy
  source 1..20: mol_type = other DNA
gggtccttcttcctggatac

SEQ ID NO: 14972 - DNA, 20 bp, synthetic construct
  misc_feature 1..20: note = Artificial sequence related to HLA knockouts in cell therapy
  source 1..20: mol_type = other DNA
ggtccttcttcctggatact

SEQ ID NO: 14973 - DNA, 20 bp, synthetic construct
  misc_feature 1..20: note = Artificial sequence related to HLA knockouts in cell therapy
  source 1..20: mol_type = other DNA
gtccttcttcctggatactc

SEQ ID NO: 14974 - DNA, 20 bp, synthetic construct
  misc_feature 1..20: note = Artificial sequence related to HLA knockouts in cell therapy
  source 1..20: mol_type = other DNA
tccttcttcctggatactca

SEQ ID NO: 14975 - DNA, 20 bp, synthetic construct
  misc_feature 1..20: note = Artificial sequence related to HLA knockouts in cell therapy
  source 1..20: mol_type = other DNA
ccttcttcctggatactcac

SEQ ID NO: 14976 - DNA, 20 bp, synthetic construct
  misc_feature 1..20: note = Artificial sequence related to HLA knockouts in cell therapy
  source 1..20: mol_type = other DNA
cttcttcctggatactcacg

SEQ ID NO: 14977 - DNA, 20 bp, synthetic construct
  misc_feature 1..20: note = Artificial sequence related to HLA knockouts in cell therapy
  source 1..20: mol_type = other DNA
ttcttcctggatactcacga

SEQ ID NO: 14978 - DNA, 20 bp, synthetic construct
  misc_feature 1..20: note = Artificial sequence related to HLA knockouts in cell therapy
  source 1..20: mol_type = other DNA
tcttcctggatactcacgac

SEQ ID NO: 14979 - DNA, 20 bp, synthetic construct
  misc_feature 1..20: note = Artificial sequence related to HLA knockouts in cell therapy
  source 1..20: mol_type = other DNA
cttcctggatactcacgacg

SEQ ID NO: 14980 - DNA, 20 bp, synthetic construct
  misc_feature 1..20: note = Artificial sequence related to HLA knockouts in cell therapy
  source 1..20: mol_type = other DNA
ttcctggatactcacgacgc

SEQ ID NO: 14981 - DNA, 20 bp, synthetic construct
  misc_feature 1..20: note = Artificial sequence related to HLA knockouts in cell therapy
  source 1..20: mol_type = other DNA
gacccagttctcactcccat

SEQ ID NO: 14982 - DNA, 20 bp, synthetic construct
  misc_feature 1..20: note = Artificial sequence related to HLA knockouts in cell therapy
  source 1..20: mol_type = other DNA
acccagttctcactcccatt

SEQ ID NO: 14983 - DNA, 20 bp, synthetic construct
  misc_feature 1..20: note = Artificial sequence related to HLA knockouts in cell therapy
  source 1..20: mol_type = other DNA
cccagttctcactcccattg

SEQ ID NO: 14984 - DNA, 20 bp, synthetic construct
  misc_feature 1..20: note = Artificial sequence related to HLA knockouts in cell therapy
  source 1..20: mol_type = other DNA
ccagttctcactcccattgg

SEQ ID NO: 14985 - DNA, 20 bp, synthetic construct
  misc_feature 1..20: note = Artificial sequence related to HLA knockouts in cell therapy
  source 1..20: mol_type = other DNA
cagttctcactcccattggg

SEQ ID NO: 14986 - DNA, 20 bp, synthetic construct
  misc_feature 1..20: note = Artificial sequence related to HLA knockouts in cell therapy
  source 1..20: mol_type = other DNA
agttctcactcccattgggt

SEQ ID NO: 14987 - DNA, 20 bp, synthetic construct
  misc_feature 1..20: note = Artificial sequence related to HLA knockouts in cell therapy
  source 1..20: mol_type = other DNA
gttctcactcccattgggtg

SEQ ID NO: 14988 - DNA, 20 bp, synthetic construct
  misc_feature 1..20: note = Artificial sequence related to HLA knockouts in cell therapy
  source 1..20: mol_type = other DNA
ttctcactcccattgggtgt

SEQ ID NO: 14989 - DNA, 20 bp, synthetic construct
  misc_feature 1..20: note = Artificial sequence related to HLA knockouts in cell therapy
  source 1..20: mol_type = other DNA
tctcactcccattgggtgtc

SEQ ID NO: 14990 - DNA, 20 bp, synthetic construct
  misc_feature 1..20: note = Artificial sequence related to HLA knockouts in cell therapy
  source 1..20: mol_type = other DNA
tcccattgggtgtcgggttt

SEQ ID NO: 14991 - DNA, 20 bp, synthetic construct
  misc_feature 1..20: note = Artificial sequence related to HLA knockouts in cell therapy
  source 1..20: mol_type = other DNA
cattgggtgtcgggtttcca

SEQ ID NO: 14992 - DNA, 20 bp, synthetic construct
  misc_feature 1..20: note = Artificial sequence related to HLA knockouts in cell therapy
  source 1..20: mol_type = other DNA
attgggtgtcgggtttccag

SEQ ID NO: 14993 - DNA, 20 bp, synthetic construct
  misc_feature 1..20: note = Artificial sequence related to HLA knockouts in cell therapy
  source 1..20: mol_type = other DNA
ttgggtgtcgggtttccaga

SEQ ID NO: 14994 - DNA, 20 bp, synthetic construct
  misc_feature 1..20: note = Artificial sequence related to HLA knockouts in cell therapy
  source 1..20: mol_type = other DNA
ggtgtcgggtttccagagaa

SEQ ID NO: 14995 - DNA, 20 bp, synthetic construct
  misc_feature 1..20: note = Artificial sequence related to HLA knockouts in cell therapy
  source 1..20: mol_type = other DNA
gtgtcgggtttccagagaag

SEQ ID NO: 14996 - DNA, 20 bp, synthetic construct
  misc_feature 1..20: note = Artificial sequence related to HLA knockouts in cell therapy
  source 1..20: mol_type = other DNA
tgtcgggtttccagagaagc

SEQ ID NO: 14997 - DNA, 20 bp, synthetic construct
  misc_feature 1..20: note = Artificial sequence related to HLA knockouts in cell therapy
  source 1..20: mol_type = other DNA
tcgggtttccagagaagcca

SEQ ID NO: 14998 - DNA, 20 bp, synthetic construct
  misc_feature 1..20: note = Artificial sequence related to HLA knockouts in cell therapy
  source 1..20: mol_type = other DNA
cgggtttccagagaagccaa

SEQ ID NO: 14999 - DNA, 20 bp, synthetic construct
  misc_feature 1..20: note = Artificial sequence related to HLA knockouts in cell therapy
  source 1..20: mol_type = other DNA
gggtttccagagaagccaat

SEQ ID NO: 15000 - DNA, 20 bp, synthetic construct
  misc_feature 1..20: note = Artificial sequence related to HLA knockouts in cell therapy
  source 1..20: mol_type = other DNA
ggtttccagagaagccaatc

SEQ ID NO: 15001 - DNA, 20 bp, synthetic construct
  misc_feature 1..20: note = Artificial sequence related to HLA knockouts in cell therapy
  source 1..20: mol_type = other DNA
gtttccagagaagccaatca

SEQ ID NO: 15002 - DNA, 20 bp, synthetic construct
  misc_feature 1..20: note = Artificial sequence related to HLA knockouts in cell therapy
  source 1..20: mol_type = other DNA
tttccagagaagccaatcag

SEQ ID NO: 15003 - DNA, 20 bp, synthetic construct
  misc_feature 1..20: note = Artificial sequence related to HLA knockouts in cell therapy
  source 1..20: mol_type = other DNA
ttccagagaagccaatcagt

SEQ ID NO: 15004 - DNA, 20 bp, synthetic construct
  misc_feature 1..20: note = Artificial sequence related to HLA knockouts in cell therapy
  source 1..20: mol_type = other DNA
tccagagaagccaatcagtg

SEQ ID NO: 15005 - DNA, 20 bp, synthetic construct
  misc_feature 1..20: note = Artificial sequence related to HLA knockouts in cell therapy
  source 1..20: mol_type = other DNA
ccagagaagccaatcagtgt

SEQ ID NO: 15006 - DNA, 20 bp, synthetic construct
  misc_feature 1..20: note = Artificial sequence related to HLA knockouts in cell therapy
  source 1..20: mol_type = other DNA
cagagaagccaatcagtgtc

SEQ ID NO: 15007 - DNA, 20 bp, synthetic construct
  misc_feature 1..20: note = Artificial sequence related to HLA knockouts in cell therapy
  source 1..20: mol_type = other DNA
agagaagccaatcagtgtcg

SEQ ID NO: 15008 - DNA, 20 bp, synthetic construct
  misc_feature 1..20: note = Artificial sequence related to HLA knockouts in cell therapy
  source 1..20: mol_type = other DNA
gagaagccaatcagtgtcgt

SEQ ID NO: 15009 - DNA, 20 bp, synthetic construct
  misc_feature 1..20: note = Artificial sequence related to HLA knockouts in cell therapy
  source 1..20: mol_type = other DNA
agaagccaatcagtgtcgtc

SEQ ID NO: 15010 - DNA, 20 bp, synthetic construct
  misc_feature 1..20: note = Artificial sequence related to HLA knockouts in cell therapy
  source 1..20: mol_type = other DNA
gaagccaatcagtgtcgtcg

SEQ ID NO: 15011 - DNA, 20 bp, synthetic construct
  misc_feature 1..20: note = Artificial sequence related to HLA knockouts in cell therapy
  source 1..20: mol_type = other DNA
aagccaatcagtgtcgtcgc

SEQ ID NO: 15012 - DNA, 20 bp, synthetic construct
  misc_feature 1..20: note = Artificial sequence related to HLA knockouts in cell therapy
  source 1..20: mol_type = other DNA
tcgcggttctaaagtccgca

SEQ ID NO: 15013 - DNA, 20 bp, synthetic construct
  misc_feature 1..20: note = Artificial sequence related to HLA knockouts in cell therapy
  source 1..20: mol_type = other DNA
ggttctaaagtccgcacgca

SEQ ID NO: 15014 - DNA, 20 bp, synthetic construct
  misc_feature 1..20: note = Artificial sequence related to HLA knockouts in cell therapy
  source 1..20: mol_type = other DNA
gttctaaagtccgcacgcac

SEQ ID NO: 15015 - DNA, 20 bp, synthetic construct
  misc_feature 1..20: note = Artificial sequence related to HLA knockouts in cell therapy
  source 1..20: mol_type = other DNA
ttctaaagtccgcacgcacc

SEQ ID NO: 15016 - DNA, 20 bp, synthetic construct
  misc_feature 1..20: note = Artificial sequence related to HLA knockouts in cell therapy
  source 1..20: mol_type = other DNA
aaccctcgtcctgctactct

SEQ ID NO: 15017 - DNA, 20 bp, synthetic construct
  misc_feature 1..20: note = Artificial sequence related to HLA knockouts in cell therapy
  source 1..20: mol_type = other DNA
ggctctcactccatgaggta

SEQ ID NO: 15018 - DNA, 20 bp, synthetic construct
  misc_feature 1..20: note = Artificial sequence related to HLA knockouts in cell therapy
  source 1..20: mol_type = other DNA
gctctcactccatgaggtat

SEQ ID NO: 15019 - DNA, 20 bp, synthetic construct
  misc_feature 1..20: note = Artificial sequence related to HLA knockouts in cell therapy
  source 1..20: mol_type = other DNA
ctctcactccatgaggtatt

SEQ ID NO: 15020 - DNA, 20 bp, synthetic construct
  misc_feature 1..20: note = Artificial sequence related to HLA knockouts in cell therapy
  source 1..20: mol_type = other DNA
tctcactccatgaggtattt

SEQ ID NO: 15021 - DNA, 20 bp, synthetic construct
  misc_feature 1..20: note = Artificial sequence related to HLA knockouts in cell therapy
  source 1..20: mol_type = other DNA
ctcactccatgaggtatttc

SEQ ID NO: 15022 - DNA, 20 bp, synthetic construct
  misc_feature 1..20: note = Artificial sequence related to HLA knockouts in cell therapy
  source 1..20: mol_type = other DNA
tcactccatgaggtatttct

SEQ ID NO: 15023 - DNA, 20 bp, synthetic construct
  misc_feature 1..20: note = Artificial sequence related to HLA knockouts in cell therapy
  source 1..20: mol_type = other DNA
cactccatgaggtatttctt

SEQ ID NO: 15024 - DNA, 20 bp, synthetic construct
  misc_feature 1..20: note = Artificial sequence related to HLA knockouts in cell therapy
  source 1..20: mol_type = other DNA
actccatgaggtatttcttc

SEQ ID NO: 15025 - DNA, 20 bp, synthetic construct
  misc_feature 1..20: note = Artificial sequence related to HLA knockouts in cell therapy
  source 1..20: mol_type = other DNA
ctccatgaggtatttcttca

SEQ ID NO: 15026 - DNA, 20 bp, synthetic construct
  misc_feature 1..20: note = Artificial sequence related to HLA knockouts in cell therapy
  source 1..20: mol_type = other DNA
tccatgaggtatttcttcac

SEQ ID NO: 15027 - DNA, 20 bp, synthetic construct
  misc_feature 1..20: note = Artificial sequence related to HLA knockouts in cell therapy
  source 1..20: mol_type = other DNA
ccatgaggtatttcttcaca

SEQ ID NO: 15028 - DNA, 20 bp, synthetic construct
  misc_feature 1..20: note = Artificial sequence related to HLA knockouts in cell therapy
  source 1..20: mol_type = other DNA
catgaggtatttcttcacat

SEQ ID NO: 15029 - DNA, 20 bp, synthetic construct
  misc_feature 1..20: note = Artificial sequence related to HLA knockouts in cell therapy
  source 1..20: mol_type = other DNA
atgaggtatttcttcacatc

SEQ ID NO: 15030 - DNA, 20 bp, synthetic construct
  misc_feature 1..20: note = Artificial sequence related to HLA knockouts in cell therapy
  source 1..20: mol_type = other DNA
tgaggtatttcttcacatcc

SEQ ID NO: 15031 - DNA, 20 bp, synthetic construct
  misc_feature 1..20: note = Artificial sequence related to HLA knockouts in cell therapy
  source 1..20: mol_type = other DNA
gaggtatttcttcacatccg

SEQ ID NO: 15032 - DNA, 20 bp, synthetic construct
  misc_feature 1..20: note = Artificial sequence related to HLA knockouts in cell therapy
  source 1..20: mol_type = other DNA
aggtatttcttcacatccgt

SEQ ID NO: 15033 - DNA, 20 bp, synthetic construct
  misc_feature 1..20: note = Artificial sequence related to HLA knockouts in cell therapy
  source 1..20: mol_type = other DNA
ggtatttcttcacatccgtg

SEQ ID NO: 15034 - DNA, 20 bp, synthetic construct
  misc_feature 1..20: note = Artificial sequence related to HLA knockouts in cell therapy
  source 1..20: mol_type = other DNA
gtatttcttcacatccgtgt

SEQ ID NO: 15035 - DNA, 20 bp, synthetic construct
  misc_feature 1..20: note = Artificial sequence related to HLA knockouts in cell therapy
  source 1..20: mol_type = other DNA
tatttcttcacatccgtgtc

SEQ ID NO: 15036 - DNA, 20 bp, synthetic construct
  misc_feature 1..20: note = Artificial sequence related to HLA knockouts in cell therapy
  source 1..20: mol_type = other DNA
atttcttcacatccgtgtcc

SEQ ID NO: 15037 - DNA, 20 bp, synthetic construct
  misc_feature 1..20: note = Artificial sequence related to HLA knockouts in cell therapy
  source 1..20: mol_type = other DNA
tttcttcacatccgtgtccc

SEQ ID NO: 15038 - DNA, 20 bp, synthetic construct
  misc_feature 1..20: note = Artificial sequence related to HLA knockouts in cell therapy
  source 1..20: mol_type = other DNA
ttcttcacatccgtgtcccg

SEQ ID NO: 15039 - DNA, 20 bp, synthetic construct
  misc_feature 1..20: note = Artificial sequence related to HLA knockouts in cell therapy
  source 1..20: mol_type = other DNA
ttcatcgcagtgggctacgt

SEQ ID NO: 15040 - DNA, 20 bp, synthetic construct
  misc_feature 1..20: note = Artificial sequence related to HLA knockouts in cell therapy
  source 1..20: mol_type = other DNA
tacgtggacgacacgcagtt

SEQ ID NO: 15041 - DNA, 20 bp, synthetic construct
  misc_feature 1..20: note = Artificial sequence related to HLA knockouts in cell therapy
  source 1..20: mol_type = other DNA
gggagacacggaaagtgaag

SEQ ID NO: 15042 - DNA, 20 bp, synthetic construct
  misc_feature 1..20: note = Artificial sequence related to HLA knockouts in cell therapy
  source 1..20: mol_type = other DNA
ggagacacggaaagtgaagg

SEQ ID NO: 15043 - DNA, 20 bp, synthetic construct
  misc_feature 1..20: note = Artificial sequence related to HLA knockouts in cell therapy
  source 1..20: mol_type = other DNA
gagacacggaaagtgaaggc

SEQ ID NO: 15044 - DNA, 20 bp, synthetic construct
  misc_feature 1..20: note = Artificial sequence related to HLA knockouts in cell therapy
  source 1..20: mol_type = other DNA
agacacggaaagtgaaggcc

SEQ ID NO: 15045 - DNA, 20 bp, synthetic construct
  misc_feature 1..20: note = Artificial sequence related to HLA knockouts in cell therapy
  source 1..20: mol_type = other DNA
acacggaaagtgaaggccca

SEQ ID NO: 15046 - DNA, 20 bp, synthetic construct
  misc_feature 1..20: note = Artificial sequence related to HLA knockouts in cell therapy
  source 1..20: mol_type = other DNA
acggaaagtgaaggcccact

SEQ ID NO: 15047 - DNA, 20 bp, synthetic construct
  misc_feature 1..20: note = Artificial sequence related to HLA knockouts in cell therapy
  source 1..20: mol_type = other DNA
ggaaagtgaaggcccactca

SEQ ID NO: 15048 - DNA, 20 bp, synthetic construct
  misc_feature 1..20: note = Artificial sequence related to HLA knockouts in cell therapy
  source 1..20: mol_type = other DNA
gaaagtgaaggcccactcac

SEQ ID NO: 15049 - DNA, 20 bp, synthetic construct
  misc_feature 1..20: note = Artificial sequence related to HLA knockouts in cell therapy
  source 1..20: mol_type = other DNA
aaagtgaaggcccactcaca

SEQ ID NO: 15050 - DNA, 20 bp, synthetic construct
  misc_feature 1..20: note = Artificial sequence related to HLA knockouts in cell therapy
  source 1..20: mol_type = other DNA
aagtgaaggcccactcacag

SEQ ID NO: 15051 - DNA, 20 bp, synthetic construct
  misc_feature 1..20: note = Artificial sequence related to HLA knockouts in cell therapy
  source 1..20: mol_type = other DNA
agtgaaggcccactcacaga

SEQ ID NO: 15052 - DNA, 20 bp, synthetic construct
  misc_feature 1..20: note = Artificial sequence related to HLA knockouts in cell therapy
  source 1..20: mol_type = other DNA
tgaaggcccactcacagact

SEQ ID NO: 15053 - DNA, 20 bp, synthetic construct
  misc_feature 1..20: note = Artificial sequence related to HLA knockouts in cell therapy
  source 1..20: mol_type = other DNA
aaggcccactcacagactca

SEQ ID NO: 15054 - DNA, 20 bp, synthetic construct
  misc_feature 1..20: note = Artificial sequence related to HLA knockouts in cell therapy
  source 1..20: mol_type = other DNA
cactcacagactcaccgagt

SEQ ID NO: 15055 - DNA, 20 bp, synthetic construct
  misc_feature 1..20: note = Artificial sequence related to HLA knockouts in cell therapy
  source 1..20: mol_type = other DNA
actcacagactcaccgagtg

SEQ ID NO: 15056 - DNA, 20 bp, synthetic construct
  misc_feature 1..20: note = Artificial sequence related to HLA knockouts in cell therapy
  source 1..20: mol_type = other DNA
tcacagactcaccgagtgga

SEQ ID NO: 15057 - DNA, 20 bp, synthetic construct
  misc_feature 1..20: note = Artificial sequence related to HLA knockouts in cell therapy
  source 1..20: mol_type = other DNA
ggctactacaaccagagcga

SEQ ID NO: 15058 - DNA, 20 bp, synthetic construct
  misc_feature 1..20: note = Artificial sequence related to HLA knockouts in cell therapy
  source 1..20: mol_type = other DNA
ctactacaaccagagcgagg

SEQ ID NO: 15059 - DNA, 20 bp, synthetic construct
  misc_feature 1..20: note = Artificial sequence related to HLA knockouts in cell therapy
  source 1..20: mol_type = other DNA
tactacaaccagagcgaggc

SEQ ID NO: 15060 - DNA, 20 bp, synthetic construct
  misc_feature 1..20: note = Artificial sequence related to HLA knockouts in cell therapy
  source 1..20: mol_type = other DNA
ttctcacaccgtccagagga

SEQ ID NO: 15061 - DNA, 20 bp, synthetic construct
  misc_feature 1..20: note = Artificial sequence related to HLA knockouts in cell therapy
  source 1..20: mol_type = other DNA
tctcacaccgtccagaggat

SEQ ID NO: 15062 - DNA, 20 bp, synthetic construct
  misc_feature 1..20: note = Artificial sequence related to HLA knockouts in cell therapy
  source 1..20: mol_type = other DNA
tcacaccgtccagaggatgt

SEQ ID NO: 15063 - DNA, 20 bp, synthetic construct
  misc_feature 1..20: note = Artificial sequence related to HLA knockouts in cell therapy
  source 1..20: mol_type = other DNA
cacaccgtccagaggatgta

SEQ ID NO: 15064 - DNA, 20 bp, synthetic construct
  misc_feature 1..20: note = Artificial sequence related to HLA knockouts in cell therapy
  source 1..20: mol_type = other DNA
acaccgtccagaggatgtat

SEQ ID NO: 15065 - DNA, 20 bp, synthetic construct
  misc_feature 1..20: note = Artificial sequence related to HLA knockouts in cell therapy
  source 1..20: mol_type = other DNA
caccgtccagaggatgtatg

SEQ ID NO: 15066 - DNA, 20 bp, synthetic construct
  misc_feature 1..20: note = Artificial sequence related to HLA knockouts in cell therapy
  source 1..20: mol_type = other DNA
accgtccagaggatgtatgg

SEQ ID NO: 15067 - DNA, 20 bp, synthetic construct
  misc_feature 1..20: note = Artificial sequence related to HLA knockouts in cell therapy
  source 1..20: mol_type = other DNA
cgtccagaggatgtatggct

SEQ ID NO: 15068 - DNA, 20 bp, synthetic construct
  misc_feature 1..20: note = Artificial sequence related to HLA knockouts in cell therapy
  source 1..20: mol_type = other DNA
gtccagaggatgtatggctg

SEQ ID NO: 15069 - DNA, 20 bp, synthetic construct
  misc_feature 1..20: note = Artificial sequence related to HLA knockouts in cell therapy
  source 1..20: mol_type = other DNA
tccagaggatgtatggctgc

SEQ ID NO: 15070 - DNA, 20 bp, synthetic construct
  misc_feature 1..20: note = Artificial sequence related to HLA knockouts in cell therapy
  source 1..20: mol_type = other DNA
cagaggatgtatggctgcga

SEQ ID NO: 15071 - DNA, 20 bp, synthetic construct
  misc_feature 1..20: note = Artificial sequence related to HLA knockouts in cell therapy
  source 1..20: mol_type = other DNA
agaggatgtatggctgcgac

SEQ ID NO: 15072 - DNA, 20 bp, synthetic construct
  misc_feature 1..20: note = Artificial sequence related to HLA knockouts in cell therapy
  source 1..20: mol_type = other DNA
aggatgtatggctgcgacgt

SEQ ID NO: 15073 - DNA, 20 bp, synthetic construct
  misc_feature 1..20: note = Artificial sequence related to HLA knockouts in cell therapy
  source 1..20: mol_type = other DNA
taccaccagtacgcctacga

SEQ ID NO: 15074 - DNA, 20 bp, synthetic construct
  misc_feature 1..20: note = Artificial sequence related to HLA knockouts in cell therapy
  source 1..20: mol_type = other DNA
gcctacgacggcaaggatta

SEQ ID NO: 15075 - DNA, 20 bp, synthetic construct
  misc_feature 1..20: note = Artificial sequence related to HLA knockouts in cell therapy
  source 1..20: mol_type = other DNA
cctacgacggcaaggattac

SEQ ID NO: 15076 - DNA, 20 bp, synthetic construct
  misc_feature 1..20: note = Artificial sequence related to HLA knockouts in cell therapy
  source 1..20: mol_type = other DNA
ctacgacggcaaggattaca

SEQ ID NO: 15077 - DNA, 20 bp, synthetic construct
  misc_feature 1..20: note = Artificial sequence related to HLA knockouts in cell therapy
  source 1..20: mol_type = other DNA
tacgacggcaaggattacat

SEQ ID NO: 15078 - DNA, 20 bp, synthetic construct
  misc_feature 1..20: note = Artificial sequence related to HLA knockouts in cell therapy
  source 1..20: mol_type = other DNA
acgacggcaaggattacatc

SEQ ID NO: 15079 - DNA, 20 bp, synthetic construct
  misc_feature 1..20: note = Artificial sequence related to HLA knockouts in cell therapy
  source 1..20: mol_type = other DNA
cgacggcaaggattacatcg

SEQ ID NO: 15080 - DNA, 20 bp, synthetic construct
  misc_feature 1..20: note = Artificial sequence related to HLA knockouts in cell therapy
  source 1..20: mol_type = other DNA
gacggcaaggattacatcgc

SEQ ID NO: 15081 - DNA, 20 bp, synthetic construct
  misc_feature 1..20: note = Artificial sequence related to HLA knockouts in cell therapy
  source 1..20: mol_type = other DNA
acggcaaggattacatcgcc

SEQ ID NO: 15082 - DNA, 20 bp, synthetic construct
  misc_feature 1..20: note = Artificial sequence related to HLA knockouts in cell therapy
  source 1..20: mol_type = other DNA
ggcaaggattacatcgccct

SEQ ID NO: 15083 - DNA, 20 bp, synthetic construct
  misc_feature 1..20: note = Artificial sequence related to HLA knockouts in cell therapy
  source 1..20: mol_type = other DNA
gcaaggattacatcgccctg

SEQ ID NO: 15084 - DNA, 20 bp, synthetic construct
  misc_feature 1..20: note = Artificial sequence related to HLA knockouts in cell therapy
  source 1..20: mol_type = other DNA
caaggattacatcgccctga

SEQ ID NO: 15085 - DNA, 20 bp, synthetic construct
  misc_feature 1..20: note = Artificial sequence related to HLA knockouts in cell therapy
  source 1..20: mol_type = other DNA
aaggattacatcgccctgaa

SEQ ID NO: 15086 - DNA, 20 bp, synthetic construct
  misc_feature 1..20: note = Artificial sequence related to HLA knockouts in cell therapy
  source 1..20: mol_type = other DNA
aggattacatcgccctgaaa

SEQ ID NO: 15087 - DNA, 20 bp, synthetic construct
  misc_feature 1..20: note = Artificial sequence related to HLA knockouts in cell therapy
  source 1..20: mol_type = other DNA
gattacatcgccctgaaaga

SEQ ID NO: 15088 - DNA, 20 bp, synthetic construct
  misc_feature 1..20: note = Artificial sequence related to HLA knockouts in cell therapy
  source 1..20: mol_type = other DNA
attacatcgccctgaaagag

SEQ ID NO: 15089 - DNA, 20 bp, synthetic construct
  misc_feature 1..20: note = Artificial sequence related to HLA knockouts in cell therapy
  source 1..20: mol_type = other DNA
ttacatcgccctgaaagagg

SEQ ID NO: 15090 - DNA, 20 bp, synthetic construct
  misc_feature 1..20: note = Artificial sequence related to HLA knockouts in cell therapy
  source 1..20: mol_type = other DNA
tacatcgccctgaaagagga

SEQ ID NO: 15091 - DNA, 20 bp, synthetic construct
  misc_feature 1..20: note = Artificial sequence related to HLA knockouts in cell therapy
  source 1..20: mol_type = other DNA
acatcgccctgaaagaggac

SEQ ID NO: 15092 - DNA, 20 bp, synthetic construct
  misc_feature 1..20: note = Artificial sequence related to HLA knockouts in cell therapy
  source 1..20: mol_type = other DNA
atcgccctgaaagaggacct

SEQ ID NO: 15093 - DNA, 20 bp, synthetic construct
  misc_feature 1..20: note = Artificial sequence related to HLA knockouts in cell therapy
  source 1..20: mol_type = other DNA
tgaaagaggacctgcgctct

SEQ ID NO: 15094 - DNA, 20 bp, synthetic construct
  misc_feature 1..20: note = Artificial sequence related to HLA knockouts in cell therapy
  source 1..20: mol_type = other DNA
gaaagaggacctgcgctctt

SEQ ID NO: 15095 - DNA, 20 bp, synthetic construct
  misc_feature 1..20: note = Artificial sequence related to HLA knockouts in cell therapy
  source 1..20: mol_type = other DNA
aaagaggacctgcgctcttg

SEQ ID NO: 15096 - DNA, 20 bp, synthetic construct
  misc_feature 1..20: note = Artificial sequence related to HLA knockouts in cell therapy
  source 1..20: mol_type = other DNA
atggcagctcagaccaccaa

SEQ ID NO: 15097 - DNA, 20 bp, synthetic construct
  misc_feature 1..20: note = Artificial sequence related to HLA knockouts in cell therapy
  source 1..20: mol_type = other DNA
agctcagaccaccaagcaca

SEQ ID NO: 15098 - DNA, 20 bp, synthetic construct
  misc_feature 1..20: note = Artificial sequence related to HLA knockouts in cell therapy
  source 1..20: mol_type = other DNA
gctcagaccaccaagcacaa

SEQ ID NO: 15099 - DNA, 20 bp, synthetic construct
  misc_feature 1..20: note = Artificial sequence related to HLA knockouts in cell therapy
  source 1..20: mol_type = other DNA
ctcagaccaccaagcacaag

SEQ ID NO: 15100 - DNA, 20 bp, synthetic construct
  misc_feature 1..20: note = Artificial sequence related to HLA knockouts in cell therapy
  source 1..20: mol_type = other DNA
tcagaccaccaagcacaagt

SEQ ID NO: 15101 - DNA, 20 bp, synthetic construct
  misc_feature 1..20: note = Artificial sequence related to HLA knockouts in cell therapy
  source 1..20: mol_type = other DNA
cagaccaccaagcacaagtg

SEQ ID NO: 15102 - DNA, 20 bp, synthetic construct
  misc_feature 1..20: note = Artificial sequence related to HLA knockouts in cell therapy
  source 1..20: mol_type = other DNA
agaccaccaagcacaagtgg

SEQ ID NO: 15103 - DNA, 20 bp, synthetic construct
  misc_feature 1..20: note = Artificial sequence related to HLA knockouts in cell therapy
  source 1..20: mol_type = other DNA
accaccaagcacaagtggga

SEQ ID NO: 15104 - DNA, 20 bp, synthetic construct
  misc_feature 1..20: note = Artificial sequence related to HLA knockouts in cell therapy
  source 1..20: mol_type = other DNA
atgtggcggagcagttgaga

SEQ ID NO: 15105 - DNA, 20 bp, synthetic construct
  misc_feature 1..20: note = Artificial sequence related to HLA knockouts in cell therapy
  source 1..20: mol_type = other DNA
gagcagttgagagcctacct

SEQ ID NO: 15106 - DNA, 20 bp, synthetic construct
  misc_feature 1..20: note = Artificial sequence related to HLA knockouts in cell therapy
  source 1..20: mol_type = other DNA
agcagttgagagcctacctg

SEQ ID NO: 15107 - DNA, 20 bp, synthetic construct
  misc_feature 1..20: note = Artificial sequence related to HLA knockouts in cell therapy
  source 1..20: mol_type = other DNA
cagttgagagcctacctgga

SEQ ID NO: 15108 - DNA, 20 bp, synthetic construct
  misc_feature 1..20: note = Artificial sequence related to HLA knockouts in cell therapy
  source 1..20: mol_type = other DNA
agttgagagcctacctggag

SEQ ID NO: 15109 - DNA, 20 bp, synthetic construct
  misc_feature 1..20: note = Artificial sequence related to HLA knockouts in cell therapy
  source 1..20: mol_type = other DNA
ctccgcagatacctggagaa

SEQ ID NO: 15110 - DNA, 20 bp, synthetic construct
  misc_feature 1..20: note = Artificial sequence related to HLA knockouts in cell therapy
  source 1..20: mol_type = other DNA
tccgcagatacctggagaac

SEQ ID NO: 15111 - DNA, 20 bp, synthetic construct
  misc_feature 1..20: note = Artificial sequence related to HLA knockouts in cell therapy
  source 1..20: mol_type = other DNA
cagatacctggagaacggga

SEQ ID NO: 15112 - DNA, 20 bp, synthetic construct
  misc_feature 1..20: note = Artificial sequence related to HLA knockouts in cell therapy
  source 1..20: mol_type = other DNA
agatacctggagaacgggaa

SEQ ID NO: 15113 - DNA, 20 bp, synthetic construct
  misc_feature 1..20: note = Artificial sequence related to HLA knockouts in cell therapy
  source 1..20: mol_type = other DNA
atacctggagaacgggaagg

SEQ ID NO: 15114 - DNA, 20 bp, synthetic construct
  misc_feature 1..20: note = Artificial sequence related to HLA knockouts in cell therapy
  source 1..20: mol_type = other DNA
tacctggagaacgggaagga

SEQ ID NO: 15115 - DNA, 20 bp, synthetic construct
  misc_feature 1..20: note = Artificial sequence related to HLA knockouts in cell therapy
  source 1..20: mol_type = other DNA
aaacgcatatgactcaccac

SEQ ID NO: 15116 - DNA, 20 bp, synthetic construct
  misc_feature 1..20: note = Artificial sequence related to HLA knockouts in cell therapy
  source 1..20: mol_type = other DNA
aacgcatatgactcaccacg

SEQ ID NO: 15117 - DNA, 20 bp, synthetic construct
  misc_feature 1..20: note = Artificial sequence related to HLA knockouts in cell therapy
  source 1..20: mol_type = other DNA
acgcatatgactcaccacgc

SEQ ID NO: 15118 - DNA, 20 bp, synthetic construct
  misc_feature 1..20: note = Artificial sequence related to HLA knockouts in cell therapy
  source 1..20: mol_type = other DNA
cgcatatgactcaccacgct

SEQ ID NO: 15119 - DNA, 20 bp, synthetic construct
  misc_feature 1..20: note = Artificial sequence related to HLA knockouts in cell therapy
  source 1..20: mol_type = other DNA
gcatatgactcaccacgctg

SEQ ID NO: 15120 - DNA, 20 bp, synthetic construct
  misc_feature 1..20: note = Artificial sequence related to HLA knockouts in cell therapy
  source 1..20: mol_type = other DNA
catatgactcaccacgctgt

SEQ ID NO: 15121 - DNA, 20 bp, synthetic construct
  misc_feature 1..20: note = Artificial sequence related to HLA knockouts in cell therapy
  source 1..20: mol_type = other DNA
atatgactcaccacgctgtc

SEQ ID NO: 15122 - DNA, 20 bp, synthetic construct
  misc_feature 1..20: note = Artificial sequence related to HLA knockouts in cell therapy
  source 1..20: mol_type = other DNA
tatgactcaccacgctgtct

SEQ ID NO: 15123 - DNA, 20 bp, synthetic construct
  misc_feature 1..20: note = Artificial sequence related to HLA knockouts in cell therapy
  source 1..20: mol_type = other DNA
atgactcaccacgctgtctc

SEQ ID NO: 15124 - DNA, 20 bp, synthetic construct
  misc_feature 1..20: note = Artificial sequence related to HLA knockouts in cell therapy
  source 1..20: mol_type = other DNA
tgactcaccacgctgtctct

SEQ ID NO: 15125 - DNA, 20 bp, synthetic construct
  misc_feature 1..20: note = Artificial sequence related to HLA knockouts in cell therapy
  source 1..20: mol_type = other DNA
actcaccacgctgtctctga

SEQ ID NO: 15126 - DNA, 20 bp, synthetic construct
  misc_feature 1..20: note = Artificial sequence related to HLA knockouts in cell therapy
  source 1..20: mol_type = other DNA
accacgctgtctctgaccat

SEQ ID NO: 15127 - DNA, 20 bp, synthetic construct
  misc_feature 1..20: note = Artificial sequence related to HLA knockouts in cell therapy
  source 1..20: mol_type = other DNA
cacgctgtctctgaccatga

SEQ ID NO: 15128 - DNA, 20 bp, synthetic construct
  misc_feature 1..20: note = Artificial sequence related to HLA knockouts in cell therapy
  source 1..20: mol_type = other DNA
acgctgtctctgaccatgaa

SEQ ID NO: 15129 - DNA, 20 bp, synthetic construct
  misc_feature 1..20: note = Artificial sequence related to HLA knockouts in cell therapy
  source 1..20: mol_type = other DNA
cgctgtctctgaccatgaag

SEQ ID NO: 15130 - DNA, 20 bp, synthetic construct
  misc_feature 1..20: note = Artificial sequence related to HLA knockouts in cell therapy
  source 1..20: mol_type = other DNA
gctgtctctgaccatgaagc

SEQ ID NO: 15131 - DNA, 20 bp, synthetic construct
  misc_feature 1..20: note = Artificial sequence related to HLA knockouts in cell therapy
  source 1..20: mol_type = other DNA
ctgtctctgaccatgaagcc

SEQ ID NO: 15132 - DNA, 20 bp, synthetic construct
  misc_feature 1..20: note = Artificial sequence related to HLA knockouts in cell therapy
  source 1..20: mol_type = other DNA
tgtctctgaccatgaagcca

SEQ ID NO: 15133 - DNA, 20 bp, synthetic construct
  misc_feature 1..20: note = Artificial sequence related to HLA knockouts in cell therapy
  source 1..20: mol_type = other DNA
gtctctgaccatgaagccac

SEQ ID NO: 15134 - DNA, 20 bp, synthetic construct
  misc_feature 1..20: note = Artificial sequence related to HLA knockouts in cell therapy
  source 1..20: mol_type = other DNA
tctctgaccatgaagccacc

SEQ ID NO: 15135 - DNA, 20 bp, synthetic construct
  misc_feature 1..20: note = Artificial sequence related to HLA knockouts in cell therapy
  source 1..20: mol_type = other DNA
tctgaccatgaagccaccct

SEQ ID NO: 15136 - DNA, 20 bp, synthetic construct
  misc_feature 1..20: note = Artificial sequence related to HLA knockouts in cell therapy
  source 1..20: mol_type = other DNA
tgaccatgaagccaccctga

SEQ ID NO: 15137 - DNA, 20 bp, synthetic construct
  misc_feature 1..20: note = Artificial sequence related to HLA knockouts in cell therapy
  source 1..20: mol_type = other DNA
agcttctaccctgcggagat

SEQ ID NO: 15138 - DNA, 20 bp, synthetic construct
  misc_feature 1..20: note = Artificial sequence related to HLA knockouts in cell therapy
  source 1..20: mol_type = other DNA
cttctaccctgcggagatca

SEQ ID NO: 15139 - DNA, 20 bp, synthetic construct
  misc_feature 1..20: note = Artificial sequence related to HLA knockouts in cell therapy
  source 1..20: mol_type = other DNA
ttctaccctgcggagatcac

SEQ ID NO: 15140 - DNA, 20 bp, synthetic construct
  misc_feature 1..20: note = Artificial sequence related to HLA knockouts in cell therapy
  source 1..20: mol_type = other DNA
tctaccctgcggagatcaca

SEQ ID NO: 15141 - DNA, 20 bp, synthetic construct
  misc_feature 1..20: note = Artificial sequence related to HLA knockouts in cell therapy
  source 1..20: mol_type = other DNA
taccctgcggagatcacact

SEQ ID NO: 15142 - DNA, 20 bp, synthetic construct
  misc_feature 1..20: note = Artificial sequence related to HLA knockouts in cell therapy
  source 1..20: mol_type = other DNA
tgcggagatcacactgacct

SEQ ID NO: 15143 - DNA, 20 bp, synthetic construct
  misc_feature 1..20: note = Artificial sequence related to HLA knockouts in cell therapy
  source 1..20: mol_type = other DNA
gagatcacactgacctggca

SEQ ID NO: 15144 - DNA, 20 bp, synthetic construct
  misc_feature 1..20: note = Artificial sequence related to HLA knockouts in cell therapy
  source 1..20: mol_type = other DNA
agatcacactgacctggcag

SEQ ID NO: 15145 - DNA, 20 bp, synthetic construct
  misc_feature 1..20: note = Artificial sequence related to HLA knockouts in cell therapy
  source 1..20: mol_type = other DNA
gggatggaaccttccagaag

SEQ ID NO: 15146 - DNA, 20 bp, synthetic construct
  misc_feature 1..20: note = Artificial sequence related to HLA knockouts in cell therapy
  source 1..20: mol_type = other DNA
ggatggaaccttccagaagt

SEQ ID NO: 15147 - DNA, 20 bp, synthetic construct
  misc_feature 1..20: note = Artificial sequence related to HLA knockouts in cell therapy
  source 1..20: mol_type = other DNA
gatggaaccttccagaagtg

SEQ ID NO: 15148 - DNA, 20 bp, synthetic construct
  misc_feature 1..20: note = Artificial sequence related to HLA knockouts in cell therapy
  source 1..20: mol_type = other DNA
atggaaccttccagaagtgg

SEQ ID NO: 15149 - DNA, 20 bp, synthetic construct
  misc_feature 1..20: note = Artificial sequence related to HLA knockouts in cell therapy
  source 1..20: mol_type = other DNA
tggaaccttccagaagtggg

SEQ ID NO: 15150 - DNA, 20 bp, synthetic construct
  misc_feature 1..20: note = Artificial sequence related to HLA knockouts in cell therapy
  source 1..20: mol_type = other DNA
cttctggacaggagcagaga

SEQ ID NO: 15151 - DNA, 20 bp, synthetic construct
  misc_feature 1..20: note = Artificial sequence related to HLA knockouts in cell therapy
  source 1..20: mol_type = other DNA
ttctggacaggagcagagat

SEQ ID NO: 15152 - DNA, 20 bp, synthetic construct
  misc_feature 1..20: note = Artificial sequence related to HLA knockouts in cell therapy
  source 1..20: mol_type = other DNA
tctggacaggagcagagata

SEQ ID NO: 15153 - DNA, 20 bp, synthetic construct
  misc_feature 1..20: note = Artificial sequence related to HLA knockouts in cell therapy
  source 1..20: mol_type = other DNA
ctggacaggagcagagatac

SEQ ID NO: 15154 - DNA, 20 bp, synthetic construct
  misc_feature 1..20: note = Artificial sequence related to HLA knockouts in cell therapy
  source 1..20: mol_type = other DNA
tggacaggagcagagataca

SEQ ID NO: 15155 - DNA, 20 bp, synthetic construct
  misc_feature 1..20: note = Artificial sequence related to HLA knockouts in cell therapy
  source 1..20: mol_type = other DNA
ggacaggagcagagatacac

SEQ ID NO: 15156 - DNA, 20 bp, synthetic construct
  misc_feature 1..20: note = Artificial sequence related to HLA knockouts in cell therapy
  source 1..20: mol_type = other DNA
gacaggagcagagatacacc

SEQ ID NO: 15157 - DNA, 20 bp, synthetic construct
  misc_feature 1..20: note = Artificial sequence related to HLA knockouts in cell therapy
  source 1..20: mol_type = other DNA
acaggagcagagatacacct

SEQ ID NO: 15158 - DNA, 20 bp, synthetic construct
  misc_feature 1..20: note = Artificial sequence related to HLA knockouts in cell therapy
  source 1..20: mol_type = other DNA
caggagcagagatacacctg

SEQ ID NO: 15159 - DNA, 20 bp, synthetic construct
  misc_feature 1..20: note = Artificial sequence related to HLA knockouts in cell therapy
  source 1..20: mol_type = other DNA
aggagcagagatacacctgc

SEQ ID NO: 15160 - DNA, 20 bp, synthetic construct
  misc_feature 1..20: note = Artificial sequence related to HLA knockouts in cell therapy
  source 1..20: mol_type = other DNA
gagcagagatacacctgcca

SEQ ID NO: 15161 - DNA, 20 bp, synthetic construct
  misc_feature 1..20: note = Artificial sequence related to HLA knockouts in cell therapy
  source 1..20: mol_type = other DNA
agcagagatacacctgccat

SEQ ID NO: 15162 - DNA, 20 bp, synthetic construct
  misc_feature 1..20: note = Artificial sequence related to HLA knockouts in cell therapy
  source 1..20: mol_type = other DNA
gcagagatacacctgccatg

SEQ ID NO: 15163 - DNA, 20 bp, synthetic construct
  misc_feature 1..20: note = Artificial sequence related to HLA knockouts in cell therapy
  source 1..20: mol_type = other DNA
cagagatacacctgccatgt

SEQ ID NO: 15164 - DNA, 20 bp, synthetic construct
  misc_feature 1..20: note = Artificial sequence related to HLA knockouts in cell therapy
  source 1..20: mol_type = other DNA
agagatacacctgccatgtg

SEQ ID NO: 15165 - DNA, 20 bp, synthetic construct
  misc_feature 1..20: note = Artificial sequence related to HLA knockouts in cell therapy
  source 1..20: mol_type = other DNA
gagatacacctgccatgtgc

SEQ ID NO: 15166 - DNA, 20 bp, synthetic construct
  misc_feature 1..20: note = Artificial sequence related to HLA knockouts in cell therapy
  source 1..20: mol_type = other DNA
agatacacctgccatgtgca

SEQ ID NO: 15167 - DNA, 20 bp, synthetic construct
  misc_feature 1..20: note = Artificial sequence related to HLA knockouts in cell therapy
  source 1..20: mol_type = other DNA
gatacacctgccatgtgcag

SEQ ID NO: 15168 - DNA, 20 bp, synthetic construct
  misc_feature 1..20: note = Artificial sequence related to HLA knockouts in cell therapy
  source 1..20: mol_type = other DNA
atacacctgccatgtgcagc

SEQ ID NO: 15169 - DNA, 20 bp, synthetic construct
  misc_feature 1..20: note = Artificial sequence related to HLA knockouts in cell therapy
  source 1..20: mol_type = other DNA
tacacctgccatgtgcagca

SEQ ID NO: 15170 - DNA, 20 bp, synthetic construct
  misc_feature 1..20: note = Artificial sequence related to HLA knockouts in cell therapy
  source 1..20: mol_type = other DNA
acacctgccatgtgcagcat

SEQ ID NO: 15171 - DNA, 20 bp, synthetic construct
  misc_feature 1..20: note = Artificial sequence related to HLA knockouts in cell therapy
  source 1..20: mol_type = other DNA
acctgccatgtgcagcatga

SEQ ID NO: 15172 - DNA, 20 bp, synthetic construct
  misc_feature 1..20: note = Artificial sequence related to HLA knockouts in cell therapy
  source 1..20: mol_type = other DNA
ccatgtgcagcatgagggtt

SEQ ID NO: 15173 - DNA, 20 bp, synthetic construct
  misc_feature 1..20: note = Artificial sequence related to HLA knockouts in cell therapy
  source 1..20: mol_type = other DNA
catgtgcagcatgagggttt

SEQ ID NO: 15174 - DNA, 20 bp, synthetic construct
  misc_feature 1..20: note = Artificial sequence related to HLA knockouts in cell therapy
  source 1..20: mol_type = other DNA
atgtgcagcatgagggtttg

SEQ ID NO: 15175 - DNA, 20 bp, synthetic construct
  misc_feature 1..20: note = Artificial sequence related to HLA knockouts in cell therapy
  source 1..20: mol_type = other DNA
tgtgcagcatgagggtttgc

SEQ ID NO: 15176 - DNA, 20 bp, synthetic construct
  misc_feature 1..20: note = Artificial sequence related to HLA knockouts in cell therapy
  source 1..20: mol_type = other DNA
cagcatgagggtttgcccaa

SEQ ID NO: 15177 - DNA, 20 bp, synthetic construct
  misc_feature 1..20: note = Artificial sequence related to HLA knockouts in cell therapy
  source 1..20: mol_type = other DNA
agcatgagggtttgcccaag

SEQ ID NO: 15178 - DNA, 20 bp, synthetic construct
  misc_feature 1..20: note = Artificial sequence related to HLA knockouts in cell therapy
  source 1..20: mol_type = other DNA
ccatcgtgggcatcattgct

SEQ ID NO: 15179 - DNA, 20 bp, synthetic construct
  misc_feature 1..20: note = Artificial sequence related to HLA knockouts in cell therapy
  source 1..20: mol_type = other DNA
catcgtgggcatcattgctg

SEQ ID NO: 15180 - DNA, 20 bp, synthetic construct
  misc_feature 1..20: note = Artificial sequence related to HLA knockouts in cell therapy
  source 1..20: mol_type = other DNA
atcgtgggcatcattgctgg

SEQ ID NO: 15181 - DNA, 20 bp, synthetic construct
  misc_feature 1..20: note = Artificial sequence related to HLA knockouts in cell therapy
  source 1..20: mol_type = other DNA
gcatcattgctggcctggtt

SEQ ID NO: 15182 - DNA, 20 bp, synthetic construct
  misc_feature 1..20: note = Artificial sequence related to HLA knockouts in cell therapy
  source 1..20: mol_type = other DNA
catcattgctggcctggttc

SEQ ID NO: 15183 - DNA, 20 bp, synthetic construct
  misc_feature 1..20: note = Artificial sequence related to HLA knockouts in cell therapy
  source 1..20: mol_type = other DNA
atcattgctggcctggttct

SEQ ID NO: 15184 - DNA, 20 bp, synthetic construct
  misc_feature 1..20: note = Artificial sequence related to HLA knockouts in cell therapy
  source 1..20: mol_type = other DNA
tcattgctggcctggttctc

SEQ ID NO: 15185 - DNA, 20 bp, synthetic construct
  misc_feature 1..20: note = Artificial sequence related to HLA knockouts in cell therapy
  source 1..20: mol_type = other DNA
cattgctggcctggttctct

SEQ ID NO: 15186 - DNA, 20 bp, synthetic construct
  misc_feature 1..20: note = Artificial sequence related to HLA knockouts in cell therapy
  source 1..20: mol_type = other DNA
attgctggcctggttctctt

SEQ ID NO: 15187 - DNA, 20 bp, synthetic construct
  misc_feature 1..20: note = Artificial sequence related to HLA knockouts in cell therapy
  source 1..20: mol_type = other DNA
ttgctggcctggttctcttt

SEQ ID NO: 15188 - DNA, 20 bp, synthetic construct
  misc_feature 1..20: note = Artificial sequence related to HLA knockouts in cell therapy
  source 1..20: mol_type = other DNA
tgctggcctggttctctttg

SEQ ID NO: 15189 - DNA, 20 bp, synthetic construct
  misc_feature 1..20: note = Artificial sequence related to HLA knockouts in cell therapy
  source 1..20: mol_type = other DNA
ctggcctggttctctttgga

SEQ ID NO: 15190 - DNA, 20 bp, synthetic construct
  misc_feature 1..20: note = Artificial sequence related to HLA knockouts in cell therapy
  source 1..20: mol_type = other DNA
tggcctggttctctttggag

SEQ ID NO: 15191 - DNA, 20 bp, synthetic construct
  misc_feature 1..20: note = Artificial sequence related to HLA knockouts in cell therapy
  source 1..20: mol_type = other DNA
gcctggttctctttggagct

SEQ ID NO: 15192 - DNA, 20 bp, synthetic construct
  misc_feature 1..20: note = Artificial sequence related to HLA knockouts in cell therapy
  source 1..20: mol_type = other DNA
cctggttctctttggagctg

SEQ ID NO: 15193 - DNA, 20 bp, synthetic construct
  misc_feature 1..20: note = Artificial sequence related to HLA knockouts in cell therapy
  source 1..20: mol_type = other DNA
ctggttctctttggagctgt

SEQ ID NO: 15194 - DNA, 20 bp, synthetic construct
  misc_feature 1..20: note = Artificial sequence related to HLA knockouts in cell therapy
  source 1..20: mol_type = other DNA
tggttctctttggagctgtg

SEQ ID NO: 15195 - DNA, 20 bp, synthetic construct
  misc_feature 1..20: note = Artificial sequence related to HLA knockouts in cell therapy
  source 1..20: mol_type = other DNA
ggttctctttggagctgtga

SEQ ID NO: 15196 - DNA, 20 bp, synthetic construct
  misc_feature 1..20: note = Artificial sequence related to HLA knockouts in cell therapy
  source 1..20: mol_type = other DNA
gttctctttggagctgtgat

SEQ ID NO: 15197 - DNA, 20 bp, synthetic construct
  misc_feature 1..20: note = Artificial sequence related to HLA knockouts in cell therapy
  source 1..20: mol_type = other DNA
ttctctttggagctgtgatc

SEQ ID NO: 15198 - DNA, 20 bp, synthetic construct
  misc_feature 1..20: note = Artificial sequence related to HLA knockouts in cell therapy
  source 1..20: mol_type = other DNA
tctctttggagctgtgatca

SEQ ID NO: 15199 - DNA, 20 bp, synthetic construct
  misc_feature 1..20: note = Artificial sequence related to HLA knockouts in cell therapy
  source 1..20: mol_type = other DNA
ctctttggagctgtgatcac

SEQ ID NO: 15200 - DNA, 20 bp, synthetic construct
  misc_feature 1..20: note = Artificial sequence related to HLA knockouts in cell therapy
  source 1..20: mol_type = other DNA
tctttggagctgtgatcact

SEQ ID NO: 15201 - DNA, 20 bp, synthetic construct
  misc_feature 1..20: note = Artificial sequence related to HLA knockouts in cell therapy
  source 1..20: mol_type = other DNA
ctttggagctgtgatcactg

SEQ ID NO: 15202 - DNA, 20 bp, synthetic construct
  misc_feature 1..20: note = Artificial sequence related to HLA knockouts in cell therapy
  source 1..20: mol_type = other DNA
tttggagctgtgatcactgg

SEQ ID NO: 15203 - DNA, 20 bp, synthetic construct
  misc_feature 1..20: note = Artificial sequence related to HLA knockouts in cell therapy
  source 1..20: mol_type = other DNA
ttggagctgtgatcactgga

SEQ ID NO: 15204 - DNA, 20 bp, synthetic construct
  misc_feature 1..20: note = Artificial sequence related to HLA knockouts in cell therapy
  source 1..20: mol_type = other DNA
tggagctgtgatcactggag

SEQ ID NO: 15205 - DNA, 20 bp, synthetic construct
  misc_feature 1..20: note = Artificial sequence related to HLA knockouts in cell therapy
  source 1..20: mol_type = other DNA
gagctgtgatcactggagct

SEQ ID NO: 15206 - DNA, 20 bp, synthetic construct
  misc_feature 1..20: note = Artificial sequence related to HLA knockouts in cell therapy
  source 1..20: mol_type = other DNA
agctgtgatcactggagctg

SEQ ID NO: 15207 - DNA, 20 bp, synthetic construct
  misc_feature 1..20: note = Artificial sequence related to HLA knockouts in cell therapy
  source 1..20: mol_type = other DNA
gctgtgatcactggagctgt

SEQ ID NO: 15208 - DNA, 20 bp, synthetic construct
  misc_feature 1..20: note = Artificial sequence related to HLA knockouts in cell therapy
  source 1..20: mol_type = other DNA
ctgtgatcactggagctgtg

SEQ ID NO: 15209 - DNA, 20 bp, synthetic construct
  misc_feature 1..20: note = Artificial sequence related to HLA knockouts in cell therapy
  source 1..20: mol_type = other DNA
tgtgatcactggagctgtgg

SEQ ID NO: 15210 - DNA, 20 bp, synthetic construct
  misc_feature 1..20: note = Artificial sequence related to HLA knockouts in cell therapy
  source 1..20: mol_type = other DNA
gtgatcactggagctgtggt

SEQ ID NO: 15211 - DNA, 20 bp, synthetic construct
  misc_feature 1..20: note = Artificial sequence related to HLA knockouts in cell therapy
  source 1..20: mol_type = other DNA
tgatcactggagctgtggtc

SEQ ID NO: 15212 - DNA, 20 bp, synthetic construct
  misc_feature 1..20: note = Artificial sequence related to HLA knockouts in cell therapy
  source 1..20: mol_type = other DNA
tgtggtcgctgctgtgatgt

SEQ ID NO: 15213 - DNA, 20 bp, synthetic construct
  misc_feature 1..20: note = Artificial sequence related to HLA knockouts in cell therapy
  source 1..20: mol_type = other DNA
tgctgtgatgtggaggagga

SEQ ID NO: 15214 - DNA, 20 bp, synthetic construct
  misc_feature 1..20: note = Artificial sequence related to HLA knockouts in cell therapy
  source 1..20: mol_type = other DNA
gctgtgatgtggaggaggaa

SEQ ID NO: 15215 - DNA, 20 bp, synthetic construct
  misc_feature 1..20: note = Artificial sequence related to HLA knockouts in cell therapy
  source 1..20: mol_type = other DNA
ctgtgatgtggaggaggaag

SEQ ID NO: 15216 - DNA, 20 bp, synthetic construct
  misc_feature 1..20: note = Artificial sequence related to HLA knockouts in cell therapy
  source 1..20: mol_type = other DNA
tgtgatgtggaggaggaaga

SEQ ID NO: 15217 - DNA, 20 bp, synthetic construct
  misc_feature 1..20: note = Artificial sequence related to HLA knockouts in cell therapy
  source 1..20: mol_type = other DNA
gtgatgtggaggaggaagag

SEQ ID NO: 15218 - DNA, 20 bp, synthetic construct
  misc_feature 1..20: note = Artificial sequence related to HLA knockouts in cell therapy
  source 1..20: mol_type = other DNA
tgatgtggaggaggaagagc

SEQ ID NO: 15219 - DNA, 20 bp, synthetic construct
  misc_feature 1..20: note = Artificial sequence related to HLA knockouts in cell therapy
  source 1..20: mol_type = other DNA
gatgtggaggaggaagagct

SEQ ID NO: 15220 - DNA, 20 bp, synthetic construct
  misc_feature 1..20: note = Artificial sequence related to HLA knockouts in cell therapy
  source 1..20: mol_type = other DNA
atgtggaggaggaagagctc

SEQ ID NO: 15221 - DNA, 20 bp, synthetic construct
  misc_feature 1..20: note = Artificial sequence related to HLA knockouts in cell therapy
  source 1..20: mol_type = other DNA
tgtggaggaggaagagctca

SEQ ID NO: 15222 - DNA, 20 bp, synthetic construct
  misc_feature 1..20: note = Artificial sequence related to HLA knockouts in cell therapy
  source 1..20: mol_type = other DNA
tggaggaggaagagctcaga

SEQ ID NO: 15223 - DNA, 20 bp, synthetic construct
  misc_feature 1..20: note = Artificial sequence related to HLA knockouts in cell therapy
  source 1..20: mol_type = other DNA
ggaggaggaagagctcagat

SEQ ID NO: 15224 - DNA, 20 bp, synthetic construct
  misc_feature 1..20: note = Artificial sequence related to HLA knockouts in cell therapy
  source 1..20: mol_type = other DNA
gaggaggaagagctcagata

SEQ ID NO: 15225 - DNA, 20 bp, synthetic construct
  misc_feature 1..20: note = Artificial sequence related to HLA knockouts in cell therapy
  source 1..20: mol_type = other DNA
aggaggaagagctcagatag

SEQ ID NO: 15226 - DNA, 20 bp, synthetic construct
  misc_feature 1..20: note = Artificial sequence related to HLA knockouts in cell therapy
  source 1..20: mol_type = other DNA
ggaggaagagctcagataga

SEQ ID NO: 15227 - DNA, 20 bp, synthetic construct
  misc_feature 1..20: note = Artificial sequence related to HLA knockouts in cell therapy
  source 1..20: mol_type = other DNA
gaggaagagctcagatagaa

SEQ ID NO: 15228 - DNA, 20 bp, synthetic construct
  misc_feature 1..20: note = Artificial sequence related to HLA knockouts in cell therapy
  source 1..20: mol_type = other DNA
aggaagagctcagatagaaa

SEQ ID NO: 15229 - DNA, 20 bp, synthetic construct
  misc_feature 1..20: note = Artificial sequence related to HLA knockouts in cell therapy
  source 1..20: mol_type = other DNA
aaaggagggagctactctca

SEQ ID NO: 15230 - DNA, 20 bp, synthetic construct
  misc_feature 1..20: note = Artificial sequence related to HLA knockouts in cell therapy
  source 1..20: mol_type = other DNA
aaggagggagctactctcag

SEQ ID NO: 15231 - DNA, 20 bp, synthetic construct
  misc_feature 1..20: note = Artificial sequence related to HLA knockouts in cell therapy
  source 1..20: mol_type = other DNA
gagctactctcaggctgcaa

SEQ ID NO: 15232 - DNA, 20 bp, synthetic construct
  misc_feature 1..20: note = Artificial sequence related to HLA knockouts in cell therapy
  source 1..20: mol_type = other DNA
agctactctcaggctgcaag

SEQ ID NO: 15233 - DNA, 20 bp, synthetic construct
  misc_feature 1..20: note = Artificial sequence related to HLA knockouts in cell therapy
  source 1..20: mol_type = other DNA
ctactctcaggctgcaagca

SEQ ID NO: 15234 - DNA, 20 bp, synthetic construct
  misc_feature 1..20: note = Artificial sequence related to HLA knockouts in cell therapy
  source 1..20: mol_type = other DNA
tactctcaggctgcaagcag

SEQ ID NO: 15235 - DNA, 20 bp, synthetic construct
  misc_feature 1..20: note = Artificial sequence related to HLA knockouts in cell therapy
  source 1..20: mol_type = other DNA
actctcaggctgcaagcagt

SEQ ID NO: 15236 - DNA, 20 bp, synthetic construct
  misc_feature 1..20: note = Artificial sequence related to HLA knockouts in cell therapy
  source 1..20: mol_type = other DNA
tctcaggctgcaagcagtga

SEQ ID NO: 15237 - DNA, 20 bp, synthetic construct
  misc_feature 1..20: note = Artificial sequence related to HLA knockouts in cell therapy
  source 1..20: mol_type = other DNA
tcaggctgcaagcagtgaca

SEQ ID NO: 15238 - DNA, 20 bp, synthetic construct
  misc_feature 1..20: note = Artificial sequence related to HLA knockouts in cell therapy
  source 1..20: mol_type = other DNA
aggctgcaagcagtgacagt

SEQ ID NO: 15239 - DNA, 20 bp, synthetic construct
  misc_feature 1..20: note = Artificial sequence related to HLA knockouts in cell therapy
  source 1..20: mol_type = other DNA
cagggctctgatgtgtctct

SEQ ID NO: 15240 - DNA, 20 bp, synthetic construct
  misc_feature 1..20: note = Artificial sequence related to HLA knockouts in cell therapy
  source 1..20: mol_type = other DNA
agggctctgatgtgtctctc

SEQ ID NO: 15241 - DNA, 20 bp, synthetic construct
  misc_feature 1..20: note = Artificial sequence related to HLA knockouts in cell therapy
  source 1..20: mol_type = other DNA
gggctctgatgtgtctctca

SEQ ID NO: 15242 - DNA, 20 bp, synthetic construct
  misc_feature 1..20: note = Artificial sequence related to HLA knockouts in cell therapy
  source 1..20: mol_type = other DNA
ggctctgatgtgtctctcac

SEQ ID NO: 15243 - DNA, 20 bp, synthetic construct
  misc_feature 1..20: note = Artificial sequence related to HLA knockouts in cell therapy
  source 1..20: mol_type = other DNA
gctctgatgtgtctctcaca

SEQ ID NO: 15244 - DNA, 20 bp, synthetic construct
  misc_feature 1..20: note = Artificial sequence related to HLA knockouts in cell therapy
  source 1..20: mol_type = other DNA
ctctgatgtgtctctcacag

SEQ ID NO: 15245 - DNA, 20 bp, synthetic construct
  misc_feature 1..20: note = Artificial sequence related to HLA knockouts in cell therapy
  source 1..20: mol_type = other DNA
tctgatgtgtctctcacagc

SEQ ID NO: 15246 - DNA, 20 bp, synthetic construct
  misc_feature 1..20: note = Artificial sequence related to HLA knockouts in cell therapy
  source 1..20: mol_type = other DNA
ctgatgtgtctctcacagct

SEQ ID NO: 15247 - DNA, 20 bp, synthetic construct
  misc_feature 1..20: note = Artificial sequence related to HLA knockouts in cell therapy
  source 1..20: mol_type = other DNA
tgatgtgtctctcacagctt

SEQ ID NO: 15248 - DNA, 20 bp, synthetic construct
  misc_feature 1..20: note = Artificial sequence related to HLA knockouts in cell therapy
  source 1..20: mol_type = other DNA
gatgtgtctctcacagcttg

SEQ ID NO: 15249 - DNA, 20 bp, synthetic construct
  misc_feature 1..20: note = Artificial sequence related to HLA knockouts in cell therapy
  source 1..20: mol_type = other DNA
atgtgtctctcacagcttgt

SEQ ID NO: 15250 - DNA, 20 bp, synthetic construct
  misc_feature 1..20: note = Artificial sequence related to HLA knockouts in cell therapy
  source 1..20: mol_type = other DNA
tgtgtctctcacagcttgta

SEQ ID NO: 15251 - DNA, 20 bp, synthetic construct
  misc_feature 1..20: note = Artificial sequence related to HLA knockouts in cell therapy
  source 1..20: mol_type = other DNA
gtgtctctcacagcttgtaa

SEQ ID NO: 15252 - DNA, 20 bp, synthetic construct
  misc_feature 1..20: note = Artificial sequence related to HLA knockouts in cell therapy
  source 1..20: mol_type = other DNA
tgtctctcacagcttgtaaa

SEQ ID NO: 15253 - DNA, 20 bp, synthetic construct
  misc_feature 1..20: note = Artificial sequence related to HLA knockouts in cell therapy
  source 1..20: mol_type = other DNA
gtctctcacagcttgtaaag

SEQ ID NO: 15254 - DNA, 20 bp, synthetic construct
  misc_feature 1..20: note = Artificial sequence related to HLA knockouts in cell therapy
  source 1..20: mol_type = other DNA
tctctcacagcttgtaaagt

SEQ ID NO: 15255 - DNA, 20 bp, synthetic construct
  misc_feature 1..20: note = Artificial sequence related to HLA knockouts in cell therapy
  source 1..20: mol_type = other DNA
ctctcacagcttgtaaagtg

SEQ ID NO: 15256 - DNA, 20 bp, synthetic construct
  misc_feature 1..20: note = Artificial sequence related to HLA knockouts in cell therapy
  source 1..20: mol_type = other DNA
tctcacagcttgtaaagtgt

SEQ ID NO: 15257 - DNA, 20 bp, synthetic construct
  misc_feature 1..20: note = Artificial sequence related to HLA knockouts in cell therapy
  source 1..20: mol_type = other DNA
ctcacagcttgtaaagtgtg

SEQ ID NO: 15258 - DNA, 20 bp, synthetic construct
  misc_feature 1..20: note = Artificial sequence related to HLA knockouts in cell therapy
  source 1..20: mol_type = other DNA
tcacagcttgtaaagtgtga

SEQ ID NO: 15259 - DNA, 20 bp, synthetic construct
  misc_feature 1..20: note = Artificial sequence related to HLA knockouts in cell therapy
  source 1..20: mol_type = other DNA
cacagcttgtaaagtgtgag

SEQ ID NO: 15260 - DNA, 20 bp, synthetic construct
  misc_feature 1..20: note = Artificial sequence related to HLA knockouts in cell therapy
  source 1..20: mol_type = other DNA
acagcttgtaaagtgtgaga

SEQ ID NO: 15261 - DNA, 20 bp, synthetic construct
  misc_feature 1..20: note = Artificial sequence related to HLA knockouts in cell therapy
  source 1..20: mol_type = other DNA
cagcttgtaaagtgtgagac

SEQ ID NO: 15262 - DNA, 20 bp, synthetic construct
  misc_feature 1..20: note = Artificial sequence related to HLA knockouts in cell therapy
  source 1..20: mol_type = other DNA
agcttgtaaagtgtgagaca

SEQ ID NO: 15263 - DNA, 20 bp, synthetic construct
  misc_feature 1..20: note = Artificial sequence related to HLA knockouts in cell therapy
  source 1..20: mol_type = other DNA
gcttgtaaagtgtgagacag

SEQ ID NO: 15264 - DNA, 20 bp, synthetic construct
  misc_feature 1..20: note = Artificial sequence related to HLA knockouts in cell therapy
  source 1..20: mol_type = other DNA
cttgtaaagtgtgagacagc

SEQ ID NO: 15265 - DNA, 20 bp, synthetic construct
  misc_feature 1..20: note = Artificial sequence related to HLA knockouts in cell therapy
  source 1..20: mol_type = other DNA
ttgtaaagtgtgagacagct

SEQ ID NO: 15266 - DNA, 20 bp, synthetic construct
  misc_feature 1..20: note = Artificial sequence related to HLA knockouts in cell therapy
  source 1..20: mol_type = other DNA
tgtaaagtgtgagacagctg

SEQ ID NO: 15267 - DNA, 20 bp, synthetic construct
  misc_feature 1..20: note = Artificial sequence related to HLA knockouts in cell therapy
  source 1..20: mol_type = other DNA
gtaaagtgtgagacagctgc

SEQ ID NO: 15268 - DNA, 20 bp, synthetic construct
  misc_feature 1..20: note = Artificial sequence related to HLA knockouts in cell therapy
  source 1..20: mol_type = other DNA
taaagtgtgagacagctgcc

SEQ ID NO: 15269 - DNA, 20 bp, synthetic construct
  misc_feature 1..20: note = Artificial sequence related to HLA knockouts in cell therapy
  source 1..20: mol_type = other DNA
aaagtgtgagacagctgcct

SEQ ID NO: 15270 - DNA, 20 bp, synthetic construct
  misc_feature 1..20: note = Artificial sequence related to HLA knockouts in cell therapy
  source 1..20: mol_type = other DNA
aagtgtgagacagctgcctt

SEQ ID NO: 15271 - DNA, 20 bp, synthetic construct
  misc_feature 1..20: note = Artificial sequence related to HLA knockouts in cell therapy
  source 1..20: mol_type = other DNA
agtgtgagacagctgccttg

SEQ ID NO: 15272 - DNA, 20 bp, synthetic construct
  misc_feature 1..20: note = Artificial sequence related to HLA knockouts in cell therapy
  source 1..20: mol_type = other DNA
gtgtgagacagctgccttgt

SEQ ID NO: 15273 - DNA, 20 bp, synthetic construct
  misc_feature 1..20: note = Artificial sequence related to HLA knockouts in cell therapy
  source 1..20: mol_type = other DNA
tgtgagacagctgccttgtg

SEQ ID NO: 15274 - DNA, 20 bp, synthetic construct
  misc_feature 1..20: note = Artificial sequence related to HLA knockouts in cell therapy
  source 1..20: mol_type = other DNA
gtgagacagctgccttgtgt

SEQ ID NO: 15275 - DNA, 20 bp, synthetic construct
  misc_feature 1..20: note = Artificial sequence related to HLA knockouts in cell therapy
  source 1..20: mol_type = other DNA
tgagacagctgccttgtgtg

SEQ ID NO: 15276 - DNA, 20 bp, synthetic construct
  misc_feature 1..20: note = Artificial sequence related to HLA knockouts in cell therapy
  source 1..20: mol_type = other DNA
tgccttgtgtgggactgaga

SEQ ID NO: 15277 - DNA, 20 bp, synthetic construct
  misc_feature 1..20: note = Artificial sequence related to HLA knockouts in cell therapy
  source 1..20: mol_type = other DNA
ttgtgtgggactgagaggca

SEQ ID NO: 15278 - DNA, 20 bp, synthetic construct
  misc_feature 1..20: note = Artificial sequence related to HLA knockouts in cell therapy
  source 1..20: mol_type = other DNA
tgtgtgggactgagaggcaa

SEQ ID NO: 15279 - DNA, 20 bp, synthetic construct
  misc_feature 1..20: note = Artificial sequence related to HLA knockouts in cell therapy
  source 1..20: mol_type = other DNA
tgtgggactgagaggcaaga

SEQ ID NO: 15280 - DNA, 20 bp, synthetic construct
  misc_feature 1..20: note = Artificial sequence related to HLA knockouts in cell therapy
  source 1..20: mol_type = other DNA
tgggactgagaggcaagagt

SEQ ID NO: 15281 - DNA, 20 bp, synthetic construct
  misc_feature 1..20: note = Artificial sequence related to HLA knockouts in cell therapy
  source 1..20: mol_type = other DNA
gggactgagaggcaagagtt

SEQ ID NO: 15282 - DNA, 20 bp, synthetic construct
  misc_feature 1..20: note = Artificial sequence related to HLA knockouts in cell therapy
  source 1..20: mol_type = other DNA
ggactgagaggcaagagttg

SEQ ID NO: 15283 - DNA, 20 bp, synthetic construct
  misc_feature 1..20: note = Artificial sequence related to HLA knockouts in cell therapy
  source 1..20: mol_type = other DNA
gactgagaggcaagagttgt

SEQ ID NO: 15284 - DNA, 20 bp, synthetic construct
  misc_feature 1..20: note = Artificial sequence related to HLA knockouts in cell therapy
  source 1..20: mol_type = other DNA
actgagaggcaagagttgtt

SEQ ID NO: 15285 - DNA, 20 bp, synthetic construct
  misc_feature 1..20: note = Artificial sequence related to HLA knockouts in cell therapy
  source 1..20: mol_type = other DNA
ctgagaggcaagagttgttc

SEQ ID NO: 15286 - DNA, 20 bp, synthetic construct
  misc_feature 1..20: note = Artificial sequence related to HLA knockouts in cell therapy
  source 1..20: mol_type = other DNA
tgagaggcaagagttgttcc

SEQ ID NO: 15287 - DNA, 20 bp, synthetic construct
  misc_feature 1..20: note = Artificial sequence related to HLA knockouts in cell therapy
  source 1..20: mol_type = other DNA
gagaggcaagagttgttcct

SEQ ID NO: 15288 - DNA, 20 bp, synthetic construct
  misc_feature 1..20: note = Artificial sequence related to HLA knockouts in cell therapy
  source 1..20: mol_type = other DNA
agaggcaagagttgttcctg

SEQ ID NO: 15289 - DNA, 20 bp, synthetic construct
  misc_feature 1..20: note = Artificial sequence related to HLA knockouts in cell therapy
  source 1..20: mol_type = other DNA
gaggcaagagttgttcctgc

SEQ ID NO: 15290 - DNA, 20 bp, synthetic construct
  misc_feature 1..20: note = Artificial sequence related to HLA knockouts in cell therapy
  source 1..20: mol_type = other DNA
aggcaagagttgttcctgcc

SEQ ID NO: 15291 - DNA, 20 bp, synthetic construct
  misc_feature 1..20: note = Artificial sequence related to HLA knockouts in cell therapy
  source 1..20: mol_type = other DNA
gcaagagttgttcctgccct

SEQ ID NO: 15292 - DNA, 20 bp, synthetic construct
  misc_feature 1..20: note = Artificial sequence related to HLA knockouts in cell therapy
  source 1..20: mol_type = other DNA
caagagttgttcctgccctt

SEQ ID NO: 15293 - DNA, 20 bp, synthetic construct
  misc_feature 1..20: note = Artificial sequence related to HLA knockouts in cell therapy
  source 1..20: mol_type = other DNA
aagagttgttcctgcccttc

SEQ ID NO: 15294 - DNA, 20 bp, synthetic construct
  misc_feature 1..20: note = Artificial sequence related to HLA knockouts in cell therapy
  source 1..20: mol_type = other DNA
agagttgttcctgcccttcc

SEQ ID NO: 15295 - DNA, 20 bp, synthetic construct
  misc_feature 1..20: note = Artificial sequence related to HLA knockouts in cell therapy
  source 1..20: mol_type = other DNA
agttgttcctgcccttccct

SEQ ID NO: 15296 - DNA, 20 bp, synthetic construct
  misc_feature 1..20: note = Artificial sequence related to HLA knockouts in cell therapy
  source 1..20: mol_type = other DNA
gttgttcctgcccttccctt

SEQ ID NO: 15297 - DNA, 20 bp, synthetic construct
  misc_feature 1..20: note = Artificial sequence related to HLA knockouts in cell therapy
  source 1..20: mol_type = other DNA
ttgttcctgcccttcccttt

SEQ ID NO: 15298 - DNA, 20 bp, synthetic construct
  misc_feature 1..20: note = Artificial sequence related to HLA knockouts in cell therapy
  source 1..20: mol_type = other DNA
tgttcctgcccttccctttg

SEQ ID NO: 15299 - DNA, 20 bp, synthetic construct
  misc_feature 1..20: note = Artificial sequence related to HLA knockouts in cell therapy
  source 1..20: mol_type = other DNA
gttcctgcccttccctttgt

SEQ ID NO: 15300 - DNA, 20 bp, synthetic construct
  misc_feature 1..20: note = Artificial sequence related to HLA knockouts in cell therapy
  source 1..20: mol_type = other DNA
ttcctgcccttccctttgtg

SEQ ID NO: 15301 - DNA, 20 bp, synthetic construct
  misc_feature 1..20: note = Artificial sequence related to HLA knockouts in cell therapy
  source 1..20: mol_type = other DNA
tcctgcccttccctttgtga

SEQ ID NO: 15302 - DNA, 20 bp, synthetic construct
  misc_feature 1..20: note = Artificial sequence related to HLA knockouts in cell therapy
  source 1..20: mol_type = other DNA
ctgcccttccctttgtgact

SEQ ID NO: 15303 - DNA, 20 bp, synthetic construct
  misc_feature 1..20: note = Artificial sequence related to HLA knockouts in cell therapy
  source 1..20: mol_type = other DNA
tgcccttccctttgtgactt

SEQ ID NO: 15304 - DNA, 20 bp, synthetic construct
  misc_feature 1..20: note = Artificial sequence related to HLA knockouts in cell therapy
  source 1..20: mol_type = other DNA
gcccttccctttgtgacttg

SEQ ID NO: 15305 - DNA, 20 bp, synthetic construct
  misc_feature 1..20: note = Artificial sequence related to HLA knockouts in cell therapy
  source 1..20: mol_type = other DNA
cccttccctttgtgacttga

SEQ ID NO: 15306 - DNA, 20 bp, synthetic construct
  misc_feature 1..20: note = Artificial sequence related to HLA knockouts in cell therapy
  source 1..20: mol_type = other DNA
ccttccctttgtgacttgaa

SEQ ID NO: 15307 - DNA, 20 bp, synthetic construct
  misc_feature 1..20: note = Artificial sequence related to HLA knockouts in cell therapy
  source 1..20: mol_type = other DNA
cttccctttgtgacttgaag

SEQ ID NO: 15308 - DNA, 20 bp, synthetic construct
  misc_feature 1..20: note = Artificial sequence related to HLA knockouts in cell therapy
  source 1..20: mol_type = other DNA
ttccctttgtgacttgaaga

SEQ ID NO: 15309 - DNA, 20 bp, synthetic construct
  misc_feature 1..20: note = Artificial sequence related to HLA knockouts in cell therapy
  source 1..20: mol_type = other DNA
tccctttgtgacttgaagaa

SEQ ID NO: 15310 - DNA, 20 bp, synthetic construct
  misc_feature 1..20: note = Artificial sequence related to HLA knockouts in cell therapy
  source 1..20: mol_type = other DNA
ccctttgtgacttgaagaac

SEQ ID NO: 15311 - DNA, 20 bp, synthetic construct
  misc_feature 1..20: note = Artificial sequence related to HLA knockouts in cell therapy
  source 1..20: mol_type = other DNA
cctttgtgacttgaagaacc

SEQ ID NO: 15312 - DNA, 20 bp, synthetic construct
  misc_feature 1..20: note = Artificial sequence related to HLA knockouts in cell therapy
  source 1..20: mol_type = other DNA
ctttgtgacttgaagaaccc

SEQ ID NO: 15313 - DNA, 20 bp, synthetic construct
  misc_feature 1..20: note = Artificial sequence related to HLA knockouts in cell therapy
  source 1..20: mol_type = other DNA
tttgtgacttgaagaaccct

SEQ ID NO: 15314 - DNA, 20 bp, synthetic construct
  misc_feature 1..20: note = Artificial sequence related to HLA knockouts in cell therapy
  source 1..20: mol_type = other DNA
ttgtgacttgaagaaccctg

SEQ ID NO: 15315 - DNA, 20 bp, synthetic construct
  misc_feature 1..20: note = Artificial sequence related to HLA knockouts in cell therapy
  source 1..20: mol_type = other DNA
tgtgacttgaagaaccctga

SEQ ID NO: 15316 - DNA, 20 bp, synthetic construct
  misc_feature 1..20: note = Artificial sequence related to HLA knockouts in cell therapy
  source 1..20: mol_type = other DNA
gtgacttgaagaaccctgac

SEQ ID NO: 15317 - DNA, 20 bp, synthetic construct
  misc_feature 1..20: note = Artificial sequence related to HLA knockouts in cell therapy
  source 1..20: mol_type = other DNA
tgacttgaagaaccctgact

SEQ ID NO: 15318 - DNA, 20 bp, synthetic construct
  misc_feature 1..20: note = Artificial sequence related to HLA knockouts in cell therapy
  source 1..20: mol_type = other DNA
gacttgaagaaccctgactt

SEQ ID NO: 15319 - DNA, 20 bp, synthetic construct
  misc_feature 1..20: note = Artificial sequence related to HLA knockouts in cell therapy
  source 1..20: mol_type = other DNA
acttgaagaaccctgacttt

SEQ ID NO: 15320 - DNA, 20 bp, synthetic construct
  misc_feature 1..20: note = Artificial sequence related to HLA knockouts in cell therapy
  source 1..20: mol_type = other DNA
cttgaagaaccctgactttg

SEQ ID NO: 15321 - DNA, 20 bp, synthetic construct
  misc_feature 1..20: note = Artificial sequence related to HLA knockouts in cell therapy
  source 1..20: mol_type = other DNA
ttgaagaaccctgactttgt

SEQ ID NO: 15322 - DNA, 20 bp, synthetic construct
  misc_feature 1..20: note = Artificial sequence related to HLA knockouts in cell therapy
  source 1..20: mol_type = other DNA
tgaagaaccctgactttgtt

SEQ ID NO: 15323 - DNA, 20 bp, synthetic construct
  misc_feature 1..20: note = Artificial sequence related to HLA knockouts in cell therapy
  source 1..20: mol_type = other DNA
gaagaaccctgactttgttt

SEQ ID NO: 15324 - DNA, 20 bp, synthetic construct
  misc_feature 1..20: note = Artificial sequence related to HLA knockouts in cell therapy
  source 1..20: mol_type = other DNA
aagaaccctgactttgtttc

SEQ ID NO: 15325 - DNA, 20 bp, synthetic construct
  misc_feature 1..20: note = Artificial sequence related to HLA knockouts in cell therapy
  source 1..20: mol_type = other DNA
agaaccctgactttgtttct

SEQ ID NO: 15326 - DNA, 20 bp, synthetic construct
  misc_feature 1..20: note = Artificial sequence related to HLA knockouts in cell therapy
  source 1..20: mol_type = other DNA
gaaccctgactttgtttctg

SEQ ID NO: 15327 - DNA, 20 bp, synthetic construct
  misc_feature 1..20: note = Artificial sequence related to HLA knockouts in cell therapy
  source 1..20: mol_type = other DNA
aaccctgactttgtttctgc

SEQ ID NO: 15328 - DNA, 20 bp, synthetic construct
  misc_feature 1..20: note = Artificial sequence related to HLA knockouts in cell therapy
  source 1..20: mol_type = other DNA
accctgactttgtttctgca

SEQ ID NO: 15329 - DNA, 20 bp, synthetic construct
  misc_feature 1..20: note = Artificial sequence related to HLA knockouts in cell therapy
  source 1..20: mol_type = other DNA
ccctgactttgtttctgcaa

SEQ ID NO: 15330 - DNA, 20 bp, synthetic construct
  misc_feature 1..20: note = Artificial sequence related to HLA knockouts in cell therapy
  source 1..20: mol_type = other DNA
cctgactttgtttctgcaaa

SEQ ID NO: 15331 - DNA, 20 bp, synthetic construct
  misc_feature 1..20: note = Artificial sequence related to HLA knockouts in cell therapy
  source 1..20: mol_type = other DNA
ctgactttgtttctgcaaag

SEQ ID NO: 15332 - DNA, 20 bp, synthetic construct
  misc_feature 1..20: note = Artificial sequence related to HLA knockouts in cell therapy
  source 1..20: mol_type = other DNA
tgactttgtttctgcaaagg

SEQ ID NO: 15333 - DNA, 20 bp, synthetic construct
  misc_feature 1..20: note = Artificial sequence related to HLA knockouts in cell therapy
  source 1..20: mol_type = other DNA
gactttgtttctgcaaaggc

SEQ ID NO: 15334 - DNA, 20 bp, synthetic construct
  misc_feature 1..20: note = Artificial sequence related to HLA knockouts in cell therapy
  source 1..20: mol_type = other DNA
actttgtttctgcaaaggca

SEQ ID NO: 15335 - DNA, 20 bp, synthetic construct
  misc_feature 1..20: note = Artificial sequence related to HLA knockouts in cell therapy
  source 1..20: mol_type = other DNA
ctttgtttctgcaaaggcac

SEQ ID NO: 15336 - DNA, 20 bp, synthetic construct
  misc_feature 1..20: note = Artificial sequence related to HLA knockouts in cell therapy
  source 1..20: mol_type = other DNA
tttgtttctgcaaaggcacc

SEQ ID NO: 15337 - DNA, 20 bp, synthetic construct
  misc_feature 1..20: note = Artificial sequence related to HLA knockouts in cell therapy
  source 1..20: mol_type = other DNA
ttgtttctgcaaaggcacct

SEQ ID NO: 15338 - DNA, 20 bp, synthetic construct
  misc_feature 1..20: note = Artificial sequence related to HLA knockouts in cell therapy
  source 1..20: mol_type = other DNA
tgtttctgcaaaggcacctg

SEQ ID NO: 15339 - DNA, 20 bp, synthetic construct
  misc_feature 1..20: note = Artificial sequence related to HLA knockouts in cell therapy
  source 1..20: mol_type = other DNA
gtttctgcaaaggcacctgc

SEQ ID NO: 15340 - DNA, 20 bp, synthetic construct
  misc_feature 1..20: note = Artificial sequence related to HLA knockouts in cell therapy
  source 1..20: mol_type = other DNA
tttctgcaaaggcacctgca

SEQ ID NO: 15341 - DNA, 20 bp, synthetic construct
  misc_feature 1..20: note = Artificial sequence related to HLA knockouts in cell therapy
  source 1..20: mol_type = other DNA
ttctgcaaaggcacctgcat

SEQ ID NO: 15342 - DNA, 20 bp, synthetic construct
  misc_feature 1..20: note = Artificial sequence related to HLA knockouts in cell therapy
  source 1..20: mol_type = other DNA
tctgcaaaggcacctgcatg

SEQ ID NO: 15343 - DNA, 20 bp, synthetic construct
  misc_feature 1..20: note = Artificial sequence related to HLA knockouts in cell therapy
  source 1..20: mol_type = other DNA
ctgcaaaggcacctgcatgt

SEQ ID NO: 15344 - DNA, 20 bp, synthetic construct
  misc_feature 1..20: note = Artificial sequence related to HLA knockouts in cell therapy
  source 1..20: mol_type = other DNA
tgcaaaggcacctgcatgtg

SEQ ID NO: 15345 - DNA, 20 bp, synthetic construct
  misc_feature 1..20: note = Artificial sequence related to HLA knockouts in cell therapy
  source 1..20: mol_type = other DNA
gcaaaggcacctgcatgtgt

SEQ ID NO: 15346 - DNA, 20 bp, synthetic construct
  misc_feature 1..20: note = Artificial sequence related to HLA knockouts in cell therapy
  source 1..20: mol_type = other DNA
caaaggcacctgcatgtgtc

SEQ ID NO: 15347 - DNA, 20 bp, synthetic construct
  misc_feature 1..20: note = Artificial sequence related to HLA knockouts in cell therapy
  source 1..20: mol_type = other DNA
aaaggcacctgcatgtgtct

SEQ ID NO: 15348 - DNA, 20 bp, synthetic construct
  misc_feature 1..20: note = Artificial sequence related to HLA knockouts in cell therapy
  source 1..20: mol_type = other DNA
aaggcacctgcatgtgtctg

SEQ ID NO: 15349 - DNA, 20 bp, synthetic construct
  misc_feature 1..20: note = Artificial sequence related to HLA knockouts in cell therapy
  source 1..20: mol_type = other DNA
aggcacctgcatgtgtctgt

SEQ ID NO: 15350 - DNA, 20 bp, synthetic construct
  misc_feature 1..20: note = Artificial sequence related to HLA knockouts in cell therapy
  source 1..20: mol_type = other DNA
gcacctgcatgtgtctgtgt

SEQ ID NO: 15351 - DNA, 20 bp, synthetic construct
  misc_feature 1..20: note = Artificial sequence related to HLA knockouts in cell therapy
  source 1..20: mol_type = other DNA
cacctgcatgtgtctgtgtt

SEQ ID NO: 15352 - DNA, 20 bp, synthetic construct
  misc_feature 1..20: note = Artificial sequence related to HLA knockouts in cell therapy
  source 1..20: mol_type = other DNA
acctgcatgtgtctgtgttc

SEQ ID NO: 15353 - DNA, 20 bp, synthetic construct
  misc_feature 1..20: note = Artificial sequence related to HLA knockouts in cell therapy
  source 1..20: mol_type = other DNA
cctgcatgtgtctgtgttcg

SEQ ID NO: 15354 - DNA, 20 bp, synthetic construct
  misc_feature 1..20: note = Artificial sequence related to HLA knockouts in cell therapy
  source 1..20: mol_type = other DNA
ctgcatgtgtctgtgttcgt

SEQ ID NO: 15355 - DNA, 20 bp, synthetic construct
  misc_feature 1..20: note = Artificial sequence related to HLA knockouts in cell therapy
  source 1..20: mol_type = other DNA
tgcatgtgtctgtgttcgtg

SEQ ID NO: 15356 - DNA, 20 bp, synthetic construct
  misc_feature 1..20: note = Artificial sequence related to HLA knockouts in cell therapy
  source 1..20: mol_type = other DNA
gcatgtgtctgtgttcgtgt

SEQ ID NO: 15357 - DNA, 20 bp, synthetic construct
  misc_feature 1..20: note = Artificial sequence related to HLA knockouts in cell therapy
  source 1..20: mol_type = other DNA
catgtgtctgtgttcgtgta

SEQ ID NO: 15358 - DNA, 20 bp, synthetic construct
  misc_feature 1..20: note = Artificial sequence related to HLA knockouts in cell therapy
  source 1..20: mol_type = other DNA
atgtgtctgtgttcgtgtag

SEQ ID NO: 15359 - DNA, 20 bp, synthetic construct
  misc_feature 1..20: note = Artificial sequence related to HLA knockouts in cell therapy
  source 1..20: mol_type = other DNA
tgtgtctgtgttcgtgtagg

SEQ ID NO: 15360 - DNA, 20 bp, synthetic construct
  misc_feature 1..20: note = Artificial sequence related to HLA knockouts in cell therapy
  source 1..20: mol_type = other DNA
gtgtctgtgttcgtgtaggc

SEQ ID NO: 15361 - DNA, 20 bp, synthetic construct
  misc_feature 1..20: note = Artificial sequence related to HLA knockouts in cell therapy
  source 1..20: mol_type = other DNA
tgtctgtgttcgtgtaggca

SEQ ID NO: 15362 - DNA, 20 bp, synthetic construct
  misc_feature 1..20: note = Artificial sequence related to HLA knockouts in cell therapy
  source 1..20: mol_type = other DNA
gtctgtgttcgtgtaggcat

SEQ ID NO: 15363 - DNA, 20 bp, synthetic construct
  misc_feature 1..20: note = Artificial sequence related to HLA knockouts in cell therapy
  source 1..20: mol_type = other DNA
tctgtgttcgtgtaggcata

SEQ ID NO: 15364 - DNA, 20 bp, synthetic construct
  misc_feature 1..20: note = Artificial sequence related to HLA knockouts in cell therapy
  source 1..20: mol_type = other DNA
ctgtgttcgtgtaggcataa

SEQ ID NO: 15365 - DNA, 20 bp, synthetic construct
  misc_feature 1..20: note = Artificial sequence related to HLA knockouts in cell therapy
  source 1..20: mol_type = other DNA
tgtgttcgtgtaggcataat

SEQ ID NO: 15366 - DNA, 20 bp, synthetic construct
  misc_feature 1..20: note = Artificial sequence related to HLA knockouts in cell therapy
  source 1..20: mol_type = other DNA
gtgttcgtgtaggcataatg

SEQ ID NO: 15367 - DNA, 20 bp, synthetic construct
  misc_feature 1..20: note = Artificial sequence related to HLA knockouts in cell therapy
  source 1..20: mol_type = other DNA
tgttcgtgtaggcataatgt

SEQ ID NO: 15368 - DNA, 20 bp, synthetic construct
  misc_feature 1..20: note = Artificial sequence related to HLA knockouts in cell therapy
  source 1..20: mol_type = other DNA
gttcgtgtaggcataatgtg

SEQ ID NO: 15369 - DNA, 20 bp, synthetic construct
  misc_feature 1..20: note = Artificial sequence related to HLA knockouts in cell therapy
  source 1..20: mol_type = other DNA
ttcgtgtaggcataatgtga

SEQ ID NO: 15370 - DNA, 20 bp, synthetic construct
  misc_feature 1..20: note = Artificial sequence related to HLA knockouts in cell therapy
  source 1..20: mol_type = other DNA
tcgtgtaggcataatgtgag

SEQ ID NO: 15371 - DNA, 20 bp, synthetic construct
  misc_feature 1..20: note = Artificial sequence related to HLA knockouts in cell therapy
  source 1..20: mol_type = other DNA
cgtgtaggcataatgtgagg

SEQ ID NO: 15372 - DNA, 20 bp, synthetic construct
  misc_feature 1..20: note = Artificial sequence related to HLA knockouts in cell therapy
  source 1..20: mol_type = other DNA
gtgtaggcataatgtgagga

SEQ ID NO: 15373 - DNA, 20 bp, synthetic construct
  misc_feature 1..20: note = Artificial sequence related to HLA knockouts in cell therapy
  source 1..20: mol_type = other DNA
tgtaggcataatgtgaggag

SEQ ID NO: 15374 - DNA, 20 bp, synthetic construct
  misc_feature 1..20: note = Artificial sequence related to HLA knockouts in cell therapy
  source 1..20: mol_type = other DNA
gtaggcataatgtgaggagg

SEQ ID NO: 15375 - DNA, 20 bp, synthetic construct
  misc_feature 1..20: note = Artificial sequence related to HLA knockouts in cell therapy
  source 1..20: mol_type = other DNA
taggcataatgtgaggaggt

SEQ ID NO: 15376 - DNA, 20 bp, synthetic construct
  misc_feature 1..20: note = Artificial sequence related to HLA knockouts in cell therapy
  source 1..20: mol_type = other DNA
aggcataatgtgaggaggtg

SEQ ID NO: 15377 - DNA, 20 bp, synthetic construct
  misc_feature 1..20: note = Artificial sequence related to HLA knockouts in cell therapy
  source 1..20: mol_type = other DNA
ggcataatgtgaggaggtgg

SEQ ID NO: 15378 - DNA, 20 bp, synthetic construct
  misc_feature 1..20: note = Artificial sequence related to HLA knockouts in cell therapy
  source 1..20: mol_type = other DNA
gcataatgtgaggaggtggg

SEQ ID NO: 15379 - DNA, 20 bp, synthetic construct
  misc_feature 1..20: note = Artificial sequence related to HLA knockouts in cell therapy
  source 1..20: mol_type = other DNA
catgtccaccatgaccctct

SEQ ID NO: 15380 - DNA, 20 bp, synthetic construct
  misc_feature 1..20: note = Artificial sequence related to HLA knockouts in cell therapy
  source 1..20: mol_type = other DNA
atgtccaccatgaccctctt

SEQ ID NO: 15381 - DNA, 20 bp, synthetic construct
  misc_feature 1..20: note = Artificial sequence related to HLA knockouts in cell therapy
  source 1..20: mol_type = other DNA
tgtccaccatgaccctcttc

SEQ ID NO: 15382 - DNA, 20 bp, synthetic construct
  misc_feature 1..20: note = Artificial sequence related to HLA knockouts in cell therapy
  source 1..20: mol_type = other DNA
cccaatcatctttcctgttc

SEQ ID NO: 15383 - DNA, 20 bp, synthetic construct
  misc_feature 1..20: note = Artificial sequence related to HLA knockouts in cell therapy
  source 1..20: mol_type = other DNA
ccaatcatctttcctgttcc

SEQ ID NO: 15384 - DNA, 20 bp, synthetic construct
  misc_feature 1..20: note = Artificial sequence related to HLA knockouts in cell therapy
  source 1..20: mol_type = other DNA
caatcatctttcctgttcca

SEQ ID NO: 15385 - DNA, 20 bp, synthetic construct
  misc_feature 1..20: note = Artificial sequence related to HLA knockouts in cell therapy
  source 1..20: mol_type = other DNA
aatcatctttcctgttccag

SEQ ID NO: 15386 - DNA, 20 bp, synthetic construct
  misc_feature 1..20: note = Artificial sequence related to HLA knockouts in cell therapy
  source 1..20: mol_type = other DNA
atcatctttcctgttccaga

SEQ ID NO: 15387 - DNA, 20 bp, synthetic construct
  misc_feature 1..20: note = Artificial sequence related to HLA knockouts in cell therapy
  source 1..20: mol_type = other DNA
tcatctttcctgttccagag

SEQ ID NO: 15388 - DNA, 20 bp, synthetic construct
  misc_feature 1..20: note = Artificial sequence related to HLA knockouts in cell therapy
  source 1..20: mol_type = other DNA
catctttcctgttccagaga

SEQ ID NO: 15389 - DNA, 20 bp, synthetic construct
  misc_feature 1..20: note = Artificial sequence related to HLA knockouts in cell therapy
  source 1..20: mol_type = other DNA
atctttcctgttccagagag

SEQ ID NO: 15390 - DNA, 20 bp, synthetic construct
  misc_feature 1..20: note = Artificial sequence related to HLA knockouts in cell therapy
  source 1..20: mol_type = other DNA
tctttcctgttccagagagg

SEQ ID NO: 15391 - DNA, 20 bp, synthetic construct
  misc_feature 1..20: note = Artificial sequence related to HLA knockouts in cell therapy
  source 1..20: mol_type = other DNA
ctttcctgttccagagaggt

SEQ ID NO: 15392 - DNA, 20 bp, synthetic construct
  misc_feature 1..20: note = Artificial sequence related to HLA knockouts in cell therapy
  source 1..20: mol_type = other DNA
tttcctgttccagagaggtg

SEQ ID NO: 15393 - DNA, 20 bp, synthetic construct
  misc_feature 1..20: note = Artificial sequence related to HLA knockouts in cell therapy
  source 1..20: mol_type = other DNA
ttcctgttccagagaggtgg

SEQ ID NO: 15394 - DNA, 20 bp, synthetic construct
  misc_feature 1..20: note = Artificial sequence related to HLA knockouts in cell therapy
  source 1..20: mol_type = other DNA
gctgaggtgtctccatctct

SEQ ID NO: 15395 - DNA, 20 bp, synthetic construct
  misc_feature 1..20: note = Artificial sequence related to HLA knockouts in cell therapy
  source 1..20: mol_type = other DNA
ctgaggtgtctccatctctg

SEQ ID NO: 15396 - DNA, 20 bp, synthetic construct
  misc_feature 1..20: note = Artificial sequence related to HLA knockouts in cell therapy
  source 1..20: mol_type = other DNA
tgaggtgtctccatctctgt

SEQ ID NO: 15397 - DNA, 20 bp, synthetic construct
  misc_feature 1..20: note = Artificial sequence related to HLA knockouts in cell therapy
  source 1..20: mol_type = other DNA
gaggtgtctccatctctgtc

SEQ ID NO: 15398 - DNA, 20 bp, synthetic construct
  misc_feature 1..20: note = Artificial sequence related to HLA knockouts in cell therapy
  source 1..20: mol_type = other DNA
aggtgtctccatctctgtct

SEQ ID NO: 15399 - DNA, 20 bp, synthetic construct
  misc_feature 1..20: note = Artificial sequence related to HLA knockouts in cell therapy
  source 1..20: mol_type = other DNA
ggtgtctccatctctgtctc

SEQ ID NO: 15400 - DNA, 20 bp, synthetic construct
  misc_feature 1..20: note = Artificial sequence related to HLA knockouts in cell therapy
  source 1..20: mol_type = other DNA
gtgtctccatctctgtctca

SEQ ID NO: 15401 - DNA, 20 bp, synthetic construct
  misc_feature 1..20: note = Artificial sequence related to HLA knockouts in cell therapy
  source 1..20: mol_type = other DNA
tgtctccatctctgtctcaa

SEQ ID NO: 15402 - DNA, 20 bp, synthetic construct
  misc_feature 1..20: note = Artificial sequence related to HLA knockouts in cell therapy
  source 1..20: mol_type = other DNA
gtctccatctctgtctcaac

SEQ ID NO: 15403 - DNA, 20 bp, synthetic construct
  misc_feature 1..20: note = Artificial sequence related to HLA knockouts in cell therapy
  source 1..20: mol_type = other DNA
tctccatctctgtctcaact

SEQ ID NO: 15404 - DNA, 20 bp, synthetic construct
  misc_feature 1..20: note = Artificial sequence related to HLA knockouts in cell therapy
  source 1..20: mol_type = other DNA
ctccatctctgtctcaactt

SEQ ID NO: 15405 - DNA, 20 bp, synthetic construct
  misc_feature 1..20: note = Artificial sequence related to HLA knockouts in cell therapy
  source 1..20: mol_type = other DNA
tccatctctgtctcaacttc

SEQ ID NO: 15406 - DNA, 20 bp, synthetic construct
  misc_feature 1..20: note = Artificial sequence related to HLA knockouts in cell therapy
  source 1..20: mol_type = other DNA
ccatctctgtctcaacttca

SEQ ID NO: 15407 - DNA, 20 bp, synthetic construct
  misc_feature 1..20: note = Artificial sequence related to HLA knockouts in cell therapy
  source 1..20: mol_type = other DNA
catctctgtctcaacttcat

SEQ ID NO: 15408 - DNA, 20 bp, synthetic construct
  misc_feature 1..20: note = Artificial sequence related to HLA knockouts in cell therapy
  source 1..20: mol_type = other DNA
atctctgtctcaacttcatg

SEQ ID NO: 15409 - DNA, 20 bp, synthetic construct
  misc_feature 1..20: note = Artificial sequence related to HLA knockouts in cell therapy
  source 1..20: mol_type = other DNA
tctctgtctcaacttcatgg

SEQ ID NO: 15410 - DNA, 20 bp, synthetic construct
  misc_feature 1..20: note = Artificial sequence related to HLA knockouts in cell therapy
  source 1..20: mol_type = other DNA
ctctgtctcaacttcatggt

SEQ ID NO: 15411 - DNA, 20 bp, synthetic construct
  misc_feature 1..20: note = Artificial sequence related to HLA knockouts in cell therapy
  source 1..20: mol_type = other DNA
tctgtctcaacttcatggtg

SEQ ID NO: 15412 - DNA, 20 bp, synthetic construct
  misc_feature 1..20: note = Artificial sequence related to HLA knockouts in cell therapy
  source 1..20: mol_type = other DNA
ctgtctcaacttcatggtgc

SEQ ID NO: 15413 - DNA, 20 bp, synthetic construct
  misc_feature 1..20: note = Artificial sequence related to HLA knockouts in cell therapy
  source 1..20: mol_type = other DNA
tgtctcaacttcatggtgca

SEQ ID NO: 15414 - DNA, 20 bp, synthetic construct
  misc_feature 1..20: note = Artificial sequence related to HLA knockouts in cell therapy
  source 1..20: mol_type = other DNA
gtctcaacttcatggtgcac

SEQ ID NO: 15415 - DNA, 20 bp, synthetic construct
  misc_feature 1..20: note = Artificial sequence related to HLA knockouts in cell therapy
  source 1..20: mol_type = other DNA
tctcaacttcatggtgcact

SEQ ID NO: 15416 - DNA, 20 bp, synthetic construct
  misc_feature 1..20: note = Artificial sequence related to HLA knockouts in cell therapy
  source 1..20: mol_type = other DNA
ctcaacttcatggtgcactg

SEQ ID NO: 15417 - DNA, 20 bp, synthetic construct
  misc_feature 1..20: note = Artificial sequence related to HLA knockouts in cell therapy
  source 1..20: mol_type = other DNA
tcaacttcatggtgcactga

SEQ ID NO: 15418 - DNA, 20 bp, synthetic construct
  misc_feature 1..20: note = Artificial sequence related to HLA knockouts in cell therapy
  source 1..20: mol_type = other DNA
caacttcatggtgcactgag

SEQ ID NO: 15419 - DNA, 20 bp, synthetic construct
  misc_feature 1..20: note = Artificial sequence related to HLA knockouts in cell therapy
  source 1..20: mol_type = other DNA
aacttcatggtgcactgagc

SEQ ID NO: 15420 - DNA, 20 bp, synthetic construct
  misc_feature 1..20: note = Artificial sequence related to HLA knockouts in cell therapy
  source 1..20: mol_type = other DNA
acttcatggtgcactgagct

SEQ ID NO: 15421 - DNA, 20 bp, synthetic construct
  misc_feature 1..20: note = Artificial sequence related to HLA knockouts in cell therapy
  source 1..20: mol_type = other DNA
cttcatggtgcactgagctg

SEQ ID NO: 15422 - DNA, 20 bp, synthetic construct
  misc_feature 1..20: note = Artificial sequence related to HLA knockouts in cell therapy
  source 1..20: mol_type = other DNA
ttcatggtgcactgagctgt

SEQ ID NO: 15423 - DNA, 20 bp, synthetic construct
  misc_feature 1..20: note = Artificial sequence related to HLA knockouts in cell therapy
  source 1..20: mol_type = other DNA
tcatggtgcactgagctgta

SEQ ID NO: 15424 - DNA, 20 bp, synthetic construct
  misc_feature 1..20: note = Artificial sequence related to HLA knockouts in cell therapy
  source 1..20: mol_type = other DNA
catggtgcactgagctgtaa

SEQ ID NO: 15425 - DNA, 20 bp, synthetic construct
  misc_feature 1..20: note = Artificial sequence related to HLA knockouts in cell therapy
  source 1..20: mol_type = other DNA
atggtgcactgagctgtaac

SEQ ID NO: 15426 - DNA, 20 bp, synthetic construct
  misc_feature 1..20: note = Artificial sequence related to HLA knockouts in cell therapy
  source 1..20: mol_type = other DNA
tggtgcactgagctgtaact

SEQ ID NO: 15427 - DNA, 20 bp, synthetic construct
  misc_feature 1..20: note = Artificial sequence related to HLA knockouts in cell therapy
  source 1..20: mol_type = other DNA
ggtgcactgagctgtaactt

SEQ ID NO: 15428 - DNA, 20 bp, synthetic construct
  misc_feature 1..20: note = Artificial sequence related to HLA knockouts in cell therapy
  source 1..20: mol_type = other DNA
gtgcactgagctgtaacttc

SEQ ID NO: 15429 - DNA, 20 bp, synthetic construct
  misc_feature 1..20: note = Artificial sequence related to HLA knockouts in cell therapy
  source 1..20: mol_type = other DNA
tgcactgagctgtaacttct

SEQ ID NO: 15430 - DNA, 20 bp, synthetic construct
  misc_feature 1..20: note = Artificial sequence related to HLA knockouts in cell therapy
  source 1..20: mol_type = other DNA
gcactgagctgtaacttctt

SEQ ID NO: 15431 - DNA, 20 bp, synthetic construct
  misc_feature 1..20: note = Artificial sequence related to HLA knockouts in cell therapy
  source 1..20: mol_type = other DNA
cactgagctgtaacttcttc

SEQ ID NO: 15432 - DNA, 20 bp, synthetic construct
  misc_feature 1..20: note = Artificial sequence related to HLA knockouts in cell therapy
  source 1..20: mol_type = other DNA
actgagctgtaacttcttcc

SEQ ID NO: 15433 - DNA, 20 bp, synthetic construct
  misc_feature 1..20: note = Artificial sequence related to HLA knockouts in cell therapy
  source 1..20: mol_type = other DNA
ctgagctgtaacttcttcct

SEQ ID NO: 15434 - DNA, 20 bp, synthetic construct
  misc_feature 1..20: note = Artificial sequence related to HLA knockouts in cell therapy
  source 1..20: mol_type = other DNA
tgagctgtaacttcttcctt

SEQ ID NO: 15435 - DNA, 20 bp, synthetic construct
  misc_feature 1..20: note = Artificial sequence related to HLA knockouts in cell therapy
  source 1..20: mol_type = other DNA
gagctgtaacttcttccttc

SEQ ID NO: 15436 - DNA, 20 bp, synthetic construct
  misc_feature 1..20: note = Artificial sequence related to HLA knockouts in cell therapy
  source 1..20: mol_type = other DNA
agctgtaacttcttccttcc

SEQ ID NO: 15437 - DNA, 20 bp, synthetic construct
  misc_feature 1..20: note = Artificial sequence related to HLA knockouts in cell therapy
  source 1..20: mol_type = other DNA
gctgtaacttcttccttccc

SEQ ID NO: 15438 - DNA, 20 bp, synthetic construct
  misc_feature 1..20: note = Artificial sequence related to HLA knockouts in cell therapy
  source 1..20: mol_type = other DNA
ctgtaacttcttccttccct

SEQ ID NO: 15439 - DNA, 20 bp, synthetic construct
  misc_feature 1..20: note = Artificial sequence related to HLA knockouts in cell therapy
  source 1..20: mol_type = other DNA
tgtaacttcttccttcccta

SEQ ID NO: 15440 - DNA, 20 bp, synthetic construct
  misc_feature 1..20: note = Artificial sequence related to HLA knockouts in cell therapy
  source 1..20: mol_type = other DNA
gtaacttcttccttccctat

SEQ ID NO: 15441 - DNA, 20 bp, synthetic construct
  misc_feature 1..20: note = Artificial sequence related to HLA knockouts in cell therapy
  source 1..20: mol_type = other DNA
taacttcttccttccctatt

SEQ ID NO: 15442 - DNA, 20 bp, synthetic construct
  misc_feature 1..20: note = Artificial sequence related to HLA knockouts in cell therapy
  source 1..20: mol_type = other DNA
aacttcttccttccctatta

SEQ ID NO: 15443 - DNA, 20 bp, synthetic construct
  misc_feature 1..20: note = Artificial sequence related to HLA knockouts in cell therapy
  source 1..20: mol_type = other DNA
acttcttccttccctattaa

SEQ ID NO: 15444 - DNA, 20 bp, synthetic construct
  misc_feature 1..20: note = Artificial sequence related to HLA knockouts in cell therapy
  source 1..20: mol_type = other DNA
cttcttccttccctattaaa

SEQ ID NO: 15445 - DNA, 21 bp, synthetic construct
  misc_feature 1..21: note = Artificial sequence related to HLA knockouts in cell therapy
  source 1..21: mol_type = other DNA
cccgaaggcggtgtatggatt

SEQ ID NO: 15446 - DNA, 21 bp, synthetic construct
  misc_feature 1..21: note = Artificial sequence related to HLA knockouts in cell therapy
  source 1..21: mol_type = other DNA
ccgaaggcggtgtatggattg

SEQ ID NO: 15447 - DNA, 21 bp, synthetic construct
  misc_feature 1..21: note = Artificial sequence related to HLA knockouts in cell therapy
  source 1..21: mol_type = other DNA
cgaaggcggtgtatggattgg

SEQ ID NO: 15448 - DNA, 21 bp, synthetic construct
  misc_feature 1..21: note = Artificial sequence related to HLA knockouts in cell therapy
  source 1..21: mol_type = other DNA
gaaggcggtgtatggattggg

SEQ ID NO: 15449 - DNA, 21 bp, synthetic construct
  misc_feature 1..21: note = Artificial sequence related to HLA knockouts in cell therapy
  source 1..21: mol_type = other DNA
ccctctcccaacctatgtagg

SEQ ID NO: 15450 - DNA, 21 bp, synthetic construct
  misc_feature 1..21: note = Artificial sequence related to HLA knockouts in cell therapy
  source 1..21: mol_type = other DNA
cctctcccaacctatgtaggg

SEQ ID NO: 15451 - DNA, 21 bp, synthetic construct
  misc_feature 1..21: note = Artificial sequence related to HLA knockouts in cell therapy
  source 1..21: mol_type = other DNA
ctctcccaacctatgtagggt

SEQ ID NO: 15452 - DNA, 21 bp, synthetic construct
  misc_feature 1..21: note = Artificial sequence related to HLA knockouts in cell therapy
  source 1..21: mol_type = other DNA
tctcccaacctatgtagggtc

SEQ ID NO: 15453 - DNA, 21 bp, synthetic construct
  misc_feature 1..21: note = Artificial sequence related to HLA knockouts in cell therapy
  source 1..21: mol_type = other DNA
ctcccaacctatgtagggtcc

SEQ ID NO: 15454 - DNA, 21 bp, synthetic construct
  misc_feature 1..21: note = Artificial sequence related to HLA knockouts in cell therapy
  source 1..21: mol_type = other DNA
tcccaacctatgtagggtcct

SEQ ID NO: 15455 - DNA, 21 bp, synthetic construct
  misc_feature 1..21: note = Artificial sequence related to HLA knockouts in cell therapy
  source 1..21: mol_type = other DNA
aacctatgtagggtccttctt

SEQ ID NO: 15456 - DNA, 21 bp, synthetic construct
  misc_feature 1..21: note = Artificial sequence related to HLA knockouts in cell therapy
  source 1..21: mol_type = other DNA
atgtagggtccttcttcctgg

SEQ ID NO: 15457 - DNA, 21 bp, synthetic construct
  misc_feature 1..21: note = Artificial sequence related to HLA knockouts in cell therapy
  source 1..21: mol_type = other DNA
tgtagggtccttcttcctgga

SEQ ID NO: 15458 - DNA, 21 bp, synthetic construct
  misc_feature 1..21: note = Artificial sequence related to HLA knockouts in cell therapy
  source 1..21: mol_type = other DNA
ccttcttcctggatactcacg

SEQ ID NO: 15459 - DNA, 21 bp, synthetic construct
  misc_feature 1..21: note = Artificial sequence related to HLA knockouts in cell therapy
  source 1..21: mol_type = other DNA
ttcttcctggatactcacgac

SEQ ID NO: 15460 - DNA, 21 bp, synthetic construct
  misc_feature 1..21: note = Artificial sequence related to HLA knockouts in cell therapy
  source 1..21: mol_type = other DNA
tcttcctggatactcacgacg

SEQ ID NO: 15461 - DNA, 21 bp, synthetic construct
  misc_feature 1..21: note = Artificial sequence related to HLA knockouts in cell therapy
  source 1..21: mol_type = other DNA
cttcctggatactcacgacgc

SEQ ID NO: 15462 - DNA, 21 bp, synthetic construct
  misc_feature 1..21: note = Artificial sequence related to HLA knockouts in cell therapy
  source 1..21: mol_type = other DNA
ttcctggatactcacgacgcg

SEQ ID NO: 15463 - DNA, 21 bp, synthetic construct
  misc_feature 1..21: note = Artificial sequence related to HLA knockouts in cell therapy
  source 1..21: mol_type = other DNA
ggacccagttctcactcccat

SEQ ID NO: 15464 - DNA, 21 bp, synthetic construct
  misc_feature 1..21: note = Artificial sequence related to HLA knockouts in cell therapy
  source 1..21: mol_type = other DNA
cccagttctcactcccattgg

SEQ ID NO: 15465 - DNA, 21 bp, synthetic construct
  misc_feature 1..21: note = Artificial sequence related to HLA knockouts in cell therapy
  source 1..21: mol_type = other DNA
ccagttctcactcccattggg

SEQ ID NO: 15466 - DNA, 21 bp, synthetic construct
  misc_feature 1..21: note = Artificial sequence related to HLA knockouts in cell therapy
  source 1..21: mol_type = other DNA
cagttctcactcccattgggt

SEQ ID NO: 15467 - DNA, 21 bp, synthetic construct
  misc_feature 1..21: note = Artificial sequence related to HLA knockouts in cell therapy
  source 1..21: mol_type = other DNA
agttctcactcccattgggtg

SEQ ID NO: 15468 - DNA, 21 bp, synthetic construct
  misc_feature 1..21: note = Artificial sequence related to HLA knockouts in cell therapy
  source 1..21: mol_type = other DNA
gttctcactcccattgggtgt

SEQ ID NO: 15469 - DNA, 21 bp, synthetic construct
  misc_feature 1..21: note = Artificial sequence related to HLA knockouts in cell therapy
  source 1..21: mol_type = other DNA
tctcactcccattgggtgtcg

SEQ ID NO: 15470 - DNA, 21 bp, synthetic construct
  misc_feature 1..21: note = Artificial sequence related to HLA knockouts in cell therapy
  source 1..21: mol_type = other DNA
actcccattgggtgtcgggtt

SEQ ID NO: 15471 - DNA, 21 bp, synthetic construct
  misc_feature 1..21: note = Artificial sequence related to HLA knockouts in cell therapy
  source 1..21: mol_type = other DNA
ctcccattgggtgtcgggttt

SEQ ID NO: 15472 - DNA, 21 bp, synthetic construct
  misc_feature 1..21: note = Artificial sequence related to HLA knockouts in cell therapy
  source 1..21: mol_type = other DNA
tcccattgggtgtcgggtttc

SEQ ID NO: 15473 - DNA, 21 bp, synthetic construct
  misc_feature 1..21: note = Artificial sequence related to HLA knockouts in cell therapy
  source 1..21: mol_type = other DNA
ccattgggtgtcgggtttcca

SEQ ID NO: 15474 - DNA, 21 bp, synthetic construct
  misc_feature 1..21: note = Artificial sequence related to HLA knockouts in cell therapy
  source 1..21: mol_type = other DNA
cattgggtgtcgggtttccag

SEQ ID NO: 15475 - DNA, 21 bp, synthetic construct
  misc_feature 1..21: note = Artificial sequence related to HLA knockouts in cell therapy
  source 1..21: mol_type = other DNA
ttgggtgtcgggtttccagag

SEQ ID NO: 15476 - DNA, 21 bp, synthetic construct
  misc_feature 1..21: note = Artificial sequence related to HLA knockouts in cell therapy
  source 1..21: mol_type = other DNA
tgggtgtcgggtttccagaga

SEQ ID NO: 15477 - DNA, 21 bp, synthetic construct
  misc_feature 1..21: note = Artificial sequence related to HLA knockouts in cell therapy
  source 1..21: mol_type = other DNA
gggtgtcgggtttccagagaa

SEQ ID NO: 15478 - DNA, 21 bp, synthetic construct
  misc_feature 1..21: note = Artificial sequence related to HLA knockouts in cell therapy
  source 1..21: mol_type = other DNA
ggtgtcgggtttccagagaag

SEQ ID NO: 15479 - DNA, 21 bp, synthetic construct
  misc_feature 1..21: note = Artificial sequence related to HLA knockouts in cell therapy
  source 1..21: mol_type = other DNA
gtgtcgggtttccagagaagc

SEQ ID NO: 15480 - DNA, 21 bp, synthetic construct
  misc_feature 1..21: note = Artificial sequence related to HLA knockouts in cell therapy
  source 1..21: mol_type = other DNA
tgtcgggtttccagagaagcc

SEQ ID NO: 15481 - DNA, 21 bp, synthetic construct
  misc_feature 1..21: note = Artificial sequence related to HLA knockouts in cell therapy
  source 1..21: mol_type = other DNA
gtcgggtttccagagaagcca

SEQ ID NO: 15482 - DNA, 21 bp, synthetic construct
  misc_feature 1..21: note = Artificial sequence related to HLA knockouts in cell therapy
  source 1..21: mol_type = other DNA
cagagaagccaatcagtgtcg

SEQ ID NO: 15483 - DNA, 21 bp, synthetic construct
  misc_feature 1..21: note = Artificial sequence related to HLA knockouts in cell therapy
  source 1..21: mol_type = other DNA
gagaagccaatcagtgtcgtc

SEQ ID NO: 15484 - DNA, 21 bp, synthetic construct
  misc_feature 1..21: note = Artificial sequence related to HLA knockouts in cell therapy
  source 1..21: mol_type = other DNA
agaagccaatcagtgtcgtcg

SEQ ID NO: 15485 - DNA, 21 bp, synthetic construct
  misc_feature 1..21: note = Artificial sequence related to HLA knockouts in cell therapy
  source 1..21: mol_type = other DNA
gaagccaatcagtgtcgtcgc

SEQ ID NO: 15486 - DNA, 21 bp, synthetic construct
  misc_feature 1..21: note = Artificial sequence related to HLA knockouts in cell therapy
  source 1..21: mol_type = other DNA
tcgcggtcgcggttctaaagt

SEQ ID NO: 15487 - DNA, 21 bp, synthetic construct
  misc_feature 1..21: note = Artificial sequence related to HLA knockouts in cell therapy
  source 1..21: mol_type = other DNA
gtcgcggttctaaagtccgca

SEQ ID NO: 15488 - DNA, 21 bp, synthetic construct
  misc_feature 1..21: note = Artificial sequence related to HLA knockouts in cell therapy
  source 1..21: mol_type = other DNA
tcgcggttctaaagtccgcac

SEQ ID NO: 15489 - DNA, 21 bp, synthetic construct
  misc_feature 1..21: note = Artificial sequence related to HLA knockouts in cell therapy
  source 1..21: mol_type = other DNA
cggttctaaagtccgcacgca

SEQ ID NO: 15490 - DNA, 21 bp, synthetic construct
  misc_feature 1..21: note = Artificial sequence related to HLA knockouts in cell therapy
  source 1..21: mol_type = other DNA
ggttctaaagtccgcacgcac

SEQ ID NO: 15491 - DNA, 21 bp, synthetic construct
  misc_feature 1..21: note = Artificial sequence related to HLA knockouts in cell therapy
  source 1..21: mol_type = other DNA
gttctaaagtccgcacgcacc

SEQ ID NO: 15492 - DNA, 21 bp, synthetic construct
  misc_feature 1..21: note = Artificial sequence related to HLA knockouts in cell therapy
  source 1..21: mol_type = other DNA
ttctaaagtccgcacgcaccc

SEQ ID NO: 15493 - DNA, 21 bp, synthetic construct
  misc_feature 1..21: note = Artificial sequence related to HLA knockouts in cell therapy
  source 1..21: mol_type = other DNA
tctaaagtccgcacgcaccca

SEQ ID NO: 15494 - DNA, 21 bp, synthetic construct
  misc_feature 1..21: note = Artificial sequence related to HLA knockouts in cell therapy
  source 1..21: mol_type = other DNA
acccaccgggactcagattct

SEQ ID NO: 15495 - DNA, 21 bp, synthetic construct
  misc_feature 1..21: note = Artificial sequence related to HLA knockouts in cell therapy
  source 1..21: mol_type = other DNA
gaaccctcgtcctgctactct

SEQ ID NO: 15496 - DNA, 21 bp, synthetic construct
  misc_feature 1..21: note = Artificial sequence related to HLA knockouts in cell therapy
  source 1..21: mol_type = other DNA
aaccctcgtcctgctactctc

SEQ ID NO: 15497 - DNA, 21 bp, synthetic construct
  misc_feature 1..21: note = Artificial sequence related to HLA knockouts in cell therapy
  source 1..21: mol_type = other DNA
gggctctcactccatgaggta

SEQ ID NO: 15498 - DNA, 21 bp, synthetic construct
  misc_feature 1..21: note = Artificial sequence related to HLA knockouts in cell therapy
  source 1..21: mol_type = other DNA
tgaggtatttcttcacatccg

SEQ ID NO: 15499 - DNA, 21 bp, synthetic construct
  misc_feature 1..21: note = Artificial sequence related to HLA knockouts in cell therapy
  source 1..21: mol_type = other DNA
gaggtatttcttcacatccgt

SEQ ID NO: 15500 - DNA, 21 bp, synthetic construct
  misc_feature 1..21: note = Artificial sequence related to HLA knockouts in cell therapy
  source 1..21: mol_type = other DNA
aggtatttcttcacatccgtg

SEQ ID NO: 15501 - DNA, 21 bp, synthetic construct
  misc_feature 1..21: note = Artificial sequence related to HLA knockouts in cell therapy
  source 1..21: mol_type = other DNA
ggtatttcttcacatccgtgt

SEQ ID NO: 15502 - DNA, 21 bp, synthetic construct
  misc_feature 1..21: note = Artificial sequence related to HLA knockouts in cell therapy
  source 1..21: mol_type = other DNA
tatttcttcacatccgtgtcc

SEQ ID NO: 15503 - DNA, 21 bp, synthetic construct
  misc_feature 1..21: note = Artificial sequence related to HLA knockouts in cell therapy
  source 1..21: mol_type = other DNA
atttcttcacatccgtgtccc

SEQ ID NO: 15504 - DNA, 21 bp, synthetic construct
  misc_feature 1..21: note = Artificial sequence related to HLA knockouts in cell therapy
  source 1..21: mol_type = other DNA
tttcttcacatccgtgtcccg

SEQ ID NO: 15505 - DNA, 21 bp, synthetic construct
  misc_feature 1..21: note = Artificial sequence related to HLA knockouts in cell therapy
  source 1..21: mol_type = other DNA
ttcttcacatccgtgtcccgg

SEQ ID NO: 15506 - DNA, 21 bp, synthetic construct
  misc_feature 1..21: note = Artificial sequence related to HLA knockouts in cell therapy
  source 1..21: mol_type = other DNA
cttcatcgcagtgggctacgt

SEQ ID NO: 15507 - DNA, 21 bp, synthetic construct
  misc_feature 1..21: note = Artificial sequence related to HLA knockouts in cell therapy
  source 1..21: mol_type = other DNA
ttcatcgcagtgggctacgtg

SEQ ID NO: 15508 - DNA, 21 bp, synthetic construct
  misc_feature 1..21: note = Artificial sequence related to HLA knockouts in cell therapy
  source 1..21: mol_type = other DNA
ctacgtggacgacacgcagtt

SEQ ID NO: 15509 - DNA, 21 bp, synthetic construct
  misc_feature 1..21: note = Artificial sequence related to HLA knockouts in cell therapy
  source 1..21: mol_type = other DNA
tacgtggacgacacgcagttc

SEQ ID NO: 15510 - DNA, 21 bp, synthetic construct
  misc_feature 1..21: note = Artificial sequence related to HLA knockouts in cell therapy
  source 1..21: mol_type = other DNA
gggagacacggaaagtgaagg

SEQ ID NO: 15511 - DNA, 21 bp, synthetic construct
  misc_feature 1..21: note = Artificial sequence related to HLA knockouts in cell therapy
  source 1..21: mol_type = other DNA
ggagacacggaaagtgaaggc

SEQ ID NO: 15512 - DNA, 21 bp, synthetic construct
  misc_feature 1..21: note = Artificial sequence related to HLA knockouts in cell therapy
  source 1..21: mol_type = other DNA
gagacacggaaagtgaaggcc

SEQ ID NO: 15513 - DNA, 21 bp, synthetic construct
  misc_feature 1..21: note = Artificial sequence related to HLA knockouts in cell therapy
  source 1..21: mol_type = other DNA
agacacggaaagtgaaggccc

SEQ ID NO: 15514 - DNA, 21 bp, synthetic construct
  misc_feature 1..21: note = Artificial sequence related to HLA knockouts in cell therapy
  source 1..21: mol_type = other DNA
gacacggaaagtgaaggccca

SEQ ID NO: 15515 - DNA, 21 bp, synthetic construct
  misc_feature 1..21: note = Artificial sequence related to HLA knockouts in cell therapy
  source 1..21: mol_type = other DNA
acacggaaagtgaaggcccac

SEQ ID NO: 15516 - DNA, 21 bp, synthetic construct
  misc_feature 1..21: note = Artificial sequence related to HLA knockouts in cell therapy
  source 1..21: mol_type = other DNA
cacggaaagtgaaggcccact

SEQ ID NO: 15517 - DNA, 21 bp, synthetic construct
  misc_feature 1..21: note = Artificial sequence related to HLA knockouts in cell therapy
  source 1..21: mol_type = other DNA
acggaaagtgaaggcccactc

SEQ ID NO: 15518 - DNA, 21 bp, synthetic construct
  misc_feature 1..21: note = Artificial sequence related to HLA knockouts in cell therapy
  source 1..21: mol_type = other DNA
cggaaagtgaaggcccactca

SEQ ID NO: 15519 - DNA, 21 bp, synthetic construct
  misc_feature 1..21: note = Artificial sequence related to HLA knockouts in cell therapy
  source 1..21: mol_type = other DNA
ggaaagtgaaggcccactcac

SEQ ID NO: 15520 - DNA, 21 bp, synthetic construct
  misc_feature 1..21: note = Artificial sequence related to HLA knockouts in cell therapy
  source 1..21: mol_type = other DNA
aaagtgaaggcccactcacag

SEQ ID NO: 15521 - DNA, 21 bp, synthetic construct
  misc_feature 1..21: note = Artificial sequence related to HLA knockouts in cell therapy
  source 1..21: mol_type = other DNA
aagtgaaggcccactcacaga

SEQ ID NO: 15522 - DNA, 21 bp, synthetic construct
  misc_feature 1..21: note = Artificial sequence related to HLA knockouts in cell therapy
  source 1..21: mol_type = other DNA
agtgaaggcccactcacagac

SEQ ID NO: 15523 - DNA, 21 bp, synthetic construct
  misc_feature 1..21: note = Artificial sequence related to HLA knockouts in cell therapy
  source 1..21: mol_type = other DNA
gtgaaggcccactcacagact

SEQ ID NO: 15524 - DNA, 21 bp, synthetic construct
  misc_feature 1..21: note = Artificial sequence related to HLA knockouts in cell therapy
  source 1..21: mol_type = other DNA
tgaaggcccactcacagactc

SEQ ID NO: 15525 - DNA, 21 bp, synthetic construct
  misc_feature 1..21: note = Artificial sequence related to HLA knockouts in cell therapy
  source 1..21: mol_type = other DNA
gaaggcccactcacagactca

SEQ ID NO: 15526 - DNA, 21 bp, synthetic construct
  misc_feature 1..21: note = Artificial sequence related to HLA knockouts in cell therapy
  source 1..21: mol_type = other DNA
aaggcccactcacagactcac

SEQ ID NO: 15527 - DNA, 21 bp, synthetic construct
  misc_feature 1..21: note = Artificial sequence related to HLA knockouts in cell therapy
  source 1..21: mol_type = other DNA
ccactcacagactcaccgagt

SEQ ID NO: 15528 - DNA, 21 bp, synthetic construct
  misc_feature 1..21: note = Artificial sequence related to HLA knockouts in cell therapy
  source 1..21: mol_type = other DNA
cactcacagactcaccgagtg

SEQ ID NO: 15529 - DNA, 21 bp, synthetic construct
  misc_feature 1..21: note = Artificial sequence related to HLA knockouts in cell therapy
  source 1..21: mol_type = other DNA
actcacagactcaccgagtgg

SEQ ID NO: 15530 - DNA, 21 bp, synthetic construct
  misc_feature 1..21: note = Artificial sequence related to HLA knockouts in cell therapy
  source 1..21: mol_type = other DNA
ctcacagactcaccgagtgga

SEQ ID NO: 15531 - DNA, 21 bp, synthetic construct
  misc_feature 1..21: note = Artificial sequence related to HLA knockouts in cell therapy
  source 1..21: mol_type = other DNA
tcacagactcaccgagtggac

SEQ ID NO: 15532 - DNA, 21 bp, synthetic construct
  misc_feature 1..21: note = Artificial sequence related to HLA knockouts in cell therapy
  source 1..21: mol_type = other DNA
acagactcaccgagtggacct

SEQ ID NO: 15533 - DNA, 21 bp, synthetic construct
  misc_feature 1..21: note = Artificial sequence related to HLA knockouts in cell therapy
  source 1..21: mol_type = other DNA
cggctactacaaccagagcga

SEQ ID NO: 15534 - DNA, 21 bp, synthetic construct
  misc_feature 1..21: note = Artificial sequence related to HLA knockouts in cell therapy
  source 1..21: mol_type = other DNA
ggctactacaaccagagcgag

SEQ ID NO: 15535 - DNA, 21 bp, synthetic construct
  misc_feature 1..21: note = Artificial sequence related to HLA knockouts in cell therapy
  source 1..21: mol_type = other DNA
gctactacaaccagagcgagg

SEQ ID NO: 15536 - DNA, 21 bp, synthetic construct
  misc_feature 1..21: note = Artificial sequence related to HLA knockouts in cell therapy
  source 1..21: mol_type = other DNA
ctactacaaccagagcgaggc

SEQ ID NO: 15537 - DNA, 21 bp, synthetic construct
  misc_feature 1..21: note = Artificial sequence related to HLA knockouts in cell therapy
  source 1..21: mol_type = other DNA
tactacaaccagagcgaggcc

SEQ ID NO: 15538 - DNA, 21 bp, synthetic construct
  misc_feature 1..21: note = Artificial sequence related to HLA knockouts in cell therapy
  source 1..21: mol_type = other DNA
gttctcacaccgtccagagga

SEQ ID NO: 15539 - DNA, 21 bp, synthetic construct
  misc_feature 1..21: note = Artificial sequence related to HLA knockouts in cell therapy
  source 1..21: mol_type = other DNA
tctcacaccgtccagaggatg

SEQ ID NO: 15540 - DNA, 21 bp, synthetic construct
  misc_feature 1..21: note = Artificial sequence related to HLA knockouts in cell therapy
  source 1..21: mol_type = other DNA
ctcacaccgtccagaggatgt

SEQ ID NO: 15541 - DNA, 21 bp, synthetic construct
  misc_feature 1..21: note = Artificial sequence related to HLA knockouts in cell therapy
  source 1..21: mol_type = other DNA
caccgtccagaggatgtatgg

SEQ ID NO: 15542 - DNA, 21 bp, synthetic construct
  misc_feature 1..21: note = Artificial sequence related to HLA knockouts in cell therapy
  source 1..21: mol_type = other DNA
accgtccagaggatgtatggc

SEQ ID NO: 15543 - DNA, 21 bp, synthetic construct
  misc_feature 1..21: note = Artificial sequence related to HLA knockouts in cell therapy
  source 1..21: mol_type = other DNA
ccgtccagaggatgtatggct

SEQ ID NO: 15544 - DNA, 21 bp, synthetic construct
  misc_feature 1..21: note = Artificial sequence related to HLA knockouts in cell therapy
  source 1..21: mol_type = other DNA
cgtccagaggatgtatggctg

SEQ ID NO: 15545 - DNA, 21 bp, synthetic construct
  misc_feature 1..21: note = Artificial sequence related to HLA knockouts in cell therapy
  source 1..21: mol_type = other DNA
gtccagaggatgtatggctgc

SEQ ID NO: 15546 - DNA, 21 bp, synthetic construct
  misc_feature 1..21: note = Artificial sequence related to HLA knockouts in cell therapy
  source 1..21: mol_type = other DNA
tccagaggatgtatggctgcg

SEQ ID NO: 15547 - DNA, 21 bp, synthetic construct
  misc_feature 1..21: note = Artificial sequence related to HLA knockouts in cell therapy
  source 1..21: mol_type = other DNA
ccagaggatgtatggctgcga

SEQ ID NO: 15548 - DNA, 21 bp, synthetic construct
  misc_feature 1..21: note = Artificial sequence related to HLA knockouts in cell therapy
  source 1..21: mol_type = other DNA
cagaggatgtatggctgcgac

SEQ ID NO: 15549 - DNA, 21 bp, synthetic construct
  misc_feature 1..21: note = Artificial sequence related to HLA knockouts in cell therapy
  source 1..21: mol_type = other DNA
agaggatgtatggctgcgacg

SEQ ID NO: 15550 - DNA, 21 bp, synthetic construct
  misc_feature 1..21: note = Artificial sequence related to HLA knockouts in cell therapy
  source 1..21: mol_type = other DNA
gaggatgtatggctgcgacgt

SEQ ID NO: 15551 - DNA, 21 bp, synthetic construct
  misc_feature 1..21: note = Artificial sequence related to HLA knockouts in cell therapy
  source 1..21: mol_type = other DNA
aggatgtatggctgcgacgtg

SEQ ID NO: 15552 - DNA, 21 bp, synthetic construct
  misc_feature 1..21: note = Artificial sequence related to HLA knockouts in cell therapy
  source 1..21: mol_type = other DNA
gtaccaccagtacgcctacga

SEQ ID NO: 15553 - DNA, 21 bp, synthetic construct
  misc_feature 1..21: note = Artificial sequence related to HLA knockouts in cell therapy
  source 1..21: mol_type = other DNA
taccaccagtacgcctacgac

SEQ ID NO: 15554 - DNA, 21 bp, synthetic construct
  misc_feature 1..21: note = Artificial sequence related to HLA knockouts in cell therapy
  source 1..21: mol_type = other DNA
tacgcctacgacggcaaggat

SEQ ID NO: 15555 - DNA, 21 bp, synthetic construct
  misc_feature 1..21: note = Artificial sequence related to HLA knockouts in cell therapy
  source 1..21: mol_type = other DNA
acgcctacgacggcaaggatt

SEQ ID NO: 15556 - DNA, 21 bp, synthetic construct
  misc_feature 1..21: note = Artificial sequence related to HLA knockouts in cell therapy
  source 1..21: mol_type = other DNA
cgacggcaaggattacatcgc

SEQ ID NO: 15557 - DNA, 21 bp, synthetic construct
  misc_feature 1..21: note = Artificial sequence related to HLA knockouts in cell therapy
  source 1..21: mol_type = other DNA
gacggcaaggattacatcgcc

SEQ ID NO: 15558 - DNA, 21 bp, synthetic construct
  misc_feature 1..21: note = Artificial sequence related to HLA knockouts in cell therapy
  source 1..21: mol_type = other DNA
acggcaaggattacatcgccc

SEQ ID NO: 15559 - DNA, 21 bp, synthetic construct
  misc_feature 1..21: note = Artificial sequence related to HLA knockouts in cell therapy
  source 1..21: mol_type = other DNA
cggcaaggattacatcgccct

SEQ ID NO: 15560 - DNA, 21 bp, synthetic construct
  misc_feature 1..21: note = Artificial sequence related to HLA knockouts in cell therapy
  source 1..21: mol_type = other DNA
ggcaaggattacatcgccctg

SEQ ID NO: 15561 - DNA, 21 bp, synthetic construct
  misc_feature 1..21: note = Artificial sequence related to HLA knockouts in cell therapy
  source 1..21: mol_type = other DNA
gcaaggattacatcgccctga

SEQ ID NO: 15562 - DNA, 21 bp, synthetic construct
  misc_feature 1..21: note = Artificial sequence related to HLA knockouts in cell therapy
  source 1..21: mol_type = other DNA
aaggattacatcgccctgaaa

SEQ ID NO: 15563 - DNA, 21 bp, synthetic construct
  misc_feature 1..21: note = Artificial sequence related to HLA knockouts in cell therapy
  source 1..21: mol_type = other DNA
tacatcgccctgaaagaggac

SEQ ID NO: 15564 - DNA, 21 bp, synthetic construct
  misc_feature 1..21: note = Artificial sequence related to HLA knockouts in cell therapy
  source 1..21: mol_type = other DNA
acatcgccctgaaagaggacc

SEQ ID NO: 15565 - DNA, 21 bp, synthetic construct
  misc_feature 1..21: note = Artificial sequence related to HLA knockouts in cell therapy
  source 1..21: mol_type = other DNA
catcgccctgaaagaggacct

SEQ ID NO: 15566 - DNA, 21 bp, synthetic construct
  misc_feature 1..21: note = Artificial sequence related to HLA knockouts in cell therapy
  source 1..21: mol_type = other DNA
atcgccctgaaagaggacctg

SEQ ID NO: 15567 - DNA, 21 bp, synthetic construct
  misc_feature 1..21: note = Artificial sequence related to HLA knockouts in cell therapy
  source 1..21: mol_type = other DNA
ctgaaagaggacctgcgctct

SEQ ID NO: 15568 - DNA, 21 bp, synthetic construct
  misc_feature 1..21: note = Artificial sequence related to HLA knockouts in cell therapy
  source 1..21: mol_type = other DNA
tgaaagaggacctgcgctctt

SEQ ID NO: 15569 - DNA, 21 bp, synthetic construct
  misc_feature 1..21: note = Artificial sequence related to HLA knockouts in cell therapy
  source 1..21: mol_type = other DNA
gaaagaggacctgcgctcttg

SEQ ID NO: 15570 - DNA, 21 bp, synthetic construct
  misc_feature 1..21: note = Artificial sequence related to HLA knockouts in cell therapy
  source 1..21: mol_type = other DNA
acatggcagctcagaccacca

SEQ ID NO: 15571 - DNA, 21 bp, synthetic construct
  misc_feature 1..21: note = Artificial sequence related to HLA knockouts in cell therapy
  source 1..21: mol_type = other DNA
catggcagctcagaccaccaa

SEQ ID NO: 15572 - DNA, 21 bp, synthetic construct
  misc_feature 1..21: note = Artificial sequence related to HLA knockouts in cell therapy
  source 1..21: mol_type = other DNA
atggcagctcagaccaccaag

SEQ ID NO: 15573 - DNA, 21 bp, synthetic construct
  misc_feature 1..21: note = Artificial sequence related to HLA knockouts in cell therapy
  source 1..21: mol_type = other DNA
cagctcagaccaccaagcaca

SEQ ID NO: 15574 - DNA, 21 bp, synthetic construct
  misc_feature 1..21: note = Artificial sequence related to HLA knockouts in cell therapy
  source 1..21: mol_type = other DNA
gctcagaccaccaagcacaag

SEQ ID NO: 15575 - DNA, 21 bp, synthetic construct
  misc_feature 1..21: note = Artificial sequence related to HLA knockouts in cell therapy
  source 1..21: mol_type = other DNA
cagaccaccaagcacaagtgg

SEQ ID NO: 15576 - DNA, 21 bp, synthetic construct
  misc_feature 1..21: note = Artificial sequence related to HLA knockouts in cell therapy
  source 1..21: mol_type = other DNA
agaccaccaagcacaagtggg

SEQ ID NO: 15577 - DNA, 21 bp, synthetic construct
  misc_feature 1..21: note = Artificial sequence related to HLA knockouts in cell therapy
  source 1..21: mol_type = other DNA
gaccaccaagcacaagtggga

SEQ ID NO: 15578 - DNA, 21 bp, synthetic construct
  misc_feature 1..21: note = Artificial sequence related to HLA knockouts in cell therapy
  source 1..21: mol_type = other DNA
accaccaagcacaagtgggag

SEQ ID NO: 15579 - DNA, 21 bp, synthetic construct
  misc_feature 1..21: note = Artificial sequence related to HLA knockouts in cell therapy
  source 1..21: mol_type = other DNA
catgtggcggagcagttgaga

SEQ ID NO: 15580 - DNA, 21 bp, synthetic construct
  misc_feature 1..21: note = Artificial sequence related to HLA knockouts in cell therapy
  source 1..21: mol_type = other DNA
atgtggcggagcagttgagag

SEQ ID NO: 15581 - DNA, 21 bp, synthetic construct
  misc_feature 1..21: note = Artificial sequence related to HLA knockouts in cell therapy
  source 1..21: mol_type = other DNA
ggagcagttgagagcctacct

SEQ ID NO: 15582 - DNA, 21 bp, synthetic construct
  misc_feature 1..21: note = Artificial sequence related to HLA knockouts in cell therapy
  source 1..21: mol_type = other DNA
gagcagttgagagcctacctg

SEQ ID NO: 15583 - DNA, 21 bp, synthetic construct
  misc_feature 1..21: note = Artificial sequence related to HLA knockouts in cell therapy
  source 1..21: mol_type = other DNA
agcagttgagagcctacctgg

SEQ ID NO: 15584 - DNA, 21 bp, synthetic construct
  misc_feature 1..21: note = Artificial sequence related to HLA knockouts in cell therapy
  source 1..21: mol_type = other DNA
gcagttgagagcctacctgga

SEQ ID NO: 15585 - DNA, 21 bp, synthetic construct
  misc_feature 1..21: note = Artificial sequence related to HLA knockouts in cell therapy
  source 1..21: mol_type = other DNA
cagttgagagcctacctggag

SEQ ID NO: 15586 - DNA, 21 bp, synthetic construct
  misc_feature 1..21: note = Artificial sequence related to HLA knockouts in cell therapy
  source 1..21: mol_type = other DNA
agttgagagcctacctggagg

SEQ ID NO: 15587 - DNA, 21 bp, synthetic construct
  misc_feature 1..21: note = Artificial sequence related to HLA knockouts in cell therapy
  source 1..21: mol_type = other DNA
gctccgcagatacctggagaa

SEQ ID NO: 15588 - DNA, 21 bp, synthetic construct
  misc_feature 1..21: note = Artificial sequence related to HLA knockouts in cell therapy
  source 1..21: mol_type = other DNA
ctccgcagatacctggagaac

SEQ ID NO: 15589 - DNA, 21 bp, synthetic construct
  misc_feature 1..21: note = Artificial sequence related to HLA knockouts in cell therapy
  source 1..21: mol_type = other DNA
tccgcagatacctggagaacg

SEQ ID NO: 15590 - DNA, 21 bp, synthetic construct
  misc_feature 1..21: note = Artificial sequence related to HLA knockouts in cell therapy
  source 1..21: mol_type = other DNA
gcagatacctggagaacggga

SEQ ID NO: 15591 - DNA, 21 bp, synthetic construct
  misc_feature 1..21: note = Artificial sequence related to HLA knockouts in cell therapy
  source 1..21: mol_type = other DNA
cagatacctggagaacgggaa

SEQ ID NO: 15592 - DNA, 21 bp, synthetic construct
  misc_feature 1..21: note = Artificial sequence related to HLA knockouts in cell therapy
  source 1..21: mol_type = other DNA
gatacctggagaacgggaagg

SEQ ID NO: 15593 - DNA, 21 bp, synthetic construct
  misc_feature 1..21: note = Artificial sequence related to HLA knockouts in cell therapy
  source 1..21: mol_type = other DNA
tacctggagaacgggaaggag

SEQ ID NO: 15594 - DNA, 21 bp, synthetic construct
  misc_feature 1..21: note = Artificial sequence related to HLA knockouts in cell therapy
  source 1..21: mol_type = other DNA
acctggagaacgggaaggaga

SEQ ID NO: 15595 - DNA, 21 bp, synthetic construct
  misc_feature 1..21: note = Artificial sequence related to HLA knockouts in cell therapy
  source 1..21: mol_type = other DNA
aacgcatatgactcaccacgc

SEQ ID NO: 15596 - DNA, 21 bp, synthetic construct
  misc_feature 1..21: note = Artificial sequence related to HLA knockouts in cell therapy
  source 1..21: mol_type = other DNA
acgcatatgactcaccacgct

SEQ ID NO: 15597 - DNA, 21 bp, synthetic construct
  misc_feature 1..21: note = Artificial sequence related to HLA knockouts in cell therapy
  source 1..21: mol_type = other DNA
cgcatatgactcaccacgctg

SEQ ID NO: 15598 - DNA, 21 bp, synthetic construct
  misc_feature 1..21: note = Artificial sequence related to HLA knockouts in cell therapy
  source 1..21: mol_type = other DNA
gcatatgactcaccacgctgt

SEQ ID NO: 15599 - DNA, 21 bp, synthetic construct
  misc_feature 1..21: note = Artificial sequence related to HLA knockouts in cell therapy
  source 1..21: mol_type = other DNA
catatgactcaccacgctgtc

SEQ ID NO: 15600 - DNA, 21 bp, synthetic construct
  misc_feature 1..21: note = Artificial sequence related to HLA knockouts in cell therapy
  source 1..21: mol_type = other DNA
tgactcaccacgctgtctctg

SEQ ID NO: 15601 - DNA, 21 bp, synthetic construct
  misc_feature 1..21: note = Artificial sequence related to HLA knockouts in cell therapy
  source 1..21: mol_type = other DNA
gactcaccacgctgtctctga

SEQ ID NO: 15602 - DNA, 21 bp, synthetic construct
  misc_feature 1..21: note = Artificial sequence related to HLA knockouts in cell therapy
  source 1..21: mol_type = other DNA
actcaccacgctgtctctgac

SEQ ID NO: 15603 - DNA, 21 bp, synthetic construct
  misc_feature 1..21: note = Artificial sequence related to HLA knockouts in cell therapy
  source 1..21: mol_type = other DNA
tcaccacgctgtctctgacca

SEQ ID NO: 15604 - DNA, 21 bp, synthetic construct
  misc_feature 1..21: note = Artificial sequence related to HLA knockouts in cell therapy
  source 1..21: mol_type = other DNA
caccacgctgtctctgaccat

SEQ ID NO: 15605 - DNA, 21 bp, synthetic construct
  misc_feature 1..21: note = Artificial sequence related to HLA knockouts in cell therapy
  source 1..21: mol_type = other DNA
accacgctgtctctgaccatg

SEQ ID NO: 15606 - DNA, 21 bp, synthetic construct
  misc_feature 1..21: note = Artificial sequence related to HLA knockouts in cell therapy
  source 1..21: mol_type = other DNA
ccacgctgtctctgaccatga

SEQ ID NO: 15607 - DNA, 21 bp, synthetic construct
  misc_feature 1..21: note = Artificial sequence related to HLA knockouts in cell therapy
  source 1..21: mol_type = other DNA
cgctgtctctgaccatgaagc

SEQ ID NO: 15608 - DNA, 21 bp, synthetic construct
  misc_feature 1..21: note = Artificial sequence related to HLA knockouts in cell therapy
  source 1..21: mol_type = other DNA
gctgtctctgaccatgaagcc

SEQ ID NO: 15609 - DNA, 21 bp, synthetic construct
  misc_feature 1..21: note = Artificial sequence related to HLA knockouts in cell therapy
  source 1..21: mol_type = other DNA
ctgtctctgaccatgaagcca

SEQ ID NO: 15610 - DNA, 21 bp, synthetic construct
  misc_feature 1..21: note = Artificial sequence related to HLA knockouts in cell therapy
  source 1..21: mol_type = other DNA
tgtctctgaccatgaagccac

SEQ ID NO: 15611 - DNA, 21 bp, synthetic construct
  misc_feature 1..21: note = Artificial sequence related to HLA knockouts in cell therapy
  source 1..21: mol_type = other DNA
gtctctgaccatgaagccacc

SEQ ID NO: 15612 - DNA, 21 bp, synthetic construct
  misc_feature 1..21: note = Artificial sequence related to HLA knockouts in cell therapy
  source 1..21: mol_type = other DNA
tctctgaccatgaagccaccc

SEQ ID NO: 15613 - DNA, 21 bp, synthetic construct
  misc_feature 1..21: note = Artificial sequence related to HLA knockouts in cell therapy
  source 1..21: mol_type = other DNA
ctctgaccatgaagccaccct

SEQ ID NO: 15614 - DNA, 21 bp, synthetic construct
  misc_feature 1..21: note = Artificial sequence related to HLA knockouts in cell therapy
  source 1..21: mol_type = other DNA
tctgaccatgaagccaccctg

SEQ ID NO: 15615 - DNA, 21 bp, synthetic construct
  misc_feature 1..21: note = Artificial sequence related to HLA knockouts in cell therapy
  source 1..21: mol_type = other DNA
ctgaccatgaagccaccctga

SEQ ID NO: 15616 - DNA, 21 bp, synthetic construct
  misc_feature 1..21: note = Artificial sequence related to HLA knockouts in cell therapy
  source 1..21: mol_type = other DNA
tgaccatgaagccaccctgag

SEQ ID NO: 15617 - DNA, 21 bp, synthetic construct
  misc_feature 1..21: note = Artificial sequence related to HLA knockouts in cell therapy
  source 1..21: mol_type = other DNA
accatgaagccaccctgaggt

SEQ ID NO: 15618 - DNA, 21 bp, synthetic construct
  misc_feature 1..21: note = Artificial sequence related to HLA knockouts in cell therapy
  source 1..21: mol_type = other DNA
atgaagccaccctgaggtgct

SEQ ID NO: 15619 - DNA, 21 bp, synthetic construct
  misc_feature 1..21: note = Artificial sequence related to HLA knockouts in cell therapy
  source 1..21: mol_type = other DNA
tgagcttctaccctgcggaga

SEQ ID NO: 15620 - DNA, 21 bp, synthetic construct
  misc_feature 1..21: note = Artificial sequence related to HLA knockouts in cell therapy
  source 1..21: mol_type = other DNA
gagcttctaccctgcggagat

SEQ ID NO: 15621 - DNA, 21 bp, synthetic construct
  misc_feature 1..21: note = Artificial sequence related to HLA knockouts in cell therapy
  source 1..21: mol_type = other DNA
agcttctaccctgcggagatc

SEQ ID NO: 15622 - DNA, 21 bp, synthetic construct
  misc_feature 1..21: note = Artificial sequence related to HLA knockouts in cell therapy
  source 1..21: mol_type = other DNA
gcttctaccctgcggagatca

SEQ ID NO: 15623 - DNA, 21 bp, synthetic construct
  misc_feature 1..21: note = Artificial sequence related to HLA knockouts in cell therapy
  source 1..21: mol_type = other DNA
cttctaccctgcggagatcac

SEQ ID NO: 15624 - DNA, 21 bp, synthetic construct
  misc_feature 1..21: note = Artificial sequence related to HLA knockouts in cell therapy
  source 1..21: mol_type = other DNA
tctaccctgcggagatcacac

SEQ ID NO: 15625 - DNA, 21 bp, synthetic construct
  misc_feature 1..21: note = Artificial sequence related to HLA knockouts in cell therapy
  source 1..21: mol_type = other DNA
ctaccctgcggagatcacact

SEQ ID NO: 15626 - DNA, 21 bp, synthetic construct
  misc_feature 1..21: note = Artificial sequence related to HLA knockouts in cell therapy
  source 1..21: mol_type = other DNA
taccctgcggagatcacactg

SEQ ID NO: 15627 - DNA, 21 bp, synthetic construct
  misc_feature 1..21: note = Artificial sequence related to HLA knockouts in cell therapy
  source 1..21: mol_type = other DNA
accctgcggagatcacactga

SEQ ID NO: 15628 - DNA, 21 bp, synthetic construct
  misc_feature 1..21: note = Artificial sequence related to HLA knockouts in cell therapy
  source 1..21: mol_type = other DNA
ctgcggagatcacactgacct

SEQ ID NO: 15629 - DNA, 21 bp, synthetic construct
  misc_feature 1..21: note = Artificial sequence related to HLA knockouts in cell therapy
  source 1..21: mol_type = other DNA
tgcggagatcacactgacctg

SEQ ID NO: 15630 - DNA, 21 bp, synthetic construct
  misc_feature 1..21: note = Artificial sequence related to HLA knockouts in cell therapy
  source 1..21: mol_type = other DNA
gagatcacactgacctggcag

SEQ ID NO: 15631 - DNA, 21 bp, synthetic construct
  misc_feature 1..21: note = Artificial sequence related to HLA knockouts in cell therapy
  source 1..21: mol_type = other DNA
agatcacactgacctggcagc

SEQ ID NO: 15632 - DNA, 21 bp, synthetic construct
  misc_feature 1..21: note = Artificial sequence related to HLA knockouts in cell therapy
  source 1..21: mol_type = other DNA
atggaaccttccagaagtggg

SEQ ID NO: 15633 - DNA, 21 bp, synthetic construct
  misc_feature 1..21: note = Artificial sequence related to HLA knockouts in cell therapy
  source 1..21: mol_type = other DNA
tggaaccttccagaagtgggc

SEQ ID NO: 15634 - DNA, 21 bp, synthetic construct
  misc_feature 1..21: note = Artificial sequence related to HLA knockouts in cell therapy
  source 1..21: mol_type = other DNA
tgtggtggtgccttctggaca

SEQ ID NO: 15635 - DNA, 21 bp, synthetic construct
  misc_feature 1..21: note = Artificial sequence related to HLA knockouts in cell therapy
  source 1..21: mol_type = other DNA
tgccttctggacaggagcaga

SEQ ID NO: 15636 - DNA, 21 bp, synthetic construct
  misc_feature 1..21: note = Artificial sequence related to HLA knockouts in cell therapy
  source 1..21: mol_type = other DNA
ccttctggacaggagcagaga

SEQ ID NO: 15637 - DNA, 21 bp, synthetic construct
  misc_feature 1..21: note = Artificial sequence related to HLA knockouts in cell therapy
  source 1..21: mol_type = other DNA
ggacaggagcagagatacacc

SEQ ID NO: 15638 - DNA, 21 bp, synthetic construct
  misc_feature 1..21: note = Artificial sequence related to HLA knockouts in cell therapy
  source 1..21: mol_type = other DNA
acaggagcagagatacacctg

SEQ ID NO: 15639 - DNA, 21 bp, synthetic construct
  misc_feature 1..21: note = Artificial sequence related to HLA knockouts in cell therapy
  source 1..21: mol_type = other DNA
caggagcagagatacacctgc

SEQ ID NO: 15640 - DNA, 21 bp, synthetic construct
  misc_feature 1..21: note = Artificial sequence related to HLA knockouts in cell therapy
  source 1..21: mol_type = other DNA
aggagcagagatacacctgcc

SEQ ID NO: 15641 - DNA, 21 bp, synthetic construct
  misc_feature 1..21: note = Artificial sequence related to HLA knockouts in cell therapy
  source 1..21: mol_type = other DNA
ggagcagagatacacctgcca

SEQ ID NO: 15642 - DNA, 21 bp, synthetic construct
  misc_feature 1..21: note = Artificial sequence related to HLA knockouts in cell therapy
  source 1..21: mol_type = other DNA
agcagagatacacctgccatg

SEQ ID NO: 15643 - DNA, 21 bp, synthetic construct
  misc_feature 1..21: note = Artificial sequence related to HLA knockouts in cell therapy
  source 1..21: mol_type = other DNA
agatacacctgccatgtgcag

SEQ ID NO: 15644 - DNA, 21 bp, synthetic construct
  misc_feature 1..21: note = Artificial sequence related to HLA knockouts in cell therapy
  source 1..21: mol_type = other DNA
gatacacctgccatgtgcagc

SEQ ID NO: 15645 - DNA, 21 bp, synthetic construct
  misc_feature 1..21: note = Artificial sequence related to HLA knockouts in cell therapy
  source 1..21: mol_type = other DNA
atacacctgccatgtgcagca

SEQ ID NO: 15646 - DNA, 21 bp, synthetic construct
  misc_feature 1..21: note = Artificial sequence related to HLA knockouts in cell therapy
  source 1..21: mol_type = other DNA
acacctgccatgtgcagcatg

SEQ ID NO: 15647 - DNA, 21 bp, synthetic construct
  misc_feature 1..21: note = Artificial sequence related to HLA knockouts in cell therapy
  source 1..21: mol_type = other DNA
acctgccatgtgcagcatgag

SEQ ID NO: 15648 - DNA, 21 bp, synthetic construct
  misc_feature 1..21: note = Artificial sequence related to HLA knockouts in cell therapy
  source 1..21: mol_type = other DNA
tgccatgtgcagcatgagggt

SEQ ID NO: 15649 - DNA, 21 bp, synthetic construct
  misc_feature 1..21: note = Artificial sequence related to HLA knockouts in cell therapy
  source 1..21: mol_type = other DNA
gccatgtgcagcatgagggtt

SEQ ID NO: 15650 - DNA, 21 bp, synthetic construct
  misc_feature 1..21: note = Artificial sequence related to HLA knockouts in cell therapy
  source 1..21: mol_type = other DNA
tgtgcagcatgagggtttgcc

SEQ ID NO: 15651 - DNA, 21 bp, synthetic construct
  misc_feature 1..21: note = Artificial sequence related to HLA knockouts in cell therapy
  source 1..21: mol_type = other DNA
tgcagcatgagggtttgccca

SEQ ID NO: 15652 - DNA, 21 bp, synthetic construct
  misc_feature 1..21: note = Artificial sequence related to HLA knockouts in cell therapy
  source 1..21: mol_type = other DNA
gcagcatgagggtttgcccaa

SEQ ID NO: 15653 - DNA, 21 bp, synthetic construct
  misc_feature 1..21: note = Artificial sequence related to HLA knockouts in cell therapy
  source 1..21: mol_type = other DNA
cagcatgagggtttgcccaag

SEQ ID NO: 15654 - DNA, 21 bp, synthetic construct
  misc_feature 1..21: note = Artificial sequence related to HLA knockouts in cell therapy
  source 1..21: mol_type = other DNA
agcatgagggtttgcccaagc

SEQ ID NO: 15655 - DNA, 21 bp, synthetic construct
  misc_feature 1..21: note = Artificial sequence related to HLA knockouts in cell therapy
  source 1..21: mol_type = other DNA
cccatcgtgggcatcattgct

SEQ ID NO: 15656 - DNA, 21 bp, synthetic construct
  misc_feature 1..21: note = Artificial sequence related to HLA knockouts in cell therapy
  source 1..21: mol_type = other DNA
ccatcgtgggcatcattgctg

SEQ ID NO: 15657 - DNA, 21 bp, synthetic construct
  misc_feature 1..21: note = Artificial sequence related to HLA knockouts in cell therapy
  source 1..21: mol_type = other DNA
catcgtgggcatcattgctgg

SEQ ID NO: 15658 - DNA, 21 bp, synthetic construct
  misc_feature 1..21: note = Artificial sequence related to HLA knockouts in cell therapy
  source 1..21: mol_type = other DNA
atcgtgggcatcattgctggc

SEQ ID NO: 15659 - DNA, 21 bp, synthetic construct
  misc_feature 1..21: note = Artificial sequence related to HLA knockouts in cell therapy
  source 1..21: mol_type = other DNA
ggcatcattgctggcctggtt

SEQ ID NO: 15660 - DNA, 21 bp, synthetic construct
  misc_feature 1..21: note = Artificial sequence related to HLA knockouts in cell therapy
  source 1..21: mol_type = other DNA
gcatcattgctggcctggttc

SEQ ID NO: 15661 - DNA, 21 bp, synthetic construct
  misc_feature 1..21: note = Artificial sequence related to HLA knockouts in cell therapy
  source 1..21: mol_type = other DNA
tgctggcctggttctctttgg

SEQ ID NO: 15662 - DNA, 21 bp, synthetic construct
  misc_feature 1..21: note = Artificial sequence related to HLA knockouts in cell therapy
  source 1..21: mol_type = other DNA
gctggcctggttctctttgga

SEQ ID NO: 15663 - DNA, 21 bp, synthetic construct
  misc_feature 1..21: note = Artificial sequence related to HLA knockouts in cell therapy
  source 1..21: mol_type = other DNA
ctggcctggttctctttggag

SEQ ID NO: 15664 - DNA, 21 bp, synthetic construct
  misc_feature 1..21: note = Artificial sequence related to HLA knockouts in cell therapy
  source 1..21: mol_type = other DNA
tggcctggttctctttggagc

SEQ ID NO: 15665 - DNA, 21 bp, synthetic construct
  misc_feature 1..21: note = Artificial sequence related to HLA knockouts in cell therapy
  source 1..21: mol_type = other DNA
ggcctggttctctttggagct

SEQ ID NO: 15666 - DNA, 21 bp, synthetic construct
  misc_feature 1..21: note = Artificial sequence related to HLA knockouts in cell therapy
  source 1..21: mol_type = other DNA
gcctggttctctttggagctg

SEQ ID NO: 15667 - DNA, 21 bp, synthetic construct
  misc_feature 1..21: note = Artificial sequence related to HLA knockouts in cell therapy
  source 1..21: mol_type = other DNA
ctggttctctttggagctgtg

SEQ ID NO: 15668 - DNA, 21 bp, synthetic construct
  misc_feature 1..21: note = Artificial sequence related to HLA knockouts in cell therapy
  source 1..21: mol_type = other DNA
ctttggagctgtgatcactgg

SEQ ID NO: 15669 - DNA, 21 bp, synthetic construct
  misc_feature 1..21: note = Artificial sequence related to HLA knockouts in cell therapy
  source 1..21: mol_type = other DNA
ttggagctgtgatcactggag

SEQ ID NO: 15670 - DNA, 21 bp, synthetic construct
  misc_feature 1..21: note = Artificial sequence related to HLA knockouts in cell therapy
  source 1..21: mol_type = other DNA
tggagctgtgatcactggagc

SEQ ID NO: 15671 - DNA, 21 bp, synthetic construct
  misc_feature 1..21: note = Artificial sequence related to HLA knockouts in cell therapy
  source 1..21: mol_type = other DNA
ggagctgtgatcactggagct

SEQ ID NO: 15672 - DNA, 21 bp, synthetic construct
  misc_feature 1..21: note = Artificial sequence related to HLA knockouts in cell therapy
  source 1..21: mol_type = other DNA
gagctgtgatcactggagctg

SEQ ID NO: 15673 - DNA, 21 bp, synthetic construct
  misc_feature 1..21: note = Artificial sequence related to HLA knockouts in cell therapy
  source 1..21: mol_type = other DNA
gctgtgatcactggagctgtg

SEQ ID NO: 15674 - DNA, 21 bp, synthetic construct
  misc_feature 1..21: note = Artificial sequence related to HLA knockouts in cell therapy
  source 1..21: mol_type = other DNA
ctgtgatcactggagctgtgg

SEQ ID NO: 15675 - DNA, 21 bp, synthetic construct
  misc_feature 1..21: note = Artificial sequence related to HLA knockouts in cell therapy
  source 1..21: mol_type = other DNA
gtgatcactggagctgtggtc

SEQ ID NO: 15676 - DNA, 21 bp, synthetic construct
  misc_feature 1..21: note = Artificial sequence related to HLA knockouts in cell therapy
  source 1..21: mol_type = other DNA
tgatcactggagctgtggtcg

SEQ ID NO: 15677 - DNA, 21 bp, synthetic construct
  misc_feature 1..21: note = Artificial sequence related to HLA knockouts in cell therapy
  source 1..21: mol_type = other DNA
atcactggagctgtggtcgct

SEQ ID NO: 15678 - DNA, 21 bp, synthetic construct
  misc_feature 1..21: note = Artificial sequence related to HLA knockouts in cell therapy
  source 1..21: mol_type = other DNA
agctgtggtcgctgctgtgat

SEQ ID NO: 15679 - DNA, 21 bp, synthetic construct
  misc_feature 1..21: note = Artificial sequence related to HLA knockouts in cell therapy
  source 1..21: mol_type = other DNA
ctgtggtcgctgctgtgatgt

SEQ ID NO: 15680 - DNA, 21 bp, synthetic construct
  misc_feature 1..21: note = Artificial sequence related to HLA knockouts in cell therapy
  source 1..21: mol_type = other DNA
tgtggtcgctgctgtgatgtg

SEQ ID NO: 15681 - DNA, 21 bp, synthetic construct
  misc_feature 1..21: note = Artificial sequence related to HLA knockouts in cell therapy
  source 1..21: mol_type = other DNA
tggtcgctgctgtgatgtgga

SEQ ID NO: 15682 - DNA, 21 bp, synthetic construct
  misc_feature 1..21: note = Artificial sequence related to HLA knockouts in cell therapy
  source 1..21: mol_type = other DNA
tcgctgctgtgatgtggagga

SEQ ID NO: 15683 - DNA, 21 bp, synthetic construct
  misc_feature 1..21: note = Artificial sequence related to HLA knockouts in cell therapy
  source 1..21: mol_type = other DNA
ctgctgtgatgtggaggagga

SEQ ID NO: 15684 - DNA, 21 bp, synthetic construct
  misc_feature 1..21: note = Artificial sequence related to HLA knockouts in cell therapy
  source 1..21: mol_type = other DNA
gctgtgatgtggaggaggaag

SEQ ID NO: 15685 - DNA, 21 bp, synthetic construct
  misc_feature 1..21: note = Artificial sequence related to HLA knockouts in cell therapy
  source 1..21: mol_type = other DNA
gtgatgtggaggaggaagagc

SEQ ID NO: 15686 - DNA, 21 bp, synthetic construct
  misc_feature 1..21: note = Artificial sequence related to HLA knockouts in cell therapy
  source 1..21: mol_type = other DNA
gatgtggaggaggaagagctc

SEQ ID NO: 15687 - DNA, 21 bp, synthetic construct
  misc_feature 1..21: note = Artificial sequence related to HLA knockouts in cell therapy
  source 1..21: mol_type = other DNA
tgtggaggaggaagagctcag

SEQ ID NO: 15688 - DNA, 21 bp, synthetic construct
  misc_feature 1..21: note = Artificial sequence related to HLA knockouts in cell therapy
  source 1..21: mol_type = other DNA
gtggaggaggaagagctcaga

SEQ ID NO: 15689 - DNA, 21 bp, synthetic construct
  misc_feature 1..21: note = Artificial sequence related to HLA knockouts in cell therapy
  source 1..21: mol_type = other DNA
aaaggagggagctactctcag

SEQ ID NO: 15690 - DNA, 21 bp, synthetic construct
  misc_feature 1..21: note = Artificial sequence related to HLA knockouts in cell therapy
  source 1..21: mol_type = other DNA
aaggagggagctactctcagg

SEQ ID NO: 15691 - DNA, 21 bp, synthetic construct
  misc_feature 1..21: note = Artificial sequence related to HLA knockouts in cell therapy
  source 1..21: mol_type = other DNA
ggagctactctcaggctgcaa

SEQ ID NO: 15692 - DNA, 21 bp, synthetic construct
  misc_feature 1..21: note = Artificial sequence related to HLA knockouts in cell therapy
  source 1..21: mol_type = other DNA
gagctactctcaggctgcaag

SEQ ID NO: 15693 - DNA, 21 bp, synthetic construct
  misc_feature 1..21: note = Artificial sequence related to HLA knockouts in cell therapy
  source 1..21: mol_type = other DNA
agctactctcaggctgcaagc

SEQ ID NO: 15694 - DNA, 21 bp, synthetic construct
  misc_feature 1..21: note = Artificial sequence related to HLA knockouts in cell therapy
  source 1..21: mol_type = other DNA
gctactctcaggctgcaagca

SEQ ID NO: 15695 - DNA, 21 bp, synthetic construct
  misc_feature 1..21: note = Artificial sequence related to HLA knockouts in cell therapy
  source 1..21: mol_type = other DNA
ctactctcaggctgcaagcag

SEQ ID NO: 15696 - DNA, 21 bp, synthetic construct
  misc_feature 1..21: note = Artificial sequence related to HLA knockouts in cell therapy
  source 1..21: mol_type = other DNA
actctcaggctgcaagcagtg

SEQ ID NO: 15697 - DNA, 21 bp, synthetic construct
  misc_feature 1..21: note = Artificial sequence related to HLA knockouts in cell therapy
  source 1..21: mol_type = other DNA
ctctcaggctgcaagcagtga

SEQ ID NO: 15698 - DNA, 21 bp, synthetic construct
  misc_feature 1..21: note = Artificial sequence related to HLA knockouts in cell therapy
  source 1..21: mol_type = other DNA
tctcaggctgcaagcagtgac

SEQ ID NO: 15699 - DNA, 21 bp, synthetic construct
  misc_feature 1..21: note = Artificial sequence related to HLA knockouts in cell therapy
  source 1..21: mol_type = other DNA
ctcaggctgcaagcagtgaca

SEQ ID NO: 15700 - DNA, 21 bp, synthetic construct
  misc_feature 1..21: note = Artificial sequence related to HLA knockouts in cell therapy
  source 1..21: mol_type = other DNA
tcaggctgcaagcagtgacag

SEQ ID NO: 15701 - DNA, 21 bp, synthetic construct
  misc_feature 1..21: note = Artificial sequence related to HLA knockouts in cell therapy
  source 1..21: mol_type = other DNA
caggctgcaagcagtgacagt

SEQ ID NO: 15702 - DNA, 21 bp, synthetic construct
  misc_feature 1..21: note = Artificial sequence related to HLA knockouts in cell therapy
  source 1..21: mol_type = other DNA
aggctgcaagcagtgacagtg

SEQ ID NO: 15703 - DNA, 21 bp, synthetic construct
  misc_feature 1..21: note = Artificial sequence related to HLA knockouts in cell therapy
  source 1..21: mol_type = other DNA
tgcaagcagtgacagtgccca

SEQ ID NO: 15704 - DNA, 21 bp, synthetic construct
  misc_feature 1..21: note = Artificial sequence related to HLA knockouts in cell therapy
  source 1..21: mol_type = other DNA
ccagggctctgatgtgtctct

SEQ ID NO: 15705 - DNA, 21 bp, synthetic construct
  misc_feature 1..21: note = Artificial sequence related to HLA knockouts in cell therapy
  source 1..21: mol_type = other DNA
cagggctctgatgtgtctctc

SEQ ID NO: 15706 - DNA, 21 bp, synthetic construct
  misc_feature 1..21: note = Artificial sequence related to HLA knockouts in cell therapy
  source 1..21: mol_type = other DNA
gggctctgatgtgtctctcac

SEQ ID NO: 15707 - DNA, 21 bp, synthetic construct
  misc_feature 1..21: note = Artificial sequence related to HLA knockouts in cell therapy
  source 1..21: mol_type = other DNA
ctctgatgtgtctctcacagc

SEQ ID NO: 15708 - DNA, 21 bp, synthetic construct
  misc_feature 1..21: note = Artificial sequence related to HLA knockouts in cell therapy
  source 1..21: mol_type = other DNA
ctcacagcttgtaaagtgtga

SEQ ID NO: 15709 - DNA, 21 bp, synthetic construct
  misc_feature 1..21: note = Artificial sequence related to HLA knockouts in cell therapy
  source 1..21: mol_type = other DNA
tcacagcttgtaaagtgtgag

SEQ ID NO: 15710 - DNA, 21 bp, synthetic construct
  misc_feature 1..21: note = Artificial sequence related to HLA knockouts in cell therapy
  source 1..21: mol_type = other DNA
gcttgtaaagtgtgagacagc

SEQ ID NO: 15711 - DNA, 21 bp, synthetic construct
  misc_feature 1..21: note = Artificial sequence related to HLA knockouts in cell therapy
  source 1..21: mol_type = other DNA
ttgtaaagtgtgagacagctg

SEQ ID NO: 15712 - DNA, 21 bp, synthetic construct
  misc_feature 1..21: note = Artificial sequence related to HLA knockouts in cell therapy
  source 1..21: mol_type = other DNA
tgtaaagtgtgagacagctgc

SEQ ID NO: 15713 - DNA, 21 bp, synthetic construct
  misc_feature 1..21: note = Artificial sequence related to HLA knockouts in cell therapy
  source 1..21: mol_type = other DNA
gtaaagtgtgagacagctgcc

SEQ ID NO: 15714 - DNA, 21 bp, synthetic construct
  misc_feature 1..21: note = Artificial sequence related to HLA knockouts in cell therapy
  source 1..21: mol_type = other DNA
taaagtgtgagacagctgcct

SEQ ID NO: 15715 - DNA, 21 bp, synthetic construct
  misc_feature 1..21: note = Artificial sequence related to HLA knockouts in cell therapy
  source 1..21: mol_type = other DNA
aaagtgtgagacagctgcctt

SEQ ID NO: 15716 - DNA, 21 bp, synthetic construct
  misc_feature 1..21: note = Artificial sequence related to HLA knockouts in cell therapy
  source 1..21: mol_type = other DNA
gtgtgagacagctgccttgtg

SEQ ID NO: 15717 - DNA, 21 bp, synthetic construct
  misc_feature 1..21: note = Artificial sequence related to HLA knockouts in cell therapy
  source 1..21: mol_type = other DNA
gtgagacagctgccttgtgtg

SEQ ID NO: 15718 - DNA, 21 bp, synthetic construct
  misc_feature 1..21: note = Artificial sequence related to HLA knockouts in cell therapy
  source 1..21: mol_type = other DNA
tgagacagctgccttgtgtgg

SEQ ID NO: 15719 - DNA, 21 bp, synthetic construct
  misc_feature 1..21: note = Artificial sequence related to HLA knockouts in cell therapy
  source 1..21: mol_type = other DNA
agacagctgccttgtgtggga

SEQ ID NO: 15720 - DNA, 21 bp, synthetic construct
  misc_feature 1..21: note = Artificial sequence related to HLA knockouts in cell therapy
  source 1..21: mol_type = other DNA
acagctgccttgtgtgggact

SEQ ID NO: 15721 - DNA, 21 bp, synthetic construct
  misc_feature 1..21: note = Artificial sequence related to HLA knockouts in cell therapy
  source 1..21: mol_type = other DNA
agctgccttgtgtgggactga

SEQ ID NO: 15722 - DNA, 21 bp, synthetic construct
  misc_feature 1..21: note = Artificial sequence related to HLA knockouts in cell therapy
  source 1..21: mol_type = other DNA
ctgccttgtgtgggactgaga

SEQ ID NO: 15723 - DNA, 21 bp, synthetic construct
  misc_feature 1..21: note = Artificial sequence related to HLA knockouts in cell therapy
  source 1..21: mol_type = other DNA
tgccttgtgtgggactgagag

SEQ ID NO: 15724 - DNA, 21 bp, synthetic construct
  misc_feature 1..21: note = Artificial sequence related to HLA knockouts in cell therapy
  source 1..21: mol_type = other DNA
cttgtgtgggactgagaggca

SEQ ID NO: 15725 - DNA, 21 bp, synthetic construct
  misc_feature 1..21: note = Artificial sequence related to HLA knockouts in cell therapy
  source 1..21: mol_type = other DNA
tgtgtgggactgagaggcaag

SEQ ID NO: 15726 - DNA, 21 bp, synthetic construct
  misc_feature 1..21: note = Artificial sequence related to HLA knockouts in cell therapy
  source 1..21: mol_type = other DNA
gtgtgggactgagaggcaaga

SEQ ID NO: 15727 - DNA, 21 bp, synthetic construct
  misc_feature 1..21: note = Artificial sequence related to HLA knockouts in cell therapy
  source 1..21: mol_type = other DNA
tgtgggactgagaggcaagag

SEQ ID NO: 15728 - DNA, 21 bp, synthetic construct
  misc_feature 1..21: note = Artificial sequence related to HLA knockouts in cell therapy
  source 1..21: mol_type = other DNA
gtgggactgagaggcaagagt

SEQ ID NO: 15729 - DNA, 21 bp, synthetic construct
  misc_feature 1..21: note = Artificial sequence related to HLA knockouts in cell therapy
  source 1..21: mol_type = other DNA
gggactgagaggcaagagttg

SEQ ID NO: 15730 - DNA, 21 bp, synthetic construct
  misc_feature 1..21: note = Artificial sequence related to HLA knockouts in cell therapy
  source 1..21: mol_type = other DNA
agaggcaagagttgttcctgc

SEQ ID NO: 15731 - DNA, 21 bp, synthetic construct
  misc_feature 1..21: note = Artificial sequence related to HLA knockouts in cell therapy
  source 1..21: mol_type = other DNA
gaggcaagagttgttcctgcc

SEQ ID NO: 15732 - DNA, 21 bp, synthetic construct
  misc_feature 1..21: note = Artificial sequence related to HLA knockouts in cell therapy
  source 1..21: mol_type = other DNA
aggcaagagttgttcctgccc

SEQ ID NO: 15733 - DNA, 21 bp, synthetic construct
  misc_feature 1..21: note = Artificial sequence related to HLA knockouts in cell therapy
  source 1..21: mol_type = other DNA
ggcaagagttgttcctgccct

SEQ ID NO: 15734 - DNA, 21 bp, synthetic construct
  misc_feature 1..21: note = Artificial sequence related to HLA knockouts in cell therapy
  source 1..21: mol_type = other DNA
gcaagagttgttcctgccctt

SEQ ID NO: 15735 - DNA, 21 bp, synthetic construct
  misc_feature 1..21: note = Artificial sequence related to HLA knockouts in cell therapy
  source 1..21: mol_type = other DNA
caagagttgttcctgcccttc

SEQ ID NO: 15736 - DNA, 21 bp, synthetic construct
  misc_feature 1..21: note = Artificial sequence related to HLA knockouts in cell therapy
  source 1..21: mol_type = other DNA
aagagttgttcctgcccttcc

SEQ ID NO: 15737 - DNA, 21 bp, synthetic construct
  misc_feature 1..21: note = Artificial sequence related to HLA knockouts in cell therapy
  source 1..21: mol_type = other DNA
agagttgttcctgcccttccc

SEQ ID NO: 15738 - DNA, 21 bp, synthetic construct
  misc_feature 1..21: note = Artificial sequence related to HLA knockouts in cell therapy
  source 1..21: mol_type = other DNA
gagttgttcctgcccttccct

SEQ ID NO: 15739 - DNA, 21 bp, synthetic construct
  misc_feature 1..21: note = Artificial sequence related to HLA knockouts in cell therapy
  source 1..21: mol_type = other DNA
gttcctgcccttccctttgtg

SEQ ID NO: 15740 - DNA, 21 bp, synthetic construct
  misc_feature 1..21: note = Artificial sequence related to HLA knockouts in cell therapy
  source 1..21: mol_type = other DNA
tcctgcccttccctttgtgac

SEQ ID NO: 15741 - DNA, 21 bp, synthetic construct
  misc_feature 1..21: note = Artificial sequence related to HLA knockouts in cell therapy
  source 1..21: mol_type = other DNA
cctgcccttccctttgtgact

SEQ ID NO: 15742 - DNA, 21 bp, synthetic construct
  misc_feature 1..21: note = Artificial sequence related to HLA knockouts in cell therapy
  source 1..21: mol_type = other DNA
cctttgtgacttgaagaaccc

SEQ ID NO: 15743 - DNA, 21 bp, synthetic construct
  misc_feature 1..21: note = Artificial sequence related to HLA knockouts in cell therapy
  source 1..21: mol_type = other DNA
ctttgtgacttgaagaaccct

SEQ ID NO: 15744 - DNA, 21 bp, synthetic construct
  misc_feature 1..21: note = Artificial sequence related to HLA knockouts in cell therapy
  source 1..21: mol_type = other DNA
tttgtgacttgaagaaccctg

SEQ ID NO: 15745 - DNA, 21 bp, synthetic construct
  misc_feature 1..21: note = Artificial sequence related to HLA knockouts in cell therapy
  source 1..21: mol_type = other DNA
ttgtgacttgaagaaccctga

SEQ ID NO: 15746 - DNA, 21 bp, synthetic construct
  misc_feature 1..21: note = Artificial sequence related to HLA knockouts in cell therapy
  source 1..21: mol_type = other DNA
tgtgacttgaagaaccctgac

SEQ ID NO: 15747 - DNA, 21 bp, synthetic construct
  misc_feature 1..21: note = Artificial sequence related to HLA knockouts in cell therapy
  source 1..21: mol_type = other DNA
aagaaccctgactttgtttct

SEQ ID NO: 15748 - DNA, 21 bp, synthetic construct
  misc_feature 1..21: note = Artificial sequence related to HLA knockouts in cell therapy
  source 1..21: mol_type = other DNA
aaccctgactttgtttctgca

SEQ ID NO: 15749 - DNA, 21 bp, synthetic construct
  misc_feature 1..21: note = Artificial sequence related to HLA knockouts in cell therapy
  source 1..21: mol_type = other DNA
cctgactttgtttctgcaaag

SEQ ID NO: 15750 - DNA, 21 bp, synthetic construct
  misc_feature 1..21: note = Artificial sequence related to HLA knockouts in cell therapy
  source 1..21: mol_type = other DNA
ctgactttgtttctgcaaagg

SEQ ID NO: 15751 - DNA, 21 bp, synthetic construct
  misc_feature 1..21: note = Artificial sequence related to HLA knockouts in cell therapy
  source 1..21: mol_type = other DNA
tgactttgtttctgcaaaggc

SEQ ID NO: 15752 - DNA, 21 bp, synthetic construct
  misc_feature 1..21: note = Artificial sequence related to HLA knockouts in cell therapy
  source 1..21: mol_type = other DNA
gactttgtttctgcaaaggca

SEQ ID NO: 15753 - DNA, 21 bp, synthetic construct
  misc_feature 1..21: note = Artificial sequence related to HLA knockouts in cell therapy
  source 1..21: mol_type = other DNA
actttgtttctgcaaaggcac

SEQ ID NO: 15754 - DNA, 21 bp, synthetic construct
  misc_feature 1..21: note = Artificial sequence related to HLA knockouts in cell therapy
  source 1..21: mol_type = other DNA
ctttgtttctgcaaaggcacc

SEQ ID NO: 15755 - DNA, 21 bp, synthetic construct
  misc_feature 1..21: note = Artificial sequence related to HLA knockouts in cell therapy
  source 1..21: mol_type = other DNA
tttgtttctgcaaaggcacct

SEQ ID NO: 15756 - DNA, 21 bp, synthetic construct
  misc_feature 1..21: note = Artificial sequence related to HLA knockouts in cell therapy
  source 1..21: mol_type = other DNA
ttgtttctgcaaaggcacctg

SEQ ID NO: 15757 - DNA, 21 bp, synthetic construct
  misc_feature 1..21: note = Artificial sequence related to HLA knockouts in cell therapy
  source 1..21: mol_type = other DNA
tgtttctgcaaaggcacctgc

SEQ ID NO: 15758 - DNA, 21 bp, synthetic construct
  misc_feature 1..21: note = Artificial sequence related to HLA knockouts in cell therapy
  source 1..21: mol_type = other DNA
gtttctgcaaaggcacctgca

SEQ ID NO: 15759 - DNA, 21 bp, synthetic construct
  misc_feature 1..21: note = Artificial sequence related to HLA knockouts in cell therapy
  source 1..21: mol_type = other DNA
ctgcaaaggcacctgcatgtg

SEQ ID NO: 15760 - DNA, 21 bp, synthetic construct
  misc_feature 1..21: note = Artificial sequence related to HLA knockouts in cell therapy
  source 1..21: mol_type = other DNA
gcaaaggcacctgcatgtgtc

SEQ ID NO: 15761 - DNA, 21 bp, synthetic construct
  misc_feature 1..21: note = Artificial sequence related to HLA knockouts in cell therapy
  source 1..21: mol_type = other DNA
aggcacctgcatgtgtctgtg

SEQ ID NO: 15762 - DNA, 21 bp, synthetic construct
  misc_feature 1..21: note = Artificial sequence related to HLA knockouts in cell therapy
  source 1..21: mol_type = other DNA
ggcacctgcatgtgtctgtgt

SEQ ID NO: 15763 - DNA, 21 bp, synthetic construct
  misc_feature 1..21: note = Artificial sequence related to HLA knockouts in cell therapy
  source 1..21: mol_type = other DNA
tgtgtctgtgttcgtgtaggc

SEQ ID NO: 15764 - DNA, 21 bp, synthetic construct
  misc_feature 1..21: note = Artificial sequence related to HLA knockouts in cell therapy
  source 1..21: mol_type = other DNA
gtgtctgtgttcgtgtaggca

SEQ ID NO: 15765 - DNA, 21 bp, synthetic construct
  misc_feature 1..21: note = Artificial sequence related to HLA knockouts in cell therapy
  source 1..21: mol_type = other DNA
tcgtgtaggcataatgtgagg

SEQ ID NO: 15766 - DNA, 21 bp, synthetic construct
  misc_feature 1..21: note = Artificial sequence related to HLA knockouts in cell therapy
  source 1..21: mol_type = other DNA
gtgtaggcataatgtgaggag

SEQ ID NO: 15767 - DNA, 21 bp, synthetic construct
  misc_feature 1..21: note = Artificial sequence related to HLA knockouts in cell therapy
  source 1..21: mol_type = other DNA
tgtaggcataatgtgaggagg

SEQ ID NO: 15768 - DNA, 21 bp, synthetic construct
  misc_feature 1..21: note = Artificial sequence related to HLA knockouts in cell therapy
  source 1..21: mol_type = other DNA
gtaggcataatgtgaggaggt

SEQ ID NO: 15769 - DNA, 21 bp, synthetic construct
  misc_feature 1..21: note = Artificial sequence related to HLA knockouts in cell therapy
  source 1..21: mol_type = other DNA
taggcataatgtgaggaggtg

SEQ ID NO: 15770 - DNA, 21 bp, synthetic construct
  misc_feature 1..21: note = Artificial sequence related to HLA knockouts in cell therapy
  source 1..21: mol_type = other DNA
aggcataatgtgaggaggtgg

SEQ ID NO: 15771 - DNA, 21 bp, synthetic construct
  misc_feature 1..21: note = Artificial sequence related to HLA knockouts in cell therapy
  source 1..21: mol_type = other DNA
ggcataatgtgaggaggtggg

SEQ ID NO: 15772 - DNA, 21 bp, synthetic construct
  misc_feature 1..21: note = Artificial sequence related to HLA knockouts in cell therapy
  source 1..21: mol_type = other DNA
ccatgtccaccatgaccctct

SEQ ID NO: 15773 - DNA, 21 bp, synthetic construct
  misc_feature 1..21: note = Artificial sequence related to HLA knockouts in cell therapy
  source 1..21: mol_type = other DNA
tgtccaccatgaccctcttcc

SEQ ID NO: 15774 - DNA, 21 bp, synthetic construct
  misc_feature 1..21: note = Artificial sequence related to HLA knockouts in cell therapy
  source 1..21: mol_type = other DNA
tccaccatgaccctcttccca

SEQ ID NO: 15775 - DNA, 21 bp, synthetic construct
  misc_feature 1..21: note = Artificial sequence related to HLA knockouts in cell therapy
  source 1..21: mol_type = other DNA
atgaccctcttcccacgctga

SEQ ID NO: 15776 - DNA, 21 bp, synthetic construct
  misc_feature 1..21: note = Artificial sequence related to HLA knockouts in cell therapy
  source 1..21: mol_type = other DNA
atcatctttcctgttccagag

SEQ ID NO: 15777 - DNA, 21 bp, synthetic construct
  misc_feature 1..21: note = Artificial sequence related to HLA knockouts in cell therapy
  source 1..21: mol_type = other DNA
atctttcctgttccagagagg

SEQ ID NO: 15778 - DNA, 21 bp, synthetic construct
  misc_feature 1..21: note = Artificial sequence related to HLA knockouts in cell therapy
  source 1..21: mol_type = other DNA
ctttcctgttccagagaggtg

SEQ ID NO: 15779 - DNA, 21 bp, synthetic construct
  misc_feature 1..21: note = Artificial sequence related to HLA knockouts in cell therapy
  source 1..21: mol_type = other DNA
tttcctgttccagagaggtgg

SEQ ID NO: 15780 - DNA, 21 bp, synthetic construct
  misc_feature 1..21: note = Artificial sequence related to HLA knockouts in cell therapy
  source 1..21: mol_type = other DNA
ttcctgttccagagaggtggg

SEQ ID NO: 15781 - DNA, 21 bp, synthetic construct
  misc_feature 1..21: note = Artificial sequence related to HLA knockouts in cell therapy
  source 1..21: mol_type = other DNA
ggctgaggtgtctccatctct

SEQ ID NO: 15782 - DNA, 21 bp, synthetic construct
  misc_feature 1..21: note = Artificial sequence related to HLA knockouts in cell therapy
  source 1..21: mol_type = other DNA
gctgaggtgtctccatctctg

SEQ ID NO: 15783 - DNA, 21 bp, synthetic construct
  misc_feature 1..21: note = Artificial sequence related to HLA knockouts in cell therapy
  source 1..21: mol_type = other DNA
tctgtctcaacttcatggtgc

SEQ ID NO: 15784 - DNA, 21 bp, synthetic construct
  misc_feature 1..21: note = Artificial sequence related to HLA knockouts in cell therapy
  source 1..21: mol_type = other DNA
ctgtctcaacttcatggtgca

SEQ ID NO: 15785 - DNA, 21 bp, synthetic construct
  misc_feature 1..21: note = Artificial sequence related to HLA knockouts in cell therapy
  source 1..21: mol_type = other DNA
tgtctcaacttcatggtgcac

SEQ ID NO: 15786 - DNA, 21 bp, synthetic construct
  misc_feature 1..21: note = Artificial sequence related to HLA knockouts in cell therapy
  source 1..21: mol_type = other DNA
tctcaacttcatggtgcactg

SEQ ID NO: 15787 - DNA, 21 bp, synthetic construct
  misc_feature 1..21: note = Artificial sequence related to HLA knockouts in cell therapy
  source 1..21: mol_type = other DNA
caacttcatggtgcactgagc

SEQ ID NO: 15788 - DNA, 21 bp, synthetic construct
  misc_feature 1..21: note = Artificial sequence related to HLA knockouts in cell therapy
  source 1..21: mol_type = other DNA
aacttcatggtgcactgagct

SEQ ID NO: 15789 - DNA, 21 bp, synthetic construct
  misc_feature 1..21: note = Artificial sequence related to HLA knockouts in cell therapy
  source 1..21: mol_type = other DNA
acttcatggtgcactgagctg

SEQ ID NO: 15790 - DNA, 21 bp, synthetic construct
  misc_feature 1..21: note = Artificial sequence related to HLA knockouts in cell therapy
  source 1..21: mol_type = other DNA
gagctgtaacttcttccttcc

SEQ ID NO: 15791 - DNA, 21 bp, synthetic construct
  misc_feature 1..21: note = Artificial sequence related to HLA knockouts in cell therapy
  source 1..21: mol_type = other DNA
agctgtaacttcttccttccc

SEQ ID NO: 15792 - DNA, 21 bp, synthetic construct
  misc_feature 1..21: note = Artificial sequence related to HLA knockouts in cell therapy
  source 1..21: mol_type = other DNA
gctgtaacttcttccttccct

SEQ ID NO: 15793 - DNA, 21 bp, synthetic construct
  misc_feature 1..21: note = Artificial sequence related to HLA knockouts in cell therapy
  source 1..21: mol_type = other DNA
aacttcttccttccctattaa

SEQ ID NO: 15794 - DNA, 22 bp, synthetic construct
  misc_feature 1..22: note = Artificial sequence related to HLA knockouts in cell therapy
  source 1..22: mol_type = other DNA
cccgaaggcggtgtatggattg

SEQ ID NO: 15795 - DNA, 22 bp, synthetic construct
  misc_feature 1..22: note = Artificial sequence related to HLA knockouts in cell therapy
  source 1..22: mol_type = other DNA
ccgaaggcggtgtatggattgg

SEQ ID NO: 15796 - DNA, 22 bp, synthetic construct
  misc_feature 1..22: note = Artificial sequence related to HLA knockouts in cell therapy
  source 1..22: mol_type = other DNA
cgaaggcggtgtatggattggg

SEQ ID NO: 15797 - DNA, 22 bp, synthetic construct
  misc_feature 1..22: note = Artificial sequence related to HLA knockouts in cell therapy
  source 1..22: mol_type = other DNA
tttctccctctcccaacctatg

SEQ ID NO: 15798 - DNA, 22 bp, synthetic construct
  misc_feature 1..22: note = Artificial sequence related to HLA knockouts in cell therapy
  source 1..22: mol_type = other DNA
ttctccctctcccaacctatgt

SEQ ID NO: 15799 - DNA, 22 bp, synthetic construct
  misc_feature 1..22: note = Artificial sequence related to HLA knockouts in cell therapy
  source 1..22: mol_type = other DNA
tctccctctcccaacctatgta

SEQ ID NO: 15800 - DNA, 22 bp, synthetic construct
  misc_feature 1..22: note = Artificial sequence related to HLA knockouts in cell therapy
  source 1..22: mol_type = other DNA
ctccctctcccaacctatgtag

SEQ ID NO: 15801 - DNA, 22 bp, synthetic construct
  misc_feature 1..22: note = Artificial sequence related to HLA knockouts in cell therapy
  source 1..22: mol_type = other DNA
tccctctcccaacctatgtagg

SEQ ID NO: 15802 - DNA, 22 bp, synthetic construct
  misc_feature 1..22: note = Artificial sequence related to HLA knockouts in cell therapy
  source 1..22: mol_type = other DNA
ccctctcccaacctatgtaggg

SEQ ID NO: 15803 - DNA, 22 bp, synthetic construct
  misc_feature 1..22: note = Artificial sequence related to HLA knockouts in cell therapy
  source 1..22: mol_type = other DNA
cctctcccaacctatgtagggt

SEQ ID NO: 15804 - DNA, 22 bp, synthetic construct
  misc_feature 1..22: note = Artificial sequence related to HLA knockouts in cell therapy
  source 1..22: mol_type = other DNA
ctctcccaacctatgtagggtc

SEQ ID NO: 15805 - DNA, 22 bp, synthetic construct
  misc_feature 1..22: note = Artificial sequence related to HLA knockouts in cell therapy
  source 1..22: mol_type = other DNA
tctcccaacctatgtagggtcc

SEQ ID NO: 15806 - DNA, 22 bp, synthetic construct
  misc_feature 1..22: note = Artificial sequence related to HLA knockouts in cell therapy
  source 1..22: mol_type = other DNA
ctcccaacctatgtagggtcct

SEQ ID NO: 15807 - DNA, 22 bp, synthetic construct
  misc_feature 1..22: note = Artificial sequence related to HLA knockouts in cell therapy
  source 1..22: mol_type = other DNA
tcccaacctatgtagggtcctt

SEQ ID NO: 15808 - DNA, 22 bp, synthetic construct
  misc_feature 1..22: note = Artificial sequence related to HLA knockouts in cell therapy
  source 1..22: mol_type = other DNA
cccaacctatgtagggtccttc

SEQ ID NO: 15809 - DNA, 22 bp, synthetic construct
  misc_feature 1..22: note = Artificial sequence related to HLA knockouts in cell therapy
  source 1..22: mol_type = other DNA
ccaacctatgtagggtccttct

SEQ ID NO: 15810 - DNA, 22 bp, synthetic construct
  misc_feature 1..22: note = Artificial sequence related to HLA knockouts in cell therapy
  source 1..22: mol_type = other DNA
caacctatgtagggtccttctt

SEQ ID NO: 15811 - DNA, 22 bp, synthetic construct
  misc_feature 1..22: note = Artificial sequence related to HLA knockouts in cell therapy
  source 1..22: mol_type = other DNA
aacctatgtagggtccttcttc

SEQ ID NO: 15812 - DNA, 22 bp, synthetic construct
  misc_feature 1..22: note = Artificial sequence related to HLA knockouts in cell therapy
  source 1..22: mol_type = other DNA
acctatgtagggtccttcttcc

SEQ ID NO: 15813 - DNA, 22 bp, synthetic construct
  misc_feature 1..22: note = Artificial sequence related to HLA knockouts in cell therapy
  source 1..22: mol_type = other DNA
cctatgtagggtccttcttcct

SEQ ID NO: 15814 - DNA, 22 bp, synthetic construct
  misc_feature 1..22: note = Artificial sequence related to HLA knockouts in cell therapy
  source 1..22: mol_type = other DNA
ctatgtagggtccttcttcctg

SEQ ID NO: 15815 - DNA, 22 bp, synthetic construct
  misc_feature 1..22: note = Artificial sequence related to HLA knockouts in cell therapy
  source 1..22: mol_type = other DNA
tatgtagggtccttcttcctgg

SEQ ID NO: 15816 - DNA, 22 bp, synthetic construct
  misc_feature 1..22: note = Artificial sequence related to HLA knockouts in cell therapy
  source 1..22: mol_type = other DNA
atgtagggtccttcttcctgga

SEQ ID NO: 15817 - DNA, 22 bp, synthetic construct
  misc_feature 1..22: note = Artificial sequence related to HLA knockouts in cell therapy
  source 1..22: mol_type = other DNA
tgtagggtccttcttcctggat

SEQ ID NO: 15818 - DNA, 22 bp, synthetic construct
  misc_feature 1..22: note = Artificial sequence related to HLA knockouts in cell therapy
  source 1..22: mol_type = other DNA
gtagggtccttcttcctggata

SEQ ID NO: 15819 - DNA, 22 bp, synthetic construct
  misc_feature 1..22: note = Artificial sequence related to HLA knockouts in cell therapy
  source 1..22: mol_type = other DNA
tagggtccttcttcctggatac

SEQ ID NO: 15820 - DNA, 22 bp, synthetic construct
  misc_feature 1..22: note = Artificial sequence related to HLA knockouts in cell therapy
  source 1..22: mol_type = other DNA
agggtccttcttcctggatact

SEQ ID NO: 15821 - DNA, 22 bp, synthetic construct
  misc_feature 1..22: note = Artificial sequence related to HLA knockouts in cell therapy
  source 1..22: mol_type = other DNA
gggtccttcttcctggatactc

SEQ ID NO: 15822 - DNA, 22 bp, synthetic construct
  misc_feature 1..22: note = Artificial sequence related to HLA knockouts in cell therapy
  source 1..22: mol_type = other DNA
ggtccttcttcctggatactca

SEQ ID NO: 15823 - DNA, 22 bp, synthetic construct
  misc_feature 1..22: note = Artificial sequence related to HLA knockouts in cell therapy
  source 1..22: mol_type = other DNA
gtccttcttcctggatactcac

SEQ ID NO: 15824 - DNA, 22 bp, synthetic construct
  misc_feature 1..22: note = Artificial sequence related to HLA knockouts in cell therapy
  source 1..22: mol_type = other DNA
tccttcttcctggatactcacg

SEQ ID NO: 15825 - DNA, 22 bp, synthetic construct
  misc_feature 1..22: note = Artificial sequence related to HLA knockouts in cell therapy
  source 1..22: mol_type = other DNA
ccttcttcctggatactcacga

SEQ ID NO: 15826 - DNA, 22 bp, synthetic construct
  misc_feature 1..22: note = Artificial sequence related to HLA knockouts in cell therapy
  source 1..22: mol_type = other DNA
cttcttcctggatactcacgac

SEQ ID NO: 15827 - DNA, 22 bp, synthetic construct
  misc_feature 1..22: note = Artificial sequence related to HLA knockouts in cell therapy
  source 1..22: mol_type = other DNA
ttcttcctggatactcacgacg

SEQ ID NO: 15828 - DNA, 22 bp, synthetic construct
  misc_feature 1..22: note = Artificial sequence related to HLA knockouts in cell therapy
  source 1..22: mol_type = other DNA
tcttcctggatactcacgacgc

SEQ ID NO: 15829 - DNA, 22 bp, synthetic construct
  misc_feature 1..22: note = Artificial sequence related to HLA knockouts in cell therapy
  source 1..22: mol_type = other DNA
cttcctggatactcacgacgcg

SEQ ID NO: 15830 - DNA, 22 bp, synthetic construct
  misc_feature 1..22: note = Artificial sequence related to HLA knockouts in cell therapy
  source 1..22: mol_type = other DNA
ttcctggatactcacgacgcgg

SEQ ID NO: 15831 - DNA, 22 bp, synthetic construct
  misc_feature 1..22: note = Artificial sequence related to HLA knockouts in cell therapy
  source 1..22: mol_type = other DNA
tcctggatactcacgacgcgga

SEQ ID NO: 15832 - DNA, 22 bp, synthetic construct
  misc_feature 1..22: note = Artificial sequence related to HLA knockouts in cell therapy
  source 1..22: mol_type = other DNA
atactcacgacgcggacccagt

SEQ ID NO: 15833 - DNA, 22 bp, synthetic construct
  misc_feature 1..22: note = Artificial sequence related to HLA knockouts in cell therapy
  source 1..22: mol_type = other DNA
tactcacgacgcggacccagtt

SEQ ID NO: 15834 - DNA, 22 bp, synthetic construct
  misc_feature 1..22: note = Artificial sequence related to HLA knockouts in cell therapy
  source 1..22: mol_type = other DNA
cggacccagttctcactcccat

SEQ ID NO: 15835 - DNA, 22 bp, synthetic construct
  misc_feature 1..22: note = Artificial sequence related to HLA knockouts in cell therapy
  source 1..22: mol_type = other DNA
ggacccagttctcactcccatt

SEQ ID NO: 15836 - DNA, 22 bp, synthetic construct
  misc_feature 1..22: note = Artificial sequence related to HLA knockouts in cell therapy
  source 1..22: mol_type = other DNA
gacccagttctcactcccattg

SEQ ID NO: 15837 - DNA, 22 bp, synthetic construct
  misc_feature 1..22: note = Artificial sequence related to HLA knockouts in cell therapy
  source 1..22: mol_type = other DNA
acccagttctcactcccattgg

SEQ ID NO: 15838 - DNA, 22 bp, synthetic construct
  misc_feature 1..22: note = Artificial sequence related to HLA knockouts in cell therapy
  source 1..22: mol_type = other DNA
cccagttctcactcccattggg

SEQ ID NO: 15839 - DNA, 22 bp, synthetic construct
  misc_feature 1..22: note = Artificial sequence related to HLA knockouts in cell therapy
  source 1..22: mol_type = other DNA
ccagttctcactcccattgggt

SEQ ID NO: 15840 - DNA, 22 bp, synthetic construct
  misc_feature 1..22: note = Artificial sequence related to HLA knockouts in cell therapy
  source 1..22: mol_type = other DNA
cagttctcactcccattgggtg

SEQ ID NO: 15841 - DNA, 22 bp, synthetic construct
  misc_feature 1..22: note = Artificial sequence related to HLA knockouts in cell therapy
  source 1..22: mol_type = other DNA
agttctcactcccattgggtgt

SEQ ID NO: 15842 - DNA, 22 bp, synthetic construct
  misc_feature 1..22: note = Artificial sequence related to HLA knockouts in cell therapy
  source 1..22: mol_type = other DNA
gttctcactcccattgggtgtc

SEQ ID NO: 15843 - DNA, 22 bp, synthetic construct
  misc_feature 1..22: note = Artificial sequence related to HLA knockouts in cell therapy
  source 1..22: mol_type = other DNA
ttctcactcccattgggtgtcg

SEQ ID NO: 15844 - DNA, 22 bp, synthetic construct
  misc_feature 1..22: note = Artificial sequence related to HLA knockouts in cell therapy
  source 1..22: mol_type = other DNA
tctcactcccattgggtgtcgg

SEQ ID NO: 15845 - DNA, 22 bp, synthetic construct
  misc_feature 1..22: note = Artificial sequence related to HLA knockouts in cell therapy
  source 1..22: mol_type = other DNA
tcactcccattgggtgtcgggt

SEQ ID NO: 15846 - DNA, 22 bp, synthetic construct
  misc_feature 1..22: note = Artificial sequence related to HLA knockouts in cell therapy
  source 1..22: mol_type = other DNA
cactcccattgggtgtcgggtt

SEQ ID NO: 15847 - DNA, 22 bp, synthetic construct
  misc_feature 1..22: note = Artificial sequence related to HLA knockouts in cell therapy
  source 1..22: mol_type = other DNA
actcccattgggtgtcgggttt

SEQ ID NO: 15848 - DNA, 22 bp, synthetic construct
  misc_feature 1..22: note = Artificial sequence related to HLA knockouts in cell therapy
  source 1..22: mol_type = other DNA
ctcccattgggtgtcgggtttc

SEQ ID NO: 15849 - DNA, 22 bp, synthetic construct
  misc_feature 1..22: note = Artificial sequence related to HLA knockouts in cell therapy
  source 1..22: mol_type = other DNA
tcccattgggtgtcgggtttcc

SEQ ID NO: 15850 - DNA, 22 bp, synthetic construct
  misc_feature 1..22: note = Artificial sequence related to HLA knockouts in cell therapy
  source 1..22: mol_type = other DNA
cccattgggtgtcgggtttcca

SEQ ID NO: 15851 - DNA, 22 bp, synthetic construct
  misc_feature 1..22: note = Artificial sequence related to HLA knockouts in cell therapy
  source 1..22: mol_type = other DNA
ccattgggtgtcgggtttccag

SEQ ID NO: 15852 - DNA, 22 bp, synthetic construct
  misc_feature 1..22: note = Artificial sequence related to HLA knockouts in cell therapy
  source 1..22: mol_type = other DNA
cattgggtgtcgggtttccaga

SEQ ID NO: 15853 - DNA, 22 bp, synthetic construct
  misc_feature 1..22: note = Artificial sequence related to HLA knockouts in cell therapy
  source 1..22: mol_type = other DNA
attgggtgtcgggtttccagag

SEQ ID NO: 15854 - DNA, 22 bp, synthetic construct
  misc_feature 1..22: note = Artificial sequence related to HLA knockouts in cell therapy
  source 1..22: mol_type = other DNA
ttgggtgtcgggtttccagaga

SEQ ID NO: 15855 - DNA, 22 bp, synthetic construct
  misc_feature 1..22: note = Artificial sequence related to HLA knockouts in cell therapy
  source 1..22: mol_type = other DNA
tgggtgtcgggtttccagagaa

SEQ ID NO: 15856 - DNA, 22 bp, synthetic construct
  misc_feature 1..22: note = Artificial sequence related to HLA knockouts in cell therapy
  source 1..22: mol_type = other DNA
gggtgtcgggtttccagagaag

SEQ ID NO: 15857 - DNA, 22 bp, synthetic construct
  misc_feature 1..22: note = Artificial sequence related to HLA knockouts in cell therapy
  source 1..22: mol_type = other DNA
ggtgtcgggtttccagagaagc

SEQ ID NO: 15858 - DNA, 22 bp, synthetic construct
  misc_feature 1..22: note = Artificial sequence related to HLA knockouts in cell therapy
  source 1..22: mol_type = other DNA
gtgtcgggtttccagagaagcc

SEQ ID NO: 15859 - DNA, 22 bp, synthetic construct
  misc_feature 1..22: note = Artificial sequence related to HLA knockouts in cell therapy
  source 1..22: mol_type = other DNA
tgtcgggtttccagagaagcca

SEQ ID NO: 15860 - DNA, 22 bp, synthetic construct
  misc_feature 1..22: note = Artificial sequence related to HLA knockouts in cell therapy
  source 1..22: mol_type = other DNA
gtcgggtttccagagaagccaa

SEQ ID NO: 15861 - DNA, 22 bp, synthetic construct
  misc_feature 1..22: note = Artificial sequence related to HLA knockouts in cell therapy
  source 1..22: mol_type = other DNA
tcgggtttccagagaagccaat

SEQ ID NO: 15862 - DNA, 22 bp, synthetic construct
  misc_feature 1..22: note = Artificial sequence related to HLA knockouts in cell therapy
  source 1..22: mol_type = other DNA
cgggtttccagagaagccaatc

SEQ ID NO: 15863 - DNA, 22 bp, synthetic construct
  misc_feature 1..22: note = Artificial sequence related to HLA knockouts in cell therapy
  source 1..22: mol_type = other DNA
gggtttccagagaagccaatca

SEQ ID NO: 15864 - DNA, 22 bp, synthetic construct
  misc_feature 1..22: note = Artificial sequence related to HLA knockouts in cell therapy
  source 1..22: mol_type = other DNA
ggtttccagagaagccaatcag

SEQ ID NO: 15865 - DNA, 22 bp, synthetic construct
  misc_feature 1..22: note = Artificial sequence related to HLA knockouts in cell therapy
  source 1..22: mol_type = other DNA
gtttccagagaagccaatcagt

SEQ ID NO: 15866 - DNA, 22 bp, synthetic construct
  misc_feature 1..22: note = Artificial sequence related to HLA knockouts in cell therapy
  source 1..22: mol_type = other DNA
tttccagagaagccaatcagtg

SEQ ID NO: 15867 - DNA, 22 bp, synthetic construct
  misc_feature 1..22: note = Artificial sequence related to HLA knockouts in cell therapy
  source 1..22: mol_type = other DNA
ttccagagaagccaatcagtgt

SEQ ID NO: 15868 - DNA, 22 bp, synthetic construct
  misc_feature 1..22: note = Artificial sequence related to HLA knockouts in cell therapy
  source 1..22: mol_type = other DNA
tccagagaagccaatcagtgtc

SEQ ID NO: 15869 - DNA, 22 bp, synthetic construct
  misc_feature 1..22: note = Artificial sequence related to HLA knockouts in cell therapy
  source 1..22: mol_type = other DNA
ccagagaagccaatcagtgtcg

SEQ ID NO: 15870 - DNA, 22 bp, synthetic construct
  misc_feature 1..22: note = Artificial sequence related to HLA knockouts in cell therapy
  source 1..22: mol_type = other DNA
cagagaagccaatcagtgtcgt

SEQ ID NO: 15871 - DNA, 22 bp, synthetic construct
  misc_feature 1..22: note = Artificial sequence related to HLA knockouts in cell therapy
  source 1..22: mol_type = other DNA
agagaagccaatcagtgtcgtc

SEQ ID NO: 15872 - DNA, 22 bp, synthetic construct
  misc_feature 1..22: note = Artificial sequence related to HLA knockouts in cell therapy
  source 1..22: mol_type = other DNA
gagaagccaatcagtgtcgtcg

SEQ ID NO: 15873 - DNA, 22 bp, synthetic construct
  misc_feature 1..22: note = Artificial sequence related to HLA knockouts in cell therapy
  source 1..22: mol_type = other DNA
agaagccaatcagtgtcgtcgc

SEQ ID NO: 15874 - DNA, 22 bp, synthetic construct
  misc_feature 1..22: note = Artificial sequence related to HLA knockouts in cell therapy
  source 1..22: mol_type = other DNA
gaagccaatcagtgtcgtcgcg

SEQ ID NO: 15875 - DNA, 22 bp, synthetic construct
  misc_feature 1..22: note = Artificial sequence related to HLA knockouts in cell therapy
  source 1..22: mol_type = other DNA
aagccaatcagtgtcgtcgcgg

SEQ ID NO: 15876 - DNA, 22 bp, synthetic construct
  misc_feature 1..22: note = Artificial sequence related to HLA knockouts in cell therapy
  source 1..22: mol_type = other DNA
agccaatcagtgtcgtcgcggt

SEQ ID NO: 15877 - DNA, 22 bp, synthetic construct
  misc_feature 1..22: note = Artificial sequence related to HLA knockouts in cell therapy
  source 1..22: mol_type = other DNA
tcgtcgcggtcgcggttctaaa

SEQ ID NO: 15878 - DNA, 22 bp, synthetic construct
  misc_feature 1..22: note = Artificial sequence related to HLA knockouts in cell therapy
  source 1..22: mol_type = other DNA
gtcgcggtcgcggttctaaagt

SEQ ID NO: 15879 - DNA, 22 bp, synthetic construct
  misc_feature 1..22: note = Artificial sequence related to HLA knockouts in cell therapy
  source 1..22: mol_type = other DNA
tcgcggtcgcggttctaaagtc

SEQ ID NO: 15880 - DNA, 22 bp, synthetic construct
  misc_feature 1..22: note = Artificial sequence related to HLA knockouts in cell therapy
  source 1..22: mol_type = other DNA
ggtcgcggttctaaagtccgca

SEQ ID NO: 15881 - DNA, 22 bp, synthetic construct
  misc_feature 1..22: note = Artificial sequence related to HLA knockouts in cell therapy
  source 1..22: mol_type = other DNA
gtcgcggttctaaagtccgcac

SEQ ID NO: 15882 - DNA, 22 bp, synthetic construct
  misc_feature 1..22: note = Artificial sequence related to HLA knockouts in cell therapy
  source 1..22: mol_type = other DNA
tcgcggttctaaagtccgcacg

SEQ ID NO: 15883 - DNA, 22 bp, synthetic construct
  misc_feature 1..22: note = Artificial sequence related to HLA knockouts in cell therapy
  source 1..22: mol_type = other DNA
gcggttctaaagtccgcacgca

SEQ ID NO: 15884 - DNA, 22 bp, synthetic construct
  misc_feature 1..22: note = Artificial sequence related to HLA knockouts in cell therapy
  source 1..22: mol_type = other DNA
cggttctaaagtccgcacgcac

SEQ ID NO: 15885 - DNA, 22 bp, synthetic construct
  misc_feature 1..22: note = Artificial sequence related to HLA knockouts in cell therapy
  source 1..22: mol_type = other DNA
ggttctaaagtccgcacgcacc

SEQ ID NO: 15886 - DNA, 22 bp, synthetic construct
  misc_feature 1..22: note = Artificial sequence related to HLA knockouts in cell therapy
  source 1..22: mol_type = other DNA
gttctaaagtccgcacgcaccc

SEQ ID NO: 15887 - DNA, 22 bp, synthetic construct
  misc_feature 1..22: note = Artificial sequence related to HLA knockouts in cell therapy
  source 1..22: mol_type = other DNA
ttctaaagtccgcacgcaccca

SEQ ID NO: 15888 - DNA, 22 bp, synthetic construct
  misc_feature 1..22: note = Artificial sequence related to HLA knockouts in cell therapy
  source 1..22: mol_type = other DNA
tctaaagtccgcacgcacccac

SEQ ID NO: 15889 - DNA, 22 bp, synthetic construct
  misc_feature 1..22: note = Artificial sequence related to HLA knockouts in cell therapy
  source 1..22: mol_type = other DNA
cacccaccgggactcagattct

SEQ ID NO: 15890 - DNA, 22 bp, synthetic construct
  misc_feature 1..22: note = Artificial sequence related to HLA knockouts in cell therapy
  source 1..22: mol_type = other DNA
acccaccgggactcagattctc

SEQ ID NO: 15891 - DNA, 22 bp, synthetic construct
  misc_feature 1..22: note = Artificial sequence related to HLA knockouts in cell therapy
  source 1..22: mol_type = other DNA
cgaaccctcgtcctgctactct

SEQ ID NO: 15892 - DNA, 22 bp, synthetic construct
  misc_feature 1..22: note = Artificial sequence related to HLA knockouts in cell therapy
  source 1..22: mol_type = other DNA
gaaccctcgtcctgctactctc

SEQ ID NO: 15893 - DNA, 22 bp, synthetic construct
  misc_feature 1..22: note = Artificial sequence related to HLA knockouts in cell therapy
  source 1..22: mol_type = other DNA
aaccctcgtcctgctactctcg

SEQ ID NO: 15894 - DNA, 22 bp, synthetic construct
  misc_feature 1..22: note = Artificial sequence related to HLA knockouts in cell therapy
  source 1..22: mol_type = other DNA
cgggctctcactccatgaggta

SEQ ID NO: 15895 - DNA, 22 bp, synthetic construct
  misc_feature 1..22: note = Artificial sequence related to HLA knockouts in cell therapy
  source 1..22: mol_type = other DNA
gggctctcactccatgaggtat

SEQ ID NO: 15896 - DNA, 22 bp, synthetic construct
  misc_feature 1..22: note = Artificial sequence related to HLA knockouts in cell therapy
  source 1..22: mol_type = other DNA
ggctctcactccatgaggtatt

SEQ ID NO: 15897 - DNA, 22 bp, synthetic construct
  misc_feature 1..22: note = Artificial sequence related to HLA knockouts in cell therapy
  source 1..22: mol_type = other DNA
gctctcactccatgaggtattt

SEQ ID NO: 15898 - DNA, 22 bp, synthetic construct
  misc_feature 1..22: note = Artificial sequence related to HLA knockouts in cell therapy
  source 1..22: mol_type = other DNA
ctctcactccatgaggtatttc

SEQ ID NO: 15899 - DNA, 22 bp, synthetic construct
  misc_feature 1..22: note = Artificial sequence related to HLA knockouts in cell therapy
  source 1..22: mol_type = other DNA
tctcactccatgaggtatttct

SEQ ID NO: 15900 - DNA, 22 bp, synthetic construct
  misc_feature 1..22: note = Artificial sequence related to HLA knockouts in cell therapy
  source 1..22: mol_type = other DNA
ctcactccatgaggtatttctt

SEQ ID NO: 15901 - DNA, 22 bp, synthetic construct
  misc_feature 1..22: note = Artificial sequence related to HLA knockouts in cell therapy
  source 1..22: mol_type = other DNA
tcactccatgaggtatttcttc

SEQ ID NO: 15902 - DNA, 22 bp, synthetic construct
  misc_feature 1..22: note = Artificial sequence related to HLA knockouts in cell therapy
  source 1..22: mol_type = other DNA
cactccatgaggtatttcttca

SEQ ID NO: 15903 - DNA, 22 bp, synthetic construct
  misc_feature 1..22: note = Artificial sequence related to HLA knockouts in cell therapy
  source 1..22: mol_type = other DNA
actccatgaggtatttcttcac

SEQ ID NO: 15904 - DNA, 22 bp, synthetic construct
  misc_feature 1..22: note = Artificial sequence related to HLA knockouts in cell therapy
  source 1..22: mol_type = other DNA
ctccatgaggtatttcttcaca

SEQ ID NO: 15905 - DNA, 22 bp, synthetic construct
  misc_feature 1..22: note = Artificial sequence related to HLA knockouts in cell therapy
  source 1..22: mol_type = other DNA
tccatgaggtatttcttcacat

SEQ ID NO: 15906 - DNA, 22 bp, synthetic construct
  misc_feature 1..22: note = Artificial sequence related to HLA knockouts in cell therapy
  source 1..22: mol_type = other DNA
ccatgaggtatttcttcacatc

SEQ ID NO: 15907 - DNA, 22 bp, synthetic construct
  misc_feature 1..22: note = Artificial sequence related to HLA knockouts in cell therapy
  source 1..22: mol_type = other DNA
catgaggtatttcttcacatcc

SEQ ID NO: 15908 - DNA, 22 bp, synthetic construct
  misc_feature 1..22: note = Artificial sequence related to HLA knockouts in cell therapy
  source 1..22: mol_type = other DNA
atgaggtatttcttcacatccg

SEQ ID NO: 15909 - DNA, 22 bp, synthetic construct
  misc_feature 1..22: note = Artificial sequence related to HLA knockouts in cell therapy
  source 1..22: mol_type = other DNA
tgaggtatttcttcacatccgt

SEQ ID NO: 15910 - DNA, 22 bp, synthetic construct
  misc_feature 1..22: note = Artificial sequence related to HLA knockouts in cell therapy
  source 1..22: mol_type = other DNA
gaggtatttcttcacatccgtg

SEQ ID NO: 15911 - DNA, 22 bp, synthetic construct
  misc_feature 1..22: note = Artificial sequence related to HLA knockouts in cell therapy
  source 1..22: mol_type = other DNA
aggtatttcttcacatccgtgt

SEQ ID NO: 15912 - DNA, 22 bp, synthetic construct
  misc_feature 1..22: note = Artificial sequence related to HLA knockouts in cell therapy
  source 1..22: mol_type = other DNA
ggtatttcttcacatccgtgtc

SEQ ID NO: 15913 - DNA, 22 bp, synthetic construct
  misc_feature 1..22: note = Artificial sequence related to HLA knockouts in cell therapy
  source 1..22: mol_type = other DNA
gtatttcttcacatccgtgtcc

SEQ ID NO: 15914 - DNA, 22 bp, synthetic construct
  misc_feature 1..22: note = Artificial sequence related to HLA knockouts in cell therapy
  source 1..22: mol_type = other DNA
tatttcttcacatccgtgtccc

SEQ ID NO: 15915 - DNA, 22 bp, synthetic construct
  misc_feature 1..22: note = Artificial sequence related to HLA knockouts in cell therapy
  source 1..22: mol_type = other DNA
atttcttcacatccgtgtcccg

SEQ ID NO: 15916 - DNA, 22 bp, synthetic construct
  misc_feature 1..22: note = Artificial sequence related to HLA knockouts in cell therapy
  source 1..22: mol_type = other DNA
tttcttcacatccgtgtcccgg

SEQ ID NO: 15917 - DNA, 22 bp, synthetic construct
  misc_feature 1..22: note = Artificial sequence related to HLA knockouts in cell therapy
  source 1..22: mol_type = other DNA
ttcttcacatccgtgtcccggc

SEQ ID NO: 15918 - DNA, 22 bp, synthetic construct
  misc_feature 1..22: note = Artificial sequence related to HLA knockouts in cell therapy
  source 1..22: mol_type = other DNA
gcttcatcgcagtgggctacgt

SEQ ID NO: 15919 - DNA, 22 bp, synthetic construct
  misc_feature 1..22: note = Artificial sequence related to HLA knockouts in cell therapy
  source 1..22: mol_type = other DNA
cttcatcgcagtgggctacgtg

SEQ ID NO: 15920 - DNA, 22 bp, synthetic construct
  misc_feature 1..22: note = Artificial sequence related to HLA knockouts in cell therapy
  source 1..22: mol_type = other DNA
ttcatcgcagtgggctacgtgg

SEQ ID NO: 15921 - DNA, 22 bp, synthetic construct
  misc_feature 1..22: note = Artificial sequence related to HLA knockouts in cell therapy
  source 1..22: mol_type = other DNA
tcatcgcagtgggctacgtgga

SEQ ID NO: 15922 - DNA, 22 bp, synthetic construct
  misc_feature 1..22: note = Artificial sequence related to HLA knockouts in cell therapy
  source 1..22: mol_type = other DNA
gctacgtggacgacacgcagtt

SEQ ID NO: 15923 - DNA, 22 bp, synthetic construct
  misc_feature 1..22: note = Artificial sequence related to HLA knockouts in cell therapy
  source 1..22: mol_type = other DNA
ctacgtggacgacacgcagttc

SEQ ID NO: 15924 - DNA, 22 bp, synthetic construct
  misc_feature 1..22: note = Artificial sequence related to HLA knockouts in cell therapy
  source 1..22: mol_type = other DNA
tacgtggacgacacgcagttcg

SEQ ID NO: 15925 - DNA, 22 bp, synthetic construct
  misc_feature 1..22: note = Artificial sequence related to HLA knockouts in cell therapy
  source 1..22: mol_type = other DNA
acgtggacgacacgcagttcgt

SEQ ID NO: 15926 - DNA, 22 bp, synthetic construct
  misc_feature 1..22: note = Artificial sequence related to HLA knockouts in cell therapy
  source 1..22: mol_type = other DNA
acgacacgcagttcgtgcggtt

SEQ ID NO: 15927 - DNA, 22 bp, synthetic construct
  misc_feature 1..22: note = Artificial sequence related to HLA knockouts in cell therapy
  source 1..22: mol_type = other DNA
acacgcagttcgtgcggttcga

SEQ ID NO: 15928 - DNA, 22 bp, synthetic construct
  misc_feature 1..22: note = Artificial sequence related to HLA knockouts in cell therapy
  source 1..22: mol_type = other DNA
acgcagttcgtgcggttcgaca

SEQ ID NO: 15929 - DNA, 22 bp, synthetic construct
  misc_feature 1..22: note = Artificial sequence related to HLA knockouts in cell therapy
  source 1..22: mol_type = other DNA
agttcgtgcggttcgacagcga

SEQ ID NO: 15930 - DNA, 22 bp, synthetic construct
  misc_feature 1..22: note = Artificial sequence related to HLA knockouts in cell therapy
  source 1..22: mol_type = other DNA
atagagcaggagggtccggagt

SEQ ID NO: 15931 - DNA, 22 bp, synthetic construct
  misc_feature 1..22: note = Artificial sequence related to HLA knockouts in cell therapy
  source 1..22: mol_type = other DNA
tagagcaggagggtccggagta

SEQ ID NO: 15932 - DNA, 22 bp, synthetic construct
  misc_feature 1..22: note = Artificial sequence related to HLA knockouts in cell therapy
  source 1..22: mol_type = other DNA
agagcaggagggtccggagtat

SEQ ID NO: 15933 - DNA, 22 bp, synthetic construct
  misc_feature 1..22: note = Artificial sequence related to HLA knockouts in cell therapy
  source 1..22: mol_type = other DNA
gagcaggagggtccggagtatt

SEQ ID NO: 15934 - DNA, 22 bp, synthetic construct
  misc_feature 1..22: note = Artificial sequence related to HLA knockouts in cell therapy
  source 1..22: mol_type = other DNA
agcaggagggtccggagtattg

SEQ ID NO: 15935 - DNA, 22 bp, synthetic construct
  misc_feature 1..22: note = Artificial sequence related to HLA knockouts in cell therapy
  source 1..22: mol_type = other DNA
aggagggtccggagtattggga

SEQ ID NO: 15936 - DNA, 22 bp, synthetic construct
  misc_feature 1..22: note = Artificial sequence related to HLA knockouts in cell therapy
  source 1..22: mol_type = other DNA
gggagacacggaaagtgaaggc

SEQ ID NO: 15937 - DNA, 22 bp, synthetic construct
  misc_feature 1..22: note = Artificial sequence related to HLA knockouts in cell therapy
  source 1..22: mol_type = other DNA
ggagacacggaaagtgaaggcc

SEQ ID NO: 15938 - DNA, 22 bp, synthetic construct
  misc_feature 1..22: note = Artificial sequence related to HLA knockouts in cell therapy
  source 1..22: mol_type = other DNA
gagacacggaaagtgaaggccc

SEQ ID NO: 15939 - DNA, 22 bp, synthetic construct
  misc_feature 1..22: note = Artificial sequence related to HLA knockouts in cell therapy
  source 1..22: mol_type = other DNA
agacacggaaagtgaaggccca

SEQ ID NO: 15940 - DNA, 22 bp, synthetic construct
  misc_feature 1..22: note = Artificial sequence related to HLA knockouts in cell therapy
  source 1..22: mol_type = other DNA
gacacggaaagtgaaggcccac

SEQ ID NO: 15941 - DNA, 22 bp, synthetic construct
  misc_feature 1..22: note = Artificial sequence related to HLA knockouts in cell therapy
  source 1..22: mol_type = other DNA
acacggaaagtgaaggcccact

SEQ ID NO: 15942 - DNA, 22 bp, synthetic construct
  misc_feature 1..22: note = Artificial sequence related to HLA knockouts in cell therapy
  source 1..22: mol_type = other DNA
cacggaaagtgaaggcccactc

SEQ ID NO: 15943 - DNA, 22 bp, synthetic construct
  misc_feature 1..22: note = Artificial sequence related to HLA knockouts in cell therapy
  source 1..22: mol_type = other DNA
acggaaagtgaaggcccactca

SEQ ID NO: 15944 - DNA, 22 bp, synthetic construct
  misc_feature 1..22: note = Artificial sequence related to HLA knockouts in cell therapy
  source 1..22: mol_type = other DNA
cggaaagtgaaggcccactcac

SEQ ID NO: 15945 - DNA, 22 bp, synthetic construct
  misc_feature 1..22: note = Artificial sequence related to HLA knockouts in cell therapy
  source 1..22: mol_type = other DNA
ggaaagtgaaggcccactcaca

SEQ ID NO: 15946 - DNA, 22 bp, synthetic construct
  misc_feature 1..22: note = Artificial sequence related to HLA knockouts in cell therapy
  source 1..22: mol_type = other DNA
gaaagtgaaggcccactcacag

SEQ ID NO: 15947 - DNA, 22 bp, synthetic construct
  misc_feature 1..22: note = Artificial sequence related to HLA knockouts in cell therapy
  source 1..22: mol_type = other DNA
aaagtgaaggcccactcacaga

SEQ ID NO: 15948 - DNA, 22 bp, synthetic construct
  misc_feature 1..22: note = Artificial sequence related to HLA knockouts in cell therapy
  source 1..22: mol_type = other DNA
aagtgaaggcccactcacagac

SEQ ID NO: 15949 - DNA, 22 bp, synthetic construct
  misc_feature 1..22: note = Artificial sequence related to HLA knockouts in cell therapy
  source 1..22: mol_type = other DNA
agtgaaggcccactcacagact

SEQ ID NO: 15950 - DNA, 22 bp, synthetic construct
  misc_feature 1..22: note = Artificial sequence related to HLA knockouts in cell therapy
  source 1..22: mol_type = other DNA
gtgaaggcccactcacagactc

SEQ ID NO: 15951 - DNA, 22 bp, synthetic construct
  misc_feature 1..22: note = Artificial sequence related to HLA knockouts in cell therapy
  source 1..22: mol_type = other DNA
tgaaggcccactcacagactca

SEQ ID NO: 15952 - DNA, 22 bp, synthetic construct
  misc_feature 1..22: note = Artificial sequence related to HLA knockouts in cell therapy
  source 1..22: mol_type = other DNA
gaaggcccactcacagactcac

SEQ ID NO: 15953 - DNA, 22 bp, synthetic construct
  misc_feature 1..22: note = Artificial sequence related to HLA knockouts in cell therapy
  source 1..22: mol_type = other DNA
aaggcccactcacagactcacc

SEQ ID NO: 15954 - DNA, 22 bp, synthetic construct
  misc_feature 1..22: note = Artificial sequence related to HLA knockouts in cell therapy
  source 1..22: mol_type = other DNA
cccactcacagactcaccgagt

SEQ ID NO: 15955 - DNA, 22 bp, synthetic construct
  misc_feature 1..22: note = Artificial sequence related to HLA knockouts in cell therapy
  source 1..22: mol_type = other DNA
ccactcacagactcaccgagtg

SEQ ID NO: 15956 - DNA, 22 bp, synthetic construct
  misc_feature 1..22: note = Artificial sequence related to HLA knockouts in cell therapy
  source 1..22: mol_type = other DNA
cactcacagactcaccgagtgg

SEQ ID NO: 15957 - DNA, 22 bp, synthetic construct
  misc_feature 1..22: note = Artificial sequence related to HLA knockouts in cell therapy
  source 1..22: mol_type = other DNA
actcacagactcaccgagtgga

SEQ ID NO: 15958 - DNA, 22 bp, synthetic construct
  misc_feature 1..22: note = Artificial sequence related to HLA knockouts in cell therapy
  source 1..22: mol_type = other DNA
ctcacagactcaccgagtggac

SEQ ID NO: 15959 - DNA, 22 bp, synthetic construct
  misc_feature 1..22: note = Artificial sequence related to HLA knockouts in cell therapy
  source 1..22: mol_type = other DNA
tcacagactcaccgagtggacc

SEQ ID NO: 15960 - DNA, 22 bp, synthetic construct
  misc_feature 1..22: note = Artificial sequence related to HLA knockouts in cell therapy
  source 1..22: mol_type = other DNA
cacagactcaccgagtggacct

SEQ ID NO: 15961 - DNA, 22 bp, synthetic construct
  misc_feature 1..22: note = Artificial sequence related to HLA knockouts in cell therapy
  source 1..22: mol_type = other DNA
acagactcaccgagtggacctg

SEQ ID NO: 15962 - DNA, 22 bp, synthetic construct
  misc_feature 1..22: note = Artificial sequence related to HLA knockouts in cell therapy
  source 1..22: mol_type = other DNA
gcggctactacaaccagagcga

SEQ ID NO: 15963 - DNA, 22 bp, synthetic construct
  misc_feature 1..22: note = Artificial sequence related to HLA knockouts in cell therapy
  source 1..22: mol_type = other DNA
cggctactacaaccagagcgag

SEQ ID NO: 15964 - DNA, 22 bp, synthetic construct
  misc_feature 1..22: note = Artificial sequence related to HLA knockouts in cell therapy
  source 1..22: mol_type = other DNA
ggctactacaaccagagcgagg

SEQ ID NO: 15965 - DNA, 22 bp, synthetic construct
  misc_feature 1..22: note = Artificial sequence related to HLA knockouts in cell therapy
  source 1..22: mol_type = other DNA
gctactacaaccagagcgaggc

SEQ ID NO: 15966 - DNA, 22 bp, synthetic construct
  misc_feature 1..22: note = Artificial sequence related to HLA knockouts in cell therapy
  source 1..22: mol_type = other DNA
ctactacaaccagagcgaggcc

SEQ ID NO: 15967 - DNA, 22 bp, synthetic construct
  misc_feature 1..22: note = Artificial sequence related to HLA knockouts in cell therapy
  source 1..22: mol_type = other DNA
tactacaaccagagcgaggccg

SEQ ID NO: 15968 - DNA, 22 bp, synthetic construct
  misc_feature 1..22: note = Artificial sequence related to HLA knockouts in cell therapy
  source 1..22: mol_type = other DNA
tacaaccagagcgaggccggtt

SEQ ID NO: 15969 - DNA, 22 bp, synthetic construct
  misc_feature 1..22: note = Artificial sequence related to HLA knockouts in cell therapy
  source 1..22: mol_type = other DNA
ggttctcacaccgtccagagga

SEQ ID NO: 15970 - DNA, 22 bp, synthetic construct
  misc_feature 1..22: note = Artificial sequence related to HLA knockouts in cell therapy
  source 1..22: mol_type = other DNA
gttctcacaccgtccagaggat

SEQ ID NO: 15971 - DNA, 22 bp, synthetic construct
  misc_feature 1..22: note = Artificial sequence related to HLA knockouts in cell therapy
  source 1..22: mol_type = other DNA
ttctcacaccgtccagaggatg

SEQ ID NO: 15972 - DNA, 22 bp, synthetic construct
  misc_feature 1..22: note = Artificial sequence related to HLA knockouts in cell therapy
  source 1..22: mol_type = other DNA
tctcacaccgtccagaggatgt

SEQ ID NO: 15973 - DNA, 22 bp, synthetic construct
  misc_feature 1..22: note = Artificial sequence related to HLA knockouts in cell therapy
  source 1..22: mol_type = other DNA
ctcacaccgtccagaggatgta

SEQ ID NO: 15974 - DNA, 22 bp, synthetic construct
  misc_feature 1..22: note = Artificial sequence related to HLA knockouts in cell therapy
  source 1..22: mol_type = other DNA
tcacaccgtccagaggatgtat

SEQ ID NO: 15975 - DNA, 22 bp, synthetic construct
  misc_feature 1..22: note = Artificial sequence related to HLA knockouts in cell therapy
  source 1..22: mol_type = other DNA
cacaccgtccagaggatgtatg

SEQ ID NO: 15976 - DNA, 22 bp, synthetic construct
  misc_feature 1..22: note = Artificial sequence related to HLA knockouts in cell therapy
  source 1..22: mol_type = other DNA
acaccgtccagaggatgtatgg

SEQ ID NO: 15977 - DNA, 22 bp, synthetic construct
  misc_feature 1..22: note = Artificial sequence related to HLA knockouts in cell therapy
  source 1..22: mol_type = other DNA
caccgtccagaggatgtatggc

SEQ ID NO: 15978 - DNA, 22 bp, synthetic construct
  misc_feature 1..22: note = Artificial sequence related to HLA knockouts in cell therapy
  source 1..22: mol_type = other DNA
accgtccagaggatgtatggct

SEQ ID NO: 15979 - DNA, 22 bp, synthetic construct
  misc_feature 1..22: note = Artificial sequence related to HLA knockouts in cell therapy
  source 1..22: mol_type = other DNA
ccgtccagaggatgtatggctg

SEQ ID NO: 15980 - DNA, 22 bp, synthetic construct
  misc_feature 1..22: note = Artificial sequence related to HLA knockouts in cell therapy
  source 1..22: mol_type = other DNA
cgtccagaggatgtatggctgc

SEQ ID NO: 15981 - DNA, 22 bp, synthetic construct
  misc_feature 1..22: note = Artificial sequence related to HLA knockouts in cell therapy
  source 1..22: mol_type = other DNA
gtccagaggatgtatggctgcg

SEQ ID NO: 15982 - DNA, 22 bp, synthetic construct
  misc_feature 1..22: note = Artificial sequence related to HLA knockouts in cell therapy
  source 1..22: mol_type = other DNA
tccagaggatgtatggctgcga

SEQ ID NO: 15983 - DNA, 22 bp, synthetic construct
  misc_feature 1..22: note = Artificial sequence related to HLA knockouts in cell therapy
  source 1..22: mol_type = other DNA
ccagaggatgtatggctgcgac

SEQ ID NO: 15984 - DNA, 22 bp, synthetic construct
  misc_feature 1..22: note = Artificial sequence related to HLA knockouts in cell therapy
  source 1..22: mol_type = other DNA
cagaggatgtatggctgcgacg

SEQ ID NO: 15985 - DNA, 22 bp, synthetic construct
  misc_feature 1..22: note = Artificial sequence related to HLA knockouts in cell therapy
  source 1..22: mol_type = other DNA
agaggatgtatggctgcgacgt

SEQ ID NO: 15986 - DNA, 22 bp, synthetic construct
  misc_feature 1..22: note = Artificial sequence related to HLA knockouts in cell therapy
  source 1..22: mol_type = other DNA
gaggatgtatggctgcgacgtg

SEQ ID NO: 15987 - DNA, 22 bp, synthetic construct
  misc_feature 1..22: note = Artificial sequence related to HLA knockouts in cell therapy
  source 1..22: mol_type = other DNA
aggatgtatggctgcgacgtgg

SEQ ID NO: 15988 - DNA, 22 bp, synthetic construct
  misc_feature 1..22: note = Artificial sequence related to HLA knockouts in cell therapy
  source 1..22: mol_type = other DNA
ggtaccaccagtacgcctacga

SEQ ID NO: 15989 - DNA, 22 bp, synthetic construct
  misc_feature 1..22: note = Artificial sequence related to HLA knockouts in cell therapy
  source 1..22: mol_type = other DNA
gtaccaccagtacgcctacgac

SEQ ID NO: 15990 - DNA, 22 bp, synthetic construct
  misc_feature 1..22: note = Artificial sequence related to HLA knockouts in cell therapy
  source 1..22: mol_type = other DNA
taccaccagtacgcctacgacg

SEQ ID NO: 15991 - DNA, 22 bp, synthetic construct
  misc_feature 1..22: note = Artificial sequence related to HLA knockouts in cell therapy
  source 1..22: mol_type = other DNA
accagtacgcctacgacggcaa

SEQ ID NO: 15992 - DNA, 22 bp, synthetic construct
  misc_feature 1..22: note = Artificial sequence related to HLA knockouts in cell therapy
  source 1..22: mol_type = other DNA
agtacgcctacgacggcaagga

SEQ ID NO: 15993 - DNA, 22 bp, synthetic construct
  misc_feature 1..22: note = Artificial sequence related to HLA knockouts in cell therapy
  source 1..22: mol_type = other DNA
gtacgcctacgacggcaaggat

SEQ ID NO: 15994 - DNA, 22 bp, synthetic construct
  misc_feature 1..22: note = Artificial sequence related to HLA knockouts in cell therapy
  source 1..22: mol_type = other DNA
tacgcctacgacggcaaggatt

SEQ ID NO: 15995 - DNA, 22 bp, synthetic construct
  misc_feature 1..22: note = Artificial sequence related to HLA knockouts in cell therapy
  source 1..22: mol_type = other DNA
acgcctacgacggcaaggatta

SEQ ID NO: 15996 - DNA, 22 bp, synthetic construct
  misc_feature 1..22: note = Artificial sequence related to HLA knockouts in cell therapy
  source 1..22: mol_type = other DNA
cgcctacgacggcaaggattac

SEQ ID NO: 15997 - DNA, 22 bp, synthetic construct
  misc_feature 1..22: note = Artificial sequence related to HLA knockouts in cell therapy
  source 1..22: mol_type = other DNA
gcctacgacggcaaggattaca

SEQ ID NO: 15998 - DNA, 22 bp, synthetic construct
  misc_feature 1..22: note = Artificial sequence related to HLA knockouts in cell therapy
  source 1..22: mol_type = other DNA
cctacgacggcaaggattacat

SEQ ID NO: 15999 - DNA, 22 bp, synthetic construct
  misc_feature 1..22: note = Artificial sequence related to HLA knockouts in cell therapy
  source 1..22: mol_type = other DNA
ctacgacggcaaggattacatc

SEQ ID NO: 16000 - DNA, 22 bp, synthetic construct
  misc_feature 1..22: note = Artificial sequence related to HLA knockouts in cell therapy
  source 1..22: mol_type = other DNA
tacgacggcaaggattacatcg

SEQ ID NO: 16001 - DNA, 22 bp, synthetic construct
  misc_feature 1..22: note = Artificial sequence related to HLA knockouts in cell therapy
  source 1..22: mol_type = other DNA
acgacggcaaggattacatcgc

SEQ ID NO: 16002 - DNA, 22 bp, synthetic construct
  misc_feature 1..22: note = Artificial sequence related to HLA knockouts in cell therapy
  source 1..22: mol_type = other DNA
cgacggcaaggattacatcgcc

SEQ ID NO: 16003 - DNA, 22 bp, synthetic construct
  misc_feature 1..22: note = Artificial sequence related to HLA knockouts in cell therapy
  source 1..22: mol_type = other DNA
gacggcaaggattacatcgccc

SEQ ID NO: 16004 - DNA, 22 bp, synthetic construct
  misc_feature 1..22: note = Artificial sequence related to HLA knockouts in cell therapy
  source 1..22: mol_type = other DNA
acggcaaggattacatcgccct

SEQ ID NO: 16005 - DNA, 22 bp, synthetic construct
  misc_feature 1..22: note = Artificial sequence related to HLA knockouts in cell therapy
  source 1..22: mol_type = other DNA
cggcaaggattacatcgccctg

SEQ ID NO: 16006 - DNA, 22 bp, synthetic construct
  misc_feature 1..22: note = Artificial sequence related to HLA knockouts in cell therapy
  source 1..22: mol_type = other DNA
ggcaaggattacatcgccctga

SEQ ID NO: 16007 - DNA, 22 bp, synthetic construct
  misc_feature 1..22: note = Artificial sequence related to HLA knockouts in cell therapy
  source 1..22: mol_type = other DNA
gcaaggattacatcgccctgaa

SEQ ID NO: 16008 - DNA, 22 bp, synthetic construct
  misc_feature 1..22: note = Artificial sequence related to HLA knockouts in cell therapy
  source 1..22: mol_type = other DNA
caaggattacatcgccctgaaa

SEQ ID NO: 16009 - DNA, 22 bp, synthetic construct
  misc_feature 1..22: note = Artificial sequence related to HLA knockouts in cell therapy
  source 1..22: mol_type = other DNA
aaggattacatcgccctgaaag

SEQ ID NO: 16010 - DNA, 22 bp, synthetic construct
  misc_feature 1..22: note = Artificial sequence related to HLA knockouts in cell therapy
  source 1..22: mol_type = other DNA
aggattacatcgccctgaaaga

SEQ ID NO: 16011 - DNA, 22 bp, synthetic construct
  misc_feature 1..22: note = Artificial sequence related to HLA knockouts in cell therapy
  source 1..22: mol_type = other DNA
ggattacatcgccctgaaagag

SEQ ID NO: 16012 - DNA, 22 bp, synthetic construct
  misc_feature 1..22: note = Artificial sequence related to HLA knockouts in cell therapy
  source 1..22: mol_type = other DNA
gattacatcgccctgaaagagg

SEQ ID NO: 16013 - DNA, 22 bp, synthetic construct
  misc_feature 1..22: note = Artificial sequence related to HLA knockouts in cell therapy
  source 1..22: mol_type = other DNA
attacatcgccctgaaagagga

SEQ ID NO: 16014 - DNA, 22 bp, synthetic construct
  misc_feature 1..22: note = Artificial sequence related to HLA knockouts in cell therapy
  source 1..22: mol_type = other DNA
ttacatcgccctgaaagaggac

SEQ ID NO: 16015 - DNA, 22 bp, synthetic construct
  misc_feature 1..22: note = Artificial sequence related to HLA knockouts in cell therapy
  source 1..22: mol_type = other DNA
tacatcgccctgaaagaggacc

SEQ ID NO: 16016 - DNA, 22 bp, synthetic construct
  misc_feature 1..22: note = Artificial sequence related to HLA knockouts in cell therapy
  source 1..22: mol_type = other DNA
acatcgccctgaaagaggacct

SEQ ID NO: 16017 - DNA, 22 bp, synthetic construct
  misc_feature 1..22: note = Artificial sequence related to HLA knockouts in cell therapy
  source 1..22: mol_type = other DNA
catcgccctgaaagaggacctg

SEQ ID NO: 16018 - DNA, 22 bp, synthetic construct
  misc_feature 1..22: note = Artificial sequence related to HLA knockouts in cell therapy
  source 1..22: mol_type = other DNA
atcgccctgaaagaggacctgc

SEQ ID NO: 16019 - DNA, 22 bp, synthetic construct
  misc_feature 1..22: note = Artificial sequence related to HLA knockouts in cell therapy
  source 1..22: mol_type = other DNA
cctgaaagaggacctgcgctct

SEQ ID NO: 16020 - DNA, 22 bp, synthetic construct
  misc_feature 1..22: note = Artificial sequence related to HLA knockouts in cell therapy
  source 1..22: mol_type = other DNA
ctgaaagaggacctgcgctctt

SEQ ID NO: 16021 - DNA, 22 bp, synthetic construct
  misc_feature 1..22: note = Artificial sequence related to HLA knockouts in cell therapy
  source 1..22: mol_type = other DNA
tgaaagaggacctgcgctcttg

SEQ ID NO: 16022 - DNA, 22 bp, synthetic construct
  misc_feature 1..22: note = Artificial sequence related to HLA knockouts in cell therapy
  source 1..22: mol_type = other DNA
gaaagaggacctgcgctcttgg

SEQ ID NO: 16023 - DNA, 22 bp, synthetic construct
  misc_feature 1..22: note = Artificial sequence related to HLA knockouts in cell therapy
  source 1..22: mol_type = other DNA
aaagaggacctgcgctcttgga

SEQ ID NO: 16024 - DNA, 22 bp, synthetic construct
  misc_feature 1..22: note = Artificial sequence related to HLA knockouts in cell therapy
  source 1..22: mol_type = other DNA
aagaggacctgcgctcttggac

SEQ ID NO: 16025 - DNA, 22 bp, synthetic construct
  misc_feature 1..22: note = Artificial sequence related to HLA knockouts in cell therapy
  source 1..22: mol_type = other DNA
gacatggcagctcagaccacca

SEQ ID NO: 16026 - DNA, 22 bp, synthetic construct
  misc_feature 1..22: note = Artificial sequence related to HLA knockouts in cell therapy
  source 1..22: mol_type = other DNA
acatggcagctcagaccaccaa

SEQ ID NO: 16027 - DNA, 22 bp, synthetic construct
  misc_feature 1..22: note = Artificial sequence related to HLA knockouts in cell therapy
  source 1..22: mol_type = other DNA
catggcagctcagaccaccaag

SEQ ID NO: 16028 - DNA, 22 bp, synthetic construct
  misc_feature 1..22: note = Artificial sequence related to HLA knockouts in cell therapy
  source 1..22: mol_type = other DNA
atggcagctcagaccaccaagc

SEQ ID NO: 16029 - DNA, 22 bp, synthetic construct
  misc_feature 1..22: note = Artificial sequence related to HLA knockouts in cell therapy
  source 1..22: mol_type = other DNA
tggcagctcagaccaccaagca

SEQ ID NO: 16030 - DNA, 22 bp, synthetic construct
  misc_feature 1..22: note = Artificial sequence related to HLA knockouts in cell therapy
  source 1..22: mol_type = other DNA
gcagctcagaccaccaagcaca

SEQ ID NO: 16031 - DNA, 22 bp, synthetic construct
  misc_feature 1..22: note = Artificial sequence related to HLA knockouts in cell therapy
  source 1..22: mol_type = other DNA
cagctcagaccaccaagcacaa

SEQ ID NO: 16032 - DNA, 22 bp, synthetic construct
  misc_feature 1..22: note = Artificial sequence related to HLA knockouts in cell therapy
  source 1..22: mol_type = other DNA
agctcagaccaccaagcacaag

SEQ ID NO: 16033 - DNA, 22 bp, synthetic construct
  misc_feature 1..22: note = Artificial sequence related to HLA knockouts in cell therapy
  source 1..22: mol_type = other DNA
gctcagaccaccaagcacaagt

SEQ ID NO: 16034 - DNA, 22 bp, synthetic construct
  misc_feature 1..22: note = Artificial sequence related to HLA knockouts in cell therapy
  source 1..22: mol_type = other DNA
ctcagaccaccaagcacaagtg

SEQ ID NO: 16035 - DNA, 22 bp, synthetic construct
  misc_feature 1..22: note = Artificial sequence related to HLA knockouts in cell therapy
  source 1..22: mol_type = other DNA
tcagaccaccaagcacaagtgg

SEQ ID NO: 16036 - DNA, 22 bp, synthetic construct
  misc_feature 1..22: note = Artificial sequence related to HLA knockouts in cell therapy
  source 1..22: mol_type = other DNA
cagaccaccaagcacaagtggg

SEQ ID NO: 16037 - DNA, 22 bp, synthetic construct
  misc_feature 1..22: note = Artificial sequence related to HLA knockouts in cell therapy
  source 1..22: mol_type = other DNA
agaccaccaagcacaagtggga

SEQ ID NO: 16038 - DNA, 22 bp, synthetic construct
  misc_feature 1..22: note = Artificial sequence related to HLA knockouts in cell therapy
  source 1..22: mol_type = other DNA
gaccaccaagcacaagtgggag

SEQ ID NO: 16039 - DNA, 22 bp, synthetic construct
  misc_feature 1..22: note = Artificial sequence related to HLA knockouts in cell therapy
  source 1..22: mol_type = other DNA
accaccaagcacaagtgggagg

SEQ ID NO: 16040 - DNA, 22 bp, synthetic construct
  misc_feature 1..22: note = Artificial sequence related to HLA knockouts in cell therapy
  source 1..22: mol_type = other DNA
ccatgtggcggagcagttgaga

SEQ ID NO: 16041 - DNA, 22 bp, synthetic construct
  misc_feature 1..22: note = Artificial sequence related to HLA knockouts in cell therapy
  source 1..22: mol_type = other DNA
catgtggcggagcagttgagag

SEQ ID NO: 16042 - DNA, 22 bp, synthetic construct
  misc_feature 1..22: note = Artificial sequence related to HLA knockouts in cell therapy
  source 1..22: mol_type = other DNA
atgtggcggagcagttgagagc

SEQ ID NO: 16043 - DNA, 22 bp, synthetic construct
  misc_feature 1..22: note = Artificial sequence related to HLA knockouts in cell therapy
  source 1..22: mol_type = other DNA
tggcggagcagttgagagccta

SEQ ID NO: 16044 - DNA, 22 bp, synthetic construct
  misc_feature 1..22: note = Artificial sequence related to HLA knockouts in cell therapy
  source 1..22: mol_type = other DNA
cggagcagttgagagcctacct

SEQ ID NO: 16045 - DNA, 22 bp, synthetic construct
  misc_feature 1..22: note = Artificial sequence related to HLA knockouts in cell therapy
  source 1..22: mol_type = other DNA
ggagcagttgagagcctacctg

SEQ ID NO: 16046 - DNA, 22 bp, synthetic construct
  misc_feature 1..22: note = Artificial sequence related to HLA knockouts in cell therapy
  source 1..22: mol_type = other DNA
gagcagttgagagcctacctgg

SEQ ID NO: 16047 - DNA, 22 bp, synthetic construct
  misc_feature 1..22: note = Artificial sequence related to HLA knockouts in cell therapy
  source 1..22: mol_type = other DNA
agcagttgagagcctacctgga

SEQ ID NO: 16048 - DNA, 22 bp, synthetic construct
  misc_feature 1..22: note = Artificial sequence related to HLA knockouts in cell therapy
  source 1..22: mol_type = other DNA
gcagttgagagcctacctggag

SEQ ID NO: 16049 - DNA, 22 bp, synthetic construct
  misc_feature 1..22: note = Artificial sequence related to HLA knockouts in cell therapy
  source 1..22: mol_type = other DNA
cagttgagagcctacctggagg

SEQ ID NO: 16050 - DNA, 22 bp, synthetic construct
  misc_feature 1..22: note = Artificial sequence related to HLA knockouts in cell therapy
  source 1..22: mol_type = other DNA
agttgagagcctacctggaggg

SEQ ID NO: 16051 - DNA, 22 bp, synthetic construct
  misc_feature 1..22: note = Artificial sequence related to HLA knockouts in cell therapy
  source 1..22: mol_type = other DNA
ttgagagcctacctggagggca

SEQ ID NO: 16052 - DNA, 22 bp, synthetic construct
  misc_feature 1..22: note = Artificial sequence related to HLA knockouts in cell therapy
  source 1..22: mol_type = other DNA
tggagtggctccgcagatacct

SEQ ID NO: 16053 - DNA, 22 bp, synthetic construct
  misc_feature 1..22: note = Artificial sequence related to HLA knockouts in cell therapy
  source 1..22: mol_type = other DNA
agtggctccgcagatacctgga

SEQ ID NO: 16054 - DNA, 22 bp, synthetic construct
  misc_feature 1..22: note = Artificial sequence related to HLA knockouts in cell therapy
  source 1..22: mol_type = other DNA
tggctccgcagatacctggaga

SEQ ID NO: 16055 - DNA, 22 bp, synthetic construct
  misc_feature 1..22: note = Artificial sequence related to HLA knockouts in cell therapy
  source 1..22: mol_type = other DNA
ggctccgcagatacctggagaa

SEQ ID NO: 16056 - DNA, 22 bp, synthetic construct
  misc_feature 1..22: note = Artificial sequence related to HLA knockouts in cell therapy
  source 1..22: mol_type = other DNA
gctccgcagatacctggagaac

SEQ ID NO: 16057 - DNA, 22 bp, synthetic construct
  misc_feature 1..22: note = Artificial sequence related to HLA knockouts in cell therapy
  source 1..22: mol_type = other DNA
ctccgcagatacctggagaacg

SEQ ID NO: 16058 - DNA, 22 bp, synthetic construct
  misc_feature 1..22: note = Artificial sequence related to HLA knockouts in cell therapy
  source 1..22: mol_type = other DNA
tccgcagatacctggagaacgg

SEQ ID NO: 16059 - DNA, 22 bp, synthetic construct
  misc_feature 1..22: note = Artificial sequence related to HLA knockouts in cell therapy
  source 1..22: mol_type = other DNA
cgcagatacctggagaacggga

SEQ ID NO: 16060 - DNA, 22 bp, synthetic construct
  misc_feature 1..22: note = Artificial sequence related to HLA knockouts in cell therapy
  source 1..22: mol_type = other DNA
gcagatacctggagaacgggaa

SEQ ID NO: 16061 - DNA, 22 bp, synthetic construct
  misc_feature 1..22: note = Artificial sequence related to HLA knockouts in cell therapy
  source 1..22: mol_type = other DNA
cagatacctggagaacgggaag

SEQ ID NO: 16062 - DNA, 22 bp, synthetic construct
  misc_feature 1..22: note = Artificial sequence related to HLA knockouts in cell therapy
  source 1..22: mol_type = other DNA
agatacctggagaacgggaagg

SEQ ID NO: 16063 - DNA, 22 bp, synthetic construct
  misc_feature 1..22: note = Artificial sequence related to HLA knockouts in cell therapy
  source 1..22: mol_type = other DNA
gatacctggagaacgggaagga

SEQ ID NO: 16064 - DNA, 22 bp, synthetic construct
  misc_feature 1..22: note = Artificial sequence related to HLA knockouts in cell therapy
  source 1..22: mol_type = other DNA
atacctggagaacgggaaggag

SEQ ID NO: 16065 - DNA, 22 bp, synthetic construct
  misc_feature 1..22: note = Artificial sequence related to HLA knockouts in cell therapy
  source 1..22: mol_type = other DNA
tacctggagaacgggaaggaga

SEQ ID NO: 16066 - DNA, 22 bp, synthetic construct
  misc_feature 1..22: note = Artificial sequence related to HLA knockouts in cell therapy
  source 1..22: mol_type = other DNA
acctggagaacgggaaggagac

SEQ ID NO: 16067 - DNA, 22 bp, synthetic construct
  misc_feature 1..22: note = Artificial sequence related to HLA knockouts in cell therapy
  source 1..22: mol_type = other DNA
tggagaacgggaaggagacgct

SEQ ID NO: 16068 - DNA, 22 bp, synthetic construct
  misc_feature 1..22: note = Artificial sequence related to HLA knockouts in cell therapy
  source 1..22: mol_type = other DNA
agaacgggaaggagacgctgca

SEQ ID NO: 16069 - DNA, 22 bp, synthetic construct
  misc_feature 1..22: note = Artificial sequence related to HLA knockouts in cell therapy
  source 1..22: mol_type = other DNA
aaacgcatatgactcaccacgc

SEQ ID NO: 16070 - DNA, 22 bp, synthetic construct
  misc_feature 1..22: note = Artificial sequence related to HLA knockouts in cell therapy
  source 1..22: mol_type = other DNA
aacgcatatgactcaccacgct

SEQ ID NO: 16071 - DNA, 22 bp, synthetic construct
  misc_feature 1..22: note = Artificial sequence related to HLA knockouts in cell therapy
  source 1..22: mol_type = other DNA
acgcatatgactcaccacgctg

SEQ ID NO: 16072 - DNA, 22 bp, synthetic construct
  misc_feature 1..22: note = Artificial sequence related to HLA knockouts in cell therapy
  source 1..22: mol_type = other DNA
cgcatatgactcaccacgctgt

SEQ ID NO: 16073 - DNA, 22 bp, synthetic construct
  misc_feature 1..22: note = Artificial sequence related to HLA knockouts in cell therapy
  source 1..22: mol_type = other DNA
gcatatgactcaccacgctgtc

SEQ ID NO: 16074 - DNA, 22 bp, synthetic construct
  misc_feature 1..22: note = Artificial sequence related to HLA knockouts in cell therapy
  source 1..22: mol_type = other DNA
catatgactcaccacgctgtct

SEQ ID NO: 16075 - DNA, 22 bp, synthetic construct
  misc_feature 1..22: note = Artificial sequence related to HLA knockouts in cell therapy
  source 1..22: mol_type = other DNA
atatgactcaccacgctgtctc

SEQ ID NO: 16076 - DNA, 22 bp, synthetic construct
  misc_feature 1..22: note = Artificial sequence related to HLA knockouts in cell therapy
  source 1..22: mol_type = other DNA
tatgactcaccacgctgtctct

SEQ ID NO: 16077 - DNA, 22 bp, synthetic construct
  misc_feature 1..22: note = Artificial sequence related to HLA knockouts in cell therapy
  source 1..22: mol_type = other DNA
atgactcaccacgctgtctctg

SEQ ID NO: 16078 - DNA, 22 bp, synthetic construct
  misc_feature 1..22: note = Artificial sequence related to HLA knockouts in cell therapy
  source 1..22: mol_type = other DNA
tgactcaccacgctgtctctga

SEQ ID NO: 16079 - DNA, 22 bp, synthetic construct
  misc_feature 1..22: note = Artificial sequence related to HLA knockouts in cell therapy
  source 1..22: mol_type = other DNA
gactcaccacgctgtctctgac

SEQ ID NO: 16080 - DNA, 22 bp, synthetic construct
  misc_feature 1..22: note = Artificial sequence related to HLA knockouts in cell therapy
  source 1..22: mol_type = other DNA
actcaccacgctgtctctgacc

SEQ ID NO: 16081 - DNA, 22 bp, synthetic construct
  misc_feature 1..22: note = Artificial sequence related to HLA knockouts in cell therapy
  source 1..22: mol_type = other DNA
ctcaccacgctgtctctgacca

SEQ ID NO: 16082 - DNA, 22 bp, synthetic construct
  misc_feature 1..22: note = Artificial sequence related to HLA knockouts in cell therapy
  source 1..22: mol_type = other DNA
tcaccacgctgtctctgaccat

SEQ ID NO: 16083 - DNA, 22 bp, synthetic construct
  misc_feature 1..22: note = Artificial sequence related to HLA knockouts in cell therapy
  source 1..22: mol_type = other DNA
caccacgctgtctctgaccatg

SEQ ID NO: 16084 - DNA, 22 bp, synthetic construct
  misc_feature 1..22: note = Artificial sequence related to HLA knockouts in cell therapy
  source 1..22: mol_type = other DNA
accacgctgtctctgaccatga

SEQ ID NO: 16085 - DNA, 22 bp, synthetic construct
  misc_feature 1..22: note = Artificial sequence related to HLA knockouts in cell therapy
  source 1..22: mol_type = other DNA
ccacgctgtctctgaccatgaa

SEQ ID NO: 16086 - DNA, 22 bp, synthetic construct
  misc_feature 1..22: note = Artificial sequence related to HLA knockouts in cell therapy
  source 1..22: mol_type = other DNA
cacgctgtctctgaccatgaag

SEQ ID NO: 16087 - DNA, 22 bp, synthetic construct
  misc_feature 1..22: note = Artificial sequence related to HLA knockouts in cell therapy
  source 1..22: mol_type = other DNA
acgctgtctctgaccatgaagc

SEQ ID NO: 16088 - DNA, 22 bp, synthetic construct
  misc_feature 1..22: note = Artificial sequence related to HLA knockouts in cell therapy
  source 1..22: mol_type = other DNA
cgctgtctctgaccatgaagcc

SEQ ID NO: 16089 - DNA, 22 bp, synthetic construct
  misc_feature 1..22: note = Artificial sequence related to HLA knockouts in cell therapy
  source 1..22: mol_type = other DNA
gctgtctctgaccatgaagcca

SEQ ID NO: 16090 - DNA, 22 bp, synthetic construct
  misc_feature 1..22: note = Artificial sequence related to HLA knockouts in cell therapy
  source 1..22: mol_type = other DNA
ctgtctctgaccatgaagccac

SEQ ID NO: 16091 - DNA, 22 bp, synthetic construct
  misc_feature 1..22: note = Artificial sequence related to HLA knockouts in cell therapy
  source 1..22: mol_type = other DNA
tgtctctgaccatgaagccacc

SEQ ID NO: 16092 - DNA, 22 bp, synthetic construct
  misc_feature 1..22: note = Artificial sequence related to HLA knockouts in cell therapy
  source 1..22: mol_type = other DNA
gtctctgaccatgaagccaccc

SEQ ID NO: 16093 - DNA, 22 bp, synthetic construct
  misc_feature 1..22: note = Artificial sequence related to HLA knockouts in cell therapy
  source 1..22: mol_type = other DNA
tctctgaccatgaagccaccct

SEQ ID NO: 16094 - DNA, 22 bp, synthetic construct
  misc_feature 1..22: note = Artificial sequence related to HLA knockouts in cell therapy
  source 1..22: mol_type = other DNA
ctctgaccatgaagccaccctg

SEQ ID NO: 16095 - DNA, 22 bp, synthetic construct
  misc_feature 1..22: note = Artificial sequence related to HLA knockouts in cell therapy
  source 1..22: mol_type = other DNA
tctgaccatgaagccaccctga

SEQ ID NO: 16096 - DNA, 22 bp, synthetic construct
  misc_feature 1..22: note = Artificial sequence related to HLA knockouts in cell therapy
  source 1..22: mol_type = other DNA
ctgaccatgaagccaccctgag

SEQ ID NO: 16097 - DNA, 22 bp, synthetic construct
  misc_feature 1..22: note = Artificial sequence related to HLA knockouts in cell therapy
  source 1..22: mol_type = other DNA
tgaccatgaagccaccctgagg

SEQ ID NO: 16098 - DNA, 22 bp, synthetic construct
  misc_feature 1..22: note = Artificial sequence related to HLA knockouts in cell therapy
  source 1..22: mol_type = other DNA
gaccatgaagccaccctgaggt

SEQ ID NO: 16099 - DNA, 22 bp, synthetic construct
  misc_feature 1..22: note = Artificial sequence related to HLA knockouts in cell therapy
  source 1..22: mol_type = other DNA
accatgaagccaccctgaggtg

SEQ ID NO: 16100 - DNA, 22 bp, synthetic construct
  misc_feature 1..22: note = Artificial sequence related to HLA knockouts in cell therapy
  source 1..22: mol_type = other DNA
catgaagccaccctgaggtgct

SEQ ID NO: 16101 - DNA, 22 bp, synthetic construct
  misc_feature 1..22: note = Artificial sequence related to HLA knockouts in cell therapy
  source 1..22: mol_type = other DNA
atgaagccaccctgaggtgctg

SEQ ID NO: 16102 - DNA, 22 bp, synthetic construct
  misc_feature 1..22: note = Artificial sequence related to HLA knockouts in cell therapy
  source 1..22: mol_type = other DNA
ctgagcttctaccctgcggaga

SEQ ID NO: 16103 - DNA, 22 bp, synthetic construct
  misc_feature 1..22: note = Artificial sequence related to HLA knockouts in cell therapy
  source 1..22: mol_type = other DNA
tgagcttctaccctgcggagat

SEQ ID NO: 16104 - DNA, 22 bp, synthetic construct
  misc_feature 1..22: note = Artificial sequence related to HLA knockouts in cell therapy
  source 1..22: mol_type = other DNA
gagcttctaccctgcggagatc

SEQ ID NO: 16105 - DNA, 22 bp, synthetic construct
  misc_feature 1..22: note = Artificial sequence related to HLA knockouts in cell therapy
  source 1..22: mol_type = other DNA
agcttctaccctgcggagatca

SEQ ID NO: 16106 - DNA, 22 bp, synthetic construct
  misc_feature 1..22: note = Artificial sequence related to HLA knockouts in cell therapy
  source 1..22: mol_type = other DNA
gcttctaccctgcggagatcac

SEQ ID NO: 16107 - DNA, 22 bp, synthetic construct
  misc_feature 1..22: note = Artificial sequence related to HLA knockouts in cell therapy
  source 1..22: mol_type = other DNA
cttctaccctgcggagatcaca

SEQ ID NO: 16108 - DNA, 22 bp, synthetic construct
  misc_feature 1..22: note = Artificial sequence related to HLA knockouts in cell therapy
  source 1..22: mol_type = other DNA
ttctaccctgcggagatcacac

SEQ ID NO: 16109 - DNA, 22 bp, synthetic construct
  misc_feature 1..22: note = Artificial sequence related to HLA knockouts in cell therapy
  source 1..22: mol_type = other DNA
tctaccctgcggagatcacact

SEQ ID NO: 16110 - DNA, 22 bp, synthetic construct
  misc_feature 1..22: note = Artificial sequence related to HLA knockouts in cell therapy
  source 1..22: mol_type = other DNA
ctaccctgcggagatcacactg

SEQ ID NO: 16111 - DNA, 22 bp, synthetic construct
  misc_feature 1..22: note = Artificial sequence related to HLA knockouts in cell therapy
  source 1..22: mol_type = other DNA
taccctgcggagatcacactga

SEQ ID NO: 16112 - DNA, 22 bp, synthetic construct
  misc_feature 1..22: note = Artificial sequence related to HLA knockouts in cell therapy
  source 1..22: mol_type = other DNA
accctgcggagatcacactgac

SEQ ID NO: 16113 - DNA, 22 bp, synthetic construct
  misc_feature 1..22: note = Artificial sequence related to HLA knockouts in cell therapy
  source 1..22: mol_type = other DNA
cctgcggagatcacactgacct

SEQ ID NO: 16114 - DNA, 22 bp, synthetic construct
  misc_feature 1..22: note = Artificial sequence related to HLA knockouts in cell therapy
  source 1..22: mol_type = other DNA
ctgcggagatcacactgacctg

SEQ ID NO: 16115 - DNA, 22 bp, synthetic construct
  misc_feature 1..22: note = Artificial sequence related to HLA knockouts in cell therapy
  source 1..22: mol_type = other DNA
tgcggagatcacactgacctgg

SEQ ID NO: 16116 - DNA, 22 bp, synthetic construct
  misc_feature 1..22: note = Artificial sequence related to HLA knockouts in cell therapy
  source 1..22: mol_type = other DNA
cggagatcacactgacctggca

SEQ ID NO: 16117 - DNA, 22 bp, synthetic construct
  misc_feature 1..22: note = Artificial sequence related to HLA knockouts in cell therapy
  source 1..22: mol_type = other DNA
ggagatcacactgacctggcag

SEQ ID NO: 16118 - DNA, 22 bp, synthetic construct
  misc_feature 1..22: note = Artificial sequence related to HLA knockouts in cell therapy
  source 1..22: mol_type = other DNA
gagatcacactgacctggcagc

SEQ ID NO: 16119 - DNA, 22 bp, synthetic construct
  misc_feature 1..22: note = Artificial sequence related to HLA knockouts in cell therapy
  source 1..22: mol_type = other DNA
agatcacactgacctggcagcg

SEQ ID NO: 16120 - DNA, 22 bp, synthetic construct
  misc_feature 1..22: note = Artificial sequence related to HLA knockouts in cell therapy
  source 1..22: mol_type = other DNA
gggatggaaccttccagaagtg

SEQ ID NO: 16121 - DNA, 22 bp, synthetic construct
  misc_feature 1..22: note = Artificial sequence related to HLA knockouts in cell therapy
  source 1..22: mol_type = other DNA
ggatggaaccttccagaagtgg

SEQ ID NO: 16122 - DNA, 22 bp, synthetic construct
  misc_feature 1..22: note = Artificial sequence related to HLA knockouts in cell therapy
  source 1..22: mol_type = other DNA
gatggaaccttccagaagtggg

SEQ ID NO: 16123 - DNA, 22 bp, synthetic construct
  misc_feature 1..22: note = Artificial sequence related to HLA knockouts in cell therapy
  source 1..22: mol_type = other DNA
atggaaccttccagaagtgggc

SEQ ID NO: 16124 - DNA, 22 bp, synthetic construct
  misc_feature 1..22: note = Artificial sequence related to HLA knockouts in cell therapy
  source 1..22: mol_type = other DNA
tggaaccttccagaagtgggcg

SEQ ID NO: 16125 - DNA, 22 bp, synthetic construct
  misc_feature 1..22: note = Artificial sequence related to HLA knockouts in cell therapy
  source 1..22: mol_type = other DNA
ctgtggtggtgccttctggaca

SEQ ID NO: 16126 - DNA, 22 bp, synthetic construct
  misc_feature 1..22: note = Artificial sequence related to HLA knockouts in cell therapy
  source 1..22: mol_type = other DNA
tgtggtggtgccttctggacag

SEQ ID NO: 16127 - DNA, 22 bp, synthetic construct
  misc_feature 1..22: note = Artificial sequence related to HLA knockouts in cell therapy
  source 1..22: mol_type = other DNA
tggtggtgccttctggacagga

SEQ ID NO: 16128 - DNA, 22 bp, synthetic construct
  misc_feature 1..22: note = Artificial sequence related to HLA knockouts in cell therapy
  source 1..22: mol_type = other DNA
tggtgccttctggacaggagca

SEQ ID NO: 16129 - DNA, 22 bp, synthetic construct
  misc_feature 1..22: note = Artificial sequence related to HLA knockouts in cell therapy
  source 1..22: mol_type = other DNA
gtgccttctggacaggagcaga

SEQ ID NO: 16130 - DNA, 22 bp, synthetic construct
  misc_feature 1..22: note = Artificial sequence related to HLA knockouts in cell therapy
  source 1..22: mol_type = other DNA
tgccttctggacaggagcagag

SEQ ID NO: 16131 - DNA, 22 bp, synthetic construct
  misc_feature 1..22: note = Artificial sequence related to HLA knockouts in cell therapy
  source 1..22: mol_type = other DNA
gccttctggacaggagcagaga

SEQ ID NO: 16132 - DNA, 22 bp, synthetic construct
  misc_feature 1..22: note = Artificial sequence related to HLA knockouts in cell therapy
  source 1..22: mol_type = other DNA
ccttctggacaggagcagagat

SEQ ID NO: 16133 - DNA, 22 bp, synthetic construct
  misc_feature 1..22: note = Artificial sequence related to HLA knockouts in cell therapy
  source 1..22: mol_type = other DNA
cttctggacaggagcagagata

SEQ ID NO: 16134 - DNA, 22 bp, synthetic construct
  misc_feature 1..22: note = Artificial sequence related to HLA knockouts in cell therapy
  source 1..22: mol_type = other DNA
ttctggacaggagcagagatac

SEQ ID NO: 16135 - DNA, 22 bp, synthetic construct
  misc_feature 1..22: note = Artificial sequence related to HLA knockouts in cell therapy
  source 1..22: mol_type = other DNA
tctggacaggagcagagataca

SEQ ID NO: 16136 - DNA, 22 bp, synthetic construct
  misc_feature 1..22: note = Artificial sequence related to HLA knockouts in cell therapy
  source 1..22: mol_type = other DNA
ctggacaggagcagagatacac

SEQ ID NO: 16137 - DNA, 22 bp, synthetic construct
  misc_feature 1..22: note = Artificial sequence related to HLA knockouts in cell therapy
  source 1..22: mol_type = other DNA
tggacaggagcagagatacacc

SEQ ID NO: 16138 - DNA, 22 bp, synthetic construct
  misc_feature 1..22: note = Artificial sequence related to HLA knockouts in cell therapy
  source 1..22: mol_type = other DNA
ggacaggagcagagatacacct

SEQ ID NO: 16139 - DNA, 22 bp, synthetic construct
  misc_feature 1..22: note = Artificial sequence related to HLA knockouts in cell therapy
  source 1..22: mol_type = other DNA
gacaggagcagagatacacctg

SEQ ID NO: 16140 - DNA, 22 bp, synthetic construct
  misc_feature 1..22: note = Artificial sequence related to HLA knockouts in cell therapy
  source 1..22: mol_type = other DNA
acaggagcagagatacacctgc

SEQ ID NO: 16141 - DNA, 22 bp, synthetic construct
  misc_feature 1..22: note = Artificial sequence related to HLA knockouts in cell therapy
  source 1..22: mol_type = other DNA
caggagcagagatacacctgcc

SEQ ID NO: 16142 - DNA, 22 bp, synthetic construct
  misc_feature 1..22: note = Artificial sequence related to HLA knockouts in cell therapy
  source 1..22: mol_type = other DNA
aggagcagagatacacctgcca

SEQ ID NO: 16143 - DNA, 22 bp, synthetic construct
  misc_feature 1..22: note = Artificial sequence related to HLA knockouts in cell therapy
  source 1..22: mol_type = other DNA
ggagcagagatacacctgccat

SEQ ID NO: 16144 - DNA, 22 bp, synthetic construct
  misc_feature 1..22: note = Artificial sequence related to HLA knockouts in cell therapy
  source 1..22: mol_type = other DNA
gagcagagatacacctgccatg

SEQ ID NO: 16145 - DNA, 22 bp, synthetic construct
  misc_feature 1..22: note = Artificial sequence related to HLA knockouts in cell therapy
  source 1..22: mol_type = other DNA
agcagagatacacctgccatgt

SEQ ID NO: 16146 - DNA, 22 bp, synthetic construct
  misc_feature 1..22: note = Artificial sequence related to HLA knockouts in cell therapy
  source 1..22: mol_type = other DNA
gcagagatacacctgccatgtg

SEQ ID NO: 16147 - DNA, 22 bp, synthetic construct
  misc_feature 1..22: note = Artificial sequence related to HLA knockouts in cell therapy
  source 1..22: mol_type = other DNA
cagagatacacctgccatgtgc

SEQ ID NO: 16148 - DNA, 22 bp, synthetic construct
  misc_feature 1..22: note = Artificial sequence related to HLA knockouts in cell therapy
  source 1..22: mol_type = other DNA
agagatacacctgccatgtgca

SEQ ID NO: 16149 - DNA, 22 bp, synthetic construct
  misc_feature 1..22: note = Artificial sequence related to HLA knockouts in cell therapy
  source 1..22: mol_type = other DNA
gagatacacctgccatgtgcag

SEQ ID NO: 16150 - DNA, 22 bp, synthetic construct
  misc_feature 1..22: note = Artificial sequence related to HLA knockouts in cell therapy
  source 1..22: mol_type = other DNA
agatacacctgccatgtgcagc

SEQ ID NO: 16151 - DNA, 22 bp, synthetic construct
  misc_feature 1..22: note = Artificial sequence related to HLA knockouts in cell therapy
  source 1..22: mol_type = other DNA
gatacacctgccatgtgcagca

SEQ ID NO: 16152 - DNA, 22 bp, synthetic construct
  misc_feature 1..22: note = Artificial sequence related to HLA knockouts in cell therapy
  source 1..22: mol_type = other DNA
atacacctgccatgtgcagcat

SEQ ID NO: 16153 - DNA, 22 bp, synthetic construct
  misc_feature 1..22: note = Artificial sequence related to HLA knockouts in cell therapy
  source 1..22: mol_type = other DNA
tacacctgccatgtgcagcatg

SEQ ID NO: 16154 - DNA, 22 bp, synthetic construct
  misc_feature 1..22: note = Artificial sequence related to HLA knockouts in cell therapy
  source 1..22: mol_type = other DNA
acacctgccatgtgcagcatga

SEQ ID NO: 16155 - DNA, 22 bp, synthetic construct
  misc_feature 1..22: note = Artificial sequence related to HLA knockouts in cell therapy
  source 1..22: mol_type = other DNA
cacctgccatgtgcagcatgag

SEQ ID NO: 16156 - DNA, 22 bp, synthetic construct
  misc_feature 1..22: note = Artificial sequence related to HLA knockouts in cell therapy
  source 1..22: mol_type = other DNA
acctgccatgtgcagcatgagg

SEQ ID NO: 16157 - DNA, 22 bp, synthetic construct
  misc_feature 1..22: note = Artificial sequence related to HLA knockouts in cell therapy
  source 1..22: mol_type = other DNA
ctgccatgtgcagcatgagggt

SEQ ID NO: 16158 - DNA, 22 bp, synthetic construct
  misc_feature 1..22: note = Artificial sequence related to HLA knockouts in cell therapy
  source 1..22: mol_type = other DNA
tgccatgtgcagcatgagggtt

SEQ ID NO: 16159 - DNA, 22 bp, synthetic construct
  misc_feature 1..22: note = Artificial sequence related to HLA knockouts in cell therapy
  source 1..22: mol_type = other DNA
gccatgtgcagcatgagggttt

SEQ ID NO: 16160 - DNA, 22 bp, synthetic construct
  misc_feature 1..22: note = Artificial sequence related to HLA knockouts in cell therapy
  source 1..22: mol_type = other DNA
ccatgtgcagcatgagggtttg

SEQ ID NO: 16161 - DNA, 22 bp, synthetic construct
  misc_feature 1..22: note = Artificial sequence related to HLA knockouts in cell therapy
  source 1..22: mol_type = other DNA
catgtgcagcatgagggtttgc

SEQ ID NO: 16162 - DNA, 22 bp, synthetic construct
  misc_feature 1..22: note = Artificial sequence related to HLA knockouts in cell therapy
  source 1..22: mol_type = other DNA
atgtgcagcatgagggtttgcc

SEQ ID NO: 16163 - DNA, 22 bp, synthetic construct
  misc_feature 1..22: note = Artificial sequence related to HLA knockouts in cell therapy
  source 1..22: mol_type = other DNA
tgtgcagcatgagggtttgccc

SEQ ID NO: 16164 - DNA, 22 bp, synthetic construct
  misc_feature 1..22: note = Artificial sequence related to HLA knockouts in cell therapy
  source 1..22: mol_type = other DNA
gtgcagcatgagggtttgccca

SEQ ID NO: 16165 - DNA, 22 bp, synthetic construct
  misc_feature 1..22: note = Artificial sequence related to HLA knockouts in cell therapy
  source 1..22: mol_type = other DNA
tgcagcatgagggtttgcccaa

SEQ ID NO: 16166 - DNA, 22 bp, synthetic construct
  misc_feature 1..22: note = Artificial sequence related to HLA knockouts in cell therapy
  source 1..22: mol_type = other DNA
gcagcatgagggtttgcccaag

SEQ ID NO: 16167 - DNA, 22 bp, synthetic construct
  misc_feature 1..22: note = Artificial sequence related to HLA knockouts in cell therapy
  source 1..22: mol_type = other DNA
cagcatgagggtttgcccaagc

SEQ ID NO: 16168 - DNA, 22 bp, synthetic construct
  misc_feature 1..22: note = Artificial sequence related to HLA knockouts in cell therapy
  source 1..22: mol_type = other DNA
agcatgagggtttgcccaagcc

SEQ ID NO: 16169 - DNA, 22 bp, synthetic construct
  misc_feature 1..22: note = Artificial sequence related to HLA knockouts in cell therapy
  source 1..22: mol_type = other DNA
accctgagatgggagccgtctt

SEQ ID NO: 16170 - DNA, 22 bp, synthetic construct
  misc_feature 1..22: note = Artificial sequence related to HLA knockouts in cell therapy
  source 1..22: mol_type = other DNA
tgagatgggagccgtcttccca

SEQ ID NO: 16171 - DNA, 22 bp, synthetic construct
  misc_feature 1..22: note = Artificial sequence related to HLA knockouts in cell therapy
  source 1..22: mol_type = other DNA
cccatcgtgggcatcattgctg

SEQ ID NO: 16172 - DNA, 22 bp, synthetic construct
  misc_feature 1..22: note = Artificial sequence related to HLA knockouts in cell therapy
  source 1..22: mol_type = other DNA
ccatcgtgggcatcattgctgg

SEQ ID NO: 16173 - DNA, 22 bp, synthetic construct
  misc_feature 1..22: note = Artificial sequence related to HLA knockouts in cell therapy
  source 1..22: mol_type = other DNA
catcgtgggcatcattgctggc

SEQ ID NO: 16174 - DNA, 22 bp, synthetic construct
  misc_feature 1..22: note = Artificial sequence related to HLA knockouts in cell therapy
  source 1..22: mol_type = other DNA
atcgtgggcatcattgctggcc

SEQ ID NO: 16175 - DNA, 22 bp, synthetic construct
  misc_feature 1..22: note = Artificial sequence related to HLA knockouts in cell therapy
  source 1..22: mol_type = other DNA
tcgtgggcatcattgctggcct

SEQ ID NO: 16176 - DNA, 22 bp, synthetic construct
  misc_feature 1..22: note = Artificial sequence related to HLA knockouts in cell therapy
  source 1..22: mol_type = other DNA
tgggcatcattgctggcctggt

SEQ ID NO: 16177 - DNA, 22 bp, synthetic construct
  misc_feature 1..22: note = Artificial sequence related to HLA knockouts in cell therapy
  source 1..22: mol_type = other DNA
gggcatcattgctggcctggtt

SEQ ID NO: 16178 - DNA, 22 bp, synthetic construct
  misc_feature 1..22: note = Artificial sequence related to HLA knockouts in cell therapy
  source 1..22: mol_type = other DNA
ggcatcattgctggcctggttc

SEQ ID NO: 16179 - DNA, 22 bp, synthetic construct
  misc_feature 1..22: note = Artificial sequence related to HLA knockouts in cell therapy
  source 1..22: mol_type = other DNA
gcatcattgctggcctggttct

SEQ ID NO: 16180 - DNA, 22 bp, synthetic construct
  misc_feature 1..22: note = Artificial sequence related to HLA knockouts in cell therapy
  source 1..22: mol_type = other DNA
catcattgctggcctggttctc

SEQ ID NO: 16181 - DNA, 22 bp, synthetic construct
  misc_feature 1..22: note = Artificial sequence related to HLA knockouts in cell therapy
  source 1..22: mol_type = other DNA
atcattgctggcctggttctct

SEQ ID NO: 16182 - DNA, 22 bp, synthetic construct
  misc_feature 1..22: note = Artificial sequence related to HLA knockouts in cell therapy
  source 1..22: mol_type = other DNA
tcattgctggcctggttctctt

SEQ ID NO: 16183 - DNA, 22 bp, synthetic construct
  misc_feature 1..22: note = Artificial sequence related to HLA knockouts in cell therapy
  source 1..22: mol_type = other DNA
cattgctggcctggttctcttt

SEQ ID NO: 16184 - DNA, 22 bp, synthetic construct
  misc_feature 1..22: note = Artificial sequence related to HLA knockouts in cell therapy
  source 1..22: mol_type = other DNA
attgctggcctggttctctttg

SEQ ID NO: 16185 - DNA, 22 bp, synthetic construct
  misc_feature 1..22: note = Artificial sequence related to HLA knockouts in cell therapy
  source 1..22: mol_type = other DNA
ttgctggcctggttctctttgg

SEQ ID NO: 16186 - DNA, 22 bp, synthetic construct
  misc_feature 1..22: note = Artificial sequence related to HLA knockouts in cell therapy
  source 1..22: mol_type = other DNA
tgctggcctggttctctttgga

SEQ ID NO: 16187 - DNA, 22 bp, synthetic construct
  misc_feature 1..22: note = Artificial sequence related to HLA knockouts in cell therapy
  source 1..22: mol_type = other DNA
gctggcctggttctctttggag

SEQ ID NO: 16188 - DNA, 22 bp, synthetic construct
  misc_feature 1..22: note = Artificial sequence related to HLA knockouts in cell therapy
  source 1..22: mol_type = other DNA
ctggcctggttctctttggagc

SEQ ID NO: 16189 - DNA, 22 bp, synthetic construct
  misc_feature 1..22: note = Artificial sequence related to HLA knockouts in cell therapy
  source 1..22: mol_type = other DNA
tggcctggttctctttggagct

SEQ ID NO: 16190 - DNA, 22 bp, synthetic construct
  misc_feature 1..22: note = Artificial sequence related to HLA knockouts in cell therapy
  source 1..22: mol_type = other DNA
ggcctggttctctttggagctg

SEQ ID NO: 16191 - DNA, 22 bp, synthetic construct
  misc_feature 1..22: note = Artificial sequence related to HLA knockouts in cell therapy
  source 1..22: mol_type = other DNA
gcctggttctctttggagctgt

SEQ ID NO: 16192 - DNA, 22 bp, synthetic construct
  misc_feature 1..22: note = Artificial sequence related to HLA knockouts in cell therapy
  source 1..22: mol_type = other DNA
cctggttctctttggagctgtg

SEQ ID NO: 16193 - DNA, 22 bp, synthetic construct
  misc_feature 1..22: note = Artificial sequence related to HLA knockouts in cell therapy
  source 1..22: mol_type = other DNA
ctggttctctttggagctgtga

SEQ ID NO: 16194 - DNA, 22 bp, synthetic construct
  misc_feature 1..22: note = Artificial sequence related to HLA knockouts in cell therapy
  source 1..22: mol_type = other DNA
tggttctctttggagctgtgat

SEQ ID NO: 16195 - DNA, 22 bp, synthetic construct
  misc_feature 1..22: note = Artificial sequence related to HLA knockouts in cell therapy
  source 1..22: mol_type = other DNA
ggttctctttggagctgtgatc

SEQ ID NO: 16196 - DNA, 22 bp, synthetic construct
  misc_feature 1..22: note = Artificial sequence related to HLA knockouts in cell therapy
  source 1..22: mol_type = other DNA
gttctctttggagctgtgatca

SEQ ID NO: 16197 - DNA, 22 bp, synthetic construct
  misc_feature 1..22: note = Artificial sequence related to HLA knockouts in cell therapy
  source 1..22: mol_type = other DNA
ttctctttggagctgtgatcac

SEQ ID NO: 16198 - DNA, 22 bp, synthetic construct
  misc_feature 1..22: note = Artificial sequence related to HLA knockouts in cell therapy
  source 1..22: mol_type = other DNA
tctctttggagctgtgatcact

SEQ ID NO: 16199 - DNA, 22 bp, synthetic construct
  misc_feature 1..22: note = Artificial sequence related to HLA knockouts in cell therapy
  source 1..22: mol_type = other DNA
ctctttggagctgtgatcactg

SEQ ID NO: 16200 - DNA, 22 bp, synthetic construct
  misc_feature 1..22: note = Artificial sequence related to HLA knockouts in cell therapy
  source 1..22: mol_type = other DNA
tctttggagctgtgatcactgg

SEQ ID NO: 16201 - DNA, 22 bp, synthetic construct
  misc_feature 1..22: note = Artificial sequence related to HLA knockouts in cell therapy
  source 1..22: mol_type = other DNA
ctttggagctgtgatcactgga

SEQ ID NO: 16202 - DNA, 22 bp, synthetic construct
  misc_feature 1..22: note = Artificial sequence related to HLA knockouts in cell therapy
  source 1..22: mol_type = other DNA
tttggagctgtgatcactggag

SEQ ID NO: 16203 - DNA, 22 bp, synthetic construct
  misc_feature 1..22: note = Artificial sequence related to HLA knockouts in cell therapy
  source 1..22: mol_type = other DNA
ttggagctgtgatcactggagc

SEQ ID NO: 16204 - DNA, 22 bp, synthetic construct
  misc_feature 1..22: note = Artificial sequence related to HLA knockouts in cell therapy
  source 1..22: mol_type = other DNA
tggagctgtgatcactggagct

SEQ ID NO: 16205 - DNA, 22 bp, synthetic construct
  misc_feature 1..22: note = Artificial sequence related to HLA knockouts in cell therapy
  source 1..22: mol_type = other DNA
ggagctgtgatcactggagctg

SEQ ID NO: 16206 - DNA, 22 bp, synthetic construct
  misc_feature 1..22: note = Artificial sequence related to HLA knockouts in cell therapy
  source 1..22: mol_type = other DNA
gagctgtgatcactggagctgt

SEQ ID NO: 16207 - DNA, 22 bp, synthetic construct
  misc_feature 1..22: note = Artificial sequence related to HLA knockouts in cell therapy
  source 1..22: mol_type = other DNA
agctgtgatcactggagctgtg

SEQ ID NO: 16208 - DNA, 22 bp, synthetic construct
  misc_feature 1..22: note = Artificial sequence related to HLA knockouts in cell therapy
  source 1..22: mol_type = other DNA
gctgtgatcactggagctgtgg

SEQ ID NO: 16209 - DNA, 22 bp, synthetic construct
  misc_feature 1..22: note = Artificial sequence related to HLA knockouts in cell therapy
  source 1..22: mol_type = other DNA
ctgtgatcactggagctgtggt

SEQ ID NO: 16210 - DNA, 22 bp, synthetic construct
  misc_feature 1..22: note = Artificial sequence related to HLA knockouts in cell therapy
  source 1..22: mol_type = other DNA
tgtgatcactggagctgtggtc

SEQ ID NO: 16211 - DNA, 22 bp, synthetic construct
  misc_feature 1..22: note = Artificial sequence related to HLA knockouts in cell therapy
  source 1..22: mol_type = other DNA
gtgatcactggagctgtggtcg

SEQ ID NO: 16212 - DNA, 22 bp, synthetic construct
  misc_feature 1..22: note = Artificial sequence related to HLA knockouts in cell therapy
  source 1..22: mol_type = other DNA
tgatcactggagctgtggtcgc

SEQ ID NO: 16213 - DNA, 22 bp, synthetic construct
  misc_feature 1..22: note = Artificial sequence related to HLA knockouts in cell therapy
  source 1..22: mol_type = other DNA
gatcactggagctgtggtcgct

SEQ ID NO: 16214 - DNA, 22 bp, synthetic construct
  misc_feature 1..22: note = Artificial sequence related to HLA knockouts in cell therapy
  source 1..22: mol_type = other DNA
atcactggagctgtggtcgctg

SEQ ID NO: 16215 - DNA, 22 bp, synthetic construct
  misc_feature 1..22: note = Artificial sequence related to HLA knockouts in cell therapy
  source 1..22: mol_type = other DNA
gagctgtggtcgctgctgtgat

SEQ ID NO: 16216 - DNA, 22 bp, synthetic construct
  misc_feature 1..22: note = Artificial sequence related to HLA knockouts in cell therapy
  source 1..22: mol_type = other DNA
agctgtggtcgctgctgtgatg

SEQ ID NO: 16217 - DNA, 22 bp, synthetic construct
  misc_feature 1..22: note = Artificial sequence related to HLA knockouts in cell therapy
  source 1..22: mol_type = other DNA
gctgtggtcgctgctgtgatgt

SEQ ID NO: 16218 - DNA, 22 bp, synthetic construct
  misc_feature 1..22: note = Artificial sequence related to HLA knockouts in cell therapy
  source 1..22: mol_type = other DNA
ctgtggtcgctgctgtgatgtg

SEQ ID NO: 16219 - DNA, 22 bp, synthetic construct
  misc_feature 1..22: note = Artificial sequence related to HLA knockouts in cell therapy
  source 1..22: mol_type = other DNA
tgtggtcgctgctgtgatgtgg

SEQ ID NO: 16220 - DNA, 22 bp, synthetic construct
  misc_feature 1..22: note = Artificial sequence related to HLA knockouts in cell therapy
  source 1..22: mol_type = other DNA
gtggtcgctgctgtgatgtgga

SEQ ID NO: 16221 - DNA, 22 bp, synthetic construct
  misc_feature 1..22: note = Artificial sequence related to HLA knockouts in cell therapy
  source 1..22: mol_type = other DNA
tggtcgctgctgtgatgtggag

SEQ ID NO: 16222 - DNA, 22 bp, synthetic construct
  misc_feature 1..22: note = Artificial sequence related to HLA knockouts in cell therapy
  source 1..22: mol_type = other DNA
gtcgctgctgtgatgtggagga

SEQ ID NO: 16223 - DNA, 22 bp, synthetic construct
  misc_feature 1..22: note = Artificial sequence related to HLA knockouts in cell therapy
  source 1..22: mol_type = other DNA
tcgctgctgtgatgtggaggag

SEQ ID NO: 16224 - DNA, 22 bp, synthetic construct
  misc_feature 1..22: note = Artificial sequence related to HLA knockouts in cell therapy
  source 1..22: mol_type = other DNA
gctgctgtgatgtggaggagga

SEQ ID NO: 16225 - DNA, 22 bp, synthetic construct
  misc_feature 1..22: note = Artificial sequence related to HLA knockouts in cell therapy
  source 1..22: mol_type = other DNA
ctgctgtgatgtggaggaggaa

SEQ ID NO: 16226 - DNA, 22 bp, synthetic construct
  misc_feature 1..22: note = Artificial sequence related to HLA knockouts in cell therapy
  source 1..22: mol_type = other DNA
tgctgtgatgtggaggaggaag

SEQ ID NO: 16227 - DNA, 22 bp, synthetic construct
  misc_feature 1..22: note = Artificial sequence related to HLA knockouts in cell therapy
  source 1..22: mol_type = other DNA
gctgtgatgtggaggaggaaga

SEQ ID NO: 16228 - DNA, 22 bp, synthetic construct
  misc_feature 1..22: note = Artificial sequence related to HLA knockouts in cell therapy
  source 1..22: mol_type = other DNA
ctgtgatgtggaggaggaagag

SEQ ID NO: 16229 - DNA, 22 bp, synthetic construct
  misc_feature 1..22: note = Artificial sequence related to HLA knockouts in cell therapy
  source 1..22: mol_type = other DNA
tgtgatgtggaggaggaagagc

SEQ ID NO: 16230 - DNA, 22 bp, synthetic construct
  misc_feature 1..22: note = Artificial sequence related to HLA knockouts in cell therapy
  source 1..22: mol_type = other DNA
gtgatgtggaggaggaagagct

SEQ ID NO: 16231 - DNA, 22 bp, synthetic construct
  misc_feature 1..22: note = Artificial sequence related to HLA knockouts in cell therapy
  source 1..22: mol_type = other DNA
tgatgtggaggaggaagagctc

SEQ ID NO: 16232 - DNA, 22 bp, synthetic construct
  misc_feature 1..22: note = Artificial sequence related to HLA knockouts in cell therapy
  source 1..22: mol_type = other DNA
gatgtggaggaggaagagctca

SEQ ID NO: 16233 - DNA, 22 bp, synthetic construct
  misc_feature 1..22: note = Artificial sequence related to HLA knockouts in cell therapy
  source 1..22: mol_type = other DNA
atgtggaggaggaagagctcag

SEQ ID NO: 16234 - DNA, 22 bp, synthetic construct
  misc_feature 1..22: note = Artificial sequence related to HLA knockouts in cell therapy
  source 1..22: mol_type = other DNA
tgtggaggaggaagagctcaga

SEQ ID NO: 16235 - DNA, 22 bp, synthetic construct
  misc_feature 1..22: note = Artificial sequence related to HLA knockouts in cell therapy
  source 1..22: mol_type = other DNA
gtggaggaggaagagctcagat

SEQ ID NO: 16236 - DNA, 22 bp, synthetic construct
  misc_feature 1..22: note = Artificial sequence related to HLA knockouts in cell therapy
  source 1..22: mol_type = other DNA
tggaggaggaagagctcagata

SEQ ID NO: 16237 - DNA, 22 bp, synthetic construct
  misc_feature 1..22: note = Artificial sequence related to HLA knockouts in cell therapy
  source 1..22: mol_type = other DNA
ggaggaggaagagctcagatag

SEQ ID NO: 16238 - DNA, 22 bp, synthetic construct
  misc_feature 1..22: note = Artificial sequence related to HLA knockouts in cell therapy
  source 1..22: mol_type = other DNA
gaggaggaagagctcagataga

SEQ ID NO: 16239 - DNA, 22 bp, synthetic construct
  misc_feature 1..22: note = Artificial sequence related to HLA knockouts in cell therapy
  source 1..22: mol_type = other DNA
aggaggaagagctcagatagaa

SEQ ID NO: 16240 - DNA, 22 bp, synthetic construct
  misc_feature 1..22: note = Artificial sequence related to HLA knockouts in cell therapy
  source 1..22: mol_type = other DNA
ggaggaagagctcagatagaaa

SEQ ID NO: 16241 - DNA, 22 bp, synthetic construct
  misc_feature 1..22: note = Artificial sequence related to HLA knockouts in cell therapy
  source 1..22: mol_type = other DNA
aaaggagggagctactctcagg

SEQ ID NO: 16242 - DNA, 22 bp, synthetic construct
  misc_feature 1..22: note = Artificial sequence related to HLA knockouts in cell therapy
  source 1..22: mol_type = other DNA
aaggagggagctactctcaggc

SEQ ID NO: 16243 - DNA, 22 bp, synthetic construct
  misc_feature 1..22: note = Artificial sequence related to HLA knockouts in cell therapy
  source 1..22: mol_type = other DNA
aggagggagctactctcaggct

SEQ ID NO: 16244 - DNA, 22 bp, synthetic construct
  misc_feature 1..22: note = Artificial sequence related to HLA knockouts in cell therapy
  source 1..22: mol_type = other DNA
agggagctactctcaggctgca

SEQ ID NO: 16245 - DNA, 22 bp, synthetic construct
  misc_feature 1..22: note = Artificial sequence related to HLA knockouts in cell therapy
  source 1..22: mol_type = other DNA
gggagctactctcaggctgcaa

SEQ ID NO: 16246 - DNA, 22 bp, synthetic construct
  misc_feature 1..22: note = Artificial sequence related to HLA knockouts in cell therapy
  source 1..22: mol_type = other DNA
ggagctactctcaggctgcaag

SEQ ID NO: 16247 - DNA, 22 bp, synthetic construct
  misc_feature 1..22: note = Artificial sequence related to HLA knockouts in cell therapy
  source 1..22: mol_type = other DNA
gagctactctcaggctgcaagc

SEQ ID NO: 16248 - DNA, 22 bp, synthetic construct
  misc_feature 1..22: note = Artificial sequence related to HLA knockouts in cell therapy
  source 1..22: mol_type = other DNA
agctactctcaggctgcaagca

SEQ ID NO: 16249 - DNA, 22 bp, synthetic construct
  misc_feature 1..22: note = Artificial sequence related to HLA knockouts in cell therapy
  source 1..22: mol_type = other DNA
gctactctcaggctgcaagcag

SEQ ID NO: 16250 - DNA, 22 bp, synthetic construct
  misc_feature 1..22: note = Artificial sequence related to HLA knockouts in cell therapy
  source 1..22: mol_type = other DNA
ctactctcaggctgcaagcagt

SEQ ID NO: 16251 - DNA, 22 bp, synthetic construct
  misc_feature 1..22: note = Artificial sequence related to HLA knockouts in cell therapy
  source 1..22: mol_type = other DNA
tactctcaggctgcaagcagtg

SEQ ID NO: 16252 - DNA, 22 bp, synthetic construct
  misc_feature 1..22: note = Artificial sequence related to HLA knockouts in cell therapy
  source 1..22: mol_type = other DNA
actctcaggctgcaagcagtga

SEQ ID NO: 16253 - DNA, 22 bp, synthetic construct
  misc_feature 1..22: note = Artificial sequence related to HLA knockouts in cell therapy
  source 1..22: mol_type = other DNA
ctctcaggctgcaagcagtgac

SEQ ID NO: 16254 - DNA, 22 bp, synthetic construct
  misc_feature 1..22: note = Artificial sequence related to HLA knockouts in cell therapy
  source 1..22: mol_type = other DNA
tctcaggctgcaagcagtgaca

SEQ ID NO: 16255 - DNA, 22 bp, synthetic construct
  misc_feature 1..22: note = Artificial sequence related to HLA knockouts in cell therapy
  source 1..22: mol_type = other DNA
ctcaggctgcaagcagtgacag

SEQ ID NO: 16256 - DNA, 22 bp, synthetic construct
  misc_feature 1..22: note = Artificial sequence related to HLA knockouts in cell therapy
  source 1..22: mol_type = other DNA
tcaggctgcaagcagtgacagt

SEQ ID NO: 16257 - DNA, 22 bp, synthetic construct
  misc_feature 1..22: note = Artificial sequence related to HLA knockouts in cell therapy
  source 1..22: mol_type = other DNA
caggctgcaagcagtgacagtg

SEQ ID NO: 16258 - DNA, 22 bp, synthetic construct
  misc_feature 1..22: note = Artificial sequence related to HLA knockouts in cell therapy
  source 1..22: mol_type = other DNA
aggctgcaagcagtgacagtgc

SEQ ID NO: 16259 - DNA, 22 bp, synthetic construct
  misc_feature 1..22: note = Artificial sequence related to HLA knockouts in cell therapy
  source 1..22: mol_type = other DNA
ctgcaagcagtgacagtgccca

SEQ ID NO: 16260 - DNA, 22 bp, synthetic construct
  misc_feature 1..22: note = Artificial sequence related to HLA knockouts in cell therapy
  source 1..22: mol_type = other DNA
tgcaagcagtgacagtgcccag

SEQ ID NO: 16261 - DNA, 22 bp, synthetic construct
  misc_feature 1..22: note = Artificial sequence related to HLA knockouts in cell therapy
  source 1..22: mol_type = other DNA
tgacagtgcccagggctctgat

SEQ ID NO: 16262 - DNA, 22 bp, synthetic construct
  misc_feature 1..22: note = Artificial sequence related to HLA knockouts in cell therapy
  source 1..22: mol_type = other DNA
acagtgcccagggctctgatgt

SEQ ID NO: 16263 - DNA, 22 bp, synthetic construct
  misc_feature 1..22: note = Artificial sequence related to HLA knockouts in cell therapy
  source 1..22: mol_type = other DNA
agtgcccagggctctgatgtgt

SEQ ID NO: 16264 - DNA, 22 bp, synthetic construct
  misc_feature 1..22: note = Artificial sequence related to HLA knockouts in cell therapy
  source 1..22: mol_type = other DNA
tgcccagggctctgatgtgtct

SEQ ID NO: 16265 - DNA, 22 bp, synthetic construct
  misc_feature 1..22: note = Artificial sequence related to HLA knockouts in cell therapy
  source 1..22: mol_type = other DNA
cccagggctctgatgtgtctct

SEQ ID NO: 16266 - DNA, 22 bp, synthetic construct
  misc_feature 1..22: note = Artificial sequence related to HLA knockouts in cell therapy
  source 1..22: mol_type = other DNA
ccagggctctgatgtgtctctc

SEQ ID NO: 16267 - DNA, 22 bp, synthetic construct
  misc_feature 1..22: note = Artificial sequence related to HLA knockouts in cell therapy
  source 1..22: mol_type = other DNA
cagggctctgatgtgtctctca

SEQ ID NO: 16268 - DNA, 22 bp, synthetic construct
  misc_feature 1..22: note = Artificial sequence related to HLA knockouts in cell therapy
  source 1..22: mol_type = other DNA
agggctctgatgtgtctctcac

SEQ ID NO: 16269 - DNA, 22 bp, synthetic construct
  misc_feature 1..22: note = Artificial sequence related to HLA knockouts in cell therapy
  source 1..22: mol_type = other DNA
gggctctgatgtgtctctcaca

SEQ ID NO: 16270 - DNA, 22 bp, synthetic construct
  misc_feature 1..22: note = Artificial sequence related to HLA knockouts in cell therapy
  source 1..22: mol_type = other DNA
ggctctgatgtgtctctcacag

SEQ ID NO: 16271 - DNA, 22 bp, synthetic construct
  misc_feature 1..22: note = Artificial sequence related to HLA knockouts in cell therapy
  source 1..22: mol_type = other DNA
gctctgatgtgtctctcacagc

SEQ ID NO: 16272 - DNA, 22 bp, synthetic construct
  misc_feature 1..22: note = Artificial sequence related to HLA knockouts in cell therapy
  source 1..22: mol_type = other DNA
ctctgatgtgtctctcacagct

SEQ ID NO: 16273 - DNA, 22 bp, synthetic construct
  misc_feature 1..22: note = Artificial sequence related to HLA knockouts in cell therapy
  source 1..22: mol_type = other DNA
tctgatgtgtctctcacagctt

SEQ ID NO: 16274 - DNA, 22 bp, synthetic construct
  misc_feature 1..22: note = Artificial sequence related to HLA knockouts in cell therapy
  source 1..22: mol_type = other DNA
ctgatgtgtctctcacagcttg

SEQ ID NO: 16275 - DNA, 22 bp, synthetic construct
  misc_feature 1..22: note = Artificial sequence related to HLA knockouts in cell therapy
  source 1..22: mol_type = other DNA
tgatgtgtctctcacagcttgt

SEQ ID NO: 16276 - DNA, 22 bp, synthetic construct
  misc_feature 1..22: note = Artificial sequence related to HLA knockouts in cell therapy
  source 1..22: mol_type = other DNA
gatgtgtctctcacagcttgta

SEQ ID NO: 16277 - DNA, 22 bp, synthetic construct
  misc_feature 1..22: note = Artificial sequence related to HLA knockouts in cell therapy
  source 1..22: mol_type = other DNA
atgtgtctctcacagcttgtaa

SEQ ID NO: 16278 - DNA, 22 bp, synthetic construct
  misc_feature 1..22: note = Artificial sequence related to HLA knockouts in cell therapy
  source 1..22: mol_type = other DNA
tgtgtctctcacagcttgtaaa

SEQ ID NO: 16279 - DNA, 22 bp, synthetic construct
  misc_feature 1..22: note = Artificial sequence related to HLA knockouts in cell therapy
  source 1..22: mol_type = other DNA
gtgtctctcacagcttgtaaag

SEQ ID NO: 16280 - DNA, 22 bp, synthetic construct
  misc_feature 1..22: note = Artificial sequence related to HLA knockouts in cell therapy
  source 1..22: mol_type = other DNA
tgtctctcacagcttgtaaagt

SEQ ID NO: 16281 - DNA, 22 bp, synthetic construct
  misc_feature 1..22: note = Artificial sequence related to HLA knockouts in cell therapy
  source 1..22: mol_type = other DNA
gtctctcacagcttgtaaagtg

SEQ ID NO: 16282 - DNA, 22 bp, synthetic construct
  misc_feature 1..22: note = Artificial sequence related to HLA knockouts in cell therapy
  source 1..22: mol_type = other DNA
tctctcacagcttgtaaagtgt

SEQ ID NO: 16283 - DNA, 22 bp, synthetic construct
  misc_feature 1..22: note = Artificial sequence related to HLA knockouts in cell therapy
  source 1..22: mol_type = other DNA
ctctcacagcttgtaaagtgtg

SEQ ID NO: 16284 - DNA, 22 bp, synthetic construct
  misc_feature 1..22: note = Artificial sequence related to HLA knockouts in cell therapy
  source 1..22: mol_type = other DNA
tctcacagcttgtaaagtgtga

SEQ ID NO: 16285 - DNA, 22 bp, synthetic construct
  misc_feature 1..22: note = Artificial sequence related to HLA knockouts in cell therapy
  source 1..22: mol_type = other DNA
ctcacagcttgtaaagtgtgag

SEQ ID NO: 16286 - DNA, 22 bp, synthetic construct
  misc_feature 1..22: note = Artificial sequence related to HLA knockouts in cell therapy
  source 1..22: mol_type = other DNA
tcacagcttgtaaagtgtgaga

SEQ ID NO: 16287 - DNA, 22 bp, synthetic construct
  misc_feature 1..22: note = Artificial sequence related to HLA knockouts in cell therapy
  source 1..22: mol_type = other DNA
cacagcttgtaaagtgtgagac

SEQ ID NO: 16288 - DNA, 22 bp, synthetic construct
  misc_feature 1..22: note = Artificial sequence related to HLA knockouts in cell therapy
  source 1..22: mol_type = other DNA
acagcttgtaaagtgtgagaca

SEQ ID NO: 16289 - DNA, 22 bp, synthetic construct
  misc_feature 1..22: note = Artificial sequence related to HLA knockouts in cell therapy
  source 1..22: mol_type = other DNA
cagcttgtaaagtgtgagacag

SEQ ID NO: 16290 - DNA, 22 bp, synthetic construct
  misc_feature 1..22: note = Artificial sequence related to HLA knockouts in cell therapy
  source 1..22: mol_type = other DNA
agcttgtaaagtgtgagacagc

SEQ ID NO: 16291 - DNA, 22 bp, synthetic construct
  misc_feature 1..22: note = Artificial sequence related to HLA knockouts in cell therapy
  source 1..22: mol_type = other DNA
gcttgtaaagtgtgagacagct

SEQ ID NO: 16292 - DNA, 22 bp, synthetic construct
  misc_feature 1..22: note = Artificial sequence related to HLA knockouts in cell therapy
  source 1..22: mol_type = other DNA
cttgtaaagtgtgagacagctg

SEQ ID NO: 16293 - DNA, 22 bp, synthetic construct
  misc_feature 1..22: note = Artificial sequence related to HLA knockouts in cell therapy
  source 1..22: mol_type = other DNA
ttgtaaagtgtgagacagctgc

SEQ ID NO: 16294 - DNA, 22 bp, synthetic construct
  misc_feature 1..22: note = Artificial sequence related to HLA knockouts in cell therapy
  source 1..22: mol_type = other DNA
tgtaaagtgtgagacagctgcc

SEQ ID NO: 16295 - DNA, 22 bp, synthetic construct
  misc_feature 1..22: note = Artificial sequence related to HLA knockouts in cell therapy
  source 1..22: mol_type = other DNA
gtaaagtgtgagacagctgcct

SEQ ID NO: 16296 - DNA, 22 bp, synthetic construct
  misc_feature 1..22: note = Artificial sequence related to HLA knockouts in cell therapy
  source 1..22: mol_type = other DNA
taaagtgtgagacagctgcctt

SEQ ID NO: 16297 - DNA, 22 bp, synthetic construct
  misc_feature 1..22: note = Artificial sequence related to HLA knockouts in cell therapy
  source 1..22: mol_type = other DNA
aaagtgtgagacagctgccttg

SEQ ID NO: 16298 - DNA, 22 bp, synthetic construct
  misc_feature 1..22: note = Artificial sequence related to HLA knockouts in cell therapy
  source 1..22: mol_type = other DNA
aagtgtgagacagctgccttgt

SEQ ID NO: 16299 - DNA, 22 bp, synthetic construct
  misc_feature 1..22: note = Artificial sequence related to HLA knockouts in cell therapy
  source 1..22: mol_type = other DNA
agtgtgagacagctgccttgtg

SEQ ID NO: 16300 - DNA, 22 bp, synthetic construct
  misc_feature 1..22: note = Artificial sequence related to HLA knockouts in cell therapy
  source 1..22: mol_type = other DNA
gtgtgagacagctgccttgtgt

SEQ ID NO: 16301 - DNA, 22 bp, synthetic construct
  misc_feature 1..22: note = Artificial sequence related to HLA knockouts in cell therapy
  source 1..22: mol_type = other DNA
tgtgagacagctgccttgtgtg

SEQ ID NO: 16302 - DNA, 22 bp, synthetic construct
  misc_feature 1..22: note = Artificial sequence related to HLA knockouts in cell therapy
  source 1..22: mol_type = other DNA
gtgagacagctgccttgtgtgg

SEQ ID NO: 16303 - DNA, 22 bp, synthetic construct
  misc_feature 1..22: note = Artificial sequence related to HLA knockouts in cell therapy
  source 1..22: mol_type = other DNA
tgagacagctgccttgtgtggg

SEQ ID NO: 16304 - DNA, 22 bp, synthetic construct
  misc_feature 1..22: note = Artificial sequence related to HLA knockouts in cell therapy
  source 1..22: mol_type = other DNA
gagacagctgccttgtgtggga

SEQ ID NO: 16305 - DNA, 22 bp, synthetic construct
  misc_feature 1..22: note = Artificial sequence related to HLA knockouts in cell therapy
  source 1..22: mol_type = other DNA
agacagctgccttgtgtgggac

SEQ ID NO: 16306 - DNA, 22 bp, synthetic construct
  misc_feature 1..22: note = Artificial sequence related to HLA knockouts in cell therapy
  source 1..22: mol_type = other DNA
gacagctgccttgtgtgggact

SEQ ID NO: 16307 - DNA, 22 bp, synthetic construct
  misc_feature 1..22: note = Artificial sequence related to HLA knockouts in cell therapy
  source 1..22: mol_type = other DNA
acagctgccttgtgtgggactg

SEQ ID NO: 16308 - DNA, 22 bp, synthetic construct
  misc_feature 1..22: note = Artificial sequence related to HLA knockouts in cell therapy
  source 1..22: mol_type = other DNA
cagctgccttgtgtgggactga

SEQ ID NO: 16309 - DNA, 22 bp, synthetic construct
  misc_feature 1..22: note = Artificial sequence related to HLA knockouts in cell therapy
  source 1..22: mol_type = other DNA
agctgccttgtgtgggactgag

SEQ ID NO: 16310 - DNA, 22 bp, synthetic construct
  misc_feature 1..22: note = Artificial sequence related to HLA knockouts in cell therapy
  source 1..22: mol_type = other DNA
gctgccttgtgtgggactgaga

SEQ ID NO: 16311 - DNA, 22 bp, synthetic construct
  misc_feature 1..22: note = Artificial sequence related to HLA knockouts in cell therapy
  source 1..22: mol_type = other DNA
ctgccttgtgtgggactgagag

SEQ ID NO: 16312 - DNA, 22 bp, synthetic construct
  misc_feature 1..22: note = Artificial sequence related to HLA knockouts in cell therapy
  source 1..22: mol_type = other DNA
tgccttgtgtgggactgagagg

SEQ ID NO: 16313 - DNA, 22 bp, synthetic construct
  misc_feature 1..22: note = Artificial sequence related to HLA knockouts in cell therapy
  source 1..22: mol_type = other DNA
ccttgtgtgggactgagaggca

SEQ ID NO: 16314 - DNA, 22 bp, synthetic construct
  misc_feature 1..22: note = Artificial sequence related to HLA knockouts in cell therapy
  source 1..22: mol_type = other DNA
cttgtgtgggactgagaggcaa

SEQ ID NO: 16315 - DNA, 22 bp, synthetic construct
  misc_feature 1..22: note = Artificial sequence related to HLA knockouts in cell therapy
  source 1..22: mol_type = other DNA
ttgtgtgggactgagaggcaag

SEQ ID NO: 16316 - DNA, 22 bp, synthetic construct
  misc_feature 1..22: note = Artificial sequence related to HLA knockouts in cell therapy
  source 1..22: mol_type = other DNA
tgtgtgggactgagaggcaaga

SEQ ID NO: 16317 - DNA, 22 bp, synthetic construct
  misc_feature 1..22: note = Artificial sequence related to HLA knockouts in cell therapy
  source 1..22: mol_type = other DNA
gtgtgggactgagaggcaagag

SEQ ID NO: 16318 - DNA, 22 bp, synthetic construct
  misc_feature 1..22: note = Artificial sequence related to HLA knockouts in cell therapy
  source 1..22: mol_type = other DNA
tgtgggactgagaggcaagagt

SEQ ID NO: 16319 - DNA, 22 bp, synthetic construct
  misc_feature 1..22: note = Artificial sequence related to HLA knockouts in cell therapy
  source 1..22: mol_type = other DNA
gtgggactgagaggcaagagtt

SEQ ID NO: 16320 - DNA, 22 bp, synthetic construct
  misc_feature 1..22: note = Artificial sequence related to HLA knockouts in cell therapy
  source 1..22: mol_type = other DNA
tgggactgagaggcaagagttg

SEQ ID NO: 16321 - DNA, 22 bp, synthetic construct
  misc_feature 1..22: note = Artificial sequence related to HLA knockouts in cell therapy
  source 1..22: mol_type = other DNA
gggactgagaggcaagagttgt

SEQ ID NO: 16322 - DNA, 22 bp, synthetic construct
  misc_feature 1..22: note = Artificial sequence related to HLA knockouts in cell therapy
  source 1..22: mol_type = other DNA
ggactgagaggcaagagttgtt

SEQ ID NO: 16323 - DNA, 22 bp, synthetic construct
  misc_feature 1..22: note = Artificial sequence related to HLA knockouts in cell therapy
  source 1..22: mol_type = other DNA
gactgagaggcaagagttgttc

SEQ ID NO: 16324 - DNA, 22 bp, synthetic construct
  misc_feature 1..22: note = Artificial sequence related to HLA knockouts in cell therapy
  source 1..22: mol_type = other DNA
actgagaggcaagagttgttcc

SEQ ID NO: 16325 - DNA, 22 bp, synthetic construct
  misc_feature 1..22: note = Artificial sequence related to HLA knockouts in cell therapy
  source 1..22: mol_type = other DNA
ctgagaggcaagagttgttcct

SEQ ID NO: 16326 - DNA, 22 bp, synthetic construct
  misc_feature 1..22: note = Artificial sequence related to HLA knockouts in cell therapy
  source 1..22: mol_type = other DNA
tgagaggcaagagttgttcctg

SEQ ID NO: 16327 - DNA, 22 bp, synthetic construct
  misc_feature 1..22: note = Artificial sequence related to HLA knockouts in cell therapy
  source 1..22: mol_type = other DNA
gagaggcaagagttgttcctgc

SEQ ID NO: 16328 - DNA, 22 bp, synthetic construct
  misc_feature 1..22: note = Artificial sequence related to HLA knockouts in cell therapy
  source 1..22: mol_type = other DNA
agaggcaagagttgttcctgcc

SEQ ID NO: 16329 - DNA, 22 bp, synthetic construct
  misc_feature 1..22: note = Artificial sequence related to HLA knockouts in cell therapy
  source 1..22: mol_type = other DNA
gaggcaagagttgttcctgccc

SEQ ID NO: 16330 - DNA, 22 bp, synthetic construct
  misc_feature 1..22: note = Artificial sequence related to HLA knockouts in cell therapy
  source 1..22: mol_type = other DNA
aggcaagagttgttcctgccct

SEQ ID NO: 16331 - DNA, 22 bp, synthetic construct
  misc_feature 1..22: note = Artificial sequence related to HLA knockouts in cell therapy
  source 1..22: mol_type = other DNA
ggcaagagttgttcctgccctt

SEQ ID NO: 16332 - DNA, 22 bp, synthetic construct
  misc_feature 1..22: note = Artificial sequence related to HLA knockouts in cell therapy
  source 1..22: mol_type = other DNA
gcaagagttgttcctgcccttc

SEQ ID NO: 16333 - DNA, 22 bp, synthetic construct
  misc_feature 1..22: note = Artificial sequence related to HLA knockouts in cell therapy
  source 1..22: mol_type = other DNA
caagagttgttcctgcccttcc

SEQ ID NO: 16334 - DNA, 22 bp, synthetic construct
  misc_feature 1..22: note = Artificial sequence related to HLA knockouts in cell therapy
  source 1..22: mol_type = other DNA
aagagttgttcctgcccttccc

SEQ ID NO: 16335 - DNA, 22 bp, synthetic construct
  misc_feature 1..22: note = Artificial sequence related to HLA knockouts in cell therapy
  source 1..22: mol_type = other DNA
agagttgttcctgcccttccct

SEQ ID NO: 16336 - DNA, 22 bp, synthetic construct
  misc_feature 1..22: note = Artificial sequence related to HLA knockouts in cell therapy
  source 1..22: mol_type = other DNA
gagttgttcctgcccttccctt

SEQ ID NO: 16337 - DNA, 22 bp, synthetic construct
  misc_feature 1..22: note = Artificial sequence related to HLA knockouts in cell therapy
  source 1..22: mol_type = other DNA
agttgttcctgcccttcccttt

SEQ ID NO: 16338 - DNA, 22 bp, synthetic construct
  misc_feature 1..22: note = Artificial sequence related to HLA knockouts in cell therapy
  source 1..22: mol_type = other DNA
gttgttcctgcccttccctttg

SEQ ID NO: 16339 - DNA, 22 bp, synthetic construct
  misc_feature 1..22: note = Artificial sequence related to HLA knockouts in cell therapy
  source 1..22: mol_type = other DNA
ttgttcctgcccttccctttgt

SEQ ID NO: 16340 - DNA, 22 bp, synthetic construct
  misc_feature 1..22: note = Artificial sequence related to HLA knockouts in cell therapy
  source 1..22: mol_type = other DNA
tgttcctgcccttccctttgtg

SEQ ID NO: 16341 - DNA, 22 bp, synthetic construct
  misc_feature 1..22: note = Artificial sequence related to HLA knockouts in cell therapy
  source 1..22: mol_type = other DNA
gttcctgcccttccctttgtga

SEQ ID NO: 16342 - DNA, 22 bp, synthetic construct
  misc_feature 1..22: note = Artificial sequence related to HLA knockouts in cell therapy
  source 1..22: mol_type = other DNA
ttcctgcccttccctttgtgac

SEQ ID NO: 16343 - DNA, 22 bp, synthetic construct
  misc_feature 1..22: note = Artificial sequence related to HLA knockouts in cell therapy
  source 1..22: mol_type = other DNA
tcctgcccttccctttgtgact

SEQ ID NO: 16344 - DNA, 22 bp, synthetic construct
  misc_feature 1..22: note = Artificial sequence related to HLA knockouts in cell therapy
  source 1..22: mol_type = other DNA
cctgcccttccctttgtgactt

SEQ ID NO: 16345 - DNA, 22 bp, synthetic construct
  misc_feature 1..22: note = Artificial sequence related to HLA knockouts in cell therapy
  source 1..22: mol_type = other DNA
ctgcccttccctttgtgacttg

SEQ ID NO: 16346 - DNA, 22 bp, synthetic construct
  misc_feature 1..22: note = Artificial sequence related to HLA knockouts in cell therapy
  source 1..22: mol_type = other DNA
tgcccttccctttgtgacttga

SEQ ID NO: 16347 - DNA, 22 bp, synthetic construct
  misc_feature 1..22: note = Artificial sequence related to HLA knockouts in cell therapy
  source 1..22: mol_type = other DNA
gcccttccctttgtgacttgaa

SEQ ID NO: 16348 - DNA, 22 bp, synthetic construct
  misc_feature 1..22: note = Artificial sequence related to HLA knockouts in cell therapy
  source 1..22: mol_type = other DNA
cccttccctttgtgacttgaag

SEQ ID NO: 16349 - DNA, 22 bp, synthetic construct
  misc_feature 1..22: note = Artificial sequence related to HLA knockouts in cell therapy
  source 1..22: mol_type = other DNA
ccttccctttgtgacttgaaga

SEQ ID NO: 16350 - DNA, 22 bp, synthetic construct
  misc_feature 1..22: note = Artificial sequence related to HLA knockouts in cell therapy
  source 1..22: mol_type = other DNA
cttccctttgtgacttgaagaa

SEQ ID NO: 16351 - DNA, 22 bp, synthetic construct
  misc_feature 1..22: note = Artificial sequence related to HLA knockouts in cell therapy
  source 1..22: mol_type = other DNA
ttccctttgtgacttgaagaac

SEQ ID NO: 16352 - DNA, 22 bp, synthetic construct
  misc_feature 1..22: note = Artificial sequence related to HLA knockouts in cell therapy
  source 1..22: mol_type = other DNA
tccctttgtgacttgaagaacc

SEQ ID NO: 16353 - DNA, 22 bp, synthetic construct
  misc_feature 1..22: note = Artificial sequence related to HLA knockouts in cell therapy
  source 1..22: mol_type = other DNA
ccctttgtgacttgaagaaccc

SEQ ID NO: 16354 - DNA, 22 bp, synthetic construct
  misc_feature 1..22: note = Artificial sequence related to HLA knockouts in cell therapy
  source 1..22: mol_type = other DNA
cctttgtgacttgaagaaccct

SEQ ID NO: 16355 - DNA, 22 bp, synthetic construct
  misc_feature 1..22: note = Artificial sequence related to HLA knockouts in cell therapy
  source 1..22: mol_type = other DNA
ctttgtgacttgaagaaccctg

SEQ ID NO: 16356 - DNA, 22 bp, synthetic construct
  misc_feature 1..22: note = Artificial sequence related to HLA knockouts in cell therapy
  source 1..22: mol_type = other DNA
tttgtgacttgaagaaccctga

SEQ ID NO: 16357 - DNA, 22 bp, synthetic construct
  misc_feature 1..22: note = Artificial sequence related to HLA knockouts in cell therapy
  source 1..22: mol_type = other DNA
ttgtgacttgaagaaccctgac

SEQ ID NO: 16358 - DNA, 22 bp, synthetic construct
  misc_feature 1..22: note = Artificial sequence related to HLA knockouts in cell therapy
  source 1..22: mol_type = other DNA
tgtgacttgaagaaccctgact

SEQ ID NO: 16359 - DNA, 22 bp, synthetic construct
  misc_feature 1..22: note = Artificial sequence related to HLA knockouts in cell therapy
  source 1..22: mol_type = other DNA
gtgacttgaagaaccctgactt

SEQ ID NO: 16360 - DNA, 22 bp, synthetic construct
  misc_feature 1..22: note = Artificial sequence related to HLA knockouts in cell therapy
  source 1..22: mol_type = other DNA
tgacttgaagaaccctgacttt

SEQ ID NO: 16361 - DNA, 22 bp, synthetic construct
  misc_feature 1..22: note = Artificial sequence related to HLA knockouts in cell therapy
  source 1..22: mol_type = other DNA
gacttgaagaaccctgactttg

SEQ ID NO: 16362 - DNA, 22 bp, synthetic construct
  misc_feature 1..22: note = Artificial sequence related to HLA knockouts in cell therapy
  source 1..22: mol_type = other DNA
acttgaagaaccctgactttgt

SEQ ID NO: 16363 - DNA, 22 bp, synthetic construct
  misc_feature 1..22: note = Artificial sequence related to HLA knockouts in cell therapy
  source 1..22: mol_type = other DNA
cttgaagaaccctgactttgtt

SEQ ID NO: 16364 - DNA, 22 bp, synthetic construct
  misc_feature 1..22: note = Artificial sequence related to HLA knockouts in cell therapy
  source 1..22: mol_type = other DNA
ttgaagaaccctgactttgttt

SEQ ID NO: 16365 - DNA, 22 bp, synthetic construct
  misc_feature 1..22: note = Artificial sequence related to HLA knockouts in cell therapy
  source 1..22: mol_type = other DNA
tgaagaaccctgactttgtttc

SEQ ID NO: 16366 - DNA, 22 bp, synthetic construct
  misc_feature 1..22: note = Artificial sequence related to HLA knockouts in cell therapy
  source 1..22: mol_type = other DNA
gaagaaccctgactttgtttct

SEQ ID NO: 16367 - DNA, 22 bp, synthetic construct
  misc_feature 1..22: note = Artificial sequence related to HLA knockouts in cell therapy
  source 1..22: mol_type = other DNA
aagaaccctgactttgtttctg

SEQ ID NO: 16368 - DNA, 22 bp, synthetic construct
  misc_feature 1..22: note = Artificial sequence related to HLA knockouts in cell therapy
  source 1..22: mol_type = other DNA
agaaccctgactttgtttctgc

SEQ ID NO: 16369 - DNA, 22 bp, synthetic construct
  misc_feature 1..22: note = Artificial sequence related to HLA knockouts in cell therapy
  source 1..22: mol_type = other DNA
gaaccctgactttgtttctgca

SEQ ID NO: 16370 - DNA, 22 bp, synthetic construct
  misc_feature 1..22: note = Artificial sequence related to HLA knockouts in cell therapy
  source 1..22: mol_type = other DNA
aaccctgactttgtttctgcaa

SEQ ID NO: 16371 - DNA, 22 bp, synthetic construct
  misc_feature 1..22: note = Artificial sequence related to HLA knockouts in cell therapy
  source 1..22: mol_type = other DNA
accctgactttgtttctgcaaa

SEQ ID NO: 16372 - DNA, 22 bp, synthetic construct
  misc_feature 1..22: note = Artificial sequence related to HLA knockouts in cell therapy
  source 1..22: mol_type = other DNA
ccctgactttgtttctgcaaag

SEQ ID NO: 16373 - DNA, 22 bp, synthetic construct
  misc_feature 1..22: note = Artificial sequence related to HLA knockouts in cell therapy
  source 1..22: mol_type = other DNA
cctgactttgtttctgcaaagg

SEQ ID NO: 16374 - DNA, 22 bp, synthetic construct
  misc_feature 1..22: note = Artificial sequence related to HLA knockouts in cell therapy
  source 1..22: mol_type = other DNA
ctgactttgtttctgcaaaggc

SEQ ID NO: 16375 - DNA, 22 bp, synthetic construct
  misc_feature 1..22: note = Artificial sequence related to HLA knockouts in cell therapy
  source 1..22: mol_type = other DNA
tgactttgtttctgcaaaggca

SEQ ID NO: 16376 - DNA, 22 bp, synthetic construct
  misc_feature 1..22: note = Artificial sequence related to HLA knockouts in cell therapy
  source 1..22: mol_type = other DNA
gactttgtttctgcaaaggcac

SEQ ID NO: 16377 - DNA, 22 bp, synthetic construct
  misc_feature 1..22: note = Artificial sequence related to HLA knockouts in cell therapy
  source 1..22: mol_type = other DNA
actttgtttctgcaaaggcacc

SEQ ID NO: 16378 - DNA, 22 bp, synthetic construct
  misc_feature 1..22: note = Artificial sequence related to HLA knockouts in cell therapy
  source 1..22: mol_type = other DNA
ctttgtttctgcaaaggcacct

SEQ ID NO: 16379 - DNA, 22 bp, synthetic construct
  misc_feature 1..22: note = Artificial sequence related to HLA knockouts in cell therapy
  source 1..22: mol_type = other DNA
tttgtttctgcaaaggcacctg

SEQ ID NO: 16380 - DNA, 22 bp, synthetic construct
  misc_feature 1..22: note = Artificial sequence related to HLA knockouts in cell therapy
  source 1..22: mol_type = other DNA
ttgtttctgcaaaggcacctgc

SEQ ID NO: 16381 - DNA, 22 bp, synthetic construct
  misc_feature 1..22: note = Artificial sequence related to HLA knockouts in cell therapy
  source 1..22: mol_type = other DNA
tgtttctgcaaaggcacctgca

SEQ ID NO: 16382 - DNA, 22 bp, synthetic construct
  misc_feature 1..22: note = Artificial sequence related to HLA knockouts in cell therapy
  source 1..22: mol_type = other DNA
gtttctgcaaaggcacctgcat

SEQ ID NO: 16383 - DNA, 22 bp, synthetic construct
  misc_feature 1..22: note = Artificial sequence related to HLA knockouts in cell therapy
  source 1..22: mol_type = other DNA
tttctgcaaaggcacctgcatg

SEQ ID NO: 16384 - DNA, 22 bp, synthetic construct
  misc_feature 1..22: note = Artificial sequence related to HLA knockouts in cell therapy
  source 1..22: mol_type = other DNA
ttctgcaaaggcacctgcatgt

SEQ ID NO: 16385 - DNA, 22 bp, synthetic construct
  misc_feature 1..22: note = Artificial sequence related to HLA knockouts in cell therapy
  source 1..22: mol_type = other DNA
tctgcaaaggcacctgcatgtg

SEQ ID NO: 16386 - DNA, 22 bp, synthetic construct
  misc_feature 1..22: note = Artificial sequence related to HLA knockouts in cell therapy
  source 1..22: mol_type = other DNA
ctgcaaaggcacctgcatgtgt

SEQ ID NO: 16387 - DNA, 22 bp, synthetic construct
  misc_feature 1..22: note = Artificial sequence related to HLA knockouts in cell therapy
  source 1..22: mol_type = other DNA
tgcaaaggcacctgcatgtgtc

SEQ ID NO: 16388 - DNA, 22 bp, synthetic construct
  misc_feature 1..22: note = Artificial sequence related to HLA knockouts in cell therapy
  source 1..22: mol_type = other DNA
gcaaaggcacctgcatgtgtct

SEQ ID NO: 16389 - DNA, 22 bp, synthetic construct
  misc_feature 1..22: note = Artificial sequence related to HLA knockouts in cell therapy
  source 1..22: mol_type = other DNA
caaaggcacctgcatgtgtctg

SEQ ID NO: 16390 - DNA, 22 bp, synthetic construct
  misc_feature 1..22: note = Artificial sequence related to HLA knockouts in cell therapy
  source 1..22: mol_type = other DNA
aaaggcacctgcatgtgtctgt

SEQ ID NO: 16391 - DNA, 22 bp, synthetic construct
  misc_feature 1..22: note = Artificial sequence related to HLA knockouts in cell therapy
  source 1..22: mol_type = other DNA
aaggcacctgcatgtgtctgtg

SEQ ID NO: 16392 - DNA, 22 bp, synthetic construct
  misc_feature 1..22: note = Artificial sequence related to HLA knockouts in cell therapy
  source 1..22: mol_type = other DNA
aggcacctgcatgtgtctgtgt

SEQ ID NO: 16393 - DNA, 22 bp, synthetic construct
  misc_feature 1..22: note = Artificial sequence related to HLA knockouts in cell therapy
  source 1..22: mol_type = other DNA
ggcacctgcatgtgtctgtgtt

SEQ ID NO: 16394 - DNA, 22 bp, synthetic construct
  misc_feature 1..22: note = Artificial sequence related to HLA knockouts in cell therapy
  source 1..22: mol_type = other DNA
gcacctgcatgtgtctgtgttc

SEQ ID NO: 16395 - DNA, 22 bp, synthetic construct
  misc_feature 1..22: note = Artificial sequence related to HLA knockouts in cell therapy
  source 1..22: mol_type = other DNA
cacctgcatgtgtctgtgttcg

SEQ ID NO: 16396 - DNA, 22 bp, synthetic construct
  misc_feature 1..22: note = Artificial sequence related to HLA knockouts in cell therapy
  source 1..22: mol_type = other DNA
acctgcatgtgtctgtgttcgt

SEQ ID NO: 16397 - DNA, 22 bp, synthetic construct
  misc_feature 1..22: note = Artificial sequence related to HLA knockouts in cell therapy
  source 1..22: mol_type = other DNA
cctgcatgtgtctgtgttcgtg

SEQ ID NO: 16398 - DNA, 22 bp, synthetic construct
  misc_feature 1..22: note = Artificial sequence related to HLA knockouts in cell therapy
  source 1..22: mol_type = other DNA
ctgcatgtgtctgtgttcgtgt

SEQ ID NO: 16399 - DNA, 22 bp, synthetic construct
  misc_feature 1..22: note = Artificial sequence related to HLA knockouts in cell therapy
  source 1..22: mol_type = other DNA
tgcatgtgtctgtgttcgtgta

SEQ ID NO: 16400 - DNA, 22 bp, synthetic construct
  misc_feature 1..22: note = Artificial sequence related to HLA knockouts in cell therapy
  source 1..22: mol_type = other DNA
gcatgtgtctgtgttcgtgtag

SEQ ID NO: 16401 - DNA, 22 bp, synthetic construct
  misc_feature 1..22: note = Artificial sequence related to HLA knockouts in cell therapy
  source 1..22: mol_type = other DNA
catgtgtctgtgttcgtgtagg

SEQ ID NO: 16402 - DNA, 22 bp, synthetic construct
  misc_feature 1..22: note = Artificial sequence related to HLA knockouts in cell therapy
  source 1..22: mol_type = other DNA
atgtgtctgtgttcgtgtaggc

SEQ ID NO: 16403 - DNA, 22 bp, synthetic construct
  misc_feature 1..22: note = Artificial sequence related to HLA knockouts in cell therapy
  source 1..22: mol_type = other DNA
tgtgtctgtgttcgtgtaggca

SEQ ID NO: 16404 - DNA, 22 bp, synthetic construct
  misc_feature 1..22: note = Artificial sequence related to HLA knockouts in cell therapy
  source 1..22: mol_type = other DNA
gtgtctgtgttcgtgtaggcat

SEQ ID NO: 16405 - DNA, 22 bp, synthetic construct
  misc_feature 1..22: note = Artificial sequence related to HLA knockouts in cell therapy
  source 1..22: mol_type = other DNA
tgtctgtgttcgtgtaggcata

SEQ ID NO: 16406 - DNA, 22 bp, synthetic construct
  misc_feature 1..22: note = Artificial sequence related to HLA knockouts in cell therapy
  source 1..22: mol_type = other DNA
gtctgtgttcgtgtaggcataa

SEQ ID NO: 16407 - DNA, 22 bp, synthetic construct
  misc_feature 1..22: note = Artificial sequence related to HLA knockouts in cell therapy
  source 1..22: mol_type = other DNA
tctgtgttcgtgtaggcataat

SEQ ID NO: 16408 - DNA, 22 bp, synthetic construct
  misc_feature 1..22: note = Artificial sequence related to HLA knockouts in cell therapy
  source 1..22: mol_type = other DNA
ctgtgttcgtgtaggcataatg

SEQ ID NO: 16409 - DNA, 22 bp, synthetic construct
  misc_feature 1..22: note = Artificial sequence related to HLA knockouts in cell therapy
  source 1..22: mol_type = other DNA
tgtgttcgtgtaggcataatgt

SEQ ID NO: 16410 - DNA, 22 bp, synthetic construct
  misc_feature 1..22: note = Artificial sequence related to HLA knockouts in cell therapy
  source 1..22: mol_type = other DNA
gtgttcgtgtaggcataatgtg

SEQ ID NO: 16411 - DNA, 22 bp, synthetic construct
  misc_feature 1..22: note = Artificial sequence related to HLA knockouts in cell therapy
  source 1..22: mol_type = other DNA
tgttcgtgtaggcataatgtga

SEQ ID NO: 16412 - DNA, 22 bp, synthetic construct
  misc_feature 1..22: note = Artificial sequence related to HLA knockouts in cell therapy
  source 1..22: mol_type = other DNA
gttcgtgtaggcataatgtgag

SEQ ID NO: 16413 - DNA, 22 bp, synthetic construct
  misc_feature 1..22: note = Artificial sequence related to HLA knockouts in cell therapy
  source 1..22: mol_type = other DNA
ttcgtgtaggcataatgtgagg

SEQ ID NO: 16414 - DNA, 22 bp, synthetic construct
  misc_feature 1..22: note = Artificial sequence related to HLA knockouts in cell therapy
  source 1..22: mol_type = other DNA
tcgtgtaggcataatgtgagga

SEQ ID NO: 16415 - DNA, 22 bp, synthetic construct
  misc_feature 1..22: note = Artificial sequence related to HLA knockouts in cell therapy
  source 1..22: mol_type = other DNA
cgtgtaggcataatgtgaggag

SEQ ID NO: 16416 - DNA, 22 bp, synthetic construct
  misc_feature 1..22: note = Artificial sequence related to HLA knockouts in cell therapy
  source 1..22: mol_type = other DNA
gtgtaggcataatgtgaggagg

SEQ ID NO: 16417 - DNA, 22 bp, synthetic construct
  misc_feature 1..22: note = Artificial sequence related to HLA knockouts in cell therapy
  source 1..22: mol_type = other DNA
tgtaggcataatgtgaggaggt

SEQ ID NO: 16418 - DNA, 22 bp, synthetic construct
  misc_feature 1..22: note = Artificial sequence related to HLA knockouts in cell therapy
  source 1..22: mol_type = other DNA
gtaggcataatgtgaggaggtg

SEQ ID NO: 16419 - DNA, 22 bp, synthetic construct
  misc_feature 1..22: note = Artificial sequence related to HLA knockouts in cell therapy
  source 1..22: mol_type = other DNA
taggcataatgtgaggaggtgg

SEQ ID NO: 16420 - DNA, 22 bp, synthetic construct
  misc_feature 1..22: note = Artificial sequence related to HLA knockouts in cell therapy
  source 1..22: mol_type = other DNA
aggcataatgtgaggaggtggg

SEQ ID NO: 16421 - DNA, 22 bp, synthetic construct
  misc_feature 1..22: note = Artificial sequence related to HLA knockouts in cell therapy
  source 1..22: mol_type = other DNA
cccatgtccaccatgaccctct

SEQ ID NO: 16422 - DNA, 22 bp, synthetic construct
  misc_feature 1..22: note = Artificial sequence related to HLA knockouts in cell therapy
  source 1..22: mol_type = other DNA
ccatgtccaccatgaccctctt

SEQ ID NO: 16423 - DNA, 22 bp, synthetic construct
  misc_feature 1..22: note = Artificial sequence related to HLA knockouts in cell therapy
  source 1..22: mol_type = other DNA
catgtccaccatgaccctcttc

SEQ ID NO: 16424 - DNA, 22 bp, synthetic construct
  misc_feature 1..22: note = Artificial sequence related to HLA knockouts in cell therapy
  source 1..22: mol_type = other DNA
atgtccaccatgaccctcttcc

SEQ ID NO: 16425 - DNA, 22 bp, synthetic construct
  misc_feature 1..22: note = Artificial sequence related to HLA knockouts in cell therapy
  source 1..22: mol_type = other DNA
tgtccaccatgaccctcttccc

SEQ ID NO: 16426 - DNA, 22 bp, synthetic construct
  misc_feature 1..22: note = Artificial sequence related to HLA knockouts in cell therapy
  source 1..22: mol_type = other DNA
gtccaccatgaccctcttccca

SEQ ID NO: 16427 - DNA, 22 bp, synthetic construct
  misc_feature 1..22: note = Artificial sequence related to HLA knockouts in cell therapy
  source 1..22: mol_type = other DNA
tccaccatgaccctcttcccac

SEQ ID NO: 16428 - DNA, 22 bp, synthetic construct
  misc_feature 1..22: note = Artificial sequence related to HLA knockouts in cell therapy
  source 1..22: mol_type = other DNA
accatgaccctcttcccacgct

SEQ ID NO: 16429 - DNA, 22 bp, synthetic construct
  misc_feature 1..22: note = Artificial sequence related to HLA knockouts in cell therapy
  source 1..22: mol_type = other DNA
catgaccctcttcccacgctga

SEQ ID NO: 16430 - DNA, 22 bp, synthetic construct
  misc_feature 1..22: note = Artificial sequence related to HLA knockouts in cell therapy
  source 1..22: mol_type = other DNA
atgaccctcttcccacgctgac

SEQ ID NO: 16431 - DNA, 22 bp, synthetic construct
  misc_feature 1..22: note = Artificial sequence related to HLA knockouts in cell therapy
  source 1..22: mol_type = other DNA
tcttcccacgctgacctgtgct

SEQ ID NO: 16432 - DNA, 22 bp, synthetic construct
  misc_feature 1..22: note = Artificial sequence related to HLA knockouts in cell therapy
  source 1..22: mol_type = other DNA
cccaatcatctttcctgttcca

SEQ ID NO: 16433 - DNA, 22 bp, synthetic construct
  misc_feature 1..22: note = Artificial sequence related to HLA knockouts in cell therapy
  source 1..22: mol_type = other DNA
ccaatcatctttcctgttccag

SEQ ID NO: 16434 - DNA, 22 bp, synthetic construct
  misc_feature 1..22: note = Artificial sequence related to HLA knockouts in cell therapy
  source 1..22: mol_type = other DNA
caatcatctttcctgttccaga

SEQ ID NO: 16435 - DNA, 22 bp, synthetic construct
  misc_feature 1..22: note = Artificial sequence related to HLA knockouts in cell therapy
  source 1..22: mol_type = other DNA
aatcatctttcctgttccagag

SEQ ID NO: 16436 - DNA, 22 bp, synthetic construct
  misc_feature 1..22: note = Artificial sequence related to HLA knockouts in cell therapy
  source 1..22: mol_type = other DNA
atcatctttcctgttccagaga

SEQ ID NO: 16437 - DNA, 22 bp, synthetic construct
  misc_feature 1..22: note = Artificial sequence related to HLA knockouts in cell therapy
  source 1..22: mol_type = other DNA
tcatctttcctgttccagagag

SEQ ID NO: 16438 - DNA, 22 bp, synthetic construct
  misc_feature 1..22: note = Artificial sequence related to HLA knockouts in cell therapy
  source 1..22: mol_type = other DNA
catctttcctgttccagagagg

SEQ ID NO: 16439 - DNA, 22 bp, synthetic construct
  misc_feature 1..22: note = Artificial sequence related to HLA knockouts in cell therapy
  source 1..22: mol_type = other DNA
atctttcctgttccagagaggt

SEQ ID NO: 16440 - DNA, 22 bp, synthetic construct
  misc_feature 1..22: note = Artificial sequence related to HLA knockouts in cell therapy
  source 1..22: mol_type = other DNA
tctttcctgttccagagaggtg

SEQ ID NO: 16441 - DNA, 22 bp, synthetic construct
  misc_feature 1..22: note = Artificial sequence related to HLA knockouts in cell therapy
  source 1..22: mol_type = other DNA
ctttcctgttccagagaggtgg

SEQ ID NO: 16442 - DNA, 22 bp, synthetic construct
  misc_feature 1..22: note = Artificial sequence related to HLA knockouts in cell therapy
  source 1..22: mol_type = other DNA
tttcctgttccagagaggtggg

SEQ ID NO: 16443 - DNA, 22 bp, synthetic construct
  misc_feature 1..22: note = Artificial sequence related to HLA knockouts in cell therapy
  source 1..22: mol_type = other DNA
gggctgaggtgtctccatctct

SEQ ID NO: 16444 - DNA, 22 bp, synthetic construct
  misc_feature 1..22: note = Artificial sequence related to HLA knockouts in cell therapy
  source 1..22: mol_type = other DNA
ggctgaggtgtctccatctctg

SEQ ID NO: 16445 - DNA, 22 bp, synthetic construct
  misc_feature 1..22: note = Artificial sequence related to HLA knockouts in cell therapy
  source 1..22: mol_type = other DNA
gctgaggtgtctccatctctgt

SEQ ID NO: 16446 - DNA, 22 bp, synthetic construct
  misc_feature 1..22: note = Artificial sequence related to HLA knockouts in cell therapy
  source 1..22: mol_type = other DNA
ctgaggtgtctccatctctgtc

SEQ ID NO: 16447 - DNA, 22 bp, synthetic construct
  misc_feature 1..22: note = Artificial sequence related to HLA knockouts in cell therapy
  source 1..22: mol_type = other DNA
tgaggtgtctccatctctgtct

SEQ ID NO: 16448 - DNA, 22 bp, synthetic construct
  misc_feature 1..22: note = Artificial sequence related to HLA knockouts in cell therapy
  source 1..22: mol_type = other DNA
gaggtgtctccatctctgtctc

SEQ ID NO: 16449 - DNA, 22 bp, synthetic construct
  misc_feature 1..22: note = Artificial sequence related to HLA knockouts in cell therapy
  source 1..22: mol_type = other DNA
aggtgtctccatctctgtctca

SEQ ID NO: 16450 - DNA, 22 bp, synthetic construct
  misc_feature 1..22: note = Artificial sequence related to HLA knockouts in cell therapy
  source 1..22: mol_type = other DNA
ggtgtctccatctctgtctcaa

SEQ ID NO: 16451 - DNA, 22 bp, synthetic construct
  misc_feature 1..22: note = Artificial sequence related to HLA knockouts in cell therapy
  source 1..22: mol_type = other DNA
gtgtctccatctctgtctcaac

SEQ ID NO: 16452 - DNA, 22 bp, synthetic construct
  misc_feature 1..22: note = Artificial sequence related to HLA knockouts in cell therapy
  source 1..22: mol_type = other DNA
tgtctccatctctgtctcaact

SEQ ID NO: 16453 - DNA, 22 bp, synthetic construct
  misc_feature 1..22: note = Artificial sequence related to HLA knockouts in cell therapy
  source 1..22: mol_type = other DNA
gtctccatctctgtctcaactt

SEQ ID NO: 16454 - DNA, 22 bp, synthetic construct
  misc_feature 1..22: note = Artificial sequence related to HLA knockouts in cell therapy
  source 1..22: mol_type = other DNA
tctccatctctgtctcaacttc

SEQ ID NO: 16455 - DNA, 22 bp, synthetic construct
  misc_feature 1..22: note = Artificial sequence related to HLA knockouts in cell therapy
  source 1..22: mol_type = other DNA
ctccatctctgtctcaacttca

SEQ ID NO: 16456 - DNA, 22 bp, synthetic construct
  misc_feature 1..22: note = Artificial sequence related to HLA knockouts in cell therapy
  source 1..22: mol_type = other DNA
tccatctctgtctcaacttcat

SEQ ID NO: 16457 - DNA, 22 bp, synthetic construct
  misc_feature 1..22: note = Artificial sequence related to HLA knockouts in cell therapy
  source 1..22: mol_type = other DNA
ccatctctgtctcaacttcatg

SEQ ID NO: 16458 - DNA, 22 bp, synthetic construct
  misc_feature 1..22: note = Artificial sequence related to HLA knockouts in cell therapy
  source 1..22: mol_type = other DNA
catctctgtctcaacttcatgg

SEQ ID NO: 16459 - DNA, 22 bp, synthetic construct
  misc_feature 1..22: note = Artificial sequence related to HLA knockouts in cell therapy
  source 1..22: mol_type = other DNA
atctctgtctcaacttcatggt

SEQ ID NO: 16460 - DNA, 22 bp, synthetic construct
  misc_feature 1..22: note = Artificial sequence related to HLA knockouts in cell therapy
  source 1..22: mol_type = other DNA
tctctgtctcaacttcatggtg

SEQ ID NO: 16461 - DNA, 22 bp, synthetic construct
  misc_feature 1..22: note = Artificial sequence related to HLA knockouts in cell therapy
  source 1..22: mol_type = other DNA
ctctgtctcaacttcatggtgc

SEQ ID NO: 16462 - DNA, 22 bp, synthetic construct
  misc_feature 1..22: note = Artificial sequence related to HLA knockouts in cell therapy
  source 1..22: mol_type = other DNA
tctgtctcaacttcatggtgca

SEQ ID NO: 16463 - DNA, 22 bp, synthetic construct
  misc_feature 1..22: note = Artificial sequence related to HLA knockouts in cell therapy
  source 1..22: mol_type = other DNA
ctgtctcaacttcatggtgcac

SEQ ID NO: 16464 - DNA, 22 bp, synthetic construct
  misc_feature 1..22: note = Artificial sequence related to HLA knockouts in cell therapy
  source 1..22: mol_type = other DNA
tgtctcaacttcatggtgcact

SEQ ID NO: 16465 - DNA, 22 bp, synthetic construct
  misc_feature 1..22: note = Artificial sequence related to HLA knockouts in cell therapy
  source 1..22: mol_type = other DNA
gtctcaacttcatggtgcactg

SEQ ID NO: 16466 - DNA, 22 bp, synthetic construct
  misc_feature 1..22: note = Artificial sequence related to HLA knockouts in cell therapy
  source 1..22: mol_type = other DNA
tctcaacttcatggtgcactga

SEQ ID NO: 16467 - DNA, 22 bp, synthetic construct
  misc_feature 1..22: note = Artificial sequence related to HLA knockouts in cell therapy
  source 1..22: mol_type = other DNA
ctcaacttcatggtgcactgag

SEQ ID NO: 16468 - DNA, 22 bp, synthetic construct
  misc_feature 1..22: note = Artificial sequence related to HLA knockouts in cell therapy
  source 1..22: mol_type = other DNA
tcaacttcatggtgcactgagc

SEQ ID NO: 16469 - DNA, 22 bp, synthetic construct
  misc_feature 1..22: note = Artificial sequence related to HLA knockouts in cell therapy
  source 1..22: mol_type = other DNA
caacttcatggtgcactgagct

SEQ ID NO: 16470 - DNA, 22 bp, synthetic construct
  misc_feature 1..22: note = Artificial sequence related to HLA knockouts in cell therapy
  source 1..22: mol_type = other DNA
aacttcatggtgcactgagctg

SEQ ID NO: 16471 - DNA, 22 bp, synthetic construct
  misc_feature 1..22: note = Artificial sequence related to HLA knockouts in cell therapy
  source 1..22: mol_type = other DNA
acttcatggtgcactgagctgt

SEQ ID NO: 16472 - DNA, 22 bp, synthetic construct
  misc_feature 1..22: note = Artificial sequence related to HLA knockouts in cell therapy
  source 1..22: mol_type = other DNA
cttcatggtgcactgagctgta

SEQ ID NO: 16473 - DNA, 22 bp, synthetic construct
  misc_feature 1..22: note = Artificial sequence related to HLA knockouts in cell therapy
  source 1..22: mol_type = other DNA
ttcatggtgcactgagctgtaa

SEQ ID NO: 16474 - DNA, 22 bp, synthetic construct
  misc_feature 1..22: note = Artificial sequence related to HLA knockouts in cell therapy
  source 1..22: mol_type = other DNA
tcatggtgcactgagctgtaac

SEQ ID NO: 16475 - DNA, 22 bp, synthetic construct
  misc_feature 1..22: note = Artificial sequence related to HLA knockouts in cell therapy
  source 1..22: mol_type = other DNA
catggtgcactgagctgtaact

SEQ ID NO: 16476 - DNA, 22 bp, synthetic construct
  misc_feature 1..22: note = Artificial sequence related to HLA knockouts in cell therapy
  source 1..22: mol_type = other DNA
atggtgcactgagctgtaactt

SEQ ID NO: 16477 - DNA, 22 bp, synthetic construct
  misc_feature 1..22: note = Artificial sequence related to HLA knockouts in cell therapy
  source 1..22: mol_type = other DNA
tggtgcactgagctgtaacttc

SEQ ID NO: 16478 - DNA, 22 bp, synthetic construct
  misc_feature 1..22: note = Artificial sequence related to HLA knockouts in cell therapy
  source 1..22: mol_type = other DNA
ggtgcactgagctgtaacttct

SEQ ID NO: 16479 - DNA, 22 bp, synthetic construct
  misc_feature 1..22: note = Artificial sequence related to HLA knockouts in cell therapy
  source 1..22: mol_type = other DNA
gtgcactgagctgtaacttctt

SEQ ID NO: 16480 - DNA, 22 bp, synthetic construct
  misc_feature 1..22: note = Artificial sequence related to HLA knockouts in cell therapy
  source 1..22: mol_type = other DNA
tgcactgagctgtaacttcttc

SEQ ID NO: 16481 - DNA, 22 bp, synthetic construct
  misc_feature 1..22: note = Artificial sequence related to HLA knockouts in cell therapy
  source 1..22: mol_type = other DNA
gcactgagctgtaacttcttcc

SEQ ID NO: 16482 - DNA, 22 bp, synthetic construct
  misc_feature 1..22: note = Artificial sequence related to HLA knockouts in cell therapy
  source 1..22: mol_type = other DNA
cactgagctgtaacttcttcct

SEQ ID NO: 16483 - DNA, 22 bp, synthetic construct
  misc_feature 1..22: note = Artificial sequence related to HLA knockouts in cell therapy
  source 1..22: mol_type = other DNA
actgagctgtaacttcttcctt

SEQ ID NO: 16484 - DNA, 22 bp, synthetic construct
  misc_feature 1..22: note = Artificial sequence related to HLA knockouts in cell therapy
  source 1..22: mol_type = other DNA
ctgagctgtaacttcttccttc

SEQ ID NO: 16485 - DNA, 22 bp, synthetic construct
  misc_feature 1..22: note = Artificial sequence related to HLA knockouts in cell therapy
  source 1..22: mol_type = other DNA
tgagctgtaacttcttccttcc

SEQ ID NO: 16486 - DNA, 22 bp, synthetic construct
  misc_feature 1..22: note = Artificial sequence related to HLA knockouts in cell therapy
  source 1..22: mol_type = other DNA
gagctgtaacttcttccttccc

SEQ ID NO: 16487 - DNA, 22 bp, synthetic construct
  misc_feature 1..22: note = Artificial sequence related to HLA knockouts in cell therapy
  source 1..22: mol_type = other DNA
agctgtaacttcttccttccct

SEQ ID NO: 16488 - DNA, 22 bp, synthetic construct
  misc_feature 1..22: note = Artificial sequence related to HLA knockouts in cell therapy
  source 1..22: mol_type = other DNA
gctgtaacttcttccttcccta

SEQ ID NO: 16489 - DNA, 22 bp, synthetic construct
  misc_feature 1..22: note = Artificial sequence related to HLA knockouts in cell therapy
  source 1..22: mol_type = other DNA
ctgtaacttcttccttccctat

SEQ ID NO: 16490 - DNA, 22 bp, synthetic construct
  misc_feature 1..22: note = Artificial sequence related to HLA knockouts in cell therapy
  source 1..22: mol_type = other DNA
tgtaacttcttccttccctatt

SEQ ID NO: 16491 - DNA, 22 bp, synthetic construct
  misc_feature 1..22: note = Artificial sequence related to HLA knockouts in cell therapy
  source 1..22: mol_type = other DNA
gtaacttcttccttccctatta

SEQ ID NO: 16492 - DNA, 22 bp, synthetic construct
  misc_feature 1..22: note = Artificial sequence related to HLA knockouts in cell therapy
  source 1..22: mol_type = other DNA
taacttcttccttccctattaa

SEQ ID NO: 16493 - DNA, 22 bp, synthetic construct
  misc_feature 1..22: note = Artificial sequence related to HLA knockouts in cell therapy
  source 1..22: mol_type = other DNA
aacttcttccttccctattaaa

SEQ ID NO: 16494 - DNA, 18 bp, synthetic construct
  misc_feature 1..18: note = Artificial sequence related to HLA knockouts in cell therapy
  source 1..18: mol_type = other DNA
cggtgtatggattgggga

SEQ ID NO: 16495 - DNA, 18 bp, synthetic construct
  misc_feature 1..18: note = Artificial sequence related to HLA knockouts in cell therapy
  source 1..18: mol_type = other DNA
ggtgtatggattggggag

SEQ ID NO: 16496 - DNA, 18 bp, synthetic construct
  misc_feature 1..18: note = Artificial sequence related to HLA knockouts in cell therapy
  source 1..18: mol_type = other DNA
gtgtatggattggggagt

SEQ ID NO: 16497 - DNA, 18 bp, synthetic construct
  misc_feature 1..18: note = Artificial sequence related to HLA knockouts in cell therapy
  source 1..18: mol_type = other DNA
tgtatggattggggagtc

SEQ ID NO: 16498 - DNA, 18 bp, synthetic construct
  misc_feature 1..18: note = Artificial sequence related to HLA knockouts in cell therapy
  source 1..18: mol_type = other DNA
gtatggattggggagtcc

SEQ ID NO: 16499 - DNA, 18 bp, synthetic construct
  misc_feature 1..18: note = Artificial sequence related to HLA knockouts in cell therapy
  source 1..18: mol_type = other DNA
tatggattggggagtccc

SEQ ID NO: 16500 - DNA, 18 bp, synthetic construct
  misc_feature 1..18: note = Artificial sequence related to HLA knockouts in cell therapy
  source 1..18: mol_type = other DNA
atggattggggagtccca

SEQ ID NO: 16501 - DNA, 18 bp, synthetic construct
  misc_feature 1..18: note = Artificial sequence related to HLA knockouts in cell therapy
  source 1..18: mol_type = other DNA
cttggggattccccaact

SEQ ID NO: 16502 - DNA, 18 bp, synthetic construct
  misc_feature 1..18: note = Artificial sequence related to HLA knockouts in cell therapy
  source 1..18: mol_type = other DNA
ttggggattccccaactc

SEQ ID NO: 16503 - DNA, 18 bp, synthetic construct
  misc_feature 1..18: note = Artificial sequence related to HLA knockouts in cell therapy
  source 1..18: mol_type = other DNA
attccccaactccgcagt

SEQ ID NO: 16504 - DNA, 18 bp, synthetic construct
  misc_feature 1..18: note = Artificial sequence related to HLA knockouts in cell therapy
  source 1..18: mol_type = other DNA
ttccccaactccgcagtt

SEQ ID NO: 16505 - DNA, 18 bp, synthetic construct
  misc_feature 1..18: note = Artificial sequence related to HLA knockouts in cell therapy
  source 1..18: mol_type = other DNA
tccccaactccgcagttt

SEQ ID NO: 16506 - DNA, 18 bp, synthetic construct
  misc_feature 1..18: note = Artificial sequence related to HLA knockouts in cell therapy
  source 1..18: mol_type = other DNA
aactccgcagtttctttt

SEQ ID NO: 16507 - DNA, 18 bp, synthetic construct
  misc_feature 1..18: note = Artificial sequence related to HLA knockouts in cell therapy
  source 1..18: mol_type = other DNA
actccgcagtttcttttc

SEQ ID NO: 16508 - DNA, 18 bp, synthetic construct
  misc_feature 1..18: note = Artificial sequence related to HLA knockouts in cell therapy
  source 1..18: mol_type = other DNA
ctccgcagtttcttttct

SEQ ID NO: 16509 - DNA, 18 bp, synthetic construct
  misc_feature 1..18: note = Artificial sequence related to HLA knockouts in cell therapy
  source 1..18: mol_type = other DNA
tccgcagtttcttttctc

SEQ ID NO: 16510 - DNA, 18 bp, synthetic construct
  misc_feature 1..18: note = Artificial sequence related to HLA knockouts in cell therapy
  source 1..18: mol_type = other DNA
ccgcagtttcttttctcc

SEQ ID NO: 16511 - DNA, 18 bp, synthetic construct
  misc_feature 1..18: note = Artificial sequence related to HLA knockouts in cell therapy
  source 1..18: mol_type = other DNA
cgcagtttcttttctccc

SEQ ID NO: 16512 - DNA, 18 bp, synthetic construct
  misc_feature 1..18: note = Artificial sequence related to HLA knockouts in cell therapy
  source 1..18: mol_type = other DNA
gcagtttcttttctccct

SEQ ID NO: 16513 - DNA, 18 bp, synthetic construct
  misc_feature 1..18: note = Artificial sequence related to HLA knockouts in cell therapy
  source 1..18: mol_type = other DNA
cagtttcttttctccctc

SEQ ID NO: 16514 - DNA, 18 bp, synthetic construct
  misc_feature 1..18: note = Artificial sequence related to HLA knockouts in cell therapy
  source 1..18: mol_type = other DNA
agtttcttttctccctct

SEQ ID NO: 16515 - DNA, 18 bp, synthetic construct
  misc_feature 1..18: note = Artificial sequence related to HLA knockouts in cell therapy
  source 1..18: mol_type = other DNA
gtttcttttctccctctc

SEQ ID NO: 16516 - DNA, 18 bp, synthetic construct
  misc_feature 1..18: note = Artificial sequence related to HLA knockouts in cell therapy
  source 1..18: mol_type = other DNA
tttcttttctccctctcc

SEQ ID NO: 16517 - DNA, 18 bp, synthetic construct
  misc_feature 1..18: note = Artificial sequence related to HLA knockouts in cell therapy
  source 1..18: mol_type = other DNA
ttcttttctccctctccc

SEQ ID NO: 16518 - DNA, 18 bp, synthetic construct
  misc_feature 1..18: note = Artificial sequence related to HLA knockouts in cell therapy
  source 1..18: mol_type = other DNA
tcttttctccctctccca

SEQ ID NO: 16519 - DNA, 18 bp, synthetic construct
  misc_feature 1..18: note = Artificial sequence related to HLA knockouts in cell therapy
  source 1..18: mol_type = other DNA
cttttctccctctcccaa

SEQ ID NO: 16520 - DNA, 18 bp, synthetic construct
  misc_feature 1..18: note = Artificial sequence related to HLA knockouts in cell therapy
  source 1..18: mol_type = other DNA
ttttctccctctcccaac

SEQ ID NO: 16521 - DNA, 18 bp, synthetic construct
  misc_feature 1..18: note = Artificial sequence related to HLA knockouts in cell therapy
  source 1..18: mol_type = other DNA
ggactcagattctcccca

SEQ ID NO: 16522 - DNA, 18 bp, synthetic construct
  misc_feature 1..18: note = Artificial sequence related to HLA knockouts in cell therapy
  source 1..18: mol_type = other DNA
gactcagattctccccag

SEQ ID NO: 16523 - DNA, 18 bp, synthetic construct
  misc_feature 1..18: note = Artificial sequence related to HLA knockouts in cell therapy
  source 1..18: mol_type = other DNA
actcagattctccccaga

SEQ ID NO: 16524 - DNA, 18 bp, synthetic construct
  misc_feature 1..18: note = Artificial sequence related to HLA knockouts in cell therapy
  source 1..18: mol_type = other DNA
ctcagattctccccagac

SEQ ID NO: 16525 - DNA, 18 bp, synthetic construct
  misc_feature 1..18: note = Artificial sequence related to HLA knockouts in cell therapy
  source 1..18: mol_type = other DNA
tcagattctccccagacg

SEQ ID NO: 16526 - DNA, 18 bp, synthetic construct
  misc_feature 1..18: note = Artificial sequence related to HLA knockouts in cell therapy
  source 1..18: mol_type = other DNA
agtattgggacggggaga

SEQ ID NO: 16527 - DNA, 18 bp, synthetic construct
  misc_feature 1..18: note = Artificial sequence related to HLA knockouts in cell therapy
  source 1..18: mol_type = other DNA
tattgggacggggagaca

SEQ ID NO: 16528 - DNA, 18 bp, synthetic construct
  misc_feature 1..18: note = Artificial sequence related to HLA knockouts in cell therapy
  source 1..18: mol_type = other DNA
acgcccccaaaacgcata

SEQ ID NO: 16529 - DNA, 18 bp, synthetic construct
  misc_feature 1..18: note = Artificial sequence related to HLA knockouts in cell therapy
  source 1..18: mol_type = other DNA
cgcccccaaaacgcatat

SEQ ID NO: 16530 - DNA, 18 bp, synthetic construct
  misc_feature 1..18: note = Artificial sequence related to HLA knockouts in cell therapy
  source 1..18: mol_type = other DNA
gcccccaaaacgcatatg

SEQ ID NO: 16531 - DNA, 18 bp, synthetic construct
  misc_feature 1..18: note = Artificial sequence related to HLA knockouts in cell therapy
  source 1..18: mol_type = other DNA
cccccaaaacgcatatga

SEQ ID NO: 16532 - DNA, 18 bp, synthetic construct
  misc_feature 1..18: note = Artificial sequence related to HLA knockouts in cell therapy
  source 1..18: mol_type = other DNA
ccccaaaacgcatatgac

SEQ ID NO: 16533 - DNA, 18 bp, synthetic construct
  misc_feature 1..18: note = Artificial sequence related to HLA knockouts in cell therapy
  source 1..18: mol_type = other DNA
cccaaaacgcatatgact

SEQ ID NO: 16534 - DNA, 18 bp, synthetic construct
  misc_feature 1..18: note = Artificial sequence related to HLA knockouts in cell therapy
  source 1..18: mol_type = other DNA
ccaaaacgcatatgactc

SEQ ID NO: 16535 - DNA, 18 bp, synthetic construct
  misc_feature 1..18: note = Artificial sequence related to HLA knockouts in cell therapy
  source 1..18: mol_type = other DNA
caaaacgcatatgactca

SEQ ID NO: 16536 - DNA, 18 bp, synthetic construct
  misc_feature 1..18: note = Artificial sequence related to HLA knockouts in cell therapy
  source 1..18: mol_type = other DNA
aaaacgcatatgactcac

SEQ ID NO: 16537 - DNA, 18 bp, synthetic construct
  misc_feature 1..18: note = Artificial sequence related to HLA knockouts in cell therapy
  source 1..18: mol_type = other DNA
tgcaggggatggaacctt

SEQ ID NO: 16538 - DNA, 18 bp, synthetic construct
  misc_feature 1..18: note = Artificial sequence related to HLA knockouts in cell therapy
  source 1..18: mol_type = other DNA
aggggatggaaccttcca

SEQ ID NO: 16539 - DNA, 18 bp, synthetic construct
  misc_feature 1..18: note = Artificial sequence related to HLA knockouts in cell therapy
  source 1..18: mol_type = other DNA
aagagctcagatagaaaa

SEQ ID NO: 16540 - DNA, 18 bp, synthetic construct
  misc_feature 1..18: note = Artificial sequence related to HLA knockouts in cell therapy
  source 1..18: mol_type = other DNA
agagctcagatagaaaag

SEQ ID NO: 16541 - DNA, 18 bp, synthetic construct
  misc_feature 1..18: note = Artificial sequence related to HLA knockouts in cell therapy
  source 1..18: mol_type = other DNA
gagctcagatagaaaagg

SEQ ID NO: 16542 - DNA, 18 bp, synthetic construct
  misc_feature 1..18: note = Artificial sequence related to HLA knockouts in cell therapy
  source 1..18: mol_type = other DNA
agctcagatagaaaagga

SEQ ID NO: 16543 - DNA, 18 bp, synthetic construct
  misc_feature 1..18: note = Artificial sequence related to HLA knockouts in cell therapy
  source 1..18: mol_type = other DNA
gctcagatagaaaaggag

SEQ ID NO: 16544 - DNA, 18 bp, synthetic construct
  misc_feature 1..18: note = Artificial sequence related to HLA knockouts in cell therapy
  source 1..18: mol_type = other DNA
ctcagatagaaaaggagg

SEQ ID NO: 16545 - DNA, 18 bp, synthetic construct
  misc_feature 1..18: note = Artificial sequence related to HLA knockouts in cell therapy
  source 1..18: mol_type = other DNA
tcagatagaaaaggaggg

SEQ ID NO: 16546 - DNA, 18 bp, synthetic construct
  misc_feature 1..18: note = Artificial sequence related to HLA knockouts in cell therapy
  source 1..18: mol_type = other DNA
cagatagaaaaggaggga

SEQ ID NO: 16547 - DNA, 18 bp, synthetic construct
  misc_feature 1..18: note = Artificial sequence related to HLA knockouts in cell therapy
  source 1..18: mol_type = other DNA
agatagaaaaggagggag

SEQ ID NO: 16548 - DNA, 18 bp, synthetic construct
  misc_feature 1..18: note = Artificial sequence related to HLA knockouts in cell therapy
  source 1..18: mol_type = other DNA
gatagaaaaggagggagc

SEQ ID NO: 16549 - DNA, 18 bp, synthetic construct
  misc_feature 1..18: note = Artificial sequence related to HLA knockouts in cell therapy
  source 1..18: mol_type = other DNA
atagaaaaggagggagct

SEQ ID NO: 16550 - DNA, 18 bp, synthetic construct
  misc_feature 1..18: note = Artificial sequence related to HLA knockouts in cell therapy
  source 1..18: mol_type = other DNA
tagaaaaggagggagcta

SEQ ID NO: 16551 - DNA, 18 bp, synthetic construct
  misc_feature 1..18: note = Artificial sequence related to HLA knockouts in cell therapy
  source 1..18: mol_type = other DNA
agaaaaggagggagctac

SEQ ID NO: 16552 - DNA, 18 bp, synthetic construct
  misc_feature 1..18: note = Artificial sequence related to HLA knockouts in cell therapy
  source 1..18: mol_type = other DNA
gaaaaggagggagctact

SEQ ID NO: 16553 - DNA, 18 bp, synthetic construct
  misc_feature 1..18: note = Artificial sequence related to HLA knockouts in cell therapy
  source 1..18: mol_type = other DNA
aaaaggagggagctactc

SEQ ID NO: 16554 - DNA, 18 bp, synthetic construct
  misc_feature 1..18: note = Artificial sequence related to HLA knockouts in cell therapy
  source 1..18: mol_type = other DNA
taatgtgaggaggtgggg

SEQ ID NO: 16555 - DNA, 18 bp, synthetic construct
  misc_feature 1..18: note = Artificial sequence related to HLA knockouts in cell therapy
  source 1..18: mol_type = other DNA
aatgtgaggaggtgggga

SEQ ID NO: 16556 - DNA, 18 bp, synthetic construct
  misc_feature 1..18: note = Artificial sequence related to HLA knockouts in cell therapy
  source 1..18: mol_type = other DNA
tgctccctccccaatcat

SEQ ID NO: 16557 - DNA, 18 bp, synthetic construct
  misc_feature 1..18: note = Artificial sequence related to HLA knockouts in cell therapy
  source 1..18: mol_type = other DNA
ctccctccccaatcatct

SEQ ID NO: 16558 - DNA, 18 bp, synthetic construct
  misc_feature 1..18: note = Artificial sequence related to HLA knockouts in cell therapy
  source 1..18: mol_type = other DNA
tccctccccaatcatctt

SEQ ID NO: 16559 - DNA, 18 bp, synthetic construct
  misc_feature 1..18: note = Artificial sequence related to HLA knockouts in cell therapy
  source 1..18: mol_type = other DNA
ccctccccaatcatcttt

SEQ ID NO: 16560 - DNA, 18 bp, synthetic construct
  misc_feature 1..18: note = Artificial sequence related to HLA knockouts in cell therapy
  source 1..18: mol_type = other DNA
cctccccaatcatctttc

SEQ ID NO: 16561 - DNA, 18 bp, synthetic construct
  misc_feature 1..18: note = Artificial sequence related to HLA knockouts in cell therapy
  source 1..18: mol_type = other DNA
ctccccaatcatctttcc

SEQ ID NO: 16562 - DNA, 18 bp, synthetic construct
  misc_feature 1..18: note = Artificial sequence related to HLA knockouts in cell therapy
  source 1..18: mol_type = other DNA
tccccaatcatctttcct

SEQ ID NO: 16563 - DNA, 18 bp, synthetic construct
  misc_feature 1..18: note = Artificial sequence related to HLA knockouts in cell therapy
  source 1..18: mol_type = other DNA
ccccaatcatctttcctg

SEQ ID NO: 16564 - DNA, 18 bp, synthetic construct
  misc_feature 1..18: note = Artificial sequence related to HLA knockouts in cell therapy
  source 1..18: mol_type = other DNA
cttccttccctattaaaa

SEQ ID NO: 16565 - DNA, 19 bp, synthetic construct
  misc_feature 1..19: note = Artificial sequence related to HLA knockouts in cell therapy
  source 1..19: mol_type = other DNA
gcggtgtatggattgggga

SEQ ID NO: 16566 - DNA, 19 bp, synthetic construct
  misc_feature 1..19: note = Artificial sequence related to HLA knockouts in cell therapy
  source 1..19: mol_type = other DNA
cggtgtatggattggggag

SEQ ID NO: 16567 - DNA, 19 bp, synthetic construct
  misc_feature 1..19: note = Artificial sequence related to HLA knockouts in cell therapy
  source 1..19: mol_type = other DNA
ggtgtatggattggggagt

SEQ ID NO: 16568 - DNA, 19 bp, synthetic construct
  misc_feature 1..19: note = Artificial sequence related to HLA knockouts in cell therapy
  source 1..19: mol_type = other DNA
gtgtatggattggggagtc

SEQ ID NO: 16569 - DNA, 19 bp, synthetic construct
  misc_feature 1..19: note = Artificial sequence related to HLA knockouts in cell therapy
  source 1..19: mol_type = other DNA
tgtatggattggggagtcc

SEQ ID NO: 16570 - DNA, 19 bp, synthetic construct
  misc_feature 1..19: note = Artificial sequence related to HLA knockouts in cell therapy
  source 1..19: mol_type = other DNA
gtatggattggggagtccc

SEQ ID NO: 16571 - DNA, 19 bp, synthetic construct
  misc_feature 1..19: note = Artificial sequence related to HLA knockouts in cell therapy
  source 1..19: mol_type = other DNA
tatggattggggagtccca

SEQ ID NO: 16572 - DNA, 19 bp, synthetic construct
  misc_feature 1..19: note = Artificial sequence related to HLA knockouts in cell therapy
  source 1..19: mol_type = other DNA
atggattggggagtcccag

SEQ ID NO: 16573 - DNA, 19 bp, synthetic construct
  misc_feature 1..19: note = Artificial sequence related to HLA knockouts in cell therapy
  source 1..19: mol_type = other DNA
attggggagtcccagcctt

SEQ ID NO: 16574 - DNA, 19 bp, synthetic construct
  misc_feature 1..19: note = Artificial sequence related to HLA knockouts in cell therapy
  source 1..19: mol_type = other DNA
agtcccagccttggggatt

SEQ ID NO: 16575 - DNA, 19 bp, synthetic construct
  misc_feature 1..19: note = Artificial sequence related to HLA knockouts in cell therapy
  source 1..19: mol_type = other DNA
agccttggggattccccaa

SEQ ID NO: 16576 - DNA, 19 bp, synthetic construct
  misc_feature 1..19: note = Artificial sequence related to HLA knockouts in cell therapy
  source 1..19: mol_type = other DNA
ccttggggattccccaact

SEQ ID NO: 16577 - DNA, 19 bp, synthetic construct
  misc_feature 1..19: note = Artificial sequence related to HLA knockouts in cell therapy
  source 1..19: mol_type = other DNA
cttggggattccccaactc

SEQ ID NO: 16578 - DNA, 19 bp, synthetic construct
  misc_feature 1..19: note = Artificial sequence related to HLA knockouts in cell therapy
  source 1..19: mol_type = other DNA
ttggggattccccaactcc

SEQ ID NO: 16579 - DNA, 19 bp, synthetic construct
  misc_feature 1..19: note = Artificial sequence related to HLA knockouts in cell therapy
  source 1..19: mol_type = other DNA
gattccccaactccgcagt

SEQ ID NO: 16580 - DNA, 19 bp, synthetic construct
  misc_feature 1..19: note = Artificial sequence related to HLA knockouts in cell therapy
  source 1..19: mol_type = other DNA
attccccaactccgcagtt

SEQ ID NO: 16581 - DNA, 19 bp, synthetic construct
  misc_feature 1..19: note = Artificial sequence related to HLA knockouts in cell therapy
  source 1..19: mol_type = other DNA
ttccccaactccgcagttt

SEQ ID NO: 16582 - DNA, 19 bp, synthetic construct
  misc_feature 1..19: note = Artificial sequence related to HLA knockouts in cell therapy
  source 1..19: mol_type = other DNA
tccccaactccgcagtttc

SEQ ID NO: 16583 - DNA, 19 bp, synthetic construct
  misc_feature 1..19: note = Artificial sequence related to HLA knockouts in cell therapy
  source 1..19: mol_type = other DNA
ccccaactccgcagtttct

SEQ ID NO: 16584 - DNA, 19 bp, synthetic construct
  misc_feature 1..19: note = Artificial sequence related to HLA knockouts in cell therapy
  source 1..19: mol_type = other DNA
caactccgcagtttctttt

SEQ ID NO: 16585 - DNA, 19 bp, synthetic construct
  misc_feature 1..19: note = Artificial sequence related to HLA knockouts in cell therapy
  source 1..19: mol_type = other DNA
aactccgcagtttcttttc

SEQ ID NO: 16586 - DNA, 19 bp, synthetic construct
  misc_feature 1..19: note = Artificial sequence related to HLA knockouts in cell therapy
  source 1..19: mol_type = other DNA
actccgcagtttcttttct

SEQ ID NO: 16587 - DNA, 19 bp, synthetic construct
  misc_feature 1..19: note = Artificial sequence related to HLA knockouts in cell therapy
  source 1..19: mol_type = other DNA
ctccgcagtttcttttctc

SEQ ID NO: 16588 - DNA, 19 bp, synthetic construct
  misc_feature 1..19: note = Artificial sequence related to HLA knockouts in cell therapy
  source 1..19: mol_type = other DNA
tccgcagtttcttttctcc

SEQ ID NO: 16589 - DNA, 19 bp, synthetic construct
  misc_feature 1..19: note = Artificial sequence related to HLA knockouts in cell therapy
  source 1..19: mol_type = other DNA
ccgcagtttcttttctccc

SEQ ID NO: 16590 - DNA, 19 bp, synthetic construct
  misc_feature 1..19: note = Artificial sequence related to HLA knockouts in cell therapy
  source 1..19: mol_type = other DNA
cgcagtttcttttctccct

SEQ ID NO: 16591 - DNA, 19 bp, synthetic construct
  misc_feature 1..19: note = Artificial sequence related to HLA knockouts in cell therapy
  source 1..19: mol_type = other DNA
gcagtttcttttctccctc

SEQ ID NO: 16592 - DNA, 19 bp, synthetic construct
  misc_feature 1..19: note = Artificial sequence related to HLA knockouts in cell therapy
  source 1..19: mol_type = other DNA
cagtttcttttctccctct

SEQ ID NO: 16593 - DNA, 19 bp, synthetic construct
  misc_feature 1..19: note = Artificial sequence related to HLA knockouts in cell therapy
  source 1..19: mol_type = other DNA
agtttcttttctccctctc

SEQ ID NO: 16594 - DNA, 19 bp, synthetic construct
  misc_feature 1..19: note = Artificial sequence related to HLA knockouts in cell therapy
  source 1..19: mol_type = other DNA
gtttcttttctccctctcc

SEQ ID NO: 16595 - DNA, 19 bp, synthetic construct
  misc_feature 1..19: note = Artificial sequence related to HLA knockouts in cell therapy
  source 1..19: mol_type = other DNA
tttcttttctccctctccc

SEQ ID NO: 16596 - DNA, 19 bp, synthetic construct
  misc_feature 1..19: note = Artificial sequence related to HLA knockouts in cell therapy
  source 1..19: mol_type = other DNA
ttcttttctccctctccca

SEQ ID NO: 16597 - DNA, 19 bp, synthetic construct
  misc_feature 1..19: note = Artificial sequence related to HLA knockouts in cell therapy
  source 1..19: mol_type = other DNA
tcttttctccctctcccaa

SEQ ID NO: 16598 - DNA, 19 bp, synthetic construct
  misc_feature 1..19: note = Artificial sequence related to HLA knockouts in cell therapy
  source 1..19: mol_type = other DNA
cttttctccctctcccaac

SEQ ID NO: 16599 - DNA, 19 bp, synthetic construct
  misc_feature 1..19: note = Artificial sequence related to HLA knockouts in cell therapy
  source 1..19: mol_type = other DNA
ttttctccctctcccaacc

SEQ ID NO: 16600 - DNA, 19 bp, synthetic construct
  misc_feature 1..19: note = Artificial sequence related to HLA knockouts in cell therapy
  source 1..19: mol_type = other DNA
gggactcagattctcccca

SEQ ID NO: 16601 - DNA, 19 bp, synthetic construct
  misc_feature 1..19: note = Artificial sequence related to HLA knockouts in cell therapy
  source 1..19: mol_type = other DNA
ggactcagattctccccag

SEQ ID NO: 16602 - DNA, 19 bp, synthetic construct
  misc_feature 1..19: note = Artificial sequence related to HLA knockouts in cell therapy
  source 1..19: mol_type = other DNA
gactcagattctccccaga

SEQ ID NO: 16603 - DNA, 19 bp, synthetic construct
  misc_feature 1..19: note = Artificial sequence related to HLA knockouts in cell therapy
  source 1..19: mol_type = other DNA
actcagattctccccagac

SEQ ID NO: 16604 - DNA, 19 bp, synthetic construct
  misc_feature 1..19: note = Artificial sequence related to HLA knockouts in cell therapy
  source 1..19: mol_type = other DNA
ctcagattctccccagacg

SEQ ID NO: 16605 - DNA, 19 bp, synthetic construct
  misc_feature 1..19: note = Artificial sequence related to HLA knockouts in cell therapy
  source 1..19: mol_type = other DNA
tcagattctccccagacgc

SEQ ID NO: 16606 - DNA, 19 bp, synthetic construct
  misc_feature 1..19: note = Artificial sequence related to HLA knockouts in cell therapy
  source 1..19: mol_type = other DNA
gagtattgggacggggaga

SEQ ID NO: 16607 - DNA, 19 bp, synthetic construct
  misc_feature 1..19: note = Artificial sequence related to HLA knockouts in cell therapy
  source 1..19: mol_type = other DNA
agtattgggacggggagac

SEQ ID NO: 16608 - DNA, 19 bp, synthetic construct
  misc_feature 1..19: note = Artificial sequence related to HLA knockouts in cell therapy
  source 1..19: mol_type = other DNA
gtattgggacggggagaca

SEQ ID NO: 16609 - DNA, 19 bp, synthetic construct
  misc_feature 1..19: note = Artificial sequence related to HLA knockouts in cell therapy
  source 1..19: mol_type = other DNA
tattgggacggggagacac

SEQ ID NO: 16610 - DNA, 19 bp, synthetic construct
  misc_feature 1..19: note = Artificial sequence related to HLA knockouts in cell therapy
  source 1..19: mol_type = other DNA
acggggagacacggaaagt

SEQ ID NO: 16611 - DNA, 19 bp, synthetic construct
  misc_feature 1..19: note = Artificial sequence related to HLA knockouts in cell therapy
  source 1..19: mol_type = other DNA
ggggagacacggaaagtga

SEQ ID NO: 16612 - DNA, 19 bp, synthetic construct
  misc_feature 1..19: note = Artificial sequence related to HLA knockouts in cell therapy
  source 1..19: mol_type = other DNA
tgcgcggctactacaacca

SEQ ID NO: 16613 - DNA, 19 bp, synthetic construct
  misc_feature 1..19: note = Artificial sequence related to HLA knockouts in cell therapy
  source 1..19: mol_type = other DNA
gacgcccccaaaacgcata

SEQ ID NO: 16614 - DNA, 19 bp, synthetic construct
  misc_feature 1..19: note = Artificial sequence related to HLA knockouts in cell therapy
  source 1..19: mol_type = other DNA
acgcccccaaaacgcatat

SEQ ID NO: 16615 - DNA, 19 bp, synthetic construct
  misc_feature 1..19: note = Artificial sequence related to HLA knockouts in cell therapy
  source 1..19: mol_type = other DNA
cgcccccaaaacgcatatg

SEQ ID NO: 16616 - DNA, 19 bp, synthetic construct
  misc_feature 1..19: note = Artificial sequence related to HLA knockouts in cell therapy
  source 1..19: mol_type = other DNA
gcccccaaaacgcatatga

SEQ ID NO: 16617 - DNA, 19 bp, synthetic construct
  misc_feature 1..19: note = Artificial sequence related to HLA knockouts in cell therapy
  source 1..19: mol_type = other DNA
cccccaaaacgcatatgac

SEQ ID NO: 16618 - DNA, 19 bp, synthetic construct
  misc_feature 1..19: note = Artificial sequence related to HLA knockouts in cell therapy
  source 1..19: mol_type = other DNA
ccccaaaacgcatatgact

SEQ ID NO: 16619 - DNA, 19 bp, synthetic construct
  misc_feature 1..19: note = Artificial sequence related to HLA knockouts in cell therapy
  source 1..19: mol_type = other DNA
cccaaaacgcatatgactc

SEQ ID NO: 16620 - DNA, 19 bp, synthetic construct
  misc_feature 1..19: note = Artificial sequence related to HLA knockouts in cell therapy
  source 1..19: mol_type = other DNA
ccaaaacgcatatgactca

SEQ ID NO: 16621 - DNA, 19 bp, synthetic construct
  misc_feature 1..19: note = Artificial sequence related to HLA knockouts in cell therapy
  source 1..19: mol_type = other DNA
caaaacgcatatgactcac

SEQ ID NO: 16622 - DNA, 19 bp, synthetic construct
  misc_feature 1..19: note = Artificial sequence related to HLA knockouts in cell therapy
  source 1..19: mol_type = other DNA
aaaacgcatatgactcacc

SEQ ID NO: 16623 - DNA, 19 bp, synthetic construct
  misc_feature 1..19: note = Artificial sequence related to HLA knockouts in cell therapy
  source 1..19: mol_type = other DNA
ctgcaggggatggaacctt

SEQ ID NO: 16624 - DNA, 19 bp, synthetic construct
  misc_feature 1..19: note = Artificial sequence related to HLA knockouts in cell therapy
  source 1..19: mol_type = other DNA
tgcaggggatggaaccttc

SEQ ID NO: 16625 - DNA, 19 bp, synthetic construct
  misc_feature 1..19: note = Artificial sequence related to HLA knockouts in cell therapy
  source 1..19: mol_type = other DNA
caggggatggaaccttcca

SEQ ID NO: 16626 - DNA, 19 bp, synthetic construct
  misc_feature 1..19: note = Artificial sequence related to HLA knockouts in cell therapy
  source 1..19: mol_type = other DNA
aggggatggaaccttccag

SEQ ID NO: 16627 - DNA, 19 bp, synthetic construct
  misc_feature 1..19: note = Artificial sequence related to HLA knockouts in cell therapy
  source 1..19: mol_type = other DNA
ggggatggaaccttccaga

SEQ ID NO: 16628 - DNA, 19 bp, synthetic construct
  misc_feature 1..19: note = Artificial sequence related to HLA knockouts in cell therapy
  source 1..19: mol_type = other DNA
aagcccctcaccctgagat

SEQ ID NO: 16629 - DNA, 19 bp, synthetic construct
  misc_feature 1..19: note = Artificial sequence related to HLA knockouts in cell therapy
  source 1..19: mol_type = other DNA
atccccatcgtgggcatca

SEQ ID NO: 16630 - DNA, 19 bp, synthetic construct
  misc_feature 1..19: note = Artificial sequence related to HLA knockouts in cell therapy
  source 1..19: mol_type = other DNA
tccccatcgtgggcatcat

SEQ ID NO: 16631 - DNA, 19 bp, synthetic construct
  misc_feature 1..19: note = Artificial sequence related to HLA knockouts in cell therapy
  source 1..19: mol_type = other DNA
ccccatcgtgggcatcatt

SEQ ID NO: 16632 - DNA, 19 bp, synthetic construct
  misc_feature 1..19: note = Artificial sequence related to HLA knockouts in cell therapy
  source 1..19: mol_type = other DNA
gaagagctcagatagaaaa

SEQ ID NO: 16633 - DNA, 19 bp, synthetic construct
  misc_feature 1..19: note = Artificial sequence related to HLA knockouts in cell therapy
  source 1..19: mol_type = other DNA
aagagctcagatagaaaag

SEQ ID NO: 16634 - DNA, 19 bp, synthetic construct
  misc_feature 1..19: note = Artificial sequence related to HLA knockouts in cell therapy
  source 1..19: mol_type = other DNA
agagctcagatagaaaagg

SEQ ID NO: 16635 - DNA, 19 bp, synthetic construct
  misc_feature 1..19: note = Artificial sequence related to HLA knockouts in cell therapy
  source 1..19: mol_type = other DNA
gagctcagatagaaaagga

SEQ ID NO: 16636 - DNA, 19 bp, synthetic construct
  misc_feature 1..19: note = Artificial sequence related to HLA knockouts in cell therapy
  source 1..19: mol_type = other DNA
agctcagatagaaaaggag

SEQ ID NO: 16637 - DNA, 19 bp, synthetic construct
  misc_feature 1..19: note = Artificial sequence related to HLA knockouts in cell therapy
  source 1..19: mol_type = other DNA
gctcagatagaaaaggagg

SEQ ID NO: 16638 - DNA, 19 bp, synthetic construct
  misc_feature 1..19: note = Artificial sequence related to HLA knockouts in cell therapy
  source 1..19: mol_type = other DNA
ctcagatagaaaaggaggg

SEQ ID NO: 16639 - DNA, 19 bp, synthetic construct
  misc_feature 1..19: note = Artificial sequence related to HLA knockouts in cell therapy
  source 1..19: mol_type = other DNA
tcagatagaaaaggaggga

SEQ ID NO: 16640 - DNA, 19 bp, synthetic construct
  misc_feature 1..19: note = Artificial sequence related to HLA knockouts in cell therapy
  source 1..19: mol_type = other DNA
cagatagaaaaggagggag

SEQ ID NO: 16641 - DNA, 19 bp, synthetic construct
  misc_feature 1..19: note = Artificial sequence related to HLA knockouts in cell therapy
  source 1..19: mol_type = other DNA
agatagaaaaggagggagc

SEQ ID NO: 16642 - DNA, 19 bp, synthetic construct
  misc_feature 1..19: note = Artificial sequence related to HLA knockouts in cell therapy
  source 1..19: mol_type = other DNA
gatagaaaaggagggagct

SEQ ID NO: 16643 - DNA, 19 bp, synthetic construct
  misc_feature 1..19: note = Artificial sequence related to HLA knockouts in cell therapy
  source 1..19: mol_type = other DNA
atagaaaaggagggagcta

SEQ ID NO: 16644 - DNA, 19 bp, synthetic construct
  misc_feature 1..19: note = Artificial sequence related to HLA knockouts in cell therapy
  source 1..19: mol_type = other DNA
tagaaaaggagggagctac

SEQ ID NO: 16645 - DNA, 19 bp, synthetic construct
  misc_feature 1..19: note = Artificial sequence related to HLA knockouts in cell therapy
  source 1..19: mol_type = other DNA
agaaaaggagggagctact

SEQ ID NO: 16646 - DNA, 19 bp, synthetic construct
  misc_feature 1..19: note = Artificial sequence related to HLA knockouts in cell therapy
  source 1..19: mol_type = other DNA
gaaaaggagggagctactc

SEQ ID NO: 16647 - DNA, 19 bp, synthetic construct
  misc_feature 1..19: note = Artificial sequence related to HLA knockouts in cell therapy
  source 1..19: mol_type = other DNA
aaaaggagggagctactct

SEQ ID NO: 16648 - DNA, 19 bp, synthetic construct
  misc_feature 1..19: note = Artificial sequence related to HLA knockouts in cell therapy
  source 1..19: mol_type = other DNA
ataatgtgaggaggtgggg

SEQ ID NO: 16649 - DNA, 19 bp, synthetic construct
  misc_feature 1..19: note = Artificial sequence related to HLA knockouts in cell therapy
  source 1..19: mol_type = other DNA
taatgtgaggaggtgggga

SEQ ID NO: 16650 - DNA, 19 bp, synthetic construct
  misc_feature 1..19: note = Artificial sequence related to HLA knockouts in cell therapy
  source 1..19: mol_type = other DNA
aatgtgaggaggtggggag

SEQ ID NO: 16651 - DNA, 19 bp, synthetic construct
  misc_feature 1..19: note = Artificial sequence related to HLA knockouts in cell therapy
  source 1..19: mol_type = other DNA
atgtgaggaggtggggaga

SEQ ID NO: 16652 - DNA, 19 bp, synthetic construct
  misc_feature 1..19: note = Artificial sequence related to HLA knockouts in cell therapy
  source 1..19: mol_type = other DNA
acccccatgtccaccatga

SEQ ID NO: 16653 - DNA, 19 bp, synthetic construct
  misc_feature 1..19: note = Artificial sequence related to HLA knockouts in cell therapy
  source 1..19: mol_type = other DNA
tgtgctccctccccaatca

SEQ ID NO: 16654 - DNA, 19 bp, synthetic construct
  misc_feature 1..19: note = Artificial sequence related to HLA knockouts in cell therapy
  source 1..19: mol_type = other DNA
gtgctccctccccaatcat

SEQ ID NO: 16655 - DNA, 19 bp, synthetic construct
  misc_feature 1..19: note = Artificial sequence related to HLA knockouts in cell therapy
  source 1..19: mol_type = other DNA
tgctccctccccaatcatc

SEQ ID NO: 16656 - DNA, 19 bp, synthetic construct
  misc_feature 1..19: note = Artificial sequence related to HLA knockouts in cell therapy
  source 1..19: mol_type = other DNA
gctccctccccaatcatct

SEQ ID NO: 16657 - DNA, 19 bp, synthetic construct
  misc_feature 1..19: note = Artificial sequence related to HLA knockouts in cell therapy
  source 1..19: mol_type = other DNA
ctccctccccaatcatctt

SEQ ID NO: 16658 - DNA, 19 bp, synthetic construct
  misc_feature 1..19: note = Artificial sequence related to HLA knockouts in cell therapy
  source 1..19: mol_type = other DNA
tccctccccaatcatcttt

SEQ ID NO: 16659 - DNA, 19 bp, synthetic construct
  misc_feature 1..19: note = Artificial sequence related to HLA knockouts in cell therapy
  source 1..19: mol_type = other DNA
ccctccccaatcatctttc

SEQ ID NO: 16660 - DNA, 19 bp, synthetic construct
  misc_feature 1..19: note = Artificial sequence related to HLA knockouts in cell therapy
  source 1..19: mol_type = other DNA
cctccccaatcatctttcc

SEQ ID NO: 16661 - DNA, 19 bp, synthetic construct
  misc_feature 1..19: note = Artificial sequence related to HLA knockouts in cell therapy
  source 1..19: mol_type = other DNA
ctccccaatcatctttcct

SEQ ID NO: 16662 - DNA, 19 bp, synthetic construct
  misc_feature 1..19: note = Artificial sequence related to HLA knockouts in cell therapy
  source 1..19: mol_type = other DNA
tccccaatcatctttcctg

SEQ ID NO: 16663 - DNA, 19 bp, synthetic construct
  misc_feature 1..19: note = Artificial sequence related to HLA knockouts in cell therapy
  source 1..19: mol_type = other DNA
ccccaatcatctttcctgt

SEQ ID NO: 16664 - DNA, 19 bp, synthetic construct
  misc_feature 1..19: note = Artificial sequence related to HLA knockouts in cell therapy
  source 1..19: mol_type = other DNA
tcttccttccctattaaaa

SEQ ID NO: 16665 - DNA, 20 bp, synthetic construct
  misc_feature 1..20: note = Artificial sequence related to HLA knockouts in cell therapy
  source 1..20: mol_type = other DNA
cggtgtatggattggggagt

SEQ ID NO: 16666 - DNA, 20 bp, synthetic construct
  misc_feature 1..20: note = Artificial sequence related to HLA knockouts in cell therapy
  source 1..20: mol_type = other DNA
ggtgtatggattggggagtc

SEQ ID NO: 16667 - DNA, 20 bp, synthetic construct
  misc_feature 1..20: note = Artificial sequence related to HLA knockouts in cell therapy
  source 1..20: mol_type = other DNA
gtgtatggattggggagtcc

SEQ ID NO: 16668 - DNA, 20 bp, synthetic construct
  misc_feature 1..20: note = Artificial sequence related to HLA knockouts in cell therapy
  source 1..20: mol_type = other DNA
tgtatggattggggagtccc

SEQ ID NO: 16669 - DNA, 20 bp, synthetic construct
  misc_feature 1..20: note = Artificial sequence related to HLA knockouts in cell therapy
  source 1..20: mol_type = other DNA
gtatggattggggagtccca

SEQ ID NO: 16670 - DNA, 20 bp, synthetic construct
  misc_feature 1..20: note = Artificial sequence related to HLA knockouts in cell therapy
  source 1..20: mol_type = other DNA
tatggattggggagtcccag

SEQ ID NO: 16671 - DNA, 20 bp, synthetic construct
  misc_feature 1..20: note = Artificial sequence related to HLA knockouts in cell therapy
  source 1..20: mol_type = other DNA
gattccccaactccgcagtt

SEQ ID NO: 16672 - DNA, 20 bp, synthetic construct
  misc_feature 1..20: note = Artificial sequence related to HLA knockouts in cell therapy
  source 1..20: mol_type = other DNA
attccccaactccgcagttt

SEQ ID NO: 16673 - DNA, 20 bp, synthetic construct
  misc_feature 1..20: note = Artificial sequence related to HLA knockouts in cell therapy
  source 1..20: mol_type = other DNA
ttccccaactccgcagtttc

SEQ ID NO: 16674 - DNA, 20 bp, synthetic construct
  misc_feature 1..20: note = Artificial sequence related to HLA knockouts in cell therapy
  source 1..20: mol_type = other DNA
tccccaactccgcagtttct

SEQ ID NO: 16675 - DNA, 20 bp, synthetic construct
  misc_feature 1..20: note = Artificial sequence related to HLA knockouts in cell therapy
  source 1..20: mol_type = other DNA
ccccaactccgcagtttctt

SEQ ID NO: 16676 - DNA, 20 bp, synthetic construct
  misc_feature 1..20: note = Artificial sequence related to HLA knockouts in cell therapy
  source 1..20: mol_type = other DNA
ccaactccgcagtttctttt

SEQ ID NO: 16677 - DNA, 20 bp, synthetic construct
  misc_feature 1..20: note = Artificial sequence related to HLA knockouts in cell therapy
  source 1..20: mol_type = other DNA
caactccgcagtttcttttc

SEQ ID NO: 16678 - DNA, 20 bp, synthetic construct
  misc_feature 1..20: note = Artificial sequence related to HLA knockouts in cell therapy
  source 1..20: mol_type = other DNA
aactccgcagtttcttttct

SEQ ID NO: 16679 - DNA, 20 bp, synthetic construct
  misc_feature 1..20: note = Artificial sequence related to HLA knockouts in cell therapy
  source 1..20: mol_type = other DNA
actccgcagtttcttttctc

SEQ ID NO: 16680 - DNA, 20 bp, synthetic construct
  misc_feature 1..20: note = Artificial sequence related to HLA knockouts in cell therapy
  source 1..20: mol_type = other DNA
ctccgcagtttcttttctcc

SEQ ID NO: 16681 - DNA, 20 bp, synthetic construct
  misc_feature 1..20: note = Artificial sequence related to HLA knockouts in cell therapy
  source 1..20: mol_type = other DNA
tccgcagtttcttttctccc

SEQ ID NO: 16682 - DNA, 20 bp, synthetic construct
  misc_feature 1..20: note = Artificial sequence related to HLA knockouts in cell therapy
  source 1..20: mol_type = other DNA
ccgcagtttcttttctccct

SEQ ID NO: 16683 - DNA, 20 bp, synthetic construct
  misc_feature 1..20: note = Artificial sequence related to HLA knockouts in cell therapy
  source 1..20: mol_type = other DNA
cgcagtttcttttctccctc

SEQ ID NO: 16684 - DNA, 20 bp, synthetic construct
  misc_feature 1..20: note = Artificial sequence related to HLA knockouts in cell therapy
  source 1..20: mol_type = other DNA
gcagtttcttttctccctct

SEQ ID NO: 16685 - DNA, 20 bp, synthetic construct
  misc_feature 1..20: note = Artificial sequence related to HLA knockouts in cell therapy
  source 1..20: mol_type = other DNA
cagtttcttttctccctctc

SEQ ID NO: 16686 - DNA, 20 bp, synthetic construct
  misc_feature 1..20: note = Artificial sequence related to HLA knockouts in cell therapy
  source 1..20: mol_type = other DNA
agtttcttttctccctctcc

SEQ ID NO: 16687 - DNA, 20 bp, synthetic construct
  misc_feature 1..20: note = Artificial sequence related to HLA knockouts in cell therapy
  source 1..20: mol_type = other DNA
gtttcttttctccctctccc

SEQ ID NO: 16688 - DNA, 20 bp, synthetic construct
  misc_feature 1..20: note = Artificial sequence related to HLA knockouts in cell therapy
  source 1..20: mol_type = other DNA
tttcttttctccctctccca

SEQ ID NO: 16689 - DNA, 20 bp, synthetic construct
  misc_feature 1..20: note = Artificial sequence related to HLA knockouts in cell therapy
  source 1..20: mol_type = other DNA
ttcttttctccctctcccaa

SEQ ID NO: 16690 - DNA, 20 bp, synthetic construct
  misc_feature 1..20: note = Artificial sequence related to HLA knockouts in cell therapy
  source 1..20: mol_type = other DNA
tcttttctccctctcccaac

SEQ ID NO: 16691 - DNA, 20 bp, synthetic construct
  misc_feature 1..20: note = Artificial sequence related to HLA knockouts in cell therapy
  source 1..20: mol_type = other DNA
cttttctccctctcccaacc

SEQ ID NO: 16692 - DNA, 20 bp, synthetic construct
  misc_feature 1..20: note = Artificial sequence related to HLA knockouts in cell therapy
  source 1..20: mol_type = other DNA
ttttctccctctcccaacct

SEQ ID NO: 16693 - DNA, 20 bp, synthetic construct
  misc_feature 1..20: note = Artificial sequence related to HLA knockouts in cell therapy
  source 1..20: mol_type = other DNA
ggactcagattctccccaga

SEQ ID NO: 16694 - DNA, 20 bp, synthetic construct
  misc_feature 1..20: note = Artificial sequence related to HLA knockouts in cell therapy
  source 1..20: mol_type = other DNA
gactcagattctccccagac

SEQ ID NO: 16695 - DNA, 20 bp, synthetic construct
  misc_feature 1..20: note = Artificial sequence related to HLA knockouts in cell therapy
  source 1..20: mol_type = other DNA
actcagattctccccagacg

SEQ ID NO: 16696 - DNA, 20 bp, synthetic construct
  misc_feature 1..20: note = Artificial sequence related to HLA knockouts in cell therapy
  source 1..20: mol_type = other DNA
agtattgggacggggagaca

SEQ ID NO: 16697 - DNA, 20 bp, synthetic construct
  misc_feature 1..20: note = Artificial sequence related to HLA knockouts in cell therapy
  source 1..20: mol_type = other DNA
ggggagacacggaaagtgaa

SEQ ID NO: 16698 - DNA, 20 bp, synthetic construct
  misc_feature 1..20: note = Artificial sequence related to HLA knockouts in cell therapy
  source 1..20: mol_type = other DNA
gacgcccccaaaacgcatat

SEQ ID NO: 16699 - DNA, 20 bp, synthetic construct
  misc_feature 1..20: note = Artificial sequence related to HLA knockouts in cell therapy
  source 1..20: mol_type = other DNA
acgcccccaaaacgcatatg

SEQ ID NO: 16700 - DNA, 20 bp, synthetic construct
  misc_feature 1..20: note = Artificial sequence related to HLA knockouts in cell therapy
  source 1..20: mol_type = other DNA
cgcccccaaaacgcatatga

SEQ ID NO: 16701 - DNA, 20 bp, synthetic construct
  misc_feature 1..20: note = Artificial sequence related to HLA knockouts in cell therapy
  source 1..20: mol_type = other DNA
gcccccaaaacgcatatgac

SEQ ID NO: 16702 - DNA, 20 bp, synthetic construct
  misc_feature 1..20: note = Artificial sequence related to HLA knockouts in cell therapy
  source 1..20: mol_type = other DNA
cccccaaaacgcatatgact

SEQ ID NO: 16703 - DNA, 20 bp, synthetic construct
  misc_feature 1..20: note = Artificial sequence related to HLA knockouts in cell therapy
  source 1..20: mol_type = other DNA
ccccaaaacgcatatgactc

SEQ ID NO: 16704 - DNA, 20 bp, synthetic construct
  misc_feature 1..20: note = Artificial sequence related to HLA knockouts in cell therapy
  source 1..20: mol_type = other DNA
cccaaaacgcatatgactca

SEQ ID NO: 16705 - DNA, 20 bp, synthetic construct
  misc_feature 1..20: note = Artificial sequence related to HLA knockouts in cell therapy
  source 1..20: mol_type = other DNA
ccaaaacgcatatgactcac

SEQ ID NO: 16706 - DNA, 20 bp, synthetic construct
  misc_feature 1..20: note = Artificial sequence related to HLA knockouts in cell therapy
  source 1..20: mol_type = other DNA
caaaacgcatatgactcacc

SEQ ID NO: 16707 - DNA, 20 bp, synthetic construct
  misc_feature 1..20: note = Artificial sequence related to HLA knockouts in cell therapy
  source 1..20: mol_type = other DNA
aaaacgcatatgactcacca

SEQ ID NO: 16708 - DNA, 20 bp, synthetic construct
  misc_feature 1..20: note = Artificial sequence related to HLA knockouts in cell therapy
  source 1..20: mol_type = other DNA
aggggatggaaccttccaga

SEQ ID NO: 16709 - DNA, 20 bp, synthetic construct
  misc_feature 1..20: note = Artificial sequence related to HLA knockouts in cell therapy
  source 1..20: mol_type = other DNA
ggggatggaaccttccagaa

SEQ ID NO: 16710 - DNA, 20 bp, synthetic construct
  misc_feature 1..20: note = Artificial sequence related to HLA knockouts in cell therapy
  source 1..20: mol_type = other DNA
atccccatcgtgggcatcat

SEQ ID NO: 16711 - DNA, 20 bp, synthetic construct
  misc_feature 1..20: note = Artificial sequence related to HLA knockouts in cell therapy
  source 1..20: mol_type = other DNA
tccccatcgtgggcatcatt

SEQ ID NO: 16712 - DNA, 20 bp, synthetic construct
  misc_feature 1..20: note = Artificial sequence related to HLA knockouts in cell therapy
  source 1..20: mol_type = other DNA
ggaagagctcagatagaaaa

SEQ ID NO: 16713 - DNA, 20 bp, synthetic construct
  misc_feature 1..20: note = Artificial sequence related to HLA knockouts in cell therapy
  source 1..20: mol_type = other DNA
gaagagctcagatagaaaag

SEQ ID NO: 16714 - DNA, 20 bp, synthetic construct
  misc_feature 1..20: note = Artificial sequence related to HLA knockouts in cell therapy
  source 1..20: mol_type = other DNA
aagagctcagatagaaaagg

SEQ ID NO: 16715 - DNA, 20 bp, synthetic construct
  misc_feature 1..20: note = Artificial sequence related to HLA knockouts in cell therapy
  source 1..20: mol_type = other DNA
agagctcagatagaaaagga

SEQ ID NO: 16716 - DNA, 20 bp, synthetic construct
  misc_feature 1..20: note = Artificial sequence related to HLA knockouts in cell therapy
  source 1..20: mol_type = other DNA
gagctcagatagaaaaggag

SEQ ID NO: 16717 - DNA, 20 bp, synthetic construct
  misc_feature 1..20: note = Artificial sequence related to HLA knockouts in cell therapy
  source 1..20: mol_type = other DNA
agctcagatagaaaaggagg

SEQ ID NO: 16718 - DNA, 20 bp, synthetic construct
  misc_feature 1..20: note = Artificial sequence related to HLA knockouts in cell therapy
  source 1..20: mol_type = other DNA
gctcagatagaaaaggaggg

SEQ ID NO: 16719 - DNA, 20 bp, synthetic construct
  misc_feature 1..20: note = Artificial sequence related to HLA knockouts in cell therapy
  source 1..20: mol_type = other DNA
ctcagatagaaaaggaggga

SEQ ID NO: 16720 - DNA, 20 bp, synthetic construct
  misc_feature 1..20: note = Artificial sequence related to HLA knockouts in cell therapy
  source 1..20: mol_type = other DNA
tcagatagaaaaggagggag

SEQ ID NO: 16721 - DNA, 20 bp, synthetic construct
  misc_feature 1..20: note = Artificial sequence related to HLA knockouts in cell therapy
  source 1..20: mol_type = other DNA
cagatagaaaaggagggagc

SEQ ID NO: 16722 - DNA, 20 bp, synthetic construct
  misc_feature 1..20: note = Artificial sequence related to HLA knockouts in cell therapy
  source 1..20: mol_type = other DNA
agatagaaaaggagggagct

SEQ ID NO: 16723 - DNA, 20 bp, synthetic construct
  misc_feature 1..20: note = Artificial sequence related to HLA knockouts in cell therapy
  source 1..20: mol_type = other DNA
gatagaaaaggagggagcta

SEQ ID NO: 16724 - DNA, 20 bp, synthetic construct
  misc_feature 1..20: note = Artificial sequence related to HLA knockouts in cell therapy
  source 1..20: mol_type = other DNA
atagaaaaggagggagctac

SEQ ID NO: 16725 - DNA, 20 bp, synthetic construct
  misc_feature 1..20: note = Artificial sequence related to HLA knockouts in cell therapy
  source 1..20: mol_type = other DNA
tagaaaaggagggagctact

SEQ ID NO: 16726 - DNA, 20 bp, synthetic construct
  misc_feature 1..20: note = Artificial sequence related to HLA knockouts in cell therapy
  source 1..20: mol_type = other DNA
agaaaaggagggagctactc

SEQ ID NO: 16727 - DNA, 20 bp, synthetic construct
  misc_feature 1..20: note = Artificial sequence related to HLA knockouts in cell therapy
  source 1..20: mol_type = other DNA
gaaaaggagggagctactct

SEQ ID NO: 16728 - DNA, 20 bp, synthetic construct
  misc_feature 1..20: note = Artificial sequence related to HLA knockouts in cell therapy
  source 1..20: mol_type = other DNA
aaaaggagggagctactctc

SEQ ID NO: 16729 - DNA, 20 bp, synthetic construct
  misc_feature 1..20: note = Artificial sequence related to HLA knockouts in cell therapy
  source 1..20: mol_type = other DNA
cataatgtgaggaggtgggg

SEQ ID NO: 16730 - DNA, 20 bp, synthetic construct
  misc_feature 1..20: note = Artificial sequence related to HLA knockouts in cell therapy
  source 1..20: mol_type = other DNA
ataatgtgaggaggtgggga

SEQ ID NO: 16731 - DNA, 20 bp, synthetic construct
  misc_feature 1..20: note = Artificial sequence related to HLA knockouts in cell therapy
  source 1..20: mol_type = other DNA
taatgtgaggaggtggggag

SEQ ID NO: 16732 - DNA, 20 bp, synthetic construct
  misc_feature 1..20: note = Artificial sequence related to HLA knockouts in cell therapy
  source 1..20: mol_type = other DNA
aatgtgaggaggtggggaga

SEQ ID NO: 16733 - DNA, 20 bp, synthetic construct
  misc_feature 1..20: note = Artificial sequence related to HLA knockouts in cell therapy
  source 1..20: mol_type = other DNA
tgtgctccctccccaatcat

SEQ ID NO: 16734 - DNA, 20 bp, synthetic construct
  misc_feature 1..20: note = Artificial sequence related to HLA knockouts in cell therapy
  source 1..20: mol_type = other DNA
tgctccctccccaatcatct

SEQ ID NO: 16735 - DNA, 20 bp, synthetic construct
  misc_feature 1..20: note = Artificial sequence related to HLA knockouts in cell therapy
  source 1..20: mol_type = other DNA
gctccctccccaatcatctt

SEQ ID NO: 16736 - DNA, 20 bp, synthetic construct
  misc_feature 1..20: note = Artificial sequence related to HLA knockouts in cell therapy
  source 1..20: mol_type = other DNA
ctccctccccaatcatcttt

SEQ ID NO: 16737 - DNA, 20 bp, synthetic construct
  misc_feature 1..20: note = Artificial sequence related to HLA knockouts in cell therapy
  source 1..20: mol_type = other DNA
tccctccccaatcatctttc

SEQ ID NO: 16738 - DNA, 20 bp, synthetic construct
  misc_feature 1..20: note = Artificial sequence related to HLA knockouts in cell therapy
  source 1..20: mol_type = other DNA
ccctccccaatcatctttcc

SEQ ID NO: 16739 - DNA, 20 bp, synthetic construct
  misc_feature 1..20: note = Artificial sequence related to HLA knockouts in cell therapy
  source 1..20: mol_type = other DNA
cctccccaatcatctttcct

SEQ ID NO: 16740 - DNA, 20 bp, synthetic construct
  misc_feature 1..20: note = Artificial sequence related to HLA knockouts in cell therapy
  source 1..20: mol_type = other DNA
ctccccaatcatctttcctg

SEQ ID NO: 16741 - DNA, 20 bp, synthetic construct
  misc_feature 1..20: note = Artificial sequence related to HLA knockouts in cell therapy
  source 1..20: mol_type = other DNA
tccccaatcatctttcctgt

SEQ ID NO: 16742 - DNA, 20 bp, synthetic construct
  misc_feature 1..20: note = Artificial sequence related to HLA knockouts in cell therapy
  source 1..20: mol_type = other DNA
ccccaatcatctttcctgtt

SEQ ID NO: 16743 - DNA, 21 bp, synthetic construct
  misc_feature 1..21: note = Artificial sequence related to HLA knockouts in cell therapy
  source 1..21: mol_type = other DNA
aaggcggtgtatggattgggg

SEQ ID NO: 16744 - DNA, 21 bp, synthetic construct
  misc_feature 1..21: note = Artificial sequence related to HLA knockouts in cell therapy
  source 1..21: mol_type = other DNA
aggcggtgtatggattgggga

SEQ ID NO: 16745 - DNA, 21 bp, synthetic construct
  misc_feature 1..21: note = Artificial sequence related to HLA knockouts in cell therapy
  source 1..21: mol_type = other DNA
gcggtgtatggattggggagt

SEQ ID NO: 16746 - DNA, 21 bp, synthetic construct
  misc_feature 1..21: note = Artificial sequence related to HLA knockouts in cell therapy
  source 1..21: mol_type = other DNA
cggtgtatggattggggagtc

SEQ ID NO: 16747 - DNA, 21 bp, synthetic construct
  misc_feature 1..21: note = Artificial sequence related to HLA knockouts in cell therapy
  source 1..21: mol_type = other DNA
ggtgtatggattggggagtcc

SEQ ID NO: 16748 - DNA, 21 bp, synthetic construct
  misc_feature 1..21: note = Artificial sequence related to HLA knockouts in cell therapy
  source 1..21: mol_type = other DNA
gtgtatggattggggagtccc

SEQ ID NO: 16749 - DNA, 21 bp, synthetic construct
  misc_feature 1..21: note = Artificial sequence related to HLA knockouts in cell therapy
  source 1..21: mol_type = other DNA
tgtatggattggggagtccca

SEQ ID NO: 16750 - DNA, 21 bp, synthetic construct
  misc_feature 1..21: note = Artificial sequence related to HLA knockouts in cell therapy
  source 1..21: mol_type = other DNA
gtatggattggggagtcccag

SEQ ID NO: 16751 - DNA, 21 bp, synthetic construct
  misc_feature 1..21: note = Artificial sequence related to HLA knockouts in cell therapy
  source 1..21: mol_type = other DNA
tatggattggggagtcccagc

SEQ ID NO: 16752 - DNA, 21 bp, synthetic construct
  misc_feature 1..21: note = Artificial sequence related to HLA knockouts in cell therapy
  source 1..21: mol_type = other DNA
agccttggggattccccaact

SEQ ID NO: 16753 - DNA, 21 bp, synthetic construct
  misc_feature 1..21: note = Artificial sequence related to HLA knockouts in cell therapy
  source 1..21: mol_type = other DNA
ggattccccaactccgcagtt

SEQ ID NO: 16754 - DNA, 21 bp, synthetic construct
  misc_feature 1..21: note = Artificial sequence related to HLA knockouts in cell therapy
  source 1..21: mol_type = other DNA
gattccccaactccgcagttt

SEQ ID NO: 16755 - DNA, 21 bp, synthetic construct
  misc_feature 1..21: note = Artificial sequence related to HLA knockouts in cell therapy
  source 1..21: mol_type = other DNA
attccccaactccgcagtttc

SEQ ID NO: 16756 - DNA, 21 bp, synthetic construct
  misc_feature 1..21: note = Artificial sequence related to HLA knockouts in cell therapy
  source 1..21: mol_type = other DNA
ttccccaactccgcagtttct

SEQ ID NO: 16757 - DNA, 21 bp, synthetic construct
  misc_feature 1..21: note = Artificial sequence related to HLA knockouts in cell therapy
  source 1..21: mol_type = other DNA
tccccaactccgcagtttctt

SEQ ID NO: 16758 - DNA, 21 bp, synthetic construct
  misc_feature 1..21: note = Artificial sequence related to HLA knockouts in cell therapy
  source 1..21: mol_type = other DNA
ccccaactccgcagtttcttt

SEQ ID NO: 16759 - DNA, 21 bp, synthetic construct
  misc_feature 1..21: note = Artificial sequence related to HLA knockouts in cell therapy
  source 1..21: mol_type = other DNA
cccaactccgcagtttctttt

SEQ ID NO: 16760 - DNA, 21 bp, synthetic construct
  misc_feature 1..21: note = Artificial sequence related to HLA knockouts in cell therapy
  source 1..21: mol_type = other DNA
ccaactccgcagtttcttttc

SEQ ID NO: 16761 - DNA, 21 bp, synthetic construct
  misc_feature 1..21: note = Artificial sequence related to HLA knockouts in cell therapy
  source 1..21: mol_type = other DNA
caactccgcagtttcttttct

SEQ ID NO: 16762 - DNA, 21 bp, synthetic construct
  misc_feature 1..21: note = Artificial sequence related to HLA knockouts in cell therapy
  source 1..21: mol_type = other DNA
aactccgcagtttcttttctc

SEQ ID NO: 16763 - DNA, 21 bp, synthetic construct
  misc_feature 1..21: note = Artificial sequence related to HLA knockouts in cell therapy
  source 1..21: mol_type = other DNA
actccgcagtttcttttctcc

SEQ ID NO: 16764 - DNA, 21 bp, synthetic construct
  misc_feature 1..21: note = Artificial sequence related to HLA knockouts in cell therapy
  source 1..21: mol_type = other DNA
ctccgcagtttcttttctccc

SEQ ID NO: 16765 - DNA, 21 bp, synthetic construct
  misc_feature 1..21: note = Artificial sequence related to HLA knockouts in cell therapy
  source 1..21: mol_type = other DNA
tccgcagtttcttttctccct

SEQ ID NO: 16766 - DNA, 21 bp, synthetic construct
  misc_feature 1..21: note = Artificial sequence related to HLA knockouts in cell therapy
  source 1..21: mol_type = other DNA
ccgcagtttcttttctccctc

SEQ ID NO: 16767 - DNA, 21 bp, synthetic construct
  misc_feature 1..21: note = Artificial sequence related to HLA knockouts in cell therapy
  source 1..21: mol_type = other DNA
cgcagtttcttttctccctct

SEQ ID NO: 16768 - DNA, 21 bp, synthetic construct
  misc_feature 1..21: note = Artificial sequence related to HLA knockouts in cell therapy
  source 1..21: mol_type = other DNA
gcagtttcttttctccctctc

SEQ ID NO: 16769 - DNA, 21 bp, synthetic construct
  misc_feature 1..21: note = Artificial sequence related to HLA knockouts in cell therapy
  source 1..21: mol_type = other DNA
cagtttcttttctccctctcc

SEQ ID NO: 16770 - DNA, 21 bp, synthetic construct
  misc_feature 1..21: note = Artificial sequence related to HLA knockouts in cell therapy
  source 1..21: mol_type = other DNA
agtttcttttctccctctccc

SEQ ID NO: 16771 - DNA, 21 bp, synthetic construct
  misc_feature 1..21: note = Artificial sequence related to HLA knockouts in cell therapy
  source 1..21: mol_type = other DNA
gtttcttttctccctctccca

SEQ ID NO: 16772 - DNA, 21 bp, synthetic construct
  misc_feature 1..21: note = Artificial sequence related to HLA knockouts in cell therapy
  source 1..21: mol_type = other DNA
tttcttttctccctctcccaa

SEQ ID NO: 16773 - DNA, 21 bp, synthetic construct
  misc_feature 1..21: note = Artificial sequence related to HLA knockouts in cell therapy
  source 1..21: mol_type = other DNA
ttcttttctccctctcccaac

SEQ ID NO: 16774 - DNA, 21 bp, synthetic construct
  misc_feature 1..21: note = Artificial sequence related to HLA knockouts in cell therapy
  source 1..21: mol_type = other DNA
tcttttctccctctcccaacc

SEQ ID NO: 16775 - DNA, 21 bp, synthetic construct
  misc_feature 1..21: note = Artificial sequence related to HLA knockouts in cell therapy
  source 1..21: mol_type = other DNA
cttttctccctctcccaacct

SEQ ID NO: 16776 - DNA, 21 bp, synthetic construct
  misc_feature 1..21: note = Artificial sequence related to HLA knockouts in cell therapy
  source 1..21: mol_type = other DNA
ttttctccctctcccaaccta

SEQ ID NO: 16777 - DNA, 21 bp, synthetic construct
  misc_feature 1..21: note = Artificial sequence related to HLA knockouts in cell therapy
  source 1..21: mol_type = other DNA
gggactcagattctccccaga

SEQ ID NO: 16778 - DNA, 21 bp, synthetic construct
  misc_feature 1..21: note = Artificial sequence related to HLA knockouts in cell therapy
  source 1..21: mol_type = other DNA
ggactcagattctccccagac

SEQ ID NO: 16779 - DNA, 21 bp, synthetic construct
  misc_feature 1..21: note = Artificial sequence related to HLA knockouts in cell therapy
  source 1..21: mol_type = other DNA
gactcagattctccccagacg

SEQ ID NO: 16780 - DNA, 21 bp, synthetic construct
  misc_feature 1..21: note = Artificial sequence related to HLA knockouts in cell therapy
  source 1..21: mol_type = other DNA
actcagattctccccagacgc

SEQ ID NO: 16781 - DNA, 21 bp, synthetic construct
  misc_feature 1..21: note = Artificial sequence related to HLA knockouts in cell therapy
  source 1..21: mol_type = other DNA
gagtattgggacggggagaca

SEQ ID NO: 16782 - DNA, 21 bp, synthetic construct
  misc_feature 1..21: note = Artificial sequence related to HLA knockouts in cell therapy
  source 1..21: mol_type = other DNA
agtattgggacggggagacac

SEQ ID NO: 16783 - DNA, 21 bp, synthetic construct
  misc_feature 1..21: note = Artificial sequence related to HLA knockouts in cell therapy
  source 1..21: mol_type = other DNA
acggggagacacggaaagtga

SEQ ID NO: 16784 - DNA, 21 bp, synthetic construct
  misc_feature 1..21: note = Artificial sequence related to HLA knockouts in cell therapy
  source 1..21: mol_type = other DNA
cggggagacacggaaagtgaa

SEQ ID NO: 16785 - DNA, 21 bp, synthetic construct
  misc_feature 1..21: note = Artificial sequence related to HLA knockouts in cell therapy
  source 1..21: mol_type = other DNA
ggggagacacggaaagtgaag

SEQ ID NO: 16786 - DNA, 21 bp, synthetic construct
  misc_feature 1..21: note = Artificial sequence related to HLA knockouts in cell therapy
  source 1..21: mol_type = other DNA
tgcgcggctactacaaccaga

SEQ ID NO: 16787 - DNA, 21 bp, synthetic construct
  misc_feature 1..21: note = Artificial sequence related to HLA knockouts in cell therapy
  source 1..21: mol_type = other DNA
ggacgcccccaaaacgcatat

SEQ ID NO: 16788 - DNA, 21 bp, synthetic construct
  misc_feature 1..21: note = Artificial sequence related to HLA knockouts in cell therapy
  source 1..21: mol_type = other DNA
gacgcccccaaaacgcatatg

SEQ ID NO: 16789 - DNA, 21 bp, synthetic construct
  misc_feature 1..21: note = Artificial sequence related to HLA knockouts in cell therapy
  source 1..21: mol_type = other DNA
acgcccccaaaacgcatatga

SEQ ID NO: 16790 - DNA, 21 bp, synthetic construct
  misc_feature 1..21: note = Artificial sequence related to HLA knockouts in cell therapy
  source 1..21: mol_type = other DNA
cgcccccaaaacgcatatgac

SEQ ID NO: 16791 - DNA, 21 bp, synthetic construct
  misc_feature 1..21: note = Artificial sequence related to HLA knockouts in cell therapy
  source 1..21: mol_type = other DNA
gcccccaaaacgcatatgact

SEQ ID NO: 16792 - DNA, 21 bp, synthetic construct
  misc_feature 1..21: note = Artificial sequence related to HLA knockouts in cell therapy
  source 1..21: mol_type = other DNA
cccccaaaacgcatatgactc

SEQ ID NO: 16793 - DNA, 21 bp, synthetic construct
  misc_feature 1..21: note = Artificial sequence related to HLA knockouts in cell therapy
  source 1..21: mol_type = other DNA
ccccaaaacgcatatgactca

SEQ ID NO: 16794 - DNA, 21 bp, synthetic construct
  misc_feature 1..21: note = Artificial sequence related to HLA knockouts in cell therapy
  source 1..21: mol_type = other DNA
cccaaaacgcatatgactcac

SEQ ID NO: 16795 - DNA, 21 bp, synthetic construct
  misc_feature 1..21: note = Artificial sequence related to HLA knockouts in cell therapy
  source 1..21: mol_type = other DNA
ccaaaacgcatatgactcacc

SEQ ID NO: 16796 - DNA, 21 bp, synthetic construct
  misc_feature 1..21: note = Artificial sequence related to HLA knockouts in cell therapy
  source 1..21: mol_type = other DNA
caaaacgcatatgactcacca

SEQ ID NO: 16797 - DNA, 21 bp, synthetic construct
  misc_feature 1..21: note = Artificial sequence related to HLA knockouts in cell therapy
  source 1..21: mol_type = other DNA
aaaacgcatatgactcaccac

SEQ ID NO: 16798 - DNA, 21 bp, synthetic construct
  misc_feature 1..21: note = Artificial sequence related to HLA knockouts in cell therapy
  source 1..21: mol_type = other DNA
tgcaggggatggaaccttcca

SEQ ID NO: 16799 - DNA, 21 bp, synthetic construct
  misc_feature 1..21: note = Artificial sequence related to HLA knockouts in cell therapy
  source 1..21: mol_type = other DNA
caggggatggaaccttccaga

SEQ ID NO: 16800 - DNA, 21 bp, synthetic construct
  misc_feature 1..21: note = Artificial sequence related to HLA knockouts in cell therapy
  source 1..21: mol_type = other DNA
aggggatggaaccttccagaa

SEQ ID NO: 16801 - DNA, 21 bp, synthetic construct
  misc_feature 1..21: note = Artificial sequence related to HLA knockouts in cell therapy
  source 1..21: mol_type = other DNA
ggggatggaaccttccagaag

SEQ ID NO: 16802 - DNA, 21 bp, synthetic construct
  misc_feature 1..21: note = Artificial sequence related to HLA knockouts in cell therapy
  source 1..21: mol_type = other DNA
catccccatcgtgggcatcat

SEQ ID NO: 16803 - DNA, 21 bp, synthetic construct
  misc_feature 1..21: note = Artificial sequence related to HLA knockouts in cell therapy
  source 1..21: mol_type = other DNA
atccccatcgtgggcatcatt

SEQ ID NO: 16804 - DNA, 21 bp, synthetic construct
  misc_feature 1..21: note = Artificial sequence related to HLA knockouts in cell therapy
  source 1..21: mol_type = other DNA
tccccatcgtgggcatcattg

SEQ ID NO: 16805 - DNA, 21 bp, synthetic construct
  misc_feature 1..21: note = Artificial sequence related to HLA knockouts in cell therapy
  source 1..21: mol_type = other DNA
aggaagagctcagatagaaaa

SEQ ID NO: 16806 - DNA, 21 bp, synthetic construct
  misc_feature 1..21: note = Artificial sequence related to HLA knockouts in cell therapy
  source 1..21: mol_type = other DNA
ggaagagctcagatagaaaag

SEQ ID NO: 16807 - DNA, 21 bp, synthetic construct
  misc_feature 1..21: note = Artificial sequence related to HLA knockouts in cell therapy
  source 1..21: mol_type = other DNA
gaagagctcagatagaaaagg

SEQ ID NO: 16808 - DNA, 21 bp, synthetic construct
  misc_feature 1..21: note = Artificial sequence related to HLA knockouts in cell therapy
  source 1..21: mol_type = other DNA
aagagctcagatagaaaagga

SEQ ID NO: 16809 - DNA, 21 bp, synthetic construct
  misc_feature 1..21: note = Artificial sequence related to HLA knockouts in cell therapy
  source 1..21: mol_type = other DNA
agagctcagatagaaaaggag

SEQ ID NO: 16810 - DNA, 21 bp, synthetic construct
  misc_feature 1..21: note = Artificial sequence related to HLA knockouts in cell therapy
  source 1..21: mol_type = other DNA
gagctcagatagaaaaggagg

SEQ ID NO: 16811 - DNA, 21 bp, synthetic construct
  misc_feature 1..21: note = Artificial sequence related to HLA knockouts in cell therapy
  source 1..21: mol_type = other DNA
agctcagatagaaaaggaggg

SEQ ID NO: 16812 - DNA, 21 bp, synthetic construct
  misc_feature 1..21: note = Artificial sequence related to HLA knockouts in cell therapy
  source 1..21: mol_type = other DNA
gctcagatagaaaaggaggga

SEQ ID NO: 16813 - DNA, 21 bp, synthetic construct
  misc_feature 1..21: note = Artificial sequence related to HLA knockouts in cell therapy
  source 1..21: mol_type = other DNA
ctcagatagaaaaggagggag

SEQ ID NO: 16814 - DNA, 21 bp, synthetic construct
  misc_feature 1..21: note = Artificial sequence related to HLA knockouts in cell therapy
  source 1..21: mol_type = other DNA
tcagatagaaaaggagggagc

SEQ ID NO: 16815 - DNA, 21 bp, synthetic construct
  misc_feature 1..21: note = Artificial sequence related to HLA knockouts in cell therapy
  source 1..21: mol_type = other DNA
cagatagaaaaggagggagct

SEQ ID NO: 16816 - DNA, 21 bp, synthetic construct
  misc_feature 1..21: note = Artificial sequence related to HLA knockouts in cell therapy
  source 1..21: mol_type = other DNA
agatagaaaaggagggagcta

SEQ ID NO: 16817 - DNA, 21 bp, synthetic construct
  misc_feature 1..21: note = Artificial sequence related to HLA knockouts in cell therapy
  source 1..21: mol_type = other DNA
gatagaaaaggagggagctac

SEQ ID NO: 16818 - DNA, 21 bp, synthetic construct
  misc_feature 1..21: note = Artificial sequence related to HLA knockouts in cell therapy
  source 1..21: mol_type = other DNA
atagaaaaggagggagctact

SEQ ID NO: 16819 - DNA, 21 bp, synthetic construct
  misc_feature 1..21: note = Artificial sequence related to HLA knockouts in cell therapy
  source 1..21: mol_type = other DNA
tagaaaaggagggagctactc

SEQ ID NO: 16820 - DNA, 21 bp, synthetic construct
  misc_feature 1..21: note = Artificial sequence related to HLA knockouts in cell therapy
  source 1..21: mol_type = other DNA
agaaaaggagggagctactct

SEQ ID NO: 16821 - DNA, 21 bp, synthetic construct
  misc_feature 1..21: note = Artificial sequence related to HLA knockouts in cell therapy
  source 1..21: mol_type = other DNA
gaaaaggagggagctactctc

SEQ ID NO: 16822 - DNA, 21 bp, synthetic construct
  misc_feature 1..21: note = Artificial sequence related to HLA knockouts in cell therapy
  source 1..21: mol_type = other DNA
aaaaggagggagctactctca

SEQ ID NO: 16823 - DNA, 21 bp, synthetic construct
  misc_feature 1..21: note = Artificial sequence related to HLA knockouts in cell therapy
  source 1..21: mol_type = other DNA
gcataatgtgaggaggtgggg

SEQ ID NO: 16824 - DNA, 21 bp, synthetic construct
  misc_feature 1..21: note = Artificial sequence related to HLA knockouts in cell therapy
  source 1..21: mol_type = other DNA
cataatgtgaggaggtgggga

SEQ ID NO: 16825 - DNA, 21 bp, synthetic construct
  misc_feature 1..21: note = Artificial sequence related to HLA knockouts in cell therapy
  source 1..21: mol_type = other DNA
ataatgtgaggaggtggggag

SEQ ID NO: 16826 - DNA, 21 bp, synthetic construct
  misc_feature 1..21: note = Artificial sequence related to HLA knockouts in cell therapy
  source 1..21: mol_type = other DNA
taatgtgaggaggtggggaga

SEQ ID NO: 16827 - DNA, 21 bp, synthetic construct
  misc_feature 1..21: note = Artificial sequence related to HLA knockouts in cell therapy
  source 1..21: mol_type = other DNA
aatgtgaggaggtggggagac

SEQ ID NO: 16828 - DNA, 21 bp, synthetic construct
  misc_feature 1..21: note = Artificial sequence related to HLA knockouts in cell therapy
  source 1..21: mol_type = other DNA
ctgtgctccctccccaatcat

SEQ ID NO: 16829 - DNA, 21 bp, synthetic construct
  misc_feature 1..21: note = Artificial sequence related to HLA knockouts in cell therapy
  source 1..21: mol_type = other DNA
tgtgctccctccccaatcatc

SEQ ID NO: 16830 - DNA, 21 bp, synthetic construct
  misc_feature 1..21: note = Artificial sequence related to HLA knockouts in cell therapy
  source 1..21: mol_type = other DNA
gtgctccctccccaatcatct

SEQ ID NO: 16831 - DNA, 21 bp, synthetic construct
  misc_feature 1..21: note = Artificial sequence related to HLA knockouts in cell therapy
  source 1..21: mol_type = other DNA
tgctccctccccaatcatctt

SEQ ID NO: 16832 - DNA, 21 bp, synthetic construct
  misc_feature 1..21: note = Artificial sequence related to HLA knockouts in cell therapy
  source 1..21: mol_type = other DNA
gctccctccccaatcatcttt

SEQ ID NO: 16833 - DNA, 21 bp, synthetic construct
  misc_feature 1..21: note = Artificial sequence related to HLA knockouts in cell therapy
  source 1..21: mol_type = other DNA
ctccctccccaatcatctttc

SEQ ID NO: 16834 - DNA, 21 bp, synthetic construct
  misc_feature 1..21: note = Artificial sequence related to HLA knockouts in cell therapy
  source 1..21: mol_type = other DNA
tccctccccaatcatctttcc

SEQ ID NO: 16835 - DNA, 21 bp, synthetic construct
  misc_feature 1..21: note = Artificial sequence related to HLA knockouts in cell therapy
  source 1..21: mol_type = other DNA
ccctccccaatcatctttcct

SEQ ID NO: 16836 - DNA, 21 bp, synthetic construct
  misc_feature 1..21: note = Artificial sequence related to HLA knockouts in cell therapy
  source 1..21: mol_type = other DNA
cctccccaatcatctttcctg

SEQ ID NO: 16837 - DNA, 21 bp, synthetic construct
  misc_feature 1..21: note = Artificial sequence related to HLA knockouts in cell therapy
  source 1..21: mol_type = other DNA
ctccccaatcatctttcctgt

SEQ ID NO: 16838 - DNA, 21 bp, synthetic construct
  misc_feature 1..21: note = Artificial sequence related to HLA knockouts in cell therapy
  source 1..21: mol_type = other DNA
tccccaatcatctttcctgtt

SEQ ID NO: 16839 - DNA, 21 bp, synthetic construct
  misc_feature 1..21: note = Artificial sequence related to HLA knockouts in cell therapy
  source 1..21: mol_type = other DNA
ccccaatcatctttcctgttc

SEQ ID NO: 16840 - DNA, 22 bp, synthetic construct
  misc_feature 1..22: note = Artificial sequence related to HLA knockouts in cell therapy
  source 1..22: mol_type = other DNA
ccccgaaggcggtgtatggatt

SEQ ID NO: 16841 - DNA, 22 bp, synthetic construct
  misc_feature 1..22: note = Artificial sequence related to HLA knockouts in cell therapy
  source 1..22: mol_type = other DNA
gaaggcggtgtatggattgggg

SEQ ID NO: 16842 - DNA, 22 bp, synthetic construct
  misc_feature 1..22: note = Artificial sequence related to HLA knockouts in cell therapy
  source 1..22: mol_type = other DNA
aaggcggtgtatggattgggga

SEQ ID NO: 16843 - DNA, 22 bp, synthetic construct
  misc_feature 1..22: note = Artificial sequence related to HLA knockouts in cell therapy
  source 1..22: mol_type = other DNA
aggcggtgtatggattggggag

SEQ ID NO: 16844 - DNA, 22 bp, synthetic construct
  misc_feature 1..22: note = Artificial sequence related to HLA knockouts in cell therapy
  source 1..22: mol_type = other DNA
ggcggtgtatggattggggagt

SEQ ID NO: 16845 - DNA, 22 bp, synthetic construct
  misc_feature 1..22: note = Artificial sequence related to HLA knockouts in cell therapy
  source 1..22: mol_type = other DNA
gcggtgtatggattggggagtc

SEQ ID NO: 16846 - DNA, 22 bp, synthetic construct
  misc_feature 1..22: note = Artificial sequence related to HLA knockouts in cell therapy
  source 1..22: mol_type = other DNA
cggtgtatggattggggagtcc

SEQ ID NO: 16847 - DNA, 22 bp, synthetic construct
  misc_feature 1..22: note = Artificial sequence related to HLA knockouts in cell therapy
  source 1..22: mol_type = other DNA
ggtgtatggattggggagtccc

SEQ ID NO: 16848 - DNA, 22 bp, synthetic construct
  misc_feature 1..22: note = Artificial sequence related to HLA knockouts in cell therapy
  source 1..22: mol_type = other DNA
gtgtatggattggggagtccca

SEQ ID NO: 16849 - DNA, 22 bp, synthetic construct
  misc_feature 1..22: note = Artificial sequence related to HLA knockouts in cell therapy
  source 1..22: mol_type = other DNA
tgtatggattggggagtcccag

SEQ ID NO: 16850 - DNA, 22 bp, synthetic construct
  misc_feature 1..22: note = Artificial sequence related to HLA knockouts in cell therapy
  source 1..22: mol_type = other DNA
gtatggattggggagtcccagc

SEQ ID NO: 16851 - DNA, 22 bp, synthetic construct
  misc_feature 1..22: note = Artificial sequence related to HLA knockouts in cell therapy
  source 1..22: mol_type = other DNA
tatggattggggagtcccagcc

SEQ ID NO: 16852 - DNA, 22 bp, synthetic construct
  misc_feature 1..22: note = Artificial sequence related to HLA knockouts in cell therapy
  source 1..22: mol_type = other DNA
atggattggggagtcccagcct

SEQ ID NO: 16853 - DNA, 22 bp, synthetic construct
  misc_feature 1..22: note = Artificial sequence related to HLA knockouts in cell therapy
  source 1..22: mol_type = other DNA
tggattggggagtcccagcctt

SEQ ID NO: 16854 - DNA, 22 bp, synthetic construct
  misc_feature 1..22: note = Artificial sequence related to HLA knockouts in cell therapy
  source 1..22: mol_type = other DNA
cagccttggggattccccaact

SEQ ID NO: 16855 - DNA, 22 bp, synthetic construct
  misc_feature 1..22: note = Artificial sequence related to HLA knockouts in cell therapy
  source 1..22: mol_type = other DNA
agccttggggattccccaactc

SEQ ID NO: 16856 - DNA, 22 bp, synthetic construct
  misc_feature 1..22: note = Artificial sequence related to HLA knockouts in cell therapy
  source 1..22: mol_type = other DNA
ttggggattccccaactccgca

SEQ ID NO: 16857 - DNA, 22 bp, synthetic construct
  misc_feature 1..22: note = Artificial sequence related to HLA knockouts in cell therapy
  source 1..22: mol_type = other DNA
gggattccccaactccgcagtt

SEQ ID NO: 16858 - DNA, 22 bp, synthetic construct
  misc_feature 1..22: note = Artificial sequence related to HLA knockouts in cell therapy
  source 1..22: mol_type = other DNA
ggattccccaactccgcagttt

SEQ ID NO: 16859 - DNA, 22 bp, synthetic construct
  misc_feature 1..22: note = Artificial sequence related to HLA knockouts in cell therapy
  source 1..22: mol_type = other DNA
gattccccaactccgcagtttc

SEQ ID NO: 16860 - DNA, 22 bp, synthetic construct
  misc_feature 1..22: note = Artificial sequence related to HLA knockouts in cell therapy
  source 1..22: mol_type = other DNA
attccccaactccgcagtttct

SEQ ID NO: 16861 - DNA, 22 bp, synthetic construct
  misc_feature 1..22: note = Artificial sequence related to HLA knockouts in cell therapy
  source 1..22: mol_type = other DNA
ttccccaactccgcagtttctt

SEQ ID NO: 16862 - DNA, 22 bp, synthetic construct
  misc_feature 1..22: note = Artificial sequence related to HLA knockouts in cell therapy
  source 1..22: mol_type = other DNA
tccccaactccgcagtttcttt

SEQ ID NO: 16863 - DNA, 22 bp, synthetic construct
  misc_feature 1..22: note = Artificial sequence related to HLA knockouts in cell therapy
  source 1..22: mol_type = other DNA
ccccaactccgcagtttctttt

SEQ ID NO: 16864 - DNA, 22 bp, synthetic construct
  misc_feature 1..22: note = Artificial sequence related to HLA knockouts in cell therapy
  source 1..22: mol_type = other DNA
cccaactccgcagtttcttttc

SEQ ID NO: 16865 - DNA, 22 bp, synthetic construct
  misc_feature 1..22: note = Artificial sequence related to HLA knockouts in cell therapy
  source 1..22: mol_type = other DNA
ccaactccgcagtttcttttct

SEQ ID NO: 16866 - DNA, 22 bp, synthetic construct
  misc_feature 1..22: note = Artificial sequence related to HLA knockouts in cell therapy
  source 1..22: mol_type = other DNA
caactccgcagtttcttttctc

SEQ ID NO: 16867 - DNA, 22 bp, synthetic construct
  misc_feature 1..22: note = Artificial sequence related to HLA knockouts in cell therapy
  source 1..22: mol_type = other DNA
aactccgcagtttcttttctcc

SEQ ID NO: 16868 - DNA, 22 bp, synthetic construct
  misc_feature 1..22: note = Artificial sequence related to HLA knockouts in cell therapy
  source 1..22: mol_type = other DNA
actccgcagtttcttttctccc

SEQ ID NO: 16869 - DNA, 22 bp, synthetic construct
  misc_feature 1..22: note = Artificial sequence related to HLA knockouts in cell therapy
  source 1..22: mol_type = other DNA
ctccgcagtttcttttctccct

SEQ ID NO: 16870 - DNA, 22 bp, synthetic construct
  misc_feature 1..22: note = Artificial sequence related to HLA knockouts in cell therapy
  source 1..22: mol_type = other DNA
tccgcagtttcttttctccctc

SEQ ID NO: 16871 - DNA, 22 bp, synthetic construct
  misc_feature 1..22: note = Artificial sequence related to HLA knockouts in cell therapy
  source 1..22: mol_type = other DNA
ccgcagtttcttttctccctct

SEQ ID NO: 16872 - DNA, 22 bp, synthetic construct
  misc_feature 1..22: note = Artificial sequence related to HLA knockouts in cell therapy
  source 1..22: mol_type = other DNA
cgcagtttcttttctccctctc

SEQ ID NO: 16873 - DNA, 22 bp, synthetic construct
  misc_feature 1..22: note = Artificial sequence related to HLA knockouts in cell therapy
  source 1..22: mol_type = other DNA
gcagtttcttttctccctctcc

SEQ ID NO: 16874 - DNA, 22 bp, synthetic construct
  misc_feature 1..22: note = Artificial sequence related to HLA knockouts in cell therapy
  source 1..22: mol_type = other DNA
cagtttcttttctccctctccc

SEQ ID NO: 16875 - DNA, 22 bp, synthetic construct
  misc_feature 1..22: note = Artificial sequence related to HLA knockouts in cell therapy
  source 1..22: mol_type = other DNA
agtttcttttctccctctccca

SEQ ID NO: 16876 - DNA, 22 bp, synthetic construct
  misc_feature 1..22: note = Artificial sequence related to HLA knockouts in cell therapy
  source 1..22: mol_type = other DNA
gtttcttttctccctctcccaa

SEQ ID NO: 16877 - DNA, 22 bp, synthetic construct
  misc_feature 1..22: note = Artificial sequence related to HLA knockouts in cell therapy
  source 1..22: mol_type = other DNA
tttcttttctccctctcccaac

SEQ ID NO: 16878 - DNA, 22 bp, synthetic construct
  misc_feature 1..22: note = Artificial sequence related to HLA knockouts in cell therapy
  source 1..22: mol_type = other DNA
ttcttttctccctctcccaacc

SEQ ID NO: 16879 - DNA, 22 bp, synthetic construct
  misc_feature 1..22: note = Artificial sequence related to HLA knockouts in cell therapy
  source 1..22: mol_type = other DNA
tcttttctccctctcccaacct

SEQ ID NO: 16880 - DNA, 22 bp, synthetic construct
  misc_feature 1..22: note = Artificial sequence related to HLA knockouts in cell therapy
  source 1..22: mol_type = other DNA
cttttctccctctcccaaccta

SEQ ID NO: 16881 - DNA, 22 bp, synthetic construct
  misc_feature 1..22: note = Artificial sequence related to HLA knockouts in cell therapy
  source 1..22: mol_type = other DNA
ttttctccctctcccaacctat

SEQ ID NO: 16882 - DNA, 22 bp, synthetic construct
  misc_feature 1..22: note = Artificial sequence related to HLA knockouts in cell therapy
  source 1..22: mol_type = other DNA
accgggactcagattctcccca

SEQ ID NO: 16883 - DNA, 22 bp, synthetic construct
  misc_feature 1..22: note = Artificial sequence related to HLA knockouts in cell therapy
  source 1..22: mol_type = other DNA
cgggactcagattctccccaga

SEQ ID NO: 16884 - DNA, 22 bp, synthetic construct
  misc_feature 1..22: note = Artificial sequence related to HLA knockouts in cell therapy
  source 1..22: mol_type = other DNA
gggactcagattctccccagac

SEQ ID NO: 16885 - DNA, 22 bp, synthetic construct
  misc_feature 1..22: note = Artificial sequence related to HLA knockouts in cell therapy
  source 1..22: mol_type = other DNA
ggactcagattctccccagacg

SEQ ID NO: 16886 - DNA, 22 bp, synthetic construct
  misc_feature 1..22: note = Artificial sequence related to HLA knockouts in cell therapy
  source 1..22: mol_type = other DNA
gactcagattctccccagacgc

SEQ ID NO: 16887 - DNA, 22 bp, synthetic construct
  misc_feature 1..22: note = Artificial sequence related to HLA knockouts in cell therapy
  source 1..22: mol_type = other DNA
actcagattctccccagacgcc

SEQ ID NO: 16888 - DNA, 22 bp, synthetic construct
  misc_feature 1..22: note = Artificial sequence related to HLA knockouts in cell therapy
  source 1..22: mol_type = other DNA
tcagattctccccagacgccga

SEQ ID NO: 16889 - DNA, 22 bp, synthetic construct
  misc_feature 1..22: note = Artificial sequence related to HLA knockouts in cell therapy
  source 1..22: mol_type = other DNA
attctccccagacgccgaggat

SEQ ID NO: 16890 - DNA, 22 bp, synthetic construct
  misc_feature 1..22: note = Artificial sequence related to HLA knockouts in cell therapy
  source 1..22: mol_type = other DNA
ggagtattgggacggggagaca

SEQ ID NO: 16891 - DNA, 22 bp, synthetic construct
  misc_feature 1..22: note = Artificial sequence related to HLA knockouts in cell therapy
  source 1..22: mol_type = other DNA
gagtattgggacggggagacac

SEQ ID NO: 16892 - DNA, 22 bp, synthetic construct
  misc_feature 1..22: note = Artificial sequence related to HLA knockouts in cell therapy
  source 1..22: mol_type = other DNA
agtattgggacggggagacacg

SEQ ID NO: 16893 - DNA, 22 bp, synthetic construct
  misc_feature 1..22: note = Artificial sequence related to HLA knockouts in cell therapy
  source 1..22: mol_type = other DNA
tattgggacggggagacacgga

SEQ ID NO: 16894 - DNA, 22 bp, synthetic construct
  misc_feature 1..22: note = Artificial sequence related to HLA knockouts in cell therapy
  source 1..22: mol_type = other DNA
attgggacggggagacacggaa

SEQ ID NO: 16895 - DNA, 22 bp, synthetic construct
  misc_feature 1..22: note = Artificial sequence related to HLA knockouts in cell therapy
  source 1..22: mol_type = other DNA
ttgggacggggagacacggaaa

SEQ ID NO: 16896 - DNA, 22 bp, synthetic construct
  misc_feature 1..22: note = Artificial sequence related to HLA knockouts in cell therapy
  source 1..22: mol_type = other DNA
gacggggagacacggaaagtga

SEQ ID NO: 16897 - DNA, 22 bp, synthetic construct
  misc_feature 1..22: note = Artificial sequence related to HLA knockouts in cell therapy
  source 1..22: mol_type = other DNA
acggggagacacggaaagtgaa

SEQ ID NO: 16898 - DNA, 22 bp, synthetic construct
  misc_feature 1..22: note = Artificial sequence related to HLA knockouts in cell therapy
  source 1..22: mol_type = other DNA
cggggagacacggaaagtgaag

SEQ ID NO: 16899 - DNA, 22 bp, synthetic construct
  misc_feature 1..22: note = Artificial sequence related to HLA knockouts in cell therapy
  source 1..22: mol_type = other DNA
ggggagacacggaaagtgaagg

SEQ ID NO: 16900 - DNA, 22 bp, synthetic construct
  misc_feature 1..22: note = Artificial sequence related to HLA knockouts in cell therapy
  source 1..22: mol_type = other DNA
ctgcgcggctactacaaccaga

SEQ ID NO: 16901 - DNA, 22 bp, synthetic construct
  misc_feature 1..22: note = Artificial sequence related to HLA knockouts in cell therapy
  source 1..22: mol_type = other DNA
tgcgcggctactacaaccagag

SEQ ID NO: 16902 - DNA, 22 bp, synthetic construct
  misc_feature 1..22: note = Artificial sequence related to HLA knockouts in cell therapy
  source 1..22: mol_type = other DNA
atgtatggctgcgacgtggggt

SEQ ID NO: 16903 - DNA, 22 bp, synthetic construct
  misc_feature 1..22: note = Artificial sequence related to HLA knockouts in cell therapy
  source 1..22: mol_type = other DNA
acggacgcccccaaaacgcata

SEQ ID NO: 16904 - DNA, 22 bp, synthetic construct
  misc_feature 1..22: note = Artificial sequence related to HLA knockouts in cell therapy
  source 1..22: mol_type = other DNA
cggacgcccccaaaacgcatat

SEQ ID NO: 16905 - DNA, 22 bp, synthetic construct
  misc_feature 1..22: note = Artificial sequence related to HLA knockouts in cell therapy
  source 1..22: mol_type = other DNA
ggacgcccccaaaacgcatatg

SEQ ID NO: 16906 - DNA, 22 bp, synthetic construct
  misc_feature 1..22: note = Artificial sequence related to HLA knockouts in cell therapy
  source 1..22: mol_type = other DNA
gacgcccccaaaacgcatatga

SEQ ID NO: 16907 - DNA, 22 bp, synthetic construct
  misc_feature 1..22: note = Artificial sequence related to HLA knockouts in cell therapy
  source 1..22: mol_type = other DNA
acgcccccaaaacgcatatgac

SEQ ID NO: 16908 - DNA, 22 bp, synthetic construct
  misc_feature 1..22: note = Artificial sequence related to HLA knockouts in cell therapy
  source 1..22: mol_type = other DNA
cgcccccaaaacgcatatgact

SEQ ID NO: 16909 - DNA, 22 bp, synthetic construct
  misc_feature 1..22: note = Artificial sequence related to HLA knockouts in cell therapy
  source 1..22: mol_type = other DNA
gcccccaaaacgcatatgactc

SEQ ID NO: 16910 - DNA, 22 bp, synthetic construct
  misc_feature 1..22: note = Artificial sequence related to HLA knockouts in cell therapy
  source 1..22: mol_type = other DNA
cccccaaaacgcatatgactca

SEQ ID NO: 16911 - DNA, 22 bp, synthetic construct
  misc_feature 1..22: note = Artificial sequence related to HLA knockouts in cell therapy
  source 1..22: mol_type = other DNA
ccccaaaacgcatatgactcac

SEQ ID NO: 16912 - DNA, 22 bp, synthetic construct
  misc_feature 1..22: note = Artificial sequence related to HLA knockouts in cell therapy
  source 1..22: mol_type = other DNA
cccaaaacgcatatgactcacc

SEQ ID NO: 16913 - DNA, 22 bp, synthetic construct
  misc_feature 1..22: note = Artificial sequence related to HLA knockouts in cell therapy
  source 1..22: mol_type = other DNA
ccaaaacgcatatgactcacca

SEQ ID NO: 16914 - DNA, 22 bp, synthetic construct
  misc_feature 1..22: note = Artificial sequence related to HLA knockouts in cell therapy
  source 1..22: mol_type = other DNA
caaaacgcatatgactcaccac

SEQ ID NO: 16915 - DNA, 22 bp, synthetic construct
  misc_feature 1..22: note = Artificial sequence related to HLA knockouts in cell therapy
  source 1..22: mol_type = other DNA
aaaacgcatatgactcaccacg

SEQ ID NO: 16916 - DNA, 22 bp, synthetic construct
  misc_feature 1..22: note = Artificial sequence related to HLA knockouts in cell therapy
  source 1..22: mol_type = other DNA
ctgcaggggatggaaccttcca

SEQ ID NO: 16917 - DNA, 22 bp, synthetic construct
  misc_feature 1..22: note = Artificial sequence related to HLA knockouts in cell therapy
  source 1..22: mol_type = other DNA
tgcaggggatggaaccttccag

SEQ ID NO: 16918 - DNA, 22 bp, synthetic construct
  misc_feature 1..22: note = Artificial sequence related to HLA knockouts in cell therapy
  source 1..22: mol_type = other DNA
gcaggggatggaaccttccaga

SEQ ID NO: 16919 - DNA, 22 bp, synthetic construct
  misc_feature 1..22: note = Artificial sequence related to HLA knockouts in cell therapy
  source 1..22: mol_type = other DNA
caggggatggaaccttccagaa

SEQ ID NO: 16920 - DNA, 22 bp, synthetic construct
  misc_feature 1..22: note = Artificial sequence related to HLA knockouts in cell therapy
  source 1..22: mol_type = other DNA
aggggatggaaccttccagaag

SEQ ID NO: 16921 - DNA, 22 bp, synthetic construct
  misc_feature 1..22: note = Artificial sequence related to HLA knockouts in cell therapy
  source 1..22: mol_type = other DNA
ggggatggaaccttccagaagt

SEQ ID NO: 16922 - DNA, 22 bp, synthetic construct
  misc_feature 1..22: note = Artificial sequence related to HLA knockouts in cell therapy
  source 1..22: mol_type = other DNA
aaccttccagaagtgggcggct

SEQ ID NO: 16923 - DNA, 22 bp, synthetic construct
  misc_feature 1..22: note = Artificial sequence related to HLA knockouts in cell therapy
  source 1..22: mol_type = other DNA
atgagggtttgcccaagcccct

SEQ ID NO: 16924 - DNA, 22 bp, synthetic construct
  misc_feature 1..22: note = Artificial sequence related to HLA knockouts in cell therapy
  source 1..22: mol_type = other DNA
accatccccatcgtgggcatca

SEQ ID NO: 16925 - DNA, 22 bp, synthetic construct
  misc_feature 1..22: note = Artificial sequence related to HLA knockouts in cell therapy
  source 1..22: mol_type = other DNA
ccatccccatcgtgggcatcat

SEQ ID NO: 16926 - DNA, 22 bp, synthetic construct
  misc_feature 1..22: note = Artificial sequence related to HLA knockouts in cell therapy
  source 1..22: mol_type = other DNA
catccccatcgtgggcatcatt

SEQ ID NO: 16927 - DNA, 22 bp, synthetic construct
  misc_feature 1..22: note = Artificial sequence related to HLA knockouts in cell therapy
  source 1..22: mol_type = other DNA
atccccatcgtgggcatcattg

SEQ ID NO: 16928 - DNA, 22 bp, synthetic construct
  misc_feature 1..22: note = Artificial sequence related to HLA knockouts in cell therapy
  source 1..22: mol_type = other DNA
tccccatcgtgggcatcattgc

SEQ ID NO: 16929 - DNA, 22 bp, synthetic construct
  misc_feature 1..22: note = Artificial sequence related to HLA knockouts in cell therapy
  source 1..22: mol_type = other DNA
ccccatcgtgggcatcattgct

SEQ ID NO: 16930 - DNA, 22 bp, synthetic construct
  misc_feature 1..22: note = Artificial sequence related to HLA knockouts in cell therapy
  source 1..22: mol_type = other DNA
gaggaagagctcagatagaaaa

SEQ ID NO: 16931 - DNA, 22 bp, synthetic construct
  misc_feature 1..22: note = Artificial sequence related to HLA knockouts in cell therapy
  source 1..22: mol_type = other DNA
aggaagagctcagatagaaaag

SEQ ID NO: 16932 - DNA, 22 bp, synthetic construct
  misc_feature 1..22: note = Artificial sequence related to HLA knockouts in cell therapy
  source 1..22: mol_type = other DNA
ggaagagctcagatagaaaagg

SEQ ID NO: 16933 - DNA, 22 bp, synthetic construct
  misc_feature 1..22: note = Artificial sequence related to HLA knockouts in cell therapy
  source 1..22: mol_type = other DNA
gaagagctcagatagaaaagga

SEQ ID NO: 16934 - DNA, 22 bp, synthetic construct
  misc_feature 1..22: note = Artificial sequence related to HLA knockouts in cell therapy
  source 1..22: mol_type = other DNA
aagagctcagatagaaaaggag

SEQ ID NO: 16935 - DNA, 22 bp, synthetic construct
  misc_feature 1..22: note = Artificial sequence related to HLA knockouts in cell therapy
  source 1..22: mol_type = other DNA
agagctcagatagaaaaggagg

SEQ ID NO: 16936 - DNA, 22 bp, synthetic construct
  misc_feature 1..22: note = Artificial sequence related to HLA knockouts in cell therapy
  source 1..22: mol_type = other DNA
gagctcagatagaaaaggaggg

SEQ ID NO: 16937 - DNA, 22 bp, synthetic construct
  misc_feature 1..22: note = Artificial sequence related to HLA knockouts in cell therapy
  source 1..22: mol_type = other DNA
agctcagatagaaaaggaggga

SEQ ID NO: 16938 - DNA, 22 bp, synthetic construct
  misc_feature 1..22: note = Artificial sequence related to HLA knockouts in cell therapy
  source 1..22: mol_type = other DNA
gctcagatagaaaaggagggag

SEQ ID NO: 16939 - DNA, 22 bp, synthetic construct
  misc_feature 1..22: note = Artificial sequence related to HLA knockouts in cell therapy
  source 1..22: mol_type = other DNA
ctcagatagaaaaggagggagc

SEQ ID NO: 16940 - DNA, 22 bp, synthetic construct
  misc_feature 1..22: note = Artificial sequence related to HLA knockouts in cell therapy
  source 1..22: mol_type = other DNA
tcagatagaaaaggagggagct

SEQ ID NO: 16941 - DNA, 22 bp, synthetic construct
  misc_feature 1..22: note = Artificial sequence related to HLA knockouts in cell therapy
  source 1..22: mol_type = other DNA
cagatagaaaaggagggagcta

SEQ ID NO: 16942 - DNA, 22 bp, synthetic construct
  misc_feature 1..22: note = Artificial sequence related to HLA knockouts in cell therapy
  source 1..22: mol_type = other DNA
agatagaaaaggagggagctac

SEQ ID NO: 16943 - DNA, 22 bp, synthetic construct
  misc_feature 1..22: note = Artificial sequence related to HLA knockouts in cell therapy
  source 1..22: mol_type = other DNA
gatagaaaaggagggagctact

SEQ ID NO: 16944 - DNA, 22 bp, synthetic construct
  misc_feature 1..22: note = Artificial sequence related to HLA knockouts in cell therapy
  source 1..22: mol_type = other DNA
atagaaaaggagggagctactc

SEQ ID NO: 16945 - DNA, 22 bp, synthetic construct
  misc_feature 1..22: note = Artificial sequence related to HLA knockouts in cell therapy
  source 1..22: mol_type = other DNA
tagaaaaggagggagctactct

SEQ ID NO: 16946 - DNA, 22 bp, synthetic construct
  misc_feature 1..22: note = Artificial sequence related to HLA knockouts in cell therapy
  source 1..22: mol_type = other DNA
agaaaaggagggagctactctc

SEQ ID NO: 16947 - DNA, 22 bp, synthetic construct
  misc_feature 1..22: note = Artificial sequence related to HLA knockouts in cell therapy
  source 1..22: mol_type = other DNA
gaaaaggagggagctactctca

SEQ ID NO: 16948 - DNA, 22 bp, synthetic construct
  misc_feature 1..22: note = Artificial sequence related to HLA knockouts in cell therapy
  source 1..22: mol_type = other DNA
aaaaggagggagctactctcag

SEQ ID NO: 16949 - DNA, 22 bp, synthetic construct
  misc_feature 1..22: note = Artificial sequence related to HLA knockouts in cell therapy
  source 1..22: mol_type = other DNA
ggcataatgtgaggaggtgggg

SEQ ID NO: 16950 - DNA, 22 bp, synthetic construct
  misc_feature 1..22: note = Artificial sequence related to HLA knockouts in cell therapy
  source 1..22: mol_type = other DNA
gcataatgtgaggaggtgggga

SEQ ID NO: 16951 - DNA, 22 bp, synthetic construct
  misc_feature 1..22: note = Artificial sequence related to HLA knockouts in cell therapy
  source 1..22: mol_type = other DNA
cataatgtgaggaggtggggag

SEQ ID NO: 16952 - DNA, 22 bp, synthetic construct
  misc_feature 1..22: note = Artificial sequence related to HLA knockouts in cell therapy
  source 1..22: mol_type = other DNA
ataatgtgaggaggtggggaga

SEQ ID NO: 16953 - DNA, 22 bp, synthetic construct
  misc_feature 1..22: note = Artificial sequence related to HLA knockouts in cell therapy
  source 1..22: mol_type = other DNA
taatgtgaggaggtggggagac

SEQ ID NO: 16954 - DNA, 22 bp, synthetic construct
  misc_feature 1..22: note = Artificial sequence related to HLA knockouts in cell therapy
  source 1..22: mol_type = other DNA
aatgtgaggaggtggggagacc

SEQ ID NO: 16955 - DNA, 22 bp, synthetic construct
  misc_feature 1..22: note = Artificial sequence related to HLA knockouts in cell therapy
  source 1..22: mol_type = other DNA
atgtgaggaggtggggagacca

SEQ ID NO: 16956 - DNA, 22 bp, synthetic construct
  misc_feature 1..22: note = Artificial sequence related to HLA knockouts in cell therapy
  source 1..22: mol_type = other DNA
tgacctgtgctccctccccaat

SEQ ID NO: 16957 - DNA, 22 bp, synthetic construct
  misc_feature 1..22: note = Artificial sequence related to HLA knockouts in cell therapy
  source 1..22: mol_type = other DNA
acctgtgctccctccccaatca

SEQ ID NO: 16958 - DNA, 22 bp, synthetic construct
  misc_feature 1..22: note = Artificial sequence related to HLA knockouts in cell therapy
  source 1..22: mol_type = other DNA
cctgtgctccctccccaatcat

SEQ ID NO: 16959 - DNA, 22 bp, synthetic construct
  misc_feature 1..22: note = Artificial sequence related to HLA knockouts in cell therapy
  source 1..22: mol_type = other DNA
ctgtgctccctccccaatcatc

SEQ ID NO: 16960 - DNA, 22 bp, synthetic construct
  misc_feature 1..22: note = Artificial sequence related to HLA knockouts in cell therapy
  source 1..22: mol_type = other DNA
tgtgctccctccccaatcatct

SEQ ID NO: 16961 - DNA, 22 bp, synthetic construct
  misc_feature 1..22: note = Artificial sequence related to HLA knockouts in cell therapy
  source 1..22: mol_type = other DNA
gtgctccctccccaatcatctt

SEQ ID NO: 16962 - DNA, 22 bp, synthetic construct
  misc_feature 1..22: note = Artificial sequence related to HLA knockouts in cell therapy
  source 1..22: mol_type = other DNA
tgctccctccccaatcatcttt

SEQ ID NO: 16963 - DNA, 22 bp, synthetic construct
  misc_feature 1..22: note = Artificial sequence related to HLA knockouts in cell therapy
  source 1..22: mol_type = other DNA
gctccctccccaatcatctttc

SEQ ID NO: 16964 - DNA, 22 bp, synthetic construct
  misc_feature 1..22: note = Artificial sequence related to HLA knockouts in cell therapy
  source 1..22: mol_type = other DNA
ctccctccccaatcatctttcc

SEQ ID NO: 16965 - DNA, 22 bp, synthetic construct
  misc_feature 1..22: note = Artificial sequence related to HLA knockouts in cell therapy
  source 1..22: mol_type = other DNA
tccctccccaatcatctttcct

SEQ ID NO: 16966 - DNA, 22 bp, synthetic construct
  misc_feature 1..22: note = Artificial sequence related to HLA knockouts in cell therapy
  source 1..22: mol_type = other DNA
ccctccccaatcatctttcctg

SEQ ID NO: 16967 - DNA, 22 bp, synthetic construct
  misc_feature 1..22: note = Artificial sequence related to HLA knockouts in cell therapy
  source 1..22: mol_type = other DNA
cctccccaatcatctttcctgt

SEQ ID NO: 16968 - DNA, 22 bp, synthetic construct
  misc_feature 1..22: note = Artificial sequence related to HLA knockouts in cell therapy
  source 1..22: mol_type = other DNA
ctccccaatcatctttcctgtt

SEQ ID NO: 16969 - DNA, 22 bp, synthetic construct
  misc_feature 1..22: note = Artificial sequence related to HLA knockouts in cell therapy
  source 1..22: mol_type = other DNA
tccccaatcatctttcctgttc

SEQ ID NO: 16970 - DNA, 22 bp, synthetic construct
  misc_feature 1..22: note = Artificial sequence related to HLA knockouts in cell therapy
  source 1..22: mol_type = other DNA
ccccaatcatctttcctgttcc

SEQ ID NO: 16971 - DNA, 22 bp, synthetic construct
  misc_feature 1..22: note = Artificial sequence related to HLA knockouts in cell therapy
  source 1..22: mol_type = other DNA
ttcctgttccagagaggtgggg

SEQ ID NO: 16972 - DNA, 22 bp, synthetic construct
  misc_feature 1..22: note = Artificial sequence related to HLA knockouts in cell therapy
  source 1..22: mol_type = other DNA
tgttccagagaggtggggctga

SEQ ID NO: 16973 - DNA, 22 bp, synthetic construct
  misc_feature 1..22: note = Artificial sequence related to HLA knockouts in cell therapy
  source 1..22: mol_type = other DNA
tggggctgaggtgtctccatct

SEQ ID NO: 16974 - DNA, 20 bp, synthetic construct
  misc_feature 1..20: note = Artificial sequence related to HLA knockouts in cell therapy
  source 1..20: mol_type = other DNA
ttcttccttccctattaaaa

SEQ ID NO: 16975 - DNA, 22 bp, synthetic construct
  misc_feature 1..22: note = Artificial sequence related to HLA knockouts in cell therapy
  source 1..22: mol_type = other DNA
acttcttccttccctattaaaa

SEQ ID NO: 16976 - DNA, 18 bp, synthetic construct
  misc_feature 1..18: note = Artificial sequence related to HLA knockouts in cell therapy
  source 1..18: mol_type = other DNA
cagaagcagaggggtcag

SEQ ID NO: 16977 - DNA, 18 bp, synthetic construct
  misc_feature 1..18: note = Artificial sequence related to HLA knockouts in cell therapy
  source 1..18: mol_type = other DNA
aagcagaggggtcagggc

SEQ ID NO: 16978 - DNA, 18 bp, synthetic construct
  misc_feature 1..18: note = Artificial sequence related to HLA knockouts in cell therapy
  source 1..18: mol_type = other DNA
agcagaggggtcagggcg

SEQ ID NO: 16979 - DNA, 18 bp, synthetic construct
  misc_feature 1..18: note = Artificial sequence related to HLA knockouts in cell therapy
  source 1..18: mol_type = other DNA
gcagaggggtcagggcga

SEQ ID NO: 16980 - DNA, 18 bp, synthetic construct
  misc_feature 1..18: note = Artificial sequence related to HLA knockouts in cell therapy
  source 1..18: mol_type = other DNA
cagaggggtcagggcgaa

SEQ ID NO: 16981 - DNA, 18 bp, synthetic construct
  misc_feature 1..18: note = Artificial sequence related to HLA knockouts in cell therapy
  source 1..18: mol_type = other DNA
agaggggtcagggcgaag

SEQ ID NO: 16982 - DNA, 18 bp, synthetic construct
  misc_feature 1..18: note = Artificial sequence related to HLA knockouts in cell therapy
  source 1..18: mol_type = other DNA
gaggggtcagggcgaagt

SEQ ID NO: 16983 - DNA, 18 bp, synthetic construct
  misc_feature 1..18: note = Artificial sequence related to HLA knockouts in cell therapy
  source 1..18: mol_type = other DNA
aggggtcagggcgaagtc

SEQ ID NO: 16984 - DNA, 18 bp, synthetic construct
  misc_feature 1..18: note = Artificial sequence related to HLA knockouts in cell therapy
  source 1..18: mol_type = other DNA
ggggtcagggcgaagtcc

SEQ ID NO: 16985 - DNA, 18 bp, synthetic construct
  misc_feature 1..18: note = Artificial sequence related to HLA knockouts in cell therapy
  source 1..18: mol_type = other DNA
gggtcagggcgaagtccc

SEQ ID NO: 16986 - DNA, 18 bp, synthetic construct
  misc_feature 1..18: note = Artificial sequence related to HLA knockouts in cell therapy
  source 1..18: mol_type = other DNA
ggtcagggcgaagtccca

SEQ ID NO: 16987 - DNA, 18 bp, synthetic construct
  misc_feature 1..18: note = Artificial sequence related to HLA knockouts in cell therapy
  source 1..18: mol_type = other DNA
gtcagggcgaagtcccag

SEQ ID NO: 16988 - DNA, 18 bp, synthetic construct
  misc_feature 1..18: note = Artificial sequence related to HLA knockouts in cell therapy
  source 1..18: mol_type = other DNA
tcagggcgaagtcccagg

SEQ ID NO: 16989 - DNA, 18 bp, synthetic construct
  misc_feature 1..18: note = Artificial sequence related to HLA knockouts in cell therapy
  source 1..18: mol_type = other DNA
cagggcgaagtcccaggg

SEQ ID NO: 16990 - DNA, 18 bp, synthetic construct
  misc_feature 1..18: note = Artificial sequence related to HLA knockouts in cell therapy
  source 1..18: mol_type = other DNA
agggcgaagtcccagggc

SEQ ID NO: 16991 - DNA, 18 bp, synthetic construct
  misc_feature 1..18: note = Artificial sequence related to HLA knockouts in cell therapy
  source 1..18: mol_type = other DNA
gggcgaagtcccagggcc

SEQ ID NO: 16992 - DNA, 18 bp, synthetic construct
  misc_feature 1..18: note = Artificial sequence related to HLA knockouts in cell therapy
  source 1..18: mol_type = other DNA
ggcgaagtcccagggccc

SEQ ID NO: 16993 - DNA, 18 bp, synthetic construct
  misc_feature 1..18: note = Artificial sequence related to HLA knockouts in cell therapy
  source 1..18: mol_type = other DNA
gcgaagtcccagggcccc

SEQ ID NO: 16994 - DNA, 18 bp, synthetic construct
  misc_feature 1..18: note = Artificial sequence related to HLA knockouts in cell therapy
  source 1..18: mol_type = other DNA
cgaagtcccagggcccca

SEQ ID NO: 16995 - DNA, 18 bp, synthetic construct
  misc_feature 1..18: note = Artificial sequence related to HLA knockouts in cell therapy
  source 1..18: mol_type = other DNA
gaagtcccagggccccag

SEQ ID NO: 16996 - DNA, 18 bp, synthetic construct
  misc_feature 1..18: note = Artificial sequence related to HLA knockouts in cell therapy
  source 1..18: mol_type = other DNA
aagtcccagggccccagg

SEQ ID NO: 16997 - DNA, 18 bp, synthetic construct
  misc_feature 1..18: note = Artificial sequence related to HLA knockouts in cell therapy
  source 1..18: mol_type = other DNA
agtcccagggccccaggc

SEQ ID NO: 16998 - DNA, 18 bp, synthetic construct
  misc_feature 1..18: note = Artificial sequence related to HLA knockouts in cell therapy
  source 1..18: mol_type = other DNA
gtcccagggccccaggcg

SEQ ID NO: 16999 - DNA, 18 bp, synthetic construct
  misc_feature 1..18: note = Artificial sequence related to HLA knockouts in cell therapy
  source 1..18: mol_type = other DNA
tcccagggccccaggcgt

SEQ ID NO: 17000 - DNA, 18 bp, synthetic construct
  misc_feature 1..18: note = Artificial sequence related to HLA knockouts in cell therapy
  source 1..18: mol_type = other DNA
cccagggccccaggcgtg

SEQ ID NO: 17001 - DNA, 18 bp, synthetic construct
  misc_feature 1..18: note = Artificial sequence related to HLA knockouts in cell therapy
  source 1..18: mol_type = other DNA
ccagggccccaggcgtgg

SEQ ID NO: 17002 - DNA, 18 bp, synthetic construct
  misc_feature 1..18: note = Artificial sequence related to HLA knockouts in cell therapy
  source 1..18: mol_type = other DNA
cagggccccaggcgtggc

SEQ ID NO: 17003 - DNA, 18 bp, synthetic construct
  misc_feature 1..18: note = Artificial sequence related to HLA knockouts in cell therapy
  source 1..18: mol_type = other DNA
agggccccaggcgtggct

SEQ ID NO: 17004 - DNA, 18 bp, synthetic construct
  misc_feature 1..18: note = Artificial sequence related to HLA knockouts in cell therapy
  source 1..18: mol_type = other DNA
gggccccaggcgtggctc

SEQ ID NO: 17005 - DNA, 18 bp, synthetic construct
  misc_feature 1..18: note = Artificial sequence related to HLA knockouts in cell therapy
  source 1..18: mol_type = other DNA
ggccccaggcgtggctct

SEQ ID NO: 17006 - DNA, 18 bp, synthetic construct
  misc_feature 1..18: note = Artificial sequence related to HLA knockouts in cell therapy
  source 1..18: mol_type = other DNA
gccccaggcgtggctctc

SEQ ID NO: 17007 - DNA, 18 bp, synthetic construct
  misc_feature 1..18: note = Artificial sequence related to HLA knockouts in cell therapy
  source 1..18: mol_type = other DNA
ccccaggcgtggctctca

SEQ ID NO: 17008 - DNA, 18 bp, synthetic construct
  misc_feature 1..18: note = Artificial sequence related to HLA knockouts in cell therapy
  source 1..18: mol_type = other DNA
cccaggcgtggctctcag

SEQ ID NO: 17009 - DNA, 18 bp, synthetic construct
  misc_feature 1..18: note = Artificial sequence related to HLA knockouts in cell therapy
  source 1..18: mol_type = other DNA
ccaggcgtggctctcagg

SEQ ID NO: 17010 - DNA, 18 bp, synthetic construct
  misc_feature 1..18: note = Artificial sequence related to HLA knockouts in cell therapy
  source 1..18: mol_type = other DNA
caggcgtggctctcaggg

SEQ ID NO: 17011 - DNA, 18 bp, synthetic construct
  misc_feature 1..18: note = Artificial sequence related to HLA knockouts in cell therapy
  source 1..18: mol_type = other DNA
aggcgtggctctcagggt

SEQ ID NO: 17012 - DNA, 18 bp, synthetic construct
  misc_feature 1..18: note = Artificial sequence related to HLA knockouts in cell therapy
  source 1..18: mol_type = other DNA
ggcgtggctctcagggtc

SEQ ID NO: 17013 - DNA, 18 bp, synthetic construct
  misc_feature 1..18: note = Artificial sequence related to HLA knockouts in cell therapy
  source 1..18: mol_type = other DNA
gcgtggctctcagggtct

SEQ ID NO: 17014 - DNA, 18 bp, synthetic construct
  misc_feature 1..18: note = Artificial sequence related to HLA knockouts in cell therapy
  source 1..18: mol_type = other DNA
cgtggctctcagggtctc

SEQ ID NO: 17015 - DNA, 18 bp, synthetic construct
  misc_feature 1..18: note = Artificial sequence related to HLA knockouts in cell therapy
  source 1..18: mol_type = other DNA
gtggctctcagggtctca

SEQ ID NO: 17016 - DNA, 18 bp, synthetic construct
  misc_feature 1..18: note = Artificial sequence related to HLA knockouts in cell therapy
  source 1..18: mol_type = other DNA
tggctctcagggtctcag

SEQ ID NO: 17017 - DNA, 18 bp, synthetic construct
  misc_feature 1..18: note = Artificial sequence related to HLA knockouts in cell therapy
  source 1..18: mol_type = other DNA
ggctctcagggtctcagg

SEQ ID NO: 17018 - DNA, 18 bp, synthetic construct
  misc_feature 1..18: note = Artificial sequence related to HLA knockouts in cell therapy
  source 1..18: mol_type = other DNA
gctctcagggtctcaggc

SEQ ID NO: 17019 - DNA, 18 bp, synthetic construct
  misc_feature 1..18: note = Artificial sequence related to HLA knockouts in cell therapy
  source 1..18: mol_type = other DNA
ctctcagggtctcaggcc

SEQ ID NO: 17020 - DNA, 18 bp, synthetic construct
  misc_feature 1..18: note = Artificial sequence related to HLA knockouts in cell therapy
  source 1..18: mol_type = other DNA
tctcagggtctcaggccc

SEQ ID NO: 17021 - DNA, 18 bp, synthetic construct
  misc_feature 1..18: note = Artificial sequence related to HLA knockouts in cell therapy
  source 1..18: mol_type = other DNA
ctcagggtctcaggcccc

SEQ ID NO: 17022 - DNA, 18 bp, synthetic construct
  misc_feature 1..18: note = Artificial sequence related to HLA knockouts in cell therapy
  source 1..18: mol_type = other DNA
tcagggtctcaggccccg

SEQ ID NO: 17023 - DNA, 18 bp, synthetic construct
  misc_feature 1..18: note = Artificial sequence related to HLA knockouts in cell therapy
  source 1..18: mol_type = other DNA
cagggtctcaggccccga

SEQ ID NO: 17024 - DNA, 18 bp, synthetic construct
  misc_feature 1..18: note = Artificial sequence related to HLA knockouts in cell therapy
  source 1..18: mol_type = other DNA
agggtctcaggccccgaa

SEQ ID NO: 17025 - DNA, 18 bp, synthetic construct
  misc_feature 1..18: note = Artificial sequence related to HLA knockouts in cell therapy
  source 1..18: mol_type = other DNA
gggtctcaggccccgaag

SEQ ID NO: 17026 - DNA, 18 bp, synthetic construct
  misc_feature 1..18: note = Artificial sequence related to HLA knockouts in cell therapy
  source 1..18: mol_type = other DNA
ggtctcaggccccgaagg

SEQ ID NO: 17027 - DNA, 18 bp, synthetic construct
  misc_feature 1..18: note = Artificial sequence related to HLA knockouts in cell therapy
  source 1..18: mol_type = other DNA
gtctcaggccccgaaggc

SEQ ID NO: 17028 - DNA, 18 bp, synthetic construct
  misc_feature 1..18: note = Artificial sequence related to HLA knockouts in cell therapy
  source 1..18: mol_type = other DNA
tctcaggccccgaaggcg

SEQ ID NO: 17029 - DNA, 18 bp, synthetic construct
  misc_feature 1..18: note = Artificial sequence related to HLA knockouts in cell therapy
  source 1..18: mol_type = other DNA
ctcaggccccgaaggcgg

SEQ ID NO: 17030 - DNA, 18 bp, synthetic construct
  misc_feature 1..18: note = Artificial sequence related to HLA knockouts in cell therapy
  source 1..18: mol_type = other DNA
tcaggccccgaaggcggt

SEQ ID NO: 17031 - DNA, 18 bp, synthetic construct
  misc_feature 1..18: note = Artificial sequence related to HLA knockouts in cell therapy
  source 1..18: mol_type = other DNA
caggccccgaaggcggtg

SEQ ID NO: 17032 - DNA, 18 bp, synthetic construct
  misc_feature 1..18: note = Artificial sequence related to HLA knockouts in cell therapy
  source 1..18: mol_type = other DNA
aggccccgaaggcggtgt

SEQ ID NO: 17033 - DNA, 18 bp, synthetic construct
  misc_feature 1..18: note = Artificial sequence related to HLA knockouts in cell therapy
  source 1..18: mol_type = other DNA
ggccccgaaggcggtgta

SEQ ID NO: 17034 - DNA, 18 bp, synthetic construct
  misc_feature 1..18: note = Artificial sequence related to HLA knockouts in cell therapy
  source 1..18: mol_type = other DNA
gccccgaaggcggtgtat

SEQ ID NO: 17035 - DNA, 18 bp, synthetic construct
  misc_feature 1..18: note = Artificial sequence related to HLA knockouts in cell therapy
  source 1..18: mol_type = other DNA
ccccgaaggcggtgtatg

SEQ ID NO: 17036 - DNA, 18 bp, synthetic construct
  misc_feature 1..18: note = Artificial sequence related to HLA knockouts in cell therapy
  source 1..18: mol_type = other DNA
cccgaaggcggtgtatgg

SEQ ID NO: 17037 - DNA, 18 bp, synthetic construct
  misc_feature 1..18: note = Artificial sequence related to HLA knockouts in cell therapy
  source 1..18: mol_type = other DNA
ccgaaggcggtgtatgga

SEQ ID NO: 17038 - DNA, 18 bp, synthetic construct
  misc_feature 1..18: note = Artificial sequence related to HLA knockouts in cell therapy
  source 1..18: mol_type = other DNA
ggcggtgtatggattggg

SEQ ID NO: 17039 - DNA, 18 bp, synthetic construct
  misc_feature 1..18: note = Artificial sequence related to HLA knockouts in cell therapy
  source 1..18: mol_type = other DNA
attggggagtcccagcct

SEQ ID NO: 17040 - DNA, 18 bp, synthetic construct
  misc_feature 1..18: note = Artificial sequence related to HLA knockouts in cell therapy
  source 1..18: mol_type = other DNA
ttggggagtcccagcctt

SEQ ID NO: 17041 - DNA, 18 bp, synthetic construct
  misc_feature 1..18: note = Artificial sequence related to HLA knockouts in cell therapy
  source 1..18: mol_type = other DNA
tcccagccttggggattc

SEQ ID NO: 17042 - DNA, 18 bp, synthetic construct
  misc_feature 1..18: note = Artificial sequence related to HLA knockouts in cell therapy
  source 1..18: mol_type = other DNA
cccagccttggggattcc

SEQ ID NO: 17043 - DNA, 18 bp, synthetic construct
  misc_feature 1..18: note = Artificial sequence related to HLA knockouts in cell therapy
  source 1..18: mol_type = other DNA
ccagccttggggattccc

SEQ ID NO: 17044 - DNA, 18 bp, synthetic construct
  misc_feature 1..18: note = Artificial sequence related to HLA knockouts in cell therapy
  source 1..18: mol_type = other DNA
cagccttggggattcccc

SEQ ID NO: 17045 - DNA, 18 bp, synthetic construct
  misc_feature 1..18: note = Artificial sequence related to HLA knockouts in cell therapy
  source 1..18: mol_type = other DNA
agccttggggattcccca

SEQ ID NO: 17046 - DNA, 18 bp, synthetic construct
  misc_feature 1..18: note = Artificial sequence related to HLA knockouts in cell therapy
  source 1..18: mol_type = other DNA
gccttggggattccccaa

SEQ ID NO: 17047 - DNA, 18 bp, synthetic construct
  misc_feature 1..18: note = Artificial sequence related to HLA knockouts in cell therapy
  source 1..18: mol_type = other DNA
ccttggggattccccaac

SEQ ID NO: 17048 - DNA, 18 bp, synthetic construct
  misc_feature 1..18: note = Artificial sequence related to HLA knockouts in cell therapy
  source 1..18: mol_type = other DNA
tggggattccccaactcc

SEQ ID NO: 17049 - DNA, 18 bp, synthetic construct
  misc_feature 1..18: note = Artificial sequence related to HLA knockouts in cell therapy
  source 1..18: mol_type = other DNA
ggggattccccaactccg

SEQ ID NO: 17050 - DNA, 18 bp, synthetic construct
  misc_feature 1..18: note = Artificial sequence related to HLA knockouts in cell therapy
  source 1..18: mol_type = other DNA
gggattccccaactccgc

SEQ ID NO: 17051 - DNA, 18 bp, synthetic construct
  misc_feature 1..18: note = Artificial sequence related to HLA knockouts in cell therapy
  source 1..18: mol_type = other DNA
ggattccccaactccgca

SEQ ID NO: 17052 - DNA, 18 bp, synthetic construct
  misc_feature 1..18: note = Artificial sequence related to HLA knockouts in cell therapy
  source 1..18: mol_type = other DNA
gattccccaactccgcag

SEQ ID NO: 17053 - DNA, 18 bp, synthetic construct
  misc_feature 1..18: note = Artificial sequence related to HLA knockouts in cell therapy
  source 1..18: mol_type = other DNA
ccccaactccgcagtttc

SEQ ID NO: 17054 - DNA, 18 bp, synthetic construct
  misc_feature 1..18: note = Artificial sequence related to HLA knockouts in cell therapy
  source 1..18: mol_type = other DNA
cctggatactcacgacgc

SEQ ID NO: 17055 - DNA, 18 bp, synthetic construct
  misc_feature 1..18: note = Artificial sequence related to HLA knockouts in cell therapy
  source 1..18: mol_type = other DNA
ctggatactcacgacgcg

SEQ ID NO: 17056 - DNA, 18 bp, synthetic construct
  misc_feature 1..18: note = Artificial sequence related to HLA knockouts in cell therapy
  source 1..18: mol_type = other DNA
tggatactcacgacgcgg

SEQ ID NO: 17057 - DNA, 18 bp, synthetic construct
  misc_feature 1..18: note = Artificial sequence related to HLA knockouts in cell therapy
  source 1..18: mol_type = other DNA
ggatactcacgacgcgga

SEQ ID NO: 17058 - DNA, 18 bp, synthetic construct
  misc_feature 1..18: note = Artificial sequence related to HLA knockouts in cell therapy
  source 1..18: mol_type = other DNA
gatactcacgacgcggac

SEQ ID NO: 17059 - DNA, 18 bp, synthetic construct
  misc_feature 1..18: note = Artificial sequence related to HLA knockouts in cell therapy
  source 1..18: mol_type = other DNA
atactcacgacgcggacc

SEQ ID NO: 17060 - DNA, 18 bp, synthetic construct
  misc_feature 1..18: note = Artificial sequence related to HLA knockouts in cell therapy
  source 1..18: mol_type = other DNA
tactcacgacgcggaccc

SEQ ID NO: 17061 - DNA, 18 bp, synthetic construct
  misc_feature 1..18: note = Artificial sequence related to HLA knockouts in cell therapy
  source 1..18: mol_type = other DNA
actcacgacgcggaccca

SEQ ID NO: 17062 - DNA, 18 bp, synthetic construct
  misc_feature 1..18: note = Artificial sequence related to HLA knockouts in cell therapy
  source 1..18: mol_type = other DNA
ctcacgacgcggacccag

SEQ ID NO: 17063 - DNA, 18 bp, synthetic construct
  misc_feature 1..18: note = Artificial sequence related to HLA knockouts in cell therapy
  source 1..18: mol_type = other DNA
tcacgacgcggacccagt

SEQ ID NO: 17064 - DNA, 18 bp, synthetic construct
  misc_feature 1..18: note = Artificial sequence related to HLA knockouts in cell therapy
  source 1..18: mol_type = other DNA
cacgacgcggacccagtt

SEQ ID NO: 17065 - DNA, 18 bp, synthetic construct
  misc_feature 1..18: note = Artificial sequence related to HLA knockouts in cell therapy
  source 1..18: mol_type = other DNA
acgacgcggacccagttc

SEQ ID NO: 17066 - DNA, 18 bp, synthetic construct
  misc_feature 1..18: note = Artificial sequence related to HLA knockouts in cell therapy
  source 1..18: mol_type = other DNA
cgacgcggacccagttct

SEQ ID NO: 17067 - DNA, 18 bp, synthetic construct
  misc_feature 1..18: note = Artificial sequence related to HLA knockouts in cell therapy
  source 1..18: mol_type = other DNA
gacgcggacccagttctc

SEQ ID NO: 17068 - DNA, 18 bp, synthetic construct
  misc_feature 1..18: note = Artificial sequence related to HLA knockouts in cell therapy
  source 1..18: mol_type = other DNA
acgcggacccagttctca

SEQ ID NO: 17069 - DNA, 18 bp, synthetic construct
  misc_feature 1..18: note = Artificial sequence related to HLA knockouts in cell therapy
  source 1..18: mol_type = other DNA
cgcggacccagttctcac

SEQ ID NO: 17070 - DNA, 18 bp, synthetic construct
  misc_feature 1..18: note = Artificial sequence related to HLA knockouts in cell therapy
  source 1..18: mol_type = other DNA
gcggacccagttctcact

SEQ ID NO: 17071 - DNA, 18 bp, synthetic construct
  misc_feature 1..18: note = Artificial sequence related to HLA knockouts in cell therapy
  source 1..18: mol_type = other DNA
cggacccagttctcactc

SEQ ID NO: 17072 - DNA, 18 bp, synthetic construct
  misc_feature 1..18: note = Artificial sequence related to HLA knockouts in cell therapy
  source 1..18: mol_type = other DNA
ggacccagttctcactcc

SEQ ID NO: 17073 - DNA, 18 bp, synthetic construct
  misc_feature 1..18: note = Artificial sequence related to HLA knockouts in cell therapy
  source 1..18: mol_type = other DNA
gacccagttctcactccc

SEQ ID NO: 17074 - DNA, 18 bp, synthetic construct
  misc_feature 1..18: note = Artificial sequence related to HLA knockouts in cell therapy
  source 1..18: mol_type = other DNA
cactcccattgggtgtcg

SEQ ID NO: 17075 - DNA, 18 bp, synthetic construct
  misc_feature 1..18: note = Artificial sequence related to HLA knockouts in cell therapy
  source 1..18: mol_type = other DNA
actcccattgggtgtcgg

SEQ ID NO: 17076 - DNA, 18 bp, synthetic construct
  misc_feature 1..18: note = Artificial sequence related to HLA knockouts in cell therapy
  source 1..18: mol_type = other DNA
ctcccattgggtgtcggg

SEQ ID NO: 17077 - DNA, 18 bp, synthetic construct
  misc_feature 1..18: note = Artificial sequence related to HLA knockouts in cell therapy
  source 1..18: mol_type = other DNA
tcccattgggtgtcgggt

SEQ ID NO: 17078 - DNA, 18 bp, synthetic construct
  misc_feature 1..18: note = Artificial sequence related to HLA knockouts in cell therapy
  source 1..18: mol_type = other DNA
cccattgggtgtcgggtt

SEQ ID NO: 17079 - DNA, 18 bp, synthetic construct
  misc_feature 1..18: note = Artificial sequence related to HLA knockouts in cell therapy
  source 1..18: mol_type = other DNA
tgggtgtcgggtttccag

SEQ ID NO: 17080 - DNA, 18 bp, synthetic construct
  misc_feature 1..18: note = Artificial sequence related to HLA knockouts in cell therapy
  source 1..18: mol_type = other DNA
gggtgtcgggtttccaga

SEQ ID NO: 17081 - DNA, 18 bp, synthetic construct
  misc_feature 1..18: note = Artificial sequence related to HLA knockouts in cell therapy
  source 1..18: mol_type = other DNA
ggtgtcgggtttccagag

SEQ ID NO: 17082 - DNA, 18 bp, synthetic construct
  misc_feature 1..18: note = Artificial sequence related to HLA knockouts in cell therapy
  source 1..18: mol_type = other DNA
cgggtttccagagaagcc

SEQ ID NO: 17083 - DNA, 18 bp, synthetic construct
  misc_feature 1..18: note = Artificial sequence related to HLA knockouts in cell therapy
  source 1..18: mol_type = other DNA
gccaatcagtgtcgtcgc

SEQ ID NO: 17084 - DNA, 18 bp, synthetic construct
  misc_feature 1..18: note = Artificial sequence related to HLA knockouts in cell therapy
  source 1..18: mol_type = other DNA
ccaatcagtgtcgtcgcg

SEQ ID NO: 17085 - DNA, 18 bp, synthetic construct
  misc_feature 1..18: note = Artificial sequence related to HLA knockouts in cell therapy
  source 1..18: mol_type = other DNA
caatcagtgtcgtcgcgg

SEQ ID NO: 17086 - DNA, 18 bp, synthetic construct
  misc_feature 1..18: note = Artificial sequence related to HLA knockouts in cell therapy
  source 1..18: mol_type = other DNA
atcagtgtcgtcgcggtc

SEQ ID NO: 17087 - DNA, 18 bp, synthetic construct
  misc_feature 1..18: note = Artificial sequence related to HLA knockouts in cell therapy
  source 1..18: mol_type = other DNA
tcagtgtcgtcgcggtcg

SEQ ID NO: 17088 - DNA, 18 bp, synthetic construct
  misc_feature 1..18: note = Artificial sequence related to HLA knockouts in cell therapy
  source 1..18: mol_type = other DNA
cagtgtcgtcgcggtcgc

SEQ ID NO: 17089 - DNA, 18 bp, synthetic construct
  misc_feature 1..18: note = Artificial sequence related to HLA knockouts in cell therapy
  source 1..18: mol_type = other DNA
agtgtcgtcgcggtcgcg

SEQ ID NO: 17090 - DNA, 18 bp, synthetic construct
  misc_feature 1..18: note = Artificial sequence related to HLA knockouts in cell therapy
  source 1..18: mol_type = other DNA
gtgtcgtcgcggtcgcgg

SEQ ID NO: 17091 - DNA, 18 bp, synthetic construct
  misc_feature 1..18: note = Artificial sequence related to HLA knockouts in cell therapy
  source 1..18: mol_type = other DNA
tgtcgtcgcggtcgcggt

SEQ ID NO: 17092 - DNA, 18 bp, synthetic construct
  misc_feature 1..18: note = Artificial sequence related to HLA knockouts in cell therapy
  source 1..18: mol_type = other DNA
gtcgtcgcggtcgcggtt

SEQ ID NO: 17093 - DNA, 18 bp, synthetic construct
  misc_feature 1..18: note = Artificial sequence related to HLA knockouts in cell therapy
  source 1..18: mol_type = other DNA
tcgtcgcggtcgcggttc

SEQ ID NO: 17094 - DNA, 18 bp, synthetic construct
  misc_feature 1..18: note = Artificial sequence related to HLA knockouts in cell therapy
  source 1..18: mol_type = other DNA
cgtcgcggtcgcggttct

SEQ ID NO: 17095 - DNA, 18 bp, synthetic construct
  misc_feature 1..18: note = Artificial sequence related to HLA knockouts in cell therapy
  source 1..18: mol_type = other DNA
gtcgcggtcgcggttcta

SEQ ID NO: 17096 - DNA, 18 bp, synthetic construct
  misc_feature 1..18: note = Artificial sequence related to HLA knockouts in cell therapy
  source 1..18: mol_type = other DNA
tcgcggtcgcggttctaa

SEQ ID NO: 17097 - DNA, 18 bp, synthetic construct
  misc_feature 1..18: note = Artificial sequence related to HLA knockouts in cell therapy
  source 1..18: mol_type = other DNA
cgcggtcgcggttctaaa

SEQ ID NO: 17098 - DNA, 18 bp, synthetic construct
  misc_feature 1..18: note = Artificial sequence related to HLA knockouts in cell therapy
  source 1..18: mol_type = other DNA
gcggtcgcggttctaaag

SEQ ID NO: 17099 - DNA, 18 bp, synthetic construct
  misc_feature 1..18: note = Artificial sequence related to HLA knockouts in cell therapy
  source 1..18: mol_type = other DNA
cgcggttctaaagtccgc

SEQ ID NO: 17100 - DNA, 18 bp, synthetic construct
  misc_feature 1..18: note = Artificial sequence related to HLA knockouts in cell therapy
  source 1..18: mol_type = other DNA
ctaaagtccgcacgcacc

SEQ ID NO: 17101 - DNA, 18 bp, synthetic construct
  misc_feature 1..18: note = Artificial sequence related to HLA knockouts in cell therapy
  source 1..18: mol_type = other DNA
taaagtccgcacgcaccc

SEQ ID NO: 17102 - DNA, 18 bp, synthetic construct
  misc_feature 1..18: note = Artificial sequence related to HLA knockouts in cell therapy
  source 1..18: mol_type = other DNA
aaagtccgcacgcaccca

SEQ ID NO: 17103 - DNA, 18 bp, synthetic construct
  misc_feature 1..18: note = Artificial sequence related to HLA knockouts in cell therapy
  source 1..18: mol_type = other DNA
aagtccgcacgcacccac

SEQ ID NO: 17104 - DNA, 18 bp, synthetic construct
  misc_feature 1..18: note = Artificial sequence related to HLA knockouts in cell therapy
  source 1..18: mol_type = other DNA
agtccgcacgcacccacc

SEQ ID NO: 17105 - DNA, 18 bp, synthetic construct
  misc_feature 1..18: note = Artificial sequence related to HLA knockouts in cell therapy
  source 1..18: mol_type = other DNA
gtccgcacgcacccaccg

SEQ ID NO: 17106 - DNA, 18 bp, synthetic construct
  misc_feature 1..18: note = Artificial sequence related to HLA knockouts in cell therapy
  source 1..18: mol_type = other DNA
tccgcacgcacccaccgg

SEQ ID NO: 17107 - DNA, 18 bp, synthetic construct
  misc_feature 1..18: note = Artificial sequence related to HLA knockouts in cell therapy
  source 1..18: mol_type = other DNA
ccgcacgcacccaccggg

SEQ ID NO: 17108 - DNA, 18 bp, synthetic construct
  misc_feature 1..18: note = Artificial sequence related to HLA knockouts in cell therapy
  source 1..18: mol_type = other DNA
cgcacgcacccaccggga

SEQ ID NO: 17109 - DNA, 18 bp, synthetic construct
  misc_feature 1..18: note = Artificial sequence related to HLA knockouts in cell therapy
  source 1..18: mol_type = other DNA
gcacgcacccaccgggac

SEQ ID NO: 17110 - DNA, 18 bp, synthetic construct
  misc_feature 1..18: note = Artificial sequence related to HLA knockouts in cell therapy
  source 1..18: mol_type = other DNA
cacgcacccaccgggact

SEQ ID NO: 17111 - DNA, 18 bp, synthetic construct
  misc_feature 1..18: note = Artificial sequence related to HLA knockouts in cell therapy
  source 1..18: mol_type = other DNA
acgcacccaccgggactc

SEQ ID NO: 17112 - DNA, 18 bp, synthetic construct
  misc_feature 1..18: note = Artificial sequence related to HLA knockouts in cell therapy
  source 1..18: mol_type = other DNA
cgcacccaccgggactca

SEQ ID NO: 17113 - DNA, 18 bp, synthetic construct
  misc_feature 1..18: note = Artificial sequence related to HLA knockouts in cell therapy
  source 1..18: mol_type = other DNA
gcacccaccgggactcag

SEQ ID NO: 17114 - DNA, 18 bp, synthetic construct
  misc_feature 1..18: note = Artificial sequence related to HLA knockouts in cell therapy
  source 1..18: mol_type = other DNA
cacccaccgggactcaga

SEQ ID NO: 17115 - DNA, 18 bp, synthetic construct
  misc_feature 1..18: note = Artificial sequence related to HLA knockouts in cell therapy
  source 1..18: mol_type = other DNA
acccaccgggactcagat

SEQ ID NO: 17116 - DNA, 18 bp, synthetic construct
  misc_feature 1..18: note = Artificial sequence related to HLA knockouts in cell therapy
  source 1..18: mol_type = other DNA
cccaccgggactcagatt

SEQ ID NO: 17117 - DNA, 18 bp, synthetic construct
  misc_feature 1..18: note = Artificial sequence related to HLA knockouts in cell therapy
  source 1..18: mol_type = other DNA
ccaccgggactcagattc

SEQ ID NO: 17118 - DNA, 18 bp, synthetic construct
  misc_feature 1..18: note = Artificial sequence related to HLA knockouts in cell therapy
  source 1..18: mol_type = other DNA
ccgggactcagattctcc

SEQ ID NO: 17119 - DNA, 18 bp, synthetic construct
  misc_feature 1..18: note = Artificial sequence related to HLA knockouts in cell therapy
  source 1..18: mol_type = other DNA
cgggactcagattctccc

SEQ ID NO: 17120 - DNA, 18 bp, synthetic construct
  misc_feature 1..18: note = Artificial sequence related to HLA knockouts in cell therapy
  source 1..18: mol_type = other DNA
gggactcagattctcccc

SEQ ID NO: 17121 - DNA, 18 bp, synthetic construct
  misc_feature 1..18: note = Artificial sequence related to HLA knockouts in cell therapy
  source 1..18: mol_type = other DNA
cagattctccccagacgc

SEQ ID NO: 17122 - DNA, 18 bp, synthetic construct
  misc_feature 1..18: note = Artificial sequence related to HLA knockouts in cell therapy
  source 1..18: mol_type = other DNA
agattctccccagacgcc

SEQ ID NO: 17123 - DNA, 18 bp, synthetic construct
  misc_feature 1..18: note = Artificial sequence related to HLA knockouts in cell therapy
  source 1..18: mol_type = other DNA
gattctccccagacgccg

SEQ ID NO: 17124 - DNA, 18 bp, synthetic construct
  misc_feature 1..18: note = Artificial sequence related to HLA knockouts in cell therapy
  source 1..18: mol_type = other DNA
attctccccagacgccga

SEQ ID NO: 17125 - DNA, 18 bp, synthetic construct
  misc_feature 1..18: note = Artificial sequence related to HLA knockouts in cell therapy
  source 1..18: mol_type = other DNA
ttctccccagacgccgag

SEQ ID NO: 17126 - DNA, 18 bp, synthetic construct
  misc_feature 1..18: note = Artificial sequence related to HLA knockouts in cell therapy
  source 1..18: mol_type = other DNA
tctccccagacgccgagg

SEQ ID NO: 17127 - DNA, 18 bp, synthetic construct
  misc_feature 1..18: note = Artificial sequence related to HLA knockouts in cell therapy
  source 1..18: mol_type = other DNA
ctccccagacgccgagga

SEQ ID NO: 17128 - DNA, 18 bp, synthetic construct
  misc_feature 1..18: note = Artificial sequence related to HLA knockouts in cell therapy
  source 1..18: mol_type = other DNA
tccccagacgccgaggat

SEQ ID NO: 17129 - DNA, 18 bp, synthetic construct
  misc_feature 1..18: note = Artificial sequence related to HLA knockouts in cell therapy
  source 1..18: mol_type = other DNA
ccccagacgccgaggatg

SEQ ID NO: 17130 - DNA, 18 bp, synthetic construct
  misc_feature 1..18: note = Artificial sequence related to HLA knockouts in cell therapy
  source 1..18: mol_type = other DNA
cccagacgccgaggatgg

SEQ ID NO: 17131 - DNA, 18 bp, synthetic construct
  misc_feature 1..18: note = Artificial sequence related to HLA knockouts in cell therapy
  source 1..18: mol_type = other DNA
ccagacgccgaggatggc

SEQ ID NO: 17132 - DNA, 18 bp, synthetic construct
  misc_feature 1..18: note = Artificial sequence related to HLA knockouts in cell therapy
  source 1..18: mol_type = other DNA
cagacgccgaggatggcc

SEQ ID NO: 17133 - DNA, 18 bp, synthetic construct
  misc_feature 1..18: note = Artificial sequence related to HLA knockouts in cell therapy
  source 1..18: mol_type = other DNA
agacgccgaggatggccg

SEQ ID NO: 17134 - DNA, 18 bp, synthetic construct
  misc_feature 1..18: note = Artificial sequence related to HLA knockouts in cell therapy
  source 1..18: mol_type = other DNA
gacgccgaggatggccgt

SEQ ID NO: 17135 - DNA, 18 bp, synthetic construct
  misc_feature 1..18: note = Artificial sequence related to HLA knockouts in cell therapy
  source 1..18: mol_type = other DNA
acgccgaggatggccgtc

SEQ ID NO: 17136 - DNA, 18 bp, synthetic construct
  misc_feature 1..18: note = Artificial sequence related to HLA knockouts in cell therapy
  source 1..18: mol_type = other DNA
cgccgaggatggccgtca

SEQ ID NO: 17137 - DNA, 18 bp, synthetic construct
  misc_feature 1..18: note = Artificial sequence related to HLA knockouts in cell therapy
  source 1..18: mol_type = other DNA
gccgaggatggccgtcat

SEQ ID NO: 17138 - DNA, 18 bp, synthetic construct
  misc_feature 1..18: note = Artificial sequence related to HLA knockouts in cell therapy
  source 1..18: mol_type = other DNA
ccgaggatggccgtcatg

SEQ ID NO: 17139 - DNA, 18 bp, synthetic construct
  misc_feature 1..18: note = Artificial sequence related to HLA knockouts in cell therapy
  source 1..18: mol_type = other DNA
cgaggatggccgtcatgg

SEQ ID NO: 17140 - DNA, 18 bp, synthetic construct
  misc_feature 1..18: note = Artificial sequence related to HLA knockouts in cell therapy
  source 1..18: mol_type = other DNA
gaggatggccgtcatggc

SEQ ID NO: 17141 - DNA, 18 bp, synthetic construct
  misc_feature 1..18: note = Artificial sequence related to HLA knockouts in cell therapy
  source 1..18: mol_type = other DNA
aggatggccgtcatggcg

SEQ ID NO: 17142 - DNA, 18 bp, synthetic construct
  misc_feature 1..18: note = Artificial sequence related to HLA knockouts in cell therapy
  source 1..18: mol_type = other DNA
ggatggccgtcatggcgc

SEQ ID NO: 17143 - DNA, 18 bp, synthetic construct
  misc_feature 1..18: note = Artificial sequence related to HLA knockouts in cell therapy
  source 1..18: mol_type = other DNA
gatggccgtcatggcgcc

SEQ ID NO: 17144 - DNA, 18 bp, synthetic construct
  misc_feature 1..18: note = Artificial sequence related to HLA knockouts in cell therapy
  source 1..18: mol_type = other DNA
atggccgtcatggcgccc

SEQ ID NO: 17145 - DNA, 18 bp, synthetic construct
  misc_feature 1..18: note = Artificial sequence related to HLA knockouts in cell therapy
  source 1..18: mol_type = other DNA
tggccgtcatggcgcccc

SEQ ID NO: 17146 - DNA, 18 bp, synthetic construct
  misc_feature 1..18: note = Artificial sequence related to HLA knockouts in cell therapy
  source 1..18: mol_type = other DNA
ggccgtcatggcgccccg

SEQ ID NO: 17147 - DNA, 18 bp, synthetic construct
  misc_feature 1..18: note = Artificial sequence related to HLA knockouts in cell therapy
  source 1..18: mol_type = other DNA
gccgtcatggcgccccga

SEQ ID NO: 17148 - DNA, 18 bp, synthetic construct
  misc_feature 1..18: note = Artificial sequence related to HLA knockouts in cell therapy
  source 1..18: mol_type = other DNA
ccgtcatggcgccccgaa

SEQ ID NO: 17149 - DNA, 18 bp, synthetic construct
  misc_feature 1..18: note = Artificial sequence related to HLA knockouts in cell therapy
  source 1..18: mol_type = other DNA
cgtcatggcgccccgaac

SEQ ID NO: 17150 - DNA, 18 bp, synthetic construct
  misc_feature 1..18: note = Artificial sequence related to HLA knockouts in cell therapy
  source 1..18: mol_type = other DNA
gtcatggcgccccgaacc

SEQ ID NO: 17151 - DNA, 18 bp, synthetic construct
  misc_feature 1..18: note = Artificial sequence related to HLA knockouts in cell therapy
  source 1..18: mol_type = other DNA
tcatggcgccccgaaccc

SEQ ID NO: 17152 - DNA, 18 bp, synthetic construct
  misc_feature 1..18: note = Artificial sequence related to HLA knockouts in cell therapy
  source 1..18: mol_type = other DNA
catggcgccccgaaccct

SEQ ID NO: 17153 - DNA, 18 bp, synthetic construct
  misc_feature 1..18: note = Artificial sequence related to HLA knockouts in cell therapy
  source 1..18: mol_type = other DNA
atggcgccccgaaccctc

SEQ ID NO: 17154 - DNA, 18 bp, synthetic construct
  misc_feature 1..18: note = Artificial sequence related to HLA knockouts in cell therapy
  source 1..18: mol_type = other DNA
tggcgccccgaaccctcg

SEQ ID NO: 17155 - DNA, 18 bp, synthetic construct
  misc_feature 1..18: note = Artificial sequence related to HLA knockouts in cell therapy
  source 1..18: mol_type = other DNA
ggcgccccgaaccctcgt

SEQ ID NO: 17156 - DNA, 18 bp, synthetic construct
  misc_feature 1..18: note = Artificial sequence related to HLA knockouts in cell therapy
  source 1..18: mol_type = other DNA
gcgccccgaaccctcgtc

SEQ ID NO: 17157 - DNA, 18 bp, synthetic construct
  misc_feature 1..18: note = Artificial sequence related to HLA knockouts in cell therapy
  source 1..18: mol_type = other DNA
cgccccgaaccctcgtcc

SEQ ID NO: 17158 - DNA, 18 bp, synthetic construct
  misc_feature 1..18: note = Artificial sequence related to HLA knockouts in cell therapy
  source 1..18: mol_type = other DNA
gccccgaaccctcgtcct

SEQ ID NO: 17159 - DNA, 18 bp, synthetic construct
  misc_feature 1..18: note = Artificial sequence related to HLA knockouts in cell therapy
  source 1..18: mol_type = other DNA
ccccgaaccctcgtcctg

SEQ ID NO: 17160 - DNA, 18 bp, synthetic construct
  misc_feature 1..18: note = Artificial sequence related to HLA knockouts in cell therapy
  source 1..18: mol_type = other DNA
cccgaaccctcgtcctgc

SEQ ID NO: 17161 - DNA, 18 bp, synthetic construct
  misc_feature 1..18: note = Artificial sequence related to HLA knockouts in cell therapy
  source 1..18: mol_type = other DNA
ccgaaccctcgtcctgct

SEQ ID NO: 17162 - DNA, 18 bp, synthetic construct
  misc_feature 1..18: note = Artificial sequence related to HLA knockouts in cell therapy
  source 1..18: mol_type = other DNA
cgaaccctcgtcctgcta

SEQ ID NO: 17163 - DNA, 18 bp, synthetic construct
  misc_feature 1..18: note = Artificial sequence related to HLA knockouts in cell therapy
  source 1..18: mol_type = other DNA
gaaccctcgtcctgctac

SEQ ID NO: 17164 - DNA, 18 bp, synthetic construct
  misc_feature 1..18: note = Artificial sequence related to HLA knockouts in cell therapy
  source 1..18: mol_type = other DNA
accctcgtcctgctactc

SEQ ID NO: 17165 - DNA, 18 bp, synthetic construct
  misc_feature 1..18: note = Artificial sequence related to HLA knockouts in cell therapy
  source 1..18: mol_type = other DNA
ccctcgtcctgctactct

SEQ ID NO: 17166 - DNA, 18 bp, synthetic construct
  misc_feature 1..18: note = Artificial sequence related to HLA knockouts in cell therapy
  source 1..18: mol_type = other DNA
cctcgtcctgctactctc

SEQ ID NO: 17167 - DNA, 18 bp, synthetic construct
  misc_feature 1..18: note = Artificial sequence related to HLA knockouts in cell therapy
  source 1..18: mol_type = other DNA
ctcgtcctgctactctcg

SEQ ID NO: 17168 - DNA, 18 bp, synthetic construct
  misc_feature 1..18: note = Artificial sequence related to HLA knockouts in cell therapy
  source 1..18: mol_type = other DNA
tcgtcctgctactctcgg

SEQ ID NO: 17169 - DNA, 18 bp, synthetic construct
  misc_feature 1..18: note = Artificial sequence related to HLA knockouts in cell therapy
  source 1..18: mol_type = other DNA
cgtcctgctactctcggg

SEQ ID NO: 17170 - DNA, 18 bp, synthetic construct
  misc_feature 1..18: note = Artificial sequence related to HLA knockouts in cell therapy
  source 1..18: mol_type = other DNA
gtcctgctactctcgggg

SEQ ID NO: 17171 - DNA, 18 bp, synthetic construct
  misc_feature 1..18: note = Artificial sequence related to HLA knockouts in cell therapy
  source 1..18: mol_type = other DNA
tcctgctactctcggggg

SEQ ID NO: 17172 - DNA, 18 bp, synthetic construct
  misc_feature 1..18: note = Artificial sequence related to HLA knockouts in cell therapy
  source 1..18: mol_type = other DNA
cctgctactctcgggggc

SEQ ID NO: 17173 - DNA, 18 bp, synthetic construct
  misc_feature 1..18: note = Artificial sequence related to HLA knockouts in cell therapy
  source 1..18: mol_type = other DNA
ctgctactctcgggggct

SEQ ID NO: 17174 - DNA, 18 bp, synthetic construct
  misc_feature 1..18: note = Artificial sequence related to HLA knockouts in cell therapy
  source 1..18: mol_type = other DNA
tgctactctcgggggctc

SEQ ID NO: 17175 - DNA, 18 bp, synthetic construct
  misc_feature 1..18: note = Artificial sequence related to HLA knockouts in cell therapy
  source 1..18: mol_type = other DNA
gctactctcgggggctct

SEQ ID NO: 17176 - DNA, 18 bp, synthetic construct
  misc_feature 1..18: note = Artificial sequence related to HLA knockouts in cell therapy
  source 1..18: mol_type = other DNA
ctactctcgggggctctg

SEQ ID NO: 17177 - DNA, 18 bp, synthetic construct
  misc_feature 1..18: note = Artificial sequence related to HLA knockouts in cell therapy
  source 1..18: mol_type = other DNA
tactctcgggggctctgg

SEQ ID NO: 17178 - DNA, 18 bp, synthetic construct
  misc_feature 1..18: note = Artificial sequence related to HLA knockouts in cell therapy
  source 1..18: mol_type = other DNA
actctcgggggctctggc

SEQ ID NO: 17179 - DNA, 18 bp, synthetic construct
  misc_feature 1..18: note = Artificial sequence related to HLA knockouts in cell therapy
  source 1..18: mol_type = other DNA
ctctcgggggctctggcc

SEQ ID NO: 17180 - DNA, 18 bp, synthetic construct
  misc_feature 1..18: note = Artificial sequence related to HLA knockouts in cell therapy
  source 1..18: mol_type = other DNA
tctcgggggctctggccc

SEQ ID NO: 17181 - DNA, 18 bp, synthetic construct
  misc_feature 1..18: note = Artificial sequence related to HLA knockouts in cell therapy
  source 1..18: mol_type = other DNA
ctcgggggctctggccct

SEQ ID NO: 17182 - DNA, 18 bp, synthetic construct
  misc_feature 1..18: note = Artificial sequence related to HLA knockouts in cell therapy
  source 1..18: mol_type = other DNA
tcgggggctctggccctg

SEQ ID NO: 17183 - DNA, 18 bp, synthetic construct
  misc_feature 1..18: note = Artificial sequence related to HLA knockouts in cell therapy
  source 1..18: mol_type = other DNA
cgggggctctggccctga

SEQ ID NO: 17184 - DNA, 18 bp, synthetic construct
  misc_feature 1..18: note = Artificial sequence related to HLA knockouts in cell therapy
  source 1..18: mol_type = other DNA
gggggctctggccctgac

SEQ ID NO: 17185 - DNA, 18 bp, synthetic construct
  misc_feature 1..18: note = Artificial sequence related to HLA knockouts in cell therapy
  source 1..18: mol_type = other DNA
ggggctctggccctgacc

SEQ ID NO: 17186 - DNA, 18 bp, synthetic construct
  misc_feature 1..18: note = Artificial sequence related to HLA knockouts in cell therapy
  source 1..18: mol_type = other DNA
gggctctggccctgaccc

SEQ ID NO: 17187 - DNA, 18 bp, synthetic construct
  misc_feature 1..18: note = Artificial sequence related to HLA knockouts in cell therapy
  source 1..18: mol_type = other DNA
ggctctggccctgaccca

SEQ ID NO: 17188 - DNA, 18 bp, synthetic construct
  misc_feature 1..18: note = Artificial sequence related to HLA knockouts in cell therapy
  source 1..18: mol_type = other DNA
gctctggccctgacccag

SEQ ID NO: 17189 - DNA, 18 bp, synthetic construct
  misc_feature 1..18: note = Artificial sequence related to HLA knockouts in cell therapy
  source 1..18: mol_type = other DNA
ctctggccctgacccaga

SEQ ID NO: 17190 - DNA, 18 bp, synthetic construct
  misc_feature 1..18: note = Artificial sequence related to HLA knockouts in cell therapy
  source 1..18: mol_type = other DNA
tctggccctgacccagac

SEQ ID NO: 17191 - DNA, 18 bp, synthetic construct
  misc_feature 1..18: note = Artificial sequence related to HLA knockouts in cell therapy
  source 1..18: mol_type = other DNA
ctggccctgacccagacc

SEQ ID NO: 17192 - DNA, 18 bp, synthetic construct
  misc_feature 1..18: note = Artificial sequence related to HLA knockouts in cell therapy
  source 1..18: mol_type = other DNA
tggccctgacccagacct

SEQ ID NO: 17193 - DNA, 18 bp, synthetic construct
  misc_feature 1..18: note = Artificial sequence related to HLA knockouts in cell therapy
  source 1..18: mol_type = other DNA
ggccctgacccagacctg

SEQ ID NO: 17194 - DNA, 18 bp, synthetic construct
  misc_feature 1..18: note = Artificial sequence related to HLA knockouts in cell therapy
  source 1..18: mol_type = other DNA
gccctgacccagacctgg

SEQ ID NO: 17195 - DNA, 18 bp, synthetic construct
  misc_feature 1..18: note = Artificial sequence related to HLA knockouts in cell therapy
  source 1..18: mol_type = other DNA
ccctgacccagacctggg

SEQ ID NO: 17196 - DNA, 18 bp, synthetic construct
  misc_feature 1..18: note = Artificial sequence related to HLA knockouts in cell therapy
  source 1..18: mol_type = other DNA
cctgacccagacctgggc

SEQ ID NO: 17197 - DNA, 18 bp, synthetic construct
  misc_feature 1..18: note = Artificial sequence related to HLA knockouts in cell therapy
  source 1..18: mol_type = other DNA
ctgacccagacctgggcg

SEQ ID NO: 17198 - DNA, 18 bp, synthetic construct
  misc_feature 1..18: note = Artificial sequence related to HLA knockouts in cell therapy
  source 1..18: mol_type = other DNA
tgacccagacctgggcgg

SEQ ID NO: 17199 - DNA, 18 bp, synthetic construct
  misc_feature 1..18: note = Artificial sequence related to HLA knockouts in cell therapy
  source 1..18: mol_type = other DNA
gacccagacctgggcggg

SEQ ID NO: 17200 - DNA, 18 bp, synthetic construct
  misc_feature 1..18: note = Artificial sequence related to HLA knockouts in cell therapy
  source 1..18: mol_type = other DNA
acccagacctgggcgggc

SEQ ID NO: 17201 - DNA, 18 bp, synthetic construct
  misc_feature 1..18: note = Artificial sequence related to HLA knockouts in cell therapy
  source 1..18: mol_type = other DNA
cccagacctgggcgggct

SEQ ID NO: 17202 - DNA, 18 bp, synthetic construct
  misc_feature 1..18: note = Artificial sequence related to HLA knockouts in cell therapy
  source 1..18: mol_type = other DNA
ccagacctgggcgggctc

SEQ ID NO: 17203 - DNA, 18 bp, synthetic construct
  misc_feature 1..18: note = Artificial sequence related to HLA knockouts in cell therapy
  source 1..18: mol_type = other DNA
cagacctgggcgggctct

SEQ ID NO: 17204 - DNA, 18 bp, synthetic construct
  misc_feature 1..18: note = Artificial sequence related to HLA knockouts in cell therapy
  source 1..18: mol_type = other DNA
agacctgggcgggctctc

SEQ ID NO: 17205 - DNA, 18 bp, synthetic construct
  misc_feature 1..18: note = Artificial sequence related to HLA knockouts in cell therapy
  source 1..18: mol_type = other DNA
gacctgggcgggctctca

SEQ ID NO: 17206 - DNA, 18 bp, synthetic construct
  misc_feature 1..18: note = Artificial sequence related to HLA knockouts in cell therapy
  source 1..18: mol_type = other DNA
acctgggcgggctctcac

SEQ ID NO: 17207 - DNA, 18 bp, synthetic construct
  misc_feature 1..18: note = Artificial sequence related to HLA knockouts in cell therapy
  source 1..18: mol_type = other DNA
cctgggcgggctctcact

SEQ ID NO: 17208 - DNA, 18 bp, synthetic construct
  misc_feature 1..18: note = Artificial sequence related to HLA knockouts in cell therapy
  source 1..18: mol_type = other DNA
ctgggcgggctctcactc

SEQ ID NO: 17209 - DNA, 18 bp, synthetic construct
  misc_feature 1..18: note = Artificial sequence related to HLA knockouts in cell therapy
  source 1..18: mol_type = other DNA
tgggcgggctctcactcc

SEQ ID NO: 17210 - DNA, 18 bp, synthetic construct
  misc_feature 1..18: note = Artificial sequence related to HLA knockouts in cell therapy
  source 1..18: mol_type = other DNA
gggcgggctctcactcca

SEQ ID NO: 17211 - DNA, 18 bp, synthetic construct
  misc_feature 1..18: note = Artificial sequence related to HLA knockouts in cell therapy
  source 1..18: mol_type = other DNA
ggcgggctctcactccat

SEQ ID NO: 17212 - DNA, 18 bp, synthetic construct
  misc_feature 1..18: note = Artificial sequence related to HLA knockouts in cell therapy
  source 1..18: mol_type = other DNA
gcgggctctcactccatg

SEQ ID NO: 17213 - DNA, 18 bp, synthetic construct
  misc_feature 1..18: note = Artificial sequence related to HLA knockouts in cell therapy
  source 1..18: mol_type = other DNA
cgggctctcactccatga

SEQ ID NO: 17214 - DNA, 18 bp, synthetic construct
  misc_feature 1..18: note = Artificial sequence related to HLA knockouts in cell therapy
  source 1..18: mol_type = other DNA
gggctctcactccatgag

SEQ ID NO: 17215 - DNA, 18 bp, synthetic construct
  misc_feature 1..18: note = Artificial sequence related to HLA knockouts in cell therapy
  source 1..18: mol_type = other DNA
ggctctcactccatgagg

SEQ ID NO: 17216 - DNA, 18 bp, synthetic construct
  misc_feature 1..18: note = Artificial sequence related to HLA knockouts in cell therapy
  source 1..18: mol_type = other DNA
cttcacatccgtgtcccg

SEQ ID NO: 17217 - DNA, 18 bp, synthetic construct
  misc_feature 1..18: note = Artificial sequence related to HLA knockouts in cell therapy
  source 1..18: mol_type = other DNA
ttcacatccgtgtcccgg

SEQ ID NO: 17218 - DNA, 18 bp, synthetic construct
  misc_feature 1..18: note = Artificial sequence related to HLA knockouts in cell therapy
  source 1..18: mol_type = other DNA
tcacatccgtgtcccggc

SEQ ID NO: 17219 - DNA, 18 bp, synthetic construct
  misc_feature 1..18: note = Artificial sequence related to HLA knockouts in cell therapy
  source 1..18: mol_type = other DNA
cacatccgtgtcccggcc

SEQ ID NO: 17220 - DNA, 18 bp, synthetic construct
  misc_feature 1..18: note = Artificial sequence related to HLA knockouts in cell therapy
  source 1..18: mol_type = other DNA
acatccgtgtcccggccc

SEQ ID NO: 17221 - DNA, 18 bp, synthetic construct
  misc_feature 1..18: note = Artificial sequence related to HLA knockouts in cell therapy
  source 1..18: mol_type = other DNA
catccgtgtcccggcccg

SEQ ID NO: 17222 - DNA, 18 bp, synthetic construct
  misc_feature 1..18: note = Artificial sequence related to HLA knockouts in cell therapy
  source 1..18: mol_type = other DNA
atccgtgtcccggcccgg

SEQ ID NO: 17223 - DNA, 18 bp, synthetic construct
  misc_feature 1..18: note = Artificial sequence related to HLA knockouts in cell therapy
  source 1..18: mol_type = other DNA
tccgtgtcccggcccggc

SEQ ID NO: 17224 - DNA, 18 bp, synthetic construct
  misc_feature 1..18: note = Artificial sequence related to HLA knockouts in cell therapy
  source 1..18: mol_type = other DNA
ccgtgtcccggcccggcc

SEQ ID NO: 17225 - DNA, 18 bp, synthetic construct
  misc_feature 1..18: note = Artificial sequence related to HLA knockouts in cell therapy
  source 1..18: mol_type = other DNA
cgtgtcccggcccggccg

SEQ ID NO: 17226 - DNA, 18 bp, synthetic construct
  misc_feature 1..18: note = Artificial sequence related to HLA knockouts in cell therapy
  source 1..18: mol_type = other DNA
gtgtcccggcccggccgc

SEQ ID NO: 17227 - DNA, 18 bp, synthetic construct
  misc_feature 1..18: note = Artificial sequence related to HLA knockouts in cell therapy
  source 1..18: mol_type = other DNA
tgtcccggcccggccgcg

SEQ ID NO: 17228 - DNA, 18 bp, synthetic construct
  misc_feature 1..18: note = Artificial sequence related to HLA knockouts in cell therapy
  source 1..18: mol_type = other DNA
gtcccggcccggccgcgg

SEQ ID NO: 17229 - DNA, 18 bp, synthetic construct
  misc_feature 1..18: note = Artificial sequence related to HLA knockouts in cell therapy
  source 1..18: mol_type = other DNA
tcccggcccggccgcggg

SEQ ID NO: 17230 - DNA, 18 bp, synthetic construct
  misc_feature 1..18: note = Artificial sequence related to HLA knockouts in cell therapy
  source 1..18: mol_type = other DNA
cccggcccggccgcgggg

SEQ ID NO: 17231 - DNA, 18 bp, synthetic construct
  misc_feature 1..18: note = Artificial sequence related to HLA knockouts in cell therapy
  source 1..18: mol_type = other DNA
ccggcccggccgcgggga

SEQ ID NO: 17232 - DNA, 18 bp, synthetic construct
  misc_feature 1..18: note = Artificial sequence related to HLA knockouts in cell therapy
  source 1..18: mol_type = other DNA
cggcccggccgcggggag

SEQ ID NO: 17233 - DNA, 18 bp, synthetic construct
  misc_feature 1..18: note = Artificial sequence related to HLA knockouts in cell therapy
  source 1..18: mol_type = other DNA
ggcccggccgcggggagc

SEQ ID NO: 17234 - DNA, 18 bp, synthetic construct
  misc_feature 1..18: note = Artificial sequence related to HLA knockouts in cell therapy
  source 1..18: mol_type = other DNA
gcccggccgcggggagcc

SEQ ID NO: 17235 - DNA, 18 bp, synthetic construct
  misc_feature 1..18: note = Artificial sequence related to HLA knockouts in cell therapy
  source 1..18: mol_type = other DNA
cccggccgcggggagccc

SEQ ID NO: 17236 - DNA, 18 bp, synthetic construct
  misc_feature 1..18: note = Artificial sequence related to HLA knockouts in cell therapy
  source 1..18: mol_type = other DNA
ccggccgcggggagcccc

SEQ ID NO: 17237 - DNA, 18 bp, synthetic construct
  misc_feature 1..18: note = Artificial sequence related to HLA knockouts in cell therapy
  source 1..18: mol_type = other DNA
cggccgcggggagccccg

SEQ ID NO: 17238 - DNA, 18 bp, synthetic construct
  misc_feature 1..18: note = Artificial sequence related to HLA knockouts in cell therapy
  source 1..18: mol_type = other DNA
ggccgcggggagccccgc

SEQ ID NO: 17239 - DNA, 18 bp, synthetic construct
  misc_feature 1..18: note = Artificial sequence related to HLA knockouts in cell therapy
  source 1..18: mol_type = other DNA
gccgcggggagccccgct

SEQ ID NO: 17240 - DNA, 18 bp, synthetic construct
  misc_feature 1..18: note = Artificial sequence related to HLA knockouts in cell therapy
  source 1..18: mol_type = other DNA
ccgcggggagccccgctt

SEQ ID NO: 17241 - DNA, 18 bp, synthetic construct
  misc_feature 1..18: note = Artificial sequence related to HLA knockouts in cell therapy
  source 1..18: mol_type = other DNA
cgcggggagccccgcttc

SEQ ID NO: 17242 - DNA, 18 bp, synthetic construct
  misc_feature 1..18: note = Artificial sequence related to HLA knockouts in cell therapy
  source 1..18: mol_type = other DNA
gcggggagccccgcttca

SEQ ID NO: 17243 - DNA, 18 bp, synthetic construct
  misc_feature 1..18: note = Artificial sequence related to HLA knockouts in cell therapy
  source 1..18: mol_type = other DNA
cggggagccccgcttcat

SEQ ID NO: 17244 - DNA, 18 bp, synthetic construct
  misc_feature 1..18: note = Artificial sequence related to HLA knockouts in cell therapy
  source 1..18: mol_type = other DNA
ggggagccccgcttcatc

SEQ ID NO: 17245 - DNA, 18 bp, synthetic construct
  misc_feature 1..18: note = Artificial sequence related to HLA knockouts in cell therapy
  source 1..18: mol_type = other DNA
gggagccccgcttcatcg

SEQ ID NO: 17246 - DNA, 18 bp, synthetic construct
  misc_feature 1..18: note = Artificial sequence related to HLA knockouts in cell therapy
  source 1..18: mol_type = other DNA
ggagccccgcttcatcgc

SEQ ID NO: 17247 - DNA, 18 bp, synthetic construct
  misc_feature 1..18: note = Artificial sequence related to HLA knockouts in cell therapy
  source 1..18: mol_type = other DNA
gagccccgcttcatcgca

SEQ ID NO: 17248 - DNA, 18 bp, synthetic construct
  misc_feature 1..18: note = Artificial sequence related to HLA knockouts in cell therapy
  source 1..18: mol_type = other DNA
agccccgcttcatcgcag

SEQ ID NO: 17249 - DNA, 18 bp, synthetic construct
  misc_feature 1..18: note = Artificial sequence related to HLA knockouts in cell therapy
  source 1..18: mol_type = other DNA
gccccgcttcatcgcagt

SEQ ID NO: 17250 - DNA, 18 bp, synthetic construct
  misc_feature 1..18: note = Artificial sequence related to HLA knockouts in cell therapy
  source 1..18: mol_type = other DNA
ccccgcttcatcgcagtg

SEQ ID NO: 17251 - DNA, 18 bp, synthetic construct
  misc_feature 1..18: note = Artificial sequence related to HLA knockouts in cell therapy
  source 1..18: mol_type = other DNA
cccgcttcatcgcagtgg

SEQ ID NO: 17252 - DNA, 18 bp, synthetic construct
  misc_feature 1..18: note = Artificial sequence related to HLA knockouts in cell therapy
  source 1..18: mol_type = other DNA
ccgcttcatcgcagtggg

SEQ ID NO: 17253 - DNA, 18 bp, synthetic construct
  misc_feature 1..18: note = Artificial sequence related to HLA knockouts in cell therapy
  source 1..18: mol_type = other DNA
cgcttcatcgcagtgggc

SEQ ID NO: 17254 - DNA, 18 bp, synthetic construct
  misc_feature 1..18: note = Artificial sequence related to HLA knockouts in cell therapy
  source 1..18: mol_type = other DNA
gcttcatcgcagtgggct

SEQ ID NO: 17255 - DNA, 18 bp, synthetic construct
  misc_feature 1..18: note = Artificial sequence related to HLA knockouts in cell therapy
  source 1..18: mol_type = other DNA
tcatcgcagtgggctacg

SEQ ID NO: 17256 - DNA, 18 bp, synthetic construct
  misc_feature 1..18: note = Artificial sequence related to HLA knockouts in cell therapy
  source 1..18: mol_type = other DNA
catcgcagtgggctacgt

SEQ ID NO: 17257 - DNA, 18 bp, synthetic construct
  misc_feature 1..18: note = Artificial sequence related to HLA knockouts in cell therapy
  source 1..18: mol_type = other DNA
atcgcagtgggctacgtg

SEQ ID NO: 17258 - DNA, 18 bp, synthetic construct
  misc_feature 1..18: note = Artificial sequence related to HLA knockouts in cell therapy
  source 1..18: mol_type = other DNA
tcgcagtgggctacgtgg

SEQ ID NO: 17259 - DNA, 18 bp, synthetic construct
  misc_feature 1..18: note = Artificial sequence related to HLA knockouts in cell therapy
  source 1..18: mol_type = other DNA
cgcagtgggctacgtgga

SEQ ID NO: 17260 - DNA, 18 bp, synthetic construct
  misc_feature 1..18: note = Artificial sequence related to HLA knockouts in cell therapy
  source 1..18: mol_type = other DNA
gcagtgggctacgtggac

SEQ ID NO: 17261 - DNA, 18 bp, synthetic construct
  misc_feature 1..18: note = Artificial sequence related to HLA knockouts in cell therapy
  source 1..18: mol_type = other DNA
cagtgggctacgtggacg

SEQ ID NO: 17262 - DNA, 18 bp, synthetic construct
  misc_feature 1..18: note = Artificial sequence related to HLA knockouts in cell therapy
  source 1..18: mol_type = other DNA
agtgggctacgtggacga

SEQ ID NO: 17263 - DNA, 18 bp, synthetic construct
  misc_feature 1..18: note = Artificial sequence related to HLA knockouts in cell therapy
  source 1..18: mol_type = other DNA
gtgggctacgtggacgac

SEQ ID NO: 17264 - DNA, 18 bp, synthetic construct
  misc_feature 1..18: note = Artificial sequence related to HLA knockouts in cell therapy
  source 1..18: mol_type = other DNA
tgggctacgtggacgaca

SEQ ID NO: 17265 - DNA, 18 bp, synthetic construct
  misc_feature 1..18: note = Artificial sequence related to HLA knockouts in cell therapy
  source 1..18: mol_type = other DNA
gggctacgtggacgacac

SEQ ID NO: 17266 - DNA, 18 bp, synthetic construct
  misc_feature 1..18: note = Artificial sequence related to HLA knockouts in cell therapy
  source 1..18: mol_type = other DNA
ggctacgtggacgacacg

SEQ ID NO: 17267 - DNA, 18 bp, synthetic construct
  misc_feature 1..18: note = Artificial sequence related to HLA knockouts in cell therapy
  source 1..18: mol_type = other DNA
gctacgtggacgacacgc

SEQ ID NO: 17268 - DNA, 18 bp, synthetic construct
  misc_feature 1..18: note = Artificial sequence related to HLA knockouts in cell therapy
  source 1..18: mol_type = other DNA
ctacgtggacgacacgca

SEQ ID NO: 17269 - DNA, 18 bp, synthetic construct
  misc_feature 1..18: note = Artificial sequence related to HLA knockouts in cell therapy
  source 1..18: mol_type = other DNA
tacgtggacgacacgcag

SEQ ID NO: 17270 - DNA, 18 bp, synthetic construct
  misc_feature 1..18: note = Artificial sequence related to HLA knockouts in cell therapy
  source 1..18: mol_type = other DNA
acgtggacgacacgcagt

SEQ ID NO: 17271 - DNA, 18 bp, synthetic construct
  misc_feature 1..18: note = Artificial sequence related to HLA knockouts in cell therapy
  source 1..18: mol_type = other DNA
cgtggacgacacgcagtt

SEQ ID NO: 17272 - DNA, 18 bp, synthetic construct
  misc_feature 1..18: note = Artificial sequence related to HLA knockouts in cell therapy
  source 1..18: mol_type = other DNA
gtggacgacacgcagttc

SEQ ID NO: 17273 - DNA, 18 bp, synthetic construct
  misc_feature 1..18: note = Artificial sequence related to HLA knockouts in cell therapy
  source 1..18: mol_type = other DNA
tggacgacacgcagttcg

SEQ ID NO: 17274 - DNA, 18 bp, synthetic construct
  misc_feature 1..18: note = Artificial sequence related to HLA knockouts in cell therapy
  source 1..18: mol_type = other DNA
ggacgacacgcagttcgt

SEQ ID NO: 17275 - DNA, 18 bp, synthetic construct
  misc_feature 1..18: note = Artificial sequence related to HLA knockouts in cell therapy
  source 1..18: mol_type = other DNA
gacgacacgcagttcgtg

SEQ ID NO: 17276 - DNA, 18 bp, synthetic construct
  misc_feature 1..18: note = Artificial sequence related to HLA knockouts in cell therapy
  source 1..18: mol_type = other DNA
acgacacgcagttcgtgc

SEQ ID NO: 17277 - DNA, 18 bp, synthetic construct
  misc_feature 1..18: note = Artificial sequence related to HLA knockouts in cell therapy
  source 1..18: mol_type = other DNA
cgacacgcagttcgtgcg

SEQ ID NO: 17278 - DNA, 18 bp, synthetic construct
  misc_feature 1..18: note = Artificial sequence related to HLA knockouts in cell therapy
  source 1..18: mol_type = other DNA
gacacgcagttcgtgcgg

SEQ ID NO: 17279 - DNA, 18 bp, synthetic construct
  misc_feature 1..18: note = Artificial sequence related to HLA knockouts in cell therapy
  source 1..18: mol_type = other DNA
acacgcagttcgtgcggt

SEQ ID NO: 17280 - DNA, 18 bp, synthetic construct
  misc_feature 1..18: note = Artificial sequence related to HLA knockouts in cell therapy
  source 1..18: mol_type = other DNA
cacgcagttcgtgcggtt

SEQ ID NO: 17281 - DNA, 18 bp, synthetic construct
  misc_feature 1..18: note = Artificial sequence related to HLA knockouts in cell therapy
  source 1..18: mol_type = other DNA
acgcagttcgtgcggttc

SEQ ID NO: 17282 - DNA, 18 bp, synthetic construct
  misc_feature 1..18: note = Artificial sequence related to HLA knockouts in cell therapy
  source 1..18: mol_type = other DNA
cgcagttcgtgcggttcg

SEQ ID NO: 17283 - DNA, 18 bp, synthetic construct
  misc_feature 1..18: note = Artificial sequence related to HLA knockouts in cell therapy
  source 1..18: mol_type = other DNA
gcagttcgtgcggttcga

SEQ ID NO: 17284 - DNA, 18 bp, synthetic construct
  misc_feature 1..18: note = Artificial sequence related to HLA knockouts in cell therapy
  source 1..18: mol_type = other DNA
cagttcgtgcggttcgac

SEQ ID NO: 17285 - DNA, 18 bp, synthetic construct
  misc_feature 1..18: note = Artificial sequence related to HLA knockouts in cell therapy
  source 1..18: mol_type = other DNA
gttcgtgcggttcgacag

SEQ ID NO: 17286 - DNA, 18 bp, synthetic construct
  misc_feature 1..18: note = Artificial sequence related to HLA knockouts in cell therapy
  source 1..18: mol_type = other DNA
ttcgtgcggttcgacagc

SEQ ID NO: 17287 - DNA, 18 bp, synthetic construct
  misc_feature 1..18: note = Artificial sequence related to HLA knockouts in cell therapy
  source 1..18: mol_type = other DNA
tcgtgcggttcgacagcg

(The sequence listing continues in the following parts.)
